United States Patent Application Publication US 2015/0232836 A1 - sequence listing, part 43

SEQ ID NO: 1706312 - DNA, 15 bp, Homo sapiens
agaagtcagtactcc

SEQ ID NO: 1706313 - DNA, 15 bp, Homo sapiens
gaagtcagtactcct

SEQ ID NO: 1706314 - DNA, 15 bp, Homo sapiens
aagtcagtactcctg

SEQ ID NO: 1706315 - DNA, 15 bp, Homo sapiens
agtcagtactcctgt

SEQ ID NO: 1706316 - DNA, 15 bp, Homo sapiens
gtcagtactcctgtt

SEQ ID NO: 1706317 - DNA, 15 bp, Homo sapiens
tcagtactcctgttg

SEQ ID NO: 1706318 - DNA, 15 bp, Homo sapiens
cagtactcctgttgc

SEQ ID NO: 1706319 - DNA, 15 bp, Homo sapiens
agtactcctgttgcg

SEQ ID NO: 1706320 - DNA, 15 bp, Homo sapiens
gtactcctgttgcgg

SEQ ID NO: 1706321 - DNA, 15 bp, Homo sapiens
tactcctgttgcgga

SEQ ID NO: 1706322 - DNA, 15 bp, Homo sapiens
actcctgttgcggag

SEQ ID NO: 1706323 - DNA, 15 bp, Homo sapiens
ctcctgttgcggaga

SEQ ID NO: 1706324 - DNA, 15 bp, Homo sapiens
tcctgttgcggagaa

SEQ ID NO: 1706325 - DNA, 15 bp, Homo sapiens
cctgttgcggagaaa

SEQ ID NO: 1706326 - DNA, 15 bp, Homo sapiens
ctgttgcggagaaag

SEQ ID NO: 1706327 - DNA, 15 bp, Homo sapiens
tgttgcggagaaagg

SEQ ID NO: 1706328 - DNA, 15 bp, Homo sapiens
gttgcggagaaagga

SEQ ID NO: 1706329 - DNA, 15 bp, Homo sapiens
ttgcggagaaaggag

SEQ ID NO: 1706330 - DNA, 15 bp, Homo sapiens
tgcggagaaaggagt

SEQ ID NO: 1706331 - DNA, 15 bp, Homo sapiens
gcggagaaaggagtc

SEQ ID NO: 1706332 - DNA, 15 bp, Homo sapiens
cggagaaaggagtca

SEQ ID NO: 1706333 - DNA, 15 bp, Homo sapiens
ggagaaaggagtcat

SEQ ID NO: 1706334 - DNA, 15 bp, Homo sapiens
gagaaaggagtcata

SEQ ID NO: 1706335 - DNA, 15 bp, Homo sapiens
agaaaggagtcatac

SEQ ID NO: 1706336 - DNA, 15 bp, Homo sapiens
gaaaggagtcatact

SEQ ID NO: 1706337 - DNA, 15 bp, Homo sapiens
aaaggagtcatactt

SEQ ID NO: 1706338 - DNA, 15 bp, Homo sapiens
aaggagtcatacttg

SEQ ID NO: 1706339 - DNA, 15 bp, Homo sapiens
aggagtcatacttgt

SEQ ID NO: 1706340 - DNA, 15 bp, Homo sapiens
ggagtcatacttgtg

SEQ ID NO: 1706341 - DNA, 15 bp, Homo sapiens
gagtcatacttgtga

SEQ ID NO: 1706342 - DNA, 15 bp, Homo sapiens
agtcatacttgtgaa

SEQ ID NO: 1706343 - DNA, 15 bp, Homo sapiens
gtcatacttgtgaag

SEQ ID NO: 1706344 - DNA, 15 bp, Homo sapiens
tcatacttgtgaaga

SEQ ID NO: 1706345 - DNA, 15 bp, Homo sapiens
catacttgtgaagac

SEQ ID NO: 1706346 - DNA, 15 bp, Homo sapiens
atacttgtgaagact

SEQ ID NO: 1706347 - DNA, 15 bp, Homo sapiens
tacttgtgaagactt

SEQ ID NO: 1706348 - DNA, 15 bp, Homo sapiens
acttgtgaagacttt

SEQ ID NO: 1706349 - DNA, 15 bp, Homo sapiens
cttgtgaagactttt

SEQ ID NO: 1706350 - DNA, 15 bp, Homo sapiens
ttgtgaagactttta

SEQ ID NO: 1706351 - DNA, 15 bp, Homo sapiens
tgtgaagacttttat

SEQ ID NO: 1706352 - DNA, 15 bp, Homo sapiens
gtgaagacttttatg

SEQ ID NO: 1706353 - DNA, 15 bp, Homo sapiens
tgaagacttttatgt

SEQ ID NO: 1706354 - DNA, 15 bp, Homo sapiens
gaagacttttatgtc

SEQ ID NO: 1706355 - DNA, 15 bp, Homo sapiens
aagacttttatgtca

SEQ ID NO: 1706356 - DNA, 15 bp, Homo sapiens
agacttttatgtcac

SEQ ID NO: 1706357 - DNA, 15 bp, Homo sapiens
gacttttatgtcact

SEQ ID NO: 1706358 - DNA, 15 bp, Homo sapiens
acttttatgtcacta

SEQ ID NO: 1706359 - DNA, 15 bp, Homo sapiens
cttttatgtcactac

SEQ ID NO: 1706360 - DNA, 15 bp, Homo sapiens
ttttatgtcactact

SEQ ID NO: 1706361 - DNA, 15 bp, Homo sapiens
tttatgtcactactc

SEQ ID NO: 1706362 - DNA, 15 bp, Homo sapiens
ttatgtcactactct

SEQ ID NO: 1706363 - DNA, 15 bp, Homo sapiens
tatgtcactactcta

SEQ ID NO: 1706364 - DNA, 15 bp, Homo sapiens
atgtcactactctaa

SEQ ID NO: 1706365 - DNA, 15 bp, Homo sapiens
tgtcactactctaaa

SEQ ID NO: 1706366 - DNA, 15 bp, Homo sapiens
gtcactactctaaag

SEQ ID NO: 1706367 - DNA, 15 bp, Homo sapiens
tcactactctaaaga

SEQ ID NO: 1706368 - DNA, 15 bp, Homo sapiens
cactactctaaagat

SEQ ID NO: 1706369 - DNA, 15 bp, Homo sapiens
actactctaaagatt

SEQ ID NO: 1706370 - DNA, 15 bp, Homo sapiens
ctactctaaagattt

SEQ ID NO: 1706371 - DNA, 15 bp, Homo sapiens
tactctaaagatttt

SEQ ID NO: 1706372 - DNA, 15 bp, Homo sapiens
actctaaagattttg

SEQ ID NO: 1706373 - DNA, 15 bp, Homo sapiens
ctctaaagattttgc

SEQ ID NO: 1706374 - DNA, 15 bp, Homo sapiens
tctaaagattttgct

SEQ ID NO: 1706375 - DNA, 15 bp, Homo sapiens
ctaaagattttgctg

SEQ ID NO: 1706376 - DNA, 15 bp, Homo sapiens
taaagattttgctgt

SEQ ID NO: 1706377 - DNA, 15 bp, Homo sapiens
aaagattttgctgtt

SEQ ID NO: 1706378 - DNA, 15 bp, Homo sapiens
aagattttgctgttg

SEQ ID NO: 1706379 - DNA, 15 bp, Homo sapiens
agattttgctgttgc

SEQ ID NO: 1706380 - DNA, 15 bp, Homo sapiens
gattttgctgttgct

SEQ ID NO: 1706381 - DNA, 15 bp, Homo sapiens
attttgctgttgctg

SEQ ID NO: 1706382 - DNA, 15 bp, Homo sapiens
ttttgctgttgctgt

SEQ ID NO: 1706383 - DNA, 15 bp, Homo sapiens
tttgctgttgctgtt

SEQ ID NO: 1706384 - DNA, 15 bp, Homo sapiens
ttgctgttgctgtta

SEQ ID NO: 1706385 - DNA, 15 bp, Homo sapiens
tgctgttgctgttaa

SEQ ID NO: 1706386 - DNA, 15 bp, Homo sapiens
gctgttgctgttaag

SEQ ID NO: 1706387 - DNA, 15 bp, Homo sapiens
ctgttgctgttaagt

SEQ ID NO: 1706388 - DNA, 15 bp, Homo sapiens
tgttgctgttaagtt

SEQ ID NO: 1706389 - DNA, 15 bp, Homo sapiens
gttgctgttaagttt

SEQ ID NO: 1706390 - DNA, 15 bp, Homo sapiens
ttgctgttaagtttg

SEQ ID NO: 1706391 - DNA, 15 bp, Homo sapiens
tgctgttaagtttgg

SEQ ID NO: 1706392 - DNA, 15 bp, Homo sapiens
gctgttaagtttgga

SEQ ID NO: 1706393 - DNA, 15 bp, Homo sapiens
ctgttaagtttggaa

SEQ ID NO: 1706394 - DNA, 15 bp, Homo sapiens
tgttaagtttggaaa

SEQ ID NO: 1706395 - DNA, 15 bp, Homo sapiens
gttaagtttggaaaa

SEQ ID NO: 1706396 - DNA, 15 bp, Homo sapiens
ttaagtttggaaaac

SEQ ID NO: 1706397 - DNA, 15 bp, Homo sapiens
taagtttggaaaaca

SEQ ID NO: 1706398 - DNA, 15 bp, Homo sapiens
aagtttggaaaacag

SEQ ID NO: 1706399 - DNA, 15 bp, Homo sapiens
agtttggaaaacagt

SEQ ID NO: 1706400 - DNA, 15 bp, Homo sapiens
gtttggaaaacagtt

SEQ ID NO: 1706401 - DNA, 15 bp, Homo sapiens
ttggaaaacagtttt

SEQ ID NO: 1706402 - DNA, 15 bp, Homo sapiens
tggaaaacagttttt

SEQ ID NO: 1706403 - DNA, 15 bp, Homo sapiens
ggaaaacagttttta

SEQ ID NO: 1706404 - DNA, 15 bp, Homo sapiens
gaaaacagtttttat

SEQ ID NO: 1706405 - DNA, 15 bp, Homo sapiens
aaaacagtttttatt

SEQ ID NO: 1706406 - DNA, 15 bp, Homo sapiens
aaacagtttttattc

SEQ ID NO: 1706407 - DNA, 15 bp, Homo sapiens
aacagtttttattct

SEQ ID NO: 1706408 - DNA, 15 bp, Homo sapiens
acagtttttattctg

SEQ ID NO: 1706409 - DNA, 15 bp, Homo sapiens
cagtttttattctgt

SEQ ID NO: 1706410 - DNA, 15 bp, Homo sapiens
agtttttattctgtt

SEQ ID NO: 1706411 - DNA, 15 bp, Homo sapiens
gtttttattctgttt

SEQ ID NO: 1706412 - DNA, 15 bp, Homo sapiens
tttttattctgtttt

SEQ ID NO: 1706413 - DNA, 15 bp, Homo sapiens
ttttattctgtttta

SEQ ID NO: 1706414 - DNA, 15 bp, Homo sapiens
tttattctgttttat

SEQ ID NO: 1706415 - DNA, 15 bp, Homo sapiens
ttattctgttttata

SEQ ID NO: 1706416 - DNA, 15 bp, Homo sapiens
tattctgttttataa

SEQ ID NO: 1706417 - DNA, 15 bp, Homo sapiens
attctgttttataaa

SEQ ID NO: 1706418 - DNA, 15 bp, Homo sapiens
ttctgttttataaac

SEQ ID NO: 1706419 - DNA, 15 bp, Homo sapiens
tctgttttataaacc

SEQ ID NO: 1706420 - DNA, 15 bp, Homo sapiens
ctgttttataaacca

SEQ ID NO: 1706421 - DNA, 15 bp, Homo sapiens
tgttttataaaccag

SEQ ID NO: 1706422 - DNA, 15 bp, Homo sapiens
gttttataaaccaga

SEQ ID NO: 1706423 - DNA, 15 bp, Homo sapiens
ttttataaaccagag

SEQ ID NO: 1706424 - DNA, 15 bp, Homo sapiens
tttataaaccagaga

SEQ ID NO: 1706425 - DNA, 15 bp, Homo sapiens
ttataaaccagagag

SEQ ID NO: 1706426 - DNA, 15 bp, Homo sapiens
tataaaccagagaga

SEQ ID NO: 1706427 - DNA, 15 bp, Homo sapiens
ataaaccagagagaa

SEQ ID NO: 1706428 - DNA, 15 bp, Homo sapiens
taaaccagagagaaa

SEQ ID NO: 1706429 - DNA, 15 bp, Homo sapiens
aaaccagagagaaat

SEQ ID NO: 1706430 - DNA, 15 bp, Homo sapiens
aaccagagagaaatg

SEQ ID NO: 1706431 - DNA, 15 bp, Homo sapiens
accagagagaaatga

SEQ ID NO: 1706432 - DNA, 15 bp, Homo sapiens
ccagagagaaatgag

SEQ ID NO: 1706433 - DNA, 15 bp, Homo sapiens
cagagagaaatgagt

SEQ ID NO: 1706434 - DNA, 15 bp, Homo sapiens
agagagaaatgagtt

SEQ ID NO: 1706435 - DNA, 15 bp, Homo sapiens
gagagaaatgagttt

SEQ ID NO: 1706436 - DNA, 15 bp, Homo sapiens
agagaaatgagtttt

SEQ ID NO: 1706437 - DNA, 15 bp, Homo sapiens
gagaaatgagttttg

SEQ ID NO: 1706438 - DNA, 15 bp, Homo sapiens
agaaatgagttttga

SEQ ID NO: 1706439 - DNA, 15 bp, Homo sapiens
gaaatgagttttgac

SEQ ID NO: 1706440 - DNA, 15 bp, Homo sapiens
aaatgagttttgacg

SEQ ID NO: 1706441 - DNA, 15 bp, Homo sapiens
aatgagttttgacgt

SEQ ID NO: 1706442 - DNA, 15 bp, Homo sapiens
atgagttttgacgtc

SEQ ID NO: 1706443 - DNA, 15 bp, Homo sapiens
tgagttttgacgtct

SEQ ID NO: 1706444 - DNA, 15 bp, Homo sapiens
gagttttgacgtctt

SEQ ID NO: 1706445 - DNA, 15 bp, Homo sapiens
agttttgacgtcttt

SEQ ID NO: 1706446 - DNA, 15 bp, Homo sapiens
gttttgacgtctttt

SEQ ID NO: 1706447 - DNA, 15 bp, Homo sapiens
ttttgacgtcttttt

SEQ ID NO: 1706448 - DNA, 15 bp, Homo sapiens
tttgacgtcttttta

SEQ ID NO: 1706449 - DNA, 15 bp, Homo sapiens
ttgacgtctttttac

SEQ ID NO: 1706450 - DNA, 15 bp, Homo sapiens
tgacgtctttttact

SEQ ID NO: 1706451 - DNA, 15 bp, Homo sapiens
gacgtctttttactt

SEQ ID NO: 1706452 - DNA, 15 bp, Homo sapiens
acgtctttttacttg

SEQ ID NO: 1706453 - DNA, 15 bp, Homo sapiens
cgtctttttacttga

SEQ ID NO: 1706454 - DNA, 15 bp, Homo sapiens
gtctttttacttgaa

SEQ ID NO: 1706455 - DNA, 15 bp, Homo sapiens
tctttttacttgaat

SEQ ID NO: 1706456 - DNA, 15 bp, Homo sapiens
ctttttacttgaatt

SEQ ID NO: 1706457 - DNA, 15 bp, Homo sapiens
tttttacttgaattt

SEQ ID NO: 1706458 - DNA, 15 bp, Homo sapiens
ttttacttgaatttc

SEQ ID NO: 1706459 - DNA, 15 bp, Homo sapiens
tttacttgaatttca

SEQ ID NO: 1706460 - DNA, 15 bp, Homo sapiens
ttacttgaatttcaa

SEQ ID NO: 1706461 - DNA, 15 bp, Homo sapiens
tacttgaatttcaac

SEQ ID NO: 1706462 - DNA, 15 bp, Homo sapiens
acttgaatttcaact

SEQ ID NO: 1706463 - DNA, 15 bp, Homo sapiens
cttgaatttcaactt

SEQ ID NO: 1706464 - DNA, 15 bp, Homo sapiens
ttgaatttcaactta

SEQ ID NO: 1706465 - DNA, 15 bp, Homo sapiens
tgaatttcaacttat

SEQ ID NO: 1706466 - DNA, 15 bp, Homo sapiens
gaatttcaacttata

SEQ ID NO: 1706467 - DNA, 15 bp, Homo sapiens
aatttcaacttatat

SEQ ID NO: 1706468 - DNA, 15 bp, Homo sapiens
atttcaacttatatt

SEQ ID NO: 1706469 - DNA, 15 bp, Homo sapiens
tttcaacttatatta

SEQ ID NO: 1706470 - DNA, 15 bp, Homo sapiens
ttcaacttatattat

SEQ ID NO: 1706471 - DNA, 15 bp, Homo sapiens
tcaacttatattata

SEQ ID NO: 1706472 - DNA, 15 bp, Homo sapiens
caacttatattataa

SEQ ID NO: 1706473 - DNA, 15 bp, Homo sapiens
aacttatattataag

SEQ ID NO: 1706474 - DNA, 15 bp, Homo sapiens
acttatattataaga

SEQ ID NO: 1706475 - DNA, 15 bp, Homo sapiens
cttatattataagaa

SEQ ID NO: 1706476 - DNA, 15 bp, Homo sapiens
ttatattataagaac

SEQ ID NO: 1706477 - DNA, 15 bp, Homo sapiens
tatattataagaacg

SEQ ID NO: 1706478 - DNA, 15 bp, Homo sapiens
atattataagaacga

SEQ ID NO: 1706479 - DNA, 15 bp, Homo sapiens
tattataagaacgaa

SEQ ID NO: 1706480 - DNA, 15 bp, Homo sapiens
attataagaacgaaa

SEQ ID NO: 1706481 - DNA, 15 bp, Homo sapiens
ttataagaacgaaag

SEQ ID NO: 1706482 - DNA, 15 bp, Homo sapiens
tataagaacgaaagt

SEQ ID NO: 1706483 - DNA, 15 bp, Homo sapiens
ataagaacgaaagta

SEQ ID NO: 1706484 - DNA, 15 bp, Homo sapiens
taagaacgaaagtaa

SEQ ID NO: 1706485 - DNA, 15 bp, Homo sapiens
aagaacgaaagtaaa

SEQ ID NO: 1706486 - DNA, 15 bp, Homo sapiens
agaacgaaagtaaag

SEQ ID NO: 1706487 - DNA, 15 bp, Homo sapiens
gaacgaaagtaaaga

SEQ ID NO: 1706488 - DNA, 15 bp, Homo sapiens
aacgaaagtaaagat

SEQ ID NO: 1706489 - DNA, 15 bp, Homo sapiens
acgaaagtaaagatg

SEQ ID NO: 1706490 - DNA, 15 bp, Homo sapiens
cgaaagtaaagatgt

SEQ ID NO: 1706491 - DNA, 15 bp, Homo sapiens
gaaagtaaagatgtt

SEQ ID NO: 1706492 - DNA, 15 bp, Homo sapiens
aaagtaaagatgttt

SEQ ID NO: 1706493 - DNA, 15 bp, Homo sapiens
aagtaaagatgtttg

SEQ ID NO: 1706494 - DNA, 15 bp, Homo sapiens
agtaaagatgtttga

SEQ ID NO: 1706495 - DNA, 15 bp, Homo sapiens
gtaaagatgtttgaa

SEQ ID NO: 1706496 - DNA, 15 bp, Homo sapiens
taaagatgtttgaat

SEQ ID NO: 1706497 - DNA, 15 bp, Homo sapiens
aaagatgtttgaata

SEQ ID NO: 1706498 - DNA, 15 bp, Homo sapiens
aagatgtttgaatac

SEQ ID NO: 1706499 - DNA, 15 bp, Homo sapiens
agatgtttgaatact

SEQ ID NO: 1706500 - DNA, 15 bp, Homo sapiens
gatgtttgaatactt

SEQ ID NO: 1706501 - DNA, 15 bp, Homo sapiens
atgtttgaatactta

SEQ ID NO: 1706502 - DNA, 15 bp, Homo sapiens
tgtttgaatacttaa

SEQ ID NO: 1706503 - DNA, 15 bp, Homo sapiens
gtttgaatacttaaa

SEQ ID NO: 1706504 - DNA, 15 bp, Homo sapiens
tttgaatacttaaac

SEQ ID NO: 1706505 - DNA, 15 bp, Homo sapiens
ttgaatacttaaaca

SEQ ID NO: 1706506 - DNA, 15 bp, Homo sapiens
tgaatacttaaacac

SEQ ID NO: 1706507 - DNA, 15 bp, Homo sapiens
gaatacttaaacact

SEQ ID NO: 1706508 - DNA, 15 bp, Homo sapiens
aatacttaaacactg

SEQ ID NO: 1706509 - DNA, 15 bp, Homo sapiens
atacttaaacactgt

SEQ ID NO: 1706510 - DNA, 15 bp, Homo sapiens
tacttaaacactgtc

SEQ ID NO: 1706511 - DNA, 15 bp, Homo sapiens
acttaaacactgtca

SEQ ID NO: 1706512 - DNA, 15 bp, Homo sapiens
cttaaacactgtcac

SEQ ID NO: 1706513 - DNA, 15 bp, Homo sapiens
ttaaacactgtcaca

SEQ ID NO: 1706514 - DNA, 15 bp, Homo sapiens
taaacactgtcacaa

SEQ ID NO: 1706515 - DNA, 15 bp, Homo sapiens
aaacactgtcacaag

SEQ ID NO: 1706516 - DNA, 15 bp, Homo sapiens
aacactgtcacaaga

SEQ ID NO: 1706517 - DNA, 15 bp, Homo sapiens
acactgtcacaagat

SEQ ID NO: 1706518 - DNA, 15 bp, Homo sapiens
cactgtcacaagatg

SEQ ID NO: 1706519 - DNA, 15 bp, Homo sapiens
actgtcacaagatgg

SEQ ID NO: 1706520 - DNA, 15 bp, Homo sapiens
ctgtcacaagatggc

SEQ ID NO: 1706521 - DNA, 15 bp, Homo sapiens
tgtcacaagatggca

SEQ ID NO: 1706522 - DNA, 15 bp, Homo sapiens
gtcacaagatggcaa

SEQ ID NO: 1706523 - DNA, 15 bp, Homo sapiens
tcacaagatggcaaa

SEQ ID NO: 1706524 - DNA, 15 bp, Homo sapiens
cacaagatggcaaaa

SEQ ID NO: 1706525 - DNA, 15 bp, Homo sapiens
acaagatggcaaaat

SEQ ID NO: 1706526 - DNA, 15 bp, Homo sapiens
caagatggcaaaatg

SEQ ID NO: 1706527 - DNA, 15 bp, Homo sapiens
aagatggcaaaatgc

SEQ ID NO: 1706528 - DNA, 15 bp, Homo sapiens
agatggcaaaatgct

SEQ ID NO: 1706529 - DNA, 15 bp, Homo sapiens
gatggcaaaatgctg

SEQ ID NO: 1706530 - DNA, 15 bp, Homo sapiens
atggcaaaatgctga

SEQ ID NO: 1706531 - DNA, 15 bp, Homo sapiens
tggcaaaatgctgaa

SEQ ID NO: 1706532 - DNA, 15 bp, Homo sapiens
ggcaaaatgctgaaa

SEQ ID NO: 1706533 - DNA, 15 bp, Homo sapiens
gcaaaatgctgaaag

SEQ ID NO: 1706534 - DNA, 15 bp, Homo sapiens
caaaatgctgaaagt

SEQ ID NO: 1706535 - DNA, 15 bp, Homo sapiens
aaaatgctgaaagtt

SEQ ID NO: 1706536 - DNA, 15 bp, Homo sapiens
aaatgctgaaagttt

SEQ ID NO: 1706537 - DNA, 15 bp, Homo sapiens
aatgctgaaagtttt

SEQ ID NO: 1706538 - DNA, 15 bp, Homo sapiens
atgctgaaagttttt

SEQ ID NO: 1706539 - DNA, 15 bp, Homo sapiens
tgctgaaagttttta

SEQ ID NO: 1706540 - DNA, 15 bp, Homo sapiens
gctgaaagtttttac

SEQ ID NO: 1706541 - DNA, 15 bp, Homo sapiens
ctgaaagtttttaca

SEQ ID NO: 1706542 - DNA, 15 bp, Homo sapiens
tgaaagtttttacac

SEQ ID NO: 1706543 - DNA, 15 bp, Homo sapiens
gaaagtttttacact

SEQ ID NO: 1706544 - DNA, 15 bp, Homo sapiens
aaagtttttacactg

SEQ ID NO: 1706545 - DNA, 15 bp, Homo sapiens
aagtttttacactgt

SEQ ID NO: 1706546 - DNA, 15 bp, Homo sapiens
agtttttacactgtc

SEQ ID NO: 1706547 - DNA, 15 bp, Homo sapiens
gtttttacactgtcg

SEQ ID NO: 1706548 - DNA, 15 bp, Homo sapiens
tttttacactgtcga

SEQ ID NO: 1706549 - DNA, 15 bp, Homo sapiens
ttttacactgtcgat

SEQ ID NO: 1706550 - DNA, 15 bp, Homo sapiens
tttacactgtcgatg

SEQ ID NO: 1706551 - DNA, 15 bp, Homo sapiens
ttacactgtcgatgt

SEQ ID NO: 1706552 - DNA, 15 bp, Homo sapiens
tacactgtcgatgtt

SEQ ID NO: 1706553 - DNA, 15 bp, Homo sapiens
acactgtcgatgttt

SEQ ID NO: 1706554 - DNA, 15 bp, Homo sapiens
cactgtcgatgtttc

SEQ ID NO: 1706555 - DNA, 15 bp, Homo sapiens
actgtcgatgtttcc

SEQ ID NO: 1706556 - DNA, 15 bp, Homo sapiens
ctgtcgatgtttcca

SEQ ID NO: 1706557 - DNA, 15 bp, Homo sapiens
tgtcgatgtttccaa

SEQ ID NO: 1706558 - DNA, 15 bp, Homo sapiens
gtcgatgtttccaat

SEQ ID NO: 1706559 - DNA, 15 bp, Homo sapiens
tcgatgtttccaatg

SEQ ID NO: 1706560 - DNA, 15 bp, Homo sapiens
cgatgtttccaatgc

SEQ ID NO: 1706561 - DNA, 15 bp, Homo sapiens
gatgtttccaatgca

SEQ ID NO: 1706562 - DNA, 15 bp, Homo sapiens
atgtttccaatgcat

SEQ ID NO: 1706563 - DNA, 15 bp, Homo sapiens
tgtttccaatgcatc

SEQ ID NO: 1706564 - DNA, 15 bp, Homo sapiens
gtttccaatgcatct

SEQ ID NO: 1706565 - DNA, 15 bp, Homo sapiens
tttccaatgcatctt

SEQ ID NO: 1706566 - DNA, 15 bp, Homo sapiens
ttccaatgcatcttc

SEQ ID NO: 1706567 - DNA, 15 bp, Homo sapiens
tccaatgcatcttcc

SEQ ID NO: 1706568 - DNA, 15 bp, Homo sapiens
ccaatgcatcttcca

SEQ ID NO: 1706569 - DNA, 15 bp, Homo sapiens
caatgcatcttccat

SEQ ID NO: 1706570 - DNA, 15 bp, Homo sapiens
aatgcatcttccatg

SEQ ID NO: 1706571 - DNA, 15 bp, Homo sapiens
atgcatcttccatga

SEQ ID NO: 1706572 - DNA, 15 bp, Homo sapiens
tgcatcttccatgat

SEQ ID NO: 1706573 - DNA, 15 bp, Homo sapiens
gcatcttccatgatg

SEQ ID NO: 1706574 - DNA, 15 bp, Homo sapiens
catcttccatgatgc

SEQ ID NO: 1706575 - DNA, 15 bp, Homo sapiens
atcttccatgatgca

SEQ ID NO: 1706576 - DNA, 15 bp, Homo sapiens
tcttccatgatgcat

SEQ ID NO: 1706577 - DNA, 15 bp, Homo sapiens
cttccatgatgcatt

SEQ ID NO: 1706578 - DNA, 15 bp, Homo sapiens
ttccatgatgcatta

SEQ ID NO: 1706579 - DNA, 15 bp, Homo sapiens
tccatgatgcattag

SEQ ID NO: 1706580 - DNA, 15 bp, Homo sapiens
ccatgatgcattaga

SEQ ID NO: 1706581 - DNA, 15 bp, Homo sapiens
catgatgcattagaa

SEQ ID NO: 1706582 - DNA, 15 bp, Homo sapiens
atgatgcattagaag

SEQ ID NO: 1706583 - DNA, 15 bp, Homo sapiens
tgatgcattagaagt

SEQ ID NO: 1706584 - DNA, 15 bp, Homo sapiens
gatgcattagaagta

SEQ ID NO: 1706585 - DNA, 15 bp, Homo sapiens
atgcattagaagtaa

SEQ ID NO: 1706586 - DNA, 15 bp, Homo sapiens
tgcattagaagtaac

SEQ ID NO: 1706587 - DNA, 15 bp, Homo sapiens
gcattagaagtaact

SEQ ID NO: 1706588 - DNA, 15 bp, Homo sapiens
cattagaagtaacta

SEQ ID NO: 1706589 - DNA, 15 bp, Homo sapiens
attagaagtaactaa

SEQ ID NO: 1706590 - DNA, 15 bp, Homo sapiens
ttagaagtaactaat

SEQ ID NO: 1706591 - DNA, 15 bp, Homo sapiens
tagaagtaactaatg

SEQ ID NO: 1706592 - DNA, 15 bp, Homo sapiens
agaagtaactaatgt

SEQ ID NO: 1706593 - DNA, 15 bp, Homo sapiens
gaagtaactaatgtt

SEQ ID NO: 1706594 - DNA, 15 bp, Homo sapiens
aagtaactaatgttt

SEQ ID NO: 1706595 - DNA, 15 bp, Homo sapiens
agtaactaatgtttg

SEQ ID NO: 1706596 - DNA, 15 bp, Homo sapiens
gtaactaatgtttga

SEQ ID NO: 1706597 - DNA, 15 bp, Homo sapiens
taactaatgtttgaa

SEQ ID NO: 1706598 - DNA, 15 bp, Homo sapiens
aactaatgtttgaaa

SEQ ID NO: 1706599 - DNA, 15 bp, Homo sapiens
actaatgtttgaaat

SEQ ID NO: 1706600 - DNA, 15 bp, Homo sapiens
ctaatgtttgaaatt

SEQ ID NO: 1706601 - DNA, 15 bp, Homo sapiens
taatgtttgaaattt

SEQ ID NO: 1706602 - DNA, 15 bp, Homo sapiens
aatgtttgaaatttt

SEQ ID NO: 1706603 - DNA, 15 bp, Homo sapiens
atgtttgaaatttta

SEQ ID NO: 1706604 - DNA, 15 bp, Homo sapiens
tgtttgaaattttaa

SEQ ID NO: 1706605 - DNA, 15 bp, Homo sapiens
gtttgaaattttaaa

SEQ ID NO: 1706606 - DNA, 15 bp, Homo sapiens
tttgaaattttaaag

SEQ ID NO: 1706607 - DNA, 15 bp, Homo sapiens
ttgaaattttaaagt

SEQ ID NO: 1706608 - DNA, 15 bp, Homo sapiens
tgaaattttaaagta

SEQ ID NO: 1706609 - DNA, 15 bp, Homo sapiens
gaaattttaaagtac

SEQ ID NO: 1706610 - DNA, 15 bp, Homo sapiens
aaattttaaagtact

SEQ ID NO: 1706611 - DNA, 15 bp, Homo sapiens
aattttaaagtactt

SEQ ID NO: 1706612 - DNA, 15 bp, Homo sapiens
attttaaagtacttt

SEQ ID NO: 1706613 - DNA, 15 bp, Homo sapiens
ttttaaagtactttt

SEQ ID NO: 1706614 - DNA, 15 bp, Homo sapiens
tttaaagtacttttg

SEQ ID NO: 1706615 - DNA, 15 bp, Homo sapiens
ttaaagtacttttgg

SEQ ID NO: 1706616 - DNA, 15 bp, Homo sapiens
taaagtacttttggt

SEQ ID NO: 1706617 - DNA, 15 bp, Homo sapiens
aaagtacttttggtt

SEQ ID NO: 1706618 - DNA, 15 bp, Homo sapiens
aagtacttttggtta

SEQ ID NO: 1706619 - DNA, 15 bp, Homo sapiens
agtacttttggttat

SEQ ID NO: 1706620 - DNA, 15 bp, Homo sapiens
gtacttttggttatt

SEQ ID NO: 1706621 - DNA, 15 bp, Homo sapiens
tacttttggttattt

SEQ ID NO: 1706622 - DNA, 15 bp, Homo sapiens
acttttggttatttt

SEQ ID NO: 1706623 - DNA, 15 bp, Homo sapiens
cttttggttattttt

SEQ ID NO: 1706624 - DNA, 15 bp, Homo sapiens
ttttggttatttttc

SEQ ID NO: 1706625 - DNA, 15 bp, Homo sapiens
tttggttatttttct

SEQ ID NO: 1706626 - DNA, 15 bp, Homo sapiens
ttggttatttttctg

SEQ ID NO: 1706627 - DNA, 15 bp, Homo sapiens
tggttatttttctgt

SEQ ID NO: 1706628 - DNA, 15 bp, Homo sapiens
ggttatttttctgtc

SEQ ID NO: 1706629 - DNA, 15 bp, Homo sapiens
gttatttttctgtca

SEQ ID NO: 1706630 - DNA, 15 bp, Homo sapiens
ttatttttctgtcat

SEQ ID NO: 1706631 - DNA, 15 bp, Homo sapiens
tatttttctgtcatc

SEQ ID NO: 1706632 - DNA, 15 bp, Homo sapiens
atttttctgtcatca

SEQ ID NO: 1706633 - DNA, 15 bp, Homo sapiens
tttttctgtcatcaa

SEQ ID NO: 1706634 - DNA, 15 bp, Homo sapiens
ttttctgtcatcaaa

SEQ ID NO: 1706635 - DNA, 15 bp, Homo sapiens
tttctgtcatcaaac

SEQ ID NO: 1706636 - DNA, 15 bp, Homo sapiens
ttctgtcatcaaaca

SEQ ID NO: 1706637 - DNA, 15 bp, Homo sapiens
tctgtcatcaaacaa

SEQ ID NO: 1706638 - DNA, 15 bp, Homo sapiens
ctgtcatcaaacaaa

SEQ ID NO: 1706639 - DNA, 15 bp, Homo sapiens
tgtcatcaaacaaaa

SEQ ID NO: 1706640 - DNA, 15 bp, Homo sapiens
gtcatcaaacaaaaa

SEQ ID NO: 1706641 - DNA, 15 bp, Homo sapiens
tcatcaaacaaaaac

SEQ ID NO: 1706642 - DNA, 15 bp, Homo sapiens
catcaaacaaaaaca

SEQ ID NO: 1706643 - DNA, 15 bp, Homo sapiens
atcaaacaaaaacag

SEQ ID NO: 1706644 - DNA, 15 bp, Homo sapiens
ttttcagatggtagt

SEQ ID NO: 1706645 - DNA, 15 bp, Homo sapiens
tttcagatggtagtt

SEQ ID NO: 1706646 - DNA, 15 bp, Homo sapiens
ttcagatggtagttc

SEQ ID NO: 1706647 - DNA, 15 bp, Homo sapiens
tcagatggtagttca

SEQ ID NO: 1706648 - DNA, 15 bp, Homo sapiens
cagatggtagttcaa

SEQ ID NO: 1706649 - DNA, 15 bp, Homo sapiens
agatggtagttcaac

SEQ ID NO: 1706650 - DNA, 15 bp, Homo sapiens
gatggtagttcaact

SEQ ID NO: 1706651 - DNA, 15 bp, Homo sapiens
atggtagttcaactg

SEQ ID NO: 1706652 - DNA, 15 bp, Homo sapiens
tggtagttcaactgg

SEQ ID NO: 1706653 - DNA, 15 bp, Homo sapiens
ggtagttcaactggg

SEQ ID NO: 1706654 - DNA, 15 bp, Homo sapiens
gtagttcaactgggg

SEQ ID NO: 1706655 - DNA, 15 bp, Homo sapiens
tagttcaactgggga

SEQ ID NO: 1706656 - DNA, 15 bp, Homo sapiens
agttcaactggggaa

SEQ ID NO: 1706657 - DNA, 15 bp, Homo sapiens
gttcaactggggaag

SEQ ID NO: 1706658 - DNA, 15 bp, Homo sapiens
ttcaactggggaaga

SEQ ID NO: 1706659 - DNA, 15 bp, Homo sapiens
tcaactggggaagaa

SEQ ID NO: 1706660 - DNA, 15 bp, Homo sapiens
caactggggaagaat

SEQ ID NO: 1706661 - DNA, 15 bp, Homo sapiens
aactggggaagaatc

SEQ ID NO: 1706662 - DNA, 15 bp, Homo sapiens
actggggaagaatct

SEQ ID NO: 1706663 - DNA, 15 bp, Homo sapiens
ctggggaagaatctg

SEQ ID NO: 1706664 - DNA, 15 bp, Homo sapiens
tggggaagaatctgc

SEQ ID NO: 1706665 - DNA, 15 bp, Homo sapiens
ggggaagaatctgct

SEQ ID NO: 1706666 - DNA, 15 bp, Homo sapiens
gggaagaatctgctt

SEQ ID NO: 1706667 - DNA, 15 bp, Homo sapiens
ggaagaatctgcttt

SEQ ID NO: 1706668 - DNA, 15 bp, Homo sapiens
gaagaatctgctttc

SEQ ID NO: 1706669 - DNA, 15 bp, Homo sapiens
aatctgctttcaaac

SEQ ID NO: 1706670 - DNA, 15 bp, Homo sapiens
atctgctttcaaact

SEQ ID NO: 1706671 - DNA, 15 bp, Homo sapiens
tctgctttcaaactc

SEQ ID NO: 1706672 - DNA, 15 bp, Homo sapiens
ctgctttcaaactca

SEQ ID NO: 1706673 - DNA, 15 bp, Homo sapiens
tgctttcaaactcac

SEQ ID NO: 1706674 - DNA, 15 bp, Homo sapiens
gctttcaaactcaca

SEQ ID NO: 1706675 - DNA, 15 bp, Homo sapiens
ctttcaaactcacat

SEQ ID NO: 1706676 - DNA, 15 bp, Homo sapiens
tttcaaactcacatt

SEQ ID NO: 1706677 - DNA, 15 bp, Homo sapiens
ttcaaactcacatta

SEQ ID NO: 1706678 - DNA, 15 bp, Homo sapiens
tcaaactcacattat

SEQ ID NO: 1706679 - DNA, 15 bp, Homo sapiens
caaactcacattatg

SEQ ID NO: 1706680 - DNA, 15 bp, Homo sapiens
aaactcacattatgt

SEQ ID NO: 1706681 - DNA, 15 bp, Homo sapiens
aactcacattatgtg

SEQ ID NO: 1706682 - DNA, 15 bp, Homo sapiens
actcacattatgtgt

SEQ ID NO: 1706683 - DNA, 15 bp, Homo sapiens
ctcacattatgtgtt

SEQ ID NO: 1706684 - DNA, 15 bp, Homo sapiens
tcacattatgtgttg

SEQ ID NO: 1706685 - DNA, 15 bp, Homo sapiens
cacattatgtgttgg

SEQ ID NO: 1706686 - DNA, 15 bp, Homo sapiens
acattatgtgttggc

SEQ ID NO: 1706687 - DNA, 15 bp, Homo sapiens
cattatgtgttggca

SEQ ID NO: 1706688 - DNA, 15 bp, Homo sapiens
attatgtgttggcag

SEQ ID NO: 1706689 - DNA, 15 bp, Homo sapiens
ttatgtgttggcaga

SEQ ID NO: 1706690 - DNA, 15 bp, Homo sapiens
tatgtgttggcagaa

SEQ ID NO: 1706691 - DNA, 15 bp, Homo sapiens
atgtgttggcagaat

SEQ ID NO: 1706692 - DNA, 15 bp, Homo sapiens
tgtgttggcagaatt

SEQ ID NO: 1706693 - DNA, 15 bp, Homo sapiens
gtgttggcagaattc

SEQ ID NO: 1706694 - DNA, 15 bp, Homo sapiens
tgttggcagaattca

SEQ ID NO: 1706695 - DNA, 15 bp, Homo sapiens
gttggcagaattcac

SEQ ID NO: 1706696 - DNA, 15 bp, Homo sapiens
ttggcagaattcacg

SEQ ID NO: 1706697 - DNA, 15 bp, Homo sapiens
tggcagaattcacgt

SEQ ID NO: 1706698 - DNA, 15 bp, Homo sapiens
ggcagaattcacgtc

SEQ ID NO: 1706699 - DNA, 15 bp, Homo sapiens
gcagaattcacgtcc

SEQ ID NO: 1706700 - DNA, 15 bp, Homo sapiens
cagaattcacgtcct

SEQ ID NO: 1706701 - DNA, 15 bp, Homo sapiens
agaattcacgtcctt

SEQ ID NO: 1706702 - DNA, 15 bp, Homo sapiens
gaattcacgtccttg

SEQ ID NO: 1706703 - DNA, 15 bp, Homo sapiens
aattcacgtccttgt

SEQ ID NO: 1706704 - DNA, 15 bp, Homo sapiens
attcacgtccttgtg

SEQ ID NO: 1706705 - DNA, 15 bp, Homo sapiens
ttcacgtccttgtgg

SEQ ID NO: 1706706 - DNA, 15 bp, Homo sapiens
tcacgtccttgtggt

SEQ ID NO: 1706707 - DNA, 15 bp, Homo sapiens
cacgtccttgtggtt

SEQ ID NO: 1706708 - DNA, 15 bp, Homo sapiens
acgtccttgtggttt

SEQ ID NO: 1706709 - DNA, 15 bp, Homo sapiens
cgtccttgtggtttc

SEQ ID NO: 1706710 - DNA, 15 bp, Homo sapiens
gtccttgtggtttca

SEQ ID NO: 1706711 - DNA, 15 bp, Homo sapiens
tccttgtggtttcac

SEQ ID NO: 1706712 - DNA, 15 bp, Homo sapiens
ccttgtggtttcaca

SEQ ID NO: 1706713 - DNA, 15 bp, Homo sapiens
cttgtggtttcacaa

SEQ ID NO: 1706714 - DNA, 15 bp, Homo sapiens
ttgtggtttcacaac

SEQ ID NO: 1706715 - DNA, 15 bp, Homo sapiens
tgtggtttcacaacc

SEQ ID NO: 1706716 - DNA, 15 bp, Homo sapiens
gtggtttcacaacct

SEQ ID NO: 1706717 - DNA, 15 bp, Homo sapiens
tggtttcacaaccta

SEQ ID NO: 1706718 - DNA, 15 bp, Homo sapiens
ggtttcacaacctag

SEQ ID NO: 1706719 - DNA, 15 bp, Homo sapiens
gtttcacaacctagg

SEQ ID NO: 1706720 - DNA, 15 bp, Homo sapiens
tttcacaacctaggg

SEQ ID NO: 1706721 - DNA, 15 bp, Homo sapiens
ttcacaacctagggc

SEQ ID NO: 1706722 - DNA, 15 bp, Homo sapiens
tcacaacctagggct

SEQ ID NO: 1706723 - DNA, 15 bp, Homo sapiens
cacaacctagggctt

SEQ ID NO: 1706724 - DNA, 15 bp, Homo sapiens
acaacctagggcttc

SEQ ID NO: 1706725 - DNA, 15 bp, Homo sapiens
caacctagggcttca

SEQ ID NO: 1706726 - DNA, 15 bp, Homo sapiens
aacctagggcttcaa

SEQ ID NO: 1706727 - DNA, 15 bp, Homo sapiens
acctagggcttcaat

SEQ ID NO: 1706728 - DNA, 15 bp, Homo sapiens
cctagggcttcaatt

SEQ ID NO: 1706729 - DNA, 15 bp, Homo sapiens
ctagggcttcaattt

SEQ ID NO: 1706730 - DNA, 15 bp, Homo sapiens
tagggcttcaatttc

SEQ ID NO: 1706731 - DNA, 15 bp, Homo sapiens
agggcttcaatttct

SEQ ID NO: 1706732 - DNA, 15 bp, Homo sapiens
gggcttcaatttctt

SEQ ID NO: 1706733 - DNA, 15 bp, Homo sapiens
ggcttcaatttcttt

SEQ ID NO: 1706734 - DNA, 15 bp, Homo sapiens
gcttcaatttctttc

SEQ ID NO: 1706735 - DNA, 15 bp, Homo sapiens
cttcaatttctttct

SEQ ID NO: 1706736 - DNA, 15 bp, Homo sapiens
ttcaatttctttctg

SEQ ID NO: 1706737 - DNA, 15 bp, Homo sapiens
tcaatttctttctgg

SEQ ID NO: 1706738 - DNA, 15 bp, Homo sapiens
caatttctttctgga

SEQ ID NO: 1706739 - DNA, 15 bp, Homo sapiens
aatttctttctggat

SEQ ID NO: 1706740 - DNA, 15 bp, Homo sapiens
atttctttctggatg

SEQ ID NO: 1706741 - DNA, 15 bp, Homo sapiens
tttctttctggatgt

SEQ ID NO: 1706742 - DNA, 15 bp, Homo sapiens
ttctttctggatgtc

SEQ ID NO: 1706743 - DNA, 15 bp, Homo sapiens
tctttctggatgtca

SEQ ID NO: 1706744 - DNA, 15 bp, Homo sapiens
ctttctggatgtcag

SEQ ID NO: 1706745 - DNA, 15 bp, Homo sapiens
tttctggatgtcagc

SEQ ID NO: 1706746 - DNA, 15 bp, Homo sapiens
ttctggatgtcagct

SEQ ID NO: 1706747 - DNA, 15 bp, Homo sapiens
tctggatgtcagctg

SEQ ID NO: 1706748 - DNA, 15 bp, Homo sapiens
ctggatgtcagctgg

SEQ ID NO: 1706749 - DNA, 15 bp, Homo sapiens
tggatgtcagctgga

SEQ ID NO: 1706750 - DNA, 15 bp, Homo sapiens
ggatgtcagctggag

SEQ ID NO: 1706751 - DNA, 15 bp, Homo sapiens
gatgtcagctggagg

SEQ ID NO: 1706752 - DNA, 15 bp, Homo sapiens
atgtcagctggaggg

SEQ ID NO: 1706753 - DNA, 15 bp, Homo sapiens
tgtcagctggagggc

SEQ ID NO: 1706754 - DNA, 15 bp, Homo sapiens
gtcagctggagggca

SEQ ID NO: 1706755 - DNA, 15 bp, Homo sapiens
tcagctggagggcac

SEQ ID NO: 1706756 - DNA, 15 bp, Homo sapiens
cagctggagggcacc

SEQ ID NO: 1706757 - DNA, 15 bp, Homo sapiens
agctggagggcaccc

SEQ ID NO: 1706758 - DNA, 15 bp, Homo sapiens
gctggagggcaccct

SEQ ID NO: 1706759 - DNA, 15 bp, Homo sapiens
ctggagggcaccctc

SEQ ID NO: 1706760 - DNA, 15 bp, Homo sapiens
tggagggcaccctca

SEQ ID NO: 1706761 - DNA, 15 bp, Homo sapiens
ggagggcaccctcag

SEQ ID NO: 1706762 - DNA, 15 bp, Homo sapiens
gagggcaccctcagc

SEQ ID NO: 1706763 - DNA, 15 bp, Homo sapiens
agggcaccctcagct

SEQ ID NO: 1706764 - DNA, 15 bp, Homo sapiens
gggcaccctcagctc

SEQ ID NO: 1706765 - DNA, 15 bp, Homo sapiens
ggcaccctcagctcc

SEQ ID NO: 1706766 - DNA, 15 bp, Homo sapiens
gcaccctcagctcct

SEQ ID NO: 1706767 - DNA, 15 bp, Homo sapiens
caccctcagctccta

SEQ ID NO: 1706768 - DNA, 15 bp, Homo sapiens
accctcagctcctag

SEQ ID NO: 1706769 - DNA, 15 bp, Homo sapiens
ccctcagctcctaga

SEQ ID NO: 1706770 - DNA, 15 bp, Homo sapiens
cctcagctcctagag

SEQ ID NO: 1706771 - DNA, 15 bp, Homo sapiens
ctcagctcctagagg

SEQ ID NO: 1706772 - DNA, 15 bp, Homo sapiens
tcagctcctagaggc

SEQ ID NO: 1706773 - DNA, 15 bp, Homo sapiens
cagctcctagaggct

SEQ ID NO: 1706774 - DNA, 15 bp, Homo sapiens
agctcctagaggctg

SEQ ID NO: 1706775 - DNA, 15 bp, Homo sapiens
gctcctagaggctgc

SEQ ID NO: 1706776 - DNA, 15 bp, Homo sapiens
ctcctagaggctgcc

SEQ ID NO: 1706777 - DNA, 15 bp, Homo sapiens
tcctagaggctgcct

SEQ ID NO: 1706778 - DNA, 15 bp, Homo sapiens
cctagaggctgcctg

SEQ ID NO: 1706779 - DNA, 15 bp, Homo sapiens
ctagaggctgcctgc

SEQ ID NO: 1706780 - DNA, 15 bp, Homo sapiens
tagaggctgcctgca

SEQ ID NO: 1706781 - DNA, 15 bp, Homo sapiens
agaggctgcctgcag

SEQ ID NO: 1706782 - DNA, 15 bp, Homo sapiens
gaggctgcctgcagt

SEQ ID NO: 1706783 - DNA, 15 bp, Homo sapiens
aggctgcctgcagtt

SEQ ID NO: 1706784 - DNA, 15 bp, Homo sapiens
ggctgcctgcagttc

SEQ ID NO: 1706785 - DNA, 15 bp, Homo sapiens
gctgcctgcagttca

SEQ ID NO: 1706786 - DNA, 15 bp, Homo sapiens
ctgcctgcagttcaa

SEQ ID NO: 1706787 - DNA, 15 bp, Homo sapiens
tgcctgcagttcaaa

SEQ ID NO: 1706788 - DNA, 15 bp, Homo sapiens
gcctgcagttcaaat

SEQ ID NO: 1706789 - DNA, 15 bp, Homo sapiens
cctgcagttcaaata

SEQ ID NO: 1706790 - DNA, 15 bp, Homo sapiens
ctgcagttcaaatag

SEQ ID NO: 1706791 - DNA, 15 bp, Homo sapiens
tgcagttcaaataga

SEQ ID NO: 1706792 - DNA, 15 bp, Homo sapiens
gcagttcaaatagaa

SEQ ID NO: 1706793 - DNA, 15 bp, Homo sapiens
cagttcaaatagaaa

SEQ ID NO: 1706794 - DNA, 15 bp, Homo sapiens
agttcaaatagaaaa

SEQ ID NO: 1706795 - DNA, 15 bp, Homo sapiens
gttcaaatagaaaat

SEQ ID NO: 1706796 - DNA, 15 bp, Homo sapiens
ttcaaatagaaaata

SEQ ID NO: 1706797 - DNA, 15 bp, Homo sapiens
tcaaatagaaaataa

SEQ ID NO: 1706798 - DNA, 15 bp, Homo sapiens
caaatagaaaataat

SEQ ID NO: 1706799 - DNA, 15 bp, Homo sapiens
aaatagaaaataatt

SEQ ID NO: 1706800 - DNA, 15 bp, Homo sapiens
aatagaaaataattc

SEQ ID NO: 1706801 - DNA, 15 bp, Homo sapiens
atagaaaataattct

SEQ ID NO: 1706802 - DNA, 15 bp, Homo sapiens
tagaaaataattctc

SEQ ID NO: 1706803 - DNA, 15 bp, Homo sapiens
agaaaataattctct

SEQ ID NO: 1706804 - DNA, 15 bp, Homo sapiens
gaaaataattctctg

SEQ ID NO: 1706805 - DNA, 15 bp, Homo sapiens
aaaataattctctgt

SEQ ID NO: 1706806 - DNA, 15 bp, Homo sapiens
aaataattctctgtt

SEQ ID NO: 1706807 - DNA, 15 bp, Homo sapiens
aataattctctgttg

SEQ ID NO: 1706808 - DNA, 15 bp, Homo sapiens
ataattctctgttgc

SEQ ID NO: 1706809 - DNA, 15 bp, Homo sapiens
taattctctgttgca

SEQ ID NO: 1706810 - DNA, 15 bp, Homo sapiens
aattctctgttgcag

SEQ ID NO: 1706811 - DNA, 15 bp, Homo sapiens
attctctgttgcaga

SEQ ID NO: 1706812 - DNA, 15 bp, Homo sapiens
ttctctgttgcagaa

SEQ ID NO: 1706813 - DNA, 15 bp, Homo sapiens
tctctgttgcagaag

SEQ ID NO: 1706814 - DNA, 15 bp, Homo sapiens
ctctgttgcagaagt

SEQ ID NO: 1706815 - DNA, 15 bp, Homo sapiens
tctgttgcagaagtt

SEQ ID NO: 1706816 - DNA, 15 bp, Homo sapiens
ctgttgcagaagtta

SEQ ID NO: 1706817 - DNA, 15 bp, Homo sapiens
tgttgcagaagttat

SEQ ID NO: 1706818 - DNA, 15 bp, Homo sapiens
gttgcagaagttatg

SEQ ID NO: 1706819 - DNA, 15 bp, Homo sapiens
ttgcagaagttatgg

SEQ ID NO: 1706820 - DNA, 15 bp, Homo sapiens
tgcagaagttatggc

SEQ ID NO: 1706821 - DNA, 15 bp, Homo sapiens
gcagaagttatggcc

SEQ ID NO: 1706822 - DNA, 15 bp, Homo sapiens
cagaagttatggcct

SEQ ID NO: 1706823 - DNA, 15 bp, Homo sapiens
agaagttatggcctt

SEQ ID NO: 1706824 - DNA, 15 bp, Homo sapiens
gaagttatggccttg

SEQ ID NO: 1706825 - DNA, 15 bp, Homo sapiens
aagttatggccttgc

SEQ ID NO: 1706826 - DNA, 15 bp, Homo sapiens
agttatggccttgct

SEQ ID NO: 1706827 - DNA, 15 bp, Homo sapiens
gttatggccttgctc

SEQ ID NO: 1706828 - DNA, 15 bp, Homo sapiens
ttatggccttgctcc

SEQ ID NO: 1706829 - DNA, 15 bp, Homo sapiens
tatggccttgctcca

SEQ ID NO: 1706830 - DNA, 15 bp, Homo sapiens
atggccttgctccag

SEQ ID NO: 1706831 - DNA, 15 bp, Homo sapiens
tggccttgctccaga

SEQ ID NO: 1706832 - DNA, 15 bp, Homo sapiens
ggccttgctccagaa

SEQ ID NO: 1706833 - DNA, 15 bp, Homo sapiens
gccttgctccagaac

SEQ ID NO: 1706834 - DNA, 15 bp, Homo sapiens
ccttgctccagaacc

SEQ ID NO: 1706835 - DNA, 15 bp, Homo sapiens
cttgctccagaacct

SEQ ID NO: 1706836 - DNA, 15 bp, Homo sapiens
ttgctccagaacctc

SEQ ID NO: 1706837 - DNA, 15 bp, Homo sapiens
tgctccagaacctca

SEQ ID NO: 1706838 - DNA, 15 bp, Homo sapiens
gctccagaacctcag

SEQ ID NO: 1706839 - DNA, 15 bp, Homo sapiens
ctccagaacctcagg

SEQ ID NO: 1706840 - DNA, 15 bp, Homo sapiens
tccagaacctcaggg

SEQ ID NO: 1706841 - DNA, 15 bp, Homo sapiens
ccagaacctcagggg

SEQ ID NO: 1706842 - DNA, 15 bp, Homo sapiens
cagaacctcaggggt

SEQ ID NO: 1706843 - DNA, 15 bp, Homo sapiens
agaacctcaggggtg

SEQ ID NO: 1706844 - DNA, 15 bp, Homo sapiens
gaacctcaggggtgt

SEQ ID NO: 1706845 - DNA, 15 bp, Homo sapiens
aacctcaggggtgtg

SEQ ID NO: 1706846 - DNA, 15 bp, Homo sapiens
acctcaggggtgtgc

SEQ ID NO: 1706847 - DNA, 15 bp, Homo sapiens
cctcaggggtgtgcc

SEQ ID NO: 1706848 - DNA, 15 bp, Homo sapiens
ctcaggggtgtgcct

SEQ ID NO: 1706849 - DNA, 15 bp, Homo sapiens
tcaggggtgtgcctc

SEQ ID NO: 1706850 - DNA, 15 bp, Homo sapiens
caggggtgtgcctcc

SEQ ID NO: 1706851 - DNA, 15 bp, Homo sapiens
aggggtgtgcctcct

SEQ ID NO: 1706852 - DNA, 15 bp, Homo sapiens
ggggtgtgcctccta

SEQ ID NO: 1706853 - DNA, 15 bp, Homo sapiens
gggtgtgcctcctat

SEQ ID NO: 1706854 - DNA, 15 bp, Homo sapiens
ggtgtgcctcctatt

SEQ ID NO: 1706855 - DNA, 15 bp, Homo sapiens
gtgtgcctcctattg

SEQ ID NO: 1706856 - DNA, 15 bp, Homo sapiens
tgtgcctcctattgg

SEQ ID NO: 1706857 - DNA, 15 bp, Homo sapiens
gtgcctcctattggg

SEQ ID NO: 1706858 - DNA, 15 bp, Homo sapiens
tgcctcctattggga

SEQ ID NO: 1706859 - DNA, 15 bp, Homo sapiens
gcctcctattgggac

SEQ ID NO: 1706860 - DNA, 15 bp, Homo sapiens
cctcctattgggact

SEQ ID NO: 1706861 - DNA, 15 bp, Homo sapiens
ctcctattgggactt

SEQ ID NO: 1706862 - DNA, 15 bp, Homo sapiens
tcctattgggacttt

SEQ ID NO: 1706863 - DNA, 15 bp, Homo sapiens
cctattgggactttc

SEQ ID NO: 1706864 - DNA, 15 bp, Homo sapiens
ctattgggactttcc

SEQ ID NO: 1706865 - DNA, 15 bp, Homo sapiens
tattgggactttcca

SEQ ID NO: 1706866 - DNA, 15 bp, Homo sapiens
attgggactttccag

SEQ ID NO: 1706867 - DNA, 15 bp, Homo sapiens
ttgggactttccagg

SEQ ID NO: 1706868 - DNA, 15 bp, Homo sapiens
tgggactttccaggg

SEQ ID NO: 1706869 - DNA, 15 bp, Homo sapiens
gggactttccaggga

SEQ ID NO: 1706870 - DNA, 15 bp, Homo sapiens
ggactttccagggac

SEQ ID NO: 1706871 - DNA, 15 bp, Homo sapiens
gactttccagggaca

SEQ ID NO: 1706872 - DNA, 15 bp, Homo sapiens
actttccagggacac

SEQ ID NO: 1706873 - DNA, 15 bp, Homo sapiens
ctttccagggacacc

SEQ ID NO: 1706874 - DNA, 15 bp, Homo sapiens
tttccagggacacca

SEQ ID NO: 1706875 - DNA, 15 bp, Homo sapiens
ttccagggacaccag

SEQ ID NO: 1706876 - DNA, 15 bp, Homo sapiens
tccagggacaccaga

SEQ ID NO: 1706877 - DNA, 15 bp, Homo sapiens
ccagggacaccagat

SEQ ID NO: 1706878 - DNA, 15 bp, Homo sapiens
cagggacaccagata

SEQ ID NO: 1706879 - DNA, 15 bp, Homo sapiens
agggacaccagatag

SEQ ID NO: 1706880 - DNA, 15 bp, Homo sapiens
gggacaccagatagc

SEQ ID NO: 1706881 - DNA, 15 bp, Homo sapiens
ggacaccagatagca

SEQ ID NO: 1706882 - DNA, 15 bp, Homo sapiens
gacaccagatagcat

SEQ ID NO: 1706883 - DNA, 15 bp, Homo sapiens
acaccagatagcatt

SEQ ID NO: 1706884 - DNA, 15 bp, Homo sapiens
caccagatagcattt

SEQ ID NO: 1706885 - DNA, 15 bp, Homo sapiens
accagatagcattta

SEQ ID NO: 1706886 - DNA, 15 bp, Homo sapiens
ccagatagcatttat

SEQ ID NO: 1706887 - DNA, 15 bp, Homo sapiens
cagatagcatttatc

SEQ ID NO: 1706888 - DNA, 15 bp, Homo sapiens
agatagcatttatct

SEQ ID NO: 1706889 - DNA, 15 bp, Homo sapiens
gatagcatttatcta

SEQ ID NO: 1706890 - DNA, 15 bp, Homo sapiens
atagcatttatctac

SEQ ID NO: 1706891 - DNA, 15 bp, Homo sapiens
tagcatttatctaca

SEQ ID NO: 1706892 - DNA, 15 bp, Homo sapiens
agcatttatctacag

SEQ ID NO: 1706893 - DNA, 15 bp, Homo sapiens
gcatttatctacagc

SEQ ID NO: 1706894 - DNA, 15 bp, Homo sapiens
catttatctacagca

SEQ ID NO: 1706895 - DNA, 15 bp, Homo sapiens
atttatctacagcaa

SEQ ID NO: 1706896 - DNA, 15 bp, Homo sapiens
tttatctacagcaaa

SEQ ID NO: 1706897 - DNA, 15 bp, Homo sapiens
ttatctacagcaaat

SEQ ID NO: 1706898 - DNA, 15 bp, Homo sapiens
tatctacagcaaata

SEQ ID NO: 1706899 - DNA, 15 bp, Homo sapiens
atctacagcaaatac

SEQ ID NO: 1706900 - DNA, 15 bp, Homo sapiens
tctacagcaaatacc

SEQ ID NO: 1706901 - DNA, 15 bp, Homo sapiens
ctacagcaaatacct

SEQ ID NO: 1706902 - DNA, 15 bp, Homo sapiens
tacagcaaatacctc

SEQ ID NO: 1706903 - DNA, 15 bp, Homo sapiens
acagcaaatacctct

SEQ ID NO: 1706904 - DNA, 15 bp, Homo sapiens
cagcaaatacctctg

SEQ ID NO: 1706905 - DNA, 15 bp, Homo sapiens
agcaaatacctctga

SEQ ID NO: 1706906 - DNA, 15 bp, Homo sapiens
gcaaatacctctgac

SEQ ID NO: 1706907 - DNA, 15 bp, Homo sapiens
aaatacctctgacac

SEQ ID NO: 1706908 - DNA, 15 bp, Homo sapiens
aatacctctgacacc

SEQ ID NO: 1706909 - DNA, 15 bp, Homo sapiens
atacctctgacacca

SEQ ID NO: 1706910 - DNA, 15 bp, Homo sapiens
tacctctgacaccac

SEQ ID NO: 1706911 - DNA, 15 bp, Homo sapiens
acctctgacaccact

SEQ ID NO: 1706912 - DNA, 15 bp, Homo sapiens
cctctgacaccactg

SEQ ID NO: 1706913 - DNA, 15 bp, Homo sapiens
ctctgacaccactgg

SEQ ID NO: 1706914 - DNA, 15 bp, Homo sapiens
tctgacaccactgga

SEQ ID NO: 1706915 - DNA, 15 bp, Homo sapiens
ctgacaccactggat

SEQ ID NO: 1706916 - DNA, 15 bp, Homo sapiens
tgacaccactggatc

SEQ ID NO: 1706917 - DNA, 15 bp, Homo sapiens
gacaccactggatct

SEQ ID NO: 1706918 - DNA, 15 bp, Homo sapiens
acaccactggatctg

SEQ ID NO: 1706919 - DNA, 15 bp, Homo sapiens
caccactggatctgc

SEQ ID NO: 1706920 - DNA, 15 bp, Homo sapiens
accactggatctgct

SEQ ID NO: 1706921 - DNA, 15 bp, Homo sapiens
ccactggatctgctg

SEQ ID NO: 1706922 - DNA, 15 bp, Homo sapiens
cactggatctgctgg

SEQ ID NO: 1706923 - DNA, 15 bp, Homo sapiens
actggatctgctgga

SEQ ID NO: 1706924 - DNA, 15 bp, Homo sapiens
ctggatctgctggat

SEQ ID NO: 1706925 - DNA, 15 bp, Homo sapiens
tggatctgctggatt

SEQ ID NO: 1706926 - DNA, 15 bp, Homo sapiens
ggatctgctggatta

SEQ ID NO: 1706927 - DNA, 15 bp, Homo sapiens
gatctgctggattat

SEQ ID NO: 1706928 - DNA, 15 bp, Homo sapiens
atctgctggattata

SEQ ID NO: 1706929 - DNA, 15 bp, Homo sapiens
tctgctggattatat

SEQ ID NO: 1706930 - DNA, 15 bp, Homo sapiens
ctgctggattatata

SEQ ID NO: 1706931 - DNA, 15 bp, Homo sapiens
tgctggattatatag

SEQ ID NO: 1706932 - DNA, 15 bp, Homo sapiens
gctggattatatagt

SEQ ID NO: 1706933 - DNA, 15 bp, Homo sapiens
ctggattatatagtt

SEQ ID NO: 1706934 - DNA, 15 bp, Homo sapiens
tggattatatagttc

SEQ ID NO: 1706935 - DNA, 15 bp, Homo sapiens
ggattatatagttca

SEQ ID NO: 1706936 - DNA, 15 bp, Homo sapiens
gattatatagttcaa

SEQ ID NO: 1706937 - DNA, 15 bp, Homo sapiens
attatatagttcaag

SEQ ID NO: 1706938 - DNA, 15 bp, Homo sapiens
ttatatagttcaagt

SEQ ID NO: 1706939 - DNA, 15 bp, Homo sapiens
tatatagttcaagta

SEQ ID NO: 1706940 - DNA, 15 bp, Homo sapiens
atatagttcaagtag

SEQ ID NO: 1706941 - DNA, 15 bp, Homo sapiens
tatagttcaagtagc

SEQ ID NO: 1706942 - DNA, 15 bp, Homo sapiens
atagttcaagtagca

SEQ ID NO: 1706943 - DNA, 15 bp, Homo sapiens
tagttcaagtagcag

SEQ ID NO: 1706944 - DNA, 15 bp, Homo sapiens
agttcaagtagcagc

SEQ ID NO: 1706945 - DNA, 15 bp, Homo sapiens
gttcaagtagcagct

SEQ ID NO: 1706946 - DNA, 15 bp, Homo sapiens
ttcaagtagcagctt

SEQ ID NO: 1706947 - DNA, 15 bp, Homo sapiens
tcaagtagcagcttt

SEQ ID NO: 1706948 - DNA, 15 bp, Homo sapiens
caagtagcagctttc

SEQ ID NO: 1706949 - DNA, 15 bp, Homo sapiens
aagtagcagctttca

SEQ ID NO: 1706950 - DNA, 15 bp, Homo sapiens
agtagcagctttcac

SEQ ID NO: 1706951 - DNA, 15 bp, Homo sapiens
gtagcagctttcacc

SEQ ID NO: 1706952 - DNA, 15 bp, Homo sapiens
tagcagctttcacca

SEQ ID NO: 1706953 - DNA, 15 bp, Homo sapiens
agcagctttcaccac

SEQ ID NO: 1706954 - DNA, 15 bp, Homo sapiens
gcagctttcaccaca

SEQ ID NO: 1706955 - DNA, 15 bp, Homo sapiens
cagctttcaccacag

SEQ ID NO: 1706956 - DNA, 15 bp, Homo sapiens
agctttcaccacagc

SEQ ID NO: 1706957 - DNA, 15 bp, Homo sapiens
gctttcaccacagcc

SEQ ID NO: 1706958 - DNA, 15 bp, Homo sapiens
ctttcaccacagcct

SEQ ID NO: 1706959 - DNA, 15 bp, Homo sapiens
tttcaccacagcctg

SEQ ID NO: 1706960 - DNA, 15 bp, Homo sapiens
ttcaccacagcctgg

SEQ ID NO: 1706961 - DNA, 15 bp, Homo sapiens
tcaccacagcctgga

SEQ ID NO: 1706962 - DNA, 15 bp, Homo sapiens
caccacagcctggag

SEQ ID NO: 1706963 - DNA, 15 bp, Homo sapiens
accacagcctggagc

SEQ ID NO: 1706964 - DNA, 15 bp, Homo sapiens
ccacagcctggagct

SEQ ID NO: 1706965 - DNA, 15 bp, Homo sapiens
cacagcctggagcta

SEQ ID NO: 1706966 - DNA, 15 bp, Homo sapiens
acagcctggagctaa

SEQ ID NO: 1706967 - DNA, 15 bp, Homo sapiens
cagcctggagctaat

SEQ ID NO: 1706968 - DNA, 15 bp, Homo sapiens
agcctggagctaatc

SEQ ID NO: 1706969 - DNA, 15 bp, Homo sapiens
gcctggagctaatcc

SEQ ID NO: 1706970 - DNA, 15 bp, Homo sapiens
cctggagctaatcct

SEQ ID NO: 1706971 - DNA, 15 bp, Homo sapiens
ctggagctaatcctg

SEQ ID NO: 1706972 - DNA, 15 bp, Homo sapiens
tggagctaatcctga

SEQ ID NO: 1706973 - DNA, 15 bp, Homo sapiens
ggagctaatcctgag

SEQ ID NO: 1706974 - DNA, 15 bp, Homo sapiens
gagctaatcctgaga

SEQ ID NO: 1706975 - DNA, 15 bp, Homo sapiens
agctaatcctgagat

SEQ ID NO: 1706976 - DNA, 15 bp, Homo sapiens
gctaatcctgagatg

SEQ ID NO: 1706977 - DNA, 15 bp, Homo sapiens
ctaatcctgagatgt

SEQ ID NO: 1706978 - DNA, 15 bp, Homo sapiens
taatcctgagatgtc

SEQ ID NO: 1706979 - DNA, 15 bp, Homo sapiens
aatcctgagatgtct

SEQ ID NO: 1706980 - DNA, 15 bp, Homo sapiens
atcctgagatgtctc

SEQ ID NO: 1706981 - DNA, 15 bp, Homo sapiens
tcctgagatgtctct

SEQ ID NO: 1706982 - DNA, 15 bp, Homo sapiens
cctgagatgtctctg

SEQ ID NO: 1706983 - DNA, 15 bp, Homo sapiens
ctgagatgtctctga

SEQ ID NO: 1706984 - DNA, 15 bp, Homo sapiens
tgagatgtctctgac

SEQ ID NO: 1706985 - DNA, 15 bp, Homo sapiens
gagatgtctctgact

SEQ ID NO: 1706986 - DNA, 15 bp, Homo sapiens
agatgtctctgacta

SEQ ID NO: 1706987 - DNA, 15 bp, Homo sapiens
gatgtctctgactac

SEQ ID NO: 1706988 - DNA, 15 bp, Homo sapiens
atgtctctgactacg

SEQ ID NO: 1706989 - DNA, 15 bp, Homo sapiens
tgtctctgactacgg

SEQ ID NO: 1706990 - DNA, 15 bp, Homo sapiens
gtctctgactacggt

SEQ ID NO: 1706991 - DNA, 15 bp, Homo sapiens
tctctgactacggta

SEQ ID NO: 1706992 - DNA, 15 bp, Homo sapiens
ctctgactacggtac

SEQ ID NO: 1706993 - DNA, 15 bp, Homo sapiens
tctgactacggtacc

SEQ ID NO: 1706994 - DNA, 15 bp, Homo sapiens
ctgactacggtaccc

SEQ ID NO: 1706995 - DNA, 15 bp, Homo sapiens
tgactacggtaccca

SEQ ID NO: 1706996 - DNA, 15 bp, Homo sapiens
gactacggtacccac

SEQ ID NO: 1706997 - DNA, 15 bp, Homo sapiens
actacggtacccact

SEQ ID NO: 1706998 - DNA, 15 bp, Homo sapiens
ctacggtacccacta

SEQ ID NO: 1706999 - DNA, 15 bp, Homo sapiens
tacggtacccactag

SEQ ID NO: 1707000 - DNA, 15 bp, Homo sapiens
acggtacccactagc

SEQ ID NO: 1707001 - DNA, 15 bp, Homo sapiens
cggtacccactagca

SEQ ID NO: 1707002 - DNA, 15 bp, Homo sapiens
ggtacccactagcaa

SEQ ID NO: 1707003 - DNA, 15 bp, Homo sapiens
gtacccactagcaac

SEQ ID NO: 1707004 - DNA, 15 bp, Homo sapiens
tacccactagcaact

SEQ ID NO: 1707005 - DNA, 15 bp, Homo sapiens
acccactagcaactg

SEQ ID NO: 1707006 - DNA, 15 bp, Homo sapiens
cccactagcaactgg

SEQ ID NO: 1707007 - DNA, 15 bp, Homo sapiens
ccactagcaactgga

SEQ ID NO: 1707008 - DNA, 15 bp, Homo sapiens
cactagcaactggac

SEQ ID NO: 1707009 - DNA, 15 bp, Homo sapiens
actagcaactggaca

SEQ ID NO: 1707010 - DNA, 15 bp, Homo sapiens
ctagcaactggacat

SEQ ID NO: 1707011 - DNA, 15 bp, Homo sapiens
tagcaactggacatt

SEQ ID NO: 1707012 - DNA, 15 bp, Homo sapiens
agcaactggacattt

SEQ ID NO: 1707013 - DNA, 15 bp, Homo sapiens
gcaactggacatttt

SEQ ID NO: 1707014 - DNA, 15 bp, Homo sapiens
caactggacattttc

SEQ ID NO: 1707015 - DNA, 15 bp, Homo sapiens
aactggacattttct

SEQ ID NO: 1707016 - DNA, 15 bp, Homo sapiens
actggacattttcta

SEQ ID NO: 1707017 - DNA, 15 bp, Homo sapiens
ctggacattttctaa

SEQ ID NO: 1707018 - DNA, 15 bp, Homo sapiens
tggacattttctaag

SEQ ID NO: 1707019 - DNA, 15 bp, Homo sapiens
ggacattttctaagt

SEQ ID NO: 1707020 - DNA, 15 bp, Homo sapiens
gacattttctaagtc

SEQ ID NO: 1707021 - DNA, 15 bp, Homo sapiens
acattttctaagtct

SEQ ID NO: 1707022 - DNA, 15 bp, Homo sapiens
cattttctaagtctc

SEQ ID NO: 1707023 - DNA, 15 bp, Homo sapiens
attttctaagtctcc

SEQ ID NO: 1707024 - DNA, 15 bp, Homo sapiens
ttttctaagtctcct

SEQ ID NO: 1707025 - DNA, 15 bp, Homo sapiens
tttctaagtctcctg

SEQ ID NO: 1707026 - DNA, 15 bp, Homo sapiens
ttctaagtctcctga

SEQ ID NO: 1707027 - DNA, 15 bp, Homo sapiens
tctaagtctcctgat

SEQ ID NO: 1707028 - DNA, 15 bp, Homo sapiens
ctaagtctcctgata

SEQ ID NO: 1707029 - DNA, 15 bp, Homo sapiens
taagtctcctgataa

SEQ ID NO: 1707030 - DNA, 15 bp, Homo sapiens
aagtctcctgataaa

SEQ ID NO: 1707031 - DNA, 15 bp, Homo sapiens
agtctcctgataaat

SEQ ID NO: 1707032 - DNA, 15 bp, Homo sapiens
gtctcctgataaatg

SEQ ID NO: 1707033 - DNA, 15 bp, Homo sapiens
tctcctgataaatgg

SEQ ID NO: 1707034 - DNA, 15 bp, Homo sapiens
ctcctgataaatggg

SEQ ID NO: 1707035 - DNA, 15 bp, Homo sapiens
tcctgataaatgggt

SEQ ID NO: 1707036 - DNA, 15 bp, Homo sapiens
cctgataaatgggtt

SEQ ID NO: 1707037 - DNA, 15 bp, Homo sapiens
ctgataaatgggttg

SEQ ID NO: 1707038 - DNA, 15 bp, Homo sapiens
tgataaatgggttga

SEQ ID NO: 1707039 - DNA, 15 bp, Homo sapiens
gataaatgggttgaa

SEQ ID NO: 1707040 - DNA, 15 bp, Homo sapiens
ataaatgggttgaag

SEQ ID NO: 1707041 - DNA, 15 bp, Homo sapiens
taaatgggttgaagc

SEQ ID NO: 1707042 - DNA, 15 bp, Homo sapiens
aaatgggttgaagct

SEQ ID NO: 1707043 - DNA, 15 bp, Homo sapiens
aatgggttgaagctg

SEQ ID NO: 1707044 - DNA, 15 bp, Homo sapiens
atgggttgaagctgt

SEQ ID NO: 1707045 - DNA, 15 bp, Homo sapiens
tgggttgaagctgta

SEQ ID NO: 1707046 - DNA, 15 bp, Homo sapiens
gggttgaagctgtat

SEQ ID NO: 1707047 - DNA, 15 bp, Homo sapiens
ggttgaagctgtatt

SEQ ID NO: 1707048 - DNA, 15 bp, Homo sapiens
gttgaagctgtattc

SEQ ID NO: 1707049 - DNA, 15 bp, Homo sapiens
ttgaagctgtattcc

SEQ ID NO: 1707050 - DNA, 15 bp, Homo sapiens
tgaagctgtattccc

SEQ ID NO: 1707051 - DNA, 15 bp, Homo sapiens
gaagctgtattccca

SEQ ID NO: 1707052 - DNA, 15 bp, Homo sapiens
aagctgtattcccaa

SEQ ID NO: 1707053 - DNA, 15 bp, Homo sapiens
agctgtattcccaaa

SEQ ID NO: 1707054 - DNA, 15 bp, Homo sapiens
gctgtattcccaaag

SEQ ID NO: 1707055 - DNA, 15 bp, Homo sapiens
ctgtattcccaaaga

SEQ ID NO: 1707056 - DNA, 15 bp, Homo sapiens
tgtattcccaaagac

SEQ ID NO: 1707057 - DNA, 15 bp, Homo sapiens
gtattcccaaagaca

SEQ ID NO: 1707058 - DNA, 15 bp, Homo sapiens
tattcccaaagacag

SEQ ID NO: 1707059 - DNA, 15 bp, Homo sapiens
attcccaaagacagt

SEQ ID NO: 1707060 - DNA, 15 bp, Homo sapiens
ttcccaaagacagta

SEQ ID NO: 1707061 - DNA, 15 bp, Homo sapiens
tcccaaagacagtac

SEQ ID NO: 1707062 - DNA, 15 bp, Homo sapiens
cccaaagacagtaca

SEQ ID NO: 1707063 - DNA, 15 bp, Homo sapiens
ccaaagacagtacat

SEQ ID NO: 1707064 - DNA, 15 bp, Homo sapiens
caaagacagtacatg

SEQ ID NO: 1707065 - DNA, 15 bp, Homo sapiens
aaagacagtacatgc

SEQ ID NO: 1707066 - DNA, 15 bp, Homo sapiens
aagacagtacatgct

SEQ ID NO: 1707067 - DNA, 15 bp, Homo sapiens
agacagtacatgctg

SEQ ID NO: 1707068 - DNA, 15 bp, Homo sapiens
gacagtacatgctgc

SEQ ID NO: 1707069 - DNA, 15 bp, Homo sapiens
acagtacatgctgcc

SEQ ID NO: 1707070 - DNA, 15 bp, Homo sapiens
cagtacatgctgcct

SEQ ID NO: 1707071 - DNA, 15 bp, Homo sapiens
agtacatgctgcctt

SEQ ID NO: 1707072 - DNA, 15 bp, Homo sapiens
gtacatgctgccttc

SEQ ID NO: 1707073 - DNA, 15 bp, Homo sapiens
tacatgctgccttca

SEQ ID NO: 1707074 - DNA, 15 bp, Homo sapiens
acatgctgccttcaa

SEQ ID NO: 1707075 - DNA, 15 bp, Homo sapiens
catgctgccttcaaa

SEQ ID NO: 1707076 - DNA, 15 bp, Homo sapiens
atgctgccttcaaaa

SEQ ID NO: 1707077 - DNA, 15 bp, Homo sapiens
tgctgccttcaaaat

SEQ ID NO: 1707078 - DNA, 15 bp, Homo sapiens
gctgccttcaaaatc

SEQ ID NO: 1707079 - DNA, 15 bp, Homo sapiens
ctgccttcaaaatca

SEQ ID NO: 1707080 - DNA, 15 bp, Homo sapiens
tgccttcaaaatcag

SEQ ID NO: 1707081 - DNA, 15 bp, Homo sapiens
gccttcaaaatcaga

SEQ ID NO: 1707082 - DNA, 15 bp, Homo sapiens
ccttcaaaatcagag

SEQ ID NO: 1707083 - DNA, 15 bp, Homo sapiens
cttcaaaatcagagg

SEQ ID NO: 1707084 - DNA, 15 bp, Homo sapiens
ttcaaaatcagagga

SEQ ID NO: 1707085 - DNA, 15 bp, Homo sapiens
tcaaaatcagaggag

SEQ ID NO: 1707086 - DNA, 15 bp, Homo sapiens
caaaatcagaggagg

SEQ ID NO: 1707087 - DNA, 15 bp, Homo sapiens
aaaatcagaggaggc

SEQ ID NO: 1707088 - DNA, 15 bp, Homo sapiens
aaatcagaggaggcc

SEQ ID NO: 1707089 - DNA, 15 bp, Homo sapiens
aatcagaggaggccc

SEQ ID NO: 1707090 - DNA, 15 bp, Homo sapiens
atcagaggaggccca

SEQ ID NO: 1707091 - DNA, 15 bp, Homo sapiens
tcagaggaggcccac

SEQ ID NO: 1707092 - DNA, 15 bp, Homo sapiens
cagaggaggcccact

SEQ ID NO: 1707093 - DNA, 15 bp, Homo sapiens
agaggaggcccacta

SEQ ID NO: 1707094 - DNA, 15 bp, Homo sapiens
gaggaggcccactaa

SEQ ID NO: 1707095 - DNA, 15 bp, Homo sapiens
aggaggcccactaag

SEQ ID NO: 1707096 - DNA, 15 bp, Homo sapiens
ggaggcccactaagt

SEQ ID NO: 1707097 - DNA, 15 bp, Homo sapiens
gaggcccactaagtg

SEQ ID NO: 1707098 - DNA, 15 bp, Homo sapiens
aggcccactaagtga

SEQ ID NO: 1707099 - DNA, 15 bp, Homo sapiens
ggcccactaagtgat

SEQ ID NO: 1707100 - DNA, 15 bp, Homo sapiens
gcccactaagtgata

SEQ ID NO: 1707101 - DNA, 15 bp, Homo sapiens
cccactaagtgataa

SEQ ID NO: 1707102 - DNA, 15 bp, Homo sapiens
ccactaagtgataag

SEQ ID NO: 1707103 - DNA, 15 bp, Homo sapiens
cactaagtgataagc

SEQ ID NO: 1707104 - DNA, 15 bp, Homo sapiens
actaagtgataagcc

SEQ ID NO: 1707105 - DNA, 15 bp, Homo sapiens
ctaagtgataagcca

SEQ ID NO: 1707106 - DNA, 15 bp, Homo sapiens
taagtgataagccac

SEQ ID NO: 1707107 - DNA, 15 bp, Homo sapiens
aagtgataagccact

SEQ ID NO: 1707108 - DNA, 15 bp, Homo sapiens
agtgataagccactt

SEQ ID NO: 1707109 - DNA, 15 bp, Homo sapiens
gtgataagccacttt

SEQ ID NO: 1707110 - DNA, 15 bp, Homo sapiens
tgataagccactttc

SEQ ID NO: 1707111 - DNA, 15 bp, Homo sapiens
gataagccactttct

SEQ ID NO: 1707112 - DNA, 15 bp, Homo sapiens
ataagccactttctt

SEQ ID NO: 1707113 - DNA, 15 bp, Homo sapiens
taagccactttctta

SEQ ID NO: 1707114 - DNA, 15 bp, Homo sapiens
aagccactttcttag

SEQ ID NO: 1707115 - DNA, 15 bp, Homo sapiens
agccactttcttagt

SEQ ID NO: 1707116 - DNA, 15 bp, Homo sapiens
gccactttcttagtg

SEQ ID NO: 1707117 - DNA, 15 bp, Homo sapiens
ccactttcttagtgg

SEQ ID NO: 1707118 - DNA, 15 bp, Homo sapiens
cactttcttagtggc

SEQ ID NO: 1707119 - DNA, 15 bp, Homo sapiens
actttcttagtggca

SEQ ID NO: 1707120 - DNA, 15 bp, Homo sapiens
ctttcttagtggcag

SEQ ID NO: 1707121 - DNA, 15 bp, Homo sapiens
tttcttagtggcagg

SEQ ID NO: 1707122 - DNA, 15 bp, Homo sapiens
ttcttagtggcaggg

SEQ ID NO: 1707123 - DNA, 15 bp, Homo sapiens
tcttagtggcagggg

SEQ ID NO: 1707124 - DNA, 15 bp, Homo sapiens
cttagtggcaggggg

SEQ ID NO: 1707125 - DNA, 15 bp, Homo sapiens
ttagtggcagggggt

SEQ ID NO: 1707126 - DNA, 15 bp, Homo sapiens
tagtggcagggggtg

SEQ ID NO: 1707127 - DNA, 15 bp, Homo sapiens
agtggcagggggtga

SEQ ID NO: 1707128 - DNA, 15 bp, Homo sapiens
gtggcagggggtgag

SEQ ID NO: 1707129 - DNA, 15 bp, Homo sapiens
tggcagggggtgaga

SEQ ID NO: 1707130 - DNA, 15 bp, Homo sapiens
ggcagggggtgagaa

SEQ ID NO: 1707131 - DNA, 15 bp, Homo sapiens
gcagggggtgagaag

SEQ ID NO: 1707132 - DNA, 15 bp, Homo sapiens
cagggggtgagaagt

SEQ ID NO: 1707133 - DNA, 15 bp, Homo sapiens
agggggtgagaagtg

SEQ ID NO: 1707134 - DNA, 15 bp, Homo sapiens
gggggtgagaagtgc

SEQ ID NO: 1707135 - DNA, 15 bp, Homo sapiens
ggggtgagaagtgca

SEQ ID NO: 1707136 - DNA, 15 bp, Homo sapiens
gggtgagaagtgcaa

SEQ ID NO: 1707137 - DNA, 15 bp, Homo sapiens
ggtgagaagtgcaat

SEQ ID NO: 1707138 - DNA, 15 bp, Homo sapiens
gtgagaagtgcaata

SEQ ID NO: 1707139 - DNA, 15 bp, Homo sapiens
tgagaagtgcaataa

SEQ ID NO: 1707140 - DNA, 15 bp, Homo sapiens
gagaagtgcaataaa

SEQ ID NO: 1707141 - DNA, 15 bp, Homo sapiens
agaagtgcaataaat

SEQ ID NO: 1707142 - DNA, 15 bp, Homo sapiens
gaagtgcaataaatt

SEQ ID NO: 1707143 - DNA, 15 bp, Homo sapiens
aagtgcaataaattg

SEQ ID NO: 1707144 - DNA, 15 bp, Homo sapiens
agtgcaataaattgt

SEQ ID NO: 1707145 - DNA, 15 bp, Homo sapiens
gtgcaataaattgtc

SEQ ID NO: 1707146 - DNA, 15 bp, Homo sapiens
tgcaataaattgtca

SEQ ID NO: 1707147 - DNA, 15 bp, Homo sapiens
gcaataaattgtcat

SEQ ID NO: 1707148 - DNA, 15 bp, Homo sapiens
caataaattgtcatt

SEQ ID NO: 1707149 - DNA, 15 bp, Homo sapiens
aataaattgtcattt

SEQ ID NO: 1707150 - DNA, 15 bp, Homo sapiens
ataaattgtcattta

SEQ ID NO: 1707151 - DNA, 15 bp, Homo sapiens
taaattgtcatttac

SEQ ID NO: 1707152 - DNA, 15 bp, Homo sapiens
aaattgtcatttaca

SEQ ID NO: 1707153 - DNA, 15 bp, Homo sapiens
aattgtcatttacat

SEQ ID NO: 1707154 - DNA, 15 bp, Homo sapiens
attgtcatttacatt

SEQ ID NO: 1707155 - DNA, 15 bp, Homo sapiens
ttgtcatttacatta

SEQ ID NO: 1707156 - DNA, 15 bp, Homo sapiens
tgtcatttacattaa

SEQ ID NO: 1707157 - DNA, 15 bp, Homo sapiens
gtcatttacattaaa

SEQ ID NO: 1707158 - DNA, 15 bp, Homo sapiens
tcatttacattaaag

SEQ ID NO: 1707159 - DNA, 15 bp, Homo sapiens
catttacattaaagg

SEQ ID NO: 1707160 - DNA, 15 bp, Homo sapiens
atttacattaaaggt

SEQ ID NO: 1707161 - DNA, 15 bp, Homo sapiens
tttacattaaaggtg

SEQ ID NO: 1707162 - DNA, 15 bp, Homo sapiens
ttacattaaaggtga

SEQ ID NO: 1707163 - DNA, 15 bp, Homo sapiens
tacattaaaggtgat

SEQ ID NO: 1707164 - DNA, 15 bp, Homo sapiens
acattaaaggtgatg

SEQ ID NO: 1707165 - DNA, 15 bp, Homo sapiens
cattaaaggtgatgc

SEQ ID NO: 1707166 - DNA, 15 bp, Homo sapiens
attaaaggtgatgct

SEQ ID NO: 1707167 - DNA, 15 bp, Homo sapiens
ttaaaggtgatgctc

SEQ ID NO: 1707168 - DNA, 15 bp, Homo sapiens
taaaggtgatgctcc

SEQ ID NO: 1707169 - DNA, 15 bp, Homo sapiens
aaaggtgatgctccc

SEQ ID NO: 1707170 - DNA, 15 bp, Homo sapiens
aaggtgatgctccca

SEQ ID NO: 1707171 - DNA, 15 bp, Homo sapiens
aggtgatgctcccag

SEQ ID NO: 1707172 - DNA, 15 bp, Homo sapiens
ggtgatgctcccagc

SEQ ID NO: 1707173 - DNA, 15 bp, Homo sapiens
gtgatgctcccagca

SEQ ID NO: 1707174 - DNA, 15 bp, Homo sapiens
tgatgctcccagcat

SEQ ID NO: 1707175 - DNA, 15 bp, Homo sapiens
gatgctcccagcata

SEQ ID NO: 1707176 - DNA, 15 bp, Homo sapiens
atgctcccagcatac

SEQ ID NO: 1707177 - DNA, 15 bp, Homo sapiens
tgctcccagcatacc

SEQ ID NO: 1707178 - DNA, 15 bp, Homo sapiens
gctcccagcataccc

SEQ ID NO: 1707179 - DNA, 15 bp, Homo sapiens
ctcccagcataccca

SEQ ID NO: 1707180 - DNA, 15 bp, Homo sapiens
tcccagcatacccag

SEQ ID NO: 1707181 - DNA, 15 bp, Homo sapiens
cccagcatacccaga

SEQ ID NO: 1707182 - DNA, 15 bp, Homo sapiens
ccagcatacccagag

SEQ ID NO: 1707183 - DNA, 15 bp, Homo sapiens
cagcatacccagagc

SEQ ID NO: 1707184 - DNA, 15 bp, Homo sapiens
agcatacccagagca

SEQ ID NO: 1707185 - DNA, 15 bp, Homo sapiens
gcatacccagagcac

SEQ ID NO: 1707186 - DNA, 15 bp, Homo sapiens
catacccagagcact

SEQ ID NO: 1707187 - DNA, 15 bp, Homo sapiens
atacccagagcactg

SEQ ID NO: 1707188 - DNA, 15 bp, Homo sapiens
tacccagagcactga

SEQ ID NO: 1707189 - DNA, 15 bp, Homo sapiens
acccagagcactgaa

SEQ ID NO: 1707190 - DNA, 15 bp, Homo sapiens
cccagagcactgaat

SEQ ID NO: 1707191 - DNA, 15 bp, Homo sapiens
ccagagcactgaatc

SEQ ID NO: 1707192 - DNA, 15 bp, Homo sapiens
cagagcactgaatct

SEQ ID NO: 1707193 - DNA, 15 bp, Homo sapiens
agagcactgaatctt

SEQ ID NO: 1707194 - DNA, 15 bp, Homo sapiens
gagcactgaatctta

SEQ ID NO: 1707195 - DNA, 15 bp, Homo sapiens
agcactgaatcttaa

SEQ ID NO: 1707196 - DNA, 15 bp, Homo sapiens
gcactgaatcttaac

SEQ ID NO: 1707197 - DNA, 15 bp, Homo sapiens
cactgaatcttaaca

SEQ ID NO: 1707198 - DNA, 15 bp, Homo sapiens
actgaatcttaacaa

SEQ ID NO: 1707199 - DNA, 15 bp, Homo sapiens
ctgaatcttaacaac

SEQ ID NO: 1707200 - DNA, 15 bp, Homo sapiens
tgaatcttaacaact

SEQ ID NO: 1707201 - DNA, 15 bp, Homo sapiens
gaatcttaacaactt

SEQ ID NO: 1707202 - DNA, 15 bp, Homo sapiens
aatcttaacaacttg

SEQ ID NO: 1707203 - DNA, 15 bp, Homo sapiens
atcttaacaacttga

SEQ ID NO: 1707204 - DNA, 15 bp, Homo sapiens
tcttaacaacttgat

SEQ ID NO: 1707205 - DNA, 15 bp, Homo sapiens
cttaacaacttgatc

SEQ ID NO: 1707206 - DNA, 15 bp, Homo sapiens
ttaacaacttgatca

SEQ ID NO: 1707207 - DNA, 15 bp, Homo sapiens
taacaacttgatcaa

SEQ ID NO: 1707208 - DNA, 15 bp, Homo sapiens
aacaacttgatcaat

SEQ ID NO: 1707209 - DNA, 15 bp, Homo sapiens
acaacttgatcaatg

SEQ ID NO: 1707210 - DNA, 15 bp, Homo sapiens
caacttgatcaatgt

SEQ ID NO: 1707211 - DNA, 15 bp, Homo sapiens
aacttgatcaatgtg

SEQ ID NO: 1707212 - DNA, 15 bp, Homo sapiens
acttgatcaatgtgg

SEQ ID NO: 1707213 - DNA, 15 bp, Homo sapiens
cttgatcaatgtggc

SEQ ID NO: 1707214 - DNA, 15 bp, Homo sapiens
ttgatcaatgtggca

SEQ ID NO: 1707215 - DNA, 15 bp, Homo sapiens
tgatcaatgtggcaa

SEQ ID NO: 1707216 - DNA, 15 bp, Homo sapiens
gatcaatgtggcaag

SEQ ID NO: 1707217 - DNA, 15 bp, Homo sapiens
atcaatgtggcaagc

SEQ ID NO: 1707218 - DNA, 15 bp, Homo sapiens
tcaatgtggcaagcc

SEQ ID NO: 1707219 - DNA, 15 bp, Homo sapiens
caatgtggcaagccc

SEQ ID NO: 1707220 - DNA, 15 bp, Homo sapiens
aatgtggcaagccct

SEQ ID NO: 1707221 - DNA, 15 bp, Homo sapiens
atgtggcaagccctc

SEQ ID NO: 1707222 - DNA, 15 bp, Homo sapiens
tgtggcaagccctca

SEQ ID NO: 1707223 - DNA, 15 bp, Homo sapiens
gtggcaagccctcaa

SEQ ID NO: 1707224 - DNA, 15 bp, Homo sapiens
tggcaagccctcaat

SEQ ID NO: 1707225 - DNA, 15 bp, Homo sapiens
ggcaagccctcaatt

SEQ ID NO: 1707226 - DNA, 15 bp, Homo sapiens
gcaagccctcaatta

SEQ ID NO: 1707227 - DNA, 15 bp, Homo sapiens
caagccctcaattat

SEQ ID NO: 1707228 - DNA, 15 bp, Homo sapiens
aagccctcaattatc

SEQ ID NO: 1707229 - DNA, 15 bp, Homo sapiens
agccctcaattatct

SEQ ID NO: 1707230 - DNA, 15 bp, Homo sapiens
gccctcaattatctt

SEQ ID NO: 1707231 - DNA, 15 bp, Homo sapiens
ccctcaattatcttg

SEQ ID NO: 1707232 - DNA, 15 bp, Homo sapiens
cctcaattatcttgg

SEQ ID NO: 1707233 - DNA, 15 bp, Homo sapiens
ctcaattatcttgga

SEQ ID NO: 1707234 - DNA, 15 bp, Homo sapiens
tcaattatcttggag

SEQ ID NO: 1707235 - DNA, 15 bp, Homo sapiens
caattatcttggagt

SEQ ID NO: 1707236 - DNA, 15 bp, Homo sapiens
aattatcttggagtt

SEQ ID NO: 1707237 - DNA, 15 bp, Homo sapiens
attatcttggagttt

SEQ ID NO: 1707238 - DNA, 15 bp, Homo sapiens
ttatcttggagttta

SEQ ID NO: 1707239 - DNA, 15 bp, Homo sapiens
tatcttggagtttat

SEQ ID NO: 1707240 - DNA, 15 bp, Homo sapiens
atcttggagtttatc

SEQ ID NO: 1707241 - DNA, 15 bp, Homo sapiens
tcttggagtttatct

SEQ ID NO: 1707242 - DNA, 15 bp, Homo sapiens
cttggagtttatctc

SEQ ID NO: 1707243 - DNA, 15 bp, Homo sapiens
ttggagtttatctcc

SEQ ID NO: 1707244 - DNA, 15 bp, Homo sapiens
tggagtttatctccc

SEQ ID NO: 1707245 - DNA, 15 bp, Homo sapiens
ggagtttatctccca

SEQ ID NO: 1707246 - DNA, 15 bp, Homo sapiens
gagtttatctcccat

SEQ ID NO: 1707247 - DNA, 15 bp, Homo sapiens
agtttatctcccatt

SEQ ID NO: 1707248 - DNA, 15 bp, Homo sapiens
gtttatctcccattc

SEQ ID NO: 1707249 - DNA, 15 bp, Homo sapiens
tttatctcccattct

SEQ ID NO: 1707250 - DNA, 15 bp, Homo sapiens
ttatctcccattctt

SEQ ID NO: 1707251 - DNA, 15 bp, Homo sapiens
tatctcccattcttt

SEQ ID NO: 1707252 - DNA, 15 bp, Homo sapiens
atctcccattctttg

SEQ ID NO: 1707253 - DNA, 15 bp, Homo sapiens
tctcccattctttgg

SEQ ID NO: 1707254 - DNA, 15 bp, Homo sapiens
ctcccattctttggg

SEQ ID NO: 1707255 - DNA, 15 bp, Homo sapiens
tcccattctttgggt

SEQ ID NO: 1707256 - DNA, 15 bp, Homo sapiens
cccattctttgggtt

SEQ ID NO: 1707257 - DNA, 15 bp, Homo sapiens
ccattctttgggtta

SEQ ID NO: 1707258 - DNA, 15 bp, Homo sapiens
cattctttgggttac

SEQ ID NO: 1707259 - DNA, 15 bp, Homo sapiens
attctttgggttaca

SEQ ID NO: 1707260 - DNA, 15 bp, Homo sapiens
ttctttgggttacat

SEQ ID NO: 1707261 - DNA, 15 bp, Homo sapiens
tctttgggttacatg

SEQ ID NO: 1707262 - DNA, 15 bp, Homo sapiens
ctttgggttacatgt

SEQ ID NO: 1707263 - DNA, 15 bp, Homo sapiens
tttgggttacatgta

SEQ ID NO: 1707264 - DNA, 15 bp, Homo sapiens
ttgggttacatgtat

SEQ ID NO: 1707265 - DNA, 15 bp, Homo sapiens
tgggttacatgtatt

SEQ ID NO: 1707266 - DNA, 15 bp, Homo sapiens
gggttacatgtattt

SEQ ID NO: 1707267 - DNA, 15 bp, Homo sapiens
ggttacatgtatttt

SEQ ID NO: 1707268 - DNA, 15 bp, Homo sapiens
gttacatgtatttta

SEQ ID NO: 1707269 - DNA, 15 bp, Homo sapiens
ttacatgtattttac

SEQ ID NO: 1707270 - DNA, 15 bp, Homo sapiens
tacatgtattttact

SEQ ID NO: 1707271 - DNA, 15 bp, Homo sapiens
acatgtattttactg

SEQ ID NO: 1707272 - DNA, 15 bp, Homo sapiens
catgtattttactgg

SEQ ID NO: 1707273 - DNA, 15 bp, Homo sapiens
atgtattttactggc

SEQ ID NO: 1707274 - DNA, 15 bp, Homo sapiens
tgtattttactggcc

SEQ ID NO: 1707275 - DNA, 15 bp, Homo sapiens
gtattttactggcca

SEQ ID NO: 1707276 - DNA, 15 bp, Homo sapiens
tattttactggccac

SEQ ID NO: 1707277 - DNA, 15 bp, Homo sapiens
attttactggccact

SEQ ID NO: 1707278 - DNA, 15 bp, Homo sapiens
ttttactggccactt

SEQ ID NO: 1707279 - DNA, 15 bp, Homo sapiens
tttactggccactta

SEQ ID NO: 1707280 - DNA, 15 bp, Homo sapiens
ttactggccacttag

SEQ ID NO: 1707281 - DNA, 15 bp, Homo sapiens
tactggccacttagc

SEQ ID NO: 1707282 - DNA, 15 bp, Homo sapiens
actggccacttagcc

SEQ ID NO: 1707283 - DNA, 15 bp, Homo sapiens
ctggccacttagcct

SEQ ID NO: 1707284 - DNA, 15 bp, Homo sapiens
tggccacttagcctg

SEQ ID NO: 1707285 - DNA, 15 bp, Homo sapiens
ggccacttagcctgt

SEQ ID NO: 1707286 - DNA, 15 bp, Homo sapiens
gccacttagcctgtc

SEQ ID NO: 1707287 - DNA, 15 bp, Homo sapiens
ccacttagcctgtct

SEQ ID NO: 1707288 - DNA, 15 bp, Homo sapiens
cacttagcctgtcta

SEQ ID NO: 1707289 - DNA, 15 bp, Homo sapiens
acttagcctgtctac

SEQ ID NO: 1707290 - DNA, 15 bp, Homo sapiens
cttagcctgtctact

SEQ ID NO: 1707291 - DNA, 15 bp, Homo sapiens
ttagcctgtctactc

SEQ ID NO: 1707292 - DNA, 15 bp, Homo sapiens
tagcctgtctactca

SEQ ID NO: 1707293 - DNA, 15 bp, Homo sapiens
agcctgtctactcaa

SEQ ID NO: 1707294 - DNA, 15 bp, Homo sapiens
gcctgtctactcaaa

SEQ ID NO: 1707295 - DNA, 15 bp, Homo sapiens
cctgtctactcaaag

SEQ ID NO: 1707296 - DNA, 15 bp, Homo sapiens
ctgtctactcaaagt

SEQ ID NO: 1707297 - DNA, 15 bp, Homo sapiens
tgtctactcaaagtg

SEQ ID NO: 1707298 - DNA, 15 bp, Homo sapiens
gtctactcaaagtgt

SEQ ID NO: 1707299 - DNA, 15 bp, Homo sapiens
tctactcaaagtgta

SEQ ID NO: 1707300 - DNA, 15 bp, Homo sapiens
ctactcaaagtgtag

SEQ ID NO: 1707301 - DNA, 15 bp, Homo sapiens
tactcaaagtgtagt

SEQ ID NO: 1707302 - DNA, 15 bp, Homo sapiens
actcaaagtgtagtc

SEQ ID NO: 1707303 - DNA, 15 bp, Homo sapiens
ctcaaagtgtagtct

SEQ ID NO: 1707304 - DNA, 15 bp, Homo sapiens
tcaaagtgtagtcta

SEQ ID NO: 1707305 - DNA, 15 bp, Homo sapiens
caaagtgtagtctac

SEQ ID NO: 1707306 - DNA, 15 bp, Homo sapiens
aaagtgtagtctaca

SEQ ID NO: 1707307 - DNA, 15 bp, Homo sapiens
aagtgtagtctacag

SEQ ID NO: 1707308 - DNA, 15 bp, Homo sapiens
agtgtagtctacaga

SEQ ID NO: 1707309 - DNA, 15 bp, Homo sapiens
gtgtagtctacagac

SEQ ID NO: 1707310 - DNA, 15 bp, Homo sapiens
tgtagtctacagaca

SEQ ID NO: 1707311 - DNA, 15 bp, Homo sapiens
gtagtctacagacag

SEQ ID NO: 1707312 - DNA, 15 bp, Homo sapiens
tagtctacagacaga

SEQ ID NO: 1707313 - DNA, 15 bp, Homo sapiens
agtctacagacagat

SEQ ID NO: 1707314 - DNA, 15 bp, Homo sapiens
gtctacagacagatg

SEQ ID NO: 1707315 - DNA, 15 bp, Homo sapiens
tctacagacagatgt

SEQ ID NO: 1707316 - DNA, 15 bp, Homo sapiens
ctacagacagatgtt

SEQ ID NO: 1707317 - DNA, 15 bp, Homo sapiens
tacagacagatgttg

SEQ ID NO: 1707318 - DNA, 15 bp, Homo sapiens
acagacagatgttgg

SEQ ID NO: 1707319 - DNA, 15 bp, Homo sapiens
cagacagatgttggc

SEQ ID NO: 1707320 - DNA, 15 bp, Homo sapiens
agacagatgttggct

SEQ ID NO: 1707321 - DNA, 15 bp, Homo sapiens
gacagatgttggctg

SEQ ID NO: 1707322 - DNA, 15 bp, Homo sapiens
acagatgttggctgg

SEQ ID NO: 1707323 - DNA, 15 bp, Homo sapiens
cagatgttggctggt

SEQ ID NO: 1707324 - DNA, 15 bp, Homo sapiens
agatgttggctggtg

SEQ ID NO: 1707325 - DNA, 15 bp, Homo sapiens
gatgttggctggtga

SEQ ID NO: 1707326 - DNA, 15 bp, Homo sapiens
atgttggctggtgaa

SEQ ID NO: 1707327 - DNA, 15 bp, Homo sapiens
tgttggctggtgaac

SEQ ID NO: 1707328 - DNA, 15 bp, Homo sapiens
gttggctggtgaaca

SEQ ID NO: 1707329 - DNA, 15 bp, Homo sapiens
ttggctggtgaacac

SEQ ID NO: 1707330 - DNA, 15 bp, Homo sapiens
tggctggtgaacact

SEQ ID NO: 1707331 - DNA, 15 bp, Homo sapiens
ggctggtgaacactt

SEQ ID NO: 1707332 - DNA, 15 bp, Homo sapiens
gctggtgaacacttg

SEQ ID NO: 1707333 - DNA, 15 bp, Homo sapiens
ctggtgaacacttgg

SEQ ID NO: 1707334 - DNA, 15 bp, Homo sapiens
tggtgaacacttggt

SEQ ID NO: 1707335 - DNA, 15 bp, Homo sapiens
ggtgaacacttggtt

SEQ ID NO: 1707336 - DNA, 15 bp, Homo sapiens
gtgaacacttggtta

SEQ ID NO: 1707337 - DNA, 15 bp, Homo sapiens
tgaacacttggttac

SEQ ID NO: 1707338 - DNA, 15 bp, Homo sapiens
gaacacttggttact

SEQ ID NO: 1707339 - DNA, 15 bp, Homo sapiens
aacacttggttacta

SEQ ID NO: 1707340 - DNA, 15 bp, Homo sapiens
acacttggttactag

SEQ ID NO: 1707341 - DNA, 15 bp, Homo sapiens
cacttggttactagc

SEQ ID NO: 1707342 - DNA, 15 bp, Homo sapiens
acttggttactagcc

SEQ ID NO: 1707343 - DNA, 15 bp, Homo sapiens
cttggttactagcct

SEQ ID NO: 1707344 - DNA, 15 bp, Homo sapiens
ttggttactagcctg

SEQ ID NO: 1707345 - DNA, 15 bp, Homo sapiens
tggttactagcctgt

SEQ ID NO: 1707346 - DNA, 15 bp, Homo sapiens
ggttactagcctgtg

SEQ ID NO: 1707347 - DNA, 15 bp, Homo sapiens
gttactagcctgtgg

SEQ ID NO: 1707348 - DNA, 15 bp, Homo sapiens
ttactagcctgtgga

SEQ ID NO: 1707349 - DNA, 15 bp, Homo sapiens
tactagcctgtggaa

SEQ ID NO: 1707350 - DNA, 15 bp, Homo sapiens
actagcctgtggaaa

SEQ ID NO: 1707351 - DNA, 15 bp, Homo sapiens
ctagcctgtggaaag

SEQ ID NO: 1707352 - DNA, 15 bp, Homo sapiens
tagcctgtggaaaga

SEQ ID NO: 1707353 - DNA, 15 bp, Homo sapiens
agcctgtggaaagat

SEQ ID NO: 1707354 - DNA, 15 bp, Homo sapiens
gcctgtggaaagata

SEQ ID NO: 1707355 - DNA, 15 bp, Homo sapiens
cctgtggaaagataa

SEQ ID NO: 1707356 - DNA, 15 bp, Homo sapiens
ctgtggaaagataaa

SEQ ID NO: 1707357 - DNA, 15 bp, Homo sapiens
tgtggaaagataaat

SEQ ID NO: 1707358 - DNA, 15 bp, Homo sapiens
gtggaaagataaatt

SEQ ID NO: 1707359 - DNA, 15 bp, Homo sapiens
tggaaagataaattc

SEQ ID NO: 1707360 - DNA, 15 bp, Homo sapiens
ggaaagataaattca

SEQ ID NO: 1707361 - DNA, 15 bp, Homo sapiens
gaaagataaattcat

SEQ ID NO: 1707362 - DNA, 15 bp, Homo sapiens
aaagataaattcata

SEQ ID NO: 1707363 - DNA, 15 bp, Homo sapiens
aagataaattcataa

SEQ ID NO: 1707364 - DNA, 15 bp, Homo sapiens
agataaattcataaa

SEQ ID NO: 1707365 - DNA, 15 bp, Homo sapiens
gataaattcataaat

SEQ ID NO: 1707366 - DNA, 15 bp, Homo sapiens
ataaattcataaatt

SEQ ID NO: 1707367 - DNA, 15 bp, Homo sapiens
taaattcataaattg

SEQ ID NO: 1707368 - DNA, 15 bp, Homo sapiens
aaattcataaattga

SEQ ID NO: 1707369 - DNA, 15 bp, Homo sapiens
aattcataaattgaa

SEQ ID NO: 1707370 - DNA, 15 bp, Homo sapiens
attcataaattgaaa

SEQ ID NO: 1707371 - DNA, 15 bp, Homo sapiens
ttcataaattgaaaa

SEQ ID NO: 1707372 - DNA, 15 bp, Homo sapiens
tcataaattgaaaat

SEQ ID NO: 1707373 - DNA, 15 bp, Homo sapiens
cataaattgaaaatc

SEQ ID NO: 1707374 - DNA, 15 bp, Homo sapiens
ataaattgaaaatct

SEQ ID NO: 1707375 - DNA, 15 bp, Homo sapiens
taaattgaaaatcta

SEQ ID NO: 1707376 - DNA, 15 bp, Homo sapiens
aaattgaaaatctat

SEQ ID NO: 1707377 - DNA, 15 bp, Homo sapiens
aattgaaaatctata

SEQ ID NO: 1707378 - DNA, 15 bp, Homo sapiens
attgaaaatctatat

SEQ ID NO: 1707379 - DNA, 15 bp, Homo sapiens
ttgaaaatctatatt

SEQ ID NO: 1707380 - DNA, 15 bp, Homo sapiens
tgaaaatctatattt

SEQ ID NO: 1707381 - DNA, 15 bp, Homo sapiens
gaaaatctatattta

SEQ ID NO: 1707382 - DNA, 15 bp, Homo sapiens
aaaatctatatttag

SEQ ID NO: 1707383 - DNA, 15 bp, Homo sapiens
aaatctatatttaga

SEQ ID NO: 1707384 - DNA, 15 bp, Homo sapiens
aatctatatttagaa

SEQ ID NO: 1707385 - DNA, 15 bp, Homo sapiens
atctatatttagaaa

SEQ ID NO: 1707386 - DNA, 15 bp, Homo sapiens
tctatatttagaaat

SEQ ID NO: 1707387 - DNA, 15 bp, Homo sapiens
ctatatttagaaatt

SEQ ID NO: 1707388 - DNA, 15 bp, Homo sapiens
tatatttagaaattt

SEQ ID NO: 1707389 - DNA, 15 bp, Homo sapiens
atatttagaaatttt

SEQ ID NO: 1707390 - DNA, 15 bp, Homo sapiens
tatttagaaatttta

SEQ ID NO: 1707391 - DNA, 15 bp, Homo sapiens
atttagaaattttat

SEQ ID NO: 1707392 - DNA, 15 bp, Homo sapiens
tttagaaattttata

SEQ ID NO: 1707393 - DNA, 15 bp, Homo sapiens
ttagaaattttatag

SEQ ID NO: 1707394 - DNA, 15 bp, Homo sapiens
tagaaattttatagc

SEQ ID NO: 1707395 - DNA, 15 bp, Homo sapiens
agaaattttatagca

SEQ ID NO: 1707396 - DNA, 15 bp, Homo sapiens
gaaattttatagcaa

SEQ ID NO: 1707397 - DNA, 15 bp, Homo sapiens
aaattttatagcaat

SEQ ID NO: 1707398 - DNA, 15 bp, Homo sapiens
aattttatagcaatt

SEQ ID NO: 1707399 - DNA, 15 bp, Homo sapiens
attttatagcaattt

SEQ ID NO: 1707400 - DNA, 15 bp, Homo sapiens
ttttatagcaatttg

SEQ ID NO: 1707401 - DNA, 15 bp, Homo sapiens
tttatagcaatttgc

SEQ ID NO: 1707402 - DNA, 15 bp, Homo sapiens
ttatagcaatttgcc

SEQ ID NO: 1707403 - DNA, 15 bp, Homo sapiens
tatagcaatttgcca

SEQ ID NO: 1707404 - DNA, 15 bp, Homo sapiens
atagcaatttgccat

SEQ ID NO: 1707405 - DNA, 15 bp, Homo sapiens
tagcaatttgccatt

SEQ ID NO: 1707406 - DNA, 15 bp, Homo sapiens
agcaatttgccattg

SEQ ID NO: 1707407 - DNA, 15 bp, Homo sapiens
gcaatttgccattgc

SEQ ID NO: 1707408 - DNA, 15 bp, Homo sapiens
caatttgccattgct

SEQ ID NO: 1707409 - DNA, 15 bp, Homo sapiens
aatttgccattgctg

SEQ ID NO: 1707410 - DNA, 15 bp, Homo sapiens
atttgccattgctgt

SEQ ID NO: 1707411 - DNA, 15 bp, Homo sapiens
tttgccattgctgtg

SEQ ID NO: 1707412 - DNA, 15 bp, Homo sapiens
ttgccattgctgtga

SEQ ID NO: 1707413 - DNA, 15 bp, Homo sapiens
tgccattgctgtgac

SEQ ID NO: 1707414 - DNA, 15 bp, Homo sapiens
gccattgctgtgact

SEQ ID NO: 1707415 - DNA, 15 bp, Homo sapiens
ccattgctgtgactt

SEQ ID NO: 1707416 - DNA, 15 bp, Homo sapiens
cattgctgtgacttc

SEQ ID NO: 1707417 - DNA, 15 bp, Homo sapiens
attgctgtgacttcc

SEQ ID NO: 1707418 - DNA, 15 bp, Homo sapiens
ttgctgtgacttcca

SEQ ID NO: 1707419 - DNA, 15 bp, Homo sapiens
tgctgtgacttccaa

SEQ ID NO: 1707420 - DNA, 15 bp, Homo sapiens
gctgtgacttccaag

SEQ ID NO: 1707421 - DNA, 15 bp, Homo sapiens
ctgtgacttccaagc

SEQ ID NO: 1707422 - DNA, 15 bp, Homo sapiens
tgtgacttccaagca

SEQ ID NO: 1707423 - DNA, 15 bp, Homo sapiens
gtgacttccaagcac

SEQ ID NO: 1707424 - DNA, 15 bp, Homo sapiens
tgacttccaagcaca

SEQ ID NO: 1707425 - DNA, 15 bp, Homo sapiens
gacttccaagcacat

SEQ ID NO: 1707426 - DNA, 15 bp, Homo sapiens
acttccaagcacatg

SEQ ID NO: 1707427 - DNA, 15 bp, Homo sapiens
cttccaagcacatga

SEQ ID NO: 1707428 - DNA, 15 bp, Homo sapiens
ttccaagcacatgat

SEQ ID NO: 1707429 - DNA, 15 bp, Homo sapiens
tccaagcacatgatc

SEQ ID NO: 1707430 - DNA, 15 bp, Homo sapiens
ccaagcacatgatca

SEQ ID NO: 1707431 - DNA, 15 bp, Homo sapiens
caagcacatgatcag

SEQ ID NO: 1707432 - DNA, 15 bp, Homo sapiens
aagcacatgatcaga

SEQ ID NO: 1707433 - DNA, 15 bp, Homo sapiens
agcacatgatcagaa

SEQ ID NO: 1707434 - DNA, 15 bp, Homo sapiens
gcacatgatcagaag

SEQ ID NO: 1707435 - DNA, 15 bp, Homo sapiens
cacatgatcagaaga

SEQ ID NO: 1707436 - DNA, 15 bp, Homo sapiens
acatgatcagaagac

SEQ ID NO: 1707437 - DNA, 15 bp, Homo sapiens
catgatcagaagact

SEQ ID NO: 1707438 - DNA, 15 bp, Homo sapiens
atgatcagaagacta

SEQ ID NO: 1707439 - DNA, 15 bp, Homo sapiens
tgatcagaagactaa

SEQ ID NO: 1707440 - DNA, 15 bp, Homo sapiens
gatcagaagactaat

SEQ ID NO: 1707441 - DNA, 15 bp, Homo sapiens
atcagaagactaatc

SEQ ID NO: 1707442 - DNA, 15 bp, Homo sapiens
tcagaagactaatct

SEQ ID NO: 1707443 - DNA, 15 bp, Homo sapiens
cagaagactaatctc

SEQ ID NO: 1707444 - DNA, 15 bp, Homo sapiens
agaagactaatctca

SEQ ID NO: 1707445 - DNA, 15 bp, Homo sapiens
gaagactaatctcat

SEQ ID NO: 1707446 - DNA, 15 bp, Homo sapiens
aagactaatctcatt

SEQ ID NO: 1707447 - DNA, 15 bp, Homo sapiens
agactaatctcattg

SEQ ID NO: 1707448 - DNA, 15 bp, Homo sapiens
gactaatctcattga

SEQ ID NO: 1707449 - DNA, 15 bp, Homo sapiens
actaatctcattgaa

SEQ ID NO: 1707450 - DNA, 15 bp, Homo sapiens
ctaatctcattgaac

SEQ ID NO: 1707451 - DNA, 15 bp, Homo sapiens
taatctcattgaaca

SEQ ID NO: 1707452 - DNA, 15 bp, Homo sapiens
aatctcattgaacaa

SEQ ID NO: 1707453 - DNA, 15 bp, Homo sapiens
atctcattgaacaaa

SEQ ID NO: 1707454 - DNA, 15 bp, Homo sapiens
tctcattgaacaaag

SEQ ID NO: 1707455 - DNA, 15 bp, Homo sapiens
ctcattgaacaaagt

SEQ ID NO: 1707456 - DNA, 15 bp, Homo sapiens
tcattgaacaaagta

SEQ ID NO: 1707457 - DNA, 15 bp, Homo sapiens
cattgaacaaagtat

SEQ ID NO: 1707458 - DNA, 15 bp, Homo sapiens
attgaacaaagtata

SEQ ID NO: 1707459 - DNA, 15 bp, Homo sapiens
ttgaacaaagtatag

SEQ ID NO: 1707460 - DNA, 15 bp, Homo sapiens
tgaacaaagtataga

SEQ ID NO: 1707461 - DNA, 15 bp, Homo sapiens
gaacaaagtatagat

SEQ ID NO: 1707462 - DNA, 15 bp, Homo sapiens
aacaaagtatagatc

SEQ ID NO: 1707463 - DNA, 15 bp, Homo sapiens
acaaagtatagatca

SEQ ID NO: 1707464 - DNA, 15 bp, Homo sapiens
caaagtatagatcat

SEQ ID NO: 1707465 - DNA, 15 bp, Homo sapiens
aaagtatagatcatt

SEQ ID NO: 1707466 - DNA, 15 bp, Homo sapiens
aagtatagatcattg

SEQ ID NO: 1707467 - DNA, 15 bp, Homo sapiens
agtatagatcattgt

SEQ ID NO: 1707468 - DNA, 15 bp, Homo sapiens
gtatagatcattgtg

SEQ ID NO: 1707469 - DNA, 15 bp, Homo sapiens
tatagatcattgtga

SEQ ID NO: 1707470 - DNA, 15 bp, Homo sapiens
atagatcattgtgat

SEQ ID NO: 1707471 - DNA, 15 bp, Homo sapiens
tagatcattgtgatt

SEQ ID NO: 1707472 - DNA, 15 bp, Homo sapiens
agatcattgtgatta

SEQ ID NO: 1707473 - DNA, 15 bp, Homo sapiens
gatcattgtgattat

SEQ ID NO: 1707474 - DNA, 15 bp, Homo sapiens
atcattgtgattatt

SEQ ID NO: 1707475 - DNA, 15 bp, Homo sapiens
tcattgtgattattg

SEQ ID NO: 1707476 - DNA, 15 bp, Homo sapiens
cattgtgattattgt

SEQ ID NO: 1707477 - DNA, 15 bp, Homo sapiens
attgtgattattgtc

SEQ ID NO: 1707478 - DNA, 15 bp, Homo sapiens
ttgtgattattgtca

SEQ ID NO: 1707479 - DNA, 15 bp, Homo sapiens
tgtgattattgtcaa

SEQ ID NO: 1707480 - DNA, 15 bp, Homo sapiens
gtgattattgtcaaa

SEQ ID NO: 1707481 - DNA, 15 bp, Homo sapiens
tgattattgtcaaac

SEQ ID NO: 1707482 - DNA, 15 bp, Homo sapiens
gattattgtcaaact

SEQ ID NO: 1707483 - DNA, 15 bp, Homo sapiens
attattgtcaaactc

SEQ ID NO: 1707484 - DNA, 15 bp, Homo sapiens
ttattgtcaaactca

SEQ ID NO: 1707485 - DNA, 15 bp, Homo sapiens
tattgtcaaactcat

SEQ ID NO: 1707486 - DNA, 15 bp, Homo sapiens
attgtcaaactcata

SEQ ID NO: 1707487 - DNA, 15 bp, Homo sapiens
ttgtcaaactcatat

SEQ ID NO: 1707488 - DNA, 15 bp, Homo sapiens
tgtcaaactcatatg

SEQ ID NO: 1707489 - DNA, 15 bp, Homo sapiens
gtcaaactcatatgg

SEQ ID NO: 1707490 - DNA, 15 bp, Homo sapiens
tcaaactcatatggt

SEQ ID NO: 1707491 - DNA, 15 bp, Homo sapiens
caaactcatatggtg

SEQ ID NO: 1707492 - DNA, 15 bp, Homo sapiens
aaactcatatggtga

SEQ ID NO: 1707493 - DNA, 15 bp, Homo sapiens
aactcatatggtgat

SEQ ID NO: 1707494 - DNA, 15 bp, Homo sapiens
actcatatggtgatt

SEQ ID NO: 1707495 - DNA, 15 bp, Homo sapiens
ctcatatggtgattt

SEQ ID NO: 1707496 - DNA, 15 bp, Homo sapiens
tcatatggtgatttg

SEQ ID NO: 1707497 - DNA, 15 bp, Homo sapiens
catatggtgatttgc

SEQ ID NO: 1707498 - DNA, 15 bp, Homo sapiens
atatggtgatttgca

SEQ ID NO: 1707499 - DNA, 15 bp, Homo sapiens
tatggtgatttgcac

SEQ ID NO: 1707500 - DNA, 15 bp, Homo sapiens
atggtgatttgcaca

SEQ ID NO: 1707501 - DNA, 15 bp, Homo sapiens
tggtgatttgcacat

SEQ ID NO: 1707502 - DNA, 15 bp, Homo sapiens
ggtgatttgcacatg

SEQ ID NO: 1707503 - DNA, 15 bp, Homo sapiens
gtgatttgcacatgc

SEQ ID NO: 1707504 - DNA, 15 bp, Homo sapiens
tgatttgcacatgca

SEQ ID NO: 1707505 - DNA, 15 bp, Homo sapiens
gatttgcacatgcag

SEQ ID NO: 1707506 - DNA, 15 bp, Homo sapiens
atttgcacatgcagc

SEQ ID NO: 1707507 - DNA, 15 bp, Homo sapiens
tttgcacatgcagca

SEQ ID NO: 1707508 - DNA, 15 bp, Homo sapiens
ttgcacatgcagcaa

SEQ ID NO: 1707509 - DNA, 15 bp, Homo sapiens
tgcacatgcagcaag

SEQ ID NO: 1707510 - DNA, 15 bp, Homo sapiens
gcacatgcagcaaga

SEQ ID NO: 1707511 - DNA, 15 bp, Homo sapiens
cacatgcagcaagat

SEQ ID NO: 1707512 - DNA, 15 bp, Homo sapiens
acatgcagcaagata

SEQ ID NO: 1707513 - DNA, 15 bp, Homo sapiens
catgcagcaagatac

SEQ ID NO: 1707514 - DNA, 15 bp, Homo sapiens
atgcagcaagatacc

SEQ ID NO: 1707515 - DNA, 15 bp, Homo sapiens
tgcagcaagatacct

SEQ ID NO: 1707516 - DNA, 15 bp, Homo sapiens
gcagcaagataccta

SEQ ID NO: 1707517 - DNA, 15 bp, Homo sapiens
cagcaagatacctac

SEQ ID NO: 1707518 - DNA, 15 bp, Homo sapiens
agcaagatacctact

SEQ ID NO: 1707519 - DNA, 15 bp, Homo sapiens
gcaagatacctactg

SEQ ID NO: 1707520 - DNA, 15 bp, Homo sapiens
caagatacctactgt

SEQ ID NO: 1707521 - DNA, 15 bp, Homo sapiens
aagatacctactgtt

SEQ ID NO: 1707522 - DNA, 15 bp, Homo sapiens
agatacctactgttc

SEQ ID NO: 1707523 - DNA, 15 bp, Homo sapiens
gatacctactgttca

SEQ ID NO: 1707524 - DNA, 15 bp, Homo sapiens
atacctactgttcaa

SEQ ID NO: 1707525 - DNA, 15 bp, Homo sapiens
tacctactgttcaag

SEQ ID NO: 1707526 - DNA, 15 bp, Homo sapiens
acctactgttcaagt

SEQ ID NO: 1707527 - DNA, 15 bp, Homo sapiens
cctactgttcaagtt

SEQ ID NO: 1707528 - DNA, 15 bp, Homo sapiens
ctactgttcaagttc

SEQ ID NO: 1707529 - DNA, 15 bp, Homo sapiens
tactgttcaagttca

SEQ ID NO: 1707530 - DNA, 15 bp, Homo sapiens
actgttcaagttcag

SEQ ID NO: 1707531 - DNA, 15 bp, Homo sapiens
ctgttcaagttcagt

SEQ ID NO: 1707532 - DNA, 15 bp, Homo sapiens
tgttcaagttcagtt

SEQ ID NO: 1707533 - DNA, 15 bp, Homo sapiens
gttcaagttcagtta

SEQ ID NO: 1707534 - DNA, 15 bp, Homo sapiens
ttcaagttcagttat

SEQ ID NO: 1707535 - DNA, 15 bp, Homo sapiens
tcaagttcagttatt

SEQ ID NO: 1707536 - DNA, 15 bp, Homo sapiens
caagttcagttattt

SEQ ID NO: 1707537 - DNA, 15 bp, Homo sapiens
aagttcagttatttc

SEQ ID NO: 1707538 - DNA, 15 bp, Homo sapiens
agttcagttatttcc

SEQ ID NO: 1707539 - DNA, 15 bp, Homo sapiens
gttcagttatttcca

SEQ ID NO: 1707540 - DNA, 15 bp, Homo sapiens
ttcagttatttccaa

SEQ ID NO: 1707541 - DNA, 15 bp, Homo sapiens
tcagttatttccaaa

SEQ ID NO: 1707542 - DNA, 15 bp, Homo sapiens
cagttatttccaaaa

SEQ ID NO: 1707543 - DNA, 15 bp, Homo sapiens
agttatttccaaaag

SEQ ID NO: 1707544 - DNA, 15 bp, Homo sapiens
gttatttccaaaagt

SEQ ID NO: 1707545 - DNA, 15 bp, Homo sapiens
ttatttccaaaagta

SEQ ID NO: 1707546 - DNA, 15 bp, Homo sapiens
tatttccaaaagtat

SEQ ID NO: 1707547 - DNA, 15 bp, Homo sapiens
atttccaaaagtatt

SEQ ID NO: 1707548 - DNA, 15 bp, Homo sapiens
tttccaaaagtattg

SEQ ID NO: 1707549 - DNA, 15 bp, Homo sapiens
ttccaaaagtattgc

SEQ ID NO: 1707550 - DNA, 15 bp, Homo sapiens
tccaaaagtattgct

SEQ ID NO: 1707551 - DNA, 15 bp, Homo sapiens
ccaaaagtattgctc

SEQ ID NO: 1707552 - DNA, 15 bp, Homo sapiens
caaaagtattgctcc

SEQ ID NO: 1707553 - DNA, 15 bp, Homo sapiens
aaaagtattgctcca

SEQ ID NO: 1707554 - DNA, 15 bp, Homo sapiens
aaagtattgctccaa

SEQ ID NO: 1707555 - DNA, 15 bp, Homo sapiens
aagtattgctccaag

SEQ ID NO: 1707556 - DNA, 15 bp, Homo sapiens
agtattgctccaaga

SEQ ID NO: 1707557 - DNA, 15 bp, Homo sapiens
gtattgctccaagac

SEQ ID NO: 1707558 - DNA, 15 bp, Homo sapiens
tattgctccaagaca

SEQ ID NO: 1707559 - DNA, 15 bp, Homo sapiens
attgctccaagacag

SEQ ID NO: 1707560 - DNA, 15 bp, Homo sapiens
ttgctccaagacagt

SEQ ID NO: 1707561 - DNA, 15 bp, Homo sapiens
tgctccaagacagtt

SEQ ID NO: 1707562 - DNA, 15 bp, Homo sapiens
gctccaagacagttt

SEQ ID NO: 1707563 - DNA, 15 bp, Homo sapiens
ctccaagacagtttg

SEQ ID NO: 1707564 - DNA, 15 bp, Homo sapiens
tccaagacagtttgg

SEQ ID NO: 1707565 - DNA, 15 bp, Homo sapiens
ccaagacagtttgga

SEQ ID NO: 1707566 - DNA, 15 bp, Homo sapiens
caagacagtttggaa

SEQ ID NO: 1707567 - DNA, 15 bp, Homo sapiens
aagacagtttggaaa

SEQ ID NO: 1707568 - DNA, 15 bp, Homo sapiens
agacagtttggaaaa

SEQ ID NO: 1707569 - DNA, 15 bp, Homo sapiens
gacagtttggaaaaa

SEQ ID NO: 1707570 - DNA, 15 bp, Homo sapiens
acagtttggaaaaaa

SEQ ID NO: 1707571 - DNA, 15 bp, Homo sapiens
cagtttggaaaaaat

SEQ ID NO: 1707572 - DNA, 15 bp, Homo sapiens
agtttggaaaaaata

SEQ ID NO: 1707573 - DNA, 15 bp, Homo sapiens
gtttggaaaaaataa

SEQ ID NO: 1707574 - DNA, 15 bp, Homo sapiens
tttggaaaaaataaa

SEQ ID NO: 1707575 - DNA, 15 bp, Homo sapiens
ttggaaaaaataaaa

SEQ ID NO: 1707576 - DNA, 15 bp, Homo sapiens
tggaaaaaataaaaa

SEQ ID NO: 1707577 - DNA, 15 bp, Homo sapiens
ggaaaaaataaaaaa

SEQ ID NO: 1707578 - DNA, 15 bp, Homo sapiens
aaaaataaaaaaaga

SEQ ID NO: 1707579 - DNA, 15 bp, Homo sapiens
aaaataaaaaaagaa

SEQ ID NO: 1707580 - DNA, 15 bp, Homo sapiens
aaataaaaaaagaat

SEQ ID NO: 1707581 - DNA, 15 bp, Homo sapiens
aataaaaaaagaatt

SEQ ID NO: 1707582 - DNA, 15 bp, Homo sapiens
ataaaaaaagaattg

SEQ ID NO: 1707583 - DNA, 15 bp, Homo sapiens
taaaaaaagaattgg

SEQ ID NO: 1707584 - DNA, 15 bp, Homo sapiens
aaaaaaagaattgga

SEQ ID NO: 1707585 - DNA, 15 bp, Homo sapiens
aaaaaagaattggag

SEQ ID NO: 1707586 - DNA, 15 bp, Homo sapiens
aaaagaattggagag

SEQ ID NO: 1707587 - DNA, 15 bp, Homo sapiens
aaagaattggagagt

SEQ ID NO: 1707588 - DNA, 15 bp, Homo sapiens
aagaattggagagtt

SEQ ID NO: 1707589 - DNA, 15 bp, Homo sapiens
agaattggagagttt

SEQ ID NO: 1707590 - DNA, 15 bp, Homo sapiens
gaattggagagtttc

SEQ ID NO: 1707591 - DNA, 15 bp, Homo sapiens
aattggagagtttca

SEQ ID NO: 1707592 - DNA, 15 bp, Homo sapiens
attggagagtttcag

SEQ ID NO: 1707593 - DNA, 15 bp, Homo sapiens
ttggagagtttcaga

SEQ ID NO: 1707594 - DNA, 15 bp, Homo sapiens
tggagagtttcagaa

SEQ ID NO: 1707595 - DNA, 15 bp, Homo sapiens
ggagagtttcagaag

SEQ ID NO: 1707596 - DNA, 15 bp, Homo sapiens
gagagtttcagaagc

SEQ ID NO: 1707597 - DNA, 15 bp, Homo sapiens
agagtttcagaagca

SEQ ID NO: 1707598 - DNA, 15 bp, Homo sapiens
gagtttcagaagcac

SEQ ID NO: 1707599 - DNA, 15 bp, Homo sapiens
agtttcagaagcact

SEQ ID NO: 1707600 - DNA, 15 bp, Homo sapiens
gtttcagaagcactg

SEQ ID NO: 1707601 - DNA, 15 bp, Homo sapiens
tttcagaagcactga

SEQ ID NO: 1707602 - DNA, 15 bp, Homo sapiens
ttcagaagcactgat

SEQ ID NO: 1707603 - DNA, 15 bp, Homo sapiens
tcagaagcactgatc

SEQ ID NO: 1707604 - DNA, 15 bp, Homo sapiens
cagaagcactgatcc

SEQ ID NO: 1707605 - DNA, 15 bp, Homo sapiens
agaagcactgatcca

SEQ ID NO: 1707606 - DNA, 15 bp, Homo sapiens
gaagcactgatccag

SEQ ID NO: 1707607 - DNA, 15 bp, Homo sapiens
aagcactgatccaga

SEQ ID NO: 1707608 - DNA, 15 bp, Homo sapiens
agcactgatccagag

SEQ ID NO: 1707609 - DNA, 15 bp, Homo sapiens
gcactgatccagagt

SEQ ID NO: 1707610 - DNA, 15 bp, Homo sapiens
cactgatccagagta

SEQ ID NO: 1707611 - DNA, 15 bp, Homo sapiens
actgatccagagtat

SEQ ID NO: 1707612 - DNA, 15 bp, Homo sapiens
ctgatccagagtatt

SEQ ID NO: 1707613 - DNA, 15 bp, Homo sapiens
tgatccagagtattt

SEQ ID NO: 1707614 - DNA, 15 bp, Homo sapiens
gatccagagtatttg

SEQ ID NO: 1707615 - DNA, 15 bp, Homo sapiens
atccagagtatttgc

SEQ ID NO: 1707616 - DNA, 15 bp, Homo sapiens
tccagagtatttgcc

SEQ ID NO: 1707617 - DNA, 15 bp, Homo sapiens
ccagagtatttgccc

SEQ ID NO: 1707618 - DNA, 15 bp, Homo sapiens
cagagtatttgcccc

SEQ ID NO: 1707619 - DNA, 15 bp, Homo sapiens
agtatttgccccttt

SEQ ID NO: 1707620 - DNA, 15 bp, Homo sapiens
gtatttgcccctttg

SEQ ID NO: 1707621 - DNA, 15 bp, Homo sapiens
tatttgcccctttgt

SEQ ID NO: 1707622 - DNA, 15 bp, Homo sapiens
atttgcccctttgta

SEQ ID NO: 1707623 - DNA, 15 bp, Homo sapiens
tttgcccctttgtac

SEQ ID NO: 1707624 - DNA, 15 bp, Homo sapiens
ttgcccctttgtact

SEQ ID NO: 1707625 - DNA, 15 bp, Homo sapiens
tgcccctttgtactt

SEQ ID NO: 1707626 - DNA, 15 bp, Homo sapiens
gcccctttgtacttt

SEQ ID NO: 1707627 - DNA, 15 bp, Homo sapiens
cccctttgtactttg

SEQ ID NO: 1707628 - DNA, 15 bp, Homo sapiens
ccctttgtactttgt

SEQ ID NO: 1707629 - DNA, 15 bp, Homo sapiens
cctttgtactttgta

SEQ ID NO: 1707630 - DNA, 15 bp, Homo sapiens
ctttgtactttgtac

SEQ ID NO: 1707631 - DNA, 15 bp, Homo sapiens
tttgtactttgtact

SEQ ID NO: 1707632 - DNA, 15 bp, Homo sapiens
ttgtactttgtactc

SEQ ID NO: 1707633 - DNA, 15 bp, Homo sapiens
tgtactttgtactcc

SEQ ID NO: 1707634 - DNA, 15 bp, Homo sapiens
gtactttgtactccc

SEQ ID NO: 1707635 - DNA, 15 bp, Homo sapiens
tactttgtactccct

SEQ ID NO: 1707636 - DNA, 15 bp, Homo sapiens
actttgtactccctc

SEQ ID NO: 1707637 - DNA, 15 bp, Homo sapiens
ctttgtactccctcc

SEQ ID NO: 1707638 - DNA, 15 bp, Homo sapiens
tttgtactccctccc

SEQ ID NO: 1707639 - DNA, 15 bp, Homo sapiens
ttgtactccctcccg

SEQ ID NO: 1707640 - DNA, 15 bp, Homo sapiens
tgtactccctcccgg

SEQ ID NO: 1707641 - DNA, 15 bp, Homo sapiens
gtactccctcccgga

SEQ ID NO: 1707642 - DNA, 15 bp, Homo sapiens
tactccctcccggac

SEQ ID NO: 1707643 - DNA, 15 bp, Homo sapiens
actccctcccggaca

SEQ ID NO: 1707644 - DNA, 15 bp, Homo sapiens
ctccctcccggacag

SEQ ID NO: 1707645 - DNA, 15 bp, Homo sapiens
tccctcccggacaga

SEQ ID NO: 1707646 - DNA, 15 bp, Homo sapiens
ccctcccggacagag

SEQ ID NO: 1707647 - DNA, 15 bp, Homo sapiens
cctcccggacagaga

SEQ ID NO: 1707648 - DNA, 15 bp, Homo sapiens
ctcccggacagagag

SEQ ID NO: 1707649 - DNA, 15 bp, Homo sapiens
tcccggacagagagc

SEQ ID NO: 1707650 - DNA, 15 bp, Homo sapiens
cccggacagagagca

SEQ ID NO: 1707651 - DNA, 15 bp, Homo sapiens
ccggacagagagcag

SEQ ID NO: 1707652 - DNA, 15 bp, Homo sapiens
cggacagagagcagg

SEQ ID NO: 1707653 - DNA, 15 bp, Homo sapiens
ggacagagagcagga

SEQ ID NO: 1707654 - DNA, 15 bp, Homo sapiens
gacagagagcaggag

SEQ ID NO: 1707655 - DNA, 15 bp, Homo sapiens
acagagagcaggaga

SEQ ID NO: 1707656 - DNA, 15 bp, Homo sapiens
cagagagcaggagaa

SEQ ID NO: 1707657 - DNA, 15 bp, Homo sapiens
agagagcaggagaat

SEQ ID NO: 1707658 - DNA, 15 bp, Homo sapiens
gagagcaggagaatt

SEQ ID NO: 1707659 - DNA, 15 bp, Homo sapiens
agagcaggagaatta

SEQ ID NO: 1707660 - DNA, 15 bp, Homo sapiens
gagcaggagaattaa

SEQ ID NO: 1707661 - DNA, 15 bp, Homo sapiens
agcaggagaattaaa

SEQ ID NO: 1707662 - DNA, 15 bp, Homo sapiens
gcaggagaattaaaa

SEQ ID NO: 1707663 - DNA, 15 bp, Homo sapiens
caggagaattaaaat

SEQ ID NO: 1707664 - DNA, 15 bp, Homo sapiens
aggagaattaaaata

SEQ ID NO: 1707665 - DNA, 15 bp, Homo sapiens
ggagaattaaaatag

SEQ ID NO: 1707666 - DNA, 15 bp, Homo sapiens
gagaattaaaatagc

SEQ ID NO: 1707667 - DNA, 15 bp, Homo sapiens
agaattaaaatagcc

SEQ ID NO: 1707668 - DNA, 15 bp, Homo sapiens
gaattaaaatagccc

SEQ ID NO: 1707669 - DNA, 15 bp, Homo sapiens
aattaaaatagccct

SEQ ID NO: 1707670 - DNA, 15 bp, Homo sapiens
attaaaatagccctg

SEQ ID NO: 1707671 - DNA, 15 bp, Homo sapiens
ttaaaatagccctgg

SEQ ID NO: 1707672 - DNA, 15 bp, Homo sapiens
taaaatagccctggg

SEQ ID NO: 1707673 - DNA, 15 bp, Homo sapiens
aaaatagccctgggc

SEQ ID NO: 1707674 - DNA, 15 bp, Homo sapiens
aaatagccctgggcc

SEQ ID NO: 1707675 - DNA, 15 bp, Homo sapiens
aatagccctgggcca

SEQ ID NO: 1707676 - DNA, 15 bp, Homo sapiens
atagccctgggccag

SEQ ID NO: 1707677 - DNA, 15 bp, Homo sapiens
tagccctgggccaga

SEQ ID NO: 1707678 - DNA, 15 bp, Homo sapiens
agccctgggccagaa

SEQ ID NO: 1707679 - DNA, 15 bp, Homo sapiens
gccctgggccagaaa

SEQ ID NO: 1707680 - DNA, 15 bp, Homo sapiens
ccctgggccagaaag

SEQ ID NO: 1707681 - DNA, 15 bp, Homo sapiens
cctgggccagaaagt

SEQ ID NO: 1707682 - DNA, 15 bp, Homo sapiens
ctgggccagaaagta

SEQ ID NO: 1707683 - DNA, 15 bp, Homo sapiens
tgggccagaaagtaa

SEQ ID NO: 1707684 - DNA, 15 bp, Homo sapiens
gggccagaaagtaaa

SEQ ID NO: 1707685 - DNA, 15 bp, Homo sapiens
ggccagaaagtaaac

SEQ ID NO: 1707686 - DNA, 15 bp, Homo sapiens
gccagaaagtaaacg

SEQ ID NO: 1707687 - DNA, 15 bp, Homo sapiens
ccagaaagtaaacgt

SEQ ID NO: 1707688 - DNA, 15 bp, Homo sapiens
cagaaagtaaacgtg

SEQ ID NO: 1707689 - DNA, 15 bp, Homo sapiens
agaaagtaaacgtgt

SEQ ID NO: 1707690 - DNA, 15 bp, Homo sapiens
gaaagtaaacgtgta

SEQ ID NO: 1707691 - DNA, 15 bp, Homo sapiens
aaagtaaacgtgtat

SEQ ID NO: 1707692 - DNA, 15 bp, Homo sapiens
aagtaaacgtgtatt

SEQ ID NO: 1707693 - DNA, 15 bp, Homo sapiens
agtaaacgtgtattc

SEQ ID NO: 1707694 - DNA, 15 bp, Homo sapiens
gtaaacgtgtattct

SEQ ID NO: 1707695 - DNA, 15 bp, Homo sapiens
taaacgtgtattctt

SEQ ID NO: 1707696 - DNA, 15 bp, Homo sapiens
aaacgtgtattctta

SEQ ID NO: 1707697 - DNA, 15 bp, Homo sapiens
aacgtgtattcttat

SEQ ID NO: 1707698 - DNA, 15 bp, Homo sapiens
acgtgtattcttatc

SEQ ID NO: 1707699 - DNA, 15 bp, Homo sapiens
cgtgtattcttatct

SEQ ID NO: 1707700 - DNA, 15 bp, Homo sapiens
gtgtattcttatctt

SEQ ID NO: 1707701 - DNA, 15 bp, Homo sapiens
tgtattcttatcttt

SEQ ID NO: 1707702 - DNA, 15 bp, Homo sapiens
gtattcttatctttt

SEQ ID NO: 1707703 - DNA, 15 bp, Homo sapiens
tattcttatcttttg

SEQ ID NO: 1707704 - DNA, 15 bp, Homo sapiens
attcttatcttttgt

SEQ ID NO: 1707705 - DNA, 15 bp, Homo sapiens
ttcttatcttttgta

SEQ ID NO: 1707706 - DNA, 15 bp, Homo sapiens
tcttatcttttgtat

SEQ ID NO: 1707707 - DNA, 15 bp, Homo sapiens
cttatcttttgtata

SEQ ID NO: 1707708 - DNA, 15 bp, Homo sapiens
ttatcttttgtatat

SEQ ID NO: 1707709 - DNA, 15 bp, Homo sapiens
tatcttttgtatatg

SEQ ID NO: 1707710 - DNA, 15 bp, Homo sapiens
atcttttgtatatga

SEQ ID NO: 1707711 - DNA, 15 bp, Homo sapiens
tcttttgtatatgag

SEQ ID NO: 1707712 - DNA, 15 bp, Homo sapiens
cttttgtatatgagg

SEQ ID NO: 1707713 - DNA, 15 bp, Homo sapiens
ttttgtatatgaggg

SEQ ID NO: 1707714 - DNA, 15 bp, Homo sapiens
tttgtatatgagggc

SEQ ID NO: 1707715 - DNA, 15 bp, Homo sapiens
ttgtatatgagggca

SEQ ID NO: 1707716 - DNA, 15 bp, Homo sapiens
tgtatatgagggcaa

SEQ ID NO: 1707717 - DNA, 15 bp, Homo sapiens
gtatatgagggcaaa

SEQ ID NO: 1707718 - DNA, 15 bp, Homo sapiens
tatatgagggcaaac

SEQ ID NO: 1707719 - DNA, 15 bp, Homo sapiens
atatgagggcaaact

SEQ ID NO: 1707720 - DNA, 15 bp, Homo sapiens
tatgagggcaaactg

SEQ ID NO: 1707721 - DNA, 15 bp, Homo sapiens
atgagggcaaactgc

SEQ ID NO: 1707722 - DNA, 15 bp, Homo sapiens
tgagggcaaactgct

SEQ ID NO: 1707723 - DNA, 15 bp, Homo sapiens
gagggcaaactgctt

SEQ ID NO: 1707724 - DNA, 15 bp, Homo sapiens
agggcaaactgcttt

SEQ ID NO: 1707725 - DNA, 15 bp, Homo sapiens
gggcaaactgctttt

SEQ ID NO: 1707726 - DNA, 15 bp, Homo sapiens
ggcaaactgcttttg

SEQ ID NO: 1707727 - DNA, 15 bp, Homo sapiens
gcaaactgcttttga

SEQ ID NO: 1707728 - DNA, 15 bp, Homo sapiens
caaactgcttttgat

SEQ ID NO: 1707729 - DNA, 15 bp, Homo sapiens
aaactgcttttgatc

SEQ ID NO: 1707730 - DNA, 15 bp, Homo sapiens
aactgcttttgatcc

SEQ ID NO: 1707731 - DNA, 15 bp, Homo sapiens
actgcttttgatcct

SEQ ID NO: 1707732 - DNA, 15 bp, Homo sapiens
ctgcttttgatcctt

SEQ ID NO: 1707733 - DNA, 15 bp, Homo sapiens
tgcttttgatccttc

SEQ ID NO: 1707734 - DNA, 15 bp, Homo sapiens
gcttttgatccttcc

SEQ ID NO: 1707735 - DNA, 15 bp, Homo sapiens
cttttgatccttcct

SEQ ID NO: 1707736 - DNA, 15 bp, Homo sapiens
ttttgatccttcctg

SEQ ID NO: 1707737 - DNA, 15 bp, Homo sapiens
tttgatccttcctgc

SEQ ID NO: 1707738 - DNA, 15 bp, Homo sapiens
ttgatccttcctgct

SEQ ID NO: 1707739 - DNA, 15 bp, Homo sapiens
tgatccttcctgctg

SEQ ID NO: 1707740 - DNA, 15 bp, Homo sapiens
gatccttcctgctga

SEQ ID NO: 1707741 - DNA, 15 bp, Homo sapiens
atccttcctgctgat

SEQ ID NO: 1707742 - DNA, 15 bp, Homo sapiens
tccttcctgctgatg

SEQ ID NO: 1707743 - DNA, 15 bp, Homo sapiens
ccttcctgctgatgg

SEQ ID NO: 1707744 - DNA, 15 bp, Homo sapiens
cttcctgctgatggg

SEQ ID NO: 1707745 - DNA, 15 bp, Homo sapiens
ttcctgctgatggga

SEQ ID NO: 1707746 - DNA, 15 bp, Homo sapiens
tcctgctgatgggaa

SEQ ID NO: 1707747 - DNA, 15 bp, Homo sapiens
cctgctgatgggaat

SEQ ID NO: 1707748 - DNA, 15 bp, Homo sapiens
ctgctgatgggaatc

SEQ ID NO: 1707749 - DNA, 15 bp, Homo sapiens
tgctgatgggaatca

SEQ ID NO: 1707750 - DNA, 15 bp, Homo sapiens
gctgatgggaatcaa

SEQ ID NO: 1707751 - DNA, 15 bp, Homo sapiens
ctgatgggaatcaag

SEQ ID NO: 1707752 - DNA, 15 bp, Homo sapiens
tgatgggaatcaaga

SEQ ID NO: 1707753 - DNA, 15 bp, Homo sapiens
gatgggaatcaagaa

SEQ ID NO: 1707754 - DNA, 15 bp, Homo sapiens
atgggaatcaagaaa

SEQ ID NO: 1707755 - DNA, 15 bp, Homo sapiens
tgggaatcaagaaag

SEQ ID NO: 1707756 - DNA, 15 bp, Homo sapiens
gggaatcaagaaagg

SEQ ID NO: 1707757 - DNA, 15 bp, Homo sapiens
ggaatcaagaaaggc

SEQ ID NO: 1707758 - DNA, 15 bp, Homo sapiens
gaatcaagaaaggca

SEQ ID NO: 1707759 - DNA, 15 bp, Homo sapiens
aatcaagaaaggcac

SEQ ID NO: 1707760 - DNA, 15 bp, Homo sapiens
atcaagaaaggcaca

SEQ ID NO: 1707761 - DNA, 15 bp, Homo sapiens
tcaagaaaggcacat

SEQ ID NO: 1707762 - DNA, 15 bp, Homo sapiens
caagaaaggcacatt

SEQ ID NO: 1707763 - DNA, 15 bp, Homo sapiens
aagaaaggcacattt

SEQ ID NO: 1707764 - DNA, 15 bp, Homo sapiens
agaaaggcacattta

SEQ ID NO: 1707765 - DNA, 15 bp, Homo sapiens
gaaaggcacatttac

SEQ ID NO: 1707766 - DNA, 15 bp, Homo sapiens
aaaggcacatttacc

SEQ ID NO: 1707767 - DNA, 15 bp, Homo sapiens
aaggcacatttacca

SEQ ID NO: 1707768 - DNA, 15 bp, Homo sapiens
aggcacatttaccaa

SEQ ID NO: 1707769 - DNA, 15 bp, Homo sapiens
ggcacatttaccaag

SEQ ID NO: 1707770 - DNA, 15 bp, Homo sapiens
gcacatttaccaagt

SEQ ID NO: 1707771 - DNA, 15 bp, Homo sapiens
cacatttaccaagtt

SEQ ID NO: 1707772 - DNA, 15 bp, Homo sapiens
acatttaccaagtta

SEQ ID NO: 1707773 - DNA, 15 bp, Homo sapiens
catttaccaagttag

SEQ ID NO: 1707774 - DNA, 15 bp, Homo sapiens
atttaccaagttagt

SEQ ID NO: 1707775 - DNA, 15 bp, Homo sapiens
tttaccaagttagta

SEQ ID NO: 1707776 - DNA, 15 bp, Homo sapiens
ttaccaagttagtaa

SEQ ID NO: 1707777 - DNA, 15 bp, Homo sapiens
taccaagttagtaac

SEQ ID NO: 1707778 - DNA, 15 bp, Homo sapiens
accaagttagtaact

SEQ ID NO: 1707779 - DNA, 15 bp, Homo sapiens
ccaagttagtaactg

SEQ ID NO: 1707780 - DNA, 15 bp, Homo sapiens
caagttagtaactgc

SEQ ID NO: 1707781 - DNA, 15 bp, Homo sapiens
aagttagtaactgca

SEQ ID NO: 1707782 - DNA, 15 bp, Homo sapiens
agttagtaactgcat

SEQ ID NO: 1707783 - DNA, 15 bp, Homo sapiens
gttagtaactgcata

SEQ ID NO: 1707784 - DNA, 15 bp, Homo sapiens
ttagtaactgcatac

SEQ ID NO: 1707785 - DNA, 15 bp, Homo sapiens
tagtaactgcatacc

SEQ ID NO: 1707786 - DNA, 15 bp, Homo sapiens
agtaactgcatacca

SEQ ID NO: 1707787 - DNA, 15 bp, Homo sapiens
gtaactgcataccaa

SEQ ID NO: 1707788 - DNA, 15 bp, Homo sapiens
taactgcataccaag

SEQ ID NO: 1707789 - DNA, 15 bp, Homo sapiens
aactgcataccaagg

SEQ ID NO: 1707790 - DNA, 15 bp, Homo sapiens
actgcataccaaggt

SEQ ID NO: 1707791 - DNA, 15 bp, Homo sapiens
ctgcataccaaggtc

SEQ ID NO: 1707792 - DNA, 15 bp, Homo sapiens
tgcataccaaggtca

SEQ ID NO: 1707793 - DNA, 15 bp, Homo sapiens
gcataccaaggtcaa

SEQ ID NO: 1707794 - DNA, 15 bp, Homo sapiens
cataccaaggtcaat

SEQ ID NO: 1707795 - DNA, 15 bp, Homo sapiens
ataccaaggtcaatg

SEQ ID NO: 1707796 - DNA, 15 bp, Homo sapiens
taccaaggtcaatgt

SEQ ID NO: 1707797 - DNA, 15 bp, Homo sapiens
accaaggtcaatgtt

SEQ ID NO: 1707798 - DNA, 15 bp, Homo sapiens
ccaaggtcaatgttg

SEQ ID NO: 1707799 - DNA, 15 bp, Homo sapiens
caaggtcaatgttga

SEQ ID NO: 1707800 - DNA, 15 bp, Homo sapiens
aaggtcaatgttgat

SEQ ID NO: 1707801 - DNA, 15 bp, Homo sapiens
aggtcaatgttgatt

SEQ ID NO: 1707802 - DNA, 15 bp, Homo sapiens
ggtcaatgttgattt

SEQ ID NO: 1707803 - DNA, 15 bp, Homo sapiens
gtcaatgttgatttt

SEQ ID NO: 1707804 - DNA, 15 bp, Homo sapiens
tcaatgttgattttc

SEQ ID NO: 1707805 - DNA, 15 bp, Homo sapiens
caatgttgattttct

SEQ ID NO: 1707806 - DNA, 15 bp, Homo sapiens
aatgttgattttctc

SEQ ID NO: 1707807 - DNA, 15 bp, Homo sapiens
atgttgattttctca

SEQ ID NO: 1707808 - DNA, 15 bp, Homo sapiens
tgttgattttctcag

SEQ ID NO: 1707809 - DNA, 15 bp, Homo sapiens
gttgattttctcagg

SEQ ID NO: 1707810 - DNA, 15 bp, Homo sapiens
ttgattttctcaggg

SEQ ID NO: 1707811 - DNA, 15 bp, Homo sapiens
tgattttctcagggg

SEQ ID NO: 1707812 - DNA, 15 bp, Homo sapiens
gattttctcagggga

SEQ ID NO: 1707813 - DNA, 15 bp, Homo sapiens
attttctcaggggaa

SEQ ID NO: 1707814 - DNA, 15 bp, Homo sapiens
ttttctcaggggaag

SEQ ID NO: 1707815 - DNA, 15 bp, Homo sapiens
tttctcaggggaaga

SEQ ID NO: 1707816 - DNA, 15 bp, Homo sapiens
ttctcaggggaagat

SEQ ID NO: 1707817 - DNA, 15 bp, Homo sapiens
tctcaggggaagata

SEQ ID NO: 1707818 - DNA, 15 bp, Homo sapiens
ctcaggggaagatac

SEQ ID NO: 1707819 - DNA, 15 bp, Homo sapiens
tcaggggaagatacc

SEQ ID NO: 1707820 - DNA, 15 bp, Homo sapiens
caggggaagatacca

SEQ ID NO: 1707821 - DNA, 15 bp, Homo sapiens
aggggaagataccac

SEQ ID NO: 1707822 - DNA, 15 bp, Homo sapiens
ggggaagataccaca

SEQ ID NO: 1707823 - DNA, 15 bp, Homo sapiens
gggaagataccacat

SEQ ID NO: 1707824 - DNA, 15 bp, Homo sapiens
ggaagataccacatg

SEQ ID NO: 1707825 - DNA, 15 bp, Homo sapiens
gaagataccacatgc

SEQ ID NO: 1707826 - DNA, 15 bp, Homo sapiens
aagataccacatgct

SEQ ID NO: 1707827 - DNA, 15 bp, Homo sapiens
agataccacatgctg

SEQ ID NO: 1707828 - DNA, 15 bp, Homo sapiens
gataccacatgctgt

SEQ ID NO: 1707829 - DNA, 15 bp, Homo sapiens
ataccacatgctgta

SEQ ID NO: 1707830 - DNA, 15 bp, Homo sapiens
taccacatgctgtat

SEQ ID NO: 1707831 - DNA, 15 bp, Homo sapiens
accacatgctgtatg

SEQ ID NO: 1707832 - DNA, 15 bp, Homo sapiens
ccacatgctgtatgg

SEQ ID NO: 1707833 - DNA, 15 bp, Homo sapiens
cacatgctgtatggc

SEQ ID NO: 1707834 - DNA, 15 bp, Homo sapiens
acatgctgtatggca

SEQ ID NO: 1707835 - DNA, 15 bp, Homo sapiens
catgctgtatggcag

SEQ ID NO: 1707836 - DNA, 15 bp, Homo sapiens
atgctgtatggcagc

SEQ ID NO: 1707837 - DNA, 15 bp, Homo sapiens
tgctgtatggcagcg

SEQ ID NO: 1707838 - DNA, 15 bp, Homo sapiens
gctgtatggcagcgc

SEQ ID NO: 1707839 - DNA, 15 bp, Homo sapiens
ctgtatggcagcgcc

SEQ ID NO: 1707840 - DNA, 15 bp, Homo sapiens
tgtatggcagcgcct

SEQ ID NO: 1707841 - DNA, 15 bp, Homo sapiens
gtatggcagcgcctc

SEQ ID NO: 1707842 - DNA, 15 bp, Homo sapiens
tatggcagcgcctct

SEQ ID NO: 1707843 - DNA, 15 bp, Homo sapiens
atggcagcgcctctt

SEQ ID NO: 1707844 - DNA, 15 bp, Homo sapiens
tggcagcgcctcttg

SEQ ID NO: 1707845 - DNA, 15 bp, Homo sapiens
ggcagcgcctcttgg

SEQ ID NO: 1707846 - DNA, 15 bp, Homo sapiens
gcagcgcctcttgga

SEQ ID NO: 1707847 - DNA, 15 bp, Homo sapiens
cagcgcctcttggag

SEQ ID NO: 1707848 - DNA, 15 bp, Homo sapiens
agcgcctcttggagc

SEQ ID NO: 1707849 - DNA, 15 bp, Homo sapiens
gcgcctcttggagct

SEQ ID NO: 1707850 - DNA, 15 bp, Homo sapiens
cgcctcttggagcta

SEQ ID NO: 1707851 - DNA, 15 bp, Homo sapiens
gcctcttggagctaa

SEQ ID NO: 1707852 - DNA, 15 bp, Homo sapiens
cctcttggagctaat

SEQ ID NO: 1707853 - DNA, 15 bp, Homo sapiens
ctcttggagctaata

SEQ ID NO: 1707854 - DNA, 15 bp, Homo sapiens
tcttggagctaatac

SEQ ID NO: 1707855 - DNA, 15 bp, Homo sapiens
cttggagctaatacc

SEQ ID NO: 1707856 - DNA, 15 bp, Homo sapiens
ttggagctaatacct

SEQ ID NO: 1707857 - DNA, 15 bp, Homo sapiens
tggagctaatacctg

SEQ ID NO: 1707858 - DNA, 15 bp, Homo sapiens
ggagctaatacctgg

SEQ ID NO: 1707859 - DNA, 15 bp, Homo sapiens
gagctaatacctggt

SEQ ID NO: 1707860 - DNA, 15 bp, Homo sapiens
agctaatacctggtt

SEQ ID NO: 1707861 - DNA, 15 bp, Homo sapiens
gctaatacctggtta

SEQ ID NO: 1707862 - DNA, 15 bp, Homo sapiens
ctaatacctggttaa

SEQ ID NO: 1707863 - DNA, 15 bp, Homo sapiens
taatacctggttaag

SEQ ID NO: 1707864 - DNA, 15 bp, Homo sapiens
aatacctggttaaga

SEQ ID NO: 1707865 - DNA, 15 bp, Homo sapiens
atacctggttaagag

SEQ ID NO: 1707866 - DNA, 15 bp, Homo sapiens
tacctggttaagagt

SEQ ID NO: 1707867 - DNA, 15 bp, Homo sapiens
acctggttaagagta

SEQ ID NO: 1707868 - DNA, 15 bp, Homo sapiens
cctggttaagagtat

SEQ ID NO: 1707869 - DNA, 15 bp, Homo sapiens
ctggttaagagtata

SEQ ID NO: 1707870 - DNA, 15 bp, Homo sapiens
tggttaagagtatag

SEQ ID NO: 1707871 - DNA, 15 bp, Homo sapiens
ggttaagagtatagt

SEQ ID NO: 1707872 - DNA, 15 bp, Homo sapiens
gttaagagtatagtt

SEQ ID NO: 1707873 - DNA, 15 bp, Homo sapiens
ttaagagtatagttg

SEQ ID NO: 1707874 - DNA, 15 bp, Homo sapiens
taagagtatagttgt

SEQ ID NO: 1707875 - DNA, 15 bp, Homo sapiens
aagagtatagttgtc

SEQ ID NO: 1707876 - DNA, 15 bp, Homo sapiens
agagtatagttgtct

SEQ ID NO: 1707877 - DNA, 15 bp, Homo sapiens
gagtatagttgtcta

SEQ ID NO: 1707878 - DNA, 15 bp, Homo sapiens
agtatagttgtctac

SEQ ID NO: 1707879 - DNA, 15 bp, Homo sapiens
gtatagttgtctact

SEQ ID NO: 1707880 - DNA, 15 bp, Homo sapiens
tatagttgtctactg

SEQ ID NO: 1707881 - DNA, 15 bp, Homo sapiens
atagttgtctactgt

SEQ ID NO: 1707882 - DNA, 15 bp, Homo sapiens
tagttgtctactgtc

SEQ ID NO: 1707883 - DNA, 15 bp, Homo sapiens
agttgtctactgtca

SEQ ID NO: 1707884 - DNA, 15 bp, Homo sapiens
gttgtctactgtcat

SEQ ID NO: 1707885 - DNA, 15 bp, Homo sapiens
ttgtctactgtcatc

SEQ ID NO: 1707886 - DNA, 15 bp, Homo sapiens
tgtctactgtcatct

SEQ ID NO: 1707887 - DNA, 15 bp, Homo sapiens
gtctactgtcatctg

SEQ ID NO: 1707888 - DNA, 15 bp, Homo sapiens
tctactgtcatctgc

SEQ ID NO: 1707889 - DNA, 15 bp, Homo sapiens
ctactgtcatctgcc

SEQ ID NO: 1707890 - DNA, 15 bp, Homo sapiens
tactgtcatctgcca

SEQ ID NO: 1707891 - DNA, 15 bp, Homo sapiens
actgtcatctgccat

SEQ ID NO: 1707892 - DNA, 15 bp, Homo sapiens
ctgtcatctgccatg

SEQ ID NO: 1707893 - DNA, 15 bp, Homo sapiens
tgtcatctgccatga

SEQ ID NO: 1707894 - DNA, 15 bp, Homo sapiens
gtcatctgccatgat

SEQ ID NO: 1707895 - DNA, 15 bp, Homo sapiens
tcatctgccatgatc

SEQ ID NO: 1707896 - DNA, 15 bp, Homo sapiens
catctgccatgatcc

SEQ ID NO: 1707897 - DNA, 15 bp, Homo sapiens
atctgccatgatccc

SEQ ID NO: 1707898 - DNA, 15 bp, Homo sapiens
tctgccatgatccca

SEQ ID NO: 1707899 - DNA, 15 bp, Homo sapiens
ctgccatgatcccat

SEQ ID NO: 1707900 - DNA, 15 bp, Homo sapiens
tgccatgatcccatt

SEQ ID NO: 1707901 - DNA, 15 bp, Homo sapiens
gccatgatcccattt

SEQ ID NO: 1707902 - DNA, 15 bp, Homo sapiens
ccatgatcccatttt

SEQ ID NO: 1707903 - DNA, 15 bp, Homo sapiens
catgatcccattttt

SEQ ID NO: 1707904 - DNA, 15 bp, Homo sapiens
atgatcccatttttt

SEQ ID NO: 1707905 - DNA, 15 bp, Homo sapiens
tgatcccattttttg

SEQ ID NO: 1707906 - DNA, 15 bp, Homo sapiens
gatcccattttttgc

SEQ ID NO: 1707907 - DNA, 15 bp, Homo sapiens
atcccattttttgca

SEQ ID NO: 1707908 - DNA, 15 bp, Homo sapiens
tcccattttttgcag

SEQ ID NO: 1707909 - DNA, 15 bp, Homo sapiens
cccattttttgcagg

SEQ ID NO: 1707910 - DNA, 15 bp, Homo sapiens
ccattttttgcaggg

SEQ ID NO: 1707911 - DNA, 15 bp, Homo sapiens
cattttttgcagggg

SEQ ID NO: 1707912 - DNA, 15 bp, Homo sapiens
attttttgcaggggt

SEQ ID NO: 1707913 - DNA, 15 bp, Homo sapiens
ttttttgcaggggtc

SEQ ID NO: 1707914 - DNA, 15 bp, Homo sapiens
tttttgcaggggtca

SEQ ID NO: 1707915 - DNA, 15 bp, Homo sapiens
ttttgcaggggtcag

SEQ ID NO: 1707916 - DNA, 15 bp, Homo sapiens
tttgcaggggtcaga

SEQ ID NO: 1707917 - DNA, 15 bp, Homo sapiens
ttgcaggggtcagac

SEQ ID NO: 1707918 - DNA, 15 bp, Homo sapiens
tgcaggggtcagacg

SEQ ID NO: 1707919 - DNA, 15 bp, Homo sapiens
gcaggggtcagacgg

SEQ ID NO: 1707920 - DNA, 15 bp, Homo sapiens
caggggtcagacggg

SEQ ID NO: 1707921 - DNA, 15 bp, Homo sapiens
aggggtcagacggga

SEQ ID NO: 1707922 - DNA, 15 bp, Homo sapiens
ggggtcagacgggag

SEQ ID NO: 1707923 - DNA, 15 bp, Homo sapiens
gggtcagacgggaga

SEQ ID NO: 1707924 - DNA, 15 bp, Homo sapiens
ggtcagacgggagaa

SEQ ID NO: 1707925 - DNA, 15 bp, Homo sapiens
gtcagacgggagaat

SEQ ID NO: 1707926 - DNA, 15 bp, Homo sapiens
tcagacgggagaatt

SEQ ID NO: 1707927 - DNA, 15 bp, Homo sapiens
cagacgggagaattg

SEQ ID NO: 1707928 - DNA, 15 bp, Homo sapiens
agacgggagaattga

SEQ ID NO: 1707929 - DNA, 15 bp, Homo sapiens
gacgggagaattgaa

SEQ ID NO: 1707930 - DNA, 15 bp, Homo sapiens
acgggagaattgaat

SEQ ID NO: 1707931 - DNA, 15 bp, Homo sapiens
cgggagaattgaatg

SEQ ID NO: 1707932 - DNA, 15 bp, Homo sapiens
gggagaattgaatgg

SEQ ID NO: 1707933 - DNA, 15 bp, Homo sapiens
ggagaattgaatggt

SEQ ID NO: 1707934 - DNA, 15 bp, Homo sapiens
gagaattgaatggta

SEQ ID NO: 1707935 - DNA, 15 bp, Homo sapiens
agaattgaatggtaa

SEQ ID NO: 1707936 - DNA, 15 bp, Homo sapiens
gaattgaatggtaat

SEQ ID NO: 1707937 - DNA, 15 bp, Homo sapiens
aattgaatggtaata

SEQ ID NO: 1707938 - DNA, 15 bp, Homo sapiens
attgaatggtaatat

SEQ ID NO: 1707939 - DNA, 15 bp, Homo sapiens
ttgaatggtaatata

SEQ ID NO: 1707940 - DNA, 15 bp, Homo sapiens
tgaatggtaatataa

SEQ ID NO: 1707941 - DNA, 15 bp, Homo sapiens
gaatggtaatataag

SEQ ID NO: 1707942 - DNA, 15 bp, Homo sapiens
aatggtaatataagg

SEQ ID NO: 1707943 - DNA, 15 bp, Homo sapiens
atggtaatataaggg

SEQ ID NO: 1707944 - DNA, 15 bp, Homo sapiens
tggtaatataaggga

SEQ ID NO: 1707945 - DNA, 15 bp, Homo sapiens
ggtaatataagggaa

SEQ ID NO: 1707946 - DNA, 15 bp, Homo sapiens
gtaatataagggaaa

SEQ ID NO: 1707947 - DNA, 15 bp, Homo sapiens
taatataagggaaac

SEQ ID NO: 1707948 - DNA, 15 bp, Homo sapiens
aatataagggaaact

SEQ ID NO: 1707949 - DNA, 15 bp, Homo sapiens
atataagggaaacta

SEQ ID NO: 1707950 - DNA, 15 bp, Homo sapiens
tataagggaaactac

SEQ ID NO: 1707951 - DNA, 15 bp, Homo sapiens
ataagggaaactaca

SEQ ID NO: 1707952 - DNA, 15 bp, Homo sapiens
taagggaaactacaa

SEQ ID NO: 1707953 - DNA, 15 bp, Homo sapiens
aagggaaactacaac

SEQ ID NO: 1707954 - DNA, 15 bp, Homo sapiens
agggaaactacaacc

SEQ ID NO: 1707955 - DNA, 15 bp, Homo sapiens
gggaaactacaaccc

SEQ ID NO: 1707956 - DNA, 15 bp, Homo sapiens
ggaaactacaacccc

SEQ ID NO: 1707957 - DNA, 15 bp, Homo sapiens
gaaactacaacccct

SEQ ID NO: 1707958 - DNA, 15 bp, Homo sapiens
aaactacaacccctg

SEQ ID NO: 1707959 - DNA, 15 bp, Homo sapiens
aactacaacccctgc

SEQ ID NO: 1707960 - DNA, 15 bp, Homo sapiens
actacaacccctgca

SEQ ID NO: 1707961 - DNA, 15 bp, Homo sapiens
ctacaacccctgcat

SEQ ID NO: 1707962 - DNA, 15 bp, Homo sapiens
tacaacccctgcatt

SEQ ID NO: 1707963 - DNA, 15 bp, Homo sapiens
acaacccctgcattc

SEQ ID NO: 1707964 - DNA, 15 bp, Homo sapiens
caacccctgcattct

SEQ ID NO: 1707965 - DNA, 15 bp, Homo sapiens
aacccctgcattctt

SEQ ID NO: 1707966 - DNA, 15 bp, Homo sapiens
acccctgcattcttt

SEQ ID NO: 1707967 - DNA, 15 bp, Homo sapiens
cccctgcattcttta

SEQ ID NO: 1707968 - DNA, 15 bp, Homo sapiens
ccctgcattctttaa

SEQ ID NO: 1707969 - DNA, 15 bp, Homo sapiens
cctgcattctttaaa

SEQ ID NO: 1707970 - DNA, 15 bp, Homo sapiens
ctgcattctttaaat

SEQ ID NO: 1707971 - DNA, 15 bp, Homo sapiens
tgcattctttaaatc

SEQ ID NO: 1707972 - DNA, 15 bp, Homo sapiens
gcattctttaaatct

SEQ ID NO: 1707973 - DNA, 15 bp, Homo sapiens
cattctttaaatctt

SEQ ID NO: 1707974 - DNA, 15 bp, Homo sapiens
attctttaaatcttt

SEQ ID NO: 1707975 - DNA, 15 bp, Homo sapiens
ttctttaaatctttg

SEQ ID NO: 1707976 - DNA, 15 bp, Homo sapiens
tctttaaatctttga

SEQ ID NO: 1707977 - DNA, 15 bp, Homo sapiens
ctttaaatctttgat

SEQ ID NO: 1707978 - DNA, 15 bp, Homo sapiens
tttaaatctttgatg

SEQ ID NO: 1707979 - DNA, 15 bp, Homo sapiens
ttaaatctttgatgg

SEQ ID NO: 1707980 - DNA, 15 bp, Homo sapiens
taaatctttgatggt

SEQ ID NO: 1707981 - DNA, 15 bp, Homo sapiens
aaatctttgatggtg

SEQ ID NO: 1707982 - DNA, 15 bp, Homo sapiens
aatctttgatggtga

SEQ ID NO: 1707983 - DNA, 15 bp, Homo sapiens
atctttgatggtgat

SEQ ID NO: 1707984 - DNA, 15 bp, Homo sapiens
tctttgatggtgatg

SEQ ID NO: 1707985 - DNA, 15 bp, Homo sapiens
ctttgatggtgatgt

SEQ ID NO: 1707986 - DNA, 15 bp, Homo sapiens
tttgatggtgatgta

SEQ ID NO: 1707987 - DNA, 15 bp, Homo sapiens
ttgatggtgatgtaa

SEQ ID NO: 1707988 - DNA, 15 bp, Homo sapiens
tgatggtgatgtaaa

SEQ ID NO: 1707989 - DNA, 15 bp, Homo sapiens
gatggtgatgtaaat

SEQ ID NO: 1707990 - DNA, 15 bp, Homo sapiens
atggtgatgtaaatc

SEQ ID NO: 1707991 - DNA, 15 bp, Homo sapiens
tggtgatgtaaatct

SEQ ID NO: 1707992 - DNA, 15 bp, Homo sapiens
ggtgatgtaaatctt

SEQ ID NO: 1707993 - DNA, 15 bp, Homo sapiens
gtgatgtaaatcttt

SEQ ID NO: 1707994 - DNA, 15 bp, Homo sapiens
tgatgtaaatctttg

SEQ ID NO: 1707995 - DNA, 15 bp, Homo sapiens
gatgtaaatctttgc

SEQ ID NO: 1707996 - DNA, 15 bp, Homo sapiens
atgtaaatctttgca

SEQ ID NO: 1707997 - DNA, 15 bp, Homo sapiens
tgtaaatctttgcaa

SEQ ID NO: 1707998 - DNA, 15 bp, Homo sapiens
gtaaatctttgcaat

SEQ ID NO: 1707999 - DNA, 15 bp, Homo sapiens
taaatctttgcaatt

SEQ ID NO: 1708000 - DNA, 15 bp, Homo sapiens
aaatctttgcaattc

SEQ ID NO: 1708001 - DNA, 15 bp, Homo sapiens
aatctttgcaattct

SEQ ID NO: 1708002 - DNA, 15 bp, Homo sapiens
atctttgcaattctt

SEQ ID NO: 1708003 - DNA, 15 bp, Homo sapiens
tctttgcaattcttc

SEQ ID NO: 1708004 - DNA, 15 bp, Homo sapiens
ctttgcaattcttcc

SEQ ID NO: 1708005 - DNA, 15 bp, Homo sapiens
tttgcaattcttcct

SEQ ID NO: 1708006 - DNA, 15 bp, Homo sapiens
ttgcaattcttccta

SEQ ID NO: 1708007 - DNA, 15 bp, Homo sapiens
tgcaattcttcctag

SEQ ID NO: 1708008 - DNA, 15 bp, Homo sapiens
gcaattcttcctaga

SEQ ID NO: 1708009 - DNA, 15 bp, Homo sapiens
caattcttcctagaa

SEQ ID NO: 1708010 - DNA, 15 bp, Homo sapiens
aattcttcctagaat

SEQ ID NO: 1708011 - DNA, 15 bp, Homo sapiens
attcttcctagaatg

SEQ ID NO: 1708012 - DNA, 15 bp, Homo sapiens
ttcttcctagaatgc

SEQ ID NO: 1708013 - DNA, 15 bp, Homo sapiens
tcttcctagaatgct

SEQ ID NO: 1708014 - DNA, 15 bp, Homo sapiens
cttcctagaatgctg

SEQ ID NO: 1708015 - DNA, 15 bp, Homo sapiens
ttcctagaatgctgt

SEQ ID NO: 1708016 - DNA, 15 bp, Homo sapiens
tcctagaatgctgtc

SEQ ID NO: 1708017 - DNA, 15 bp, Homo sapiens
cctagaatgctgtct

SEQ ID NO: 1708018 - DNA, 15 bp, Homo sapiens
ctagaatgctgtctt

SEQ ID NO: 1708019 - DNA, 15 bp, Homo sapiens
tagaatgctgtcttg

SEQ ID NO: 1708020 - DNA, 15 bp, Homo sapiens
agaatgctgtcttgc

SEQ ID NO: 1708021 - DNA, 15 bp, Homo sapiens
gaatgctgtcttgct

SEQ ID NO: 1708022 - DNA, 15 bp, Homo sapiens
aatgctgtcttgctt

SEQ ID NO: 1708023 - DNA, 15 bp, Homo sapiens
atgctgtcttgcttc

SEQ ID NO: 1708024 - DNA, 15 bp, Homo sapiens
tgctgtcttgcttct

SEQ ID NO: 1708025 - DNA, 15 bp, Homo sapiens
gctgtcttgcttctg

SEQ ID NO: 1708026 - DNA, 15 bp, Homo sapiens
ctgtcttgcttctga

SEQ ID NO: 1708027 - DNA, 15 bp, Homo sapiens
tgtcttgcttctgat

SEQ ID NO: 1708028 - DNA, 15 bp, Homo sapiens
gtcttgcttctgatt

SEQ ID NO: 1708029 - DNA, 15 bp, Homo sapiens
tcttgcttctgattt

SEQ ID NO: 1708030 - DNA, 15 bp, Homo sapiens
cttgcttctgattta

SEQ ID NO: 1708031 - DNA, 15 bp, Homo sapiens
ttgcttctgatttac

SEQ ID NO: 1708032 - DNA, 15 bp, Homo sapiens
tgcttctgatttact

SEQ ID NO: 1708033 - DNA, 15 bp, Homo sapiens
gcttctgatttacta

SEQ ID NO: 1708034 - DNA, 15 bp, Homo sapiens
cttctgatttactat

SEQ ID NO: 1708035 - DNA, 15 bp, Homo sapiens
ttctgatttactatc

SEQ ID NO: 1708036 - DNA, 15 bp, Homo sapiens
tctgatttactatcc

SEQ ID NO: 1708037 - DNA, 15 bp, Homo sapiens
ctgatttactatcct

SEQ ID NO: 1708038 - DNA, 15 bp, Homo sapiens
tgatttactatcctg

SEQ ID NO: 1708039 - DNA, 15 bp, Homo sapiens
gatttactatcctga

SEQ ID NO: 1708040 - DNA, 15 bp, Homo sapiens
atttactatcctgac

SEQ ID NO: 1708041 - DNA, 15 bp, Homo sapiens
tttactatcctgact

SEQ ID NO: 1708042 - DNA, 15 bp, Homo sapiens
ttactatcctgactt

SEQ ID NO: 1708043 - DNA, 15 bp, Homo sapiens
tactatcctgacttg

SEQ ID NO: 1708044 - DNA, 15 bp, Homo sapiens
actatcctgacttgg

SEQ ID NO: 1708045 - DNA, 15 bp, Homo sapiens
ctatcctgacttggg

SEQ ID NO: 1708046 - DNA, 15 bp, Homo sapiens
tatcctgacttgggg

SEQ ID NO: 1708047 - DNA, 15 bp, Homo sapiens
atcctgacttggggt

SEQ ID NO: 1708048 - DNA, 15 bp, Homo sapiens
tcctgacttggggtg

SEQ ID NO: 1708049 - DNA, 15 bp, Homo sapiens
cctgacttggggtga

SEQ ID NO: 1708050 - DNA, 15 bp, Homo sapiens
ctgacttggggtgac

SEQ ID NO: 1708051 - DNA, 15 bp, Homo sapiens
tgacttggggtgaca

SEQ ID NO: 1708052 - DNA, 15 bp, Homo sapiens
gacttggggtgacag

SEQ ID NO: 1708053 - DNA, 15 bp, Homo sapiens
acttggggtgacagt

SEQ ID NO: 1708054 - DNA, 15 bp, Homo sapiens
cttggggtgacagtg

SEQ ID NO: 1708055 - DNA, 15 bp, Homo sapiens
ttggggtgacagtgg

SEQ ID NO: 1708056 - DNA, 15 bp, Homo sapiens
tggggtgacagtggc

SEQ ID NO: 1708057 - DNA, 15 bp, Homo sapiens
ggggtgacagtggca

SEQ ID NO: 1708058 - DNA, 15 bp, Homo sapiens
gggtgacagtggcag

SEQ ID NO: 1708059 - DNA, 15 bp, Homo sapiens
ggtgacagtggcagt

SEQ ID NO: 1708060 - DNA, 15 bp, Homo sapiens
gtgacagtggcagtt

SEQ ID NO: 1708061 - DNA, 15 bp, Homo sapiens
tgacagtggcagttt

SEQ ID NO: 1708062 - DNA, 15 bp, Homo sapiens
gacagtggcagtttc

SEQ ID NO: 1708063 - DNA, 15 bp, Homo sapiens
acagtggcagtttca

SEQ ID NO: 1708064 - DNA, 15 bp, Homo sapiens
cagtggcagtttcaa

SEQ ID NO: 1708065 - DNA, 15 bp, Homo sapiens
agtggcagtttcaaa

SEQ ID NO: 1708066 - DNA, 15 bp, Homo sapiens
gtggcagtttcaaag

SEQ ID NO: 1708067 - DNA, 15 bp, Homo sapiens
tggcagtttcaaagg

SEQ ID NO: 1708068 - DNA, 15 bp, Homo sapiens
ggcagtttcaaaggc

SEQ ID NO: 1708069 - DNA, 15 bp, Homo sapiens
gcagtttcaaaggct

SEQ ID NO: 1708070 - DNA, 15 bp, Homo sapiens
cagtttcaaaggctt

SEQ ID NO: 1708071 - DNA, 15 bp, Homo sapiens
agtttcaaaggcttc

SEQ ID NO: 1708072 - DNA, 15 bp, Homo sapiens
gtttcaaaggcttct

SEQ ID NO: 1708073 - DNA, 15 bp, Homo sapiens
tttcaaaggcttcta

SEQ ID NO: 1708074 - DNA, 15 bp, Homo sapiens
ttcaaaggcttctac

SEQ ID NO: 1708075 - DNA, 15 bp, Homo sapiens
tcaaaggcttctact

SEQ ID NO: 1708076 - DNA, 15 bp, Homo sapiens
caaaggcttctactt

SEQ ID NO: 1708077 - DNA, 15 bp, Homo sapiens
aaaggcttctacttg

SEQ ID NO: 1708078 - DNA, 15 bp, Homo sapiens
aaggcttctacttgg

SEQ ID NO: 1708079 - DNA, 15 bp, Homo sapiens
aggcttctacttggt

SEQ ID NO: 1708080 - DNA, 15 bp, Homo sapiens
ggcttctacttggtc

SEQ ID NO: 1708081 - DNA, 15 bp, Homo sapiens
gcttctacttggtcc

SEQ ID NO: 1708082 - DNA, 15 bp, Homo sapiens
cttctacttggtcct

SEQ ID NO: 1708083 - DNA, 15 bp, Homo sapiens
ttctacttggtcctc

SEQ ID NO: 1708084 - DNA, 15 bp, Homo sapiens
tctacttggtcctcc

SEQ ID NO: 1708085 - DNA, 15 bp, Homo sapiens
ctacttggtcctcct

SEQ ID NO: 1708086 - DNA, 15 bp, Homo sapiens
tacttggtcctccta

SEQ ID NO: 1708087 - DNA, 15 bp, Homo sapiens
acttggtcctcctac

SEQ ID NO: 1708088 - DNA, 15 bp, Homo sapiens
cttggtcctcctaca

SEQ ID NO: 1708089 - DNA, 15 bp, Homo sapiens
ttggtcctcctacat

SEQ ID NO: 1708090 - DNA, 15 bp, Homo sapiens
tggtcctcctacata

SEQ ID NO: 1708091 - DNA, 15 bp, Homo sapiens
ggtcctcctacataa

SEQ ID NO: 1708092 - DNA, 15 bp, Homo sapiens
gtcctcctacataat

SEQ ID NO: 1708093 - DNA, 15 bp, Homo sapiens
tcctcctacataatg

SEQ ID NO: 1708094 - DNA, 15 bp, Homo sapiens
cctcctacataatga

SEQ ID NO: 1708095 - DNA, 15 bp, Homo sapiens
ctcctacataatgac

SEQ ID NO: 1708096 - DNA, 15 bp, Homo sapiens
tcctacataatgact

SEQ ID NO: 1708097 - DNA, 15 bp, Homo sapiens
cctacataatgacta

SEQ ID NO: 1708098 - DNA, 15 bp, Homo sapiens
ctacataatgactat

SEQ ID NO: 1708099 - DNA, 15 bp, Homo sapiens
tacataatgactatt

SEQ ID NO: 1708100 - DNA, 15 bp, Homo sapiens
acataatgactatta

SEQ ID NO: 1708101 - DNA, 15 bp, Homo sapiens
cataatgactattaa

SEQ ID NO: 1708102 - DNA, 15 bp, Homo sapiens
ataatgactattaat

SEQ ID NO: 1708103 - DNA, 15 bp, Homo sapiens
taatgactattaatc

SEQ ID NO: 1708104 - DNA, 15 bp, Homo sapiens
aatgactattaatcc

SEQ ID NO: 1708105 - DNA, 15 bp, Homo sapiens
atgactattaatcca

SEQ ID NO: 1708106 - DNA, 15 bp, Homo sapiens
tgactattaatccat

SEQ ID NO: 1708107 - DNA, 15 bp, Homo sapiens
gactattaatccatg

SEQ ID NO: 1708108 - DNA, 15 bp, Homo sapiens
actattaatccatgg

SEQ ID NO: 1708109 - DNA, 15 bp, Homo sapiens
ctattaatccatggg

SEQ ID NO: 1708110 - DNA, 15 bp, Homo sapiens
tattaatccatgggt

SEQ ID NO: 1708111 - DNA, 15 bp, Homo sapiens
attaatccatgggtc

SEQ ID NO: 1708112 - DNA, 15 bp, Homo sapiens
ttaatccatgggtca

SEQ ID NO: 1708113 - DNA, 15 bp, Homo sapiens
taatccatgggtcag

SEQ ID NO: 1708114 - DNA, 15 bp, Homo sapiens
aatccatgggtcagg

SEQ ID NO: 1708115 - DNA, 15 bp, Homo sapiens
atccatgggtcaggg

SEQ ID NO: 1708116 - DNA, 15 bp, Homo sapiens
tccatgggtcaggga

SEQ ID NO: 1708117 - DNA, 15 bp, Homo sapiens
ccatgggtcagggag

SEQ ID NO: 1708118 - DNA, 15 bp, Homo sapiens
catgggtcagggagc

SEQ ID NO: 1708119 - DNA, 15 bp, Homo sapiens
atgggtcagggagcc

SEQ ID NO: 1708120 - DNA, 15 bp, Homo sapiens
tgggtcagggagcca

SEQ ID NO: 1708121 - DNA, 15 bp, Homo sapiens
gggtcagggagccaa

SEQ ID NO: 1708122 - DNA, 15 bp, Homo sapiens
ggtcagggagccaat

SEQ ID NO: 1708123 - DNA, 15 bp, Homo sapiens
gtcagggagccaatg

SEQ ID NO: 1708124 - DNA, 15 bp, Homo sapiens
tcagggagccaatgt

SEQ ID NO: 1708125 - DNA, 15 bp, Homo sapiens
cagggagccaatgtg

SEQ ID NO: 1708126 - DNA, 15 bp, Homo sapiens
agggagccaatgtga

SEQ ID NO: 1708127 - DNA, 15 bp, Homo sapiens
gggagccaatgtgaa

SEQ ID NO: 1708128 - DNA, 15 bp, Homo sapiens
ggagccaatgtgaag

SEQ ID NO: 1708129 - DNA, 15 bp, Homo sapiens
gagccaatgtgaagg

SEQ ID NO: 1708130 - DNA, 15 bp, Homo sapiens
agccaatgtgaaggt

SEQ ID NO: 1708131 - DNA, 15 bp, Homo sapiens
gccaatgtgaaggtt

SEQ ID NO: 1708132 - DNA, 15 bp, Homo sapiens
ccaatgtgaaggttt

SEQ ID NO: 1708133 - DNA, 15 bp, Homo sapiens
caatgtgaaggtttt

SEQ ID NO: 1708134 - DNA, 15 bp, Homo sapiens
aatgtgaaggttttg

SEQ ID NO: 1708135 - DNA, 15 bp, Homo sapiens
atgtgaaggttttgc

SEQ ID NO: 1708136 - DNA, 15 bp, Homo sapiens
tgtgaaggttttgcc

SEQ ID NO: 1708137 - DNA, 15 bp, Homo sapiens
gtgaaggttttgcca

SEQ ID NO: 1708138 - DNA, 15 bp, Homo sapiens
tgaaggttttgccag

SEQ ID NO: 1708139 - DNA, 15 bp, Homo sapiens
gaaggttttgccagc

SEQ ID NO: 1708140 - DNA, 15 bp, Homo sapiens
aaggttttgccagct

SEQ ID NO: 1708141 - DNA, 15 bp, Homo sapiens
aggttttgccagcta

SEQ ID NO: 1708142 - DNA, 15 bp, Homo sapiens
ggttttgccagctaa

SEQ ID NO: 1708143 - DNA, 15 bp, Homo sapiens
gttttgccagctaag

SEQ ID NO: 1708144 - DNA, 15 bp, Homo sapiens
ttttgccagctaaga

SEQ ID NO: 1708145 - DNA, 15 bp, Homo sapiens
tttgccagctaagat

SEQ ID NO: 1708146 - DNA, 15 bp, Homo sapiens
ttgccagctaagatt

SEQ ID NO: 1708147 - DNA, 15 bp, Homo sapiens
tgccagctaagattg

SEQ ID NO: 1708148 - DNA, 15 bp, Homo sapiens
gccagctaagattga

SEQ ID NO: 1708149 - DNA, 15 bp, Homo sapiens
ccagctaagattgac

SEQ ID NO: 1708150 - DNA, 15 bp, Homo sapiens
cagctaagattgact

SEQ ID NO: 1708151 - DNA, 15 bp, Homo sapiens
agctaagattgacta

SEQ ID NO: 1708152 - DNA, 15 bp, Homo sapiens
gctaagattgactac

SEQ ID NO: 1708153 - DNA, 15 bp, Homo sapiens
ctaagattgactacc

SEQ ID NO: 1708154 - DNA, 15 bp, Homo sapiens
taagattgactacct

SEQ ID NO: 1708155 - DNA, 15 bp, Homo sapiens
aagattgactacctt

SEQ ID NO: 1708156 - DNA, 15 bp, Homo sapiens
agattgactacctta

SEQ ID NO: 1708157 - DNA, 15 bp, Homo sapiens
gattgactaccttaa

SEQ ID NO: 1708158 - DNA, 15 bp, Homo sapiens
attgactaccttaat

SEQ ID NO: 1708159 - DNA, 15 bp, Homo sapiens
ttgactaccttaatt

SEQ ID NO: 1708160 - DNA, 15 bp, Homo sapiens
tgactaccttaatta

SEQ ID NO: 1708161 - DNA, 15 bp, Homo sapiens
gactaccttaattag

SEQ ID NO: 1708162 - DNA, 15 bp, Homo sapiens
actaccttaattaga

SEQ ID NO: 1708163 - DNA, 15 bp, Homo sapiens
ctaccttaattagac

SEQ ID NO: 1708164 - DNA, 15 bp, Homo sapiens
taccttaattagaca

SEQ ID NO: 1708165 - DNA, 15 bp, Homo sapiens
accttaattagacat

SEQ ID NO: 1708166 - DNA, 15 bp, Homo sapiens
ccttaattagacatt

SEQ ID NO: 1708167 - DNA, 15 bp, Homo sapiens
cttaattagacattc

SEQ ID NO: 1708168 - DNA, 15 bp, Homo sapiens
ttaattagacattca

SEQ ID NO: 1708169 - DNA, 15 bp, Homo sapiens
taattagacattcag

SEQ ID NO: 1708170 - DNA, 15 bp, Homo sapiens
aattagacattcagt

SEQ ID NO: 1708171 - DNA, 15 bp, Homo sapiens
attagacattcagtg

SEQ ID NO: 1708172 - DNA, 15 bp, Homo sapiens
ttagacattcagtga

SEQ ID NO: 1708173 - DNA, 15 bp, Homo sapiens
tagacattcagtgat

SEQ ID NO: 1708174 - DNA, 15 bp, Homo sapiens
agacattcagtgatt

SEQ ID NO: 1708175 - DNA, 15 bp, Homo sapiens
gacattcagtgattt

SEQ ID NO: 1708176 - DNA, 15 bp, Homo sapiens
acattcagtgattta

SEQ ID NO: 1708177 - DNA, 15 bp, Homo sapiens
cattcagtgatttaa

SEQ ID NO: 1708178 - DNA, 15 bp, Homo sapiens
attcagtgatttaaa

SEQ ID NO: 1708179 - DNA, 15 bp, Homo sapiens
ttcagtgatttaaac

SEQ ID NO: 1708180 - DNA, 15 bp, Homo sapiens
tcagtgatttaaaca

SEQ ID NO: 1708181 - DNA, 15 bp, Homo sapiens
cagtgatttaaacat

SEQ ID NO: 1708182 - DNA, 15 bp, Homo sapiens
agtgatttaaacata

SEQ ID NO: 1708183 - DNA, 15 bp, Homo sapiens
gtgatttaaacataa

SEQ ID NO: 1708184 - DNA, 15 bp, Homo sapiens
tgatttaaacataaa

SEQ ID NO: 1708185 - DNA, 15 bp, Homo sapiens
gatttaaacataaaa

SEQ ID NO: 1708186 - DNA, 15 bp, Homo sapiens
atttaaacataaaat

SEQ ID NO: 1708187 - DNA, 15 bp, Homo sapiens
tttaaacataaaatg

SEQ ID NO: 1708188 - DNA, 15 bp, Homo sapiens
ttaaacataaaatgc

SEQ ID NO: 1708189 - DNA, 15 bp, Homo sapiens
taaacataaaatgca

SEQ ID NO: 1708190 - DNA, 15 bp, Homo sapiens
aaacataaaatgcat

SEQ ID NO: 1708191 - DNA, 15 bp, Homo sapiens
aacataaaatgcatt

SEQ ID NO: 1708192 - DNA, 15 bp, Homo sapiens
acataaaatgcattc

SEQ ID NO: 1708193 - DNA, 15 bp, Homo sapiens
cataaaatgcattca

SEQ ID NO: 1708194 - DNA, 15 bp, Homo sapiens
ataaaatgcattcat

SEQ ID NO: 1708195 - DNA, 15 bp, Homo sapiens
taaaatgcattcatg

SEQ ID NO: 1708196 - DNA, 15 bp, Homo sapiens
aaaatgcattcatgg

SEQ ID NO: 1708197 - DNA, 15 bp, Homo sapiens
aaatgcattcatggg

SEQ ID NO: 1708198 - DNA, 15 bp, Homo sapiens
aatgcattcatgggc

SEQ ID NO: 1708199 - DNA, 15 bp, Homo sapiens
atgcattcatgggca

SEQ ID NO: 1708200 - DNA, 15 bp, Homo sapiens
tgcattcatgggcaa

SEQ ID NO: 1708201 - DNA, 15 bp, Homo sapiens
gcattcatgggcaat

SEQ ID NO: 1708202 - DNA, 15 bp, Homo sapiens
cattcatgggcaatc

SEQ ID NO: 1708203 - DNA, 15 bp, Homo sapiens
attcatgggcaatca

SEQ ID NO: 1708204 - DNA, 15 bp, Homo sapiens
ttcatgggcaatcag

SEQ ID NO: 1708205 - DNA, 15 bp, Homo sapiens
tcatgggcaatcaga

SEQ ID NO: 1708206 - DNA, 15 bp, Homo sapiens
catgggcaatcagat

SEQ ID NO: 1708207 - DNA, 15 bp, Homo sapiens
atgggcaatcagatc

SEQ ID NO: 1708208 - DNA, 15 bp, Homo sapiens
tgggcaatcagatcc

SEQ ID NO: 1708209 - DNA, 15 bp, Homo sapiens
gggcaatcagatcca

SEQ ID NO: 1708210 - DNA, 15 bp, Homo sapiens
ggcaatcagatccac

SEQ ID NO: 1708211 - DNA, 15 bp, Homo sapiens
gcaatcagatccact

SEQ ID NO: 1708212 - DNA, 15 bp, Homo sapiens
caatcagatccactg

SEQ ID NO: 1708213 - DNA, 15 bp, Homo sapiens
aatcagatccactgt

SEQ ID NO: 1708214 - DNA, 15 bp, Homo sapiens
atcagatccactgtg

SEQ ID NO: 1708215 - DNA, 15 bp, Homo sapiens
tcagatccactgtga

SEQ ID NO: 1708216 - DNA, 15 bp, Homo sapiens
cagatccactgtgag

SEQ ID NO: 1708217 - DNA, 15 bp, Homo sapiens
agatccactgtgagt

SEQ ID NO: 1708218 - DNA, 15 bp, Homo sapiens
gatccactgtgagtt

SEQ ID NO: 1708219 - DNA, 15 bp, Homo sapiens
atccactgtgagttg

SEQ ID NO: 1708220 - DNA, 15 bp, Homo sapiens
tccactgtgagttgg

SEQ ID NO: 1708221 - DNA, 15 bp, Homo sapiens
ccactgtgagttgga

SEQ ID NO: 1708222 - DNA, 15 bp, Homo sapiens
cactgtgagttggaa

SEQ ID NO: 1708223 - DNA, 15 bp, Homo sapiens
actgtgagttggaat

SEQ ID NO: 1708224 - DNA, 15 bp, Homo sapiens
ctgtgagttggaatt

SEQ ID NO: 1708225 - DNA, 15 bp, Homo sapiens
tgtgagttggaattg

SEQ ID NO: 1708226 - DNA, 15 bp, Homo sapiens
gtgagttggaattga

SEQ ID NO: 1708227 - DNA, 15 bp, Homo sapiens
tgagttggaattgag

SEQ ID NO: 1708228 - DNA, 15 bp, Homo sapiens
gagttggaattgagc

SEQ ID NO: 1708229 - DNA, 15 bp, Homo sapiens
agttggaattgagcc

SEQ ID NO: 1708230 - DNA, 15 bp, Homo sapiens
gttggaattgagccc

SEQ ID NO: 1708231 - DNA, 15 bp, Homo sapiens
ttggaattgagccca

SEQ ID NO: 1708232 - DNA, 15 bp, Homo sapiens
tggaattgagcccaa

SEQ ID NO: 1708233 - DNA, 15 bp, Homo sapiens
ggaattgagcccaaa

SEQ ID NO: 1708234 - DNA, 15 bp, Homo sapiens
gaattgagcccaaac

SEQ ID NO: 1708235 - DNA, 15 bp, Homo sapiens
aattgagcccaaact

SEQ ID NO: 1708236 - DNA, 15 bp, Homo sapiens
attgagcccaaactc

SEQ ID NO: 1708237 - DNA, 15 bp, Homo sapiens
ttgagcccaaactcc

SEQ ID NO: 1708238 - DNA, 15 bp, Homo sapiens
tgagcccaaactcca

SEQ ID NO: 1708239 - DNA, 15 bp, Homo sapiens
agcccaaactccact

SEQ ID NO: 1708240 - DNA, 15 bp, Homo sapiens
gcccaaactccactg

SEQ ID NO: 1708241 - DNA, 15 bp, Homo sapiens
cccaaactccactgg

SEQ ID NO: 1708242 - DNA, 15 bp, Homo sapiens
ccaaactccactggt

SEQ ID NO: 1708243 - DNA, 15 bp, Homo sapiens
caaactccactggtc

SEQ ID NO: 1708244 - DNA, 15 bp, Homo sapiens
aaactccactggtcc

SEQ ID NO: 1708245 - DNA, 15 bp, Homo sapiens
aactccactggtccc

SEQ ID NO: 1708246 - DNA, 15 bp, Homo sapiens
actccactggtccct

SEQ ID NO: 1708247 - DNA, 15 bp, Homo sapiens
ctccactggtcccta

SEQ ID NO: 1708248 - DNA, 15 bp, Homo sapiens
tccactggtccctat

SEQ ID NO: 1708249 - DNA, 15 bp, Homo sapiens
ccactggtccctatt

SEQ ID NO: 1708250 - DNA, 15 bp, Homo sapiens
cactggtccctattc

SEQ ID NO: 1708251 - DNA, 15 bp, Homo sapiens
actggtccctattct

SEQ ID NO: 1708252 - DNA, 15 bp, Homo sapiens
ctggtccctattcta

SEQ ID NO: 1708253 - DNA, 15 bp, Homo sapiens
tggtccctattctaa

SEQ ID NO: 1708254 - DNA, 15 bp, Homo sapiens
ggtccctattctaac

SEQ ID NO: 1708255 - DNA, 15 bp, Homo sapiens
gtccctattctaact

SEQ ID NO: 1708256 - DNA, 15 bp, Homo sapiens
tccctattctaactg

SEQ ID NO: 1708257 - DNA, 15 bp, Homo sapiens
ccctattctaactgg

SEQ ID NO: 1708258 - DNA, 15 bp, Homo sapiens
cctattctaactgga

SEQ ID NO: 1708259 - DNA, 15 bp, Homo sapiens
ctattctaactggag

SEQ ID NO: 1708260 - DNA, 15 bp, Homo sapiens
tattctaactggaga

SEQ ID NO: 1708261 - DNA, 15 bp, Homo sapiens
attctaactggagaa

SEQ ID NO: 1708262 - DNA, 15 bp, Homo sapiens
ttctaactggagaat

SEQ ID NO: 1708263 - DNA, 15 bp, Homo sapiens
tctaactggagaatt

SEQ ID NO: 1708264 - DNA, 15 bp, Homo sapiens
ctaactggagaatta

SEQ ID NO: 1708265 - DNA, 15 bp, Homo sapiens
taactggagaattac

SEQ ID NO: 1708266 - DNA, 15 bp, Homo sapiens
aactggagaattaca

SEQ ID NO: 1708267 - DNA, 15 bp, Homo sapiens
actggagaattacat

SEQ ID NO: 1708268 - DNA, 15 bp, Homo sapiens
ctggagaattacatt

SEQ ID NO: 1708269 - DNA, 15 bp, Homo sapiens
tggagaattacattg

SEQ ID NO: 1708270 - DNA, 15 bp, Homo sapiens
ggagaattacattgg

SEQ ID NO: 1708271 - DNA, 15 bp, Homo sapiens
gagaattacattggt

SEQ ID NO: 1708272 - DNA, 15 bp, Homo sapiens
agaattacattggta

SEQ ID NO: 1708273 - DNA, 15 bp, Homo sapiens
gaattacattggtat

SEQ ID NO: 1708274 - DNA, 15 bp, Homo sapiens
aattacattggtatc

SEQ ID NO: 1708275 - DNA, 15 bp, Homo sapiens
attacattggtatca

SEQ ID NO: 1708276 - DNA, 15 bp, Homo sapiens
ttacattggtatcag

SEQ ID NO: 1708277 - DNA, 15 bp, Homo sapiens
tacattggtatcagg

SEQ ID NO: 1708278 - DNA, 15 bp, Homo sapiens
acattggtatcaggg

SEQ ID NO: 1708279 - DNA, 15 bp, Homo sapiens
cattggtatcagggt

SEQ ID NO: 1708280 - DNA, 15 bp, Homo sapiens
attggtatcagggtc

SEQ ID NO: 1708281 - DNA, 15 bp, Homo sapiens
ttggtatcagggtca

SEQ ID NO: 1708282 - DNA, 15 bp, Homo sapiens
tggtatcagggtcag

SEQ ID NO: 1708283 - DNA, 15 bp, Homo sapiens
ggtatcagggtcagc

SEQ ID NO: 1708284 - DNA, 15 bp, Homo sapiens
gtatcagggtcagct

SEQ ID NO: 1708285 - DNA, 15 bp, Homo sapiens
tatcagggtcagctc

SEQ ID NO: 1708286 - DNA, 15 bp, Homo sapiens
atcagggtcagctca

SEQ ID NO: 1708287 - DNA, 15 bp, Homo sapiens
tcagggtcagctcag

SEQ ID NO: 1708288 - DNA, 15 bp, Homo sapiens
cagggtcagctcaga

SEQ ID NO: 1708289 - DNA, 15 bp, Homo sapiens
agggtcagctcagac

SEQ ID NO: 1708290 - DNA, 15 bp, Homo sapiens
gggtcagctcagact

SEQ ID NO: 1708291 - DNA, 15 bp, Homo sapiens
ggtcagctcagactt

SEQ ID NO: 1708292 - DNA, 15 bp, Homo sapiens
gtcagctcagacttt

SEQ ID NO: 1708293 - DNA, 15 bp, Homo sapiens
tcagctcagactttg

SEQ ID NO: 1708294 - DNA, 15 bp, Homo sapiens
cagctcagactttgt

SEQ ID NO: 1708295 - DNA, 15 bp, Homo sapiens
agctcagactttgta

SEQ ID NO: 1708296 - DNA, 15 bp, Homo sapiens
gctcagactttgtat

SEQ ID NO: 1708297 - DNA, 15 bp, Homo sapiens
ctcagactttgtatc

SEQ ID NO: 1708298 - DNA, 15 bp, Homo sapiens
tcagactttgtatct

SEQ ID NO: 1708299 - DNA, 15 bp, Homo sapiens
cagactttgtatcta

SEQ ID NO: 1708300 - DNA, 15 bp, Homo sapiens
agactttgtatctaa

SEQ ID NO: 1708301 - DNA, 15 bp, Homo sapiens
gactttgtatctaac

SEQ ID NO: 1708302 - DNA, 15 bp, Homo sapiens
actttgtatctaaca

SEQ ID NO: 1708303 - DNA, 15 bp, Homo sapiens
ctttgtatctaacag

SEQ ID NO: 1708304 - DNA, 15 bp, Homo sapiens
tttgtatctaacagt

SEQ ID NO: 1708305 - DNA, 15 bp, Homo sapiens
ttgtatctaacagtt

SEQ ID NO: 1708306 - DNA, 15 bp, Homo sapiens
tgtatctaacagttc

SEQ ID NO: 1708307 - DNA, 15 bp, Homo sapiens
gtatctaacagttct

SEQ ID NO: 1708308 - DNA, 15 bp, Homo sapiens
tatctaacagttctt

SEQ ID NO: 1708309 - DNA, 15 bp, Homo sapiens
atctaacagttcttg

SEQ ID NO: 1708310 - DNA, 15 bp, Homo sapiens
tctaacagttcttga

SEQ ID NO: 1708311 - DNA, 15 bp, Homo sapiens
ctaacagttcttgaa

SEQ ID NO: 1708312 - DNA, 15 bp, Homo sapiens
taacagttcttgaat

SEQ ID NO: 1708313 - DNA, 15 bp, Homo sapiens
aacagttcttgaata

SEQ ID NO: 1708314 - DNA, 15 bp, Homo sapiens
acagttcttgaatac

SEQ ID NO: 1708315 - DNA, 15 bp, Homo sapiens
cagttcttgaatact

SEQ ID NO: 1708316 - DNA, 15 bp, Homo sapiens
agttcttgaatactt

SEQ ID NO: 1708317 - DNA, 15 bp, Homo sapiens
gttcttgaatacttg

SEQ ID NO: 1708318 - DNA, 15 bp, Homo sapiens
ttcttgaatacttga

SEQ ID NO: 1708319 - DNA, 15 bp, Homo sapiens
tcttgaatacttgat

SEQ ID NO: 1708320 - DNA, 15 bp, Homo sapiens
cttgaatacttgata

SEQ ID NO: 1708321 - DNA, 15 bp, Homo sapiens
ttgaatacttgatat

SEQ ID NO: 1708322 - DNA, 15 bp, Homo sapiens
tgaatacttgatatt

SEQ ID NO: 1708323 - DNA, 15 bp, Homo sapiens
gaatacttgatattc

SEQ ID NO: 1708324 - DNA, 15 bp, Homo sapiens
aatacttgatattcc

SEQ ID NO: 1708325 - DNA, 15 bp, Homo sapiens
atacttgatattcct

SEQ ID NO: 1708326 - DNA, 15 bp, Homo sapiens
tacttgatattcctc

SEQ ID NO: 1708327 - DNA, 15 bp, Homo sapiens
acttgatattcctct

SEQ ID NO: 1708328 - DNA, 15 bp, Homo sapiens
cttgatattcctctt

SEQ ID NO: 1708329 - DNA, 15 bp, Homo sapiens
ttgatattcctcttt

SEQ ID NO: 1708330 - DNA, 15 bp, Homo sapiens
tgatattcctctttc

SEQ ID NO: 1708331 - DNA, 15 bp, Homo sapiens
gatattcctctttct

SEQ ID NO: 1708332 - DNA, 15 bp, Homo sapiens
atattcctctttctt

SEQ ID NO: 1708333 - DNA, 15 bp, Homo sapiens
tattcctctttcttc

SEQ ID NO: 1708334 - DNA, 15 bp, Homo sapiens
attcctctttcttcc

SEQ ID NO: 1708335 - DNA, 15 bp, Homo sapiens
ttcctctttcttcca

SEQ ID NO: 1708336 - DNA, 15 bp, Homo sapiens
tcctctttcttccac

SEQ ID NO: 1708337 - DNA, 15 bp, Homo sapiens
cctctttcttccact

SEQ ID NO: 1708338 - DNA, 15 bp, Homo sapiens
ctctttcttccactg

SEQ ID NO: 1708339 - DNA, 15 bp, Homo sapiens
tctttcttccactgc

SEQ ID NO: 1708340 - DNA, 15 bp, Homo sapiens
ctttcttccactgca

SEQ ID NO: 1708341 - DNA, 15 bp, Homo sapiens
tttcttccactgcat

SEQ ID NO: 1708342 - DNA, 15 bp, Homo sapiens
ttcttccactgcatg

SEQ ID NO: 1708343 - DNA, 15 bp, Homo sapiens
tcttccactgcatgc

SEQ ID NO: 1708344 - DNA, 15 bp, Homo sapiens
cttccactgcatgct

SEQ ID NO: 1708345 - DNA, 15 bp, Homo sapiens
ttccactgcatgctc

SEQ ID NO: 1708346 - DNA, 15 bp, Homo sapiens
tccactgcatgctct

SEQ ID NO: 1708347 - DNA, 15 bp, Homo sapiens
ccactgcatgctctc

SEQ ID NO: 1708348 - DNA, 15 bp, Homo sapiens
cactgcatgctctca

SEQ ID NO: 1708349 - DNA, 15 bp, Homo sapiens
actgcatgctctcac

SEQ ID NO: 1708350 - DNA, 15 bp, Homo sapiens
ctgcatgctctcacc

SEQ ID NO: 1708351 - DNA, 15 bp, Homo sapiens
tgcatgctctcacct

SEQ ID NO: 1708352 - DNA, 15 bp, Homo sapiens
gcatgctctcaccta

SEQ ID NO: 1708353 - DNA, 15 bp, Homo sapiens
catgctctcacctag

SEQ ID NO: 1708354 - DNA, 15 bp, Homo sapiens
atgctctcacctagc

SEQ ID NO: 1708355 - DNA, 15 bp, Homo sapiens
tgctctcacctagca

SEQ ID NO: 1708356 - DNA, 15 bp, Homo sapiens
gctctcacctagcaa

SEQ ID NO: 1708357 - DNA, 15 bp, Homo sapiens
ctctcacctagcaaa

SEQ ID NO: 1708358 - DNA, 15 bp, Homo sapiens
tctcacctagcaaat

SEQ ID NO: 1708359 - DNA, 15 bp, Homo sapiens
ctcacctagcaaatg

SEQ ID NO: 1708360 - DNA, 15 bp, Homo sapiens
tcacctagcaaatgg

SEQ ID NO: 1708361 - DNA, 15 bp, Homo sapiens
cacctagcaaatggc

SEQ ID NO: 1708362 - DNA, 15 bp, Homo sapiens
acctagcaaatggcc

SEQ ID NO: 1708363 - DNA, 15 bp, Homo sapiens
cctagcaaatggcca

SEQ ID NO: 1708364 - DNA, 15 bp, Homo sapiens
ctagcaaatggccac

SEQ ID NO: 1708365 - DNA, 15 bp, Homo sapiens
tagcaaatggccacg

SEQ ID NO: 1708366 - DNA, 15 bp, Homo sapiens
agcaaatggccacga

SEQ ID NO: 1708367 - DNA, 15 bp, Homo sapiens
gcaaatggccacgag

SEQ ID NO: 1708368 - DNA, 15 bp, Homo sapiens
caaatggccacgagt

SEQ ID NO: 1708369 - DNA, 15 bp, Homo sapiens
aaatggccacgagtc

SEQ ID NO: 1708370 - DNA, 15 bp, Homo sapiens
aatggccacgagtca

SEQ ID NO: 1708371 - DNA, 15 bp, Homo sapiens
atggccacgagtcat

SEQ ID NO: 1708372 - DNA, 15 bp, Homo sapiens
tggccacgagtcatt

SEQ ID NO: 1708373 - DNA, 15 bp, Homo sapiens
ggccacgagtcattt

SEQ ID NO: 1708374 - DNA, 15 bp, Homo sapiens
gccacgagtcatttt

SEQ ID NO: 1708375 - DNA, 15 bp, Homo sapiens
ccacgagtcattttg

SEQ ID NO: 1708376 - DNA, 15 bp, Homo sapiens
cacgagtcattttgg

SEQ ID NO: 1708377 - DNA, 15 bp, Homo sapiens
acgagtcattttggg

SEQ ID NO: 1708378 - DNA, 15 bp, Homo sapiens
cgagtcattttgggg

SEQ ID NO: 1708379 - DNA, 15 bp, Homo sapiens
gagtcattttgggga

SEQ ID NO: 1708380 - DNA, 15 bp, Homo sapiens
agtcattttggggag

SEQ ID NO: 1708381 - DNA, 15 bp, Homo sapiens
gtcattttggggagc

SEQ ID NO: 1708382 - DNA, 15 bp, Homo sapiens
tcattttggggagcc

SEQ ID NO: 1708383 - DNA, 15 bp, Homo sapiens
cattttggggagcca

SEQ ID NO: 1708384 - DNA, 15 bp, Homo sapiens
attttggggagccac

SEQ ID NO: 1708385 - DNA, 15 bp, Homo sapiens
ttttggggagccacc

SEQ ID NO: 1708386 - DNA, 15 bp, Homo sapiens
tttggggagccacct

SEQ ID NO: 1708387 - DNA, 15 bp, Homo sapiens
ttggggagccaccta

SEQ ID NO: 1708388 - DNA, 15 bp, Homo sapiens
tggggagccacctat

SEQ ID NO: 1708389 - DNA, 15 bp, Homo sapiens
ggggagccacctatc

SEQ ID NO: 1708390 - DNA, 15 bp, Homo sapiens
gggagccacctatca

SEQ ID NO: 1708391 - DNA, 15 bp, Homo sapiens
ggagccacctatcaa

SEQ ID NO: 1708392 - DNA, 15 bp, Homo sapiens
gagccacctatcaaa

SEQ ID NO: 1708393 - DNA, 15 bp, Homo sapiens
agccacctatcaaaa

SEQ ID NO: 1708394 - DNA, 15 bp, Homo sapiens
gccacctatcaaaag

SEQ ID NO: 1708395 - DNA, 15 bp, Homo sapiens
ccacctatcaaaagg

SEQ ID NO: 1708396 - DNA, 15 bp, Homo sapiens
cacctatcaaaagga

SEQ ID NO: 1708397 - DNA, 15 bp, Homo sapiens
acctatcaaaaggag

SEQ ID NO: 1708398 - DNA, 15 bp, Homo sapiens
cctatcaaaaggagt

SEQ ID NO: 1708399 - DNA, 15 bp, Homo sapiens
ctatcaaaaggagtc

SEQ ID NO: 1708400 - DNA, 15 bp, Homo sapiens
tatcaaaaggagtca

SEQ ID NO: 1708401 - DNA, 15 bp, Homo sapiens
atcaaaaggagtcat

SEQ ID NO: 1708402 - DNA, 15 bp, Homo sapiens
tcaaaaggagtcatt

SEQ ID NO: 1708403 - DNA, 15 bp, Homo sapiens
caaaaggagtcatta

SEQ ID NO: 1708404 - DNA, 15 bp, Homo sapiens
aaaaggagtcattac

SEQ ID NO: 1708405 - DNA, 15 bp, Homo sapiens
aaaggagtcattaca

SEQ ID NO: 1708406 - DNA, 15 bp, Homo sapiens
aaggagtcattacat

SEQ ID NO: 1708407 - DNA, 15 bp, Homo sapiens
aggagtcattacata

SEQ ID NO: 1708408 - DNA, 15 bp, Homo sapiens
ggagtcattacataa

SEQ ID NO: 1708409 - DNA, 15 bp, Homo sapiens
gagtcattacataac

SEQ ID NO: 1708410 - DNA, 15 bp, Homo sapiens
agtcattacataact

SEQ ID NO: 1708411 - DNA, 15 bp, Homo sapiens
gtcattacataactt

SEQ ID NO: 1708412 - DNA, 15 bp, Homo sapiens
tcattacataactta

SEQ ID NO: 1708413 - DNA, 15 bp, Homo sapiens
cattacataacttat

SEQ ID NO: 1708414 - DNA, 15 bp, Homo sapiens
attacataacttata

SEQ ID NO: 1708415 - DNA, 15 bp, Homo sapiens
ttacataacttatag

SEQ ID NO: 1708416 - DNA, 15 bp, Homo sapiens
tacataacttatagg

SEQ ID NO: 1708417 - DNA, 15 bp, Homo sapiens
acataacttataggc

SEQ ID NO: 1708418 - DNA, 15 bp, Homo sapiens
cataacttataggca

SEQ ID NO: 1708419 - DNA, 15 bp, Homo sapiens
ataacttataggcaa

SEQ ID NO: 1708420 - DNA, 15 bp, Homo sapiens
taacttataggcaag

SEQ ID NO: 1708421 - DNA, 15 bp, Homo sapiens
aacttataggcaaga

SEQ ID NO: 1708422 - DNA, 15 bp, Homo sapiens
acttataggcaagag

SEQ ID NO: 1708423 - DNA, 15 bp, Homo sapiens
cttataggcaagaga

SEQ ID NO: 1708424 - DNA, 15 bp, Homo sapiens
ttataggcaagagaa

SEQ ID NO: 1708425 - DNA, 15 bp, Homo sapiens
tataggcaagagaag

SEQ ID NO: 1708426 - DNA, 15 bp, Homo sapiens
ataggcaagagaaga

SEQ ID NO: 1708427 - DNA, 15 bp, Homo sapiens
taggcaagagaagac

SEQ ID NO: 1708428 - DNA, 15 bp, Homo sapiens
aggcaagagaagact

SEQ ID NO: 1708429 - DNA, 15 bp, Homo sapiens
ggcaagagaagactt

SEQ ID NO: 1708430 - DNA, 15 bp, Homo sapiens
gcaagagaagacttc

SEQ ID NO: 1708431 - DNA, 15 bp, Homo sapiens
caagagaagacttct

SEQ ID NO: 1708432 - DNA, 15 bp, Homo sapiens
aagagaagacttctc

SEQ ID NO: 1708433 - DNA, 15 bp, Homo sapiens
agagaagacttctca

SEQ ID NO: 1708434 - DNA, 15 bp, Homo sapiens
gagaagacttctcaa

SEQ ID NO: 1708435 - DNA, 15 bp, Homo sapiens
agaagacttctcaag

SEQ ID NO: 1708436 - DNA, 15 bp, Homo sapiens
gaagacttctcaagc

SEQ ID NO: 1708437 - DNA, 15 bp, Homo sapiens
aagacttctcaagct

SEQ ID NO: 1708438 - DNA, 15 bp, Homo sapiens
agacttctcaagctt

SEQ ID NO: 1708439 - DNA, 15 bp, Homo sapiens
gacttctcaagcttg

SEQ ID NO: 1708440 - DNA, 15 bp, Homo sapiens
acttctcaagcttga

SEQ ID NO: 1708441 - DNA, 15 bp, Homo sapiens
cttctcaagcttgag

SEQ ID NO: 1708442 - DNA, 15 bp, Homo sapiens
ttctcaagcttgagg

SEQ ID NO: 1708443 - DNA, 15 bp, Homo sapiens
tctcaagcttgaggt

SEQ ID NO: 1708444 - DNA, 15 bp, Homo sapiens
ctcaagcttgaggtg

SEQ ID NO: 1708445 - DNA, 15 bp, Homo sapiens
tcaagcttgaggtgg

SEQ ID NO: 1708446 - DNA, 15 bp, Homo sapiens
caagcttgaggtggt

SEQ ID NO: 1708447 - DNA, 15 bp, Homo sapiens
aagcttgaggtggtg

SEQ ID NO: 1708448 - DNA, 15 bp, Homo sapiens
agcttgaggtggtgc

SEQ ID NO: 1708449 - DNA, 15 bp, Homo sapiens
gcttgaggtggtgct

SEQ ID NO: 1708450 - DNA, 15 bp, Homo sapiens
cttgaggtggtgctt

SEQ ID NO: 1708451 - DNA, 15 bp, Homo sapiens
ttgaggtggtgcttc

SEQ ID NO: 1708452 - DNA, 15 bp, Homo sapiens
tgaggtggtgcttct

SEQ ID NO: 1708453 - DNA, 15 bp, Homo sapiens
gaggtggtgcttctg

SEQ ID NO: 1708454 - DNA, 15 bp, Homo sapiens
aggtggtgcttctgc

SEQ ID NO: 1708455 - DNA, 15 bp, Homo sapiens
ggtggtgcttctgcc

SEQ ID NO: 1708456 - DNA, 15 bp, Homo sapiens
gtggtgcttctgcca

SEQ ID NO: 1708457 - DNA, 15 bp, Homo sapiens
tggtgcttctgccag

SEQ ID NO: 1708458 - DNA, 15 bp, Homo sapiens
ggtgcttctgccagc

SEQ ID NO: 1708459 - DNA, 15 bp, Homo sapiens
gtgcttctgccagcc

SEQ ID NO: 1708460 - DNA, 15 bp, Homo sapiens
tgcttctgccagcca

SEQ ID NO: 1708461 - DNA, 15 bp, Homo sapiens
gcttctgccagccag

SEQ ID NO: 1708462 - DNA, 15 bp, Homo sapiens
cttctgccagccaga

SEQ ID NO: 1708463 - DNA, 15 bp, Homo sapiens
ttctgccagccagag

SEQ ID NO: 1708464 - DNA, 15 bp, Homo sapiens
tctgccagccagagg

SEQ ID NO: 1708465 - DNA, 15 bp, Homo sapiens
ctgccagccagaggg

SEQ ID NO: 1708466 - DNA, 15 bp, Homo sapiens
tgccagccagagggt

SEQ ID NO: 1708467 - DNA, 15 bp, Homo sapiens
gccagccagagggtt

SEQ ID NO: 1708468 - DNA, 15 bp, Homo sapiens
ccagccagagggttc

SEQ ID NO: 1708469 - DNA, 15 bp, Homo sapiens
cagccagagggttca

SEQ ID NO: 1708470 - DNA, 15 bp, Homo sapiens
agccagagggttcag

SEQ ID NO: 1708471 - DNA, 15 bp, Homo sapiens
gccagagggttcaga

SEQ ID NO: 1708472 - DNA, 15 bp, Homo sapiens
ccagagggttcagag

SEQ ID NO: 1708473 - DNA, 15 bp, Homo sapiens
cagagggttcagagc

SEQ ID NO: 1708474 - DNA, 15 bp, Homo sapiens
agagggttcagagca

SEQ ID NO: 1708475 - DNA, 15 bp, Homo sapiens
gagggttcagagcac

SEQ ID NO: 1708476 - DNA, 15 bp, Homo sapiens
agggttcagagcact

SEQ ID NO: 1708477 - DNA, 15 bp, Homo sapiens
gggttcagagcacta

SEQ ID NO: 1708478 - DNA, 15 bp, Homo sapiens
ggttcagagcactag

SEQ ID NO: 1708479 - DNA, 15 bp, Homo sapiens
gttcagagcactagt

SEQ ID NO: 1708480 - DNA, 15 bp, Homo sapiens
ttcagagcactagtg

SEQ ID NO: 1708481 - DNA, 15 bp, Homo sapiens
tcagagcactagtgg

SEQ ID NO: 1708482 - DNA, 15 bp, Homo sapiens
cagagcactagtggg

SEQ ID NO: 1708483 - DNA, 15 bp, Homo sapiens
agagcactagtgggc

SEQ ID NO: 1708484 - DNA, 15 bp, Homo sapiens
gagcactagtgggct

SEQ ID NO: 1708485 - DNA, 15 bp, Homo sapiens
agcactagtgggctg

SEQ ID NO: 1708486 - DNA, 15 bp, Homo sapiens
gcactagtgggctgc

SEQ ID NO: 1708487 - DNA, 15 bp, Homo sapiens
cactagtgggctgca

SEQ ID NO: 1708488 - DNA, 15 bp, Homo sapiens
actagtgggctgcag

SEQ ID NO: 1708489 - DNA, 15 bp, Homo sapiens
ctagtgggctgcagt

SEQ ID NO: 1708490 - DNA, 15 bp, Homo sapiens
tagtgggctgcagtg

SEQ ID NO: 1708491 - DNA, 15 bp, Homo sapiens
agtgggctgcagtga

SEQ ID NO: 1708492 - DNA, 15 bp, Homo sapiens
gtgggctgcagtgag

SEQ ID NO: 1708493 - DNA, 15 bp, Homo sapiens
tgggctgcagtgagc

SEQ ID NO: 1708494 - DNA, 15 bp, Homo sapiens
gggctgcagtgagca

SEQ ID NO: 1708495 - DNA, 15 bp, Homo sapiens
ggctgcagtgagcac

SEQ ID NO: 1708496 - DNA, 15 bp, Homo sapiens
gctgcagtgagcaca

SEQ ID NO: 1708497 - DNA, 15 bp, Homo sapiens
ctgcagtgagcacat

SEQ ID NO: 1708498 - DNA, 15 bp, Homo sapiens
tgcagtgagcacatt

SEQ ID NO: 1708499 - DNA, 15 bp, Homo sapiens
gcagtgagcacattc

SEQ ID NO: 1708500 - DNA, 15 bp, Homo sapiens
cagtgagcacattcc

SEQ ID NO: 1708501 - DNA, 15 bp, Homo sapiens
agtgagcacattcca

SEQ ID NO: 1708502 - DNA, 15 bp, Homo sapiens
gtgagcacattccac

SEQ ID NO: 1708503 - DNA, 15 bp, Homo sapiens
tgagcacattccacc

SEQ ID NO: 1708504 - DNA, 15 bp, Homo sapiens
gagcacattccacct

SEQ ID NO: 1708505 - DNA, 15 bp, Homo sapiens
agcacattccacctt

SEQ ID NO: 1708506 - DNA, 15 bp, Homo sapiens
gcacattccaccttg

SEQ ID NO: 1708507 - DNA, 15 bp, Homo sapiens
cacattccaccttgc

SEQ ID NO: 1708508 - DNA, 15 bp, Homo sapiens
acattccaccttgca

SEQ ID NO: 1708509 - DNA, 15 bp, Homo sapiens
cattccaccttgcag

SEQ ID NO: 1708510 - DNA, 15 bp, Homo sapiens
attccaccttgcaga

SEQ ID NO: 1708511 - DNA, 15 bp, Homo sapiens
ttccaccttgcagaa

SEQ ID NO: 1708512 - DNA, 15 bp, Homo sapiens
tccaccttgcagaag

SEQ ID NO: 1708513 - DNA, 15 bp, Homo sapiens
ccaccttgcagaagc

SEQ ID NO: 1708514 - DNA, 15 bp, Homo sapiens
caccttgcagaagcc

SEQ ID NO: 1708515 - DNA, 15 bp, Homo sapiens
accttgcagaagcca

SEQ ID NO: 1708516 - DNA, 15 bp, Homo sapiens
ccttgcagaagccat

SEQ ID NO: 1708517 - DNA, 15 bp, Homo sapiens
cttgcagaagccatt

SEQ ID NO: 1708518 - DNA, 15 bp, Homo sapiens
ttgcagaagccattt

SEQ ID NO: 1708519 - DNA, 15 bp, Homo sapiens
tgcagaagccatttg

SEQ ID NO: 1708520 - DNA, 15 bp, Homo sapiens
gcagaagccatttgt

SEQ ID NO: 1708521 - DNA, 15 bp, Homo sapiens
cagaagccatttgtg

SEQ ID NO: 1708522 - DNA, 15 bp, Homo sapiens
agaagccatttgtgt

SEQ ID NO: 1708523 - DNA, 15 bp, Homo sapiens
gaagccatttgtgtg

SEQ ID NO: 1708524 - DNA, 15 bp, Homo sapiens
aagccatttgtgtgc

SEQ ID NO: 1708525 - DNA, 15 bp, Homo sapiens
agccatttgtgtgca

SEQ ID NO: 1708526 - DNA, 15 bp, Homo sapiens
gccatttgtgtgcat

SEQ ID NO: 1708527 - DNA, 15 bp, Homo sapiens
ccatttgtgtgcatt

SEQ ID NO: 1708528 - DNA, 15 bp, Homo sapiens
catttgtgtgcattt

SEQ ID NO: 1708529 - DNA, 15 bp, Homo sapiens
atttgtgtgcatttc

SEQ ID NO: 1708530 - DNA, 15 bp, Homo sapiens
tttgtgtgcatttct

SEQ ID NO: 1708531 - DNA, 15 bp, Homo sapiens
ttgtgtgcatttctt

SEQ ID NO: 1708532 - DNA, 15 bp, Homo sapiens
tgtgtgcatttcttt

SEQ ID NO: 1708533 - DNA, 15 bp, Homo sapiens
gtgtgcatttctttt

SEQ ID NO: 1708534 - DNA, 15 bp, Homo sapiens
tgtgcatttcttttt

SEQ ID NO: 1708535 - DNA, 15 bp, Homo sapiens
gtgcatttcttttta

SEQ ID NO: 1708536 - DNA, 15 bp, Homo sapiens
tgcatttctttttaa

SEQ ID NO: 1708537 - DNA, 15 bp, Homo sapiens
gcatttctttttaat

SEQ ID NO: 1708538 - DNA, 15 bp, Homo sapiens
catttctttttaatt

SEQ ID NO: 1708539 - DNA, 15 bp, Homo sapiens
atttctttttaattc

SEQ ID NO: 1708540 - DNA, 15 bp, Homo sapiens
tttctttttaattct

SEQ ID NO: 1708541 - DNA, 15 bp, Homo sapiens
ttctttttaattctg

SEQ ID NO: 1708542 - DNA, 15 bp, Homo sapiens
tctttttaattctgt

SEQ ID NO: 1708543 - DNA, 15 bp, Homo sapiens
ctttttaattctgtg

SEQ ID NO: 1708544 - DNA, 15 bp, Homo sapiens
tttttaattctgtgt

SEQ ID NO: 1708545 - DNA, 15 bp, Homo sapiens
ttttaattctgtgtt

SEQ ID NO: 1708546 - DNA, 15 bp, Homo sapiens
tttaattctgtgttt

SEQ ID NO: 1708547 - DNA, 15 bp, Homo sapiens
ttaattctgtgtttg

SEQ ID NO: 1708548 - DNA, 15 bp, Homo sapiens
taattctgtgtttgg

SEQ ID NO: 1708549 - DNA, 15 bp, Homo sapiens
aattctgtgtttggt

SEQ ID NO: 1708550 - DNA, 15 bp, Homo sapiens
attctgtgtttggtg

SEQ ID NO: 1708551 - DNA, 15 bp, Homo sapiens
ttctgtgtttggtga

SEQ ID NO: 1708552 - DNA, 15 bp, Homo sapiens
tctgtgtttggtgac

SEQ ID NO: 1708553 - DNA, 15 bp, Homo sapiens
ctgtgtttggtgaca

SEQ ID NO: 1708554 - DNA, 15 bp, Homo sapiens
tgtgtttggtgacat

SEQ ID NO: 1708555 - DNA, 15 bp, Homo sapiens
gtgtttggtgacatt

SEQ ID NO: 1708556 - DNA, 15 bp, Homo sapiens
tgtttggtgacatta

SEQ ID NO: 1708557 - DNA, 15 bp, Homo sapiens
gtttggtgacattat

SEQ ID NO: 1708558 - DNA, 15 bp, Homo sapiens
tttggtgacattatg

SEQ ID NO: 1708559 - DNA, 15 bp, Homo sapiens
ttggtgacattatgc

SEQ ID NO: 1708560 - DNA, 15 bp, Homo sapiens
tggtgacattatgct

SEQ ID NO: 1708561 - DNA, 15 bp, Homo sapiens
ggtgacattatgctg

SEQ ID NO: 1708562 - DNA, 15 bp, Homo sapiens
gtgacattatgctgg

SEQ ID NO: 1708563 - DNA, 15 bp, Homo sapiens
tgacattatgctggt

SEQ ID NO: 1708564 - DNA, 15 bp, Homo sapiens
gacattatgctggta

SEQ ID NO: 1708565 - DNA, 15 bp, Homo sapiens
acattatgctggtag

SEQ ID NO: 1708566 - DNA, 15 bp, Homo sapiens
cattatgctggtagc

SEQ ID NO: 1708567 - DNA, 15 bp, Homo sapiens
attatgctggtagct

SEQ ID NO: 1708568 - DNA, 15 bp, Homo sapiens
ttatgctggtagctt

SEQ ID NO: 1708569 - DNA, 15 bp, Homo sapiens
tatgctggtagcttg

SEQ ID NO: 1708570 - DNA, 15 bp, Homo sapiens
atgctggtagcttga

SEQ ID NO: 1708571 - DNA, 15 bp, Homo sapiens
tgctggtagcttgaa

SEQ ID NO: 1708572 - DNA, 15 bp, Homo sapiens
gctggtagcttgaaa

SEQ ID NO: 1708573 - DNA, 15 bp, Homo sapiens
ctggtagcttgaaat

SEQ ID NO: 1708574 - DNA, 15 bp, Homo sapiens
tggtagcttgaaatt

SEQ ID NO: 1708575 - DNA, 15 bp, Homo sapiens
ggtagcttgaaattg

SEQ ID NO: 1708576 - DNA, 15 bp, Homo sapiens
gtagcttgaaattga

SEQ ID NO: 1708577 - DNA, 15 bp, Homo sapiens
tagcttgaaattgac

SEQ ID NO: 1708578 - DNA, 15 bp, Homo sapiens
agcttgaaattgacc

SEQ ID NO: 1708579 - DNA, 15 bp, Homo sapiens
gcttgaaattgacca

SEQ ID NO: 1708580 - DNA, 15 bp, Homo sapiens
cttgaaattgaccaa

SEQ ID NO: 1708581 - DNA, 15 bp, Homo sapiens
ttgaaattgaccaag

SEQ ID NO: 1708582 - DNA, 15 bp, Homo sapiens
tgaaattgaccaagg

SEQ ID NO: 1708583 - DNA, 15 bp, Homo sapiens
gaaattgaccaaggt

SEQ ID NO: 1708584 - DNA, 15 bp, Homo sapiens
aaattgaccaaggtg

SEQ ID NO: 1708585 - DNA, 15 bp, Homo sapiens
aattgaccaaggtgg

SEQ ID NO: 1708586 - DNA, 15 bp, Homo sapiens
attgaccaaggtggg

SEQ ID NO: 1708587 - DNA, 15 bp, Homo sapiens
ttgaccaaggtggga

SEQ ID NO: 1708588 - DNA, 15 bp, Homo sapiens
tgaccaaggtgggag

SEQ ID NO: 1708589 - DNA, 15 bp, Homo sapiens
gaccaaggtgggagt

SEQ ID NO: 1708590 - DNA, 15 bp, Homo sapiens
accaaggtgggagtg

SEQ ID NO: 1708591 - DNA, 15 bp, Homo sapiens
ccaaggtgggagtgt

SEQ ID NO: 1708592 - DNA, 15 bp, Homo sapiens
caaggtgggagtgtt

SEQ ID NO: 1708593 - DNA, 15 bp, Homo sapiens
aaggtgggagtgttt

SEQ ID NO: 1708594 - DNA, 15 bp, Homo sapiens
aggtgggagtgttta

SEQ ID NO: 1708595 - DNA, 15 bp, Homo sapiens
ggtgggagtgtttac

SEQ ID NO: 1708596 - DNA, 15 bp, Homo sapiens
gtgggagtgtttaca

SEQ ID NO: 1708597 - DNA, 15 bp, Homo sapiens
tgggagtgtttacat

SEQ ID NO: 1708598 - DNA, 15 bp, Homo sapiens
gggagtgtttacata

SEQ ID NO: 1708599 - DNA, 15 bp, Homo sapiens
ggagtgtttacataa

SEQ ID NO: 1708600 - DNA, 15 bp, Homo sapiens
gagtgtttacataac

SEQ ID NO: 1708601 - DNA, 15 bp, Homo sapiens
agtgtttacataaca

SEQ ID NO: 1708602 - DNA, 15 bp, Homo sapiens
gtgtttacataacag

SEQ ID NO: 1708603 - DNA, 15 bp, Homo sapiens
tgtttacataacaga

SEQ ID NO: 1708604 - DNA, 15 bp, Homo sapiens
gtttacataacagaa

SEQ ID NO: 1708605 - DNA, 15 bp, Homo sapiens
tttacataacagaaa

SEQ ID NO: 1708606 - DNA, 15 bp, Homo sapiens
ttacataacagaaat

SEQ ID NO: 1708607 - DNA, 15 bp, Homo sapiens
tacataacagaaatt

SEQ ID NO: 1708608 - DNA, 15 bp, Homo sapiens
acataacagaaattg

SEQ ID NO: 1708609 - DNA, 15 bp, Homo sapiens
cataacagaaattgg

SEQ ID NO: 1708610 - DNA, 15 bp, Homo sapiens
ataacagaaattggc

SEQ ID NO: 1708611 - DNA, 15 bp, Homo sapiens
taacagaaattggca

SEQ ID NO: 1708612 - DNA, 15 bp, Homo sapiens
aacagaaattggcaa

SEQ ID NO: 1708613 - DNA, 15 bp, Homo sapiens
acagaaattggcaaa

SEQ ID NO: 1708614 - DNA, 15 bp, Homo sapiens
cagaaattggcaaat

SEQ ID NO: 1708615 - DNA, 15 bp, Homo sapiens
agaaattggcaaata

SEQ ID NO: 1708616 - DNA, 15 bp, Homo sapiens
gaaattggcaaatat

SEQ ID NO: 1708617 - DNA, 15 bp, Homo sapiens
aaattggcaaatatt

SEQ ID NO: 1708618 - DNA, 15 bp, Homo sapiens
aattggcaaatatta

SEQ ID NO: 1708619 - DNA, 15 bp, Homo sapiens
attggcaaatattaa

SEQ ID NO: 1708620 - DNA, 15 bp, Homo sapiens
ttggcaaatattaaa

SEQ ID NO: 1708621 - DNA, 15 bp, Homo sapiens
tggcaaatattaaaa

SEQ ID NO: 1708622 - DNA, 15 bp, Homo sapiens
ggcaaatattaaaat

SEQ ID NO: 1708623 - DNA, 15 bp, Homo sapiens
gcaaatattaaaatg

SEQ ID NO: 1708624 - DNA, 15 bp, Homo sapiens
caaatattaaaatgt

SEQ ID NO: 1708625 - DNA, 15 bp, Homo sapiens
aaatattaaaatgtc

SEQ ID NO: 1708626 - DNA, 15 bp, Homo sapiens
aatattaaaatgtcc

SEQ ID NO: 1708627 - DNA, 15 bp, Homo sapiens
atattaaaatgtcct

SEQ ID NO: 1708628 - DNA, 15 bp, Homo sapiens
tattaaaatgtcctt

SEQ ID NO: 1708629 - DNA, 15 bp, Homo sapiens
attaaaatgtccttc

SEQ ID NO: 1708630 - DNA, 15 bp, Homo sapiens
ttaaaatgtccttcc

SEQ ID NO: 1708631 - DNA, 15 bp, Homo sapiens
taaaatgtccttccc

SEQ ID NO: 1708632 - DNA, 15 bp, Homo sapiens
aaaatgtccttcccc

SEQ ID NO: 1708633 - DNA, 15 bp, Homo sapiens
aaatgtccttcccca

SEQ ID NO: 1708634 - DNA, 15 bp, Homo sapiens
aatgtccttccccac

SEQ ID NO: 1708635 - DNA, 15 bp, Homo sapiens
atgtccttccccacc

SEQ ID NO: 1708636 - DNA, 15 bp, Homo sapiens
tgtccttccccacca

SEQ ID NO: 1708637 - DNA, 15 bp, Homo sapiens
gtccttccccaccac

SEQ ID NO: 1708638 - DNA, 15 bp, Homo sapiens
tccttccccaccacc

SEQ ID NO: 1708639 - DNA, 15 bp, Homo sapiens
ccttccccaccaccc

SEQ ID NO: 1708640 - DNA, 15 bp, Homo sapiens
cttccccaccaccct

SEQ ID NO: 1708641 - DNA, 15 bp, Homo sapiens
ttccccaccaccctc

SEQ ID NO: 1708642 - DNA, 15 bp, Homo sapiens
tccccaccaccctct

SEQ ID NO: 1708643 - DNA, 15 bp, Homo sapiens
ccccaccaccctctc

SEQ ID NO: 1708644 - DNA, 15 bp, Homo sapiens
cccaccaccctctcc

SEQ ID NO: 1708645 - DNA, 15 bp, Homo sapiens
ccaccaccctctccc

SEQ ID NO: 1708646 - DNA, 15 bp, Homo sapiens
caccaccctctcccc

SEQ ID NO: 1708647 - DNA, 15 bp, Homo sapiens
accaccctctcccct

SEQ ID NO: 1708648 - DNA, 15 bp, Homo sapiens
ccaccctctcccctg

SEQ ID NO: 1708649 - DNA, 15 bp, Homo sapiens
caccctctcccctga

SEQ ID NO: 1708650 - DNA, 15 bp, Homo sapiens
accctctcccctgag

SEQ ID NO: 1708651 - DNA, 15 bp, Homo sapiens
ccctctcccctgaga

SEQ ID NO: 1708652 - DNA, 15 bp, Homo sapiens
cctctcccctgagaa

SEQ ID NO: 1708653 - DNA, 15 bp, Homo sapiens
ctctcccctgagaac

SEQ ID NO: 1708654 - DNA, 15 bp, Homo sapiens
tctcccctgagaact

SEQ ID NO: 1708655 - DNA, 15 bp, Homo sapiens
ctcccctgagaactg

SEQ ID NO: 1708656 - DNA, 15 bp, Homo sapiens
tcccctgagaactgg

SEQ ID NO: 1708657 - DNA, 15 bp, Homo sapiens
cccctgagaactggt

SEQ ID NO: 1708658 - DNA, 15 bp, Homo sapiens
ccctgagaactggtt

SEQ ID NO: 1708659 - DNA, 15 bp, Homo sapiens
cctgagaactggttg

SEQ ID NO: 1708660 - DNA, 15 bp, Homo sapiens
ctgagaactggttgt

SEQ ID NO: 1708661 - DNA, 15 bp, Homo sapiens
tgagaactggttgtt

SEQ ID NO: 1708662 - DNA, 15 bp, Homo sapiens
gagaactggttgtta

SEQ ID NO: 1708663 - DNA, 15 bp, Homo sapiens
agaactggttgttaa

SEQ ID NO: 1708664 - DNA, 15 bp, Homo sapiens
gaactggttgttaaa

SEQ ID NO: 1708665 - DNA, 15 bp, Homo sapiens
aactggttgttaaat

SEQ ID NO: 1708666 - DNA, 15 bp, Homo sapiens
actggttgttaaatt

SEQ ID NO: 1708667 - DNA, 15 bp, Homo sapiens
ctggttgttaaattt

SEQ ID NO: 1708668 - DNA, 15 bp, Homo sapiens
tggttgttaaatttc

SEQ ID NO: 1708669 - DNA, 15 bp, Homo sapiens
ggttgttaaatttct

SEQ ID NO: 1708670 - DNA, 15 bp, Homo sapiens
gttgttaaatttctt

SEQ ID NO: 1708671 - DNA, 15 bp, Homo sapiens
ttgttaaatttcttt

SEQ ID NO: 1708672 - DNA, 15 bp, Homo sapiens
tgttaaatttctttc

SEQ ID NO: 1708673 - DNA, 15 bp, Homo sapiens
gttaaatttctttcc

SEQ ID NO: 1708674 - DNA, 15 bp, Homo sapiens
ttaaatttctttcca

SEQ ID NO: 1708675 - DNA, 15 bp, Homo sapiens
taaatttctttccag

SEQ ID NO: 1708676 - DNA, 15 bp, Homo sapiens
aaatttctttccagt

SEQ ID NO: 1708677 - DNA, 15 bp, Homo sapiens
aatttctttccagta

SEQ ID NO: 1708678 - DNA, 15 bp, Homo sapiens
atttctttccagtac

SEQ ID NO: 1708679 - DNA, 15 bp, Homo sapiens
tttctttccagtaca

SEQ ID NO: 1708680 - DNA, 15 bp, Homo sapiens
ttctttccagtacat

SEQ ID NO: 1708681 - DNA, 15 bp, Homo sapiens
tctttccagtacatt

SEQ ID NO: 1708682 - DNA, 15 bp, Homo sapiens
ctttccagtacatta

SEQ ID NO: 1708683 - DNA, 15 bp, Homo sapiens
tttccagtacattac

SEQ ID NO: 1708684 - DNA, 15 bp, Homo sapiens
ttccagtacattaca

SEQ ID NO: 1708685 - DNA, 15 bp, Homo sapiens
tccagtacattacag

SEQ ID NO: 1708686 - DNA, 15 bp, Homo sapiens
ccagtacattacaga

SEQ ID NO: 1708687 - DNA, 15 bp, Homo sapiens
cagtacattacagag

SEQ ID NO: 1708688 - DNA, 15 bp, Homo sapiens
agtacattacagagt

SEQ ID NO: 1708689 - DNA, 15 bp, Homo sapiens
gtacattacagagtc

SEQ ID NO: 1708690 - DNA, 15 bp, Homo sapiens
tacattacagagtca

SEQ ID NO: 1708691 - DNA, 15 bp, Homo sapiens
acattacagagtcag

SEQ ID NO: 1708692 - DNA, 15 bp, Homo sapiens
cattacagagtcagg

SEQ ID NO: 1708693 - DNA, 15 bp, Homo sapiens
attacagagtcaggg

SEQ ID NO: 1708694 - DNA, 15 bp, Homo sapiens
ttacagagtcagggg

SEQ ID NO: 1708695 - DNA, 15 bp, Homo sapiens
tacagagtcaggggt

SEQ ID NO: 1708696 - DNA, 15 bp, Homo sapiens
acagagtcaggggta

SEQ ID NO: 1708697 - DNA, 15 bp, Homo sapiens
cagagtcaggggtaa

SEQ ID NO: 1708698 - DNA, 15 bp, Homo sapiens
agagtcaggggtaac

SEQ ID NO: 1708699 - DNA, 15 bp, Homo sapiens
gagtcaggggtaaca

SEQ ID NO: 1708700 - DNA, 15 bp, Homo sapiens
agtcaggggtaacat

SEQ ID NO: 1708701 - DNA, 15 bp, Homo sapiens
gtcaggggtaacata

SEQ ID NO: 1708702 - DNA, 15 bp, Homo sapiens
tcaggggtaacatag

SEQ ID NO: 1708703 - DNA, 15 bp, Homo sapiens
caggggtaacataga

SEQ ID NO: 1708704 - DNA, 15 bp, Homo sapiens
aggggtaacatagaa

SEQ ID NO: 1708705 - DNA, 15 bp, Homo sapiens
ggggtaacatagaag

SEQ ID NO: 1708706 - DNA, 15 bp, Homo sapiens
gggtaacatagaaga

SEQ ID NO: 1708707 - DNA, 15 bp, Homo sapiens
ggtaacatagaagat

SEQ ID NO: 1708708 - DNA, 15 bp, Homo sapiens
gtaacatagaagatt

SEQ ID NO: 1708709 - DNA, 15 bp, Homo sapiens
taacatagaagattc

SEQ ID NO: 1708710 - DNA, 15 bp, Homo sapiens
aacatagaagattca

SEQ ID NO: 1708711 - DNA, 15 bp, Homo sapiens
acatagaagattcaa

SEQ ID NO: 1708712 - DNA, 15 bp, Homo sapiens
catagaagattcaat

SEQ ID NO: 1708713 - DNA, 15 bp, Homo sapiens
atagaagattcaata

SEQ ID NO: 1708714 - DNA, 15 bp, Homo sapiens
tagaagattcaatat

SEQ ID NO: 1708715 - DNA, 15 bp, Homo sapiens
agaagattcaatatt

SEQ ID NO: 1708716 - DNA, 15 bp, Homo sapiens
gaagattcaatattc

SEQ ID NO: 1708717 - DNA, 15 bp, Homo sapiens
aagattcaatattct

SEQ ID NO: 1708718 - DNA, 15 bp, Homo sapiens
agattcaatattctc

SEQ ID NO: 1708719 - DNA, 15 bp, Homo sapiens
gattcaatattctca

SEQ ID NO: 1708720 - DNA, 15 bp, Homo sapiens
attcaatattctcag

SEQ ID NO: 1708721 - DNA, 15 bp, Homo sapiens
ttcaatattctcagg

SEQ ID NO: 1708722 - DNA, 15 bp, Homo sapiens
tcaatattctcaggc

SEQ ID NO: 1708723 - DNA, 15 bp, Homo sapiens
caatattctcaggct

SEQ ID NO: 1708724 - DNA, 15 bp, Homo sapiens
aatattctcaggctc

SEQ ID NO: 1708725 - DNA, 15 bp, Homo sapiens
atattctcaggctca

SEQ ID NO: 1708726 - DNA, 15 bp, Homo sapiens
tattctcaggctcat

SEQ ID NO: 1708727 - DNA, 15 bp, Homo sapiens
attctcaggctcatc

SEQ ID NO: 1708728 - DNA, 15 bp, Homo sapiens
ttctcaggctcatct

SEQ ID NO: 1708729 - DNA, 15 bp, Homo sapiens
tctcaggctcatcta

SEQ ID NO: 1708730 - DNA, 15 bp, Homo sapiens
ctcaggctcatctat

SEQ ID NO: 1708731 - DNA, 15 bp, Homo sapiens
tcaggctcatctatc

SEQ ID NO: 1708732 - DNA, 15 bp, Homo sapiens
caggctcatctatcc

SEQ ID NO: 1708733 - DNA, 15 bp, Homo sapiens
aggctcatctatcca

SEQ ID NO: 1708734 - DNA, 15 bp, Homo sapiens
ggctcatctatccaa

SEQ ID NO: 1708735 - DNA, 15 bp, Homo sapiens
gctcatctatccaaa

SEQ ID NO: 1708736 - DNA, 15 bp, Homo sapiens
ctcatctatccaaat

SEQ ID NO: 1708737 - DNA, 15 bp, Homo sapiens
tcatctatccaaatg

SEQ ID NO: 1708738 - DNA, 15 bp, Homo sapiens
catctatccaaatgc

SEQ ID NO: 1708739 - DNA, 15 bp, Homo sapiens
atctatccaaatgcc

SEQ ID NO: 1708740 - DNA, 15 bp, Homo sapiens
tctatccaaatgccc

SEQ ID NO: 1708741 - DNA, 15 bp, Homo sapiens
ctatccaaatgccct

SEQ ID NO: 1708742 - DNA, 15 bp, Homo sapiens
tatccaaatgcccta

SEQ ID NO: 1708743 - DNA, 15 bp, Homo sapiens
atccaaatgccctat

SEQ ID NO: 1708744 - DNA, 15 bp, Homo sapiens
tccaaatgccctatc

SEQ ID NO: 1708745 - DNA, 15 bp, Homo sapiens
ccaaatgccctatcc

SEQ ID NO: 1708746 - DNA, 15 bp, Homo sapiens
caaatgccctatcct

SEQ ID NO: 1708747 - DNA, 15 bp, Homo sapiens
aaatgccctatccta

SEQ ID NO: 1708748 - DNA, 15 bp, Homo sapiens
aatgccctatcctag

SEQ ID NO: 1708749 - DNA, 15 bp, Homo sapiens
atgccctatcctagg

SEQ ID NO: 1708750 - DNA, 15 bp, Homo sapiens
tgccctatcctaggt

SEQ ID NO: 1708751 - DNA, 15 bp, Homo sapiens
gccctatcctaggtc

SEQ ID NO: 1708752 - DNA, 15 bp, Homo sapiens
ccctatcctaggtct

SEQ ID NO: 1708753 - DNA, 15 bp, Homo sapiens
cctatcctaggtctt

SEQ ID NO: 1708754 - DNA, 15 bp, Homo sapiens
ctatcctaggtctta

SEQ ID NO: 1708755 - DNA, 15 bp, Homo sapiens
tatcctaggtcttag

SEQ ID NO: 1708756 - DNA, 15 bp, Homo sapiens
atcctaggtcttagg

SEQ ID NO: 1708757 - DNA, 15 bp, Homo sapiens
tcctaggtcttaggg

SEQ ID NO: 1708758 - DNA, 15 bp, Homo sapiens
cctaggtcttagggt

SEQ ID NO: 1708759 - DNA, 15 bp, Homo sapiens
ctaggtcttagggta

SEQ ID NO: 1708760 - DNA, 15 bp, Homo sapiens
taggtcttagggtaa

SEQ ID NO: 1708761 - DNA, 15 bp, Homo sapiens
aggtcttagggtaat

SEQ ID NO: 1708762 - DNA, 15 bp, Homo sapiens
ggtcttagggtaata

SEQ ID NO: 1708763 - DNA, 15 bp, Homo sapiens
gtcttagggtaatac

SEQ ID NO: 1708764 - DNA, 15 bp, Homo sapiens
tcttagggtaatact

SEQ ID NO: 1708765 - DNA, 15 bp, Homo sapiens
cttagggtaatactc

SEQ ID NO: 1708766 - DNA, 15 bp, Homo sapiens
ttagggtaatactct

SEQ ID NO: 1708767 - DNA, 15 bp, Homo sapiens
tagggtaatactctt

SEQ ID NO: 1708768 - DNA, 15 bp, Homo sapiens
agggtaatactcttt

SEQ ID NO: 1708769 - DNA, 15 bp, Homo sapiens
gggtaatactctttt

SEQ ID NO: 1708770 - DNA, 15 bp, Homo sapiens
ggtaatactcttttt

SEQ ID NO: 1708771 - DNA, 15 bp, Homo sapiens
gtaatactctttttc

SEQ ID NO: 1708772 - DNA, 15 bp, Homo sapiens
taatactctttttcc

SEQ ID NO: 1708773 - DNA, 15 bp, Homo sapiens
aatactctttttcct

SEQ ID NO: 1708774 - DNA, 15 bp, Homo sapiens
atactctttttcctt

SEQ ID NO: 1708775 - DNA, 15 bp, Homo sapiens
tactctttttccttt

SEQ ID NO: 1708776 - DNA, 15 bp, Homo sapiens
actctttttcctttc

SEQ ID NO: 1708777 - DNA, 15 bp, Homo sapiens
ctctttttcctttca

SEQ ID NO: 1708778 - DNA, 15 bp, Homo sapiens
tctttttcctttcaa

SEQ ID NO: 1708779 - DNA, 15 bp, Homo sapiens
ctttttcctttcaag

SEQ ID NO: 1708780 - DNA, 15 bp, Homo sapiens
tttttcctttcaaga

SEQ ID NO: 1708781 - DNA, 15 bp, Homo sapiens
ttttcctttcaagaa

SEQ ID NO: 1708782 - DNA, 15 bp, Homo sapiens
tttcctttcaagaac

SEQ ID NO: 1708783 - DNA, 15 bp, Homo sapiens
ttcctttcaagaaca

SEQ ID NO: 1708784 - DNA, 15 bp, Homo sapiens
tcctttcaagaacaa

SEQ ID NO: 1708785 - DNA, 15 bp, Homo sapiens
cctttcaagaacaag

SEQ ID NO: 1708786 - DNA, 15 bp, Homo sapiens
ctttcaagaacaaga

SEQ ID NO: 1708787 - DNA, 15 bp, Homo sapiens
tttcaagaacaagat

SEQ ID NO: 1708788 - DNA, 15 bp, Homo sapiens
ttcaagaacaagatg

SEQ ID NO: 1708789 - DNA, 15 bp, Homo sapiens
tcaagaacaagatgt

SEQ ID NO: 1708790 - DNA, 15 bp, Homo sapiens
caagaacaagatgtg

SEQ ID NO: 1708791 - DNA, 15 bp, Homo sapiens
aagaacaagatgtgg

SEQ ID NO: 1708792 - DNA, 15 bp, Homo sapiens
agaacaagatgtggg

SEQ ID NO: 1708793 - DNA, 15 bp, Homo sapiens
gaacaagatgtgggc

SEQ ID NO: 1708794 - DNA, 15 bp, Homo sapiens
aacaagatgtgggct

SEQ ID NO: 1708795 - DNA, 15 bp, Homo sapiens
acaagatgtgggcta

SEQ ID NO: 1708796 - DNA, 15 bp, Homo sapiens
caagatgtgggctag

SEQ ID NO: 1708797 - DNA, 15 bp, Homo sapiens
aagatgtgggctagg

SEQ ID NO: 1708798 - DNA, 15 bp, Homo sapiens
agatgtgggctagga

SEQ ID NO: 1708799 - DNA, 15 bp, Homo sapiens
gatgtgggctaggag

SEQ ID NO: 1708800 - DNA, 15 bp, Homo sapiens
atgtgggctaggaga

SEQ ID NO: 1708801 - DNA, 15 bp, Homo sapiens
tgtgggctaggagac

SEQ ID NO: 1708802 - DNA, 15 bp, Homo sapiens
gtgggctaggagacc

SEQ ID NO: 1708803 - DNA, 15 bp, Homo sapiens
tgggctaggagaccc

SEQ ID NO: 1708804 - DNA, 15 bp, Homo sapiens
gggctaggagaccct

SEQ ID NO: 1708805 - DNA, 15 bp, Homo sapiens
ggctaggagaccctg

SEQ ID NO: 1708806 - DNA, 15 bp, Homo sapiens
gctaggagaccctga

SEQ ID NO: 1708807 - DNA, 15 bp, Homo sapiens
ctaggagaccctgaa

SEQ ID NO: 1708808 - DNA, 15 bp, Homo sapiens
taggagaccctgaaa

SEQ ID NO: 1708809 - DNA, 15 bp, Homo sapiens
aggagaccctgaaag

SEQ ID NO: 1708810 - DNA, 15 bp, Homo sapiens
ggagaccctgaaagt

SEQ ID NO: 1708811 - DNA, 15 bp, Homo sapiens
gagaccctgaaagtc

SEQ ID NO: 1708812 - DNA, 15 bp, Homo sapiens
agaccctgaaagtcc

SEQ ID NO: 1708813 - DNA, 15 bp, Homo sapiens
gaccctgaaagtcca

SEQ ID NO: 1708814 - DNA, 15 bp, Homo sapiens
accctgaaagtccat

SEQ ID NO: 1708815 - DNA, 15 bp, Homo sapiens
ccctgaaagtccatg

SEQ ID NO: 1708816 - DNA, 15 bp, Homo sapiens
cctgaaagtccatgc

SEQ ID NO: 1708817 - DNA, 15 bp, Homo sapiens
ctgaaagtccatgca

SEQ ID NO: 1708818 - DNA, 15 bp, Homo sapiens
tgaaagtccatgcat

SEQ ID NO: 1708819 - DNA, 15 bp, Homo sapiens
gaaagtccatgcatt

SEQ ID NO: 1708820 - DNA, 15 bp, Homo sapiens
aaagtccatgcattt

SEQ ID NO: 1708821 - DNA, 15 bp, Homo sapiens
aagtccatgcatttg

SEQ ID NO: 1708822 - DNA, 15 bp, Homo sapiens
agtccatgcatttgg

SEQ ID NO: 1708823 - DNA, 15 bp, Homo sapiens
gtccatgcatttggt

SEQ ID NO: 1708824 - DNA, 15 bp, Homo sapiens
tccatgcatttggtt

SEQ ID NO: 1708825 - DNA, 15 bp, Homo sapiens
ccatgcatttggttg

SEQ ID NO: 1708826 - DNA, 15 bp, Homo sapiens
catgcatttggttgc

SEQ ID NO: 1708827 - DNA, 15 bp, Homo sapiens
atgcatttggttgcc

SEQ ID NO: 1708828 - DNA, 15 bp, Homo sapiens
tgcatttggttgcct

SEQ ID NO: 1708829 - DNA, 15 bp, Homo sapiens
gcatttggttgcctt

SEQ ID NO: 1708830 - DNA, 15 bp, Homo sapiens
catttggttgccttt

SEQ ID NO: 1708831 - DNA, 15 bp, Homo sapiens
atttggttgcctttt

SEQ ID NO: 1708832 - DNA, 15 bp, Homo sapiens
tttggttgccttttc

SEQ ID NO: 1708833 - DNA, 15 bp, Homo sapiens
ttggttgccttttca

SEQ ID NO: 1708834 - DNA, 15 bp, Homo sapiens
tggttgccttttcaa

SEQ ID NO: 1708835 - DNA, 15 bp, Homo sapiens
ggttgccttttcaac

SEQ ID NO: 1708836 - DNA, 15 bp, Homo sapiens
gttgccttttcaact

SEQ ID NO: 1708837 - DNA, 15 bp, Homo sapiens
ttgccttttcaactc

SEQ ID NO: 1708838 - DNA, 15 bp, Homo sapiens
tgccttttcaactct

SEQ ID NO: 1708839 - DNA, 15 bp, Homo sapiens
gccttttcaactctt

SEQ ID NO: 1708840 - DNA, 15 bp, Homo sapiens
ccttttcaactcttc

SEQ ID NO: 1708841 - DNA, 15 bp, Homo sapiens
cttttcaactcttct

SEQ ID NO: 1708842 - DNA, 15 bp, Homo sapiens
ttttcaactcttctg

SEQ ID NO: 1708843 - DNA, 15 bp, Homo sapiens
tttcaactcttctgc

SEQ ID NO: 1708844 - DNA, 15 bp, Homo sapiens
ttcaactcttctgcc

SEQ ID NO: 1708845 - DNA, 15 bp, Homo sapiens
tcaactcttctgccc

SEQ ID NO: 1708846 - DNA, 15 bp, Homo sapiens
caactcttctgccct

SEQ ID NO: 1708847 - DNA, 15 bp, Homo sapiens
aactcttctgccctt

SEQ ID NO: 1708848 - DNA, 15 bp, Homo sapiens
actcttctgccctta

SEQ ID NO: 1708849 - DNA, 15 bp, Homo sapiens
ctcttctgcccttac

SEQ ID NO: 1708850 - DNA, 15 bp, Homo sapiens
tcttctgcccttaca

SEQ ID NO: 1708851 - DNA, 15 bp, Homo sapiens
cttctgcccttacaa

SEQ ID NO: 1708852 - DNA, 15 bp, Homo sapiens
ttctgcccttacaat

SEQ ID NO: 1708853 - DNA, 15 bp, Homo sapiens
tctgcccttacaatc

SEQ ID NO: 1708854 - DNA, 15 bp, Homo sapiens
ctgcccttacaatca

SEQ ID NO: 1708855 - DNA, 15 bp, Homo sapiens
tgcccttacaatcag

SEQ ID NO: 1708856 - DNA, 15 bp, Homo sapiens
gcccttacaatcagc

SEQ ID NO: 1708857 - DNA, 15 bp, Homo sapiens
cccttacaatcagct

SEQ ID NO: 1708858 - DNA, 15 bp, Homo sapiens
ccttacaatcagctt

SEQ ID NO: 1708859 - DNA, 15 bp, Homo sapiens
cttacaatcagcttc

SEQ ID NO: 1708860 - DNA, 15 bp, Homo sapiens
ttacaatcagcttcc

SEQ ID NO: 1708861 - DNA, 15 bp, Homo sapiens
tacaatcagcttccg

SEQ ID NO: 1708862 - DNA, 15 bp, Homo sapiens
acaatcagcttccgt

SEQ ID NO: 1708863 - DNA, 15 bp, Homo sapiens
caatcagcttccgtg

SEQ ID NO: 1708864 - DNA, 15 bp, Homo sapiens
aatcagcttccgtga

SEQ ID NO: 1708865 - DNA, 15 bp, Homo sapiens
atcagcttccgtgac

SEQ ID NO: 1708866 - DNA, 15 bp, Homo sapiens
tcagcttccgtgact

SEQ ID NO: 1708867 - DNA, 15 bp, Homo sapiens
cagcttccgtgactt

SEQ ID NO: 1708868 - DNA, 15 bp, Homo sapiens
agcttccgtgacttc

SEQ ID NO: 1708869 - DNA, 15 bp, Homo sapiens
gcttccgtgacttcc

SEQ ID NO: 1708870 - DNA, 15 bp, Homo sapiens
cttccgtgacttcct

SEQ ID NO: 1708871 - DNA, 15 bp, Homo sapiens
ttccgtgacttcctg

SEQ ID NO: 1708872 - DNA, 15 bp, Homo sapiens
tccgtgacttcctgt

SEQ ID NO: 1708873 - DNA, 15 bp, Homo sapiens
ccgtgacttcctgta

SEQ ID NO: 1708874 - DNA, 15 bp, Homo sapiens
cgtgacttcctgtag

SEQ ID NO: 1708875 - DNA, 15 bp, Homo sapiens
gtgacttcctgtagc

SEQ ID NO: 1708876 - DNA, 15 bp, Homo sapiens
tgacttcctgtagcc

SEQ ID NO: 1708877 - DNA, 15 bp, Homo sapiens
gacttcctgtagcct

SEQ ID NO: 1708878 - DNA, 15 bp, Homo sapiens
acttcctgtagccta

SEQ ID NO: 1708879 - DNA, 15 bp, Homo sapiens
cttcctgtagcctaa

SEQ ID NO: 1708880 - DNA, 15 bp, Homo sapiens
ttcctgtagcctaaa

SEQ ID NO: 1708881 - DNA, 15 bp, Homo sapiens
tcctgtagcctaaag

SEQ ID NO: 1708882 - DNA, 15 bp, Homo sapiens
cctgtagcctaaagc

SEQ ID NO: 1708883 - DNA, 15 bp, Homo sapiens
ctgtagcctaaagca

SEQ ID NO: 1708884 - DNA, 15 bp, Homo sapiens
tgtagcctaaagcaa

SEQ ID NO: 1708885 - DNA, 15 bp, Homo sapiens
gtagcctaaagcaaa

SEQ ID NO: 1708886 - DNA, 15 bp, Homo sapiens
tagcctaaagcaaac

SEQ ID NO: 1708887 - DNA, 15 bp, Homo sapiens
agcctaaagcaaact

SEQ ID NO: 1708888 - DNA, 15 bp, Homo sapiens
gcctaaagcaaacta

SEQ ID NO: 1708889 - DNA, 15 bp, Homo sapiens
cctaaagcaaactac

SEQ ID NO: 1708890 - DNA, 15 bp, Homo sapiens
ctaaagcaaactaca

SEQ ID NO: 1708891 - DNA, 15 bp, Homo sapiens
taaagcaaactacac

SEQ ID NO: 1708892 - DNA, 15 bp, Homo sapiens
aaagcaaactacact

SEQ ID NO: 1708893 - DNA, 15 bp, Homo sapiens
aagcaaactacacta

SEQ ID NO: 1708894 - DNA, 15 bp, Homo sapiens
agcaaactacactaa

SEQ ID NO: 1708895 - DNA, 15 bp, Homo sapiens
gcaaactacactaaa

SEQ ID NO: 1708896 - DNA, 15 bp, Homo sapiens
caaactacactaaat

SEQ ID NO: 1708897 - DNA, 15 bp, Homo sapiens
aaactacactaaata

SEQ ID NO: 1708898 - DNA, 15 bp, Homo sapiens
aactacactaaatat

SEQ ID NO: 1708899 - DNA, 15 bp, Homo sapiens
actacactaaatatt

SEQ ID NO: 1708900 - DNA, 15 bp, Homo sapiens
ctacactaaatatta

SEQ ID NO: 1708901 - DNA, 15 bp, Homo sapiens
tacactaaatattac

SEQ ID NO: 1708902 - DNA, 15 bp, Homo sapiens
acactaaatattact

SEQ ID NO: 1708903 - DNA, 15 bp, Homo sapiens
cactaaatattacta

SEQ ID NO: 1708904 - DNA, 15 bp, Homo sapiens
actaaatattactaa

SEQ ID NO: 1708905 - DNA, 15 bp, Homo sapiens
ctaaatattactaaa

SEQ ID NO: 1708906 - DNA, 15 bp, Homo sapiens
taaatattactaaaa

SEQ ID NO: 1708907 - DNA, 15 bp, Homo sapiens
aaatattactaaaaa

SEQ ID NO: 1708908 - DNA, 15 bp, Homo sapiens
aatattactaaaaat

SEQ ID NO: 1708909 - DNA, 15 bp, Homo sapiens
atattactaaaaatt

SEQ ID NO: 1708910 - DNA, 15 bp, Homo sapiens
tattactaaaaattg

SEQ ID NO: 1708911 - DNA, 15 bp, Homo sapiens
attactaaaaattgc

SEQ ID NO: 1708912 - DNA, 15 bp, Homo sapiens
ttactaaaaattgcc

SEQ ID NO: 1708913 - DNA, 15 bp, Homo sapiens
tactaaaaattgcca

SEQ ID NO: 1708914 - DNA, 15 bp, Homo sapiens
actaaaaattgccag

SEQ ID NO: 1708915 - DNA, 15 bp, Homo sapiens
ctaaaaattgccagt

SEQ ID NO: 1708916 - DNA, 15 bp, Homo sapiens
taaaaattgccagta

SEQ ID NO: 1708917 - DNA, 15 bp, Homo sapiens
aaaaattgccagtag

SEQ ID NO: 1708918 - DNA, 15 bp, Homo sapiens
aaaattgccagtaga

SEQ ID NO: 1708919 - DNA, 15 bp, Homo sapiens
aaattgccagtagag

SEQ ID NO: 1708920 - DNA, 15 bp, Homo sapiens
aattgccagtagagg

SEQ ID NO: 1708921 - DNA, 15 bp, Homo sapiens
attgccagtagaggc

SEQ ID NO: 1708922 - DNA, 15 bp, Homo sapiens
ttgccagtagaggcc

SEQ ID NO: 1708923 - DNA, 15 bp, Homo sapiens
tgccagtagaggccc

SEQ ID NO: 1708924 - DNA, 15 bp, Homo sapiens
gccagtagaggccct

SEQ ID NO: 1708925 - DNA, 15 bp, Homo sapiens
ccagtagaggccctc

SEQ ID NO: 1708926 - DNA, 15 bp, Homo sapiens
cagtagaggccctct

SEQ ID NO: 1708927 - DNA, 15 bp, Homo sapiens
agtagaggccctctg

SEQ ID NO: 1708928 - DNA, 15 bp, Homo sapiens
gtagaggccctctgg

SEQ ID NO: 1708929 - DNA, 15 bp, Homo sapiens
tagaggccctctggc

SEQ ID NO: 1708930 - DNA, 15 bp, Homo sapiens
agaggccctctggcc

SEQ ID NO: 1708931 - DNA, 15 bp, Homo sapiens
gaggccctctggcct

SEQ ID NO: 1708932 - DNA, 15 bp, Homo sapiens
aggccctctggcctt

SEQ ID NO: 1708933 - DNA, 15 bp, Homo sapiens
ggccctctggccttc

SEQ ID NO: 1708934 - DNA, 15 bp, Homo sapiens
gccctctggccttca

SEQ ID NO: 1708935 - DNA, 15 bp, Homo sapiens
ccctctggccttcac

SEQ ID NO: 1708936 - DNA, 15 bp, Homo sapiens
cctctggccttcacg

SEQ ID NO: 1708937 - DNA, 15 bp, Homo sapiens
ctctggccttcacgg

SEQ ID NO: 1708938 - DNA, 15 bp, Homo sapiens
tctggccttcacggt

SEQ ID NO: 1708939 - DNA, 15 bp, Homo sapiens
ctggccttcacggtg

SEQ ID NO: 1708940 - DNA, 15 bp, Homo sapiens
tggccttcacggtgt

SEQ ID NO: 1708941 - DNA, 15 bp, Homo sapiens
ggccttcacggtgtg

SEQ ID NO: 1708942 - DNA, 15 bp, Homo sapiens
gccttcacggtgtga

SEQ ID NO: 1708943 - DNA, 15 bp, Homo sapiens
ccttcacggtgtgac

SEQ ID NO: 1708944 - DNA, 15 bp, Homo sapiens
cttcacggtgtgact

SEQ ID NO: 1708945 - DNA, 15 bp, Homo sapiens
ttcacggtgtgactt

SEQ ID NO: 1708946 - DNA, 15 bp, Homo sapiens
tcacggtgtgactta

SEQ ID NO: 1708947 - DNA, 15 bp, Homo sapiens
cacggtgtgacttaa

SEQ ID NO: 1708948 - DNA, 15 bp, Homo sapiens
acggtgtgacttaag

SEQ ID NO: 1708949 - DNA, 15 bp, Homo sapiens
cggtgtgacttaagg

SEQ ID NO: 1708950 - DNA, 15 bp, Homo sapiens
ggtgtgacttaaggt

SEQ ID NO: 1708951 - DNA, 15 bp, Homo sapiens
gtgtgacttaaggtg

SEQ ID NO: 1708952 - DNA, 15 bp, Homo sapiens
tgtgacttaaggtga

SEQ ID NO: 1708953 - DNA, 15 bp, Homo sapiens
gtgacttaaggtgac

SEQ ID NO: 1708954 - DNA, 15 bp, Homo sapiens
tgacttaaggtgaca

SEQ ID NO: 1708955 - DNA, 15 bp, Homo sapiens
gacttaaggtgacag

SEQ ID NO: 1708956 - DNA, 15 bp, Homo sapiens
acttaaggtgacagg

SEQ ID NO: 1708957 - DNA, 15 bp, Homo sapiens
cttaaggtgacaggt

SEQ ID NO: 1708958 - DNA, 15 bp, Homo sapiens
ttaaggtgacaggtg

SEQ ID NO: 1708959 - DNA, 15 bp, Homo sapiens
taaggtgacaggtgg

SEQ ID NO: 1708960 - DNA, 15 bp, Homo sapiens
aaggtgacaggtggc

SEQ ID NO: 1708961 - DNA, 15 bp, Homo sapiens
aggtgacaggtggct

SEQ ID NO: 1708962 - DNA, 15 bp, Homo sapiens
ggtgacaggtggctg

SEQ ID NO: 1708963 - DNA, 15 bp, Homo sapiens
gtgacaggtggctgc

SEQ ID NO: 1708964 - DNA, 15 bp, Homo sapiens
tgacaggtggctgcc

SEQ ID NO: 1708965 - DNA, 15 bp, Homo sapiens
gacaggtggctgccc

SEQ ID NO: 1708966 - DNA, 15 bp, Homo sapiens
acaggtggctgccct

SEQ ID NO: 1708967 - DNA, 15 bp, Homo sapiens
caggtggctgccctg

SEQ ID NO: 1708968 - DNA, 15 bp, Homo sapiens
aggtggctgccctga

SEQ ID NO: 1708969 - DNA, 15 bp, Homo sapiens
ggtggctgccctgag

SEQ ID NO: 1708970 - DNA, 15 bp, Homo sapiens
gtggctgccctgagg

SEQ ID NO: 1708971 - DNA, 15 bp, Homo sapiens
tggctgccctgaggc

SEQ ID NO: 1708972 - DNA, 15 bp, Homo sapiens
ggctgccctgaggca

SEQ ID NO: 1708973 - DNA, 15 bp, Homo sapiens
gctgccctgaggcat

SEQ ID NO: 1708974 - DNA, 15 bp, Homo sapiens
ctgccctgaggcatc

SEQ ID NO: 1708975 - DNA, 15 bp, Homo sapiens
tgccctgaggcatca

SEQ ID NO: 1708976 - DNA, 15 bp, Homo sapiens
gccctgaggcatcat

SEQ ID NO: 1708977 - DNA, 15 bp, Homo sapiens
ccctgaggcatcatt

SEQ ID NO: 1708978 - DNA, 15 bp, Homo sapiens
cctgaggcatcattt

SEQ ID NO: 1708979 - DNA, 15 bp, Homo sapiens
ctgaggcatcatttt

SEQ ID NO: 1708980 - DNA, 15 bp, Homo sapiens
tgaggcatcattttg

SEQ ID NO: 1708981 - DNA, 15 bp, Homo sapiens
gaggcatcattttgt

SEQ ID NO: 1708982 - DNA, 15 bp, Homo sapiens
aggcatcattttgtt

SEQ ID NO: 1708983 - DNA, 15 bp, Homo sapiens
ggcatcattttgttt

SEQ ID NO: 1708984 - DNA, 15 bp, Homo sapiens
gcatcattttgtttt

SEQ ID NO: 1708985 - DNA, 15 bp, Homo sapiens
catcattttgtttta

SEQ ID NO: 1708986 - DNA, 15 bp, Homo sapiens
atcattttgttttac

SEQ ID NO: 1708987 - DNA, 15 bp, Homo sapiens
tcattttgttttaca

SEQ ID NO: 1708988 - DNA, 15 bp, Homo sapiens
cattttgttttacaa

SEQ ID NO: 1708989 - DNA, 15 bp, Homo sapiens
attttgttttacaag

SEQ ID NO: 1708990 - DNA, 15 bp, Homo sapiens
ttttgttttacaagg

SEQ ID NO: 1708991 - DNA, 15 bp, Homo sapiens
tttgttttacaaggt

SEQ ID NO: 1708992 - DNA, 15 bp, Homo sapiens
ttgttttacaaggta

SEQ ID NO: 1708993 - DNA, 15 bp, Homo sapiens
tgttttacaaggtat

SEQ ID NO: 1708994 - DNA, 15 bp, Homo sapiens
gttttacaaggtata

SEQ ID NO: 1708995 - DNA, 15 bp, Homo sapiens
ttttacaaggtatac

SEQ ID NO: 1708996 - DNA, 15 bp, Homo sapiens
tttacaaggtataca

SEQ ID NO: 1708997 - DNA, 15 bp, Homo sapiens
ttacaaggtatacaa

SEQ ID NO: 1708998 - DNA, 15 bp, Homo sapiens
tacaaggtatacaat

SEQ ID NO: 1708999 - DNA, 15 bp, Homo sapiens
acaaggtatacaatt

SEQ ID NO: 1709000 - DNA, 15 bp, Homo sapiens
caaggtatacaattc

SEQ ID NO: 1709001 - DNA, 15 bp, Homo sapiens
aaggtatacaattcc

SEQ ID NO: 1709002 - DNA, 15 bp, Homo sapiens
aggtatacaattcca

SEQ ID NO: 1709003 - DNA, 15 bp, Homo sapiens
ggtatacaattccat

SEQ ID NO: 1709004 - DNA, 15 bp, Homo sapiens
gtatacaattccatc

SEQ ID NO: 1709005 - DNA, 15 bp, Homo sapiens
tatacaattccatca

SEQ ID NO: 1709006 - DNA, 15 bp, Homo sapiens
atacaattccatcaa

SEQ ID NO: 1709007 - DNA, 15 bp, Homo sapiens
tacaattccatcaac

SEQ ID NO: 1709008 - DNA, 15 bp, Homo sapiens
acaattccatcaaca

SEQ ID NO: 1709009 - DNA, 15 bp, Homo sapiens
caattccatcaacag

SEQ ID NO: 1709010 - DNA, 15 bp, Homo sapiens
aattccatcaacaga

SEQ ID NO: 1709011 - DNA, 15 bp, Homo sapiens
attccatcaacagaa

SEQ ID NO: 1709012 - DNA, 15 bp, Homo sapiens
ttccatcaacagaat

SEQ ID NO: 1709013 - DNA, 15 bp, Homo sapiens
tccatcaacagaatc

SEQ ID NO: 1709014 - DNA, 15 bp, Homo sapiens
ccatcaacagaatca

SEQ ID NO: 1709015 - DNA, 15 bp, Homo sapiens
catcaacagaatcaa

SEQ ID NO: 1709016 - DNA, 15 bp, Homo sapiens
atcaacagaatcaag

SEQ ID NO: 1709017 - DNA, 15 bp, Homo sapiens
tcaacagaatcaagc

SEQ ID NO: 1709018 - DNA, 15 bp, Homo sapiens
caacagaatcaagcc

SEQ ID NO: 1709019 - DNA, 15 bp, Homo sapiens
aacagaatcaagccc

SEQ ID NO: 1709020 - DNA, 15 bp, Homo sapiens
acagaatcaagcccc

SEQ ID NO: 1709021 - DNA, 15 bp, Homo sapiens
cagaatcaagcccct

SEQ ID NO: 1709022 - DNA, 15 bp, Homo sapiens
agaatcaagcccctc

SEQ ID NO: 1709023 - DNA, 15 bp, Homo sapiens
gaatcaagcccctct

SEQ ID NO: 1709024 - DNA, 15 bp, Homo sapiens
aatcaagcccctcta

SEQ ID NO: 1709025 - DNA, 15 bp, Homo sapiens
atcaagcccctctat

SEQ ID NO: 1709026 - DNA, 15 bp, Homo sapiens
tcaagcccctctata

SEQ ID NO: 1709027 - DNA, 15 bp, Homo sapiens
caagcccctctatag

SEQ ID NO: 1709028 - DNA, 15 bp, Homo sapiens
aagcccctctatagt

SEQ ID NO: 1709029 - DNA, 15 bp, Homo sapiens
agcccctctatagtc

SEQ ID NO: 1709030 - DNA, 15 bp, Homo sapiens
gcccctctatagtcc

SEQ ID NO: 1709031 - DNA, 15 bp, Homo sapiens
cccctctatagtcct

SEQ ID NO: 1709032 - DNA, 15 bp, Homo sapiens
ccctctatagtcctt

SEQ ID NO: 1709033 - DNA, 15 bp, Homo sapiens
cctctatagtcctta

SEQ ID NO: 1709034 - DNA, 15 bp, Homo sapiens
ctctatagtccttac

SEQ ID NO: 1709035 - DNA, 15 bp, Homo sapiens
tctatagtccttaca

SEQ ID NO: 1709036 - DNA, 15 bp, Homo sapiens
ctatagtccttacag

SEQ ID NO: 1709037 - DNA, 15 bp, Homo sapiens
tatagtccttacagt

SEQ ID NO: 1709038 - DNA, 15 bp, Homo sapiens
atagtccttacagtt

SEQ ID NO: 1709039 - DNA, 15 bp, Homo sapiens
tagtccttacagtta

SEQ ID NO: 1709040 - DNA, 15 bp, Homo sapiens
agtccttacagttat

SEQ ID NO: 1709041 - DNA, 15 bp, Homo sapiens
gtccttacagttatt

SEQ ID NO: 1709042 - DNA, 15 bp, Homo sapiens
tccttacagttattg

SEQ ID NO: 1709043 - DNA, 15 bp, Homo sapiens
ccttacagttattgt

SEQ ID NO: 1709044 - DNA, 15 bp, Homo sapiens
cttacagttattgtc

SEQ ID NO: 1709045 - DNA, 15 bp, Homo sapiens
ttacagttattgtcc

SEQ ID NO: 1709046 - DNA, 15 bp, Homo sapiens
tacagttattgtccc

SEQ ID NO: 1709047 - DNA, 15 bp, Homo sapiens
acagttattgtcccc

SEQ ID NO: 1709048 - DNA, 15 bp, Homo sapiens
cagttattgtcccca

SEQ ID NO: 1709049 - DNA, 15 bp, Homo sapiens
agttattgtccccac

SEQ ID NO: 1709050 - DNA, 15 bp, Homo sapiens
gttattgtccccaca

SEQ ID NO: 1709051 - DNA, 15 bp, Homo sapiens
ttattgtccccacac

SEQ ID NO: 1709052 - DNA, 15 bp, Homo sapiens
tattgtccccacact

SEQ ID NO: 1709053 - DNA, 15 bp, Homo sapiens
attgtccccacactg

SEQ ID NO: 1709054 - DNA, 15 bp, Homo sapiens
ttgtccccacactgt

SEQ ID NO: 1709055 - DNA, 15 bp, Homo sapiens
tgtccccacactgtt

SEQ ID NO: 1709056 - DNA, 15 bp, Homo sapiens
gtccccacactgttc

SEQ ID NO: 1709057 - DNA, 15 bp, Homo sapiens
tccccacactgttca

SEQ ID NO: 1709058 - DNA, 15 bp, Homo sapiens
ccccacactgttcaa

SEQ ID NO: 1709059 - DNA, 15 bp, Homo sapiens
cccacactgttcaaa

SEQ ID NO: 1709060 - DNA, 15 bp, Homo sapiens
ccacactgttcaaac

SEQ ID NO: 1709061 - DNA, 15 bp, Homo sapiens
cacactgttcaaaca

SEQ ID NO: 1709062 - DNA, 15 bp, Homo sapiens
acactgttcaaacag

SEQ ID NO: 1709063 - DNA, 15 bp, Homo sapiens
cactgttcaaacagt

SEQ ID NO: 1709064 - DNA, 15 bp, Homo sapiens
actgttcaaacagta

SEQ ID NO: 1709065 - DNA, 15 bp, Homo sapiens
ctgttcaaacagtat

SEQ ID NO: 1709066 - DNA, 15 bp, Homo sapiens
tgttcaaacagtatg

SEQ ID NO: 1709067 - DNA, 15 bp, Homo sapiens
gttcaaacagtatgg

SEQ ID NO: 1709068 - DNA, 15 bp, Homo sapiens
ttcaaacagtatggc

SEQ ID NO: 1709069 - DNA, 15 bp, Homo sapiens
tcaaacagtatggct

SEQ ID NO: 1709070 - DNA, 15 bp, Homo sapiens
caaacagtatggcta

SEQ ID NO: 1709071 - DNA, 15 bp, Homo sapiens
aaacagtatggctac

SEQ ID NO: 1709072 - DNA, 15 bp, Homo sapiens
aacagtatggctact

SEQ ID NO: 1709073 - DNA, 15 bp, Homo sapiens
acagtatggctacta

SEQ ID NO: 1709074 - DNA, 15 bp, Homo sapiens
cagtatggctactac

SEQ ID NO: 1709075 - DNA, 15 bp, Homo sapiens
agtatggctactacc

SEQ ID NO: 1709076 - DNA, 15 bp, Homo sapiens
gtatggctactacct

SEQ ID NO: 1709077 - DNA, 15 bp, Homo sapiens
tatggctactaccta

SEQ ID NO: 1709078 - DNA, 15 bp, Homo sapiens
atggctactacctat

SEQ ID NO: 1709079 - DNA, 15 bp, Homo sapiens
tggctactacctatc

SEQ ID NO: 1709080 - DNA, 15 bp, Homo sapiens
ggctactacctatcc

SEQ ID NO: 1709081 - DNA, 15 bp, Homo sapiens
gctactacctatccc

SEQ ID NO: 1709082 - DNA, 15 bp, Homo sapiens
ctactacctatccca

SEQ ID NO: 1709083 - DNA, 15 bp, Homo sapiens
tactacctatcccaa

SEQ ID NO: 1709084 - DNA, 15 bp, Homo sapiens
actacctatcccaat

SEQ ID NO: 1709085 - DNA, 15 bp, Homo sapiens
ctacctatcccaatg

SEQ ID NO: 1709086 - DNA, 15 bp, Homo sapiens
tacctatcccaatgc

SEQ ID NO: 1709087 - DNA, 15 bp, Homo sapiens
acctatcccaatgcc

SEQ ID NO: 1709088 - DNA, 15 bp, Homo sapiens
cctatcccaatgccc

SEQ ID NO: 1709089 - DNA, 15 bp, Homo sapiens
ctatcccaatgcccc

SEQ ID NO: 1709090 - DNA, 15 bp, Homo sapiens
tatcccaatgcccca

SEQ ID NO: 1709091 - DNA, 15 bp, Homo sapiens
atcccaatgccccac

SEQ ID NO: 1709092 - DNA, 15 bp, Homo sapiens
tcccaatgccccacc

SEQ ID NO: 1709093 - DNA, 15 bp, Homo sapiens
cccaatgccccacct

SEQ ID NO: 1709094 - DNA, 15 bp, Homo sapiens
ccaatgccccacctt

SEQ ID NO: 1709095 - DNA, 15 bp, Homo sapiens
caatgccccaccttc

SEQ ID NO: 1709096 - DNA, 15 bp, Homo sapiens
aatgccccaccttct

SEQ ID NO: 1709097 - DNA, 15 bp, Homo sapiens
atgccccaccttcta

SEQ ID NO: 1709098 - DNA, 15 bp, Homo sapiens
tgccccaccttctat

SEQ ID NO: 1709099 - DNA, 15 bp, Homo sapiens
gccccaccttctatc

SEQ ID NO: 1709100 - DNA, 15 bp, Homo sapiens
ccccaccttctatct

SEQ ID NO: 1709101 - DNA, 15 bp, Homo sapiens
cccaccttctatctg

SEQ ID NO: 1709102 - DNA, 15 bp, Homo sapiens
ccaccttctatctgc

SEQ ID NO: 1709103 - DNA, 15 bp, Homo sapiens
caccttctatctgca

SEQ ID NO: 1709104 - DNA, 15 bp, Homo sapiens
accttctatctgcac

SEQ ID NO: 1709105 - DNA, 15 bp, Homo sapiens
ccttctatctgcact

SEQ ID NO: 1709106 - DNA, 15 bp, Homo sapiens
cttctatctgcactg

SEQ ID NO: 1709107 - DNA, 15 bp, Homo sapiens
ttctatctgcactgc

SEQ ID NO: 1709108 - DNA, 15 bp, Homo sapiens
tctatctgcactgca

SEQ ID NO: 1709109 - DNA, 15 bp, Homo sapiens
ctatctgcactgcat

SEQ ID NO: 1709110 - DNA, 15 bp, Homo sapiens
tatctgcactgcatc

SEQ ID NO: 1709111 - DNA, 15 bp, Homo sapiens
atctgcactgcatct

SEQ ID NO: 1709112 - DNA, 15 bp, Homo sapiens
tctgcactgcatctc

SEQ ID NO: 1709113 - DNA, 15 bp, Homo sapiens
ctgcactgcatctca

SEQ ID NO: 1709114 - DNA, 15 bp, Homo sapiens
tgcactgcatctcaa

SEQ ID NO: 1709115 - DNA, 15 bp, Homo sapiens
gcactgcatctcaat

SEQ ID NO: 1709116 - DNA, 15 bp, Homo sapiens
cactgcatctcaatt

SEQ ID NO: 1709117 - DNA, 15 bp, Homo sapiens
actgcatctcaatta

SEQ ID NO: 1709118 - DNA, 15 bp, Homo sapiens
ctgcatctcaattag

SEQ ID NO: 1709119 - DNA, 15 bp, Homo sapiens
tgcatctcaattagc

SEQ ID NO: 1709120 - DNA, 15 bp, Homo sapiens
gcatctcaattagct

SEQ ID NO: 1709121 - DNA, 15 bp, Homo sapiens
catctcaattagcta

SEQ ID NO: 1709122 - DNA, 15 bp, Homo sapiens
atctcaattagctac

SEQ ID NO: 1709123 - DNA, 15 bp, Homo sapiens
tctcaattagctaca

SEQ ID NO: 1709124 - DNA, 15 bp, Homo sapiens
ctcaattagctacag

SEQ ID NO: 1709125 - DNA, 15 bp, Homo sapiens
tcaattagctacagg

SEQ ID NO: 1709126 - DNA, 15 bp, Homo sapiens
caattagctacaggt

SEQ ID NO: 1709127 - DNA, 15 bp, Homo sapiens
aattagctacaggtg

SEQ ID NO: 1709128 - DNA, 15 bp, Homo sapiens
attagctacaggtgg

SEQ ID NO: 1709129 - DNA, 15 bp, Homo sapiens
ttagctacaggtggg

SEQ ID NO: 1709130 - DNA, 15 bp, Homo sapiens
tagctacaggtggga

SEQ ID NO: 1709131 - DNA, 15 bp, Homo sapiens
agctacaggtgggaa

SEQ ID NO: 1709132 - DNA, 15 bp, Homo sapiens
gctacaggtgggaag

SEQ ID NO: 1709133 - DNA, 15 bp, Homo sapiens
ctacaggtgggaagc

SEQ ID NO: 1709134 - DNA, 15 bp, Homo sapiens
tacaggtgggaagcc

SEQ ID NO: 1709135 - DNA, 15 bp, Homo sapiens
acaggtgggaagcct

SEQ ID NO: 1709136 - DNA, 15 bp, Homo sapiens
caggtgggaagcctt

SEQ ID NO: 1709137 - DNA, 15 bp, Homo sapiens
aggtgggaagccttt

SEQ ID NO: 1709138 - DNA, 15 bp, Homo sapiens
ggtgggaagcctttg

SEQ ID NO: 1709139 - DNA, 15 bp, Homo sapiens
gtgggaagcctttgt

SEQ ID NO: 1709140 - DNA, 15 bp, Homo sapiens
tgggaagcctttgta

SEQ ID NO: 1709141 - DNA, 15 bp, Homo sapiens
gggaagcctttgtaa

SEQ ID NO: 1709142 - DNA, 15 bp, Homo sapiens
ggaagcctttgtaat

SEQ ID NO: 1709143 - DNA, 15 bp, Homo sapiens
gaagcctttgtaatc

SEQ ID NO: 1709144 - DNA, 15 bp, Homo sapiens
aagcctttgtaatca

SEQ ID NO: 1709145 - DNA, 15 bp, Homo sapiens
agcctttgtaatcat

SEQ ID NO: 1709146 - DNA, 15 bp, Homo sapiens
gcctttgtaatcatg

SEQ ID NO: 1709147 - DNA, 15 bp, Homo sapiens
cctttgtaatcatgg

SEQ ID NO: 1709148 - DNA, 15 bp, Homo sapiens
ctttgtaatcatggt

SEQ ID NO: 1709149 - DNA, 15 bp, Homo sapiens
tttgtaatcatggta

SEQ ID NO: 1709150 - DNA, 15 bp, Homo sapiens
ttgtaatcatggtat

SEQ ID NO: 1709151 - DNA, 15 bp, Homo sapiens
tgtaatcatggtatc

SEQ ID NO: 1709152 - DNA, 15 bp, Homo sapiens
gtaatcatggtatca

SEQ ID NO: 1709153 - DNA, 15 bp, Homo sapiens
taatcatggtatcac

SEQ ID NO: 1709154 - DNA, 15 bp, Homo sapiens
aatcatggtatcact

SEQ ID NO: 1709155 - DNA, 15 bp, Homo sapiens
atcatggtatcactg

SEQ ID NO: 1709156 - DNA, 15 bp, Homo sapiens
tcatggtatcactgt

SEQ ID NO: 1709157 - DNA, 15 bp, Homo sapiens
catggtatcactgtg

SEQ ID NO: 1709158 - DNA, 15 bp, Homo sapiens
atggtatcactgtgt

SEQ ID NO: 1709159 - DNA, 15 bp, Homo sapiens
tggtatcactgtgtt

SEQ ID NO: 1709160 - DNA, 15 bp, Homo sapiens
ggtatcactgtgttg

SEQ ID NO: 1709161 - DNA, 15 bp, Homo sapiens
gtatcactgtgttgc

SEQ ID NO: 1709162 - DNA, 15 bp, Homo sapiens
tatcactgtgttgct

SEQ ID NO: 1709163 - DNA, 15 bp, Homo sapiens
atcactgtgttgctt

SEQ ID NO: 1709164 - DNA, 15 bp, Homo sapiens
tcactgtgttgcttc

SEQ ID NO: 1709165 - DNA, 15 bp, Homo sapiens
cactgtgttgcttca

SEQ ID NO: 1709166 - DNA, 15 bp, Homo sapiens
actgtgttgcttcat

SEQ ID NO: 1709167 - DNA, 15 bp, Homo sapiens
ctgtgttgcttcata

SEQ ID NO: 1709168 - DNA, 15 bp, Homo sapiens
tgtgttgcttcataa

SEQ ID NO: 1709169 - DNA, 15 bp, Homo sapiens
gtgttgcttcataac

SEQ ID NO: 1709170 - DNA, 15 bp, Homo sapiens
tgttgcttcataact

SEQ ID NO: 1709171 - DNA, 15 bp, Homo sapiens
gttgcttcataacta

SEQ ID NO: 1709172 - DNA, 15 bp, Homo sapiens
ttgcttcataactac

SEQ ID NO: 1709173 - DNA, 15 bp, Homo sapiens
tgcttcataactacc

SEQ ID NO: 1709174 - DNA, 15 bp, Homo sapiens
gcttcataactaccc

SEQ ID NO: 1709175 - DNA, 15 bp, Homo sapiens
cttcataactaccca

SEQ ID NO: 1709176 - DNA, 15 bp, Homo sapiens
ttcataactacccac

SEQ ID NO: 1709177 - DNA, 15 bp, Homo sapiens
tcataactacccact

SEQ ID NO: 1709178 - DNA, 15 bp, Homo sapiens
cataactacccactc

SEQ ID NO: 1709179 - DNA, 15 bp, Homo sapiens
ataactacccactca

SEQ ID NO: 1709180 - DNA, 15 bp, Homo sapiens
taactacccactcac

SEQ ID NO: 1709181 - DNA, 15 bp, Homo sapiens
aactacccactcact

SEQ ID NO: 1709182 - DNA, 15 bp, Homo sapiens
actacccactcactg

SEQ ID NO: 1709183 - DNA, 15 bp, Homo sapiens
ctacccactcactgt

SEQ ID NO: 1709184 - DNA, 15 bp, Homo sapiens
tacccactcactgtg

SEQ ID NO: 1709185 - DNA, 15 bp, Homo sapiens
acccactcactgtgc

SEQ ID NO: 1709186 - DNA, 15 bp, Homo sapiens
cccactcactgtgcc

SEQ ID NO: 1709187 - DNA, 15 bp, Homo sapiens
ccactcactgtgcca

SEQ ID NO: 1709188 - DNA, 15 bp, Homo sapiens
cactcactgtgccat

SEQ ID NO: 1709189 - DNA, 15 bp, Homo sapiens
actcactgtgccatg

SEQ ID NO: 1709190 - DNA, 15 bp, Homo sapiens
ctcactgtgccatgg

SEQ ID NO: 1709191 - DNA, 15 bp, Homo sapiens
tcactgtgccatggg

SEQ ID NO: 1709192 - DNA, 15 bp, Homo sapiens
cactgtgccatgggt

SEQ ID NO: 1709193 - DNA, 15 bp, Homo sapiens
actgtgccatgggtc

SEQ ID NO: 1709194 - DNA, 15 bp, Homo sapiens
ctgtgccatgggtct

SEQ ID NO: 1709195 - DNA, 15 bp, Homo sapiens
tgtgccatgggtctt

SEQ ID NO: 1709196 - DNA, 15 bp, Homo sapiens
gtgccatgggtcttt

SEQ ID NO: 1709197 - DNA, 15 bp, Homo sapiens
tgccatgggtcttta

SEQ ID NO: 1709198 - DNA, 15 bp, Homo sapiens
gccatgggtctttat

SEQ ID NO: 1709199 - DNA, 15 bp, Homo sapiens
ccatgggtctttatt

SEQ ID NO: 1709200 - DNA, 15 bp, Homo sapiens
catgggtctttattg

SEQ ID NO: 1709201 - DNA, 15 bp, Homo sapiens
atgggtctttattgc

SEQ ID NO: 1709202 - DNA, 15 bp, Homo sapiens
tgggtctttattgcc

SEQ ID NO: 1709203 - DNA, 15 bp, Homo sapiens
gggtctttattgcca

SEQ ID NO: 1709204 - DNA, 15 bp, Homo sapiens
ggtctttattgccac

SEQ ID NO: 1709205 - DNA, 15 bp, Homo sapiens
gtctttattgccaca

SEQ ID NO: 1709206 - DNA, 15 bp, Homo sapiens
tctttattgccacac

SEQ ID NO: 1709207 - DNA, 15 bp, Homo sapiens
ctttattgccacacg

SEQ ID NO: 1709208 - DNA, 15 bp, Homo sapiens
tttattgccacacgg

SEQ ID NO: 1709209 - DNA, 15 bp, Homo sapiens
ttattgccacacggt

SEQ ID NO: 1709210 - DNA, 15 bp, Homo sapiens
tattgccacacggtc

SEQ ID NO: 1709211 - DNA, 15 bp, Homo sapiens
attgccacacggtcg

SEQ ID NO: 1709212 - DNA, 15 bp, Homo sapiens
ttgccacacggtcgg

SEQ ID NO: 1709213 - DNA, 15 bp, Homo sapiens
tgccacacggtcggt

SEQ ID NO: 1709214 - DNA, 15 bp, Homo sapiens
gccacacggtcggta

SEQ ID NO: 1709215 - DNA, 15 bp, Homo sapiens
ccacacggtcggtaa

SEQ ID NO: 1709216 - DNA, 15 bp, Homo sapiens
cacacggtcggtaag

SEQ ID NO: 1709217 - DNA, 15 bp, Homo sapiens
acacggtcggtaagt

SEQ ID NO: 1709218 - DNA, 15 bp, Homo sapiens
cacggtcggtaagta

SEQ ID NO: 1709219 - DNA, 15 bp, Homo sapiens
acggtcggtaagtaa

SEQ ID NO: 1709220 - DNA, 15 bp, Homo sapiens
cggtcggtaagtaac

SEQ ID NO: 1709221 - DNA, 15 bp, Homo sapiens
ggtcggtaagtaacc

SEQ ID NO: 1709222 - DNA, 15 bp, Homo sapiens
gtcggtaagtaaccc

SEQ ID NO: 1709223 - DNA, 15 bp, Homo sapiens
tcggtaagtaaccca

SEQ ID NO: 1709224 - DNA, 15 bp, Homo sapiens
cggtaagtaacccaa

SEQ ID NO: 1709225 - DNA, 15 bp, Homo sapiens
ggtaagtaacccaac

SEQ ID NO: 1709226 - DNA, 15 bp, Homo sapiens
gtaagtaacccaact

SEQ ID NO: 1709227 - DNA, 15 bp, Homo sapiens
taagtaacccaactc

SEQ ID NO: 1709228 - DNA, 15 bp, Homo sapiens
aagtaacccaactct

SEQ ID NO: 1709229 - DNA, 15 bp, Homo sapiens
agtaacccaactcta

SEQ ID NO: 1709230 - DNA, 15 bp, Homo sapiens
gtaacccaactctag

SEQ ID NO: 1709231 - DNA, 15 bp, Homo sapiens
taacccaactctagc

SEQ ID NO: 1709232 - DNA, 15 bp, Homo sapiens
aacccaactctagca

SEQ ID NO: 1709233 - DNA, 15 bp, Homo sapiens
acccaactctagcat

SEQ ID NO: 1709234 - DNA, 15 bp, Homo sapiens
cccaactctagcatt

SEQ ID NO: 1709235 - DNA, 15 bp, Homo sapiens
ccaactctagcattc

SEQ ID NO: 1709236 - DNA, 15 bp, Homo sapiens
caactctagcattcc

SEQ ID NO: 1709237 - DNA, 15 bp, Homo sapiens
aactctagcattcca

SEQ ID NO: 1709238 - DNA, 15 bp, Homo sapiens
actctagcattccat

SEQ ID NO: 1709239 - DNA, 15 bp, Homo sapiens
ctctagcattccatc

SEQ ID NO: 1709240 - DNA, 15 bp, Homo sapiens
tctagcattccatcc

SEQ ID NO: 1709241 - DNA, 15 bp, Homo sapiens
ctagcattccatcct

SEQ ID NO: 1709242 - DNA, 15 bp, Homo sapiens
tagcattccatcctg

SEQ ID NO: 1709243 - DNA, 15 bp, Homo sapiens
agcattccatcctga

SEQ ID NO: 1709244 - DNA, 15 bp, Homo sapiens
gcattccatcctgag

SEQ ID NO: 1709245 - DNA, 15 bp, Homo sapiens
cattccatcctgagt

SEQ ID NO: 1709246 - DNA, 15 bp, Homo sapiens
attccatcctgagtg

SEQ ID NO: 1709247 - DNA, 15 bp, Homo sapiens
ttccatcctgagtgt

SEQ ID NO: 1709248 - DNA, 15 bp, Homo sapiens
tccatcctgagtgtc

SEQ ID NO: 1709249 - DNA, 15 bp, Homo sapiens
ccatcctgagtgtct

SEQ ID NO: 1709250 - DNA, 15 bp, Homo sapiens
catcctgagtgtctg

SEQ ID NO: 1709251 - DNA, 15 bp, Homo sapiens
atcctgagtgtctgc

SEQ ID NO: 1709252 - DNA, 15 bp, Homo sapiens
tcctgagtgtctgca

SEQ ID NO: 1709253 - DNA, 15 bp, Homo sapiens
cctgagtgtctgcag

SEQ ID NO: 1709254 - DNA, 15 bp, Homo sapiens
ctgagtgtctgcagg

SEQ ID NO: 1709255 - DNA, 15 bp, Homo sapiens
tgagtgtctgcagga

SEQ ID NO: 1709256 - DNA, 15 bp, Homo sapiens
gagtgtctgcaggac

SEQ ID NO: 1709257 - DNA, 15 bp, Homo sapiens
agtgtctgcaggacg

SEQ ID NO: 1709258 - DNA, 15 bp, Homo sapiens
gtgtctgcaggacgc

SEQ ID NO: 1709259 - DNA, 15 bp, Homo sapiens
tgtctgcaggacgct

SEQ ID NO: 1709260 - DNA, 15 bp, Homo sapiens
gtctgcaggacgctc

SEQ ID NO: 1709261 - DNA, 15 bp, Homo sapiens
tctgcaggacgctcc

SEQ ID NO: 1709262 - DNA, 15 bp, Homo sapiens
ctgcaggacgctcct

SEQ ID NO: 1709263 - DNA, 15 bp, Homo sapiens
tgcaggacgctcctg

SEQ ID NO: 1709264 - DNA, 15 bp, Homo sapiens
gcaggacgctcctgg

SEQ ID NO: 1709265 - DNA, 15 bp, Homo sapiens
caggacgctcctggt

SEQ ID NO: 1709266 - DNA, 15 bp, Homo sapiens
aggacgctcctggtg

SEQ ID NO: 1709267 - DNA, 15 bp, Homo sapiens
ggacgctcctggtgc

SEQ ID NO: 1709268 - DNA, 15 bp, Homo sapiens
gacgctcctggtgcc

SEQ ID NO: 1709269 - DNA, 15 bp, Homo sapiens
acgctcctggtgcca

SEQ ID NO: 1709270 - DNA, 15 bp, Homo sapiens
cgctcctggtgccaa

SEQ ID NO: 1709271 - DNA, 15 bp, Homo sapiens
gctcctggtgccaag

SEQ ID NO: 1709272 - DNA, 15 bp, Homo sapiens
ctcctggtgccaagt

SEQ ID NO: 1709273 - DNA, 15 bp, Homo sapiens
tcctggtgccaagtc

SEQ ID NO: 1709274 - DNA, 15 bp, Homo sapiens
cctggtgccaagtct

SEQ ID NO: 1709275 - DNA, 15 bp, Homo sapiens
ctggtgccaagtctt

SEQ ID NO: 1709276 - DNA, 15 bp, Homo sapiens
tggtgccaagtcttt

SEQ ID NO: 1709277 - DNA, 15 bp, Homo sapiens
ggtgccaagtctttt

SEQ ID NO: 1709278 - DNA, 15 bp, Homo sapiens
gtgccaagtctttta

SEQ ID NO: 1709279 - DNA, 15 bp, Homo sapiens
tgccaagtcttttag

SEQ ID NO: 1709280 - DNA, 15 bp, Homo sapiens
gccaagtcttttagc

SEQ ID NO: 1709281 - DNA, 15 bp, Homo sapiens
ccaagtcttttagcc

SEQ ID NO: 1709282 - DNA, 15 bp, Homo sapiens
caagtcttttagcct

SEQ ID NO: 1709283 - DNA, 15 bp, Homo sapiens
aagtcttttagcctg

SEQ ID NO: 1709284 - DNA, 15 bp, Homo sapiens
agtcttttagcctgg

SEQ ID NO: 1709285 - DNA, 15 bp, Homo sapiens
gtcttttagcctggg

SEQ ID NO: 1709286 - DNA, 15 bp, Homo sapiens
tcttttagcctgggt

SEQ ID NO: 1709287 - DNA, 15 bp, Homo sapiens
cttttagcctgggtt

SEQ ID NO: 1709288 - DNA, 15 bp, Homo sapiens
ttttagcctgggttc

SEQ ID NO: 1709289 - DNA, 15 bp, Homo sapiens
tttagcctgggttct

SEQ ID NO: 1709290 - DNA, 15 bp, Homo sapiens
ttagcctgggttctg

SEQ ID NO: 1709291 - DNA, 15 bp, Homo sapiens
tagcctgggttctgt

SEQ ID NO: 1709292 - DNA, 15 bp, Homo sapiens
agcctgggttctgta

SEQ ID NO: 1709293 - DNA, 15 bp, Homo sapiens
gcctgggttctgtag

SEQ ID NO: 1709294 - DNA, 15 bp, Homo sapiens
cctgggttctgtaga

SEQ ID NO: 1709295 - DNA, 15 bp, Homo sapiens
ctgggttctgtagaa

SEQ ID NO: 1709296 - DNA, 15 bp, Homo sapiens
tgggttctgtagaaa

SEQ ID NO: 1709297 - DNA, 15 bp, Homo sapiens
gggttctgtagaaaa

SEQ ID NO: 1709298 - DNA, 15 bp, Homo sapiens
ggttctgtagaaaac

SEQ ID NO: 1709299 - DNA, 15 bp, Homo sapiens
gttctgtagaaaaca

SEQ ID NO: 1709300 - DNA, 15 bp, Homo sapiens
ttctgtagaaaacag

SEQ ID NO: 1709301 - DNA, 15 bp, Homo sapiens
tctgtagaaaacaga

SEQ ID NO: 1709302 - DNA, 15 bp, Homo sapiens
ctgtagaaaacagag

SEQ ID NO: 1709303 - DNA, 15 bp, Homo sapiens
tgtagaaaacagagc

SEQ ID NO: 1709304 - DNA, 15 bp, Homo sapiens
gtagaaaacagagcc

SEQ ID NO: 1709305 - DNA, 15 bp, Homo sapiens
tagaaaacagagcct

SEQ ID NO: 1709306 - DNA, 15 bp, Homo sapiens
gaaaacagagcctga

SEQ ID NO: 1709307 - DNA, 15 bp, Homo sapiens
aaaacagagcctgag

SEQ ID NO: 1709308 - DNA, 15 bp, Homo sapiens
aaacagagcctgagt

SEQ ID NO: 1709309 - DNA, 15 bp, Homo sapiens
aacagagcctgagtg

SEQ ID NO: 1709310 - DNA, 15 bp, Homo sapiens
acagagcctgagtgt

SEQ ID NO: 1709311 - DNA, 15 bp, Homo sapiens
cagagcctgagtgta

SEQ ID NO: 1709312 - DNA, 15 bp, Homo sapiens
agagcctgagtgtag

SEQ ID NO: 1709313 - DNA, 15 bp, Homo sapiens
gagcctgagtgtagt

SEQ ID NO: 1709314 - DNA, 15 bp, Homo sapiens
agcctgagtgtagtt

SEQ ID NO: 1709315 - DNA, 15 bp, Homo sapiens
gcctgagtgtagttt

SEQ ID NO: 1709316 - DNA, 15 bp, Homo sapiens
cctgagtgtagtttg

SEQ ID NO: 1709317 - DNA, 15 bp, Homo sapiens
ctgagtgtagtttga

SEQ ID NO: 1709318 - DNA, 15 bp, Homo sapiens
tgagtgtagtttgag

SEQ ID NO: 1709319 - DNA, 15 bp, Homo sapiens
gagtgtagtttgaga

SEQ ID NO: 1709320 - DNA, 15 bp, Homo sapiens
agtgtagtttgagag

SEQ ID NO: 1709321 - DNA, 15 bp, Homo sapiens
gtgtagtttgagaga

SEQ ID NO: 1709322 - DNA, 15 bp, Homo sapiens
tgtagtttgagagaa

SEQ ID NO: 1709323 - DNA, 15 bp, Homo sapiens
gtagtttgagagaaa

SEQ ID NO: 1709324 - DNA, 15 bp, Homo sapiens
tagtttgagagaaac

SEQ ID NO: 1709325 - DNA, 15 bp, Homo sapiens
agtttgagagaaact

SEQ ID NO: 1709326 - DNA, 15 bp, Homo sapiens
gtttgagagaaactg

SEQ ID NO: 1709327 - DNA, 15 bp, Homo sapiens
tttgagagaaactgg

SEQ ID NO: 1709328 - DNA, 15 bp, Homo sapiens
ttgagagaaactgga

SEQ ID NO: 1709329 - DNA, 15 bp, Homo sapiens
tgagagaaactggag

SEQ ID NO: 1709330 - DNA, 15 bp, Homo sapiens
gagagaaactggagt

SEQ ID NO: 1709331 - DNA, 15 bp, Homo sapiens
agagaaactggagtg

SEQ ID NO: 1709332 - DNA, 15 bp, Homo sapiens
gagaaactggagtga

SEQ ID NO: 1709333 - DNA, 15 bp, Homo sapiens
agaaactggagtgaa

SEQ ID NO: 1709334 - DNA, 15 bp, Homo sapiens
gaaactggagtgaag

SEQ ID NO: 1709335 - DNA, 15 bp, Homo sapiens
aaactggagtgaaga

SEQ ID NO: 1709336 - DNA, 15 bp, Homo sapiens
aactggagtgaagac

SEQ ID NO: 1709337 - DNA, 15 bp, Homo sapiens
actggagtgaagacg

SEQ ID NO: 1709338 - DNA, 15 bp, Homo sapiens
ctggagtgaagacga

SEQ ID NO: 1709339 - DNA, 15 bp, Homo sapiens
tggagtgaagacgaa

SEQ ID NO: 1709340 - DNA, 15 bp, Homo sapiens
ggagtgaagacgaac

SEQ ID NO: 1709341 - DNA, 15 bp, Homo sapiens
gagtgaagacgaacg

SEQ ID NO: 1709342 - DNA, 15 bp, Homo sapiens
agtgaagacgaacgg

SEQ ID NO: 1709343 - DNA, 15 bp, Homo sapiens
gtgaagacgaacggg

SEQ ID NO: 1709344 - DNA, 15 bp, Homo sapiens
tgaagacgaacgggc

SEQ ID NO: 1709345 - DNA, 15 bp, Homo sapiens
gaagacgaacgggct

SEQ ID NO: 1709346 - DNA, 15 bp, Homo sapiens
aagacgaacgggctg

SEQ ID NO: 1709347 - DNA, 15 bp, Homo sapiens
agacgaacgggctgg

SEQ ID NO: 1709348 - DNA, 15 bp, Homo sapiens
gacgaacgggctggg

SEQ ID NO: 1709349 - DNA, 15 bp, Homo sapiens
acgaacgggctgggc

SEQ ID NO: 1709350 - DNA, 15 bp, Homo sapiens
cgaacgggctgggca

SEQ ID NO: 1709351 - DNA, 15 bp, Homo sapiens
gaacgggctgggcaa

SEQ ID NO: 1709352 - DNA, 15 bp, Homo sapiens
aacgggctgggcaaa

SEQ ID NO: 1709353 - DNA, 15 bp, Homo sapiens
acgggctgggcaaag

SEQ ID NO: 1709354 - DNA, 15 bp, Homo sapiens
cgggctgggcaaaga

SEQ ID NO: 1709355 - DNA, 15 bp, Homo sapiens
gggctgggcaaagaa

SEQ ID NO: 1709356 - DNA, 15 bp, Homo sapiens
ggctgggcaaagaag

SEQ ID NO: 1709357 - DNA, 15 bp, Homo sapiens
gctgggcaaagaagg

SEQ ID NO: 1709358 - DNA, 15 bp, Homo sapiens
ctgggcaaagaagga

SEQ ID NO: 1709359 - DNA, 15 bp, Homo sapiens
tgggcaaagaaggaa

SEQ ID NO: 1709360 - DNA, 15 bp, Homo sapiens
gggcaaagaaggaag

SEQ ID NO: 1709361 - DNA, 15 bp, Homo sapiens
ggcaaagaaggaaga

SEQ ID NO: 1709362 - DNA, 15 bp, Homo sapiens
gcaaagaaggaagag

SEQ ID NO: 1709363 - DNA, 15 bp, Homo sapiens
caaagaaggaagaga

SEQ ID NO: 1709364 - DNA, 15 bp, Homo sapiens
aaagaaggaagagaa

SEQ ID NO: 1709365 - DNA, 15 bp, Homo sapiens
aagaaggaagagaaa

SEQ ID NO: 1709366 - DNA, 15 bp, Homo sapiens
agaaggaagagaaac

SEQ ID NO: 1709367 - DNA, 15 bp, Homo sapiens
gaaggaagagaaact

SEQ ID NO: 1709368 - DNA, 15 bp, Homo sapiens
aaggaagagaaacta

SEQ ID NO: 1709369 - DNA, 15 bp, Homo sapiens
aggaagagaaactat

SEQ ID NO: 1709370 - DNA, 15 bp, Homo sapiens
ggaagagaaactatt

SEQ ID NO: 1709371 - DNA, 15 bp, Homo sapiens
gaagagaaactatta

SEQ ID NO: 1709372 - DNA, 15 bp, Homo sapiens
aagagaaactattaa

SEQ ID NO: 1709373 - DNA, 15 bp, Homo sapiens
agagaaactattaat

SEQ ID NO: 1709374 - DNA, 15 bp, Homo sapiens
gagaaactattaata

SEQ ID NO: 1709375 - DNA, 15 bp, Homo sapiens
agaaactattaataa

SEQ ID NO: 1709376 - DNA, 15 bp, Homo sapiens
gaaactattaataat

SEQ ID NO: 1709377 - DNA, 15 bp, Homo sapiens
aaactattaataata

SEQ ID NO: 1709378 - DNA, 15 bp, Homo sapiens
aactattaataataa

SEQ ID NO: 1709379 - DNA, 15 bp, Homo sapiens
actattaataataaa

SEQ ID NO: 1709380 - DNA, 15 bp, Homo sapiens
ctattaataataaaa

SEQ ID NO: 1709381 - DNA, 15 bp, Homo sapiens
tattaataataaaat

SEQ ID NO: 1709382 - DNA, 15 bp, Homo sapiens
attaataataaaata

SEQ ID NO: 1709383 - DNA, 15 bp, Homo sapiens
ttaataataaaatag

SEQ ID NO: 1709384 - DNA, 15 bp, Homo sapiens
taataataaaatagt

SEQ ID NO: 1709385 - DNA, 15 bp, Homo sapiens
aataataaaatagtg

SEQ ID NO: 1709386 - DNA, 15 bp, Homo sapiens
ataataaaatagtgt

SEQ ID NO: 1709387 - DNA, 15 bp, Homo sapiens
taataaaatagtgta

SEQ ID NO: 1709388 - DNA, 15 bp, Homo sapiens
aataaaatagtgtat

SEQ ID NO: 1709389 - DNA, 15 bp, Homo sapiens
ataaaatagtgtatt

SEQ ID NO: 1709390 - DNA, 15 bp, Homo sapiens
taaaatagtgtatta

SEQ ID NO: 1709391 - DNA, 15 bp, Homo sapiens
aaaatagtgtattac

SEQ ID NO: 1709392 - DNA, 15 bp, Homo sapiens
aaatagtgtattacc

SEQ ID NO: 1709393 - DNA, 15 bp, Homo sapiens
aatagtgtattaccg

SEQ ID NO: 1709394 - DNA, 15 bp, Homo sapiens
atagtgtattaccga

SEQ ID NO: 1709395 - DNA, 15 bp, Homo sapiens
tagtgtattaccgaa

SEQ ID NO: 1709396 - DNA, 15 bp, Homo sapiens
agtgtattaccgaac

SEQ ID NO: 1709397 - DNA, 15 bp, Homo sapiens
gtgtattaccgaact

SEQ ID NO: 1709398 - DNA, 15 bp, Homo sapiens
tgtattaccgaacta

SEQ ID NO: 1709399 - DNA, 15 bp, Homo sapiens
gtattaccgaactag

SEQ ID NO: 1709400 - DNA, 15 bp, Homo sapiens
tattaccgaactagc

SEQ ID NO: 1709401 - DNA, 15 bp, Homo sapiens
attaccgaactagct

SEQ ID NO: 1709402 - DNA, 15 bp, Homo sapiens
ttaccgaactagcta

SEQ ID NO: 1709403 - DNA, 15 bp, Homo sapiens
taccgaactagctac

SEQ ID NO: 1709404 - DNA, 15 bp, Homo sapiens
accgaactagctacc

SEQ ID NO: 1709405 - DNA, 15 bp, Homo sapiens
ccgaactagctacct

SEQ ID NO: 1709406 - DNA, 15 bp, Homo sapiens
cgaactagctacctc

SEQ ID NO: 1709407 - DNA, 15 bp, Homo sapiens
gaactagctacctct

SEQ ID NO: 1709408 - DNA, 15 bp, Homo sapiens
aactagctacctctt

SEQ ID NO: 1709409 - DNA, 15 bp, Homo sapiens
actagctacctcttg

SEQ ID NO: 1709410 - DNA, 15 bp, Homo sapiens
ctagctacctcttgg

SEQ ID NO: 1709411 - DNA, 15 bp, Homo sapiens
tagctacctcttggt

SEQ ID NO: 1709412 - DNA, 15 bp, Homo sapiens
agctacctcttggta

SEQ ID NO: 1709413 - DNA, 15 bp, Homo sapiens
gctacctcttggtat

SEQ ID NO: 1709414 - DNA, 15 bp, Homo sapiens
ctacctcttggtatc

SEQ ID NO: 1709415 - DNA, 15 bp, Homo sapiens
tacctcttggtatca

SEQ ID NO: 1709416 - DNA, 15 bp, Homo sapiens
acctcttggtatcaa

SEQ ID NO: 1709417 - DNA, 15 bp, Homo sapiens
cctcttggtatcaag

SEQ ID NO: 1709418 - DNA, 15 bp, Homo sapiens
ctcttggtatcaagc

SEQ ID NO: 1709419 - DNA, 15 bp, Homo sapiens
tcttggtatcaagcc

SEQ ID NO: 1709420 - DNA, 15 bp, Homo sapiens
cttggtatcaagccc

SEQ ID NO: 1709421 - DNA, 15 bp, Homo sapiens
ttggtatcaagcccg

SEQ ID NO: 1709422 - DNA, 15 bp, Homo sapiens
tggtatcaagcccgg

SEQ ID NO: 1709423 - DNA, 15 bp, Homo sapiens
ggtatcaagcccggg

SEQ ID NO: 1709424 - DNA, 15 bp, Homo sapiens
gtatcaagcccgggt

SEQ ID NO: 1709425 - DNA, 15 bp, Homo sapiens
tatcaagcccgggtg

SEQ ID NO: 1709426 - DNA, 15 bp, Homo sapiens
atcaagcccgggtga

SEQ ID NO: 1709427 - DNA, 15 bp, Homo sapiens
tcaagcccgggtgat

SEQ ID NO: 1709428 - DNA, 15 bp, Homo sapiens
caagcccgggtgatt

SEQ ID NO: 1709429 - DNA, 15 bp, Homo sapiens
aagcccgggtgattg

SEQ ID NO: 1709430 - DNA, 15 bp, Homo sapiens
agcccgggtgattgg

SEQ ID NO: 1709431 - DNA, 15 bp, Homo sapiens
gcccgggtgattggt

SEQ ID NO: 1709432 - DNA, 15 bp, Homo sapiens
cccgggtgattggtc

SEQ ID NO: 1709433 - DNA, 15 bp, Homo sapiens
ccgggtgattggtca

SEQ ID NO: 1709434 - DNA, 15 bp, Homo sapiens
cgggtgattggtcag

SEQ ID NO: 1709435 - DNA, 15 bp, Homo sapiens
gggtgattggtcagt

SEQ ID NO: 1709436 - DNA, 15 bp, Homo sapiens
ggtgattggtcagta

SEQ ID NO: 1709437 - DNA, 15 bp, Homo sapiens
gtgattggtcagtat

SEQ ID NO: 1709438 - DNA, 15 bp, Homo sapiens
tgattggtcagtatc

SEQ ID NO: 1709439 - DNA, 15 bp, Homo sapiens
gattggtcagtatca

SEQ ID NO: 1709440 - DNA, 15 bp, Homo sapiens
attggtcagtatcat

SEQ ID NO: 1709441 - DNA, 15 bp, Homo sapiens
ttggtcagtatcatg

SEQ ID NO: 1709442 - DNA, 15 bp, Homo sapiens
tggtcagtatcatga

SEQ ID NO: 1709443 - DNA, 15 bp, Homo sapiens
ggtcagtatcatgag

SEQ ID NO: 1709444 - DNA, 15 bp, Homo sapiens
gtcagtatcatgagg

SEQ ID NO: 1709445 - DNA, 15 bp, Homo sapiens
tcagtatcatgaggg

SEQ ID NO: 1709446 - DNA, 15 bp, Homo sapiens
cagtatcatgagggt

SEQ ID NO: 1709447 - DNA, 15 bp, Homo sapiens
agtatcatgagggtc

SEQ ID NO: 1709448 - DNA, 15 bp, Homo sapiens
gtatcatgagggtca

SEQ ID NO: 1709449 - DNA, 15 bp, Homo sapiens
tatcatgagggtcat

SEQ ID NO: 1709450 - DNA, 15 bp, Homo sapiens
atcatgagggtcata

SEQ ID NO: 1709451 - DNA, 15 bp, Homo sapiens
tcatgagggtcatat

SEQ ID NO: 1709452 - DNA, 15 bp, Homo sapiens
catgagggtcatatt

SEQ ID NO: 1709453 - DNA, 15 bp, Homo sapiens
atgagggtcatattt

SEQ ID NO: 1709454 - DNA, 15 bp, Homo sapiens
tgagggtcatatttt

SEQ ID NO: 1709455 - DNA, 15 bp, Homo sapiens
gagggtcatattttg

SEQ ID NO: 1709456 - DNA, 15 bp, Homo sapiens
agggtcatattttga

SEQ ID NO: 1709457 - DNA, 15 bp, Homo sapiens
gggtcatattttgag

SEQ ID NO: 1709458 - DNA, 15 bp, Homo sapiens
ggtcatattttgaga

SEQ ID NO: 1709459 - DNA, 15 bp, Homo sapiens
gtcatattttgagag

SEQ ID NO: 1709460 - DNA, 15 bp, Homo sapiens
tcatattttgagagg

SEQ ID NO: 1709461 - DNA, 15 bp, Homo sapiens
catattttgagaggt

SEQ ID NO: 1709462 - DNA, 15 bp, Homo sapiens
atattttgagaggta

SEQ ID NO: 1709463 - DNA, 15 bp, Homo sapiens
tattttgagaggtag

SEQ ID NO: 1709464 - DNA, 15 bp, Homo sapiens
attttgagaggtagt

SEQ ID NO: 1709465 - DNA, 15 bp, Homo sapiens
ttttgagaggtagta

SEQ ID NO: 1709466 - DNA, 15 bp, Homo sapiens
tttgagaggtagtat

SEQ ID NO: 1709467 - DNA, 15 bp, Homo sapiens
ttgagaggtagtatg

SEQ ID NO: 1709468 - DNA, 15 bp, Homo sapiens
tgagaggtagtatgg

SEQ ID NO: 1709469 - DNA, 15 bp, Homo sapiens
gagaggtagtatgga

SEQ ID NO: 1709470 - DNA, 15 bp, Homo sapiens
agaggtagtatggac

SEQ ID NO: 1709471 - DNA, 15 bp, Homo sapiens
gaggtagtatggact

SEQ ID NO: 1709472 - DNA, 15 bp, Homo sapiens
aggtagtatggacta

SEQ ID NO: 1709473 - DNA, 15 bp, Homo sapiens
ggtagtatggactac

SEQ ID NO: 1709474 - DNA, 15 bp, Homo sapiens
gtagtatggactact

SEQ ID NO: 1709475 - DNA, 15 bp, Homo sapiens
tagtatggactactg

SEQ ID NO: 1709476 - DNA, 15 bp, Homo sapiens
agtatggactactgt

SEQ ID NO: 1709477 - DNA, 15 bp, Homo sapiens
gtatggactactgtg

SEQ ID NO: 1709478 - DNA, 15 bp, Homo sapiens
tatggactactgtgt

SEQ ID NO: 1709479 - DNA, 15 bp, Homo sapiens
atggactactgtgtt

SEQ ID NO: 1709480 - DNA, 15 bp, Homo sapiens
tggactactgtgttt

SEQ ID NO: 1709481 - DNA, 15 bp, Homo sapiens
ggactactgtgtttc

SEQ ID NO: 1709482 - DNA, 15 bp, Homo sapiens
gactactgtgtttca

SEQ ID NO: 1709483 - DNA, 15 bp, Homo sapiens
actactgtgtttcag

SEQ ID NO: 1709484 - DNA, 15 bp, Homo sapiens
ctactgtgtttcagg

SEQ ID NO: 1709485 - DNA, 15 bp, Homo sapiens
tactgtgtttcagga

SEQ ID NO: 1709486 - DNA, 15 bp, Homo sapiens
actgtgtttcaggac

SEQ ID NO: 1709487 - DNA, 15 bp, Homo sapiens
ctgtgtttcaggaca

SEQ ID NO: 1709488 - DNA, 15 bp, Homo sapiens
tgtgtttcaggacaa

SEQ ID NO: 1709489 - DNA, 15 bp, Homo sapiens
gtgtttcaggacaat

SEQ ID NO: 1709490 - DNA, 15 bp, Homo sapiens
tgtttcaggacaatc

SEQ ID NO: 1709491 - DNA, 15 bp, Homo sapiens
gtttcaggacaatct

SEQ ID NO: 1709492 - DNA, 15 bp, Homo sapiens
tttcaggacaatctg

SEQ ID NO: 1709493 - DNA, 15 bp, Homo sapiens
ttcaggacaatctgt

SEQ ID NO: 1709494 - DNA, 15 bp, Homo sapiens
tcaggacaatctgtc

SEQ ID NO: 1709495 - DNA, 15 bp, Homo sapiens
caggacaatctgtct

SEQ ID NO: 1709496 - DNA, 15 bp, Homo sapiens
aggacaatctgtctg

SEQ ID NO: 1709497 - DNA, 15 bp, Homo sapiens
ggacaatctgtctgg

SEQ ID NO: 1709498 - DNA, 15 bp, Homo sapiens
gacaatctgtctggg

SEQ ID NO: 1709499 - DNA, 15 bp, Homo sapiens
acaatctgtctgggt

SEQ ID NO: 1709500 - DNA, 15 bp, Homo sapiens
caatctgtctgggtg

SEQ ID NO: 1709501 - DNA, 15 bp, Homo sapiens
aatctgtctgggtgg

SEQ ID NO: 1709502 - DNA, 15 bp, Homo sapiens
atctgtctgggtgga

SEQ ID NO: 1709503 - DNA, 15 bp, Homo sapiens
tctgtctgggtggag

SEQ ID NO: 1709504 - DNA, 15 bp, Homo sapiens
ctgtctgggtggagg

SEQ ID NO: 1709505 - DNA, 15 bp, Homo sapiens
tgtctgggtggagga

SEQ ID NO: 1709506 - DNA, 15 bp, Homo sapiens
gtctgggtggaggaa

SEQ ID NO: 1709507 - DNA, 15 bp, Homo sapiens
tctgggtggaggaag

SEQ ID NO: 1709508 - DNA, 15 bp, Homo sapiens
ctgggtggaggaagg

SEQ ID NO: 1709509 - DNA, 15 bp, Homo sapiens
tgggtggaggaagga

SEQ ID NO: 1709510 - DNA, 15 bp, Homo sapiens
gggtggaggaaggag

SEQ ID NO: 1709511 - DNA, 15 bp, Homo sapiens
ggtggaggaaggaga

SEQ ID NO: 1709512 - DNA, 15 bp, Homo sapiens
gtggaggaaggagag

SEQ ID NO: 1709513 - DNA, 15 bp, Homo sapiens
tggaggaaggagagg

SEQ ID NO: 1709514 - DNA, 15 bp, Homo sapiens
ggaggaaggagagga

SEQ ID NO: 1709515 - DNA, 15 bp, Homo sapiens
gaggaaggagaggag

SEQ ID NO: 1709516 - DNA, 15 bp, Homo sapiens
aggaaggagaggagt

SEQ ID NO: 1709517 - DNA, 15 bp, Homo sapiens
ggaaggagaggagtt

SEQ ID NO: 1709518 - DNA, 15 bp, Homo sapiens
gaaggagaggagttt

SEQ ID NO: 1709519 - DNA, 15 bp, Homo sapiens
aaggagaggagttta

SEQ ID NO: 1709520 - DNA, 15 bp, Homo sapiens
aggagaggagtttat

SEQ ID NO: 1709521 - DNA, 15 bp, Homo sapiens
ggagaggagtttata

SEQ ID NO: 1709522 - DNA, 15 bp, Homo sapiens
gagaggagtttatat

SEQ ID NO: 1709523 - DNA, 15 bp, Homo sapiens
agaggagtttatatg

SEQ ID NO: 1709524 - DNA, 15 bp, Homo sapiens
gaggagtttatatgc

SEQ ID NO: 1709525 - DNA, 15 bp, Homo sapiens
aggagtttatatgct

SEQ ID NO: 1709526 - DNA, 15 bp, Homo sapiens
ggagtttatatgctg

SEQ ID NO: 1709527 - DNA, 15 bp, Homo sapiens
gagtttatatgctgg

SEQ ID NO: 1709528 - DNA, 15 bp, Homo sapiens
agtttatatgctgga

SEQ ID NO: 1709529 - DNA, 15 bp, Homo sapiens
gtttatatgctggac

SEQ ID NO: 1709530 - DNA, 15 bp, Homo sapiens
tttatatgctggacc

SEQ ID NO: 1709531 - DNA, 15 bp, Homo sapiens
ttatatgctggaccc

SEQ ID NO: 1709532 - DNA, 15 bp, Homo sapiens
tatatgctggaccca

SEQ ID NO: 1709533 - DNA, 15 bp, Homo sapiens
atatgctggacccat

SEQ ID NO: 1709534 - DNA, 15 bp, Homo sapiens
tatgctggacccatc

SEQ ID NO: 1709535 - DNA, 15 bp, Homo sapiens
atgctggacccatct

SEQ ID NO: 1709536 - DNA, 15 bp, Homo sapiens
tgctggacccatctt

SEQ ID NO: 1709537 - DNA, 15 bp, Homo sapiens
gctggacccatcttg

SEQ ID NO: 1709538 - DNA, 15 bp, Homo sapiens
ctggacccatcttgt

SEQ ID NO: 1709539 - DNA, 15 bp, Homo sapiens
tggacccatcttgtt

SEQ ID NO: 1709540 - DNA, 15 bp, Homo sapiens
ggacccatcttgttt

SEQ ID NO: 1709541 - DNA, 15 bp, Homo sapiens
gacccatcttgtttt

SEQ ID NO: 1709542 - DNA, 15 bp, Homo sapiens
acccatcttgttttg

SEQ ID NO: 1709543 - DNA, 15 bp, Homo sapiens
cccatcttgttttga

SEQ ID NO: 1709544 - DNA, 15 bp, Homo sapiens
ccatcttgttttgat

SEQ ID NO: 1709545 - DNA, 15 bp, Homo sapiens
catcttgttttgatt

SEQ ID NO: 1709546 - DNA, 15 bp, Homo sapiens
atcttgttttgatta

SEQ ID NO: 1709547 - DNA, 15 bp, Homo sapiens
tcttgttttgattag

SEQ ID NO: 1709548 - DNA, 15 bp, Homo sapiens
cttgttttgattaga

SEQ ID NO: 1709549 - DNA, 15 bp, Homo sapiens
ttgttttgattagat

SEQ ID NO: 1709550 - DNA, 15 bp, Homo sapiens
tgttttgattagatt

SEQ ID NO: 1709551 - DNA, 15 bp, Homo sapiens
gttttgattagattt

SEQ ID NO: 1709552 - DNA, 15 bp, Homo sapiens
ttttgattagattta

SEQ ID NO: 1709553 - DNA, 15 bp, Homo sapiens
tttgattagatttac

SEQ ID NO: 1709554 - DNA, 15 bp, Homo sapiens
ttgattagatttacc

SEQ ID NO: 1709555 - DNA, 15 bp, Homo sapiens
tgattagatttaccc

SEQ ID NO: 1709556 - DNA, 15 bp, Homo sapiens
gattagatttacccc

SEQ ID NO: 1709557 - DNA, 15 bp, Homo sapiens
attagatttacccca

SEQ ID NO: 1709558 - DNA, 15 bp, Homo sapiens
ttagatttaccccaa

SEQ ID NO: 1709559 - DNA, 15 bp, Homo sapiens
tagatttaccccaag

SEQ ID NO: 1709560 - DNA, 15 bp, Homo sapiens
agatttaccccaagg

SEQ ID NO: 1709561 - DNA, 15 bp, Homo sapiens
gatttaccccaagga

SEQ ID NO: 1709562 - DNA, 15 bp, Homo sapiens
atttaccccaaggac

SEQ ID NO: 1709563 - DNA, 15 bp, Homo sapiens
tttaccccaaggaca

SEQ ID NO: 1709564 - DNA, 15 bp, Homo sapiens
ttaccccaaggacat

SEQ ID NO: 1709565 - DNA, 15 bp, Homo sapiens
taccccaaggacatt

SEQ ID NO: 1709566 - DNA, 15 bp, Homo sapiens
accccaaggacatta

SEQ ID NO: 1709567 - DNA, 15 bp, Homo sapiens
ccccaaggacattaa

SEQ ID NO: 1709568 - DNA, 15 bp, Homo sapiens
cccaaggacattaac

SEQ ID NO: 1709569 - DNA, 15 bp, Homo sapiens
ccaaggacattaact

SEQ ID NO: 1709570 - DNA, 15 bp, Homo sapiens
caaggacattaactc

SEQ ID NO: 1709571 - DNA, 15 bp, Homo sapiens
aaggacattaactcc

SEQ ID NO: 1709572 - DNA, 15 bp, Homo sapiens
aggacattaactcca

SEQ ID NO: 1709573 - DNA, 15 bp, Homo sapiens
ggacattaactccac

SEQ ID NO: 1709574 - DNA, 15 bp, Homo sapiens
gacattaactccact

SEQ ID NO: 1709575 - DNA, 15 bp, Homo sapiens
acattaactccactg

SEQ ID NO: 1709576 - DNA, 15 bp, Homo sapiens
cattaactccactgc

SEQ ID NO: 1709577 - DNA, 15 bp, Homo sapiens
attaactccactgca

SEQ ID NO: 1709578 - DNA, 15 bp, Homo sapiens
ttaactccactgcac

SEQ ID NO: 1709579 - DNA, 15 bp, Homo sapiens
taactccactgcact

SEQ ID NO: 1709580 - DNA, 15 bp, Homo sapiens
aactccactgcactt

SEQ ID NO: 1709581 - DNA, 15 bp, Homo sapiens
actccactgcactta

SEQ ID NO: 1709582 - DNA, 15 bp, Homo sapiens
ctccactgcacttac

SEQ ID NO: 1709583 - DNA, 15 bp, Homo sapiens
tccactgcacttacg

SEQ ID NO: 1709584 - DNA, 15 bp, Homo sapiens
ccactgcacttacgg

SEQ ID NO: 1709585 - DNA, 15 bp, Homo sapiens
cactgcacttacggc

SEQ ID NO: 1709586 - DNA, 15 bp, Homo sapiens
actgcacttacggct

SEQ ID NO: 1709587 - DNA, 15 bp, Homo sapiens
ctgcacttacggcta

SEQ ID NO: 1709588 - DNA, 15 bp, Homo sapiens
tgcacttacggctac

SEQ ID NO: 1709589 - DNA, 15 bp, Homo sapiens
gcacttacggctaca

SEQ ID NO: 1709590 - DNA, 15 bp, Homo sapiens
cacttacggctacac

SEQ ID NO: 1709591 - DNA, 15 bp, Homo sapiens
acttacggctacact

SEQ ID NO: 1709592 - DNA, 15 bp, Homo sapiens
cttacggctacactt

SEQ ID NO: 1709593 - DNA, 15 bp, Homo sapiens
ttacggctacacttt

SEQ ID NO: 1709594 - DNA, 15 bp, Homo sapiens
tacggctacactttg

SEQ ID NO: 1709595 - DNA, 15 bp, Homo sapiens
acggctacactttgt

SEQ ID NO: 1709596 - DNA, 15 bp, Homo sapiens
cggctacactttgtt

SEQ ID NO: 1709597 - DNA, 15 bp, Homo sapiens
ggctacactttgtta

SEQ ID NO: 1709598 - DNA, 15 bp, Homo sapiens
gctacactttgttag

SEQ ID NO: 1709599 - DNA, 15 bp, Homo sapiens
ctacactttgttaga

SEQ ID NO: 1709600 - DNA, 15 bp, Homo sapiens
tacactttgttagaa

SEQ ID NO: 1709601 - DNA, 15 bp, Homo sapiens
acactttgttagaag

SEQ ID NO: 1709602 - DNA, 15 bp, Homo sapiens
cactttgttagaagc

SEQ ID NO: 1709603 - DNA, 15 bp, Homo sapiens
actttgttagaagcc

SEQ ID NO: 1709604 - DNA, 15 bp, Homo sapiens
ctttgttagaagccc

SEQ ID NO: 1709605 - DNA, 15 bp, Homo sapiens
tttgttagaagccca

SEQ ID NO: 1709606 - DNA, 15 bp, Homo sapiens
ttgttagaagcccaa

SEQ ID NO: 1709607 - DNA, 15 bp, Homo sapiens
tgttagaagcccaac

SEQ ID NO: 1709608 - DNA, 15 bp, Homo sapiens
gttagaagcccaaca

SEQ ID NO: 1709609 - DNA, 15 bp, Homo sapiens
ttagaagcccaacag

SEQ ID NO: 1709610 - DNA, 15 bp, Homo sapiens
tagaagcccaacagt

SEQ ID NO: 1709611 - DNA, 15 bp, Homo sapiens
agaagcccaacagtt

SEQ ID NO: 1709612 - DNA, 15 bp, Homo sapiens
gaagcccaacagtta

SEQ ID NO: 1709613 - DNA, 15 bp, Homo sapiens
aagcccaacagttag

SEQ ID NO: 1709614 - DNA, 15 bp, Homo sapiens
agcccaacagttagg

SEQ ID NO: 1709615 - DNA, 15 bp, Homo sapiens
gcccaacagttaggc

SEQ ID NO: 1709616 - DNA, 15 bp, Homo sapiens
cccaacagttaggca

SEQ ID NO: 1709617 - DNA, 15 bp, Homo sapiens
ccaacagttaggcac

SEQ ID NO: 1709618 - DNA, 15 bp, Homo sapiens
caacagttaggcact

SEQ ID NO: 1709619 - DNA, 15 bp, Homo sapiens
aacagttaggcacta

SEQ ID NO: 1709620 - DNA, 15 bp, Homo sapiens
acagttaggcactat

SEQ ID NO: 1709621 - DNA, 15 bp, Homo sapiens
cagttaggcactatc

SEQ ID NO: 1709622 - DNA, 15 bp, Homo sapiens
agttaggcactatct

SEQ ID NO: 1709623 - DNA, 15 bp, Homo sapiens
gttaggcactatctc

SEQ ID NO: 1709624 - DNA, 15 bp, Homo sapiens
ttaggcactatctca

SEQ ID NO: 1709625 - DNA, 15 bp, Homo sapiens
taggcactatctcag

SEQ ID NO: 1709626 - DNA, 15 bp, Homo sapiens
aggcactatctcagc

SEQ ID NO: 1709627 - DNA, 15 bp, Homo sapiens
ggcactatctcagcc

SEQ ID NO: 1709628 - DNA, 15 bp, Homo sapiens
gcactatctcagccc

SEQ ID NO: 1709629 - DNA, 15 bp, Homo sapiens
cactatctcagccct

SEQ ID NO: 1709630 - DNA, 15 bp, Homo sapiens
actatctcagccctc

SEQ ID NO: 1709631 - DNA, 15 bp, Homo sapiens
ctatctcagccctct

SEQ ID NO: 1709632 - DNA, 15 bp, Homo sapiens
tatctcagccctctt

SEQ ID NO: 1709633 - DNA, 15 bp, Homo sapiens
atctcagccctcttg

SEQ ID NO: 1709634 - DNA, 15 bp, Homo sapiens
tctcagccctcttgg

SEQ ID NO: 1709635 - DNA, 15 bp, Homo sapiens
ctcagccctcttggg

SEQ ID NO: 1709636 - DNA, 15 bp, Homo sapiens
tcagccctcttgggg

SEQ ID NO: 1709637 - DNA, 15 bp, Homo sapiens
cagccctcttggggt

SEQ ID NO: 1709638 - DNA, 15 bp, Homo sapiens
agccctcttggggtg

SEQ ID NO: 1709639 - DNA, 15 bp, Homo sapiens
gccctcttggggtgg

SEQ ID NO: 1709640 - DNA, 15 bp, Homo sapiens
ccctcttggggtggg

SEQ ID NO: 1709641 - DNA, 15 bp, Homo sapiens
cctcttggggtggga

SEQ ID NO: 1709642 - DNA, 15 bp, Homo sapiens
ctcttggggtgggag

SEQ ID NO: 1709643 - DNA, 15 bp, Homo sapiens
tcttggggtgggagg

SEQ ID NO: 1709644 - DNA, 15 bp, Homo sapiens
cttggggtgggaggt

SEQ ID NO: 1709645 - DNA, 15 bp, Homo sapiens
ttggggtgggaggtg

SEQ ID NO: 1709646 - DNA, 15 bp, Homo sapiens
tggggtgggaggtga

SEQ ID NO: 1709647 - DNA, 15 bp, Homo sapiens
ggggtgggaggtgag

SEQ ID NO: 1709648 - DNA, 15 bp, Homo sapiens
gggtgggaggtgaga

SEQ ID NO: 1709649 - DNA, 15 bp, Homo sapiens
ggtgggaggtgagat

SEQ ID NO: 1709650 - DNA, 15 bp, Homo sapiens
gtgggaggtgagatg

SEQ ID NO: 1709651 - DNA, 15 bp, Homo sapiens
tgggaggtgagatgt

SEQ ID NO: 1709652 - DNA, 15 bp, Homo sapiens
gggaggtgagatgtg

SEQ ID NO: 1709653 - DNA, 15 bp, Homo sapiens
ggaggtgagatgtgt

SEQ ID NO: 1709654 - DNA, 15 bp, Homo sapiens
gaggtgagatgtgtg

SEQ ID NO: 1709655 - DNA, 15 bp, Homo sapiens
aggtgagatgtgtgt

SEQ ID NO: 1709656 - DNA, 15 bp, Homo sapiens
ggtgagatgtgtgtg

SEQ ID NO: 1709657 - DNA, 15 bp, Homo sapiens
gtgagatgtgtgtgg

SEQ ID NO: 1709658 - DNA, 15 bp, Homo sapiens
tgagatgtgtgtggc

SEQ ID NO: 1709659 - DNA, 15 bp, Homo sapiens
gagatgtgtgtggct

SEQ ID NO: 1709660 - DNA, 15 bp, Homo sapiens
agatgtgtgtggctt

SEQ ID NO: 1709661 - DNA, 15 bp, Homo sapiens
gatgtgtgtggcttg

SEQ ID NO: 1709662 - DNA, 15 bp, Homo sapiens
atgtgtgtggcttgg

SEQ ID NO: 1709663 - DNA, 15 bp, Homo sapiens
tgtgtgtggcttggg

SEQ ID NO: 1709664 - DNA, 15 bp, Homo sapiens
gtgtgtggcttgggg

SEQ ID NO: 1709665 - DNA, 15 bp, Homo sapiens
tgtgtggcttgggga

SEQ ID NO: 1709666 - DNA, 15 bp, Homo sapiens
gtgtggcttggggaa

SEQ ID NO: 1709667 - DNA, 15 bp, Homo sapiens
tgtggcttggggaaa

SEQ ID NO: 1709668 - DNA, 15 bp, Homo sapiens
gtggcttggggaaag

SEQ ID NO: 1709669 - DNA, 15 bp, Homo sapiens
tggcttggggaaagg

SEQ ID NO: 1709670 - DNA, 15 bp, Homo sapiens
ggcttggggaaaggg

SEQ ID NO: 1709671 - DNA, 15 bp, Homo sapiens
gcttggggaaaggga

SEQ ID NO: 1709672 - DNA, 15 bp, Homo sapiens
cttggggaaagggag

SEQ ID NO: 1709673 - DNA, 15 bp, Homo sapiens
ttggggaaagggagg

SEQ ID NO: 1709674 - DNA, 15 bp, Homo sapiens
tggggaaagggaggg

SEQ ID NO: 1709675 - DNA, 15 bp, Homo sapiens
ggggaaagggagggg

SEQ ID NO: 1709676 - DNA, 15 bp, Homo sapiens
gggaaagggagggga

SEQ ID NO: 1709677 - DNA, 15 bp, Homo sapiens
ggaaagggaggggaa

SEQ ID NO: 1709678 - DNA, 15 bp, Homo sapiens
gaaagggaggggaac

SEQ ID NO: 1709679 - DNA, 15 bp, Homo sapiens
aaagggaggggaacc

SEQ ID NO: 1709680 - DNA, 15 bp, Homo sapiens
aagggaggggaacca

SEQ ID NO: 1709681 - DNA, 15 bp, Homo sapiens
agggaggggaaccac

SEQ ID NO: 1709682 - DNA, 15 bp, Homo sapiens
gggaggggaaccact

SEQ ID NO: 1709683 - DNA, 15 bp, Homo sapiens
ggaggggaaccactg

SEQ ID NO: 1709684 - DNA, 15 bp, Homo sapiens
gaggggaaccactgg

SEQ ID NO: 1709685 - DNA, 15 bp, Homo sapiens
aggggaaccactggg

SEQ ID NO: 1709686 - DNA, 15 bp, Homo sapiens
ggggaaccactggga

SEQ ID NO: 1709687 - DNA, 15 bp, Homo sapiens
gggaaccactgggat

SEQ ID NO: 1709688 - DNA, 15 bp, Homo sapiens
ggaaccactgggatg

SEQ ID NO: 1709689 - DNA, 15 bp, Homo sapiens
gaaccactgggatgt

SEQ ID NO: 1709690 - DNA, 15 bp, Homo sapiens
aaccactgggatgtg

SEQ ID NO: 1709691 - DNA, 15 bp, Homo sapiens
accactgggatgtgc

SEQ ID NO: 1709692 - DNA, 15 bp, Homo sapiens
ccactgggatgtgcc

SEQ ID NO: 1709693 - DNA, 15 bp, Homo sapiens
cactgggatgtgcca

SEQ ID NO: 1709694 - DNA, 15 bp, Homo sapiens
actgggatgtgccaa

SEQ ID NO: 1709695 - DNA, 15 bp, Homo sapiens
ctgggatgtgccaat

SEQ ID NO: 1709696 - DNA, 15 bp, Homo sapiens
tgggatgtgccaatg

SEQ ID NO: 1709697 - DNA, 15 bp, Homo sapiens
gggatgtgccaatgt

SEQ ID NO: 1709698 - DNA, 15 bp, Homo sapiens
ggatgtgccaatgta

SEQ ID NO: 1709699 - DNA, 15 bp, Homo sapiens
gatgtgccaatgtaa

SEQ ID NO: 1709700 - DNA, 15 bp, Homo sapiens
atgtgccaatgtaaa

SEQ ID NO: 1709701 - DNA, 15 bp, Homo sapiens
tgtgccaatgtaaag

SEQ ID NO: 1709702 - DNA, 15 bp, Homo sapiens
gtgccaatgtaaagt

SEQ ID NO: 1709703 - DNA, 15 bp, Homo sapiens
tgccaatgtaaagtc

SEQ ID NO: 1709704 - DNA, 15 bp, Homo sapiens
gccaatgtaaagtct

SEQ ID NO: 1709705 - DNA, 15 bp, Homo sapiens
ccaatgtaaagtctg

SEQ ID NO: 1709706 - DNA, 15 bp, Homo sapiens
caatgtaaagtctgt

SEQ ID NO: 1709707 - DNA, 15 bp, Homo sapiens
aatgtaaagtctgtt

SEQ ID NO: 1709708 - DNA, 15 bp, Homo sapiens
atgtaaagtctgttg

SEQ ID NO: 1709709 - DNA, 15 bp, Homo sapiens
tgtaaagtctgttgc

SEQ ID NO: 1709710 - DNA, 15 bp, Homo sapiens
gtaaagtctgttgct

SEQ ID NO: 1709711 - DNA, 15 bp, Homo sapiens
taaagtctgttgctt

SEQ ID NO: 1709712 - DNA, 15 bp, Homo sapiens
aaagtctgttgcttc

SEQ ID NO: 1709713 - DNA, 15 bp, Homo sapiens
aagtctgttgcttca

SEQ ID NO: 1709714 - DNA, 15 bp, Homo sapiens
agtctgttgcttcag

SEQ ID NO: 1709715 - DNA, 15 bp, Homo sapiens
gtctgttgcttcagt

SEQ ID NO: 1709716 - DNA, 15 bp, Homo sapiens
tctgttgcttcagta

SEQ ID NO: 1709717 - DNA, 15 bp, Homo sapiens
ctgttgcttcagtag

SEQ ID NO: 1709718 - DNA, 15 bp, Homo sapiens
tgttgcttcagtagt

SEQ ID NO: 1709719 - DNA, 15 bp, Homo sapiens
gttgcttcagtagtc

SEQ ID NO: 1709720 - DNA, 15 bp, Homo sapiens
ttgcttcagtagtct

SEQ ID NO: 1709721 - DNA, 15 bp, Homo sapiens
tgcttcagtagtctc

SEQ ID NO: 1709722 - DNA, 15 bp, Homo sapiens
gcttcagtagtctct

SEQ ID NO: 1709723 - DNA, 15 bp, Homo sapiens
cttcagtagtctctg

SEQ ID NO: 1709724 - DNA, 15 bp, Homo sapiens
ttcagtagtctctgg

SEQ ID NO: 1709725 - DNA, 15 bp, Homo sapiens
tcagtagtctctggg

SEQ ID NO: 1709726 - DNA, 15 bp, Homo sapiens
cagtagtctctgggc

SEQ ID NO: 1709727 - DNA, 15 bp, Homo sapiens
agtagtctctgggca

SEQ ID NO: 1709728 - DNA, 15 bp, Homo sapiens
gtagtctctgggcag

SEQ ID NO: 1709729 - DNA, 15 bp, Homo sapiens
tagtctctgggcagg

SEQ ID NO: 1709730 - DNA, 15 bp, Homo sapiens
agtctctgggcaggg

SEQ ID NO: 1709731 - DNA, 15 bp, Homo sapiens
gtctctgggcagggc

SEQ ID NO: 1709732 - DNA, 15 bp, Homo sapiens
tctctgggcagggcc

SEQ ID NO: 1709733 - DNA, 15 bp, Homo sapiens
ctctgggcagggccc

SEQ ID NO: 1709734 - DNA, 15 bp, Homo sapiens
tctgggcagggccca

SEQ ID NO: 1709735 - DNA, 15 bp, Homo sapiens
ctgggcagggcccat

SEQ ID NO: 1709736 - DNA, 15 bp, Homo sapiens
tgggcagggcccata

SEQ ID NO: 1709737 - DNA, 15 bp, Homo sapiens
gggcagggcccatac

SEQ ID NO: 1709738 - DNA, 15 bp, Homo sapiens
ggcagggcccataca

SEQ ID NO: 1709739 - DNA, 15 bp, Homo sapiens
gcagggcccatacag

SEQ ID NO: 1709740 - DNA, 15 bp, Homo sapiens
cagggcccatacagt

SEQ ID NO: 1709741 - DNA, 15 bp, Homo sapiens
agggcccatacagtt

SEQ ID NO: 1709742 - DNA, 15 bp, Homo sapiens
gggcccatacagttg

SEQ ID NO: 1709743 - DNA, 15 bp, Homo sapiens
ggcccatacagttgg

SEQ ID NO: 1709744 - DNA, 15 bp, Homo sapiens
gcccatacagttggt

SEQ ID NO: 1709745 - DNA, 15 bp, Homo sapiens
cccatacagttggtt

SEQ ID NO: 1709746 - DNA, 15 bp, Homo sapiens
ccatacagttggttg

SEQ ID NO: 1709747 - DNA, 15 bp, Homo sapiens
catacagttggttgc

SEQ ID NO: 1709748 - DNA, 15 bp, Homo sapiens
atacagttggttgct

SEQ ID NO: 1709749 - DNA, 15 bp, Homo sapiens
tacagttggttgcta

SEQ ID NO: 1709750 - DNA, 15 bp, Homo sapiens
acagttggttgctat

SEQ ID NO: 1709751 - DNA, 15 bp, Homo sapiens
cagttggttgctatg

SEQ ID NO: 1709752 - DNA, 15 bp, Homo sapiens
agttggttgctatgg

SEQ ID NO: 1709753 - DNA, 15 bp, Homo sapiens
gttggttgctatggt

SEQ ID NO: 1709754 - DNA, 15 bp, Homo sapiens
ttggttgctatggtg

SEQ ID NO: 1709755 - DNA, 15 bp, Homo sapiens
tggttgctatggtgg

SEQ ID NO: 1709756 - DNA, 15 bp, Homo sapiens
ggttgctatggtggc

SEQ ID NO: 1709757 - DNA, 15 bp, Homo sapiens
gttgctatggtggca

SEQ ID NO: 1709758 - DNA, 15 bp, Homo sapiens
ttgctatggtggcag

SEQ ID NO: 1709759 - DNA, 15 bp, Homo sapiens
tgctatggtggcagt

SEQ ID NO: 1709760 - DNA, 15 bp, Homo sapiens
gctatggtggcagtt

SEQ ID NO: 1709761 - DNA, 15 bp, Homo sapiens
ctatggtggcagttg

SEQ ID NO: 1709762 - DNA, 15 bp, Homo sapiens
tatggtggcagttgg

SEQ ID NO: 1709763 - DNA, 15 bp, Homo sapiens
atggtggcagttggg

SEQ ID NO: 1709764 - DNA, 15 bp, Homo sapiens
tggtggcagttgggg

SEQ ID NO: 1709765 - DNA, 15 bp, Homo sapiens
ggtggcagttgggga

SEQ ID NO: 1709766 - DNA, 15 bp, Homo sapiens
gtggcagttggggaa

SEQ ID NO: 1709767 - DNA, 15 bp, Homo sapiens
tggcagttggggaaa

SEQ ID NO: 1709768 - DNA, 15 bp, Homo sapiens
ggcagttggggaaaa

SEQ ID NO: 1709769 - DNA, 15 bp, Homo sapiens
gcagttggggaaaac

SEQ ID NO: 1709770 - DNA, 15 bp, Homo sapiens
cagttggggaaaaca

SEQ ID NO: 1709771 - DNA, 15 bp, Homo sapiens
agttggggaaaacaa

SEQ ID NO: 1709772 - DNA, 15 bp, Homo sapiens
gttggggaaaacaag

SEQ ID NO: 1709773 - DNA, 15 bp, Homo sapiens
ttggggaaaacaagt

SEQ ID NO: 1709774 - DNA, 15 bp, Homo sapiens
tggggaaaacaagtg

SEQ ID NO: 1709775 - DNA, 15 bp, Homo sapiens
ggggaaaacaagtgg

SEQ ID NO: 1709776 - DNA, 15 bp, Homo sapiens
gggaaaacaagtggt

SEQ ID NO: 1709777 - DNA, 15 bp, Homo sapiens
ggaaaacaagtggtc

SEQ ID NO: 1709778 - DNA, 15 bp, Homo sapiens
gaaaacaagtggtca

SEQ ID NO: 1709779 - DNA, 15 bp, Homo sapiens
aaaacaagtggtcaa

SEQ ID NO: 1709780 - DNA, 15 bp, Homo sapiens
aaacaagtggtcaat

SEQ ID NO: 1709781 - DNA, 15 bp, Homo sapiens
aacaagtggtcaatg

SEQ ID NO: 1709782 - DNA, 15 bp, Homo sapiens
acaagtggtcaatga

SEQ ID NO: 1709783 - DNA, 15 bp, Homo sapiens
caagtggtcaatgac

SEQ ID NO: 1709784 - DNA, 15 bp, Homo sapiens
aagtggtcaatgacc

SEQ ID NO: 1709785 - DNA, 15 bp, Homo sapiens
agtggtcaatgaccc

SEQ ID NO: 1709786 - DNA, 15 bp, Homo sapiens
gtggtcaatgaccct

SEQ ID NO: 1709787 - DNA, 15 bp, Homo sapiens
tggtcaatgaccctg

SEQ ID NO: 1709788 - DNA, 15 bp, Homo sapiens
ggtcaatgaccctgg

SEQ ID NO: 1709789 - DNA, 15 bp, Homo sapiens
gtcaatgaccctgga

SEQ ID NO: 1709790 - DNA, 15 bp, Homo sapiens
tcaatgaccctggag

SEQ ID NO: 1709791 - DNA, 15 bp, Homo sapiens
caatgaccctggagt

SEQ ID NO: 1709792 - DNA, 15 bp, Homo sapiens
aatgaccctggagtt

SEQ ID NO: 1709793 - DNA, 15 bp, Homo sapiens
atgaccctggagtta

SEQ ID NO: 1709794 - DNA, 15 bp, Homo sapiens
tgaccctggagttag

SEQ ID NO: 1709795 - DNA, 15 bp, Homo sapiens
gaccctggagttagg

SEQ ID NO: 1709796 - DNA, 15 bp, Homo sapiens
accctggagttaggc

SEQ ID NO: 1709797 - DNA, 15 bp, Homo sapiens
ccctggagttaggcc

SEQ ID NO: 1709798 - DNA, 15 bp, Homo sapiens
cctggagttaggcca

SEQ ID NO: 1709799 - DNA, 15 bp, Homo sapiens
ctggagttaggccag

SEQ ID NO: 1709800 - DNA, 15 bp, Homo sapiens
tggagttaggccagg

SEQ ID NO: 1709801 - DNA, 15 bp, Homo sapiens
ggagttaggccaggc

SEQ ID NO: 1709802 - DNA, 15 bp, Homo sapiens
gagttaggccaggct

SEQ ID NO: 1709803 - DNA, 15 bp, Homo sapiens
agttaggccaggctg

SEQ ID NO: 1709804 - DNA, 15 bp, Homo sapiens
gttaggccaggctgt

SEQ ID NO: 1709805 - DNA, 15 bp, Homo sapiens
ttaggccaggctgtt

SEQ ID NO: 1709806 - DNA, 15 bp, Homo sapiens
taggccaggctgttt

SEQ ID NO: 1709807 - DNA, 15 bp, Homo sapiens
aggccaggctgtttg

SEQ ID NO: 1709808 - DNA, 15 bp, Homo sapiens
ggccaggctgtttgg

SEQ ID NO: 1709809 - DNA, 15 bp, Homo sapiens
gccaggctgtttggc

SEQ ID NO: 1709810 - DNA, 15 bp, Homo sapiens
ccaggctgtttggct

SEQ ID NO: 1709811 - DNA, 15 bp, Homo sapiens
caggctgtttggctt

SEQ ID NO: 1709812 - DNA, 15 bp, Homo sapiens
aggctgtttggctta

SEQ ID NO: 1709813 - DNA, 15 bp, Homo sapiens
ggctgtttggcttat

SEQ ID NO: 1709814 - DNA, 15 bp, Homo sapiens
gctgtttggcttata

SEQ ID NO: 1709815 - DNA, 15 bp, Homo sapiens
ctgtttggcttatag

SEQ ID NO: 1709816 - DNA, 15 bp, Homo sapiens
tgtttggcttatagg

SEQ ID NO: 1709817 - DNA, 15 bp, Homo sapiens
gtttggcttataggt

SEQ ID NO: 1709818 - DNA, 15 bp, Homo sapiens
tttggcttataggtg

SEQ ID NO: 1709819 - DNA, 15 bp, Homo sapiens
ttggcttataggtga

SEQ ID NO: 1709820 - DNA, 15 bp, Homo sapiens
tggcttataggtgac

SEQ ID NO: 1709821 - DNA, 15 bp, Homo sapiens
ggcttataggtgaca

SEQ ID NO: 1709822 - DNA, 15 bp, Homo sapiens
gcttataggtgacat

SEQ ID NO: 1709823 - DNA, 15 bp, Homo sapiens
cttataggtgacata

SEQ ID NO: 1709824 - DNA, 15 bp, Homo sapiens
ttataggtgacatat

SEQ ID NO: 1709825 - DNA, 15 bp, Homo sapiens
tataggtgacatata

SEQ ID NO: 1709826 - DNA, 15 bp, Homo sapiens
ataggtgacatatac

SEQ ID NO: 1709827 - DNA, 15 bp, Homo sapiens
taggtgacatataca

SEQ ID NO: 1709828 - DNA, 15 bp, Homo sapiens
aggtgacatatacac

SEQ ID NO: 1709829 - DNA, 15 bp, Homo sapiens
ggtgacatatacact

SEQ ID NO: 1709830 - DNA, 15 bp, Homo sapiens
gtgacatatacactg

SEQ ID NO: 1709831 - DNA, 15 bp, Homo sapiens
tgacatatacactgc

SEQ ID NO: 1709832 - DNA, 15 bp, Homo sapiens
gacatatacactgct

SEQ ID NO: 1709833 - DNA, 15 bp, Homo sapiens
acatatacactgctt

SEQ ID NO: 1709834 - DNA, 15 bp, Homo sapiens
catatacactgcttg

SEQ ID NO: 1709835 - DNA, 15 bp, Homo sapiens
atatacactgcttga

SEQ ID NO: 1709836 - DNA, 15 bp, Homo sapiens
tatacactgcttgat

SEQ ID NO: 1709837 - DNA, 15 bp, Homo sapiens
atacactgcttgata

SEQ ID NO: 1709838 - DNA, 15 bp, Homo sapiens
tacactgcttgatat

SEQ ID NO: 1709839 - DNA, 15 bp, Homo sapiens
acactgcttgatatg

SEQ ID NO: 1709840 - DNA, 15 bp, Homo sapiens
cactgcttgatatgt

SEQ ID NO: 1709841 - DNA, 15 bp, Homo sapiens
actgcttgatatgtc

SEQ ID NO: 1709842 - DNA, 15 bp, Homo sapiens
ctgcttgatatgtct

SEQ ID NO: 1709843 - DNA, 15 bp, Homo sapiens
tgcttgatatgtcta

SEQ ID NO: 1709844 - DNA, 15 bp, Homo sapiens
gcttgatatgtctac

SEQ ID NO: 1709845 - DNA, 15 bp, Homo sapiens
cttgatatgtctacc

SEQ ID NO: 1709846 - DNA, 15 bp, Homo sapiens
ttgatatgtctacca

SEQ ID NO: 1709847 - DNA, 15 bp, Homo sapiens
tgatatgtctaccac

SEQ ID NO: 1709848 - DNA, 15 bp, Homo sapiens
gatatgtctaccaca

SEQ ID NO: 1709849 - DNA, 15 bp, Homo sapiens
atatgtctaccacac

SEQ ID NO: 1709850 - DNA, 15 bp, Homo sapiens
tatgtctaccacact

SEQ ID NO: 1709851 - DNA, 15 bp, Homo sapiens
atgtctaccacactg

SEQ ID NO: 1709852 - DNA, 15 bp, Homo sapiens
tgtctaccacactgc

SEQ ID NO: 1709853 - DNA, 15 bp, Homo sapiens
gtctaccacactgcc

SEQ ID NO: 1709854 - DNA, 15 bp, Homo sapiens
tctaccacactgccc

SEQ ID NO: 1709855 - DNA, 15 bp, Homo sapiens
ctaccacactgccct

SEQ ID NO: 1709856 - DNA, 15 bp, Homo sapiens
taccacactgccctt

SEQ ID NO: 1709857 - DNA, 15 bp, Homo sapiens
accacactgcccttc

SEQ ID NO: 1709858 - DNA, 15 bp, Homo sapiens
ccacactgcccttct

SEQ ID NO: 1709859 - DNA, 15 bp, Homo sapiens
cacactgcccttctt

SEQ ID NO: 1709860 - DNA, 15 bp, Homo sapiens
acactgcccttcttg

SEQ ID NO: 1709861 - DNA, 15 bp, Homo sapiens
cactgcccttcttga

SEQ ID NO: 1709862 - DNA, 15 bp, Homo sapiens
actgcccttcttgaa

SEQ ID NO: 1709863 - DNA, 15 bp, Homo sapiens
ctgcccttcttgaat

SEQ ID NO: 1709864 - DNA, 15 bp, Homo sapiens
tgcccttcttgaatc

SEQ ID NO: 1709865 - DNA, 15 bp, Homo sapiens
gcccttcttgaatct

SEQ ID NO: 1709866 - DNA, 15 bp, Homo sapiens
cccttcttgaatctt

SEQ ID NO: 1709867 - DNA, 15 bp, Homo sapiens
ccttcttgaatcttg

SEQ ID NO: 1709868 - DNA, 15 bp, Homo sapiens
cttcttgaatcttgg

SEQ ID NO: 1709869 - DNA, 15 bp, Homo sapiens
ttcttgaatcttggt

SEQ ID NO: 1709870 - DNA, 15 bp, Homo sapiens
tcttgaatcttggtt

SEQ ID NO: 1709871 - DNA, 15 bp, Homo sapiens
cttgaatcttggttt

SEQ ID NO: 1709872 - DNA, 15 bp, Homo sapiens
ttgaatcttggtttt

SEQ ID NO: 1709873 - DNA, 15 bp, Homo sapiens
tgaatcttggttttc

SEQ ID NO: 1709874 - DNA, 15 bp, Homo sapiens
gaatcttggttttcg

SEQ ID NO: 1709875 - DNA, 15 bp, Homo sapiens
aatcttggttttcgg

SEQ ID NO: 1709876 - DNA, 15 bp, Homo sapiens
atcttggttttcggc

SEQ ID NO: 1709877 - DNA, 15 bp, Homo sapiens
tcttggttttcggca

SEQ ID NO: 1709878 - DNA, 15 bp, Homo sapiens
cttggttttcggcat

SEQ ID NO: 1709879 - DNA, 15 bp, Homo sapiens
ttggttttcggcatt

SEQ ID NO: 1709880 - DNA, 15 bp, Homo sapiens
tggttttcggcattt

SEQ ID NO: 1709881 - DNA, 15 bp, Homo sapiens
ggttttcggcatttc

SEQ ID NO: 1709882 - DNA, 15 bp, Homo sapiens
gttttcggcatttct

SEQ ID NO: 1709883 - DNA, 15 bp, Homo sapiens
ttttcggcatttctt

SEQ ID NO: 1709884 - DNA, 15 bp, Homo sapiens
tttcggcatttcttt

SEQ ID NO: 1709885 - DNA, 15 bp, Homo sapiens
ttcggcatttcttta

SEQ ID NO: 1709886 - DNA, 15 bp, Homo sapiens
tcggcatttctttaa

SEQ ID NO: 1709887 - DNA, 15 bp, Homo sapiens
cggcatttctttaat

SEQ ID NO: 1709888 - DNA, 15 bp, Homo sapiens
ggcatttctttaatt

SEQ ID NO: 1709889 - DNA, 15 bp, Homo sapiens
gcatttctttaattc

SEQ ID NO: 1709890 - DNA, 15 bp, Homo sapiens
catttctttaattct

SEQ ID NO: 1709891 - DNA, 15 bp, Homo sapiens
atttctttaattcta

SEQ ID NO: 1709892 - DNA, 15 bp, Homo sapiens
tttctttaattctat

SEQ ID NO: 1709893 - DNA, 15 bp, Homo sapiens
ttctttaattctatt

SEQ ID NO: 1709894 - DNA, 15 bp, Homo sapiens
tctttaattctattt

SEQ ID NO: 1709895 - DNA, 15 bp, Homo sapiens
ctttaattctattta

SEQ ID NO: 1709896 - DNA, 15 bp, Homo sapiens
tttaattctatttag

SEQ ID NO: 1709897 - DNA, 15 bp, Homo sapiens
ttaattctatttagt

SEQ ID NO: 1709898 - DNA, 15 bp, Homo sapiens
taattctatttagtg

SEQ ID NO: 1709899 - DNA, 15 bp, Homo sapiens
aattctatttagtgt

SEQ ID NO: 1709900 - DNA, 15 bp, Homo sapiens
attctatttagtgtt

SEQ ID NO: 1709901 - DNA, 15 bp, Homo sapiens
ttctatttagtgttc

SEQ ID NO: 1709902 - DNA, 15 bp, Homo sapiens
tctatttagtgttct

SEQ ID NO: 1709903 - DNA, 15 bp, Homo sapiens
ctatttagtgttctt

SEQ ID NO: 1709904 - DNA, 15 bp, Homo sapiens
tatttagtgttcttc

SEQ ID NO: 1709905 - DNA, 15 bp, Homo sapiens
atttagtgttcttcc

SEQ ID NO: 1709906 - DNA, 15 bp, Homo sapiens
tttagtgttcttcca

SEQ ID NO: 1709907 - DNA, 15 bp, Homo sapiens
ttagtgttcttccaa

SEQ ID NO: 1709908 - DNA, 15 bp, Homo sapiens
tagtgttcttccaat

SEQ ID NO: 1709909 - DNA, 15 bp, Homo sapiens
agtgttcttccaata

SEQ ID NO: 1709910 - DNA, 15 bp, Homo sapiens
gtgttcttccaataa

SEQ ID NO: 1709911 - DNA, 15 bp, Homo sapiens
tgttcttccaataaa

SEQ ID NO: 1709912 - DNA, 15 bp, Homo sapiens
gttcttccaataaat

SEQ ID NO: 1709913 - DNA, 15 bp, Homo sapiens
ttcttccaataaatt

SEQ ID NO: 1709914 - DNA, 15 bp, Homo sapiens
tcttccaataaattc

SEQ ID NO: 1709915 - DNA, 15 bp, Homo sapiens
cttccaataaattct

SEQ ID NO: 1709916 - DNA, 15 bp, Homo sapiens
ttccaataaattctc

SEQ ID NO: 1709917 - DNA, 15 bp, Homo sapiens
tccaataaattctca

SEQ ID NO: 1709918 - DNA, 15 bp, Homo sapiens
ccaataaattctcat

SEQ ID NO: 1709919 - DNA, 15 bp, Homo sapiens
caataaattctcatt

SEQ ID NO: 1709920 - DNA, 15 bp, Homo sapiens
aataaattctcattt

SEQ ID NO: 1709921 - DNA, 15 bp, Homo sapiens
ataaattctcatttt

SEQ ID NO: 1709922 - DNA, 15 bp, Homo sapiens
taaattctcattttt

SEQ ID NO: 1709923 - DNA, 15 bp, Homo sapiens
aaattctcatttttt

SEQ ID NO: 1709924 - DNA, 15 bp, Homo sapiens
aattctcattttttg

SEQ ID NO: 1709925 - DNA, 15 bp, Homo sapiens
attctcattttttgg

SEQ ID NO: 1709926 - DNA, 15 bp, Homo sapiens
ttctcattttttggt

SEQ ID NO: 1709927 - DNA, 15 bp, Homo sapiens
tctcattttttggtt

SEQ ID NO: 1709928 - DNA, 15 bp, Homo sapiens
ctcattttttggttg

SEQ ID NO: 1709929 - DNA, 15 bp, Homo sapiens
tcattttttggttgc

SEQ ID NO: 1709930 - DNA, 15 bp, Homo sapiens
cattttttggttgct

SEQ ID NO: 1709931 - DNA, 15 bp, Homo sapiens
attttttggttgcta

SEQ ID NO: 1709932 - DNA, 15 bp, Homo sapiens
ttttttggttgctaa

SEQ ID NO: 1709933 - DNA, 15 bp, Homo sapiens
tttttggttgctaat

SEQ ID NO: 1709934 - DNA, 15 bp, Homo sapiens
ttttggttgctaatc

SEQ ID NO: 1709935 - DNA, 15 bp, Homo sapiens
tttggttgctaatca

SEQ ID NO: 1709936 - DNA, 15 bp, Homo sapiens
ttggttgctaatcag

SEQ ID NO: 1709937 - DNA, 15 bp, Homo sapiens
tggttgctaatcaga

SEQ ID NO: 1709938 - DNA, 15 bp, Homo sapiens
ggttgctaatcagag

SEQ ID NO: 1709939 - DNA, 15 bp, Homo sapiens
gttgctaatcagagc

SEQ ID NO: 1709940 - DNA, 15 bp, Homo sapiens
ttgctaatcagagcc

SEQ ID NO: 1709941 - DNA, 15 bp, Homo sapiens
tgctaatcagagccg

SEQ ID NO: 1709942 - DNA, 15 bp, Homo sapiens
gctaatcagagccga

SEQ ID NO: 1709943 - DNA, 15 bp, Homo sapiens
ctaatcagagccgat

SEQ ID NO: 1709944 - DNA, 15 bp, Homo sapiens
taatcagagccgatt

SEQ ID NO: 1709945 - DNA, 15 bp, Homo sapiens
aatcagagccgattt

SEQ ID NO: 1709946 - DNA, 15 bp, Homo sapiens
atcagagccgatttc

SEQ ID NO: 1709947 - DNA, 15 bp, Homo sapiens
tcagagccgatttct

SEQ ID NO: 1709948 - DNA, 15 bp, Homo sapiens
cagagccgatttctg

SEQ ID NO: 1709949 - DNA, 15 bp, Homo sapiens
agagccgatttctgt

SEQ ID NO: 1709950 - DNA, 15 bp, Homo sapiens
gagccgatttctgtt

SEQ ID NO: 1709951 - DNA, 15 bp, Homo sapiens
agccgatttctgttt

SEQ ID NO: 1709952 - DNA, 15 bp, Homo sapiens
gccgatttctgtttc

SEQ ID NO: 1709953 - DNA, 15 bp, Homo sapiens
ccgatttctgtttca

SEQ ID NO: 1709954 - DNA, 15 bp, Homo sapiens
cgatttctgtttcat

SEQ ID NO: 1709955 - DNA, 15 bp, Homo sapiens
gatttctgtttcatg

SEQ ID NO: 1709956 - DNA, 15 bp, Homo sapiens
atttctgtttcatga

SEQ ID NO: 1709957 - DNA, 15 bp, Homo sapiens
tttctgtttcatgag

SEQ ID NO: 1709958 - DNA, 15 bp, Homo sapiens
ttctgtttcatgagg

SEQ ID NO: 1709959 - DNA, 15 bp, Homo sapiens
tctgtttcatgaggc

SEQ ID NO: 1709960 - DNA, 15 bp, Homo sapiens
ctgtttcatgaggcc

SEQ ID NO: 1709961 - DNA, 15 bp, Homo sapiens
tgtttcatgaggcca

SEQ ID NO: 1709962 - DNA, 15 bp, Homo sapiens
gtttcatgaggccaa

SEQ ID NO: 1709963 - DNA, 15 bp, Homo sapiens
tttcatgaggccaag

SEQ ID NO: 1709964 - DNA, 15 bp, Homo sapiens
ttcatgaggccaagg

SEQ ID NO: 1709965 - DNA, 15 bp, Homo sapiens
tcatgaggccaagga

SEQ ID NO: 1709966 - DNA, 15 bp, Homo sapiens
catgaggccaaggaa

SEQ ID NO: 1709967 - DNA, 15 bp, Homo sapiens
atgaggccaaggaaa

SEQ ID NO: 1709968 - DNA, 15 bp, Homo sapiens
tgaggccaaggaaac

SEQ ID NO: 1709969 - DNA, 15 bp, Homo sapiens
gaggccaaggaaaca

SEQ ID NO: 1709970 - DNA, 15 bp, Homo sapiens
aggccaaggaaacaa

SEQ ID NO: 1709971 - DNA, 15 bp, Homo sapiens
ggccaaggaaacaat

SEQ ID NO: 1709972 - DNA, 15 bp, Homo sapiens
gccaaggaaacaatt

SEQ ID NO: 1709973 - DNA, 15 bp, Homo sapiens
ccaaggaaacaattt

SEQ ID NO: 1709974 - DNA, 15 bp, Homo sapiens
caaggaaacaatttt

SEQ ID NO: 1709975 - DNA, 15 bp, Homo sapiens
aaggaaacaatttta

SEQ ID NO: 1709976 - DNA, 15 bp, Homo sapiens
aggaaacaattttaa

SEQ ID NO: 1709977 - DNA, 15 bp, Homo sapiens
ggaaacaattttaag

SEQ ID NO: 1709978 - DNA, 15 bp, Homo sapiens
gaaacaattttaagc

SEQ ID NO: 1709979 - DNA, 15 bp, Homo sapiens
aaacaattttaagca

SEQ ID NO: 1709980 - DNA, 15 bp, Homo sapiens
aacaattttaagcaa

SEQ ID NO: 1709981 - DNA, 15 bp, Homo sapiens
acaattttaagcaat

SEQ ID NO: 1709982 - DNA, 15 bp, Homo sapiens
caattttaagcaata

SEQ ID NO: 1709983 - DNA, 15 bp, Homo sapiens
aattttaagcaatat

SEQ ID NO: 1709984 - DNA, 15 bp, Homo sapiens
attttaagcaatatt

SEQ ID NO: 1709985 - DNA, 15 bp, Homo sapiens
ttttaagcaatattt

SEQ ID NO: 1709986 - DNA, 15 bp, Homo sapiens
tttaagcaatatttt

SEQ ID NO: 1709987 - DNA, 15 bp, Homo sapiens
ttaagcaatatttta

SEQ ID NO: 1709988 - DNA, 15 bp, Homo sapiens
taagcaatattttat

SEQ ID NO: 1709989 - DNA, 15 bp, Homo sapiens
aagcaatattttata

SEQ ID NO: 1709990 - DNA, 15 bp, Homo sapiens
agcaatattttatac

SEQ ID NO: 1709991 - DNA, 15 bp, Homo sapiens
gcaatattttatact

SEQ ID NO: 1709992 - DNA, 15 bp, Homo sapiens
caatattttatactc

SEQ ID NO: 1709993 - DNA, 15 bp, Homo sapiens
aatattttatactct

SEQ ID NO: 1709994 - DNA, 15 bp, Homo sapiens
atattttatactctc

SEQ ID NO: 1709995 - DNA, 15 bp, Homo sapiens
tattttatactctct

SEQ ID NO: 1709996 - DNA, 15 bp, Homo sapiens
attttatactctctt

SEQ ID NO: 1709997 - DNA, 15 bp, Homo sapiens
ttttatactctcttt

SEQ ID NO: 1709998 - DNA, 15 bp, Homo sapiens
tttatactctcttta

SEQ ID NO: 1709999 - DNA, 15 bp, Homo sapiens
ttatactctctttag

SEQ ID NO: 1710000 - DNA, 15 bp, Homo sapiens
tatactctctttagt

SEQ ID NO: 1710001 - DNA, 15 bp, Homo sapiens
atactctctttagtg

SEQ ID NO: 1710002 - DNA, 15 bp, Homo sapiens
tactctctttagtgc

SEQ ID NO: 1710003 - DNA, 15 bp, Homo sapiens
actctctttagtgct

SEQ ID NO: 1710004 - DNA, 15 bp, Homo sapiens
ctctctttagtgctc

SEQ ID NO: 1710005 - DNA, 15 bp, Homo sapiens
tctctttagtgctcc

SEQ ID NO: 1710006 - DNA, 15 bp, Homo sapiens
ctctttagtgctcca

SEQ ID NO: 1710007 - DNA, 15 bp, Homo sapiens
tctttagtgctccaa

SEQ ID NO: 1710008 - DNA, 15 bp, Homo sapiens
ctttagtgctccaaa

SEQ ID NO: 1710009 - DNA, 15 bp, Homo sapiens
tttagtgctccaaac

SEQ ID NO: 1710010 - DNA, 15 bp, Homo sapiens
ttagtgctccaaaca

SEQ ID NO: 1710011 - DNA, 15 bp, Homo sapiens
tagtgctccaaacac

SEQ ID NO: 1710012 - DNA, 15 bp, Homo sapiens
agtgctccaaacact

SEQ ID NO: 1710013 - DNA, 15 bp, Homo sapiens
gtgctccaaacactg

SEQ ID NO: 1710014 - DNA, 15 bp, Homo sapiens
tgctccaaacactgt

SEQ ID NO: 1710015 - DNA, 15 bp, Homo sapiens
gctccaaacactgtt

SEQ ID NO: 1710016 - DNA, 15 bp, Homo sapiens
ctccaaacactgttg

SEQ ID NO: 1710017 - DNA, 15 bp, Homo sapiens
tccaaacactgttgt

SEQ ID NO: 1710018 - DNA, 15 bp, Homo sapiens
ccaaacactgttgta

SEQ ID NO: 1710019 - DNA, 15 bp, Homo sapiens
caaacactgttgtat

SEQ ID NO: 1710020 - DNA, 15 bp, Homo sapiens
aaacactgttgtata

SEQ ID NO: 1710021 - DNA, 15 bp, Homo sapiens
aacactgttgtatac

SEQ ID NO: 1710022 - DNA, 15 bp, Homo sapiens
acactgttgtatact

SEQ ID NO: 1710023 - DNA, 15 bp, Homo sapiens
cactgttgtatactt

SEQ ID NO: 1710024 - DNA, 15 bp, Homo sapiens
actgttgtatactta

SEQ ID NO: 1710025 - DNA, 15 bp, Homo sapiens
ctgttgtatacttat

SEQ ID NO: 1710026 - DNA, 15 bp, Homo sapiens
tgttgtatacttatt

SEQ ID NO: 1710027 - DNA, 15 bp, Homo sapiens
gttgtatacttattt

SEQ ID NO: 1710028 - DNA, 15 bp, Homo sapiens
ttgtatacttatttg

SEQ ID NO: 1710029 - DNA, 15 bp, Homo sapiens
tgtatacttatttgg

SEQ ID NO: 1710030 - DNA, 15 bp, Homo sapiens
gtatacttatttggt

SEQ ID NO: 1710031 - DNA, 15 bp, Homo sapiens
tatacttatttggtg

SEQ ID NO: 1710032 - DNA, 15 bp, Homo sapiens
atacttatttggtgc

SEQ ID NO: 1710033 - DNA, 15 bp, Homo sapiens
tacttatttggtgct

SEQ ID NO: 1710034 - DNA, 15 bp, Homo sapiens
acttatttggtgcta

SEQ ID NO: 1710035 - DNA, 15 bp, Homo sapiens
cttatttggtgctaa

SEQ ID NO: 1710036 - DNA, 15 bp, Homo sapiens
ttatttggtgctaat

SEQ ID NO: 1710037 - DNA, 15 bp, Homo sapiens
tatttggtgctaatg

SEQ ID NO: 1710038 - DNA, 15 bp, Homo sapiens
atttggtgctaatgc

SEQ ID NO: 1710039 - DNA, 15 bp, Homo sapiens
tttggtgctaatgct

SEQ ID NO: 1710040 - DNA, 15 bp, Homo sapiens
ttggtgctaatgctc

SEQ ID NO: 1710041 - DNA, 15 bp, Homo sapiens
tggtgctaatgctcg

SEQ ID NO: 1710042 - DNA, 15 bp, Homo sapiens
ggtgctaatgctcga

SEQ ID NO: 1710043 - DNA, 15 bp, Homo sapiens
gtgctaatgctcgat

SEQ ID NO: 1710044 - DNA, 15 bp, Homo sapiens
tgctaatgctcgatg

SEQ ID NO: 1710045 - DNA, 15 bp, Homo sapiens
gctaatgctcgatga

SEQ ID NO: 1710046 - DNA, 15 bp, Homo sapiens
ctaatgctcgatgaa

SEQ ID NO: 1710047 - DNA, 15 bp, Homo sapiens
taatgctcgatgaac

SEQ ID NO: 1710048 - DNA, 15 bp, Homo sapiens
aatgctcgatgaact

SEQ ID NO: 1710049 - DNA, 15 bp, Homo sapiens
atgctcgatgaactg

SEQ ID NO: 1710050 - DNA, 15 bp, Homo sapiens
tgctcgatgaactgc

SEQ ID NO: 1710051 - DNA, 15 bp, Homo sapiens
gctcgatgaactgca

SEQ ID NO: 1710052 - DNA, 15 bp, Homo sapiens
ctcgatgaactgcag

SEQ ID NO: 1710053 - DNA, 15 bp, Homo sapiens
tcgatgaactgcaga

SEQ ID NO: 1710054 - DNA, 15 bp, Homo sapiens
cgatgaactgcagaa

SEQ ID NO: 1710055 - DNA, 15 bp, Homo sapiens
gatgaactgcagaaa

SEQ ID NO: 1710056 - DNA, 15 bp, Homo sapiens
atgaactgcagaaat

SEQ ID NO: 1710057 - DNA, 15 bp, Homo sapiens
tgaactgcagaaatt

SEQ ID NO: 1710058 - DNA, 15 bp, Homo sapiens
gaactgcagaaattt

SEQ ID NO: 1710059 - DNA, 15 bp, Homo sapiens
aactgcagaaatttg

SEQ ID NO: 1710060 - DNA, 15 bp, Homo sapiens
actgcagaaatttgt

SEQ ID NO: 1710061 - DNA, 15 bp, Homo sapiens
ctgcagaaatttgtc

SEQ ID NO: 1710062 - DNA, 15 bp, Homo sapiens
tgcagaaatttgtct

SEQ ID NO: 1710063 - DNA, 15 bp, Homo sapiens
gcagaaatttgtcta

SEQ ID NO: 1710064 - DNA, 15 bp, Homo sapiens
cagaaatttgtctat

SEQ ID NO: 1710065 - DNA, 15 bp, Homo sapiens
agaaatttgtctatg

SEQ ID NO: 1710066 - DNA, 15 bp, Homo sapiens
gaaatttgtctatgt

SEQ ID NO: 1710067 - DNA, 15 bp, Homo sapiens
aaatttgtctatgta

SEQ ID NO: 1710068 - DNA, 15 bp, Homo sapiens
aatttgtctatgtac

SEQ ID NO: 1710069 - DNA, 15 bp, Homo sapiens
atttgtctatgtact

SEQ ID NO: 1710070 - DNA, 15 bp, Homo sapiens
tttgtctatgtactg

SEQ ID NO: 1710071 - DNA, 15 bp, Homo sapiens
ttgtctatgtactgt

SEQ ID NO: 1710072 - DNA, 15 bp, Homo sapiens
tgtctatgtactgta

SEQ ID NO: 1710073 - DNA, 15 bp, Homo sapiens
gtctatgtactgtac

SEQ ID NO: 1710074 - DNA, 15 bp, Homo sapiens
tctatgtactgtacc

SEQ ID NO: 1710075 - DNA, 15 bp, Homo sapiens
ctatgtactgtacca

SEQ ID NO: 1710076 - DNA, 15 bp, Homo sapiens
tatgtactgtaccac

SEQ ID NO: 1710077 - DNA, 15 bp, Homo sapiens
atgtactgtaccact

SEQ ID NO: 1710078 - DNA, 15 bp, Homo sapiens
tgtactgtaccactt

SEQ ID NO: 1710079 - DNA, 15 bp, Homo sapiens
gtactgtaccactta

SEQ ID NO: 1710080 - DNA, 15 bp, Homo sapiens
tactgtaccacttat

SEQ ID NO: 1710081 - DNA, 15 bp, Homo sapiens
actgtaccacttatc

SEQ ID NO: 1710082 - DNA, 15 bp, Homo sapiens
ctgtaccacttatct

SEQ ID NO: 1710083 - DNA, 15 bp, Homo sapiens
tgtaccacttatcta

SEQ ID NO: 1710084 - DNA, 15 bp, Homo sapiens
gtaccacttatctat

SEQ ID NO: 1710085 - DNA, 15 bp, Homo sapiens
taccacttatctatc

SEQ ID NO: 1710086 - DNA, 15 bp, Homo sapiens
accacttatctatcg

SEQ ID NO: 1710087 - DNA, 15 bp, Homo sapiens
ccacttatctatcgc

SEQ ID NO: 1710088 - DNA, 15 bp, Homo sapiens
cacttatctatcgct

SEQ ID NO: 1710089 - DNA, 15 bp, Homo sapiens
acttatctatcgctg

SEQ ID NO: 1710090 - DNA, 15 bp, Homo sapiens
cttatctatcgctgt

SEQ ID NO: 1710091 - DNA, 15 bp, Homo sapiens
ttatctatcgctgta

SEQ ID NO: 1710092 - DNA, 15 bp, Homo sapiens
tatctatcgctgtat

SEQ ID NO: 1710093 - DNA, 15 bp, Homo sapiens
atctatcgctgtata

SEQ ID NO: 1710094 - DNA, 15 bp, Homo sapiens
tctatcgctgtataa

SEQ ID NO: 1710095 - DNA, 15 bp, Homo sapiens
ctatcgctgtataac

SEQ ID NO: 1710096 - DNA, 15 bp, Homo sapiens
tatcgctgtataaca

SEQ ID NO: 1710097 - DNA, 15 bp, Homo sapiens
atcgctgtataacaa

SEQ ID NO: 1710098 - DNA, 15 bp, Homo sapiens
tcgctgtataacaaa

SEQ ID NO: 1710099 - DNA, 15 bp, Homo sapiens
cgctgtataacaaat

SEQ ID NO: 1710100 - DNA, 15 bp, Homo sapiens
gctgtataacaaatt

SEQ ID NO: 1710101 - DNA, 15 bp, Homo sapiens
ctgtataacaaattg

SEQ ID NO: 1710102 - DNA, 15 bp, Homo sapiens
tgtataacaaattgc

SEQ ID NO: 1710103 - DNA, 15 bp, Homo sapiens
gtataacaaattgcc

SEQ ID NO: 1710104 - DNA, 15 bp, Homo sapiens
tataacaaattgccc

SEQ ID NO: 1710105 - DNA, 15 bp, Homo sapiens
ataacaaattgcccc

SEQ ID NO: 1710106 - DNA, 15 bp, Homo sapiens
taacaaattgccccc

SEQ ID NO: 1710107 - DNA, 15 bp, Homo sapiens
aacaaattgccccca

SEQ ID NO: 1710108 - DNA, 15 bp, Homo sapiens
acaaattgcccccaa

SEQ ID NO: 1710109 - DNA, 15 bp, Homo sapiens
caaattgcccccaaa

SEQ ID NO: 1710110 - DNA, 15 bp, Homo sapiens
aaattgcccccaaat

SEQ ID NO: 1710111 - DNA, 15 bp, Homo sapiens
aattgcccccaaatt

SEQ ID NO: 1710112 - DNA, 15 bp, Homo sapiens
attgcccccaaatta

SEQ ID NO: 1710113 - DNA, 15 bp, Homo sapiens
ttgcccccaaattaa

SEQ ID NO: 1710114 - DNA, 15 bp, Homo sapiens
tgcccccaaattaat

SEQ ID NO: 1710115 - DNA, 15 bp, Homo sapiens
gcccccaaattaatg

SEQ ID NO: 1710116 - DNA, 15 bp, Homo sapiens
cccccaaattaatga

SEQ ID NO: 1710117 - DNA, 15 bp, Homo sapiens
ccccaaattaatgac

SEQ ID NO: 1710118 - DNA, 15 bp, Homo sapiens
cccaaattaatgact

SEQ ID NO: 1710119 - DNA, 15 bp, Homo sapiens
ccaaattaatgacta

SEQ ID NO: 1710120 - DNA, 15 bp, Homo sapiens
caaattaatgactaa

SEQ ID NO: 1710121 - DNA, 15 bp, Homo sapiens
aaattaatgactaaa

SEQ ID NO: 1710122 - DNA, 15 bp, Homo sapiens
aattaatgactaaag

SEQ ID NO: 1710123 - DNA, 15 bp, Homo sapiens
attaatgactaaagc

SEQ ID NO: 1710124 - DNA, 15 bp, Homo sapiens
ttaatgactaaagca

SEQ ID NO: 1710125 - DNA, 15 bp, Homo sapiens
taatgactaaagcaa

SEQ ID NO: 1710126 - DNA, 15 bp, Homo sapiens
aatgactaaagcaat

SEQ ID NO: 1710127 - DNA, 15 bp, Homo sapiens
atgactaaagcaata

SEQ ID NO: 1710128 - DNA, 15 bp, Homo sapiens
tgactaaagcaataa

SEQ ID NO: 1710129 - DNA, 15 bp, Homo sapiens
gactaaagcaataat

SEQ ID NO: 1710130 - DNA, 15 bp, Homo sapiens
actaaagcaataatg

SEQ ID NO: 1710131 - DNA, 15 bp, Homo sapiens
ctaaagcaataatga

SEQ ID NO: 1710132 - DNA, 15 bp, Homo sapiens
taaagcaataatgat

SEQ ID NO: 1710133 - DNA, 15 bp, Homo sapiens
aaagcaataatgatt

SEQ ID NO: 1710134 - DNA, 15 bp, Homo sapiens
aagcaataatgattc

SEQ ID NO: 1710135 - DNA, 15 bp, Homo sapiens
agcaataatgattca

SEQ ID NO: 1710136 - DNA, 15 bp, Homo sapiens
gcaataatgattcac

SEQ ID NO: 1710137 - DNA, 15 bp, Homo sapiens
caataatgattcact

SEQ ID NO: 1710138 - DNA, 15 bp, Homo sapiens
aataatgattcactg

SEQ ID NO: 1710139 - DNA, 15 bp, Homo sapiens
ataatgattcactgg

SEQ ID NO: 1710140 - DNA, 15 bp, Homo sapiens
taatgattcactggt

SEQ ID NO: 1710141 - DNA, 15 bp, Homo sapiens
aatgattcactggtt

SEQ ID NO: 1710142 - DNA, 15 bp, Homo sapiens
atgattcactggttc

SEQ ID NO: 1710143 - DNA, 15 bp, Homo sapiens
tgattcactggttct

SEQ ID NO: 1710144 - DNA, 15 bp, Homo sapiens
gattcactggttctt

SEQ ID NO: 1710145 - DNA, 15 bp, Homo sapiens
attcactggttcttc

SEQ ID NO: 1710146 - DNA, 15 bp, Homo sapiens
ttcactggttcttct

SEQ ID NO: 1710147 - DNA, 15 bp, Homo sapiens
tcactggttcttctg

SEQ ID NO: 1710148 - DNA, 15 bp, Homo sapiens
cactggttcttctgc

SEQ ID NO: 1710149 - DNA, 15 bp, Homo sapiens
actggttcttctgct

SEQ ID NO: 1710150 - DNA, 15 bp, Homo sapiens
ctggttcttctgctg

SEQ ID NO: 1710151 - DNA, 15 bp, Homo sapiens
tggttcttctgctga

SEQ ID NO: 1710152 - DNA, 15 bp, Homo sapiens
ggttcttctgctgat

SEQ ID NO: 1710153 - DNA, 15 bp, Homo sapiens
gttcttctgctgatc

SEQ ID NO: 1710154 - DNA, 15 bp, Homo sapiens
ttcttctgctgatct

SEQ ID NO: 1710155 - DNA, 15 bp, Homo sapiens
tcttctgctgatctt

SEQ ID NO: 1710156 - DNA, 15 bp, Homo sapiens
cttctgctgatcttc

SEQ ID NO: 1710157 - DNA, 15 bp, Homo sapiens
ttctgctgatcttct

SEQ ID NO: 1710158 - DNA, 15 bp, Homo sapiens
tctgctgatcttctc

SEQ ID NO: 1710159 - DNA, 15 bp, Homo sapiens
ctgctgatcttctct

SEQ ID NO: 1710160 - DNA, 15 bp, Homo sapiens
tgctgatcttctctg

SEQ ID NO: 1710161 - DNA, 15 bp, Homo sapiens
gctgatcttctctgg

SEQ ID NO: 1710162 - DNA, 15 bp, Homo sapiens
ctgatcttctctggt

SEQ ID NO: 1710163 - DNA, 15 bp, Homo sapiens
tgatcttctctggta

SEQ ID NO: 1710164 - DNA, 15 bp, Homo sapiens
gatcttctctggtag

SEQ ID NO: 1710165 - DNA, 15 bp, Homo sapiens
atcttctctggtagg

SEQ ID NO: 1710166 - DNA, 15 bp, Homo sapiens
tcttctctggtaggt

SEQ ID NO: 1710167 - DNA, 15 bp, Homo sapiens
cttctctggtaggtg

SEQ ID NO: 1710168 - DNA, 15 bp, Homo sapiens
ttctctggtaggtgg

SEQ ID NO: 1710169 - DNA, 15 bp, Homo sapiens
tctctggtaggtggg

SEQ ID NO: 1710170 - DNA, 15 bp, Homo sapiens
ctctggtaggtgggt

SEQ ID NO: 1710171 - DNA, 15 bp, Homo sapiens
tctggtaggtgggtg

SEQ ID NO: 1710172 - DNA, 15 bp, Homo sapiens
ctggtaggtgggtgg

SEQ ID NO: 1710173 - DNA, 15 bp, Homo sapiens
tggtaggtgggtggg

SEQ ID NO: 1710174 - DNA, 15 bp, Homo sapiens
ggtaggtgggtgggt

SEQ ID NO: 1710175 - DNA, 15 bp, Homo sapiens
gtaggtgggtgggta

SEQ ID NO: 1710176 - DNA, 15 bp, Homo sapiens
taggtgggtgggtat

SEQ ID NO: 1710177 - DNA, 15 bp, Homo sapiens
aggtgggtgggtata

SEQ ID NO: 1710178 - DNA, 15 bp, Homo sapiens
ggtgggtgggtatag

SEQ ID NO: 1710179 - DNA, 15 bp, Homo sapiens
gtgggtgggtatagg

SEQ ID NO: 1710180 - DNA, 15 bp, Homo sapiens
tgggtgggtataggc

SEQ ID NO: 1710181 - DNA, 15 bp, Homo sapiens
gggtgggtataggct

SEQ ID NO: 1710182 - DNA, 15 bp, Homo sapiens
ggtgggtataggctc

SEQ ID NO: 1710183 - DNA, 15 bp, Homo sapiens
gtgggtataggctca

SEQ ID NO: 1710184 - DNA, 15 bp, Homo sapiens
tgggtataggctcag

SEQ ID NO: 1710185 - DNA, 15 bp, Homo sapiens
gggtataggctcagc

SEQ ID NO: 1710186 - DNA, 15 bp, Homo sapiens
ggtataggctcagcc

SEQ ID NO: 1710187 - DNA, 15 bp, Homo sapiens
gtataggctcagcct

SEQ ID NO: 1710188 - DNA, 15 bp, Homo sapiens
tataggctcagcctc

SEQ ID NO: 1710189 - DNA, 15 bp, Homo sapiens
ataggctcagcctct

SEQ ID NO: 1710190 - DNA, 15 bp, Homo sapiens
taggctcagcctctt

SEQ ID NO: 1710191 - DNA, 15 bp, Homo sapiens
aggctcagcctcttt

SEQ ID NO: 1710192 - DNA, 15 bp, Homo sapiens
ggctcagcctctttc

SEQ ID NO: 1710193 - DNA, 15 bp, Homo sapiens
gctcagcctctttct

SEQ ID NO: 1710194 - DNA, 15 bp, Homo sapiens
ctcagcctctttctc

SEQ ID NO: 1710195 - DNA, 15 bp, Homo sapiens
tcagcctctttctcc

SEQ ID NO: 1710196 - DNA, 15 bp, Homo sapiens
cagcctctttctcca

SEQ ID NO: 1710197 - DNA, 15 bp, Homo sapiens
agcctctttctccat

SEQ ID NO: 1710198 - DNA, 15 bp, Homo sapiens
gcctctttctccatg

SEQ ID NO: 1710199 - DNA, 15 bp, Homo sapiens
cctctttctccatgt

SEQ ID NO: 1710200 - DNA, 15 bp, Homo sapiens
ctctttctccatgtg

SEQ ID NO: 1710201 - DNA, 15 bp, Homo sapiens
tctttctccatgtgg

SEQ ID NO: 1710202 - DNA, 15 bp, Homo sapiens
ctttctccatgtggt

SEQ ID NO: 1710203 - DNA, 15 bp, Homo sapiens
tttctccatgtggtc

SEQ ID NO: 1710204 - DNA, 15 bp, Homo sapiens
ttctccatgtggtct

SEQ ID NO: 1710205 - DNA, 15 bp, Homo sapiens
tctccatgtggtctg

SEQ ID NO: 1710206 - DNA, 15 bp, Homo sapiens
ctccatgtggtctgt

SEQ ID NO: 1710207 - DNA, 15 bp, Homo sapiens
tccatgtggtctgtc

SEQ ID NO: 1710208 - DNA, 15 bp, Homo sapiens
ccatgtggtctgtca

SEQ ID NO: 1710209 - DNA, 15 bp, Homo sapiens
catgtggtctgtcat

SEQ ID NO: 1710210 - DNA, 15 bp, Homo sapiens
atgtggtctgtcatc

SEQ ID NO: 1710211 - DNA, 15 bp, Homo sapiens
tgtggtctgtcatct

SEQ ID NO: 1710212 - DNA, 15 bp, Homo sapiens
gtggtctgtcatctt

SEQ ID NO: 1710213 - DNA, 15 bp, Homo sapiens
tggtctgtcatcttc

SEQ ID NO: 1710214 - DNA, 15 bp, Homo sapiens
ggtctgtcatcttca

SEQ ID NO: 1710215 - DNA, 15 bp, Homo sapiens
gtctgtcatcttcat

SEQ ID NO: 1710216 - DNA, 15 bp, Homo sapiens
tctgtcatcttcata

SEQ ID NO: 1710217 - DNA, 15 bp, Homo sapiens
ctgtcatcttcatag

SEQ ID NO: 1710218 - DNA, 15 bp, Homo sapiens
tgtcatcttcatagg

SEQ ID NO: 1710219 - DNA, 15 bp, Homo sapiens
gtcatcttcataggg

SEQ ID NO: 1710220 - DNA, 15 bp, Homo sapiens
tcatcttcataggga

SEQ ID NO: 1710221 - DNA, 15 bp, Homo sapiens
catcttcatagggac

SEQ ID NO: 1710222 - DNA, 15 bp, Homo sapiens
atcttcatagggact

SEQ ID NO: 1710223 - DNA, 15 bp, Homo sapiens
tcttcatagggacta

SEQ ID NO: 1710224 - DNA, 15 bp, Homo sapiens
cttcatagggactaa

SEQ ID NO: 1710225 - DNA, 15 bp, Homo sapiens
ttcatagggactaac

SEQ ID NO: 1710226 - DNA, 15 bp, Homo sapiens
tcatagggactaacc

SEQ ID NO: 1710227 - DNA, 15 bp, Homo sapiens
catagggactaaccc

SEQ ID NO: 1710228 - DNA, 15 bp, Homo sapiens
atagggactaaccca

SEQ ID NO: 1710229 - DNA, 15 bp, Homo sapiens
tagggactaacccac

SEQ ID NO: 1710230 - DNA, 15 bp, Homo sapiens
agggactaacccaca

SEQ ID NO: 1710231 - DNA, 15 bp, Homo sapiens
gggactaacccacac

SEQ ID NO: 1710232 - DNA, 15 bp, Homo sapiens
ggactaacccacact

SEQ ID NO: 1710233 - DNA, 15 bp, Homo sapiens
gactaacccacactt

SEQ ID NO: 1710234 - DNA, 15 bp, Homo sapiens
actaacccacacttc

SEQ ID NO: 1710235 - DNA, 15 bp, Homo sapiens
ctaacccacacttct

SEQ ID NO: 1710236 - DNA, 15 bp, Homo sapiens
taacccacacttctt

SEQ ID NO: 1710237 - DNA, 15 bp, Homo sapiens
aacccacacttctta

SEQ ID NO: 1710238 - DNA, 15 bp, Homo sapiens
acccacacttcttac

SEQ ID NO: 1710239 - DNA, 15 bp, Homo sapiens
cccacacttcttaca

SEQ ID NO: 1710240 - DNA, 15 bp, Homo sapiens
ccacacttcttacat

SEQ ID NO: 1710241 - DNA, 15 bp, Homo sapiens
cacacttcttacatg

SEQ ID NO: 1710242 - DNA, 15 bp, Homo sapiens
acacttcttacatgg

SEQ ID NO: 1710243 - DNA, 15 bp, Homo sapiens
cacttcttacatggc

SEQ ID NO: 1710244 - DNA, 15 bp, Homo sapiens
acttcttacatggca

SEQ ID NO: 1710245 - DNA, 15 bp, Homo sapiens
cttcttacatggcac

SEQ ID NO: 1710246 - DNA, 15 bp, Homo sapiens
ttcttacatggcacc

SEQ ID NO: 1710247 - DNA, 15 bp, Homo sapiens
tcttacatggcacct

SEQ ID NO: 1710248 - DNA, 15 bp, Homo sapiens
cttacatggcacctg

SEQ ID NO: 1710249 - DNA, 15 bp, Homo sapiens
ttacatggcacctgg

SEQ ID NO: 1710250 - DNA, 15 bp, Homo sapiens
tacatggcacctgga

SEQ ID NO: 1710251 - DNA, 15 bp, Homo sapiens
acatggcacctggat

SEQ ID NO: 1710252 - DNA, 15 bp, Homo sapiens
catggcacctggatt

SEQ ID NO: 1710253 - DNA, 15 bp, Homo sapiens
atggcacctggattt

SEQ ID NO: 1710254 - DNA, 15 bp, Homo sapiens
tggcacctggatttc

SEQ ID NO: 1710255 - DNA, 15 bp, Homo sapiens
ggcacctggatttca

SEQ ID NO: 1710256 - DNA, 15 bp, Homo sapiens
gcacctggatttcag

SEQ ID NO: 1710257 - DNA, 15 bp, Homo sapiens
cacctggatttcagg

SEQ ID NO: 1710258 - DNA, 15 bp, Homo sapiens
acctggatttcagga

SEQ ID NO: 1710259 - DNA, 15 bp, Homo sapiens
cctggatttcaggac

SEQ ID NO: 1710260 - DNA, 15 bp, Homo sapiens
ctggatttcaggaca

SEQ ID NO: 1710261 - DNA, 15 bp, Homo sapiens
tggatttcaggacag

SEQ ID NO: 1710262 - DNA, 15 bp, Homo sapiens
ggatttcaggacagc

SEQ ID NO: 1710263 - DNA, 15 bp, Homo sapiens
gatttcaggacagca

SEQ ID NO: 1710264 - DNA, 15 bp, Homo sapiens
atttcaggacagcaa

SEQ ID NO: 1710265 - DNA, 15 bp, Homo sapiens
tttcaggacagcaag

SEQ ID NO: 1710266 - DNA, 15 bp, Homo sapiens
ttcaggacagcaagc

SEQ ID NO: 1710267 - DNA, 15 bp, Homo sapiens
tcaggacagcaagcc

SEQ ID NO: 1710268 - DNA, 15 bp, Homo sapiens
caggacagcaagccc

SEQ ID NO: 1710269 - DNA, 15 bp, Homo sapiens
aggacagcaagccct

SEQ ID NO: 1710270 - DNA, 15 bp, Homo sapiens
ggacagcaagcccta

SEQ ID NO: 1710271 - DNA, 15 bp, Homo sapiens
gacagcaagccctaa

SEQ ID NO: 1710272 - DNA, 15 bp, Homo sapiens
acagcaagccctaat

SEQ ID NO: 1710273 - DNA, 15 bp, Homo sapiens
cagcaagccctaatg

SEQ ID NO: 1710274 - DNA, 15 bp, Homo sapiens
agcaagccctaatgc

SEQ ID NO: 1710275 - DNA, 15 bp, Homo sapiens
gcaagccctaatgca

SEQ ID NO: 1710276 - DNA, 15 bp, Homo sapiens
caagccctaatgcac

SEQ ID NO: 1710277 - DNA, 15 bp, Homo sapiens
aagccctaatgcaca

SEQ ID NO: 1710278 - DNA, 15 bp, Homo sapiens
agccctaatgcacaa

SEQ ID NO: 1710279 - DNA, 15 bp, Homo sapiens
gccctaatgcacaag

SEQ ID NO: 1710280 - DNA, 15 bp, Homo sapiens
ccctaatgcacaagc

SEQ ID NO: 1710281 - DNA, 15 bp, Homo sapiens
cctaatgcacaagca

SEQ ID NO: 1710282 - DNA, 15 bp, Homo sapiens
ctaatgcacaagcac

SEQ ID NO: 1710283 - DNA, 15 bp, Homo sapiens
taatgcacaagcact

SEQ ID NO: 1710284 - DNA, 15 bp, Homo sapiens
aatgcacaagcactt

SEQ ID NO: 1710285 - DNA, 15 bp, Homo sapiens
atgcacaagcactta

SEQ ID NO: 1710286 - DNA, 15 bp, Homo sapiens
tgcacaagcacttat

SEQ ID NO: 1710287 - DNA, 15 bp, Homo sapiens
gcacaagcacttatc

SEQ ID NO: 1710288 - DNA, 15 bp, Homo sapiens
cacaagcacttatca

SEQ ID NO: 1710289 - DNA, 15 bp, Homo sapiens
acaagcacttatcaa

SEQ ID NO: 1710290 - DNA, 15 bp, Homo sapiens
caagcacttatcaag

SEQ ID NO: 1710291 - DNA, 15 bp, Homo sapiens
aagcacttatcaagg

SEQ ID NO: 1710292 - DNA, 15 bp, Homo sapiens
agcacttatcaaggt

SEQ ID NO: 1710293 - DNA, 15 bp, Homo sapiens
gcacttatcaaggtg

SEQ ID NO: 1710294 - DNA, 15 bp, Homo sapiens
cacttatcaaggtgc

SEQ ID NO: 1710295 - DNA, 15 bp, Homo sapiens
acttatcaaggtgct

SEQ ID NO: 1710296 - DNA, 15 bp, Homo sapiens
cttatcaaggtgctt

SEQ ID NO: 1710297 - DNA, 15 bp, Homo sapiens
ttatcaaggtgcttg

SEQ ID NO: 1710298 - DNA, 15 bp, Homo sapiens
tatcaaggtgcttgc

SEQ ID NO: 1710299 - DNA, 15 bp, Homo sapiens
atcaaggtgcttgct

SEQ ID NO: 1710300 - DNA, 15 bp, Homo sapiens
tcaaggtgcttgctg

SEQ ID NO: 1710301 - DNA, 15 bp, Homo sapiens
caaggtgcttgctga

SEQ ID NO: 1710302 - DNA, 15 bp, Homo sapiens
aaggtgcttgctgag

SEQ ID NO: 1710303 - DNA, 15 bp, Homo sapiens
aggtgcttgctgaga

SEQ ID NO: 1710304 - DNA, 15 bp, Homo sapiens
ggtgcttgctgagat

SEQ ID NO: 1710305 - DNA, 15 bp, Homo sapiens
gtgcttgctgagatc

SEQ ID NO: 1710306 - DNA, 15 bp, Homo sapiens
tgcttgctgagatcc

SEQ ID NO: 1710307 - DNA, 15 bp, Homo sapiens
gcttgctgagatcct

SEQ ID NO: 1710308 - DNA, 15 bp, Homo sapiens
cttgctgagatccta

SEQ ID NO: 1710309 - DNA, 15 bp, Homo sapiens
ttgctgagatcctat

SEQ ID NO: 1710310 - DNA, 15 bp, Homo sapiens
tgctgagatcctatt

SEQ ID NO: 1710311 - DNA, 15 bp, Homo sapiens
gctgagatcctattg

SEQ ID NO: 1710312 - DNA, 15 bp, Homo sapiens
ctgagatcctattgg

SEQ ID NO: 1710313 - DNA, 15 bp, Homo sapiens
tgagatcctattggc

SEQ ID NO: 1710314 - DNA, 15 bp, Homo sapiens
gagatcctattggcc

SEQ ID NO: 1710315 - DNA, 15 bp, Homo sapiens
agatcctattggcca

SEQ ID NO: 1710316 - DNA, 15 bp, Homo sapiens
gatcctattggccaa

SEQ ID NO: 1710317 - DNA, 15 bp, Homo sapiens
atcctattggccaaa

SEQ ID NO: 1710318 - DNA, 15 bp, Homo sapiens
tcctattggccaaac

SEQ ID NO: 1710319 - DNA, 15 bp, Homo sapiens
cctattggccaaaca

SEQ ID NO: 1710320 - DNA, 15 bp, Homo sapiens
ctattggccaaacaa

SEQ ID NO: 1710321 - DNA, 15 bp, Homo sapiens
tattggccaaacaag

SEQ ID NO: 1710322 - DNA, 15 bp, Homo sapiens
attggccaaacaagt

SEQ ID NO: 1710323 - DNA, 15 bp, Homo sapiens
ttggccaaacaagtc

SEQ ID NO: 1710324 - DNA, 15 bp, Homo sapiens
tggccaaacaagtca

SEQ ID NO: 1710325 - DNA, 15 bp, Homo sapiens
ggccaaacaagtcac

SEQ ID NO: 1710326 - DNA, 15 bp, Homo sapiens
gccaaacaagtcaca

SEQ ID NO: 1710327 - DNA, 15 bp, Homo sapiens
ccaaacaagtcacaa

SEQ ID NO: 1710328 - DNA, 15 bp, Homo sapiens
caaacaagtcacaag

SEQ ID NO: 1710329 - DNA, 15 bp, Homo sapiens
aaacaagtcacaagg

SEQ ID NO: 1710330 - DNA, 15 bp, Homo sapiens
aacaagtcacaaggc

SEQ ID NO: 1710331 - DNA, 15 bp, Homo sapiens
acaagtcacaaggcc

SEQ ID NO: 1710332 - DNA, 15 bp, Homo sapiens
caagtcacaaggcca

SEQ ID NO: 1710333 - DNA, 15 bp, Homo sapiens
aagtcacaaggccaa

SEQ ID NO: 1710334 - DNA, 15 bp, Homo sapiens
agtcacaaggccaag

SEQ ID NO: 1710335 - DNA, 15 bp, Homo sapiens
caaggccaagcccag

SEQ ID NO: 1710336 - DNA, 15 bp, Homo sapiens
aaggccaagcccagc

SEQ ID NO: 1710337 - DNA, 15 bp, Homo sapiens
aggccaagcccagca

SEQ ID NO: 1710338 - DNA, 15 bp, Homo sapiens
ggccaagcccagcat

SEQ ID NO: 1710339 - DNA, 15 bp, Homo sapiens
gccaagcccagcatc

SEQ ID NO: 1710340 - DNA, 15 bp, Homo sapiens
ccaagcccagcatca

SEQ ID NO: 1710341 - DNA, 15 bp, Homo sapiens
caagcccagcatcag

SEQ ID NO: 1710342 - DNA, 15 bp, Homo sapiens
aagcccagcatcagt

SEQ ID NO: 1710343 - DNA, 15 bp, Homo sapiens
agcccagcatcagtg

SEQ ID NO: 1710344 - DNA, 15 bp, Homo sapiens
gcccagcatcagtgt

SEQ ID NO: 1710345 - DNA, 15 bp, Homo sapiens
cccagcatcagtgtg

SEQ ID NO: 1710346 - DNA, 15 bp, Homo sapiens
ccagcatcagtgtgg

SEQ ID NO: 1710347 - DNA, 15 bp, Homo sapiens
cagcatcagtgtgga

SEQ ID NO: 1710348 - DNA, 15 bp, Homo sapiens
agcatcagtgtggaa

SEQ ID NO: 1710349 - DNA, 15 bp, Homo sapiens
gcatcagtgtggaac

SEQ ID NO: 1710350 - DNA, 15 bp, Homo sapiens
catcagtgtggaact

SEQ ID NO: 1710351 - DNA, 15 bp, Homo sapiens
atcagtgtggaactc

SEQ ID NO: 1710352 - DNA, 15 bp, Homo sapiens
tcagtgtggaactct

SEQ ID NO: 1710353 - DNA, 15 bp, Homo sapiens
cagtgtggaactctg

SEQ ID NO: 1710354 - DNA, 15 bp, Homo sapiens
agtgtggaactctgc

SEQ ID NO: 1710355 - DNA, 15 bp, Homo sapiens
gtgtggaactctgca

SEQ ID NO: 1710356 - DNA, 15 bp, Homo sapiens
tgtggaactctgcac

SEQ ID NO: 1710357 - DNA, 15 bp, Homo sapiens
gtggaactctgcaca

SEQ ID NO: 1710358 - DNA, 15 bp, Homo sapiens
tggaactctgcacaa

SEQ ID NO: 1710359 - DNA, 15 bp, Homo sapiens
ggaactctgcacaaa

SEQ ID NO: 1710360 - DNA, 15 bp, Homo sapiens
gaactctgcacaaag

SEQ ID NO: 1710361 - DNA, 15 bp, Homo sapiens
aactctgcacaaagg

SEQ ID NO: 1710362 - DNA, 15 bp, Homo sapiens
actctgcacaaaggc

SEQ ID NO: 1710363 - DNA, 15 bp, Homo sapiens
ctctgcacaaaggca

SEQ ID NO: 1710364 - DNA, 15 bp, Homo sapiens
tctgcacaaaggcat

SEQ ID NO: 1710365 - DNA, 15 bp, Homo sapiens
ctgcacaaaggcatg

SEQ ID NO: 1710366 - DNA, 15 bp, Homo sapiens
tgcacaaaggcatga

SEQ ID NO: 1710367 - DNA, 15 bp, Homo sapiens
gcacaaaggcatgaa

SEQ ID NO: 1710368 - DNA, 15 bp, Homo sapiens
cacaaaggcatgaat

SEQ ID NO: 1710369 - DNA, 15 bp, Homo sapiens
acaaaggcatgaatg

SEQ ID NO: 1710370 - DNA, 15 bp, Homo sapiens
caaaggcatgaatgt

SEQ ID NO: 1710371 - DNA, 15 bp, Homo sapiens
aaaggcatgaatgtc

SEQ ID NO: 1710372 - DNA, 15 bp, Homo sapiens
aaggcatgaatgtca

SEQ ID NO: 1710373 - DNA, 15 bp, Homo sapiens
aggcatgaatgtcag

SEQ ID NO: 1710374 - DNA, 15 bp, Homo sapiens
ggcatgaatgtcagt

SEQ ID NO: 1710375 - DNA, 15 bp, Homo sapiens
gcatgaatgtcagta

SEQ ID NO: 1710376 - DNA, 15 bp, Homo sapiens
catgaatgtcagtag

SEQ ID NO: 1710377 - DNA, 15 bp, Homo sapiens
atgaatgtcagtagg

SEQ ID NO: 1710378 - DNA, 15 bp, Homo sapiens
tgaatgtcagtaggt

SEQ ID NO: 1710379 - DNA, 15 bp, Homo sapiens
gaatgtcagtaggtg

SEQ ID NO: 1710380 - DNA, 15 bp, Homo sapiens
aatgtcagtaggtgt

SEQ ID NO: 1710381 - DNA, 15 bp, Homo sapiens
atgtcagtaggtgtg

SEQ ID NO: 1710382 - DNA, 15 bp, Homo sapiens
tgtcagtaggtgtga

SEQ ID NO: 1710383 - DNA, 15 bp, Homo sapiens
gtcagtaggtgtgat

SEQ ID NO: 1710384 - DNA, 15 bp, Homo sapiens
tcagtaggtgtgatt

SEQ ID NO: 1710385 - DNA, 15 bp, Homo sapiens
cagtaggtgtgattc

SEQ ID NO: 1710386 - DNA, 15 bp, Homo sapiens
agtaggtgtgattca

SEQ ID NO: 1710387 - DNA, 15 bp, Homo sapiens
gtaggtgtgattcat

SEQ ID NO: 1710388 - DNA, 15 bp, Homo sapiens
taggtgtgattcatt

SEQ ID NO: 1710389 - DNA, 15 bp, Homo sapiens
aggtgtgattcattg

SEQ ID NO: 1710390 - DNA, 15 bp, Homo sapiens
ggtgtgattcattgt

SEQ ID NO: 1710391 - DNA, 15 bp, Homo sapiens
gtgtgattcattgta

SEQ ID NO: 1710392 - DNA, 15 bp, Homo sapiens
tgtgattcattgtag

SEQ ID NO: 1710393 - DNA, 15 bp, Homo sapiens
gtgattcattgtagg

SEQ ID NO: 1710394 - DNA, 15 bp, Homo sapiens
tgattcattgtaggc

SEQ ID NO: 1710395 - DNA, 15 bp, Homo sapiens
gattcattgtaggcc

SEQ ID NO: 1710396 - DNA, 15 bp, Homo sapiens
attcattgtaggcca

SEQ ID NO: 1710397 - DNA, 15 bp, Homo sapiens
ttcattgtaggccat

SEQ ID NO: 1710398 - DNA, 15 bp, Homo sapiens
tcattgtaggccatc

SEQ ID NO: 1710399 - DNA, 15 bp, Homo sapiens
cattgtaggccatca

SEQ ID NO: 1710400 - DNA, 15 bp, Homo sapiens
attgtaggccatcag

SEQ ID NO: 1710401 - DNA, 15 bp, Homo sapiens
ttgtaggccatcagt

SEQ ID NO: 1710402 - DNA, 15 bp, Homo sapiens
tgtaggccatcagtg

SEQ ID NO: 1710403 - DNA, 15 bp, Homo sapiens
gtaggccatcagtgt

SEQ ID NO: 1710404 - DNA, 15 bp, Homo sapiens
taggccatcagtgtt

SEQ ID NO: 1710405 - DNA, 15 bp, Homo sapiens
aggccatcagtgtta

SEQ ID NO: 1710406 - DNA, 15 bp, Homo sapiens
ggccatcagtgttag

SEQ ID NO: 1710407 - DNA, 15 bp, Homo sapiens
gccatcagtgttagt

SEQ ID NO: 1710408 - DNA, 15 bp, Homo sapiens
ccatcagtgttagtc

SEQ ID NO: 1710409 - DNA, 15 bp, Homo sapiens
catcagtgttagtct

SEQ ID NO: 1710410 - DNA, 15 bp, Homo sapiens
atcagtgttagtcta

SEQ ID NO: 1710411 - DNA, 15 bp, Homo sapiens
tcagtgttagtctac

SEQ ID NO: 1710412 - DNA, 15 bp, Homo sapiens
cagtgttagtctacc

SEQ ID NO: 1710413 - DNA, 15 bp, Homo sapiens
agtgttagtctacca

SEQ ID NO: 1710414 - DNA, 15 bp, Homo sapiens
gtgttagtctaccac

SEQ ID NO: 1710415 - DNA, 15 bp, Homo sapiens
tgttagtctaccacc

SEQ ID NO: 1710416 - DNA, 15 bp, Homo sapiens
gttagtctaccacca

SEQ ID NO: 1710417 - DNA, 15 bp, Homo sapiens
ttagtctaccaccag

SEQ ID NO: 1710418 - DNA, 15 bp, Homo sapiens
tagtctaccaccagg

SEQ ID NO: 1710419 - DNA, 15 bp, Homo sapiens
agtctaccaccaggt

SEQ ID NO: 1710420 - DNA, 15 bp, Homo sapiens
gtctaccaccaggta

SEQ ID NO: 1710421 - DNA, 15 bp, Homo sapiens
tctaccaccaggtat

SEQ ID NO: 1710422 - DNA, 15 bp, Homo sapiens
ctaccaccaggtatt

SEQ ID NO: 1710423 - DNA, 15 bp, Homo sapiens
taccaccaggtattt

SEQ ID NO: 1710424 - DNA, 15 bp, Homo sapiens
accaccaggtattta

SEQ ID NO: 1710425 - DNA, 15 bp, Homo sapiens
ccaccaggtatttac

SEQ ID NO: 1710426 - DNA, 15 bp, Homo sapiens
caccaggtatttaca

SEQ ID NO: 1710427 - DNA, 15 bp, Homo sapiens
accaggtatttacat

SEQ ID NO: 1710428 - DNA, 15 bp, Homo sapiens
ccaggtatttacatt

SEQ ID NO: 1710429 - DNA, 15 bp, Homo sapiens
caggtatttacattg

SEQ ID NO: 1710430 - DNA, 15 bp, Homo sapiens
aggtatttacattgt

SEQ ID NO: 1710431 - DNA, 15 bp, Homo sapiens
ggtatttacattgtt

SEQ ID NO: 1710432 - DNA, 15 bp, Homo sapiens
gtatttacattgttc

SEQ ID NO: 1710433 - DNA, 15 bp, Homo sapiens
tatttacattgttct

SEQ ID NO: 1710434 - DNA, 15 bp, Homo sapiens
atttacattgttctt

SEQ ID NO: 1710435 - DNA, 15 bp, Homo sapiens
tttacattgttcttt

SEQ ID NO: 1710436 - DNA, 15 bp, Homo sapiens
ttacattgttcttta

SEQ ID NO: 1710437 - DNA, 15 bp, Homo sapiens
tacattgttctttag

SEQ ID NO: 1710438 - DNA, 15 bp, Homo sapiens
acattgttctttaga

SEQ ID NO: 1710439 - DNA, 15 bp, Homo sapiens
cattgttctttagag

SEQ ID NO: 1710440 - DNA, 15 bp, Homo sapiens
attgttctttagagc

SEQ ID NO: 1710441 - DNA, 15 bp, Homo sapiens
ttgttctttagagca

SEQ ID NO: 1710442 - DNA, 15 bp, Homo sapiens
tgttctttagagcag

SEQ ID NO: 1710443 - DNA, 15 bp, Homo sapiens
gttctttagagcaga

SEQ ID NO: 1710444 - DNA, 15 bp, Homo sapiens
ttctttagagcagag

SEQ ID NO: 1710445 - DNA, 15 bp, Homo sapiens
tctttagagcagaga

SEQ ID NO: 1710446 - DNA, 15 bp, Homo sapiens
ctttagagcagagac

SEQ ID NO: 1710447 - DNA, 15 bp, Homo sapiens
tttagagcagagact

SEQ ID NO: 1710448 - DNA, 15 bp, Homo sapiens
ttagagcagagactt

SEQ ID NO: 1710449 - DNA, 15 bp, Homo sapiens
tagagcagagacttc

SEQ ID NO: 1710450 - DNA, 15 bp, Homo sapiens
agagcagagacttcc

SEQ ID NO: 1710451 - DNA, 15 bp, Homo sapiens
gagcagagacttccg

SEQ ID NO: 1710452 - DNA, 15 bp, Homo sapiens
agcagagacttccgg

SEQ ID NO: 1710453 - DNA, 15 bp, Homo sapiens
gcagagacttccggt

SEQ ID NO: 1710454 - DNA, 15 bp, Homo sapiens
cagagacttccggtg

SEQ ID NO: 1710455 - DNA, 15 bp, Homo sapiens
agagacttccggtgg

SEQ ID NO: 1710456 - DNA, 15 bp, Homo sapiens
gagacttccggtggt

SEQ ID NO: 1710457 - DNA, 15 bp, Homo sapiens
agacttccggtggtc

SEQ ID NO: 1710458 - DNA, 15 bp, Homo sapiens
gacttccggtggtcc

SEQ ID NO: 1710459 - DNA, 15 bp, Homo sapiens
acttccggtggtccc

SEQ ID NO: 1710460 - DNA, 15 bp, Homo sapiens
cttccggtggtcccc

SEQ ID NO: 1710461 - DNA, 15 bp, Homo sapiens
ttccggtggtccccc

SEQ ID NO: 1710462 - DNA, 15 bp, Homo sapiens
tccggtggtccccca

SEQ ID NO: 1710463 - DNA, 15 bp, Homo sapiens
ccggtggtcccccaa

SEQ ID NO: 1710464 - DNA, 15 bp, Homo sapiens
cggtggtcccccaac

SEQ ID NO: 1710465 - DNA, 15 bp, Homo sapiens
ggtggtcccccaaca

SEQ ID NO: 1710466 - DNA, 15 bp, Homo sapiens
gtggtcccccaacag

SEQ ID NO: 1710467 - DNA, 15 bp, Homo sapiens
tggtcccccaacagc

SEQ ID NO: 1710468 - DNA, 15 bp, Homo sapiens
ggtcccccaacagct

SEQ ID NO: 1710469 - DNA, 15 bp, Homo sapiens
gtcccccaacagctg

SEQ ID NO: 1710470 - DNA, 15 bp, Homo sapiens
tcccccaacagctgt

SEQ ID NO: 1710471 - DNA, 15 bp, Homo sapiens
cccccaacagctgtt

SEQ ID NO: 1710472 - DNA, 15 bp, Homo sapiens
ccccaacagctgttc

SEQ ID NO: 1710473 - DNA, 15 bp, Homo sapiens
cccaacagctgttct

SEQ ID NO: 1710474 - DNA, 15 bp, Homo sapiens
ccaacagctgttctc

SEQ ID NO: 1710475 - DNA, 15 bp, Homo sapiens
caacagctgttctcc

SEQ ID NO: 1710476 - DNA, 15 bp, Homo sapiens
aacagctgttctccc

SEQ ID NO: 1710477 - DNA, 15 bp, Homo sapiens
acagctgttctccct

SEQ ID NO: 1710478 - DNA, 15 bp, Homo sapiens
cagctgttctccctt

SEQ ID NO: 1710479 - DNA, 15 bp, Homo sapiens
agctgttctcccttg

SEQ ID NO: 1710480 - DNA, 15 bp, Homo sapiens
gctgttctcccttgc

SEQ ID NO: 1710481 - DNA, 15 bp, Homo sapiens
ctgttctcccttgct

SEQ ID NO: 1710482 - DNA, 15 bp, Homo sapiens
tgttctcccttgctt

SEQ ID NO: 1710483 - DNA, 15 bp, Homo sapiens
gttctcccttgcttc

SEQ ID NO: 1710484 - DNA, 15 bp, Homo sapiens
ttctcccttgcttct

SEQ ID NO: 1710485 - DNA, 15 bp, Homo sapiens
tctcccttgcttctg

SEQ ID NO: 1710486 - DNA, 15 bp, Homo sapiens
ctcccttgcttctgt

SEQ ID NO: 1710487 - DNA, 15 bp, Homo sapiens
tcccttgcttctgta

SEQ ID NO: 1710488 - DNA, 15 bp, Homo sapiens
cccttgcttctgtat

SEQ ID NO: 1710489 - DNA, 15 bp, Homo sapiens
ccttgcttctgtatt

SEQ ID NO: 1710490 - DNA, 15 bp, Homo sapiens
cttgcttctgtatta

SEQ ID NO: 1710491 - DNA, 15 bp, Homo sapiens
ttgcttctgtattaa

SEQ ID NO: 1710492 - DNA, 15 bp, Homo sapiens
tgcttctgtattaag

SEQ ID NO: 1710493 - DNA, 15 bp, Homo sapiens
gcttctgtattaaga

SEQ ID NO: 1710494 - DNA, 15 bp, Homo sapiens
cttctgtattaagag

SEQ ID NO: 1710495 - DNA, 15 bp, Homo sapiens
ttctgtattaagaga

SEQ ID NO: 1710496 - DNA, 15 bp, Homo sapiens
tctgtattaagagat

SEQ ID NO: 1710497 - DNA, 15 bp, Homo sapiens
ctgtattaagagatc

SEQ ID NO: 1710498 - DNA, 15 bp, Homo sapiens
tgtattaagagatcc

SEQ ID NO: 1710499 - DNA, 15 bp, Homo sapiens
gtattaagagatccc

SEQ ID NO: 1710500 - DNA, 15 bp, Homo sapiens
tattaagagatccct

SEQ ID NO: 1710501 - DNA, 15 bp, Homo sapiens
attaagagatccctg

SEQ ID NO: 1710502 - DNA, 15 bp, Homo sapiens
ttaagagatccctga

SEQ ID NO: 1710503 - DNA, 15 bp, Homo sapiens
taagagatccctgaa

SEQ ID NO: 1710504 - DNA, 15 bp, Homo sapiens
aagagatccctgaat

SEQ ID NO: 1710505 - DNA, 15 bp, Homo sapiens
agagatccctgaatt

SEQ ID NO: 1710506 - DNA, 15 bp, Homo sapiens
gagatccctgaattc

SEQ ID NO: 1710507 - DNA, 15 bp, Homo sapiens
agatccctgaattct

SEQ ID NO: 1710508 - DNA, 15 bp, Homo sapiens
gatccctgaattctg

SEQ ID NO: 1710509 - DNA, 15 bp, Homo sapiens
atccctgaattctgt

SEQ ID NO: 1710510 - DNA, 15 bp, Homo sapiens
tccctgaattctgtt

SEQ ID NO: 1710511 - DNA, 15 bp, Homo sapiens
ccctgaattctgtta

SEQ ID NO: 1710512 - DNA, 15 bp, Homo sapiens
cctgaattctgttaa

SEQ ID NO: 1710513 - DNA, 15 bp, Homo sapiens
ctgaattctgttaat

SEQ ID NO: 1710514 - DNA, 15 bp, Homo sapiens
tgaattctgttaatg

SEQ ID NO: 1710515 - DNA, 15 bp, Homo sapiens
gaattctgttaatga

SEQ ID NO: 1710516 - DNA, 15 bp, Homo sapiens
aattctgttaatgaa

SEQ ID NO: 1710517 - DNA, 15 bp, Homo sapiens
attctgttaatgaac

SEQ ID NO: 1710518 - DNA, 15 bp, Homo sapiens
ttctgttaatgaact

SEQ ID NO: 1710519 - DNA, 15 bp, Homo sapiens
tctgttaatgaactc

SEQ ID NO: 1710520 - DNA, 15 bp, Homo sapiens
ctgttaatgaactca

SEQ ID NO: 1710521 - DNA, 15 bp, Homo sapiens
tgttaatgaactcat

SEQ ID NO: 1710522 - DNA, 15 bp, Homo sapiens
gttaatgaactcatg

SEQ ID NO: 1710523 - DNA, 15 bp, Homo sapiens
ttaatgaactcatga

SEQ ID NO: 1710524 - DNA, 15 bp, Homo sapiens
taatgaactcatgat

SEQ ID NO: 1710525 - DNA, 15 bp, Homo sapiens
aatgaactcatgatt

SEQ ID NO: 1710526 - DNA, 15 bp, Homo sapiens
atgaactcatgattg

SEQ ID NO: 1710527 - DNA, 15 bp, Homo sapiens
tgaactcatgattgt

SEQ ID NO: 1710528 - DNA, 15 bp, Homo sapiens
gaactcatgattgtc

SEQ ID NO: 1710529 - DNA, 15 bp, Homo sapiens
aactcatgattgtca

SEQ ID NO: 1710530 - DNA, 15 bp, Homo sapiens
actcatgattgtcaa

SEQ ID NO: 1710531 - DNA, 15 bp, Homo sapiens
ctcatgattgtcaaa

SEQ ID NO: 1710532 - DNA, 15 bp, Homo sapiens
tcatgattgtcaaaa

SEQ ID NO: 1710533 - DNA, 15 bp, Homo sapiens
catgattgtcaaaaa

SEQ ID NO: 1710534 - DNA, 15 bp, Homo sapiens
atgattgtcaaaaaa

SEQ ID NO: 1710535 - DNA, 15 bp, Homo sapiens
tgattgtcaaaaaaa

SEQ ID NO: 1710536 - DNA, 15 bp, Homo sapiens
gattgtcaaaaaaag

SEQ ID NO: 1710537 - DNA, 15 bp, Homo sapiens
attgtcaaaaaaagt

SEQ ID NO: 1710538 - DNA, 15 bp, Homo sapiens
ttgtcaaaaaaagtt

SEQ ID NO: 1710539 - DNA, 15 bp, Homo sapiens
tgtcaaaaaaagttt

SEQ ID NO: 1710540 - DNA, 15 bp, Homo sapiens
gtcaaaaaaagtttt

SEQ ID NO: 1710541 - DNA, 15 bp, Homo sapiens
tcaaaaaaagttttt

SEQ ID NO: 1710542 - DNA, 15 bp, Homo sapiens
caaaaaaagtttttt

SEQ ID NO: 1710543 - DNA, 15 bp, Homo sapiens
aaaaaaagttttttt

SEQ ID NO: 1710544 - DNA, 15 bp, Homo sapiens
aaaaagttttttttc

SEQ ID NO: 1710545 - DNA, 15 bp, Homo sapiens
aaaagttttttttcc

SEQ ID NO: 1710546 - DNA, 15 bp, Homo sapiens
aaagttttttttccc

SEQ ID NO: 1710547 - DNA, 15 bp, Homo sapiens
aagttttttttccct

SEQ ID NO: 1710548 - DNA, 15 bp, Homo sapiens
agttttttttccctg

SEQ ID NO: 1710549 - DNA, 15 bp, Homo sapiens
gttttttttccctgt

SEQ ID NO: 1710550 - DNA, 15 bp, Homo sapiens
ttttttttccctgta

SEQ ID NO: 1710551 - DNA, 15 bp, Homo sapiens
tttttttccctgtac

SEQ ID NO: 1710552 - DNA, 15 bp, Homo sapiens
ttttttccctgtacc

SEQ ID NO: 1710553 - DNA, 15 bp, Homo sapiens
tttttccctgtaccc

SEQ ID NO: 1710554 - DNA, 15 bp, Homo sapiens
ttttccctgtacccc

SEQ ID NO: 1710555 - DNA, 15 bp, Homo sapiens
tttccctgtacccca

SEQ ID NO: 1710556 - DNA, 15 bp, Homo sapiens
ttccctgtaccccac

SEQ ID NO: 1710557 - DNA, 15 bp, Homo sapiens
tccctgtaccccaca

SEQ ID NO: 1710558 - DNA, 15 bp, Homo sapiens
ccctgtaccccacag

SEQ ID NO: 1710559 - DNA, 15 bp, Homo sapiens
cctgtaccccacagt

SEQ ID NO: 1710560 - DNA, 15 bp, Homo sapiens
ctgtaccccacagta

SEQ ID NO: 1710561 - DNA, 15 bp, Homo sapiens
tgtaccccacagtaa

SEQ ID NO: 1710562 - DNA, 15 bp, Homo sapiens
gtaccccacagtaag

SEQ ID NO: 1710563 - DNA, 15 bp, Homo sapiens
taccccacagtaagg

SEQ ID NO: 1710564 - DNA, 15 bp, Homo sapiens
accccacagtaaggt

SEQ ID NO: 1710565 - DNA, 15 bp, Homo sapiens
ccccacagtaaggtg

SEQ ID NO: 1710566 - DNA, 15 bp, Homo sapiens
cccacagtaaggtgt

SEQ ID NO: 1710567 - DNA, 15 bp, Homo sapiens
ccacagtaaggtgtg

SEQ ID NO: 1710568 - DNA, 15 bp, Homo sapiens
cacagtaaggtgtgg

SEQ ID NO: 1710569 - DNA, 15 bp, Homo sapiens
acagtaaggtgtggc

SEQ ID NO: 1710570 - DNA, 15 bp, Homo sapiens
cagtaaggtgtggct

SEQ ID NO: 1710571 - DNA, 15 bp, Homo sapiens
agtaaggtgtggctt

SEQ ID NO: 1710572 - DNA, 15 bp, Homo sapiens
gtaaggtgtggcttt

SEQ ID NO: 1710573 - DNA, 15 bp, Homo sapiens
taaggtgtggctttg

SEQ ID NO: 1710574 - DNA, 15 bp, Homo sapiens
aaggtgtggctttgc

SEQ ID NO: 1710575 - DNA, 15 bp, Homo sapiens
aggtgtggctttgca

SEQ ID NO: 1710576 - DNA, 15 bp, Homo sapiens
ggtgtggctttgcat

SEQ ID NO: 1710577 - DNA, 15 bp, Homo sapiens
gtgtggctttgcatc

SEQ ID NO: 1710578 - DNA, 15 bp, Homo sapiens
tgtggctttgcatcc

SEQ ID NO: 1710579 - DNA, 15 bp, Homo sapiens
gtggctttgcatcca

SEQ ID NO: 1710580 - DNA, 15 bp, Homo sapiens
tggctttgcatccac

SEQ ID NO: 1710581 - DNA, 15 bp, Homo sapiens
ggctttgcatccacg

SEQ ID NO: 1710582 - DNA, 15 bp, Homo sapiens
gctttgcatccacgt

SEQ ID NO: 1710583 - DNA, 15 bp, Homo sapiens
ctttgcatccacgtt

SEQ ID NO: 1710584 - DNA, 15 bp, Homo sapiens
tttgcatccacgttt

SEQ ID NO: 1710585 - DNA, 15 bp, Homo sapiens
ttgcatccacgtttt

SEQ ID NO: 1710586 - DNA, 15 bp, Homo sapiens
tgcatccacgttttg

SEQ ID NO: 1710587 - DNA, 15 bp, Homo sapiens
gcatccacgttttga

SEQ ID NO: 1710588 - DNA, 15 bp, Homo sapiens
catccacgttttgat

SEQ ID NO: 1710589 - DNA, 15 bp, Homo sapiens
atccacgttttgatc

SEQ ID NO: 1710590 - DNA, 15 bp, Homo sapiens
tccacgttttgatca

SEQ ID NO: 1710591 - DNA, 15 bp, Homo sapiens
ccacgttttgatcaa

SEQ ID NO: 1710592 - DNA, 15 bp, Homo sapiens
cacgttttgatcaat

SEQ ID NO: 1710593 - DNA, 15 bp, Homo sapiens
acgttttgatcaatg

SEQ ID NO: 1710594 - DNA, 15 bp, Homo sapiens
cgttttgatcaatgg

SEQ ID NO: 1710595 - DNA, 15 bp, Homo sapiens
gttttgatcaatggg

SEQ ID NO: 1710596 - DNA, 15 bp, Homo sapiens
ttttgatcaatggga

SEQ ID NO: 1710597 - DNA, 15 bp, Homo sapiens
tttgatcaatgggat

SEQ ID NO: 1710598 - DNA, 15 bp, Homo sapiens
ttgatcaatgggatg

SEQ ID NO: 1710599 - DNA, 15 bp, Homo sapiens
tgatcaatgggatgt

SEQ ID NO: 1710600 - DNA, 15 bp, Homo sapiens
gatcaatgggatgta

SEQ ID NO: 1710601 - DNA, 15 bp, Homo sapiens
atcaatgggatgtaa

SEQ ID NO: 1710602 - DNA, 15 bp, Homo sapiens
tcaatgggatgtaag

SEQ ID NO: 1710603 - DNA, 15 bp, Homo sapiens
caatgggatgtaagc

SEQ ID NO: 1710604 - DNA, 15 bp, Homo sapiens
aatgggatgtaagcg

SEQ ID NO: 1710605 - DNA, 15 bp, Homo sapiens
atgggatgtaagcga

SEQ ID NO: 1710606 - DNA, 15 bp, Homo sapiens
tgggatgtaagcgaa

SEQ ID NO: 1710607 - DNA, 15 bp, Homo sapiens
gggatgtaagcgaag

SEQ ID NO: 1710608 - DNA, 15 bp, Homo sapiens
ggatgtaagcgaagg

SEQ ID NO: 1710609 - DNA, 15 bp, Homo sapiens
gatgtaagcgaaggt

SEQ ID NO: 1710610 - DNA, 15 bp, Homo sapiens
atgtaagcgaaggtg

SEQ ID NO: 1710611 - DNA, 15 bp, Homo sapiens
tgtaagcgaaggtgt

SEQ ID NO: 1710612 - DNA, 15 bp, Homo sapiens
gtaagcgaaggtgta

SEQ ID NO: 1710613 - DNA, 15 bp, Homo sapiens
taagcgaaggtgtat

SEQ ID NO: 1710614 - DNA, 15 bp, Homo sapiens
aagcgaaggtgtatt

SEQ ID NO: 1710615 - DNA, 15 bp, Homo sapiens
agcgaaggtgtattg

SEQ ID NO: 1710616 - DNA, 15 bp, Homo sapiens
gcgaaggtgtattgt

SEQ ID NO: 1710617 - DNA, 15 bp, Homo sapiens
cgaaggtgtattgtg

SEQ ID NO: 1710618 - DNA, 15 bp, Homo sapiens
gaaggtgtattgtgg

SEQ ID NO: 1710619 - DNA, 15 bp, Homo sapiens
aaggtgtattgtggc

SEQ ID NO: 1710620 - DNA, 15 bp, Homo sapiens
aggtgtattgtggca

SEQ ID NO: 1710621 - DNA, 15 bp, Homo sapiens
ggtgtattgtggcag

SEQ ID NO: 1710622 - DNA, 15 bp, Homo sapiens
gtgtattgtggcagt

SEQ ID NO: 1710623 - DNA, 15 bp, Homo sapiens
tgtattgtggcagtt

SEQ ID NO: 1710624 - DNA, 15 bp, Homo sapiens
gtattgtggcagttt

SEQ ID NO: 1710625 - DNA, 15 bp, Homo sapiens
tattgtggcagtttc

SEQ ID NO: 1710626 - DNA, 15 bp, Homo sapiens
attgtggcagtttcc

SEQ ID NO: 1710627 - DNA, 15 bp, Homo sapiens
ttgtggcagtttcca

SEQ ID NO: 1710628 - DNA, 15 bp, Homo sapiens
tgtggcagtttccag

SEQ ID NO: 1710629 - DNA, 15 bp, Homo sapiens
gtggcagtttccagg

SEQ ID NO: 1710630 - DNA, 15 bp, Homo sapiens
tggcagtttccagga

SEQ ID NO: 1710631 - DNA, 15 bp, Homo sapiens
ggcagtttccaggaa

SEQ ID NO: 1710632 - DNA, 15 bp, Homo sapiens
gcagtttccaggaat

SEQ ID NO: 1710633 - DNA, 15 bp, Homo sapiens
cagtttccaggaatt

SEQ ID NO: 1710634 - DNA, 15 bp, Homo sapiens
agtttccaggaattt

SEQ ID NO: 1710635 - DNA, 15 bp, Homo sapiens
gtttccaggaatttt

SEQ ID NO: 1710636 - DNA, 15 bp, Homo sapiens
tttccaggaattttc

SEQ ID NO: 1710637 - DNA, 15 bp, Homo sapiens
ttccaggaattttcc

SEQ ID NO: 1710638 - DNA, 15 bp, Homo sapiens
tccaggaattttcct

SEQ ID NO: 1710639 - DNA, 15 bp, Homo sapiens
ccaggaattttcctt

SEQ ID NO: 1710640 - DNA, 15 bp, Homo sapiens
caggaattttcctta

SEQ ID NO: 1710641 - DNA, 15 bp, Homo sapiens
aggaattttccttaa

SEQ ID NO: 1710642 - DNA, 15 bp, Homo sapiens
ggaattttccttaag

SEQ ID NO: 1710643 - DNA, 15 bp, Homo sapiens
gaattttccttaagt

SEQ ID NO: 1710644 - DNA, 15 bp, Homo sapiens
aattttccttaagtg

SEQ ID NO: 1710645 - DNA, 15 bp, Homo sapiens
attttccttaagtga

SEQ ID NO: 1710646 - DNA, 15 bp, Homo sapiens
ttttccttaagtgag

SEQ ID NO: 1710647 - DNA, 15 bp, Homo sapiens
tttccttaagtgaga

SEQ ID NO: 1710648 - DNA, 15 bp, Homo sapiens
ttccttaagtgagaa

SEQ ID NO: 1710649 - DNA, 15 bp, Homo sapiens
tccttaagtgagaac

SEQ ID NO: 1710650 - DNA, 15 bp, Homo sapiens
ccttaagtgagaaca

SEQ ID NO: 1710651 - DNA, 15 bp, Homo sapiens
cttaagtgagaacag

SEQ ID NO: 1710652 - DNA, 15 bp, Homo sapiens
ttaagtgagaacagg

SEQ ID NO: 1710653 - DNA, 15 bp, Homo sapiens
taagtgagaacaggc

SEQ ID NO: 1710654 - DNA, 15 bp, Homo sapiens
aagtgagaacaggcg

SEQ ID NO: 1710655 - DNA, 15 bp, Homo sapiens
agtgagaacaggcgt

SEQ ID NO: 1710656 - DNA, 15 bp, Homo sapiens
gtgagaacaggcgtg

SEQ ID NO: 1710657 - DNA, 15 bp, Homo sapiens
tgagaacaggcgtgt

SEQ ID NO: 1710658 - DNA, 15 bp, Homo sapiens
gagaacaggcgtgtg

SEQ ID NO: 1710659 - DNA, 15 bp, Homo sapiens
agaacaggcgtgtgc

SEQ ID NO: 1710660 - DNA, 15 bp, Homo sapiens
gaacaggcgtgtgcc

SEQ ID NO: 1710661 - DNA, 15 bp, Homo sapiens
aacaggcgtgtgcct

SEQ ID NO: 1710662 - DNA, 15 bp, Homo sapiens
acaggcgtgtgcctc

SEQ ID NO: 1710663 - DNA, 15 bp, Homo sapiens
caggcgtgtgcctct

SEQ ID NO: 1710664 - DNA, 15 bp, Homo sapiens
aggcgtgtgcctctg

SEQ ID NO: 1710665 - DNA, 15 bp, Homo sapiens
ggcgtgtgcctctgg

SEQ ID NO: 1710666 - DNA, 15 bp, Homo sapiens
gcgtgtgcctctggc

SEQ ID NO: 1710667 - DNA, 15 bp, Homo sapiens
cgtgtgcctctggct

SEQ ID NO: 1710668 - DNA, 15 bp, Homo sapiens
gtgtgcctctggctt

SEQ ID NO: 1710669 - DNA, 15 bp, Homo sapiens
tgtgcctctggcttt

SEQ ID NO: 1710670 - DNA, 15 bp, Homo sapiens
gtgcctctggctttt

SEQ ID NO: 1710671 - DNA, 15 bp, Homo sapiens
tgcctctggcttttt

SEQ ID NO: 1710672 - DNA, 15 bp, Homo sapiens
gcctctggctttttc

SEQ ID NO: 1710673 - DNA, 15 bp, Homo sapiens
cctctggctttttct

SEQ ID NO: 1710674 - DNA, 15 bp, Homo sapiens
ctctggctttttctt

SEQ ID NO: 1710675 - DNA, 15 bp, Homo sapiens
tctggctttttcttt

SEQ ID NO: 1710676 - DNA, 15 bp, Homo sapiens
ctggctttttcttta

SEQ ID NO: 1710677 - DNA, 15 bp, Homo sapiens
tggctttttctttat

SEQ ID NO: 1710678 - DNA, 15 bp, Homo sapiens
ggctttttctttatg

SEQ ID NO: 1710679 - DNA, 15 bp, Homo sapiens
gctttttctttatgc

SEQ ID NO: 1710680 - DNA, 15 bp, Homo sapiens
ctttttctttatgcc

SEQ ID NO: 1710681 - DNA, 15 bp, Homo sapiens
tttttctttatgcct

SEQ ID NO: 1710682 - DNA, 15 bp, Homo sapiens
ttttctttatgcctt

SEQ ID NO: 1710683 - DNA, 15 bp, Homo sapiens
tttctttatgccttc

SEQ ID NO: 1710684 - DNA, 15 bp, Homo sapiens
ttctttatgccttcc

SEQ ID NO: 1710685 - DNA, 15 bp, Homo sapiens
tctttatgccttcca

SEQ ID NO: 1710686 - DNA, 15 bp, Homo sapiens
ctttatgccttccag

SEQ ID NO: 1710687 - DNA, 15 bp, Homo sapiens
tttatgccttccagc

SEQ ID NO: 1710688 - DNA, 15 bp, Homo sapiens
ttatgccttccagca

SEQ ID NO: 1710689 - DNA, 15 bp, Homo sapiens
tatgccttccagcac

SEQ ID NO: 1710690 - DNA, 15 bp, Homo sapiens
atgccttccagcacc

SEQ ID NO: 1710691 - DNA, 15 bp, Homo sapiens
tgccttccagcaccc

SEQ ID NO: 1710692 - DNA, 15 bp, Homo sapiens
gccttccagcaccct

SEQ ID NO: 1710693 - DNA, 15 bp, Homo sapiens
ccttccagcaccctg

SEQ ID NO: 1710694 - DNA, 15 bp, Homo sapiens
cttccagcaccctgc

SEQ ID NO: 1710695 - DNA, 15 bp, Homo sapiens
ttccagcaccctgct

SEQ ID NO: 1710696 - DNA, 15 bp, Homo sapiens
tccagcaccctgctg

SEQ ID NO: 1710697 - DNA, 15 bp, Homo sapiens
ccagcaccctgctgt

SEQ ID NO: 1710698 - DNA, 15 bp, Homo sapiens
cagcaccctgctgtt

SEQ ID NO: 1710699 - DNA, 15 bp, Homo sapiens
agcaccctgctgttt

SEQ ID NO: 1710700 - DNA, 15 bp, Homo sapiens
gcaccctgctgttta

SEQ ID NO: 1710701 - DNA, 15 bp, Homo sapiens
caccctgctgtttaa

SEQ ID NO: 1710702 - DNA, 15 bp, Homo sapiens
accctgctgtttaaa

SEQ ID NO: 1710703 - DNA, 15 bp, Homo sapiens
ccctgctgtttaaaa

SEQ ID NO: 1710704 - DNA, 15 bp, Homo sapiens
cctgctgtttaaaac

SEQ ID NO: 1710705 - DNA, 15 bp, Homo sapiens
ctgctgtttaaaacg

SEQ ID NO: 1710706 - DNA, 15 bp, Homo sapiens
tgctgtttaaaacgt

SEQ ID NO: 1710707 - DNA, 15 bp, Homo sapiens
gctgtttaaaacgta

SEQ ID NO: 1710708 - DNA, 15 bp, Homo sapiens
ctgtttaaaacgtag

SEQ ID NO: 1710709 - DNA, 15 bp, Homo sapiens
tgtttaaaacgtagg

SEQ ID NO: 1710710 - DNA, 15 bp, Homo sapiens
gtttaaaacgtaggt

SEQ ID NO: 1710711 - DNA, 15 bp, Homo sapiens
tttaaaacgtaggta

SEQ ID NO: 1710712 - DNA, 15 bp, Homo sapiens
ttaaaacgtaggtac

SEQ ID NO: 1710713 - DNA, 15 bp, Homo sapiens
taaaacgtaggtacg

SEQ ID NO: 1710714 - DNA, 15 bp, Homo sapiens
aaaacgtaggtacga

SEQ ID NO: 1710715 - DNA, 15 bp, Homo sapiens
aaacgtaggtacgac

SEQ ID NO: 1710716 - DNA, 15 bp, Homo sapiens
aacgtaggtacgact

SEQ ID NO: 1710717 - DNA, 15 bp, Homo sapiens
acgtaggtacgactt

SEQ ID NO: 1710718 - DNA, 15 bp, Homo sapiens
cgtaggtacgacttt

SEQ ID NO: 1710719 - DNA, 15 bp, Homo sapiens
gtaggtacgactttt

SEQ ID NO: 1710720 - DNA, 15 bp, Homo sapiens
taggtacgacttttg

SEQ ID NO: 1710721 - DNA, 15 bp, Homo sapiens
aggtacgacttttgg

SEQ ID NO: 1710722 - DNA, 15 bp, Homo sapiens
ggtacgacttttggc

SEQ ID NO: 1710723 - DNA, 15 bp, Homo sapiens
gtacgacttttggct

SEQ ID NO: 1710724 - DNA, 15 bp, Homo sapiens
tacgacttttggctg

SEQ ID NO: 1710725 - DNA, 15 bp, Homo sapiens
acgacttttggctgc

SEQ ID NO: 1710726 - DNA, 15 bp, Homo sapiens
cgacttttggctgcc

SEQ ID NO: 1710727 - DNA, 15 bp, Homo sapiens
gacttttggctgcca

SEQ ID NO: 1710728 - DNA, 15 bp, Homo sapiens
acttttggctgccat

SEQ ID NO: 1710729 - DNA, 15 bp, Homo sapiens
cttttggctgccatc

SEQ ID NO: 1710730 - DNA, 15 bp, Homo sapiens
ttttggctgccatcc

SEQ ID NO: 1710731 - DNA, 15 bp, Homo sapiens
tttggctgccatcct

SEQ ID NO: 1710732 - DNA, 15 bp, Homo sapiens
ttggctgccatcctg

SEQ ID NO: 1710733 - DNA, 15 bp, Homo sapiens
tggctgccatcctgg

SEQ ID NO: 1710734 - DNA, 15 bp, Homo sapiens
ggctgccatcctgga

SEQ ID NO: 1710735 - DNA, 15 bp, Homo sapiens
gctgccatcctggac

SEQ ID NO: 1710736 - DNA, 15 bp, Homo sapiens
ctgccatcctggacc

SEQ ID NO: 1710737 - DNA, 15 bp, Homo sapiens
tgccatcctggaccc

SEQ ID NO: 1710738 - DNA, 15 bp, Homo sapiens
gccatcctggaccct

SEQ ID NO: 1710739 - DNA, 15 bp, Homo sapiens
ccatcctggaccctt

SEQ ID NO: 1710740 - DNA, 15 bp, Homo sapiens
catcctggaccctta

SEQ ID NO: 1710741 - DNA, 15 bp, Homo sapiens
atcctggacccttaa

SEQ ID NO: 1710742 - DNA, 15 bp, Homo sapiens
tcctggacccttaag

SEQ ID NO: 1710743 - DNA, 15 bp, Homo sapiens
cctggacccttaagt

SEQ ID NO: 1710744 - DNA, 15 bp, Homo sapiens
ctggacccttaagta

SEQ ID NO: 1710745 - DNA, 15 bp, Homo sapiens
tggacccttaagtac

SEQ ID NO: 1710746 - DNA, 15 bp, Homo sapiens
ggacccttaagtacc

SEQ ID NO: 1710747 - DNA, 15 bp, Homo sapiens
gacccttaagtaccc

SEQ ID NO: 1710748 - DNA, 15 bp, Homo sapiens
acccttaagtaccct

SEQ ID NO: 1710749 - DNA, 15 bp, Homo sapiens
cccttaagtaccctc

SEQ ID NO: 1710750 - DNA, 15 bp, Homo sapiens
ccttaagtaccctcc

SEQ ID NO: 1710751 - DNA, 15 bp, Homo sapiens
cttaagtaccctcca

SEQ ID NO: 1710752 - DNA, 15 bp, Homo sapiens
ttaagtaccctccag

SEQ ID NO: 1710753 - DNA, 15 bp, Homo sapiens
taagtaccctccagg

SEQ ID NO: 1710754 - DNA, 15 bp, Homo sapiens
aagtaccctccaggg

SEQ ID NO: 1710755 - DNA, 15 bp, Homo sapiens
agtaccctccaggga

SEQ ID NO: 1710756 - DNA, 15 bp, Homo sapiens
gtaccctccagggat

SEQ ID NO: 1710757 - DNA, 15 bp, Homo sapiens
taccctccagggatg

SEQ ID NO: 1710758 - DNA, 15 bp, Homo sapiens
accctccagggatga

SEQ ID NO: 1710759 - DNA, 15 bp, Homo sapiens
ccctccagggatgat

SEQ ID NO: 1710760 - DNA, 15 bp, Homo sapiens
cctccagggatgata

SEQ ID NO: 1710761 - DNA, 15 bp, Homo sapiens
ctccagggatgatag

SEQ ID NO: 1710762 - DNA, 15 bp, Homo sapiens
tccagggatgataga

SEQ ID NO: 1710763 - DNA, 15 bp, Homo sapiens
ccagggatgatagag

SEQ ID NO: 1710764 - DNA, 15 bp, Homo sapiens
cagggatgatagagt

SEQ ID NO: 1710765 - DNA, 15 bp, Homo sapiens
agggatgatagagtt

SEQ ID NO: 1710766 - DNA, 15 bp, Homo sapiens
gggatgatagagtta

SEQ ID NO: 1710767 - DNA, 15 bp, Homo sapiens
ggatgatagagttat

SEQ ID NO: 1710768 - DNA, 15 bp, Homo sapiens
gatgatagagttatg

SEQ ID NO: 1710769 - DNA, 15 bp, Homo sapiens
atgatagagttatga

SEQ ID NO: 1710770 - DNA, 15 bp, Homo sapiens
tgatagagttatgag

SEQ ID NO: 1710771 - DNA, 15 bp, Homo sapiens
gatagagttatgagc

SEQ ID NO: 1710772 - DNA, 15 bp, Homo sapiens
atagagttatgagct

SEQ ID NO: 1710773 - DNA, 15 bp, Homo sapiens
tagagttatgagctg

SEQ ID NO: 1710774 - DNA, 15 bp, Homo sapiens
agagttatgagctga

SEQ ID NO: 1710775 - DNA, 15 bp, Homo sapiens
gagttatgagctgaa

SEQ ID NO: 1710776 - DNA, 15 bp, Homo sapiens
agttatgagctgaag

SEQ ID NO: 1710777 - DNA, 15 bp, Homo sapiens
gttatgagctgaagg

SEQ ID NO: 1710778 - DNA, 15 bp, Homo sapiens
ttatgagctgaaggt

SEQ ID NO: 1710779 - DNA, 15 bp, Homo sapiens
tatgagctgaaggtg

SEQ ID NO: 1710780 - DNA, 15 bp, Homo sapiens
atgagctgaaggtgc

SEQ ID NO: 1710781 - DNA, 15 bp, Homo sapiens
tgagctgaaggtgcc

SEQ ID NO: 1710782 - DNA, 15 bp, Homo sapiens
gagctgaaggtgcct

SEQ ID NO: 1710783 - DNA, 15 bp, Homo sapiens
agctgaaggtgcctg

SEQ ID NO: 1710784 - DNA, 15 bp, Homo sapiens
gctgaaggtgcctgt

SEQ ID NO: 1710785 - DNA, 15 bp, Homo sapiens
ctgaaggtgcctgtg

SEQ ID NO: 1710786 - DNA, 15 bp, Homo sapiens
tgaaggtgcctgtgt

SEQ ID NO: 1710787 - DNA, 15 bp, Homo sapiens
gaaggtgcctgtgtc

SEQ ID NO: 1710788 - DNA, 15 bp, Homo sapiens
aaggtgcctgtgtcc

SEQ ID NO: 1710789 - DNA, 15 bp, Homo sapiens
aggtgcctgtgtccc

SEQ ID NO: 1710790 - DNA, 15 bp, Homo sapiens
ggtgcctgtgtccct

SEQ ID NO: 1710791 - DNA, 15 bp, Homo sapiens
gtgcctgtgtccctg

SEQ ID NO: 1710792 - DNA, 15 bp, Homo sapiens
tgcctgtgtccctga

SEQ ID NO: 1710793 - DNA, 15 bp, Homo sapiens
gcctgtgtccctgag

SEQ ID NO: 1710794 - DNA, 15 bp, Homo sapiens
cctgtgtccctgagg

SEQ ID NO: 1710795 - DNA, 15 bp, Homo sapiens
ctgtgtccctgagga

SEQ ID NO: 1710796 - DNA, 15 bp, Homo sapiens
tgtgtccctgaggac

SEQ ID NO: 1710797 - DNA, 15 bp, Homo sapiens
gtgtccctgaggact

SEQ ID NO: 1710798 - DNA, 15 bp, Homo sapiens
tgtccctgaggactt

SEQ ID NO: 1710799 - DNA, 15 bp, Homo sapiens
gtccctgaggacttc

SEQ ID NO: 1710800 - DNA, 15 bp, Homo sapiens
tccctgaggacttca

SEQ ID NO: 1710801 - DNA, 15 bp, Homo sapiens
ccctgaggacttcac

SEQ ID NO: 1710802 - DNA, 15 bp, Homo sapiens
cctgaggacttcact

SEQ ID NO: 1710803 - DNA, 15 bp, Homo sapiens
ctgaggacttcactg

SEQ ID NO: 1710804 - DNA, 15 bp, Homo sapiens
tgaggacttcactga

SEQ ID NO: 1710805 - DNA, 15 bp, Homo sapiens
gaggacttcactgag

SEQ ID NO: 1710806 - DNA, 15 bp, Homo sapiens
aggacttcactgagc

SEQ ID NO: 1710807 - DNA, 15 bp, Homo sapiens
ggacttcactgagca

SEQ ID NO: 1710808 - DNA, 15 bp, Homo sapiens
gacttcactgagcag

SEQ ID NO: 1710809 - DNA, 15 bp, Homo sapiens
acttcactgagcaga

SEQ ID NO: 1710810 - DNA, 15 bp, Homo sapiens
cttcactgagcagaa

SEQ ID NO: 1710811 - DNA, 15 bp, Homo sapiens
ttcactgagcagaac

SEQ ID NO: 1710812 - DNA, 15 bp, Homo sapiens
tcactgagcagaacc

SEQ ID NO: 1710813 - DNA, 15 bp, Homo sapiens
cactgagcagaacct

SEQ ID NO: 1710814 - DNA, 15 bp, Homo sapiens
actgagcagaacctt

SEQ ID NO: 1710815 - DNA, 15 bp, Homo sapiens
ctgagcagaaccttc

SEQ ID NO: 1710816 - DNA, 15 bp, Homo sapiens
tgagcagaaccttca

SEQ ID NO: 1710817 - DNA, 15 bp, Homo sapiens
gagcagaaccttcac

SEQ ID NO: 1710818 - DNA, 15 bp, Homo sapiens
agcagaaccttcact

SEQ ID NO: 1710819 - DNA, 15 bp, Homo sapiens
gcagaaccttcactt

SEQ ID NO: 1710820 - DNA, 15 bp, Homo sapiens
cagaaccttcactta

SEQ ID NO: 1710821 - DNA, 15 bp, Homo sapiens
agaaccttcacttag

SEQ ID NO: 1710822 - DNA, 15 bp, Homo sapiens
gaaccttcacttagt

SEQ ID NO: 1710823 - DNA, 15 bp, Homo sapiens
aaccttcacttagtc

SEQ ID NO: 1710824 - DNA, 15 bp, Homo sapiens
accttcacttagtcc

SEQ ID NO: 1710825 - DNA, 15 bp, Homo sapiens
ccttcacttagtcct

SEQ ID NO: 1710826 - DNA, 15 bp, Homo sapiens
cttcacttagtccta

SEQ ID NO: 1710827 - DNA, 15 bp, Homo sapiens
ttcacttagtcctag

SEQ ID NO: 1710828 - DNA, 15 bp, Homo sapiens
tcacttagtcctaga

SEQ ID NO: 1710829 - DNA, 15 bp, Homo sapiens
cacttagtcctagaa

SEQ ID NO: 1710830 - DNA, 15 bp, Homo sapiens
acttagtcctagaat

SEQ ID NO: 1710831 - DNA, 15 bp, Homo sapiens
cttagtcctagaatt

SEQ ID NO: 1710832 - DNA, 15 bp, Homo sapiens
ttagtcctagaattc

SEQ ID NO: 1710833 - DNA, 15 bp, Homo sapiens
tagtcctagaattcc

SEQ ID NO: 1710834 - DNA, 15 bp, Homo sapiens
agtcctagaattcct

SEQ ID NO: 1710835 - DNA, 15 bp, Homo sapiens
gtcctagaattccta

SEQ ID NO: 1710836 - DNA, 15 bp, Homo sapiens
tcctagaattcctac

SEQ ID NO: 1710837 - DNA, 15 bp, Homo sapiens
cctagaattcctacc

SEQ ID NO: 1710838 - DNA, 15 bp, Homo sapiens
ctagaattcctacct

SEQ ID NO: 1710839 - DNA, 15 bp, Homo sapiens
tagaattcctacctc

SEQ ID NO: 1710840 - DNA, 15 bp, Homo sapiens
agaattcctacctct

SEQ ID NO: 1710841 - DNA, 15 bp, Homo sapiens
gaattcctacctcta

SEQ ID NO: 1710842 - DNA, 15 bp, Homo sapiens
aattcctacctctag

SEQ ID NO: 1710843 - DNA, 15 bp, Homo sapiens
attcctacctctaga

SEQ ID NO: 1710844 - DNA, 15 bp, Homo sapiens
ttcctacctctagac

SEQ ID NO: 1710845 - DNA, 15 bp, Homo sapiens
tcctacctctagact

SEQ ID NO: 1710846 - DNA, 15 bp, Homo sapiens
cctacctctagactt

SEQ ID NO: 1710847 - DNA, 15 bp, Homo sapiens
ctacctctagacttt

SEQ ID NO: 1710848 - DNA, 15 bp, Homo sapiens
tacctctagactttt

SEQ ID NO: 1710849 - DNA, 15 bp, Homo sapiens
acctctagactttta

SEQ ID NO: 1710850 - DNA, 15 bp, Homo sapiens
cctctagacttttac

SEQ ID NO: 1710851 - DNA, 15 bp, Homo sapiens
ctctagacttttacc

SEQ ID NO: 1710852 - DNA, 15 bp, Homo sapiens
tctagacttttacct

SEQ ID NO: 1710853 - DNA, 15 bp, Homo sapiens
ctagacttttacctg

SEQ ID NO: 1710854 - DNA, 15 bp, Homo sapiens
tagacttttacctgg

SEQ ID NO: 1710855 - DNA, 15 bp, Homo sapiens
agacttttacctggg

SEQ ID NO: 1710856 - DNA, 15 bp, Homo sapiens
gacttttacctggga

SEQ ID NO: 1710857 - DNA, 15 bp, Homo sapiens
acttttacctgggat

SEQ ID NO: 1710858 - DNA, 15 bp, Homo sapiens
cttttacctgggata

SEQ ID NO: 1710859 - DNA, 15 bp, Homo sapiens
ttttacctgggatac

SEQ ID NO: 1710860 - DNA, 15 bp, Homo sapiens
tttacctgggatact

SEQ ID NO: 1710861 - DNA, 15 bp, Homo sapiens
ttacctgggatacta

SEQ ID NO: 1710862 - DNA, 15 bp, Homo sapiens
tacctgggatactaa

SEQ ID NO: 1710863 - DNA, 15 bp, Homo sapiens
acctgggatactaat

SEQ ID NO: 1710864 - DNA, 15 bp, Homo sapiens
cctgggatactaatc

SEQ ID NO: 1710865 - DNA, 15 bp, Homo sapiens
ctgggatactaatct

SEQ ID NO: 1710866 - DNA, 15 bp, Homo sapiens
tgggatactaatctt

SEQ ID NO: 1710867 - DNA, 15 bp, Homo sapiens
gggatactaatcttt

SEQ ID NO: 1710868 - DNA, 15 bp, Homo sapiens
ggatactaatctttt

SEQ ID NO: 1710869 - DNA, 15 bp, Homo sapiens
gatactaatctttta

SEQ ID NO: 1710870 - DNA, 15 bp, Homo sapiens
atactaatcttttat

SEQ ID NO: 1710871 - DNA, 15 bp, Homo sapiens
tactaatcttttatt

SEQ ID NO: 1710872 - DNA, 15 bp, Homo sapiens
actaatcttttattt

SEQ ID NO: 1710873 - DNA, 15 bp, Homo sapiens
ctaatcttttattta

SEQ ID NO: 1710874 - DNA, 15 bp, Homo sapiens
atcttttatttaatc

SEQ ID NO: 1710875 - DNA, 15 bp, Homo sapiens
tcttttatttaatct

SEQ ID NO: 1710876 - DNA, 15 bp, Homo sapiens
cttttatttaatcta

SEQ ID NO: 1710877 - DNA, 15 bp, Homo sapiens
ttttatttaatctat

SEQ ID NO: 1710878 - DNA, 15 bp, Homo sapiens
tttatttaatctatt

SEQ ID NO: 1710879 - DNA, 15 bp, Homo sapiens
ttatttaatctattg

SEQ ID NO: 1710880 - DNA, 15 bp, Homo sapiens
tatttaatctattgt

SEQ ID NO: 1710881 - DNA, 15 bp, Homo sapiens
atttaatctattgtt

SEQ ID NO: 1710882 - DNA, 15 bp, Homo sapiens
tttaatctattgtta

SEQ ID NO: 1710883 - DNA, 15 bp, Homo sapiens
ttaatctattgttat

SEQ ID NO: 1710884 - DNA, 15 bp, Homo sapiens
taatctattgttatt

SEQ ID NO: 1710885 - DNA, 15 bp, Homo sapiens
aatctattgttattt

SEQ ID NO: 1710886 - DNA, 15 bp, Homo sapiens
atctattgttatttt

SEQ ID NO: 1710887 - DNA, 15 bp, Homo sapiens
tctattgttattttg

SEQ ID NO: 1710888 - DNA, 15 bp, Homo sapiens
ctattgttattttgg

SEQ ID NO: 1710889 - DNA, 15 bp, Homo sapiens
tattgttattttggg

SEQ ID NO: 1710890 - DNA, 15 bp, Homo sapiens
attgttattttgggt

SEQ ID NO: 1710891 - DNA, 15 bp, Homo sapiens
ttgttattttgggtt

SEQ ID NO: 1710892 - DNA, 15 bp, Homo sapiens
tgttattttgggttc

SEQ ID NO: 1710893 - DNA, 15 bp, Homo sapiens
gttattttgggttct

SEQ ID NO: 1710894 - DNA, 15 bp, Homo sapiens
ttattttgggttctg

SEQ ID NO: 1710895 - DNA, 15 bp, Homo sapiens
tattttgggttctgt

SEQ ID NO: 1710896 - DNA, 15 bp, Homo sapiens
attttgggttctgtt

SEQ ID NO: 1710897 - DNA, 15 bp, Homo sapiens
ttttgggttctgtta

SEQ ID NO: 1710898 - DNA, 15 bp, Homo sapiens
tttgggttctgttat

SEQ ID NO: 1710899 - DNA, 15 bp, Homo sapiens
ttgggttctgttatt

SEQ ID NO: 1710900 - DNA, 15 bp, Homo sapiens
tgggttctgttatta

SEQ ID NO: 1710901 - DNA, 15 bp, Homo sapiens
gggttctgttattag

SEQ ID NO: 1710902 - DNA, 15 bp, Homo sapiens
ggttctgttattagc

SEQ ID NO: 1710903 - DNA, 15 bp, Homo sapiens
gttctgttattagca

SEQ ID NO: 1710904 - DNA, 15 bp, Homo sapiens
ttctgttattagcag

SEQ ID NO: 1710905 - DNA, 15 bp, Homo sapiens
tctgttattagcagc

SEQ ID NO: 1710906 - DNA, 15 bp, Homo sapiens
ctgttattagcagct

SEQ ID NO: 1710907 - DNA, 15 bp, Homo sapiens
tgttattagcagcta

SEQ ID NO: 1710908 - DNA, 15 bp, Homo sapiens
gttattagcagctaa

SEQ ID NO: 1710909 - DNA, 15 bp, Homo sapiens
ttattagcagctaac

SEQ ID NO: 1710910 - DNA, 15 bp, Homo sapiens
tattagcagctaaca

SEQ ID NO: 1710911 - DNA, 15 bp, Homo sapiens
attagcagctaacat

SEQ ID NO: 1710912 - DNA, 15 bp, Homo sapiens
ttagcagctaacata

SEQ ID NO: 1710913 - DNA, 15 bp, Homo sapiens
tagcagctaacataa

SEQ ID NO: 1710914 - DNA, 15 bp, Homo sapiens
agcagctaacataat

SEQ ID NO: 1710915 - DNA, 15 bp, Homo sapiens
gcagctaacataatc

SEQ ID NO: 1710916 - DNA, 15 bp, Homo sapiens
cagctaacataatcc

SEQ ID NO: 1710917 - DNA, 15 bp, Homo sapiens
agctaacataatcct

SEQ ID NO: 1710918 - DNA, 15 bp, Homo sapiens
gctaacataatcctg

SEQ ID NO: 1710919 - DNA, 15 bp, Homo sapiens
ctaacataatcctgt

SEQ ID NO: 1710920 - DNA, 15 bp, Homo sapiens
taacataatcctgtc

SEQ ID NO: 1710921 - DNA, 15 bp, Homo sapiens
aacataatcctgtca

SEQ ID NO: 1710922 - DNA, 15 bp, Homo sapiens
acataatcctgtcat

SEQ ID NO: 1710923 - DNA, 15 bp, Homo sapiens
cataatcctgtcata

SEQ ID NO: 1710924 - DNA, 15 bp, Homo sapiens
ataatcctgtcatac

SEQ ID NO: 1710925 - DNA, 15 bp, Homo sapiens
taatcctgtcatact

SEQ ID NO: 1710926 - DNA, 15 bp, Homo sapiens
aatcctgtcatacta

SEQ ID NO: 1710927 - DNA, 15 bp, Homo sapiens
atcctgtcatactat

SEQ ID NO: 1710928 - DNA, 15 bp, Homo sapiens
tcctgtcatactatt

SEQ ID NO: 1710929 - DNA, 15 bp, Homo sapiens
cctgtcatactattg

SEQ ID NO: 1710930 - DNA, 15 bp, Homo sapiens
ctgtcatactattga

SEQ ID NO: 1710931 - DNA, 15 bp, Homo sapiens
tgtcatactattgaa

SEQ ID NO: 1710932 - DNA, 15 bp, Homo sapiens
gtcatactattgaaa

SEQ ID NO: 1710933 - DNA, 15 bp, Homo sapiens
tcatactattgaaat

SEQ ID NO: 1710934 - DNA, 15 bp, Homo sapiens
catactattgaaata

SEQ ID NO: 1710935 - DNA, 15 bp, Homo sapiens
atactattgaaatat

SEQ ID NO: 1710936 - DNA, 15 bp, Homo sapiens
tactattgaaatata

SEQ ID NO: 1710937 - DNA, 15 bp, Homo sapiens
actattgaaatatag

SEQ ID NO: 1710938 - DNA, 15 bp, Homo sapiens
ctattgaaatatagt

SEQ ID NO: 1710939 - DNA, 15 bp, Homo sapiens
tattgaaatatagtc

SEQ ID NO: 1710940 - DNA, 15 bp, Homo sapiens
attgaaatatagtct

SEQ ID NO: 1710941 - DNA, 15 bp, Homo sapiens
ttgaaatatagtctc

SEQ ID NO: 1710942 - DNA, 15 bp, Homo sapiens
tgaaatatagtctct

SEQ ID NO: 1710943 - DNA, 15 bp, Homo sapiens
gaaatatagtctctc

SEQ ID NO: 1710944 - DNA, 15 bp, Homo sapiens
aaatatagtctctct

SEQ ID NO: 1710945 - DNA, 15 bp, Homo sapiens
aatatagtctctcta

SEQ ID NO: 1710946 - DNA, 15 bp, Homo sapiens
atatagtctctctat

SEQ ID NO: 1710947 - DNA, 15 bp, Homo sapiens
tatagtctctctatg

SEQ ID NO: 1710948 - DNA, 15 bp, Homo sapiens
atagtctctctatgt

SEQ ID NO: 1710949 - DNA, 15 bp, Homo sapiens
tagtctctctatgtt

SEQ ID NO: 1710950 - DNA, 15 bp, Homo sapiens
agtctctctatgttt

SEQ ID NO: 1710951 - DNA, 15 bp, Homo sapiens
gtctctctatgtttt

SEQ ID NO: 1710952 - DNA, 15 bp, Homo sapiens
tctctctatgttttt

SEQ ID NO: 1710953 - DNA, 15 bp, Homo sapiens
ctctctatgttttta

SEQ ID NO: 1710954 - DNA, 15 bp, Homo sapiens
tctctatgtttttag

SEQ ID NO: 1710955 - DNA, 15 bp, Homo sapiens
ctctatgtttttagg

SEQ ID NO: 1710956 - DNA, 15 bp, Homo sapiens
tctatgtttttaggt

SEQ ID NO: 1710957 - DNA, 15 bp, Homo sapiens
ctatgtttttaggtc

SEQ ID NO: 1710958 - DNA, 15 bp, Homo sapiens
tatgtttttaggtca

SEQ ID NO: 1710959 - DNA, 15 bp, Homo sapiens
atgtttttaggtcat

SEQ ID NO: 1710960 - DNA, 15 bp, Homo sapiens
tgtttttaggtcata

SEQ ID NO: 1710961 - DNA, 15 bp, Homo sapiens
gtttttaggtcatac

SEQ ID NO: 1710962 - DNA, 15 bp, Homo sapiens
tttttaggtcatact

SEQ ID NO: 1710963 - DNA, 15 bp, Homo sapiens
ttttaggtcatactc

SEQ ID NO: 1710964 - DNA, 15 bp, Homo sapiens
tttaggtcatactcg

SEQ ID NO: 1710965 - DNA, 15 bp, Homo sapiens
ttaggtcatactcga

SEQ ID NO: 1710966 - DNA, 15 bp, Homo sapiens
taggtcatactcgac

SEQ ID NO: 1710967 - DNA, 15 bp, Homo sapiens
aggtcatactcgaca

SEQ ID NO: 1710968 - DNA, 15 bp, Homo sapiens
ggtcatactcgacag

SEQ ID NO: 1710969 - DNA, 15 bp, Homo sapiens
gtcatactcgacagt

SEQ ID NO: 1710970 - DNA, 15 bp, Homo sapiens
tcatactcgacagta

SEQ ID NO: 1710971 - DNA, 15 bp, Homo sapiens
catactcgacagtat

SEQ ID NO: 1710972 - DNA, 15 bp, Homo sapiens
atactcgacagtatg

SEQ ID NO: 1710973 - DNA, 15 bp, Homo sapiens
tactcgacagtatgt

SEQ ID NO: 1710974 - DNA, 15 bp, Homo sapiens
actcgacagtatgta

SEQ ID NO: 1710975 - DNA, 15 bp, Homo sapiens
ctcgacagtatgtaa

SEQ ID NO: 1710976 - DNA, 15 bp, Homo sapiens
tcgacagtatgtaat

SEQ ID NO: 1710977 - DNA, 15 bp, Homo sapiens
cgacagtatgtaatt

SEQ ID NO: 1710978 - DNA, 15 bp, Homo sapiens
gacagtatgtaattt

SEQ ID NO: 1710979 - DNA, 15 bp, Homo sapiens
acagtatgtaatttt

SEQ ID NO: 1710980 - DNA, 15 bp, Homo sapiens
cagtatgtaattttt

SEQ ID NO: 1710981 - DNA, 15 bp, Homo sapiens
agtatgtaatttttt

SEQ ID NO: 1710982 - DNA, 15 bp, Homo sapiens
gtatgtaattttttt

SEQ ID NO: 1710983 - DNA, 15 bp, Homo sapiens
tatgtaatttttttt

SEQ ID NO: 1710984 - DNA, 15 bp, Homo sapiens
atgtaattttttttt

SEQ ID NO: 1710985 - DNA, 15 bp, Homo sapiens
tgtaatttttttttt

SEQ ID NO: 1710986 - DNA, 15 bp, Homo sapiens
gcccaggctggagtc

SEQ ID NO: 1710987 - DNA, 15 bp, Homo sapiens
cccaggctggagtcc

SEQ ID NO: 1710988 - DNA, 15 bp, Homo sapiens
ccaggctggagtcca

SEQ ID NO: 1710989 - DNA, 15 bp, Homo sapiens
caggctggagtccag

SEQ ID NO: 1710990 - DNA, 15 bp, Homo sapiens
aggctggagtccagt

SEQ ID NO: 1710991 - DNA, 15 bp, Homo sapiens
ggctggagtccagtg

SEQ ID NO: 1710992 - DNA, 15 bp, Homo sapiens
gctggagtccagtgg

SEQ ID NO: 1710993 - DNA, 15 bp, Homo sapiens
ctggagtccagtggc

SEQ ID NO: 1710994 - DNA, 15 bp, Homo sapiens
tggagtccagtggcg

SEQ ID NO: 1710995 - DNA, 15 bp, Homo sapiens
ggagtccagtggcgt

SEQ ID NO: 1710996 - DNA, 15 bp, Homo sapiens
gagtccagtggcgtg

SEQ ID NO: 1710997 - DNA, 15 bp, Homo sapiens
agtccagtggcgtga

SEQ ID NO: 1710998 - DNA, 15 bp, Homo sapiens
gtccagtggcgtgat

SEQ ID NO: 1710999 - DNA, 15 bp, Homo sapiens
tccagtggcgtgatc

SEQ ID NO: 1711000 - DNA, 15 bp, Homo sapiens
ccagtggcgtgatct

SEQ ID NO: 1711001 - DNA, 15 bp, Homo sapiens
agtggcgtgatctca

SEQ ID NO: 1711002 - DNA, 15 bp, Homo sapiens
gtggcgtgatctcag

SEQ ID NO: 1711003 - DNA, 15 bp, Homo sapiens
tggcgtgatctcagc

SEQ ID NO: 1711004 - DNA, 15 bp, Homo sapiens
ggcgtgatctcagct

SEQ ID NO: 1711005 - DNA, 15 bp, Homo sapiens
gcgtgatctcagctc

SEQ ID NO: 1711006 - DNA, 15 bp, Homo sapiens
cgtgatctcagctca

SEQ ID NO: 1711007 - DNA, 15 bp, Homo sapiens
actgcaaactccact

SEQ ID NO: 1711008 - DNA, 15 bp, Homo sapiens
ctgcaaactccactt

SEQ ID NO: 1711009 - DNA, 15 bp, Homo sapiens
tgcaaactccacttc

SEQ ID NO: 1711010 - DNA, 15 bp, Homo sapiens
gcaaactccacttcc

SEQ ID NO: 1711011 - DNA, 15 bp, Homo sapiens
caaactccacttcct

SEQ ID NO: 1711012 - DNA, 15 bp, Homo sapiens
aaactccacttcctg

SEQ ID NO: 1711013 - DNA, 15 bp, Homo sapiens
aactccacttcctgg

SEQ ID NO: 1711014 - DNA, 15 bp, Homo sapiens
actccacttcctggg

SEQ ID NO: 1711015 - DNA, 15 bp, Homo sapiens
ctccacttcctgggt

SEQ ID NO: 1711016 - DNA, 15 bp, Homo sapiens
tccacttcctgggtt

SEQ ID NO: 1711017 - DNA, 15 bp, Homo sapiens
ccacttcctgggttc

SEQ ID NO: 1711018 - DNA, 15 bp, Homo sapiens
cacttcctgggttca

SEQ ID NO: 1711019 - DNA, 15 bp, Homo sapiens
acttcctgggttcag

SEQ ID NO: 1711020 - DNA, 15 bp, Homo sapiens
cttcctgggttcagg

SEQ ID NO: 1711021 - DNA, 15 bp, Homo sapiens
ttcctgggttcaggt

SEQ ID NO: 1711022 - DNA, 15 bp, Homo sapiens
tcctgggttcaggtg

SEQ ID NO: 1711023 - DNA, 15 bp, Homo sapiens
cctgggttcaggtga

SEQ ID NO: 1711024 - DNA, 15 bp, Homo sapiens
ctgggttcaggtgat

SEQ ID NO: 1711025 - DNA, 15 bp, Homo sapiens
tgggttcaggtgatt

SEQ ID NO: 1711026 - DNA, 15 bp, Homo sapiens
gggttcaggtgattc

SEQ ID NO: 1711027 - DNA, 15 bp, Homo sapiens
ggttcaggtgattct

SEQ ID NO: 1711028 - DNA, 15 bp, Homo sapiens
gttcaggtgattctc

SEQ ID NO: 1711029 - DNA, 15 bp, Homo sapiens
ttcaggtgattctct

SEQ ID NO: 1711030 - DNA, 15 bp, Homo sapiens
tcaggtgattctctt

SEQ ID NO: 1711031 - DNA, 15 bp, Homo sapiens
caggtgattctcttg

SEQ ID NO: 1711032 - DNA, 15 bp, Homo sapiens
aggtgattctcttgc

SEQ ID NO: 1711033 - DNA, 15 bp, Homo sapiens
ggtgattctcttgcc

SEQ ID NO: 1711034 - DNA, 15 bp, Homo sapiens
gtgattctcttgcct

SEQ ID NO: 1711035 - DNA, 15 bp, Homo sapiens
tgattctcttgcctt

SEQ ID NO: 1711036 - DNA, 15 bp, Homo sapiens
gattctcttgcctta

SEQ ID NO: 1711037 - DNA, 15 bp, Homo sapiens
attctcttgccttag

SEQ ID NO: 1711038 - DNA, 15 bp, Homo sapiens
ttctcttgccttagc

SEQ ID NO: 1711039 - DNA, 15 bp, Homo sapiens
tctcttgccttagcc

SEQ ID NO: 1711040 - DNA, 15 bp, Homo sapiens
ctcttgccttagcct

SEQ ID NO: 1711041 - DNA, 15 bp, Homo sapiens
tcttgccttagcctc

SEQ ID NO: 1711042 - DNA, 15 bp, Homo sapiens
cttgccttagcctcc

SEQ ID NO: 1711043 - DNA, 15 bp, Homo sapiens
ttgccttagcctcct

SEQ ID NO: 1711044 - DNA, 15 bp, Homo sapiens
ttagcctcctgagtg

SEQ ID NO: 1711045 - DNA, 15 bp, Homo sapiens
tagcctcctgagtgg

SEQ ID NO: 1711046 - DNA, 15 bp, Homo sapiens
agcctcctgagtggc

SEQ ID NO: 1711047 - DNA, 15 bp, Homo sapiens
gcctcctgagtggct

SEQ ID NO: 1711048 - DNA, 15 bp, Homo sapiens
cctcctgagtggctg

SEQ ID NO: 1711049 - DNA, 15 bp, Homo sapiens
ctcctgagtggctgg

SEQ ID NO: 1711050 - DNA, 15 bp, Homo sapiens
tcctgagtggctggg

SEQ ID NO: 1711051 - DNA, 15 bp, Homo sapiens
cctgagtggctggga

SEQ ID NO: 1711052 - DNA, 15 bp, Homo sapiens
ctgagtggctgggac

SEQ ID NO: 1711053 - DNA, 15 bp, Homo sapiens
tgagtggctgggact

SEQ ID NO: 1711054 - DNA, 15 bp, Homo sapiens
gagtggctgggacta

SEQ ID NO: 1711055 - DNA, 15 bp, Homo sapiens
agtggctgggactac

SEQ ID NO: 1711056 - DNA, 15 bp, Homo sapiens
gtggctgggactaca

SEQ ID NO: 1711057 - DNA, 15 bp, Homo sapiens
tggctgggactacag

SEQ ID NO: 1711058 - DNA, 15 bp, Homo sapiens
ggctgggactacagg

SEQ ID NO: 1711059 - DNA, 15 bp, Homo sapiens
gcatgagccatcacg

SEQ ID NO: 1711060 - DNA, 15 bp, Homo sapiens
catgagccatcacgc

SEQ ID NO: 1711061 - DNA, 15 bp, Homo sapiens
atgagccatcacgcc

SEQ ID NO: 1711062 - DNA, 15 bp, Homo sapiens
tgagccatcacgcct

SEQ ID NO: 1711063 - DNA, 15 bp, Homo sapiens
gagccatcacgcctg

SEQ ID NO: 1711064 - DNA, 15 bp, Homo sapiens
agccatcacgcctgg

SEQ ID NO: 1711065 - DNA, 15 bp, Homo sapiens
gccatcacgcctggg

SEQ ID NO: 1711066 - DNA, 15 bp, Homo sapiens
ccatcacgcctgggt

SEQ ID NO: 1711067 - DNA, 15 bp, Homo sapiens
catcacgcctgggta

SEQ ID NO: 1711068 - DNA, 15 bp, Homo sapiens
atcacgcctgggtaa

SEQ ID NO: 1711069 - DNA, 15 bp, Homo sapiens
tcacgcctgggtaat

SEQ ID NO: 1711070 - DNA, 15 bp, Homo sapiens
cacgcctgggtaatt

SEQ ID NO: 1711071 - DNA, 15 bp, Homo sapiens
acgcctgggtaattt

SEQ ID NO: 1711072 - DNA, 15 bp, Homo sapiens
cgcctgggtaatttt

SEQ ID NO: 1711073 - DNA, 15 bp, Homo sapiens
gcctgggtaattttt

SEQ ID NO: 1711074 - DNA, 15 bp, Homo sapiens
cctgggtaatttttg

SEQ ID NO: 1711075 - DNA, 15 bp, Homo sapiens
ctgggtaatttttgt

SEQ ID NO: 1711076 - DNA, 15 bp, Homo sapiens
tgggtaatttttgta

SEQ ID NO: 1711077 - DNA, 15 bp, Homo sapiens
gggtaatttttgtat

SEQ ID NO: 1711078 - DNA, 15 bp, Homo sapiens
ggtaatttttgtatt

SEQ ID NO: 1711079 - DNA, 15 bp, Homo sapiens
gtaatttttgtattt

SEQ ID NO: 1711080 - DNA, 15 bp, Homo sapiens
atttttagtacagat

SEQ ID NO: 1711081 - DNA, 15 bp, Homo sapiens
tttttagtacagata

SEQ ID NO: 1711082 - DNA, 15 bp, Homo sapiens
ttttagtacagatag

SEQ ID NO: 1711083 - DNA, 15 bp, Homo sapiens
tttagtacagatagg

SEQ ID NO: 1711084 - DNA, 15 bp, Homo sapiens
ttagtacagatagga

SEQ ID NO: 1711085 - DNA, 15 bp, Homo sapiens
tagtacagataggat

SEQ ID NO: 1711086 - DNA, 15 bp, Homo sapiens
agtacagataggatt

SEQ ID NO: 1711087 - DNA, 15 bp, Homo sapiens
gtacagataggattt

SEQ ID NO: 1711088 - DNA, 15 bp, Homo sapiens
tacagataggatttc

SEQ ID NO: 1711089 - DNA, 15 bp, Homo sapiens
acagataggatttcg

SEQ ID NO: 1711090 - DNA, 15 bp, Homo sapiens
cagataggatttcgc

SEQ ID NO: 1711091 - DNA, 15 bp, Homo sapiens
agataggatttcgcc

SEQ ID NO: 1711092 - DNA, 15 bp, Homo sapiens
gataggatttcgcca

SEQ ID NO: 1711093 - DNA, 15 bp, Homo sapiens
ataggatttcgccat

SEQ ID NO: 1711094 - DNA, 15 bp, Homo sapiens
taggatttcgccatg

SEQ ID NO: 1711095 - DNA, 15 bp, Homo sapiens
aggatttcgccatgt

SEQ ID NO: 1711096 - DNA, 15 bp, Homo sapiens
ggatttcgccatgtt

SEQ ID NO: 1711097 - DNA, 15 bp, Homo sapiens
gatttcgccatgttg

SEQ ID NO: 1711098 - DNA, 15 bp, Homo sapiens
atttcgccatgttgg

SEQ ID NO: 1711099 - DNA, 15 bp, Homo sapiens
ggcctcaagcgatct

SEQ ID NO: 1711100 - DNA, 15 bp, Homo sapiens
gcctcaagcgatctg

SEQ ID NO: 1711101 - DNA, 15 bp, Homo sapiens
cctcaagcgatctgc

SEQ ID NO: 1711102 - DNA, 15 bp, Homo sapiens
ctcaagcgatctgca

SEQ ID NO: 1711103 - DNA, 15 bp, Homo sapiens
tcaagcgatctgcat

SEQ ID NO: 1711104 - DNA, 15 bp, Homo sapiens
caagcgatctgcatg

SEQ ID NO: 1711105 - DNA, 15 bp, Homo sapiens
aagcgatctgcatgc

SEQ ID NO: 1711106 - DNA, 15 bp, Homo sapiens
agcgatctgcatgcc

SEQ ID NO: 1711107 - DNA, 15 bp, Homo sapiens
gcgatctgcatgcct

SEQ ID NO: 1711108 - DNA, 15 bp, Homo sapiens
cgatctgcatgcctt

SEQ ID NO: 1711109 - DNA, 15 bp, Homo sapiens
gatctgcatgccttg

SEQ ID NO: 1711110 - DNA, 15 bp, Homo sapiens
atctgcatgccttgg

SEQ ID NO: 1711111 - DNA, 15 bp, Homo sapiens
tctgcatgccttggt

SEQ ID NO: 1711112 - DNA, 15 bp, Homo sapiens
ctgcatgccttggtc

SEQ ID NO: 1711113 - DNA, 15 bp, Homo sapiens
tgcatgccttggtct

SEQ ID NO: 1711114 - DNA, 15 bp, Homo sapiens
gcatgccttggtctc

SEQ ID NO: 1711115 - DNA, 15 bp, Homo sapiens
catgccttggtctct

SEQ ID NO: 1711116 - DNA, 15 bp, Homo sapiens
atgccttggtctctc

SEQ ID NO: 1711117 - DNA, 15 bp, Homo sapiens
tgccttggtctctca

SEQ ID NO: 1711118 - DNA, 15 bp, Homo sapiens
gccttggtctctcaa

SEQ ID NO: 1711119 - DNA, 15 bp, Homo sapiens
ccttggtctctcaaa

SEQ ID NO: 1711120 - DNA, 15 bp, Homo sapiens
cttggtctctcaaag

SEQ ID NO: 1711121 - DNA, 15 bp, Homo sapiens
ttggtctctcaaagt

SEQ ID NO: 1711122 - DNA, 15 bp, Homo sapiens
tggtctctcaaagtg

SEQ ID NO: 1711123 - DNA, 15 bp, Homo sapiens
ggtctctcaaagtgc

SEQ ID NO: 1711124 - DNA, 15 bp, Homo sapiens
gtctctcaaagtgct

SEQ ID NO: 1711125 - DNA, 15 bp, Homo sapiens
ctcaaagtgctgggg

SEQ ID NO: 1711126 - DNA, 15 bp, Homo sapiens
tcaaagtgctggggt

SEQ ID NO: 1711127 - DNA, 15 bp, Homo sapiens
tgctggggttacaga

SEQ ID NO: 1711128 - DNA, 15 bp, Homo sapiens
gctggggttacagat

SEQ ID NO: 1711129 - DNA, 15 bp, Homo sapiens
ctggggttacagatg

SEQ ID NO: 1711130 - DNA, 15 bp, Homo sapiens
tggggttacagatgt

SEQ ID NO: 1711131 - DNA, 15 bp, Homo sapiens
ggggttacagatgtg

SEQ ID NO: 1711132 - DNA, 15 bp, Homo sapiens
gggttacagatgtga

SEQ ID NO: 1711133 - DNA, 15 bp, Homo sapiens
ggttacagatgtgag

SEQ ID NO: 1711134 - DNA, 15 bp, Homo sapiens
gttacagatgtgagt

SEQ ID NO: 1711135 - DNA, 15 bp, Homo sapiens
ttacagatgtgagtc

SEQ ID NO: 1711136 - DNA, 15 bp, Homo sapiens
tacagatgtgagtca

SEQ ID NO: 1711137 - DNA, 15 bp, Homo sapiens
acagatgtgagtcac

SEQ ID NO: 1711138 - DNA, 15 bp, Homo sapiens
cagatgtgagtcacc

SEQ ID NO: 1711139 - DNA, 15 bp, Homo sapiens
agatgtgagtcacca

SEQ ID NO: 1711140 - DNA, 15 bp, Homo sapiens
gatgtgagtcaccaa

SEQ ID NO: 1711141 - DNA, 15 bp, Homo sapiens
atgtgagtcaccaaa

SEQ ID NO: 1711142 - DNA, 15 bp, Homo sapiens
tgtgagtcaccaaac

SEQ ID NO: 1711143 - DNA, 15 bp, Homo sapiens
gtgagtcaccaaacc

SEQ ID NO: 1711144 - DNA, 15 bp, Homo sapiens
tgagtcaccaaacct

SEQ ID NO: 1711145 - DNA, 15 bp, Homo sapiens
gagtcaccaaacctg

SEQ ID NO: 1711146 - DNA, 15 bp, Homo sapiens
agtcaccaaacctgg

SEQ ID NO: 1711147 - DNA, 15 bp, Homo sapiens
gtcaccaaacctggc

SEQ ID NO: 1711148 - DNA, 15 bp, Homo sapiens
tcaccaaacctggcc

SEQ ID NO: 1711149 - DNA, 15 bp, Homo sapiens
caccaaacctggccc

SEQ ID NO: 1711150 - DNA, 15 bp, Homo sapiens
accaaacctggccca

SEQ ID NO: 1711151 - DNA, 15 bp, Homo sapiens
ccaaacctggcccac

SEQ ID NO: 1711152 - DNA, 15 bp, Homo sapiens
caaacctggcccaca

SEQ ID NO: 1711153 - DNA, 15 bp, Homo sapiens
aaacctggcccacag

SEQ ID NO: 1711154 - DNA, 15 bp, Homo sapiens
aacctggcccacagt

SEQ ID NO: 1711155 - DNA, 15 bp, Homo sapiens
acctggcccacagta

SEQ ID NO: 1711156 - DNA, 15 bp, Homo sapiens
cctggcccacagtat

SEQ ID NO: 1711157 - DNA, 15 bp, Homo sapiens
ctggcccacagtatg

SEQ ID NO: 1711158 - DNA, 15 bp, Homo sapiens
tggcccacagtatgt

SEQ ID NO: 1711159 - DNA, 15 bp, Homo sapiens
ggcccacagtatgta

SEQ ID NO: 1711160 - DNA, 15 bp, Homo sapiens
gcccacagtatgtaa

SEQ ID NO: 1711161 - DNA, 15 bp, Homo sapiens
cccacagtatgtaat

SEQ ID NO: 1711162 - DNA, 15 bp, Homo sapiens
ccacagtatgtaatt

SEQ ID NO: 1711163 - DNA, 15 bp, Homo sapiens
cacagtatgtaattt

SEQ ID NO: 1711164 - DNA, 15 bp, Homo sapiens
acagtatgtaatttc

SEQ ID NO: 1711165 - DNA, 15 bp, Homo sapiens
cagtatgtaatttct

SEQ ID NO: 1711166 - DNA, 15 bp, Homo sapiens
agtatgtaatttctt

SEQ ID NO: 1711167 - DNA, 15 bp, Homo sapiens
gtatgtaatttctta

SEQ ID NO: 1711168 - DNA, 15 bp, Homo sapiens
tatgtaatttcttac

SEQ ID NO: 1711169 - DNA, 15 bp, Homo sapiens
atgtaatttcttacc

SEQ ID NO: 1711170 - DNA, 15 bp, Homo sapiens
tgtaatttcttacct

SEQ ID NO: 1711171 - DNA, 15 bp, Homo sapiens
gtaatttcttacctt

SEQ ID NO: 1711172 - DNA, 15 bp, Homo sapiens
taatttcttaccttc

SEQ ID NO: 1711173 - DNA, 15 bp, Homo sapiens
aatttcttaccttcc

SEQ ID NO: 1711174 - DNA, 15 bp, Homo sapiens
atttcttaccttccg

SEQ ID NO: 1711175 - DNA, 15 bp, Homo sapiens
tttcttaccttccgc

SEQ ID NO: 1711176 - DNA, 15 bp, Homo sapiens
ttcttaccttccgct

SEQ ID NO: 1711177 - DNA, 15 bp, Homo sapiens
tcttaccttccgctc

SEQ ID NO: 1711178 - DNA, 15 bp, Homo sapiens
cttaccttccgctca

SEQ ID NO: 1711179 - DNA, 15 bp, Homo sapiens
ttaccttccgctcat

SEQ ID NO: 1711180 - DNA, 15 bp, Homo sapiens
taccttccgctcatc

SEQ ID NO: 1711181 - DNA, 15 bp, Homo sapiens
accttccgctcatct

SEQ ID NO: 1711182 - DNA, 15 bp, Homo sapiens
ccttccgctcatctt

SEQ ID NO: 1711183 - DNA, 15 bp, Homo sapiens
cttccgctcatcttc

SEQ ID NO: 1711184 - DNA, 15 bp, Homo sapiens
ttccgctcatcttca

SEQ ID NO: 1711185 - DNA, 15 bp, Homo sapiens
tccgctcatcttcac

SEQ ID NO: 1711186 - DNA, 15 bp, Homo sapiens
ccgctcatcttcacc

SEQ ID NO: 1711187 - DNA, 15 bp, Homo sapiens
cgctcatcttcaccc

SEQ ID NO: 1711188 - DNA, 15 bp, Homo sapiens
gctcatcttcaccca

SEQ ID NO: 1711189 - DNA, 15 bp, Homo sapiens
ctcatcttcacccaa

SEQ ID NO: 1711190 - DNA, 15 bp, Homo sapiens
tcatcttcacccaaa

SEQ ID NO: 1711191 - DNA, 15 bp, Homo sapiens
catcttcacccaaaa

SEQ ID NO: 1711192 - DNA, 15 bp, Homo sapiens
atcttcacccaaaac

SEQ ID NO: 1711193 - DNA, 15 bp, Homo sapiens
tcttcacccaaaaca

SEQ ID NO: 1711194 - DNA, 15 bp, Homo sapiens
cttcacccaaaacat

SEQ ID NO: 1711195 - DNA, 15 bp, Homo sapiens
ttcacccaaaacatt

SEQ ID NO: 1711196 - DNA, 15 bp, Homo sapiens
tcacccaaaacattc

SEQ ID NO: 1711197 - DNA, 15 bp, Homo sapiens
cacccaaaacattct

SEQ ID NO: 1711198 - DNA, 15 bp, Homo sapiens
acccaaaacattctg

SEQ ID NO: 1711199 - DNA, 15 bp, Homo sapiens
cccaaaacattctga

SEQ ID NO: 1711200 - DNA, 15 bp, Homo sapiens
ccaaaacattctgat

SEQ ID NO: 1711201 - DNA, 15 bp, Homo sapiens
caaaacattctgata

SEQ ID NO: 1711202 - DNA, 15 bp, Homo sapiens
aaaacattctgatag

SEQ ID NO: 1711203 - DNA, 15 bp, Homo sapiens
aaacattctgatagc

SEQ ID NO: 1711204 - DNA, 15 bp, Homo sapiens
aacattctgatagcc

SEQ ID NO: 1711205 - DNA, 15 bp, Homo sapiens
acattctgatagccc

SEQ ID NO: 1711206 - DNA, 15 bp, Homo sapiens
cattctgatagccct

SEQ ID NO: 1711207 - DNA, 15 bp, Homo sapiens
attctgatagccctt

SEQ ID NO: 1711208 - DNA, 15 bp, Homo sapiens
ttctgatagccctta

SEQ ID NO: 1711209 - DNA, 15 bp, Homo sapiens
tctgatagcccttat

SEQ ID NO: 1711210 - DNA, 15 bp, Homo sapiens
ctgatagcccttatt

SEQ ID NO: 1711211 - DNA, 15 bp, Homo sapiens
tgatagcccttattg

SEQ ID NO: 1711212 - DNA, 15 bp, Homo sapiens
gatagcccttattga

SEQ ID NO: 1711213 - DNA, 15 bp, Homo sapiens
atagcccttattgat

SEQ ID NO: 1711214 - DNA, 15 bp, Homo sapiens
tagcccttattgatt

SEQ ID NO: 1711215 - DNA, 15 bp, Homo sapiens
agcccttattgatta

SEQ ID NO: 1711216 - DNA, 15 bp, Homo sapiens
gcccttattgattag

SEQ ID NO: 1711217 - DNA, 15 bp, Homo sapiens
cccttattgattaga

SEQ ID NO: 1711218 - DNA, 15 bp, Homo sapiens
ccttattgattagaa

SEQ ID NO: 1711219 - DNA, 15 bp, Homo sapiens
cttattgattagaag

SEQ ID NO: 1711220 - DNA, 15 bp, Homo sapiens
ttattgattagaaga

SEQ ID NO: 1711221 - DNA, 15 bp, Homo sapiens
tattgattagaagag

SEQ ID NO: 1711222 - DNA, 15 bp, Homo sapiens
attgattagaagagg

SEQ ID NO: 1711223 - DNA, 15 bp, Homo sapiens
ttgattagaagagga

SEQ ID NO: 1711224 - DNA, 15 bp, Homo sapiens
tgattagaagaggag

SEQ ID NO: 1711225 - DNA, 15 bp, Homo sapiens
gattagaagaggagg

SEQ ID NO: 1711226 - DNA, 15 bp, Homo sapiens
attagaagaggagga

SEQ ID NO: 1711227 - DNA, 15 bp, Homo sapiens
ttagaagaggaggag

SEQ ID NO: 1711228 - DNA, 15 bp, Homo sapiens
tagaagaggaggaga

SEQ ID NO: 1711229 - DNA, 15 bp, Homo sapiens
agaagaggaggagaa

SEQ ID NO: 1711230 - DNA, 15 bp, Homo sapiens
gaagaggaggagaat

SEQ ID NO: 1711231 - DNA, 15 bp, Homo sapiens
aagaggaggagaatg

SEQ ID NO: 1711232 - DNA, 15 bp, Homo sapiens
agaggaggagaatgc

SEQ ID NO: 1711233 - DNA, 15 bp, Homo sapiens
gaggaggagaatgca

SEQ ID NO: 1711234 - DNA, 15 bp, Homo sapiens
aggaggagaatgcat

SEQ ID NO: 1711235 - DNA, 15 bp, Homo sapiens
ggaggagaatgcatt

SEQ ID NO: 1711236 - DNA, 15 bp, Homo sapiens
gaggagaatgcatta

SEQ ID NO: 1711237 - DNA, 15 bp, Homo sapiens
aggagaatgcattaa

SEQ ID NO: 1711238 - DNA, 15 bp, Homo sapiens
ggagaatgcattaag

SEQ ID NO: 1711239 - DNA, 15 bp, Homo sapiens
gagaatgcattaagt

SEQ ID NO: 1711240 - DNA, 15 bp, Homo sapiens
agaatgcattaagtt

SEQ ID NO: 1711241 - DNA, 15 bp, Homo sapiens
gaatgcattaagttt

SEQ ID NO: 1711242 - DNA, 15 bp, Homo sapiens
aatgcattaagttta

SEQ ID NO: 1711243 - DNA, 15 bp, Homo sapiens
atgcattaagtttag

SEQ ID NO: 1711244 - DNA, 15 bp, Homo sapiens
tgcattaagtttagt

SEQ ID NO: 1711245 - DNA, 15 bp, Homo sapiens
gcattaagtttagtt

SEQ ID NO: 1711246 - DNA, 15 bp, Homo sapiens
cattaagtttagttg

SEQ ID NO: 1711247 - DNA, 15 bp, Homo sapiens
attaagtttagttgg

SEQ ID NO: 1711248 - DNA, 15 bp, Homo sapiens
ttaagtttagttggc

SEQ ID NO: 1711249 - DNA, 15 bp, Homo sapiens
taagtttagttggca

SEQ ID NO: 1711250 - DNA, 15 bp, Homo sapiens
aagtttagttggcag

SEQ ID NO: 1711251 - DNA, 15 bp, Homo sapiens
agtttagttggcaga

SEQ ID NO: 1711252 - DNA, 15 bp, Homo sapiens
gtttagttggcagaa

SEQ ID NO: 1711253 - DNA, 15 bp, Homo sapiens
tttagttggcagaaa

SEQ ID NO: 1711254 - DNA, 15 bp, Homo sapiens
ttagttggcagaaat

SEQ ID NO: 1711255 - DNA, 15 bp, Homo sapiens
tagttggcagaaatt

SEQ ID NO: 1711256 - DNA, 15 bp, Homo sapiens
agttggcagaaattg

SEQ ID NO: 1711257 - DNA, 15 bp, Homo sapiens
gttggcagaaattgt

SEQ ID NO: 1711258 - DNA, 15 bp, Homo sapiens
ttggcagaaattgtg

SEQ ID NO: 1711259 - DNA, 15 bp, Homo sapiens
tggcagaaattgtgt

SEQ ID NO: 1711260 - DNA, 15 bp, Homo sapiens
ggcagaaattgtgtg

SEQ ID NO: 1711261 - DNA, 15 bp, Homo sapiens
gcagaaattgtgtga

SEQ ID NO: 1711262 - DNA, 15 bp, Homo sapiens
cagaaattgtgtgaa

SEQ ID NO: 1711263 - DNA, 15 bp, Homo sapiens
agaaattgtgtgaat

SEQ ID NO: 1711264 - DNA, 15 bp, Homo sapiens
gaaattgtgtgaatt

SEQ ID NO: 1711265 - DNA, 15 bp, Homo sapiens
aaattgtgtgaattt

SEQ ID NO: 1711266 - DNA, 15 bp, Homo sapiens
aattgtgtgaattta

SEQ ID NO: 1711267 - DNA, 15 bp, Homo sapiens
attgtgtgaatttaa

SEQ ID NO: 1711268 - DNA, 15 bp, Homo sapiens
ttgtgtgaatttaaa

SEQ ID NO: 1711269 - DNA, 15 bp, Homo sapiens
tgtgtgaatttaaaa

SEQ ID NO: 1711270 - DNA, 15 bp, Homo sapiens
gtgtgaatttaaaat

SEQ ID NO: 1711271 - DNA, 15 bp, Homo sapiens
tgtgaatttaaaatc

SEQ ID NO: 1711272 - DNA, 15 bp, Homo sapiens
gtgaatttaaaatca

SEQ ID NO: 1711273 - DNA, 15 bp, Homo sapiens
tgaatttaaaatcat

SEQ ID NO: 1711274 - DNA, 15 bp, Homo sapiens
gaatttaaaatcatg

SEQ ID NO: 1711275 - DNA, 15 bp, Homo sapiens
aatttaaaatcatgc

SEQ ID NO: 1711276 - DNA, 15 bp, Homo sapiens
atttaaaatcatgca

SEQ ID NO: 1711277 - DNA, 15 bp, Homo sapiens
tttaaaatcatgcat

SEQ ID NO: 1711278 - DNA, 15 bp, Homo sapiens
ttaaaatcatgcatt

SEQ ID NO: 1711279 - DNA, 15 bp, Homo sapiens
taaaatcatgcattt

SEQ ID NO: 1711280 - DNA, 15 bp, Homo sapiens
aaaatcatgcattta

SEQ ID NO: 1711281 - DNA, 15 bp, Homo sapiens
aaatcatgcatttag

SEQ ID NO: 1711282 - DNA, 15 bp, Homo sapiens
aatcatgcatttaga

SEQ ID NO: 1711283 - DNA, 15 bp, Homo sapiens
atcatgcatttagag

SEQ ID NO: 1711284 - DNA, 15 bp, Homo sapiens
tcatgcatttagaga

SEQ ID NO: 1711285 - DNA, 15 bp, Homo sapiens
catgcatttagagaa

SEQ ID NO: 1711286 - DNA, 15 bp, Homo sapiens
atgcatttagagaaa

SEQ ID NO: 1711287 - DNA, 15 bp, Homo sapiens
tgcatttagagaaac

SEQ ID NO: 1711288 - DNA, 15 bp, Homo sapiens
gcatttagagaaaca

SEQ ID NO: 1711289 - DNA, 15 bp, Homo sapiens
catttagagaaacat

SEQ ID NO: 1711290 - DNA, 15 bp, Homo sapiens
atttagagaaacatg

SEQ ID NO: 1711291 - DNA, 15 bp, Homo sapiens
tttagagaaacatgt

SEQ ID NO: 1711292 - DNA, 15 bp, Homo sapiens
ttagagaaacatgtg

SEQ ID NO: 1711293 - DNA, 15 bp, Homo sapiens
tagagaaacatgtgt

SEQ ID NO: 1711294 - DNA, 15 bp, Homo sapiens
agagaaacatgtgtg

SEQ ID NO: 1711295 - DNA, 15 bp, Homo sapiens
gagaaacatgtgtgg

SEQ ID NO: 1711296 - DNA, 15 bp, Homo sapiens
agaaacatgtgtggc

SEQ ID NO: 1711297 - DNA, 15 bp, Homo sapiens
gaaacatgtgtggct

SEQ ID NO: 1711298 - DNA, 15 bp, Homo sapiens
aaacatgtgtggctc

SEQ ID NO: 1711299 - DNA, 15 bp, Homo sapiens
aacatgtgtggctca

SEQ ID NO: 1711300 - DNA, 15 bp, Homo sapiens
acatgtgtggctcat

SEQ ID NO: 1711301 - DNA, 15 bp, Homo sapiens
catgtgtggctcatc

SEQ ID NO: 1711302 - DNA, 15 bp, Homo sapiens
atgtgtggctcatca

SEQ ID NO: 1711303 - DNA, 15 bp, Homo sapiens
tgtgtggctcatcaa

SEQ ID NO: 1711304 - DNA, 15 bp, Homo sapiens
gtgtggctcatcaag

SEQ ID NO: 1711305 - DNA, 15 bp, Homo sapiens
tgtggctcatcaagc

SEQ ID NO: 1711306 - DNA, 15 bp, Homo sapiens
gtggctcatcaagcc

SEQ ID NO: 1711307 - DNA, 15 bp, Homo sapiens
tggctcatcaagcca

SEQ ID NO: 1711308 - DNA, 15 bp, Homo sapiens
ggctcatcaagccat

SEQ ID NO: 1711309 - DNA, 15 bp, Homo sapiens
gctcatcaagccatt

SEQ ID NO: 1711310 - DNA, 15 bp, Homo sapiens
ctcatcaagccatta

SEQ ID NO: 1711311 - DNA, 15 bp, Homo sapiens
tcatcaagccattaa

SEQ ID NO: 1711312 - DNA, 15 bp, Homo sapiens
catcaagccattaag

SEQ ID NO: 1711313 - DNA, 15 bp, Homo sapiens
atcaagccattaaga

SEQ ID NO: 1711314 - DNA, 15 bp, Homo sapiens
tcaagccattaagaa

SEQ ID NO: 1711315 - DNA, 15 bp, Homo sapiens
caagccattaagaaa

SEQ ID NO: 1711316 - DNA, 15 bp, Homo sapiens
aagccattaagaaaa

SEQ ID NO: 1711317 - DNA, 15 bp, Homo sapiens
agccattaagaaaac

SEQ ID NO: 1711318 - DNA, 15 bp, Homo sapiens
gccattaagaaaaca

SEQ ID NO: 1711319 - DNA, 15 bp, Homo sapiens
ccattaagaaaacaa

SEQ ID NO: 1711320 - DNA, 15 bp, Homo sapiens
cattaagaaaacaaa

SEQ ID NO: 1711321 - DNA, 15 bp, Homo sapiens
attaagaaaacaaaa

SEQ ID NO: 1711322 - DNA, 15 bp, Homo sapiens
ttaagaaaacaaaaa

SEQ ID NO: 1711323 - DNA, 15 bp, Homo sapiens
taagaaaacaaaaaa

SEQ ID NO: 1711324 - DNA, 15 bp, Homo sapiens
aagaaaacaaaaaag

SEQ ID NO: 1711325 - DNA, 15 bp, Homo sapiens
agaaaacaaaaaaga

SEQ ID NO: 1711326 - DNA, 15 bp, Homo sapiens
gaaaacaaaaaagag

SEQ ID NO: 1711327 - DNA, 15 bp, Homo sapiens
aaaacaaaaaagagg

SEQ ID NO: 1711328 - DNA, 15 bp, Homo sapiens
aaacaaaaaagagga

SEQ ID NO: 1711329 - DNA, 15 bp, Homo sapiens
aacaaaaaagaggaa

SEQ ID NO: 1711330 - DNA, 15 bp, Homo sapiens
acaaaaaagaggaaa

SEQ ID NO: 1711331 - DNA, 15 bp, Homo sapiens
caaaaaagaggaaac

SEQ ID NO: 1711332 - DNA, 15 bp, Homo sapiens
aaaaaagaggaaact

SEQ ID NO: 1711333 - DNA, 15 bp, Homo sapiens
aaaaagaggaaacta

SEQ ID NO: 1711334 - DNA, 15 bp, Homo sapiens
aaaagaggaaactac

SEQ ID NO: 1711335 - DNA, 15 bp, Homo sapiens
aaagaggaaactaca

SEQ ID NO: 1711336 - DNA, 15 bp, Homo sapiens
aagaggaaactacaa

SEQ ID NO: 1711337 - DNA, 15 bp, Homo sapiens
agaggaaactacaaa

SEQ ID NO: 1711338 - DNA, 15 bp, Homo sapiens
gaggaaactacaaaa

SEQ ID NO: 1711339 - DNA, 15 bp, Homo sapiens
aggaaactacaaaat

SEQ ID NO: 1711340 - DNA, 15 bp, Homo sapiens
ggaaactacaaaatg

SEQ ID NO: 1711341 - DNA, 15 bp, Homo sapiens
gaaactacaaaatgt

SEQ ID NO: 1711342 - DNA, 15 bp, Homo sapiens
aaactacaaaatgtt

SEQ ID NO: 1711343 - DNA, 15 bp, Homo sapiens
aactacaaaatgttt

SEQ ID NO: 1711344 - DNA, 15 bp, Homo sapiens
actacaaaatgtttg

SEQ ID NO: 1711345 - DNA, 15 bp, Homo sapiens
ctacaaaatgtttgc

SEQ ID NO: 1711346 - DNA, 15 bp, Homo sapiens
tacaaaatgtttgca

SEQ ID NO: 1711347 - DNA, 15 bp, Homo sapiens
acaaaatgtttgcat

SEQ ID NO: 1711348 - DNA, 15 bp, Homo sapiens
caaaatgtttgcatt

SEQ ID NO: 1711349 - DNA, 15 bp, Homo sapiens
aaaatgtttgcattc

SEQ ID NO: 1711350 - DNA, 15 bp, Homo sapiens
aaatgtttgcattcc

SEQ ID NO: 1711351 - DNA, 15 bp, Homo sapiens
aatgtttgcattcct

SEQ ID NO: 1711352 - DNA, 15 bp, Homo sapiens
atgtttgcattcctg

SEQ ID NO: 1711353 - DNA, 15 bp, Homo sapiens
tgtttgcattcctgt

SEQ ID NO: 1711354 - DNA, 15 bp, Homo sapiens
gtttgcattcctgta

SEQ ID NO: 1711355 - DNA, 15 bp, Homo sapiens
tttgcattcctgtag

SEQ ID NO: 1711356 - DNA, 15 bp, Homo sapiens
ttgcattcctgtagc

SEQ ID NO: 1711357 - DNA, 15 bp, Homo sapiens
tgcattcctgtagcc

SEQ ID NO: 1711358 - DNA, 15 bp, Homo sapiens
gcattcctgtagccc

SEQ ID NO: 1711359 - DNA, 15 bp, Homo sapiens
cattcctgtagccca

SEQ ID NO: 1711360 - DNA, 15 bp, Homo sapiens
attcctgtagcccac

SEQ ID NO: 1711361 - DNA, 15 bp, Homo sapiens
ttcctgtagcccaca

SEQ ID NO: 1711362 - DNA, 15 bp, Homo sapiens
tcctgtagcccacaa

SEQ ID NO: 1711363 - DNA, 15 bp, Homo sapiens
cctgtagcccacaag

SEQ ID NO: 1711364 - DNA, 15 bp, Homo sapiens
ctgtagcccacaaga

SEQ ID NO: 1711365 - DNA, 15 bp, Homo sapiens
tgtagcccacaagag

SEQ ID NO: 1711366 - DNA, 15 bp, Homo sapiens
gtagcccacaagaga

SEQ ID NO: 1711367 - DNA, 15 bp, Homo sapiens
tagcccacaagagac

SEQ ID NO: 1711368 - DNA, 15 bp, Homo sapiens
agcccacaagagaca

SEQ ID NO: 1711369 - DNA, 15 bp, Homo sapiens
gcccacaagagacaa

SEQ ID NO: 1711370 - DNA, 15 bp, Homo sapiens
cccacaagagacaaa

SEQ ID NO: 1711371 - DNA, 15 bp, Homo sapiens
ccacaagagacaaat

SEQ ID NO: 1711372 - DNA, 15 bp, Homo sapiens
cacaagagacaaatc

SEQ ID NO: 1711373 - DNA, 15 bp, Homo sapiens
acaagagacaaatct

SEQ ID NO: 1711374 - DNA, 15 bp, Homo sapiens
caagagacaaatcta

SEQ ID NO: 1711375 - DNA, 15 bp, Homo sapiens
aagagacaaatctag

SEQ ID NO: 1711376 - DNA, 15 bp, Homo sapiens
agagacaaatctaga

SEQ ID NO: 1711377 - DNA, 15 bp, Homo sapiens
gagacaaatctagaa

SEQ ID NO: 1711378 - DNA, 15 bp, Homo sapiens
agacaaatctagaac

SEQ ID NO: 1711379 - DNA, 15 bp, Homo sapiens
gacaaatctagaaca

SEQ ID NO: 1711380 - DNA, 15 bp, Homo sapiens
caaatctagaacaat

SEQ ID NO: 1711381 - DNA, 15 bp, Homo sapiens
aaatctagaacaatg

SEQ ID NO: 1711382 - DNA, 15 bp, Homo sapiens
aatctagaacaatgc

SEQ ID NO: 1711383 - DNA, 15 bp, Homo sapiens
atctagaacaatgct

SEQ ID NO: 1711384 - DNA, 15 bp, Homo sapiens
tctagaacaatgctg

SEQ ID NO: 1711385 - DNA, 15 bp, Homo sapiens
ctagaacaatgctgg

SEQ ID NO: 1711386 - DNA, 15 bp, Homo sapiens
tagaacaatgctggg

SEQ ID NO: 1711387 - DNA, 15 bp, Homo sapiens
agaacaatgctgggg

SEQ ID NO: 1711388 - DNA, 15 bp, Homo sapiens
gaacaatgctggggt

SEQ ID NO: 1711389 - DNA, 15 bp, Homo sapiens
aacaatgctggggtc

SEQ ID NO: 1711390 - DNA, 15 bp, Homo sapiens
acaatgctggggtct

SEQ ID NO: 1711391 - DNA, 15 bp, Homo sapiens
caatgctggggtctg

SEQ ID NO: 1711392 - DNA, 15 bp, Homo sapiens
aatgctggggtctgg

SEQ ID NO: 1711393 - DNA, 15 bp, Homo sapiens
atgctggggtctggt

SEQ ID NO: 1711394 - DNA, 15 bp, Homo sapiens
tgctggggtctggtc

SEQ ID NO: 1711395 - DNA, 15 bp, Homo sapiens
gctggggtctggtca

SEQ ID NO: 1711396 - DNA, 15 bp, Homo sapiens
ctggggtctggtcaa

SEQ ID NO: 1711397 - DNA, 15 bp, Homo sapiens
tggggtctggtcaag

SEQ ID NO: 1711398 - DNA, 15 bp, Homo sapiens
ggggtctggtcaagt

SEQ ID NO: 1711399 - DNA, 15 bp, Homo sapiens
gggtctggtcaagta

SEQ ID NO: 1711400 - DNA, 15 bp, Homo sapiens
ggtctggtcaagtag

SEQ ID NO: 1711401 - DNA, 15 bp, Homo sapiens
gtctggtcaagtagg

SEQ ID NO: 1711402 - DNA, 15 bp, Homo sapiens
tctggtcaagtaggg

SEQ ID NO: 1711403 - DNA, 15 bp, Homo sapiens
ctggtcaagtaggga

SEQ ID NO: 1711404 - DNA, 15 bp, Homo sapiens
tggtcaagtagggaa

SEQ ID NO: 1711405 - DNA, 15 bp, Homo sapiens
ggtcaagtagggaaa

SEQ ID NO: 1711406 - DNA, 15 bp, Homo sapiens
gtcaagtagggaaag

SEQ ID NO: 1711407 - DNA, 15 bp, Homo sapiens
tcaagtagggaaagc

SEQ ID NO: 1711408 - DNA, 15 bp, Homo sapiens
caagtagggaaagct

SEQ ID NO: 1711409 - DNA, 15 bp, Homo sapiens
aagtagggaaagctc

SEQ ID NO: 1711410 - DNA, 15 bp, Homo sapiens
agtagggaaagctct

SEQ ID NO: 1711411 - DNA, 15 bp, Homo sapiens
gtagggaaagctctc

SEQ ID NO: 1711412 - DNA, 15 bp, Homo sapiens
tagggaaagctctca

SEQ ID NO: 1711413 - DNA, 15 bp, Homo sapiens
agggaaagctctcag

SEQ ID NO: 1711414 - DNA, 15 bp, Homo sapiens
gggaaagctctcagt

SEQ ID NO: 1711415 - DNA, 15 bp, Homo sapiens
ggaaagctctcagta

SEQ ID NO: 1711416 - DNA, 15 bp, Homo sapiens
gaaagctctcagtaa

SEQ ID NO: 1711417 - DNA, 15 bp, Homo sapiens
aaagctctcagtaag

SEQ ID NO: 1711418 - DNA, 15 bp, Homo sapiens
aagctctcagtaaga

SEQ ID NO: 1711419 - DNA, 15 bp, Homo sapiens
agctctcagtaagac

SEQ ID NO: 1711420 - DNA, 15 bp, Homo sapiens
gctctcagtaagacc

SEQ ID NO: 1711421 - DNA, 15 bp, Homo sapiens
ctctcagtaagacca

SEQ ID NO: 1711422 - DNA, 15 bp, Homo sapiens
tctcagtaagaccaa

SEQ ID NO: 1711423 - DNA, 15 bp, Homo sapiens
ctcagtaagaccaag

SEQ ID NO: 1711424 - DNA, 15 bp, Homo sapiens
tcagtaagaccaagc

SEQ ID NO: 1711425 - DNA, 15 bp, Homo sapiens
cagtaagaccaagca

SEQ ID NO: 1711426 - DNA, 15 bp, Homo sapiens
agtaagaccaagcac

SEQ ID NO: 1711427 - DNA, 15 bp, Homo sapiens
gtaagaccaagcaca

SEQ ID NO: 1711428 - DNA, 15 bp, Homo sapiens
taagaccaagcacaa

SEQ ID NO: 1711429 - DNA, 15 bp, Homo sapiens
aagaccaagcacaaa

SEQ ID NO: 1711430 - DNA, 15 bp, Homo sapiens
agaccaagcacaaac

SEQ ID NO: 1711431 - DNA, 15 bp, Homo sapiens
gaccaagcacaaacc

SEQ ID NO: 1711432 - DNA, 15 bp, Homo sapiens
accaagcacaaaccc

SEQ ID NO: 1711433 - DNA, 15 bp, Homo sapiens
ccaagcacaaacccc

SEQ ID NO: 1711434 - DNA, 15 bp, Homo sapiens
caagcacaaacccca

SEQ ID NO: 1711435 - DNA, 15 bp, Homo sapiens
aagcacaaaccccac

SEQ ID NO: 1711436 - DNA, 15 bp, Homo sapiens
agcacaaaccccact

SEQ ID NO: 1711437 - DNA, 15 bp, Homo sapiens
gcacaaaccccactt

SEQ ID NO: 1711438 - DNA, 15 bp, Homo sapiens
cacaaaccccacttc

SEQ ID NO: 1711439 - DNA, 15 bp, Homo sapiens
acaaaccccacttct

SEQ ID NO: 1711440 - DNA, 15 bp, Homo sapiens
caaaccccacttctg

SEQ ID NO: 1711441 - DNA, 15 bp, Homo sapiens
aaaccccacttctgg

SEQ ID NO: 1711442 - DNA, 15 bp, Homo sapiens
aaccccacttctggt

SEQ ID NO: 1711443 - DNA, 15 bp, Homo sapiens
accccacttctggtt

SEQ ID NO: 1711444 - DNA, 15 bp, Homo sapiens
ccccacttctggttt

SEQ ID NO: 1711445 - DNA, 15 bp, Homo sapiens
cccacttctggtttc

SEQ ID NO: 1711446 - DNA, 15 bp, Homo sapiens
ccacttctggtttcc

SEQ ID NO: 1711447 - DNA, 15 bp, Homo sapiens
cacttctggtttcct

SEQ ID NO: 1711448 - DNA, 15 bp, Homo sapiens
acttctggtttcctt

SEQ ID NO: 1711449 - DNA, 15 bp, Homo sapiens
cttctggtttccttg

SEQ ID NO: 1711450 - DNA, 15 bp, Homo sapiens
ttctggtttccttgg

SEQ ID NO: 1711451 - DNA, 15 bp, Homo sapiens
tctggtttccttggt

SEQ ID NO: 1711452 - DNA, 15 bp, Homo sapiens
ctggtttccttggtt

SEQ ID NO: 1711453 - DNA, 15 bp, Homo sapiens
tggtttccttggttt

SEQ ID NO: 1711454 - DNA, 15 bp, Homo sapiens
ggtttccttggtttg

SEQ ID NO: 1711455 - DNA, 15 bp, Homo sapiens
gtttccttggtttgg

SEQ ID NO: 1711456 - DNA, 15 bp, Homo sapiens
tttccttggtttggg

SEQ ID NO: 1711457 - DNA, 15 bp, Homo sapiens
ttccttggtttgggg

SEQ ID NO: 1711458 - DNA, 15 bp, Homo sapiens
tccttggtttggggc

SEQ ID NO: 1711459 - DNA, 15 bp, Homo sapiens
ccttggtttggggct

SEQ ID NO: 1711460 - DNA, 15 bp, Homo sapiens
cttggtttggggctg

SEQ ID NO: 1711461 - DNA, 15 bp, Homo sapiens
ttggtttggggctgt

SEQ ID NO: 1711462 - DNA, 15 bp, Homo sapiens
tggtttggggctgtc

SEQ ID NO: 1711463 - DNA, 15 bp, Homo sapiens
ggtttggggctgtct

SEQ ID NO: 1711464 - DNA, 15 bp, Homo sapiens
gtttggggctgtctc

SEQ ID NO: 1711465 - DNA, 15 bp, Homo sapiens
tttggggctgtctca

SEQ ID NO: 1711466 - DNA, 15 bp, Homo sapiens
ttggggctgtctcat

SEQ ID NO: 1711467 - DNA, 15 bp, Homo sapiens
tggggctgtctcatg

SEQ ID NO: 1711468 - DNA, 15 bp, Homo sapiens
ggggctgtctcatgt

SEQ ID NO: 1711469 - DNA, 15 bp, Homo sapiens
gggctgtctcatgtt

SEQ ID NO: 1711470 - DNA, 15 bp, Homo sapiens
ggctgtctcatgtta

SEQ ID NO: 1711471 - DNA, 15 bp, Homo sapiens
gctgtctcatgttaa

SEQ ID NO: 1711472 - DNA, 15 bp, Homo sapiens
ctgtctcatgttaat

SEQ ID NO: 1711473 - DNA, 15 bp, Homo sapiens
tgtctcatgttaatg

SEQ ID NO: 1711474 - DNA, 15 bp, Homo sapiens
gtctcatgttaatga

SEQ ID NO: 1711475 - DNA, 15 bp, Homo sapiens
tctcatgttaatgat

SEQ ID NO: 1711476 - DNA, 15 bp, Homo sapiens
ctcatgttaatgata

SEQ ID NO: 1711477 - DNA, 15 bp, Homo sapiens
tcatgttaatgatat

SEQ ID NO: 1711478 - DNA, 15 bp, Homo sapiens
catgttaatgatatt

SEQ ID NO: 1711479 - DNA, 15 bp, Homo sapiens
atgttaatgatattt

SEQ ID NO: 1711480 - DNA, 15 bp, Homo sapiens
tgttaatgatatttt

SEQ ID NO: 1711481 - DNA, 15 bp, Homo sapiens
gttaatgatattttt

SEQ ID NO: 1711482 - DNA, 15 bp, Homo sapiens
ttaatgatatttttc

SEQ ID NO: 1711483 - DNA, 15 bp, Homo sapiens
taatgatatttttca

SEQ ID NO: 1711484 - DNA, 15 bp, Homo sapiens
aatgatatttttcat

SEQ ID NO: 1711485 - DNA, 15 bp, Homo sapiens
atgatatttttcatg

SEQ ID NO: 1711486 - DNA, 15 bp, Homo sapiens
tgatatttttcatga

SEQ ID NO: 1711487 - DNA, 15 bp, Homo sapiens
gatatttttcatgag

SEQ ID NO: 1711488 - DNA, 15 bp, Homo sapiens
atatttttcatgaga

SEQ ID NO: 1711489 - DNA, 15 bp, Homo sapiens
tatttttcatgagaa

SEQ ID NO: 1711490 - DNA, 15 bp, Homo sapiens
atttttcatgagaaa

SEQ ID NO: 1711491 - DNA, 15 bp, Homo sapiens
tttttcatgagaaaa

SEQ ID NO: 1711492 - DNA, 15 bp, Homo sapiens
ttttcatgagaaaaa

SEQ ID NO: 1711493 - DNA, 15 bp, Homo sapiens
tttcatgagaaaaac

SEQ ID NO: 1711494 - DNA, 15 bp, Homo sapiens
ttcatgagaaaaacc

SEQ ID NO: 1711495 - DNA, 15 bp, Homo sapiens
tcatgagaaaaacca

SEQ ID NO: 1711496 - DNA, 15 bp, Homo sapiens
catgagaaaaaccac

SEQ ID NO: 1711497 - DNA, 15 bp, Homo sapiens
atgagaaaaaccaca

SEQ ID NO: 1711498 - DNA, 15 bp, Homo sapiens
tgagaaaaaccacat

SEQ ID NO: 1711499 - DNA, 15 bp, Homo sapiens
gagaaaaaccacatg

SEQ ID NO: 1711500 - DNA, 15 bp, Homo sapiens
agaaaaaccacatgc

SEQ ID NO: 1711501 - DNA, 15 bp, Homo sapiens
gaaaaaccacatgca

SEQ ID NO: 1711502 - DNA, 15 bp, Homo sapiens
aaaaaccacatgcaa

SEQ ID NO: 1711503 - DNA, 15 bp, Homo sapiens
aaaaccacatgcaaa

SEQ ID NO: 1711504 - DNA, 15 bp, Homo sapiens
aaaccacatgcaaat

SEQ ID NO: 1711505 - DNA, 15 bp, Homo sapiens
aaccacatgcaaatg

SEQ ID NO: 1711506 - DNA, 15 bp, Homo sapiens
accacatgcaaatga

SEQ ID NO: 1711507 - DNA, 15 bp, Homo sapiens
ccacatgcaaatgaa

SEQ ID NO: 1711508 - DNA, 15 bp, Homo sapiens
cacatgcaaatgaaa

SEQ ID NO: 1711509 - DNA, 15 bp, Homo sapiens
acatgcaaatgaaac

SEQ ID NO: 1711510 - DNA, 15 bp, Homo sapiens
catgcaaatgaaaca

SEQ ID NO: 1711511 - DNA, 15 bp, Homo sapiens
atgcaaatgaaacaa

SEQ ID NO: 1711512 - DNA, 15 bp, Homo sapiens
tgcaaatgaaacaat

SEQ ID NO: 1711513 - DNA, 15 bp, Homo sapiens
gcaaatgaaacaatt

SEQ ID NO: 1711514 - DNA, 15 bp, Homo sapiens
caaatgaaacaattc

SEQ ID NO: 1711515 - DNA, 15 bp, Homo sapiens
aaatgaaacaattcg

SEQ ID NO: 1711516 - DNA, 15 bp, Homo sapiens
aatgaaacaattcgt

SEQ ID NO: 1711517 - DNA, 15 bp, Homo sapiens
atgaaacaattcgtt

SEQ ID NO: 1711518 - DNA, 15 bp, Homo sapiens
tgaaacaattcgttg

SEQ ID NO: 1711519 - DNA, 15 bp, Homo sapiens
gaaacaattcgttgt

SEQ ID NO: 1711520 - DNA, 15 bp, Homo sapiens
aaacaattcgttgtc

SEQ ID NO: 1711521 - DNA, 15 bp, Homo sapiens
aacaattcgttgtcc

SEQ ID NO: 1711522 - DNA, 15 bp, Homo sapiens
acaattcgttgtccc

SEQ ID NO: 1711523 - DNA, 15 bp, Homo sapiens
caattcgttgtcccc

SEQ ID NO: 1711524 - DNA, 15 bp, Homo sapiens
aattcgttgtcccca

SEQ ID NO: 1711525 - DNA, 15 bp, Homo sapiens
attcgttgtccccac

SEQ ID NO: 1711526 - DNA, 15 bp, Homo sapiens
ttcgttgtccccact

SEQ ID NO: 1711527 - DNA, 15 bp, Homo sapiens
tcgttgtccccactt

SEQ ID NO: 1711528 - DNA, 15 bp, Homo sapiens
cgttgtccccacttg

SEQ ID NO: 1711529 - DNA, 15 bp, Homo sapiens
gttgtccccacttgg

SEQ ID NO: 1711530 - DNA, 15 bp, Homo sapiens
ttgtccccacttgga

SEQ ID NO: 1711531 - DNA, 15 bp, Homo sapiens
tgtccccacttggag

SEQ ID NO: 1711532 - DNA, 15 bp, Homo sapiens
gtccccacttggagg

SEQ ID NO: 1711533 - DNA, 15 bp, Homo sapiens
tccccacttggaggt

SEQ ID NO: 1711534 - DNA, 15 bp, Homo sapiens
ccccacttggaggtg

SEQ ID NO: 1711535 - DNA, 15 bp, Homo sapiens
cccacttggaggtgc

SEQ ID NO: 1711536 - DNA, 15 bp, Homo sapiens
ccacttggaggtgca

SEQ ID NO: 1711537 - DNA, 15 bp, Homo sapiens
cacttggaggtgcag

SEQ ID NO: 1711538 - DNA, 15 bp, Homo sapiens
acttggaggtgcagt

SEQ ID NO: 1711539 - DNA, 15 bp, Homo sapiens
cttggaggtgcagtg

SEQ ID NO: 1711540 - DNA, 15 bp, Homo sapiens
ttggaggtgcagtgg

SEQ ID NO: 1711541 - DNA, 15 bp, Homo sapiens
tggaggtgcagtggt

SEQ ID NO: 1711542 - DNA, 15 bp, Homo sapiens
ggaggtgcagtggtg

SEQ ID NO: 1711543 - DNA, 15 bp, Homo sapiens
gaggtgcagtggtgg

SEQ ID NO: 1711544 - DNA, 15 bp, Homo sapiens
aggtgcagtggtggt

SEQ ID NO: 1711545 - DNA, 15 bp, Homo sapiens
ggtgcagtggtggtg

SEQ ID NO: 1711546 - DNA, 15 bp, Homo sapiens
gtgcagtggtggtgg

SEQ ID NO: 1711547 - DNA, 15 bp, Homo sapiens
tgcagtggtggtggt

SEQ ID NO: 1711548 - DNA, 15 bp, Homo sapiens
gcagtggtggtggtg

SEQ ID NO: 1711549 - DNA, 15 bp, Homo sapiens
cagtggtggtggtgg

SEQ ID NO: 1711550 - DNA, 15 bp, Homo sapiens
agtggtggtggtggg

SEQ ID NO: 1711551 - DNA, 15 bp, Homo sapiens
gtggtggtggtgggg

SEQ ID NO: 1711552 - DNA, 15 bp, Homo sapiens
tggtggtggtgggga

SEQ ID NO: 1711553 - DNA, 15 bp, Homo sapiens
ggtggtggtggggag

SEQ ID NO: 1711554 - DNA, 15 bp, Homo sapiens
gtggtggtggggaga

SEQ ID NO: 1711555 - DNA, 15 bp, Homo sapiens
tggtggtggggagaa

SEQ ID NO: 1711556 - DNA, 15 bp, Homo sapiens
ggtggtggggagaac

SEQ ID NO: 1711557 - DNA, 15 bp, Homo sapiens
gtggtggggagaact

SEQ ID NO: 1711558 - DNA, 15 bp, Homo sapiens
tggtggggagaacta

SEQ ID NO: 1711559 - DNA, 15 bp, Homo sapiens
ggtggggagaactag

SEQ ID NO: 1711560 - DNA, 15 bp, Homo sapiens
gtggggagaactagg

SEQ ID NO: 1711561 - DNA, 15 bp, Homo sapiens
tggggagaactaggg

SEQ ID NO: 1711562 - DNA, 15 bp, Homo sapiens
ggggagaactaggga

SEQ ID NO: 1711563 - DNA, 15 bp, Homo sapiens
gggagaactagggaa

SEQ ID NO: 1711564 - DNA, 15 bp, Homo sapiens
ggagaactagggaag

SEQ ID NO: 1711565 - DNA, 15 bp, Homo sapiens
gagaactagggaagg

SEQ ID NO: 1711566 - DNA, 15 bp, Homo sapiens
agaactagggaaggg

SEQ ID NO: 1711567 - DNA, 15 bp, Homo sapiens
gaactagggaagggt

SEQ ID NO: 1711568 - DNA, 15 bp, Homo sapiens
aactagggaagggtt

SEQ ID NO: 1711569 - DNA, 15 bp, Homo sapiens
actagggaagggttt

SEQ ID NO: 1711570 - DNA, 15 bp, Homo sapiens
ctagggaagggtttg

SEQ ID NO: 1711571 - DNA, 15 bp, Homo sapiens
tagggaagggtttgt

SEQ ID NO: 1711572 - DNA, 15 bp, Homo sapiens
agggaagggtttgtg

SEQ ID NO: 1711573 - DNA, 15 bp, Homo sapiens
gggaagggtttgtgc

SEQ ID NO: 1711574 - DNA, 15 bp, Homo sapiens
ggaagggtttgtgca

SEQ ID NO: 1711575 - DNA, 15 bp, Homo sapiens
gaagggtttgtgcat

SEQ ID NO: 1711576 - DNA, 15 bp, Homo sapiens
aagggtttgtgcatc

SEQ ID NO: 1711577 - DNA, 15 bp, Homo sapiens
agggtttgtgcatca

SEQ ID NO: 1711578 - DNA, 15 bp, Homo sapiens
gggtttgtgcatcag

SEQ ID NO: 1711579 - DNA, 15 bp, Homo sapiens
ggtttgtgcatcaga

SEQ ID NO: 1711580 - DNA, 15 bp, Homo sapiens
gtttgtgcatcagac

SEQ ID NO: 1711581 - DNA, 15 bp, Homo sapiens
tttgtgcatcagaca

SEQ ID NO: 1711582 - DNA, 15 bp, Homo sapiens
ttgtgcatcagacaa

SEQ ID NO: 1711583 - DNA, 15 bp, Homo sapiens
tgtgcatcagacaaa

SEQ ID NO: 1711584 - DNA, 15 bp, Homo sapiens
gtgcatcagacaaag

SEQ ID NO: 1711585 - DNA, 15 bp, Homo sapiens
tgcatcagacaaagg

SEQ ID NO: 1711586 - DNA, 15 bp, Homo sapiens
gcatcagacaaaggt

SEQ ID NO: 1711587 - DNA, 15 bp, Homo sapiens
catcagacaaaggtt

SEQ ID NO: 1711588 - DNA, 15 bp, Homo sapiens
atcagacaaaggttg

SEQ ID NO: 1711589 - DNA, 15 bp, Homo sapiens
tcagacaaaggttgg

SEQ ID NO: 1711590 - DNA, 15 bp, Homo sapiens
cagacaaaggttggg

SEQ ID NO: 1711591 - DNA, 15 bp, Homo sapiens
agacaaaggttggga

SEQ ID NO: 1711592 - DNA, 15 bp, Homo sapiens
gacaaaggttgggat

SEQ ID NO: 1711593 - DNA, 15 bp, Homo sapiens
acaaaggttgggatt

SEQ ID NO: 1711594 - DNA, 15 bp, Homo sapiens
caaaggttgggatta

SEQ ID NO: 1711595 - DNA, 15 bp, Homo sapiens
aaaggttgggattac

SEQ ID NO: 1711596 - DNA, 15 bp, Homo sapiens
aaggttgggattaca

SEQ ID NO: 1711597 - DNA, 15 bp, Homo sapiens
aggttgggattacaa

SEQ ID NO: 1711598 - DNA, 15 bp, Homo sapiens
ggttgggattacaag

SEQ ID NO: 1711599 - DNA, 15 bp, Homo sapiens
gttgggattacaagg

SEQ ID NO: 1711600 - DNA, 15 bp, Homo sapiens
ttgggattacaaggg

SEQ ID NO: 1711601 - DNA, 15 bp, Homo sapiens
tgggattacaagggt

SEQ ID NO: 1711602 - DNA, 15 bp, Homo sapiens
gggattacaagggtt

SEQ ID NO: 1711603 - DNA, 15 bp, Homo sapiens
ggattacaagggttg

SEQ ID NO: 1711604 - DNA, 15 bp, Homo sapiens
gattacaagggttgt

SEQ ID NO: 1711605 - DNA, 15 bp, Homo sapiens
attacaagggttgta

SEQ ID NO: 1711606 - DNA, 15 bp, Homo sapiens
ttacaagggttgtag

SEQ ID NO: 1711607 - DNA, 15 bp, Homo sapiens
tacaagggttgtaga

SEQ ID NO: 1711608 - DNA, 15 bp, Homo sapiens
acaagggttgtagat

SEQ ID NO: 1711609 - DNA, 15 bp, Homo sapiens
caagggttgtagatg

SEQ ID NO: 1711610 - DNA, 15 bp, Homo sapiens
aagggttgtagatga

SEQ ID NO: 1711611 - DNA, 15 bp, Homo sapiens
agggttgtagatgaa

SEQ ID NO: 1711612 - DNA, 15 bp, Homo sapiens
gggttgtagatgaac

SEQ ID NO: 1711613 - DNA, 15 bp, Homo sapiens
ggttgtagatgaacg

SEQ ID NO: 1711614 - DNA, 15 bp, Homo sapiens
gttgtagatgaacga

SEQ ID NO: 1711615 - DNA, 15 bp, Homo sapiens
ttgtagatgaacgag

SEQ ID NO: 1711616 - DNA, 15 bp, Homo sapiens
tgtagatgaacgaga

SEQ ID NO: 1711617 - DNA, 15 bp, Homo sapiens
gtagatgaacgagat

SEQ ID NO: 1711618 - DNA, 15 bp, Homo sapiens
tagatgaacgagatg

SEQ ID NO: 1711619 - DNA, 15 bp, Homo sapiens
agatgaacgagatgt

SEQ ID NO: 1711620 - DNA, 15 bp, Homo sapiens
gatgaacgagatgtg

SEQ ID NO: 1711621 - DNA, 15 bp, Homo sapiens
atgaacgagatgtgc

SEQ ID NO: 1711622 - DNA, 15 bp, Homo sapiens
tgaacgagatgtgcc

SEQ ID NO: 1711623 - DNA, 15 bp, Homo sapiens
gaacgagatgtgcct

SEQ ID NO: 1711624 - DNA, 15 bp, Homo sapiens
aacgagatgtgcctt

SEQ ID NO: 1711625 - DNA, 15 bp, Homo sapiens
acgagatgtgccttt

SEQ ID NO: 1711626 - DNA, 15 bp, Homo sapiens
cgagatgtgccttta

SEQ ID NO: 1711627 - DNA, 15 bp, Homo sapiens
gagatgtgcctttag

SEQ ID NO: 1711628 - DNA, 15 bp, Homo sapiens
agatgtgcctttagt

SEQ ID NO: 1711629 - DNA, 15 bp, Homo sapiens
gatgtgcctttagtt

SEQ ID NO: 1711630 - DNA, 15 bp, Homo sapiens
atgtgcctttagtta

SEQ ID NO: 1711631 - DNA, 15 bp, Homo sapiens
tgtgcctttagttac

SEQ ID NO: 1711632 - DNA, 15 bp, Homo sapiens
gtgcctttagttaca

SEQ ID NO: 1711633 - DNA, 15 bp, Homo sapiens
tgcctttagttacag

SEQ ID NO: 1711634 - DNA, 15 bp, Homo sapiens
gcctttagttacagc

SEQ ID NO: 1711635 - DNA, 15 bp, Homo sapiens
cctttagttacagcc

SEQ ID NO: 1711636 - DNA, 15 bp, Homo sapiens
ctttagttacagcca

SEQ ID NO: 1711637 - DNA, 15 bp, Homo sapiens
tttagttacagccac

SEQ ID NO: 1711638 - DNA, 15 bp, Homo sapiens
ttagttacagccact

SEQ ID NO: 1711639 - DNA, 15 bp, Homo sapiens
tagttacagccactt

SEQ ID NO: 1711640 - DNA, 15 bp, Homo sapiens
agttacagccacttc

SEQ ID NO: 1711641 - DNA, 15 bp, Homo sapiens
gttacagccacttct

SEQ ID NO: 1711642 - DNA, 15 bp, Homo sapiens
ttacagccacttctt

SEQ ID NO: 1711643 - DNA, 15 bp, Homo sapiens
tacagccacttcttg

SEQ ID NO: 1711644 - DNA, 15 bp, Homo sapiens
acagccacttcttga

SEQ ID NO: 1711645 - DNA, 15 bp, Homo sapiens
cagccacttcttgag

SEQ ID NO: 1711646 - DNA, 15 bp, Homo sapiens
agccacttcttgagt

SEQ ID NO: 1711647 - DNA, 15 bp, Homo sapiens
gccacttcttgagtg

SEQ ID NO: 1711648 - DNA, 15 bp, Homo sapiens
ccacttcttgagtgc

SEQ ID NO: 1711649 - DNA, 15 bp, Homo sapiens
cacttcttgagtgct

SEQ ID NO: 1711650 - DNA, 15 bp, Homo sapiens
acttcttgagtgctg

SEQ ID NO: 1711651 - DNA, 15 bp, Homo sapiens
cttcttgagtgctgt

SEQ ID NO: 1711652 - DNA, 15 bp, Homo sapiens
ttcttgagtgctgta

SEQ ID NO: 1711653 - DNA, 15 bp, Homo sapiens
tcttgagtgctgtat

SEQ ID NO: 1711654 - DNA, 15 bp, Homo sapiens
cttgagtgctgtatg

SEQ ID NO: 1711655 - DNA, 15 bp, Homo sapiens
ttgagtgctgtatgt

SEQ ID NO: 1711656 - DNA, 15 bp, Homo sapiens
tgagtgctgtatgtc

SEQ ID NO: 1711657 - DNA, 15 bp, Homo sapiens
gagtgctgtatgtct

SEQ ID NO: 1711658 - DNA, 15 bp, Homo sapiens
agtgctgtatgtcta

SEQ ID NO: 1711659 - DNA, 15 bp, Homo sapiens
gtgctgtatgtctat

SEQ ID NO: 1711660 - DNA, 15 bp, Homo sapiens
tgctgtatgtctatg

SEQ ID NO: 1711661 - DNA, 15 bp, Homo sapiens
gctgtatgtctatgt

SEQ ID NO: 1711662 - DNA, 15 bp, Homo sapiens
ctgtatgtctatgtg

SEQ ID NO: 1711663 - DNA, 15 bp, Homo sapiens
tgtatgtctatgtga

SEQ ID NO: 1711664 - DNA, 15 bp, Homo sapiens
gtatgtctatgtgac

SEQ ID NO: 1711665 - DNA, 15 bp, Homo sapiens
tatgtctatgtgact

SEQ ID NO: 1711666 - DNA, 15 bp, Homo sapiens
atgtctatgtgactc

SEQ ID NO: 1711667 - DNA, 15 bp, Homo sapiens
tgtctatgtgactcc

SEQ ID NO: 1711668 - DNA, 15 bp, Homo sapiens
gtctatgtgactcct

SEQ ID NO: 1711669 - DNA, 15 bp, Homo sapiens
tctatgtgactcctg

SEQ ID NO: 1711670 - DNA, 15 bp, Homo sapiens
ctatgtgactcctga

SEQ ID NO: 1711671 - DNA, 15 bp, Homo sapiens
tatgtgactcctgat

SEQ ID NO: 1711672 - DNA, 15 bp, Homo sapiens
atgtgactcctgatg

SEQ ID NO: 1711673 - DNA, 15 bp, Homo sapiens
tgtgactcctgatga

SEQ ID NO: 1711674 - DNA, 15 bp, Homo sapiens
gtgactcctgatgac

SEQ ID NO: 1711675 - DNA, 15 bp, Homo sapiens
tgactcctgatgact

SEQ ID NO: 1711676 - DNA, 15 bp, Homo sapiens
gactcctgatgactt

SEQ ID NO: 1711677 - DNA, 15 bp, Homo sapiens
actcctgatgacttg

SEQ ID NO: 1711678 - DNA, 15 bp, Homo sapiens
ctcctgatgacttgg

SEQ ID NO: 1711679 - DNA, 15 bp, Homo sapiens
tcctgatgacttggt

SEQ ID NO: 1711680 - DNA, 15 bp, Homo sapiens
cctgatgacttggtc

SEQ ID NO: 1711681 - DNA, 15 bp, Homo sapiens
ctgatgacttggtca

SEQ ID NO: 1711682 - DNA, 15 bp, Homo sapiens
tgatgacttggtcaa

SEQ ID NO: 1711683 - DNA, 15 bp, Homo sapiens
gatgacttggtcaaa

SEQ ID NO: 1711684 - DNA, 15 bp, Homo sapiens
atgacttggtcaaag

SEQ ID NO: 1711685 - DNA, 15 bp, Homo sapiens
tgacttggtcaaaga

SEQ ID NO: 1711686 - DNA, 15 bp, Homo sapiens
gacttggtcaaagaa

SEQ ID NO: 1711687 - DNA, 15 bp, Homo sapiens
acttggtcaaagaaa

SEQ ID NO: 1711688 - DNA, 15 bp, Homo sapiens
cttggtcaaagaaaa

SEQ ID NO: 1711689 - DNA, 15 bp, Homo sapiens
ttggtcaaagaaaat

SEQ ID NO: 1711690 - DNA, 15 bp, Homo sapiens
tggtcaaagaaaata

SEQ ID NO: 1711691 - DNA, 15 bp, Homo sapiens
ggtcaaagaaaatat

SEQ ID NO: 1711692 - DNA, 15 bp, Homo sapiens
gtcaaagaaaatatc

SEQ ID NO: 1711693 - DNA, 15 bp, Homo sapiens
tcaaagaaaatatca

SEQ ID NO: 1711694 - DNA, 15 bp, Homo sapiens
caaagaaaatatcaa

SEQ ID NO: 1711695 - DNA, 15 bp, Homo sapiens
aaagaaaatatcaac

SEQ ID NO: 1711696 - DNA, 15 bp, Homo sapiens
aagaaaatatcaaca

SEQ ID NO: 1711697 - DNA, 15 bp, Homo sapiens
agaaaatatcaacac

SEQ ID NO: 1711698 - DNA, 15 bp, Homo sapiens
gaaaatatcaacaca

SEQ ID NO: 1711699 - DNA, 15 bp, Homo sapiens
aaaatatcaacacat

SEQ ID NO: 1711700 - DNA, 15 bp, Homo sapiens
aaatatcaacacatt

SEQ ID NO: 1711701 - DNA, 15 bp, Homo sapiens
aatatcaacacattg

SEQ ID NO: 1711702 - DNA, 15 bp, Homo sapiens
atatcaacacattgc

SEQ ID NO: 1711703 - DNA, 15 bp, Homo sapiens
tatcaacacattgcc

SEQ ID NO: 1711704 - DNA, 15 bp, Homo sapiens
atcaacacattgcct

SEQ ID NO: 1711705 - DNA, 15 bp, Homo sapiens
tcaacacattgcctt

SEQ ID NO: 1711706 - DNA, 15 bp, Homo sapiens
caacacattgcctta

SEQ ID NO: 1711707 - DNA, 15 bp, Homo sapiens
aacacattgccttag

SEQ ID NO: 1711708 - DNA, 15 bp, Homo sapiens
acacattgccttagc

SEQ ID NO: 1711709 - DNA, 15 bp, Homo sapiens
cacattgccttagct

SEQ ID NO: 1711710 - DNA, 15 bp, Homo sapiens
acattgccttagctg

SEQ ID NO: 1711711 - DNA, 15 bp, Homo sapiens
cattgccttagctgt

SEQ ID NO: 1711712 - DNA, 15 bp, Homo sapiens
attgccttagctgtt

SEQ ID NO: 1711713 - DNA, 15 bp, Homo sapiens
ttgccttagctgttt

SEQ ID NO: 1711714 - DNA, 15 bp, Homo sapiens
tgccttagctgtttt

SEQ ID NO: 1711715 - DNA, 15 bp, Homo sapiens
gccttagctgttttc

SEQ ID NO: 1711716 - DNA, 15 bp, Homo sapiens
ccttagctgttttcc

SEQ ID NO: 1711717 - DNA, 15 bp, Homo sapiens
cttagctgttttcct

SEQ ID NO: 1711718 - DNA, 15 bp, Homo sapiens
ttagctgttttcctt

SEQ ID NO: 1711719 - DNA, 15 bp, Homo sapiens
tagctgttttccttg

SEQ ID NO: 1711720 - DNA, 15 bp, Homo sapiens
agctgttttccttga

SEQ ID NO: 1711721 - DNA, 15 bp, Homo sapiens
gctgttttccttgat

SEQ ID NO: 1711722 - DNA, 15 bp, Homo sapiens
ctgttttccttgatg

SEQ ID NO: 1711723 - DNA, 15 bp, Homo sapiens
tgttttccttgatgg

SEQ ID NO: 1711724 - DNA, 15 bp, Homo sapiens
gttttccttgatggg

SEQ ID NO: 1711725 - DNA, 15 bp, Homo sapiens
ttttccttgatgggg

SEQ ID NO: 1711726 - DNA, 15 bp, Homo sapiens
tttccttgatgggga

SEQ ID NO: 1711727 - DNA, 15 bp, Homo sapiens
ttccttgatggggag

SEQ ID NO: 1711728 - DNA, 15 bp, Homo sapiens
tccttgatggggaga

SEQ ID NO: 1711729 - DNA, 15 bp, Homo sapiens
ccttgatggggagaa

SEQ ID NO: 1711730 - DNA, 15 bp, Homo sapiens
cttgatggggagaaa

SEQ ID NO: 1711731 - DNA, 15 bp, Homo sapiens
ttgatggggagaaat

SEQ ID NO: 1711732 - DNA, 15 bp, Homo sapiens
tgatggggagaaatc

SEQ ID NO: 1711733 - DNA, 15 bp, Homo sapiens
gatggggagaaatcg

SEQ ID NO: 1711734 - DNA, 15 bp, Homo sapiens
atggggagaaatcga

SEQ ID NO: 1711735 - DNA, 15 bp, Homo sapiens
tggggagaaatcgac

SEQ ID NO: 1711736 - DNA, 15 bp, Homo sapiens
ggggagaaatcgaca

SEQ ID NO: 1711737 - DNA, 15 bp, Homo sapiens
gggagaaatcgacac

SEQ ID NO: 1711738 - DNA, 15 bp, Homo sapiens
ggagaaatcgacaca

SEQ ID NO: 1711739 - DNA, 15 bp, Homo sapiens
gagaaatcgacacac

SEQ ID NO: 1711740 - DNA, 15 bp, Homo sapiens
agaaatcgacacact

SEQ ID NO: 1711741 - DNA, 15 bp, Homo sapiens
gaaatcgacacactt

SEQ ID NO: 1711742 - DNA, 15 bp, Homo sapiens
aaatcgacacacttg

SEQ ID NO: 1711743 - DNA, 15 bp, Homo sapiens
aatcgacacacttgg

SEQ ID NO: 1711744 - DNA, 15 bp, Homo sapiens
atcgacacacttgga

SEQ ID NO: 1711745 - DNA, 15 bp, Homo sapiens
tcgacacacttggaa

SEQ ID NO: 1711746 - DNA, 15 bp, Homo sapiens
cgacacacttggaaa

SEQ ID NO: 1711747 - DNA, 15 bp, Homo sapiens
gacacacttggaaat

SEQ ID NO: 1711748 - DNA, 15 bp, Homo sapiens
acacacttggaaatg

SEQ ID NO: 1711749 - DNA, 15 bp, Homo sapiens
cacacttggaaatgg

SEQ ID NO: 1711750 - DNA, 15 bp, Homo sapiens
acacttggaaatgga

SEQ ID NO: 1711751 - DNA, 15 bp, Homo sapiens
cacttggaaatggaa

SEQ ID NO: 1711752 - DNA, 15 bp, Homo sapiens
acttggaaatggaag

SEQ ID NO: 1711753 - DNA, 15 bp, Homo sapiens
cttggaaatggaaga

SEQ ID NO: 1711754 - DNA, 15 bp, Homo sapiens
ttggaaatggaagaa

SEQ ID NO: 1711755 - DNA, 15 bp, Homo sapiens
tggaaatggaagaat

SEQ ID NO: 1711756 - DNA, 15 bp, Homo sapiens
ggaaatggaagaatt

SEQ ID NO: 1711757 - DNA, 15 bp, Homo sapiens
gaaatggaagaattt

SEQ ID NO: 1711758 - DNA, 15 bp, Homo sapiens
aaatggaagaatttc

SEQ ID NO: 1711759 - DNA, 15 bp, Homo sapiens
aatggaagaatttcc

SEQ ID NO: 1711760 - DNA, 15 bp, Homo sapiens
atggaagaatttcct

SEQ ID NO: 1711761 - DNA, 15 bp, Homo sapiens
tggaagaatttcctc

SEQ ID NO: 1711762 - DNA, 15 bp, Homo sapiens
ggaagaatttcctct

SEQ ID NO: 1711763 - DNA, 15 bp, Homo sapiens
gaagaatttcctctc

SEQ ID NO: 1711764 - DNA, 15 bp, Homo sapiens
aagaatttcctctct

SEQ ID NO: 1711765 - DNA, 15 bp, Homo sapiens
agaatttcctctctt

SEQ ID NO: 1711766 - DNA, 15 bp, Homo sapiens
gaatttcctctcttg

SEQ ID NO: 1711767 - DNA, 15 bp, Homo sapiens
aatttcctctcttgt

SEQ ID NO: 1711768 - DNA, 15 bp, Homo sapiens
atttcctctcttgtt

SEQ ID NO: 1711769 - DNA, 15 bp, Homo sapiens
tttcctctcttgttg

SEQ ID NO: 1711770 - DNA, 15 bp, Homo sapiens
ttcctctcttgttgc

SEQ ID NO: 1711771 - DNA, 15 bp, Homo sapiens
tcctctcttgttgca

SEQ ID NO: 1711772 - DNA, 15 bp, Homo sapiens
cctctcttgttgcag

SEQ ID NO: 1711773 - DNA, 15 bp, Homo sapiens
ctctcttgttgcagt

SEQ ID NO: 1711774 - DNA, 15 bp, Homo sapiens
tctcttgttgcagtg

SEQ ID NO: 1711775 - DNA, 15 bp, Homo sapiens
ctcttgttgcagtgg

SEQ ID NO: 1711776 - DNA, 15 bp, Homo sapiens
tcttgttgcagtggc

SEQ ID NO: 1711777 - DNA, 15 bp, Homo sapiens
cttgttgcagtggct

SEQ ID NO: 1711778 - DNA, 15 bp, Homo sapiens
ttgttgcagtggctt

SEQ ID NO: 1711779 - DNA, 15 bp, Homo sapiens
tgttgcagtggcttt

SEQ ID NO: 1711780 - DNA, 15 bp, Homo sapiens
gttgcagtggctttg

SEQ ID NO: 1711781 - DNA, 15 bp, Homo sapiens
ttgcagtggctttgt

SEQ ID NO: 1711782 - DNA, 15 bp, Homo sapiens
tgcagtggctttgtg

SEQ ID NO: 1711783 - DNA, 15 bp, Homo sapiens
gcagtggctttgtgc

SEQ ID NO: 1711784 - DNA, 15 bp, Homo sapiens
cagtggctttgtgca

SEQ ID NO: 1711785 - DNA, 15 bp, Homo sapiens
agtggctttgtgcat

SEQ ID NO: 1711786 - DNA, 15 bp, Homo sapiens
gtggctttgtgcatt

SEQ ID NO: 1711787 - DNA, 15 bp, Homo sapiens
tggctttgtgcattg

SEQ ID NO: 1711788 - DNA, 15 bp, Homo sapiens
ggctttgtgcattgg

SEQ ID NO: 1711789 - DNA, 15 bp, Homo sapiens
gctttgtgcattggc

SEQ ID NO: 1711790 - DNA, 15 bp, Homo sapiens
ctttgtgcattggct

SEQ ID NO: 1711791 - DNA, 15 bp, Homo sapiens
tttgtgcattggctt

SEQ ID NO: 1711792 - DNA, 15 bp, Homo sapiens
ttgtgcattggcttg

SEQ ID NO: 1711793 - DNA, 15 bp, Homo sapiens
tgtgcattggcttga

SEQ ID NO: 1711794 - DNA, 15 bp, Homo sapiens
gtgcattggcttgag

SEQ ID NO: 1711795 - DNA, 15 bp, Homo sapiens
tgcattggcttgagc

SEQ ID NO: 1711796 - DNA, 15 bp, Homo sapiens
gcattggcttgagct

SEQ ID NO: 1711797 - DNA, 15 bp, Homo sapiens
cattggcttgagctg

SEQ ID NO: 1711798 - DNA, 15 bp, Homo sapiens
attggcttgagctgc

SEQ ID NO: 1711799 - DNA, 15 bp, Homo sapiens
ttggcttgagctgca

SEQ ID NO: 1711800 - DNA, 15 bp, Homo sapiens
tggcttgagctgcag

SEQ ID NO: 1711801 - DNA, 15 bp, Homo sapiens
ggcttgagctgcagt

SEQ ID NO: 1711802 - DNA, 15 bp, Homo sapiens
gcttgagctgcagtc

SEQ ID NO: 1711803 - DNA, 15 bp, Homo sapiens
cttgagctgcagtca

SEQ ID NO: 1711804 - DNA, 15 bp, Homo sapiens
ttgagctgcagtcat

SEQ ID NO: 1711805 - DNA, 15 bp, Homo sapiens
tgagctgcagtcatc

SEQ ID NO: 1711806 - DNA, 15 bp, Homo sapiens
gagctgcagtcatct

SEQ ID NO: 1711807 - DNA, 15 bp, Homo sapiens
agctgcagtcatctg

SEQ ID NO: 1711808 - DNA, 15 bp, Homo sapiens
gctgcagtcatctgg

SEQ ID NO: 1711809 - DNA, 15 bp, Homo sapiens
ctgcagtcatctggc

SEQ ID NO: 1711810 - DNA, 15 bp, Homo sapiens
tgcagtcatctggca

SEQ ID NO: 1711811 - DNA, 15 bp, Homo sapiens
gcagtcatctggcag

SEQ ID NO: 1711812 - DNA, 15 bp, Homo sapiens
cagtcatctggcagt

SEQ ID NO: 1711813 - DNA, 15 bp, Homo sapiens
agtcatctggcagtt

SEQ ID NO: 1711814 - DNA, 15 bp, Homo sapiens
gtcatctggcagttt

SEQ ID NO: 1711815 - DNA, 15 bp, Homo sapiens
tcatctggcagtttg

SEQ ID NO: 1711816 - DNA, 15 bp, Homo sapiens
catctggcagtttgt

SEQ ID NO: 1711817 - DNA, 15 bp, Homo sapiens
atctggcagtttgtt

SEQ ID NO: 1711818 - DNA, 15 bp, Homo sapiens
tctggcagtttgttg

SEQ ID NO: 1711819 - DNA, 15 bp, Homo sapiens
ctggcagtttgttgc

SEQ ID NO: 1711820 - DNA, 15 bp, Homo sapiens
tggcagtttgttgct

SEQ ID NO: 1711821 - DNA, 15 bp, Homo sapiens
ggcagtttgttgctt

SEQ ID NO: 1711822 - DNA, 15 bp, Homo sapiens
gcagtttgttgcttc

SEQ ID NO: 1711823 - DNA, 15 bp, Homo sapiens
cagtttgttgcttca

SEQ ID NO: 1711824 - DNA, 15 bp, Homo sapiens
agtttgttgcttcag

SEQ ID NO: 1711825 - DNA, 15 bp, Homo sapiens
gtttgttgcttcagt

SEQ ID NO: 1711826 - DNA, 15 bp, Homo sapiens
tttgttgcttcagtc

SEQ ID NO: 1711827 - DNA, 15 bp, Homo sapiens
ttgttgcttcagtca

SEQ ID NO: 1711828 - DNA, 15 bp, Homo sapiens
tgttgcttcagtcac

SEQ ID NO: 1711829 - DNA, 15 bp, Homo sapiens
gttgcttcagtcact

SEQ ID NO: 1711830 - DNA, 15 bp, Homo sapiens
ttgcttcagtcactg

SEQ ID NO: 1711831 - DNA, 15 bp, Homo sapiens
tgcttcagtcactgg

SEQ ID NO: 1711832 - DNA, 15 bp, Homo sapiens
gcttcagtcactggc

SEQ ID NO: 1711833 - DNA, 15 bp, Homo sapiens
cttcagtcactggcc

SEQ ID NO: 1711834 - DNA, 15 bp, Homo sapiens
ttcagtcactggccc

SEQ ID NO: 1711835 - DNA, 15 bp, Homo sapiens
tcagtcactggccct

SEQ ID NO: 1711836 - DNA, 15 bp, Homo sapiens
cagtcactggccctg

SEQ ID NO: 1711837 - DNA, 15 bp, Homo sapiens
agtcactggccctgg

SEQ ID NO: 1711838 - DNA, 15 bp, Homo sapiens
gtcactggccctggc

SEQ ID NO: 1711839 - DNA, 15 bp, Homo sapiens
tcactggccctggcc

SEQ ID NO: 1711840 - DNA, 15 bp, Homo sapiens
cactggccctggccc

SEQ ID NO: 1711841 - DNA, 15 bp, Homo sapiens
actggccctggccct

SEQ ID NO: 1711842 - DNA, 15 bp, Homo sapiens
ctggccctggccctt

SEQ ID NO: 1711843 - DNA, 15 bp, Homo sapiens
tggccctggcccttg

SEQ ID NO: 1711844 - DNA, 15 bp, Homo sapiens
ggccctggcccttgc

SEQ ID NO: 1711845 - DNA, 15 bp, Homo sapiens
gccctggcccttgcc

SEQ ID NO: 1711846 - DNA, 15 bp, Homo sapiens
ccctggcccttgcca

SEQ ID NO: 1711847 - DNA, 15 bp, Homo sapiens
cctggcccttgccac

SEQ ID NO: 1711848 - DNA, 15 bp, Homo sapiens
ctggcccttgccact

SEQ ID NO: 1711849 - DNA, 15 bp, Homo sapiens
tggcccttgccactg

SEQ ID NO: 1711850 - DNA, 15 bp, Homo sapiens
ggcccttgccactgc

SEQ ID NO: 1711851 - DNA, 15 bp, Homo sapiens
gcccttgccactgcc

SEQ ID NO: 1711852 - DNA, 15 bp, Homo sapiens
cccttgccactgcca

SEQ ID NO: 1711853 - DNA, 15 bp, Homo sapiens
ccttgccactgccag

SEQ ID NO: 1711854 - DNA, 15 bp, Homo sapiens
cttgccactgccagg

SEQ ID NO: 1711855 - DNA, 15 bp, Homo sapiens
ttgccactgccaggc

SEQ ID NO: 1711856 - DNA, 15 bp, Homo sapiens
tgccactgccaggca

SEQ ID NO: 1711857 - DNA, 15 bp, Homo sapiens
gccactgccaggcag

SEQ ID NO: 1711858 - DNA, 15 bp, Homo sapiens
ccactgccaggcaga

SEQ ID NO: 1711859 - DNA, 15 bp, Homo sapiens
cactgccaggcagag

SEQ ID NO: 1711860 - DNA, 15 bp, Homo sapiens
actgccaggcagagt

SEQ ID NO: 1711861 - DNA, 15 bp, Homo sapiens
ctgccaggcagagtt

SEQ ID NO: 1711862 - DNA, 15 bp, Homo sapiens
tgccaggcagagttg

SEQ ID NO: 1711863 - DNA, 15 bp, Homo sapiens
gccaggcagagttga

SEQ ID NO: 1711864 - DNA, 15 bp, Homo sapiens
ccaggcagagttgag

SEQ ID NO: 1711865 - DNA, 15 bp, Homo sapiens
caggcagagttgagc

SEQ ID NO: 1711866 - DNA, 15 bp, Homo sapiens
aggcagagttgagcc

SEQ ID NO: 1711867 - DNA, 15 bp, Homo sapiens
ggcagagttgagcct

SEQ ID NO: 1711868 - DNA, 15 bp, Homo sapiens
gcagagttgagcctg

SEQ ID NO: 1711869 - DNA, 15 bp, Homo sapiens
cagagttgagcctgc

SEQ ID NO: 1711870 - DNA, 15 bp, Homo sapiens
agagttgagcctgca

SEQ ID NO: 1711871 - DNA, 15 bp, Homo sapiens
gagttgagcctgcac

SEQ ID NO: 1711872 - DNA, 15 bp, Homo sapiens
agttgagcctgcact

SEQ ID NO: 1711873 - DNA, 15 bp, Homo sapiens
gttgagcctgcactg

SEQ ID NO: 1711874 - DNA, 15 bp, Homo sapiens
ttgagcctgcactga

SEQ ID NO: 1711875 - DNA, 15 bp, Homo sapiens
tgagcctgcactgaa

SEQ ID NO: 1711876 - DNA, 15 bp, Homo sapiens
gagcctgcactgaag

SEQ ID NO: 1711877 - DNA, 15 bp, Homo sapiens
agcctgcactgaaga

SEQ ID NO: 1711878 - DNA, 15 bp, Homo sapiens
gcctgcactgaagac

SEQ ID NO: 1711879 - DNA, 15 bp, Homo sapiens
cctgcactgaagaca

SEQ ID NO: 1711880 - DNA, 15 bp, Homo sapiens
ctgcactgaagacat

SEQ ID NO: 1711881 - DNA, 15 bp, Homo sapiens
tgcactgaagacatg

SEQ ID NO: 1711882 - DNA, 15 bp, Homo sapiens
gcactgaagacatga

SEQ ID NO: 1711883 - DNA, 15 bp, Homo sapiens
cactgaagacatgag

SEQ ID NO: 1711884 - DNA, 15 bp, Homo sapiens
actgaagacatgaga

SEQ ID NO: 1711885 - DNA, 15 bp, Homo sapiens
ctgaagacatgagaa

SEQ ID NO: 1711886 - DNA, 15 bp, Homo sapiens
tgaagacatgagaat

SEQ ID NO: 1711887 - DNA, 15 bp, Homo sapiens
gaagacatgagaata

SEQ ID NO: 1711888 - DNA, 15 bp, Homo sapiens
aagacatgagaatac

SEQ ID NO: 1711889 - DNA, 15 bp, Homo sapiens
agacatgagaatact

SEQ ID NO: 1711890 - DNA, 15 bp, Homo sapiens
gacatgagaatactg

SEQ ID NO: 1711891 - DNA, 15 bp, Homo sapiens
acatgagaatactgg

SEQ ID NO: 1711892 - DNA, 15 bp, Homo sapiens
catgagaatactgga

SEQ ID NO: 1711893 - DNA, 15 bp, Homo sapiens
atgagaatactggat

SEQ ID NO: 1711894 - DNA, 15 bp, Homo sapiens
tgagaatactggatc

SEQ ID NO: 1711895 - DNA, 15 bp, Homo sapiens
gagaatactggatca

SEQ ID NO: 1711896 - DNA, 15 bp, Homo sapiens
agaatactggatcaa

SEQ ID NO: 1711897 - DNA, 15 bp, Homo sapiens
gaatactggatcaat

SEQ ID NO: 1711898 - DNA, 15 bp, Homo sapiens
aatactggatcaata

SEQ ID NO: 1711899 - DNA, 15 bp, Homo sapiens
atactggatcaatac

SEQ ID NO: 1711900 - DNA, 15 bp, Homo sapiens
tactggatcaataca

SEQ ID NO: 1711901 - DNA, 15 bp, Homo sapiens
actggatcaatacaa

SEQ ID NO: 1711902 - DNA, 15 bp, Homo sapiens
ctggatcaatacaaa

SEQ ID NO: 1711903 - DNA, 15 bp, Homo sapiens
tggatcaatacaaac

SEQ ID NO: 1711904 - DNA, 15 bp, Homo sapiens
ggatcaatacaaacg

SEQ ID NO: 1711905 - DNA, 15 bp, Homo sapiens
gatcaatacaaacgt

SEQ ID NO: 1711906 - DNA, 15 bp, Homo sapiens
atcaatacaaacgtt

SEQ ID NO: 1711907 - DNA, 15 bp, Homo sapiens
tcaatacaaacgtta

SEQ ID NO: 1711908 - DNA, 15 bp, Homo sapiens
caatacaaacgttat

SEQ ID NO: 1711909 - DNA, 15 bp, Homo sapiens
aatacaaacgttatg

SEQ ID NO: 1711910 - DNA, 15 bp, Homo sapiens
atacaaacgttatgg

SEQ ID NO: 1711911 - DNA, 15 bp, Homo sapiens
tacaaacgttatgga

SEQ ID NO: 1711912 - DNA, 15 bp, Homo sapiens
acaaacgttatggaa

SEQ ID NO: 1711913 - DNA, 15 bp, Homo sapiens
caaacgttatggaaa

SEQ ID NO: 1711914 - DNA, 15 bp, Homo sapiens
aaacgttatggaaaa

SEQ ID NO: 1711915 - DNA, 15 bp, Homo sapiens
aacgttatggaaaat

SEQ ID NO: 1711916 - DNA, 15 bp, Homo sapiens
acgttatggaaaatg

SEQ ID NO: 1711917 - DNA, 15 bp, Homo sapiens
cgttatggaaaatgt

SEQ ID NO: 1711918 - DNA, 15 bp, Homo sapiens
gttatggaaaatgtt

SEQ ID NO: 1711919 - DNA, 15 bp, Homo sapiens
ttatggaaaatgttt

SEQ ID NO: 1711920 - DNA, 15 bp, Homo sapiens
tatggaaaatgtttt

SEQ ID NO: 1711921 - DNA, 15 bp, Homo sapiens
atggaaaatgtttta

SEQ ID NO: 1711922 - DNA, 15 bp, Homo sapiens
tggaaaatgttttaa

SEQ ID NO: 1711923 - DNA, 15 bp, Homo sapiens
ggaaaatgttttaac

SEQ ID NO: 1711924 - DNA, 15 bp, Homo sapiens
gaaaatgttttaact

SEQ ID NO: 1711925 - DNA, 15 bp, Homo sapiens
aaaatgttttaactt

SEQ ID NO: 1711926 - DNA, 15 bp, Homo sapiens
aaatgttttaacttt

SEQ ID NO: 1711927 - DNA, 15 bp, Homo sapiens
aatgttttaactttt

SEQ ID NO: 1711928 - DNA, 15 bp, Homo sapiens
atgttttaacttttt

SEQ ID NO: 1711929 - DNA, 15 bp, Homo sapiens
tgttttaactttttc

SEQ ID NO: 1711930 - DNA, 15 bp, Homo sapiens
gttttaactttttct

SEQ ID NO: 1711931 - DNA, 15 bp, Homo sapiens
ttttaactttttctt

SEQ ID NO: 1711932 - DNA, 15 bp, Homo sapiens
tttaactttttcttt

SEQ ID NO: 1711933 - DNA, 15 bp, Homo sapiens
ttaactttttctttt

SEQ ID NO: 1711934 - DNA, 15 bp, Homo sapiens
taactttttcttttt

SEQ ID NO: 1711935 - DNA, 15 bp, Homo sapiens
aactttttctttttt

SEQ ID NO: 1711936 - DNA, 15 bp, Homo sapiens
actttttcttttttt

SEQ ID NO: 1711937 - DNA, 15 bp, Homo sapiens
tttctttttttaaaa

SEQ ID NO: 1711938 - DNA, 15 bp, Homo sapiens
ttctttttttaaaag

SEQ ID NO: 1711939 - DNA, 15 bp, Homo sapiens
tctttttttaaaagg

SEQ ID NO: 1711940 - DNA, 15 bp, Homo sapiens
ctttttttaaaaggc

SEQ ID NO: 1711941 - DNA, 15 bp, Homo sapiens
tttttttaaaaggcc

SEQ ID NO: 1711942 - DNA, 15 bp, Homo sapiens
ttttttaaaaggcct

SEQ ID NO: 1711943 - DNA, 15 bp, Homo sapiens
tttttaaaaggcctg

SEQ ID NO: 1711944 - DNA, 15 bp, Homo sapiens
ttttaaaaggcctgc

SEQ ID NO: 1711945 - DNA, 15 bp, Homo sapiens
tttaaaaggcctgcc

SEQ ID NO: 1711946 - DNA, 15 bp, Homo sapiens
ttaaaaggcctgcct

SEQ ID NO: 1711947 - DNA, 15 bp, Homo sapiens
taaaaggcctgcctg

SEQ ID NO: 1711948 - DNA, 15 bp, Homo sapiens
aaaaggcctgcctgt

SEQ ID NO: 1711949 - DNA, 15 bp, Homo sapiens
aaaggcctgcctgtt

SEQ ID NO: 1711950 - DNA, 15 bp, Homo sapiens
aaggcctgcctgtta

SEQ ID NO: 1711951 - DNA, 15 bp, Homo sapiens
aggcctgcctgttat

SEQ ID NO: 1711952 - DNA, 15 bp, Homo sapiens
ggcctgcctgttatc

SEQ ID NO: 1711953 - DNA, 15 bp, Homo sapiens
gcctgcctgttatct

SEQ ID NO: 1711954 - DNA, 15 bp, Homo sapiens
cctgcctgttatctt

SEQ ID NO: 1711955 - DNA, 15 bp, Homo sapiens
ctgcctgttatcttt

SEQ ID NO: 1711956 - DNA, 15 bp, Homo sapiens
tgcctgttatcttta

SEQ ID NO: 1711957 - DNA, 15 bp, Homo sapiens
gcctgttatctttat

SEQ ID NO: 1711958 - DNA, 15 bp, Homo sapiens
cctgttatctttata

SEQ ID NO: 1711959 - DNA, 15 bp, Homo sapiens
ctgttatctttatac

SEQ ID NO: 1711960 - DNA, 15 bp, Homo sapiens
tgttatctttatacc

SEQ ID NO: 1711961 - DNA, 15 bp, Homo sapiens
gttatctttatacct

SEQ ID NO: 1711962 - DNA, 15 bp, Homo sapiens
ttatctttatacctc

SEQ ID NO: 1711963 - DNA, 15 bp, Homo sapiens
tatctttatacctct

SEQ ID NO: 1711964 - DNA, 15 bp, Homo sapiens
atctttatacctctg

SEQ ID NO: 1711965 - DNA, 15 bp, Homo sapiens
tctttatacctctgt

SEQ ID NO: 1711966 - DNA, 15 bp, Homo sapiens
ctttatacctctgtt

SEQ ID NO: 1711967 - DNA, 15 bp, Homo sapiens
tttatacctctgtta

SEQ ID NO: 1711968 - DNA, 15 bp, Homo sapiens
ttatacctctgttac

SEQ ID NO: 1711969 - DNA, 15 bp, Homo sapiens
tatacctctgttacc

SEQ ID NO: 1711970 - DNA, 15 bp, Homo sapiens
atacctctgttaccc

SEQ ID NO: 1711971 - DNA, 15 bp, Homo sapiens
tacctctgttacccg

SEQ ID NO: 1711972 - DNA, 15 bp, Homo sapiens
acctctgttacccgc

SEQ ID NO: 1711973 - DNA, 15 bp, Homo sapiens
cctctgttacccgcc

SEQ ID NO: 1711974 - DNA, 15 bp, Homo sapiens
ctctgttacccgccc

SEQ ID NO: 1711975 - DNA, 15 bp, Homo sapiens
tctgttacccgcccc

SEQ ID NO: 1711976 - DNA, 15 bp, Homo sapiens
ctgttacccgcccca

SEQ ID NO: 1711977 - DNA, 15 bp, Homo sapiens
tgttacccgccccac

SEQ ID NO: 1711978 - DNA, 15 bp, Homo sapiens
gttacccgccccacc

SEQ ID NO: 1711979 - DNA, 15 bp, Homo sapiens
ttacccgccccacca

SEQ ID NO: 1711980 - DNA, 15 bp, Homo sapiens
tacccgccccaccac

SEQ ID NO: 1711981 - DNA, 15 bp, Homo sapiens
acccgccccaccacc

SEQ ID NO: 1711982 - DNA, 15 bp, Homo sapiens
cccgccccaccaccc

SEQ ID NO: 1711983 - DNA, 15 bp, Homo sapiens
ccgccccaccacccc

SEQ ID NO: 1711984 - DNA, 15 bp, Homo sapiens
cgccccaccacccca

SEQ ID NO: 1711985 - DNA, 15 bp, Homo sapiens
gccccaccaccccag

SEQ ID NO: 1711986 - DNA, 15 bp, Homo sapiens
ccccaccaccccaga

SEQ ID NO: 1711987 - DNA, 15 bp, Homo sapiens
cccaccaccccagaa

SEQ ID NO: 1711988 - DNA, 15 bp, Homo sapiens
ccaccaccccagaaa

SEQ ID NO: 1711989 - DNA, 15 bp, Homo sapiens
caccaccccagaaat

SEQ ID NO: 1711990 - DNA, 15 bp, Homo sapiens
accaccccagaaatg

SEQ ID NO: 1711991 - DNA, 15 bp, Homo sapiens
ccaccccagaaatga

SEQ ID NO: 1711992 - DNA, 15 bp, Homo sapiens
caccccagaaatgag

SEQ ID NO: 1711993 - DNA, 15 bp, Homo sapiens
accccagaaatgagc

SEQ ID NO: 1711994 - DNA, 15 bp, Homo sapiens
ccccagaaatgagcc

SEQ ID NO: 1711995 - DNA, 15 bp, Homo sapiens
cccagaaatgagcca

SEQ ID NO: 1711996 - DNA, 15 bp, Homo sapiens
ccagaaatgagccag

SEQ ID NO: 1711997 - DNA, 15 bp, Homo sapiens
cagaaatgagccaga

SEQ ID NO: 1711998 - DNA, 15 bp, Homo sapiens
agaaatgagccagag

SEQ ID NO: 1711999 - DNA, 15 bp, Homo sapiens
gaaatgagccagagc

SEQ ID NO: 1712000 - DNA, 15 bp, Homo sapiens
aaatgagccagagcc

SEQ ID NO: 1712001 - DNA, 15 bp, Homo sapiens
aatgagccagagcct

SEQ ID NO: 1712002 - DNA, 15 bp, Homo sapiens
atgagccagagcctt

SEQ ID NO: 1712003 - DNA, 15 bp, Homo sapiens
tgagccagagccttt

SEQ ID NO: 1712004 - DNA, 15 bp, Homo sapiens
gagccagagcctttg

SEQ ID NO: 1712005 - DNA, 15 bp, Homo sapiens
agccagagcctttgt

SEQ ID NO: 1712006 - DNA, 15 bp, Homo sapiens
gccagagcctttgtg

SEQ ID NO: 1712007 - DNA, 15 bp, Homo sapiens
ccagagcctttgtga

SEQ ID NO: 1712008 - DNA, 15 bp, Homo sapiens
cagagcctttgtgat

SEQ ID NO: 1712009 - DNA, 15 bp, Homo sapiens
agagcctttgtgatg

SEQ ID NO: 1712010 - DNA, 15 bp, Homo sapiens
gagcctttgtgatgg

SEQ ID NO: 1712011 - DNA, 15 bp, Homo sapiens
agcctttgtgatggc

SEQ ID NO: 1712012 - DNA, 15 bp, Homo sapiens
gcctttgtgatggct

SEQ ID NO: 1712013 - DNA, 15 bp, Homo sapiens
cctttgtgatggcta

SEQ ID NO: 1712014 - DNA, 15 bp, Homo sapiens
ctttgtgatggctag

SEQ ID NO: 1712015 - DNA, 15 bp, Homo sapiens
tttgtgatggctaga

SEQ ID NO: 1712016 - DNA, 15 bp, Homo sapiens
ttgtgatggctagat

SEQ ID NO: 1712017 - DNA, 15 bp, Homo sapiens
tgtgatggctagatt

SEQ ID NO: 1712018 - DNA, 15 bp, Homo sapiens
gtgatggctagattt

SEQ ID NO: 1712019 - DNA, 15 bp, Homo sapiens
tgatggctagatttg

SEQ ID NO: 1712020 - DNA, 15 bp, Homo sapiens
gatggctagatttgt

SEQ ID NO: 1712021 - DNA, 15 bp, Homo sapiens
atggctagatttgtt

SEQ ID NO: 1712022 - DNA, 15 bp, Homo sapiens
tggctagatttgttt

SEQ ID NO: 1712023 - DNA, 15 bp, Homo sapiens
ggctagatttgtttg

SEQ ID NO: 1712024 - DNA, 15 bp, Homo sapiens
gctagatttgtttga

SEQ ID NO: 1712025 - DNA, 15 bp, Homo sapiens
ctagatttgtttgaa

SEQ ID NO: 1712026 - DNA, 15 bp, Homo sapiens
tagatttgtttgaac

SEQ ID NO: 1712027 - DNA, 15 bp, Homo sapiens
agatttgtttgaaca

SEQ ID NO: 1712028 - DNA, 15 bp, Homo sapiens
gatttgtttgaacat

SEQ ID NO: 1712029 - DNA, 15 bp, Homo sapiens
atttgtttgaacatt

SEQ ID NO: 1712030 - DNA, 15 bp, Homo sapiens
tttgtttgaacattt

SEQ ID NO: 1712031 - DNA, 15 bp, Homo sapiens
ttgtttgaacattta

SEQ ID NO: 1712032 - DNA, 15 bp, Homo sapiens
tgtttgaacatttaa

SEQ ID NO: 1712033 - DNA, 15 bp, Homo sapiens
gtttgaacatttaat

SEQ ID NO: 1712034 - DNA, 15 bp, Homo sapiens
tttgaacatttaatc

SEQ ID NO: 1712035 - DNA, 15 bp, Homo sapiens
ttgaacatttaatct

SEQ ID NO: 1712036 - DNA, 15 bp, Homo sapiens
tgaacatttaatctc

SEQ ID NO: 1712037 - DNA, 15 bp, Homo sapiens
gaacatttaatctcc

SEQ ID NO: 1712038 - DNA, 15 bp, Homo sapiens
aacatttaatctcct

SEQ ID NO: 1712039 - DNA, 15 bp, Homo sapiens
acatttaatctcctt

SEQ ID NO: 1712040 - DNA, 15 bp, Homo sapiens
catttaatctccttc

SEQ ID NO: 1712041 - DNA, 15 bp, Homo sapiens
atttaatctccttcc

SEQ ID NO: 1712042 - DNA, 15 bp, Homo sapiens
tttaatctccttccc

SEQ ID NO: 1712043 - DNA, 15 bp, Homo sapiens
ttaatctccttcccc

SEQ ID NO: 1712044 - DNA, 15 bp, Homo sapiens
taatctccttcccca

SEQ ID NO: 1712045 - DNA, 15 bp, Homo sapiens
aatctccttccccat

SEQ ID NO: 1712046 - DNA, 15 bp, Homo sapiens
atctccttccccatc

SEQ ID NO: 1712047 - DNA, 15 bp, Homo sapiens
tctccttccccatct

SEQ ID NO: 1712048 - DNA, 15 bp, Homo sapiens
ctccttccccatctg

SEQ ID NO: 1712049 - DNA, 15 bp, Homo sapiens
tccttccccatctgt

SEQ ID NO: 1712050 - DNA, 15 bp, Homo sapiens
ccttccccatctgtt

SEQ ID NO: 1712051 - DNA, 15 bp, Homo sapiens
cttccccatctgttt

SEQ ID NO: 1712052 - DNA, 15 bp, Homo sapiens
ttccccatctgtttt

SEQ ID NO: 1712053 - DNA, 15 bp, Homo sapiens
tccccatctgttttg

SEQ ID NO: 1712054 - DNA, 15 bp, Homo sapiens
ccccatctgttttga

SEQ ID NO: 1712055 - DNA, 15 bp, Homo sapiens
cccatctgttttgag

SEQ ID NO: 1712056 - DNA, 15 bp, Homo sapiens
ccatctgttttgaga

SEQ ID NO: 1712057 - DNA, 15 bp, Homo sapiens
catctgttttgagaa

SEQ ID NO: 1712058 - DNA, 15 bp, Homo sapiens
atctgttttgagaaa

SEQ ID NO: 1712059 - DNA, 15 bp, Homo sapiens
tctgttttgagaaat

SEQ ID NO: 1712060 - DNA, 15 bp, Homo sapiens
ctgttttgagaaata

SEQ ID NO: 1712061 - DNA, 15 bp, Homo sapiens
tgttttgagaaatat

SEQ ID NO: 1712062 - DNA, 15 bp, Homo sapiens
gttttgagaaatatc

SEQ ID NO: 1712063 - DNA, 15 bp, Homo sapiens
ttttgagaaatatct

SEQ ID NO: 1712064 - DNA, 15 bp, Homo sapiens
tttgagaaatatcta

SEQ ID NO: 1712065 - DNA, 15 bp, Homo sapiens
ttgagaaatatctag

SEQ ID NO: 1712066 - DNA, 15 bp, Homo sapiens
tgagaaatatctagc

SEQ ID NO: 1712067 - DNA, 15 bp, Homo sapiens
gagaaatatctagcc

SEQ ID NO: 1712068 - DNA, 15 bp, Homo sapiens
agaaatatctagcct

SEQ ID NO: 1712069 - DNA, 15 bp, Homo sapiens
gaaatatctagcctc

SEQ ID NO: 1712070 - DNA, 15 bp, Homo sapiens
aaatatctagcctct

SEQ ID NO: 1712071 - DNA, 15 bp, Homo sapiens
aatatctagcctctt

SEQ ID NO: 1712072 - DNA, 15 bp, Homo sapiens
atatctagcctcttt

SEQ ID NO: 1712073 - DNA, 15 bp, Homo sapiens
tatctagcctcttta

SEQ ID NO: 1712074 - DNA, 15 bp, Homo sapiens
atctagcctctttat

SEQ ID NO: 1712075 - DNA, 15 bp, Homo sapiens
tctagcctctttatc

SEQ ID NO: 1712076 - DNA, 15 bp, Homo sapiens
ctagcctctttatca

SEQ ID NO: 1712077 - DNA, 15 bp, Homo sapiens
tagcctctttatcag

SEQ ID NO: 1712078 - DNA, 15 bp, Homo sapiens
agcctctttatcaga

SEQ ID NO: 1712079 - DNA, 15 bp, Homo sapiens
gcctctttatcagaa

SEQ ID NO: 1712080 - DNA, 15 bp, Homo sapiens
cctctttatcagaag

SEQ ID NO: 1712081 - DNA, 15 bp, Homo sapiens
ctctttatcagaaga

SEQ ID NO: 1712082 - DNA, 15 bp, Homo sapiens
tctttatcagaagag

SEQ ID NO: 1712083 - DNA, 15 bp, Homo sapiens
ctttatcagaagaga

SEQ ID NO: 1712084 - DNA, 15 bp, Homo sapiens
tttatcagaagagag

SEQ ID NO: 1712085 - DNA, 15 bp, Homo sapiens
ttatcagaagagagc

SEQ ID NO: 1712086 - DNA, 15 bp, Homo sapiens
tatcagaagagagct

SEQ ID NO: 1712087 - DNA, 15 bp, Homo sapiens
atcagaagagagctt

SEQ ID NO: 1712088 - DNA, 15 bp, Homo sapiens
tcagaagagagctta

SEQ ID NO: 1712089 - DNA, 15 bp, Homo sapiens
cagaagagagcttaa

SEQ ID NO: 1712090 - DNA, 15 bp, Homo sapiens
agaagagagcttaaa

SEQ ID NO: 1712091 - DNA, 15 bp, Homo sapiens
gaagagagcttaaag

SEQ ID NO: 1712092 - DNA, 15 bp, Homo sapiens
aagagagcttaaagt

SEQ ID NO: 1712093 - DNA, 15 bp, Homo sapiens
agagagcttaaagtc

SEQ ID NO: 1712094 - DNA, 15 bp, Homo sapiens
gagagcttaaagtct

SEQ ID NO: 1712095 - DNA, 15 bp, Homo sapiens
agagcttaaagtctc

SEQ ID NO: 1712096 - DNA, 15 bp, Homo sapiens
gagcttaaagtctca

SEQ ID NO: 1712097 - DNA, 15 bp, Homo sapiens
agcttaaagtctcac

SEQ ID NO: 1712098 - DNA, 15 bp, Homo sapiens
gcttaaagtctcacc

SEQ ID NO: 1712099 - DNA, 15 bp, Homo sapiens
cttaaagtctcacca

SEQ ID NO: 1712100 - DNA, 15 bp, Homo sapiens
ttaaagtctcaccaa

SEQ ID NO: 1712101 - DNA, 15 bp, Homo sapiens
taaagtctcaccaac

SEQ ID NO: 1712102 - DNA, 15 bp, Homo sapiens
aaagtctcaccaaca

SEQ ID NO: 1712103 - DNA, 15 bp, Homo sapiens
aagtctcaccaacat

SEQ ID NO: 1712104 - DNA, 15 bp, Homo sapiens
agtctcaccaacatt

SEQ ID NO: 1712105 - DNA, 15 bp, Homo sapiens
gtctcaccaacattc

SEQ ID NO: 1712106 - DNA, 15 bp, Homo sapiens
tctcaccaacattct

SEQ ID NO: 1712107 - DNA, 15 bp, Homo sapiens
ctcaccaacattctt

SEQ ID NO: 1712108 - DNA, 15 bp, Homo sapiens
tcaccaacattcttg

SEQ ID NO: 1712109 - DNA, 15 bp, Homo sapiens
caccaacattcttgc

SEQ ID NO: 1712110 - DNA, 15 bp, Homo sapiens
accaacattcttgcc

SEQ ID NO: 1712111 - DNA, 15 bp, Homo sapiens
ccaacattcttgccc

SEQ ID NO: 1712112 - DNA, 15 bp, Homo sapiens
caacattcttgcccc

SEQ ID NO: 1712113 - DNA, 15 bp, Homo sapiens
aacattcttgcccca

SEQ ID NO: 1712114 - DNA, 15 bp, Homo sapiens
acattcttgccccag

SEQ ID NO: 1712115 - DNA, 15 bp, Homo sapiens
cattcttgccccagg

SEQ ID NO: 1712116 - DNA, 15 bp, Homo sapiens
attcttgccccaggt

SEQ ID NO: 1712117 - DNA, 15 bp, Homo sapiens
ttcttgccccaggtg

SEQ ID NO: 1712118 - DNA, 15 bp, Homo sapiens
tcttgccccaggtgt

SEQ ID NO: 1712119 - DNA, 15 bp, Homo sapiens
cttgccccaggtgtc

SEQ ID NO: 1712120 - DNA, 15 bp, Homo sapiens
ttgccccaggtgtca

SEQ ID NO: 1712121 - DNA, 15 bp, Homo sapiens
tgccccaggtgtcat

SEQ ID NO: 1712122 - DNA, 15 bp, Homo sapiens
gccccaggtgtcatg

SEQ ID NO: 1712123 - DNA, 15 bp, Homo sapiens
ccccaggtgtcatgg

SEQ ID NO: 1712124 - DNA, 15 bp, Homo sapiens
cccaggtgtcatggg

SEQ ID NO: 1712125 - DNA, 15 bp, Homo sapiens
ccaggtgtcatgggc

SEQ ID NO: 1712126 - DNA, 15 bp, Homo sapiens
caggtgtcatgggct

SEQ ID NO: 1712127 - DNA, 15 bp, Homo sapiens
aggtgtcatgggctg

SEQ ID NO: 1712128 - DNA, 15 bp, Homo sapiens
ggtgtcatgggctga

SEQ ID NO: 1712129 - DNA, 15 bp, Homo sapiens
gtgtcatgggctgaa

SEQ ID NO: 1712130 - DNA, 15 bp, Homo sapiens
tgtcatgggctgaac

SEQ ID NO: 1712131 - DNA, 15 bp, Homo sapiens
gtcatgggctgaact

SEQ ID NO: 1712132 - DNA, 15 bp, Homo sapiens
tcatgggctgaactg

SEQ ID NO: 1712133 - DNA, 15 bp, Homo sapiens
catgggctgaactgt

SEQ ID NO: 1712134 - DNA, 15 bp, Homo sapiens
atgggctgaactgtt

SEQ ID NO: 1712135 - DNA, 15 bp, Homo sapiens
tgggctgaactgttt

SEQ ID NO: 1712136 - DNA, 15 bp, Homo sapiens
gggctgaactgtttc

SEQ ID NO: 1712137 - DNA, 15 bp, Homo sapiens
ggctgaactgtttcc

SEQ ID NO: 1712138 - DNA, 15 bp, Homo sapiens
gctgaactgtttccc

SEQ ID NO: 1712139 - DNA, 15 bp, Homo sapiens
ctgaactgtttccct

SEQ ID NO: 1712140 - DNA, 15 bp, Homo sapiens
tgaactgtttccctc

SEQ ID NO: 1712141 - DNA, 15 bp, Homo sapiens
gaactgtttccctca

SEQ ID NO: 1712142 - DNA, 15 bp, Homo sapiens
aactgtttccctcaa

SEQ ID NO: 1712143 - DNA, 15 bp, Homo sapiens
actgtttccctcaaa

SEQ ID NO: 1712144 - DNA, 15 bp, Homo sapiens
ctgtttccctcaaat

SEQ ID NO: 1712145 - DNA, 15 bp, Homo sapiens
tgtttccctcaaatt

SEQ ID NO: 1712146 - DNA, 15 bp, Homo sapiens
gtttccctcaaattt

SEQ ID NO: 1712147 - DNA, 15 bp, Homo sapiens
tttccctcaaattta

SEQ ID NO: 1712148 - DNA, 15 bp, Homo sapiens
ttccctcaaatttat

SEQ ID NO: 1712149 - DNA, 15 bp, Homo sapiens
tccctcaaatttata

SEQ ID NO: 1712150 - DNA, 15 bp, Homo sapiens
ccctcaaatttatat

SEQ ID NO: 1712151 - DNA, 15 bp, Homo sapiens
cctcaaatttatatt

SEQ ID NO: 1712152 - DNA, 15 bp, Homo sapiens
tcaaatttatatttt

SEQ ID NO: 1712153 - DNA, 15 bp, Homo sapiens
caaatttatattttg

SEQ ID NO: 1712154 - DNA, 15 bp, Homo sapiens
aaatttatattttga

SEQ ID NO: 1712155 - DNA, 15 bp, Homo sapiens
aatttatattttgaa

SEQ ID NO: 1712156 - DNA, 15 bp, Homo sapiens
atttatattttgaag

SEQ ID NO: 1712157 - DNA, 15 bp, Homo sapiens
tttatattttgaagt

SEQ ID NO: 1712158 - DNA, 15 bp, Homo sapiens
ttatattttgaagtc

SEQ ID NO: 1712159 - DNA, 15 bp, Homo sapiens
tatattttgaagtct

SEQ ID NO: 1712160 - DNA, 15 bp, Homo sapiens
atattttgaagtctt

SEQ ID NO: 1712161 - DNA, 15 bp, Homo sapiens
tattttgaagtctta

SEQ ID NO: 1712162 - DNA, 15 bp, Homo sapiens
attttgaagtcttaa

SEQ ID NO: 1712163 - DNA, 15 bp, Homo sapiens
ttttgaagtcttaac

SEQ ID NO: 1712164 - DNA, 15 bp, Homo sapiens
tttgaagtcttaact

SEQ ID NO: 1712165 - DNA, 15 bp, Homo sapiens
ttgaagtcttaactc

SEQ ID NO: 1712166 - DNA, 15 bp, Homo sapiens
tgaagtcttaactcc

SEQ ID NO: 1712167 - DNA, 15 bp, Homo sapiens
gaagtcttaactccc

SEQ ID NO: 1712168 - DNA, 15 bp, Homo sapiens
aagtcttaactccca

SEQ ID NO: 1712169 - DNA, 15 bp, Homo sapiens
agtcttaactcccag

SEQ ID NO: 1712170 - DNA, 15 bp, Homo sapiens
gtcttaactcccagt

SEQ ID NO: 1712171 - DNA, 15 bp, Homo sapiens
tcttaactcccagta

SEQ ID NO: 1712172 - DNA, 15 bp, Homo sapiens
cttaactcccagtac

SEQ ID NO: 1712173 - DNA, 15 bp, Homo sapiens
ttaactcccagtacc

SEQ ID NO: 1712174 - DNA, 15 bp, Homo sapiens
taactcccagtacct

SEQ ID NO: 1712175 - DNA, 15 bp, Homo sapiens
aactcccagtacctc

SEQ ID NO: 1712176 - DNA, 15 bp, Homo sapiens
actcccagtacctca

SEQ ID NO: 1712177 - DNA, 15 bp, Homo sapiens
ctcccagtacctcag

SEQ ID NO: 1712178 - DNA, 15 bp, Homo sapiens
tcccagtacctcaga

SEQ ID NO: 1712179 - DNA, 15 bp, Homo sapiens
cccagtacctcagaa

SEQ ID NO: 1712180 - DNA, 15 bp, Homo sapiens
agtacctcagaatga

SEQ ID NO: 1712181 - DNA, 15 bp, Homo sapiens
gtacctcagaatgaa

SEQ ID NO: 1712182 - DNA, 15 bp, Homo sapiens
tacctcagaatgaaa

SEQ ID NO: 1712183 - DNA, 15 bp, Homo sapiens
acctcagaatgaaac

SEQ ID NO: 1712184 - DNA, 15 bp, Homo sapiens
cctcagaatgaaact

SEQ ID NO: 1712185 - DNA, 15 bp, Homo sapiens
ctcagaatgaaactg

SEQ ID NO: 1712186 - DNA, 15 bp, Homo sapiens
tcagaatgaaactgc

SEQ ID NO: 1712187 - DNA, 15 bp, Homo sapiens
cagaatgaaactgca

SEQ ID NO: 1712188 - DNA, 15 bp, Homo sapiens
agaatgaaactgcat

SEQ ID NO: 1712189 - DNA, 15 bp, Homo sapiens
gaatgaaactgcatt

SEQ ID NO: 1712190 - DNA, 15 bp, Homo sapiens
aatgaaactgcattt

SEQ ID NO: 1712191 - DNA, 15 bp, Homo sapiens
atgaaactgcatttg

SEQ ID NO: 1712192 - DNA, 15 bp, Homo sapiens
tgaaactgcatttgg

SEQ ID NO: 1712193 - DNA, 15 bp, Homo sapiens
gaaactgcatttgga

SEQ ID NO: 1712194 - DNA, 15 bp, Homo sapiens
aaactgcatttggag

SEQ ID NO: 1712195 - DNA, 15 bp, Homo sapiens
aactgcatttggaga

SEQ ID NO: 1712196 - DNA, 15 bp, Homo sapiens
actgcatttggagat

SEQ ID NO: 1712197 - DNA, 15 bp, Homo sapiens
ctgcatttggagata

SEQ ID NO: 1712198 - DNA, 15 bp, Homo sapiens
tgcatttggagatag

SEQ ID NO: 1712199 - DNA, 15 bp, Homo sapiens
gcatttggagatagg

SEQ ID NO: 1712200 - DNA, 15 bp, Homo sapiens
catttggagataggg

SEQ ID NO: 1712201 - DNA, 15 bp, Homo sapiens
atttggagatagggt

SEQ ID NO: 1712202 - DNA, 15 bp, Homo sapiens
tttggagatagggtc

SEQ ID NO: 1712203 - DNA, 15 bp, Homo sapiens
ttggagatagggtct

SEQ ID NO: 1712204 - DNA, 15 bp, Homo sapiens
tggagatagggtctt

SEQ ID NO: 1712205 - DNA, 15 bp, Homo sapiens
ggagatagggtcttt

SEQ ID NO: 1712206 - DNA, 15 bp, Homo sapiens
gagatagggtcttta

SEQ ID NO: 1712207 - DNA, 15 bp, Homo sapiens
agatagggtctttac

SEQ ID NO: 1712208 - DNA, 15 bp, Homo sapiens
gatagggtctttacg

SEQ ID NO: 1712209 - DNA, 15 bp, Homo sapiens
atagggtctttacgg

SEQ ID NO: 1712210 - DNA, 15 bp, Homo sapiens
tagggtctttacgga

SEQ ID NO: 1712211 - DNA, 15 bp, Homo sapiens
agggtctttacggag

SEQ ID NO: 1712212 - DNA, 15 bp, Homo sapiens
gggtctttacggagg

SEQ ID NO: 1712213 - DNA, 15 bp, Homo sapiens
ggtctttacggaggt

SEQ ID NO: 1712214 - DNA, 15 bp, Homo sapiens
gtctttacggaggta

SEQ ID NO: 1712215 - DNA, 15 bp, Homo sapiens
tctttacggaggtaa

SEQ ID NO: 1712216 - DNA, 15 bp, Homo sapiens
ctttacggaggtaat

SEQ ID NO: 1712217 - DNA, 15 bp, Homo sapiens
tttacggaggtaatt

SEQ ID NO: 1712218 - DNA, 15 bp, Homo sapiens
ttacggaggtaatta

SEQ ID NO: 1712219 - DNA, 15 bp, Homo sapiens
tacggaggtaattaa

SEQ ID NO: 1712220 - DNA, 15 bp, Homo sapiens
acggaggtaattaag

SEQ ID NO: 1712221 - DNA, 15 bp, Homo sapiens
cggaggtaattaagt

SEQ ID NO: 1712222 - DNA, 15 bp, Homo sapiens
ggaggtaattaagtt

SEQ ID NO: 1712223 - DNA, 15 bp, Homo sapiens
gaggtaattaagtta

SEQ ID NO: 1712224 - DNA, 15 bp, Homo sapiens
aggtaattaagttaa

SEQ ID NO: 1712225 - DNA, 15 bp, Homo sapiens
ggtaattaagttaaa

SEQ ID NO: 1712226 - DNA, 15 bp, Homo sapiens
gtaattaagttaaaa

SEQ ID NO: 1712227 - DNA, 15 bp, Homo sapiens
taattaagttaaaat

SEQ ID NO: 1712228 - DNA, 15 bp, Homo sapiens
aattaagttaaaatg

SEQ ID NO: 1712229 - DNA, 15 bp, Homo sapiens
agttaaaatgaggtt

SEQ ID NO: 1712230 - DNA, 15 bp, Homo sapiens
gttaaaatgaggttg

SEQ ID NO: 1712231 - DNA, 15 bp, Homo sapiens
ttaaaatgaggttgt

SEQ ID NO: 1712232 - DNA, 15 bp, Homo sapiens
taaaatgaggttgtt

SEQ ID NO: 1712233 - DNA, 15 bp, Homo sapiens
aaaatgaggttgtta

SEQ ID NO: 1712234 - DNA, 15 bp, Homo sapiens
aaatgaggttgttag

SEQ ID NO: 1712235 - DNA, 15 bp, Homo sapiens
aatgaggttgttaga

SEQ ID NO: 1712236 - DNA, 15 bp, Homo sapiens
atgaggttgttagag

SEQ ID NO: 1712237 - DNA, 15 bp, Homo sapiens
tgaggttgttagagt

SEQ ID NO: 1712238 - DNA, 15 bp, Homo sapiens
gaggttgttagagtc

SEQ ID NO: 1712239 - DNA, 15 bp, Homo sapiens
aggttgttagagtca

SEQ ID NO: 1712240 - DNA, 15 bp, Homo sapiens
ggttgttagagtcat

SEQ ID NO: 1712241 - DNA, 15 bp, Homo sapiens
gttgttagagtcatt

SEQ ID NO: 1712242 - DNA, 15 bp, Homo sapiens
ttgttagagtcattc

SEQ ID NO: 1712243 - DNA, 15 bp, Homo sapiens
tgttagagtcattca

SEQ ID NO: 1712244 - DNA, 15 bp, Homo sapiens
gttagagtcattcat

SEQ ID NO: 1712245 - DNA, 15 bp, Homo sapiens
ttagagtcattcatt

SEQ ID NO: 1712246 - DNA, 15 bp, Homo sapiens
tagagtcattcattg

SEQ ID NO: 1712247 - DNA, 15 bp, Homo sapiens
agagtcattcattgg

SEQ ID NO: 1712248 - DNA, 15 bp, Homo sapiens
gagtcattcattgga

SEQ ID NO: 1712249 - DNA, 15 bp, Homo sapiens
agtcattcattggaa

SEQ ID NO: 1712250 - DNA, 15 bp, Homo sapiens
gtcattcattggaaa

SEQ ID NO: 1712251 - DNA, 15 bp, Homo sapiens
tcattcattggaaaa

SEQ ID NO: 1712252 - DNA, 15 bp, Homo sapiens
cattcattggaaaag

SEQ ID NO: 1712253 - DNA, 15 bp, Homo sapiens
attcattggaaaagt

SEQ ID NO: 1712254 - DNA, 15 bp, Homo sapiens
ttcattggaaaagta

SEQ ID NO: 1712255 - DNA, 15 bp, Homo sapiens
tcattggaaaagtat

SEQ ID NO: 1712256 - DNA, 15 bp, Homo sapiens
cattggaaaagtatt

SEQ ID NO: 1712257 - DNA, 15 bp, Homo sapiens
attggaaaagtattt

SEQ ID NO: 1712258 - DNA, 15 bp, Homo sapiens
ttggaaaagtatttg

SEQ ID NO: 1712259 - DNA, 15 bp, Homo sapiens
tggaaaagtatttgt

SEQ ID NO: 1712260 - DNA, 15 bp, Homo sapiens
ggaaaagtatttgtc

SEQ ID NO: 1712261 - DNA, 15 bp, Homo sapiens
gaaaagtatttgtca

SEQ ID NO: 1712262 - DNA, 15 bp, Homo sapiens
aaaagtatttgtcaa

SEQ ID NO: 1712263 - DNA, 15 bp, Homo sapiens
aaagtatttgtcaaa

SEQ ID NO: 1712264 - DNA, 15 bp, Homo sapiens
aagtatttgtcaaat

SEQ ID NO: 1712265 - DNA, 15 bp, Homo sapiens
agtatttgtcaaatg

SEQ ID NO: 1712266 - DNA, 15 bp, Homo sapiens
gtatttgtcaaatgt

SEQ ID NO: 1712267 - DNA, 15 bp, Homo sapiens
tatttgtcaaatgtc

SEQ ID NO: 1712268 - DNA, 15 bp, Homo sapiens
atttgtcaaatgtct

SEQ ID NO: 1712269 - DNA, 15 bp, Homo sapiens
tttgtcaaatgtcta

SEQ ID NO: 1712270 - DNA, 15 bp, Homo sapiens
ttgtcaaatgtctac

SEQ ID NO: 1712271 - DNA, 15 bp, Homo sapiens
tgtcaaatgtctact

SEQ ID NO: 1712272 - DNA, 15 bp, Homo sapiens
gtcaaatgtctacta

SEQ ID NO: 1712273 - DNA, 15 bp, Homo sapiens
tcaaatgtctactat

SEQ ID NO: 1712274 - DNA, 15 bp, Homo sapiens
caaatgtctactatg

SEQ ID NO: 1712275 - DNA, 15 bp, Homo sapiens
aaatgtctactatgt

SEQ ID NO: 1712276 - DNA, 15 bp, Homo sapiens
aatgtctactatgtg

SEQ ID NO: 1712277 - DNA, 15 bp, Homo sapiens
atgtctactatgtgc

SEQ ID NO: 1712278 - DNA, 15 bp, Homo sapiens
tgtctactatgtgcc

SEQ ID NO: 1712279 - DNA, 15 bp, Homo sapiens
gtctactatgtgcca

SEQ ID NO: 1712280 - DNA, 15 bp, Homo sapiens
tctactatgtgccag

SEQ ID NO: 1712281 - DNA, 15 bp, Homo sapiens
tatgtgccaggcaca

SEQ ID NO: 1712282 - DNA, 15 bp, Homo sapiens
atgtgccaggcacat

SEQ ID NO: 1712283 - DNA, 15 bp, Homo sapiens
tgtgccaggcacatg

SEQ ID NO: 1712284 - DNA, 15 bp, Homo sapiens
gtgccaggcacatgt

SEQ ID NO: 1712285 - DNA, 15 bp, Homo sapiens
tgccaggcacatgtt

SEQ ID NO: 1712286 - DNA, 15 bp, Homo sapiens
gccaggcacatgtta

SEQ ID NO: 1712287 - DNA, 15 bp, Homo sapiens
ccaggcacatgttag

SEQ ID NO: 1712288 - DNA, 15 bp, Homo sapiens
caggcacatgttagg

SEQ ID NO: 1712289 - DNA, 15 bp, Homo sapiens
aggcacatgttaggc

SEQ ID NO: 1712290 - DNA, 15 bp, Homo sapiens
ggcacatgttaggca

SEQ ID NO: 1712291 - DNA, 15 bp, Homo sapiens
gcacatgttaggcat

SEQ ID NO: 1712292 - DNA, 15 bp, Homo sapiens
cacatgttaggcatg

SEQ ID NO: 1712293 - DNA, 15 bp, Homo sapiens
acatgttaggcatgc

SEQ ID NO: 1712294 - DNA, 15 bp, Homo sapiens
catgttaggcatgca

SEQ ID NO: 1712295 - DNA, 15 bp, Homo sapiens
atgttaggcatgcag

SEQ ID NO: 1712296 - DNA, 15 bp, Homo sapiens
tgttaggcatgcagc

SEQ ID NO: 1712297 - DNA, 15 bp, Homo sapiens
gttaggcatgcagcc

SEQ ID NO: 1712298 - DNA, 15 bp, Homo sapiens
ttaggcatgcagccc

SEQ ID NO: 1712299 - DNA, 15 bp, Homo sapiens
taggcatgcagcccc

SEQ ID NO: 1712300 - DNA, 15 bp, Homo sapiens
aggcatgcagcccca

SEQ ID NO: 1712301 - DNA, 15 bp, Homo sapiens
ggcatgcagccccac

SEQ ID NO: 1712302 - DNA, 15 bp, Homo sapiens
gcatgcagccccact

SEQ ID NO: 1712303 - DNA, 15 bp, Homo sapiens
catgcagccccactg

SEQ ID NO: 1712304 - DNA, 15 bp, Homo sapiens
atgcagccccactgg

SEQ ID NO: 1712305 - DNA, 15 bp, Homo sapiens
tgcagccccactggt

SEQ ID NO: 1712306 - DNA, 15 bp, Homo sapiens
gcagccccactggtt

SEQ ID NO: 1712307 - DNA, 15 bp, Homo sapiens
cagccccactggtta

SEQ ID NO: 1712308 - DNA, 15 bp, Homo sapiens
agccccactggttag

SEQ ID NO: 1712309 - DNA, 15 bp, Homo sapiens
gccccactggttagg

SEQ ID NO: 1712310 - DNA, 15 bp, Homo sapiens
ccccactggttagga

SEQ ID NO: 1712311 - DNA, 15 bp, Homo sapiens
cccactggttaggag

SEQ ID NO: 1712312 - DNA, 15 bp, Homo sapiens
ccactggttaggaga

SEQ ID NO: 1712313 - DNA, 15 bp, Homo sapiens
cactggttaggagaa

SEQ ID NO: 1712314 - DNA, 15 bp, Homo sapiens
actggttaggagaac

SEQ ID NO: 1712315 - DNA, 15 bp, Homo sapiens
ctggttaggagaaca

SEQ ID NO: 1712316 - DNA, 15 bp, Homo sapiens
tggttaggagaacag

SEQ ID NO: 1712317 - DNA, 15 bp, Homo sapiens
ggttaggagaacaga

SEQ ID NO: 1712318 - DNA, 15 bp, Homo sapiens
gttaggagaacagat

SEQ ID NO: 1712319 - DNA, 15 bp, Homo sapiens
ttaggagaacagata

SEQ ID NO: 1712320 - DNA, 15 bp, Homo sapiens
taggagaacagatat

SEQ ID NO: 1712321 - DNA, 15 bp, Homo sapiens
aggagaacagatata

SEQ ID NO: 1712322 - DNA, 15 bp, Homo sapiens
ggagaacagatatag

SEQ ID NO: 1712323 - DNA, 15 bp, Homo sapiens
gagaacagatataga

SEQ ID NO: 1712324 - DNA, 15 bp, Homo sapiens
agaacagatatagac

SEQ ID NO: 1712325 - DNA, 15 bp, Homo sapiens
gaacagatatagacc

SEQ ID NO: 1712326 - DNA, 15 bp, Homo sapiens
aacagatatagacct

SEQ ID NO: 1712327 - DNA, 15 bp, Homo sapiens
acagatatagaccta

SEQ ID NO: 1712328 - DNA, 15 bp, Homo sapiens
cagatatagacctac

SEQ ID NO: 1712329 - DNA, 15 bp, Homo sapiens
agatatagacctacc

SEQ ID NO: 1712330 - DNA, 15 bp, Homo sapiens
gatatagacctacct

SEQ ID NO: 1712331 - DNA, 15 bp, Homo sapiens
atatagacctacctt

SEQ ID NO: 1712332 - DNA, 15 bp, Homo sapiens
tatagacctaccttc

SEQ ID NO: 1712333 - DNA, 15 bp, Homo sapiens
atagacctaccttca

SEQ ID NO: 1712334 - DNA, 15 bp, Homo sapiens
tagacctaccttcag

SEQ ID NO: 1712335 - DNA, 15 bp, Homo sapiens
agacctaccttcaga

SEQ ID NO: 1712336 - DNA, 15 bp, Homo sapiens
gacctaccttcagag

SEQ ID NO: 1712337 - DNA, 15 bp, Homo sapiens
acctaccttcagaga

SEQ ID NO: 1712338 - DNA, 15 bp, Homo sapiens
cctaccttcagagac

SEQ ID NO: 1712339 - DNA, 15 bp, Homo sapiens
ctaccttcagagact

SEQ ID NO: 1712340 - DNA, 15 bp, Homo sapiens
taccttcagagactg

SEQ ID NO: 1712341 - DNA, 15 bp, Homo sapiens
accttcagagactgt

SEQ ID NO: 1712342 - DNA, 15 bp, Homo sapiens
ccttcagagactgtc

SEQ ID NO: 1712343 - DNA, 15 bp, Homo sapiens
cttcagagactgtct

SEQ ID NO: 1712344 - DNA, 15 bp, Homo sapiens
ttcagagactgtctg

SEQ ID NO: 1712345 - DNA, 15 bp, Homo sapiens
tcagagactgtctgg

SEQ ID NO: 1712346 - DNA, 15 bp, Homo sapiens
cagagactgtctggc

SEQ ID NO: 1712347 - DNA, 15 bp, Homo sapiens
agagactgtctggct

SEQ ID NO: 1712348 - DNA, 15 bp, Homo sapiens
gagactgtctggctt

SEQ ID NO: 1712349 - DNA, 15 bp, Homo sapiens
agactgtctggcttc

SEQ ID NO: 1712350 - DNA, 15 bp, Homo sapiens
gactgtctggcttcg

SEQ ID NO: 1712351 - DNA, 15 bp, Homo sapiens
actgtctggcttcgt

SEQ ID NO: 1712352 - DNA, 15 bp, Homo sapiens
ctgtctggcttcgtg

SEQ ID NO: 1712353 - DNA, 15 bp, Homo sapiens
tgtctggcttcgtgg

SEQ ID NO: 1712354 - DNA, 15 bp, Homo sapiens
gtctggcttcgtgga

SEQ ID NO: 1712355 - DNA, 15 bp, Homo sapiens
tctggcttcgtggac

SEQ ID NO: 1712356 - DNA, 15 bp, Homo sapiens
ctggcttcgtggaca

SEQ ID NO: 1712357 - DNA, 15 bp, Homo sapiens
tggcttcgtggacat

SEQ ID NO: 1712358 - DNA, 15 bp, Homo sapiens
ggcttcgtggacatg

SEQ ID NO: 1712359 - DNA, 15 bp, Homo sapiens
gcttcgtggacatgt

SEQ ID NO: 1712360 - DNA, 15 bp, Homo sapiens
cttcgtggacatgta

SEQ ID NO: 1712361 - DNA, 15 bp, Homo sapiens
ttcgtggacatgtag

SEQ ID NO: 1712362 - DNA, 15 bp, Homo sapiens
tcgtggacatgtagc

SEQ ID NO: 1712363 - DNA, 15 bp, Homo sapiens
cgtggacatgtagcc

SEQ ID NO: 1712364 - DNA, 15 bp, Homo sapiens
gtggacatgtagcct

SEQ ID NO: 1712365 - DNA, 15 bp, Homo sapiens
tggacatgtagcctg

SEQ ID NO: 1712366 - DNA, 15 bp, Homo sapiens
ggacatgtagcctgt

SEQ ID NO: 1712367 - DNA, 15 bp, Homo sapiens
gacatgtagcctgtg

SEQ ID NO: 1712368 - DNA, 15 bp, Homo sapiens
acatgtagcctgtgt

SEQ ID NO: 1712369 - DNA, 15 bp, Homo sapiens
catgtagcctgtgta

SEQ ID NO: 1712370 - DNA, 15 bp, Homo sapiens
atgtagcctgtgtag

SEQ ID NO: 1712371 - DNA, 15 bp, Homo sapiens
tgtagcctgtgtagt

SEQ ID NO: 1712372 - DNA, 15 bp, Homo sapiens
gtagcctgtgtagtc

SEQ ID NO: 1712373 - DNA, 15 bp, Homo sapiens
tagcctgtgtagtca

SEQ ID NO: 1712374 - DNA, 15 bp, Homo sapiens
agcctgtgtagtcac

SEQ ID NO: 1712375 - DNA, 15 bp, Homo sapiens
gcctgtgtagtcact

SEQ ID NO: 1712376 - DNA, 15 bp, Homo sapiens
cctgtgtagtcactt

SEQ ID NO: 1712377 - DNA, 15 bp, Homo sapiens
ctgtgtagtcactta

SEQ ID NO: 1712378 - DNA, 15 bp, Homo sapiens
tgtgtagtcacttag

SEQ ID NO: 1712379 - DNA, 15 bp, Homo sapiens
gtgtagtcacttagt

SEQ ID NO: 1712380 - DNA, 15 bp, Homo sapiens
tgtagtcacttagtt

SEQ ID NO: 1712381 - DNA, 15 bp, Homo sapiens
gtagtcacttagttc

SEQ ID NO: 1712382 - DNA, 15 bp, Homo sapiens
tagtcacttagttct

SEQ ID NO: 1712383 - DNA, 15 bp, Homo sapiens
agtcacttagttctc

SEQ ID NO: 1712384 - DNA, 15 bp, Homo sapiens
gtcacttagttctcc

SEQ ID NO: 1712385 - DNA, 15 bp, Homo sapiens
tcacttagttctcca

SEQ ID NO: 1712386 - DNA, 15 bp, Homo sapiens
cacttagttctccat

SEQ ID NO: 1712387 - DNA, 15 bp, Homo sapiens
acttagttctccatg

SEQ ID NO: 1712388 - DNA, 15 bp, Homo sapiens
cttagttctccatgt

SEQ ID NO: 1712389 - DNA, 15 bp, Homo sapiens
ttagttctccatgtt

SEQ ID NO: 1712390 - DNA, 15 bp, Homo sapiens
tagttctccatgtta

SEQ ID NO: 1712391 - DNA, 15 bp, Homo sapiens
agttctccatgttag

SEQ ID NO: 1712392 - DNA, 15 bp, Homo sapiens
gttctccatgttaga

SEQ ID NO: 1712393 - DNA, 15 bp, Homo sapiens
ttctccatgttagaa

SEQ ID NO: 1712394 - DNA, 15 bp, Homo sapiens
tctccatgttagaaa

SEQ ID NO: 1712395 - DNA, 15 bp, Homo sapiens
ctccatgttagaaag

SEQ ID NO: 1712396 - DNA, 15 bp, Homo sapiens
tccatgttagaaaga

SEQ ID NO: 1712397 - DNA, 15 bp, Homo sapiens
ccatgttagaaagac

SEQ ID NO: 1712398 - DNA, 15 bp, Homo sapiens
catgttagaaagacc

SEQ ID NO: 1712399 - DNA, 15 bp, Homo sapiens
atgttagaaagaccc

SEQ ID NO: 1712400 - DNA, 15 bp, Homo sapiens
tgttagaaagaccct

SEQ ID NO: 1712401 - DNA, 15 bp, Homo sapiens
gttagaaagaccctg

SEQ ID NO: 1712402 - DNA, 15 bp, Homo sapiens
ttagaaagaccctgt

SEQ ID NO: 1712403 - DNA, 15 bp, Homo sapiens
tagaaagaccctgtg

SEQ ID NO: 1712404 - DNA, 15 bp, Homo sapiens
agaaagaccctgtgg

SEQ ID NO: 1712405 - DNA, 15 bp, Homo sapiens
gaaagaccctgtggt

SEQ ID NO: 1712406 - DNA, 15 bp, Homo sapiens
aaagaccctgtggtt

SEQ ID NO: 1712407 - DNA, 15 bp, Homo sapiens
aagaccctgtggttg

SEQ ID NO: 1712408 - DNA, 15 bp, Homo sapiens
agaccctgtggttgg

SEQ ID NO: 1712409 - DNA, 15 bp, Homo sapiens
gaccctgtggttggt

SEQ ID NO: 1712410 - DNA, 15 bp, Homo sapiens
accctgtggttggtt

SEQ ID NO: 1712411 - DNA, 15 bp, Homo sapiens
ccctgtggttggttt

SEQ ID NO: 1712412 - DNA, 15 bp, Homo sapiens
cctgtggttggttta

SEQ ID NO: 1712413 - DNA, 15 bp, Homo sapiens
ctgtggttggtttaa

SEQ ID NO: 1712414 - DNA, 15 bp, Homo sapiens
tgtggttggtttaat

SEQ ID NO: 1712415 - DNA, 15 bp, Homo sapiens
gtggttggtttaatg

SEQ ID NO: 1712416 - DNA, 15 bp, Homo sapiens
tggttggtttaatgc

SEQ ID NO: 1712417 - DNA, 15 bp, Homo sapiens
ggttggtttaatgct

SEQ ID NO: 1712418 - DNA, 15 bp, Homo sapiens
gttggtttaatgctc

SEQ ID NO: 1712419 - DNA, 15 bp, Homo sapiens
ttggtttaatgctct

SEQ ID NO: 1712420 - DNA, 15 bp, Homo sapiens
tggtttaatgctctg

SEQ ID NO: 1712421 - DNA, 15 bp, Homo sapiens
ggtttaatgctctgt

SEQ ID NO: 1712422 - DNA, 15 bp, Homo sapiens
gtttaatgctctgtt

SEQ ID NO: 1712423 - DNA, 15 bp, Homo sapiens
tttaatgctctgttg

SEQ ID NO: 1712424 - DNA, 15 bp, Homo sapiens
ttaatgctctgttgc

SEQ ID NO: 1712425 - DNA, 15 bp, Homo sapiens
taatgctctgttgcc

SEQ ID NO: 1712426 - DNA, 15 bp, Homo sapiens
aatgctctgttgcca

SEQ ID NO: 1712427 - DNA, 15 bp, Homo sapiens
atgctctgttgccac

SEQ ID NO: 1712428 - DNA, 15 bp, Homo sapiens
tgctctgttgccacc

SEQ ID NO: 1712429 - DNA, 15 bp, Homo sapiens
gctctgttgccacca

SEQ ID NO: 1712430 - DNA, 15 bp, Homo sapiens
ctctgttgccaccat

SEQ ID NO: 1712431 - DNA, 15 bp, Homo sapiens
tctgttgccaccatc

SEQ ID NO: 1712432 - DNA, 15 bp, Homo sapiens
ctgttgccaccatct

SEQ ID NO: 1712433 - DNA, 15 bp, Homo sapiens
tgttgccaccatctt

SEQ ID NO: 1712434 - DNA, 15 bp, Homo sapiens
gttgccaccatcttg

SEQ ID NO: 1712435 - DNA, 15 bp, Homo sapiens
ttgccaccatcttga

SEQ ID NO: 1712436 - DNA, 15 bp, Homo sapiens
tgccaccatcttgaa

SEQ ID NO: 1712437 - DNA, 15 bp, Homo sapiens
gccaccatcttgaaa

SEQ ID NO: 1712438 - DNA, 15 bp, Homo sapiens
ccaccatcttgaaat

SEQ ID NO: 1712439 - DNA, 15 bp, Homo sapiens
caccatcttgaaatt

SEQ ID NO: 1712440 - DNA, 15 bp, Homo sapiens
accatcttgaaattc

SEQ ID NO: 1712441 - DNA, 15 bp, Homo sapiens
ccatcttgaaattct

SEQ ID NO: 1712442 - DNA, 15 bp, Homo sapiens
catcttgaaattctt

SEQ ID NO: 1712443 - DNA, 15 bp, Homo sapiens
atcttgaaattctta

SEQ ID NO: 1712444 - DNA, 15 bp, Homo sapiens
tcttgaaattcttag

SEQ ID NO: 1712445 - DNA, 15 bp, Homo sapiens
cttgaaattcttagt

SEQ ID NO: 1712446 - DNA, 15 bp, Homo sapiens
ttgaaattcttagta

SEQ ID NO: 1712447 - DNA, 15 bp, Homo sapiens
tgaaattcttagtaa

SEQ ID NO: 1712448 - DNA, 15 bp, Homo sapiens
gaaattcttagtaat

SEQ ID NO: 1712449 - DNA, 15 bp, Homo sapiens
aaattcttagtaatt

SEQ ID NO: 1712450 - DNA, 15 bp, Homo sapiens
aattcttagtaattt

SEQ ID NO: 1712451 - DNA, 15 bp, Homo sapiens
attcttagtaatttt

SEQ ID NO: 1712452 - DNA, 15 bp, Homo sapiens
ttcttagtaattttt

SEQ ID NO: 1712453 - DNA, 15 bp, Homo sapiens
tcttagtaatttttc

SEQ ID NO: 1712454 - DNA, 15 bp, Homo sapiens
cttagtaatttttca

SEQ ID NO: 1712455 - DNA, 15 bp, Homo sapiens
ttagtaatttttcaa

SEQ ID NO: 1712456 - DNA, 15 bp, Homo sapiens
tagtaatttttcaat

SEQ ID NO: 1712457 - DNA, 15 bp, Homo sapiens
agtaatttttcaatg

SEQ ID NO: 1712458 - DNA, 15 bp, Homo sapiens
gtaatttttcaatga

SEQ ID NO: 1712459 - DNA, 15 bp, Homo sapiens
taatttttcaatgag

SEQ ID NO: 1712460 - DNA, 15 bp, Homo sapiens
aatttttcaatgagg

SEQ ID NO: 1712461 - DNA, 15 bp, Homo sapiens
atttttcaatgagga

SEQ ID NO: 1712462 - DNA, 15 bp, Homo sapiens
tttttcaatgaggag

SEQ ID NO: 1712463 - DNA, 15 bp, Homo sapiens
ttttcaatgaggagt

SEQ ID NO: 1712464 - DNA, 15 bp, Homo sapiens
tttcaatgaggagtt

SEQ ID NO: 1712465 - DNA, 15 bp, Homo sapiens
ttcaatgaggagttc

SEQ ID NO: 1712466 - DNA, 15 bp, Homo sapiens
tcaatgaggagttct

SEQ ID NO: 1712467 - DNA, 15 bp, Homo sapiens
caatgaggagttctg

SEQ ID NO: 1712468 - DNA, 15 bp, Homo sapiens
aatgaggagttctgc

SEQ ID NO: 1712469 - DNA, 15 bp, Homo sapiens
atgaggagttctgca

SEQ ID NO: 1712470 - DNA, 15 bp, Homo sapiens
tgaggagttctgcat

SEQ ID NO: 1712471 - DNA, 15 bp, Homo sapiens
gaggagttctgcatt

SEQ ID NO: 1712472 - DNA, 15 bp, Homo sapiens
aggagttctgcattt

SEQ ID NO: 1712473 - DNA, 15 bp, Homo sapiens
ggagttctgcatttt

SEQ ID NO: 1712474 - DNA, 15 bp, Homo sapiens
gagttctgcattttt

SEQ ID NO: 1712475 - DNA, 15 bp, Homo sapiens
agttctgcatttttt

SEQ ID NO: 1712476 - DNA, 15 bp, Homo sapiens
gttctgcattttttt

SEQ ID NO: 1712477 - DNA, 15 bp, Homo sapiens
ttctgcatttttttt

SEQ ID NO: 1712478 - DNA, 15 bp, Homo sapiens
tctgcattttttttc

SEQ ID NO: 1712479 - DNA, 15 bp, Homo sapiens
ctgcattttttttcc

SEQ ID NO: 1712480 - DNA, 15 bp, Homo sapiens
tgcattttttttcct

SEQ ID NO: 1712481 - DNA, 15 bp, Homo sapiens
gcattttttttcctc

SEQ ID NO: 1712482 - DNA, 15 bp, Homo sapiens
ttttttttcctctgg

SEQ ID NO: 1712483 - DNA, 15 bp, Homo sapiens
tttttttcctctgga

SEQ ID NO: 1712484 - DNA, 15 bp, Homo sapiens
ttttttcctctggac

SEQ ID NO: 1712485 - DNA, 15 bp, Homo sapiens
tttttcctctggacc

SEQ ID NO: 1712486 - DNA, 15 bp, Homo sapiens
ttttcctctggaccc

SEQ ID NO: 1712487 - DNA, 15 bp, Homo sapiens
tttcctctggaccct

SEQ ID NO: 1712488 - DNA, 15 bp, Homo sapiens
ttcctctggaccctg

SEQ ID NO: 1712489 - DNA, 15 bp, Homo sapiens
tcctctggaccctgc

SEQ ID NO: 1712490 - DNA, 15 bp, Homo sapiens
cctctggaccctgca

SEQ ID NO: 1712491 - DNA, 15 bp, Homo sapiens
ctctggaccctgcaa

SEQ ID NO: 1712492 - DNA, 15 bp, Homo sapiens
tctggaccctgcaaa

SEQ ID NO: 1712493 - DNA, 15 bp, Homo sapiens
ctggaccctgcaaat

SEQ ID NO: 1712494 - DNA, 15 bp, Homo sapiens
tggaccctgcaaatt

SEQ ID NO: 1712495 - DNA, 15 bp, Homo sapiens
ggaccctgcaaatta

SEQ ID NO: 1712496 - DNA, 15 bp, Homo sapiens
gaccctgcaaattat

SEQ ID NO: 1712497 - DNA, 15 bp, Homo sapiens
accctgcaaattatg

SEQ ID NO: 1712498 - DNA, 15 bp, Homo sapiens
ccctgcaaattatgt

SEQ ID NO: 1712499 - DNA, 15 bp, Homo sapiens
cctgcaaattatgta

SEQ ID NO: 1712500 - DNA, 15 bp, Homo sapiens
ctgcaaattatgtaa

SEQ ID NO: 1712501 - DNA, 15 bp, Homo sapiens
tgcaaattatgtaat

SEQ ID NO: 1712502 - DNA, 15 bp, Homo sapiens
gcaaattatgtaatt

SEQ ID NO: 1712503 - DNA, 15 bp, Homo sapiens
caaattatgtaattg

SEQ ID NO: 1712504 - DNA, 15 bp, Homo sapiens
aaattatgtaattgg

SEQ ID NO: 1712505 - DNA, 15 bp, Homo sapiens
aattatgtaattggt

SEQ ID NO: 1712506 - DNA, 15 bp, Homo sapiens
attatgtaattggtc

SEQ ID NO: 1712507 - DNA, 15 bp, Homo sapiens
ttatgtaattggtcc

SEQ ID NO: 1712508 - DNA, 15 bp, Homo sapiens
tatgtaattggtcct

SEQ ID NO: 1712509 - DNA, 15 bp, Homo sapiens
atgtaattggtcctg

SEQ ID NO: 1712510 - DNA, 15 bp, Homo sapiens
tgtaattggtcctgc

SEQ ID NO: 1712511 - DNA, 15 bp, Homo sapiens
gtaattggtcctgct

SEQ ID NO: 1712512 - DNA, 15 bp, Homo sapiens
taattggtcctgctc

SEQ ID NO: 1712513 - DNA, 15 bp, Homo sapiens
aattggtcctgctca

SEQ ID NO: 1712514 - DNA, 15 bp, Homo sapiens
attggtcctgctcat

SEQ ID NO: 1712515 - DNA, 15 bp, Homo sapiens
ttggtcctgctcatg

SEQ ID NO: 1712516 - DNA, 15 bp, Homo sapiens
tggtcctgctcatgg

SEQ ID NO: 1712517 - DNA, 15 bp, Homo sapiens
ggtcctgctcatgga

SEQ ID NO: 1712518 - DNA, 15 bp, Homo sapiens
gtcctgctcatggaa

SEQ ID NO: 1712519 - DNA, 15 bp, Homo sapiens
tcctgctcatggaaa

SEQ ID NO: 1712520 - DNA, 15 bp, Homo sapiens
cctgctcatggaaat

SEQ ID NO: 1712521 - DNA, 15 bp, Homo sapiens
ctgctcatggaaatt

SEQ ID NO: 1712522 - DNA, 15 bp, Homo sapiens
tgctcatggaaattg

SEQ ID NO: 1712523 - DNA, 15 bp, Homo sapiens
gctcatggaaattgg

SEQ ID NO: 1712524 - DNA, 15 bp, Homo sapiens
ctcatggaaattggt

SEQ ID NO: 1712525 - DNA, 15 bp, Homo sapiens
tcatggaaattggta

SEQ ID NO: 1712526 - DNA, 15 bp, Homo sapiens
catggaaattggtat

SEQ ID NO: 1712527 - DNA, 15 bp, Homo sapiens
atggaaattggtata

SEQ ID NO: 1712528 - DNA, 15 bp, Homo sapiens
tggaaattggtatag

SEQ ID NO: 1712529 - DNA, 15 bp, Homo sapiens
ggaaattggtatagt

SEQ ID NO: 1712530 - DNA, 15 bp, Homo sapiens
gaaattggtatagta

SEQ ID NO: 1712531 - DNA, 15 bp, Homo sapiens
aaattggtatagtag

SEQ ID NO: 1712532 - DNA, 15 bp, Homo sapiens
aattggtatagtagg

SEQ ID NO: 1712533 - DNA, 15 bp, Homo sapiens
attggtatagtagga

SEQ ID NO: 1712534 - DNA, 15 bp, Homo sapiens
ttggtatagtaggag

SEQ ID NO: 1712535 - DNA, 15 bp, Homo sapiens
tggtatagtaggaga

SEQ ID NO: 1712536 - DNA, 15 bp, Homo sapiens
ggtatagtaggagaa

SEQ ID NO: 1712537 - DNA, 15 bp, Homo sapiens
gtatagtaggagaat

SEQ ID NO: 1712538 - DNA, 15 bp, Homo sapiens
tatagtaggagaatc

SEQ ID NO: 1712539 - DNA, 15 bp, Homo sapiens
atagtaggagaatca

SEQ ID NO: 1712540 - DNA, 15 bp, Homo sapiens
tagtaggagaatcaa

SEQ ID NO: 1712541 - DNA, 15 bp, Homo sapiens
agtaggagaatcaat

SEQ ID NO: 1712542 - DNA, 15 bp, Homo sapiens
gtaggagaatcaatc

SEQ ID NO: 1712543 - DNA, 15 bp, Homo sapiens
taggagaatcaatca

SEQ ID NO: 1712544 - DNA, 15 bp, Homo sapiens
aggagaatcaatcat

SEQ ID NO: 1712545 - DNA, 15 bp, Homo sapiens
ggagaatcaatcata

SEQ ID NO: 1712546 - DNA, 15 bp, Homo sapiens
gagaatcaatcatat

SEQ ID NO: 1712547 - DNA, 15 bp, Homo sapiens
agaatcaatcatatt

SEQ ID NO: 1712548 - DNA, 15 bp, Homo sapiens
gaatcaatcatattc

SEQ ID NO: 1712549 - DNA, 15 bp, Homo sapiens
aatcaatcatattct

SEQ ID NO: 1712550 - DNA, 15 bp, Homo sapiens
atcaatcatattctc

SEQ ID NO: 1712551 - DNA, 15 bp, Homo sapiens
tcaatcatattctct

SEQ ID NO: 1712552 - DNA, 15 bp, Homo sapiens
caatcatattctctg

SEQ ID NO: 1712553 - DNA, 15 bp, Homo sapiens
aatcatattctctgc

SEQ ID NO: 1712554 - DNA, 15 bp, Homo sapiens
atcatattctctgca

SEQ ID NO: 1712555 - DNA, 15 bp, Homo sapiens
tcatattctctgcac

SEQ ID NO: 1712556 - DNA, 15 bp, Homo sapiens
catattctctgcact

SEQ ID NO: 1712557 - DNA, 15 bp, Homo sapiens
atattctctgcactt

SEQ ID NO: 1712558 - DNA, 15 bp, Homo sapiens
tattctctgcactta

SEQ ID NO: 1712559 - DNA, 15 bp, Homo sapiens
attctctgcacttag

SEQ ID NO: 1712560 - DNA, 15 bp, Homo sapiens
ttctctgcacttagg

SEQ ID NO: 1712561 - DNA, 15 bp, Homo sapiens
tctctgcacttagga

SEQ ID NO: 1712562 - DNA, 15 bp, Homo sapiens
ctctgcacttaggag

SEQ ID NO: 1712563 - DNA, 15 bp, Homo sapiens
tctgcacttaggagt

SEQ ID NO: 1712564 - DNA, 15 bp, Homo sapiens
ctgcacttaggagtg

SEQ ID NO: 1712565 - DNA, 15 bp, Homo sapiens
tgcacttaggagtgt

SEQ ID NO: 1712566 - DNA, 15 bp, Homo sapiens
gcacttaggagtgtg

SEQ ID NO: 1712567 - DNA, 15 bp, Homo sapiens
cacttaggagtgtgg

SEQ ID NO: 1712568 - DNA, 15 bp, Homo sapiens
acttaggagtgtggt

SEQ ID NO: 1712569 - DNA, 15 bp, Homo sapiens
cttaggagtgtggtt

SEQ ID NO: 1712570 - DNA, 15 bp, Homo sapiens
ttaggagtgtggttt

SEQ ID NO: 1712571 - DNA, 15 bp, Homo sapiens
taggagtgtggtttg

SEQ ID NO: 1712572 - DNA, 15 bp, Homo sapiens
aggagtgtggtttgg

SEQ ID NO: 1712573 - DNA, 15 bp, Homo sapiens
ggagtgtggtttggt

SEQ ID NO: 1712574 - DNA, 15 bp, Homo sapiens
gagtgtggtttggtg

SEQ ID NO: 1712575 - DNA, 15 bp, Homo sapiens
agtgtggtttggtgg

SEQ ID NO: 1712576 - DNA, 15 bp, Homo sapiens
gtgtggtttggtggc

SEQ ID NO: 1712577 - DNA, 15 bp, Homo sapiens
tgtggtttggtggca

SEQ ID NO: 1712578 - DNA, 15 bp, Homo sapiens
gtggtttggtggcat

SEQ ID NO: 1712579 - DNA, 15 bp, Homo sapiens
tggtttggtggcatg

SEQ ID NO: 1712580 - DNA, 15 bp, Homo sapiens
ggtttggtggcatgg

SEQ ID NO: 1712581 - DNA, 15 bp, Homo sapiens
gtttggtggcatgga

SEQ ID NO: 1712582 - DNA, 15 bp, Homo sapiens
tttggtggcatggag

SEQ ID NO: 1712583 - DNA, 15 bp, Homo sapiens
ttggtggcatggaga

SEQ ID NO: 1712584 - DNA, 15 bp, Homo sapiens
tggtggcatggagag

SEQ ID NO: 1712585 - DNA, 15 bp, Homo sapiens
ggtggcatggagaga

SEQ ID NO: 1712586 - DNA, 15 bp, Homo sapiens
gtggcatggagagaa

SEQ ID NO: 1712587 - DNA, 15 bp, Homo sapiens
tggcatggagagaag

SEQ ID NO: 1712588 - DNA, 15 bp, Homo sapiens
ggcatggagagaagg

SEQ ID NO: 1712589 - DNA, 15 bp, Homo sapiens
gcatggagagaaggt

SEQ ID NO: 1712590 - DNA, 15 bp, Homo sapiens
catggagagaaggtc

SEQ ID NO: 1712591 - DNA, 15 bp, Homo sapiens
atggagagaaggtca

SEQ ID NO: 1712592 - DNA, 15 bp, Homo sapiens
tggagagaaggtcag

SEQ ID NO: 1712593 - DNA, 15 bp, Homo sapiens
ggagagaaggtcagt

SEQ ID NO: 1712594 - DNA, 15 bp, Homo sapiens
gagagaaggtcagtg

SEQ ID NO: 1712595 - DNA, 15 bp, Homo sapiens
agagaaggtcagtgt

SEQ ID NO: 1712596 - DNA, 15 bp, Homo sapiens
gagaaggtcagtgta

SEQ ID NO: 1712597 - DNA, 15 bp, Homo sapiens
agaaggtcagtgtag

SEQ ID NO: 1712598 - DNA, 15 bp, Homo sapiens
gaaggtcagtgtagc

SEQ ID NO: 1712599 - DNA, 15 bp, Homo sapiens
aaggtcagtgtagca

SEQ ID NO: 1712600 - DNA, 15 bp, Homo sapiens
aggtcagtgtagcag

SEQ ID NO: 1712601 - DNA, 15 bp, Homo sapiens
ggtcagtgtagcaga

SEQ ID NO: 1712602 - DNA, 15 bp, Homo sapiens
gtcagtgtagcagaa

SEQ ID NO: 1712603 - DNA, 15 bp, Homo sapiens
tcagtgtagcagaag

SEQ ID NO: 1712604 - DNA, 15 bp, Homo sapiens
cagtgtagcagaagt

SEQ ID NO: 1712605 - DNA, 15 bp, Homo sapiens
agtgtagcagaagta

SEQ ID NO: 1712606 - DNA, 15 bp, Homo sapiens
gtgtagcagaagtag

SEQ ID NO: 1712607 - DNA, 15 bp, Homo sapiens
tgtagcagaagtagt

SEQ ID NO: 1712608 - DNA, 15 bp, Homo sapiens
gtagcagaagtagta

SEQ ID NO: 1712609 - DNA, 15 bp, Homo sapiens
tagcagaagtagtac

SEQ ID NO: 1712610 - DNA, 15 bp, Homo sapiens
agcagaagtagtaca

SEQ ID NO: 1712611 - DNA, 15 bp, Homo sapiens
gcagaagtagtacag

SEQ ID NO: 1712612 - DNA, 15 bp, Homo sapiens
cagaagtagtacagt

SEQ ID NO: 1712613 - DNA, 15 bp, Homo sapiens
agaagtagtacagta

SEQ ID NO: 1712614 - DNA, 15 bp, Homo sapiens
gaagtagtacagtat

SEQ ID NO: 1712615 - DNA, 15 bp, Homo sapiens
aagtagtacagtata

SEQ ID NO: 1712616 - DNA, 15 bp, Homo sapiens
agtagtacagtataa

SEQ ID NO: 1712617 - DNA, 15 bp, Homo sapiens
gtagtacagtataaa

SEQ ID NO: 1712618 - DNA, 15 bp, Homo sapiens
tagtacagtataaaa

SEQ ID NO: 1712619 - DNA, 15 bp, Homo sapiens
agtacagtataaaaa

SEQ ID NO: 1712620 - DNA, 15 bp, Homo sapiens
gtacagtataaaaag

SEQ ID NO: 1712621 - DNA, 15 bp, Homo sapiens
tacagtataaaaaga

SEQ ID NO: 1712622 - DNA, 15 bp, Homo sapiens
acagtataaaaagat

SEQ ID NO: 1712623 - DNA, 15 bp, Homo sapiens
cagtataaaaagatg

SEQ ID NO: 1712624 - DNA, 15 bp, Homo sapiens
agtataaaaagatga

SEQ ID NO: 1712625 - DNA, 15 bp, Homo sapiens
gtataaaaagatgaa

SEQ ID NO: 1712626 - DNA, 15 bp, Homo sapiens
tataaaaagatgaag

SEQ ID NO: 1712627 - DNA, 15 bp, Homo sapiens
ataaaaagatgaaga

SEQ ID NO: 1712628 - DNA, 15 bp, Homo sapiens
taaaaagatgaagat

SEQ ID NO: 1712629 - DNA, 15 bp, Homo sapiens
aaaaagatgaagatg

SEQ ID NO: 1712630 - DNA, 15 bp, Homo sapiens
aaaagatgaagatga

SEQ ID NO: 1712631 - DNA, 15 bp, Homo sapiens
aaagatgaagatgat

SEQ ID NO: 1712632 - DNA, 15 bp, Homo sapiens
aagatgaagatgata

SEQ ID NO: 1712633 - DNA, 15 bp, Homo sapiens
agatgaagatgataa

SEQ ID NO: 1712634 - DNA, 15 bp, Homo sapiens
gatgaagatgataat

SEQ ID NO: 1712635 - DNA, 15 bp, Homo sapiens
atgaagatgataata

SEQ ID NO: 1712636 - DNA, 15 bp, Homo sapiens
tgaagatgataatat

SEQ ID NO: 1712637 - DNA, 15 bp, Homo sapiens
gaagatgataatatt

SEQ ID NO: 1712638 - DNA, 15 bp, Homo sapiens
aagatgataatattc

SEQ ID NO: 1712639 - DNA, 15 bp, Homo sapiens
agatgataatattca

SEQ ID NO: 1712640 - DNA, 15 bp, Homo sapiens
gatgataatattcac

SEQ ID NO: 1712641 - DNA, 15 bp, Homo sapiens
atgataatattcaca

SEQ ID NO: 1712642 - DNA, 15 bp, Homo sapiens
tgataatattcacaa

SEQ ID NO: 1712643 - DNA, 15 bp, Homo sapiens
gataatattcacaat

SEQ ID NO: 1712644 - DNA, 15 bp, Homo sapiens
ataatattcacaatg

SEQ ID NO: 1712645 - DNA, 15 bp, Homo sapiens
taatattcacaatgg

SEQ ID NO: 1712646 - DNA, 15 bp, Homo sapiens
aatattcacaatggc

SEQ ID NO: 1712647 - DNA, 15 bp, Homo sapiens
atattcacaatggcg

SEQ ID NO: 1712648 - DNA, 15 bp, Homo sapiens
tattcacaatggcgg

SEQ ID NO: 1712649 - DNA, 15 bp, Homo sapiens
attcacaatggcggg

SEQ ID NO: 1712650 - DNA, 15 bp, Homo sapiens
ttcacaatggcggga

SEQ ID NO: 1712651 - DNA, 15 bp, Homo sapiens
tcacaatggcgggaa

SEQ ID NO: 1712652 - DNA, 15 bp, Homo sapiens
cacaatggcgggaag

SEQ ID NO: 1712653 - DNA, 15 bp, Homo sapiens
acaatggcgggaagg

SEQ ID NO: 1712654 - DNA, 15 bp, Homo sapiens
caatggcgggaagga

SEQ ID NO: 1712655 - DNA, 15 bp, Homo sapiens
aatggcgggaaggag

SEQ ID NO: 1712656 - DNA, 15 bp, Homo sapiens
atggcgggaaggagt

SEQ ID NO: 1712657 - DNA, 15 bp, Homo sapiens
tggcgggaaggagtg

SEQ ID NO: 1712658 - DNA, 15 bp, Homo sapiens
ggcgggaaggagtgg

SEQ ID NO: 1712659 - DNA, 15 bp, Homo sapiens
gcgggaaggagtgga

SEQ ID NO: 1712660 - DNA, 15 bp, Homo sapiens
cgggaaggagtggag

SEQ ID NO: 1712661 - DNA, 15 bp, Homo sapiens
gggaaggagtggagt

SEQ ID NO: 1712662 - DNA, 15 bp, Homo sapiens
ggaaggagtggagtc

SEQ ID NO: 1712663 - DNA, 15 bp, Homo sapiens
gaaggagtggagtct

SEQ ID NO: 1712664 - DNA, 15 bp, Homo sapiens
aaggagtggagtctg

SEQ ID NO: 1712665 - DNA, 15 bp, Homo sapiens
aggagtggagtctgc

SEQ ID NO: 1712666 - DNA, 15 bp, Homo sapiens
ggagtggagtctgct

SEQ ID NO: 1712667 - DNA, 15 bp, Homo sapiens
gagtggagtctgctg

SEQ ID NO: 1712668 - DNA, 15 bp, Homo sapiens
agtggagtctgctgc

SEQ ID NO: 1712669 - DNA, 15 bp, Homo sapiens
gtggagtctgctgct

SEQ ID NO: 1712670 - DNA, 15 bp, Homo sapiens
tggagtctgctgctg

SEQ ID NO: 1712671 - DNA, 15 bp, Homo sapiens
ggagtctgctgctgg

SEQ ID NO: 1712672 - DNA, 15 bp, Homo sapiens
gagtctgctgctggg

SEQ ID NO: 1712673 - DNA, 15 bp, Homo sapiens
agtctgctgctgggg

SEQ ID NO: 1712674 - DNA, 15 bp, Homo sapiens
gtctgctgctggggg

SEQ ID NO: 1712675 - DNA, 15 bp, Homo sapiens
tctgctgctggggga

SEQ ID NO: 1712676 - DNA, 15 bp, Homo sapiens
ctgctgctgggggat

SEQ ID NO: 1712677 - DNA, 15 bp, Homo sapiens
tgctgctgggggatg

SEQ ID NO: 1712678 - DNA, 15 bp, Homo sapiens
gctgctgggggatga

SEQ ID NO: 1712679 - DNA, 15 bp, Homo sapiens
ctgctgggggatgaa

SEQ ID NO: 1712680 - DNA, 15 bp, Homo sapiens
tgctgggggatgaaa

SEQ ID NO: 1712681 - DNA, 15 bp, Homo sapiens
gctgggggatgaaaa

SEQ ID NO: 1712682 - DNA, 15 bp, Homo sapiens
ctgggggatgaaaag

SEQ ID NO: 1712683 - DNA, 15 bp, Homo sapiens
tgggggatgaaaaga

SEQ ID NO: 1712684 - DNA, 15 bp, Homo sapiens
gggggatgaaaagat

SEQ ID NO: 1712685 - DNA, 15 bp, Homo sapiens
ggggatgaaaagata

SEQ ID NO: 1712686 - DNA, 15 bp, Homo sapiens
gggatgaaaagatac

SEQ ID NO: 1712687 - DNA, 15 bp, Homo sapiens
ggatgaaaagataca

SEQ ID NO: 1712688 - DNA, 15 bp, Homo sapiens
gatgaaaagatacat

SEQ ID NO: 1712689 - DNA, 15 bp, Homo sapiens
atgaaaagatacatg

SEQ ID NO: 1712690 - DNA, 15 bp, Homo sapiens
tgaaaagatacatga

SEQ ID NO: 1712691 - DNA, 15 bp, Homo sapiens
gaaaagatacatgag

SEQ ID NO: 1712692 - DNA, 15 bp, Homo sapiens
aaaagatacatgagt

SEQ ID NO: 1712693 - DNA, 15 bp, Homo sapiens
aaagatacatgagtg

SEQ ID NO: 1712694 - DNA, 15 bp, Homo sapiens
aagatacatgagtgg

SEQ ID NO: 1712695 - DNA, 15 bp, Homo sapiens
agatacatgagtgga

SEQ ID NO: 1712696 - DNA, 15 bp, Homo sapiens
gatacatgagtggaa

SEQ ID NO: 1712697 - DNA, 15 bp, Homo sapiens
atacatgagtggaac

SEQ ID NO: 1712698 - DNA, 15 bp, Homo sapiens
tacatgagtggaaca

SEQ ID NO: 1712699 - DNA, 15 bp, Homo sapiens
acatgagtggaacag

SEQ ID NO: 1712700 - DNA, 15 bp, Homo sapiens
catgagtggaacagc

SEQ ID NO: 1712701 - DNA, 15 bp, Homo sapiens
atgagtggaacagca

SEQ ID NO: 1712702 - DNA, 15 bp, Homo sapiens
tgagtggaacagcag

SEQ ID NO: 1712703 - DNA, 15 bp, Homo sapiens
gagtggaacagcagg

SEQ ID NO: 1712704 - DNA, 15 bp, Homo sapiens
agtggaacagcaggg

SEQ ID NO: 1712705 - DNA, 15 bp, Homo sapiens
gtggaacagcagggg

SEQ ID NO: 1712706 - DNA, 15 bp, Homo sapiens
tggaacagcaggggt

SEQ ID NO: 1712707 - DNA, 15 bp, Homo sapiens
ggaacagcaggggtt

SEQ ID NO: 1712708 - DNA, 15 bp, Homo sapiens
gaacagcaggggttc

SEQ ID NO: 1712709 - DNA, 15 bp, Homo sapiens
aacagcaggggttct

SEQ ID NO: 1712710 - DNA, 15 bp, Homo sapiens
acagcaggggttctt

SEQ ID NO: 1712711 - DNA, 15 bp, Homo sapiens
cagcaggggttcttt

SEQ ID NO: 1712712 - DNA, 15 bp, Homo sapiens
agcaggggttctttt

SEQ ID NO: 1712713 - DNA, 15 bp, Homo sapiens
gcaggggttcttttt

SEQ ID NO: 1712714 - DNA, 15 bp, Homo sapiens
caggggttctttttt

SEQ ID NO: 1712715 - DNA, 15 bp, Homo sapiens
aggggttcttttttg

SEQ ID NO: 1712716 - DNA, 15 bp, Homo sapiens
ggggttcttttttgt

SEQ ID NO: 1712717 - DNA, 15 bp, Homo sapiens
gggttcttttttgtt

SEQ ID NO: 1712718 - DNA, 15 bp, Homo sapiens
ggttcttttttgttt

SEQ ID NO: 1712719 - DNA, 15 bp, Homo sapiens
gttcttttttgtttt

SEQ ID NO: 1712720 - DNA, 15 bp, Homo sapiens
ttcttttttgttttc

SEQ ID NO: 1712721 - DNA, 15 bp, Homo sapiens
tcttttttgttttct

SEQ ID NO: 1712722 - DNA, 15 bp, Homo sapiens
cttttttgttttctt

SEQ ID NO: 1712723 - DNA, 15 bp, Homo sapiens
ttttttgttttcttt

SEQ ID NO: 1712724 - DNA, 15 bp, Homo sapiens
ttttgttttctttac

SEQ ID NO: 1712725 - DNA, 15 bp, Homo sapiens
tttgttttctttact

SEQ ID NO: 1712726 - DNA, 15 bp, Homo sapiens
ttgttttctttactt

SEQ ID NO: 1712727 - DNA, 15 bp, Homo sapiens
tgttttctttacttt

SEQ ID NO: 1712728 - DNA, 15 bp, Homo sapiens
gttttctttactttt

SEQ ID NO: 1712729 - DNA, 15 bp, Homo sapiens
ttttctttacttttc

SEQ ID NO: 1712730 - DNA, 15 bp, Homo sapiens
tttctttacttttcc

SEQ ID NO: 1712731 - DNA, 15 bp, Homo sapiens
ttctttacttttcct

SEQ ID NO: 1712732 - DNA, 15 bp, Homo sapiens
tctttacttttcctc

SEQ ID NO: 1712733 - DNA, 15 bp, Homo sapiens
ctttacttttcctcc

SEQ ID NO: 1712734 - DNA, 15 bp, Homo sapiens
tttacttttcctccc

SEQ ID NO: 1712735 - DNA, 15 bp, Homo sapiens
ttacttttcctccca

SEQ ID NO: 1712736 - DNA, 15 bp, Homo sapiens
tacttttcctcccag

SEQ ID NO: 1712737 - DNA, 15 bp, Homo sapiens
acttttcctcccaga

SEQ ID NO: 1712738 - DNA, 15 bp, Homo sapiens
cttttcctcccagac

SEQ ID NO: 1712739 - DNA, 15 bp, Homo sapiens
ttttcctcccagacc

SEQ ID NO: 1712740 - DNA, 15 bp, Homo sapiens
tttcctcccagacct

SEQ ID NO: 1712741 - DNA, 15 bp, Homo sapiens
ttcctcccagacctt

SEQ ID NO: 1712742 - DNA, 15 bp, Homo sapiens
tcctcccagacctta

SEQ ID NO: 1712743 - DNA, 15 bp, Homo sapiens
cctcccagaccttat

SEQ ID NO: 1712744 - DNA, 15 bp, Homo sapiens
ctcccagaccttatt

SEQ ID NO: 1712745 - DNA, 15 bp, Homo sapiens
tcccagaccttatta

SEQ ID NO: 1712746 - DNA, 15 bp, Homo sapiens
cccagaccttattat

SEQ ID NO: 1712747 - DNA, 15 bp, Homo sapiens
ccagaccttattatt

SEQ ID NO: 1712748 - DNA, 15 bp, Homo sapiens
cagaccttattatta

SEQ ID NO: 1712749 - DNA, 15 bp, Homo sapiens
agaccttattattaa

SEQ ID NO: 1712750 - DNA, 15 bp, Homo sapiens
gaccttattattaac

SEQ ID NO: 1712751 - DNA, 15 bp, Homo sapiens
accttattattaacc

SEQ ID NO: 1712752 - DNA, 15 bp, Homo sapiens
ccttattattaacct

SEQ ID NO: 1712753 - DNA, 15 bp, Homo sapiens
cttattattaacctt

SEQ ID NO: 1712754 - DNA, 15 bp, Homo sapiens
ttattattaaccttg

SEQ ID NO: 1712755 - DNA, 15 bp, Homo sapiens
tattattaaccttga

SEQ ID NO: 1712756 - DNA, 15 bp, Homo sapiens
attattaaccttgaa

SEQ ID NO: 1712757 - DNA, 15 bp, Homo sapiens
ttattaaccttgaat

SEQ ID NO: 1712758 - DNA, 15 bp, Homo sapiens
tattaaccttgaata

SEQ ID NO: 1712759 - DNA, 15 bp, Homo sapiens
attaaccttgaataa

SEQ ID NO: 1712760 - DNA, 15 bp, Homo sapiens
ttaaccttgaataat

SEQ ID NO: 1712761 - DNA, 15 bp, Homo sapiens
taaccttgaataatt

SEQ ID NO: 1712762 - DNA, 15 bp, Homo sapiens
aaccttgaataattc

SEQ ID NO: 1712763 - DNA, 15 bp, Homo sapiens
accttgaataattca

SEQ ID NO: 1712764 - DNA, 15 bp, Homo sapiens
ccttgaataattcag

SEQ ID NO: 1712765 - DNA, 15 bp, Homo sapiens
cttgaataattcaga

SEQ ID NO: 1712766 - DNA, 15 bp, Homo sapiens
ttgaataattcagat

SEQ ID NO: 1712767 - DNA, 15 bp, Homo sapiens
tgaataattcagata

SEQ ID NO: 1712768 - DNA, 15 bp, Homo sapiens
gaataattcagataa

SEQ ID NO: 1712769 - DNA, 15 bp, Homo sapiens
aataattcagataaa

SEQ ID NO: 1712770 - DNA, 15 bp, Homo sapiens
ataattcagataaac

SEQ ID NO: 1712771 - DNA, 15 bp, Homo sapiens
taattcagataaact

SEQ ID NO: 1712772 - DNA, 15 bp, Homo sapiens
aattcagataaactg

SEQ ID NO: 1712773 - DNA, 15 bp, Homo sapiens
attcagataaactga

SEQ ID NO: 1712774 - DNA, 15 bp, Homo sapiens
ttcagataaactgaa

SEQ ID NO: 1712775 - DNA, 15 bp, Homo sapiens
tcagataaactgaac

SEQ ID NO: 1712776 - DNA, 15 bp, Homo sapiens
cagataaactgaaca

SEQ ID NO: 1712777 - DNA, 15 bp, Homo sapiens
agataaactgaacag

SEQ ID NO: 1712778 - DNA, 15 bp, Homo sapiens
gataaactgaacagg

SEQ ID NO: 1712779 - DNA, 15 bp, Homo sapiens
ataaactgaacaggt

SEQ ID NO: 1712780 - DNA, 15 bp, Homo sapiens
taaactgaacaggtc

SEQ ID NO: 1712781 - DNA, 15 bp, Homo sapiens
aaactgaacaggtct

SEQ ID NO: 1712782 - DNA, 15 bp, Homo sapiens
aactgaacaggtctc

SEQ ID NO: 1712783 - DNA, 15 bp, Homo sapiens
actgaacaggtctct

SEQ ID NO: 1712784 - DNA, 15 bp, Homo sapiens
ctgaacaggtctctg

SEQ ID NO: 1712785 - DNA, 15 bp, Homo sapiens
tgaacaggtctctgt

SEQ ID NO: 1712786 - DNA, 15 bp, Homo sapiens
gaacaggtctctgtt

SEQ ID NO: 1712787 - DNA, 15 bp, Homo sapiens
aacaggtctctgttc

SEQ ID NO: 1712788 - DNA, 15 bp, Homo sapiens
acaggtctctgttcc

SEQ ID NO: 1712789 - DNA, 15 bp, Homo sapiens
caggtctctgttcct

SEQ ID NO: 1712790 - DNA, 15 bp, Homo sapiens
aggtctctgttcctt

SEQ ID NO: 1712791 - DNA, 15 bp, Homo sapiens
ggtctctgttccttg

SEQ ID NO: 1712792 - DNA, 15 bp, Homo sapiens
gtctctgttccttga

SEQ ID NO: 1712793 - DNA, 15 bp, Homo sapiens
tctctgttccttgaa

SEQ ID NO: 1712794 - DNA, 15 bp, Homo sapiens
ctctgttccttgaaa

SEQ ID NO: 1712795 - DNA, 15 bp, Homo sapiens
tctgttccttgaaac

SEQ ID NO: 1712796 - DNA, 15 bp, Homo sapiens
ctgttccttgaaacc

SEQ ID NO: 1712797 - DNA, 15 bp, Homo sapiens
tgttccttgaaacct

SEQ ID NO: 1712798 - DNA, 15 bp, Homo sapiens
gttccttgaaacctg

SEQ ID NO: 1712799 - DNA, 15 bp, Homo sapiens
ttccttgaaacctga

SEQ ID NO: 1712800 - DNA, 15 bp, Homo sapiens
tccttgaaacctgaa

SEQ ID NO: 1712801 - DNA, 15 bp, Homo sapiens
ccttgaaacctgaaa

SEQ ID NO: 1712802 - DNA, 15 bp, Homo sapiens
cttgaaacctgaaag

SEQ ID NO: 1712803 - DNA, 15 bp, Homo sapiens
ttgaaacctgaaaga

SEQ ID NO: 1712804 - DNA, 15 bp, Homo sapiens
tgaaacctgaaagaa

SEQ ID NO: 1712805 - DNA, 15 bp, Homo sapiens
gaaacctgaaagaat

SEQ ID NO: 1712806 - DNA, 15 bp, Homo sapiens
aaacctgaaagaatc

SEQ ID NO: 1712807 - DNA, 15 bp, Homo sapiens
aacctgaaagaatct

SEQ ID NO: 1712808 - DNA, 15 bp, Homo sapiens
acctgaaagaatcta

SEQ ID NO: 1712809 - DNA, 15 bp, Homo sapiens
cctgaaagaatctaa

SEQ ID NO: 1712810 - DNA, 15 bp, Homo sapiens
ctgaaagaatctaac

SEQ ID NO: 1712811 - DNA, 15 bp, Homo sapiens
tgaaagaatctaaca

SEQ ID NO: 1712812 - DNA, 15 bp, Homo sapiens
gaaagaatctaacat

SEQ ID NO: 1712813 - DNA, 15 bp, Homo sapiens
aaagaatctaacatg

SEQ ID NO: 1712814 - DNA, 15 bp, Homo sapiens
aagaatctaacatgc

SEQ ID NO: 1712815 - DNA, 15 bp, Homo sapiens
agaatctaacatgca

SEQ ID NO: 1712816 - DNA, 15 bp, Homo sapiens
gaatctaacatgcac

SEQ ID NO: 1712817 - DNA, 15 bp, Homo sapiens
aatctaacatgcaca

SEQ ID NO: 1712818 - DNA, 15 bp, Homo sapiens
atctaacatgcacat

SEQ ID NO: 1712819 - DNA, 15 bp, Homo sapiens
tctaacatgcacata

SEQ ID NO: 1712820 - DNA, 15 bp, Homo sapiens
ctaacatgcacatat

SEQ ID NO: 1712821 - DNA, 15 bp, Homo sapiens
taacatgcacatatg

SEQ ID NO: 1712822 - DNA, 15 bp, Homo sapiens
aacatgcacatatgg

SEQ ID NO: 1712823 - DNA, 15 bp, Homo sapiens
acatgcacatatggg

SEQ ID NO: 1712824 - DNA, 15 bp, Homo sapiens
catgcacatatggga

SEQ ID NO: 1712825 - DNA, 15 bp, Homo sapiens
atgcacatatgggaa

SEQ ID NO: 1712826 - DNA, 15 bp, Homo sapiens
tgcacatatgggaag

SEQ ID NO: 1712827 - DNA, 15 bp, Homo sapiens
gcacatatgggaagt

SEQ ID NO: 1712828 - DNA, 15 bp, Homo sapiens
cacatatgggaagtt

SEQ ID NO: 1712829 - DNA, 15 bp, Homo sapiens
acatatgggaagtta

SEQ ID NO: 1712830 - DNA, 15 bp, Homo sapiens
catatgggaagttat

SEQ ID NO: 1712831 - DNA, 15 bp, Homo sapiens
atatgggaagttatt

SEQ ID NO: 1712832 - DNA, 15 bp, Homo sapiens
tatgggaagttattt

SEQ ID NO: 1712833 - DNA, 15 bp, Homo sapiens
atgggaagttattta

SEQ ID NO: 1712834 - DNA, 15 bp, Homo sapiens
tgggaagttatttaa

SEQ ID NO: 1712835 - DNA, 15 bp, Homo sapiens
gggaagttatttaag

SEQ ID NO: 1712836 - DNA, 15 bp, Homo sapiens
ggaagttatttaagt

SEQ ID NO: 1712837 - DNA, 15 bp, Homo sapiens
gaagttatttaagtc

SEQ ID NO: 1712838 - DNA, 15 bp, Homo sapiens
aagttatttaagtca

SEQ ID NO: 1712839 - DNA, 15 bp, Homo sapiens
agttatttaagtcat

SEQ ID NO: 1712840 - DNA, 15 bp, Homo sapiens
gttatttaagtcatg

SEQ ID NO: 1712841 - DNA, 15 bp, Homo sapiens
ttatttaagtcatgg

SEQ ID NO: 1712842 - DNA, 15 bp, Homo sapiens
tatttaagtcatggg

SEQ ID NO: 1712843 - DNA, 15 bp, Homo sapiens
atttaagtcatggga

SEQ ID NO: 1712844 - DNA, 15 bp, Homo sapiens
tttaagtcatgggat

SEQ ID NO: 1712845 - DNA, 15 bp, Homo sapiens
ttaagtcatgggatt

SEQ ID NO: 1712846 - DNA, 15 bp, Homo sapiens
taagtcatgggattg

SEQ ID NO: 1712847 - DNA, 15 bp, Homo sapiens
aagtcatgggattga

SEQ ID NO: 1712848 - DNA, 15 bp, Homo sapiens
agtcatgggattgaa

SEQ ID NO: 1712849 - DNA, 15 bp, Homo sapiens
gtcatgggattgaaa

SEQ ID NO: 1712850 - DNA, 15 bp, Homo sapiens
tcatgggattgaaat

SEQ ID NO: 1712851 - DNA, 15 bp, Homo sapiens
catgggattgaaata

SEQ ID NO: 1712852 - DNA, 15 bp, Homo sapiens
atgggattgaaatag

SEQ ID NO: 1712853 - DNA, 15 bp, Homo sapiens
tgggattgaaataga

SEQ ID NO: 1712854 - DNA, 15 bp, Homo sapiens
gggattgaaatagag

SEQ ID NO: 1712855 - DNA, 15 bp, Homo sapiens
ggattgaaatagagc

SEQ ID NO: 1712856 - DNA, 15 bp, Homo sapiens
gattgaaatagagca

SEQ ID NO: 1712857 - DNA, 15 bp, Homo sapiens
attgaaatagagcaa

SEQ ID NO: 1712858 - DNA, 15 bp, Homo sapiens
ttgaaatagagcaag

SEQ ID NO: 1712859 - DNA, 15 bp, Homo sapiens
tgaaatagagcaaga

SEQ ID NO: 1712860 - DNA, 15 bp, Homo sapiens
gaaatagagcaagaa

SEQ ID NO: 1712861 - DNA, 15 bp, Homo sapiens
aaatagagcaagaag

SEQ ID NO: 1712862 - DNA, 15 bp, Homo sapiens
aatagagcaagaaga

SEQ ID NO: 1712863 - DNA, 15 bp, Homo sapiens
atagagcaagaagag

SEQ ID NO: 1712864 - DNA, 15 bp, Homo sapiens
tagagcaagaagaga

SEQ ID NO: 1712865 - DNA, 15 bp, Homo sapiens
agagcaagaagagag

SEQ ID NO: 1712866 - DNA, 15 bp, Homo sapiens
gagcaagaagagagg

SEQ ID NO: 1712867 - DNA, 15 bp, Homo sapiens
agcaagaagagagga

SEQ ID NO: 1712868 - DNA, 15 bp, Homo sapiens
gcaagaagagaggag

SEQ ID NO: 1712869 - DNA, 15 bp, Homo sapiens
caagaagagaggagg

SEQ ID NO: 1712870 - DNA, 15 bp, Homo sapiens
aagaagagaggagga

SEQ ID NO: 1712871 - DNA, 15 bp, Homo sapiens
agaagagaggaggat

SEQ ID NO: 1712872 - DNA, 15 bp, Homo sapiens
gaagagaggaggatt

SEQ ID NO: 1712873 - DNA, 15 bp, Homo sapiens
aagagaggaggattg

SEQ ID NO: 1712874 - DNA, 15 bp, Homo sapiens
agagaggaggattga

SEQ ID NO: 1712875 - DNA, 15 bp, Homo sapiens
gagaggaggattgaa

SEQ ID NO: 1712876 - DNA, 15 bp, Homo sapiens
agaggaggattgaag

SEQ ID NO: 1712877 - DNA, 15 bp, Homo sapiens
gaggaggattgaaga

SEQ ID NO: 1712878 - DNA, 15 bp, Homo sapiens
aggaggattgaagac

SEQ ID NO: 1712879 - DNA, 15 bp, Homo sapiens
ggaggattgaagacg

SEQ ID NO: 1712880 - DNA, 15 bp, Homo sapiens
gaggattgaagacgc

SEQ ID NO: 1712881 - DNA, 15 bp, Homo sapiens
aggattgaagacgct

SEQ ID NO: 1712882 - DNA, 15 bp, Homo sapiens
ggattgaagacgctt

SEQ ID NO: 1712883 - DNA, 15 bp, Homo sapiens
gattgaagacgcttg

SEQ ID NO: 1712884 - DNA, 15 bp, Homo sapiens
attgaagacgcttga

SEQ ID NO: 1712885 - DNA, 15 bp, Homo sapiens
ttgaagacgcttgaa

SEQ ID NO: 1712886 - DNA, 15 bp, Homo sapiens
tgaagacgcttgaag

SEQ ID NO: 1712887 - DNA, 15 bp, Homo sapiens
gaagacgcttgaaga

SEQ ID NO: 1712888 - DNA, 15 bp, Homo sapiens
aagacgcttgaagac

SEQ ID NO: 1712889 - DNA, 15 bp, Homo sapiens
agacgcttgaagacc

SEQ ID NO: 1712890 - DNA, 15 bp, Homo sapiens
gacgcttgaagacca

SEQ ID NO: 1712891 - DNA, 15 bp, Homo sapiens
acgcttgaagaccag

SEQ ID NO: 1712892 - DNA, 15 bp, Homo sapiens
cgcttgaagaccagt

SEQ ID NO: 1712893 - DNA, 15 bp, Homo sapiens
gcttgaagaccagtg

SEQ ID NO: 1712894 - DNA, 15 bp, Homo sapiens
cttgaagaccagtgt

SEQ ID NO: 1712895 - DNA, 15 bp, Homo sapiens
ttgaagaccagtgtt

SEQ ID NO: 1712896 - DNA, 15 bp, Homo sapiens
tgaagaccagtgttt

SEQ ID NO: 1712897 - DNA, 15 bp, Homo sapiens
gaagaccagtgtttc

SEQ ID NO: 1712898 - DNA, 15 bp, Homo sapiens
aagaccagtgtttcc

SEQ ID NO: 1712899 - DNA, 15 bp, Homo sapiens
agaccagtgtttccc

SEQ ID NO: 1712900 - DNA, 15 bp, Homo sapiens
gaccagtgtttccca

SEQ ID NO: 1712901 - DNA, 15 bp, Homo sapiens
accagtgtttcccac

SEQ ID NO: 1712902 - DNA, 15 bp, Homo sapiens
ccagtgtttcccaca

SEQ ID NO: 1712903 - DNA, 15 bp, Homo sapiens
cagtgtttcccacac

SEQ ID NO: 1712904 - DNA, 15 bp, Homo sapiens
agtgtttcccacact

SEQ ID NO: 1712905 - DNA, 15 bp, Homo sapiens
gtgtttcccacacta

SEQ ID NO: 1712906 - DNA, 15 bp, Homo sapiens
tgtttcccacactat

SEQ ID NO: 1712907 - DNA, 15 bp, Homo sapiens
gtttcccacactatc

SEQ ID NO: 1712908 - DNA, 15 bp, Homo sapiens
tttcccacactatct

SEQ ID NO: 1712909 - DNA, 15 bp, Homo sapiens
ttcccacactatctg

SEQ ID NO: 1712910 - DNA, 15 bp, Homo sapiens
tcccacactatctgt

SEQ ID NO: 1712911 - DNA, 15 bp, Homo sapiens
cccacactatctgtg

SEQ ID NO: 1712912 - DNA, 15 bp, Homo sapiens
ccacactatctgtga

SEQ ID NO: 1712913 - DNA, 15 bp, Homo sapiens
cacactatctgtgaa

SEQ ID NO: 1712914 - DNA, 15 bp, Homo sapiens
acactatctgtgaag

SEQ ID NO: 1712915 - DNA, 15 bp, Homo sapiens
cactatctgtgaagg

SEQ ID NO: 1712916 - DNA, 15 bp, Homo sapiens
actatctgtgaagga

SEQ ID NO: 1712917 - DNA, 15 bp, Homo sapiens
ctatctgtgaaggaa

SEQ ID NO: 1712918 - DNA, 15 bp, Homo sapiens
tatctgtgaaggaac

SEQ ID NO: 1712919 - DNA, 15 bp, Homo sapiens
atctgtgaaggaact

SEQ ID NO: 1712920 - DNA, 15 bp, Homo sapiens
tctgtgaaggaactt

SEQ ID NO: 1712921 - DNA, 15 bp, Homo sapiens
ctgtgaaggaacttt

SEQ ID NO: 1712922 - DNA, 15 bp, Homo sapiens
tgtgaaggaactttt

SEQ ID NO: 1712923 - DNA, 15 bp, Homo sapiens
gtgaaggaacttttc

SEQ ID NO: 1712924 - DNA, 15 bp, Homo sapiens
tgaaggaacttttca

SEQ ID NO: 1712925 - DNA, 15 bp, Homo sapiens
gaaggaacttttcat

SEQ ID NO: 1712926 - DNA, 15 bp, Homo sapiens
aaggaacttttcatt

SEQ ID NO: 1712927 - DNA, 15 bp, Homo sapiens
aggaacttttcattc

SEQ ID NO: 1712928 - DNA, 15 bp, Homo sapiens
ggaacttttcattct

SEQ ID NO: 1712929 - DNA, 15 bp, Homo sapiens
gaacttttcattctt

SEQ ID NO: 1712930 - DNA, 15 bp, Homo sapiens
aacttttcattcttt

SEQ ID NO: 1712931 - DNA, 15 bp, Homo sapiens
acttttcattctttt

SEQ ID NO: 1712932 - DNA, 15 bp, Homo sapiens
ttttcattctttttc

SEQ ID NO: 1712933 - DNA, 15 bp, Homo sapiens
tttcattctttttca

SEQ ID NO: 1712934 - DNA, 15 bp, Homo sapiens
ttcattctttttcat

SEQ ID NO: 1712935 - DNA, 15 bp, Homo sapiens
tcattctttttcatt

SEQ ID NO: 1712936 - DNA, 15 bp, Homo sapiens
cattctttttcatta

SEQ ID NO: 1712937 - DNA, 15 bp, Homo sapiens
ttctttttcattaac

SEQ ID NO: 1712938 - DNA, 15 bp, Homo sapiens
tctttttcattaact

SEQ ID NO: 1712939 - DNA, 15 bp, Homo sapiens
ctttttcattaactg

SEQ ID NO: 1712940 - DNA, 15 bp, Homo sapiens
tttttcattaactgt

SEQ ID NO: 1712941 - DNA, 15 bp, Homo sapiens
ttttcattaactgtt

SEQ ID NO: 1712942 - DNA, 15 bp, Homo sapiens
tttcattaactgttt

SEQ ID NO: 1712943 - DNA, 15 bp, Homo sapiens
ttcattaactgtttg

SEQ ID NO: 1712944 - DNA, 15 bp, Homo sapiens
tcattaactgtttgt

SEQ ID NO: 1712945 - DNA, 15 bp, Homo sapiens
cattaactgtttgtc

SEQ ID NO: 1712946 - DNA, 15 bp, Homo sapiens
attaactgtttgtca

SEQ ID NO: 1712947 - DNA, 15 bp, Homo sapiens
ttaactgtttgtcat

SEQ ID NO: 1712948 - DNA, 15 bp, Homo sapiens
taactgtttgtcatg

SEQ ID NO: 1712949 - DNA, 15 bp, Homo sapiens
aactgtttgtcatga

SEQ ID NO: 1712950 - DNA, 15 bp, Homo sapiens
actgtttgtcatgaa

SEQ ID NO: 1712951 - DNA, 15 bp, Homo sapiens
ctgtttgtcatgaag

SEQ ID NO: 1712952 - DNA, 15 bp, Homo sapiens
tgtttgtcatgaagt

SEQ ID NO: 1712953 - DNA, 15 bp, Homo sapiens
gtttgtcatgaagtg

SEQ ID NO: 1712954 - DNA, 15 bp, Homo sapiens
tttgtcatgaagtga

SEQ ID NO: 1712955 - DNA, 15 bp, Homo sapiens
ttgtcatgaagtgat

SEQ ID NO: 1712956 - DNA, 15 bp, Homo sapiens
tgtcatgaagtgata

SEQ ID NO: 1712957 - DNA, 15 bp, Homo sapiens
gtcatgaagtgatat

SEQ ID NO: 1712958 - DNA, 15 bp, Homo sapiens
tcatgaagtgatatt

SEQ ID NO: 1712959 - DNA, 15 bp, Homo sapiens
catgaagtgatatta

SEQ ID NO: 1712960 - DNA, 15 bp, Homo sapiens
atgaagtgatattaa

SEQ ID NO: 1712961 - DNA, 15 bp, Homo sapiens
tgaagtgatattaac

SEQ ID NO: 1712962 - DNA, 15 bp, Homo sapiens
gaagtgatattaaca

SEQ ID NO: 1712963 - DNA, 15 bp, Homo sapiens
aagtgatattaacac

SEQ ID NO: 1712964 - DNA, 15 bp, Homo sapiens
agtgatattaacact

SEQ ID NO: 1712965 - DNA, 15 bp, Homo sapiens
gtgatattaacactt

SEQ ID NO: 1712966 - DNA, 15 bp, Homo sapiens
tgatattaacacttt

SEQ ID NO: 1712967 - DNA, 15 bp, Homo sapiens
gatattaacactttg

SEQ ID NO: 1712968 - DNA, 15 bp, Homo sapiens
atattaacactttgg

SEQ ID NO: 1712969 - DNA, 15 bp, Homo sapiens
tattaacactttgga

SEQ ID NO: 1712970 - DNA, 15 bp, Homo sapiens
attaacactttggaa

SEQ ID NO: 1712971 - DNA, 15 bp, Homo sapiens
ttaacactttggaat

SEQ ID NO: 1712972 - DNA, 15 bp, Homo sapiens
taacactttggaatg

SEQ ID NO: 1712973 - DNA, 15 bp, Homo sapiens
aacactttggaatgt

SEQ ID NO: 1712974 - DNA, 15 bp, Homo sapiens
acactttggaatgta

SEQ ID NO: 1712975 - DNA, 15 bp, Homo sapiens
cactttggaatgtaa

SEQ ID NO: 1712976 - DNA, 15 bp, Homo sapiens
actttggaatgtaaa

SEQ ID NO: 1712977 - DNA, 15 bp, Homo sapiens
ctttggaatgtaaaa

SEQ ID NO: 1712978 - DNA, 15 bp, Homo sapiens
tttggaatgtaaaat

SEQ ID NO: 1712979 - DNA, 15 bp, Homo sapiens
ttggaatgtaaaata

SEQ ID NO: 1712980 - DNA, 15 bp, Homo sapiens
tggaatgtaaaatag

SEQ ID NO: 1712981 - DNA, 15 bp, Homo sapiens
ggaatgtaaaataga

SEQ ID NO: 1712982 - DNA, 15 bp, Homo sapiens
gaatgtaaaatagaa

SEQ ID NO: 1712983 - DNA, 15 bp, Homo sapiens
aatgtaaaatagaaa

SEQ ID NO: 1712984 - DNA, 15 bp, Homo sapiens
atgtaaaatagaaac

SEQ ID NO: 1712985 - DNA, 15 bp, Homo sapiens
tgtaaaatagaaaca

SEQ ID NO: 1712986 - DNA, 15 bp, Homo sapiens
gtaaaatagaaacaa

SEQ ID NO: 1712987 - DNA, 15 bp, Homo sapiens
taaaatagaaacaaa

SEQ ID NO: 1712988 - DNA, 15 bp, Homo sapiens
aaaatagaaacaaat

SEQ ID NO: 1712989 - DNA, 15 bp, Homo sapiens
aaatagaaacaaatt

SEQ ID NO: 1712990 - DNA, 15 bp, Homo sapiens
aatagaaacaaattg

SEQ ID NO: 1712991 - DNA, 15 bp, Homo sapiens
atagaaacaaattgc

SEQ ID NO: 1712992 - DNA, 15 bp, Homo sapiens
tagaaacaaattgca

SEQ ID NO: 1712993 - DNA, 15 bp, Homo sapiens
agaaacaaattgcaa

SEQ ID NO: 1712994 - DNA, 15 bp, Homo sapiens
gaaacaaattgcaaa

SEQ ID NO: 1712995 - DNA, 15 bp, Homo sapiens
aaacaaattgcaaaa

SEQ ID NO: 1712996 - DNA, 15 bp, Homo sapiens
aacaaattgcaaaaa

SEQ ID NO: 1712997 - DNA, 15 bp, Homo sapiens
acaaattgcaaaaaa

SEQ ID NO: 1712998 - DNA, 15 bp, Homo sapiens
caaattgcaaaaaat

SEQ ID NO: 1712999 - DNA, 15 bp, Homo sapiens
aaattgcaaaaaatt

SEQ ID NO: 1713000 - DNA, 15 bp, Homo sapiens
aattgcaaaaaatta

SEQ ID NO: 1713001 - DNA, 15 bp, Homo sapiens
attgcaaaaaattat

SEQ ID NO: 1713002 - DNA, 15 bp, Homo sapiens
ttgcaaaaaattata

SEQ ID NO: 1713003 - DNA, 15 bp, Homo sapiens
tgcaaaaaattataa

SEQ ID NO: 1713004 - DNA, 15 bp, Homo sapiens
gcaaaaaattataat

SEQ ID NO: 1713005 - DNA, 15 bp, Homo sapiens
caaaaaattataatg

SEQ ID NO: 1713006 - DNA, 15 bp, Homo sapiens
aaaaaattataatga

SEQ ID NO: 1713007 - DNA, 15 bp, Homo sapiens
aaaaattataatgaa

SEQ ID NO: 1713008 - DNA, 15 bp, Homo sapiens
aaaattataatgaaa

SEQ ID NO: 1713009 - DNA, 15 bp, Homo sapiens
aaattataatgaaaa

SEQ ID NO: 1713010 - DNA, 15 bp, Homo sapiens
aattataatgaaaac

SEQ ID NO: 1713011 - DNA, 15 bp, Homo sapiens
attataatgaaaaca

SEQ ID NO: 1713012 - DNA, 15 bp, Homo sapiens
ttataatgaaaacag

SEQ ID NO: 1713013 - DNA, 15 bp, Homo sapiens
tataatgaaaacaga

SEQ ID NO: 1713014 - DNA, 15 bp, Homo sapiens
ataatgaaaacagag

SEQ ID NO: 1713015 - DNA, 15 bp, Homo sapiens
taatgaaaacagagg

SEQ ID NO: 1713016 - DNA, 15 bp, Homo sapiens
aatgaaaacagaggc

SEQ ID NO: 1713017 - DNA, 15 bp, Homo sapiens
atgaaaacagaggca

SEQ ID NO: 1713018 - DNA, 15 bp, Homo sapiens
tgaaaacagaggcac

SEQ ID NO: 1713019 - DNA, 15 bp, Homo sapiens
aaaacagaggcacac

SEQ ID NO: 1713020 - DNA, 15 bp, Homo sapiens
aaacagaggcacacc

SEQ ID NO: 1713021 - DNA, 15 bp, Homo sapiens
aacagaggcacacca

SEQ ID NO: 1713022 - DNA, 15 bp, Homo sapiens
acagaggcacaccaa

SEQ ID NO: 1713023 - DNA, 15 bp, Homo sapiens
cagaggcacaccaaa

SEQ ID NO: 1713024 - DNA, 15 bp, Homo sapiens
agaggcacaccaaat

SEQ ID NO: 1713025 - DNA, 15 bp, Homo sapiens
gaggcacaccaaata

SEQ ID NO: 1713026 - DNA, 15 bp, Homo sapiens
aggcacaccaaatat

SEQ ID NO: 1713027 - DNA, 15 bp, Homo sapiens
ggcacaccaaatatt

SEQ ID NO: 1713028 - DNA, 15 bp, Homo sapiens
gcacaccaaatattg

SEQ ID NO: 1713029 - DNA, 15 bp, Homo sapiens
cacaccaaatattgt

SEQ ID NO: 1713030 - DNA, 15 bp, Homo sapiens
acaccaaatattgta

SEQ ID NO: 1713031 - DNA, 15 bp, Homo sapiens
caccaaatattgtac

SEQ ID NO: 1713032 - DNA, 15 bp, Homo sapiens
accaaatattgtaca

SEQ ID NO: 1713033 - DNA, 15 bp, Homo sapiens
ccaaatattgtacaa

SEQ ID NO: 1713034 - DNA, 15 bp, Homo sapiens
caaatattgtacaag

SEQ ID NO: 1713035 - DNA, 15 bp, Homo sapiens
aaatattgtacaagc

SEQ ID NO: 1713036 - DNA, 15 bp, Homo sapiens
aatattgtacaagct

SEQ ID NO: 1713037 - DNA, 15 bp, Homo sapiens
atattgtacaagctc

SEQ ID NO: 1713038 - DNA, 15 bp, Homo sapiens
tattgtacaagctca

SEQ ID NO: 1713039 - DNA, 15 bp, Homo sapiens
attgtacaagctcac

SEQ ID NO: 1713040 - DNA, 15 bp, Homo sapiens
ttgtacaagctcaca

SEQ ID NO: 1713041 - DNA, 15 bp, Homo sapiens
tgtacaagctcacat

SEQ ID NO: 1713042 - DNA, 15 bp, Homo sapiens
gtacaagctcacatt

SEQ ID NO: 1713043 - DNA, 15 bp, Homo sapiens
tacaagctcacattt

SEQ ID NO: 1713044 - DNA, 15 bp, Homo sapiens
acaagctcacatttt

SEQ ID NO: 1713045 - DNA, 15 bp, Homo sapiens
caagctcacattttt

SEQ ID NO: 1713046 - DNA, 15 bp, Homo sapiens
aagctcacatttttt

SEQ ID NO: 1713047 - DNA, 15 bp, Homo sapiens
agctcacatttttta

SEQ ID NO: 1713048 - DNA, 15 bp, Homo sapiens
gctcacattttttag

SEQ ID NO: 1713049 - DNA, 15 bp, Homo sapiens
ctcacattttttaga

SEQ ID NO: 1713050 - DNA, 15 bp, Homo sapiens
tcacattttttagat

SEQ ID NO: 1713051 - DNA, 15 bp, Homo sapiens
cacattttttagatt

SEQ ID NO: 1713052 - DNA, 15 bp, Homo sapiens
acattttttagatta

SEQ ID NO: 1713053 - DNA, 15 bp, Homo sapiens
cattttttagattaa

SEQ ID NO: 1713054 - DNA, 15 bp, Homo sapiens
attttttagattaaa

SEQ ID NO: 1713055 - DNA, 15 bp, Homo sapiens
ttttttagattaaac

SEQ ID NO: 1713056 - DNA, 15 bp, Homo sapiens
tttttagattaaaca

SEQ ID NO: 1713057 - DNA, 15 bp, Homo sapiens
ttttagattaaacag

SEQ ID NO: 1713058 - DNA, 15 bp, Homo sapiens
tttagattaaacaga

SEQ ID NO: 1713059 - DNA, 15 bp, Homo sapiens
ttagattaaacagaa

SEQ ID NO: 1713060 - DNA, 15 bp, Homo sapiens
tagattaaacagaaa

SEQ ID NO: 1713061 - DNA, 15 bp, Homo sapiens
agattaaacagaaat

SEQ ID NO: 1713062 - DNA, 15 bp, Homo sapiens
gattaaacagaaata

SEQ ID NO: 1713063 - DNA, 15 bp, Homo sapiens
attaaacagaaatag

SEQ ID NO: 1713064 - DNA, 15 bp, Homo sapiens
ttaaacagaaataga

SEQ ID NO: 1713065 - DNA, 15 bp, Homo sapiens
taaacagaaatagaa

SEQ ID NO: 1713066 - DNA, 15 bp, Homo sapiens
aaacagaaatagaat

SEQ ID NO: 1713067 - DNA, 15 bp, Homo sapiens
aacagaaatagaatt

SEQ ID NO: 1713068 - DNA, 15 bp, Homo sapiens
acagaaatagaatta

SEQ ID NO: 1713069 - DNA, 15 bp, Homo sapiens
cagaaatagaattac

SEQ ID NO: 1713070 - DNA, 15 bp, Homo sapiens
agaaatagaattaca

SEQ ID NO: 1713071 - DNA, 15 bp, Homo sapiens
gaaatagaattacat

SEQ ID NO: 1713072 - DNA, 15 bp, Homo sapiens
aaatagaattacatt

SEQ ID NO: 1713073 - DNA, 15 bp, Homo sapiens
aatagaattacattt

SEQ ID NO: 1713074 - DNA, 15 bp, Homo sapiens
atagaattacatttc

SEQ ID NO: 1713075 - DNA, 15 bp, Homo sapiens
tagaattacatttca

SEQ ID NO: 1713076 - DNA, 15 bp, Homo sapiens
agaattacatttcaa

SEQ ID NO: 1713077 - DNA, 15 bp, Homo sapiens
gaattacatttcaat

SEQ ID NO: 1713078 - DNA, 15 bp, Homo sapiens
aattacatttcaata

SEQ ID NO: 1713079 - DNA, 15 bp, Homo sapiens
attacatttcaataa

SEQ ID NO: 1713080 - DNA, 15 bp, Homo sapiens
ttacatttcaataaa

SEQ ID NO: 1713081 - DNA, 15 bp, Homo sapiens
tacatttcaataaaa

SEQ ID NO: 1713082 - DNA, 15 bp, Homo sapiens
acatttcaataaaaa

SEQ ID NO: 1713083 - DNA, 15 bp, Homo sapiens
catttcaataaaaat

SEQ ID NO: 1713084 - DNA, 15 bp, Homo sapiens
atttcaataaaaatt

SEQ ID NO: 1713085 - DNA, 15 bp, Homo sapiens
tttcaataaaaatta

SEQ ID NO: 1713086 - DNA, 15 bp, Homo sapiens
ttcaataaaaattat

SEQ ID NO: 1713087 - DNA, 15 bp, Homo sapiens
tcaataaaaattatc

SEQ ID NO: 1713088 - DNA, 15 bp, Homo sapiens
caataaaaattatca

SEQ ID NO: 1713089 - DNA, 15 bp, Homo sapiens
aataaaaattatcag

SEQ ID NO: 1713090 - DNA, 15 bp, Homo sapiens
ataaaaattatcaga

SEQ ID NO: 1713091 - DNA, 15 bp, Homo sapiens
taaaaattatcagaa

SEQ ID NO: 1713092 - DNA, 15 bp, Homo sapiens
aaaaattatcagaac

SEQ ID NO: 1713093 - DNA, 15 bp, Homo sapiens
aaaattatcagaaca

SEQ ID NO: 1713094 - DNA, 15 bp, Homo sapiens
aaattatcagaacaa

SEQ ID NO: 1713095 - DNA, 15 bp, Homo sapiens
aattatcagaacaaa

SEQ ID NO: 1713096 - DNA, 15 bp, Homo sapiens
attatcagaacaaac

SEQ ID NO: 1713097 - DNA, 15 bp, Homo sapiens
ttatcagaacaaaca

SEQ ID NO: 1713098 - DNA, 15 bp, Homo sapiens
tatcagaacaaacat

SEQ ID NO: 1713099 - DNA, 15 bp, Homo sapiens
atcagaacaaacata

SEQ ID NO: 1713100 - DNA, 15 bp, Homo sapiens
tcagaacaaacataa

SEQ ID NO: 1713101 - DNA, 15 bp, Homo sapiens
cagaacaaacataaa

SEQ ID NO: 1713102 - DNA, 15 bp, Homo sapiens
agaacaaacataaat

SEQ ID NO: 1713103 - DNA, 15 bp, Homo sapiens
gaacaaacataaata

SEQ ID NO: 1713104 - DNA, 15 bp, Homo sapiens
aacaaacataaataa

SEQ ID NO: 1713105 - DNA, 15 bp, Homo sapiens
acaaacataaataaa

SEQ ID NO: 1713106 - DNA, 15 bp, Homo sapiens
caaacataaataaaa

SEQ ID NO: 1713107 - DNA, 15 bp, Homo sapiens
aaacataaataaaag

SEQ ID NO: 1713108 - DNA, 15 bp, Homo sapiens
cataaataaaagaaa

SEQ ID NO: 1713109 - DNA, 15 bp, Homo sapiens
ataaataaaagaaaa

SEQ ID NO: 1713110 - DNA, 15 bp, Homo sapiens
taaataaaagaaaaa

SEQ ID NO: 1713111 - DNA, 15 bp, Homo sapiens
aaataaaagaaaaaa

SEQ ID NO: 1713112 - DNA, 15 bp, Homo sapiens
aataaaagaaaaaat

SEQ ID NO: 1713113 - DNA, 15 bp, Homo sapiens
ataaaagaaaaaatt

SEQ ID NO: 1713114 - DNA, 15 bp, Homo sapiens
taaaagaaaaaatta

SEQ ID NO: 1713115 - DNA, 15 bp, Homo sapiens
aaaagaaaaaattac

SEQ ID NO: 1713116 - DNA, 15 bp, Homo sapiens
aaagaaaaaattaca

SEQ ID NO: 1713117 - DNA, 15 bp, Homo sapiens
aagaaaaaattacaa

SEQ ID NO: 1713118 - DNA, 15 bp, Homo sapiens
agaaaaaattacaaa

SEQ ID NO: 1713119 - DNA, 15 bp, Homo sapiens
gaaaaaattacaaaa

SEQ ID NO: 1713120 - DNA, 15 bp, Homo sapiens
aaaaaattacaaaat

SEQ ID NO: 1713121 - DNA, 15 bp, Homo sapiens
aaaaattacaaaatg

SEQ ID NO: 1713122 - DNA, 15 bp, Homo sapiens
aaaattacaaaatgt

SEQ ID NO: 1713123 - DNA, 15 bp, Homo sapiens
aaattacaaaatgta

SEQ ID NO: 1713124 - DNA, 15 bp, Homo sapiens
aattacaaaatgtac

SEQ ID NO: 1713125 - DNA, 15 bp, Homo sapiens
attacaaaatgtaca

SEQ ID NO: 1713126 - DNA, 15 bp, Homo sapiens
ttacaaaatgtacat

SEQ ID NO: 1713127 - DNA, 15 bp, Homo sapiens
tacaaaatgtacatt

SEQ ID NO: 1713128 - DNA, 15 bp, Homo sapiens
acaaaatgtacattg

SEQ ID NO: 1713129 - DNA, 15 bp, Homo sapiens
caaaatgtacattgc

SEQ ID NO: 1713130 - DNA, 15 bp, Homo sapiens
aaatgtacattgctt

SEQ ID NO: 1713131 - DNA, 15 bp, Homo sapiens
aatgtacattgctta

SEQ ID NO: 1713132 - DNA, 15 bp, Homo sapiens
atgtacattgcttat

SEQ ID NO: 1713133 - DNA, 15 bp, Homo sapiens
tgtacattgcttatt

SEQ ID NO: 1713134 - DNA, 15 bp, Homo sapiens
gtacattgcttattg

SEQ ID NO: 1713135 - DNA, 15 bp, Homo sapiens
tacattgcttattga

SEQ ID NO: 1713136 - DNA, 15 bp, Homo sapiens
acattgcttattgaa

SEQ ID NO: 1713137 - DNA, 15 bp, Homo sapiens
cattgcttattgaaa

SEQ ID NO: 1713138 - DNA, 15 bp, Homo sapiens
attgcttattgaaag

SEQ ID NO: 1713139 - DNA, 15 bp, Homo sapiens
ttgcttattgaaagt

SEQ ID NO: 1713140 - DNA, 15 bp, Homo sapiens
tgcttattgaaagtg

SEQ ID NO: 1713141 - DNA, 15 bp, Homo sapiens
gcttattgaaagtgt

SEQ ID NO: 1713142 - DNA, 15 bp, Homo sapiens
cttattgaaagtgtc

SEQ ID NO: 1713143 - DNA, 15 bp, Homo sapiens
ttattgaaagtgtcc

SEQ ID NO: 1713144 - DNA, 15 bp, Homo sapiens
tattgaaagtgtcca

SEQ ID NO: 1713145 - DNA, 15 bp, Homo sapiens
attgaaagtgtccag

SEQ ID NO: 1713146 - DNA, 15 bp, Homo sapiens
ttgaaagtgtccaga

SEQ ID NO: 1713147 - DNA, 15 bp, Homo sapiens
tgaaagtgtccagat

SEQ ID NO: 1713148 - DNA, 15 bp, Homo sapiens
gaaagtgtccagata

SEQ ID NO: 1713149 - DNA, 15 bp, Homo sapiens
aaagtgtccagatag

SEQ ID NO: 1713150 - DNA, 15 bp, Homo sapiens
aagtgtccagataga

SEQ ID NO: 1713151 - DNA, 15 bp, Homo sapiens
agtgtccagatagat

SEQ ID NO: 1713152 - DNA, 15 bp, Homo sapiens
gtgtccagatagata

SEQ ID NO: 1713153 - DNA, 15 bp, Homo sapiens
tgtccagatagataa

SEQ ID NO: 1713154 - DNA, 15 bp, Homo sapiens
gtccagatagataat

SEQ ID NO: 1713155 - DNA, 15 bp, Homo sapiens
tccagatagataatt

SEQ ID NO: 1713156 - DNA, 15 bp, Homo sapiens
ccagatagataatta

SEQ ID NO: 1713157 - DNA, 15 bp, Homo sapiens
cagatagataattaa

SEQ ID NO: 1713158 - DNA, 15 bp, Homo sapiens
agatagataattaat

SEQ ID NO: 1713159 - DNA, 15 bp, Homo sapiens
gatagataattaata

SEQ ID NO: 1713160 - DNA, 15 bp, Homo sapiens
atagataattaataa

SEQ ID NO: 1713161 - DNA, 15 bp, Homo sapiens
tagataattaataaa

SEQ ID NO: 1713162 - DNA, 15 bp, Homo sapiens
agataattaataaag

SEQ ID NO: 1713163 - DNA, 15 bp, Homo sapiens
gataattaataaaga

SEQ ID NO: 1713164 - DNA, 15 bp, Homo sapiens
ataattaataaagag

SEQ ID NO: 1713165 - DNA, 15 bp, Homo sapiens
taattaataaagaga

SEQ ID NO: 1713166 - DNA, 15 bp, Homo sapiens
aattaataaagagaa

SEQ ID NO: 1713167 - DNA, 15 bp, Homo sapiens
attaataaagagaat

SEQ ID NO: 1713168 - DNA, 15 bp, Homo sapiens
ttaataaagagaatt

SEQ ID NO: 1713169 - DNA, 15 bp, Homo sapiens
taataaagagaattg

SEQ ID NO: 1713170 - DNA, 15 bp, Homo sapiens
aataaagagaattgc

SEQ ID NO: 1713171 - DNA, 15 bp, Homo sapiens
ataaagagaattgcc

SEQ ID NO: 1713172 - DNA, 15 bp, Homo sapiens
taaagagaattgcca

SEQ ID NO: 1713173 - DNA, 15 bp, Homo sapiens
aaagagaattgccat

SEQ ID NO: 1713174 - DNA, 15 bp, Homo sapiens
aagagaattgccatt

SEQ ID NO: 1713175 - DNA, 15 bp, Homo sapiens
agagaattgccatta

SEQ ID NO: 1713176 - DNA, 15 bp, Homo sapiens
gagaattgccattat

SEQ ID NO: 1713177 - DNA, 15 bp, Homo sapiens
agaattgccattatc

SEQ ID NO: 1713178 - DNA, 15 bp, Homo sapiens
gaattgccattatcc

SEQ ID NO: 1713179 - DNA, 15 bp, Homo sapiens
aattgccattatcct

SEQ ID NO: 1713180 - DNA, 15 bp, Homo sapiens
attgccattatcctc

SEQ ID NO: 1713181 - DNA, 15 bp, Homo sapiens
ttgccattatcctcc

SEQ ID NO: 1713182 - DNA, 15 bp, Homo sapiens
tgccattatcctcct

SEQ ID NO: 1713183 - DNA, 15 bp, Homo sapiens
gccattatcctccta

SEQ ID NO: 1713184 - DNA, 15 bp, Homo sapiens
ccattatcctcctaa

SEQ ID NO: 1713185 - DNA, 15 bp, Homo sapiens
cattatcctcctaat

SEQ ID NO: 1713186 - DNA, 15 bp, Homo sapiens
attatcctcctaata

SEQ ID NO: 1713187 - DNA, 15 bp, Homo sapiens
ttatcctcctaatat

SEQ ID NO: 1713188 - DNA, 15 bp, Homo sapiens
tatcctcctaatatt

SEQ ID NO: 1713189 - DNA, 15 bp, Homo sapiens
atcctcctaatattt

SEQ ID NO: 1713190 - DNA, 15 bp, Homo sapiens
tcctcctaatattta

SEQ ID NO: 1713191 - DNA, 15 bp, Homo sapiens
cctcctaatatttat

SEQ ID NO: 1713192 - DNA, 15 bp, Homo sapiens
ctcctaatatttatc

SEQ ID NO: 1713193 - DNA, 15 bp, Homo sapiens
tcctaatatttatca

SEQ ID NO: 1713194 - DNA, 15 bp, Homo sapiens
cctaatatttatcac

SEQ ID NO: 1713195 - DNA, 15 bp, Homo sapiens
ctaatatttatcacc

SEQ ID NO: 1713196 - DNA, 15 bp, Homo sapiens
taatatttatcacct

SEQ ID NO: 1713197 - DNA, 15 bp, Homo sapiens
aatatttatcacctc

SEQ ID NO: 1713198 - DNA, 15 bp, Homo sapiens
atatttatcacctca

SEQ ID NO: 1713199 - DNA, 15 bp, Homo sapiens
tatttatcacctcac

SEQ ID NO: 1713200 - DNA, 15 bp, Homo sapiens
atttatcacctcaca

SEQ ID NO: 1713201 - DNA, 15 bp, Homo sapiens
tttatcacctcacag

SEQ ID NO: 1713202 - DNA, 15 bp, Homo sapiens
ttatcacctcacagc

SEQ ID NO: 1713203 - DNA, 15 bp, Homo sapiens
tatcacctcacagcc

SEQ ID NO: 1713204 - DNA, 15 bp, Homo sapiens
atcacctcacagccg

SEQ ID NO: 1713205 - DNA, 15 bp, Homo sapiens
tcacctcacagccgt

SEQ ID NO: 1713206 - DNA, 15 bp, Homo sapiens
cacctcacagccgta

SEQ ID NO: 1713207 - DNA, 15 bp, Homo sapiens
acctcacagccgtaa

SEQ ID NO: 1713208 - DNA, 15 bp, Homo sapiens
cctcacagccgtaac

SEQ ID NO: 1713209 - DNA, 15 bp, Homo sapiens
ctcacagccgtaaca

SEQ ID NO: 1713210 - DNA, 15 bp, Homo sapiens
tcacagccgtaacaa

SEQ ID NO: 1713211 - DNA, 15 bp, Homo sapiens
cacagccgtaacaac

SEQ ID NO: 1713212 - DNA, 15 bp, Homo sapiens
acagccgtaacaact

SEQ ID NO: 1713213 - DNA, 15 bp, Homo sapiens
cagccgtaacaacta

SEQ ID NO: 1713214 - DNA, 15 bp, Homo sapiens
agccgtaacaactaa

SEQ ID NO: 1713215 - DNA, 15 bp, Homo sapiens
gccgtaacaactaac

SEQ ID NO: 1713216 - DNA, 15 bp, Homo sapiens
ccgtaacaactaaca

SEQ ID NO: 1713217 - DNA, 15 bp, Homo sapiens
cgtaacaactaacaa

SEQ ID NO: 1713218 - DNA, 15 bp, Homo sapiens
gtaacaactaacaaa

SEQ ID NO: 1713219 - DNA, 15 bp, Homo sapiens
taacaactaacaaaa

SEQ ID NO: 1713220 - DNA, 15 bp, Homo sapiens
aacaactaacaaaaa

SEQ ID NO: 1713221 - DNA, 15 bp, Homo sapiens
acaactaacaaaaag

SEQ ID NO: 1713222 - DNA, 15 bp, Homo sapiens
caactaacaaaaagt

SEQ ID NO: 1713223 - DNA, 15 bp, Homo sapiens
aactaacaaaaagtt

SEQ ID NO: 1713224 - DNA, 15 bp, Homo sapiens
actaacaaaaagttg

SEQ ID NO: 1713225 - DNA, 15 bp, Homo sapiens
ctaacaaaaagttgg

SEQ ID NO: 1713226 - DNA, 15 bp, Homo sapiens
taacaaaaagttggg

SEQ ID NO: 1713227 - DNA, 15 bp, Homo sapiens
aacaaaaagttggga

SEQ ID NO: 1713228 - DNA, 15 bp, Homo sapiens
acaaaaagttgggag

SEQ ID NO: 1713229 - DNA, 15 bp, Homo sapiens
caaaaagttgggagt

SEQ ID NO: 1713230 - DNA, 15 bp, Homo sapiens
aaaaagttgggagtg

SEQ ID NO: 1713231 - DNA, 15 bp, Homo sapiens
aaaagttgggagtga

SEQ ID NO: 1713232 - DNA, 15 bp, Homo sapiens
aaagttgggagtgaa

SEQ ID NO: 1713233 - DNA, 15 bp, Homo sapiens
aagttgggagtgaag

SEQ ID NO: 1713234 - DNA, 15 bp, Homo sapiens
agttgggagtgaagt

SEQ ID NO: 1713235 - DNA, 15 bp, Homo sapiens
gttgggagtgaagta

SEQ ID NO: 1713236 - DNA, 15 bp, Homo sapiens
ttgggagtgaagtag

SEQ ID NO: 1713237 - DNA, 15 bp, Homo sapiens
tgggagtgaagtagt

SEQ ID NO: 1713238 - DNA, 15 bp, Homo sapiens
gggagtgaagtagta

SEQ ID NO: 1713239 - DNA, 15 bp, Homo sapiens
ggagtgaagtagtaa

SEQ ID NO: 1713240 - DNA, 15 bp, Homo sapiens
gagtgaagtagtaat

SEQ ID NO: 1713241 - DNA, 15 bp, Homo sapiens
agtgaagtagtaatt

SEQ ID NO: 1713242 - DNA, 15 bp, Homo sapiens
gtgaagtagtaattt

SEQ ID NO: 1713243 - DNA, 15 bp, Homo sapiens
tgaagtagtaatttc

SEQ ID NO: 1713244 - DNA, 15 bp, Homo sapiens
gaagtagtaatttcc

SEQ ID NO: 1713245 - DNA, 15 bp, Homo sapiens
aagtagtaatttccc

SEQ ID NO: 1713246 - DNA, 15 bp, Homo sapiens
agtagtaatttccca

SEQ ID NO: 1713247 - DNA, 15 bp, Homo sapiens
gtagtaatttcccac

SEQ ID NO: 1713248 - DNA, 15 bp, Homo sapiens
tagtaatttcccact

SEQ ID NO: 1713249 - DNA, 15 bp, Homo sapiens
agtaatttcccacta

SEQ ID NO: 1713250 - DNA, 15 bp, Homo sapiens
gtaatttcccactaa

SEQ ID NO: 1713251 - DNA, 15 bp, Homo sapiens
taatttcccactaaa

SEQ ID NO: 1713252 - DNA, 15 bp, Homo sapiens
aatttcccactaaac

SEQ ID NO: 1713253 - DNA, 15 bp, Homo sapiens
atttcccactaaaca

SEQ ID NO: 1713254 - DNA, 15 bp, Homo sapiens
tttcccactaaacaa

SEQ ID NO: 1713255 - DNA, 15 bp, Homo sapiens
ttcccactaaacaac

SEQ ID NO: 1713256 - DNA, 15 bp, Homo sapiens
tcccactaaacaaca

SEQ ID NO: 1713257 - DNA, 15 bp, Homo sapiens
cccactaaacaacat

SEQ ID NO: 1713258 - DNA, 15 bp, Homo sapiens
ccactaaacaacatg

SEQ ID NO: 1713259 - DNA, 15 bp, Homo sapiens
cactaaacaacatga

SEQ ID NO: 1713260 - DNA, 15 bp, Homo sapiens
actaaacaacatgaa

SEQ ID NO: 1713261 - DNA, 15 bp, Homo sapiens
ctaaacaacatgaat

SEQ ID NO: 1713262 - DNA, 15 bp, Homo sapiens
taaacaacatgaatg

SEQ ID NO: 1713263 - DNA, 15 bp, Homo sapiens
aaacaacatgaatgt

SEQ ID NO: 1713264 - DNA, 15 bp, Homo sapiens
aacaacatgaatgtt

SEQ ID NO: 1713265 - DNA, 15 bp, Homo sapiens
acaacatgaatgtta

SEQ ID NO: 1713266 - DNA, 15 bp, Homo sapiens
caacatgaatgttaa

SEQ ID NO: 1713267 - DNA, 15 bp, Homo sapiens
aacatgaatgttaat

SEQ ID NO: 1713268 - DNA, 15 bp, Homo sapiens
acatgaatgttaata

SEQ ID NO: 1713269 - DNA, 15 bp, Homo sapiens
catgaatgttaatat

SEQ ID NO: 1713270 - DNA, 15 bp, Homo sapiens
atgaatgttaatatt

SEQ ID NO: 1713271 - DNA, 15 bp, Homo sapiens
tgaatgttaatattt

SEQ ID NO: 1713272 - DNA, 15 bp, Homo sapiens
gaatgttaatatttg

SEQ ID NO: 1713273 - DNA, 15 bp, Homo sapiens
aatgttaatatttga

SEQ ID NO: 1713274 - DNA, 15 bp, Homo sapiens
atgttaatatttgaa

SEQ ID NO: 1713275 - DNA, 15 bp, Homo sapiens
tgttaatatttgaag

SEQ ID NO: 1713276 - DNA, 15 bp, Homo sapiens
gttaatatttgaagt

SEQ ID NO: 1713277 - DNA, 15 bp, Homo sapiens
ttaatatttgaagtt

SEQ ID NO: 1713278 - DNA, 15 bp, Homo sapiens
taatatttgaagttt

SEQ ID NO: 1713279 - DNA, 15 bp, Homo sapiens
aatatttgaagtttt

SEQ ID NO: 1713280 - DNA, 15 bp, Homo sapiens
atatttgaagtttta

SEQ ID NO: 1713281 - DNA, 15 bp, Homo sapiens
tatttgaagttttaa

SEQ ID NO: 1713282 - DNA, 15 bp, Homo sapiens
atttgaagttttaat

SEQ ID NO: 1713283 - DNA, 15 bp, Homo sapiens
tttgaagttttaatg

SEQ ID NO: 1713284 - DNA, 15 bp, Homo sapiens
ttgaagttttaatgt

SEQ ID NO: 1713285 - DNA, 15 bp, Homo sapiens
tgaagttttaatgtg

SEQ ID NO: 1713286 - DNA, 15 bp, Homo sapiens
gaagttttaatgtga

SEQ ID NO: 1713287 - DNA, 15 bp, Homo sapiens
aagttttaatgtgag

SEQ ID NO: 1713288 - DNA, 15 bp, Homo sapiens
agttttaatgtgaga

SEQ ID NO: 1713289 - DNA, 15 bp, Homo sapiens
gttttaatgtgagaa

SEQ ID NO: 1713290 - DNA, 15 bp, Homo sapiens
ttttaatgtgagaaa

SEQ ID NO: 1713291 - DNA, 15 bp, Homo sapiens
tttaatgtgagaaat

SEQ ID NO: 1713292 - DNA, 15 bp, Homo sapiens
ttaatgtgagaaatg

SEQ ID NO: 1713293 - DNA, 15 bp, Homo sapiens
taatgtgagaaatga

SEQ ID NO: 1713294 - DNA, 15 bp, Homo sapiens
aatgtgagaaatgag

SEQ ID NO: 1713295 - DNA, 15 bp, Homo sapiens
atgtgagaaatgagt

SEQ ID NO: 1713296 - DNA, 15 bp, Homo sapiens
tgtgagaaatgagtg

SEQ ID NO: 1713297 - DNA, 15 bp, Homo sapiens
gtgagaaatgagtgg

SEQ ID NO: 1713298 - DNA, 15 bp, Homo sapiens
tgagaaatgagtggg

SEQ ID NO: 1713299 - DNA, 15 bp, Homo sapiens
gagaaatgagtgggc

SEQ ID NO: 1713300 - DNA, 15 bp, Homo sapiens
agaaatgagtgggct

SEQ ID NO: 1713301 - DNA, 15 bp, Homo sapiens
gaaatgagtgggctc

SEQ ID NO: 1713302 - DNA, 15 bp, Homo sapiens
aaatgagtgggctct

SEQ ID NO: 1713303 - DNA, 15 bp, Homo sapiens
aatgagtgggctctt

SEQ ID NO: 1713304 - DNA, 15 bp, Homo sapiens
atgagtgggctcttt

SEQ ID NO: 1713305 - DNA, 15 bp, Homo sapiens
tgagtgggctctttg

SEQ ID NO: 1713306 - DNA, 15 bp, Homo sapiens
gagtgggctctttgc

SEQ ID NO: 1713307 - DNA, 15 bp, Homo sapiens
agtgggctctttgct

SEQ ID NO: 1713308 - DNA, 15 bp, Homo sapiens
gtgggctctttgctt

SEQ ID NO: 1713309 - DNA, 15 bp, Homo sapiens
tgggctctttgcttg

SEQ ID NO: 1713310 - DNA, 15 bp, Homo sapiens
gggctctttgcttgt

SEQ ID NO: 1713311 - DNA, 15 bp, Homo sapiens
ggctctttgcttgtt

SEQ ID NO: 1713312 - DNA, 15 bp, Homo sapiens
gctctttgcttgtta

SEQ ID NO: 1713313 - DNA, 15 bp, Homo sapiens
ctctttgcttgttaa

SEQ ID NO: 1713314 - DNA, 15 bp, Homo sapiens
tctttgcttgttaaa

SEQ ID NO: 1713315 - DNA, 15 bp, Homo sapiens
ctttgcttgttaaat

SEQ ID NO: 1713316 - DNA, 15 bp, Homo sapiens
tttgcttgttaaatt

SEQ ID NO: 1713317 - DNA, 15 bp, Homo sapiens
ttgcttgttaaatta

SEQ ID NO: 1713318 - DNA, 15 bp, Homo sapiens
tgcttgttaaattat

SEQ ID NO: 1713319 - DNA, 15 bp, Homo sapiens
gcttgttaaattatc

SEQ ID NO: 1713320 - DNA, 15 bp, Homo sapiens
cttgttaaattatct

SEQ ID NO: 1713321 - DNA, 15 bp, Homo sapiens
ttgttaaattatcta

SEQ ID NO: 1713322 - DNA, 15 bp, Homo sapiens
tgttaaattatctaa

SEQ ID NO: 1713323 - DNA, 15 bp, Homo sapiens
gttaaattatctaat

SEQ ID NO: 1713324 - DNA, 15 bp, Homo sapiens
ttaaattatctaatc

SEQ ID NO: 1713325 - DNA, 15 bp, Homo sapiens
taaattatctaatct

SEQ ID NO: 1713326 - DNA, 15 bp, Homo sapiens
aaattatctaatcta

SEQ ID NO: 1713327 - DNA, 15 bp, Homo sapiens
aattatctaatctag

SEQ ID NO: 1713328 - DNA, 15 bp, Homo sapiens
attatctaatctagg

SEQ ID NO: 1713329 - DNA, 15 bp, Homo sapiens
ttatctaatctaggt

SEQ ID NO: 1713330 - DNA, 15 bp, Homo sapiens
tatctaatctaggtt

SEQ ID NO: 1713331 - DNA, 15 bp, Homo sapiens
atctaatctaggttg

SEQ ID NO: 1713332 - DNA, 15 bp, Homo sapiens
tctaatctaggttgg

SEQ ID NO: 1713333 - DNA, 15 bp, Homo sapiens
ctaatctaggttgga

SEQ ID NO: 1713334 - DNA, 15 bp, Homo sapiens
taatctaggttggat

SEQ ID NO: 1713335 - DNA, 15 bp, Homo sapiens
aatctaggttggatt

SEQ ID NO: 1713336 - DNA, 15 bp, Homo sapiens
atctaggttggattg

SEQ ID NO: 1713337 - DNA, 15 bp, Homo sapiens
tctaggttggattgg

SEQ ID NO: 1713338 - DNA, 15 bp, Homo sapiens
ctaggttggattggt

SEQ ID NO: 1713339 - DNA, 15 bp, Homo sapiens
taggttggattggtg

SEQ ID NO: 1713340 - DNA, 15 bp, Homo sapiens
aggttggattggtga

SEQ ID NO: 1713341 - DNA, 15 bp, Homo sapiens
ggttggattggtgac

SEQ ID NO: 1713342 - DNA, 15 bp, Homo sapiens
gttggattggtgaca

SEQ ID NO: 1713343 - DNA, 15 bp, Homo sapiens
ttggattggtgacat

SEQ ID NO: 1713344 - DNA, 15 bp, Homo sapiens
tggattggtgacatg

SEQ ID NO: 1713345 - DNA, 15 bp, Homo sapiens
ggattggtgacatgc

SEQ ID NO: 1713346 - DNA, 15 bp, Homo sapiens
gattggtgacatgct

SEQ ID NO: 1713347 - DNA, 15 bp, Homo sapiens
attggtgacatgcta

SEQ ID NO: 1713348 - DNA, 15 bp, Homo sapiens
ttggtgacatgctac

SEQ ID NO: 1713349 - DNA, 15 bp, Homo sapiens
tggtgacatgctact

SEQ ID NO: 1713350 - DNA, 15 bp, Homo sapiens
ggtgacatgctactt

SEQ ID NO: 1713351 - DNA, 15 bp, Homo sapiens
gtgacatgctacttg

SEQ ID NO: 1713352 - DNA, 15 bp, Homo sapiens
tgacatgctacttgc

SEQ ID NO: 1713353 - DNA, 15 bp, Homo sapiens
gacatgctacttgca

SEQ ID NO: 1713354 - DNA, 15 bp, Homo sapiens
acatgctacttgcag

SEQ ID NO: 1713355 - DNA, 15 bp, Homo sapiens
catgctacttgcagg

SEQ ID NO: 1713356 - DNA, 15 bp, Homo sapiens
atgctacttgcagga

SEQ ID NO: 1713357 - DNA, 15 bp, Homo sapiens
tgctacttgcaggag

SEQ ID NO: 1713358 - DNA, 15 bp, Homo sapiens
gctacttgcaggaga

SEQ ID NO: 1713359 - DNA, 15 bp, Homo sapiens
ctacttgcaggagat

SEQ ID NO: 1713360 - DNA, 15 bp, Homo sapiens
tacttgcaggagatg

SEQ ID NO: 1713361 - DNA, 15 bp, Homo sapiens
acttgcaggagatga

SEQ ID NO: 1713362 - DNA, 15 bp, Homo sapiens
cttgcaggagatgat

SEQ ID NO: 1713363 - DNA, 15 bp, Homo sapiens
ttgcaggagatgatg

SEQ ID NO: 1713364 - DNA, 15 bp, Homo sapiens
tgcaggagatgatgt

SEQ ID NO: 1713365 - DNA, 15 bp, Homo sapiens
gcaggagatgatgta

SEQ ID NO: 1713366 - DNA, 15 bp, Homo sapiens
caggagatgatgtat

SEQ ID NO: 1713367 - DNA, 15 bp, Homo sapiens
aggagatgatgtata

SEQ ID NO: 1713368 - DNA, 15 bp, Homo sapiens
ggagatgatgtatat

SEQ ID NO: 1713369 - DNA, 15 bp, Homo sapiens
gagatgatgtatatc

SEQ ID NO: 1713370 - DNA, 15 bp, Homo sapiens
agatgatgtatatct

SEQ ID NO: 1713371 - DNA, 15 bp, Homo sapiens
gatgatgtatatcta

SEQ ID NO: 1713372 - DNA, 15 bp, Homo sapiens
atgatgtatatctaa

SEQ ID NO: 1713373 - DNA, 15 bp, Homo sapiens
tgatgtatatctaaa

SEQ ID NO: 1713374 - DNA, 15 bp, Homo sapiens
gatgtatatctaaat

SEQ ID NO: 1713375 - DNA, 15 bp, Homo sapiens
atgtatatctaaatt

SEQ ID NO: 1713376 - DNA, 15 bp, Homo sapiens
tgtatatctaaattg

SEQ ID NO: 1713377 - DNA, 15 bp, Homo sapiens
gtatatctaaattgt

SEQ ID NO: 1713378 - DNA, 15 bp, Homo sapiens
tatatctaaattgtt

SEQ ID NO: 1713379 - DNA, 15 bp, Homo sapiens
atatctaaattgttt

SEQ ID NO: 1713380 - DNA, 15 bp, Homo sapiens
tatctaaattgtttt

SEQ ID NO: 1713381 - DNA, 15 bp, Homo sapiens
atctaaattgttttt

SEQ ID NO: 1713382 - DNA, 15 bp, Homo sapiens
tctaaattgttttta

SEQ ID NO: 1713383 - DNA, 15 bp, Homo sapiens
ctaaattgtttttat

SEQ ID NO: 1713384 - DNA, 15 bp, Homo sapiens
taaattgtttttata

SEQ ID NO: 1713385 - DNA, 15 bp, Homo sapiens
aaattgtttttatat

SEQ ID NO: 1713386 - DNA, 15 bp, Homo sapiens
aattgtttttatatt

SEQ ID NO: 1713387 - DNA, 15 bp, Homo sapiens
attgtttttatattt

SEQ ID NO: 1713388 - DNA, 15 bp, Homo sapiens
tgtttttatatttta

SEQ ID NO: 1713389 - DNA, 15 bp, Homo sapiens
gtttttatattttat

SEQ ID NO: 1713390 - DNA, 15 bp, Homo sapiens
tttttatattttatt

SEQ ID NO: 1713391 - DNA, 15 bp, Homo sapiens
ttttatattttattt

SEQ ID NO: 1713392 - DNA, 15 bp, Homo sapiens
ttatattttatttta

SEQ ID NO: 1713393 - DNA, 15 bp, Homo sapiens
tatattttattttaa

SEQ ID NO: 1713394 - DNA, 15 bp, Homo sapiens
atattttattttaac

SEQ ID NO: 1713395 - DNA, 15 bp, Homo sapiens
tattttattttaaca

SEQ ID NO: 1713396 - DNA, 15 bp, Homo sapiens
attttattttaacaa

SEQ ID NO: 1713397 - DNA, 15 bp, Homo sapiens
ttttattttaacaac

SEQ ID NO: 1713398 - DNA, 15 bp, Homo sapiens
tttattttaacaaca

SEQ ID NO: 1713399 - DNA, 15 bp, Homo sapiens
ttattttaacaacac

SEQ ID NO: 1713400 - DNA, 15 bp, Homo sapiens
tattttaacaacact

SEQ ID NO: 1713401 - DNA, 15 bp, Homo sapiens
attttaacaacacta

SEQ ID NO: 1713402 - DNA, 15 bp, Homo sapiens
ttttaacaacactag

SEQ ID NO: 1713403 - DNA, 15 bp, Homo sapiens
tttaacaacactagt

SEQ ID NO: 1713404 - DNA, 15 bp, Homo sapiens
ttaacaacactagta

SEQ ID NO: 1713405 - DNA, 15 bp, Homo sapiens
taacaacactagtag

SEQ ID NO: 1713406 - DNA, 15 bp, Homo sapiens
aacaacactagtagt

SEQ ID NO: 1713407 - DNA, 15 bp, Homo sapiens
acaacactagtagta

SEQ ID NO: 1713408 - DNA, 15 bp, Homo sapiens
caacactagtagtag

SEQ ID NO: 1713409 - DNA, 15 bp, Homo sapiens
aacactagtagtaga

SEQ ID NO: 1713410 - DNA, 15 bp, Homo sapiens
acactagtagtagaa

SEQ ID NO: 1713411 - DNA, 15 bp, Homo sapiens
cactagtagtagaaa

SEQ ID NO: 1713412 - DNA, 15 bp, Homo sapiens
actagtagtagaaaa

SEQ ID NO: 1713413 - DNA, 15 bp, Homo sapiens
ctagtagtagaaaaa

SEQ ID NO: 1713414 - DNA, 15 bp, Homo sapiens
tagtagtagaaaaac

SEQ ID NO: 1713415 - DNA, 15 bp, Homo sapiens
agtagtagaaaaact

SEQ ID NO: 1713416 - DNA, 15 bp, Homo sapiens
gtagtagaaaaacta

SEQ ID NO: 1713417 - DNA, 15 bp, Homo sapiens
tagtagaaaaactag

SEQ ID NO: 1713418 - DNA, 15 bp, Homo sapiens
agtagaaaaactagt

SEQ ID NO: 1713419 - DNA, 15 bp, Homo sapiens
gtagaaaaactagtc

SEQ ID NO: 1713420 - DNA, 15 bp, Homo sapiens
tagaaaaactagtct

SEQ ID NO: 1713421 - DNA, 15 bp, Homo sapiens
agaaaaactagtctc

SEQ ID NO: 1713422 - DNA, 15 bp, Homo sapiens
gaaaaactagtctct

SEQ ID NO: 1713423 - DNA, 15 bp, Homo sapiens
aaaaactagtctctc

SEQ ID NO: 1713424 - DNA, 15 bp, Homo sapiens
aaaactagtctctca

SEQ ID NO: 1713425 - DNA, 15 bp, Homo sapiens
aaactagtctctcaa

SEQ ID NO: 1713426 - DNA, 15 bp, Homo sapiens
aactagtctctcaaa

SEQ ID NO: 1713427 - DNA, 15 bp, Homo sapiens
actagtctctcaaaa

SEQ ID NO: 1713428 - DNA, 15 bp, Homo sapiens
ctagtctctcaaaaa

SEQ ID NO: 1713429 - DNA, 15 bp, Homo sapiens
tagtctctcaaaaat

SEQ ID NO: 1713430 - DNA, 15 bp, Homo sapiens
agtctctcaaaaata

SEQ ID NO: 1713431 - DNA, 15 bp, Homo sapiens
gtctctcaaaaatat

SEQ ID NO: 1713432 - DNA, 15 bp, Homo sapiens
tctctcaaaaatatg

SEQ ID NO: 1713433 - DNA, 15 bp, Homo sapiens
ctctcaaaaatatgt

SEQ ID NO: 1713434 - DNA, 15 bp, Homo sapiens
tctcaaaaatatgtt

SEQ ID NO: 1713435 - DNA, 15 bp, Homo sapiens
ctcaaaaatatgttg

SEQ ID NO: 1713436 - DNA, 15 bp, Homo sapiens
tcaaaaatatgttga

SEQ ID NO: 1713437 - DNA, 15 bp, Homo sapiens
caaaaatatgttgaa

SEQ ID NO: 1713438 - DNA, 15 bp, Homo sapiens
aaaaatatgttgaag

SEQ ID NO: 1713439 - DNA, 15 bp, Homo sapiens
aaaatatgttgaagg

SEQ ID NO: 1713440 - DNA, 15 bp, Homo sapiens
aaatatgttgaaggg

SEQ ID NO: 1713441 - DNA, 15 bp, Homo sapiens
aatatgttgaaggga

SEQ ID NO: 1713442 - DNA, 15 bp, Homo sapiens
atatgttgaagggaa

SEQ ID NO: 1713443 - DNA, 15 bp, Homo sapiens
tatgttgaagggaac

SEQ ID NO: 1713444 - DNA, 15 bp, Homo sapiens
atgttgaagggaaca

SEQ ID NO: 1713445 - DNA, 15 bp, Homo sapiens
tgttgaagggaacag

SEQ ID NO: 1713446 - DNA, 15 bp, Homo sapiens
gttgaagggaacaga

SEQ ID NO: 1713447 - DNA, 15 bp, Homo sapiens
ttgaagggaacagaa

SEQ ID NO: 1713448 - DNA, 15 bp, Homo sapiens
tgaagggaacagaag

SEQ ID NO: 1713449 - DNA, 15 bp, Homo sapiens
gaagggaacagaaga

SEQ ID NO: 1713450 - DNA, 15 bp, Homo sapiens
aagggaacagaagaa

SEQ ID NO: 1713451 - DNA, 15 bp, Homo sapiens
agggaacagaagaag

SEQ ID NO: 1713452 - DNA, 15 bp, Homo sapiens
gggaacagaagaaga

SEQ ID NO: 1713453 - DNA, 15 bp, Homo sapiens
ggaacagaagaagac

SEQ ID NO: 1713454 - DNA, 15 bp, Homo sapiens
gaacagaagaagact

SEQ ID NO: 1713455 - DNA, 15 bp, Homo sapiens
aacagaagaagactt

SEQ ID NO: 1713456 - DNA, 15 bp, Homo sapiens
acagaagaagactta

SEQ ID NO: 1713457 - DNA, 15 bp, Homo sapiens
cagaagaagacttaa

SEQ ID NO: 1713458 - DNA, 15 bp, Homo sapiens
agaagaagacttaaa

SEQ ID NO: 1713459 - DNA, 15 bp, Homo sapiens
aagaagacttaaagc

SEQ ID NO: 1713460 - DNA, 15 bp, Homo sapiens
agaagacttaaagca

SEQ ID NO: 1713461 - DNA, 15 bp, Homo sapiens
gaagacttaaagcaa

SEQ ID NO: 1713462 - DNA, 15 bp, Homo sapiens
aagacttaaagcaat

SEQ ID NO: 1713463 - DNA, 15 bp, Homo sapiens
agacttaaagcaatt

SEQ ID NO: 1713464 - DNA, 15 bp, Homo sapiens
gacttaaagcaattt

SEQ ID NO: 1713465 - DNA, 15 bp, Homo sapiens
acttaaagcaattta

SEQ ID NO: 1713466 - DNA, 15 bp, Homo sapiens
cttaaagcaatttaa

SEQ ID NO: 1713467 - DNA, 15 bp, Homo sapiens
ttaaagcaatttaac

SEQ ID NO: 1713468 - DNA, 15 bp, Homo sapiens
taaagcaatttaaca

SEQ ID NO: 1713469 - DNA, 15 bp, Homo sapiens
aaagcaatttaacaa

SEQ ID NO: 1713470 - DNA, 15 bp, Homo sapiens
aagcaatttaacaat

SEQ ID NO: 1713471 - DNA, 15 bp, Homo sapiens
agcaatttaacaata

SEQ ID NO: 1713472 - DNA, 15 bp, Homo sapiens
gcaatttaacaatat

SEQ ID NO: 1713473 - DNA, 15 bp, Homo sapiens
caatttaacaatatc

SEQ ID NO: 1713474 - DNA, 15 bp, Homo sapiens
aatttaacaatatca

SEQ ID NO: 1713475 - DNA, 15 bp, Homo sapiens
atttaacaatatcag

SEQ ID NO: 1713476 - DNA, 15 bp, Homo sapiens
tttaacaatatcagg

SEQ ID NO: 1713477 - DNA, 15 bp, Homo sapiens
ttaacaatatcagga

SEQ ID NO: 1713478 - DNA, 15 bp, Homo sapiens
taacaatatcaggat

SEQ ID NO: 1713479 - DNA, 15 bp, Homo sapiens
aacaatatcaggata

SEQ ID NO: 1713480 - DNA, 15 bp, Homo sapiens
acaatatcaggataa

SEQ ID NO: 1713481 - DNA, 15 bp, Homo sapiens
caatatcaggataat

SEQ ID NO: 1713482 - DNA, 15 bp, Homo sapiens
aatatcaggataatc

SEQ ID NO: 1713483 - DNA, 15 bp, Homo sapiens
atatcaggataatca

SEQ ID NO: 1713484 - DNA, 15 bp, Homo sapiens
tatcaggataatcac

SEQ ID NO: 1713485 - DNA, 15 bp, Homo sapiens
atcaggataatcact

SEQ ID NO: 1713486 - DNA, 15 bp, Homo sapiens
tcaggataatcactt

SEQ ID NO: 1713487 - DNA, 15 bp, Homo sapiens
caggataatcacttt

SEQ ID NO: 1713488 - DNA, 15 bp, Homo sapiens
aggataatcactttt

SEQ ID NO: 1713489 - DNA, 15 bp, Homo sapiens
ggataatcactttta

SEQ ID NO: 1713490 - DNA, 15 bp, Homo sapiens
gataatcacttttaa

SEQ ID NO: 1713491 - DNA, 15 bp, Homo sapiens
ataatcacttttaac

SEQ ID NO: 1713492 - DNA, 15 bp, Homo sapiens
taatcacttttaact

SEQ ID NO: 1713493 - DNA, 15 bp, Homo sapiens
aatcacttttaactt

SEQ ID NO: 1713494 - DNA, 15 bp, Homo sapiens
atcacttttaacttt

SEQ ID NO: 1713495 - DNA, 15 bp, Homo sapiens
tcacttttaactttt

SEQ ID NO: 1713496 - DNA, 15 bp, Homo sapiens
cacttttaactttta

SEQ ID NO: 1713497 - DNA, 15 bp, Homo sapiens
acttttaacttttat

SEQ ID NO: 1713498 - DNA, 15 bp, Homo sapiens
cttttaacttttatc

SEQ ID NO: 1713499 - DNA, 15 bp, Homo sapiens
ttttaacttttatcc

SEQ ID NO: 1713500 - DNA, 15 bp, Homo sapiens
tttaacttttatcct

SEQ ID NO: 1713501 - DNA, 15 bp, Homo sapiens
ttaacttttatcctt

SEQ ID NO: 1713502 - DNA, 15 bp, Homo sapiens
taacttttatcctta

SEQ ID NO: 1713503 - DNA, 15 bp, Homo sapiens
aacttttatccttaa

SEQ ID NO: 1713504 - DNA, 15 bp, Homo sapiens
acttttatccttaat

SEQ ID NO: 1713505 - DNA, 15 bp, Homo sapiens
cttttatccttaatg

SEQ ID NO: 1713506 - DNA, 15 bp, Homo sapiens
ttttatccttaatga

SEQ ID NO: 1713507 - DNA, 15 bp, Homo sapiens
tttatccttaatgat

SEQ ID NO: 1713508 - DNA, 15 bp, Homo sapiens
ttatccttaatgatg

SEQ ID NO: 1713509 - DNA, 15 bp, Homo sapiens
tatccttaatgatgg

SEQ ID NO: 1713510 - DNA, 15 bp, Homo sapiens
atccttaatgatgga

SEQ ID NO: 1713511 - DNA, 15 bp, Homo sapiens
tccttaatgatggaa

SEQ ID NO: 1713512 - DNA, 15 bp, Homo sapiens
ccttaatgatggaaa

SEQ ID NO: 1713513 - DNA, 15 bp, Homo sapiens
cttaatgatggaaac

SEQ ID NO: 1713514 - DNA, 15 bp, Homo sapiens
ttaatgatggaaaca

SEQ ID NO: 1713515 - DNA, 15 bp, Homo sapiens
taatgatggaaacaa

SEQ ID NO: 1713516 - DNA, 15 bp, Homo sapiens
aatgatggaaacaat

SEQ ID NO: 1713517 - DNA, 15 bp, Homo sapiens
atgatggaaacaatg

SEQ ID NO: 1713518 - DNA, 15 bp, Homo sapiens
tgatggaaacaatgc

SEQ ID NO: 1713519 - DNA, 15 bp, Homo sapiens
gatggaaacaatgcg

SEQ ID NO: 1713520 - DNA, 15 bp, Homo sapiens
atggaaacaatgcgt

SEQ ID NO: 1713521 - DNA, 15 bp, Homo sapiens
tggaaacaatgcgtt

SEQ ID NO: 1713522 - DNA, 15 bp, Homo sapiens
ggaaacaatgcgtta

SEQ ID NO: 1713523 - DNA, 15 bp, Homo sapiens
gaaacaatgcgttat

SEQ ID NO: 1713524 - DNA, 15 bp, Homo sapiens
aaacaatgcgttatt

SEQ ID NO: 1713525 - DNA, 15 bp, Homo sapiens
aacaatgcgttattt

SEQ ID NO: 1713526 - DNA, 15 bp, Homo sapiens
acaatgcgttatttt

SEQ ID NO: 1713527 - DNA, 15 bp, Homo sapiens
caatgcgttattttc

SEQ ID NO: 1713528 - DNA, 15 bp, Homo sapiens
aatgcgttattttca

SEQ ID NO: 1713529 - DNA, 15 bp, Homo sapiens
atgcgttattttcaa

SEQ ID NO: 1713530 - DNA, 15 bp, Homo sapiens
tgcgttattttcaaa

SEQ ID NO: 1713531 - DNA, 15 bp, Homo sapiens
gcgttattttcaaaa

SEQ ID NO: 1713532 - DNA, 15 bp, Homo sapiens
cgttattttcaaaat

SEQ ID NO: 1713533 - DNA, 15 bp, Homo sapiens
gttattttcaaaatt

SEQ ID NO: 1713534 - DNA, 15 bp, Homo sapiens
ttattttcaaaattc

SEQ ID NO: 1713535 - DNA, 15 bp, Homo sapiens
tattttcaaaattca

SEQ ID NO: 1713536 - DNA, 15 bp, Homo sapiens
attttcaaaattcat

SEQ ID NO: 1713537 - DNA, 15 bp, Homo sapiens
ttttcaaaattcatc

SEQ ID NO: 1713538 - DNA, 15 bp, Homo sapiens
tttcaaaattcatct

SEQ ID NO: 1713539 - DNA, 15 bp, Homo sapiens
ttcaaaattcatctt

SEQ ID NO: 1713540 - DNA, 15 bp, Homo sapiens
tcaaaattcatcttc

SEQ ID NO: 1713541 - DNA, 15 bp, Homo sapiens
caaaattcatcttca

SEQ ID NO: 1713542 - DNA, 15 bp, Homo sapiens
aaaattcatcttcaa

SEQ ID NO: 1713543 - DNA, 15 bp, Homo sapiens
aaattcatcttcaat

SEQ ID NO: 1713544 - DNA, 15 bp, Homo sapiens
aattcatcttcaatc

SEQ ID NO: 1713545 - DNA, 15 bp, Homo sapiens
attcatcttcaatct

SEQ ID NO: 1713546 - DNA, 15 bp, Homo sapiens
ttcatcttcaatctt

SEQ ID NO: 1713547 - DNA, 15 bp, Homo sapiens
tcatcttcaatcttt

SEQ ID NO: 1713548 - DNA, 15 bp, Homo sapiens
catcttcaatctttc

SEQ ID NO: 1713549 - DNA, 15 bp, Homo sapiens
atcttcaatctttca

SEQ ID NO: 1713550 - DNA, 15 bp, Homo sapiens
tcttcaatctttcat

SEQ ID NO: 1713551 - DNA, 15 bp, Homo sapiens
cttcaatctttcatc

SEQ ID NO: 1713552 - DNA, 15 bp, Homo sapiens
ttcaatctttcatca

SEQ ID NO: 1713553 - DNA, 15 bp, Homo sapiens
tcaatctttcatcag

SEQ ID NO: 1713554 - DNA, 15 bp, Homo sapiens
caatctttcatcagt

SEQ ID NO: 1713555 - DNA, 15 bp, Homo sapiens
aatctttcatcagta

SEQ ID NO: 1713556 - DNA, 15 bp, Homo sapiens
atctttcatcagtag

SEQ ID NO: 1713557 - DNA, 15 bp, Homo sapiens
tctttcatcagtagc

SEQ ID NO: 1713558 - DNA, 15 bp, Homo sapiens
ctttcatcagtagcc

SEQ ID NO: 1713559 - DNA, 15 bp, Homo sapiens
tttcatcagtagcca

SEQ ID NO: 1713560 - DNA, 15 bp, Homo sapiens
ttcatcagtagccag

SEQ ID NO: 1713561 - DNA, 15 bp, Homo sapiens
tcatcagtagccagt

SEQ ID NO: 1713562 - DNA, 15 bp, Homo sapiens
catcagtagccagtt

SEQ ID NO: 1713563 - DNA, 15 bp, Homo sapiens
atcagtagccagttt

SEQ ID NO: 1713564 - DNA, 15 bp, Homo sapiens
tcagtagccagtttc

SEQ ID NO: 1713565 - DNA, 15 bp, Homo sapiens
cagtagccagtttca

SEQ ID NO: 1713566 - DNA, 15 bp, Homo sapiens
agtagccagtttcaa

SEQ ID NO: 1713567 - DNA, 15 bp, Homo sapiens
gtagccagtttcaaa

SEQ ID NO: 1713568 - DNA, 15 bp, Homo sapiens
tagccagtttcaaaa

SEQ ID NO: 1713569 - DNA, 15 bp, Homo sapiens
agccagtttcaaaaa

SEQ ID NO: 1713570 - DNA, 15 bp, Homo sapiens
gccagtttcaaaaac

SEQ ID NO: 1713571 - DNA, 15 bp, Homo sapiens
ccagtttcaaaaact

SEQ ID NO: 1713572 - DNA, 15 bp, Homo sapiens
cagtttcaaaaactg

SEQ ID NO: 1713573 - DNA, 15 bp, Homo sapiens
agtttcaaaaactgt

SEQ ID NO: 1713574 - DNA, 15 bp, Homo sapiens
gtttcaaaaactgtc

SEQ ID NO: 1713575 - DNA, 15 bp, Homo sapiens
tttcaaaaactgtca

SEQ ID NO: 1713576 - DNA, 15 bp, Homo sapiens
ttcaaaaactgtcac

SEQ ID NO: 1713577 - DNA, 15 bp, Homo sapiens
tcaaaaactgtcact

SEQ ID NO: 1713578 - DNA, 15 bp, Homo sapiens
caaaaactgtcactc

SEQ ID NO: 1713579 - DNA, 15 bp, Homo sapiens
aaaaactgtcactca

SEQ ID NO: 1713580 - DNA, 15 bp, Homo sapiens
aaaactgtcactcaa

SEQ ID NO: 1713581 - DNA, 15 bp, Homo sapiens
aaactgtcactcaag

SEQ ID NO: 1713582 - DNA, 15 bp, Homo sapiens
aactgtcactcaagt

SEQ ID NO: 1713583 - DNA, 15 bp, Homo sapiens
actgtcactcaagtt

SEQ ID NO: 1713584 - DNA, 15 bp, Homo sapiens
ctgtcactcaagtta

SEQ ID NO: 1713585 - DNA, 15 bp, Homo sapiens
tgtcactcaagttat

SEQ ID NO: 1713586 - DNA, 15 bp, Homo sapiens
gtcactcaagttatc

SEQ ID NO: 1713587 - DNA, 15 bp, Homo sapiens
tcactcaagttatct

SEQ ID NO: 1713588 - DNA, 15 bp, Homo sapiens
cactcaagttatctt

SEQ ID NO: 1713589 - DNA, 15 bp, Homo sapiens
actcaagttatcttt

SEQ ID NO: 1713590 - DNA, 15 bp, Homo sapiens
ctcaagttatctttc

SEQ ID NO: 1713591 - DNA, 15 bp, Homo sapiens
tcaagttatctttca

SEQ ID NO: 1713592 - DNA, 15 bp, Homo sapiens
caagttatctttcaa

SEQ ID NO: 1713593 - DNA, 15 bp, Homo sapiens
aagttatctttcaat

SEQ ID NO: 1713594 - DNA, 15 bp, Homo sapiens
agttatctttcaatg

SEQ ID NO: 1713595 - DNA, 15 bp, Homo sapiens
gttatctttcaatga

SEQ ID NO: 1713596 - DNA, 15 bp, Homo sapiens
ttatctttcaatgaa

SEQ ID NO: 1713597 - DNA, 15 bp, Homo sapiens
tatctttcaatgaaa

SEQ ID NO: 1713598 - DNA, 15 bp, Homo sapiens
atctttcaatgaaat

SEQ ID NO: 1713599 - DNA, 15 bp, Homo sapiens
tctttcaatgaaata

SEQ ID NO: 1713600 - DNA, 15 bp, Homo sapiens
ctttcaatgaaataa

SEQ ID NO: 1713601 - DNA, 15 bp, Homo sapiens
tttcaatgaaataaa

SEQ ID NO: 1713602 - DNA, 15 bp, Homo sapiens
ttcaatgaaataaac

SEQ ID NO: 1713603 - DNA, 15 bp, Homo sapiens
tcaatgaaataaacg

SEQ ID NO: 1713604 - DNA, 15 bp, Homo sapiens
caatgaaataaacgg

SEQ ID NO: 1713605 - DNA, 15 bp, Homo sapiens
aatgaaataaacgga

SEQ ID NO: 1713606 - DNA, 15 bp, Homo sapiens
atgaaataaacggat

SEQ ID NO: 1713607 - DNA, 15 bp, Homo sapiens
tgaaataaacggatt

SEQ ID NO: 1713608 - DNA, 15 bp, Homo sapiens
gaaataaacggattt

SEQ ID NO: 1713609 - DNA, 15 bp, Homo sapiens
aaataaacggatttt

SEQ ID NO: 1713610 - DNA, 15 bp, Homo sapiens
aataaacggattttg

SEQ ID NO: 1713611 - DNA, 15 bp, Homo sapiens
ataaacggattttgg

SEQ ID NO: 1713612 - DNA, 15 bp, Homo sapiens
taaacggattttgga

SEQ ID NO: 1713613 - DNA, 15 bp, Homo sapiens
aaacggattttggat

SEQ ID NO: 1713614 - DNA, 15 bp, Homo sapiens
aacggattttggatc

SEQ ID NO: 1713615 - DNA, 15 bp, Homo sapiens
acggattttggatcc

SEQ ID NO: 1713616 - DNA, 15 bp, Homo sapiens
cggattttggatcca

SEQ ID NO: 1713617 - DNA, 15 bp, Homo sapiens
ggattttggatccat

SEQ ID NO: 1713618 - DNA, 15 bp, Homo sapiens
gattttggatccatg

SEQ ID NO: 1713619 - DNA, 15 bp, Homo sapiens
attttggatccatga

SEQ ID NO: 1713620 - DNA, 15 bp, Homo sapiens
ttttggatccatgaa

SEQ ID NO: 1713621 - DNA, 15 bp, Homo sapiens
tttggatccatgaat

SEQ ID NO: 1713622 - DNA, 15 bp, Homo sapiens
ttggatccatgaatt

SEQ ID NO: 1713623 - DNA, 15 bp, Homo sapiens
tggatccatgaattt

SEQ ID NO: 1713624 - DNA, 15 bp, Homo sapiens
ggatccatgaatttc

SEQ ID NO: 1713625 - DNA, 15 bp, Homo sapiens
gatccatgaatttct

SEQ ID NO: 1713626 - DNA, 15 bp, Homo sapiens
atccatgaatttctt

SEQ ID NO: 1713627 - DNA, 15 bp, Homo sapiens
tccatgaatttcttg

SEQ ID NO: 1713628 - DNA, 15 bp, Homo sapiens
ccatgaatttcttgc

SEQ ID NO: 1713629 - DNA, 15 bp, Homo sapiens
catgaatttcttgca

SEQ ID NO: 1713630 - DNA, 15 bp, Homo sapiens
atgaatttcttgcat

SEQ ID NO: 1713631 - DNA, 15 bp, Homo sapiens
tgaatttcttgcatg

SEQ ID NO: 1713632 - DNA, 15 bp, Homo sapiens
gaatttcttgcatgt

SEQ ID NO: 1713633 - DNA, 15 bp, Homo sapiens
aatttcttgcatgtg

SEQ ID NO: 1713634 - DNA, 15 bp, Homo sapiens
atttcttgcatgtgg

SEQ ID NO: 1713635 - DNA, 15 bp, Homo sapiens
tttcttgcatgtgga

SEQ ID NO: 1713636 - DNA, 15 bp, Homo sapiens
ttcttgcatgtggag

SEQ ID NO: 1713637 - DNA, 15 bp, Homo sapiens
tcttgcatgtggagc

SEQ ID NO: 1713638 - DNA, 15 bp, Homo sapiens
cttgcatgtggagct

SEQ ID NO: 1713639 - DNA, 15 bp, Homo sapiens
ttgcatgtggagctt

SEQ ID NO: 1713640 - DNA, 15 bp, Homo sapiens
tgcatgtggagcttg

SEQ ID NO: 1713641 - DNA, 15 bp, Homo sapiens
gcatgtggagcttgt

SEQ ID NO: 1713642 - DNA, 15 bp, Homo sapiens
catgtggagcttgtt

SEQ ID NO: 1713643 - DNA, 15 bp, Homo sapiens
atgtggagcttgttt

SEQ ID NO: 1713644 - DNA, 15 bp, Homo sapiens
tgtggagcttgtttt

SEQ ID NO: 1713645 - DNA, 15 bp, Homo sapiens
gtggagcttgttttg

SEQ ID NO: 1713646 - DNA, 15 bp, Homo sapiens
tggagcttgttttga

SEQ ID NO: 1713647 - DNA, 15 bp, Homo sapiens
ggagcttgttttgat

SEQ ID NO: 1713648 - DNA, 15 bp, Homo sapiens
gagcttgttttgata

SEQ ID NO: 1713649 - DNA, 15 bp, Homo sapiens
agcttgttttgatag

SEQ ID NO: 1713650 - DNA, 15 bp, Homo sapiens
gcttgttttgataga

SEQ ID NO: 1713651 - DNA, 15 bp, Homo sapiens
cttgttttgatagaa

SEQ ID NO: 1713652 - DNA, 15 bp, Homo sapiens
ttgttttgatagaaa

SEQ ID NO: 1713653 - DNA, 15 bp, Homo sapiens
tgttttgatagaaaa

SEQ ID NO: 1713654 - DNA, 15 bp, Homo sapiens
gttttgatagaaaat

SEQ ID NO: 1713655 - DNA, 15 bp, Homo sapiens
ttttgatagaaaata

SEQ ID NO: 1713656 - DNA, 15 bp, Homo sapiens
tttgatagaaaatac

SEQ ID NO: 1713657 - DNA, 15 bp, Homo sapiens
ttgatagaaaatact

SEQ ID NO: 1713658 - DNA, 15 bp, Homo sapiens
tgatagaaaatactc

SEQ ID NO: 1713659 - DNA, 15 bp, Homo sapiens
gatagaaaatactca

SEQ ID NO: 1713660 - DNA, 15 bp, Homo sapiens
atagaaaatactcag

SEQ ID NO: 1713661 - DNA, 15 bp, Homo sapiens
tagaaaatactcaga

SEQ ID NO: 1713662 - DNA, 15 bp, Homo sapiens
agaaaatactcagat

SEQ ID NO: 1713663 - DNA, 15 bp, Homo sapiens
gaaaatactcagata

SEQ ID NO: 1713664 - DNA, 15 bp, Homo sapiens
aaaatactcagatat

SEQ ID NO: 1713665 - DNA, 15 bp, Homo sapiens
aaatactcagatatt

SEQ ID NO: 1713666 - DNA, 15 bp, Homo sapiens
aatactcagatattt

SEQ ID NO: 1713667 - DNA, 15 bp, Homo sapiens
atactcagatatttt

SEQ ID NO: 1713668 - DNA, 15 bp, Homo sapiens
tactcagatatttta

SEQ ID NO: 1713669 - DNA, 15 bp, Homo sapiens
actcagatattttat

SEQ ID NO: 1713670 - DNA, 15 bp, Homo sapiens
ctcagatattttatc

SEQ ID NO: 1713671 - DNA, 15 bp, Homo sapiens
tcagatattttatca

SEQ ID NO: 1713672 - DNA, 15 bp, Homo sapiens
cagatattttatcaa

SEQ ID NO: 1713673 - DNA, 15 bp, Homo sapiens
agatattttatcaaa

SEQ ID NO: 1713674 - DNA, 15 bp, Homo sapiens
gatattttatcaaat

SEQ ID NO: 1713675 - DNA, 15 bp, Homo sapiens
atattttatcaaatt

SEQ ID NO: 1713676 - DNA, 15 bp, Homo sapiens
tattttatcaaattt

SEQ ID NO: 1713677 - DNA, 15 bp, Homo sapiens
attttatcaaattta

SEQ ID NO: 1713678 - DNA, 15 bp, Homo sapiens
ttttatcaaatttat

SEQ ID NO: 1713679 - DNA, 15 bp, Homo sapiens
tttatcaaatttata

SEQ ID NO: 1713680 - DNA, 15 bp, Homo sapiens
ttatcaaatttataa

SEQ ID NO: 1713681 - DNA, 15 bp, Homo sapiens
tatcaaatttataat

SEQ ID NO: 1713682 - DNA, 15 bp, Homo sapiens
atcaaatttataatt

SEQ ID NO: 1713683 - DNA, 15 bp, Homo sapiens
tcaaatttataatta

SEQ ID NO: 1713684 - DNA, 15 bp, Homo sapiens
caaatttataattag

SEQ ID NO: 1713685 - DNA, 15 bp, Homo sapiens
aaatttataattagt

SEQ ID NO: 1713686 - DNA, 15 bp, Homo sapiens
aatttataattagtt

SEQ ID NO: 1713687 - DNA, 15 bp, Homo sapiens
atttataattagttt

SEQ ID NO: 1713688 - DNA, 15 bp, Homo sapiens
tttataattagtttt

SEQ ID NO: 1713689 - DNA, 15 bp, Homo sapiens
ttataattagttttt

SEQ ID NO: 1713690 - DNA, 15 bp, Homo sapiens
tataattagtttttt

SEQ ID NO: 1713691 - DNA, 15 bp, Homo sapiens
ataattagtttttta

SEQ ID NO: 1713692 - DNA, 15 bp, Homo sapiens
taattagttttttaa

SEQ ID NO: 1713693 - DNA, 15 bp, Homo sapiens
aattagttttttaat

SEQ ID NO: 1713694 - DNA, 15 bp, Homo sapiens
attagttttttaata

SEQ ID NO: 1713695 - DNA, 15 bp, Homo sapiens
ttagttttttaatat

SEQ ID NO: 1713696 - DNA, 15 bp, Homo sapiens
tagttttttaatatt

SEQ ID NO: 1713697 - DNA, 15 bp, Homo sapiens
agttttttaatattt

SEQ ID NO: 1713698 - DNA, 15 bp, Homo sapiens
gttttttaatatttt

SEQ ID NO: 1713699 - DNA, 15 bp, Homo sapiens
ttttttaatattttg

SEQ ID NO: 1713700 - DNA, 15 bp, Homo sapiens
tttttaatattttgt

SEQ ID NO: 1713701 - DNA, 15 bp, Homo sapiens
ttttaatattttgta

SEQ ID NO: 1713702 - DNA, 15 bp, Homo sapiens
tttaatattttgtat

SEQ ID NO: 1713703 - DNA, 15 bp, Homo sapiens
ttaatattttgtata

SEQ ID NO: 1713704 - DNA, 15 bp, Homo sapiens
taatattttgtatat

SEQ ID NO: 1713705 - DNA, 15 bp, Homo sapiens
aatattttgtatata

SEQ ID NO: 1713706 - DNA, 15 bp, Homo sapiens
atattttgtatataa

SEQ ID NO: 1713707 - DNA, 15 bp, Homo sapiens
tattttgtatataaa

SEQ ID NO: 1713708 - DNA, 15 bp, Homo sapiens
attttgtatataaat

SEQ ID NO: 1713709 - DNA, 15 bp, Homo sapiens
ttttgtatataaatg

SEQ ID NO: 1713710 - DNA, 15 bp, Homo sapiens
tttgtatataaatgt

SEQ ID NO: 1713711 - DNA, 15 bp, Homo sapiens
ttgtatataaatgtc

SEQ ID NO: 1713712 - DNA, 15 bp, Homo sapiens
tgtatataaatgtcc

SEQ ID NO: 1713713 - DNA, 15 bp, Homo sapiens
gtatataaatgtcct

SEQ ID NO: 1713714 - DNA, 15 bp, Homo sapiens
tatataaatgtcctt

SEQ ID NO: 1713715 - DNA, 15 bp, Homo sapiens
atataaatgtccttt

SEQ ID NO: 1713716 - DNA, 15 bp, Homo sapiens
tataaatgtccttta

SEQ ID NO: 1713717 - DNA, 15 bp, Homo sapiens
ataaatgtcctttaa

SEQ ID NO: 1713718 - DNA, 15 bp, Homo sapiens
taaatgtcctttaag

SEQ ID NO: 1713719 - DNA, 15 bp, Homo sapiens
aaatgtcctttaagt

SEQ ID NO: 1713720 - DNA, 15 bp, Homo sapiens
aatgtcctttaagtt

SEQ ID NO: 1713721 - DNA, 15 bp, Homo sapiens
atgtcctttaagttt

SEQ ID NO: 1713722 - DNA, 15 bp, Homo sapiens
tgtcctttaagtttg

SEQ ID NO: 1713723 - DNA, 15 bp, Homo sapiens
gtcctttaagtttga

SEQ ID NO: 1713724 - DNA, 15 bp, Homo sapiens
tcctttaagtttgat

SEQ ID NO: 1713725 - DNA, 15 bp, Homo sapiens
cctttaagtttgatg

SEQ ID NO: 1713726 - DNA, 15 bp, Homo sapiens
ctttaagtttgatgg

SEQ ID NO: 1713727 - DNA, 15 bp, Homo sapiens
tttaagtttgatggc

SEQ ID NO: 1713728 - DNA, 15 bp, Homo sapiens
ttaagtttgatggct

SEQ ID NO: 1713729 - DNA, 15 bp, Homo sapiens
taagtttgatggctt

SEQ ID NO: 1713730 - DNA, 15 bp, Homo sapiens
aagtttgatggcttt

SEQ ID NO: 1713731 - DNA, 15 bp, Homo sapiens
agtttgatggcttta

SEQ ID NO: 1713732 - DNA, 15 bp, Homo sapiens
gtttgatggctttat

SEQ ID NO: 1713733 - DNA, 15 bp, Homo sapiens
tttgatggctttatt

SEQ ID NO: 1713734 - DNA, 15 bp, Homo sapiens
ttgatggctttattg

SEQ ID NO: 1713735 - DNA, 15 bp, Homo sapiens
tgatggctttattgt

SEQ ID NO: 1713736 - DNA, 15 bp, Homo sapiens
gatggctttattgtt

SEQ ID NO: 1713737 - DNA, 15 bp, Homo sapiens
atggctttattgttt

SEQ ID NO: 1713738 - DNA, 15 bp, Homo sapiens
tggctttattgtttc

SEQ ID NO: 1713739 - DNA, 15 bp, Homo sapiens
ggctttattgtttca

SEQ ID NO: 1713740 - DNA, 15 bp, Homo sapiens
gctttattgtttcat

SEQ ID NO: 1713741 - DNA, 15 bp, Homo sapiens
ctttattgtttcatt

SEQ ID NO: 1713742 - DNA, 15 bp, Homo sapiens
tttattgtttcatta

SEQ ID NO: 1713743 - DNA, 15 bp, Homo sapiens
ttattgtttcattag

SEQ ID NO: 1713744 - DNA, 15 bp, Homo sapiens
tattgtttcattagt

SEQ ID NO: 1713745 - DNA, 15 bp, Homo sapiens
attgtttcattagtc

SEQ ID NO: 1713746 - DNA, 15 bp, Homo sapiens
ttgtttcattagtct

SEQ ID NO: 1713747 - DNA, 15 bp, Homo sapiens
tgtttcattagtctg

SEQ ID NO: 1713748 - DNA, 15 bp, Homo sapiens
gtttcattagtctgt

SEQ ID NO: 1713749 - DNA, 15 bp, Homo sapiens
tttcattagtctgta

SEQ ID NO: 1713750 - DNA, 15 bp, Homo sapiens
ttcattagtctgtaa

SEQ ID NO: 1713751 - DNA, 15 bp, Homo sapiens
tcattagtctgtaat

SEQ ID NO: 1713752 - DNA, 15 bp, Homo sapiens
cattagtctgtaatg

SEQ ID NO: 1713753 - DNA, 15 bp, Homo sapiens
attagtctgtaatga

SEQ ID NO: 1713754 - DNA, 15 bp, Homo sapiens
ttagtctgtaatgat

SEQ ID NO: 1713755 - DNA, 15 bp, Homo sapiens
tagtctgtaatgatt

SEQ ID NO: 1713756 - DNA, 15 bp, Homo sapiens
agtctgtaatgattt

SEQ ID NO: 1713757 - DNA, 15 bp, Homo sapiens
gtctgtaatgatttt

SEQ ID NO: 1713758 - DNA, 15 bp, Homo sapiens
tctgtaatgatttta

SEQ ID NO: 1713759 - DNA, 15 bp, Homo sapiens
ctgtaatgattttag

SEQ ID NO: 1713760 - DNA, 15 bp, Homo sapiens
tgtaatgattttagc

SEQ ID NO: 1713761 - DNA, 15 bp, Homo sapiens
gtaatgattttagca

SEQ ID NO: 1713762 - DNA, 15 bp, Homo sapiens
taatgattttagcac

SEQ ID NO: 1713763 - DNA, 15 bp, Homo sapiens
aatgattttagcact

SEQ ID NO: 1713764 - DNA, 15 bp, Homo sapiens
atgattttagcactt

SEQ ID NO: 1713765 - DNA, 15 bp, Homo sapiens
tgattttagcacttc

SEQ ID NO: 1713766 - DNA, 15 bp, Homo sapiens
gattttagcacttca

SEQ ID NO: 1713767 - DNA, 15 bp, Homo sapiens
attttagcacttcac

SEQ ID NO: 1713768 - DNA, 15 bp, Homo sapiens
ttttagcacttcact

SEQ ID NO: 1713769 - DNA, 15 bp, Homo sapiens
tttagcacttcacta

SEQ ID NO: 1713770 - DNA, 15 bp, Homo sapiens
ttagcacttcactat

SEQ ID NO: 1713771 - DNA, 15 bp, Homo sapiens
tagcacttcactatg

SEQ ID NO: 1713772 - DNA, 15 bp, Homo sapiens
agcacttcactatga

SEQ ID NO: 1713773 - DNA, 15 bp, Homo sapiens
gcacttcactatgag

SEQ ID NO: 1713774 - DNA, 15 bp, Homo sapiens
cacttcactatgagt

SEQ ID NO: 1713775 - DNA, 15 bp, Homo sapiens
acttcactatgagtt

SEQ ID NO: 1713776 - DNA, 15 bp, Homo sapiens
cttcactatgagtta

SEQ ID NO: 1713777 - DNA, 15 bp, Homo sapiens
ttcactatgagttat

SEQ ID NO: 1713778 - DNA, 15 bp, Homo sapiens
tcactatgagttatg

SEQ ID NO: 1713779 - DNA, 15 bp, Homo sapiens
cactatgagttatgg

SEQ ID NO: 1713780 - DNA, 15 bp, Homo sapiens
actatgagttatggc

SEQ ID NO: 1713781 - DNA, 15 bp, Homo sapiens
ctatgagttatggct

SEQ ID NO: 1713782 - DNA, 15 bp, Homo sapiens
tatgagttatggcta

SEQ ID NO: 1713783 - DNA, 15 bp, Homo sapiens
atgagttatggctac

SEQ ID NO: 1713784 - DNA, 15 bp, Homo sapiens
tgagttatggctaca

SEQ ID NO: 1713785 - DNA, 15 bp, Homo sapiens
gagttatggctacaa

SEQ ID NO: 1713786 - DNA, 15 bp, Homo sapiens
agttatggctacaaa

SEQ ID NO: 1713787 - DNA, 15 bp, Homo sapiens
gttatggctacaaac

SEQ ID NO: 1713788 - DNA, 15 bp, Homo sapiens
ttatggctacaaact

SEQ ID NO: 1713789 - DNA, 15 bp, Homo sapiens
tatggctacaaactc

SEQ ID NO: 1713790 - DNA, 15 bp, Homo sapiens
atggctacaaactca

SEQ ID NO: 1713791 - DNA, 15 bp, Homo sapiens
tggctacaaactcaa

SEQ ID NO: 1713792 - DNA, 15 bp, Homo sapiens
ggctacaaactcaat

SEQ ID NO: 1713793 - DNA, 15 bp, Homo sapiens
gctacaaactcaata

SEQ ID NO: 1713794 - DNA, 15 bp, Homo sapiens
ctacaaactcaataa

SEQ ID NO: 1713795 - DNA, 15 bp, Homo sapiens
tacaaactcaataac

SEQ ID NO: 1713796 - DNA, 15 bp, Homo sapiens
acaaactcaataaca

SEQ ID NO: 1713797 - DNA, 15 bp, Homo sapiens
caaactcaataacaa

SEQ ID NO: 1713798 - DNA, 15 bp, Homo sapiens
aaactcaataacaag

SEQ ID NO: 1713799 - DNA, 15 bp, Homo sapiens
aactcaataacaagg

SEQ ID NO: 1713800 - DNA, 15 bp, Homo sapiens
actcaataacaaggg

SEQ ID NO: 1713801 - DNA, 15 bp, Homo sapiens
ctcaataacaaggga

SEQ ID NO: 1713802 - DNA, 15 bp, Homo sapiens
tcaataacaagggat

SEQ ID NO: 1713803 - DNA, 15 bp, Homo sapiens
caataacaagggatt

SEQ ID NO: 1713804 - DNA, 15 bp, Homo sapiens
aataacaagggatta

SEQ ID NO: 1713805 - DNA, 15 bp, Homo sapiens
ataacaagggattat

SEQ ID NO: 1713806 - DNA, 15 bp, Homo sapiens
taacaagggattata

SEQ ID NO: 1713807 - DNA, 15 bp, Homo sapiens
aacaagggattatac

SEQ ID NO: 1713808 - DNA, 15 bp, Homo sapiens
acaagggattatact

SEQ ID NO: 1713809 - DNA, 15 bp, Homo sapiens
caagggattatactt

SEQ ID NO: 1713810 - DNA, 15 bp, Homo sapiens
aagggattatacttc

SEQ ID NO: 1713811 - DNA, 15 bp, Homo sapiens
agggattatacttct

SEQ ID NO: 1713812 - DNA, 15 bp, Homo sapiens
gggattatacttctg

SEQ ID NO: 1713813 - DNA, 15 bp, Homo sapiens
ggattatacttctga

SEQ ID NO: 1713814 - DNA, 15 bp, Homo sapiens
gattatacttctgag

SEQ ID NO: 1713815 - DNA, 15 bp, Homo sapiens
attatacttctgagt

SEQ ID NO: 1713816 - DNA, 15 bp, Homo sapiens
ttatacttctgagta

SEQ ID NO: 1713817 - DNA, 15 bp, Homo sapiens
tatacttctgagtaa

SEQ ID NO: 1713818 - DNA, 15 bp, Homo sapiens
atacttctgagtaaa

SEQ ID NO: 1713819 - DNA, 15 bp, Homo sapiens
tacttctgagtaaaa

SEQ ID NO: 1713820 - DNA, 15 bp, Homo sapiens
acttctgagtaaaat

SEQ ID NO: 1713821 - DNA, 15 bp, Homo sapiens
cttctgagtaaaatt

SEQ ID NO: 1713822 - DNA, 15 bp, Homo sapiens
ttctgagtaaaatta

SEQ ID NO: 1713823 - DNA, 15 bp, Homo sapiens
tctgagtaaaattag

SEQ ID NO: 1713824 - DNA, 15 bp, Homo sapiens
ctgagtaaaattagt

SEQ ID NO: 1713825 - DNA, 15 bp, Homo sapiens
tgagtaaaattagta

SEQ ID NO: 1713826 - DNA, 15 bp, Homo sapiens
gagtaaaattagtac

SEQ ID NO: 1713827 - DNA, 15 bp, Homo sapiens
agtaaaattagtaca

SEQ ID NO: 1713828 - DNA, 15 bp, Homo sapiens
gtaaaattagtacaa

SEQ ID NO: 1713829 - DNA, 15 bp, Homo sapiens
taaaattagtacaaa

SEQ ID NO: 1713830 - DNA, 15 bp, Homo sapiens
aaaattagtacaaac

SEQ ID NO: 1713831 - DNA, 15 bp, Homo sapiens
aaattagtacaaact

SEQ ID NO: 1713832 - DNA, 15 bp, Homo sapiens
aattagtacaaactc

SEQ ID NO: 1713833 - DNA, 15 bp, Homo sapiens
attagtacaaactcc

SEQ ID NO: 1713834 - DNA, 15 bp, Homo sapiens
ttagtacaaactcct

SEQ ID NO: 1713835 - DNA, 15 bp, Homo sapiens
tagtacaaactccta

SEQ ID NO: 1713836 - DNA, 15 bp, Homo sapiens
agtacaaactcctat

SEQ ID NO: 1713837 - DNA, 15 bp, Homo sapiens
gtacaaactcctatt

SEQ ID NO: 1713838 - DNA, 15 bp, Homo sapiens
tacaaactcctattt

SEQ ID NO: 1713839 - DNA, 15 bp, Homo sapiens
acaaactcctatttg

SEQ ID NO: 1713840 - DNA, 15 bp, Homo sapiens
caaactcctatttgt

SEQ ID NO: 1713841 - DNA, 15 bp, Homo sapiens
aaactcctatttgtt

SEQ ID NO: 1713842 - DNA, 15 bp, Homo sapiens
aactcctatttgttt

SEQ ID NO: 1713843 - DNA, 15 bp, Homo sapiens
actcctatttgttta

SEQ ID NO: 1713844 - DNA, 15 bp, Homo sapiens
ctcctatttgtttaa

SEQ ID NO: 1713845 - DNA, 15 bp, Homo sapiens
tcctatttgtttaat

SEQ ID NO: 1713846 - DNA, 15 bp, Homo sapiens
cctatttgtttaatt

SEQ ID NO: 1713847 - DNA, 15 bp, Homo sapiens
ctatttgtttaattc

SEQ ID NO: 1713848 - DNA, 15 bp, Homo sapiens
tatttgtttaattct

SEQ ID NO: 1713849 - DNA, 15 bp, Homo sapiens
atttgtttaattctt

SEQ ID NO: 1713850 - DNA, 15 bp, Homo sapiens
tttgtttaattcttt

SEQ ID NO: 1713851 - DNA, 15 bp, Homo sapiens
ttgtttaattctttg

SEQ ID NO: 1713852 - DNA, 15 bp, Homo sapiens
tgtttaattctttgg

SEQ ID NO: 1713853 - DNA, 15 bp, Homo sapiens
gtttaattctttgga

SEQ ID NO: 1713854 - DNA, 15 bp, Homo sapiens
tttaattctttggaa

SEQ ID NO: 1713855 - DNA, 15 bp, Homo sapiens
ttaattctttggaat

SEQ ID NO: 1713856 - DNA, 15 bp, Homo sapiens
taattctttggaatt

SEQ ID NO: 1713857 - DNA, 15 bp, Homo sapiens
aattctttggaatta

SEQ ID NO: 1713858 - DNA, 15 bp, Homo sapiens
attctttggaattac

SEQ ID NO: 1713859 - DNA, 15 bp, Homo sapiens
ttctttggaattact

SEQ ID NO: 1713860 - DNA, 15 bp, Homo sapiens
tctttggaattactt

SEQ ID NO: 1713861 - DNA, 15 bp, Homo sapiens
ctttggaattacttc

SEQ ID NO: 1713862 - DNA, 15 bp, Homo sapiens
tttggaattacttct

SEQ ID NO: 1713863 - DNA, 15 bp, Homo sapiens
ttggaattacttctc

SEQ ID NO: 1713864 - DNA, 15 bp, Homo sapiens
tggaattacttctct

SEQ ID NO: 1713865 - DNA, 15 bp, Homo sapiens
ggaattacttctctg

SEQ ID NO: 1713866 - DNA, 15 bp, Homo sapiens
gaattacttctctga

SEQ ID NO: 1713867 - DNA, 15 bp, Homo sapiens
aattacttctctgat

SEQ ID NO: 1713868 - DNA, 15 bp, Homo sapiens
attacttctctgatc

SEQ ID NO: 1713869 - DNA, 15 bp, Homo sapiens
ttacttctctgatca

SEQ ID NO: 1713870 - DNA, 15 bp, Homo sapiens
tacttctctgatcat

SEQ ID NO: 1713871 - DNA, 15 bp, Homo sapiens
acttctctgatcatt

SEQ ID NO: 1713872 - DNA, 15 bp, Homo sapiens
cttctctgatcatta

SEQ ID NO: 1713873 - DNA, 15 bp, Homo sapiens
ttctctgatcattat

SEQ ID NO: 1713874 - DNA, 15 bp, Homo sapiens
tctctgatcattatt

SEQ ID NO: 1713875 - DNA, 15 bp, Homo sapiens
ctctgatcattattt

SEQ ID NO: 1713876 - DNA, 15 bp, Homo sapiens
tctgatcattattta

SEQ ID NO: 1713877 - DNA, 15 bp, Homo sapiens
ctgatcattatttag

SEQ ID NO: 1713878 - DNA, 15 bp, Homo sapiens
tgatcattatttagt

SEQ ID NO: 1713879 - DNA, 15 bp, Homo sapiens
gatcattatttagtt

SEQ ID NO: 1713880 - DNA, 15 bp, Homo sapiens
atcattatttagttt

SEQ ID NO: 1713881 - DNA, 15 bp, Homo sapiens
tcattatttagttta

SEQ ID NO: 1713882 - DNA, 15 bp, Homo sapiens
cattatttagtttac

SEQ ID NO: 1713883 - DNA, 15 bp, Homo sapiens
attatttagtttact

SEQ ID NO: 1713884 - DNA, 15 bp, Homo sapiens
ttatttagtttacta

SEQ ID NO: 1713885 - DNA, 15 bp, Homo sapiens
tatttagtttactac

SEQ ID NO: 1713886 - DNA, 15 bp, Homo sapiens
atttagtttactact

SEQ ID NO: 1713887 - DNA, 15 bp, Homo sapiens
tttagtttactactg

SEQ ID NO: 1713888 - DNA, 15 bp, Homo sapiens
ttagtttactactgt

SEQ ID NO: 1713889 - DNA, 15 bp, Homo sapiens
tagtttactactgtg

SEQ ID NO: 1713890 - DNA, 15 bp, Homo sapiens
agtttactactgtga

SEQ ID NO: 1713891 - DNA, 15 bp, Homo sapiens
gtttactactgtgat

SEQ ID NO: 1713892 - DNA, 15 bp, Homo sapiens
tttactactgtgatt

SEQ ID NO: 1713893 - DNA, 15 bp, Homo sapiens
ttactactgtgatta

SEQ ID NO: 1713894 - DNA, 15 bp, Homo sapiens
tactactgtgattac

SEQ ID NO: 1713895 - DNA, 15 bp, Homo sapiens
actactgtgattact

SEQ ID NO: 1713896 - DNA, 15 bp, Homo sapiens
ctactgtgattacta

SEQ ID NO: 1713897 - DNA, 15 bp, Homo sapiens
tactgtgattactaa

SEQ ID NO: 1713898 - DNA, 15 bp, Homo sapiens
actgtgattactaac

SEQ ID NO: 1713899 - DNA, 15 bp, Homo sapiens
ctgtgattactaaca

SEQ ID NO: 1713900 - DNA, 15 bp, Homo sapiens
tgtgattactaacac

SEQ ID NO: 1713901 - DNA, 15 bp, Homo sapiens
gtgattactaacaca

SEQ ID NO: 1713902 - DNA, 15 bp, Homo sapiens
tgattactaacacat

SEQ ID NO: 1713903 - DNA, 15 bp, Homo sapiens
gattactaacacatt

SEQ ID NO: 1713904 - DNA, 15 bp, Homo sapiens
attactaacacatta

SEQ ID NO: 1713905 - DNA, 15 bp, Homo sapiens
ttactaacacattac

SEQ ID NO: 1713906 - DNA, 15 bp, Homo sapiens
tactaacacattact

SEQ ID NO: 1713907 - DNA, 15 bp, Homo sapiens
actaacacattactg

SEQ ID NO: 1713908 - DNA, 15 bp, Homo sapiens
ctaacacattactga

SEQ ID NO: 1713909 - DNA, 15 bp, Homo sapiens
taacacattactgat

SEQ ID NO: 1713910 - DNA, 15 bp, Homo sapiens
aacacattactgatg

SEQ ID NO: 1713911 - DNA, 15 bp, Homo sapiens
acacattactgatgt

SEQ ID NO: 1713912 - DNA, 15 bp, Homo sapiens
cacattactgatgtg

SEQ ID NO: 1713913 - DNA, 15 bp, Homo sapiens
acattactgatgtgt

SEQ ID NO: 1713914 - DNA, 15 bp, Homo sapiens
cattactgatgtgtg

SEQ ID NO: 1713915 - DNA, 15 bp, Homo sapiens
attactgatgtgtgt

SEQ ID NO: 1713916 - DNA, 15 bp, Homo sapiens
ttactgatgtgtgtc

SEQ ID NO: 1713917 - DNA, 15 bp, Homo sapiens
tactgatgtgtgtct

SEQ ID NO: 1713918 - DNA, 15 bp, Homo sapiens
actgatgtgtgtctt

SEQ ID NO: 1713919 - DNA, 15 bp, Homo sapiens
ctgatgtgtgtcttg

SEQ ID NO: 1713920 - DNA, 15 bp, Homo sapiens
tgatgtgtgtcttgt

SEQ ID NO: 1713921 - DNA, 15 bp, Homo sapiens
gatgtgtgtcttgta

SEQ ID NO: 1713922 - DNA, 15 bp, Homo sapiens
atgtgtgtcttgtat

SEQ ID NO: 1713923 - DNA, 15 bp, Homo sapiens
tgtgtgtcttgtatt

SEQ ID NO: 1713924 - DNA, 15 bp, Homo sapiens
gtgtgtcttgtattg

SEQ ID NO: 1713925 - DNA, 15 bp, Homo sapiens
tgtgtcttgtattgg

SEQ ID NO: 1713926 - DNA, 15 bp, Homo sapiens
gtgtcttgtattggc

SEQ ID NO: 1713927 - DNA, 15 bp, Homo sapiens
tgtcttgtattggca

SEQ ID NO: 1713928 - DNA, 15 bp, Homo sapiens
gtcttgtattggcaa

SEQ ID NO: 1713929 - DNA, 15 bp, Homo sapiens
tcttgtattggcaaa

SEQ ID NO: 1713930 - DNA, 15 bp, Homo sapiens
cttgtattggcaaaa

SEQ ID NO: 1713931 - DNA, 15 bp, Homo sapiens
ttgtattggcaaaat

SEQ ID NO: 1713932 - DNA, 15 bp, Homo sapiens
tgtattggcaaaatt

SEQ ID NO: 1713933 - DNA, 15 bp, Homo sapiens
gtattggcaaaattg

SEQ ID NO: 1713934 - DNA, 15 bp, Homo sapiens
tattggcaaaattgg

SEQ ID NO: 1713935 - DNA, 15 bp, Homo sapiens
attggcaaaattgga

SEQ ID NO: 1713936 - DNA, 15 bp, Homo sapiens
ttggcaaaattggac

SEQ ID NO: 1713937 - DNA, 15 bp, Homo sapiens
tggcaaaattggaca

SEQ ID NO: 1713938 - DNA, 15 bp, Homo sapiens
ggcaaaattggacag

SEQ ID NO: 1713939 - DNA, 15 bp, Homo sapiens
gcaaaattggacagt

SEQ ID NO: 1713940 - DNA, 15 bp, Homo sapiens
caaaattggacagta

SEQ ID NO: 1713941 - DNA, 15 bp, Homo sapiens
aaaattggacagtaa

SEQ ID NO: 1713942 - DNA, 15 bp, Homo sapiens
aaattggacagtaag

SEQ ID NO: 1713943 - DNA, 15 bp, Homo sapiens
aattggacagtaagg

SEQ ID NO: 1713944 - DNA, 15 bp, Homo sapiens
attggacagtaagga

SEQ ID NO: 1713945 - DNA, 15 bp, Homo sapiens
ttggacagtaaggat

SEQ ID NO: 1713946 - DNA, 15 bp, Homo sapiens
tggacagtaaggatt

SEQ ID NO: 1713947 - DNA, 15 bp, Homo sapiens
ggacagtaaggattg

SEQ ID NO: 1713948 - DNA, 15 bp, Homo sapiens
gacagtaaggattgt

SEQ ID NO: 1713949 - DNA, 15 bp, Homo sapiens
acagtaaggattgtt

SEQ ID NO: 1713950 - DNA, 15 bp, Homo sapiens
cagtaaggattgttt

SEQ ID NO: 1713951 - DNA, 15 bp, Homo sapiens
agtaaggattgtttt

SEQ ID NO: 1713952 - DNA, 15 bp, Homo sapiens
gtaaggattgttttg

SEQ ID NO: 1713953 - DNA, 15 bp, Homo sapiens
taaggattgttttgc

SEQ ID NO: 1713954 - DNA, 15 bp, Homo sapiens
aaggattgttttgcc

SEQ ID NO: 1713955 - DNA, 15 bp, Homo sapiens
aggattgttttgcca

SEQ ID NO: 1713956 - DNA, 15 bp, Homo sapiens
ggattgttttgccat

SEQ ID NO: 1713957 - DNA, 15 bp, Homo sapiens
gattgttttgccatc

SEQ ID NO: 1713958 - DNA, 15 bp, Homo sapiens
attgttttgccatct

SEQ ID NO: 1713959 - DNA, 15 bp, Homo sapiens
ttgttttgccatcta

SEQ ID NO: 1713960 - DNA, 15 bp, Homo sapiens
tgttttgccatctat

SEQ ID NO: 1713961 - DNA, 15 bp, Homo sapiens
gttttgccatctata

SEQ ID NO: 1713962 - DNA, 15 bp, Homo sapiens
ttttgccatctataa

SEQ ID NO: 1713963 - DNA, 15 bp, Homo sapiens
tttgccatctataat

SEQ ID NO: 1713964 - DNA, 15 bp, Homo sapiens
ttgccatctataatt

SEQ ID NO: 1713965 - DNA, 15 bp, Homo sapiens
tgccatctataattt

SEQ ID NO: 1713966 - DNA, 15 bp, Homo sapiens
gccatctataattta

SEQ ID NO: 1713967 - DNA, 15 bp, Homo sapiens
ccatctataatttag

SEQ ID NO: 1713968 - DNA, 15 bp, Homo sapiens
catctataatttagg

SEQ ID NO: 1713969 - DNA, 15 bp, Homo sapiens
atctataatttaggg

SEQ ID NO: 1713970 - DNA, 15 bp, Homo sapiens
tctataatttagggt

SEQ ID NO: 1713971 - DNA, 15 bp, Homo sapiens
ctataatttagggtt

SEQ ID NO: 1713972 - DNA, 15 bp, Homo sapiens
tataatttagggtta

SEQ ID NO: 1713973 - DNA, 15 bp, Homo sapiens
ataatttagggttaa

SEQ ID NO: 1713974 - DNA, 15 bp, Homo sapiens
taatttagggttaaa

SEQ ID NO: 1713975 - DNA, 15 bp, Homo sapiens
aatttagggttaaaa

SEQ ID NO: 1713976 - DNA, 15 bp, Homo sapiens
atttagggttaaaaa

SEQ ID NO: 1713977 - DNA, 15 bp, Homo sapiens
tttagggttaaaaac

SEQ ID NO: 1713978 - DNA, 15 bp, Homo sapiens
ttagggttaaaaaca

SEQ ID NO: 1713979 - DNA, 15 bp, Homo sapiens
tagggttaaaaacaa

SEQ ID NO: 1713980 - DNA, 15 bp, Homo sapiens
agggttaaaaacaaa

SEQ ID NO: 1713981 - DNA, 15 bp, Homo sapiens
gggttaaaaacaaat

SEQ ID NO: 1713982 - DNA, 15 bp, Homo sapiens
ggttaaaaacaaatg

SEQ ID NO: 1713983 - DNA, 15 bp, Homo sapiens
gttaaaaacaaatga

SEQ ID NO: 1713984 - DNA, 15 bp, Homo sapiens
ttaaaaacaaatgac

SEQ ID NO: 1713985 - DNA, 15 bp, Homo sapiens
taaaaacaaatgaca

SEQ ID NO: 1713986 - DNA, 15 bp, Homo sapiens
aaaaacaaatgacac

SEQ ID NO: 1713987 - DNA, 15 bp, Homo sapiens
aaaacaaatgacaca

SEQ ID NO: 1713988 - DNA, 15 bp, Homo sapiens
aaacaaatgacacaa

SEQ ID NO: 1713989 - DNA, 15 bp, Homo sapiens
aacaaatgacacaaa

SEQ ID NO: 1713990 - DNA, 15 bp, Homo sapiens
acaaatgacacaaat

SEQ ID NO: 1713991 - DNA, 15 bp, Homo sapiens
caaatgacacaaatt

SEQ ID NO: 1713992 - DNA, 15 bp, Homo sapiens
aaatgacacaaattt

SEQ ID NO: 1713993 - DNA, 15 bp, Homo sapiens
aatgacacaaatttt

SEQ ID NO: 1713994 - DNA, 15 bp, Homo sapiens
atgacacaaatttta

SEQ ID NO: 1713995 - DNA, 15 bp, Homo sapiens
tgacacaaattttac

SEQ ID NO: 1713996 - DNA, 15 bp, Homo sapiens
gacacaaattttact

SEQ ID NO: 1713997 - DNA, 15 bp, Homo sapiens
acacaaattttactc

SEQ ID NO: 1713998 - DNA, 15 bp, Homo sapiens
cacaaattttactcc

SEQ ID NO: 1713999 - DNA, 15 bp, Homo sapiens
acaaattttactccc

SEQ ID NO: 1714000 - DNA, 15 bp, Homo sapiens
caaattttactcccc

SEQ ID NO: 1714001 - DNA, 15 bp, Homo sapiens
aaattttactcccct

SEQ ID NO: 1714002 - DNA, 15 bp, Homo sapiens
aattttactccccta

SEQ ID NO: 1714003 - DNA, 15 bp, Homo sapiens
attttactcccctaa

SEQ ID NO: 1714004 - DNA, 15 bp, Homo sapiens
ttttactcccctaat

SEQ ID NO: 1714005 - DNA, 15 bp, Homo sapiens
tttactcccctaatt

SEQ ID NO: 1714006 - DNA, 15 bp, Homo sapiens
ttactcccctaattt

SEQ ID NO: 1714007 - DNA, 15 bp, Homo sapiens
tactcccctaattta

SEQ ID NO: 1714008 - DNA, 15 bp, Homo sapiens
actcccctaatttag

SEQ ID NO: 1714009 - DNA, 15 bp, Homo sapiens
ctcccctaatttagc

SEQ ID NO: 1714010 - DNA, 15 bp, Homo sapiens
tcccctaatttagct

SEQ ID NO: 1714011 - DNA, 15 bp, Homo sapiens
cccctaatttagcta

SEQ ID NO: 1714012 - DNA, 15 bp, Homo sapiens
ccctaatttagctaa

SEQ ID NO: 1714013 - DNA, 15 bp, Homo sapiens
cctaatttagctaag

SEQ ID NO: 1714014 - DNA, 15 bp, Homo sapiens
ctaatttagctaaga

SEQ ID NO: 1714015 - DNA, 15 bp, Homo sapiens
taatttagctaagaa

SEQ ID NO: 1714016 - DNA, 15 bp, Homo sapiens
aatttagctaagaat

SEQ ID NO: 1714017 - DNA, 15 bp, Homo sapiens
atttagctaagaatt

SEQ ID NO: 1714018 - DNA, 15 bp, Homo sapiens
tttagctaagaattt

SEQ ID NO: 1714019 - DNA, 15 bp, Homo sapiens
ttagctaagaattta

SEQ ID NO: 1714020 - DNA, 15 bp, Homo sapiens
tagctaagaatttac

SEQ ID NO: 1714021 - DNA, 15 bp, Homo sapiens
agctaagaatttaca

SEQ ID NO: 1714022 - DNA, 15 bp, Homo sapiens
gctaagaatttacaa

SEQ ID NO: 1714023 - DNA, 15 bp, Homo sapiens
ctaagaatttacaaa

SEQ ID NO: 1714024 - DNA, 15 bp, Homo sapiens
taagaatttacaaaa

SEQ ID NO: 1714025 - DNA, 15 bp, Homo sapiens
aagaatttacaaaaa

SEQ ID NO: 1714026 - DNA, 15 bp, Homo sapiens
agaatttacaaaaaa

SEQ ID NO: 1714027 - DNA, 15 bp, Homo sapiens
gaatttacaaaaaat

SEQ ID NO: 1714028 - DNA, 15 bp, Homo sapiens
aatttacaaaaaata

SEQ ID NO: 1714029 - DNA, 15 bp, Homo sapiens
atttacaaaaaatag

SEQ ID NO: 1714030 - DNA, 15 bp, Homo sapiens
tttacaaaaaatagg

SEQ ID NO: 1714031 - DNA, 15 bp, Homo sapiens
ttacaaaaaataggc

SEQ ID NO: 1714032 - DNA, 15 bp, Homo sapiens
tacaaaaaataggct

SEQ ID NO: 1714033 - DNA, 15 bp, Homo sapiens
acaaaaaataggctt

SEQ ID NO: 1714034 - DNA, 15 bp, Homo sapiens
caaaaaataggcttg

SEQ ID NO: 1714035 - DNA, 15 bp, Homo sapiens
aaaaaataggcttga

SEQ ID NO: 1714036 - DNA, 15 bp, Homo sapiens
aaaaataggcttgat

SEQ ID NO: 1714037 - DNA, 15 bp, Homo sapiens
aaaataggcttgatt

SEQ ID NO: 1714038 - DNA, 15 bp, Homo sapiens
aaataggcttgatta

SEQ ID NO: 1714039 - DNA, 15 bp, Homo sapiens
aataggcttgattaa

SEQ ID NO: 1714040 - DNA, 15 bp, Homo sapiens
ataggcttgattaaa

SEQ ID NO: 1714041 - DNA, 15 bp, Homo sapiens
taggcttgattaaaa

SEQ ID NO: 1714042 - DNA, 15 bp, Homo sapiens
aggcttgattaaaaa

SEQ ID NO: 1714043 - DNA, 15 bp, Homo sapiens
ggcttgattaaaaat

SEQ ID NO: 1714044 - DNA, 15 bp, Homo sapiens
gcttgattaaaaatg

SEQ ID NO: 1714045 - DNA, 15 bp, Homo sapiens
cttgattaaaaatga

SEQ ID NO: 1714046 - DNA, 15 bp, Homo sapiens
ttgattaaaaatgaa

SEQ ID NO: 1714047 - DNA, 15 bp, Homo sapiens
tgattaaaaatgaaa

SEQ ID NO: 1714048 - DNA, 15 bp, Homo sapiens
gattaaaaatgaaaa

SEQ ID NO: 1714049 - DNA, 15 bp, Homo sapiens
attaaaaatgaaaat

SEQ ID NO: 1714050 - DNA, 15 bp, Homo sapiens
ttaaaaatgaaaatg

SEQ ID NO: 1714051 - DNA, 15 bp, Homo sapiens
taaaaatgaaaatga

SEQ ID NO: 1714052 - DNA, 15 bp, Homo sapiens
aaaaatgaaaatgat

SEQ ID NO: 1714053 - DNA, 15 bp, Homo sapiens
aaaatgaaaatgatt

SEQ ID NO: 1714054 - DNA, 15 bp, Homo sapiens
aaatgaaaatgattg

SEQ ID NO: 1714055 - DNA, 15 bp, Homo sapiens
aatgaaaatgattgt

SEQ ID NO: 1714056 - DNA, 15 bp, Homo sapiens
atgaaaatgattgta

SEQ ID NO: 1714057 - DNA, 15 bp, Homo sapiens
tgaaaatgattgtaa

SEQ ID NO: 1714058 - DNA, 15 bp, Homo sapiens
gaaaatgattgtaaa

SEQ ID NO: 1714059 - DNA, 15 bp, Homo sapiens
aaaatgattgtaaaa

SEQ ID NO: 1714060 - DNA, 15 bp, Homo sapiens
aaatgattgtaaaaa

SEQ ID NO: 1714061 - DNA, 15 bp, Homo sapiens
aatgattgtaaaaat

SEQ ID NO: 1714062 - DNA, 15 bp, Homo sapiens
atgattgtaaaaata

SEQ ID NO: 1714063 - DNA, 15 bp, Homo sapiens
tgattgtaaaaataa

SEQ ID NO: 1714064 - DNA, 15 bp, Homo sapiens
gattgtaaaaataac

SEQ ID NO: 1714065 - DNA, 15 bp, Homo sapiens
attgtaaaaataaca

SEQ ID NO: 1714066 - DNA, 15 bp, Homo sapiens
ttgtaaaaataacaa

SEQ ID NO: 1714067 - DNA, 15 bp, Homo sapiens
tgtaaaaataacaag

SEQ ID NO: 1714068 - DNA, 15 bp, Homo sapiens
gtaaaaataacaagt

SEQ ID NO: 1714069 - DNA, 15 bp, Homo sapiens
taaaaataacaagtt

SEQ ID NO: 1714070 - DNA, 15 bp, Homo sapiens
aaaaataacaagtta

SEQ ID NO: 1714071 - DNA, 15 bp, Homo sapiens
aaaataacaagttat

SEQ ID NO: 1714072 - DNA, 15 bp, Homo sapiens
aaataacaagttata

SEQ ID NO: 1714073 - DNA, 15 bp, Homo sapiens
aataacaagttatat

SEQ ID NO: 1714074 - DNA, 15 bp, Homo sapiens
ataacaagttatata

SEQ ID NO: 1714075 - DNA, 15 bp, Homo sapiens
taacaagttatataa

SEQ ID NO: 1714076 - DNA, 15 bp, Homo sapiens
aacaagttatataag

SEQ ID NO: 1714077 - DNA, 15 bp, Homo sapiens
acaagttatataagt

SEQ ID NO: 1714078 - DNA, 15 bp, Homo sapiens
caagttatataagta

SEQ ID NO: 1714079 - DNA, 15 bp, Homo sapiens
aagttatataagtaa

SEQ ID NO: 1714080 - DNA, 15 bp, Homo sapiens
agttatataagtaaa

SEQ ID NO: 1714081 - DNA, 15 bp, Homo sapiens
gttatataagtaaat

SEQ ID NO: 1714082 - DNA, 15 bp, Homo sapiens
ttatataagtaaata

SEQ ID NO: 1714083 - DNA, 15 bp, Homo sapiens
tatataagtaaataa

SEQ ID NO: 1714084 - DNA, 15 bp, Homo sapiens
atataagtaaataaa

SEQ ID NO: 1714085 - DNA, 15 bp, Homo sapiens
agtaaataaatattt

SEQ ID NO: 1714086 - DNA, 15 bp, Homo sapiens
gtaaataaatattta

SEQ ID NO: 1714087 - DNA, 15 bp, Homo sapiens
taaataaatatttac

SEQ ID NO: 1714088 - DNA, 15 bp, Homo sapiens
aaataaatatttaca

SEQ ID NO: 1714089 - DNA, 15 bp, Homo sapiens
aataaatatttacat

SEQ ID NO: 1714090 - DNA, 15 bp, Homo sapiens
ataaatatttacatt

SEQ ID NO: 1714091 - DNA, 15 bp, Homo sapiens
taaatatttacattt

SEQ ID NO: 1714092 - DNA, 15 bp, Homo sapiens
aaatatttacatttt

SEQ ID NO: 1714093 - DNA, 15 bp, Homo sapiens
aatatttacattttc

SEQ ID NO: 1714094 - DNA, 15 bp, Homo sapiens
atatttacattttca

SEQ ID NO: 1714095 - DNA, 15 bp, Homo sapiens
tatttacattttcat

SEQ ID NO: 1714096 - DNA, 15 bp, Homo sapiens
atttacattttcata

SEQ ID NO: 1714097 - DNA, 15 bp, Homo sapiens
tttacattttcatag

SEQ ID NO: 1714098 - DNA, 15 bp, Homo sapiens
ttacattttcataga

SEQ ID NO: 1714099 - DNA, 15 bp, Homo sapiens
tacattttcatagat

SEQ ID NO: 1714100 - DNA, 15 bp, Homo sapiens
acattttcatagatt

SEQ ID NO: 1714101 - DNA, 15 bp, Homo sapiens
cattttcatagattt

SEQ ID NO: 1714102 - DNA, 15 bp, Homo sapiens
attttcatagatttt

SEQ ID NO: 1714103 - DNA, 15 bp, Homo sapiens
ttttcatagattttt

SEQ ID NO: 1714104 - DNA, 15 bp, Homo sapiens
tttcatagattttta

SEQ ID NO: 1714105 - DNA, 15 bp, Homo sapiens
ttcatagatttttac

SEQ ID NO: 1714106 - DNA, 15 bp, Homo sapiens
tcatagatttttact

SEQ ID NO: 1714107 - DNA, 15 bp, Homo sapiens
catagatttttactc

SEQ ID NO: 1714108 - DNA, 15 bp, Homo sapiens
atagatttttactct

SEQ ID NO: 1714109 - DNA, 15 bp, Homo sapiens
tagatttttactctt

SEQ ID NO: 1714110 - DNA, 15 bp, Homo sapiens
agatttttactcttg

SEQ ID NO: 1714111 - DNA, 15 bp, Homo sapiens
gatttttactcttgg

SEQ ID NO: 1714112 - DNA, 15 bp, Homo sapiens
atttttactcttggg

SEQ ID NO: 1714113 - DNA, 15 bp, Homo sapiens
tttttactcttgggt

SEQ ID NO: 1714114 - DNA, 15 bp, Homo sapiens
ttttactcttgggtt

SEQ ID NO: 1714115 - DNA, 15 bp, Homo sapiens
tttactcttgggttg

SEQ ID NO: 1714116 - DNA, 15 bp, Homo sapiens
ttactcttgggttgc

SEQ ID NO: 1714117 - DNA, 15 bp, Homo sapiens
tactcttgggttgca

SEQ ID NO: 1714118 - DNA, 15 bp, Homo sapiens
actcttgggttgcag

SEQ ID NO: 1714119 - DNA, 15 bp, Homo sapiens
ctcttgggttgcagg

SEQ ID NO: 1714120 - DNA, 15 bp, Homo sapiens
tcttgggttgcaggt

SEQ ID NO: 1714121 - DNA, 15 bp, Homo sapiens
cttgggttgcaggtg

SEQ ID NO: 1714122 - DNA, 15 bp, Homo sapiens
ttgggttgcaggtga

SEQ ID NO: 1714123 - DNA, 15 bp, Homo sapiens
tgggttgcaggtgac

SEQ ID NO: 1714124 - DNA, 15 bp, Homo sapiens
gggttgcaggtgaca

SEQ ID NO: 1714125 - DNA, 15 bp, Homo sapiens
ggttgcaggtgacaa

SEQ ID NO: 1714126 - DNA, 15 bp, Homo sapiens
gttgcaggtgacaaa

SEQ ID NO: 1714127 - DNA, 15 bp, Homo sapiens
ttgcaggtgacaaac

SEQ ID NO: 1714128 - DNA, 15 bp, Homo sapiens
tgcaggtgacaaacc

SEQ ID NO: 1714129 - DNA, 15 bp, Homo sapiens
gcaggtgacaaacct

SEQ ID NO: 1714130 - DNA, 15 bp, Homo sapiens
caggtgacaaacctt

SEQ ID NO: 1714131 - DNA, 15 bp, Homo sapiens
aggtgacaaaccttg

SEQ ID NO: 1714132 - DNA, 15 bp, Homo sapiens
ggtgacaaaccttga

SEQ ID NO: 1714133 - DNA, 15 bp, Homo sapiens
gtgacaaaccttgaa

SEQ ID NO: 1714134 - DNA, 15 bp, Homo sapiens
tgacaaaccttgaaa

SEQ ID NO: 1714135 - DNA, 15 bp, Homo sapiens
gacaaaccttgaaat

SEQ ID NO: 1714136 - DNA, 15 bp, Homo sapiens
acaaaccttgaaatt

SEQ ID NO: 1714137 - DNA, 15 bp, Homo sapiens
caaaccttgaaattt

SEQ ID NO: 1714138 - DNA, 15 bp, Homo sapiens
aaaccttgaaatttt

SEQ ID NO: 1714139 - DNA, 15 bp, Homo sapiens
aaccttgaaatttta

SEQ ID NO: 1714140 - DNA, 15 bp, Homo sapiens
accttgaaattttac

SEQ ID NO: 1714141 - DNA, 15 bp, Homo sapiens
ccttgaaattttact

SEQ ID NO: 1714142 - DNA, 15 bp, Homo sapiens
cttgaaattttactc

SEQ ID NO: 1714143 - DNA, 15 bp, Homo sapiens
ttgaaattttactca

SEQ ID NO: 1714144 - DNA, 15 bp, Homo sapiens
tgaaattttactcat

SEQ ID NO: 1714145 - DNA, 15 bp, Homo sapiens
gaaattttactcatt

SEQ ID NO: 1714146 - DNA, 15 bp, Homo sapiens
aaattttactcattg

SEQ ID NO: 1714147 - DNA, 15 bp, Homo sapiens
aattttactcattgt

SEQ ID NO: 1714148 - DNA, 15 bp, Homo sapiens
attttactcattgta

SEQ ID NO: 1714149 - DNA, 15 bp, Homo sapiens
ttttactcattgtaa

SEQ ID NO: 1714150 - DNA, 15 bp, Homo sapiens
tttactcattgtaat

SEQ ID NO: 1714151 - DNA, 15 bp, Homo sapiens
ttactcattgtaata

SEQ ID NO: 1714152 - DNA, 15 bp, Homo sapiens
tactcattgtaatat

SEQ ID NO: 1714153 - DNA, 15 bp, Homo sapiens
actcattgtaatatc

SEQ ID NO: 1714154 - DNA, 15 bp, Homo sapiens
ctcattgtaatatcg

SEQ ID NO: 1714155 - DNA, 15 bp, Homo sapiens
tcattgtaatatcgt

SEQ ID NO: 1714156 - DNA, 15 bp, Homo sapiens
cattgtaatatcgta

SEQ ID NO: 1714157 - DNA, 15 bp, Homo sapiens
attgtaatatcgtac

SEQ ID NO: 1714158 - DNA, 15 bp, Homo sapiens
ttgtaatatcgtact

SEQ ID NO: 1714159 - DNA, 15 bp, Homo sapiens
tgtaatatcgtacta

SEQ ID NO: 1714160 - DNA, 15 bp, Homo sapiens
gtaatatcgtactat

SEQ ID NO: 1714161 - DNA, 15 bp, Homo sapiens
taatatcgtactatt

SEQ ID NO: 1714162 - DNA, 15 bp, Homo sapiens
aatatcgtactattg

SEQ ID NO: 1714163 - DNA, 15 bp, Homo sapiens
atatcgtactattgc

SEQ ID NO: 1714164 - DNA, 15 bp, Homo sapiens
tatcgtactattgca

SEQ ID NO: 1714165 - DNA, 15 bp, Homo sapiens
atcgtactattgcat

SEQ ID NO: 1714166 - DNA, 15 bp, Homo sapiens
tcgtactattgcata

SEQ ID NO: 1714167 - DNA, 15 bp, Homo sapiens
cgtactattgcatat

SEQ ID NO: 1714168 - DNA, 15 bp, Homo sapiens
gtactattgcatatg

SEQ ID NO: 1714169 - DNA, 15 bp, Homo sapiens
tactattgcatatga

SEQ ID NO: 1714170 - DNA, 15 bp, Homo sapiens
actattgcatatgac

SEQ ID NO: 1714171 - DNA, 15 bp, Homo sapiens
ctattgcatatgaca

SEQ ID NO: 1714172 - DNA, 15 bp, Homo sapiens
tattgcatatgacag

SEQ ID NO: 1714173 - DNA, 15 bp, Homo sapiens
attgcatatgacagg

SEQ ID NO: 1714174 - DNA, 15 bp, Homo sapiens
ttgcatatgacaggg

SEQ ID NO: 1714175 - DNA, 15 bp, Homo sapiens
tgcatatgacaggga

SEQ ID NO: 1714176 - DNA, 15 bp, Homo sapiens
gcatatgacagggac

SEQ ID NO: 1714177 - DNA, 15 bp, Homo sapiens
catatgacagggaca

SEQ ID NO: 1714178 - DNA, 15 bp, Homo sapiens
atatgacagggacac

SEQ ID NO: 1714179 - DNA, 15 bp, Homo sapiens
tatgacagggacaca

SEQ ID NO: 1714180 - DNA, 15 bp, Homo sapiens
atgacagggacacaa

SEQ ID NO: 1714181 - DNA, 15 bp, Homo sapiens
tgacagggacacaac

SEQ ID NO: 1714182 - DNA, 15 bp, Homo sapiens
gacagggacacaacc

SEQ ID NO: 1714183 - DNA, 15 bp, Homo sapiens
acagggacacaacca

SEQ ID NO: 1714184 - DNA, 15 bp, Homo sapiens
cagggacacaaccat

SEQ ID NO: 1714185 - DNA, 15 bp, Homo sapiens
agggacacaaccatg

SEQ ID NO: 1714186 - DNA, 15 bp, Homo sapiens
gggacacaaccatgc

SEQ ID NO: 1714187 - DNA, 15 bp, Homo sapiens
ggacacaaccatgcc

SEQ ID NO: 1714188 - DNA, 15 bp, Homo sapiens
gacacaaccatgcca

SEQ ID NO: 1714189 - DNA, 15 bp, Homo sapiens
acacaaccatgccac

SEQ ID NO: 1714190 - DNA, 15 bp, Homo sapiens
cacaaccatgccacc

SEQ ID NO: 1714191 - DNA, 15 bp, Homo sapiens
acaaccatgccacct

SEQ ID NO: 1714192 - DNA, 15 bp, Homo sapiens
caaccatgccacctg

SEQ ID NO: 1714193 - DNA, 15 bp, Homo sapiens
aaccatgccacctgc

SEQ ID NO: 1714194 - DNA, 15 bp, Homo sapiens
accatgccacctgca

SEQ ID NO: 1714195 - DNA, 15 bp, Homo sapiens
ccatgccacctgcaa

SEQ ID NO: 1714196 - DNA, 15 bp, Homo sapiens
catgccacctgcaac

SEQ ID NO: 1714197 - DNA, 15 bp, Homo sapiens
atgccacctgcaact

SEQ ID NO: 1714198 - DNA, 15 bp, Homo sapiens
tgccacctgcaactc

SEQ ID NO: 1714199 - DNA, 15 bp, Homo sapiens
gccacctgcaactca

SEQ ID NO: 1714200 - DNA, 15 bp, Homo sapiens
ccacctgcaactcaa

SEQ ID NO: 1714201 - DNA, 15 bp, Homo sapiens
cacctgcaactcaag

SEQ ID NO: 1714202 - DNA, 15 bp, Homo sapiens
acctgcaactcaaga

SEQ ID NO: 1714203 - DNA, 15 bp, Homo sapiens
cctgcaactcaagaa

SEQ ID NO: 1714204 - DNA, 15 bp, Homo sapiens
ctgcaactcaagaac

SEQ ID NO: 1714205 - DNA, 15 bp, Homo sapiens
tgcaactcaagaacc

SEQ ID NO: 1714206 - DNA, 15 bp, Homo sapiens
gcaactcaagaacca

SEQ ID NO: 1714207 - DNA, 15 bp, Homo sapiens
caactcaagaaccag

SEQ ID NO: 1714208 - DNA, 15 bp, Homo sapiens
aactcaagaaccagg

SEQ ID NO: 1714209 - DNA, 15 bp, Homo sapiens
actcaagaaccaggt

SEQ ID NO: 1714210 - DNA, 15 bp, Homo sapiens
ctcaagaaccaggtt

SEQ ID NO: 1714211 - DNA, 15 bp, Homo sapiens
tcaagaaccaggttg

SEQ ID NO: 1714212 - DNA, 15 bp, Homo sapiens
caagaaccaggttga

SEQ ID NO: 1714213 - DNA, 15 bp, Homo sapiens
aagaaccaggttgaa

SEQ ID NO: 1714214 - DNA, 15 bp, Homo sapiens
agaaccaggttgaag

SEQ ID NO: 1714215 - DNA, 15 bp, Homo sapiens
gaaccaggttgaaga

SEQ ID NO: 1714216 - DNA, 15 bp, Homo sapiens
aaccaggttgaagaa

SEQ ID NO: 1714217 - DNA, 15 bp, Homo sapiens
accaggttgaagaat

SEQ ID NO: 1714218 - DNA, 15 bp, Homo sapiens
ccaggttgaagaata

SEQ ID NO: 1714219 - DNA, 15 bp, Homo sapiens
caggttgaagaatac

SEQ ID NO: 1714220 - DNA, 15 bp, Homo sapiens
aggttgaagaatacc

SEQ ID NO: 1714221 - DNA, 15 bp, Homo sapiens
ggttgaagaatacct

SEQ ID NO: 1714222 - DNA, 15 bp, Homo sapiens
gttgaagaatacctg

SEQ ID NO: 1714223 - DNA, 15 bp, Homo sapiens
ttgaagaatacctga

SEQ ID NO: 1714224 - DNA, 15 bp, Homo sapiens
tgaagaatacctgaa

SEQ ID NO: 1714225 - DNA, 15 bp, Homo sapiens
gaagaatacctgaac

SEQ ID NO: 1714226 - DNA, 15 bp, Homo sapiens
aagaatacctgaact

SEQ ID NO: 1714227 - DNA, 15 bp, Homo sapiens
agaatacctgaactg

SEQ ID NO: 1714228 - DNA, 15 bp, Homo sapiens
gaatacctgaactgt

SEQ ID NO: 1714229 - DNA, 15 bp, Homo sapiens
aatacctgaactgtt

SEQ ID NO: 1714230 - DNA, 15 bp, Homo sapiens
atacctgaactgttt

SEQ ID NO: 1714231 - DNA, 15 bp, Homo sapiens
tacctgaactgttta

SEQ ID NO: 1714232 - DNA, 15 bp, Homo sapiens
acctgaactgtttaa

SEQ ID NO: 1714233 - DNA, 15 bp, Homo sapiens
cctgaactgtttaac

SEQ ID NO: 1714234 - DNA, 15 bp, Homo sapiens
ctgaactgtttaaca

SEQ ID NO: 1714235 - DNA, 15 bp, Homo sapiens
tgaactgtttaacaa

SEQ ID NO: 1714236 - DNA, 15 bp, Homo sapiens
gaactgtttaacaag

SEQ ID NO: 1714237 - DNA, 15 bp, Homo sapiens
aactgtttaacaagc

SEQ ID NO: 1714238 - DNA, 15 bp, Homo sapiens
actgtttaacaagca

SEQ ID NO: 1714239 - DNA, 15 bp, Homo sapiens
ctgtttaacaagcaa

SEQ ID NO: 1714240 - DNA, 15 bp, Homo sapiens
tgtttaacaagcaat

SEQ ID NO: 1714241 - DNA, 15 bp, Homo sapiens
gtttaacaagcaatg

SEQ ID NO: 1714242 - DNA, 15 bp, Homo sapiens
tttaacaagcaatgt

SEQ ID NO: 1714243 - DNA, 15 bp, Homo sapiens
ttaacaagcaatgtc

SEQ ID NO: 1714244 - DNA, 15 bp, Homo sapiens
taacaagcaatgtcc

SEQ ID NO: 1714245 - DNA, 15 bp, Homo sapiens
aacaagcaatgtcca

SEQ ID NO: 1714246 - DNA, 15 bp, Homo sapiens
acaagcaatgtccaa

SEQ ID NO: 1714247 - DNA, 15 bp, Homo sapiens
caagcaatgtccaat

SEQ ID NO: 1714248 - DNA, 15 bp, Homo sapiens
aagcaatgtccaatg

SEQ ID NO: 1714249 - DNA, 15 bp, Homo sapiens
agcaatgtccaatga

SEQ ID NO: 1714250 - DNA, 15 bp, Homo sapiens
gcaatgtccaatgat

SEQ ID NO: 1714251 - DNA, 15 bp, Homo sapiens
caatgtccaatgatc

SEQ ID NO: 1714252 - DNA, 15 bp, Homo sapiens
aatgtccaatgatca

SEQ ID NO: 1714253 - DNA, 15 bp, Homo sapiens
atgtccaatgatcat

SEQ ID NO: 1714254 - DNA, 15 bp, Homo sapiens
tgtccaatgatcatg

SEQ ID NO: 1714255 - DNA, 15 bp, Homo sapiens
gtccaatgatcatgc

SEQ ID NO: 1714256 - DNA, 15 bp, Homo sapiens
tccaatgatcatgca

SEQ ID NO: 1714257 - DNA, 15 bp, Homo sapiens
ccaatgatcatgcac

SEQ ID NO: 1714258 - DNA, 15 bp, Homo sapiens
caatgatcatgcact

SEQ ID NO: 1714259 - DNA, 15 bp, Homo sapiens
aatgatcatgcactc

SEQ ID NO: 1714260 - DNA, 15 bp, Homo sapiens
atgatcatgcactcg

SEQ ID NO: 1714261 - DNA, 15 bp, Homo sapiens
tgatcatgcactcgg

SEQ ID NO: 1714262 - DNA, 15 bp, Homo sapiens
gatcatgcactcgga

SEQ ID NO: 1714263 - DNA, 15 bp, Homo sapiens
atcatgcactcggat

SEQ ID NO: 1714264 - DNA, 15 bp, Homo sapiens
tcatgcactcggata

SEQ ID NO: 1714265 - DNA, 15 bp, Homo sapiens
catgcactcggatat

SEQ ID NO: 1714266 - DNA, 15 bp, Homo sapiens
atgcactcggatatt

SEQ ID NO: 1714267 - DNA, 15 bp, Homo sapiens
tgcactcggatattc

SEQ ID NO: 1714268 - DNA, 15 bp, Homo sapiens
gcactcggatattcc

SEQ ID NO: 1714269 - DNA, 15 bp, Homo sapiens
cactcggatattcct

SEQ ID NO: 1714270 - DNA, 15 bp, Homo sapiens
actcggatattcctg

SEQ ID NO: 1714271 - DNA, 15 bp, Homo sapiens
ctcggatattcctga

SEQ ID NO: 1714272 - DNA, 15 bp, Homo sapiens
tcggatattcctgaa

SEQ ID NO: 1714273 - DNA, 15 bp, Homo sapiens
cggatattcctgaaa

SEQ ID NO: 1714274 - DNA, 15 bp, Homo sapiens
ggatattcctgaaat

SEQ ID NO: 1714275 - DNA, 15 bp, Homo sapiens
gatattcctgaaatg

SEQ ID NO: 1714276 - DNA, 15 bp, Homo sapiens
atattcctgaaatgt

SEQ ID NO: 1714277 - DNA, 15 bp, Homo sapiens
tattcctgaaatgtc

SEQ ID NO: 1714278 - DNA, 15 bp, Homo sapiens
attcctgaaatgtca

SEQ ID NO: 1714279 - DNA, 15 bp, Homo sapiens
ttcctgaaatgtcaa

SEQ ID NO: 1714280 - DNA, 15 bp, Homo sapiens
tcctgaaatgtcaaa

SEQ ID NO: 1714281 - DNA, 15 bp, Homo sapiens
cctgaaatgtcaaat

SEQ ID NO: 1714282 - DNA, 15 bp, Homo sapiens
ctgaaatgtcaaatt

SEQ ID NO: 1714283 - DNA, 15 bp, Homo sapiens
tgaaatgtcaaattg

SEQ ID NO: 1714284 - DNA, 15 bp, Homo sapiens
gaaatgtcaaattga

SEQ ID NO: 1714285 - DNA, 15 bp, Homo sapiens
aaatgtcaaattgat

SEQ ID NO: 1714286 - DNA, 15 bp, Homo sapiens
aatgtcaaattgata

SEQ ID NO: 1714287 - DNA, 15 bp, Homo sapiens
atgtcaaattgatat

SEQ ID NO: 1714288 - DNA, 15 bp, Homo sapiens
tgtcaaattgatata

SEQ ID NO: 1714289 - DNA, 15 bp, Homo sapiens
gtcaaattgatataa

SEQ ID NO: 1714290 - DNA, 15 bp, Homo sapiens
tcaaattgatataaa

SEQ ID NO: 1714291 - DNA, 15 bp, Homo sapiens
caaattgatataaac

SEQ ID NO: 1714292 - DNA, 15 bp, Homo sapiens
aaattgatataaaca

SEQ ID NO: 1714293 - DNA, 15 bp, Homo sapiens
aattgatataaacac

SEQ ID NO: 1714294 - DNA, 15 bp, Homo sapiens
attgatataaacact

SEQ ID NO: 1714295 - DNA, 15 bp, Homo sapiens
ttgatataaacactg

SEQ ID NO: 1714296 - DNA, 15 bp, Homo sapiens
tgatataaacactgc

SEQ ID NO: 1714297 - DNA, 15 bp, Homo sapiens
gatataaacactgct

SEQ ID NO: 1714298 - DNA, 15 bp, Homo sapiens
atataaacactgcta

SEQ ID NO: 1714299 - DNA, 15 bp, Homo sapiens
tataaacactgctaa

SEQ ID NO: 1714300 - DNA, 15 bp, Homo sapiens
ataaacactgctaag

SEQ ID NO: 1714301 - DNA, 15 bp, Homo sapiens
taaacactgctaagc

SEQ ID NO: 1714302 - DNA, 15 bp, Homo sapiens
aaacactgctaagca

SEQ ID NO: 1714303 - DNA, 15 bp, Homo sapiens
aacactgctaagcac

SEQ ID NO: 1714304 - DNA, 15 bp, Homo sapiens
acactgctaagcact

SEQ ID NO: 1714305 - DNA, 15 bp, Homo sapiens
cactgctaagcactt

SEQ ID NO: 1714306 - DNA, 15 bp, Homo sapiens
actgctaagcactta

SEQ ID NO: 1714307 - DNA, 15 bp, Homo sapiens
ctgctaagcacttat

SEQ ID NO: 1714308 - DNA, 15 bp, Homo sapiens
tgctaagcacttatc

SEQ ID NO: 1714309 - DNA, 15 bp, Homo sapiens
gctaagcacttatcc

SEQ ID NO: 1714310 - DNA, 15 bp, Homo sapiens
ctaagcacttatcct

SEQ ID NO: 1714311 - DNA, 15 bp, Homo sapiens
taagcacttatcctt

SEQ ID NO: 1714312 - DNA, 15 bp, Homo sapiens
aagcacttatccttt

SEQ ID NO: 1714313 - DNA, 15 bp, Homo sapiens
agcacttatcctttt

SEQ ID NO: 1714314 - DNA, 15 bp, Homo sapiens
gcacttatcctttta

SEQ ID NO: 1714315 - DNA, 15 bp, Homo sapiens
cacttatccttttaa

SEQ ID NO: 1714316 - DNA, 15 bp, Homo sapiens
acttatccttttaat

SEQ ID NO: 1714317 - DNA, 15 bp, Homo sapiens
cttatccttttaatt

SEQ ID NO: 1714318 - DNA, 15 bp, Homo sapiens
ttatccttttaattt

SEQ ID NO: 1714319 - DNA, 15 bp, Homo sapiens
tatccttttaatttc

SEQ ID NO: 1714320 - DNA, 15 bp, Homo sapiens
atccttttaatttct

SEQ ID NO: 1714321 - DNA, 15 bp, Homo sapiens
tccttttaatttctg

SEQ ID NO: 1714322 - DNA, 15 bp, Homo sapiens
ccttttaatttctgt

SEQ ID NO: 1714323 - DNA, 15 bp, Homo sapiens
cttttaatttctgta

SEQ ID NO: 1714324 - DNA, 15 bp, Homo sapiens
ttttaatttctgtac

SEQ ID NO: 1714325 - DNA, 15 bp, Homo sapiens
tttaatttctgtact

SEQ ID NO: 1714326 - DNA, 15 bp, Homo sapiens
ttaatttctgtactt

SEQ ID NO: 1714327 - DNA, 15 bp, Homo sapiens
taatttctgtactta

SEQ ID NO: 1714328 - DNA, 15 bp, Homo sapiens
aatttctgtacttat

SEQ ID NO: 1714329 - DNA, 15 bp, Homo sapiens
atttctgtacttatt

SEQ ID NO: 1714330 - DNA, 15 bp, Homo sapiens
tttctgtacttattt

SEQ ID NO: 1714331 - DNA, 15 bp, Homo sapiens
ttctgtacttatttc

SEQ ID NO: 1714332 - DNA, 15 bp, Homo sapiens
tctgtacttatttcc

SEQ ID NO: 1714333 - DNA, 15 bp, Homo sapiens
ctgtacttatttcct

SEQ ID NO: 1714334 - DNA, 15 bp, Homo sapiens
tgtacttatttcctt

SEQ ID NO: 1714335 - DNA, 15 bp, Homo sapiens
gtacttatttccttg

SEQ ID NO: 1714336 - DNA, 15 bp, Homo sapiens
tacttatttccttgt

SEQ ID NO: 1714337 - DNA, 15 bp, Homo sapiens
acttatttccttgtg

SEQ ID NO: 1714338 - DNA, 15 bp, Homo sapiens
cttatttccttgtgg

SEQ ID NO: 1714339 - DNA, 15 bp, Homo sapiens
ttatttccttgtgga

SEQ ID NO: 1714340 - DNA, 15 bp, Homo sapiens
tatttccttgtggac

SEQ ID NO: 1714341 - DNA, 15 bp, Homo sapiens
atttccttgtggact

SEQ ID NO: 1714342 - DNA, 15 bp, Homo sapiens
tttccttgtggacta

SEQ ID NO: 1714343 - DNA, 15 bp, Homo sapiens
ttccttgtggactaa

SEQ ID NO: 1714344 - DNA, 15 bp, Homo sapiens
tccttgtggactaaa

SEQ ID NO: 1714345 - DNA, 15 bp, Homo sapiens
ccttgtggactaaac

SEQ ID NO: 1714346 - DNA, 15 bp, Homo sapiens
cttgtggactaaaca

SEQ ID NO: 1714347 - DNA, 15 bp, Homo sapiens
ttgtggactaaacac

SEQ ID NO: 1714348 - DNA, 15 bp, Homo sapiens
tgtggactaaacaca

SEQ ID NO: 1714349 - DNA, 15 bp, Homo sapiens
gtggactaaacacaa

SEQ ID NO: 1714350 - DNA, 15 bp, Homo sapiens
tggactaaacacaaa

SEQ ID NO: 1714351 - DNA, 15 bp, Homo sapiens
ggactaaacacaaac

SEQ ID NO: 1714352 - DNA, 15 bp, Homo sapiens
gactaaacacaaaca

SEQ ID NO: 1714353 - DNA, 15 bp, Homo sapiens
actaaacacaaacag

SEQ ID NO: 1714354 - DNA, 15 bp, Homo sapiens
ctaaacacaaacagt

SEQ ID NO: 1714355 - DNA, 15 bp, Homo sapiens
taaacacaaacagtt

SEQ ID NO: 1714356 - DNA, 15 bp, Homo sapiens
aaacacaaacagttc

SEQ ID NO: 1714357 - DNA, 15 bp, Homo sapiens
aacacaaacagttcg

SEQ ID NO: 1714358 - DNA, 15 bp, Homo sapiens
acacaaacagttcgc

SEQ ID NO: 1714359 - DNA, 15 bp, Homo sapiens
cacaaacagttcgca

SEQ ID NO: 1714360 - DNA, 15 bp, Homo sapiens
acaaacagttcgcag

SEQ ID NO: 1714361 - DNA, 15 bp, Homo sapiens
caaacagttcgcaga

SEQ ID NO: 1714362 - DNA, 15 bp, Homo sapiens
aaacagttcgcagac

SEQ ID NO: 1714363 - DNA, 15 bp, Homo sapiens
aacagttcgcagact

SEQ ID NO: 1714364 - DNA, 15 bp, Homo sapiens
acagttcgcagactg

SEQ ID NO: 1714365 - DNA, 15 bp, Homo sapiens
cagttcgcagactgt

SEQ ID NO: 1714366 - DNA, 15 bp, Homo sapiens
agttcgcagactgtc

SEQ ID NO: 1714367 - DNA, 15 bp, Homo sapiens
gttcgcagactgtca

SEQ ID NO: 1714368 - DNA, 15 bp, Homo sapiens
ttcgcagactgtcac

SEQ ID NO: 1714369 - DNA, 15 bp, Homo sapiens
tcgcagactgtcact

SEQ ID NO: 1714370 - DNA, 15 bp, Homo sapiens
cgcagactgtcactg

SEQ ID NO: 1714371 - DNA, 15 bp, Homo sapiens
gcagactgtcactgg

SEQ ID NO: 1714372 - DNA, 15 bp, Homo sapiens
cagactgtcactggt

SEQ ID NO: 1714373 - DNA, 15 bp, Homo sapiens
agactgtcactggtc

SEQ ID NO: 1714374 - DNA, 15 bp, Homo sapiens
gactgtcactggtcc

SEQ ID NO: 1714375 - DNA, 15 bp, Homo sapiens
actgtcactggtcca

SEQ ID NO: 1714376 - DNA, 15 bp, Homo sapiens
ctgtcactggtccaa

SEQ ID NO: 1714377 - DNA, 15 bp, Homo sapiens
tgtcactggtccaag

SEQ ID NO: 1714378 - DNA, 15 bp, Homo sapiens
gtcactggtccaaga

SEQ ID NO: 1714379 - DNA, 15 bp, Homo sapiens
tcactggtccaagaa

SEQ ID NO: 1714380 - DNA, 15 bp, Homo sapiens
cactggtccaagaac

SEQ ID NO: 1714381 - DNA, 15 bp, Homo sapiens
actggtccaagaact

SEQ ID NO: 1714382 - DNA, 15 bp, Homo sapiens
ctggtccaagaacta

SEQ ID NO: 1714383 - DNA, 15 bp, Homo sapiens
tggtccaagaactac

SEQ ID NO: 1714384 - DNA, 15 bp, Homo sapiens
ggtccaagaactaca

SEQ ID NO: 1714385 - DNA, 15 bp, Homo sapiens
gtccaagaactacac

SEQ ID NO: 1714386 - DNA, 15 bp, Homo sapiens
tccaagaactacact

SEQ ID NO: 1714387 - DNA, 15 bp, Homo sapiens
ccaagaactacactt

SEQ ID NO: 1714388 - DNA, 15 bp, Homo sapiens
caagaactacacttt

SEQ ID NO: 1714389 - DNA, 15 bp, Homo sapiens
aagaactacactttg

SEQ ID NO: 1714390 - DNA, 15 bp, Homo sapiens
agaactacactttga

SEQ ID NO: 1714391 - DNA, 15 bp, Homo sapiens
gaactacactttgag

SEQ ID NO: 1714392 - DNA, 15 bp, Homo sapiens
aactacactttgagt

SEQ ID NO: 1714393 - DNA, 15 bp, Homo sapiens
actacactttgagta

SEQ ID NO: 1714394 - DNA, 15 bp, Homo sapiens
ctacactttgagtag

SEQ ID NO: 1714395 - DNA, 15 bp, Homo sapiens
tacactttgagtagc

SEQ ID NO: 1714396 - DNA, 15 bp, Homo sapiens
acactttgagtagca

SEQ ID NO: 1714397 - DNA, 15 bp, Homo sapiens
cactttgagtagcat

SEQ ID NO: 1714398 - DNA, 15 bp, Homo sapiens
actttgagtagcatt

SEQ ID NO: 1714399 - DNA, 15 bp, Homo sapiens
ctttgagtagcatta

SEQ ID NO: 1714400 - DNA, 15 bp, Homo sapiens
tttgagtagcattac

SEQ ID NO: 1714401 - DNA, 15 bp, Homo sapiens
ttgagtagcattact

SEQ ID NO: 1714402 - DNA, 15 bp, Homo sapiens
tgagtagcattactc

SEQ ID NO: 1714403 - DNA, 15 bp, Homo sapiens
gagtagcattactct

SEQ ID NO: 1714404 - DNA, 15 bp, Homo sapiens
agtagcattactcta

SEQ ID NO: 1714405 - DNA, 15 bp, Homo sapiens
gtagcattactctag

SEQ ID NO: 1714406 - DNA, 15 bp, Homo sapiens
tagcattactctagg

SEQ ID NO: 1714407 - DNA, 15 bp, Homo sapiens
agcattactctaggg

SEQ ID NO: 1714408 - DNA, 15 bp, Homo sapiens
gcattactctaggga

SEQ ID NO: 1714409 - DNA, 15 bp, Homo sapiens
cattactctagggag

SEQ ID NO: 1714410 - DNA, 15 bp, Homo sapiens
attactctagggagc

SEQ ID NO: 1714411 - DNA, 15 bp, Homo sapiens
ttactctagggagca

SEQ ID NO: 1714412 - DNA, 15 bp, Homo sapiens
tactctagggagcac

SEQ ID NO: 1714413 - DNA, 15 bp, Homo sapiens
actctagggagcact

SEQ ID NO: 1714414 - DNA, 15 bp, Homo sapiens
ctctagggagcactt

SEQ ID NO: 1714415 - DNA, 15 bp, Homo sapiens
tctagggagcacttg

SEQ ID NO: 1714416 - DNA, 15 bp, Homo sapiens
ctagggagcacttgc

SEQ ID NO: 1714417 - DNA, 15 bp, Homo sapiens
tagggagcacttgca

SEQ ID NO: 1714418 - DNA, 15 bp, Homo sapiens
agggagcacttgcat

SEQ ID NO: 1714419 - DNA, 15 bp, Homo sapiens
gggagcacttgcatt

SEQ ID NO: 1714420 - DNA, 15 bp, Homo sapiens
ggagcacttgcattg

SEQ ID NO: 1714421 - DNA, 15 bp, Homo sapiens
gagcacttgcattga

SEQ ID NO: 1714422 - DNA, 15 bp, Homo sapiens
agcacttgcattgaa

SEQ ID NO: 1714423 - DNA, 15 bp, Homo sapiens
gcacttgcattgaag

SEQ ID NO: 1714424 - DNA, 15 bp, Homo sapiens
cacttgcattgaagg

SEQ ID NO: 1714425 - DNA, 15 bp, Homo sapiens
acttgcattgaaggg

SEQ ID NO: 1714426 - DNA, 15 bp, Homo sapiens
cttgcattgaaggga

SEQ ID NO: 1714427 - DNA, 15 bp, Homo sapiens
ttgcattgaagggac

SEQ ID NO: 1714428 - DNA, 15 bp, Homo sapiens
tgcattgaagggacc

SEQ ID NO: 1714429 - DNA, 15 bp, Homo sapiens
gcattgaagggaccg

SEQ ID NO: 1714430 - DNA, 15 bp, Homo sapiens
cattgaagggaccgg

SEQ ID NO: 1714431 - DNA, 15 bp, Homo sapiens
attgaagggaccggc

SEQ ID NO: 1714432 - DNA, 15 bp, Homo sapiens
ttgaagggaccggca

SEQ ID NO: 1714433 - DNA, 15 bp, Homo sapiens
tgaagggaccggcag

SEQ ID NO: 1714434 - DNA, 15 bp, Homo sapiens
gaagggaccggcaga

SEQ ID NO: 1714435 - DNA, 15 bp, Homo sapiens
aagggaccggcagaa

SEQ ID NO: 1714436 - DNA, 15 bp, Homo sapiens
agggaccggcagaaa

SEQ ID NO: 1714437 - DNA, 15 bp, Homo sapiens
gggaccggcagaaag

SEQ ID NO: 1714438 - DNA, 15 bp, Homo sapiens
ggaccggcagaaaga

SEQ ID NO: 1714439 - DNA, 15 bp, Homo sapiens
gaccggcagaaagag

SEQ ID NO: 1714440 - DNA, 15 bp, Homo sapiens
accggcagaaagaga

SEQ ID NO: 1714441 - DNA, 15 bp, Homo sapiens
ccggcagaaagagaa

SEQ ID NO: 1714442 - DNA, 15 bp, Homo sapiens
cggcagaaagagaac

SEQ ID NO: 1714443 - DNA, 15 bp, Homo sapiens
ggcagaaagagaact

SEQ ID NO: 1714444 - DNA, 15 bp, Homo sapiens
gcagaaagagaacta

SEQ ID NO: 1714445 - DNA, 15 bp, Homo sapiens
cagaaagagaactaa

SEQ ID NO: 1714446 - DNA, 15 bp, Homo sapiens
agaaagagaactaat

SEQ ID NO: 1714447 - DNA, 15 bp, Homo sapiens
gaaagagaactaatg

SEQ ID NO: 1714448 - DNA, 15 bp, Homo sapiens
aaagagaactaatga

SEQ ID NO: 1714449 - DNA, 15 bp, Homo sapiens
aagagaactaatgaa

SEQ ID NO: 1714450 - DNA, 15 bp, Homo sapiens
agagaactaatgaag

SEQ ID NO: 1714451 - DNA, 15 bp, Homo sapiens
gagaactaatgaagg

SEQ ID NO: 1714452 - DNA, 15 bp, Homo sapiens
agaactaatgaagga

SEQ ID NO: 1714453 - DNA, 15 bp, Homo sapiens
gaactaatgaaggaa

SEQ ID NO: 1714454 - DNA, 15 bp, Homo sapiens
aactaatgaaggaat

SEQ ID NO: 1714455 - DNA, 15 bp, Homo sapiens
actaatgaaggaatt

SEQ ID NO: 1714456 - DNA, 15 bp, Homo sapiens
ctaatgaaggaattt

SEQ ID NO: 1714457 - DNA, 15 bp, Homo sapiens
taatgaaggaatttg

SEQ ID NO: 1714458 - DNA, 15 bp, Homo sapiens
aatgaaggaatttgt

SEQ ID NO: 1714459 - DNA, 15 bp, Homo sapiens
atgaaggaatttgtg

SEQ ID NO: 1714460 - DNA, 15 bp, Homo sapiens
tgaaggaatttgtga

SEQ ID NO: 1714461 - DNA, 15 bp, Homo sapiens
gaaggaatttgtgaa

SEQ ID NO: 1714462 - DNA, 15 bp, Homo sapiens
aaggaatttgtgaag

SEQ ID NO: 1714463 - DNA, 15 bp, Homo sapiens
aggaatttgtgaagt

SEQ ID NO: 1714464 - DNA, 15 bp, Homo sapiens
ggaatttgtgaagta

SEQ ID NO: 1714465 - DNA, 15 bp, Homo sapiens
gaatttgtgaagtaa

SEQ ID NO: 1714466 - DNA, 15 bp, Homo sapiens
aatttgtgaagtaac

SEQ ID NO: 1714467 - DNA, 15 bp, Homo sapiens
atttgtgaagtaaca

SEQ ID NO: 1714468 - DNA, 15 bp, Homo sapiens
tttgtgaagtaacaa

SEQ ID NO: 1714469 - DNA, 15 bp, Homo sapiens
ttgtgaagtaacaag

SEQ ID NO: 1714470 - DNA, 15 bp, Homo sapiens
tgtgaagtaacaagg

SEQ ID NO: 1714471 - DNA, 15 bp, Homo sapiens
gtgaagtaacaaggg

SEQ ID NO: 1714472 - DNA, 15 bp, Homo sapiens
tgaagtaacaaggga

SEQ ID NO: 1714473 - DNA, 15 bp, Homo sapiens
gaagtaacaagggag

SEQ ID NO: 1714474 - DNA, 15 bp, Homo sapiens
aagtaacaagggagg

SEQ ID NO: 1714475 - DNA, 15 bp, Homo sapiens
agtaacaagggagga

SEQ ID NO: 1714476 - DNA, 15 bp, Homo sapiens
gtaacaagggaggag

SEQ ID NO: 1714477 - DNA, 15 bp, Homo sapiens
taacaagggaggaga

SEQ ID NO: 1714478 - DNA, 15 bp, Homo sapiens
aacaagggaggagaa

SEQ ID NO: 1714479 - DNA, 15 bp, Homo sapiens
acaagggaggagaac

SEQ ID NO: 1714480 - DNA, 15 bp, Homo sapiens
caagggaggagaaca

SEQ ID NO: 1714481 - DNA, 15 bp, Homo sapiens
aagggaggagaacaa

SEQ ID NO: 1714482 - DNA, 15 bp, Homo sapiens
agggaggagaacaag

SEQ ID NO: 1714483 - DNA, 15 bp, Homo sapiens
gggaggagaacaagg

SEQ ID NO: 1714484 - DNA, 15 bp, Homo sapiens
ggaggagaacaagga

SEQ ID NO: 1714485 - DNA, 15 bp, Homo sapiens
gaggagaacaaggag

SEQ ID NO: 1714486 - DNA, 15 bp, Homo sapiens
aggagaacaaggaga

SEQ ID NO: 1714487 - DNA, 15 bp, Homo sapiens
ggagaacaaggagac

SEQ ID NO: 1714488 - DNA, 15 bp, Homo sapiens
gagaacaaggagacc

SEQ ID NO: 1714489 - DNA, 15 bp, Homo sapiens
agaacaaggagacca

SEQ ID NO: 1714490 - DNA, 15 bp, Homo sapiens
gaacaaggagaccat

SEQ ID NO: 1714491 - DNA, 15 bp, Homo sapiens
aacaaggagaccata

SEQ ID NO: 1714492 - DNA, 15 bp, Homo sapiens
acaaggagaccatag

SEQ ID NO: 1714493 - DNA, 15 bp, Homo sapiens
caaggagaccataga

SEQ ID NO: 1714494 - DNA, 15 bp, Homo sapiens
aaggagaccatagat

SEQ ID NO: 1714495 - DNA, 15 bp, Homo sapiens
aggagaccatagatt

SEQ ID NO: 1714496 - DNA, 15 bp, Homo sapiens
ggagaccatagattt

SEQ ID NO: 1714497 - DNA, 15 bp, Homo sapiens
gagaccatagatttg

SEQ ID NO: 1714498 - DNA, 15 bp, Homo sapiens
agaccatagatttgt

SEQ ID NO: 1714499 - DNA, 15 bp, Homo sapiens
gaccatagatttgtg

SEQ ID NO: 1714500 - DNA, 15 bp, Homo sapiens
accatagatttgtgg

SEQ ID NO: 1714501 - DNA, 15 bp, Homo sapiens
ccatagatttgtgga

SEQ ID NO: 1714502 - DNA, 15 bp, Homo sapiens
catagatttgtggaa

SEQ ID NO: 1714503 - DNA, 15 bp, Homo sapiens
atagatttgtggaag

SEQ ID NO: 1714504 - DNA, 15 bp, Homo sapiens
tagatttgtggaaga

SEQ ID NO: 1714505 - DNA, 15 bp, Homo sapiens
agatttgtggaagac

SEQ ID NO: 1714506 - DNA, 15 bp, Homo sapiens
gatttgtggaagact

SEQ ID NO: 1714507 - DNA, 15 bp, Homo sapiens
atttgtggaagacta

SEQ ID NO: 1714508 - DNA, 15 bp, Homo sapiens
tttgtggaagactag

SEQ ID NO: 1714509 - DNA, 15 bp, Homo sapiens
ttgtggaagactagg

SEQ ID NO: 1714510 - DNA, 15 bp, Homo sapiens
tgtggaagactaggg

SEQ ID NO: 1714511 - DNA, 15 bp, Homo sapiens
gtggaagactaggga

SEQ ID NO: 1714512 - DNA, 15 bp, Homo sapiens
tggaagactagggaa

SEQ ID NO: 1714513 - DNA, 15 bp, Homo sapiens
ggaagactagggaat

SEQ ID NO: 1714514 - DNA, 15 bp, Homo sapiens
gaagactagggaatt

SEQ ID NO: 1714515 - DNA, 15 bp, Homo sapiens
aagactagggaattt

SEQ ID NO: 1714516 - DNA, 15 bp, Homo sapiens
agactagggaatttt

SEQ ID NO: 1714517 - DNA, 15 bp, Homo sapiens
gactagggaattttt

SEQ ID NO: 1714518 - DNA, 15 bp, Homo sapiens
actagggaattttta

SEQ ID NO: 1714519 - DNA, 15 bp, Homo sapiens
ctagggaatttttaa

SEQ ID NO: 1714520 - DNA, 15 bp, Homo sapiens
tagggaatttttaag

SEQ ID NO: 1714521 - DNA, 15 bp, Homo sapiens
agggaatttttaaga

SEQ ID NO: 1714522 - DNA, 15 bp, Homo sapiens
gggaatttttaagag

SEQ ID NO: 1714523 - DNA, 15 bp, Homo sapiens
ggaatttttaagagg

SEQ ID NO: 1714524 - DNA, 15 bp, Homo sapiens
gaatttttaagagga

SEQ ID NO: 1714525 - DNA, 15 bp, Homo sapiens
aatttttaagaggaa

SEQ ID NO: 1714526 - DNA, 15 bp, Homo sapiens
atttttaagaggaag

SEQ ID NO: 1714527 - DNA, 15 bp, Homo sapiens
tttttaagaggaagt

SEQ ID NO: 1714528 - DNA, 15 bp, Homo sapiens
ttttaagaggaagtg

SEQ ID NO: 1714529 - DNA, 15 bp, Homo sapiens
tttaagaggaagtgg

SEQ ID NO: 1714530 - DNA, 15 bp, Homo sapiens
ttaagaggaagtggt

SEQ ID NO: 1714531 - DNA, 15 bp, Homo sapiens
taagaggaagtggtt

SEQ ID NO: 1714532 - DNA, 15 bp, Homo sapiens
aagaggaagtggtta

SEQ ID NO: 1714533 - DNA, 15 bp, Homo sapiens
agaggaagtggttaa

SEQ ID NO: 1714534 - DNA, 15 bp, Homo sapiens
gaggaagtggttaac

SEQ ID NO: 1714535 - DNA, 15 bp, Homo sapiens
aggaagtggttaact

SEQ ID NO: 1714536 - DNA, 15 bp, Homo sapiens
ggaagtggttaacta

SEQ ID NO: 1714537 - DNA, 15 bp, Homo sapiens
gaagtggttaactat

SEQ ID NO: 1714538 - DNA, 15 bp, Homo sapiens
aagtggttaactata

SEQ ID NO: 1714539 - DNA, 15 bp, Homo sapiens
agtggttaactatat

SEQ ID NO: 1714540 - DNA, 15 bp, Homo sapiens
gtggttaactatatt

SEQ ID NO: 1714541 - DNA, 15 bp, Homo sapiens
tggttaactatattg

SEQ ID NO: 1714542 - DNA, 15 bp, Homo sapiens
ggttaactatattga

SEQ ID NO: 1714543 - DNA, 15 bp, Homo sapiens
gttaactatattgac

SEQ ID NO: 1714544 - DNA, 15 bp, Homo sapiens
ttaactatattgact

SEQ ID NO: 1714545 - DNA, 15 bp, Homo sapiens
taactatattgactg

SEQ ID NO: 1714546 - DNA, 15 bp, Homo sapiens
aactatattgactgc

SEQ ID NO: 1714547 - DNA, 15 bp, Homo sapiens
actatattgactgca

SEQ ID NO: 1714548 - DNA, 15 bp, Homo sapiens
ctatattgactgcaa

SEQ ID NO: 1714549 - DNA, 15 bp, Homo sapiens
tatattgactgcaag

SEQ ID NO: 1714550 - DNA, 15 bp, Homo sapiens
atattgactgcaaga

SEQ ID NO: 1714551 - DNA, 15 bp, Homo sapiens
tattgactgcaagaa

SEQ ID NO: 1714552 - DNA, 15 bp, Homo sapiens
attgactgcaagaaa

SEQ ID NO: 1714553 - DNA, 15 bp, Homo sapiens
ttgactgcaagaaag

SEQ ID NO: 1714554 - DNA, 15 bp, Homo sapiens
tgactgcaagaaagg

SEQ ID NO: 1714555 - DNA, 15 bp, Homo sapiens
gactgcaagaaaggt

SEQ ID NO: 1714556 - DNA, 15 bp, Homo sapiens
actgcaagaaaggtc

SEQ ID NO: 1714557 - DNA, 15 bp, Homo sapiens
ctgcaagaaaggtca

SEQ ID NO: 1714558 - DNA, 15 bp, Homo sapiens
tgcaagaaaggtcaa

SEQ ID NO: 1714559 - DNA, 15 bp, Homo sapiens
gcaagaaaggtcaag

SEQ ID NO: 1714560 - DNA, 15 bp, Homo sapiens
caagaaaggtcaagt

SEQ ID NO: 1714561 - DNA, 15 bp, Homo sapiens
aagaaaggtcaagta

SEQ ID NO: 1714562 - DNA, 15 bp, Homo sapiens
agaaaggtcaagtag

SEQ ID NO: 1714563 - DNA, 15 bp, Homo sapiens
gaaaggtcaagtagg

SEQ ID NO: 1714564 - DNA, 15 bp, Homo sapiens
aaaggtcaagtaggt

SEQ ID NO: 1714565 - DNA, 15 bp, Homo sapiens
aaggtcaagtaggtt

SEQ ID NO: 1714566 - DNA, 15 bp, Homo sapiens
aggtcaagtaggttg

SEQ ID NO: 1714567 - DNA, 15 bp, Homo sapiens
ggtcaagtaggttga

SEQ ID NO: 1714568 - DNA, 15 bp, Homo sapiens
gtcaagtaggttgag

SEQ ID NO: 1714569 - DNA, 15 bp, Homo sapiens
tcaagtaggttgagg

SEQ ID NO: 1714570 - DNA, 15 bp, Homo sapiens
caagtaggttgagga

SEQ ID NO: 1714571 - DNA, 15 bp, Homo sapiens
aagtaggttgaggac

SEQ ID NO: 1714572 - DNA, 15 bp, Homo sapiens
agtaggttgaggacc

SEQ ID NO: 1714573 - DNA, 15 bp, Homo sapiens
gtaggttgaggacca

SEQ ID NO: 1714574 - DNA, 15 bp, Homo sapiens
taggttgaggaccaa

SEQ ID NO: 1714575 - DNA, 15 bp, Homo sapiens
aggttgaggaccaaa

SEQ ID NO: 1714576 - DNA, 15 bp, Homo sapiens
ggttgaggaccaaaa

SEQ ID NO: 1714577 - DNA, 15 bp, Homo sapiens
gttgaggaccaaaag

SEQ ID NO: 1714578 - DNA, 15 bp, Homo sapiens
ttgaggaccaaaaga

SEQ ID NO: 1714579 - DNA, 15 bp, Homo sapiens
tgaggaccaaaagaa

SEQ ID NO: 1714580 - DNA, 15 bp, Homo sapiens
gaggaccaaaagaag

SEQ ID NO: 1714581 - DNA, 15 bp, Homo sapiens
aggaccaaaagaagc

SEQ ID NO: 1714582 - DNA, 15 bp, Homo sapiens
ggaccaaaagaagcc

SEQ ID NO: 1714583 - DNA, 15 bp, Homo sapiens
gaccaaaagaagcca

SEQ ID NO: 1714584 - DNA, 15 bp, Homo sapiens
accaaaagaagccat

SEQ ID NO: 1714585 - DNA, 15 bp, Homo sapiens
ccaaaagaagccatg

SEQ ID NO: 1714586 - DNA, 15 bp, Homo sapiens
caaaagaagccatgg

SEQ ID NO: 1714587 - DNA, 15 bp, Homo sapiens
aaaagaagccatggg

SEQ ID NO: 1714588 - DNA, 15 bp, Homo sapiens
aaagaagccatggga

SEQ ID NO: 1714589 - DNA, 15 bp, Homo sapiens
aagaagccatgggat

SEQ ID NO: 1714590 - DNA, 15 bp, Homo sapiens
agaagccatgggatt

SEQ ID NO: 1714591 - DNA, 15 bp, Homo sapiens
gaagccatgggattg

SEQ ID NO: 1714592 - DNA, 15 bp, Homo sapiens
aagccatgggattga

SEQ ID NO: 1714593 - DNA, 15 bp, Homo sapiens
agccatgggattgac

SEQ ID NO: 1714594 - DNA, 15 bp, Homo sapiens
gccatgggattgaca

SEQ ID NO: 1714595 - DNA, 15 bp, Homo sapiens
ccatgggattgacaa

SEQ ID NO: 1714596 - DNA, 15 bp, Homo sapiens
catgggattgacaac

SEQ ID NO: 1714597 - DNA, 15 bp, Homo sapiens
atgggattgacaact

SEQ ID NO: 1714598 - DNA, 15 bp, Homo sapiens
tgggattgacaacta

SEQ ID NO: 1714599 - DNA, 15 bp, Homo sapiens
gggattgacaactat

SEQ ID NO: 1714600 - DNA, 15 bp, Homo sapiens
ggattgacaactatc

SEQ ID NO: 1714601 - DNA, 15 bp, Homo sapiens
gattgacaactatca

SEQ ID NO: 1714602 - DNA, 15 bp, Homo sapiens
attgacaactatcat

SEQ ID NO: 1714603 - DNA, 15 bp, Homo sapiens
ttgacaactatcatc

SEQ ID NO: 1714604 - DNA, 15 bp, Homo sapiens
tgacaactatcatca

SEQ ID NO: 1714605 - DNA, 15 bp, Homo sapiens
gacaactatcatcag

SEQ ID NO: 1714606 - DNA, 15 bp, Homo sapiens
acaactatcatcagt

SEQ ID NO: 1714607 - DNA, 15 bp, Homo sapiens
caactatcatcagtg

SEQ ID NO: 1714608 - DNA, 15 bp, Homo sapiens
aactatcatcagtga

SEQ ID NO: 1714609 - DNA, 15 bp, Homo sapiens
actatcatcagtgac

SEQ ID NO: 1714610 - DNA, 15 bp, Homo sapiens
ctatcatcagtgaca

SEQ ID NO: 1714611 - DNA, 15 bp, Homo sapiens
tatcatcagtgacat

SEQ ID NO: 1714612 - DNA, 15 bp, Homo sapiens
atcatcagtgacatt

SEQ ID NO: 1714613 - DNA, 15 bp, Homo sapiens
tcatcagtgacattt

SEQ ID NO: 1714614 - DNA, 15 bp, Homo sapiens
catcagtgacatttg

SEQ ID NO: 1714615 - DNA, 15 bp, Homo sapiens
atcagtgacatttga

SEQ ID NO: 1714616 - DNA, 15 bp, Homo sapiens
tcagtgacatttgaa

SEQ ID NO: 1714617 - DNA, 15 bp, Homo sapiens
cagtgacatttgaaa

SEQ ID NO: 1714618 - DNA, 15 bp, Homo sapiens
agtgacatttgaaag

SEQ ID NO: 1714619 - DNA, 15 bp, Homo sapiens
gtgacatttgaaaga

SEQ ID NO: 1714620 - DNA, 15 bp, Homo sapiens
tgacatttgaaagag

SEQ ID NO: 1714621 - DNA, 15 bp, Homo sapiens
gacatttgaaagagt

SEQ ID NO: 1714622 - DNA, 15 bp, Homo sapiens
acatttgaaagagtg

SEQ ID NO: 1714623 - DNA, 15 bp, Homo sapiens
catttgaaagagtga

SEQ ID NO: 1714624 - DNA, 15 bp, Homo sapiens
atttgaaagagtgat

SEQ ID NO: 1714625 - DNA, 15 bp, Homo sapiens
tttgaaagagtgatt

SEQ ID NO: 1714626 - DNA, 15 bp, Homo sapiens
ttgaaagagtgattt

SEQ ID NO: 1714627 - DNA, 15 bp, Homo sapiens
tgaaagagtgatttc

SEQ ID NO: 1714628 - DNA, 15 bp, Homo sapiens
gaaagagtgatttca

SEQ ID NO: 1714629 - DNA, 15 bp, Homo sapiens
aaagagtgatttcag

SEQ ID NO: 1714630 - DNA, 15 bp, Homo sapiens
aagagtgatttcaga

SEQ ID NO: 1714631 - DNA, 15 bp, Homo sapiens
agagtgatttcagaa

SEQ ID NO: 1714632 - DNA, 15 bp, Homo sapiens
gagtgatttcagaag

SEQ ID NO: 1714633 - DNA, 15 bp, Homo sapiens
agtgatttcagaagg

SEQ ID NO: 1714634 - DNA, 15 bp, Homo sapiens
gtgatttcagaaggg

SEQ ID NO: 1714635 - DNA, 15 bp, Homo sapiens
tgatttcagaagggg

SEQ ID NO: 1714636 - DNA, 15 bp, Homo sapiens
gatttcagaaggggg

SEQ ID NO: 1714637 - DNA, 15 bp, Homo sapiens
atttcagaagggggc

SEQ ID NO: 1714638 - DNA, 15 bp, Homo sapiens
tttcagaagggggct

SEQ ID NO: 1714639 - DNA, 15 bp, Homo sapiens
ttcagaagggggctc

SEQ ID NO: 1714640 - DNA, 15 bp, Homo sapiens
tcagaagggggctct

SEQ ID NO: 1714641 - DNA, 15 bp, Homo sapiens
cagaagggggctctt

SEQ ID NO: 1714642 - DNA, 15 bp, Homo sapiens
agaagggggctcttg

SEQ ID NO: 1714643 - DNA, 15 bp, Homo sapiens
gaagggggctcttgg

SEQ ID NO: 1714644 - DNA, 15 bp, Homo sapiens
aagggggctcttggt

SEQ ID NO: 1714645 - DNA, 15 bp, Homo sapiens
agggggctcttggtg

SEQ ID NO: 1714646 - DNA, 15 bp, Homo sapiens
gggggctcttggtgg

SEQ ID NO: 1714647 - DNA, 15 bp, Homo sapiens
ggggctcttggtggt

SEQ ID NO: 1714648 - DNA, 15 bp, Homo sapiens
gggctcttggtggta

SEQ ID NO: 1714649 - DNA, 15 bp, Homo sapiens
ggctcttggtggtag

SEQ ID NO: 1714650 - DNA, 15 bp, Homo sapiens
gctcttggtggtagt

SEQ ID NO: 1714651 - DNA, 15 bp, Homo sapiens
ctcttggtggtagtg

SEQ ID NO: 1714652 - DNA, 15 bp, Homo sapiens
tcttggtggtagtga

SEQ ID NO: 1714653 - DNA, 15 bp, Homo sapiens
cttggtggtagtgaa

SEQ ID NO: 1714654 - DNA, 15 bp, Homo sapiens
ttggtggtagtgaaa

SEQ ID NO: 1714655 - DNA, 15 bp, Homo sapiens
tggtggtagtgaaag

SEQ ID NO: 1714656 - DNA, 15 bp, Homo sapiens
ggtggtagtgaaaga

SEQ ID NO: 1714657 - DNA, 15 bp, Homo sapiens
gtggtagtgaaagaa

SEQ ID NO: 1714658 - DNA, 15 bp, Homo sapiens
tggtagtgaaagaaa

SEQ ID NO: 1714659 - DNA, 15 bp, Homo sapiens
ggtagtgaaagaaag

SEQ ID NO: 1714660 - DNA, 15 bp, Homo sapiens
gtagtgaaagaaagc

SEQ ID NO: 1714661 - DNA, 15 bp, Homo sapiens
tagtgaaagaaagcc

SEQ ID NO: 1714662 - DNA, 15 bp, Homo sapiens
agtgaaagaaagcca

SEQ ID NO: 1714663 - DNA, 15 bp, Homo sapiens
gtgaaagaaagccag

SEQ ID NO: 1714664 - DNA, 15 bp, Homo sapiens
tgaaagaaagccagg

SEQ ID NO: 1714665 - DNA, 15 bp, Homo sapiens
gaaagaaagccaggg

SEQ ID NO: 1714666 - DNA, 15 bp, Homo sapiens
aaagaaagccagggg

SEQ ID NO: 1714667 - DNA, 15 bp, Homo sapiens
aagaaagccaggggc

SEQ ID NO: 1714668 - DNA, 15 bp, Homo sapiens
agaaagccaggggcc

SEQ ID NO: 1714669 - DNA, 15 bp, Homo sapiens
gaaagccaggggcca

SEQ ID NO: 1714670 - DNA, 15 bp, Homo sapiens
aaagccaggggccag

SEQ ID NO: 1714671 - DNA, 15 bp, Homo sapiens
aagccaggggccagc

SEQ ID NO: 1714672 - DNA, 15 bp, Homo sapiens
agccaggggccagca

SEQ ID NO: 1714673 - DNA, 15 bp, Homo sapiens
gccaggggccagcag

SEQ ID NO: 1714674 - DNA, 15 bp, Homo sapiens
ccaggggccagcagg

SEQ ID NO: 1714675 - DNA, 15 bp, Homo sapiens
caggggccagcaggc

SEQ ID NO: 1714676 - DNA, 15 bp, Homo sapiens
aggggccagcaggct

SEQ ID NO: 1714677 - DNA, 15 bp, Homo sapiens
ggggccagcaggctg

SEQ ID NO: 1714678 - DNA, 15 bp, Homo sapiens
gggccagcaggctga

SEQ ID NO: 1714679 - DNA, 15 bp, Homo sapiens
ggccagcaggctgag

SEQ ID NO: 1714680 - DNA, 15 bp, Homo sapiens
gccagcaggctgaga

SEQ ID NO: 1714681 - DNA, 15 bp, Homo sapiens
ccagcaggctgagaa

SEQ ID NO: 1714682 - DNA, 15 bp, Homo sapiens
cagcaggctgagaaa

SEQ ID NO: 1714683 - DNA, 15 bp, Homo sapiens
agcaggctgagaaat

SEQ ID NO: 1714684 - DNA, 15 bp, Homo sapiens
gcaggctgagaaatt

SEQ ID NO: 1714685 - DNA, 15 bp, Homo sapiens
caggctgagaaattg

SEQ ID NO: 1714686 - DNA, 15 bp, Homo sapiens
aggctgagaaattgg

SEQ ID NO: 1714687 - DNA, 15 bp, Homo sapiens
ggctgagaaattggg

SEQ ID NO: 1714688 - DNA, 15 bp, Homo sapiens
gctgagaaattgggg

SEQ ID NO: 1714689 - DNA, 15 bp, Homo sapiens
ctgagaaattgggga

SEQ ID NO: 1714690 - DNA, 15 bp, Homo sapiens
tgagaaattggggaa

SEQ ID NO: 1714691 - DNA, 15 bp, Homo sapiens
gagaaattggggaag

SEQ ID NO: 1714692 - DNA, 15 bp, Homo sapiens
agaaattggggaagc

SEQ ID NO: 1714693 - DNA, 15 bp, Homo sapiens
gaaattggggaagca

SEQ ID NO: 1714694 - DNA, 15 bp, Homo sapiens
aaattggggaagcag

SEQ ID NO: 1714695 - DNA, 15 bp, Homo sapiens
aattggggaagcaga

SEQ ID NO: 1714696 - DNA, 15 bp, Homo sapiens
attggggaagcagag

SEQ ID NO: 1714697 - DNA, 15 bp, Homo sapiens
ttggggaagcagaga

SEQ ID NO: 1714698 - DNA, 15 bp, Homo sapiens
tggggaagcagagag

SEQ ID NO: 1714699 - DNA, 15 bp, Homo sapiens
ggggaagcagagaga

SEQ ID NO: 1714700 - DNA, 15 bp, Homo sapiens
gggaagcagagagaa

SEQ ID NO: 1714701 - DNA, 15 bp, Homo sapiens
ggaagcagagagaac

SEQ ID NO: 1714702 - DNA, 15 bp, Homo sapiens
gaagcagagagaacc

SEQ ID NO: 1714703 - DNA, 15 bp, Homo sapiens
aagcagagagaacca

SEQ ID NO: 1714704 - DNA, 15 bp, Homo sapiens
agcagagagaaccaa

SEQ ID NO: 1714705 - DNA, 15 bp, Homo sapiens
gcagagagaaccaat

SEQ ID NO: 1714706 - DNA, 15 bp, Homo sapiens
cagagagaaccaatg

SEQ ID NO: 1714707 - DNA, 15 bp, Homo sapiens
agagagaaccaatgg

SEQ ID NO: 1714708 - DNA, 15 bp, Homo sapiens
gagagaaccaatggg

SEQ ID NO: 1714709 - DNA, 15 bp, Homo sapiens
agagaaccaatgggg

SEQ ID NO: 1714710 - DNA, 15 bp, Homo sapiens
gagaaccaatgggga

SEQ ID NO: 1714711 - DNA, 15 bp, Homo sapiens
agaaccaatggggac

SEQ ID NO: 1714712 - DNA, 15 bp, Homo sapiens
gaaccaatggggact

SEQ ID NO: 1714713 - DNA, 15 bp, Homo sapiens
aaccaatggggacta

SEQ ID NO: 1714714 - DNA, 15 bp, Homo sapiens
accaatggggactac

SEQ ID NO: 1714715 - DNA, 15 bp, Homo sapiens
ccaatggggactacc

SEQ ID NO: 1714716 - DNA, 15 bp, Homo sapiens
caatggggactaccc

SEQ ID NO: 1714717 - DNA, 15 bp, Homo sapiens
aatggggactaccct

SEQ ID NO: 1714718 - DNA, 15 bp, Homo sapiens
atggggactaccctt

SEQ ID NO: 1714719 - DNA, 15 bp, Homo sapiens
tggggactacccttc

SEQ ID NO: 1714720 - DNA, 15 bp, Homo sapiens
ggggactacccttct

SEQ ID NO: 1714721 - DNA, 15 bp, Homo sapiens
gggactacccttcta

SEQ ID NO: 1714722 - DNA, 15 bp, Homo sapiens
ggactacccttctaa

SEQ ID NO: 1714723 - DNA, 15 bp, Homo sapiens
gactacccttctaag

SEQ ID NO: 1714724 - DNA, 15 bp, Homo sapiens
actacccttctaaga

SEQ ID NO: 1714725 - DNA, 15 bp, Homo sapiens
ctacccttctaagaa

SEQ ID NO: 1714726 - DNA, 15 bp, Homo sapiens
tacccttctaagaag

SEQ ID NO: 1714727 - DNA, 15 bp, Homo sapiens
acccttctaagaagc

SEQ ID NO: 1714728 - DNA, 15 bp, Homo sapiens
cccttctaagaagct

SEQ ID NO: 1714729 - DNA, 15 bp, Homo sapiens
ccttctaagaagcta

SEQ ID NO: 1714730 - DNA, 15 bp, Homo sapiens
cttctaagaagctag

SEQ ID NO: 1714731 - DNA, 15 bp, Homo sapiens
ttctaagaagctaga

SEQ ID NO: 1714732 - DNA, 15 bp, Homo sapiens
tctaagaagctagat

SEQ ID NO: 1714733 - DNA, 15 bp, Homo sapiens
ctaagaagctagatg

SEQ ID NO: 1714734 - DNA, 15 bp, Homo sapiens
taagaagctagatgg

SEQ ID NO: 1714735 - DNA, 15 bp, Homo sapiens
aagaagctagatggt

SEQ ID NO: 1714736 - DNA, 15 bp, Homo sapiens
agaagctagatggtt

SEQ ID NO: 1714737 - DNA, 15 bp, Homo sapiens
gaagctagatggtta

SEQ ID NO: 1714738 - DNA, 15 bp, Homo sapiens
aagctagatggttaa

SEQ ID NO: 1714739 - DNA, 15 bp, Homo sapiens
agctagatggttaag

SEQ ID NO: 1714740 - DNA, 15 bp, Homo sapiens
gctagatggttaaga

SEQ ID NO: 1714741 - DNA, 15 bp, Homo sapiens
ctagatggttaagaa

SEQ ID NO: 1714742 - DNA, 15 bp, Homo sapiens
tagatggttaagaaa

SEQ ID NO: 1714743 - DNA, 15 bp, Homo sapiens
agatggttaagaaat

SEQ ID NO: 1714744 - DNA, 15 bp, Homo sapiens
gatggttaagaaatg

SEQ ID NO: 1714745 - DNA, 15 bp, Homo sapiens
tggttaagaaatgga

SEQ ID NO: 1714746 - DNA, 15 bp, Homo sapiens
ggttaagaaatggaa

SEQ ID NO: 1714747 - DNA, 15 bp, Homo sapiens
gttaagaaatggaaa

SEQ ID NO: 1714748 - DNA, 15 bp, Homo sapiens
ttaagaaatggaaat

SEQ ID NO: 1714749 - DNA, 15 bp, Homo sapiens
taagaaatggaaata

SEQ ID NO: 1714750 - DNA, 15 bp, Homo sapiens
aagaaatggaaatag

SEQ ID NO: 1714751 - DNA, 15 bp, Homo sapiens
agaaatggaaatagt

SEQ ID NO: 1714752 - DNA, 15 bp, Homo sapiens
gaaatggaaatagtg

SEQ ID NO: 1714753 - DNA, 15 bp, Homo sapiens
aaatggaaatagtgt

SEQ ID NO: 1714754 - DNA, 15 bp, Homo sapiens
aatggaaatagtgtg

SEQ ID NO: 1714755 - DNA, 15 bp, Homo sapiens
atggaaatagtgtgg

SEQ ID NO: 1714756 - DNA, 15 bp, Homo sapiens
tggaaatagtgtggt

SEQ ID NO: 1714757 - DNA, 15 bp, Homo sapiens
ggaaatagtgtggta

SEQ ID NO: 1714758 - DNA, 15 bp, Homo sapiens
gaaatagtgtggtag

SEQ ID NO: 1714759 - DNA, 15 bp, Homo sapiens
aaatagtgtggtagc

SEQ ID NO: 1714760 - DNA, 15 bp, Homo sapiens
aatagtgtggtagct

SEQ ID NO: 1714761 - DNA, 15 bp, Homo sapiens
atagtgtggtagctt

SEQ ID NO: 1714762 - DNA, 15 bp, Homo sapiens
tagtgtggtagcttg

SEQ ID NO: 1714763 - DNA, 15 bp, Homo sapiens
agtgtggtagcttgg

SEQ ID NO: 1714764 - DNA, 15 bp, Homo sapiens
gtgtggtagcttggg

SEQ ID NO: 1714765 - DNA, 15 bp, Homo sapiens
tgtggtagcttgggg

SEQ ID NO: 1714766 - DNA, 15 bp, Homo sapiens
gtggtagcttggggg

SEQ ID NO: 1714767 - DNA, 15 bp, Homo sapiens
tggtagcttgggggt

SEQ ID NO: 1714768 - DNA, 15 bp, Homo sapiens
ggtagcttgggggta

SEQ ID NO: 1714769 - DNA, 15 bp, Homo sapiens
gtagcttgggggtat

SEQ ID NO: 1714770 - DNA, 15 bp, Homo sapiens
tagcttgggggtata

SEQ ID NO: 1714771 - DNA, 15 bp, Homo sapiens
agcttgggggtataa

SEQ ID NO: 1714772 - DNA, 15 bp, Homo sapiens
gcttgggggtataaa

SEQ ID NO: 1714773 - DNA, 15 bp, Homo sapiens
cttgggggtataaaa

SEQ ID NO: 1714774 - DNA, 15 bp, Homo sapiens
ttgggggtataaaaa

SEQ ID NO: 1714775 - DNA, 15 bp, Homo sapiens
tgggggtataaaaac

SEQ ID NO: 1714776 - DNA, 15 bp, Homo sapiens
gggggtataaaaact

SEQ ID NO: 1714777 - DNA, 15 bp, Homo sapiens
ggggtataaaaactt

SEQ ID NO: 1714778 - DNA, 15 bp, Homo sapiens
gggtataaaaacttt

SEQ ID NO: 1714779 - DNA, 15 bp, Homo sapiens
ggtataaaaactttg

SEQ ID NO: 1714780 - DNA, 15 bp, Homo sapiens
gtataaaaactttga

SEQ ID NO: 1714781 - DNA, 15 bp, Homo sapiens
tataaaaactttgaa

SEQ ID NO: 1714782 - DNA, 15 bp, Homo sapiens
ataaaaactttgaag

SEQ ID NO: 1714783 - DNA, 15 bp, Homo sapiens
taaaaactttgaagg

SEQ ID NO: 1714784 - DNA, 15 bp, Homo sapiens
aaaaactttgaagga

SEQ ID NO: 1714785 - DNA, 15 bp, Homo sapiens
aaaactttgaaggaa

SEQ ID NO: 1714786 - DNA, 15 bp, Homo sapiens
aaactttgaaggaag

SEQ ID NO: 1714787 - DNA, 15 bp, Homo sapiens
aactttgaaggaagg

SEQ ID NO: 1714788 - DNA, 15 bp, Homo sapiens
actttgaaggaaggc

SEQ ID NO: 1714789 - DNA, 15 bp, Homo sapiens
ctttgaaggaaggct

SEQ ID NO: 1714790 - DNA, 15 bp, Homo sapiens
tttgaaggaaggctt

SEQ ID NO: 1714791 - DNA, 15 bp, Homo sapiens
ttgaaggaaggcttt

SEQ ID NO: 1714792 - DNA, 15 bp, Homo sapiens
tgaaggaaggctttt

SEQ ID NO: 1714793 - DNA, 15 bp, Homo sapiens
gaaggaaggcttttt

SEQ ID NO: 1714794 - DNA, 15 bp, Homo sapiens
aaggaaggcttttta

SEQ ID NO: 1714795 - DNA, 15 bp, Homo sapiens
aggaaggctttttag

SEQ ID NO: 1714796 - DNA, 15 bp, Homo sapiens
ggaaggctttttaga

SEQ ID NO: 1714797 - DNA, 15 bp, Homo sapiens
gaaggctttttagaa

SEQ ID NO: 1714798 - DNA, 15 bp, Homo sapiens
aaggctttttagaac

SEQ ID NO: 1714799 - DNA, 15 bp, Homo sapiens
aggctttttagaacg

SEQ ID NO: 1714800 - DNA, 15 bp, Homo sapiens
ggctttttagaacga

SEQ ID NO: 1714801 - DNA, 15 bp, Homo sapiens
gctttttagaacgat

SEQ ID NO: 1714802 - DNA, 15 bp, Homo sapiens
ctttttagaacgatg

SEQ ID NO: 1714803 - DNA, 15 bp, Homo sapiens
tttttagaacgatga

SEQ ID NO: 1714804 - DNA, 15 bp, Homo sapiens
ttttagaacgatgaa

SEQ ID NO: 1714805 - DNA, 15 bp, Homo sapiens
tttagaacgatgaag

SEQ ID NO: 1714806 - DNA, 15 bp, Homo sapiens
ttagaacgatgaaga

SEQ ID NO: 1714807 - DNA, 15 bp, Homo sapiens
tagaacgatgaagac

SEQ ID NO: 1714808 - DNA, 15 bp, Homo sapiens
agaacgatgaagact

SEQ ID NO: 1714809 - DNA, 15 bp, Homo sapiens
gaacgatgaagactt

SEQ ID NO: 1714810 - DNA, 15 bp, Homo sapiens
aacgatgaagacttt

SEQ ID NO: 1714811 - DNA, 15 bp, Homo sapiens
acgatgaagactttt

SEQ ID NO: 1714812 - DNA, 15 bp, Homo sapiens
cgatgaagacttttt

SEQ ID NO: 1714813 - DNA, 15 bp, Homo sapiens
gatgaagacttttta

SEQ ID NO: 1714814 - DNA, 15 bp, Homo sapiens
atgaagactttttag

SEQ ID NO: 1714815 - DNA, 15 bp, Homo sapiens
tgaagactttttaga

SEQ ID NO: 1714816 - DNA, 15 bp, Homo sapiens
gaagactttttagac

SEQ ID NO: 1714817 - DNA, 15 bp, Homo sapiens
aagactttttagacc

SEQ ID NO: 1714818 - DNA, 15 bp, Homo sapiens
agactttttagaccc

SEQ ID NO: 1714819 - DNA, 15 bp, Homo sapiens
gactttttagaccct

SEQ ID NO: 1714820 - DNA, 15 bp, Homo sapiens
actttttagaccctt

SEQ ID NO: 1714821 - DNA, 15 bp, Homo sapiens
ctttttagacccttc

SEQ ID NO: 1714822 - DNA, 15 bp, Homo sapiens
tttttagacccttcc

SEQ ID NO: 1714823 - DNA, 15 bp, Homo sapiens
ttttagacccttccc

SEQ ID NO: 1714824 - DNA, 15 bp, Homo sapiens
tttagacccttcccc

SEQ ID NO: 1714825 - DNA, 15 bp, Homo sapiens
ttagacccttcccca

SEQ ID NO: 1714826 - DNA, 15 bp, Homo sapiens
tagacccttccccaa

SEQ ID NO: 1714827 - DNA, 15 bp, Homo sapiens
agacccttccccaaa

SEQ ID NO: 1714828 - DNA, 15 bp, Homo sapiens
gacccttccccaaat

SEQ ID NO: 1714829 - DNA, 15 bp, Homo sapiens
acccttccccaaatt

SEQ ID NO: 1714830 - DNA, 15 bp, Homo sapiens
cccttccccaaattt

SEQ ID NO: 1714831 - DNA, 15 bp, Homo sapiens
ccttccccaaatttt

SEQ ID NO: 1714832 - DNA, 15 bp, Homo sapiens
cttccccaaatttta

SEQ ID NO: 1714833 - DNA, 15 bp, Homo sapiens
ttccccaaattttaa

SEQ ID NO: 1714834 - DNA, 15 bp, Homo sapiens
tccccaaattttaat

SEQ ID NO: 1714835 - DNA, 15 bp, Homo sapiens
ccccaaattttaata

SEQ ID NO: 1714836 - DNA, 15 bp, Homo sapiens
cccaaattttaatat

SEQ ID NO: 1714837 - DNA, 15 bp, Homo sapiens
ccaaattttaatatc

SEQ ID NO: 1714838 - DNA, 15 bp, Homo sapiens
caaattttaatatca

SEQ ID NO: 1714839 - DNA, 15 bp, Homo sapiens
aaattttaatatcac

SEQ ID NO: 1714840 - DNA, 15 bp, Homo sapiens
aattttaatatcact

SEQ ID NO: 1714841 - DNA, 15 bp, Homo sapiens
attttaatatcactg

SEQ ID NO: 1714842 - DNA, 15 bp, Homo sapiens
ttttaatatcactga

SEQ ID NO: 1714843 - DNA, 15 bp, Homo sapiens
tttaatatcactgaa

SEQ ID NO: 1714844 - DNA, 15 bp, Homo sapiens
ttaatatcactgaag

SEQ ID NO: 1714845 - DNA, 15 bp, Homo sapiens
taatatcactgaagg

SEQ ID NO: 1714846 - DNA, 15 bp, Homo sapiens
aatatcactgaagga

SEQ ID NO: 1714847 - DNA, 15 bp, Homo sapiens
atatcactgaaggag

SEQ ID NO: 1714848 - DNA, 15 bp, Homo sapiens
tatcactgaaggagt

SEQ ID NO: 1714849 - DNA, 15 bp, Homo sapiens
atcactgaaggagtc

SEQ ID NO: 1714850 - DNA, 15 bp, Homo sapiens
tcactgaaggagtct

SEQ ID NO: 1714851 - DNA, 15 bp, Homo sapiens
cactgaaggagtctc

SEQ ID NO: 1714852 - DNA, 15 bp, Homo sapiens
actgaaggagtctca

SEQ ID NO: 1714853 - DNA, 15 bp, Homo sapiens
ctgaaggagtctcaa

SEQ ID NO: 1714854 - DNA, 15 bp, Homo sapiens
tgaaggagtctcaaa

SEQ ID NO: 1714855 - DNA, 15 bp, Homo sapiens
gaaggagtctcaaac

SEQ ID NO: 1714856 - DNA, 15 bp, Homo sapiens
aaggagtctcaaact

SEQ ID NO: 1714857 - DNA, 15 bp, Homo sapiens
aggagtctcaaactg

SEQ ID NO: 1714858 - DNA, 15 bp, Homo sapiens
ggagtctcaaactga

SEQ ID NO: 1714859 - DNA, 15 bp, Homo sapiens
gagtctcaaactgaa

SEQ ID NO: 1714860 - DNA, 15 bp, Homo sapiens
agtctcaaactgaag

SEQ ID NO: 1714861 - DNA, 15 bp, Homo sapiens
gtctcaaactgaaga

SEQ ID NO: 1714862 - DNA, 15 bp, Homo sapiens
tctcaaactgaagag

SEQ ID NO: 1714863 - DNA, 15 bp, Homo sapiens
ctcaaactgaagaga

SEQ ID NO: 1714864 - DNA, 15 bp, Homo sapiens
tcaaactgaagagag

SEQ ID NO: 1714865 - DNA, 15 bp, Homo sapiens
caaactgaagagagt

SEQ ID NO: 1714866 - DNA, 15 bp, Homo sapiens
aaactgaagagagtt

SEQ ID NO: 1714867 - DNA, 15 bp, Homo sapiens
aactgaagagagttc

SEQ ID NO: 1714868 - DNA, 15 bp, Homo sapiens
actgaagagagttcc

SEQ ID NO: 1714869 - DNA, 15 bp, Homo sapiens
ctgaagagagttccc

SEQ ID NO: 1714870 - DNA, 15 bp, Homo sapiens
tgaagagagttccct

SEQ ID NO: 1714871 - DNA, 15 bp, Homo sapiens
gaagagagttccctc

SEQ ID NO: 1714872 - DNA, 15 bp, Homo sapiens
aagagagttccctct

SEQ ID NO: 1714873 - DNA, 15 bp, Homo sapiens
agagagttccctctc

SEQ ID NO: 1714874 - DNA, 15 bp, Homo sapiens
gagagttccctctct

SEQ ID NO: 1714875 - DNA, 15 bp, Homo sapiens
agagttccctctcta

SEQ ID NO: 1714876 - DNA, 15 bp, Homo sapiens
gagttccctctctag

SEQ ID NO: 1714877 - DNA, 15 bp, Homo sapiens
agttccctctctaga

SEQ ID NO: 1714878 - DNA, 15 bp, Homo sapiens
gttccctctctagat

SEQ ID NO: 1714879 - DNA, 15 bp, Homo sapiens
ttccctctctagata

SEQ ID NO: 1714880 - DNA, 15 bp, Homo sapiens
tccctctctagatag

SEQ ID NO: 1714881 - DNA, 15 bp, Homo sapiens
ccctctctagataga

SEQ ID NO: 1714882 - DNA, 15 bp, Homo sapiens
cctctctagatagaa

SEQ ID NO: 1714883 - DNA, 15 bp, Homo sapiens
ctctctagatagaaa

SEQ ID NO: 1714884 - DNA, 15 bp, Homo sapiens
tctctagatagaaaa

SEQ ID NO: 1714885 - DNA, 15 bp, Homo sapiens
ctctagatagaaaat

SEQ ID NO: 1714886 - DNA, 15 bp, Homo sapiens
tctagatagaaaatc

SEQ ID NO: 1714887 - DNA, 15 bp, Homo sapiens
ctagatagaaaatct

SEQ ID NO: 1714888 - DNA, 15 bp, Homo sapiens
tagatagaaaatcta

SEQ ID NO: 1714889 - DNA, 15 bp, Homo sapiens
agatagaaaatctaa

SEQ ID NO: 1714890 - DNA, 15 bp, Homo sapiens
gatagaaaatctaag

SEQ ID NO: 1714891 - DNA, 15 bp, Homo sapiens
atagaaaatctaaga

SEQ ID NO: 1714892 - DNA, 15 bp, Homo sapiens
tagaaaatctaagaa

SEQ ID NO: 1714893 - DNA, 15 bp, Homo sapiens
agaaaatctaagaaa

SEQ ID NO: 1714894 - DNA, 15 bp, Homo sapiens
gaaaatctaagaaat

SEQ ID NO: 1714895 - DNA, 15 bp, Homo sapiens
aaaatctaagaaata

SEQ ID NO: 1714896 - DNA, 15 bp, Homo sapiens
aaatctaagaaatac

SEQ ID NO: 1714897 - DNA, 15 bp, Homo sapiens
aatctaagaaataca

SEQ ID NO: 1714898 - DNA, 15 bp, Homo sapiens
atctaagaaatacat

SEQ ID NO: 1714899 - DNA, 15 bp, Homo sapiens
tctaagaaatacata

SEQ ID NO: 1714900 - DNA, 15 bp, Homo sapiens
ctaagaaatacatat

SEQ ID NO: 1714901 - DNA, 15 bp, Homo sapiens
taagaaatacatata

SEQ ID NO: 1714902 - DNA, 15 bp, Homo sapiens
aagaaatacatatat

SEQ ID NO: 1714903 - DNA, 15 bp, Homo sapiens
agaaatacatatatt

SEQ ID NO: 1714904 - DNA, 15 bp, Homo sapiens
gaaatacatatattt

SEQ ID NO: 1714905 - DNA, 15 bp, Homo sapiens
aaatacatatatttt

SEQ ID NO: 1714906 - DNA, 15 bp, Homo sapiens
aatacatatattttt

SEQ ID NO: 1714907 - DNA, 15 bp, Homo sapiens
atacatatatttttt

SEQ ID NO: 1714908 - DNA, 15 bp, Homo sapiens
tacatatattttttg

SEQ ID NO: 1714909 - DNA, 15 bp, Homo sapiens
acatatattttttgt

SEQ ID NO: 1714910 - DNA, 15 bp, Homo sapiens
catatattttttgta

SEQ ID NO: 1714911 - DNA, 15 bp, Homo sapiens
atatattttttgtag

SEQ ID NO: 1714912 - DNA, 15 bp, Homo sapiens
tatattttttgtagg

SEQ ID NO: 1714913 - DNA, 15 bp, Homo sapiens
atattttttgtagga

SEQ ID NO: 1714914 - DNA, 15 bp, Homo sapiens
tattttttgtaggag

SEQ ID NO: 1714915 - DNA, 15 bp, Homo sapiens
attttttgtaggagt

SEQ ID NO: 1714916 - DNA, 15 bp, Homo sapiens
ttttttgtaggagtc

SEQ ID NO: 1714917 - DNA, 15 bp, Homo sapiens
tttttgtaggagtct

SEQ ID NO: 1714918 - DNA, 15 bp, Homo sapiens
ttttgtaggagtctt

SEQ ID NO: 1714919 - DNA, 15 bp, Homo sapiens
tttgtaggagtctta

SEQ ID NO: 1714920 - DNA, 15 bp, Homo sapiens
ttgtaggagtcttac

SEQ ID NO: 1714921 - DNA, 15 bp, Homo sapiens
tgtaggagtcttaca

SEQ ID NO: 1714922 - DNA, 15 bp, Homo sapiens
gtaggagtcttacag

SEQ ID NO: 1714923 - DNA, 15 bp, Homo sapiens
taggagtcttacagc

SEQ ID NO: 1714924 - DNA, 15 bp, Homo sapiens
aggagtcttacagca

SEQ ID NO: 1714925 - DNA, 15 bp, Homo sapiens
ggagtcttacagcaa

SEQ ID NO: 1714926 - DNA, 15 bp, Homo sapiens
gagtcttacagcaat

SEQ ID NO: 1714927 - DNA, 15 bp, Homo sapiens
agtcttacagcaatc

SEQ ID NO: 1714928 - DNA, 15 bp, Homo sapiens
gtcttacagcaatct

SEQ ID NO: 1714929 - DNA, 15 bp, Homo sapiens
tcttacagcaatctt

SEQ ID NO: 1714930 - DNA, 15 bp, Homo sapiens
cttacagcaatcttc

SEQ ID NO: 1714931 - DNA, 15 bp, Homo sapiens
ttacagcaatcttct

SEQ ID NO: 1714932 - DNA, 15 bp, Homo sapiens
tacagcaatcttctt

SEQ ID NO: 1714933 - DNA, 15 bp, Homo sapiens
acagcaatcttctta

SEQ ID NO: 1714934 - DNA, 15 bp, Homo sapiens
cagcaatcttcttaa

SEQ ID NO: 1714935 - DNA, 15 bp, Homo sapiens
agcaatcttcttaaa

SEQ ID NO: 1714936 - DNA, 15 bp, Homo sapiens
gcaatcttcttaaaa

SEQ ID NO: 1714937 - DNA, 15 bp, Homo sapiens
caatcttcttaaaat

SEQ ID NO: 1714938 - DNA, 15 bp, Homo sapiens
aatcttcttaaaatt

SEQ ID NO: 1714939 - DNA, 15 bp, Homo sapiens
atcttcttaaaatta

SEQ ID NO: 1714940 - DNA, 15 bp, Homo sapiens
tcttcttaaaattac

SEQ ID NO: 1714941 - DNA, 15 bp, Homo sapiens
cttcttaaaattacc

SEQ ID NO: 1714942 - DNA, 15 bp, Homo sapiens
ttcttaaaattacca

SEQ ID NO: 1714943 - DNA, 15 bp, Homo sapiens
tcttaaaattaccaa

SEQ ID NO: 1714944 - DNA, 15 bp, Homo sapiens
cttaaaattaccaag

SEQ ID NO: 1714945 - DNA, 15 bp, Homo sapiens
ttaaaattaccaagc

SEQ ID NO: 1714946 - DNA, 15 bp, Homo sapiens
taaaattaccaagca

SEQ ID NO: 1714947 - DNA, 15 bp, Homo sapiens
aaaattaccaagcag

SEQ ID NO: 1714948 - DNA, 15 bp, Homo sapiens
aaattaccaagcagg

SEQ ID NO: 1714949 - DNA, 15 bp, Homo sapiens
aattaccaagcaggt

SEQ ID NO: 1714950 - DNA, 15 bp, Homo sapiens
attaccaagcaggtt

SEQ ID NO: 1714951 - DNA, 15 bp, Homo sapiens
ttaccaagcaggttg

SEQ ID NO: 1714952 - DNA, 15 bp, Homo sapiens
taccaagcaggttgg

SEQ ID NO: 1714953 - DNA, 15 bp, Homo sapiens
accaagcaggttgga

SEQ ID NO: 1714954 - DNA, 15 bp, Homo sapiens
ccaagcaggttggaa

SEQ ID NO: 1714955 - DNA, 15 bp, Homo sapiens
caagcaggttggaag

SEQ ID NO: 1714956 - DNA, 15 bp, Homo sapiens
aagcaggttggaaga

SEQ ID NO: 1714957 - DNA, 15 bp, Homo sapiens
agcaggttggaagag

SEQ ID NO: 1714958 - DNA, 15 bp, Homo sapiens
gcaggttggaagaga

SEQ ID NO: 1714959 - DNA, 15 bp, Homo sapiens
caggttggaagagat

SEQ ID NO: 1714960 - DNA, 15 bp, Homo sapiens
aggttggaagagatc

SEQ ID NO: 1714961 - DNA, 15 bp, Homo sapiens
ggttggaagagatcc

SEQ ID NO: 1714962 - DNA, 15 bp, Homo sapiens
gttggaagagatcca

SEQ ID NO: 1714963 - DNA, 15 bp, Homo sapiens
ttggaagagatccat

SEQ ID NO: 1714964 - DNA, 15 bp, Homo sapiens
tggaagagatccatg

SEQ ID NO: 1714965 - DNA, 15 bp, Homo sapiens
ggaagagatccatga

SEQ ID NO: 1714966 - DNA, 15 bp, Homo sapiens
gaagagatccatgaa

SEQ ID NO: 1714967 - DNA, 15 bp, Homo sapiens
aagagatccatgaat

SEQ ID NO: 1714968 - DNA, 15 bp, Homo sapiens
agagatccatgaatt

SEQ ID NO: 1714969 - DNA, 15 bp, Homo sapiens
gagatccatgaattt

SEQ ID NO: 1714970 - DNA, 15 bp, Homo sapiens
agatccatgaatttc

SEQ ID NO: 1714971 - DNA, 15 bp, Homo sapiens
gatccatgaatttca

SEQ ID NO: 1714972 - DNA, 15 bp, Homo sapiens
atccatgaatttcaa

SEQ ID NO: 1714973 - DNA, 15 bp, Homo sapiens
tccatgaatttcaag

SEQ ID NO: 1714974 - DNA, 15 bp, Homo sapiens
ccatgaatttcaaga

SEQ ID NO: 1714975 - DNA, 15 bp, Homo sapiens
catgaatttcaagaa

SEQ ID NO: 1714976 - DNA, 15 bp, Homo sapiens
atgaatttcaagaag

SEQ ID NO: 1714977 - DNA, 15 bp, Homo sapiens
tgaatttcaagaagt

SEQ ID NO: 1714978 - DNA, 15 bp, Homo sapiens
gaatttcaagaagtt

SEQ ID NO: 1714979 - DNA, 15 bp, Homo sapiens
aatttcaagaagttc

SEQ ID NO: 1714980 - DNA, 15 bp, Homo sapiens
atttcaagaagttca

SEQ ID NO: 1714981 - DNA, 15 bp, Homo sapiens
tttcaagaagttcag

SEQ ID NO: 1714982 - DNA, 15 bp, Homo sapiens
ttcaagaagttcagg

SEQ ID NO: 1714983 - DNA, 15 bp, Homo sapiens
tcaagaagttcaggg

SEQ ID NO: 1714984 - DNA, 15 bp, Homo sapiens
caagaagttcagggg

SEQ ID NO: 1714985 - DNA, 15 bp, Homo sapiens
aagaagttcaggggg

SEQ ID NO: 1714986 - DNA, 15 bp, Homo sapiens
agaagttcaggggga

SEQ ID NO: 1714987 - DNA, 15 bp, Homo sapiens
gaagttcagggggaa

SEQ ID NO: 1714988 - DNA, 15 bp, Homo sapiens
aagttcagggggaat

SEQ ID NO: 1714989 - DNA, 15 bp, Homo sapiens
agttcagggggaatt

SEQ ID NO: 1714990 - DNA, 15 bp, Homo sapiens
gttcagggggaattt

SEQ ID NO: 1714991 - DNA, 15 bp, Homo sapiens
ttcagggggaatttt

SEQ ID NO: 1714992 - DNA, 15 bp, Homo sapiens
tcagggggaattttt

SEQ ID NO: 1714993 - DNA, 15 bp, Homo sapiens
cagggggaatttttt

SEQ ID NO: 1714994 - DNA, 15 bp, Homo sapiens
agggggaattttttt

SEQ ID NO: 1714995 - DNA, 15 bp, Homo sapiens
gggggaattttttta

SEQ ID NO: 1714996 - DNA, 15 bp, Homo sapiens
ggggaatttttttaa

SEQ ID NO: 1714997 - DNA, 15 bp, Homo sapiens
gggaatttttttaag

SEQ ID NO: 1714998 - DNA, 15 bp, Homo sapiens
ggaatttttttaaga

SEQ ID NO: 1714999 - DNA, 15 bp, Homo sapiens
gaatttttttaagac

SEQ ID NO: 1715000 - DNA, 15 bp, Homo sapiens
aatttttttaagact

SEQ ID NO: 1715001 - DNA, 15 bp, Homo sapiens
atttttttaagactc

SEQ ID NO: 1715002 - DNA, 15 bp, Homo sapiens
tttttttaagactct

SEQ ID NO: 1715003 - DNA, 15 bp, Homo sapiens
ttttttaagactctg

SEQ ID NO: 1715004 - DNA, 15 bp, Homo sapiens
tttttaagactctgc

SEQ ID NO: 1715005 - DNA, 15 bp, Homo sapiens
ttttaagactctgct

SEQ ID NO: 1715006 - DNA, 15 bp, Homo sapiens
tttaagactctgctg

SEQ ID NO: 1715007 - DNA, 15 bp, Homo sapiens
ttaagactctgctga

SEQ ID NO: 1715008 - DNA, 15 bp, Homo sapiens
taagactctgctgaa

SEQ ID NO: 1715009 - DNA, 15 bp, Homo sapiens
aagactctgctgaaa

SEQ ID NO: 1715010 - DNA, 15 bp, Homo sapiens
agactctgctgaaat

SEQ ID NO: 1715011 - DNA, 15 bp, Homo sapiens
gactctgctgaaata

SEQ ID NO: 1715012 - DNA, 15 bp, Homo sapiens
actctgctgaaatat

SEQ ID NO: 1715013 - DNA, 15 bp, Homo sapiens
ctctgctgaaatata

SEQ ID NO: 1715014 - DNA, 15 bp, Homo sapiens
tctgctgaaatatat

SEQ ID NO: 1715015 - DNA, 15 bp, Homo sapiens
ctgctgaaatatata

SEQ ID NO: 1715016 - DNA, 15 bp, Homo sapiens
tgctgaaatatatat

SEQ ID NO: 1715017 - DNA, 15 bp, Homo sapiens
gctgaaatatatata

SEQ ID NO: 1715018 - DNA, 15 bp, Homo sapiens
ctgaaatatatatat

SEQ ID NO: 1715019 - DNA, 15 bp, Homo sapiens
tgaaatatatatata

SEQ ID NO: 1715020 - DNA, 15 bp, Homo sapiens
gaaatatatatatat

SEQ ID NO: 1715021 - DNA, 15 bp, Homo sapiens
atatatattttttga

SEQ ID NO: 1715022 - DNA, 15 bp, Homo sapiens
tatatattttttgag

SEQ ID NO: 1715023 - DNA, 15 bp, Homo sapiens
atatattttttgaga

SEQ ID NO: 1715024 - DNA, 15 bp, Homo sapiens
tatattttttgagat

SEQ ID NO: 1715025 - DNA, 15 bp, Homo sapiens
atattttttgagatg

SEQ ID NO: 1715026 - DNA, 15 bp, Homo sapiens
gatggggtcttgctc

SEQ ID NO: 1715027 - DNA, 15 bp, Homo sapiens
atggggtcttgctct

SEQ ID NO: 1715028 - DNA, 15 bp, Homo sapiens
tggggtcttgctctt

SEQ ID NO: 1715029 - DNA, 15 bp, Homo sapiens
ggggtcttgctcttg

SEQ ID NO: 1715030 - DNA, 15 bp, Homo sapiens
gggtcttgctcttgt

SEQ ID NO: 1715031 - DNA, 15 bp, Homo sapiens
ggtcttgctcttgtc

SEQ ID NO: 1715032 - DNA, 15 bp, Homo sapiens
gtcttgctcttgtcg

SEQ ID NO: 1715033 - DNA, 15 bp, Homo sapiens
tcttgctcttgtcgc

SEQ ID NO: 1715034 - DNA, 15 bp, Homo sapiens
cttgctcttgtcgcc

SEQ ID NO: 1715035 - DNA, 15 bp, Homo sapiens
ttgctcttgtcgcct

SEQ ID NO: 1715036 - DNA, 15 bp, Homo sapiens
tgctcttgtcgccta

SEQ ID NO: 1715037 - DNA, 15 bp, Homo sapiens
gctcttgtcgcctag

SEQ ID NO: 1715038 - DNA, 15 bp, Homo sapiens
ctcttgtcgcctagg

SEQ ID NO: 1715039 - DNA, 15 bp, Homo sapiens
tcttgtcgcctaggc

SEQ ID NO: 1715040 - DNA, 15 bp, Homo sapiens
cttgtcgcctaggct

SEQ ID NO: 1715041 - DNA, 15 bp, Homo sapiens
agtggcatgatctca

SEQ ID NO: 1715042 - DNA, 15 bp, Homo sapiens
acctgccaccacact

SEQ ID NO: 1715043 - DNA, 15 bp, Homo sapiens
cctgccaccacactc

SEQ ID NO: 1715044 - DNA, 15 bp, Homo sapiens
ctgccaccacactca

SEQ ID NO: 1715045 - DNA, 15 bp, Homo sapiens
tgccaccacactcag

SEQ ID NO: 1715046 - DNA, 15 bp, Homo sapiens
gccaccacactcagc

SEQ ID NO: 1715047 - DNA, 15 bp, Homo sapiens
ccaccacactcagct

SEQ ID NO: 1715048 - DNA, 15 bp, Homo sapiens
caccacactcagcta

SEQ ID NO: 1715049 - DNA, 15 bp, Homo sapiens
accacactcagctaa

SEQ ID NO: 1715050 - DNA, 15 bp, Homo sapiens
ccacactcagctaat

SEQ ID NO: 1715051 - DNA, 15 bp, Homo sapiens
cacactcagctaatt

SEQ ID NO: 1715052 - DNA, 15 bp, Homo sapiens
acactcagctaattt

SEQ ID NO: 1715053 - DNA, 15 bp, Homo sapiens
cactcagctaatttc

SEQ ID NO: 1715054 - DNA, 15 bp, Homo sapiens
actcagctaatttcg

SEQ ID NO: 1715055 - DNA, 15 bp, Homo sapiens
ctcagctaatttcgt

SEQ ID NO: 1715056 - DNA, 15 bp, Homo sapiens
tcagctaatttcgta

SEQ ID NO: 1715057 - DNA, 15 bp, Homo sapiens
cagctaatttcgtat

SEQ ID NO: 1715058 - DNA, 15 bp, Homo sapiens
agctaatttcgtatt

SEQ ID NO: 1715059 - DNA, 15 bp, Homo sapiens
gctaatttcgtattt

SEQ ID NO: 1715060 - DNA, 15 bp, Homo sapiens
ctaatttcgtatttt

SEQ ID NO: 1715061 - DNA, 15 bp, Homo sapiens
taatttcgtattttt

SEQ ID NO: 1715062 - DNA, 15 bp, Homo sapiens
aatttcgtatttttg

SEQ ID NO: 1715063 - DNA, 15 bp, Homo sapiens
atttcgtatttttgg

SEQ ID NO: 1715064 - DNA, 15 bp, Homo sapiens
tttcgtatttttggt

SEQ ID NO: 1715065 - DNA, 15 bp, Homo sapiens
ttcgtatttttggta

SEQ ID NO: 1715066 - DNA, 15 bp, Homo sapiens
tcgtatttttggtag

SEQ ID NO: 1715067 - DNA, 15 bp, Homo sapiens
cgtatttttggtaga

SEQ ID NO: 1715068 - DNA, 15 bp, Homo sapiens
ttttggtagagatgt

SEQ ID NO: 1715069 - DNA, 15 bp, Homo sapiens
tttggtagagatgtg

SEQ ID NO: 1715070 - DNA, 15 bp, Homo sapiens
ttggtagagatgtgg

SEQ ID NO: 1715071 - DNA, 15 bp, Homo sapiens
tggtagagatgtggt

SEQ ID NO: 1715072 - DNA, 15 bp, Homo sapiens
ggtagagatgtggtt

SEQ ID NO: 1715073 - DNA, 15 bp, Homo sapiens
gagatgtggtttcac

SEQ ID NO: 1715074 - DNA, 15 bp, Homo sapiens
agatgtggtttcacc

SEQ ID NO: 1715075 - DNA, 15 bp, Homo sapiens
gatgtggtttcacca

SEQ ID NO: 1715076 - DNA, 15 bp, Homo sapiens
atgtggtttcaccat

SEQ ID NO: 1715077 - DNA, 15 bp, Homo sapiens
tgtggtttcaccatg

SEQ ID NO: 1715078 - DNA, 15 bp, Homo sapiens
gtggtttcaccatgt

SEQ ID NO: 1715079 - DNA, 15 bp, Homo sapiens
tggtttcaccatgtt

SEQ ID NO: 1715080 - DNA, 15 bp, Homo sapiens
ggtttcaccatgttt

SEQ ID NO: 1715081 - DNA, 15 bp, Homo sapiens
gtttcaccatgtttg

SEQ ID NO: 1715082 - DNA, 15 bp, Homo sapiens
tttcaccatgtttgc

SEQ ID NO: 1715083 - DNA, 15 bp, Homo sapiens
ttcaccatgtttgcc

SEQ ID NO: 1715084 - DNA, 15 bp, Homo sapiens
tcaccatgtttgcca

SEQ ID NO: 1715085 - DNA, 15 bp, Homo sapiens
caccatgtttgccag

SEQ ID NO: 1715086 - DNA, 15 bp, Homo sapiens
accatgtttgccagc

SEQ ID NO: 1715087 - DNA, 15 bp, Homo sapiens
ccatgtttgccagcc

SEQ ID NO: 1715088 - DNA, 15 bp, Homo sapiens
catgtttgccagcct

SEQ ID NO: 1715089 - DNA, 15 bp, Homo sapiens
atgtttgccagcctg

SEQ ID NO: 1715090 - DNA, 15 bp, Homo sapiens
tgtttgccagcctgg

SEQ ID NO: 1715091 - DNA, 15 bp, Homo sapiens
gtttgccagcctggt

SEQ ID NO: 1715092 - DNA, 15 bp, Homo sapiens
tttgccagcctggtc

SEQ ID NO: 1715093 - DNA, 15 bp, Homo sapiens
ttgccagcctggtct

SEQ ID NO: 1715094 - DNA, 15 bp, Homo sapiens
tgccagcctggtctc

SEQ ID NO: 1715095 - DNA, 15 bp, Homo sapiens
gccagcctggtctca

SEQ ID NO: 1715096 - DNA, 15 bp, Homo sapiens
ccagcctggtctcaa

SEQ ID NO: 1715097 - DNA, 15 bp, Homo sapiens
cagcctggtctcaaa

SEQ ID NO: 1715098 - DNA, 15 bp, Homo sapiens
agcctggtctcaaac

SEQ ID NO: 1715099 - DNA, 15 bp, Homo sapiens
gcctggtctcaaact

SEQ ID NO: 1715100 - DNA, 15 bp, Homo sapiens
cctggtctcaaactc

SEQ ID NO: 1715101 - DNA, 15 bp, Homo sapiens
cttggcctcccaaac

SEQ ID NO: 1715102 - DNA, 15 bp, Homo sapiens
gcgtgagccaccgta

SEQ ID NO: 1715103 - DNA, 15 bp, Homo sapiens
cgtgagccaccgtac

SEQ ID NO: 1715104 - DNA, 15 bp, Homo sapiens
tgagccaccgtacct

SEQ ID NO: 1715105 - DNA, 15 bp, Homo sapiens
gagccaccgtacctg

SEQ ID NO: 1715106 - DNA, 15 bp, Homo sapiens
agccaccgtacctgg

SEQ ID NO: 1715107 - DNA, 15 bp, Homo sapiens
gccaccgtacctggt

SEQ ID NO: 1715108 - DNA, 15 bp, Homo sapiens
ccaccgtacctggtc

SEQ ID NO: 1715109 - DNA, 15 bp, Homo sapiens
caccgtacctggtct

SEQ ID NO: 1715110 - DNA, 15 bp, Homo sapiens
accgtacctggtcta

SEQ ID NO: 1715111 - DNA, 15 bp, Homo sapiens
ccgtacctggtctag

SEQ ID NO: 1715112 - DNA, 15 bp, Homo sapiens
cgtacctggtctaga

SEQ ID NO: 1715113 - DNA, 15 bp, Homo sapiens
gtacctggtctagac

SEQ ID NO: 1715114 - DNA, 15 bp, Homo sapiens
tacctggtctagact

SEQ ID NO: 1715115 - DNA, 15 bp, Homo sapiens
acctggtctagactc

SEQ ID NO: 1715116 - DNA, 15 bp, Homo sapiens
cctggtctagactct

SEQ ID NO: 1715117 - DNA, 15 bp, Homo sapiens
ctggtctagactctg

SEQ ID NO: 1715118 - DNA, 15 bp, Homo sapiens
tggtctagactctgc

SEQ ID NO: 1715119 - DNA, 15 bp, Homo sapiens
ggtctagactctgcc

SEQ ID NO: 1715120 - DNA, 15 bp, Homo sapiens
gtctagactctgccg

SEQ ID NO: 1715121 - DNA, 15 bp, Homo sapiens
tctagactctgccga

SEQ ID NO: 1715122 - DNA, 15 bp, Homo sapiens
ctagactctgccgaa

SEQ ID NO: 1715123 - DNA, 15 bp, Homo sapiens
tagactctgccgaaa

SEQ ID NO: 1715124 - DNA, 15 bp, Homo sapiens
agactctgccgaaat

SEQ ID NO: 1715125 - DNA, 15 bp, Homo sapiens
gactctgccgaaatt

SEQ ID NO: 1715126 - DNA, 15 bp, Homo sapiens
actctgccgaaattc

SEQ ID NO: 1715127 - DNA, 15 bp, Homo sapiens
ctctgccgaaattct

SEQ ID NO: 1715128 - DNA, 15 bp, Homo sapiens
tctgccgaaattcta

SEQ ID NO: 1715129 - DNA, 15 bp, Homo sapiens
ctgccgaaattctaa

SEQ ID NO: 1715130 - DNA, 15 bp, Homo sapiens
tgccgaaattctaat

SEQ ID NO: 1715131 - DNA, 15 bp, Homo sapiens
gccgaaattctaata

SEQ ID NO: 1715132 - DNA, 15 bp, Homo sapiens
ccgaaattctaatac

SEQ ID NO: 1715133 - DNA, 15 bp, Homo sapiens
cgaaattctaatact

SEQ ID NO: 1715134 - DNA, 15 bp, Homo sapiens
gaaattctaatactt

SEQ ID NO: 1715135 - DNA, 15 bp, Homo sapiens
aaattctaatacttc

SEQ ID NO: 1715136 - DNA, 15 bp, Homo sapiens
aattctaatacttct

SEQ ID NO: 1715137 - DNA, 15 bp, Homo sapiens
attctaatacttctt

SEQ ID NO: 1715138 - DNA, 15 bp, Homo sapiens
ttctaatacttcttt

SEQ ID NO: 1715139 - DNA, 15 bp, Homo sapiens
tctaatacttctttg

SEQ ID NO: 1715140 - DNA, 15 bp, Homo sapiens
ctaatacttctttgg

SEQ ID NO: 1715141 - DNA, 15 bp, Homo sapiens
taatacttctttggt

SEQ ID NO: 1715142 - DNA, 15 bp, Homo sapiens
aatacttctttggta

SEQ ID NO: 1715143 - DNA, 15 bp, Homo sapiens
atacttctttggtaa

SEQ ID NO: 1715144 - DNA, 15 bp, Homo sapiens
tacttctttggtaat

SEQ ID NO: 1715145 - DNA, 15 bp, Homo sapiens
acttctttggtaatg

SEQ ID NO: 1715146 - DNA, 15 bp, Homo sapiens
cttctttggtaatgc

SEQ ID NO: 1715147 - DNA, 15 bp, Homo sapiens
ttctttggtaatgca

SEQ ID NO: 1715148 - DNA, 15 bp, Homo sapiens
tctttggtaatgcaa

SEQ ID NO: 1715149 - DNA, 15 bp, Homo sapiens
ctttggtaatgcaac

SEQ ID NO: 1715150 - DNA, 15 bp, Homo sapiens
tttggtaatgcaaca

SEQ ID NO: 1715151 - DNA, 15 bp, Homo sapiens
ttggtaatgcaacag

SEQ ID NO: 1715152 - DNA, 15 bp, Homo sapiens
tggtaatgcaacaga

SEQ ID NO: 1715153 - DNA, 15 bp, Homo sapiens
ggtaatgcaacagaa

SEQ ID NO: 1715154 - DNA, 15 bp, Homo sapiens
gtaatgcaacagaaa

SEQ ID NO: 1715155 - DNA, 15 bp, Homo sapiens
taatgcaacagaaaa

SEQ ID NO: 1715156 - DNA, 15 bp, Homo sapiens
aatgcaacagaaaac

SEQ ID NO: 1715157 - DNA, 15 bp, Homo sapiens
atgcaacagaaaact

SEQ ID NO: 1715158 - DNA, 15 bp, Homo sapiens
tgcaacagaaaacta

SEQ ID NO: 1715159 - DNA, 15 bp, Homo sapiens
gcaacagaaaactaa

SEQ ID NO: 1715160 - DNA, 15 bp, Homo sapiens
aacagaaaactaaag

SEQ ID NO: 1715161 - DNA, 15 bp, Homo sapiens
acagaaaactaaaga

SEQ ID NO: 1715162 - DNA, 15 bp, Homo sapiens
cagaaaactaaagat

SEQ ID NO: 1715163 - DNA, 15 bp, Homo sapiens
agaaaactaaagatt

SEQ ID NO: 1715164 - DNA, 15 bp, Homo sapiens
gaaaactaaagattt

SEQ ID NO: 1715165 - DNA, 15 bp, Homo sapiens
aaaactaaagatttt

SEQ ID NO: 1715166 - DNA, 15 bp, Homo sapiens
aaactaaagattttg

SEQ ID NO: 1715167 - DNA, 15 bp, Homo sapiens
aactaaagattttga

SEQ ID NO: 1715168 - DNA, 15 bp, Homo sapiens
actaaagattttgat

SEQ ID NO: 1715169 - DNA, 15 bp, Homo sapiens
ctaaagattttgatg

SEQ ID NO: 1715170 - DNA, 15 bp, Homo sapiens
taaagattttgatgg

SEQ ID NO: 1715171 - DNA, 15 bp, Homo sapiens
aaagattttgatggt

SEQ ID NO: 1715172 - DNA, 15 bp, Homo sapiens
aagattttgatggtg

SEQ ID NO: 1715173 - DNA, 15 bp, Homo sapiens
agattttgatggtga

SEQ ID NO: 1715174 - DNA, 15 bp, Homo sapiens
gattttgatggtgaa

SEQ ID NO: 1715175 - DNA, 15 bp, Homo sapiens
attttgatggtgaac

SEQ ID NO: 1715176 - DNA, 15 bp, Homo sapiens
ttttgatggtgaact

SEQ ID NO: 1715177 - DNA, 15 bp, Homo sapiens
tttgatggtgaactc

SEQ ID NO: 1715178 - DNA, 15 bp, Homo sapiens
ttgatggtgaactca

SEQ ID NO: 1715179 - DNA, 15 bp, Homo sapiens
tgatggtgaactcaa

SEQ ID NO: 1715180 - DNA, 15 bp, Homo sapiens
gatggtgaactcaat

SEQ ID NO: 1715181 - DNA, 15 bp, Homo sapiens
atggtgaactcaatt

SEQ ID NO: 1715182 - DNA, 15 bp, Homo sapiens
tggtgaactcaattg

SEQ ID NO: 1715183 - DNA, 15 bp, Homo sapiens
ggtgaactcaattgc

SEQ ID NO: 1715184 - DNA, 15 bp, Homo sapiens
gtgaactcaattgct

SEQ ID NO: 1715185 - DNA, 15 bp, Homo sapiens
tgaactcaattgctt

SEQ ID NO: 1715186 - DNA, 15 bp, Homo sapiens
gaactcaattgcttc

SEQ ID NO: 1715187 - DNA, 15 bp, Homo sapiens
aactcaattgcttct

SEQ ID NO: 1715188 - DNA, 15 bp, Homo sapiens
actcaattgcttctg

SEQ ID NO: 1715189 - DNA, 15 bp, Homo sapiens
ctcaattgcttctga

SEQ ID NO: 1715190 - DNA, 15 bp, Homo sapiens
tcaattgcttctgag

SEQ ID NO: 1715191 - DNA, 15 bp, Homo sapiens
caattgcttctgagt

SEQ ID NO: 1715192 - DNA, 15 bp, Homo sapiens
aattgcttctgagtt

SEQ ID NO: 1715193 - DNA, 15 bp, Homo sapiens
attgcttctgagttg

SEQ ID NO: 1715194 - DNA, 15 bp, Homo sapiens
ttgcttctgagttgt

SEQ ID NO: 1715195 - DNA, 15 bp, Homo sapiens
tgcttctgagttgtg

SEQ ID NO: 1715196 - DNA, 15 bp, Homo sapiens
gcttctgagttgtgt

SEQ ID NO: 1715197 - DNA, 15 bp, Homo sapiens
cttctgagttgtgtg

SEQ ID NO: 1715198 - DNA, 15 bp, Homo sapiens
ttctgagttgtgtgg

SEQ ID NO: 1715199 - DNA, 15 bp, Homo sapiens
tctgagttgtgtgga

SEQ ID NO: 1715200 - DNA, 15 bp, Homo sapiens
ctgagttgtgtggat

SEQ ID NO: 1715201 - DNA, 15 bp, Homo sapiens
tgagttgtgtggatg

SEQ ID NO: 1715202 - DNA, 15 bp, Homo sapiens
gagttgtgtggatga

SEQ ID NO: 1715203 - DNA, 15 bp, Homo sapiens
agttgtgtggatgaa

SEQ ID NO: 1715204 - DNA, 15 bp, Homo sapiens
gttgtgtggatgaaa

SEQ ID NO: 1715205 - DNA, 15 bp, Homo sapiens
ttgtgtggatgaaaa

SEQ ID NO: 1715206 - DNA, 15 bp, Homo sapiens
tgtgtggatgaaaat

SEQ ID NO: 1715207 - DNA, 15 bp, Homo sapiens
gtgtggatgaaaata

SEQ ID NO: 1715208 - DNA, 15 bp, Homo sapiens
tgtggatgaaaatat

SEQ ID NO: 1715209 - DNA, 15 bp, Homo sapiens
gtggatgaaaatata

SEQ ID NO: 1715210 - DNA, 15 bp, Homo sapiens
tggatgaaaatatat

SEQ ID NO: 1715211 - DNA, 15 bp, Homo sapiens
ggatgaaaatatatt

SEQ ID NO: 1715212 - DNA, 15 bp, Homo sapiens
gatgaaaatatattt

SEQ ID NO: 1715213 - DNA, 15 bp, Homo sapiens
atgaaaatatatttt

SEQ ID NO: 1715214 - DNA, 15 bp, Homo sapiens
tgaaaatatatttta

SEQ ID NO: 1715215 - DNA, 15 bp, Homo sapiens
gaaaatatattttat

SEQ ID NO: 1715216 - DNA, 15 bp, Homo sapiens
aaaatatattttatt

SEQ ID NO: 1715217 - DNA, 15 bp, Homo sapiens
aaatatattttatta

SEQ ID NO: 1715218 - DNA, 15 bp, Homo sapiens
aatatattttattat

SEQ ID NO: 1715219 - DNA, 15 bp, Homo sapiens
atatattttattatt

SEQ ID NO: 1715220 - DNA, 15 bp, Homo sapiens
tatattttattattt

SEQ ID NO: 1715221 - DNA, 15 bp, Homo sapiens
atattttattatttt

SEQ ID NO: 1715222 - DNA, 15 bp, Homo sapiens
tattttattattttt

SEQ ID NO: 1715223 - DNA, 15 bp, Homo sapiens
attttattatttttt

SEQ ID NO: 1715224 - DNA, 15 bp, Homo sapiens
ttttattattttttc

SEQ ID NO: 1715225 - DNA, 15 bp, Homo sapiens
tttattattttttcc

SEQ ID NO: 1715226 - DNA, 15 bp, Homo sapiens
ttattattttttcct

SEQ ID NO: 1715227 - DNA, 15 bp, Homo sapiens
tattattttttcctt

SEQ ID NO: 1715228 - DNA, 15 bp, Homo sapiens
attattttttccttc

SEQ ID NO: 1715229 - DNA, 15 bp, Homo sapiens
ttattttttccttca

SEQ ID NO: 1715230 - DNA, 15 bp, Homo sapiens
tattttttccttcaa

SEQ ID NO: 1715231 - DNA, 15 bp, Homo sapiens
attttttccttcaac

SEQ ID NO: 1715232 - DNA, 15 bp, Homo sapiens
ttttttccttcaact

SEQ ID NO: 1715233 - DNA, 15 bp, Homo sapiens
tttttccttcaactt

SEQ ID NO: 1715234 - DNA, 15 bp, Homo sapiens
ttttccttcaacttt

SEQ ID NO: 1715235 - DNA, 15 bp, Homo sapiens
tttccttcaactttt

SEQ ID NO: 1715236 - DNA, 15 bp, Homo sapiens
ttccttcaactttta

SEQ ID NO: 1715237 - DNA, 15 bp, Homo sapiens
tccttcaacttttaa

SEQ ID NO: 1715238 - DNA, 15 bp, Homo sapiens
ccttcaacttttaag

SEQ ID NO: 1715239 - DNA, 15 bp, Homo sapiens
cttcaacttttaagc

SEQ ID NO: 1715240 - DNA, 15 bp, Homo sapiens
ttcaacttttaagct

SEQ ID NO: 1715241 - DNA, 15 bp, Homo sapiens
tcaacttttaagctc

SEQ ID NO: 1715242 - DNA, 15 bp, Homo sapiens
caacttttaagctcc

SEQ ID NO: 1715243 - DNA, 15 bp, Homo sapiens
aacttttaagctccc

SEQ ID NO: 1715244 - DNA, 15 bp, Homo sapiens
acttttaagctccca

SEQ ID NO: 1715245 - DNA, 15 bp, Homo sapiens
cttttaagctcccag

SEQ ID NO: 1715246 - DNA, 15 bp, Homo sapiens
ttttaagctcccagg

SEQ ID NO: 1715247 - DNA, 15 bp, Homo sapiens
tttaagctcccaggt

SEQ ID NO: 1715248 - DNA, 15 bp, Homo sapiens
ttaagctcccaggta

SEQ ID NO: 1715249 - DNA, 15 bp, Homo sapiens
taagctcccaggtat

SEQ ID NO: 1715250 - DNA, 15 bp, Homo sapiens
aagctcccaggtata

SEQ ID NO: 1715251 - DNA, 15 bp, Homo sapiens
agctcccaggtatat

SEQ ID NO: 1715252 - DNA, 15 bp, Homo sapiens
gctcccaggtatatg

SEQ ID NO: 1715253 - DNA, 15 bp, Homo sapiens
ctcccaggtatatgt

SEQ ID NO: 1715254 - DNA, 15 bp, Homo sapiens
tcccaggtatatgtg

SEQ ID NO: 1715255 - DNA, 15 bp, Homo sapiens
cccaggtatatgtgt

SEQ ID NO: 1715256 - DNA, 15 bp, Homo sapiens
ccaggtatatgtgta

SEQ ID NO: 1715257 - DNA, 15 bp, Homo sapiens
caggtatatgtgtag

SEQ ID NO: 1715258 - DNA, 15 bp, Homo sapiens
aggtatatgtgtagg

SEQ ID NO: 1715259 - DNA, 15 bp, Homo sapiens
ggtatatgtgtagga

SEQ ID NO: 1715260 - DNA, 15 bp, Homo sapiens
gtatatgtgtaggat

SEQ ID NO: 1715261 - DNA, 15 bp, Homo sapiens
tatatgtgtaggatg

SEQ ID NO: 1715262 - DNA, 15 bp, Homo sapiens
atatgtgtaggatgt

SEQ ID NO: 1715263 - DNA, 15 bp, Homo sapiens
tatgtgtaggatgtg

SEQ ID NO: 1715264 - DNA, 15 bp, Homo sapiens
atgtgtaggatgtgc

SEQ ID NO: 1715265 - DNA, 15 bp, Homo sapiens
tgtgtaggatgtgca

SEQ ID NO: 1715266 - DNA, 15 bp, Homo sapiens
gtgtaggatgtgcag

SEQ ID NO: 1715267 - DNA, 15 bp, Homo sapiens
tgtaggatgtgcagg

SEQ ID NO: 1715268 - DNA, 15 bp, Homo sapiens
gtaggatgtgcaggt

SEQ ID NO: 1715269 - DNA, 15 bp, Homo sapiens
taggatgtgcaggtt

SEQ ID NO: 1715270 - DNA, 15 bp, Homo sapiens
aggatgtgcaggttt

SEQ ID NO: 1715271 - DNA, 15 bp, Homo sapiens
ggatgtgcaggtttg

SEQ ID NO: 1715272 - DNA, 15 bp, Homo sapiens
gatgtgcaggtttgt

SEQ ID NO: 1715273 - DNA, 15 bp, Homo sapiens
gtgcaggtttgttac

SEQ ID NO: 1715274 - DNA, 15 bp, Homo sapiens
tgcaggtttgttaca

SEQ ID NO: 1715275 - DNA, 15 bp, Homo sapiens
gcaggtttgttacac

SEQ ID NO: 1715276 - DNA, 15 bp, Homo sapiens
caggtttgttacaca

SEQ ID NO: 1715277 - DNA, 15 bp, Homo sapiens
aggtttgttacacag

SEQ ID NO: 1715278 - DNA, 15 bp, Homo sapiens
ggtttgttacacagg

SEQ ID NO: 1715279 - DNA, 15 bp, Homo sapiens
gtttgttacacaggt

SEQ ID NO: 1715280 - DNA, 15 bp, Homo sapiens
tttgttacacaggta

SEQ ID NO: 1715281 - DNA, 15 bp, Homo sapiens
ttgttacacaggtaa

SEQ ID NO: 1715282 - DNA, 15 bp, Homo sapiens
tgttacacaggtaaa

SEQ ID NO: 1715283 - DNA, 15 bp, Homo sapiens
gttacacaggtaaat

SEQ ID NO: 1715284 - DNA, 15 bp, Homo sapiens
ttacacaggtaaatg

SEQ ID NO: 1715285 - DNA, 15 bp, Homo sapiens
tacacaggtaaatgt

SEQ ID NO: 1715286 - DNA, 15 bp, Homo sapiens
acacaggtaaatgtg

SEQ ID NO: 1715287 - DNA, 15 bp, Homo sapiens
cacaggtaaatgtgt

SEQ ID NO: 1715288 - DNA, 15 bp, Homo sapiens
acaggtaaatgtgtg

SEQ ID NO: 1715289 - DNA, 15 bp, Homo sapiens
caggtaaatgtgtgc

SEQ ID NO: 1715290 - DNA, 15 bp, Homo sapiens
aggtaaatgtgtgct

SEQ ID NO: 1715291 - DNA, 15 bp, Homo sapiens
ggtaaatgtgtgcta

SEQ ID NO: 1715292 - DNA, 15 bp, Homo sapiens
gtaaatgtgtgctat

SEQ ID NO: 1715293 - DNA, 15 bp, Homo sapiens
taaatgtgtgctatg

SEQ ID NO: 1715294 - DNA, 15 bp, Homo sapiens
aaatgtgtgctatgg

SEQ ID NO: 1715295 - DNA, 15 bp, Homo sapiens
aatgtgtgctatggt

SEQ ID NO: 1715296 - DNA, 15 bp, Homo sapiens
atgtgtgctatggtg

SEQ ID NO: 1715297 - DNA, 15 bp, Homo sapiens
tgtgtgctatggtgg

SEQ ID NO: 1715298 - DNA, 15 bp, Homo sapiens
gtgtgctatggtggt

SEQ ID NO: 1715299 - DNA, 15 bp, Homo sapiens
tgtgctatggtggtg

SEQ ID NO: 1715300 - DNA, 15 bp, Homo sapiens
gtgctatggtggtgt

SEQ ID NO: 1715301 - DNA, 15 bp, Homo sapiens
tgctatggtggtgtg

SEQ ID NO: 1715302 - DNA, 15 bp, Homo sapiens
gctatggtggtgtgc

SEQ ID NO: 1715303 - DNA, 15 bp, Homo sapiens
ctatggtggtgtgct

SEQ ID NO: 1715304 - DNA, 15 bp, Homo sapiens
tatggtggtgtgctg

SEQ ID NO: 1715305 - DNA, 15 bp, Homo sapiens
atggtggtgtgctgc

SEQ ID NO: 1715306 - DNA, 15 bp, Homo sapiens
tggtggtgtgctgca

SEQ ID NO: 1715307 - DNA, 15 bp, Homo sapiens
ggtggtgtgctgcac

SEQ ID NO: 1715308 - DNA, 15 bp, Homo sapiens
gtggtgtgctgcaca

SEQ ID NO: 1715309 - DNA, 15 bp, Homo sapiens
tggtgtgctgcacag

SEQ ID NO: 1715310 - DNA, 15 bp, Homo sapiens
ggtgtgctgcacaga

SEQ ID NO: 1715311 - DNA, 15 bp, Homo sapiens
gtgtgctgcacagat

SEQ ID NO: 1715312 - DNA, 15 bp, Homo sapiens
tgtgctgcacagatc

SEQ ID NO: 1715313 - DNA, 15 bp, Homo sapiens
gtgctgcacagatca

SEQ ID NO: 1715314 - DNA, 15 bp, Homo sapiens
tgctgcacagatcaa

SEQ ID NO: 1715315 - DNA, 15 bp, Homo sapiens
gctgcacagatcaac

SEQ ID NO: 1715316 - DNA, 15 bp, Homo sapiens
ctgcacagatcaacc

SEQ ID NO: 1715317 - DNA, 15 bp, Homo sapiens
tgcacagatcaaccc

SEQ ID NO: 1715318 - DNA, 15 bp, Homo sapiens
gcacagatcaaccca

SEQ ID NO: 1715319 - DNA, 15 bp, Homo sapiens
cacagatcaacccat

SEQ ID NO: 1715320 - DNA, 15 bp, Homo sapiens
acagatcaacccatc

SEQ ID NO: 1715321 - DNA, 15 bp, Homo sapiens
cagatcaacccatca

SEQ ID NO: 1715322 - DNA, 15 bp, Homo sapiens
agatcaacccatcac

SEQ ID NO: 1715323 - DNA, 15 bp, Homo sapiens
gatcaacccatcacc

SEQ ID NO: 1715324 - DNA, 15 bp, Homo sapiens
atcaacccatcacca

SEQ ID NO: 1715325 - DNA, 15 bp, Homo sapiens
tcaacccatcaccat

SEQ ID NO: 1715326 - DNA, 15 bp, Homo sapiens
caacccatcaccatg

SEQ ID NO: 1715327 - DNA, 15 bp, Homo sapiens
aacccatcaccatgg

SEQ ID NO: 1715328 - DNA, 15 bp, Homo sapiens
acccatcaccatggt

SEQ ID NO: 1715329 - DNA, 15 bp, Homo sapiens
cccatcaccatggta

SEQ ID NO: 1715330 - DNA, 15 bp, Homo sapiens
ccatcaccatggtat

SEQ ID NO: 1715331 - DNA, 15 bp, Homo sapiens
catcaccatggtatt

SEQ ID NO: 1715332 - DNA, 15 bp, Homo sapiens
atcaccatggtatta

SEQ ID NO: 1715333 - DNA, 15 bp, Homo sapiens
tcaccatggtattaa

SEQ ID NO: 1715334 - DNA, 15 bp, Homo sapiens
caccatggtattaag

SEQ ID NO: 1715335 - DNA, 15 bp, Homo sapiens
accatggtattaagc

SEQ ID NO: 1715336 - DNA, 15 bp, Homo sapiens
ccatggtattaagcc

SEQ ID NO: 1715337 - DNA, 15 bp, Homo sapiens
catggtattaagccc

SEQ ID NO: 1715338 - DNA, 15 bp, Homo sapiens
atggtattaagccca

SEQ ID NO: 1715339 - DNA, 15 bp, Homo sapiens
tggtattaagcccag

SEQ ID NO: 1715340 - DNA, 15 bp, Homo sapiens
ggtattaagcccagc

SEQ ID NO: 1715341 - DNA, 15 bp, Homo sapiens
gtattaagcccagca

SEQ ID NO: 1715342 - DNA, 15 bp, Homo sapiens
tattaagcccagcat

SEQ ID NO: 1715343 - DNA, 15 bp, Homo sapiens
attaagcccagcatc

SEQ ID NO: 1715344 - DNA, 15 bp, Homo sapiens
ttaagcccagcatcc

SEQ ID NO: 1715345 - DNA, 15 bp, Homo sapiens
taagcccagcatcca

SEQ ID NO: 1715346 - DNA, 15 bp, Homo sapiens
aagcccagcatccat

SEQ ID NO: 1715347 - DNA, 15 bp, Homo sapiens
agcccagcatccatt

SEQ ID NO: 1715348 - DNA, 15 bp, Homo sapiens
gcccagcatccatta

SEQ ID NO: 1715349 - DNA, 15 bp, Homo sapiens
cccagcatccattag

SEQ ID NO: 1715350 - DNA, 15 bp, Homo sapiens
ccagcatccattagc

SEQ ID NO: 1715351 - DNA, 15 bp, Homo sapiens
cagcatccattagct

SEQ ID NO: 1715352 - DNA, 15 bp, Homo sapiens
agcatccattagctc

SEQ ID NO: 1715353 - DNA, 15 bp, Homo sapiens
gcatccattagctct

SEQ ID NO: 1715354 - DNA, 15 bp, Homo sapiens
catccattagctctc

SEQ ID NO: 1715355 - DNA, 15 bp, Homo sapiens
atccattagctctcc

SEQ ID NO: 1715356 - DNA, 15 bp, Homo sapiens
tccattagctctcct

SEQ ID NO: 1715357 - DNA, 15 bp, Homo sapiens
ccattagctctcctg

SEQ ID NO: 1715358 - DNA, 15 bp, Homo sapiens
cattagctctcctga

SEQ ID NO: 1715359 - DNA, 15 bp, Homo sapiens
attagctctcctgat

SEQ ID NO: 1715360 - DNA, 15 bp, Homo sapiens
ttagctctcctgatg

SEQ ID NO: 1715361 - DNA, 15 bp, Homo sapiens
tagctctcctgatgc

SEQ ID NO: 1715362 - DNA, 15 bp, Homo sapiens
agctctcctgatgct

SEQ ID NO: 1715363 - DNA, 15 bp, Homo sapiens
gctctcctgatgctc

SEQ ID NO: 1715364 - DNA, 15 bp, Homo sapiens
ctctcctgatgctct

SEQ ID NO: 1715365 - DNA, 15 bp, Homo sapiens
tctcctgatgctctc

SEQ ID NO: 1715366 - DNA, 15 bp, Homo sapiens
ctcctgatgctctcc

SEQ ID NO: 1715367 - DNA, 15 bp, Homo sapiens
tcctgatgctctccc

SEQ ID NO: 1715368 - DNA, 15 bp, Homo sapiens
cctgatgctctccct

SEQ ID NO: 1715369 - DNA, 15 bp, Homo sapiens
ctgatgctctccctc

SEQ ID NO: 1715370 - DNA, 15 bp, Homo sapiens
tgatgctctccctct

SEQ ID NO: 1715371 - DNA, 15 bp, Homo sapiens
gatgctctccctctc

SEQ ID NO: 1715372 - DNA, 15 bp, Homo sapiens
atgctctccctctcc

SEQ ID NO: 1715373 - DNA, 15 bp, Homo sapiens
tgctctccctctccc

SEQ ID NO: 1715374 - DNA, 15 bp, Homo sapiens
gctctccctctcccc

SEQ ID NO: 1715375 - DNA, 15 bp, Homo sapiens
tctccctctccccac

SEQ ID NO: 1715376 - DNA, 15 bp, Homo sapiens
ctccctctccccacc

SEQ ID NO: 1715377 - DNA, 15 bp, Homo sapiens
tccctctccccaccc

SEQ ID NO: 1715378 - DNA, 15 bp, Homo sapiens
ccctctccccaccct

SEQ ID NO: 1715379 - DNA, 15 bp, Homo sapiens
cctctccccaccctt

SEQ ID NO: 1715380 - DNA, 15 bp, Homo sapiens
ctctccccacccttc

SEQ ID NO: 1715381 - DNA, 15 bp, Homo sapiens
tctccccacccttcc

SEQ ID NO: 1715382 - DNA, 15 bp, Homo sapiens
ctccccacccttccc

SEQ ID NO: 1715383 - DNA, 15 bp, Homo sapiens
tccccacccttcccc

SEQ ID NO: 1715384 - DNA, 15 bp, Homo sapiens
ccccacccttccccg

SEQ ID NO: 1715385 - DNA, 15 bp, Homo sapiens
cccacccttccccgc

SEQ ID NO: 1715386 - DNA, 15 bp, Homo sapiens
ccacccttccccgct

SEQ ID NO: 1715387 - DNA, 15 bp, Homo sapiens
cacccttccccgcta

SEQ ID NO: 1715388 - DNA, 15 bp, Homo sapiens
acccttccccgctac

SEQ ID NO: 1715389 - DNA, 15 bp, Homo sapiens
cccttccccgctaca

SEQ ID NO: 1715390 - DNA, 15 bp, Homo sapiens
ccttccccgctacag

SEQ ID NO: 1715391 - DNA, 15 bp, Homo sapiens
cttccccgctacagg

SEQ ID NO: 1715392 - DNA, 15 bp, Homo sapiens
ttccccgctacaggc

SEQ ID NO: 1715393 - DNA, 15 bp, Homo sapiens
tccccgctacaggcc

SEQ ID NO: 1715394 - DNA, 15 bp, Homo sapiens
ccccgctacaggccc

SEQ ID NO: 1715395 - DNA, 15 bp, Homo sapiens
cccgctacaggcccc

SEQ ID NO: 1715396 - DNA, 15 bp, Homo sapiens
ccgctacaggcccca

SEQ ID NO: 1715397 - DNA, 15 bp, Homo sapiens
cgctacaggccccag

SEQ ID NO: 1715398 - DNA, 15 bp, Homo sapiens
gctacaggccccagt

SEQ ID NO: 1715399 - DNA, 15 bp, Homo sapiens
ctacaggccccagtg

SEQ ID NO: 1715400 - DNA, 15 bp, Homo sapiens
tacaggccccagtgt

SEQ ID NO: 1715401 - DNA, 15 bp, Homo sapiens
acaggccccagtgtg

SEQ ID NO: 1715402 - DNA, 15 bp, Homo sapiens
caggccccagtgtgt

SEQ ID NO: 1715403 - DNA, 15 bp, Homo sapiens
aggccccagtgtgtg

SEQ ID NO: 1715404 - DNA, 15 bp, Homo sapiens
ggccccagtgtgtgt

SEQ ID NO: 1715405 - DNA, 15 bp, Homo sapiens
gccccagtgtgtgtt

SEQ ID NO: 1715406 - DNA, 15 bp, Homo sapiens
ccccagtgtgtgttg

SEQ ID NO: 1715407 - DNA, 15 bp, Homo sapiens
cccagtgtgtgttgt

SEQ ID NO: 1715408 - DNA, 15 bp, Homo sapiens
ccagtgtgtgttgtt

SEQ ID NO: 1715409 - DNA, 15 bp, Homo sapiens
cagtgtgtgttgttc

SEQ ID NO: 1715410 - DNA, 15 bp, Homo sapiens
agtgtgtgttgttcc

SEQ ID NO: 1715411 - DNA, 15 bp, Homo sapiens
gtgtgtgttgttccc

SEQ ID NO: 1715412 - DNA, 15 bp, Homo sapiens
tgtgtgttgttcccc

SEQ ID NO: 1715413 - DNA, 15 bp, Homo sapiens
gtgtgttgttcccct

SEQ ID NO: 1715414 - DNA, 15 bp, Homo sapiens
tgtgttgttcccctt

SEQ ID NO: 1715415 - DNA, 15 bp, Homo sapiens
gtgttgttccccttc

SEQ ID NO: 1715416 - DNA, 15 bp, Homo sapiens
tgttgttccccttcc

SEQ ID NO: 1715417 - DNA, 15 bp, Homo sapiens
gttgttccccttcct

SEQ ID NO: 1715418 - DNA, 15 bp, Homo sapiens
ttgttccccttcctg

SEQ ID NO: 1715419 - DNA, 15 bp, Homo sapiens
tgttccccttcctgg

SEQ ID NO: 1715420 - DNA, 15 bp, Homo sapiens
gttccccttcctggg

SEQ ID NO: 1715421 - DNA, 15 bp, Homo sapiens
ttccccttcctgggt

SEQ ID NO: 1715422 - DNA, 15 bp, Homo sapiens
tccccttcctgggtc

SEQ ID NO: 1715423 - DNA, 15 bp, Homo sapiens
ccccttcctgggtct

SEQ ID NO: 1715424 - DNA, 15 bp, Homo sapiens
cccttcctgggtcta

SEQ ID NO: 1715425 - DNA, 15 bp, Homo sapiens
ccttcctgggtctat

SEQ ID NO: 1715426 - DNA, 15 bp, Homo sapiens
cttcctgggtctatt

SEQ ID NO: 1715427 - DNA, 15 bp, Homo sapiens
ttcctgggtctattt

SEQ ID NO: 1715428 - DNA, 15 bp, Homo sapiens
tcctgggtctatttt

SEQ ID NO: 1715429 - DNA, 15 bp, Homo sapiens
cctgggtctatttta

SEQ ID NO: 1715430 - DNA, 15 bp, Homo sapiens
ctgggtctattttat

SEQ ID NO: 1715431 - DNA, 15 bp, Homo sapiens
tgggtctattttatg

SEQ ID NO: 1715432 - DNA, 15 bp, Homo sapiens
gggtctattttatgg

SEQ ID NO: 1715433 - DNA, 15 bp, Homo sapiens
ggtctattttatggt

SEQ ID NO: 1715434 - DNA, 15 bp, Homo sapiens
gtctattttatggta

SEQ ID NO: 1715435 - DNA, 15 bp, Homo sapiens
tctattttatggtat

SEQ ID NO: 1715436 - DNA, 15 bp, Homo sapiens
ctattttatggtatg

SEQ ID NO: 1715437 - DNA, 15 bp, Homo sapiens
tattttatggtatgt

SEQ ID NO: 1715438 - DNA, 15 bp, Homo sapiens
attttatggtatgta

SEQ ID NO: 1715439 - DNA, 15 bp, Homo sapiens
ttttatggtatgtat

SEQ ID NO: 1715440 - DNA, 15 bp, Homo sapiens
tttatggtatgtatg

SEQ ID NO: 1715441 - DNA, 15 bp, Homo sapiens
ttatggtatgtatgt

SEQ ID NO: 1715442 - DNA, 15 bp, Homo sapiens
tatggtatgtatgtg

SEQ ID NO: 1715443 - DNA, 15 bp, Homo sapiens
atggtatgtatgtgt

SEQ ID NO: 1715444 - DNA, 15 bp, Homo sapiens
tggtatgtatgtgtg

SEQ ID NO: 1715445 - DNA, 15 bp, Homo sapiens
ggtatgtatgtgtgt

SEQ ID NO: 1715446 - DNA, 15 bp, Homo sapiens
gtatgtatgtgtgta

SEQ ID NO: 1715447 - DNA, 15 bp, Homo sapiens
tatgtatgtgtgtat

SEQ ID NO: 1715448 - DNA, 15 bp, Homo sapiens
atgtatgtgtgtatg

SEQ ID NO: 1715449 - DNA, 15 bp, Homo sapiens
tgtatgtgtgtatgt

SEQ ID NO: 1715450 - DNA, 15 bp, Homo sapiens
gtatgtgtgtatgtg

SEQ ID NO: 1715451 - DNA, 15 bp, Homo sapiens
tatgtgtgtatgtgt

SEQ ID NO: 1715452 - DNA, 15 bp, Homo sapiens
atgtgtgtatgtgtg

SEQ ID NO: 1715453 - DNA, 15 bp, Homo sapiens
tgtgtgtatgtgtgt

SEQ ID NO: 1715454 - DNA, 15 bp, Homo sapiens
gtgtgtatgtgtgtg

SEQ ID NO: 1715455 - DNA, 15 bp, Homo sapiens
tgtgtatgtgtgtgt

SEQ ID NO: 1715456 - DNA, 15 bp, Homo sapiens
gtgtatgtgtgtgtg

SEQ ID NO: 1715457 - DNA, 15 bp, Homo sapiens
gtgtgtgtgtgtatc

SEQ ID NO: 1715458 - DNA, 15 bp, Homo sapiens
tgtgtgtgtgtatct

SEQ ID NO: 1715459 - DNA, 15 bp, Homo sapiens
gtgtgtgtgtatcta

SEQ ID NO: 1715460 - DNA, 15 bp, Homo sapiens
tgtgtgtgtatctat

SEQ ID NO: 1715461 - DNA, 15 bp, Homo sapiens
gtgtgtgtatctatt

SEQ ID NO: 1715462 - DNA, 15 bp, Homo sapiens
tgtgtgtatctattt

SEQ ID NO: 1715463 - DNA, 15 bp, Homo sapiens
gtgtgtatctattta

SEQ ID NO: 1715464 - DNA, 15 bp, Homo sapiens
tgtgtatctatttat

SEQ ID NO: 1715465 - DNA, 15 bp, Homo sapiens
gtgtatctatttatg

SEQ ID NO: 1715466 - DNA, 15 bp, Homo sapiens
tgtatctatttatgt

SEQ ID NO: 1715467 - DNA, 15 bp, Homo sapiens
gtatctatttatgtg

SEQ ID NO: 1715468 - DNA, 15 bp, Homo sapiens
tatctatttatgtgt

SEQ ID NO: 1715469 - DNA, 15 bp, Homo sapiens
atctatttatgtgta

SEQ ID NO: 1715470 - DNA, 15 bp, Homo sapiens
tctatttatgtgtat

SEQ ID NO: 1715471 - DNA, 15 bp, Homo sapiens
ctatttatgtgtata

SEQ ID NO: 1715472 - DNA, 15 bp, Homo sapiens
tatttatgtgtatat

SEQ ID NO: 1715473 - DNA, 15 bp, Homo sapiens
atttatgtgtatata

SEQ ID NO: 1715474 - DNA, 15 bp, Homo sapiens
tttatgtgtatatat

SEQ ID NO: 1715475 - DNA, 15 bp, Homo sapiens
ttatgtgtatatatt

SEQ ID NO: 1715476 - DNA, 15 bp, Homo sapiens
tatgtgtatatatta

SEQ ID NO: 1715477 - DNA, 15 bp, Homo sapiens
atgtgtatatattat

SEQ ID NO: 1715478 - DNA, 15 bp, Homo sapiens
tgtgtatatattatg

SEQ ID NO: 1715479 - DNA, 15 bp, Homo sapiens
gtgtatatattatga

SEQ ID NO: 1715480 - DNA, 15 bp, Homo sapiens
tgtatatattatgat

SEQ ID NO: 1715481 - DNA, 15 bp, Homo sapiens
gtatatattatgata

SEQ ID NO: 1715482 - DNA, 15 bp, Homo sapiens
tatatattatgatat

SEQ ID NO: 1715483 - DNA, 15 bp, Homo sapiens
atatattatgatata

SEQ ID NO: 1715484 - DNA, 15 bp, Homo sapiens
tatattatgatatat

SEQ ID NO: 1715485 - DNA, 15 bp, Homo sapiens
atattatgatatata

SEQ ID NO: 1715486 - DNA, 15 bp, Homo sapiens
tattatgatatatac

SEQ ID NO: 1715487 - DNA, 15 bp, Homo sapiens
attatgatatataca

SEQ ID NO: 1715488 - DNA, 15 bp, Homo sapiens
ttatgatatatacac

SEQ ID NO: 1715489 - DNA, 15 bp, Homo sapiens
tatgatatatacacc

SEQ ID NO: 1715490 - DNA, 15 bp, Homo sapiens
atgatatatacacca

SEQ ID NO: 1715491 - DNA, 15 bp, Homo sapiens
tgatatatacaccac

SEQ ID NO: 1715492 - DNA, 15 bp, Homo sapiens
gatatatacaccaca

SEQ ID NO: 1715493 - DNA, 15 bp, Homo sapiens
atatatacaccacac

SEQ ID NO: 1715494 - DNA, 15 bp, Homo sapiens
tatatacaccacact

SEQ ID NO: 1715495 - DNA, 15 bp, Homo sapiens
atatacaccacactt

SEQ ID NO: 1715496 - DNA, 15 bp, Homo sapiens
tatacaccacacttt

SEQ ID NO: 1715497 - DNA, 15 bp, Homo sapiens
atacaccacactttt

SEQ ID NO: 1715498 - DNA, 15 bp, Homo sapiens
tacaccacacttttt

SEQ ID NO: 1715499 - DNA, 15 bp, Homo sapiens
acaccacactttttt

SEQ ID NO: 1715500 - DNA, 15 bp, Homo sapiens
caccacacttttttc

SEQ ID NO: 1715501 - DNA, 15 bp, Homo sapiens
accacacttttttca

SEQ ID NO: 1715502 - DNA, 15 bp, Homo sapiens
ccacacttttttcaa

SEQ ID NO: 1715503 - DNA, 15 bp, Homo sapiens
cacacttttttcaaa

SEQ ID NO: 1715504 - DNA, 15 bp, Homo sapiens
acacttttttcaaac

SEQ ID NO: 1715505 - DNA, 15 bp, Homo sapiens
cacttttttcaaact

SEQ ID NO: 1715506 - DNA, 15 bp, Homo sapiens
acttttttcaaacta

SEQ ID NO: 1715507 - DNA, 15 bp, Homo sapiens
cttttttcaaactat

SEQ ID NO: 1715508 - DNA, 15 bp, Homo sapiens
ttttttcaaactatt

SEQ ID NO: 1715509 - DNA, 15 bp, Homo sapiens
tttttcaaactatta

SEQ ID NO: 1715510 - DNA, 15 bp, Homo sapiens
ttttcaaactattat

SEQ ID NO: 1715511 - DNA, 15 bp, Homo sapiens
tttcaaactattatt

SEQ ID NO: 1715512 - DNA, 15 bp, Homo sapiens
ttcaaactattattt

SEQ ID NO: 1715513 - DNA, 15 bp, Homo sapiens
tcaaactattatttt

SEQ ID NO: 1715514 - DNA, 15 bp, Homo sapiens
caaactattatttta

SEQ ID NO: 1715515 - DNA, 15 bp, Homo sapiens
aaactattattttag

SEQ ID NO: 1715516 - DNA, 15 bp, Homo sapiens
aactattattttagg

SEQ ID NO: 1715517 - DNA, 15 bp, Homo sapiens
actattattttaggt

SEQ ID NO: 1715518 - DNA, 15 bp, Homo sapiens
ctattattttaggtt

SEQ ID NO: 1715519 - DNA, 15 bp, Homo sapiens
tattattttaggttt

SEQ ID NO: 1715520 - DNA, 15 bp, Homo sapiens
attattttaggttta

SEQ ID NO: 1715521 - DNA, 15 bp, Homo sapiens
ttattttaggtttag

SEQ ID NO: 1715522 - DNA, 15 bp, Homo sapiens
tattttaggtttagg

SEQ ID NO: 1715523 - DNA, 15 bp, Homo sapiens
attttaggtttaggg

SEQ ID NO: 1715524 - DNA, 15 bp, Homo sapiens
ttttaggtttaggga

SEQ ID NO: 1715525 - DNA, 15 bp, Homo sapiens
tttaggtttagggat

SEQ ID NO: 1715526 - DNA, 15 bp, Homo sapiens
ttaggtttagggata

SEQ ID NO: 1715527 - DNA, 15 bp, Homo sapiens
taggtttagggatac

SEQ ID NO: 1715528 - DNA, 15 bp, Homo sapiens
aggtttagggataca

SEQ ID NO: 1715529 - DNA, 15 bp, Homo sapiens
ggtttagggatacat

SEQ ID NO: 1715530 - DNA, 15 bp, Homo sapiens
gtttagggatacatg

SEQ ID NO: 1715531 - DNA, 15 bp, Homo sapiens
tttagggatacatgt

SEQ ID NO: 1715532 - DNA, 15 bp, Homo sapiens
ttagggatacatgtg

SEQ ID NO: 1715533 - DNA, 15 bp, Homo sapiens
tagggatacatgtgc

SEQ ID NO: 1715534 - DNA, 15 bp, Homo sapiens
agggatacatgtgca

SEQ ID NO: 1715535 - DNA, 15 bp, Homo sapiens
gggatacatgtgcaa

SEQ ID NO: 1715536 - DNA, 15 bp, Homo sapiens
ggatacatgtgcaag

SEQ ID NO: 1715537 - DNA, 15 bp, Homo sapiens
gatacatgtgcaagt

SEQ ID NO: 1715538 - DNA, 15 bp, Homo sapiens
atacatgtgcaagtt

SEQ ID NO: 1715539 - DNA, 15 bp, Homo sapiens
tacatgtgcaagttt

SEQ ID NO: 1715540 - DNA, 15 bp, Homo sapiens
acatgtgcaagtttg

SEQ ID NO: 1715541 - DNA, 15 bp, Homo sapiens
catgtgcaagtttgt

SEQ ID NO: 1715542 - DNA, 15 bp, Homo sapiens
atgtgcaagtttgtt

SEQ ID NO: 1715543 - DNA, 15 bp, Homo sapiens
tgtgcaagtttgtta

SEQ ID NO: 1715544 - DNA, 15 bp, Homo sapiens
gtgcaagtttgttat

SEQ ID NO: 1715545 - DNA, 15 bp, Homo sapiens
tgcaagtttgttata

SEQ ID NO: 1715546 - DNA, 15 bp, Homo sapiens
gcaagtttgttatat

SEQ ID NO: 1715547 - DNA, 15 bp, Homo sapiens
caagtttgttatata

SEQ ID NO: 1715548 - DNA, 15 bp, Homo sapiens
aagtttgttatatag

SEQ ID NO: 1715549 - DNA, 15 bp, Homo sapiens
agtttgttatatagg

SEQ ID NO: 1715550 - DNA, 15 bp, Homo sapiens
gtttgttatataggt

SEQ ID NO: 1715551 - DNA, 15 bp, Homo sapiens
tttgttatataggta

SEQ ID NO: 1715552 - DNA, 15 bp, Homo sapiens
ttgttatataggtaa

SEQ ID NO: 1715553 - DNA, 15 bp, Homo sapiens
tgttatataggtaaa

SEQ ID NO: 1715554 - DNA, 15 bp, Homo sapiens
gttatataggtaaac

SEQ ID NO: 1715555 - DNA, 15 bp, Homo sapiens
ttatataggtaaact

SEQ ID NO: 1715556 - DNA, 15 bp, Homo sapiens
tatataggtaaactg

SEQ ID NO: 1715557 - DNA, 15 bp, Homo sapiens
atataggtaaactgt

SEQ ID NO: 1715558 - DNA, 15 bp, Homo sapiens
tataggtaaactgtg

SEQ ID NO: 1715559 - DNA, 15 bp, Homo sapiens
ataggtaaactgtgt

SEQ ID NO: 1715560 - DNA, 15 bp, Homo sapiens
taggtaaactgtgtg

SEQ ID NO: 1715561 - DNA, 15 bp, Homo sapiens
aggtaaactgtgtgt

SEQ ID NO: 1715562 - DNA, 15 bp, Homo sapiens
ggtaaactgtgtgtc

SEQ ID NO: 1715563 - DNA, 15 bp, Homo sapiens
gtaaactgtgtgtct

SEQ ID NO: 1715564 - DNA, 15 bp, Homo sapiens
taaactgtgtgtctc

SEQ ID NO: 1715565 - DNA, 15 bp, Homo sapiens
aaactgtgtgtctct

SEQ ID NO: 1715566 - DNA, 15 bp, Homo sapiens
aactgtgtgtctctg

SEQ ID NO: 1715567 - DNA, 15 bp, Homo sapiens
actgtgtgtctctgg

SEQ ID NO: 1715568 - DNA, 15 bp, Homo sapiens
ctgtgtgtctctggg

SEQ ID NO: 1715569 - DNA, 15 bp, Homo sapiens
tgtgtgtctctgggg

SEQ ID NO: 1715570 - DNA, 15 bp, Homo sapiens
gtgtgtctctggggt

SEQ ID NO: 1715571 - DNA, 15 bp, Homo sapiens
tgtgtctctggggtt

SEQ ID NO: 1715572 - DNA, 15 bp, Homo sapiens
gtgtctctggggttt

SEQ ID NO: 1715573 - DNA, 15 bp, Homo sapiens
tgtctctggggtttg

SEQ ID NO: 1715574 - DNA, 15 bp, Homo sapiens
gtctctggggtttgg

SEQ ID NO: 1715575 - DNA, 15 bp, Homo sapiens
tctctggggtttggt

SEQ ID NO: 1715576 - DNA, 15 bp, Homo sapiens
ctctggggtttggtg

SEQ ID NO: 1715577 - DNA, 15 bp, Homo sapiens
tctggggtttggtgt

SEQ ID NO: 1715578 - DNA, 15 bp, Homo sapiens
ctggggtttggtgtg

SEQ ID NO: 1715579 - DNA, 15 bp, Homo sapiens
tggggtttggtgtgt

SEQ ID NO: 1715580 - DNA, 15 bp, Homo sapiens
ggggtttggtgtgta

SEQ ID NO: 1715581 - DNA, 15 bp, Homo sapiens
gggtttggtgtgtac

SEQ ID NO: 1715582 - DNA, 15 bp, Homo sapiens
ggtttggtgtgtaca

SEQ ID NO: 1715583 - DNA, 15 bp, Homo sapiens
gtttggtgtgtacag

SEQ ID NO: 1715584 - DNA, 15 bp, Homo sapiens
tttggtgtgtacaga

SEQ ID NO: 1715585 - DNA, 15 bp, Homo sapiens
ttggtgtgtacagat

SEQ ID NO: 1715586 - DNA, 15 bp, Homo sapiens
tggtgtgtacagatt

SEQ ID NO: 1715587 - DNA, 15 bp, Homo sapiens
ggtgtgtacagattt

SEQ ID NO: 1715588 - DNA, 15 bp, Homo sapiens
gtgtgtacagatttt

SEQ ID NO: 1715589 - DNA, 15 bp, Homo sapiens
tgtgtacagattttt

SEQ ID NO: 1715590 - DNA, 15 bp, Homo sapiens
gtgtacagatttttt

SEQ ID NO: 1715591 - DNA, 15 bp, Homo sapiens
tgtacagattttttc

SEQ ID NO: 1715592 - DNA, 15 bp, Homo sapiens
gtacagattttttca

SEQ ID NO: 1715593 - DNA, 15 bp, Homo sapiens
tacagattttttcac

SEQ ID NO: 1715594 - DNA, 15 bp, Homo sapiens
acagattttttcacc

SEQ ID NO: 1715595 - DNA, 15 bp, Homo sapiens
cagattttttcacca

SEQ ID NO: 1715596 - DNA, 15 bp, Homo sapiens
agattttttcaccac

SEQ ID NO: 1715597 - DNA, 15 bp, Homo sapiens
gattttttcaccacc

SEQ ID NO: 1715598 - DNA, 15 bp, Homo sapiens
attttttcaccaccc

SEQ ID NO: 1715599 - DNA, 15 bp, Homo sapiens
ttttttcaccaccca

SEQ ID NO: 1715600 - DNA, 15 bp, Homo sapiens
tttttcaccacccag

SEQ ID NO: 1715601 - DNA, 15 bp, Homo sapiens
ttttcaccacccagg

SEQ ID NO: 1715602 - DNA, 15 bp, Homo sapiens
tttcaccacccaggt

SEQ ID NO: 1715603 - DNA, 15 bp, Homo sapiens
ttcaccacccaggta

SEQ ID NO: 1715604 - DNA, 15 bp, Homo sapiens
tcaccacccaggtaa

SEQ ID NO: 1715605 - DNA, 15 bp, Homo sapiens
caccacccaggtaac

SEQ ID NO: 1715606 - DNA, 15 bp, Homo sapiens
accacccaggtaaca

SEQ ID NO: 1715607 - DNA, 15 bp, Homo sapiens
ccacccaggtaacaa

SEQ ID NO: 1715608 - DNA, 15 bp, Homo sapiens
cacccaggtaacaag

SEQ ID NO: 1715609 - DNA, 15 bp, Homo sapiens
acccaggtaacaagt

SEQ ID NO: 1715610 - DNA, 15 bp, Homo sapiens
cccaggtaacaagtg

SEQ ID NO: 1715611 - DNA, 15 bp, Homo sapiens
ccaggtaacaagtgt

SEQ ID NO: 1715612 - DNA, 15 bp, Homo sapiens
caggtaacaagtgta

SEQ ID NO: 1715613 - DNA, 15 bp, Homo sapiens
aggtaacaagtgtag

SEQ ID NO: 1715614 - DNA, 15 bp, Homo sapiens
ggtaacaagtgtagt

SEQ ID NO: 1715615 - DNA, 15 bp, Homo sapiens
gtaacaagtgtagta

SEQ ID NO: 1715616 - DNA, 15 bp, Homo sapiens
taacaagtgtagtac

SEQ ID NO: 1715617 - DNA, 15 bp, Homo sapiens
aacaagtgtagtacc

SEQ ID NO: 1715618 - DNA, 15 bp, Homo sapiens
acaagtgtagtacct

SEQ ID NO: 1715619 - DNA, 15 bp, Homo sapiens
caagtgtagtacctg

SEQ ID NO: 1715620 - DNA, 15 bp, Homo sapiens
aagtgtagtacctga

SEQ ID NO: 1715621 - DNA, 15 bp, Homo sapiens
agtgtagtacctgat

SEQ ID NO: 1715622 - DNA, 15 bp, Homo sapiens
gtgtagtacctgata

SEQ ID NO: 1715623 - DNA, 15 bp, Homo sapiens
tgtagtacctgatag

SEQ ID NO: 1715624 - DNA, 15 bp, Homo sapiens
gtagtacctgatagg

SEQ ID NO: 1715625 - DNA, 15 bp, Homo sapiens
tagtacctgataggt

SEQ ID NO: 1715626 - DNA, 15 bp, Homo sapiens
agtacctgataggta

SEQ ID NO: 1715627 - DNA, 15 bp, Homo sapiens
gtacctgataggtag

SEQ ID NO: 1715628 - DNA, 15 bp, Homo sapiens
tacctgataggtagt

SEQ ID NO: 1715629 - DNA, 15 bp, Homo sapiens
acctgataggtagtt

SEQ ID NO: 1715630 - DNA, 15 bp, Homo sapiens
cctgataggtagttt

SEQ ID NO: 1715631 - DNA, 15 bp, Homo sapiens
ctgataggtagtttt

SEQ ID NO: 1715632 - DNA, 15 bp, Homo sapiens
tgataggtagttttt

SEQ ID NO: 1715633 - DNA, 15 bp, Homo sapiens
gataggtagtttttt

SEQ ID NO: 1715634 - DNA, 15 bp, Homo sapiens
ataggtagttttttg

SEQ ID NO: 1715635 - DNA, 15 bp, Homo sapiens
taggtagttttttga

SEQ ID NO: 1715636 - DNA, 15 bp, Homo sapiens
aggtagttttttgat

SEQ ID NO: 1715637 - DNA, 15 bp, Homo sapiens
ggtagttttttgatc

SEQ ID NO: 1715638 - DNA, 15 bp, Homo sapiens
gtagttttttgatct

SEQ ID NO: 1715639 - DNA, 15 bp, Homo sapiens
tagttttttgatctt

SEQ ID NO: 1715640 - DNA, 15 bp, Homo sapiens
agttttttgatcttc

SEQ ID NO: 1715641 - DNA, 15 bp, Homo sapiens
gttttttgatcttct

SEQ ID NO: 1715642 - DNA, 15 bp, Homo sapiens
ttttttgatcttctg

SEQ ID NO: 1715643 - DNA, 15 bp, Homo sapiens
tttttgatcttctgt

SEQ ID NO: 1715644 - DNA, 15 bp, Homo sapiens
ttttgatcttctgtc

SEQ ID NO: 1715645 - DNA, 15 bp, Homo sapiens
tttgatcttctgtcc

SEQ ID NO: 1715646 - DNA, 15 bp, Homo sapiens
ttgatcttctgtcct

SEQ ID NO: 1715647 - DNA, 15 bp, Homo sapiens
tgatcttctgtcctc

SEQ ID NO: 1715648 - DNA, 15 bp, Homo sapiens
gatcttctgtcctct

SEQ ID NO: 1715649 - DNA, 15 bp, Homo sapiens
atcttctgtcctctc

SEQ ID NO: 1715650 - DNA, 15 bp, Homo sapiens
tcttctgtcctctca

SEQ ID NO: 1715651 - DNA, 15 bp, Homo sapiens
cttctgtcctctcac

SEQ ID NO: 1715652 - DNA, 15 bp, Homo sapiens
ttctgtcctctcacc

SEQ ID NO: 1715653 - DNA, 15 bp, Homo sapiens
tctgtcctctcaccc

SEQ ID NO: 1715654 - DNA, 15 bp, Homo sapiens
ctgtcctctcaccct

SEQ ID NO: 1715655 - DNA, 15 bp, Homo sapiens
tgtcctctcacccta

SEQ ID NO: 1715656 - DNA, 15 bp, Homo sapiens
gtcctctcaccctac

SEQ ID NO: 1715657 - DNA, 15 bp, Homo sapiens
tcctctcaccctaca

SEQ ID NO: 1715658 - DNA, 15 bp, Homo sapiens
cctctcaccctacac

SEQ ID NO: 1715659 - DNA, 15 bp, Homo sapiens
ctctcaccctacacc

SEQ ID NO: 1715660 - DNA, 15 bp, Homo sapiens
tctcaccctacaccc

SEQ ID NO: 1715661 - DNA, 15 bp, Homo sapiens
ctcaccctacaccct

SEQ ID NO: 1715662 - DNA, 15 bp, Homo sapiens
tcaccctacaccctc

SEQ ID NO: 1715663 - DNA, 15 bp, Homo sapiens
caccctacaccctca

SEQ ID NO: 1715664 - DNA, 15 bp, Homo sapiens
accctacaccctcaa

SEQ ID NO: 1715665 - DNA, 15 bp, Homo sapiens
ccctacaccctcaag

SEQ ID NO: 1715666 - DNA, 15 bp, Homo sapiens
cctacaccctcaagt

SEQ ID NO: 1715667 - DNA, 15 bp, Homo sapiens
ctacaccctcaagta

SEQ ID NO: 1715668 - DNA, 15 bp, Homo sapiens
tacaccctcaagtaa

SEQ ID NO: 1715669 - DNA, 15 bp, Homo sapiens
acaccctcaagtaat

SEQ ID NO: 1715670 - DNA, 15 bp, Homo sapiens
caccctcaagtaatc

SEQ ID NO: 1715671 - DNA, 15 bp, Homo sapiens
accctcaagtaatcc

SEQ ID NO: 1715672 - DNA, 15 bp, Homo sapiens
ccctcaagtaatccc

SEQ ID NO: 1715673 - DNA, 15 bp, Homo sapiens
cctcaagtaatcccc

SEQ ID NO: 1715674 - DNA, 15 bp, Homo sapiens
ctcaagtaatccccc

SEQ ID NO: 1715675 - DNA, 15 bp, Homo sapiens
tcaagtaatccccca

SEQ ID NO: 1715676 - DNA, 15 bp, Homo sapiens
caagtaatcccccag

SEQ ID NO: 1715677 - DNA, 15 bp, Homo sapiens
aagtaatcccccagt

SEQ ID NO: 1715678 - DNA, 15 bp, Homo sapiens
agtaatcccccagtg

SEQ ID NO: 1715679 - DNA, 15 bp, Homo sapiens
gtaatcccccagtgt

SEQ ID NO: 1715680 - DNA, 15 bp, Homo sapiens
taatcccccagtgtg

SEQ ID NO: 1715681 - DNA, 15 bp, Homo sapiens
aatcccccagtgtgt

SEQ ID NO: 1715682 - DNA, 15 bp, Homo sapiens
atcccccagtgtgtg

SEQ ID NO: 1715683 - DNA, 15 bp, Homo sapiens
tcccccagtgtgtgt

SEQ ID NO: 1715684 - DNA, 15 bp, Homo sapiens
cccccagtgtgtgtt

SEQ ID NO: 1715685 - DNA, 15 bp, Homo sapiens
tgtgttgttcccctc

SEQ ID NO: 1715686 - DNA, 15 bp, Homo sapiens
gtgttgttcccctct

SEQ ID NO: 1715687 - DNA, 15 bp, Homo sapiens
tgttgttcccctctt

SEQ ID NO: 1715688 - DNA, 15 bp, Homo sapiens
gttgttcccctcttc

SEQ ID NO: 1715689 - DNA, 15 bp, Homo sapiens
ttgttcccctcttca

SEQ ID NO: 1715690 - DNA, 15 bp, Homo sapiens
tgttcccctcttcat

SEQ ID NO: 1715691 - DNA, 15 bp, Homo sapiens
gttcccctcttcatg

SEQ ID NO: 1715692 - DNA, 15 bp, Homo sapiens
ttcccctcttcatgt

SEQ ID NO: 1715693 - DNA, 15 bp, Homo sapiens
tcccctcttcatgtc

SEQ ID NO: 1715694 - DNA, 15 bp, Homo sapiens
cccctcttcatgtcc

SEQ ID NO: 1715695 - DNA, 15 bp, Homo sapiens
ccctcttcatgtcca

SEQ ID NO: 1715696 - DNA, 15 bp, Homo sapiens
cctcttcatgtccat

SEQ ID NO: 1715697 - DNA, 15 bp, Homo sapiens
ctcttcatgtccatg

SEQ ID NO: 1715698 - DNA, 15 bp, Homo sapiens
tcttcatgtccatgt

SEQ ID NO: 1715699 - DNA, 15 bp, Homo sapiens
cttcatgtccatgtg

SEQ ID NO: 1715700 - DNA, 15 bp, Homo sapiens
ttcatgtccatgtgt

SEQ ID NO: 1715701 - DNA, 15 bp, Homo sapiens
tcatgtccatgtgtt

SEQ ID NO: 1715702 - DNA, 15 bp, Homo sapiens
catgtccatgtgttc

SEQ ID NO: 1715703 - DNA, 15 bp, Homo sapiens
atgtccatgtgttct

SEQ ID NO: 1715704 - DNA, 15 bp, Homo sapiens
tgtccatgtgttctc

SEQ ID NO: 1715705 - DNA, 15 bp, Homo sapiens
gtccatgtgttctca

SEQ ID NO: 1715706 - DNA, 15 bp, Homo sapiens
tccatgtgttctcat

SEQ ID NO: 1715707 - DNA, 15 bp, Homo sapiens
ccatgtgttctcatt

SEQ ID NO: 1715708 - DNA, 15 bp, Homo sapiens
catgtgttctcattg

SEQ ID NO: 1715709 - DNA, 15 bp, Homo sapiens
atgtgttctcattgt

SEQ ID NO: 1715710 - DNA, 15 bp, Homo sapiens
tgtgttctcattgtt

SEQ ID NO: 1715711 - DNA, 15 bp, Homo sapiens
gtgttctcattgttt

SEQ ID NO: 1715712 - DNA, 15 bp, Homo sapiens
tgttctcattgttta

SEQ ID NO: 1715713 - DNA, 15 bp, Homo sapiens
gttctcattgtttag

SEQ ID NO: 1715714 - DNA, 15 bp, Homo sapiens
ttctcattgtttagc

SEQ ID NO: 1715715 - DNA, 15 bp, Homo sapiens
tctcattgtttagct

SEQ ID NO: 1715716 - DNA, 15 bp, Homo sapiens
ctcattgtttagctc

SEQ ID NO: 1715717 - DNA, 15 bp, Homo sapiens
tcattgtttagctcc

SEQ ID NO: 1715718 - DNA, 15 bp, Homo sapiens
cattgtttagctccc

SEQ ID NO: 1715719 - DNA, 15 bp, Homo sapiens
attgtttagctccca

SEQ ID NO: 1715720 - DNA, 15 bp, Homo sapiens
ttgtttagctcccac

SEQ ID NO: 1715721 - DNA, 15 bp, Homo sapiens
tgtttagctcccact

SEQ ID NO: 1715722 - DNA, 15 bp, Homo sapiens
gtttagctcccactt

SEQ ID NO: 1715723 - DNA, 15 bp, Homo sapiens
tttagctcccactta

SEQ ID NO: 1715724 - DNA, 15 bp, Homo sapiens
ttagctcccacttat

SEQ ID NO: 1715725 - DNA, 15 bp, Homo sapiens
tagctcccacttata

SEQ ID NO: 1715726 - DNA, 15 bp, Homo sapiens
agctcccacttataa

SEQ ID NO: 1715727 - DNA, 15 bp, Homo sapiens
gctcccacttataag

SEQ ID NO: 1715728 - DNA, 15 bp, Homo sapiens
ctcccacttataagt

SEQ ID NO: 1715729 - DNA, 15 bp, Homo sapiens
tcccacttataagtg

SEQ ID NO: 1715730 - DNA, 15 bp, Homo sapiens
cccacttataagtga

SEQ ID NO: 1715731 - DNA, 15 bp, Homo sapiens
ccacttataagtgag

SEQ ID NO: 1715732 - DNA, 15 bp, Homo sapiens
cacttataagtgaga

SEQ ID NO: 1715733 - DNA, 15 bp, Homo sapiens
acttataagtgagaa

SEQ ID NO: 1715734 - DNA, 15 bp, Homo sapiens
cttataagtgagaac

SEQ ID NO: 1715735 - DNA, 15 bp, Homo sapiens
ttataagtgagaaca

SEQ ID NO: 1715736 - DNA, 15 bp, Homo sapiens
tataagtgagaacat

SEQ ID NO: 1715737 - DNA, 15 bp, Homo sapiens
ataagtgagaacatg

SEQ ID NO: 1715738 - DNA, 15 bp, Homo sapiens
taagtgagaacatgc

SEQ ID NO: 1715739 - DNA, 15 bp, Homo sapiens
aagtgagaacatgca

SEQ ID NO: 1715740 - DNA, 15 bp, Homo sapiens
agtgagaacatgcag

SEQ ID NO: 1715741 - DNA, 15 bp, Homo sapiens
gtgagaacatgcagt

SEQ ID NO: 1715742 - DNA, 15 bp, Homo sapiens
tgagaacatgcagtg

SEQ ID NO: 1715743 - DNA, 15 bp, Homo sapiens
gagaacatgcagtgt

SEQ ID NO: 1715744 - DNA, 15 bp, Homo sapiens
agaacatgcagtgtt

SEQ ID NO: 1715745 - DNA, 15 bp, Homo sapiens
gaacatgcagtgttt

SEQ ID NO: 1715746 - DNA, 15 bp, Homo sapiens
aacatgcagtgtttg

SEQ ID NO: 1715747 - DNA, 15 bp, Homo sapiens
acatgcagtgtttgg

SEQ ID NO: 1715748 - DNA, 15 bp, Homo sapiens
catgcagtgtttggt

SEQ ID NO: 1715749 - DNA, 15 bp, Homo sapiens
cagtgtttggttttc

SEQ ID NO: 1715750 - DNA, 15 bp, Homo sapiens
agtgtttggttttct

SEQ ID NO: 1715751 - DNA, 15 bp, Homo sapiens
ttggttttctgttcc

SEQ ID NO: 1715752 - DNA, 15 bp, Homo sapiens
tggttttctgttcct

SEQ ID NO: 1715753 - DNA, 15 bp, Homo sapiens
ggttttctgttcctg

SEQ ID NO: 1715754 - DNA, 15 bp, Homo sapiens
gttttctgttcctgc

SEQ ID NO: 1715755 - DNA, 15 bp, Homo sapiens
ttttctgttcctgcg

SEQ ID NO: 1715756 - DNA, 15 bp, Homo sapiens
tttctgttcctgcgt

SEQ ID NO: 1715757 - DNA, 15 bp, Homo sapiens
ttctgttcctgcgtt

SEQ ID NO: 1715758 - DNA, 15 bp, Homo sapiens
tctgttcctgcgtta

SEQ ID NO: 1715759 - DNA, 15 bp, Homo sapiens
ctgttcctgcgttag

SEQ ID NO: 1715760 - DNA, 15 bp, Homo sapiens
tgttcctgcgttagt

SEQ ID NO: 1715761 - DNA, 15 bp, Homo sapiens
gttcctgcgttagtt

SEQ ID NO: 1715762 - DNA, 15 bp, Homo sapiens
ttcctgcgttagttt

SEQ ID NO: 1715763 - DNA, 15 bp, Homo sapiens
tcctgcgttagtttg

SEQ ID NO: 1715764 - DNA, 15 bp, Homo sapiens
cctgcgttagtttgc

SEQ ID NO: 1715765 - DNA, 15 bp, Homo sapiens
ctgcgttagtttgct

SEQ ID NO: 1715766 - DNA, 15 bp, Homo sapiens
tgcgttagtttgctg

SEQ ID NO: 1715767 - DNA, 15 bp, Homo sapiens
gcgttagtttgctga

SEQ ID NO: 1715768 - DNA, 15 bp, Homo sapiens
cgttagtttgctgag

SEQ ID NO: 1715769 - DNA, 15 bp, Homo sapiens
agtttgctgaggata

SEQ ID NO: 1715770 - DNA, 15 bp, Homo sapiens
gtttgctgaggataa

SEQ ID NO: 1715771 - DNA, 15 bp, Homo sapiens
tttgctgaggataaa

SEQ ID NO: 1715772 - DNA, 15 bp, Homo sapiens
ttgctgaggataaag

SEQ ID NO: 1715773 - DNA, 15 bp, Homo sapiens
tgctgaggataaagg

SEQ ID NO: 1715774 - DNA, 15 bp, Homo sapiens
gctgaggataaaggc

SEQ ID NO: 1715775 - DNA, 15 bp, Homo sapiens
ctgaggataaaggct

SEQ ID NO: 1715776 - DNA, 15 bp, Homo sapiens
tgaggataaaggctt

SEQ ID NO: 1715777 - DNA, 15 bp, Homo sapiens
gaggataaaggcttc

SEQ ID NO: 1715778 - DNA, 15 bp, Homo sapiens
aggataaaggcttct

SEQ ID NO: 1715779 - DNA, 15 bp, Homo sapiens
ggataaaggcttctg

SEQ ID NO: 1715780 - DNA, 15 bp, Homo sapiens
gataaaggcttctgg

SEQ ID NO: 1715781 - DNA, 15 bp, Homo sapiens
ataaaggcttctggc

SEQ ID NO: 1715782 - DNA, 15 bp, Homo sapiens
taaaggcttctggct

SEQ ID NO: 1715783 - DNA, 15 bp, Homo sapiens
aaaggcttctggctc

SEQ ID NO: 1715784 - DNA, 15 bp, Homo sapiens
aaggcttctggctcc

SEQ ID NO: 1715785 - DNA, 15 bp, Homo sapiens
aggcttctggctcca

SEQ ID NO: 1715786 - DNA, 15 bp, Homo sapiens
ggcttctggctccat

SEQ ID NO: 1715787 - DNA, 15 bp, Homo sapiens
gcttctggctccatc

SEQ ID NO: 1715788 - DNA, 15 bp, Homo sapiens
cttctggctccatcc

SEQ ID NO: 1715789 - DNA, 15 bp, Homo sapiens
ttctggctccatcca

SEQ ID NO: 1715790 - DNA, 15 bp, Homo sapiens
tctggctccatccat

SEQ ID NO: 1715791 - DNA, 15 bp, Homo sapiens
ctggctccatccatg

SEQ ID NO: 1715792 - DNA, 15 bp, Homo sapiens
tggctccatccatgt

SEQ ID NO: 1715793 - DNA, 15 bp, Homo sapiens
ggctccatccatgtt

SEQ ID NO: 1715794 - DNA, 15 bp, Homo sapiens
gctccatccatgttc

SEQ ID NO: 1715795 - DNA, 15 bp, Homo sapiens
ctccatccatgttcc

SEQ ID NO: 1715796 - DNA, 15 bp, Homo sapiens
tccatccatgttcct

SEQ ID NO: 1715797 - DNA, 15 bp, Homo sapiens
ccatccatgttcctg

SEQ ID NO: 1715798 - DNA, 15 bp, Homo sapiens
catccatgttcctgc

SEQ ID NO: 1715799 - DNA, 15 bp, Homo sapiens
atccatgttcctgca

SEQ ID NO: 1715800 - DNA, 15 bp, Homo sapiens
tccatgttcctgcaa

SEQ ID NO: 1715801 - DNA, 15 bp, Homo sapiens
ccatgttcctgcaaa

SEQ ID NO: 1715802 - DNA, 15 bp, Homo sapiens
catgttcctgcaaag

SEQ ID NO: 1715803 - DNA, 15 bp, Homo sapiens
atgttcctgcaaagg

SEQ ID NO: 1715804 - DNA, 15 bp, Homo sapiens
tgttcctgcaaagga

SEQ ID NO: 1715805 - DNA, 15 bp, Homo sapiens
gttcctgcaaaggac

SEQ ID NO: 1715806 - DNA, 15 bp, Homo sapiens
ttcctgcaaaggaca

SEQ ID NO: 1715807 - DNA, 15 bp, Homo sapiens
tcctgcaaaggacat

SEQ ID NO: 1715808 - DNA, 15 bp, Homo sapiens
cctgcaaaggacatg

SEQ ID NO: 1715809 - DNA, 15 bp, Homo sapiens
ctgcaaaggacatga

SEQ ID NO: 1715810 - DNA, 15 bp, Homo sapiens
tgcaaaggacatgat

SEQ ID NO: 1715811 - DNA, 15 bp, Homo sapiens
gcaaaggacatgatc

SEQ ID NO: 1715812 - DNA, 15 bp, Homo sapiens
caaaggacatgatct

SEQ ID NO: 1715813 - DNA, 15 bp, Homo sapiens
aaaggacatgatctc

SEQ ID NO: 1715814 - DNA, 15 bp, Homo sapiens
aaggacatgatctca

SEQ ID NO: 1715815 - DNA, 15 bp, Homo sapiens
aggacatgatctcat

SEQ ID NO: 1715816 - DNA, 15 bp, Homo sapiens
ggacatgatctcatt

SEQ ID NO: 1715817 - DNA, 15 bp, Homo sapiens
gacatgatctcattc

SEQ ID NO: 1715818 - DNA, 15 bp, Homo sapiens
acatgatctcattcc

SEQ ID NO: 1715819 - DNA, 15 bp, Homo sapiens
catgatctcattcct

SEQ ID NO: 1715820 - DNA, 15 bp, Homo sapiens
atgatctcattcctt

SEQ ID NO: 1715821 - DNA, 15 bp, Homo sapiens
tgatctcattccttt

SEQ ID NO: 1715822 - DNA, 15 bp, Homo sapiens
gatctcattcctttt

SEQ ID NO: 1715823 - DNA, 15 bp, Homo sapiens
atctcattccttttt

SEQ ID NO: 1715824 - DNA, 15 bp, Homo sapiens
tctcattccttttta

SEQ ID NO: 1715825 - DNA, 15 bp, Homo sapiens
ctcattcctttttat

SEQ ID NO: 1715826 - DNA, 15 bp, Homo sapiens
tcattcctttttatg

SEQ ID NO: 1715827 - DNA, 15 bp, Homo sapiens
cattcctttttatgg

SEQ ID NO: 1715828 - DNA, 15 bp, Homo sapiens
attcctttttatggc

SEQ ID NO: 1715829 - DNA, 15 bp, Homo sapiens
ttcctttttatggct

SEQ ID NO: 1715830 - DNA, 15 bp, Homo sapiens
tcctttttatggctg

SEQ ID NO: 1715831 - DNA, 15 bp, Homo sapiens
cctttttatggctgc

SEQ ID NO: 1715832 - DNA, 15 bp, Homo sapiens
ctttttatggctgca

SEQ ID NO: 1715833 - DNA, 15 bp, Homo sapiens
tttttatggctgcag

SEQ ID NO: 1715834 - DNA, 15 bp, Homo sapiens
ttttatggctgcagg

SEQ ID NO: 1715835 - DNA, 15 bp, Homo sapiens
tttatggctgcagga

SEQ ID NO: 1715836 - DNA, 15 bp, Homo sapiens
ttatggctgcaggaa

SEQ ID NO: 1715837 - DNA, 15 bp, Homo sapiens
tatggctgcaggaaa

SEQ ID NO: 1715838 - DNA, 15 bp, Homo sapiens
atggctgcaggaaaa

SEQ ID NO: 1715839 - DNA, 15 bp, Homo sapiens
tggctgcaggaaaat

SEQ ID NO: 1715840 - DNA, 15 bp, Homo sapiens
ggctgcaggaaaata

SEQ ID NO: 1715841 - DNA, 15 bp, Homo sapiens
gctgcaggaaaatat

SEQ ID NO: 1715842 - DNA, 15 bp, Homo sapiens
ctgcaggaaaatata

SEQ ID NO: 1715843 - DNA, 15 bp, Homo sapiens
tgcaggaaaatatat

SEQ ID NO: 1715844 - DNA, 15 bp, Homo sapiens
gcaggaaaatatatt

SEQ ID NO: 1715845 - DNA, 15 bp, Homo sapiens
caggaaaatatattt

SEQ ID NO: 1715846 - DNA, 15 bp, Homo sapiens
aggaaaatatatttt

SEQ ID NO: 1715847 - DNA, 15 bp, Homo sapiens
ggaaaatatatttta

SEQ ID NO: 1715848 - DNA, 15 bp, Homo sapiens
gaaaatatattttac

SEQ ID NO: 1715849 - DNA, 15 bp, Homo sapiens
aaaatatattttaca

SEQ ID NO: 1715850 - DNA, 15 bp, Homo sapiens
aaatatattttacat

SEQ ID NO: 1715851 - DNA, 15 bp, Homo sapiens
aatatattttacata

SEQ ID NO: 1715852 - DNA, 15 bp, Homo sapiens
atatattttacatac

SEQ ID NO: 1715853 - DNA, 15 bp, Homo sapiens
tatattttacatact

SEQ ID NO: 1715854 - DNA, 15 bp, Homo sapiens
atattttacatacta

SEQ ID NO: 1715855 - DNA, 15 bp, Homo sapiens
tattttacatactag

SEQ ID NO: 1715856 - DNA, 15 bp, Homo sapiens
attttacatactagt

SEQ ID NO: 1715857 - DNA, 15 bp, Homo sapiens
ttttacatactagtg

SEQ ID NO: 1715858 - DNA, 15 bp, Homo sapiens
tttacatactagtga

SEQ ID NO: 1715859 - DNA, 15 bp, Homo sapiens
ttacatactagtgaa

SEQ ID NO: 1715860 - DNA, 15 bp, Homo sapiens
tacatactagtgaac

SEQ ID NO: 1715861 - DNA, 15 bp, Homo sapiens
acatactagtgaaca

SEQ ID NO: 1715862 - DNA, 15 bp, Homo sapiens
catactagtgaacat

SEQ ID NO: 1715863 - DNA, 15 bp, Homo sapiens
atactagtgaacata

SEQ ID NO: 1715864 - DNA, 15 bp, Homo sapiens
tactagtgaacatag

SEQ ID NO: 1715865 - DNA, 15 bp, Homo sapiens
actagtgaacatagt

SEQ ID NO: 1715866 - DNA, 15 bp, Homo sapiens
ctagtgaacatagtt

SEQ ID NO: 1715867 - DNA, 15 bp, Homo sapiens
tagtgaacatagtta

SEQ ID NO: 1715868 - DNA, 15 bp, Homo sapiens
agtgaacatagttaa

SEQ ID NO: 1715869 - DNA, 15 bp, Homo sapiens
gtgaacatagttaaa

SEQ ID NO: 1715870 - DNA, 15 bp, Homo sapiens
tgaacatagttaaat

SEQ ID NO: 1715871 - DNA, 15 bp, Homo sapiens
gaacatagttaaatt

SEQ ID NO: 1715872 - DNA, 15 bp, Homo sapiens
aacatagttaaatta

SEQ ID NO: 1715873 - DNA, 15 bp, Homo sapiens
acatagttaaattaa

SEQ ID NO: 1715874 - DNA, 15 bp, Homo sapiens
catagttaaattaat

SEQ ID NO: 1715875 - DNA, 15 bp, Homo sapiens
atagttaaattaatc

SEQ ID NO: 1715876 - DNA, 15 bp, Homo sapiens
tagttaaattaatcc

SEQ ID NO: 1715877 - DNA, 15 bp, Homo sapiens
agttaaattaatcca

SEQ ID NO: 1715878 - DNA, 15 bp, Homo sapiens
gttaaattaatccat

SEQ ID NO: 1715879 - DNA, 15 bp, Homo sapiens
ttaaattaatccatg

SEQ ID NO: 1715880 - DNA, 15 bp, Homo sapiens
taaattaatccatgg

SEQ ID NO: 1715881 - DNA, 15 bp, Homo sapiens
aaattaatccatggt

SEQ ID NO: 1715882 - DNA, 15 bp, Homo sapiens
aattaatccatggtc

SEQ ID NO: 1715883 - DNA, 15 bp, Homo sapiens
attaatccatggtca

SEQ ID NO: 1715884 - DNA, 15 bp, Homo sapiens
ttaatccatggtcaa

SEQ ID NO: 1715885 - DNA, 15 bp, Homo sapiens
taatccatggtcaag

SEQ ID NO: 1715886 - DNA, 15 bp, Homo sapiens
aatccatggtcaaga

SEQ ID NO: 1715887 - DNA, 15 bp, Homo sapiens
atccatggtcaagac

SEQ ID NO: 1715888 - DNA, 15 bp, Homo sapiens
tccatggtcaagaca

SEQ ID NO: 1715889 - DNA, 15 bp, Homo sapiens
ccatggtcaagacat

SEQ ID NO: 1715890 - DNA, 15 bp, Homo sapiens
catggtcaagacata

SEQ ID NO: 1715891 - DNA, 15 bp, Homo sapiens
atggtcaagacatat

SEQ ID NO: 1715892 - DNA, 15 bp, Homo sapiens
tggtcaagacatata

SEQ ID NO: 1715893 - DNA, 15 bp, Homo sapiens
ggtcaagacatatat

SEQ ID NO: 1715894 - DNA, 15 bp, Homo sapiens
gtcaagacatatatt

SEQ ID NO: 1715895 - DNA, 15 bp, Homo sapiens
tcaagacatatattc

SEQ ID NO: 1715896 - DNA, 15 bp, Homo sapiens
caagacatatattct

SEQ ID NO: 1715897 - DNA, 15 bp, Homo sapiens
aagacatatattctt

SEQ ID NO: 1715898 - DNA, 15 bp, Homo sapiens
agacatatattcttt

SEQ ID NO: 1715899 - DNA, 15 bp, Homo sapiens
gacatatattctttt

SEQ ID NO: 1715900 - DNA, 15 bp, Homo sapiens
catatattcttttgt

SEQ ID NO: 1715901 - DNA, 15 bp, Homo sapiens
atatattcttttgta

SEQ ID NO: 1715902 - DNA, 15 bp, Homo sapiens
tatattcttttgtaa

SEQ ID NO: 1715903 - DNA, 15 bp, Homo sapiens
atattcttttgtaaa

SEQ ID NO: 1715904 - DNA, 15 bp, Homo sapiens
tattcttttgtaaat

SEQ ID NO: 1715905 - DNA, 15 bp, Homo sapiens
attcttttgtaaatt

SEQ ID NO: 1715906 - DNA, 15 bp, Homo sapiens
ttcttttgtaaattg

SEQ ID NO: 1715907 - DNA, 15 bp, Homo sapiens
tcttttgtaaattga

SEQ ID NO: 1715908 - DNA, 15 bp, Homo sapiens
cttttgtaaattgag

SEQ ID NO: 1715909 - DNA, 15 bp, Homo sapiens
ttttgtaaattgaga

SEQ ID NO: 1715910 - DNA, 15 bp, Homo sapiens
tttgtaaattgagaa

SEQ ID NO: 1715911 - DNA, 15 bp, Homo sapiens
ttgtaaattgagaaa

SEQ ID NO: 1715912 - DNA, 15 bp, Homo sapiens
tgtaaattgagaaat

SEQ ID NO: 1715913 - DNA, 15 bp, Homo sapiens
gtaaattgagaaatc

SEQ ID NO: 1715914 - DNA, 15 bp, Homo sapiens
taaattgagaaatct

SEQ ID NO: 1715915 - DNA, 15 bp, Homo sapiens
aaattgagaaatctc

SEQ ID NO: 1715916 - DNA, 15 bp, Homo sapiens
aattgagaaatctct

SEQ ID NO: 1715917 - DNA, 15 bp, Homo sapiens
attgagaaatctctt

SEQ ID NO: 1715918 - DNA, 15 bp, Homo sapiens
ttgagaaatctcttt

SEQ ID NO: 1715919 - DNA, 15 bp, Homo sapiens
tgagaaatctcttta

SEQ ID NO: 1715920 - DNA, 15 bp, Homo sapiens
gagaaatctctttat

SEQ ID NO: 1715921 - DNA, 15 bp, Homo sapiens
agaaatctctttatc

SEQ ID NO: 1715922 - DNA, 15 bp, Homo sapiens
gaaatctctttatca

SEQ ID NO: 1715923 - DNA, 15 bp, Homo sapiens
aaatctctttatcat

SEQ ID NO: 1715924 - DNA, 15 bp, Homo sapiens
aatctctttatcata

SEQ ID NO: 1715925 - DNA, 15 bp, Homo sapiens
atctctttatcataa

SEQ ID NO: 1715926 - DNA, 15 bp, Homo sapiens
tctctttatcataat

SEQ ID NO: 1715927 - DNA, 15 bp, Homo sapiens
ctctttatcataatt

SEQ ID NO: 1715928 - DNA, 15 bp, Homo sapiens
tctttatcataattg

SEQ ID NO: 1715929 - DNA, 15 bp, Homo sapiens
ctttatcataattgt

SEQ ID NO: 1715930 - DNA, 15 bp, Homo sapiens
tttatcataattgta

SEQ ID NO: 1715931 - DNA, 15 bp, Homo sapiens
ttatcataattgtaa

SEQ ID NO: 1715932 - DNA, 15 bp, Homo sapiens
tatcataattgtaat

SEQ ID NO: 1715933 - DNA, 15 bp, Homo sapiens
atcataattgtaata

SEQ ID NO: 1715934 - DNA, 15 bp, Homo sapiens
tcataattgtaatat

SEQ ID NO: 1715935 - DNA, 15 bp, Homo sapiens
cataattgtaatatg

SEQ ID NO: 1715936 - DNA, 15 bp, Homo sapiens
ataattgtaatatgg

SEQ ID NO: 1715937 - DNA, 15 bp, Homo sapiens
taattgtaatatggt

SEQ ID NO: 1715938 - DNA, 15 bp, Homo sapiens
aattgtaatatggta

SEQ ID NO: 1715939 - DNA, 15 bp, Homo sapiens
attgtaatatggtaa

SEQ ID NO: 1715940 - DNA, 15 bp, Homo sapiens
ttgtaatatggtaat

SEQ ID NO: 1715941 - DNA, 15 bp, Homo sapiens
tgtaatatggtaata

SEQ ID NO: 1715942 - DNA, 15 bp, Homo sapiens
gtaatatggtaataa

SEQ ID NO: 1715943 - DNA, 15 bp, Homo sapiens
taatatggtaataaa

SEQ ID NO: 1715944 - DNA, 15 bp, Homo sapiens
aatatggtaataaat

SEQ ID NO: 1715945 - DNA, 15 bp, Homo sapiens
atatggtaataaata

SEQ ID NO: 1715946 - DNA, 15 bp, Homo sapiens
tatggtaataaataa

SEQ ID NO: 1715947 - DNA, 15 bp, Homo sapiens
atggtaataaataaa

SEQ ID NO: 1715948 - DNA, 15 bp, Homo sapiens
tggtaataaataaat

SEQ ID NO: 1715949 - DNA, 15 bp, Homo sapiens
ggtaataaataaatc

SEQ ID NO: 1715950 - DNA, 15 bp, Homo sapiens
gtaataaataaatct

SEQ ID NO: 1715951 - DNA, 15 bp, Homo sapiens
taataaataaatcta

SEQ ID NO: 1715952 - DNA, 15 bp, Homo sapiens
aataaataaatctag

SEQ ID NO: 1715953 - DNA, 15 bp, Homo sapiens
ataaataaatctaga

SEQ ID NO: 1715954 - DNA, 15 bp, Homo sapiens
taaataaatctagat

SEQ ID NO: 1715955 - DNA, 15 bp, Homo sapiens
aaataaatctagatt

SEQ ID NO: 1715956 - DNA, 15 bp, Homo sapiens
aataaatctagatta

SEQ ID NO: 1715957 - DNA, 15 bp, Homo sapiens
ataaatctagattac

SEQ ID NO: 1715958 - DNA, 15 bp, Homo sapiens
taaatctagattaca

SEQ ID NO: 1715959 - DNA, 15 bp, Homo sapiens
aaatctagattacat

SEQ ID NO: 1715960 - DNA, 15 bp, Homo sapiens
aatctagattacata

SEQ ID NO: 1715961 - DNA, 15 bp, Homo sapiens
atctagattacataa

SEQ ID NO: 1715962 - DNA, 15 bp, Homo sapiens
tctagattacataaa

SEQ ID NO: 1715963 - DNA, 15 bp, Homo sapiens
ctagattacataaat

SEQ ID NO: 1715964 - DNA, 15 bp, Homo sapiens
tagattacataaatg

SEQ ID NO: 1715965 - DNA, 15 bp, Homo sapiens
agattacataaatgt

SEQ ID NO: 1715966 - DNA, 15 bp, Homo sapiens
gattacataaatgta

SEQ ID NO: 1715967 - DNA, 15 bp, Homo sapiens
attacataaatgtaa

SEQ ID NO: 1715968 - DNA, 15 bp, Homo sapiens
ttacataaatgtaat

SEQ ID NO: 1715969 - DNA, 15 bp, Homo sapiens
tacataaatgtaatc

SEQ ID NO: 1715970 - DNA, 15 bp, Homo sapiens
acataaatgtaatct

SEQ ID NO: 1715971 - DNA, 15 bp, Homo sapiens
cataaatgtaatcta

SEQ ID NO: 1715972 - DNA, 15 bp, Homo sapiens
ataaatgtaatctag

SEQ ID NO: 1715973 - DNA, 15 bp, Homo sapiens
taaatgtaatctaga

SEQ ID NO: 1715974 - DNA, 15 bp, Homo sapiens
aaatgtaatctagat

SEQ ID NO: 1715975 - DNA, 15 bp, Homo sapiens
aatgtaatctagatg

SEQ ID NO: 1715976 - DNA, 15 bp, Homo sapiens
atgtaatctagatgt

SEQ ID NO: 1715977 - DNA, 15 bp, Homo sapiens
tgtaatctagatgtt

SEQ ID NO: 1715978 - DNA, 15 bp, Homo sapiens
gtaatctagatgttg

SEQ ID NO: 1715979 - DNA, 15 bp, Homo sapiens
taatctagatgttga

SEQ ID NO: 1715980 - DNA, 15 bp, Homo sapiens
aatctagatgttgat

SEQ ID NO: 1715981 - DNA, 15 bp, Homo sapiens
atctagatgttgata

SEQ ID NO: 1715982 - DNA, 15 bp, Homo sapiens
tctagatgttgataa

SEQ ID NO: 1715983 - DNA, 15 bp, Homo sapiens
ctagatgttgataaa

SEQ ID NO: 1715984 - DNA, 15 bp, Homo sapiens
tagatgttgataaac

SEQ ID NO: 1715985 - DNA, 15 bp, Homo sapiens
agatgttgataaact

SEQ ID NO: 1715986 - DNA, 15 bp, Homo sapiens
gatgttgataaactg

SEQ ID NO: 1715987 - DNA, 15 bp, Homo sapiens
atgttgataaactgg

SEQ ID NO: 1715988 - DNA, 15 bp, Homo sapiens
tgttgataaactggt

SEQ ID NO: 1715989 - DNA, 15 bp, Homo sapiens
gttgataaactggtt

SEQ ID NO: 1715990 - DNA, 15 bp, Homo sapiens
ttgataaactggttt

SEQ ID NO: 1715991 - DNA, 15 bp, Homo sapiens
tgataaactggtttt

SEQ ID NO: 1715992 - DNA, 15 bp, Homo sapiens
gataaactggtttta

SEQ ID NO: 1715993 - DNA, 15 bp, Homo sapiens
ataaactggttttaa

SEQ ID NO: 1715994 - DNA, 15 bp, Homo sapiens
taaactggttttaaa

SEQ ID NO: 1715995 - DNA, 15 bp, Homo sapiens
aaactggttttaaat

SEQ ID NO: 1715996 - DNA, 15 bp, Homo sapiens
aactggttttaaata

SEQ ID NO: 1715997 - DNA, 15 bp, Homo sapiens
actggttttaaataa

SEQ ID NO: 1715998 - DNA, 15 bp, Homo sapiens
ctggttttaaataaa

SEQ ID NO: 1715999 - DNA, 15 bp, Homo sapiens
tggttttaaataaag

SEQ ID NO: 1716000 - DNA, 15 bp, Homo sapiens
ggttttaaataaagc

SEQ ID NO: 1716001 - DNA, 15 bp, Homo sapiens
gttttaaataaagca

SEQ ID NO: 1716002 - DNA, 15 bp, Homo sapiens
ttttaaataaagcaa

SEQ ID NO: 1716003 - DNA, 15 bp, Homo sapiens
tttaaataaagcaag

SEQ ID NO: 1716004 - DNA, 15 bp, Homo sapiens
ttaaataaagcaagt

SEQ ID NO: 1716005 - DNA, 15 bp, Homo sapiens
taaataaagcaagtg

SEQ ID NO: 1716006 - DNA, 15 bp, Homo sapiens
aaataaagcaagtga

SEQ ID NO: 1716007 - DNA, 15 bp, Homo sapiens
aataaagcaagtgat

SEQ ID NO: 1716008 - DNA, 15 bp, Homo sapiens
ataaagcaagtgata

SEQ ID NO: 1716009 - DNA, 15 bp, Homo sapiens
taaagcaagtgatat

SEQ ID NO: 1716010 - DNA, 15 bp, Homo sapiens
aaagcaagtgatatc

SEQ ID NO: 1716011 - DNA, 15 bp, Homo sapiens
aagcaagtgatatct

SEQ ID NO: 1716012 - DNA, 15 bp, Homo sapiens
agcaagtgatatcta

SEQ ID NO: 1716013 - DNA, 15 bp, Homo sapiens
gcaagtgatatctac

SEQ ID NO: 1716014 - DNA, 15 bp, Homo sapiens
caagtgatatctacg

SEQ ID NO: 1716015 - DNA, 15 bp, Homo sapiens
aagtgatatctacgt

SEQ ID NO: 1716016 - DNA, 15 bp, Homo sapiens
agtgatatctacgta

SEQ ID NO: 1716017 - DNA, 15 bp, Homo sapiens
gtgatatctacgtat

SEQ ID NO: 1716018 - DNA, 15 bp, Homo sapiens
tgatatctacgtatg

SEQ ID NO: 1716019 - DNA, 15 bp, Homo sapiens
gatatctacgtatga

SEQ ID NO: 1716020 - DNA, 15 bp, Homo sapiens
atatctacgtatgaa

SEQ ID NO: 1716021 - DNA, 15 bp, Homo sapiens
tatctacgtatgaag

SEQ ID NO: 1716022 - DNA, 15 bp, Homo sapiens
atctacgtatgaaga

SEQ ID NO: 1716023 - DNA, 15 bp, Homo sapiens
tctacgtatgaagag

SEQ ID NO: 1716024 - DNA, 15 bp, Homo sapiens
ctacgtatgaagaga

SEQ ID NO: 1716025 - DNA, 15 bp, Homo sapiens
tacgtatgaagagag

SEQ ID NO: 1716026 - DNA, 15 bp, Homo sapiens
acgtatgaagagagt

SEQ ID NO: 1716027 - DNA, 15 bp, Homo sapiens
cgtatgaagagagtt

SEQ ID NO: 1716028 - DNA, 15 bp, Homo sapiens
gtatgaagagagttt

SEQ ID NO: 1716029 - DNA, 15 bp, Homo sapiens
tatgaagagagttta

SEQ ID NO: 1716030 - DNA, 15 bp, Homo sapiens
atgaagagagtttac

SEQ ID NO: 1716031 - DNA, 15 bp, Homo sapiens
tgaagagagtttact

SEQ ID NO: 1716032 - DNA, 15 bp, Homo sapiens
gaagagagtttactt

SEQ ID NO: 1716033 - DNA, 15 bp, Homo sapiens
aagagagtttacttc

SEQ ID NO: 1716034 - DNA, 15 bp, Homo sapiens
agagagtttacttca

SEQ ID NO: 1716035 - DNA, 15 bp, Homo sapiens
gagagtttacttcag

SEQ ID NO: 1716036 - DNA, 15 bp, Homo sapiens
agagtttacttcagt

SEQ ID NO: 1716037 - DNA, 15 bp, Homo sapiens
gagtttacttcagtt

SEQ ID NO: 1716038 - DNA, 15 bp, Homo sapiens
agtttacttcagttc

SEQ ID NO: 1716039 - DNA, 15 bp, Homo sapiens
gtttacttcagttcc

SEQ ID NO: 1716040 - DNA, 15 bp, Homo sapiens
tttacttcagttcct

SEQ ID NO: 1716041 - DNA, 15 bp, Homo sapiens
ttacttcagttccta

SEQ ID NO: 1716042 - DNA, 15 bp, Homo sapiens
tacttcagttcctag

SEQ ID NO: 1716043 - DNA, 15 bp, Homo sapiens
acttcagttcctaga

SEQ ID NO: 1716044 - DNA, 15 bp, Homo sapiens
cttcagttcctagaa

SEQ ID NO: 1716045 - DNA, 15 bp, Homo sapiens
ttcagttcctagaac

SEQ ID NO: 1716046 - DNA, 15 bp, Homo sapiens
tcagttcctagaact

SEQ ID NO: 1716047 - DNA, 15 bp, Homo sapiens
cagttcctagaactt

SEQ ID NO: 1716048 - DNA, 15 bp, Homo sapiens
agttcctagaacttt

SEQ ID NO: 1716049 - DNA, 15 bp, Homo sapiens
gttcctagaactttc

SEQ ID NO: 1716050 - DNA, 15 bp, Homo sapiens
ttcctagaactttcc

SEQ ID NO: 1716051 - DNA, 15 bp, Homo sapiens
tcctagaactttcct

SEQ ID NO: 1716052 - DNA, 15 bp, Homo sapiens
cctagaactttcctt

SEQ ID NO: 1716053 - DNA, 15 bp, Homo sapiens
ctagaactttccttc

SEQ ID NO: 1716054 - DNA, 15 bp, Homo sapiens
tagaactttccttca

SEQ ID NO: 1716055 - DNA, 15 bp, Homo sapiens
agaactttccttcac

SEQ ID NO: 1716056 - DNA, 15 bp, Homo sapiens
gaactttccttcact

SEQ ID NO: 1716057 - DNA, 15 bp, Homo sapiens
aactttccttcactt

SEQ ID NO: 1716058 - DNA, 15 bp, Homo sapiens
actttccttcacttt

SEQ ID NO: 1716059 - DNA, 15 bp, Homo sapiens
ctttccttcactttc

SEQ ID NO: 1716060 - DNA, 15 bp, Homo sapiens
tttccttcactttcc

SEQ ID NO: 1716061 - DNA, 15 bp, Homo sapiens
ttccttcactttcct

SEQ ID NO: 1716062 - DNA, 15 bp, Homo sapiens
tccttcactttcctg

SEQ ID NO: 1716063 - DNA, 15 bp, Homo sapiens
ccttcactttcctgc

SEQ ID NO: 1716064 - DNA, 15 bp, Homo sapiens
cttcactttcctgcc

SEQ ID NO: 1716065 - DNA, 15 bp, Homo sapiens
ttcactttcctgcca

SEQ ID NO: 1716066 - DNA, 15 bp, Homo sapiens
tcactttcctgccat

SEQ ID NO: 1716067 - DNA, 15 bp, Homo sapiens
cactttcctgccatc

SEQ ID NO: 1716068 - DNA, 15 bp, Homo sapiens
actttcctgccatcc

SEQ ID NO: 1716069 - DNA, 15 bp, Homo sapiens
ctttcctgccatccc

SEQ ID NO: 1716070 - DNA, 15 bp, Homo sapiens
tttcctgccatccct

SEQ ID NO: 1716071 - DNA, 15 bp, Homo sapiens
ttcctgccatcccta

SEQ ID NO: 1716072 - DNA, 15 bp, Homo sapiens
tcctgccatccctac

SEQ ID NO: 1716073 - DNA, 15 bp, Homo sapiens
cctgccatccctact

SEQ ID NO: 1716074 - DNA, 15 bp, Homo sapiens
ctgccatccctactt

SEQ ID NO: 1716075 - DNA, 15 bp, Homo sapiens
tgccatccctacttt

SEQ ID NO: 1716076 - DNA, 15 bp, Homo sapiens
gccatccctactttt

SEQ ID NO: 1716077 - DNA, 15 bp, Homo sapiens
ccatccctactttta

SEQ ID NO: 1716078 - DNA, 15 bp, Homo sapiens
catccctacttttag

SEQ ID NO: 1716079 - DNA, 15 bp, Homo sapiens
atccctacttttagt

SEQ ID NO: 1716080 - DNA, 15 bp, Homo sapiens
tccctacttttagta

SEQ ID NO: 1716081 - DNA, 15 bp, Homo sapiens
ccctacttttagtaa

SEQ ID NO: 1716082 - DNA, 15 bp, Homo sapiens
cctacttttagtaag

SEQ ID NO: 1716083 - DNA, 15 bp, Homo sapiens
ctacttttagtaagc

SEQ ID NO: 1716084 - DNA, 15 bp, Homo sapiens
tacttttagtaagca

SEQ ID NO: 1716085 - DNA, 15 bp, Homo sapiens
acttttagtaagcaa

SEQ ID NO: 1716086 - DNA, 15 bp, Homo sapiens
cttttagtaagcaag

SEQ ID NO: 1716087 - DNA, 15 bp, Homo sapiens
ttttagtaagcaagc

SEQ ID NO: 1716088 - DNA, 15 bp, Homo sapiens
tttagtaagcaagca

SEQ ID NO: 1716089 - DNA, 15 bp, Homo sapiens
ttagtaagcaagcat

SEQ ID NO: 1716090 - DNA, 15 bp, Homo sapiens
tagtaagcaagcatt

SEQ ID NO: 1716091 - DNA, 15 bp, Homo sapiens
agtaagcaagcattt

SEQ ID NO: 1716092 - DNA, 15 bp, Homo sapiens
gtaagcaagcattta

SEQ ID NO: 1716093 - DNA, 15 bp, Homo sapiens
taagcaagcatttac

SEQ ID NO: 1716094 - DNA, 15 bp, Homo sapiens
aagcaagcatttact

SEQ ID NO: 1716095 - DNA, 15 bp, Homo sapiens
agcaagcatttactg

SEQ ID NO: 1716096 - DNA, 15 bp, Homo sapiens
gcaagcatttactgt

SEQ ID NO: 1716097 - DNA, 15 bp, Homo sapiens
caagcatttactgtg

SEQ ID NO: 1716098 - DNA, 15 bp, Homo sapiens
aagcatttactgtgt

SEQ ID NO: 1716099 - DNA, 15 bp, Homo sapiens
agcatttactgtgtg

SEQ ID NO: 1716100 - DNA, 15 bp, Homo sapiens
gcatttactgtgtgt

SEQ ID NO: 1716101 - DNA, 15 bp, Homo sapiens
catttactgtgtgtg

SEQ ID NO: 1716102 - DNA, 15 bp, Homo sapiens
atttactgtgtgtgt

SEQ ID NO: 1716103 - DNA, 15 bp, Homo sapiens
tttactgtgtgtgta

SEQ ID NO: 1716104 - DNA, 15 bp, Homo sapiens
ttactgtgtgtgtaa

SEQ ID NO: 1716105 - DNA, 15 bp, Homo sapiens
tactgtgtgtgtaac

SEQ ID NO: 1716106 - DNA, 15 bp, Homo sapiens
actgtgtgtgtaaca

SEQ ID NO: 1716107 - DNA, 15 bp, Homo sapiens
ctgtgtgtgtaacac

SEQ ID NO: 1716108 - DNA, 15 bp, Homo sapiens
tgtgtgtgtaacact

SEQ ID NO: 1716109 - DNA, 15 bp, Homo sapiens
gtgtgtgtaacactg

SEQ ID NO: 1716110 - DNA, 15 bp, Homo sapiens
tgtgtgtaacactgt

SEQ ID NO: 1716111 - DNA, 15 bp, Homo sapiens
gtgtgtaacactgtg

SEQ ID NO: 1716112 - DNA, 15 bp, Homo sapiens
tgtgtaacactgtgc

SEQ ID NO: 1716113 - DNA, 15 bp, Homo sapiens
gtgtaacactgtgct

SEQ ID NO: 1716114 - DNA, 15 bp, Homo sapiens
tgtaacactgtgcta

SEQ ID NO: 1716115 - DNA, 15 bp, Homo sapiens
gtaacactgtgctag

SEQ ID NO: 1716116 - DNA, 15 bp, Homo sapiens
taacactgtgctagg

SEQ ID NO: 1716117 - DNA, 15 bp, Homo sapiens
aacactgtgctaggt

SEQ ID NO: 1716118 - DNA, 15 bp, Homo sapiens
acactgtgctaggta

SEQ ID NO: 1716119 - DNA, 15 bp, Homo sapiens
cactgtgctaggtac

SEQ ID NO: 1716120 - DNA, 15 bp, Homo sapiens
actgtgctaggtact

SEQ ID NO: 1716121 - DNA, 15 bp, Homo sapiens
ctgtgctaggtacta

SEQ ID NO: 1716122 - DNA, 15 bp, Homo sapiens
tgtgctaggtactaa

SEQ ID NO: 1716123 - DNA, 15 bp, Homo sapiens
gtgctaggtactaag

SEQ ID NO: 1716124 - DNA, 15 bp, Homo sapiens
tgctaggtactaagg

SEQ ID NO: 1716125 - DNA, 15 bp, Homo sapiens
gctaggtactaaggc

SEQ ID NO: 1716126 - DNA, 15 bp, Homo sapiens
ctaggtactaaggca

SEQ ID NO: 1716127 - DNA, 15 bp, Homo sapiens
taggtactaaggcaa

SEQ ID NO: 1716128 - DNA, 15 bp, Homo sapiens
aggtactaaggcaat

SEQ ID NO: 1716129 - DNA, 15 bp, Homo sapiens
ggtactaaggcaatg

SEQ ID NO: 1716130 - DNA, 15 bp, Homo sapiens
gtactaaggcaatga

SEQ ID NO: 1716131 - DNA, 15 bp, Homo sapiens
tactaaggcaatgat

SEQ ID NO: 1716132 - DNA, 15 bp, Homo sapiens
actaaggcaatgatg

SEQ ID NO: 1716133 - DNA, 15 bp, Homo sapiens
ctaaggcaatgatga

SEQ ID NO: 1716134 - DNA, 15 bp, Homo sapiens
taaggcaatgatgat

SEQ ID NO: 1716135 - DNA, 15 bp, Homo sapiens
aaggcaatgatgata

SEQ ID NO: 1716136 - DNA, 15 bp, Homo sapiens
aggcaatgatgatac

SEQ ID NO: 1716137 - DNA, 15 bp, Homo sapiens
ggcaatgatgatacc

SEQ ID NO: 1716138 - DNA, 15 bp, Homo sapiens
gcaatgatgataccc

SEQ ID NO: 1716139 - DNA, 15 bp, Homo sapiens
caatgatgataccca

SEQ ID NO: 1716140 - DNA, 15 bp, Homo sapiens
aatgatgatacccaa

SEQ ID NO: 1716141 - DNA, 15 bp, Homo sapiens
atgatgatacccaag

SEQ ID NO: 1716142 - DNA, 15 bp, Homo sapiens
tgatgatacccaaga

SEQ ID NO: 1716143 - DNA, 15 bp, Homo sapiens
gatgatacccaagat

SEQ ID NO: 1716144 - DNA, 15 bp, Homo sapiens
atgatacccaagatt

SEQ ID NO: 1716145 - DNA, 15 bp, Homo sapiens
tgatacccaagattt

SEQ ID NO: 1716146 - DNA, 15 bp, Homo sapiens
gatacccaagatttg

SEQ ID NO: 1716147 - DNA, 15 bp, Homo sapiens
atacccaagatttgg

SEQ ID NO: 1716148 - DNA, 15 bp, Homo sapiens
tacccaagatttggt

SEQ ID NO: 1716149 - DNA, 15 bp, Homo sapiens
acccaagatttggtc

SEQ ID NO: 1716150 - DNA, 15 bp, Homo sapiens
cccaagatttggtct

SEQ ID NO: 1716151 - DNA, 15 bp, Homo sapiens
ccaagatttggtctc

SEQ ID NO: 1716152 - DNA, 15 bp, Homo sapiens
caagatttggtctct

SEQ ID NO: 1716153 - DNA, 15 bp, Homo sapiens
aagatttggtctcta

SEQ ID NO: 1716154 - DNA, 15 bp, Homo sapiens
agatttggtctctat

SEQ ID NO: 1716155 - DNA, 15 bp, Homo sapiens
gatttggtctctatc

SEQ ID NO: 1716156 - DNA, 15 bp, Homo sapiens
atttggtctctatcc

SEQ ID NO: 1716157 - DNA, 15 bp, Homo sapiens
tttggtctctatcct

SEQ ID NO: 1716158 - DNA, 15 bp, Homo sapiens
ttggtctctatcctg

SEQ ID NO: 1716159 - DNA, 15 bp, Homo sapiens
tggtctctatcctga

SEQ ID NO: 1716160 - DNA, 15 bp, Homo sapiens
ggtctctatcctgaa

SEQ ID NO: 1716161 - DNA, 15 bp, Homo sapiens
gtctctatcctgaag

SEQ ID NO: 1716162 - DNA, 15 bp, Homo sapiens
tctctatcctgaaga

SEQ ID NO: 1716163 - DNA, 15 bp, Homo sapiens
ctctatcctgaagat

SEQ ID NO: 1716164 - DNA, 15 bp, Homo sapiens
tctatcctgaagata

SEQ ID NO: 1716165 - DNA, 15 bp, Homo sapiens
ctatcctgaagataa

SEQ ID NO: 1716166 - DNA, 15 bp, Homo sapiens
tatcctgaagataag

SEQ ID NO: 1716167 - DNA, 15 bp, Homo sapiens
atcctgaagataagc

SEQ ID NO: 1716168 - DNA, 15 bp, Homo sapiens
tcctgaagataagca

SEQ ID NO: 1716169 - DNA, 15 bp, Homo sapiens
cctgaagataagcac

SEQ ID NO: 1716170 - DNA, 15 bp, Homo sapiens
ctgaagataagcaca

SEQ ID NO: 1716171 - DNA, 15 bp, Homo sapiens
tgaagataagcacag

SEQ ID NO: 1716172 - DNA, 15 bp, Homo sapiens
gaagataagcacagg

SEQ ID NO: 1716173 - DNA, 15 bp, Homo sapiens
aagataagcacagga

SEQ ID NO: 1716174 - DNA, 15 bp, Homo sapiens
agataagcacaggag

SEQ ID NO: 1716175 - DNA, 15 bp, Homo sapiens
gataagcacaggaga

SEQ ID NO: 1716176 - DNA, 15 bp, Homo sapiens
ataagcacaggagaa

SEQ ID NO: 1716177 - DNA, 15 bp, Homo sapiens
taagcacaggagaaa

SEQ ID NO: 1716178 - DNA, 15 bp, Homo sapiens
aagcacaggagaaac

SEQ ID NO: 1716179 - DNA, 15 bp, Homo sapiens
agcacaggagaaaca

SEQ ID NO: 1716180 - DNA, 15 bp, Homo sapiens
gcacaggagaaacat

SEQ ID NO: 1716181 - DNA, 15 bp, Homo sapiens
cacaggagaaacatt

SEQ ID NO: 1716182 - DNA, 15 bp, Homo sapiens
acaggagaaacatta

SEQ ID NO: 1716183 - DNA, 15 bp, Homo sapiens
caggagaaacattat

SEQ ID NO: 1716184 - DNA, 15 bp, Homo sapiens
aggagaaacattatc

SEQ ID NO: 1716185 - DNA, 15 bp, Homo sapiens
ggagaaacattatca

SEQ ID NO: 1716186 - DNA, 15 bp, Homo sapiens
gagaaacattatcag

SEQ ID NO: 1716187 - DNA, 15 bp, Homo sapiens
agaaacattatcagt

SEQ ID NO: 1716188 - DNA, 15 bp, Homo sapiens
gaaacattatcagtc

SEQ ID NO: 1716189 - DNA, 15 bp, Homo sapiens
aaacattatcagtca

SEQ ID NO: 1716190 - DNA, 15 bp, Homo sapiens
aacattatcagtcat

SEQ ID NO: 1716191 - DNA, 15 bp, Homo sapiens
acattatcagtcatg

SEQ ID NO: 1716192 - DNA, 15 bp, Homo sapiens
cattatcagtcatga

SEQ ID NO: 1716193 - DNA, 15 bp, Homo sapiens
attatcagtcatgat

SEQ ID NO: 1716194 - DNA, 15 bp, Homo sapiens
ttatcagtcatgatg

SEQ ID NO: 1716195 - DNA, 15 bp, Homo sapiens
tatcagtcatgatgc

SEQ ID NO: 1716196 - DNA, 15 bp, Homo sapiens
atcagtcatgatgct

SEQ ID NO: 1716197 - DNA, 15 bp, Homo sapiens
tcagtcatgatgctt

SEQ ID NO: 1716198 - DNA, 15 bp, Homo sapiens
cagtcatgatgcttt

SEQ ID NO: 1716199 - DNA, 15 bp, Homo sapiens
agtcatgatgctttc

SEQ ID NO: 1716200 - DNA, 15 bp, Homo sapiens
gtcatgatgctttct

SEQ ID NO: 1716201 - DNA, 15 bp, Homo sapiens
tcatgatgctttctg

SEQ ID NO: 1716202 - DNA, 15 bp, Homo sapiens
catgatgctttctgt

SEQ ID NO: 1716203 - DNA, 15 bp, Homo sapiens
atgatgctttctgtt

SEQ ID NO: 1716204 - DNA, 15 bp, Homo sapiens
tgatgctttctgttg

SEQ ID NO: 1716205 - DNA, 15 bp, Homo sapiens
gatgctttctgttgc

SEQ ID NO: 1716206 - DNA, 15 bp, Homo sapiens
atgctttctgttgca

SEQ ID NO: 1716207 - DNA, 15 bp, Homo sapiens
tgctttctgttgcaa

SEQ ID NO: 1716208 - DNA, 15 bp, Homo sapiens
gctttctgttgcaaa

SEQ ID NO: 1716209 - DNA, 15 bp, Homo sapiens
ctttctgttgcaaac

SEQ ID NO: 1716210 - DNA, 15 bp, Homo sapiens
tttctgttgcaaaca

SEQ ID NO: 1716211 - DNA, 15 bp, Homo sapiens
ttctgttgcaaacaa

SEQ ID NO: 1716212 - DNA, 15 bp, Homo sapiens
tctgttgcaaacaag

SEQ ID NO: 1716213 - DNA, 15 bp, Homo sapiens
ctgttgcaaacaagt

SEQ ID NO: 1716214 - DNA, 15 bp, Homo sapiens
tgttgcaaacaagtg

SEQ ID NO: 1716215 - DNA, 15 bp, Homo sapiens
gttgcaaacaagtga

SEQ ID NO: 1716216 - DNA, 15 bp, Homo sapiens
ttgcaaacaagtgaa

SEQ ID NO: 1716217 - DNA, 15 bp, Homo sapiens
tgcaaacaagtgaaa

SEQ ID NO: 1716218 - DNA, 15 bp, Homo sapiens
gcaaacaagtgaaaa

SEQ ID NO: 1716219 - DNA, 15 bp, Homo sapiens
caaacaagtgaaaac

SEQ ID NO: 1716220 - DNA, 15 bp, Homo sapiens
aaacaagtgaaaacc

SEQ ID NO: 1716221 - DNA, 15 bp, Homo sapiens
aacaagtgaaaacct

SEQ ID NO: 1716222 - DNA, 15 bp, Homo sapiens
acaagtgaaaacctc

SEQ ID NO: 1716223 - DNA, 15 bp, Homo sapiens
caagtgaaaacctca

SEQ ID NO: 1716224 - DNA, 15 bp, Homo sapiens
aagtgaaaacctcag

SEQ ID NO: 1716225 - DNA, 15 bp, Homo sapiens
agtgaaaacctcagc

SEQ ID NO: 1716226 - DNA, 15 bp, Homo sapiens
gtgaaaacctcagct

SEQ ID NO: 1716227 - DNA, 15 bp, Homo sapiens
tgaaaacctcagctc

SEQ ID NO: 1716228 - DNA, 15 bp, Homo sapiens
gaaaacctcagctca

SEQ ID NO: 1716229 - DNA, 15 bp, Homo sapiens
aaaacctcagctcag

SEQ ID NO: 1716230 - DNA, 15 bp, Homo sapiens
aaacctcagctcagc

SEQ ID NO: 1716231 - DNA, 15 bp, Homo sapiens
aacctcagctcagct

SEQ ID NO: 1716232 - DNA, 15 bp, Homo sapiens
acctcagctcagctt

SEQ ID NO: 1716233 - DNA, 15 bp, Homo sapiens
cctcagctcagctta

SEQ ID NO: 1716234 - DNA, 15 bp, Homo sapiens
ctcagctcagcttag

SEQ ID NO: 1716235 - DNA, 15 bp, Homo sapiens
tcagctcagcttagg

SEQ ID NO: 1716236 - DNA, 15 bp, Homo sapiens
cagctcagcttaggt

SEQ ID NO: 1716237 - DNA, 15 bp, Homo sapiens
agctcagcttaggtc

SEQ ID NO: 1716238 - DNA, 15 bp, Homo sapiens
gctcagcttaggtca

SEQ ID NO: 1716239 - DNA, 15 bp, Homo sapiens
ctcagcttaggtcag

SEQ ID NO: 1716240 - DNA, 15 bp, Homo sapiens
tcagcttaggtcagc

SEQ ID NO: 1716241 - DNA, 15 bp, Homo sapiens
cagcttaggtcagct

SEQ ID NO: 1716242 - DNA, 15 bp, Homo sapiens
agcttaggtcagctc

SEQ ID NO: 1716243 - DNA, 15 bp, Homo sapiens
gcttaggtcagctcc

SEQ ID NO: 1716244 - DNA, 15 bp, Homo sapiens
cttaggtcagctcca

SEQ ID NO: 1716245 - DNA, 15 bp, Homo sapiens
ttaggtcagctccag

SEQ ID NO: 1716246 - DNA, 15 bp, Homo sapiens
taggtcagctccagg

SEQ ID NO: 1716247 - DNA, 15 bp, Homo sapiens
aggtcagctccaggg

SEQ ID NO: 1716248 - DNA, 15 bp, Homo sapiens
ggtcagctccagggc

SEQ ID NO: 1716249 - DNA, 15 bp, Homo sapiens
gtcagctccagggct

SEQ ID NO: 1716250 - DNA, 15 bp, Homo sapiens
tcagctccagggctg

SEQ ID NO: 1716251 - DNA, 15 bp, Homo sapiens
cagctccagggctgg

SEQ ID NO: 1716252 - DNA, 15 bp, Homo sapiens
agctccagggctggc

SEQ ID NO: 1716253 - DNA, 15 bp, Homo sapiens
gctccagggctggcc

SEQ ID NO: 1716254 - DNA, 15 bp, Homo sapiens
ctccagggctggcca

SEQ ID NO: 1716255 - DNA, 15 bp, Homo sapiens
tccagggctggccaa

SEQ ID NO: 1716256 - DNA, 15 bp, Homo sapiens
ccagggctggccaaa

SEQ ID NO: 1716257 - DNA, 15 bp, Homo sapiens
cagggctggccaaat

SEQ ID NO: 1716258 - DNA, 15 bp, Homo sapiens
agggctggccaaatc

SEQ ID NO: 1716259 - DNA, 15 bp, Homo sapiens
gggctggccaaatca

SEQ ID NO: 1716260 - DNA, 15 bp, Homo sapiens
ggctggccaaatcag

SEQ ID NO: 1716261 - DNA, 15 bp, Homo sapiens
gctggccaaatcaga

SEQ ID NO: 1716262 - DNA, 15 bp, Homo sapiens
ctggccaaatcagag

SEQ ID NO: 1716263 - DNA, 15 bp, Homo sapiens
tggccaaatcagagg

SEQ ID NO: 1716264 - DNA, 15 bp, Homo sapiens
ggccaaatcagaggc

SEQ ID NO: 1716265 - DNA, 15 bp, Homo sapiens
gccaaatcagaggct

SEQ ID NO: 1716266 - DNA, 15 bp, Homo sapiens
ccaaatcagaggctc

SEQ ID NO: 1716267 - DNA, 15 bp, Homo sapiens
caaatcagaggctca

SEQ ID NO: 1716268 - DNA, 15 bp, Homo sapiens
aaatcagaggctcat

SEQ ID NO: 1716269 - DNA, 15 bp, Homo sapiens
aatcagaggctcatt

SEQ ID NO: 1716270 - DNA, 15 bp, Homo sapiens
atcagaggctcattt

SEQ ID NO: 1716271 - DNA, 15 bp, Homo sapiens
tcagaggctcattta

SEQ ID NO: 1716272 - DNA, 15 bp, Homo sapiens
cagaggctcatttat

SEQ ID NO: 1716273 - DNA, 15 bp, Homo sapiens
agaggctcatttata

SEQ ID NO: 1716274 - DNA, 15 bp, Homo sapiens
gaggctcatttataa

SEQ ID NO: 1716275 - DNA, 15 bp, Homo sapiens
aggctcatttataac

SEQ ID NO: 1716276 - DNA, 15 bp, Homo sapiens
ggctcatttataaca

SEQ ID NO: 1716277 - DNA, 15 bp, Homo sapiens
gctcatttataacac

SEQ ID NO: 1716278 - DNA, 15 bp, Homo sapiens
ctcatttataacact

SEQ ID NO: 1716279 - DNA, 15 bp, Homo sapiens
tcatttataacactg

SEQ ID NO: 1716280 - DNA, 15 bp, Homo sapiens
catttataacactga

SEQ ID NO: 1716281 - DNA, 15 bp, Homo sapiens
atttataacactgag

SEQ ID NO: 1716282 - DNA, 15 bp, Homo sapiens
tttataacactgagg

SEQ ID NO: 1716283 - DNA, 15 bp, Homo sapiens
ttataacactgagga

SEQ ID NO: 1716284 - DNA, 15 bp, Homo sapiens
tataacactgaggat

SEQ ID NO: 1716285 - DNA, 15 bp, Homo sapiens
ataacactgaggatc

SEQ ID NO: 1716286 - DNA, 15 bp, Homo sapiens
taacactgaggatcc

SEQ ID NO: 1716287 - DNA, 15 bp, Homo sapiens
aacactgaggatcca

SEQ ID NO: 1716288 - DNA, 15 bp, Homo sapiens
acactgaggatccag

SEQ ID NO: 1716289 - DNA, 15 bp, Homo sapiens
cactgaggatccaga

SEQ ID NO: 1716290 - DNA, 15 bp, Homo sapiens
actgaggatccagat

SEQ ID NO: 1716291 - DNA, 15 bp, Homo sapiens
ctgaggatccagatt

SEQ ID NO: 1716292 - DNA, 15 bp, Homo sapiens
tgaggatccagattc

SEQ ID NO: 1716293 - DNA, 15 bp, Homo sapiens
gaggatccagattct

SEQ ID NO: 1716294 - DNA, 15 bp, Homo sapiens
aggatccagattctt

SEQ ID NO: 1716295 - DNA, 15 bp, Homo sapiens
ggatccagattcttt

SEQ ID NO: 1716296 - DNA, 15 bp, Homo sapiens
gatccagattctttt

SEQ ID NO: 1716297 - DNA, 15 bp, Homo sapiens
atccagattcttttg

SEQ ID NO: 1716298 - DNA, 15 bp, Homo sapiens
tccagattcttttga

SEQ ID NO: 1716299 - DNA, 15 bp, Homo sapiens
ccagattcttttgaa

SEQ ID NO: 1716300 - DNA, 15 bp, Homo sapiens
cagattcttttgaaa

SEQ ID NO: 1716301 - DNA, 15 bp, Homo sapiens
agattcttttgaaat

SEQ ID NO: 1716302 - DNA, 15 bp, Homo sapiens
gattcttttgaaatt

SEQ ID NO: 1716303 - DNA, 15 bp, Homo sapiens
attcttttgaaattc

SEQ ID NO: 1716304 - DNA, 15 bp, Homo sapiens
ttcttttgaaattcc

SEQ ID NO: 1716305 - DNA, 15 bp, Homo sapiens
tcttttgaaattcct

SEQ ID NO: 1716306 - DNA, 15 bp, Homo sapiens
cttttgaaattcctc

SEQ ID NO: 1716307 - DNA, 15 bp, Homo sapiens
ttttgaaattcctcc

SEQ ID NO: 1716308 - DNA, 15 bp, Homo sapiens
tttgaaattcctcct

SEQ ID NO: 1716309 - DNA, 15 bp, Homo sapiens
ttgaaattcctcctg

SEQ ID NO: 1716310 - DNA, 15 bp, Homo sapiens
tgaaattcctcctgc

SEQ ID NO: 1716311 - DNA, 15 bp, Homo sapiens
gaaattcctcctgca

SEQ ID NO: 1716312 - DNA, 15 bp, Homo sapiens
aaattcctcctgcac

SEQ ID NO: 1716313 - DNA, 15 bp, Homo sapiens
aattcctcctgcacc

SEQ ID NO: 1716314 - DNA, 15 bp, Homo sapiens
attcctcctgcacca

SEQ ID NO: 1716315 - DNA, 15 bp, Homo sapiens
ttcctcctgcaccaa

SEQ ID NO: 1716316 - DNA, 15 bp, Homo sapiens
tcctcctgcaccaat

SEQ ID NO: 1716317 - DNA, 15 bp, Homo sapiens
cctcctgcaccaata

SEQ ID NO: 1716318 - DNA, 15 bp, Homo sapiens
ctcctgcaccaatat

SEQ ID NO: 1716319 - DNA, 15 bp, Homo sapiens
tcctgcaccaatatc

SEQ ID NO: 1716320 - DNA, 15 bp, Homo sapiens
cctgcaccaatatca

SEQ ID NO: 1716321 - DNA, 15 bp, Homo sapiens
ctgcaccaatatcag

SEQ ID NO: 1716322 - DNA, 15 bp, Homo sapiens
tgcaccaatatcagc

SEQ ID NO: 1716323 - DNA, 15 bp, Homo sapiens
gcaccaatatcagca

SEQ ID NO: 1716324 - DNA, 15 bp, Homo sapiens
caccaatatcagcat

SEQ ID NO: 1716325 - DNA, 15 bp, Homo sapiens
accaatatcagcatt

SEQ ID NO: 1716326 - DNA, 15 bp, Homo sapiens
ccaatatcagcattt

SEQ ID NO: 1716327 - DNA, 15 bp, Homo sapiens
caatatcagcatttc

SEQ ID NO: 1716328 - DNA, 15 bp, Homo sapiens
aatatcagcatttct

SEQ ID NO: 1716329 - DNA, 15 bp, Homo sapiens
gcgccctccctgccc

SEQ ID NO: 1716330 - DNA, 15 bp, Homo sapiens
cgccctccctgcccc

SEQ ID NO: 1716331 - DNA, 15 bp, Homo sapiens
gccctccctgccccc

SEQ ID NO: 1716332 - DNA, 15 bp, Homo sapiens
ccctccctgcccccc

SEQ ID NO: 1716333 - DNA, 15 bp, Homo sapiens
cctccctgccccccg

SEQ ID NO: 1716334 - DNA, 15 bp, Homo sapiens
ctccctgccccccgc

SEQ ID NO: 1716335 - DNA, 15 bp, Homo sapiens
tccctgccccccgcc

SEQ ID NO: 1716336 - DNA, 15 bp, Homo sapiens
ccctgccccccgcca

SEQ ID NO: 1716337 - DNA, 15 bp, Homo sapiens
cctgccccccgccac

SEQ ID NO: 1716338 - DNA, 15 bp, Homo sapiens
ctgccccccgccacg

SEQ ID NO: 1716339 - DNA, 15 bp, Homo sapiens
tgccccccgccacgg

SEQ ID NO: 1716340 - DNA, 15 bp, Homo sapiens
gccccccgccacggc

SEQ ID NO: 1716341 - DNA, 15 bp, Homo sapiens
ccccccgccacggcg

SEQ ID NO: 1716342 - DNA, 15 bp, Homo sapiens
cccccgccacggcgg

SEQ ID NO: 1716343 - DNA, 15 bp, Homo sapiens
ccccgccacggcgga

SEQ ID NO: 1716344 - DNA, 15 bp, Homo sapiens
cccgccacggcggag

SEQ ID NO: 1716345 - DNA, 15 bp, Homo sapiens
ccgccacggcggagc

SEQ ID NO: 1716346 - DNA, 15 bp, Homo sapiens
cgccacggcggagcg

SEQ ID NO: 1716347 - DNA, 15 bp, Homo sapiens
gccacggcggagcgt

SEQ ID NO: 1716348 - DNA, 15 bp, Homo sapiens
ccacggcggagcgtc

SEQ ID NO: 1716349 - DNA, 15 bp, Homo sapiens
cacggcggagcgtct

SEQ ID NO: 1716350 - DNA, 15 bp, Homo sapiens
acggcggagcgtctg

SEQ ID NO: 1716351 - DNA, 15 bp, Homo sapiens
cggcggagcgtctgc

SEQ ID NO: 1716352 - DNA, 15 bp, Homo sapiens
ggcggagcgtctgca

SEQ ID NO: 1716353 - DNA, 15 bp, Homo sapiens
gcggagcgtctgcag

SEQ ID NO: 1716354 - DNA, 15 bp, Homo sapiens
cggagcgtctgcaga

SEQ ID NO: 1716355 - DNA, 15 bp, Homo sapiens
ggagcgtctgcagaa

SEQ ID NO: 1716356 - DNA, 15 bp, Homo sapiens
gagcgtctgcagaat

SEQ ID NO: 1716357 - DNA, 15 bp, Homo sapiens
agcgtctgcagaatg

SEQ ID NO: 1716358 - DNA, 15 bp, Homo sapiens
gcgtctgcagaatgg

SEQ ID NO: 1716359 - DNA, 15 bp, Homo sapiens
cgtctgcagaatggt

SEQ ID NO: 1716360 - DNA, 15 bp, Homo sapiens
gtctgcagaatggtg

SEQ ID NO: 1716361 - DNA, 15 bp, Homo sapiens
tctgcagaatggtga

SEQ ID NO: 1716362 - DNA, 15 bp, Homo sapiens
ctgcagaatggtgac

SEQ ID NO: 1716363 - DNA, 15 bp, Homo sapiens
tgcagaatggtgaca

SEQ ID NO: 1716364 - DNA, 15 bp, Homo sapiens
gcagaatggtgacag

SEQ ID NO: 1716365 - DNA, 15 bp, Homo sapiens
cagaatggtgacagg

SEQ ID NO: 1716366 - DNA, 15 bp, Homo sapiens
agaatggtgacagga

SEQ ID NO: 1716367 - DNA, 15 bp, Homo sapiens
gaatggtgacaggat

SEQ ID NO: 1716368 - DNA, 15 bp, Homo sapiens
aatggtgacaggatt

SEQ ID NO: 1716369 - DNA, 15 bp, Homo sapiens
atggtgacaggattc

SEQ ID NO: 1716370 - DNA, 15 bp, Homo sapiens
tggtgacaggattct

SEQ ID NO: 1716371 - DNA, 15 bp, Homo sapiens
ggtgacaggattctg

SEQ ID NO: 1716372 - DNA, 15 bp, Homo sapiens
gtgacaggattctgg

SEQ ID NO: 1716373 - DNA, 15 bp, Homo sapiens
tgacaggattctggg

SEQ ID NO: 1716374 - DNA, 15 bp, Homo sapiens
gacaggattctgggt

SEQ ID NO: 1716375 - DNA, 15 bp, Homo sapiens
acaggattctgggtt

SEQ ID NO: 1716376 - DNA, 15 bp, Homo sapiens
caggattctgggttc

SEQ ID NO: 1716377 - DNA, 15 bp, Homo sapiens
aggattctgggttct

SEQ ID NO: 1716378 - DNA, 15 bp, Homo sapiens
ggattctgggttctt

SEQ ID NO: 1716379 - DNA, 15 bp, Homo sapiens
gattctgggttcttg

SEQ ID NO: 1716380 - DNA, 15 bp, Homo sapiens
attctgggttcttgg

SEQ ID NO: 1716381 - DNA, 15 bp, Homo sapiens
ttctgggttcttggg

SEQ ID NO: 1716382 - DNA, 15 bp, Homo sapiens
tctgggttcttgggc

SEQ ID NO: 1716383 - DNA, 15 bp, Homo sapiens
ctgggttcttgggcg

SEQ ID NO: 1716384 - DNA, 15 bp, Homo sapiens
tgggttcttgggcga

SEQ ID NO: 1716385 - DNA, 15 bp, Homo sapiens
gggttcttgggcgag

SEQ ID NO: 1716386 - DNA, 15 bp, Homo sapiens
ggttcttgggcgagg

SEQ ID NO: 1716387 - DNA, 15 bp, Homo sapiens
gttcttgggcgaggg

SEQ ID NO: 1716388 - DNA, 15 bp, Homo sapiens
ttcttgggcgagggg

SEQ ID NO: 1716389 - DNA, 15 bp, Homo sapiens
tcttgggcgaggggt

SEQ ID NO: 1716390 - DNA, 15 bp, Homo sapiens
cttgggcgaggggtc

SEQ ID NO: 1716391 - DNA, 15 bp, Homo sapiens
ttgggcgaggggtct

SEQ ID NO: 1716392 - DNA, 15 bp, Homo sapiens
tgggcgaggggtctc

SEQ ID NO: 1716393 - DNA, 15 bp, Homo sapiens
gggcgaggggtctcg

SEQ ID NO: 1716394 - DNA, 15 bp, Homo sapiens
ggcgaggggtctcgg

SEQ ID NO: 1716395 - DNA, 15 bp, Homo sapiens
gcgaggggtctcggc

SEQ ID NO: 1716396 - DNA, 15 bp, Homo sapiens
cgaggggtctcggct

SEQ ID NO: 1716397 - DNA, 15 bp, Homo sapiens
gaggggtctcggctt

SEQ ID NO: 1716398 - DNA, 15 bp, Homo sapiens
aggggtctcggcttc

SEQ ID NO: 1716399 - DNA, 15 bp, Homo sapiens
ggggtctcggcttca

SEQ ID NO: 1716400 - DNA, 15 bp, Homo sapiens
gggtctcggcttcaa

SEQ ID NO: 1716401 - DNA, 15 bp, Homo sapiens
ggtctcggcttcaac

SEQ ID NO: 1716402 - DNA, 15 bp, Homo sapiens
gtctcggcttcaact

SEQ ID NO: 1716403 - DNA, 15 bp, Homo sapiens
tctcggcttcaactt

SEQ ID NO: 1716404 - DNA, 15 bp, Homo sapiens
ctcggcttcaacttg

SEQ ID NO: 1716405 - DNA, 15 bp, Homo sapiens
tcggcttcaacttga

SEQ ID NO: 1716406 - DNA, 15 bp, Homo sapiens
cggcttcaacttgac

SEQ ID NO: 1716407 - DNA, 15 bp, Homo sapiens
ggcttcaacttgaca

SEQ ID NO: 1716408 - DNA, 15 bp, Homo sapiens
gcttcaacttgacag

SEQ ID NO: 1716409 - DNA, 15 bp, Homo sapiens
cttcaacttgacagg

SEQ ID NO: 1716410 - DNA, 15 bp, Homo sapiens
ttcaacttgacaggt

SEQ ID NO: 1716411 - DNA, 15 bp, Homo sapiens
tcaacttgacaggtg

SEQ ID NO: 1716412 - DNA, 15 bp, Homo sapiens
caacttgacaggtgt

SEQ ID NO: 1716413 - DNA, 15 bp, Homo sapiens
aacttgacaggtgtc

SEQ ID NO: 1716414 - DNA, 15 bp, Homo sapiens
acttgacaggtgtcg

SEQ ID NO: 1716415 - DNA, 15 bp, Homo sapiens
cttgacaggtgtcgg

SEQ ID NO: 1716416 - DNA, 15 bp, Homo sapiens
ttgacaggtgtcggg

SEQ ID NO: 1716417 - DNA, 15 bp, Homo sapiens
tgacaggtgtcgggc

SEQ ID NO: 1716418 - DNA, 15 bp, Homo sapiens
gacaggtgtcgggcg

SEQ ID NO: 1716419 - DNA, 15 bp, Homo sapiens
acaggtgtcgggcgg

SEQ ID NO: 1716420 - DNA, 15 bp, Homo sapiens
caggtgtcgggcggg

SEQ ID NO: 1716421 - DNA, 15 bp, Homo sapiens
aggtgtcgggcgggt

SEQ ID NO: 1716422 - DNA, 15 bp, Homo sapiens
ggtgtcgggcgggtg

SEQ ID NO: 1716423 - DNA, 15 bp, Homo sapiens
gtgtcgggcgggtgg

SEQ ID NO: 1716424 - DNA, 15 bp, Homo sapiens
tgtcgggcgggtggg

SEQ ID NO: 1716425 - DNA, 15 bp, Homo sapiens
gtcgggcgggtgggg

SEQ ID NO: 1716426 - DNA, 15 bp, Homo sapiens
tcgggcgggtggggc

SEQ ID NO: 1716427 - DNA, 15 bp, Homo sapiens
cgggcgggtggggct

SEQ ID NO: 1716428 - DNA, 15 bp, Homo sapiens
gggcgggtggggcta

SEQ ID NO: 1716429 - DNA, 15 bp, Homo sapiens
ggcgggtggggctag

SEQ ID NO: 1716430 - DNA, 15 bp, Homo sapiens
gcgggtggggctagg

SEQ ID NO: 1716431 - DNA, 15 bp, Homo sapiens
cgggtggggctaggg

SEQ ID NO: 1716432 - DNA, 15 bp, Homo sapiens
gggtggggctagggt

SEQ ID NO: 1716433 - DNA, 15 bp, Homo sapiens
ggtggggctagggtc

SEQ ID NO: 1716434 - DNA, 15 bp, Homo sapiens
gtggggctagggtcc

SEQ ID NO: 1716435 - DNA, 15 bp, Homo sapiens
tggggctagggtcct

SEQ ID NO: 1716436 - DNA, 15 bp, Homo sapiens
ggggctagggtcctg

SEQ ID NO: 1716437 - DNA, 15 bp, Homo sapiens
gggctagggtcctga

SEQ ID NO: 1716438 - DNA, 15 bp, Homo sapiens
ggctagggtcctgag

SEQ ID NO: 1716439 - DNA, 15 bp, Homo sapiens
gctagggtcctgagc

SEQ ID NO: 1716440 - DNA, 15 bp, Homo sapiens
ctagggtcctgagcg

SEQ ID NO: 1716441 - DNA, 15 bp, Homo sapiens
tagggtcctgagcga

SEQ ID NO: 1716442 - DNA, 15 bp, Homo sapiens
agggtcctgagcgaa

SEQ ID NO: 1716443 - DNA, 15 bp, Homo sapiens
gggtcctgagcgaag

SEQ ID NO: 1716444 - DNA, 15 bp, Homo sapiens
ggtcctgagcgaagt

SEQ ID NO: 1716445 - DNA, 15 bp, Homo sapiens
gtcctgagcgaagtg

SEQ ID NO: 1716446 - DNA, 15 bp, Homo sapiens
tcctgagcgaagtga

SEQ ID NO: 1716447 - DNA, 15 bp, Homo sapiens
cctgagcgaagtgac

SEQ ID NO: 1716448 - DNA, 15 bp, Homo sapiens
ctgagcgaagtgaca

SEQ ID NO: 1716449 - DNA, 15 bp, Homo sapiens
tgagcgaagtgacag

SEQ ID NO: 1716450 - DNA, 15 bp, Homo sapiens
gagcgaagtgacagg

SEQ ID NO: 1716451 - DNA, 15 bp, Homo sapiens
agcgaagtgacaggt

SEQ ID NO: 1716452 - DNA, 15 bp, Homo sapiens
gcgaagtgacaggtg

SEQ ID NO: 1716453 - DNA, 15 bp, Homo sapiens
cgaagtgacaggtgc

SEQ ID NO: 1716454 - DNA, 15 bp, Homo sapiens
gaagtgacaggtgca

SEQ ID NO: 1716455 - DNA, 15 bp, Homo sapiens
aagtgacaggtgcag

SEQ ID NO: 1716456 - DNA, 15 bp, Homo sapiens
agtgacaggtgcagt

SEQ ID NO: 1716457 - DNA, 15 bp, Homo sapiens
gtgacaggtgcagtt

SEQ ID NO: 1716458 - DNA, 15 bp, Homo sapiens
tgacaggtgcagttc

SEQ ID NO: 1716459 - DNA, 15 bp, Homo sapiens
gacaggtgcagttcc

SEQ ID NO: 1716460 - DNA, 15 bp, Homo sapiens
acaggtgcagttccc

SEQ ID NO: 1716461 - DNA, 15 bp, Homo sapiens
caggtgcagttccct

SEQ ID NO: 1716462 - DNA, 15 bp, Homo sapiens
aggtgcagttccctc

SEQ ID NO: 1716463 - DNA, 15 bp, Homo sapiens
ggtgcagttccctct

SEQ ID NO: 1716464 - DNA, 15 bp, Homo sapiens
gtgcagttccctctt

SEQ ID NO: 1716465 - DNA, 15 bp, Homo sapiens
tgcagttccctcttg

SEQ ID NO: 1716466 - DNA, 15 bp, Homo sapiens
gcagttccctcttgt

SEQ ID NO: 1716467 - DNA, 15 bp, Homo sapiens
cagttccctcttgtg

SEQ ID NO: 1716468 - DNA, 15 bp, Homo sapiens
agttccctcttgtga

SEQ ID NO: 1716469 - DNA, 15 bp, Homo sapiens
gttccctcttgtgag

SEQ ID NO: 1716470 - DNA, 15 bp, Homo sapiens
ttccctcttgtgagg

SEQ ID NO: 1716471 - DNA, 15 bp, Homo sapiens
tccctcttgtgaggc

SEQ ID NO: 1716472 - DNA, 15 bp, Homo sapiens
ccctcttgtgaggct

SEQ ID NO: 1716473 - DNA, 15 bp, Homo sapiens
cctcttgtgaggctc

SEQ ID NO: 1716474 - DNA, 15 bp, Homo sapiens
ctcttgtgaggctcg

SEQ ID NO: 1716475 - DNA, 15 bp, Homo sapiens
tcttgtgaggctcgg

SEQ ID NO: 1716476 - DNA, 15 bp, Homo sapiens
cttgtgaggctcgga

SEQ ID NO: 1716477 - DNA, 15 bp, Homo sapiens
ttgtgaggctcggag

SEQ ID NO: 1716478 - DNA, 15 bp, Homo sapiens
tgtgaggctcggagg

SEQ ID NO: 1716479 - DNA, 15 bp, Homo sapiens
gtgaggctcggaggc

SEQ ID NO: 1716480 - DNA, 15 bp, Homo sapiens
tgaggctcggaggca

SEQ ID NO: 1716481 - DNA, 15 bp, Homo sapiens
gaggctcggaggcag

SEQ ID NO: 1716482 - DNA, 15 bp, Homo sapiens
aggctcggaggcaga

SEQ ID NO: 1716483 - DNA, 15 bp, Homo sapiens
ggctcggaggcagag

SEQ ID NO: 1716484 - DNA, 15 bp, Homo sapiens
gctcggaggcagagg

SEQ ID NO: 1716485 - DNA, 15 bp, Homo sapiens
ctcggaggcagaggg

SEQ ID NO: 1716486 - DNA, 15 bp, Homo sapiens
tcggaggcagagggt

SEQ ID NO: 1716487 - DNA, 15 bp, Homo sapiens
cggaggcagagggtc

SEQ ID NO: 1716488 - DNA, 15 bp, Homo sapiens
ggaggcagagggtcg

SEQ ID NO: 1716489 - DNA, 15 bp, Homo sapiens
gaggcagagggtcgt

SEQ ID NO: 1716490 - DNA, 15 bp, Homo sapiens
aggcagagggtcgtt

SEQ ID NO: 1716491 - DNA, 15 bp, Homo sapiens
ggcagagggtcgttg

SEQ ID NO: 1716492 - DNA, 15 bp, Homo sapiens
gcagagggtcgttgc

SEQ ID NO: 1716493 - DNA, 15 bp, Homo sapiens
cagagggtcgttgcg

SEQ ID NO: 1716494 - DNA, 15 bp, Homo sapiens
agagggtcgttgcga

SEQ ID NO: 1716495 - DNA, 15 bp, Homo sapiens
gagggtcgttgcgag

SEQ ID NO: 1716496 - DNA, 15 bp, Homo sapiens
agggtcgttgcgagc

SEQ ID NO: 1716497 - DNA, 15 bp, Homo sapiens
gggtcgttgcgagcg

SEQ ID NO: 1716498 - DNA, 15 bp, Homo sapiens
ggtcgttgcgagcgt

SEQ ID NO: 1716499 - DNA, 15 bp, Homo sapiens
gtcgttgcgagcgtc

SEQ ID NO: 1716500 - DNA, 15 bp, Homo sapiens
tcgttgcgagcgtcc

SEQ ID NO: 1716501 - DNA, 15 bp, Homo sapiens
cgttgcgagcgtcca

SEQ ID NO: 1716502 - DNA, 15 bp, Homo sapiens
gttgcgagcgtccat

SEQ ID NO: 1716503 - DNA, 15 bp, Homo sapiens
ttgcgagcgtccatc

SEQ ID NO: 1716504 - DNA, 15 bp, Homo sapiens
tgcgagcgtccatca

SEQ ID NO: 1716505 - DNA, 15 bp, Homo sapiens
gcgagcgtccatcag

SEQ ID NO: 1716506 - DNA, 15 bp, Homo sapiens
cgagcgtccatcaga

SEQ ID NO: 1716507 - DNA, 15 bp, Homo sapiens
gagcgtccatcagac

SEQ ID NO: 1716508 - DNA, 15 bp, Homo sapiens
agcgtccatcagacg

SEQ ID NO: 1716509 - DNA, 15 bp, Homo sapiens
gcgtccatcagacgc

SEQ ID NO: 1716510 - DNA, 15 bp, Homo sapiens
cgtccatcagacgca

SEQ ID NO: 1716511 - DNA, 15 bp, Homo sapiens
gtccatcagacgcaa

SEQ ID NO: 1716512 - DNA, 15 bp, Homo sapiens
tccatcagacgcaaa

SEQ ID NO: 1716513 - DNA, 15 bp, Homo sapiens
ccatcagacgcaaaa

SEQ ID NO: 1716514 - DNA, 15 bp, Homo sapiens
catcagacgcaaaaa

SEQ ID NO: 1716515 - DNA, 15 bp, Homo sapiens
atcagacgcaaaaaa

SEQ ID NO: 1716516 - DNA, 15 bp, Homo sapiens
tcagacgcaaaaaat

SEQ ID NO: 1716517 - DNA, 15 bp, Homo sapiens
cagacgcaaaaaatg

SEQ ID NO: 1716518 - DNA, 15 bp, Homo sapiens
agacgcaaaaaatga

SEQ ID NO: 1716519 - DNA, 15 bp, Homo sapiens
gacgcaaaaaatgaa

SEQ ID NO: 1716520 - DNA, 15 bp, Homo sapiens
acgcaaaaaatgaaa

SEQ ID NO: 1716521 - DNA, 15 bp, Homo sapiens
cgcaaaaaatgaaaa

SEQ ID NO: 1716522 - DNA, 15 bp, Homo sapiens
gcaaaaaatgaaaaa

SEQ ID NO: 1716523 - DNA, 15 bp, Homo sapiens
caaaaaatgaaaaat

SEQ ID NO: 1716524 - DNA, 15 bp, Homo sapiens
aaaaaatgaaaaata

SEQ ID NO: 1716525 - DNA, 15 bp, Homo sapiens
aaaaatgaaaaataa

SEQ ID NO: 1716526 - DNA, 15 bp, Homo sapiens
aaaatgaaaaataaa

SEQ ID NO: 1716527 - DNA, 15 bp, Homo sapiens
aaatgaaaaataaaa

SEQ ID NO: 1716528 - DNA, 15 bp, Homo sapiens
aatgaaaaataaaaa

SEQ ID NO: 1716529 - DNA, 15 bp, Homo sapiens
atgaaaaataaaaat

SEQ ID NO: 1716530 - DNA, 15 bp, Homo sapiens
tgaaaaataaaaata

SEQ ID NO: 1716531 - DNA, 15 bp, Homo sapiens
gaaaaataaaaatac

SEQ ID NO: 1716532 - DNA, 15 bp, Homo sapiens
aaaaataaaaataca

SEQ ID NO: 1716533 - DNA, 15 bp, Homo sapiens
aaaataaaaatacaa

SEQ ID NO: 1716534 - DNA, 15 bp, Homo sapiens
aaataaaaatacaaa

SEQ ID NO: 1716535 - DNA, 15 bp, Homo sapiens
aaatacaaaaatggt

SEQ ID NO: 1716536 - DNA, 15 bp, Homo sapiens
aatacaaaaatggtg

SEQ ID NO: 1716537 - DNA, 15 bp, Homo sapiens
atacaaaaatggtgt

SEQ ID NO: 1716538 - DNA, 15 bp, Homo sapiens
tacaaaaatggtgtc

SEQ ID NO: 1716539 - DNA, 15 bp, Homo sapiens
acaaaaatggtgtct

SEQ ID NO: 1716540 - DNA, 15 bp, Homo sapiens
caaaaatggtgtctg

SEQ ID NO: 1716541 - DNA, 15 bp, Homo sapiens
aaaaatggtgtctgt

SEQ ID NO: 1716542 - DNA, 15 bp, Homo sapiens
aaaatggtgtctgtg

SEQ ID NO: 1716543 - DNA, 15 bp, Homo sapiens
aaatggtgtctgtgg

SEQ ID NO: 1716544 - DNA, 15 bp, Homo sapiens
aatggtgtctgtggg

SEQ ID NO: 1716545 - DNA, 15 bp, Homo sapiens
atggtgtctgtggga

SEQ ID NO: 1716546 - DNA, 15 bp, Homo sapiens
tggtgtctgtgggag

SEQ ID NO: 1716547 - DNA, 15 bp, Homo sapiens
ggtgtctgtgggaga

SEQ ID NO: 1716548 - DNA, 15 bp, Homo sapiens
gtgtctgtgggagag

SEQ ID NO: 1716549 - DNA, 15 bp, Homo sapiens
tgtctgtgggagagt

SEQ ID NO: 1716550 - DNA, 15 bp, Homo sapiens
gtctgtgggagagtt

SEQ ID NO: 1716551 - DNA, 15 bp, Homo sapiens
tctgtgggagagttt

SEQ ID NO: 1716552 - DNA, 15 bp, Homo sapiens
ctgtgggagagtttt

SEQ ID NO: 1716553 - DNA, 15 bp, Homo sapiens
tgtgggagagttttt

SEQ ID NO: 1716554 - DNA, 15 bp, Homo sapiens
gtgggagagtttttc

SEQ ID NO: 1716555 - DNA, 15 bp, Homo sapiens
tgggagagtttttca

SEQ ID NO: 1716556 - DNA, 15 bp, Homo sapiens
gggagagtttttcac

SEQ ID NO: 1716557 - DNA, 15 bp, Homo sapiens
ggagagtttttcacc

SEQ ID NO: 1716558 - DNA, 15 bp, Homo sapiens
gagagtttttcaccg

SEQ ID NO: 1716559 - DNA, 15 bp, Homo sapiens
agagtttttcaccgg

SEQ ID NO: 1716560 - DNA, 15 bp, Homo sapiens
gagtttttcaccgga

SEQ ID NO: 1716561 - DNA, 15 bp, Homo sapiens
agtttttcaccggag

SEQ ID NO: 1716562 - DNA, 15 bp, Homo sapiens
gtttttcaccggaga

SEQ ID NO: 1716563 - DNA, 15 bp, Homo sapiens
tttttcaccggagaa

SEQ ID NO: 1716564 - DNA, 15 bp, Homo sapiens
ttttcaccggagaat

SEQ ID NO: 1716565 - DNA, 15 bp, Homo sapiens
tttcaccggagaatt

SEQ ID NO: 1716566 - DNA, 15 bp, Homo sapiens
ttcaccggagaattg

SEQ ID NO: 1716567 - DNA, 15 bp, Homo sapiens
tcaccggagaattgg

SEQ ID NO: 1716568 - DNA, 15 bp, Homo sapiens
caccggagaattgga

SEQ ID NO: 1716569 - DNA, 15 bp, Homo sapiens
accggagaattggag

SEQ ID NO: 1716570 - DNA, 15 bp, Homo sapiens
ccggagaattggagt

SEQ ID NO: 1716571 - DNA, 15 bp, Homo sapiens
cggagaattggagta

SEQ ID NO: 1716572 - DNA, 15 bp, Homo sapiens
ggagaattggagtac

SEQ ID NO: 1716573 - DNA, 15 bp, Homo sapiens
gagaattggagtact

SEQ ID NO: 1716574 - DNA, 15 bp, Homo sapiens
agaattggagtactc

SEQ ID NO: 1716575 - DNA, 15 bp, Homo sapiens
gaattggagtactcc

SEQ ID NO: 1716576 - DNA, 15 bp, Homo sapiens
aattggagtactccg

SEQ ID NO: 1716577 - DNA, 15 bp, Homo sapiens
attggagtactccgg

SEQ ID NO: 1716578 - DNA, 15 bp, Homo sapiens
ttggagtactccggt

SEQ ID NO: 1716579 - DNA, 15 bp, Homo sapiens
tggagtactccggtg

SEQ ID NO: 1716580 - DNA, 15 bp, Homo sapiens
ggagtactccggtgg

SEQ ID NO: 1716581 - DNA, 15 bp, Homo sapiens
gagtactccggtggt

SEQ ID NO: 1716582 - DNA, 15 bp, Homo sapiens
agtactccggtggtc

SEQ ID NO: 1716583 - DNA, 15 bp, Homo sapiens
gtactccggtggtcg

SEQ ID NO: 1716584 - DNA, 15 bp, Homo sapiens
tactccggtggtcgt

SEQ ID NO: 1716585 - DNA, 15 bp, Homo sapiens
actccggtggtcgtc

SEQ ID NO: 1716586 - DNA, 15 bp, Homo sapiens
ctccggtggtcgtct

SEQ ID NO: 1716587 - DNA, 15 bp, Homo sapiens
tccggtggtcgtctg

SEQ ID NO: 1716588 - DNA, 15 bp, Homo sapiens
ccggtggtcgtctga

SEQ ID NO: 1716589 - DNA, 15 bp, Homo sapiens
cggtggtcgtctgac

SEQ ID NO: 1716590 - DNA, 15 bp, Homo sapiens
ggtggtcgtctgact

SEQ ID NO: 1716591 - DNA, 15 bp, Homo sapiens
gtggtcgtctgactt

SEQ ID NO: 1716592 - DNA, 15 bp, Homo sapiens
tggtcgtctgacttt

SEQ ID NO: 1716593 - DNA, 15 bp, Homo sapiens
ggtcgtctgactttc

SEQ ID NO: 1716594 - DNA, 15 bp, Homo sapiens
gtcgtctgactttct

SEQ ID NO: 1716595 - DNA, 15 bp, Homo sapiens
tcgtctgactttctg

SEQ ID NO: 1716596 - DNA, 15 bp, Homo sapiens
cgtctgactttctgt

SEQ ID NO: 1716597 - DNA, 15 bp, Homo sapiens
gtctgactttctgtt

SEQ ID NO: 1716598 - DNA, 15 bp, Homo sapiens
tctgactttctgttt

SEQ ID NO: 1716599 - DNA, 15 bp, Homo sapiens
ctgactttctgtttt

SEQ ID NO: 1716600 - DNA, 15 bp, Homo sapiens
tgactttctgttttg

SEQ ID NO: 1716601 - DNA, 15 bp, Homo sapiens
gactttctgttttgg

SEQ ID NO: 1716602 - DNA, 15 bp, Homo sapiens
actttctgttttggt

SEQ ID NO: 1716603 - DNA, 15 bp, Homo sapiens
ctttctgttttggtt

SEQ ID NO: 1716604 - DNA, 15 bp, Homo sapiens
tttctgttttggttc

SEQ ID NO: 1716605 - DNA, 15 bp, Homo sapiens
ttctgttttggttca

SEQ ID NO: 1716606 - DNA, 15 bp, Homo sapiens
tctgttttggttcac

SEQ ID NO: 1716607 - DNA, 15 bp, Homo sapiens
ctgttttggttcacg

SEQ ID NO: 1716608 - DNA, 15 bp, Homo sapiens
tgttttggttcacgc

SEQ ID NO: 1716609 - DNA, 15 bp, Homo sapiens
gttttggttcacgcg

SEQ ID NO: 1716610 - DNA, 15 bp, Homo sapiens
ttttggttcacgcga

SEQ ID NO: 1716611 - DNA, 15 bp, Homo sapiens
tttggttcacgcgat

SEQ ID NO: 1716612 - DNA, 15 bp, Homo sapiens
ttggttcacgcgatg

SEQ ID NO: 1716613 - DNA, 15 bp, Homo sapiens
tggttcacgcgatgc

SEQ ID NO: 1716614 - DNA, 15 bp, Homo sapiens
ggttcacgcgatgca

SEQ ID NO: 1716615 - DNA, 15 bp, Homo sapiens
gttcacgcgatgcaa

SEQ ID NO: 1716616 - DNA, 15 bp, Homo sapiens
ttcacgcgatgcaac

SEQ ID NO: 1716617 - DNA, 15 bp, Homo sapiens
tcacgcgatgcaaca

SEQ ID NO: 1716618 - DNA, 15 bp, Homo sapiens
cacgcgatgcaacag

SEQ ID NO: 1716619 - DNA, 15 bp, Homo sapiens
acgcgatgcaacagt

SEQ ID NO: 1716620 - DNA, 15 bp, Homo sapiens
cgcgatgcaacagtt

SEQ ID NO: 1716621 - DNA, 15 bp, Homo sapiens
gcgatgcaacagttg

SEQ ID NO: 1716622 - DNA, 15 bp, Homo sapiens
cgatgcaacagttgg

SEQ ID NO: 1716623 - DNA, 15 bp, Homo sapiens
gatgcaacagttggg

SEQ ID NO: 1716624 - DNA, 15 bp, Homo sapiens
atgcaacagttggga

SEQ ID NO: 1716625 - DNA, 15 bp, Homo sapiens
tgcaacagttgggaa

SEQ ID NO: 1716626 - DNA, 15 bp, Homo sapiens
gcaacagttgggaag

SEQ ID NO: 1716627 - DNA, 15 bp, Homo sapiens
caacagttgggaagt

SEQ ID NO: 1716628 - DNA, 15 bp, Homo sapiens
aacagttgggaagta

SEQ ID NO: 1716629 - DNA, 15 bp, Homo sapiens
acagttgggaagtat

SEQ ID NO: 1716630 - DNA, 15 bp, Homo sapiens
cagttgggaagtatt

SEQ ID NO: 1716631 - DNA, 15 bp, Homo sapiens
agttgggaagtattt

SEQ ID NO: 1716632 - DNA, 15 bp, Homo sapiens
gttgggaagtatttt

SEQ ID NO: 1716633 - DNA, 15 bp, Homo sapiens
ttgggaagtattttc

SEQ ID NO: 1716634 - DNA, 15 bp, Homo sapiens
tgggaagtattttct

SEQ ID NO: 1716635 - DNA, 15 bp, Homo sapiens
gggaagtattttctt

SEQ ID NO: 1716636 - DNA, 15 bp, Homo sapiens
ggaagtattttcttc

SEQ ID NO: 1716637 - DNA, 15 bp, Homo sapiens
gaagtattttcttcc

SEQ ID NO: 1716638 - DNA, 15 bp, Homo sapiens
aagtattttcttccg

SEQ ID NO: 1716639 - DNA, 15 bp, Homo sapiens
agtattttcttccgg

SEQ ID NO: 1716640 - DNA, 15 bp, Homo sapiens
gtattttcttccggg

SEQ ID NO: 1716641 - DNA, 15 bp, Homo sapiens
tattttcttccgggc

SEQ ID NO: 1716642 - DNA, 15 bp, Homo sapiens
attttcttccgggcg

SEQ ID NO: 1716643 - DNA, 15 bp, Homo sapiens
ttttcttccgggcgt

SEQ ID NO: 1716644 - DNA, 15 bp, Homo sapiens
tttcttccgggcgtg

SEQ ID NO: 1716645 - DNA, 15 bp, Homo sapiens
ttcttccgggcgtgc

SEQ ID NO: 1716646 - DNA, 15 bp, Homo sapiens
tcttccgggcgtgca

SEQ ID NO: 1716647 - DNA, 15 bp, Homo sapiens
cttccgggcgtgcac

SEQ ID NO: 1716648 - DNA, 15 bp, Homo sapiens
ttccgggcgtgcact

SEQ ID NO: 1716649 - DNA, 15 bp, Homo sapiens
tccgggcgtgcactg

SEQ ID NO: 1716650 - DNA, 15 bp, Homo sapiens
ccgggcgtgcactgc

SEQ ID NO: 1716651 - DNA, 15 bp, Homo sapiens
cgggcgtgcactgca

SEQ ID NO: 1716652 - DNA, 15 bp, Homo sapiens
gggcgtgcactgcat

SEQ ID NO: 1716653 - DNA, 15 bp, Homo sapiens
ggcgtgcactgcatc

SEQ ID NO: 1716654 - DNA, 15 bp, Homo sapiens
gcgtgcactgcatct

SEQ ID NO: 1716655 - DNA, 15 bp, Homo sapiens
cgtgcactgcatctg

SEQ ID NO: 1716656 - DNA, 15 bp, Homo sapiens
gtgcactgcatctga

SEQ ID NO: 1716657 - DNA, 15 bp, Homo sapiens
tgcactgcatctgaa

SEQ ID NO: 1716658 - DNA, 15 bp, Homo sapiens
gcactgcatctgaag

SEQ ID NO: 1716659 - DNA, 15 bp, Homo sapiens
cactgcatctgaagt

SEQ ID NO: 1716660 - DNA, 15 bp, Homo sapiens
actgcatctgaagtc

SEQ ID NO: 1716661 - DNA, 15 bp, Homo sapiens
ctgcatctgaagtcc

SEQ ID NO: 1716662 - DNA, 15 bp, Homo sapiens
tgcatctgaagtcca

SEQ ID NO: 1716663 - DNA, 15 bp, Homo sapiens
gcatctgaagtccat

SEQ ID NO: 1716664 - DNA, 15 bp, Homo sapiens
catctgaagtccatt

SEQ ID NO: 1716665 - DNA, 15 bp, Homo sapiens
atctgaagtccattt

SEQ ID NO: 1716666 - DNA, 15 bp, Homo sapiens
tctgaagtccatttg

SEQ ID NO: 1716667 - DNA, 15 bp, Homo sapiens
ctgaagtccatttgt

SEQ ID NO: 1716668 - DNA, 15 bp, Homo sapiens
tgaagtccatttgtg

SEQ ID NO: 1716669 - DNA, 15 bp, Homo sapiens
gaagtccatttgtgg

SEQ ID NO: 1716670 - DNA, 15 bp, Homo sapiens
aagtccatttgtggg

SEQ ID NO: 1716671 - DNA, 15 bp, Homo sapiens
agtccatttgtggga

SEQ ID NO: 1716672 - DNA, 15 bp, Homo sapiens
gtccatttgtgggag

SEQ ID NO: 1716673 - DNA, 15 bp, Homo sapiens
tccatttgtgggaga

SEQ ID NO: 1716674 - DNA, 15 bp, Homo sapiens
ccatttgtgggagag

SEQ ID NO: 1716675 - DNA, 15 bp, Homo sapiens
catttgtgggagagg

SEQ ID NO: 1716676 - DNA, 15 bp, Homo sapiens
atttgtgggagaggc

SEQ ID NO: 1716677 - DNA, 15 bp, Homo sapiens
tttgtgggagaggcc

SEQ ID NO: 1716678 - DNA, 15 bp, Homo sapiens
ttgtgggagaggccg

SEQ ID NO: 1716679 - DNA, 15 bp, Homo sapiens
tgtgggagaggccga

SEQ ID NO: 1716680 - DNA, 15 bp, Homo sapiens
gtgggagaggccgac

SEQ ID NO: 1716681 - DNA, 15 bp, Homo sapiens
tgggagaggccgacc

SEQ ID NO: 1716682 - DNA, 15 bp, Homo sapiens
gggagaggccgacca

SEQ ID NO: 1716683 - DNA, 15 bp, Homo sapiens
ggagaggccgaccag

SEQ ID NO: 1716684 - DNA, 15 bp, Homo sapiens
gagaggccgaccaga

SEQ ID NO: 1716685 - DNA, 15 bp, Homo sapiens
agaggccgaccagaa

SEQ ID NO: 1716686 - DNA, 15 bp, Homo sapiens
gaggccgaccagaaa

SEQ ID NO: 1716687 - DNA, 15 bp, Homo sapiens
aggccgaccagaaag

SEQ ID NO: 1716688 - DNA, 15 bp, Homo sapiens
ggccgaccagaaagc

SEQ ID NO: 1716689 - DNA, 15 bp, Homo sapiens
gccgaccagaaagcc

SEQ ID NO: 1716690 - DNA, 15 bp, Homo sapiens
ccgaccagaaagcct

SEQ ID NO: 1716691 - DNA, 15 bp, Homo sapiens
cgaccagaaagcctt

SEQ ID NO: 1716692 - DNA, 15 bp, Homo sapiens
gaccagaaagccttg

SEQ ID NO: 1716693 - DNA, 15 bp, Homo sapiens
accagaaagccttgg

SEQ ID NO: 1716694 - DNA, 15 bp, Homo sapiens
ccagaaagccttgga

SEQ ID NO: 1716695 - DNA, 15 bp, Homo sapiens
cagaaagccttggac

SEQ ID NO: 1716696 - DNA, 15 bp, Homo sapiens
agaaagccttggaca

SEQ ID NO: 1716697 - DNA, 15 bp, Homo sapiens
gaaagccttggacaa

SEQ ID NO: 1716698 - DNA, 15 bp, Homo sapiens
aaagccttggacaag

SEQ ID NO: 1716699 - DNA, 15 bp, Homo sapiens
aagccttggacaaga

SEQ ID NO: 1716700 - DNA, 15 bp, Homo sapiens
agccttggacaagaa

SEQ ID NO: 1716701 - DNA, 15 bp, Homo sapiens
gccttggacaagaag

SEQ ID NO: 1716702 - DNA, 15 bp, Homo sapiens
ccttggacaagaagc

SEQ ID NO: 1716703 - DNA, 15 bp, Homo sapiens
cttggacaagaagcg

SEQ ID NO: 1716704 - DNA, 15 bp, Homo sapiens
ttggacaagaagcgc

SEQ ID NO: 1716705 - DNA, 15 bp, Homo sapiens
tggacaagaagcgca

SEQ ID NO: 1716706 - DNA, 15 bp, Homo sapiens
ggacaagaagcgcag

SEQ ID NO: 1716707 - DNA, 15 bp, Homo sapiens
gacaagaagcgcagg

SEQ ID NO: 1716708 - DNA, 15 bp, Homo sapiens
acaagaagcgcaggg

SEQ ID NO: 1716709 - DNA, 15 bp, Homo sapiens
caagaagcgcagggt

SEQ ID NO: 1716710 - DNA, 15 bp, Homo sapiens
aagaagcgcagggtc

SEQ ID NO: 1716711 - DNA, 15 bp, Homo sapiens
agaagcgcagggtcc

SEQ ID NO: 1716712 - DNA, 15 bp, Homo sapiens
gaagcgcagggtcct

SEQ ID NO: 1716713 - DNA, 15 bp, Homo sapiens
aagcgcagggtcctg

SEQ ID NO: 1716714 - DNA, 15 bp, Homo sapiens
agcgcagggtcctga

SEQ ID NO: 1716715 - DNA, 15 bp, Homo sapiens
gcgcagggtcctgag

SEQ ID NO: 1716716 - DNA, 15 bp, Homo sapiens
cgcagggtcctgagt

SEQ ID NO: 1716717 - DNA, 15 bp, Homo sapiens
gcagggtcctgagtg

SEQ ID NO: 1716718 - DNA, 15 bp, Homo sapiens
cagggtcctgagtgt

SEQ ID NO: 1716719 - DNA, 15 bp, Homo sapiens
agggtcctgagtgtc

SEQ ID NO: 1716720 - DNA, 15 bp, Homo sapiens
gggtcctgagtgtcc

SEQ ID NO: 1716721 - DNA, 15 bp, Homo sapiens
ggtcctgagtgtcca

SEQ ID NO: 1716722 - DNA, 15 bp, Homo sapiens
gtcctgagtgtccat

SEQ ID NO: 1716723 - DNA, 15 bp, Homo sapiens
tcctgagtgtccatt

SEQ ID NO: 1716724 - DNA, 15 bp, Homo sapiens
cctgagtgtccattg

SEQ ID NO: 1716725 - DNA, 15 bp, Homo sapiens
ctgagtgtccattgc

SEQ ID NO: 1716726 - DNA, 15 bp, Homo sapiens
tgagtgtccattgcc

SEQ ID NO: 1716727 - DNA, 15 bp, Homo sapiens
gagtgtccattgccc

SEQ ID NO: 1716728 - DNA, 15 bp, Homo sapiens
agtgtccattgccca

SEQ ID NO: 1716729 - DNA, 15 bp, Homo sapiens
gtgtccattgcccac

SEQ ID NO: 1716730 - DNA, 15 bp, Homo sapiens
tgtccattgcccaca

SEQ ID NO: 1716731 - DNA, 15 bp, Homo sapiens
gtccattgcccacag

SEQ ID NO: 1716732 - DNA, 15 bp, Homo sapiens
tccattgcccacagg

SEQ ID NO: 1716733 - DNA, 15 bp, Homo sapiens
ccattgcccacagga

SEQ ID NO: 1716734 - DNA, 15 bp, Homo sapiens
cattgcccacaggat

SEQ ID NO: 1716735 - DNA, 15 bp, Homo sapiens
attgcccacaggata

SEQ ID NO: 1716736 - DNA, 15 bp, Homo sapiens
ttgcccacaggatac

SEQ ID NO: 1716737 - DNA, 15 bp, Homo sapiens
tgcccacaggatact

SEQ ID NO: 1716738 - DNA, 15 bp, Homo sapiens
gcccacaggatactc

SEQ ID NO: 1716739 - DNA, 15 bp, Homo sapiens
cccacaggatactcg

SEQ ID NO: 1716740 - DNA, 15 bp, Homo sapiens
ccacaggatactcgg

SEQ ID NO: 1716741 - DNA, 15 bp, Homo sapiens
cacaggatactcggc

SEQ ID NO: 1716742 - DNA, 15 bp, Homo sapiens
acaggatactcggct

SEQ ID NO: 1716743 - DNA, 15 bp, Homo sapiens
caggatactcggctc

SEQ ID NO: 1716744 - DNA, 15 bp, Homo sapiens
aggatactcggctca

SEQ ID NO: 1716745 - DNA, 15 bp, Homo sapiens
ggatactcggctcag

SEQ ID NO: 1716746 - DNA, 15 bp, Homo sapiens
gatactcggctcagg

SEQ ID NO: 1716747 - DNA, 15 bp, Homo sapiens
atactcggctcagga

SEQ ID NO: 1716748 - DNA, 15 bp, Homo sapiens
tactcggctcaggag

SEQ ID NO: 1716749 - DNA, 15 bp, Homo sapiens
actcggctcaggagc

SEQ ID NO: 1716750 - DNA, 15 bp, Homo sapiens
ctcggctcaggagct

SEQ ID NO: 1716751 - DNA, 15 bp, Homo sapiens
tcggctcaggagctt

SEQ ID NO: 1716752 - DNA, 15 bp, Homo sapiens
cggctcaggagcttt

SEQ ID NO: 1716753 - DNA, 15 bp, Homo sapiens
ggctcaggagctttg

SEQ ID NO: 1716754 - DNA, 15 bp, Homo sapiens
gctcaggagctttgc

SEQ ID NO: 1716755 - DNA, 15 bp, Homo sapiens
ctcaggagctttgcg

SEQ ID NO: 1716756 - DNA, 15 bp, Homo sapiens
tcaggagctttgcgg

SEQ ID NO: 1716757 - DNA, 15 bp, Homo sapiens
caggagctttgcggc

SEQ ID NO: 1716758 - DNA, 15 bp, Homo sapiens
aggagctttgcggcg

SEQ ID NO: 1716759 - DNA, 15 bp, Homo sapiens
ggagctttgcggcgt

SEQ ID NO: 1716760 - DNA, 15 bp, Homo sapiens
gagctttgcggcgtt

SEQ ID NO: 1716761 - DNA, 15 bp, Homo sapiens
agctttgcggcgttt

SEQ ID NO: 1716762 - DNA, 15 bp, Homo sapiens
gctttgcggcgtttc

SEQ ID NO: 1716763 - DNA, 15 bp, Homo sapiens
ctttgcggcgtttcc

SEQ ID NO: 1716764 - DNA, 15 bp, Homo sapiens
tttgcggcgtttcct

SEQ ID NO: 1716765 - DNA, 15 bp, Homo sapiens
ttgcggcgtttcctt

SEQ ID NO: 1716766 - DNA, 15 bp, Homo sapiens
tgcggcgtttcctta

SEQ ID NO: 1716767 - DNA, 15 bp, Homo sapiens
gcggcgtttccttag

SEQ ID NO: 1716768 - DNA, 15 bp, Homo sapiens
cggcgtttccttaga

SEQ ID NO: 1716769 - DNA, 15 bp, Homo sapiens
ggcgtttccttagaa

SEQ ID NO: 1716770 - DNA, 15 bp, Homo sapiens
gcgtttccttagaac

SEQ ID NO: 1716771 - DNA, 15 bp, Homo sapiens
cgtttccttagaaca

SEQ ID NO: 1716772 - DNA, 15 bp, Homo sapiens
gtttccttagaacaa

SEQ ID NO: 1716773 - DNA, 15 bp, Homo sapiens
tttccttagaacaat

SEQ ID NO: 1716774 - DNA, 15 bp, Homo sapiens
ttccttagaacaata

SEQ ID NO: 1716775 - DNA, 15 bp, Homo sapiens
tccttagaacaataa

SEQ ID NO: 1716776 - DNA, 15 bp, Homo sapiens
ccttagaacaataat

SEQ ID NO: 1716777 - DNA, 15 bp, Homo sapiens
cttagaacaataatg

SEQ ID NO: 1716778 - DNA, 15 bp, Homo sapiens
ttagaacaataatgc

SEQ ID NO: 1716779 - DNA, 15 bp, Homo sapiens
tagaacaataatgca

SEQ ID NO: 1716780 - DNA, 15 bp, Homo sapiens
agaacaataatgcat

SEQ ID NO: 1716781 - DNA, 15 bp, Homo sapiens
gaacaataatgcatc

SEQ ID NO: 1716782 - DNA, 15 bp, Homo sapiens
aacaataatgcatcg

SEQ ID NO: 1716783 - DNA, 15 bp, Homo sapiens
acaataatgcatcga

SEQ ID NO: 1716784 - DNA, 15 bp, Homo sapiens
caataatgcatcgag

SEQ ID NO: 1716785 - DNA, 15 bp, Homo sapiens
aataatgcatcgagg

SEQ ID NO: 1716786 - DNA, 15 bp, Homo sapiens
ataatgcatcgaggc

SEQ ID NO: 1716787 - DNA, 15 bp, Homo sapiens
taatgcatcgaggcc

SEQ ID NO: 1716788 - DNA, 15 bp, Homo sapiens
aatgcatcgaggcct

SEQ ID NO: 1716789 - DNA, 15 bp, Homo sapiens
atgcatcgaggcctt

SEQ ID NO: 1716790 - DNA, 15 bp, Homo sapiens
tgcatcgaggccttg

SEQ ID NO: 1716791 - DNA, 15 bp, Homo sapiens
gcatcgaggccttgg

SEQ ID NO: 1716792 - DNA, 15 bp, Homo sapiens
catcgaggccttggg

SEQ ID NO: 1716793 - DNA, 15 bp, Homo sapiens
atcgaggccttgggg

SEQ ID NO: 1716794 - DNA, 15 bp, Homo sapiens
tcgaggccttgggga

SEQ ID NO: 1716795 - DNA, 15 bp, Homo sapiens
cgaggccttggggac

SEQ ID NO: 1716796 - DNA, 15 bp, Homo sapiens
gaggccttggggact

SEQ ID NO: 1716797 - DNA, 15 bp, Homo sapiens
aggccttggggactc

SEQ ID NO: 1716798 - DNA, 15 bp, Homo sapiens
ggccttggggactca

SEQ ID NO: 1716799 - DNA, 15 bp, Homo sapiens
gccttggggactcaa

SEQ ID NO: 1716800 - DNA, 15 bp, Homo sapiens
ccttggggactcaaa

SEQ ID NO: 1716801 - DNA, 15 bp, Homo sapiens
cttggggactcaaag

SEQ ID NO: 1716802 - DNA, 15 bp, Homo sapiens
ttggggactcaaagc

SEQ ID NO: 1716803 - DNA, 15 bp, Homo sapiens
tggggactcaaagcc

SEQ ID NO: 1716804 - DNA, 15 bp, Homo sapiens
ggggactcaaagcca

SEQ ID NO: 1716805 - DNA, 15 bp, Homo sapiens
gggactcaaagccat

SEQ ID NO: 1716806 - DNA, 15 bp, Homo sapiens
ggactcaaagccatc

SEQ ID NO: 1716807 - DNA, 15 bp, Homo sapiens
gactcaaagccatct

SEQ ID NO: 1716808 - DNA, 15 bp, Homo sapiens
actcaaagccatctg

SEQ ID NO: 1716809 - DNA, 15 bp, Homo sapiens
ctcaaagccatctgt

SEQ ID NO: 1716810 - DNA, 15 bp, Homo sapiens
tcaaagccatctgta

SEQ ID NO: 1716811 - DNA, 15 bp, Homo sapiens
caaagccatctgtag

SEQ ID NO: 1716812 - DNA, 15 bp, Homo sapiens
aaagccatctgtagt

SEQ ID NO: 1716813 - DNA, 15 bp, Homo sapiens
aagccatctgtagtg

SEQ ID NO: 1716814 - DNA, 15 bp, Homo sapiens
agccatctgtagtga

SEQ ID NO: 1716815 - DNA, 15 bp, Homo sapiens
gccatctgtagtgat

SEQ ID NO: 1716816 - DNA, 15 bp, Homo sapiens
ccatctgtagtgatt

SEQ ID NO: 1716817 - DNA, 15 bp, Homo sapiens
catctgtagtgattg

SEQ ID NO: 1716818 - DNA, 15 bp, Homo sapiens
atctgtagtgattga

SEQ ID NO: 1716819 - DNA, 15 bp, Homo sapiens
tctgtagtgattgat

SEQ ID NO: 1716820 - DNA, 15 bp, Homo sapiens
ctgtagtgattgatg

SEQ ID NO: 1716821 - DNA, 15 bp, Homo sapiens
tgtagtgattgatgg

SEQ ID NO: 1716822 - DNA, 15 bp, Homo sapiens
gtagtgattgatgga

SEQ ID NO: 1716823 - DNA, 15 bp, Homo sapiens
tagtgattgatggag

SEQ ID NO: 1716824 - DNA, 15 bp, Homo sapiens
agtgattgatggagc

SEQ ID NO: 1716825 - DNA, 15 bp, Homo sapiens
gtgattgatggagcg

SEQ ID NO: 1716826 - DNA, 15 bp, Homo sapiens
tgattgatggagcgt

SEQ ID NO: 1716827 - DNA, 15 bp, Homo sapiens
gattgatggagcgta

SEQ ID NO: 1716828 - DNA, 15 bp, Homo sapiens
attgatggagcgtaa

SEQ ID NO: 1716829 - DNA, 15 bp, Homo sapiens
ttgatggagcgtaac

SEQ ID NO: 1716830 - DNA, 15 bp, Homo sapiens
tgatggagcgtaact

SEQ ID NO: 1716831 - DNA, 15 bp, Homo sapiens
gatggagcgtaactc

SEQ ID NO: 1716832 - DNA, 15 bp, Homo sapiens
atggagcgtaactct

SEQ ID NO: 1716833 - DNA, 15 bp, Homo sapiens
tggagcgtaactctt

SEQ ID NO: 1716834 - DNA, 15 bp, Homo sapiens
ggagcgtaactcttt

SEQ ID NO: 1716835 - DNA, 15 bp, Homo sapiens
gagcgtaactcttta

SEQ ID NO: 1716836 - DNA, 15 bp, Homo sapiens
agcgtaactctttag

SEQ ID NO: 1716837 - DNA, 15 bp, Homo sapiens
gcgtaactctttaga

SEQ ID NO: 1716838 - DNA, 15 bp, Homo sapiens
cgtaactctttagag

SEQ ID NO: 1716839 - DNA, 15 bp, Homo sapiens
gtaactctttagagg

SEQ ID NO: 1716840 - DNA, 15 bp, Homo sapiens
taactctttagagga

SEQ ID NO: 1716841 - DNA, 15 bp, Homo sapiens
aactctttagaggaa

SEQ ID NO: 1716842 - DNA, 15 bp, Homo sapiens
actctttagaggaac

SEQ ID NO: 1716843 - DNA, 15 bp, Homo sapiens
ctctttagaggaact

SEQ ID NO: 1716844 - DNA, 15 bp, Homo sapiens
tctttagaggaactg

SEQ ID NO: 1716845 - DNA, 15 bp, Homo sapiens
ctttagaggaactga

SEQ ID NO: 1716846 - DNA, 15 bp, Homo sapiens
tttagaggaactgaa

SEQ ID NO: 1716847 - DNA, 15 bp, Homo sapiens
ttagaggaactgaaa

SEQ ID NO: 1716848 - DNA, 15 bp, Homo sapiens
tagaggaactgaaac

SEQ ID NO: 1716849 - DNA, 15 bp, Homo sapiens
agaggaactgaaaca

SEQ ID NO: 1716850 - DNA, 15 bp, Homo sapiens
gaggaactgaaacat

SEQ ID NO: 1716851 - DNA, 15 bp, Homo sapiens
aggaactgaaacatg

SEQ ID NO: 1716852 - DNA, 15 bp, Homo sapiens
ggaactgaaacatgg

SEQ ID NO: 1716853 - DNA, 15 bp, Homo sapiens
gaactgaaacatggg

SEQ ID NO: 1716854 - DNA, 15 bp, Homo sapiens
aactgaaacatgggc

SEQ ID NO: 1716855 - DNA, 15 bp, Homo sapiens
actgaaacatgggca

SEQ ID NO: 1716856 - DNA, 15 bp, Homo sapiens
ctgaaacatgggcaa

SEQ ID NO: 1716857 - DNA, 15 bp, Homo sapiens
tgaaacatgggcaaa

SEQ ID NO: 1716858 - DNA, 15 bp, Homo sapiens
gaaacatgggcaaaa

SEQ ID NO: 1716859 - DNA, 15 bp, Homo sapiens
aaacatgggcaaaac

SEQ ID NO: 1716860 - DNA, 15 bp, Homo sapiens
aacatgggcaaaact

SEQ ID NO: 1716861 - DNA, 15 bp, Homo sapiens
acatgggcaaaactt

SEQ ID NO: 1716862 - DNA, 15 bp, Homo sapiens
catgggcaaaacttt

SEQ ID NO: 1716863 - DNA, 15 bp, Homo sapiens
atgggcaaaactttc

SEQ ID NO: 1716864 - DNA, 15 bp, Homo sapiens
tgggcaaaactttca

SEQ ID NO: 1716865 - DNA, 15 bp, Homo sapiens
gggcaaaactttcat

SEQ ID NO: 1716866 - DNA, 15 bp, Homo sapiens
ggcaaaactttcatg

SEQ ID NO: 1716867 - DNA, 15 bp, Homo sapiens
gcaaaactttcatga

SEQ ID NO: 1716868 - DNA, 15 bp, Homo sapiens
caaaactttcatgag

SEQ ID NO: 1716869 - DNA, 15 bp, Homo sapiens
aaaactttcatgaga

SEQ ID NO: 1716870 - DNA, 15 bp, Homo sapiens
aaactttcatgagac

SEQ ID NO: 1716871 - DNA, 15 bp, Homo sapiens
aactttcatgagaca

SEQ ID NO: 1716872 - DNA, 15 bp, Homo sapiens
actttcatgagacat

SEQ ID NO: 1716873 - DNA, 15 bp, Homo sapiens
ctttcatgagacatt

SEQ ID NO: 1716874 - DNA, 15 bp, Homo sapiens
tttcatgagacattt

SEQ ID NO: 1716875 - DNA, 15 bp, Homo sapiens
ttcatgagacattta

SEQ ID NO: 1716876 - DNA, 15 bp, Homo sapiens
tcatgagacatttac

SEQ ID NO: 1716877 - DNA, 15 bp, Homo sapiens
catgagacatttacc

SEQ ID NO: 1716878 - DNA, 15 bp, Homo sapiens
atgagacatttacca

SEQ ID NO: 1716879 - DNA, 15 bp, Homo sapiens
tgagacatttaccag

SEQ ID NO: 1716880 - DNA, 15 bp, Homo sapiens
gagacatttaccaga

SEQ ID NO: 1716881 - DNA, 15 bp, Homo sapiens
agacatttaccagaa

SEQ ID NO: 1716882 - DNA, 15 bp, Homo sapiens
gacatttaccagaag

SEQ ID NO: 1716883 - DNA, 15 bp, Homo sapiens
acatttaccagaagt

SEQ ID NO: 1716884 - DNA, 15 bp, Homo sapiens
catttaccagaagtg

SEQ ID NO: 1716885 - DNA, 15 bp, Homo sapiens
atttaccagaagtgc

SEQ ID NO: 1716886 - DNA, 15 bp, Homo sapiens
tttaccagaagtgct

SEQ ID NO: 1716887 - DNA, 15 bp, Homo sapiens
ttaccagaagtgctt

SEQ ID NO: 1716888 - DNA, 15 bp, Homo sapiens
taccagaagtgcttg

SEQ ID NO: 1716889 - DNA, 15 bp, Homo sapiens
accagaagtgcttga

SEQ ID NO: 1716890 - DNA, 15 bp, Homo sapiens
ccagaagtgcttgaa

SEQ ID NO: 1716891 - DNA, 15 bp, Homo sapiens
cagaagtgcttgaaa

SEQ ID NO: 1716892 - DNA, 15 bp, Homo sapiens
agaagtgcttgaaag

SEQ ID NO: 1716893 - DNA, 15 bp, Homo sapiens
gaagtgcttgaaagt

SEQ ID NO: 1716894 - DNA, 15 bp, Homo sapiens
aagtgcttgaaagtt

SEQ ID NO: 1716895 - DNA, 15 bp, Homo sapiens
agtgcttgaaagttt

SEQ ID NO: 1716896 - DNA, 15 bp, Homo sapiens
gtgcttgaaagtttc

SEQ ID NO: 1716897 - DNA, 15 bp, Homo sapiens
tgcttgaaagtttct

SEQ ID NO: 1716898 - DNA, 15 bp, Homo sapiens
gcttgaaagtttcta

SEQ ID NO: 1716899 - DNA, 15 bp, Homo sapiens
cttgaaagtttctaa

SEQ ID NO: 1716900 - DNA, 15 bp, Homo sapiens
ttgaaagtttctaaa

SEQ ID NO: 1716901 - DNA, 15 bp, Homo sapiens
tgaaagtttctaaac

SEQ ID NO: 1716902 - DNA, 15 bp, Homo sapiens
gaaagtttctaaact

SEQ ID NO: 1716903 - DNA, 15 bp, Homo sapiens
aaagtttctaaactt

SEQ ID NO: 1716904 - DNA, 15 bp, Homo sapiens
aagtttctaaacttt

SEQ ID NO: 1716905 - DNA, 15 bp, Homo sapiens
agtttctaaactttt

SEQ ID NO: 1716906 - DNA, 15 bp, Homo sapiens
gtttctaaacttttt

SEQ ID NO: 1716907 - DNA, 15 bp, Homo sapiens
tttctaaactttttt

SEQ ID NO: 1716908 - DNA, 15 bp, Homo sapiens
ttctaaacttttttt

SEQ ID NO: 1716909 - DNA, 15 bp, Homo sapiens
tctaaactttttttt

SEQ ID NO: 1716910 - DNA, 15 bp, Homo sapiens
ctaaacttttttttt

SEQ ID NO: 1716911 - DNA, 15 bp, Homo sapiens
taaactttttttttt

SEQ ID NO: 1716912 - DNA, 15 bp, Homo sapiens
aaacttttttttttc

SEQ ID NO: 1716913 - DNA, 15 bp, Homo sapiens
aacttttttttttcc

SEQ ID NO: 1716914 - DNA, 15 bp, Homo sapiens
acttttttttttcct

SEQ ID NO: 1716915 - DNA, 15 bp, Homo sapiens
cttttttttttcctg

SEQ ID NO: 1716916 - DNA, 15 bp, Homo sapiens
ttttttttttcctgt

SEQ ID NO: 1716917 - DNA, 15 bp, Homo sapiens
tttttttttcctgtt

SEQ ID NO: 1716918 - DNA, 15 bp, Homo sapiens
ttttttttcctgttt

SEQ ID NO: 1716919 - DNA, 15 bp, Homo sapiens
tttttttcctgtttg

SEQ ID NO: 1716920 - DNA, 15 bp, Homo sapiens
ttttttcctgtttga

SEQ ID NO: 1716921 - DNA, 15 bp, Homo sapiens
tttttcctgtttgat

SEQ ID NO: 1716922 - DNA, 15 bp, Homo sapiens
ttttcctgtttgatg

SEQ ID NO: 1716923 - DNA, 15 bp, Homo sapiens
tttcctgtttgatga

SEQ ID NO: 1716924 - DNA, 15 bp, Homo sapiens
ttcctgtttgatgaa

SEQ ID NO: 1716925 - DNA, 15 bp, Homo sapiens
tcctgtttgatgaac

SEQ ID NO: 1716926 - DNA, 15 bp, Homo sapiens
cctgtttgatgaact

SEQ ID NO: 1716927 - DNA, 15 bp, Homo sapiens
ctgtttgatgaactc

SEQ ID NO: 1716928 - DNA, 15 bp, Homo sapiens
tgtttgatgaactct

SEQ ID NO: 1716929 - DNA, 15 bp, Homo sapiens
gtttgatgaactctt

SEQ ID NO: 1716930 - DNA, 15 bp, Homo sapiens
tttgatgaactcttc

SEQ ID NO: 1716931 - DNA, 15 bp, Homo sapiens
ttgatgaactcttct

SEQ ID NO: 1716932 - DNA, 15 bp, Homo sapiens
tgatgaactcttctt

SEQ ID NO: 1716933 - DNA, 15 bp, Homo sapiens
gatgaactcttcttg

SEQ ID NO: 1716934 - DNA, 15 bp, Homo sapiens
atgaactcttcttgc

SEQ ID NO: 1716935 - DNA, 15 bp, Homo sapiens
tgaactcttcttgcg

SEQ ID NO: 1716936 - DNA, 15 bp, Homo sapiens
gaactcttcttgcgt

SEQ ID NO: 1716937 - DNA, 15 bp, Homo sapiens
aactcttcttgcgtg

SEQ ID NO: 1716938 - DNA, 15 bp, Homo sapiens
actcttcttgcgtgt

SEQ ID NO: 1716939 - DNA, 15 bp, Homo sapiens
ctcttcttgcgtgtt

SEQ ID NO: 1716940 - DNA, 15 bp, Homo sapiens
tcttcttgcgtgtta

SEQ ID NO: 1716941 - DNA, 15 bp, Homo sapiens
cttcttgcgtgttag

SEQ ID NO: 1716942 - DNA, 15 bp, Homo sapiens
ttcttgcgtgttagt

SEQ ID NO: 1716943 - DNA, 15 bp, Homo sapiens
tcttgcgtgttagtc

SEQ ID NO: 1716944 - DNA, 15 bp, Homo sapiens
cttgcgtgttagtcg

SEQ ID NO: 1716945 - DNA, 15 bp, Homo sapiens
ttgcgtgttagtcgg

SEQ ID NO: 1716946 - DNA, 15 bp, Homo sapiens
tgcgtgttagtcggc

SEQ ID NO: 1716947 - DNA, 15 bp, Homo sapiens
gcgtgttagtcggct

SEQ ID NO: 1716948 - DNA, 15 bp, Homo sapiens
cgtgttagtcggctt

SEQ ID NO: 1716949 - DNA, 15 bp, Homo sapiens
gtgttagtcggcttc

SEQ ID NO: 1716950 - DNA, 15 bp, Homo sapiens
tgttagtcggcttcg

SEQ ID NO: 1716951 - DNA, 15 bp, Homo sapiens
gttagtcggcttcgg

SEQ ID NO: 1716952 - DNA, 15 bp, Homo sapiens
ttagtcggcttcggc

SEQ ID NO: 1716953 - DNA, 15 bp, Homo sapiens
tagtcggcttcggct

SEQ ID NO: 1716954 - DNA, 15 bp, Homo sapiens
agtcggcttcggctt

SEQ ID NO: 1716955 - DNA, 15 bp, Homo sapiens
gtcggcttcggcttg

SEQ ID NO: 1716956 - DNA, 15 bp, Homo sapiens
tcggcttcggcttgt

SEQ ID NO: 1716957 - DNA, 15 bp, Homo sapiens
cggcttcggcttgtc

SEQ ID NO: 1716958 - DNA, 15 bp, Homo sapiens
ggcttcggcttgtct

SEQ ID NO: 1716959 - DNA, 15 bp, Homo sapiens
gcttcggcttgtctc

SEQ ID NO: 1716960 - DNA, 15 bp, Homo sapiens
cttcggcttgtctca

SEQ ID NO: 1716961 - DNA, 15 bp, Homo sapiens
ttcggcttgtctcat

SEQ ID NO: 1716962 - DNA, 15 bp, Homo sapiens
tcggcttgtctcatt

SEQ ID NO: 1716963 - DNA, 15 bp, Homo sapiens
cggcttgtctcatta

SEQ ID NO: 1716964 - DNA, 15 bp, Homo sapiens
ggcttgtctcattat

SEQ ID NO: 1716965 - DNA, 15 bp, Homo sapiens
gcttgtctcattatt

SEQ ID NO: 1716966 - DNA, 15 bp, Homo sapiens
cttgtctcattattt

SEQ ID NO: 1716967 - DNA, 15 bp, Homo sapiens
ttgtctcattatttc

SEQ ID NO: 1716968 - DNA, 15 bp, Homo sapiens
tgtctcattatttct

SEQ ID NO: 1716969 - DNA, 15 bp, Homo sapiens
gtctcattatttctt

SEQ ID NO: 1716970 - DNA, 15 bp, Homo sapiens
tctcattatttcttc

SEQ ID NO: 1716971 - DNA, 15 bp, Homo sapiens
ctcattatttcttcc

SEQ ID NO: 1716972 - DNA, 15 bp, Homo sapiens
tcattatttcttcca

SEQ ID NO: 1716973 - DNA, 15 bp, Homo sapiens
cattatttcttccat

SEQ ID NO: 1716974 - DNA, 15 bp, Homo sapiens
attatttcttccatt

SEQ ID NO: 1716975 - DNA, 15 bp, Homo sapiens
ttatttcttccattt

SEQ ID NO: 1716976 - DNA, 15 bp, Homo sapiens
tatttcttccatttt

SEQ ID NO: 1716977 - DNA, 15 bp, Homo sapiens
atttcttccattttg

SEQ ID NO: 1716978 - DNA, 15 bp, Homo sapiens
tttcttccattttgc

SEQ ID NO: 1716979 - DNA, 15 bp, Homo sapiens
ttcttccattttgcc

SEQ ID NO: 1716980 - DNA, 15 bp, Homo sapiens
tcttccattttgcct

SEQ ID NO: 1716981 - DNA, 15 bp, Homo sapiens
cttccattttgcctt

SEQ ID NO: 1716982 - DNA, 15 bp, Homo sapiens
ttccattttgccttt

SEQ ID NO: 1716983 - DNA, 15 bp, Homo sapiens
tccattttgcctttt

SEQ ID NO: 1716984 - DNA, 15 bp, Homo sapiens
ccattttgccttttg

SEQ ID NO: 1716985 - DNA, 15 bp, Homo sapiens
cattttgccttttga

SEQ ID NO: 1716986 - DNA, 15 bp, Homo sapiens
attttgccttttgac

SEQ ID NO: 1716987 - DNA, 15 bp, Homo sapiens
ttttgccttttgact

SEQ ID NO: 1716988 - DNA, 15 bp, Homo sapiens
tttgccttttgactt

SEQ ID NO: 1716989 - DNA, 15 bp, Homo sapiens
ttgccttttgacttt

SEQ ID NO: 1716990 - DNA, 15 bp, Homo sapiens
tgccttttgactttg

SEQ ID NO: 1716991 - DNA, 15 bp, Homo sapiens
gccttttgactttga

SEQ ID NO: 1716992 - DNA, 15 bp, Homo sapiens
ccttttgactttgaa

SEQ ID NO: 1716993 - DNA, 15 bp, Homo sapiens
cttttgactttgaac

SEQ ID NO: 1716994 - DNA, 15 bp, Homo sapiens
ttttgactttgaacc

SEQ ID NO: 1716995 - DNA, 15 bp, Homo sapiens
tttgactttgaacca

SEQ ID NO: 1716996 - DNA, 15 bp, Homo sapiens
ttgactttgaaccag

SEQ ID NO: 1716997 - DNA, 15 bp, Homo sapiens
tgactttgaaccagc

SEQ ID NO: 1716998 - DNA, 15 bp, Homo sapiens
gactttgaaccagca

SEQ ID NO: 1716999 - DNA, 15 bp, Homo sapiens
actttgaaccagcaa

SEQ ID NO: 1717000 - DNA, 15 bp, Homo sapiens
ctttgaaccagcaag

SEQ ID NO: 1717001 - DNA, 15 bp, Homo sapiens
tttgaaccagcaagg

SEQ ID NO: 1717002 - DNA, 15 bp, Homo sapiens
ttgaaccagcaagga

SEQ ID NO: 1717003 - DNA, 15 bp, Homo sapiens
tgaaccagcaaggat

SEQ ID NO: 1717004 - DNA, 15 bp, Homo sapiens
gaaccagcaaggatc

SEQ ID NO: 1717005 - DNA, 15 bp, Homo sapiens
aaccagcaaggatct

SEQ ID NO: 1717006 - DNA, 15 bp, Homo sapiens
accagcaaggatctt

SEQ ID NO: 1717007 - DNA, 15 bp, Homo sapiens
ccagcaaggatcttg

SEQ ID NO: 1717008 - DNA, 15 bp, Homo sapiens
cagcaaggatcttgg

SEQ ID NO: 1717009 - DNA, 15 bp, Homo sapiens
agcaaggatcttggt

SEQ ID NO: 1717010 - DNA, 15 bp, Homo sapiens
gcaaggatcttggtg

SEQ ID NO: 1717011 - DNA, 15 bp, Homo sapiens
caaggatcttggtgt

SEQ ID NO: 1717012 - DNA, 15 bp, Homo sapiens
aaggatcttggtgtc

SEQ ID NO: 1717013 - DNA, 15 bp, Homo sapiens
aggatcttggtgtcc

SEQ ID NO: 1717014 - DNA, 15 bp, Homo sapiens
ggatcttggtgtccc

SEQ ID NO: 1717015 - DNA, 15 bp, Homo sapiens
gatcttggtgtcccc

SEQ ID NO: 1717016 - DNA, 15 bp, Homo sapiens
atcttggtgtcccct

SEQ ID NO: 1717017 - DNA, 15 bp, Homo sapiens
tcttggtgtcccctc

SEQ ID NO: 1717018 - DNA, 15 bp, Homo sapiens
cttggtgtcccctct

SEQ ID NO: 1717019 - DNA, 15 bp, Homo sapiens
ttggtgtcccctctt

SEQ ID NO: 1717020 - DNA, 15 bp, Homo sapiens
tggtgtcccctcttt

SEQ ID NO: 1717021 - DNA, 15 bp, Homo sapiens
ggtgtcccctctttt

SEQ ID NO: 1717022 - DNA, 15 bp, Homo sapiens
gtgtcccctcttttt

SEQ ID NO: 1717023 - DNA, 15 bp, Homo sapiens
tgtcccctctttttg

SEQ ID NO: 1717024 - DNA, 15 bp, Homo sapiens
gtcccctctttttgc

SEQ ID NO: 1717025 - DNA, 15 bp, Homo sapiens
tcccctctttttgcc

SEQ ID NO: 1717026 - DNA, 15 bp, Homo sapiens
cccctctttttgcct

SEQ ID NO: 1717027 - DNA, 15 bp, Homo sapiens
ccctctttttgcctt

SEQ ID NO: 1717028 - DNA, 15 bp, Homo sapiens
cctctttttgccttt

SEQ ID NO: 1717029 - DNA, 15 bp, Homo sapiens
ctctttttgcctttg

SEQ ID NO: 1717030 - DNA, 15 bp, Homo sapiens
tctttttgcctttgt

SEQ ID NO: 1717031 - DNA, 15 bp, Homo sapiens
ctttttgcctttgtt

SEQ ID NO: 1717032 - DNA, 15 bp, Homo sapiens
tttttgcctttgttt

SEQ ID NO: 1717033 - DNA, 15 bp, Homo sapiens
ttttgcctttgtttt

SEQ ID NO: 1717034 - DNA, 15 bp, Homo sapiens
tttgcctttgttttt

SEQ ID NO: 1717035 - DNA, 15 bp, Homo sapiens
ttgcctttgtttttg

SEQ ID NO: 1717036 - DNA, 15 bp, Homo sapiens
tgcctttgtttttgg

SEQ ID NO: 1717037 - DNA, 15 bp, Homo sapiens
gcctttgtttttggc

SEQ ID NO: 1717038 - DNA, 15 bp, Homo sapiens
cctttgtttttggca

SEQ ID NO: 1717039 - DNA, 15 bp, Homo sapiens
ctttgtttttggcac

SEQ ID NO: 1717040 - DNA, 15 bp, Homo sapiens
tttgtttttggcaca

SEQ ID NO: 1717041 - DNA, 15 bp, Homo sapiens
ttgtttttggcacaa

SEQ ID NO: 1717042 - DNA, 15 bp, Homo sapiens
tgtttttggcacaaa

SEQ ID NO: 1717043 - DNA, 15 bp, Homo sapiens
gtttttggcacaaaa

SEQ ID NO: 1717044 - DNA, 15 bp, Homo sapiens
tttttggcacaaaat

SEQ ID NO: 1717045 - DNA, 15 bp, Homo sapiens
ttttggcacaaaatt

SEQ ID NO: 1717046 - DNA, 15 bp, Homo sapiens
tttggcacaaaatta

SEQ ID NO: 1717047 - DNA, 15 bp, Homo sapiens
ttggcacaaaattag

SEQ ID NO: 1717048 - DNA, 15 bp, Homo sapiens
tggcacaaaattagt

SEQ ID NO: 1717049 - DNA, 15 bp, Homo sapiens
ggcacaaaattagtg

SEQ ID NO: 1717050 - DNA, 15 bp, Homo sapiens
gcacaaaattagtgg

SEQ ID NO: 1717051 - DNA, 15 bp, Homo sapiens
cacaaaattagtggt

SEQ ID NO: 1717052 - DNA, 15 bp, Homo sapiens
acaaaattagtggtt

SEQ ID NO: 1717053 - DNA, 15 bp, Homo sapiens
caaaattagtggttc

SEQ ID NO: 1717054 - DNA, 15 bp, Homo sapiens
aaaattagtggttct

SEQ ID NO: 1717055 - DNA, 15 bp, Homo sapiens
aaattagtggttctg

SEQ ID NO: 1717056 - DNA, 15 bp, Homo sapiens
aattagtggttctgt

SEQ ID NO: 1717057 - DNA, 15 bp, Homo sapiens
attagtggttctgtg

SEQ ID NO: 1717058 - DNA, 15 bp, Homo sapiens
ttagtggttctgtgc

SEQ ID NO: 1717059 - DNA, 15 bp, Homo sapiens
tagtggttctgtgcg

SEQ ID NO: 1717060 - DNA, 15 bp, Homo sapiens
agtggttctgtgcgc

SEQ ID NO: 1717061 - DNA, 15 bp, Homo sapiens
gtggttctgtgcgca

SEQ ID NO: 1717062 - DNA, 15 bp, Homo sapiens
tggttctgtgcgcaa

SEQ ID NO: 1717063 - DNA, 15 bp, Homo sapiens
ggttctgtgcgcaaa

SEQ ID NO: 1717064 - DNA, 15 bp, Homo sapiens
gttctgtgcgcaaat

SEQ ID NO: 1717065 - DNA, 15 bp, Homo sapiens
ttctgtgcgcaaatg

SEQ ID NO: 1717066 - DNA, 15 bp, Homo sapiens
tctgtgcgcaaatgg

SEQ ID NO: 1717067 - DNA, 15 bp, Homo sapiens
ctgtgcgcaaatgga

SEQ ID NO: 1717068 - DNA, 15 bp, Homo sapiens
tgtgcgcaaatggaa

SEQ ID NO: 1717069 - DNA, 15 bp, Homo sapiens
gtgcgcaaatggaaa

SEQ ID NO: 1717070 - DNA, 15 bp, Homo sapiens
tgcgcaaatggaaat

SEQ ID NO: 1717071 - DNA, 15 bp, Homo sapiens
gcgcaaatggaaatt

SEQ ID NO: 1717072 - DNA, 15 bp, Homo sapiens
cgcaaatggaaattt

SEQ ID NO: 1717073 - DNA, 15 bp, Homo sapiens
gcaaatggaaatttt

SEQ ID NO: 1717074 - DNA, 15 bp, Homo sapiens
caaatggaaattttc

SEQ ID NO: 1717075 - DNA, 15 bp, Homo sapiens
aaatggaaattttcg

SEQ ID NO: 1717076 - DNA, 15 bp, Homo sapiens
aatggaaattttcgt

SEQ ID NO: 1717077 - DNA, 15 bp, Homo sapiens
atggaaattttcgtt

SEQ ID NO: 1717078 - DNA, 15 bp, Homo sapiens
tggaaattttcgttt

SEQ ID NO: 1717079 - DNA, 15 bp, Homo sapiens
ggaaattttcgtttt

SEQ ID NO: 1717080 - DNA, 15 bp, Homo sapiens
gaaattttcgttttc

SEQ ID NO: 1717081 - DNA, 15 bp, Homo sapiens
aaattttcgttttcc

SEQ ID NO: 1717082 - DNA, 15 bp, Homo sapiens
aattttcgttttccc

SEQ ID NO: 1717083 - DNA, 15 bp, Homo sapiens
attttcgttttccct

SEQ ID NO: 1717084 - DNA, 15 bp, Homo sapiens
ttttcgttttccctt

SEQ ID NO: 1717085 - DNA, 15 bp, Homo sapiens
tttcgttttccctta

SEQ ID NO: 1717086 - DNA, 15 bp, Homo sapiens
ttcgttttcccttat

SEQ ID NO: 1717087 - DNA, 15 bp, Homo sapiens
tcgttttcccttatt

SEQ ID NO: 1717088 - DNA, 15 bp, Homo sapiens
cgttttcccttatta

SEQ ID NO: 1717089 - DNA, 15 bp, Homo sapiens
gttttcccttattaa

SEQ ID NO: 1717090 - DNA, 15 bp, Homo sapiens
ttttcccttattaag

SEQ ID NO: 1717091 - DNA, 15 bp, Homo sapiens
tttcccttattaagt

SEQ ID NO: 1717092 - DNA, 15 bp, Homo sapiens
ttcccttattaagtg

SEQ ID NO: 1717093 - DNA, 15 bp, Homo sapiens
tcccttattaagtgg

SEQ ID NO: 1717094 - DNA, 15 bp, Homo sapiens
cccttattaagtgga

SEQ ID NO: 1717095 - DNA, 15 bp, Homo sapiens
ccttattaagtggaa

SEQ ID NO: 1717096 - DNA, 15 bp, Homo sapiens
cttattaagtggaat

SEQ ID NO: 1717097 - DNA, 15 bp, Homo sapiens
ttattaagtggaatc

SEQ ID NO: 1717098 - DNA, 15 bp, Homo sapiens
tattaagtggaatct

SEQ ID NO: 1717099 - DNA, 15 bp, Homo sapiens
attaagtggaatcta

SEQ ID NO: 1717100 - DNA, 15 bp, Homo sapiens
ttaagtggaatctaa

SEQ ID NO: 1717101 - DNA, 15 bp, Homo sapiens
taagtggaatctaaa

SEQ ID NO: 1717102 - DNA, 15 bp, Homo sapiens
aagtggaatctaaat

SEQ ID NO: 1717103 - DNA, 15 bp, Homo sapiens
agtggaatctaaatt

SEQ ID NO: 1717104 - DNA, 15 bp, Homo sapiens
gtggaatctaaattt

SEQ ID NO: 1717105 - DNA, 15 bp, Homo sapiens
tggaatctaaattta

SEQ ID NO: 1717106 - DNA, 15 bp, Homo sapiens
ggaatctaaatttaa

SEQ ID NO: 1717107 - DNA, 15 bp, Homo sapiens
gaatctaaatttaag

SEQ ID NO: 1717108 - DNA, 15 bp, Homo sapiens
aatctaaatttaagc

SEQ ID NO: 1717109 - DNA, 15 bp, Homo sapiens
atctaaatttaagca

SEQ ID NO: 1717110 - DNA, 15 bp, Homo sapiens
tctaaatttaagcaa

SEQ ID NO: 1717111 - DNA, 15 bp, Homo sapiens
ctaaatttaagcaag

SEQ ID NO: 1717112 - DNA, 15 bp, Homo sapiens
taaatttaagcaagt

SEQ ID NO: 1717113 - DNA, 15 bp, Homo sapiens
aaatttaagcaagtc

SEQ ID NO: 1717114 - DNA, 15 bp, Homo sapiens
aatttaagcaagtcc

SEQ ID NO: 1717115 - DNA, 15 bp, Homo sapiens
atttaagcaagtcca

SEQ ID NO: 1717116 - DNA, 15 bp, Homo sapiens
tttaagcaagtccat

SEQ ID NO: 1717117 - DNA, 15 bp, Homo sapiens
ttaagcaagtccata

SEQ ID NO: 1717118 - DNA, 15 bp, Homo sapiens
taagcaagtccatac

SEQ ID NO: 1717119 - DNA, 15 bp, Homo sapiens
aagcaagtccatacg

SEQ ID NO: 1717120 - DNA, 15 bp, Homo sapiens
agcaagtccatacga

SEQ ID NO: 1717121 - DNA, 15 bp, Homo sapiens
gcaagtccatacgaa

SEQ ID NO: 1717122 - DNA, 15 bp, Homo sapiens
caagtccatacgaat

SEQ ID NO: 1717123 - DNA, 15 bp, Homo sapiens
aagtccatacgaatg

SEQ ID NO: 1717124 - DNA, 15 bp, Homo sapiens
agtccatacgaatgc

SEQ ID NO: 1717125 - DNA, 15 bp, Homo sapiens
gtccatacgaatgca

SEQ ID NO: 1717126 - DNA, 15 bp, Homo sapiens
tccatacgaatgcac

SEQ ID NO: 1717127 - DNA, 15 bp, Homo sapiens
ccatacgaatgcact

SEQ ID NO: 1717128 - DNA, 15 bp, Homo sapiens
catacgaatgcacta

SEQ ID NO: 1717129 - DNA, 15 bp, Homo sapiens
atacgaatgcactag

SEQ ID NO: 1717130 - DNA, 15 bp, Homo sapiens
tacgaatgcactaga

SEQ ID NO: 1717131 - DNA, 15 bp, Homo sapiens
acgaatgcactagat

SEQ ID NO: 1717132 - DNA, 15 bp, Homo sapiens
cgaatgcactagatc

SEQ ID NO: 1717133 - DNA, 15 bp, Homo sapiens
gaatgcactagatct

SEQ ID NO: 1717134 - DNA, 15 bp, Homo sapiens
aatgcactagatctt

SEQ ID NO: 1717135 - DNA, 15 bp, Homo sapiens
atgcactagatcttg

SEQ ID NO: 1717136 - DNA, 15 bp, Homo sapiens
tgcactagatcttga

SEQ ID NO: 1717137 - DNA, 15 bp, Homo sapiens
gcactagatcttgaa

SEQ ID NO: 1717138 - DNA, 15 bp, Homo sapiens
cactagatcttgaag

SEQ ID NO: 1717139 - DNA, 15 bp, Homo sapiens
actagatcttgaagg

SEQ ID NO: 1717140 - DNA, 15 bp, Homo sapiens
ctagatcttgaaggg

SEQ ID NO: 1717141 - DNA, 15 bp, Homo sapiens
tagatcttgaaggga

SEQ ID NO: 1717142 - DNA, 15 bp, Homo sapiens
agatcttgaagggaa

SEQ ID NO: 1717143 - DNA, 15 bp, Homo sapiens
gatcttgaagggaag

SEQ ID NO: 1717144 - DNA, 15 bp, Homo sapiens
atcttgaagggaagt

SEQ ID NO: 1717145 - DNA, 15 bp, Homo sapiens
tcttgaagggaagta

SEQ ID NO: 1717146 - DNA, 15 bp, Homo sapiens
cttgaagggaagtat

SEQ ID NO: 1717147 - DNA, 15 bp, Homo sapiens
ttgaagggaagtatt

SEQ ID NO: 1717148 - DNA, 15 bp, Homo sapiens
tgaagggaagtattt

SEQ ID NO: 1717149 - DNA, 15 bp, Homo sapiens
gaagggaagtattta

SEQ ID NO: 1717150 - DNA, 15 bp, Homo sapiens
aagggaagtatttat

SEQ ID NO: 1717151 - DNA, 15 bp, Homo sapiens
agggaagtatttatt

SEQ ID NO: 1717152 - DNA, 15 bp, Homo sapiens
gggaagtatttattg

SEQ ID NO: 1717153 - DNA, 15 bp, Homo sapiens
ggaagtatttattgt

SEQ ID NO: 1717154 - DNA, 15 bp, Homo sapiens
gaagtatttattgta

SEQ ID NO: 1717155 - DNA, 15 bp, Homo sapiens
aagtatttattgtat

SEQ ID NO: 1717156 - DNA, 15 bp, Homo sapiens
agtatttattgtatt

SEQ ID NO: 1717157 - DNA, 15 bp, Homo sapiens
gtatttattgtatta

SEQ ID NO: 1717158 - DNA, 15 bp, Homo sapiens
tatttattgtattac

SEQ ID NO: 1717159 - DNA, 15 bp, Homo sapiens
atttattgtattaca

SEQ ID NO: 1717160 - DNA, 15 bp, Homo sapiens
tttattgtattacaa

SEQ ID NO: 1717161 - DNA, 15 bp, Homo sapiens
ttattgtattacaac

SEQ ID NO: 1717162 - DNA, 15 bp, Homo sapiens
tattgtattacaaca

SEQ ID NO: 1717163 - DNA, 15 bp, Homo sapiens
attgtattacaacat

SEQ ID NO: 1717164 - DNA, 15 bp, Homo sapiens
ttgtattacaacatc

SEQ ID NO: 1717165 - DNA, 15 bp, Homo sapiens
tgtattacaacatct

SEQ ID NO: 1717166 - DNA, 15 bp, Homo sapiens
gtattacaacatctt

SEQ ID NO: 1717167 - DNA, 15 bp, Homo sapiens
tattacaacatctta

SEQ ID NO: 1717168 - DNA, 15 bp, Homo sapiens
attacaacatcttac

SEQ ID NO: 1717169 - DNA, 15 bp, Homo sapiens
ttacaacatcttact

SEQ ID NO: 1717170 - DNA, 15 bp, Homo sapiens
tacaacatcttactt

SEQ ID NO: 1717171 - DNA, 15 bp, Homo sapiens
acaacatcttacttt

SEQ ID NO: 1717172 - DNA, 15 bp, Homo sapiens
caacatcttactttt

SEQ ID NO: 1717173 - DNA, 15 bp, Homo sapiens
aacatcttacttttc

SEQ ID NO: 1717174 - DNA, 15 bp, Homo sapiens
acatcttacttttct

SEQ ID NO: 1717175 - DNA, 15 bp, Homo sapiens
catcttacttttctt

SEQ ID NO: 1717176 - DNA, 15 bp, Homo sapiens
atcttacttttcttg

SEQ ID NO: 1717177 - DNA, 15 bp, Homo sapiens
tcttacttttcttga

SEQ ID NO: 1717178 - DNA, 15 bp, Homo sapiens
cttacttttcttgat

SEQ ID NO: 1717179 - DNA, 15 bp, Homo sapiens
ttacttttcttgatt

SEQ ID NO: 1717180 - DNA, 15 bp, Homo sapiens
tacttttcttgattt

SEQ ID NO: 1717181 - DNA, 15 bp, Homo sapiens
acttttcttgatttt

SEQ ID NO: 1717182 - DNA, 15 bp, Homo sapiens
cttttcttgattttt

SEQ ID NO: 1717183 - DNA, 15 bp, Homo sapiens
ttttcttgatttttc

SEQ ID NO: 1717184 - DNA, 15 bp, Homo sapiens
tttcttgatttttct

SEQ ID NO: 1717185 - DNA, 15 bp, Homo sapiens
ttcttgatttttcta

SEQ ID NO: 1717186 - DNA, 15 bp, Homo sapiens
tcttgatttttctac

SEQ ID NO: 1717187 - DNA, 15 bp, Homo sapiens
cttgatttttctact

SEQ ID NO: 1717188 - DNA, 15 bp, Homo sapiens
ttgatttttctactt

SEQ ID NO: 1717189 - DNA, 15 bp, Homo sapiens
tgatttttctacttt

SEQ ID NO: 1717190 - DNA, 15 bp, Homo sapiens
gatttttctacttta

SEQ ID NO: 1717191 - DNA, 15 bp, Homo sapiens
atttttctactttat

SEQ ID NO: 1717192 - DNA, 15 bp, Homo sapiens
tttttctactttatg

SEQ ID NO: 1717193 - DNA, 15 bp, Homo sapiens
ttttctactttatgg

SEQ ID NO: 1717194 - DNA, 15 bp, Homo sapiens
tttctactttatggt

SEQ ID NO: 1717195 - DNA, 15 bp, Homo sapiens
ttctactttatggtt

SEQ ID NO: 1717196 - DNA, 15 bp, Homo sapiens
tctactttatggtta

SEQ ID NO: 1717197 - DNA, 15 bp, Homo sapiens
ctactttatggttaa

SEQ ID NO: 1717198 - DNA, 15 bp, Homo sapiens
tactttatggttaaa

SEQ ID NO: 1717199 - DNA, 15 bp, Homo sapiens
actttatggttaaat

SEQ ID NO: 1717200 - DNA, 15 bp, Homo sapiens
ctttatggttaaata

SEQ ID NO: 1717201 - DNA, 15 bp, Homo sapiens
tttatggttaaatag

SEQ ID NO: 1717202 - DNA, 15 bp, Homo sapiens
ttatggttaaatagc

SEQ ID NO: 1717203 - DNA, 15 bp, Homo sapiens
tatggttaaatagct

SEQ ID NO: 1717204 - DNA, 15 bp, Homo sapiens
atggttaaatagcta

SEQ ID NO: 1717205 - DNA, 15 bp, Homo sapiens
tggttaaatagctat

SEQ ID NO: 1717206 - DNA, 15 bp, Homo sapiens
ggttaaatagctatg

SEQ ID NO: 1717207 - DNA, 15 bp, Homo sapiens
gttaaatagctatga

SEQ ID NO: 1717208 - DNA, 15 bp, Homo sapiens
ttaaatagctatgat

SEQ ID NO: 1717209 - DNA, 15 bp, Homo sapiens
taaatagctatgatt

SEQ ID NO: 1717210 - DNA, 15 bp, Homo sapiens
aaatagctatgattg

SEQ ID NO: 1717211 - DNA, 15 bp, Homo sapiens
aatagctatgattga

SEQ ID NO: 1717212 - DNA, 15 bp, Homo sapiens
atagctatgattgaa

SEQ ID NO: 1717213 - DNA, 15 bp, Homo sapiens
tagctatgattgaaa

SEQ ID NO: 1717214 - DNA, 15 bp, Homo sapiens
agctatgattgaaag

SEQ ID NO: 1717215 - DNA, 15 bp, Homo sapiens
gctatgattgaaaga

SEQ ID NO: 1717216 - DNA, 15 bp, Homo sapiens
ctatgattgaaagag

SEQ ID NO: 1717217 - DNA, 15 bp, Homo sapiens
tatgattgaaagagt

SEQ ID NO: 1717218 - DNA, 15 bp, Homo sapiens
atgattgaaagagtg

SEQ ID NO: 1717219 - DNA, 15 bp, Homo sapiens
tgattgaaagagtgt

SEQ ID NO: 1717220 - DNA, 15 bp, Homo sapiens
gattgaaagagtgta

SEQ ID NO: 1717221 - DNA, 15 bp, Homo sapiens
attgaaagagtgtaa

SEQ ID NO: 1717222 - DNA, 15 bp, Homo sapiens
ttgaaagagtgtaat

SEQ ID NO: 1717223 - DNA, 15 bp, Homo sapiens
tgaaagagtgtaatt

SEQ ID NO: 1717224 - DNA, 15 bp, Homo sapiens
gaaagagtgtaattg

SEQ ID NO: 1717225 - DNA, 15 bp, Homo sapiens
aaagagtgtaattgt

SEQ ID NO: 1717226 - DNA, 15 bp, Homo sapiens
aagagtgtaattgtc

SEQ ID NO: 1717227 - DNA, 15 bp, Homo sapiens
agagtgtaattgtca

SEQ ID NO: 1717228 - DNA, 15 bp, Homo sapiens
gagtgtaattgtcat

SEQ ID NO: 1717229 - DNA, 15 bp, Homo sapiens
agtgtaattgtcatt

SEQ ID NO: 1717230 - DNA, 15 bp, Homo sapiens
gtgtaattgtcatta

SEQ ID NO: 1717231 - DNA, 15 bp, Homo sapiens
tgtaattgtcattat

SEQ ID NO: 1717232 - DNA, 15 bp, Homo sapiens
gtaattgtcattatt

SEQ ID NO: 1717233 - DNA, 15 bp, Homo sapiens
taattgtcattattg

SEQ ID NO: 1717234 - DNA, 15 bp, Homo sapiens
aattgtcattattgt

SEQ ID NO: 1717235 - DNA, 15 bp, Homo sapiens
attgtcattattgtc

SEQ ID NO: 1717236 - DNA, 15 bp, Homo sapiens
ttgtcattattgtca

SEQ ID NO: 1717237 - DNA, 15 bp, Homo sapiens
tgtcattattgtcag

SEQ ID NO: 1717238 - DNA, 15 bp, Homo sapiens
gtcattattgtcagc

SEQ ID NO: 1717239 - DNA, 15 bp, Homo sapiens
tcattattgtcagca

SEQ ID NO: 1717240 - DNA, 15 bp, Homo sapiens
cattattgtcagcac

SEQ ID NO: 1717241 - DNA, 15 bp, Homo sapiens
attattgtcagcact

SEQ ID NO: 1717242 - DNA, 15 bp, Homo sapiens
ttattgtcagcactg

SEQ ID NO: 1717243 - DNA, 15 bp, Homo sapiens
tattgtcagcactgg

SEQ ID NO: 1717244 - DNA, 15 bp, Homo sapiens
attgtcagcactggt

SEQ ID NO: 1717245 - DNA, 15 bp, Homo sapiens
ttgtcagcactggtt

SEQ ID NO: 1717246 - DNA, 15 bp, Homo sapiens
tgtcagcactggttc

SEQ ID NO: 1717247 - DNA, 15 bp, Homo sapiens
gtcagcactggttct

SEQ ID NO: 1717248 - DNA, 15 bp, Homo sapiens
tcagcactggttcta

SEQ ID NO: 1717249 - DNA, 15 bp, Homo sapiens
cagcactggttctac

SEQ ID NO: 1717250 - DNA, 15 bp, Homo sapiens
agcactggttctact

SEQ ID NO: 1717251 - DNA, 15 bp, Homo sapiens
gcactggttctactt

SEQ ID NO: 1717252 - DNA, 15 bp, Homo sapiens
cactggttctacttt

SEQ ID NO: 1717253 - DNA, 15 bp, Homo sapiens
actggttctactttg

SEQ ID NO: 1717254 - DNA, 15 bp, Homo sapiens
ctggttctactttga

SEQ ID NO: 1717255 - DNA, 15 bp, Homo sapiens
tggttctactttgag

SEQ ID NO: 1717256 - DNA, 15 bp, Homo sapiens
ggttctactttgaga

SEQ ID NO: 1717257 - DNA, 15 bp, Homo sapiens
gttctactttgagac

SEQ ID NO: 1717258 - DNA, 15 bp, Homo sapiens
ttctactttgagaca

SEQ ID NO: 1717259 - DNA, 15 bp, Homo sapiens
tctactttgagacaa

SEQ ID NO: 1717260 - DNA, 15 bp, Homo sapiens
ctactttgagacaag

SEQ ID NO: 1717261 - DNA, 15 bp, Homo sapiens
tactttgagacaagt

SEQ ID NO: 1717262 - DNA, 15 bp, Homo sapiens
actttgagacaagtt

SEQ ID NO: 1717263 - DNA, 15 bp, Homo sapiens
ctttgagacaagttc

SEQ ID NO: 1717264 - DNA, 15 bp, Homo sapiens
tttgagacaagttca

SEQ ID NO: 1717265 - DNA, 15 bp, Homo sapiens
ttgagacaagttcat

SEQ ID NO: 1717266 - DNA, 15 bp, Homo sapiens
tgagacaagttcatt

SEQ ID NO: 1717267 - DNA, 15 bp, Homo sapiens
gagacaagttcattg

SEQ ID NO: 1717268 - DNA, 15 bp, Homo sapiens
agacaagttcattgc

SEQ ID NO: 1717269 - DNA, 15 bp, Homo sapiens
gacaagttcattgca

SEQ ID NO: 1717270 - DNA, 15 bp, Homo sapiens
acaagttcattgcag

SEQ ID NO: 1717271 - DNA, 15 bp, Homo sapiens
caagttcattgcaga

SEQ ID NO: 1717272 - DNA, 15 bp, Homo sapiens
aagttcattgcagag

SEQ ID NO: 1717273 - DNA, 15 bp, Homo sapiens
agttcattgcagagg

SEQ ID NO: 1717274 - DNA, 15 bp, Homo sapiens
gttcattgcagaggg

SEQ ID NO: 1717275 - DNA, 15 bp, Homo sapiens
ttcattgcagaggga

SEQ ID NO: 1717276 - DNA, 15 bp, Homo sapiens
tcattgcagagggaa

SEQ ID NO: 1717277 - DNA, 15 bp, Homo sapiens
cattgcagagggaat

SEQ ID NO: 1717278 - DNA, 15 bp, Homo sapiens
attgcagagggaatg

SEQ ID NO: 1717279 - DNA, 15 bp, Homo sapiens
ttgcagagggaatgg

SEQ ID NO: 1717280 - DNA, 15 bp, Homo sapiens
tgcagagggaatggg

SEQ ID NO: 1717281 - DNA, 15 bp, Homo sapiens
gcagagggaatggga

SEQ ID NO: 1717282 - DNA, 15 bp, Homo sapiens
cagagggaatgggac

SEQ ID NO: 1717283 - DNA, 15 bp, Homo sapiens
agagggaatgggact

SEQ ID NO: 1717284 - DNA, 15 bp, Homo sapiens
gagggaatgggactt

SEQ ID NO: 1717285 - DNA, 15 bp, Homo sapiens
agggaatgggacttg

SEQ ID NO: 1717286 - DNA, 15 bp, Homo sapiens
gggaatgggacttgt

SEQ ID NO: 1717287 - DNA, 15 bp, Homo sapiens
ggaatgggacttgtt

SEQ ID NO: 1717288 - DNA, 15 bp, Homo sapiens
gaatgggacttgttt

SEQ ID NO: 1717289 - DNA, 15 bp, Homo sapiens
aatgggacttgtttc

SEQ ID NO: 1717290 - DNA, 15 bp, Homo sapiens
atgggacttgtttct

SEQ ID NO: 1717291 - DNA, 15 bp, Homo sapiens
tgggacttgtttctg

SEQ ID NO: 1717292 - DNA, 15 bp, Homo sapiens
gggacttgtttctgt

SEQ ID NO: 1717293 - DNA, 15 bp, Homo sapiens
ggacttgtttctgtt

SEQ ID NO: 1717294 - DNA, 15 bp, Homo sapiens
gacttgtttctgttt

SEQ ID NO: 1717295 - DNA, 15 bp, Homo sapiens
acttgtttctgtttt

SEQ ID NO: 1717296 - DNA, 15 bp, Homo sapiens
cttgtttctgttttt

SEQ ID NO: 1717297 - DNA, 15 bp, Homo sapiens
ttgtttctgtttttc

SEQ ID NO: 1717298 - DNA, 15 bp, Homo sapiens
tgtttctgtttttca

SEQ ID NO: 1717299 - DNA, 15 bp, Homo sapiens
gtttctgtttttcac

SEQ ID NO: 1717300 - DNA, 15 bp, Homo sapiens
tttctgtttttcact

SEQ ID NO: 1717301 - DNA, 15 bp, Homo sapiens
ttctgtttttcacta

SEQ ID NO: 1717302 - DNA, 15 bp, Homo sapiens
tctgtttttcactat

SEQ ID NO: 1717303 - DNA, 15 bp, Homo sapiens
ctgtttttcactatt

SEQ ID NO: 1717304 - DNA, 15 bp, Homo sapiens
tgtttttcactattt

SEQ ID NO: 1717305 - DNA, 15 bp, Homo sapiens
gtttttcactatttt

SEQ ID NO: 1717306 - DNA, 15 bp, Homo sapiens
tttttcactattttc

SEQ ID NO: 1717307 - DNA, 15 bp, Homo sapiens
ttttcactattttct

SEQ ID NO: 1717308 - DNA, 15 bp, Homo sapiens
tttcactattttctc

SEQ ID NO: 1717309 - DNA, 15 bp, Homo sapiens
ttcactattttctct

SEQ ID NO: 1717310 - DNA, 15 bp, Homo sapiens
tcactattttctctc

SEQ ID NO: 1717311 - DNA, 15 bp, Homo sapiens
cactattttctctcc

SEQ ID NO: 1717312 - DNA, 15 bp, Homo sapiens
actattttctctccc

SEQ ID NO: 1717313 - DNA, 15 bp, Homo sapiens
ctattttctctccca

SEQ ID NO: 1717314 - DNA, 15 bp, Homo sapiens
tattttctctcccat

SEQ ID NO: 1717315 - DNA, 15 bp, Homo sapiens
attttctctcccatt

SEQ ID NO: 1717316 - DNA, 15 bp, Homo sapiens
ttttctctcccattc

SEQ ID NO: 1717317 - DNA, 15 bp, Homo sapiens
tttctctcccattct

SEQ ID NO: 1717318 - DNA, 15 bp, Homo sapiens
ttctctcccattctt

SEQ ID NO: 1717319 - DNA, 15 bp, Homo sapiens
tctctcccattcttg

SEQ ID NO: 1717320 - DNA, 15 bp, Homo sapiens
ctctcccattcttgt

SEQ ID NO: 1717321 - DNA, 15 bp, Homo sapiens
tctcccattcttgtc

SEQ ID NO: 1717322 - DNA, 15 bp, Homo sapiens
ctcccattcttgtct

SEQ ID NO: 1717323 - DNA, 15 bp, Homo sapiens
tcccattcttgtcta

SEQ ID NO: 1717324 - DNA, 15 bp, Homo sapiens
cccattcttgtctat

SEQ ID NO: 1717325 - DNA, 15 bp, Homo sapiens
ccattcttgtctatc

SEQ ID NO: 1717326 - DNA, 15 bp, Homo sapiens
cattcttgtctatca

SEQ ID NO: 1717327 - DNA, 15 bp, Homo sapiens
attcttgtctatcac

SEQ ID NO: 1717328 - DNA, 15 bp, Homo sapiens
ttcttgtctatcacc

SEQ ID NO: 1717329 - DNA, 15 bp, Homo sapiens
tcttgtctatcacca

SEQ ID NO: 1717330 - DNA, 15 bp, Homo sapiens
cttgtctatcaccaa

SEQ ID NO: 1717331 - DNA, 15 bp, Homo sapiens
ttgtctatcaccaaa

SEQ ID NO: 1717332 - DNA, 15 bp, Homo sapiens
tgtctatcaccaaat

SEQ ID NO: 1717333 - DNA, 15 bp, Homo sapiens
gtctatcaccaaatc

SEQ ID NO: 1717334 - DNA, 15 bp, Homo sapiens
tctatcaccaaatcc

SEQ ID NO: 1717335 - DNA, 15 bp, Homo sapiens
ctatcaccaaatcct

SEQ ID NO: 1717336 - DNA, 15 bp, Homo sapiens
tatcaccaaatcctt

SEQ ID NO: 1717337 - DNA, 15 bp, Homo sapiens
atcaccaaatccttt

SEQ ID NO: 1717338 - DNA, 15 bp, Homo sapiens
tcaccaaatcctttc

SEQ ID NO: 1717339 - DNA, 15 bp, Homo sapiens
caccaaatcctttca

SEQ ID NO: 1717340 - DNA, 15 bp, Homo sapiens
accaaatcctttcac

SEQ ID NO: 1717341 - DNA, 15 bp, Homo sapiens
ccaaatcctttcacc

SEQ ID NO: 1717342 - DNA, 15 bp, Homo sapiens
caaatcctttcaccc

SEQ ID NO: 1717343 - DNA, 15 bp, Homo sapiens
aaatcctttcaccct

SEQ ID NO: 1717344 - DNA, 15 bp, Homo sapiens
aatcctttcaccctc

SEQ ID NO: 1717345 - DNA, 15 bp, Homo sapiens
atcctttcaccctca

SEQ ID NO: 1717346 - DNA, 15 bp, Homo sapiens
tcctttcaccctcac

SEQ ID NO: 1717347 - DNA, 15 bp, Homo sapiens
cctttcaccctcacc

SEQ ID NO: 1717348 - DNA, 15 bp, Homo sapiens
ctttcaccctcaccc

SEQ ID NO: 1717349 - DNA, 15 bp, Homo sapiens
tttcaccctcaccca

SEQ ID NO: 1717350 - DNA, 15 bp, Homo sapiens
ttcaccctcacccat

SEQ ID NO: 1717351 - DNA, 15 bp, Homo sapiens
tcaccctcacccatt

SEQ ID NO: 1717352 - DNA, 15 bp, Homo sapiens
caccctcacccattt

SEQ ID NO: 1717353 - DNA, 15 bp, Homo sapiens
accctcacccatttc

SEQ ID NO: 1717354 - DNA, 15 bp, Homo sapiens
ccctcacccatttct

SEQ ID NO: 1717355 - DNA, 15 bp, Homo sapiens
cctcacccatttctt

SEQ ID NO: 1717356 - DNA, 15 bp, Homo sapiens
ctcacccatttcttt

SEQ ID NO: 1717357 - DNA, 15 bp, Homo sapiens
tcacccatttctttc

SEQ ID NO: 1717358 - DNA, 15 bp, Homo sapiens
cacccatttctttcc

SEQ ID NO: 1717359 - DNA, 15 bp, Homo sapiens
acccatttctttcca

SEQ ID NO: 1717360 - DNA, 15 bp, Homo sapiens
cccatttctttccac

SEQ ID NO: 1717361 - DNA, 15 bp, Homo sapiens
ccatttctttccact

SEQ ID NO: 1717362 - DNA, 15 bp, Homo sapiens
catttctttccactc

SEQ ID NO: 1717363 - DNA, 15 bp, Homo sapiens
atttctttccactcg

SEQ ID NO: 1717364 - DNA, 15 bp, Homo sapiens
tttctttccactcgg

SEQ ID NO: 1717365 - DNA, 15 bp, Homo sapiens
ttctttccactcggt

SEQ ID NO: 1717366 - DNA, 15 bp, Homo sapiens
tctttccactcggta

SEQ ID NO: 1717367 - DNA, 15 bp, Homo sapiens
ctttccactcggtat

SEQ ID NO: 1717368 - DNA, 15 bp, Homo sapiens
tttccactcggtata

SEQ ID NO: 1717369 - DNA, 15 bp, Homo sapiens
ttccactcggtatac

SEQ ID NO: 1717370 - DNA, 15 bp, Homo sapiens
tccactcggtataca

SEQ ID NO: 1717371 - DNA, 15 bp, Homo sapiens
ccactcggtatacac

SEQ ID NO: 1717372 - DNA, 15 bp, Homo sapiens
cactcggtatacact

SEQ ID NO: 1717373 - DNA, 15 bp, Homo sapiens
actcggtatacacta

SEQ ID NO: 1717374 - DNA, 15 bp, Homo sapiens
ctcggtatacactaa

SEQ ID NO: 1717375 - DNA, 15 bp, Homo sapiens
tcggtatacactaac

SEQ ID NO: 1717376 - DNA, 15 bp, Homo sapiens
cggtatacactaaca

SEQ ID NO: 1717377 - DNA, 15 bp, Homo sapiens
ggtatacactaacaa

SEQ ID NO: 1717378 - DNA, 15 bp, Homo sapiens
gtatacactaacaat

SEQ ID NO: 1717379 - DNA, 15 bp, Homo sapiens
tatacactaacaatt

SEQ ID NO: 1717380 - DNA, 15 bp, Homo sapiens
atacactaacaattc

SEQ ID NO: 1717381 - DNA, 15 bp, Homo sapiens
tacactaacaattca

SEQ ID NO: 1717382 - DNA, 15 bp, Homo sapiens
acactaacaattcac

SEQ ID NO: 1717383 - DNA, 15 bp, Homo sapiens
cactaacaattcacg

SEQ ID NO: 1717384 - DNA, 15 bp, Homo sapiens
actaacaattcacgg

SEQ ID NO: 1717385 - DNA, 15 bp, Homo sapiens
ctaacaattcacggc

SEQ ID NO: 1717386 - DNA, 15 bp, Homo sapiens
taacaattcacggca

SEQ ID NO: 1717387 - DNA, 15 bp, Homo sapiens
aacaattcacggcag

SEQ ID NO: 1717388 - DNA, 15 bp, Homo sapiens
acaattcacggcaga

SEQ ID NO: 1717389 - DNA, 15 bp, Homo sapiens
caattcacggcagaa

SEQ ID NO: 1717390 - DNA, 15 bp, Homo sapiens
aattcacggcagaaa

SEQ ID NO: 1717391 - DNA, 15 bp, Homo sapiens
attcacggcagaaaa

SEQ ID NO: 1717392 - DNA, 15 bp, Homo sapiens
ttcacggcagaaaag

SEQ ID NO: 1717393 - DNA, 15 bp, Homo sapiens
tcacggcagaaaaga

SEQ ID NO: 1717394 - DNA, 15 bp, Homo sapiens
cacggcagaaaagat

SEQ ID NO: 1717395 - DNA, 15 bp, Homo sapiens
acggcagaaaagatt

SEQ ID NO: 1717396 - DNA, 15 bp, Homo sapiens
cggcagaaaagattg

SEQ ID NO: 1717397 - DNA, 15 bp, Homo sapiens
ggcagaaaagattga

SEQ ID NO: 1717398 - DNA, 15 bp, Homo sapiens
gcagaaaagattgaa

SEQ ID NO: 1717399 - DNA, 15 bp, Homo sapiens
cagaaaagattgaag

SEQ ID NO: 1717400 - DNA, 15 bp, Homo sapiens
agaaaagattgaagt

SEQ ID NO: 1717401 - DNA, 15 bp, Homo sapiens
gaaaagattgaagtg

SEQ ID NO: 1717402 - DNA, 15 bp, Homo sapiens
aaaagattgaagtgg

SEQ ID NO: 1717403 - DNA, 15 bp, Homo sapiens
aaagattgaagtggg

SEQ ID NO: 1717404 - DNA, 15 bp, Homo sapiens
aagattgaagtggga

SEQ ID NO: 1717405 - DNA, 15 bp, Homo sapiens
agattgaagtgggat

SEQ ID NO: 1717406 - DNA, 15 bp, Homo sapiens
gattgaagtgggatt

SEQ ID NO: 1717407 - DNA, 15 bp, Homo sapiens
ttgaagtgggattta

SEQ ID NO: 1717408 - DNA, 15 bp, Homo sapiens
tgaagtgggatttag

SEQ ID NO: 1717409 - DNA, 15 bp, Homo sapiens
gaagtgggatttagg

SEQ ID NO: 1717410 - DNA, 15 bp, Homo sapiens
aagtgggatttagga

SEQ ID NO: 1717411 - DNA, 15 bp, Homo sapiens
agtgggatttaggaa

SEQ ID NO: 1717412 - DNA, 15 bp, Homo sapiens
gtgggatttaggaaa

SEQ ID NO: 1717413 - DNA, 15 bp, Homo sapiens
tgggatttaggaaat

SEQ ID NO: 1717414 - DNA, 15 bp, Homo sapiens
gggatttaggaaatg

SEQ ID NO: 1717415 - DNA, 15 bp, Homo sapiens
ggatttaggaaatgg

SEQ ID NO: 1717416 - DNA, 15 bp, Homo sapiens
gatttaggaaatggc

SEQ ID NO: 1717417 - DNA, 15 bp, Homo sapiens
atttaggaaatggcc

SEQ ID NO: 1717418 - DNA, 15 bp, Homo sapiens
tttaggaaatggccc

SEQ ID NO: 1717419 - DNA, 15 bp, Homo sapiens
ttaggaaatggcccc

SEQ ID NO: 1717420 - DNA, 15 bp, Homo sapiens
taggaaatggcccct

SEQ ID NO: 1717421 - DNA, 15 bp, Homo sapiens
aggaaatggcccctg

SEQ ID NO: 1717422 - DNA, 15 bp, Homo sapiens
ggaaatggcccctgg

SEQ ID NO: 1717423 - DNA, 15 bp, Homo sapiens
gaaatggcccctgga

SEQ ID NO: 1717424 - DNA, 15 bp, Homo sapiens
aaatggcccctggaa

SEQ ID NO: 1717425 - DNA, 15 bp, Homo sapiens
aatggcccctggaag

SEQ ID NO: 1717426 - DNA, 15 bp, Homo sapiens
atggcccctggaagg

SEQ ID NO: 1717427 - DNA, 15 bp, Homo sapiens
tggcccctggaaggc

SEQ ID NO: 1717428 - DNA, 15 bp, Homo sapiens
ggcccctggaaggct

SEQ ID NO: 1717429 - DNA, 15 bp, Homo sapiens
gcccctggaaggcta

SEQ ID NO: 1717430 - DNA, 15 bp, Homo sapiens
cccctggaaggctat

SEQ ID NO: 1717431 - DNA, 15 bp, Homo sapiens
ccctggaaggctatt

SEQ ID NO: 1717432 - DNA, 15 bp, Homo sapiens
cctggaaggctatta

SEQ ID NO: 1717433 - DNA, 15 bp, Homo sapiens
ctggaaggctattaa

SEQ ID NO: 1717434 - DNA, 15 bp, Homo sapiens
tggaaggctattaaa

SEQ ID NO: 1717435 - DNA, 15 bp, Homo sapiens
ggaaggctattaaaa

SEQ ID NO: 1717436 - DNA, 15 bp, Homo sapiens
gaaggctattaaaaa

SEQ ID NO: 1717437 - DNA, 15 bp, Homo sapiens
aaggctattaaaaat

SEQ ID NO: 1717438 - DNA, 15 bp, Homo sapiens
aggctattaaaaatt

SEQ ID NO: 1717439 - DNA, 15 bp, Homo sapiens
ggctattaaaaattt

SEQ ID NO: 1717440 - DNA, 15 bp, Homo sapiens
gctattaaaaattta

SEQ ID NO: 1717441 - DNA, 15 bp, Homo sapiens
ctattaaaaatttat

SEQ ID NO: 1717442 - DNA, 15 bp, Homo sapiens
tattaaaaatttata

SEQ ID NO: 1717443 - DNA, 15 bp, Homo sapiens
attaaaaatttatat

SEQ ID NO: 1717444 - DNA, 15 bp, Homo sapiens
ttaaaaatttatata

SEQ ID NO: 1717445 - DNA, 15 bp, Homo sapiens
taaaaatttatatat

SEQ ID NO: 1717446 - DNA, 15 bp, Homo sapiens
aaaaatttatatatt

SEQ ID NO: 1717447 - DNA, 15 bp, Homo sapiens
aaaatttatatattt

SEQ ID NO: 1717448 - DNA, 15 bp, Homo sapiens
aaatttatatattta

SEQ ID NO: 1717449 - DNA, 15 bp, Homo sapiens
aatttatatatttaa

SEQ ID NO: 1717450 - DNA, 15 bp, Homo sapiens
atttatatatttaaa

SEQ ID NO: 1717451 - DNA, 15 bp, Homo sapiens
tttatatatttaaat

SEQ ID NO: 1717452 - DNA, 15 bp, Homo sapiens
ttatatatttaaatg

SEQ ID NO: 1717453 - DNA, 15 bp, Homo sapiens
tatatatttaaatgg

SEQ ID NO: 1717454 - DNA, 15 bp, Homo sapiens
atatatttaaatgga

SEQ ID NO: 1717455 - DNA, 15 bp, Homo sapiens
tatatttaaatggac

SEQ ID NO: 1717456 - DNA, 15 bp, Homo sapiens
atatttaaatggact

SEQ ID NO: 1717457 - DNA, 15 bp, Homo sapiens
tatttaaatggactg

SEQ ID NO: 1717458 - DNA, 15 bp, Homo sapiens
atttaaatggactgt

SEQ ID NO: 1717459 - DNA, 15 bp, Homo sapiens
tttaaatggactgtc

SEQ ID NO: 1717460 - DNA, 15 bp, Homo sapiens
ttaaatggactgtct

SEQ ID NO: 1717461 - DNA, 15 bp, Homo sapiens
taaatggactgtctt

SEQ ID NO: 1717462 - DNA, 15 bp, Homo sapiens
aaatggactgtctta

SEQ ID NO: 1717463 - DNA, 15 bp, Homo sapiens
aatggactgtcttat

SEQ ID NO: 1717464 - DNA, 15 bp, Homo sapiens
atggactgtcttata

SEQ ID NO: 1717465 - DNA, 15 bp, Homo sapiens
tggactgtcttatag

SEQ ID NO: 1717466 - DNA, 15 bp, Homo sapiens
ggactgtcttatagg

SEQ ID NO: 1717467 - DNA, 15 bp, Homo sapiens
gactgtcttataggt

SEQ ID NO: 1717468 - DNA, 15 bp, Homo sapiens
actgtcttataggtc

SEQ ID NO: 1717469 - DNA, 15 bp, Homo sapiens
ctgtcttataggtca

SEQ ID NO: 1717470 - DNA, 15 bp, Homo sapiens
tgtcttataggtcag

SEQ ID NO: 1717471 - DNA, 15 bp, Homo sapiens
gtcttataggtcagt

SEQ ID NO: 1717472 - DNA, 15 bp, Homo sapiens
tcttataggtcagtt

SEQ ID NO: 1717473 - DNA, 15 bp, Homo sapiens
cttataggtcagtta

SEQ ID NO: 1717474 - DNA, 15 bp, Homo sapiens
ttataggtcagttaa

SEQ ID NO: 1717475 - DNA, 15 bp, Homo sapiens
tataggtcagttaaa

SEQ ID NO: 1717476 - DNA, 15 bp, Homo sapiens
ataggtcagttaaaa

SEQ ID NO: 1717477 - DNA, 15 bp, Homo sapiens
taggtcagttaaaaa

SEQ ID NO: 1717478 - DNA, 15 bp, Homo sapiens
aggtcagttaaaaac

SEQ ID NO: 1717479 - DNA, 15 bp, Homo sapiens
ggtcagttaaaaacc

SEQ ID NO: 1717480 - DNA, 15 bp, Homo sapiens
gtcagttaaaaacca

SEQ ID NO: 1717481 - DNA, 15 bp, Homo sapiens
tcagttaaaaaccat

SEQ ID NO: 1717482 - DNA, 15 bp, Homo sapiens
cagttaaaaaccata

SEQ ID NO: 1717483 - DNA, 15 bp, Homo sapiens
agttaaaaaccatat

SEQ ID NO: 1717484 - DNA, 15 bp, Homo sapiens
gttaaaaaccatatt

SEQ ID NO: 1717485 - DNA, 15 bp, Homo sapiens
ttaaaaaccatattc

SEQ ID NO: 1717486 - DNA, 15 bp, Homo sapiens
taaaaaccatattcg

SEQ ID NO: 1717487 - DNA, 15 bp, Homo sapiens
aaaaaccatattcgt

SEQ ID NO: 1717488 - DNA, 15 bp, Homo sapiens
aaaaccatattcgtt

SEQ ID NO: 1717489 - DNA, 15 bp, Homo sapiens
aaaccatattcgtta

SEQ ID NO: 1717490 - DNA, 15 bp, Homo sapiens
aaccatattcgttaa

SEQ ID NO: 1717491 - DNA, 15 bp, Homo sapiens
accatattcgttaaa

SEQ ID NO: 1717492 - DNA, 15 bp, Homo sapiens
ccatattcgttaaaa

SEQ ID NO: 1717493 - DNA, 15 bp, Homo sapiens
catattcgttaaaaa

SEQ ID NO: 1717494 - DNA, 15 bp, Homo sapiens
atattcgttaaaaaa

SEQ ID NO: 1717495 - DNA, 15 bp, Homo sapiens
tattcgttaaaaaac

SEQ ID NO: 1717496 - DNA, 15 bp, Homo sapiens
attcgttaaaaaacc

SEQ ID NO: 1717497 - DNA, 15 bp, Homo sapiens
ttcgttaaaaaacca

SEQ ID NO: 1717498 - DNA, 15 bp, Homo sapiens
tcgttaaaaaaccaa

SEQ ID NO: 1717499 - DNA, 15 bp, Homo sapiens
cgttaaaaaaccaaa

SEQ ID NO: 1717500 - DNA, 15 bp, Homo sapiens
gttaaaaaaccaaaa

SEQ ID NO: 1717501 - DNA, 15 bp, Homo sapiens
ttaaaaaaccaaaat

SEQ ID NO: 1717502 - DNA, 15 bp, Homo sapiens
taaaaaaccaaaata

SEQ ID NO: 1717503 - DNA, 15 bp, Homo sapiens
aaaaaaccaaaataa

SEQ ID NO: 1717504 - DNA, 15 bp, Homo sapiens
aaaaaccaaaataac

SEQ ID NO: 1717505 - DNA, 15 bp, Homo sapiens
aaaaccaaaataaca

SEQ ID NO: 1717506 - DNA, 15 bp, Homo sapiens
aaaccaaaataacaa

SEQ ID NO: 1717507 - DNA, 15 bp, Homo sapiens
aaccaaaataacaac

SEQ ID NO: 1717508 - DNA, 15 bp, Homo sapiens
accaaaataacaaca

SEQ ID NO: 1717509 - DNA, 15 bp, Homo sapiens
ccaaaataacaacaa

SEQ ID NO: 1717510 - DNA, 15 bp, Homo sapiens
caaaataacaacaac

SEQ ID NO: 1717511 - DNA, 15 bp, Homo sapiens
aaaataacaacaaca

SEQ ID NO: 1717512 - DNA, 15 bp, Homo sapiens
ataacaacaacaaaa

SEQ ID NO: 1717513 - DNA, 15 bp, Homo sapiens
taacaacaacaaaaa

SEQ ID NO: 1717514 - DNA, 15 bp, Homo sapiens
acaacaacaaaaaat

SEQ ID NO: 1717515 - DNA, 15 bp, Homo sapiens
caacaacaaaaaatt

SEQ ID NO: 1717516 - DNA, 15 bp, Homo sapiens
aacaacaaaaaatta

SEQ ID NO: 1717517 - DNA, 15 bp, Homo sapiens
acaacaaaaaattaa

SEQ ID NO: 1717518 - DNA, 15 bp, Homo sapiens
caacaaaaaattaaa

SEQ ID NO: 1717519 - DNA, 15 bp, Homo sapiens
aacaaaaaattaaaa

SEQ ID NO: 1717520 - DNA, 15 bp, Homo sapiens
caaaaaattaaaaac

SEQ ID NO: 1717521 - DNA, 15 bp, Homo sapiens
aaaaaattaaaaacc

SEQ ID NO: 1717522 - DNA, 15 bp, Homo sapiens
aaaaattaaaaacca

SEQ ID NO: 1717523 - DNA, 15 bp, Homo sapiens
aaaattaaaaaccac

SEQ ID NO: 1717524 - DNA, 15 bp, Homo sapiens
aaattaaaaaccacg

SEQ ID NO: 1717525 - DNA, 15 bp, Homo sapiens
aattaaaaaccacgt

SEQ ID NO: 1717526 - DNA, 15 bp, Homo sapiens
attaaaaaccacgtc

SEQ ID NO: 1717527 - DNA, 15 bp, Homo sapiens
ttaaaaaccacgtct

SEQ ID NO: 1717528 - DNA, 15 bp, Homo sapiens
taaaaaccacgtctg

SEQ ID NO: 1717529 - DNA, 15 bp, Homo sapiens
aaaaaccacgtctgg

SEQ ID NO: 1717530 - DNA, 15 bp, Homo sapiens
aaaaccacgtctggg

SEQ ID NO: 1717531 - DNA, 15 bp, Homo sapiens
aaaccacgtctgggg

SEQ ID NO: 1717532 - DNA, 15 bp, Homo sapiens
aaccacgtctggggc

SEQ ID NO: 1717533 - DNA, 15 bp, Homo sapiens
accacgtctggggca

SEQ ID NO: 1717534 - DNA, 15 bp, Homo sapiens
ccacgtctggggcat

SEQ ID NO: 1717535 - DNA, 15 bp, Homo sapiens
cacgtctggggcatg

SEQ ID NO: 1717536 - DNA, 15 bp, Homo sapiens
acgtctggggcatgt

SEQ ID NO: 1717537 - DNA, 15 bp, Homo sapiens
cgtctggggcatgtt

SEQ ID NO: 1717538 - DNA, 15 bp, Homo sapiens
gtctggggcatgttc

SEQ ID NO: 1717539 - DNA, 15 bp, Homo sapiens
tctggggcatgttct

SEQ ID NO: 1717540 - DNA, 15 bp, Homo sapiens
ctggggcatgttctg

SEQ ID NO: 1717541 - DNA, 15 bp, Homo sapiens
tggggcatgttctgg

SEQ ID NO: 1717542 - DNA, 15 bp, Homo sapiens
ggggcatgttctggg

SEQ ID NO: 1717543 - DNA, 15 bp, Homo sapiens
gggcatgttctggga

SEQ ID NO: 1717544 - DNA, 15 bp, Homo sapiens
ggcatgttctgggaa

SEQ ID NO: 1717545 - DNA, 15 bp, Homo sapiens
gcatgttctgggaaa

SEQ ID NO: 1717546 - DNA, 15 bp, Homo sapiens
catgttctgggaaaa

SEQ ID NO: 1717547 - DNA, 15 bp, Homo sapiens
atgttctgggaaaag

SEQ ID NO: 1717548 - DNA, 15 bp, Homo sapiens
tgttctgggaaaaga

SEQ ID NO: 1717549 - DNA, 15 bp, Homo sapiens
gttctgggaaaagac

SEQ ID NO: 1717550 - DNA, 15 bp, Homo sapiens
ttctgggaaaagaca

SEQ ID NO: 1717551 - DNA, 15 bp, Homo sapiens
tctgggaaaagacat

SEQ ID NO: 1717552 - DNA, 15 bp, Homo sapiens
ctgggaaaagacatg

SEQ ID NO: 1717553 - DNA, 15 bp, Homo sapiens
tgggaaaagacatgg

SEQ ID NO: 1717554 - DNA, 15 bp, Homo sapiens
gggaaaagacatggc

SEQ ID NO: 1717555 - DNA, 15 bp, Homo sapiens
ggaaaagacatggct

SEQ ID NO: 1717556 - DNA, 15 bp, Homo sapiens
gaaaagacatggctt

SEQ ID NO: 1717557 - DNA, 15 bp, Homo sapiens
aaaagacatggcttt

SEQ ID NO: 1717558 - DNA, 15 bp, Homo sapiens
aaagacatggcttta

SEQ ID NO: 1717559 - DNA, 15 bp, Homo sapiens
aagacatggctttag

SEQ ID NO: 1717560 - DNA, 15 bp, Homo sapiens
agacatggctttagt

SEQ ID NO: 1717561 - DNA, 15 bp, Homo sapiens
gacatggctttagtt

SEQ ID NO: 1717562 - DNA, 15 bp, Homo sapiens
acatggctttagttt

SEQ ID NO: 1717563 - DNA, 15 bp, Homo sapiens
catggctttagtttc

SEQ ID NO: 1717564 - DNA, 15 bp, Homo sapiens
atggctttagtttct

SEQ ID NO: 1717565 - DNA, 15 bp, Homo sapiens
tggctttagtttctg

SEQ ID NO: 1717566 - DNA, 15 bp, Homo sapiens
ggctttagtttctga

SEQ ID NO: 1717567 - DNA, 15 bp, Homo sapiens
gctttagtttctgat

SEQ ID NO: 1717568 - DNA, 15 bp, Homo sapiens
ctttagtttctgatt

SEQ ID NO: 1717569 - DNA, 15 bp, Homo sapiens
tttagtttctgatta

SEQ ID NO: 1717570 - DNA, 15 bp, Homo sapiens
ttagtttctgattaa

SEQ ID NO: 1717571 - DNA, 15 bp, Homo sapiens
tagtttctgattaaa

SEQ ID NO: 1717572 - DNA, 15 bp, Homo sapiens
agtttctgattaaat

SEQ ID NO: 1717573 - DNA, 15 bp, Homo sapiens
gtttctgattaaatt

SEQ ID NO: 1717574 - DNA, 15 bp, Homo sapiens
tttctgattaaattc

SEQ ID NO: 1717575 - DNA, 15 bp, Homo sapiens
ttctgattaaattct

SEQ ID NO: 1717576 - DNA, 15 bp, Homo sapiens
tctgattaaattctg

SEQ ID NO: 1717577 - DNA, 15 bp, Homo sapiens
ctgattaaattctga

SEQ ID NO: 1717578 - DNA, 15 bp, Homo sapiens
tgattaaattctgat

SEQ ID NO: 1717579 - DNA, 15 bp, Homo sapiens
gattaaattctgatg

SEQ ID NO: 1717580 - DNA, 15 bp, Homo sapiens
attaaattctgatgt

SEQ ID NO: 1717581 - DNA, 15 bp, Homo sapiens
ttaaattctgatgta

SEQ ID NO: 1717582 - DNA, 15 bp, Homo sapiens
taaattctgatgtat

SEQ ID NO: 1717583 - DNA, 15 bp, Homo sapiens
aaattctgatgtatc

SEQ ID NO: 1717584 - DNA, 15 bp, Homo sapiens
aattctgatgtatcc

SEQ ID NO: 1717585 - DNA, 15 bp, Homo sapiens
attctgatgtatcca

SEQ ID NO: 1717586 - DNA, 15 bp, Homo sapiens
ttctgatgtatccaa

SEQ ID NO: 1717587 - DNA, 15 bp, Homo sapiens
tctgatgtatccaat

SEQ ID NO: 1717588 - DNA, 15 bp, Homo sapiens
ctgatgtatccaatt

SEQ ID NO: 1717589 - DNA, 15 bp, Homo sapiens
tgatgtatccaattc

SEQ ID NO: 1717590 - DNA, 15 bp, Homo sapiens
gatgtatccaattct

SEQ ID NO: 1717591 - DNA, 15 bp, Homo sapiens
atgtatccaattctt

SEQ ID NO: 1717592 - DNA, 15 bp, Homo sapiens
tgtatccaattcttg

SEQ ID NO: 1717593 - DNA, 15 bp, Homo sapiens
gtatccaattcttgc

SEQ ID NO: 1717594 - DNA, 15 bp, Homo sapiens
tatccaattcttgca

SEQ ID NO: 1717595 - DNA, 15 bp, Homo sapiens
atccaattcttgcaa

SEQ ID NO: 1717596 - DNA, 15 bp, Homo sapiens
tccaattcttgcaaa

SEQ ID NO: 1717597 - DNA, 15 bp, Homo sapiens
ccaattcttgcaaat

SEQ ID NO: 1717598 - DNA, 15 bp, Homo sapiens
caattcttgcaaatt

SEQ ID NO: 1717599 - DNA, 15 bp, Homo sapiens
aattcttgcaaattt

SEQ ID NO: 1717600 - DNA, 15 bp, Homo sapiens
attcttgcaaatttc

SEQ ID NO: 1717601 - DNA, 15 bp, Homo sapiens
ttcttgcaaatttcc

SEQ ID NO: 1717602 - DNA, 15 bp, Homo sapiens
tcttgcaaatttccc

SEQ ID NO: 1717603 - DNA, 15 bp, Homo sapiens
cttgcaaatttccct

SEQ ID NO: 1717604 - DNA, 15 bp, Homo sapiens
ttgcaaatttccctt

SEQ ID NO: 1717605 - DNA, 15 bp, Homo sapiens
tgcaaatttcccttg

SEQ ID NO: 1717606 - DNA, 15 bp, Homo sapiens
gcaaatttcccttgg

SEQ ID NO: 1717607 - DNA, 15 bp, Homo sapiens
caaatttcccttggg

SEQ ID NO: 1717608 - DNA, 15 bp, Homo sapiens
aaatttcccttggga

SEQ ID NO: 1717609 - DNA, 15 bp, Homo sapiens
aatttcccttgggaa

SEQ ID NO: 1717610 - DNA, 15 bp, Homo sapiens
atttcccttgggaaa

SEQ ID NO: 1717611 - DNA, 15 bp, Homo sapiens
tttcccttgggaaaa

SEQ ID NO: 1717612 - DNA, 15 bp, Homo sapiens
ttcccttgggaaaat

SEQ ID NO: 1717613 - DNA, 15 bp, Homo sapiens
tcccttgggaaaatg

SEQ ID NO: 1717614 - DNA, 15 bp, Homo sapiens
cccttgggaaaatgc

SEQ ID NO: 1717615 - DNA, 15 bp, Homo sapiens
ccttgggaaaatgca

SEQ ID NO: 1717616 - DNA, 15 bp, Homo sapiens
cttgggaaaatgcag

SEQ ID NO: 1717617 - DNA, 15 bp, Homo sapiens
ttgggaaaatgcagt

SEQ ID NO: 1717618 - DNA, 15 bp, Homo sapiens
tgggaaaatgcagta

SEQ ID NO: 1717619 - DNA, 15 bp, Homo sapiens
gggaaaatgcagtaa

SEQ ID NO: 1717620 - DNA, 15 bp, Homo sapiens
ggaaaatgcagtaat

SEQ ID NO: 1717621 - DNA, 15 bp, Homo sapiens
gaaaatgcagtaatg

SEQ ID NO: 1717622 - DNA, 15 bp, Homo sapiens
aaaatgcagtaatgg

SEQ ID NO: 1717623 - DNA, 15 bp, Homo sapiens
aaatgcagtaatggc

SEQ ID NO: 1717624 - DNA, 15 bp, Homo sapiens
aatgcagtaatggct

SEQ ID NO: 1717625 - DNA, 15 bp, Homo sapiens
atgcagtaatggcta

SEQ ID NO: 1717626 - DNA, 15 bp, Homo sapiens
tgcagtaatggctac

SEQ ID NO: 1717627 - DNA, 15 bp, Homo sapiens
gcagtaatggctact

SEQ ID NO: 1717628 - DNA, 15 bp, Homo sapiens
cagtaatggctactc

SEQ ID NO: 1717629 - DNA, 15 bp, Homo sapiens
agtaatggctactct

SEQ ID NO: 1717630 - DNA, 15 bp, Homo sapiens
gtaatggctactcta

SEQ ID NO: 1717631 - DNA, 15 bp, Homo sapiens
taatggctactctaa

SEQ ID NO: 1717632 - DNA, 15 bp, Homo sapiens
aatggctactctaaa

SEQ ID NO: 1717633 - DNA, 15 bp, Homo sapiens
atggctactctaaag

SEQ ID NO: 1717634 - DNA, 15 bp, Homo sapiens
tggctactctaaaga

SEQ ID NO: 1717635 - DNA, 15 bp, Homo sapiens
ggctactctaaagaa

SEQ ID NO: 1717636 - DNA, 15 bp, Homo sapiens
gctactctaaagaat

SEQ ID NO: 1717637 - DNA, 15 bp, Homo sapiens
ctactctaaagaatt

SEQ ID NO: 1717638 - DNA, 15 bp, Homo sapiens
tactctaaagaattc

SEQ ID NO: 1717639 - DNA, 15 bp, Homo sapiens
actctaaagaattcc

SEQ ID NO: 1717640 - DNA, 15 bp, Homo sapiens
ctctaaagaattcca

SEQ ID NO: 1717641 - DNA, 15 bp, Homo sapiens
tctaaagaattccat

SEQ ID NO: 1717642 - DNA, 15 bp, Homo sapiens
ctaaagaattccatg

SEQ ID NO: 1717643 - DNA, 15 bp, Homo sapiens
taaagaattccatgt

SEQ ID NO: 1717644 - DNA, 15 bp, Homo sapiens
aaagaattccatgtt

SEQ ID NO: 1717645 - DNA, 15 bp, Homo sapiens
aagaattccatgtta

SEQ ID NO: 1717646 - DNA, 15 bp, Homo sapiens
agaattccatgttat

SEQ ID NO: 1717647 - DNA, 15 bp, Homo sapiens
gaattccatgttatg

SEQ ID NO: 1717648 - DNA, 15 bp, Homo sapiens
aattccatgttatgc

SEQ ID NO: 1717649 - DNA, 15 bp, Homo sapiens
attccatgttatgca

SEQ ID NO: 1717650 - DNA, 15 bp, Homo sapiens
ttccatgttatgcac

SEQ ID NO: 1717651 - DNA, 15 bp, Homo sapiens
tccatgttatgcaca

SEQ ID NO: 1717652 - DNA, 15 bp, Homo sapiens
ccatgttatgcacac

SEQ ID NO: 1717653 - DNA, 15 bp, Homo sapiens
catgttatgcacaca

SEQ ID NO: 1717654 - DNA, 15 bp, Homo sapiens
atgttatgcacacag

SEQ ID NO: 1717655 - DNA, 15 bp, Homo sapiens
tgttatgcacacagc

SEQ ID NO: 1717656 - DNA, 15 bp, Homo sapiens
gttatgcacacagct

SEQ ID NO: 1717657 - DNA, 15 bp, Homo sapiens
ttatgcacacagctt

SEQ ID NO: 1717658 - DNA, 15 bp, Homo sapiens
tatgcacacagcttt

SEQ ID NO: 1717659 - DNA, 15 bp, Homo sapiens
atgcacacagctttg

SEQ ID NO: 1717660 - DNA, 15 bp, Homo sapiens
tgcacacagctttgg

SEQ ID NO: 1717661 - DNA, 15 bp, Homo sapiens
gcacacagctttgga

SEQ ID NO: 1717662 - DNA, 15 bp, Homo sapiens
cacacagctttggaa

SEQ ID NO: 1717663 - DNA, 15 bp, Homo sapiens
acacagctttggaag

SEQ ID NO: 1717664 - DNA, 15 bp, Homo sapiens
cacagctttggaagc

SEQ ID NO: 1717665 - DNA, 15 bp, Homo sapiens
acagctttggaagca

SEQ ID NO: 1717666 - DNA, 15 bp, Homo sapiens
cagctttggaagcat

SEQ ID NO: 1717667 - DNA, 15 bp, Homo sapiens
agctttggaagcata

SEQ ID NO: 1717668 - DNA, 15 bp, Homo sapiens
gctttggaagcatac

SEQ ID NO: 1717669 - DNA, 15 bp, Homo sapiens
ctttggaagcatact

SEQ ID NO: 1717670 - DNA, 15 bp, Homo sapiens
tttggaagcatactc

SEQ ID NO: 1717671 - DNA, 15 bp, Homo sapiens
ttggaagcatactct

SEQ ID NO: 1717672 - DNA, 15 bp, Homo sapiens
tggaagcatactcta

SEQ ID NO: 1717673 - DNA, 15 bp, Homo sapiens
ggaagcatactctaa

SEQ ID NO: 1717674 - DNA, 15 bp, Homo sapiens
gaagcatactctaat

SEQ ID NO: 1717675 - DNA, 15 bp, Homo sapiens
aagcatactctaatg

SEQ ID NO: 1717676 - DNA, 15 bp, Homo sapiens
agcatactctaatgt

SEQ ID NO: 1717677 - DNA, 15 bp, Homo sapiens
gcatactctaatgta

SEQ ID NO: 1717678 - DNA, 15 bp, Homo sapiens
catactctaatgtag

SEQ ID NO: 1717679 - DNA, 15 bp, Homo sapiens
atactctaatgtagg

SEQ ID NO: 1717680 - DNA, 15 bp, Homo sapiens
tactctaatgtaggg

SEQ ID NO: 1717681 - DNA, 15 bp, Homo sapiens
actctaatgtagggt

SEQ ID NO: 1717682 - DNA, 15 bp, Homo sapiens
ctctaatgtagggta

SEQ ID NO: 1717683 - DNA, 15 bp, Homo sapiens
tctaatgtagggtaa

SEQ ID NO: 1717684 - DNA, 15 bp, Homo sapiens
ctaatgtagggtaac

SEQ ID NO: 1717685 - DNA, 15 bp, Homo sapiens
taatgtagggtaacc

SEQ ID NO: 1717686 - DNA, 15 bp, Homo sapiens
aatgtagggtaacca

SEQ ID NO: 1717687 - DNA, 15 bp, Homo sapiens
atgtagggtaaccag

SEQ ID NO: 1717688 - DNA, 15 bp, Homo sapiens
tgtagggtaaccagg

SEQ ID NO: 1717689 - DNA, 15 bp, Homo sapiens
gtagggtaaccagga

SEQ ID NO: 1717690 - DNA, 15 bp, Homo sapiens
tagggtaaccaggaa

SEQ ID NO: 1717691 - DNA, 15 bp, Homo sapiens
agggtaaccaggaat

SEQ ID NO: 1717692 - DNA, 15 bp, Homo sapiens
gggtaaccaggaata

SEQ ID NO: 1717693 - DNA, 15 bp, Homo sapiens
ggtaaccaggaatat

SEQ ID NO: 1717694 - DNA, 15 bp, Homo sapiens
gtaaccaggaatatt

SEQ ID NO: 1717695 - DNA, 15 bp, Homo sapiens
taaccaggaatattg

SEQ ID NO: 1717696 - DNA, 15 bp, Homo sapiens
aaccaggaatattga

SEQ ID NO: 1717697 - DNA, 15 bp, Homo sapiens
accaggaatattgac

SEQ ID NO: 1717698 - DNA, 15 bp, Homo sapiens
ccaggaatattgacg

SEQ ID NO: 1717699 - DNA, 15 bp, Homo sapiens
caggaatattgacgt

SEQ ID NO: 1717700 - DNA, 15 bp, Homo sapiens
aggaatattgacgtt

SEQ ID NO: 1717701 - DNA, 15 bp, Homo sapiens
ggaatattgacgttg

SEQ ID NO: 1717702 - DNA, 15 bp, Homo sapiens
gaatattgacgttgt

SEQ ID NO: 1717703 - DNA, 15 bp, Homo sapiens
aatattgacgttgtg

SEQ ID NO: 1717704 - DNA, 15 bp, Homo sapiens
atattgacgttgtgg

SEQ ID NO: 1717705 - DNA, 15 bp, Homo sapiens
tattgacgttgtggc

SEQ ID NO: 1717706 - DNA, 15 bp, Homo sapiens
attgacgttgtggcc

SEQ ID NO: 1717707 - DNA, 15 bp, Homo sapiens
ttgacgttgtggcca

SEQ ID NO: 1717708 - DNA, 15 bp, Homo sapiens
tgacgttgtggccac

SEQ ID NO: 1717709 - DNA, 15 bp, Homo sapiens
gacgttgtggccact

SEQ ID NO: 1717710 - DNA, 15 bp, Homo sapiens
acgttgtggccactg

SEQ ID NO: 1717711 - DNA, 15 bp, Homo sapiens
cgttgtggccactgc

SEQ ID NO: 1717712 - DNA, 15 bp, Homo sapiens
gttgtggccactgct

SEQ ID NO: 1717713 - DNA, 15 bp, Homo sapiens
ttgtggccactgctt

SEQ ID NO: 1717714 - DNA, 15 bp, Homo sapiens
tgtggccactgcttg

SEQ ID NO: 1717715 - DNA, 15 bp, Homo sapiens
gtggccactgcttgg

SEQ ID NO: 1717716 - DNA, 15 bp, Homo sapiens
tggccactgcttgga

SEQ ID NO: 1717717 - DNA, 15 bp, Homo sapiens
ggccactgcttggaa

SEQ ID NO: 1717718 - DNA, 15 bp, Homo sapiens
gccactgcttggaaa

SEQ ID NO: 1717719 - DNA, 15 bp, Homo sapiens
ccactgcttggaaaa

SEQ ID NO: 1717720 - DNA, 15 bp, Homo sapiens
cactgcttggaaaaa

SEQ ID NO: 1717721 - DNA, 15 bp, Homo sapiens
actgcttggaaaaaa

SEQ ID NO: 1717722 - DNA, 15 bp, Homo sapiens
ctgcttggaaaaaag

SEQ ID NO: 1717723 - DNA, 15 bp, Homo sapiens
tgcttggaaaaaaga

SEQ ID NO: 1717724 - DNA, 15 bp, Homo sapiens
gcttggaaaaaagag

SEQ ID NO: 1717725 - DNA, 15 bp, Homo sapiens
cttggaaaaaagagg

SEQ ID NO: 1717726 - DNA, 15 bp, Homo sapiens
ttggaaaaaagagga

SEQ ID NO: 1717727 - DNA, 15 bp, Homo sapiens
tggaaaaaagaggac

SEQ ID NO: 1717728 - DNA, 15 bp, Homo sapiens
ggaaaaaagaggact

SEQ ID NO: 1717729 - DNA, 15 bp, Homo sapiens
gaaaaaagaggactg

SEQ ID NO: 1717730 - DNA, 15 bp, Homo sapiens
aaaaaagaggactgt

SEQ ID NO: 1717731 - DNA, 15 bp, Homo sapiens
aaaaagaggactgtt

SEQ ID NO: 1717732 - DNA, 15 bp, Homo sapiens
aaaagaggactgttt

SEQ ID NO: 1717733 - DNA, 15 bp, Homo sapiens
aaagaggactgtttc

SEQ ID NO: 1717734 - DNA, 15 bp, Homo sapiens
aagaggactgtttct

SEQ ID NO: 1717735 - DNA, 15 bp, Homo sapiens
agaggactgtttctt

SEQ ID NO: 1717736 - DNA, 15 bp, Homo sapiens
gaggactgtttcttt

SEQ ID NO: 1717737 - DNA, 15 bp, Homo sapiens
aggactgtttctttc

SEQ ID NO: 1717738 - DNA, 15 bp, Homo sapiens
ggactgtttctttca

SEQ ID NO: 1717739 - DNA, 15 bp, Homo sapiens
gactgtttctttcat

SEQ ID NO: 1717740 - DNA, 15 bp, Homo sapiens
actgtttctttcatt

SEQ ID NO: 1717741 - DNA, 15 bp, Homo sapiens
ctgtttctttcattt

SEQ ID NO: 1717742 - DNA, 15 bp, Homo sapiens
tgtttctttcatttt

SEQ ID NO: 1717743 - DNA, 15 bp, Homo sapiens
gtttctttcattttt

SEQ ID NO: 1717744 - DNA, 15 bp, Homo sapiens
tttctttcatttttt

SEQ ID NO: 1717745 - DNA, 15 bp, Homo sapiens
ttctttcatttttta

SEQ ID NO: 1717746 - DNA, 15 bp, Homo sapiens
tctttcattttttaa

SEQ ID NO: 1717747 - DNA, 15 bp, Homo sapiens
ctttcattttttaac

SEQ ID NO: 1717748 - DNA, 15 bp, Homo sapiens
tttcattttttaact

SEQ ID NO: 1717749 - DNA, 15 bp, Homo sapiens
ttcattttttaactc

SEQ ID NO: 1717750 - DNA, 15 bp, Homo sapiens
tcattttttaactca

SEQ ID NO: 1717751 - DNA, 15 bp, Homo sapiens
cattttttaactcat

SEQ ID NO: 1717752 - DNA, 15 bp, Homo sapiens
attttttaactcatt

SEQ ID NO: 1717753 - DNA, 15 bp, Homo sapiens
ttttttaactcattt

SEQ ID NO: 1717754 - DNA, 15 bp, Homo sapiens
tttttaactcatttt

SEQ ID NO: 1717755 - DNA, 15 bp, Homo sapiens
ttttaactcatttta

SEQ ID NO: 1717756 - DNA, 15 bp, Homo sapiens
tttaactcattttat

SEQ ID NO: 1717757 - DNA, 15 bp, Homo sapiens
ttaactcattttata

SEQ ID NO: 1717758 - DNA, 15 bp, Homo sapiens
taactcattttatat

SEQ ID NO: 1717759 - DNA, 15 bp, Homo sapiens
aactcattttatata

SEQ ID NO: 1717760 - DNA, 15 bp, Homo sapiens
actcattttatatat

SEQ ID NO: 1717761 - DNA, 15 bp, Homo sapiens
ctcattttatatatt

SEQ ID NO: 1717762 - DNA, 15 bp, Homo sapiens
tcattttatatattt

SEQ ID NO: 1717763 - DNA, 15 bp, Homo sapiens
cattttatatatttt

SEQ ID NO: 1717764 - DNA, 15 bp, Homo sapiens
attttatatatttta

SEQ ID NO: 1717765 - DNA, 15 bp, Homo sapiens
tttatatattttaag

SEQ ID NO: 1717766 - DNA, 15 bp, Homo sapiens
ttatatattttaagt

SEQ ID NO: 1717767 - DNA, 15 bp, Homo sapiens
tatatattttaagta

SEQ ID NO: 1717768 - DNA, 15 bp, Homo sapiens
atatattttaagtaa

SEQ ID NO: 1717769 - DNA, 15 bp, Homo sapiens
tatattttaagtaat

SEQ ID NO: 1717770 - DNA, 15 bp, Homo sapiens
atattttaagtaatg

SEQ ID NO: 1717771 - DNA, 15 bp, Homo sapiens
tattttaagtaatgg

SEQ ID NO: 1717772 - DNA, 15 bp, Homo sapiens
attttaagtaatgga

SEQ ID NO: 1717773 - DNA, 15 bp, Homo sapiens
ttttaagtaatggaa

SEQ ID NO: 1717774 - DNA, 15 bp, Homo sapiens
tttaagtaatggaac

SEQ ID NO: 1717775 - DNA, 15 bp, Homo sapiens
ttaagtaatggaact

SEQ ID NO: 1717776 - DNA, 15 bp, Homo sapiens
taagtaatggaacta

SEQ ID NO: 1717777 - DNA, 15 bp, Homo sapiens
aagtaatggaactat

SEQ ID NO: 1717778 - DNA, 15 bp, Homo sapiens
agtaatggaactata

SEQ ID NO: 1717779 - DNA, 15 bp, Homo sapiens
gtaatggaactataa

SEQ ID NO: 1717780 - DNA, 15 bp, Homo sapiens
taatggaactataaa

SEQ ID NO: 1717781 - DNA, 15 bp, Homo sapiens
aatggaactataaaa

SEQ ID NO: 1717782 - DNA, 15 bp, Homo sapiens
atggaactataaaaa

SEQ ID NO: 1717783 - DNA, 15 bp, Homo sapiens
tggaactataaaaaa

SEQ ID NO: 1717784 - DNA, 15 bp, Homo sapiens
gaactataaaaaatt

SEQ ID NO: 1717785 - DNA, 15 bp, Homo sapiens
aactataaaaaattc

SEQ ID NO: 1717786 - DNA, 15 bp, Homo sapiens
actataaaaaattct

SEQ ID NO: 1717787 - DNA, 15 bp, Homo sapiens
ctataaaaaattctc

SEQ ID NO: 1717788 - DNA, 15 bp, Homo sapiens
tataaaaaattctct

SEQ ID NO: 1717789 - DNA, 15 bp, Homo sapiens
ataaaaaattctctt

SEQ ID NO: 1717790 - DNA, 15 bp, Homo sapiens
taaaaaattctctta

SEQ ID NO: 1717791 - DNA, 15 bp, Homo sapiens
aaaaaattctcttat

SEQ ID NO: 1717792 - DNA, 15 bp, Homo sapiens
aaaaattctcttata

SEQ ID NO: 1717793 - DNA, 15 bp, Homo sapiens
aaaattctcttataa

SEQ ID NO: 1717794 - DNA, 15 bp, Homo sapiens
aaattctcttataag

SEQ ID NO: 1717795 - DNA, 15 bp, Homo sapiens
aattctcttataagt

SEQ ID NO: 1717796 - DNA, 15 bp, Homo sapiens
attctcttataagtc

SEQ ID NO: 1717797 - DNA, 15 bp, Homo sapiens
ttctcttataagtca

SEQ ID NO: 1717798 - DNA, 15 bp, Homo sapiens
tctcttataagtcaa

SEQ ID NO: 1717799 - DNA, 15 bp, Homo sapiens
ctcttataagtcaaa

SEQ ID NO: 1717800 - DNA, 15 bp, Homo sapiens
tcttataagtcaaaa

SEQ ID NO: 1717801 - DNA, 15 bp, Homo sapiens
cttataagtcaaaac

SEQ ID NO: 1717802 - DNA, 15 bp, Homo sapiens
ttataagtcaaaacc

SEQ ID NO: 1717803 - DNA, 15 bp, Homo sapiens
tataagtcaaaacca

SEQ ID NO: 1717804 - DNA, 15 bp, Homo sapiens
ataagtcaaaaccat

SEQ ID NO: 1717805 - DNA, 15 bp, Homo sapiens
taagtcaaaaccata

SEQ ID NO: 1717806 - DNA, 15 bp, Homo sapiens
aagtcaaaaccatac

SEQ ID NO: 1717807 - DNA, 15 bp, Homo sapiens
agtcaaaaccataca

SEQ ID NO: 1717808 - DNA, 15 bp, Homo sapiens
gtcaaaaccatacaa

SEQ ID NO: 1717809 - DNA, 15 bp, Homo sapiens
tcaaaaccatacaag

SEQ ID NO: 1717810 - DNA, 15 bp, Homo sapiens
caaaaccatacaaga

SEQ ID NO: 1717811 - DNA, 15 bp, Homo sapiens
aaaaccatacaagat

SEQ ID NO: 1717812 - DNA, 15 bp, Homo sapiens
aaaccatacaagata

SEQ ID NO: 1717813 - DNA, 15 bp, Homo sapiens
aaccatacaagatac

SEQ ID NO: 1717814 - DNA, 15 bp, Homo sapiens
accatacaagataca

SEQ ID NO: 1717815 - DNA, 15 bp, Homo sapiens
ccatacaagatacag

SEQ ID NO: 1717816 - DNA, 15 bp, Homo sapiens
catacaagatacagt

SEQ ID NO: 1717817 - DNA, 15 bp, Homo sapiens
atacaagatacagtc

SEQ ID NO: 1717818 - DNA, 15 bp, Homo sapiens
tacaagatacagtct

SEQ ID NO: 1717819 - DNA, 15 bp, Homo sapiens
acaagatacagtctg

SEQ ID NO: 1717820 - DNA, 15 bp, Homo sapiens
caagatacagtctgt

SEQ ID NO: 1717821 - DNA, 15 bp, Homo sapiens
aagatacagtctgtt

SEQ ID NO: 1717822 - DNA, 15 bp, Homo sapiens
agatacagtctgttc

SEQ ID NO: 1717823 - DNA, 15 bp, Homo sapiens
gatacagtctgttct

SEQ ID NO: 1717824 - DNA, 15 bp, Homo sapiens
atacagtctgttctt

SEQ ID NO: 1717825 - DNA, 15 bp, Homo sapiens
tacagtctgttcttg

SEQ ID NO: 1717826 - DNA, 15 bp, Homo sapiens
acagtctgttcttga

SEQ ID NO: 1717827 - DNA, 15 bp, Homo sapiens
cagtctgttcttgat

SEQ ID NO: 1717828 - DNA, 15 bp, Homo sapiens
agtctgttcttgatt

SEQ ID NO: 1717829 - DNA, 15 bp, Homo sapiens
gtctgttcttgatta

SEQ ID NO: 1717830 - DNA, 15 bp, Homo sapiens
tctgttcttgattat

SEQ ID NO: 1717831 - DNA, 15 bp, Homo sapiens
ctgttcttgattatc

SEQ ID NO: 1717832 - DNA, 15 bp, Homo sapiens
tgttcttgattatcc

SEQ ID NO: 1717833 - DNA, 15 bp, Homo sapiens
gttcttgattatcca

SEQ ID NO: 1717834 - DNA, 15 bp, Homo sapiens
ttcttgattatccat

SEQ ID NO: 1717835 - DNA, 15 bp, Homo sapiens
tcttgattatccata

SEQ ID NO: 1717836 - DNA, 15 bp, Homo sapiens
cttgattatccatac

SEQ ID NO: 1717837 - DNA, 15 bp, Homo sapiens
ttgattatccatacc

SEQ ID NO: 1717838 - DNA, 15 bp, Homo sapiens
tgattatccataccc

SEQ ID NO: 1717839 - DNA, 15 bp, Homo sapiens
gattatccataccca

SEQ ID NO: 1717840 - DNA, 15 bp, Homo sapiens
attatccatacccac

SEQ ID NO: 1717841 - DNA, 15 bp, Homo sapiens
ttatccatacccaca

SEQ ID NO: 1717842 - DNA, 15 bp, Homo sapiens
tatccatacccacaa

SEQ ID NO: 1717843 - DNA, 15 bp, Homo sapiens
atccatacccacaaa

SEQ ID NO: 1717844 - DNA, 15 bp, Homo sapiens
tccatacccacaaag

SEQ ID NO: 1717845 - DNA, 15 bp, Homo sapiens
ccatacccacaaagg

SEQ ID NO: 1717846 - DNA, 15 bp, Homo sapiens
catacccacaaaggg

SEQ ID NO: 1717847 - DNA, 15 bp, Homo sapiens
atacccacaaagggt

SEQ ID NO: 1717848 - DNA, 15 bp, Homo sapiens
tacccacaaagggtt

SEQ ID NO: 1717849 - DNA, 15 bp, Homo sapiens
acccacaaagggttt

SEQ ID NO: 1717850 - DNA, 15 bp, Homo sapiens
cccacaaagggtttc

SEQ ID NO: 1717851 - DNA, 15 bp, Homo sapiens
ccacaaagggtttca

SEQ ID NO: 1717852 - DNA, 15 bp, Homo sapiens
cacaaagggtttcat

SEQ ID NO: 1717853 - DNA, 15 bp, Homo sapiens
acaaagggtttcatt

SEQ ID NO: 1717854 - DNA, 15 bp, Homo sapiens
caaagggtttcatta

SEQ ID NO: 1717855 - DNA, 15 bp, Homo sapiens
aaagggtttcattaa

SEQ ID NO: 1717856 - DNA, 15 bp, Homo sapiens
aagggtttcattaac

SEQ ID NO: 1717857 - DNA, 15 bp, Homo sapiens
agggtttcattaaca

SEQ ID NO: 1717858 - DNA, 15 bp, Homo sapiens
gggtttcattaacat

SEQ ID NO: 1717859 - DNA, 15 bp, Homo sapiens
ggtttcattaacata

SEQ ID NO: 1717860 - DNA, 15 bp, Homo sapiens
gtttcattaacatag

SEQ ID NO: 1717861 - DNA, 15 bp, Homo sapiens
tttcattaacataga

SEQ ID NO: 1717862 - DNA, 15 bp, Homo sapiens
ttcattaacatagac

SEQ ID NO: 1717863 - DNA, 15 bp, Homo sapiens
tcattaacatagaca

SEQ ID NO: 1717864 - DNA, 15 bp, Homo sapiens
cattaacatagacag

SEQ ID NO: 1717865 - DNA, 15 bp, Homo sapiens
attaacatagacagt

SEQ ID NO: 1717866 - DNA, 15 bp, Homo sapiens
ttaacatagacagtt

SEQ ID NO: 1717867 - DNA, 15 bp, Homo sapiens
taacatagacagttg

SEQ ID NO: 1717868 - DNA, 15 bp, Homo sapiens
aacatagacagttga

SEQ ID NO: 1717869 - DNA, 15 bp, Homo sapiens
acatagacagttgaa

SEQ ID NO: 1717870 - DNA, 15 bp, Homo sapiens
catagacagttgaac

SEQ ID NO: 1717871 - DNA, 15 bp, Homo sapiens
atagacagttgaact

SEQ ID NO: 1717872 - DNA, 15 bp, Homo sapiens
tagacagttgaactc

SEQ ID NO: 1717873 - DNA, 15 bp, Homo sapiens
agacagttgaactct

SEQ ID NO: 1717874 - DNA, 15 bp, Homo sapiens
gacagttgaactcta

SEQ ID NO: 1717875 - DNA, 15 bp, Homo sapiens
acagttgaactctat

SEQ ID NO: 1717876 - DNA, 15 bp, Homo sapiens
cagttgaactctata

SEQ ID NO: 1717877 - DNA, 15 bp, Homo sapiens
agttgaactctataa

SEQ ID NO: 1717878 - DNA, 15 bp, Homo sapiens
gttgaactctataaa

SEQ ID NO: 1717879 - DNA, 15 bp, Homo sapiens
ttgaactctataaat

SEQ ID NO: 1717880 - DNA, 15 bp, Homo sapiens
tgaactctataaatt

SEQ ID NO: 1717881 - DNA, 15 bp, Homo sapiens
gaactctataaatta

SEQ ID NO: 1717882 - DNA, 15 bp, Homo sapiens
aactctataaattaa

SEQ ID NO: 1717883 - DNA, 15 bp, Homo sapiens
actctataaattaac

SEQ ID NO: 1717884 - DNA, 15 bp, Homo sapiens
ctctataaattaacc

SEQ ID NO: 1717885 - DNA, 15 bp, Homo sapiens
tctataaattaacca

SEQ ID NO: 1717886 - DNA, 15 bp, Homo sapiens
ctataaattaaccag

SEQ ID NO: 1717887 - DNA, 15 bp, Homo sapiens
tataaattaaccagc

SEQ ID NO: 1717888 - DNA, 15 bp, Homo sapiens
ataaattaaccagca

SEQ ID NO: 1717889 - DNA, 15 bp, Homo sapiens
taaattaaccagcaa

SEQ ID NO: 1717890 - DNA, 15 bp, Homo sapiens
aattaaccagcaagg

SEQ ID NO: 1717891 - DNA, 15 bp, Homo sapiens
attaaccagcaaggg

SEQ ID NO: 1717892 - DNA, 15 bp, Homo sapiens
ttaaccagcaagggt

SEQ ID NO: 1717893 - DNA, 15 bp, Homo sapiens
taaccagcaagggta

SEQ ID NO: 1717894 - DNA, 15 bp, Homo sapiens
aaccagcaagggtag

SEQ ID NO: 1717895 - DNA, 15 bp, Homo sapiens
accagcaagggtaga

SEQ ID NO: 1717896 - DNA, 15 bp, Homo sapiens
ccagcaagggtagaa

SEQ ID NO: 1717897 - DNA, 15 bp, Homo sapiens
cagcaagggtagaac

SEQ ID NO: 1717898 - DNA, 15 bp, Homo sapiens
agcaagggtagaacc

SEQ ID NO: 1717899 - DNA, 15 bp, Homo sapiens
gcaagggtagaaccg

SEQ ID NO: 1717900 - DNA, 15 bp, Homo sapiens
caagggtagaaccgc

SEQ ID NO: 1717901 - DNA, 15 bp, Homo sapiens
aagggtagaaccgct

SEQ ID NO: 1717902 - DNA, 15 bp, Homo sapiens
agggtagaaccgctg

SEQ ID NO: 1717903 - DNA, 15 bp, Homo sapiens
gggtagaaccgctgc

SEQ ID NO: 1717904 - DNA, 15 bp, Homo sapiens
ggtagaaccgctgcc

SEQ ID NO: 1717905 - DNA, 15 bp, Homo sapiens
gtagaaccgctgccg

SEQ ID NO: 1717906 - DNA, 15 bp, Homo sapiens
tagaaccgctgccgt

SEQ ID NO: 1717907 - DNA, 15 bp, Homo sapiens
agaaccgctgccgtg

SEQ ID NO: 1717908 - DNA, 15 bp, Homo sapiens
gaaccgctgccgtgc

SEQ ID NO: 1717909 - DNA, 15 bp, Homo sapiens
aaccgctgccgtgca

SEQ ID NO: 1717910 - DNA, 15 bp, Homo sapiens
accgctgccgtgcag

SEQ ID NO: 1717911 - DNA, 15 bp, Homo sapiens
ccgctgccgtgcagt

SEQ ID NO: 1717912 - DNA, 15 bp, Homo sapiens
cgctgccgtgcagtc

SEQ ID NO: 1717913 - DNA, 15 bp, Homo sapiens
gctgccgtgcagtct

SEQ ID NO: 1717914 - DNA, 15 bp, Homo sapiens
ctgccgtgcagtctg

SEQ ID NO: 1717915 - DNA, 15 bp, Homo sapiens
tgccgtgcagtctga

SEQ ID NO: 1717916 - DNA, 15 bp, Homo sapiens
gccgtgcagtctgat

SEQ ID NO: 1717917 - DNA, 15 bp, Homo sapiens
ccgtgcagtctgata

SEQ ID NO: 1717918 - DNA, 15 bp, Homo sapiens
cgtgcagtctgatac

SEQ ID NO: 1717919 - DNA, 15 bp, Homo sapiens
gtgcagtctgatact

SEQ ID NO: 1717920 - DNA, 15 bp, Homo sapiens
tgcagtctgatactg

SEQ ID NO: 1717921 - DNA, 15 bp, Homo sapiens
gcagtctgatactga

SEQ ID NO: 1717922 - DNA, 15 bp, Homo sapiens
cagtctgatactgag

SEQ ID NO: 1717923 - DNA, 15 bp, Homo sapiens
agtctgatactgagc

SEQ ID NO: 1717924 - DNA, 15 bp, Homo sapiens
gtctgatactgagca

SEQ ID NO: 1717925 - DNA, 15 bp, Homo sapiens
tctgatactgagcat

SEQ ID NO: 1717926 - DNA, 15 bp, Homo sapiens
ctgatactgagcatc

SEQ ID NO: 1717927 - DNA, 15 bp, Homo sapiens
tgatactgagcatct

SEQ ID NO: 1717928 - DNA, 15 bp, Homo sapiens
gatactgagcatctt

SEQ ID NO: 1717929 - DNA, 15 bp, Homo sapiens
atactgagcatcttg

SEQ ID NO: 1717930 - DNA, 15 bp, Homo sapiens
tactgagcatcttgc

SEQ ID NO: 1717931 - DNA, 15 bp, Homo sapiens
actgagcatcttgcc

SEQ ID NO: 1717932 - DNA, 15 bp, Homo sapiens
ctgagcatcttgcct

SEQ ID NO: 1717933 - DNA, 15 bp, Homo sapiens
tgagcatcttgcctg

SEQ ID NO: 1717934 - DNA, 15 bp, Homo sapiens
gagcatcttgcctgg

SEQ ID NO: 1717935 - DNA, 15 bp, Homo sapiens
agcatcttgcctgga

SEQ ID NO: 1717936 - DNA, 15 bp, Homo sapiens
gcatcttgcctggag

SEQ ID NO: 1717937 - DNA, 15 bp, Homo sapiens
catcttgcctggaga

SEQ ID NO: 1717938 - DNA, 15 bp, Homo sapiens
atcttgcctggagat

SEQ ID NO: 1717939 - DNA, 15 bp, Homo sapiens
tcttgcctggagatg

SEQ ID NO: 1717940 - DNA, 15 bp, Homo sapiens
cttgcctggagatgg

SEQ ID NO: 1717941 - DNA, 15 bp, Homo sapiens
ttgcctggagatgga

SEQ ID NO: 1717942 - DNA, 15 bp, Homo sapiens
tgcctggagatggaa

SEQ ID NO: 1717943 - DNA, 15 bp, Homo sapiens
gcctggagatggaat

SEQ ID NO: 1717944 - DNA, 15 bp, Homo sapiens
cctggagatggaatc

SEQ ID NO: 1717945 - DNA, 15 bp, Homo sapiens
ctggagatggaatca

SEQ ID NO: 1717946 - DNA, 15 bp, Homo sapiens
tggagatggaatcaa

SEQ ID NO: 1717947 - DNA, 15 bp, Homo sapiens
ggagatggaatcaag

SEQ ID NO: 1717948 - DNA, 15 bp, Homo sapiens
gagatggaatcaagg

SEQ ID NO: 1717949 - DNA, 15 bp, Homo sapiens
agatggaatcaaggc

SEQ ID NO: 1717950 - DNA, 15 bp, Homo sapiens
gatggaatcaaggct

SEQ ID NO: 1717951 - DNA, 15 bp, Homo sapiens
atggaatcaaggctc

SEQ ID NO: 1717952 - DNA, 15 bp, Homo sapiens
tggaatcaaggctca

SEQ ID NO: 1717953 - DNA, 15 bp, Homo sapiens
ggaatcaaggctcag

SEQ ID NO: 1717954 - DNA, 15 bp, Homo sapiens
gaatcaaggctcagt

SEQ ID NO: 1717955 - DNA, 15 bp, Homo sapiens
aatcaaggctcagtc

SEQ ID NO: 1717956 - DNA, 15 bp, Homo sapiens
atcaaggctcagtcc

SEQ ID NO: 1717957 - DNA, 15 bp, Homo sapiens
tcaaggctcagtcca

SEQ ID NO: 1717958 - DNA, 15 bp, Homo sapiens
caaggctcagtccaa

SEQ ID NO: 1717959 - DNA, 15 bp, Homo sapiens
aaggctcagtccaac

SEQ ID NO: 1717960 - DNA, 15 bp, Homo sapiens
aggctcagtccaact

SEQ ID NO: 1717961 - DNA, 15 bp, Homo sapiens
ggctcagtccaactg

SEQ ID NO: 1717962 - DNA, 15 bp, Homo sapiens
gctcagtccaactgc

SEQ ID NO: 1717963 - DNA, 15 bp, Homo sapiens
ctcagtccaactgca

SEQ ID NO: 1717964 - DNA, 15 bp, Homo sapiens
tcagtccaactgcac

SEQ ID NO: 1717965 - DNA, 15 bp, Homo sapiens
cagtccaactgcacc

SEQ ID NO: 1717966 - DNA, 15 bp, Homo sapiens
agtccaactgcacct

SEQ ID NO: 1717967 - DNA, 15 bp, Homo sapiens
gtccaactgcacctc

SEQ ID NO: 1717968 - DNA, 15 bp, Homo sapiens
tccaactgcacctcc

SEQ ID NO: 1717969 - DNA, 15 bp, Homo sapiens
ccaactgcacctcca

SEQ ID NO: 1717970 - DNA, 15 bp, Homo sapiens
caactgcacctccag

SEQ ID NO: 1717971 - DNA, 15 bp, Homo sapiens
aactgcacctccagt

SEQ ID NO: 1717972 - DNA, 15 bp, Homo sapiens
actgcacctccagtg

SEQ ID NO: 1717973 - DNA, 15 bp, Homo sapiens
ctgcacctccagtga

SEQ ID NO: 1717974 - DNA, 15 bp, Homo sapiens
tgcacctccagtgac

SEQ ID NO: 1717975 - DNA, 15 bp, Homo sapiens
gcacctccagtgaca

SEQ ID NO: 1717976 - DNA, 15 bp, Homo sapiens
cacctccagtgacag

SEQ ID NO: 1717977 - DNA, 15 bp, Homo sapiens
acctccagtgacaga

SEQ ID NO: 1717978 - DNA, 15 bp, Homo sapiens
cctccagtgacagat

SEQ ID NO: 1717979 - DNA, 15 bp, Homo sapiens
ctccagtgacagatt

SEQ ID NO: 1717980 - DNA, 15 bp, Homo sapiens
tccagtgacagattc

SEQ ID NO: 1717981 - DNA, 15 bp, Homo sapiens
ccagtgacagattcc

SEQ ID NO: 1717982 - DNA, 15 bp, Homo sapiens
cagtgacagattcca

SEQ ID NO: 1717983 - DNA, 15 bp, Homo sapiens
agtgacagattccat

SEQ ID NO: 1717984 - DNA, 15 bp, Homo sapiens
gtgacagattccatt

SEQ ID NO: 1717985 - DNA, 15 bp, Homo sapiens
tgacagattccattc

SEQ ID NO: 1717986 - DNA, 15 bp, Homo sapiens
gacagattccattcc

SEQ ID NO: 1717987 - DNA, 15 bp, Homo sapiens
acagattccattcct

SEQ ID NO: 1717988 - DNA, 15 bp, Homo sapiens
cagattccattcctg

SEQ ID NO: 1717989 - DNA, 15 bp, Homo sapiens
agattccattcctga

SEQ ID NO: 1717990 - DNA, 15 bp, Homo sapiens
gattccattcctgat

SEQ ID NO: 1717991 - DNA, 15 bp, Homo sapiens
attccattcctgatt

SEQ ID NO: 1717992 - DNA, 15 bp, Homo sapiens
ttccattcctgattt

SEQ ID NO: 1717993 - DNA, 15 bp, Homo sapiens
tccattcctgatttg

SEQ ID NO: 1717994 - DNA, 15 bp, Homo sapiens
ccattcctgatttga

SEQ ID NO: 1717995 - DNA, 15 bp, Homo sapiens
cattcctgatttgag

SEQ ID NO: 1717996 - DNA, 15 bp, Homo sapiens
attcctgatttgaga

SEQ ID NO: 1717997 - DNA, 15 bp, Homo sapiens
ttcctgatttgagag

SEQ ID NO: 1717998 - DNA, 15 bp, Homo sapiens
tcctgatttgagagt

SEQ ID NO: 1717999 - DNA, 15 bp, Homo sapiens
cctgatttgagagtt

SEQ ID NO: 1718000 - DNA, 15 bp, Homo sapiens
ctgatttgagagttt

SEQ ID NO: 1718001 - DNA, 15 bp, Homo sapiens
tgatttgagagttta

SEQ ID NO: 1718002 - DNA, 15 bp, Homo sapiens
gatttgagagtttag

SEQ ID NO: 1718003 - DNA, 15 bp, Homo sapiens
atttgagagtttaga

SEQ ID NO: 1718004 - DNA, 15 bp, Homo sapiens
tttgagagtttagat

SEQ ID NO: 1718005 - DNA, 15 bp, Homo sapiens
ttgagagtttagatc

SEQ ID NO: 1718006 - DNA, 15 bp, Homo sapiens
tgagagtttagatct

SEQ ID NO: 1718007 - DNA, 15 bp, Homo sapiens
gagagtttagatctt

SEQ ID NO: 1718008 - DNA, 15 bp, Homo sapiens
agagtttagatctta

SEQ ID NO: 1718009 - DNA, 15 bp, Homo sapiens
gagtttagatcttat

SEQ ID NO: 1718010 - DNA, 15 bp, Homo sapiens
agtttagatcttatt

SEQ ID NO: 1718011 - DNA, 15 bp, Homo sapiens
gtttagatcttattt

SEQ ID NO: 1718012 - DNA, 15 bp, Homo sapiens
tttagatcttatttc

SEQ ID NO: 1718013 - DNA, 15 bp, Homo sapiens
ttagatcttatttct

SEQ ID NO: 1718014 - DNA, 15 bp, Homo sapiens
tagatcttatttctg

SEQ ID NO: 1718015 - DNA, 15 bp, Homo sapiens
agatcttatttctgt

SEQ ID NO: 1718016 - DNA, 15 bp, Homo sapiens
gatcttatttctgtt

SEQ ID NO: 1718017 - DNA, 15 bp, Homo sapiens
atcttatttctgttg

SEQ ID NO: 1718018 - DNA, 15 bp, Homo sapiens
tcttatttctgttgc

SEQ ID NO: 1718019 - DNA, 15 bp, Homo sapiens
cttatttctgttgcc

SEQ ID NO: 1718020 - DNA, 15 bp, Homo sapiens
ttatttctgttgcct

SEQ ID NO: 1718021 - DNA, 15 bp, Homo sapiens
tatttctgttgcctt

SEQ ID NO: 1718022 - DNA, 15 bp, Homo sapiens
atttctgttgcctta

SEQ ID NO: 1718023 - DNA, 15 bp, Homo sapiens
tttctgttgccttat

SEQ ID NO: 1718024 - DNA, 15 bp, Homo sapiens
ttctgttgccttatc

SEQ ID NO: 1718025 - DNA, 15 bp, Homo sapiens
tctgttgccttatct

SEQ ID NO: 1718026 - DNA, 15 bp, Homo sapiens
ctgttgccttatctc

SEQ ID NO: 1718027 - DNA, 15 bp, Homo sapiens
tgttgccttatctct

SEQ ID NO: 1718028 - DNA, 15 bp, Homo sapiens
gttgccttatctctg

SEQ ID NO: 1718029 - DNA, 15 bp, Homo sapiens
ttgccttatctctgg

SEQ ID NO: 1718030 - DNA, 15 bp, Homo sapiens
tgccttatctctggc

SEQ ID NO: 1718031 - DNA, 15 bp, Homo sapiens
gccttatctctggcc

SEQ ID NO: 1718032 - DNA, 15 bp, Homo sapiens
ccttatctctggcct

SEQ ID NO: 1718033 - DNA, 15 bp, Homo sapiens
cttatctctggccta

SEQ ID NO: 1718034 - DNA, 15 bp, Homo sapiens
ttatctctggcctaa

SEQ ID NO: 1718035 - DNA, 15 bp, Homo sapiens
tatctctggcctaag

SEQ ID NO: 1718036 - DNA, 15 bp, Homo sapiens
atctctggcctaagt

SEQ ID NO: 1718037 - DNA, 15 bp, Homo sapiens
tctctggcctaagta

SEQ ID NO: 1718038 - DNA, 15 bp, Homo sapiens
ctctggcctaagtaa

SEQ ID NO: 1718039 - DNA, 15 bp, Homo sapiens
tctggcctaagtaat

SEQ ID NO: 1718040 - DNA, 15 bp, Homo sapiens
ctggcctaagtaatg

SEQ ID NO: 1718041 - DNA, 15 bp, Homo sapiens
tggcctaagtaatgt

SEQ ID NO: 1718042 - DNA, 15 bp, Homo sapiens
ggcctaagtaatgta

SEQ ID NO: 1718043 - DNA, 15 bp, Homo sapiens
gcctaagtaatgtag

SEQ ID NO: 1718044 - DNA, 15 bp, Homo sapiens
cctaagtaatgtagc

SEQ ID NO: 1718045 - DNA, 15 bp, Homo sapiens
ctaagtaatgtagct

SEQ ID NO: 1718046 - DNA, 15 bp, Homo sapiens
taagtaatgtagctg

SEQ ID NO: 1718047 - DNA, 15 bp, Homo sapiens
aagtaatgtagctgg

SEQ ID NO: 1718048 - DNA, 15 bp, Homo sapiens
agtaatgtagctgga

SEQ ID NO: 1718049 - DNA, 15 bp, Homo sapiens
gtaatgtagctggaa

SEQ ID NO: 1718050 - DNA, 15 bp, Homo sapiens
taatgtagctggaag

SEQ ID NO: 1718051 - DNA, 15 bp, Homo sapiens
aatgtagctggaagg

SEQ ID NO: 1718052 - DNA, 15 bp, Homo sapiens
atgtagctggaaggg

SEQ ID NO: 1718053 - DNA, 15 bp, Homo sapiens
tgtagctggaaggga

SEQ ID NO: 1718054 - DNA, 15 bp, Homo sapiens
gtagctggaagggaa

SEQ ID NO: 1718055 - DNA, 15 bp, Homo sapiens
tagctggaagggaaa

SEQ ID NO: 1718056 - DNA, 15 bp, Homo sapiens
agctggaagggaaac

SEQ ID NO: 1718057 - DNA, 15 bp, Homo sapiens
gctggaagggaaact

SEQ ID NO: 1718058 - DNA, 15 bp, Homo sapiens
ctggaagggaaactg

SEQ ID NO: 1718059 - DNA, 15 bp, Homo sapiens
tggaagggaaactgt

SEQ ID NO: 1718060 - DNA, 15 bp, Homo sapiens
ggaagggaaactgtc

SEQ ID NO: 1718061 - DNA, 15 bp, Homo sapiens
gaagggaaactgtca

SEQ ID NO: 1718062 - DNA, 15 bp, Homo sapiens
aagggaaactgtcac

SEQ ID NO: 1718063 - DNA, 15 bp, Homo sapiens
agggaaactgtcact

SEQ ID NO: 1718064 - DNA, 15 bp, Homo sapiens
gggaaactgtcacta

SEQ ID NO: 1718065 - DNA, 15 bp, Homo sapiens
ggaaactgtcactag

SEQ ID NO: 1718066 - DNA, 15 bp, Homo sapiens
gaaactgtcactagg

SEQ ID NO: 1718067 - DNA, 15 bp, Homo sapiens
aaactgtcactagga

SEQ ID NO: 1718068 - DNA, 15 bp, Homo sapiens
aactgtcactaggaa

SEQ ID NO: 1718069 - DNA, 15 bp, Homo sapiens
actgtcactaggaac

SEQ ID NO: 1718070 - DNA, 15 bp, Homo sapiens
ctgtcactaggaaca

SEQ ID NO: 1718071 - DNA, 15 bp, Homo sapiens
tgtcactaggaacag

SEQ ID NO: 1718072 - DNA, 15 bp, Homo sapiens
gtcactaggaacagc

SEQ ID NO: 1718073 - DNA, 15 bp, Homo sapiens
tcactaggaacagca

SEQ ID NO: 1718074 - DNA, 15 bp, Homo sapiens
cactaggaacagcat

SEQ ID NO: 1718075 - DNA, 15 bp, Homo sapiens
actaggaacagcata

SEQ ID NO: 1718076 - DNA, 15 bp, Homo sapiens
ctaggaacagcatac

SEQ ID NO: 1718077 - DNA, 15 bp, Homo sapiens
taggaacagcatacc

SEQ ID NO: 1718078 - DNA, 15 bp, Homo sapiens
aggaacagcatacca

SEQ ID NO: 1718079 - DNA, 15 bp, Homo sapiens
ggaacagcataccac

SEQ ID NO: 1718080 - DNA, 15 bp, Homo sapiens
gaacagcataccaca

SEQ ID NO: 1718081 - DNA, 15 bp, Homo sapiens
aacagcataccacat

SEQ ID NO: 1718082 - DNA, 15 bp, Homo sapiens
acagcataccacatt

SEQ ID NO: 1718083 - DNA, 15 bp, Homo sapiens
cagcataccacattc

SEQ ID NO: 1718084 - DNA, 15 bp, Homo sapiens
agcataccacattca

SEQ ID NO: 1718085 - DNA, 15 bp, Homo sapiens
gcataccacattcat

SEQ ID NO: 1718086 - DNA, 15 bp, Homo sapiens
cataccacattcatt

SEQ ID NO: 1718087 - DNA, 15 bp, Homo sapiens
ataccacattcattg

SEQ ID NO: 1718088 - DNA, 15 bp, Homo sapiens
taccacattcattgt

SEQ ID NO: 1718089 - DNA, 15 bp, Homo sapiens
accacattcattgtt

SEQ ID NO: 1718090 - DNA, 15 bp, Homo sapiens
ccacattcattgttg

SEQ ID NO: 1718091 - DNA, 15 bp, Homo sapiens
cacattcattgttga

SEQ ID NO: 1718092 - DNA, 15 bp, Homo sapiens
acattcattgttgaa

SEQ ID NO: 1718093 - DNA, 15 bp, Homo sapiens
cattcattgttgaaa

SEQ ID NO: 1718094 - DNA, 15 bp, Homo sapiens
attcattgttgaaat

SEQ ID NO: 1718095 - DNA, 15 bp, Homo sapiens
ttcattgttgaaata

SEQ ID NO: 1718096 - DNA, 15 bp, Homo sapiens
tcattgttgaaataa

SEQ ID NO: 1718097 - DNA, 15 bp, Homo sapiens
cattgttgaaataat

SEQ ID NO: 1718098 - DNA, 15 bp, Homo sapiens
attgttgaaataatc

SEQ ID NO: 1718099 - DNA, 15 bp, Homo sapiens
ttgttgaaataatca

SEQ ID NO: 1718100 - DNA, 15 bp, Homo sapiens
tgttgaaataatcaa

SEQ ID NO: 1718101 - DNA, 15 bp, Homo sapiens
gttgaaataatcaaa

SEQ ID NO: 1718102 - DNA, 15 bp, Homo sapiens
ttgaaataatcaaag

SEQ ID NO: 1718103 - DNA, 15 bp, Homo sapiens
tgaaataatcaaagg

SEQ ID NO: 1718104 - DNA, 15 bp, Homo sapiens
gaaataatcaaaggt

SEQ ID NO: 1718105 - DNA, 15 bp, Homo sapiens
aaataatcaaaggtt

SEQ ID NO: 1718106 - DNA, 15 bp, Homo sapiens
aataatcaaaggtta

SEQ ID NO: 1718107 - DNA, 15 bp, Homo sapiens
ataatcaaaggttaa

SEQ ID NO: 1718108 - DNA, 15 bp, Homo sapiens
taatcaaaggttaat

SEQ ID NO: 1718109 - DNA, 15 bp, Homo sapiens
aatcaaaggttaatc

SEQ ID NO: 1718110 - DNA, 15 bp, Homo sapiens
atcaaaggttaatca

SEQ ID NO: 1718111 - DNA, 15 bp, Homo sapiens
tcaaaggttaatcat

SEQ ID NO: 1718112 - DNA, 15 bp, Homo sapiens
caaaggttaatcatg

SEQ ID NO: 1718113 - DNA, 15 bp, Homo sapiens
aaaggttaatcatgt

SEQ ID NO: 1718114 - DNA, 15 bp, Homo sapiens
aaggttaatcatgtt

SEQ ID NO: 1718115 - DNA, 15 bp, Homo sapiens
aggttaatcatgttt

SEQ ID NO: 1718116 - DNA, 15 bp, Homo sapiens
ggttaatcatgtttc

SEQ ID NO: 1718117 - DNA, 15 bp, Homo sapiens
gttaatcatgtttcg

SEQ ID NO: 1718118 - DNA, 15 bp, Homo sapiens
ttaatcatgtttcga

SEQ ID NO: 1718119 - DNA, 15 bp, Homo sapiens
taatcatgtttcgag

SEQ ID NO: 1718120 - DNA, 15 bp, Homo sapiens
aatcatgtttcgagc

SEQ ID NO: 1718121 - DNA, 15 bp, Homo sapiens
atcatgtttcgagct

SEQ ID NO: 1718122 - DNA, 15 bp, Homo sapiens
tcatgtttcgagctg

SEQ ID NO: 1718123 - DNA, 15 bp, Homo sapiens
catgtttcgagctgg

SEQ ID NO: 1718124 - DNA, 15 bp, Homo sapiens
atgtttcgagctggg

SEQ ID NO: 1718125 - DNA, 15 bp, Homo sapiens
tgtttcgagctgggt

SEQ ID NO: 1718126 - DNA, 15 bp, Homo sapiens
gtttcgagctgggtg

SEQ ID NO: 1718127 - DNA, 15 bp, Homo sapiens
tttcgagctgggtgt

SEQ ID NO: 1718128 - DNA, 15 bp, Homo sapiens
ttcgagctgggtgtg

SEQ ID NO: 1718129 - DNA, 15 bp, Homo sapiens
tcgagctgggtgtga

SEQ ID NO: 1718130 - DNA, 15 bp, Homo sapiens
cgagctgggtgtgat

SEQ ID NO: 1718131 - DNA, 15 bp, Homo sapiens
gagctgggtgtgatg

SEQ ID NO: 1718132 - DNA, 15 bp, Homo sapiens
gggtgtgatggcgcg

SEQ ID NO: 1718133 - DNA, 15 bp, Homo sapiens
ggtgtgatggcgcgt

SEQ ID NO: 1718134 - DNA, 15 bp, Homo sapiens
gtgtgatggcgcgta

SEQ ID NO: 1718135 - DNA, 15 bp, Homo sapiens
tgtgatggcgcgtac

SEQ ID NO: 1718136 - DNA, 15 bp, Homo sapiens
gtgatggcgcgtacc

SEQ ID NO: 1718137 - DNA, 15 bp, Homo sapiens
tgatggcgcgtacct

SEQ ID NO: 1718138 - DNA, 15 bp, Homo sapiens
gatggcgcgtacctg

SEQ ID NO: 1718139 - DNA, 15 bp, Homo sapiens
atggcgcgtacctgt

SEQ ID NO: 1718140 - DNA, 15 bp, Homo sapiens
tggcgcgtacctgta

SEQ ID NO: 1718141 - DNA, 15 bp, Homo sapiens
ggcgcgtacctgtag

SEQ ID NO: 1718142 - DNA, 15 bp, Homo sapiens
gcgcgtacctgtagt

SEQ ID NO: 1718143 - DNA, 15 bp, Homo sapiens
cgcgtacctgtagtc

SEQ ID NO: 1718144 - DNA, 15 bp, Homo sapiens
gcgtacctgtagtcc

SEQ ID NO: 1718145 - DNA, 15 bp, Homo sapiens
cgtacctgtagtcca

SEQ ID NO: 1718146 - DNA, 15 bp, Homo sapiens
gtacctgtagtccat

SEQ ID NO: 1718147 - DNA, 15 bp, Homo sapiens
tacctgtagtccatg

SEQ ID NO: 1718148 - DNA, 15 bp, Homo sapiens
acctgtagtccatgc

SEQ ID NO: 1718149 - DNA, 15 bp, Homo sapiens
cctgtagtccatgct

SEQ ID NO: 1718150 - DNA, 15 bp, Homo sapiens
ctgtagtccatgcta

SEQ ID NO: 1718151 - DNA, 15 bp, Homo sapiens
tgtagtccatgctac

SEQ ID NO: 1718152 - DNA, 15 bp, Homo sapiens
gtagtccatgctact

SEQ ID NO: 1718153 - DNA, 15 bp, Homo sapiens
tagtccatgctactc

SEQ ID NO: 1718154 - DNA, 15 bp, Homo sapiens
agtccatgctactca

SEQ ID NO: 1718155 - DNA, 15 bp, Homo sapiens
gtccatgctactcag

SEQ ID NO: 1718156 - DNA, 15 bp, Homo sapiens
tccatgctactcagg

SEQ ID NO: 1718157 - DNA, 15 bp, Homo sapiens
ccatgctactcagga

SEQ ID NO: 1718158 - DNA, 15 bp, Homo sapiens
catgctactcaggag

SEQ ID NO: 1718159 - DNA, 15 bp, Homo sapiens
atgctactcaggagg

SEQ ID NO: 1718160 - DNA, 15 bp, Homo sapiens
tgctactcaggaggc

SEQ ID NO: 1718161 - DNA, 15 bp, Homo sapiens
gaggcaggaggatca

SEQ ID NO: 1718162 - DNA, 15 bp, Homo sapiens
ggcaggaggatcaca

SEQ ID NO: 1718163 - DNA, 15 bp, Homo sapiens
gcaggaggatcacat

SEQ ID NO: 1718164 - DNA, 15 bp, Homo sapiens
caggaggatcacatg

SEQ ID NO: 1718165 - DNA, 15 bp, Homo sapiens
aggaggatcacatga

SEQ ID NO: 1718166 - DNA, 15 bp, Homo sapiens
ggaggatcacatgag

SEQ ID NO: 1718167 - DNA, 15 bp, Homo sapiens
gaggatcacatgagc

SEQ ID NO: 1718168 - DNA, 15 bp, Homo sapiens
aggatcacatgagct

SEQ ID NO: 1718169 - DNA, 15 bp, Homo sapiens
ggatcacatgagctt

SEQ ID NO: 1718170 - DNA, 15 bp, Homo sapiens
gatcacatgagcttg

SEQ ID NO: 1718171 - DNA, 15 bp, Homo sapiens
atcacatgagcttgg

SEQ ID NO: 1718172 - DNA, 15 bp, Homo sapiens
tcacatgagcttggg

SEQ ID NO: 1718173 - DNA, 15 bp, Homo sapiens
cacatgagcttggga

SEQ ID NO: 1718174 - DNA, 15 bp, Homo sapiens
acatgagcttgggag

SEQ ID NO: 1718175 - DNA, 15 bp, Homo sapiens
catgagcttgggagt

SEQ ID NO: 1718176 - DNA, 15 bp, Homo sapiens
atgagcttgggagtt

SEQ ID NO: 1718177 - DNA, 15 bp, Homo sapiens
tgagcttgggagttg

SEQ ID NO: 1718178 - DNA, 15 bp, Homo sapiens
gagcttgggagttgg

SEQ ID NO: 1718179 - DNA, 15 bp, Homo sapiens
agcttgggagttgga

SEQ ID NO: 1718180 - DNA, 15 bp, Homo sapiens
gcttgggagttggag

SEQ ID NO: 1718181 - DNA, 15 bp, Homo sapiens
cttgggagttggagg

SEQ ID NO: 1718182 - DNA, 15 bp, Homo sapiens
ttgggagttggaggc

SEQ ID NO: 1718183 - DNA, 15 bp, Homo sapiens
tgggagttggaggcc

SEQ ID NO: 1718184 - DNA, 15 bp, Homo sapiens
gggagttggaggcca

SEQ ID NO: 1718185 - DNA, 15 bp, Homo sapiens
ggagttggaggccag

SEQ ID NO: 1718186 - DNA, 15 bp, Homo sapiens
gagttggaggccagc

SEQ ID NO: 1718187 - DNA, 15 bp, Homo sapiens
agttggaggccagcc

SEQ ID NO: 1718188 - DNA, 15 bp, Homo sapiens
gttggaggccagcct

SEQ ID NO: 1718189 - DNA, 15 bp, Homo sapiens
ttggaggccagcctg

SEQ ID NO: 1718190 - DNA, 15 bp, Homo sapiens
tggaggccagcctgg

SEQ ID NO: 1718191 - DNA, 15 bp, Homo sapiens
ggaggccagcctggg

SEQ ID NO: 1718192 - DNA, 15 bp, Homo sapiens
gaggccagcctgggc

SEQ ID NO: 1718193 - DNA, 15 bp, Homo sapiens
aggccagcctgggca

SEQ ID NO: 1718194 - DNA, 15 bp, Homo sapiens
ggccagcctgggcaa

SEQ ID NO: 1718195 - DNA, 15 bp, Homo sapiens
gccagcctgggcaac

SEQ ID NO: 1718196 - DNA, 15 bp, Homo sapiens
cctgggcaacaaagc

SEQ ID NO: 1718197 - DNA, 15 bp, Homo sapiens
ctgggcaacaaagca

SEQ ID NO: 1718198 - DNA, 15 bp, Homo sapiens
tgggcaacaaagcaa

SEQ ID NO: 1718199 - DNA, 15 bp, Homo sapiens
gggcaacaaagcaag

SEQ ID NO: 1718200 - DNA, 15 bp, Homo sapiens
ggcaacaaagcaaga

SEQ ID NO: 1718201 - DNA, 15 bp, Homo sapiens
gcaacaaagcaagac

SEQ ID NO: 1718202 - DNA, 15 bp, Homo sapiens
caacaaagcaagacc

SEQ ID NO: 1718203 - DNA, 15 bp, Homo sapiens
aacaaagcaagaccc

SEQ ID NO: 1718204 - DNA, 15 bp, Homo sapiens
acaaagcaagacccc

SEQ ID NO: 1718205 - DNA, 15 bp, Homo sapiens
caaagcaagacccca

SEQ ID NO: 1718206 - DNA, 15 bp, Homo sapiens
aaagcaagaccccag

SEQ ID NO: 1718207 - DNA, 15 bp, Homo sapiens
aagcaagaccccagt

SEQ ID NO: 1718208 - DNA, 15 bp, Homo sapiens
agcaagaccccagtc

SEQ ID NO: 1718209 - DNA, 15 bp, Homo sapiens
gcaagaccccagtct

SEQ ID NO: 1718210 - DNA, 15 bp, Homo sapiens
caagaccccagtctt

SEQ ID NO: 1718211 - DNA, 15 bp, Homo sapiens
aagaccccagtcttt

SEQ ID NO: 1718212 - DNA, 15 bp, Homo sapiens
agaccccagtcttta

SEQ ID NO: 1718213 - DNA, 15 bp, Homo sapiens
gaccccagtctttaa

SEQ ID NO: 1718214 - DNA, 15 bp, Homo sapiens
accccagtctttaaa

SEQ ID NO: 1718215 - DNA, 15 bp, Homo sapiens
ccccagtctttaaaa

SEQ ID NO: 1718216 - DNA, 15 bp, Homo sapiens
cccagtctttaaaaa

SEQ ID NO: 1718217 - DNA, 15 bp, Homo sapiens
ccagtctttaaaaaa

SEQ ID NO: 1718218 - DNA, 15 bp, Homo sapiens
cagtctttaaaaaaa

SEQ ID NO: 1718219 - DNA, 15 bp, Homo sapiens
agtctttaaaaaaac

SEQ ID NO: 1718220 - DNA, 15 bp, Homo sapiens
gtctttaaaaaaaca

SEQ ID NO: 1718221 - DNA, 15 bp, Homo sapiens
tctttaaaaaaacaa

SEQ ID NO: 1718222 - DNA, 15 bp, Homo sapiens
ctttaaaaaaacaaa

SEQ ID NO: 1718223 - DNA, 15 bp, Homo sapiens
tttaaaaaaacaaaa

SEQ ID NO: 1718224 - DNA, 15 bp, Homo sapiens
aaaaaaacaaaaaag

SEQ ID NO: 1718225 - DNA, 15 bp, Homo sapiens
aaaaaacaaaaaagc

SEQ ID NO: 1718226 - DNA, 15 bp, Homo sapiens
aaaaacaaaaaagct

SEQ ID NO: 1718227 - DNA, 15 bp, Homo sapiens
aaaacaaaaaagctg

SEQ ID NO: 1718228 - DNA, 15 bp, Homo sapiens
aaacaaaaaagctga

SEQ ID NO: 1718229 - DNA, 15 bp, Homo sapiens
aacaaaaaagctgac

SEQ ID NO: 1718230 - DNA, 15 bp, Homo sapiens
acaaaaaagctgacc

SEQ ID NO: 1718231 - DNA, 15 bp, Homo sapiens
caaaaaagctgacca

SEQ ID NO: 1718232 - DNA, 15 bp, Homo sapiens
aaaaaagctgaccag

SEQ ID NO: 1718233 - DNA, 15 bp, Homo sapiens
aaaaagctgaccagg

SEQ ID NO: 1718234 - DNA, 15 bp, Homo sapiens
aaaagctgaccaggc

SEQ ID NO: 1718235 - DNA, 15 bp, Homo sapiens
aaagctgaccaggca

SEQ ID NO: 1718236 - DNA, 15 bp, Homo sapiens
aagctgaccaggcat

SEQ ID NO: 1718237 - DNA, 15 bp, Homo sapiens
agctgaccaggcatg

SEQ ID NO: 1718238 - DNA, 15 bp, Homo sapiens
gctgaccaggcatgt

SEQ ID NO: 1718239 - DNA, 15 bp, Homo sapiens
ctgaccaggcatgtt

SEQ ID NO: 1718240 - DNA, 15 bp, Homo sapiens
tgaccaggcatgttg

SEQ ID NO: 1718241 - DNA, 15 bp, Homo sapiens
gaccaggcatgttgg

SEQ ID NO: 1718242 - DNA, 15 bp, Homo sapiens
accaggcatgttggc

SEQ ID NO: 1718243 - DNA, 15 bp, Homo sapiens
ggcatgttggctcac

SEQ ID NO: 1718244 - DNA, 15 bp, Homo sapiens
gcatgttggctcacg

SEQ ID NO: 1718245 - DNA, 15 bp, Homo sapiens
catgttggctcacgc

SEQ ID NO: 1718246 - DNA, 15 bp, Homo sapiens
atgttggctcacgcc

SEQ ID NO: 1718247 - DNA, 15 bp, Homo sapiens
tgttggctcacgcct

SEQ ID NO: 1718248 - DNA, 15 bp, Homo sapiens
gttggctcacgcctg

SEQ ID NO: 1718249 - DNA, 15 bp, Homo sapiens
ttggctcacgcctgt

SEQ ID NO: 1718250 - DNA, 15 bp, Homo sapiens
tttgggaggccaaga

SEQ ID NO: 1718251 - DNA, 15 bp, Homo sapiens
ttgggaggccaagat

SEQ ID NO: 1718252 - DNA, 15 bp, Homo sapiens
tgggaggccaagatg

SEQ ID NO: 1718253 - DNA, 15 bp, Homo sapiens
gggaggccaagatgg

SEQ ID NO: 1718254 - DNA, 15 bp, Homo sapiens
ggaggccaagatggg

SEQ ID NO: 1718255 - DNA, 15 bp, Homo sapiens
gaggccaagatggga

SEQ ID NO: 1718256 - DNA, 15 bp, Homo sapiens
aggccaagatgggaa

SEQ ID NO: 1718257 - DNA, 15 bp, Homo sapiens
ggccaagatgggaag

SEQ ID NO: 1718258 - DNA, 15 bp, Homo sapiens
gccaagatgggaaga

SEQ ID NO: 1718259 - DNA, 15 bp, Homo sapiens
ccaagatgggaagat

SEQ ID NO: 1718260 - DNA, 15 bp, Homo sapiens
caagatgggaagatt

SEQ ID NO: 1718261 - DNA, 15 bp, Homo sapiens
aagatgggaagattg

SEQ ID NO: 1718262 - DNA, 15 bp, Homo sapiens
agatgggaagattgc

SEQ ID NO: 1718263 - DNA, 15 bp, Homo sapiens
gatgggaagattgct

SEQ ID NO: 1718264 - DNA, 15 bp, Homo sapiens
atgggaagattgctt

SEQ ID NO: 1718265 - DNA, 15 bp, Homo sapiens
attgcttgaggccag

SEQ ID NO: 1718266 - DNA, 15 bp, Homo sapiens
ttgcttgaggccagg

SEQ ID NO: 1718267 - DNA, 15 bp, Homo sapiens
ccaggagtttgagag

SEQ ID NO: 1718268 - DNA, 15 bp, Homo sapiens
caggagtttgagagg

SEQ ID NO: 1718269 - DNA, 15 bp, Homo sapiens
aggagtttgagagga

SEQ ID NO: 1718270 - DNA, 15 bp, Homo sapiens
ggagtttgagaggag

SEQ ID NO: 1718271 - DNA, 15 bp, Homo sapiens
gagtttgagaggagc

SEQ ID NO: 1718272 - DNA, 15 bp, Homo sapiens
agtttgagaggagcc

SEQ ID NO: 1718273 - DNA, 15 bp, Homo sapiens
gtttgagaggagcct

SEQ ID NO: 1718274 - DNA, 15 bp, Homo sapiens
tttgagaggagcctg

SEQ ID NO: 1718275 - DNA, 15 bp, Homo sapiens
ttgagaggagcctgg

SEQ ID NO: 1718276 - DNA, 15 bp, Homo sapiens
tgagaggagcctggg

SEQ ID NO: 1718277 - DNA, 15 bp, Homo sapiens
gagaggagcctgggc

SEQ ID NO: 1718278 - DNA, 15 bp, Homo sapiens
agaggagcctgggca

SEQ ID NO: 1718279 - DNA, 15 bp, Homo sapiens
gaggagcctgggcaa

SEQ ID NO: 1718280 - DNA, 15 bp, Homo sapiens
aggagcctgggcaac

SEQ ID NO: 1718281 - DNA, 15 bp, Homo sapiens
ggagcctgggcaaca

SEQ ID NO: 1718282 - DNA, 15 bp, Homo sapiens
gagcctgggcaacaa

SEQ ID NO: 1718283 - DNA, 15 bp, Homo sapiens
cctgggcaacaaaac

SEQ ID NO: 1718284 - DNA, 15 bp, Homo sapiens
ctgggcaacaaaaca

SEQ ID NO: 1718285 - DNA, 15 bp, Homo sapiens
tgggcaacaaaacaa

SEQ ID NO: 1718286 - DNA, 15 bp, Homo sapiens
gggcaacaaaacaag

SEQ ID NO: 1718287 - DNA, 15 bp, Homo sapiens
ggcaacaaaacaaga

SEQ ID NO: 1718288 - DNA, 15 bp, Homo sapiens
gcaacaaaacaagac

SEQ ID NO: 1718289 - DNA, 15 bp, Homo sapiens
caacaaaacaagacc

SEQ ID NO: 1718290 - DNA, 15 bp, Homo sapiens
aacaaaacaagaccc

SEQ ID NO: 1718291 - DNA, 15 bp, Homo sapiens
acaaaacaagaccct

SEQ ID NO: 1718292 - DNA, 15 bp, Homo sapiens
caaaacaagaccctg

SEQ ID NO: 1718293 - DNA, 15 bp, Homo sapiens
aaaacaagaccctgt

SEQ ID NO: 1718294 - DNA, 15 bp, Homo sapiens
aaacaagaccctgtc

SEQ ID NO: 1718295 - DNA, 15 bp, Homo sapiens
gtctctaaaacaaat

SEQ ID NO: 1718296 - DNA, 15 bp, Homo sapiens
tctctaaaacaaatt

SEQ ID NO: 1718297 - DNA, 15 bp, Homo sapiens
ctctaaaacaaattt

SEQ ID NO: 1718298 - DNA, 15 bp, Homo sapiens
tctaaaacaaatttt

SEQ ID NO: 1718299 - DNA, 15 bp, Homo sapiens
ctaaaacaaatttta

SEQ ID NO: 1718300 - DNA, 15 bp, Homo sapiens
taaaacaaattttaa

SEQ ID NO: 1718301 - DNA, 15 bp, Homo sapiens
aaaacaaattttaaa

SEQ ID NO: 1718302 - DNA, 15 bp, Homo sapiens
aaacaaattttaaaa

SEQ ID NO: 1718303 - DNA, 15 bp, Homo sapiens
aacaaattttaaaaa

SEQ ID NO: 1718304 - DNA, 15 bp, Homo sapiens
acaaattttaaaaaa

SEQ ID NO: 1718305 - DNA, 15 bp, Homo sapiens
aaattttaaaaaatt

SEQ ID NO: 1718306 - DNA, 15 bp, Homo sapiens
aattttaaaaaatta

SEQ ID NO: 1718307 - DNA, 15 bp, Homo sapiens
attttaaaaaattag

SEQ ID NO: 1718308 - DNA, 15 bp, Homo sapiens
ttttaaaaaattagc

SEQ ID NO: 1718309 - DNA, 15 bp, Homo sapiens
tttaaaaaattagcc

SEQ ID NO: 1718310 - DNA, 15 bp, Homo sapiens
ttaaaaaattagcca

SEQ ID NO: 1718311 - DNA, 15 bp, Homo sapiens
aaaaaattagccagt

SEQ ID NO: 1718312 - DNA, 15 bp, Homo sapiens
aaaaattagccagtg

SEQ ID NO: 1718313 - DNA, 15 bp, Homo sapiens
aaaattagccagtgg

SEQ ID NO: 1718314 - DNA, 15 bp, Homo sapiens
aaattagccagtggc

SEQ ID NO: 1718315 - DNA, 15 bp, Homo sapiens
aattagccagtggct

SEQ ID NO: 1718316 - DNA, 15 bp, Homo sapiens
attagccagtggctg

SEQ ID NO: 1718317 - DNA, 15 bp, Homo sapiens
ttagccagtggctgt

SEQ ID NO: 1718318 - DNA, 15 bp, Homo sapiens
tagccagtggctgtg

SEQ ID NO: 1718319 - DNA, 15 bp, Homo sapiens
agccagtggctgtgg

SEQ ID NO: 1718320 - DNA, 15 bp, Homo sapiens
gccagtggctgtggc

SEQ ID NO: 1718321 - DNA, 15 bp, Homo sapiens
ccagtggctgtggca

SEQ ID NO: 1718322 - DNA, 15 bp, Homo sapiens
cagtggctgtggcac

SEQ ID NO: 1718323 - DNA, 15 bp, Homo sapiens
agtggctgtggcaca

SEQ ID NO: 1718324 - DNA, 15 bp, Homo sapiens
gtggctgtggcacac

SEQ ID NO: 1718325 - DNA, 15 bp, Homo sapiens
tggctgtggcacacc

SEQ ID NO: 1718326 - DNA, 15 bp, Homo sapiens
ggctgtggcacacct

SEQ ID NO: 1718327 - DNA, 15 bp, Homo sapiens
gctgtggcacacctg

SEQ ID NO: 1718328 - DNA, 15 bp, Homo sapiens
ctgtggcacacctgt

SEQ ID NO: 1718329 - DNA, 15 bp, Homo sapiens
tgtggcacacctgta

SEQ ID NO: 1718330 - DNA, 15 bp, Homo sapiens
gtggcacacctgtag

SEQ ID NO: 1718331 - DNA, 15 bp, Homo sapiens
tggcacacctgtagg

SEQ ID NO: 1718332 - DNA, 15 bp, Homo sapiens
ggcacacctgtaggc

SEQ ID NO: 1718333 - DNA, 15 bp, Homo sapiens
gcacacctgtaggct

SEQ ID NO: 1718334 - DNA, 15 bp, Homo sapiens
cacacctgtaggctc

SEQ ID NO: 1718335 - DNA, 15 bp, Homo sapiens
acacctgtaggctca

SEQ ID NO: 1718336 - DNA, 15 bp, Homo sapiens
cacctgtaggctcat

SEQ ID NO: 1718337 - DNA, 15 bp, Homo sapiens
acctgtaggctcatc

SEQ ID NO: 1718338 - DNA, 15 bp, Homo sapiens
cctgtaggctcatct

SEQ ID NO: 1718339 - DNA, 15 bp, Homo sapiens
ctgtaggctcatcta

SEQ ID NO: 1718340 - DNA, 15 bp, Homo sapiens
tgtaggctcatctac

SEQ ID NO: 1718341 - DNA, 15 bp, Homo sapiens
gtaggctcatctact

SEQ ID NO: 1718342 - DNA, 15 bp, Homo sapiens
taggctcatctactc

SEQ ID NO: 1718343 - DNA, 15 bp, Homo sapiens
aggctcatctactca

SEQ ID NO: 1718344 - DNA, 15 bp, Homo sapiens
ggctcatctactcag

SEQ ID NO: 1718345 - DNA, 15 bp, Homo sapiens
gctcatctactcagg

SEQ ID NO: 1718346 - DNA, 15 bp, Homo sapiens
ctcatctactcagga

SEQ ID NO: 1718347 - DNA, 15 bp, Homo sapiens
tcatctactcaggag

SEQ ID NO: 1718348 - DNA, 15 bp, Homo sapiens
catctactcaggagg

SEQ ID NO: 1718349 - DNA, 15 bp, Homo sapiens
atctactcaggaggc

SEQ ID NO: 1718350 - DNA, 15 bp, Homo sapiens
tctactcaggaggct

SEQ ID NO: 1718351 - DNA, 15 bp, Homo sapiens
aggagtttgagactg

SEQ ID NO: 1718352 - DNA, 15 bp, Homo sapiens
ggagtttgagactgc

SEQ ID NO: 1718353 - DNA, 15 bp, Homo sapiens
gagtttgagactgca

SEQ ID NO: 1718354 - DNA, 15 bp, Homo sapiens
agtttgagactgcag

SEQ ID NO: 1718355 - DNA, 15 bp, Homo sapiens
gtttgagactgcagt

SEQ ID NO: 1718356 - DNA, 15 bp, Homo sapiens
tttgagactgcagtg

SEQ ID NO: 1718357 - DNA, 15 bp, Homo sapiens
cagtgagccatgatt

SEQ ID NO: 1718358 - DNA, 15 bp, Homo sapiens
agtgagccatgattt

SEQ ID NO: 1718359 - DNA, 15 bp, Homo sapiens
gtgagccatgatttc

SEQ ID NO: 1718360 - DNA, 15 bp, Homo sapiens
tgagccatgatttca

SEQ ID NO: 1718361 - DNA, 15 bp, Homo sapiens
gagccatgatttcac

SEQ ID NO: 1718362 - DNA, 15 bp, Homo sapiens
agccatgatttcacc

SEQ ID NO: 1718363 - DNA, 15 bp, Homo sapiens
gccatgatttcacca

SEQ ID NO: 1718364 - DNA, 15 bp, Homo sapiens
ccatgatttcaccac

SEQ ID NO: 1718365 - DNA, 15 bp, Homo sapiens
catgatttcaccact

SEQ ID NO: 1718366 - DNA, 15 bp, Homo sapiens
atgatttcaccactg

SEQ ID NO: 1718367 - DNA, 15 bp, Homo sapiens
tgatttcaccactgc

SEQ ID NO: 1718368 - DNA, 15 bp, Homo sapiens
gatttcaccactgca

SEQ ID NO: 1718369 - DNA, 15 bp, Homo sapiens
atttcaccactgcac

SEQ ID NO: 1718370 - DNA, 15 bp, Homo sapiens
tttcaccactgcacc

SEQ ID NO: 1718371 - DNA, 15 bp, Homo sapiens
ttcaccactgcaccc

SEQ ID NO: 1718372 - DNA, 15 bp, Homo sapiens
tcaccactgcacccc

SEQ ID NO: 1718373 - DNA, 15 bp, Homo sapiens
caccactgcacccca

SEQ ID NO: 1718374 - DNA, 15 bp, Homo sapiens
accactgcaccccag

SEQ ID NO: 1718375 - DNA, 15 bp, Homo sapiens
caccccagcctggat

SEQ ID NO: 1718376 - DNA, 15 bp, Homo sapiens
accccagcctggatg

SEQ ID NO: 1718377 - DNA, 15 bp, Homo sapiens
ccccagcctggatga

SEQ ID NO: 1718378 - DNA, 15 bp, Homo sapiens
cccagcctggatgac

SEQ ID NO: 1718379 - DNA, 15 bp, Homo sapiens
ggatgacagagtgaa

SEQ ID NO: 1718380 - DNA, 15 bp, Homo sapiens
gatgacagagtgaaa

SEQ ID NO: 1718381 - DNA, 15 bp, Homo sapiens
atgacagagtgaaac

SEQ ID NO: 1718382 - DNA, 15 bp, Homo sapiens
tgacagagtgaaacc

SEQ ID NO: 1718383 - DNA, 15 bp, Homo sapiens
gacagagtgaaaccc

SEQ ID NO: 1718384 - DNA, 15 bp, Homo sapiens
acagagtgaaaccct

SEQ ID NO: 1718385 - DNA, 15 bp, Homo sapiens
cagagtgaaacccta

SEQ ID NO: 1718386 - DNA, 15 bp, Homo sapiens
agagtgaaaccctat

SEQ ID NO: 1718387 - DNA, 15 bp, Homo sapiens
gagtgaaaccctatt

SEQ ID NO: 1718388 - DNA, 15 bp, Homo sapiens
agtgaaaccctattt

SEQ ID NO: 1718389 - DNA, 15 bp, Homo sapiens
gtgaaaccctatttc

SEQ ID NO: 1718390 - DNA, 15 bp, Homo sapiens
tgaaaccctatttca

SEQ ID NO: 1718391 - DNA, 15 bp, Homo sapiens
gaaaccctatttcaa

SEQ ID NO: 1718392 - DNA, 15 bp, Homo sapiens
aaaccctatttcaaa

SEQ ID NO: 1718393 - DNA, 15 bp, Homo sapiens
aaccctatttcaaaa

SEQ ID NO: 1718394 - DNA, 15 bp, Homo sapiens
accctatttcaaaac

SEQ ID NO: 1718395 - DNA, 15 bp, Homo sapiens
ccctatttcaaaaca

SEQ ID NO: 1718396 - DNA, 15 bp, Homo sapiens
cctatttcaaaacaa

SEQ ID NO: 1718397 - DNA, 15 bp, Homo sapiens
ctatttcaaaacaag

SEQ ID NO: 1718398 - DNA, 15 bp, Homo sapiens
tatttcaaaacaaga

SEQ ID NO: 1718399 - DNA, 15 bp, Homo sapiens
atttcaaaacaagaa

SEQ ID NO: 1718400 - DNA, 15 bp, Homo sapiens
tttcaaaacaagaaa

SEQ ID NO: 1718401 - DNA, 15 bp, Homo sapiens
ttcaaaacaagaaaa

SEQ ID NO: 1718402 - DNA, 15 bp, Homo sapiens
tcaaaacaagaaaaa

SEQ ID NO: 1718403 - DNA, 15 bp, Homo sapiens
caaaacaagaaaaaa

SEQ ID NO: 1718404 - DNA, 15 bp, Homo sapiens
aaaacaagaaaaaaa

SEQ ID NO: 1718405 - DNA, 15 bp, Homo sapiens
aaacaagaaaaaaaa

SEQ ID NO: 1718406 - DNA, 15 bp, Homo sapiens
aacaagaaaaaaaaa

SEQ ID NO: 1718407 - DNA, 15 bp, Homo sapiens
acaagaaaaaaaaac

SEQ ID NO: 1718408 - DNA, 15 bp, Homo sapiens
caagaaaaaaaaaca

SEQ ID NO: 1718409 - DNA, 15 bp, Homo sapiens
aagaaaaaaaaacaa

SEQ ID NO: 1718410 - DNA, 15 bp, Homo sapiens
agaaaaaaaaacaaa

SEQ ID NO: 1718411 - DNA, 15 bp, Homo sapiens
gaaaaaaaaacaaaa

SEQ ID NO: 1718412 - DNA, 15 bp, Homo sapiens
aaaaaaaacaaaaac

SEQ ID NO: 1718413 - DNA, 15 bp, Homo sapiens
aaaaaaacaaaaact

SEQ ID NO: 1718414 - DNA, 15 bp, Homo sapiens
aaaaaacaaaaacta

SEQ ID NO: 1718415 - DNA, 15 bp, Homo sapiens
aaaaacaaaaactaa

SEQ ID NO: 1718416 - DNA, 15 bp, Homo sapiens
aaaacaaaaactaat

SEQ ID NO: 1718417 - DNA, 15 bp, Homo sapiens
aaacaaaaactaatt

SEQ ID NO: 1718418 - DNA, 15 bp, Homo sapiens
aacaaaaactaatta

SEQ ID NO: 1718419 - DNA, 15 bp, Homo sapiens
acaaaaactaattat

SEQ ID NO: 1718420 - DNA, 15 bp, Homo sapiens
caaaaactaattatg

SEQ ID NO: 1718421 - DNA, 15 bp, Homo sapiens
aaaaactaattatgt

SEQ ID NO: 1718422 - DNA, 15 bp, Homo sapiens
aaaactaattatgtt

SEQ ID NO: 1718423 - DNA, 15 bp, Homo sapiens
aaactaattatgttt

SEQ ID NO: 1718424 - DNA, 15 bp, Homo sapiens
aactaattatgtttt

SEQ ID NO: 1718425 - DNA, 15 bp, Homo sapiens
actaattatgttttg

SEQ ID NO: 1718426 - DNA, 15 bp, Homo sapiens
ctaattatgttttga

SEQ ID NO: 1718427 - DNA, 15 bp, Homo sapiens
taattatgttttgaa

SEQ ID NO: 1718428 - DNA, 15 bp, Homo sapiens
aattatgttttgaag

SEQ ID NO: 1718429 - DNA, 15 bp, Homo sapiens
attatgttttgaagg

SEQ ID NO: 1718430 - DNA, 15 bp, Homo sapiens
ttatgttttgaagga

SEQ ID NO: 1718431 - DNA, 15 bp, Homo sapiens
tatgttttgaaggag

SEQ ID NO: 1718432 - DNA, 15 bp, Homo sapiens
atgttttgaaggagg

SEQ ID NO: 1718433 - DNA, 15 bp, Homo sapiens
tgttttgaaggagga

SEQ ID NO: 1718434 - DNA, 15 bp, Homo sapiens
gttttgaaggaggaa

SEQ ID NO: 1718435 - DNA, 15 bp, Homo sapiens
ttttgaaggaggaat

SEQ ID NO: 1718436 - DNA, 15 bp, Homo sapiens
tttgaaggaggaatt

SEQ ID NO: 1718437 - DNA, 15 bp, Homo sapiens
ttgaaggaggaattg

SEQ ID NO: 1718438 - DNA, 15 bp, Homo sapiens
tgaaggaggaattgg

SEQ ID NO: 1718439 - DNA, 15 bp, Homo sapiens
gaaggaggaattggc

SEQ ID NO: 1718440 - DNA, 15 bp, Homo sapiens
aaggaggaattggca

SEQ ID NO: 1718441 - DNA, 15 bp, Homo sapiens
aggaggaattggcag

SEQ ID NO: 1718442 - DNA, 15 bp, Homo sapiens
ggaggaattggcagt

SEQ ID NO: 1718443 - DNA, 15 bp, Homo sapiens
gaggaattggcagtc

SEQ ID NO: 1718444 - DNA, 15 bp, Homo sapiens
aggaattggcagtct

SEQ ID NO: 1718445 - DNA, 15 bp, Homo sapiens
ggaattggcagtcta

SEQ ID NO: 1718446 - DNA, 15 bp, Homo sapiens
gaattggcagtctag

SEQ ID NO: 1718447 - DNA, 15 bp, Homo sapiens
aattggcagtctaga

SEQ ID NO: 1718448 - DNA, 15 bp, Homo sapiens
attggcagtctagaa

SEQ ID NO: 1718449 - DNA, 15 bp, Homo sapiens
ttggcagtctagaat

SEQ ID NO: 1718450 - DNA, 15 bp, Homo sapiens
tggcagtctagaata

SEQ ID NO: 1718451 - DNA, 15 bp, Homo sapiens
ggcagtctagaatag

SEQ ID NO: 1718452 - DNA, 15 bp, Homo sapiens
gcagtctagaatagt

SEQ ID NO: 1718453 - DNA, 15 bp, Homo sapiens
cagtctagaatagtg

SEQ ID NO: 1718454 - DNA, 15 bp, Homo sapiens
agtctagaatagtgg

SEQ ID NO: 1718455 - DNA, 15 bp, Homo sapiens
gtctagaatagtggt

SEQ ID NO: 1718456 - DNA, 15 bp, Homo sapiens
tctagaatagtggtc

SEQ ID NO: 1718457 - DNA, 15 bp, Homo sapiens
ctagaatagtggtca

SEQ ID NO: 1718458 - DNA, 15 bp, Homo sapiens
tagaatagtggtcaa

SEQ ID NO: 1718459 - DNA, 15 bp, Homo sapiens
agaatagtggtcaag

SEQ ID NO: 1718460 - DNA, 15 bp, Homo sapiens
gaatagtggtcaagg

SEQ ID NO: 1718461 - DNA, 15 bp, Homo sapiens
aatagtggtcaaggg

SEQ ID NO: 1718462 - DNA, 15 bp, Homo sapiens
atagtggtcaagggc

SEQ ID NO: 1718463 - DNA, 15 bp, Homo sapiens
tagtggtcaagggca

SEQ ID NO: 1718464 - DNA, 15 bp, Homo sapiens
agtggtcaagggcat

SEQ ID NO: 1718465 - DNA, 15 bp, Homo sapiens
gtggtcaagggcatg

SEQ ID NO: 1718466 - DNA, 15 bp, Homo sapiens
tggtcaagggcatgg

SEQ ID NO: 1718467 - DNA, 15 bp, Homo sapiens
ggtcaagggcatgga

SEQ ID NO: 1718468 - DNA, 15 bp, Homo sapiens
gtcaagggcatggat

SEQ ID NO: 1718469 - DNA, 15 bp, Homo sapiens
tcaagggcatggatt

SEQ ID NO: 1718470 - DNA, 15 bp, Homo sapiens
caagggcatggatta

SEQ ID NO: 1718471 - DNA, 15 bp, Homo sapiens
aagggcatggattat

SEQ ID NO: 1718472 - DNA, 15 bp, Homo sapiens
agggcatggattata

SEQ ID NO: 1718473 - DNA, 15 bp, Homo sapiens
gggcatggattatag

SEQ ID NO: 1718474 - DNA, 15 bp, Homo sapiens
ggcatggattataga

SEQ ID NO: 1718475 - DNA, 15 bp, Homo sapiens
gcatggattatagag

SEQ ID NO: 1718476 - DNA, 15 bp, Homo sapiens
catggattatagagt

SEQ ID NO: 1718477 - DNA, 15 bp, Homo sapiens
atggattatagagtt

SEQ ID NO: 1718478 - DNA, 15 bp, Homo sapiens
tggattatagagtta

SEQ ID NO: 1718479 - DNA, 15 bp, Homo sapiens
ggattatagagttag

SEQ ID NO: 1718480 - DNA, 15 bp, Homo sapiens
gattatagagttaga

SEQ ID NO: 1718481 - DNA, 15 bp, Homo sapiens
attatagagttagac

SEQ ID NO: 1718482 - DNA, 15 bp, Homo sapiens
ttatagagttagact

SEQ ID NO: 1718483 - DNA, 15 bp, Homo sapiens
tatagagttagactg

SEQ ID NO: 1718484 - DNA, 15 bp, Homo sapiens
atagagttagactgt

SEQ ID NO: 1718485 - DNA, 15 bp, Homo sapiens
tagagttagactgtt

SEQ ID NO: 1718486 - DNA, 15 bp, Homo sapiens
agagttagactgttg

SEQ ID NO: 1718487 - DNA, 15 bp, Homo sapiens
gagttagactgttgg

SEQ ID NO: 1718488 - DNA, 15 bp, Homo sapiens
agttagactgttggg

SEQ ID NO: 1718489 - DNA, 15 bp, Homo sapiens
gttagactgttgggc

SEQ ID NO: 1718490 - DNA, 15 bp, Homo sapiens
ttagactgttgggct

SEQ ID NO: 1718491 - DNA, 15 bp, Homo sapiens
tagactgttgggctc

SEQ ID NO: 1718492 - DNA, 15 bp, Homo sapiens
agactgttgggctca

SEQ ID NO: 1718493 - DNA, 15 bp, Homo sapiens
gactgttgggctcac

SEQ ID NO: 1718494 - DNA, 15 bp, Homo sapiens
actgttgggctcaca

SEQ ID NO: 1718495 - DNA, 15 bp, Homo sapiens
ctgttgggctcacat

SEQ ID NO: 1718496 - DNA, 15 bp, Homo sapiens
tgttgggctcacata

SEQ ID NO: 1718497 - DNA, 15 bp, Homo sapiens
gttgggctcacatag

SEQ ID NO: 1718498 - DNA, 15 bp, Homo sapiens
ttgggctcacatagt

SEQ ID NO: 1718499 - DNA, 15 bp, Homo sapiens
tgggctcacatagtg

SEQ ID NO: 1718500 - DNA, 15 bp, Homo sapiens
gggctcacatagtgg

SEQ ID NO: 1718501 - DNA, 15 bp, Homo sapiens
ggctcacatagtggt

SEQ ID NO: 1718502 - DNA, 15 bp, Homo sapiens
gctcacatagtggtt

SEQ ID NO: 1718503 - DNA, 15 bp, Homo sapiens
ctcacatagtggttt

SEQ ID NO: 1718504 - DNA, 15 bp, Homo sapiens
tcacatagtggttta

SEQ ID NO: 1718505 - DNA, 15 bp, Homo sapiens
cacatagtggtttac

SEQ ID NO: 1718506 - DNA, 15 bp, Homo sapiens
acatagtggtttacc

SEQ ID NO: 1718507 - DNA, 15 bp, Homo sapiens
catagtggtttacct

SEQ ID NO: 1718508 - DNA, 15 bp, Homo sapiens
atagtggtttacctc

SEQ ID NO: 1718509 - DNA, 15 bp, Homo sapiens
tagtggtttacctct

SEQ ID NO: 1718510 - DNA, 15 bp, Homo sapiens
agtggtttacctctt

SEQ ID NO: 1718511 - DNA, 15 bp, Homo sapiens
gtggtttacctctta

SEQ ID NO: 1718512 - DNA, 15 bp, Homo sapiens
tggtttacctcttac

SEQ ID NO: 1718513 - DNA, 15 bp, Homo sapiens
ggtttacctcttacc

SEQ ID NO: 1718514 - DNA, 15 bp, Homo sapiens
gtttacctcttaccg

SEQ ID NO: 1718515 - DNA, 15 bp, Homo sapiens
tttacctcttaccgg

SEQ ID NO: 1718516 - DNA, 15 bp, Homo sapiens
ttacctcttaccggc

SEQ ID NO: 1718517 - DNA, 15 bp, Homo sapiens
tacctcttaccggct

SEQ ID NO: 1718518 - DNA, 15 bp, Homo sapiens
acctcttaccggctg

SEQ ID NO: 1718519 - DNA, 15 bp, Homo sapiens
cctcttaccggctga

SEQ ID NO: 1718520 - DNA, 15 bp, Homo sapiens
ctcttaccggctgag

SEQ ID NO: 1718521 - DNA, 15 bp, Homo sapiens
tcttaccggctgaga

SEQ ID NO: 1718522 - DNA, 15 bp, Homo sapiens
cttaccggctgagac

SEQ ID NO: 1718523 - DNA, 15 bp, Homo sapiens
ttaccggctgagacc

SEQ ID NO: 1718524 - DNA, 15 bp, Homo sapiens
taccggctgagacct

SEQ ID NO: 1718525 - DNA, 15 bp, Homo sapiens
accggctgagacctc

SEQ ID NO: 1718526 - DNA, 15 bp, Homo sapiens
ccggctgagacctca

SEQ ID NO: 1718527 - DNA, 15 bp, Homo sapiens
cggctgagacctcag

SEQ ID NO: 1718528 - DNA, 15 bp, Homo sapiens
ggctgagacctcagg

SEQ ID NO: 1718529 - DNA, 15 bp, Homo sapiens
gctgagacctcaggt

SEQ ID NO: 1718530 - DNA, 15 bp, Homo sapiens
ctgagacctcaggta

SEQ ID NO: 1718531 - DNA, 15 bp, Homo sapiens
tgagacctcaggtaa

SEQ ID NO: 1718532 - DNA, 15 bp, Homo sapiens
gagacctcaggtaag

SEQ ID NO: 1718533 - DNA, 15 bp, Homo sapiens
agacctcaggtaagt

SEQ ID NO: 1718534 - DNA, 15 bp, Homo sapiens
gacctcaggtaagtt

SEQ ID NO: 1718535 - DNA, 15 bp, Homo sapiens
acctcaggtaagttc

SEQ ID NO: 1718536 - DNA, 15 bp, Homo sapiens
cctcaggtaagttct

SEQ ID NO: 1718537 - DNA, 15 bp, Homo sapiens
ctcaggtaagttctt

SEQ ID NO: 1718538 - DNA, 15 bp, Homo sapiens
tcaggtaagttcttt

SEQ ID NO: 1718539 - DNA, 15 bp, Homo sapiens
caggtaagttcttta

SEQ ID NO: 1718540 - DNA, 15 bp, Homo sapiens
aggtaagttctttaa

SEQ ID NO: 1718541 - DNA, 15 bp, Homo sapiens
ggtaagttctttaac

SEQ ID NO: 1718542 - DNA, 15 bp, Homo sapiens
gtaagttctttaact

SEQ ID NO: 1718543 - DNA, 15 bp, Homo sapiens
taagttctttaactt

SEQ ID NO: 1718544 - DNA, 15 bp, Homo sapiens
aagttctttaacttc

SEQ ID NO: 1718545 - DNA, 15 bp, Homo sapiens
agttctttaacttct

SEQ ID NO: 1718546 - DNA, 15 bp, Homo sapiens
gttctttaacttctc

SEQ ID NO: 1718547 - DNA, 15 bp, Homo sapiens
ttctttaacttctcc

SEQ ID NO: 1718548 - DNA, 15 bp, Homo sapiens
tctttaacttctcca

SEQ ID NO: 1718549 - DNA, 15 bp, Homo sapiens
ctttaacttctccaa

SEQ ID NO: 1718550 - DNA, 15 bp, Homo sapiens
tttaacttctccaat

SEQ ID NO: 1718551 - DNA, 15 bp, Homo sapiens
ttaacttctccaatt

SEQ ID NO: 1718552 - DNA, 15 bp, Homo sapiens
taacttctccaattt

SEQ ID NO: 1718553 - DNA, 15 bp, Homo sapiens
aacttctccaatttg

SEQ ID NO: 1718554 - DNA, 15 bp, Homo sapiens
acttctccaatttga

SEQ ID NO: 1718555 - DNA, 15 bp, Homo sapiens
cttctccaatttgac

SEQ ID NO: 1718556 - DNA, 15 bp, Homo sapiens
ttctccaatttgaca

SEQ ID NO: 1718557 - DNA, 15 bp, Homo sapiens
tctccaatttgacag

SEQ ID NO: 1718558 - DNA, 15 bp, Homo sapiens
ctccaatttgacaga

SEQ ID NO: 1718559 - DNA, 15 bp, Homo sapiens
tccaatttgacagac

SEQ ID NO: 1718560 - DNA, 15 bp, Homo sapiens
ccaatttgacagaca

SEQ ID NO: 1718561 - DNA, 15 bp, Homo sapiens
caatttgacagacat

SEQ ID NO: 1718562 - DNA, 15 bp, Homo sapiens
aatttgacagacatc

SEQ ID NO: 1718563 - DNA, 15 bp, Homo sapiens
atttgacagacatct

SEQ ID NO: 1718564 - DNA, 15 bp, Homo sapiens
tttgacagacatctg

SEQ ID NO: 1718565 - DNA, 15 bp, Homo sapiens
ttgacagacatctgt

SEQ ID NO: 1718566 - DNA, 15 bp, Homo sapiens
tgacagacatctgta

SEQ ID NO: 1718567 - DNA, 15 bp, Homo sapiens
gacagacatctgtaa

SEQ ID NO: 1718568 - DNA, 15 bp, Homo sapiens
acagacatctgtaaa

SEQ ID NO: 1718569 - DNA, 15 bp, Homo sapiens
cagacatctgtaaat

SEQ ID NO: 1718570 - DNA, 15 bp, Homo sapiens
agacatctgtaaatg

SEQ ID NO: 1718571 - DNA, 15 bp, Homo sapiens
gacatctgtaaatgt

SEQ ID NO: 1718572 - DNA, 15 bp, Homo sapiens
acatctgtaaatgtc

SEQ ID NO: 1718573 - DNA, 15 bp, Homo sapiens
catctgtaaatgtct

SEQ ID NO: 1718574 - DNA, 15 bp, Homo sapiens
atctgtaaatgtcta

SEQ ID NO: 1718575 - DNA, 15 bp, Homo sapiens
tctgtaaatgtctac

SEQ ID NO: 1718576 - DNA, 15 bp, Homo sapiens
ctgtaaatgtctact

SEQ ID NO: 1718577 - DNA, 15 bp, Homo sapiens
tgtaaatgtctactt

SEQ ID NO: 1718578 - DNA, 15 bp, Homo sapiens
gtaaatgtctacttt

SEQ ID NO: 1718579 - DNA, 15 bp, Homo sapiens
taaatgtctactttt

SEQ ID NO: 1718580 - DNA, 15 bp, Homo sapiens
aaatgtctactttta

SEQ ID NO: 1718581 - DNA, 15 bp, Homo sapiens
aatgtctacttttac

SEQ ID NO: 1718582 - DNA, 15 bp, Homo sapiens
atgtctacttttaca

SEQ ID NO: 1718583 - DNA, 15 bp, Homo sapiens
tgtctacttttacag

SEQ ID NO: 1718584 - DNA, 15 bp, Homo sapiens
gtctacttttacaga

SEQ ID NO: 1718585 - DNA, 15 bp, Homo sapiens
tctacttttacagat

SEQ ID NO: 1718586 - DNA, 15 bp, Homo sapiens
ctacttttacagatg

SEQ ID NO: 1718587 - DNA, 15 bp, Homo sapiens
tacttttacagatga

SEQ ID NO: 1718588 - DNA, 15 bp, Homo sapiens
acttttacagatgag

SEQ ID NO: 1718589 - DNA, 15 bp, Homo sapiens
cttttacagatgaga

SEQ ID NO: 1718590 - DNA, 15 bp, Homo sapiens
tttacagatgagaat

SEQ ID NO: 1718591 - DNA, 15 bp, Homo sapiens
ttacagatgagaata

SEQ ID NO: 1718592 - DNA, 15 bp, Homo sapiens
tacagatgagaatac

SEQ ID NO: 1718593 - DNA, 15 bp, Homo sapiens
acagatgagaatact

SEQ ID NO: 1718594 - DNA, 15 bp, Homo sapiens
cagatgagaatactt

SEQ ID NO: 1718595 - DNA, 15 bp, Homo sapiens
agatgagaatactta

SEQ ID NO: 1718596 - DNA, 15 bp, Homo sapiens
gatgagaatacttat

SEQ ID NO: 1718597 - DNA, 15 bp, Homo sapiens
atgagaatacttatc

SEQ ID NO: 1718598 - DNA, 15 bp, Homo sapiens
tgagaatacttatct

SEQ ID NO: 1718599 - DNA, 15 bp, Homo sapiens
gagaatacttatcta

SEQ ID NO: 1718600 - DNA, 15 bp, Homo sapiens
agaatacttatctaa

SEQ ID NO: 1718601 - DNA, 15 bp, Homo sapiens
gaatacttatctaaa

SEQ ID NO: 1718602 - DNA, 15 bp, Homo sapiens
aatacttatctaaaa

SEQ ID NO: 1718603 - DNA, 15 bp, Homo sapiens
atacttatctaaaag

SEQ ID NO: 1718604 - DNA, 15 bp, Homo sapiens
tacttatctaaaagg

SEQ ID NO: 1718605 - DNA, 15 bp, Homo sapiens
acttatctaaaaggg

SEQ ID NO: 1718606 - DNA, 15 bp, Homo sapiens
cttatctaaaagggc

SEQ ID NO: 1718607 - DNA, 15 bp, Homo sapiens
ttatctaaaagggct

SEQ ID NO: 1718608 - DNA, 15 bp, Homo sapiens
tatctaaaagggctg

SEQ ID NO: 1718609 - DNA, 15 bp, Homo sapiens
atctaaaagggctga

SEQ ID NO: 1718610 - DNA, 15 bp, Homo sapiens
tctaaaagggctgat

SEQ ID NO: 1718611 - DNA, 15 bp, Homo sapiens
ctaaaagggctgatg

SEQ ID NO: 1718612 - DNA, 15 bp, Homo sapiens
taaaagggctgatgt

SEQ ID NO: 1718613 - DNA, 15 bp, Homo sapiens
aaaagggctgatgtc

SEQ ID NO: 1718614 - DNA, 15 bp, Homo sapiens
aaagggctgatgtcg

SEQ ID NO: 1718615 - DNA, 15 bp, Homo sapiens
aagggctgatgtcgg

SEQ ID NO: 1718616 - DNA, 15 bp, Homo sapiens
agggctgatgtcggg

SEQ ID NO: 1718617 - DNA, 15 bp, Homo sapiens
gggctgatgtcggga

SEQ ID NO: 1718618 - DNA, 15 bp, Homo sapiens
ggctgatgtcgggat

SEQ ID NO: 1718619 - DNA, 15 bp, Homo sapiens
gctgatgtcgggatt

SEQ ID NO: 1718620 - DNA, 15 bp, Homo sapiens
ctgatgtcgggattc

SEQ ID NO: 1718621 - DNA, 15 bp, Homo sapiens
tgatgtcgggattca

SEQ ID NO: 1718622 - DNA, 15 bp, Homo sapiens
gatgtcgggattcag

SEQ ID NO: 1718623 - DNA, 15 bp, Homo sapiens
atgtcgggattcagt

SEQ ID NO: 1718624 - DNA, 15 bp, Homo sapiens
tgtcgggattcagtg

SEQ ID NO: 1718625 - DNA, 15 bp, Homo sapiens
gtcgggattcagtga

SEQ ID NO: 1718626 - DNA, 15 bp, Homo sapiens
tcgggattcagtgaa

SEQ ID NO: 1718627 - DNA, 15 bp, Homo sapiens
cgggattcagtgaaa

SEQ ID NO: 1718628 - DNA, 15 bp, Homo sapiens
gggattcagtgaaac

SEQ ID NO: 1718629 - DNA, 15 bp, Homo sapiens
ggattcagtgaaacc

SEQ ID NO: 1718630 - DNA, 15 bp, Homo sapiens
gattcagtgaaacca

SEQ ID NO: 1718631 - DNA, 15 bp, Homo sapiens
attcagtgaaaccat

SEQ ID NO: 1718632 - DNA, 15 bp, Homo sapiens
ttcagtgaaaccata

SEQ ID NO: 1718633 - DNA, 15 bp, Homo sapiens
tcagtgaaaccatat

SEQ ID NO: 1718634 - DNA, 15 bp, Homo sapiens
cagtgaaaccatatg

SEQ ID NO: 1718635 - DNA, 15 bp, Homo sapiens
agtgaaaccatatgt

SEQ ID NO: 1718636 - DNA, 15 bp, Homo sapiens
gtgaaaccatatgtt

SEQ ID NO: 1718637 - DNA, 15 bp, Homo sapiens
tgaaaccatatgttt

SEQ ID NO: 1718638 - DNA, 15 bp, Homo sapiens
gaaaccatatgttta

SEQ ID NO: 1718639 - DNA, 15 bp, Homo sapiens
aaaccatatgtttaa

SEQ ID NO: 1718640 - DNA, 15 bp, Homo sapiens
aaccatatgtttaag

SEQ ID NO: 1718641 - DNA, 15 bp, Homo sapiens
accatatgtttaagg

SEQ ID NO: 1718642 - DNA, 15 bp, Homo sapiens
ccatatgtttaaggt

SEQ ID NO: 1718643 - DNA, 15 bp, Homo sapiens
catatgtttaaggta

SEQ ID NO: 1718644 - DNA, 15 bp, Homo sapiens
atatgtttaaggtac

SEQ ID NO: 1718645 - DNA, 15 bp, Homo sapiens
tatgtttaaggtact

SEQ ID NO: 1718646 - DNA, 15 bp, Homo sapiens
atgtttaaggtactt

SEQ ID NO: 1718647 - DNA, 15 bp, Homo sapiens
tgtttaaggtacttt

SEQ ID NO: 1718648 - DNA, 15 bp, Homo sapiens
gtttaaggtactttc

SEQ ID NO: 1718649 - DNA, 15 bp, Homo sapiens
tttaaggtactttct

SEQ ID NO: 1718650 - DNA, 15 bp, Homo sapiens
ttaaggtactttcta

SEQ ID NO: 1718651 - DNA, 15 bp, Homo sapiens
taaggtactttctac

SEQ ID NO: 1718652 - DNA, 15 bp, Homo sapiens
aaggtactttctaca

SEQ ID NO: 1718653 - DNA, 15 bp, Homo sapiens
aggtactttctacag

SEQ ID NO: 1718654 - DNA, 15 bp, Homo sapiens
ggtactttctacagg

SEQ ID NO: 1718655 - DNA, 15 bp, Homo sapiens
gtactttctacagga

SEQ ID NO: 1718656 - DNA, 15 bp, Homo sapiens
tactttctacaggat

SEQ ID NO: 1718657 - DNA, 15 bp, Homo sapiens
actttctacaggatc

SEQ ID NO: 1718658 - DNA, 15 bp, Homo sapiens
ctttctacaggatca

SEQ ID NO: 1718659 - DNA, 15 bp, Homo sapiens
tttctacaggatcat

SEQ ID NO: 1718660 - DNA, 15 bp, Homo sapiens
ttctacaggatcata

SEQ ID NO: 1718661 - DNA, 15 bp, Homo sapiens
tctacaggatcatag

SEQ ID NO: 1718662 - DNA, 15 bp, Homo sapiens
ctacaggatcatagt

SEQ ID NO: 1718663 - DNA, 15 bp, Homo sapiens
tacaggatcatagta

SEQ ID NO: 1718664 - DNA, 15 bp, Homo sapiens
acaggatcatagtaa

SEQ ID NO: 1718665 - DNA, 15 bp, Homo sapiens
caggatcatagtaaa

SEQ ID NO: 1718666 - DNA, 15 bp, Homo sapiens
aggatcatagtaaat

SEQ ID NO: 1718667 - DNA, 15 bp, Homo sapiens
ggatcatagtaaata

SEQ ID NO: 1718668 - DNA, 15 bp, Homo sapiens
gatcatagtaaatac

SEQ ID NO: 1718669 - DNA, 15 bp, Homo sapiens
atcatagtaaatact

SEQ ID NO: 1718670 - DNA, 15 bp, Homo sapiens
tcatagtaaatactc

SEQ ID NO: 1718671 - DNA, 15 bp, Homo sapiens
catagtaaatactca

SEQ ID NO: 1718672 - DNA, 15 bp, Homo sapiens
atagtaaatactcaa

SEQ ID NO: 1718673 - DNA, 15 bp, Homo sapiens
tagtaaatactcaaa

SEQ ID NO: 1718674 - DNA, 15 bp, Homo sapiens
agtaaatactcaaaa

SEQ ID NO: 1718675 - DNA, 15 bp, Homo sapiens
gtaaatactcaaaaa

SEQ ID NO: 1718676 - DNA, 15 bp, Homo sapiens
taaatactcaaaaat

SEQ ID NO: 1718677 - DNA, 15 bp, Homo sapiens
aaatactcaaaaatt

SEQ ID NO: 1718678 - DNA, 15 bp, Homo sapiens
aatactcaaaaatta

SEQ ID NO: 1718679 - DNA, 15 bp, Homo sapiens
atactcaaaaattat

SEQ ID NO: 1718680 - DNA, 15 bp, Homo sapiens
tactcaaaaattatt

SEQ ID NO: 1718681 - DNA, 15 bp, Homo sapiens
actcaaaaattatta

SEQ ID NO: 1718682 - DNA, 15 bp, Homo sapiens
ctcaaaaattattaa

SEQ ID NO: 1718683 - DNA, 15 bp, Homo sapiens
tcaaaaattattaat

SEQ ID NO: 1718684 - DNA, 15 bp, Homo sapiens
caaaaattattaatt

SEQ ID NO: 1718685 - DNA, 15 bp, Homo sapiens
aaaaattattaatta

SEQ ID NO: 1718686 - DNA, 15 bp, Homo sapiens
aaaattattaattat

SEQ ID NO: 1718687 - DNA, 15 bp, Homo sapiens
aaattattaattatt

SEQ ID NO: 1718688 - DNA, 15 bp, Homo sapiens
aattattaattattc

SEQ ID NO: 1718689 - DNA, 15 bp, Homo sapiens
attattaattattct

SEQ ID NO: 1718690 - DNA, 15 bp, Homo sapiens
ttattaattattctt

SEQ ID NO: 1718691 - DNA, 15 bp, Homo sapiens
tattaattattcttc

SEQ ID NO: 1718692 - DNA, 15 bp, Homo sapiens
attaattattcttca

SEQ ID NO: 1718693 - DNA, 15 bp, Homo sapiens
ttaattattcttcat

SEQ ID NO: 1718694 - DNA, 15 bp, Homo sapiens
taattattcttcata

SEQ ID NO: 1718695 - DNA, 15 bp, Homo sapiens
aattattcttcatac

SEQ ID NO: 1718696 - DNA, 15 bp, Homo sapiens
attattcttcatact

SEQ ID NO: 1718697 - DNA, 15 bp, Homo sapiens
ttattcttcatacta

SEQ ID NO: 1718698 - DNA, 15 bp, Homo sapiens
tattcttcatactat

SEQ ID NO: 1718699 - DNA, 15 bp, Homo sapiens
attcttcatactatt

SEQ ID NO: 1718700 - DNA, 15 bp, Homo sapiens
ttcttcatactattc

SEQ ID NO: 1718701 - DNA, 15 bp, Homo sapiens
tcttcatactattct

SEQ ID NO: 1718702 - DNA, 15 bp, Homo sapiens
cttcatactattctt

SEQ ID NO: 1718703 - DNA, 15 bp, Homo sapiens
ttcatactattctta

SEQ ID NO: 1718704 - DNA, 15 bp, Homo sapiens
tcatactattcttat

SEQ ID NO: 1718705 - DNA, 15 bp, Homo sapiens
catactattcttatt

SEQ ID NO: 1718706 - DNA, 15 bp, Homo sapiens
atactattcttatta

SEQ ID NO: 1718707 - DNA, 15 bp, Homo sapiens
tactattcttattag

SEQ ID NO: 1718708 - DNA, 15 bp, Homo sapiens
actattcttattagt

SEQ ID NO: 1718709 - DNA, 15 bp, Homo sapiens
ctattcttattagta

SEQ ID NO: 1718710 - DNA, 15 bp, Homo sapiens
tattcttattagtag

SEQ ID NO: 1718711 - DNA, 15 bp, Homo sapiens
attcttattagtaga

SEQ ID NO: 1718712 - DNA, 15 bp, Homo sapiens
ttcttattagtagat

SEQ ID NO: 1718713 - DNA, 15 bp, Homo sapiens
tcttattagtagata

SEQ ID NO: 1718714 - DNA, 15 bp, Homo sapiens
cttattagtagataa

SEQ ID NO: 1718715 - DNA, 15 bp, Homo sapiens
ttattagtagataac

SEQ ID NO: 1718716 - DNA, 15 bp, Homo sapiens
tattagtagataaca

SEQ ID NO: 1718717 - DNA, 15 bp, Homo sapiens
attagtagataacac

SEQ ID NO: 1718718 - DNA, 15 bp, Homo sapiens
ttagtagataacaca

SEQ ID NO: 1718719 - DNA, 15 bp, Homo sapiens
tagtagataacacat

SEQ ID NO: 1718720 - DNA, 15 bp, Homo sapiens
agtagataacacata

SEQ ID NO: 1718721 - DNA, 15 bp, Homo sapiens
gtagataacacatag

SEQ ID NO: 1718722 - DNA, 15 bp, Homo sapiens
tagataacacataga

SEQ ID NO: 1718723 - DNA, 15 bp, Homo sapiens
agataacacatagaa

SEQ ID NO: 1718724 - DNA, 15 bp, Homo sapiens
gataacacatagaaa

SEQ ID NO: 1718725 - DNA, 15 bp, Homo sapiens
ataacacatagaaat

SEQ ID NO: 1718726 - DNA, 15 bp, Homo sapiens
taacacatagaaatt

SEQ ID NO: 1718727 - DNA, 15 bp, Homo sapiens
aacacatagaaatta

SEQ ID NO: 1718728 - DNA, 15 bp, Homo sapiens
acacatagaaattag

SEQ ID NO: 1718729 - DNA, 15 bp, Homo sapiens
cacatagaaattaga

SEQ ID NO: 1718730 - DNA, 15 bp, Homo sapiens
acatagaaattagat

SEQ ID NO: 1718731 - DNA, 15 bp, Homo sapiens
catagaaattagatg

SEQ ID NO: 1718732 - DNA, 15 bp, Homo sapiens
atagaaattagatga

SEQ ID NO: 1718733 - DNA, 15 bp, Homo sapiens
tagaaattagatgaa

SEQ ID NO: 1718734 - DNA, 15 bp, Homo sapiens
agaaattagatgaat

SEQ ID NO: 1718735 - DNA, 15 bp, Homo sapiens
gaaattagatgaatg

SEQ ID NO: 1718736 - DNA, 15 bp, Homo sapiens
aaattagatgaatga

SEQ ID NO: 1718737 - DNA, 15 bp, Homo sapiens
aattagatgaatgaa

SEQ ID NO: 1718738 - DNA, 15 bp, Homo sapiens
attagatgaatgaaa

SEQ ID NO: 1718739 - DNA, 15 bp, Homo sapiens
ttagatgaatgaaaa

SEQ ID NO: 1718740 - DNA, 15 bp, Homo sapiens
tagatgaatgaaaat

SEQ ID NO: 1718741 - DNA, 15 bp, Homo sapiens
agatgaatgaaaatg

SEQ ID NO: 1718742 - DNA, 15 bp, Homo sapiens
gatgaatgaaaatga

SEQ ID NO: 1718743 - DNA, 15 bp, Homo sapiens
atgaatgaaaatgaa

SEQ ID NO: 1718744 - DNA, 15 bp, Homo sapiens
tgaatgaaaatgaat

SEQ ID NO: 1718745 - DNA, 15 bp, Homo sapiens
gaatgaaaatgaatt

SEQ ID NO: 1718746 - DNA, 15 bp, Homo sapiens
aatgaaaatgaatta

SEQ ID NO: 1718747 - DNA, 15 bp, Homo sapiens
atgaaaatgaattag

SEQ ID NO: 1718748 - DNA, 15 bp, Homo sapiens
tgaaaatgaattagc

SEQ ID NO: 1718749 - DNA, 15 bp, Homo sapiens
gaaaatgaattagcc

SEQ ID NO: 1718750 - DNA, 15 bp, Homo sapiens
aaaatgaattagcca

SEQ ID NO: 1718751 - DNA, 15 bp, Homo sapiens
aaatgaattagccaa

SEQ ID NO: 1718752 - DNA, 15 bp, Homo sapiens
aatgaattagccaac

SEQ ID NO: 1718753 - DNA, 15 bp, Homo sapiens
atgaattagccaaca

SEQ ID NO: 1718754 - DNA, 15 bp, Homo sapiens
tgaattagccaacaa

SEQ ID NO: 1718755 - DNA, 15 bp, Homo sapiens
gaattagccaacaag

SEQ ID NO: 1718756 - DNA, 15 bp, Homo sapiens
aattagccaacaaga

SEQ ID NO: 1718757 - DNA, 15 bp, Homo sapiens
attagccaacaagaa

SEQ ID NO: 1718758 - DNA, 15 bp, Homo sapiens
ttagccaacaagaat

SEQ ID NO: 1718759 - DNA, 15 bp, Homo sapiens
tagccaacaagaatt

SEQ ID NO: 1718760 - DNA, 15 bp, Homo sapiens
agccaacaagaattt

SEQ ID NO: 1718761 - DNA, 15 bp, Homo sapiens
gccaacaagaattta

SEQ ID NO: 1718762 - DNA, 15 bp, Homo sapiens
ccaacaagaatttat

SEQ ID NO: 1718763 - DNA, 15 bp, Homo sapiens
caacaagaatttatt

SEQ ID NO: 1718764 - DNA, 15 bp, Homo sapiens
aacaagaatttatta

SEQ ID NO: 1718765 - DNA, 15 bp, Homo sapiens
acaagaatttattaa

SEQ ID NO: 1718766 - DNA, 15 bp, Homo sapiens
caagaatttattaaa

SEQ ID NO: 1718767 - DNA, 15 bp, Homo sapiens
aagaatttattaaat

SEQ ID NO: 1718768 - DNA, 15 bp, Homo sapiens
agaatttattaaatg

SEQ ID NO: 1718769 - DNA, 15 bp, Homo sapiens
gaatttattaaatgc

SEQ ID NO: 1718770 - DNA, 15 bp, Homo sapiens
aatttattaaatgct

SEQ ID NO: 1718771 - DNA, 15 bp, Homo sapiens
atttattaaatgctt

SEQ ID NO: 1718772 - DNA, 15 bp, Homo sapiens
tttattaaatgcttg

SEQ ID NO: 1718773 - DNA, 15 bp, Homo sapiens
ttattaaatgcttgt

SEQ ID NO: 1718774 - DNA, 15 bp, Homo sapiens
tattaaatgcttgtc

SEQ ID NO: 1718775 - DNA, 15 bp, Homo sapiens
attaaatgcttgtct

SEQ ID NO: 1718776 - DNA, 15 bp, Homo sapiens
ttaaatgcttgtctt

SEQ ID NO: 1718777 - DNA, 15 bp, Homo sapiens
taaatgcttgtcttt

SEQ ID NO: 1718778 - DNA, 15 bp, Homo sapiens
aaatgcttgtctttg

SEQ ID NO: 1718779 - DNA, 15 bp, Homo sapiens
aatgcttgtctttgt

SEQ ID NO: 1718780 - DNA, 15 bp, Homo sapiens
atgcttgtctttgtt

SEQ ID NO: 1718781 - DNA, 15 bp, Homo sapiens
tgcttgtctttgtta

SEQ ID NO: 1718782 - DNA, 15 bp, Homo sapiens
gcttgtctttgttaa

SEQ ID NO: 1718783 - DNA, 15 bp, Homo sapiens
cttgtctttgttaag

SEQ ID NO: 1718784 - DNA, 15 bp, Homo sapiens
ttgtctttgttaagg

SEQ ID NO: 1718785 - DNA, 15 bp, Homo sapiens
tgtctttgttaaggg

SEQ ID NO: 1718786 - DNA, 15 bp, Homo sapiens
gtctttgttaagggg

SEQ ID NO: 1718787 - DNA, 15 bp, Homo sapiens
tctttgttaagggga

SEQ ID NO: 1718788 - DNA, 15 bp, Homo sapiens
ctttgttaaggggaa

SEQ ID NO: 1718789 - DNA, 15 bp, Homo sapiens
tttgttaaggggaaa

SEQ ID NO: 1718790 - DNA, 15 bp, Homo sapiens
ttgttaaggggaaag

SEQ ID NO: 1718791 - DNA, 15 bp, Homo sapiens
tgttaaggggaaagg

SEQ ID NO: 1718792 - DNA, 15 bp, Homo sapiens
gttaaggggaaagga

SEQ ID NO: 1718793 - DNA, 15 bp, Homo sapiens
ttaaggggaaaggac

SEQ ID NO: 1718794 - DNA, 15 bp, Homo sapiens
taaggggaaaggaca

SEQ ID NO: 1718795 - DNA, 15 bp, Homo sapiens
aaggggaaaggacaa

SEQ ID NO: 1718796 - DNA, 15 bp, Homo sapiens
aggggaaaggacaaa

SEQ ID NO: 1718797 - DNA, 15 bp, Homo sapiens
ggggaaaggacaaaa

SEQ ID NO: 1718798 - DNA, 15 bp, Homo sapiens
gggaaaggacaaaaa

SEQ ID NO: 1718799 - DNA, 15 bp, Homo sapiens
ggaaaggacaaaaat

SEQ ID NO: 1718800 - DNA, 15 bp, Homo sapiens
gaaaggacaaaaata

SEQ ID NO: 1718801 - DNA, 15 bp, Homo sapiens
aaaggacaaaaataa

SEQ ID NO: 1718802 - DNA, 15 bp, Homo sapiens
aaggacaaaaataag

SEQ ID NO: 1718803 - DNA, 15 bp, Homo sapiens
aggacaaaaataagc

SEQ ID NO: 1718804 - DNA, 15 bp, Homo sapiens
ggacaaaaataagca

SEQ ID NO: 1718805 - DNA, 15 bp, Homo sapiens
gacaaaaataagcag

SEQ ID NO: 1718806 - DNA, 15 bp, Homo sapiens
acaaaaataagcagt

SEQ ID NO: 1718807 - DNA, 15 bp, Homo sapiens
caaaaataagcagtc

SEQ ID NO: 1718808 - DNA, 15 bp, Homo sapiens
aaaaataagcagtcg

SEQ ID NO: 1718809 - DNA, 15 bp, Homo sapiens
aaaataagcagtcgc

SEQ ID NO: 1718810 - DNA, 15 bp, Homo sapiens
aaataagcagtcgca

SEQ ID NO: 1718811 - DNA, 15 bp, Homo sapiens
aataagcagtcgcat

SEQ ID NO: 1718812 - DNA, 15 bp, Homo sapiens
ataagcagtcgcatc

SEQ ID NO: 1718813 - DNA, 15 bp, Homo sapiens
taagcagtcgcatca

SEQ ID NO: 1718814 - DNA, 15 bp, Homo sapiens
aagcagtcgcatcat

SEQ ID NO: 1718815 - DNA, 15 bp, Homo sapiens
agcagtcgcatcatg

SEQ ID NO: 1718816 - DNA, 15 bp, Homo sapiens
gcagtcgcatcatgt

SEQ ID NO: 1718817 - DNA, 15 bp, Homo sapiens
cagtcgcatcatgta

SEQ ID NO: 1718818 - DNA, 15 bp, Homo sapiens
agtcgcatcatgtaa

SEQ ID NO: 1718819 - DNA, 15 bp, Homo sapiens
gtcgcatcatgtaag

SEQ ID NO: 1718820 - DNA, 15 bp, Homo sapiens
tcgcatcatgtaaga

SEQ ID NO: 1718821 - DNA, 15 bp, Homo sapiens
cgcatcatgtaagat

SEQ ID NO: 1718822 - DNA, 15 bp, Homo sapiens
gcatcatgtaagatg

SEQ ID NO: 1718823 - DNA, 15 bp, Homo sapiens
catcatgtaagatgt

SEQ ID NO: 1718824 - DNA, 15 bp, Homo sapiens
atcatgtaagatgtg

SEQ ID NO: 1718825 - DNA, 15 bp, Homo sapiens
tcatgtaagatgtgc

SEQ ID NO: 1718826 - DNA, 15 bp, Homo sapiens
catgtaagatgtgct

SEQ ID NO: 1718827 - DNA, 15 bp, Homo sapiens
atgtaagatgtgcta

SEQ ID NO: 1718828 - DNA, 15 bp, Homo sapiens
tgtaagatgtgctag

SEQ ID NO: 1718829 - DNA, 15 bp, Homo sapiens
gtaagatgtgctagt

SEQ ID NO: 1718830 - DNA, 15 bp, Homo sapiens
taagatgtgctagta

SEQ ID NO: 1718831 - DNA, 15 bp, Homo sapiens
aagatgtgctagtag

SEQ ID NO: 1718832 - DNA, 15 bp, Homo sapiens
agatgtgctagtagg

SEQ ID NO: 1718833 - DNA, 15 bp, Homo sapiens
gatgtgctagtaggt

SEQ ID NO: 1718834 - DNA, 15 bp, Homo sapiens
atgtgctagtaggta

SEQ ID NO: 1718835 - DNA, 15 bp, Homo sapiens
tgtgctagtaggtag

SEQ ID NO: 1718836 - DNA, 15 bp, Homo sapiens
gtgctagtaggtaga

SEQ ID NO: 1718837 - DNA, 15 bp, Homo sapiens
tgctagtaggtagag

SEQ ID NO: 1718838 - DNA, 15 bp, Homo sapiens
gctagtaggtagaga

SEQ ID NO: 1718839 - DNA, 15 bp, Homo sapiens
ctagtaggtagagag

SEQ ID NO: 1718840 - DNA, 15 bp, Homo sapiens
tagtaggtagagaga

SEQ ID NO: 1718841 - DNA, 15 bp, Homo sapiens
agtaggtagagagat

SEQ ID NO: 1718842 - DNA, 15 bp, Homo sapiens
gtaggtagagagata

SEQ ID NO: 1718843 - DNA, 15 bp, Homo sapiens
taggtagagagatat

SEQ ID NO: 1718844 - DNA, 15 bp, Homo sapiens
aggtagagagatata

SEQ ID NO: 1718845 - DNA, 15 bp, Homo sapiens
ggtagagagatatat

SEQ ID NO: 1718846 - DNA, 15 bp, Homo sapiens
gtagagagatatatg

SEQ ID NO: 1718847 - DNA, 15 bp, Homo sapiens
tagagagatatatga

SEQ ID NO: 1718848 - DNA, 15 bp, Homo sapiens
agagagatatatgaa

SEQ ID NO: 1718849 - DNA, 15 bp, Homo sapiens
gagagatatatgaaa

SEQ ID NO: 1718850 - DNA, 15 bp, Homo sapiens
agagatatatgaaac

SEQ ID NO: 1718851 - DNA, 15 bp, Homo sapiens
gagatatatgaaaca

SEQ ID NO: 1718852 - DNA, 15 bp, Homo sapiens
agatatatgaaacat

SEQ ID NO: 1718853 - DNA, 15 bp, Homo sapiens
gatatatgaaacatt

SEQ ID NO: 1718854 - DNA, 15 bp, Homo sapiens
atatatgaaacattg

SEQ ID NO: 1718855 - DNA, 15 bp, Homo sapiens
tatatgaaacattga

SEQ ID NO: 1718856 - DNA, 15 bp, Homo sapiens
atatgaaacattgat

SEQ ID NO: 1718857 - DNA, 15 bp, Homo sapiens
tatgaaacattgata

SEQ ID NO: 1718858 - DNA, 15 bp, Homo sapiens
atgaaacattgataa

SEQ ID NO: 1718859 - DNA, 15 bp, Homo sapiens
tgaaacattgataag

SEQ ID NO: 1718860 - DNA, 15 bp, Homo sapiens
gaaacattgataaga

SEQ ID NO: 1718861 - DNA, 15 bp, Homo sapiens
aaacattgataagag

SEQ ID NO: 1718862 - DNA, 15 bp, Homo sapiens
aacattgataagaga

SEQ ID NO: 1718863 - DNA, 15 bp, Homo sapiens
acattgataagagaa

SEQ ID NO: 1718864 - DNA, 15 bp, Homo sapiens
cattgataagagaag

SEQ ID NO: 1718865 - DNA, 15 bp, Homo sapiens
attgataagagaaga

SEQ ID NO: 1718866 - DNA, 15 bp, Homo sapiens
ttgataagagaagac

SEQ ID NO: 1718867 - DNA, 15 bp, Homo sapiens
tgataagagaagact

SEQ ID NO: 1718868 - DNA, 15 bp, Homo sapiens
gataagagaagacta

SEQ ID NO: 1718869 - DNA, 15 bp, Homo sapiens
ataagagaagactac

SEQ ID NO: 1718870 - DNA, 15 bp, Homo sapiens
taagagaagactaca

SEQ ID NO: 1718871 - DNA, 15 bp, Homo sapiens
aagagaagactacag

SEQ ID NO: 1718872 - DNA, 15 bp, Homo sapiens
agagaagactacagt

SEQ ID NO: 1718873 - DNA, 15 bp, Homo sapiens
gagaagactacagtt

SEQ ID NO: 1718874 - DNA, 15 bp, Homo sapiens
agaagactacagttt

SEQ ID NO: 1718875 - DNA, 15 bp, Homo sapiens
gaagactacagttta

SEQ ID NO: 1718876 - DNA, 15 bp, Homo sapiens
aagactacagtttaa

SEQ ID NO: 1718877 - DNA, 15 bp, Homo sapiens
agactacagtttaac

SEQ ID NO: 1718878 - DNA, 15 bp, Homo sapiens
gactacagtttaaca

SEQ ID NO: 1718879 - DNA, 15 bp, Homo sapiens
actacagtttaacaa

SEQ ID NO: 1718880 - DNA, 15 bp, Homo sapiens
ctacagtttaacaaa

SEQ ID NO: 1718881 - DNA, 15 bp, Homo sapiens
tacagtttaacaaag

SEQ ID NO: 1718882 - DNA, 15 bp, Homo sapiens
acagtttaacaaagt

SEQ ID NO: 1718883 - DNA, 15 bp, Homo sapiens
cagtttaacaaagtc

SEQ ID NO: 1718884 - DNA, 15 bp, Homo sapiens
agtttaacaaagtca

SEQ ID NO: 1718885 - DNA, 15 bp, Homo sapiens
gtttaacaaagtcac

SEQ ID NO: 1718886 - DNA, 15 bp, Homo sapiens
tttaacaaagtcact

SEQ ID NO: 1718887 - DNA, 15 bp, Homo sapiens
ttaacaaagtcactg

SEQ ID NO: 1718888 - DNA, 15 bp, Homo sapiens
taacaaagtcactgg

SEQ ID NO: 1718889 - DNA, 15 bp, Homo sapiens
aacaaagtcactggc

SEQ ID NO: 1718890 - DNA, 15 bp, Homo sapiens
acaaagtcactggcg

SEQ ID NO: 1718891 - DNA, 15 bp, Homo sapiens
caaagtcactggcgt

SEQ ID NO: 1718892 - DNA, 15 bp, Homo sapiens
aaagtcactggcgtt

SEQ ID NO: 1718893 - DNA, 15 bp, Homo sapiens
aagtcactggcgttg

SEQ ID NO: 1718894 - DNA, 15 bp, Homo sapiens
agtcactggcgttga

SEQ ID NO: 1718895 - DNA, 15 bp, Homo sapiens
gtcactggcgttgaa

SEQ ID NO: 1718896 - DNA, 15 bp, Homo sapiens
tcactggcgttgaat

SEQ ID NO: 1718897 - DNA, 15 bp, Homo sapiens
cactggcgttgaatt

SEQ ID NO: 1718898 - DNA, 15 bp, Homo sapiens
actggcgttgaattg

SEQ ID NO: 1718899 - DNA, 15 bp, Homo sapiens
ctggcgttgaattgt

SEQ ID NO: 1718900 - DNA, 15 bp, Homo sapiens
tggcgttgaattgta

SEQ ID NO: 1718901 - DNA, 15 bp, Homo sapiens
ggcgttgaattgtat

SEQ ID NO: 1718902 - DNA, 15 bp, Homo sapiens
gcgttgaattgtata

SEQ ID NO: 1718903 - DNA, 15 bp, Homo sapiens
cgttgaattgtataa

SEQ ID NO: 1718904 - DNA, 15 bp, Homo sapiens
gttgaattgtataat

SEQ ID NO: 1718905 - DNA, 15 bp, Homo sapiens
ttgaattgtataata

SEQ ID NO: 1718906 - DNA, 15 bp, Homo sapiens
tgaattgtataatat

SEQ ID NO: 1718907 - DNA, 15 bp, Homo sapiens
gaattgtataatatt

SEQ ID NO: 1718908 - DNA, 15 bp, Homo sapiens
aattgtataatatta

SEQ ID NO: 1718909 - DNA, 15 bp, Homo sapiens
attgtataatattat

SEQ ID NO: 1718910 - DNA, 15 bp, Homo sapiens
ttgtataatattatc

SEQ ID NO: 1718911 - DNA, 15 bp, Homo sapiens
tgtataatattatct

SEQ ID NO: 1718912 - DNA, 15 bp, Homo sapiens
gtataatattatcta

SEQ ID NO: 1718913 - DNA, 15 bp, Homo sapiens
tataatattatctat

SEQ ID NO: 1718914 - DNA, 15 bp, Homo sapiens
ataatattatctatg

SEQ ID NO: 1718915 - DNA, 15 bp, Homo sapiens
taatattatctatgg

SEQ ID NO: 1718916 - DNA, 15 bp, Homo sapiens
aatattatctatggg

SEQ ID NO: 1718917 - DNA, 15 bp, Homo sapiens
atattatctatgggt

SEQ ID NO: 1718918 - DNA, 15 bp, Homo sapiens
tattatctatgggtt

SEQ ID NO: 1718919 - DNA, 15 bp, Homo sapiens
attatctatgggttt

SEQ ID NO: 1718920 - DNA, 15 bp, Homo sapiens
ttatctatgggtttt

SEQ ID NO: 1718921 - DNA, 15 bp, Homo sapiens
tatctatgggttttt

SEQ ID NO: 1718922 - DNA, 15 bp, Homo sapiens
atctatgggttttta

SEQ ID NO: 1718923 - DNA, 15 bp, Homo sapiens
tctatgggtttttat

SEQ ID NO: 1718924 - DNA, 15 bp, Homo sapiens
ctatgggtttttatc

SEQ ID NO: 1718925 - DNA, 15 bp, Homo sapiens
tatgggtttttatct

SEQ ID NO: 1718926 - DNA, 15 bp, Homo sapiens
atgggtttttatctt

SEQ ID NO: 1718927 - DNA, 15 bp, Homo sapiens
tgggtttttatcttt

SEQ ID NO: 1718928 - DNA, 15 bp, Homo sapiens
gggtttttatctttt

SEQ ID NO: 1718929 - DNA, 15 bp, Homo sapiens
ggtttttatcttttt

SEQ ID NO: 1718930 - DNA, 15 bp, Homo sapiens
gtttttatctttttg

SEQ ID NO: 1718931 - DNA, 15 bp, Homo sapiens
tttttatctttttgt

SEQ ID NO: 1718932 - DNA, 15 bp, Homo sapiens
ttttatctttttgtt

SEQ ID NO: 1718933 - DNA, 15 bp, Homo sapiens
tttatctttttgttg

SEQ ID NO: 1718934 - DNA, 15 bp, Homo sapiens
ttatctttttgttgt

SEQ ID NO: 1718935 - DNA, 15 bp, Homo sapiens
tatctttttgttgtt

SEQ ID NO: 1718936 - DNA, 15 bp, Homo sapiens
atctttttgttgtta

SEQ ID NO: 1718937 - DNA, 15 bp, Homo sapiens
tctttttgttgttat

SEQ ID NO: 1718938 - DNA, 15 bp, Homo sapiens
ctttttgttgttatc

SEQ ID NO: 1718939 - DNA, 15 bp, Homo sapiens
tttttgttgttatct

SEQ ID NO: 1718940 - DNA, 15 bp, Homo sapiens
ttttgttgttatctt

SEQ ID NO: 1718941 - DNA, 15 bp, Homo sapiens
tttgttgttatcttt

SEQ ID NO: 1718942 - DNA, 15 bp, Homo sapiens
ttgttgttatcttta

SEQ ID NO: 1718943 - DNA, 15 bp, Homo sapiens
tgttgttatctttat

SEQ ID NO: 1718944 - DNA, 15 bp, Homo sapiens
gttgttatctttatc

SEQ ID NO: 1718945 - DNA, 15 bp, Homo sapiens
ttgttatctttatcc

SEQ ID NO: 1718946 - DNA, 15 bp, Homo sapiens
tgttatctttatcct

SEQ ID NO: 1718947 - DNA, 15 bp, Homo sapiens
gttatctttatccta

SEQ ID NO: 1718948 - DNA, 15 bp, Homo sapiens
ttatctttatcctat

SEQ ID NO: 1718949 - DNA, 15 bp, Homo sapiens
tatctttatcctatt

SEQ ID NO: 1718950 - DNA, 15 bp, Homo sapiens
atctttatcctattt

SEQ ID NO: 1718951 - DNA, 15 bp, Homo sapiens
tctttatcctatttt

SEQ ID NO: 1718952 - DNA, 15 bp, Homo sapiens
ctttatcctattttc

SEQ ID NO: 1718953 - DNA, 15 bp, Homo sapiens
tttatcctattttcc

SEQ ID NO: 1718954 - DNA, 15 bp, Homo sapiens
ttatcctattttccc

SEQ ID NO: 1718955 - DNA, 15 bp, Homo sapiens
tatcctattttccca

SEQ ID NO: 1718956 - DNA, 15 bp, Homo sapiens
atcctattttcccaa

SEQ ID NO: 1718957 - DNA, 15 bp, Homo sapiens
tcctattttcccaaa

SEQ ID NO: 1718958 - DNA, 15 bp, Homo sapiens
cctattttcccaaac

SEQ ID NO: 1718959 - DNA, 15 bp, Homo sapiens
ctattttcccaaaca

SEQ ID NO: 1718960 - DNA, 15 bp, Homo sapiens
tattttcccaaacag

SEQ ID NO: 1718961 - DNA, 15 bp, Homo sapiens
attttcccaaacagc

SEQ ID NO: 1718962 - DNA, 15 bp, Homo sapiens
ttttcccaaacagct

SEQ ID NO: 1718963 - DNA, 15 bp, Homo sapiens
tttcccaaacagctt

SEQ ID NO: 1718964 - DNA, 15 bp, Homo sapiens
ttcccaaacagcttt

SEQ ID NO: 1718965 - DNA, 15 bp, Homo sapiens
tcccaaacagcttta

SEQ ID NO: 1718966 - DNA, 15 bp, Homo sapiens
cccaaacagctttag

SEQ ID NO: 1718967 - DNA, 15 bp, Homo sapiens
ccaaacagctttagc

SEQ ID NO: 1718968 - DNA, 15 bp, Homo sapiens
caaacagctttagct

SEQ ID NO: 1718969 - DNA, 15 bp, Homo sapiens
aaacagctttagcta

SEQ ID NO: 1718970 - DNA, 15 bp, Homo sapiens
aacagctttagctat

SEQ ID NO: 1718971 - DNA, 15 bp, Homo sapiens
acagctttagctatt

SEQ ID NO: 1718972 - DNA, 15 bp, Homo sapiens
cagctttagctatta

SEQ ID NO: 1718973 - DNA, 15 bp, Homo sapiens
agctttagctattac

SEQ ID NO: 1718974 - DNA, 15 bp, Homo sapiens
gctttagctattaca

SEQ ID NO: 1718975 - DNA, 15 bp, Homo sapiens
ctttagctattacat

SEQ ID NO: 1718976 - DNA, 15 bp, Homo sapiens
tttagctattacatt

SEQ ID NO: 1718977 - DNA, 15 bp, Homo sapiens
ttagctattacattt

SEQ ID NO: 1718978 - DNA, 15 bp, Homo sapiens
tagctattacattta

SEQ ID NO: 1718979 - DNA, 15 bp, Homo sapiens
agctattacatttac

SEQ ID NO: 1718980 - DNA, 15 bp, Homo sapiens
gctattacatttact

SEQ ID NO: 1718981 - DNA, 15 bp, Homo sapiens
ctattacatttactt

SEQ ID NO: 1718982 - DNA, 15 bp, Homo sapiens
tattacatttacttt

SEQ ID NO: 1718983 - DNA, 15 bp, Homo sapiens
attacatttactttc

SEQ ID NO: 1718984 - DNA, 15 bp, Homo sapiens
ttacatttactttcc

SEQ ID NO: 1718985 - DNA, 15 bp, Homo sapiens
tacatttactttcct

SEQ ID NO: 1718986 - DNA, 15 bp, Homo sapiens
acatttactttcctt

SEQ ID NO: 1718987 - DNA, 15 bp, Homo sapiens
catttactttccttc

SEQ ID NO: 1718988 - DNA, 15 bp, Homo sapiens
atttactttccttca

SEQ ID NO: 1718989 - DNA, 15 bp, Homo sapiens
tttactttccttcac

SEQ ID NO: 1718990 - DNA, 15 bp, Homo sapiens
ttactttccttcaca

SEQ ID NO: 1718991 - DNA, 15 bp, Homo sapiens
tactttccttcacag

SEQ ID NO: 1718992 - DNA, 15 bp, Homo sapiens
actttccttcacaga

SEQ ID NO: 1718993 - DNA, 15 bp, Homo sapiens
ctttccttcacagaa

SEQ ID NO: 1718994 - DNA, 15 bp, Homo sapiens
tttccttcacagaag

SEQ ID NO: 1718995 - DNA, 15 bp, Homo sapiens
ttccttcacagaagt

SEQ ID NO: 1718996 - DNA, 15 bp, Homo sapiens
tccttcacagaagtg

SEQ ID NO: 1718997 - DNA, 15 bp, Homo sapiens
ccttcacagaagtgt

SEQ ID NO: 1718998 - DNA, 15 bp, Homo sapiens
cttcacagaagtgtt

SEQ ID NO: 1718999 - DNA, 15 bp, Homo sapiens
ttcacagaagtgttt

SEQ ID NO: 1719000 - DNA, 15 bp, Homo sapiens
tcacagaagtgtttt

SEQ ID NO: 1719001 - DNA, 15 bp, Homo sapiens
cacagaagtgttttg

SEQ ID NO: 1719002 - DNA, 15 bp, Homo sapiens
acagaagtgttttgc

SEQ ID NO: 1719003 - DNA, 15 bp, Homo sapiens
cagaagtgttttgct

SEQ ID NO: 1719004 - DNA, 15 bp, Homo sapiens
agaagtgttttgctg

SEQ ID NO: 1719005 - DNA, 15 bp, Homo sapiens
gaagtgttttgctgc

SEQ ID NO: 1719006 - DNA, 15 bp, Homo sapiens
aagtgttttgctgct

SEQ ID NO: 1719007 - DNA, 15 bp, Homo sapiens
agtgttttgctgctt

SEQ ID NO: 1719008 - DNA, 15 bp, Homo sapiens
gtgttttgctgcttt

SEQ ID NO: 1719009 - DNA, 15 bp, Homo sapiens
tgttttgctgctttg

SEQ ID NO: 1719010 - DNA, 15 bp, Homo sapiens
gttttgctgctttga

SEQ ID NO: 1719011 - DNA, 15 bp, Homo sapiens
ttttgctgctttgaa

SEQ ID NO: 1719012 - DNA, 15 bp, Homo sapiens
tttgctgctttgaag

SEQ ID NO: 1719013 - DNA, 15 bp, Homo sapiens
ttgctgctttgaagt

SEQ ID NO: 1719014 - DNA, 15 bp, Homo sapiens
tgctgctttgaagta

SEQ ID NO: 1719015 - DNA, 15 bp, Homo sapiens
gctgctttgaagtat

SEQ ID NO: 1719016 - DNA, 15 bp, Homo sapiens
ctgctttgaagtata

SEQ ID NO: 1719017 - DNA, 15 bp, Homo sapiens
tgctttgaagtatat

SEQ ID NO: 1719018 - DNA, 15 bp, Homo sapiens
gctttgaagtatatt

SEQ ID NO: 1719019 - DNA, 15 bp, Homo sapiens
ctttgaagtatattt

SEQ ID NO: 1719020 - DNA, 15 bp, Homo sapiens
ttgaagtatatttga

SEQ ID NO: 1719021 - DNA, 15 bp, Homo sapiens
tgaagtatatttgac

SEQ ID NO: 1719022 - DNA, 15 bp, Homo sapiens
gaagtatatttgact

SEQ ID NO: 1719023 - DNA, 15 bp, Homo sapiens
aagtatatttgactt

SEQ ID NO: 1719024 - DNA, 15 bp, Homo sapiens
agtatatttgactta

SEQ ID NO: 1719025 - DNA, 15 bp, Homo sapiens
gtatatttgacttac

SEQ ID NO: 1719026 - DNA, 15 bp, Homo sapiens
tatatttgacttacc

SEQ ID NO: 1719027 - DNA, 15 bp, Homo sapiens
atatttgacttacca

SEQ ID NO: 1719028 - DNA, 15 bp, Homo sapiens
tatttgacttaccat

SEQ ID NO: 1719029 - DNA, 15 bp, Homo sapiens
atttgacttaccatg

SEQ ID NO: 1719030 - DNA, 15 bp, Homo sapiens
tttgacttaccatgc

SEQ ID NO: 1719031 - DNA, 15 bp, Homo sapiens
ttgacttaccatgca

SEQ ID NO: 1719032 - DNA, 15 bp, Homo sapiens
tgacttaccatgcaa

SEQ ID NO: 1719033 - DNA, 15 bp, Homo sapiens
gacttaccatgcaag

SEQ ID NO: 1719034 - DNA, 15 bp, Homo sapiens
acttaccatgcaagc

SEQ ID NO: 1719035 - DNA, 15 bp, Homo sapiens
cttaccatgcaagca

SEQ ID NO: 1719036 - DNA, 15 bp, Homo sapiens
ttaccatgcaagcaa

SEQ ID NO: 1719037 - DNA, 15 bp, Homo sapiens
taccatgcaagcaaa

SEQ ID NO: 1719038 - DNA, 15 bp, Homo sapiens
accatgcaagcaaat

SEQ ID NO: 1719039 - DNA, 15 bp, Homo sapiens
ccatgcaagcaaata

SEQ ID NO: 1719040 - DNA, 15 bp, Homo sapiens
catgcaagcaaatat

SEQ ID NO: 1719041 - DNA, 15 bp, Homo sapiens
atgcaagcaaatatt

SEQ ID NO: 1719042 - DNA, 15 bp, Homo sapiens
tgcaagcaaatattt

SEQ ID NO: 1719043 - DNA, 15 bp, Homo sapiens
gcaagcaaatatttt

SEQ ID NO: 1719044 - DNA, 15 bp, Homo sapiens
caagcaaatattttt

SEQ ID NO: 1719045 - DNA, 15 bp, Homo sapiens
aagcaaatatttttc

SEQ ID NO: 1719046 - DNA, 15 bp, Homo sapiens
agcaaatatttttca

SEQ ID NO: 1719047 - DNA, 15 bp, Homo sapiens
gcaaatatttttcac

SEQ ID NO: 1719048 - DNA, 15 bp, Homo sapiens
caaatatttttcact

SEQ ID NO: 1719049 - DNA, 15 bp, Homo sapiens
aaatatttttcactg

SEQ ID NO: 1719050 - DNA, 15 bp, Homo sapiens
aatatttttcactgt

SEQ ID NO: 1719051 - DNA, 15 bp, Homo sapiens
atatttttcactgtg

SEQ ID NO: 1719052 - DNA, 15 bp, Homo sapiens
tatttttcactgtgt

SEQ ID NO: 1719053 - DNA, 15 bp, Homo sapiens
atttttcactgtgtg

SEQ ID NO: 1719054 - DNA, 15 bp, Homo sapiens
tttttcactgtgtgg

SEQ ID NO: 1719055 - DNA, 15 bp, Homo sapiens
ttttcactgtgtggt

SEQ ID NO: 1719056 - DNA, 15 bp, Homo sapiens
tttcactgtgtggta

SEQ ID NO: 1719057 - DNA, 15 bp, Homo sapiens
ttcactgtgtggtat

SEQ ID NO: 1719058 - DNA, 15 bp, Homo sapiens
tcactgtgtggtatc

SEQ ID NO: 1719059 - DNA, 15 bp, Homo sapiens
cactgtgtggtatcc

SEQ ID NO: 1719060 - DNA, 15 bp, Homo sapiens
actgtgtggtatcct

SEQ ID NO: 1719061 - DNA, 15 bp, Homo sapiens
ctgtgtggtatcctt

SEQ ID NO: 1719062 - DNA, 15 bp, Homo sapiens
tgtgtggtatcctta

SEQ ID NO: 1719063 - DNA, 15 bp, Homo sapiens
gtgtggtatccttat

SEQ ID NO: 1719064 - DNA, 15 bp, Homo sapiens
tgtggtatccttatt

SEQ ID NO: 1719065 - DNA, 15 bp, Homo sapiens
gtggtatccttattt

SEQ ID NO: 1719066 - DNA, 15 bp, Homo sapiens
tggtatccttatttt

SEQ ID NO: 1719067 - DNA, 15 bp, Homo sapiens
ggtatccttattttg

SEQ ID NO: 1719068 - DNA, 15 bp, Homo sapiens
gtatccttattttgg

SEQ ID NO: 1719069 - DNA, 15 bp, Homo sapiens
tatccttattttgga

SEQ ID NO: 1719070 - DNA, 15 bp, Homo sapiens
atccttattttggaa

SEQ ID NO: 1719071 - DNA, 15 bp, Homo sapiens
tccttattttggaat

SEQ ID NO: 1719072 - DNA, 15 bp, Homo sapiens
ccttattttggaatg

SEQ ID NO: 1719073 - DNA, 15 bp, Homo sapiens
cttattttggaatga

SEQ ID NO: 1719074 - DNA, 15 bp, Homo sapiens
ttattttggaatgac

SEQ ID NO: 1719075 - DNA, 15 bp, Homo sapiens
tattttggaatgacc

SEQ ID NO: 1719076 - DNA, 15 bp, Homo sapiens
attttggaatgacca

SEQ ID NO: 1719077 - DNA, 15 bp, Homo sapiens
ttttggaatgaccat

SEQ ID NO: 1719078 - DNA, 15 bp, Homo sapiens
tttggaatgaccatg

SEQ ID NO: 1719079 - DNA, 15 bp, Homo sapiens
ttggaatgaccatga

SEQ ID NO: 1719080 - DNA, 15 bp, Homo sapiens
tggaatgaccatgaa

SEQ ID NO: 1719081 - DNA, 15 bp, Homo sapiens
ggaatgaccatgaaa

SEQ ID NO: 1719082 - DNA, 15 bp, Homo sapiens
gaatgaccatgaaaa

SEQ ID NO: 1719083 - DNA, 15 bp, Homo sapiens
aatgaccatgaaaaa

SEQ ID NO: 1719084 - DNA, 15 bp, Homo sapiens
atgaccatgaaaaag

SEQ ID NO: 1719085 - DNA, 15 bp, Homo sapiens
tgaccatgaaaaaga

SEQ ID NO: 1719086 - DNA, 15 bp, Homo sapiens
gaccatgaaaaagat

SEQ ID NO: 1719087 - DNA, 15 bp, Homo sapiens
accatgaaaaagata

SEQ ID NO: 1719088 - DNA, 15 bp, Homo sapiens
ccatgaaaaagataa

SEQ ID NO: 1719089 - DNA, 15 bp, Homo sapiens
catgaaaaagataat

SEQ ID NO: 1719090 - DNA, 15 bp, Homo sapiens
atgaaaaagataatc

SEQ ID NO: 1719091 - DNA, 15 bp, Homo sapiens
tgaaaaagataatca

SEQ ID NO: 1719092 - DNA, 15 bp, Homo sapiens
gaaaaagataatcat

SEQ ID NO: 1719093 - DNA, 15 bp, Homo sapiens
aaaaagataatcata

SEQ ID NO: 1719094 - DNA, 15 bp, Homo sapiens
aaaagataatcatat

SEQ ID NO: 1719095 - DNA, 15 bp, Homo sapiens
aaagataatcatatg

SEQ ID NO: 1719096 - DNA, 15 bp, Homo sapiens
aagataatcatatgt

SEQ ID NO: 1719097 - DNA, 15 bp, Homo sapiens
agataatcatatgtt

SEQ ID NO: 1719098 - DNA, 15 bp, Homo sapiens
gataatcatatgttt

SEQ ID NO: 1719099 - DNA, 15 bp, Homo sapiens
ataatcatatgttta

SEQ ID NO: 1719100 - DNA, 15 bp, Homo sapiens
taatcatatgtttaa

SEQ ID NO: 1719101 - DNA, 15 bp, Homo sapiens
aatcatatgtttaaa

SEQ ID NO: 1719102 - DNA, 15 bp, Homo sapiens
atcatatgtttaaat

SEQ ID NO: 1719103 - DNA, 15 bp, Homo sapiens
tcatatgtttaaatt

SEQ ID NO: 1719104 - DNA, 15 bp, Homo sapiens
catatgtttaaattt

SEQ ID NO: 1719105 - DNA, 15 bp, Homo sapiens
atatgtttaaatttg

SEQ ID NO: 1719106 - DNA, 15 bp, Homo sapiens
tatgtttaaatttga

SEQ ID NO: 1719107 - DNA, 15 bp, Homo sapiens
atgtttaaatttgaa

SEQ ID NO: 1719108 - DNA, 15 bp, Homo sapiens
tgtttaaatttgaag

SEQ ID NO: 1719109 - DNA, 15 bp, Homo sapiens
gtttaaatttgaagt

SEQ ID NO: 1719110 - DNA, 15 bp, Homo sapiens
tttaaatttgaagtg

SEQ ID NO: 1719111 - DNA, 15 bp, Homo sapiens
ttaaatttgaagtgt

SEQ ID NO: 1719112 - DNA, 15 bp, Homo sapiens
taaatttgaagtgta

SEQ ID NO: 1719113 - DNA, 15 bp, Homo sapiens
aaatttgaagtgtaa

SEQ ID NO: 1719114 - DNA, 15 bp, Homo sapiens
aatttgaagtgtaat

SEQ ID NO: 1719115 - DNA, 15 bp, Homo sapiens
atttgaagtgtaatg

SEQ ID NO: 1719116 - DNA, 15 bp, Homo sapiens
tttgaagtgtaatgt

SEQ ID NO: 1719117 - DNA, 15 bp, Homo sapiens
ttgaagtgtaatgtt

SEQ ID NO: 1719118 - DNA, 15 bp, Homo sapiens
tgaagtgtaatgttt

SEQ ID NO: 1719119 - DNA, 15 bp, Homo sapiens
gaagtgtaatgtttt

SEQ ID NO: 1719120 - DNA, 15 bp, Homo sapiens
aagtgtaatgttttt

SEQ ID NO: 1719121 - DNA, 15 bp, Homo sapiens
agtgtaatgtttttc

SEQ ID NO: 1719122 - DNA, 15 bp, Homo sapiens
gtgtaatgtttttct

SEQ ID NO: 1719123 - DNA, 15 bp, Homo sapiens
tgtaatgtttttcta

SEQ ID NO: 1719124 - DNA, 15 bp, Homo sapiens
gtaatgtttttctaa

SEQ ID NO: 1719125 - DNA, 15 bp, Homo sapiens
taatgtttttctaag

SEQ ID NO: 1719126 - DNA, 15 bp, Homo sapiens
aatgtttttctaaga

SEQ ID NO: 1719127 - DNA, 15 bp, Homo sapiens
atgtttttctaagat

SEQ ID NO: 1719128 - DNA, 15 bp, Homo sapiens
tgtttttctaagata

SEQ ID NO: 1719129 - DNA, 15 bp, Homo sapiens
gtttttctaagataa

SEQ ID NO: 1719130 - DNA, 15 bp, Homo sapiens
tttttctaagataaa

SEQ ID NO: 1719131 - DNA, 15 bp, Homo sapiens
ttttctaagataaaa

SEQ ID NO: 1719132 - DNA, 15 bp, Homo sapiens
tttctaagataaaat

SEQ ID NO: 1719133 - DNA, 15 bp, Homo sapiens
ttctaagataaaata

SEQ ID NO: 1719134 - DNA, 15 bp, Homo sapiens
tctaagataaaataa

SEQ ID NO: 1719135 - DNA, 15 bp, Homo sapiens
ctaagataaaataag

SEQ ID NO: 1719136 - DNA, 15 bp, Homo sapiens
taagataaaataaga

SEQ ID NO: 1719137 - DNA, 15 bp, Homo sapiens
aagataaaataagat

SEQ ID NO: 1719138 - DNA, 15 bp, Homo sapiens
agataaaataagatc

SEQ ID NO: 1719139 - DNA, 15 bp, Homo sapiens
gataaaataagatct

SEQ ID NO: 1719140 - DNA, 15 bp, Homo sapiens
ataaaataagatctt

SEQ ID NO: 1719141 - DNA, 15 bp, Homo sapiens
taaaataagatctta

SEQ ID NO: 1719142 - DNA, 15 bp, Homo sapiens
aaaataagatcttaa

SEQ ID NO: 1719143 - DNA, 15 bp, Homo sapiens
aaataagatcttaaa

SEQ ID NO: 1719144 - DNA, 15 bp, Homo sapiens
aataagatcttaaag

SEQ ID NO: 1719145 - DNA, 15 bp, Homo sapiens
ataagatcttaaagt

SEQ ID NO: 1719146 - DNA, 15 bp, Homo sapiens
taagatcttaaagta

SEQ ID NO: 1719147 - DNA, 15 bp, Homo sapiens
aagatcttaaagtat

SEQ ID NO: 1719148 - DNA, 15 bp, Homo sapiens
agatcttaaagtatt

SEQ ID NO: 1719149 - DNA, 15 bp, Homo sapiens
gatcttaaagtattt

SEQ ID NO: 1719150 - DNA, 15 bp, Homo sapiens
atcttaaagtattta

SEQ ID NO: 1719151 - DNA, 15 bp, Homo sapiens
tcttaaagtatttaa

SEQ ID NO: 1719152 - DNA, 15 bp, Homo sapiens
cttaaagtatttaat

SEQ ID NO: 1719153 - DNA, 15 bp, Homo sapiens
ttaaagtatttaata

SEQ ID NO: 1719154 - DNA, 15 bp, Homo sapiens
taaagtatttaataa

SEQ ID NO: 1719155 - DNA, 15 bp, Homo sapiens
aaagtatttaataat

SEQ ID NO: 1719156 - DNA, 15 bp, Homo sapiens
aagtatttaataatg

SEQ ID NO: 1719157 - DNA, 15 bp, Homo sapiens
agtatttaataatgt

SEQ ID NO: 1719158 - DNA, 15 bp, Homo sapiens
gtatttaataatgtt

SEQ ID NO: 1719159 - DNA, 15 bp, Homo sapiens
tatttaataatgttc

SEQ ID NO: 1719160 - DNA, 15 bp, Homo sapiens
atttaataatgttct

SEQ ID NO: 1719161 - DNA, 15 bp, Homo sapiens
tttaataatgttctt

SEQ ID NO: 1719162 - DNA, 15 bp, Homo sapiens
ttaataatgttcttt

SEQ ID NO: 1719163 - DNA, 15 bp, Homo sapiens
taataatgttctttt

SEQ ID NO: 1719164 - DNA, 15 bp, Homo sapiens
aataatgttcttttt

SEQ ID NO: 1719165 - DNA, 15 bp, Homo sapiens
ataatgttctttttc

SEQ ID NO: 1719166 - DNA, 15 bp, Homo sapiens
taatgttctttttca

SEQ ID NO: 1719167 - DNA, 15 bp, Homo sapiens
aatgttctttttcac

SEQ ID NO: 1719168 - DNA, 15 bp, Homo sapiens
atgttctttttcaca

SEQ ID NO: 1719169 - DNA, 15 bp, Homo sapiens
tgttctttttcacag

SEQ ID NO: 1719170 - DNA, 15 bp, Homo sapiens
gttctttttcacagt

SEQ ID NO: 1719171 - DNA, 15 bp, Homo sapiens
ttctttttcacagta

SEQ ID NO: 1719172 - DNA, 15 bp, Homo sapiens
tctttttcacagtag

SEQ ID NO: 1719173 - DNA, 15 bp, Homo sapiens
ctttttcacagtagt

SEQ ID NO: 1719174 - DNA, 15 bp, Homo sapiens
tttttcacagtagtg

SEQ ID NO: 1719175 - DNA, 15 bp, Homo sapiens
ttttcacagtagtgt

SEQ ID NO: 1719176 - DNA, 15 bp, Homo sapiens
tttcacagtagtgtt

SEQ ID NO: 1719177 - DNA, 15 bp, Homo sapiens
ttcacagtagtgtta

SEQ ID NO: 1719178 - DNA, 15 bp, Homo sapiens
tcacagtagtgttat

SEQ ID NO: 1719179 - DNA, 15 bp, Homo sapiens
cacagtagtgttatg

SEQ ID NO: 1719180 - DNA, 15 bp, Homo sapiens
acagtagtgttatgt

SEQ ID NO: 1719181 - DNA, 15 bp, Homo sapiens
cagtagtgttatgtg

SEQ ID NO: 1719182 - DNA, 15 bp, Homo sapiens
agtagtgttatgtgc

SEQ ID NO: 1719183 - DNA, 15 bp, Homo sapiens
gtagtgttatgtgca

SEQ ID NO: 1719184 - DNA, 15 bp, Homo sapiens
tagtgttatgtgcaa

SEQ ID NO: 1719185 - DNA, 15 bp, Homo sapiens
agtgttatgtgcaaa

SEQ ID NO: 1719186 - DNA, 15 bp, Homo sapiens
gtgttatgtgcaaac

SEQ ID NO: 1719187 - DNA, 15 bp, Homo sapiens
tgttatgtgcaaact

SEQ ID NO: 1719188 - DNA, 15 bp, Homo sapiens
gttatgtgcaaacta

SEQ ID NO: 1719189 - DNA, 15 bp, Homo sapiens
ttatgtgcaaactat

SEQ ID NO: 1719190 - DNA, 15 bp, Homo sapiens
tatgtgcaaactatt

SEQ ID NO: 1719191 - DNA, 15 bp, Homo sapiens
atgtgcaaactattg

SEQ ID NO: 1719192 - DNA, 15 bp, Homo sapiens
tgtgcaaactattga

SEQ ID NO: 1719193 - DNA, 15 bp, Homo sapiens
gtgcaaactattgaa

SEQ ID NO: 1719194 - DNA, 15 bp, Homo sapiens
tgcaaactattgaaa

SEQ ID NO: 1719195 - DNA, 15 bp, Homo sapiens
gcaaactattgaaac

SEQ ID NO: 1719196 - DNA, 15 bp, Homo sapiens
caaactattgaaaca

SEQ ID NO: 1719197 - DNA, 15 bp, Homo sapiens
aaactattgaaacaa

SEQ ID NO: 1719198 - DNA, 15 bp, Homo sapiens
aactattgaaacaag

SEQ ID NO: 1719199 - DNA, 15 bp, Homo sapiens
actattgaaacaagt

SEQ ID NO: 1719200 - DNA, 15 bp, Homo sapiens
ctattgaaacaagta

SEQ ID NO: 1719201 - DNA, 15 bp, Homo sapiens
tattgaaacaagtat

SEQ ID NO: 1719202 - DNA, 15 bp, Homo sapiens
attgaaacaagtatg

SEQ ID NO: 1719203 - DNA, 15 bp, Homo sapiens
ttgaaacaagtatgt

SEQ ID NO: 1719204 - DNA, 15 bp, Homo sapiens
tgaaacaagtatgta

SEQ ID NO: 1719205 - DNA, 15 bp, Homo sapiens
gaaacaagtatgtac

SEQ ID NO: 1719206 - DNA, 15 bp, Homo sapiens
aaacaagtatgtact

SEQ ID NO: 1719207 - DNA, 15 bp, Homo sapiens
aacaagtatgtactg

SEQ ID NO: 1719208 - DNA, 15 bp, Homo sapiens
acaagtatgtactga

SEQ ID NO: 1719209 - DNA, 15 bp, Homo sapiens
caagtatgtactgaa

SEQ ID NO: 1719210 - DNA, 15 bp, Homo sapiens
aagtatgtactgaat

SEQ ID NO: 1719211 - DNA, 15 bp, Homo sapiens
agtatgtactgaatc

SEQ ID NO: 1719212 - DNA, 15 bp, Homo sapiens
gtatgtactgaatca

SEQ ID NO: 1719213 - DNA, 15 bp, Homo sapiens
tatgtactgaatcaa

SEQ ID NO: 1719214 - DNA, 15 bp, Homo sapiens
atgtactgaatcaat

SEQ ID NO: 1719215 - DNA, 15 bp, Homo sapiens
tgtactgaatcaatt

SEQ ID NO: 1719216 - DNA, 15 bp, Homo sapiens
gtactgaatcaattt

SEQ ID NO: 1719217 - DNA, 15 bp, Homo sapiens
tactgaatcaatttg

SEQ ID NO: 1719218 - DNA, 15 bp, Homo sapiens
actgaatcaatttga

SEQ ID NO: 1719219 - DNA, 15 bp, Homo sapiens
ctgaatcaatttgat

SEQ ID NO: 1719220 - DNA, 15 bp, Homo sapiens
tgaatcaatttgatt

SEQ ID NO: 1719221 - DNA, 15 bp, Homo sapiens
gaatcaatttgattt

SEQ ID NO: 1719222 - DNA, 15 bp, Homo sapiens
aatcaatttgattta

SEQ ID NO: 1719223 - DNA, 15 bp, Homo sapiens
atcaatttgatttat

SEQ ID NO: 1719224 - DNA, 15 bp, Homo sapiens
tcaatttgatttata

SEQ ID NO: 1719225 - DNA, 15 bp, Homo sapiens
caatttgatttataa

SEQ ID NO: 1719226 - DNA, 15 bp, Homo sapiens
aatttgatttataag

SEQ ID NO: 1719227 - DNA, 15 bp, Homo sapiens
atttgatttataagt

SEQ ID NO: 1719228 - DNA, 15 bp, Homo sapiens
tttgatttataagta

SEQ ID NO: 1719229 - DNA, 15 bp, Homo sapiens
ttgatttataagtat

SEQ ID NO: 1719230 - DNA, 15 bp, Homo sapiens
tgatttataagtata

SEQ ID NO: 1719231 - DNA, 15 bp, Homo sapiens
gatttataagtatat

SEQ ID NO: 1719232 - DNA, 15 bp, Homo sapiens
atttataagtatatg

SEQ ID NO: 1719233 - DNA, 15 bp, Homo sapiens
tttataagtatatgc

SEQ ID NO: 1719234 - DNA, 15 bp, Homo sapiens
ttataagtatatgcc

SEQ ID NO: 1719235 - DNA, 15 bp, Homo sapiens
tataagtatatgcca

SEQ ID NO: 1719236 - DNA, 15 bp, Homo sapiens
ataagtatatgccaa

SEQ ID NO: 1719237 - DNA, 15 bp, Homo sapiens
taagtatatgccaat

SEQ ID NO: 1719238 - DNA, 15 bp, Homo sapiens
aagtatatgccaatt

SEQ ID NO: 1719239 - DNA, 15 bp, Homo sapiens
agtatatgccaatta

SEQ ID NO: 1719240 - DNA, 15 bp, Homo sapiens
gtatatgccaattat

SEQ ID NO: 1719241 - DNA, 15 bp, Homo sapiens
tatatgccaattata

SEQ ID NO: 1719242 - DNA, 15 bp, Homo sapiens
atatgccaattatat

SEQ ID NO: 1719243 - DNA, 15 bp, Homo sapiens
tatgccaattatatg

SEQ ID NO: 1719244 - DNA, 15 bp, Homo sapiens
atgccaattatatga

SEQ ID NO: 1719245 - DNA, 15 bp, Homo sapiens
tgccaattatatgat

SEQ ID NO: 1719246 - DNA, 15 bp, Homo sapiens
gccaattatatgatt

SEQ ID NO: 1719247 - DNA, 15 bp, Homo sapiens
ccaattatatgatta

SEQ ID NO: 1719248 - DNA, 15 bp, Homo sapiens
caattatatgattat

SEQ ID NO: 1719249 - DNA, 15 bp, Homo sapiens
aattatatgattatt

SEQ ID NO: 1719250 - DNA, 15 bp, Homo sapiens
attatatgattattt

SEQ ID NO: 1719251 - DNA, 15 bp, Homo sapiens
ttatatgattatttt

SEQ ID NO: 1719252 - DNA, 15 bp, Homo sapiens
tatatgattattttc

SEQ ID NO: 1719253 - DNA, 15 bp, Homo sapiens
atatgattattttca

SEQ ID NO: 1719254 - DNA, 15 bp, Homo sapiens
tatgattattttcat

SEQ ID NO: 1719255 - DNA, 15 bp, Homo sapiens
atgattattttcatt

SEQ ID NO: 1719256 - DNA, 15 bp, Homo sapiens
tgattattttcattt

SEQ ID NO: 1719257 - DNA, 15 bp, Homo sapiens
gattattttcatttg

SEQ ID NO: 1719258 - DNA, 15 bp, Homo sapiens
attattttcatttgg

SEQ ID NO: 1719259 - DNA, 15 bp, Homo sapiens
ttattttcatttggt

SEQ ID NO: 1719260 - DNA, 15 bp, Homo sapiens
tattttcatttggta

SEQ ID NO: 1719261 - DNA, 15 bp, Homo sapiens
attttcatttggtag

SEQ ID NO: 1719262 - DNA, 15 bp, Homo sapiens
ttttcatttggtagg

SEQ ID NO: 1719263 - DNA, 15 bp, Homo sapiens
tttcatttggtaggc

SEQ ID NO: 1719264 - DNA, 15 bp, Homo sapiens
ttcatttggtaggct

SEQ ID NO: 1719265 - DNA, 15 bp, Homo sapiens
tcatttggtaggctt

SEQ ID NO: 1719266 - DNA, 15 bp, Homo sapiens
catttggtaggcttg

SEQ ID NO: 1719267 - DNA, 15 bp, Homo sapiens
atttggtaggcttga

SEQ ID NO: 1719268 - DNA, 15 bp, Homo sapiens
tttggtaggcttgag

SEQ ID NO: 1719269 - DNA, 15 bp, Homo sapiens
ttggtaggcttgagt

SEQ ID NO: 1719270 - DNA, 15 bp, Homo sapiens
tggtaggcttgagtt

SEQ ID NO: 1719271 - DNA, 15 bp, Homo sapiens
ggtaggcttgagttt

SEQ ID NO: 1719272 - DNA, 15 bp, Homo sapiens
gtaggcttgagtttg

SEQ ID NO: 1719273 - DNA, 15 bp, Homo sapiens
taggcttgagtttga

SEQ ID NO: 1719274 - DNA, 15 bp, Homo sapiens
aggcttgagtttgaa

SEQ ID NO: 1719275 - DNA, 15 bp, Homo sapiens
ggcttgagtttgaag

SEQ ID NO: 1719276 - DNA, 15 bp, Homo sapiens
gcttgagtttgaaga

SEQ ID NO: 1719277 - DNA, 15 bp, Homo sapiens
cttgagtttgaagaa

SEQ ID NO: 1719278 - DNA, 15 bp, Homo sapiens
ttgagtttgaagaaa

SEQ ID NO: 1719279 - DNA, 15 bp, Homo sapiens
tgagtttgaagaaac

SEQ ID NO: 1719280 - DNA, 15 bp, Homo sapiens
gagtttgaagaaaca

SEQ ID NO: 1719281 - DNA, 15 bp, Homo sapiens
agtttgaagaaacag

SEQ ID NO: 1719282 - DNA, 15 bp, Homo sapiens
gtttgaagaaacaga

SEQ ID NO: 1719283 - DNA, 15 bp, Homo sapiens
tttgaagaaacagaa

SEQ ID NO: 1719284 - DNA, 15 bp, Homo sapiens
ttgaagaaacagaag

SEQ ID NO: 1719285 - DNA, 15 bp, Homo sapiens
tgaagaaacagaaga

SEQ ID NO: 1719286 - DNA, 15 bp, Homo sapiens
gaagaaacagaagaa

SEQ ID NO: 1719287 - DNA, 15 bp, Homo sapiens
aagaaacagaagaac

SEQ ID NO: 1719288 - DNA, 15 bp, Homo sapiens
agaaacagaagaacc

SEQ ID NO: 1719289 - DNA, 15 bp, Homo sapiens
gaaacagaagaacct

SEQ ID NO: 1719290 - DNA, 15 bp, Homo sapiens
aaacagaagaacctg

SEQ ID NO: 1719291 - DNA, 15 bp, Homo sapiens
aacagaagaacctga

SEQ ID NO: 1719292 - DNA, 15 bp, Homo sapiens
acagaagaacctgat

SEQ ID NO: 1719293 - DNA, 15 bp, Homo sapiens
cagaagaacctgatt

SEQ ID NO: 1719294 - DNA, 15 bp, Homo sapiens
agaagaacctgattt

SEQ ID NO: 1719295 - DNA, 15 bp, Homo sapiens
gaagaacctgatttt

SEQ ID NO: 1719296 - DNA, 15 bp, Homo sapiens
aagaacctgatttta

SEQ ID NO: 1719297 - DNA, 15 bp, Homo sapiens
agaacctgattttac

SEQ ID NO: 1719298 - DNA, 15 bp, Homo sapiens
gaacctgattttact

SEQ ID NO: 1719299 - DNA, 15 bp, Homo sapiens
aacctgattttactg

SEQ ID NO: 1719300 - DNA, 15 bp, Homo sapiens
acctgattttactgc

SEQ ID NO: 1719301 - DNA, 15 bp, Homo sapiens
cctgattttactgca

SEQ ID NO: 1719302 - DNA, 15 bp, Homo sapiens
ctgattttactgcat

SEQ ID NO: 1719303 - DNA, 15 bp, Homo sapiens
tgattttactgcatt

SEQ ID NO: 1719304 - DNA, 15 bp, Homo sapiens
gattttactgcatta

SEQ ID NO: 1719305 - DNA, 15 bp, Homo sapiens
attttactgcattat

SEQ ID NO: 1719306 - DNA, 15 bp, Homo sapiens
ttttactgcattatg

SEQ ID NO: 1719307 - DNA, 15 bp, Homo sapiens
tttactgcattatgt

SEQ ID NO: 1719308 - DNA, 15 bp, Homo sapiens
ttactgcattatgtc

SEQ ID NO: 1719309 - DNA, 15 bp, Homo sapiens
tactgcattatgtca

SEQ ID NO: 1719310 - DNA, 15 bp, Homo sapiens
actgcattatgtcag

SEQ ID NO: 1719311 - DNA, 15 bp, Homo sapiens
ctgcattatgtcaga

SEQ ID NO: 1719312 - DNA, 15 bp, Homo sapiens
tgcattatgtcagaa

SEQ ID NO: 1719313 - DNA, 15 bp, Homo sapiens
gcattatgtcagaaa

SEQ ID NO: 1719314 - DNA, 15 bp, Homo sapiens
cattatgtcagaaat

SEQ ID NO: 1719315 - DNA, 15 bp, Homo sapiens
attatgtcagaaatt

SEQ ID NO: 1719316 - DNA, 15 bp, Homo sapiens
ttatgtcagaaatta

SEQ ID NO: 1719317 - DNA, 15 bp, Homo sapiens
tatgtcagaaattaa

SEQ ID NO: 1719318 - DNA, 15 bp, Homo sapiens
atgtcagaaattaaa

SEQ ID NO: 1719319 - DNA, 15 bp, Homo sapiens
tgtcagaaattaaag

SEQ ID NO: 1719320 - DNA, 15 bp, Homo sapiens
gtcagaaattaaaga

SEQ ID NO: 1719321 - DNA, 15 bp, Homo sapiens
tcagaaattaaagat

SEQ ID NO: 1719322 - DNA, 15 bp, Homo sapiens
cagaaattaaagata

SEQ ID NO: 1719323 - DNA, 15 bp, Homo sapiens
agaaattaaagatac

SEQ ID NO: 1719324 - DNA, 15 bp, Homo sapiens
gaaattaaagatacc

SEQ ID NO: 1719325 - DNA, 15 bp, Homo sapiens
aaattaaagatacca

SEQ ID NO: 1719326 - DNA, 15 bp, Homo sapiens
aattaaagataccag

SEQ ID NO: 1719327 - DNA, 15 bp, Homo sapiens
attaaagataccaga

SEQ ID NO: 1719328 - DNA, 15 bp, Homo sapiens
ttaaagataccagat

SEQ ID NO: 1719329 - DNA, 15 bp, Homo sapiens
taaagataccagatc

SEQ ID NO: 1719330 - DNA, 15 bp, Homo sapiens
aaagataccagatca

SEQ ID NO: 1719331 - DNA, 15 bp, Homo sapiens
aagataccagatcat

SEQ ID NO: 1719332 - DNA, 15 bp, Homo sapiens
agataccagatcatg

SEQ ID NO: 1719333 - DNA, 15 bp, Homo sapiens
gataccagatcatgt

SEQ ID NO: 1719334 - DNA, 15 bp, Homo sapiens
ataccagatcatgtc

SEQ ID NO: 1719335 - DNA, 15 bp, Homo sapiens
taccagatcatgtca

SEQ ID NO: 1719336 - DNA, 15 bp, Homo sapiens
accagatcatgtcag

SEQ ID NO: 1719337 - DNA, 15 bp, Homo sapiens
ccagatcatgtcaga

SEQ ID NO: 1719338 - DNA, 15 bp, Homo sapiens
cagatcatgtcagag

SEQ ID NO: 1719339 - DNA, 15 bp, Homo sapiens
agatcatgtcagaga

SEQ ID NO: 1719340 - DNA, 15 bp, Homo sapiens
gatcatgtcagagag

SEQ ID NO: 1719341 - DNA, 15 bp, Homo sapiens
atcatgtcagagaga

SEQ ID NO: 1719342 - DNA, 15 bp, Homo sapiens
tcatgtcagagagag

SEQ ID NO: 1719343 - DNA, 15 bp, Homo sapiens
catgtcagagagaga

SEQ ID NO: 1719344 - DNA, 15 bp, Homo sapiens
atgtcagagagagag

SEQ ID NO: 1719345 - DNA, 15 bp, Homo sapiens
tgtcagagagagagc

SEQ ID NO: 1719346 - DNA, 15 bp, Homo sapiens
gtcagagagagagct

SEQ ID NO: 1719347 - DNA, 15 bp, Homo sapiens
tcagagagagagctt

SEQ ID NO: 1719348 - DNA, 15 bp, Homo sapiens
cagagagagagcttg

SEQ ID NO: 1719349 - DNA, 15 bp, Homo sapiens
agagagagagcttgg

SEQ ID NO: 1719350 - DNA, 15 bp, Homo sapiens
gagagagagcttggt

SEQ ID NO: 1719351 - DNA, 15 bp, Homo sapiens
agagagagcttggtt

SEQ ID NO: 1719352 - DNA, 15 bp, Homo sapiens
gagagagcttggtta

SEQ ID NO: 1719353 - DNA, 15 bp, Homo sapiens
agagagcttggttaa

SEQ ID NO: 1719354 - DNA, 15 bp, Homo sapiens
gagagcttggttaac

SEQ ID NO: 1719355 - DNA, 15 bp, Homo sapiens
agagcttggttaact

SEQ ID NO: 1719356 - DNA, 15 bp, Homo sapiens
gagcttggttaactt

SEQ ID NO: 1719357 - DNA, 15 bp, Homo sapiens
agcttggttaacttg

SEQ ID NO: 1719358 - DNA, 15 bp, Homo sapiens
gcttggttaacttgg

SEQ ID NO: 1719359 - DNA, 15 bp, Homo sapiens
cttggttaacttggg

SEQ ID NO: 1719360 - DNA, 15 bp, Homo sapiens
ttggttaacttggga

SEQ ID NO: 1719361 - DNA, 15 bp, Homo sapiens
tggttaacttgggag

SEQ ID NO: 1719362 - DNA, 15 bp, Homo sapiens
ggttaacttgggaga

SEQ ID NO: 1719363 - DNA, 15 bp, Homo sapiens
gttaacttgggagaa

SEQ ID NO: 1719364 - DNA, 15 bp, Homo sapiens
ttaacttgggagaaa

SEQ ID NO: 1719365 - DNA, 15 bp, Homo sapiens
taacttgggagaaag

SEQ ID NO: 1719366 - DNA, 15 bp, Homo sapiens
aacttgggagaaagt

SEQ ID NO: 1719367 - DNA, 15 bp, Homo sapiens
acttgggagaaagtt

SEQ ID NO: 1719368 - DNA, 15 bp, Homo sapiens
cttgggagaaagttt

SEQ ID NO: 1719369 - DNA, 15 bp, Homo sapiens
ttgggagaaagtttc

SEQ ID NO: 1719370 - DNA, 15 bp, Homo sapiens
tgggagaaagtttca

SEQ ID NO: 1719371 - DNA, 15 bp, Homo sapiens
gggagaaagtttcat

SEQ ID NO: 1719372 - DNA, 15 bp, Homo sapiens
ggagaaagtttcatc

SEQ ID NO: 1719373 - DNA, 15 bp, Homo sapiens
gagaaagtttcatct

SEQ ID NO: 1719374 - DNA, 15 bp, Homo sapiens
agaaagtttcatctg

SEQ ID NO: 1719375 - DNA, 15 bp, Homo sapiens
gaaagtttcatctgt

SEQ ID NO: 1719376 - DNA, 15 bp, Homo sapiens
aaagtttcatctgtg

SEQ ID NO: 1719377 - DNA, 15 bp, Homo sapiens
aagtttcatctgtgg

SEQ ID NO: 1719378 - DNA, 15 bp, Homo sapiens
agtttcatctgtgga

SEQ ID NO: 1719379 - DNA, 15 bp, Homo sapiens
gtttcatctgtggat

SEQ ID NO: 1719380 - DNA, 15 bp, Homo sapiens
tttcatctgtggatg

SEQ ID NO: 1719381 - DNA, 15 bp, Homo sapiens
ttcatctgtggatgg

SEQ ID NO: 1719382 - DNA, 15 bp, Homo sapiens
tcatctgtggatgga

SEQ ID NO: 1719383 - DNA, 15 bp, Homo sapiens
catctgtggatggag

SEQ ID NO: 1719384 - DNA, 15 bp, Homo sapiens
atctgtggatggagt

SEQ ID NO: 1719385 - DNA, 15 bp, Homo sapiens
tctgtggatggagta

SEQ ID NO: 1719386 - DNA, 15 bp, Homo sapiens
ctgtggatggagtat

SEQ ID NO: 1719387 - DNA, 15 bp, Homo sapiens
tgtggatggagtatt

SEQ ID NO: 1719388 - DNA, 15 bp, Homo sapiens
gtggatggagtattg

SEQ ID NO: 1719389 - DNA, 15 bp, Homo sapiens
tggatggagtattgg

SEQ ID NO: 1719390 - DNA, 15 bp, Homo sapiens
ggatggagtattggt

SEQ ID NO: 1719391 - DNA, 15 bp, Homo sapiens
gatggagtattggta

SEQ ID NO: 1719392 - DNA, 15 bp, Homo sapiens
atggagtattggtaa

SEQ ID NO: 1719393 - DNA, 15 bp, Homo sapiens
tggagtattggtaag

SEQ ID NO: 1719394 - DNA, 15 bp, Homo sapiens
ggagtattggtaagg

SEQ ID NO: 1719395 - DNA, 15 bp, Homo sapiens
gagtattggtaagga

SEQ ID NO: 1719396 - DNA, 15 bp, Homo sapiens
agtattggtaaggat

SEQ ID NO: 1719397 - DNA, 15 bp, Homo sapiens
gtattggtaaggatt

SEQ ID NO: 1719398 - DNA, 15 bp, Homo sapiens
tattggtaaggattt

SEQ ID NO: 1719399 - DNA, 15 bp, Homo sapiens
attggtaaggatttt

SEQ ID NO: 1719400 - DNA, 15 bp, Homo sapiens
ttggtaaggattttc

SEQ ID NO: 1719401 - DNA, 15 bp, Homo sapiens
tggtaaggattttct

SEQ ID NO: 1719402 - DNA, 15 bp, Homo sapiens
ggtaaggattttctt

SEQ ID NO: 1719403 - DNA, 15 bp, Homo sapiens
gtaaggattttctta

SEQ ID NO: 1719404 - DNA, 15 bp, Homo sapiens
taaggattttcttaa

SEQ ID NO: 1719405 - DNA, 15 bp, Homo sapiens
aaggattttcttaaa

SEQ ID NO: 1719406 - DNA, 15 bp, Homo sapiens
aggattttcttaaaa

SEQ ID NO: 1719407 - DNA, 15 bp, Homo sapiens
ggattttcttaaaac

SEQ ID NO: 1719408 - DNA, 15 bp, Homo sapiens
gattttcttaaaacg

SEQ ID NO: 1719409 - DNA, 15 bp, Homo sapiens
attttcttaaaacgt

SEQ ID NO: 1719410 - DNA, 15 bp, Homo sapiens
ttttcttaaaacgtt

SEQ ID NO: 1719411 - DNA, 15 bp, Homo sapiens
tttcttaaaacgttt

SEQ ID NO: 1719412 - DNA, 15 bp, Homo sapiens
ttcttaaaacgtttt

SEQ ID NO: 1719413 - DNA, 15 bp, Homo sapiens
tcttaaaacgttttg

SEQ ID NO: 1719414 - DNA, 15 bp, Homo sapiens
cttaaaacgttttga

SEQ ID NO: 1719415 - DNA, 15 bp, Homo sapiens
ttaaaacgttttgaa

SEQ ID NO: 1719416 - DNA, 15 bp, Homo sapiens
taaaacgttttgaaa

SEQ ID NO: 1719417 - DNA, 15 bp, Homo sapiens
aaaacgttttgaaat

SEQ ID NO: 1719418 - DNA, 15 bp, Homo sapiens
aaacgttttgaaatt

SEQ ID NO: 1719419 - DNA, 15 bp, Homo sapiens
aacgttttgaaattt

SEQ ID NO: 1719420 - DNA, 15 bp, Homo sapiens
acgttttgaaatttt

SEQ ID NO: 1719421 - DNA, 15 bp, Homo sapiens
cgttttgaaattttt

SEQ ID NO: 1719422 - DNA, 15 bp, Homo sapiens
gttttgaaatttttt

SEQ ID NO: 1719423 - DNA, 15 bp, Homo sapiens
ttttgaaattttttt

SEQ ID NO: 1719424 - DNA, 15 bp, Homo sapiens
tgaaatttttttttc

SEQ ID NO: 1719425 - DNA, 15 bp, Homo sapiens
gaaatttttttttct

SEQ ID NO: 1719426 - DNA, 15 bp, Homo sapiens
aaatttttttttctc

SEQ ID NO: 1719427 - DNA, 15 bp, Homo sapiens
aatttttttttctca

SEQ ID NO: 1719428 - DNA, 15 bp, Homo sapiens
atttttttttctcat

SEQ ID NO: 1719429 - DNA, 15 bp, Homo sapiens
tttttttttctcatt

SEQ ID NO: 1719430 - DNA, 15 bp, Homo sapiens
ttttttttctcattt

SEQ ID NO: 1719431 - DNA, 15 bp, Homo sapiens
tttttttctcatttt

SEQ ID NO: 1719432 - DNA, 15 bp, Homo sapiens
ttttttctcatttta

SEQ ID NO: 1719433 - DNA, 15 bp, Homo sapiens
tttttctcattttaa

SEQ ID NO: 1719434 - DNA, 15 bp, Homo sapiens
ttttctcattttaaa

SEQ ID NO: 1719435 - DNA, 15 bp, Homo sapiens
tttctcattttaaaa

SEQ ID NO: 1719436 - DNA, 15 bp, Homo sapiens
ttctcattttaaaaa

SEQ ID NO: 1719437 - DNA, 15 bp, Homo sapiens
tctcattttaaaaac

SEQ ID NO: 1719438 - DNA, 15 bp, Homo sapiens
ctcattttaaaaaca

SEQ ID NO: 1719439 - DNA, 15 bp, Homo sapiens
tcattttaaaaacaa

SEQ ID NO: 1719440 - DNA, 15 bp, Homo sapiens
cattttaaaaacaac

SEQ ID NO: 1719441 - DNA, 15 bp, Homo sapiens
attttaaaaacaact

SEQ ID NO: 1719442 - DNA, 15 bp, Homo sapiens
ttttaaaaacaactt

SEQ ID NO: 1719443 - DNA, 15 bp, Homo sapiens
tttaaaaacaacttc

SEQ ID NO: 1719444 - DNA, 15 bp, Homo sapiens
ttaaaaacaacttca

SEQ ID NO: 1719445 - DNA, 15 bp, Homo sapiens
taaaaacaacttcaa

SEQ ID NO: 1719446 - DNA, 15 bp, Homo sapiens
aaaaacaacttcaaa

SEQ ID NO: 1719447 - DNA, 15 bp, Homo sapiens
aaaacaacttcaaat

SEQ ID NO: 1719448 - DNA, 15 bp, Homo sapiens
aaacaacttcaaatc

SEQ ID NO: 1719449 - DNA, 15 bp, Homo sapiens
aacaacttcaaatca

SEQ ID NO: 1719450 - DNA, 15 bp, Homo sapiens
acaacttcaaatcac

SEQ ID NO: 1719451 - DNA, 15 bp, Homo sapiens
caacttcaaatcact

SEQ ID NO: 1719452 - DNA, 15 bp, Homo sapiens
aacttcaaatcacta

SEQ ID NO: 1719453 - DNA, 15 bp, Homo sapiens
acttcaaatcactat

SEQ ID NO: 1719454 - DNA, 15 bp, Homo sapiens
cttcaaatcactata

SEQ ID NO: 1719455 - DNA, 15 bp, Homo sapiens
ttcaaatcactatac

SEQ ID NO: 1719456 - DNA, 15 bp, Homo sapiens
tcaaatcactataca

SEQ ID NO: 1719457 - DNA, 15 bp, Homo sapiens
caaatcactatacaa

SEQ ID NO: 1719458 - DNA, 15 bp, Homo sapiens
aaatcactatacaaa

SEQ ID NO: 1719459 - DNA, 15 bp, Homo sapiens
aatcactatacaaaa

SEQ ID NO: 1719460 - DNA, 15 bp, Homo sapiens
atcactatacaaaaa

SEQ ID NO: 1719461 - DNA, 15 bp, Homo sapiens
tcactatacaaaaat

SEQ ID NO: 1719462 - DNA, 15 bp, Homo sapiens
cactatacaaaaatt

SEQ ID NO: 1719463 - DNA, 15 bp, Homo sapiens
actatacaaaaattg

SEQ ID NO: 1719464 - DNA, 15 bp, Homo sapiens
ctatacaaaaattga

SEQ ID NO: 1719465 - DNA, 15 bp, Homo sapiens
tatacaaaaattgaa

SEQ ID NO: 1719466 - DNA, 15 bp, Homo sapiens
atacaaaaattgaaa

SEQ ID NO: 1719467 - DNA, 15 bp, Homo sapiens
tacaaaaattgaaag

SEQ ID NO: 1719468 - DNA, 15 bp, Homo sapiens
acaaaaattgaaaga

SEQ ID NO: 1719469 - DNA, 15 bp, Homo sapiens
caaaaattgaaagat

SEQ ID NO: 1719470 - DNA, 15 bp, Homo sapiens
aaaaattgaaagata

SEQ ID NO: 1719471 - DNA, 15 bp, Homo sapiens
aaaattgaaagatag

SEQ ID NO: 1719472 - DNA, 15 bp, Homo sapiens
aaattgaaagataga

SEQ ID NO: 1719473 - DNA, 15 bp, Homo sapiens
aattgaaagatagaa

SEQ ID NO: 1719474 - DNA, 15 bp, Homo sapiens
attgaaagatagaaa

SEQ ID NO: 1719475 - DNA, 15 bp, Homo sapiens
ttgaaagatagaaaa

SEQ ID NO: 1719476 - DNA, 15 bp, Homo sapiens
tgaaagatagaaaaa

SEQ ID NO: 1719477 - DNA, 15 bp, Homo sapiens
gaaagatagaaaaat

SEQ ID NO: 1719478 - DNA, 15 bp, Homo sapiens
aaagatagaaaaata

SEQ ID NO: 1719479 - DNA, 15 bp, Homo sapiens
aagatagaaaaatat

SEQ ID NO: 1719480 - DNA, 15 bp, Homo sapiens
agatagaaaaatata

SEQ ID NO: 1719481 - DNA, 15 bp, Homo sapiens
gatagaaaaatataa

SEQ ID NO: 1719482 - DNA, 15 bp, Homo sapiens
atagaaaaatataaa

SEQ ID NO: 1719483 - DNA, 15 bp, Homo sapiens
tagaaaaatataaag

SEQ ID NO: 1719484 - DNA, 15 bp, Homo sapiens
agaaaaatataaaga

SEQ ID NO: 1719485 - DNA, 15 bp, Homo sapiens
gaaaaatataaagac

SEQ ID NO: 1719486 - DNA, 15 bp, Homo sapiens
aaaaatataaagaca

SEQ ID NO: 1719487 - DNA, 15 bp, Homo sapiens
aaaatataaagacaa

SEQ ID NO: 1719488 - DNA, 15 bp, Homo sapiens
aaatataaagacaat

SEQ ID NO: 1719489 - DNA, 15 bp, Homo sapiens
aatataaagacaata

SEQ ID NO: 1719490 - DNA, 15 bp, Homo sapiens
atataaagacaataa

SEQ ID NO: 1719491 - DNA, 15 bp, Homo sapiens
tataaagacaataaa

SEQ ID NO: 1719492 - DNA, 15 bp, Homo sapiens
ataaagacaataaaa

SEQ ID NO: 1719493 - DNA, 15 bp, Homo sapiens
taaagacaataaaag

SEQ ID NO: 1719494 - DNA, 15 bp, Homo sapiens
aaagacaataaaagc

SEQ ID NO: 1719495 - DNA, 15 bp, Homo sapiens
aagacaataaaagct

SEQ ID NO: 1719496 - DNA, 15 bp, Homo sapiens
agacaataaaagcta

SEQ ID NO: 1719497 - DNA, 15 bp, Homo sapiens
gacaataaaagctaa

SEQ ID NO: 1719498 - DNA, 15 bp, Homo sapiens
acaataaaagctaat

SEQ ID NO: 1719499 - DNA, 15 bp, Homo sapiens
caataaaagctaata

SEQ ID NO: 1719500 - DNA, 15 bp, Homo sapiens
aataaaagctaataa

SEQ ID NO: 1719501 - DNA, 15 bp, Homo sapiens
ataaaagctaataat

SEQ ID NO: 1719502 - DNA, 15 bp, Homo sapiens
taaaagctaataata

SEQ ID NO: 1719503 - DNA, 15 bp, Homo sapiens
aaaagctaataataa

SEQ ID NO: 1719504 - DNA, 15 bp, Homo sapiens
aaagctaataataat

SEQ ID NO: 1719505 - DNA, 15 bp, Homo sapiens
aagctaataataatt

SEQ ID NO: 1719506 - DNA, 15 bp, Homo sapiens
agctaataataattc

SEQ ID NO: 1719507 - DNA, 15 bp, Homo sapiens
gctaataataattcc

SEQ ID NO: 1719508 - DNA, 15 bp, Homo sapiens
ctaataataattcca

SEQ ID NO: 1719509 - DNA, 15 bp, Homo sapiens
taataataattccat

SEQ ID NO: 1719510 - DNA, 15 bp, Homo sapiens
aataataattccatt

SEQ ID NO: 1719511 - DNA, 15 bp, Homo sapiens
ataataattccatta

SEQ ID NO: 1719512 - DNA, 15 bp, Homo sapiens
taataattccattac

SEQ ID NO: 1719513 - DNA, 15 bp, Homo sapiens
aataattccattacc

SEQ ID NO: 1719514 - DNA, 15 bp, Homo sapiens
ataattccattaccc

SEQ ID NO: 1719515 - DNA, 15 bp, Homo sapiens
taattccattaccca

SEQ ID NO: 1719516 - DNA, 15 bp, Homo sapiens
aattccattacccag

SEQ ID NO: 1719517 - DNA, 15 bp, Homo sapiens
attccattacccaga

SEQ ID NO: 1719518 - DNA, 15 bp, Homo sapiens
tgcattgtgttccaa

SEQ ID NO: 1719519 - DNA, 15 bp, Homo sapiens
gcattgtgttccaaa

SEQ ID NO: 1719520 - DNA, 15 bp, Homo sapiens
cattgtgttccaaat

SEQ ID NO: 1719521 - DNA, 15 bp, Homo sapiens
attgtgttccaaatc

SEQ ID NO: 1719522 - DNA, 15 bp, Homo sapiens
ttgtgttccaaatct

SEQ ID NO: 1719523 - DNA, 15 bp, Homo sapiens
tgtgttccaaatctg

SEQ ID NO: 1719524 - DNA, 15 bp, Homo sapiens
gtgttccaaatctgt

SEQ ID NO: 1719525 - DNA, 15 bp, Homo sapiens
tgttccaaatctgtt

SEQ ID NO: 1719526 - DNA, 15 bp, Homo sapiens
gttccaaatctgttt

SEQ ID NO: 1719527 - DNA, 15 bp, Homo sapiens
ttccaaatctgtttg

SEQ ID NO: 1719528 - DNA, 15 bp, Homo sapiens
tccaaatctgtttgc

SEQ ID NO: 1719529 - DNA, 15 bp, Homo sapiens
ccaaatctgtttgca

SEQ ID NO: 1719530 - DNA, 15 bp, Homo sapiens
caaatctgtttgcaa

SEQ ID NO: 1719531 - DNA, 15 bp, Homo sapiens
aaatctgtttgcaag

SEQ ID NO: 1719532 - DNA, 15 bp, Homo sapiens
aatctgtttgcaagt

SEQ ID NO: 1719533 - DNA, 15 bp, Homo sapiens
atctgtttgcaagtt

SEQ ID NO: 1719534 - DNA, 15 bp, Homo sapiens
tctgtttgcaagttt

SEQ ID NO: 1719535 - DNA, 15 bp, Homo sapiens
ctgtttgcaagtttg

SEQ ID NO: 1719536 - DNA, 15 bp, Homo sapiens
tgtttgcaagtttga

SEQ ID NO: 1719537 - DNA, 15 bp, Homo sapiens
gtttgcaagtttgat

SEQ ID NO: 1719538 - DNA, 15 bp, Homo sapiens
tttgcaagtttgata

SEQ ID NO: 1719539 - DNA, 15 bp, Homo sapiens
ttgcaagtttgatat

SEQ ID NO: 1719540 - DNA, 15 bp, Homo sapiens
tgcaagtttgatata

SEQ ID NO: 1719541 - DNA, 15 bp, Homo sapiens
gcaagtttgatatag

SEQ ID NO: 1719542 - DNA, 15 bp, Homo sapiens
caagtttgatatagt

SEQ ID NO: 1719543 - DNA, 15 bp, Homo sapiens
aagtttgatatagta

SEQ ID NO: 1719544 - DNA, 15 bp, Homo sapiens
agtttgatatagtag

SEQ ID NO: 1719545 - DNA, 15 bp, Homo sapiens
gtttgatatagtagt

SEQ ID NO: 1719546 - DNA, 15 bp, Homo sapiens
tttgatatagtagtt

SEQ ID NO: 1719547 - DNA, 15 bp, Homo sapiens
ttgatatagtagtta

SEQ ID NO: 1719548 - DNA, 15 bp, Homo sapiens
tgatatagtagttag

SEQ ID NO: 1719549 - DNA, 15 bp, Homo sapiens
gatatagtagttagg

SEQ ID NO: 1719550 - DNA, 15 bp, Homo sapiens
atatagtagttaggt

SEQ ID NO: 1719551 - DNA, 15 bp, Homo sapiens
tatagtagttaggtt

SEQ ID NO: 1719552 - DNA, 15 bp, Homo sapiens
atagtagttaggttt

SEQ ID NO: 1719553 - DNA, 15 bp, Homo sapiens
tagtagttaggtttc

SEQ ID NO: 1719554 - DNA, 15 bp, Homo sapiens
agtagttaggtttcc

SEQ ID NO: 1719555 - DNA, 15 bp, Homo sapiens
gtagttaggtttcca

SEQ ID NO: 1719556 - DNA, 15 bp, Homo sapiens
tagttaggtttccag

SEQ ID NO: 1719557 - DNA, 15 bp, Homo sapiens
agttaggtttccagc

SEQ ID NO: 1719558 - DNA, 15 bp, Homo sapiens
gttaggtttccagcc

SEQ ID NO: 1719559 - DNA, 15 bp, Homo sapiens
ttaggtttccagcct

SEQ ID NO: 1719560 - DNA, 15 bp, Homo sapiens
taggtttccagcctg

SEQ ID NO: 1719561 - DNA, 15 bp, Homo sapiens
aggtttccagcctgg

SEQ ID NO: 1719562 - DNA, 15 bp, Homo sapiens
ggtttccagcctggt

SEQ ID NO: 1719563 - DNA, 15 bp, Homo sapiens
gtttccagcctggtt

SEQ ID NO: 1719564 - DNA, 15 bp, Homo sapiens
tttccagcctggttc

SEQ ID NO: 1719565 - DNA, 15 bp, Homo sapiens
ttccagcctggttca

SEQ ID NO: 1719566 - DNA, 15 bp, Homo sapiens
tccagcctggttcac

SEQ ID NO: 1719567 - DNA, 15 bp, Homo sapiens
ccagcctggttcaca

SEQ ID NO: 1719568 - DNA, 15 bp, Homo sapiens
cagcctggttcacat

SEQ ID NO: 1719569 - DNA, 15 bp, Homo sapiens
agcctggttcacata

SEQ ID NO: 1719570 - DNA, 15 bp, Homo sapiens
gcctggttcacataa

SEQ ID NO: 1719571 - DNA, 15 bp, Homo sapiens
cctggttcacataac

SEQ ID NO: 1719572 - DNA, 15 bp, Homo sapiens
ctggttcacataact

SEQ ID NO: 1719573 - DNA, 15 bp, Homo sapiens
tggttcacataactt

SEQ ID NO: 1719574 - DNA, 15 bp, Homo sapiens
ggttcacataactta

SEQ ID NO: 1719575 - DNA, 15 bp, Homo sapiens
gttcacataacttat

SEQ ID NO: 1719576 - DNA, 15 bp, Homo sapiens
ttcacataacttatt

SEQ ID NO: 1719577 - DNA, 15 bp, Homo sapiens
tcacataacttattt

SEQ ID NO: 1719578 - DNA, 15 bp, Homo sapiens
cacataacttatttt

SEQ ID NO: 1719579 - DNA, 15 bp, Homo sapiens
acataacttattttt

SEQ ID NO: 1719580 - DNA, 15 bp, Homo sapiens
cataacttatttttt

SEQ ID NO: 1719581 - DNA, 15 bp, Homo sapiens
ataacttattttttt

SEQ ID NO: 1719582 - DNA, 15 bp, Homo sapiens
taacttatttttttt

SEQ ID NO: 1719583 - DNA, 15 bp, Homo sapiens
aacttattttttttt

SEQ ID NO: 1719584 - DNA, 15 bp, Homo sapiens
acttatttttttttg

SEQ ID NO: 1719585 - DNA, 15 bp, Homo sapiens
cttatttttttttgt

SEQ ID NO: 1719586 - DNA, 15 bp, Homo sapiens
ttatttttttttgta

SEQ ID NO: 1719587 - DNA, 15 bp, Homo sapiens
tatttttttttgtac

SEQ ID NO: 1719588 - DNA, 15 bp, Homo sapiens
atttttttttgtact

SEQ ID NO: 1719589 - DNA, 15 bp, Homo sapiens
tttttttttgtacta

SEQ ID NO: 1719590 - DNA, 15 bp, Homo sapiens
ttttttttgtactaa

SEQ ID NO: 1719591 - DNA, 15 bp, Homo sapiens
tttttttgtactaaa

SEQ ID NO: 1719592 - DNA, 15 bp, Homo sapiens
ttttttgtactaaac

SEQ ID NO: 1719593 - DNA, 15 bp, Homo sapiens
tttttgtactaaact

SEQ ID NO: 1719594 - DNA, 15 bp, Homo sapiens
ttttgtactaaacta

SEQ ID NO: 1719595 - DNA, 15 bp, Homo sapiens
tttgtactaaactat

SEQ ID NO: 1719596 - DNA, 15 bp, Homo sapiens
ttgtactaaactata

SEQ ID NO: 1719597 - DNA, 15 bp, Homo sapiens
tgtactaaactataa

SEQ ID NO: 1719598 - DNA, 15 bp, Homo sapiens
gtactaaactataac

SEQ ID NO: 1719599 - DNA, 15 bp, Homo sapiens
tactaaactataaca

SEQ ID NO: 1719600 - DNA, 15 bp, Homo sapiens
actaaactataacaa

SEQ ID NO: 1719601 - DNA, 15 bp, Homo sapiens
ctaaactataacaat

SEQ ID NO: 1719602 - DNA, 15 bp, Homo sapiens
taaactataacaata

SEQ ID NO: 1719603 - DNA, 15 bp, Homo sapiens
aaactataacaataa

SEQ ID NO: 1719604 - DNA, 15 bp, Homo sapiens
aactataacaataat

SEQ ID NO: 1719605 - DNA, 15 bp, Homo sapiens
actataacaataata

SEQ ID NO: 1719606 - DNA, 15 bp, Homo sapiens
ctataacaataatag

SEQ ID NO: 1719607 - DNA, 15 bp, Homo sapiens
tataacaataatagt

SEQ ID NO: 1719608 - DNA, 15 bp, Homo sapiens
ataacaataatagtt

SEQ ID NO: 1719609 - DNA, 15 bp, Homo sapiens
taacaataatagttt

SEQ ID NO: 1719610 - DNA, 15 bp, Homo sapiens
aacaataatagtttt

SEQ ID NO: 1719611 - DNA, 15 bp, Homo sapiens
acaataatagtttta

SEQ ID NO: 1719612 - DNA, 15 bp, Homo sapiens
caataatagttttaa

SEQ ID NO: 1719613 - DNA, 15 bp, Homo sapiens
aataatagttttaac

SEQ ID NO: 1719614 - DNA, 15 bp, Homo sapiens
ataatagttttaaca

SEQ ID NO: 1719615 - DNA, 15 bp, Homo sapiens
taatagttttaacag

SEQ ID NO: 1719616 - DNA, 15 bp, Homo sapiens
aatagttttaacagt

SEQ ID NO: 1719617 - DNA, 15 bp, Homo sapiens
atagttttaacagta

SEQ ID NO: 1719618 - DNA, 15 bp, Homo sapiens
tagttttaacagtag

SEQ ID NO: 1719619 - DNA, 15 bp, Homo sapiens
agttttaacagtaga

SEQ ID NO: 1719620 - DNA, 15 bp, Homo sapiens
gttttaacagtagag

SEQ ID NO: 1719621 - DNA, 15 bp, Homo sapiens
ttttaacagtagagg

SEQ ID NO: 1719622 - DNA, 15 bp, Homo sapiens
tttaacagtagaggc

SEQ ID NO: 1719623 - DNA, 15 bp, Homo sapiens
ttaacagtagaggct

SEQ ID NO: 1719624 - DNA, 15 bp, Homo sapiens
taacagtagaggctc

SEQ ID NO: 1719625 - DNA, 15 bp, Homo sapiens
aacagtagaggctct

SEQ ID NO: 1719626 - DNA, 15 bp, Homo sapiens
acagtagaggctctt

SEQ ID NO: 1719627 - DNA, 15 bp, Homo sapiens
cagtagaggctcttt

SEQ ID NO: 1719628 - DNA, 15 bp, Homo sapiens
agtagaggctctttt

SEQ ID NO: 1719629 - DNA, 15 bp, Homo sapiens
gtagaggctcttttg

SEQ ID NO: 1719630 - DNA, 15 bp, Homo sapiens
tagaggctcttttga

SEQ ID NO: 1719631 - DNA, 15 bp, Homo sapiens
agaggctcttttgag

SEQ ID NO: 1719632 - DNA, 15 bp, Homo sapiens
gaggctcttttgagc

SEQ ID NO: 1719633 - DNA, 15 bp, Homo sapiens
aggctcttttgagct

SEQ ID NO: 1719634 - DNA, 15 bp, Homo sapiens
ggctcttttgagctt

SEQ ID NO: 1719635 - DNA, 15 bp, Homo sapiens
gctcttttgagcttc

SEQ ID NO: 1719636 - DNA, 15 bp, Homo sapiens
ctcttttgagcttca

SEQ ID NO: 1719637 - DNA, 15 bp, Homo sapiens
tcttttgagcttcag

SEQ ID NO: 1719638 - DNA, 15 bp, Homo sapiens
cttttgagcttcaga

SEQ ID NO: 1719639 - DNA, 15 bp, Homo sapiens
ttttgagcttcagaa

SEQ ID NO: 1719640 - DNA, 15 bp, Homo sapiens
tttgagcttcagaat

SEQ ID NO: 1719641 - DNA, 15 bp, Homo sapiens
ttgagcttcagaatt

SEQ ID NO: 1719642 - DNA, 15 bp, Homo sapiens
tgagcttcagaattg

SEQ ID NO: 1719643 - DNA, 15 bp, Homo sapiens
gagcttcagaattga

SEQ ID NO: 1719644 - DNA, 15 bp, Homo sapiens
agcttcagaattgaa

SEQ ID NO: 1719645 - DNA, 15 bp, Homo sapiens
gcttcagaattgaat

SEQ ID NO: 1719646 - DNA, 15 bp, Homo sapiens
cttcagaattgaata

SEQ ID NO: 1719647 - DNA, 15 bp, Homo sapiens
ttcagaattgaatac

SEQ ID NO: 1719648 - DNA, 15 bp, Homo sapiens
tcagaattgaataca

SEQ ID NO: 1719649 - DNA, 15 bp, Homo sapiens
cagaattgaatacat

SEQ ID NO: 1719650 - DNA, 15 bp, Homo sapiens
agaattgaatacata

SEQ ID NO: 1719651 - DNA, 15 bp, Homo sapiens
gaattgaatacatat

SEQ ID NO: 1719652 - DNA, 15 bp, Homo sapiens
aattgaatacatata

SEQ ID NO: 1719653 - DNA, 15 bp, Homo sapiens
attgaatacatatat

SEQ ID NO: 1719654 - DNA, 15 bp, Homo sapiens
ttgaatacatatata

SEQ ID NO: 1719655 - DNA, 15 bp, Homo sapiens
tgaatacatatataa

SEQ ID NO: 1719656 - DNA, 15 bp, Homo sapiens
gaatacatatataag

SEQ ID NO: 1719657 - DNA, 15 bp, Homo sapiens
aatacatatataagc

SEQ ID NO: 1719658 - DNA, 15 bp, Homo sapiens
atacatatataagca

SEQ ID NO: 1719659 - DNA, 15 bp, Homo sapiens
tacatatataagcaa

SEQ ID NO: 1719660 - DNA, 15 bp, Homo sapiens
acatatataagcaaa

SEQ ID NO: 1719661 - DNA, 15 bp, Homo sapiens
catatataagcaaat

SEQ ID NO: 1719662 - DNA, 15 bp, Homo sapiens
atatataagcaaatg

SEQ ID NO: 1719663 - DNA, 15 bp, Homo sapiens
tatataagcaaatgt

SEQ ID NO: 1719664 - DNA, 15 bp, Homo sapiens
atataagcaaatgtt

SEQ ID NO: 1719665 - DNA, 15 bp, Homo sapiens
tataagcaaatgtta

SEQ ID NO: 1719666 - DNA, 15 bp, Homo sapiens
ataagcaaatgttac

SEQ ID NO: 1719667 - DNA, 15 bp, Homo sapiens
taagcaaatgttact

SEQ ID NO: 1719668 - DNA, 15 bp, Homo sapiens
aagcaaatgttactg

SEQ ID NO: 1719669 - DNA, 15 bp, Homo sapiens
agcaaatgttactgc

SEQ ID NO: 1719670 - DNA, 15 bp, Homo sapiens
gcaaatgttactgct

SEQ ID NO: 1719671 - DNA, 15 bp, Homo sapiens
caaatgttactgctt

SEQ ID NO: 1719672 - DNA, 15 bp, Homo sapiens
aaatgttactgcttt

SEQ ID NO: 1719673 - DNA, 15 bp, Homo sapiens
aatgttactgcttta

SEQ ID NO: 1719674 - DNA, 15 bp, Homo sapiens
atgttactgctttat

SEQ ID NO: 1719675 - DNA, 15 bp, Homo sapiens
tgttactgctttatt

SEQ ID NO: 1719676 - DNA, 15 bp, Homo sapiens
gttactgctttatta

SEQ ID NO: 1719677 - DNA, 15 bp, Homo sapiens
ttactgctttattac

SEQ ID NO: 1719678 - DNA, 15 bp, Homo sapiens
tactgctttattacc

SEQ ID NO: 1719679 - DNA, 15 bp, Homo sapiens
actgctttattaccc

SEQ ID NO: 1719680 - DNA, 15 bp, Homo sapiens
ctgctttattaccct

SEQ ID NO: 1719681 - DNA, 15 bp, Homo sapiens
tgctttattaccctt

SEQ ID NO: 1719682 - DNA, 15 bp, Homo sapiens
gctttattacccttt

SEQ ID NO: 1719683 - DNA, 15 bp, Homo sapiens
ctttattaccctttt

SEQ ID NO: 1719684 - DNA, 15 bp, Homo sapiens
tttattacccttttt

SEQ ID NO: 1719685 - DNA, 15 bp, Homo sapiens
ttattaccctttttc

SEQ ID NO: 1719686 - DNA, 15 bp, Homo sapiens
tattaccctttttca

SEQ ID NO: 1719687 - DNA, 15 bp, Homo sapiens
attaccctttttcat

SEQ ID NO: 1719688 - DNA, 15 bp, Homo sapiens
ttaccctttttcatc

SEQ ID NO: 1719689 - DNA, 15 bp, Homo sapiens
taccctttttcatcc

SEQ ID NO: 1719690 - DNA, 15 bp, Homo sapiens
accctttttcatcct

SEQ ID NO: 1719691 - DNA, 15 bp, Homo sapiens
ccctttttcatcctg

SEQ ID NO: 1719692 - DNA, 15 bp, Homo sapiens
cctttttcatcctgg

SEQ ID NO: 1719693 - DNA, 15 bp, Homo sapiens
ctttttcatcctggc

SEQ ID NO: 1719694 - DNA, 15 bp, Homo sapiens
tttttcatcctggct

SEQ ID NO: 1719695 - DNA, 15 bp, Homo sapiens
ttttcatcctggctt

SEQ ID NO: 1719696 - DNA, 15 bp, Homo sapiens
tttcatcctggcttt

SEQ ID NO: 1719697 - DNA, 15 bp, Homo sapiens
ttcatcctggctttg

SEQ ID NO: 1719698 - DNA, 15 bp, Homo sapiens
tcatcctggctttgt

SEQ ID NO: 1719699 - DNA, 15 bp, Homo sapiens
catcctggctttgtc

SEQ ID NO: 1719700 - DNA, 15 bp, Homo sapiens
atcctggctttgtct

SEQ ID NO: 1719701 - DNA, 15 bp, Homo sapiens
tcctggctttgtctc

SEQ ID NO: 1719702 - DNA, 15 bp, Homo sapiens
cctggctttgtctct

SEQ ID NO: 1719703 - DNA, 15 bp, Homo sapiens
ctggctttgtctcta

SEQ ID NO: 1719704 - DNA, 15 bp, Homo sapiens
tggctttgtctctac

SEQ ID NO: 1719705 - DNA, 15 bp, Homo sapiens
ggctttgtctctacc

SEQ ID NO: 1719706 - DNA, 15 bp, Homo sapiens
gctttgtctctacct

SEQ ID NO: 1719707 - DNA, 15 bp, Homo sapiens
ctttgtctctacctt

SEQ ID NO: 1719708 - DNA, 15 bp, Homo sapiens
tttgtctctaccttc

SEQ ID NO: 1719709 - DNA, 15 bp, Homo sapiens
ttgtctctaccttcc

SEQ ID NO: 1719710 - DNA, 15 bp, Homo sapiens
tgtctctaccttccc

SEQ ID NO: 1719711 - DNA, 15 bp, Homo sapiens
gtctctaccttccct

SEQ ID NO: 1719712 - DNA, 15 bp, Homo sapiens
tctctaccttccctg

SEQ ID NO: 1719713 - DNA, 15 bp, Homo sapiens
ctctaccttccctgg

SEQ ID NO: 1719714 - DNA, 15 bp, Homo sapiens
tctaccttccctggg

SEQ ID NO: 1719715 - DNA, 15 bp, Homo sapiens
ctaccttccctggga

SEQ ID NO: 1719716 - DNA, 15 bp, Homo sapiens
taccttccctgggaa

SEQ ID NO: 1719717 - DNA, 15 bp, Homo sapiens
accttccctgggaac

SEQ ID NO: 1719718 - DNA, 15 bp, Homo sapiens
ccttccctgggaact

SEQ ID NO: 1719719 - DNA, 15 bp, Homo sapiens
cttccctgggaactg

SEQ ID NO: 1719720 - DNA, 15 bp, Homo sapiens
ttccctgggaactgg

SEQ ID NO: 1719721 - DNA, 15 bp, Homo sapiens
tccctgggaactggc

SEQ ID NO: 1719722 - DNA, 15 bp, Homo sapiens
ccctgggaactggcc

SEQ ID NO: 1719723 - DNA, 15 bp, Homo sapiens
cctgggaactggccc

SEQ ID NO: 1719724 - DNA, 15 bp, Homo sapiens
ctgggaactggccca

SEQ ID NO: 1719725 - DNA, 15 bp, Homo sapiens
tgggaactggcccag

SEQ ID NO: 1719726 - DNA, 15 bp, Homo sapiens
gggaactggcccagt

SEQ ID NO: 1719727 - DNA, 15 bp, Homo sapiens
ggaactggcccagtt

SEQ ID NO: 1719728 - DNA, 15 bp, Homo sapiens
gaactggcccagttt

SEQ ID NO: 1719729 - DNA, 15 bp, Homo sapiens
aactggcccagtttg

SEQ ID NO: 1719730 - DNA, 15 bp, Homo sapiens
actggcccagtttga

SEQ ID NO: 1719731 - DNA, 15 bp, Homo sapiens
ctggcccagtttgaa

SEQ ID NO: 1719732 - DNA, 15 bp, Homo sapiens
tggcccagtttgaat

SEQ ID NO: 1719733 - DNA, 15 bp, Homo sapiens
ggcccagtttgaatc

SEQ ID NO: 1719734 - DNA, 15 bp, Homo sapiens
gcccagtttgaatct

SEQ ID NO: 1719735 - DNA, 15 bp, Homo sapiens
cccagtttgaatctt

SEQ ID NO: 1719736 - DNA, 15 bp, Homo sapiens
ccagtttgaatctta

SEQ ID NO: 1719737 - DNA, 15 bp, Homo sapiens
cagtttgaatcttat

SEQ ID NO: 1719738 - DNA, 15 bp, Homo sapiens
agtttgaatcttatt

SEQ ID NO: 1719739 - DNA, 15 bp, Homo sapiens
gtttgaatcttattt

SEQ ID NO: 1719740 - DNA, 15 bp, Homo sapiens
tttgaatcttatttc

SEQ ID NO: 1719741 - DNA, 15 bp, Homo sapiens
ttgaatcttatttcc

SEQ ID NO: 1719742 - DNA, 15 bp, Homo sapiens
tgaatcttatttcct

SEQ ID NO: 1719743 - DNA, 15 bp, Homo sapiens
gaatcttatttccta

SEQ ID NO: 1719744 - DNA, 15 bp, Homo sapiens
aatcttatttcctaa

SEQ ID NO: 1719745 - DNA, 15 bp, Homo sapiens
atcttatttcctaat

SEQ ID NO: 1719746 - DNA, 15 bp, Homo sapiens
tcttatttcctaatg

SEQ ID NO: 1719747 - DNA, 15 bp, Homo sapiens
cttatttcctaatgg

SEQ ID NO: 1719748 - DNA, 15 bp, Homo sapiens
ttatttcctaatgga

SEQ ID NO: 1719749 - DNA, 15 bp, Homo sapiens
tatttcctaatggag

SEQ ID NO: 1719750 - DNA, 15 bp, Homo sapiens
atttcctaatggagc

SEQ ID NO: 1719751 - DNA, 15 bp, Homo sapiens
tttcctaatggagct

SEQ ID NO: 1719752 - DNA, 15 bp, Homo sapiens
ttcctaatggagctc

SEQ ID NO: 1719753 - DNA, 15 bp, Homo sapiens
tcctaatggagctca

SEQ ID NO: 1719754 - DNA, 15 bp, Homo sapiens
cctaatggagctcat

SEQ ID NO: 1719755 - DNA, 15 bp, Homo sapiens
ctaatggagctcata

SEQ ID NO: 1719756 - DNA, 15 bp, Homo sapiens
taatggagctcataa

SEQ ID NO: 1719757 - DNA, 15 bp, Homo sapiens
aatggagctcataat

SEQ ID NO: 1719758 - DNA, 15 bp, Homo sapiens
atggagctcataatg

SEQ ID NO: 1719759 - DNA, 15 bp, Homo sapiens
tggagctcataatgg

SEQ ID NO: 1719760 - DNA, 15 bp, Homo sapiens
ggagctcataatggg

SEQ ID NO: 1719761 - DNA, 15 bp, Homo sapiens
gagctcataatgggg

SEQ ID NO: 1719762 - DNA, 15 bp, Homo sapiens
agctcataatgggga

SEQ ID NO: 1719763 - DNA, 15 bp, Homo sapiens
gctcataatggggac

SEQ ID NO: 1719764 - DNA, 15 bp, Homo sapiens
ctcataatggggact

SEQ ID NO: 1719765 - DNA, 15 bp, Homo sapiens
tcataatggggacta

SEQ ID NO: 1719766 - DNA, 15 bp, Homo sapiens
cataatggggactag

SEQ ID NO: 1719767 - DNA, 15 bp, Homo sapiens
ataatggggactagg

SEQ ID NO: 1719768 - DNA, 15 bp, Homo sapiens
taatggggactagga

SEQ ID NO: 1719769 - DNA, 15 bp, Homo sapiens
aatggggactaggat

SEQ ID NO: 1719770 - DNA, 15 bp, Homo sapiens
atggggactaggatg

SEQ ID NO: 1719771 - DNA, 15 bp, Homo sapiens
tggggactaggatgt

SEQ ID NO: 1719772 - DNA, 15 bp, Homo sapiens
ggggactaggatgtg

SEQ ID NO: 1719773 - DNA, 15 bp, Homo sapiens
gggactaggatgtgt

SEQ ID NO: 1719774 - DNA, 15 bp, Homo sapiens
ggactaggatgtgtg

SEQ ID NO: 1719775 - DNA, 15 bp, Homo sapiens
gactaggatgtgtga

SEQ ID NO: 1719776 - DNA, 15 bp, Homo sapiens
actaggatgtgtgaa

SEQ ID NO: 1719777 - DNA, 15 bp, Homo sapiens
ctaggatgtgtgaaa

SEQ ID NO: 1719778 - DNA, 15 bp, Homo sapiens
taggatgtgtgaaat

SEQ ID NO: 1719779 - DNA, 15 bp, Homo sapiens
aggatgtgtgaaatt

SEQ ID NO: 1719780 - DNA, 15 bp, Homo sapiens
ggatgtgtgaaatta

SEQ ID NO: 1719781 - DNA, 15 bp, Homo sapiens
gatgtgtgaaattat

SEQ ID NO: 1719782 - DNA, 15 bp, Homo sapiens
atgtgtgaaattatt

SEQ ID NO: 1719783 - DNA, 15 bp, Homo sapiens
tgtgtgaaattattt

SEQ ID NO: 1719784 - DNA, 15 bp, Homo sapiens
gtgtgaaattattta

SEQ ID NO: 1719785 - DNA, 15 bp, Homo sapiens
tgtgaaattatttat

SEQ ID NO: 1719786 - DNA, 15 bp, Homo sapiens
gtgaaattatttatg

SEQ ID NO: 1719787 - DNA, 15 bp, Homo sapiens
tgaaattatttatgg

SEQ ID NO: 1719788 - DNA, 15 bp, Homo sapiens
gaaattatttatggc

SEQ ID NO: 1719789 - DNA, 15 bp, Homo sapiens
aaattatttatggct

SEQ ID NO: 1719790 - DNA, 15 bp, Homo sapiens
aattatttatggcta

SEQ ID NO: 1719791 - DNA, 15 bp, Homo sapiens
attatttatggctag

SEQ ID NO: 1719792 - DNA, 15 bp, Homo sapiens
ttatttatggctagg

SEQ ID NO: 1719793 - DNA, 15 bp, Homo sapiens
tatttatggctaggt

SEQ ID NO: 1719794 - DNA, 15 bp, Homo sapiens
atttatggctaggta

SEQ ID NO: 1719795 - DNA, 15 bp, Homo sapiens
tttatggctaggtac

SEQ ID NO: 1719796 - DNA, 15 bp, Homo sapiens
ttatggctaggtact

SEQ ID NO: 1719797 - DNA, 15 bp, Homo sapiens
tatggctaggtactg

SEQ ID NO: 1719798 - DNA, 15 bp, Homo sapiens
atggctaggtactgg

SEQ ID NO: 1719799 - DNA, 15 bp, Homo sapiens
tggctaggtactgga

SEQ ID NO: 1719800 - DNA, 15 bp, Homo sapiens
ggctaggtactggag

SEQ ID NO: 1719801 - DNA, 15 bp, Homo sapiens
gctaggtactggagg

SEQ ID NO: 1719802 - DNA, 15 bp, Homo sapiens
ctaggtactggagga

SEQ ID NO: 1719803 - DNA, 15 bp, Homo sapiens
taggtactggaggaa

SEQ ID NO: 1719804 - DNA, 15 bp, Homo sapiens
aggtactggaggaag

SEQ ID NO: 1719805 - DNA, 15 bp, Homo sapiens
ggtactggaggaagg

SEQ ID NO: 1719806 - DNA, 15 bp, Homo sapiens
gtactggaggaaggt

SEQ ID NO: 1719807 - DNA, 15 bp, Homo sapiens
tactggaggaaggta

SEQ ID NO: 1719808 - DNA, 15 bp, Homo sapiens
actggaggaaggtaa

SEQ ID NO: 1719809 - DNA, 15 bp, Homo sapiens
ctggaggaaggtaag

SEQ ID NO: 1719810 - DNA, 15 bp, Homo sapiens
tggaggaaggtaaga

SEQ ID NO: 1719811 - DNA, 15 bp, Homo sapiens
ggaggaaggtaagaa

SEQ ID NO: 1719812 - DNA, 15 bp, Homo sapiens
gaggaaggtaagaaa

SEQ ID NO: 1719813 - DNA, 15 bp, Homo sapiens
aggaaggtaagaaag

SEQ ID NO: 1719814 - DNA, 15 bp, Homo sapiens
ggaaggtaagaaagg

SEQ ID NO: 1719815 - DNA, 15 bp, Homo sapiens
gaaggtaagaaagga

SEQ ID NO: 1719816 - DNA, 15 bp, Homo sapiens
aaggtaagaaaggaa

SEQ ID NO: 1719817 - DNA, 15 bp, Homo sapiens
aggtaagaaaggaat

SEQ ID NO: 1719818 - DNA, 15 bp, Homo sapiens
ggtaagaaaggaatt

SEQ ID NO: 1719819 - DNA, 15 bp, Homo sapiens
gtaagaaaggaattt

SEQ ID NO: 1719820 - DNA, 15 bp, Homo sapiens
taagaaaggaatttc

SEQ ID NO: 1719821 - DNA, 15 bp, Homo sapiens
aagaaaggaatttca

SEQ ID NO: 1719822 - DNA, 15 bp, Homo sapiens
agaaaggaatttcat

SEQ ID NO: 1719823 - DNA, 15 bp, Homo sapiens
gaaaggaatttcatg

SEQ ID NO: 1719824 - DNA, 15 bp, Homo sapiens
aaaggaatttcatgt

SEQ ID NO: 1719825 - DNA, 15 bp, Homo sapiens
aaggaatttcatgtt

SEQ ID NO: 1719826 - DNA, 15 bp, Homo sapiens
aggaatttcatgtta

SEQ ID NO: 1719827 - DNA, 15 bp, Homo sapiens
ggaatttcatgttat

SEQ ID NO: 1719828 - DNA, 15 bp, Homo sapiens
gaatttcatgttatt

SEQ ID NO: 1719829 - DNA, 15 bp, Homo sapiens
aatttcatgttattt

SEQ ID NO: 1719830 - DNA, 15 bp, Homo sapiens
atttcatgttatttt

SEQ ID NO: 1719831 - DNA, 15 bp, Homo sapiens
tttcatgttattttt

SEQ ID NO: 1719832 - DNA, 15 bp, Homo sapiens
ttcatgttatttttg

SEQ ID NO: 1719833 - DNA, 15 bp, Homo sapiens
tcatgttatttttgg

SEQ ID NO: 1719834 - DNA, 15 bp, Homo sapiens
catgttatttttggg

SEQ ID NO: 1719835 - DNA, 15 bp, Homo sapiens
atgttatttttggga

SEQ ID NO: 1719836 - DNA, 15 bp, Homo sapiens
tgttatttttgggat

SEQ ID NO: 1719837 - DNA, 15 bp, Homo sapiens
gttatttttgggatt

SEQ ID NO: 1719838 - DNA, 15 bp, Homo sapiens
ttatttttgggattt

SEQ ID NO: 1719839 - DNA, 15 bp, Homo sapiens
tatttttgggatttg

SEQ ID NO: 1719840 - DNA, 15 bp, Homo sapiens
atttttgggatttga

SEQ ID NO: 1719841 - DNA, 15 bp, Homo sapiens
tttttgggatttgag

SEQ ID NO: 1719842 - DNA, 15 bp, Homo sapiens
ttttgggatttgagg

SEQ ID NO: 1719843 - DNA, 15 bp, Homo sapiens
tttgggatttgaggt

SEQ ID NO: 1719844 - DNA, 15 bp, Homo sapiens
ttgggatttgaggtg

SEQ ID NO: 1719845 - DNA, 15 bp, Homo sapiens
tgggatttgaggtgt

SEQ ID NO: 1719846 - DNA, 15 bp, Homo sapiens
gggatttgaggtgtg

SEQ ID NO: 1719847 - DNA, 15 bp, Homo sapiens
ggatttgaggtgtgc

SEQ ID NO: 1719848 - DNA, 15 bp, Homo sapiens
gatttgaggtgtgct

SEQ ID NO: 1719849 - DNA, 15 bp, Homo sapiens
atttgaggtgtgctt

SEQ ID NO: 1719850 - DNA, 15 bp, Homo sapiens
tttgaggtgtgcttt

SEQ ID NO: 1719851 - DNA, 15 bp, Homo sapiens
ttgaggtgtgctttt

SEQ ID NO: 1719852 - DNA, 15 bp, Homo sapiens
tgaggtgtgcttttg

SEQ ID NO: 1719853 - DNA, 15 bp, Homo sapiens
gaggtgtgcttttga

SEQ ID NO: 1719854 - DNA, 15 bp, Homo sapiens
aggtgtgcttttgaa

SEQ ID NO: 1719855 - DNA, 15 bp, Homo sapiens
ggtgtgcttttgaag

SEQ ID NO: 1719856 - DNA, 15 bp, Homo sapiens
gtgtgcttttgaagg

SEQ ID NO: 1719857 - DNA, 15 bp, Homo sapiens
tgtgcttttgaaggg

SEQ ID NO: 1719858 - DNA, 15 bp, Homo sapiens
gtgcttttgaagggt

SEQ ID NO: 1719859 - DNA, 15 bp, Homo sapiens
tgcttttgaagggta

SEQ ID NO: 1719860 - DNA, 15 bp, Homo sapiens
gcttttgaagggtat

SEQ ID NO: 1719861 - DNA, 15 bp, Homo sapiens
cttttgaagggtatg

SEQ ID NO: 1719862 - DNA, 15 bp, Homo sapiens
ttttgaagggtatga

SEQ ID NO: 1719863 - DNA, 15 bp, Homo sapiens
tttgaagggtatgat

SEQ ID NO: 1719864 - DNA, 15 bp, Homo sapiens
ttgaagggtatgatg

SEQ ID NO: 1719865 - DNA, 15 bp, Homo sapiens
tgaagggtatgatgg

SEQ ID NO: 1719866 - DNA, 15 bp, Homo sapiens
gaagggtatgatgga

SEQ ID NO: 1719867 - DNA, 15 bp, Homo sapiens
aagggtatgatggaa

SEQ ID NO: 1719868 - DNA, 15 bp, Homo sapiens
agggtatgatggaag

SEQ ID NO: 1719869 - DNA, 15 bp, Homo sapiens
gggtatgatggaaga

SEQ ID NO: 1719870 - DNA, 15 bp, Homo sapiens
ggtatgatggaagat

SEQ ID NO: 1719871 - DNA, 15 bp, Homo sapiens
gtatgatggaagatg

SEQ ID NO: 1719872 - DNA, 15 bp, Homo sapiens
tatgatggaagatga

SEQ ID NO: 1719873 - DNA, 15 bp, Homo sapiens
atgatggaagatgat

SEQ ID NO: 1719874 - DNA, 15 bp, Homo sapiens
tgatggaagatgatg

SEQ ID NO: 1719875 - DNA, 15 bp, Homo sapiens
gatggaagatgatgt

SEQ ID NO: 1719876 - DNA, 15 bp, Homo sapiens
atggaagatgatgtc

SEQ ID NO: 1719877 - DNA, 15 bp, Homo sapiens
tggaagatgatgtcc

SEQ ID NO: 1719878 - DNA, 15 bp, Homo sapiens
ggaagatgatgtcct

SEQ ID NO: 1719879 - DNA, 15 bp, Homo sapiens
gaagatgatgtcctg

SEQ ID NO: 1719880 - DNA, 15 bp, Homo sapiens
aagatgatgtcctgt

SEQ ID NO: 1719881 - DNA, 15 bp, Homo sapiens
agatgatgtcctgtt

SEQ ID NO: 1719882 - DNA, 15 bp, Homo sapiens
gatgatgtcctgttg

SEQ ID NO: 1719883 - DNA, 15 bp, Homo sapiens
atgatgtcctgttgt

SEQ ID NO: 1719884 - DNA, 15 bp, Homo sapiens
tgatgtcctgttgtc

SEQ ID NO: 1719885 - DNA, 15 bp, Homo sapiens
gatgtcctgttgtcc

SEQ ID NO: 1719886 - DNA, 15 bp, Homo sapiens
atgtcctgttgtcct

SEQ ID NO: 1719887 - DNA, 15 bp, Homo sapiens
tgtcctgttgtcctg

SEQ ID NO: 1719888 - DNA, 15 bp, Homo sapiens
gtcctgttgtcctgt

SEQ ID NO: 1719889 - DNA, 15 bp, Homo sapiens
tcctgttgtcctgtt

SEQ ID NO: 1719890 - DNA, 15 bp, Homo sapiens
cctgttgtcctgttg

SEQ ID NO: 1719891 - DNA, 15 bp, Homo sapiens
ctgttgtcctgttgt

SEQ ID NO: 1719892 - DNA, 15 bp, Homo sapiens
tgttgtcctgttgta

SEQ ID NO: 1719893 - DNA, 15 bp, Homo sapiens
gttgtcctgttgtaa

SEQ ID NO: 1719894 - DNA, 15 bp, Homo sapiens
ttgtcctgttgtaaa

SEQ ID NO: 1719895 - DNA, 15 bp, Homo sapiens
tgtcctgttgtaaat

SEQ ID NO: 1719896 - DNA, 15 bp, Homo sapiens
gtcctgttgtaaatc

SEQ ID NO: 1719897 - DNA, 15 bp, Homo sapiens
tcctgttgtaaatca

SEQ ID NO: 1719898 - DNA, 15 bp, Homo sapiens
cctgttgtaaatcaa

SEQ ID NO: 1719899 - DNA, 15 bp, Homo sapiens
ctgttgtaaatcaac

SEQ ID NO: 1719900 - DNA, 15 bp, Homo sapiens
tgttgtaaatcaaca

SEQ ID NO: 1719901 - DNA, 15 bp, Homo sapiens
gttgtaaatcaacag

SEQ ID NO: 1719902 - DNA, 15 bp, Homo sapiens
ttgtaaatcaacaga

SEQ ID NO: 1719903 - DNA, 15 bp, Homo sapiens
tgtaaatcaacagac

SEQ ID NO: 1719904 - DNA, 15 bp, Homo sapiens
gtaaatcaacagact

SEQ ID NO: 1719905 - DNA, 15 bp, Homo sapiens
taaatcaacagactt

SEQ ID NO: 1719906 - DNA, 15 bp, Homo sapiens
aaatcaacagacttt

SEQ ID NO: 1719907 - DNA, 15 bp, Homo sapiens
aatcaacagactttt

SEQ ID NO: 1719908 - DNA, 15 bp, Homo sapiens
atcaacagacttttc

SEQ ID NO: 1719909 - DNA, 15 bp, Homo sapiens
tcaacagacttttcc

SEQ ID NO: 1719910 - DNA, 15 bp, Homo sapiens
caacagacttttcct

SEQ ID NO: 1719911 - DNA, 15 bp, Homo sapiens
aacagacttttcctt

SEQ ID NO: 1719912 - DNA, 15 bp, Homo sapiens
acagacttttccttg

SEQ ID NO: 1719913 - DNA, 15 bp, Homo sapiens
cagacttttccttga

SEQ ID NO: 1719914 - DNA, 15 bp, Homo sapiens
agacttttccttgaa

SEQ ID NO: 1719915 - DNA, 15 bp, Homo sapiens
gacttttccttgaaa

SEQ ID NO: 1719916 - DNA, 15 bp, Homo sapiens
acttttccttgaaat

SEQ ID NO: 1719917 - DNA, 15 bp, Homo sapiens
cttttccttgaaata

SEQ ID NO: 1719918 - DNA, 15 bp, Homo sapiens
ttttccttgaaatat

SEQ ID NO: 1719919 - DNA, 15 bp, Homo sapiens
tttccttgaaatatg

SEQ ID NO: 1719920 - DNA, 15 bp, Homo sapiens
ttccttgaaatatga

SEQ ID NO: 1719921 - DNA, 15 bp, Homo sapiens
tccttgaaatatgat

SEQ ID NO: 1719922 - DNA, 15 bp, Homo sapiens
ccttgaaatatgatt

SEQ ID NO: 1719923 - DNA, 15 bp, Homo sapiens
cttgaaatatgattt

SEQ ID NO: 1719924 - DNA, 15 bp, Homo sapiens
ttgaaatatgatttt

SEQ ID NO: 1719925 - DNA, 15 bp, Homo sapiens
tgaaatatgatttta

SEQ ID NO: 1719926 - DNA, 15 bp, Homo sapiens
gaaatatgattttaa

SEQ ID NO: 1719927 - DNA, 15 bp, Homo sapiens
aaatatgattttaag

SEQ ID NO: 1719928 - DNA, 15 bp, Homo sapiens
aatatgattttaagt

SEQ ID NO: 1719929 - DNA, 15 bp, Homo sapiens
atatgattttaagtt

SEQ ID NO: 1719930 - DNA, 15 bp, Homo sapiens
tatgattttaagtta

SEQ ID NO: 1719931 - DNA, 15 bp, Homo sapiens
atgattttaagttag

SEQ ID NO: 1719932 - DNA, 15 bp, Homo sapiens
tgattttaagttaga

SEQ ID NO: 1719933 - DNA, 15 bp, Homo sapiens
gattttaagttagag

SEQ ID NO: 1719934 - DNA, 15 bp, Homo sapiens
attttaagttagagt

SEQ ID NO: 1719935 - DNA, 15 bp, Homo sapiens
ttttaagttagagtt

SEQ ID NO: 1719936 - DNA, 15 bp, Homo sapiens
tttaagttagagtta

SEQ ID NO: 1719937 - DNA, 15 bp, Homo sapiens
ttaagttagagttac

SEQ ID NO: 1719938 - DNA, 15 bp, Homo sapiens
taagttagagttacg

SEQ ID NO: 1719939 - DNA, 15 bp, Homo sapiens
aagttagagttacgt

SEQ ID NO: 1719940 - DNA, 15 bp, Homo sapiens
agttagagttacgtt

SEQ ID NO: 1719941 - DNA, 15 bp, Homo sapiens
gttagagttacgttt

SEQ ID NO: 1719942 - DNA, 15 bp, Homo sapiens
ttagagttacgtttt

SEQ ID NO: 1719943 - DNA, 15 bp, Homo sapiens
tagagttacgttttt

SEQ ID NO: 1719944 - DNA, 15 bp, Homo sapiens
agagttacgtttttg

SEQ ID NO: 1719945 - DNA, 15 bp, Homo sapiens
gagttacgtttttga

SEQ ID NO: 1719946 - DNA, 15 bp, Homo sapiens
agttacgtttttgag

SEQ ID NO: 1719947 - DNA, 15 bp, Homo sapiens
gttacgtttttgagg

SEQ ID NO: 1719948 - DNA, 15 bp, Homo sapiens
ttacgtttttgaggt

SEQ ID NO: 1719949 - DNA, 15 bp, Homo sapiens
tacgtttttgaggtt

SEQ ID NO: 1719950 - DNA, 15 bp, Homo sapiens
acgtttttgaggttt

SEQ ID NO: 1719951 - DNA, 15 bp, Homo sapiens
cgtttttgaggtttg

SEQ ID NO: 1719952 - DNA, 15 bp, Homo sapiens
gtttttgaggtttgg

SEQ ID NO: 1719953 - DNA, 15 bp, Homo sapiens
tttttgaggtttggc

SEQ ID NO: 1719954 - DNA, 15 bp, Homo sapiens
ttttgaggtttggcc

SEQ ID NO: 1719955 - DNA, 15 bp, Homo sapiens
tttgaggtttggcct

SEQ ID NO: 1719956 - DNA, 15 bp, Homo sapiens
ttgaggtttggcctg

SEQ ID NO: 1719957 - DNA, 15 bp, Homo sapiens
tgaggtttggcctga

SEQ ID NO: 1719958 - DNA, 15 bp, Homo sapiens
gaggtttggcctgag

SEQ ID NO: 1719959 - DNA, 15 bp, Homo sapiens
aggtttggcctgaga

SEQ ID NO: 1719960 - DNA, 15 bp, Homo sapiens
ggtttggcctgagaa

SEQ ID NO: 1719961 - DNA, 15 bp, Homo sapiens
gtttggcctgagaat

SEQ ID NO: 1719962 - DNA, 15 bp, Homo sapiens
tttggcctgagaatt

SEQ ID NO: 1719963 - DNA, 15 bp, Homo sapiens
ttggcctgagaattt

SEQ ID NO: 1719964 - DNA, 15 bp, Homo sapiens
tggcctgagaattta

SEQ ID NO: 1719965 - DNA, 15 bp, Homo sapiens
ggcctgagaatttaa

SEQ ID NO: 1719966 - DNA, 15 bp, Homo sapiens
gcctgagaatttaac

SEQ ID NO: 1719967 - DNA, 15 bp, Homo sapiens
cctgagaatttaacc

SEQ ID NO: 1719968 - DNA, 15 bp, Homo sapiens
ctgagaatttaacct

SEQ ID NO: 1719969 - DNA, 15 bp, Homo sapiens
tgagaatttaacctt

SEQ ID NO: 1719970 - DNA, 15 bp, Homo sapiens
gagaatttaaccttc

SEQ ID NO: 1719971 - DNA, 15 bp, Homo sapiens
agaatttaaccttca

SEQ ID NO: 1719972 - DNA, 15 bp, Homo sapiens
gaatttaaccttcat

SEQ ID NO: 1719973 - DNA, 15 bp, Homo sapiens
aatttaaccttcatt

SEQ ID NO: 1719974 - DNA, 15 bp, Homo sapiens
atttaaccttcattt

SEQ ID NO: 1719975 - DNA, 15 bp, Homo sapiens
tttaaccttcattta

SEQ ID NO: 1719976 - DNA, 15 bp, Homo sapiens
ttaaccttcatttat

SEQ ID NO: 1719977 - DNA, 15 bp, Homo sapiens
taaccttcatttata

SEQ ID NO: 1719978 - DNA, 15 bp, Homo sapiens
aaccttcatttatat

SEQ ID NO: 1719979 - DNA, 15 bp, Homo sapiens
accttcatttatata

SEQ ID NO: 1719980 - DNA, 15 bp, Homo sapiens
ccttcatttatataa

SEQ ID NO: 1719981 - DNA, 15 bp, Homo sapiens
cttcatttatataat

SEQ ID NO: 1719982 - DNA, 15 bp, Homo sapiens
ttcatttatataata

SEQ ID NO: 1719983 - DNA, 15 bp, Homo sapiens
tcatttatataataa

SEQ ID NO: 1719984 - DNA, 15 bp, Homo sapiens
catttatataataat

SEQ ID NO: 1719985 - DNA, 15 bp, Homo sapiens
atttatataataata

SEQ ID NO: 1719986 - DNA, 15 bp, Homo sapiens
tttatataataatat

SEQ ID NO: 1719987 - DNA, 15 bp, Homo sapiens
ttatataataatatc

SEQ ID NO: 1719988 - DNA, 15 bp, Homo sapiens
tatataataatatct

SEQ ID NO: 1719989 - DNA, 15 bp, Homo sapiens
atataataatatcta

SEQ ID NO: 1719990 - DNA, 15 bp, Homo sapiens
tataataatatctaa

SEQ ID NO: 1719991 - DNA, 15 bp, Homo sapiens
ataataatatctaag

SEQ ID NO: 1719992 - DNA, 15 bp, Homo sapiens
taataatatctaagg

SEQ ID NO: 1719993 - DNA, 15 bp, Homo sapiens
aataatatctaaggg

SEQ ID NO: 1719994 - DNA, 15 bp, Homo sapiens
ataatatctaaggga

SEQ ID NO: 1719995 - DNA, 15 bp, Homo sapiens
taatatctaagggag

SEQ ID NO: 1719996 - DNA, 15 bp, Homo sapiens
aatatctaagggaga

SEQ ID NO: 1719997 - DNA, 15 bp, Homo sapiens
atatctaagggagaa

SEQ ID NO: 1719998 - DNA, 15 bp, Homo sapiens
tatctaagggagaat

SEQ ID NO: 1719999 - DNA, 15 bp, Homo sapiens
atctaagggagaatg

SEQ ID NO: 1720000 - DNA, 15 bp, Homo sapiens
tctaagggagaatgt

SEQ ID NO: 1720001 - DNA, 15 bp, Homo sapiens
ctaagggagaatgtg

SEQ ID NO: 1720002 - DNA, 15 bp, Homo sapiens
taagggagaatgtga

SEQ ID NO: 1720003 - DNA, 15 bp, Homo sapiens
aagggagaatgtgat

SEQ ID NO: 1720004 - DNA, 15 bp, Homo sapiens
agggagaatgtgata

SEQ ID NO: 1720005 - DNA, 15 bp, Homo sapiens
gggagaatgtgatac

SEQ ID NO: 1720006 - DNA, 15 bp, Homo sapiens
ggagaatgtgataca

SEQ ID NO: 1720007 - DNA, 15 bp, Homo sapiens
gagaatgtgatacag

SEQ ID NO: 1720008 - DNA, 15 bp, Homo sapiens
agaatgtgatacagt

SEQ ID NO: 1720009 - DNA, 15 bp, Homo sapiens
gaatgtgatacagtg

SEQ ID NO: 1720010 - DNA, 15 bp, Homo sapiens
aatgtgatacagtgt

SEQ ID NO: 1720011 - DNA, 15 bp, Homo sapiens
atgtgatacagtgtg

SEQ ID NO: 1720012 - DNA, 15 bp, Homo sapiens
tgtgatacagtgtgt

SEQ ID NO: 1720013 - DNA, 15 bp, Homo sapiens
gtgatacagtgtgtt

SEQ ID NO: 1720014 - DNA, 15 bp, Homo sapiens
tgatacagtgtgttc

SEQ ID NO: 1720015 - DNA, 15 bp, Homo sapiens
gatacagtgtgttct

SEQ ID NO: 1720016 - DNA, 15 bp, Homo sapiens
atacagtgtgttcta

SEQ ID NO: 1720017 - DNA, 15 bp, Homo sapiens
tacagtgtgttctaa

SEQ ID NO: 1720018 - DNA, 15 bp, Homo sapiens
acagtgtgttctaag

SEQ ID NO: 1720019 - DNA, 15 bp, Homo sapiens
cagtgtgttctaaga

SEQ ID NO: 1720020 - DNA, 15 bp, Homo sapiens
agtgtgttctaagaa

SEQ ID NO: 1720021 - DNA, 15 bp, Homo sapiens
gtgtgttctaagaag

SEQ ID NO: 1720022 - DNA, 15 bp, Homo sapiens
tgtgttctaagaagc

SEQ ID NO: 1720023 - DNA, 15 bp, Homo sapiens
gtgttctaagaagca

SEQ ID NO: 1720024 - DNA, 15 bp, Homo sapiens
tgttctaagaagcaa

SEQ ID NO: 1720025 - DNA, 15 bp, Homo sapiens
gttctaagaagcaaa

SEQ ID NO: 1720026 - DNA, 15 bp, Homo sapiens
ttctaagaagcaaat

SEQ ID NO: 1720027 - DNA, 15 bp, Homo sapiens
tctaagaagcaaatg

SEQ ID NO: 1720028 - DNA, 15 bp, Homo sapiens
ctaagaagcaaatgt

SEQ ID NO: 1720029 - DNA, 15 bp, Homo sapiens
taagaagcaaatgta

SEQ ID NO: 1720030 - DNA, 15 bp, Homo sapiens
aagaagcaaatgtaa

SEQ ID NO: 1720031 - DNA, 15 bp, Homo sapiens
agaagcaaatgtaat

SEQ ID NO: 1720032 - DNA, 15 bp, Homo sapiens
gaagcaaatgtaatg

SEQ ID NO: 1720033 - DNA, 15 bp, Homo sapiens
aagcaaatgtaatga

SEQ ID NO: 1720034 - DNA, 15 bp, Homo sapiens
agcaaatgtaatgac

SEQ ID NO: 1720035 - DNA, 15 bp, Homo sapiens
gcaaatgtaatgaca

SEQ ID NO: 1720036 - DNA, 15 bp, Homo sapiens
caaatgtaatgacag

SEQ ID NO: 1720037 - DNA, 15 bp, Homo sapiens
aaatgtaatgacaga

SEQ ID NO: 1720038 - DNA, 15 bp, Homo sapiens
aatgtaatgacagaa

SEQ ID NO: 1720039 - DNA, 15 bp, Homo sapiens
atgtaatgacagaat

SEQ ID NO: 1720040 - DNA, 15 bp, Homo sapiens
tgtaatgacagaata

SEQ ID NO: 1720041 - DNA, 15 bp, Homo sapiens
gtaatgacagaataa

SEQ ID NO: 1720042 - DNA, 15 bp, Homo sapiens
taatgacagaataaa

SEQ ID NO: 1720043 - DNA, 15 bp, Homo sapiens
aatgacagaataaat

SEQ ID NO: 1720044 - DNA, 15 bp, Homo sapiens
atgacagaataaatg

SEQ ID NO: 1720045 - DNA, 15 bp, Homo sapiens
tgacagaataaatgt

SEQ ID NO: 1720046 - DNA, 15 bp, Homo sapiens
gacagaataaatgtg

SEQ ID NO: 1720047 - DNA, 15 bp, Homo sapiens
acagaataaatgtgt

SEQ ID NO: 1720048 - DNA, 15 bp, Homo sapiens
cagaataaatgtgtt

SEQ ID NO: 1720049 - DNA, 15 bp, Homo sapiens
agaataaatgtgttt

SEQ ID NO: 1720050 - DNA, 15 bp, Homo sapiens
gaataaatgtgtttc

SEQ ID NO: 1720051 - DNA, 15 bp, Homo sapiens
aataaatgtgtttcc

SEQ ID NO: 1720052 - DNA, 15 bp, Homo sapiens
ataaatgtgtttcca

SEQ ID NO: 1720053 - DNA, 15 bp, Homo sapiens
taaatgtgtttccag

SEQ ID NO: 1720054 - DNA, 15 bp, Homo sapiens
aaatgtgtttccagt

SEQ ID NO: 1720055 - DNA, 15 bp, Homo sapiens
aatgtgtttccagtg

SEQ ID NO: 1720056 - DNA, 15 bp, Homo sapiens
atgtgtttccagtgc

SEQ ID NO: 1720057 - DNA, 15 bp, Homo sapiens
tgtgtttccagtgca

SEQ ID NO: 1720058 - DNA, 15 bp, Homo sapiens
gtgtttccagtgcag

SEQ ID NO: 1720059 - DNA, 15 bp, Homo sapiens
tgtttccagtgcagc

SEQ ID NO: 1720060 - DNA, 15 bp, Homo sapiens
gtttccagtgcagct

SEQ ID NO: 1720061 - DNA, 15 bp, Homo sapiens
tttccagtgcagcta

SEQ ID NO: 1720062 - DNA, 15 bp, Homo sapiens
ttccagtgcagctat

SEQ ID NO: 1720063 - DNA, 15 bp, Homo sapiens
tccagtgcagctatt

SEQ ID NO: 1720064 - DNA, 15 bp, Homo sapiens
ccagtgcagctattc

SEQ ID NO: 1720065 - DNA, 15 bp, Homo sapiens
cagtgcagctattct

SEQ ID NO: 1720066 - DNA, 15 bp, Homo sapiens
agtgcagctattcta

SEQ ID NO: 1720067 - DNA, 15 bp, Homo sapiens
gtgcagctattctag

SEQ ID NO: 1720068 - DNA, 15 bp, Homo sapiens
tgcagctattctagt

SEQ ID NO: 1720069 - DNA, 15 bp, Homo sapiens
gcagctattctagtg

SEQ ID NO: 1720070 - DNA, 15 bp, Homo sapiens
cagctattctagtgg

SEQ ID NO: 1720071 - DNA, 15 bp, Homo sapiens
agctattctagtggc

SEQ ID NO: 1720072 - DNA, 15 bp, Homo sapiens
gctattctagtggca

SEQ ID NO: 1720073 - DNA, 15 bp, Homo sapiens
ctattctagtggcag

SEQ ID NO: 1720074 - DNA, 15 bp, Homo sapiens
tattctagtggcagt

SEQ ID NO: 1720075 - DNA, 15 bp, Homo sapiens
attctagtggcagtt

SEQ ID NO: 1720076 - DNA, 15 bp, Homo sapiens
ttctagtggcagttg

SEQ ID NO: 1720077 - DNA, 15 bp, Homo sapiens
tctagtggcagttgt

SEQ ID NO: 1720078 - DNA, 15 bp, Homo sapiens
ctagtggcagttgtc

SEQ ID NO: 1720079 - DNA, 15 bp, Homo sapiens
tagtggcagttgtct

SEQ ID NO: 1720080 - DNA, 15 bp, Homo sapiens
agtggcagttgtctc

SEQ ID NO: 1720081 - DNA, 15 bp, Homo sapiens
gtggcagttgtctct

SEQ ID NO: 1720082 - DNA, 15 bp, Homo sapiens
tggcagttgtctctc

SEQ ID NO: 1720083 - DNA, 15 bp, Homo sapiens
ggcagttgtctctct

SEQ ID NO: 1720084 - DNA, 15 bp, Homo sapiens
gcagttgtctctctt

SEQ ID NO: 1720085 - DNA, 15 bp, Homo sapiens
cagttgtctctcttc

SEQ ID NO: 1720086 - DNA, 15 bp, Homo sapiens
agttgtctctcttct

SEQ ID NO: 1720087 - DNA, 15 bp, Homo sapiens
gttgtctctcttctt

SEQ ID NO: 1720088 - DNA, 15 bp, Homo sapiens
ttgtctctcttcttt

SEQ ID NO: 1720089 - DNA, 15 bp, Homo sapiens
tgtctctcttctttg

SEQ ID NO: 1720090 - DNA, 15 bp, Homo sapiens
gtctctcttctttga

SEQ ID NO: 1720091 - DNA, 15 bp, Homo sapiens
tctctcttctttgaa

SEQ ID NO: 1720092 - DNA, 15 bp, Homo sapiens
ctctcttctttgaaa

SEQ ID NO: 1720093 - DNA, 15 bp, Homo sapiens
tctcttctttgaaac

SEQ ID NO: 1720094 - DNA, 15 bp, Homo sapiens
ctcttctttgaaaca

SEQ ID NO: 1720095 - DNA, 15 bp, Homo sapiens
tcttctttgaaacaa

SEQ ID NO: 1720096 - DNA, 15 bp, Homo sapiens
cttctttgaaacaag

SEQ ID NO: 1720097 - DNA, 15 bp, Homo sapiens
ttctttgaaacaaga

SEQ ID NO: 1720098 - DNA, 15 bp, Homo sapiens
tctttgaaacaagag

SEQ ID NO: 1720099 - DNA, 15 bp, Homo sapiens
ctttgaaacaagagg

SEQ ID NO: 1720100 - DNA, 15 bp, Homo sapiens
tttgaaacaagagga

SEQ ID NO: 1720101 - DNA, 15 bp, Homo sapiens
ttgaaacaagaggag

SEQ ID NO: 1720102 - DNA, 15 bp, Homo sapiens
tgaaacaagaggagg

SEQ ID NO: 1720103 - DNA, 15 bp, Homo sapiens
gaaacaagaggagga

SEQ ID NO: 1720104 - DNA, 15 bp, Homo sapiens
aaacaagaggaggaa

SEQ ID NO: 1720105 - DNA, 15 bp, Homo sapiens
aacaagaggaggaat

SEQ ID NO: 1720106 - DNA, 15 bp, Homo sapiens
acaagaggaggaata

SEQ ID NO: 1720107 - DNA, 15 bp, Homo sapiens
caagaggaggaatat

SEQ ID NO: 1720108 - DNA, 15 bp, Homo sapiens
aagaggaggaatatt

SEQ ID NO: 1720109 - DNA, 15 bp, Homo sapiens
agaggaggaatattg

SEQ ID NO: 1720110 - DNA, 15 bp, Homo sapiens
gaggaggaatattgt

SEQ ID NO: 1720111 - DNA, 15 bp, Homo sapiens
aggaggaatattgtc

SEQ ID NO: 1720112 - DNA, 15 bp, Homo sapiens
ggaggaatattgtca

SEQ ID NO: 1720113 - DNA, 15 bp, Homo sapiens
gaggaatattgtcaa

SEQ ID NO: 1720114 - DNA, 15 bp, Homo sapiens
aggaatattgtcaaa

SEQ ID NO: 1720115 - DNA, 15 bp, Homo sapiens
ggaatattgtcaaaa

SEQ ID NO: 1720116 - DNA, 15 bp, Homo sapiens
gaatattgtcaaaaa

SEQ ID NO: 1720117 - DNA, 15 bp, Homo sapiens
aatattgtcaaaaag

SEQ ID NO: 1720118 - DNA, 15 bp, Homo sapiens
atattgtcaaaaagg

SEQ ID NO: 1720119 - DNA, 15 bp, Homo sapiens
tattgtcaaaaagga

SEQ ID NO: 1720120 - DNA, 15 bp, Homo sapiens
attgtcaaaaaggaa

SEQ ID NO: 1720121 - DNA, 15 bp, Homo sapiens
ttgtcaaaaaggaaa

SEQ ID NO: 1720122 - DNA, 15 bp, Homo sapiens
tgtcaaaaaggaaac

SEQ ID NO: 1720123 - DNA, 15 bp, Homo sapiens
gtcaaaaaggaaacc

SEQ ID NO: 1720124 - DNA, 15 bp, Homo sapiens
tcaaaaaggaaaccc

SEQ ID NO: 1720125 - DNA, 15 bp, Homo sapiens
caaaaaggaaaccct

SEQ ID NO: 1720126 - DNA, 15 bp, Homo sapiens
aaaaaggaaaccctt

SEQ ID NO: 1720127 - DNA, 15 bp, Homo sapiens
aaaaggaaacccttt

SEQ ID NO: 1720128 - DNA, 15 bp, Homo sapiens
aaaggaaaccctttt

SEQ ID NO: 1720129 - DNA, 15 bp, Homo sapiens
aaggaaacccttttt

SEQ ID NO: 1720130 - DNA, 15 bp, Homo sapiens
aggaaacccttttta

SEQ ID NO: 1720131 - DNA, 15 bp, Homo sapiens
ggaaaccctttttaa

SEQ ID NO: 1720132 - DNA, 15 bp, Homo sapiens
gaaaccctttttaac

SEQ ID NO: 1720133 - DNA, 15 bp, Homo sapiens
aaaccctttttaaca

SEQ ID NO: 1720134 - DNA, 15 bp, Homo sapiens
aaccctttttaacaa

SEQ ID NO: 1720135 - DNA, 15 bp, Homo sapiens
accctttttaacaat

SEQ ID NO: 1720136 - DNA, 15 bp, Homo sapiens
ccctttttaacaata

SEQ ID NO: 1720137 - DNA, 15 bp, Homo sapiens
cctttttaacaatag

SEQ ID NO: 1720138 - DNA, 15 bp, Homo sapiens
ctttttaacaataga

SEQ ID NO: 1720139 - DNA, 15 bp, Homo sapiens
tttttaacaatagaa

SEQ ID NO: 1720140 - DNA, 15 bp, Homo sapiens
ttttaacaatagaaa

SEQ ID NO: 1720141 - DNA, 15 bp, Homo sapiens
tttaacaatagaaag

SEQ ID NO: 1720142 - DNA, 15 bp, Homo sapiens
ttaacaatagaaagt

SEQ ID NO: 1720143 - DNA, 15 bp, Homo sapiens
taacaatagaaagta

SEQ ID NO: 1720144 - DNA, 15 bp, Homo sapiens
aacaatagaaagtag

SEQ ID NO: 1720145 - DNA, 15 bp, Homo sapiens
acaatagaaagtagg

SEQ ID NO: 1720146 - DNA, 15 bp, Homo sapiens
caatagaaagtaggt

SEQ ID NO: 1720147 - DNA, 15 bp, Homo sapiens
aatagaaagtaggtg

SEQ ID NO: 1720148 - DNA, 15 bp, Homo sapiens
atagaaagtaggtga

SEQ ID NO: 1720149 - DNA, 15 bp, Homo sapiens
tagaaagtaggtgat

SEQ ID NO: 1720150 - DNA, 15 bp, Homo sapiens
agaaagtaggtgatg

SEQ ID NO: 1720151 - DNA, 15 bp, Homo sapiens
gaaagtaggtgatgt

SEQ ID NO: 1720152 - DNA, 15 bp, Homo sapiens
aaagtaggtgatgtt

SEQ ID NO: 1720153 - DNA, 15 bp, Homo sapiens
aagtaggtgatgttt

SEQ ID NO: 1720154 - DNA, 15 bp, Homo sapiens
agtaggtgatgttta

SEQ ID NO: 1720155 - DNA, 15 bp, Homo sapiens
gtaggtgatgtttat

SEQ ID NO: 1720156 - DNA, 15 bp, Homo sapiens
taggtgatgtttatt

SEQ ID NO: 1720157 - DNA, 15 bp, Homo sapiens
aggtgatgtttattg

SEQ ID NO: 1720158 - DNA, 15 bp, Homo sapiens
ggtgatgtttattgg

SEQ ID NO: 1720159 - DNA, 15 bp, Homo sapiens
gtgatgtttattggg

SEQ ID NO: 1720160 - DNA, 15 bp, Homo sapiens
tgatgtttattggga

SEQ ID NO: 1720161 - DNA, 15 bp, Homo sapiens
gatgtttattgggat

SEQ ID NO: 1720162 - DNA, 15 bp, Homo sapiens
atgtttattgggata

SEQ ID NO: 1720163 - DNA, 15 bp, Homo sapiens
tgtttattgggatag

SEQ ID NO: 1720164 - DNA, 15 bp, Homo sapiens
gtttattgggataga

SEQ ID NO: 1720165 - DNA, 15 bp, Homo sapiens
tttattgggatagag

SEQ ID NO: 1720166 - DNA, 15 bp, Homo sapiens
ttattgggatagagg

SEQ ID NO: 1720167 - DNA, 15 bp, Homo sapiens
tattgggatagagga

SEQ ID NO: 1720168 - DNA, 15 bp, Homo sapiens
attgggatagaggat

SEQ ID NO: 1720169 - DNA, 15 bp, Homo sapiens
ttgggatagaggatg

SEQ ID NO: 1720170 - DNA, 15 bp, Homo sapiens
tgggatagaggatgg

SEQ ID NO: 1720171 - DNA, 15 bp, Homo sapiens
gggatagaggatggg

SEQ ID NO: 1720172 - DNA, 15 bp, Homo sapiens
ggatagaggatgggt

SEQ ID NO: 1720173 - DNA, 15 bp, Homo sapiens
gatagaggatgggtt

SEQ ID NO: 1720174 - DNA, 15 bp, Homo sapiens
atagaggatgggtta

SEQ ID NO: 1720175 - DNA, 15 bp, Homo sapiens
tagaggatgggttaa

SEQ ID NO: 1720176 - DNA, 15 bp, Homo sapiens
agaggatgggttaag

SEQ ID NO: 1720177 - DNA, 15 bp, Homo sapiens
gaggatgggttaaga

SEQ ID NO: 1720178 - DNA, 15 bp, Homo sapiens
aggatgggttaagag

SEQ ID NO: 1720179 - DNA, 15 bp, Homo sapiens
ggatgggttaagagc

SEQ ID NO: 1720180 - DNA, 15 bp, Homo sapiens
gatgggttaagagca

SEQ ID NO: 1720181 - DNA, 15 bp, Homo sapiens
atgggttaagagcaa

SEQ ID NO: 1720182 - DNA, 15 bp, Homo sapiens
tgggttaagagcaag

SEQ ID NO: 1720183 - DNA, 15 bp, Homo sapiens
gggttaagagcaagg

SEQ ID NO: 1720184 - DNA, 15 bp, Homo sapiens
ggttaagagcaagga

SEQ ID NO: 1720185 - DNA, 15 bp, Homo sapiens
gttaagagcaaggat

SEQ ID NO: 1720186 - DNA, 15 bp, Homo sapiens
ttaagagcaaggatt

SEQ ID NO: 1720187 - DNA, 15 bp, Homo sapiens
taagagcaaggatta

SEQ ID NO: 1720188 - DNA, 15 bp, Homo sapiens
aagagcaaggattaa

SEQ ID NO: 1720189 - DNA, 15 bp, Homo sapiens
agagcaaggattaag

SEQ ID NO: 1720190 - DNA, 15 bp, Homo sapiens
gagcaaggattaaga

SEQ ID NO: 1720191 - DNA, 15 bp, Homo sapiens
agcaaggattaagag

SEQ ID NO: 1720192 - DNA, 15 bp, Homo sapiens
gcaaggattaagagt

SEQ ID NO: 1720193 - DNA, 15 bp, Homo sapiens
caaggattaagagtc

SEQ ID NO: 1720194 - DNA, 15 bp, Homo sapiens
aaggattaagagtca

SEQ ID NO: 1720195 - DNA, 15 bp, Homo sapiens
aggattaagagtcaa

SEQ ID NO: 1720196 - DNA, 15 bp, Homo sapiens
ggattaagagtcaaa

SEQ ID NO: 1720197 - DNA, 15 bp, Homo sapiens
gattaagagtcaaac

SEQ ID NO: 1720198 - DNA, 15 bp, Homo sapiens
attaagagtcaaaca

SEQ ID NO: 1720199 - DNA, 15 bp, Homo sapiens
ttaagagtcaaacag

SEQ ID NO: 1720200 - DNA, 15 bp, Homo sapiens
taagagtcaaacaga

SEQ ID NO: 1720201 - DNA, 15 bp, Homo sapiens
aagagtcaaacagat

SEQ ID NO: 1720202 - DNA, 15 bp, Homo sapiens
agagtcaaacagata

SEQ ID NO: 1720203 - DNA, 15 bp, Homo sapiens
gagtcaaacagatat

SEQ ID NO: 1720204 - DNA, 15 bp, Homo sapiens
agtcaaacagatata

SEQ ID NO: 1720205 - DNA, 15 bp, Homo sapiens
gtcaaacagatatac

SEQ ID NO: 1720206 - DNA, 15 bp, Homo sapiens
tcaaacagatatacc

SEQ ID NO: 1720207 - DNA, 15 bp, Homo sapiens
caaacagatatacca

SEQ ID NO: 1720208 - DNA, 15 bp, Homo sapiens
aaacagatataccat

SEQ ID NO: 1720209 - DNA, 15 bp, Homo sapiens
aacagatataccatg

SEQ ID NO: 1720210 - DNA, 15 bp, Homo sapiens
acagatataccatgt

SEQ ID NO: 1720211 - DNA, 15 bp, Homo sapiens
cagatataccatgtc

SEQ ID NO: 1720212 - DNA, 15 bp, Homo sapiens
agatataccatgtcc

SEQ ID NO: 1720213 - DNA, 15 bp, Homo sapiens
gatataccatgtccg

SEQ ID NO: 1720214 - DNA, 15 bp, Homo sapiens
atataccatgtccga

SEQ ID NO: 1720215 - DNA, 15 bp, Homo sapiens
tataccatgtccgaa

SEQ ID NO: 1720216 - DNA, 15 bp, Homo sapiens
ataccatgtccgaac

SEQ ID NO: 1720217 - DNA, 15 bp, Homo sapiens
taccatgtccgaact

SEQ ID NO: 1720218 - DNA, 15 bp, Homo sapiens
accatgtccgaactc

SEQ ID NO: 1720219 - DNA, 15 bp, Homo sapiens
ccatgtccgaactcc

SEQ ID NO: 1720220 - DNA, 15 bp, Homo sapiens
catgtccgaactcca

SEQ ID NO: 1720221 - DNA, 15 bp, Homo sapiens
atgtccgaactccat

SEQ ID NO: 1720222 - DNA, 15 bp, Homo sapiens
tgtccgaactccatt

SEQ ID NO: 1720223 - DNA, 15 bp, Homo sapiens
gtccgaactccatta

SEQ ID NO: 1720224 - DNA, 15 bp, Homo sapiens
tccgaactccattat

SEQ ID NO: 1720225 - DNA, 15 bp, Homo sapiens
ccgaactccattatc

SEQ ID NO: 1720226 - DNA, 15 bp, Homo sapiens
cgaactccattatct

SEQ ID NO: 1720227 - DNA, 15 bp, Homo sapiens
gaactccattatctt

SEQ ID NO: 1720228 - DNA, 15 bp, Homo sapiens
aactccattatcttg

SEQ ID NO: 1720229 - DNA, 15 bp, Homo sapiens
actccattatcttga

SEQ ID NO: 1720230 - DNA, 15 bp, Homo sapiens
ctccattatcttgaa

SEQ ID NO: 1720231 - DNA, 15 bp, Homo sapiens
tccattatcttgaac

SEQ ID NO: 1720232 - DNA, 15 bp, Homo sapiens
ccattatcttgaaca

SEQ ID NO: 1720233 - DNA, 15 bp, Homo sapiens
cattatcttgaacat

SEQ ID NO: 1720234 - DNA, 15 bp, Homo sapiens
attatcttgaacatg

SEQ ID NO: 1720235 - DNA, 15 bp, Homo sapiens
ttatcttgaacatgt

SEQ ID NO: 1720236 - DNA, 15 bp, Homo sapiens
tatcttgaacatgtt

SEQ ID NO: 1720237 - DNA, 15 bp, Homo sapiens
atcttgaacatgtta

SEQ ID NO: 1720238 - DNA, 15 bp, Homo sapiens
tcttgaacatgttat

SEQ ID NO: 1720239 - DNA, 15 bp, Homo sapiens
cttgaacatgttatc

SEQ ID NO: 1720240 - DNA, 15 bp, Homo sapiens
ttgaacatgttatct

SEQ ID NO: 1720241 - DNA, 15 bp, Homo sapiens
tgaacatgttatcta

SEQ ID NO: 1720242 - DNA, 15 bp, Homo sapiens
gaacatgttatctac

SEQ ID NO: 1720243 - DNA, 15 bp, Homo sapiens
aacatgttatctaca

SEQ ID NO: 1720244 - DNA, 15 bp, Homo sapiens
acatgttatctacaa

SEQ ID NO: 1720245 - DNA, 15 bp, Homo sapiens
catgttatctacaat

SEQ ID NO: 1720246 - DNA, 15 bp, Homo sapiens
atgttatctacaatt

SEQ ID NO: 1720247 - DNA, 15 bp, Homo sapiens
tgttatctacaattt

SEQ ID NO: 1720248 - DNA, 15 bp, Homo sapiens
gttatctacaatttt

SEQ ID NO: 1720249 - DNA, 15 bp, Homo sapiens
ttatctacaattttc

SEQ ID NO: 1720250 - DNA, 15 bp, Homo sapiens
tatctacaattttca

SEQ ID NO: 1720251 - DNA, 15 bp, Homo sapiens
atctacaattttcaa

SEQ ID NO: 1720252 - DNA, 15 bp, Homo sapiens
tctacaattttcaag

SEQ ID NO: 1720253 - DNA, 15 bp, Homo sapiens
ctacaattttcaagc

SEQ ID NO: 1720254 - DNA, 15 bp, Homo sapiens
tacaattttcaagcc

SEQ ID NO: 1720255 - DNA, 15 bp, Homo sapiens
acaattttcaagcct

SEQ ID NO: 1720256 - DNA, 15 bp, Homo sapiens
caattttcaagcctt

SEQ ID NO: 1720257 - DNA, 15 bp, Homo sapiens
aattttcaagcctta

SEQ ID NO: 1720258 - DNA, 15 bp, Homo sapiens
attttcaagccttag

SEQ ID NO: 1720259 - DNA, 15 bp, Homo sapiens
ttttcaagccttagt

SEQ ID NO: 1720260 - DNA, 15 bp, Homo sapiens
tttcaagccttagtt

SEQ ID NO: 1720261 - DNA, 15 bp, Homo sapiens
ttcaagccttagttt

SEQ ID NO: 1720262 - DNA, 15 bp, Homo sapiens
tcaagccttagtttt

SEQ ID NO: 1720263 - DNA, 15 bp, Homo sapiens
caagccttagttttc

SEQ ID NO: 1720264 - DNA, 15 bp, Homo sapiens
aagccttagttttct

SEQ ID NO: 1720265 - DNA, 15 bp, Homo sapiens
agccttagttttctt

SEQ ID NO: 1720266 - DNA, 15 bp, Homo sapiens
gccttagttttctta

SEQ ID NO: 1720267 - DNA, 15 bp, Homo sapiens
ccttagttttcttac

SEQ ID NO: 1720268 - DNA, 15 bp, Homo sapiens
cttagttttcttacc

SEQ ID NO: 1720269 - DNA, 15 bp, Homo sapiens
ttagttttcttacct

SEQ ID NO: 1720270 - DNA, 15 bp, Homo sapiens
tagttttcttacctg

SEQ ID NO: 1720271 - DNA, 15 bp, Homo sapiens
agttttcttacctgt

SEQ ID NO: 1720272 - DNA, 15 bp, Homo sapiens
gttttcttacctgta

SEQ ID NO: 1720273 - DNA, 15 bp, Homo sapiens
ttttcttacctgtaa

SEQ ID NO: 1720274 - DNA, 15 bp, Homo sapiens
tttcttacctgtaaa

SEQ ID NO: 1720275 - DNA, 15 bp, Homo sapiens
ttcttacctgtaaaa

SEQ ID NO: 1720276 - DNA, 15 bp, Homo sapiens
tcttacctgtaaaag

SEQ ID NO: 1720277 - DNA, 15 bp, Homo sapiens
cttacctgtaaaagg

SEQ ID NO: 1720278 - DNA, 15 bp, Homo sapiens
ttacctgtaaaaggg

SEQ ID NO: 1720279 - DNA, 15 bp, Homo sapiens
tacctgtaaaaggga

SEQ ID NO: 1720280 - DNA, 15 bp, Homo sapiens
acctgtaaaagggac

SEQ ID NO: 1720281 - DNA, 15 bp, Homo sapiens
cctgtaaaagggact

SEQ ID NO: 1720282 - DNA, 15 bp, Homo sapiens
ctgtaaaagggactg

SEQ ID NO: 1720283 - DNA, 15 bp, Homo sapiens
tgtaaaagggactga

SEQ ID NO: 1720284 - DNA, 15 bp, Homo sapiens
gtaaaagggactgac

SEQ ID NO: 1720285 - DNA, 15 bp, Homo sapiens
taaaagggactgaca

SEQ ID NO: 1720286 - DNA, 15 bp, Homo sapiens
aaaagggactgacag

SEQ ID NO: 1720287 - DNA, 15 bp, Homo sapiens
aaagggactgacagt

SEQ ID NO: 1720288 - DNA, 15 bp, Homo sapiens
aagggactgacagta

SEQ ID NO: 1720289 - DNA, 15 bp, Homo sapiens
agggactgacagtaa

SEQ ID NO: 1720290 - DNA, 15 bp, Homo sapiens
gggactgacagtaat

SEQ ID NO: 1720291 - DNA, 15 bp, Homo sapiens
ggactgacagtaatt

SEQ ID NO: 1720292 - DNA, 15 bp, Homo sapiens
gactgacagtaattt

SEQ ID NO: 1720293 - DNA, 15 bp, Homo sapiens
actgacagtaatttc

SEQ ID NO: 1720294 - DNA, 15 bp, Homo sapiens
ctgacagtaatttct

SEQ ID NO: 1720295 - DNA, 15 bp, Homo sapiens
tgacagtaatttctg

SEQ ID NO: 1720296 - DNA, 15 bp, Homo sapiens
gacagtaatttctgg

SEQ ID NO: 1720297 - DNA, 15 bp, Homo sapiens
acagtaatttctgga

SEQ ID NO: 1720298 - DNA, 15 bp, Homo sapiens
cagtaatttctggat

SEQ ID NO: 1720299 - DNA, 15 bp, Homo sapiens
agtaatttctggatc

SEQ ID NO: 1720300 - DNA, 15 bp, Homo sapiens
gtaatttctggatct

SEQ ID NO: 1720301 - DNA, 15 bp, Homo sapiens
taatttctggatctt

SEQ ID NO: 1720302 - DNA, 15 bp, Homo sapiens
aatttctggatcttg

SEQ ID NO: 1720303 - DNA, 15 bp, Homo sapiens
atttctggatcttgg

SEQ ID NO: 1720304 - DNA, 15 bp, Homo sapiens
tttctggatcttgga

SEQ ID NO: 1720305 - DNA, 15 bp, Homo sapiens
ttctggatcttggag

SEQ ID NO: 1720306 - DNA, 15 bp, Homo sapiens
tctggatcttggagt

SEQ ID NO: 1720307 - DNA, 15 bp, Homo sapiens
ctggatcttggagtt

SEQ ID NO: 1720308 - DNA, 15 bp, Homo sapiens
tggatcttggagtta

SEQ ID NO: 1720309 - DNA, 15 bp, Homo sapiens
ggatcttggagttat

SEQ ID NO: 1720310 - DNA, 15 bp, Homo sapiens
gatcttggagttatg

SEQ ID NO: 1720311 - DNA, 15 bp, Homo sapiens
atcttggagttatgt

SEQ ID NO: 1720312 - DNA, 15 bp, Homo sapiens
tcttggagttatgtg

SEQ ID NO: 1720313 - DNA, 15 bp, Homo sapiens
cttggagttatgtgc

SEQ ID NO: 1720314 - DNA, 15 bp, Homo sapiens
ttggagttatgtgca

SEQ ID NO: 1720315 - DNA, 15 bp, Homo sapiens
tggagttatgtgcag

SEQ ID NO: 1720316 - DNA, 15 bp, Homo sapiens
ggagttatgtgcaga

SEQ ID NO: 1720317 - DNA, 15 bp, Homo sapiens
gagttatgtgcagat

SEQ ID NO: 1720318 - DNA, 15 bp, Homo sapiens
agttatgtgcagatt

SEQ ID NO: 1720319 - DNA, 15 bp, Homo sapiens
gttatgtgcagatta

SEQ ID NO: 1720320 - DNA, 15 bp, Homo sapiens
ttatgtgcagattaa

SEQ ID NO: 1720321 - DNA, 15 bp, Homo sapiens
tatgtgcagattaaa

SEQ ID NO: 1720322 - DNA, 15 bp, Homo sapiens
atgtgcagattaaat

SEQ ID NO: 1720323 - DNA, 15 bp, Homo sapiens
tgtgcagattaaata

SEQ ID NO: 1720324 - DNA, 15 bp, Homo sapiens
gtgcagattaaataa

SEQ ID NO: 1720325 - DNA, 15 bp, Homo sapiens
tgcagattaaataaa

SEQ ID NO: 1720326 - DNA, 15 bp, Homo sapiens
gcagattaaataaat

SEQ ID NO: 1720327 - DNA, 15 bp, Homo sapiens
cagattaaataaatt

SEQ ID NO: 1720328 - DNA, 15 bp, Homo sapiens
agattaaataaatta

SEQ ID NO: 1720329 - DNA, 15 bp, Homo sapiens
gattaaataaattaa

SEQ ID NO: 1720330 - DNA, 15 bp, Homo sapiens
attaaataaattaat

SEQ ID NO: 1720331 - DNA, 15 bp, Homo sapiens
taaataaattaatgc

SEQ ID NO: 1720332 - DNA, 15 bp, Homo sapiens
aaataaattaatgca

SEQ ID NO: 1720333 - DNA, 15 bp, Homo sapiens
aataaattaatgcat

SEQ ID NO: 1720334 - DNA, 15 bp, Homo sapiens
ataaattaatgcata

SEQ ID NO: 1720335 - DNA, 15 bp, Homo sapiens
taaattaatgcatat

SEQ ID NO: 1720336 - DNA, 15 bp, Homo sapiens
aaattaatgcatata

SEQ ID NO: 1720337 - DNA, 15 bp, Homo sapiens
aattaatgcatataa

SEQ ID NO: 1720338 - DNA, 15 bp, Homo sapiens
attaatgcatataaa

SEQ ID NO: 1720339 - DNA, 15 bp, Homo sapiens
ttaatgcatataaag

SEQ ID NO: 1720340 - DNA, 15 bp, Homo sapiens
taatgcatataaagc

SEQ ID NO: 1720341 - DNA, 15 bp, Homo sapiens
aatgcatataaagct

SEQ ID NO: 1720342 - DNA, 15 bp, Homo sapiens
atgcatataaagctc

SEQ ID NO: 1720343 - DNA, 15 bp, Homo sapiens
tgcatataaagctct

SEQ ID NO: 1720344 - DNA, 15 bp, Homo sapiens
gcatataaagctctt

SEQ ID NO: 1720345 - DNA, 15 bp, Homo sapiens
catataaagctctta

SEQ ID NO: 1720346 - DNA, 15 bp, Homo sapiens
atataaagctcttat

SEQ ID NO: 1720347 - DNA, 15 bp, Homo sapiens
tataaagctcttatt

SEQ ID NO: 1720348 - DNA, 15 bp, Homo sapiens
ataaagctcttatta

SEQ ID NO: 1720349 - DNA, 15 bp, Homo sapiens
taaagctcttattag

SEQ ID NO: 1720350 - DNA, 15 bp, Homo sapiens
aaagctcttattaga

SEQ ID NO: 1720351 - DNA, 15 bp, Homo sapiens
aagctcttattagag

SEQ ID NO: 1720352 - DNA, 15 bp, Homo sapiens
agctcttattagagt

SEQ ID NO: 1720353 - DNA, 15 bp, Homo sapiens
gctcttattagagtc

SEQ ID NO: 1720354 - DNA, 15 bp, Homo sapiens
ctcttattagagtca

SEQ ID NO: 1720355 - DNA, 15 bp, Homo sapiens
tcttattagagtcaa

SEQ ID NO: 1720356 - DNA, 15 bp, Homo sapiens
cttattagagtcaat

SEQ ID NO: 1720357 - DNA, 15 bp, Homo sapiens
ttattagagtcaatg

SEQ ID NO: 1720358 - DNA, 15 bp, Homo sapiens
tattagagtcaatga

SEQ ID NO: 1720359 - DNA, 15 bp, Homo sapiens
attagagtcaatgag

SEQ ID NO: 1720360 - DNA, 15 bp, Homo sapiens
ttagagtcaatgagt

SEQ ID NO: 1720361 - DNA, 15 bp, Homo sapiens
tagagtcaatgagta

SEQ ID NO: 1720362 - DNA, 15 bp, Homo sapiens
agagtcaatgagtat

SEQ ID NO: 1720363 - DNA, 15 bp, Homo sapiens
gagtcaatgagtatg

SEQ ID NO: 1720364 - DNA, 15 bp, Homo sapiens
agtcaatgagtatgt

SEQ ID NO: 1720365 - DNA, 15 bp, Homo sapiens
gtcaatgagtatgta

SEQ ID NO: 1720366 - DNA, 15 bp, Homo sapiens
tcaatgagtatgtat

SEQ ID NO: 1720367 - DNA, 15 bp, Homo sapiens
caatgagtatgtata

SEQ ID NO: 1720368 - DNA, 15 bp, Homo sapiens
aatgagtatgtatat

SEQ ID NO: 1720369 - DNA, 15 bp, Homo sapiens
atgagtatgtatatt

SEQ ID NO: 1720370 - DNA, 15 bp, Homo sapiens
tgagtatgtatatta

SEQ ID NO: 1720371 - DNA, 15 bp, Homo sapiens
gagtatgtatattag

SEQ ID NO: 1720372 - DNA, 15 bp, Homo sapiens
agtatgtatattagg

SEQ ID NO: 1720373 - DNA, 15 bp, Homo sapiens
gtatgtatattaggt

SEQ ID NO: 1720374 - DNA, 15 bp, Homo sapiens
tatgtatattaggtc

SEQ ID NO: 1720375 - DNA, 15 bp, Homo sapiens
atgtatattaggtct

SEQ ID NO: 1720376 - DNA, 15 bp, Homo sapiens
tgtatattaggtctt

SEQ ID NO: 1720377 - DNA, 15 bp, Homo sapiens
gtatattaggtcttg

SEQ ID NO: 1720378 - DNA, 15 bp, Homo sapiens
tatattaggtcttgc

SEQ ID NO: 1720379 - DNA, 15 bp, Homo sapiens
atattaggtcttgca

SEQ ID NO: 1720380 - DNA, 15 bp, Homo sapiens
tattaggtcttgcaa

SEQ ID NO: 1720381 - DNA, 15 bp, Homo sapiens
attaggtcttgcaaa

SEQ ID NO: 1720382 - DNA, 15 bp, Homo sapiens
ttaggtcttgcaaac

SEQ ID NO: 1720383 - DNA, 15 bp, Homo sapiens
taggtcttgcaaaca

SEQ ID NO: 1720384 - DNA, 15 bp, Homo sapiens
aggtcttgcaaacag

SEQ ID NO: 1720385 - DNA, 15 bp, Homo sapiens
ggtcttgcaaacaga

SEQ ID NO: 1720386 - DNA, 15 bp, Homo sapiens
gtcttgcaaacagaa

SEQ ID NO: 1720387 - DNA, 15 bp, Homo sapiens
tcttgcaaacagaat

SEQ ID NO: 1720388 - DNA, 15 bp, Homo sapiens
cttgcaaacagaata

SEQ ID NO: 1720389 - DNA, 15 bp, Homo sapiens
ttgcaaacagaataa

SEQ ID NO: 1720390 - DNA, 15 bp, Homo sapiens
tgcaaacagaataat

SEQ ID NO: 1720391 - DNA, 15 bp, Homo sapiens
gcaaacagaataatt

SEQ ID NO: 1720392 - DNA, 15 bp, Homo sapiens
caaacagaataattt

SEQ ID NO: 1720393 - DNA, 15 bp, Homo sapiens
aaacagaataatttt

SEQ ID NO: 1720394 - DNA, 15 bp, Homo sapiens
aacagaataatttta

SEQ ID NO: 1720395 - DNA, 15 bp, Homo sapiens
acagaataattttac

SEQ ID NO: 1720396 - DNA, 15 bp, Homo sapiens
cagaataattttact

SEQ ID NO: 1720397 - DNA, 15 bp, Homo sapiens
agaataattttactt

SEQ ID NO: 1720398 - DNA, 15 bp, Homo sapiens
gaataattttactta

SEQ ID NO: 1720399 - DNA, 15 bp, Homo sapiens
aataattttacttaa

SEQ ID NO: 1720400 - DNA, 15 bp, Homo sapiens
ataattttacttaag

SEQ ID NO: 1720401 - DNA, 15 bp, Homo sapiens
taattttacttaaga

SEQ ID NO: 1720402 - DNA, 15 bp, Homo sapiens
aattttacttaagaa

SEQ ID NO: 1720403 - DNA, 15 bp, Homo sapiens
attttacttaagaaa

SEQ ID NO: 1720404 - DNA, 15 bp, Homo sapiens
ttttacttaagaaat

SEQ ID NO: 1720405 - DNA, 15 bp, Homo sapiens
tttacttaagaaata

SEQ ID NO: 1720406 - DNA, 15 bp, Homo sapiens
ttacttaagaaatac

SEQ ID NO: 1720407 - DNA, 15 bp, Homo sapiens
tacttaagaaatacc

SEQ ID NO: 1720408 - DNA, 15 bp, Homo sapiens
acttaagaaataccc

SEQ ID NO: 1720409 - DNA, 15 bp, Homo sapiens
cttaagaaatacccc

SEQ ID NO: 1720410 - DNA, 15 bp, Homo sapiens
ttaagaaatacccca

SEQ ID NO: 1720411 - DNA, 15 bp, Homo sapiens
taagaaataccccag

SEQ ID NO: 1720412 - DNA, 15 bp, Homo sapiens
aagaaataccccaga

SEQ ID NO: 1720413 - DNA, 15 bp, Homo sapiens
agaaataccccagaa

SEQ ID NO: 1720414 - DNA, 15 bp, Homo sapiens
gaaataccccagaaa

SEQ ID NO: 1720415 - DNA, 15 bp, Homo sapiens
aaataccccagaaaa

SEQ ID NO: 1720416 - DNA, 15 bp, Homo sapiens
aataccccagaaaat

SEQ ID NO: 1720417 - DNA, 15 bp, Homo sapiens
ataccccagaaaatt

SEQ ID NO: 1720418 - DNA, 15 bp, Homo sapiens
taccccagaaaattt

SEQ ID NO: 1720419 - DNA, 15 bp, Homo sapiens
accccagaaaatttt

SEQ ID NO: 1720420 - DNA, 15 bp, Homo sapiens
ccccagaaaatttta

SEQ ID NO: 1720421 - DNA, 15 bp, Homo sapiens
cccagaaaattttat

SEQ ID NO: 1720422 - DNA, 15 bp, Homo sapiens
ccagaaaattttatc

SEQ ID NO: 1720423 - DNA, 15 bp, Homo sapiens
cagaaaattttatca

SEQ ID NO: 1720424 - DNA, 15 bp, Homo sapiens
agaaaattttatcat

SEQ ID NO: 1720425 - DNA, 15 bp, Homo sapiens
gaaaattttatcatt

SEQ ID NO: 1720426 - DNA, 15 bp, Homo sapiens
aaaattttatcattg

SEQ ID NO: 1720427 - DNA, 15 bp, Homo sapiens
aaattttatcattga

SEQ ID NO: 1720428 - DNA, 15 bp, Homo sapiens
aattttatcattgat

SEQ ID NO: 1720429 - DNA, 15 bp, Homo sapiens
attttatcattgatg

SEQ ID NO: 1720430 - DNA, 15 bp, Homo sapiens
ttttatcattgatgt

SEQ ID NO: 1720431 - DNA, 15 bp, Homo sapiens
tttatcattgatgta

SEQ ID NO: 1720432 - DNA, 15 bp, Homo sapiens
ttatcattgatgtat

SEQ ID NO: 1720433 - DNA, 15 bp, Homo sapiens
tatcattgatgtatt

SEQ ID NO: 1720434 - DNA, 15 bp, Homo sapiens
atcattgatgtattt

SEQ ID NO: 1720435 - DNA, 15 bp, Homo sapiens
tcattgatgtatttt

SEQ ID NO: 1720436 - DNA, 15 bp, Homo sapiens
cattgatgtattttt

SEQ ID NO: 1720437 - DNA, 15 bp, Homo sapiens
attgatgtatttttt

SEQ ID NO: 1720438 - DNA, 15 bp, Homo sapiens
ttgatgtattttttt

SEQ ID NO: 1720439 - DNA, 15 bp, Homo sapiens
tgatgtatttttttt

SEQ ID NO: 1720440 - DNA, 15 bp, Homo sapiens
gatgtattttttttt

SEQ ID NO: 1720441 - DNA, 15 bp, Homo sapiens
atgtattttttttta

SEQ ID NO: 1720442 - DNA, 15 bp, Homo sapiens
tgtatttttttttag

SEQ ID NO: 1720443 - DNA, 15 bp, Homo sapiens
gtatttttttttagg

SEQ ID NO: 1720444 - DNA, 15 bp, Homo sapiens
tatttttttttagga

SEQ ID NO: 1720445 - DNA, 15 bp, Homo sapiens
atttttttttaggag

SEQ ID NO: 1720446 - DNA, 15 bp, Homo sapiens
tttttttttaggaga

SEQ ID NO: 1720447 - DNA, 15 bp, Homo sapiens
ttttttttaggagaa

SEQ ID NO: 1720448 - DNA, 15 bp, Homo sapiens
tttttttaggagaac

SEQ ID NO: 1720449 - DNA, 15 bp, Homo sapiens
ttttttaggagaact

SEQ ID NO: 1720450 - DNA, 15 bp, Homo sapiens
tttttaggagaactt

SEQ ID NO: 1720451 - DNA, 15 bp, Homo sapiens
ttttaggagaactta

SEQ ID NO: 1720452 - DNA, 15 bp, Homo sapiens
tttaggagaacttag

SEQ ID NO: 1720453 - DNA, 15 bp, Homo sapiens
ttaggagaacttagg

SEQ ID NO: 1720454 - DNA, 15 bp, Homo sapiens
taggagaacttagga

SEQ ID NO: 1720455 - DNA, 15 bp, Homo sapiens
aggagaacttaggat

SEQ ID NO: 1720456 - DNA, 15 bp, Homo sapiens
ggagaacttaggata

SEQ ID NO: 1720457 - DNA, 15 bp, Homo sapiens
gagaacttaggatat

SEQ ID NO: 1720458 - DNA, 15 bp, Homo sapiens
agaacttaggatatc

SEQ ID NO: 1720459 - DNA, 15 bp, Homo sapiens
gaacttaggatatca

SEQ ID NO: 1720460 - DNA, 15 bp, Homo sapiens
aacttaggatatcag

SEQ ID NO: 1720461 - DNA, 15 bp, Homo sapiens
acttaggatatcagt

SEQ ID NO: 1720462 - DNA, 15 bp, Homo sapiens
cttaggatatcagtt

SEQ ID NO: 1720463 - DNA, 15 bp, Homo sapiens
ttaggatatcagtta

SEQ ID NO: 1720464 - DNA, 15 bp, Homo sapiens
taggatatcagttaa

SEQ ID NO: 1720465 - DNA, 15 bp, Homo sapiens
aggatatcagttaaa

SEQ ID NO: 1720466 - DNA, 15 bp, Homo sapiens
ggatatcagttaaaa

SEQ ID NO: 1720467 - DNA, 15 bp, Homo sapiens
gatatcagttaaaat

SEQ ID NO: 1720468 - DNA, 15 bp, Homo sapiens
atatcagttaaaatg

SEQ ID NO: 1720469 - DNA, 15 bp, Homo sapiens
tatcagttaaaatgg

SEQ ID NO: 1720470 - DNA, 15 bp, Homo sapiens
atcagttaaaatggt

SEQ ID NO: 1720471 - DNA, 15 bp, Homo sapiens
tcagttaaaatggtt

SEQ ID NO: 1720472 - DNA, 15 bp, Homo sapiens
cagttaaaatggtta

SEQ ID NO: 1720473 - DNA, 15 bp, Homo sapiens
agttaaaatggttac

SEQ ID NO: 1720474 - DNA, 15 bp, Homo sapiens
gttaaaatggttaca

SEQ ID NO: 1720475 - DNA, 15 bp, Homo sapiens
ttaaaatggttacaa

SEQ ID NO: 1720476 - DNA, 15 bp, Homo sapiens
taaaatggttacaat

SEQ ID NO: 1720477 - DNA, 15 bp, Homo sapiens
aaaatggttacaatt

SEQ ID NO: 1720478 - DNA, 15 bp, Homo sapiens
aaatggttacaattt

SEQ ID NO: 1720479 - DNA, 15 bp, Homo sapiens
aatggttacaatttt

SEQ ID NO: 1720480 - DNA, 15 bp, Homo sapiens
atggttacaatttta

SEQ ID NO: 1720481 - DNA, 15 bp, Homo sapiens
tggttacaattttaa

SEQ ID NO: 1720482 - DNA, 15 bp, Homo sapiens
ggttacaattttaaa

SEQ ID NO: 1720483 - DNA, 15 bp, Homo sapiens
gttacaattttaaat

SEQ ID NO: 1720484 - DNA, 15 bp, Homo sapiens
ttacaattttaaatg

SEQ ID NO: 1720485 - DNA, 15 bp, Homo sapiens
tacaattttaaatgc

SEQ ID NO: 1720486 - DNA, 15 bp, Homo sapiens
acaattttaaatgca

SEQ ID NO: 1720487 - DNA, 15 bp, Homo sapiens
caattttaaatgcat

SEQ ID NO: 1720488 - DNA, 15 bp, Homo sapiens
aattttaaatgcatt

SEQ ID NO: 1720489 - DNA, 15 bp, Homo sapiens
attttaaatgcattg

SEQ ID NO: 1720490 - DNA, 15 bp, Homo sapiens
ttttaaatgcattgt

SEQ ID NO: 1720491 - DNA, 15 bp, Homo sapiens
tttaaatgcattgta

SEQ ID NO: 1720492 - DNA, 15 bp, Homo sapiens
ttaaatgcattgtag

SEQ ID NO: 1720493 - DNA, 15 bp, Homo sapiens
taaatgcattgtagt

SEQ ID NO: 1720494 - DNA, 15 bp, Homo sapiens
aaatgcattgtagtg

SEQ ID NO: 1720495 - DNA, 15 bp, Homo sapiens
aatgcattgtagtga

SEQ ID NO: 1720496 - DNA, 15 bp, Homo sapiens
atgcattgtagtgat

SEQ ID NO: 1720497 - DNA, 15 bp, Homo sapiens
tgcattgtagtgatt

SEQ ID NO: 1720498 - DNA, 15 bp, Homo sapiens
gcattgtagtgattt

SEQ ID NO: 1720499 - DNA, 15 bp, Homo sapiens
cattgtagtgatttt

SEQ ID NO: 1720500 - DNA, 15 bp, Homo sapiens
attgtagtgattttg

SEQ ID NO: 1720501 - DNA, 15 bp, Homo sapiens
ttgtagtgattttga

SEQ ID NO: 1720502 - DNA, 15 bp, Homo sapiens
tgtagtgattttgat

SEQ ID NO: 1720503 - DNA, 15 bp, Homo sapiens
gtagtgattttgatg

SEQ ID NO: 1720504 - DNA, 15 bp, Homo sapiens
tagtgattttgatgt

SEQ ID NO: 1720505 - DNA, 15 bp, Homo sapiens
agtgattttgatgta

SEQ ID NO: 1720506 - DNA, 15 bp, Homo sapiens
gtgattttgatgtag

SEQ ID NO: 1720507 - DNA, 15 bp, Homo sapiens
tgattttgatgtagt

SEQ ID NO: 1720508 - DNA, 15 bp, Homo sapiens
gattttgatgtagta

SEQ ID NO: 1720509 - DNA, 15 bp, Homo sapiens
attttgatgtagtaa

SEQ ID NO: 1720510 - DNA, 15 bp, Homo sapiens
ttttgatgtagtaat

SEQ ID NO: 1720511 - DNA, 15 bp, Homo sapiens
tttgatgtagtaatg

SEQ ID NO: 1720512 - DNA, 15 bp, Homo sapiens
ttgatgtagtaatgt

SEQ ID NO: 1720513 - DNA, 15 bp, Homo sapiens
tgatgtagtaatgtt

SEQ ID NO: 1720514 - DNA, 15 bp, Homo sapiens
gatgtagtaatgttt

SEQ ID NO: 1720515 - DNA, 15 bp, Homo sapiens
atgtagtaatgtttg

SEQ ID NO: 1720516 - DNA, 15 bp, Homo sapiens
tgtagtaatgtttgt

SEQ ID NO: 1720517 - DNA, 15 bp, Homo sapiens
gtagtaatgtttgtt

SEQ ID NO: 1720518 - DNA, 15 bp, Homo sapiens
tagtaatgtttgtta

SEQ ID NO: 1720519 - DNA, 15 bp, Homo sapiens
agtaatgtttgttaa

SEQ ID NO: 1720520 - DNA, 15 bp, Homo sapiens
gtaatgtttgttaaa

SEQ ID NO: 1720521 - DNA, 15 bp, Homo sapiens
taatgtttgttaaaa

SEQ ID NO: 1720522 - DNA, 15 bp, Homo sapiens
aatgtttgttaaaat

SEQ ID NO: 1720523 - DNA, 15 bp, Homo sapiens
atgtttgttaaaatt

SEQ ID NO: 1720524 - DNA, 15 bp, Homo sapiens
tgtttgttaaaattc

SEQ ID NO: 1720525 - DNA, 15 bp, Homo sapiens
gtttgttaaaattct

SEQ ID NO: 1720526 - DNA, 15 bp, Homo sapiens
tttgttaaaattctt

SEQ ID NO: 1720527 - DNA, 15 bp, Homo sapiens
ttgttaaaattctta

SEQ ID NO: 1720528 - DNA, 15 bp, Homo sapiens
tgttaaaattcttat

SEQ ID NO: 1720529 - DNA, 15 bp, Homo sapiens
gttaaaattcttatt

SEQ ID NO: 1720530 - DNA, 15 bp, Homo sapiens
ttaaaattcttattt

SEQ ID NO: 1720531 - DNA, 15 bp, Homo sapiens
taaaattcttatttt

SEQ ID NO: 1720532 - DNA, 15 bp, Homo sapiens
aaaattcttattttt

SEQ ID NO: 1720533 - DNA, 15 bp, Homo sapiens
aaattcttattttta

SEQ ID NO: 1720534 - DNA, 15 bp, Homo sapiens
aattcttatttttaa

SEQ ID NO: 1720535 - DNA, 15 bp, Homo sapiens
attcttatttttaag

SEQ ID NO: 1720536 - DNA, 15 bp, Homo sapiens
ttcttatttttaagt

SEQ ID NO: 1720537 - DNA, 15 bp, Homo sapiens
tcttatttttaagta

SEQ ID NO: 1720538 - DNA, 15 bp, Homo sapiens
cttatttttaagtac

SEQ ID NO: 1720539 - DNA, 15 bp, Homo sapiens
ttatttttaagtact

SEQ ID NO: 1720540 - DNA, 15 bp, Homo sapiens
tatttttaagtactt

SEQ ID NO: 1720541 - DNA, 15 bp, Homo sapiens
atttttaagtacttt

SEQ ID NO: 1720542 - DNA, 15 bp, Homo sapiens
tttttaagtacttta

SEQ ID NO: 1720543 - DNA, 15 bp, Homo sapiens
ttttaagtactttag

SEQ ID NO: 1720544 - DNA, 15 bp, Homo sapiens
tttaagtactttagc

SEQ ID NO: 1720545 - DNA, 15 bp, Homo sapiens
ttaagtactttagca

SEQ ID NO: 1720546 - DNA, 15 bp, Homo sapiens
taagtactttagcat

SEQ ID NO: 1720547 - DNA, 15 bp, Homo sapiens
aagtactttagcatc

SEQ ID NO: 1720548 - DNA, 15 bp, Homo sapiens
agtactttagcatca

SEQ ID NO: 1720549 - DNA, 15 bp, Homo sapiens
gtactttagcatcag

SEQ ID NO: 1720550 - DNA, 15 bp, Homo sapiens
tactttagcatcaga

SEQ ID NO: 1720551 - DNA, 15 bp, Homo sapiens
actttagcatcagaa

SEQ ID NO: 1720552 - DNA, 15 bp, Homo sapiens
ctttagcatcagaaa

SEQ ID NO: 1720553 - DNA, 15 bp, Homo sapiens
tttagcatcagaaaa

SEQ ID NO: 1720554 - DNA, 15 bp, Homo sapiens
ttagcatcagaaaag

SEQ ID NO: 1720555 - DNA, 15 bp, Homo sapiens
tagcatcagaaaagt

SEQ ID NO: 1720556 - DNA, 15 bp, Homo sapiens
agcatcagaaaagtt

SEQ ID NO: 1720557 - DNA, 15 bp, Homo sapiens
gcatcagaaaagttg

SEQ ID NO: 1720558 - DNA, 15 bp, Homo sapiens
catcagaaaagttgt

SEQ ID NO: 1720559 - DNA, 15 bp, Homo sapiens
atcagaaaagttgtt

SEQ ID NO: 1720560 - DNA, 15 bp, Homo sapiens
tcagaaaagttgttt

SEQ ID NO: 1720561 - DNA, 15 bp, Homo sapiens
cagaaaagttgttta

SEQ ID NO: 1720562 - DNA, 15 bp, Homo sapiens
agaaaagttgtttat

SEQ ID NO: 1720563 - DNA, 15 bp, Homo sapiens
gaaaagttgtttatg

SEQ ID NO: 1720564 - DNA, 15 bp, Homo sapiens
aaaagttgtttatgc

SEQ ID NO: 1720565 - DNA, 15 bp, Homo sapiens
aaagttgtttatgca

SEQ ID NO: 1720566 - DNA, 15 bp, Homo sapiens
aagttgtttatgcat

SEQ ID NO: 1720567 - DNA, 15 bp, Homo sapiens
agttgtttatgcata

SEQ ID NO: 1720568 - DNA, 15 bp, Homo sapiens
gttgtttatgcatac

SEQ ID NO: 1720569 - DNA, 15 bp, Homo sapiens
ttgtttatgcataca

SEQ ID NO: 1720570 - DNA, 15 bp, Homo sapiens
tgtttatgcatacat

SEQ ID NO: 1720571 - DNA, 15 bp, Homo sapiens
gtttatgcatacatg

SEQ ID NO: 1720572 - DNA, 15 bp, Homo sapiens
tttatgcatacatga

SEQ ID NO: 1720573 - DNA, 15 bp, Homo sapiens
ttatgcatacatgaa

SEQ ID NO: 1720574 - DNA, 15 bp, Homo sapiens
tatgcatacatgaaa

SEQ ID NO: 1720575 - DNA, 15 bp, Homo sapiens
atgcatacatgaaag

SEQ ID NO: 1720576 - DNA, 15 bp, Homo sapiens
tgcatacatgaaagc

SEQ ID NO: 1720577 - DNA, 15 bp, Homo sapiens
gcatacatgaaagca

SEQ ID NO: 1720578 - DNA, 15 bp, Homo sapiens
catacatgaaagcat

SEQ ID NO: 1720579 - DNA, 15 bp, Homo sapiens
atacatgaaagcata

SEQ ID NO: 1720580 - DNA, 15 bp, Homo sapiens
tacatgaaagcatat

SEQ ID NO: 1720581 - DNA, 15 bp, Homo sapiens
acatgaaagcatata

SEQ ID NO: 1720582 - DNA, 15 bp, Homo sapiens
catgaaagcatatat

SEQ ID NO: 1720583 - DNA, 15 bp, Homo sapiens
atgaaagcatatatt

SEQ ID NO: 1720584 - DNA, 15 bp, Homo sapiens
tgaaagcatatatta

SEQ ID NO: 1720585 - DNA, 15 bp, Homo sapiens
gaaagcatatattaa

SEQ ID NO: 1720586 - DNA, 15 bp, Homo sapiens
aaagcatatattaat

SEQ ID NO: 1720587 - DNA, 15 bp, Homo sapiens
aagcatatattaatc

SEQ ID NO: 1720588 - DNA, 15 bp, Homo sapiens
agcatatattaatcc

SEQ ID NO: 1720589 - DNA, 15 bp, Homo sapiens
gcatatattaatccc

SEQ ID NO: 1720590 - DNA, 15 bp, Homo sapiens
catatattaatccct

SEQ ID NO: 1720591 - DNA, 15 bp, Homo sapiens
atatattaatccctt

SEQ ID NO: 1720592 - DNA, 15 bp, Homo sapiens
tatattaatcccttt

SEQ ID NO: 1720593 - DNA, 15 bp, Homo sapiens
atattaatcccttta

SEQ ID NO: 1720594 - DNA, 15 bp, Homo sapiens
tattaatccctttaa

SEQ ID NO: 1720595 - DNA, 15 bp, Homo sapiens
attaatccctttaaa

SEQ ID NO: 1720596 - DNA, 15 bp, Homo sapiens
ttaatccctttaaag

SEQ ID NO: 1720597 - DNA, 15 bp, Homo sapiens
taatccctttaaagg

SEQ ID NO: 1720598 - DNA, 15 bp, Homo sapiens
aatccctttaaagga

SEQ ID NO: 1720599 - DNA, 15 bp, Homo sapiens
atccctttaaaggaa

SEQ ID NO: 1720600 - DNA, 15 bp, Homo sapiens
tccctttaaaggaaa

SEQ ID NO: 1720601 - DNA, 15 bp, Homo sapiens
ccctttaaaggaaaa

SEQ ID NO: 1720602 - DNA, 15 bp, Homo sapiens
cctttaaaggaaaag

SEQ ID NO: 1720603 - DNA, 15 bp, Homo sapiens
ctttaaaggaaaagt

SEQ ID NO: 1720604 - DNA, 15 bp, Homo sapiens
tttaaaggaaaagtt

SEQ ID NO: 1720605 - DNA, 15 bp, Homo sapiens
ttaaaggaaaagttt

SEQ ID NO: 1720606 - DNA, 15 bp, Homo sapiens
taaaggaaaagtttg

SEQ ID NO: 1720607 - DNA, 15 bp, Homo sapiens
aaaggaaaagtttgt

SEQ ID NO: 1720608 - DNA, 15 bp, Homo sapiens
aaggaaaagtttgtg

SEQ ID NO: 1720609 - DNA, 15 bp, Homo sapiens
aggaaaagtttgtgg

SEQ ID NO: 1720610 - DNA, 15 bp, Homo sapiens
ggaaaagtttgtggt

SEQ ID NO: 1720611 - DNA, 15 bp, Homo sapiens
gaaaagtttgtggta

SEQ ID NO: 1720612 - DNA, 15 bp, Homo sapiens
aaaagtttgtggtat

SEQ ID NO: 1720613 - DNA, 15 bp, Homo sapiens
aaagtttgtggtatt

SEQ ID NO: 1720614 - DNA, 15 bp, Homo sapiens
aagtttgtggtattt

SEQ ID NO: 1720615 - DNA, 15 bp, Homo sapiens
agtttgtggtatttt

SEQ ID NO: 1720616 - DNA, 15 bp, Homo sapiens
gtttgtggtattttg

SEQ ID NO: 1720617 - DNA, 15 bp, Homo sapiens
tttgtggtattttgt

SEQ ID NO: 1720618 - DNA, 15 bp, Homo sapiens
ttgtggtattttgtc

SEQ ID NO: 1720619 - DNA, 15 bp, Homo sapiens
tgtggtattttgtct

SEQ ID NO: 1720620 - DNA, 15 bp, Homo sapiens
gtggtattttgtcta

SEQ ID NO: 1720621 - DNA, 15 bp, Homo sapiens
tggtattttgtctag

SEQ ID NO: 1720622 - DNA, 15 bp, Homo sapiens
ggtattttgtctaga

SEQ ID NO: 1720623 - DNA, 15 bp, Homo sapiens
gtattttgtctagaa

SEQ ID NO: 1720624 - DNA, 15 bp, Homo sapiens
tattttgtctagaaa

SEQ ID NO: 1720625 - DNA, 15 bp, Homo sapiens
attttgtctagaaaa

SEQ ID NO: 1720626 - DNA, 15 bp, Homo sapiens
ttttgtctagaaaag

SEQ ID NO: 1720627 - DNA, 15 bp, Homo sapiens
tttgtctagaaaagt

SEQ ID NO: 1720628 - DNA, 15 bp, Homo sapiens
ttgtctagaaaagtg

SEQ ID NO: 1720629 - DNA, 15 bp, Homo sapiens
tgtctagaaaagtgt

SEQ ID NO: 1720630 - DNA, 15 bp, Homo sapiens
gtctagaaaagtgtt

SEQ ID NO: 1720631 - DNA, 15 bp, Homo sapiens
tctagaaaagtgttt

SEQ ID NO: 1720632 - DNA, 15 bp, Homo sapiens
ctagaaaagtgtttt

SEQ ID NO: 1720633 - DNA, 15 bp, Homo sapiens
tagaaaagtgttttc

SEQ ID NO: 1720634 - DNA, 15 bp, Homo sapiens
agaaaagtgttttct

SEQ ID NO: 1720635 - DNA, 15 bp, Homo sapiens
gaaaagtgttttctt

SEQ ID NO: 1720636 - DNA, 15 bp, Homo sapiens
aaaagtgttttcttt

SEQ ID NO: 1720637 - DNA, 15 bp, Homo sapiens
aaagtgttttctttt

SEQ ID NO: 1720638 - DNA, 15 bp, Homo sapiens
aagtgttttcttttt

SEQ ID NO: 1720639 - DNA, 15 bp, Homo sapiens
agtgttttctttttt

SEQ ID NO: 1720640 - DNA, 15 bp, Homo sapiens
gtgttttcttttttt

SEQ ID NO: 1720641 - DNA, 15 bp, Homo sapiens
tgttttcttttttta

SEQ ID NO: 1720642 - DNA, 15 bp, Homo sapiens
ttctttttttaaaat

SEQ ID NO: 1720643 - DNA, 15 bp, Homo sapiens
tctttttttaaaata

SEQ ID NO: 1720644 - DNA, 15 bp, Homo sapiens
ctttttttaaaataa

SEQ ID NO: 1720645 - DNA, 15 bp, Homo sapiens
tttttttaaaataaa

SEQ ID NO: 1720646 - DNA, 15 bp, Homo sapiens
ttttttaaaataaat

SEQ ID NO: 1720647 - DNA, 15 bp, Homo sapiens
tttttaaaataaata

SEQ ID NO: 1720648 - DNA, 15 bp, Homo sapiens
ttttaaaataaatat

SEQ ID NO: 1720649 - DNA, 15 bp, Homo sapiens
tttaaaataaatatt

SEQ ID NO: 1720650 - DNA, 15 bp, Homo sapiens
ttaaaataaatattt

SEQ ID NO: 1720651 - DNA, 15 bp, Homo sapiens
taaaataaatattta

SEQ ID NO: 1720652 - DNA, 15 bp, Homo sapiens
aaaataaatatttag

SEQ ID NO: 1720653 - DNA, 15 bp, Homo sapiens
aaataaatatttagt

SEQ ID NO: 1720654 - DNA, 15 bp, Homo sapiens
aataaatatttagta

SEQ ID NO: 1720655 - DNA, 15 bp, Homo sapiens
ataaatatttagtaa

SEQ ID NO: 1720656 - DNA, 15 bp, Homo sapiens
taaatatttagtaaa

SEQ ID NO: 1720657 - DNA, 15 bp, Homo sapiens
aaatatttagtaaag

SEQ ID NO: 1720658 - DNA, 15 bp, Homo sapiens
aatatttagtaaagt

SEQ ID NO: 1720659 - DNA, 15 bp, Homo sapiens
atatttagtaaagtg

SEQ ID NO: 1720660 - DNA, 15 bp, Homo sapiens
tatttagtaaagtgt

SEQ ID NO: 1720661 - DNA, 15 bp, Homo sapiens
atttagtaaagtgta

SEQ ID NO: 1720662 - DNA, 15 bp, Homo sapiens
tttagtaaagtgtaa

SEQ ID NO: 1720663 - DNA, 15 bp, Homo sapiens
ttagtaaagtgtaat

SEQ ID NO: 1720664 - DNA, 15 bp, Homo sapiens
tagtaaagtgtaata

SEQ ID NO: 1720665 - DNA, 15 bp, Homo sapiens
agtaaagtgtaataa

SEQ ID NO: 1720666 - DNA, 15 bp, Homo sapiens
gtaaagtgtaataat

SEQ ID NO: 1720667 - DNA, 15 bp, Homo sapiens
taaagtgtaataata

SEQ ID NO: 1720668 - DNA, 15 bp, Homo sapiens
aaagtgtaataataa

SEQ ID NO: 1720669 - DNA, 15 bp, Homo sapiens
aagtgtaataataaa

SEQ ID NO: 1720670 - DNA, 15 bp, Homo sapiens
agtgtaataataaag

SEQ ID NO: 1720671 - DNA, 15 bp, Homo sapiens
gtgtaataataaaga

SEQ ID NO: 1720672 - DNA, 15 bp, Homo sapiens
tgtaataataaagat

SEQ ID NO: 1720673 - DNA, 15 bp, Homo sapiens
gtaataataaagatt

SEQ ID NO: 1720674 - DNA, 15 bp, Homo sapiens
taataataaagatta

SEQ ID NO: 1720675 - DNA, 15 bp, Homo sapiens
aataataaagattag

SEQ ID NO: 1720676 - DNA, 15 bp, Homo sapiens
ataataaagattagc

SEQ ID NO: 1720677 - DNA, 15 bp, Homo sapiens
taataaagattagct

SEQ ID NO: 1720678 - DNA, 15 bp, Homo sapiens
aataaagattagctt

SEQ ID NO: 1720679 - DNA, 15 bp, Homo sapiens
ataaagattagcttt

SEQ ID NO: 1720680 - DNA, 15 bp, Homo sapiens
taaagattagctttg

SEQ ID NO: 1720681 - DNA, 15 bp, Homo sapiens
aaagattagctttgt

SEQ ID NO: 1720682 - DNA, 15 bp, Homo sapiens
aagattagctttgtt

SEQ ID NO: 1720683 - DNA, 15 bp, Homo sapiens
agattagctttgttc

SEQ ID NO: 1720684 - DNA, 15 bp, Homo sapiens
gattagctttgttca

SEQ ID NO: 1720685 - DNA, 15 bp, Homo sapiens
attagctttgttcat

SEQ ID NO: 1720686 - DNA, 15 bp, Homo sapiens
ttagctttgttcata

SEQ ID NO: 1720687 - DNA, 15 bp, Homo sapiens
tagctttgttcataa

SEQ ID NO: 1720688 - DNA, 15 bp, Homo sapiens
agctttgttcataag

SEQ ID NO: 1720689 - DNA, 15 bp, Homo sapiens
gctttgttcataagg

SEQ ID NO: 1720690 - DNA, 15 bp, Homo sapiens
ctttgttcataaggt

SEQ ID NO: 1720691 - DNA, 15 bp, Homo sapiens
tttgttcataaggtt

SEQ ID NO: 1720692 - DNA, 15 bp, Homo sapiens
ttgttcataaggtta

SEQ ID NO: 1720693 - DNA, 15 bp, Homo sapiens
tgttcataaggttag

SEQ ID NO: 1720694 - DNA, 15 bp, Homo sapiens
gttcataaggttaga

SEQ ID NO: 1720695 - DNA, 15 bp, Homo sapiens
ttcataaggttagat

SEQ ID NO: 1720696 - DNA, 15 bp, Homo sapiens
tcataaggttagatt

SEQ ID NO: 1720697 - DNA, 15 bp, Homo sapiens
cataaggttagattg

SEQ ID NO: 1720698 - DNA, 15 bp, Homo sapiens
ataaggttagattgt

SEQ ID NO: 1720699 - DNA, 15 bp, Homo sapiens
taaggttagattgta

SEQ ID NO: 1720700 - DNA, 15 bp, Homo sapiens
aaggttagattgtat

SEQ ID NO: 1720701 - DNA, 15 bp, Homo sapiens
aggttagattgtatt

SEQ ID NO: 1720702 - DNA, 15 bp, Homo sapiens
ggttagattgtattt

SEQ ID NO: 1720703 - DNA, 15 bp, Homo sapiens
gttagattgtattta

SEQ ID NO: 1720704 - DNA, 15 bp, Homo sapiens
ttagattgtatttat

SEQ ID NO: 1720705 - DNA, 15 bp, Homo sapiens
tagattgtatttatg

SEQ ID NO: 1720706 - DNA, 15 bp, Homo sapiens
agattgtatttatgc

SEQ ID NO: 1720707 - DNA, 15 bp, Homo sapiens
gattgtatttatgct

SEQ ID NO: 1720708 - DNA, 15 bp, Homo sapiens
attgtatttatgctg

SEQ ID NO: 1720709 - DNA, 15 bp, Homo sapiens
ttgtatttatgctga

SEQ ID NO: 1720710 - DNA, 15 bp, Homo sapiens
tgtatttatgctgat

SEQ ID NO: 1720711 - DNA, 15 bp, Homo sapiens
gtatttatgctgatt

SEQ ID NO: 1720712 - DNA, 15 bp, Homo sapiens
tatttatgctgatta

SEQ ID NO: 1720713 - DNA, 15 bp, Homo sapiens
atttatgctgattat

SEQ ID NO: 1720714 - DNA, 15 bp, Homo sapiens
tttatgctgattata

SEQ ID NO: 1720715 - DNA, 15 bp, Homo sapiens
ttatgctgattatag

SEQ ID NO: 1720716 - DNA, 15 bp, Homo sapiens
tatgctgattatagc

SEQ ID NO: 1720717 - DNA, 15 bp, Homo sapiens
atgctgattatagca

SEQ ID NO: 1720718 - DNA, 15 bp, Homo sapiens
tgctgattatagcat

SEQ ID NO: 1720719 - DNA, 15 bp, Homo sapiens
gctgattatagcata

SEQ ID NO: 1720720 - DNA, 15 bp, Homo sapiens
ctgattatagcatat

SEQ ID NO: 1720721 - DNA, 15 bp, Homo sapiens
tgattatagcatatg

SEQ ID NO: 1720722 - DNA, 15 bp, Homo sapiens
gattatagcatatga

SEQ ID NO: 1720723 - DNA, 15 bp, Homo sapiens
attatagcatatgaa

SEQ ID NO: 1720724 - DNA, 15 bp, Homo sapiens
ttatagcatatgaat

SEQ ID NO: 1720725 - DNA, 15 bp, Homo sapiens
tatagcatatgaata

SEQ ID NO: 1720726 - DNA, 15 bp, Homo sapiens
atagcatatgaatag

SEQ ID NO: 1720727 - DNA, 15 bp, Homo sapiens
tagcatatgaatagg

SEQ ID NO: 1720728 - DNA, 15 bp, Homo sapiens
agcatatgaatagga

SEQ ID NO: 1720729 - DNA, 15 bp, Homo sapiens
gcatatgaataggac

SEQ ID NO: 1720730 - DNA, 15 bp, Homo sapiens
catatgaataggact

SEQ ID NO: 1720731 - DNA, 15 bp, Homo sapiens
atatgaataggactt

SEQ ID NO: 1720732 - DNA, 15 bp, Homo sapiens
tatgaataggacttt

SEQ ID NO: 1720733 - DNA, 15 bp, Homo sapiens
atgaataggactttc

SEQ ID NO: 1720734 - DNA, 15 bp, Homo sapiens
tgaataggactttcc

SEQ ID NO: 1720735 - DNA, 15 bp, Homo sapiens
gaataggactttcca

SEQ ID NO: 1720736 - DNA, 15 bp, Homo sapiens
aataggactttccat

SEQ ID NO: 1720737 - DNA, 15 bp, Homo sapiens
ataggactttccatt

SEQ ID NO: 1720738 - DNA, 15 bp, Homo sapiens
taggactttccatta

SEQ ID NO: 1720739 - DNA, 15 bp, Homo sapiens
aggactttccattaa

SEQ ID NO: 1720740 - DNA, 15 bp, Homo sapiens
ggactttccattaag

SEQ ID NO: 1720741 - DNA, 15 bp, Homo sapiens
gactttccattaaga

SEQ ID NO: 1720742 - DNA, 15 bp, Homo sapiens
actttccattaagaa

SEQ ID NO: 1720743 - DNA, 15 bp, Homo sapiens
ctttccattaagaaa

SEQ ID NO: 1720744 - DNA, 15 bp, Homo sapiens
tttccattaagaaat

SEQ ID NO: 1720745 - DNA, 15 bp, Homo sapiens
ttccattaagaaatt

SEQ ID NO: 1720746 - DNA, 15 bp, Homo sapiens
tccattaagaaattg

SEQ ID NO: 1720747 - DNA, 15 bp, Homo sapiens
ccattaagaaattgg

SEQ ID NO: 1720748 - DNA, 15 bp, Homo sapiens
cattaagaaattggc

SEQ ID NO: 1720749 - DNA, 15 bp, Homo sapiens
attaagaaattggct

SEQ ID NO: 1720750 - DNA, 15 bp, Homo sapiens
ttaagaaattggcta

SEQ ID NO: 1720751 - DNA, 15 bp, Homo sapiens
taagaaattggctaa

SEQ ID NO: 1720752 - DNA, 15 bp, Homo sapiens
aagaaattggctaag

SEQ ID NO: 1720753 - DNA, 15 bp, Homo sapiens
agaaattggctaagg

SEQ ID NO: 1720754 - DNA, 15 bp, Homo sapiens
gaaattggctaaggt

SEQ ID NO: 1720755 - DNA, 15 bp, Homo sapiens
aaattggctaaggtg

SEQ ID NO: 1720756 - DNA, 15 bp, Homo sapiens
aattggctaaggtga

SEQ ID NO: 1720757 - DNA, 15 bp, Homo sapiens
attggctaaggtgat

SEQ ID NO: 1720758 - DNA, 15 bp, Homo sapiens
ttggctaaggtgatg

SEQ ID NO: 1720759 - DNA, 15 bp, Homo sapiens
tggctaaggtgatgt

SEQ ID NO: 1720760 - DNA, 15 bp, Homo sapiens
ggctaaggtgatgtt

SEQ ID NO: 1720761 - DNA, 15 bp, Homo sapiens
gctaaggtgatgttc

SEQ ID NO: 1720762 - DNA, 15 bp, Homo sapiens
ctaaggtgatgttca

SEQ ID NO: 1720763 - DNA, 15 bp, Homo sapiens
taaggtgatgttcat

SEQ ID NO: 1720764 - DNA, 15 bp, Homo sapiens
aaggtgatgttcata

SEQ ID NO: 1720765 - DNA, 15 bp, Homo sapiens
aggtgatgttcatat

SEQ ID NO: 1720766 - DNA, 15 bp, Homo sapiens
ggtgatgttcatatt

SEQ ID NO: 1720767 - DNA, 15 bp, Homo sapiens
gtgatgttcatattg

SEQ ID NO: 1720768 - DNA, 15 bp, Homo sapiens
tgatgttcatattgt

SEQ ID NO: 1720769 - DNA, 15 bp, Homo sapiens
gatgttcatattgtg

SEQ ID NO: 1720770 - DNA, 15 bp, Homo sapiens
atgttcatattgtga

SEQ ID NO: 1720771 - DNA, 15 bp, Homo sapiens
tgttcatattgtgac

SEQ ID NO: 1720772 - DNA, 15 bp, Homo sapiens
gttcatattgtgact

SEQ ID NO: 1720773 - DNA, 15 bp, Homo sapiens
ttcatattgtgactt

SEQ ID NO: 1720774 - DNA, 15 bp, Homo sapiens
tcatattgtgactta

SEQ ID NO: 1720775 - DNA, 15 bp, Homo sapiens
catattgtgacttaa

SEQ ID NO: 1720776 - DNA, 15 bp, Homo sapiens
atattgtgacttaag

SEQ ID NO: 1720777 - DNA, 15 bp, Homo sapiens
tattgtgacttaagg

SEQ ID NO: 1720778 - DNA, 15 bp, Homo sapiens
attgtgacttaaggt

SEQ ID NO: 1720779 - DNA, 15 bp, Homo sapiens
ttgtgacttaaggtg

SEQ ID NO: 1720780 - DNA, 15 bp, Homo sapiens
gtgacttaaggtgaa

SEQ ID NO: 1720781 - DNA, 15 bp, Homo sapiens
tgacttaaggtgaat

SEQ ID NO: 1720782 - DNA, 15 bp, Homo sapiens
gacttaaggtgaatc

SEQ ID NO: 1720783 - DNA, 15 bp, Homo sapiens
acttaaggtgaatca

SEQ ID NO: 1720784 - DNA, 15 bp, Homo sapiens
cttaaggtgaatcag

SEQ ID NO: 1720785 - DNA, 15 bp, Homo sapiens
ttaaggtgaatcagc

SEQ ID NO: 1720786 - DNA, 15 bp, Homo sapiens
taaggtgaatcagct

SEQ ID NO: 1720787 - DNA, 15 bp, Homo sapiens
aaggtgaatcagctg

SEQ ID NO: 1720788 - DNA, 15 bp, Homo sapiens
aggtgaatcagctgt

SEQ ID NO: 1720789 - DNA, 15 bp, Homo sapiens
ggtgaatcagctgtt

SEQ ID NO: 1720790 - DNA, 15 bp, Homo sapiens
gtgaatcagctgtta

SEQ ID NO: 1720791 - DNA, 15 bp, Homo sapiens
tgaatcagctgttag

SEQ ID NO: 1720792 - DNA, 15 bp, Homo sapiens
gaatcagctgttaga

SEQ ID NO: 1720793 - DNA, 15 bp, Homo sapiens
aatcagctgttagaa

SEQ ID NO: 1720794 - DNA, 15 bp, Homo sapiens
atcagctgttagaat

SEQ ID NO: 1720795 - DNA, 15 bp, Homo sapiens
tcagctgttagaatt

SEQ ID NO: 1720796 - DNA, 15 bp, Homo sapiens
cagctgttagaattt

SEQ ID NO: 1720797 - DNA, 15 bp, Homo sapiens
agctgttagaatttt

SEQ ID NO: 1720798 - DNA, 15 bp, Homo sapiens
gctgttagaattttg

SEQ ID NO: 1720799 - DNA, 15 bp, Homo sapiens
ctgttagaattttgg

SEQ ID NO: 1720800 - DNA, 15 bp, Homo sapiens
tgttagaattttggt

SEQ ID NO: 1720801 - DNA, 15 bp, Homo sapiens
gttagaattttggtt

SEQ ID NO: 1720802 - DNA, 15 bp, Homo sapiens
ttagaattttggttt

SEQ ID NO: 1720803 - DNA, 15 bp, Homo sapiens
tagaattttggttta

SEQ ID NO: 1720804 - DNA, 15 bp, Homo sapiens
agaattttggtttac

SEQ ID NO: 1720805 - DNA, 15 bp, Homo sapiens
gaattttggtttact

SEQ ID NO: 1720806 - DNA, 15 bp, Homo sapiens
aattttggtttactt

SEQ ID NO: 1720807 - DNA, 15 bp, Homo sapiens
attttggtttacttt

SEQ ID NO: 1720808 - DNA, 15 bp, Homo sapiens
ttttggtttactttc

SEQ ID NO: 1720809 - DNA, 15 bp, Homo sapiens
tttggtttactttct

SEQ ID NO: 1720810 - DNA, 15 bp, Homo sapiens
ttggtttactttctg

SEQ ID NO: 1720811 - DNA, 15 bp, Homo sapiens
tggtttactttctgc

SEQ ID NO: 1720812 - DNA, 15 bp, Homo sapiens
ggtttactttctgca

SEQ ID NO: 1720813 - DNA, 15 bp, Homo sapiens
gtttactttctgcat

SEQ ID NO: 1720814 - DNA, 15 bp, Homo sapiens
tttactttctgcatc

SEQ ID NO: 1720815 - DNA, 15 bp, Homo sapiens
ttactttctgcatct

SEQ ID NO: 1720816 - DNA, 15 bp, Homo sapiens
tactttctgcatctt

SEQ ID NO: 1720817 - DNA, 15 bp, Homo sapiens
actttctgcatcttg

SEQ ID NO: 1720818 - DNA, 15 bp, Homo sapiens
ctttctgcatcttga

SEQ ID NO: 1720819 - DNA, 15 bp, Homo sapiens
tttctgcatcttgat

SEQ ID NO: 1720820 - DNA, 15 bp, Homo sapiens
ttctgcatcttgatt

SEQ ID NO: 1720821 - DNA, 15 bp, Homo sapiens
tctgcatcttgattg

SEQ ID NO: 1720822 - DNA, 15 bp, Homo sapiens
ctgcatcttgattgg

SEQ ID NO: 1720823 - DNA, 15 bp, Homo sapiens
tgcatcttgattggt

SEQ ID NO: 1720824 - DNA, 15 bp, Homo sapiens
gcatcttgattggta

SEQ ID NO: 1720825 - DNA, 15 bp, Homo sapiens
catcttgattggtag

SEQ ID NO: 1720826 - DNA, 15 bp, Homo sapiens
atcttgattggtagt

SEQ ID NO: 1720827 - DNA, 15 bp, Homo sapiens
tcttgattggtagta

SEQ ID NO: 1720828 - DNA, 15 bp, Homo sapiens
cttgattggtagtat

SEQ ID NO: 1720829 - DNA, 15 bp, Homo sapiens
ttgattggtagtatg

SEQ ID NO: 1720830 - DNA, 15 bp, Homo sapiens
tgattggtagtatgg

SEQ ID NO: 1720831 - DNA, 15 bp, Homo sapiens
gattggtagtatggt

SEQ ID NO: 1720832 - DNA, 15 bp, Homo sapiens
attggtagtatggta

SEQ ID NO: 1720833 - DNA, 15 bp, Homo sapiens
ttggtagtatggtag

SEQ ID NO: 1720834 - DNA, 15 bp, Homo sapiens
tggtagtatggtaga

SEQ ID NO: 1720835 - DNA, 15 bp, Homo sapiens
ggtagtatggtagaa

SEQ ID NO: 1720836 - DNA, 15 bp, Homo sapiens
gtagtatggtagaat

SEQ ID NO: 1720837 - DNA, 15 bp, Homo sapiens
tagtatggtagaatg

SEQ ID NO: 1720838 - DNA, 15 bp, Homo sapiens
agtatggtagaatgg

SEQ ID NO: 1720839 - DNA, 15 bp, Homo sapiens
gtatggtagaatgga

SEQ ID NO: 1720840 - DNA, 15 bp, Homo sapiens
tatggtagaatggaa

SEQ ID NO: 1720841 - DNA, 15 bp, Homo sapiens
atggtagaatggaaa

SEQ ID NO: 1720842 - DNA, 15 bp, Homo sapiens
tggtagaatggaaaa

SEQ ID NO: 1720843 - DNA, 15 bp, Homo sapiens
ggtagaatggaaaat

SEQ ID NO: 1720844 - DNA, 15 bp, Homo sapiens
gtagaatggaaaatg

SEQ ID NO: 1720845 - DNA, 15 bp, Homo sapiens
tagaatggaaaatgc

SEQ ID NO: 1720846 - DNA, 15 bp, Homo sapiens
agaatggaaaatgcc

SEQ ID NO: 1720847 - DNA, 15 bp, Homo sapiens
gaatggaaaatgcct

SEQ ID NO: 1720848 - DNA, 15 bp, Homo sapiens
aatggaaaatgcctt

SEQ ID NO: 1720849 - DNA, 15 bp, Homo sapiens
atggaaaatgccttg

SEQ ID NO: 1720850 - DNA, 15 bp, Homo sapiens
tggaaaatgccttgg

SEQ ID NO: 1720851 - DNA, 15 bp, Homo sapiens
ggaaaatgccttgga

SEQ ID NO: 1720852 - DNA, 15 bp, Homo sapiens
gaaaatgccttggac

SEQ ID NO: 1720853 - DNA, 15 bp, Homo sapiens
aaaatgccttggacc

SEQ ID NO: 1720854 - DNA, 15 bp, Homo sapiens
aaatgccttggacct

SEQ ID NO: 1720855 - DNA, 15 bp, Homo sapiens
aatgccttggacctc

SEQ ID NO: 1720856 - DNA, 15 bp, Homo sapiens
atgccttggacctca

SEQ ID NO: 1720857 - DNA, 15 bp, Homo sapiens
tgccttggacctcaa

SEQ ID NO: 1720858 - DNA, 15 bp, Homo sapiens
gccttggacctcaag

SEQ ID NO: 1720859 - DNA, 15 bp, Homo sapiens
ccttggacctcaagg

SEQ ID NO: 1720860 - DNA, 15 bp, Homo sapiens
cttggacctcaaggc

SEQ ID NO: 1720861 - DNA, 15 bp, Homo sapiens
ttggacctcaaggca

SEQ ID NO: 1720862 - DNA, 15 bp, Homo sapiens
tggacctcaaggcag

SEQ ID NO: 1720863 - DNA, 15 bp, Homo sapiens
ggacctcaaggcagg

SEQ ID NO: 1720864 - DNA, 15 bp, Homo sapiens
gacctcaaggcagga

SEQ ID NO: 1720865 - DNA, 15 bp, Homo sapiens
acctcaaggcaggaa

SEQ ID NO: 1720866 - DNA, 15 bp, Homo sapiens
cctcaaggcaggaaa

SEQ ID NO: 1720867 - DNA, 15 bp, Homo sapiens
ctcaaggcaggaaac

SEQ ID NO: 1720868 - DNA, 15 bp, Homo sapiens
tcaaggcaggaaact

SEQ ID NO: 1720869 - DNA, 15 bp, Homo sapiens
caaggcaggaaactt

SEQ ID NO: 1720870 - DNA, 15 bp, Homo sapiens
aggcaggaaactttg

SEQ ID NO: 1720871 - DNA, 15 bp, Homo sapiens
ggcaggaaactttgg

SEQ ID NO: 1720872 - DNA, 15 bp, Homo sapiens
gcaggaaactttggt

SEQ ID NO: 1720873 - DNA, 15 bp, Homo sapiens
caggaaactttggtt

SEQ ID NO: 1720874 - DNA, 15 bp, Homo sapiens
aggaaactttggttg

SEQ ID NO: 1720875 - DNA, 15 bp, Homo sapiens
ggaaactttggttgt

SEQ ID NO: 1720876 - DNA, 15 bp, Homo sapiens
gaaactttggttgta

SEQ ID NO: 1720877 - DNA, 15 bp, Homo sapiens
aaactttggttgtaa

SEQ ID NO: 1720878 - DNA, 15 bp, Homo sapiens
aactttggttgtaat

SEQ ID NO: 1720879 - DNA, 15 bp, Homo sapiens
actttggttgtaatt

SEQ ID NO: 1720880 - DNA, 15 bp, Homo sapiens
ctttggttgtaatta

SEQ ID NO: 1720881 - DNA, 15 bp, Homo sapiens
tttggttgtaattat

SEQ ID NO: 1720882 - DNA, 15 bp, Homo sapiens
ttggttgtaattata

SEQ ID NO: 1720883 - DNA, 15 bp, Homo sapiens
tggttgtaattatat

SEQ ID NO: 1720884 - DNA, 15 bp, Homo sapiens
ggttgtaattatatt

SEQ ID NO: 1720885 - DNA, 15 bp, Homo sapiens
gttgtaattatattg

SEQ ID NO: 1720886 - DNA, 15 bp, Homo sapiens
ttgtaattatattgt

SEQ ID NO: 1720887 - DNA, 15 bp, Homo sapiens
tgtaattatattgta

SEQ ID NO: 1720888 - DNA, 15 bp, Homo sapiens
gtaattatattgtag

SEQ ID NO: 1720889 - DNA, 15 bp, Homo sapiens
taattatattgtagc

SEQ ID NO: 1720890 - DNA, 15 bp, Homo sapiens
aattatattgtagct

SEQ ID NO: 1720891 - DNA, 15 bp, Homo sapiens
attatattgtagcta

SEQ ID NO: 1720892 - DNA, 15 bp, Homo sapiens
ttatattgtagctat

SEQ ID NO: 1720893 - DNA, 15 bp, Homo sapiens
tatattgtagctata

SEQ ID NO: 1720894 - DNA, 15 bp, Homo sapiens
atattgtagctatat

SEQ ID NO: 1720895 - DNA, 15 bp, Homo sapiens
tattgtagctatatg

SEQ ID NO: 1720896 - DNA, 15 bp, Homo sapiens
attgtagctatatga

SEQ ID NO: 1720897 - DNA, 15 bp, Homo sapiens
ttgtagctatatgat

SEQ ID NO: 1720898 - DNA, 15 bp, Homo sapiens
tgtagctatatgatt

SEQ ID NO: 1720899 - DNA, 15 bp, Homo sapiens
gtagctatatgattt

SEQ ID NO: 1720900 - DNA, 15 bp, Homo sapiens
tagctatatgatttt

SEQ ID NO: 1720901 - DNA, 15 bp, Homo sapiens
agctatatgatttta

SEQ ID NO: 1720902 - DNA, 15 bp, Homo sapiens
gctatatgattttag

SEQ ID NO: 1720903 - DNA, 15 bp, Homo sapiens
ctatatgattttagg

SEQ ID NO: 1720904 - DNA, 15 bp, Homo sapiens
tatatgattttaggc

SEQ ID NO: 1720905 - DNA, 15 bp, Homo sapiens
atatgattttaggca

SEQ ID NO: 1720906 - DNA, 15 bp, Homo sapiens
tatgattttaggcaa

SEQ ID NO: 1720907 - DNA, 15 bp, Homo sapiens
atgattttaggcaaa

SEQ ID NO: 1720908 - DNA, 15 bp, Homo sapiens
tgattttaggcaaat

SEQ ID NO: 1720909 - DNA, 15 bp, Homo sapiens
gattttaggcaaatt

SEQ ID NO: 1720910 - DNA, 15 bp, Homo sapiens
attttaggcaaattg

SEQ ID NO: 1720911 - DNA, 15 bp, Homo sapiens
ttttaggcaaattgg

SEQ ID NO: 1720912 - DNA, 15 bp, Homo sapiens
tttaggcaaattggt

SEQ ID NO: 1720913 - DNA, 15 bp, Homo sapiens
ttaggcaaattggtt

SEQ ID NO: 1720914 - DNA, 15 bp, Homo sapiens
taggcaaattggtta

SEQ ID NO: 1720915 - DNA, 15 bp, Homo sapiens
aggcaaattggttaa

SEQ ID NO: 1720916 - DNA, 15 bp, Homo sapiens
ggcaaattggttaat

SEQ ID NO: 1720917 - DNA, 15 bp, Homo sapiens
gcaaattggttaatt

SEQ ID NO: 1720918 - DNA, 15 bp, Homo sapiens
caaattggttaattc

SEQ ID NO: 1720919 - DNA, 15 bp, Homo sapiens
aaattggttaattct

SEQ ID NO: 1720920 - DNA, 15 bp, Homo sapiens
aattggttaattctg

SEQ ID NO: 1720921 - DNA, 15 bp, Homo sapiens
attggttaattctgt

SEQ ID NO: 1720922 - DNA, 15 bp, Homo sapiens
ttggttaattctgtg

SEQ ID NO: 1720923 - DNA, 15 bp, Homo sapiens
tggttaattctgtga

SEQ ID NO: 1720924 - DNA, 15 bp, Homo sapiens
ggttaattctgtgag

SEQ ID NO: 1720925 - DNA, 15 bp, Homo sapiens
gttaattctgtgagt

SEQ ID NO: 1720926 - DNA, 15 bp, Homo sapiens
ttaattctgtgagtc

SEQ ID NO: 1720927 - DNA, 15 bp, Homo sapiens
taattctgtgagtct

SEQ ID NO: 1720928 - DNA, 15 bp, Homo sapiens
aattctgtgagtctc

SEQ ID NO: 1720929 - DNA, 15 bp, Homo sapiens
attctgtgagtctca

SEQ ID NO: 1720930 - DNA, 15 bp, Homo sapiens
ttctgtgagtctcag

SEQ ID NO: 1720931 - DNA, 15 bp, Homo sapiens
tctgtgagtctcagt

SEQ ID NO: 1720932 - DNA, 15 bp, Homo sapiens
ctgtgagtctcagtt

SEQ ID NO: 1720933 - DNA, 15 bp, Homo sapiens
tgtgagtctcagttt

SEQ ID NO: 1720934 - DNA, 15 bp, Homo sapiens
gtgagtctcagtttg

SEQ ID NO: 1720935 - DNA, 15 bp, Homo sapiens
tgagtctcagtttgc

SEQ ID NO: 1720936 - DNA, 15 bp, Homo sapiens
gagtctcagtttgct

SEQ ID NO: 1720937 - DNA, 15 bp, Homo sapiens
agtctcagtttgctc

SEQ ID NO: 1720938 - DNA, 15 bp, Homo sapiens
gtctcagtttgctca

SEQ ID NO: 1720939 - DNA, 15 bp, Homo sapiens
tctcagtttgctcac

SEQ ID NO: 1720940 - DNA, 15 bp, Homo sapiens
ctcagtttgctcacc

SEQ ID NO: 1720941 - DNA, 15 bp, Homo sapiens
tcagtttgctcacct

SEQ ID NO: 1720942 - DNA, 15 bp, Homo sapiens
cagtttgctcacctg

SEQ ID NO: 1720943 - DNA, 15 bp, Homo sapiens
agtttgctcacctgt

SEQ ID NO: 1720944 - DNA, 15 bp, Homo sapiens
gtttgctcacctgta

SEQ ID NO: 1720945 - DNA, 15 bp, Homo sapiens
tttgctcacctgtaa

SEQ ID NO: 1720946 - DNA, 15 bp, Homo sapiens
ttgctcacctgtaag

SEQ ID NO: 1720947 - DNA, 15 bp, Homo sapiens
tgctcacctgtaagg

SEQ ID NO: 1720948 - DNA, 15 bp, Homo sapiens
gctcacctgtaaggc

SEQ ID NO: 1720949 - DNA, 15 bp, Homo sapiens
ctcacctgtaaggca

SEQ ID NO: 1720950 - DNA, 15 bp, Homo sapiens
tcacctgtaaggcag

SEQ ID NO: 1720951 - DNA, 15 bp, Homo sapiens
cacctgtaaggcaga

SEQ ID NO: 1720952 - DNA, 15 bp, Homo sapiens
acctgtaaggcagaa

SEQ ID NO: 1720953 - DNA, 15 bp, Homo sapiens
cctgtaaggcagaaa

SEQ ID NO: 1720954 - DNA, 15 bp, Homo sapiens
ctgtaaggcagaaat

SEQ ID NO: 1720955 - DNA, 15 bp, Homo sapiens
tgtaaggcagaaata

SEQ ID NO: 1720956 - DNA, 15 bp, Homo sapiens
gtaaggcagaaataa

SEQ ID NO: 1720957 - DNA, 15 bp, Homo sapiens
taaggcagaaataat

SEQ ID NO: 1720958 - DNA, 15 bp, Homo sapiens
aaggcagaaataatg

SEQ ID NO: 1720959 - DNA, 15 bp, Homo sapiens
aggcagaaataatgc

SEQ ID NO: 1720960 - DNA, 15 bp, Homo sapiens
ggcagaaataatgcc

SEQ ID NO: 1720961 - DNA, 15 bp, Homo sapiens
gcagaaataatgcct

SEQ ID NO: 1720962 - DNA, 15 bp, Homo sapiens
cagaaataatgcctg

SEQ ID NO: 1720963 - DNA, 15 bp, Homo sapiens
agaaataatgcctga

SEQ ID NO: 1720964 - DNA, 15 bp, Homo sapiens
gaaataatgcctgaa

SEQ ID NO: 1720965 - DNA, 15 bp, Homo sapiens
aaataatgcctgaat

SEQ ID NO: 1720966 - DNA, 15 bp, Homo sapiens
aataatgcctgaatg

SEQ ID NO: 1720967 - DNA, 15 bp, Homo sapiens
ataatgcctgaatgt

SEQ ID NO: 1720968 - DNA, 15 bp, Homo sapiens
taatgcctgaatgtg

SEQ ID NO: 1720969 - DNA, 15 bp, Homo sapiens
aatgcctgaatgtga

SEQ ID NO: 1720970 - DNA, 15 bp, Homo sapiens
atgcctgaatgtgaa

SEQ ID NO: 1720971 - DNA, 15 bp, Homo sapiens
tgcctgaatgtgaac

SEQ ID NO: 1720972 - DNA, 15 bp, Homo sapiens
gcctgaatgtgaacc

SEQ ID NO: 1720973 - DNA, 15 bp, Homo sapiens
cctgaatgtgaacct

SEQ ID NO: 1720974 - DNA, 15 bp, Homo sapiens
ctgaatgtgaacctc

SEQ ID NO: 1720975 - DNA, 15 bp, Homo sapiens
tgaatgtgaacctca

SEQ ID NO: 1720976 - DNA, 15 bp, Homo sapiens
gaatgtgaacctcat

SEQ ID NO: 1720977 - DNA, 15 bp, Homo sapiens
aatgtgaacctcata

SEQ ID NO: 1720978 - DNA, 15 bp, Homo sapiens
atgtgaacctcatag

SEQ ID NO: 1720979 - DNA, 15 bp, Homo sapiens
tgtgaacctcatagg

SEQ ID NO: 1720980 - DNA, 15 bp, Homo sapiens
gtgaacctcataggc

SEQ ID NO: 1720981 - DNA, 15 bp, Homo sapiens
tgaacctcataggct

SEQ ID NO: 1720982 - DNA, 15 bp, Homo sapiens
gaacctcataggctt

SEQ ID NO: 1720983 - DNA, 15 bp, Homo sapiens
aacctcataggcttt

SEQ ID NO: 1720984 - DNA, 15 bp, Homo sapiens
acctcataggctttt

SEQ ID NO: 1720985 - DNA, 15 bp, Homo sapiens
cctcataggcttttt

SEQ ID NO: 1720986 - DNA, 15 bp, Homo sapiens
ctcataggctttttg

SEQ ID NO: 1720987 - DNA, 15 bp, Homo sapiens
tcataggctttttgt

SEQ ID NO: 1720988 - DNA, 15 bp, Homo sapiens
cataggctttttgtt

SEQ ID NO: 1720989 - DNA, 15 bp, Homo sapiens
ataggctttttgtta

SEQ ID NO: 1720990 - DNA, 15 bp, Homo sapiens
taggctttttgttat

SEQ ID NO: 1720991 - DNA, 15 bp, Homo sapiens
aggctttttgttata

SEQ ID NO: 1720992 - DNA, 15 bp, Homo sapiens
ggctttttgttatac

SEQ ID NO: 1720993 - DNA, 15 bp, Homo sapiens
gctttttgttataca

SEQ ID NO: 1720994 - DNA, 15 bp, Homo sapiens
ctttttgttatacat

SEQ ID NO: 1720995 - DNA, 15 bp, Homo sapiens
tttttgttatacata

SEQ ID NO: 1720996 - DNA, 15 bp, Homo sapiens
ttttgttatacatac

SEQ ID NO: 1720997 - DNA, 15 bp, Homo sapiens
tttgttatacataca

SEQ ID NO: 1720998 - DNA, 15 bp, Homo sapiens
ttgttatacatacat

SEQ ID NO: 1720999 - DNA, 15 bp, Homo sapiens
tgttatacatacata

SEQ ID NO: 1721000 - DNA, 15 bp, Homo sapiens
gttatacatacatat

SEQ ID NO: 1721001 - DNA, 15 bp, Homo sapiens
ttatacatacatata

SEQ ID NO: 1721002 - DNA, 15 bp, Homo sapiens
tatacatacatatat

SEQ ID NO: 1721003 - DNA, 15 bp, Homo sapiens
atacatacatatata

SEQ ID NO: 1721004 - DNA, 15 bp, Homo sapiens
tacatacatatatat

SEQ ID NO: 1721005 - DNA, 15 bp, Homo sapiens
acatacatatatatg

SEQ ID NO: 1721006 - DNA, 15 bp, Homo sapiens
catacatatatatgt

SEQ ID NO: 1721007 - DNA, 15 bp, Homo sapiens
tatatatgtatatga

SEQ ID NO: 1721008 - DNA, 15 bp, Homo sapiens
atatatgtatatgaa

SEQ ID NO: 1721009 - DNA, 15 bp, Homo sapiens
tatatgtatatgaaa

SEQ ID NO: 1721010 - DNA, 15 bp, Homo sapiens
atatgtatatgaaat

SEQ ID NO: 1721011 - DNA, 15 bp, Homo sapiens
tatgtatatgaaatg

SEQ ID NO: 1721012 - DNA, 15 bp, Homo sapiens
atgtatatgaaatgt

SEQ ID NO: 1721013 - DNA, 15 bp, Homo sapiens
tgtatatgaaatgta

SEQ ID NO: 1721014 - DNA, 15 bp, Homo sapiens
gtatatgaaatgtat

SEQ ID NO: 1721015 - DNA, 15 bp, Homo sapiens
tatatgaaatgtatg

SEQ ID NO: 1721016 - DNA, 15 bp, Homo sapiens
atatgaaatgtatga

SEQ ID NO: 1721017 - DNA, 15 bp, Homo sapiens
tatgaaatgtatgat

SEQ ID NO: 1721018 - DNA, 15 bp, Homo sapiens
atgaaatgtatgata

SEQ ID NO: 1721019 - DNA, 15 bp, Homo sapiens
tgaaatgtatgatat

SEQ ID NO: 1721020 - DNA, 15 bp, Homo sapiens
gaaatgtatgatata

SEQ ID NO: 1721021 - DNA, 15 bp, Homo sapiens
aaatgtatgatatac

SEQ ID NO: 1721022 - DNA, 15 bp, Homo sapiens
aatgtatgatataca

SEQ ID NO: 1721023 - DNA, 15 bp, Homo sapiens
atgtatgatatacat

SEQ ID NO: 1721024 - DNA, 15 bp, Homo sapiens
tgtatgatatacata

SEQ ID NO: 1721025 - DNA, 15 bp, Homo sapiens
gtatgatatacatat

SEQ ID NO: 1721026 - DNA, 15 bp, Homo sapiens
tatgatatacatatc

SEQ ID NO: 1721027 - DNA, 15 bp, Homo sapiens
atgatatacatatct

SEQ ID NO: 1721028 - DNA, 15 bp, Homo sapiens
tgatatacatatctc

SEQ ID NO: 1721029 - DNA, 15 bp, Homo sapiens
gatatacatatctca

SEQ ID NO: 1721030 - DNA, 15 bp, Homo sapiens
atatacatatctcaa

SEQ ID NO: 1721031 - DNA, 15 bp, Homo sapiens
tatacatatctcaaa

SEQ ID NO: 1721032 - DNA, 15 bp, Homo sapiens
atacatatctcaaag

SEQ ID NO: 1721033 - DNA, 15 bp, Homo sapiens
tacatatctcaaaga

SEQ ID NO: 1721034 - DNA, 15 bp, Homo sapiens
acatatctcaaagag

SEQ ID NO: 1721035 - DNA, 15 bp, Homo sapiens
catatctcaaagagc

SEQ ID NO: 1721036 - DNA, 15 bp, Homo sapiens
atatctcaaagagct

SEQ ID NO: 1721037 - DNA, 15 bp, Homo sapiens
tatctcaaagagctt

SEQ ID NO: 1721038 - DNA, 15 bp, Homo sapiens
atctcaaagagcttt

SEQ ID NO: 1721039 - DNA, 15 bp, Homo sapiens
tctcaaagagctttg

SEQ ID NO: 1721040 - DNA, 15 bp, Homo sapiens
ctcaaagagctttgg

SEQ ID NO: 1721041 - DNA, 15 bp, Homo sapiens
tcaaagagctttggg

SEQ ID NO: 1721042 - DNA, 15 bp, Homo sapiens
caaagagctttggga

SEQ ID NO: 1721043 - DNA, 15 bp, Homo sapiens
aaagagctttgggat

SEQ ID NO: 1721044 - DNA, 15 bp, Homo sapiens
aagagctttgggata

SEQ ID NO: 1721045 - DNA, 15 bp, Homo sapiens
agagctttgggatat

SEQ ID NO: 1721046 - DNA, 15 bp, Homo sapiens
gagctttgggatata

SEQ ID NO: 1721047 - DNA, 15 bp, Homo sapiens
agctttgggatatat

SEQ ID NO: 1721048 - DNA, 15 bp, Homo sapiens
gctttgggatatatt

SEQ ID NO: 1721049 - DNA, 15 bp, Homo sapiens
ctttgggatatattg

SEQ ID NO: 1721050 - DNA, 15 bp, Homo sapiens
tttgggatatattgc

SEQ ID NO: 1721051 - DNA, 15 bp, Homo sapiens
ttgggatatattgct

SEQ ID NO: 1721052 - DNA, 15 bp, Homo sapiens
tgggatatattgctc

SEQ ID NO: 1721053 - DNA, 15 bp, Homo sapiens
gggatatattgctct

SEQ ID NO: 1721054 - DNA, 15 bp, Homo sapiens
ggatatattgctctt

SEQ ID NO: 1721055 - DNA, 15 bp, Homo sapiens
gatatattgctcttg

SEQ ID NO: 1721056 - DNA, 15 bp, Homo sapiens
atatattgctcttga

SEQ ID NO: 1721057 - DNA, 15 bp, Homo sapiens
tatattgctcttgat

SEQ ID NO: 1721058 - DNA, 15 bp, Homo sapiens
atattgctcttgata

SEQ ID NO: 1721059 - DNA, 15 bp, Homo sapiens
tattgctcttgatag

SEQ ID NO: 1721060 - DNA, 15 bp, Homo sapiens
attgctcttgataga

SEQ ID NO: 1721061 - DNA, 15 bp, Homo sapiens
ttgctcttgatagaa

SEQ ID NO: 1721062 - DNA, 15 bp, Homo sapiens
tgctcttgatagaac

SEQ ID NO: 1721063 - DNA, 15 bp, Homo sapiens
gctcttgatagaacc

SEQ ID NO: 1721064 - DNA, 15 bp, Homo sapiens
ctcttgatagaacca

SEQ ID NO: 1721065 - DNA, 15 bp, Homo sapiens
tcttgatagaaccac

SEQ ID NO: 1721066 - DNA, 15 bp, Homo sapiens
cttgatagaaccact

SEQ ID NO: 1721067 - DNA, 15 bp, Homo sapiens
ttgatagaaccactt

SEQ ID NO: 1721068 - DNA, 15 bp, Homo sapiens
tgatagaaccactta

SEQ ID NO: 1721069 - DNA, 15 bp, Homo sapiens
gatagaaccacttac

SEQ ID NO: 1721070 - DNA, 15 bp, Homo sapiens
atagaaccacttact

SEQ ID NO: 1721071 - DNA, 15 bp, Homo sapiens
tagaaccacttactt

SEQ ID NO: 1721072 - DNA, 15 bp, Homo sapiens
agaaccacttactta

SEQ ID NO: 1721073 - DNA, 15 bp, Homo sapiens
gaaccacttacttat

SEQ ID NO: 1721074 - DNA, 15 bp, Homo sapiens
aaccacttacttatt

SEQ ID NO: 1721075 - DNA, 15 bp, Homo sapiens
accacttacttattt

SEQ ID NO: 1721076 - DNA, 15 bp, Homo sapiens
ccacttacttatttt

SEQ ID NO: 1721077 - DNA, 15 bp, Homo sapiens
cacttacttattttt

SEQ ID NO: 1721078 - DNA, 15 bp, Homo sapiens
acttacttatttttg

SEQ ID NO: 1721079 - DNA, 15 bp, Homo sapiens
cttacttatttttgt

SEQ ID NO: 1721080 - DNA, 15 bp, Homo sapiens
ttacttatttttgtg

SEQ ID NO: 1721081 - DNA, 15 bp, Homo sapiens
tacttatttttgtga

SEQ ID NO: 1721082 - DNA, 15 bp, Homo sapiens
acttatttttgtgat

SEQ ID NO: 1721083 - DNA, 15 bp, Homo sapiens
cttatttttgtgata

SEQ ID NO: 1721084 - DNA, 15 bp, Homo sapiens
ttatttttgtgatat

SEQ ID NO: 1721085 - DNA, 15 bp, Homo sapiens
tatttttgtgatatg

SEQ ID NO: 1721086 - DNA, 15 bp, Homo sapiens
atttttgtgatatgg

SEQ ID NO: 1721087 - DNA, 15 bp, Homo sapiens
tttttgtgatatggt

SEQ ID NO: 1721088 - DNA, 15 bp, Homo sapiens
ttttgtgatatggtg

SEQ ID NO: 1721089 - DNA, 15 bp, Homo sapiens
tttgtgatatggtgg

SEQ ID NO: 1721090 - DNA, 15 bp, Homo sapiens
ttgtgatatggtggt

SEQ ID NO: 1721091 - DNA, 15 bp, Homo sapiens
tgtgatatggtggtt

SEQ ID NO: 1721092 - DNA, 15 bp, Homo sapiens
gtgatatggtggtta

SEQ ID NO: 1721093 - DNA, 15 bp, Homo sapiens
tgatatggtggttat

SEQ ID NO: 1721094 - DNA, 15 bp, Homo sapiens
gatatggtggttata

SEQ ID NO: 1721095 - DNA, 15 bp, Homo sapiens
atatggtggttatat

SEQ ID NO: 1721096 - DNA, 15 bp, Homo sapiens
tatggtggttatatt

SEQ ID NO: 1721097 - DNA, 15 bp, Homo sapiens
atggtggttatattt

SEQ ID NO: 1721098 - DNA, 15 bp, Homo sapiens
tggtggttatatttt

SEQ ID NO: 1721099 - DNA, 15 bp, Homo sapiens
ggtggttatatttta

SEQ ID NO: 1721100 - DNA, 15 bp, Homo sapiens
gtggttatattttaa

SEQ ID NO: 1721101 - DNA, 15 bp, Homo sapiens
tggttatattttaaa

SEQ ID NO: 1721102 - DNA, 15 bp, Homo sapiens
ggttatattttaaat

SEQ ID NO: 1721103 - DNA, 15 bp, Homo sapiens
gttatattttaaata

SEQ ID NO: 1721104 - DNA, 15 bp, Homo sapiens
ttatattttaaataa

SEQ ID NO: 1721105 - DNA, 15 bp, Homo sapiens
tatattttaaataaa

SEQ ID NO: 1721106 - DNA, 15 bp, Homo sapiens
atattttaaataaat

SEQ ID NO: 1721107 - DNA, 15 bp, Homo sapiens
tattttaaataaata

SEQ ID NO: 1721108 - DNA, 15 bp, Homo sapiens
attttaaataaatac

SEQ ID NO: 1721109 - DNA, 15 bp, Homo sapiens
ttttaaataaataca

SEQ ID NO: 1721110 - DNA, 15 bp, Homo sapiens
tttaaataaatacag

SEQ ID NO: 1721111 - DNA, 15 bp, Homo sapiens
ttaaataaatacagt

SEQ ID NO: 1721112 - DNA, 15 bp, Homo sapiens
taaataaatacagtc

SEQ ID NO: 1721113 - DNA, 15 bp, Homo sapiens
aaataaatacagtca

SEQ ID NO: 1721114 - DNA, 15 bp, Homo sapiens
aataaatacagtcat

SEQ ID NO: 1721115 - DNA, 15 bp, Homo sapiens
ataaatacagtcatg

SEQ ID NO: 1721116 - DNA, 15 bp, Homo sapiens
taaatacagtcatgt

SEQ ID NO: 1721117 - DNA, 15 bp, Homo sapiens
aaatacagtcatgtg

SEQ ID NO: 1721118 - DNA, 15 bp, Homo sapiens
aatacagtcatgtgt

SEQ ID NO: 1721119 - DNA, 15 bp, Homo sapiens
atacagtcatgtgtt

SEQ ID NO: 1721120 - DNA, 15 bp, Homo sapiens
catgtgttgcttaac

SEQ ID NO: 1721121 - DNA, 15 bp, Homo sapiens
atgtgttgcttaaca

SEQ ID NO: 1721122 - DNA, 15 bp, Homo sapiens
tgtgttgcttaacaa

SEQ ID NO: 1721123 - DNA, 15 bp, Homo sapiens
gtgttgcttaacaat

SEQ ID NO: 1721124 - DNA, 15 bp, Homo sapiens
tgttgcttaacaatg

SEQ ID NO: 1721125 - DNA, 15 bp, Homo sapiens
gttgcttaacaatgg

SEQ ID NO: 1721126 - DNA, 15 bp, Homo sapiens
ttgcttaacaatggg

SEQ ID NO: 1721127 - DNA, 15 bp, Homo sapiens
tgcttaacaatggga

SEQ ID NO: 1721128 - DNA, 15 bp, Homo sapiens
gcttaacaatgggaa

SEQ ID NO: 1721129 - DNA, 15 bp, Homo sapiens
cttaacaatgggaac

SEQ ID NO: 1721130 - DNA, 15 bp, Homo sapiens
ttaacaatgggaaca

SEQ ID NO: 1721131 - DNA, 15 bp, Homo sapiens
taacaatgggaacac

SEQ ID NO: 1721132 - DNA, 15 bp, Homo sapiens
aacaatgggaacaca

SEQ ID NO: 1721133 - DNA, 15 bp, Homo sapiens
acaatgggaacacat

SEQ ID NO: 1721134 - DNA, 15 bp, Homo sapiens
caatgggaacacatc

SEQ ID NO: 1721135 - DNA, 15 bp, Homo sapiens
aatgggaacacatct

SEQ ID NO: 1721136 - DNA, 15 bp, Homo sapiens
atgggaacacatctg

SEQ ID NO: 1721137 - DNA, 15 bp, Homo sapiens
tgggaacacatctga

SEQ ID NO: 1721138 - DNA, 15 bp, Homo sapiens
gggaacacatctgag

SEQ ID NO: 1721139 - DNA, 15 bp, Homo sapiens
ggaacacatctgaga

SEQ ID NO: 1721140 - DNA, 15 bp, Homo sapiens
gaacacatctgagaa

SEQ ID NO: 1721141 - DNA, 15 bp, Homo sapiens
aacacatctgagaaa

SEQ ID NO: 1721142 - DNA, 15 bp, Homo sapiens
acacatctgagaaat

SEQ ID NO: 1721143 - DNA, 15 bp, Homo sapiens
cacatctgagaaatg

SEQ ID NO: 1721144 - DNA, 15 bp, Homo sapiens
acatctgagaaatgc

SEQ ID NO: 1721145 - DNA, 15 bp, Homo sapiens
catctgagaaatgca

SEQ ID NO: 1721146 - DNA, 15 bp, Homo sapiens
atctgagaaatgcat

SEQ ID NO: 1721147 - DNA, 15 bp, Homo sapiens
ttaggtgatttcatc

SEQ ID NO: 1721148 - DNA, 15 bp, Homo sapiens
taggtgatttcatcg

SEQ ID NO: 1721149 - DNA, 15 bp, Homo sapiens
aggtgatttcatcgt

SEQ ID NO: 1721150 - DNA, 15 bp, Homo sapiens
ggtgatttcatcgtt

SEQ ID NO: 1721151 - DNA, 15 bp, Homo sapiens
gtgatttcatcgttg

SEQ ID NO: 1721152 - DNA, 15 bp, Homo sapiens
tgatttcatcgttgt

SEQ ID NO: 1721153 - DNA, 15 bp, Homo sapiens
gatttcatcgttgtg

SEQ ID NO: 1721154 - DNA, 15 bp, Homo sapiens
atttcatcgttgtgt

SEQ ID NO: 1721155 - DNA, 15 bp, Homo sapiens
tttcatcgttgtgtg

SEQ ID NO: 1721156 - DNA, 15 bp, Homo sapiens
ttcatcgttgtgtga

SEQ ID NO: 1721157 - DNA, 15 bp, Homo sapiens
tcatcgttgtgtgaa

SEQ ID NO: 1721158 - DNA, 15 bp, Homo sapiens
catcgttgtgtgaac

SEQ ID NO: 1721159 - DNA, 15 bp, Homo sapiens
atcgttgtgtgaaca

SEQ ID NO: 1721160 - DNA, 15 bp, Homo sapiens
tcgttgtgtgaacat

SEQ ID NO: 1721161 - DNA, 15 bp, Homo sapiens
cgttgtgtgaacatc

SEQ ID NO: 1721162 - DNA, 15 bp, Homo sapiens
gttgtgtgaacatca

SEQ ID NO: 1721163 - DNA, 15 bp, Homo sapiens
ttgtgtgaacatcat

SEQ ID NO: 1721164 - DNA, 15 bp, Homo sapiens
tgtgtgaacatcata

SEQ ID NO: 1721165 - DNA, 15 bp, Homo sapiens
gtgtgaacatcatag

SEQ ID NO: 1721166 - DNA, 15 bp, Homo sapiens
tgtgaacatcatagc

SEQ ID NO: 1721167 - DNA, 15 bp, Homo sapiens
gtgaacatcatagca

SEQ ID NO: 1721168 - DNA, 15 bp, Homo sapiens
tgaacatcatagcat

SEQ ID NO: 1721169 - DNA, 15 bp, Homo sapiens
gaacatcatagcatg

SEQ ID NO: 1721170 - DNA, 15 bp, Homo sapiens
aacatcatagcatgt

SEQ ID NO: 1721171 - DNA, 15 bp, Homo sapiens
acatcatagcatgta

SEQ ID NO: 1721172 - DNA, 15 bp, Homo sapiens
catcatagcatgtac

SEQ ID NO: 1721173 - DNA, 15 bp, Homo sapiens
atcatagcatgtact

SEQ ID NO: 1721174 - DNA, 15 bp, Homo sapiens
tcatagcatgtactt

SEQ ID NO: 1721175 - DNA, 15 bp, Homo sapiens
catagcatgtactta

SEQ ID NO: 1721176 - DNA, 15 bp, Homo sapiens
atagcatgtacttac

SEQ ID NO: 1721177 - DNA, 15 bp, Homo sapiens
tagcatgtacttaca

SEQ ID NO: 1721178 - DNA, 15 bp, Homo sapiens
agcatgtacttacac

SEQ ID NO: 1721179 - DNA, 15 bp, Homo sapiens
gcatgtacttacaca

SEQ ID NO: 1721180 - DNA, 15 bp, Homo sapiens
catgtacttacacaa

SEQ ID NO: 1721181 - DNA, 15 bp, Homo sapiens
atgtacttacacaaa

SEQ ID NO: 1721182 - DNA, 15 bp, Homo sapiens
tgtacttacacaaac

SEQ ID NO: 1721183 - DNA, 15 bp, Homo sapiens
gtacttacacaaacc

SEQ ID NO: 1721184 - DNA, 15 bp, Homo sapiens
tacttacacaaacct

SEQ ID NO: 1721185 - DNA, 15 bp, Homo sapiens
acttacacaaacctg

SEQ ID NO: 1721186 - DNA, 15 bp, Homo sapiens
cttacacaaacctgg

SEQ ID NO: 1721187 - DNA, 15 bp, Homo sapiens
ttacacaaacctgga

SEQ ID NO: 1721188 - DNA, 15 bp, Homo sapiens
tacacaaacctggat

SEQ ID NO: 1721189 - DNA, 15 bp, Homo sapiens
acacaaacctggatg

SEQ ID NO: 1721190 - DNA, 15 bp, Homo sapiens
cacaaacctggatgg

SEQ ID NO: 1721191 - DNA, 15 bp, Homo sapiens
acaaacctggatggt

SEQ ID NO: 1721192 - DNA, 15 bp, Homo sapiens
caaacctggatggta

SEQ ID NO: 1721193 - DNA, 15 bp, Homo sapiens
aaacctggatggtat

SEQ ID NO: 1721194 - DNA, 15 bp, Homo sapiens
aacctggatggtata

SEQ ID NO: 1721195 - DNA, 15 bp, Homo sapiens
acctggatggtatag

SEQ ID NO: 1721196 - DNA, 15 bp, Homo sapiens
cctggatggtatagc

SEQ ID NO: 1721197 - DNA, 15 bp, Homo sapiens
ctggatggtatagcc

SEQ ID NO: 1721198 - DNA, 15 bp, Homo sapiens
tggatggtatagcct

SEQ ID NO: 1721199 - DNA, 15 bp, Homo sapiens
ggatggtatagccta

SEQ ID NO: 1721200 - DNA, 15 bp, Homo sapiens
gatggtatagcctat

SEQ ID NO: 1721201 - DNA, 15 bp, Homo sapiens
atggtatagcctatg

SEQ ID NO: 1721202 - DNA, 15 bp, Homo sapiens
tggtatagcctatga

SEQ ID NO: 1721203 - DNA, 15 bp, Homo sapiens
ggtatagcctatgac

SEQ ID NO: 1721204 - DNA, 15 bp, Homo sapiens
gtatagcctatgaca

SEQ ID NO: 1721205 - DNA, 15 bp, Homo sapiens
tatagcctatgacac

SEQ ID NO: 1721206 - DNA, 15 bp, Homo sapiens
atagcctatgacaca

SEQ ID NO: 1721207 - DNA, 15 bp, Homo sapiens
tagcctatgacacac

SEQ ID NO: 1721208 - DNA, 15 bp, Homo sapiens
agcctatgacacacc

SEQ ID NO: 1721209 - DNA, 15 bp, Homo sapiens
gcctatgacacacct

SEQ ID NO: 1721210 - DNA, 15 bp, Homo sapiens
cctatgacacaccta

SEQ ID NO: 1721211 - DNA, 15 bp, Homo sapiens
ctatgacacacctat

SEQ ID NO: 1721212 - DNA, 15 bp, Homo sapiens
tatgacacacctatg

SEQ ID NO: 1721213 - DNA, 15 bp, Homo sapiens
atgacacacctatgc

SEQ ID NO: 1721214 - DNA, 15 bp, Homo sapiens
tgacacacctatgct

SEQ ID NO: 1721215 - DNA, 15 bp, Homo sapiens
gacacacctatgctg

SEQ ID NO: 1721216 - DNA, 15 bp, Homo sapiens
acacacctatgctgt

SEQ ID NO: 1721217 - DNA, 15 bp, Homo sapiens
cacacctatgctgtg

SEQ ID NO: 1721218 - DNA, 15 bp, Homo sapiens
acacctatgctgtgt

SEQ ID NO: 1721219 - DNA, 15 bp, Homo sapiens
cacctatgctgtgtg

SEQ ID NO: 1721220 - DNA, 15 bp, Homo sapiens
acctatgctgtgtgg

SEQ ID NO: 1721221 - DNA, 15 bp, Homo sapiens
cctatgctgtgtggt

SEQ ID NO: 1721222 - DNA, 15 bp, Homo sapiens
ctatgctgtgtggta

SEQ ID NO: 1721223 - DNA, 15 bp, Homo sapiens
tatgctgtgtggtat

SEQ ID NO: 1721224 - DNA, 15 bp, Homo sapiens
atgctgtgtggtata

SEQ ID NO: 1721225 - DNA, 15 bp, Homo sapiens
tgctgtgtggtatat

SEQ ID NO: 1721226 - DNA, 15 bp, Homo sapiens
gctgtgtggtatata

SEQ ID NO: 1721227 - DNA, 15 bp, Homo sapiens
ctgtgtggtatatag

SEQ ID NO: 1721228 - DNA, 15 bp, Homo sapiens
tgtgtggtatatagc

SEQ ID NO: 1721229 - DNA, 15 bp, Homo sapiens
gtgtggtatatagca

SEQ ID NO: 1721230 - DNA, 15 bp, Homo sapiens
tgtggtatatagcat

SEQ ID NO: 1721231 - DNA, 15 bp, Homo sapiens
gtggtatatagcatg

SEQ ID NO: 1721232 - DNA, 15 bp, Homo sapiens
tggtatatagcatgt

SEQ ID NO: 1721233 - DNA, 15 bp, Homo sapiens
ggtatatagcatgtt

SEQ ID NO: 1721234 - DNA, 15 bp, Homo sapiens
gtatatagcatgttg

SEQ ID NO: 1721235 - DNA, 15 bp, Homo sapiens
tatatagcatgttgc

SEQ ID NO: 1721236 - DNA, 15 bp, Homo sapiens
atatagcatgttgct

SEQ ID NO: 1721237 - DNA, 15 bp, Homo sapiens
tatagcatgttgctc

SEQ ID NO: 1721238 - DNA, 15 bp, Homo sapiens
atagcatgttgctcc

SEQ ID NO: 1721239 - DNA, 15 bp, Homo sapiens
tagcatgttgctcct

SEQ ID NO: 1721240 - DNA, 15 bp, Homo sapiens
agcatgttgctccta

SEQ ID NO: 1721241 - DNA, 15 bp, Homo sapiens
gcatgttgctcctag

SEQ ID NO: 1721242 - DNA, 15 bp, Homo sapiens
catgttgctcctagt

SEQ ID NO: 1721243 - DNA, 15 bp, Homo sapiens
atgttgctcctagtc

SEQ ID NO: 1721244 - DNA, 15 bp, Homo sapiens
tgttgctcctagtct

SEQ ID NO: 1721245 - DNA, 15 bp, Homo sapiens
gttgctcctagtctg

SEQ ID NO: 1721246 - DNA, 15 bp, Homo sapiens
ttgctcctagtctgc

SEQ ID NO: 1721247 - DNA, 15 bp, Homo sapiens
tgctcctagtctgca

SEQ ID NO: 1721248 - DNA, 15 bp, Homo sapiens
gctcctagtctgcaa

SEQ ID NO: 1721249 - DNA, 15 bp, Homo sapiens
ctcctagtctgcaaa

SEQ ID NO: 1721250 - DNA, 15 bp, Homo sapiens
tcctagtctgcaaat

SEQ ID NO: 1721251 - DNA, 15 bp, Homo sapiens
cctagtctgcaaatg

SEQ ID NO: 1721252 - DNA, 15 bp, Homo sapiens
ctagtctgcaaatgt

SEQ ID NO: 1721253 - DNA, 15 bp, Homo sapiens
tagtctgcaaatgtg

SEQ ID NO: 1721254 - DNA, 15 bp, Homo sapiens
agtctgcaaatgtgt

SEQ ID NO: 1721255 - DNA, 15 bp, Homo sapiens
gtctgcaaatgtgta

SEQ ID NO: 1721256 - DNA, 15 bp, Homo sapiens
tctgcaaatgtgtac

SEQ ID NO: 1721257 - DNA, 15 bp, Homo sapiens
ctgcaaatgtgtaca

SEQ ID NO: 1721258 - DNA, 15 bp, Homo sapiens
tgcaaatgtgtacag

SEQ ID NO: 1721259 - DNA, 15 bp, Homo sapiens
gcaaatgtgtacagc

SEQ ID NO: 1721260 - DNA, 15 bp, Homo sapiens
caaatgtgtacagca

SEQ ID NO: 1721261 - DNA, 15 bp, Homo sapiens
aaatgtgtacagcat

SEQ ID NO: 1721262 - DNA, 15 bp, Homo sapiens
aatgtgtacagcatg

SEQ ID NO: 1721263 - DNA, 15 bp, Homo sapiens
atgtgtacagcatgt

SEQ ID NO: 1721264 - DNA, 15 bp, Homo sapiens
tgtgtacagcatgtt

SEQ ID NO: 1721265 - DNA, 15 bp, Homo sapiens
gtgtacagcatgtta

SEQ ID NO: 1721266 - DNA, 15 bp, Homo sapiens
gttactgtactgaac

SEQ ID NO: 1721267 - DNA, 15 bp, Homo sapiens
ttactgtactgaaca

SEQ ID NO: 1721268 - DNA, 15 bp, Homo sapiens
tactgtactgaacat

SEQ ID NO: 1721269 - DNA, 15 bp, Homo sapiens
actgtactgaacatt

SEQ ID NO: 1721270 - DNA, 15 bp, Homo sapiens
ctgtactgaacattg

SEQ ID NO: 1721271 - DNA, 15 bp, Homo sapiens
tgtactgaacattgt

SEQ ID NO: 1721272 - DNA, 15 bp, Homo sapiens
gtactgaacattgta

SEQ ID NO: 1721273 - DNA, 15 bp, Homo sapiens
tactgaacattgtag

SEQ ID NO: 1721274 - DNA, 15 bp, Homo sapiens
actgaacattgtagg

SEQ ID NO: 1721275 - DNA, 15 bp, Homo sapiens
ctgaacattgtaggc

SEQ ID NO: 1721276 - DNA, 15 bp, Homo sapiens
tgaacattgtaggca

SEQ ID NO: 1721277 - DNA, 15 bp, Homo sapiens
gaacattgtaggcaa

SEQ ID NO: 1721278 - DNA, 15 bp, Homo sapiens
aacattgtaggcaat

SEQ ID NO: 1721279 - DNA, 15 bp, Homo sapiens
acattgtaggcaatt

SEQ ID NO: 1721280 - DNA, 15 bp, Homo sapiens
cattgtaggcaattg

SEQ ID NO: 1721281 - DNA, 15 bp, Homo sapiens
attgtaggcaattgt

SEQ ID NO: 1721282 - DNA, 15 bp, Homo sapiens
ttgtaggcaattgta

SEQ ID NO: 1721283 - DNA, 15 bp, Homo sapiens
tgtaggcaattgtaa

SEQ ID NO: 1721284 - DNA, 15 bp, Homo sapiens
gtaggcaattgtaac

SEQ ID NO: 1721285 - DNA, 15 bp, Homo sapiens
taggcaattgtaaca

SEQ ID NO: 1721286 - DNA, 15 bp, Homo sapiens
aggcaattgtaacac

SEQ ID NO: 1721287 - DNA, 15 bp, Homo sapiens
ggcaattgtaacaca

SEQ ID NO: 1721288 - DNA, 15 bp, Homo sapiens
gcaattgtaacacaa

SEQ ID NO: 1721289 - DNA, 15 bp, Homo sapiens
caattgtaacacaat

SEQ ID NO: 1721290 - DNA, 15 bp, Homo sapiens
aattgtaacacaatg

SEQ ID NO: 1721291 - DNA, 15 bp, Homo sapiens
attgtaacacaatgg

SEQ ID NO: 1721292 - DNA, 15 bp, Homo sapiens
ttgtaacacaatggt

SEQ ID NO: 1721293 - DNA, 15 bp, Homo sapiens
tgtaacacaatggta

SEQ ID NO: 1721294 - DNA, 15 bp, Homo sapiens
gtaacacaatggtaa

SEQ ID NO: 1721295 - DNA, 15 bp, Homo sapiens
taacacaatggtaag

SEQ ID NO: 1721296 - DNA, 15 bp, Homo sapiens
aacacaatggtaagt

SEQ ID NO: 1721297 - DNA, 15 bp, Homo sapiens
acacaatggtaagta

SEQ ID NO: 1721298 - DNA, 15 bp, Homo sapiens
cacaatggtaagtat

SEQ ID NO: 1721299 - DNA, 15 bp, Homo sapiens
acaatggtaagtatt

SEQ ID NO: 1721300 - DNA, 15 bp, Homo sapiens
caatggtaagtattt

SEQ ID NO: 1721301 - DNA, 15 bp, Homo sapiens
aatggtaagtatttg

SEQ ID NO: 1721302 - DNA, 15 bp, Homo sapiens
atggtaagtatttgt

SEQ ID NO: 1721303 - DNA, 15 bp, Homo sapiens
tggtaagtatttgta

SEQ ID NO: 1721304 - DNA, 15 bp, Homo sapiens
ggtaagtatttgtat

SEQ ID NO: 1721305 - DNA, 15 bp, Homo sapiens
gtaagtatttgtata

SEQ ID NO: 1721306 - DNA, 15 bp, Homo sapiens
taagtatttgtatat

SEQ ID NO: 1721307 - DNA, 15 bp, Homo sapiens
aagtatttgtatatc

SEQ ID NO: 1721308 - DNA, 15 bp, Homo sapiens
agtatttgtatatct

SEQ ID NO: 1721309 - DNA, 15 bp, Homo sapiens
gtatttgtatatcta

SEQ ID NO: 1721310 - DNA, 15 bp, Homo sapiens
tatttgtatatctat

SEQ ID NO: 1721311 - DNA, 15 bp, Homo sapiens
atttgtatatctata

SEQ ID NO: 1721312 - DNA, 15 bp, Homo sapiens
tttgtatatctatac

SEQ ID NO: 1721313 - DNA, 15 bp, Homo sapiens
ttgtatatctataca

SEQ ID NO: 1721314 - DNA, 15 bp, Homo sapiens
tgtatatctatacat

SEQ ID NO: 1721315 - DNA, 15 bp, Homo sapiens
gtatatctatacata

SEQ ID NO: 1721316 - DNA, 15 bp, Homo sapiens
tatatctatacatag

SEQ ID NO: 1721317 - DNA, 15 bp, Homo sapiens
atatctatacataga

SEQ ID NO: 1721318 - DNA, 15 bp, Homo sapiens
tatctatacatagaa

SEQ ID NO: 1721319 - DNA, 15 bp, Homo sapiens
atctatacatagaaa

SEQ ID NO: 1721320 - DNA, 15 bp, Homo sapiens
tctatacatagaaaa

SEQ ID NO: 1721321 - DNA, 15 bp, Homo sapiens
ctatacatagaaaag

SEQ ID NO: 1721322 - DNA, 15 bp, Homo sapiens
tatacatagaaaagg

SEQ ID NO: 1721323 - DNA, 15 bp, Homo sapiens
atacatagaaaaggt

SEQ ID NO: 1721324 - DNA, 15 bp, Homo sapiens
tacatagaaaaggta

SEQ ID NO: 1721325 - DNA, 15 bp, Homo sapiens
aaaaggtacagtaga

SEQ ID NO: 1721326 - DNA, 15 bp, Homo sapiens
aaaggtacagtagat

SEQ ID NO: 1721327 - DNA, 15 bp, Homo sapiens
aaggtacagtagatc

SEQ ID NO: 1721328 - DNA, 15 bp, Homo sapiens
aggtacagtagatca

SEQ ID NO: 1721329 - DNA, 15 bp, Homo sapiens
ggtacagtagatcat

SEQ ID NO: 1721330 - DNA, 15 bp, Homo sapiens
gtacagtagatcatc

SEQ ID NO: 1721331 - DNA, 15 bp, Homo sapiens
tacagtagatcatcc

SEQ ID NO: 1721332 - DNA, 15 bp, Homo sapiens
acagtagatcatcca

SEQ ID NO: 1721333 - DNA, 15 bp, Homo sapiens
cagtagatcatccat

SEQ ID NO: 1721334 - DNA, 15 bp, Homo sapiens
agtagatcatccata

SEQ ID NO: 1721335 - DNA, 15 bp, Homo sapiens
gtagatcatccatat

SEQ ID NO: 1721336 - DNA, 15 bp, Homo sapiens
tagatcatccatatc

SEQ ID NO: 1721337 - DNA, 15 bp, Homo sapiens
agatcatccatatcc

SEQ ID NO: 1721338 - DNA, 15 bp, Homo sapiens
gatcatccatatcct

SEQ ID NO: 1721339 - DNA, 15 bp, Homo sapiens
atcatccatatcctt

SEQ ID NO: 1721340 - DNA, 15 bp, Homo sapiens
tcatccatatcctta

SEQ ID NO: 1721341 - DNA, 15 bp, Homo sapiens
catccatatccttac

SEQ ID NO: 1721342 - DNA, 15 bp, Homo sapiens
atccatatccttact

SEQ ID NO: 1721343 - DNA, 15 bp, Homo sapiens
tccatatccttactg

SEQ ID NO: 1721344 - DNA, 15 bp, Homo sapiens
ccatatccttactga

SEQ ID NO: 1721345 - DNA, 15 bp, Homo sapiens
catatccttactgat

SEQ ID NO: 1721346 - DNA, 15 bp, Homo sapiens
atatccttactgatt

SEQ ID NO: 1721347 - DNA, 15 bp, Homo sapiens
tatccttactgattt

SEQ ID NO: 1721348 - DNA, 15 bp, Homo sapiens
atccttactgatttt

SEQ ID NO: 1721349 - DNA, 15 bp, Homo sapiens
tccttactgattttc

SEQ ID NO: 1721350 - DNA, 15 bp, Homo sapiens
ccttactgattttct

SEQ ID NO: 1721351 - DNA, 15 bp, Homo sapiens
cttactgattttctt

SEQ ID NO: 1721352 - DNA, 15 bp, Homo sapiens
ttactgattttcttt

SEQ ID NO: 1721353 - DNA, 15 bp, Homo sapiens
tactgattttctttc

SEQ ID NO: 1721354 - DNA, 15 bp, Homo sapiens
actgattttctttct

SEQ ID NO: 1721355 - DNA, 15 bp, Homo sapiens
ctgattttctttcta

SEQ ID NO: 1721356 - DNA, 15 bp, Homo sapiens
tgattttctttctat

SEQ ID NO: 1721357 - DNA, 15 bp, Homo sapiens
gattttctttctatg

SEQ ID NO: 1721358 - DNA, 15 bp, Homo sapiens
attttctttctatgt

SEQ ID NO: 1721359 - DNA, 15 bp, Homo sapiens
ttttctttctatgtg

SEQ ID NO: 1721360 - DNA, 15 bp, Homo sapiens
tttctttctatgtgt

SEQ ID NO: 1721361 - DNA, 15 bp, Homo sapiens
ttctttctatgtgtt

SEQ ID NO: 1721362 - DNA, 15 bp, Homo sapiens
tctttctatgtgttt

SEQ ID NO: 1721363 - DNA, 15 bp, Homo sapiens
ctttctatgtgtttt

SEQ ID NO: 1721364 - DNA, 15 bp, Homo sapiens
tttctatgtgtttta

SEQ ID NO: 1721365 - DNA, 15 bp, Homo sapiens
ttctatgtgttttac

SEQ ID NO: 1721366 - DNA, 15 bp, Homo sapiens
tctatgtgttttact

SEQ ID NO: 1721367 - DNA, 15 bp, Homo sapiens
ctatgtgttttacta

SEQ ID NO: 1721368 - DNA, 15 bp, Homo sapiens
tatgtgttttactaa

SEQ ID NO: 1721369 - DNA, 15 bp, Homo sapiens
atgtgttttactaat

SEQ ID NO: 1721370 - DNA, 15 bp, Homo sapiens
tgtgttttactaatt

SEQ ID NO: 1721371 - DNA, 15 bp, Homo sapiens
gtgttttactaatta

SEQ ID NO: 1721372 - DNA, 15 bp, Homo sapiens
tgttttactaattat

SEQ ID NO: 1721373 - DNA, 15 bp, Homo sapiens
gttttactaattatt

SEQ ID NO: 1721374 - DNA, 15 bp, Homo sapiens
ttttactaattattg

SEQ ID NO: 1721375 - DNA, 15 bp, Homo sapiens
tttactaattattga

SEQ ID NO: 1721376 - DNA, 15 bp, Homo sapiens
ttactaattattgag

SEQ ID NO: 1721377 - DNA, 15 bp, Homo sapiens
tactaattattgagg

SEQ ID NO: 1721378 - DNA, 15 bp, Homo sapiens
actaattattgaggg

SEQ ID NO: 1721379 - DNA, 15 bp, Homo sapiens
ctaattattgaggga

SEQ ID NO: 1721380 - DNA, 15 bp, Homo sapiens
taattattgagggag

SEQ ID NO: 1721381 - DNA, 15 bp, Homo sapiens
aattattgagggaga

SEQ ID NO: 1721382 - DNA, 15 bp, Homo sapiens
attattgagggagaa

SEQ ID NO: 1721383 - DNA, 15 bp, Homo sapiens
ttattgagggagaaa

SEQ ID NO: 1721384 - DNA, 15 bp, Homo sapiens
tattgagggagaaat

SEQ ID NO: 1721385 - DNA, 15 bp, Homo sapiens
attgagggagaaata

SEQ ID NO: 1721386 - DNA, 15 bp, Homo sapiens
ttgagggagaaatat

SEQ ID NO: 1721387 - DNA, 15 bp, Homo sapiens
tgagggagaaatatg

SEQ ID NO: 1721388 - DNA, 15 bp, Homo sapiens
gagggagaaatatga

SEQ ID NO: 1721389 - DNA, 15 bp, Homo sapiens
agggagaaatatgaa

SEQ ID NO: 1721390 - DNA, 15 bp, Homo sapiens
gggagaaatatgaag

SEQ ID NO: 1721391 - DNA, 15 bp, Homo sapiens
ggagaaatatgaagc

SEQ ID NO: 1721392 - DNA, 15 bp, Homo sapiens
gagaaatatgaagcc

SEQ ID NO: 1721393 - DNA, 15 bp, Homo sapiens
agaaatatgaagcct

SEQ ID NO: 1721394 - DNA, 15 bp, Homo sapiens
gaaatatgaagcctc

SEQ ID NO: 1721395 - DNA, 15 bp, Homo sapiens
aaatatgaagcctcc

SEQ ID NO: 1721396 - DNA, 15 bp, Homo sapiens
aatatgaagcctcca

SEQ ID NO: 1721397 - DNA, 15 bp, Homo sapiens
atatgaagcctccaa

SEQ ID NO: 1721398 - DNA, 15 bp, Homo sapiens
tatgaagcctccaac

SEQ ID NO: 1721399 - DNA, 15 bp, Homo sapiens
atgaagcctccaact

SEQ ID NO: 1721400 - DNA, 15 bp, Homo sapiens
tgaagcctccaacta

SEQ ID NO: 1721401 - DNA, 15 bp, Homo sapiens
gaagcctccaactat

SEQ ID NO: 1721402 - DNA, 15 bp, Homo sapiens
aagcctccaactata

SEQ ID NO: 1721403 - DNA, 15 bp, Homo sapiens
agcctccaactataa

SEQ ID NO: 1721404 - DNA, 15 bp, Homo sapiens
gcctccaactataat

SEQ ID NO: 1721405 - DNA, 15 bp, Homo sapiens
cctccaactataatt

SEQ ID NO: 1721406 - DNA, 15 bp, Homo sapiens
ctccaactataatta

SEQ ID NO: 1721407 - DNA, 15 bp, Homo sapiens
tccaactataattag

SEQ ID NO: 1721408 - DNA, 15 bp, Homo sapiens
ccaactataattaga

SEQ ID NO: 1721409 - DNA, 15 bp, Homo sapiens
caactataattagaa

SEQ ID NO: 1721410 - DNA, 15 bp, Homo sapiens
aactataattagaat

SEQ ID NO: 1721411 - DNA, 15 bp, Homo sapiens
actataattagaatg

SEQ ID NO: 1721412 - DNA, 15 bp, Homo sapiens
ctataattagaatgg

SEQ ID NO: 1721413 - DNA, 15 bp, Homo sapiens
tataattagaatggt

SEQ ID NO: 1721414 - DNA, 15 bp, Homo sapiens
ataattagaatggtc

SEQ ID NO: 1721415 - DNA, 15 bp, Homo sapiens
taattagaatggtcc

SEQ ID NO: 1721416 - DNA, 15 bp, Homo sapiens
aattagaatggtcct

SEQ ID NO: 1721417 - DNA, 15 bp, Homo sapiens
attagaatggtcctt

SEQ ID NO: 1721418 - DNA, 15 bp, Homo sapiens
ttagaatggtccttt

SEQ ID NO: 1721419 - DNA, 15 bp, Homo sapiens
tagaatggtcctttt

SEQ ID NO: 1721420 - DNA, 15 bp, Homo sapiens
agaatggtcctttta

SEQ ID NO: 1721421 - DNA, 15 bp, Homo sapiens
gaatggtccttttaa

SEQ ID NO: 1721422 - DNA, 15 bp, Homo sapiens
aatggtccttttaaa

SEQ ID NO: 1721423 - DNA, 15 bp, Homo sapiens
atggtccttttaaat

SEQ ID NO: 1721424 - DNA, 15 bp, Homo sapiens
tggtccttttaaatt

SEQ ID NO: 1721425 - DNA, 15 bp, Homo sapiens
ggtccttttaaattc

SEQ ID NO: 1721426 - DNA, 15 bp, Homo sapiens
gtccttttaaattct

SEQ ID NO: 1721427 - DNA, 15 bp, Homo sapiens
tccttttaaattctg

SEQ ID NO: 1721428 - DNA, 15 bp, Homo sapiens
ccttttaaattctgt

SEQ ID NO: 1721429 - DNA, 15 bp, Homo sapiens
cttttaaattctgtt

SEQ ID NO: 1721430 - DNA, 15 bp, Homo sapiens
ttttaaattctgttt

SEQ ID NO: 1721431 - DNA, 15 bp, Homo sapiens
tttaaattctgtttt

SEQ ID NO: 1721432 - DNA, 15 bp, Homo sapiens
ttaaattctgttttt

SEQ ID NO: 1721433 - DNA, 15 bp, Homo sapiens
taaattctgtttttt

SEQ ID NO: 1721434 - DNA, 15 bp, Homo sapiens
aaattctgtttttta

SEQ ID NO: 1721435 - DNA, 15 bp, Homo sapiens
aattctgttttttat

SEQ ID NO: 1721436 - DNA, 15 bp, Homo sapiens
attctgttttttatt

SEQ ID NO: 1721437 - DNA, 15 bp, Homo sapiens
ttctgttttttatta

SEQ ID NO: 1721438 - DNA, 15 bp, Homo sapiens
tctgttttttattaa

SEQ ID NO: 1721439 - DNA, 15 bp, Homo sapiens
ctgttttttattaat

SEQ ID NO: 1721440 - DNA, 15 bp, Homo sapiens
tgttttttattaatg

SEQ ID NO: 1721441 - DNA, 15 bp, Homo sapiens
gttttttattaatgt

SEQ ID NO: 1721442 - DNA, 15 bp, Homo sapiens
ttttttattaatgta

SEQ ID NO: 1721443 - DNA, 15 bp, Homo sapiens
tttttattaatgtat

SEQ ID NO: 1721444 - DNA, 15 bp, Homo sapiens
ttttattaatgtatt

SEQ ID NO: 1721445 - DNA, 15 bp, Homo sapiens
tttattaatgtattt

SEQ ID NO: 1721446 - DNA, 15 bp, Homo sapiens
ttattaatgtatttt

SEQ ID NO: 1721447 - DNA, 15 bp, Homo sapiens
tattaatgtattttt

SEQ ID NO: 1721448 - DNA, 15 bp, Homo sapiens
attaatgtatttttt

SEQ ID NO: 1721449 - DNA, 15 bp, Homo sapiens
ttaatgtatttttta

SEQ ID NO: 1721450 - DNA, 15 bp, Homo sapiens
taatgtattttttat

SEQ ID NO: 1721451 - DNA, 15 bp, Homo sapiens
aatgtattttttatt

SEQ ID NO: 1721452 - DNA, 15 bp, Homo sapiens
atgtattttttattt

SEQ ID NO: 1721453 - DNA, 15 bp, Homo sapiens
tgtattttttatttt

SEQ ID NO: 1721454 - DNA, 15 bp, Homo sapiens
gtattttttatttta

SEQ ID NO: 1721455 - DNA, 15 bp, Homo sapiens
ttttattttattttg

SEQ ID NO: 1721456 - DNA, 15 bp, Homo sapiens
tttattttattttga

SEQ ID NO: 1721457 - DNA, 15 bp, Homo sapiens
ttattttattttgag

SEQ ID NO: 1721458 - DNA, 15 bp, Homo sapiens
tattttattttgaga

SEQ ID NO: 1721459 - DNA, 15 bp, Homo sapiens
attttattttgagat

SEQ ID NO: 1721460 - DNA, 15 bp, Homo sapiens
ttttattttgagatg

SEQ ID NO: 1721461 - DNA, 15 bp, Homo sapiens
tttattttgagatgg

SEQ ID NO: 1721462 - DNA, 15 bp, Homo sapiens
caggctggagtgcgt

SEQ ID NO: 1721463 - DNA, 15 bp, Homo sapiens
aggctggagtgcgtg

SEQ ID NO: 1721464 - DNA, 15 bp, Homo sapiens
ggctggagtgcgtgg

SEQ ID NO: 1721465 - DNA, 15 bp, Homo sapiens
gctggagtgcgtggc

SEQ ID NO: 1721466 - DNA, 15 bp, Homo sapiens
ctggagtgcgtggca

SEQ ID NO: 1721467 - DNA, 15 bp, Homo sapiens
tggagtgcgtggcac

SEQ ID NO: 1721468 - DNA, 15 bp, Homo sapiens
ggagtgcgtggcacg

SEQ ID NO: 1721469 - DNA, 15 bp, Homo sapiens
gagtgcgtggcacga

SEQ ID NO: 1721470 - DNA, 15 bp, Homo sapiens
agtgcgtggcacgat

SEQ ID NO: 1721471 - DNA, 15 bp, Homo sapiens
gtgcgtggcacgatc

SEQ ID NO: 1721472 - DNA, 15 bp, Homo sapiens
tgcgtggcacgatct

SEQ ID NO: 1721473 - DNA, 15 bp, Homo sapiens
gcgtggcacgatctc

SEQ ID NO: 1721474 - DNA, 15 bp, Homo sapiens
cgtggcacgatctcg

SEQ ID NO: 1721475 - DNA, 15 bp, Homo sapiens
tctgcctcccgggtc

SEQ ID NO: 1721476 - DNA, 15 bp, Homo sapiens
ctgcctcccgggtcc

SEQ ID NO: 1721477 - DNA, 15 bp, Homo sapiens
tgcctcccgggtcca

SEQ ID NO: 1721478 - DNA, 15 bp, Homo sapiens
gcctcccgggtccaa

SEQ ID NO: 1721479 - DNA, 15 bp, Homo sapiens
cctcccgggtccaag

SEQ ID NO: 1721480 - DNA, 15 bp, Homo sapiens
ctcccgggtccaagc

SEQ ID NO: 1721481 - DNA, 15 bp, Homo sapiens
tcccgggtccaagcg

SEQ ID NO: 1721482 - DNA, 15 bp, Homo sapiens
cccgggtccaagcga

SEQ ID NO: 1721483 - DNA, 15 bp, Homo sapiens
ccgggtccaagcgat

SEQ ID NO: 1721484 - DNA, 15 bp, Homo sapiens
cgggtccaagcgatt

SEQ ID NO: 1721485 - DNA, 15 bp, Homo sapiens
tccaagcgattctcc

SEQ ID NO: 1721486 - DNA, 15 bp, Homo sapiens
ccaagcgattctcct

SEQ ID NO: 1721487 - DNA, 15 bp, Homo sapiens
gtctcagcctcccga

SEQ ID NO: 1721488 - DNA, 15 bp, Homo sapiens
tctcagcctcccgag

SEQ ID NO: 1721489 - DNA, 15 bp, Homo sapiens
gcatgcgccaccaca

SEQ ID NO: 1721490 - DNA, 15 bp, Homo sapiens
catgcgccaccacac

SEQ ID NO: 1721491 - DNA, 15 bp, Homo sapiens
atgcgccaccacacc

SEQ ID NO: 1721492 - DNA, 15 bp, Homo sapiens
gcgccaccacacccg

SEQ ID NO: 1721493 - DNA, 15 bp, Homo sapiens
cgccaccacacccgg

SEQ ID NO: 1721494 - DNA, 15 bp, Homo sapiens
caccacacccggcta

SEQ ID NO: 1721495 - DNA, 15 bp, Homo sapiens
accacacccggctaa

SEQ ID NO: 1721496 - DNA, 15 bp, Homo sapiens
ccacacccggctaat

SEQ ID NO: 1721497 - DNA, 15 bp, Homo sapiens
cacacccggctaatt

SEQ ID NO: 1721498 - DNA, 15 bp, Homo sapiens
acacccggctaattt

SEQ ID NO: 1721499 - DNA, 15 bp, Homo sapiens
cacccggctaatttt

SEQ ID NO: 1721500 - DNA, 15 bp, Homo sapiens
acccggctaattttt

SEQ ID NO: 1721501 - DNA, 15 bp, Homo sapiens
ccgtgttagtcaggc

SEQ ID NO: 1721502 - DNA, 15 bp, Homo sapiens
cgtgttagtcaggct

SEQ ID NO: 1721503 - DNA, 15 bp, Homo sapiens
gtgttagtcaggctg

SEQ ID NO: 1721504 - DNA, 15 bp, Homo sapiens
tgttagtcaggctgg

SEQ ID NO: 1721505 - DNA, 15 bp, Homo sapiens
gttagtcaggctggt

SEQ ID NO: 1721506 - DNA, 15 bp, Homo sapiens
ttagtcaggctggtc

SEQ ID NO: 1721507 - DNA, 15 bp, Homo sapiens
tagtcaggctggtct

SEQ ID NO: 1721508 - DNA, 15 bp, Homo sapiens
agtcaggctggtctc

SEQ ID NO: 1721509 - DNA, 15 bp, Homo sapiens
ctcatgatctgccct

SEQ ID NO: 1721510 - DNA, 15 bp, Homo sapiens
tcatgatctgccctc

SEQ ID NO: 1721511 - DNA, 15 bp, Homo sapiens
catgatctgccctcg

SEQ ID NO: 1721512 - DNA, 15 bp, Homo sapiens
atgatctgccctcgg

SEQ ID NO: 1721513 - DNA, 15 bp, Homo sapiens
tgatctgccctcggc

SEQ ID NO: 1721514 - DNA, 15 bp, Homo sapiens
gatctgccctcggcc

SEQ ID NO: 1721515 - DNA, 15 bp, Homo sapiens
atctgccctcggcct

SEQ ID NO: 1721516 - DNA, 15 bp, Homo sapiens
tctgccctcggcctc

SEQ ID NO: 1721517 - DNA, 15 bp, Homo sapiens
ctgccctcggcctcc

SEQ ID NO: 1721518 - DNA, 15 bp, Homo sapiens
tgccctcggcctccc

SEQ ID NO: 1721519 - DNA, 15 bp, Homo sapiens
gccctcggcctccca

SEQ ID NO: 1721520 - DNA, 15 bp, Homo sapiens
ccctcggcctcccaa

SEQ ID NO: 1721521 - DNA, 15 bp, Homo sapiens
gcgtgagccactgtg

SEQ ID NO: 1721522 - DNA, 15 bp, Homo sapiens
cgtgagccactgtgc

SEQ ID NO: 1721523 - DNA, 15 bp, Homo sapiens
cactgtgcctggcct

SEQ ID NO: 1721524 - DNA, 15 bp, Homo sapiens
actgtgcctggcctt

SEQ ID NO: 1721525 - DNA, 15 bp, Homo sapiens
ctgtgcctggccttt

SEQ ID NO: 1721526 - DNA, 15 bp, Homo sapiens
tgtgcctggccttta

SEQ ID NO: 1721527 - DNA, 15 bp, Homo sapiens
gtgcctggcctttat

SEQ ID NO: 1721528 - DNA, 15 bp, Homo sapiens
tgcctggcctttatt

SEQ ID NO: 1721529 - DNA, 15 bp, Homo sapiens
gcctggcctttatta

SEQ ID NO: 1721530 - DNA, 15 bp, Homo sapiens
cctggcctttattag

SEQ ID NO: 1721531 - DNA, 15 bp, Homo sapiens
ctggcctttattagt

SEQ ID NO: 1721532 - DNA, 15 bp, Homo sapiens
tggcctttattagtg

SEQ ID NO: 1721533 - DNA, 15 bp, Homo sapiens
ggcctttattagtgt

SEQ ID NO: 1721534 - DNA, 15 bp, Homo sapiens
gcctttattagtgta

SEQ ID NO: 1721535 - DNA, 15 bp, Homo sapiens
cctttattagtgtat

SEQ ID NO: 1721536 - DNA, 15 bp, Homo sapiens
ctttattagtgtatt

SEQ ID NO: 1721537 - DNA, 15 bp, Homo sapiens
tttattagtgtattt

SEQ ID NO: 1721538 - DNA, 15 bp, Homo sapiens
ttattagtgtatttt

SEQ ID NO: 1721539 - DNA, 15 bp, Homo sapiens
tattagtgtatttta

SEQ ID NO: 1721540 - DNA, 15 bp, Homo sapiens
attagtgtattttaa

SEQ ID NO: 1721541 - DNA, 15 bp, Homo sapiens
ttagtgtattttaaa

SEQ ID NO: 1721542 - DNA, 15 bp, Homo sapiens
tagtgtattttaaag

SEQ ID NO: 1721543 - DNA, 15 bp, Homo sapiens
agtgtattttaaagc

SEQ ID NO: 1721544 - DNA, 15 bp, Homo sapiens
gtgtattttaaagct

SEQ ID NO: 1721545 - DNA, 15 bp, Homo sapiens
tgtattttaaagctt

SEQ ID NO: 1721546 - DNA, 15 bp, Homo sapiens
gtattttaaagcttt

SEQ ID NO: 1721547 - DNA, 15 bp, Homo sapiens
tattttaaagcttta

SEQ ID NO: 1721548 - DNA, 15 bp, Homo sapiens
attttaaagctttat

SEQ ID NO: 1721549 - DNA, 15 bp, Homo sapiens
ttttaaagctttatc

SEQ ID NO: 1721550 - DNA, 15 bp, Homo sapiens
tttaaagctttatcc

SEQ ID NO: 1721551 - DNA, 15 bp, Homo sapiens
ttaaagctttatcct

SEQ ID NO: 1721552 - DNA, 15 bp, Homo sapiens
taaagctttatcctt

SEQ ID NO: 1721553 - DNA, 15 bp, Homo sapiens
aaagctttatccttg

SEQ ID NO: 1721554 - DNA, 15 bp, Homo sapiens
aagctttatccttgg

SEQ ID NO: 1721555 - DNA, 15 bp, Homo sapiens
agctttatccttggg

SEQ ID NO: 1721556 - DNA, 15 bp, Homo sapiens
gctttatccttgggt

SEQ ID NO: 1721557 - DNA, 15 bp, Homo sapiens
ctttatccttgggta

SEQ ID NO: 1721558 - DNA, 15 bp, Homo sapiens
tttatccttgggtac

SEQ ID NO: 1721559 - DNA, 15 bp, Homo sapiens
ttatccttgggtaca

SEQ ID NO: 1721560 - DNA, 15 bp, Homo sapiens
tatccttgggtacat

SEQ ID NO: 1721561 - DNA, 15 bp, Homo sapiens
atccttgggtacata

SEQ ID NO: 1721562 - DNA, 15 bp, Homo sapiens
tccttgggtacatac

SEQ ID NO: 1721563 - DNA, 15 bp, Homo sapiens
ccttgggtacataca

SEQ ID NO: 1721564 - DNA, 15 bp, Homo sapiens
cttgggtacatacaa

SEQ ID NO: 1721565 - DNA, 15 bp, Homo sapiens
ttgggtacatacaag

SEQ ID NO: 1721566 - DNA, 15 bp, Homo sapiens
tgggtacatacaagt

SEQ ID NO: 1721567 - DNA, 15 bp, Homo sapiens
gggtacatacaagtt

SEQ ID NO: 1721568 - DNA, 15 bp, Homo sapiens
ggtacatacaagttt

SEQ ID NO: 1721569 - DNA, 15 bp, Homo sapiens
gtacatacaagttta

SEQ ID NO: 1721570 - DNA, 15 bp, Homo sapiens
tacatacaagtttag

SEQ ID NO: 1721571 - DNA, 15 bp, Homo sapiens
acatacaagtttaga

SEQ ID NO: 1721572 - DNA, 15 bp, Homo sapiens
catacaagtttagaa

SEQ ID NO: 1721573 - DNA, 15 bp, Homo sapiens
atacaagtttagaat

SEQ ID NO: 1721574 - DNA, 15 bp, Homo sapiens
tacaagtttagaatt

SEQ ID NO: 1721575 - DNA, 15 bp, Homo sapiens
acaagtttagaattt

SEQ ID NO: 1721576 - DNA, 15 bp, Homo sapiens
caagtttagaatttt

SEQ ID NO: 1721577 - DNA, 15 bp, Homo sapiens
aagtttagaattttt

SEQ ID NO: 1721578 - DNA, 15 bp, Homo sapiens
agtttagaattttta

SEQ ID NO: 1721579 - DNA, 15 bp, Homo sapiens
gtttagaatttttat

SEQ ID NO: 1721580 - DNA, 15 bp, Homo sapiens
tttagaatttttatg

SEQ ID NO: 1721581 - DNA, 15 bp, Homo sapiens
ttagaatttttatgc

SEQ ID NO: 1721582 - DNA, 15 bp, Homo sapiens
tagaatttttatgcc

SEQ ID NO: 1721583 - DNA, 15 bp, Homo sapiens
agaatttttatgcct

SEQ ID NO: 1721584 - DNA, 15 bp, Homo sapiens
gaatttttatgcctt

SEQ ID NO: 1721585 - DNA, 15 bp, Homo sapiens
aatttttatgccttt

SEQ ID NO: 1721586 - DNA, 15 bp, Homo sapiens
atttttatgcctttt

SEQ ID NO: 1721587 - DNA, 15 bp, Homo sapiens
tttttatgcctttta

SEQ ID NO: 1721588 - DNA, 15 bp, Homo sapiens
ttttatgccttttag

SEQ ID NO: 1721589 - DNA, 15 bp, Homo sapiens
tttatgccttttagg

SEQ ID NO: 1721590 - DNA, 15 bp, Homo sapiens
ttatgccttttaggt

SEQ ID NO: 1721591 - DNA, 15 bp, Homo sapiens
tatgccttttaggta

SEQ ID NO: 1721592 - DNA, 15 bp, Homo sapiens
atgccttttaggtaa

SEQ ID NO: 1721593 - DNA, 15 bp, Homo sapiens
tgccttttaggtaaa

SEQ ID NO: 1721594 - DNA, 15 bp, Homo sapiens
gccttttaggtaaat

SEQ ID NO: 1721595 - DNA, 15 bp, Homo sapiens
ccttttaggtaaatt

SEQ ID NO: 1721596 - DNA, 15 bp, Homo sapiens
cttttaggtaaattg

SEQ ID NO: 1721597 - DNA, 15 bp, Homo sapiens
ttttaggtaaattgg

SEQ ID NO: 1721598 - DNA, 15 bp, Homo sapiens
tttaggtaaattggt

SEQ ID NO: 1721599 - DNA, 15 bp, Homo sapiens
ttaggtaaattggta

SEQ ID NO: 1721600 - DNA, 15 bp, Homo sapiens
taggtaaattggtac

SEQ ID NO: 1721601 - DNA, 15 bp, Homo sapiens
aggtaaattggtacc

SEQ ID NO: 1721602 - DNA, 15 bp, Homo sapiens
ggtaaattggtacct

SEQ ID NO: 1721603 - DNA, 15 bp, Homo sapiens
gtaaattggtacctt

SEQ ID NO: 1721604 - DNA, 15 bp, Homo sapiens
taaattggtaccttt

SEQ ID NO: 1721605 - DNA, 15 bp, Homo sapiens
aaattggtaccttta

SEQ ID NO: 1721606 - DNA, 15 bp, Homo sapiens
aattggtacctttat

SEQ ID NO: 1721607 - DNA, 15 bp, Homo sapiens
attggtacctttatc

SEQ ID NO: 1721608 - DNA, 15 bp, Homo sapiens
ttggtacctttatca

SEQ ID NO: 1721609 - DNA, 15 bp, Homo sapiens
tggtacctttatcat

SEQ ID NO: 1721610 - DNA, 15 bp, Homo sapiens
ggtacctttatcatt

SEQ ID NO: 1721611 - DNA, 15 bp, Homo sapiens
gtacctttatcatta

SEQ ID NO: 1721612 - DNA, 15 bp, Homo sapiens
tacctttatcattat

SEQ ID NO: 1721613 - DNA, 15 bp, Homo sapiens
acctttatcattatg

SEQ ID NO: 1721614 - DNA, 15 bp, Homo sapiens
cctttatcattatgt

SEQ ID NO: 1721615 - DNA, 15 bp, Homo sapiens
ctttatcattatgta

SEQ ID NO: 1721616 - DNA, 15 bp, Homo sapiens
tttatcattatgtaa

SEQ ID NO: 1721617 - DNA, 15 bp, Homo sapiens
ttatcattatgtaat

SEQ ID NO: 1721618 - DNA, 15 bp, Homo sapiens
tatcattatgtaatg

SEQ ID NO: 1721619 - DNA, 15 bp, Homo sapiens
atcattatgtaatgt

SEQ ID NO: 1721620 - DNA, 15 bp, Homo sapiens
tcattatgtaatgtg

SEQ ID NO: 1721621 - DNA, 15 bp, Homo sapiens
cattatgtaatgtgc

SEQ ID NO: 1721622 - DNA, 15 bp, Homo sapiens
attatgtaatgtgct

SEQ ID NO: 1721623 - DNA, 15 bp, Homo sapiens
ttatgtaatgtgctt

SEQ ID NO: 1721624 - DNA, 15 bp, Homo sapiens
tatgtaatgtgcttt

SEQ ID NO: 1721625 - DNA, 15 bp, Homo sapiens
atgtaatgtgctttt

SEQ ID NO: 1721626 - DNA, 15 bp, Homo sapiens
tgtaatgtgcttttt

SEQ ID NO: 1721627 - DNA, 15 bp, Homo sapiens
gtaatgtgctttttt

SEQ ID NO: 1721628 - DNA, 15 bp, Homo sapiens
taatgtgctttttta

SEQ ID NO: 1721629 - DNA, 15 bp, Homo sapiens
aatgtgcttttttat

SEQ ID NO: 1721630 - DNA, 15 bp, Homo sapiens
atgtgcttttttatc

SEQ ID NO: 1721631 - DNA, 15 bp, Homo sapiens
tgtgcttttttatcc

SEQ ID NO: 1721632 - DNA, 15 bp, Homo sapiens
gtgcttttttatcca

SEQ ID NO: 1721633 - DNA, 15 bp, Homo sapiens
tgcttttttatccaa

SEQ ID NO: 1721634 - DNA, 15 bp, Homo sapiens
gcttttttatccaaa

SEQ ID NO: 1721635 - DNA, 15 bp, Homo sapiens
cttttttatccaaat

SEQ ID NO: 1721636 - DNA, 15 bp, Homo sapiens
ttttttatccaaatt

SEQ ID NO: 1721637 - DNA, 15 bp, Homo sapiens
tttttatccaaattt

SEQ ID NO: 1721638 - DNA, 15 bp, Homo sapiens
ttttatccaaattta

SEQ ID NO: 1721639 - DNA, 15 bp, Homo sapiens
tttatccaaatttat

SEQ ID NO: 1721640 - DNA, 15 bp, Homo sapiens
ttatccaaatttata

SEQ ID NO: 1721641 - DNA, 15 bp, Homo sapiens
tatccaaatttatat

SEQ ID NO: 1721642 - DNA, 15 bp, Homo sapiens
atccaaatttatatc

SEQ ID NO: 1721643 - DNA, 15 bp, Homo sapiens
tccaaatttatatct

SEQ ID NO: 1721644 - DNA, 15 bp, Homo sapiens
ccaaatttatatctt

SEQ ID NO: 1721645 - DNA, 15 bp, Homo sapiens
caaatttatatcttt

SEQ ID NO: 1721646 - DNA, 15 bp, Homo sapiens
aaatttatatctttt

SEQ ID NO: 1721647 - DNA, 15 bp, Homo sapiens
aatttatatcttttg

SEQ ID NO: 1721648 - DNA, 15 bp, Homo sapiens
atttatatcttttgt

SEQ ID NO: 1721649 - DNA, 15 bp, Homo sapiens
tttatatcttttgtt

SEQ ID NO: 1721650 - DNA, 15 bp, Homo sapiens
ttatatcttttgttc

SEQ ID NO: 1721651 - DNA, 15 bp, Homo sapiens
tatatcttttgttct

SEQ ID NO: 1721652 - DNA, 15 bp, Homo sapiens
atatcttttgttctg

SEQ ID NO: 1721653 - DNA, 15 bp, Homo sapiens
tatcttttgttctgc

SEQ ID NO: 1721654 - DNA, 15 bp, Homo sapiens
atcttttgttctgca

SEQ ID NO: 1721655 - DNA, 15 bp, Homo sapiens
tcttttgttctgcag

SEQ ID NO: 1721656 - DNA, 15 bp, Homo sapiens
cttttgttctgcagt

SEQ ID NO: 1721657 - DNA, 15 bp, Homo sapiens
ttttgttctgcagtg

SEQ ID NO: 1721658 - DNA, 15 bp, Homo sapiens
tttgttctgcagtgt

SEQ ID NO: 1721659 - DNA, 15 bp, Homo sapiens
ttgttctgcagtgtc

SEQ ID NO: 1721660 - DNA, 15 bp, Homo sapiens
tgttctgcagtgtcc

SEQ ID NO: 1721661 - DNA, 15 bp, Homo sapiens
gttctgcagtgtcca

SEQ ID NO: 1721662 - DNA, 15 bp, Homo sapiens
ttctgcagtgtccac

SEQ ID NO: 1721663 - DNA, 15 bp, Homo sapiens
tctgcagtgtccaca

SEQ ID NO: 1721664 - DNA, 15 bp, Homo sapiens
ctgcagtgtccacat

SEQ ID NO: 1721665 - DNA, 15 bp, Homo sapiens
tgcagtgtccacata

SEQ ID NO: 1721666 - DNA, 15 bp, Homo sapiens
gcagtgtccacatat

SEQ ID NO: 1721667 - DNA, 15 bp, Homo sapiens
cagtgtccacatatc

SEQ ID NO: 1721668 - DNA, 15 bp, Homo sapiens
agtgtccacatatcg

SEQ ID NO: 1721669 - DNA, 15 bp, Homo sapiens
gtgtccacatatcga

SEQ ID NO: 1721670 - DNA, 15 bp, Homo sapiens
tgtccacatatcgat

SEQ ID NO: 1721671 - DNA, 15 bp, Homo sapiens
gtccacatatcgatt

SEQ ID NO: 1721672 - DNA, 15 bp, Homo sapiens
tccacatatcgattc

SEQ ID NO: 1721673 - DNA, 15 bp, Homo sapiens
ccacatatcgattcc

SEQ ID NO: 1721674 - DNA, 15 bp, Homo sapiens
cacatatcgattcca

SEQ ID NO: 1721675 - DNA, 15 bp, Homo sapiens
acatatcgattccac

SEQ ID NO: 1721676 - DNA, 15 bp, Homo sapiens
catatcgattccact

SEQ ID NO: 1721677 - DNA, 15 bp, Homo sapiens
atatcgattccactt

SEQ ID NO: 1721678 - DNA, 15 bp, Homo sapiens
tatcgattccacttt

SEQ ID NO: 1721679 - DNA, 15 bp, Homo sapiens
atcgattccactttt

SEQ ID NO: 1721680 - DNA, 15 bp, Homo sapiens
tcgattccacttttc

SEQ ID NO: 1721681 - DNA, 15 bp, Homo sapiens
cgattccacttttct

SEQ ID NO: 1721682 - DNA, 15 bp, Homo sapiens
gattccacttttctt

SEQ ID NO: 1721683 - DNA, 15 bp, Homo sapiens
attccacttttcttg

SEQ ID NO: 1721684 - DNA, 15 bp, Homo sapiens
ttccacttttcttgt

SEQ ID NO: 1721685 - DNA, 15 bp, Homo sapiens
tccacttttcttgtg

SEQ ID NO: 1721686 - DNA, 15 bp, Homo sapiens
ccacttttcttgtga

SEQ ID NO: 1721687 - DNA, 15 bp, Homo sapiens
cacttttcttgtgat

SEQ ID NO: 1721688 - DNA, 15 bp, Homo sapiens
acttttcttgtgatc

SEQ ID NO: 1721689 - DNA, 15 bp, Homo sapiens
cttttcttgtgatca

SEQ ID NO: 1721690 - DNA, 15 bp, Homo sapiens
ttttcttgtgatcac

SEQ ID NO: 1721691 - DNA, 15 bp, Homo sapiens
tttcttgtgatcact

SEQ ID NO: 1721692 - DNA, 15 bp, Homo sapiens
ttcttgtgatcactc

SEQ ID NO: 1721693 - DNA, 15 bp, Homo sapiens
tcttgtgatcactct

SEQ ID NO: 1721694 - DNA, 15 bp, Homo sapiens
cttgtgatcactctt

SEQ ID NO: 1721695 - DNA, 15 bp, Homo sapiens
ttgtgatcactcttt

SEQ ID NO: 1721696 - DNA, 15 bp, Homo sapiens
tgtgatcactcttta

SEQ ID NO: 1721697 - DNA, 15 bp, Homo sapiens
gtgatcactctttac

SEQ ID NO: 1721698 - DNA, 15 bp, Homo sapiens
tgatcactctttaca

SEQ ID NO: 1721699 - DNA, 15 bp, Homo sapiens
gatcactctttacaa

SEQ ID NO: 1721700 - DNA, 15 bp, Homo sapiens
atcactctttacaat

SEQ ID NO: 1721701 - DNA, 15 bp, Homo sapiens
tcactctttacaatg

SEQ ID NO: 1721702 - DNA, 15 bp, Homo sapiens
cactctttacaatgt

SEQ ID NO: 1721703 - DNA, 15 bp, Homo sapiens
actctttacaatgtg

SEQ ID NO: 1721704 - DNA, 15 bp, Homo sapiens
ctctttacaatgtgt

SEQ ID NO: 1721705 - DNA, 15 bp, Homo sapiens
tctttacaatgtgta

SEQ ID NO: 1721706 - DNA, 15 bp, Homo sapiens
ctttacaatgtgtat

SEQ ID NO: 1721707 - DNA, 15 bp, Homo sapiens
tttacaatgtgtatc

SEQ ID NO: 1721708 - DNA, 15 bp, Homo sapiens
ttacaatgtgtatcg

SEQ ID NO: 1721709 - DNA, 15 bp, Homo sapiens
tacaatgtgtatcgt

SEQ ID NO: 1721710 - DNA, 15 bp, Homo sapiens
acaatgtgtatcgtt

SEQ ID NO: 1721711 - DNA, 15 bp, Homo sapiens
caatgtgtatcgttt

SEQ ID NO: 1721712 - DNA, 15 bp, Homo sapiens
aatgtgtatcgttta

SEQ ID NO: 1721713 - DNA, 15 bp, Homo sapiens
atgtgtatcgtttac

SEQ ID NO: 1721714 - DNA, 15 bp, Homo sapiens
tgtgtatcgtttacc

SEQ ID NO: 1721715 - DNA, 15 bp, Homo sapiens
gtgtatcgtttacct

SEQ ID NO: 1721716 - DNA, 15 bp, Homo sapiens
tgtatcgtttacctt

SEQ ID NO: 1721717 - DNA, 15 bp, Homo sapiens
gtatcgtttaccttc

SEQ ID NO: 1721718 - DNA, 15 bp, Homo sapiens
tatcgtttaccttca

SEQ ID NO: 1721719 - DNA, 15 bp, Homo sapiens
atcgtttaccttcat

SEQ ID NO: 1721720 - DNA, 15 bp, Homo sapiens
tcgtttaccttcatt

SEQ ID NO: 1721721 - DNA, 15 bp, Homo sapiens
cgtttaccttcattt

SEQ ID NO: 1721722 - DNA, 15 bp, Homo sapiens
gtttaccttcatttt

SEQ ID NO: 1721723 - DNA, 15 bp, Homo sapiens
tttaccttcattttg

SEQ ID NO: 1721724 - DNA, 15 bp, Homo sapiens
ttaccttcattttga

SEQ ID NO: 1721725 - DNA, 15 bp, Homo sapiens
taccttcattttgat

SEQ ID NO: 1721726 - DNA, 15 bp, Homo sapiens
accttcattttgatt

SEQ ID NO: 1721727 - DNA, 15 bp, Homo sapiens
ccttcattttgattt

SEQ ID NO: 1721728 - DNA, 15 bp, Homo sapiens
cttcattttgatttt

SEQ ID NO: 1721729 - DNA, 15 bp, Homo sapiens
ttcattttgatttta

SEQ ID NO: 1721730 - DNA, 15 bp, Homo sapiens
tcattttgattttaa

SEQ ID NO: 1721731 - DNA, 15 bp, Homo sapiens
cattttgattttaac

SEQ ID NO: 1721732 - DNA, 15 bp, Homo sapiens
attttgattttaacc

SEQ ID NO: 1721733 - DNA, 15 bp, Homo sapiens
ttttgattttaacct

SEQ ID NO: 1721734 - DNA, 15 bp, Homo sapiens
tttgattttaaccta

SEQ ID NO: 1721735 - DNA, 15 bp, Homo sapiens
ttgattttaacctat

SEQ ID NO: 1721736 - DNA, 15 bp, Homo sapiens
tgattttaacctatt

SEQ ID NO: 1721737 - DNA, 15 bp, Homo sapiens
gattttaacctattt

SEQ ID NO: 1721738 - DNA, 15 bp, Homo sapiens
attttaacctatttc

SEQ ID NO: 1721739 - DNA, 15 bp, Homo sapiens
ttttaacctatttct

SEQ ID NO: 1721740 - DNA, 15 bp, Homo sapiens
tttaacctatttctt

SEQ ID NO: 1721741 - DNA, 15 bp, Homo sapiens
ttaacctatttcttt

SEQ ID NO: 1721742 - DNA, 15 bp, Homo sapiens
taacctatttctttt

SEQ ID NO: 1721743 - DNA, 15 bp, Homo sapiens
aacctatttcttttt

SEQ ID NO: 1721744 - DNA, 15 bp, Homo sapiens
acctatttctttttt

SEQ ID NO: 1721745 - DNA, 15 bp, Homo sapiens
cctatttctttttta

SEQ ID NO: 1721746 - DNA, 15 bp, Homo sapiens
ctatttcttttttat

SEQ ID NO: 1721747 - DNA, 15 bp, Homo sapiens
tatttcttttttata

SEQ ID NO: 1721748 - DNA, 15 bp, Homo sapiens
atttcttttttatat

SEQ ID NO: 1721749 - DNA, 15 bp, Homo sapiens
tttcttttttatatt

SEQ ID NO: 1721750 - DNA, 15 bp, Homo sapiens
ttcttttttatattt

SEQ ID NO: 1721751 - DNA, 15 bp, Homo sapiens
tcttttttatattta

SEQ ID NO: 1721752 - DNA, 15 bp, Homo sapiens
cttttttatatttaa

SEQ ID NO: 1721753 - DNA, 15 bp, Homo sapiens
ttttttatatttaaa

SEQ ID NO: 1721754 - DNA, 15 bp, Homo sapiens
tttttatatttaaat

SEQ ID NO: 1721755 - DNA, 15 bp, Homo sapiens
ttttatatttaaatg

SEQ ID NO: 1721756 - DNA, 15 bp, Homo sapiens
tttatatttaaatgg

SEQ ID NO: 1721757 - DNA, 15 bp, Homo sapiens
ttatatttaaatgga

SEQ ID NO: 1721758 - DNA, 15 bp, Homo sapiens
tatatttaaatggat

SEQ ID NO: 1721759 - DNA, 15 bp, Homo sapiens
atatttaaatggatt

SEQ ID NO: 1721760 - DNA, 15 bp, Homo sapiens
tatttaaatggattt

SEQ ID NO: 1721761 - DNA, 15 bp, Homo sapiens
atttaaatggatttt

SEQ ID NO: 1721762 - DNA, 15 bp, Homo sapiens
tttaaatggattttt

SEQ ID NO: 1721763 - DNA, 15 bp, Homo sapiens
ttaaatggatttttg

SEQ ID NO: 1721764 - DNA, 15 bp, Homo sapiens
taaatggatttttgt

SEQ ID NO: 1721765 - DNA, 15 bp, Homo sapiens
aaatggatttttgtt

SEQ ID NO: 1721766 - DNA, 15 bp, Homo sapiens
aatggatttttgttg

SEQ ID NO: 1721767 - DNA, 15 bp, Homo sapiens
atggatttttgttgt

SEQ ID NO: 1721768 - DNA, 15 bp, Homo sapiens
tggatttttgttgtt

SEQ ID NO: 1721769 - DNA, 15 bp, Homo sapiens
ggatttttgttgttt

SEQ ID NO: 1721770 - DNA, 15 bp, Homo sapiens
gatttttgttgtttt

SEQ ID NO: 1721771 - DNA, 15 bp, Homo sapiens
tttttgttgttttgt

SEQ ID NO: 1721772 - DNA, 15 bp, Homo sapiens
ttttgttgttttgta

SEQ ID NO: 1721773 - DNA, 15 bp, Homo sapiens
tttgttgttttgtaa

SEQ ID NO: 1721774 - DNA, 15 bp, Homo sapiens
ttgttgttttgtaat

SEQ ID NO: 1721775 - DNA, 15 bp, Homo sapiens
tgttgttttgtaatc

SEQ ID NO: 1721776 - DNA, 15 bp, Homo sapiens
gttgttttgtaatca

SEQ ID NO: 1721777 - DNA, 15 bp, Homo sapiens
ttgttttgtaatcag

SEQ ID NO: 1721778 - DNA, 15 bp, Homo sapiens
tgttttgtaatcagc

SEQ ID NO: 1721779 - DNA, 15 bp, Homo sapiens
gttttgtaatcagca

SEQ ID NO: 1721780 - DNA, 15 bp, Homo sapiens
ttttgtaatcagcat

SEQ ID NO: 1721781 - DNA, 15 bp, Homo sapiens
tttgtaatcagcatt

SEQ ID NO: 1721782 - DNA, 15 bp, Homo sapiens
ttgtaatcagcattc

SEQ ID NO: 1721783 - DNA, 15 bp, Homo sapiens
tgtaatcagcattca

SEQ ID NO: 1721784 - DNA, 15 bp, Homo sapiens
gtaatcagcattcat

SEQ ID NO: 1721785 - DNA, 15 bp, Homo sapiens
taatcagcattcatt

SEQ ID NO: 1721786 - DNA, 15 bp, Homo sapiens
aatcagcattcatta

SEQ ID NO: 1721787 - DNA, 15 bp, Homo sapiens
atcagcattcattaa

SEQ ID NO: 1721788 - DNA, 15 bp, Homo sapiens
tcagcattcattaaa

SEQ ID NO: 1721789 - DNA, 15 bp, Homo sapiens
cagcattcattaaaa

SEQ ID NO: 1721790 - DNA, 15 bp, Homo sapiens
agcattcattaaaaa

SEQ ID NO: 1721791 - DNA, 15 bp, Homo sapiens
gcattcattaaaaat

SEQ ID NO: 1721792 - DNA, 15 bp, Homo sapiens
cattcattaaaaatt

SEQ ID NO: 1721793 - DNA, 15 bp, Homo sapiens
attcattaaaaattt

SEQ ID NO: 1721794 - DNA, 15 bp, Homo sapiens
ttcattaaaaatttt

SEQ ID NO: 1721795 - DNA, 15 bp, Homo sapiens
tcattaaaaattttt

SEQ ID NO: 1721796 - DNA, 15 bp, Homo sapiens
cattaaaaattttta

SEQ ID NO: 1721797 - DNA, 15 bp, Homo sapiens
attaaaaatttttag

SEQ ID NO: 1721798 - DNA, 15 bp, Homo sapiens
ttaaaaatttttagc

SEQ ID NO: 1721799 - DNA, 15 bp, Homo sapiens
taaaaatttttagct

SEQ ID NO: 1721800 - DNA, 15 bp, Homo sapiens
aaaaatttttagctg

SEQ ID NO: 1721801 - DNA, 15 bp, Homo sapiens
aaaatttttagctga

SEQ ID NO: 1721802 - DNA, 15 bp, Homo sapiens
aaatttttagctgaa

SEQ ID NO: 1721803 - DNA, 15 bp, Homo sapiens
aatttttagctgaat

SEQ ID NO: 1721804 - DNA, 15 bp, Homo sapiens
atttttagctgaata

SEQ ID NO: 1721805 - DNA, 15 bp, Homo sapiens
tttttagctgaatac

SEQ ID NO: 1721806 - DNA, 15 bp, Homo sapiens
ttttagctgaatact

SEQ ID NO: 1721807 - DNA, 15 bp, Homo sapiens
tttagctgaatactt

SEQ ID NO: 1721808 - DNA, 15 bp, Homo sapiens
ttagctgaatacttt

SEQ ID NO: 1721809 - DNA, 15 bp, Homo sapiens
tagctgaatactttt

SEQ ID NO: 1721810 - DNA, 15 bp, Homo sapiens
agctgaatacttttt

SEQ ID NO: 1721811 - DNA, 15 bp, Homo sapiens
gctgaatacttttta

SEQ ID NO: 1721812 - DNA, 15 bp, Homo sapiens
ctgaatactttttac

SEQ ID NO: 1721813 - DNA, 15 bp, Homo sapiens
tgaatactttttact

SEQ ID NO: 1721814 - DNA, 15 bp, Homo sapiens
gaatactttttactt

SEQ ID NO: 1721815 - DNA, 15 bp, Homo sapiens
aatactttttacttt

SEQ ID NO: 1721816 - DNA, 15 bp, Homo sapiens
atactttttactttt

SEQ ID NO: 1721817 - DNA, 15 bp, Homo sapiens
tactttttacttttg

SEQ ID NO: 1721818 - DNA, 15 bp, Homo sapiens
actttttacttttgt

SEQ ID NO: 1721819 - DNA, 15 bp, Homo sapiens
ctttttacttttgtt

SEQ ID NO: 1721820 - DNA, 15 bp, Homo sapiens
tttttacttttgtta

SEQ ID NO: 1721821 - DNA, 15 bp, Homo sapiens
ttttacttttgttag

SEQ ID NO: 1721822 - DNA, 15 bp, Homo sapiens
tttacttttgttagg

SEQ ID NO: 1721823 - DNA, 15 bp, Homo sapiens
ttacttttgttaggg

SEQ ID NO: 1721824 - DNA, 15 bp, Homo sapiens
tacttttgttagggt

SEQ ID NO: 1721825 - DNA, 15 bp, Homo sapiens
acttttgttagggtt

SEQ ID NO: 1721826 - DNA, 15 bp, Homo sapiens
cttttgttagggttc

SEQ ID NO: 1721827 - DNA, 15 bp, Homo sapiens
ttttgttagggttcc

SEQ ID NO: 1721828 - DNA, 15 bp, Homo sapiens
tttgttagggttccc

SEQ ID NO: 1721829 - DNA, 15 bp, Homo sapiens
ttgttagggttccct

SEQ ID NO: 1721830 - DNA, 15 bp, Homo sapiens
tgttagggttccctg

SEQ ID NO: 1721831 - DNA, 15 bp, Homo sapiens
gttagggttccctgt

SEQ ID NO: 1721832 - DNA, 15 bp, Homo sapiens
ttagggttccctgtg

SEQ ID NO: 1721833 - DNA, 15 bp, Homo sapiens
tagggttccctgtgt

SEQ ID NO: 1721834 - DNA, 15 bp, Homo sapiens
agggttccctgtgtc

SEQ ID NO: 1721835 - DNA, 15 bp, Homo sapiens
gggttccctgtgtct

SEQ ID NO: 1721836 - DNA, 15 bp, Homo sapiens
ggttccctgtgtctc

SEQ ID NO: 1721837 - DNA, 15 bp, Homo sapiens
gttccctgtgtctct

SEQ ID NO: 1721838 - DNA, 15 bp, Homo sapiens
ttccctgtgtctctt

SEQ ID NO: 1721839 - DNA, 15 bp, Homo sapiens
tccctgtgtctcttc

SEQ ID NO: 1721840 - DNA, 15 bp, Homo sapiens
ccctgtgtctcttcc

SEQ ID NO: 1721841 - DNA, 15 bp, Homo sapiens
cctgtgtctcttcct

SEQ ID NO: 1721842 - DNA, 15 bp, Homo sapiens
ctgtgtctcttcctt

SEQ ID NO: 1721843 - DNA, 15 bp, Homo sapiens
tgtgtctcttccttt

SEQ ID NO: 1721844 - DNA, 15 bp, Homo sapiens
gtgtctcttcctttc

SEQ ID NO: 1721845 - DNA, 15 bp, Homo sapiens
tgtctcttcctttca

SEQ ID NO: 1721846 - DNA, 15 bp, Homo sapiens
gtctcttcctttcat

SEQ ID NO: 1721847 - DNA, 15 bp, Homo sapiens
tctcttcctttcatg

SEQ ID NO: 1721848 - DNA, 15 bp, Homo sapiens
ctcttcctttcatgt

SEQ ID NO: 1721849 - DNA, 15 bp, Homo sapiens
tcttcctttcatgtt

SEQ ID NO: 1721850 - DNA, 15 bp, Homo sapiens
cttcctttcatgttg

SEQ ID NO: 1721851 - DNA, 15 bp, Homo sapiens
ttcctttcatgttgt

SEQ ID NO: 1721852 - DNA, 15 bp, Homo sapiens
tcctttcatgttgtg

SEQ ID NO: 1721853 - DNA, 15 bp, Homo sapiens
cctttcatgttgtgc

SEQ ID NO: 1721854 - DNA, 15 bp, Homo sapiens
ctttcatgttgtgcc

SEQ ID NO: 1721855 - DNA, 15 bp, Homo sapiens
tttcatgttgtgcca

SEQ ID NO: 1721856 - DNA, 15 bp, Homo sapiens
ttcatgttgtgccac

SEQ ID NO: 1721857 - DNA, 15 bp, Homo sapiens
tcatgttgtgccaca

SEQ ID NO: 1721858 - DNA, 15 bp, Homo sapiens
catgttgtgccacag

SEQ ID NO: 1721859 - DNA, 15 bp, Homo sapiens
atgttgtgccacaga

SEQ ID NO: 1721860 - DNA, 15 bp, Homo sapiens
tgttgtgccacagat

SEQ ID NO: 1721861 - DNA, 15 bp, Homo sapiens
gttgtgccacagatg

SEQ ID NO: 1721862 - DNA, 15 bp, Homo sapiens
ttgtgccacagatga

SEQ ID NO: 1721863 - DNA, 15 bp, Homo sapiens
tgtgccacagatgag

SEQ ID NO: 1721864 - DNA, 15 bp, Homo sapiens
gtgccacagatgagc

SEQ ID NO: 1721865 - DNA, 15 bp, Homo sapiens
tgccacagatgagcc

SEQ ID NO: 1721866 - DNA, 15 bp, Homo sapiens
gccacagatgagcca

SEQ ID NO: 1721867 - DNA, 15 bp, Homo sapiens
ccacagatgagccat

SEQ ID NO: 1721868 - DNA, 15 bp, Homo sapiens
cacagatgagccatt

SEQ ID NO: 1721869 - DNA, 15 bp, Homo sapiens
acagatgagccatta

SEQ ID NO: 1721870 - DNA, 15 bp, Homo sapiens
cagatgagccattat

SEQ ID NO: 1721871 - DNA, 15 bp, Homo sapiens
agatgagccattatt

SEQ ID NO: 1721872 - DNA, 15 bp, Homo sapiens
gatgagccattattt

SEQ ID NO: 1721873 - DNA, 15 bp, Homo sapiens
atgagccattattta

SEQ ID NO: 1721874 - DNA, 15 bp, Homo sapiens
tgagccattatttat

SEQ ID NO: 1721875 - DNA, 15 bp, Homo sapiens
gagccattatttata

SEQ ID NO: 1721876 - DNA, 15 bp, Homo sapiens
agccattatttatat

SEQ ID NO: 1721877 - DNA, 15 bp, Homo sapiens
gccattatttatatc

SEQ ID NO: 1721878 - DNA, 15 bp, Homo sapiens
ccattatttatatct

SEQ ID NO: 1721879 - DNA, 15 bp, Homo sapiens
cattatttatatctt

SEQ ID NO: 1721880 - DNA, 15 bp, Homo sapiens
attatttatatcttt

SEQ ID NO: 1721881 - DNA, 15 bp, Homo sapiens
ttatttatatctttt

SEQ ID NO: 1721882 - DNA, 15 bp, Homo sapiens
tatttatatcttttc

SEQ ID NO: 1721883 - DNA, 15 bp, Homo sapiens
atttatatcttttct

SEQ ID NO: 1721884 - DNA, 15 bp, Homo sapiens
tttatatcttttctc

SEQ ID NO: 1721885 - DNA, 15 bp, Homo sapiens
ttatatcttttctct

SEQ ID NO: 1721886 - DNA, 15 bp, Homo sapiens
tatatcttttctctc

SEQ ID NO: 1721887 - DNA, 15 bp, Homo sapiens
atatcttttctctca

SEQ ID NO: 1721888 - DNA, 15 bp, Homo sapiens
tatcttttctctcat

SEQ ID NO: 1721889 - DNA, 15 bp, Homo sapiens
atcttttctctcatt

SEQ ID NO: 1721890 - DNA, 15 bp, Homo sapiens
tcttttctctcattg

SEQ ID NO: 1721891 - DNA, 15 bp, Homo sapiens
cttttctctcattgg

SEQ ID NO: 1721892 - DNA, 15 bp, Homo sapiens
ttttctctcattgga

SEQ ID NO: 1721893 - DNA, 15 bp, Homo sapiens
tttctctcattggag

SEQ ID NO: 1721894 - DNA, 15 bp, Homo sapiens
ttctctcattggagg

SEQ ID NO: 1721895 - DNA, 15 bp, Homo sapiens
tctctcattggaggt

SEQ ID NO: 1721896 - DNA, 15 bp, Homo sapiens
ctctcattggaggtt

SEQ ID NO: 1721897 - DNA, 15 bp, Homo sapiens
tctcattggaggttc

SEQ ID NO: 1721898 - DNA, 15 bp, Homo sapiens
ctcattggaggttcc

SEQ ID NO: 1721899 - DNA, 15 bp, Homo sapiens
tcattggaggttcct

SEQ ID NO: 1721900 - DNA, 15 bp, Homo sapiens
cattggaggttcctt

SEQ ID NO: 1721901 - DNA, 15 bp, Homo sapiens
attggaggttccttt

SEQ ID NO: 1721902 - DNA, 15 bp, Homo sapiens
ttggaggttcctttt

SEQ ID NO: 1721903 - DNA, 15 bp, Homo sapiens
tggaggttccttttt

SEQ ID NO: 1721904 - DNA, 15 bp, Homo sapiens
ggaggttcctttttt

SEQ ID NO: 1721905 - DNA, 15 bp, Homo sapiens
gaggttccttttttt

SEQ ID NO: 1721906 - DNA, 15 bp, Homo sapiens
aggttccttttttta

SEQ ID NO: 1721907 - DNA, 15 bp, Homo sapiens
ggttcctttttttag

SEQ ID NO: 1721908 - DNA, 15 bp, Homo sapiens
gttcctttttttagg

SEQ ID NO: 1721909 - DNA, 15 bp, Homo sapiens
ttcctttttttaggg

SEQ ID NO: 1721910 - DNA, 15 bp, Homo sapiens
tcctttttttagggg

SEQ ID NO: 1721911 - DNA, 15 bp, Homo sapiens
cctttttttagggga

SEQ ID NO: 1721912 - DNA, 15 bp, Homo sapiens
ctttttttaggggaa

SEQ ID NO: 1721913 - DNA, 15 bp, Homo sapiens
tttttttaggggaaa

SEQ ID NO: 1721914 - DNA, 15 bp, Homo sapiens
ttttttaggggaaat

SEQ ID NO: 1721915 - DNA, 15 bp, Homo sapiens
tttttaggggaaatt

SEQ ID NO: 1721916 - DNA, 15 bp, Homo sapiens
ttttaggggaaatta

SEQ ID NO: 1721917 - DNA, 15 bp, Homo sapiens
tttaggggaaattaa

SEQ ID NO: 1721918 - DNA, 15 bp, Homo sapiens
ttaggggaaattaaa

SEQ ID NO: 1721919 - DNA, 15 bp, Homo sapiens
taggggaaattaaat

SEQ ID NO: 1721920 - DNA, 15 bp, Homo sapiens
aggggaaattaaata

SEQ ID NO: 1721921 - DNA, 15 bp, Homo sapiens
ggggaaattaaataa

SEQ ID NO: 1721922 - DNA, 15 bp, Homo sapiens
gggaaattaaataat

SEQ ID NO: 1721923 - DNA, 15 bp, Homo sapiens
ggaaattaaataatc

SEQ ID NO: 1721924 - DNA, 15 bp, Homo sapiens
gaaattaaataatct

SEQ ID NO: 1721925 - DNA, 15 bp, Homo sapiens
aaattaaataatctg

SEQ ID NO: 1721926 - DNA, 15 bp, Homo sapiens
aattaaataatctga

SEQ ID NO: 1721927 - DNA, 15 bp, Homo sapiens
attaaataatctgaa

SEQ ID NO: 1721928 - DNA, 15 bp, Homo sapiens
ttaaataatctgaaa

SEQ ID NO: 1721929 - DNA, 15 bp, Homo sapiens
taaataatctgaaat

SEQ ID NO: 1721930 - DNA, 15 bp, Homo sapiens
aaataatctgaaata

SEQ ID NO: 1721931 - DNA, 15 bp, Homo sapiens
aataatctgaaatat

SEQ ID NO: 1721932 - DNA, 15 bp, Homo sapiens
ataatctgaaatata

SEQ ID NO: 1721933 - DNA, 15 bp, Homo sapiens
taatctgaaatataa

SEQ ID NO: 1721934 - DNA, 15 bp, Homo sapiens
aatctgaaatataag

SEQ ID NO: 1721935 - DNA, 15 bp, Homo sapiens
atctgaaatataagg

SEQ ID NO: 1721936 - DNA, 15 bp, Homo sapiens
tctgaaatataagga

SEQ ID NO: 1721937 - DNA, 15 bp, Homo sapiens
ctgaaatataaggaa

SEQ ID NO: 1721938 - DNA, 15 bp, Homo sapiens
tgaaatataaggaaa

SEQ ID NO: 1721939 - DNA, 15 bp, Homo sapiens
gaaatataaggaaag

SEQ ID NO: 1721940 - DNA, 15 bp, Homo sapiens
aaatataaggaaagg

SEQ ID NO: 1721941 - DNA, 15 bp, Homo sapiens
aatataaggaaagga

SEQ ID NO: 1721942 - DNA, 15 bp, Homo sapiens
atataaggaaaggat

SEQ ID NO: 1721943 - DNA, 15 bp, Homo sapiens
tataaggaaaggata

SEQ ID NO: 1721944 - DNA, 15 bp, Homo sapiens
ataaggaaaggatat

SEQ ID NO: 1721945 - DNA, 15 bp, Homo sapiens
taaggaaaggatatg

SEQ ID NO: 1721946 - DNA, 15 bp, Homo sapiens
aaggaaaggatatgt

SEQ ID NO: 1721947 - DNA, 15 bp, Homo sapiens
aggaaaggatatgtt

SEQ ID NO: 1721948 - DNA, 15 bp, Homo sapiens
ggaaaggatatgttg

SEQ ID NO: 1721949 - DNA, 15 bp, Homo sapiens
gaaaggatatgttga

SEQ ID NO: 1721950 - DNA, 15 bp, Homo sapiens
aaaggatatgttgat

SEQ ID NO: 1721951 - DNA, 15 bp, Homo sapiens
aaggatatgttgatt

SEQ ID NO: 1721952 - DNA, 15 bp, Homo sapiens
aggatatgttgattt

SEQ ID NO: 1721953 - DNA, 15 bp, Homo sapiens
ggatatgttgatttc

SEQ ID NO: 1721954 - DNA, 15 bp, Homo sapiens
gatatgttgatttca

SEQ ID NO: 1721955 - DNA, 15 bp, Homo sapiens
atatgttgatttcaa

SEQ ID NO: 1721956 - DNA, 15 bp, Homo sapiens
tatgttgatttcaag

SEQ ID NO: 1721957 - DNA, 15 bp, Homo sapiens
atgttgatttcaaga

SEQ ID NO: 1721958 - DNA, 15 bp, Homo sapiens
tgttgatttcaagaa

SEQ ID NO: 1721959 - DNA, 15 bp, Homo sapiens
gttgatttcaagaaa

SEQ ID NO: 1721960 - DNA, 15 bp, Homo sapiens
ttgatttcaagaaag

SEQ ID NO: 1721961 - DNA, 15 bp, Homo sapiens
tgatttcaagaaagg

SEQ ID NO: 1721962 - DNA, 15 bp, Homo sapiens
gatttcaagaaaggt

SEQ ID NO: 1721963 - DNA, 15 bp, Homo sapiens
atttcaagaaaggtt

SEQ ID NO: 1721964 - DNA, 15 bp, Homo sapiens
tttcaagaaaggttg

SEQ ID NO: 1721965 - DNA, 15 bp, Homo sapiens
ttcaagaaaggttgt

SEQ ID NO: 1721966 - DNA, 15 bp, Homo sapiens
tcaagaaaggttgtt

SEQ ID NO: 1721967 - DNA, 15 bp, Homo sapiens
caagaaaggttgttt

SEQ ID NO: 1721968 - DNA, 15 bp, Homo sapiens
aagaaaggttgtttt

SEQ ID NO: 1721969 - DNA, 15 bp, Homo sapiens
agaaaggttgttttt

SEQ ID NO: 1721970 - DNA, 15 bp, Homo sapiens
gaaaggttgtttttg

SEQ ID NO: 1721971 - DNA, 15 bp, Homo sapiens
aaaggttgtttttgt

SEQ ID NO: 1721972 - DNA, 15 bp, Homo sapiens
aaggttgtttttgtt

SEQ ID NO: 1721973 - DNA, 15 bp, Homo sapiens
aggttgtttttgttc

SEQ ID NO: 1721974 - DNA, 15 bp, Homo sapiens
ggttgtttttgttcc

SEQ ID NO: 1721975 - DNA, 15 bp, Homo sapiens
gttgtttttgttcct

SEQ ID NO: 1721976 - DNA, 15 bp, Homo sapiens
ttgtttttgttcctt

SEQ ID NO: 1721977 - DNA, 15 bp, Homo sapiens
tgtttttgttcctta

SEQ ID NO: 1721978 - DNA, 15 bp, Homo sapiens
gtttttgttccttat

SEQ ID NO: 1721979 - DNA, 15 bp, Homo sapiens
tttttgttccttatc

SEQ ID NO: 1721980 - DNA, 15 bp, Homo sapiens
ttttgttccttatct

SEQ ID NO: 1721981 - DNA, 15 bp, Homo sapiens
tttgttccttatctg

SEQ ID NO: 1721982 - DNA, 15 bp, Homo sapiens
ttgttccttatctgg

SEQ ID NO: 1721983 - DNA, 15 bp, Homo sapiens
tgttccttatctggc

SEQ ID NO: 1721984 - DNA, 15 bp, Homo sapiens
gttccttatctggct

SEQ ID NO: 1721985 - DNA, 15 bp, Homo sapiens
ttccttatctggctt

SEQ ID NO: 1721986 - DNA, 15 bp, Homo sapiens
tccttatctggcttg

SEQ ID NO: 1721987 - DNA, 15 bp, Homo sapiens
ccttatctggcttgt

SEQ ID NO: 1721988 - DNA, 15 bp, Homo sapiens
cttatctggcttgtt

SEQ ID NO: 1721989 - DNA, 15 bp, Homo sapiens
ttatctggcttgttc

SEQ ID NO: 1721990 - DNA, 15 bp, Homo sapiens
tatctggcttgttct

SEQ ID NO: 1721991 - DNA, 15 bp, Homo sapiens
atctggcttgttctt

SEQ ID NO: 1721992 - DNA, 15 bp, Homo sapiens
tctggcttgttcttg

SEQ ID NO: 1721993 - DNA, 15 bp, Homo sapiens
ctggcttgttcttgt

SEQ ID NO: 1721994 - DNA, 15 bp, Homo sapiens
tggcttgttcttgtt

SEQ ID NO: 1721995 - DNA, 15 bp, Homo sapiens
ggcttgttcttgttg

SEQ ID NO: 1721996 - DNA, 15 bp, Homo sapiens
gcttgttcttgttgt

SEQ ID NO: 1721997 - DNA, 15 bp, Homo sapiens
cttgttcttgttgtg

SEQ ID NO: 1721998 - DNA, 15 bp, Homo sapiens
ttgttcttgttgtga

SEQ ID NO: 1721999 - DNA, 15 bp, Homo sapiens
tgttcttgttgtgag

SEQ ID NO: 1722000 - DNA, 15 bp, Homo sapiens
gttcttgttgtgagg

SEQ ID NO: 1722001 - DNA, 15 bp, Homo sapiens
ttcttgttgtgaggg

SEQ ID NO: 1722002 - DNA, 15 bp, Homo sapiens
tcttgttgtgagggt

SEQ ID NO: 1722003 - DNA, 15 bp, Homo sapiens
cttgttgtgagggtg

SEQ ID NO: 1722004 - DNA, 15 bp, Homo sapiens
ttgttgtgagggtgg

SEQ ID NO: 1722005 - DNA, 15 bp, Homo sapiens
tgttgtgagggtggg

SEQ ID NO: 1722006 - DNA, 15 bp, Homo sapiens
gttgtgagggtggga

SEQ ID NO: 1722007 - DNA, 15 bp, Homo sapiens
ttgtgagggtgggag

SEQ ID NO: 1722008 - DNA, 15 bp, Homo sapiens
tgtgagggtgggagc

SEQ ID NO: 1722009 - DNA, 15 bp, Homo sapiens
gtgagggtgggagca

SEQ ID NO: 1722010 - DNA, 15 bp, Homo sapiens
tgagggtgggagcaa

SEQ ID NO: 1722011 - DNA, 15 bp, Homo sapiens
gagggtgggagcaat

SEQ ID NO: 1722012 - DNA, 15 bp, Homo sapiens
agggtgggagcaata

SEQ ID NO: 1722013 - DNA, 15 bp, Homo sapiens
gggtgggagcaatac

SEQ ID NO: 1722014 - DNA, 15 bp, Homo sapiens
ggtgggagcaatact

SEQ ID NO: 1722015 - DNA, 15 bp, Homo sapiens
gtgggagcaatactc

SEQ ID NO: 1722016 - DNA, 15 bp, Homo sapiens
tgggagcaatactct

SEQ ID NO: 1722017 - DNA, 15 bp, Homo sapiens
gggagcaatactctt

SEQ ID NO: 1722018 - DNA, 15 bp, Homo sapiens
ggagcaatactcttt

SEQ ID NO: 1722019 - DNA, 15 bp, Homo sapiens
gagcaatactctttg

SEQ ID NO: 1722020 - DNA, 15 bp, Homo sapiens
agcaatactctttgc

SEQ ID NO: 1722021 - DNA, 15 bp, Homo sapiens
gcaatactctttgca

SEQ ID NO: 1722022 - DNA, 15 bp, Homo sapiens
caatactctttgcag

SEQ ID NO: 1722023 - DNA, 15 bp, Homo sapiens
aatactctttgcagc

SEQ ID NO: 1722024 - DNA, 15 bp, Homo sapiens
atactctttgcagct

SEQ ID NO: 1722025 - DNA, 15 bp, Homo sapiens
tactctttgcagctt

SEQ ID NO: 1722026 - DNA, 15 bp, Homo sapiens
actctttgcagcttt

SEQ ID NO: 1722027 - DNA, 15 bp, Homo sapiens
ctctttgcagctttc

SEQ ID NO: 1722028 - DNA, 15 bp, Homo sapiens
tctttgcagctttct

SEQ ID NO: 1722029 - DNA, 15 bp, Homo sapiens
ctttgcagctttctg

SEQ ID NO: 1722030 - DNA, 15 bp, Homo sapiens
tttgcagctttctgc

SEQ ID NO: 1722031 - DNA, 15 bp, Homo sapiens
ttgcagctttctgca

SEQ ID NO: 1722032 - DNA, 15 bp, Homo sapiens
tgcagctttctgcat

SEQ ID NO: 1722033 - DNA, 15 bp, Homo sapiens
gcagctttctgcatt

SEQ ID NO: 1722034 - DNA, 15 bp, Homo sapiens
cagctttctgcattc

SEQ ID NO: 1722035 - DNA, 15 bp, Homo sapiens
agctttctgcattct

SEQ ID NO: 1722036 - DNA, 15 bp, Homo sapiens
gctttctgcattcta

SEQ ID NO: 1722037 - DNA, 15 bp, Homo sapiens
ctttctgcattctag

SEQ ID NO: 1722038 - DNA, 15 bp, Homo sapiens
tttctgcattctagg

SEQ ID NO: 1722039 - DNA, 15 bp, Homo sapiens
ttctgcattctagga

SEQ ID NO: 1722040 - DNA, 15 bp, Homo sapiens
tctgcattctaggaa

SEQ ID NO: 1722041 - DNA, 15 bp, Homo sapiens
ctgcattctaggaag

SEQ ID NO: 1722042 - DNA, 15 bp, Homo sapiens
tgcattctaggaaga

SEQ ID NO: 1722043 - DNA, 15 bp, Homo sapiens
gcattctaggaagaa

SEQ ID NO: 1722044 - DNA, 15 bp, Homo sapiens
cattctaggaagaag

SEQ ID NO: 1722045 - DNA, 15 bp, Homo sapiens
attctaggaagaagt

SEQ ID NO: 1722046 - DNA, 15 bp, Homo sapiens
ttctaggaagaagtg

SEQ ID NO: 1722047 - DNA, 15 bp, Homo sapiens
tctaggaagaagtgg

SEQ ID NO: 1722048 - DNA, 15 bp, Homo sapiens
ctaggaagaagtgga

SEQ ID NO: 1722049 - DNA, 15 bp, Homo sapiens
taggaagaagtggaa

SEQ ID NO: 1722050 - DNA, 15 bp, Homo sapiens
aggaagaagtggaat

SEQ ID NO: 1722051 - DNA, 15 bp, Homo sapiens
ggaagaagtggaatt

SEQ ID NO: 1722052 - DNA, 15 bp, Homo sapiens
gaagaagtggaattt

SEQ ID NO: 1722053 - DNA, 15 bp, Homo sapiens
aagaagtggaatttt

SEQ ID NO: 1722054 - DNA, 15 bp, Homo sapiens
agaagtggaatttta

SEQ ID NO: 1722055 - DNA, 15 bp, Homo sapiens
gaagtggaattttac

SEQ ID NO: 1722056 - DNA, 15 bp, Homo sapiens
aagtggaattttaca

SEQ ID NO: 1722057 - DNA, 15 bp, Homo sapiens
agtggaattttacac

SEQ ID NO: 1722058 - DNA, 15 bp, Homo sapiens
gtggaattttacact

SEQ ID NO: 1722059 - DNA, 15 bp, Homo sapiens
tggaattttacacta

SEQ ID NO: 1722060 - DNA, 15 bp, Homo sapiens
ggaattttacactac

SEQ ID NO: 1722061 - DNA, 15 bp, Homo sapiens
gaattttacactacc

SEQ ID NO: 1722062 - DNA, 15 bp, Homo sapiens
aattttacactacca

SEQ ID NO: 1722063 - DNA, 15 bp, Homo sapiens
attttacactaccat

SEQ ID NO: 1722064 - DNA, 15 bp, Homo sapiens
ttttacactaccatt

SEQ ID NO: 1722065 - DNA, 15 bp, Homo sapiens
tttacactaccattt

SEQ ID NO: 1722066 - DNA, 15 bp, Homo sapiens
ttacactaccatttg

SEQ ID NO: 1722067 - DNA, 15 bp, Homo sapiens
tacactaccatttgc

SEQ ID NO: 1722068 - DNA, 15 bp, Homo sapiens
acactaccatttgct

SEQ ID NO: 1722069 - DNA, 15 bp, Homo sapiens
cactaccatttgctt

SEQ ID NO: 1722070 - DNA, 15 bp, Homo sapiens
actaccatttgcttt

SEQ ID NO: 1722071 - DNA, 15 bp, Homo sapiens
ctaccatttgctttc

SEQ ID NO: 1722072 - DNA, 15 bp, Homo sapiens
taccatttgctttct

SEQ ID NO: 1722073 - DNA, 15 bp, Homo sapiens
accatttgctttctt

SEQ ID NO: 1722074 - DNA, 15 bp, Homo sapiens
ccatttgctttcttt

SEQ ID NO: 1722075 - DNA, 15 bp, Homo sapiens
catttgctttcttta

SEQ ID NO: 1722076 - DNA, 15 bp, Homo sapiens
atttgctttctttac

SEQ ID NO: 1722077 - DNA, 15 bp, Homo sapiens
tttgctttctttaca

SEQ ID NO: 1722078 - DNA, 15 bp, Homo sapiens
ttgctttctttacag

SEQ ID NO: 1722079 - DNA, 15 bp, Homo sapiens
tgctttctttacagg

SEQ ID NO: 1722080 - DNA, 15 bp, Homo sapiens
gctttctttacaggt

SEQ ID NO: 1722081 - DNA, 15 bp, Homo sapiens
ctttctttacaggtt

SEQ ID NO: 1722082 - DNA, 15 bp, Homo sapiens
tttctttacaggttt

SEQ ID NO: 1722083 - DNA, 15 bp, Homo sapiens
ttctttacaggttta

SEQ ID NO: 1722084 - DNA, 15 bp, Homo sapiens
tctttacaggtttac

SEQ ID NO: 1722085 - DNA, 15 bp, Homo sapiens
ctttacaggtttacc

SEQ ID NO: 1722086 - DNA, 15 bp, Homo sapiens
tttacaggtttacct

SEQ ID NO: 1722087 - DNA, 15 bp, Homo sapiens
ttacaggtttacctt

SEQ ID NO: 1722088 - DNA, 15 bp, Homo sapiens
tacaggtttaccttg

SEQ ID NO: 1722089 - DNA, 15 bp, Homo sapiens
acaggtttaccttgg

SEQ ID NO: 1722090 - DNA, 15 bp, Homo sapiens
caggtttaccttggt

SEQ ID NO: 1722091 - DNA, 15 bp, Homo sapiens
aggtttaccttggta

SEQ ID NO: 1722092 - DNA, 15 bp, Homo sapiens
ggtttaccttggtat

SEQ ID NO: 1722093 - DNA, 15 bp, Homo sapiens
gtttaccttggtatt

SEQ ID NO: 1722094 - DNA, 15 bp, Homo sapiens
tttaccttggtattc

SEQ ID NO: 1722095 - DNA, 15 bp, Homo sapiens
ttaccttggtattca

SEQ ID NO: 1722096 - DNA, 15 bp, Homo sapiens
taccttggtattcag

SEQ ID NO: 1722097 - DNA, 15 bp, Homo sapiens
accttggtattcagt

SEQ ID NO: 1722098 - DNA, 15 bp, Homo sapiens
ccttggtattcagtg

SEQ ID NO: 1722099 - DNA, 15 bp, Homo sapiens
cttggtattcagtgt

SEQ ID NO: 1722100 - DNA, 15 bp, Homo sapiens
ttggtattcagtgtc

SEQ ID NO: 1722101 - DNA, 15 bp, Homo sapiens
tggtattcagtgtct

SEQ ID NO: 1722102 - DNA, 15 bp, Homo sapiens
ggtattcagtgtctg

SEQ ID NO: 1722103 - DNA, 15 bp, Homo sapiens
gtattcagtgtctgt

SEQ ID NO: 1722104 - DNA, 15 bp, Homo sapiens
tattcagtgtctgtc

SEQ ID NO: 1722105 - DNA, 15 bp, Homo sapiens
attcagtgtctgtcc

SEQ ID NO: 1722106 - DNA, 15 bp, Homo sapiens
ttcagtgtctgtcca

SEQ ID NO: 1722107 - DNA, 15 bp, Homo sapiens
tcagtgtctgtccat

SEQ ID NO: 1722108 - DNA, 15 bp, Homo sapiens
cagtgtctgtccata

SEQ ID NO: 1722109 - DNA, 15 bp, Homo sapiens
agtgtctgtccatag

SEQ ID NO: 1722110 - DNA, 15 bp, Homo sapiens
gtgtctgtccatagg

SEQ ID NO: 1722111 - DNA, 15 bp, Homo sapiens
tgtctgtccatagga

SEQ ID NO: 1722112 - DNA, 15 bp, Homo sapiens
gtctgtccataggac

SEQ ID NO: 1722113 - DNA, 15 bp, Homo sapiens
tctgtccataggact

SEQ ID NO: 1722114 - DNA, 15 bp, Homo sapiens
ctgtccataggacta

SEQ ID NO: 1722115 - DNA, 15 bp, Homo sapiens
tgtccataggactaa

SEQ ID NO: 1722116 - DNA, 15 bp, Homo sapiens
gtccataggactaat

SEQ ID NO: 1722117 - DNA, 15 bp, Homo sapiens
tccataggactaatt

SEQ ID NO: 1722118 - DNA, 15 bp, Homo sapiens
ccataggactaatta

SEQ ID NO: 1722119 - DNA, 15 bp, Homo sapiens
cataggactaattaa

SEQ ID NO: 1722120 - DNA, 15 bp, Homo sapiens
ataggactaattaaa

SEQ ID NO: 1722121 - DNA, 15 bp, Homo sapiens
taggactaattaaaa

SEQ ID NO: 1722122 - DNA, 15 bp, Homo sapiens
aggactaattaaaac

SEQ ID NO: 1722123 - DNA, 15 bp, Homo sapiens
ggactaattaaaact

SEQ ID NO: 1722124 - DNA, 15 bp, Homo sapiens
gactaattaaaacta

SEQ ID NO: 1722125 - DNA, 15 bp, Homo sapiens
actaattaaaactat

SEQ ID NO: 1722126 - DNA, 15 bp, Homo sapiens
ctaattaaaactata

SEQ ID NO: 1722127 - DNA, 15 bp, Homo sapiens
taattaaaactatac

SEQ ID NO: 1722128 - DNA, 15 bp, Homo sapiens
aattaaaactatacc

SEQ ID NO: 1722129 - DNA, 15 bp, Homo sapiens
attaaaactatacca

SEQ ID NO: 1722130 - DNA, 15 bp, Homo sapiens
ttaaaactataccag

SEQ ID NO: 1722131 - DNA, 15 bp, Homo sapiens
taaaactataccaga

SEQ ID NO: 1722132 - DNA, 15 bp, Homo sapiens
aaaactataccagac

SEQ ID NO: 1722133 - DNA, 15 bp, Homo sapiens
aaactataccagact

SEQ ID NO: 1722134 - DNA, 15 bp, Homo sapiens
aactataccagactc

SEQ ID NO: 1722135 - DNA, 15 bp, Homo sapiens
actataccagactcc

SEQ ID NO: 1722136 - DNA, 15 bp, Homo sapiens
ctataccagactcct

SEQ ID NO: 1722137 - DNA, 15 bp, Homo sapiens
tataccagactcctt

SEQ ID NO: 1722138 - DNA, 15 bp, Homo sapiens
ataccagactccttc

SEQ ID NO: 1722139 - DNA, 15 bp, Homo sapiens
taccagactccttct

SEQ ID NO: 1722140 - DNA, 15 bp, Homo sapiens
accagactccttcta

SEQ ID NO: 1722141 - DNA, 15 bp, Homo sapiens
ccagactccttctat

SEQ ID NO: 1722142 - DNA, 15 bp, Homo sapiens
cagactccttctatt

SEQ ID NO: 1722143 - DNA, 15 bp, Homo sapiens
agactccttctattt

SEQ ID NO: 1722144 - DNA, 15 bp, Homo sapiens
gactccttctatttt

SEQ ID NO: 1722145 - DNA, 15 bp, Homo sapiens
actccttctatttta

SEQ ID NO: 1722146 - DNA, 15 bp, Homo sapiens
ctccttctattttaa

SEQ ID NO: 1722147 - DNA, 15 bp, Homo sapiens
tccttctattttaaa

SEQ ID NO: 1722148 - DNA, 15 bp, Homo sapiens
ccttctattttaaac

SEQ ID NO: 1722149 - DNA, 15 bp, Homo sapiens
cttctattttaaacc

SEQ ID NO: 1722150 - DNA, 15 bp, Homo sapiens
ttctattttaaacct

SEQ ID NO: 1722151 - DNA, 15 bp, Homo sapiens
tctattttaaaccta

SEQ ID NO: 1722152 - DNA, 15 bp, Homo sapiens
ctattttaaacctat

SEQ ID NO: 1722153 - DNA, 15 bp, Homo sapiens
tattttaaacctatc

SEQ ID NO: 1722154 - DNA, 15 bp, Homo sapiens
attttaaacctatcc

SEQ ID NO: 1722155 - DNA, 15 bp, Homo sapiens
ttttaaacctatccg

SEQ ID NO: 1722156 - DNA, 15 bp, Homo sapiens
tttaaacctatccgt

SEQ ID NO: 1722157 - DNA, 15 bp, Homo sapiens
ttaaacctatccgtt

SEQ ID NO: 1722158 - DNA, 15 bp, Homo sapiens
taaacctatccgttc

SEQ ID NO: 1722159 - DNA, 15 bp, Homo sapiens
aaacctatccgttca

SEQ ID NO: 1722160 - DNA, 15 bp, Homo sapiens
aacctatccgttcag

SEQ ID NO: 1722161 - DNA, 15 bp, Homo sapiens
acctatccgttcagt

SEQ ID NO: 1722162 - DNA, 15 bp, Homo sapiens
cctatccgttcagtc

SEQ ID NO: 1722163 - DNA, 15 bp, Homo sapiens
ctatccgttcagtct

SEQ ID NO: 1722164 - DNA, 15 bp, Homo sapiens
tatccgttcagtctc

SEQ ID NO: 1722165 - DNA, 15 bp, Homo sapiens
atccgttcagtctca

SEQ ID NO: 1722166 - DNA, 15 bp, Homo sapiens
tccgttcagtctcaa

SEQ ID NO: 1722167 - DNA, 15 bp, Homo sapiens
ccgttcagtctcaag

SEQ ID NO: 1722168 - DNA, 15 bp, Homo sapiens
cgttcagtctcaagt

SEQ ID NO: 1722169 - DNA, 15 bp, Homo sapiens
gttcagtctcaagtt

SEQ ID NO: 1722170 - DNA, 15 bp, Homo sapiens
ttcagtctcaagtta

SEQ ID NO: 1722171 - DNA, 15 bp, Homo sapiens
tcagtctcaagttat

SEQ ID NO: 1722172 - DNA, 15 bp, Homo sapiens
cagtctcaagttatc

SEQ ID NO: 1722173 - DNA, 15 bp, Homo sapiens
agtctcaagttatct

SEQ ID NO: 1722174 - DNA, 15 bp, Homo sapiens
gtctcaagttatctt

SEQ ID NO: 1722175 - DNA, 15 bp, Homo sapiens
tctcaagttatcttt

SEQ ID NO: 1722176 - DNA, 15 bp, Homo sapiens
ctcaagttatctttt

SEQ ID NO: 1722177 - DNA, 15 bp, Homo sapiens
tcaagttatcttttt

SEQ ID NO: 1722178 - DNA, 15 bp, Homo sapiens
caagttatctttttg

SEQ ID NO: 1722179 - DNA, 15 bp, Homo sapiens
aagttatctttttgc

SEQ ID NO: 1722180 - DNA, 15 bp, Homo sapiens
agttatctttttgca

SEQ ID NO: 1722181 - DNA, 15 bp, Homo sapiens
gttatctttttgcat

SEQ ID NO: 1722182 - DNA, 15 bp, Homo sapiens
ttatctttttgcatt

SEQ ID NO: 1722183 - DNA, 15 bp, Homo sapiens
tatctttttgcattg

SEQ ID NO: 1722184 - DNA, 15 bp, Homo sapiens
atctttttgcattgc

SEQ ID NO: 1722185 - DNA, 15 bp, Homo sapiens
tctttttgcattgcc

SEQ ID NO: 1722186 - DNA, 15 bp, Homo sapiens
ctttttgcattgcct

SEQ ID NO: 1722187 - DNA, 15 bp, Homo sapiens
tttttgcattgcctc

SEQ ID NO: 1722188 - DNA, 15 bp, Homo sapiens
ttttgcattgcctct

SEQ ID NO: 1722189 - DNA, 15 bp, Homo sapiens
tttgcattgcctctc

SEQ ID NO: 1722190 - DNA, 15 bp, Homo sapiens
ttgcattgcctctca

SEQ ID NO: 1722191 - DNA, 15 bp, Homo sapiens
tgcattgcctctcac

SEQ ID NO: 1722192 - DNA, 15 bp, Homo sapiens
gcattgcctctcacg

SEQ ID NO: 1722193 - DNA, 15 bp, Homo sapiens
cattgcctctcacgt

SEQ ID NO: 1722194 - DNA, 15 bp, Homo sapiens
attgcctctcacgtc

SEQ ID NO: 1722195 - DNA, 15 bp, Homo sapiens
ttgcctctcacgtct

SEQ ID NO: 1722196 - DNA, 15 bp, Homo sapiens
tgcctctcacgtctg

SEQ ID NO: 1722197 - DNA, 15 bp, Homo sapiens
gcctctcacgtctgt

SEQ ID NO: 1722198 - DNA, 15 bp, Homo sapiens
cctctcacgtctgtc

SEQ ID NO: 1722199 - DNA, 15 bp, Homo sapiens
ctctcacgtctgtcc

SEQ ID NO: 1722200 - DNA, 15 bp, Homo sapiens
tctcacgtctgtccc

SEQ ID NO: 1722201 - DNA, 15 bp, Homo sapiens
ctcacgtctgtccct

SEQ ID NO: 1722202 - DNA, 15 bp, Homo sapiens
tcacgtctgtccctt

SEQ ID NO: 1722203 - DNA, 15 bp, Homo sapiens
cacgtctgtcccttc

SEQ ID NO: 1722204 - DNA, 15 bp, Homo sapiens
acgtctgtcccttca

SEQ ID NO: 1722205 - DNA, 15 bp, Homo sapiens
cgtctgtcccttcat

SEQ ID NO: 1722206 - DNA, 15 bp, Homo sapiens
gtctgtcccttcatt

SEQ ID NO: 1722207 - DNA, 15 bp, Homo sapiens
tctgtcccttcattt

SEQ ID NO: 1722208 - DNA, 15 bp, Homo sapiens
ctgtcccttcatttc

SEQ ID NO: 1722209 - DNA, 15 bp, Homo sapiens
tgtcccttcatttct

SEQ ID NO: 1722210 - DNA, 15 bp, Homo sapiens
gtcccttcatttctt

SEQ ID NO: 1722211 - DNA, 15 bp, Homo sapiens
tcccttcatttcttt

SEQ ID NO: 1722212 - DNA, 15 bp, Homo sapiens
cccttcatttctttt

SEQ ID NO: 1722213 - DNA, 15 bp, Homo sapiens
ccttcatttctttta

SEQ ID NO: 1722214 - DNA, 15 bp, Homo sapiens
cttcatttcttttac

SEQ ID NO: 1722215 - DNA, 15 bp, Homo sapiens
ttcatttcttttacc

SEQ ID NO: 1722216 - DNA, 15 bp, Homo sapiens
tcatttcttttacca

SEQ ID NO: 1722217 - DNA, 15 bp, Homo sapiens
catttcttttaccag

SEQ ID NO: 1722218 - DNA, 15 bp, Homo sapiens
atttcttttaccagc

SEQ ID NO: 1722219 - DNA, 15 bp, Homo sapiens
tttcttttaccagca

SEQ ID NO: 1722220 - DNA, 15 bp, Homo sapiens
ttcttttaccagcag

SEQ ID NO: 1722221 - DNA, 15 bp, Homo sapiens
tcttttaccagcagt

SEQ ID NO: 1722222 - DNA, 15 bp, Homo sapiens
cttttaccagcagtg

SEQ ID NO: 1722223 - DNA, 15 bp, Homo sapiens
ttttaccagcagtgc

SEQ ID NO: 1722224 - DNA, 15 bp, Homo sapiens
tttaccagcagtgct

SEQ ID NO: 1722225 - DNA, 15 bp, Homo sapiens
ttaccagcagtgctt

SEQ ID NO: 1722226 - DNA, 15 bp, Homo sapiens
taccagcagtgcttg

SEQ ID NO: 1722227 - DNA, 15 bp, Homo sapiens
accagcagtgcttgg

SEQ ID NO: 1722228 - DNA, 15 bp, Homo sapiens
ccagcagtgcttggt

SEQ ID NO: 1722229 - DNA, 15 bp, Homo sapiens
cagcagtgcttggtt

SEQ ID NO: 1722230 - DNA, 15 bp, Homo sapiens
agcagtgcttggttt

SEQ ID NO: 1722231 - DNA, 15 bp, Homo sapiens
gcagtgcttggtttt

SEQ ID NO: 1722232 - DNA, 15 bp, Homo sapiens
cagtgcttggttttt

SEQ ID NO: 1722233 - DNA, 15 bp, Homo sapiens
agtgcttggttttta

SEQ ID NO: 1722234 - DNA, 15 bp, Homo sapiens
gtgcttggtttttac

SEQ ID NO: 1722235 - DNA, 15 bp, Homo sapiens
tgcttggtttttact

SEQ ID NO: 1722236 - DNA, 15 bp, Homo sapiens
gcttggtttttactg

SEQ ID NO: 1722237 - DNA, 15 bp, Homo sapiens
cttggtttttactgt

SEQ ID NO: 1722238 - DNA, 15 bp, Homo sapiens
ttggtttttactgtt

SEQ ID NO: 1722239 - DNA, 15 bp, Homo sapiens
tggtttttactgttt

SEQ ID NO: 1722240 - DNA, 15 bp, Homo sapiens
ggtttttactgtttg

SEQ ID NO: 1722241 - DNA, 15 bp, Homo sapiens
gtttttactgtttgc

SEQ ID NO: 1722242 - DNA, 15 bp, Homo sapiens
tttttactgtttgct

SEQ ID NO: 1722243 - DNA, 15 bp, Homo sapiens
ttttactgtttgctt

SEQ ID NO: 1722244 - DNA, 15 bp, Homo sapiens
tttactgtttgcttt

SEQ ID NO: 1722245 - DNA, 15 bp, Homo sapiens
ttactgtttgctttg

SEQ ID NO: 1722246 - DNA, 15 bp, Homo sapiens
tactgtttgctttgg

SEQ ID NO: 1722247 - DNA, 15 bp, Homo sapiens
actgtttgctttggt

SEQ ID NO: 1722248 - DNA, 15 bp, Homo sapiens
ctgtttgctttggtt

SEQ ID NO: 1722249 - DNA, 15 bp, Homo sapiens
tgtttgctttggttt

SEQ ID NO: 1722250 - DNA, 15 bp, Homo sapiens
gtttgctttggtttt

SEQ ID NO: 1722251 - DNA, 15 bp, Homo sapiens
tttgctttggtttta

SEQ ID NO: 1722252 - DNA, 15 bp, Homo sapiens
ttgctttggttttaa

SEQ ID NO: 1722253 - DNA, 15 bp, Homo sapiens
tgctttggttttaat

SEQ ID NO: 1722254 - DNA, 15 bp, Homo sapiens
gctttggttttaatt

SEQ ID NO: 1722255 - DNA, 15 bp, Homo sapiens
ctttggttttaattt

SEQ ID NO: 1722256 - DNA, 15 bp, Homo sapiens
tttggttttaatttc

SEQ ID NO: 1722257 - DNA, 15 bp, Homo sapiens
ttggttttaatttcc

SEQ ID NO: 1722258 - DNA, 15 bp, Homo sapiens
tggttttaatttcct

SEQ ID NO: 1722259 - DNA, 15 bp, Homo sapiens
ggttttaatttcctt

SEQ ID NO: 1722260 - DNA, 15 bp, Homo sapiens
gttttaatttccttt

SEQ ID NO: 1722261 - DNA, 15 bp, Homo sapiens
ttttaatttcctttt

SEQ ID NO: 1722262 - DNA, 15 bp, Homo sapiens
tttaatttccttttt

SEQ ID NO: 1722263 - DNA, 15 bp, Homo sapiens
ttaatttccttttta

SEQ ID NO: 1722264 - DNA, 15 bp, Homo sapiens
taatttcctttttat

SEQ ID NO: 1722265 - DNA, 15 bp, Homo sapiens
aatttcctttttatt

SEQ ID NO: 1722266 - DNA, 15 bp, Homo sapiens
atttcctttttattt

SEQ ID NO: 1722267 - DNA, 15 bp, Homo sapiens
tttcctttttatttt

SEQ ID NO: 1722268 - DNA, 15 bp, Homo sapiens
ttcctttttattttt

SEQ ID NO: 1722269 - DNA, 15 bp, Homo sapiens
ctttttattttttta

SEQ ID NO: 1722270 - DNA, 15 bp, Homo sapiens
tttttatttttttaa

SEQ ID NO: 1722271 - DNA, 15 bp, Homo sapiens
ttttatttttttaat

SEQ ID NO: 1722272 - DNA, 15 bp, Homo sapiens
tttatttttttaatt

SEQ ID NO: 1722273 - DNA, 15 bp, Homo sapiens
ttatttttttaattt

SEQ ID NO: 1722274 - DNA, 15 bp, Homo sapiens
tatttttttaatttc

SEQ ID NO: 1722275 - DNA, 15 bp, Homo sapiens
atttttttaatttca

SEQ ID NO: 1722276 - DNA, 15 bp, Homo sapiens
tttttttaatttcag

SEQ ID NO: 1722277 - DNA, 15 bp, Homo sapiens
ttttaatttcagaag

SEQ ID NO: 1722278 - DNA, 15 bp, Homo sapiens
tttaatttcagaagg

SEQ ID NO: 1722279 - DNA, 15 bp, Homo sapiens
ttaatttcagaaggt

SEQ ID NO: 1722280 - DNA, 15 bp, Homo sapiens
taatttcagaaggtg

SEQ ID NO: 1722281 - DNA, 15 bp, Homo sapiens
aatttcagaaggtgg

SEQ ID NO: 1722282 - DNA, 15 bp, Homo sapiens
atttcagaaggtgga

SEQ ID NO: 1722283 - DNA, 15 bp, Homo sapiens
tttcagaaggtggaa

SEQ ID NO: 1722284 - DNA, 15 bp, Homo sapiens
ttcagaaggtggaag

SEQ ID NO: 1722285 - DNA, 15 bp, Homo sapiens
tcagaaggtggaagc

SEQ ID NO: 1722286 - DNA, 15 bp, Homo sapiens
cagaaggtggaagct

SEQ ID NO: 1722287 - DNA, 15 bp, Homo sapiens
agaaggtggaagctt

SEQ ID NO: 1722288 - DNA, 15 bp, Homo sapiens
gaaggtggaagctta

SEQ ID NO: 1722289 - DNA, 15 bp, Homo sapiens
aaggtggaagcttat

SEQ ID NO: 1722290 - DNA, 15 bp, Homo sapiens
aggtggaagcttatg

SEQ ID NO: 1722291 - DNA, 15 bp, Homo sapiens
ggtggaagcttatgt

SEQ ID NO: 1722292 - DNA, 15 bp, Homo sapiens
gtggaagcttatgtc

SEQ ID NO: 1722293 - DNA, 15 bp, Homo sapiens
tggaagcttatgtca

SEQ ID NO: 1722294 - DNA, 15 bp, Homo sapiens
ggaagcttatgtcat

SEQ ID NO: 1722295 - DNA, 15 bp, Homo sapiens
gaagcttatgtcatt

SEQ ID NO: 1722296 - DNA, 15 bp, Homo sapiens
aagcttatgtcattg

SEQ ID NO: 1722297 - DNA, 15 bp, Homo sapiens
agcttatgtcattga

SEQ ID NO: 1722298 - DNA, 15 bp, Homo sapiens
gcttatgtcattgac

SEQ ID NO: 1722299 - DNA, 15 bp, Homo sapiens
cttatgtcattgact

SEQ ID NO: 1722300 - DNA, 15 bp, Homo sapiens
ttatgtcattgactt

SEQ ID NO: 1722301 - DNA, 15 bp, Homo sapiens
tatgtcattgacttg

SEQ ID NO: 1722302 - DNA, 15 bp, Homo sapiens
atgtcattgacttga

SEQ ID NO: 1722303 - DNA, 15 bp, Homo sapiens
tgtcattgacttgag

SEQ ID NO: 1722304 - DNA, 15 bp, Homo sapiens
gtcattgacttgagc

SEQ ID NO: 1722305 - DNA, 15 bp, Homo sapiens
tcattgacttgagca

SEQ ID NO: 1722306 - DNA, 15 bp, Homo sapiens
cattgacttgagcat

SEQ ID NO: 1722307 - DNA, 15 bp, Homo sapiens
attgacttgagcatt

SEQ ID NO: 1722308 - DNA, 15 bp, Homo sapiens
ttgacttgagcattt

SEQ ID NO: 1722309 - DNA, 15 bp, Homo sapiens
tgacttgagcatttt

SEQ ID NO: 1722310 - DNA, 15 bp, Homo sapiens
gacttgagcattttt

SEQ ID NO: 1722311 - DNA, 15 bp, Homo sapiens
acttgagcatttttt

SEQ ID NO: 1722312 - DNA, 15 bp, Homo sapiens
cttgagcatttttta

SEQ ID NO: 1722313 - DNA, 15 bp, Homo sapiens
ttgagcattttttat

SEQ ID NO: 1722314 - DNA, 15 bp, Homo sapiens
tgagcattttttatg

SEQ ID NO: 1722315 - DNA, 15 bp, Homo sapiens
gagcattttttatgc

SEQ ID NO: 1722316 - DNA, 15 bp, Homo sapiens
agcattttttatgca

SEQ ID NO: 1722317 - DNA, 15 bp, Homo sapiens
gcattttttatgcat

SEQ ID NO: 1722318 - DNA, 15 bp, Homo sapiens
cattttttatgcatg

SEQ ID NO: 1722319 - DNA, 15 bp, Homo sapiens
attttttatgcatgt

SEQ ID NO: 1722320 - DNA, 15 bp, Homo sapiens
ttttttatgcatgtt

SEQ ID NO: 1722321 - DNA, 15 bp, Homo sapiens
tttttatgcatgttt

SEQ ID NO: 1722322 - DNA, 15 bp, Homo sapiens
ttttatgcatgtttt

SEQ ID NO: 1722323 - DNA, 15 bp, Homo sapiens
tttatgcatgtttta

SEQ ID NO: 1722324 - DNA, 15 bp, Homo sapiens
ttatgcatgttttag

SEQ ID NO: 1722325 - DNA, 15 bp, Homo sapiens
tatgcatgttttagt

SEQ ID NO: 1722326 - DNA, 15 bp, Homo sapiens
atgcatgttttagtg

SEQ ID NO: 1722327 - DNA, 15 bp, Homo sapiens
tgcatgttttagtgc

SEQ ID NO: 1722328 - DNA, 15 bp, Homo sapiens
gcatgttttagtgcc

SEQ ID NO: 1722329 - DNA, 15 bp, Homo sapiens
catgttttagtgcct

SEQ ID NO: 1722330 - DNA, 15 bp, Homo sapiens
atgttttagtgcctc

SEQ ID NO: 1722331 - DNA, 15 bp, Homo sapiens
tgttttagtgcctct

SEQ ID NO: 1722332 - DNA, 15 bp, Homo sapiens
gttttagtgcctctt

SEQ ID NO: 1722333 - DNA, 15 bp, Homo sapiens
ttttagtgcctcttt

SEQ ID NO: 1722334 - DNA, 15 bp, Homo sapiens
tttagtgcctctttc

SEQ ID NO: 1722335 - DNA, 15 bp, Homo sapiens
ttagtgcctctttct

SEQ ID NO: 1722336 - DNA, 15 bp, Homo sapiens
tagtgcctctttctg

SEQ ID NO: 1722337 - DNA, 15 bp, Homo sapiens
agtgcctctttctga

SEQ ID NO: 1722338 - DNA, 15 bp, Homo sapiens
gtgcctctttctgac

SEQ ID NO: 1722339 - DNA, 15 bp, Homo sapiens
tgcctctttctgact

SEQ ID NO: 1722340 - DNA, 15 bp, Homo sapiens
gcctctttctgacta

SEQ ID NO: 1722341 - DNA, 15 bp, Homo sapiens
cctctttctgactag

SEQ ID NO: 1722342 - DNA, 15 bp, Homo sapiens
ctctttctgactagt

SEQ ID NO: 1722343 - DNA, 15 bp, Homo sapiens
tctttctgactagtc

SEQ ID NO: 1722344 - DNA, 15 bp, Homo sapiens
ctttctgactagtct

SEQ ID NO: 1722345 - DNA, 15 bp, Homo sapiens
tttctgactagtctc

SEQ ID NO: 1722346 - DNA, 15 bp, Homo sapiens
ttctgactagtctct

SEQ ID NO: 1722347 - DNA, 15 bp, Homo sapiens
tctgactagtctctt

SEQ ID NO: 1722348 - DNA, 15 bp, Homo sapiens
ctgactagtctcttc

SEQ ID NO: 1722349 - DNA, 15 bp, Homo sapiens
tgactagtctcttct

SEQ ID NO: 1722350 - DNA, 15 bp, Homo sapiens
gactagtctcttctt

SEQ ID NO: 1722351 - DNA, 15 bp, Homo sapiens
actagtctcttcttt

SEQ ID NO: 1722352 - DNA, 15 bp, Homo sapiens
ctagtctcttctttt

SEQ ID NO: 1722353 - DNA, 15 bp, Homo sapiens
tagtctcttcttttc

SEQ ID NO: 1722354 - DNA, 15 bp, Homo sapiens
agtctcttcttttct

SEQ ID NO: 1722355 - DNA, 15 bp, Homo sapiens
gtctcttcttttctc

SEQ ID NO: 1722356 - DNA, 15 bp, Homo sapiens
tctcttcttttctcc

SEQ ID NO: 1722357 - DNA, 15 bp, Homo sapiens
ctcttcttttctcca

SEQ ID NO: 1722358 - DNA, 15 bp, Homo sapiens
tcttcttttctccat

SEQ ID NO: 1722359 - DNA, 15 bp, Homo sapiens
cttcttttctccatc

SEQ ID NO: 1722360 - DNA, 15 bp, Homo sapiens
ttcttttctccatcc

SEQ ID NO: 1722361 - DNA, 15 bp, Homo sapiens
tcttttctccatcca

SEQ ID NO: 1722362 - DNA, 15 bp, Homo sapiens
cttttctccatccaa

SEQ ID NO: 1722363 - DNA, 15 bp, Homo sapiens
ttttctccatccaat

SEQ ID NO: 1722364 - DNA, 15 bp, Homo sapiens
tttctccatccaatc

SEQ ID NO: 1722365 - DNA, 15 bp, Homo sapiens
ttctccatccaatcc

SEQ ID NO: 1722366 - DNA, 15 bp, Homo sapiens
tctccatccaatcca

SEQ ID NO: 1722367 - DNA, 15 bp, Homo sapiens
ctccatccaatccat

SEQ ID NO: 1722368 - DNA, 15 bp, Homo sapiens
tccatccaatccatc

SEQ ID NO: 1722369 - DNA, 15 bp, Homo sapiens
ccatccaatccatcc

SEQ ID NO: 1722370 - DNA, 15 bp, Homo sapiens
catccaatccatcct

SEQ ID NO: 1722371 - DNA, 15 bp, Homo sapiens
atccaatccatcctg

SEQ ID NO: 1722372 - DNA, 15 bp, Homo sapiens
tccaatccatcctgt

SEQ ID NO: 1722373 - DNA, 15 bp, Homo sapiens
ccaatccatcctgtg

SEQ ID NO: 1722374 - DNA, 15 bp, Homo sapiens
caatccatcctgtgc

SEQ ID NO: 1722375 - DNA, 15 bp, Homo sapiens
aatccatcctgtgcc

SEQ ID NO: 1722376 - DNA, 15 bp, Homo sapiens
atccatcctgtgcct

SEQ ID NO: 1722377 - DNA, 15 bp, Homo sapiens
tccatcctgtgcctg

SEQ ID NO: 1722378 - DNA, 15 bp, Homo sapiens
ccatcctgtgcctga

SEQ ID NO: 1722379 - DNA, 15 bp, Homo sapiens
catcctgtgcctgat

SEQ ID NO: 1722380 - DNA, 15 bp, Homo sapiens
atcctgtgcctgatt

SEQ ID NO: 1722381 - DNA, 15 bp, Homo sapiens
tcctgtgcctgattt

SEQ ID NO: 1722382 - DNA, 15 bp, Homo sapiens
cctgtgcctgatttt

SEQ ID NO: 1722383 - DNA, 15 bp, Homo sapiens
ctgtgcctgattttt

SEQ ID NO: 1722384 - DNA, 15 bp, Homo sapiens
tgtgcctgattttta

SEQ ID NO: 1722385 - DNA, 15 bp, Homo sapiens
gtgcctgatttttag

SEQ ID NO: 1722386 - DNA, 15 bp, Homo sapiens
tgcctgatttttaga

SEQ ID NO: 1722387 - DNA, 15 bp, Homo sapiens
gcctgatttttagaa

SEQ ID NO: 1722388 - DNA, 15 bp, Homo sapiens
cctgatttttagaaa

SEQ ID NO: 1722389 - DNA, 15 bp, Homo sapiens
ctgatttttagaaaa

SEQ ID NO: 1722390 - DNA, 15 bp, Homo sapiens
tgatttttagaaaag

SEQ ID NO: 1722391 - DNA, 15 bp, Homo sapiens
gatttttagaaaaga

SEQ ID NO: 1722392 - DNA, 15 bp, Homo sapiens
atttttagaaaagac

SEQ ID NO: 1722393 - DNA, 15 bp, Homo sapiens
tttttagaaaagact

SEQ ID NO: 1722394 - DNA, 15 bp, Homo sapiens
ttttagaaaagactg

SEQ ID NO: 1722395 - DNA, 15 bp, Homo sapiens
tttagaaaagactgg

SEQ ID NO: 1722396 - DNA, 15 bp, Homo sapiens
ttagaaaagactggt

SEQ ID NO: 1722397 - DNA, 15 bp, Homo sapiens
tagaaaagactggtg

SEQ ID NO: 1722398 - DNA, 15 bp, Homo sapiens
agaaaagactggtgt

SEQ ID NO: 1722399 - DNA, 15 bp, Homo sapiens
gaaaagactggtgta

SEQ ID NO: 1722400 - DNA, 15 bp, Homo sapiens
aaaagactggtgtac

SEQ ID NO: 1722401 - DNA, 15 bp, Homo sapiens
aaagactggtgtaca

SEQ ID NO: 1722402 - DNA, 15 bp, Homo sapiens
aagactggtgtacag

SEQ ID NO: 1722403 - DNA, 15 bp, Homo sapiens
agactggtgtacagt

SEQ ID NO: 1722404 - DNA, 15 bp, Homo sapiens
gactggtgtacagtt

SEQ ID NO: 1722405 - DNA, 15 bp, Homo sapiens
actggtgtacagttt

SEQ ID NO: 1722406 - DNA, 15 bp, Homo sapiens
ctggtgtacagtttg

SEQ ID NO: 1722407 - DNA, 15 bp, Homo sapiens
tggtgtacagtttgc

SEQ ID NO: 1722408 - DNA, 15 bp, Homo sapiens
ggtgtacagtttgcc

SEQ ID NO: 1722409 - DNA, 15 bp, Homo sapiens
gtgtacagtttgccc

SEQ ID NO: 1722410 - DNA, 15 bp, Homo sapiens
tgtacagtttgcccc

SEQ ID NO: 1722411 - DNA, 15 bp, Homo sapiens
gtacagtttgcccct

SEQ ID NO: 1722412 - DNA, 15 bp, Homo sapiens
tacagtttgcccctt

SEQ ID NO: 1722413 - DNA, 15 bp, Homo sapiens
acagtttgccccttt

SEQ ID NO: 1722414 - DNA, 15 bp, Homo sapiens
cagtttgcccctttt

SEQ ID NO: 1722415 - DNA, 15 bp, Homo sapiens
agtttgccccttttg

SEQ ID NO: 1722416 - DNA, 15 bp, Homo sapiens
gtttgccccttttgc

SEQ ID NO: 1722417 - DNA, 15 bp, Homo sapiens
tttgccccttttgct

SEQ ID NO: 1722418 - DNA, 15 bp, Homo sapiens
ttgccccttttgctt

SEQ ID NO: 1722419 - DNA, 15 bp, Homo sapiens
tgccccttttgcttt

SEQ ID NO: 1722420 - DNA, 15 bp, Homo sapiens
gccccttttgcttta

SEQ ID NO: 1722421 - DNA, 15 bp, Homo sapiens
ccccttttgctttaa

SEQ ID NO: 1722422 - DNA, 15 bp, Homo sapiens
cccttttgctttaaa

SEQ ID NO: 1722423 - DNA, 15 bp, Homo sapiens
ccttttgctttaaaa

SEQ ID NO: 1722424 - DNA, 15 bp, Homo sapiens
cttttgctttaaaat

SEQ ID NO: 1722425 - DNA, 15 bp, Homo sapiens
ttttgctttaaaatt

SEQ ID NO: 1722426 - DNA, 15 bp, Homo sapiens
tttgctttaaaattt

SEQ ID NO: 1722427 - DNA, 15 bp, Homo sapiens
ttgctttaaaattta

SEQ ID NO: 1722428 - DNA, 15 bp, Homo sapiens
tgctttaaaatttat

SEQ ID NO: 1722429 - DNA, 15 bp, Homo sapiens
gctttaaaatttatt

SEQ ID NO: 1722430 - DNA, 15 bp, Homo sapiens
ctttaaaatttattt

SEQ ID NO: 1722431 - DNA, 15 bp, Homo sapiens
tttaaaatttatttt

SEQ ID NO: 1722432 - DNA, 15 bp, Homo sapiens
ttaaaatttattttt

SEQ ID NO: 1722433 - DNA, 15 bp, Homo sapiens
aaatttatttttcat

SEQ ID NO: 1722434 - DNA, 15 bp, Homo sapiens
aatttatttttcatt

SEQ ID NO: 1722435 - DNA, 15 bp, Homo sapiens
atttatttttcattg

SEQ ID NO: 1722436 - DNA, 15 bp, Homo sapiens
tttatttttcattgt

SEQ ID NO: 1722437 - DNA, 15 bp, Homo sapiens
ttatttttcattgtt

SEQ ID NO: 1722438 - DNA, 15 bp, Homo sapiens
tatttttcattgtta

SEQ ID NO: 1722439 - DNA, 15 bp, Homo sapiens
atttttcattgttac

SEQ ID NO: 1722440 - DNA, 15 bp, Homo sapiens
tttttcattgttaca

SEQ ID NO: 1722441 - DNA, 15 bp, Homo sapiens
ttttcattgttacaa

SEQ ID NO: 1722442 - DNA, 15 bp, Homo sapiens
tttcattgttacaac

SEQ ID NO: 1722443 - DNA, 15 bp, Homo sapiens
ttcattgttacaacc

SEQ ID NO: 1722444 - DNA, 15 bp, Homo sapiens
tcattgttacaaccc

SEQ ID NO: 1722445 - DNA, 15 bp, Homo sapiens
cattgttacaaccca

SEQ ID NO: 1722446 - DNA, 15 bp, Homo sapiens
attgttacaacccac

SEQ ID NO: 1722447 - DNA, 15 bp, Homo sapiens
ttgttacaacccact

SEQ ID NO: 1722448 - DNA, 15 bp, Homo sapiens
tgttacaacccactc

SEQ ID NO: 1722449 - DNA, 15 bp, Homo sapiens
gttacaacccactct

SEQ ID NO: 1722450 - DNA, 15 bp, Homo sapiens
ttacaacccactctc

SEQ ID NO: 1722451 - DNA, 15 bp, Homo sapiens
tacaacccactctca

SEQ ID NO: 1722452 - DNA, 15 bp, Homo sapiens
acaacccactctcag

SEQ ID NO: 1722453 - DNA, 15 bp, Homo sapiens
caacccactctcagt

SEQ ID NO: 1722454 - DNA, 15 bp, Homo sapiens
aacccactctcagta

SEQ ID NO: 1722455 - DNA, 15 bp, Homo sapiens
acccactctcagtag

SEQ ID NO: 1722456 - DNA, 15 bp, Homo sapiens
cccactctcagtagc

SEQ ID NO: 1722457 - DNA, 15 bp, Homo sapiens
ccactctcagtagcc

SEQ ID NO: 1722458 - DNA, 15 bp, Homo sapiens
cactctcagtagcct

SEQ ID NO: 1722459 - DNA, 15 bp, Homo sapiens
actctcagtagcctc

SEQ ID NO: 1722460 - DNA, 15 bp, Homo sapiens
ctctcagtagcctcc

SEQ ID NO: 1722461 - DNA, 15 bp, Homo sapiens
tctcagtagcctcca

SEQ ID NO: 1722462 - DNA, 15 bp, Homo sapiens
ctcagtagcctccat

SEQ ID NO: 1722463 - DNA, 15 bp, Homo sapiens
tcagtagcctccatt

SEQ ID NO: 1722464 - DNA, 15 bp, Homo sapiens
cagtagcctccattg

SEQ ID NO: 1722465 - DNA, 15 bp, Homo sapiens
agtagcctccattgt

SEQ ID NO: 1722466 - DNA, 15 bp, Homo sapiens
gtagcctccattgta

SEQ ID NO: 1722467 - DNA, 15 bp, Homo sapiens
tagcctccattgtaa

SEQ ID NO: 1722468 - DNA, 15 bp, Homo sapiens
agcctccattgtaac

SEQ ID NO: 1722469 - DNA, 15 bp, Homo sapiens
gcctccattgtaaca

SEQ ID NO: 1722470 - DNA, 15 bp, Homo sapiens
cctccattgtaacac

SEQ ID NO: 1722471 - DNA, 15 bp, Homo sapiens
ctccattgtaacacc

SEQ ID NO: 1722472 - DNA, 15 bp, Homo sapiens
tccattgtaacaccc

SEQ ID NO: 1722473 - DNA, 15 bp, Homo sapiens
ccattgtaacaccct

SEQ ID NO: 1722474 - DNA, 15 bp, Homo sapiens
cattgtaacaccctc

SEQ ID NO: 1722475 - DNA, 15 bp, Homo sapiens
attgtaacaccctcc

SEQ ID NO: 1722476 - DNA, 15 bp, Homo sapiens
ttgtaacaccctccc

SEQ ID NO: 1722477 - DNA, 15 bp, Homo sapiens
tgtaacaccctccca

SEQ ID NO: 1722478 - DNA, 15 bp, Homo sapiens
gtaacaccctcccat

SEQ ID NO: 1722479 - DNA, 15 bp, Homo sapiens
taacaccctcccatg

SEQ ID NO: 1722480 - DNA, 15 bp, Homo sapiens
aacaccctcccatgc

SEQ ID NO: 1722481 - DNA, 15 bp, Homo sapiens
acaccctcccatgct

SEQ ID NO: 1722482 - DNA, 15 bp, Homo sapiens
caccctcccatgctc

SEQ ID NO: 1722483 - DNA, 15 bp, Homo sapiens
accctcccatgctcc

SEQ ID NO: 1722484 - DNA, 15 bp, Homo sapiens
ccctcccatgctccc

SEQ ID NO: 1722485 - DNA, 15 bp, Homo sapiens
cctcccatgctccca

SEQ ID NO: 1722486 - DNA, 15 bp, Homo sapiens
ctcccatgctcccac

SEQ ID NO: 1722487 - DNA, 15 bp, Homo sapiens
tcccatgctcccacc

SEQ ID NO: 1722488 - DNA, 15 bp, Homo sapiens
cccatgctcccacca

SEQ ID NO: 1722489 - DNA, 15 bp, Homo sapiens
ccatgctcccaccac

SEQ ID NO: 1722490 - DNA, 15 bp, Homo sapiens
catgctcccaccacc

SEQ ID NO: 1722491 - DNA, 15 bp, Homo sapiens
atgctcccaccacca

SEQ ID NO: 1722492 - DNA, 15 bp, Homo sapiens
tgctcccaccaccat

SEQ ID NO: 1722493 - DNA, 15 bp, Homo sapiens
gctcccaccaccatt

SEQ ID NO: 1722494 - DNA, 15 bp, Homo sapiens
ctcccaccaccatta

SEQ ID NO: 1722495 - DNA, 15 bp, Homo sapiens
tcccaccaccattat

SEQ ID NO: 1722496 - DNA, 15 bp, Homo sapiens
cccaccaccattatg

SEQ ID NO: 1722497 - DNA, 15 bp, Homo sapiens
ccaccaccattatga

SEQ ID NO: 1722498 - DNA, 15 bp, Homo sapiens
caccaccattatgaa

SEQ ID NO: 1722499 - DNA, 15 bp, Homo sapiens
accaccattatgaag

SEQ ID NO: 1722500 - DNA, 15 bp, Homo sapiens
ccaccattatgaaga

SEQ ID NO: 1722501 - DNA, 15 bp, Homo sapiens
caccattatgaagaa

SEQ ID NO: 1722502 - DNA, 15 bp, Homo sapiens
accattatgaagaag

SEQ ID NO: 1722503 - DNA, 15 bp, Homo sapiens
ccattatgaagaagt

SEQ ID NO: 1722504 - DNA, 15 bp, Homo sapiens
cattatgaagaagta

SEQ ID NO: 1722505 - DNA, 15 bp, Homo sapiens
attatgaagaagtaa

SEQ ID NO: 1722506 - DNA, 15 bp, Homo sapiens
ttatgaagaagtaaa

SEQ ID NO: 1722507 - DNA, 15 bp, Homo sapiens
tatgaagaagtaaag

SEQ ID NO: 1722508 - DNA, 15 bp, Homo sapiens
atgaagaagtaaagt

SEQ ID NO: 1722509 - DNA, 15 bp, Homo sapiens
tgaagaagtaaagtc

SEQ ID NO: 1722510 - DNA, 15 bp, Homo sapiens
gaagaagtaaagtcc

SEQ ID NO: 1722511 - DNA, 15 bp, Homo sapiens
aagaagtaaagtcca

SEQ ID NO: 1722512 - DNA, 15 bp, Homo sapiens
agaagtaaagtccaa

SEQ ID NO: 1722513 - DNA, 15 bp, Homo sapiens
gaagtaaagtccaaa

SEQ ID NO: 1722514 - DNA, 15 bp, Homo sapiens
aagtaaagtccaaac

SEQ ID NO: 1722515 - DNA, 15 bp, Homo sapiens
agtaaagtccaaact

SEQ ID NO: 1722516 - DNA, 15 bp, Homo sapiens
gtaaagtccaaactt

SEQ ID NO: 1722517 - DNA, 15 bp, Homo sapiens
taaagtccaaacttt

SEQ ID NO: 1722518 - DNA, 15 bp, Homo sapiens
aaagtccaaactttc

SEQ ID NO: 1722519 - DNA, 15 bp, Homo sapiens
aagtccaaactttct

SEQ ID NO: 1722520 - DNA, 15 bp, Homo sapiens
agtccaaactttctc

SEQ ID NO: 1722521 - DNA, 15 bp, Homo sapiens
gtccaaactttctca

SEQ ID NO: 1722522 - DNA, 15 bp, Homo sapiens
tccaaactttctcag

SEQ ID NO: 1722523 - DNA, 15 bp, Homo sapiens
ccaaactttctcagt

SEQ ID NO: 1722524 - DNA, 15 bp, Homo sapiens
caaactttctcagta

SEQ ID NO: 1722525 - DNA, 15 bp, Homo sapiens
aaactttctcagtat

SEQ ID NO: 1722526 - DNA, 15 bp, Homo sapiens
aactttctcagtatt

SEQ ID NO: 1722527 - DNA, 15 bp, Homo sapiens
actttctcagtattt

SEQ ID NO: 1722528 - DNA, 15 bp, Homo sapiens
ctttctcagtatttg

SEQ ID NO: 1722529 - DNA, 15 bp, Homo sapiens
tttctcagtatttgt

SEQ ID NO: 1722530 - DNA, 15 bp, Homo sapiens
ttctcagtatttgta

SEQ ID NO: 1722531 - DNA, 15 bp, Homo sapiens
tctcagtatttgtag

SEQ ID NO: 1722532 - DNA, 15 bp, Homo sapiens
ctcagtatttgtagt

SEQ ID NO: 1722533 - DNA, 15 bp, Homo sapiens
tcagtatttgtagtt

SEQ ID NO: 1722534 - DNA, 15 bp, Homo sapiens
cagtatttgtagttc

SEQ ID NO: 1722535 - DNA, 15 bp, Homo sapiens
agtatttgtagttct

SEQ ID NO: 1722536 - DNA, 15 bp, Homo sapiens
gtatttgtagttctt

SEQ ID NO: 1722537 - DNA, 15 bp, Homo sapiens
tatttgtagttcttc

SEQ ID NO: 1722538 - DNA, 15 bp, Homo sapiens
atttgtagttcttca

SEQ ID NO: 1722539 - DNA, 15 bp, Homo sapiens
tttgtagttcttcat

SEQ ID NO: 1722540 - DNA, 15 bp, Homo sapiens
ttgtagttcttcatg

SEQ ID NO: 1722541 - DNA, 15 bp, Homo sapiens
tgtagttcttcatgg

SEQ ID NO: 1722542 - DNA, 15 bp, Homo sapiens
gtagttcttcatggt

SEQ ID NO: 1722543 - DNA, 15 bp, Homo sapiens
tagttcttcatggtc

SEQ ID NO: 1722544 - DNA, 15 bp, Homo sapiens
agttcttcatggtct

SEQ ID NO: 1722545 - DNA, 15 bp, Homo sapiens
gttcttcatggtctg

SEQ ID NO: 1722546 - DNA, 15 bp, Homo sapiens
ttcttcatggtctgt

SEQ ID NO: 1722547 - DNA, 15 bp, Homo sapiens
tcttcatggtctgtg

SEQ ID NO: 1722548 - DNA, 15 bp, Homo sapiens
cttcatggtctgtgc

SEQ ID NO: 1722549 - DNA, 15 bp, Homo sapiens
ttcatggtctgtgct

SEQ ID NO: 1722550 - DNA, 15 bp, Homo sapiens
tcatggtctgtgctt

SEQ ID NO: 1722551 - DNA, 15 bp, Homo sapiens
catggtctgtgcttt

SEQ ID NO: 1722552 - DNA, 15 bp, Homo sapiens
atggtctgtgcttta

SEQ ID NO: 1722553 - DNA, 15 bp, Homo sapiens
tggtctgtgctttaa

SEQ ID NO: 1722554 - DNA, 15 bp, Homo sapiens
ggtctgtgctttaac

SEQ ID NO: 1722555 - DNA, 15 bp, Homo sapiens
gtctgtgctttaacc

SEQ ID NO: 1722556 - DNA, 15 bp, Homo sapiens
tctgtgctttaacct

SEQ ID NO: 1722557 - DNA, 15 bp, Homo sapiens
ctgtgctttaacctt

SEQ ID NO: 1722558 - DNA, 15 bp, Homo sapiens
tgtgctttaaccttc

SEQ ID NO: 1722559 - DNA, 15 bp, Homo sapiens
gtgctttaaccttcc

SEQ ID NO: 1722560 - DNA, 15 bp, Homo sapiens
tgctttaaccttcct

SEQ ID NO: 1722561 - DNA, 15 bp, Homo sapiens
gctttaaccttcctt

SEQ ID NO: 1722562 - DNA, 15 bp, Homo sapiens
ctttaaccttccttc

SEQ ID NO: 1722563 - DNA, 15 bp, Homo sapiens
tttaaccttccttcc

SEQ ID NO: 1722564 - DNA, 15 bp, Homo sapiens
ttaaccttccttcca

SEQ ID NO: 1722565 - DNA, 15 bp, Homo sapiens
taaccttccttccag

SEQ ID NO: 1722566 - DNA, 15 bp, Homo sapiens
aaccttccttccagt

SEQ ID NO: 1722567 - DNA, 15 bp, Homo sapiens
accttccttccagtc

SEQ ID NO: 1722568 - DNA, 15 bp, Homo sapiens
ccttccttccagtct

SEQ ID NO: 1722569 - DNA, 15 bp, Homo sapiens
cttccttccagtctt

SEQ ID NO: 1722570 - DNA, 15 bp, Homo sapiens
ttccttccagtctta

SEQ ID NO: 1722571 - DNA, 15 bp, Homo sapiens
tccttccagtcttat

SEQ ID NO: 1722572 - DNA, 15 bp, Homo sapiens
ccttccagtcttatt

SEQ ID NO: 1722573 - DNA, 15 bp, Homo sapiens
cttccagtcttattt

SEQ ID NO: 1722574 - DNA, 15 bp, Homo sapiens
ttccagtcttatttt

SEQ ID NO: 1722575 - DNA, 15 bp, Homo sapiens
tccagtcttattttt

SEQ ID NO: 1722576 - DNA, 15 bp, Homo sapiens
ccagtcttatttttt

SEQ ID NO: 1722577 - DNA, 15 bp, Homo sapiens
cagtcttatttttta

SEQ ID NO: 1722578 - DNA, 15 bp, Homo sapiens
agtcttattttttat

SEQ ID NO: 1722579 - DNA, 15 bp, Homo sapiens
gtcttattttttatt

SEQ ID NO: 1722580 - DNA, 15 bp, Homo sapiens
tcttattttttattt

SEQ ID NO: 1722581 - DNA, 15 bp, Homo sapiens
cttattttttatttc

SEQ ID NO: 1722582 - DNA, 15 bp, Homo sapiens
ttattttttatttcc

SEQ ID NO: 1722583 - DNA, 15 bp, Homo sapiens
tattttttatttcca

SEQ ID NO: 1722584 - DNA, 15 bp, Homo sapiens
attttttatttccat

SEQ ID NO: 1722585 - DNA, 15 bp, Homo sapiens
ttttttatttccatt

SEQ ID NO: 1722586 - DNA, 15 bp, Homo sapiens
ttttatttccattgt

SEQ ID NO: 1722587 - DNA, 15 bp, Homo sapiens
tttatttccattgtt

SEQ ID NO: 1722588 - DNA, 15 bp, Homo sapiens
ttatttccattgttg

SEQ ID NO: 1722589 - DNA, 15 bp, Homo sapiens
tatttccattgttgg

SEQ ID NO: 1722590 - DNA, 15 bp, Homo sapiens
atttccattgttggc

SEQ ID NO: 1722591 - DNA, 15 bp, Homo sapiens
tttccattgttggcc

SEQ ID NO: 1722592 - DNA, 15 bp, Homo sapiens
ttccattgttggccc

SEQ ID NO: 1722593 - DNA, 15 bp, Homo sapiens
tccattgttggcccc

SEQ ID NO: 1722594 - DNA, 15 bp, Homo sapiens
ccattgttggccccc

SEQ ID NO: 1722595 - DNA, 15 bp, Homo sapiens
cattgttggccccca

SEQ ID NO: 1722596 - DNA, 15 bp, Homo sapiens
attgttggcccccaa

SEQ ID NO: 1722597 - DNA, 15 bp, Homo sapiens
ttgttggcccccaat

SEQ ID NO: 1722598 - DNA, 15 bp, Homo sapiens
tgttggcccccaatg

SEQ ID NO: 1722599 - DNA, 15 bp, Homo sapiens
gttggcccccaatgc

SEQ ID NO: 1722600 - DNA, 15 bp, Homo sapiens
ttggcccccaatgcc

SEQ ID NO: 1722601 - DNA, 15 bp, Homo sapiens
tggcccccaatgcct

SEQ ID NO: 1722602 - DNA, 15 bp, Homo sapiens
ggcccccaatgcctg

SEQ ID NO: 1722603 - DNA, 15 bp, Homo sapiens
gcccccaatgcctgt

SEQ ID NO: 1722604 - DNA, 15 bp, Homo sapiens
cccccaatgcctgtg

SEQ ID NO: 1722605 - DNA, 15 bp, Homo sapiens
ccccaatgcctgtgt

SEQ ID NO: 1722606 - DNA, 15 bp, Homo sapiens
cccaatgcctgtgtt

SEQ ID NO: 1722607 - DNA, 15 bp, Homo sapiens
ccaatgcctgtgttc

SEQ ID NO: 1722608 - DNA, 15 bp, Homo sapiens
caatgcctgtgttct

SEQ ID NO: 1722609 - DNA, 15 bp, Homo sapiens
aatgcctgtgttctc

SEQ ID NO: 1722610 - DNA, 15 bp, Homo sapiens
atgcctgtgttctct

SEQ ID NO: 1722611 - DNA, 15 bp, Homo sapiens
tgcctgtgttctctt

SEQ ID NO: 1722612 - DNA, 15 bp, Homo sapiens
gcctgtgttctcttc

SEQ ID NO: 1722613 - DNA, 15 bp, Homo sapiens
cctgtgttctcttcc

SEQ ID NO: 1722614 - DNA, 15 bp, Homo sapiens
ctgtgttctcttccc

SEQ ID NO: 1722615 - DNA, 15 bp, Homo sapiens
tgtgttctcttccct

SEQ ID NO: 1722616 - DNA, 15 bp, Homo sapiens
gtgttctcttccctt

SEQ ID NO: 1722617 - DNA, 15 bp, Homo sapiens
tgttctcttcccttc

SEQ ID NO: 1722618 - DNA, 15 bp, Homo sapiens
gttctcttcccttcc

SEQ ID NO: 1722619 - DNA, 15 bp, Homo sapiens
ttctcttcccttcca

SEQ ID NO: 1722620 - DNA, 15 bp, Homo sapiens
tctcttcccttccat

SEQ ID NO: 1722621 - DNA, 15 bp, Homo sapiens
ctcttcccttccata

SEQ ID NO: 1722622 - DNA, 15 bp, Homo sapiens
tcttcccttccatat

SEQ ID NO: 1722623 - DNA, 15 bp, Homo sapiens
cttcccttccatatg

SEQ ID NO: 1722624 - DNA, 15 bp, Homo sapiens
ttcccttccatatga

SEQ ID NO: 1722625 - DNA, 15 bp, Homo sapiens
tcccttccatatgaa

SEQ ID NO: 1722626 - DNA, 15 bp, Homo sapiens
cccttccatatgaat

SEQ ID NO: 1722627 - DNA, 15 bp, Homo sapiens
ccttccatatgaatc

SEQ ID NO: 1722628 - DNA, 15 bp, Homo sapiens
cttccatatgaatct

SEQ ID NO: 1722629 - DNA, 15 bp, Homo sapiens
ttccatatgaatctt

SEQ ID NO: 1722630 - DNA, 15 bp, Homo sapiens
tccatatgaatcttc

SEQ ID NO: 1722631 - DNA, 15 bp, Homo sapiens
ccatatgaatcttcc

SEQ ID NO: 1722632 - DNA, 15 bp, Homo sapiens
catatgaatcttcca

SEQ ID NO: 1722633 - DNA, 15 bp, Homo sapiens
atatgaatcttccat

SEQ ID NO: 1722634 - DNA, 15 bp, Homo sapiens
tatgaatcttccata

SEQ ID NO: 1722635 - DNA, 15 bp, Homo sapiens
atgaatcttccatat

SEQ ID NO: 1722636 - DNA, 15 bp, Homo sapiens
tgaatcttccatatg

SEQ ID NO: 1722637 - DNA, 15 bp, Homo sapiens
gaatcttccatatga

SEQ ID NO: 1722638 - DNA, 15 bp, Homo sapiens
aatcttccatatgaa

SEQ ID NO: 1722639 - DNA, 15 bp, Homo sapiens
atcttccatatgaat

SEQ ID NO: 1722640 - DNA, 15 bp, Homo sapiens
tcttccatatgaata

SEQ ID NO: 1722641 - DNA, 15 bp, Homo sapiens
cttccatatgaatat

SEQ ID NO: 1722642 - DNA, 15 bp, Homo sapiens
ttccatatgaatatc

SEQ ID NO: 1722643 - DNA, 15 bp, Homo sapiens
tccatatgaatatct

SEQ ID NO: 1722644 - DNA, 15 bp, Homo sapiens
ccatatgaatatctt

SEQ ID NO: 1722645 - DNA, 15 bp, Homo sapiens
catatgaatatcttc

SEQ ID NO: 1722646 - DNA, 15 bp, Homo sapiens
atatgaatatcttcc

SEQ ID NO: 1722647 - DNA, 15 bp, Homo sapiens
tatgaatatcttcca

SEQ ID NO: 1722648 - DNA, 15 bp, Homo sapiens
atgaatatcttccat

SEQ ID NO: 1722649 - DNA, 15 bp, Homo sapiens
tgaatatcttccata

SEQ ID NO: 1722650 - DNA, 15 bp, Homo sapiens
gaatatcttccatat

SEQ ID NO: 1722651 - DNA, 15 bp, Homo sapiens
aatatcttccatatg

SEQ ID NO: 1722652 - DNA, 15 bp, Homo sapiens
atatcttccatatga

SEQ ID NO: 1722653 - DNA, 15 bp, Homo sapiens
tatcttccatatgaa

SEQ ID NO: 1722654 - DNA, 15 bp, Homo sapiens
ttccatatgaatatg

SEQ ID NO: 1722655 - DNA, 15 bp, Homo sapiens
tccatatgaatatga

SEQ ID NO: 1722656 - DNA, 15 bp, Homo sapiens
ccatatgaatatgat

SEQ ID NO: 1722657 - DNA, 15 bp, Homo sapiens
catatgaatatgata

SEQ ID NO: 1722658 - DNA, 15 bp, Homo sapiens
atatgaatatgatag

SEQ ID NO: 1722659 - DNA, 15 bp, Homo sapiens
tatgaatatgatagt

SEQ ID NO: 1722660 - DNA, 15 bp, Homo sapiens
atgaatatgatagta

SEQ ID NO: 1722661 - DNA, 15 bp, Homo sapiens
tgaatatgatagtat

SEQ ID NO: 1722662 - DNA, 15 bp, Homo sapiens
gaatatgatagtatt

SEQ ID NO: 1722663 - DNA, 15 bp, Homo sapiens
aatatgatagtattc

SEQ ID NO: 1722664 - DNA, 15 bp, Homo sapiens
atatgatagtattca

SEQ ID NO: 1722665 - DNA, 15 bp, Homo sapiens
tatgatagtattcat

SEQ ID NO: 1722666 - DNA, 15 bp, Homo sapiens
atgatagtattcata

SEQ ID NO: 1722667 - DNA, 15 bp, Homo sapiens
tgatagtattcatat

SEQ ID NO: 1722668 - DNA, 15 bp, Homo sapiens
gatagtattcatatt

SEQ ID NO: 1722669 - DNA, 15 bp, Homo sapiens
atagtattcatattc

SEQ ID NO: 1722670 - DNA, 15 bp, Homo sapiens
tagtattcatattca

SEQ ID NO: 1722671 - DNA, 15 bp, Homo sapiens
agtattcatattcat

SEQ ID NO: 1722672 - DNA, 15 bp, Homo sapiens
gtattcatattcatg

SEQ ID NO: 1722673 - DNA, 15 bp, Homo sapiens
tattcatattcatgc

SEQ ID NO: 1722674 - DNA, 15 bp, Homo sapiens
attcatattcatgcg

SEQ ID NO: 1722675 - DNA, 15 bp, Homo sapiens
ttcatattcatgcga

SEQ ID NO: 1722676 - DNA, 15 bp, Homo sapiens
tcatattcatgcgat

SEQ ID NO: 1722677 - DNA, 15 bp, Homo sapiens
catattcatgcgatc

SEQ ID NO: 1722678 - DNA, 15 bp, Homo sapiens
atattcatgcgatct

SEQ ID NO: 1722679 - DNA, 15 bp, Homo sapiens
tattcatgcgatctc

SEQ ID NO: 1722680 - DNA, 15 bp, Homo sapiens
attcatgcgatctcc

SEQ ID NO: 1722681 - DNA, 15 bp, Homo sapiens
ttcatgcgatctccc

SEQ ID NO: 1722682 - DNA, 15 bp, Homo sapiens
tcatgcgatctcccc

SEQ ID NO: 1722683 - DNA, 15 bp, Homo sapiens
catgcgatctcccct

SEQ ID NO: 1722684 - DNA, 15 bp, Homo sapiens
atgcgatctcccctt

SEQ ID NO: 1722685 - DNA, 15 bp, Homo sapiens
tgcgatctccccttt

SEQ ID NO: 1722686 - DNA, 15 bp, Homo sapiens
gcgatctcccctttt

SEQ ID NO: 1722687 - DNA, 15 bp, Homo sapiens
cgatctccccttttt

SEQ ID NO: 1722688 - DNA, 15 bp, Homo sapiens
gatctcccctttttt

SEQ ID NO: 1722689 - DNA, 15 bp, Homo sapiens
atctccccttttttt

SEQ ID NO: 1722690 - DNA, 15 bp, Homo sapiens
tctcccctttttttg

SEQ ID NO: 1722691 - DNA, 15 bp, Homo sapiens
ctcccctttttttgg

SEQ ID NO: 1722692 - DNA, 15 bp, Homo sapiens
tcccctttttttgga

SEQ ID NO: 1722693 - DNA, 15 bp, Homo sapiens
cccctttttttggaa

SEQ ID NO: 1722694 - DNA, 15 bp, Homo sapiens
ccctttttttggaat

SEQ ID NO: 1722695 - DNA, 15 bp, Homo sapiens
cctttttttggaata

SEQ ID NO: 1722696 - DNA, 15 bp, Homo sapiens
ctttttttggaatac

SEQ ID NO: 1722697 - DNA, 15 bp, Homo sapiens
tttttttggaatacc

SEQ ID NO: 1722698 - DNA, 15 bp, Homo sapiens
ttttttggaataccc

SEQ ID NO: 1722699 - DNA, 15 bp, Homo sapiens
tttttggaataccct

SEQ ID NO: 1722700 - DNA, 15 bp, Homo sapiens
ttttggaataccctt

SEQ ID NO: 1722701 - DNA, 15 bp, Homo sapiens
tttggaatacccttc

SEQ ID NO: 1722702 - DNA, 15 bp, Homo sapiens
ttggaatacccttct

SEQ ID NO: 1722703 - DNA, 15 bp, Homo sapiens
tggaatacccttctt

SEQ ID NO: 1722704 - DNA, 15 bp, Homo sapiens
ggaatacccttcttt

SEQ ID NO: 1722705 - DNA, 15 bp, Homo sapiens
gaatacccttctttt

SEQ ID NO: 1722706 - DNA, 15 bp, Homo sapiens
aatacccttcttttt

SEQ ID NO: 1722707 - DNA, 15 bp, Homo sapiens
atacccttctttttt

SEQ ID NO: 1722708 - DNA, 15 bp, Homo sapiens
tacccttcttttttc

SEQ ID NO: 1722709 - DNA, 15 bp, Homo sapiens
acccttcttttttct

SEQ ID NO: 1722710 - DNA, 15 bp, Homo sapiens
cccttcttttttctt

SEQ ID NO: 1722711 - DNA, 15 bp, Homo sapiens
ccttcttttttcttt

SEQ ID NO: 1722712 - DNA, 15 bp, Homo sapiens
ttcttttttctttta

SEQ ID NO: 1722713 - DNA, 15 bp, Homo sapiens
tcttttttcttttag

SEQ ID NO: 1722714 - DNA, 15 bp, Homo sapiens
cttttttcttttagc

SEQ ID NO: 1722715 - DNA, 15 bp, Homo sapiens
ttttttcttttagcc

SEQ ID NO: 1722716 - DNA, 15 bp, Homo sapiens
tttttcttttagcct

SEQ ID NO: 1722717 - DNA, 15 bp, Homo sapiens
ttttcttttagccta

SEQ ID NO: 1722718 - DNA, 15 bp, Homo sapiens
tttcttttagcctaa

SEQ ID NO: 1722719 - DNA, 15 bp, Homo sapiens
ttcttttagcctaaa

SEQ ID NO: 1722720 - DNA, 15 bp, Homo sapiens
tcttttagcctaaat

SEQ ID NO: 1722721 - DNA, 15 bp, Homo sapiens
cttttagcctaaatt

SEQ ID NO: 1722722 - DNA, 15 bp, Homo sapiens
ttttagcctaaattc

SEQ ID NO: 1722723 - DNA, 15 bp, Homo sapiens
tttagcctaaattct

SEQ ID NO: 1722724 - DNA, 15 bp, Homo sapiens
ttagcctaaattctg

SEQ ID NO: 1722725 - DNA, 15 bp, Homo sapiens
tagcctaaattctgt

SEQ ID NO: 1722726 - DNA, 15 bp, Homo sapiens
agcctaaattctgtt

SEQ ID NO: 1722727 - DNA, 15 bp, Homo sapiens
gcctaaattctgttt

SEQ ID NO: 1722728 - DNA, 15 bp, Homo sapiens
cctaaattctgtttt

SEQ ID NO: 1722729 - DNA, 15 bp, Homo sapiens
taaattctgttttta

SEQ ID NO: 1722730 - DNA, 15 bp, Homo sapiens
aaattctgtttttaa

SEQ ID NO: 1722731 - DNA, 15 bp, Homo sapiens
aattctgtttttaag

SEQ ID NO: 1722732 - DNA, 15 bp, Homo sapiens
attctgtttttaaga

SEQ ID NO: 1722733 - DNA, 15 bp, Homo sapiens
ttctgtttttaagat

SEQ ID NO: 1722734 - DNA, 15 bp, Homo sapiens
tctgtttttaagatg

SEQ ID NO: 1722735 - DNA, 15 bp, Homo sapiens
ctgtttttaagatgc

SEQ ID NO: 1722736 - DNA, 15 bp, Homo sapiens
tgtttttaagatgca

SEQ ID NO: 1722737 - DNA, 15 bp, Homo sapiens
gtttttaagatgcag

SEQ ID NO: 1722738 - DNA, 15 bp, Homo sapiens
tttttaagatgcagt

SEQ ID NO: 1722739 - DNA, 15 bp, Homo sapiens
ttttaagatgcagtt

SEQ ID NO: 1722740 - DNA, 15 bp, Homo sapiens
tttaagatgcagtta

SEQ ID NO: 1722741 - DNA, 15 bp, Homo sapiens
ttaagatgcagttaa

SEQ ID NO: 1722742 - DNA, 15 bp, Homo sapiens
taagatgcagttaaa

SEQ ID NO: 1722743 - DNA, 15 bp, Homo sapiens
aagatgcagttaaag

SEQ ID NO: 1722744 - DNA, 15 bp, Homo sapiens
agatgcagttaaagc

SEQ ID NO: 1722745 - DNA, 15 bp, Homo sapiens
gatgcagttaaagct

SEQ ID NO: 1722746 - DNA, 15 bp, Homo sapiens
atgcagttaaagctt

SEQ ID NO: 1722747 - DNA, 15 bp, Homo sapiens
tgcagttaaagcttc

SEQ ID NO: 1722748 - DNA, 15 bp, Homo sapiens
gcagttaaagcttct

SEQ ID NO: 1722749 - DNA, 15 bp, Homo sapiens
cagttaaagcttctc

SEQ ID NO: 1722750 - DNA, 15 bp, Homo sapiens
agttaaagcttctcc

SEQ ID NO: 1722751 - DNA, 15 bp, Homo sapiens
gttaaagcttctcct

SEQ ID NO: 1722752 - DNA, 15 bp, Homo sapiens
ttaaagcttctcctt

SEQ ID NO: 1722753 - DNA, 15 bp, Homo sapiens
taaagcttctccttt

SEQ ID NO: 1722754 - DNA, 15 bp, Homo sapiens
aaagcttctccttta

SEQ ID NO: 1722755 - DNA, 15 bp, Homo sapiens
aagcttctcctttat

SEQ ID NO: 1722756 - DNA, 15 bp, Homo sapiens
agcttctcctttatg

SEQ ID NO: 1722757 - DNA, 15 bp, Homo sapiens
gcttctcctttatgc

SEQ ID NO: 1722758 - DNA, 15 bp, Homo sapiens
cttctcctttatgca

SEQ ID NO: 1722759 - DNA, 15 bp, Homo sapiens
ttctcctttatgcat

SEQ ID NO: 1722760 - DNA, 15 bp, Homo sapiens
tctcctttatgcata

SEQ ID NO: 1722761 - DNA, 15 bp, Homo sapiens
ctcctttatgcatat

SEQ ID NO: 1722762 - DNA, 15 bp, Homo sapiens
tcctttatgcatatc

SEQ ID NO: 1722763 - DNA, 15 bp, Homo sapiens
cctttatgcatatct

SEQ ID NO: 1722764 - DNA, 15 bp, Homo sapiens
ctttatgcatatctc

SEQ ID NO: 1722765 - DNA, 15 bp, Homo sapiens
tttatgcatatctct

SEQ ID NO: 1722766 - DNA, 15 bp, Homo sapiens
ttatgcatatctctt

SEQ ID NO: 1722767 - DNA, 15 bp, Homo sapiens
tatgcatatctctta

SEQ ID NO: 1722768 - DNA, 15 bp, Homo sapiens
atgcatatctcttat

SEQ ID NO: 1722769 - DNA, 15 bp, Homo sapiens
tgcatatctcttata

SEQ ID NO: 1722770 - DNA, 15 bp, Homo sapiens
gcatatctcttataa

SEQ ID NO: 1722771 - DNA, 15 bp, Homo sapiens
catatctcttataag

SEQ ID NO: 1722772 - DNA, 15 bp, Homo sapiens
atatctcttataaga

SEQ ID NO: 1722773 - DNA, 15 bp, Homo sapiens
tatctcttataagat

SEQ ID NO: 1722774 - DNA, 15 bp, Homo sapiens
atctcttataagata

SEQ ID NO: 1722775 - DNA, 15 bp, Homo sapiens
tctcttataagatat

SEQ ID NO: 1722776 - DNA, 15 bp, Homo sapiens
ctcttataagatata

SEQ ID NO: 1722777 - DNA, 15 bp, Homo sapiens
tcttataagatatat

SEQ ID NO: 1722778 - DNA, 15 bp, Homo sapiens
cttataagatatatt

SEQ ID NO: 1722779 - DNA, 15 bp, Homo sapiens
ttataagatatatta

SEQ ID NO: 1722780 - DNA, 15 bp, Homo sapiens
tataagatatattat

SEQ ID NO: 1722781 - DNA, 15 bp, Homo sapiens
ataagatatattatt

SEQ ID NO: 1722782 - DNA, 15 bp, Homo sapiens
taagatatattattt

SEQ ID NO: 1722783 - DNA, 15 bp, Homo sapiens
aagatatattatttg

SEQ ID NO: 1722784 - DNA, 15 bp, Homo sapiens
agatatattatttgc

SEQ ID NO: 1722785 - DNA, 15 bp, Homo sapiens
gatatattatttgca

SEQ ID NO: 1722786 - DNA, 15 bp, Homo sapiens
atatattatttgcag

SEQ ID NO: 1722787 - DNA, 15 bp, Homo sapiens
tatattatttgcaga

SEQ ID NO: 1722788 - DNA, 15 bp, Homo sapiens
atattatttgcagac

SEQ ID NO: 1722789 - DNA, 15 bp, Homo sapiens
tattatttgcagact

SEQ ID NO: 1722790 - DNA, 15 bp, Homo sapiens
attatttgcagactt

SEQ ID NO: 1722791 - DNA, 15 bp, Homo sapiens
ttatttgcagacttt

SEQ ID NO: 1722792 - DNA, 15 bp, Homo sapiens
tatttgcagactttt

SEQ ID NO: 1722793 - DNA, 15 bp, Homo sapiens
atttgcagacttttc

SEQ ID NO: 1722794 - DNA, 15 bp, Homo sapiens
tttgcagacttttcc

SEQ ID NO: 1722795 - DNA, 15 bp, Homo sapiens
ttgcagacttttccc

SEQ ID NO: 1722796 - DNA, 15 bp, Homo sapiens
tgcagacttttcccc

SEQ ID NO: 1722797 - DNA, 15 bp, Homo sapiens
gcagacttttccccc

SEQ ID NO: 1722798 - DNA, 15 bp, Homo sapiens
cagacttttcccccc

SEQ ID NO: 1722799 - DNA, 15 bp, Homo sapiens
agacttttcccccca

SEQ ID NO: 1722800 - DNA, 15 bp, Homo sapiens
gacttttccccccat

SEQ ID NO: 1722801 - DNA, 15 bp, Homo sapiens
acttttccccccatt

SEQ ID NO: 1722802 - DNA, 15 bp, Homo sapiens
cttttccccccattc

SEQ ID NO: 1722803 - DNA, 15 bp, Homo sapiens
ttttccccccattct

SEQ ID NO: 1722804 - DNA, 15 bp, Homo sapiens
tttccccccattctg

SEQ ID NO: 1722805 - DNA, 15 bp, Homo sapiens
ttccccccattctgt

SEQ ID NO: 1722806 - DNA, 15 bp, Homo sapiens
tccccccattctgtg

SEQ ID NO: 1722807 - DNA, 15 bp, Homo sapiens
ccccccattctgtga

SEQ ID NO: 1722808 - DNA, 15 bp, Homo sapiens
cccccattctgtgag

SEQ ID NO: 1722809 - DNA, 15 bp, Homo sapiens
ccccattctgtgagt

SEQ ID NO: 1722810 - DNA, 15 bp, Homo sapiens
cccattctgtgagtt

SEQ ID NO: 1722811 - DNA, 15 bp, Homo sapiens
ccattctgtgagttg

SEQ ID NO: 1722812 - DNA, 15 bp, Homo sapiens
cattctgtgagttgc

SEQ ID NO: 1722813 - DNA, 15 bp, Homo sapiens
attctgtgagttgcc

SEQ ID NO: 1722814 - DNA, 15 bp, Homo sapiens
ttctgtgagttgcct

SEQ ID NO: 1722815 - DNA, 15 bp, Homo sapiens
tctgtgagttgcctt

SEQ ID NO: 1722816 - DNA, 15 bp, Homo sapiens
ctgtgagttgccttt

SEQ ID NO: 1722817 - DNA, 15 bp, Homo sapiens
tgtgagttgcctttt

SEQ ID NO: 1722818 - DNA, 15 bp, Homo sapiens
gtgagttgccttttc

SEQ ID NO: 1722819 - DNA, 15 bp, Homo sapiens
tgagttgccttttca

SEQ ID NO: 1722820 - DNA, 15 bp, Homo sapiens
gagttgccttttcac

SEQ ID NO: 1722821 - DNA, 15 bp, Homo sapiens
agttgccttttcact

SEQ ID NO: 1722822 - DNA, 15 bp, Homo sapiens
gttgccttttcactt

SEQ ID NO: 1722823 - DNA, 15 bp, Homo sapiens
ttgccttttcacttt

SEQ ID NO: 1722824 - DNA, 15 bp, Homo sapiens
tgccttttcactttc

SEQ ID NO: 1722825 - DNA, 15 bp, Homo sapiens
gccttttcactttct

SEQ ID NO: 1722826 - DNA, 15 bp, Homo sapiens
ccttttcactttctt

SEQ ID NO: 1722827 - DNA, 15 bp, Homo sapiens
cttttcactttcttg

SEQ ID NO: 1722828 - DNA, 15 bp, Homo sapiens
ttttcactttcttga

SEQ ID NO: 1722829 - DNA, 15 bp, Homo sapiens
tttcactttcttgat

SEQ ID NO: 1722830 - DNA, 15 bp, Homo sapiens
ttcactttcttgatg

SEQ ID NO: 1722831 - DNA, 15 bp, Homo sapiens
tcactttcttgatga

SEQ ID NO: 1722832 - DNA, 15 bp, Homo sapiens
cactttcttgatgat

SEQ ID NO: 1722833 - DNA, 15 bp, Homo sapiens
actttcttgatgatg

SEQ ID NO: 1722834 - DNA, 15 bp, Homo sapiens
ctttcttgatgatgt

SEQ ID NO: 1722835 - DNA, 15 bp, Homo sapiens
tttcttgatgatgtc

SEQ ID NO: 1722836 - DNA, 15 bp, Homo sapiens
ttcttgatgatgtca

SEQ ID NO: 1722837 - DNA, 15 bp, Homo sapiens
tcttgatgatgtcat

SEQ ID NO: 1722838 - DNA, 15 bp, Homo sapiens
cttgatgatgtcatt

SEQ ID NO: 1722839 - DNA, 15 bp, Homo sapiens
ttgatgatgtcattt

SEQ ID NO: 1722840 - DNA, 15 bp, Homo sapiens
tgatgatgtcatttg

SEQ ID NO: 1722841 - DNA, 15 bp, Homo sapiens
gatgatgtcatttgc

SEQ ID NO: 1722842 - DNA, 15 bp, Homo sapiens
atgatgtcatttgca

SEQ ID NO: 1722843 - DNA, 15 bp, Homo sapiens
tgatgtcatttgcag

SEQ ID NO: 1722844 - DNA, 15 bp, Homo sapiens
gatgtcatttgcagc

SEQ ID NO: 1722845 - DNA, 15 bp, Homo sapiens
atgtcatttgcagcg

SEQ ID NO: 1722846 - DNA, 15 bp, Homo sapiens
tgtcatttgcagcgt

SEQ ID NO: 1722847 - DNA, 15 bp, Homo sapiens
gtcatttgcagcgta

SEQ ID NO: 1722848 - DNA, 15 bp, Homo sapiens
tcatttgcagcgtag

SEQ ID NO: 1722849 - DNA, 15 bp, Homo sapiens
catttgcagcgtagg

SEQ ID NO: 1722850 - DNA, 15 bp, Homo sapiens
atttgcagcgtagga

SEQ ID NO: 1722851 - DNA, 15 bp, Homo sapiens
tttgcagcgtaggat

SEQ ID NO: 1722852 - DNA, 15 bp, Homo sapiens
ttgcagcgtaggatt

SEQ ID NO: 1722853 - DNA, 15 bp, Homo sapiens
tgcagcgtaggattt

SEQ ID NO: 1722854 - DNA, 15 bp, Homo sapiens
gcagcgtaggatttt

SEQ ID NO: 1722855 - DNA, 15 bp, Homo sapiens
cagcgtaggatttta

SEQ ID NO: 1722856 - DNA, 15 bp, Homo sapiens
agcgtaggattttaa

SEQ ID NO: 1722857 - DNA, 15 bp, Homo sapiens
gcgtaggattttaat

SEQ ID NO: 1722858 - DNA, 15 bp, Homo sapiens
cgtaggattttaatt

SEQ ID NO: 1722859 - DNA, 15 bp, Homo sapiens
gtaggattttaattt

SEQ ID NO: 1722860 - DNA, 15 bp, Homo sapiens
taggattttaatttt

SEQ ID NO: 1722861 - DNA, 15 bp, Homo sapiens
aggattttaattttg

SEQ ID NO: 1722862 - DNA, 15 bp, Homo sapiens
ggattttaattttga

SEQ ID NO: 1722863 - DNA, 15 bp, Homo sapiens
gattttaattttgat

SEQ ID NO: 1722864 - DNA, 15 bp, Homo sapiens
attttaattttgatg

SEQ ID NO: 1722865 - DNA, 15 bp, Homo sapiens
ttttaattttgatga

SEQ ID NO: 1722866 - DNA, 15 bp, Homo sapiens
tttaattttgatgaa

SEQ ID NO: 1722867 - DNA, 15 bp, Homo sapiens
ttaattttgatgaag

SEQ ID NO: 1722868 - DNA, 15 bp, Homo sapiens
taattttgatgaagt

SEQ ID NO: 1722869 - DNA, 15 bp, Homo sapiens
aattttgatgaagtc

SEQ ID NO: 1722870 - DNA, 15 bp, Homo sapiens
attttgatgaagtcc

SEQ ID NO: 1722871 - DNA, 15 bp, Homo sapiens
ttttgatgaagtcca

SEQ ID NO: 1722872 - DNA, 15 bp, Homo sapiens
tttgatgaagtccag

SEQ ID NO: 1722873 - DNA, 15 bp, Homo sapiens
ttgatgaagtccagt

SEQ ID NO: 1722874 - DNA, 15 bp, Homo sapiens
tgatgaagtccagtt

SEQ ID NO: 1722875 - DNA, 15 bp, Homo sapiens
gatgaagtccagttt

SEQ ID NO: 1722876 - DNA, 15 bp, Homo sapiens
atgaagtccagtttt

SEQ ID NO: 1722877 - DNA, 15 bp, Homo sapiens
tgaagtccagttttc

SEQ ID NO: 1722878 - DNA, 15 bp, Homo sapiens
gaagtccagttttct

SEQ ID NO: 1722879 - DNA, 15 bp, Homo sapiens
aagtccagttttcta

SEQ ID NO: 1722880 - DNA, 15 bp, Homo sapiens
agtccagttttctat

SEQ ID NO: 1722881 - DNA, 15 bp, Homo sapiens
gtccagttttctatt

SEQ ID NO: 1722882 - DNA, 15 bp, Homo sapiens
tccagttttctattt

SEQ ID NO: 1722883 - DNA, 15 bp, Homo sapiens
ccagttttctatttt

SEQ ID NO: 1722884 - DNA, 15 bp, Homo sapiens
cagttttctattttt

SEQ ID NO: 1722885 - DNA, 15 bp, Homo sapiens
agttttctatttttt

SEQ ID NO: 1722886 - DNA, 15 bp, Homo sapiens
gttttctattttttt

SEQ ID NO: 1722887 - DNA, 15 bp, Homo sapiens
ttttctatttttttt

SEQ ID NO: 1722888 - DNA, 15 bp, Homo sapiens
tttctattttttttt

SEQ ID NO: 1722889 - DNA, 15 bp, Homo sapiens
ttctatttttttttt

SEQ ID NO: 1722890 - DNA, 15 bp, Homo sapiens
ctattttttttttgg

SEQ ID NO: 1722891 - DNA, 15 bp, Homo sapiens
tattttttttttggt

SEQ ID NO: 1722892 - DNA, 15 bp, Homo sapiens
attttttttttggtg

SEQ ID NO: 1722893 - DNA, 15 bp, Homo sapiens
ttttttttttggtgg

SEQ ID NO: 1722894 - DNA, 15 bp, Homo sapiens
tttttttttggtggt

SEQ ID NO: 1722895 - DNA, 15 bp, Homo sapiens
ttttttttggtggtg

SEQ ID NO: 1722896 - DNA, 15 bp, Homo sapiens
tttttttggtggtgg

SEQ ID NO: 1722897 - DNA, 15 bp, Homo sapiens
ttttttggtggtggt

SEQ ID NO: 1722898 - DNA, 15 bp, Homo sapiens
tttttggtggtggtt

SEQ ID NO: 1722899 - DNA, 15 bp, Homo sapiens
ttttggtggtggttt

SEQ ID NO: 1722900 - DNA, 15 bp, Homo sapiens
tttggtggtggtttt

SEQ ID NO: 1722901 - DNA, 15 bp, Homo sapiens
ttggtggtggttttt

SEQ ID NO: 1722902 - DNA, 15 bp, Homo sapiens
tggtggtggtttttt

SEQ ID NO: 1722903 - DNA, 15 bp, Homo sapiens
ggtggtggttttttt

SEQ ID NO: 1722904 - DNA, 15 bp, Homo sapiens
gtggtggtttttttt

SEQ ID NO: 1722905 - DNA, 15 bp, Homo sapiens
tggtggttttttttt

SEQ ID NO: 1722906 - DNA, 15 bp, Homo sapiens
ggtggtttttttttt

SEQ ID NO: 1722907 - DNA, 15 bp, Homo sapiens
gtggttttttttttg

SEQ ID NO: 1722908 - DNA, 15 bp, Homo sapiens
tggttttttttttgg

SEQ ID NO: 1722909 - DNA, 15 bp, Homo sapiens
ggttttttttttggt

SEQ ID NO: 1722910 - DNA, 15 bp, Homo sapiens
gttttttttttggtt

SEQ ID NO: 1722911 - DNA, 15 bp, Homo sapiens
ttttttttttggttg

SEQ ID NO: 1722912 - DNA, 15 bp, Homo sapiens
tttttttttggttgc

SEQ ID NO: 1722913 - DNA, 15 bp, Homo sapiens
ttttttttggttgct

SEQ ID NO: 1722914 - DNA, 15 bp, Homo sapiens
tttttttggttgctt

SEQ ID NO: 1722915 - DNA, 15 bp, Homo sapiens
ttttttggttgcttg

SEQ ID NO: 1722916 - DNA, 15 bp, Homo sapiens
tttttggttgcttgg

SEQ ID NO: 1722917 - DNA, 15 bp, Homo sapiens
ttttggttgcttggg

SEQ ID NO: 1722918 - DNA, 15 bp, Homo sapiens
tttggttgcttgggc

SEQ ID NO: 1722919 - DNA, 15 bp, Homo sapiens
ttggttgcttgggct

SEQ ID NO: 1722920 - DNA, 15 bp, Homo sapiens
tggttgcttgggctt

SEQ ID NO: 1722921 - DNA, 15 bp, Homo sapiens
ggttgcttgggcttt

SEQ ID NO: 1722922 - DNA, 15 bp, Homo sapiens
gttgcttgggctttt

SEQ ID NO: 1722923 - DNA, 15 bp, Homo sapiens
ttgcttgggcttttg

SEQ ID NO: 1722924 - DNA, 15 bp, Homo sapiens
tgcttgggcttttga

SEQ ID NO: 1722925 - DNA, 15 bp, Homo sapiens
gcttgggcttttgat

SEQ ID NO: 1722926 - DNA, 15 bp, Homo sapiens
cttgggcttttgatg

SEQ ID NO: 1722927 - DNA, 15 bp, Homo sapiens
ttgggcttttgatgt

SEQ ID NO: 1722928 - DNA, 15 bp, Homo sapiens
tgggcttttgatgtt

SEQ ID NO: 1722929 - DNA, 15 bp, Homo sapiens
gggcttttgatgttg

SEQ ID NO: 1722930 - DNA, 15 bp, Homo sapiens
ggcttttgatgttgt

SEQ ID NO: 1722931 - DNA, 15 bp, Homo sapiens
gcttttgatgttgta

SEQ ID NO: 1722932 - DNA, 15 bp, Homo sapiens
cttttgatgttgtat

SEQ ID NO: 1722933 - DNA, 15 bp, Homo sapiens
ttttgatgttgtatc

SEQ ID NO: 1722934 - DNA, 15 bp, Homo sapiens
tttgatgttgtatct

SEQ ID NO: 1722935 - DNA, 15 bp, Homo sapiens
ttgatgttgtatcta

SEQ ID NO: 1722936 - DNA, 15 bp, Homo sapiens
tgatgttgtatctaa

SEQ ID NO: 1722937 - DNA, 15 bp, Homo sapiens
gatgttgtatctaag

SEQ ID NO: 1722938 - DNA, 15 bp, Homo sapiens
atgttgtatctaaga

SEQ ID NO: 1722939 - DNA, 15 bp, Homo sapiens
tgttgtatctaagaa

SEQ ID NO: 1722940 - DNA, 15 bp, Homo sapiens
gttgtatctaagaag

SEQ ID NO: 1722941 - DNA, 15 bp, Homo sapiens
ttgtatctaagaagg

SEQ ID NO: 1722942 - DNA, 15 bp, Homo sapiens
tgtatctaagaaggc

SEQ ID NO: 1722943 - DNA, 15 bp, Homo sapiens
gtatctaagaaggcc

SEQ ID NO: 1722944 - DNA, 15 bp, Homo sapiens
tatctaagaaggcct

SEQ ID NO: 1722945 - DNA, 15 bp, Homo sapiens
atctaagaaggcctt

SEQ ID NO: 1722946 - DNA, 15 bp, Homo sapiens
tctaagaaggccttg

SEQ ID NO: 1722947 - DNA, 15 bp, Homo sapiens
ctaagaaggccttga

SEQ ID NO: 1722948 - DNA, 15 bp, Homo sapiens
taagaaggccttgac

SEQ ID NO: 1722949 - DNA, 15 bp, Homo sapiens
aagaaggccttgact

SEQ ID NO: 1722950 - DNA, 15 bp, Homo sapiens
agaaggccttgacta

SEQ ID NO: 1722951 - DNA, 15 bp, Homo sapiens
gaaggccttgactaa

SEQ ID NO: 1722952 - DNA, 15 bp, Homo sapiens
aaggccttgactaac

SEQ ID NO: 1722953 - DNA, 15 bp, Homo sapiens
aggccttgactaacc

SEQ ID NO: 1722954 - DNA, 15 bp, Homo sapiens
ggccttgactaaccc

SEQ ID NO: 1722955 - DNA, 15 bp, Homo sapiens
gccttgactaaccca

SEQ ID NO: 1722956 - DNA, 15 bp, Homo sapiens
ccttgactaacccaa

SEQ ID NO: 1722957 - DNA, 15 bp, Homo sapiens
cttgactaacccaag

SEQ ID NO: 1722958 - DNA, 15 bp, Homo sapiens
ttgactaacccaagg

SEQ ID NO: 1722959 - DNA, 15 bp, Homo sapiens
tgactaacccaaggt

SEQ ID NO: 1722960 - DNA, 15 bp, Homo sapiens
gactaacccaaggtc

SEQ ID NO: 1722961 - DNA, 15 bp, Homo sapiens
actaacccaaggtca

SEQ ID NO: 1722962 - DNA, 15 bp, Homo sapiens
ctaacccaaggtcat

SEQ ID NO: 1722963 - DNA, 15 bp, Homo sapiens
taacccaaggtcatg

SEQ ID NO: 1722964 - DNA, 15 bp, Homo sapiens
aacccaaggtcatga

SEQ ID NO: 1722965 - DNA, 15 bp, Homo sapiens
acccaaggtcatgaa

SEQ ID NO: 1722966 - DNA, 15 bp, Homo sapiens
cccaaggtcatgaag

SEQ ID NO: 1722967 - DNA, 15 bp, Homo sapiens
ccaaggtcatgaaga

SEQ ID NO: 1722968 - DNA, 15 bp, Homo sapiens
caaggtcatgaagac

SEQ ID NO: 1722969 - DNA, 15 bp, Homo sapiens
aaggtcatgaagact

SEQ ID NO: 1722970 - DNA, 15 bp, Homo sapiens
aggtcatgaagactt

SEQ ID NO: 1722971 - DNA, 15 bp, Homo sapiens
ggtcatgaagactta

SEQ ID NO: 1722972 - DNA, 15 bp, Homo sapiens
gtcatgaagacttat

SEQ ID NO: 1722973 - DNA, 15 bp, Homo sapiens
tcatgaagacttatt

SEQ ID NO: 1722974 - DNA, 15 bp, Homo sapiens
catgaagacttattc

SEQ ID NO: 1722975 - DNA, 15 bp, Homo sapiens
atgaagacttattct

SEQ ID NO: 1722976 - DNA, 15 bp, Homo sapiens
tgaagacttattctg

SEQ ID NO: 1722977 - DNA, 15 bp, Homo sapiens
gaagacttattctgt

SEQ ID NO: 1722978 - DNA, 15 bp, Homo sapiens
aagacttattctgtg

SEQ ID NO: 1722979 - DNA, 15 bp, Homo sapiens
agacttattctgtgc

SEQ ID NO: 1722980 - DNA, 15 bp, Homo sapiens
gacttattctgtgct

SEQ ID NO: 1722981 - DNA, 15 bp, Homo sapiens
acttattctgtgctt

SEQ ID NO: 1722982 - DNA, 15 bp, Homo sapiens
cttattctgtgcttt

SEQ ID NO: 1722983 - DNA, 15 bp, Homo sapiens
ttattctgtgctttc

SEQ ID NO: 1722984 - DNA, 15 bp, Homo sapiens
tattctgtgctttct

SEQ ID NO: 1722985 - DNA, 15 bp, Homo sapiens
attctgtgctttctt

SEQ ID NO: 1722986 - DNA, 15 bp, Homo sapiens
ttctgtgctttcttc

SEQ ID NO: 1722987 - DNA, 15 bp, Homo sapiens
tctgtgctttcttct

SEQ ID NO: 1722988 - DNA, 15 bp, Homo sapiens
tgtgctttcttctaa

SEQ ID NO: 1722989 - DNA, 15 bp, Homo sapiens
gtgctttcttctaaa

SEQ ID NO: 1722990 - DNA, 15 bp, Homo sapiens
tgctttcttctaaaa

SEQ ID NO: 1722991 - DNA, 15 bp, Homo sapiens
gctttcttctaaaag

SEQ ID NO: 1722992 - DNA, 15 bp, Homo sapiens
ctttcttctaaaagt

SEQ ID NO: 1722993 - DNA, 15 bp, Homo sapiens
tttcttctaaaagtc

SEQ ID NO: 1722994 - DNA, 15 bp, Homo sapiens
ttcttctaaaagtca

SEQ ID NO: 1722995 - DNA, 15 bp, Homo sapiens
tcttctaaaagtcat

SEQ ID NO: 1722996 - DNA, 15 bp, Homo sapiens
cttctaaaagtcata

SEQ ID NO: 1722997 - DNA, 15 bp, Homo sapiens
ttctaaaagtcatat

SEQ ID NO: 1722998 - DNA, 15 bp, Homo sapiens
tctaaaagtcatatg

SEQ ID NO: 1722999 - DNA, 15 bp, Homo sapiens
ctaaaagtcatatgg

SEQ ID NO: 1723000 - DNA, 15 bp, Homo sapiens
taaaagtcatatggt

SEQ ID NO: 1723001 - DNA, 15 bp, Homo sapiens
aaaagtcatatggtt

SEQ ID NO: 1723002 - DNA, 15 bp, Homo sapiens
aaagtcatatggttt

SEQ ID NO: 1723003 - DNA, 15 bp, Homo sapiens
aagtcatatggtttt

SEQ ID NO: 1723004 - DNA, 15 bp, Homo sapiens
agtcatatggttttt

SEQ ID NO: 1723005 - DNA, 15 bp, Homo sapiens
gtcatatggttttta

SEQ ID NO: 1723006 - DNA, 15 bp, Homo sapiens
tcatatggtttttag

SEQ ID NO: 1723007 - DNA, 15 bp, Homo sapiens
catatggtttttagt

SEQ ID NO: 1723008 - DNA, 15 bp, Homo sapiens
atatggtttttagtt

SEQ ID NO: 1723009 - DNA, 15 bp, Homo sapiens
tatggtttttagttc

SEQ ID NO: 1723010 - DNA, 15 bp, Homo sapiens
atggtttttagttct

SEQ ID NO: 1723011 - DNA, 15 bp, Homo sapiens
tggtttttagttctt

SEQ ID NO: 1723012 - DNA, 15 bp, Homo sapiens
ggtttttagttcttg

SEQ ID NO: 1723013 - DNA, 15 bp, Homo sapiens
gtttttagttcttgt

SEQ ID NO: 1723014 - DNA, 15 bp, Homo sapiens
tttttagttcttgtc

SEQ ID NO: 1723015 - DNA, 15 bp, Homo sapiens
ttttagttcttgtca

SEQ ID NO: 1723016 - DNA, 15 bp, Homo sapiens
tttagttcttgtcag

SEQ ID NO: 1723017 - DNA, 15 bp, Homo sapiens
ttagttcttgtcagt

SEQ ID NO: 1723018 - DNA, 15 bp, Homo sapiens
tagttcttgtcagtc

SEQ ID NO: 1723019 - DNA, 15 bp, Homo sapiens
agttcttgtcagtct

SEQ ID NO: 1723020 - DNA, 15 bp, Homo sapiens
gttcttgtcagtctt

SEQ ID NO: 1723021 - DNA, 15 bp, Homo sapiens
ttcttgtcagtcttg

SEQ ID NO: 1723022 - DNA, 15 bp, Homo sapiens
tcttgtcagtcttgg

SEQ ID NO: 1723023 - DNA, 15 bp, Homo sapiens
cttgtcagtcttggg

SEQ ID NO: 1723024 - DNA, 15 bp, Homo sapiens
ttgtcagtcttgggt

SEQ ID NO: 1723025 - DNA, 15 bp, Homo sapiens
tgtcagtcttgggtt

SEQ ID NO: 1723026 - DNA, 15 bp, Homo sapiens
gtcagtcttgggttt

SEQ ID NO: 1723027 - DNA, 15 bp, Homo sapiens
tcagtcttgggtttt

SEQ ID NO: 1723028 - DNA, 15 bp, Homo sapiens
cagtcttgggttttt

SEQ ID NO: 1723029 - DNA, 15 bp, Homo sapiens
agtcttgggtttttt

SEQ ID NO: 1723030 - DNA, 15 bp, Homo sapiens
gtcttgggttttttt

SEQ ID NO: 1723031 - DNA, 15 bp, Homo sapiens
tcttgggtttttttt

SEQ ID NO: 1723032 - DNA, 15 bp, Homo sapiens
cttgggttttttttt

SEQ ID NO: 1723033 - DNA, 15 bp, Homo sapiens
tgggtttttttttgt

SEQ ID NO: 1723034 - DNA, 15 bp, Homo sapiens
gggtttttttttgtt

SEQ ID NO: 1723035 - DNA, 15 bp, Homo sapiens
ttttttttttgagtt

SEQ ID NO: 1723036 - DNA, 15 bp, Homo sapiens
tttttttttgagtta

SEQ ID NO: 1723037 - DNA, 15 bp, Homo sapiens
ttttttttgagttaa

SEQ ID NO: 1723038 - DNA, 15 bp, Homo sapiens
tttttttgagttaat

SEQ ID NO: 1723039 - DNA, 15 bp, Homo sapiens
ttttttgagttaatt

SEQ ID NO: 1723040 - DNA, 15 bp, Homo sapiens
tttttgagttaattt

SEQ ID NO: 1723041 - DNA, 15 bp, Homo sapiens
ttttgagttaatttt

SEQ ID NO: 1723042 - DNA, 15 bp, Homo sapiens
tttgagttaattttt

SEQ ID NO: 1723043 - DNA, 15 bp, Homo sapiens
ttgagttaatttttg

SEQ ID NO: 1723044 - DNA, 15 bp, Homo sapiens
tgagttaatttttgt

SEQ ID NO: 1723045 - DNA, 15 bp, Homo sapiens
gagttaatttttgtg

SEQ ID NO: 1723046 - DNA, 15 bp, Homo sapiens
agttaatttttgtgt

SEQ ID NO: 1723047 - DNA, 15 bp, Homo sapiens
gttaatttttgtgta

SEQ ID NO: 1723048 - DNA, 15 bp, Homo sapiens
ttaatttttgtgtat

SEQ ID NO: 1723049 - DNA, 15 bp, Homo sapiens
taatttttgtgtatg

SEQ ID NO: 1723050 - DNA, 15 bp, Homo sapiens
aatttttgtgtatga

SEQ ID NO: 1723051 - DNA, 15 bp, Homo sapiens
atttttgtgtatgat

SEQ ID NO: 1723052 - DNA, 15 bp, Homo sapiens
tttttgtgtatgatg

SEQ ID NO: 1723053 - DNA, 15 bp, Homo sapiens
ttttgtgtatgatgt

SEQ ID NO: 1723054 - DNA, 15 bp, Homo sapiens
tttgtgtatgatgtg

SEQ ID NO: 1723055 - DNA, 15 bp, Homo sapiens
ttgtgtatgatgtga

SEQ ID NO: 1723056 - DNA, 15 bp, Homo sapiens
tgtgtatgatgtgag

SEQ ID NO: 1723057 - DNA, 15 bp, Homo sapiens
gtgtatgatgtgagg

SEQ ID NO: 1723058 - DNA, 15 bp, Homo sapiens
tgtatgatgtgagga

SEQ ID NO: 1723059 - DNA, 15 bp, Homo sapiens
gtatgatgtgaggaa

SEQ ID NO: 1723060 - DNA, 15 bp, Homo sapiens
tatgatgtgaggaag

SEQ ID NO: 1723061 - DNA, 15 bp, Homo sapiens
atgatgtgaggaaga

SEQ ID NO: 1723062 - DNA, 15 bp, Homo sapiens
tgatgtgaggaagag

SEQ ID NO: 1723063 - DNA, 15 bp, Homo sapiens
gatgtgaggaagagg

SEQ ID NO: 1723064 - DNA, 15 bp, Homo sapiens
atgtgaggaagaggt

SEQ ID NO: 1723065 - DNA, 15 bp, Homo sapiens
tgtgaggaagaggtc

SEQ ID NO: 1723066 - DNA, 15 bp, Homo sapiens
gtgaggaagaggtct

SEQ ID NO: 1723067 - DNA, 15 bp, Homo sapiens
tgaggaagaggtcta

SEQ ID NO: 1723068 - DNA, 15 bp, Homo sapiens
gaggaagaggtctaa

SEQ ID NO: 1723069 - DNA, 15 bp, Homo sapiens
aggaagaggtctaac

SEQ ID NO: 1723070 - DNA, 15 bp, Homo sapiens
ggaagaggtctaact

SEQ ID NO: 1723071 - DNA, 15 bp, Homo sapiens
gaagaggtctaactc

SEQ ID NO: 1723072 - DNA, 15 bp, Homo sapiens
aagaggtctaactcc

SEQ ID NO: 1723073 - DNA, 15 bp, Homo sapiens
agaggtctaactcca

SEQ ID NO: 1723074 - DNA, 15 bp, Homo sapiens
gaggtctaactccag

SEQ ID NO: 1723075 - DNA, 15 bp, Homo sapiens
aggtctaactccagt

SEQ ID NO: 1723076 - DNA, 15 bp, Homo sapiens
ggtctaactccagtc

SEQ ID NO: 1723077 - DNA, 15 bp, Homo sapiens
gtctaactccagtct

SEQ ID NO: 1723078 - DNA, 15 bp, Homo sapiens
tctaactccagtctt

SEQ ID NO: 1723079 - DNA, 15 bp, Homo sapiens
ctaactccagtcttt

SEQ ID NO: 1723080 - DNA, 15 bp, Homo sapiens
taactccagtctttt

SEQ ID NO: 1723081 - DNA, 15 bp, Homo sapiens
aactccagtcttttg

SEQ ID NO: 1723082 - DNA, 15 bp, Homo sapiens
actccagtcttttga

SEQ ID NO: 1723083 - DNA, 15 bp, Homo sapiens
ctccagtcttttgaa

SEQ ID NO: 1723084 - DNA, 15 bp, Homo sapiens
tccagtcttttgaat

SEQ ID NO: 1723085 - DNA, 15 bp, Homo sapiens
ccagtcttttgaatg

SEQ ID NO: 1723086 - DNA, 15 bp, Homo sapiens
cagtcttttgaatgt

SEQ ID NO: 1723087 - DNA, 15 bp, Homo sapiens
agtcttttgaatgtg

SEQ ID NO: 1723088 - DNA, 15 bp, Homo sapiens
gtcttttgaatgtgg

SEQ ID NO: 1723089 - DNA, 15 bp, Homo sapiens
tcttttgaatgtgga

SEQ ID NO: 1723090 - DNA, 15 bp, Homo sapiens
cttttgaatgtggat

SEQ ID NO: 1723091 - DNA, 15 bp, Homo sapiens
ttttgaatgtggata

SEQ ID NO: 1723092 - DNA, 15 bp, Homo sapiens
tttgaatgtggatat

SEQ ID NO: 1723093 - DNA, 15 bp, Homo sapiens
ttgaatgtggatatc

SEQ ID NO: 1723094 - DNA, 15 bp, Homo sapiens
tgaatgtggatatcc

SEQ ID NO: 1723095 - DNA, 15 bp, Homo sapiens
gaatgtggatatcca

SEQ ID NO: 1723096 - DNA, 15 bp, Homo sapiens
aatgtggatatccag

SEQ ID NO: 1723097 - DNA, 15 bp, Homo sapiens
atgtggatatccagt

SEQ ID NO: 1723098 - DNA, 15 bp, Homo sapiens
tgtggatatccagtt

SEQ ID NO: 1723099 - DNA, 15 bp, Homo sapiens
gtggatatccagttg

SEQ ID NO: 1723100 - DNA, 15 bp, Homo sapiens
tggatatccagttgt

SEQ ID NO: 1723101 - DNA, 15 bp, Homo sapiens
ggatatccagttgtc

SEQ ID NO: 1723102 - DNA, 15 bp, Homo sapiens
gatatccagttgtct

SEQ ID NO: 1723103 - DNA, 15 bp, Homo sapiens
atatccagttgtctc

SEQ ID NO: 1723104 - DNA, 15 bp, Homo sapiens
tatccagttgtctct

SEQ ID NO: 1723105 - DNA, 15 bp, Homo sapiens
atccagttgtctctg

SEQ ID NO: 1723106 - DNA, 15 bp, Homo sapiens
tccagttgtctctgc

SEQ ID NO: 1723107 - DNA, 15 bp, Homo sapiens
ccagttgtctctgca

SEQ ID NO: 1723108 - DNA, 15 bp, Homo sapiens
cagttgtctctgcac

SEQ ID NO: 1723109 - DNA, 15 bp, Homo sapiens
agttgtctctgcacc

SEQ ID NO: 1723110 - DNA, 15 bp, Homo sapiens
gttgtctctgcacca

SEQ ID NO: 1723111 - DNA, 15 bp, Homo sapiens
ttgtctctgcaccac

SEQ ID NO: 1723112 - DNA, 15 bp, Homo sapiens
tgtctctgcaccact

SEQ ID NO: 1723113 - DNA, 15 bp, Homo sapiens
gtctctgcaccactt

SEQ ID NO: 1723114 - DNA, 15 bp, Homo sapiens
tctctgcaccactta

SEQ ID NO: 1723115 - DNA, 15 bp, Homo sapiens
ctctgcaccacttat

SEQ ID NO: 1723116 - DNA, 15 bp, Homo sapiens
tctgcaccacttatg

SEQ ID NO: 1723117 - DNA, 15 bp, Homo sapiens
ctgcaccacttatgg

SEQ ID NO: 1723118 - DNA, 15 bp, Homo sapiens
tgcaccacttatgga

SEQ ID NO: 1723119 - DNA, 15 bp, Homo sapiens
gcaccacttatggaa

SEQ ID NO: 1723120 - DNA, 15 bp, Homo sapiens
caccacttatggaaa

SEQ ID NO: 1723121 - DNA, 15 bp, Homo sapiens
accacttatggaaaa

SEQ ID NO: 1723122 - DNA, 15 bp, Homo sapiens
ccacttatggaaaag

SEQ ID NO: 1723123 - DNA, 15 bp, Homo sapiens
cacttatggaaaaga

SEQ ID NO: 1723124 - DNA, 15 bp, Homo sapiens
acttatggaaaagac

SEQ ID NO: 1723125 - DNA, 15 bp, Homo sapiens
cttatggaaaagact

SEQ ID NO: 1723126 - DNA, 15 bp, Homo sapiens
ttatggaaaagacta

SEQ ID NO: 1723127 - DNA, 15 bp, Homo sapiens
tatggaaaagactat

SEQ ID NO: 1723128 - DNA, 15 bp, Homo sapiens
atggaaaagactatt

SEQ ID NO: 1723129 - DNA, 15 bp, Homo sapiens
tggaaaagactattc

SEQ ID NO: 1723130 - DNA, 15 bp, Homo sapiens
ggaaaagactattct

SEQ ID NO: 1723131 - DNA, 15 bp, Homo sapiens
gaaaagactattctt

SEQ ID NO: 1723132 - DNA, 15 bp, Homo sapiens
aaaagactattcttt

SEQ ID NO: 1723133 - DNA, 15 bp, Homo sapiens
aaagactattctttc

SEQ ID NO: 1723134 - DNA, 15 bp, Homo sapiens
aagactattctttct

SEQ ID NO: 1723135 - DNA, 15 bp, Homo sapiens
agactattctttctt

SEQ ID NO: 1723136 - DNA, 15 bp, Homo sapiens
gactattctttcttc

SEQ ID NO: 1723137 - DNA, 15 bp, Homo sapiens
actattctttcttca

SEQ ID NO: 1723138 - DNA, 15 bp, Homo sapiens
ctattctttcttcat

SEQ ID NO: 1723139 - DNA, 15 bp, Homo sapiens
tattctttcttcatt

SEQ ID NO: 1723140 - DNA, 15 bp, Homo sapiens
attctttcttcattg

SEQ ID NO: 1723141 - DNA, 15 bp, Homo sapiens
ttctttcttcattga

SEQ ID NO: 1723142 - DNA, 15 bp, Homo sapiens
tctttcttcattgaa

SEQ ID NO: 1723143 - DNA, 15 bp, Homo sapiens
ctttcttcattgaat

SEQ ID NO: 1723144 - DNA, 15 bp, Homo sapiens
tttcttcattgaatt

SEQ ID NO: 1723145 - DNA, 15 bp, Homo sapiens
ttcttcattgaattg

SEQ ID NO: 1723146 - DNA, 15 bp, Homo sapiens
tcttcattgaattgt

SEQ ID NO: 1723147 - DNA, 15 bp, Homo sapiens
cttcattgaattgtt

SEQ ID NO: 1723148 - DNA, 15 bp, Homo sapiens
ttcattgaattgttt

SEQ ID NO: 1723149 - DNA, 15 bp, Homo sapiens
tcattgaattgtttt

SEQ ID NO: 1723150 - DNA, 15 bp, Homo sapiens
cattgaattgttttg

SEQ ID NO: 1723151 - DNA, 15 bp, Homo sapiens
attgaattgttttgg

SEQ ID NO: 1723152 - DNA, 15 bp, Homo sapiens
ttgaattgttttggt

SEQ ID NO: 1723153 - DNA, 15 bp, Homo sapiens
tgaattgttttggtg

SEQ ID NO: 1723154 - DNA, 15 bp, Homo sapiens
gaattgttttggtgc

SEQ ID NO: 1723155 - DNA, 15 bp, Homo sapiens
aattgttttggtgcc

SEQ ID NO: 1723156 - DNA, 15 bp, Homo sapiens
attgttttggtgccc

SEQ ID NO: 1723157 - DNA, 15 bp, Homo sapiens
ttgttttggtgccct

SEQ ID NO: 1723158 - DNA, 15 bp, Homo sapiens
tgttttggtgccctt

SEQ ID NO: 1723159 - DNA, 15 bp, Homo sapiens
gttttggtgcccttg

SEQ ID NO: 1723160 - DNA, 15 bp, Homo sapiens
ttttggtgcccttga

SEQ ID NO: 1723161 - DNA, 15 bp, Homo sapiens
tttggtgcccttgat

SEQ ID NO: 1723162 - DNA, 15 bp, Homo sapiens
ttggtgcccttgatg

SEQ ID NO: 1723163 - DNA, 15 bp, Homo sapiens
tggtgcccttgatga

SEQ ID NO: 1723164 - DNA, 15 bp, Homo sapiens
ggtgcccttgatgaa

SEQ ID NO: 1723165 - DNA, 15 bp, Homo sapiens
gtgcccttgatgaaa

SEQ ID NO: 1723166 - DNA, 15 bp, Homo sapiens
tgcccttgatgaaaa

SEQ ID NO: 1723167 - DNA, 15 bp, Homo sapiens
gcccttgatgaaaat

SEQ ID NO: 1723168 - DNA, 15 bp, Homo sapiens
cccttgatgaaaatc

SEQ ID NO: 1723169 - DNA, 15 bp, Homo sapiens
ccttgatgaaaatca

SEQ ID NO: 1723170 - DNA, 15 bp, Homo sapiens
cttgatgaaaatcag

SEQ ID NO: 1723171 - DNA, 15 bp, Homo sapiens
ttgatgaaaatcagt

SEQ ID NO: 1723172 - DNA, 15 bp, Homo sapiens
tgatgaaaatcagtt

SEQ ID NO: 1723173 - DNA, 15 bp, Homo sapiens
gatgaaaatcagttg

SEQ ID NO: 1723174 - DNA, 15 bp, Homo sapiens
atgaaaatcagttga

SEQ ID NO: 1723175 - DNA, 15 bp, Homo sapiens
tgaaaatcagttgac

SEQ ID NO: 1723176 - DNA, 15 bp, Homo sapiens
gaaaatcagttgact

SEQ ID NO: 1723177 - DNA, 15 bp, Homo sapiens
aaaatcagttgacta

SEQ ID NO: 1723178 - DNA, 15 bp, Homo sapiens
aaatcagttgactat

SEQ ID NO: 1723179 - DNA, 15 bp, Homo sapiens
aatcagttgactata

SEQ ID NO: 1723180 - DNA, 15 bp, Homo sapiens
atcagttgactataa

SEQ ID NO: 1723181 - DNA, 15 bp, Homo sapiens
tcagttgactataaa

SEQ ID NO: 1723182 - DNA, 15 bp, Homo sapiens
cagttgactataaaa

SEQ ID NO: 1723183 - DNA, 15 bp, Homo sapiens
agttgactataaaaa

SEQ ID NO: 1723184 - DNA, 15 bp, Homo sapiens
gttgactataaaaac

SEQ ID NO: 1723185 - DNA, 15 bp, Homo sapiens
ttgactataaaaacc

SEQ ID NO: 1723186 - DNA, 15 bp, Homo sapiens
tgactataaaaacca

SEQ ID NO: 1723187 - DNA, 15 bp, Homo sapiens
gactataaaaaccag

SEQ ID NO: 1723188 - DNA, 15 bp, Homo sapiens
actataaaaaccagg

SEQ ID NO: 1723189 - DNA, 15 bp, Homo sapiens
ctataaaaaccaggg

SEQ ID NO: 1723190 - DNA, 15 bp, Homo sapiens
tataaaaaccagggt

SEQ ID NO: 1723191 - DNA, 15 bp, Homo sapiens
ataaaaaccagggtt

SEQ ID NO: 1723192 - DNA, 15 bp, Homo sapiens
taaaaaccagggttt

SEQ ID NO: 1723193 - DNA, 15 bp, Homo sapiens
aaaaaccagggttta

SEQ ID NO: 1723194 - DNA, 15 bp, Homo sapiens
aaaaccagggtttat

SEQ ID NO: 1723195 - DNA, 15 bp, Homo sapiens
aaaccagggtttatt

SEQ ID NO: 1723196 - DNA, 15 bp, Homo sapiens
aaccagggtttattt

SEQ ID NO: 1723197 - DNA, 15 bp, Homo sapiens
accagggtttatttc

SEQ ID NO: 1723198 - DNA, 15 bp, Homo sapiens
ccagggtttatttct

SEQ ID NO: 1723199 - DNA, 15 bp, Homo sapiens
cagggtttatttctg

SEQ ID NO: 1723200 - DNA, 15 bp, Homo sapiens
agggtttatttctgg

SEQ ID NO: 1723201 - DNA, 15 bp, Homo sapiens
gggtttatttctgga

SEQ ID NO: 1723202 - DNA, 15 bp, Homo sapiens
ggtttatttctggag

SEQ ID NO: 1723203 - DNA, 15 bp, Homo sapiens
gtttatttctggagt

SEQ ID NO: 1723204 - DNA, 15 bp, Homo sapiens
tttatttctggagtc

SEQ ID NO: 1723205 - DNA, 15 bp, Homo sapiens
ttatttctggagtct

SEQ ID NO: 1723206 - DNA, 15 bp, Homo sapiens
tatttctggagtctc

SEQ ID NO: 1723207 - DNA, 15 bp, Homo sapiens
atttctggagtctca

SEQ ID NO: 1723208 - DNA, 15 bp, Homo sapiens
tttctggagtctcag

SEQ ID NO: 1723209 - DNA, 15 bp, Homo sapiens
ttctggagtctcagt

SEQ ID NO: 1723210 - DNA, 15 bp, Homo sapiens
tctggagtctcagtt

SEQ ID NO: 1723211 - DNA, 15 bp, Homo sapiens
ctggagtctcagttc

SEQ ID NO: 1723212 - DNA, 15 bp, Homo sapiens
tggagtctcagttct

SEQ ID NO: 1723213 - DNA, 15 bp, Homo sapiens
ggagtctcagttcta

SEQ ID NO: 1723214 - DNA, 15 bp, Homo sapiens
gagtctcagttctat

SEQ ID NO: 1723215 - DNA, 15 bp, Homo sapiens
agtctcagttctatt

SEQ ID NO: 1723216 - DNA, 15 bp, Homo sapiens
gtctcagttctattc

SEQ ID NO: 1723217 - DNA, 15 bp, Homo sapiens
tctcagttctattcc

SEQ ID NO: 1723218 - DNA, 15 bp, Homo sapiens
ctcagttctattcca

SEQ ID NO: 1723219 - DNA, 15 bp, Homo sapiens
tcagttctattccat

SEQ ID NO: 1723220 - DNA, 15 bp, Homo sapiens
cagttctattccatt

SEQ ID NO: 1723221 - DNA, 15 bp, Homo sapiens
agttctattccattg

SEQ ID NO: 1723222 - DNA, 15 bp, Homo sapiens
gttctattccattgc

SEQ ID NO: 1723223 - DNA, 15 bp, Homo sapiens
ttctattccattgct

SEQ ID NO: 1723224 - DNA, 15 bp, Homo sapiens
tctattccattgctc

SEQ ID NO: 1723225 - DNA, 15 bp, Homo sapiens
ctattccattgctct

SEQ ID NO: 1723226 - DNA, 15 bp, Homo sapiens
tattccattgctctg

SEQ ID NO: 1723227 - DNA, 15 bp, Homo sapiens
attccattgctctgt

SEQ ID NO: 1723228 - DNA, 15 bp, Homo sapiens
ttccattgctctgta

SEQ ID NO: 1723229 - DNA, 15 bp, Homo sapiens
tccattgctctgtat

SEQ ID NO: 1723230 - DNA, 15 bp, Homo sapiens
ccattgctctgtatg

SEQ ID NO: 1723231 - DNA, 15 bp, Homo sapiens
cattgctctgtatgt

SEQ ID NO: 1723232 - DNA, 15 bp, Homo sapiens
attgctctgtatgtt

SEQ ID NO: 1723233 - DNA, 15 bp, Homo sapiens
tgctctgtatgttta

SEQ ID NO: 1723234 - DNA, 15 bp, Homo sapiens
gctctgtatgtttat

SEQ ID NO: 1723235 - DNA, 15 bp, Homo sapiens
ctctgtatgtttatt

SEQ ID NO: 1723236 - DNA, 15 bp, Homo sapiens
tctgtatgtttattc

SEQ ID NO: 1723237 - DNA, 15 bp, Homo sapiens
ctgtatgtttattct

SEQ ID NO: 1723238 - DNA, 15 bp, Homo sapiens
tgtatgtttattctt

SEQ ID NO: 1723239 - DNA, 15 bp, Homo sapiens
gtatgtttattcttt

SEQ ID NO: 1723240 - DNA, 15 bp, Homo sapiens
tatgtttattctttt

SEQ ID NO: 1723241 - DNA, 15 bp, Homo sapiens
atgtttattcttttt

SEQ ID NO: 1723242 - DNA, 15 bp, Homo sapiens
tgtttattctttttt

SEQ ID NO: 1723243 - DNA, 15 bp, Homo sapiens
gtttattcttttttt

SEQ ID NO: 1723244 - DNA, 15 bp, Homo sapiens
tttattctttttttt

SEQ ID NO: 1723245 - DNA, 15 bp, Homo sapiens
ttattcttttttttt

SEQ ID NO: 1723246 - DNA, 15 bp, Homo sapiens
tattctttttttttt

SEQ ID NO: 1723247 - DNA, 15 bp, Homo sapiens
ggagtgcggtggcac

SEQ ID NO: 1723248 - DNA, 15 bp, Homo sapiens
gagtgcggtggcaca

SEQ ID NO: 1723249 - DNA, 15 bp, Homo sapiens
agtgcggtggcacaa

SEQ ID NO: 1723250 - DNA, 15 bp, Homo sapiens
gtgcggtggcacaat

SEQ ID NO: 1723251 - DNA, 15 bp, Homo sapiens
tgcggtggcacaatc

SEQ ID NO: 1723252 - DNA, 15 bp, Homo sapiens
gcggtggcacaatct

SEQ ID NO: 1723253 - DNA, 15 bp, Homo sapiens
cggtggcacaatctc

SEQ ID NO: 1723254 - DNA, 15 bp, Homo sapiens
ggtggcacaatctcg

SEQ ID NO: 1723255 - DNA, 15 bp, Homo sapiens
gcacaatctcggctt

SEQ ID NO: 1723256 - DNA, 15 bp, Homo sapiens
cacaatctcggcttc

SEQ ID NO: 1723257 - DNA, 15 bp, Homo sapiens
acaatctcggcttcc

SEQ ID NO: 1723258 - DNA, 15 bp, Homo sapiens
caatctcggcttcct

SEQ ID NO: 1723259 - DNA, 15 bp, Homo sapiens
aatctcggcttcctg

SEQ ID NO: 1723260 - DNA, 15 bp, Homo sapiens
atctcggcttcctgc

SEQ ID NO: 1723261 - DNA, 15 bp, Homo sapiens
tctcggcttcctgca

SEQ ID NO: 1723262 - DNA, 15 bp, Homo sapiens
ctcggcttcctgcaa

SEQ ID NO: 1723263 - DNA, 15 bp, Homo sapiens
tcggcttcctgcaag

SEQ ID NO: 1723264 - DNA, 15 bp, Homo sapiens
cggcttcctgcaagc

SEQ ID NO: 1723265 - DNA, 15 bp, Homo sapiens
ggcttcctgcaagct

SEQ ID NO: 1723266 - DNA, 15 bp, Homo sapiens
gcttcctgcaagctc

SEQ ID NO: 1723267 - DNA, 15 bp, Homo sapiens
cttcctgcaagctcc

SEQ ID NO: 1723268 - DNA, 15 bp, Homo sapiens
ttcctgcaagctccg

SEQ ID NO: 1723269 - DNA, 15 bp, Homo sapiens
tcctgcaagctccgc

SEQ ID NO: 1723270 - DNA, 15 bp, Homo sapiens
cctgcaagctccgcc

SEQ ID NO: 1723271 - DNA, 15 bp, Homo sapiens
gcctcccgggttcat

SEQ ID NO: 1723272 - DNA, 15 bp, Homo sapiens
cctcccgggttcatg

SEQ ID NO: 1723273 - DNA, 15 bp, Homo sapiens
ctcccgggttcatgc

SEQ ID NO: 1723274 - DNA, 15 bp, Homo sapiens
tcccgggttcatgcc

SEQ ID NO: 1723275 - DNA, 15 bp, Homo sapiens
cccgggttcatgcca

SEQ ID NO: 1723276 - DNA, 15 bp, Homo sapiens
ccgggttcatgccat

SEQ ID NO: 1723277 - DNA, 15 bp, Homo sapiens
cgggttcatgccatt

SEQ ID NO: 1723278 - DNA, 15 bp, Homo sapiens
tcagcctcccaaaga

SEQ ID NO: 1723279 - DNA, 15 bp, Homo sapiens
cagcctcccaaagag

SEQ ID NO: 1723280 - DNA, 15 bp, Homo sapiens
agcctcccaaagagc

SEQ ID NO: 1723281 - DNA, 15 bp, Homo sapiens
ccaaagagctgggac

SEQ ID NO: 1723282 - DNA, 15 bp, Homo sapiens
caaagagctgggact

SEQ ID NO: 1723283 - DNA, 15 bp, Homo sapiens
aaagagctgggacta

SEQ ID NO: 1723284 - DNA, 15 bp, Homo sapiens
aagagctgggactac

SEQ ID NO: 1723285 - DNA, 15 bp, Homo sapiens
agagctgggactaca

SEQ ID NO: 1723286 - DNA, 15 bp, Homo sapiens
gagctgggactacag

SEQ ID NO: 1723287 - DNA, 15 bp, Homo sapiens
cccggctaatttttc

SEQ ID NO: 1723288 - DNA, 15 bp, Homo sapiens
ccggctaatttttct

SEQ ID NO: 1723289 - DNA, 15 bp, Homo sapiens
cggctaatttttctg

SEQ ID NO: 1723290 - DNA, 15 bp, Homo sapiens
ggctaatttttctgt

SEQ ID NO: 1723291 - DNA, 15 bp, Homo sapiens
gctaatttttctgta

SEQ ID NO: 1723292 - DNA, 15 bp, Homo sapiens
ctaatttttctgtat

SEQ ID NO: 1723293 - DNA, 15 bp, Homo sapiens
taatttttctgtatt

SEQ ID NO: 1723294 - DNA, 15 bp, Homo sapiens
aatttttctgtattt

SEQ ID NO: 1723295 - DNA, 15 bp, Homo sapiens
atttttctgtatttt

SEQ ID NO: 1723296 - DNA, 15 bp, Homo sapiens
tttttctgtattttt

SEQ ID NO: 1723297 - DNA, 15 bp, Homo sapiens
ttttctgtattttta

SEQ ID NO: 1723298 - DNA, 15 bp, Homo sapiens
ctgtgttagccagga

SEQ ID NO: 1723299 - DNA, 15 bp, Homo sapiens
tgtgttagccaggat

SEQ ID NO: 1723300 - DNA, 15 bp, Homo sapiens
ctgacctcgtgatcg

SEQ ID NO: 1723301 - DNA, 15 bp, Homo sapiens
tgacctcgtgatcgc

SEQ ID NO: 1723302 - DNA, 15 bp, Homo sapiens
gacctcgtgatcgcc

SEQ ID NO: 1723303 - DNA, 15 bp, Homo sapiens
acctcgtgatcgccc

SEQ ID NO: 1723304 - DNA, 15 bp, Homo sapiens
cctcgtgatcgccca

SEQ ID NO: 1723305 - DNA, 15 bp, Homo sapiens
ctcgtgatcgcccac

SEQ ID NO: 1723306 - DNA, 15 bp, Homo sapiens
tcgtgatcgcccacc

SEQ ID NO: 1723307 - DNA, 15 bp, Homo sapiens
cgtgatcgcccacct

SEQ ID NO: 1723308 - DNA, 15 bp, Homo sapiens
gtgatcgcccacctc

SEQ ID NO: 1723309 - DNA, 15 bp, Homo sapiens
tgatcgcccacctcg

SEQ ID NO: 1723310 - DNA, 15 bp, Homo sapiens
gatcgcccacctcgg

SEQ ID NO: 1723311 - DNA, 15 bp, Homo sapiens
atcgcccacctcggc

SEQ ID NO: 1723312 - DNA, 15 bp, Homo sapiens
tcgcccacctcggcc

SEQ ID NO: 1723313 - DNA, 15 bp, Homo sapiens
ccgcgcctggccgta

SEQ ID NO: 1723314 - DNA, 15 bp, Homo sapiens
cgcgcctggccgtat

SEQ ID NO: 1723315 - DNA, 15 bp, Homo sapiens
gcgcctggccgtatg

SEQ ID NO: 1723316 - DNA, 15 bp, Homo sapiens
cgcctggccgtatgt

SEQ ID NO: 1723317 - DNA, 15 bp, Homo sapiens
gcctggccgtatgtt

SEQ ID NO: 1723318 - DNA, 15 bp, Homo sapiens
cctggccgtatgttt

SEQ ID NO: 1723319 - DNA, 15 bp, Homo sapiens
ctggccgtatgttta

SEQ ID NO: 1723320 - DNA, 15 bp, Homo sapiens
tggccgtatgtttat

SEQ ID NO: 1723321 - DNA, 15 bp, Homo sapiens
ggccgtatgtttatt

SEQ ID NO: 1723322 - DNA, 15 bp, Homo sapiens
gccgtatgtttattc

SEQ ID NO: 1723323 - DNA, 15 bp, Homo sapiens
ccgtatgtttattct

SEQ ID NO: 1723324 - DNA, 15 bp, Homo sapiens
cgtatgtttattctt

SEQ ID NO: 1723325 - DNA, 15 bp, Homo sapiens
gtatgtttattctta

SEQ ID NO: 1723326 - DNA, 15 bp, Homo sapiens
tatgtttattcttat

SEQ ID NO: 1723327 - DNA, 15 bp, Homo sapiens
atgtttattcttatg

SEQ ID NO: 1723328 - DNA, 15 bp, Homo sapiens
tgtttattcttatga

SEQ ID NO: 1723329 - DNA, 15 bp, Homo sapiens
gtttattcttatgat

SEQ ID NO: 1723330 - DNA, 15 bp, Homo sapiens
tttattcttatgata

SEQ ID NO: 1723331 - DNA, 15 bp, Homo sapiens
ttattcttatgatag

SEQ ID NO: 1723332 - DNA, 15 bp, Homo sapiens
tattcttatgatagt

SEQ ID NO: 1723333 - DNA, 15 bp, Homo sapiens
attcttatgatagta

SEQ ID NO: 1723334 - DNA, 15 bp, Homo sapiens
ttcttatgatagtac

SEQ ID NO: 1723335 - DNA, 15 bp, Homo sapiens
tcttatgatagtacc

SEQ ID NO: 1723336 - DNA, 15 bp, Homo sapiens
cttatgatagtacca

SEQ ID NO: 1723337 - DNA, 15 bp, Homo sapiens
ttatgatagtaccat

SEQ ID NO: 1723338 - DNA, 15 bp, Homo sapiens
tatgatagtaccata

SEQ ID NO: 1723339 - DNA, 15 bp, Homo sapiens
atgatagtaccatac

SEQ ID NO: 1723340 - DNA, 15 bp, Homo sapiens
tgatagtaccatact

SEQ ID NO: 1723341 - DNA, 15 bp, Homo sapiens
gatagtaccatactg

SEQ ID NO: 1723342 - DNA, 15 bp, Homo sapiens
atagtaccatactgt

SEQ ID NO: 1723343 - DNA, 15 bp, Homo sapiens
tagtaccatactgtt

SEQ ID NO: 1723344 - DNA, 15 bp, Homo sapiens
agtaccatactgttt

SEQ ID NO: 1723345 - DNA, 15 bp, Homo sapiens
gtaccatactgtttt

SEQ ID NO: 1723346 - DNA, 15 bp, Homo sapiens
taccatactgttttg

SEQ ID NO: 1723347 - DNA, 15 bp, Homo sapiens
accatactgttttgt

SEQ ID NO: 1723348 - DNA, 15 bp, Homo sapiens
ccatactgttttgta

SEQ ID NO: 1723349 - DNA, 15 bp, Homo sapiens
catactgttttgtag

SEQ ID NO: 1723350 - DNA, 15 bp, Homo sapiens
atactgttttgtagt

SEQ ID NO: 1723351 - DNA, 15 bp, Homo sapiens
tactgttttgtagta

SEQ ID NO: 1723352 - DNA, 15 bp, Homo sapiens
actgttttgtagtat

SEQ ID NO: 1723353 - DNA, 15 bp, Homo sapiens
ctgttttgtagtatg

SEQ ID NO: 1723354 - DNA, 15 bp, Homo sapiens
tgttttgtagtatgt

SEQ ID NO: 1723355 - DNA, 15 bp, Homo sapiens
gttttgtagtatgtt

SEQ ID NO: 1723356 - DNA, 15 bp, Homo sapiens
ttttgtagtatgttt

SEQ ID NO: 1723357 - DNA, 15 bp, Homo sapiens
tttgtagtatgtttt

SEQ ID NO: 1723358 - DNA, 15 bp, Homo sapiens
ttgtagtatgtttta

SEQ ID NO: 1723359 - DNA, 15 bp, Homo sapiens
tgtagtatgttttat

SEQ ID NO: 1723360 - DNA, 15 bp, Homo sapiens
gtagtatgttttata

SEQ ID NO: 1723361 - DNA, 15 bp, Homo sapiens
tagtatgttttatag

SEQ ID NO: 1723362 - DNA, 15 bp, Homo sapiens
agtatgttttatagc

SEQ ID NO: 1723363 - DNA, 15 bp, Homo sapiens
gtatgttttatagct

SEQ ID NO: 1723364 - DNA, 15 bp, Homo sapiens
tatgttttatagctt

SEQ ID NO: 1723365 - DNA, 15 bp, Homo sapiens
atgttttatagcttt

SEQ ID NO: 1723366 - DNA, 15 bp, Homo sapiens
tgttttatagctttg

SEQ ID NO: 1723367 - DNA, 15 bp, Homo sapiens
gttttatagctttgt

SEQ ID NO: 1723368 - DNA, 15 bp, Homo sapiens
ttttatagctttgta

SEQ ID NO: 1723369 - DNA, 15 bp, Homo sapiens
tttatagctttgtag

SEQ ID NO: 1723370 - DNA, 15 bp, Homo sapiens
ttatagctttgtagt

SEQ ID NO: 1723371 - DNA, 15 bp, Homo sapiens
tatagctttgtagta

SEQ ID NO: 1723372 - DNA, 15 bp, Homo sapiens
atagctttgtagtat

SEQ ID NO: 1723373 - DNA, 15 bp, Homo sapiens
tagctttgtagtatg

SEQ ID NO: 1723374 - DNA, 15 bp, Homo sapiens
agctttgtagtatgt

SEQ ID NO: 1723375 - DNA, 15 bp, Homo sapiens
gctttgtagtatgtt

SEQ ID NO: 1723376 - DNA, 15 bp, Homo sapiens
ctttgtagtatgttt

SEQ ID NO: 1723377 - DNA, 15 bp, Homo sapiens
ttgtagtatgttttg

SEQ ID NO: 1723378 - DNA, 15 bp, Homo sapiens
tgtagtatgttttga

SEQ ID NO: 1723379 - DNA, 15 bp, Homo sapiens
gtagtatgttttgaa

SEQ ID NO: 1723380 - DNA, 15 bp, Homo sapiens
tagtatgttttgaaa

SEQ ID NO: 1723381 - DNA, 15 bp, Homo sapiens
agtatgttttgaaat

SEQ ID NO: 1723382 - DNA, 15 bp, Homo sapiens
gtatgttttgaaata

SEQ ID NO: 1723383 - DNA, 15 bp, Homo sapiens
tatgttttgaaatag

SEQ ID NO: 1723384 - DNA, 15 bp, Homo sapiens
atgttttgaaatagg

SEQ ID NO: 1723385 - DNA, 15 bp, Homo sapiens
gttttgaaataggga

SEQ ID NO: 1723386 - DNA, 15 bp, Homo sapiens
ttttgaaatagggaa

SEQ ID NO: 1723387 - DNA, 15 bp, Homo sapiens
tttgaaatagggaag

SEQ ID NO: 1723388 - DNA, 15 bp, Homo sapiens
ttgaaatagggaagt

SEQ ID NO: 1723389 - DNA, 15 bp, Homo sapiens
tgaaatagggaagtg

SEQ ID NO: 1723390 - DNA, 15 bp, Homo sapiens
gaaatagggaagtgt

SEQ ID NO: 1723391 - DNA, 15 bp, Homo sapiens
aaatagggaagtgtg

SEQ ID NO: 1723392 - DNA, 15 bp, Homo sapiens
aatagggaagtgtga

SEQ ID NO: 1723393 - DNA, 15 bp, Homo sapiens
atagggaagtgtgag

SEQ ID NO: 1723394 - DNA, 15 bp, Homo sapiens
tagggaagtgtgagt

SEQ ID NO: 1723395 - DNA, 15 bp, Homo sapiens
agggaagtgtgagtt

SEQ ID NO: 1723396 - DNA, 15 bp, Homo sapiens
gggaagtgtgagttc

SEQ ID NO: 1723397 - DNA, 15 bp, Homo sapiens
ggaagtgtgagttcg

SEQ ID NO: 1723398 - DNA, 15 bp, Homo sapiens
gaagtgtgagttcga

SEQ ID NO: 1723399 - DNA, 15 bp, Homo sapiens
aagtgtgagttcgac

SEQ ID NO: 1723400 - DNA, 15 bp, Homo sapiens
agtgtgagttcgaca

SEQ ID NO: 1723401 - DNA, 15 bp, Homo sapiens
gtgtgagttcgacaa

SEQ ID NO: 1723402 - DNA, 15 bp, Homo sapiens
tgtgagttcgacaac

SEQ ID NO: 1723403 - DNA, 15 bp, Homo sapiens
gtgagttcgacaact

SEQ ID NO: 1723404 - DNA, 15 bp, Homo sapiens
tgagttcgacaactt

SEQ ID NO: 1723405 - DNA, 15 bp, Homo sapiens
gagttcgacaacttt

SEQ ID NO: 1723406 - DNA, 15 bp, Homo sapiens
agttcgacaactttg

SEQ ID NO: 1723407 - DNA, 15 bp, Homo sapiens
gttcgacaactttgg

SEQ ID NO: 1723408 - DNA, 15 bp, Homo sapiens
ttcgacaactttggt

SEQ ID NO: 1723409 - DNA, 15 bp, Homo sapiens
tcgacaactttggtt

SEQ ID NO: 1723410 - DNA, 15 bp, Homo sapiens
cgacaactttggttt

SEQ ID NO: 1723411 - DNA, 15 bp, Homo sapiens
gacaactttggtttt

SEQ ID NO: 1723412 - DNA, 15 bp, Homo sapiens
acaactttggttttc

SEQ ID NO: 1723413 - DNA, 15 bp, Homo sapiens
caactttggttttct

SEQ ID NO: 1723414 - DNA, 15 bp, Homo sapiens
aactttggttttctt

SEQ ID NO: 1723415 - DNA, 15 bp, Homo sapiens
actttggttttcttt

SEQ ID NO: 1723416 - DNA, 15 bp, Homo sapiens
ctttggttttctttt

SEQ ID NO: 1723417 - DNA, 15 bp, Homo sapiens
tttggttttcttttt

SEQ ID NO: 1723418 - DNA, 15 bp, Homo sapiens
tggttttctttttca

SEQ ID NO: 1723419 - DNA, 15 bp, Homo sapiens
ggttttctttttcaa

SEQ ID NO: 1723420 - DNA, 15 bp, Homo sapiens
gttttctttttcaag

SEQ ID NO: 1723421 - DNA, 15 bp, Homo sapiens
ttttctttttcaaga

SEQ ID NO: 1723422 - DNA, 15 bp, Homo sapiens
tttctttttcaagat

SEQ ID NO: 1723423 - DNA, 15 bp, Homo sapiens
ttctttttcaagatt

SEQ ID NO: 1723424 - DNA, 15 bp, Homo sapiens
tctttttcaagatta

SEQ ID NO: 1723425 - DNA, 15 bp, Homo sapiens
ctttttcaagattac

SEQ ID NO: 1723426 - DNA, 15 bp, Homo sapiens
tttttcaagattact

SEQ ID NO: 1723427 - DNA, 15 bp, Homo sapiens
ttttcaagattactt

SEQ ID NO: 1723428 - DNA, 15 bp, Homo sapiens
tttcaagattacttt

SEQ ID NO: 1723429 - DNA, 15 bp, Homo sapiens
ttcaagattactttt

SEQ ID NO: 1723430 - DNA, 15 bp, Homo sapiens
tcaagattacttttg

SEQ ID NO: 1723431 - DNA, 15 bp, Homo sapiens
caagattacttttgt

SEQ ID NO: 1723432 - DNA, 15 bp, Homo sapiens
aagattacttttgtt

SEQ ID NO: 1723433 - DNA, 15 bp, Homo sapiens
agattacttttgtta

SEQ ID NO: 1723434 - DNA, 15 bp, Homo sapiens
gattacttttgttac

SEQ ID NO: 1723435 - DNA, 15 bp, Homo sapiens
attacttttgttact

SEQ ID NO: 1723436 - DNA, 15 bp, Homo sapiens
ttacttttgttactc

SEQ ID NO: 1723437 - DNA, 15 bp, Homo sapiens
tacttttgttactct

SEQ ID NO: 1723438 - DNA, 15 bp, Homo sapiens
acttttgttactctt

SEQ ID NO: 1723439 - DNA, 15 bp, Homo sapiens
cttttgttactcttg

SEQ ID NO: 1723440 - DNA, 15 bp, Homo sapiens
ttttgttactcttgg

SEQ ID NO: 1723441 - DNA, 15 bp, Homo sapiens
tttgttactcttggt

SEQ ID NO: 1723442 - DNA, 15 bp, Homo sapiens
ttgttactcttggta

SEQ ID NO: 1723443 - DNA, 15 bp, Homo sapiens
tgttactcttggtac

SEQ ID NO: 1723444 - DNA, 15 bp, Homo sapiens
gttactcttggtact

SEQ ID NO: 1723445 - DNA, 15 bp, Homo sapiens
ttactcttggtactt

SEQ ID NO: 1723446 - DNA, 15 bp, Homo sapiens
tactcttggtacttg

SEQ ID NO: 1723447 - DNA, 15 bp, Homo sapiens
actcttggtacttga

SEQ ID NO: 1723448 - DNA, 15 bp, Homo sapiens
ctcttggtacttgaa

SEQ ID NO: 1723449 - DNA, 15 bp, Homo sapiens
tcttggtacttgaat

SEQ ID NO: 1723450 - DNA, 15 bp, Homo sapiens
cttggtacttgaatt

SEQ ID NO: 1723451 - DNA, 15 bp, Homo sapiens
ttggtacttgaattt

SEQ ID NO: 1723452 - DNA, 15 bp, Homo sapiens
tggtacttgaatttc

SEQ ID NO: 1723453 - DNA, 15 bp, Homo sapiens
ggtacttgaatttcc

SEQ ID NO: 1723454 - DNA, 15 bp, Homo sapiens
gtacttgaatttcca

SEQ ID NO: 1723455 - DNA, 15 bp, Homo sapiens
tacttgaatttccat

SEQ ID NO: 1723456 - DNA, 15 bp, Homo sapiens
acttgaatttccatg

SEQ ID NO: 1723457 - DNA, 15 bp, Homo sapiens
cttgaatttccatgt

SEQ ID NO: 1723458 - DNA, 15 bp, Homo sapiens
ttgaatttccatgtg

SEQ ID NO: 1723459 - DNA, 15 bp, Homo sapiens
tgaatttccatgtga

SEQ ID NO: 1723460 - DNA, 15 bp, Homo sapiens
gaatttccatgtgaa

SEQ ID NO: 1723461 - DNA, 15 bp, Homo sapiens
aatttccatgtgaat

SEQ ID NO: 1723462 - DNA, 15 bp, Homo sapiens
atttccatgtgaatt

SEQ ID NO: 1723463 - DNA, 15 bp, Homo sapiens
tttccatgtgaattt

SEQ ID NO: 1723464 - DNA, 15 bp, Homo sapiens
ttccatgtgaatttt

SEQ ID NO: 1723465 - DNA, 15 bp, Homo sapiens
tccatgtgaattttt

SEQ ID NO: 1723466 - DNA, 15 bp, Homo sapiens
ccatgtgaattttta

SEQ ID NO: 1723467 - DNA, 15 bp, Homo sapiens
catgtgaatttttag

SEQ ID NO: 1723468 - DNA, 15 bp, Homo sapiens
atgtgaatttttagg

SEQ ID NO: 1723469 - DNA, 15 bp, Homo sapiens
tgtgaatttttagga

SEQ ID NO: 1723470 - DNA, 15 bp, Homo sapiens
gtgaatttttaggat

SEQ ID NO: 1723471 - DNA, 15 bp, Homo sapiens
tgaatttttaggatc

SEQ ID NO: 1723472 - DNA, 15 bp, Homo sapiens
gaatttttaggatca

SEQ ID NO: 1723473 - DNA, 15 bp, Homo sapiens
aatttttaggatcaa

SEQ ID NO: 1723474 - DNA, 15 bp, Homo sapiens
atttttaggatcaat

SEQ ID NO: 1723475 - DNA, 15 bp, Homo sapiens
tttttaggatcaatt

SEQ ID NO: 1723476 - DNA, 15 bp, Homo sapiens
ttttaggatcaattt

SEQ ID NO: 1723477 - DNA, 15 bp, Homo sapiens
tttaggatcaatttg

SEQ ID NO: 1723478 - DNA, 15 bp, Homo sapiens
ttaggatcaatttgt

SEQ ID NO: 1723479 - DNA, 15 bp, Homo sapiens
taggatcaatttgtc

SEQ ID NO: 1723480 - DNA, 15 bp, Homo sapiens
aggatcaatttgtca

SEQ ID NO: 1723481 - DNA, 15 bp, Homo sapiens
ggatcaatttgtcaa

SEQ ID NO: 1723482 - DNA, 15 bp, Homo sapiens
gatcaatttgtcaat

SEQ ID NO: 1723483 - DNA, 15 bp, Homo sapiens
atcaatttgtcaatt

SEQ ID NO: 1723484 - DNA, 15 bp, Homo sapiens
tcaatttgtcaattt

SEQ ID NO: 1723485 - DNA, 15 bp, Homo sapiens
caatttgtcaatttc

SEQ ID NO: 1723486 - DNA, 15 bp, Homo sapiens
aatttgtcaatttct

SEQ ID NO: 1723487 - DNA, 15 bp, Homo sapiens
atttgtcaatttctg

SEQ ID NO: 1723488 - DNA, 15 bp, Homo sapiens
tttgtcaatttctgt

SEQ ID NO: 1723489 - DNA, 15 bp, Homo sapiens
ttgtcaatttctgtt

SEQ ID NO: 1723490 - DNA, 15 bp, Homo sapiens
tgtcaatttctgttt

SEQ ID NO: 1723491 - DNA, 15 bp, Homo sapiens
gtcaatttctgtttt

SEQ ID NO: 1723492 - DNA, 15 bp, Homo sapiens
tcaatttctgtttta

SEQ ID NO: 1723493 - DNA, 15 bp, Homo sapiens
caatttctgttttaa

SEQ ID NO: 1723494 - DNA, 15 bp, Homo sapiens
aatttctgttttaaa

SEQ ID NO: 1723495 - DNA, 15 bp, Homo sapiens
atttctgttttaaaa

SEQ ID NO: 1723496 - DNA, 15 bp, Homo sapiens
tttctgttttaaaaa

SEQ ID NO: 1723497 - DNA, 15 bp, Homo sapiens
ttctgttttaaaaaa

SEQ ID NO: 1723498 - DNA, 15 bp, Homo sapiens
tctgttttaaaaaaa

SEQ ID NO: 1723499 - DNA, 15 bp, Homo sapiens
ctgttttaaaaaaag

SEQ ID NO: 1723500 - DNA, 15 bp, Homo sapiens
tgttttaaaaaaagg

SEQ ID NO: 1723501 - DNA, 15 bp, Homo sapiens
gttttaaaaaaaggc

SEQ ID NO: 1723502 - DNA, 15 bp, Homo sapiens
ttttaaaaaaaggca

SEQ ID NO: 1723503 - DNA, 15 bp, Homo sapiens
tttaaaaaaaggcag

SEQ ID NO: 1723504 - DNA, 15 bp, Homo sapiens
ttaaaaaaaggcagc

SEQ ID NO: 1723505 - DNA, 15 bp, Homo sapiens
taaaaaaaggcagct

SEQ ID NO: 1723506 - DNA, 15 bp, Homo sapiens
aaaaaaaggcagctg

SEQ ID NO: 1723507 - DNA, 15 bp, Homo sapiens
aaaaaaggcagctgg

SEQ ID NO: 1723508 - DNA, 15 bp, Homo sapiens
aaaaaggcagctggg

SEQ ID NO: 1723509 - DNA, 15 bp, Homo sapiens
aaaaggcagctggga

SEQ ID NO: 1723510 - DNA, 15 bp, Homo sapiens
aaaggcagctgggat

SEQ ID NO: 1723511 - DNA, 15 bp, Homo sapiens
aaggcagctgggatt

SEQ ID NO: 1723512 - DNA, 15 bp, Homo sapiens
aggcagctgggattt

SEQ ID NO: 1723513 - DNA, 15 bp, Homo sapiens
ggcagctgggatttt

SEQ ID NO: 1723514 - DNA, 15 bp, Homo sapiens
gcagctgggattttg

SEQ ID NO: 1723515 - DNA, 15 bp, Homo sapiens
cagctgggattttga

SEQ ID NO: 1723516 - DNA, 15 bp, Homo sapiens
agctgggattttgat

SEQ ID NO: 1723517 - DNA, 15 bp, Homo sapiens
gctgggattttgata

SEQ ID NO: 1723518 - DNA, 15 bp, Homo sapiens
ctgggattttgatag

SEQ ID NO: 1723519 - DNA, 15 bp, Homo sapiens
tgggattttgatagg

SEQ ID NO: 1723520 - DNA, 15 bp, Homo sapiens
gggattttgataggg

SEQ ID NO: 1723521 - DNA, 15 bp, Homo sapiens
ggattttgataggga

SEQ ID NO: 1723522 - DNA, 15 bp, Homo sapiens
gattttgatagggat

SEQ ID NO: 1723523 - DNA, 15 bp, Homo sapiens
attttgatagggatt

SEQ ID NO: 1723524 - DNA, 15 bp, Homo sapiens
ttttgatagggatta

SEQ ID NO: 1723525 - DNA, 15 bp, Homo sapiens
tttgatagggattat

SEQ ID NO: 1723526 - DNA, 15 bp, Homo sapiens
ttgatagggattatg

SEQ ID NO: 1723527 - DNA, 15 bp, Homo sapiens
tgatagggattatgt

SEQ ID NO: 1723528 - DNA, 15 bp, Homo sapiens
gatagggattatgtt

SEQ ID NO: 1723529 - DNA, 15 bp, Homo sapiens
atagggattatgttg

SEQ ID NO: 1723530 - DNA, 15 bp, Homo sapiens
tagggattatgttgg

SEQ ID NO: 1723531 - DNA, 15 bp, Homo sapiens
agggattatgttgga

SEQ ID NO: 1723532 - DNA, 15 bp, Homo sapiens
gggattatgttggat

SEQ ID NO: 1723533 - DNA, 15 bp, Homo sapiens
ggattatgttggatc

SEQ ID NO: 1723534 - DNA, 15 bp, Homo sapiens
gattatgttggatct

SEQ ID NO: 1723535 - DNA, 15 bp, Homo sapiens
attatgttggatcta

SEQ ID NO: 1723536 - DNA, 15 bp, Homo sapiens
ttatgttggatctag

SEQ ID NO: 1723537 - DNA, 15 bp, Homo sapiens
tatgttggatctaga

SEQ ID NO: 1723538 - DNA, 15 bp, Homo sapiens
atgttggatctagat

SEQ ID NO: 1723539 - DNA, 15 bp, Homo sapiens
tgttggatctagatc

SEQ ID NO: 1723540 - DNA, 15 bp, Homo sapiens
gttggatctagatca

SEQ ID NO: 1723541 - DNA, 15 bp, Homo sapiens
ttggatctagatcaa

SEQ ID NO: 1723542 - DNA, 15 bp, Homo sapiens
tggatctagatcaat

SEQ ID NO: 1723543 - DNA, 15 bp, Homo sapiens
ggatctagatcaatt

SEQ ID NO: 1723544 - DNA, 15 bp, Homo sapiens
gatctagatcaattt

SEQ ID NO: 1723545 - DNA, 15 bp, Homo sapiens
atctagatcaatttg

SEQ ID NO: 1723546 - DNA, 15 bp, Homo sapiens
tctagatcaatttgc

SEQ ID NO: 1723547 - DNA, 15 bp, Homo sapiens
ctagatcaatttgcg

SEQ ID NO: 1723548 - DNA, 15 bp, Homo sapiens
tagatcaatttgcgg

SEQ ID NO: 1723549 - DNA, 15 bp, Homo sapiens
agatcaatttgcgga

SEQ ID NO: 1723550 - DNA, 15 bp, Homo sapiens
gatcaatttgcggaa

SEQ ID NO: 1723551 - DNA, 15 bp, Homo sapiens
atcaatttgcggaat

SEQ ID NO: 1723552 - DNA, 15 bp, Homo sapiens
tcaatttgcggaata

SEQ ID NO: 1723553 - DNA, 15 bp, Homo sapiens
caatttgcggaatat

SEQ ID NO: 1723554 - DNA, 15 bp, Homo sapiens
aatttgcggaatatt

SEQ ID NO: 1723555 - DNA, 15 bp, Homo sapiens
atttgcggaatattg

SEQ ID NO: 1723556 - DNA, 15 bp, Homo sapiens
tttgcggaatattgc

SEQ ID NO: 1723557 - DNA, 15 bp, Homo sapiens
ttgcggaatattgca

SEQ ID NO: 1723558 - DNA, 15 bp, Homo sapiens
tgcggaatattgcat

SEQ ID NO: 1723559 - DNA, 15 bp, Homo sapiens
gcggaatattgcatt

SEQ ID NO: 1723560 - DNA, 15 bp, Homo sapiens
cggaatattgcattc

SEQ ID NO: 1723561 - DNA, 15 bp, Homo sapiens
ggaatattgcattct

SEQ ID NO: 1723562 - DNA, 15 bp, Homo sapiens
gaatattgcattctt

SEQ ID NO: 1723563 - DNA, 15 bp, Homo sapiens
aatattgcattctta

SEQ ID NO: 1723564 - DNA, 15 bp, Homo sapiens
atattgcattcttaa

SEQ ID NO: 1723565 - DNA, 15 bp, Homo sapiens
tattgcattcttaac

SEQ ID NO: 1723566 - DNA, 15 bp, Homo sapiens
attgcattcttaaca

SEQ ID NO: 1723567 - DNA, 15 bp, Homo sapiens
ttgcattcttaacaa

SEQ ID NO: 1723568 - DNA, 15 bp, Homo sapiens
tgcattcttaacaac

SEQ ID NO: 1723569 - DNA, 15 bp, Homo sapiens
gcattcttaacaaca

SEQ ID NO: 1723570 - DNA, 15 bp, Homo sapiens
cattcttaacaacat

SEQ ID NO: 1723571 - DNA, 15 bp, Homo sapiens
attcttaacaacatg

SEQ ID NO: 1723572 - DNA, 15 bp, Homo sapiens
ttcttaacaacatga

SEQ ID NO: 1723573 - DNA, 15 bp, Homo sapiens
tcttaacaacatgaa

SEQ ID NO: 1723574 - DNA, 15 bp, Homo sapiens
cttaacaacatgaag

SEQ ID NO: 1723575 - DNA, 15 bp, Homo sapiens
ttaacaacatgaagt

SEQ ID NO: 1723576 - DNA, 15 bp, Homo sapiens
taacaacatgaagtc

SEQ ID NO: 1723577 - DNA, 15 bp, Homo sapiens
aacaacatgaagtct

SEQ ID NO: 1723578 - DNA, 15 bp, Homo sapiens
acaacatgaagtctt

SEQ ID NO: 1723579 - DNA, 15 bp, Homo sapiens
caacatgaagtcttc

SEQ ID NO: 1723580 - DNA, 15 bp, Homo sapiens
aacatgaagtcttca

SEQ ID NO: 1723581 - DNA, 15 bp, Homo sapiens
acatgaagtcttcag

SEQ ID NO: 1723582 - DNA, 15 bp, Homo sapiens
catgaagtcttcaga

SEQ ID NO: 1723583 - DNA, 15 bp, Homo sapiens
atgaagtcttcagat

SEQ ID NO: 1723584 - DNA, 15 bp, Homo sapiens
tgaagtcttcagatg

SEQ ID NO: 1723585 - DNA, 15 bp, Homo sapiens
gaagtcttcagatgc

SEQ ID NO: 1723586 - DNA, 15 bp, Homo sapiens
aagtcttcagatgca

SEQ ID NO: 1723587 - DNA, 15 bp, Homo sapiens
agtcttcagatgcat

SEQ ID NO: 1723588 - DNA, 15 bp, Homo sapiens
gtcttcagatgcatg

SEQ ID NO: 1723589 - DNA, 15 bp, Homo sapiens
tcttcagatgcatgc

SEQ ID NO: 1723590 - DNA, 15 bp, Homo sapiens
cttcagatgcatgca

SEQ ID NO: 1723591 - DNA, 15 bp, Homo sapiens
ttcagatgcatgcat

SEQ ID NO: 1723592 - DNA, 15 bp, Homo sapiens
tcagatgcatgcata

SEQ ID NO: 1723593 - DNA, 15 bp, Homo sapiens
cagatgcatgcatat

SEQ ID NO: 1723594 - DNA, 15 bp, Homo sapiens
agatgcatgcatatg

SEQ ID NO: 1723595 - DNA, 15 bp, Homo sapiens
gatgcatgcatatgg

SEQ ID NO: 1723596 - DNA, 15 bp, Homo sapiens
atgcatgcatatgga

SEQ ID NO: 1723597 - DNA, 15 bp, Homo sapiens
tgcatgcatatggaa

SEQ ID NO: 1723598 - DNA, 15 bp, Homo sapiens
gcatgcatatggaat

SEQ ID NO: 1723599 - DNA, 15 bp, Homo sapiens
catgcatatggaatg

SEQ ID NO: 1723600 - DNA, 15 bp, Homo sapiens
atgcatatggaatgt

SEQ ID NO: 1723601 - DNA, 15 bp, Homo sapiens
tgcatatggaatgtc

SEQ ID NO: 1723602 - DNA, 15 bp, Homo sapiens
gcatatggaatgtct

SEQ ID NO: 1723603 - DNA, 15 bp, Homo sapiens
catatggaatgtctt

SEQ ID NO: 1723604 - DNA, 15 bp, Homo sapiens
atatggaatgtcttt

SEQ ID NO: 1723605 - DNA, 15 bp, Homo sapiens
tatggaatgtctttt

SEQ ID NO: 1723606 - DNA, 15 bp, Homo sapiens
atggaatgtcttttc

SEQ ID NO: 1723607 - DNA, 15 bp, Homo sapiens
tggaatgtcttttcg

SEQ ID NO: 1723608 - DNA, 15 bp, Homo sapiens
ggaatgtcttttcgt

SEQ ID NO: 1723609 - DNA, 15 bp, Homo sapiens
gaatgtcttttcgtt

SEQ ID NO: 1723610 - DNA, 15 bp, Homo sapiens
aatgtcttttcgttt

SEQ ID NO: 1723611 - DNA, 15 bp, Homo sapiens
atgtcttttcgttta

SEQ ID NO: 1723612 - DNA, 15 bp, Homo sapiens
tgtcttttcgtttaa

SEQ ID NO: 1723613 - DNA, 15 bp, Homo sapiens
gtcttttcgtttaag

SEQ ID NO: 1723614 - DNA, 15 bp, Homo sapiens
tcttttcgtttaagt

SEQ ID NO: 1723615 - DNA, 15 bp, Homo sapiens
cttttcgtttaagtc

SEQ ID NO: 1723616 - DNA, 15 bp, Homo sapiens
ttttcgtttaagtct

SEQ ID NO: 1723617 - DNA, 15 bp, Homo sapiens
tttcgtttaagtctt

SEQ ID NO: 1723618 - DNA, 15 bp, Homo sapiens
ttcgtttaagtcttt

SEQ ID NO: 1723619 - DNA, 15 bp, Homo sapiens
tcgtttaagtctttc

SEQ ID NO: 1723620 - DNA, 15 bp, Homo sapiens
cgtttaagtctttct

SEQ ID NO: 1723621 - DNA, 15 bp, Homo sapiens
gtttaagtctttctt

SEQ ID NO: 1723622 - DNA, 15 bp, Homo sapiens
tttaagtctttcttt

SEQ ID NO: 1723623 - DNA, 15 bp, Homo sapiens
ttaagtctttctttc

SEQ ID NO: 1723624 - DNA, 15 bp, Homo sapiens
taagtctttctttca

SEQ ID NO: 1723625 - DNA, 15 bp, Homo sapiens
aagtctttctttcac

SEQ ID NO: 1723626 - DNA, 15 bp, Homo sapiens
agtctttctttcacc

SEQ ID NO: 1723627 - DNA, 15 bp, Homo sapiens
gtctttctttcacca

SEQ ID NO: 1723628 - DNA, 15 bp, Homo sapiens
tctttctttcaccag

SEQ ID NO: 1723629 - DNA, 15 bp, Homo sapiens
ctttctttcaccagt

SEQ ID NO: 1723630 - DNA, 15 bp, Homo sapiens
tttctttcaccagtg

SEQ ID NO: 1723631 - DNA, 15 bp, Homo sapiens
ttctttcaccagtgt

SEQ ID NO: 1723632 - DNA, 15 bp, Homo sapiens
tctttcaccagtgtt

SEQ ID NO: 1723633 - DNA, 15 bp, Homo sapiens
ctttcaccagtgttt

SEQ ID NO: 1723634 - DNA, 15 bp, Homo sapiens
tttcaccagtgtttt

SEQ ID NO: 1723635 - DNA, 15 bp, Homo sapiens
ttcaccagtgttttc

SEQ ID NO: 1723636 - DNA, 15 bp, Homo sapiens
tcaccagtgttttca

SEQ ID NO: 1723637 - DNA, 15 bp, Homo sapiens
caccagtgttttcag

SEQ ID NO: 1723638 - DNA, 15 bp, Homo sapiens
accagtgttttcagt

SEQ ID NO: 1723639 - DNA, 15 bp, Homo sapiens
ccagtgttttcagtt

SEQ ID NO: 1723640 - DNA, 15 bp, Homo sapiens
cagtgttttcagttt

SEQ ID NO: 1723641 - DNA, 15 bp, Homo sapiens
agtgttttcagtttt

SEQ ID NO: 1723642 - DNA, 15 bp, Homo sapiens
gtgttttcagttttc

SEQ ID NO: 1723643 - DNA, 15 bp, Homo sapiens
tgttttcagttttca

SEQ ID NO: 1723644 - DNA, 15 bp, Homo sapiens
gttttcagttttcag

SEQ ID NO: 1723645 - DNA, 15 bp, Homo sapiens
ttttcagttttcaga

SEQ ID NO: 1723646 - DNA, 15 bp, Homo sapiens
tttcagttttcagag

SEQ ID NO: 1723647 - DNA, 15 bp, Homo sapiens
ttcagttttcagagt

SEQ ID NO: 1723648 - DNA, 15 bp, Homo sapiens
tcagttttcagagta

SEQ ID NO: 1723649 - DNA, 15 bp, Homo sapiens
cagttttcagagtat

SEQ ID NO: 1723650 - DNA, 15 bp, Homo sapiens
agttttcagagtata

SEQ ID NO: 1723651 - DNA, 15 bp, Homo sapiens
gttttcagagtataa

SEQ ID NO: 1723652 - DNA, 15 bp, Homo sapiens
ttttcagagtataaa

SEQ ID NO: 1723653 - DNA, 15 bp, Homo sapiens
tttcagagtataaat

SEQ ID NO: 1723654 - DNA, 15 bp, Homo sapiens
ttcagagtataaatc

SEQ ID NO: 1723655 - DNA, 15 bp, Homo sapiens
tcagagtataaatct

SEQ ID NO: 1723656 - DNA, 15 bp, Homo sapiens
cagagtataaatctt

SEQ ID NO: 1723657 - DNA, 15 bp, Homo sapiens
agagtataaatctta

SEQ ID NO: 1723658 - DNA, 15 bp, Homo sapiens
gagtataaatcttac

SEQ ID NO: 1723659 - DNA, 15 bp, Homo sapiens
agtataaatcttact

SEQ ID NO: 1723660 - DNA, 15 bp, Homo sapiens
gtataaatcttacta

SEQ ID NO: 1723661 - DNA, 15 bp, Homo sapiens
tataaatcttactaa

SEQ ID NO: 1723662 - DNA, 15 bp, Homo sapiens
ataaatcttactaaa

SEQ ID NO: 1723663 - DNA, 15 bp, Homo sapiens
taaatcttactaaat

SEQ ID NO: 1723664 - DNA, 15 bp, Homo sapiens
aaatcttactaaata

SEQ ID NO: 1723665 - DNA, 15 bp, Homo sapiens
aatcttactaaatat

SEQ ID NO: 1723666 - DNA, 15 bp, Homo sapiens
atcttactaaatatt

SEQ ID NO: 1723667 - DNA, 15 bp, Homo sapiens
tcttactaaatattt

SEQ ID NO: 1723668 - DNA, 15 bp, Homo sapiens
cttactaaatattta

SEQ ID NO: 1723669 - DNA, 15 bp, Homo sapiens
actaaatatttattc

SEQ ID NO: 1723670 - DNA, 15 bp, Homo sapiens
ctaaatatttattct

SEQ ID NO: 1723671 - DNA, 15 bp, Homo sapiens
taaatatttattctt

SEQ ID NO: 1723672 - DNA, 15 bp, Homo sapiens
aaatatttattcttg

SEQ ID NO: 1723673 - DNA, 15 bp, Homo sapiens
aatatttattcttgg

SEQ ID NO: 1723674 - DNA, 15 bp, Homo sapiens
atatttattcttggt

SEQ ID NO: 1723675 - DNA, 15 bp, Homo sapiens
tatttattcttggtg

SEQ ID NO: 1723676 - DNA, 15 bp, Homo sapiens
atttattcttggtga

SEQ ID NO: 1723677 - DNA, 15 bp, Homo sapiens
tttattcttggtgat

SEQ ID NO: 1723678 - DNA, 15 bp, Homo sapiens
ttattcttggtgata

SEQ ID NO: 1723679 - DNA, 15 bp, Homo sapiens
tattcttggtgatat

SEQ ID NO: 1723680 - DNA, 15 bp, Homo sapiens
attcttggtgatatt

SEQ ID NO: 1723681 - DNA, 15 bp, Homo sapiens
ttcttggtgatatta

SEQ ID NO: 1723682 - DNA, 15 bp, Homo sapiens
tcttggtgatattat

SEQ ID NO: 1723683 - DNA, 15 bp, Homo sapiens
cttggtgatattatt

SEQ ID NO: 1723684 - DNA, 15 bp, Homo sapiens
ttggtgatattatta

SEQ ID NO: 1723685 - DNA, 15 bp, Homo sapiens
tggtgatattattat

SEQ ID NO: 1723686 - DNA, 15 bp, Homo sapiens
ggtgatattattata

SEQ ID NO: 1723687 - DNA, 15 bp, Homo sapiens
gtgatattattataa

SEQ ID NO: 1723688 - DNA, 15 bp, Homo sapiens
tgatattattataaa

SEQ ID NO: 1723689 - DNA, 15 bp, Homo sapiens
gatattattataaat

SEQ ID NO: 1723690 - DNA, 15 bp, Homo sapiens
atattattataaatg

SEQ ID NO: 1723691 - DNA, 15 bp, Homo sapiens
tattattataaatgg

SEQ ID NO: 1723692 - DNA, 15 bp, Homo sapiens
attattataaatgga

SEQ ID NO: 1723693 - DNA, 15 bp, Homo sapiens
ttattataaatggaa

SEQ ID NO: 1723694 - DNA, 15 bp, Homo sapiens
tattataaatggaat

SEQ ID NO: 1723695 - DNA, 15 bp, Homo sapiens
attataaatggaatt

SEQ ID NO: 1723696 - DNA, 15 bp, Homo sapiens
ttataaatggaattg

SEQ ID NO: 1723697 - DNA, 15 bp, Homo sapiens
tataaatggaattgt

SEQ ID NO: 1723698 - DNA, 15 bp, Homo sapiens
ataaatggaattgtt

SEQ ID NO: 1723699 - DNA, 15 bp, Homo sapiens
taaatggaattgttt

SEQ ID NO: 1723700 - DNA, 15 bp, Homo sapiens
aaatggaattgtttt

SEQ ID NO: 1723701 - DNA, 15 bp, Homo sapiens
aatggaattgttttc

SEQ ID NO: 1723702 - DNA, 15 bp, Homo sapiens
atggaattgttttct

SEQ ID NO: 1723703 - DNA, 15 bp, Homo sapiens
tggaattgttttctt

SEQ ID NO: 1723704 - DNA, 15 bp, Homo sapiens
ggaattgttttcttt

SEQ ID NO: 1723705 - DNA, 15 bp, Homo sapiens
gaattgttttctttc

SEQ ID NO: 1723706 - DNA, 15 bp, Homo sapiens
aattgttttctttcc

SEQ ID NO: 1723707 - DNA, 15 bp, Homo sapiens
attgttttctttcct

SEQ ID NO: 1723708 - DNA, 15 bp, Homo sapiens
ttgttttctttcctt

SEQ ID NO: 1723709 - DNA, 15 bp, Homo sapiens
tgttttctttccttt

SEQ ID NO: 1723710 - DNA, 15 bp, Homo sapiens
gttttctttcctttt

SEQ ID NO: 1723711 - DNA, 15 bp, Homo sapiens
ttttctttccttttt

SEQ ID NO: 1723712 - DNA, 15 bp, Homo sapiens
tttctttcctttttg

SEQ ID NO: 1723713 - DNA, 15 bp, Homo sapiens
ttctttcctttttgg

SEQ ID NO: 1723714 - DNA, 15 bp, Homo sapiens
tctttcctttttggc

SEQ ID NO: 1723715 - DNA, 15 bp, Homo sapiens
ctttcctttttggct

SEQ ID NO: 1723716 - DNA, 15 bp, Homo sapiens
tttcctttttggctt

SEQ ID NO: 1723717 - DNA, 15 bp, Homo sapiens
ttcctttttggctta

SEQ ID NO: 1723718 - DNA, 15 bp, Homo sapiens
tcctttttggcttat

SEQ ID NO: 1723719 - DNA, 15 bp, Homo sapiens
cctttttggcttatt

SEQ ID NO: 1723720 - DNA, 15 bp, Homo sapiens
ctttttggcttattc

SEQ ID NO: 1723721 - DNA, 15 bp, Homo sapiens
tttttggcttattca

SEQ ID NO: 1723722 - DNA, 15 bp, Homo sapiens
ttttggcttattcat

SEQ ID NO: 1723723 - DNA, 15 bp, Homo sapiens
tttggcttattcatt

SEQ ID NO: 1723724 - DNA, 15 bp, Homo sapiens
ttggcttattcattg

SEQ ID NO: 1723725 - DNA, 15 bp, Homo sapiens
tggcttattcattgt

SEQ ID NO: 1723726 - DNA, 15 bp, Homo sapiens
ggcttattcattgta

SEQ ID NO: 1723727 - DNA, 15 bp, Homo sapiens
gcttattcattgtag

SEQ ID NO: 1723728 - DNA, 15 bp, Homo sapiens
cttattcattgtagg

SEQ ID NO: 1723729 - DNA, 15 bp, Homo sapiens
ttattcattgtaggt

SEQ ID NO: 1723730 - DNA, 15 bp, Homo sapiens
tattcattgtaggtg

SEQ ID NO: 1723731 - DNA, 15 bp, Homo sapiens
attcattgtaggtgg

SEQ ID NO: 1723732 - DNA, 15 bp, Homo sapiens
ttcattgtaggtgga

SEQ ID NO: 1723733 - DNA, 15 bp, Homo sapiens
tcattgtaggtggat

SEQ ID NO: 1723734 - DNA, 15 bp, Homo sapiens
cattgtaggtggata

SEQ ID NO: 1723735 - DNA, 15 bp, Homo sapiens
attgtaggtggatag

SEQ ID NO: 1723736 - DNA, 15 bp, Homo sapiens
ttgtaggtggataga

SEQ ID NO: 1723737 - DNA, 15 bp, Homo sapiens
tgtaggtggatagaa

SEQ ID NO: 1723738 - DNA, 15 bp, Homo sapiens
gtaggtggatagaaa

SEQ ID NO: 1723739 - DNA, 15 bp, Homo sapiens
taggtggatagaaat

SEQ ID NO: 1723740 - DNA, 15 bp, Homo sapiens
aggtggatagaaata

SEQ ID NO: 1723741 - DNA, 15 bp, Homo sapiens
ggtggatagaaataa

SEQ ID NO: 1723742 - DNA, 15 bp, Homo sapiens
gtggatagaaataaa

SEQ ID NO: 1723743 - DNA, 15 bp, Homo sapiens
tggatagaaataaaa

SEQ ID NO: 1723744 - DNA, 15 bp, Homo sapiens
ggatagaaataaaat

SEQ ID NO: 1723745 - DNA, 15 bp, Homo sapiens
gatagaaataaaatc

SEQ ID NO: 1723746 - DNA, 15 bp, Homo sapiens
atagaaataaaatct

SEQ ID NO: 1723747 - DNA, 15 bp, Homo sapiens
tagaaataaaatcta

SEQ ID NO: 1723748 - DNA, 15 bp, Homo sapiens
agaaataaaatctat

SEQ ID NO: 1723749 - DNA, 15 bp, Homo sapiens
gaaataaaatctatt

SEQ ID NO: 1723750 - DNA, 15 bp, Homo sapiens
aaataaaatctattt

SEQ ID NO: 1723751 - DNA, 15 bp, Homo sapiens
aataaaatctatttt

SEQ ID NO: 1723752 - DNA, 15 bp, Homo sapiens
ataaaatctattttt

SEQ ID NO: 1723753 - DNA, 15 bp, Homo sapiens
taaaatctatttttt

SEQ ID NO: 1723754 - DNA, 15 bp, Homo sapiens
aaaatctattttttt

SEQ ID NO: 1723755 - DNA, 15 bp, Homo sapiens
aaatctatttttttt

SEQ ID NO: 1723756 - DNA, 15 bp, Homo sapiens
aatctattttttttg

SEQ ID NO: 1723757 - DNA, 15 bp, Homo sapiens
atctattttttttgg

SEQ ID NO: 1723758 - DNA, 15 bp, Homo sapiens
tctattttttttgga

SEQ ID NO: 1723759 - DNA, 15 bp, Homo sapiens
ctattttttttggat

SEQ ID NO: 1723760 - DNA, 15 bp, Homo sapiens
tattttttttggata

SEQ ID NO: 1723761 - DNA, 15 bp, Homo sapiens
attttttttggataa

SEQ ID NO: 1723762 - DNA, 15 bp, Homo sapiens
ttttttttggataag

SEQ ID NO: 1723763 - DNA, 15 bp, Homo sapiens
tttttttggataaga

SEQ ID NO: 1723764 - DNA, 15 bp, Homo sapiens
ttttttggataagag

SEQ ID NO: 1723765 - DNA, 15 bp, Homo sapiens
tttttggataagagc

SEQ ID NO: 1723766 - DNA, 15 bp, Homo sapiens
ttttggataagagca

SEQ ID NO: 1723767 - DNA, 15 bp, Homo sapiens
tttggataagagcag

SEQ ID NO: 1723768 - DNA, 15 bp, Homo sapiens
ttggataagagcagc

SEQ ID NO: 1723769 - DNA, 15 bp, Homo sapiens
tggataagagcagct

SEQ ID NO: 1723770 - DNA, 15 bp, Homo sapiens
ggataagagcagcta

SEQ ID NO: 1723771 - DNA, 15 bp, Homo sapiens
gataagagcagctaa

SEQ ID NO: 1723772 - DNA, 15 bp, Homo sapiens
ataagagcagctaaa

SEQ ID NO: 1723773 - DNA, 15 bp, Homo sapiens
taagagcagctaaaa

SEQ ID NO: 1723774 - DNA, 15 bp, Homo sapiens
aagagcagctaaaat

SEQ ID NO: 1723775 - DNA, 15 bp, Homo sapiens
agagcagctaaaatc

SEQ ID NO: 1723776 - DNA, 15 bp, Homo sapiens
gagcagctaaaatca

SEQ ID NO: 1723777 - DNA, 15 bp, Homo sapiens
agcagctaaaatcag

SEQ ID NO: 1723778 - DNA, 15 bp, Homo sapiens
gcagctaaaatcagt

SEQ ID NO: 1723779 - DNA, 15 bp, Homo sapiens
cagctaaaatcagtt

SEQ ID NO: 1723780 - DNA, 15 bp, Homo sapiens
agctaaaatcagttg

SEQ ID NO: 1723781 - DNA, 15 bp, Homo sapiens
gctaaaatcagttgg

SEQ ID NO: 1723782 - DNA, 15 bp, Homo sapiens
ctaaaatcagttggg

SEQ ID NO: 1723783 - DNA, 15 bp, Homo sapiens
taaaatcagttgggc

SEQ ID NO: 1723784 - DNA, 15 bp, Homo sapiens
aaaatcagttgggca

SEQ ID NO: 1723785 - DNA, 15 bp, Homo sapiens
aaatcagttgggcac

SEQ ID NO: 1723786 - DNA, 15 bp, Homo sapiens
aatcagttgggcacg

SEQ ID NO: 1723787 - DNA, 15 bp, Homo sapiens
atcagttgggcacgg

SEQ ID NO: 1723788 - DNA, 15 bp, Homo sapiens
tcagttgggcacgga

SEQ ID NO: 1723789 - DNA, 15 bp, Homo sapiens
cagttgggcacggag

SEQ ID NO: 1723790 - DNA, 15 bp, Homo sapiens
agttgggcacggagg

SEQ ID NO: 1723791 - DNA, 15 bp, Homo sapiens
gttgggcacggaggc

SEQ ID NO: 1723792 - DNA, 15 bp, Homo sapiens
ttgggcacggaggct

SEQ ID NO: 1723793 - DNA, 15 bp, Homo sapiens
tgggcacggaggctc

SEQ ID NO: 1723794 - DNA, 15 bp, Homo sapiens
gggcacggaggctca

SEQ ID NO: 1723795 - DNA, 15 bp, Homo sapiens
ggcacggaggctcac

SEQ ID NO: 1723796 - DNA, 15 bp, Homo sapiens
gcacggaggctcacg

SEQ ID NO: 1723797 - DNA, 15 bp, Homo sapiens
cacggaggctcacgc

SEQ ID NO: 1723798 - DNA, 15 bp, Homo sapiens
acggaggctcacgcc

SEQ ID NO: 1723799 - DNA, 15 bp, Homo sapiens
cggaggctcacgcct

SEQ ID NO: 1723800 - DNA, 15 bp, Homo sapiens
ggaggctcacgcctg

SEQ ID NO: 1723801 - DNA, 15 bp, Homo sapiens
gaggctcacgcctgt

SEQ ID NO: 1723802 - DNA, 15 bp, Homo sapiens
aggctcacgcctgta

SEQ ID NO: 1723803 - DNA, 15 bp, Homo sapiens
cacgcctgtaatctt

SEQ ID NO: 1723804 - DNA, 15 bp, Homo sapiens
acgcctgtaatctta

SEQ ID NO: 1723805 - DNA, 15 bp, Homo sapiens
cgcctgtaatcttag

SEQ ID NO: 1723806 - DNA, 15 bp, Homo sapiens
gaggccgaggtgggt

SEQ ID NO: 1723807 - DNA, 15 bp, Homo sapiens
aggccgaggtgggtg

SEQ ID NO: 1723808 - DNA, 15 bp, Homo sapiens
ggccgaggtgggtgg

SEQ ID NO: 1723809 - DNA, 15 bp, Homo sapiens
acttgaggtcaggaa

SEQ ID NO: 1723810 - DNA, 15 bp, Homo sapiens
cttgaggtcaggaat

SEQ ID NO: 1723811 - DNA, 15 bp, Homo sapiens
ttgaggtcaggaatt

SEQ ID NO: 1723812 - DNA, 15 bp, Homo sapiens
tgaggtcaggaattt

SEQ ID NO: 1723813 - DNA, 15 bp, Homo sapiens
gaggtcaggaatttg

SEQ ID NO: 1723814 - DNA, 15 bp, Homo sapiens
aggtcaggaatttga

SEQ ID NO: 1723815 - DNA, 15 bp, Homo sapiens
ggtcaggaatttgag

SEQ ID NO: 1723816 - DNA, 15 bp, Homo sapiens
gtcaggaatttgaga

SEQ ID NO: 1723817 - DNA, 15 bp, Homo sapiens
tcaggaatttgagac

SEQ ID NO: 1723818 - DNA, 15 bp, Homo sapiens
tgcagtgagccgaag

SEQ ID NO: 1723819 - DNA, 15 bp, Homo sapiens
gcagtgagccgaagt

SEQ ID NO: 1723820 - DNA, 15 bp, Homo sapiens
cagtgagccgaagtc

SEQ ID NO: 1723821 - DNA, 15 bp, Homo sapiens
agtgagccgaagtcg

SEQ ID NO: 1723822 - DNA, 15 bp, Homo sapiens
gtgagccgaagtcgt

SEQ ID NO: 1723823 - DNA, 15 bp, Homo sapiens
tgagccgaagtcgtg

SEQ ID NO: 1723824 - DNA, 15 bp, Homo sapiens
gagccgaagtcgtgc

SEQ ID NO: 1723825 - DNA, 15 bp, Homo sapiens
agccgaagtcgtgcc

SEQ ID NO: 1723826 - DNA, 15 bp, Homo sapiens
gccgaagtcgtgcca

SEQ ID NO: 1723827 - DNA, 15 bp, Homo sapiens
ccgaagtcgtgccac

SEQ ID NO: 1723828 - DNA, 15 bp, Homo sapiens
cgaagtcgtgccact

SEQ ID NO: 1723829 - DNA, 15 bp, Homo sapiens
gaagtcgtgccactg

SEQ ID NO: 1723830 - DNA, 15 bp, Homo sapiens
aagtcgtgccactgc

SEQ ID NO: 1723831 - DNA, 15 bp, Homo sapiens
agtcgtgccactgca

SEQ ID NO: 1723832 - DNA, 15 bp, Homo sapiens
gtcgtgccactgcac

SEQ ID NO: 1723833 - DNA, 15 bp, Homo sapiens
agcctgggcaaaaaa

SEQ ID NO: 1723834 - DNA, 15 bp, Homo sapiens
gcctgggcaaaaaaa

SEQ ID NO: 1723835 - DNA, 15 bp, Homo sapiens
cctgggcaaaaaaaa

SEQ ID NO: 1723836 - DNA, 15 bp, Homo sapiens
ctgggcaaaaaaaaa

SEQ ID NO: 1723837 - DNA, 15 bp, Homo sapiens
tgggcaaaaaaaaaa

SEQ ID NO: 1723838 - DNA, 15 bp, Homo sapiens
gggcaaaaaaaaaaa

SEQ ID NO: 1723839 - DNA, 15 bp, Homo sapiens
ggcaaaaaaaaaaag

SEQ ID NO: 1723840 - DNA, 15 bp, Homo sapiens
gcaaaaaaaaaaaga

SEQ ID NO: 1723841 - DNA, 15 bp, Homo sapiens
caaaaaaaaaaagaa

SEQ ID NO: 1723842 - DNA, 15 bp, Homo sapiens
aaaaaaaagaaaaag

SEQ ID NO: 1723843 - DNA, 15 bp, Homo sapiens
aaaaaaagaaaaagc

SEQ ID NO: 1723844 - DNA, 15 bp, Homo sapiens
aaaaaagaaaaagca

SEQ ID NO: 1723845 - DNA, 15 bp, Homo sapiens
aaaaagaaaaagcag

SEQ ID NO: 1723846 - DNA, 15 bp, Homo sapiens
aaaagaaaaagcagc

SEQ ID NO: 1723847 - DNA, 15 bp, Homo sapiens
aaagaaaaagcagct

SEQ ID NO: 1723848 - DNA, 15 bp, Homo sapiens
aagaaaaagcagcta

SEQ ID NO: 1723849 - DNA, 15 bp, Homo sapiens
agaaaaagcagctaa

SEQ ID NO: 1723850 - DNA, 15 bp, Homo sapiens
gaaaaagcagctaaa

SEQ ID NO: 1723851 - DNA, 15 bp, Homo sapiens
aaaaagcagctaaaa

SEQ ID NO: 1723852 - DNA, 15 bp, Homo sapiens
aaaagcagctaaaat

SEQ ID NO: 1723853 - DNA, 15 bp, Homo sapiens
aaagcagctaaaatc

SEQ ID NO: 1723854 - DNA, 15 bp, Homo sapiens
aagcagctaaaatct

SEQ ID NO: 1723855 - DNA, 15 bp, Homo sapiens
agcagctaaaatcta

SEQ ID NO: 1723856 - DNA, 15 bp, Homo sapiens
gcagctaaaatctat

SEQ ID NO: 1723857 - DNA, 15 bp, Homo sapiens
cagctaaaatctatg

SEQ ID NO: 1723858 - DNA, 15 bp, Homo sapiens
agctaaaatctatgt

SEQ ID NO: 1723859 - DNA, 15 bp, Homo sapiens
gctaaaatctatgta

SEQ ID NO: 1723860 - DNA, 15 bp, Homo sapiens
ctaaaatctatgtat

SEQ ID NO: 1723861 - DNA, 15 bp, Homo sapiens
taaaatctatgtatt

SEQ ID NO: 1723862 - DNA, 15 bp, Homo sapiens
aaaatctatgtattt

SEQ ID NO: 1723863 - DNA, 15 bp, Homo sapiens
aaatctatgtattta

SEQ ID NO: 1723864 - DNA, 15 bp, Homo sapiens
aatctatgtatttaa

SEQ ID NO: 1723865 - DNA, 15 bp, Homo sapiens
atctatgtatttaac

SEQ ID NO: 1723866 - DNA, 15 bp, Homo sapiens
tctatgtatttaaca

SEQ ID NO: 1723867 - DNA, 15 bp, Homo sapiens
ctatgtatttaacaa

SEQ ID NO: 1723868 - DNA, 15 bp, Homo sapiens
tatgtatttaacaaa

SEQ ID NO: 1723869 - DNA, 15 bp, Homo sapiens
atgtatttaacaaaa

SEQ ID NO: 1723870 - DNA, 15 bp, Homo sapiens
tgtatttaacaaaaa

SEQ ID NO: 1723871 - DNA, 15 bp, Homo sapiens
gtatttaacaaaaat

SEQ ID NO: 1723872 - DNA, 15 bp, Homo sapiens
tatttaacaaaaatc

SEQ ID NO: 1723873 - DNA, 15 bp, Homo sapiens
atttaacaaaaatct

SEQ ID NO: 1723874 - DNA, 15 bp, Homo sapiens
tttaacaaaaatctc

SEQ ID NO: 1723875 - DNA, 15 bp, Homo sapiens
ttaacaaaaatctct

SEQ ID NO: 1723876 - DNA, 15 bp, Homo sapiens
taacaaaaatctcta

SEQ ID NO: 1723877 - DNA, 15 bp, Homo sapiens
aacaaaaatctctaa

SEQ ID NO: 1723878 - DNA, 15 bp, Homo sapiens
acaaaaatctctaat

SEQ ID NO: 1723879 - DNA, 15 bp, Homo sapiens
caaaaatctctaata

SEQ ID NO: 1723880 - DNA, 15 bp, Homo sapiens
aaaaatctctaatac

SEQ ID NO: 1723881 - DNA, 15 bp, Homo sapiens
aaaatctctaataca

SEQ ID NO: 1723882 - DNA, 15 bp, Homo sapiens
aaatctctaatacag

SEQ ID NO: 1723883 - DNA, 15 bp, Homo sapiens
aatctctaatacagt

SEQ ID NO: 1723884 - DNA, 15 bp, Homo sapiens
atctctaatacagta

SEQ ID NO: 1723885 - DNA, 15 bp, Homo sapiens
tctctaatacagtac

SEQ ID NO: 1723886 - DNA, 15 bp, Homo sapiens
ctctaatacagtacc

SEQ ID NO: 1723887 - DNA, 15 bp, Homo sapiens
tctaatacagtacca

SEQ ID NO: 1723888 - DNA, 15 bp, Homo sapiens
ctaatacagtaccat

SEQ ID NO: 1723889 - DNA, 15 bp, Homo sapiens
taatacagtaccatt

SEQ ID NO: 1723890 - DNA, 15 bp, Homo sapiens
aatacagtaccattt

SEQ ID NO: 1723891 - DNA, 15 bp, Homo sapiens
atacagtaccatttt

SEQ ID NO: 1723892 - DNA, 15 bp, Homo sapiens
tacagtaccatttta

SEQ ID NO: 1723893 - DNA, 15 bp, Homo sapiens
acagtaccattttat

SEQ ID NO: 1723894 - DNA, 15 bp, Homo sapiens
cagtaccattttatt

SEQ ID NO: 1723895 - DNA, 15 bp, Homo sapiens
agtaccattttattt

SEQ ID NO: 1723896 - DNA, 15 bp, Homo sapiens
gtaccattttattta

SEQ ID NO: 1723897 - DNA, 15 bp, Homo sapiens
taccattttatttat

SEQ ID NO: 1723898 - DNA, 15 bp, Homo sapiens
accattttatttatt

SEQ ID NO: 1723899 - DNA, 15 bp, Homo sapiens
ccattttatttatta

SEQ ID NO: 1723900 - DNA, 15 bp, Homo sapiens
cattttatttattat

SEQ ID NO: 1723901 - DNA, 15 bp, Homo sapiens
attttatttattata

SEQ ID NO: 1723902 - DNA, 15 bp, Homo sapiens
ttttatttattatag

SEQ ID NO: 1723903 - DNA, 15 bp, Homo sapiens
tttatttattatagt

SEQ ID NO: 1723904 - DNA, 15 bp, Homo sapiens
ttatttattatagtc

SEQ ID NO: 1723905 - DNA, 15 bp, Homo sapiens
tatttattatagtcc

SEQ ID NO: 1723906 - DNA, 15 bp, Homo sapiens
atttattatagtcct

SEQ ID NO: 1723907 - DNA, 15 bp, Homo sapiens
tttattatagtcctc

SEQ ID NO: 1723908 - DNA, 15 bp, Homo sapiens
ttattatagtcctca

SEQ ID NO: 1723909 - DNA, 15 bp, Homo sapiens
tattatagtcctcat

SEQ ID NO: 1723910 - DNA, 15 bp, Homo sapiens
attatagtcctcatg

SEQ ID NO: 1723911 - DNA, 15 bp, Homo sapiens
ttatagtcctcatgt

SEQ ID NO: 1723912 - DNA, 15 bp, Homo sapiens
tatagtcctcatgtt

SEQ ID NO: 1723913 - DNA, 15 bp, Homo sapiens
atagtcctcatgttg

SEQ ID NO: 1723914 - DNA, 15 bp, Homo sapiens
tagtcctcatgttgt

SEQ ID NO: 1723915 - DNA, 15 bp, Homo sapiens
agtcctcatgttgta

SEQ ID NO: 1723916 - DNA, 15 bp, Homo sapiens
gtcctcatgttgtat

SEQ ID NO: 1723917 - DNA, 15 bp, Homo sapiens
tcctcatgttgtata

SEQ ID NO: 1723918 - DNA, 15 bp, Homo sapiens
cctcatgttgtatat

SEQ ID NO: 1723919 - DNA, 15 bp, Homo sapiens
ctcatgttgtatatt

SEQ ID NO: 1723920 - DNA, 15 bp, Homo sapiens
tcatgttgtatatta

SEQ ID NO: 1723921 - DNA, 15 bp, Homo sapiens
catgttgtatattag

SEQ ID NO: 1723922 - DNA, 15 bp, Homo sapiens
atgttgtatattaga

SEQ ID NO: 1723923 - DNA, 15 bp, Homo sapiens
tgttgtatattagat

SEQ ID NO: 1723924 - DNA, 15 bp, Homo sapiens
gttgtatattagatc

SEQ ID NO: 1723925 - DNA, 15 bp, Homo sapiens
ttgtatattagatct

SEQ ID NO: 1723926 - DNA, 15 bp, Homo sapiens
tgtatattagatctc

SEQ ID NO: 1723927 - DNA, 15 bp, Homo sapiens
gtatattagatctct

SEQ ID NO: 1723928 - DNA, 15 bp, Homo sapiens
tatattagatctctg

SEQ ID NO: 1723929 - DNA, 15 bp, Homo sapiens
atattagatctctgg

SEQ ID NO: 1723930 - DNA, 15 bp, Homo sapiens
tattagatctctgga

SEQ ID NO: 1723931 - DNA, 15 bp, Homo sapiens
attagatctctggac

SEQ ID NO: 1723932 - DNA, 15 bp, Homo sapiens
ttagatctctggact

SEQ ID NO: 1723933 - DNA, 15 bp, Homo sapiens
tagatctctggactt

SEQ ID NO: 1723934 - DNA, 15 bp, Homo sapiens
agatctctggacttg

SEQ ID NO: 1723935 - DNA, 15 bp, Homo sapiens
gatctctggacttgt

SEQ ID NO: 1723936 - DNA, 15 bp, Homo sapiens
atctctggacttgtt

SEQ ID NO: 1723937 - DNA, 15 bp, Homo sapiens
tctctggacttgttc

SEQ ID NO: 1723938 - DNA, 15 bp, Homo sapiens
ctctggacttgttca

SEQ ID NO: 1723939 - DNA, 15 bp, Homo sapiens
tctggacttgttcat

SEQ ID NO: 1723940 - DNA, 15 bp, Homo sapiens
ctggacttgttcatc

SEQ ID NO: 1723941 - DNA, 15 bp, Homo sapiens
tggacttgttcatcc

SEQ ID NO: 1723942 - DNA, 15 bp, Homo sapiens
ggacttgttcatcct

SEQ ID NO: 1723943 - DNA, 15 bp, Homo sapiens
gacttgttcatccta

SEQ ID NO: 1723944 - DNA, 15 bp, Homo sapiens
acttgttcatcctat

SEQ ID NO: 1723945 - DNA, 15 bp, Homo sapiens
cttgttcatcctatg

SEQ ID NO: 1723946 - DNA, 15 bp, Homo sapiens
ttgttcatcctatgt

SEQ ID NO: 1723947 - DNA, 15 bp, Homo sapiens
tgttcatcctatgta

SEQ ID NO: 1723948 - DNA, 15 bp, Homo sapiens
gttcatcctatgtat

SEQ ID NO: 1723949 - DNA, 15 bp, Homo sapiens
ttcatcctatgtatt

SEQ ID NO: 1723950 - DNA, 15 bp, Homo sapiens
tcatcctatgtattt

SEQ ID NO: 1723951 - DNA, 15 bp, Homo sapiens
catcctatgtatttg

SEQ ID NO: 1723952 - DNA, 15 bp, Homo sapiens
atcctatgtatttgc

SEQ ID NO: 1723953 - DNA, 15 bp, Homo sapiens
tcctatgtatttgct

SEQ ID NO: 1723954 - DNA, 15 bp, Homo sapiens
cctatgtatttgcta

SEQ ID NO: 1723955 - DNA, 15 bp, Homo sapiens
ctatgtatttgctac

SEQ ID NO: 1723956 - DNA, 15 bp, Homo sapiens
tatgtatttgctact

SEQ ID NO: 1723957 - DNA, 15 bp, Homo sapiens
atgtatttgctactt

SEQ ID NO: 1723958 - DNA, 15 bp, Homo sapiens
tgtatttgctacttc

SEQ ID NO: 1723959 - DNA, 15 bp, Homo sapiens
gtatttgctacttcg

SEQ ID NO: 1723960 - DNA, 15 bp, Homo sapiens
tatttgctacttcgt

SEQ ID NO: 1723961 - DNA, 15 bp, Homo sapiens
atttgctacttcgta

SEQ ID NO: 1723962 - DNA, 15 bp, Homo sapiens
tttgctacttcgtat

SEQ ID NO: 1723963 - DNA, 15 bp, Homo sapiens
ttgctacttcgtatc

SEQ ID NO: 1723964 - DNA, 15 bp, Homo sapiens
tgctacttcgtatcc

SEQ ID NO: 1723965 - DNA, 15 bp, Homo sapiens
gctacttcgtatcct

SEQ ID NO: 1723966 - DNA, 15 bp, Homo sapiens
ctacttcgtatcctt

SEQ ID NO: 1723967 - DNA, 15 bp, Homo sapiens
tacttcgtatccttt

SEQ ID NO: 1723968 - DNA, 15 bp, Homo sapiens
acttcgtatcctttg

SEQ ID NO: 1723969 - DNA, 15 bp, Homo sapiens
cttcgtatcctttga

SEQ ID NO: 1723970 - DNA, 15 bp, Homo sapiens
ttcgtatcctttgaa

SEQ ID NO: 1723971 - DNA, 15 bp, Homo sapiens
tcgtatcctttgaac

SEQ ID NO: 1723972 - DNA, 15 bp, Homo sapiens
cgtatcctttgaact

SEQ ID NO: 1723973 - DNA, 15 bp, Homo sapiens
gtatcctttgaacta

SEQ ID NO: 1723974 - DNA, 15 bp, Homo sapiens
tatcctttgaactac

SEQ ID NO: 1723975 - DNA, 15 bp, Homo sapiens
atcctttgaactaca

SEQ ID NO: 1723976 - DNA, 15 bp, Homo sapiens
tcctttgaactacat

SEQ ID NO: 1723977 - DNA, 15 bp, Homo sapiens
cctttgaactacatc

SEQ ID NO: 1723978 - DNA, 15 bp, Homo sapiens
ctttgaactacatct

SEQ ID NO: 1723979 - DNA, 15 bp, Homo sapiens
tttgaactacatctt

SEQ ID NO: 1723980 - DNA, 15 bp, Homo sapiens
ttgaactacatcttt

SEQ ID NO: 1723981 - DNA, 15 bp, Homo sapiens
tgaactacatctttt

SEQ ID NO: 1723982 - DNA, 15 bp, Homo sapiens
gaactacatcttttc

SEQ ID NO: 1723983 - DNA, 15 bp, Homo sapiens
aactacatcttttca

SEQ ID NO: 1723984 - DNA, 15 bp, Homo sapiens
actacatcttttcaa

SEQ ID NO: 1723985 - DNA, 15 bp, Homo sapiens
ctacatcttttcaaa

SEQ ID NO: 1723986 - DNA, 15 bp, Homo sapiens
tacatcttttcaaag

SEQ ID NO: 1723987 - DNA, 15 bp, Homo sapiens
acatcttttcaaagg

SEQ ID NO: 1723988 - DNA, 15 bp, Homo sapiens
catcttttcaaagga

SEQ ID NO: 1723989 - DNA, 15 bp, Homo sapiens
atcttttcaaaggat

SEQ ID NO: 1723990 - DNA, 15 bp, Homo sapiens
tcttttcaaaggatg

SEQ ID NO: 1723991 - DNA, 15 bp, Homo sapiens
cttttcaaaggatga

SEQ ID NO: 1723992 - DNA, 15 bp, Homo sapiens
ttttcaaaggatgaa

SEQ ID NO: 1723993 - DNA, 15 bp, Homo sapiens
tttcaaaggatgaaa

SEQ ID NO: 1723994 - DNA, 15 bp, Homo sapiens
ttcaaaggatgaaat

SEQ ID NO: 1723995 - DNA, 15 bp, Homo sapiens
tcaaaggatgaaatt

SEQ ID NO: 1723996 - DNA, 15 bp, Homo sapiens
caaaggatgaaattg

SEQ ID NO: 1723997 - DNA, 15 bp, Homo sapiens
aaaggatgaaattgg

SEQ ID NO: 1723998 - DNA, 15 bp, Homo sapiens
aaggatgaaattggg

SEQ ID NO: 1723999 - DNA, 15 bp, Homo sapiens
aggatgaaattgggt

SEQ ID NO: 1724000 - DNA, 15 bp, Homo sapiens
ggatgaaattgggta

SEQ ID NO: 1724001 - DNA, 15 bp, Homo sapiens
gatgaaattgggtaa

SEQ ID NO: 1724002 - DNA, 15 bp, Homo sapiens
atgaaattgggtaat

SEQ ID NO: 1724003 - DNA, 15 bp, Homo sapiens
tgaaattgggtaatg

SEQ ID NO: 1724004 - DNA, 15 bp, Homo sapiens
gaaattgggtaatgt

SEQ ID NO: 1724005 - DNA, 15 bp, Homo sapiens
aaattgggtaatgtg

SEQ ID NO: 1724006 - DNA, 15 bp, Homo sapiens
aattgggtaatgtga

SEQ ID NO: 1724007 - DNA, 15 bp, Homo sapiens
attgggtaatgtgat

SEQ ID NO: 1724008 - DNA, 15 bp, Homo sapiens
ttgggtaatgtgatg

SEQ ID NO: 1724009 - DNA, 15 bp, Homo sapiens
tgggtaatgtgatgc

SEQ ID NO: 1724010 - DNA, 15 bp, Homo sapiens
gggtaatgtgatgcc

SEQ ID NO: 1724011 - DNA, 15 bp, Homo sapiens
ggtaatgtgatgcct

SEQ ID NO: 1724012 - DNA, 15 bp, Homo sapiens
gtaatgtgatgcctc

SEQ ID NO: 1724013 - DNA, 15 bp, Homo sapiens
taatgtgatgcctct

SEQ ID NO: 1724014 - DNA, 15 bp, Homo sapiens
aatgtgatgcctcta

SEQ ID NO: 1724015 - DNA, 15 bp, Homo sapiens
atgtgatgcctctag

SEQ ID NO: 1724016 - DNA, 15 bp, Homo sapiens
tgtgatgcctctagc

SEQ ID NO: 1724017 - DNA, 15 bp, Homo sapiens
gtgatgcctctagct

SEQ ID NO: 1724018 - DNA, 15 bp, Homo sapiens
tgatgcctctagctt

SEQ ID NO: 1724019 - DNA, 15 bp, Homo sapiens
gatgcctctagcttt

SEQ ID NO: 1724020 - DNA, 15 bp, Homo sapiens
atgcctctagctttg

SEQ ID NO: 1724021 - DNA, 15 bp, Homo sapiens
tgcctctagctttgg

SEQ ID NO: 1724022 - DNA, 15 bp, Homo sapiens
gcctctagctttggt

SEQ ID NO: 1724023 - DNA, 15 bp, Homo sapiens
cctctagctttggtc

SEQ ID NO: 1724024 - DNA, 15 bp, Homo sapiens
ctctagctttggtct

SEQ ID NO: 1724025 - DNA, 15 bp, Homo sapiens
tctagctttggtctt

SEQ ID NO: 1724026 - DNA, 15 bp, Homo sapiens
ctagctttggtcttt

SEQ ID NO: 1724027 - DNA, 15 bp, Homo sapiens
tagctttggtctttt

SEQ ID NO: 1724028 - DNA, 15 bp, Homo sapiens
agctttggtcttttt

SEQ ID NO: 1724029 - DNA, 15 bp, Homo sapiens
gctttggtctttttg

SEQ ID NO: 1724030 - DNA, 15 bp, Homo sapiens
ctttggtctttttgt

SEQ ID NO: 1724031 - DNA, 15 bp, Homo sapiens
tttggtctttttgtg

SEQ ID NO: 1724032 - DNA, 15 bp, Homo sapiens
ttggtctttttgtgt

SEQ ID NO: 1724033 - DNA, 15 bp, Homo sapiens
tggtctttttgtgta

SEQ ID NO: 1724034 - DNA, 15 bp, Homo sapiens
ggtctttttgtgtag

SEQ ID NO: 1724035 - DNA, 15 bp, Homo sapiens
gtctttttgtgtagg

SEQ ID NO: 1724036 - DNA, 15 bp, Homo sapiens
tctttttgtgtaggg

SEQ ID NO: 1724037 - DNA, 15 bp, Homo sapiens
ctttttgtgtagggt

SEQ ID NO: 1724038 - DNA, 15 bp, Homo sapiens
tttttgtgtagggtt

SEQ ID NO: 1724039 - DNA, 15 bp, Homo sapiens
ttttgtgtagggttg

SEQ ID NO: 1724040 - DNA, 15 bp, Homo sapiens
tttgtgtagggttgc

SEQ ID NO: 1724041 - DNA, 15 bp, Homo sapiens
ttgtgtagggttgcc

SEQ ID NO: 1724042 - DNA, 15 bp, Homo sapiens
tgtgtagggttgcct

SEQ ID NO: 1724043 - DNA, 15 bp, Homo sapiens
gtgtagggttgcctt

SEQ ID NO: 1724044 - DNA, 15 bp, Homo sapiens
tgtagggttgccttg

SEQ ID NO: 1724045 - DNA, 15 bp, Homo sapiens
gtagggttgccttga

SEQ ID NO: 1724046 - DNA, 15 bp, Homo sapiens
tagggttgccttgac

SEQ ID NO: 1724047 - DNA, 15 bp, Homo sapiens
agggttgccttgact

SEQ ID NO: 1724048 - DNA, 15 bp, Homo sapiens
gggttgccttgacta

SEQ ID NO: 1724049 - DNA, 15 bp, Homo sapiens
ggttgccttgactat

SEQ ID NO: 1724050 - DNA, 15 bp, Homo sapiens
gttgccttgactatt

SEQ ID NO: 1724051 - DNA, 15 bp, Homo sapiens
ttgccttgactattc

SEQ ID NO: 1724052 - DNA, 15 bp, Homo sapiens
tgccttgactattcg

SEQ ID NO: 1724053 - DNA, 15 bp, Homo sapiens
gccttgactattcgg

SEQ ID NO: 1724054 - DNA, 15 bp, Homo sapiens
ccttgactattcggg

SEQ ID NO: 1724055 - DNA, 15 bp, Homo sapiens
cttgactattcgggc

SEQ ID NO: 1724056 - DNA, 15 bp, Homo sapiens
ttgactattcgggct

SEQ ID NO: 1724057 - DNA, 15 bp, Homo sapiens
tgactattcgggctc

SEQ ID NO: 1724058 - DNA, 15 bp, Homo sapiens
gactattcgggctct

SEQ ID NO: 1724059 - DNA, 15 bp, Homo sapiens
actattcgggctctt

SEQ ID NO: 1724060 - DNA, 15 bp, Homo sapiens
ctattcgggctcttt

SEQ ID NO: 1724061 - DNA, 15 bp, Homo sapiens
tattcgggctctttt

SEQ ID NO: 1724062 - DNA, 15 bp, Homo sapiens
attcgggctcttttt

SEQ ID NO: 1724063 - DNA, 15 bp, Homo sapiens
ttcgggctctttttc

SEQ ID NO: 1724064 - DNA, 15 bp, Homo sapiens
tcgggctctttttca

SEQ ID NO: 1724065 - DNA, 15 bp, Homo sapiens
cgggctctttttcag

SEQ ID NO: 1724066 - DNA, 15 bp, Homo sapiens
gggctctttttcagt

SEQ ID NO: 1724067 - DNA, 15 bp, Homo sapiens
ggctctttttcagtt

SEQ ID NO: 1724068 - DNA, 15 bp, Homo sapiens
gctctttttcagttc

SEQ ID NO: 1724069 - DNA, 15 bp, Homo sapiens
ctctttttcagttcc

SEQ ID NO: 1724070 - DNA, 15 bp, Homo sapiens
tctttttcagttcca

SEQ ID NO: 1724071 - DNA, 15 bp, Homo sapiens
ctttttcagttccat

SEQ ID NO: 1724072 - DNA, 15 bp, Homo sapiens
tttttcagttccata

SEQ ID NO: 1724073 - DNA, 15 bp, Homo sapiens
ttttcagttccatat

SEQ ID NO: 1724074 - DNA, 15 bp, Homo sapiens
tttcagttccatatg

SEQ ID NO: 1724075 - DNA, 15 bp, Homo sapiens
ttcagttccatatga

SEQ ID NO: 1724076 - DNA, 15 bp, Homo sapiens
tcagttccatatgaa

SEQ ID NO: 1724077 - DNA, 15 bp, Homo sapiens
cagttccatatgaat

SEQ ID NO: 1724078 - DNA, 15 bp, Homo sapiens
agttccatatgaatt

SEQ ID NO: 1724079 - DNA, 15 bp, Homo sapiens
gttccatatgaattt

SEQ ID NO: 1724080 - DNA, 15 bp, Homo sapiens
ttccatatgaatttt

SEQ ID NO: 1724081 - DNA, 15 bp, Homo sapiens
tccatatgaatttta

SEQ ID NO: 1724082 - DNA, 15 bp, Homo sapiens
ccatatgaattttaa

SEQ ID NO: 1724083 - DNA, 15 bp, Homo sapiens
catatgaattttaaa

SEQ ID NO: 1724084 - DNA, 15 bp, Homo sapiens
atatgaattttaaaa

SEQ ID NO: 1724085 - DNA, 15 bp, Homo sapiens
tatgaattttaaaat

SEQ ID NO: 1724086 - DNA, 15 bp, Homo sapiens
atgaattttaaaata

SEQ ID NO: 1724087 - DNA, 15 bp, Homo sapiens
tgaattttaaaatag

SEQ ID NO: 1724088 - DNA, 15 bp, Homo sapiens
gaattttaaaataga

SEQ ID NO: 1724089 - DNA, 15 bp, Homo sapiens
aattttaaaatagat

SEQ ID NO: 1724090 - DNA, 15 bp, Homo sapiens
attttaaaatagatt

SEQ ID NO: 1724091 - DNA, 15 bp, Homo sapiens
ttttaaaatagattt

SEQ ID NO: 1724092 - DNA, 15 bp, Homo sapiens
tttaaaatagatttt

SEQ ID NO: 1724093 - DNA, 15 bp, Homo sapiens
ttaaaatagattttt

SEQ ID NO: 1724094 - DNA, 15 bp, Homo sapiens
taaaatagatttttt

SEQ ID NO: 1724095 - DNA, 15 bp, Homo sapiens
aaaatagattttttt

SEQ ID NO: 1724096 - DNA, 15 bp, Homo sapiens
aaatagatttttttt

SEQ ID NO: 1724097 - DNA, 15 bp, Homo sapiens
agattttttttttct

SEQ ID NO: 1724098 - DNA, 15 bp, Homo sapiens
tttttttctttttcc

SEQ ID NO: 1724099 - DNA, 15 bp, Homo sapiens
ttttttctttttcct

SEQ ID NO: 1724100 - DNA, 15 bp, Homo sapiens
tttttctttttccta

SEQ ID NO: 1724101 - DNA, 15 bp, Homo sapiens
ttttctttttcctaa

SEQ ID NO: 1724102 - DNA, 15 bp, Homo sapiens
tttctttttcctaac

SEQ ID NO: 1724103 - DNA, 15 bp, Homo sapiens
ttctttttcctaact

SEQ ID NO: 1724104 - DNA, 15 bp, Homo sapiens
tctttttcctaactc

SEQ ID NO: 1724105 - DNA, 15 bp, Homo sapiens
ctttttcctaactct

SEQ ID NO: 1724106 - DNA, 15 bp, Homo sapiens
tttttcctaactctg

SEQ ID NO: 1724107 - DNA, 15 bp, Homo sapiens
ttttcctaactctgt

SEQ ID NO: 1724108 - DNA, 15 bp, Homo sapiens
tttcctaactctgtg

SEQ ID NO: 1724109 - DNA, 15 bp, Homo sapiens
ttcctaactctgtga

SEQ ID NO: 1724110 - DNA, 15 bp, Homo sapiens
tcctaactctgtgaa

SEQ ID NO: 1724111 - DNA, 15 bp, Homo sapiens
cctaactctgtgaat

SEQ ID NO: 1724112 - DNA, 15 bp, Homo sapiens
ctaactctgtgaata

SEQ ID NO: 1724113 - DNA, 15 bp, Homo sapiens
taactctgtgaataa

SEQ ID NO: 1724114 - DNA, 15 bp, Homo sapiens
aactctgtgaataat

SEQ ID NO: 1724115 - DNA, 15 bp, Homo sapiens
actctgtgaataatg

SEQ ID NO: 1724116 - DNA, 15 bp, Homo sapiens
ctctgtgaataatgt

SEQ ID NO: 1724117 - DNA, 15 bp, Homo sapiens
tctgtgaataatgtc

SEQ ID NO: 1724118 - DNA, 15 bp, Homo sapiens
ctgtgaataatgtca

SEQ ID NO: 1724119 - DNA, 15 bp, Homo sapiens
tgtgaataatgtcat

SEQ ID NO: 1724120 - DNA, 15 bp, Homo sapiens
gtgaataatgtcatt

SEQ ID NO: 1724121 - DNA, 15 bp, Homo sapiens
tgaataatgtcattg

SEQ ID NO: 1724122 - DNA, 15 bp, Homo sapiens
gaataatgtcattgg

SEQ ID NO: 1724123 - DNA, 15 bp, Homo sapiens
aataatgtcattggt

SEQ ID NO: 1724124 - DNA, 15 bp, Homo sapiens
ataatgtcattggta

SEQ ID NO: 1724125 - DNA, 15 bp, Homo sapiens
taatgtcattggtag

SEQ ID NO: 1724126 - DNA, 15 bp, Homo sapiens
aatgtcattggtagt

SEQ ID NO: 1724127 - DNA, 15 bp, Homo sapiens
atgtcattggtagtc

SEQ ID NO: 1724128 - DNA, 15 bp, Homo sapiens
tgtcattggtagtct

SEQ ID NO: 1724129 - DNA, 15 bp, Homo sapiens
gtcattggtagtctg

SEQ ID NO: 1724130 - DNA, 15 bp, Homo sapiens
tcattggtagtctga

SEQ ID NO: 1724131 - DNA, 15 bp, Homo sapiens
cattggtagtctgat

SEQ ID NO: 1724132 - DNA, 15 bp, Homo sapiens
attggtagtctgata

SEQ ID NO: 1724133 - DNA, 15 bp, Homo sapiens
ttggtagtctgatag

SEQ ID NO: 1724134 - DNA, 15 bp, Homo sapiens
tggtagtctgataga

SEQ ID NO: 1724135 - DNA, 15 bp, Homo sapiens
ggtagtctgatagaa

SEQ ID NO: 1724136 - DNA, 15 bp, Homo sapiens
gtagtctgatagaaa

SEQ ID NO: 1724137 - DNA, 15 bp, Homo sapiens
tagtctgatagaaac

SEQ ID NO: 1724138 - DNA, 15 bp, Homo sapiens
agtctgatagaaaca

SEQ ID NO: 1724139 - DNA, 15 bp, Homo sapiens
gtctgatagaaacag

SEQ ID NO: 1724140 - DNA, 15 bp, Homo sapiens
tctgatagaaacagc

SEQ ID NO: 1724141 - DNA, 15 bp, Homo sapiens
ctgatagaaacagca

SEQ ID NO: 1724142 - DNA, 15 bp, Homo sapiens
tgatagaaacagcat

SEQ ID NO: 1724143 - DNA, 15 bp, Homo sapiens
gatagaaacagcatt

SEQ ID NO: 1724144 - DNA, 15 bp, Homo sapiens
atagaaacagcattg

SEQ ID NO: 1724145 - DNA, 15 bp, Homo sapiens
tagaaacagcattga

SEQ ID NO: 1724146 - DNA, 15 bp, Homo sapiens
agaaacagcattgaa

SEQ ID NO: 1724147 - DNA, 15 bp, Homo sapiens
gaaacagcattgaac

SEQ ID NO: 1724148 - DNA, 15 bp, Homo sapiens
aaacagcattgaacc

SEQ ID NO: 1724149 - DNA, 15 bp, Homo sapiens
aacagcattgaacct

SEQ ID NO: 1724150 - DNA, 15 bp, Homo sapiens
acagcattgaacctg

SEQ ID NO: 1724151 - DNA, 15 bp, Homo sapiens
cagcattgaacctgt

SEQ ID NO: 1724152 - DNA, 15 bp, Homo sapiens
agcattgaacctgta

SEQ ID NO: 1724153 - DNA, 15 bp, Homo sapiens
gcattgaacctgtaa

SEQ ID NO: 1724154 - DNA, 15 bp, Homo sapiens
cattgaacctgtaaa

SEQ ID NO: 1724155 - DNA, 15 bp, Homo sapiens
attgaacctgtaaat

SEQ ID NO: 1724156 - DNA, 15 bp, Homo sapiens
ttgaacctgtaaatt

SEQ ID NO: 1724157 - DNA, 15 bp, Homo sapiens
tgaacctgtaaattg

SEQ ID NO: 1724158 - DNA, 15 bp, Homo sapiens
gaacctgtaaattgc

SEQ ID NO: 1724159 - DNA, 15 bp, Homo sapiens
aacctgtaaattgct

SEQ ID NO: 1724160 - DNA, 15 bp, Homo sapiens
acctgtaaattgctt

SEQ ID NO: 1724161 - DNA, 15 bp, Homo sapiens
cctgtaaattgcttt

SEQ ID NO: 1724162 - DNA, 15 bp, Homo sapiens
ctgtaaattgctttg

SEQ ID NO: 1724163 - DNA, 15 bp, Homo sapiens
tgtaaattgctttgg

SEQ ID NO: 1724164 - DNA, 15 bp, Homo sapiens
gtaaattgctttggg

SEQ ID NO: 1724165 - DNA, 15 bp, Homo sapiens
taaattgctttgggc

SEQ ID NO: 1724166 - DNA, 15 bp, Homo sapiens
aaattgctttgggca

SEQ ID NO: 1724167 - DNA, 15 bp, Homo sapiens
aattgctttgggcag

SEQ ID NO: 1724168 - DNA, 15 bp, Homo sapiens
attgctttgggcagt

SEQ ID NO: 1724169 - DNA, 15 bp, Homo sapiens
ttgctttgggcagtg

SEQ ID NO: 1724170 - DNA, 15 bp, Homo sapiens
tgctttgggcagtgt

SEQ ID NO: 1724171 - DNA, 15 bp, Homo sapiens
gctttgggcagtgtg

SEQ ID NO: 1724172 - DNA, 15 bp, Homo sapiens
ctttgggcagtgtgg

SEQ ID NO: 1724173 - DNA, 15 bp, Homo sapiens
tttgggcagtgtggc

SEQ ID NO: 1724174 - DNA, 15 bp, Homo sapiens
ttgggcagtgtggcc

SEQ ID NO: 1724175 - DNA, 15 bp, Homo sapiens
tgggcagtgtggcca

SEQ ID NO: 1724176 - DNA, 15 bp, Homo sapiens
gggcagtgtggccat

SEQ ID NO: 1724177 - DNA, 15 bp, Homo sapiens
ggcagtgtggccatt

SEQ ID NO: 1724178 - DNA, 15 bp, Homo sapiens
gcagtgtggccattt

SEQ ID NO: 1724179 - DNA, 15 bp, Homo sapiens
cagtgtggccatttt

SEQ ID NO: 1724180 - DNA, 15 bp, Homo sapiens
agtgtggccatttta

SEQ ID NO: 1724181 - DNA, 15 bp, Homo sapiens
gtgtggccattttaa

SEQ ID NO: 1724182 - DNA, 15 bp, Homo sapiens
tgtggccattttaat

SEQ ID NO: 1724183 - DNA, 15 bp, Homo sapiens
gtggccattttaatg

SEQ ID NO: 1724184 - DNA, 15 bp, Homo sapiens
tggccattttaatga

SEQ ID NO: 1724185 - DNA, 15 bp, Homo sapiens
ggccattttaatgat

SEQ ID NO: 1724186 - DNA, 15 bp, Homo sapiens
gccattttaatgata

SEQ ID NO: 1724187 - DNA, 15 bp, Homo sapiens
ccattttaatgatat

SEQ ID NO: 1724188 - DNA, 15 bp, Homo sapiens
cattttaatgatatt

SEQ ID NO: 1724189 - DNA, 15 bp, Homo sapiens
attttaatgatattg

SEQ ID NO: 1724190 - DNA, 15 bp, Homo sapiens
ttttaatgatattga

SEQ ID NO: 1724191 - DNA, 15 bp, Homo sapiens
tttaatgatattgat

SEQ ID NO: 1724192 - DNA, 15 bp, Homo sapiens
ttaatgatattgatt

SEQ ID NO: 1724193 - DNA, 15 bp, Homo sapiens
taatgatattgattc

SEQ ID NO: 1724194 - DNA, 15 bp, Homo sapiens
aatgatattgattct

SEQ ID NO: 1724195 - DNA, 15 bp, Homo sapiens
atgatattgattctt

SEQ ID NO: 1724196 - DNA, 15 bp, Homo sapiens
tgatattgattcttc

SEQ ID NO: 1724197 - DNA, 15 bp, Homo sapiens
gatattgattcttct

SEQ ID NO: 1724198 - DNA, 15 bp, Homo sapiens
atattgattcttctt

SEQ ID NO: 1724199 - DNA, 15 bp, Homo sapiens
tattgattcttctta

SEQ ID NO: 1724200 - DNA, 15 bp, Homo sapiens
attgattcttcttat

SEQ ID NO: 1724201 - DNA, 15 bp, Homo sapiens
ttgattcttcttatc

SEQ ID NO: 1724202 - DNA, 15 bp, Homo sapiens
tgattcttcttatcc

SEQ ID NO: 1724203 - DNA, 15 bp, Homo sapiens
gattcttcttatcca

SEQ ID NO: 1724204 - DNA, 15 bp, Homo sapiens
attcttcttatccat

SEQ ID NO: 1724205 - DNA, 15 bp, Homo sapiens
ttcttcttatccatg

SEQ ID NO: 1724206 - DNA, 15 bp, Homo sapiens
tcttcttatccatga

SEQ ID NO: 1724207 - DNA, 15 bp, Homo sapiens
cttcttatccatgag

SEQ ID NO: 1724208 - DNA, 15 bp, Homo sapiens
ttcttatccatgagc

SEQ ID NO: 1724209 - DNA, 15 bp, Homo sapiens
tcttatccatgagca

SEQ ID NO: 1724210 - DNA, 15 bp, Homo sapiens
cttatccatgagcat

SEQ ID NO: 1724211 - DNA, 15 bp, Homo sapiens
ttatccatgagcatg

SEQ ID NO: 1724212 - DNA, 15 bp, Homo sapiens
tatccatgagcatgg

SEQ ID NO: 1724213 - DNA, 15 bp, Homo sapiens
atccatgagcatgga

SEQ ID NO: 1724214 - DNA, 15 bp, Homo sapiens
tccatgagcatggaa

SEQ ID NO: 1724215 - DNA, 15 bp, Homo sapiens
ccatgagcatggaat

SEQ ID NO: 1724216 - DNA, 15 bp, Homo sapiens
catgagcatggaatg

SEQ ID NO: 1724217 - DNA, 15 bp, Homo sapiens
atgagcatggaatgt

SEQ ID NO: 1724218 - DNA, 15 bp, Homo sapiens
tgagcatggaatgtt

SEQ ID NO: 1724219 - DNA, 15 bp, Homo sapiens
gagcatggaatgttt

SEQ ID NO: 1724220 - DNA, 15 bp, Homo sapiens
agcatggaatgtttt

SEQ ID NO: 1724221 - DNA, 15 bp, Homo sapiens
gcatggaatgttttt

SEQ ID NO: 1724222 - DNA, 15 bp, Homo sapiens
catggaatgtttttc

SEQ ID NO: 1724223 - DNA, 15 bp, Homo sapiens
atggaatgtttttcc

SEQ ID NO: 1724224 - DNA, 15 bp, Homo sapiens
tggaatgtttttcca

SEQ ID NO: 1724225 - DNA, 15 bp, Homo sapiens
ggaatgtttttccat

SEQ ID NO: 1724226 - DNA, 15 bp, Homo sapiens
gaatgtttttccatt

SEQ ID NO: 1724227 - DNA, 15 bp, Homo sapiens
aatgtttttccattt

SEQ ID NO: 1724228 - DNA, 15 bp, Homo sapiens
atgtttttccatttg

SEQ ID NO: 1724229 - DNA, 15 bp, Homo sapiens
tgtttttccatttgt

SEQ ID NO: 1724230 - DNA, 15 bp, Homo sapiens
gtttttccatttgtt

SEQ ID NO: 1724231 - DNA, 15 bp, Homo sapiens
tttttccatttgttc

SEQ ID NO: 1724232 - DNA, 15 bp, Homo sapiens
ttttccatttgttcg

SEQ ID NO: 1724233 - DNA, 15 bp, Homo sapiens
tttccatttgttcgt

SEQ ID NO: 1724234 - DNA, 15 bp, Homo sapiens
ttccatttgttcgtg

SEQ ID NO: 1724235 - DNA, 15 bp, Homo sapiens
tccatttgttcgtgt

SEQ ID NO: 1724236 - DNA, 15 bp, Homo sapiens
ccatttgttcgtgtc

SEQ ID NO: 1724237 - DNA, 15 bp, Homo sapiens
catttgttcgtgtca

SEQ ID NO: 1724238 - DNA, 15 bp, Homo sapiens
atttgttcgtgtcat

SEQ ID NO: 1724239 - DNA, 15 bp, Homo sapiens
tttgttcgtgtcatc

SEQ ID NO: 1724240 - DNA, 15 bp, Homo sapiens
ttgttcgtgtcatct

SEQ ID NO: 1724241 - DNA, 15 bp, Homo sapiens
tgttcgtgtcatctc

SEQ ID NO: 1724242 - DNA, 15 bp, Homo sapiens
gttcgtgtcatctct

SEQ ID NO: 1724243 - DNA, 15 bp, Homo sapiens
ttcgtgtcatctctg

SEQ ID NO: 1724244 - DNA, 15 bp, Homo sapiens
tcgtgtcatctctga

SEQ ID NO: 1724245 - DNA, 15 bp, Homo sapiens
cgtgtcatctctgat

SEQ ID NO: 1724246 - DNA, 15 bp, Homo sapiens
gtgtcatctctgatt

SEQ ID NO: 1724247 - DNA, 15 bp, Homo sapiens
tgtcatctctgattt

SEQ ID NO: 1724248 - DNA, 15 bp, Homo sapiens
gtcatctctgattta

SEQ ID NO: 1724249 - DNA, 15 bp, Homo sapiens
tcatctctgatttat

SEQ ID NO: 1724250 - DNA, 15 bp, Homo sapiens
catctctgatttatt

SEQ ID NO: 1724251 - DNA, 15 bp, Homo sapiens
atctctgatttattt

SEQ ID NO: 1724252 - DNA, 15 bp, Homo sapiens
tctctgatttatttg

SEQ ID NO: 1724253 - DNA, 15 bp, Homo sapiens
ctctgatttatttga

SEQ ID NO: 1724254 - DNA, 15 bp, Homo sapiens
tctgatttatttgag

SEQ ID NO: 1724255 - DNA, 15 bp, Homo sapiens
ctgatttatttgagc

SEQ ID NO: 1724256 - DNA, 15 bp, Homo sapiens
tgatttatttgagct

SEQ ID NO: 1724257 - DNA, 15 bp, Homo sapiens
gatttatttgagctg

SEQ ID NO: 1724258 - DNA, 15 bp, Homo sapiens
atttatttgagctgt

SEQ ID NO: 1724259 - DNA, 15 bp, Homo sapiens
tttatttgagctgtg

SEQ ID NO: 1724260 - DNA, 15 bp, Homo sapiens
ttatttgagctgtgt

SEQ ID NO: 1724261 - DNA, 15 bp, Homo sapiens
tatttgagctgtgtt

SEQ ID NO: 1724262 - DNA, 15 bp, Homo sapiens
atttgagctgtgttt

SEQ ID NO: 1724263 - DNA, 15 bp, Homo sapiens
tttgagctgtgtttt

SEQ ID NO: 1724264 - DNA, 15 bp, Homo sapiens
ttgagctgtgttttg

SEQ ID NO: 1724265 - DNA, 15 bp, Homo sapiens
tgagctgtgttttgt

SEQ ID NO: 1724266 - DNA, 15 bp, Homo sapiens
gagctgtgttttgta

SEQ ID NO: 1724267 - DNA, 15 bp, Homo sapiens
agctgtgttttgtaa

SEQ ID NO: 1724268 - DNA, 15 bp, Homo sapiens
gctgtgttttgtaat

SEQ ID NO: 1724269 - DNA, 15 bp, Homo sapiens
ctgtgttttgtaatt

SEQ ID NO: 1724270 - DNA, 15 bp, Homo sapiens
tgtgttttgtaattc

SEQ ID NO: 1724271 - DNA, 15 bp, Homo sapiens
gtgttttgtaattct

SEQ ID NO: 1724272 - DNA, 15 bp, Homo sapiens
tgttttgtaattctt

SEQ ID NO: 1724273 - DNA, 15 bp, Homo sapiens
gttttgtaattcttg

SEQ ID NO: 1724274 - DNA, 15 bp, Homo sapiens
ttttgtaattcttgt

SEQ ID NO: 1724275 - DNA, 15 bp, Homo sapiens
tttgtaattcttgta

SEQ ID NO: 1724276 - DNA, 15 bp, Homo sapiens
ttgtaattcttgtag

SEQ ID NO: 1724277 - DNA, 15 bp, Homo sapiens
tgtaattcttgtaga

SEQ ID NO: 1724278 - DNA, 15 bp, Homo sapiens
gtaattcttgtagag

SEQ ID NO: 1724279 - DNA, 15 bp, Homo sapiens
taattcttgtagaga

SEQ ID NO: 1724280 - DNA, 15 bp, Homo sapiens
aattcttgtagagag

SEQ ID NO: 1724281 - DNA, 15 bp, Homo sapiens
attcttgtagagagc

SEQ ID NO: 1724282 - DNA, 15 bp, Homo sapiens
ttcttgtagagagct

SEQ ID NO: 1724283 - DNA, 15 bp, Homo sapiens
tcttgtagagagctt

SEQ ID NO: 1724284 - DNA, 15 bp, Homo sapiens
cttgtagagagcttt

SEQ ID NO: 1724285 - DNA, 15 bp, Homo sapiens
ttgtagagagctttc

SEQ ID NO: 1724286 - DNA, 15 bp, Homo sapiens
tgtagagagctttca

SEQ ID NO: 1724287 - DNA, 15 bp, Homo sapiens
gtagagagctttcac

SEQ ID NO: 1724288 - DNA, 15 bp, Homo sapiens
tagagagctttcacc

SEQ ID NO: 1724289 - DNA, 15 bp, Homo sapiens
agagagctttcacct

SEQ ID NO: 1724290 - DNA, 15 bp, Homo sapiens
gagagctttcacctc

SEQ ID NO: 1724291 - DNA, 15 bp, Homo sapiens
agagctttcacctcc

SEQ ID NO: 1724292 - DNA, 15 bp, Homo sapiens
gagctttcacctccc

SEQ ID NO: 1724293 - DNA, 15 bp, Homo sapiens
agctttcacctccct

SEQ ID NO: 1724294 - DNA, 15 bp, Homo sapiens
gctttcacctcccta

SEQ ID NO: 1724295 - DNA, 15 bp, Homo sapiens
ctttcacctccctag

SEQ ID NO: 1724296 - DNA, 15 bp, Homo sapiens
tttcacctccctagt

SEQ ID NO: 1724297 - DNA, 15 bp, Homo sapiens
ttcacctccctagtt

SEQ ID NO: 1724298 - DNA, 15 bp, Homo sapiens
tcacctccctagtta

SEQ ID NO: 1724299 - DNA, 15 bp, Homo sapiens
cacctccctagttag

SEQ ID NO: 1724300 - DNA, 15 bp, Homo sapiens
acctccctagttagc

SEQ ID NO: 1724301 - DNA, 15 bp, Homo sapiens
cctccctagttagct

SEQ ID NO: 1724302 - DNA, 15 bp, Homo sapiens
ctccctagttagctg

SEQ ID NO: 1724303 - DNA, 15 bp, Homo sapiens
tccctagttagctgt

SEQ ID NO: 1724304 - DNA, 15 bp, Homo sapiens
ccctagttagctgta

SEQ ID NO: 1724305 - DNA, 15 bp, Homo sapiens
cctagttagctgtat

SEQ ID NO: 1724306 - DNA, 15 bp, Homo sapiens
ctagttagctgtatt

SEQ ID NO: 1724307 - DNA, 15 bp, Homo sapiens
tagttagctgtattc

SEQ ID NO: 1724308 - DNA, 15 bp, Homo sapiens
agttagctgtattcc

SEQ ID NO: 1724309 - DNA, 15 bp, Homo sapiens
gttagctgtattcct

SEQ ID NO: 1724310 - DNA, 15 bp, Homo sapiens
ttagctgtattccta

SEQ ID NO: 1724311 - DNA, 15 bp, Homo sapiens
tagctgtattcctag

SEQ ID NO: 1724312 - DNA, 15 bp, Homo sapiens
agctgtattcctaga

SEQ ID NO: 1724313 - DNA, 15 bp, Homo sapiens
gctgtattcctagat

SEQ ID NO: 1724314 - DNA, 15 bp, Homo sapiens
ctgtattcctagata

SEQ ID NO: 1724315 - DNA, 15 bp, Homo sapiens
tgtattcctagatat

SEQ ID NO: 1724316 - DNA, 15 bp, Homo sapiens
gtattcctagatatt

SEQ ID NO: 1724317 - DNA, 15 bp, Homo sapiens
tattcctagatattt

SEQ ID NO: 1724318 - DNA, 15 bp, Homo sapiens
attcctagatatttt

SEQ ID NO: 1724319 - DNA, 15 bp, Homo sapiens
ttcctagatatttta

SEQ ID NO: 1724320 - DNA, 15 bp, Homo sapiens
tcctagatattttat

SEQ ID NO: 1724321 - DNA, 15 bp, Homo sapiens
cctagatattttatt

SEQ ID NO: 1724322 - DNA, 15 bp, Homo sapiens
ctagatattttattc

SEQ ID NO: 1724323 - DNA, 15 bp, Homo sapiens
tagatattttattct

SEQ ID NO: 1724324 - DNA, 15 bp, Homo sapiens
agatattttattctt

SEQ ID NO: 1724325 - DNA, 15 bp, Homo sapiens
gatattttattcttt

SEQ ID NO: 1724326 - DNA, 15 bp, Homo sapiens
atattttattcttta

SEQ ID NO: 1724327 - DNA, 15 bp, Homo sapiens
tattttattctttat

SEQ ID NO: 1724328 - DNA, 15 bp, Homo sapiens
attttattctttatt

SEQ ID NO: 1724329 - DNA, 15 bp, Homo sapiens
ttttattctttattg

SEQ ID NO: 1724330 - DNA, 15 bp, Homo sapiens
tttattctttattgt

SEQ ID NO: 1724331 - DNA, 15 bp, Homo sapiens
ttattctttattgtg

SEQ ID NO: 1724332 - DNA, 15 bp, Homo sapiens
tattctttattgtgg

SEQ ID NO: 1724333 - DNA, 15 bp, Homo sapiens
attctttattgtggc

SEQ ID NO: 1724334 - DNA, 15 bp, Homo sapiens
ttctttattgtggct

SEQ ID NO: 1724335 - DNA, 15 bp, Homo sapiens
tctttattgtggcta

SEQ ID NO: 1724336 - DNA, 15 bp, Homo sapiens
ctttattgtggctat

SEQ ID NO: 1724337 - DNA, 15 bp, Homo sapiens
tttattgtggctatt

SEQ ID NO: 1724338 - DNA, 15 bp, Homo sapiens
ttattgtggctattg

SEQ ID NO: 1724339 - DNA, 15 bp, Homo sapiens
tattgtggctattgt

SEQ ID NO: 1724340 - DNA, 15 bp, Homo sapiens
attgtggctattgtg

SEQ ID NO: 1724341 - DNA, 15 bp, Homo sapiens
ttgtggctattgtga

SEQ ID NO: 1724342 - DNA, 15 bp, Homo sapiens
tgtggctattgtgag

SEQ ID NO: 1724343 - DNA, 15 bp, Homo sapiens
gtggctattgtgagt

SEQ ID NO: 1724344 - DNA, 15 bp, Homo sapiens
tggctattgtgagtg

SEQ ID NO: 1724345 - DNA, 15 bp, Homo sapiens
ggctattgtgagtgg

SEQ ID NO: 1724346 - DNA, 15 bp, Homo sapiens
gctattgtgagtggg

SEQ ID NO: 1724347 - DNA, 15 bp, Homo sapiens
ctattgtgagtgggt

SEQ ID NO: 1724348 - DNA, 15 bp, Homo sapiens
tattgtgagtgggtt

SEQ ID NO: 1724349 - DNA, 15 bp, Homo sapiens
attgtgagtgggttg

SEQ ID NO: 1724350 - DNA, 15 bp, Homo sapiens
ttgtgagtgggttgc

SEQ ID NO: 1724351 - DNA, 15 bp, Homo sapiens
tgtgagtgggttgca

SEQ ID NO: 1724352 - DNA, 15 bp, Homo sapiens
gtgagtgggttgcat

SEQ ID NO: 1724353 - DNA, 15 bp, Homo sapiens
tgagtgggttgcatt

SEQ ID NO: 1724354 - DNA, 15 bp, Homo sapiens
gagtgggttgcattc

SEQ ID NO: 1724355 - DNA, 15 bp, Homo sapiens
agtgggttgcattct

SEQ ID NO: 1724356 - DNA, 15 bp, Homo sapiens
gtgggttgcattctt

SEQ ID NO: 1724357 - DNA, 15 bp, Homo sapiens
tgggttgcattcttg

SEQ ID NO: 1724358 - DNA, 15 bp, Homo sapiens
gggttgcattcttga

SEQ ID NO: 1724359 - DNA, 15 bp, Homo sapiens
ggttgcattcttgat

SEQ ID NO: 1724360 - DNA, 15 bp, Homo sapiens
gttgcattcttgatt

SEQ ID NO: 1724361 - DNA, 15 bp, Homo sapiens
ttgcattcttgattt

SEQ ID NO: 1724362 - DNA, 15 bp, Homo sapiens
tgcattcttgatttg

SEQ ID NO: 1724363 - DNA, 15 bp, Homo sapiens
gcattcttgatttgg

SEQ ID NO: 1724364 - DNA, 15 bp, Homo sapiens
cattcttgatttggc

SEQ ID NO: 1724365 - DNA, 15 bp, Homo sapiens
attcttgatttggct

SEQ ID NO: 1724366 - DNA, 15 bp, Homo sapiens
ttcttgatttggctc

SEQ ID NO: 1724367 - DNA, 15 bp, Homo sapiens
tcttgatttggctct

SEQ ID NO: 1724368 - DNA, 15 bp, Homo sapiens
cttgatttggctctc

SEQ ID NO: 1724369 - DNA, 15 bp, Homo sapiens
ttgatttggctctca

SEQ ID NO: 1724370 - DNA, 15 bp, Homo sapiens
tgatttggctctcag

SEQ ID NO: 1724371 - DNA, 15 bp, Homo sapiens
gatttggctctcagc

SEQ ID NO: 1724372 - DNA, 15 bp, Homo sapiens
atttggctctcagct

SEQ ID NO: 1724373 - DNA, 15 bp, Homo sapiens
tttggctctcagctt

SEQ ID NO: 1724374 - DNA, 15 bp, Homo sapiens
ttggctctcagcttg

SEQ ID NO: 1724375 - DNA, 15 bp, Homo sapiens
tggctctcagcttgg

SEQ ID NO: 1724376 - DNA, 15 bp, Homo sapiens
ggctctcagcttggg

SEQ ID NO: 1724377 - DNA, 15 bp, Homo sapiens
gctctcagcttgggt

SEQ ID NO: 1724378 - DNA, 15 bp, Homo sapiens
ctctcagcttgggta

SEQ ID NO: 1724379 - DNA, 15 bp, Homo sapiens
tctcagcttgggtat

SEQ ID NO: 1724380 - DNA, 15 bp, Homo sapiens
ctcagcttgggtatt

SEQ ID NO: 1724381 - DNA, 15 bp, Homo sapiens
tcagcttgggtattg

SEQ ID NO: 1724382 - DNA, 15 bp, Homo sapiens
cagcttgggtattgg

SEQ ID NO: 1724383 - DNA, 15 bp, Homo sapiens
agcttgggtattggt

SEQ ID NO: 1724384 - DNA, 15 bp, Homo sapiens
gcttgggtattggta

SEQ ID NO: 1724385 - DNA, 15 bp, Homo sapiens
cttgggtattggtac

SEQ ID NO: 1724386 - DNA, 15 bp, Homo sapiens
ttgggtattggtaca

SEQ ID NO: 1724387 - DNA, 15 bp, Homo sapiens
tgggtattggtacac

SEQ ID NO: 1724388 - DNA, 15 bp, Homo sapiens
gggtattggtacaca

SEQ ID NO: 1724389 - DNA, 15 bp, Homo sapiens
ggtattggtacacag

SEQ ID NO: 1724390 - DNA, 15 bp, Homo sapiens
gtattggtacacagg

SEQ ID NO: 1724391 - DNA, 15 bp, Homo sapiens
tattggtacacagga

SEQ ID NO: 1724392 - DNA, 15 bp, Homo sapiens
attggtacacaggaa

SEQ ID NO: 1724393 - DNA, 15 bp, Homo sapiens
ttggtacacaggaat

SEQ ID NO: 1724394 - DNA, 15 bp, Homo sapiens
tggtacacaggaatg

SEQ ID NO: 1724395 - DNA, 15 bp, Homo sapiens
ggtacacaggaatgc

SEQ ID NO: 1724396 - DNA, 15 bp, Homo sapiens
gtacacaggaatgct

SEQ ID NO: 1724397 - DNA, 15 bp, Homo sapiens
tacacaggaatgcta

SEQ ID NO: 1724398 - DNA, 15 bp, Homo sapiens
acacaggaatgctag

SEQ ID NO: 1724399 - DNA, 15 bp, Homo sapiens
cacaggaatgctagt

SEQ ID NO: 1724400 - DNA, 15 bp, Homo sapiens
acaggaatgctagtg

SEQ ID NO: 1724401 - DNA, 15 bp, Homo sapiens
caggaatgctagtga

SEQ ID NO: 1724402 - DNA, 15 bp, Homo sapiens
aggaatgctagtgat

SEQ ID NO: 1724403 - DNA, 15 bp, Homo sapiens
ggaatgctagtgatt

SEQ ID NO: 1724404 - DNA, 15 bp, Homo sapiens
gaatgctagtgattt

SEQ ID NO: 1724405 - DNA, 15 bp, Homo sapiens
aatgctagtgatttt

SEQ ID NO: 1724406 - DNA, 15 bp, Homo sapiens
atgctagtgattttt

SEQ ID NO: 1724407 - DNA, 15 bp, Homo sapiens
tgctagtgatttttg

SEQ ID NO: 1724408 - DNA, 15 bp, Homo sapiens
gctagtgatttttgt

SEQ ID NO: 1724409 - DNA, 15 bp, Homo sapiens
ctagtgatttttgta

SEQ ID NO: 1724410 - DNA, 15 bp, Homo sapiens
tagtgatttttgtac

SEQ ID NO: 1724411 - DNA, 15 bp, Homo sapiens
agtgatttttgtaca

SEQ ID NO: 1724412 - DNA, 15 bp, Homo sapiens
gtgatttttgtacat

SEQ ID NO: 1724413 - DNA, 15 bp, Homo sapiens
tgatttttgtacatt

SEQ ID NO: 1724414 - DNA, 15 bp, Homo sapiens
gatttttgtacattg

SEQ ID NO: 1724415 - DNA, 15 bp, Homo sapiens
atttttgtacattga

SEQ ID NO: 1724416 - DNA, 15 bp, Homo sapiens
tttttgtacattgat

SEQ ID NO: 1724417 - DNA, 15 bp, Homo sapiens
ttttgtacattgatt

SEQ ID NO: 1724418 - DNA, 15 bp, Homo sapiens
tttgtacattgattt

SEQ ID NO: 1724419 - DNA, 15 bp, Homo sapiens
ttgtacattgatttt

SEQ ID NO: 1724420 - DNA, 15 bp, Homo sapiens
tgtacattgatttta

SEQ ID NO: 1724421 - DNA, 15 bp, Homo sapiens
gtacattgattttat

SEQ ID NO: 1724422 - DNA, 15 bp, Homo sapiens
tacattgattttata

SEQ ID NO: 1724423 - DNA, 15 bp, Homo sapiens
acattgattttatat

SEQ ID NO: 1724424 - DNA, 15 bp, Homo sapiens
cattgattttatatc

SEQ ID NO: 1724425 - DNA, 15 bp, Homo sapiens
attgattttatatcc

SEQ ID NO: 1724426 - DNA, 15 bp, Homo sapiens
ttgattttatatcct

SEQ ID NO: 1724427 - DNA, 15 bp, Homo sapiens
tgattttatatcctg

SEQ ID NO: 1724428 - DNA, 15 bp, Homo sapiens
gattttatatcctga

SEQ ID NO: 1724429 - DNA, 15 bp, Homo sapiens
attttatatcctgaa

SEQ ID NO: 1724430 - DNA, 15 bp, Homo sapiens
ttttatatcctgaaa

SEQ ID NO: 1724431 - DNA, 15 bp, Homo sapiens
tttatatcctgaaac

SEQ ID NO: 1724432 - DNA, 15 bp, Homo sapiens
ttatatcctgaaact

SEQ ID NO: 1724433 - DNA, 15 bp, Homo sapiens
tatatcctgaaactt

SEQ ID NO: 1724434 - DNA, 15 bp, Homo sapiens
atatcctgaaacttt

SEQ ID NO: 1724435 - DNA, 15 bp, Homo sapiens
tatcctgaaactttg

SEQ ID NO: 1724436 - DNA, 15 bp, Homo sapiens
atcctgaaactttgc

SEQ ID NO: 1724437 - DNA, 15 bp, Homo sapiens
tcctgaaactttgct

SEQ ID NO: 1724438 - DNA, 15 bp, Homo sapiens
cctgaaactttgctt

SEQ ID NO: 1724439 - DNA, 15 bp, Homo sapiens
ctgaaactttgctta

SEQ ID NO: 1724440 - DNA, 15 bp, Homo sapiens
tgaaactttgcttat

SEQ ID NO: 1724441 - DNA, 15 bp, Homo sapiens
gaaactttgcttatc

SEQ ID NO: 1724442 - DNA, 15 bp, Homo sapiens
aaactttgcttatca

SEQ ID NO: 1724443 - DNA, 15 bp, Homo sapiens
aactttgcttatcag

SEQ ID NO: 1724444 - DNA, 15 bp, Homo sapiens
actttgcttatcagc

SEQ ID NO: 1724445 - DNA, 15 bp, Homo sapiens
ctttgcttatcagct

SEQ ID NO: 1724446 - DNA, 15 bp, Homo sapiens
tttgcttatcagctg

SEQ ID NO: 1724447 - DNA, 15 bp, Homo sapiens
ttgcttatcagctga

SEQ ID NO: 1724448 - DNA, 15 bp, Homo sapiens
tgcttatcagctgaa

SEQ ID NO: 1724449 - DNA, 15 bp, Homo sapiens
gcttatcagctgaag

SEQ ID NO: 1724450 - DNA, 15 bp, Homo sapiens
cttatcagctgaagg

SEQ ID NO: 1724451 - DNA, 15 bp, Homo sapiens
ttatcagctgaagga

SEQ ID NO: 1724452 - DNA, 15 bp, Homo sapiens
tatcagctgaaggaa

SEQ ID NO: 1724453 - DNA, 15 bp, Homo sapiens
atcagctgaaggaac

SEQ ID NO: 1724454 - DNA, 15 bp, Homo sapiens
tcagctgaaggaact

SEQ ID NO: 1724455 - DNA, 15 bp, Homo sapiens
cagctgaaggaactt

SEQ ID NO: 1724456 - DNA, 15 bp, Homo sapiens
agctgaaggaacttt

SEQ ID NO: 1724457 - DNA, 15 bp, Homo sapiens
gctgaaggaactttt

SEQ ID NO: 1724458 - DNA, 15 bp, Homo sapiens
ctgaaggaacttttg

SEQ ID NO: 1724459 - DNA, 15 bp, Homo sapiens
tgaaggaacttttga

SEQ ID NO: 1724460 - DNA, 15 bp, Homo sapiens
gaaggaacttttgat

SEQ ID NO: 1724461 - DNA, 15 bp, Homo sapiens
aaggaacttttgatc

SEQ ID NO: 1724462 - DNA, 15 bp, Homo sapiens
aggaacttttgatca

SEQ ID NO: 1724463 - DNA, 15 bp, Homo sapiens
ggaacttttgatcag

SEQ ID NO: 1724464 - DNA, 15 bp, Homo sapiens
gaacttttgatcaga

SEQ ID NO: 1724465 - DNA, 15 bp, Homo sapiens
aacttttgatcagag

SEQ ID NO: 1724466 - DNA, 15 bp, Homo sapiens
acttttgatcagaga

SEQ ID NO: 1724467 - DNA, 15 bp, Homo sapiens
cttttgatcagagac

SEQ ID NO: 1724468 - DNA, 15 bp, Homo sapiens
ttttgatcagagact

SEQ ID NO: 1724469 - DNA, 15 bp, Homo sapiens
tttgatcagagacta

SEQ ID NO: 1724470 - DNA, 15 bp, Homo sapiens
ttgatcagagactat

SEQ ID NO: 1724471 - DNA, 15 bp, Homo sapiens
tgatcagagactatg

SEQ ID NO: 1724472 - DNA, 15 bp, Homo sapiens
gatcagagactatgg

SEQ ID NO: 1724473 - DNA, 15 bp, Homo sapiens
atcagagactatggg

SEQ ID NO: 1724474 - DNA, 15 bp, Homo sapiens
tcagagactatggga

SEQ ID NO: 1724475 - DNA, 15 bp, Homo sapiens
cagagactatgggat

SEQ ID NO: 1724476 - DNA, 15 bp, Homo sapiens
agagactatgggatt

SEQ ID NO: 1724477 - DNA, 15 bp, Homo sapiens
gagactatgggattt

SEQ ID NO: 1724478 - DNA, 15 bp, Homo sapiens
agactatgggatttt

SEQ ID NO: 1724479 - DNA, 15 bp, Homo sapiens
gactatgggattttc

SEQ ID NO: 1724480 - DNA, 15 bp, Homo sapiens
actatgggattttct

SEQ ID NO: 1724481 - DNA, 15 bp, Homo sapiens
ctatgggattttcta

SEQ ID NO: 1724482 - DNA, 15 bp, Homo sapiens
tatgggattttctag

SEQ ID NO: 1724483 - DNA, 15 bp, Homo sapiens
atgggattttctagg

SEQ ID NO: 1724484 - DNA, 15 bp, Homo sapiens
tgggattttctaggt

SEQ ID NO: 1724485 - DNA, 15 bp, Homo sapiens
gggattttctaggtg

SEQ ID NO: 1724486 - DNA, 15 bp, Homo sapiens
ggattttctaggtgt

SEQ ID NO: 1724487 - DNA, 15 bp, Homo sapiens
gattttctaggtgta

SEQ ID NO: 1724488 - DNA, 15 bp, Homo sapiens
attttctaggtgtaa

SEQ ID NO: 1724489 - DNA, 15 bp, Homo sapiens
ttttctaggtgtaaa

SEQ ID NO: 1724490 - DNA, 15 bp, Homo sapiens
tttctaggtgtaaaa

SEQ ID NO: 1724491 - DNA, 15 bp, Homo sapiens
ttctaggtgtaaaat

SEQ ID NO: 1724492 - DNA, 15 bp, Homo sapiens
tctaggtgtaaaatc

SEQ ID NO: 1724493 - DNA, 15 bp, Homo sapiens
ctaggtgtaaaatca

SEQ ID NO: 1724494 - DNA, 15 bp, Homo sapiens
taggtgtaaaatcat

SEQ ID NO: 1724495 - DNA, 15 bp, Homo sapiens
aggtgtaaaatcatc

SEQ ID NO: 1724496 - DNA, 15 bp, Homo sapiens
ggtgtaaaatcatca

SEQ ID NO: 1724497 - DNA, 15 bp, Homo sapiens
gtgtaaaatcatcat

SEQ ID NO: 1724498 - DNA, 15 bp, Homo sapiens
tgtaaaatcatcatc

SEQ ID NO: 1724499 - DNA, 15 bp, Homo sapiens
gtaaaatcatcatct

SEQ ID NO: 1724500 - DNA, 15 bp, Homo sapiens
taaaatcatcatctg

SEQ ID NO: 1724501 - DNA, 15 bp, Homo sapiens
aaaatcatcatctgc

SEQ ID NO: 1724502 - DNA, 15 bp, Homo sapiens
aaatcatcatctgca

SEQ ID NO: 1724503 - DNA, 15 bp, Homo sapiens
aatcatcatctgcaa

SEQ ID NO: 1724504 - DNA, 15 bp, Homo sapiens
atcatcatctgcaaa

SEQ ID NO: 1724505 - DNA, 15 bp, Homo sapiens
tcatcatctgcaaac

SEQ ID NO: 1724506 - DNA, 15 bp, Homo sapiens
catcatctgcaaaca

SEQ ID NO: 1724507 - DNA, 15 bp, Homo sapiens
atcatctgcaaacag

SEQ ID NO: 1724508 - DNA, 15 bp, Homo sapiens
tcatctgcaaacagg

SEQ ID NO: 1724509 - DNA, 15 bp, Homo sapiens
catctgcaaacagga

SEQ ID NO: 1724510 - DNA, 15 bp, Homo sapiens
atctgcaaacaggaa

SEQ ID NO: 1724511 - DNA, 15 bp, Homo sapiens
tctgcaaacaggaat

SEQ ID NO: 1724512 - DNA, 15 bp, Homo sapiens
ctgcaaacaggaata

SEQ ID NO: 1724513 - DNA, 15 bp, Homo sapiens
tgcaaacaggaatag

SEQ ID NO: 1724514 - DNA, 15 bp, Homo sapiens
gcaaacaggaatagt

SEQ ID NO: 1724515 - DNA, 15 bp, Homo sapiens
caaacaggaatagtt

SEQ ID NO: 1724516 - DNA, 15 bp, Homo sapiens
aaacaggaatagttt

SEQ ID NO: 1724517 - DNA, 15 bp, Homo sapiens
aacaggaatagtttg

SEQ ID NO: 1724518 - DNA, 15 bp, Homo sapiens
acaggaatagtttga

SEQ ID NO: 1724519 - DNA, 15 bp, Homo sapiens
caggaatagtttgac

SEQ ID NO: 1724520 - DNA, 15 bp, Homo sapiens
aggaatagtttgact

SEQ ID NO: 1724521 - DNA, 15 bp, Homo sapiens
ggaatagtttgactt

SEQ ID NO: 1724522 - DNA, 15 bp, Homo sapiens
gaatagtttgacttc

SEQ ID NO: 1724523 - DNA, 15 bp, Homo sapiens
aatagtttgacttcc

SEQ ID NO: 1724524 - DNA, 15 bp, Homo sapiens
atagtttgacttcct

SEQ ID NO: 1724525 - DNA, 15 bp, Homo sapiens
tagtttgacttcctt

SEQ ID NO: 1724526 - DNA, 15 bp, Homo sapiens
agtttgacttccttt

SEQ ID NO: 1724527 - DNA, 15 bp, Homo sapiens
gtttgacttcctttt

SEQ ID NO: 1724528 - DNA, 15 bp, Homo sapiens
tttgacttccttttt

SEQ ID NO: 1724529 - DNA, 15 bp, Homo sapiens
ttgacttcctttttt

SEQ ID NO: 1724530 - DNA, 15 bp, Homo sapiens
tgacttccttttttc

SEQ ID NO: 1724531 - DNA, 15 bp, Homo sapiens
gacttccttttttct

SEQ ID NO: 1724532 - DNA, 15 bp, Homo sapiens
acttccttttttctt

SEQ ID NO: 1724533 - DNA, 15 bp, Homo sapiens
cttccttttttctta

SEQ ID NO: 1724534 - DNA, 15 bp, Homo sapiens
ttccttttttcttat

SEQ ID NO: 1724535 - DNA, 15 bp, Homo sapiens
tccttttttcttatt

SEQ ID NO: 1724536 - DNA, 15 bp, Homo sapiens
ccttttttcttattc

SEQ ID NO: 1724537 - DNA, 15 bp, Homo sapiens
cttttttcttattcc

SEQ ID NO: 1724538 - DNA, 15 bp, Homo sapiens
ttttttcttattccg

SEQ ID NO: 1724539 - DNA, 15 bp, Homo sapiens
tttttcttattccga

SEQ ID NO: 1724540 - DNA, 15 bp, Homo sapiens
ttttcttattccgat

SEQ ID NO: 1724541 - DNA, 15 bp, Homo sapiens
tttcttattccgatg

SEQ ID NO: 1724542 - DNA, 15 bp, Homo sapiens
ttcttattccgatgc

SEQ ID NO: 1724543 - DNA, 15 bp, Homo sapiens
tcttattccgatgct

SEQ ID NO: 1724544 - DNA, 15 bp, Homo sapiens
cttattccgatgctc

SEQ ID NO: 1724545 - DNA, 15 bp, Homo sapiens
ttattccgatgctct

SEQ ID NO: 1724546 - DNA, 15 bp, Homo sapiens
tattccgatgctctt

SEQ ID NO: 1724547 - DNA, 15 bp, Homo sapiens
attccgatgctcttt

SEQ ID NO: 1724548 - DNA, 15 bp, Homo sapiens
ttccgatgctcttta

SEQ ID NO: 1724549 - DNA, 15 bp, Homo sapiens
tccgatgctctttat

SEQ ID NO: 1724550 - DNA, 15 bp, Homo sapiens
ccgatgctctttatt

SEQ ID NO: 1724551 - DNA, 15 bp, Homo sapiens
cgatgctctttattt

SEQ ID NO: 1724552 - DNA, 15 bp, Homo sapiens
gatgctctttatttc

SEQ ID NO: 1724553 - DNA, 15 bp, Homo sapiens
atgctctttatttcc

SEQ ID NO: 1724554 - DNA, 15 bp, Homo sapiens
tgctctttatttcct

SEQ ID NO: 1724555 - DNA, 15 bp, Homo sapiens
gctctttatttcctt

SEQ ID NO: 1724556 - DNA, 15 bp, Homo sapiens
ctctttatttccttc

SEQ ID NO: 1724557 - DNA, 15 bp, Homo sapiens
tctttatttccttct

SEQ ID NO: 1724558 - DNA, 15 bp, Homo sapiens
ctttatttccttctc

SEQ ID NO: 1724559 - DNA, 15 bp, Homo sapiens
tttatttccttctct

SEQ ID NO: 1724560 - DNA, 15 bp, Homo sapiens
ttatttccttctctt

SEQ ID NO: 1724561 - DNA, 15 bp, Homo sapiens
tatttccttctcttg

SEQ ID NO: 1724562 - DNA, 15 bp, Homo sapiens
atttccttctcttgt

SEQ ID NO: 1724563 - DNA, 15 bp, Homo sapiens
tccttctcttgtctg

SEQ ID NO: 1724564 - DNA, 15 bp, Homo sapiens
ccttctcttgtctga

SEQ ID NO: 1724565 - DNA, 15 bp, Homo sapiens
cttctcttgtctgat

SEQ ID NO: 1724566 - DNA, 15 bp, Homo sapiens
ttctcttgtctgatt

SEQ ID NO: 1724567 - DNA, 15 bp, Homo sapiens
tctcttgtctgattg

SEQ ID NO: 1724568 - DNA, 15 bp, Homo sapiens
ctcttgtctgattgc

SEQ ID NO: 1724569 - DNA, 15 bp, Homo sapiens
tcttgtctgattgct

SEQ ID NO: 1724570 - DNA, 15 bp, Homo sapiens
cttgtctgattgctg

SEQ ID NO: 1724571 - DNA, 15 bp, Homo sapiens
ttgtctgattgctgt

SEQ ID NO: 1724572 - DNA, 15 bp, Homo sapiens
tgtctgattgctgtg

SEQ ID NO: 1724573 - DNA, 15 bp, Homo sapiens
gtctgattgctgtgg

SEQ ID NO: 1724574 - DNA, 15 bp, Homo sapiens
tctgattgctgtggc

SEQ ID NO: 1724575 - DNA, 15 bp, Homo sapiens
ctgattgctgtggct

SEQ ID NO: 1724576 - DNA, 15 bp, Homo sapiens
tgattgctgtggcta

SEQ ID NO: 1724577 - DNA, 15 bp, Homo sapiens
gattgctgtggctag

SEQ ID NO: 1724578 - DNA, 15 bp, Homo sapiens
attgctgtggctagg

SEQ ID NO: 1724579 - DNA, 15 bp, Homo sapiens
ttgctgtggctagga

SEQ ID NO: 1724580 - DNA, 15 bp, Homo sapiens
tgctgtggctaggac

SEQ ID NO: 1724581 - DNA, 15 bp, Homo sapiens
gctgtggctaggact

SEQ ID NO: 1724582 - DNA, 15 bp, Homo sapiens
ctgtggctaggactt

SEQ ID NO: 1724583 - DNA, 15 bp, Homo sapiens
tgtggctaggacttc

SEQ ID NO: 1724584 - DNA, 15 bp, Homo sapiens
gtggctaggacttcc

SEQ ID NO: 1724585 - DNA, 15 bp, Homo sapiens
tggctaggacttcca

SEQ ID NO: 1724586 - DNA, 15 bp, Homo sapiens
ggctaggacttccaa

SEQ ID NO: 1724587 - DNA, 15 bp, Homo sapiens
gctaggacttccaat

SEQ ID NO: 1724588 - DNA, 15 bp, Homo sapiens
ctaggacttccaata

SEQ ID NO: 1724589 - DNA, 15 bp, Homo sapiens
taggacttccaatac

SEQ ID NO: 1724590 - DNA, 15 bp, Homo sapiens
aggacttccaatacc

SEQ ID NO: 1724591 - DNA, 15 bp, Homo sapiens
ggacttccaatacca

SEQ ID NO: 1724592 - DNA, 15 bp, Homo sapiens
gacttccaataccat

SEQ ID NO: 1724593 - DNA, 15 bp, Homo sapiens
acttccaataccatg

SEQ ID NO: 1724594 - DNA, 15 bp, Homo sapiens
cttccaataccatgt

SEQ ID NO: 1724595 - DNA, 15 bp, Homo sapiens
ttccaataccatgtt

SEQ ID NO: 1724596 - DNA, 15 bp, Homo sapiens
tccaataccatgttg

SEQ ID NO: 1724597 - DNA, 15 bp, Homo sapiens
ccaataccatgttga

SEQ ID NO: 1724598 - DNA, 15 bp, Homo sapiens
caataccatgttgaa

SEQ ID NO: 1724599 - DNA, 15 bp, Homo sapiens
aataccatgttgaat

SEQ ID NO: 1724600 - DNA, 15 bp, Homo sapiens
ataccatgttgaata

SEQ ID NO: 1724601 - DNA, 15 bp, Homo sapiens
taccatgttgaatag

SEQ ID NO: 1724602 - DNA, 15 bp, Homo sapiens
accatgttgaatagg

SEQ ID NO: 1724603 - DNA, 15 bp, Homo sapiens
ccatgttgaatagga

SEQ ID NO: 1724604 - DNA, 15 bp, Homo sapiens
catgttgaataggag

SEQ ID NO: 1724605 - DNA, 15 bp, Homo sapiens
atgttgaataggagt

SEQ ID NO: 1724606 - DNA, 15 bp, Homo sapiens
tgttgaataggagtg

SEQ ID NO: 1724607 - DNA, 15 bp, Homo sapiens
gttgaataggagtgg

SEQ ID NO: 1724608 - DNA, 15 bp, Homo sapiens
ttgaataggagtggt

SEQ ID NO: 1724609 - DNA, 15 bp, Homo sapiens
tgaataggagtggtg

SEQ ID NO: 1724610 - DNA, 15 bp, Homo sapiens
gaataggagtggtga

SEQ ID NO: 1724611 - DNA, 15 bp, Homo sapiens
aataggagtggtgag

SEQ ID NO: 1724612 - DNA, 15 bp, Homo sapiens
ataggagtggtgaga

SEQ ID NO: 1724613 - DNA, 15 bp, Homo sapiens
taggagtggtgagag

SEQ ID NO: 1724614 - DNA, 15 bp, Homo sapiens
aggagtggtgagaga

SEQ ID NO: 1724615 - DNA, 15 bp, Homo sapiens
ggagtggtgagagag

SEQ ID NO: 1724616 - DNA, 15 bp, Homo sapiens
gagtggtgagagaga

SEQ ID NO: 1724617 - DNA, 15 bp, Homo sapiens
agtggtgagagagag

SEQ ID NO: 1724618 - DNA, 15 bp, Homo sapiens
gtggtgagagagagc

SEQ ID NO: 1724619 - DNA, 15 bp, Homo sapiens
tggtgagagagagca

SEQ ID NO: 1724620 - DNA, 15 bp, Homo sapiens
ggtgagagagagcat

SEQ ID NO: 1724621 - DNA, 15 bp, Homo sapiens
gtgagagagagcatc

SEQ ID NO: 1724622 - DNA, 15 bp, Homo sapiens
tgagagagagcatcc

SEQ ID NO: 1724623 - DNA, 15 bp, Homo sapiens
gagagagagcatcct

SEQ ID NO: 1724624 - DNA, 15 bp, Homo sapiens
agagagagcatcctt

SEQ ID NO: 1724625 - DNA, 15 bp, Homo sapiens
gagagagcatcctta

SEQ ID NO: 1724626 - DNA, 15 bp, Homo sapiens
agagagcatccttat

SEQ ID NO: 1724627 - DNA, 15 bp, Homo sapiens
gagagcatccttatt

SEQ ID NO: 1724628 - DNA, 15 bp, Homo sapiens
agagcatccttattt

SEQ ID NO: 1724629 - DNA, 15 bp, Homo sapiens
gagcatccttatttt

SEQ ID NO: 1724630 - DNA, 15 bp, Homo sapiens
agcatccttattttg

SEQ ID NO: 1724631 - DNA, 15 bp, Homo sapiens
gcatccttattttgt

SEQ ID NO: 1724632 - DNA, 15 bp, Homo sapiens
tccttattttgttct

SEQ ID NO: 1724633 - DNA, 15 bp, Homo sapiens
ccttattttgttctg

SEQ ID NO: 1724634 - DNA, 15 bp, Homo sapiens
cttattttgttctgc

SEQ ID NO: 1724635 - DNA, 15 bp, Homo sapiens
ttattttgttctgcc

SEQ ID NO: 1724636 - DNA, 15 bp, Homo sapiens
tattttgttctgcct

SEQ ID NO: 1724637 - DNA, 15 bp, Homo sapiens
attttgttctgcctt

SEQ ID NO: 1724638 - DNA, 15 bp, Homo sapiens
ttttgttctgccttt

SEQ ID NO: 1724639 - DNA, 15 bp, Homo sapiens
tttgttctgcctttc

SEQ ID NO: 1724640 - DNA, 15 bp, Homo sapiens
ttgttctgcctttca

SEQ ID NO: 1724641 - DNA, 15 bp, Homo sapiens
tgttctgcctttcaa

SEQ ID NO: 1724642 - DNA, 15 bp, Homo sapiens
gttctgcctttcaag

SEQ ID NO: 1724643 - DNA, 15 bp, Homo sapiens
ttctgcctttcaagg

SEQ ID NO: 1724644 - DNA, 15 bp, Homo sapiens
tctgcctttcaaggg

SEQ ID NO: 1724645 - DNA, 15 bp, Homo sapiens
ctgcctttcaagggg

SEQ ID NO: 1724646 - DNA, 15 bp, Homo sapiens
tgcctttcaagggga

SEQ ID NO: 1724647 - DNA, 15 bp, Homo sapiens
gcctttcaaggggaa

SEQ ID NO: 1724648 - DNA, 15 bp, Homo sapiens
cctttcaaggggaat

SEQ ID NO: 1724649 - DNA, 15 bp, Homo sapiens
ctttcaaggggaatg

SEQ ID NO: 1724650 - DNA, 15 bp, Homo sapiens
tttcaaggggaatgc

SEQ ID NO: 1724651 - DNA, 15 bp, Homo sapiens
ttcaaggggaatgct

SEQ ID NO: 1724652 - DNA, 15 bp, Homo sapiens
tcaaggggaatgctt

SEQ ID NO: 1724653 - DNA, 15 bp, Homo sapiens
caaggggaatgcttt

SEQ ID NO: 1724654 - DNA, 15 bp, Homo sapiens
aaggggaatgctttc

SEQ ID NO: 1724655 - DNA, 15 bp, Homo sapiens
aggggaatgctttca

SEQ ID NO: 1724656 - DNA, 15 bp, Homo sapiens
ggggaatgctttcaa

SEQ ID NO: 1724657 - DNA, 15 bp, Homo sapiens
gggaatgctttcaac

SEQ ID NO: 1724658 - DNA, 15 bp, Homo sapiens
ggaatgctttcaact

SEQ ID NO: 1724659 - DNA, 15 bp, Homo sapiens
gaatgctttcaactt

SEQ ID NO: 1724660 - DNA, 15 bp, Homo sapiens
aatgctttcaacttt

SEQ ID NO: 1724661 - DNA, 15 bp, Homo sapiens
atgctttcaactttt

SEQ ID NO: 1724662 - DNA, 15 bp, Homo sapiens
tgctttcaacttttg

SEQ ID NO: 1724663 - DNA, 15 bp, Homo sapiens
gctttcaacttttgc

SEQ ID NO: 1724664 - DNA, 15 bp, Homo sapiens
ctttcaacttttgcc

SEQ ID NO: 1724665 - DNA, 15 bp, Homo sapiens
tttcaacttttgcct

SEQ ID NO: 1724666 - DNA, 15 bp, Homo sapiens
ttcaacttttgcctc

SEQ ID NO: 1724667 - DNA, 15 bp, Homo sapiens
tcaacttttgcctct

SEQ ID NO: 1724668 - DNA, 15 bp, Homo sapiens
caacttttgcctctt

SEQ ID NO: 1724669 - DNA, 15 bp, Homo sapiens
aacttttgcctctta

SEQ ID NO: 1724670 - DNA, 15 bp, Homo sapiens
acttttgcctcttaa

SEQ ID NO: 1724671 - DNA, 15 bp, Homo sapiens
cttttgcctcttaag

SEQ ID NO: 1724672 - DNA, 15 bp, Homo sapiens
ttttgcctcttaagt

SEQ ID NO: 1724673 - DNA, 15 bp, Homo sapiens
tttgcctcttaagta

SEQ ID NO: 1724674 - DNA, 15 bp, Homo sapiens
ttgcctcttaagtat

SEQ ID NO: 1724675 - DNA, 15 bp, Homo sapiens
tgcctcttaagtatg

SEQ ID NO: 1724676 - DNA, 15 bp, Homo sapiens
gcctcttaagtatga

SEQ ID NO: 1724677 - DNA, 15 bp, Homo sapiens
cctcttaagtatgat

SEQ ID NO: 1724678 - DNA, 15 bp, Homo sapiens
ctcttaagtatgatg

SEQ ID NO: 1724679 - DNA, 15 bp, Homo sapiens
tcttaagtatgatgt

SEQ ID NO: 1724680 - DNA, 15 bp, Homo sapiens
cttaagtatgatgtt

SEQ ID NO: 1724681 - DNA, 15 bp, Homo sapiens
ttaagtatgatgttg

SEQ ID NO: 1724682 - DNA, 15 bp, Homo sapiens
taagtatgatgttgg

SEQ ID NO: 1724683 - DNA, 15 bp, Homo sapiens
aagtatgatgttggc

SEQ ID NO: 1724684 - DNA, 15 bp, Homo sapiens
agtatgatgttggct

SEQ ID NO: 1724685 - DNA, 15 bp, Homo sapiens
gtatgatgttggctg

SEQ ID NO: 1724686 - DNA, 15 bp, Homo sapiens
tatgatgttggctgt

SEQ ID NO: 1724687 - DNA, 15 bp, Homo sapiens
atgatgttggctgtg

SEQ ID NO: 1724688 - DNA, 15 bp, Homo sapiens
tgatgttggctgtgg

SEQ ID NO: 1724689 - DNA, 15 bp, Homo sapiens
gatgttggctgtgga

SEQ ID NO: 1724690 - DNA, 15 bp, Homo sapiens
atgttggctgtggat

SEQ ID NO: 1724691 - DNA, 15 bp, Homo sapiens
tgttggctgtggatt

SEQ ID NO: 1724692 - DNA, 15 bp, Homo sapiens
gttggctgtggattt

SEQ ID NO: 1724693 - DNA, 15 bp, Homo sapiens
ttggctgtggatttg

SEQ ID NO: 1724694 - DNA, 15 bp, Homo sapiens
tggctgtggatttgt

SEQ ID NO: 1724695 - DNA, 15 bp, Homo sapiens
ggctgtggatttgtc

SEQ ID NO: 1724696 - DNA, 15 bp, Homo sapiens
gctgtggatttgtca

SEQ ID NO: 1724697 - DNA, 15 bp, Homo sapiens
ctgtggatttgtcat

SEQ ID NO: 1724698 - DNA, 15 bp, Homo sapiens
tgtggatttgtcata

SEQ ID NO: 1724699 - DNA, 15 bp, Homo sapiens
gtggatttgtcatag

SEQ ID NO: 1724700 - DNA, 15 bp, Homo sapiens
tggatttgtcataga

SEQ ID NO: 1724701 - DNA, 15 bp, Homo sapiens
ggatttgtcatagat

SEQ ID NO: 1724702 - DNA, 15 bp, Homo sapiens
gatttgtcatagatg

SEQ ID NO: 1724703 - DNA, 15 bp, Homo sapiens
atttgtcatagatgg

SEQ ID NO: 1724704 - DNA, 15 bp, Homo sapiens
tttgtcatagatggc

SEQ ID NO: 1724705 - DNA, 15 bp, Homo sapiens
ttgtcatagatggct

SEQ ID NO: 1724706 - DNA, 15 bp, Homo sapiens
tgtcatagatggctc

SEQ ID NO: 1724707 - DNA, 15 bp, Homo sapiens
gtcatagatggctct

SEQ ID NO: 1724708 - DNA, 15 bp, Homo sapiens
tcatagatggctctt

SEQ ID NO: 1724709 - DNA, 15 bp, Homo sapiens
catagatggctctta

SEQ ID NO: 1724710 - DNA, 15 bp, Homo sapiens
atagatggctcttat

SEQ ID NO: 1724711 - DNA, 15 bp, Homo sapiens
tagatggctcttatt

SEQ ID NO: 1724712 - DNA, 15 bp, Homo sapiens
agatggctcttatta

SEQ ID NO: 1724713 - DNA, 15 bp, Homo sapiens
gatggctcttattat

SEQ ID NO: 1724714 - DNA, 15 bp, Homo sapiens
atggctcttattatt

SEQ ID NO: 1724715 - DNA, 15 bp, Homo sapiens
tggctcttattattt

SEQ ID NO: 1724716 - DNA, 15 bp, Homo sapiens
ggctcttattatttt

SEQ ID NO: 1724717 - DNA, 15 bp, Homo sapiens
gctcttattattttg

SEQ ID NO: 1724718 - DNA, 15 bp, Homo sapiens
ctcttattattttga

SEQ ID NO: 1724719 - DNA, 15 bp, Homo sapiens
tcttattattttgaa

SEQ ID NO: 1724720 - DNA, 15 bp, Homo sapiens
cttattattttgaag

SEQ ID NO: 1724721 - DNA, 15 bp, Homo sapiens
ttattattttgaagt

SEQ ID NO: 1724722 - DNA, 15 bp, Homo sapiens
tattattttgaagta

SEQ ID NO: 1724723 - DNA, 15 bp, Homo sapiens
attattttgaagtat

SEQ ID NO: 1724724 - DNA, 15 bp, Homo sapiens
ttattttgaagtatg

SEQ ID NO: 1724725 - DNA, 15 bp, Homo sapiens
tattttgaagtatgt

SEQ ID NO: 1724726 - DNA, 15 bp, Homo sapiens
attttgaagtatgtt

SEQ ID NO: 1724727 - DNA, 15 bp, Homo sapiens
ttttgaagtatgttc

SEQ ID NO: 1724728 - DNA, 15 bp, Homo sapiens
tttgaagtatgttcc

SEQ ID NO: 1724729 - DNA, 15 bp, Homo sapiens
ttgaagtatgttcct

SEQ ID NO: 1724730 - DNA, 15 bp, Homo sapiens
tgaagtatgttcctt

SEQ ID NO: 1724731 - DNA, 15 bp, Homo sapiens
gaagtatgttccttc

SEQ ID NO: 1724732 - DNA, 15 bp, Homo sapiens
aagtatgttccttca

SEQ ID NO: 1724733 - DNA, 15 bp, Homo sapiens
agtatgttccttcaa

SEQ ID NO: 1724734 - DNA, 15 bp, Homo sapiens
gtatgttccttcaat

SEQ ID NO: 1724735 - DNA, 15 bp, Homo sapiens
tatgttccttcaatg

SEQ ID NO: 1724736 - DNA, 15 bp, Homo sapiens
atgttccttcaatgc

SEQ ID NO: 1724737 - DNA, 15 bp, Homo sapiens
tgttccttcaatgcc

SEQ ID NO: 1724738 - DNA, 15 bp, Homo sapiens
gttccttcaatgcct

SEQ ID NO: 1724739 - DNA, 15 bp, Homo sapiens
ttccttcaatgccta

SEQ ID NO: 1724740 - DNA, 15 bp, Homo sapiens
tccttcaatgcctag

SEQ ID NO: 1724741 - DNA, 15 bp, Homo sapiens
ccttcaatgcctagt

SEQ ID NO: 1724742 - DNA, 15 bp, Homo sapiens
cttcaatgcctagtt

SEQ ID NO: 1724743 - DNA, 15 bp, Homo sapiens
ttcaatgcctagttt

SEQ ID NO: 1724744 - DNA, 15 bp, Homo sapiens
tcaatgcctagtttg

SEQ ID NO: 1724745 - DNA, 15 bp, Homo sapiens
caatgcctagtttgt

SEQ ID NO: 1724746 - DNA, 15 bp, Homo sapiens
aatgcctagtttgtt

SEQ ID NO: 1724747 - DNA, 15 bp, Homo sapiens
atgcctagtttgttg

SEQ ID NO: 1724748 - DNA, 15 bp, Homo sapiens
tgcctagtttgttga

SEQ ID NO: 1724749 - DNA, 15 bp, Homo sapiens
gcctagtttgttgag

SEQ ID NO: 1724750 - DNA, 15 bp, Homo sapiens
cctagtttgttgagc

SEQ ID NO: 1724751 - DNA, 15 bp, Homo sapiens
ctagtttgttgagct

SEQ ID NO: 1724752 - DNA, 15 bp, Homo sapiens
tagtttgttgagcta

SEQ ID NO: 1724753 - DNA, 15 bp, Homo sapiens
agtttgttgagctat

SEQ ID NO: 1724754 - DNA, 15 bp, Homo sapiens
gtttgttgagctata

SEQ ID NO: 1724755 - DNA, 15 bp, Homo sapiens
tttgttgagctatat

SEQ ID NO: 1724756 - DNA, 15 bp, Homo sapiens
ttgttgagctatata

SEQ ID NO: 1724757 - DNA, 15 bp, Homo sapiens
tgttgagctatatac

SEQ ID NO: 1724758 - DNA, 15 bp, Homo sapiens
gttgagctatatacc

SEQ ID NO: 1724759 - DNA, 15 bp, Homo sapiens
ttgagctatatacca

SEQ ID NO: 1724760 - DNA, 15 bp, Homo sapiens
tgagctatataccac

SEQ ID NO: 1724761 - DNA, 15 bp, Homo sapiens
gagctatataccaca

SEQ ID NO: 1724762 - DNA, 15 bp, Homo sapiens
agctatataccacac

SEQ ID NO: 1724763 - DNA, 15 bp, Homo sapiens
gctatataccacact

SEQ ID NO: 1724764 - DNA, 15 bp, Homo sapiens
ctatataccacactt

SEQ ID NO: 1724765 - DNA, 15 bp, Homo sapiens
tatataccacacttt

SEQ ID NO: 1724766 - DNA, 15 bp, Homo sapiens
atataccacactttc

SEQ ID NO: 1724767 - DNA, 15 bp, Homo sapiens
tataccacactttct

SEQ ID NO: 1724768 - DNA, 15 bp, Homo sapiens
ataccacactttctt

SEQ ID NO: 1724769 - DNA, 15 bp, Homo sapiens
taccacactttcttt

SEQ ID NO: 1724770 - DNA, 15 bp, Homo sapiens
accacactttcttta

SEQ ID NO: 1724771 - DNA, 15 bp, Homo sapiens
ccacactttctttat

SEQ ID NO: 1724772 - DNA, 15 bp, Homo sapiens
cacactttctttatc

SEQ ID NO: 1724773 - DNA, 15 bp, Homo sapiens
acactttctttatcc

SEQ ID NO: 1724774 - DNA, 15 bp, Homo sapiens
cactttctttatcca

SEQ ID NO: 1724775 - DNA, 15 bp, Homo sapiens
actttctttatccac

SEQ ID NO: 1724776 - DNA, 15 bp, Homo sapiens
ctttctttatccact

SEQ ID NO: 1724777 - DNA, 15 bp, Homo sapiens
tttctttatccacta

SEQ ID NO: 1724778 - DNA, 15 bp, Homo sapiens
ttctttatccactaa

SEQ ID NO: 1724779 - DNA, 15 bp, Homo sapiens
tctttatccactaat

SEQ ID NO: 1724780 - DNA, 15 bp, Homo sapiens
ctttatccactaatc

SEQ ID NO: 1724781 - DNA, 15 bp, Homo sapiens
tttatccactaatcg

SEQ ID NO: 1724782 - DNA, 15 bp, Homo sapiens
ttatccactaatcgg

SEQ ID NO: 1724783 - DNA, 15 bp, Homo sapiens
tatccactaatcggc

SEQ ID NO: 1724784 - DNA, 15 bp, Homo sapiens
atccactaatcggct

SEQ ID NO: 1724785 - DNA, 15 bp, Homo sapiens
tccactaatcggctg

SEQ ID NO: 1724786 - DNA, 15 bp, Homo sapiens
ccactaatcggctga

SEQ ID NO: 1724787 - DNA, 15 bp, Homo sapiens
cactaatcggctgat

SEQ ID NO: 1724788 - DNA, 15 bp, Homo sapiens
actaatcggctgatg

SEQ ID NO: 1724789 - DNA, 15 bp, Homo sapiens
ctaatcggctgatgg

SEQ ID NO: 1724790 - DNA, 15 bp, Homo sapiens
taatcggctgatggg

SEQ ID NO: 1724791 - DNA, 15 bp, Homo sapiens
aatcggctgatgggc

SEQ ID NO: 1724792 - DNA, 15 bp, Homo sapiens
atcggctgatgggca

SEQ ID NO: 1724793 - DNA, 15 bp, Homo sapiens
tcggctgatgggcac

SEQ ID NO: 1724794 - DNA, 15 bp, Homo sapiens
cggctgatgggcact

SEQ ID NO: 1724795 - DNA, 15 bp, Homo sapiens
ggctgatgggcactt

SEQ ID NO: 1724796 - DNA, 15 bp, Homo sapiens
gctgatgggcacttc

SEQ ID NO: 1724797 - DNA, 15 bp, Homo sapiens
ctgatgggcacttca

SEQ ID NO: 1724798 - DNA, 15 bp, Homo sapiens
tgatgggcacttcag

SEQ ID NO: 1724799 - DNA, 15 bp, Homo sapiens
gatgggcacttcagt

SEQ ID NO: 1724800 - DNA, 15 bp, Homo sapiens
atgggcacttcagtt

SEQ ID NO: 1724801 - DNA, 15 bp, Homo sapiens
tgggcacttcagttg

SEQ ID NO: 1724802 - DNA, 15 bp, Homo sapiens
gggcacttcagttga

SEQ ID NO: 1724803 - DNA, 15 bp, Homo sapiens
ggcacttcagttgat

SEQ ID NO: 1724804 - DNA, 15 bp, Homo sapiens
gcacttcagttgatt

SEQ ID NO: 1724805 - DNA, 15 bp, Homo sapiens
cacttcagttgattc

SEQ ID NO: 1724806 - DNA, 15 bp, Homo sapiens
acttcagttgattcc

SEQ ID NO: 1724807 - DNA, 15 bp, Homo sapiens
cttcagttgattcca

SEQ ID NO: 1724808 - DNA, 15 bp, Homo sapiens
ttcagttgattccat

SEQ ID NO: 1724809 - DNA, 15 bp, Homo sapiens
tcagttgattccata

SEQ ID NO: 1724810 - DNA, 15 bp, Homo sapiens
cagttgattccatac

SEQ ID NO: 1724811 - DNA, 15 bp, Homo sapiens
agttgattccatact

SEQ ID NO: 1724812 - DNA, 15 bp, Homo sapiens
gttgattccatactt

SEQ ID NO: 1724813 - DNA, 15 bp, Homo sapiens
ttgattccatacttt

SEQ ID NO: 1724814 - DNA, 15 bp, Homo sapiens
tgattccatactttt

SEQ ID NO: 1724815 - DNA, 15 bp, Homo sapiens
gattccatacttttg

SEQ ID NO: 1724816 - DNA, 15 bp, Homo sapiens
attccatacttttgc

SEQ ID NO: 1724817 - DNA, 15 bp, Homo sapiens
ttccatacttttgca

SEQ ID NO: 1724818 - DNA, 15 bp, Homo sapiens
tccatacttttgcag

SEQ ID NO: 1724819 - DNA, 15 bp, Homo sapiens
ccatacttttgcagt

SEQ ID NO: 1724820 - DNA, 15 bp, Homo sapiens
catacttttgcagtt

SEQ ID NO: 1724821 - DNA, 15 bp, Homo sapiens
atacttttgcagttg

SEQ ID NO: 1724822 - DNA, 15 bp, Homo sapiens
tacttttgcagttgt

SEQ ID NO: 1724823 - DNA, 15 bp, Homo sapiens
acttttgcagttgtg

SEQ ID NO: 1724824 - DNA, 15 bp, Homo sapiens
cttttgcagttgtga

SEQ ID NO: 1724825 - DNA, 15 bp, Homo sapiens
ttttgcagttgtgaa

SEQ ID NO: 1724826 - DNA, 15 bp, Homo sapiens
tttgcagttgtgaat

SEQ ID NO: 1724827 - DNA, 15 bp, Homo sapiens
ttgcagttgtgaatt

SEQ ID NO: 1724828 - DNA, 15 bp, Homo sapiens
tgcagttgtgaattg

SEQ ID NO: 1724829 - DNA, 15 bp, Homo sapiens
gcagttgtgaattgt

SEQ ID NO: 1724830 - DNA, 15 bp, Homo sapiens
cagttgtgaattgtg

SEQ ID NO: 1724831 - DNA, 15 bp, Homo sapiens
agttgtgaattgtgc

SEQ ID NO: 1724832 - DNA, 15 bp, Homo sapiens
gttgtgaattgtgct

SEQ ID NO: 1724833 - DNA, 15 bp, Homo sapiens
ttgtgaattgtgctg

SEQ ID NO: 1724834 - DNA, 15 bp, Homo sapiens
tgtgaattgtgctgc

SEQ ID NO: 1724835 - DNA, 15 bp, Homo sapiens
gtgaattgtgctgca

SEQ ID NO: 1724836 - DNA, 15 bp, Homo sapiens
tgaattgtgctgcaa

SEQ ID NO: 1724837 - DNA, 15 bp, Homo sapiens
gaattgtgctgcaat

SEQ ID NO: 1724838 - DNA, 15 bp, Homo sapiens
aattgtgctgcaata

SEQ ID NO: 1724839 - DNA, 15 bp, Homo sapiens
attgtgctgcaataa

SEQ ID NO: 1724840 - DNA, 15 bp, Homo sapiens
ttgtgctgcaataaa

SEQ ID NO: 1724841 - DNA, 15 bp, Homo sapiens
tgtgctgcaataaac

SEQ ID NO: 1724842 - DNA, 15 bp, Homo sapiens
gtgctgcaataaaca

SEQ ID NO: 1724843 - DNA, 15 bp, Homo sapiens
tgctgcaataaacaa

SEQ ID NO: 1724844 - DNA, 15 bp, Homo sapiens
gctgcaataaacaag

SEQ ID NO: 1724845 - DNA, 15 bp, Homo sapiens
ctgcaataaacaagt

SEQ ID NO: 1724846 - DNA, 15 bp, Homo sapiens
tgcaataaacaagtg

SEQ ID NO: 1724847 - DNA, 15 bp, Homo sapiens
gcaataaacaagtgc

SEQ ID NO: 1724848 - DNA, 15 bp, Homo sapiens
caataaacaagtgca

SEQ ID NO: 1724849 - DNA, 15 bp, Homo sapiens
aataaacaagtgcag

SEQ ID NO: 1724850 - DNA, 15 bp, Homo sapiens
ataaacaagtgcagg

SEQ ID NO: 1724851 - DNA, 15 bp, Homo sapiens
taaacaagtgcaggt

SEQ ID NO: 1724852 - DNA, 15 bp, Homo sapiens
aaacaagtgcaggtt

SEQ ID NO: 1724853 - DNA, 15 bp, Homo sapiens
aacaagtgcaggttt

SEQ ID NO: 1724854 - DNA, 15 bp, Homo sapiens
acaagtgcaggtttc

SEQ ID NO: 1724855 - DNA, 15 bp, Homo sapiens
caagtgcaggtttct

SEQ ID NO: 1724856 - DNA, 15 bp, Homo sapiens
aagtgcaggtttctt

SEQ ID NO: 1724857 - DNA, 15 bp, Homo sapiens
agtgcaggtttcttt

SEQ ID NO: 1724858 - DNA, 15 bp, Homo sapiens
gtgcaggtttctttt

SEQ ID NO: 1724859 - DNA, 15 bp, Homo sapiens
tgcaggtttcttttt

SEQ ID NO: 1724860 - DNA, 15 bp, Homo sapiens
gcaggtttctttttg

SEQ ID NO: 1724861 - DNA, 15 bp, Homo sapiens
caggtttctttttga

SEQ ID NO: 1724862 - DNA, 15 bp, Homo sapiens
aggtttctttttgat

SEQ ID NO: 1724863 - DNA, 15 bp, Homo sapiens
ggtttctttttgata

SEQ ID NO: 1724864 - DNA, 15 bp, Homo sapiens
gtttctttttgatat

SEQ ID NO: 1724865 - DNA, 15 bp, Homo sapiens
tttctttttgatatt

SEQ ID NO: 1724866 - DNA, 15 bp, Homo sapiens
ttctttttgatatta

SEQ ID NO: 1724867 - DNA, 15 bp, Homo sapiens
tctttttgatattat

SEQ ID NO: 1724868 - DNA, 15 bp, Homo sapiens
ctttttgatattatg

SEQ ID NO: 1724869 - DNA, 15 bp, Homo sapiens
tttttgatattatga

SEQ ID NO: 1724870 - DNA, 15 bp, Homo sapiens
ttttgatattatgac

SEQ ID NO: 1724871 - DNA, 15 bp, Homo sapiens
tttgatattatgact

SEQ ID NO: 1724872 - DNA, 15 bp, Homo sapiens
ttgatattatgactt

SEQ ID NO: 1724873 - DNA, 15 bp, Homo sapiens
tgatattatgacttc

SEQ ID NO: 1724874 - DNA, 15 bp, Homo sapiens
gatattatgacttct

SEQ ID NO: 1724875 - DNA, 15 bp, Homo sapiens
atattatgacttctt

SEQ ID NO: 1724876 - DNA, 15 bp, Homo sapiens
tattatgacttcttt

SEQ ID NO: 1724877 - DNA, 15 bp, Homo sapiens
attatgacttctttt

SEQ ID NO: 1724878 - DNA, 15 bp, Homo sapiens
ttatgacttctttta

SEQ ID NO: 1724879 - DNA, 15 bp, Homo sapiens
tatgacttcttttat

SEQ ID NO: 1724880 - DNA, 15 bp, Homo sapiens
atgacttcttttatt

SEQ ID NO: 1724881 - DNA, 15 bp, Homo sapiens
tgacttcttttattt

SEQ ID NO: 1724882 - DNA, 15 bp, Homo sapiens
gacttcttttatttt

SEQ ID NO: 1724883 - DNA, 15 bp, Homo sapiens
acttcttttattttg

SEQ ID NO: 1724884 - DNA, 15 bp, Homo sapiens
cttcttttattttgg

SEQ ID NO: 1724885 - DNA, 15 bp, Homo sapiens
ttcttttattttggg

SEQ ID NO: 1724886 - DNA, 15 bp, Homo sapiens
tcttttattttgggt

SEQ ID NO: 1724887 - DNA, 15 bp, Homo sapiens
cttttattttgggta

SEQ ID NO: 1724888 - DNA, 15 bp, Homo sapiens
ttttattttgggtag

SEQ ID NO: 1724889 - DNA, 15 bp, Homo sapiens
tttattttgggtaga

SEQ ID NO: 1724890 - DNA, 15 bp, Homo sapiens
ttattttgggtagat

SEQ ID NO: 1724891 - DNA, 15 bp, Homo sapiens
tattttgggtagata

SEQ ID NO: 1724892 - DNA, 15 bp, Homo sapiens
attttgggtagatac

SEQ ID NO: 1724893 - DNA, 15 bp, Homo sapiens
ttttgggtagatacc

SEQ ID NO: 1724894 - DNA, 15 bp, Homo sapiens
tttgggtagataccc

SEQ ID NO: 1724895 - DNA, 15 bp, Homo sapiens
ttgggtagataccca

SEQ ID NO: 1724896 - DNA, 15 bp, Homo sapiens
tgggtagatacccag

SEQ ID NO: 1724897 - DNA, 15 bp, Homo sapiens
gggtagatacccagt

SEQ ID NO: 1724898 - DNA, 15 bp, Homo sapiens
ggtagatacccagta

SEQ ID NO: 1724899 - DNA, 15 bp, Homo sapiens
gtagatacccagtag

SEQ ID NO: 1724900 - DNA, 15 bp, Homo sapiens
tagatacccagtagt

SEQ ID NO: 1724901 - DNA, 15 bp, Homo sapiens
agatacccagtagtg

SEQ ID NO: 1724902 - DNA, 15 bp, Homo sapiens
gatacccagtagtgg

SEQ ID NO: 1724903 - DNA, 15 bp, Homo sapiens
atacccagtagtggg

SEQ ID NO: 1724904 - DNA, 15 bp, Homo sapiens
tacccagtagtggga

SEQ ID NO: 1724905 - DNA, 15 bp, Homo sapiens
acccagtagtgggat

SEQ ID NO: 1724906 - DNA, 15 bp, Homo sapiens
cccagtagtgggatt

SEQ ID NO: 1724907 - DNA, 15 bp, Homo sapiens
ccagtagtgggattg

SEQ ID NO: 1724908 - DNA, 15 bp, Homo sapiens
cagtagtgggattgc

SEQ ID NO: 1724909 - DNA, 15 bp, Homo sapiens
agtagtgggattgct

SEQ ID NO: 1724910 - DNA, 15 bp, Homo sapiens
gtagtgggattgctg

SEQ ID NO: 1724911 - DNA, 15 bp, Homo sapiens
agtgggattgctgga

SEQ ID NO: 1724912 - DNA, 15 bp, Homo sapiens
gtgggattgctggat

SEQ ID NO: 1724913 - DNA, 15 bp, Homo sapiens
tgggattgctggatc

SEQ ID NO: 1724914 - DNA, 15 bp, Homo sapiens
gggattgctggatcg

SEQ ID NO: 1724915 - DNA, 15 bp, Homo sapiens
ggattgctggatcga

SEQ ID NO: 1724916 - DNA, 15 bp, Homo sapiens
gattgctggatcgaa

SEQ ID NO: 1724917 - DNA, 15 bp, Homo sapiens
attgctggatcgaat

SEQ ID NO: 1724918 - DNA, 15 bp, Homo sapiens
ttgctggatcgaatg

SEQ ID NO: 1724919 - DNA, 15 bp, Homo sapiens
tgctggatcgaatgg

SEQ ID NO: 1724920 - DNA, 15 bp, Homo sapiens
gctggatcgaatggt

SEQ ID NO: 1724921 - DNA, 15 bp, Homo sapiens
ctggatcgaatggtt

SEQ ID NO: 1724922 - DNA, 15 bp, Homo sapiens
tggatcgaatggttg

SEQ ID NO: 1724923 - DNA, 15 bp, Homo sapiens
ggatcgaatggttga

SEQ ID NO: 1724924 - DNA, 15 bp, Homo sapiens
gatcgaatggttgat

SEQ ID NO: 1724925 - DNA, 15 bp, Homo sapiens
atcgaatggttgatc

SEQ ID NO: 1724926 - DNA, 15 bp, Homo sapiens
tcgaatggttgatct

SEQ ID NO: 1724927 - DNA, 15 bp, Homo sapiens
cgaatggttgatctg

SEQ ID NO: 1724928 - DNA, 15 bp, Homo sapiens
gaatggttgatctgc

SEQ ID NO: 1724929 - DNA, 15 bp, Homo sapiens
aatggttgatctgct

SEQ ID NO: 1724930 - DNA, 15 bp, Homo sapiens
atggttgatctgctt

SEQ ID NO: 1724931 - DNA, 15 bp, Homo sapiens
tggttgatctgcttc

SEQ ID NO: 1724932 - DNA, 15 bp, Homo sapiens
ggttgatctgcttct

SEQ ID NO: 1724933 - DNA, 15 bp, Homo sapiens
gttgatctgcttcta

SEQ ID NO: 1724934 - DNA, 15 bp, Homo sapiens
ttgatctgcttctag

SEQ ID NO: 1724935 - DNA, 15 bp, Homo sapiens
tgatctgcttctagt

SEQ ID NO: 1724936 - DNA, 15 bp, Homo sapiens
gatctgcttctagtt

SEQ ID NO: 1724937 - DNA, 15 bp, Homo sapiens
atctgcttctagttc

SEQ ID NO: 1724938 - DNA, 15 bp, Homo sapiens
tctgcttctagttct

SEQ ID NO: 1724939 - DNA, 15 bp, Homo sapiens
ctgcttctagttctt

SEQ ID NO: 1724940 - DNA, 15 bp, Homo sapiens
tgcttctagttcttt

SEQ ID NO: 1724941 - DNA, 15 bp, Homo sapiens
gcttctagttctttg

SEQ ID NO: 1724942 - DNA, 15 bp, Homo sapiens
cttctagttctttga

SEQ ID NO: 1724943 - DNA, 15 bp, Homo sapiens
ttctagttctttgag

SEQ ID NO: 1724944 - DNA, 15 bp, Homo sapiens
tctagttctttgaga

SEQ ID NO: 1724945 - DNA, 15 bp, Homo sapiens
ctagttctttgagaa

SEQ ID NO: 1724946 - DNA, 15 bp, Homo sapiens
tagttctttgagaaa

SEQ ID NO: 1724947 - DNA, 15 bp, Homo sapiens
agttctttgagaaat

SEQ ID NO: 1724948 - DNA, 15 bp, Homo sapiens
gttctttgagaaatc

SEQ ID NO: 1724949 - DNA, 15 bp, Homo sapiens
ttctttgagaaatcc

SEQ ID NO: 1724950 - DNA, 15 bp, Homo sapiens
tctttgagaaatcct

SEQ ID NO: 1724951 - DNA, 15 bp, Homo sapiens
ctttgagaaatcctc

SEQ ID NO: 1724952 - DNA, 15 bp, Homo sapiens
tttgagaaatcctca

SEQ ID NO: 1724953 - DNA, 15 bp, Homo sapiens
ttgagaaatcctcac

SEQ ID NO: 1724954 - DNA, 15 bp, Homo sapiens
tgagaaatcctcaca

SEQ ID NO: 1724955 - DNA, 15 bp, Homo sapiens
gagaaatcctcacac

SEQ ID NO: 1724956 - DNA, 15 bp, Homo sapiens
agaaatcctcacact

SEQ ID NO: 1724957 - DNA, 15 bp, Homo sapiens
gaaatcctcacactg

SEQ ID NO: 1724958 - DNA, 15 bp, Homo sapiens
aaatcctcacactgt

SEQ ID NO: 1724959 - DNA, 15 bp, Homo sapiens
aatcctcacactgtt

SEQ ID NO: 1724960 - DNA, 15 bp, Homo sapiens
atcctcacactgttt

SEQ ID NO: 1724961 - DNA, 15 bp, Homo sapiens
tcctcacactgtttt

SEQ ID NO: 1724962 - DNA, 15 bp, Homo sapiens
cctcacactgttttc

SEQ ID NO: 1724963 - DNA, 15 bp, Homo sapiens
ctcacactgttttcc

SEQ ID NO: 1724964 - DNA, 15 bp, Homo sapiens
tcacactgttttcca

SEQ ID NO: 1724965 - DNA, 15 bp, Homo sapiens
cacactgttttccat

SEQ ID NO: 1724966 - DNA, 15 bp, Homo sapiens
acactgttttccata

SEQ ID NO: 1724967 - DNA, 15 bp, Homo sapiens
cactgttttccatag

SEQ ID NO: 1724968 - DNA, 15 bp, Homo sapiens
actgttttccataga

SEQ ID NO: 1724969 - DNA, 15 bp, Homo sapiens
ctgttttccatagag

SEQ ID NO: 1724970 - DNA, 15 bp, Homo sapiens
tgttttccatagagg

SEQ ID NO: 1724971 - DNA, 15 bp, Homo sapiens
gttttccatagaggt

SEQ ID NO: 1724972 - DNA, 15 bp, Homo sapiens
ttttccatagaggtt

SEQ ID NO: 1724973 - DNA, 15 bp, Homo sapiens
tttccatagaggttg

SEQ ID NO: 1724974 - DNA, 15 bp, Homo sapiens
ttccatagaggttgt

SEQ ID NO: 1724975 - DNA, 15 bp, Homo sapiens
tccatagaggttgtg

SEQ ID NO: 1724976 - DNA, 15 bp, Homo sapiens
ccatagaggttgtgc

SEQ ID NO: 1724977 - DNA, 15 bp, Homo sapiens
catagaggttgtgct

SEQ ID NO: 1724978 - DNA, 15 bp, Homo sapiens
atagaggttgtgcta

SEQ ID NO: 1724979 - DNA, 15 bp, Homo sapiens
tagaggttgtgctaa

SEQ ID NO: 1724980 - DNA, 15 bp, Homo sapiens
agaggttgtgctaat

SEQ ID NO: 1724981 - DNA, 15 bp, Homo sapiens
gaggttgtgctaatt

SEQ ID NO: 1724982 - DNA, 15 bp, Homo sapiens
aggttgtgctaattt

SEQ ID NO: 1724983 - DNA, 15 bp, Homo sapiens
ggttgtgctaattta

SEQ ID NO: 1724984 - DNA, 15 bp, Homo sapiens
gttgtgctaatttac

SEQ ID NO: 1724985 - DNA, 15 bp, Homo sapiens
ttgtgctaatttaca

SEQ ID NO: 1724986 - DNA, 15 bp, Homo sapiens
tgtgctaatttacat

SEQ ID NO: 1724987 - DNA, 15 bp, Homo sapiens
gtgctaatttacatt

SEQ ID NO: 1724988 - DNA, 15 bp, Homo sapiens
tgctaatttacattt

SEQ ID NO: 1724989 - DNA, 15 bp, Homo sapiens
gctaatttacatttc

SEQ ID NO: 1724990 - DNA, 15 bp, Homo sapiens
ctaatttacatttcc

SEQ ID NO: 1724991 - DNA, 15 bp, Homo sapiens
taatttacatttcca

SEQ ID NO: 1724992 - DNA, 15 bp, Homo sapiens
aatttacatttccac

SEQ ID NO: 1724993 - DNA, 15 bp, Homo sapiens
atttacatttccacc

SEQ ID NO: 1724994 - DNA, 15 bp, Homo sapiens
tttacatttccacca

SEQ ID NO: 1724995 - DNA, 15 bp, Homo sapiens
ttacatttccaccaa

SEQ ID NO: 1724996 - DNA, 15 bp, Homo sapiens
tacatttccaccaac

SEQ ID NO: 1724997 - DNA, 15 bp, Homo sapiens
acatttccaccaaca

SEQ ID NO: 1724998 - DNA, 15 bp, Homo sapiens
catttccaccaacag

SEQ ID NO: 1724999 - DNA, 15 bp, Homo sapiens
atttccaccaacagt

SEQ ID NO: 1725000 - DNA, 15 bp, Homo sapiens
tttccaccaacagtg

SEQ ID NO: 1725001 - DNA, 15 bp, Homo sapiens
ttccaccaacagtgt

SEQ ID NO: 1725002 - DNA, 15 bp, Homo sapiens
tccaccaacagtgta

SEQ ID NO: 1725003 - DNA, 15 bp, Homo sapiens
ccaccaacagtgtat

SEQ ID NO: 1725004 - DNA, 15 bp, Homo sapiens
caccaacagtgtata

SEQ ID NO: 1725005 - DNA, 15 bp, Homo sapiens
accaacagtgtataa

SEQ ID NO: 1725006 - DNA, 15 bp, Homo sapiens
ccaacagtgtataag

SEQ ID NO: 1725007 - DNA, 15 bp, Homo sapiens
caacagtgtataagc

SEQ ID NO: 1725008 - DNA, 15 bp, Homo sapiens
aacagtgtataagca

SEQ ID NO: 1725009 - DNA, 15 bp, Homo sapiens
acagtgtataagcat

SEQ ID NO: 1725010 - DNA, 15 bp, Homo sapiens
cagtgtataagcatt

SEQ ID NO: 1725011 - DNA, 15 bp, Homo sapiens
agtgtataagcattc

SEQ ID NO: 1725012 - DNA, 15 bp, Homo sapiens
gtgtataagcattcc

SEQ ID NO: 1725013 - DNA, 15 bp, Homo sapiens
tgtataagcattccc

SEQ ID NO: 1725014 - DNA, 15 bp, Homo sapiens
gtataagcattccct

SEQ ID NO: 1725015 - DNA, 15 bp, Homo sapiens
tataagcattccctt

SEQ ID NO: 1725016 - DNA, 15 bp, Homo sapiens
ataagcattcccttt

SEQ ID NO: 1725017 - DNA, 15 bp, Homo sapiens
taagcattccctttt

SEQ ID NO: 1725018 - DNA, 15 bp, Homo sapiens
aagcattcccttttc

SEQ ID NO: 1725019 - DNA, 15 bp, Homo sapiens
agcattcccttttca

SEQ ID NO: 1725020 - DNA, 15 bp, Homo sapiens
gcattcccttttcac

SEQ ID NO: 1725021 - DNA, 15 bp, Homo sapiens
cattcccttttcact

SEQ ID NO: 1725022 - DNA, 15 bp, Homo sapiens
attcccttttcactg

SEQ ID NO: 1725023 - DNA, 15 bp, Homo sapiens
ttcccttttcactgc

SEQ ID NO: 1725024 - DNA, 15 bp, Homo sapiens
tcccttttcactgca

SEQ ID NO: 1725025 - DNA, 15 bp, Homo sapiens
cccttttcactgcat

SEQ ID NO: 1725026 - DNA, 15 bp, Homo sapiens
ccttttcactgcatc

SEQ ID NO: 1725027 - DNA, 15 bp, Homo sapiens
cttttcactgcatcc

SEQ ID NO: 1725028 - DNA, 15 bp, Homo sapiens
tttcactgcatcctc

SEQ ID NO: 1725029 - DNA, 15 bp, Homo sapiens
ttcactgcatcctcg

SEQ ID NO: 1725030 - DNA, 15 bp, Homo sapiens
tcactgcatcctcgc

SEQ ID NO: 1725031 - DNA, 15 bp, Homo sapiens
cactgcatcctcgcc

SEQ ID NO: 1725032 - DNA, 15 bp, Homo sapiens
actgcatcctcgcca

SEQ ID NO: 1725033 - DNA, 15 bp, Homo sapiens
ctgcatcctcgccaa

SEQ ID NO: 1725034 - DNA, 15 bp, Homo sapiens
tgcatcctcgccaac

SEQ ID NO: 1725035 - DNA, 15 bp, Homo sapiens
gcatcctcgccaaca

SEQ ID NO: 1725036 - DNA, 15 bp, Homo sapiens
catcctcgccaacat

SEQ ID NO: 1725037 - DNA, 15 bp, Homo sapiens
atcctcgccaacatc

SEQ ID NO: 1725038 - DNA, 15 bp, Homo sapiens
tcctcgccaacatct

SEQ ID NO: 1725039 - DNA, 15 bp, Homo sapiens
cctcgccaacatcta

SEQ ID NO: 1725040 - DNA, 15 bp, Homo sapiens
ctcgccaacatctat

SEQ ID NO: 1725041 - DNA, 15 bp, Homo sapiens
tcgccaacatctatt

SEQ ID NO: 1725042 - DNA, 15 bp, Homo sapiens
cgccaacatctattg

SEQ ID NO: 1725043 - DNA, 15 bp, Homo sapiens
gccaacatctattgt

SEQ ID NO: 1725044 - DNA, 15 bp, Homo sapiens
ccaacatctattgtt

SEQ ID NO: 1725045 - DNA, 15 bp, Homo sapiens
caacatctattgttt

SEQ ID NO: 1725046 - DNA, 15 bp, Homo sapiens
aacatctattgtttt

SEQ ID NO: 1725047 - DNA, 15 bp, Homo sapiens
acatctattgttttt

SEQ ID NO: 1725048 - DNA, 15 bp, Homo sapiens
catctattgtttttt

SEQ ID NO: 1725049 - DNA, 15 bp, Homo sapiens
atctattgttttttt

SEQ ID NO: 1725050 - DNA, 15 bp, Homo sapiens
tctattgttttttta

SEQ ID NO: 1725051 - DNA, 15 bp, Homo sapiens
ctattgtttttttac

SEQ ID NO: 1725052 - DNA, 15 bp, Homo sapiens
tattgtttttttact

SEQ ID NO: 1725053 - DNA, 15 bp, Homo sapiens
attgtttttttactt

SEQ ID NO: 1725054 - DNA, 15 bp, Homo sapiens
ttgtttttttacttt

SEQ ID NO: 1725055 - DNA, 15 bp, Homo sapiens
tgtttttttacttta

SEQ ID NO: 1725056 - DNA, 15 bp, Homo sapiens
gtttttttactttat

SEQ ID NO: 1725057 - DNA, 15 bp, Homo sapiens
tttttttactttatt

SEQ ID NO: 1725058 - DNA, 15 bp, Homo sapiens
ttttttactttattt

SEQ ID NO: 1725059 - DNA, 15 bp, Homo sapiens
tttttactttatttt

SEQ ID NO: 1725060 - DNA, 15 bp, Homo sapiens
ttttactttattttc

SEQ ID NO: 1725061 - DNA, 15 bp, Homo sapiens
tttactttattttcc

SEQ ID NO: 1725062 - DNA, 15 bp, Homo sapiens
ttactttattttcca

SEQ ID NO: 1725063 - DNA, 15 bp, Homo sapiens
tactttattttccat

SEQ ID NO: 1725064 - DNA, 15 bp, Homo sapiens
actttattttccata

SEQ ID NO: 1725065 - DNA, 15 bp, Homo sapiens
ctttattttccatat

SEQ ID NO: 1725066 - DNA, 15 bp, Homo sapiens
tttattttccatata

SEQ ID NO: 1725067 - DNA, 15 bp, Homo sapiens
ttattttccatataa

SEQ ID NO: 1725068 - DNA, 15 bp, Homo sapiens
tattttccatataaa

SEQ ID NO: 1725069 - DNA, 15 bp, Homo sapiens
attttccatataaaa

SEQ ID NO: 1725070 - DNA, 15 bp, Homo sapiens
ttttccatataaaaa

SEQ ID NO: 1725071 - DNA, 15 bp, Homo sapiens
tttccatataaaaag

SEQ ID NO: 1725072 - DNA, 15 bp, Homo sapiens
ttccatataaaaagg

SEQ ID NO: 1725073 - DNA, 15 bp, Homo sapiens
tccatataaaaaggg

SEQ ID NO: 1725074 - DNA, 15 bp, Homo sapiens
ccatataaaaagggg

SEQ ID NO: 1725075 - DNA, 15 bp, Homo sapiens
catataaaaaggggt

SEQ ID NO: 1725076 - DNA, 15 bp, Homo sapiens
atataaaaaggggtt

SEQ ID NO: 1725077 - DNA, 15 bp, Homo sapiens
tataaaaaggggttt

SEQ ID NO: 1725078 - DNA, 15 bp, Homo sapiens
ataaaaaggggttta

SEQ ID NO: 1725079 - DNA, 15 bp, Homo sapiens
taaaaaggggtttat

SEQ ID NO: 1725080 - DNA, 15 bp, Homo sapiens
aaaaaggggtttatt

SEQ ID NO: 1725081 - DNA, 15 bp, Homo sapiens
aaaaggggtttattt

SEQ ID NO: 1725082 - DNA, 15 bp, Homo sapiens
aaaggggtttattta

SEQ ID NO: 1725083 - DNA, 15 bp, Homo sapiens
aaggggtttatttag

SEQ ID NO: 1725084 - DNA, 15 bp, Homo sapiens
aggggtttatttaga

SEQ ID NO: 1725085 - DNA, 15 bp, Homo sapiens
ggggtttatttagat

SEQ ID NO: 1725086 - DNA, 15 bp, Homo sapiens
gggtttatttagatg

SEQ ID NO: 1725087 - DNA, 15 bp, Homo sapiens
ggtttatttagatgt

SEQ ID NO: 1725088 - DNA, 15 bp, Homo sapiens
gtttatttagatgtt

SEQ ID NO: 1725089 - DNA, 15 bp, Homo sapiens
tttatttagatgtta

SEQ ID NO: 1725090 - DNA, 15 bp, Homo sapiens
ttatttagatgttag

SEQ ID NO: 1725091 - DNA, 15 bp, Homo sapiens
tatttagatgttaga

SEQ ID NO: 1725092 - DNA, 15 bp, Homo sapiens
atttagatgttagaa

SEQ ID NO: 1725093 - DNA, 15 bp, Homo sapiens
tttagatgttagaat

SEQ ID NO: 1725094 - DNA, 15 bp, Homo sapiens
ttagatgttagaatc

SEQ ID NO: 1725095 - DNA, 15 bp, Homo sapiens
tagatgttagaatca

SEQ ID NO: 1725096 - DNA, 15 bp, Homo sapiens
agatgttagaatcat

SEQ ID NO: 1725097 - DNA, 15 bp, Homo sapiens
gatgttagaatcatc

SEQ ID NO: 1725098 - DNA, 15 bp, Homo sapiens
atgttagaatcatct

SEQ ID NO: 1725099 - DNA, 15 bp, Homo sapiens
tgttagaatcatcta

SEQ ID NO: 1725100 - DNA, 15 bp, Homo sapiens
gttagaatcatctag

SEQ ID NO: 1725101 - DNA, 15 bp, Homo sapiens
ttagaatcatctagt

SEQ ID NO: 1725102 - DNA, 15 bp, Homo sapiens
tagaatcatctagtg

SEQ ID NO: 1725103 - DNA, 15 bp, Homo sapiens
agaatcatctagtga

SEQ ID NO: 1725104 - DNA, 15 bp, Homo sapiens
gaatcatctagtgat

SEQ ID NO: 1725105 - DNA, 15 bp, Homo sapiens
aatcatctagtgatt

SEQ ID NO: 1725106 - DNA, 15 bp, Homo sapiens
atcatctagtgattc

SEQ ID NO: 1725107 - DNA, 15 bp, Homo sapiens
tcatctagtgattca

SEQ ID NO: 1725108 - DNA, 15 bp, Homo sapiens
catctagtgattcag

SEQ ID NO: 1725109 - DNA, 15 bp, Homo sapiens
atctagtgattcaga

SEQ ID NO: 1725110 - DNA, 15 bp, Homo sapiens
tctagtgattcagaa

SEQ ID NO: 1725111 - DNA, 15 bp, Homo sapiens
ctagtgattcagaaa

SEQ ID NO: 1725112 - DNA, 15 bp, Homo sapiens
tagtgattcagaaag

SEQ ID NO: 1725113 - DNA, 15 bp, Homo sapiens
agtgattcagaaaga

SEQ ID NO: 1725114 - DNA, 15 bp, Homo sapiens
gtgattcagaaagat

SEQ ID NO: 1725115 - DNA, 15 bp, Homo sapiens
tgattcagaaagatt

SEQ ID NO: 1725116 - DNA, 15 bp, Homo sapiens
gattcagaaagattg

SEQ ID NO: 1725117 - DNA, 15 bp, Homo sapiens
attcagaaagattgg

SEQ ID NO: 1725118 - DNA, 15 bp, Homo sapiens
ttcagaaagattgga

SEQ ID NO: 1725119 - DNA, 15 bp, Homo sapiens
tcagaaagattggac

SEQ ID NO: 1725120 - DNA, 15 bp, Homo sapiens
cagaaagattggaca

SEQ ID NO: 1725121 - DNA, 15 bp, Homo sapiens
agaaagattggacat

SEQ ID NO: 1725122 - DNA, 15 bp, Homo sapiens
gaaagattggacatg

SEQ ID NO: 1725123 - DNA, 15 bp, Homo sapiens
aaagattggacatga

SEQ ID NO: 1725124 - DNA, 15 bp, Homo sapiens
aagattggacatgaa

SEQ ID NO: 1725125 - DNA, 15 bp, Homo sapiens
agattggacatgaat

SEQ ID NO: 1725126 - DNA, 15 bp, Homo sapiens
gattggacatgaatc

SEQ ID NO: 1725127 - DNA, 15 bp, Homo sapiens
attggacatgaatcc

SEQ ID NO: 1725128 - DNA, 15 bp, Homo sapiens
ttggacatgaatcca

SEQ ID NO: 1725129 - DNA, 15 bp, Homo sapiens
tggacatgaatccac

SEQ ID NO: 1725130 - DNA, 15 bp, Homo sapiens
ggacatgaatccacc

SEQ ID NO: 1725131 - DNA, 15 bp, Homo sapiens
gacatgaatccaccc

SEQ ID NO: 1725132 - DNA, 15 bp, Homo sapiens
acatgaatccaccca

SEQ ID NO: 1725133 - DNA, 15 bp, Homo sapiens
catgaatccacccag

SEQ ID NO: 1725134 - DNA, 15 bp, Homo sapiens
atgaatccacccagg

SEQ ID NO: 1725135 - DNA, 15 bp, Homo sapiens
tgaatccacccaggc

SEQ ID NO: 1725136 - DNA, 15 bp, Homo sapiens
gaatccacccaggcc

SEQ ID NO: 1725137 - DNA, 15 bp, Homo sapiens
aatccacccaggccc

SEQ ID NO: 1725138 - DNA, 15 bp, Homo sapiens
atccacccaggccca

SEQ ID NO: 1725139 - DNA, 15 bp, Homo sapiens
tccacccaggcccag

SEQ ID NO: 1725140 - DNA, 15 bp, Homo sapiens
ccacccaggcccagg

SEQ ID NO: 1725141 - DNA, 15 bp, Homo sapiens
cacccaggcccaggg

SEQ ID NO: 1725142 - DNA, 15 bp, Homo sapiens
acccaggcccagggc

SEQ ID NO: 1725143 - DNA, 15 bp, Homo sapiens
cccaggcccagggct

SEQ ID NO: 1725144 - DNA, 15 bp, Homo sapiens
ccaggcccagggctg

SEQ ID NO: 1725145 - DNA, 15 bp, Homo sapiens
caggcccagggctga

SEQ ID NO: 1725146 - DNA, 15 bp, Homo sapiens
aggcccagggctgag

SEQ ID NO: 1725147 - DNA, 15 bp, Homo sapiens
ggcccagggctgagc

SEQ ID NO: 1725148 - DNA, 15 bp, Homo sapiens
gcccagggctgagct

SEQ ID NO: 1725149 - DNA, 15 bp, Homo sapiens
cccagggctgagctg

SEQ ID NO: 1725150 - DNA, 15 bp, Homo sapiens
ccagggctgagctgc

SEQ ID NO: 1725151 - DNA, 15 bp, Homo sapiens
cagggctgagctgca

SEQ ID NO: 1725152 - DNA, 15 bp, Homo sapiens
agggctgagctgcag

SEQ ID NO: 1725153 - DNA, 15 bp, Homo sapiens
gggctgagctgcaga

SEQ ID NO: 1725154 - DNA, 15 bp, Homo sapiens
ggctgagctgcagag

SEQ ID NO: 1725155 - DNA, 15 bp, Homo sapiens
gctgagctgcagagc

SEQ ID NO: 1725156 - DNA, 15 bp, Homo sapiens
ctgagctgcagagca

SEQ ID NO: 1725157 - DNA, 15 bp, Homo sapiens
tgagctgcagagcag

SEQ ID NO: 1725158 - DNA, 15 bp, Homo sapiens
gagctgcagagcagc

SEQ ID NO: 1725159 - DNA, 15 bp, Homo sapiens
agctgcagagcagcc

SEQ ID NO: 1725160 - DNA, 15 bp, Homo sapiens
gctgcagagcagccg

SEQ ID NO: 1725161 - DNA, 15 bp, Homo sapiens
ctgcagagcagccgc

SEQ ID NO: 1725162 - DNA, 15 bp, Homo sapiens
tgcagagcagccgct

SEQ ID NO: 1725163 - DNA, 15 bp, Homo sapiens
gcagagcagccgctg

SEQ ID NO: 1725164 - DNA, 15 bp, Homo sapiens
cagagcagccgctga

SEQ ID NO: 1725165 - DNA, 15 bp, Homo sapiens
agagcagccgctgac

SEQ ID NO: 1725166 - DNA, 15 bp, Homo sapiens
gagcagccgctgaca

SEQ ID NO: 1725167 - DNA, 15 bp, Homo sapiens
agcagccgctgacat

SEQ ID NO: 1725168 - DNA, 15 bp, Homo sapiens
gcagccgctgacatc

SEQ ID NO: 1725169 - DNA, 15 bp, Homo sapiens
cagccgctgacatcc

SEQ ID NO: 1725170 - DNA, 15 bp, Homo sapiens
agccgctgacatccg

SEQ ID NO: 1725171 - DNA, 15 bp, Homo sapiens
gccgctgacatccgc

SEQ ID NO: 1725172 - DNA, 15 bp, Homo sapiens
ccgctgacatccgcg

SEQ ID NO: 1725173 - DNA, 15 bp, Homo sapiens
cgctgacatccgcgg

SEQ ID NO: 1725174 - DNA, 15 bp, Homo sapiens
gctgacatccgcggg

SEQ ID NO: 1725175 - DNA, 15 bp, Homo sapiens
ctgacatccgcgggg

SEQ ID NO: 1725176 - DNA, 15 bp, Homo sapiens
tgacatccgcgggga

SEQ ID NO: 1725177 - DNA, 15 bp, Homo sapiens
gacatccgcggggat

SEQ ID NO: 1725178 - DNA, 15 bp, Homo sapiens
acatccgcggggatt

SEQ ID NO: 1725179 - DNA, 15 bp, Homo sapiens
catccgcggggattt

SEQ ID NO: 1725180 - DNA, 15 bp, Homo sapiens
atccgcggggatttc

SEQ ID NO: 1725181 - DNA, 15 bp, Homo sapiens
tccgcggggatttca

SEQ ID NO: 1725182 - DNA, 15 bp, Homo sapiens
ccgcggggatttcac

SEQ ID NO: 1725183 - DNA, 15 bp, Homo sapiens
cgcggggatttcaca

SEQ ID NO: 1725184 - DNA, 15 bp, Homo sapiens
gcggggatttcacat

SEQ ID NO: 1725185 - DNA, 15 bp, Homo sapiens
cggggatttcacatg

SEQ ID NO: 1725186 - DNA, 15 bp, Homo sapiens
ggggatttcacatgc

SEQ ID NO: 1725187 - DNA, 15 bp, Homo sapiens
gggatttcacatgca

SEQ ID NO: 1725188 - DNA, 15 bp, Homo sapiens
ggatttcacatgcaa

SEQ ID NO: 1725189 - DNA, 15 bp, Homo sapiens
gatttcacatgcaac

SEQ ID NO: 1725190 - DNA, 15 bp, Homo sapiens
atttcacatgcaaca

SEQ ID NO: 1725191 - DNA, 15 bp, Homo sapiens
tttcacatgcaacag

SEQ ID NO: 1725192 - DNA, 15 bp, Homo sapiens
ttcacatgcaacagg

SEQ ID NO: 1725193 - DNA, 15 bp, Homo sapiens
tcacatgcaacaggg

SEQ ID NO: 1725194 - DNA, 15 bp, Homo sapiens
cacatgcaacaggga

SEQ ID NO: 1725195 - DNA, 15 bp, Homo sapiens
acatgcaacagggag

SEQ ID NO: 1725196 - DNA, 15 bp, Homo sapiens
catgcaacagggagc

SEQ ID NO: 1725197 - DNA, 15 bp, Homo sapiens
atgcaacagggagct

SEQ ID NO: 1725198 - DNA, 15 bp, Homo sapiens
tgcaacagggagctc

SEQ ID NO: 1725199 - DNA, 15 bp, Homo sapiens
gcaacagggagctct

SEQ ID NO: 1725200 - DNA, 15 bp, Homo sapiens
caacagggagctctc

SEQ ID NO: 1725201 - DNA, 15 bp, Homo sapiens
aacagggagctctca

SEQ ID NO: 1725202 - DNA, 15 bp, Homo sapiens
acagggagctctcac

SEQ ID NO: 1725203 - DNA, 15 bp, Homo sapiens
cagggagctctcacg

SEQ ID NO: 1725204 - DNA, 15 bp, Homo sapiens
agggagctctcacgt

SEQ ID NO: 1725205 - DNA, 15 bp, Homo sapiens
gggagctctcacgtg

SEQ ID NO: 1725206 - DNA, 15 bp, Homo sapiens
ggagctctcacgtgc

SEQ ID NO: 1725207 - DNA, 15 bp, Homo sapiens
gagctctcacgtgct

SEQ ID NO: 1725208 - DNA, 15 bp, Homo sapiens
agctctcacgtgctt

SEQ ID NO: 1725209 - DNA, 15 bp, Homo sapiens
gctctcacgtgcttg

SEQ ID NO: 1725210 - DNA, 15 bp, Homo sapiens
ctctcacgtgcttgc

SEQ ID NO: 1725211 - DNA, 15 bp, Homo sapiens
tctcacgtgcttgct

SEQ ID NO: 1725212 - DNA, 15 bp, Homo sapiens
ctcacgtgcttgctg

SEQ ID NO: 1725213 - DNA, 15 bp, Homo sapiens
tcacgtgcttgctgg

SEQ ID NO: 1725214 - DNA, 15 bp, Homo sapiens
cacgtgcttgctggc

SEQ ID NO: 1725215 - DNA, 15 bp, Homo sapiens
acgtgcttgctggcc

SEQ ID NO: 1725216 - DNA, 15 bp, Homo sapiens
cgtgcttgctggcca

SEQ ID NO: 1725217 - DNA, 15 bp, Homo sapiens
gtgcttgctggccat

SEQ ID NO: 1725218 - DNA, 15 bp, Homo sapiens
tgcttgctggccatt

SEQ ID NO: 1725219 - DNA, 15 bp, Homo sapiens
gcttgctggccattg

SEQ ID NO: 1725220 - DNA, 15 bp, Homo sapiens
cttgctggccattgt

SEQ ID NO: 1725221 - DNA, 15 bp, Homo sapiens
ttgctggccattgtg

SEQ ID NO: 1725222 - DNA, 15 bp, Homo sapiens
tgctggccattgtgc

SEQ ID NO: 1725223 - DNA, 15 bp, Homo sapiens
gctggccattgtgct

SEQ ID NO: 1725224 - DNA, 15 bp, Homo sapiens
ctggccattgtgctt

SEQ ID NO: 1725225 - DNA, 15 bp, Homo sapiens
tggccattgtgcttt

SEQ ID NO: 1725226 - DNA, 15 bp, Homo sapiens
ggccattgtgcttta

SEQ ID NO: 1725227 - DNA, 15 bp, Homo sapiens
gccattgtgctttaa

SEQ ID NO: 1725228 - DNA, 15 bp, Homo sapiens
ccattgtgctttaaa

SEQ ID NO: 1725229 - DNA, 15 bp, Homo sapiens
cattgtgctttaaat

SEQ ID NO: 1725230 - DNA, 15 bp, Homo sapiens
attgtgctttaaatc

SEQ ID NO: 1725231 - DNA, 15 bp, Homo sapiens
ttgtgctttaaatcg

SEQ ID NO: 1725232 - DNA, 15 bp, Homo sapiens
tgtgctttaaatcgt

SEQ ID NO: 1725233 - DNA, 15 bp, Homo sapiens
gtgctttaaatcgtt

SEQ ID NO: 1725234 - DNA, 15 bp, Homo sapiens
tgctttaaatcgttt

SEQ ID NO: 1725235 - DNA, 15 bp, Homo sapiens
gctttaaatcgtttt

SEQ ID NO: 1725236 - DNA, 15 bp, Homo sapiens
ctttaaatcgttttt

SEQ ID NO: 1725237 - DNA, 15 bp, Homo sapiens
tttaaatcgtttttt

SEQ ID NO: 1725238 - DNA, 15 bp, Homo sapiens
ttaaatcgttttttc

SEQ ID NO: 1725239 - DNA, 15 bp, Homo sapiens
taaatcgttttttcc

SEQ ID NO: 1725240 - DNA, 15 bp, Homo sapiens
aaatcgttttttcca

SEQ ID NO: 1725241 - DNA, 15 bp, Homo sapiens
aatcgttttttccag

SEQ ID NO: 1725242 - DNA, 15 bp, Homo sapiens
atcgttttttccagc

SEQ ID NO: 1725243 - DNA, 15 bp, Homo sapiens
tcgttttttccagcg

SEQ ID NO: 1725244 - DNA, 15 bp, Homo sapiens
cgttttttccagcgg

SEQ ID NO: 1725245 - DNA, 15 bp, Homo sapiens
gttttttccagcgga

SEQ ID NO: 1725246 - DNA, 15 bp, Homo sapiens
ttttttccagcggac

SEQ ID NO: 1725247 - DNA, 15 bp, Homo sapiens
tttttccagcggaca

SEQ ID NO: 1725248 - DNA, 15 bp, Homo sapiens
ttttccagcggacag

SEQ ID NO: 1725249 - DNA, 15 bp, Homo sapiens
tttccagcggacagc

SEQ ID NO: 1725250 - DNA, 15 bp, Homo sapiens
ttccagcggacagct

SEQ ID NO: 1725251 - DNA, 15 bp, Homo sapiens
tccagcggacagctg

SEQ ID NO: 1725252 - DNA, 15 bp, Homo sapiens
ccagcggacagctgt

SEQ ID NO: 1725253 - DNA, 15 bp, Homo sapiens
cagcggacagctgtg

SEQ ID NO: 1725254 - DNA, 15 bp, Homo sapiens
agcggacagctgtga

SEQ ID NO: 1725255 - DNA, 15 bp, Homo sapiens
gcggacagctgtgac

SEQ ID NO: 1725256 - DNA, 15 bp, Homo sapiens
cggacagctgtgact

SEQ ID NO: 1725257 - DNA, 15 bp, Homo sapiens
ggacagctgtgactg

SEQ ID NO: 1725258 - DNA, 15 bp, Homo sapiens
gacagctgtgactgc

SEQ ID NO: 1725259 - DNA, 15 bp, Homo sapiens
acagctgtgactgca

SEQ ID NO: 1725260 - DNA, 15 bp, Homo sapiens
cagctgtgactgcag

SEQ ID NO: 1725261 - DNA, 15 bp, Homo sapiens
agctgtgactgcagt

SEQ ID NO: 1725262 - DNA, 15 bp, Homo sapiens
gctgtgactgcagtt

SEQ ID NO: 1725263 - DNA, 15 bp, Homo sapiens
ctgtgactgcagttt

SEQ ID NO: 1725264 - DNA, 15 bp, Homo sapiens
tgtgactgcagtttt

SEQ ID NO: 1725265 - DNA, 15 bp, Homo sapiens
gtgactgcagttttc

SEQ ID NO: 1725266 - DNA, 15 bp, Homo sapiens
tgactgcagttttca

SEQ ID NO: 1725267 - DNA, 15 bp, Homo sapiens
gactgcagttttcaa

SEQ ID NO: 1725268 - DNA, 15 bp, Homo sapiens
actgcagttttcaaa

SEQ ID NO: 1725269 - DNA, 15 bp, Homo sapiens
ctgcagttttcaaat

SEQ ID NO: 1725270 - DNA, 15 bp, Homo sapiens
tgcagttttcaaatg

SEQ ID NO: 1725271 - DNA, 15 bp, Homo sapiens
gcagttttcaaatgt

SEQ ID NO: 1725272 - DNA, 15 bp, Homo sapiens
cagttttcaaatgtg

SEQ ID NO: 1725273 - DNA, 15 bp, Homo sapiens
agttttcaaatgtgc

SEQ ID NO: 1725274 - DNA, 15 bp, Homo sapiens
gttttcaaatgtgct

SEQ ID NO: 1725275 - DNA, 15 bp, Homo sapiens
ttttcaaatgtgctc

SEQ ID NO: 1725276 - DNA, 15 bp, Homo sapiens
tttcaaatgtgctct

SEQ ID NO: 1725277 - DNA, 15 bp, Homo sapiens
ttcaaatgtgctctg

SEQ ID NO: 1725278 - DNA, 15 bp, Homo sapiens
tcaaatgtgctctgg

SEQ ID NO: 1725279 - DNA, 15 bp, Homo sapiens
caaatgtgctctggc

SEQ ID NO: 1725280 - DNA, 15 bp, Homo sapiens
aaatgtgctctggcc

SEQ ID NO: 1725281 - DNA, 15 bp, Homo sapiens
aatgtgctctggcct

SEQ ID NO: 1725282 - DNA, 15 bp, Homo sapiens
atgtgctctggcctc

SEQ ID NO: 1725283 - DNA, 15 bp, Homo sapiens
tgtgctctggcctcc

SEQ ID NO: 1725284 - DNA, 15 bp, Homo sapiens
gtgctctggcctcca

SEQ ID NO: 1725285 - DNA, 15 bp, Homo sapiens
tgctctggcctccaa

SEQ ID NO: 1725286 - DNA, 15 bp, Homo sapiens
gctctggcctccaag

SEQ ID NO: 1725287 - DNA, 15 bp, Homo sapiens
ctctggcctccaagg

SEQ ID NO: 1725288 - DNA, 15 bp, Homo sapiens
tctggcctccaagga

SEQ ID NO: 1725289 - DNA, 15 bp, Homo sapiens
ctggcctccaaggac

SEQ ID NO: 1725290 - DNA, 15 bp, Homo sapiens
tggcctccaaggacc

SEQ ID NO: 1725291 - DNA, 15 bp, Homo sapiens
ggcctccaaggacca

SEQ ID NO: 1725292 - DNA, 15 bp, Homo sapiens
gcctccaaggaccag

SEQ ID NO: 1725293 - DNA, 15 bp, Homo sapiens
cctccaaggaccagg

SEQ ID NO: 1725294 - DNA, 15 bp, Homo sapiens
ctccaaggaccaggg

SEQ ID NO: 1725295 - DNA, 15 bp, Homo sapiens
tccaaggaccagggg

SEQ ID NO: 1725296 - DNA, 15 bp, Homo sapiens
ccaaggaccaggggg

SEQ ID NO: 1725297 - DNA, 15 bp, Homo sapiens
caaggaccagggggg

SEQ ID NO: 1725298 - DNA, 15 bp, Homo sapiens
aaggaccaggggggc

SEQ ID NO: 1725299 - DNA, 15 bp, Homo sapiens
aggaccaggggggcg

SEQ ID NO: 1725300 - DNA, 15 bp, Homo sapiens
ggaccaggggggcgg

SEQ ID NO: 1725301 - DNA, 15 bp, Homo sapiens
gaccaggggggcggt

SEQ ID NO: 1725302 - DNA, 15 bp, Homo sapiens
accaggggggcggtg

SEQ ID NO: 1725303 - DNA, 15 bp, Homo sapiens
ccaggggggcggtgg

SEQ ID NO: 1725304 - DNA, 15 bp, Homo sapiens
caggggggcggtggg

SEQ ID NO: 1725305 - DNA, 15 bp, Homo sapiens
aggggggcggtgggg

SEQ ID NO: 1725306 - DNA, 15 bp, Homo sapiens
ggggggcggtggggg

SEQ ID NO: 1725307 - DNA, 15 bp, Homo sapiens
gggggcggtgggggg

SEQ ID NO: 1725308 - DNA, 15 bp, Homo sapiens
ggggcggtggggggc

SEQ ID NO: 1725309 - DNA, 15 bp, Homo sapiens
gggcggtggggggcg

SEQ ID NO: 1725310 - DNA, 15 bp, Homo sapiens
ggcggtggggggcgg

SEQ ID NO: 1725311 - DNA, 15 bp, Homo sapiens
gcggtggggggcggg

SEQ ID NO: 1725312 - DNA, 15 bp, Homo sapiens
cggtggggggcgggg

SEQ ID NO: 1725313 - DNA, 15 bp, Homo sapiens
ggtggggggcggggg

SEQ ID NO: 1725314 - DNA, 15 bp, Homo sapiens
gtggggggcgggggt

SEQ ID NO: 1725315 - DNA, 15 bp, Homo sapiens
tggggggcgggggtg

SEQ ID NO: 1725316 - DNA, 15 bp, Homo sapiens
ggggggcgggggtgt

SEQ ID NO: 1725317 - DNA, 15 bp, Homo sapiens
gggggcgggggtgtc

SEQ ID NO: 1725318 - DNA, 15 bp, Homo sapiens
ggggcgggggtgtcc

SEQ ID NO: 1725319 - DNA, 15 bp, Homo sapiens
gggcgggggtgtcct

SEQ ID NO: 1725320 - DNA, 15 bp, Homo sapiens
ggcgggggtgtcctc

SEQ ID NO: 1725321 - DNA, 15 bp, Homo sapiens
gcgggggtgtcctct

SEQ ID NO: 1725322 - DNA, 15 bp, Homo sapiens
cgggggtgtcctctg

SEQ ID NO: 1725323 - DNA, 15 bp, Homo sapiens
gggggtgtcctctgt

SEQ ID NO: 1725324 - DNA, 15 bp, Homo sapiens
ggggtgtcctctgta

SEQ ID NO: 1725325 - DNA, 15 bp, Homo sapiens
gggtgtcctctgtat

SEQ ID NO: 1725326 - DNA, 15 bp, Homo sapiens
ggtgtcctctgtata

SEQ ID NO: 1725327 - DNA, 15 bp, Homo sapiens
gtgtcctctgtataa

SEQ ID NO: 1725328 - DNA, 15 bp, Homo sapiens
tgtcctctgtataaa

SEQ ID NO: 1725329 - DNA, 15 bp, Homo sapiens
gtcctctgtataaaa

SEQ ID NO: 1725330 - DNA, 15 bp, Homo sapiens
tcctctgtataaaaa

SEQ ID NO: 1725331 - DNA, 15 bp, Homo sapiens
cctctgtataaaaag

SEQ ID NO: 1725332 - DNA, 15 bp, Homo sapiens
ctctgtataaaaagt

SEQ ID NO: 1725333 - DNA, 15 bp, Homo sapiens
tctgtataaaaagtg

SEQ ID NO: 1725334 - DNA, 15 bp, Homo sapiens
ctgtataaaaagtgc

SEQ ID NO: 1725335 - DNA, 15 bp, Homo sapiens
tgtataaaaagtgct

SEQ ID NO: 1725336 - DNA, 15 bp, Homo sapiens
gtataaaaagtgctg

SEQ ID NO: 1725337 - DNA, 15 bp, Homo sapiens
tataaaaagtgctgt

SEQ ID NO: 1725338 - DNA, 15 bp, Homo sapiens
ataaaaagtgctgtc

SEQ ID NO: 1725339 - DNA, 15 bp, Homo sapiens
taaaaagtgctgtcc

SEQ ID NO: 1725340 - DNA, 15 bp, Homo sapiens
aaaaagtgctgtcct

SEQ ID NO: 1725341 - DNA, 15 bp, Homo sapiens
aaaagtgctgtcctg

SEQ ID NO: 1725342 - DNA, 15 bp, Homo sapiens
aaagtgctgtcctgc

SEQ ID NO: 1725343 - DNA, 15 bp, Homo sapiens
aagtgctgtcctgcg

SEQ ID NO: 1725344 - DNA, 15 bp, Homo sapiens
agtgctgtcctgcga

SEQ ID NO: 1725345 - DNA, 15 bp, Homo sapiens
gtgctgtcctgcgag

SEQ ID NO: 1725346 - DNA, 15 bp, Homo sapiens
tgctgtcctgcgagc

SEQ ID NO: 1725347 - DNA, 15 bp, Homo sapiens
gctgtcctgcgagct

SEQ ID NO: 1725348 - DNA, 15 bp, Homo sapiens
ctgtcctgcgagctt

SEQ ID NO: 1725349 - DNA, 15 bp, Homo sapiens
tgtcctgcgagcttc

SEQ ID NO: 1725350 - DNA, 15 bp, Homo sapiens
gtcctgcgagcttcc

SEQ ID NO: 1725351 - DNA, 15 bp, Homo sapiens
tcctgcgagcttccc

SEQ ID NO: 1725352 - DNA, 15 bp, Homo sapiens
cctgcgagcttcccg

SEQ ID NO: 1725353 - DNA, 15 bp, Homo sapiens
ctgcgagcttcccga

SEQ ID NO: 1725354 - DNA, 15 bp, Homo sapiens
tgcgagcttcccgac

SEQ ID NO: 1725355 - DNA, 15 bp, Homo sapiens
gcgagcttcccgacg

SEQ ID NO: 1725356 - DNA, 15 bp, Homo sapiens
cgagcttcccgacgg

SEQ ID NO: 1725357 - DNA, 15 bp, Homo sapiens
gagcttcccgacgga

SEQ ID NO: 1725358 - DNA, 15 bp, Homo sapiens
agcttcccgacggac

SEQ ID NO: 1725359 - DNA, 15 bp, Homo sapiens
gcttcccgacggaca

SEQ ID NO: 1725360 - DNA, 15 bp, Homo sapiens
cttcccgacggacac

SEQ ID NO: 1725361 - DNA, 15 bp, Homo sapiens
ttcccgacggacact

SEQ ID NO: 1725362 - DNA, 15 bp, Homo sapiens
tcccgacggacactt

SEQ ID NO: 1725363 - DNA, 15 bp, Homo sapiens
cccgacggacacttt

SEQ ID NO: 1725364 - DNA, 15 bp, Homo sapiens
ccgacggacactttg

SEQ ID NO: 1725365 - DNA, 15 bp, Homo sapiens
cgacggacactttgg

SEQ ID NO: 1725366 - DNA, 15 bp, Homo sapiens
gacggacactttggg

SEQ ID NO: 1725367 - DNA, 15 bp, Homo sapiens
acggacactttgggg

SEQ ID NO: 1725368 - DNA, 15 bp, Homo sapiens
cggacactttggggc

SEQ ID NO: 1725369 - DNA, 15 bp, Homo sapiens
ggacactttggggca

SEQ ID NO: 1725370 - DNA, 15 bp, Homo sapiens
gacactttggggcat

SEQ ID NO: 1725371 - DNA, 15 bp, Homo sapiens
acactttggggcatc

SEQ ID NO: 1725372 - DNA, 15 bp, Homo sapiens
cactttggggcatct

SEQ ID NO: 1725373 - DNA, 15 bp, Homo sapiens
actttggggcatctg

SEQ ID NO: 1725374 - DNA, 15 bp, Homo sapiens
ctttggggcatctga

SEQ ID NO: 1725375 - DNA, 15 bp, Homo sapiens
tttggggcatctgag

SEQ ID NO: 1725376 - DNA, 15 bp, Homo sapiens
ttggggcatctgagc

SEQ ID NO: 1725377 - DNA, 15 bp, Homo sapiens
tggggcatctgagcg

SEQ ID NO: 1725378 - DNA, 15 bp, Homo sapiens
ggggcatctgagcga

SEQ ID NO: 1725379 - DNA, 15 bp, Homo sapiens
gggcatctgagcgat

SEQ ID NO: 1725380 - DNA, 15 bp, Homo sapiens
ggcatctgagcgatt

SEQ ID NO: 1725381 - DNA, 15 bp, Homo sapiens
gcatctgagcgattc

SEQ ID NO: 1725382 - DNA, 15 bp, Homo sapiens
catctgagcgattcc

SEQ ID NO: 1725383 - DNA, 15 bp, Homo sapiens
atctgagcgattccc

SEQ ID NO: 1725384 - DNA, 15 bp, Homo sapiens
tctgagcgattcccg

SEQ ID NO: 1725385 - DNA, 15 bp, Homo sapiens
ctgagcgattcccgg

SEQ ID NO: 1725386 - DNA, 15 bp, Homo sapiens
tgagcgattcccggg

SEQ ID NO: 1725387 - DNA, 15 bp, Homo sapiens
gagcgattcccgggg

SEQ ID NO: 1725388 - DNA, 15 bp, Homo sapiens
agcgattcccgggga

SEQ ID NO: 1725389 - DNA, 15 bp, Homo sapiens
gcgattcccggggag

SEQ ID NO: 1725390 - DNA, 15 bp, Homo sapiens
cgattcccggggagg

SEQ ID NO: 1725391 - DNA, 15 bp, Homo sapiens
gattcccggggaggg

SEQ ID NO: 1725392 - DNA, 15 bp, Homo sapiens
attcccggggagggc

SEQ ID NO: 1725393 - DNA, 15 bp, Homo sapiens
ttcccggggagggca

SEQ ID NO: 1725394 - DNA, 15 bp, Homo sapiens
tcccggggagggcag

SEQ ID NO: 1725395 - DNA, 15 bp, Homo sapiens
cccggggagggcagc

SEQ ID NO: 1725396 - DNA, 15 bp, Homo sapiens
ccggggagggcagct

SEQ ID NO: 1725397 - DNA, 15 bp, Homo sapiens
cggggagggcagctc

SEQ ID NO: 1725398 - DNA, 15 bp, Homo sapiens
ggggagggcagctct

SEQ ID NO: 1725399 - DNA, 15 bp, Homo sapiens
gggagggcagctctg

SEQ ID NO: 1725400 - DNA, 15 bp, Homo sapiens
ggagggcagctctgc

SEQ ID NO: 1725401 - DNA, 15 bp, Homo sapiens
gagggcagctctgcc

SEQ ID NO: 1725402 - DNA, 15 bp, Homo sapiens
agggcagctctgcct

SEQ ID NO: 1725403 - DNA, 15 bp, Homo sapiens
gggcagctctgcctt

SEQ ID NO: 1725404 - DNA, 15 bp, Homo sapiens
ggcagctctgccttc

SEQ ID NO: 1725405 - DNA, 15 bp, Homo sapiens
gcagctctgccttcc

SEQ ID NO: 1725406 - DNA, 15 bp, Homo sapiens
cagctctgccttcct

SEQ ID NO: 1725407 - DNA, 15 bp, Homo sapiens
agctctgccttcctc

SEQ ID NO: 1725408 - DNA, 15 bp, Homo sapiens
gctctgccttcctca

SEQ ID NO: 1725409 - DNA, 15 bp, Homo sapiens
ctctgccttcctcag

SEQ ID NO: 1725410 - DNA, 15 bp, Homo sapiens
tctgccttcctcagg

SEQ ID NO: 1725411 - DNA, 15 bp, Homo sapiens
ctgccttcctcaggc

SEQ ID NO: 1725412 - DNA, 15 bp, Homo sapiens
tgccttcctcaggct

SEQ ID NO: 1725413 - DNA, 15 bp, Homo sapiens
gccttcctcaggcta

SEQ ID NO: 1725414 - DNA, 15 bp, Homo sapiens
ccttcctcaggctac

SEQ ID NO: 1725415 - DNA, 15 bp, Homo sapiens
cttcctcaggctacc

SEQ ID NO: 1725416 - DNA, 15 bp, Homo sapiens
ttcctcaggctacca

SEQ ID NO: 1725417 - DNA, 15 bp, Homo sapiens
tcctcaggctaccac

SEQ ID NO: 1725418 - DNA, 15 bp, Homo sapiens
cctcaggctaccact

SEQ ID NO: 1725419 - DNA, 15 bp, Homo sapiens
ctcaggctaccactg

SEQ ID NO: 1725420 - DNA, 15 bp, Homo sapiens
tcaggctaccactgc

SEQ ID NO: 1725421 - DNA, 15 bp, Homo sapiens
caggctaccactgca

SEQ ID NO: 1725422 - DNA, 15 bp, Homo sapiens
aggctaccactgcag

SEQ ID NO: 1725423 - DNA, 15 bp, Homo sapiens
ggctaccactgcagc

SEQ ID NO: 1725424 - DNA, 15 bp, Homo sapiens
gctaccactgcagcc

SEQ ID NO: 1725425 - DNA, 15 bp, Homo sapiens
ctaccactgcagcca

SEQ ID NO: 1725426 - DNA, 15 bp, Homo sapiens
taccactgcagccac

SEQ ID NO: 1725427 - DNA, 15 bp, Homo sapiens
accactgcagccacc

SEQ ID NO: 1725428 - DNA, 15 bp, Homo sapiens
ccactgcagccaccg

SEQ ID NO: 1725429 - DNA, 15 bp, Homo sapiens
cactgcagccaccga

SEQ ID NO: 1725430 - DNA, 15 bp, Homo sapiens
actgcagccaccgac

SEQ ID NO: 1725431 - DNA, 15 bp, Homo sapiens
ctgcagccaccgacg

SEQ ID NO: 1725432 - DNA, 15 bp, Homo sapiens
tgcagccaccgacgg

SEQ ID NO: 1725433 - DNA, 15 bp, Homo sapiens
gcagccaccgacgga

SEQ ID NO: 1725434 - DNA, 15 bp, Homo sapiens
cagccaccgacggac

SEQ ID NO: 1725435 - DNA, 15 bp, Homo sapiens
agccaccgacggaca

SEQ ID NO: 1725436 - DNA, 15 bp, Homo sapiens
gccaccgacggacat

SEQ ID NO: 1725437 - DNA, 15 bp, Homo sapiens
ccaccgacggacatt

SEQ ID NO: 1725438 - DNA, 15 bp, Homo sapiens
caccgacggacattc

SEQ ID NO: 1725439 - DNA, 15 bp, Homo sapiens
accgacggacattct

SEQ ID NO: 1725440 - DNA, 15 bp, Homo sapiens
ccgacggacattctc

SEQ ID NO: 1725441 - DNA, 15 bp, Homo sapiens
cgacggacattctca

SEQ ID NO: 1725442 - DNA, 15 bp, Homo sapiens
gacggacattctcac

SEQ ID NO: 1725443 - DNA, 15 bp, Homo sapiens
acggacattctcacc

SEQ ID NO: 1725444 - DNA, 15 bp, Homo sapiens
cggacattctcacca

SEQ ID NO: 1725445 - DNA, 15 bp, Homo sapiens
ggacattctcaccag

SEQ ID NO: 1725446 - DNA, 15 bp, Homo sapiens
gacattctcaccagc

SEQ ID NO: 1725447 - DNA, 15 bp, Homo sapiens
acattctcaccagca

SEQ ID NO: 1725448 - DNA, 15 bp, Homo sapiens
cattctcaccagcaa

SEQ ID NO: 1725449 - DNA, 15 bp, Homo sapiens
attctcaccagcaat

SEQ ID NO: 1725450 - DNA, 15 bp, Homo sapiens
ttctcaccagcaatc

SEQ ID NO: 1725451 - DNA, 15 bp, Homo sapiens
tctcaccagcaatca

SEQ ID NO: 1725452 - DNA, 15 bp, Homo sapiens
ctcaccagcaatcaa

SEQ ID NO: 1725453 - DNA, 15 bp, Homo sapiens
tcaccagcaatcaac

SEQ ID NO: 1725454 - DNA, 15 bp, Homo sapiens
caccagcaatcaacc

SEQ ID NO: 1725455 - DNA, 15 bp, Homo sapiens
accagcaatcaacca

SEQ ID NO: 1725456 - DNA, 15 bp, Homo sapiens
ccagcaatcaaccaa

SEQ ID NO: 1725457 - DNA, 15 bp, Homo sapiens
cagcaatcaaccaaa

SEQ ID NO: 1725458 - DNA, 15 bp, Homo sapiens
agcaatcaaccaaaa

SEQ ID NO: 1725459 - DNA, 15 bp, Homo sapiens
gcaatcaaccaaaaa

SEQ ID NO: 1725460 - DNA, 15 bp, Homo sapiens
caatcaaccaaaaaa

SEQ ID NO: 1725461 - DNA, 15 bp, Homo sapiens
aatcaaccaaaaaac

SEQ ID NO: 1725462 - DNA, 15 bp, Homo sapiens
atcaaccaaaaaaca

SEQ ID NO: 1725463 - DNA, 15 bp, Homo sapiens
tcaaccaaaaaacat

SEQ ID NO: 1725464 - DNA, 15 bp, Homo sapiens
caaccaaaaaacatc

SEQ ID NO: 1725465 - DNA, 15 bp, Homo sapiens
aaccaaaaaacatca

SEQ ID NO: 1725466 - DNA, 15 bp, Homo sapiens
accaaaaaacatcag

SEQ ID NO: 1725467 - DNA, 15 bp, Homo sapiens
ccaaaaaacatcaga

SEQ ID NO: 1725468 - DNA, 15 bp, Homo sapiens
caaaaaacatcagag

SEQ ID NO: 1725469 - DNA, 15 bp, Homo sapiens
aaaaaacatcagagt

SEQ ID NO: 1725470 - DNA, 15 bp, Homo sapiens
aaaaacatcagagtc

SEQ ID NO: 1725471 - DNA, 15 bp, Homo sapiens
aaaacatcagagtct

SEQ ID NO: 1725472 - DNA, 15 bp, Homo sapiens
aaacatcagagtctc

SEQ ID NO: 1725473 - DNA, 15 bp, Homo sapiens
aacatcagagtctct

SEQ ID NO: 1725474 - DNA, 15 bp, Homo sapiens
acatcagagtctctg

SEQ ID NO: 1725475 - DNA, 15 bp, Homo sapiens
catcagagtctctgt

SEQ ID NO: 1725476 - DNA, 15 bp, Homo sapiens
atcagagtctctgtg

SEQ ID NO: 1725477 - DNA, 15 bp, Homo sapiens
tcagagtctctgtga

SEQ ID NO: 1725478 - DNA, 15 bp, Homo sapiens
cagagtctctgtgaa

SEQ ID NO: 1725479 - DNA, 15 bp, Homo sapiens
agagtctctgtgaac

SEQ ID NO: 1725480 - DNA, 15 bp, Homo sapiens
gagtctctgtgaact

SEQ ID NO: 1725481 - DNA, 15 bp, Homo sapiens
agtctctgtgaactt

SEQ ID NO: 1725482 - DNA, 15 bp, Homo sapiens
gtctctgtgaacttg

SEQ ID NO: 1725483 - DNA, 15 bp, Homo sapiens
tctctgtgaacttgg

SEQ ID NO: 1725484 - DNA, 15 bp, Homo sapiens
ctctgtgaacttggc

SEQ ID NO: 1725485 - DNA, 15 bp, Homo sapiens
tctgtgaacttggct

SEQ ID NO: 1725486 - DNA, 15 bp, Homo sapiens
ctgtgaacttggctg

SEQ ID NO: 1725487 - DNA, 15 bp, Homo sapiens
tgtgaacttggctgc

SEQ ID NO: 1725488 - DNA, 15 bp, Homo sapiens
gtgaacttggctgcg

SEQ ID NO: 1725489 - DNA, 15 bp, Homo sapiens
tgaacttggctgcga

SEQ ID NO: 1725490 - DNA, 15 bp, Homo sapiens
gaacttggctgcgat

SEQ ID NO: 1725491 - DNA, 15 bp, Homo sapiens
aacttggctgcgatg

SEQ ID NO: 1725492 - DNA, 15 bp, Homo sapiens
acttggctgcgatga

SEQ ID NO: 1725493 - DNA, 15 bp, Homo sapiens
cttggctgcgatgat

SEQ ID NO: 1725494 - DNA, 15 bp, Homo sapiens
ttggctgcgatgata

SEQ ID NO: 1725495 - DNA, 15 bp, Homo sapiens
tggctgcgatgataa

SEQ ID NO: 1725496 - DNA, 15 bp, Homo sapiens
ggctgcgatgataag

SEQ ID NO: 1725497 - DNA, 15 bp, Homo sapiens
gctgcgatgataaga

SEQ ID NO: 1725498 - DNA, 15 bp, Homo sapiens
ctgcgatgataagaa

SEQ ID NO: 1725499 - DNA, 15 bp, Homo sapiens
tgcgatgataagaac

SEQ ID NO: 1725500 - DNA, 15 bp, Homo sapiens
gcgatgataagaacc

SEQ ID NO: 1725501 - DNA, 15 bp, Homo sapiens
cgatgataagaacca

SEQ ID NO: 1725502 - DNA, 15 bp, Homo sapiens
gatgataagaaccaa

SEQ ID NO: 1725503 - DNA, 15 bp, Homo sapiens
atgataagaaccaaa

SEQ ID NO: 1725504 - DNA, 15 bp, Homo sapiens
tgataagaaccaaat

SEQ ID NO: 1725505 - DNA, 15 bp, Homo sapiens
gataagaaccaaatg

SEQ ID NO: 1725506 - DNA, 15 bp, Homo sapiens
ataagaaccaaatgt

SEQ ID NO: 1725507 - DNA, 15 bp, Homo sapiens
taagaaccaaatgtt

SEQ ID NO: 1725508 - DNA, 15 bp, Homo sapiens
aagaaccaaatgttt

SEQ ID NO: 1725509 - DNA, 15 bp, Homo sapiens
agaaccaaatgtttt

SEQ ID NO: 1725510 - DNA, 15 bp, Homo sapiens
gaaccaaatgttttc

SEQ ID NO: 1725511 - DNA, 15 bp, Homo sapiens
aaccaaatgttttct

SEQ ID NO: 1725512 - DNA, 15 bp, Homo sapiens
accaaatgttttcta

SEQ ID NO: 1725513 - DNA, 15 bp, Homo sapiens
ccaaatgttttctaa

SEQ ID NO: 1725514 - DNA, 15 bp, Homo sapiens
caaatgttttctaat

SEQ ID NO: 1725515 - DNA, 15 bp, Homo sapiens
aaatgttttctaatc

SEQ ID NO: 1725516 - DNA, 15 bp, Homo sapiens
aatgttttctaatct

SEQ ID NO: 1725517 - DNA, 15 bp, Homo sapiens
atgttttctaatcta

SEQ ID NO: 1725518 - DNA, 15 bp, Homo sapiens
tgttttctaatctaa

SEQ ID NO: 1725519 - DNA, 15 bp, Homo sapiens
gttttctaatctaag

SEQ ID NO: 1725520 - DNA, 15 bp, Homo sapiens
ttttctaatctaaga

SEQ ID NO: 1725521 - DNA, 15 bp, Homo sapiens
tttctaatctaagac

SEQ ID NO: 1725522 - DNA, 15 bp, Homo sapiens
ttctaatctaagact

SEQ ID NO: 1725523 - DNA, 15 bp, Homo sapiens
tctaatctaagactt

SEQ ID NO: 1725524 - DNA, 15 bp, Homo sapiens
ctaatctaagacttg

SEQ ID NO: 1725525 - DNA, 15 bp, Homo sapiens
taatctaagacttgt

SEQ ID NO: 1725526 - DNA, 15 bp, Homo sapiens
aatctaagacttgta

SEQ ID NO: 1725527 - DNA, 15 bp, Homo sapiens
atctaagacttgtat

SEQ ID NO: 1725528 - DNA, 15 bp, Homo sapiens
tctaagacttgtatg

SEQ ID NO: 1725529 - DNA, 15 bp, Homo sapiens
ctaagacttgtatgc

SEQ ID NO: 1725530 - DNA, 15 bp, Homo sapiens
taagacttgtatgca

SEQ ID NO: 1725531 - DNA, 15 bp, Homo sapiens
aagacttgtatgcag

SEQ ID NO: 1725532 - DNA, 15 bp, Homo sapiens
agacttgtatgcaga

SEQ ID NO: 1725533 - DNA, 15 bp, Homo sapiens
gacttgtatgcagaa

SEQ ID NO: 1725534 - DNA, 15 bp, Homo sapiens
acttgtatgcagaac

SEQ ID NO: 1725535 - DNA, 15 bp, Homo sapiens
cttgtatgcagaaca

SEQ ID NO: 1725536 - DNA, 15 bp, Homo sapiens
ttgtatgcagaacac

SEQ ID NO: 1725537 - DNA, 15 bp, Homo sapiens
tgtatgcagaacaca

SEQ ID NO: 1725538 - DNA, 15 bp, Homo sapiens
gtatgcagaacacag

SEQ ID NO: 1725539 - DNA, 15 bp, Homo sapiens
tatgcagaacacagg

SEQ ID NO: 1725540 - DNA, 15 bp, Homo sapiens
atgcagaacacagga

SEQ ID NO: 1725541 - DNA, 15 bp, Homo sapiens
tgcagaacacaggaa

SEQ ID NO: 1725542 - DNA, 15 bp, Homo sapiens
gcagaacacaggaaa

SEQ ID NO: 1725543 - DNA, 15 bp, Homo sapiens
cagaacacaggaaat

SEQ ID NO: 1725544 - DNA, 15 bp, Homo sapiens
agaacacaggaaatt

SEQ ID NO: 1725545 - DNA, 15 bp, Homo sapiens
gaacacaggaaattg

SEQ ID NO: 1725546 - DNA, 15 bp, Homo sapiens
aacacaggaaattgc

SEQ ID NO: 1725547 - DNA, 15 bp, Homo sapiens
acacaggaaattgca

SEQ ID NO: 1725548 - DNA, 15 bp, Homo sapiens
cacaggaaattgcaa

SEQ ID NO: 1725549 - DNA, 15 bp, Homo sapiens
acaggaaattgcaat

SEQ ID NO: 1725550 - DNA, 15 bp, Homo sapiens
caggaaattgcaatt

SEQ ID NO: 1725551 - DNA, 15 bp, Homo sapiens
aggaaattgcaatta

SEQ ID NO: 1725552 - DNA, 15 bp, Homo sapiens
ggaaattgcaattag

SEQ ID NO: 1725553 - DNA, 15 bp, Homo sapiens
gaaattgcaattagg

SEQ ID NO: 1725554 - DNA, 15 bp, Homo sapiens
aaattgcaattagga

SEQ ID NO: 1725555 - DNA, 15 bp, Homo sapiens
aattgcaattaggaa

SEQ ID NO: 1725556 - DNA, 15 bp, Homo sapiens
attgcaattaggaac

SEQ ID NO: 1725557 - DNA, 15 bp, Homo sapiens
ttgcaattaggaaca

SEQ ID NO: 1725558 - DNA, 15 bp, Homo sapiens
tgcaattaggaacac

SEQ ID NO: 1725559 - DNA, 15 bp, Homo sapiens
gcaattaggaacacc

SEQ ID NO: 1725560 - DNA, 15 bp, Homo sapiens
caattaggaacaccc

SEQ ID NO: 1725561 - DNA, 15 bp, Homo sapiens
aattaggaacaccct

SEQ ID NO: 1725562 - DNA, 15 bp, Homo sapiens
attaggaacacccta

SEQ ID NO: 1725563 - DNA, 15 bp, Homo sapiens
ttaggaacaccctac

SEQ ID NO: 1725564 - DNA, 15 bp, Homo sapiens
taggaacaccctaca

SEQ ID NO: 1725565 - DNA, 15 bp, Homo sapiens
aggaacaccctacaa

SEQ ID NO: 1725566 - DNA, 15 bp, Homo sapiens
ggaacaccctacaaa

SEQ ID NO: 1725567 - DNA, 15 bp, Homo sapiens
gaacaccctacaaaa

SEQ ID NO: 1725568 - DNA, 15 bp, Homo sapiens
aacaccctacaaaat

SEQ ID NO: 1725569 - DNA, 15 bp, Homo sapiens
acaccctacaaaatt

SEQ ID NO: 1725570 - DNA, 15 bp, Homo sapiens
caccctacaaaattg

SEQ ID NO: 1725571 - DNA, 15 bp, Homo sapiens
accctacaaaattga

SEQ ID NO: 1725572 - DNA, 15 bp, Homo sapiens
ccctacaaaattgaa

SEQ ID NO: 1725573 - DNA, 15 bp, Homo sapiens
cctacaaaattgaac

SEQ ID NO: 1725574 - DNA, 15 bp, Homo sapiens
ctacaaaattgaaca

SEQ ID NO: 1725575 - DNA, 15 bp, Homo sapiens
tacaaaattgaacaa

SEQ ID NO: 1725576 - DNA, 15 bp, Homo sapiens
aaaattgaacaacag

SEQ ID NO: 1725577 - DNA, 15 bp, Homo sapiens
aaattgaacaacagt

SEQ ID NO: 1725578 - DNA, 15 bp, Homo sapiens
aattgaacaacagta

SEQ ID NO: 1725579 - DNA, 15 bp, Homo sapiens
attgaacaacagtat

SEQ ID NO: 1725580 - DNA, 15 bp, Homo sapiens
ttgaacaacagtatt

SEQ ID NO: 1725581 - DNA, 15 bp, Homo sapiens
tgaacaacagtattt

SEQ ID NO: 1725582 - DNA, 15 bp, Homo sapiens
gaacaacagtatttt

SEQ ID NO: 1725583 - DNA, 15 bp, Homo sapiens
aacaacagtattttc

SEQ ID NO: 1725584 - DNA, 15 bp, Homo sapiens
acaacagtattttct

SEQ ID NO: 1725585 - DNA, 15 bp, Homo sapiens
caacagtattttcta

SEQ ID NO: 1725586 - DNA, 15 bp, Homo sapiens
aacagtattttctaa

SEQ ID NO: 1725587 - DNA, 15 bp, Homo sapiens
acagtattttctaaa

SEQ ID NO: 1725588 - DNA, 15 bp, Homo sapiens
cagtattttctaaaa

SEQ ID NO: 1725589 - DNA, 15 bp, Homo sapiens
agtattttctaaaaa

SEQ ID NO: 1725590 - DNA, 15 bp, Homo sapiens
gtattttctaaaaat

SEQ ID NO: 1725591 - DNA, 15 bp, Homo sapiens
tattttctaaaaata

SEQ ID NO: 1725592 - DNA, 15 bp, Homo sapiens
attttctaaaaatat

SEQ ID NO: 1725593 - DNA, 15 bp, Homo sapiens
ttttctaaaaatatt

SEQ ID NO: 1725594 - DNA, 15 bp, Homo sapiens
tttctaaaaatattt

SEQ ID NO: 1725595 - DNA, 15 bp, Homo sapiens
ttctaaaaatatttt

SEQ ID NO: 1725596 - DNA, 15 bp, Homo sapiens
tctaaaaatattttt

SEQ ID NO: 1725597 - DNA, 15 bp, Homo sapiens
ctaaaaatatttttt

SEQ ID NO: 1725598 - DNA, 15 bp, Homo sapiens
taaaaatatttttta

SEQ ID NO: 1725599 - DNA, 15 bp, Homo sapiens
aaaaatattttttac

SEQ ID NO: 1725600 - DNA, 15 bp, Homo sapiens
aaaatattttttaca

SEQ ID NO: 1725601 - DNA, 15 bp, Homo sapiens
aaatattttttacat

SEQ ID NO: 1725602 - DNA, 15 bp, Homo sapiens
aatattttttacatc

SEQ ID NO: 1725603 - DNA, 15 bp, Homo sapiens
atattttttacatca

SEQ ID NO: 1725604 - DNA, 15 bp, Homo sapiens
tattttttacatcac

SEQ ID NO: 1725605 - DNA, 15 bp, Homo sapiens
attttttacatcact

SEQ ID NO: 1725606 - DNA, 15 bp, Homo sapiens
ttttttacatcactt

SEQ ID NO: 1725607 - DNA, 15 bp, Homo sapiens
tttttacatcacttt

SEQ ID NO: 1725608 - DNA, 15 bp, Homo sapiens
ttttacatcacttta

SEQ ID NO: 1725609 - DNA, 15 bp, Homo sapiens
tttacatcactttaa

SEQ ID NO: 1725610 - DNA, 15 bp, Homo sapiens
ttacatcactttaaa

SEQ ID NO: 1725611 - DNA, 15 bp, Homo sapiens
tacatcactttaaat

SEQ ID NO: 1725612 - DNA, 15 bp, Homo sapiens
acatcactttaaata

SEQ ID NO: 1725613 - DNA, 15 bp, Homo sapiens
catcactttaaataa

SEQ ID NO: 1725614 - DNA, 15 bp, Homo sapiens
atcactttaaataat

SEQ ID NO: 1725615 - DNA, 15 bp, Homo sapiens
tcactttaaataatt

SEQ ID NO: 1725616 - DNA, 15 bp, Homo sapiens
cactttaaataattt

SEQ ID NO: 1725617 - DNA, 15 bp, Homo sapiens
actttaaataattta

SEQ ID NO: 1725618 - DNA, 15 bp, Homo sapiens
ctttaaataatttac

SEQ ID NO: 1725619 - DNA, 15 bp, Homo sapiens
tttaaataatttaca

SEQ ID NO: 1725620 - DNA, 15 bp, Homo sapiens
ttaaataatttacag

SEQ ID NO: 1725621 - DNA, 15 bp, Homo sapiens
taaataatttacaga

SEQ ID NO: 1725622 - DNA, 15 bp, Homo sapiens
aaataatttacagaa

SEQ ID NO: 1725623 - DNA, 15 bp, Homo sapiens
aataatttacagaaa

SEQ ID NO: 1725624 - DNA, 15 bp, Homo sapiens
ataatttacagaaag

SEQ ID NO: 1725625 - DNA, 15 bp, Homo sapiens
taatttacagaaagc

SEQ ID NO: 1725626 - DNA, 15 bp, Homo sapiens
aatttacagaaagct

SEQ ID NO: 1725627 - DNA, 15 bp, Homo sapiens
atttacagaaagcta

SEQ ID NO: 1725628 - DNA, 15 bp, Homo sapiens
tttacagaaagctac

SEQ ID NO: 1725629 - DNA, 15 bp, Homo sapiens
ttacagaaagctaca

SEQ ID NO: 1725630 - DNA, 15 bp, Homo sapiens
tacagaaagctacag

SEQ ID NO: 1725631 - DNA, 15 bp, Homo sapiens
acagaaagctacaga

SEQ ID NO: 1725632 - DNA, 15 bp, Homo sapiens
cagaaagctacagaa

SEQ ID NO: 1725633 - DNA, 15 bp, Homo sapiens
agaaagctacagaaa

SEQ ID NO: 1725634 - DNA, 15 bp, Homo sapiens
gaaagctacagaaat

SEQ ID NO: 1725635 - DNA, 15 bp, Homo sapiens
aaagctacagaaatc

SEQ ID NO: 1725636 - DNA, 15 bp, Homo sapiens
aagctacagaaatca

SEQ ID NO: 1725637 - DNA, 15 bp, Homo sapiens
agctacagaaatcat

SEQ ID NO: 1725638 - DNA, 15 bp, Homo sapiens
gctacagaaatcata

SEQ ID NO: 1725639 - DNA, 15 bp, Homo sapiens
ctacagaaatcatat

SEQ ID NO: 1725640 - DNA, 15 bp, Homo sapiens
tacagaaatcatatt

SEQ ID NO: 1725641 - DNA, 15 bp, Homo sapiens
acagaaatcatattt

SEQ ID NO: 1725642 - DNA, 15 bp, Homo sapiens
cagaaatcatattta

SEQ ID NO: 1725643 - DNA, 15 bp, Homo sapiens
agaaatcatatttac

SEQ ID NO: 1725644 - DNA, 15 bp, Homo sapiens
gaaatcatatttacc

SEQ ID NO: 1725645 - DNA, 15 bp, Homo sapiens
aaatcatatttacca

SEQ ID NO: 1725646 - DNA, 15 bp, Homo sapiens
aatcatatttaccag

SEQ ID NO: 1725647 - DNA, 15 bp, Homo sapiens
atcatatttaccagg

SEQ ID NO: 1725648 - DNA, 15 bp, Homo sapiens
tcatatttaccagga

SEQ ID NO: 1725649 - DNA, 15 bp, Homo sapiens
catatttaccaggac

SEQ ID NO: 1725650 - DNA, 15 bp, Homo sapiens
atatttaccaggaca

SEQ ID NO: 1725651 - DNA, 15 bp, Homo sapiens
tatttaccaggacac

SEQ ID NO: 1725652 - DNA, 15 bp, Homo sapiens
atttaccaggacaca

SEQ ID NO: 1725653 - DNA, 15 bp, Homo sapiens
tttaccaggacacat

SEQ ID NO: 1725654 - DNA, 15 bp, Homo sapiens
ttaccaggacacatc

SEQ ID NO: 1725655 - DNA, 15 bp, Homo sapiens
taccaggacacatct

SEQ ID NO: 1725656 - DNA, 15 bp, Homo sapiens
accaggacacatctg

SEQ ID NO: 1725657 - DNA, 15 bp, Homo sapiens
ccaggacacatctgt

SEQ ID NO: 1725658 - DNA, 15 bp, Homo sapiens
caggacacatctgtt

SEQ ID NO: 1725659 - DNA, 15 bp, Homo sapiens
aggacacatctgtta

SEQ ID NO: 1725660 - DNA, 15 bp, Homo sapiens
ggacacatctgttaa

SEQ ID NO: 1725661 - DNA, 15 bp, Homo sapiens
gacacatctgttaaa

SEQ ID NO: 1725662 - DNA, 15 bp, Homo sapiens
acacatctgttaaat

SEQ ID NO: 1725663 - DNA, 15 bp, Homo sapiens
cacatctgttaaata

SEQ ID NO: 1725664 - DNA, 15 bp, Homo sapiens
acatctgttaaataa

SEQ ID NO: 1725665 - DNA, 15 bp, Homo sapiens
catctgttaaataaa

SEQ ID NO: 1725666 - DNA, 15 bp, Homo sapiens
atctgttaaataaaa

SEQ ID NO: 1725667 - DNA, 15 bp, Homo sapiens
tctgttaaataaaag

SEQ ID NO: 1725668 - DNA, 15 bp, Homo sapiens
ctgttaaataaaagc

SEQ ID NO: 1725669 - DNA, 15 bp, Homo sapiens
tgttaaataaaagca

SEQ ID NO: 1725670 - DNA, 15 bp, Homo sapiens
gttaaataaaagcat

SEQ ID NO: 1725671 - DNA, 15 bp, Homo sapiens
ttaaataaaagcatt

SEQ ID NO: 1725672 - DNA, 15 bp, Homo sapiens
taaataaaagcattg

SEQ ID NO: 1725673 - DNA, 15 bp, Homo sapiens
aaataaaagcattgt

SEQ ID NO: 1725674 - DNA, 15 bp, Homo sapiens
aataaaagcattgtt

SEQ ID NO: 1725675 - DNA, 15 bp, Homo sapiens
ataaaagcattgttt

SEQ ID NO: 1725676 - DNA, 15 bp, Homo sapiens
taaaagcattgtttc

SEQ ID NO: 1725677 - DNA, 15 bp, Homo sapiens
aaaagcattgtttca

SEQ ID NO: 1725678 - DNA, 15 bp, Homo sapiens
aaagcattgtttcat

SEQ ID NO: 1725679 - DNA, 15 bp, Homo sapiens
aagcattgtttcatg

SEQ ID NO: 1725680 - DNA, 15 bp, Homo sapiens
agcattgtttcatgt

SEQ ID NO: 1725681 - DNA, 15 bp, Homo sapiens
gcattgtttcatgtt

SEQ ID NO: 1725682 - DNA, 15 bp, Homo sapiens
cattgtttcatgttg

SEQ ID NO: 1725683 - DNA, 15 bp, Homo sapiens
attgtttcatgttgg

SEQ ID NO: 1725684 - DNA, 15 bp, Homo sapiens
ttgtttcatgttggt

SEQ ID NO: 1725685 - DNA, 15 bp, Homo sapiens
tgtttcatgttggtg

SEQ ID NO: 1725686 - DNA, 15 bp, Homo sapiens
gtttcatgttggtgt

SEQ ID NO: 1725687 - DNA, 15 bp, Homo sapiens
tttcatgttggtgta

SEQ ID NO: 1725688 - DNA, 15 bp, Homo sapiens
ttcatgttggtgtac

SEQ ID NO: 1725689 - DNA, 15 bp, Homo sapiens
tcatgttggtgtacg

SEQ ID NO: 1725690 - DNA, 15 bp, Homo sapiens
catgttggtgtacgt

SEQ ID NO: 1725691 - DNA, 15 bp, Homo sapiens
atgttggtgtacgtc

SEQ ID NO: 1725692 - DNA, 15 bp, Homo sapiens
tgttggtgtacgtct

SEQ ID NO: 1725693 - DNA, 15 bp, Homo sapiens
gttggtgtacgtcta

SEQ ID NO: 1725694 - DNA, 15 bp, Homo sapiens
ttggtgtacgtctat

SEQ ID NO: 1725695 - DNA, 15 bp, Homo sapiens
tggtgtacgtctata

SEQ ID NO: 1725696 - DNA, 15 bp, Homo sapiens
ggtgtacgtctatac

SEQ ID NO: 1725697 - DNA, 15 bp, Homo sapiens
gtgtacgtctataca

SEQ ID NO: 1725698 - DNA, 15 bp, Homo sapiens
tgtacgtctatacag

SEQ ID NO: 1725699 - DNA, 15 bp, Homo sapiens
gtacgtctatacagg

SEQ ID NO: 1725700 - DNA, 15 bp, Homo sapiens
tacgtctatacaggg

SEQ ID NO: 1725701 - DNA, 15 bp, Homo sapiens
acgtctatacagggc

SEQ ID NO: 1725702 - DNA, 15 bp, Homo sapiens
cgtctatacagggct

SEQ ID NO: 1725703 - DNA, 15 bp, Homo sapiens
gtctatacagggcta

SEQ ID NO: 1725704 - DNA, 15 bp, Homo sapiens
tctatacagggctat

SEQ ID NO: 1725705 - DNA, 15 bp, Homo sapiens
ctatacagggctatg

SEQ ID NO: 1725706 - DNA, 15 bp, Homo sapiens
tatacagggctatgt

SEQ ID NO: 1725707 - DNA, 15 bp, Homo sapiens
atacagggctatgta

SEQ ID NO: 1725708 - DNA, 15 bp, Homo sapiens
tacagggctatgtat

SEQ ID NO: 1725709 - DNA, 15 bp, Homo sapiens
acagggctatgtata

SEQ ID NO: 1725710 - DNA, 15 bp, Homo sapiens
cagggctatgtataa

SEQ ID NO: 1725711 - DNA, 15 bp, Homo sapiens
agggctatgtataac

SEQ ID NO: 1725712 - DNA, 15 bp, Homo sapiens
gggctatgtataacc

SEQ ID NO: 1725713 - DNA, 15 bp, Homo sapiens
ggctatgtataaccg

SEQ ID NO: 1725714 - DNA, 15 bp, Homo sapiens
gctatgtataaccga

SEQ ID NO: 1725715 - DNA, 15 bp, Homo sapiens
ctatgtataaccgac

SEQ ID NO: 1725716 - DNA, 15 bp, Homo sapiens
tatgtataaccgact

SEQ ID NO: 1725717 - DNA, 15 bp, Homo sapiens
atgtataaccgactc

SEQ ID NO: 1725718 - DNA, 15 bp, Homo sapiens
tgtataaccgactcc

SEQ ID NO: 1725719 - DNA, 15 bp, Homo sapiens
gtataaccgactcct

SEQ ID NO: 1725720 - DNA, 15 bp, Homo sapiens
tataaccgactcctg

SEQ ID NO: 1725721 - DNA, 15 bp, Homo sapiens
ataaccgactcctgt

SEQ ID NO: 1725722 - DNA, 15 bp, Homo sapiens
taaccgactcctgtt

SEQ ID NO: 1725723 - DNA, 15 bp, Homo sapiens
aaccgactcctgttt

SEQ ID NO: 1725724 - DNA, 15 bp, Homo sapiens
accgactcctgtttc

SEQ ID NO: 1725725 - DNA, 15 bp, Homo sapiens
ccgactcctgtttct

SEQ ID NO: 1725726 - DNA, 15 bp, Homo sapiens
cgactcctgtttctc

SEQ ID NO: 1725727 - DNA, 15 bp, Homo sapiens
gactcctgtttctcc

SEQ ID NO: 1725728 - DNA, 15 bp, Homo sapiens
actcctgtttctcct

SEQ ID NO: 1725729 - DNA, 15 bp, Homo sapiens
ctcctgtttctcctc

SEQ ID NO: 1725730 - DNA, 15 bp, Homo sapiens
tcctgtttctcctcc

SEQ ID NO: 1725731 - DNA, 15 bp, Homo sapiens
cctgtttctcctccc

SEQ ID NO: 1725732 - DNA, 15 bp, Homo sapiens
ctgtttctcctccct

SEQ ID NO: 1725733 - DNA, 15 bp, Homo sapiens
tgtttctcctccctg

SEQ ID NO: 1725734 - DNA, 15 bp, Homo sapiens
gtttctcctccctgc

SEQ ID NO: 1725735 - DNA, 15 bp, Homo sapiens
tttctcctccctgca

SEQ ID NO: 1725736 - DNA, 15 bp, Homo sapiens
ttctcctccctgcaa

SEQ ID NO: 1725737 - DNA, 15 bp, Homo sapiens
tctcctccctgcaac

SEQ ID NO: 1725738 - DNA, 15 bp, Homo sapiens
ctcctccctgcaacc

SEQ ID NO: 1725739 - DNA, 15 bp, Homo sapiens
tcctccctgcaacca

SEQ ID NO: 1725740 - DNA, 15 bp, Homo sapiens
cctccctgcaaccac

SEQ ID NO: 1725741 - DNA, 15 bp, Homo sapiens
ctccctgcaaccaca

SEQ ID NO: 1725742 - DNA, 15 bp, Homo sapiens
tccctgcaaccacag

SEQ ID NO: 1725743 - DNA, 15 bp, Homo sapiens
ccctgcaaccacaga

SEQ ID NO: 1725744 - DNA, 15 bp, Homo sapiens
cctgcaaccacagaa

SEQ ID NO: 1725745 - DNA, 15 bp, Homo sapiens
ctgcaaccacagaac

SEQ ID NO: 1725746 - DNA, 15 bp, Homo sapiens
tgcaaccacagaacc

SEQ ID NO: 1725747 - DNA, 15 bp, Homo sapiens
gcaaccacagaacca

SEQ ID NO: 1725748 - DNA, 15 bp, Homo sapiens
caaccacagaaccat

SEQ ID NO: 1725749 - DNA, 15 bp, Homo sapiens
aaccacagaaccatc

SEQ ID NO: 1725750 - DNA, 15 bp, Homo sapiens
accacagaaccatca

SEQ ID NO: 1725751 - DNA, 15 bp, Homo sapiens
ccacagaaccatcac

SEQ ID NO: 1725752 - DNA, 15 bp, Homo sapiens
cacagaaccatcaca

SEQ ID NO: 1725753 - DNA, 15 bp, Homo sapiens
acagaaccatcacac

SEQ ID NO: 1725754 - DNA, 15 bp, Homo sapiens
cagaaccatcacaca

SEQ ID NO: 1725755 - DNA, 15 bp, Homo sapiens
agaaccatcacacac

SEQ ID NO: 1725756 - DNA, 15 bp, Homo sapiens
gaaccatcacacaca

SEQ ID NO: 1725757 - DNA, 15 bp, Homo sapiens
aaccatcacacacac

SEQ ID NO: 1725758 - DNA, 15 bp, Homo sapiens
accatcacacacaca

SEQ ID NO: 1725759 - DNA, 15 bp, Homo sapiens
atcacacacacacac

SEQ ID NO: 1725760 - DNA, 15 bp, Homo sapiens
acacacacacacgga

SEQ ID NO: 1725761 - DNA, 15 bp, Homo sapiens
cacacacacacggat

SEQ ID NO: 1725762 - DNA, 15 bp, Homo sapiens
acacacacacggata

SEQ ID NO: 1725763 - DNA, 15 bp, Homo sapiens
cacacacacggatac

SEQ ID NO: 1725764 - DNA, 15 bp, Homo sapiens
acacacacggataca

SEQ ID NO: 1725765 - DNA, 15 bp, Homo sapiens
cacacacggatacac

SEQ ID NO: 1725766 - DNA, 15 bp, Homo sapiens
acacacggatacacg

SEQ ID NO: 1725767 - DNA, 15 bp, Homo sapiens
cacacggatacacgc

SEQ ID NO: 1725768 - DNA, 15 bp, Homo sapiens
acacggatacacgca

SEQ ID NO: 1725769 - DNA, 15 bp, Homo sapiens
cacggatacacgcac

SEQ ID NO: 1725770 - DNA, 15 bp, Homo sapiens
acggatacacgcaca

SEQ ID NO: 1725771 - DNA, 15 bp, Homo sapiens
cggatacacgcacag

SEQ ID NO: 1725772 - DNA, 15 bp, Homo sapiens
ggatacacgcacaga

SEQ ID NO: 1725773 - DNA, 15 bp, Homo sapiens
gatacacgcacagat

SEQ ID NO: 1725774 - DNA, 15 bp, Homo sapiens
atacacgcacagata

SEQ ID NO: 1725775 - DNA, 15 bp, Homo sapiens
tacacgcacagatac

SEQ ID NO: 1725776 - DNA, 15 bp, Homo sapiens
acacgcacagatacg

SEQ ID NO: 1725777 - DNA, 15 bp, Homo sapiens
cacgcacagatacgc

SEQ ID NO: 1725778 - DNA, 15 bp, Homo sapiens
acgcacagatacgct

SEQ ID NO: 1725779 - DNA, 15 bp, Homo sapiens
cgcacagatacgctc

SEQ ID NO: 1725780 - DNA, 15 bp, Homo sapiens
gcacagatacgctcc

SEQ ID NO: 1725781 - DNA, 15 bp, Homo sapiens
cacagatacgctcct

SEQ ID NO: 1725782 - DNA, 15 bp, Homo sapiens
acagatacgctcctt

SEQ ID NO: 1725783 - DNA, 15 bp, Homo sapiens
cagatacgctccttt

SEQ ID NO: 1725784 - DNA, 15 bp, Homo sapiens
agatacgctcctttc

SEQ ID NO: 1725785 - DNA, 15 bp, Homo sapiens
gatacgctcctttcc

SEQ ID NO: 1725786 - DNA, 15 bp, Homo sapiens
atacgctcctttcca

SEQ ID NO: 1725787 - DNA, 15 bp, Homo sapiens
tacgctcctttccac

SEQ ID NO: 1725788 - DNA, 15 bp, Homo sapiens
acgctcctttccaca

SEQ ID NO: 1725789 - DNA, 15 bp, Homo sapiens
cgctcctttccacaa

SEQ ID NO: 1725790 - DNA, 15 bp, Homo sapiens
gctcctttccacaaa

SEQ ID NO: 1725791 - DNA, 15 bp, Homo sapiens
ctcctttccacaaat

SEQ ID NO: 1725792 - DNA, 15 bp, Homo sapiens
tcctttccacaaatg

SEQ ID NO: 1725793 - DNA, 15 bp, Homo sapiens
cctttccacaaatgc

SEQ ID NO: 1725794 - DNA, 15 bp, Homo sapiens
ctttccacaaatgca

SEQ ID NO: 1725795 - DNA, 15 bp, Homo sapiens
tttccacaaatgcac

SEQ ID NO: 1725796 - DNA, 15 bp, Homo sapiens
ttccacaaatgcacg

SEQ ID NO: 1725797 - DNA, 15 bp, Homo sapiens
tccacaaatgcacgc

SEQ ID NO: 1725798 - DNA, 15 bp, Homo sapiens
ccacaaatgcacgca

SEQ ID NO: 1725799 - DNA, 15 bp, Homo sapiens
cacaaatgcacgcaa

SEQ ID NO: 1725800 - DNA, 15 bp, Homo sapiens
acaaatgcacgcaaa

SEQ ID NO: 1725801 - DNA, 15 bp, Homo sapiens
caaatgcacgcaaac

SEQ ID NO: 1725802 - DNA, 15 bp, Homo sapiens
aaatgcacgcaaacc

SEQ ID NO: 1725803 - DNA, 15 bp, Homo sapiens
aatgcacgcaaaccg

SEQ ID NO: 1725804 - DNA, 15 bp, Homo sapiens
atgcacgcaaaccgg

SEQ ID NO: 1725805 - DNA, 15 bp, Homo sapiens
tgcacgcaaaccggg

SEQ ID NO: 1725806 - DNA, 15 bp, Homo sapiens
gcacgcaaaccggga

SEQ ID NO: 1725807 - DNA, 15 bp, Homo sapiens
cacgcaaaccgggac

SEQ ID NO: 1725808 - DNA, 15 bp, Homo sapiens
acgcaaaccgggacg

SEQ ID NO: 1725809 - DNA, 15 bp, Homo sapiens
cgcaaaccgggacgc

SEQ ID NO: 1725810 - DNA, 15 bp, Homo sapiens
gcaaaccgggacgca

SEQ ID NO: 1725811 - DNA, 15 bp, Homo sapiens
caaaccgggacgcaa

SEQ ID NO: 1725812 - DNA, 15 bp, Homo sapiens
aaaccgggacgcaaa

SEQ ID NO: 1725813 - DNA, 15 bp, Homo sapiens
aaccgggacgcaaac

SEQ ID NO: 1725814 - DNA, 15 bp, Homo sapiens
accgggacgcaaacc

SEQ ID NO: 1725815 - DNA, 15 bp, Homo sapiens
ccgggacgcaaaccc

SEQ ID NO: 1725816 - DNA, 15 bp, Homo sapiens
cgggacgcaaaccca

SEQ ID NO: 1725817 - DNA, 15 bp, Homo sapiens
gggacgcaaacccac

SEQ ID NO: 1725818 - DNA, 15 bp, Homo sapiens
ggacgcaaacccaca

SEQ ID NO: 1725819 - DNA, 15 bp, Homo sapiens
gacgcaaacccacaa

SEQ ID NO: 1725820 - DNA, 15 bp, Homo sapiens
acgcaaacccacaac

SEQ ID NO: 1725821 - DNA, 15 bp, Homo sapiens
cgcaaacccacaact

SEQ ID NO: 1725822 - DNA, 15 bp, Homo sapiens
gcaaacccacaactc

SEQ ID NO: 1725823 - DNA, 15 bp, Homo sapiens
caaacccacaactcg

SEQ ID NO: 1725824 - DNA, 15 bp, Homo sapiens
aaacccacaactcga

SEQ ID NO: 1725825 - DNA, 15 bp, Homo sapiens
aacccacaactcgag

SEQ ID NO: 1725826 - DNA, 15 bp, Homo sapiens
acccacaactcgagg

SEQ ID NO: 1725827 - DNA, 15 bp, Homo sapiens
cccacaactcgaggg

SEQ ID NO: 1725828 - DNA, 15 bp, Homo sapiens
ccacaactcgagggc

SEQ ID NO: 1725829 - DNA, 15 bp, Homo sapiens
cacaactcgagggct

SEQ ID NO: 1725830 - DNA, 15 bp, Homo sapiens
acaactcgagggctt

SEQ ID NO: 1725831 - DNA, 15 bp, Homo sapiens
caactcgagggctta

SEQ ID NO: 1725832 - DNA, 15 bp, Homo sapiens
aactcgagggcttag

SEQ ID NO: 1725833 - DNA, 15 bp, Homo sapiens
actcgagggcttaga

SEQ ID NO: 1725834 - DNA, 15 bp, Homo sapiens
ctcgagggcttagac

SEQ ID NO: 1725835 - DNA, 15 bp, Homo sapiens
tcgagggcttagacc

SEQ ID NO: 1725836 - DNA, 15 bp, Homo sapiens
cgagggcttagacct

SEQ ID NO: 1725837 - DNA, 15 bp, Homo sapiens
gagggcttagacctt

SEQ ID NO: 1725838 - DNA, 15 bp, Homo sapiens
agggcttagaccttc

SEQ ID NO: 1725839 - DNA, 15 bp, Homo sapiens
gggcttagaccttca

SEQ ID NO: 1725840 - DNA, 15 bp, Homo sapiens
ggcttagaccttcac

SEQ ID NO: 1725841 - DNA, 15 bp, Homo sapiens
gcttagaccttcact

SEQ ID NO: 1725842 - DNA, 15 bp, Homo sapiens
cttagaccttcactg

SEQ ID NO: 1725843 - DNA, 15 bp, Homo sapiens
ttagaccttcactgc

SEQ ID NO: 1725844 - DNA, 15 bp, Homo sapiens
tagaccttcactgct

SEQ ID NO: 1725845 - DNA, 15 bp, Homo sapiens
agaccttcactgctg

SEQ ID NO: 1725846 - DNA, 15 bp, Homo sapiens
gaccttcactgctga

SEQ ID NO: 1725847 - DNA, 15 bp, Homo sapiens
accttcactgctgag

SEQ ID NO: 1725848 - DNA, 15 bp, Homo sapiens
ccttcactgctgagc

SEQ ID NO: 1725849 - DNA, 15 bp, Homo sapiens
cttcactgctgagct

SEQ ID NO: 1725850 - DNA, 15 bp, Homo sapiens
ttcactgctgagctg

SEQ ID NO: 1725851 - DNA, 15 bp, Homo sapiens
tcactgctgagctgc

SEQ ID NO: 1725852 - DNA, 15 bp, Homo sapiens
cactgctgagctgcc

SEQ ID NO: 1725853 - DNA, 15 bp, Homo sapiens
actgctgagctgccg

SEQ ID NO: 1725854 - DNA, 15 bp, Homo sapiens
ctgctgagctgccgc

SEQ ID NO: 1725855 - DNA, 15 bp, Homo sapiens
tgctgagctgccgcc

SEQ ID NO: 1725856 - DNA, 15 bp, Homo sapiens
gctgagctgccgcca

SEQ ID NO: 1725857 - DNA, 15 bp, Homo sapiens
ctgagctgccgccac

SEQ ID NO: 1725858 - DNA, 15 bp, Homo sapiens
tgagctgccgccact

SEQ ID NO: 1725859 - DNA, 15 bp, Homo sapiens
gagctgccgccactg

SEQ ID NO: 1725860 - DNA, 15 bp, Homo sapiens
agctgccgccactgt

SEQ ID NO: 1725861 - DNA, 15 bp, Homo sapiens
gctgccgccactgtc

SEQ ID NO: 1725862 - DNA, 15 bp, Homo sapiens
ctgccgccactgtcc

SEQ ID NO: 1725863 - DNA, 15 bp, Homo sapiens
tgccgccactgtcct

SEQ ID NO: 1725864 - DNA, 15 bp, Homo sapiens
gccgccactgtcctc

SEQ ID NO: 1725865 - DNA, 15 bp, Homo sapiens
ccgccactgtcctcc

SEQ ID NO: 1725866 - DNA, 15 bp, Homo sapiens
cgccactgtcctccg

SEQ ID NO: 1725867 - DNA, 15 bp, Homo sapiens
gccactgtcctccgt

SEQ ID NO: 1725868 - DNA, 15 bp, Homo sapiens
ccactgtcctccgtg

SEQ ID NO: 1725869 - DNA, 15 bp, Homo sapiens
cactgtcctccgtgc

SEQ ID NO: 1725870 - DNA, 15 bp, Homo sapiens
actgtcctccgtgcg

SEQ ID NO: 1725871 - DNA, 15 bp, Homo sapiens
ctgtcctccgtgcgc

SEQ ID NO: 1725872 - DNA, 15 bp, Homo sapiens
tgtcctccgtgcgcg

SEQ ID NO: 1725873 - DNA, 15 bp, Homo sapiens
gtcctccgtgcgcgg

SEQ ID NO: 1725874 - DNA, 15 bp, Homo sapiens
tcctccgtgcgcgga

SEQ ID NO: 1725875 - DNA, 15 bp, Homo sapiens
cctccgtgcgcggag

SEQ ID NO: 1725876 - DNA, 15 bp, Homo sapiens
ctccgtgcgcggagt

SEQ ID NO: 1725877 - DNA, 15 bp, Homo sapiens
tccgtgcgcggagtg

SEQ ID NO: 1725878 - DNA, 15 bp, Homo sapiens
ccgtgcgcggagtgt

SEQ ID NO: 1725879 - DNA, 15 bp, Homo sapiens
cgtgcgcggagtgtc

SEQ ID NO: 1725880 - DNA, 15 bp, Homo sapiens
gtgcgcggagtgtcg

SEQ ID NO: 1725881 - DNA, 15 bp, Homo sapiens
tgcgcggagtgtcgc

SEQ ID NO: 1725882 - DNA, 15 bp, Homo sapiens
gcgcggagtgtcgct

SEQ ID NO: 1725883 - DNA, 15 bp, Homo sapiens
cgcggagtgtcgctg

SEQ ID NO: 1725884 - DNA, 15 bp, Homo sapiens
gcggagtgtcgctga

SEQ ID NO: 1725885 - DNA, 15 bp, Homo sapiens
cggagtgtcgctgaa

SEQ ID NO: 1725886 - DNA, 15 bp, Homo sapiens
ggagtgtcgctgaag

SEQ ID NO: 1725887 - DNA, 15 bp, Homo sapiens
gagtgtcgctgaagt

SEQ ID NO: 1725888 - DNA, 15 bp, Homo sapiens
agtgtcgctgaagtc

SEQ ID NO: 1725889 - DNA, 15 bp, Homo sapiens
gtgtcgctgaagtca

SEQ ID NO: 1725890 - DNA, 15 bp, Homo sapiens
tgtcgctgaagtcac

SEQ ID NO: 1725891 - DNA, 15 bp, Homo sapiens
gtcgctgaagtcact

SEQ ID NO: 1725892 - DNA, 15 bp, Homo sapiens
tcgctgaagtcactg

SEQ ID NO: 1725893 - DNA, 15 bp, Homo sapiens
cgctgaagtcactgg

SEQ ID NO: 1725894 - DNA, 15 bp, Homo sapiens
gctgaagtcactggc

SEQ ID NO: 1725895 - DNA, 15 bp, Homo sapiens
ctgaagtcactggcg

SEQ ID NO: 1725896 - DNA, 15 bp, Homo sapiens
tgaagtcactggcgt

SEQ ID NO: 1725897 - DNA, 15 bp, Homo sapiens
gaagtcactggcgtc

SEQ ID NO: 1725898 - DNA, 15 bp, Homo sapiens
aagtcactggcgtca

SEQ ID NO: 1725899 - DNA, 15 bp, Homo sapiens
agtcactggcgtcac

SEQ ID NO: 1725900 - DNA, 15 bp, Homo sapiens
gtcactggcgtcact

SEQ ID NO: 1725901 - DNA, 15 bp, Homo sapiens
tcactggcgtcacta

SEQ ID NO: 1725902 - DNA, 15 bp, Homo sapiens
cactggcgtcactaa

SEQ ID NO: 1725903 - DNA, 15 bp, Homo sapiens
actggcgtcactaac

SEQ ID NO: 1725904 - DNA, 15 bp, Homo sapiens
ctggcgtcactaacc

SEQ ID NO: 1725905 - DNA, 15 bp, Homo sapiens
tggcgtcactaacca

SEQ ID NO: 1725906 - DNA, 15 bp, Homo sapiens
ggcgtcactaaccaa

SEQ ID NO: 1725907 - DNA, 15 bp, Homo sapiens
gcgtcactaaccaag

SEQ ID NO: 1725908 - DNA, 15 bp, Homo sapiens
cgtcactaaccaagg

SEQ ID NO: 1725909 - DNA, 15 bp, Homo sapiens
gtcactaaccaaggc

SEQ ID NO: 1725910 - DNA, 15 bp, Homo sapiens
tcactaaccaaggcg

SEQ ID NO: 1725911 - DNA, 15 bp, Homo sapiens
cactaaccaaggcgt

SEQ ID NO: 1725912 - DNA, 15 bp, Homo sapiens
actaaccaaggcgtg

SEQ ID NO: 1725913 - DNA, 15 bp, Homo sapiens
ctaaccaaggcgtgc

SEQ ID NO: 1725914 - DNA, 15 bp, Homo sapiens
taaccaaggcgtgcc

SEQ ID NO: 1725915 - DNA, 15 bp, Homo sapiens
aaccaaggcgtgccc

SEQ ID NO: 1725916 - DNA, 15 bp, Homo sapiens
accaaggcgtgcccg

SEQ ID NO: 1725917 - DNA, 15 bp, Homo sapiens
ccaaggcgtgcccgc

SEQ ID NO: 1725918 - DNA, 15 bp, Homo sapiens
caaggcgtgcccgcc

SEQ ID NO: 1725919 - DNA, 15 bp, Homo sapiens
aaggcgtgcccgccc

SEQ ID NO: 1725920 - DNA, 15 bp, Homo sapiens
aggcgtgcccgccca

SEQ ID NO: 1725921 - DNA, 15 bp, Homo sapiens
ggcgtgcccgcccaa

SEQ ID NO: 1725922 - DNA, 15 bp, Homo sapiens
gcgtgcccgcccaag

SEQ ID NO: 1725923 - DNA, 15 bp, Homo sapiens
cgtgcccgcccaagg

SEQ ID NO: 1725924 - DNA, 15 bp, Homo sapiens
gtgcccgcccaaggt

SEQ ID NO: 1725925 - DNA, 15 bp, Homo sapiens
tgcccgcccaaggtg

SEQ ID NO: 1725926 - DNA, 15 bp, Homo sapiens
gcccgcccaaggtgc

SEQ ID NO: 1725927 - DNA, 15 bp, Homo sapiens
cccgcccaaggtgcc

SEQ ID NO: 1725928 - DNA, 15 bp, Homo sapiens
ccgcccaaggtgccc

SEQ ID NO: 1725929 - DNA, 15 bp, Homo sapiens
cgcccaaggtgccct

SEQ ID NO: 1725930 - DNA, 15 bp, Homo sapiens
gcccaaggtgccctg

SEQ ID NO: 1725931 - DNA, 15 bp, Homo sapiens
cccaaggtgccctgg

SEQ ID NO: 1725932 - DNA, 15 bp, Homo sapiens
ccaaggtgccctggt

SEQ ID NO: 1725933 - DNA, 15 bp, Homo sapiens
caaggtgccctggtc

SEQ ID NO: 1725934 - DNA, 15 bp, Homo sapiens
aaggtgccctggtcc

SEQ ID NO: 1725935 - DNA, 15 bp, Homo sapiens
aggtgccctggtcct

SEQ ID NO: 1725936 - DNA, 15 bp, Homo sapiens
ggtgccctggtcctg

SEQ ID NO: 1725937 - DNA, 15 bp, Homo sapiens
gtgccctggtcctgg

SEQ ID NO: 1725938 - DNA, 15 bp, Homo sapiens
tgccctggtcctggt

SEQ ID NO: 1725939 - DNA, 15 bp, Homo sapiens
gccctggtcctggtc

SEQ ID NO: 1725940 - DNA, 15 bp, Homo sapiens
ccctggtcctggtcg

SEQ ID NO: 1725941 - DNA, 15 bp, Homo sapiens
cctggtcctggtcgt

SEQ ID NO: 1725942 - DNA, 15 bp, Homo sapiens
ctggtcctggtcgtc

SEQ ID NO: 1725943 - DNA, 15 bp, Homo sapiens
tggtcctggtcgtcc

SEQ ID NO: 1725944 - DNA, 15 bp, Homo sapiens
ggtcctggtcgtccc

SEQ ID NO: 1725945 - DNA, 15 bp, Homo sapiens
gtcctggtcgtccct

SEQ ID NO: 1725946 - DNA, 15 bp, Homo sapiens
tcctggtcgtcccta

SEQ ID NO: 1725947 - DNA, 15 bp, Homo sapiens
cctggtcgtccctat

SEQ ID NO: 1725948 - DNA, 15 bp, Homo sapiens
ctggtcgtccctatc

SEQ ID NO: 1725949 - DNA, 15 bp, Homo sapiens
tggtcgtccctatcg

SEQ ID NO: 1725950 - DNA, 15 bp, Homo sapiens
ggtcgtccctatcga

SEQ ID NO: 1725951 - DNA, 15 bp, Homo sapiens
gtcgtccctatcgat

SEQ ID NO: 1725952 - DNA, 15 bp, Homo sapiens
tcgtccctatcgatg

SEQ ID NO: 1725953 - DNA, 15 bp, Homo sapiens
cgtccctatcgatga

SEQ ID NO: 1725954 - DNA, 15 bp, Homo sapiens
gtccctatcgatgac

SEQ ID NO: 1725955 - DNA, 15 bp, Homo sapiens
tccctatcgatgacc

SEQ ID NO: 1725956 - DNA, 15 bp, Homo sapiens
ccctatcgatgaccc

SEQ ID NO: 1725957 - DNA, 15 bp, Homo sapiens
cctatcgatgaccct

SEQ ID NO: 1725958 - DNA, 15 bp, Homo sapiens
ctatcgatgaccctt

SEQ ID NO: 1725959 - DNA, 15 bp, Homo sapiens
tatcgatgacccttc

SEQ ID NO: 1725960 - DNA, 15 bp, Homo sapiens
atcgatgacccttcg

SEQ ID NO: 1725961 - DNA, 15 bp, Homo sapiens
tcgatgacccttcgt

SEQ ID NO: 1725962 - DNA, 15 bp, Homo sapiens
cgatgacccttcgtc

SEQ ID NO: 1725963 - DNA, 15 bp, Homo sapiens
gatgacccttcgtca

SEQ ID NO: 1725964 - DNA, 15 bp, Homo sapiens
atgacccttcgtcaa

SEQ ID NO: 1725965 - DNA, 15 bp, Homo sapiens
tgacccttcgtcaat

SEQ ID NO: 1725966 - DNA, 15 bp, Homo sapiens
gacccttcgtcaata

SEQ ID NO: 1725967 - DNA, 15 bp, Homo sapiens
acccttcgtcaatac

SEQ ID NO: 1725968 - DNA, 15 bp, Homo sapiens
cccttcgtcaatacc

SEQ ID NO: 1725969 - DNA, 15 bp, Homo sapiens
ccttcgtcaatacct

SEQ ID NO: 1725970 - DNA, 15 bp, Homo sapiens
cttcgtcaatacctc

SEQ ID NO: 1725971 - DNA, 15 bp, Homo sapiens
ttcgtcaatacctca

SEQ ID NO: 1725972 - DNA, 15 bp, Homo sapiens
tcgtcaatacctcag

SEQ ID NO: 1725973 - DNA, 15 bp, Homo sapiens
cgtcaatacctcagg

SEQ ID NO: 1725974 - DNA, 15 bp, Homo sapiens
gtcaatacctcaggt

SEQ ID NO: 1725975 - DNA, 15 bp, Homo sapiens
tcaatacctcaggtc

SEQ ID NO: 1725976 - DNA, 15 bp, Homo sapiens
caatacctcaggtct

SEQ ID NO: 1725977 - DNA, 15 bp, Homo sapiens
aatacctcaggtcta

SEQ ID NO: 1725978 - DNA, 15 bp, Homo sapiens
atacctcaggtctaa

SEQ ID NO: 1725979 - DNA, 15 bp, Homo sapiens
tacctcaggtctaaa

SEQ ID NO: 1725980 - DNA, 15 bp, Homo sapiens
acctcaggtctaaaa

SEQ ID NO: 1725981 - DNA, 15 bp, Homo sapiens
cctcaggtctaaaat

SEQ ID NO: 1725982 - DNA, 15 bp, Homo sapiens
ctcaggtctaaaatg

SEQ ID NO: 1725983 - DNA, 15 bp, Homo sapiens
tcaggtctaaaatgc

SEQ ID NO: 1725984 - DNA, 15 bp, Homo sapiens
caggtctaaaatgct

SEQ ID NO: 1725985 - DNA, 15 bp, Homo sapiens
aggtctaaaatgctt

SEQ ID NO: 1725986 - DNA, 15 bp, Homo sapiens
ggtctaaaatgcttt

SEQ ID NO: 1725987 - DNA, 15 bp, Homo sapiens
gtctaaaatgctttc

SEQ ID NO: 1725988 - DNA, 15 bp, Homo sapiens
tctaaaatgctttcc

SEQ ID NO: 1725989 - DNA, 15 bp, Homo sapiens
ctaaaatgctttcct

SEQ ID NO: 1725990 - DNA, 15 bp, Homo sapiens
taaaatgctttcctc

SEQ ID NO: 1725991 - DNA, 15 bp, Homo sapiens
aaaatgctttcctcc

SEQ ID NO: 1725992 - DNA, 15 bp, Homo sapiens
aaatgctttcctccg

SEQ ID NO: 1725993 - DNA, 15 bp, Homo sapiens
aatgctttcctccga

SEQ ID NO: 1725994 - DNA, 15 bp, Homo sapiens
atgctttcctccgag

SEQ ID NO: 1725995 - DNA, 15 bp, Homo sapiens
tgctttcctccgagc

SEQ ID NO: 1725996 - DNA, 15 bp, Homo sapiens
gctttcctccgagcc

SEQ ID NO: 1725997 - DNA, 15 bp, Homo sapiens
ctttcctccgagccc

SEQ ID NO: 1725998 - DNA, 15 bp, Homo sapiens
tttcctccgagcccg

SEQ ID NO: 1725999 - DNA, 15 bp, Homo sapiens
ttcctccgagcccga

SEQ ID NO: 1726000 - DNA, 15 bp, Homo sapiens
tcctccgagcccgag

SEQ ID NO: 1726001 - DNA, 15 bp, Homo sapiens
cctccgagcccgagt

SEQ ID NO: 1726002 - DNA, 15 bp, Homo sapiens
ctccgagcccgagtt

SEQ ID NO: 1726003 - DNA, 15 bp, Homo sapiens
tccgagcccgagttc

SEQ ID NO: 1726004 - DNA, 15 bp, Homo sapiens
ccgagcccgagttcc

SEQ ID NO: 1726005 - DNA, 15 bp, Homo sapiens
cgagcccgagttcct

SEQ ID NO: 1726006 - DNA, 15 bp, Homo sapiens
gagcccgagttcctc

SEQ ID NO: 1726007 - DNA, 15 bp, Homo sapiens
agcccgagttcctcc

SEQ ID NO: 1726008 - DNA, 15 bp, Homo sapiens
gcccgagttcctcct

SEQ ID NO: 1726009 - DNA, 15 bp, Homo sapiens
cccgagttcctcctg

SEQ ID NO: 1726010 - DNA, 15 bp, Homo sapiens
ccgagttcctcctgt

SEQ ID NO: 1726011 - DNA, 15 bp, Homo sapiens
cgagttcctcctgtc

SEQ ID NO: 1726012 - DNA, 15 bp, Homo sapiens
gagttcctcctgtcg

SEQ ID NO: 1726013 - DNA, 15 bp, Homo sapiens
agttcctcctgtcgg

SEQ ID NO: 1726014 - DNA, 15 bp, Homo sapiens
gttcctcctgtcggg

SEQ ID NO: 1726015 - DNA, 15 bp, Homo sapiens
ttcctcctgtcgggc

SEQ ID NO: 1726016 - DNA, 15 bp, Homo sapiens
tcctcctgtcgggca

SEQ ID NO: 1726017 - DNA, 15 bp, Homo sapiens
cctcctgtcgggcaa

SEQ ID NO: 1726018 - DNA, 15 bp, Homo sapiens
ctcctgtcgggcaaa

SEQ ID NO: 1726019 - DNA, 15 bp, Homo sapiens
tcctgtcgggcaaac

SEQ ID NO: 1726020 - DNA, 15 bp, Homo sapiens
cctgtcgggcaaact

SEQ ID NO: 1726021 - DNA, 15 bp, Homo sapiens
ctgtcgggcaaactc

SEQ ID NO: 1726022 - DNA, 15 bp, Homo sapiens
tgtcgggcaaactcc

SEQ ID NO: 1726023 - DNA, 15 bp, Homo sapiens
gtcgggcaaactccg

SEQ ID NO: 1726024 - DNA, 15 bp, Homo sapiens
tcgggcaaactccgc

SEQ ID NO: 1726025 - DNA, 15 bp, Homo sapiens
cgggcaaactccgcc

SEQ ID NO: 1726026 - DNA, 15 bp, Homo sapiens
gggcaaactccgccc

SEQ ID NO: 1726027 - DNA, 15 bp, Homo sapiens
ggcaaactccgccct

SEQ ID NO: 1726028 - DNA, 15 bp, Homo sapiens
gcaaactccgccctg

SEQ ID NO: 1726029 - DNA, 15 bp, Homo sapiens
caaactccgccctgt

SEQ ID NO: 1726030 - DNA, 15 bp, Homo sapiens
aaactccgccctgtc

SEQ ID NO: 1726031 - DNA, 15 bp, Homo sapiens
aactccgccctgtct

SEQ ID NO: 1726032 - DNA, 15 bp, Homo sapiens
actccgccctgtctg

SEQ ID NO: 1726033 - DNA, 15 bp, Homo sapiens
ctccgccctgtctgt

SEQ ID NO: 1726034 - DNA, 15 bp, Homo sapiens
tccgccctgtctgtg

SEQ ID NO: 1726035 - DNA, 15 bp, Homo sapiens
ccgccctgtctgtgc

SEQ ID NO: 1726036 - DNA, 15 bp, Homo sapiens
cgccctgtctgtgcc

SEQ ID NO: 1726037 - DNA, 15 bp, Homo sapiens
gccctgtctgtgcct

SEQ ID NO: 1726038 - DNA, 15 bp, Homo sapiens
ccctgtctgtgcctt

SEQ ID NO: 1726039 - DNA, 15 bp, Homo sapiens
cctgtctgtgccttg

SEQ ID NO: 1726040 - DNA, 15 bp, Homo sapiens
ctgtctgtgccttgc

SEQ ID NO: 1726041 - DNA, 15 bp, Homo sapiens
tgtctgtgccttgct

SEQ ID NO: 1726042 - DNA, 15 bp, Homo sapiens
gtctgtgccttgctg

SEQ ID NO: 1726043 - DNA, 15 bp, Homo sapiens
tctgtgccttgctgc

SEQ ID NO: 1726044 - DNA, 15 bp, Homo sapiens
ctgtgccttgctgct

SEQ ID NO: 1726045 - DNA, 15 bp, Homo sapiens
tgtgccttgctgctt

SEQ ID NO: 1726046 - DNA, 15 bp, Homo sapiens
gtgccttgctgcttg

SEQ ID NO: 1726047 - DNA, 15 bp, Homo sapiens
tgccttgctgcttgg

SEQ ID NO: 1726048 - DNA, 15 bp, Homo sapiens
gccttgctgcttggc

SEQ ID NO: 1726049 - DNA, 15 bp, Homo sapiens
ccttgctgcttggcc

SEQ ID NO: 1726050 - DNA, 15 bp, Homo sapiens
cttgctgcttggcca

SEQ ID NO: 1726051 - DNA, 15 bp, Homo sapiens
ttgctgcttggccag

SEQ ID NO: 1726052 - DNA, 15 bp, Homo sapiens
tgctgcttggccagg

SEQ ID NO: 1726053 - DNA, 15 bp, Homo sapiens
gctgcttggccaggg

SEQ ID NO: 1726054 - DNA, 15 bp, Homo sapiens
ctgcttggccagggc

SEQ ID NO: 1726055 - DNA, 15 bp, Homo sapiens
tgcttggccagggcc

SEQ ID NO: 1726056 - DNA, 15 bp, Homo sapiens
gcttggccagggccc

SEQ ID NO: 1726057 - DNA, 15 bp, Homo sapiens
cttggccagggcccg

SEQ ID NO: 1726058 - DNA, 15 bp, Homo sapiens
ttggccagggcccgc

SEQ ID NO: 1726059 - DNA, 15 bp, Homo sapiens
tggccagggcccgcc

SEQ ID NO: 1726060 - DNA, 15 bp, Homo sapiens
ggccagggcccgccg

SEQ ID NO: 1726061 - DNA, 15 bp, Homo sapiens
gccagggcccgccgt

SEQ ID NO: 1726062 - DNA, 15 bp, Homo sapiens
ccagggcccgccgtc

SEQ ID NO: 1726063 - DNA, 15 bp, Homo sapiens
cagggcccgccgtcc

SEQ ID NO: 1726064 - DNA, 15 bp, Homo sapiens
agggcccgccgtcct

SEQ ID NO: 1726065 - DNA, 15 bp, Homo sapiens
gggcccgccgtcctt

SEQ ID NO: 1726066 - DNA, 15 bp, Homo sapiens
ggcccgccgtccttc

SEQ ID NO: 1726067 - DNA, 15 bp, Homo sapiens
gcccgccgtccttct

SEQ ID NO: 1726068 - DNA, 15 bp, Homo sapiens
cccgccgtccttctt

SEQ ID NO: 1726069 - DNA, 15 bp, Homo sapiens
ccgccgtccttcttc

SEQ ID NO: 1726070 - DNA, 15 bp, Homo sapiens
cgccgtccttcttcg

SEQ ID NO: 1726071 - DNA, 15 bp, Homo sapiens
gccgtccttcttcgc

SEQ ID NO: 1726072 - DNA, 15 bp, Homo sapiens
ccgtccttcttcgcc

SEQ ID NO: 1726073 - DNA, 15 bp, Homo sapiens
cgtccttcttcgcca

SEQ ID NO: 1726074 - DNA, 15 bp, Homo sapiens
gtccttcttcgccag

SEQ ID NO: 1726075 - DNA, 15 bp, Homo sapiens
tccttcttcgccagc

SEQ ID NO: 1726076 - DNA, 15 bp, Homo sapiens
ccttcttcgccagca

SEQ ID NO: 1726077 - DNA, 15 bp, Homo sapiens
cttcttcgccagcaa

SEQ ID NO: 1726078 - DNA, 15 bp, Homo sapiens
ttcttcgccagcaag

SEQ ID NO: 1726079 - DNA, 15 bp, Homo sapiens
tcttcgccagcaagt

SEQ ID NO: 1726080 - DNA, 15 bp, Homo sapiens
cttcgccagcaagtg

SEQ ID NO: 1726081 - DNA, 15 bp, Homo sapiens
ttcgccagcaagtgt

SEQ ID NO: 1726082 - DNA, 15 bp, Homo sapiens
tcgccagcaagtgtg

SEQ ID NO: 1726083 - DNA, 15 bp, Homo sapiens
cgccagcaagtgtgg

SEQ ID NO: 1726084 - DNA, 15 bp, Homo sapiens
gccagcaagtgtggg

SEQ ID NO: 1726085 - DNA, 15 bp, Homo sapiens
ccagcaagtgtgggc

SEQ ID NO: 1726086 - DNA, 15 bp, Homo sapiens
cagcaagtgtgggct

SEQ ID NO: 1726087 - DNA, 15 bp, Homo sapiens
agcaagtgtgggctt

SEQ ID NO: 1726088 - DNA, 15 bp, Homo sapiens
gcaagtgtgggcttc

SEQ ID NO: 1726089 - DNA, 15 bp, Homo sapiens
caagtgtgggcttcc

SEQ ID NO: 1726090 - DNA, 15 bp, Homo sapiens
aagtgtgggcttcca

SEQ ID NO: 1726091 - DNA, 15 bp, Homo sapiens
agtgtgggcttccaa

SEQ ID NO: 1726092 - DNA, 15 bp, Homo sapiens
gtgtgggcttccaaa

SEQ ID NO: 1726093 - DNA, 15 bp, Homo sapiens
tgtgggcttccaaag

SEQ ID NO: 1726094 - DNA, 15 bp, Homo sapiens
gtgggcttccaaaga

SEQ ID NO: 1726095 - DNA, 15 bp, Homo sapiens
tgggcttccaaagac

SEQ ID NO: 1726096 - DNA, 15 bp, Homo sapiens
gggcttccaaagaca

SEQ ID NO: 1726097 - DNA, 15 bp, Homo sapiens
ggcttccaaagacag

SEQ ID NO: 1726098 - DNA, 15 bp, Homo sapiens
gcttccaaagacagg

SEQ ID NO: 1726099 - DNA, 15 bp, Homo sapiens
cttccaaagacaggg

SEQ ID NO: 1726100 - DNA, 15 bp, Homo sapiens
ttccaaagacagggc

SEQ ID NO: 1726101 - DNA, 15 bp, Homo sapiens
tccaaagacagggct

SEQ ID NO: 1726102 - DNA, 15 bp, Homo sapiens
ccaaagacagggctg

SEQ ID NO: 1726103 - DNA, 15 bp, Homo sapiens
caaagacagggctgg

SEQ ID NO: 1726104 - DNA, 15 bp, Homo sapiens
aaagacagggctggg

SEQ ID NO: 1726105 - DNA, 15 bp, Homo sapiens
aagacagggctgggc

SEQ ID NO: 1726106 - DNA, 15 bp, Homo sapiens
agacagggctgggcc

SEQ ID NO: 1726107 - DNA, 15 bp, Homo sapiens
gacagggctgggccc

SEQ ID NO: 1726108 - DNA, 15 bp, Homo sapiens
acagggctgggcccg

SEQ ID NO: 1726109 - DNA, 15 bp, Homo sapiens
cagggctgggcccgg

SEQ ID NO: 1726110 - DNA, 15 bp, Homo sapiens
agggctgggcccggc

SEQ ID NO: 1726111 - DNA, 15 bp, Homo sapiens
gggctgggcccggcc

SEQ ID NO: 1726112 - DNA, 15 bp, Homo sapiens
ggctgggcccggcct

SEQ ID NO: 1726113 - DNA, 15 bp, Homo sapiens
gctgggcccggcctg

SEQ ID NO: 1726114 - DNA, 15 bp, Homo sapiens
ctgggcccggcctgg

SEQ ID NO: 1726115 - DNA, 15 bp, Homo sapiens
tgggcccggcctggg

SEQ ID NO: 1726116 - DNA, 15 bp, Homo sapiens
gggcccggcctgggc

SEQ ID NO: 1726117 - DNA, 15 bp, Homo sapiens
ggcccggcctgggcc

SEQ ID NO: 1726118 - DNA, 15 bp, Homo sapiens
gcccggcctgggcct

SEQ ID NO: 1726119 - DNA, 15 bp, Homo sapiens
cccggcctgggcctc

SEQ ID NO: 1726120 - DNA, 15 bp, Homo sapiens
ccggcctgggcctcc

SEQ ID NO: 1726121 - DNA, 15 bp, Homo sapiens
cggcctgggcctccc

SEQ ID NO: 1726122 - DNA, 15 bp, Homo sapiens
ggcctgggcctccct

SEQ ID NO: 1726123 - DNA, 15 bp, Homo sapiens
gcctgggcctccctg

SEQ ID NO: 1726124 - DNA, 15 bp, Homo sapiens
cctgggcctccctga

SEQ ID NO: 1726125 - DNA, 15 bp, Homo sapiens
ctgggcctccctgaa

SEQ ID NO: 1726126 - DNA, 15 bp, Homo sapiens
tgggcctccctgaag

SEQ ID NO: 1726127 - DNA, 15 bp, Homo sapiens
gggcctccctgaagg

SEQ ID NO: 1726128 - DNA, 15 bp, Homo sapiens
ggcctccctgaaggc

SEQ ID NO: 1726129 - DNA, 15 bp, Homo sapiens
gcctccctgaaggca

SEQ ID NO: 1726130 - DNA, 15 bp, Homo sapiens
cctccctgaaggcag

SEQ ID NO: 1726131 - DNA, 15 bp, Homo sapiens
ctccctgaaggcaga

SEQ ID NO: 1726132 - DNA, 15 bp, Homo sapiens
tccctgaaggcagag

SEQ ID NO: 1726133 - DNA, 15 bp, Homo sapiens
ccctgaaggcagaga

SEQ ID NO: 1726134 - DNA, 15 bp, Homo sapiens
cctgaaggcagagaa

SEQ ID NO: 1726135 - DNA, 15 bp, Homo sapiens
ctgaaggcagagaag

SEQ ID NO: 1726136 - DNA, 15 bp, Homo sapiens
tgaaggcagagaagg

SEQ ID NO: 1726137 - DNA, 15 bp, Homo sapiens
gaaggcagagaagga

SEQ ID NO: 1726138 - DNA, 15 bp, Homo sapiens
aaggcagagaaggac

SEQ ID NO: 1726139 - DNA, 15 bp, Homo sapiens
aggcagagaaggacg

SEQ ID NO: 1726140 - DNA, 15 bp, Homo sapiens
ggcagagaaggacgg

SEQ ID NO: 1726141 - DNA, 15 bp, Homo sapiens
gcagagaaggacggg

SEQ ID NO: 1726142 - DNA, 15 bp, Homo sapiens
cagagaaggacgggc

SEQ ID NO: 1726143 - DNA, 15 bp, Homo sapiens
agagaaggacgggcc

SEQ ID NO: 1726144 - DNA, 15 bp, Homo sapiens
gagaaggacgggccc

SEQ ID NO: 1726145 - DNA, 15 bp, Homo sapiens
agaaggacgggccct

SEQ ID NO: 1726146 - DNA, 15 bp, Homo sapiens
gaaggacgggccctg

SEQ ID NO: 1726147 - DNA, 15 bp, Homo sapiens
aaggacgggccctgt

SEQ ID NO: 1726148 - DNA, 15 bp, Homo sapiens
aggacgggccctgtg

SEQ ID NO: 1726149 - DNA, 15 bp, Homo sapiens
ggacgggccctgtgg

SEQ ID NO: 1726150 - DNA, 15 bp, Homo sapiens
gacgggccctgtgga

SEQ ID NO: 1726151 - DNA, 15 bp, Homo sapiens
acgggccctgtggag

SEQ ID NO: 1726152 - DNA, 15 bp, Homo sapiens
cgggccctgtggagg

SEQ ID NO: 1726153 - DNA, 15 bp, Homo sapiens
gggccctgtggaggc

SEQ ID NO: 1726154 - DNA, 15 bp, Homo sapiens
ggccctgtggaggca

SEQ ID NO: 1726155 - DNA, 15 bp, Homo sapiens
gccctgtggaggcag

SEQ ID NO: 1726156 - DNA, 15 bp, Homo sapiens
ccctgtggaggcagc

SEQ ID NO: 1726157 - DNA, 15 bp, Homo sapiens
cctgtggaggcagcc

SEQ ID NO: 1726158 - DNA, 15 bp, Homo sapiens
ctgtggaggcagccc

SEQ ID NO: 1726159 - DNA, 15 bp, Homo sapiens
tgtggaggcagcccc

SEQ ID NO: 1726160 - DNA, 15 bp, Homo sapiens
gtggaggcagcccca

SEQ ID NO: 1726161 - DNA, 15 bp, Homo sapiens
tggaggcagccccat

SEQ ID NO: 1726162 - DNA, 15 bp, Homo sapiens
ggaggcagccccatg

SEQ ID NO: 1726163 - DNA, 15 bp, Homo sapiens
gaggcagccccatgt

SEQ ID NO: 1726164 - DNA, 15 bp, Homo sapiens
aggcagccccatgtc

SEQ ID NO: 1726165 - DNA, 15 bp, Homo sapiens
ggcagccccatgtcg

SEQ ID NO: 1726166 - DNA, 15 bp, Homo sapiens
gcagccccatgtcgg

SEQ ID NO: 1726167 - DNA, 15 bp, Homo sapiens
cagccccatgtcggg

SEQ ID NO: 1726168 - DNA, 15 bp, Homo sapiens
agccccatgtcgggc

SEQ ID NO: 1726169 - DNA, 15 bp, Homo sapiens
gccccatgtcgggct

SEQ ID NO: 1726170 - DNA, 15 bp, Homo sapiens
ccccatgtcgggctg

SEQ ID NO: 1726171 - DNA, 15 bp, Homo sapiens
cccatgtcgggctga

SEQ ID NO: 1726172 - DNA, 15 bp, Homo sapiens
ccatgtcgggctgaa

SEQ ID NO: 1726173 - DNA, 15 bp, Homo sapiens
catgtcgggctgaag

SEQ ID NO: 1726174 - DNA, 15 bp, Homo sapiens
atgtcgggctgaaga

SEQ ID NO: 1726175 - DNA, 15 bp, Homo sapiens
tgtcgggctgaagag

SEQ ID NO: 1726176 - DNA, 15 bp, Homo sapiens
gtcgggctgaagagg

SEQ ID NO: 1726177 - DNA, 15 bp, Homo sapiens
tcgggctgaagaggc

SEQ ID NO: 1726178 - DNA, 15 bp, Homo sapiens
cgggctgaagaggct

SEQ ID NO: 1726179 - DNA, 15 bp, Homo sapiens
gggctgaagaggctg

SEQ ID NO: 1726180 - DNA, 15 bp, Homo sapiens
ggctgaagaggctgg

SEQ ID NO: 1726181 - DNA, 15 bp, Homo sapiens
gctgaagaggctggc

SEQ ID NO: 1726182 - DNA, 15 bp, Homo sapiens
ctgaagaggctggcc

SEQ ID NO: 1726183 - DNA, 15 bp, Homo sapiens
tgaagaggctggcct

SEQ ID NO: 1726184 - DNA, 15 bp, Homo sapiens
gaagaggctggcctg

SEQ ID NO: 1726185 - DNA, 15 bp, Homo sapiens
aagaggctggcctgc

SEQ ID NO: 1726186 - DNA, 15 bp, Homo sapiens
agaggctggcctgcc

SEQ ID NO: 1726187 - DNA, 15 bp, Homo sapiens
gaggctggcctgcct

SEQ ID NO: 1726188 - DNA, 15 bp, Homo sapiens
aggctggcctgcctg

SEQ ID NO: 1726189 - DNA, 15 bp, Homo sapiens
ggctggcctgcctgc

SEQ ID NO: 1726190 - DNA, 15 bp, Homo sapiens
gctggcctgcctgcc

SEQ ID NO: 1726191 - DNA, 15 bp, Homo sapiens
ctggcctgcctgccc

SEQ ID NO: 1726192 - DNA, 15 bp, Homo sapiens
tggcctgcctgcccc

SEQ ID NO: 1726193 - DNA, 15 bp, Homo sapiens
ggcctgcctgccccc

SEQ ID NO: 1726194 - DNA, 15 bp, Homo sapiens
gcctgcctgcccccc

SEQ ID NO: 1726195 - DNA, 15 bp, Homo sapiens
cctgcctgcccccct

SEQ ID NO: 1726196 - DNA, 15 bp, Homo sapiens
ctgcctgcccccctg

SEQ ID NO: 1726197 - DNA, 15 bp, Homo sapiens
tgcctgcccccctgg

SEQ ID NO: 1726198 - DNA, 15 bp, Homo sapiens
gcctgcccccctggg

SEQ ID NO: 1726199 - DNA, 15 bp, Homo sapiens
cctgcccccctggga

SEQ ID NO: 1726200 - DNA, 15 bp, Homo sapiens
ctgcccccctgggag

SEQ ID NO: 1726201 - DNA, 15 bp, Homo sapiens
tgcccccctgggaga

SEQ ID NO: 1726202 - DNA, 15 bp, Homo sapiens
gcccccctgggagac

SEQ ID NO: 1726203 - DNA, 15 bp, Homo sapiens
cccccctgggagaca

SEQ ID NO: 1726204 - DNA, 15 bp, Homo sapiens
ccccctgggagacac

SEQ ID NO: 1726205 - DNA, 15 bp, Homo sapiens
cccctgggagacacc

SEQ ID NO: 1726206 - DNA, 15 bp, Homo sapiens
ccctgggagacaccc

SEQ ID NO: 1726207 - DNA, 15 bp, Homo sapiens
cctgggagacaccct

SEQ ID NO: 1726208 - DNA, 15 bp, Homo sapiens
ctgggagacaccctt

SEQ ID NO: 1726209 - DNA, 15 bp, Homo sapiens
tgggagacacccttt

SEQ ID NO: 1726210 - DNA, 15 bp, Homo sapiens
gggagacaccctttc

SEQ ID NO: 1726211 - DNA, 15 bp, Homo sapiens
ggagacaccctttcc

SEQ ID NO: 1726212 - DNA, 15 bp, Homo sapiens
gagacaccctttcca

SEQ ID NO: 1726213 - DNA, 15 bp, Homo sapiens
agacaccctttccaa

SEQ ID NO: 1726214 - DNA, 15 bp, Homo sapiens
gacaccctttccaaa

SEQ ID NO: 1726215 - DNA, 15 bp, Homo sapiens
acaccctttccaaaa

SEQ ID NO: 1726216 - DNA, 15 bp, Homo sapiens
caccctttccaaaat

SEQ ID NO: 1726217 - DNA, 15 bp, Homo sapiens
accctttccaaaatg

SEQ ID NO: 1726218 - DNA, 15 bp, Homo sapiens
ccctttccaaaatgg

SEQ ID NO: 1726219 - DNA, 15 bp, Homo sapiens
cctttccaaaatgga

SEQ ID NO: 1726220 - DNA, 15 bp, Homo sapiens
ctttccaaaatggaa

SEQ ID NO: 1726221 - DNA, 15 bp, Homo sapiens
tttccaaaatggaag

SEQ ID NO: 1726222 - DNA, 15 bp, Homo sapiens
ttccaaaatggaaga

SEQ ID NO: 1726223 - DNA, 15 bp, Homo sapiens
tccaaaatggaagag

SEQ ID NO: 1726224 - DNA, 15 bp, Homo sapiens
ccaaaatggaagagc

SEQ ID NO: 1726225 - DNA, 15 bp, Homo sapiens
caaaatggaagagct

SEQ ID NO: 1726226 - DNA, 15 bp, Homo sapiens
aaaatggaagagctg

SEQ ID NO: 1726227 - DNA, 15 bp, Homo sapiens
aaatggaagagctgg

SEQ ID NO: 1726228 - DNA, 15 bp, Homo sapiens
aatggaagagctggg

SEQ ID NO: 1726229 - DNA, 15 bp, Homo sapiens
atggaagagctgggt

SEQ ID NO: 1726230 - DNA, 15 bp, Homo sapiens
tggaagagctgggtg

SEQ ID NO: 1726231 - DNA, 15 bp, Homo sapiens
ggaagagctgggtgg

SEQ ID NO: 1726232 - DNA, 15 bp, Homo sapiens
gaagagctgggtgga

SEQ ID NO: 1726233 - DNA, 15 bp, Homo sapiens
aagagctgggtggac

SEQ ID NO: 1726234 - DNA, 15 bp, Homo sapiens
agagctgggtggaca

SEQ ID NO: 1726235 - DNA, 15 bp, Homo sapiens
gagctgggtggacag

SEQ ID NO: 1726236 - DNA, 15 bp, Homo sapiens
agctgggtggacagc

SEQ ID NO: 1726237 - DNA, 15 bp, Homo sapiens
gctgggtggacagcg

SEQ ID NO: 1726238 - DNA, 15 bp, Homo sapiens
ctgggtggacagcgc

SEQ ID NO: 1726239 - DNA, 15 bp, Homo sapiens
tgggtggacagcgcg

SEQ ID NO: 1726240 - DNA, 15 bp, Homo sapiens
gggtggacagcgcgg

SEQ ID NO: 1726241 - DNA, 15 bp, Homo sapiens
ggtggacagcgcggg

SEQ ID NO: 1726242 - DNA, 15 bp, Homo sapiens
gtggacagcgcgggg

SEQ ID NO: 1726243 - DNA, 15 bp, Homo sapiens
tggacagcgcgggga

SEQ ID NO: 1726244 - DNA, 15 bp, Homo sapiens
ggacagcgcggggag

SEQ ID NO: 1726245 - DNA, 15 bp, Homo sapiens
gacagcgcggggaga

SEQ ID NO: 1726246 - DNA, 15 bp, Homo sapiens
acagcgcggggagaa

SEQ ID NO: 1726247 - DNA, 15 bp, Homo sapiens
cagcgcggggagaag

SEQ ID NO: 1726248 - DNA, 15 bp, Homo sapiens
agcgcggggagaagc

SEQ ID NO: 1726249 - DNA, 15 bp, Homo sapiens
gcgcggggagaagcc

SEQ ID NO: 1726250 - DNA, 15 bp, Homo sapiens
cgcggggagaagccc

SEQ ID NO: 1726251 - DNA, 15 bp, Homo sapiens
gcggggagaagccca

SEQ ID NO: 1726252 - DNA, 15 bp, Homo sapiens
cggggagaagcccac

SEQ ID NO: 1726253 - DNA, 15 bp, Homo sapiens
ggggagaagcccaca

SEQ ID NO: 1726254 - DNA, 15 bp, Homo sapiens
gggagaagcccacaa

SEQ ID NO: 1726255 - DNA, 15 bp, Homo sapiens
ggagaagcccacaag

SEQ ID NO: 1726256 - DNA, 15 bp, Homo sapiens
gagaagcccacaagg

SEQ ID NO: 1726257 - DNA, 15 bp, Homo sapiens
agaagcccacaaggg

SEQ ID NO: 1726258 - DNA, 15 bp, Homo sapiens
gaagcccacaagggg

SEQ ID NO: 1726259 - DNA, 15 bp, Homo sapiens
aagcccacaaggggt

SEQ ID NO: 1726260 - DNA, 15 bp, Homo sapiens
agcccacaaggggta

SEQ ID NO: 1726261 - DNA, 15 bp, Homo sapiens
gcccacaaggggtag

SEQ ID NO: 1726262 - DNA, 15 bp, Homo sapiens
cccacaaggggtagg

SEQ ID NO: 1726263 - DNA, 15 bp, Homo sapiens
ccacaaggggtaggc

SEQ ID NO: 1726264 - DNA, 15 bp, Homo sapiens
cacaaggggtaggct

SEQ ID NO: 1726265 - DNA, 15 bp, Homo sapiens
acaaggggtaggctg

SEQ ID NO: 1726266 - DNA, 15 bp, Homo sapiens
caaggggtaggctgg

SEQ ID NO: 1726267 - DNA, 15 bp, Homo sapiens
aaggggtaggctggg

SEQ ID NO: 1726268 - DNA, 15 bp, Homo sapiens
aggggtaggctgggc

SEQ ID NO: 1726269 - DNA, 15 bp, Homo sapiens
ggggtaggctgggca

SEQ ID NO: 1726270 - DNA, 15 bp, Homo sapiens
gggtaggctgggcag

SEQ ID NO: 1726271 - DNA, 15 bp, Homo sapiens
ggtaggctgggcagg

SEQ ID NO: 1726272 - DNA, 15 bp, Homo sapiens
gtaggctgggcaggc

SEQ ID NO: 1726273 - DNA, 15 bp, Homo sapiens
taggctgggcaggcc

SEQ ID NO: 1726274 - DNA, 15 bp, Homo sapiens
aggctgggcaggccc

SEQ ID NO: 1726275 - DNA, 15 bp, Homo sapiens
ggctgggcaggcccc

SEQ ID NO: 1726276 - DNA, 15 bp, Homo sapiens
gctgggcaggcccca

SEQ ID NO: 1726277 - DNA, 15 bp, Homo sapiens
ctgggcaggccccag

SEQ ID NO: 1726278 - DNA, 15 bp, Homo sapiens
tgggcaggccccagg

SEQ ID NO: 1726279 - DNA, 15 bp, Homo sapiens
gggcaggccccaggc

SEQ ID NO: 1726280 - DNA, 15 bp, Homo sapiens
ggcaggccccaggcg

SEQ ID NO: 1726281 - DNA, 15 bp, Homo sapiens
gcaggccccaggcgg

SEQ ID NO: 1726282 - DNA, 15 bp, Homo sapiens
caggccccaggcggg

SEQ ID NO: 1726283 - DNA, 15 bp, Homo sapiens
aggccccaggcgggg

SEQ ID NO: 1726284 - DNA, 15 bp, Homo sapiens
ggccccaggcggggc

SEQ ID NO: 1726285 - DNA, 15 bp, Homo sapiens
gccccaggcggggcc

SEQ ID NO: 1726286 - DNA, 15 bp, Homo sapiens
ccccaggcggggccc

SEQ ID NO: 1726287 - DNA, 15 bp, Homo sapiens
cccaggcggggccct

SEQ ID NO: 1726288 - DNA, 15 bp, Homo sapiens
ccaggcggggccctc

SEQ ID NO: 1726289 - DNA, 15 bp, Homo sapiens
caggcggggccctcg

SEQ ID NO: 1726290 - DNA, 15 bp, Homo sapiens
aggcggggccctcgg

SEQ ID NO: 1726291 - DNA, 15 bp, Homo sapiens
ggcggggccctcgga

SEQ ID NO: 1726292 - DNA, 15 bp, Homo sapiens
gcggggccctcggac

SEQ ID NO: 1726293 - DNA, 15 bp, Homo sapiens
cggggccctcggacc

SEQ ID NO: 1726294 - DNA, 15 bp, Homo sapiens
ggggccctcggaccc

SEQ ID NO: 1726295 - DNA, 15 bp, Homo sapiens
gggccctcggacccc

SEQ ID NO: 1726296 - DNA, 15 bp, Homo sapiens
ggccctcggacccct

SEQ ID NO: 1726297 - DNA, 15 bp, Homo sapiens
gccctcggacccctt

SEQ ID NO: 1726298 - DNA, 15 bp, Homo sapiens
ccctcggaccccttg

SEQ ID NO: 1726299 - DNA, 15 bp, Homo sapiens
cctcggaccccttgt

SEQ ID NO: 1726300 - DNA, 15 bp, Homo sapiens
ctcggaccccttgtc

SEQ ID NO: 1726301 - DNA, 15 bp, Homo sapiens
tcggaccccttgtct

SEQ ID NO: 1726302 - DNA, 15 bp, Homo sapiens
cggaccccttgtctt

SEQ ID NO: 1726303 - DNA, 15 bp, Homo sapiens
ggaccccttgtcttt

SEQ ID NO: 1726304 - DNA, 15 bp, Homo sapiens
gaccccttgtctttc

SEQ ID NO: 1726305 - DNA, 15 bp, Homo sapiens
accccttgtctttcc

SEQ ID NO: 1726306 - DNA, 15 bp, Homo sapiens
ccccttgtctttccc

SEQ ID NO: 1726307 - DNA, 15 bp, Homo sapiens
cccttgtctttcccg

SEQ ID NO: 1726308 - DNA, 15 bp, Homo sapiens
ccttgtctttcccgc

SEQ ID NO: 1726309 - DNA, 15 bp, Homo sapiens
cttgtctttcccgct

SEQ ID NO: 1726310 - DNA, 15 bp, Homo sapiens
ttgtctttcccgctc

SEQ ID NO: 1726311 - DNA, 15 bp, Homo sapiens
tgtctttcccgctcc

SEQ ID NO: 1726312 - DNA, 15 bp, Homo sapiens
gtctttcccgctccc

SEQ ID NO: 1726313 - DNA, 15 bp, Homo sapiens
tctttcccgctcccg

SEQ ID NO: 1726314 - DNA, 15 bp, Homo sapiens
ctttcccgctcccga

SEQ ID NO: 1726315 - DNA, 15 bp, Homo sapiens
tttcccgctcccgac

SEQ ID NO: 1726316 - DNA, 15 bp, Homo sapiens
ttcccgctcccgacg

SEQ ID NO: 1726317 - DNA, 15 bp, Homo sapiens
tcccgctcccgacgc

SEQ ID NO: 1726318 - DNA, 15 bp, Homo sapiens
cccgctcccgacgcc

SEQ ID NO: 1726319 - DNA, 15 bp, Homo sapiens
ccgctcccgacgccc

SEQ ID NO: 1726320 - DNA, 15 bp, Homo sapiens
cgctcccgacgcccc

SEQ ID NO: 1726321 - DNA, 15 bp, Homo sapiens
gctcccgacgccccg

SEQ ID NO: 1726322 - DNA, 15 bp, Homo sapiens
ctcccgacgccccgc

SEQ ID NO: 1726323 - DNA, 15 bp, Homo sapiens
tcccgacgccccgcc

SEQ ID NO: 1726324 - DNA, 15 bp, Homo sapiens
cccgacgccccgcct

SEQ ID NO: 1726325 - DNA, 15 bp, Homo sapiens
ccgacgccccgcctc

SEQ ID NO: 1726326 - DNA, 15 bp, Homo sapiens
cgacgccccgcctcc

SEQ ID NO: 1726327 - DNA, 15 bp, Homo sapiens
gacgccccgcctcca

SEQ ID NO: 1726328 - DNA, 15 bp, Homo sapiens
acgccccgcctccac

SEQ ID NO: 1726329 - DNA, 15 bp, Homo sapiens
cgccccgcctccact

SEQ ID NO: 1726330 - DNA, 15 bp, Homo sapiens
gccccgcctccactc

SEQ ID NO: 1726331 - DNA, 15 bp, Homo sapiens
ccccgcctccactcc

SEQ ID NO: 1726332 - DNA, 15 bp, Homo sapiens
cccgcctccactccg

SEQ ID NO: 1726333 - DNA, 15 bp, Homo sapiens
ccgcctccactccgc

SEQ ID NO: 1726334 - DNA, 15 bp, Homo sapiens
cgcctccactccgca

SEQ ID NO: 1726335 - DNA, 15 bp, Homo sapiens
gcctccactccgcat

SEQ ID NO: 1726336 - DNA, 15 bp, Homo sapiens
cctccactccgcatc

SEQ ID NO: 1726337 - DNA, 15 bp, Homo sapiens
ctccactccgcatct

SEQ ID NO: 1726338 - DNA, 15 bp, Homo sapiens
tccactccgcatctc

SEQ ID NO: 1726339 - DNA, 15 bp, Homo sapiens
ccactccgcatctct

SEQ ID NO: 1726340 - DNA, 15 bp, Homo sapiens
cactccgcatctcta

SEQ ID NO: 1726341 - DNA, 15 bp, Homo sapiens
actccgcatctctac

SEQ ID NO: 1726342 - DNA, 15 bp, Homo sapiens
ctccgcatctctact

SEQ ID NO: 1726343 - DNA, 15 bp, Homo sapiens
tccgcatctctactt

SEQ ID NO: 1726344 - DNA, 15 bp, Homo sapiens
ccgcatctctacttt

SEQ ID NO: 1726345 - DNA, 15 bp, Homo sapiens
cgcatctctactttc

SEQ ID NO: 1726346 - DNA, 15 bp, Homo sapiens
gcatctctactttcc

SEQ ID NO: 1726347 - DNA, 15 bp, Homo sapiens
catctctactttccg

SEQ ID NO: 1726348 - DNA, 15 bp, Homo sapiens
atctctactttccga

SEQ ID NO: 1726349 - DNA, 15 bp, Homo sapiens
tctctactttccgag

SEQ ID NO: 1726350 - DNA, 15 bp, Homo sapiens
ctctactttccgagc

SEQ ID NO: 1726351 - DNA, 15 bp, Homo sapiens
tctactttccgagcg

SEQ ID NO: 1726352 - DNA, 15 bp, Homo sapiens
ctactttccgagcgc

SEQ ID NO: 1726353 - DNA, 15 bp, Homo sapiens
tactttccgagcgca

SEQ ID NO: 1726354 - DNA, 15 bp, Homo sapiens
actttccgagcgcag

SEQ ID NO: 1726355 - DNA, 15 bp, Homo sapiens
ctttccgagcgcagc

SEQ ID NO: 1726356 - DNA, 15 bp, Homo sapiens
tttccgagcgcagcg

SEQ ID NO: 1726357 - DNA, 15 bp, Homo sapiens
ttccgagcgcagcgc

SEQ ID NO: 1726358 - DNA, 15 bp, Homo sapiens
tccgagcgcagcgcg

SEQ ID NO: 1726359 - DNA, 15 bp, Homo sapiens
ccgagcgcagcgcgc

SEQ ID NO: 1726360 - DNA, 15 bp, Homo sapiens
cgagcgcagcgcgca

SEQ ID NO: 1726361 - DNA, 15 bp, Homo sapiens
gagcgcagcgcgcac

SEQ ID NO: 1726362 - DNA, 15 bp, Homo sapiens
agcgcagcgcgcacg

SEQ ID NO: 1726363 - DNA, 15 bp, Homo sapiens
gcgcagcgcgcacgg

SEQ ID NO: 1726364 - DNA, 15 bp, Homo sapiens
cgcagcgcgcacggg

SEQ ID NO: 1726365 - DNA, 15 bp, Homo sapiens
gcagcgcgcacgggt

SEQ ID NO: 1726366 - DNA, 15 bp, Homo sapiens
cagcgcgcacgggtt

SEQ ID NO: 1726367 - DNA, 15 bp, Homo sapiens
agcgcgcacgggttc

SEQ ID NO: 1726368 - DNA, 15 bp, Homo sapiens
gcgcgcacgggttcc

SEQ ID NO: 1726369 - DNA, 15 bp, Homo sapiens
cgcgcacgggttccg

SEQ ID NO: 1726370 - DNA, 15 bp, Homo sapiens
gcgcacgggttccgg

SEQ ID NO: 1726371 - DNA, 15 bp, Homo sapiens
cgcacgggttccggt

SEQ ID NO: 1726372 - DNA, 15 bp, Homo sapiens
gcacgggttccggtg

SEQ ID NO: 1726373 - DNA, 15 bp, Homo sapiens
cacgggttccggtgg

SEQ ID NO: 1726374 - DNA, 15 bp, Homo sapiens
acgggttccggtggg

SEQ ID NO: 1726375 - DNA, 15 bp, Homo sapiens
cgggttccggtgggt

SEQ ID NO: 1726376 - DNA, 15 bp, Homo sapiens
gggttccggtgggtg

SEQ ID NO: 1726377 - DNA, 15 bp, Homo sapiens
ggttccggtgggtga

SEQ ID NO: 1726378 - DNA, 15 bp, Homo sapiens
gttccggtgggtgaa

SEQ ID NO: 1726379 - DNA, 15 bp, Homo sapiens
ttccggtgggtgaag

SEQ ID NO: 1726380 - DNA, 15 bp, Homo sapiens
tccggtgggtgaagt

SEQ ID NO: 1726381 - DNA, 15 bp, Homo sapiens
ccggtgggtgaagtc

SEQ ID NO: 1726382 - DNA, 15 bp, Homo sapiens
cggtgggtgaagtcg

SEQ ID NO: 1726383 - DNA, 15 bp, Homo sapiens
ggtgggtgaagtcgc

SEQ ID NO: 1726384 - DNA, 15 bp, Homo sapiens
gtgggtgaagtcgct

SEQ ID NO: 1726385 - DNA, 15 bp, Homo sapiens
tgggtgaagtcgctc

SEQ ID NO: 1726386 - DNA, 15 bp, Homo sapiens
gggtgaagtcgctcg

SEQ ID NO: 1726387 - DNA, 15 bp, Homo sapiens
ggtgaagtcgctcga

SEQ ID NO: 1726388 - DNA, 15 bp, Homo sapiens
gtgaagtcgctcgag

SEQ ID NO: 1726389 - DNA, 15 bp, Homo sapiens
tgaagtcgctcgagg

SEQ ID NO: 1726390 - DNA, 15 bp, Homo sapiens
gaagtcgctcgaggg

SEQ ID NO: 1726391 - DNA, 15 bp, Homo sapiens
aagtcgctcgagggc

SEQ ID NO: 1726392 - DNA, 15 bp, Homo sapiens
agtcgctcgagggca

SEQ ID NO: 1726393 - DNA, 15 bp, Homo sapiens
gtcgctcgagggcag

SEQ ID NO: 1726394 - DNA, 15 bp, Homo sapiens
tcgctcgagggcagg

SEQ ID NO: 1726395 - DNA, 15 bp, Homo sapiens
cgctcgagggcaggg

SEQ ID NO: 1726396 - DNA, 15 bp, Homo sapiens
gctcgagggcagggt

SEQ ID NO: 1726397 - DNA, 15 bp, Homo sapiens
ctcgagggcagggtg

SEQ ID NO: 1726398 - DNA, 15 bp, Homo sapiens
tcgagggcagggtgt

SEQ ID NO: 1726399 - DNA, 15 bp, Homo sapiens
cgagggcagggtgtg

SEQ ID NO: 1726400 - DNA, 15 bp, Homo sapiens
gagggcagggtgtgg

SEQ ID NO: 1726401 - DNA, 15 bp, Homo sapiens
agggcagggtgtggt

SEQ ID NO: 1726402 - DNA, 15 bp, Homo sapiens
gggcagggtgtggtc

SEQ ID NO: 1726403 - DNA, 15 bp, Homo sapiens
ggcagggtgtggtca

SEQ ID NO: 1726404 - DNA, 15 bp, Homo sapiens
gcagggtgtggtcag

SEQ ID NO: 1726405 - DNA, 15 bp, Homo sapiens
cagggtgtggtcagc

SEQ ID NO: 1726406 - DNA, 15 bp, Homo sapiens
agggtgtggtcagcc

SEQ ID NO: 1726407 - DNA, 15 bp, Homo sapiens
gggtgtggtcagcct

SEQ ID NO: 1726408 - DNA, 15 bp, Homo sapiens
ggtgtggtcagcctg

SEQ ID NO: 1726409 - DNA, 15 bp, Homo sapiens
gtgtggtcagcctgg

SEQ ID NO: 1726410 - DNA, 15 bp, Homo sapiens
tgtggtcagcctggg

SEQ ID NO: 1726411 - DNA, 15 bp, Homo sapiens
gtggtcagcctgggc

SEQ ID NO: 1726412 - DNA, 15 bp, Homo sapiens
tggtcagcctgggct

SEQ ID NO: 1726413 - DNA, 15 bp, Homo sapiens
ggtcagcctgggctc

SEQ ID NO: 1726414 - DNA, 15 bp, Homo sapiens
gtcagcctgggctcc

SEQ ID NO: 1726415 - DNA, 15 bp, Homo sapiens
tcagcctgggctcca

SEQ ID NO: 1726416 - DNA, 15 bp, Homo sapiens
cagcctgggctccag

SEQ ID NO: 1726417 - DNA, 15 bp, Homo sapiens
agcctgggctccaga

SEQ ID NO: 1726418 - DNA, 15 bp, Homo sapiens
gcctgggctccagag

SEQ ID NO: 1726419 - DNA, 15 bp, Homo sapiens
cctgggctccagagt

SEQ ID NO: 1726420 - DNA, 15 bp, Homo sapiens
ctgggctccagagtc

SEQ ID NO: 1726421 - DNA, 15 bp, Homo sapiens
tgggctccagagtcc

SEQ ID NO: 1726422 - DNA, 15 bp, Homo sapiens
gggctccagagtccc

SEQ ID NO: 1726423 - DNA, 15 bp, Homo sapiens
ggctccagagtccct

SEQ ID NO: 1726424 - DNA, 15 bp, Homo sapiens
gctccagagtccctt

SEQ ID NO: 1726425 - DNA, 15 bp, Homo sapiens
ctccagagtcccttt

SEQ ID NO: 1726426 - DNA, 15 bp, Homo sapiens
tccagagtccctttc

SEQ ID NO: 1726427 - DNA, 15 bp, Homo sapiens
ccagagtccctttca

SEQ ID NO: 1726428 - DNA, 15 bp, Homo sapiens
cagagtccctttcag

SEQ ID NO: 1726429 - DNA, 15 bp, Homo sapiens
agagtccctttcagc

SEQ ID NO: 1726430 - DNA, 15 bp, Homo sapiens
gagtccctttcagct

SEQ ID NO: 1726431 - DNA, 15 bp, Homo sapiens
agtccctttcagctt

SEQ ID NO: 1726432 - DNA, 15 bp, Homo sapiens
gtccctttcagcttc

SEQ ID NO: 1726433 - DNA, 15 bp, Homo sapiens
tccctttcagcttcc

SEQ ID NO: 1726434 - DNA, 15 bp, Homo sapiens
ccctttcagcttcct

SEQ ID NO: 1726435 - DNA, 15 bp, Homo sapiens
cctttcagcttcctg

SEQ ID NO: 1726436 - DNA, 15 bp, Homo sapiens
ctttcagcttcctgg

SEQ ID NO: 1726437 - DNA, 15 bp, Homo sapiens
tttcagcttcctggc

SEQ ID NO: 1726438 - DNA, 15 bp, Homo sapiens
ttcagcttcctggct

SEQ ID NO: 1726439 - DNA, 15 bp, Homo sapiens
tcagcttcctggcta

SEQ ID NO: 1726440 - DNA, 15 bp, Homo sapiens
cagcttcctggctag

SEQ ID NO: 1726441 - DNA, 15 bp, Homo sapiens
agcttcctggctagg

SEQ ID NO: 1726442 - DNA, 15 bp, Homo sapiens
gcttcctggctaggg

SEQ ID NO: 1726443 - DNA, 15 bp, Homo sapiens
cttcctggctagggg

SEQ ID NO: 1726444 - DNA, 15 bp, Homo sapiens
ttcctggctaggggt

SEQ ID NO: 1726445 - DNA, 15 bp, Homo sapiens
tcctggctaggggtc

SEQ ID NO: 1726446 - DNA, 15 bp, Homo sapiens
cctggctaggggtca

SEQ ID NO: 1726447 - DNA, 15 bp, Homo sapiens
ctggctaggggtcag

SEQ ID NO: 1726448 - DNA, 15 bp, Homo sapiens
tggctaggggtcagg

SEQ ID NO: 1726449 - DNA, 15 bp, Homo sapiens
ggctaggggtcagga

SEQ ID NO: 1726450 - DNA, 15 bp, Homo sapiens
gctaggggtcaggaa

SEQ ID NO: 1726451 - DNA, 15 bp, Homo sapiens
ctaggggtcaggaag

SEQ ID NO: 1726452 - DNA, 15 bp, Homo sapiens
taggggtcaggaagc

SEQ ID NO: 1726453 - DNA, 15 bp, Homo sapiens
aggggtcaggaagcc

SEQ ID NO: 1726454 - DNA, 15 bp, Homo sapiens
ggggtcaggaagccc

SEQ ID NO: 1726455 - DNA, 15 bp, Homo sapiens
gggtcaggaagcccc

SEQ ID NO: 1726456 - DNA, 15 bp, Homo sapiens
ggtcaggaagccccg

SEQ ID NO: 1726457 - DNA, 15 bp, Homo sapiens
gtcaggaagccccgg

SEQ ID NO: 1726458 - DNA, 15 bp, Homo sapiens
tcaggaagccccggc

SEQ ID NO: 1726459 - DNA, 15 bp, Homo sapiens
caggaagccccggct

SEQ ID NO: 1726460 - DNA, 15 bp, Homo sapiens
aggaagccccggctc

SEQ ID NO: 1726461 - DNA, 15 bp, Homo sapiens
ggaagccccggctcc

SEQ ID NO: 1726462 - DNA, 15 bp, Homo sapiens
gaagccccggctccc

SEQ ID NO: 1726463 - DNA, 15 bp, Homo sapiens
aagccccggctcccg

SEQ ID NO: 1726464 - DNA, 15 bp, Homo sapiens
agccccggctcccgc

SEQ ID NO: 1726465 - DNA, 15 bp, Homo sapiens
gccccggctcccgca

SEQ ID NO: 1726466 - DNA, 15 bp, Homo sapiens
ccccggctcccgcag

SEQ ID NO: 1726467 - DNA, 15 bp, Homo sapiens
cccggctcccgcagc

SEQ ID NO: 1726468 - DNA, 15 bp, Homo sapiens
ccggctcccgcagcc

SEQ ID NO: 1726469 - DNA, 15 bp, Homo sapiens
cggctcccgcagccc

SEQ ID NO: 1726470 - DNA, 15 bp, Homo sapiens
ggctcccgcagccca

SEQ ID NO: 1726471 - DNA, 15 bp, Homo sapiens
gctcccgcagcccat

SEQ ID NO: 1726472 - DNA, 15 bp, Homo sapiens
ctcccgcagcccatg

SEQ ID NO: 1726473 - DNA, 15 bp, Homo sapiens
tcccgcagcccatgt

SEQ ID NO: 1726474 - DNA, 15 bp, Homo sapiens
cccgcagcccatgtg

SEQ ID NO: 1726475 - DNA, 15 bp, Homo sapiens
ccgcagcccatgtga

SEQ ID NO: 1726476 - DNA, 15 bp, Homo sapiens
cgcagcccatgtgaa

SEQ ID NO: 1726477 - DNA, 15 bp, Homo sapiens
gcagcccatgtgaaa

SEQ ID NO: 1726478 - DNA, 15 bp, Homo sapiens
cagcccatgtgaaag

SEQ ID NO: 1726479 - DNA, 15 bp, Homo sapiens
agcccatgtgaaagc

SEQ ID NO: 1726480 - DNA, 15 bp, Homo sapiens
gcccatgtgaaagct

SEQ ID NO: 1726481 - DNA, 15 bp, Homo sapiens
cccatgtgaaagctc

SEQ ID NO: 1726482 - DNA, 15 bp, Homo sapiens
ccatgtgaaagctcc

SEQ ID NO: 1726483 - DNA, 15 bp, Homo sapiens
catgtgaaagctccc

SEQ ID NO: 1726484 - DNA, 15 bp, Homo sapiens
atgtgaaagctcccc

SEQ ID NO: 1726485 - DNA, 15 bp, Homo sapiens
tgtgaaagctccccc

SEQ ID NO: 1726486 - DNA, 15 bp, Homo sapiens
gtgaaagctcccccc

SEQ ID NO: 1726487 - DNA, 15 bp, Homo sapiens
tgaaagctcccccca

SEQ ID NO: 1726488 - DNA, 15 bp, Homo sapiens
gaaagctccccccag

SEQ ID NO: 1726489 - DNA, 15 bp, Homo sapiens
aaagctccccccagc

SEQ ID NO: 1726490 - DNA, 15 bp, Homo sapiens
aagctccccccagca

SEQ ID NO: 1726491 - DNA, 15 bp, Homo sapiens
agctccccccagcac

SEQ ID NO: 1726492 - DNA, 15 bp, Homo sapiens
gctccccccagcacc

SEQ ID NO: 1726493 - DNA, 15 bp, Homo sapiens
ctccccccagcacct

SEQ ID NO: 1726494 - DNA, 15 bp, Homo sapiens
tccccccagcacctc

SEQ ID NO: 1726495 - DNA, 15 bp, Homo sapiens
ccccccagcacctcc

SEQ ID NO: 1726496 - DNA, 15 bp, Homo sapiens
cccccagcacctccg

SEQ ID NO: 1726497 - DNA, 15 bp, Homo sapiens
ccccagcacctccgg

SEQ ID NO: 1726498 - DNA, 15 bp, Homo sapiens
cccagcacctccggc

SEQ ID NO: 1726499 - DNA, 15 bp, Homo sapiens
ccagcacctccggcc

SEQ ID NO: 1726500 - DNA, 15 bp, Homo sapiens
cagcacctccggcct

SEQ ID NO: 1726501 - DNA, 15 bp, Homo sapiens
agcacctccggcctc

SEQ ID NO: 1726502 - DNA, 15 bp, Homo sapiens
gcacctccggcctcg

SEQ ID NO: 1726503 - DNA, 15 bp, Homo sapiens
cacctccggcctcgg

SEQ ID NO: 1726504 - DNA, 15 bp, Homo sapiens
acctccggcctcggt

SEQ ID NO: 1726505 - DNA, 15 bp, Homo sapiens
cctccggcctcggtg

SEQ ID NO: 1726506 - DNA, 15 bp, Homo sapiens
ctccggcctcggtgc

SEQ ID NO: 1726507 - DNA, 15 bp, Homo sapiens
tccggcctcggtgcc

SEQ ID NO: 1726508 - DNA, 15 bp, Homo sapiens
ccggcctcggtgccc

SEQ ID NO: 1726509 - DNA, 15 bp, Homo sapiens
cggcctcggtgcccg

SEQ ID NO: 1726510 - DNA, 15 bp, Homo sapiens
ggcctcggtgcccgc

SEQ ID NO: 1726511 - DNA, 15 bp, Homo sapiens
gcctcggtgcccgct

SEQ ID NO: 1726512 - DNA, 15 bp, Homo sapiens
cctcggtgcccgctg

SEQ ID NO: 1726513 - DNA, 15 bp, Homo sapiens
ctcggtgcccgctgt

SEQ ID NO: 1726514 - DNA, 15 bp, Homo sapiens
tcggtgcccgctgtg

SEQ ID NO: 1726515 - DNA, 15 bp, Homo sapiens
cggtgcccgctgtgg

SEQ ID NO: 1726516 - DNA, 15 bp, Homo sapiens
ggtgcccgctgtggc

SEQ ID NO: 1726517 - DNA, 15 bp, Homo sapiens
gtgcccgctgtggca

SEQ ID NO: 1726518 - DNA, 15 bp, Homo sapiens
tgcccgctgtggcac

SEQ ID NO: 1726519 - DNA, 15 bp, Homo sapiens
gcccgctgtggcact

SEQ ID NO: 1726520 - DNA, 15 bp, Homo sapiens
cccgctgtggcactg

SEQ ID NO: 1726521 - DNA, 15 bp, Homo sapiens
ccgctgtggcactgc

SEQ ID NO: 1726522 - DNA, 15 bp, Homo sapiens
cgctgtggcactgct

SEQ ID NO: 1726523 - DNA, 15 bp, Homo sapiens
gctgtggcactgctg

SEQ ID NO: 1726524 - DNA, 15 bp, Homo sapiens
ctgtggcactgctgg

SEQ ID NO: 1726525 - DNA, 15 bp, Homo sapiens
tgtggcactgctggg

SEQ ID NO: 1726526 - DNA, 15 bp, Homo sapiens
gtggcactgctgggc

SEQ ID NO: 1726527 - DNA, 15 bp, Homo sapiens
tggcactgctgggca

SEQ ID NO: 1726528 - DNA, 15 bp, Homo sapiens
ggcactgctgggcag

SEQ ID NO: 1726529 - DNA, 15 bp, Homo sapiens
gcactgctgggcagc

SEQ ID NO: 1726530 - DNA, 15 bp, Homo sapiens
cactgctgggcagct

SEQ ID NO: 1726531 - DNA, 15 bp, Homo sapiens
actgctgggcagctg

SEQ ID NO: 1726532 - DNA, 15 bp, Homo sapiens
ctgctgggcagctga

SEQ ID NO: 1726533 - DNA, 15 bp, Homo sapiens
tgctgggcagctgaa

SEQ ID NO: 1726534 - DNA, 15 bp, Homo sapiens
gctgggcagctgaat

SEQ ID NO: 1726535 - DNA, 15 bp, Homo sapiens
ctgggcagctgaata

SEQ ID NO: 1726536 - DNA, 15 bp, Homo sapiens
tgggcagctgaataa

SEQ ID NO: 1726537 - DNA, 15 bp, Homo sapiens
gggcagctgaataaa

SEQ ID NO: 1726538 - DNA, 15 bp, Homo sapiens
ggcagctgaataaaa

SEQ ID NO: 1726539 - DNA, 15 bp, Homo sapiens
gcagctgaataaaag

SEQ ID NO: 1726540 - DNA, 15 bp, Homo sapiens
cagctgaataaaagc

SEQ ID NO: 1726541 - DNA, 15 bp, Homo sapiens
agctgaataaaagca

SEQ ID NO: 1726542 - DNA, 15 bp, Homo sapiens
gctgaataaaagcac

SEQ ID NO: 1726543 - DNA, 15 bp, Homo sapiens
ctgaataaaagcact

SEQ ID NO: 1726544 - DNA, 15 bp, Homo sapiens
tgaataaaagcactt

SEQ ID NO: 1726545 - DNA, 15 bp, Homo sapiens
gaataaaagcacttc

SEQ ID NO: 1726546 - DNA, 15 bp, Homo sapiens
aataaaagcacttct

SEQ ID NO: 1726547 - DNA, 15 bp, Homo sapiens
ataaaagcacttctg

SEQ ID NO: 1726548 - DNA, 15 bp, Homo sapiens
taaaagcacttctgg

SEQ ID NO: 1726549 - DNA, 15 bp, Homo sapiens
aaaagcacttctggc

SEQ ID NO: 1726550 - DNA, 15 bp, Homo sapiens
aaagcacttctggca

SEQ ID NO: 1726551 - DNA, 15 bp, Homo sapiens
aagcacttctggcag

SEQ ID NO: 1726552 - DNA, 15 bp, Homo sapiens
agcacttctggcagc

SEQ ID NO: 1726553 - DNA, 15 bp, Homo sapiens
gcacttctggcagca

SEQ ID NO: 1726554 - DNA, 15 bp, Homo sapiens
cacttctggcagcat

SEQ ID NO: 1726555 - DNA, 15 bp, Homo sapiens
acttctggcagcatg

SEQ ID NO: 1726556 - DNA, 15 bp, Homo sapiens
cttctggcagcatgc

SEQ ID NO: 1726557 - DNA, 15 bp, Homo sapiens
ttctggcagcatgct

SEQ ID NO: 1726558 - DNA, 15 bp, Homo sapiens
tctggcagcatgctc

SEQ ID NO: 1726559 - DNA, 15 bp, Homo sapiens
ctggcagcatgctcg

SEQ ID NO: 1726560 - DNA, 15 bp, Homo sapiens
tggcagcatgctcgg

SEQ ID NO: 1726561 - DNA, 15 bp, Homo sapiens
ggcagcatgctcggc

SEQ ID NO: 1726562 - DNA, 15 bp, Homo sapiens
gcagcatgctcggcc

SEQ ID NO: 1726563 - DNA, 15 bp, Homo sapiens
cagcatgctcggccc

SEQ ID NO: 1726564 - DNA, 15 bp, Homo sapiens
agcatgctcggcccc

SEQ ID NO: 1726565 - DNA, 15 bp, Homo sapiens
gcatgctcggcccct

SEQ ID NO: 1726566 - DNA, 15 bp, Homo sapiens
catgctcggcccctc

SEQ ID NO: 1726567 - DNA, 15 bp, Homo sapiens
atgctcggcccctcg

SEQ ID NO: 1726568 - DNA, 15 bp, Homo sapiens
tgctcggcccctcgt

SEQ ID NO: 1726569 - DNA, 15 bp, Homo sapiens
gctcggcccctcgtg

SEQ ID NO: 1726570 - DNA, 15 bp, Homo sapiens
ctcggcccctcgtga

SEQ ID NO: 1726571 - DNA, 15 bp, Homo sapiens
tcggcccctcgtgag

SEQ ID NO: 1726572 - DNA, 15 bp, Homo sapiens
cggcccctcgtgagc

SEQ ID NO: 1726573 - DNA, 15 bp, Homo sapiens
ggcccctcgtgagcg

SEQ ID NO: 1726574 - DNA, 15 bp, Homo sapiens
gcccctcgtgagcgc

SEQ ID NO: 1726575 - DNA, 15 bp, Homo sapiens
cccctcgtgagcgct

SEQ ID NO: 1726576 - DNA, 15 bp, Homo sapiens
ccctcgtgagcgctg

SEQ ID NO: 1726577 - DNA, 15 bp, Homo sapiens
cctcgtgagcgctgg

SEQ ID NO: 1726578 - DNA, 15 bp, Homo sapiens
ctcgtgagcgctggt

SEQ ID NO: 1726579 - DNA, 15 bp, Homo sapiens
tcgtgagcgctggtc

SEQ ID NO: 1726580 - DNA, 15 bp, Homo sapiens
cgtgagcgctggtct

SEQ ID NO: 1726581 - DNA, 15 bp, Homo sapiens
gtgagcgctggtctt

SEQ ID NO: 1726582 - DNA, 15 bp, Homo sapiens
tgagcgctggtcttt

SEQ ID NO: 1726583 - DNA, 15 bp, Homo sapiens
gagcgctggtctttc

SEQ ID NO: 1726584 - DNA, 15 bp, Homo sapiens
agcgctggtctttct

SEQ ID NO: 1726585 - DNA, 15 bp, Homo sapiens
gcgctggtctttctg

SEQ ID NO: 1726586 - DNA, 15 bp, Homo sapiens
cgctggtctttctga

SEQ ID NO: 1726587 - DNA, 15 bp, Homo sapiens
gctggtctttctgaa

SEQ ID NO: 1726588 - DNA, 15 bp, Homo sapiens
ctggtctttctgaat

SEQ ID NO: 1726589 - DNA, 15 bp, Homo sapiens
tggtctttctgaatg

SEQ ID NO: 1726590 - DNA, 15 bp, Homo sapiens
ggtctttctgaatgt

SEQ ID NO: 1726591 - DNA, 15 bp, Homo sapiens
gtctttctgaatgta

SEQ ID NO: 1726592 - DNA, 15 bp, Homo sapiens
tctttctgaatgtaa

SEQ ID NO: 1726593 - DNA, 15 bp, Homo sapiens
ctttctgaatgtaaa

SEQ ID NO: 1726594 - DNA, 15 bp, Homo sapiens
tttctgaatgtaaac

SEQ ID NO: 1726595 - DNA, 15 bp, Homo sapiens
ttctgaatgtaaaca

SEQ ID NO: 1726596 - DNA, 15 bp, Homo sapiens
tctgaatgtaaacat

SEQ ID NO: 1726597 - DNA, 15 bp, Homo sapiens
ctgaatgtaaacatt

SEQ ID NO: 1726598 - DNA, 15 bp, Homo sapiens
tgaatgtaaacattt

SEQ ID NO: 1726599 - DNA, 15 bp, Homo sapiens
gaatgtaaacatttc

SEQ ID NO: 1726600 - DNA, 15 bp, Homo sapiens
aatgtaaacatttct

SEQ ID NO: 1726601 - DNA, 15 bp, Homo sapiens
atgtaaacatttctc

SEQ ID NO: 1726602 - DNA, 15 bp, Homo sapiens
tgtaaacatttctcc

SEQ ID NO: 1726603 - DNA, 15 bp, Homo sapiens
gtaaacatttctcct

SEQ ID NO: 1726604 - DNA, 15 bp, Homo sapiens
taaacatttctcctg

SEQ ID NO: 1726605 - DNA, 15 bp, Homo sapiens
aaacatttctcctgc

SEQ ID NO: 1726606 - DNA, 15 bp, Homo sapiens
aacatttctcctgct

SEQ ID NO: 1726607 - DNA, 15 bp, Homo sapiens
acatttctcctgctc

SEQ ID NO: 1726608 - DNA, 15 bp, Homo sapiens
catttctcctgctcg

SEQ ID NO: 1726609 - DNA, 15 bp, Homo sapiens
atttctcctgctcgc

SEQ ID NO: 1726610 - DNA, 15 bp, Homo sapiens
tttctcctgctcgct

SEQ ID NO: 1726611 - DNA, 15 bp, Homo sapiens
ttctcctgctcgctg

SEQ ID NO: 1726612 - DNA, 15 bp, Homo sapiens
tctcctgctcgctga

SEQ ID NO: 1726613 - DNA, 15 bp, Homo sapiens
ctcctgctcgctgag

SEQ ID NO: 1726614 - DNA, 15 bp, Homo sapiens
tcctgctcgctgaga

SEQ ID NO: 1726615 - DNA, 15 bp, Homo sapiens
cctgctcgctgagag

SEQ ID NO: 1726616 - DNA, 15 bp, Homo sapiens
ctgctcgctgagagc

SEQ ID NO: 1726617 - DNA, 15 bp, Homo sapiens
tgctcgctgagagcc

SEQ ID NO: 1726618 - DNA, 15 bp, Homo sapiens
gctcgctgagagccc

SEQ ID NO: 1726619 - DNA, 15 bp, Homo sapiens
ctcgctgagagcccc

SEQ ID NO: 1726620 - DNA, 15 bp, Homo sapiens
tcgctgagagcccct

SEQ ID NO: 1726621 - DNA, 15 bp, Homo sapiens
cgctgagagcccctt

SEQ ID NO: 1726622 - DNA, 15 bp, Homo sapiens
gctgagagccccttg

SEQ ID NO: 1726623 - DNA, 15 bp, Homo sapiens
ctgagagccccttgg

SEQ ID NO: 1726624 - DNA, 15 bp, Homo sapiens
tgagagccccttggc

SEQ ID NO: 1726625 - DNA, 15 bp, Homo sapiens
gagagccccttggcg

SEQ ID NO: 1726626 - DNA, 15 bp, Homo sapiens
agagccccttggcgg

SEQ ID NO: 1726627 - DNA, 15 bp, Homo sapiens
gagccccttggcgga

SEQ ID NO: 1726628 - DNA, 15 bp, Homo sapiens
agccccttggcggag

SEQ ID NO: 1726629 - DNA, 15 bp, Homo sapiens
gccccttggcggaga

SEQ ID NO: 1726630 - DNA, 15 bp, Homo sapiens
ccccttggcggagac

SEQ ID NO: 1726631 - DNA, 15 bp, Homo sapiens
cccttggcggagaca

SEQ ID NO: 1726632 - DNA, 15 bp, Homo sapiens
ccttggcggagacac

SEQ ID NO: 1726633 - DNA, 15 bp, Homo sapiens
cttggcggagacact

SEQ ID NO: 1726634 - DNA, 15 bp, Homo sapiens
ttggcggagacactg

SEQ ID NO: 1726635 - DNA, 15 bp, Homo sapiens
tggcggagacactgc

SEQ ID NO: 1726636 - DNA, 15 bp, Homo sapiens
ggcggagacactgcc

SEQ ID NO: 1726637 - DNA, 15 bp, Homo sapiens
gcggagacactgcca

SEQ ID NO: 1726638 - DNA, 15 bp, Homo sapiens
cggagacactgccac

SEQ ID NO: 1726639 - DNA, 15 bp, Homo sapiens
ggagacactgccact

SEQ ID NO: 1726640 - DNA, 15 bp, Homo sapiens
gagacactgccactg

SEQ ID NO: 1726641 - DNA, 15 bp, Homo sapiens
agacactgccactgg

SEQ ID NO: 1726642 - DNA, 15 bp, Homo sapiens
gacactgccactggt

SEQ ID NO: 1726643 - DNA, 15 bp, Homo sapiens
acactgccactggtg

SEQ ID NO: 1726644 - DNA, 15 bp, Homo sapiens
cactgccactggtgc

SEQ ID NO: 1726645 - DNA, 15 bp, Homo sapiens
actgccactggtgct

SEQ ID NO: 1726646 - DNA, 15 bp, Homo sapiens
ctgccactggtgctc

SEQ ID NO: 1726647 - DNA, 15 bp, Homo sapiens
tgccactggtgctcc

SEQ ID NO: 1726648 - DNA, 15 bp, Homo sapiens
gccactggtgctcct

SEQ ID NO: 1726649 - DNA, 15 bp, Homo sapiens
ccactggtgctcctg

SEQ ID NO: 1726650 - DNA, 15 bp, Homo sapiens
cactggtgctcctgg

SEQ ID NO: 1726651 - DNA, 15 bp, Homo sapiens
actggtgctcctggg

SEQ ID NO: 1726652 - DNA, 15 bp, Homo sapiens
ctggtgctcctgggc

SEQ ID NO: 1726653 - DNA, 15 bp, Homo sapiens
tggtgctcctgggcg

SEQ ID NO: 1726654 - DNA, 15 bp, Homo sapiens
ggtgctcctgggcgg

SEQ ID NO: 1726655 - DNA, 15 bp, Homo sapiens
gtgctcctgggcggt

SEQ ID NO: 1726656 - DNA, 15 bp, Homo sapiens
tgctcctgggcggtg

SEQ ID NO: 1726657 - DNA, 15 bp, Homo sapiens
gctcctgggcggtgc

SEQ ID NO: 1726658 - DNA, 15 bp, Homo sapiens
ctcctgggcggtgcc

SEQ ID NO: 1726659 - DNA, 15 bp, Homo sapiens
tcctgggcggtgccg

SEQ ID NO: 1726660 - DNA, 15 bp, Homo sapiens
cctgggcggtgccgg

SEQ ID NO: 1726661 - DNA, 15 bp, Homo sapiens
ctgggcggtgccgga

SEQ ID NO: 1726662 - DNA, 15 bp, Homo sapiens
tgggcggtgccggat

SEQ ID NO: 1726663 - DNA, 15 bp, Homo sapiens
gggcggtgccggatc

SEQ ID NO: 1726664 - DNA, 15 bp, Homo sapiens
ggcggtgccggatcc

SEQ ID NO: 1726665 - DNA, 15 bp, Homo sapiens
gcggtgccggatccc

SEQ ID NO: 1726666 - DNA, 15 bp, Homo sapiens
cggtgccggatcccc

SEQ ID NO: 1726667 - DNA, 15 bp, Homo sapiens
ggtgccggatcccct

SEQ ID NO: 1726668 - DNA, 15 bp, Homo sapiens
gtgccggatcccctt

SEQ ID NO: 1726669 - DNA, 15 bp, Homo sapiens
tgccggatccccttg

SEQ ID NO: 1726670 - DNA, 15 bp, Homo sapiens
gccggatccccttgg

SEQ ID NO: 1726671 - DNA, 15 bp, Homo sapiens
ccggatccccttggg

SEQ ID NO: 1726672 - DNA, 15 bp, Homo sapiens
cggatccccttgggc

SEQ ID NO: 1726673 - DNA, 15 bp, Homo sapiens
ggatccccttgggcg

SEQ ID NO: 1726674 - DNA, 15 bp, Homo sapiens
gatccccttgggcgg

SEQ ID NO: 1726675 - DNA, 15 bp, Homo sapiens
atccccttgggcggg

SEQ ID NO: 1726676 - DNA, 15 bp, Homo sapiens
tccccttgggcggga

SEQ ID NO: 1726677 - DNA, 15 bp, Homo sapiens
ccccttgggcgggag

SEQ ID NO: 1726678 - DNA, 15 bp, Homo sapiens
cccttgggcgggagc

SEQ ID NO: 1726679 - DNA, 15 bp, Homo sapiens
ccttgggcgggagca

SEQ ID NO: 1726680 - DNA, 15 bp, Homo sapiens
cttgggcgggagcag

SEQ ID NO: 1726681 - DNA, 15 bp, Homo sapiens
ttgggcgggagcagc

SEQ ID NO: 1726682 - DNA, 15 bp, Homo sapiens
tgggcgggagcagcg

SEQ ID NO: 1726683 - DNA, 15 bp, Homo sapiens
gggcgggagcagcgg

SEQ ID NO: 1726684 - DNA, 15 bp, Homo sapiens
ggcgggagcagcggg

SEQ ID NO: 1726685 - DNA, 15 bp, Homo sapiens
gcgggagcagcgggg

SEQ ID NO: 1726686 - DNA, 15 bp, Homo sapiens
cgggagcagcgggga

SEQ ID NO: 1726687 - DNA, 15 bp, Homo sapiens
gggagcagcggggag

SEQ ID NO: 1726688 - DNA, 15 bp, Homo sapiens
ggagcagcggggagc

SEQ ID NO: 1726689 - DNA, 15 bp, Homo sapiens
gagcagcggggagcc

SEQ ID NO: 1726690 - DNA, 15 bp, Homo sapiens
agcagcggggagccc

SEQ ID NO: 1726691 - DNA, 15 bp, Homo sapiens
gcagcggggagcccc

SEQ ID NO: 1726692 - DNA, 15 bp, Homo sapiens
cagcggggagcccct

SEQ ID NO: 1726693 - DNA, 15 bp, Homo sapiens
agcggggagcccctt

SEQ ID NO: 1726694 - DNA, 15 bp, Homo sapiens
gcggggagccccttc

SEQ ID NO: 1726695 - DNA, 15 bp, Homo sapiens
cggggagccccttcc

SEQ ID NO: 1726696 - DNA, 15 bp, Homo sapiens
ggggagccccttcct

SEQ ID NO: 1726697 - DNA, 15 bp, Homo sapiens
gggagccccttcctg

SEQ ID NO: 1726698 - DNA, 15 bp, Homo sapiens
ggagccccttcctgc

SEQ ID NO: 1726699 - DNA, 15 bp, Homo sapiens
gagccccttcctgcc

SEQ ID NO: 1726700 - DNA, 15 bp, Homo sapiens
agccccttcctgccc

SEQ ID NO: 1726701 - DNA, 15 bp, Homo sapiens
gccccttcctgccct

SEQ ID NO: 1726702 - DNA, 15 bp, Homo sapiens
ccccttcctgccctg

SEQ ID NO: 1726703 - DNA, 15 bp, Homo sapiens
cccttcctgccctgg

SEQ ID NO: 1726704 - DNA, 15 bp, Homo sapiens
ccttcctgccctggc

SEQ ID NO: 1726705 - DNA, 15 bp, Homo sapiens
cttcctgccctggct

SEQ ID NO: 1726706 - DNA, 15 bp, Homo sapiens
ttcctgccctggctg

SEQ ID NO: 1726707 - DNA, 15 bp, Homo sapiens
tcctgccctggctga

SEQ ID NO: 1726708 - DNA, 15 bp, Homo sapiens
cctgccctggctgaa

SEQ ID NO: 1726709 - DNA, 15 bp, Homo sapiens
ctgccctggctgaac

SEQ ID NO: 1726710 - DNA, 15 bp, Homo sapiens
tgccctggctgaaca

SEQ ID NO: 1726711 - DNA, 15 bp, Homo sapiens
gccctggctgaacag

SEQ ID NO: 1726712 - DNA, 15 bp, Homo sapiens
ccctggctgaacagg

SEQ ID NO: 1726713 - DNA, 15 bp, Homo sapiens
cctggctgaacaggt

SEQ ID NO: 1726714 - DNA, 15 bp, Homo sapiens
ctggctgaacaggtc

SEQ ID NO: 1726715 - DNA, 15 bp, Homo sapiens
tggctgaacaggtcg

SEQ ID NO: 1726716 - DNA, 15 bp, Homo sapiens
ggctgaacaggtcgg

SEQ ID NO: 1726717 - DNA, 15 bp, Homo sapiens
gctgaacaggtcggc

SEQ ID NO: 1726718 - DNA, 15 bp, Homo sapiens
ctgaacaggtcggct

SEQ ID NO: 1726719 - DNA, 15 bp, Homo sapiens
tgaacaggtcggctg

SEQ ID NO: 1726720 - DNA, 15 bp, Homo sapiens
gaacaggtcggctgt

SEQ ID NO: 1726721 - DNA, 15 bp, Homo sapiens
aacaggtcggctgtg

SEQ ID NO: 1726722 - DNA, 15 bp, Homo sapiens
acaggtcggctgtgc

SEQ ID NO: 1726723 - DNA, 15 bp, Homo sapiens
caggtcggctgtgcc

SEQ ID NO: 1726724 - DNA, 15 bp, Homo sapiens
aggtcggctgtgccc

SEQ ID NO: 1726725 - DNA, 15 bp, Homo sapiens
ggtcggctgtgccct

SEQ ID NO: 1726726 - DNA, 15 bp, Homo sapiens
gtcggctgtgccctg

SEQ ID NO: 1726727 - DNA, 15 bp, Homo sapiens
tcggctgtgccctgt

SEQ ID NO: 1726728 - DNA, 15 bp, Homo sapiens
cggctgtgccctgtg

SEQ ID NO: 1726729 - DNA, 15 bp, Homo sapiens
ggctgtgccctgtgc

SEQ ID NO: 1726730 - DNA, 15 bp, Homo sapiens
gctgtgccctgtgct

SEQ ID NO: 1726731 - DNA, 15 bp, Homo sapiens
ctgtgccctgtgctc

SEQ ID NO: 1726732 - DNA, 15 bp, Homo sapiens
tgtgccctgtgctcc

SEQ ID NO: 1726733 - DNA, 15 bp, Homo sapiens
gtgccctgtgctcca

SEQ ID NO: 1726734 - DNA, 15 bp, Homo sapiens
tgccctgtgctccag

SEQ ID NO: 1726735 - DNA, 15 bp, Homo sapiens
gccctgtgctccagc

SEQ ID NO: 1726736 - DNA, 15 bp, Homo sapiens
ccctgtgctccagcg

SEQ ID NO: 1726737 - DNA, 15 bp, Homo sapiens
cctgtgctccagcgc

SEQ ID NO: 1726738 - DNA, 15 bp, Homo sapiens
ctgtgctccagcgct

SEQ ID NO: 1726739 - DNA, 15 bp, Homo sapiens
tgtgctccagcgctc

SEQ ID NO: 1726740 - DNA, 15 bp, Homo sapiens
gtgctccagcgctct

SEQ ID NO: 1726741 - DNA, 15 bp, Homo sapiens
tgctccagcgctctc

SEQ ID NO: 1726742 - DNA, 15 bp, Homo sapiens
gctccagcgctctct

SEQ ID NO: 1726743 - DNA, 15 bp, Homo sapiens
ctccagcgctctctg

SEQ ID NO: 1726744 - DNA, 15 bp, Homo sapiens
tccagcgctctctgc

SEQ ID NO: 1726745 - DNA, 15 bp, Homo sapiens
ccagcgctctctgca

SEQ ID NO: 1726746 - DNA, 15 bp, Homo sapiens
cagcgctctctgcac

SEQ ID NO: 1726747 - DNA, 15 bp, Homo sapiens
agcgctctctgcacc

SEQ ID NO: 1726748 - DNA, 15 bp, Homo sapiens
gcgctctctgcacct

SEQ ID NO: 1726749 - DNA, 15 bp, Homo sapiens
cgctctctgcacctc

SEQ ID NO: 1726750 - DNA, 15 bp, Homo sapiens
gctctctgcacctca

SEQ ID NO: 1726751 - DNA, 15 bp, Homo sapiens
ctctctgcacctcat

SEQ ID NO: 1726752 - DNA, 15 bp, Homo sapiens
tctctgcacctcatg

SEQ ID NO: 1726753 - DNA, 15 bp, Homo sapiens
ctctgcacctcatgg

SEQ ID NO: 1726754 - DNA, 15 bp, Homo sapiens
tctgcacctcatggc

SEQ ID NO: 1726755 - DNA, 15 bp, Homo sapiens
ctgcacctcatggcc

SEQ ID NO: 1726756 - DNA, 15 bp, Homo sapiens
tgcacctcatggccc

SEQ ID NO: 1726757 - DNA, 15 bp, Homo sapiens
gcacctcatggccct

SEQ ID NO: 1726758 - DNA, 15 bp, Homo sapiens
cacctcatggccctt

SEQ ID NO: 1726759 - DNA, 15 bp, Homo sapiens
acctcatggcccttc

SEQ ID NO: 1726760 - DNA, 15 bp, Homo sapiens
cctcatggcccttct

SEQ ID NO: 1726761 - DNA, 15 bp, Homo sapiens
ctcatggcccttctg

SEQ ID NO: 1726762 - DNA, 15 bp, Homo sapiens
tcatggcccttctgc

SEQ ID NO: 1726763 - DNA, 15 bp, Homo sapiens
catggcccttctgcc

SEQ ID NO: 1726764 - DNA, 15 bp, Homo sapiens
atggcccttctgccg

SEQ ID NO: 1726765 - DNA, 15 bp, Homo sapiens
tggcccttctgccgg

SEQ ID NO: 1726766 - DNA, 15 bp, Homo sapiens
ggcccttctgccggc

SEQ ID NO: 1726767 - DNA, 15 bp, Homo sapiens
gcccttctgccggct

SEQ ID NO: 1726768 - DNA, 15 bp, Homo sapiens
cccttctgccggctg

SEQ ID NO: 1726769 - DNA, 15 bp, Homo sapiens
ccttctgccggctgt

SEQ ID NO: 1726770 - DNA, 15 bp, Homo sapiens
cttctgccggctgtg

SEQ ID NO: 1726771 - DNA, 15 bp, Homo sapiens
ttctgccggctgtgg

SEQ ID NO: 1726772 - DNA, 15 bp, Homo sapiens
tctgccggctgtggg

SEQ ID NO: 1726773 - DNA, 15 bp, Homo sapiens
ctgccggctgtggga

SEQ ID NO: 1726774 - DNA, 15 bp, Homo sapiens
tgccggctgtgggac

SEQ ID NO: 1726775 - DNA, 15 bp, Homo sapiens
gccggctgtgggacc

SEQ ID NO: 1726776 - DNA, 15 bp, Homo sapiens
ccggctgtgggaccc

SEQ ID NO: 1726777 - DNA, 15 bp, Homo sapiens
cggctgtgggacccc

SEQ ID NO: 1726778 - DNA, 15 bp, Homo sapiens
ggctgtgggaccccc

SEQ ID NO: 1726779 - DNA, 15 bp, Homo sapiens
gctgtgggacccccc

SEQ ID NO: 1726780 - DNA, 15 bp, Homo sapiens
ctgtgggacccccct

SEQ ID NO: 1726781 - DNA, 15 bp, Homo sapiens
tgtgggacccccctg

SEQ ID NO: 1726782 - DNA, 15 bp, Homo sapiens
gtgggacccccctgg

SEQ ID NO: 1726783 - DNA, 15 bp, Homo sapiens
tgggacccccctggc

SEQ ID NO: 1726784 - DNA, 15 bp, Homo sapiens
gggacccccctggcc

SEQ ID NO: 1726785 - DNA, 15 bp, Homo sapiens
ggacccccctggccc

SEQ ID NO: 1726786 - DNA, 15 bp, Homo sapiens
gacccccctggccca

SEQ ID NO: 1726787 - DNA, 15 bp, Homo sapiens
acccccctggcccac

SEQ ID NO: 1726788 - DNA, 15 bp, Homo sapiens
cccccctggcccact

SEQ ID NO: 1726789 - DNA, 15 bp, Homo sapiens
ccccctggcccactg

SEQ ID NO: 1726790 - DNA, 15 bp, Homo sapiens
cccctggcccactga

SEQ ID NO: 1726791 - DNA, 15 bp, Homo sapiens
ccctggcccactgac

SEQ ID NO: 1726792 - DNA, 15 bp, Homo sapiens
cctggcccactgact

SEQ ID NO: 1726793 - DNA, 15 bp, Homo sapiens
ctggcccactgactc

SEQ ID NO: 1726794 - DNA, 15 bp, Homo sapiens
tggcccactgactcc

SEQ ID NO: 1726795 - DNA, 15 bp, Homo sapiens
ggcccactgactccg

SEQ ID NO: 1726796 - DNA, 15 bp, Homo sapiens
gcccactgactccgc

SEQ ID NO: 1726797 - DNA, 15 bp, Homo sapiens
cccactgactccgcg

SEQ ID NO: 1726798 - DNA, 15 bp, Homo sapiens
ccactgactccgcgt

SEQ ID NO: 1726799 - DNA, 15 bp, Homo sapiens
cactgactccgcgtg

SEQ ID NO: 1726800 - DNA, 15 bp, Homo sapiens
actgactccgcgtgc

SEQ ID NO: 1726801 - DNA, 15 bp, Homo sapiens
ctgactccgcgtgca

SEQ ID NO: 1726802 - DNA, 15 bp, Homo sapiens
tgactccgcgtgcac

SEQ ID NO: 1726803 - DNA, 15 bp, Homo sapiens
gactccgcgtgcaca

SEQ ID NO: 1726804 - DNA, 15 bp, Homo sapiens
actccgcgtgcacac

SEQ ID NO: 1726805 - DNA, 15 bp, Homo sapiens
ctccgcgtgcacacg

SEQ ID NO: 1726806 - DNA, 15 bp, Homo sapiens
tccgcgtgcacacgc

SEQ ID NO: 1726807 - DNA, 15 bp, Homo sapiens
ccgcgtgcacacgcc

SEQ ID NO: 1726808 - DNA, 15 bp, Homo sapiens
cgcgtgcacacgcca

SEQ ID NO: 1726809 - DNA, 15 bp, Homo sapiens
gcgtgcacacgccag

SEQ ID NO: 1726810 - DNA, 15 bp, Homo sapiens
cgtgcacacgccagg

SEQ ID NO: 1726811 - DNA, 15 bp, Homo sapiens
gtgcacacgccaggc

SEQ ID NO: 1726812 - DNA, 15 bp, Homo sapiens
tgcacacgccaggcg

SEQ ID NO: 1726813 - DNA, 15 bp, Homo sapiens
gcacacgccaggcgg

SEQ ID NO: 1726814 - DNA, 15 bp, Homo sapiens
cacacgccaggcggt

SEQ ID NO: 1726815 - DNA, 15 bp, Homo sapiens
acacgccaggcggtg

SEQ ID NO: 1726816 - DNA, 15 bp, Homo sapiens
cacgccaggcggtgg

SEQ ID NO: 1726817 - DNA, 15 bp, Homo sapiens
acgccaggcggtggg

SEQ ID NO: 1726818 - DNA, 15 bp, Homo sapiens
cgccaggcggtgggg

SEQ ID NO: 1726819 - DNA, 15 bp, Homo sapiens
gccaggcggtggggc

SEQ ID NO: 1726820 - DNA, 15 bp, Homo sapiens
ccaggcggtggggcc

SEQ ID NO: 1726821 - DNA, 15 bp, Homo sapiens
caggcggtggggccc

SEQ ID NO: 1726822 - DNA, 15 bp, Homo sapiens
aggcggtggggcccg

SEQ ID NO: 1726823 - DNA, 15 bp, Homo sapiens
ggcggtggggcccgc

SEQ ID NO: 1726824 - DNA, 15 bp, Homo sapiens
gcggtggggcccgct

SEQ ID NO: 1726825 - DNA, 15 bp, Homo sapiens
cggtggggcccgctc

SEQ ID NO: 1726826 - DNA, 15 bp, Homo sapiens
ggtggggcccgctcc

SEQ ID NO: 1726827 - DNA, 15 bp, Homo sapiens
gtggggcccgctcct

SEQ ID NO: 1726828 - DNA, 15 bp, Homo sapiens
tggggcccgctcctt

SEQ ID NO: 1726829 - DNA, 15 bp, Homo sapiens
ggggcccgctccttc

SEQ ID NO: 1726830 - DNA, 15 bp, Homo sapiens
gggcccgctccttcc

SEQ ID NO: 1726831 - DNA, 15 bp, Homo sapiens
ggcccgctccttcct

SEQ ID NO: 1726832 - DNA, 15 bp, Homo sapiens
gcccgctccttcctg

SEQ ID NO: 1726833 - DNA, 15 bp, Homo sapiens
cccgctccttcctgc

SEQ ID NO: 1726834 - DNA, 15 bp, Homo sapiens
ccgctccttcctgca

SEQ ID NO: 1726835 - DNA, 15 bp, Homo sapiens
cgctccttcctgcac

SEQ ID NO: 1726836 - DNA, 15 bp, Homo sapiens
gctccttcctgcaca

SEQ ID NO: 1726837 - DNA, 15 bp, Homo sapiens
ctccttcctgcacag

SEQ ID NO: 1726838 - DNA, 15 bp, Homo sapiens
tccttcctgcacagc

SEQ ID NO: 1726839 - DNA, 15 bp, Homo sapiens
ccttcctgcacagca

SEQ ID NO: 1726840 - DNA, 15 bp, Homo sapiens
cttcctgcacagcaa

SEQ ID NO: 1726841 - DNA, 15 bp, Homo sapiens
ttcctgcacagcaac

SEQ ID NO: 1726842 - DNA, 15 bp, Homo sapiens
tcctgcacagcaact

SEQ ID NO: 1726843 - DNA, 15 bp, Homo sapiens
cctgcacagcaactc

SEQ ID NO: 1726844 - DNA, 15 bp, Homo sapiens
ctgcacagcaactct

SEQ ID NO: 1726845 - DNA, 15 bp, Homo sapiens
tgcacagcaactctg

SEQ ID NO: 1726846 - DNA, 15 bp, Homo sapiens
gcacagcaactctgg

SEQ ID NO: 1726847 - DNA, 15 bp, Homo sapiens
cacagcaactctggc

SEQ ID NO: 1726848 - DNA, 15 bp, Homo sapiens
acagcaactctggcc

SEQ ID NO: 1726849 - DNA, 15 bp, Homo sapiens
cagcaactctggcct

SEQ ID NO: 1726850 - DNA, 15 bp, Homo sapiens
agcaactctggcctg

SEQ ID NO: 1726851 - DNA, 15 bp, Homo sapiens
gcaactctggcctga

SEQ ID NO: 1726852 - DNA, 15 bp, Homo sapiens
caactctggcctgaa

SEQ ID NO: 1726853 - DNA, 15 bp, Homo sapiens
aactctggcctgaat

SEQ ID NO: 1726854 - DNA, 15 bp, Homo sapiens
actctggcctgaatg

SEQ ID NO: 1726855 - DNA, 15 bp, Homo sapiens
ctctggcctgaatga

SEQ ID NO: 1726856 - DNA, 15 bp, Homo sapiens
tctggcctgaatgag

SEQ ID NO: 1726857 - DNA, 15 bp, Homo sapiens
ctggcctgaatgagc

SEQ ID NO: 1726858 - DNA, 15 bp, Homo sapiens
tggcctgaatgagcc

SEQ ID NO: 1726859 - DNA, 15 bp, Homo sapiens
ggcctgaatgagccc

SEQ ID NO: 1726860 - DNA, 15 bp, Homo sapiens
gcctgaatgagcccc

SEQ ID NO: 1726861 - DNA, 15 bp, Homo sapiens
cctgaatgagcccca

SEQ ID NO: 1726862 - DNA, 15 bp, Homo sapiens
ctgaatgagccccat

SEQ ID NO: 1726863 - DNA, 15 bp, Homo sapiens
tgaatgagccccatt

SEQ ID NO: 1726864 - DNA, 15 bp, Homo sapiens
gaatgagccccattt

SEQ ID NO: 1726865 - DNA, 15 bp, Homo sapiens
aatgagccccatttc

SEQ ID NO: 1726866 - DNA, 15 bp, Homo sapiens
atgagccccatttcc

SEQ ID NO: 1726867 - DNA, 15 bp, Homo sapiens
tgagccccatttccc

SEQ ID NO: 1726868 - DNA, 15 bp, Homo sapiens
gagccccatttcccg

SEQ ID NO: 1726869 - DNA, 15 bp, Homo sapiens
agccccatttcccga

SEQ ID NO: 1726870 - DNA, 15 bp, Homo sapiens
gccccatttcccgag

SEQ ID NO: 1726871 - DNA, 15 bp, Homo sapiens
ccccatttcccgaga

SEQ ID NO: 1726872 - DNA, 15 bp, Homo sapiens
cccatttcccgagag

SEQ ID NO: 1726873 - DNA, 15 bp, Homo sapiens
ccatttcccgagagc

SEQ ID NO: 1726874 - DNA, 15 bp, Homo sapiens
catttcccgagagca

SEQ ID NO: 1726875 - DNA, 15 bp, Homo sapiens
atttcccgagagcag

SEQ ID NO: 1726876 - DNA, 15 bp, Homo sapiens
tttcccgagagcagc

SEQ ID NO: 1726877 - DNA, 15 bp, Homo sapiens
ttcccgagagcagca

SEQ ID NO: 1726878 - DNA, 15 bp, Homo sapiens
tcccgagagcagcag

SEQ ID NO: 1726879 - DNA, 15 bp, Homo sapiens
cccgagagcagcagg

SEQ ID NO: 1726880 - DNA, 15 bp, Homo sapiens
ccgagagcagcaggg

SEQ ID NO: 1726881 - DNA, 15 bp, Homo sapiens
cgagagcagcagggc

SEQ ID NO: 1726882 - DNA, 15 bp, Homo sapiens
agagcagcagggccc

SEQ ID NO: 1726883 - DNA, 15 bp, Homo sapiens
gagcagcagggccct

SEQ ID NO: 1726884 - DNA, 15 bp, Homo sapiens
agcagcagggccctc

SEQ ID NO: 1726885 - DNA, 15 bp, Homo sapiens
gcagcagggccctct

SEQ ID NO: 1726886 - DNA, 15 bp, Homo sapiens
cagcagggccctctg

SEQ ID NO: 1726887 - DNA, 15 bp, Homo sapiens
agcagggccctctgc

SEQ ID NO: 1726888 - DNA, 15 bp, Homo sapiens
gcagggccctctgcc

SEQ ID NO: 1726889 - DNA, 15 bp, Homo sapiens
cagggccctctgcct

SEQ ID NO: 1726890 - DNA, 15 bp, Homo sapiens
agggccctctgcctg

SEQ ID NO: 1726891 - DNA, 15 bp, Homo sapiens
gggccctctgcctga

SEQ ID NO: 1726892 - DNA, 15 bp, Homo sapiens
ggccctctgcctgaa

SEQ ID NO: 1726893 - DNA, 15 bp, Homo sapiens
gccctctgcctgaac

SEQ ID NO: 1726894 - DNA, 15 bp, Homo sapiens
ccctctgcctgaact

SEQ ID NO: 1726895 - DNA, 15 bp, Homo sapiens
cctctgcctgaactt

SEQ ID NO: 1726896 - DNA, 15 bp, Homo sapiens
ctctgcctgaacttc

SEQ ID NO: 1726897 - DNA, 15 bp, Homo sapiens
tctgcctgaacttct

SEQ ID NO: 1726898 - DNA, 15 bp, Homo sapiens
ctgcctgaacttctg

SEQ ID NO: 1726899 - DNA, 15 bp, Homo sapiens
tgcctgaacttctga

SEQ ID NO: 1726900 - DNA, 15 bp, Homo sapiens
gcctgaacttctgaa

SEQ ID NO: 1726901 - DNA, 15 bp, Homo sapiens
cctgaacttctgaac

SEQ ID NO: 1726902 - DNA, 15 bp, Homo sapiens
ctgaacttctgaact

SEQ ID NO: 1726903 - DNA, 15 bp, Homo sapiens
tgaacttctgaactg

SEQ ID NO: 1726904 - DNA, 15 bp, Homo sapiens
gaacttctgaactgc

SEQ ID NO: 1726905 - DNA, 15 bp, Homo sapiens
aacttctgaactgct

SEQ ID NO: 1726906 - DNA, 15 bp, Homo sapiens
acttctgaactgctc

SEQ ID NO: 1726907 - DNA, 15 bp, Homo sapiens
cttctgaactgctca

SEQ ID NO: 1726908 - DNA, 15 bp, Homo sapiens
ttctgaactgctcag

SEQ ID NO: 1726909 - DNA, 15 bp, Homo sapiens
tctgaactgctcaga

SEQ ID NO: 1726910 - DNA, 15 bp, Homo sapiens
ctgaactgctcagac

SEQ ID NO: 1726911 - DNA, 15 bp, Homo sapiens
tgaactgctcagact

SEQ ID NO: 1726912 - DNA, 15 bp, Homo sapiens
gaactgctcagactc

SEQ ID NO: 1726913 - DNA, 15 bp, Homo sapiens
aactgctcagactcc

SEQ ID NO: 1726914 - DNA, 15 bp, Homo sapiens
actgctcagactcct

SEQ ID NO: 1726915 - DNA, 15 bp, Homo sapiens
ctgctcagactcctt

SEQ ID NO: 1726916 - DNA, 15 bp, Homo sapiens
tgctcagactccttg

SEQ ID NO: 1726917 - DNA, 15 bp, Homo sapiens
gctcagactccttgg

SEQ ID NO: 1726918 - DNA, 15 bp, Homo sapiens
ctcagactccttggc

SEQ ID NO: 1726919 - DNA, 15 bp, Homo sapiens
tcagactccttggcc

SEQ ID NO: 1726920 - DNA, 15 bp, Homo sapiens
cagactccttggcct

SEQ ID NO: 1726921 - DNA, 15 bp, Homo sapiens
agactccttggcctt

SEQ ID NO: 1726922 - DNA, 15 bp, Homo sapiens
gactccttggccttt

SEQ ID NO: 1726923 - DNA, 15 bp, Homo sapiens
actccttggcctttt

SEQ ID NO: 1726924 - DNA, 15 bp, Homo sapiens
ctccttggccttttc

SEQ ID NO: 1726925 - DNA, 15 bp, Homo sapiens
tccttggccttttcc

SEQ ID NO: 1726926 - DNA, 15 bp, Homo sapiens
ccttggccttttccg

SEQ ID NO: 1726927 - DNA, 15 bp, Homo sapiens
cttggccttttccgc

SEQ ID NO: 1726928 - DNA, 15 bp, Homo sapiens
ttggccttttccgcc

SEQ ID NO: 1726929 - DNA, 15 bp, Homo sapiens
tggccttttccgcca

SEQ ID NO: 1726930 - DNA, 15 bp, Homo sapiens
ggccttttccgccaa

SEQ ID NO: 1726931 - DNA, 15 bp, Homo sapiens
gccttttccgccaaa

SEQ ID NO: 1726932 - DNA, 15 bp, Homo sapiens
ccttttccgccaaaa

SEQ ID NO: 1726933 - DNA, 15 bp, Homo sapiens
cttttccgccaaaaa

SEQ ID NO: 1726934 - DNA, 15 bp, Homo sapiens
ttttccgccaaaaac

SEQ ID NO: 1726935 - DNA, 15 bp, Homo sapiens
tttccgccaaaaact

SEQ ID NO: 1726936 - DNA, 15 bp, Homo sapiens
ttccgccaaaaactt

SEQ ID NO: 1726937 - DNA, 15 bp, Homo sapiens
tccgccaaaaactta

SEQ ID NO: 1726938 - DNA, 15 bp, Homo sapiens
ccgccaaaaacttac

SEQ ID NO: 1726939 - DNA, 15 bp, Homo sapiens
cgccaaaaacttact

SEQ ID NO: 1726940 - DNA, 15 bp, Homo sapiens
gccaaaaacttacta

SEQ ID NO: 1726941 - DNA, 15 bp, Homo sapiens
ccaaaaacttactaa

SEQ ID NO: 1726942 - DNA, 15 bp, Homo sapiens
caaaaacttactaat

SEQ ID NO: 1726943 - DNA, 15 bp, Homo sapiens
aaaaacttactaatc

SEQ ID NO: 1726944 - DNA, 15 bp, Homo sapiens
aaaacttactaatct

SEQ ID NO: 1726945 - DNA, 15 bp, Homo sapiens
aaacttactaatcta

SEQ ID NO: 1726946 - DNA, 15 bp, Homo sapiens
aacttactaatctac

SEQ ID NO: 1726947 - DNA, 15 bp, Homo sapiens
acttactaatctaca

SEQ ID NO: 1726948 - DNA, 15 bp, Homo sapiens
cttactaatctacag

SEQ ID NO: 1726949 - DNA, 15 bp, Homo sapiens
ttactaatctacagt

SEQ ID NO: 1726950 - DNA, 15 bp, Homo sapiens
tactaatctacagtt

SEQ ID NO: 1726951 - DNA, 15 bp, Homo sapiens
actaatctacagttc

SEQ ID NO: 1726952 - DNA, 15 bp, Homo sapiens
ctaatctacagttcg

SEQ ID NO: 1726953 - DNA, 15 bp, Homo sapiens
taatctacagttcga

SEQ ID NO: 1726954 - DNA, 15 bp, Homo sapiens
aatctacagttcgat

SEQ ID NO: 1726955 - DNA, 15 bp, Homo sapiens
atctacagttcgatg

SEQ ID NO: 1726956 - DNA, 15 bp, Homo sapiens
tctacagttcgatgc

SEQ ID NO: 1726957 - DNA, 15 bp, Homo sapiens
ctacagttcgatgct

SEQ ID NO: 1726958 - DNA, 15 bp, Homo sapiens
tacagttcgatgctc

SEQ ID NO: 1726959 - DNA, 15 bp, Homo sapiens
acagttcgatgctct

SEQ ID NO: 1726960 - DNA, 15 bp, Homo sapiens
cagttcgatgctctc

SEQ ID NO: 1726961 - DNA, 15 bp, Homo sapiens
agttcgatgctctcg

SEQ ID NO: 1726962 - DNA, 15 bp, Homo sapiens
gttcgatgctctcgt

SEQ ID NO: 1726963 - DNA, 15 bp, Homo sapiens
ttcgatgctctcgtc

SEQ ID NO: 1726964 - DNA, 15 bp, Homo sapiens
tcgatgctctcgtca

SEQ ID NO: 1726965 - DNA, 15 bp, Homo sapiens
cgatgctctcgtcac

SEQ ID NO: 1726966 - DNA, 15 bp, Homo sapiens
gatgctctcgtcact

SEQ ID NO: 1726967 - DNA, 15 bp, Homo sapiens
atgctctcgtcactg

SEQ ID NO: 1726968 - DNA, 15 bp, Homo sapiens
tgctctcgtcactgt

SEQ ID NO: 1726969 - DNA, 15 bp, Homo sapiens
gctctcgtcactgtc

SEQ ID NO: 1726970 - DNA, 15 bp, Homo sapiens
ctctcgtcactgtcc

SEQ ID NO: 1726971 - DNA, 15 bp, Homo sapiens
tctcgtcactgtcca

SEQ ID NO: 1726972 - DNA, 15 bp, Homo sapiens
ctcgtcactgtccac

SEQ ID NO: 1726973 - DNA, 15 bp, Homo sapiens
tcgtcactgtccact

SEQ ID NO: 1726974 - DNA, 15 bp, Homo sapiens
cgtcactgtccactg

SEQ ID NO: 1726975 - DNA, 15 bp, Homo sapiens
gtcactgtccactga

SEQ ID NO: 1726976 - DNA, 15 bp, Homo sapiens
tcactgtccactgaa

SEQ ID NO: 1726977 - DNA, 15 bp, Homo sapiens
cactgtccactgaac

SEQ ID NO: 1726978 - DNA, 15 bp, Homo sapiens
actgtccactgaact

SEQ ID NO: 1726979 - DNA, 15 bp, Homo sapiens
ctgtccactgaactc

SEQ ID NO: 1726980 - DNA, 15 bp, Homo sapiens
tgtccactgaactcc

SEQ ID NO: 1726981 - DNA, 15 bp, Homo sapiens
gtccactgaactcct

SEQ ID NO: 1726982 - DNA, 15 bp, Homo sapiens
tccactgaactcctg

SEQ ID NO: 1726983 - DNA, 15 bp, Homo sapiens
ccactgaactcctgt

SEQ ID NO: 1726984 - DNA, 15 bp, Homo sapiens
cactgaactcctgtc

SEQ ID NO: 1726985 - DNA, 15 bp, Homo sapiens
actgaactcctgtcg

SEQ ID NO: 1726986 - DNA, 15 bp, Homo sapiens
ctgaactcctgtcgt

SEQ ID NO: 1726987 - DNA, 15 bp, Homo sapiens
tgaactcctgtcgtc

SEQ ID NO: 1726988 - DNA, 15 bp, Homo sapiens
gaactcctgtcgtca

SEQ ID NO: 1726989 - DNA, 15 bp, Homo sapiens
aactcctgtcgtcag

SEQ ID NO: 1726990 - DNA, 15 bp, Homo sapiens
actcctgtcgtcaga

SEQ ID NO: 1726991 - DNA, 15 bp, Homo sapiens
ctcctgtcgtcagac

SEQ ID NO: 1726992 - DNA, 15 bp, Homo sapiens
tcctgtcgtcagaca

SEQ ID NO: 1726993 - DNA, 15 bp, Homo sapiens
cctgtcgtcagacag

SEQ ID NO: 1726994 - DNA, 15 bp, Homo sapiens
ctgtcgtcagacagg

SEQ ID NO: 1726995 - DNA, 15 bp, Homo sapiens
tgtcgtcagacaggg

SEQ ID NO: 1726996 - DNA, 15 bp, Homo sapiens
gtcgtcagacaggga

SEQ ID NO: 1726997 - DNA, 15 bp, Homo sapiens
tcgtcagacagggag

SEQ ID NO: 1726998 - DNA, 15 bp, Homo sapiens
cgtcagacagggagc

SEQ ID NO: 1726999 - DNA, 15 bp, Homo sapiens
gtcagacagggagcc

SEQ ID NO: 1727000 - DNA, 15 bp, Homo sapiens
tcagacagggagccg

SEQ ID NO: 1727001 - DNA, 15 bp, Homo sapiens
cagacagggagccgg

SEQ ID NO: 1727002 - DNA, 15 bp, Homo sapiens
agacagggagccggg

SEQ ID NO: 1727003 - DNA, 15 bp, Homo sapiens
gacagggagccgggg

SEQ ID NO: 1727004 - DNA, 15 bp, Homo sapiens
acagggagccggggc

SEQ ID NO: 1727005 - DNA, 15 bp, Homo sapiens
cagggagccggggct

SEQ ID NO: 1727006 - DNA, 15 bp, Homo sapiens
agggagccggggctg

SEQ ID NO: 1727007 - DNA, 15 bp, Homo sapiens
gggagccggggctgg

SEQ ID NO: 1727008 - DNA, 15 bp, Homo sapiens
ggagccggggctggg

SEQ ID NO: 1727009 - DNA, 15 bp, Homo sapiens
gagccggggctggga

SEQ ID NO: 1727010 - DNA, 15 bp, Homo sapiens
agccggggctgggag

SEQ ID NO: 1727011 - DNA, 15 bp, Homo sapiens
gccggggctgggagc

SEQ ID NO: 1727012 - DNA, 15 bp, Homo sapiens
ccggggctgggagct

SEQ ID NO: 1727013 - DNA, 15 bp, Homo sapiens
cggggctgggagctg

SEQ ID NO: 1727014 - DNA, 15 bp, Homo sapiens
ggggctgggagctgg

SEQ ID NO: 1727015 - DNA, 15 bp, Homo sapiens
gggctgggagctggg

SEQ ID NO: 1727016 - DNA, 15 bp, Homo sapiens
ggctgggagctgggc

SEQ ID NO: 1727017 - DNA, 15 bp, Homo sapiens
gctgggagctgggcc

SEQ ID NO: 1727018 - DNA, 15 bp, Homo sapiens
ctgggagctgggccc

SEQ ID NO: 1727019 - DNA, 15 bp, Homo sapiens
tgggagctgggccct

SEQ ID NO: 1727020 - DNA, 15 bp, Homo sapiens
gggagctgggccctg

SEQ ID NO: 1727021 - DNA, 15 bp, Homo sapiens
ggagctgggccctgg

SEQ ID NO: 1727022 - DNA, 15 bp, Homo sapiens
gagctgggccctggc

SEQ ID NO: 1727023 - DNA, 15 bp, Homo sapiens
agctgggccctggca

SEQ ID NO: 1727024 - DNA, 15 bp, Homo sapiens
gctgggccctggcat

SEQ ID NO: 1727025 - DNA, 15 bp, Homo sapiens
ctgggccctggcatt

SEQ ID NO: 1727026 - DNA, 15 bp, Homo sapiens
tgggccctggcattc

SEQ ID NO: 1727027 - DNA, 15 bp, Homo sapiens
gggccctggcattcc

SEQ ID NO: 1727028 - DNA, 15 bp, Homo sapiens
ggccctggcattccc

SEQ ID NO: 1727029 - DNA, 15 bp, Homo sapiens
gccctggcattccct

SEQ ID NO: 1727030 - DNA, 15 bp, Homo sapiens
ccctggcattccctg

SEQ ID NO: 1727031 - DNA, 15 bp, Homo sapiens
cctggcattccctgg

SEQ ID NO: 1727032 - DNA, 15 bp, Homo sapiens
ctggcattccctggg

SEQ ID NO: 1727033 - DNA, 15 bp, Homo sapiens
tggcattccctgggg

SEQ ID NO: 1727034 - DNA, 15 bp, Homo sapiens
ggcattccctgggga

SEQ ID NO: 1727035 - DNA, 15 bp, Homo sapiens
gcattccctggggaa

SEQ ID NO: 1727036 - DNA, 15 bp, Homo sapiens
cattccctggggaaa

SEQ ID NO: 1727037 - DNA, 15 bp, Homo sapiens
attccctggggaaat

SEQ ID NO: 1727038 - DNA, 15 bp, Homo sapiens
ttccctggggaaatg

SEQ ID NO: 1727039 - DNA, 15 bp, Homo sapiens
tccctggggaaatgg

SEQ ID NO: 1727040 - DNA, 15 bp, Homo sapiens
ccctggggaaatgga

SEQ ID NO: 1727041 - DNA, 15 bp, Homo sapiens
cctggggaaatggat

SEQ ID NO: 1727042 - DNA, 15 bp, Homo sapiens
ctggggaaatggatt

SEQ ID NO: 1727043 - DNA, 15 bp, Homo sapiens
tggggaaatggattc

SEQ ID NO: 1727044 - DNA, 15 bp, Homo sapiens
ggggaaatggattcc

SEQ ID NO: 1727045 - DNA, 15 bp, Homo sapiens
gggaaatggattccc

SEQ ID NO: 1727046 - DNA, 15 bp, Homo sapiens
ggaaatggattccct

SEQ ID NO: 1727047 - DNA, 15 bp, Homo sapiens
gaaatggattccctt

SEQ ID NO: 1727048 - DNA, 15 bp, Homo sapiens
aaatggattcccttc

SEQ ID NO: 1727049 - DNA, 15 bp, Homo sapiens
aatggattcccttca

SEQ ID NO: 1727050 - DNA, 15 bp, Homo sapiens
atggattcccttcag

SEQ ID NO: 1727051 - DNA, 15 bp, Homo sapiens
tggattcccttcaga

SEQ ID NO: 1727052 - DNA, 15 bp, Homo sapiens
ggattcccttcagag

SEQ ID NO: 1727053 - DNA, 15 bp, Homo sapiens
gattcccttcagagg

SEQ ID NO: 1727054 - DNA, 15 bp, Homo sapiens
attcccttcagaggc

SEQ ID NO: 1727055 - DNA, 15 bp, Homo sapiens
ttcccttcagaggcg

SEQ ID NO: 1727056 - DNA, 15 bp, Homo sapiens
tcccttcagaggcgg

SEQ ID NO: 1727057 - DNA, 15 bp, Homo sapiens
cccttcagaggcgga

SEQ ID NO: 1727058 - DNA, 15 bp, Homo sapiens
ccttcagaggcggag

SEQ ID NO: 1727059 - DNA, 15 bp, Homo sapiens
cttcagaggcggagg

SEQ ID NO: 1727060 - DNA, 15 bp, Homo sapiens
ttcagaggcggaggc

SEQ ID NO: 1727061 - DNA, 15 bp, Homo sapiens
tcagaggcggaggca

SEQ ID NO: 1727062 - DNA, 15 bp, Homo sapiens
cagaggcggaggcag

SEQ ID NO: 1727063 - DNA, 15 bp, Homo sapiens
agaggcggaggcaga

SEQ ID NO: 1727064 - DNA, 15 bp, Homo sapiens
gaggcggaggcagag

SEQ ID NO: 1727065 - DNA, 15 bp, Homo sapiens
aggcggaggcagagg

SEQ ID NO: 1727066 - DNA, 15 bp, Homo sapiens
ggcggaggcagaggc

SEQ ID NO: 1727067 - DNA, 15 bp, Homo sapiens
gcggaggcagaggcg

SEQ ID NO: 1727068 - DNA, 15 bp, Homo sapiens
cggaggcagaggcgc

SEQ ID NO: 1727069 - DNA, 15 bp, Homo sapiens
ggaggcagaggcgca

SEQ ID NO: 1727070 - DNA, 15 bp, Homo sapiens
gaggcagaggcgcat

SEQ ID NO: 1727071 - DNA, 15 bp, Homo sapiens
aggcagaggcgcatc

SEQ ID NO: 1727072 - DNA, 15 bp, Homo sapiens
ggcagaggcgcatcc

SEQ ID NO: 1727073 - DNA, 15 bp, Homo sapiens
gcagaggcgcatccc

SEQ ID NO: 1727074 - DNA, 15 bp, Homo sapiens
cagaggcgcatcccc

SEQ ID NO: 1727075 - DNA, 15 bp, Homo sapiens
agaggcgcatcccct

SEQ ID NO: 1727076 - DNA, 15 bp, Homo sapiens
gaggcgcatcccctc

SEQ ID NO: 1727077 - DNA, 15 bp, Homo sapiens
aggcgcatcccctca

SEQ ID NO: 1727078 - DNA, 15 bp, Homo sapiens
ggcgcatcccctcac

SEQ ID NO: 1727079 - DNA, 15 bp, Homo sapiens
gcgcatcccctcact

SEQ ID NO: 1727080 - DNA, 15 bp, Homo sapiens
cgcatcccctcactc

SEQ ID NO: 1727081 - DNA, 15 bp, Homo sapiens
gcatcccctcactcg

SEQ ID NO: 1727082 - DNA, 15 bp, Homo sapiens
catcccctcactcgg

SEQ ID NO: 1727083 - DNA, 15 bp, Homo sapiens
atcccctcactcgga

SEQ ID NO: 1727084 - DNA, 15 bp, Homo sapiens
tcccctcactcggaa

SEQ ID NO: 1727085 - DNA, 15 bp, Homo sapiens
cccctcactcggaag

SEQ ID NO: 1727086 - DNA, 15 bp, Homo sapiens
ccctcactcggaagg

SEQ ID NO: 1727087 - DNA, 15 bp, Homo sapiens
cctcactcggaaggc

SEQ ID NO: 1727088 - DNA, 15 bp, Homo sapiens
ctcactcggaaggcc

SEQ ID NO: 1727089 - DNA, 15 bp, Homo sapiens
tcactcggaaggccg

SEQ ID NO: 1727090 - DNA, 15 bp, Homo sapiens
cactcggaaggccgg

SEQ ID NO: 1727091 - DNA, 15 bp, Homo sapiens
actcggaaggccggg

SEQ ID NO: 1727092 - DNA, 15 bp, Homo sapiens
ctcggaaggccgggg

SEQ ID NO: 1727093 - DNA, 15 bp, Homo sapiens
tcggaaggccggggc

SEQ ID NO: 1727094 - DNA, 15 bp, Homo sapiens
cggaaggccggggcc

SEQ ID NO: 1727095 - DNA, 15 bp, Homo sapiens
ggaaggccggggccg

SEQ ID NO: 1727096 - DNA, 15 bp, Homo sapiens
gaaggccggggccgt

SEQ ID NO: 1727097 - DNA, 15 bp, Homo sapiens
aaggccggggccgtg

SEQ ID NO: 1727098 - DNA, 15 bp, Homo sapiens
aggccggggccgtgt

SEQ ID NO: 1727099 - DNA, 15 bp, Homo sapiens
ggccggggccgtgtc

SEQ ID NO: 1727100 - DNA, 15 bp, Homo sapiens
gccggggccgtgtcc

SEQ ID NO: 1727101 - DNA, 15 bp, Homo sapiens
ccggggccgtgtcct

SEQ ID NO: 1727102 - DNA, 15 bp, Homo sapiens
cggggccgtgtcctg

SEQ ID NO: 1727103 - DNA, 15 bp, Homo sapiens
ggggccgtgtcctgg

SEQ ID NO: 1727104 - DNA, 15 bp, Homo sapiens
gggccgtgtcctggc

SEQ ID NO: 1727105 - DNA, 15 bp, Homo sapiens
ggccgtgtcctggct

SEQ ID NO: 1727106 - DNA, 15 bp, Homo sapiens
gccgtgtcctggctc

SEQ ID NO: 1727107 - DNA, 15 bp, Homo sapiens
ccgtgtcctggctcc

SEQ ID NO: 1727108 - DNA, 15 bp, Homo sapiens
cgtgtcctggctcct

SEQ ID NO: 1727109 - DNA, 15 bp, Homo sapiens
gtgtcctggctcctg

SEQ ID NO: 1727110 - DNA, 15 bp, Homo sapiens
tgtcctggctcctga

SEQ ID NO: 1727111 - DNA, 15 bp, Homo sapiens
gtcctggctcctgac

SEQ ID NO: 1727112 - DNA, 15 bp, Homo sapiens
tcctggctcctgacg

SEQ ID NO: 1727113 - DNA, 15 bp, Homo sapiens
cctggctcctgacgc

SEQ ID NO: 1727114 - DNA, 15 bp, Homo sapiens
ctggctcctgacgcc

SEQ ID NO: 1727115 - DNA, 15 bp, Homo sapiens
tggctcctgacgccc

SEQ ID NO: 1727116 - DNA, 15 bp, Homo sapiens
ggctcctgacgccct

SEQ ID NO: 1727117 - DNA, 15 bp, Homo sapiens
gctcctgacgccctc

SEQ ID NO: 1727118 - DNA, 15 bp, Homo sapiens
ctcctgacgccctcc

SEQ ID NO: 1727119 - DNA, 15 bp, Homo sapiens
tcctgacgccctcct

SEQ ID NO: 1727120 - DNA, 15 bp, Homo sapiens
cctgacgccctcctg

SEQ ID NO: 1727121 - DNA, 15 bp, Homo sapiens
ctgacgccctcctgc

SEQ ID NO: 1727122 - DNA, 15 bp, Homo sapiens
tgacgccctcctgct

SEQ ID NO: 1727123 - DNA, 15 bp, Homo sapiens
gacgccctcctgctt

SEQ ID NO: 1727124 - DNA, 15 bp, Homo sapiens
acgccctcctgcttc

SEQ ID NO: 1727125 - DNA, 15 bp, Homo sapiens
cgccctcctgcttcg

SEQ ID NO: 1727126 - DNA, 15 bp, Homo sapiens
gccctcctgcttcgt

SEQ ID NO: 1727127 - DNA, 15 bp, Homo sapiens
ccctcctgcttcgtc

SEQ ID NO: 1727128 - DNA, 15 bp, Homo sapiens
cctcctgcttcgtct

SEQ ID NO: 1727129 - DNA, 15 bp, Homo sapiens
ctcctgcttcgtctt

SEQ ID NO: 1727130 - DNA, 15 bp, Homo sapiens
tcctgcttcgtcttc

SEQ ID NO: 1727131 - DNA, 15 bp, Homo sapiens
cctgcttcgtcttct

SEQ ID NO: 1727132 - DNA, 15 bp, Homo sapiens
ctgcttcgtcttctc

SEQ ID NO: 1727133 - DNA, 15 bp, Homo sapiens
tgcttcgtcttctct

SEQ ID NO: 1727134 - DNA, 15 bp, Homo sapiens
gcttcgtcttctctg

SEQ ID NO: 1727135 - DNA, 15 bp, Homo sapiens
cttcgtcttctctgc

SEQ ID NO: 1727136 - DNA, 15 bp, Homo sapiens
ttcgtcttctctgcc

SEQ ID NO: 1727137 - DNA, 15 bp, Homo sapiens
tcgtcttctctgcca

SEQ ID NO: 1727138 - DNA, 15 bp, Homo sapiens
cgtcttctctgccat

SEQ ID NO: 1727139 - DNA, 15 bp, Homo sapiens
gtcttctctgccata

SEQ ID NO: 1727140 - DNA, 15 bp, Homo sapiens
tcttctctgccatac

SEQ ID NO: 1727141 - DNA, 15 bp, Homo sapiens
cttctctgccatact

SEQ ID NO: 1727142 - DNA, 15 bp, Homo sapiens
ttctctgccatactg

SEQ ID NO: 1727143 - DNA, 15 bp, Homo sapiens
tctctgccatactgc

SEQ ID NO: 1727144 - DNA, 15 bp, Homo sapiens
ctctgccatactgcc

SEQ ID NO: 1727145 - DNA, 15 bp, Homo sapiens
tctgccatactgcca

SEQ ID NO: 1727146 - DNA, 15 bp, Homo sapiens
ctgccatactgccac

SEQ ID NO: 1727147 - DNA, 15 bp, Homo sapiens
tgccatactgccaca

SEQ ID NO: 1727148 - DNA, 15 bp, Homo sapiens
gccatactgccacag

SEQ ID NO: 1727149 - DNA, 15 bp, Homo sapiens
ccatactgccacaga

SEQ ID NO: 1727150 - DNA, 15 bp, Homo sapiens
catactgccacagac

SEQ ID NO: 1727151 - DNA, 15 bp, Homo sapiens
atactgccacagaca

SEQ ID NO: 1727152 - DNA, 15 bp, Homo sapiens
tactgccacagacac

SEQ ID NO: 1727153 - DNA, 15 bp, Homo sapiens
actgccacagacact

SEQ ID NO: 1727154 - DNA, 15 bp, Homo sapiens
ctgccacagacactg

SEQ ID NO: 1727155 - DNA, 15 bp, Homo sapiens
tgccacagacactgg

SEQ ID NO: 1727156 - DNA, 15 bp, Homo sapiens
gccacagacactggg

SEQ ID NO: 1727157 - DNA, 15 bp, Homo sapiens
ccacagacactggga

SEQ ID NO: 1727158 - DNA, 15 bp, Homo sapiens
cacagacactgggag

SEQ ID NO: 1727159 - DNA, 15 bp, Homo sapiens
acagacactgggagg

SEQ ID NO: 1727160 - DNA, 15 bp, Homo sapiens
cagacactgggaggt

SEQ ID NO: 1727161 - DNA, 15 bp, Homo sapiens
agacactgggaggtt

SEQ ID NO: 1727162 - DNA, 15 bp, Homo sapiens
gacactgggaggttt

SEQ ID NO: 1727163 - DNA, 15 bp, Homo sapiens
acactgggaggtttg

SEQ ID NO: 1727164 - DNA, 15 bp, Homo sapiens
cactgggaggtttgt

SEQ ID NO: 1727165 - DNA, 15 bp, Homo sapiens
actgggaggtttgtt

SEQ ID NO: 1727166 - DNA, 15 bp, Homo sapiens
ctgggaggtttgttc

SEQ ID NO: 1727167 - DNA, 15 bp, Homo sapiens
tgggaggtttgttcc

SEQ ID NO: 1727168 - DNA, 15 bp, Homo sapiens
gggaggtttgttccc

SEQ ID NO: 1727169 - DNA, 15 bp, Homo sapiens
ggaggtttgttccct

SEQ ID NO: 1727170 - DNA, 15 bp, Homo sapiens
gaggtttgttccctg

SEQ ID NO: 1727171 - DNA, 15 bp, Homo sapiens
aggtttgttccctgg

SEQ ID NO: 1727172 - DNA, 15 bp, Homo sapiens
ggtttgttccctgga

SEQ ID NO: 1727173 - DNA, 15 bp, Homo sapiens
gtttgttccctggac

SEQ ID NO: 1727174 - DNA, 15 bp, Homo sapiens
tttgttccctggacc

SEQ ID NO: 1727175 - DNA, 15 bp, Homo sapiens
ttgttccctggaccc

SEQ ID NO: 1727176 - DNA, 15 bp, Homo sapiens
tgttccctggaccct

SEQ ID NO: 1727177 - DNA, 15 bp, Homo sapiens
gttccctggaccctc

SEQ ID NO: 1727178 - DNA, 15 bp, Homo sapiens
ttccctggaccctcg

SEQ ID NO: 1727179 - DNA, 15 bp, Homo sapiens
tccctggaccctcgc

SEQ ID NO: 1727180 - DNA, 15 bp, Homo sapiens
ccctggaccctcgcc

SEQ ID NO: 1727181 - DNA, 15 bp, Homo sapiens
cctggaccctcgccg

SEQ ID NO: 1727182 - DNA, 15 bp, Homo sapiens
ctggaccctcgccgc

SEQ ID NO: 1727183 - DNA, 15 bp, Homo sapiens
tggaccctcgccgct

SEQ ID NO: 1727184 - DNA, 15 bp, Homo sapiens
ggaccctcgccgctg

SEQ ID NO: 1727185 - DNA, 15 bp, Homo sapiens
gaccctcgccgctgt

SEQ ID NO: 1727186 - DNA, 15 bp, Homo sapiens
accctcgccgctgtc

SEQ ID NO: 1727187 - DNA, 15 bp, Homo sapiens
ccctcgccgctgtct

SEQ ID NO: 1727188 - DNA, 15 bp, Homo sapiens
cctcgccgctgtctc

SEQ ID NO: 1727189 - DNA, 15 bp, Homo sapiens
ctcgccgctgtctct

SEQ ID NO: 1727190 - DNA, 15 bp, Homo sapiens
tcgccgctgtctctc

SEQ ID NO: 1727191 - DNA, 15 bp, Homo sapiens
cgccgctgtctctct

SEQ ID NO: 1727192 - DNA, 15 bp, Homo sapiens
gccgctgtctctctt

SEQ ID NO: 1727193 - DNA, 15 bp, Homo sapiens
ccgctgtctctcttg

SEQ ID NO: 1727194 - DNA, 15 bp, Homo sapiens
cgctgtctctcttgg

SEQ ID NO: 1727195 - DNA, 15 bp, Homo sapiens
gctgtctctcttgga

SEQ ID NO: 1727196 - DNA, 15 bp, Homo sapiens
ctgtctctcttggac

SEQ ID NO: 1727197 - DNA, 15 bp, Homo sapiens
tgtctctcttggact

SEQ ID NO: 1727198 - DNA, 15 bp, Homo sapiens
gtctctcttggactt

SEQ ID NO: 1727199 - DNA, 15 bp, Homo sapiens
tctctcttggacttg

SEQ ID NO: 1727200 - DNA, 15 bp, Homo sapiens
ctctcttggacttgg

SEQ ID NO: 1727201 - DNA, 15 bp, Homo sapiens
tctcttggacttgga

SEQ ID NO: 1727202 - DNA, 15 bp, Homo sapiens
ctcttggacttggag

SEQ ID NO: 1727203 - DNA, 15 bp, Homo sapiens
tcttggacttggaga

SEQ ID NO: 1727204 - DNA, 15 bp, Homo sapiens
cttggacttggagag

SEQ ID NO: 1727205 - DNA, 15 bp, Homo sapiens
ttggacttggagagt

SEQ ID NO: 1727206 - DNA, 15 bp, Homo sapiens
tggacttggagagtc

SEQ ID NO: 1727207 - DNA, 15 bp, Homo sapiens
ggacttggagagtca

SEQ ID NO: 1727208 - DNA, 15 bp, Homo sapiens
gacttggagagtcag

SEQ ID NO: 1727209 - DNA, 15 bp, Homo sapiens
acttggagagtcagc

SEQ ID NO: 1727210 - DNA, 15 bp, Homo sapiens
cttggagagtcagct

SEQ ID NO: 1727211 - DNA, 15 bp, Homo sapiens
ttggagagtcagcta

SEQ ID NO: 1727212 - DNA, 15 bp, Homo sapiens
tggagagtcagctat

SEQ ID NO: 1727213 - DNA, 15 bp, Homo sapiens
ggagagtcagctatt

SEQ ID NO: 1727214 - DNA, 15 bp, Homo sapiens
gagagtcagctatta

SEQ ID NO: 1727215 - DNA, 15 bp, Homo sapiens
agagtcagctattaa

SEQ ID NO: 1727216 - DNA, 15 bp, Homo sapiens
gagtcagctattaag

SEQ ID NO: 1727217 - DNA, 15 bp, Homo sapiens
agtcagctattaagc

SEQ ID NO: 1727218 - DNA, 15 bp, Homo sapiens
gtcagctattaagca

SEQ ID NO: 1727219 - DNA, 15 bp, Homo sapiens
tcagctattaagcac

SEQ ID NO: 1727220 - DNA, 15 bp, Homo sapiens
cagctattaagcacc

SEQ ID NO: 1727221 - DNA, 15 bp, Homo sapiens
agctattaagcaccg

SEQ ID NO: 1727222 - DNA, 15 bp, Homo sapiens
gctattaagcaccgg

SEQ ID NO: 1727223 - DNA, 15 bp, Homo sapiens
ctattaagcaccggc

SEQ ID NO: 1727224 - DNA, 15 bp, Homo sapiens
tattaagcaccggcg

SEQ ID NO: 1727225 - DNA, 15 bp, Homo sapiens
attaagcaccggcgg

SEQ ID NO: 1727226 - DNA, 15 bp, Homo sapiens
ttaagcaccggcggg

SEQ ID NO: 1727227 - DNA, 15 bp, Homo sapiens
taagcaccggcgggc

SEQ ID NO: 1727228 - DNA, 15 bp, Homo sapiens
aagcaccggcgggct

SEQ ID NO: 1727229 - DNA, 15 bp, Homo sapiens
agcaccggcgggctt

SEQ ID NO: 1727230 - DNA, 15 bp, Homo sapiens
gcaccggcgggcttc

SEQ ID NO: 1727231 - DNA, 15 bp, Homo sapiens
caccggcgggcttct

SEQ ID NO: 1727232 - DNA, 15 bp, Homo sapiens
accggcgggcttctg

SEQ ID NO: 1727233 - DNA, 15 bp, Homo sapiens
ccggcgggcttctgt

SEQ ID NO: 1727234 - DNA, 15 bp, Homo sapiens
cggcgggcttctgtc

SEQ ID NO: 1727235 - DNA, 15 bp, Homo sapiens
ggcgggcttctgtct

SEQ ID NO: 1727236 - DNA, 15 bp, Homo sapiens
gcgggcttctgtctt

SEQ ID NO: 1727237 - DNA, 15 bp, Homo sapiens
cgggcttctgtcttt

SEQ ID NO: 1727238 - DNA, 15 bp, Homo sapiens
gggcttctgtctttc

SEQ ID NO: 1727239 - DNA, 15 bp, Homo sapiens
ggcttctgtctttcc

SEQ ID NO: 1727240 - DNA, 15 bp, Homo sapiens
gcttctgtctttcca

SEQ ID NO: 1727241 - DNA, 15 bp, Homo sapiens
cttctgtctttccag

SEQ ID NO: 1727242 - DNA, 15 bp, Homo sapiens
ttctgtctttccagt

SEQ ID NO: 1727243 - DNA, 15 bp, Homo sapiens
tctgtctttccagtc

SEQ ID NO: 1727244 - DNA, 15 bp, Homo sapiens
ctgtctttccagtct

SEQ ID NO: 1727245 - DNA, 15 bp, Homo sapiens
tgtctttccagtctc

SEQ ID NO: 1727246 - DNA, 15 bp, Homo sapiens
gtctttccagtctct

SEQ ID NO: 1727247 - DNA, 15 bp, Homo sapiens
tctttccagtctctc

SEQ ID NO: 1727248 - DNA, 15 bp, Homo sapiens
ctttccagtctctcg

SEQ ID NO: 1727249 - DNA, 15 bp, Homo sapiens
tttccagtctctcgg

SEQ ID NO: 1727250 - DNA, 15 bp, Homo sapiens
ttccagtctctcggg

SEQ ID NO: 1727251 - DNA, 15 bp, Homo sapiens
tccagtctctcggga

SEQ ID NO: 1727252 - DNA, 15 bp, Homo sapiens
ccagtctctcgggag

SEQ ID NO: 1727253 - DNA, 15 bp, Homo sapiens
cagtctctcgggagc

SEQ ID NO: 1727254 - DNA, 15 bp, Homo sapiens
agtctctcgggagcc

SEQ ID NO: 1727255 - DNA, 15 bp, Homo sapiens
gtctctcgggagccc

SEQ ID NO: 1727256 - DNA, 15 bp, Homo sapiens
tctctcgggagcccg

SEQ ID NO: 1727257 - DNA, 15 bp, Homo sapiens
ctctcgggagcccgc

SEQ ID NO: 1727258 - DNA, 15 bp, Homo sapiens
tctcgggagcccgcc

SEQ ID NO: 1727259 - DNA, 15 bp, Homo sapiens
ctcgggagcccgccc

SEQ ID NO: 1727260 - DNA, 15 bp, Homo sapiens
tcgggagcccgccca

SEQ ID NO: 1727261 - DNA, 15 bp, Homo sapiens
cgggagcccgcccag

SEQ ID NO: 1727262 - DNA, 15 bp, Homo sapiens
gggagcccgcccagc

SEQ ID NO: 1727263 - DNA, 15 bp, Homo sapiens
ggagcccgcccagct

SEQ ID NO: 1727264 - DNA, 15 bp, Homo sapiens
gagcccgcccagctg

SEQ ID NO: 1727265 - DNA, 15 bp, Homo sapiens
agcccgcccagctgc

SEQ ID NO: 1727266 - DNA, 15 bp, Homo sapiens
gcccgcccagctgct

SEQ ID NO: 1727267 - DNA, 15 bp, Homo sapiens
cccgcccagctgctc

SEQ ID NO: 1727268 - DNA, 15 bp, Homo sapiens
ccgcccagctgctcc

SEQ ID NO: 1727269 - DNA, 15 bp, Homo sapiens
cgcccagctgctcca

SEQ ID NO: 1727270 - DNA, 15 bp, Homo sapiens
gcccagctgctccag

SEQ ID NO: 1727271 - DNA, 15 bp, Homo sapiens
cccagctgctccagg

SEQ ID NO: 1727272 - DNA, 15 bp, Homo sapiens
ccagctgctccagga

SEQ ID NO: 1727273 - DNA, 15 bp, Homo sapiens
cagctgctccaggaa

SEQ ID NO: 1727274 - DNA, 15 bp, Homo sapiens
agctgctccaggaag

SEQ ID NO: 1727275 - DNA, 15 bp, Homo sapiens
gctgctccaggaagt

SEQ ID NO: 1727276 - DNA, 15 bp, Homo sapiens
ctgctccaggaagtg

SEQ ID NO: 1727277 - DNA, 15 bp, Homo sapiens
tgctccaggaagtgc

SEQ ID NO: 1727278 - DNA, 15 bp, Homo sapiens
gctccaggaagtgca

SEQ ID NO: 1727279 - DNA, 15 bp, Homo sapiens
ctccaggaagtgcat

SEQ ID NO: 1727280 - DNA, 15 bp, Homo sapiens
tccaggaagtgcatc

SEQ ID NO: 1727281 - DNA, 15 bp, Homo sapiens
ccaggaagtgcatct

SEQ ID NO: 1727282 - DNA, 15 bp, Homo sapiens
caggaagtgcatctg

SEQ ID NO: 1727283 - DNA, 15 bp, Homo sapiens
aggaagtgcatctgg

SEQ ID NO: 1727284 - DNA, 15 bp, Homo sapiens
ggaagtgcatctggg

SEQ ID NO: 1727285 - DNA, 15 bp, Homo sapiens
gaagtgcatctgggc

SEQ ID NO: 1727286 - DNA, 15 bp, Homo sapiens
aagtgcatctgggca

SEQ ID NO: 1727287 - DNA, 15 bp, Homo sapiens
agtgcatctgggcag

SEQ ID NO: 1727288 - DNA, 15 bp, Homo sapiens
gtgcatctgggcagt

SEQ ID NO: 1727289 - DNA, 15 bp, Homo sapiens
tgcatctgggcagtg

SEQ ID NO: 1727290 - DNA, 15 bp, Homo sapiens
gcatctgggcagtgc

SEQ ID NO: 1727291 - DNA, 15 bp, Homo sapiens
catctgggcagtgct

SEQ ID NO: 1727292 - DNA, 15 bp, Homo sapiens
atctgggcagtgctg

SEQ ID NO: 1727293 - DNA, 15 bp, Homo sapiens
tctgggcagtgctga

SEQ ID NO: 1727294 - DNA, 15 bp, Homo sapiens
ctgggcagtgctgaa

SEQ ID NO: 1727295 - DNA, 15 bp, Homo sapiens
tgggcagtgctgaac

SEQ ID NO: 1727296 - DNA, 15 bp, Homo sapiens
gggcagtgctgaacc

SEQ ID NO: 1727297 - DNA, 15 bp, Homo sapiens
ggcagtgctgaacct

SEQ ID NO: 1727298 - DNA, 15 bp, Homo sapiens
gcagtgctgaacctg

SEQ ID NO: 1727299 - DNA, 15 bp, Homo sapiens
cagtgctgaacctga

SEQ ID NO: 1727300 - DNA, 15 bp, Homo sapiens
agtgctgaacctgac

SEQ ID NO: 1727301 - DNA, 15 bp, Homo sapiens
gtgctgaacctgacc

SEQ ID NO: 1727302 - DNA, 15 bp, Homo sapiens
tgctgaacctgacct

SEQ ID NO: 1727303 - DNA, 15 bp, Homo sapiens
gctgaacctgacctt

SEQ ID NO: 1727304 - DNA, 15 bp, Homo sapiens
ctgaacctgaccttc

SEQ ID NO: 1727305 - DNA, 15 bp, Homo sapiens
tgaacctgaccttcc

SEQ ID NO: 1727306 - DNA, 15 bp, Homo sapiens
gaacctgaccttcct

SEQ ID NO: 1727307 - DNA, 15 bp, Homo sapiens
aacctgaccttcctg

SEQ ID NO: 1727308 - DNA, 15 bp, Homo sapiens
acctgaccttcctgc

SEQ ID NO: 1727309 - DNA, 15 bp, Homo sapiens
cctgaccttcctgca

SEQ ID NO: 1727310 - DNA, 15 bp, Homo sapiens
ctgaccttcctgcac

SEQ ID NO: 1727311 - DNA, 15 bp, Homo sapiens
tgaccttcctgcacg

SEQ ID NO: 1727312 - DNA, 15 bp, Homo sapiens
gaccttcctgcacgc

SEQ ID NO: 1727313 - DNA, 15 bp, Homo sapiens
accttcctgcacgca

SEQ ID NO: 1727314 - DNA, 15 bp, Homo sapiens
ccttcctgcacgcag

SEQ ID NO: 1727315 - DNA, 15 bp, Homo sapiens
cttcctgcacgcagc

SEQ ID NO: 1727316 - DNA, 15 bp, Homo sapiens
ttcctgcacgcagcc

SEQ ID NO: 1727317 - DNA, 15 bp, Homo sapiens
tcctgcacgcagccc

SEQ ID NO: 1727318 - DNA, 15 bp, Homo sapiens
cctgcacgcagccct

SEQ ID NO: 1727319 - DNA, 15 bp, Homo sapiens
ctgcacgcagccctg

SEQ ID NO: 1727320 - DNA, 15 bp, Homo sapiens
tgcacgcagccctgg

SEQ ID NO: 1727321 - DNA, 15 bp, Homo sapiens
gcacgcagccctggg

SEQ ID NO: 1727322 - DNA, 15 bp, Homo sapiens
cacgcagccctgggt

SEQ ID NO: 1727323 - DNA, 15 bp, Homo sapiens
acgcagccctgggtt

SEQ ID NO: 1727324 - DNA, 15 bp, Homo sapiens
cgcagccctgggttc

SEQ ID NO: 1727325 - DNA, 15 bp, Homo sapiens
gcagccctgggttcc

SEQ ID NO: 1727326 - DNA, 15 bp, Homo sapiens
cagccctgggttccc

SEQ ID NO: 1727327 - DNA, 15 bp, Homo sapiens
agccctgggttccct

SEQ ID NO: 1727328 - DNA, 15 bp, Homo sapiens
gccctgggttccctg

SEQ ID NO: 1727329 - DNA, 15 bp, Homo sapiens
ccctgggttccctgc

SEQ ID NO: 1727330 - DNA, 15 bp, Homo sapiens
cctgggttccctgca

SEQ ID NO: 1727331 - DNA, 15 bp, Homo sapiens
ctgggttccctgcac

SEQ ID NO: 1727332 - DNA, 15 bp, Homo sapiens
tgggttccctgcacc

SEQ ID NO: 1727333 - DNA, 15 bp, Homo sapiens
gggttccctgcacct

SEQ ID NO: 1727334 - DNA, 15 bp, Homo sapiens
ggttccctgcacctc

SEQ ID NO: 1727335 - DNA, 15 bp, Homo sapiens
gttccctgcacctct

SEQ ID NO: 1727336 - DNA, 15 bp, Homo sapiens
ttccctgcacctctt

SEQ ID NO: 1727337 - DNA, 15 bp, Homo sapiens
tccctgcacctcttc

SEQ ID NO: 1727338 - DNA, 15 bp, Homo sapiens
ccctgcacctcttct

SEQ ID NO: 1727339 - DNA, 15 bp, Homo sapiens
cctgcacctcttctt

SEQ ID NO: 1727340 - DNA, 15 bp, Homo sapiens
ctgcacctcttcttg

SEQ ID NO: 1727341 - DNA, 15 bp, Homo sapiens
tgcacctcttcttga

SEQ ID NO: 1727342 - DNA, 15 bp, Homo sapiens
gcacctcttcttgag

SEQ ID NO: 1727343 - DNA, 15 bp, Homo sapiens
cacctcttcttgagc

SEQ ID NO: 1727344 - DNA, 15 bp, Homo sapiens
acctcttcttgagct

SEQ ID NO: 1727345 - DNA, 15 bp, Homo sapiens
cctcttcttgagctt

SEQ ID NO: 1727346 - DNA, 15 bp, Homo sapiens
ctcttcttgagcttt

SEQ ID NO: 1727347 - DNA, 15 bp, Homo sapiens
tcttcttgagctttc

SEQ ID NO: 1727348 - DNA, 15 bp, Homo sapiens
cttcttgagctttcg

SEQ ID NO: 1727349 - DNA, 15 bp, Homo sapiens
ttcttgagctttcgc

SEQ ID NO: 1727350 - DNA, 15 bp, Homo sapiens
tcttgagctttcgct

SEQ ID NO: 1727351 - DNA, 15 bp, Homo sapiens
cttgagctttcgctt

SEQ ID NO: 1727352 - DNA, 15 bp, Homo sapiens
ttgagctttcgcttg

SEQ ID NO: 1727353 - DNA, 15 bp, Homo sapiens
tgagctttcgcttgg

SEQ ID NO: 1727354 - DNA, 15 bp, Homo sapiens
gagctttcgcttgga

SEQ ID NO: 1727355 - DNA, 15 bp, Homo sapiens
agctttcgcttggac

SEQ ID NO: 1727356 - DNA, 15 bp, Homo sapiens
gctttcgcttggacc

SEQ ID NO: 1727357 - DNA, 15 bp, Homo sapiens
ctttcgcttggacct

SEQ ID NO: 1727358 - DNA, 15 bp, Homo sapiens
tttcgcttggacctt

SEQ ID NO: 1727359 - DNA, 15 bp, Homo sapiens
ttcgcttggacctta

SEQ ID NO: 1727360 - DNA, 15 bp, Homo sapiens
tcgcttggaccttaa

SEQ ID NO: 1727361 - DNA, 15 bp, Homo sapiens
cgcttggaccttaag

SEQ ID NO: 1727362 - DNA, 15 bp, Homo sapiens
gcttggaccttaagt

SEQ ID NO: 1727363 - DNA, 15 bp, Homo sapiens
cttggaccttaagtc

SEQ ID NO: 1727364 - DNA, 15 bp, Homo sapiens
ttggaccttaagtcc

SEQ ID NO: 1727365 - DNA, 15 bp, Homo sapiens
tggaccttaagtcct

SEQ ID NO: 1727366 - DNA, 15 bp, Homo sapiens
ggaccttaagtcctt

SEQ ID NO: 1727367 - DNA, 15 bp, Homo sapiens
gaccttaagtccttg

SEQ ID NO: 1727368 - DNA, 15 bp, Homo sapiens
accttaagtccttga

SEQ ID NO: 1727369 - DNA, 15 bp, Homo sapiens
ccttaagtccttgat

SEQ ID NO: 1727370 - DNA, 15 bp, Homo sapiens
cttaagtccttgatg

SEQ ID NO: 1727371 - DNA, 15 bp, Homo sapiens
ttaagtccttgatgg

SEQ ID NO: 1727372 - DNA, 15 bp, Homo sapiens
taagtccttgatggc

SEQ ID NO: 1727373 - DNA, 15 bp, Homo sapiens
aagtccttgatggcc

SEQ ID NO: 1727374 - DNA, 15 bp, Homo sapiens
agtccttgatggccg

SEQ ID NO: 1727375 - DNA, 15 bp, Homo sapiens
gtccttgatggccgt

SEQ ID NO: 1727376 - DNA, 15 bp, Homo sapiens
tccttgatggccgtg

SEQ ID NO: 1727377 - DNA, 15 bp, Homo sapiens
ccttgatggccgtgt

SEQ ID NO: 1727378 - DNA, 15 bp, Homo sapiens
cttgatggccgtgtc

SEQ ID NO: 1727379 - DNA, 15 bp, Homo sapiens
ttgatggccgtgtcc

SEQ ID NO: 1727380 - DNA, 15 bp, Homo sapiens
tgatggccgtgtcca

SEQ ID NO: 1727381 - DNA, 15 bp, Homo sapiens
gatggccgtgtccag

SEQ ID NO: 1727382 - DNA, 15 bp, Homo sapiens
atggccgtgtccagg

SEQ ID NO: 1727383 - DNA, 15 bp, Homo sapiens
tggccgtgtccaggt

SEQ ID NO: 1727384 - DNA, 15 bp, Homo sapiens
ggccgtgtccaggtc

SEQ ID NO: 1727385 - DNA, 15 bp, Homo sapiens
gccgtgtccaggtcc

SEQ ID NO: 1727386 - DNA, 15 bp, Homo sapiens
ccgtgtccaggtcct

SEQ ID NO: 1727387 - DNA, 15 bp, Homo sapiens
cgtgtccaggtcctc

SEQ ID NO: 1727388 - DNA, 15 bp, Homo sapiens
gtgtccaggtcctcg

SEQ ID NO: 1727389 - DNA, 15 bp, Homo sapiens
tgtccaggtcctcgt

SEQ ID NO: 1727390 - DNA, 15 bp, Homo sapiens
gtccaggtcctcgtc

SEQ ID NO: 1727391 - DNA, 15 bp, Homo sapiens
tccaggtcctcgtca

SEQ ID NO: 1727392 - DNA, 15 bp, Homo sapiens
ccaggtcctcgtcac

SEQ ID NO: 1727393 - DNA, 15 bp, Homo sapiens
caggtcctcgtcact

SEQ ID NO: 1727394 - DNA, 15 bp, Homo sapiens
aggtcctcgtcactg

SEQ ID NO: 1727395 - DNA, 15 bp, Homo sapiens
ggtcctcgtcactgt

SEQ ID NO: 1727396 - DNA, 15 bp, Homo sapiens
gtcctcgtcactgtc

SEQ ID NO: 1727397 - DNA, 15 bp, Homo sapiens
tcctcgtcactgtcc

SEQ ID NO: 1727398 - DNA, 15 bp, Homo sapiens
cctcgtcactgtcca

SEQ ID NO: 1727399 - DNA, 15 bp, Homo sapiens
ctcgtcactgtccag

SEQ ID NO: 1727400 - DNA, 15 bp, Homo sapiens
tcgtcactgtccagg

SEQ ID NO: 1727401 - DNA, 15 bp, Homo sapiens
cgtcactgtccaggg

SEQ ID NO: 1727402 - DNA, 15 bp, Homo sapiens
gtcactgtccaggga

SEQ ID NO: 1727403 - DNA, 15 bp, Homo sapiens
tcactgtccagggag

SEQ ID NO: 1727404 - DNA, 15 bp, Homo sapiens
cactgtccagggagc

SEQ ID NO: 1727405 - DNA, 15 bp, Homo sapiens
actgtccagggagct

SEQ ID NO: 1727406 - DNA, 15 bp, Homo sapiens
ctgtccagggagctg

SEQ ID NO: 1727407 - DNA, 15 bp, Homo sapiens
tgtccagggagctgc

SEQ ID NO: 1727408 - DNA, 15 bp, Homo sapiens
gtccagggagctgct

SEQ ID NO: 1727409 - DNA, 15 bp, Homo sapiens
tccagggagctgctc

SEQ ID NO: 1727410 - DNA, 15 bp, Homo sapiens
ccagggagctgctct

SEQ ID NO: 1727411 - DNA, 15 bp, Homo sapiens
cagggagctgctctt

SEQ ID NO: 1727412 - DNA, 15 bp, Homo sapiens
agggagctgctcttg

SEQ ID NO: 1727413 - DNA, 15 bp, Homo sapiens
gggagctgctcttgt

SEQ ID NO: 1727414 - DNA, 15 bp, Homo sapiens
ggagctgctcttgtc

SEQ ID NO: 1727415 - DNA, 15 bp, Homo sapiens
gagctgctcttgtct

SEQ ID NO: 1727416 - DNA, 15 bp, Homo sapiens
agctgctcttgtctt

SEQ ID NO: 1727417 - DNA, 15 bp, Homo sapiens
gctgctcttgtcttc

SEQ ID NO: 1727418 - DNA, 15 bp, Homo sapiens
ctgctcttgtcttcg

SEQ ID NO: 1727419 - DNA, 15 bp, Homo sapiens
tgctcttgtcttcgg

SEQ ID NO: 1727420 - DNA, 15 bp, Homo sapiens
gctcttgtcttcgga

SEQ ID NO: 1727421 - DNA, 15 bp, Homo sapiens
ctcttgtcttcggag

SEQ ID NO: 1727422 - DNA, 15 bp, Homo sapiens
tcttgtcttcggagc

SEQ ID NO: 1727423 - DNA, 15 bp, Homo sapiens
cttgtcttcggagct

SEQ ID NO: 1727424 - DNA, 15 bp, Homo sapiens
ttgtcttcggagctc

SEQ ID NO: 1727425 - DNA, 15 bp, Homo sapiens
tgtcttcggagctct

SEQ ID NO: 1727426 - DNA, 15 bp, Homo sapiens
gtcttcggagctctc

SEQ ID NO: 1727427 - DNA, 15 bp, Homo sapiens
tcttcggagctctcc

SEQ ID NO: 1727428 - DNA, 15 bp, Homo sapiens
cttcggagctctcct

SEQ ID NO: 1727429 - DNA, 15 bp, Homo sapiens
ttcggagctctcctt

SEQ ID NO: 1727430 - DNA, 15 bp, Homo sapiens
tcggagctctccttc

SEQ ID NO: 1727431 - DNA, 15 bp, Homo sapiens
cggagctctccttct

SEQ ID NO: 1727432 - DNA, 15 bp, Homo sapiens
ggagctctccttctc

SEQ ID NO: 1727433 - DNA, 15 bp, Homo sapiens
gagctctccttctcg

SEQ ID NO: 1727434 - DNA, 15 bp, Homo sapiens
agctctccttctcgt

SEQ ID NO: 1727435 - DNA, 15 bp, Homo sapiens
gctctccttctcgtc

SEQ ID NO: 1727436 - DNA, 15 bp, Homo sapiens
ctctccttctcgtcc

SEQ ID NO: 1727437 - DNA, 15 bp, Homo sapiens
tctccttctcgtcca

SEQ ID NO: 1727438 - DNA, 15 bp, Homo sapiens
ctccttctcgtccag

SEQ ID NO: 1727439 - DNA, 15 bp, Homo sapiens
tccttctcgtccagg

SEQ ID NO: 1727440 - DNA, 15 bp, Homo sapiens
ccttctcgtccaggt

SEQ ID NO: 1727441 - DNA, 15 bp, Homo sapiens
cttctcgtccaggtg

SEQ ID NO: 1727442 - DNA, 15 bp, Homo sapiens
ttctcgtccaggtgc

SEQ ID NO: 1727443 - DNA, 15 bp, Homo sapiens
tctcgtccaggtgcc

SEQ ID NO: 1727444 - DNA, 15 bp, Homo sapiens
ctcgtccaggtgcct

SEQ ID NO: 1727445 - DNA, 15 bp, Homo sapiens
tcgtccaggtgcctc

SEQ ID NO: 1727446 - DNA, 15 bp, Homo sapiens
cgtccaggtgcctca

SEQ ID NO: 1727447 - DNA, 15 bp, Homo sapiens
gtccaggtgcctcac

SEQ ID NO: 1727448 - DNA, 15 bp, Homo sapiens
tccaggtgcctcacc

SEQ ID NO: 1727449 - DNA, 15 bp, Homo sapiens
ccaggtgcctcacct

SEQ ID NO: 1727450 - DNA, 15 bp, Homo sapiens
caggtgcctcacctc

SEQ ID NO: 1727451 - DNA, 15 bp, Homo sapiens
aggtgcctcacctcg

SEQ ID NO: 1727452 - DNA, 15 bp, Homo sapiens
ggtgcctcacctcgt

SEQ ID NO: 1727453 - DNA, 15 bp, Homo sapiens
gtgcctcacctcgtc

SEQ ID NO: 1727454 - DNA, 15 bp, Homo sapiens
tgcctcacctcgtct

SEQ ID NO: 1727455 - DNA, 15 bp, Homo sapiens
gcctcacctcgtctg

SEQ ID NO: 1727456 - DNA, 15 bp, Homo sapiens
cctcacctcgtctgt

SEQ ID NO: 1727457 - DNA, 15 bp, Homo sapiens
ctcacctcgtctgtc

SEQ ID NO: 1727458 - DNA, 15 bp, Homo sapiens
tcacctcgtctgtct

SEQ ID NO: 1727459 - DNA, 15 bp, Homo sapiens
cacctcgtctgtctt

SEQ ID NO: 1727460 - DNA, 15 bp, Homo sapiens
acctcgtctgtctta

SEQ ID NO: 1727461 - DNA, 15 bp, Homo sapiens
cctcgtctgtcttac

SEQ ID NO: 1727462 - DNA, 15 bp, Homo sapiens
ctcgtctgtcttacc

SEQ ID NO: 1727463 - DNA, 15 bp, Homo sapiens
tcgtctgtcttaccc

SEQ ID NO: 1727464 - DNA, 15 bp, Homo sapiens
cgtctgtcttaccct

SEQ ID NO: 1727465 - DNA, 15 bp, Homo sapiens
gtctgtcttaccctg

SEQ ID NO: 1727466 - DNA, 15 bp, Homo sapiens
tctgtcttaccctgg

SEQ ID NO: 1727467 - DNA, 15 bp, Homo sapiens
ctgtcttaccctggc

SEQ ID NO: 1727468 - DNA, 15 bp, Homo sapiens
tgtcttaccctggcc

SEQ ID NO: 1727469 - DNA, 15 bp, Homo sapiens
gtcttaccctggccc

SEQ ID NO: 1727470 - DNA, 15 bp, Homo sapiens
tcttaccctggccct

SEQ ID NO: 1727471 - DNA, 15 bp, Homo sapiens
cttaccctggccctg

SEQ ID NO: 1727472 - DNA, 15 bp, Homo sapiens
ttaccctggccctgc

SEQ ID NO: 1727473 - DNA, 15 bp, Homo sapiens
taccctggccctgcg

SEQ ID NO: 1727474 - DNA, 15 bp, Homo sapiens
accctggccctgcgt

SEQ ID NO: 1727475 - DNA, 15 bp, Homo sapiens
ccctggccctgcgtc

SEQ ID NO: 1727476 - DNA, 15 bp, Homo sapiens
cctggccctgcgtca

SEQ ID NO: 1727477 - DNA, 15 bp, Homo sapiens
ctggccctgcgtcat

SEQ ID NO: 1727478 - DNA, 15 bp, Homo sapiens
tggccctgcgtcatg

SEQ ID NO: 1727479 - DNA, 15 bp, Homo sapiens
ggccctgcgtcatgc

SEQ ID NO: 1727480 - DNA, 15 bp, Homo sapiens
gccctgcgtcatgcg

SEQ ID NO: 1727481 - DNA, 15 bp, Homo sapiens
ccctgcgtcatgcga

SEQ ID NO: 1727482 - DNA, 15 bp, Homo sapiens
cctgcgtcatgcgag

SEQ ID NO: 1727483 - DNA, 15 bp, Homo sapiens
ctgcgtcatgcgagt

SEQ ID NO: 1727484 - DNA, 15 bp, Homo sapiens
tgcgtcatgcgagtg

SEQ ID NO: 1727485 - DNA, 15 bp, Homo sapiens
gcgtcatgcgagtgt

SEQ ID NO: 1727486 - DNA, 15 bp, Homo sapiens
cgtcatgcgagtgtc

SEQ ID NO: 1727487 - DNA, 15 bp, Homo sapiens
gtcatgcgagtgtcg

SEQ ID NO: 1727488 - DNA, 15 bp, Homo sapiens
tcatgcgagtgtcgc

SEQ ID NO: 1727489 - DNA, 15 bp, Homo sapiens
catgcgagtgtcgcc

SEQ ID NO: 1727490 - DNA, 15 bp, Homo sapiens
atgcgagtgtcgccg

SEQ ID NO: 1727491 - DNA, 15 bp, Homo sapiens
tgcgagtgtcgccgg

SEQ ID NO: 1727492 - DNA, 15 bp, Homo sapiens
gcgagtgtcgccggg

SEQ ID NO: 1727493 - DNA, 15 bp, Homo sapiens
cgagtgtcgccgggc

SEQ ID NO: 1727494 - DNA, 15 bp, Homo sapiens
gagtgtcgccgggcc

SEQ ID NO: 1727495 - DNA, 15 bp, Homo sapiens
agtgtcgccgggccc

SEQ ID NO: 1727496 - DNA, 15 bp, Homo sapiens
gtgtcgccgggcccc

SEQ ID NO: 1727497 - DNA, 15 bp, Homo sapiens
tgtcgccgggcccct

SEQ ID NO: 1727498 - DNA, 15 bp, Homo sapiens
gtcgccgggcccctt

SEQ ID NO: 1727499 - DNA, 15 bp, Homo sapiens
tcgccgggccccttg

SEQ ID NO: 1727500 - DNA, 15 bp, Homo sapiens
cgccgggccccttgg

SEQ ID NO: 1727501 - DNA, 15 bp, Homo sapiens
gccgggccccttggc

SEQ ID NO: 1727502 - DNA, 15 bp, Homo sapiens
ccgggccccttggct

SEQ ID NO: 1727503 - DNA, 15 bp, Homo sapiens
cgggccccttggctg

SEQ ID NO: 1727504 - DNA, 15 bp, Homo sapiens
gggccccttggctgc

SEQ ID NO: 1727505 - DNA, 15 bp, Homo sapiens
ggccccttggctgcg

SEQ ID NO: 1727506 - DNA, 15 bp, Homo sapiens
gccccttggctgcgc

SEQ ID NO: 1727507 - DNA, 15 bp, Homo sapiens
ccccttggctgcgcc

SEQ ID NO: 1727508 - DNA, 15 bp, Homo sapiens
cccttggctgcgccc

SEQ ID NO: 1727509 - DNA, 15 bp, Homo sapiens
ccttggctgcgccct

SEQ ID NO: 1727510 - DNA, 15 bp, Homo sapiens
cttggctgcgccctc

SEQ ID NO: 1727511 - DNA, 15 bp, Homo sapiens
ttggctgcgccctcc

SEQ ID NO: 1727512 - DNA, 15 bp, Homo sapiens
tggctgcgccctccc

SEQ ID NO: 1727513 - DNA, 15 bp, Homo sapiens
ggctgcgccctcccc

SEQ ID NO: 1727514 - DNA, 15 bp, Homo sapiens
gctgcgccctcccct

SEQ ID NO: 1727515 - DNA, 15 bp, Homo sapiens
ctgcgccctcccctc

SEQ ID NO: 1727516 - DNA, 15 bp, Homo sapiens
tgcgccctcccctcc

SEQ ID NO: 1727517 - DNA, 15 bp, Homo sapiens
gcgccctcccctccc

SEQ ID NO: 1727518 - DNA, 15 bp, Homo sapiens
cgccctcccctcccg

SEQ ID NO: 1727519 - DNA, 15 bp, Homo sapiens
gccctcccctcccgg

SEQ ID NO: 1727520 - DNA, 15 bp, Homo sapiens
ccctcccctcccggg

SEQ ID NO: 1727521 - DNA, 15 bp, Homo sapiens
cctcccctcccggga

SEQ ID NO: 1727522 - DNA, 15 bp, Homo sapiens
ctcccctcccgggac

SEQ ID NO: 1727523 - DNA, 15 bp, Homo sapiens
tcccctcccgggacc

SEQ ID NO: 1727524 - DNA, 15 bp, Homo sapiens
cccctcccgggacct

SEQ ID NO: 1727525 - DNA, 15 bp, Homo sapiens
ccctcccgggacctc

SEQ ID NO: 1727526 - DNA, 15 bp, Homo sapiens
cctcccgggacctcg

SEQ ID NO: 1727527 - DNA, 15 bp, Homo sapiens
ctcccgggacctcgc

SEQ ID NO: 1727528 - DNA, 15 bp, Homo sapiens
tcccgggacctcgct

SEQ ID NO: 1727529 - DNA, 15 bp, Homo sapiens
cccgggacctcgctg

SEQ ID NO: 1727530 - DNA, 15 bp, Homo sapiens
ccgggacctcgctgg

SEQ ID NO: 1727531 - DNA, 15 bp, Homo sapiens
cgggacctcgctggc

SEQ ID NO: 1727532 - DNA, 15 bp, Homo sapiens
gggacctcgctggct

SEQ ID NO: 1727533 - DNA, 15 bp, Homo sapiens
ggacctcgctggctt

SEQ ID NO: 1727534 - DNA, 15 bp, Homo sapiens
gacctcgctggcttt

SEQ ID NO: 1727535 - DNA, 15 bp, Homo sapiens
acctcgctggctttg

SEQ ID NO: 1727536 - DNA, 15 bp, Homo sapiens
cctcgctggctttgc

SEQ ID NO: 1727537 - DNA, 15 bp, Homo sapiens
ctcgctggctttgcc

SEQ ID NO: 1727538 - DNA, 15 bp, Homo sapiens
tcgctggctttgccc

SEQ ID NO: 1727539 - DNA, 15 bp, Homo sapiens
cgctggctttgccct

SEQ ID NO: 1727540 - DNA, 15 bp, Homo sapiens
gctggctttgccctg

SEQ ID NO: 1727541 - DNA, 15 bp, Homo sapiens
ctggctttgccctgg

SEQ ID NO: 1727542 - DNA, 15 bp, Homo sapiens
tggctttgccctgga

SEQ ID NO: 1727543 - DNA, 15 bp, Homo sapiens
ggctttgccctggac

SEQ ID NO: 1727544 - DNA, 15 bp, Homo sapiens
gctttgccctggacg

SEQ ID NO: 1727545 - DNA, 15 bp, Homo sapiens
ctttgccctggacgg

SEQ ID NO: 1727546 - DNA, 15 bp, Homo sapiens
tttgccctggacggg

SEQ ID NO: 1727547 - DNA, 15 bp, Homo sapiens
ttgccctggacgggc

SEQ ID NO: 1727548 - DNA, 15 bp, Homo sapiens
tgccctggacgggca

SEQ ID NO: 1727549 - DNA, 15 bp, Homo sapiens
gccctggacgggcag

SEQ ID NO: 1727550 - DNA, 15 bp, Homo sapiens
ccctggacgggcagg

SEQ ID NO: 1727551 - DNA, 15 bp, Homo sapiens
cctggacgggcaggt

SEQ ID NO: 1727552 - DNA, 15 bp, Homo sapiens
ctggacgggcaggtc

SEQ ID NO: 1727553 - DNA, 15 bp, Homo sapiens
tggacgggcaggtcc

SEQ ID NO: 1727554 - DNA, 15 bp, Homo sapiens
ggacgggcaggtccc

SEQ ID NO: 1727555 - DNA, 15 bp, Homo sapiens
gacgggcaggtcccg

SEQ ID NO: 1727556 - DNA, 15 bp, Homo sapiens
acgggcaggtcccgc

SEQ ID NO: 1727557 - DNA, 15 bp, Homo sapiens
cgggcaggtcccgcc

SEQ ID NO: 1727558 - DNA, 15 bp, Homo sapiens
gggcaggtcccgccc

SEQ ID NO: 1727559 - DNA, 15 bp, Homo sapiens
ggcaggtcccgcccc

SEQ ID NO: 1727560 - DNA, 15 bp, Homo sapiens
gcaggtcccgcccct

SEQ ID NO: 1727561 - DNA, 15 bp, Homo sapiens
caggtcccgcccctc

SEQ ID NO: 1727562 - DNA, 15 bp, Homo sapiens
aggtcccgcccctca

SEQ ID NO: 1727563 - DNA, 15 bp, Homo sapiens
ggtcccgcccctcat

SEQ ID NO: 1727564 - DNA, 15 bp, Homo sapiens
gtcccgcccctcatg

SEQ ID NO: 1727565 - DNA, 15 bp, Homo sapiens
tcccgcccctcatgg

SEQ ID NO: 1727566 - DNA, 15 bp, Homo sapiens
cccgcccctcatggc

SEQ ID NO: 1727567 - DNA, 15 bp, Homo sapiens
ccgcccctcatggcc

SEQ ID NO: 1727568 - DNA, 15 bp, Homo sapiens
cgcccctcatggccg

SEQ ID NO: 1727569 - DNA, 15 bp, Homo sapiens
gcccctcatggccgg

SEQ ID NO: 1727570 - DNA, 15 bp, Homo sapiens
cccctcatggccggg

SEQ ID NO: 1727571 - DNA, 15 bp, Homo sapiens
ccctcatggccgggc

SEQ ID NO: 1727572 - DNA, 15 bp, Homo sapiens
cctcatggccgggca

SEQ ID NO: 1727573 - DNA, 15 bp, Homo sapiens
ctcatggccgggcac

SEQ ID NO: 1727574 - DNA, 15 bp, Homo sapiens
tcatggccgggcacg

SEQ ID NO: 1727575 - DNA, 15 bp, Homo sapiens
catggccgggcacgg

SEQ ID NO: 1727576 - DNA, 15 bp, Homo sapiens
atggccgggcacggc

SEQ ID NO: 1727577 - DNA, 15 bp, Homo sapiens
tggccgggcacggct

SEQ ID NO: 1727578 - DNA, 15 bp, Homo sapiens
ggccgggcacggctc

SEQ ID NO: 1727579 - DNA, 15 bp, Homo sapiens
gccgggcacggctca

SEQ ID NO: 1727580 - DNA, 15 bp, Homo sapiens
ccgggcacggctcac

SEQ ID NO: 1727581 - DNA, 15 bp, Homo sapiens
cgggcacggctcacg

SEQ ID NO: 1727582 - DNA, 15 bp, Homo sapiens
gggcacggctcacgc

SEQ ID NO: 1727583 - DNA, 15 bp, Homo sapiens
ggcacggctcacgcc

SEQ ID NO: 1727584 - DNA, 15 bp, Homo sapiens
gcacggctcacgcct

SEQ ID NO: 1727585 - DNA, 15 bp, Homo sapiens
cacggctcacgcctg

SEQ ID NO: 1727586 - DNA, 15 bp, Homo sapiens
acggctcacgcctgg

SEQ ID NO: 1727587 - DNA, 15 bp, Homo sapiens
cggctcacgcctggc

SEQ ID NO: 1727588 - DNA, 15 bp, Homo sapiens
ggctcacgcctggct

SEQ ID NO: 1727589 - DNA, 15 bp, Homo sapiens
gctcacgcctggctg

SEQ ID NO: 1727590 - DNA, 15 bp, Homo sapiens
ctcacgcctggctgt

SEQ ID NO: 1727591 - DNA, 15 bp, Homo sapiens
tcacgcctggctgtg

SEQ ID NO: 1727592 - DNA, 15 bp, Homo sapiens
cacgcctggctgtgg

SEQ ID NO: 1727593 - DNA, 15 bp, Homo sapiens
acgcctggctgtggt

SEQ ID NO: 1727594 - DNA, 15 bp, Homo sapiens
cgcctggctgtggtc

SEQ ID NO: 1727595 - DNA, 15 bp, Homo sapiens
gcctggctgtggtcg

SEQ ID NO: 1727596 - DNA, 15 bp, Homo sapiens
cctggctgtggtcgg

SEQ ID NO: 1727597 - DNA, 15 bp, Homo sapiens
ctggctgtggtcggc

SEQ ID NO: 1727598 - DNA, 15 bp, Homo sapiens
tggctgtggtcggca

SEQ ID NO: 1727599 - DNA, 15 bp, Homo sapiens
ggctgtggtcggcat

SEQ ID NO: 1727600 - DNA, 15 bp, Homo sapiens
gctgtggtcggcatc

SEQ ID NO: 1727601 - DNA, 15 bp, Homo sapiens
ctgtggtcggcatcc

SEQ ID NO: 1727602 - DNA, 15 bp, Homo sapiens
tgtggtcggcatcct

SEQ ID NO: 1727603 - DNA, 15 bp, Homo sapiens
gtggtcggcatcctg

SEQ ID NO: 1727604 - DNA, 15 bp, Homo sapiens
tggtcggcatcctgg

SEQ ID NO: 1727605 - DNA, 15 bp, Homo sapiens
ggtcggcatcctggc

SEQ ID NO: 1727606 - DNA, 15 bp, Homo sapiens
gtcggcatcctggcc

SEQ ID NO: 1727607 - DNA, 15 bp, Homo sapiens
tcggcatcctggcca

SEQ ID NO: 1727608 - DNA, 15 bp, Homo sapiens
cggcatcctggccac

SEQ ID NO: 1727609 - DNA, 15 bp, Homo sapiens
ggcatcctggccacc

SEQ ID NO: 1727610 - DNA, 15 bp, Homo sapiens
gcatcctggccacca

SEQ ID NO: 1727611 - DNA, 15 bp, Homo sapiens
catcctggccaccat

SEQ ID NO: 1727612 - DNA, 15 bp, Homo sapiens
atcctggccaccatc

SEQ ID NO: 1727613 - DNA, 15 bp, Homo sapiens
tcctggccaccatct

SEQ ID NO: 1727614 - DNA, 15 bp, Homo sapiens
cctggccaccatctt

SEQ ID NO: 1727615 - DNA, 15 bp, Homo sapiens
ctggccaccatcttt

SEQ ID NO: 1727616 - DNA, 15 bp, Homo sapiens
tggccaccatctttc

SEQ ID NO: 1727617 - DNA, 15 bp, Homo sapiens
ggccaccatctttca

SEQ ID NO: 1727618 - DNA, 15 bp, Homo sapiens
gccaccatctttcac

SEQ ID NO: 1727619 - DNA, 15 bp, Homo sapiens
ccaccatctttcacc

SEQ ID NO: 1727620 - DNA, 15 bp, Homo sapiens
caccatctttcacca

SEQ ID NO: 1727621 - DNA, 15 bp, Homo sapiens
accatctttcaccac

SEQ ID NO: 1727622 - DNA, 15 bp, Homo sapiens
ccatctttcaccacc

SEQ ID NO: 1727623 - DNA, 15 bp, Homo sapiens
catctttcaccacct

SEQ ID NO: 1727624 - DNA, 15 bp, Homo sapiens
atctttcaccacctc

SEQ ID NO: 1727625 - DNA, 15 bp, Homo sapiens
tctttcaccacctcc

SEQ ID NO: 1727626 - DNA, 15 bp, Homo sapiens
ctttcaccacctccc

SEQ ID NO: 1727627 - DNA, 15 bp, Homo sapiens
tttcaccacctcccg

SEQ ID NO: 1727628 - DNA, 15 bp, Homo sapiens
ttcaccacctcccgc

SEQ ID NO: 1727629 - DNA, 15 bp, Homo sapiens
tcaccacctcccgcg

SEQ ID NO: 1727630 - DNA, 15 bp, Homo sapiens
caccacctcccgcgt

SEQ ID NO: 1727631 - DNA, 15 bp, Homo sapiens
accacctcccgcgtt

SEQ ID NO: 1727632 - DNA, 15 bp, Homo sapiens
ccacctcccgcgttt

SEQ ID NO: 1727633 - DNA, 15 bp, Homo sapiens
cacctcccgcgtttt

SEQ ID NO: 1727634 - DNA, 15 bp, Homo sapiens
acctcccgcgttttc

SEQ ID NO: 1727635 - DNA, 15 bp, Homo sapiens
cctcccgcgttttct

SEQ ID NO: 1727636 - DNA, 15 bp, Homo sapiens
ctcccgcgttttctt

SEQ ID NO: 1727637 - DNA, 15 bp, Homo sapiens
tcccgcgttttcttg

SEQ ID NO: 1727638 - DNA, 15 bp, Homo sapiens
cccgcgttttcttgg

SEQ ID NO: 1727639 - DNA, 15 bp, Homo sapiens
ccgcgttttcttggg

SEQ ID NO: 1727640 - DNA, 15 bp, Homo sapiens
cgcgttttcttgggc

SEQ ID NO: 1727641 - DNA, 15 bp, Homo sapiens
gcgttttcttgggcg

SEQ ID NO: 1727642 - DNA, 15 bp, Homo sapiens
cgttttcttgggcgt

SEQ ID NO: 1727643 - DNA, 15 bp, Homo sapiens
gttttcttgggcgtg

SEQ ID NO: 1727644 - DNA, 15 bp, Homo sapiens
ttttcttgggcgtgg

SEQ ID NO: 1727645 - DNA, 15 bp, Homo sapiens
tttcttgggcgtgga

SEQ ID NO: 1727646 - DNA, 15 bp, Homo sapiens
ttcttgggcgtggac

SEQ ID NO: 1727647 - DNA, 15 bp, Homo sapiens
tcttgggcgtggacg

SEQ ID NO: 1727648 - DNA, 15 bp, Homo sapiens
cttgggcgtggacgg

SEQ ID NO: 1727649 - DNA, 15 bp, Homo sapiens
ttgggcgtggacggc

SEQ ID NO: 1727650 - DNA, 15 bp, Homo sapiens
tgggcgtggacggcc

SEQ ID NO: 1727651 - DNA, 15 bp, Homo sapiens
gggcgtggacggcct

SEQ ID NO: 1727652 - DNA, 15 bp, Homo sapiens
ggcgtggacggcctc

SEQ ID NO: 1727653 - DNA, 15 bp, Homo sapiens
gcgtggacggcctca

SEQ ID NO: 1727654 - DNA, 15 bp, Homo sapiens
cgtggacggcctcat

SEQ ID NO: 1727655 - DNA, 15 bp, Homo sapiens
gtggacggcctcatg

SEQ ID NO: 1727656 - DNA, 15 bp, Homo sapiens
tggacggcctcatgg

SEQ ID NO: 1727657 - DNA, 15 bp, Homo sapiens
ggacggcctcatggc

SEQ ID NO: 1727658 - DNA, 15 bp, Homo sapiens
gacggcctcatggca

SEQ ID NO: 1727659 - DNA, 15 bp, Homo sapiens
acggcctcatggcat

SEQ ID NO: 1727660 - DNA, 15 bp, Homo sapiens
cggcctcatggcatg

SEQ ID NO: 1727661 - DNA, 15 bp, Homo sapiens
ggcctcatggcatgg

SEQ ID NO: 1727662 - DNA, 15 bp, Homo sapiens
gcctcatggcatggc

SEQ ID NO: 1727663 - DNA, 15 bp, Homo sapiens
cctcatggcatggcc

SEQ ID NO: 1727664 - DNA, 15 bp, Homo sapiens
ctcatggcatggccg

SEQ ID NO: 1727665 - DNA, 15 bp, Homo sapiens
tcatggcatggccgc

SEQ ID NO: 1727666 - DNA, 15 bp, Homo sapiens
catggcatggccgcc

SEQ ID NO: 1727667 - DNA, 15 bp, Homo sapiens
atggcatggccgccg

SEQ ID NO: 1727668 - DNA, 15 bp, Homo sapiens
tggcatggccgccgc

SEQ ID NO: 1727669 - DNA, 15 bp, Homo sapiens
ggcatggccgccgcc

SEQ ID NO: 1727670 - DNA, 15 bp, Homo sapiens
gcatggccgccgcct

SEQ ID NO: 1727671 - DNA, 15 bp, Homo sapiens
catggccgccgcctc

SEQ ID NO: 1727672 - DNA, 15 bp, Homo sapiens
atggccgccgcctct

SEQ ID NO: 1727673 - DNA, 15 bp, Homo sapiens
tggccgccgcctcta

SEQ ID NO: 1727674 - DNA, 15 bp, Homo sapiens
ggccgccgcctctac

SEQ ID NO: 1727675 - DNA, 15 bp, Homo sapiens
gccgccgcctctacg

SEQ ID NO: 1727676 - DNA, 15 bp, Homo sapiens
ccgccgcctctacgt

SEQ ID NO: 1727677 - DNA, 15 bp, Homo sapiens
cgccgcctctacgtt

SEQ ID NO: 1727678 - DNA, 15 bp, Homo sapiens
gccgcctctacgttt

SEQ ID NO: 1727679 - DNA, 15 bp, Homo sapiens
ccgcctctacgtttc

SEQ ID NO: 1727680 - DNA, 15 bp, Homo sapiens
cgcctctacgtttcc

SEQ ID NO: 1727681 - DNA, 15 bp, Homo sapiens
gcctctacgtttcct

SEQ ID NO: 1727682 - DNA, 15 bp, Homo sapiens
cctctacgtttcctt

SEQ ID NO: 1727683 - DNA, 15 bp, Homo sapiens
ctctacgtttccttt

SEQ ID NO: 1727684 - DNA, 15 bp, Homo sapiens
tctacgtttcctttt

SEQ ID NO: 1727685 - DNA, 15 bp, Homo sapiens
ctacgtttccttttg

SEQ ID NO: 1727686 - DNA, 15 bp, Homo sapiens
tacgtttccttttgc

SEQ ID NO: 1727687 - DNA, 15 bp, Homo sapiens
acgtttccttttgca

SEQ ID NO: 1727688 - DNA, 15 bp, Homo sapiens
cgtttccttttgcag

SEQ ID NO: 1727689 - DNA, 15 bp, Homo sapiens
gtttccttttgcagc

SEQ ID NO: 1727690 - DNA, 15 bp, Homo sapiens
tttccttttgcagct

SEQ ID NO: 1727691 - DNA, 15 bp, Homo sapiens
ttccttttgcagctc

SEQ ID NO: 1727692 - DNA, 15 bp, Homo sapiens
tccttttgcagctca

SEQ ID NO: 1727693 - DNA, 15 bp, Homo sapiens
ccttttgcagctcag

SEQ ID NO: 1727694 - DNA, 15 bp, Homo sapiens
cttttgcagctcagc

SEQ ID NO: 1727695 - DNA, 15 bp, Homo sapiens
ttttgcagctcagca

SEQ ID NO: 1727696 - DNA, 15 bp, Homo sapiens
tttgcagctcagcag

SEQ ID NO: 1727697 - DNA, 15 bp, Homo sapiens
ttgcagctcagcagc

SEQ ID NO: 1727698 - DNA, 15 bp, Homo sapiens
tgcagctcagcagcg

SEQ ID NO: 1727699 - DNA, 15 bp, Homo sapiens
gcagctcagcagcgg

SEQ ID NO: 1727700 - DNA, 15 bp, Homo sapiens
cagctcagcagcggg

SEQ ID NO: 1727701 - DNA, 15 bp, Homo sapiens
agctcagcagcgggt

SEQ ID NO: 1727702 - DNA, 15 bp, Homo sapiens
gctcagcagcgggtc

SEQ ID NO: 1727703 - DNA, 15 bp, Homo sapiens
ctcagcagcgggtcc

SEQ ID NO: 1727704 - DNA, 15 bp, Homo sapiens
tcagcagcgggtccg

SEQ ID NO: 1727705 - DNA, 15 bp, Homo sapiens
cagcagcgggtccgg

SEQ ID NO: 1727706 - DNA, 15 bp, Homo sapiens
agcagcgggtccggt

SEQ ID NO: 1727707 - DNA, 15 bp, Homo sapiens
gcagcgggtccggtg

SEQ ID NO: 1727708 - DNA, 15 bp, Homo sapiens
cagcgggtccggtgt

SEQ ID NO: 1727709 - DNA, 15 bp, Homo sapiens
agcgggtccggtgtt

SEQ ID NO: 1727710 - DNA, 15 bp, Homo sapiens
gcgggtccggtgttt

SEQ ID NO: 1727711 - DNA, 15 bp, Homo sapiens
cgggtccggtgtttt

SEQ ID NO: 1727712 - DNA, 15 bp, Homo sapiens
gggtccggtgtttta

SEQ ID NO: 1727713 - DNA, 15 bp, Homo sapiens
ggtccggtgttttag

SEQ ID NO: 1727714 - DNA, 15 bp, Homo sapiens
gtccggtgttttaga

SEQ ID NO: 1727715 - DNA, 15 bp, Homo sapiens
tccggtgttttagag

SEQ ID NO: 1727716 - DNA, 15 bp, Homo sapiens
ccggtgttttagaga

SEQ ID NO: 1727717 - DNA, 15 bp, Homo sapiens
cggtgttttagagag

SEQ ID NO: 1727718 - DNA, 15 bp, Homo sapiens
ggtgttttagagagg

SEQ ID NO: 1727719 - DNA, 15 bp, Homo sapiens
gtgttttagagaggg

SEQ ID NO: 1727720 - DNA, 15 bp, Homo sapiens
tgttttagagagggg

SEQ ID NO: 1727721 - DNA, 15 bp, Homo sapiens
gttttagagaggggg

SEQ ID NO: 1727722 - DNA, 15 bp, Homo sapiens
ttttagagagggggg

SEQ ID NO: 1727723 - DNA, 15 bp, Homo sapiens
tttagagaggggggc

SEQ ID NO: 1727724 - DNA, 15 bp, Homo sapiens
ttagagaggggggcc

SEQ ID NO: 1727725 - DNA, 15 bp, Homo sapiens
tagagaggggggcct

SEQ ID NO: 1727726 - DNA, 15 bp, Homo sapiens
agagaggggggcctt

SEQ ID NO: 1727727 - DNA, 15 bp, Homo sapiens
gagaggggggccttg

SEQ ID NO: 1727728 - DNA, 15 bp, Homo sapiens
agaggggggccttgg

SEQ ID NO: 1727729 - DNA, 15 bp, Homo sapiens
gaggggggccttggg

SEQ ID NO: 1727730 - DNA, 15 bp, Homo sapiens
aggggggccttgggg

SEQ ID NO: 1727731 - DNA, 15 bp, Homo sapiens
ggggggccttggggc

SEQ ID NO: 1727732 - DNA, 15 bp, Homo sapiens
gggggccttggggcc

SEQ ID NO: 1727733 - DNA, 15 bp, Homo sapiens
ggggccttggggcca

SEQ ID NO: 1727734 - DNA, 15 bp, Homo sapiens
gggccttggggccac

SEQ ID NO: 1727735 - DNA, 15 bp, Homo sapiens
ggccttggggccact

SEQ ID NO: 1727736 - DNA, 15 bp, Homo sapiens
gccttggggccactg

SEQ ID NO: 1727737 - DNA, 15 bp, Homo sapiens
ccttggggccactgg

SEQ ID NO: 1727738 - DNA, 15 bp, Homo sapiens
cttggggccactggt

SEQ ID NO: 1727739 - DNA, 15 bp, Homo sapiens
ttggggccactggtc

SEQ ID NO: 1727740 - DNA, 15 bp, Homo sapiens
tggggccactggtct

SEQ ID NO: 1727741 - DNA, 15 bp, Homo sapiens
ggggccactggtctg

SEQ ID NO: 1727742 - DNA, 15 bp, Homo sapiens
gggccactggtctgg

SEQ ID NO: 1727743 - DNA, 15 bp, Homo sapiens
ggccactggtctggc

SEQ ID NO: 1727744 - DNA, 15 bp, Homo sapiens
gccactggtctggct

SEQ ID NO: 1727745 - DNA, 15 bp, Homo sapiens
ccactggtctggctg

SEQ ID NO: 1727746 - DNA, 15 bp, Homo sapiens
cactggtctggctgt

SEQ ID NO: 1727747 - DNA, 15 bp, Homo sapiens
actggtctggctgtt

SEQ ID NO: 1727748 - DNA, 15 bp, Homo sapiens
ctggtctggctgttg

SEQ ID NO: 1727749 - DNA, 15 bp, Homo sapiens
tggtctggctgttgg

SEQ ID NO: 1727750 - DNA, 15 bp, Homo sapiens
ggtctggctgttggg

SEQ ID NO: 1727751 - DNA, 15 bp, Homo sapiens
gtctggctgttgggg

SEQ ID NO: 1727752 - DNA, 15 bp, Homo sapiens
tctggctgttggggc

SEQ ID NO: 1727753 - DNA, 15 bp, Homo sapiens
ctggctgttggggcc

SEQ ID NO: 1727754 - DNA, 15 bp, Homo sapiens
tggctgttggggcca

SEQ ID NO: 1727755 - DNA, 15 bp, Homo sapiens
ggctgttggggccag

SEQ ID NO: 1727756 - DNA, 15 bp, Homo sapiens
gctgttggggccagg

SEQ ID NO: 1727757 - DNA, 15 bp, Homo sapiens
ctgttggggccaggc

SEQ ID NO: 1727758 - DNA, 15 bp, Homo sapiens
tgttggggccaggcg

SEQ ID NO: 1727759 - DNA, 15 bp, Homo sapiens
gttggggccaggcgg

SEQ ID NO: 1727760 - DNA, 15 bp, Homo sapiens
ttggggccaggcggt

SEQ ID NO: 1727761 - DNA, 15 bp, Homo sapiens
tggggccaggcggtg

SEQ ID NO: 1727762 - DNA, 15 bp, Homo sapiens
ggggccaggcggtga

SEQ ID NO: 1727763 - DNA, 15 bp, Homo sapiens
gggccaggcggtgaa

SEQ ID NO: 1727764 - DNA, 15 bp, Homo sapiens
ggccaggcggtgaaa

SEQ ID NO: 1727765 - DNA, 15 bp, Homo sapiens
gccaggcggtgaaag

SEQ ID NO: 1727766 - DNA, 15 bp, Homo sapiens
ccaggcggtgaaagt

SEQ ID NO: 1727767 - DNA, 15 bp, Homo sapiens
caggcggtgaaagtg

SEQ ID NO: 1727768 - DNA, 15 bp, Homo sapiens
aggcggtgaaagtgg

SEQ ID NO: 1727769 - DNA, 15 bp, Homo sapiens
ggcggtgaaagtggg

SEQ ID NO: 1727770 - DNA, 15 bp, Homo sapiens
gcggtgaaagtgggc

SEQ ID NO: 1727771 - DNA, 15 bp, Homo sapiens
cggtgaaagtgggcc

SEQ ID NO: 1727772 - DNA, 15 bp, Homo sapiens
ggtgaaagtgggccc

SEQ ID NO: 1727773 - DNA, 15 bp, Homo sapiens
gtgaaagtgggccct

SEQ ID NO: 1727774 - DNA, 15 bp, Homo sapiens
tgaaagtgggccctg

SEQ ID NO: 1727775 - DNA, 15 bp, Homo sapiens
gaaagtgggccctgg

SEQ ID NO: 1727776 - DNA, 15 bp, Homo sapiens
aaagtgggccctggg

SEQ ID NO: 1727777 - DNA, 15 bp, Homo sapiens
aagtgggccctgggc

SEQ ID NO: 1727778 - DNA, 15 bp, Homo sapiens
agtgggccctgggca

SEQ ID NO: 1727779 - DNA, 15 bp, Homo sapiens
gtgggccctgggcag

SEQ ID NO: 1727780 - DNA, 15 bp, Homo sapiens
tgggccctgggcagc

SEQ ID NO: 1727781 - DNA, 15 bp, Homo sapiens
gggccctgggcagcc

SEQ ID NO: 1727782 - DNA, 15 bp, Homo sapiens
ggccctgggcagcct

SEQ ID NO: 1727783 - DNA, 15 bp, Homo sapiens
gccctgggcagcctg

SEQ ID NO: 1727784 - DNA, 15 bp, Homo sapiens
ccctgggcagcctgc

SEQ ID NO: 1727785 - DNA, 15 bp, Homo sapiens
cctgggcagcctgcg

SEQ ID NO: 1727786 - DNA, 15 bp, Homo sapiens
ctgggcagcctgcga

SEQ ID NO: 1727787 - DNA, 15 bp, Homo sapiens
tgggcagcctgcgag

SEQ ID NO: 1727788 - DNA, 15 bp, Homo sapiens
gggcagcctgcgagc

SEQ ID NO: 1727789 - DNA, 15 bp, Homo sapiens
ggcagcctgcgagca

SEQ ID NO: 1727790 - DNA, 15 bp, Homo sapiens
gcagcctgcgagcag

SEQ ID NO: 1727791 - DNA, 15 bp, Homo sapiens
cagcctgcgagcagc

SEQ ID NO: 1727792 - DNA, 15 bp, Homo sapiens
agcctgcgagcagct

SEQ ID NO: 1727793 - DNA, 15 bp, Homo sapiens
gcctgcgagcagctc

SEQ ID NO: 1727794 - DNA, 15 bp, Homo sapiens
cctgcgagcagctct

SEQ ID NO: 1727795 - DNA, 15 bp, Homo sapiens
ctgcgagcagctctc

SEQ ID NO: 1727796 - DNA, 15 bp, Homo sapiens
tgcgagcagctctca

SEQ ID NO: 1727797 - DNA, 15 bp, Homo sapiens
gcgagcagctctcac

SEQ ID NO: 1727798 - DNA, 15 bp, Homo sapiens
cgagcagctctcacc

SEQ ID NO: 1727799 - DNA, 15 bp, Homo sapiens
gagcagctctcacct

SEQ ID NO: 1727800 - DNA, 15 bp, Homo sapiens
agcagctctcacctc

SEQ ID NO: 1727801 - DNA, 15 bp, Homo sapiens
gcagctctcacctct

SEQ ID NO: 1727802 - DNA, 15 bp, Homo sapiens
cagctctcacctctg

SEQ ID NO: 1727803 - DNA, 15 bp, Homo sapiens
agctctcacctctgg

SEQ ID NO: 1727804 - DNA, 15 bp, Homo sapiens
gctctcacctctggc

SEQ ID NO: 1727805 - DNA, 15 bp, Homo sapiens
ctctcacctctggcc

SEQ ID NO: 1727806 - DNA, 15 bp, Homo sapiens
tctcacctctggcca

SEQ ID NO: 1727807 - DNA, 15 bp, Homo sapiens
ctcacctctggccag

SEQ ID NO: 1727808 - DNA, 15 bp, Homo sapiens
tcacctctggccagc

SEQ ID NO: 1727809 - DNA, 15 bp, Homo sapiens
cacctctggccagca

SEQ ID NO: 1727810 - DNA, 15 bp, Homo sapiens
acctctggccagcaa

SEQ ID NO: 1727811 - DNA, 15 bp, Homo sapiens
cctctggccagcaaa

SEQ ID NO: 1727812 - DNA, 15 bp, Homo sapiens
ctctggccagcaaac

SEQ ID NO: 1727813 - DNA, 15 bp, Homo sapiens
tctggccagcaaact

SEQ ID NO: 1727814 - DNA, 15 bp, Homo sapiens
ctggccagcaaactc

SEQ ID NO: 1727815 - DNA, 15 bp, Homo sapiens
tggccagcaaactcc

SEQ ID NO: 1727816 - DNA, 15 bp, Homo sapiens
ggccagcaaactccc

SEQ ID NO: 1727817 - DNA, 15 bp, Homo sapiens
gccagcaaactcccc

SEQ ID NO: 1727818 - DNA, 15 bp, Homo sapiens
ccagcaaactccccg

SEQ ID NO: 1727819 - DNA, 15 bp, Homo sapiens
cagcaaactccccga

SEQ ID NO: 1727820 - DNA, 15 bp, Homo sapiens
agcaaactccccgac

SEQ ID NO: 1727821 - DNA, 15 bp, Homo sapiens
gcaaactccccgact

SEQ ID NO: 1727822 - DNA, 15 bp, Homo sapiens
caaactccccgacta

SEQ ID NO: 1727823 - DNA, 15 bp, Homo sapiens
aaactccccgactat

SEQ ID NO: 1727824 - DNA, 15 bp, Homo sapiens
aactccccgactatg

SEQ ID NO: 1727825 - DNA, 15 bp, Homo sapiens
actccccgactatgc

SEQ ID NO: 1727826 - DNA, 15 bp, Homo sapiens
ctccccgactatgcc

SEQ ID NO: 1727827 - DNA, 15 bp, Homo sapiens
tccccgactatgcct

SEQ ID NO: 1727828 - DNA, 15 bp, Homo sapiens
ccccgactatgcctt

SEQ ID NO: 1727829 - DNA, 15 bp, Homo sapiens
cccgactatgccttg

SEQ ID NO: 1727830 - DNA, 15 bp, Homo sapiens
ccgactatgccttga

SEQ ID NO: 1727831 - DNA, 15 bp, Homo sapiens
cgactatgccttgag

SEQ ID NO: 1727832 - DNA, 15 bp, Homo sapiens
gactatgccttgagg

SEQ ID NO: 1727833 - DNA, 15 bp, Homo sapiens
actatgccttgaggg

SEQ ID NO: 1727834 - DNA, 15 bp, Homo sapiens
ctatgccttgagggt

SEQ ID NO: 1727835 - DNA, 15 bp, Homo sapiens
tatgccttgagggtc

SEQ ID NO: 1727836 - DNA, 15 bp, Homo sapiens
atgccttgagggtca

SEQ ID NO: 1727837 - DNA, 15 bp, Homo sapiens
tgccttgagggtcaa

SEQ ID NO: 1727838 - DNA, 15 bp, Homo sapiens
gccttgagggtcaaa

SEQ ID NO: 1727839 - DNA, 15 bp, Homo sapiens
ccttgagggtcaaaa

SEQ ID NO: 1727840 - DNA, 15 bp, Homo sapiens
cttgagggtcaaaac

SEQ ID NO: 1727841 - DNA, 15 bp, Homo sapiens
ttgagggtcaaaacg

SEQ ID NO: 1727842 - DNA, 15 bp, Homo sapiens
tgagggtcaaaacgt

SEQ ID NO: 1727843 - DNA, 15 bp, Homo sapiens
gagggtcaaaacgtc

SEQ ID NO: 1727844 - DNA, 15 bp, Homo sapiens
agggtcaaaacgtct

SEQ ID NO: 1727845 - DNA, 15 bp, Homo sapiens
gggtcaaaacgtctg

SEQ ID NO: 1727846 - DNA, 15 bp, Homo sapiens
ggtcaaaacgtctgg

SEQ ID NO: 1727847 - DNA, 15 bp, Homo sapiens
gtcaaaacgtctgga

SEQ ID NO: 1727848 - DNA, 15 bp, Homo sapiens
tcaaaacgtctggat

SEQ ID NO: 1727849 - DNA, 15 bp, Homo sapiens
caaaacgtctggatt

SEQ ID NO: 1727850 - DNA, 15 bp, Homo sapiens
aaaacgtctggattt

SEQ ID NO: 1727851 - DNA, 15 bp, Homo sapiens
aaacgtctggatttc

SEQ ID NO: 1727852 - DNA, 15 bp, Homo sapiens
aacgtctggatttcc

SEQ ID NO: 1727853 - DNA, 15 bp, Homo sapiens
acgtctggatttcct

SEQ ID NO: 1727854 - DNA, 15 bp, Homo sapiens
cgtctggatttcctg

SEQ ID NO: 1727855 - DNA, 15 bp, Homo sapiens
gtctggatttcctga

SEQ ID NO: 1727856 - DNA, 15 bp, Homo sapiens
tctggatttcctgat

SEQ ID NO: 1727857 - DNA, 15 bp, Homo sapiens
ctggatttcctgatc

SEQ ID NO: 1727858 - DNA, 15 bp, Homo sapiens
tggatttcctgatcg

SEQ ID NO: 1727859 - DNA, 15 bp, Homo sapiens
ggatttcctgatcga

SEQ ID NO: 1727860 - DNA, 15 bp, Homo sapiens
gatttcctgatcgat

SEQ ID NO: 1727861 - DNA, 15 bp, Homo sapiens
atttcctgatcgatg

SEQ ID NO: 1727862 - DNA, 15 bp, Homo sapiens
tttcctgatcgatgc

SEQ ID NO: 1727863 - DNA, 15 bp, Homo sapiens
ttcctgatcgatgct

SEQ ID NO: 1727864 - DNA, 15 bp, Homo sapiens
tcctgatcgatgctg

SEQ ID NO: 1727865 - DNA, 15 bp, Homo sapiens
cctgatcgatgctgt

SEQ ID NO: 1727866 - DNA, 15 bp, Homo sapiens
ctgatcgatgctgtc

SEQ ID NO: 1727867 - DNA, 15 bp, Homo sapiens
tgatcgatgctgtcg

SEQ ID NO: 1727868 - DNA, 15 bp, Homo sapiens
gatcgatgctgtcgt

SEQ ID NO: 1727869 - DNA, 15 bp, Homo sapiens
atcgatgctgtcgtc

SEQ ID NO: 1727870 - DNA, 15 bp, Homo sapiens
tcgatgctgtcgtcg

SEQ ID NO: 1727871 - DNA, 15 bp, Homo sapiens
cgatgctgtcgtcgc

SEQ ID NO: 1727872 - DNA, 15 bp, Homo sapiens
gatgctgtcgtcgct

SEQ ID NO: 1727873 - DNA, 15 bp, Homo sapiens
atgctgtcgtcgctg

SEQ ID NO: 1727874 - DNA, 15 bp, Homo sapiens
tgctgtcgtcgctgt

SEQ ID NO: 1727875 - DNA, 15 bp, Homo sapiens
gctgtcgtcgctgtc

SEQ ID NO: 1727876 - DNA, 15 bp, Homo sapiens
ctgtcgtcgctgtcc

SEQ ID NO: 1727877 - DNA, 15 bp, Homo sapiens
tgtcgtcgctgtcca

SEQ ID NO: 1727878 - DNA, 15 bp, Homo sapiens
gtcgtcgctgtccac

SEQ ID NO: 1727879 - DNA, 15 bp, Homo sapiens
tcgtcgctgtccacg

SEQ ID NO: 1727880 - DNA, 15 bp, Homo sapiens
cgtcgctgtccacgg

SEQ ID NO: 1727881 - DNA, 15 bp, Homo sapiens
gtcgctgtccacgga

SEQ ID NO: 1727882 - DNA, 15 bp, Homo sapiens
tcgctgtccacggag

SEQ ID NO: 1727883 - DNA, 15 bp, Homo sapiens
cgctgtccacggagc

SEQ ID NO: 1727884 - DNA, 15 bp, Homo sapiens
gctgtccacggagct

SEQ ID NO: 1727885 - DNA, 15 bp, Homo sapiens
ctgtccacggagcta

SEQ ID NO: 1727886 - DNA, 15 bp, Homo sapiens
tgtccacggagctac

SEQ ID NO: 1727887 - DNA, 15 bp, Homo sapiens
gtccacggagctact

SEQ ID NO: 1727888 - DNA, 15 bp, Homo sapiens
tccacggagctactg

SEQ ID NO: 1727889 - DNA, 15 bp, Homo sapiens
ccacggagctactgt

SEQ ID NO: 1727890 - DNA, 15 bp, Homo sapiens
cacggagctactgtc

SEQ ID NO: 1727891 - DNA, 15 bp, Homo sapiens
acggagctactgtcg

SEQ ID NO: 1727892 - DNA, 15 bp, Homo sapiens
cggagctactgtcgc

SEQ ID NO: 1727893 - DNA, 15 bp, Homo sapiens
ggagctactgtcgcc

SEQ ID NO: 1727894 - DNA, 15 bp, Homo sapiens
gagctactgtcgccg

SEQ ID NO: 1727895 - DNA, 15 bp, Homo sapiens
agctactgtcgccgt

SEQ ID NO: 1727896 - DNA, 15 bp, Homo sapiens
gctactgtcgccgtc

SEQ ID NO: 1727897 - DNA, 15 bp, Homo sapiens
ctactgtcgccgtca

SEQ ID NO: 1727898 - DNA, 15 bp, Homo sapiens
tactgtcgccgtcag

SEQ ID NO: 1727899 - DNA, 15 bp, Homo sapiens
actgtcgccgtcaga

SEQ ID NO: 1727900 - DNA, 15 bp, Homo sapiens
ctgtcgccgtcagag

SEQ ID NO: 1727901 - DNA, 15 bp, Homo sapiens
tgtcgccgtcagagc

SEQ ID NO: 1727902 - DNA, 15 bp, Homo sapiens
gtcgccgtcagagcg

SEQ ID NO: 1727903 - DNA, 15 bp, Homo sapiens
tcgccgtcagagcgg

SEQ ID NO: 1727904 - DNA, 15 bp, Homo sapiens
cgccgtcagagcggg

SEQ ID NO: 1727905 - DNA, 15 bp, Homo sapiens
gccgtcagagcggga

SEQ ID NO: 1727906 - DNA, 15 bp, Homo sapiens
ccgtcagagcgggaa

SEQ ID NO: 1727907 - DNA, 15 bp, Homo sapiens
cgtcagagcgggaag

SEQ ID NO: 1727908 - DNA, 15 bp, Homo sapiens
gtcagagcgggaagg

SEQ ID NO: 1727909 - DNA, 15 bp, Homo sapiens
tcagagcgggaaggc

SEQ ID NO: 1727910 - DNA, 15 bp, Homo sapiens
cagagcgggaaggca

SEQ ID NO: 1727911 - DNA, 15 bp, Homo sapiens
agagcgggaaggcac

SEQ ID NO: 1727912 - DNA, 15 bp, Homo sapiens
gagcgggaaggcacg

SEQ ID NO: 1727913 - DNA, 15 bp, Homo sapiens
agcgggaaggcacgt

SEQ ID NO: 1727914 - DNA, 15 bp, Homo sapiens
gcgggaaggcacgtt

SEQ ID NO: 1727915 - DNA, 15 bp, Homo sapiens
cgggaaggcacgttc

SEQ ID NO: 1727916 - DNA, 15 bp, Homo sapiens
gggaaggcacgttca

SEQ ID NO: 1727917 - DNA, 15 bp, Homo sapiens
ggaaggcacgttcag

SEQ ID NO: 1727918 - DNA, 15 bp, Homo sapiens
gaaggcacgttcagg

SEQ ID NO: 1727919 - DNA, 15 bp, Homo sapiens
aaggcacgttcaggg

SEQ ID NO: 1727920 - DNA, 15 bp, Homo sapiens
aggcacgttcaggga

SEQ ID NO: 1727921 - DNA, 15 bp, Homo sapiens
ggcacgttcagggag

SEQ ID NO: 1727922 - DNA, 15 bp, Homo sapiens
gcacgttcagggagt

SEQ ID NO: 1727923 - DNA, 15 bp, Homo sapiens
cacgttcagggagta

SEQ ID NO: 1727924 - DNA, 15 bp, Homo sapiens
acgttcagggagtag

SEQ ID NO: 1727925 - DNA, 15 bp, Homo sapiens
cgttcagggagtaga

SEQ ID NO: 1727926 - DNA, 15 bp, Homo sapiens
gttcagggagtagaa

SEQ ID NO: 1727927 - DNA, 15 bp, Homo sapiens
ttcagggagtagaag

SEQ ID NO: 1727928 - DNA, 15 bp, Homo sapiens
tcagggagtagaagc

SEQ ID NO: 1727929 - DNA, 15 bp, Homo sapiens
cagggagtagaagcg

SEQ ID NO: 1727930 - DNA, 15 bp, Homo sapiens
agggagtagaagcgt

SEQ ID NO: 1727931 - DNA, 15 bp, Homo sapiens
gggagtagaagcgtg

SEQ ID NO: 1727932 - DNA, 15 bp, Homo sapiens
ggagtagaagcgtgg

SEQ ID NO: 1727933 - DNA, 15 bp, Homo sapiens
gagtagaagcgtggg

SEQ ID NO: 1727934 - DNA, 15 bp, Homo sapiens
agtagaagcgtgggc

SEQ ID NO: 1727935 - DNA, 15 bp, Homo sapiens
gtagaagcgtgggct

SEQ ID NO: 1727936 - DNA, 15 bp, Homo sapiens
tagaagcgtgggctt

SEQ ID NO: 1727937 - DNA, 15 bp, Homo sapiens
agaagcgtgggcttg

SEQ ID NO: 1727938 - DNA, 15 bp, Homo sapiens
gaagcgtgggcttgc

SEQ ID NO: 1727939 - DNA, 15 bp, Homo sapiens
aagcgtgggcttgca

SEQ ID NO: 1727940 - DNA, 15 bp, Homo sapiens
agcgtgggcttgcag

SEQ ID NO: 1727941 - DNA, 15 bp, Homo sapiens
gcgtgggcttgcaga

SEQ ID NO: 1727942 - DNA, 15 bp, Homo sapiens
cgtgggcttgcagaa

SEQ ID NO: 1727943 - DNA, 15 bp, Homo sapiens
gtgggcttgcagaaa

SEQ ID NO: 1727944 - DNA, 15 bp, Homo sapiens
tgggcttgcagaaag

SEQ ID NO: 1727945 - DNA, 15 bp, Homo sapiens
gggcttgcagaaagg

SEQ ID NO: 1727946 - DNA, 15 bp, Homo sapiens
ggcttgcagaaaggg

SEQ ID NO: 1727947 - DNA, 15 bp, Homo sapiens
gcttgcagaaaggga

SEQ ID NO: 1727948 - DNA, 15 bp, Homo sapiens
cttgcagaaagggac

SEQ ID NO: 1727949 - DNA, 15 bp, Homo sapiens
ttgcagaaagggacc

SEQ ID NO: 1727950 - DNA, 15 bp, Homo sapiens
tgcagaaagggacct

SEQ ID NO: 1727951 - DNA, 15 bp, Homo sapiens
gcagaaagggacctg

SEQ ID NO: 1727952 - DNA, 15 bp, Homo sapiens
cagaaagggacctgt

SEQ ID NO: 1727953 - DNA, 15 bp, Homo sapiens
agaaagggacctgtt

SEQ ID NO: 1727954 - DNA, 15 bp, Homo sapiens
gaaagggacctgttg

SEQ ID NO: 1727955 - DNA, 15 bp, Homo sapiens
aaagggacctgttgc

SEQ ID NO: 1727956 - DNA, 15 bp, Homo sapiens
aagggacctgttgct

SEQ ID NO: 1727957 - DNA, 15 bp, Homo sapiens
agggacctgttgctg

SEQ ID NO: 1727958 - DNA, 15 bp, Homo sapiens
gggacctgttgctgc

SEQ ID NO: 1727959 - DNA, 15 bp, Homo sapiens
ggacctgttgctgcc

SEQ ID NO: 1727960 - DNA, 15 bp, Homo sapiens
gacctgttgctgcct

SEQ ID NO: 1727961 - DNA, 15 bp, Homo sapiens
acctgttgctgcctt

SEQ ID NO: 1727962 - DNA, 15 bp, Homo sapiens
cctgttgctgcctta

SEQ ID NO: 1727963 - DNA, 15 bp, Homo sapiens
ctgttgctgccttac

SEQ ID NO: 1727964 - DNA, 15 bp, Homo sapiens
tgttgctgccttaca

SEQ ID NO: 1727965 - DNA, 15 bp, Homo sapiens
gttgctgccttacat

SEQ ID NO: 1727966 - DNA, 15 bp, Homo sapiens
ttgctgccttacatg

SEQ ID NO: 1727967 - DNA, 15 bp, Homo sapiens
tgctgccttacatgg

SEQ ID NO: 1727968 - DNA, 15 bp, Homo sapiens
gctgccttacatggg

SEQ ID NO: 1727969 - DNA, 15 bp, Homo sapiens
ctgccttacatgggg

SEQ ID NO: 1727970 - DNA, 15 bp, Homo sapiens
tgccttacatggggg

SEQ ID NO: 1727971 - DNA, 15 bp, Homo sapiens
gccttacatgggggc

SEQ ID NO: 1727972 - DNA, 15 bp, Homo sapiens
ccttacatgggggcc

SEQ ID NO: 1727973 - DNA, 15 bp, Homo sapiens
cttacatgggggccg

SEQ ID NO: 1727974 - DNA, 15 bp, Homo sapiens
ttacatgggggccgg

SEQ ID NO: 1727975 - DNA, 15 bp, Homo sapiens
tacatgggggccggc

SEQ ID NO: 1727976 - DNA, 15 bp, Homo sapiens
acatgggggccggca

SEQ ID NO: 1727977 - DNA, 15 bp, Homo sapiens
catgggggccggcag

SEQ ID NO: 1727978 - DNA, 15 bp, Homo sapiens
atgggggccggcagg

SEQ ID NO: 1727979 - DNA, 15 bp, Homo sapiens
tgggggccggcaggg

SEQ ID NO: 1727980 - DNA, 15 bp, Homo sapiens
gggggccggcagggt

SEQ ID NO: 1727981 - DNA, 15 bp, Homo sapiens
ggggccggcagggta

SEQ ID NO: 1727982 - DNA, 15 bp, Homo sapiens
gggccggcagggtag

SEQ ID NO: 1727983 - DNA, 15 bp, Homo sapiens
ggccggcagggtagt

SEQ ID NO: 1727984 - DNA, 15 bp, Homo sapiens
gccggcagggtagtc

SEQ ID NO: 1727985 - DNA, 15 bp, Homo sapiens
ccggcagggtagtct

SEQ ID NO: 1727986 - DNA, 15 bp, Homo sapiens
cggcagggtagtctt

SEQ ID NO: 1727987 - DNA, 15 bp, Homo sapiens
ggcagggtagtcttg

SEQ ID NO: 1727988 - DNA, 15 bp, Homo sapiens
gcagggtagtcttgg

SEQ ID NO: 1727989 - DNA, 15 bp, Homo sapiens
cagggtagtcttgga

SEQ ID NO: 1727990 - DNA, 15 bp, Homo sapiens
agggtagtcttggaa

SEQ ID NO: 1727991 - DNA, 15 bp, Homo sapiens
gggtagtcttggaaa

SEQ ID NO: 1727992 - DNA, 15 bp, Homo sapiens
ggtagtcttggaaat

SEQ ID NO: 1727993 - DNA, 15 bp, Homo sapiens
gtagtcttggaaatg

SEQ ID NO: 1727994 - DNA, 15 bp, Homo sapiens
tagtcttggaaatgc

SEQ ID NO: 1727995 - DNA, 15 bp, Homo sapiens
agtcttggaaatgcc

SEQ ID NO: 1727996 - DNA, 15 bp, Homo sapiens
gtcttggaaatgccc

SEQ ID NO: 1727997 - DNA, 15 bp, Homo sapiens
tcttggaaatgccca

SEQ ID NO: 1727998 - DNA, 15 bp, Homo sapiens
cttggaaatgcccaa

SEQ ID NO: 1727999 - DNA, 15 bp, Homo sapiens
ttggaaatgcccaag

SEQ ID NO: 1728000 - DNA, 15 bp, Homo sapiens
tggaaatgcccaaga

SEQ ID NO: 1728001 - DNA, 15 bp, Homo sapiens
ggaaatgcccaagat

SEQ ID NO: 1728002 - DNA, 15 bp, Homo sapiens
gaaatgcccaagatt

SEQ ID NO: 1728003 - DNA, 15 bp, Homo sapiens
aaatgcccaagattg

SEQ ID NO: 1728004 - DNA, 15 bp, Homo sapiens
aatgcccaagattgc

SEQ ID NO: 1728005 - DNA, 15 bp, Homo sapiens
atgcccaagattgct

SEQ ID NO: 1728006 - DNA, 15 bp, Homo sapiens
tgcccaagattgctt

SEQ ID NO: 1728007 - DNA, 15 bp, Homo sapiens
gcccaagattgcttc

SEQ ID NO: 1728008 - DNA, 15 bp, Homo sapiens
cccaagattgcttcc

SEQ ID NO: 1728009 - DNA, 15 bp, Homo sapiens
ccaagattgcttccg

SEQ ID NO: 1728010 - DNA, 15 bp, Homo sapiens
caagattgcttccgc

SEQ ID NO: 1728011 - DNA, 15 bp, Homo sapiens
aagattgcttccgcg

SEQ ID NO: 1728012 - DNA, 15 bp, Homo sapiens
agattgcttccgcgc

SEQ ID NO: 1728013 - DNA, 15 bp, Homo sapiens
gattgcttccgcgcg

SEQ ID NO: 1728014 - DNA, 15 bp, Homo sapiens
attgcttccgcgcgc

SEQ ID NO: 1728015 - DNA, 15 bp, Homo sapiens
ttgcttccgcgcgcg

SEQ ID NO: 1728016 - DNA, 15 bp, Homo sapiens
tgcttccgcgcgcgt

SEQ ID NO: 1728017 - DNA, 15 bp, Homo sapiens
gcttccgcgcgcgtc

SEQ ID NO: 1728018 - DNA, 15 bp, Homo sapiens
cttccgcgcgcgtca

SEQ ID NO: 1728019 - DNA, 15 bp, Homo sapiens
ttccgcgcgcgtcag

SEQ ID NO: 1728020 - DNA, 15 bp, Homo sapiens
tccgcgcgcgtcagt

SEQ ID NO: 1728021 - DNA, 15 bp, Homo sapiens
ccgcgcgcgtcagtt

SEQ ID NO: 1728022 - DNA, 15 bp, Homo sapiens
cgcgcgcgtcagttc

SEQ ID NO: 1728023 - DNA, 15 bp, Homo sapiens
gcgcgcgtcagttca

SEQ ID NO: 1728024 - DNA, 15 bp, Homo sapiens
cgcgcgtcagttcag

SEQ ID NO: 1728025 - DNA, 15 bp, Homo sapiens
gcgcgtcagttcagc

SEQ ID NO: 1728026 - DNA, 15 bp, Homo sapiens
cgcgtcagttcagcg

SEQ ID NO: 1728027 - DNA, 15 bp, Homo sapiens
gcgtcagttcagcgg

SEQ ID NO: 1728028 - DNA, 15 bp, Homo sapiens
cgtcagttcagcgga

SEQ ID NO: 1728029 - DNA, 15 bp, Homo sapiens
gtcagttcagcggac

SEQ ID NO: 1728030 - DNA, 15 bp, Homo sapiens
tcagttcagcggacg

SEQ ID NO: 1728031 - DNA, 15 bp, Homo sapiens
cagttcagcggacgt

SEQ ID NO: 1728032 - DNA, 15 bp, Homo sapiens
agttcagcggacgtg

SEQ ID NO: 1728033 - DNA, 15 bp, Homo sapiens
gttcagcggacgtgt

SEQ ID NO: 1728034 - DNA, 15 bp, Homo sapiens
ttcagcggacgtgtc

SEQ ID NO: 1728035 - DNA, 15 bp, Homo sapiens
tcagcggacgtgtct

SEQ ID NO: 1728036 - DNA, 15 bp, Homo sapiens
cagcggacgtgtctg

SEQ ID NO: 1728037 - DNA, 15 bp, Homo sapiens
agcggacgtgtctgc

SEQ ID NO: 1728038 - DNA, 15 bp, Homo sapiens
gcggacgtgtctgcc

SEQ ID NO: 1728039 - DNA, 15 bp, Homo sapiens
cggacgtgtctgcct

SEQ ID NO: 1728040 - DNA, 15 bp, Homo sapiens
ggacgtgtctgcctg

SEQ ID NO: 1728041 - DNA, 15 bp, Homo sapiens
gacgtgtctgcctgg

SEQ ID NO: 1728042 - DNA, 15 bp, Homo sapiens
acgtgtctgcctggc

SEQ ID NO: 1728043 - DNA, 15 bp, Homo sapiens
cgtgtctgcctggca

SEQ ID NO: 1728044 - DNA, 15 bp, Homo sapiens
gtgtctgcctggcac

SEQ ID NO: 1728045 - DNA, 15 bp, Homo sapiens
tgtctgcctggcacg

SEQ ID NO: 1728046 - DNA, 15 bp, Homo sapiens
gtctgcctggcacga

SEQ ID NO: 1728047 - DNA, 15 bp, Homo sapiens
tctgcctggcacgag

SEQ ID NO: 1728048 - DNA, 15 bp, Homo sapiens
ctgcctggcacgagg

SEQ ID NO: 1728049 - DNA, 15 bp, Homo sapiens
tgcctggcacgagga

SEQ ID NO: 1728050 - DNA, 15 bp, Homo sapiens
gcctggcacgaggac

SEQ ID NO: 1728051 - DNA, 15 bp, Homo sapiens
cctggcacgaggacc

SEQ ID NO: 1728052 - DNA, 15 bp, Homo sapiens
ctggcacgaggaccg

SEQ ID NO: 1728053 - DNA, 15 bp, Homo sapiens
tggcacgaggaccgt

SEQ ID NO: 1728054 - DNA, 15 bp, Homo sapiens
ggcacgaggaccgtt

SEQ ID NO: 1728055 - DNA, 15 bp, Homo sapiens
gcacgaggaccgttc

SEQ ID NO: 1728056 - DNA, 15 bp, Homo sapiens
cacgaggaccgttct

SEQ ID NO: 1728057 - DNA, 15 bp, Homo sapiens
acgaggaccgttcta

SEQ ID NO: 1728058 - DNA, 15 bp, Homo sapiens
cgaggaccgttctac

SEQ ID NO: 1728059 - DNA, 15 bp, Homo sapiens
gaggaccgttctaca

SEQ ID NO: 1728060 - DNA, 15 bp, Homo sapiens
aggaccgttctacaa

SEQ ID NO: 1728061 - DNA, 15 bp, Homo sapiens
ggaccgttctacaaa

SEQ ID NO: 1728062 - DNA, 15 bp, Homo sapiens
gaccgttctacaaac

SEQ ID NO: 1728063 - DNA, 15 bp, Homo sapiens
accgttctacaaact

SEQ ID NO: 1728064 - DNA, 15 bp, Homo sapiens
ccgttctacaaactc

SEQ ID NO: 1728065 - DNA, 15 bp, Homo sapiens
cgttctacaaactcg

SEQ ID NO: 1728066 - DNA, 15 bp, Homo sapiens
gttctacaaactcgt

SEQ ID NO: 1728067 - DNA, 15 bp, Homo sapiens
ttctacaaactcgtt

SEQ ID NO: 1728068 - DNA, 15 bp, Homo sapiens
tctacaaactcgttc

SEQ ID NO: 1728069 - DNA, 15 bp, Homo sapiens
ctacaaactcgttcc

SEQ ID NO: 1728070 - DNA, 15 bp, Homo sapiens
tacaaactcgttcct

SEQ ID NO: 1728071 - DNA, 15 bp, Homo sapiens
acaaactcgttcctg

SEQ ID NO: 1728072 - DNA, 15 bp, Homo sapiens
caaactcgttcctgg

SEQ ID NO: 1728073 - DNA, 15 bp, Homo sapiens
aaactcgttcctgga

SEQ ID NO: 1728074 - DNA, 15 bp, Homo sapiens
aactcgttcctggaa

SEQ ID NO: 1728075 - DNA, 15 bp, Homo sapiens
actcgttcctggaag

SEQ ID NO: 1728076 - DNA, 15 bp, Homo sapiens
ctcgttcctggaagc

SEQ ID NO: 1728077 - DNA, 15 bp, Homo sapiens
tcgttcctggaagcc

SEQ ID NO: 1728078 - DNA, 15 bp, Homo sapiens
cgttcctggaagccg

SEQ ID NO: 1728079 - DNA, 15 bp, Homo sapiens
gttcctggaagccgg

SEQ ID NO: 1728080 - DNA, 15 bp, Homo sapiens
ttcctggaagccggg

SEQ ID NO: 1728081 - DNA, 15 bp, Homo sapiens
tcctggaagccgggc

SEQ ID NO: 1728082 - DNA, 15 bp, Homo sapiens
cctggaagccgggct

SEQ ID NO: 1728083 - DNA, 15 bp, Homo sapiens
ctggaagccgggctc

SEQ ID NO: 1728084 - DNA, 15 bp, Homo sapiens
tggaagccgggctcg

SEQ ID NO: 1728085 - DNA, 15 bp, Homo sapiens
ggaagccgggctcgc

SEQ ID NO: 1728086 - DNA, 15 bp, Homo sapiens
gaagccgggctcgct

SEQ ID NO: 1728087 - DNA, 15 bp, Homo sapiens
aagccgggctcgctg

SEQ ID NO: 1728088 - DNA, 15 bp, Homo sapiens
agccgggctcgctgg

SEQ ID NO: 1728089 - DNA, 15 bp, Homo sapiens
gccgggctcgctgga

SEQ ID NO: 1728090 - DNA, 15 bp, Homo sapiens
ccgggctcgctggag

SEQ ID NO: 1728091 - DNA, 15 bp, Homo sapiens
cgggctcgctggagg

SEQ ID NO: 1728092 - DNA, 15 bp, Homo sapiens
gggctcgctggaggc

SEQ ID NO: 1728093 - DNA, 15 bp, Homo sapiens
ggctcgctggaggcg

SEQ ID NO: 1728094 - DNA, 15 bp, Homo sapiens
gctcgctggaggcgg

SEQ ID NO: 1728095 - DNA, 15 bp, Homo sapiens
ctcgctggaggcgga

SEQ ID NO: 1728096 - DNA, 15 bp, Homo sapiens
tcgctggaggcggag

SEQ ID NO: 1728097 - DNA, 15 bp, Homo sapiens
cgctggaggcggagc

SEQ ID NO: 1728098 - DNA, 15 bp, Homo sapiens
gctggaggcggagct

SEQ ID NO: 1728099 - DNA, 15 bp, Homo sapiens
ctggaggcggagctt

SEQ ID NO: 1728100 - DNA, 15 bp, Homo sapiens
tggaggcggagcttt

SEQ ID NO: 1728101 - DNA, 15 bp, Homo sapiens
ggaggcggagctttg

SEQ ID NO: 1728102 - DNA, 15 bp, Homo sapiens
gaggcggagctttgg

SEQ ID NO: 1728103 - DNA, 15 bp, Homo sapiens
aggcggagctttggt

SEQ ID NO: 1728104 - DNA, 15 bp, Homo sapiens
ggcggagctttggtt

SEQ ID NO: 1728105 - DNA, 15 bp, Homo sapiens
gcggagctttggttt

SEQ ID NO: 1728106 - DNA, 15 bp, Homo sapiens
cggagctttggtttc

SEQ ID NO: 1728107 - DNA, 15 bp, Homo sapiens
ggagctttggtttcc

SEQ ID NO: 1728108 - DNA, 15 bp, Homo sapiens
gagctttggtttcct

SEQ ID NO: 1728109 - DNA, 15 bp, Homo sapiens
agctttggtttcctt

SEQ ID NO: 1728110 - DNA, 15 bp, Homo sapiens
gctttggtttccttc

SEQ ID NO: 1728111 - DNA, 15 bp, Homo sapiens
ctttggtttccttcg

SEQ ID NO: 1728112 - DNA, 15 bp, Homo sapiens
tttggtttccttcgg

SEQ ID NO: 1728113 - DNA, 15 bp, Homo sapiens
ttggtttccttcggg

SEQ ID NO: 1728114 - DNA, 15 bp, Homo sapiens
tggtttccttcggga

SEQ ID NO: 1728115 - DNA, 15 bp, Homo sapiens
ggtttccttcgggag

SEQ ID NO: 1728116 - DNA, 15 bp, Homo sapiens
gtttccttcgggagc

SEQ ID NO: 1728117 - DNA, 15 bp, Homo sapiens
tttccttcgggagct

SEQ ID NO: 1728118 - DNA, 15 bp, Homo sapiens
ttccttcgggagctt

SEQ ID NO: 1728119 - DNA, 15 bp, Homo sapiens
tccttcgggagcttg

SEQ ID NO: 1728120 - DNA, 15 bp, Homo sapiens
ccttcgggagcttgt

SEQ ID NO: 1728121 - DNA, 15 bp, Homo sapiens
cttcgggagcttgtg

SEQ ID NO: 1728122 - DNA, 15 bp, Homo sapiens
ttcgggagcttgtgg

SEQ ID NO: 1728123 - DNA, 15 bp, Homo sapiens
tcgggagcttgtggg

SEQ ID NO: 1728124 - DNA, 15 bp, Homo sapiens
cgggagcttgtgggg

SEQ ID NO: 1728125 - DNA, 15 bp, Homo sapiens
gggagcttgtgggga

SEQ ID NO: 1728126 - DNA, 15 bp, Homo sapiens
ggagcttgtggggaa

SEQ ID NO: 1728127 - DNA, 15 bp, Homo sapiens
gagcttgtggggaat

SEQ ID NO: 1728128 - DNA, 15 bp, Homo sapiens
agcttgtggggaatg

SEQ ID NO: 1728129 - DNA, 15 bp, Homo sapiens
gcttgtggggaatgg

SEQ ID NO: 1728130 - DNA, 15 bp, Homo sapiens
cttgtggggaatggt

SEQ ID NO: 1728131 - DNA, 15 bp, Homo sapiens
ttgtggggaatggtc

SEQ ID NO: 1728132 - DNA, 15 bp, Homo sapiens
tgtggggaatggtca

SEQ ID NO: 1728133 - DNA, 15 bp, Homo sapiens
gtggggaatggtcag

SEQ ID NO: 1728134 - DNA, 15 bp, Homo sapiens
tggggaatggtcagc

SEQ ID NO: 1728135 - DNA, 15 bp, Homo sapiens
ggggaatggtcagcg

SEQ ID NO: 1728136 - DNA, 15 bp, Homo sapiens
gggaatggtcagcgt

SEQ ID NO: 1728137 - DNA, 15 bp, Homo sapiens
ggaatggtcagcgtc

SEQ ID NO: 1728138 - DNA, 15 bp, Homo sapiens
gaatggtcagcgtct

SEQ ID NO: 1728139 - DNA, 15 bp, Homo sapiens
aatggtcagcgtcta

SEQ ID NO: 1728140 - DNA, 15 bp, Homo sapiens
atggtcagcgtctag

SEQ ID NO: 1728141 - DNA, 15 bp, Homo sapiens
tggtcagcgtctagg

SEQ ID NO: 1728142 - DNA, 15 bp, Homo sapiens
ggtcagcgtctaggc

SEQ ID NO: 1728143 - DNA, 15 bp, Homo sapiens
gtcagcgtctaggca

SEQ ID NO: 1728144 - DNA, 15 bp, Homo sapiens
tcagcgtctaggcac

SEQ ID NO: 1728145 - DNA, 15 bp, Homo sapiens
cagcgtctaggcacc

SEQ ID NO: 1728146 - DNA, 15 bp, Homo sapiens
agcgtctaggcaccc

SEQ ID NO: 1728147 - DNA, 15 bp, Homo sapiens
gcgtctaggcacccc

SEQ ID NO: 1728148 - DNA, 15 bp, Homo sapiens
cgtctaggcaccccg

SEQ ID NO: 1728149 - DNA, 15 bp, Homo sapiens
gtctaggcaccccgg

SEQ ID NO: 1728150 - DNA, 15 bp, Homo sapiens
tctaggcaccccggg

SEQ ID NO: 1728151 - DNA, 15 bp, Homo sapiens
ctaggcaccccgggc

SEQ ID NO: 1728152 - DNA, 15 bp, Homo sapiens
taggcaccccgggca

SEQ ID NO: 1728153 - DNA, 15 bp, Homo sapiens
aggcaccccgggcaa

SEQ ID NO: 1728154 - DNA, 15 bp, Homo sapiens
ggcaccccgggcaag

SEQ ID NO: 1728155 - DNA, 15 bp, Homo sapiens
gcaccccgggcaagg

SEQ ID NO: 1728156 - DNA, 15 bp, Homo sapiens
caccccgggcaaggg

SEQ ID NO: 1728157 - DNA, 15 bp, Homo sapiens
accccgggcaagggt

SEQ ID NO: 1728158 - DNA, 15 bp, Homo sapiens
ccccgggcaagggtc

SEQ ID NO: 1728159 - DNA, 15 bp, Homo sapiens
cccgggcaagggtct

SEQ ID NO: 1728160 - DNA, 15 bp, Homo sapiens
ccgggcaagggtctg

SEQ ID NO: 1728161 - DNA, 15 bp, Homo sapiens
cgggcaagggtctgt

SEQ ID NO: 1728162 - DNA, 15 bp, Homo sapiens
gggcaagggtctgtg

SEQ ID NO: 1728163 - DNA, 15 bp, Homo sapiens
ggcaagggtctgtgg

SEQ ID NO: 1728164 - DNA, 15 bp, Homo sapiens
gcaagggtctgtggc

SEQ ID NO: 1728165 - DNA, 15 bp, Homo sapiens
caagggtctgtggcc

SEQ ID NO: 1728166 - DNA, 15 bp, Homo sapiens
aagggtctgtggcct

SEQ ID NO: 1728167 - DNA, 15 bp, Homo sapiens
agggtctgtggcctt

SEQ ID NO: 1728168 - DNA, 15 bp, Homo sapiens
gggtctgtggccttg

SEQ ID NO: 1728169 - DNA, 15 bp, Homo sapiens
ggtctgtggccttgg

SEQ ID NO: 1728170 - DNA, 15 bp, Homo sapiens
gtctgtggccttggt

SEQ ID NO: 1728171 - DNA, 15 bp, Homo sapiens
tctgtggccttggtg

SEQ ID NO: 1728172 - DNA, 15 bp, Homo sapiens
ctgtggccttggtgg

SEQ ID NO: 1728173 - DNA, 15 bp, Homo sapiens
tgtggccttggtggc

SEQ ID NO: 1728174 - DNA, 15 bp, Homo sapiens
gtggccttggtggcc

SEQ ID NO: 1728175 - DNA, 15 bp, Homo sapiens
tggccttggtggcca

SEQ ID NO: 1728176 - DNA, 15 bp, Homo sapiens
ggccttggtggccac

SEQ ID NO: 1728177 - DNA, 15 bp, Homo sapiens
gccttggtggccact

SEQ ID NO: 1728178 - DNA, 15 bp, Homo sapiens
ccttggtggccactg

SEQ ID NO: 1728179 - DNA, 15 bp, Homo sapiens
cttggtggccactgg

SEQ ID NO: 1728180 - DNA, 15 bp, Homo sapiens
ttggtggccactggc

SEQ ID NO: 1728181 - DNA, 15 bp, Homo sapiens
tggtggccactggct

SEQ ID NO: 1728182 - DNA, 15 bp, Homo sapiens
ggtggccactggctt

SEQ ID NO: 1728183 - DNA, 15 bp, Homo sapiens
gtggccactggcttc

SEQ ID NO: 1728184 - DNA, 15 bp, Homo sapiens
tggccactggcttcc

SEQ ID NO: 1728185 - DNA, 15 bp, Homo sapiens
ggccactggcttcct

SEQ ID NO: 1728186 - DNA, 15 bp, Homo sapiens
gccactggcttcctc

SEQ ID NO: 1728187 - DNA, 15 bp, Homo sapiens
ccactggcttcctct

SEQ ID NO: 1728188 - DNA, 15 bp, Homo sapiens
cactggcttcctcta

SEQ ID NO: 1728189 - DNA, 15 bp, Homo sapiens
actggcttcctctag

SEQ ID NO: 1728190 - DNA, 15 bp, Homo sapiens
ctggcttcctctagc

SEQ ID NO: 1728191 - DNA, 15 bp, Homo sapiens
tggcttcctctagct

SEQ ID NO: 1728192 - DNA, 15 bp, Homo sapiens
ggcttcctctagctg

SEQ ID NO: 1728193 - DNA, 15 bp, Homo sapiens
gcttcctctagctgg

SEQ ID NO: 1728194 - DNA, 15 bp, Homo sapiens
cttcctctagctggg

SEQ ID NO: 1728195 - DNA, 15 bp, Homo sapiens
ttcctctagctgggt

SEQ ID NO: 1728196 - DNA, 15 bp, Homo sapiens
tcctctagctgggtg

SEQ ID NO: 1728197 - DNA, 15 bp, Homo sapiens
cctctagctgggtgt

SEQ ID NO: 1728198 - DNA, 15 bp, Homo sapiens
ctctagctgggtgtt

SEQ ID NO: 1728199 - DNA, 15 bp, Homo sapiens
tctagctgggtgttt

SEQ ID NO: 1728200 - DNA, 15 bp, Homo sapiens
tagctgggtgttttc

SEQ ID NO: 1728201 - DNA, 15 bp, Homo sapiens
agctgggtgttttcc

SEQ ID NO: 1728202 - DNA, 15 bp, Homo sapiens
gctgggtgttttcct

SEQ ID NO: 1728203 - DNA, 15 bp, Homo sapiens
ctgggtgttttcctg

SEQ ID NO: 1728204 - DNA, 15 bp, Homo sapiens
tgggtgttttcctgt

SEQ ID NO: 1728205 - DNA, 15 bp, Homo sapiens
gggtgttttcctgtg

SEQ ID NO: 1728206 - DNA, 15 bp, Homo sapiens
ggtgttttcctgtgg

SEQ ID NO: 1728207 - DNA, 15 bp, Homo sapiens
gtgttttcctgtggg

SEQ ID NO: 1728208 - DNA, 15 bp, Homo sapiens
tgttttcctgtgggt

SEQ ID NO: 1728209 - DNA, 15 bp, Homo sapiens
gttttcctgtgggtc

SEQ ID NO: 1728210 - DNA, 15 bp, Homo sapiens
ttttcctgtgggtct

SEQ ID NO: 1728211 - DNA, 15 bp, Homo sapiens
tttcctgtgggtctc

SEQ ID NO: 1728212 - DNA, 15 bp, Homo sapiens
ttcctgtgggtctcg

SEQ ID NO: 1728213 - DNA, 15 bp, Homo sapiens
tcctgtgggtctcgc

SEQ ID NO: 1728214 - DNA, 15 bp, Homo sapiens
cctgtgggtctcgcg

SEQ ID NO: 1728215 - DNA, 15 bp, Homo sapiens
ctgtgggtctcgcgc

SEQ ID NO: 1728216 - DNA, 15 bp, Homo sapiens
tgtgggtctcgcgca

SEQ ID NO: 1728217 - DNA, 15 bp, Homo sapiens
gtgggtctcgcgcaa

SEQ ID NO: 1728218 - DNA, 15 bp, Homo sapiens
tgggtctcgcgcaag

SEQ ID NO: 1728219 - DNA, 15 bp, Homo sapiens
gggtctcgcgcaagg

SEQ ID NO: 1728220 - DNA, 15 bp, Homo sapiens
ggtctcgcgcaaggc

SEQ ID NO: 1728221 - DNA, 15 bp, Homo sapiens
gtctcgcgcaaggca

SEQ ID NO: 1728222 - DNA, 15 bp, Homo sapiens
tctcgcgcaaggcac

SEQ ID NO: 1728223 - DNA, 15 bp, Homo sapiens
ctcgcgcaaggcact

SEQ ID NO: 1728224 - DNA, 15 bp, Homo sapiens
tcgcgcaaggcactt

SEQ ID NO: 1728225 - DNA, 15 bp, Homo sapiens
cgcgcaaggcacttt

SEQ ID NO: 1728226 - DNA, 15 bp, Homo sapiens
gcgcaaggcactttt

SEQ ID NO: 1728227 - DNA, 15 bp, Homo sapiens
cgcaaggcacttttt

SEQ ID NO: 1728228 - DNA, 15 bp, Homo sapiens
gcaaggcactttttt

SEQ ID NO: 1728229 - DNA, 15 bp, Homo sapiens
caaggcacttttttg

SEQ ID NO: 1728230 - DNA, 15 bp, Homo sapiens
aaggcacttttttgt

SEQ ID NO: 1728231 - DNA, 15 bp, Homo sapiens
aggcacttttttgtg

SEQ ID NO: 1728232 - DNA, 15 bp, Homo sapiens
ggcacttttttgtgg

SEQ ID NO: 1728233 - DNA, 15 bp, Homo sapiens
gcacttttttgtggc

SEQ ID NO: 1728234 - DNA, 15 bp, Homo sapiens
cacttttttgtggcg

SEQ ID NO: 1728235 - DNA, 15 bp, Homo sapiens
acttttttgtggcgc

SEQ ID NO: 1728236 - DNA, 15 bp, Homo sapiens
cttttttgtggcgct

SEQ ID NO: 1728237 - DNA, 15 bp, Homo sapiens
ttttttgtggcgctg

SEQ ID NO: 1728238 - DNA, 15 bp, Homo sapiens
tttttgtggcgctgc

SEQ ID NO: 1728239 - DNA, 15 bp, Homo sapiens
ttttgtggcgctgct

SEQ ID NO: 1728240 - DNA, 15 bp, Homo sapiens
tttgtggcgctgctt

SEQ ID NO: 1728241 - DNA, 15 bp, Homo sapiens
ttgtggcgctgcttg

SEQ ID NO: 1728242 - DNA, 15 bp, Homo sapiens
tgtggcgctgcttgt

SEQ ID NO: 1728243 - DNA, 15 bp, Homo sapiens
gtggcgctgcttgtg

SEQ ID NO: 1728244 - DNA, 15 bp, Homo sapiens
tggcgctgcttgtgc

SEQ ID NO: 1728245 - DNA, 15 bp, Homo sapiens
ggcgctgcttgtgct

SEQ ID NO: 1728246 - DNA, 15 bp, Homo sapiens
gcgctgcttgtgctg

SEQ ID NO: 1728247 - DNA, 15 bp, Homo sapiens
cgctgcttgtgctgt

SEQ ID NO: 1728248 - DNA, 15 bp, Homo sapiens
gctgcttgtgctgtg

SEQ ID NO: 1728249 - DNA, 15 bp, Homo sapiens
ctgcttgtgctgtgt

SEQ ID NO: 1728250 - DNA, 15 bp, Homo sapiens
tgcttgtgctgtgtg

SEQ ID NO: 1728251 - DNA, 15 bp, Homo sapiens
gcttgtgctgtgtgc

SEQ ID NO: 1728252 - DNA, 15 bp, Homo sapiens
cttgtgctgtgtgcg

SEQ ID NO: 1728253 - DNA, 15 bp, Homo sapiens
ttgtgctgtgtgcgg

SEQ ID NO: 1728254 - DNA, 15 bp, Homo sapiens
tgtgctgtgtgcggg

SEQ ID NO: 1728255 - DNA, 15 bp, Homo sapiens
gtgctgtgtgcgggg

SEQ ID NO: 1728256 - DNA, 15 bp, Homo sapiens
tgctgtgtgcggggt

SEQ ID NO: 1728257 - DNA, 15 bp, Homo sapiens
gctgtgtgcggggtc

SEQ ID NO: 1728258 - DNA, 15 bp, Homo sapiens
ctgtgtgcggggtca

SEQ ID NO: 1728259 - DNA, 15 bp, Homo sapiens
tgtgtgcggggtcag

SEQ ID NO: 1728260 - DNA, 15 bp, Homo sapiens
gtgtgcggggtcagg

SEQ ID NO: 1728261 - DNA, 15 bp, Homo sapiens
tgtgcggggtcaggc

SEQ ID NO: 1728262 - DNA, 15 bp, Homo sapiens
gtgcggggtcaggcg

SEQ ID NO: 1728263 - DNA, 15 bp, Homo sapiens
tgcggggtcaggcgt

SEQ ID NO: 1728264 - DNA, 15 bp, Homo sapiens
gcggggtcaggcgtc

SEQ ID NO: 1728265 - DNA, 15 bp, Homo sapiens
cggggtcaggcgtcc

SEQ ID NO: 1728266 - DNA, 15 bp, Homo sapiens
ggggtcaggcgtcct

SEQ ID NO: 1728267 - DNA, 15 bp, Homo sapiens
gggtcaggcgtcctc

SEQ ID NO: 1728268 - DNA, 15 bp, Homo sapiens
ggtcaggcgtcctct

SEQ ID NO: 1728269 - DNA, 15 bp, Homo sapiens
gtcaggcgtcctctc

SEQ ID NO: 1728270 - DNA, 15 bp, Homo sapiens
tcaggcgtcctctct

SEQ ID NO: 1728271 - DNA, 15 bp, Homo sapiens
caggcgtcctctctc

SEQ ID NO: 1728272 - DNA, 15 bp, Homo sapiens
aggcgtcctctctcc

SEQ ID NO: 1728273 - DNA, 15 bp, Homo sapiens
ggcgtcctctctcct

SEQ ID NO: 1728274 - DNA, 15 bp, Homo sapiens
gcgtcctctctcctc

SEQ ID NO: 1728275 - DNA, 15 bp, Homo sapiens
cgtcctctctcctcc

SEQ ID NO: 1728276 - DNA, 15 bp, Homo sapiens
gtcctctctcctccc

SEQ ID NO: 1728277 - DNA, 15 bp, Homo sapiens
tcctctctcctcccg

SEQ ID NO: 1728278 - DNA, 15 bp, Homo sapiens
cctctctcctcccgg

SEQ ID NO: 1728279 - DNA, 15 bp, Homo sapiens
ctctctcctcccggc

SEQ ID NO: 1728280 - DNA, 15 bp, Homo sapiens
tctctcctcccggcg

SEQ ID NO: 1728281 - DNA, 15 bp, Homo sapiens
ctctcctcccggcgc

SEQ ID NO: 1728282 - DNA, 15 bp, Homo sapiens
tctcctcccggcgct

SEQ ID NO: 1728283 - DNA, 15 bp, Homo sapiens
ctcctcccggcgctg

SEQ ID NO: 1728284 - DNA, 15 bp, Homo sapiens
tcctcccggcgctgg

SEQ ID NO: 1728285 - DNA, 15 bp, Homo sapiens
cctcccggcgctggg

SEQ ID NO: 1728286 - DNA, 15 bp, Homo sapiens
ctcccggcgctgggc

SEQ ID NO: 1728287 - DNA, 15 bp, Homo sapiens
tcccggcgctgggcc

SEQ ID NO: 1728288 - DNA, 15 bp, Homo sapiens
cccggcgctgggccc

SEQ ID NO: 1728289 - DNA, 15 bp, Homo sapiens
ccggcgctgggccct

SEQ ID NO: 1728290 - DNA, 15 bp, Homo sapiens
cggcgctgggccctc

SEQ ID NO: 1728291 - DNA, 15 bp, Homo sapiens
ggcgctgggccctct

SEQ ID NO: 1728292 - DNA, 15 bp, Homo sapiens
gcgctgggccctctg

SEQ ID NO: 1728293 - DNA, 15 bp, Homo sapiens
cgctgggccctctgg

SEQ ID NO: 1728294 - DNA, 15 bp, Homo sapiens
gctgggccctctggg

SEQ ID NO: 1728295 - DNA, 15 bp, Homo sapiens
ctgggccctctgggg

SEQ ID NO: 1728296 - DNA, 15 bp, Homo sapiens
tgggccctctggggc

SEQ ID NO: 1728297 - DNA, 15 bp, Homo sapiens
gggccctctggggca

SEQ ID NO: 1728298 - DNA, 15 bp, Homo sapiens
ggccctctggggcag

SEQ ID NO: 1728299 - DNA, 15 bp, Homo sapiens
gccctctggggcagg

SEQ ID NO: 1728300 - DNA, 15 bp, Homo sapiens
ccctctggggcaggt

SEQ ID NO: 1728301 - DNA, 15 bp, Homo sapiens
cctctggggcaggtc

SEQ ID NO: 1728302 - DNA, 15 bp, Homo sapiens
ctctggggcaggtcc

SEQ ID NO: 1728303 - DNA, 15 bp, Homo sapiens
tctggggcaggtccc

SEQ ID NO: 1728304 - DNA, 15 bp, Homo sapiens
ctggggcaggtcccc

SEQ ID NO: 1728305 - DNA, 15 bp, Homo sapiens
tggggcaggtccccg

SEQ ID NO: 1728306 - DNA, 15 bp, Homo sapiens
ggggcaggtccccgt

SEQ ID NO: 1728307 - DNA, 15 bp, Homo sapiens
gggcaggtccccgtt

SEQ ID NO: 1728308 - DNA, 15 bp, Homo sapiens
ggcaggtccccgttg

SEQ ID NO: 1728309 - DNA, 15 bp, Homo sapiens
gcaggtccccgttgg

SEQ ID NO: 1728310 - DNA, 15 bp, Homo sapiens
caggtccccgttggc

SEQ ID NO: 1728311 - DNA, 15 bp, Homo sapiens
aggtccccgttggcc

SEQ ID NO: 1728312 - DNA, 15 bp, Homo sapiens
ggtccccgttggcct

SEQ ID NO: 1728313 - DNA, 15 bp, Homo sapiens
gtccccgttggcctc

SEQ ID NO: 1728314 - DNA, 15 bp, Homo sapiens
tccccgttggcctcc

SEQ ID NO: 1728315 - DNA, 15 bp, Homo sapiens
ccccgttggcctcct

SEQ ID NO: 1728316 - DNA, 15 bp, Homo sapiens
cccgttggcctcctt

SEQ ID NO: 1728317 - DNA, 15 bp, Homo sapiens
ccgttggcctccttg

SEQ ID NO: 1728318 - DNA, 15 bp, Homo sapiens
cgttggcctccttgc

SEQ ID NO: 1728319 - DNA, 15 bp, Homo sapiens
gttggcctccttgcg

SEQ ID NO: 1728320 - DNA, 15 bp, Homo sapiens
ttggcctccttgcgt

SEQ ID NO: 1728321 - DNA, 15 bp, Homo sapiens
tggcctccttgcgtg

SEQ ID NO: 1728322 - DNA, 15 bp, Homo sapiens
ggcctccttgcgtgt

SEQ ID NO: 1728323 - DNA, 15 bp, Homo sapiens
gcctccttgcgtgtt

SEQ ID NO: 1728324 - DNA, 15 bp, Homo sapiens
cctccttgcgtgttt

SEQ ID NO: 1728325 - DNA, 15 bp, Homo sapiens
ctccttgcgtgtttg

SEQ ID NO: 1728326 - DNA, 15 bp, Homo sapiens
tccttgcgtgtttgc

SEQ ID NO: 1728327 - DNA, 15 bp, Homo sapiens
ccttgcgtgtttgcc

SEQ ID NO: 1728328 - DNA, 15 bp, Homo sapiens
cttgcgtgtttgccg

SEQ ID NO: 1728329 - DNA, 15 bp, Homo sapiens
ttgcgtgtttgccgc

SEQ ID NO: 1728330 - DNA, 15 bp, Homo sapiens
tgcgtgtttgccgca

SEQ ID NO: 1728331 - DNA, 15 bp, Homo sapiens
gcgtgtttgccgcag

SEQ ID NO: 1728332 - DNA, 15 bp, Homo sapiens
cgtgtttgccgcagc

SEQ ID NO: 1728333 - DNA, 15 bp, Homo sapiens
gtgtttgccgcagct

SEQ ID NO: 1728334 - DNA, 15 bp, Homo sapiens
tgtttgccgcagcta

SEQ ID NO: 1728335 - DNA, 15 bp, Homo sapiens
gtttgccgcagctag

SEQ ID NO: 1728336 - DNA, 15 bp, Homo sapiens
tttgccgcagctagt

SEQ ID NO: 1728337 - DNA, 15 bp, Homo sapiens
ttgccgcagctagta

SEQ ID NO: 1728338 - DNA, 15 bp, Homo sapiens
tgccgcagctagtac

SEQ ID NO: 1728339 - DNA, 15 bp, Homo sapiens
gccgcagctagtaca

SEQ ID NO: 1728340 - DNA, 15 bp, Homo sapiens
ccgcagctagtacac

SEQ ID NO: 1728341 - DNA, 15 bp, Homo sapiens
cgcagctagtacacc

SEQ ID NO: 1728342 - DNA, 15 bp, Homo sapiens
gcagctagtacacct

SEQ ID NO: 1728343 - DNA, 15 bp, Homo sapiens
cagctagtacacctg

SEQ ID NO: 1728344 - DNA, 15 bp, Homo sapiens
agctagtacacctgg

SEQ ID NO: 1728345 - DNA, 15 bp, Homo sapiens
gctagtacacctgga

SEQ ID NO: 1728346 - DNA, 15 bp, Homo sapiens
ctagtacacctggat

SEQ ID NO: 1728347 - DNA, 15 bp, Homo sapiens
tagtacacctggatg

SEQ ID NO: 1728348 - DNA, 15 bp, Homo sapiens
agtacacctggatgg

SEQ ID NO: 1728349 - DNA, 15 bp, Homo sapiens
gtacacctggatggc

SEQ ID NO: 1728350 - DNA, 15 bp, Homo sapiens
tacacctggatggcc

SEQ ID NO: 1728351 - DNA, 15 bp, Homo sapiens
acacctggatggcct

SEQ ID NO: 1728352 - DNA, 15 bp, Homo sapiens
cacctggatggcctc

SEQ ID NO: 1728353 - DNA, 15 bp, Homo sapiens
acctggatggcctcc

SEQ ID NO: 1728354 - DNA, 15 bp, Homo sapiens
cctggatggcctcct

SEQ ID NO: 1728355 - DNA, 15 bp, Homo sapiens
ctggatggcctcctc

SEQ ID NO: 1728356 - DNA, 15 bp, Homo sapiens
tggatggcctcctca

SEQ ID NO: 1728357 - DNA, 15 bp, Homo sapiens
ggatggcctcctcag

SEQ ID NO: 1728358 - DNA, 15 bp, Homo sapiens
gatggcctcctcagt

SEQ ID NO: 1728359 - DNA, 15 bp, Homo sapiens
atggcctcctcagtg

SEQ ID NO: 1728360 - DNA, 15 bp, Homo sapiens
tggcctcctcagtgc

SEQ ID NO: 1728361 - DNA, 15 bp, Homo sapiens
ggcctcctcagtgcc

SEQ ID NO: 1728362 - DNA, 15 bp, Homo sapiens
gcctcctcagtgccg

SEQ ID NO: 1728363 - DNA, 15 bp, Homo sapiens
cctcctcagtgccgt

SEQ ID NO: 1728364 - DNA, 15 bp, Homo sapiens
ctcctcagtgccgtc

SEQ ID NO: 1728365 - DNA, 15 bp, Homo sapiens
tcctcagtgccgtcg

SEQ ID NO: 1728366 - DNA, 15 bp, Homo sapiens
cctcagtgccgtcgt

SEQ ID NO: 1728367 - DNA, 15 bp, Homo sapiens
ctcagtgccgtcgtt

SEQ ID NO: 1728368 - DNA, 15 bp, Homo sapiens
tcagtgccgtcgttg

SEQ ID NO: 1728369 - DNA, 15 bp, Homo sapiens
cagtgccgtcgttgc

SEQ ID NO: 1728370 - DNA, 15 bp, Homo sapiens
agtgccgtcgttgct

SEQ ID NO: 1728371 - DNA, 15 bp, Homo sapiens
gtgccgtcgttgctg

SEQ ID NO: 1728372 - DNA, 15 bp, Homo sapiens
tgccgtcgttgctgc

SEQ ID NO: 1728373 - DNA, 15 bp, Homo sapiens
gccgtcgttgctgct

SEQ ID NO: 1728374 - DNA, 15 bp, Homo sapiens
ccgtcgttgctgctg

SEQ ID NO: 1728375 - DNA, 15 bp, Homo sapiens
cgtcgttgctgctgg

SEQ ID NO: 1728376 - DNA, 15 bp, Homo sapiens
gtcgttgctgctgga

SEQ ID NO: 1728377 - DNA, 15 bp, Homo sapiens
tcgttgctgctggag

SEQ ID NO: 1728378 - DNA, 15 bp, Homo sapiens
cgttgctgctggagt

SEQ ID NO: 1728379 - DNA, 15 bp, Homo sapiens
gttgctgctggagtc

SEQ ID NO: 1728380 - DNA, 15 bp, Homo sapiens
ttgctgctggagtct

SEQ ID NO: 1728381 - DNA, 15 bp, Homo sapiens
tgctgctggagtctg

SEQ ID NO: 1728382 - DNA, 15 bp, Homo sapiens
gctgctggagtctga

SEQ ID NO: 1728383 - DNA, 15 bp, Homo sapiens
ctgctggagtctgac

SEQ ID NO: 1728384 - DNA, 15 bp, Homo sapiens
tgctggagtctgacg

SEQ ID NO: 1728385 - DNA, 15 bp, Homo sapiens
gctggagtctgacgc

SEQ ID NO: 1728386 - DNA, 15 bp, Homo sapiens
ctggagtctgacgcc

SEQ ID NO: 1728387 - DNA, 15 bp, Homo sapiens
tggagtctgacgcct

SEQ ID NO: 1728388 - DNA, 15 bp, Homo sapiens
ggagtctgacgcctc

SEQ ID NO: 1728389 - DNA, 15 bp, Homo sapiens
gagtctgacgcctcg

SEQ ID NO: 1728390 - DNA, 15 bp, Homo sapiens
agtctgacgcctcgg

SEQ ID NO: 1728391 - DNA, 15 bp, Homo sapiens
gtctgacgcctcggg

SEQ ID NO: 1728392 - DNA, 15 bp, Homo sapiens
tctgacgcctcgggc

SEQ ID NO: 1728393 - DNA, 15 bp, Homo sapiens
ctgacgcctcgggcg

SEQ ID NO: 1728394 - DNA, 15 bp, Homo sapiens
tgacgcctcgggcgc

SEQ ID NO: 1728395 - DNA, 15 bp, Homo sapiens
gacgcctcgggcgcc

SEQ ID NO: 1728396 - DNA, 15 bp, Homo sapiens
acgcctcgggcgcct

SEQ ID NO: 1728397 - DNA, 15 bp, Homo sapiens
cgcctcgggcgcctg

SEQ ID NO: 1728398 - DNA, 15 bp, Homo sapiens
gcctcgggcgcctgc

SEQ ID NO: 1728399 - DNA, 15 bp, Homo sapiens
cctcgggcgcctgcg

SEQ ID NO: 1728400 - DNA, 15 bp, Homo sapiens
ctcgggcgcctgcgc

SEQ ID NO: 1728401 - DNA, 15 bp, Homo sapiens
tcgggcgcctgcgcc

SEQ ID NO: 1728402 - DNA, 15 bp, Homo sapiens
cgggcgcctgcgccg

SEQ ID NO: 1728403 - DNA, 15 bp, Homo sapiens
gggcgcctgcgccgc

SEQ ID NO: 1728404 - DNA, 15 bp, Homo sapiens
ggcgcctgcgccgca

SEQ ID NO: 1728405 - DNA, 15 bp, Homo sapiens
gcgcctgcgccgcac

SEQ ID NO: 1728406 - DNA, 15 bp, Homo sapiens
cgcctgcgccgcact

SEQ ID NO: 1728407 - DNA, 15 bp, Homo sapiens
gcctgcgccgcactt

SEQ ID NO: 1728408 - DNA, 15 bp, Homo sapiens
cctgcgccgcacttg

SEQ ID NO: 1728409 - DNA, 15 bp, Homo sapiens
ctgcgccgcacttgt

SEQ ID NO: 1728410 - DNA, 15 bp, Homo sapiens
tgcgccgcacttgtg

SEQ ID NO: 1728411 - DNA, 15 bp, Homo sapiens
gcgccgcacttgtga

SEQ ID NO: 1728412 - DNA, 15 bp, Homo sapiens
cgccgcacttgtgac

SEQ ID NO: 1728413 - DNA, 15 bp, Homo sapiens
gccgcacttgtgact

SEQ ID NO: 1728414 - DNA, 15 bp, Homo sapiens
ccgcacttgtgactt

SEQ ID NO: 1728415 - DNA, 15 bp, Homo sapiens
cgcacttgtgacttg

SEQ ID NO: 1728416 - DNA, 15 bp, Homo sapiens
gcacttgtgacttgc

SEQ ID NO: 1728417 - DNA, 15 bp, Homo sapiens
cacttgtgacttgct

SEQ ID NO: 1728418 - DNA, 15 bp, Homo sapiens
acttgtgacttgctt

SEQ ID NO: 1728419 - DNA, 15 bp, Homo sapiens
cttgtgacttgcttt

SEQ ID NO: 1728420 - DNA, 15 bp, Homo sapiens
ttgtgacttgctttc

SEQ ID NO: 1728421 - DNA, 15 bp, Homo sapiens
tgtgacttgctttcc

SEQ ID NO: 1728422 - DNA, 15 bp, Homo sapiens
gtgacttgctttccc

SEQ ID NO: 1728423 - DNA, 15 bp, Homo sapiens
tgacttgctttcccc

SEQ ID NO: 1728424 - DNA, 15 bp, Homo sapiens
gacttgctttcccct

SEQ ID NO: 1728425 - DNA, 15 bp, Homo sapiens
acttgctttcccctt

SEQ ID NO: 1728426 - DNA, 15 bp, Homo sapiens
cttgctttccccttc

SEQ ID NO: 1728427 - DNA, 15 bp, Homo sapiens
ttgctttccccttct

SEQ ID NO: 1728428 - DNA, 15 bp, Homo sapiens
tgctttccccttctc

SEQ ID NO: 1728429 - DNA, 15 bp, Homo sapiens
gctttccccttctca

SEQ ID NO: 1728430 - DNA, 15 bp, Homo sapiens
ctttccccttctcag

SEQ ID NO: 1728431 - DNA, 15 bp, Homo sapiens
tttccccttctcagg

SEQ ID NO: 1728432 - DNA, 15 bp, Homo sapiens
ttccccttctcaggg

SEQ ID NO: 1728433 - DNA, 15 bp, Homo sapiens
tccccttctcagggc

SEQ ID NO: 1728434 - DNA, 15 bp, Homo sapiens
ccccttctcagggcg

SEQ ID NO: 1728435 - DNA, 15 bp, Homo sapiens
cccttctcagggcgc

SEQ ID NO: 1728436 - DNA, 15 bp, Homo sapiens
ccttctcagggcgcc

SEQ ID NO: 1728437 - DNA, 15 bp, Homo sapiens
cttctcagggcgcca

SEQ ID NO: 1728438 - DNA, 15 bp, Homo sapiens
ttctcagggcgccag

SEQ ID NO: 1728439 - DNA, 15 bp, Homo sapiens
tctcagggcgccagc

SEQ ID NO: 1728440 - DNA, 15 bp, Homo sapiens
ctcagggcgccagcg

SEQ ID NO: 1728441 - DNA, 15 bp, Homo sapiens
tcagggcgccagcgc

SEQ ID NO: 1728442 - DNA, 15 bp, Homo sapiens
cagggcgccagcgct

SEQ ID NO: 1728443 - DNA, 15 bp, Homo sapiens
agggcgccagcgctc

SEQ ID NO: 1728444 - DNA, 15 bp, Homo sapiens
gggcgccagcgctcc

SEQ ID NO: 1728445 - DNA, 15 bp, Homo sapiens
ggcgccagcgctcct

SEQ ID NO: 1728446 - DNA, 15 bp, Homo sapiens
gcgccagcgctcctc

SEQ ID NO: 1728447 - DNA, 15 bp, Homo sapiens
cgccagcgctcctct

SEQ ID NO: 1728448 - DNA, 15 bp, Homo sapiens
gccagcgctcctctt

SEQ ID NO: 1728449 - DNA, 15 bp, Homo sapiens
ccagcgctcctcttg

SEQ ID NO: 1728450 - DNA, 15 bp, Homo sapiens
cagcgctcctcttga

SEQ ID NO: 1728451 - DNA, 15 bp, Homo sapiens
agcgctcctcttgac

SEQ ID NO: 1728452 - DNA, 15 bp, Homo sapiens
gcgctcctcttgacc

SEQ ID NO: 1728453 - DNA, 15 bp, Homo sapiens
cgctcctcttgaccc

SEQ ID NO: 1728454 - DNA, 15 bp, Homo sapiens
gctcctcttgacccc

SEQ ID NO: 1728455 - DNA, 15 bp, Homo sapiens
ctcctcttgaccccg

SEQ ID NO: 1728456 - DNA, 15 bp, Homo sapiens
tcctcttgaccccgc

SEQ ID NO: 1728457 - DNA, 15 bp, Homo sapiens
cctcttgaccccgct

SEQ ID NO: 1728458 - DNA, 15 bp, Homo sapiens
ctcttgaccccgctt

SEQ ID NO: 1728459 - DNA, 15 bp, Homo sapiens
tcttgaccccgcttt

SEQ ID NO: 1728460 - DNA, 15 bp, Homo sapiens
cttgaccccgctttt

SEQ ID NO: 1728461 - DNA, 15 bp, Homo sapiens
ttgaccccgctttta

SEQ ID NO: 1728462 - DNA, 15 bp, Homo sapiens
tgaccccgcttttat

SEQ ID NO: 1728463 - DNA, 15 bp, Homo sapiens
gaccccgcttttatt

SEQ ID NO: 1728464 - DNA, 15 bp, Homo sapiens
accccgcttttattc

SEQ ID NO: 1728465 - DNA, 15 bp, Homo sapiens
ccccgcttttattct

SEQ ID NO: 1728466 - DNA, 15 bp, Homo sapiens
cccgcttttattctg

SEQ ID NO: 1728467 - DNA, 15 bp, Homo sapiens
ccgcttttattctgt

SEQ ID NO: 1728468 - DNA, 15 bp, Homo sapiens
cgcttttattctgtg

SEQ ID NO: 1728469 - DNA, 15 bp, Homo sapiens
gcttttattctgtgg

SEQ ID NO: 1728470 - DNA, 15 bp, Homo sapiens
cttttattctgtggt

SEQ ID NO: 1728471 - DNA, 15 bp, Homo sapiens
ttttattctgtggtg

SEQ ID NO: 1728472 - DNA, 15 bp, Homo sapiens
tttattctgtggtgc

SEQ ID NO: 1728473 - DNA, 15 bp, Homo sapiens
ttattctgtggtgct

SEQ ID NO: 1728474 - DNA, 15 bp, Homo sapiens
tattctgtggtgctt

SEQ ID NO: 1728475 - DNA, 15 bp, Homo sapiens
attctgtggtgcttc

SEQ ID NO: 1728476 - DNA, 15 bp, Homo sapiens
ttctgtggtgcttct

SEQ ID NO: 1728477 - DNA, 15 bp, Homo sapiens
tctgtggtgcttctg

SEQ ID NO: 1728478 - DNA, 15 bp, Homo sapiens
ctgtggtgcttctga

SEQ ID NO: 1728479 - DNA, 15 bp, Homo sapiens
tgtggtgcttctgaa

SEQ ID NO: 1728480 - DNA, 15 bp, Homo sapiens
gtggtgcttctgaag

SEQ ID NO: 1728481 - DNA, 15 bp, Homo sapiens
tggtgcttctgaagg

SEQ ID NO: 1728482 - DNA, 15 bp, Homo sapiens
ggtgcttctgaaggg

SEQ ID NO: 1728483 - DNA, 15 bp, Homo sapiens
gtgcttctgaagggc

SEQ ID NO: 1728484 - DNA, 15 bp, Homo sapiens
tgcttctgaagggct

SEQ ID NO: 1728485 - DNA, 15 bp, Homo sapiens
gcttctgaagggctg

SEQ ID NO: 1728486 - DNA, 15 bp, Homo sapiens
cttctgaagggctgc

SEQ ID NO: 1728487 - DNA, 15 bp, Homo sapiens
ttctgaagggctgca

SEQ ID NO: 1728488 - DNA, 15 bp, Homo sapiens
tctgaagggctgcag

SEQ ID NO: 1728489 - DNA, 15 bp, Homo sapiens
ctgaagggctgcagg

SEQ ID NO: 1728490 - DNA, 15 bp, Homo sapiens
tgaagggctgcaggg

SEQ ID NO: 1728491 - DNA, 15 bp, Homo sapiens
gaagggctgcagggg

SEQ ID NO: 1728492 - DNA, 15 bp, Homo sapiens
aagggctgcaggggg

SEQ ID NO: 1728493 - DNA, 15 bp, Homo sapiens
agggctgcagggggc

SEQ ID NO: 1728494 - DNA, 15 bp, Homo sapiens
gggctgcagggggct

SEQ ID NO: 1728495 - DNA, 15 bp, Homo sapiens
ggctgcagggggctg

SEQ ID NO: 1728496 - DNA, 15 bp, Homo sapiens
gctgcagggggctgc

SEQ ID NO: 1728497 - DNA, 15 bp, Homo sapiens
ctgcagggggctgct

SEQ ID NO: 1728498 - DNA, 15 bp, Homo sapiens
tgcagggggctgctg

SEQ ID NO: 1728499 - DNA, 15 bp, Homo sapiens
gcagggggctgctgg

SEQ ID NO: 1728500 - DNA, 15 bp, Homo sapiens
cagggggctgctggc

SEQ ID NO: 1728501 - DNA, 15 bp, Homo sapiens
agggggctgctggct

SEQ ID NO: 1728502 - DNA, 15 bp, Homo sapiens
gggggctgctggctt

SEQ ID NO: 1728503 - DNA, 15 bp, Homo sapiens
ggggctgctggcttc

SEQ ID NO: 1728504 - DNA, 15 bp, Homo sapiens
gggctgctggcttcg

SEQ ID NO: 1728505 - DNA, 15 bp, Homo sapiens
ggctgctggcttcgg

SEQ ID NO: 1728506 - DNA, 15 bp, Homo sapiens
gctgctggcttcggg

SEQ ID NO: 1728507 - DNA, 15 bp, Homo sapiens
ctgctggcttcgggc

SEQ ID NO: 1728508 - DNA, 15 bp, Homo sapiens
tgctggcttcgggct

SEQ ID NO: 1728509 - DNA, 15 bp, Homo sapiens
gctggcttcgggctg

SEQ ID NO: 1728510 - DNA, 15 bp, Homo sapiens
ctggcttcgggctgc

SEQ ID NO: 1728511 - DNA, 15 bp, Homo sapiens
tggcttcgggctgcc

SEQ ID NO: 1728512 - DNA, 15 bp, Homo sapiens
ggcttcgggctgccc

SEQ ID NO: 1728513 - DNA, 15 bp, Homo sapiens
gcttcgggctgccct

SEQ ID NO: 1728514 - DNA, 15 bp, Homo sapiens
cttcgggctgccctt

SEQ ID NO: 1728515 - DNA, 15 bp, Homo sapiens
ttcgggctgcccttg

SEQ ID NO: 1728516 - DNA, 15 bp, Homo sapiens
tcgggctgcccttgt

SEQ ID NO: 1728517 - DNA, 15 bp, Homo sapiens
cgggctgcccttgtt

SEQ ID NO: 1728518 - DNA, 15 bp, Homo sapiens
gggctgcccttgttc

SEQ ID NO: 1728519 - DNA, 15 bp, Homo sapiens
ggctgcccttgttct

SEQ ID NO: 1728520 - DNA, 15 bp, Homo sapiens
gctgcccttgttctc

SEQ ID NO: 1728521 - DNA, 15 bp, Homo sapiens
ctgcccttgttctcc

SEQ ID NO: 1728522 - DNA, 15 bp, Homo sapiens
tgcccttgttctcct

SEQ ID NO: 1728523 - DNA, 15 bp, Homo sapiens
gcccttgttctcctg

SEQ ID NO: 1728524 - DNA, 15 bp, Homo sapiens
cccttgttctcctgc

SEQ ID NO: 1728525 - DNA, 15 bp, Homo sapiens
ccttgttctcctgct

SEQ ID NO: 1728526 - DNA, 15 bp, Homo sapiens
cttgttctcctgctt

SEQ ID NO: 1728527 - DNA, 15 bp, Homo sapiens
ttgttctcctgcttg

SEQ ID NO: 1728528 - DNA, 15 bp, Homo sapiens
tgttctcctgcttgg

SEQ ID NO: 1728529 - DNA, 15 bp, Homo sapiens
gttctcctgcttggt

SEQ ID NO: 1728530 - DNA, 15 bp, Homo sapiens
ttctcctgcttggtc

SEQ ID NO: 1728531 - DNA, 15 bp, Homo sapiens
tctcctgcttggtcg

SEQ ID NO: 1728532 - DNA, 15 bp, Homo sapiens
ctcctgcttggtcgt

SEQ ID NO: 1728533 - DNA, 15 bp, Homo sapiens
tcctgcttggtcgtg

SEQ ID NO: 1728534 - DNA, 15 bp, Homo sapiens
cctgcttggtcgtga

SEQ ID NO: 1728535 - DNA, 15 bp, Homo sapiens
ctgcttggtcgtgac

SEQ ID NO: 1728536 - DNA, 15 bp, Homo sapiens
tgcttggtcgtgacc

SEQ ID NO: 1728537 - DNA, 15 bp, Homo sapiens
gcttggtcgtgaccc

SEQ ID NO: 1728538 - DNA, 15 bp, Homo sapiens
cttggtcgtgaccct

SEQ ID NO: 1728539 - DNA, 15 bp, Homo sapiens
ttggtcgtgaccctg

SEQ ID NO: 1728540 - DNA, 15 bp, Homo sapiens
tggtcgtgaccctgg

SEQ ID NO: 1728541 - DNA, 15 bp, Homo sapiens
ggtcgtgaccctgga

SEQ ID NO: 1728542 - DNA, 15 bp, Homo sapiens
gtcgtgaccctggac

SEQ ID NO: 1728543 - DNA, 15 bp, Homo sapiens
tcgtgaccctggact

SEQ ID NO: 1728544 - DNA, 15 bp, Homo sapiens
cgtgaccctggactt

SEQ ID NO: 1728545 - DNA, 15 bp, Homo sapiens
gtgaccctggacttg

SEQ ID NO: 1728546 - DNA, 15 bp, Homo sapiens
tgaccctggacttga

SEQ ID NO: 1728547 - DNA, 15 bp, Homo sapiens
gaccctggacttgag

SEQ ID NO: 1728548 - DNA, 15 bp, Homo sapiens
accctggacttgagg

SEQ ID NO: 1728549 - DNA, 15 bp, Homo sapiens
ccctggacttgaggc

SEQ ID NO: 1728550 - DNA, 15 bp, Homo sapiens
cctggacttgaggct

SEQ ID NO: 1728551 - DNA, 15 bp, Homo sapiens
ctggacttgaggctt

SEQ ID NO: 1728552 - DNA, 15 bp, Homo sapiens
tggacttgaggcttc

SEQ ID NO: 1728553 - DNA, 15 bp, Homo sapiens
ggacttgaggcttct

SEQ ID NO: 1728554 - DNA, 15 bp, Homo sapiens
gacttgaggcttctg

SEQ ID NO: 1728555 - DNA, 15 bp, Homo sapiens
acttgaggcttctgg

SEQ ID NO: 1728556 - DNA, 15 bp, Homo sapiens
cttgaggcttctggg

SEQ ID NO: 1728557 - DNA, 15 bp, Homo sapiens
ttgaggcttctgggc

SEQ ID NO: 1728558 - DNA, 15 bp, Homo sapiens
tgaggcttctgggct

SEQ ID NO: 1728559 - DNA, 15 bp, Homo sapiens
gaggcttctgggctg

SEQ ID NO: 1728560 - DNA, 15 bp, Homo sapiens
aggcttctgggctgc

SEQ ID NO: 1728561 - DNA, 15 bp, Homo sapiens
ggcttctgggctgca

SEQ ID NO: 1728562 - DNA, 15 bp, Homo sapiens
gcttctgggctgcac

SEQ ID NO: 1728563 - DNA, 15 bp, Homo sapiens
cttctgggctgcacg

SEQ ID NO: 1728564 - DNA, 15 bp, Homo sapiens
ttctgggctgcacgt

SEQ ID NO: 1728565 - DNA, 15 bp, Homo sapiens
tctgggctgcacgtt

SEQ ID NO: 1728566 - DNA, 15 bp, Homo sapiens
ctgggctgcacgttc

SEQ ID NO: 1728567 - DNA, 15 bp, Homo sapiens
tgggctgcacgttcg

SEQ ID NO: 1728568 - DNA, 15 bp, Homo sapiens
gggctgcacgttcgt

SEQ ID NO: 1728569 - DNA, 15 bp, Homo sapiens
ggctgcacgttcgtc

SEQ ID NO: 1728570 - DNA, 15 bp, Homo sapiens
gctgcacgttcgtct

SEQ ID NO: 1728571 - DNA, 15 bp, Homo sapiens
ctgcacgttcgtctt

SEQ ID NO: 1728572 - DNA, 15 bp, Homo sapiens
tgcacgttcgtcttt

SEQ ID NO: 1728573 - DNA, 15 bp, Homo sapiens
gcacgttcgtctttg

SEQ ID NO: 1728574 - DNA, 15 bp, Homo sapiens
cacgttcgtctttgc

SEQ ID NO: 1728575 - DNA, 15 bp, Homo sapiens
acgttcgtctttgct

SEQ ID NO: 1728576 - DNA, 15 bp, Homo sapiens
cgttcgtctttgcta

SEQ ID NO: 1728577 - DNA, 15 bp, Homo sapiens
gttcgtctttgctaa

SEQ ID NO: 1728578 - DNA, 15 bp, Homo sapiens
ttcgtctttgctaac

SEQ ID NO: 1728579 - DNA, 15 bp, Homo sapiens
tcgtctttgctaacc

SEQ ID NO: 1728580 - DNA, 15 bp, Homo sapiens
cgtctttgctaaccg

SEQ ID NO: 1728581 - DNA, 15 bp, Homo sapiens
gtctttgctaaccgg

SEQ ID NO: 1728582 - DNA, 15 bp, Homo sapiens
tctttgctaaccggg

SEQ ID NO: 1728583 - DNA, 15 bp, Homo sapiens
ctttgctaaccgggg

SEQ ID NO: 1728584 - DNA, 15 bp, Homo sapiens
tttgctaaccgggga

SEQ ID NO: 1728585 - DNA, 15 bp, Homo sapiens
ttgctaaccggggag

SEQ ID NO: 1728586 - DNA, 15 bp, Homo sapiens
tgctaaccggggagg

SEQ ID NO: 1728587 - DNA, 15 bp, Homo sapiens
gctaaccggggaggt

SEQ ID NO: 1728588 - DNA, 15 bp, Homo sapiens
ctaaccggggaggtt

SEQ ID NO: 1728589 - DNA, 15 bp, Homo sapiens
taaccggggaggttt

SEQ ID NO: 1728590 - DNA, 15 bp, Homo sapiens
aaccggggaggtttg

SEQ ID NO: 1728591 - DNA, 15 bp, Homo sapiens
accggggaggtttgc

SEQ ID NO: 1728592 - DNA, 15 bp, Homo sapiens
ccggggaggtttgcg

SEQ ID NO: 1728593 - DNA, 15 bp, Homo sapiens
cggggaggtttgcga

SEQ ID NO: 1728594 - DNA, 15 bp, Homo sapiens
ggggaggtttgcgaa

SEQ ID NO: 1728595 - DNA, 15 bp, Homo sapiens
gggaggtttgcgaaa

SEQ ID NO: 1728596 - DNA, 15 bp, Homo sapiens
ggaggtttgcgaaag

SEQ ID NO: 1728597 - DNA, 15 bp, Homo sapiens
gaggtttgcgaaagg

SEQ ID NO: 1728598 - DNA, 15 bp, Homo sapiens
aggtttgcgaaaggc

SEQ ID NO: 1728599 - DNA, 15 bp, Homo sapiens
ggtttgcgaaaggcg

SEQ ID NO: 1728600 - DNA, 15 bp, Homo sapiens
gtttgcgaaaggcga

SEQ ID NO: 1728601 - DNA, 15 bp, Homo sapiens
tttgcgaaaggcgaa

SEQ ID NO: 1728602 - DNA, 15 bp, Homo sapiens
ttgcgaaaggcgaac

SEQ ID NO: 1728603 - DNA, 15 bp, Homo sapiens
tgcgaaaggcgaact

SEQ ID NO: 1728604 - DNA, 15 bp, Homo sapiens
gcgaaaggcgaactc

SEQ ID NO: 1728605 - DNA, 15 bp, Homo sapiens
cgaaaggcgaactct

SEQ ID NO: 1728606 - DNA, 15 bp, Homo sapiens
gaaaggcgaactctt

SEQ ID NO: 1728607 - DNA, 15 bp, Homo sapiens
aaaggcgaactcttt

SEQ ID NO: 1728608 - DNA, 15 bp, Homo sapiens
aaggcgaactcttta

SEQ ID NO: 1728609 - DNA, 15 bp, Homo sapiens
aggcgaactctttat

SEQ ID NO: 1728610 - DNA, 15 bp, Homo sapiens
ggcgaactctttatg

SEQ ID NO: 1728611 - DNA, 15 bp, Homo sapiens
gcgaactctttatgg

SEQ ID NO: 1728612 - DNA, 15 bp, Homo sapiens
cgaactctttatggg

SEQ ID NO: 1728613 - DNA, 15 bp, Homo sapiens
gaactctttatgggc

SEQ ID NO: 1728614 - DNA, 15 bp, Homo sapiens
aactctttatgggcg

SEQ ID NO: 1728615 - DNA, 15 bp, Homo sapiens
actctttatgggcgc

SEQ ID NO: 1728616 - DNA, 15 bp, Homo sapiens
ctctttatgggcgcc

SEQ ID NO: 1728617 - DNA, 15 bp, Homo sapiens
tctttatgggcgccc

SEQ ID NO: 1728618 - DNA, 15 bp, Homo sapiens
ctttatgggcgccct

SEQ ID NO: 1728619 - DNA, 15 bp, Homo sapiens
tttatgggcgccctt

SEQ ID NO: 1728620 - DNA, 15 bp, Homo sapiens
ttatgggcgcccttc

SEQ ID NO: 1728621 - DNA, 15 bp, Homo sapiens
tatgggcgcccttca

SEQ ID NO: 1728622 - DNA, 15 bp, Homo sapiens
atgggcgcccttcag

SEQ ID NO: 1728623 - DNA, 15 bp, Homo sapiens
tgggcgcccttcaga

SEQ ID NO: 1728624 - DNA, 15 bp, Homo sapiens
gggcgcccttcagac

SEQ ID NO: 1728625 - DNA, 15 bp, Homo sapiens
ggcgcccttcagacc

SEQ ID NO: 1728626 - DNA, 15 bp, Homo sapiens
gcgcccttcagaccc

SEQ ID NO: 1728627 - DNA, 15 bp, Homo sapiens
cgcccttcagaccct

SEQ ID NO: 1728628 - DNA, 15 bp, Homo sapiens
gcccttcagaccctg

SEQ ID NO: 1728629 - DNA, 15 bp, Homo sapiens
cccttcagaccctgc

SEQ ID NO: 1728630 - DNA, 15 bp, Homo sapiens
ccttcagaccctgcc

SEQ ID NO: 1728631 - DNA, 15 bp, Homo sapiens
cttcagaccctgccg

SEQ ID NO: 1728632 - DNA, 15 bp, Homo sapiens
ttcagaccctgccga

SEQ ID NO: 1728633 - DNA, 15 bp, Homo sapiens
tcagaccctgccgat

SEQ ID NO: 1728634 - DNA, 15 bp, Homo sapiens
cagaccctgccgatg

SEQ ID NO: 1728635 - DNA, 15 bp, Homo sapiens
agaccctgccgatgc

SEQ ID NO: 1728636 - DNA, 15 bp, Homo sapiens
gaccctgccgatgcg

SEQ ID NO: 1728637 - DNA, 15 bp, Homo sapiens
accctgccgatgcgc

SEQ ID NO: 1728638 - DNA, 15 bp, Homo sapiens
ccctgccgatgcgcc

SEQ ID NO: 1728639 - DNA, 15 bp, Homo sapiens
cctgccgatgcgcca

SEQ ID NO: 1728640 - DNA, 15 bp, Homo sapiens
ctgccgatgcgccac

SEQ ID NO: 1728641 - DNA, 15 bp, Homo sapiens
tgccgatgcgccacc

SEQ ID NO: 1728642 - DNA, 15 bp, Homo sapiens
gccgatgcgccacct

SEQ ID NO: 1728643 - DNA, 15 bp, Homo sapiens
ccgatgcgccacctt

SEQ ID NO: 1728644 - DNA, 15 bp, Homo sapiens
cgatgcgccaccttt

SEQ ID NO: 1728645 - DNA, 15 bp, Homo sapiens
gatgcgccacctttg

SEQ ID NO: 1728646 - DNA, 15 bp, Homo sapiens
atgcgccacctttgc

SEQ ID NO: 1728647 - DNA, 15 bp, Homo sapiens
tgcgccacctttgcg

SEQ ID NO: 1728648 - DNA, 15 bp, Homo sapiens
gcgccacctttgcgg

SEQ ID NO: 1728649 - DNA, 15 bp, Homo sapiens
cgccacctttgcggc

SEQ ID NO: 1728650 - DNA, 15 bp, Homo sapiens
gccacctttgcggct

SEQ ID NO: 1728651 - DNA, 15 bp, Homo sapiens
ccacctttgcggcta

SEQ ID NO: 1728652 - DNA, 15 bp, Homo sapiens
cacctttgcggctag

SEQ ID NO: 1728653 - DNA, 15 bp, Homo sapiens
acctttgcggctagc

SEQ ID NO: 1728654 - DNA, 15 bp, Homo sapiens
cctttgcggctagct

SEQ ID NO: 1728655 - DNA, 15 bp, Homo sapiens
ctttgcggctagctc

SEQ ID NO: 1728656 - DNA, 15 bp, Homo sapiens
tttgcggctagctct

SEQ ID NO: 1728657 - DNA, 15 bp, Homo sapiens
ttgcggctagctctt

SEQ ID NO: 1728658 - DNA, 15 bp, Homo sapiens
tgcggctagctcttc

SEQ ID NO: 1728659 - DNA, 15 bp, Homo sapiens
gcggctagctcttcg

SEQ ID NO: 1728660 - DNA, 15 bp, Homo sapiens
cggctagctcttcgt

SEQ ID NO: 1728661 - DNA, 15 bp, Homo sapiens
ggctagctcttcgtg

SEQ ID NO: 1728662 - DNA, 15 bp, Homo sapiens
gctagctcttcgtgg

SEQ ID NO: 1728663 - DNA, 15 bp, Homo sapiens
ctagctcttcgtggg

SEQ ID NO: 1728664 - DNA, 15 bp, Homo sapiens
tagctcttcgtggga

SEQ ID NO: 1728665 - DNA, 15 bp, Homo sapiens
agctcttcgtgggat

SEQ ID NO: 1728666 - DNA, 15 bp, Homo sapiens
gctcttcgtgggatt

SEQ ID NO: 1728667 - DNA, 15 bp, Homo sapiens
ctcttcgtgggattt

SEQ ID NO: 1728668 - DNA, 15 bp, Homo sapiens
tcttcgtgggatttc

SEQ ID NO: 1728669 - DNA, 15 bp, Homo sapiens
cttcgtgggatttca

SEQ ID NO: 1728670 - DNA, 15 bp, Homo sapiens
ttcgtgggatttcaa

SEQ ID NO: 1728671 - DNA, 15 bp, Homo sapiens
tcgtgggatttcaag

SEQ ID NO: 1728672 - DNA, 15 bp, Homo sapiens
cgtgggatttcaaga

SEQ ID NO: 1728673 - DNA, 15 bp, Homo sapiens
gtgggatttcaagag

SEQ ID NO: 1728674 - DNA, 15 bp, Homo sapiens
tgggatttcaagagt

SEQ ID NO: 1728675 - DNA, 15 bp, Homo sapiens
gggatttcaagagtg

SEQ ID NO: 1728676 - DNA, 15 bp, Homo sapiens
ggatttcaagagtga

SEQ ID NO: 1728677 - DNA, 15 bp, Homo sapiens
gatttcaagagtgac

SEQ ID NO: 1728678 - DNA, 15 bp, Homo sapiens
atttcaagagtgact

SEQ ID NO: 1728679 - DNA, 15 bp, Homo sapiens
tttcaagagtgactt

SEQ ID NO: 1728680 - DNA, 15 bp, Homo sapiens
ttcaagagtgacttg

SEQ ID NO: 1728681 - DNA, 15 bp, Homo sapiens
tcaagagtgacttgg

SEQ ID NO: 1728682 - DNA, 15 bp, Homo sapiens
caagagtgacttggt

SEQ ID NO: 1728683 - DNA, 15 bp, Homo sapiens
aagagtgacttggtc

SEQ ID NO: 1728684 - DNA, 15 bp, Homo sapiens
agagtgacttggtcg

SEQ ID NO: 1728685 - DNA, 15 bp, Homo sapiens
gagtgacttggtcga

SEQ ID NO: 1728686 - DNA, 15 bp, Homo sapiens
agtgacttggtcgaa

SEQ ID NO: 1728687 - DNA, 15 bp, Homo sapiens
gtgacttggtcgaat

SEQ ID NO: 1728688 - DNA, 15 bp, Homo sapiens
tgacttggtcgaatt

SEQ ID NO: 1728689 - DNA, 15 bp, Homo sapiens
gacttggtcgaattt

SEQ ID NO: 1728690 - DNA, 15 bp, Homo sapiens
acttggtcgaatttt

SEQ ID NO: 1728691 - DNA, 15 bp, Homo sapiens
cttggtcgaattttc

SEQ ID NO: 1728692 - DNA, 15 bp, Homo sapiens
ttggtcgaattttcg

SEQ ID NO: 1728693 - DNA, 15 bp, Homo sapiens
tggtcgaattttcgt

SEQ ID NO: 1728694 - DNA, 15 bp, Homo sapiens
ggtcgaattttcgtt

SEQ ID NO: 1728695 - DNA, 15 bp, Homo sapiens
gtcgaattttcgttt

SEQ ID NO: 1728696 - DNA, 15 bp, Homo sapiens
tcgaattttcgtttg

SEQ ID NO: 1728697 - DNA, 15 bp, Homo sapiens
cgaattttcgtttgg

SEQ ID NO: 1728698 - DNA, 15 bp, Homo sapiens
gaattttcgtttggg

SEQ ID NO: 1728699 - DNA, 15 bp, Homo sapiens
aattttcgtttgggt

SEQ ID NO: 1728700 - DNA, 15 bp, Homo sapiens
attttcgtttgggtc

SEQ ID NO: 1728701 - DNA, 15 bp, Homo sapiens
ttttcgtttgggtct

SEQ ID NO: 1728702 - DNA, 15 bp, Homo sapiens
tttcgtttgggtctg

SEQ ID NO: 1728703 - DNA, 15 bp, Homo sapiens
ttcgtttgggtctgg

SEQ ID NO: 1728704 - DNA, 15 bp, Homo sapiens
tcgtttgggtctggt

SEQ ID NO: 1728705 - DNA, 15 bp, Homo sapiens
cgtttgggtctggtt

SEQ ID NO: 1728706 - DNA, 15 bp, Homo sapiens
gtttgggtctggttt

SEQ ID NO: 1728707 - DNA, 15 bp, Homo sapiens
tttgggtctggtttt

SEQ ID NO: 1728708 - DNA, 15 bp, Homo sapiens
ttgggtctggttttt

SEQ ID NO: 1728709 - DNA, 15 bp, Homo sapiens
tgggtctggtttttt

SEQ ID NO: 1728710 - DNA, 15 bp, Homo sapiens
gggtctggtttttta

SEQ ID NO: 1728711 - DNA, 15 bp, Homo sapiens
ggtctggttttttat

SEQ ID NO: 1728712 - DNA, 15 bp, Homo sapiens
gtctggttttttatc

SEQ ID NO: 1728713 - DNA, 15 bp, Homo sapiens
tctggttttttatct

SEQ ID NO: 1728714 - DNA, 15 bp, Homo sapiens
ctggttttttatcta

SEQ ID NO: 1728715 - DNA, 15 bp, Homo sapiens
tggttttttatctat

SEQ ID NO: 1728716 - DNA, 15 bp, Homo sapiens
ggttttttatctatt

SEQ ID NO: 1728717 - DNA, 15 bp, Homo sapiens
gttttttatctattg

SEQ ID NO: 1728718 - DNA, 15 bp, Homo sapiens
ttttttatctattga

SEQ ID NO: 1728719 - DNA, 15 bp, Homo sapiens
tttttatctattgac

SEQ ID NO: 1728720 - DNA, 15 bp, Homo sapiens
ttttatctattgacc

SEQ ID NO: 1728721 - DNA, 15 bp, Homo sapiens
tttatctattgaccc

SEQ ID NO: 1728722 - DNA, 15 bp, Homo sapiens
ttatctattgacccc

SEQ ID NO: 1728723 - DNA, 15 bp, Homo sapiens
tatctattgacccca

SEQ ID NO: 1728724 - DNA, 15 bp, Homo sapiens
atctattgaccccat

SEQ ID NO: 1728725 - DNA, 15 bp, Homo sapiens
tctattgaccccatc

SEQ ID NO: 1728726 - DNA, 15 bp, Homo sapiens
ctattgaccccatca

SEQ ID NO: 1728727 - DNA, 15 bp, Homo sapiens
tattgaccccatcac

SEQ ID NO: 1728728 - DNA, 15 bp, Homo sapiens
attgaccccatcaca

SEQ ID NO: 1728729 - DNA, 15 bp, Homo sapiens
ttgaccccatcacat

SEQ ID NO: 1728730 - DNA, 15 bp, Homo sapiens
tgaccccatcacatt

SEQ ID NO: 1728731 - DNA, 15 bp, Homo sapiens
gaccccatcacattt

SEQ ID NO: 1728732 - DNA, 15 bp, Homo sapiens
accccatcacatttt

SEQ ID NO: 1728733 - DNA, 15 bp, Homo sapiens
ccccatcacattttt

SEQ ID NO: 1728734 - DNA, 15 bp, Homo sapiens
cccatcacatttttg

SEQ ID NO: 1728735 - DNA, 15 bp, Homo sapiens
ccatcacatttttgg

SEQ ID NO: 1728736 - DNA, 15 bp, Homo sapiens
catcacatttttggg

SEQ ID NO: 1728737 - DNA, 15 bp, Homo sapiens
atcacatttttgggt

SEQ ID NO: 1728738 - DNA, 15 bp, Homo sapiens
tcacatttttgggtc

SEQ ID NO: 1728739 - DNA, 15 bp, Homo sapiens
cacatttttgggtcg

SEQ ID NO: 1728740 - DNA, 15 bp, Homo sapiens
acatttttgggtcgc

SEQ ID NO: 1728741 - DNA, 15 bp, Homo sapiens
catttttgggtcgca

SEQ ID NO: 1728742 - DNA, 15 bp, Homo sapiens
atttttgggtcgcat

SEQ ID NO: 1728743 - DNA, 15 bp, Homo sapiens
tttttgggtcgcatg

SEQ ID NO: 1728744 - DNA, 15 bp, Homo sapiens
ttttgggtcgcatgc

SEQ ID NO: 1728745 - DNA, 15 bp, Homo sapiens
tttgggtcgcatgct

SEQ ID NO: 1728746 - DNA, 15 bp, Homo sapiens
ttgggtcgcatgcta

SEQ ID NO: 1728747 - DNA, 15 bp, Homo sapiens
tgggtcgcatgctat

SEQ ID NO: 1728748 - DNA, 15 bp, Homo sapiens
gggtcgcatgctatc

SEQ ID NO: 1728749 - DNA, 15 bp, Homo sapiens
ggtcgcatgctatct

SEQ ID NO: 1728750 - DNA, 15 bp, Homo sapiens
gtcgcatgctatctc

SEQ ID NO: 1728751 - DNA, 15 bp, Homo sapiens
tcgcatgctatctct

SEQ ID NO: 1728752 - DNA, 15 bp, Homo sapiens
cgcatgctatctctt

SEQ ID NO: 1728753 - DNA, 15 bp, Homo sapiens
gcatgctatctcttc

SEQ ID NO: 1728754 - DNA, 15 bp, Homo sapiens
catgctatctcttct

SEQ ID NO: 1728755 - DNA, 15 bp, Homo sapiens
atgctatctcttctc

SEQ ID NO: 1728756 - DNA, 15 bp, Homo sapiens
tgctatctcttctca

SEQ ID NO: 1728757 - DNA, 15 bp, Homo sapiens
gctatctcttctcat

SEQ ID NO: 1728758 - DNA, 15 bp, Homo sapiens
ctatctcttctcatt

SEQ ID NO: 1728759 - DNA, 15 bp, Homo sapiens
tatctcttctcattc

SEQ ID NO: 1728760 - DNA, 15 bp, Homo sapiens
atctcttctcattca

SEQ ID NO: 1728761 - DNA, 15 bp, Homo sapiens
tctcttctcattcag

SEQ ID NO: 1728762 - DNA, 15 bp, Homo sapiens
ctcttctcattcaga

SEQ ID NO: 1728763 - DNA, 15 bp, Homo sapiens
tcttctcattcagaa

SEQ ID NO: 1728764 - DNA, 15 bp, Homo sapiens
cttctcattcagaag

SEQ ID NO: 1728765 - DNA, 15 bp, Homo sapiens
ttctcattcagaagc

SEQ ID NO: 1728766 - DNA, 15 bp, Homo sapiens
tctcattcagaagct

SEQ ID NO: 1728767 - DNA, 15 bp, Homo sapiens
ctcattcagaagctg

SEQ ID NO: 1728768 - DNA, 15 bp, Homo sapiens
tcattcagaagctgt

SEQ ID NO: 1728769 - DNA, 15 bp, Homo sapiens
cattcagaagctgtt

SEQ ID NO: 1728770 - DNA, 15 bp, Homo sapiens
attcagaagctgttc

SEQ ID NO: 1728771 - DNA, 15 bp, Homo sapiens
ttcagaagctgttct

SEQ ID NO: 1728772 - DNA, 15 bp, Homo sapiens
tcagaagctgttcta

SEQ ID NO: 1728773 - DNA, 15 bp, Homo sapiens
cagaagctgttctat

SEQ ID NO: 1728774 - DNA, 15 bp, Homo sapiens
agaagctgttctatt

SEQ ID NO: 1728775 - DNA, 15 bp, Homo sapiens
gaagctgttctattt

SEQ ID NO: 1728776 - DNA, 15 bp, Homo sapiens
aagctgttctatttc

SEQ ID NO: 1728777 - DNA, 15 bp, Homo sapiens
agctgttctatttcc

SEQ ID NO: 1728778 - DNA, 15 bp, Homo sapiens
gctgttctatttccg

SEQ ID NO: 1728779 - DNA, 15 bp, Homo sapiens
ctgttctatttccgc

SEQ ID NO: 1728780 - DNA, 15 bp, Homo sapiens
tgttctatttccgcc

SEQ ID NO: 1728781 - DNA, 15 bp, Homo sapiens
gttctatttccgcct

SEQ ID NO: 1728782 - DNA, 15 bp, Homo sapiens
ttctatttccgcctt

SEQ ID NO: 1728783 - DNA, 15 bp, Homo sapiens
tctatttccgcctta

SEQ ID NO: 1728784 - DNA, 15 bp, Homo sapiens
ctatttccgccttaa

SEQ ID NO: 1728785 - DNA, 15 bp, Homo sapiens
tatttccgccttaat

SEQ ID NO: 1728786 - DNA, 15 bp, Homo sapiens
atttccgccttaatg

SEQ ID NO: 1728787 - DNA, 15 bp, Homo sapiens
tttccgccttaatgc

SEQ ID NO: 1728788 - DNA, 15 bp, Homo sapiens
ttccgccttaatgct

SEQ ID NO: 1728789 - DNA, 15 bp, Homo sapiens
tccgccttaatgctc

SEQ ID NO: 1728790 - DNA, 15 bp, Homo sapiens
ccgccttaatgctct

SEQ ID NO: 1728791 - DNA, 15 bp, Homo sapiens
cgccttaatgctctg

SEQ ID NO: 1728792 - DNA, 15 bp, Homo sapiens
gccttaatgctctgc

SEQ ID NO: 1728793 - DNA, 15 bp, Homo sapiens
ccttaatgctctgct

SEQ ID NO: 1728794 - DNA, 15 bp, Homo sapiens
cttaatgctctgctc

SEQ ID NO: 1728795 - DNA, 15 bp, Homo sapiens
ttaatgctctgctcg

SEQ ID NO: 1728796 - DNA, 15 bp, Homo sapiens
taatgctctgctcga

SEQ ID NO: 1728797 - DNA, 15 bp, Homo sapiens
aatgctctgctcgaa

SEQ ID NO: 1728798 - DNA, 15 bp, Homo sapiens
atgctctgctcgaag

SEQ ID NO: 1728799 - DNA, 15 bp, Homo sapiens
tgctctgctcgaagg

SEQ ID NO: 1728800 - DNA, 15 bp, Homo sapiens
gctctgctcgaagga

SEQ ID NO: 1728801 - DNA, 15 bp, Homo sapiens
ctctgctcgaaggag

SEQ ID NO: 1728802 - DNA, 15 bp, Homo sapiens
tctgctcgaaggagt

SEQ ID NO: 1728803 - DNA, 15 bp, Homo sapiens
ctgctcgaaggagtc

SEQ ID NO: 1728804 - DNA, 15 bp, Homo sapiens
tgctcgaaggagtcg

SEQ ID NO: 1728805 - DNA, 15 bp, Homo sapiens
gctcgaaggagtcgt

SEQ ID NO: 1728806 - DNA, 15 bp, Homo sapiens
ctcgaaggagtcgtt

SEQ ID NO: 1728807 - DNA, 15 bp, Homo sapiens
tcgaaggagtcgttg

SEQ ID NO: 1728808 - DNA, 15 bp, Homo sapiens
cgaaggagtcgttgc

SEQ ID NO: 1728809 - DNA, 15 bp, Homo sapiens
gaaggagtcgttgct

SEQ ID NO: 1728810 - DNA, 15 bp, Homo sapiens
aaggagtcgttgctg

SEQ ID NO: 1728811 - DNA, 15 bp, Homo sapiens
aggagtcgttgctgc

SEQ ID NO: 1728812 - DNA, 15 bp, Homo sapiens
ggagtcgttgctgct

SEQ ID NO: 1728813 - DNA, 15 bp, Homo sapiens
gagtcgttgctgctc

SEQ ID NO: 1728814 - DNA, 15 bp, Homo sapiens
agtcgttgctgctcg

SEQ ID NO: 1728815 - DNA, 15 bp, Homo sapiens
gtcgttgctgctcgc

SEQ ID NO: 1728816 - DNA, 15 bp, Homo sapiens
tcgttgctgctcgct

SEQ ID NO: 1728817 - DNA, 15 bp, Homo sapiens
cgttgctgctcgctc

SEQ ID NO: 1728818 - DNA, 15 bp, Homo sapiens
gttgctgctcgctct

SEQ ID NO: 1728819 - DNA, 15 bp, Homo sapiens
ttgctgctcgctctg

SEQ ID NO: 1728820 - DNA, 15 bp, Homo sapiens
tgctgctcgctctga

SEQ ID NO: 1728821 - DNA, 15 bp, Homo sapiens
gctgctcgctctgac

SEQ ID NO: 1728822 - DNA, 15 bp, Homo sapiens
ctgctcgctctgacc

SEQ ID NO: 1728823 - DNA, 15 bp, Homo sapiens
tgctcgctctgaccg

SEQ ID NO: 1728824 - DNA, 15 bp, Homo sapiens
gctcgctctgaccgg

SEQ ID NO: 1728825 - DNA, 15 bp, Homo sapiens
ctcgctctgaccggg

SEQ ID NO: 1728826 - DNA, 15 bp, Homo sapiens
tcgctctgaccggga

SEQ ID NO: 1728827 - DNA, 15 bp, Homo sapiens
cgctctgaccgggaa

SEQ ID NO: 1728828 - DNA, 15 bp, Homo sapiens
gctctgaccgggaag

SEQ ID NO: 1728829 - DNA, 15 bp, Homo sapiens
ctctgaccgggaagg

SEQ ID NO: 1728830 - DNA, 15 bp, Homo sapiens
tctgaccgggaaggc

SEQ ID NO: 1728831 - DNA, 15 bp, Homo sapiens
ctgaccgggaaggca

SEQ ID NO: 1728832 - DNA, 15 bp, Homo sapiens
tgaccgggaaggcag

SEQ ID NO: 1728833 - DNA, 15 bp, Homo sapiens
gaccgggaaggcaga

SEQ ID NO: 1728834 - DNA, 15 bp, Homo sapiens
accgggaaggcagaa

SEQ ID NO: 1728835 - DNA, 15 bp, Homo sapiens
ccgggaaggcagaac

SEQ ID NO: 1728836 - DNA, 15 bp, Homo sapiens
cgggaaggcagaacc

SEQ ID NO: 1728837 - DNA, 15 bp, Homo sapiens
gggaaggcagaaccc

SEQ ID NO: 1728838 - DNA, 15 bp, Homo sapiens
ggaaggcagaaccct

SEQ ID NO: 1728839 - DNA, 15 bp, Homo sapiens
gaaggcagaacccta

SEQ ID NO: 1728840 - DNA, 15 bp, Homo sapiens
aaggcagaaccctag

SEQ ID NO: 1728841 - DNA, 15 bp, Homo sapiens
aggcagaaccctagt

SEQ ID NO: 1728842 - DNA, 15 bp, Homo sapiens
ggcagaaccctagtc

SEQ ID NO: 1728843 - DNA, 15 bp, Homo sapiens
gcagaaccctagtcc

SEQ ID NO: 1728844 - DNA, 15 bp, Homo sapiens
cagaaccctagtcct

SEQ ID NO: 1728845 - DNA, 15 bp, Homo sapiens
agaaccctagtcctc

SEQ ID NO: 1728846 - DNA, 15 bp, Homo sapiens
gaaccctagtcctca

SEQ ID NO: 1728847 - DNA, 15 bp, Homo sapiens
aaccctagtcctcac

SEQ ID NO: 1728848 - DNA, 15 bp, Homo sapiens
accctagtcctcact

SEQ ID NO: 1728849 - DNA, 15 bp, Homo sapiens
ccctagtcctcactg

SEQ ID NO: 1728850 - DNA, 15 bp, Homo sapiens
cctagtcctcactgg

SEQ ID NO: 1728851 - DNA, 15 bp, Homo sapiens
ctagtcctcactgga

SEQ ID NO: 1728852 - DNA, 15 bp, Homo sapiens
tagtcctcactggat

SEQ ID NO: 1728853 - DNA, 15 bp, Homo sapiens
agtcctcactggatc

SEQ ID NO: 1728854 - DNA, 15 bp, Homo sapiens
gtcctcactggatct

SEQ ID NO: 1728855 - DNA, 15 bp, Homo sapiens
tcctcactggatctc

SEQ ID NO: 1728856 - DNA, 15 bp, Homo sapiens
cctcactggatctca

SEQ ID NO: 1728857 - DNA, 15 bp, Homo sapiens
ctcactggatctcac

SEQ ID NO: 1728858 - DNA, 15 bp, Homo sapiens
tcactggatctcacc

SEQ ID NO: 1728859 - DNA, 15 bp, Homo sapiens
cactggatctcacct

SEQ ID NO: 1728860 - DNA, 15 bp, Homo sapiens
actggatctcacctg

SEQ ID NO: 1728861 - DNA, 15 bp, Homo sapiens
ctggatctcacctgg

SEQ ID NO: 1728862 - DNA, 15 bp, Homo sapiens
tggatctcacctggc

SEQ ID NO: 1728863 - DNA, 15 bp, Homo sapiens
ggatctcacctggct

SEQ ID NO: 1728864 - DNA, 15 bp, Homo sapiens
gatctcacctggctg

SEQ ID NO: 1728865 - DNA, 15 bp, Homo sapiens
atctcacctggctgc

SEQ ID NO: 1728866 - DNA, 15 bp, Homo sapiens
tctcacctggctgcc

SEQ ID NO: 1728867 - DNA, 15 bp, Homo sapiens
ctcacctggctgcca

SEQ ID NO: 1728868 - DNA, 15 bp, Homo sapiens
tcacctggctgccag

SEQ ID NO: 1728869 - DNA, 15 bp, Homo sapiens
cacctggctgccagg

SEQ ID NO: 1728870 - DNA, 15 bp, Homo sapiens
acctggctgccaggg

SEQ ID NO: 1728871 - DNA, 15 bp, Homo sapiens
cctggctgccagggc

SEQ ID NO: 1728872 - DNA, 15 bp, Homo sapiens
ctggctgccagggcc

SEQ ID NO: 1728873 - DNA, 15 bp, Homo sapiens
tggctgccagggcca

SEQ ID NO: 1728874 - DNA, 15 bp, Homo sapiens
ggctgccagggccac

SEQ ID NO: 1728875 - DNA, 15 bp, Homo sapiens
gctgccagggccacc

SEQ ID NO: 1728876 - DNA, 15 bp, Homo sapiens
ctgccagggccacca

SEQ ID NO: 1728877 - DNA, 15 bp, Homo sapiens
tgccagggccaccac

SEQ ID NO: 1728878 - DNA, 15 bp, Homo sapiens
gccagggccaccacc

SEQ ID NO: 1728879 - DNA, 15 bp, Homo sapiens
ccagggccaccacct

SEQ ID NO: 1728880 - DNA, 15 bp, Homo sapiens
cagggccaccacctg

SEQ ID NO: 1728881 - DNA, 15 bp, Homo sapiens
agggccaccacctga

SEQ ID NO: 1728882 - DNA, 15 bp, Homo sapiens
gggccaccacctgag

SEQ ID NO: 1728883 - DNA, 15 bp, Homo sapiens
ggccaccacctgagc

SEQ ID NO: 1728884 - DNA, 15 bp, Homo sapiens
gccaccacctgagcc

SEQ ID NO: 1728885 - DNA, 15 bp, Homo sapiens
ccaccacctgagcca

SEQ ID NO: 1728886 - DNA, 15 bp, Homo sapiens
caccacctgagccag

SEQ ID NO: 1728887 - DNA, 15 bp, Homo sapiens
accacctgagccagg

SEQ ID NO: 1728888 - DNA, 15 bp, Homo sapiens
ccacctgagccaggt

SEQ ID NO: 1728889 - DNA, 15 bp, Homo sapiens
cacctgagccaggta

SEQ ID NO: 1728890 - DNA, 15 bp, Homo sapiens
acctgagccaggtac

SEQ ID NO: 1728891 - DNA, 15 bp, Homo sapiens
cctgagccaggtaca

SEQ ID NO: 1728892 - DNA, 15 bp, Homo sapiens
ctgagccaggtacaa

SEQ ID NO: 1728893 - DNA, 15 bp, Homo sapiens
tgagccaggtacaag

SEQ ID NO: 1728894 - DNA, 15 bp, Homo sapiens
gagccaggtacaagt

SEQ ID NO: 1728895 - DNA, 15 bp, Homo sapiens
agccaggtacaagtt

SEQ ID NO: 1728896 - DNA, 15 bp, Homo sapiens
gccaggtacaagttt

SEQ ID NO: 1728897 - DNA, 15 bp, Homo sapiens
ccaggtacaagtttt

SEQ ID NO: 1728898 - DNA, 15 bp, Homo sapiens
caggtacaagttttg

SEQ ID NO: 1728899 - DNA, 15 bp, Homo sapiens
aggtacaagttttgg

SEQ ID NO: 1728900 - DNA, 15 bp, Homo sapiens
ggtacaagttttggg

SEQ ID NO: 1728901 - DNA, 15 bp, Homo sapiens
gtacaagttttgggg

SEQ ID NO: 1728902 - DNA, 15 bp, Homo sapiens
tacaagttttggggg

SEQ ID NO: 1728903 - DNA, 15 bp, Homo sapiens
acaagttttgggggg

SEQ ID NO: 1728904 - DNA, 15 bp, Homo sapiens
caagttttgggggga

SEQ ID NO: 1728905 - DNA, 15 bp, Homo sapiens
aagttttggggggac

SEQ ID NO: 1728906 - DNA, 15 bp, Homo sapiens
agttttggggggaca

SEQ ID NO: 1728907 - DNA, 15 bp, Homo sapiens
gttttggggggacac

SEQ ID NO: 1728908 - DNA, 15 bp, Homo sapiens
ttttggggggacaca

SEQ ID NO: 1728909 - DNA, 15 bp, Homo sapiens
tttggggggacacac

SEQ ID NO: 1728910 - DNA, 15 bp, Homo sapiens
ttggggggacacacg

SEQ ID NO: 1728911 - DNA, 15 bp, Homo sapiens
tggggggacacacgg

SEQ ID NO: 1728912 - DNA, 15 bp, Homo sapiens
ggggggacacacgga

SEQ ID NO: 1728913 - DNA, 15 bp, Homo sapiens
gggggacacacggaa

SEQ ID NO: 1728914 - DNA, 15 bp, Homo sapiens
ggggacacacggaag

SEQ ID NO: 1728915 - DNA, 15 bp, Homo sapiens
gggacacacggaagt

SEQ ID NO: 1728916 - DNA, 15 bp, Homo sapiens
ggacacacggaagtc

SEQ ID NO: 1728917 - DNA, 15 bp, Homo sapiens
gacacacggaagtcg

SEQ ID NO: 1728918 - DNA, 15 bp, Homo sapiens
acacacggaagtcgg

SEQ ID NO: 1728919 - DNA, 15 bp, Homo sapiens
cacacggaagtcggg

SEQ ID NO: 1728920 - DNA, 15 bp, Homo sapiens
acacggaagtcgggg

SEQ ID NO: 1728921 - DNA, 15 bp, Homo sapiens
cacggaagtcggggc

SEQ ID NO: 1728922 - DNA, 15 bp, Homo sapiens
acggaagtcggggca

SEQ ID NO: 1728923 - DNA, 15 bp, Homo sapiens
cggaagtcggggcac

SEQ ID NO: 1728924 - DNA, 15 bp, Homo sapiens
ggaagtcggggcact

SEQ ID NO: 1728925 - DNA, 15 bp, Homo sapiens
gaagtcggggcactg

SEQ ID NO: 1728926 - DNA, 15 bp, Homo sapiens
aagtcggggcactgc

SEQ ID NO: 1728927 - DNA, 15 bp, Homo sapiens
agtcggggcactgcc

SEQ ID NO: 1728928 - DNA, 15 bp, Homo sapiens
gtcggggcactgccg

SEQ ID NO: 1728929 - DNA, 15 bp, Homo sapiens
tcggggcactgccgt

SEQ ID NO: 1728930 - DNA, 15 bp, Homo sapiens
cggggcactgccgtg

SEQ ID NO: 1728931 - DNA, 15 bp, Homo sapiens
ggggcactgccgtga

SEQ ID NO: 1728932 - DNA, 15 bp, Homo sapiens
gggcactgccgtgag

SEQ ID NO: 1728933 - DNA, 15 bp, Homo sapiens
ggcactgccgtgaga

SEQ ID NO: 1728934 - DNA, 15 bp, Homo sapiens
gcactgccgtgagat

SEQ ID NO: 1728935 - DNA, 15 bp, Homo sapiens
cactgccgtgagata

SEQ ID NO: 1728936 - DNA, 15 bp, Homo sapiens
actgccgtgagatag

SEQ ID NO: 1728937 - DNA, 15 bp, Homo sapiens
ctgccgtgagatagt

SEQ ID NO: 1728938 - DNA, 15 bp, Homo sapiens
tgccgtgagatagtt

SEQ ID NO: 1728939 - DNA, 15 bp, Homo sapiens
gccgtgagatagttc

SEQ ID NO: 1728940 - DNA, 15 bp, Homo sapiens
ccgtgagatagttct

SEQ ID NO: 1728941 - DNA, 15 bp, Homo sapiens
cgtgagatagttctg

SEQ ID NO: 1728942 - DNA, 15 bp, Homo sapiens
gtgagatagttctgg

SEQ ID NO: 1728943 - DNA, 15 bp, Homo sapiens
tgagatagttctggc

SEQ ID NO: 1728944 - DNA, 15 bp, Homo sapiens
gagatagttctggct

SEQ ID NO: 1728945 - DNA, 15 bp, Homo sapiens
agatagttctggctt

SEQ ID NO: 1728946 - DNA, 15 bp, Homo sapiens
gatagttctggctta

SEQ ID NO: 1728947 - DNA, 15 bp, Homo sapiens
atagttctggcttac

SEQ ID NO: 1728948 - DNA, 15 bp, Homo sapiens
tagttctggcttaca

SEQ ID NO: 1728949 - DNA, 15 bp, Homo sapiens
agttctggcttacat

SEQ ID NO: 1728950 - DNA, 15 bp, Homo sapiens
gttctggcttacatc

SEQ ID NO: 1728951 - DNA, 15 bp, Homo sapiens
ttctggcttacatct

SEQ ID NO: 1728952 - DNA, 15 bp, Homo sapiens
tctggcttacatcta

SEQ ID NO: 1728953 - DNA, 15 bp, Homo sapiens
ctggcttacatctac

SEQ ID NO: 1728954 - DNA, 15 bp, Homo sapiens
tggcttacatctact

SEQ ID NO: 1728955 - DNA, 15 bp, Homo sapiens
ggcttacatctactg

SEQ ID NO: 1728956 - DNA, 15 bp, Homo sapiens
gcttacatctactgc

SEQ ID NO: 1728957 - DNA, 15 bp, Homo sapiens
cttacatctactgcc

SEQ ID NO: 1728958 - DNA, 15 bp, Homo sapiens
ttacatctactgcca

SEQ ID NO: 1728959 - DNA, 15 bp, Homo sapiens
tacatctactgccac

SEQ ID NO: 1728960 - DNA, 15 bp, Homo sapiens
acatctactgccact

SEQ ID NO: 1728961 - DNA, 15 bp, Homo sapiens
catctactgccactg

SEQ ID NO: 1728962 - DNA, 15 bp, Homo sapiens
atctactgccactgc

SEQ ID NO: 1728963 - DNA, 15 bp, Homo sapiens
tctactgccactgcc

SEQ ID NO: 1728964 - DNA, 15 bp, Homo sapiens
ctactgccactgcct

SEQ ID NO: 1728965 - DNA, 15 bp, Homo sapiens
tactgccactgcctg

SEQ ID NO: 1728966 - DNA, 15 bp, Homo sapiens
actgccactgcctgc

SEQ ID NO: 1728967 - DNA, 15 bp, Homo sapiens
ctgccactgcctgca

SEQ ID NO: 1728968 - DNA, 15 bp, Homo sapiens
tgccactgcctgcag

SEQ ID NO: 1728969 - DNA, 15 bp, Homo sapiens
gccactgcctgcagc

SEQ ID NO: 1728970 - DNA, 15 bp, Homo sapiens
ccactgcctgcagcc

SEQ ID NO: 1728971 - DNA, 15 bp, Homo sapiens
cactgcctgcagccc

SEQ ID NO: 1728972 - DNA, 15 bp, Homo sapiens
actgcctgcagccct

SEQ ID NO: 1728973 - DNA, 15 bp, Homo sapiens
ctgcctgcagccctg

SEQ ID NO: 1728974 - DNA, 15 bp, Homo sapiens
tgcctgcagccctgg

SEQ ID NO: 1728975 - DNA, 15 bp, Homo sapiens
gcctgcagccctgga

SEQ ID NO: 1728976 - DNA, 15 bp, Homo sapiens
ctgcagccctggaag

SEQ ID NO: 1728977 - DNA, 15 bp, Homo sapiens
tgcagccctggaagg

SEQ ID NO: 1728978 - DNA, 15 bp, Homo sapiens
gcagccctggaaggc

SEQ ID NO: 1728979 - DNA, 15 bp, Homo sapiens
cagccctggaaggct

SEQ ID NO: 1728980 - DNA, 15 bp, Homo sapiens
agccctggaaggctg

SEQ ID NO: 1728981 - DNA, 15 bp, Homo sapiens
gccctggaaggctgg

SEQ ID NO: 1728982 - DNA, 15 bp, Homo sapiens
ccctggaaggctggg

SEQ ID NO: 1728983 - DNA, 15 bp, Homo sapiens
cctggaaggctgggc

SEQ ID NO: 1728984 - DNA, 15 bp, Homo sapiens
ctggaaggctgggct

SEQ ID NO: 1728985 - DNA, 15 bp, Homo sapiens
tggaaggctgggctg

SEQ ID NO: 1728986 - DNA, 15 bp, Homo sapiens
ggaaggctgggctgc

SEQ ID NO: 1728987 - DNA, 15 bp, Homo sapiens
gaaggctgggctgcg

SEQ ID NO: 1728988 - DNA, 15 bp, Homo sapiens
aaggctgggctgcgc

SEQ ID NO: 1728989 - DNA, 15 bp, Homo sapiens
aggctgggctgcgcc

SEQ ID NO: 1728990 - DNA, 15 bp, Homo sapiens
ggctgggctgcgcct

SEQ ID NO: 1728991 - DNA, 15 bp, Homo sapiens
gctgggctgcgcctg

SEQ ID NO: 1728992 - DNA, 15 bp, Homo sapiens
ctgggctgcgcctgg

SEQ ID NO: 1728993 - DNA, 15 bp, Homo sapiens
tgggctgcgcctggc

SEQ ID NO: 1728994 - DNA, 15 bp, Homo sapiens
gggctgcgcctggct

SEQ ID NO: 1728995 - DNA, 15 bp, Homo sapiens
ggctgcgcctggctg

SEQ ID NO: 1728996 - DNA, 15 bp, Homo sapiens
gctgcgcctggctgg

SEQ ID NO: 1728997 - DNA, 15 bp, Homo sapiens
ctgcgcctggctggc

SEQ ID NO: 1728998 - DNA, 15 bp, Homo sapiens
tgcgcctggctggcc

SEQ ID NO: 1728999 - DNA, 15 bp, Homo sapiens
gcgcctggctggccc

SEQ ID NO: 1729000 - DNA, 15 bp, Homo sapiens
cgcctggctggcccc

SEQ ID NO: 1729001 - DNA, 15 bp, Homo sapiens
gcctggctggcccct

SEQ ID NO: 1729002 - DNA, 15 bp, Homo sapiens
cctggctggcccctg

SEQ ID NO: 1729003 - DNA, 15 bp, Homo sapiens
ctggctggcccctgc

SEQ ID NO: 1729004 - DNA, 15 bp, Homo sapiens
tggctggcccctgcc

SEQ ID NO: 1729005 - DNA, 15 bp, Homo sapiens
ggctggcccctgcca

SEQ ID NO: 1729006 - DNA, 15 bp, Homo sapiens
gctggcccctgccag

SEQ ID NO: 1729007 - DNA, 15 bp, Homo sapiens
ctggcccctgccagc

SEQ ID NO: 1729008 - DNA, 15 bp, Homo sapiens
tggcccctgccagcc

SEQ ID NO: 1729009 - DNA, 15 bp, Homo sapiens
ggcccctgccagccc

SEQ ID NO: 1729010 - DNA, 15 bp, Homo sapiens
gcccctgccagcccc

SEQ ID NO: 1729011 - DNA, 15 bp, Homo sapiens
cccctgccagccccg

SEQ ID NO: 1729012 - DNA, 15 bp, Homo sapiens
ccctgccagccccgg

SEQ ID NO: 1729013 - DNA, 15 bp, Homo sapiens
cctgccagccccggg

SEQ ID NO: 1729014 - DNA, 15 bp, Homo sapiens
ctgccagccccgggc

SEQ ID NO: 1729015 - DNA, 15 bp, Homo sapiens
tgccagccccgggct

SEQ ID NO: 1729016 - DNA, 15 bp, Homo sapiens
gccagccccgggctg

SEQ ID NO: 1729017 - DNA, 15 bp, Homo sapiens
ccagccccgggctgt

SEQ ID NO: 1729018 - DNA, 15 bp, Homo sapiens
cagccccgggctgtg

SEQ ID NO: 1729019 - DNA, 15 bp, Homo sapiens
agccccgggctgtgc

SEQ ID NO: 1729020 - DNA, 15 bp, Homo sapiens
gccccgggctgtgcg

SEQ ID NO: 1729021 - DNA, 15 bp, Homo sapiens
ccccgggctgtgcgg

SEQ ID NO: 1729022 - DNA, 15 bp, Homo sapiens
cccgggctgtgcggc

SEQ ID NO: 1729023 - DNA, 15 bp, Homo sapiens
ccgggctgtgcggct

SEQ ID NO: 1729024 - DNA, 15 bp, Homo sapiens
cgggctgtgcggctc

SEQ ID NO: 1729025 - DNA, 15 bp, Homo sapiens
gggctgtgcggctcc

SEQ ID NO: 1729026 - DNA, 15 bp, Homo sapiens
ggctgtgcggctcca

SEQ ID NO: 1729027 - DNA, 15 bp, Homo sapiens
gctgtgcggctccac

SEQ ID NO: 1729028 - DNA, 15 bp, Homo sapiens
ctgtgcggctccact

SEQ ID NO: 1729029 - DNA, 15 bp, Homo sapiens
tgtgcggctccactc

SEQ ID NO: 1729030 - DNA, 15 bp, Homo sapiens
gtgcggctccactct

SEQ ID NO: 1729031 - DNA, 15 bp, Homo sapiens
tgcggctccactctt

SEQ ID NO: 1729032 - DNA, 15 bp, Homo sapiens
gcggctccactcttt

SEQ ID NO: 1729033 - DNA, 15 bp, Homo sapiens
cggctccactctttg

SEQ ID NO: 1729034 - DNA, 15 bp, Homo sapiens
ggctccactctttgc

SEQ ID NO: 1729035 - DNA, 15 bp, Homo sapiens
gctccactctttgcc

SEQ ID NO: 1729036 - DNA, 15 bp, Homo sapiens
ctccactctttgcct

SEQ ID NO: 1729037 - DNA, 15 bp, Homo sapiens
tccactctttgcctt

SEQ ID NO: 1729038 - DNA, 15 bp, Homo sapiens
ccactctttgccttt

SEQ ID NO: 1729039 - DNA, 15 bp, Homo sapiens
cactctttgccttta

SEQ ID NO: 1729040 - DNA, 15 bp, Homo sapiens
actctttgcctttag

SEQ ID NO: 1729041 - DNA, 15 bp, Homo sapiens
ctctttgcctttagg

SEQ ID NO: 1729042 - DNA, 15 bp, Homo sapiens
tctttgcctttaggt

SEQ ID NO: 1729043 - DNA, 15 bp, Homo sapiens
ctttgcctttaggta

SEQ ID NO: 1729044 - DNA, 15 bp, Homo sapiens
tttgcctttaggtac

SEQ ID NO: 1729045 - DNA, 15 bp, Homo sapiens
ttgcctttaggtact

SEQ ID NO: 1729046 - DNA, 15 bp, Homo sapiens
tgcctttaggtactc

SEQ ID NO: 1729047 - DNA, 15 bp, Homo sapiens
gcctttaggtactcc

SEQ ID NO: 1729048 - DNA, 15 bp, Homo sapiens
cctttaggtactccc

SEQ ID NO: 1729049 - DNA, 15 bp, Homo sapiens
ctttaggtactcccg

SEQ ID NO: 1729050 - DNA, 15 bp, Homo sapiens
tttaggtactcccgg

SEQ ID NO: 1729051 - DNA, 15 bp, Homo sapiens
ttaggtactcccgga

SEQ ID NO: 1729052 - DNA, 15 bp, Homo sapiens
taggtactcccggat

SEQ ID NO: 1729053 - DNA, 15 bp, Homo sapiens
aggtactcccggatg

SEQ ID NO: 1729054 - DNA, 15 bp, Homo sapiens
ggtactcccggatgg

SEQ ID NO: 1729055 - DNA, 15 bp, Homo sapiens
gtactcccggatggc

SEQ ID NO: 1729056 - DNA, 15 bp, Homo sapiens
tactcccggatggct

SEQ ID NO: 1729057 - DNA, 15 bp, Homo sapiens
actcccggatggctt

SEQ ID NO: 1729058 - DNA, 15 bp, Homo sapiens
ctcccggatggcttc

SEQ ID NO: 1729059 - DNA, 15 bp, Homo sapiens
tcccggatggcttcc

SEQ ID NO: 1729060 - DNA, 15 bp, Homo sapiens
cccggatggcttccg

SEQ ID NO: 1729061 - DNA, 15 bp, Homo sapiens
ccggatggcttccgc

SEQ ID NO: 1729062 - DNA, 15 bp, Homo sapiens
cggatggcttccgca

SEQ ID NO: 1729063 - DNA, 15 bp, Homo sapiens
ggatggcttccgcaa

SEQ ID NO: 1729064 - DNA, 15 bp, Homo sapiens
gatggcttccgcaat

SEQ ID NO: 1729065 - DNA, 15 bp, Homo sapiens
atggcttccgcaatg

SEQ ID NO: 1729066 - DNA, 15 bp, Homo sapiens
tggcttccgcaatgt

SEQ ID NO: 1729067 - DNA, 15 bp, Homo sapiens
ggcttccgcaatgtc

SEQ ID NO: 1729068 - DNA, 15 bp, Homo sapiens
gcttccgcaatgtcc

SEQ ID NO: 1729069 - DNA, 15 bp, Homo sapiens
cttccgcaatgtccc

SEQ ID NO: 1729070 - DNA, 15 bp, Homo sapiens
ttccgcaatgtcccg

SEQ ID NO: 1729071 - DNA, 15 bp, Homo sapiens
tccgcaatgtcccgg

SEQ ID NO: 1729072 - DNA, 15 bp, Homo sapiens
ccgcaatgtcccggt

SEQ ID NO: 1729073 - DNA, 15 bp, Homo sapiens
cgcaatgtcccggtc

SEQ ID NO: 1729074 - DNA, 15 bp, Homo sapiens
gcaatgtcccggtcc

SEQ ID NO: 1729075 - DNA, 15 bp, Homo sapiens
caatgtcccggtcca

SEQ ID NO: 1729076 - DNA, 15 bp, Homo sapiens
aatgtcccggtccac

SEQ ID NO: 1729077 - DNA, 15 bp, Homo sapiens
atgtcccggtccacg

SEQ ID NO: 1729078 - DNA, 15 bp, Homo sapiens
tgtcccggtccacgg

SEQ ID NO: 1729079 - DNA, 15 bp, Homo sapiens
gtcccggtccacgga

SEQ ID NO: 1729080 - DNA, 15 bp, Homo sapiens
tcccggtccacggaa

SEQ ID NO: 1729081 - DNA, 15 bp, Homo sapiens
cccggtccacggaat

SEQ ID NO: 1729082 - DNA, 15 bp, Homo sapiens
ccggtccacggaatc

SEQ ID NO: 1729083 - DNA, 15 bp, Homo sapiens
cggtccacggaatca

SEQ ID NO: 1729084 - DNA, 15 bp, Homo sapiens
ggtccacggaatcat

SEQ ID NO: 1729085 - DNA, 15 bp, Homo sapiens
gtccacggaatcatc

SEQ ID NO: 1729086 - DNA, 15 bp, Homo sapiens
tccacggaatcatca

SEQ ID NO: 1729087 - DNA, 15 bp, Homo sapiens
ccacggaatcatcat

SEQ ID NO: 1729088 - DNA, 15 bp, Homo sapiens
cacggaatcatcatt

SEQ ID NO: 1729089 - DNA, 15 bp, Homo sapiens
acggaatcatcattg

SEQ ID NO: 1729090 - DNA, 15 bp, Homo sapiens
cggaatcatcattga

SEQ ID NO: 1729091 - DNA, 15 bp, Homo sapiens
ggaatcatcattgaa

SEQ ID NO: 1729092 - DNA, 15 bp, Homo sapiens
gaatcatcattgaat

SEQ ID NO: 1729093 - DNA, 15 bp, Homo sapiens
aatcatcattgaatc

SEQ ID NO: 1729094 - DNA, 15 bp, Homo sapiens
atcatcattgaatct

SEQ ID NO: 1729095 - DNA, 15 bp, Homo sapiens
tcatcattgaatcta

SEQ ID NO: 1729096 - DNA, 15 bp, Homo sapiens
catcattgaatctag

SEQ ID NO: 1729097 - DNA, 15 bp, Homo sapiens
atcattgaatctagc

SEQ ID NO: 1729098 - DNA, 15 bp, Homo sapiens
tcattgaatctagca

SEQ ID NO: 1729099 - DNA, 15 bp, Homo sapiens
cattgaatctagcac

SEQ ID NO: 1729100 - DNA, 15 bp, Homo sapiens
attgaatctagcacc

SEQ ID NO: 1729101 - DNA, 15 bp, Homo sapiens
ttgaatctagcacca

SEQ ID NO: 1729102 - DNA, 15 bp, Homo sapiens
tgaatctagcaccaa

SEQ ID NO: 1729103 - DNA, 15 bp, Homo sapiens
gaatctagcaccaac

SEQ ID NO: 1729104 - DNA, 15 bp, Homo sapiens
aatctagcaccaacg

SEQ ID NO: 1729105 - DNA, 15 bp, Homo sapiens
atctagcaccaacgg

SEQ ID NO: 1729106 - DNA, 15 bp, Homo sapiens
tctagcaccaacggg

SEQ ID NO: 1729107 - DNA, 15 bp, Homo sapiens
ctagcaccaacgggc

SEQ ID NO: 1729108 - DNA, 15 bp, Homo sapiens
tagcaccaacgggcc

SEQ ID NO: 1729109 - DNA, 15 bp, Homo sapiens
agcaccaacgggcca

SEQ ID NO: 1729110 - DNA, 15 bp, Homo sapiens
gcaccaacgggccaa

SEQ ID NO: 1729111 - DNA, 15 bp, Homo sapiens
caccaacgggccaaa

SEQ ID NO: 1729112 - DNA, 15 bp, Homo sapiens
accaacgggccaaag

SEQ ID NO: 1729113 - DNA, 15 bp, Homo sapiens
ccaacgggccaaagt

SEQ ID NO: 1729114 - DNA, 15 bp, Homo sapiens
caacgggccaaagtc

SEQ ID NO: 1729115 - DNA, 15 bp, Homo sapiens
aacgggccaaagtct

SEQ ID NO: 1729116 - DNA, 15 bp, Homo sapiens
acgggccaaagtctg

SEQ ID NO: 1729117 - DNA, 15 bp, Homo sapiens
cgggccaaagtctgc

SEQ ID NO: 1729118 - DNA, 15 bp, Homo sapiens
gggccaaagtctgca

SEQ ID NO: 1729119 - DNA, 15 bp, Homo sapiens
ggccaaagtctgcag

SEQ ID NO: 1729120 - DNA, 15 bp, Homo sapiens
gccaaagtctgcagt

SEQ ID NO: 1729121 - DNA, 15 bp, Homo sapiens
ccaaagtctgcagtt

SEQ ID NO: 1729122 - DNA, 15 bp, Homo sapiens
caaagtctgcagttt

SEQ ID NO: 1729123 - DNA, 15 bp, Homo sapiens
aaagtctgcagtttc

SEQ ID NO: 1729124 - DNA, 15 bp, Homo sapiens
aagtctgcagtttcc

SEQ ID NO: 1729125 - DNA, 15 bp, Homo sapiens
agtctgcagtttcct

SEQ ID NO: 1729126 - DNA, 15 bp, Homo sapiens
gtctgcagtttcctc

SEQ ID NO: 1729127 - DNA, 15 bp, Homo sapiens
tctgcagtttcctcc

SEQ ID NO: 1729128 - DNA, 15 bp, Homo sapiens
ctgcagtttcctcct

SEQ ID NO: 1729129 - DNA, 15 bp, Homo sapiens
tgcagtttcctcctc

SEQ ID NO: 1729130 - DNA, 15 bp, Homo sapiens
gcagtttcctcctcc

SEQ ID NO: 1729131 - DNA, 15 bp, Homo sapiens
cagtttcctcctccc

SEQ ID NO: 1729132 - DNA, 15 bp, Homo sapiens
agtttcctcctccct

SEQ ID NO: 1729133 - DNA, 15 bp, Homo sapiens
gtttcctcctccctc

SEQ ID NO: 1729134 - DNA, 15 bp, Homo sapiens
tttcctcctccctca

SEQ ID NO: 1729135 - DNA, 15 bp, Homo sapiens
ttcctcctccctcat

SEQ ID NO: 1729136 - DNA, 15 bp, Homo sapiens
tcctcctccctcatg

SEQ ID NO: 1729137 - DNA, 15 bp, Homo sapiens
cctcctccctcatgg

SEQ ID NO: 1729138 - DNA, 15 bp, Homo sapiens
cctccctcatggggt

SEQ ID NO: 1729139 - DNA, 15 bp, Homo sapiens
ctccctcatggggtc

SEQ ID NO: 1729140 - DNA, 15 bp, Homo sapiens
tccctcatggggtca

SEQ ID NO: 1729141 - DNA, 15 bp, Homo sapiens
ccctcatggggtcaa

SEQ ID NO: 1729142 - DNA, 15 bp, Homo sapiens
cctcatggggtcaaa

SEQ ID NO: 1729143 - DNA, 15 bp, Homo sapiens
ctcatggggtcaaag

SEQ ID NO: 1729144 - DNA, 15 bp, Homo sapiens
tcatggggtcaaagt

SEQ ID NO: 1729145 - DNA, 15 bp, Homo sapiens
catggggtcaaagtc

SEQ ID NO: 1729146 - DNA, 15 bp, Homo sapiens
atggggtcaaagtca

SEQ ID NO: 1729147 - DNA, 15 bp, Homo sapiens
tggggtcaaagtcag

SEQ ID NO: 1729148 - DNA, 15 bp, Homo sapiens
ggggtcaaagtcagc

SEQ ID NO: 1729149 - DNA, 15 bp, Homo sapiens
gggtcaaagtcagca

SEQ ID NO: 1729150 - DNA, 15 bp, Homo sapiens
ggtcaaagtcagcaa

SEQ ID NO: 1729151 - DNA, 15 bp, Homo sapiens
gtcaaagtcagcaac

SEQ ID NO: 1729152 - DNA, 15 bp, Homo sapiens
tcaaagtcagcaaca

SEQ ID NO: 1729153 - DNA, 15 bp, Homo sapiens
aaagtcagcaacaag

SEQ ID NO: 1729154 - DNA, 15 bp, Homo sapiens
aagtcagcaacaaga

SEQ ID NO: 1729155 - DNA, 15 bp, Homo sapiens
agtcagcaacaagac

SEQ ID NO: 1729156 - DNA, 15 bp, Homo sapiens
gtcagcaacaagacc

SEQ ID NO: 1729157 - DNA, 15 bp, Homo sapiens
tcagcaacaagacca

SEQ ID NO: 1729158 - DNA, 15 bp, Homo sapiens
cagcaacaagaccac

SEQ ID NO: 1729159 - DNA, 15 bp, Homo sapiens
agcaacaagaccaca

SEQ ID NO: 1729160 - DNA, 15 bp, Homo sapiens
gcaacaagaccacag

SEQ ID NO: 1729161 - DNA, 15 bp, Homo sapiens
caacaagaccacagg

SEQ ID NO: 1729162 - DNA, 15 bp, Homo sapiens
aacaagaccacaggc

SEQ ID NO: 1729163 - DNA, 15 bp, Homo sapiens
acaagaccacaggca

SEQ ID NO: 1729164 - DNA, 15 bp, Homo sapiens
caagaccacaggcag

SEQ ID NO: 1729165 - DNA, 15 bp, Homo sapiens
aagaccacaggcagg

SEQ ID NO: 1729166 - DNA, 15 bp, Homo sapiens
agaccacaggcaggc

SEQ ID NO: 1729167 - DNA, 15 bp, Homo sapiens
gaccacaggcaggca

SEQ ID NO: 1729168 - DNA, 15 bp, Homo sapiens
accacaggcaggcaa

SEQ ID NO: 1729169 - DNA, 15 bp, Homo sapiens
ccacaggcaggcaat

SEQ ID NO: 1729170 - DNA, 15 bp, Homo sapiens
cacaggcaggcaatg

SEQ ID NO: 1729171 - DNA, 15 bp, Homo sapiens
acaggcaggcaatgc

SEQ ID NO: 1729172 - DNA, 15 bp, Homo sapiens
caggcaggcaatgcg

SEQ ID NO: 1729173 - DNA, 15 bp, Homo sapiens
aggcaggcaatgcgg

SEQ ID NO: 1729174 - DNA, 15 bp, Homo sapiens
ggcaggcaatgcggg

SEQ ID NO: 1729175 - DNA, 15 bp, Homo sapiens
gcaggcaatgcgggc

SEQ ID NO: 1729176 - DNA, 15 bp, Homo sapiens
caggcaatgcgggct

SEQ ID NO: 1729177 - DNA, 15 bp, Homo sapiens
aggcaatgcgggctg

SEQ ID NO: 1729178 - DNA, 15 bp, Homo sapiens
ggcaatgcgggctgc

SEQ ID NO: 1729179 - DNA, 15 bp, Homo sapiens
gcaatgcgggctgct

SEQ ID NO: 1729180 - DNA, 15 bp, Homo sapiens
caatgcgggctgctc

SEQ ID NO: 1729181 - DNA, 15 bp, Homo sapiens
aatgcgggctgctcc

SEQ ID NO: 1729182 - DNA, 15 bp, Homo sapiens
atgcgggctgctcct

SEQ ID NO: 1729183 - DNA, 15 bp, Homo sapiens
tgcgggctgctcctt

SEQ ID NO: 1729184 - DNA, 15 bp, Homo sapiens
gcgggctgctccttg

SEQ ID NO: 1729185 - DNA, 15 bp, Homo sapiens
cgggctgctccttgt

SEQ ID NO: 1729186 - DNA, 15 bp, Homo sapiens
gggctgctccttgtg

SEQ ID NO: 1729187 - DNA, 15 bp, Homo sapiens
ggctgctccttgtgc

SEQ ID NO: 1729188 - DNA, 15 bp, Homo sapiens
gctgctccttgtgca

SEQ ID NO: 1729189 - DNA, 15 bp, Homo sapiens
ctgctccttgtgcac

SEQ ID NO: 1729190 - DNA, 15 bp, Homo sapiens
tgctccttgtgcacg

SEQ ID NO: 1729191 - DNA, 15 bp, Homo sapiens
gctccttgtgcacgg

SEQ ID NO: 1729192 - DNA, 15 bp, Homo sapiens
ctccttgtgcacggt

SEQ ID NO: 1729193 - DNA, 15 bp, Homo sapiens
tccttgtgcacggtg

SEQ ID NO: 1729194 - DNA, 15 bp, Homo sapiens
ccttgtgcacggtgg

SEQ ID NO: 1729195 - DNA, 15 bp, Homo sapiens
cttgtgcacggtggg

SEQ ID NO: 1729196 - DNA, 15 bp, Homo sapiens
ttgtgcacggtgggc

SEQ ID NO: 1729197 - DNA, 15 bp, Homo sapiens
tgtgcacggtgggct

SEQ ID NO: 1729198 - DNA, 15 bp, Homo sapiens
gtgcacggtgggctt

SEQ ID NO: 1729199 - DNA, 15 bp, Homo sapiens
tgcacggtgggcttg

SEQ ID NO: 1729200 - DNA, 15 bp, Homo sapiens
gcacggtgggcttgg

SEQ ID NO: 1729201 - DNA, 15 bp, Homo sapiens
cacggtgggcttggc

SEQ ID NO: 1729202 - DNA, 15 bp, Homo sapiens
acggtgggcttggca

SEQ ID NO: 1729203 - DNA, 15 bp, Homo sapiens
cggtgggcttggcag

SEQ ID NO: 1729204 - DNA, 15 bp, Homo sapiens
ggtgggcttggcagc

SEQ ID NO: 1729205 - DNA, 15 bp, Homo sapiens
gtgggcttggcagct

SEQ ID NO: 1729206 - DNA, 15 bp, Homo sapiens
tgggcttggcagctg

SEQ ID NO: 1729207 - DNA, 15 bp, Homo sapiens
gggcttggcagctgg

SEQ ID NO: 1729208 - DNA, 15 bp, Homo sapiens
ggcttggcagctggc

SEQ ID NO: 1729209 - DNA, 15 bp, Homo sapiens
gcttggcagctggct

SEQ ID NO: 1729210 - DNA, 15 bp, Homo sapiens
cttggcagctggctt

SEQ ID NO: 1729211 - DNA, 15 bp, Homo sapiens
ttggcagctggcttg

SEQ ID NO: 1729212 - DNA, 15 bp, Homo sapiens
tggcagctggcttgg

SEQ ID NO: 1729213 - DNA, 15 bp, Homo sapiens
ggcagctggcttggc

SEQ ID NO: 1729214 - DNA, 15 bp, Homo sapiens
gcagctggcttggcg

SEQ ID NO: 1729215 - DNA, 15 bp, Homo sapiens
cagctggcttggcgt

SEQ ID NO: 1729216 - DNA, 15 bp, Homo sapiens
agctggcttggcgtc

SEQ ID NO: 1729217 - DNA, 15 bp, Homo sapiens
gctggcttggcgtct

SEQ ID NO: 1729218 - DNA, 15 bp, Homo sapiens
ctggcttggcgtctg

SEQ ID NO: 1729219 - DNA, 15 bp, Homo sapiens
tggcttggcgtctgc

SEQ ID NO: 1729220 - DNA, 15 bp, Homo sapiens
ggcttggcgtctgcc

SEQ ID NO: 1729221 - DNA, 15 bp, Homo sapiens
gcttggcgtctgccc

SEQ ID NO: 1729222 - DNA, 15 bp, Homo sapiens
cttggcgtctgccct

SEQ ID NO: 1729223 - DNA, 15 bp, Homo sapiens
ttggcgtctgccctg

SEQ ID NO: 1729224 - DNA, 15 bp, Homo sapiens
tggcgtctgccctgt

SEQ ID NO: 1729225 - DNA, 15 bp, Homo sapiens
ggcgtctgccctgtg

SEQ ID NO: 1729226 - DNA, 15 bp, Homo sapiens
gcgtctgccctgtgg

SEQ ID NO: 1729227 - DNA, 15 bp, Homo sapiens
cgtctgccctgtggc

SEQ ID NO: 1729228 - DNA, 15 bp, Homo sapiens
gtctgccctgtggcc

SEQ ID NO: 1729229 - DNA, 15 bp, Homo sapiens
tctgccctgtggccc

SEQ ID NO: 1729230 - DNA, 15 bp, Homo sapiens
ctgccctgtggcccc

SEQ ID NO: 1729231 - DNA, 15 bp, Homo sapiens
tgccctgtggcccct

SEQ ID NO: 1729232 - DNA, 15 bp, Homo sapiens
gccctgtggcccctc

SEQ ID NO: 1729233 - DNA, 15 bp, Homo sapiens
ccctgtggcccctct

SEQ ID NO: 1729234 - DNA, 15 bp, Homo sapiens
cctgtggcccctctg

SEQ ID NO: 1729235 - DNA, 15 bp, Homo sapiens
ctgtggcccctctgt

SEQ ID NO: 1729236 - DNA, 15 bp, Homo sapiens
tgtggcccctctgtg

SEQ ID NO: 1729237 - DNA, 15 bp, Homo sapiens
gtggcccctctgtgc

SEQ ID NO: 1729238 - DNA, 15 bp, Homo sapiens
tggcccctctgtgca

SEQ ID NO: 1729239 - DNA, 15 bp, Homo sapiens
ggcccctctgtgcag

SEQ ID NO: 1729240 - DNA, 15 bp, Homo sapiens
gcccctctgtgcagc

SEQ ID NO: 1729241 - DNA, 15 bp, Homo sapiens
cccctctgtgcagcg

SEQ ID NO: 1729242 - DNA, 15 bp, Homo sapiens
ccctctgtgcagcgc

SEQ ID NO: 1729243 - DNA, 15 bp, Homo sapiens
cctctgtgcagcgcg

SEQ ID NO: 1729244 - DNA, 15 bp, Homo sapiens
ctctgtgcagcgcgc

SEQ ID NO: 1729245 - DNA, 15 bp, Homo sapiens
tctgtgcagcgcgct

SEQ ID NO: 1729246 - DNA, 15 bp, Homo sapiens
ctgtgcagcgcgctc

SEQ ID NO: 1729247 - DNA, 15 bp, Homo sapiens
tgtgcagcgcgctca

SEQ ID NO: 1729248 - DNA, 15 bp, Homo sapiens
gtgcagcgcgctcat

SEQ ID NO: 1729249 - DNA, 15 bp, Homo sapiens
tgcagcgcgctcatc

SEQ ID NO: 1729250 - DNA, 15 bp, Homo sapiens
gcagcgcgctcatcg

SEQ ID NO: 1729251 - DNA, 15 bp, Homo sapiens
cagcgcgctcatcgg

SEQ ID NO: 1729252 - DNA, 15 bp, Homo sapiens
agcgcgctcatcggt

SEQ ID NO: 1729253 - DNA, 15 bp, Homo sapiens
gcgcgctcatcggtg

SEQ ID NO: 1729254 - DNA, 15 bp, Homo sapiens
cgcgctcatcggtgg

SEQ ID NO: 1729255 - DNA, 15 bp, Homo sapiens
gcgctcatcggtggt

SEQ ID NO: 1729256 - DNA, 15 bp, Homo sapiens
cgctcatcggtggtg

SEQ ID NO: 1729257 - DNA, 15 bp, Homo sapiens
gctcatcggtggtgc

SEQ ID NO: 1729258 - DNA, 15 bp, Homo sapiens
ctcatcggtggtgcc

SEQ ID NO: 1729259 - DNA, 15 bp, Homo sapiens
tcatcggtggtgccc

SEQ ID NO: 1729260 - DNA, 15 bp, Homo sapiens
catcggtggtgcccc

SEQ ID NO: 1729261 - DNA, 15 bp, Homo sapiens
atcggtggtgccccg

SEQ ID NO: 1729262 - DNA, 15 bp, Homo sapiens
tcggtggtgccccga

SEQ ID NO: 1729263 - DNA, 15 bp, Homo sapiens
cggtggtgccccgag

SEQ ID NO: 1729264 - DNA, 15 bp, Homo sapiens
ggtggtgccccgagc

SEQ ID NO: 1729265 - DNA, 15 bp, Homo sapiens
gtggtgccccgagca

SEQ ID NO: 1729266 - DNA, 15 bp, Homo sapiens
tggtgccccgagcaa

SEQ ID NO: 1729267 - DNA, 15 bp, Homo sapiens
ggtgccccgagcaac

SEQ ID NO: 1729268 - DNA, 15 bp, Homo sapiens
gtgccccgagcaacc

SEQ ID NO: 1729269 - DNA, 15 bp, Homo sapiens
tgccccgagcaaccc

SEQ ID NO: 1729270 - DNA, 15 bp, Homo sapiens
gccccgagcaacccc

SEQ ID NO: 1729271 - DNA, 15 bp, Homo sapiens
ccccgagcaaccccg

SEQ ID NO: 1729272 - DNA, 15 bp, Homo sapiens
cccgagcaaccccgc

SEQ ID NO: 1729273 - DNA, 15 bp, Homo sapiens
ccgagcaaccccgct

SEQ ID NO: 1729274 - DNA, 15 bp, Homo sapiens
cgagcaaccccgctg

SEQ ID NO: 1729275 - DNA, 15 bp, Homo sapiens
gagcaaccccgctgc

SEQ ID NO: 1729276 - DNA, 15 bp, Homo sapiens
agcaaccccgctgcg

SEQ ID NO: 1729277 - DNA, 15 bp, Homo sapiens
gcaaccccgctgcgc

SEQ ID NO: 1729278 - DNA, 15 bp, Homo sapiens
caaccccgctgcgct

SEQ ID NO: 1729279 - DNA, 15 bp, Homo sapiens
aaccccgctgcgctg

SEQ ID NO: 1729280 - DNA, 15 bp, Homo sapiens
accccgctgcgctgc

SEQ ID NO: 1729281 - DNA, 15 bp, Homo sapiens
ccccgctgcgctgca

SEQ ID NO: 1729282 - DNA, 15 bp, Homo sapiens
cccgctgcgctgcag

SEQ ID NO: 1729283 - DNA, 15 bp, Homo sapiens
ccgctgcgctgcagc

SEQ ID NO: 1729284 - DNA, 15 bp, Homo sapiens
cgctgcgctgcagcg

SEQ ID NO: 1729285 - DNA, 15 bp, Homo sapiens
gctgcgctgcagcgt

SEQ ID NO: 1729286 - DNA, 15 bp, Homo sapiens
ctgcgctgcagcgtg

SEQ ID NO: 1729287 - DNA, 15 bp, Homo sapiens
tgcgctgcagcgtgc

SEQ ID NO: 1729288 - DNA, 15 bp, Homo sapiens
gcgctgcagcgtgct

SEQ ID NO: 1729289 - DNA, 15 bp, Homo sapiens
cgctgcagcgtgctg

SEQ ID NO: 1729290 - DNA, 15 bp, Homo sapiens
gctgcagcgtgctga

SEQ ID NO: 1729291 - DNA, 15 bp, Homo sapiens
ctgcagcgtgctgat

SEQ ID NO: 1729292 - DNA, 15 bp, Homo sapiens
tgcagcgtgctgatg

SEQ ID NO: 1729293 - DNA, 15 bp, Homo sapiens
gcagcgtgctgatga

SEQ ID NO: 1729294 - DNA, 15 bp, Homo sapiens
cagcgtgctgatgag

SEQ ID NO: 1729295 - DNA, 15 bp, Homo sapiens
agcgtgctgatgagc

SEQ ID NO: 1729296 - DNA, 15 bp, Homo sapiens
gcgtgctgatgagca

SEQ ID NO: 1729297 - DNA, 15 bp, Homo sapiens
cgtgctgatgagcat

SEQ ID NO: 1729298 - DNA, 15 bp, Homo sapiens
gtgctgatgagcatc

SEQ ID NO: 1729299 - DNA, 15 bp, Homo sapiens
tgctgatgagcatct

SEQ ID NO: 1729300 - DNA, 15 bp, Homo sapiens
gctgatgagcatctg

SEQ ID NO: 1729301 - DNA, 15 bp, Homo sapiens
ctgatgagcatctgc

SEQ ID NO: 1729302 - DNA, 15 bp, Homo sapiens
tgatgagcatctgca

SEQ ID NO: 1729303 - DNA, 15 bp, Homo sapiens
gatgagcatctgcac

SEQ ID NO: 1729304 - DNA, 15 bp, Homo sapiens
atgagcatctgcacc

SEQ ID NO: 1729305 - DNA, 15 bp, Homo sapiens
tgagcatctgcaccc

SEQ ID NO: 1729306 - DNA, 15 bp, Homo sapiens
gagcatctgcacccg

SEQ ID NO: 1729307 - DNA, 15 bp, Homo sapiens
agcatctgcacccgg

SEQ ID NO: 1729308 - DNA, 15 bp, Homo sapiens
gcatctgcacccggg

SEQ ID NO: 1729309 - DNA, 15 bp, Homo sapiens
catctgcacccgggc

SEQ ID NO: 1729310 - DNA, 15 bp, Homo sapiens
atctgcacccgggcg

SEQ ID NO: 1729311 - DNA, 15 bp, Homo sapiens
tctgcacccgggcgc

SEQ ID NO: 1729312 - DNA, 15 bp, Homo sapiens
ctgcacccgggcgct

SEQ ID NO: 1729313 - DNA, 15 bp, Homo sapiens
tgcacccgggcgctc

SEQ ID NO: 1729314 - DNA, 15 bp, Homo sapiens
gcacccgggcgctca

SEQ ID NO: 1729315 - DNA, 15 bp, Homo sapiens
cacccgggcgctcac

SEQ ID NO: 1729316 - DNA, 15 bp, Homo sapiens
acccgggcgctcacc

SEQ ID NO: 1729317 - DNA, 15 bp, Homo sapiens
cccgggcgctcaccg

SEQ ID NO: 1729318 - DNA, 15 bp, Homo sapiens
ccgggcgctcaccga

SEQ ID NO: 1729319 - DNA, 15 bp, Homo sapiens
cgggcgctcaccgac

SEQ ID NO: 1729320 - DNA, 15 bp, Homo sapiens
gggcgctcaccgaca

SEQ ID NO: 1729321 - DNA, 15 bp, Homo sapiens
ggcgctcaccgacac

SEQ ID NO: 1729322 - DNA, 15 bp, Homo sapiens
gcgctcaccgacacg

SEQ ID NO: 1729323 - DNA, 15 bp, Homo sapiens
cgctcaccgacacgc

SEQ ID NO: 1729324 - DNA, 15 bp, Homo sapiens
gctcaccgacacgct

SEQ ID NO: 1729325 - DNA, 15 bp, Homo sapiens
ctcaccgacacgctc

SEQ ID NO: 1729326 - DNA, 15 bp, Homo sapiens
tcaccgacacgctct

SEQ ID NO: 1729327 - DNA, 15 bp, Homo sapiens
caccgacacgctctc

SEQ ID NO: 1729328 - DNA, 15 bp, Homo sapiens
accgacacgctctcc

SEQ ID NO: 1729329 - DNA, 15 bp, Homo sapiens
ccgacacgctctcca

SEQ ID NO: 1729330 - DNA, 15 bp, Homo sapiens
cgacacgctctccac

SEQ ID NO: 1729331 - DNA, 15 bp, Homo sapiens
gacacgctctccacc

SEQ ID NO: 1729332 - DNA, 15 bp, Homo sapiens
acacgctctccaccc

SEQ ID NO: 1729333 - DNA, 15 bp, Homo sapiens
cacgctctccacccc

SEQ ID NO: 1729334 - DNA, 15 bp, Homo sapiens
acgctctccaccccc

SEQ ID NO: 1729335 - DNA, 15 bp, Homo sapiens
cgctctccaccccct

SEQ ID NO: 1729336 - DNA, 15 bp, Homo sapiens
gctctccaccccctc

SEQ ID NO: 1729337 - DNA, 15 bp, Homo sapiens
ctctccaccccctcg

SEQ ID NO: 1729338 - DNA, 15 bp, Homo sapiens
tctccaccccctcgt

SEQ ID NO: 1729339 - DNA, 15 bp, Homo sapiens
ctccaccccctcgtc

SEQ ID NO: 1729340 - DNA, 15 bp, Homo sapiens
tccaccccctcgtca

SEQ ID NO: 1729341 - DNA, 15 bp, Homo sapiens
ccaccccctcgtcag

SEQ ID NO: 1729342 - DNA, 15 bp, Homo sapiens
caccccctcgtcagc

SEQ ID NO: 1729343 - DNA, 15 bp, Homo sapiens
accccctcgtcagcc

SEQ ID NO: 1729344 - DNA, 15 bp, Homo sapiens
ccccctcgtcagcct

SEQ ID NO: 1729345 - DNA, 15 bp, Homo sapiens
cccctcgtcagcctc

SEQ ID NO: 1729346 - DNA, 15 bp, Homo sapiens
ccctcgtcagcctcc

SEQ ID NO: 1729347 - DNA, 15 bp, Homo sapiens
cctcgtcagcctccg

SEQ ID NO: 1729348 - DNA, 15 bp, Homo sapiens
ctcgtcagcctccga

SEQ ID NO: 1729349 - DNA, 15 bp, Homo sapiens
tcgtcagcctccgag

SEQ ID NO: 1729350 - DNA, 15 bp, Homo sapiens
cgtcagcctccgaga

SEQ ID NO: 1729351 - DNA, 15 bp, Homo sapiens
gtcagcctccgagaa

SEQ ID NO: 1729352 - DNA, 15 bp, Homo sapiens
tcagcctccgagaag

SEQ ID NO: 1729353 - DNA, 15 bp, Homo sapiens
cagcctccgagaagc

SEQ ID NO: 1729354 - DNA, 15 bp, Homo sapiens
agcctccgagaagca

SEQ ID NO: 1729355 - DNA, 15 bp, Homo sapiens
gcctccgagaagcac

SEQ ID NO: 1729356 - DNA, 15 bp, Homo sapiens
cctccgagaagcacc

SEQ ID NO: 1729357 - DNA, 15 bp, Homo sapiens
ctccgagaagcaccc

SEQ ID NO: 1729358 - DNA, 15 bp, Homo sapiens
tccgagaagcacccg

SEQ ID NO: 1729359 - DNA, 15 bp, Homo sapiens
ccgagaagcacccgg

SEQ ID NO: 1729360 - DNA, 15 bp, Homo sapiens
cgagaagcacccggg

SEQ ID NO: 1729361 - DNA, 15 bp, Homo sapiens
gagaagcacccgggg

SEQ ID NO: 1729362 - DNA, 15 bp, Homo sapiens
agaagcacccgggga

SEQ ID NO: 1729363 - DNA, 15 bp, Homo sapiens
gaagcacccggggaa

SEQ ID NO: 1729364 - DNA, 15 bp, Homo sapiens
aagcacccggggaac

SEQ ID NO: 1729365 - DNA, 15 bp, Homo sapiens
agcacccggggaacc

SEQ ID NO: 1729366 - DNA, 15 bp, Homo sapiens
gcacccggggaacct

SEQ ID NO: 1729367 - DNA, 15 bp, Homo sapiens
cacccggggaaccta

SEQ ID NO: 1729368 - DNA, 15 bp, Homo sapiens
acccggggaacctaa

SEQ ID NO: 1729369 - DNA, 15 bp, Homo sapiens
cccggggaacctaaa

SEQ ID NO: 1729370 - DNA, 15 bp, Homo sapiens
ccggggaacctaaag

SEQ ID NO: 1729371 - DNA, 15 bp, Homo sapiens
cggggaacctaaagc

SEQ ID NO: 1729372 - DNA, 15 bp, Homo sapiens
ggggaacctaaagct

SEQ ID NO: 1729373 - DNA, 15 bp, Homo sapiens
gggaacctaaagctc

SEQ ID NO: 1729374 - DNA, 15 bp, Homo sapiens
ggaacctaaagctcc

SEQ ID NO: 1729375 - DNA, 15 bp, Homo sapiens
gaacctaaagctccc

SEQ ID NO: 1729376 - DNA, 15 bp, Homo sapiens
aacctaaagctccct

SEQ ID NO: 1729377 - DNA, 15 bp, Homo sapiens
acctaaagctccctg

SEQ ID NO: 1729378 - DNA, 15 bp, Homo sapiens
cctaaagctccctgg

SEQ ID NO: 1729379 - DNA, 15 bp, Homo sapiens
ctaaagctccctggt

SEQ ID NO: 1729380 - DNA, 15 bp, Homo sapiens
taaagctccctggtg

SEQ ID NO: 1729381 - DNA, 15 bp, Homo sapiens
aaagctccctggtgg

SEQ ID NO: 1729382 - DNA, 15 bp, Homo sapiens
aagctccctggtggg

SEQ ID NO: 1729383 - DNA, 15 bp, Homo sapiens
agctccctggtgggc

SEQ ID NO: 1729384 - DNA, 15 bp, Homo sapiens
gctccctggtgggcc

SEQ ID NO: 1729385 - DNA, 15 bp, Homo sapiens
ctccctggtgggcca

SEQ ID NO: 1729386 - DNA, 15 bp, Homo sapiens
tccctggtgggccaa

SEQ ID NO: 1729387 - DNA, 15 bp, Homo sapiens
ccctggtgggccaaa

SEQ ID NO: 1729388 - DNA, 15 bp, Homo sapiens
cctggtgggccaaag

SEQ ID NO: 1729389 - DNA, 15 bp, Homo sapiens
ctggtgggccaaagg

SEQ ID NO: 1729390 - DNA, 15 bp, Homo sapiens
tggtgggccaaaggc

SEQ ID NO: 1729391 - DNA, 15 bp, Homo sapiens
ggtgggccaaaggcc

SEQ ID NO: 1729392 - DNA, 15 bp, Homo sapiens
gtgggccaaaggcct

SEQ ID NO: 1729393 - DNA, 15 bp, Homo sapiens
tgggccaaaggcctc

SEQ ID NO: 1729394 - DNA, 15 bp, Homo sapiens
gggccaaaggcctcc

SEQ ID NO: 1729395 - DNA, 15 bp, Homo sapiens
ggccaaaggcctccc

SEQ ID NO: 1729396 - DNA, 15 bp, Homo sapiens
gccaaaggcctccca

SEQ ID NO: 1729397 - DNA, 15 bp, Homo sapiens
ccaaaggcctcccat

SEQ ID NO: 1729398 - DNA, 15 bp, Homo sapiens
caaaggcctcccatt

SEQ ID NO: 1729399 - DNA, 15 bp, Homo sapiens
aaaggcctcccattt

SEQ ID NO: 1729400 - DNA, 15 bp, Homo sapiens
aaggcctcccatttg

SEQ ID NO: 1729401 - DNA, 15 bp, Homo sapiens
aggcctcccatttgg

SEQ ID NO: 1729402 - DNA, 15 bp, Homo sapiens
ggcctcccatttgga

SEQ ID NO: 1729403 - DNA, 15 bp, Homo sapiens
gcctcccatttggac

SEQ ID NO: 1729404 - DNA, 15 bp, Homo sapiens
cctcccatttggact

SEQ ID NO: 1729405 - DNA, 15 bp, Homo sapiens
ctcccatttggactg

SEQ ID NO: 1729406 - DNA, 15 bp, Homo sapiens
tcccatttggactgg

SEQ ID NO: 1729407 - DNA, 15 bp, Homo sapiens
cccatttggactggg

SEQ ID NO: 1729408 - DNA, 15 bp, Homo sapiens
ccatttggactgggg

SEQ ID NO: 1729409 - DNA, 15 bp, Homo sapiens
catttggactgggga

SEQ ID NO: 1729410 - DNA, 15 bp, Homo sapiens
atttggactggggag

SEQ ID NO: 1729411 - DNA, 15 bp, Homo sapiens
tttggactggggagc

SEQ ID NO: 1729412 - DNA, 15 bp, Homo sapiens
ttggactggggagca

SEQ ID NO: 1729413 - DNA, 15 bp, Homo sapiens
tggactggggagcaa

SEQ ID NO: 1729414 - DNA, 15 bp, Homo sapiens
ggactggggagcaac

SEQ ID NO: 1729415 - DNA, 15 bp, Homo sapiens
gactggggagcaacc

SEQ ID NO: 1729416 - DNA, 15 bp, Homo sapiens
actggggagcaaccc

SEQ ID NO: 1729417 - DNA, 15 bp, Homo sapiens
ctggggagcaacccc

SEQ ID NO: 1729418 - DNA, 15 bp, Homo sapiens
tggggagcaacccct

SEQ ID NO: 1729419 - DNA, 15 bp, Homo sapiens
ggggagcaacccctg

SEQ ID NO: 1729420 - DNA, 15 bp, Homo sapiens
ggagcaacccctgga

SEQ ID NO: 1729421 - DNA, 15 bp, Homo sapiens
gagcaacccctggag

SEQ ID NO: 1729422 - DNA, 15 bp, Homo sapiens
agcaacccctggagt

SEQ ID NO: 1729423 - DNA, 15 bp, Homo sapiens
gcaacccctggagta

SEQ ID NO: 1729424 - DNA, 15 bp, Homo sapiens
caacccctggagtag

SEQ ID NO: 1729425 - DNA, 15 bp, Homo sapiens
aacccctggagtagc

SEQ ID NO: 1729426 - DNA, 15 bp, Homo sapiens
acccctggagtagcg

SEQ ID NO: 1729427 - DNA, 15 bp, Homo sapiens
cccctggagtagcgt

SEQ ID NO: 1729428 - DNA, 15 bp, Homo sapiens
ccctggagtagcgtt

SEQ ID NO: 1729429 - DNA, 15 bp, Homo sapiens
cctggagtagcgttc

SEQ ID NO: 1729430 - DNA, 15 bp, Homo sapiens
ctggagtagcgttcc

SEQ ID NO: 1729431 - DNA, 15 bp, Homo sapiens
tggagtagcgttcct

SEQ ID NO: 1729432 - DNA, 15 bp, Homo sapiens
ggagtagcgttcctg

SEQ ID NO: 1729433 - DNA, 15 bp, Homo sapiens
gagtagcgttcctga

SEQ ID NO: 1729434 - DNA, 15 bp, Homo sapiens
agtagcgttcctgag

SEQ ID NO: 1729435 - DNA, 15 bp, Homo sapiens
gtagcgttcctgaga

SEQ ID NO: 1729436 - DNA, 15 bp, Homo sapiens
tagcgttcctgagaa

SEQ ID NO: 1729437 - DNA, 15 bp, Homo sapiens
agcgttcctgagaaa

SEQ ID NO: 1729438 - DNA, 15 bp, Homo sapiens
gcgttcctgagaaac

SEQ ID NO: 1729439 - DNA, 15 bp, Homo sapiens
cgttcctgagaaaca

SEQ ID NO: 1729440 - DNA, 15 bp, Homo sapiens
gttcctgagaaacat

SEQ ID NO: 1729441 - DNA, 15 bp, Homo sapiens
ttcctgagaaacatt

SEQ ID NO: 1729442 - DNA, 15 bp, Homo sapiens
tcctgagaaacattc

SEQ ID NO: 1729443 - DNA, 15 bp, Homo sapiens
cctgagaaacattct

SEQ ID NO: 1729444 - DNA, 15 bp, Homo sapiens
ctgagaaacattcta

SEQ ID NO: 1729445 - DNA, 15 bp, Homo sapiens
tgagaaacattctag

SEQ ID NO: 1729446 - DNA, 15 bp, Homo sapiens
gagaaacattctagc

SEQ ID NO: 1729447 - DNA, 15 bp, Homo sapiens
agaaacattctagca

SEQ ID NO: 1729448 - DNA, 15 bp, Homo sapiens
gaaacattctagcag

SEQ ID NO: 1729449 - DNA, 15 bp, Homo sapiens
aaacattctagcaga

SEQ ID NO: 1729450 - DNA, 15 bp, Homo sapiens
aacattctagcagaa

SEQ ID NO: 1729451 - DNA, 15 bp, Homo sapiens
acattctagcagaag

SEQ ID NO: 1729452 - DNA, 15 bp, Homo sapiens
cattctagcagaagg

SEQ ID NO: 1729453 - DNA, 15 bp, Homo sapiens
attctagcagaaggg

SEQ ID NO: 1729454 - DNA, 15 bp, Homo sapiens
ttctagcagaagggg

SEQ ID NO: 1729455 - DNA, 15 bp, Homo sapiens
tctagcagaagggga

SEQ ID NO: 1729456 - DNA, 15 bp, Homo sapiens
ctagcagaaggggag

SEQ ID NO: 1729457 - DNA, 15 bp, Homo sapiens
tagcagaaggggagg

SEQ ID NO: 1729458 - DNA, 15 bp, Homo sapiens
agcagaaggggaggg

SEQ ID NO: 1729459 - DNA, 15 bp, Homo sapiens
gcagaaggggaggga

SEQ ID NO: 1729460 - DNA, 15 bp, Homo sapiens
cagaaggggagggac

SEQ ID NO: 1729461 - DNA, 15 bp, Homo sapiens
agaaggggagggacg

SEQ ID NO: 1729462 - DNA, 15 bp, Homo sapiens
gaaggggagggacgc

SEQ ID NO: 1729463 - DNA, 15 bp, Homo sapiens
aaggggagggacgcg

SEQ ID NO: 1729464 - DNA, 15 bp, Homo sapiens
aggggagggacgcgc

SEQ ID NO: 1729465 - DNA, 15 bp, Homo sapiens
ggggagggacgcgca

SEQ ID NO: 1729466 - DNA, 15 bp, Homo sapiens
gggagggacgcgcag

SEQ ID NO: 1729467 - DNA, 15 bp, Homo sapiens
ggagggacgcgcaga

SEQ ID NO: 1729468 - DNA, 15 bp, Homo sapiens
gagggacgcgcagag

SEQ ID NO: 1729469 - DNA, 15 bp, Homo sapiens
agggacgcgcagagg

SEQ ID NO: 1729470 - DNA, 15 bp, Homo sapiens
gggacgcgcagaggg

SEQ ID NO: 1729471 - DNA, 15 bp, Homo sapiens
ggacgcgcagaggga

SEQ ID NO: 1729472 - DNA, 15 bp, Homo sapiens
gacgcgcagagggac

SEQ ID NO: 1729473 - DNA, 15 bp, Homo sapiens
acgcgcagagggacg

SEQ ID NO: 1729474 - DNA, 15 bp, Homo sapiens
cgcgcagagggacga

SEQ ID NO: 1729475 - DNA, 15 bp, Homo sapiens
gcgcagagggacgac

SEQ ID NO: 1729476 - DNA, 15 bp, Homo sapiens
cgcagagggacgacg

SEQ ID NO: 1729477 - DNA, 15 bp, Homo sapiens
gcagagggacgacgc

SEQ ID NO: 1729478 - DNA, 15 bp, Homo sapiens
cagagggacgacgct

SEQ ID NO: 1729479 - DNA, 15 bp, Homo sapiens
agagggacgacgctt

SEQ ID NO: 1729480 - DNA, 15 bp, Homo sapiens
gagggacgacgcttt

SEQ ID NO: 1729481 - DNA, 15 bp, Homo sapiens
agggacgacgcttta

SEQ ID NO: 1729482 - DNA, 15 bp, Homo sapiens
gggacgacgctttat

SEQ ID NO: 1729483 - DNA, 15 bp, Homo sapiens
ggacgacgctttatt

SEQ ID NO: 1729484 - DNA, 15 bp, Homo sapiens
gacgacgctttattt

SEQ ID NO: 1729485 - DNA, 15 bp, Homo sapiens
acgacgctttatttc

SEQ ID NO: 1729486 - DNA, 15 bp, Homo sapiens
cgacgctttatttct

SEQ ID NO: 1729487 - DNA, 15 bp, Homo sapiens
gacgctttatttctc

SEQ ID NO: 1729488 - DNA, 15 bp, Homo sapiens
acgctttatttctct

SEQ ID NO: 1729489 - DNA, 15 bp, Homo sapiens
cgctttatttctctg

SEQ ID NO: 1729490 - DNA, 15 bp, Homo sapiens
gctttatttctctgc

SEQ ID NO: 1729491 - DNA, 15 bp, Homo sapiens
ctttatttctctgcc

SEQ ID NO: 1729492 - DNA, 15 bp, Homo sapiens
tttatttctctgcca

SEQ ID NO: 1729493 - DNA, 15 bp, Homo sapiens
ttatttctctgccag

SEQ ID NO: 1729494 - DNA, 15 bp, Homo sapiens
tatttctctgccagc

SEQ ID NO: 1729495 - DNA, 15 bp, Homo sapiens
atttctctgccagct

SEQ ID NO: 1729496 - DNA, 15 bp, Homo sapiens
tttctctgccagctt

SEQ ID NO: 1729497 - DNA, 15 bp, Homo sapiens
ttctctgccagcttc

SEQ ID NO: 1729498 - DNA, 15 bp, Homo sapiens
tctctgccagcttca

SEQ ID NO: 1729499 - DNA, 15 bp, Homo sapiens
ctctgccagcttcat

SEQ ID NO: 1729500 - DNA, 15 bp, Homo sapiens
tctgccagcttcata

SEQ ID NO: 1729501 - DNA, 15 bp, Homo sapiens
ctgccagcttcatat

SEQ ID NO: 1729502 - DNA, 15 bp, Homo sapiens
tgccagcttcatata

SEQ ID NO: 1729503 - DNA, 15 bp, Homo sapiens
gccagcttcatatac

SEQ ID NO: 1729504 - DNA, 15 bp, Homo sapiens
ccagcttcatatact

SEQ ID NO: 1729505 - DNA, 15 bp, Homo sapiens
cagcttcatatactc

SEQ ID NO: 1729506 - DNA, 15 bp, Homo sapiens
agcttcatatactca

SEQ ID NO: 1729507 - DNA, 15 bp, Homo sapiens
gcttcatatactcaa

SEQ ID NO: 1729508 - DNA, 15 bp, Homo sapiens
cttcatatactcaaa

SEQ ID NO: 1729509 - DNA, 15 bp, Homo sapiens
ttcatatactcaaaa

SEQ ID NO: 1729510 - DNA, 15 bp, Homo sapiens
tcatatactcaaaag

SEQ ID NO: 1729511 - DNA, 15 bp, Homo sapiens
catatactcaaaagg

SEQ ID NO: 1729512 - DNA, 15 bp, Homo sapiens
atatactcaaaaggt

SEQ ID NO: 1729513 - DNA, 15 bp, Homo sapiens
tatactcaaaaggtt

SEQ ID NO: 1729514 - DNA, 15 bp, Homo sapiens
atactcaaaaggttg

SEQ ID NO: 1729515 - DNA, 15 bp, Homo sapiens
tactcaaaaggttgg

SEQ ID NO: 1729516 - DNA, 15 bp, Homo sapiens
actcaaaaggttggc

SEQ ID NO: 1729517 - DNA, 15 bp, Homo sapiens
ctcaaaaggttggca

SEQ ID NO: 1729518 - DNA, 15 bp, Homo sapiens
tcaaaaggttggcag

SEQ ID NO: 1729519 - DNA, 15 bp, Homo sapiens
caaaaggttggcagc

SEQ ID NO: 1729520 - DNA, 15 bp, Homo sapiens
aaaaggttggcagcg

SEQ ID NO: 1729521 - DNA, 15 bp, Homo sapiens
aaaggttggcagcgg

SEQ ID NO: 1729522 - DNA, 15 bp, Homo sapiens
aaggttggcagcggg

SEQ ID NO: 1729523 - DNA, 15 bp, Homo sapiens
aggttggcagcgggg

SEQ ID NO: 1729524 - DNA, 15 bp, Homo sapiens
ggttggcagcggggt

SEQ ID NO: 1729525 - DNA, 15 bp, Homo sapiens
gttggcagcggggtg

SEQ ID NO: 1729526 - DNA, 15 bp, Homo sapiens
ttggcagcggggtgc

SEQ ID NO: 1729527 - DNA, 15 bp, Homo sapiens
tggcagcggggtgca

SEQ ID NO: 1729528 - DNA, 15 bp, Homo sapiens
ggcagcggggtgcag

SEQ ID NO: 1729529 - DNA, 15 bp, Homo sapiens
gcagcggggtgcagt

SEQ ID NO: 1729530 - DNA, 15 bp, Homo sapiens
cagcggggtgcagtg

SEQ ID NO: 1729531 - DNA, 15 bp, Homo sapiens
agcggggtgcagtgg

SEQ ID NO: 1729532 - DNA, 15 bp, Homo sapiens
gcggggtgcagtggc

SEQ ID NO: 1729533 - DNA, 15 bp, Homo sapiens
cggggtgcagtggct

SEQ ID NO: 1729534 - DNA, 15 bp, Homo sapiens
ggggtgcagtggctc

SEQ ID NO: 1729535 - DNA, 15 bp, Homo sapiens
ggtgcagtggctcaa

SEQ ID NO: 1729536 - DNA, 15 bp, Homo sapiens
gtgcagtggctcaag

SEQ ID NO: 1729537 - DNA, 15 bp, Homo sapiens
tgcagtggctcaagc

SEQ ID NO: 1729538 - DNA, 15 bp, Homo sapiens
gcagtggctcaagcc

SEQ ID NO: 1729539 - DNA, 15 bp, Homo sapiens
cagtggctcaagccc

SEQ ID NO: 1729540 - DNA, 15 bp, Homo sapiens
agtggctcaagcccg

SEQ ID NO: 1729541 - DNA, 15 bp, Homo sapiens
gtggctcaagcccgt

SEQ ID NO: 1729542 - DNA, 15 bp, Homo sapiens
tggctcaagcccgta

SEQ ID NO: 1729543 - DNA, 15 bp, Homo sapiens
ggctcaagcccgtaa

SEQ ID NO: 1729544 - DNA, 15 bp, Homo sapiens
gctcaagcccgtaat

SEQ ID NO: 1729545 - DNA, 15 bp, Homo sapiens
ctcaagcccgtaatc

SEQ ID NO: 1729546 - DNA, 15 bp, Homo sapiens
tcaagcccgtaatca

SEQ ID NO: 1729547 - DNA, 15 bp, Homo sapiens
caagcccgtaatcac

SEQ ID NO: 1729548 - DNA, 15 bp, Homo sapiens
aagcccgtaatcaca

SEQ ID NO: 1729549 - DNA, 15 bp, Homo sapiens
agcccgtaatcacag

SEQ ID NO: 1729550 - DNA, 15 bp, Homo sapiens
gcccgtaatcacagc

SEQ ID NO: 1729551 - DNA, 15 bp, Homo sapiens
cccgtaatcacagca

SEQ ID NO: 1729552 - DNA, 15 bp, Homo sapiens
ccgtaatcacagcac

SEQ ID NO: 1729553 - DNA, 15 bp, Homo sapiens
cgtaatcacagcact

SEQ ID NO: 1729554 - DNA, 15 bp, Homo sapiens
gtaatcacagcactt

SEQ ID NO: 1729555 - DNA, 15 bp, Homo sapiens
taatcacagcacttt

SEQ ID NO: 1729556 - DNA, 15 bp, Homo sapiens
aatcacagcactttg

SEQ ID NO: 1729557 - DNA, 15 bp, Homo sapiens
atcacagcactttga

SEQ ID NO: 1729558 - DNA, 15 bp, Homo sapiens
tcacagcactttgag

SEQ ID NO: 1729559 - DNA, 15 bp, Homo sapiens
cacagcactttgaga

SEQ ID NO: 1729560 - DNA, 15 bp, Homo sapiens
acagcactttgagag

SEQ ID NO: 1729561 - DNA, 15 bp, Homo sapiens
gaggcgggcggatcg

SEQ ID NO: 1729562 - DNA, 15 bp, Homo sapiens
aggcgggcggatcgc

SEQ ID NO: 1729563 - DNA, 15 bp, Homo sapiens
ggcgggcggatcgcg

SEQ ID NO: 1729564 - DNA, 15 bp, Homo sapiens
gcgggcggatcgcga

SEQ ID NO: 1729565 - DNA, 15 bp, Homo sapiens
cgggcggatcgcgag

SEQ ID NO: 1729566 - DNA, 15 bp, Homo sapiens
gggcggatcgcgagg

SEQ ID NO: 1729567 - DNA, 15 bp, Homo sapiens
ggcggatcgcgaggt

SEQ ID NO: 1729568 - DNA, 15 bp, Homo sapiens
gcggatcgcgaggtc

SEQ ID NO: 1729569 - DNA, 15 bp, Homo sapiens
cggatcgcgaggtca

SEQ ID NO: 1729570 - DNA, 15 bp, Homo sapiens
ggatcgcgaggtcag

SEQ ID NO: 1729571 - DNA, 15 bp, Homo sapiens
gatcgcgaggtcagg

SEQ ID NO: 1729572 - DNA, 15 bp, Homo sapiens
atcgcgaggtcagga

SEQ ID NO: 1729573 - DNA, 15 bp, Homo sapiens
tcgcgaggtcaggag

SEQ ID NO: 1729574 - DNA, 15 bp, Homo sapiens
cgcgaggtcaggagt

SEQ ID NO: 1729575 - DNA, 15 bp, Homo sapiens
gcgaggtcaggagtt

SEQ ID NO: 1729576 - DNA, 15 bp, Homo sapiens
aggagtttgagaccc

SEQ ID NO: 1729577 - DNA, 15 bp, Homo sapiens
ggagtttgagacccg

SEQ ID NO: 1729578 - DNA, 15 bp, Homo sapiens
tgagacccgcctggc

SEQ ID NO: 1729579 - DNA, 15 bp, Homo sapiens
gagacccgcctggcc

SEQ ID NO: 1729580 - DNA, 15 bp, Homo sapiens
agacccgcctggcca

SEQ ID NO: 1729581 - DNA, 15 bp, Homo sapiens
gacccgcctggccaa

SEQ ID NO: 1729582 - DNA, 15 bp, Homo sapiens
acccgcctggccaac

SEQ ID NO: 1729583 - DNA, 15 bp, Homo sapiens
cccgcctggccaaca

SEQ ID NO: 1729584 - DNA, 15 bp, Homo sapiens
ccgcctggccaacat

SEQ ID NO: 1729585 - DNA, 15 bp, Homo sapiens
cgcctggccaacata

SEQ ID NO: 1729586 - DNA, 15 bp, Homo sapiens
gcctggccaacatac

SEQ ID NO: 1729587 - DNA, 15 bp, Homo sapiens
cctggccaacatact

SEQ ID NO: 1729588 - DNA, 15 bp, Homo sapiens
ctggccaacatactg

SEQ ID NO: 1729589 - DNA, 15 bp, Homo sapiens
tggccaacatactga

SEQ ID NO: 1729590 - DNA, 15 bp, Homo sapiens
ggccaacatactgaa

SEQ ID NO: 1729591 - DNA, 15 bp, Homo sapiens
gccaacatactgaaa

SEQ ID NO: 1729592 - DNA, 15 bp, Homo sapiens
ccaacatactgaaac

SEQ ID NO: 1729593 - DNA, 15 bp, Homo sapiens
caacatactgaaacc

SEQ ID NO: 1729594 - DNA, 15 bp, Homo sapiens
aacatactgaaaccc

SEQ ID NO: 1729595 - DNA, 15 bp, Homo sapiens
acatactgaaacccc

SEQ ID NO: 1729596 - DNA, 15 bp, Homo sapiens
catactgaaaccccg

SEQ ID NO: 1729597 - DNA, 15 bp, Homo sapiens
atactgaaaccccgt

SEQ ID NO: 1729598 - DNA, 15 bp, Homo sapiens
tactgaaaccccgtc

SEQ ID NO: 1729599 - DNA, 15 bp, Homo sapiens
actgaaaccccgtct

SEQ ID NO: 1729600 - DNA, 15 bp, Homo sapiens
ctgaaaccccgtctc

SEQ ID NO: 1729601 - DNA, 15 bp, Homo sapiens
cccgtctctactaat

SEQ ID NO: 1729602 - DNA, 15 bp, Homo sapiens
ccgtctctactaata

SEQ ID NO: 1729603 - DNA, 15 bp, Homo sapiens
cgggcgtggtggtgt

SEQ ID NO: 1729604 - DNA, 15 bp, Homo sapiens
gggcgtggtggtgtg

SEQ ID NO: 1729605 - DNA, 15 bp, Homo sapiens
ggcgtggtggtgtga

SEQ ID NO: 1729606 - DNA, 15 bp, Homo sapiens
gcgtggtggtgtgag

SEQ ID NO: 1729607 - DNA, 15 bp, Homo sapiens
cgtggtggtgtgagc

SEQ ID NO: 1729608 - DNA, 15 bp, Homo sapiens
gtggtggtgtgagcc

SEQ ID NO: 1729609 - DNA, 15 bp, Homo sapiens
tggtggtgtgagcct

SEQ ID NO: 1729610 - DNA, 15 bp, Homo sapiens
ggtggtgtgagcctg

SEQ ID NO: 1729611 - DNA, 15 bp, Homo sapiens
gtggtgtgagcctgt

SEQ ID NO: 1729612 - DNA, 15 bp, Homo sapiens
tggtgtgagcctgta

SEQ ID NO: 1729613 - DNA, 15 bp, Homo sapiens
ggtgtgagcctgtag

SEQ ID NO: 1729614 - DNA, 15 bp, Homo sapiens
gtgtgagcctgtagt

SEQ ID NO: 1729615 - DNA, 15 bp, Homo sapiens
tgtgagcctgtagtc

SEQ ID NO: 1729616 - DNA, 15 bp, Homo sapiens
gtcccagctactcgt

SEQ ID NO: 1729617 - DNA, 15 bp, Homo sapiens
tcccagctactcgtg

SEQ ID NO: 1729618 - DNA, 15 bp, Homo sapiens
cccagctactcgtga

SEQ ID NO: 1729619 - DNA, 15 bp, Homo sapiens
ccagctactcgtgag

SEQ ID NO: 1729620 - DNA, 15 bp, Homo sapiens
cagctactcgtgagg

SEQ ID NO: 1729621 - DNA, 15 bp, Homo sapiens
agctactcgtgaggc

SEQ ID NO: 1729622 - DNA, 15 bp, Homo sapiens
gctactcgtgaggca

SEQ ID NO: 1729623 - DNA, 15 bp, Homo sapiens
ctactcgtgaggcag

SEQ ID NO: 1729624 - DNA, 15 bp, Homo sapiens
tactcgtgaggcaga

SEQ ID NO: 1729625 - DNA, 15 bp, Homo sapiens
actcgtgaggcagag

SEQ ID NO: 1729626 - DNA, 15 bp, Homo sapiens
ctcgtgaggcagagg

SEQ ID NO: 1729627 - DNA, 15 bp, Homo sapiens
tcgtgaggcagaggc

SEQ ID NO: 1729628 - DNA, 15 bp, Homo sapiens
cgtgaggcagaggcc

SEQ ID NO: 1729629 - DNA, 15 bp, Homo sapiens
gtgaggcagaggcca

SEQ ID NO: 1729630 - DNA, 15 bp, Homo sapiens
tgaggcagaggccag

SEQ ID NO: 1729631 - DNA, 15 bp, Homo sapiens
gaggcagaggccagg

SEQ ID NO: 1729632 - DNA, 15 bp, Homo sapiens
aggcagaggccaggg

SEQ ID NO: 1729633 - DNA, 15 bp, Homo sapiens
ggcagaggccaggga

SEQ ID NO: 1729634 - DNA, 15 bp, Homo sapiens
gcagaggccagggaa

SEQ ID NO: 1729635 - DNA, 15 bp, Homo sapiens
cagaggccagggaat

SEQ ID NO: 1729636 - DNA, 15 bp, Homo sapiens
agaggccagggaatc

SEQ ID NO: 1729637 - DNA, 15 bp, Homo sapiens
gaggccagggaatcg

SEQ ID NO: 1729638 - DNA, 15 bp, Homo sapiens
aggccagggaatcgc

SEQ ID NO: 1729639 - DNA, 15 bp, Homo sapiens
ggccagggaatcgct

SEQ ID NO: 1729640 - DNA, 15 bp, Homo sapiens
gccagggaatcgctt

SEQ ID NO: 1729641 - DNA, 15 bp, Homo sapiens
ccagggaatcgcttg

SEQ ID NO: 1729642 - DNA, 15 bp, Homo sapiens
cagggaatcgcttga

SEQ ID NO: 1729643 - DNA, 15 bp, Homo sapiens
agggaatcgcttgaa

SEQ ID NO: 1729644 - DNA, 15 bp, Homo sapiens
gggaatcgcttgaag

SEQ ID NO: 1729645 - DNA, 15 bp, Homo sapiens
ggaatcgcttgaagc

SEQ ID NO: 1729646 - DNA, 15 bp, Homo sapiens
gaatcgcttgaagcc

SEQ ID NO: 1729647 - DNA, 15 bp, Homo sapiens
aatcgcttgaagccg

SEQ ID NO: 1729648 - DNA, 15 bp, Homo sapiens
atcgcttgaagccgg

SEQ ID NO: 1729649 - DNA, 15 bp, Homo sapiens
tcgcttgaagccgga

SEQ ID NO: 1729650 - DNA, 15 bp, Homo sapiens
cgcttgaagccggaa

SEQ ID NO: 1729651 - DNA, 15 bp, Homo sapiens
gcttgaagccggaag

SEQ ID NO: 1729652 - DNA, 15 bp, Homo sapiens
cttgaagccggaagg

SEQ ID NO: 1729653 - DNA, 15 bp, Homo sapiens
ttgaagccggaaggt

SEQ ID NO: 1729654 - DNA, 15 bp, Homo sapiens
tgaagccggaaggtg

SEQ ID NO: 1729655 - DNA, 15 bp, Homo sapiens
gaagccggaaggtgg

SEQ ID NO: 1729656 - DNA, 15 bp, Homo sapiens
aagccggaaggtgga

SEQ ID NO: 1729657 - DNA, 15 bp, Homo sapiens
agccggaaggtggag

SEQ ID NO: 1729658 - DNA, 15 bp, Homo sapiens
gccggaaggtggagg

SEQ ID NO: 1729659 - DNA, 15 bp, Homo sapiens
ccggaaggtggaggt

SEQ ID NO: 1729660 - DNA, 15 bp, Homo sapiens
cggaaggtggaggtt

SEQ ID NO: 1729661 - DNA, 15 bp, Homo sapiens
ggaaggtggaggttg

SEQ ID NO: 1729662 - DNA, 15 bp, Homo sapiens
gaaggtggaggttgc

SEQ ID NO: 1729663 - DNA, 15 bp, Homo sapiens
tgagctgagatcgcc

SEQ ID NO: 1729664 - DNA, 15 bp, Homo sapiens
gagctgagatcgccc

SEQ ID NO: 1729665 - DNA, 15 bp, Homo sapiens
agctgagatcgcccc

SEQ ID NO: 1729666 - DNA, 15 bp, Homo sapiens
gctgagatcgcccca

SEQ ID NO: 1729667 - DNA, 15 bp, Homo sapiens
ctgagatcgccccac

SEQ ID NO: 1729668 - DNA, 15 bp, Homo sapiens
tgagatcgccccact

SEQ ID NO: 1729669 - DNA, 15 bp, Homo sapiens
gagatcgccccactg

SEQ ID NO: 1729670 - DNA, 15 bp, Homo sapiens
agatcgccccactgc

SEQ ID NO: 1729671 - DNA, 15 bp, Homo sapiens
gatcgccccactgct

SEQ ID NO: 1729672 - DNA, 15 bp, Homo sapiens
atcgccccactgctc

SEQ ID NO: 1729673 - DNA, 15 bp, Homo sapiens
tcgccccactgctct

SEQ ID NO: 1729674 - DNA, 15 bp, Homo sapiens
gccccactgctctcc

SEQ ID NO: 1729675 - DNA, 15 bp, Homo sapiens
ccccactgctctcca

SEQ ID NO: 1729676 - DNA, 15 bp, Homo sapiens
cccactgctctccag

SEQ ID NO: 1729677 - DNA, 15 bp, Homo sapiens
ccactgctctccagc

SEQ ID NO: 1729678 - DNA, 15 bp, Homo sapiens
cactgctctccagcc

SEQ ID NO: 1729679 - DNA, 15 bp, Homo sapiens
actgctctccagcct

SEQ ID NO: 1729680 - DNA, 15 bp, Homo sapiens
ctgctctccagcctg

SEQ ID NO: 1729681 - DNA, 15 bp, Homo sapiens
tgctctccagcctgg

SEQ ID NO: 1729682 - DNA, 15 bp, Homo sapiens
gctctccagcctggg

SEQ ID NO: 1729683 - DNA, 15 bp, Homo sapiens
ctctccagcctgggt

SEQ ID NO: 1729684 - DNA, 15 bp, Homo sapiens
tctccagcctgggtg

SEQ ID NO: 1729685 - DNA, 15 bp, Homo sapiens
cgtctcaaaaaagaa

SEQ ID NO: 1729686 - DNA, 15 bp, Homo sapiens
gtctcaaaaaagaaa

SEQ ID NO: 1729687 - DNA, 15 bp, Homo sapiens
tctcaaaaaagaaaa

SEQ ID NO: 1729688 - DNA, 15 bp, Homo sapiens
ctcaaaaaagaaaaa

SEQ ID NO: 1729689 - DNA, 15 bp, Homo sapiens
aaaaaaaaaaagagt

SEQ ID NO: 1729690 - DNA, 15 bp, Homo sapiens
aaaaaaaaaagagtg

SEQ ID NO: 1729691 - DNA, 15 bp, Homo sapiens
aaaaaaaaagagtgg

SEQ ID NO: 1729692 - DNA, 15 bp, Homo sapiens
aaaaaaaagagtggc

SEQ ID NO: 1729693 - DNA, 15 bp, Homo sapiens
aaaaaaagagtggca

SEQ ID NO: 1729694 - DNA, 15 bp, Homo sapiens
aaaaaagagtggcaa

SEQ ID NO: 1729695 - DNA, 15 bp, Homo sapiens
aaaaagagtggcaag

SEQ ID NO: 1729696 - DNA, 15 bp, Homo sapiens
aaaagagtggcaagt

SEQ ID NO: 1729697 - DNA, 15 bp, Homo sapiens
aaagagtggcaagtg

SEQ ID NO: 1729698 - DNA, 15 bp, Homo sapiens
aagagtggcaagtgg

SEQ ID NO: 1729699 - DNA, 15 bp, Homo sapiens
agagtggcaagtggt

SEQ ID NO: 1729700 - DNA, 15 bp, Homo sapiens
gagtggcaagtggtg

SEQ ID NO: 1729701 - DNA, 15 bp, Homo sapiens
agtggcaagtggtgc

SEQ ID NO: 1729702 - DNA, 15 bp, Homo sapiens
gtggcaagtggtgcc

SEQ ID NO: 1729703 - DNA, 15 bp, Homo sapiens
tggcaagtggtgccc

SEQ ID NO: 1729704 - DNA, 15 bp, Homo sapiens
ggcaagtggtgccca

SEQ ID NO: 1729705 - DNA, 15 bp, Homo sapiens
gcaagtggtgcccat

SEQ ID NO: 1729706 - DNA, 15 bp, Homo sapiens
caagtggtgcccatg

SEQ ID NO: 1729707 - DNA, 15 bp, Homo sapiens
aagtggtgcccatga

SEQ ID NO: 1729708 - DNA, 15 bp, Homo sapiens
agtggtgcccatgag

SEQ ID NO: 1729709 - DNA, 15 bp, Homo sapiens
gtggtgcccatgaga

SEQ ID NO: 1729710 - DNA, 15 bp, Homo sapiens
tggtgcccatgagat

SEQ ID NO: 1729711 - DNA, 15 bp, Homo sapiens
ggtgcccatgagata

SEQ ID NO: 1729712 - DNA, 15 bp, Homo sapiens
gtgcccatgagataa

SEQ ID NO: 1729713 - DNA, 15 bp, Homo sapiens
tgcccatgagataaa

SEQ ID NO: 1729714 - DNA, 15 bp, Homo sapiens
gcccatgagataaag

SEQ ID NO: 1729715 - DNA, 15 bp, Homo sapiens
cccatgagataaagt

SEQ ID NO: 1729716 - DNA, 15 bp, Homo sapiens
ccatgagataaagtc

SEQ ID NO: 1729717 - DNA, 15 bp, Homo sapiens
catgagataaagtct

SEQ ID NO: 1729718 - DNA, 15 bp, Homo sapiens
atgagataaagtctg

SEQ ID NO: 1729719 - DNA, 15 bp, Homo sapiens
tgagataaagtctgc

SEQ ID NO: 1729720 - DNA, 15 bp, Homo sapiens
gagataaagtctgca

SEQ ID NO: 1729721 - DNA, 15 bp, Homo sapiens
agataaagtctgcaa

SEQ ID NO: 1729722 - DNA, 15 bp, Homo sapiens
gataaagtctgcaaa

SEQ ID NO: 1729723 - DNA, 15 bp, Homo sapiens
ataaagtctgcaaat

SEQ ID NO: 1729724 - DNA, 15 bp, Homo sapiens
taaagtctgcaaatg

SEQ ID NO: 1729725 - DNA, 15 bp, Homo sapiens
aaagtctgcaaatgc

SEQ ID NO: 1729726 - DNA, 15 bp, Homo sapiens
aagtctgcaaatgct

SEQ ID NO: 1729727 - DNA, 15 bp, Homo sapiens
agtctgcaaatgctt

SEQ ID NO: 1729728 - DNA, 15 bp, Homo sapiens
gtctgcaaatgcttc

SEQ ID NO: 1729729 - DNA, 15 bp, Homo sapiens
tctgcaaatgcttct

SEQ ID NO: 1729730 - DNA, 15 bp, Homo sapiens
ctgcaaatgcttctt

SEQ ID NO: 1729731 - DNA, 15 bp, Homo sapiens
tgcaaatgcttcttt

SEQ ID NO: 1729732 - DNA, 15 bp, Homo sapiens
gcaaatgcttctttg

SEQ ID NO: 1729733 - DNA, 15 bp, Homo sapiens
caaatgcttctttgc

SEQ ID NO: 1729734 - DNA, 15 bp, Homo sapiens
aaatgcttctttgca

SEQ ID NO: 1729735 - DNA, 15 bp, Homo sapiens
aatgcttctttgcag

SEQ ID NO: 1729736 - DNA, 15 bp, Homo sapiens
atgcttctttgcagt

SEQ ID NO: 1729737 - DNA, 15 bp, Homo sapiens
tgcttctttgcagtt

SEQ ID NO: 1729738 - DNA, 15 bp, Homo sapiens
gcttctttgcagttt

SEQ ID NO: 1729739 - DNA, 15 bp, Homo sapiens
cttctttgcagttta

SEQ ID NO: 1729740 - DNA, 15 bp, Homo sapiens
ttctttgcagtttaa

SEQ ID NO: 1729741 - DNA, 15 bp, Homo sapiens
tctttgcagtttaaa

SEQ ID NO: 1729742 - DNA, 15 bp, Homo sapiens
ctttgcagtttaaaa

SEQ ID NO: 1729743 - DNA, 15 bp, Homo sapiens
tttgcagtttaaaaa

SEQ ID NO: 1729744 - DNA, 15 bp, Homo sapiens
ttgcagtttaaaaag

SEQ ID NO: 1729745 - DNA, 15 bp, Homo sapiens
tgcagtttaaaaagg

SEQ ID NO: 1729746 - DNA, 15 bp, Homo sapiens
gcagtttaaaaagga

SEQ ID NO: 1729747 - DNA, 15 bp, Homo sapiens
cagtttaaaaaggac

SEQ ID NO: 1729748 - DNA, 15 bp, Homo sapiens
agtttaaaaaggacg

SEQ ID NO: 1729749 - DNA, 15 bp, Homo sapiens
gtttaaaaaggacga

SEQ ID NO: 1729750 - DNA, 15 bp, Homo sapiens
tttaaaaaggacgac

SEQ ID NO: 1729751 - DNA, 15 bp, Homo sapiens
ttaaaaaggacgacg

SEQ ID NO: 1729752 - DNA, 15 bp, Homo sapiens
taaaaaggacgacga

SEQ ID NO: 1729753 - DNA, 15 bp, Homo sapiens
aaaaaggacgacgac

SEQ ID NO: 1729754 - DNA, 15 bp, Homo sapiens
aaaaggacgacgact

SEQ ID NO: 1729755 - DNA, 15 bp, Homo sapiens
aaaggacgacgacta

SEQ ID NO: 1729756 - DNA, 15 bp, Homo sapiens
aaggacgacgactat

SEQ ID NO: 1729757 - DNA, 15 bp, Homo sapiens
aggacgacgactata

SEQ ID NO: 1729758 - DNA, 15 bp, Homo sapiens
ggacgacgactataa

SEQ ID NO: 1729759 - DNA, 15 bp, Homo sapiens
gacgacgactataaa

SEQ ID NO: 1729760 - DNA, 15 bp, Homo sapiens
acgacgactataaac

SEQ ID NO: 1729761 - DNA, 15 bp, Homo sapiens
cgacgactataaacc

SEQ ID NO: 1729762 - DNA, 15 bp, Homo sapiens
gacgactataaaccc

SEQ ID NO: 1729763 - DNA, 15 bp, Homo sapiens
acgactataaaccca

SEQ ID NO: 1729764 - DNA, 15 bp, Homo sapiens
cgactataaacccag

SEQ ID NO: 1729765 - DNA, 15 bp, Homo sapiens
gactataaacccagg

SEQ ID NO: 1729766 - DNA, 15 bp, Homo sapiens
actataaacccagga

SEQ ID NO: 1729767 - DNA, 15 bp, Homo sapiens
ctataaacccaggat

SEQ ID NO: 1729768 - DNA, 15 bp, Homo sapiens
tataaacccaggatc

SEQ ID NO: 1729769 - DNA, 15 bp, Homo sapiens
ataaacccaggatca

SEQ ID NO: 1729770 - DNA, 15 bp, Homo sapiens
taaacccaggatcag

SEQ ID NO: 1729771 - DNA, 15 bp, Homo sapiens
aaacccaggatcagg

SEQ ID NO: 1729772 - DNA, 15 bp, Homo sapiens
aacccaggatcagga

SEQ ID NO: 1729773 - DNA, 15 bp, Homo sapiens
acccaggatcaggac

SEQ ID NO: 1729774 - DNA, 15 bp, Homo sapiens
cccaggatcaggacg

SEQ ID NO: 1729775 - DNA, 15 bp, Homo sapiens
ccaggatcaggacga

SEQ ID NO: 1729776 - DNA, 15 bp, Homo sapiens
caggatcaggacgac

SEQ ID NO: 1729777 - DNA, 15 bp, Homo sapiens
aggatcaggacgacg

SEQ ID NO: 1729778 - DNA, 15 bp, Homo sapiens
ggatcaggacgacgt

SEQ ID NO: 1729779 - DNA, 15 bp, Homo sapiens
gatcaggacgacgtt

SEQ ID NO: 1729780 - DNA, 15 bp, Homo sapiens
atcaggacgacgtta

SEQ ID NO: 1729781 - DNA, 15 bp, Homo sapiens
tcaggacgacgttac

SEQ ID NO: 1729782 - DNA, 15 bp, Homo sapiens
caggacgacgttacg

SEQ ID NO: 1729783 - DNA, 15 bp, Homo sapiens
aggacgacgttacgc

SEQ ID NO: 1729784 - DNA, 15 bp, Homo sapiens
ggacgacgttacgca

SEQ ID NO: 1729785 - DNA, 15 bp, Homo sapiens
gacgacgttacgcat

SEQ ID NO: 1729786 - DNA, 15 bp, Homo sapiens
acgacgttacgcata

SEQ ID NO: 1729787 - DNA, 15 bp, Homo sapiens
cgacgttacgcatag

SEQ ID NO: 1729788 - DNA, 15 bp, Homo sapiens
gacgttacgcataga

SEQ ID NO: 1729789 - DNA, 15 bp, Homo sapiens
acgttacgcatagat

SEQ ID NO: 1729790 - DNA, 15 bp, Homo sapiens
cgttacgcatagatt

SEQ ID NO: 1729791 - DNA, 15 bp, Homo sapiens
gttacgcatagattt

SEQ ID NO: 1729792 - DNA, 15 bp, Homo sapiens
ttacgcatagattta

SEQ ID NO: 1729793 - DNA, 15 bp, Homo sapiens
tacgcatagatttat

SEQ ID NO: 1729794 - DNA, 15 bp, Homo sapiens
acgcatagatttatt

SEQ ID NO: 1729795 - DNA, 15 bp, Homo sapiens
cgcatagatttattc

SEQ ID NO: 1729796 - DNA, 15 bp, Homo sapiens
gcatagatttattct

SEQ ID NO: 1729797 - DNA, 15 bp, Homo sapiens
catagatttattctt

SEQ ID NO: 1729798 - DNA, 15 bp, Homo sapiens
atagatttattcttg

SEQ ID NO: 1729799 - DNA, 15 bp, Homo sapiens
tagatttattcttga

SEQ ID NO: 1729800 - DNA, 15 bp, Homo sapiens
agatttattcttgac

SEQ ID NO: 1729801 - DNA, 15 bp, Homo sapiens
gatttattcttgacc

SEQ ID NO: 1729802 - DNA, 15 bp, Homo sapiens
atttattcttgacct

SEQ ID NO: 1729803 - DNA, 15 bp, Homo sapiens
tttattcttgacctg

SEQ ID NO: 1729804 - DNA, 15 bp, Homo sapiens
ttattcttgacctga

SEQ ID NO: 1729805 - DNA, 15 bp, Homo sapiens
tattcttgacctgac

SEQ ID NO: 1729806 - DNA, 15 bp, Homo sapiens
attcttgacctgacc

SEQ ID NO: 1729807 - DNA, 15 bp, Homo sapiens
ttcttgacctgacca

SEQ ID NO: 1729808 - DNA, 15 bp, Homo sapiens
tcttgacctgaccaa

SEQ ID NO: 1729809 - DNA, 15 bp, Homo sapiens
cttgacctgaccaac

SEQ ID NO: 1729810 - DNA, 15 bp, Homo sapiens
ttgacctgaccaacg

SEQ ID NO: 1729811 - DNA, 15 bp, Homo sapiens
tgacctgaccaacga

SEQ ID NO: 1729812 - DNA, 15 bp, Homo sapiens
gacctgaccaacgag

SEQ ID NO: 1729813 - DNA, 15 bp, Homo sapiens
acctgaccaacgagc

SEQ ID NO: 1729814 - DNA, 15 bp, Homo sapiens
cctgaccaacgagct

SEQ ID NO: 1729815 - DNA, 15 bp, Homo sapiens
ctgaccaacgagctc

SEQ ID NO: 1729816 - DNA, 15 bp, Homo sapiens
tgaccaacgagctct

SEQ ID NO: 1729817 - DNA, 15 bp, Homo sapiens
gaccaacgagctctt

SEQ ID NO: 1729818 - DNA, 15 bp, Homo sapiens
accaacgagctcttg

SEQ ID NO: 1729819 - DNA, 15 bp, Homo sapiens
ccaacgagctcttga

SEQ ID NO: 1729820 - DNA, 15 bp, Homo sapiens
caacgagctcttgaa

SEQ ID NO: 1729821 - DNA, 15 bp, Homo sapiens
aacgagctcttgaaa

SEQ ID NO: 1729822 - DNA, 15 bp, Homo sapiens
acgagctcttgaaat

SEQ ID NO: 1729823 - DNA, 15 bp, Homo sapiens
cgagctcttgaaatt

SEQ ID NO: 1729824 - DNA, 15 bp, Homo sapiens
gagctcttgaaattc

SEQ ID NO: 1729825 - DNA, 15 bp, Homo sapiens
agctcttgaaattct

SEQ ID NO: 1729826 - DNA, 15 bp, Homo sapiens
gctcttgaaattctc

SEQ ID NO: 1729827 - DNA, 15 bp, Homo sapiens
ctcttgaaattctct

SEQ ID NO: 1729828 - DNA, 15 bp, Homo sapiens
tcttgaaattctctt

SEQ ID NO: 1729829 - DNA, 15 bp, Homo sapiens
cttgaaattctcttt

SEQ ID NO: 1729830 - DNA, 15 bp, Homo sapiens
ttgaaattctctttg

SEQ ID NO: 1729831 - DNA, 15 bp, Homo sapiens
tgaaattctctttgc

SEQ ID NO: 1729832 - DNA, 15 bp, Homo sapiens
gaaattctctttgca

SEQ ID NO: 1729833 - DNA, 15 bp, Homo sapiens
aaattctctttgcaa

SEQ ID NO: 1729834 - DNA, 15 bp, Homo sapiens
aattctctttgcaac

SEQ ID NO: 1729835 - DNA, 15 bp, Homo sapiens
ttctctttgcaacta

SEQ ID NO: 1729836 - DNA, 15 bp, Homo sapiens
tctctttgcaactag

SEQ ID NO: 1729837 - DNA, 15 bp, Homo sapiens
ctctttgcaactagg

SEQ ID NO: 1729838 - DNA, 15 bp, Homo sapiens
tctttgcaactaggt

SEQ ID NO: 1729839 - DNA, 15 bp, Homo sapiens
ctttgcaactaggtc

SEQ ID NO: 1729840 - DNA, 15 bp, Homo sapiens
tttgcaactaggtcg

SEQ ID NO: 1729841 - DNA, 15 bp, Homo sapiens
ttgcaactaggtcga

SEQ ID NO: 1729842 - DNA, 15 bp, Homo sapiens
tgcaactaggtcgac

SEQ ID NO: 1729843 - DNA, 15 bp, Homo sapiens
gcaactaggtcgact

SEQ ID NO: 1729844 - DNA, 15 bp, Homo sapiens
caactaggtcgactg

SEQ ID NO: 1729845 - DNA, 15 bp, Homo sapiens
aactaggtcgactgt

SEQ ID NO: 1729846 - DNA, 15 bp, Homo sapiens
actaggtcgactgtg

SEQ ID NO: 1729847 - DNA, 15 bp, Homo sapiens
ctaggtcgactgtga

SEQ ID NO: 1729848 - DNA, 15 bp, Homo sapiens
taggtcgactgtgaa

SEQ ID NO: 1729849 - DNA, 15 bp, Homo sapiens
aggtcgactgtgaaa

SEQ ID NO: 1729850 - DNA, 15 bp, Homo sapiens
ggtcgactgtgaaac

SEQ ID NO: 1729851 - DNA, 15 bp, Homo sapiens
gtcgactgtgaaact

SEQ ID NO: 1729852 - DNA, 15 bp, Homo sapiens
tcgactgtgaaactg

SEQ ID NO: 1729853 - DNA, 15 bp, Homo sapiens
cgactgtgaaactgc

SEQ ID NO: 1729854 - DNA, 15 bp, Homo sapiens
gactgtgaaactgca

SEQ ID NO: 1729855 - DNA, 15 bp, Homo sapiens
actgtgaaactgcag

SEQ ID NO: 1729856 - DNA, 15 bp, Homo sapiens
ctgtgaaactgcagc

SEQ ID NO: 1729857 - DNA, 15 bp, Homo sapiens
tgtgaaactgcagcc

SEQ ID NO: 1729858 - DNA, 15 bp, Homo sapiens
gtgaaactgcagcca

SEQ ID NO: 1729859 - DNA, 15 bp, Homo sapiens
tgaaactgcagccag

SEQ ID NO: 1729860 - DNA, 15 bp, Homo sapiens
gaaactgcagccagt

SEQ ID NO: 1729861 - DNA, 15 bp, Homo sapiens
aaactgcagccagtg

SEQ ID NO: 1729862 - DNA, 15 bp, Homo sapiens
aactgcagccagtgt

SEQ ID NO: 1729863 - DNA, 15 bp, Homo sapiens
actgcagccagtgtc

SEQ ID NO: 1729864 - DNA, 15 bp, Homo sapiens
ctgcagccagtgtcc

SEQ ID NO: 1729865 - DNA, 15 bp, Homo sapiens
tgcagccagtgtccc

SEQ ID NO: 1729866 - DNA, 15 bp, Homo sapiens
gcagccagtgtcccc

SEQ ID NO: 1729867 - DNA, 15 bp, Homo sapiens
cagccagtgtcccca

SEQ ID NO: 1729868 - DNA, 15 bp, Homo sapiens
agccagtgtccccaa

SEQ ID NO: 1729869 - DNA, 15 bp, Homo sapiens
gccagtgtccccaaa

SEQ ID NO: 1729870 - DNA, 15 bp, Homo sapiens
ccagtgtccccaaac

SEQ ID NO: 1729871 - DNA, 15 bp, Homo sapiens
cagtgtccccaaacg

SEQ ID NO: 1729872 - DNA, 15 bp, Homo sapiens
agtgtccccaaacgc

SEQ ID NO: 1729873 - DNA, 15 bp, Homo sapiens
gtgtccccaaacgcc

SEQ ID NO: 1729874 - DNA, 15 bp, Homo sapiens
tgtccccaaacgccc

SEQ ID NO: 1729875 - DNA, 15 bp, Homo sapiens
gtccccaaacgcccc

SEQ ID NO: 1729876 - DNA, 15 bp, Homo sapiens
tccccaaacgcccca

SEQ ID NO: 1729877 - DNA, 15 bp, Homo sapiens
ccccaaacgccccaa

SEQ ID NO: 1729878 - DNA, 15 bp, Homo sapiens
cccaaacgccccaag

SEQ ID NO: 1729879 - DNA, 15 bp, Homo sapiens
ccaaacgccccaagg

SEQ ID NO: 1729880 - DNA, 15 bp, Homo sapiens
caaacgccccaagga

SEQ ID NO: 1729881 - DNA, 15 bp, Homo sapiens
aaacgccccaaggat

SEQ ID NO: 1729882 - DNA, 15 bp, Homo sapiens
aacgccccaaggata

SEQ ID NO: 1729883 - DNA, 15 bp, Homo sapiens
acgccccaaggataa

SEQ ID NO: 1729884 - DNA, 15 bp, Homo sapiens
cgccccaaggataag

SEQ ID NO: 1729885 - DNA, 15 bp, Homo sapiens
gccccaaggataagg

SEQ ID NO: 1729886 - DNA, 15 bp, Homo sapiens
ccccaaggataaggc

SEQ ID NO: 1729887 - DNA, 15 bp, Homo sapiens
cccaaggataaggcc

SEQ ID NO: 1729888 - DNA, 15 bp, Homo sapiens
ccaaggataaggcct

SEQ ID NO: 1729889 - DNA, 15 bp, Homo sapiens
caaggataaggcctt

SEQ ID NO: 1729890 - DNA, 15 bp, Homo sapiens
aaggataaggccttt

SEQ ID NO: 1729891 - DNA, 15 bp, Homo sapiens
aggataaggccttta

SEQ ID NO: 1729892 - DNA, 15 bp, Homo sapiens
ggataaggcctttat

SEQ ID NO: 1729893 - DNA, 15 bp, Homo sapiens
gataaggcctttatc

SEQ ID NO: 1729894 - DNA, 15 bp, Homo sapiens
ataaggcctttatca

SEQ ID NO: 1729895 - DNA, 15 bp, Homo sapiens
taaggcctttatcac

SEQ ID NO: 1729896 - DNA, 15 bp, Homo sapiens
aaggcctttatcact

SEQ ID NO: 1729897 - DNA, 15 bp, Homo sapiens
aggcctttatcactc

SEQ ID NO: 1729898 - DNA, 15 bp, Homo sapiens
ggcctttatcactcc

SEQ ID NO: 1729899 - DNA, 15 bp, Homo sapiens
gcctttatcactccg

SEQ ID NO: 1729900 - DNA, 15 bp, Homo sapiens
cctttatcactccga

SEQ ID NO: 1729901 - DNA, 15 bp, Homo sapiens
ctttatcactccgac

SEQ ID NO: 1729902 - DNA, 15 bp, Homo sapiens
tttatcactccgacg

SEQ ID NO: 1729903 - DNA, 15 bp, Homo sapiens
ttatcactccgacgc

SEQ ID NO: 1729904 - DNA, 15 bp, Homo sapiens
tatcactccgacgca

SEQ ID NO: 1729905 - DNA, 15 bp, Homo sapiens
atcactccgacgcat

SEQ ID NO: 1729906 - DNA, 15 bp, Homo sapiens
tcactccgacgcatc

SEQ ID NO: 1729907 - DNA, 15 bp, Homo sapiens
cactccgacgcatcc

SEQ ID NO: 1729908 - DNA, 15 bp, Homo sapiens
actccgacgcatcct

SEQ ID NO: 1729909 - DNA, 15 bp, Homo sapiens
ctccgacgcatcctc

SEQ ID NO: 1729910 - DNA, 15 bp, Homo sapiens
tccgacgcatcctct

SEQ ID NO: 1729911 - DNA, 15 bp, Homo sapiens
ccgacgcatcctctc

SEQ ID NO: 1729912 - DNA, 15 bp, Homo sapiens
cgacgcatcctctct

SEQ ID NO: 1729913 - DNA, 15 bp, Homo sapiens
gacgcatcctctctc

SEQ ID NO: 1729914 - DNA, 15 bp, Homo sapiens
acgcatcctctctct

SEQ ID NO: 1729915 - DNA, 15 bp, Homo sapiens
cgcatcctctctctg

SEQ ID NO: 1729916 - DNA, 15 bp, Homo sapiens
gcatcctctctctgc

SEQ ID NO: 1729917 - DNA, 15 bp, Homo sapiens
catcctctctctgct

SEQ ID NO: 1729918 - DNA, 15 bp, Homo sapiens
atcctctctctgctt

SEQ ID NO: 1729919 - DNA, 15 bp, Homo sapiens
tcctctctctgcttt

SEQ ID NO: 1729920 - DNA, 15 bp, Homo sapiens
cctctctctgctttt

SEQ ID NO: 1729921 - DNA, 15 bp, Homo sapiens
ctctctctgcttttt

SEQ ID NO: 1729922 - DNA, 15 bp, Homo sapiens
tctctctgcttttta

SEQ ID NO: 1729923 - DNA, 15 bp, Homo sapiens
ctctctgctttttaa

SEQ ID NO: 1729924 - DNA, 15 bp, Homo sapiens
tctctgctttttaaa

SEQ ID NO: 1729925 - DNA, 15 bp, Homo sapiens
ctctgctttttaaat

SEQ ID NO: 1729926 - DNA, 15 bp, Homo sapiens
tctgctttttaaata

SEQ ID NO: 1729927 - DNA, 15 bp, Homo sapiens
ctgctttttaaatag

SEQ ID NO: 1729928 - DNA, 15 bp, Homo sapiens
tgctttttaaataga

SEQ ID NO: 1729929 - DNA, 15 bp, Homo sapiens
gctttttaaatagac

SEQ ID NO: 1729930 - DNA, 15 bp, Homo sapiens
ctttttaaatagact

SEQ ID NO: 1729931 - DNA, 15 bp, Homo sapiens
tttttaaatagactt

SEQ ID NO: 1729932 - DNA, 15 bp, Homo sapiens
ttttaaatagacttt

SEQ ID NO: 1729933 - DNA, 15 bp, Homo sapiens
tttaaatagactttt

SEQ ID NO: 1729934 - DNA, 15 bp, Homo sapiens
ttaaatagacttttg

SEQ ID NO: 1729935 - DNA, 15 bp, Homo sapiens
taaatagacttttga

SEQ ID NO: 1729936 - DNA, 15 bp, Homo sapiens
aaatagacttttgac

SEQ ID NO: 1729937 - DNA, 15 bp, Homo sapiens
aatagacttttgact

SEQ ID NO: 1729938 - DNA, 15 bp, Homo sapiens
atagacttttgactc

SEQ ID NO: 1729939 - DNA, 15 bp, Homo sapiens
tagacttttgactcg

SEQ ID NO: 1729940 - DNA, 15 bp, Homo sapiens
agacttttgactcgg

SEQ ID NO: 1729941 - DNA, 15 bp, Homo sapiens
gacttttgactcggc

SEQ ID NO: 1729942 - DNA, 15 bp, Homo sapiens
acttttgactcggcc

SEQ ID NO: 1729943 - DNA, 15 bp, Homo sapiens
cttttgactcggcca

SEQ ID NO: 1729944 - DNA, 15 bp, Homo sapiens
ttttgactcggccag

SEQ ID NO: 1729945 - DNA, 15 bp, Homo sapiens
tttgactcggccagg

SEQ ID NO: 1729946 - DNA, 15 bp, Homo sapiens
ttgactcggccaggc

SEQ ID NO: 1729947 - DNA, 15 bp, Homo sapiens
tgactcggccaggcc

SEQ ID NO: 1729948 - DNA, 15 bp, Homo sapiens
gactcggccaggccc

SEQ ID NO: 1729949 - DNA, 15 bp, Homo sapiens
actcggccaggcccc

SEQ ID NO: 1729950 - DNA, 15 bp, Homo sapiens
ctcggccaggccccc

SEQ ID NO: 1729951 - DNA, 15 bp, Homo sapiens
tcggccaggccccct

SEQ ID NO: 1729952 - DNA, 15 bp, Homo sapiens
cggccaggccccctg

SEQ ID NO: 1729953 - DNA, 15 bp, Homo sapiens
ggccaggccccctgc

SEQ ID NO: 1729954 - DNA, 15 bp, Homo sapiens
gccaggccccctgcc

SEQ ID NO: 1729955 - DNA, 15 bp, Homo sapiens
ccaggccccctgcca

SEQ ID NO: 1729956 - DNA, 15 bp, Homo sapiens
caggccccctgccac

SEQ ID NO: 1729957 - DNA, 15 bp, Homo sapiens
aggccccctgccacc

SEQ ID NO: 1729958 - DNA, 15 bp, Homo sapiens
ggccccctgccaccc

SEQ ID NO: 1729959 - DNA, 15 bp, Homo sapiens
gccccctgccaccca

SEQ ID NO: 1729960 - DNA, 15 bp, Homo sapiens
ccccctgccacccac

SEQ ID NO: 1729961 - DNA, 15 bp, Homo sapiens
cccctgccacccacc

SEQ ID NO: 1729962 - DNA, 15 bp, Homo sapiens
ccctgccacccaccg

SEQ ID NO: 1729963 - DNA, 15 bp, Homo sapiens
cctgccacccaccgc

SEQ ID NO: 1729964 - DNA, 15 bp, Homo sapiens
ctgccacccaccgcg

SEQ ID NO: 1729965 - DNA, 15 bp, Homo sapiens
tgccacccaccgcgc

SEQ ID NO: 1729966 - DNA, 15 bp, Homo sapiens
gccacccaccgcgct

SEQ ID NO: 1729967 - DNA, 15 bp, Homo sapiens
ccacccaccgcgctg

SEQ ID NO: 1729968 - DNA, 15 bp, Homo sapiens
cacccaccgcgctga

SEQ ID NO: 1729969 - DNA, 15 bp, Homo sapiens
acccaccgcgctgac

SEQ ID NO: 1729970 - DNA, 15 bp, Homo sapiens
cccaccgcgctgacc

SEQ ID NO: 1729971 - DNA, 15 bp, Homo sapiens
ccaccgcgctgaccc

SEQ ID NO: 1729972 - DNA, 15 bp, Homo sapiens
caccgcgctgaccct

SEQ ID NO: 1729973 - DNA, 15 bp, Homo sapiens
accgcgctgaccctg

SEQ ID NO: 1729974 - DNA, 15 bp, Homo sapiens
ccgcgctgaccctgc

SEQ ID NO: 1729975 - DNA, 15 bp, Homo sapiens
cgcgctgaccctgcc

SEQ ID NO: 1729976 - DNA, 15 bp, Homo sapiens
gcgctgaccctgcct

SEQ ID NO: 1729977 - DNA, 15 bp, Homo sapiens
cgctgaccctgcctg

SEQ ID NO: 1729978 - DNA, 15 bp, Homo sapiens
gctgaccctgcctgc

SEQ ID NO: 1729979 - DNA, 15 bp, Homo sapiens
ctgaccctgcctgcg

SEQ ID NO: 1729980 - DNA, 15 bp, Homo sapiens
tgaccctgcctgcgc

SEQ ID NO: 1729981 - DNA, 15 bp, Homo sapiens
gaccctgcctgcgct

SEQ ID NO: 1729982 - DNA, 15 bp, Homo sapiens
accctgcctgcgctt

SEQ ID NO: 1729983 - DNA, 15 bp, Homo sapiens
ccctgcctgcgcttg

SEQ ID NO: 1729984 - DNA, 15 bp, Homo sapiens
cctgcctgcgcttgc

SEQ ID NO: 1729985 - DNA, 15 bp, Homo sapiens
ctgcctgcgcttgcg

SEQ ID NO: 1729986 - DNA, 15 bp, Homo sapiens
tgcctgcgcttgcgt

SEQ ID NO: 1729987 - DNA, 15 bp, Homo sapiens
gcctgcgcttgcgtc

SEQ ID NO: 1729988 - DNA, 15 bp, Homo sapiens
cctgcgcttgcgtcc

SEQ ID NO: 1729989 - DNA, 15 bp, Homo sapiens
ctgcgcttgcgtccc

SEQ ID NO: 1729990 - DNA, 15 bp, Homo sapiens
tgcgcttgcgtcccg

SEQ ID NO: 1729991 - DNA, 15 bp, Homo sapiens
gcgcttgcgtcccgc

SEQ ID NO: 1729992 - DNA, 15 bp, Homo sapiens
cgcttgcgtcccgcg

SEQ ID NO: 1729993 - DNA, 15 bp, Homo sapiens
gcttgcgtcccgcgt

SEQ ID NO: 1729994 - DNA, 15 bp, Homo sapiens
cttgcgtcccgcgtc

SEQ ID NO: 1729995 - DNA, 15 bp, Homo sapiens
ttgcgtcccgcgtcc

SEQ ID NO: 1729996 - DNA, 15 bp, Homo sapiens
tgcgtcccgcgtccc

SEQ ID NO: 1729997 - DNA, 15 bp, Homo sapiens
gcgtcccgcgtcccg

SEQ ID NO: 1729998 - DNA, 15 bp, Homo sapiens
cgtcccgcgtcccgc

SEQ ID NO: 1729999 - DNA, 15 bp, Homo sapiens
gtcccgcgtcccgca

SEQ ID NO: 1730000 - DNA, 15 bp, Homo sapiens
tcccgcgtcccgcat

SEQ ID NO: 1730001 - DNA, 15 bp, Homo sapiens
cccgcgtcccgcatc

SEQ ID NO: 1730002 - DNA, 15 bp, Homo sapiens
ccgcgtcccgcatcc

SEQ ID NO: 1730003 - DNA, 15 bp, Homo sapiens
cgcgtcccgcatccg

SEQ ID NO: 1730004 - DNA, 15 bp, Homo sapiens
gcgtcccgcatccgg

SEQ ID NO: 1730005 - DNA, 15 bp, Homo sapiens
cgtcccgcatccggg

SEQ ID NO: 1730006 - DNA, 15 bp, Homo sapiens
gtcccgcatccgggg

SEQ ID NO: 1730007 - DNA, 15 bp, Homo sapiens
tcccgcatccggggg

SEQ ID NO: 1730008 - DNA, 15 bp, Homo sapiens
cccgcatccgggggg

SEQ ID NO: 1730009 - DNA, 15 bp, Homo sapiens
ccgcatccgggggga

SEQ ID NO: 1730010 - DNA, 15 bp, Homo sapiens
cgcatccggggggag

SEQ ID NO: 1730011 - DNA, 15 bp, Homo sapiens
gcatccggggggagg

SEQ ID NO: 1730012 - DNA, 15 bp, Homo sapiens
catccggggggaggc

SEQ ID NO: 1730013 - DNA, 15 bp, Homo sapiens
atccggggggaggcg

SEQ ID NO: 1730014 - DNA, 15 bp, Homo sapiens
tccggggggaggcgg

SEQ ID NO: 1730015 - DNA, 15 bp, Homo sapiens
ccggggggaggcggc

SEQ ID NO: 1730016 - DNA, 15 bp, Homo sapiens
cggggggaggcggcg

SEQ ID NO: 1730017 - DNA, 15 bp, Homo sapiens
ggggggaggcggcgg

SEQ ID NO: 1730018 - DNA, 15 bp, Homo sapiens
gggggaggcggcggg

SEQ ID NO: 1730019 - DNA, 15 bp, Homo sapiens
ggggaggcggcgggc

SEQ ID NO: 1730020 - DNA, 15 bp, Homo sapiens
gggaggcggcgggcc

SEQ ID NO: 1730021 - DNA, 15 bp, Homo sapiens
ggaggcggcgggccc

SEQ ID NO: 1730022 - DNA, 15 bp, Homo sapiens
gaggcggcgggcccg

SEQ ID NO: 1730023 - DNA, 15 bp, Homo sapiens
aggcggcgggcccgg

SEQ ID NO: 1730024 - DNA, 15 bp, Homo sapiens
ggcggcgggcccggg

SEQ ID NO: 1730025 - DNA, 15 bp, Homo sapiens
gcggcgggcccgggt

SEQ ID NO: 1730026 - DNA, 15 bp, Homo sapiens
cggcgggcccgggtc

SEQ ID NO: 1730027 - DNA, 15 bp, Homo sapiens
ggcgggcccgggtct

SEQ ID NO: 1730028 - DNA, 15 bp, Homo sapiens
gcgggcccgggtctc

SEQ ID NO: 1730029 - DNA, 15 bp, Homo sapiens
cgggcccgggtctct

SEQ ID NO: 1730030 - DNA, 15 bp, Homo sapiens
gggcccgggtctctg

SEQ ID NO: 1730031 - DNA, 15 bp, Homo sapiens
ggcccgggtctctgg

SEQ ID NO: 1730032 - DNA, 15 bp, Homo sapiens
gcccgggtctctggg

SEQ ID NO: 1730033 - DNA, 15 bp, Homo sapiens
cccgggtctctgggg

SEQ ID NO: 1730034 - DNA, 15 bp, Homo sapiens
ccgggtctctggggc

SEQ ID NO: 1730035 - DNA, 15 bp, Homo sapiens
cgggtctctggggct

SEQ ID NO: 1730036 - DNA, 15 bp, Homo sapiens
gggtctctggggctg

SEQ ID NO: 1730037 - DNA, 15 bp, Homo sapiens
ggtctctggggctgg

SEQ ID NO: 1730038 - DNA, 15 bp, Homo sapiens
gtctctggggctggc

SEQ ID NO: 1730039 - DNA, 15 bp, Homo sapiens
tctctggggctggcc

SEQ ID NO: 1730040 - DNA, 15 bp, Homo sapiens
ctctggggctggccc

SEQ ID NO: 1730041 - DNA, 15 bp, Homo sapiens
tctggggctggccca

SEQ ID NO: 1730042 - DNA, 15 bp, Homo sapiens
ctggggctggcccat

SEQ ID NO: 1730043 - DNA, 15 bp, Homo sapiens
tggggctggcccatt

SEQ ID NO: 1730044 - DNA, 15 bp, Homo sapiens
ggggctggcccattt

SEQ ID NO: 1730045 - DNA, 15 bp, Homo sapiens
gggctggcccattta

SEQ ID NO: 1730046 - DNA, 15 bp, Homo sapiens
ggctggcccatttac

SEQ ID NO: 1730047 - DNA, 15 bp, Homo sapiens
gctggcccatttact

SEQ ID NO: 1730048 - DNA, 15 bp, Homo sapiens
ctggcccatttactt

SEQ ID NO: 1730049 - DNA, 15 bp, Homo sapiens
tggcccatttactta

SEQ ID NO: 1730050 - DNA, 15 bp, Homo sapiens
ggcccatttacttag

SEQ ID NO: 1730051 - DNA, 15 bp, Homo sapiens
gcccatttacttagt

SEQ ID NO: 1730052 - DNA, 15 bp, Homo sapiens
cccatttacttagtt

SEQ ID NO: 1730053 - DNA, 15 bp, Homo sapiens
ccatttacttagttt

SEQ ID NO: 1730054 - DNA, 15 bp, Homo sapiens
catttacttagtttt

SEQ ID NO: 1730055 - DNA, 15 bp, Homo sapiens
atttacttagttttg

SEQ ID NO: 1730056 - DNA, 15 bp, Homo sapiens
tttacttagttttgt

SEQ ID NO: 1730057 - DNA, 15 bp, Homo sapiens
ttacttagttttgtt

SEQ ID NO: 1730058 - DNA, 15 bp, Homo sapiens
tacttagttttgttt

SEQ ID NO: 1730059 - DNA, 15 bp, Homo sapiens
acttagttttgtttt

SEQ ID NO: 1730060 - DNA, 15 bp, Homo sapiens
cttagttttgttttt

SEQ ID NO: 1730061 - DNA, 15 bp, Homo sapiens
ttagttttgtttttg

SEQ ID NO: 1730062 - DNA, 15 bp, Homo sapiens
tagttttgtttttgt

SEQ ID NO: 1730063 - DNA, 15 bp, Homo sapiens
agttttgtttttgtt

SEQ ID NO: 1730064 - DNA, 15 bp, Homo sapiens
gttttgtttttgttg

SEQ ID NO: 1730065 - DNA, 15 bp, Homo sapiens
ttttgtttttgttgc

SEQ ID NO: 1730066 - DNA, 15 bp, Homo sapiens
tttgtttttgttgca

SEQ ID NO: 1730067 - DNA, 15 bp, Homo sapiens
ttgtttttgttgcat

SEQ ID NO: 1730068 - DNA, 15 bp, Homo sapiens
tgtttttgttgcatt

SEQ ID NO: 1730069 - DNA, 15 bp, Homo sapiens
gtttttgttgcattt

SEQ ID NO: 1730070 - DNA, 15 bp, Homo sapiens
tttttgttgcatttg

SEQ ID NO: 1730071 - DNA, 15 bp, Homo sapiens
ttttgttgcatttgc

SEQ ID NO: 1730072 - DNA, 15 bp, Homo sapiens
tttgttgcatttgct

SEQ ID NO: 1730073 - DNA, 15 bp, Homo sapiens
ttgttgcatttgctt

SEQ ID NO: 1730074 - DNA, 15 bp, Homo sapiens
tgttgcatttgcttt

SEQ ID NO: 1730075 - DNA, 15 bp, Homo sapiens
gttgcatttgctttt

SEQ ID NO: 1730076 - DNA, 15 bp, Homo sapiens
ttgcatttgcttttg

SEQ ID NO: 1730077 - DNA, 15 bp, Homo sapiens
tgcatttgcttttgg

SEQ ID NO: 1730078 - DNA, 15 bp, Homo sapiens
gcatttgcttttggt

SEQ ID NO: 1730079 - DNA, 15 bp, Homo sapiens
catttgcttttggtg

SEQ ID NO: 1730080 - DNA, 15 bp, Homo sapiens
atttgcttttggtga

SEQ ID NO: 1730081 - DNA, 15 bp, Homo sapiens
tttgcttttggtgac

SEQ ID NO: 1730082 - DNA, 15 bp, Homo sapiens
ttgcttttggtgaca

SEQ ID NO: 1730083 - DNA, 15 bp, Homo sapiens
tgcttttggtgacac

SEQ ID NO: 1730084 - DNA, 15 bp, Homo sapiens
gcttttggtgacact

SEQ ID NO: 1730085 - DNA, 15 bp, Homo sapiens
cttttggtgacactc

SEQ ID NO: 1730086 - DNA, 15 bp, Homo sapiens
ttttggtgacactcc

SEQ ID NO: 1730087 - DNA, 15 bp, Homo sapiens
tttggtgacactccc

SEQ ID NO: 1730088 - DNA, 15 bp, Homo sapiens
ttggtgacactccct

SEQ ID NO: 1730089 - DNA, 15 bp, Homo sapiens
tggtgacactccctt

SEQ ID NO: 1730090 - DNA, 15 bp, Homo sapiens
ggtgacactcccttt

SEQ ID NO: 1730091 - DNA, 15 bp, Homo sapiens
gtgacactccctttt

SEQ ID NO: 1730092 - DNA, 15 bp, Homo sapiens
tgacactcccttttt

SEQ ID NO: 1730093 - DNA, 15 bp, Homo sapiens
gacactccctttttg

SEQ ID NO: 1730094 - DNA, 15 bp, Homo sapiens
acactccctttttga

SEQ ID NO: 1730095 - DNA, 15 bp, Homo sapiens
cactccctttttgat

SEQ ID NO: 1730096 - DNA, 15 bp, Homo sapiens
actccctttttgata

SEQ ID NO: 1730097 - DNA, 15 bp, Homo sapiens
ctccctttttgatat

SEQ ID NO: 1730098 - DNA, 15 bp, Homo sapiens
tccctttttgatatt

SEQ ID NO: 1730099 - DNA, 15 bp, Homo sapiens
ccctttttgatattc

SEQ ID NO: 1730100 - DNA, 15 bp, Homo sapiens
cctttttgatattcc

SEQ ID NO: 1730101 - DNA, 15 bp, Homo sapiens
ctttttgatattcca

SEQ ID NO: 1730102 - DNA, 15 bp, Homo sapiens
tttttgatattccac

SEQ ID NO: 1730103 - DNA, 15 bp, Homo sapiens
ttttgatattccaca

SEQ ID NO: 1730104 - DNA, 15 bp, Homo sapiens
tttgatattccacat

SEQ ID NO: 1730105 - DNA, 15 bp, Homo sapiens
ttgatattccacata

SEQ ID NO: 1730106 - DNA, 15 bp, Homo sapiens
tgatattccacatat

SEQ ID NO: 1730107 - DNA, 15 bp, Homo sapiens
gatattccacatata

SEQ ID NO: 1730108 - DNA, 15 bp, Homo sapiens
atattccacatataa

SEQ ID NO: 1730109 - DNA, 15 bp, Homo sapiens
tattccacatataaa

SEQ ID NO: 1730110 - DNA, 15 bp, Homo sapiens
attccacatataaat

SEQ ID NO: 1730111 - DNA, 15 bp, Homo sapiens
ttccacatataaatg

SEQ ID NO: 1730112 - DNA, 15 bp, Homo sapiens
tccacatataaatga

SEQ ID NO: 1730113 - DNA, 15 bp, Homo sapiens
ccacatataaatgag

SEQ ID NO: 1730114 - DNA, 15 bp, Homo sapiens
cacatataaatgagg

SEQ ID NO: 1730115 - DNA, 15 bp, Homo sapiens
acatataaatgaggc

SEQ ID NO: 1730116 - DNA, 15 bp, Homo sapiens
catataaatgaggca

SEQ ID NO: 1730117 - DNA, 15 bp, Homo sapiens
atataaatgaggcaa

SEQ ID NO: 1730118 - DNA, 15 bp, Homo sapiens
tataaatgaggcaat

SEQ ID NO: 1730119 - DNA, 15 bp, Homo sapiens
ataaatgaggcaata

SEQ ID NO: 1730120 - DNA, 15 bp, Homo sapiens
taaatgaggcaataa

SEQ ID NO: 1730121 - DNA, 15 bp, Homo sapiens
aaatgaggcaataat

SEQ ID NO: 1730122 - DNA, 15 bp, Homo sapiens
aatgaggcaataatt

SEQ ID NO: 1730123 - DNA, 15 bp, Homo sapiens
atgaggcaataattt

SEQ ID NO: 1730124 - DNA, 15 bp, Homo sapiens
tgaggcaataatttt

SEQ ID NO: 1730125 - DNA, 15 bp, Homo sapiens
gaggcaataattttc

SEQ ID NO: 1730126 - DNA, 15 bp, Homo sapiens
aggcaataattttct

SEQ ID NO: 1730127 - DNA, 15 bp, Homo sapiens
ggcaataattttctt

SEQ ID NO: 1730128 - DNA, 15 bp, Homo sapiens
gcaataattttcttt

SEQ ID NO: 1730129 - DNA, 15 bp, Homo sapiens
caataattttctttc

SEQ ID NO: 1730130 - DNA, 15 bp, Homo sapiens
ataattttctttcta

SEQ ID NO: 1730131 - DNA, 15 bp, Homo sapiens
taattttctttctat

SEQ ID NO: 1730132 - DNA, 15 bp, Homo sapiens
aattttctttctatg

SEQ ID NO: 1730133 - DNA, 15 bp, Homo sapiens
ttttctttctatgtc

SEQ ID NO: 1730134 - DNA, 15 bp, Homo sapiens
tttctttctatgtct

SEQ ID NO: 1730135 - DNA, 15 bp, Homo sapiens
ttctttctatgtctg

SEQ ID NO: 1730136 - DNA, 15 bp, Homo sapiens
tctttctatgtctgc

SEQ ID NO: 1730137 - DNA, 15 bp, Homo sapiens
ctttctatgtctgct

SEQ ID NO: 1730138 - DNA, 15 bp, Homo sapiens
tttctatgtctgctt

SEQ ID NO: 1730139 - DNA, 15 bp, Homo sapiens
ttctatgtctgctta

SEQ ID NO: 1730140 - DNA, 15 bp, Homo sapiens
tctatgtctgcttat

SEQ ID NO: 1730141 - DNA, 15 bp, Homo sapiens
ctatgtctgcttatt

SEQ ID NO: 1730142 - DNA, 15 bp, Homo sapiens
tatgtctgcttattt

SEQ ID NO: 1730143 - DNA, 15 bp, Homo sapiens
atgtctgcttatttc

SEQ ID NO: 1730144 - DNA, 15 bp, Homo sapiens
tgtctgcttatttca

SEQ ID NO: 1730145 - DNA, 15 bp, Homo sapiens
gtctgcttatttcac

SEQ ID NO: 1730146 - DNA, 15 bp, Homo sapiens
tctgcttatttcact

SEQ ID NO: 1730147 - DNA, 15 bp, Homo sapiens
ctgcttatttcactt

SEQ ID NO: 1730148 - DNA, 15 bp, Homo sapiens
tgcttatttcactta

SEQ ID NO: 1730149 - DNA, 15 bp, Homo sapiens
ttatttcacttagca

SEQ ID NO: 1730150 - DNA, 15 bp, Homo sapiens
tatttcacttagcat

SEQ ID NO: 1730151 - DNA, 15 bp, Homo sapiens
atttcacttagcata

SEQ ID NO: 1730152 - DNA, 15 bp, Homo sapiens
tttcacttagcataa

SEQ ID NO: 1730153 - DNA, 15 bp, Homo sapiens
ttcacttagcataat

SEQ ID NO: 1730154 - DNA, 15 bp, Homo sapiens
tcacttagcataatg

SEQ ID NO: 1730155 - DNA, 15 bp, Homo sapiens
cacttagcataatgg

SEQ ID NO: 1730156 - DNA, 15 bp, Homo sapiens
acttagcataatggt

SEQ ID NO: 1730157 - DNA, 15 bp, Homo sapiens
cttagcataatggtc

SEQ ID NO: 1730158 - DNA, 15 bp, Homo sapiens
ttagcataatggtct

SEQ ID NO: 1730159 - DNA, 15 bp, Homo sapiens
tagcataatggtctc

SEQ ID NO: 1730160 - DNA, 15 bp, Homo sapiens
agcataatggtctcc

SEQ ID NO: 1730161 - DNA, 15 bp, Homo sapiens
gcataatggtctccc

SEQ ID NO: 1730162 - DNA, 15 bp, Homo sapiens
cataatggtctccct

SEQ ID NO: 1730163 - DNA, 15 bp, Homo sapiens
ataatggtctccctg

SEQ ID NO: 1730164 - DNA, 15 bp, Homo sapiens
taatggtctccctgt

SEQ ID NO: 1730165 - DNA, 15 bp, Homo sapiens
aatggtctccctgtc

SEQ ID NO: 1730166 - DNA, 15 bp, Homo sapiens
atggtctccctgtcc

SEQ ID NO: 1730167 - DNA, 15 bp, Homo sapiens
tggtctccctgtcca

SEQ ID NO: 1730168 - DNA, 15 bp, Homo sapiens
ggtctccctgtccac

SEQ ID NO: 1730169 - DNA, 15 bp, Homo sapiens
gtctccctgtccacc

SEQ ID NO: 1730170 - DNA, 15 bp, Homo sapiens
tctccctgtccacct

SEQ ID NO: 1730171 - DNA, 15 bp, Homo sapiens
ctccctgtccacctc

SEQ ID NO: 1730172 - DNA, 15 bp, Homo sapiens
tccctgtccacctcg

SEQ ID NO: 1730173 - DNA, 15 bp, Homo sapiens
ccctgtccacctcgg

SEQ ID NO: 1730174 - DNA, 15 bp, Homo sapiens
cctgtccacctcggc

SEQ ID NO: 1730175 - DNA, 15 bp, Homo sapiens
ctgtccacctcggct

SEQ ID NO: 1730176 - DNA, 15 bp, Homo sapiens
tgtccacctcggctc

SEQ ID NO: 1730177 - DNA, 15 bp, Homo sapiens
gtccacctcggctcc

SEQ ID NO: 1730178 - DNA, 15 bp, Homo sapiens
tccacctcggctccc

SEQ ID NO: 1730179 - DNA, 15 bp, Homo sapiens
ccacctcggctcccg

SEQ ID NO: 1730180 - DNA, 15 bp, Homo sapiens
cacctcggctcccgc

SEQ ID NO: 1730181 - DNA, 15 bp, Homo sapiens
acctcggctcccgcg

SEQ ID NO: 1730182 - DNA, 15 bp, Homo sapiens
cctcggctcccgcgc

SEQ ID NO: 1730183 - DNA, 15 bp, Homo sapiens
ctcggctcccgcgcg

SEQ ID NO: 1730184 - DNA, 15 bp, Homo sapiens
tcggctcccgcgcgg

SEQ ID NO: 1730185 - DNA, 15 bp, Homo sapiens
cggctcccgcgcggg

SEQ ID NO: 1730186 - DNA, 15 bp, Homo sapiens
ggctcccgcgcgggg

SEQ ID NO: 1730187 - DNA, 15 bp, Homo sapiens
gctcccgcgcgggga

SEQ ID NO: 1730188 - DNA, 15 bp, Homo sapiens
ctcccgcgcggggag

SEQ ID NO: 1730189 - DNA, 15 bp, Homo sapiens
tcccgcgcggggagg

SEQ ID NO: 1730190 - DNA, 15 bp, Homo sapiens
cccgcgcggggagga

SEQ ID NO: 1730191 - DNA, 15 bp, Homo sapiens
ccgcgcggggaggag

SEQ ID NO: 1730192 - DNA, 15 bp, Homo sapiens
cgcgcggggaggagg

SEQ ID NO: 1730193 - DNA, 15 bp, Homo sapiens
gcgcggggaggaggg

SEQ ID NO: 1730194 - DNA, 15 bp, Homo sapiens
cgcggggaggagggg

SEQ ID NO: 1730195 - DNA, 15 bp, Homo sapiens
gcggggaggaggggc

SEQ ID NO: 1730196 - DNA, 15 bp, Homo sapiens
cggggaggaggggca

SEQ ID NO: 1730197 - DNA, 15 bp, Homo sapiens
ggggaggaggggcaa

SEQ ID NO: 1730198 - DNA, 15 bp, Homo sapiens
gggaggaggggcaag

SEQ ID NO: 1730199 - DNA, 15 bp, Homo sapiens
ggaggaggggcaagg

SEQ ID NO: 1730200 - DNA, 15 bp, Homo sapiens
gaggaggggcaaggg

SEQ ID NO: 1730201 - DNA, 15 bp, Homo sapiens
aggaggggcaagggc

SEQ ID NO: 1730202 - DNA, 15 bp, Homo sapiens
ggaggggcaagggcc

SEQ ID NO: 1730203 - DNA, 15 bp, Homo sapiens
gaggggcaagggccc

SEQ ID NO: 1730204 - DNA, 15 bp, Homo sapiens
aggggcaagggccct

SEQ ID NO: 1730205 - DNA, 15 bp, Homo sapiens
ggggcaagggccctc

SEQ ID NO: 1730206 - DNA, 15 bp, Homo sapiens
gggcaagggccctcc

SEQ ID NO: 1730207 - DNA, 15 bp, Homo sapiens
ggcaagggccctccg

SEQ ID NO: 1730208 - DNA, 15 bp, Homo sapiens
gcaagggccctccgc

SEQ ID NO: 1730209 - DNA, 15 bp, Homo sapiens
caagggccctccgcc

SEQ ID NO: 1730210 - DNA, 15 bp, Homo sapiens
aagggccctccgccc

SEQ ID NO: 1730211 - DNA, 15 bp, Homo sapiens
agggccctccgcccg

SEQ ID NO: 1730212 - DNA, 15 bp, Homo sapiens
gggccctccgcccgg

SEQ ID NO: 1730213 - DNA, 15 bp, Homo sapiens
ggccctccgcccggg

SEQ ID NO: 1730214 - DNA, 15 bp, Homo sapiens
gccctccgcccgggc

SEQ ID NO: 1730215 - DNA, 15 bp, Homo sapiens
ccctccgcccgggcc

SEQ ID NO: 1730216 - DNA, 15 bp, Homo sapiens
cctccgcccgggccc

SEQ ID NO: 1730217 - DNA, 15 bp, Homo sapiens
ctccgcccgggcccc

SEQ ID NO: 1730218 - DNA, 15 bp, Homo sapiens
tccgcccgggccccg

SEQ ID NO: 1730219 - DNA, 15 bp, Homo sapiens
ccgcccgggccccgc

SEQ ID NO: 1730220 - DNA, 15 bp, Homo sapiens
cgcccgggccccgcc

SEQ ID NO: 1730221 - DNA, 15 bp, Homo sapiens
gcccgggccccgcct

SEQ ID NO: 1730222 - DNA, 15 bp, Homo sapiens
cccgggccccgcctc

SEQ ID NO: 1730223 - DNA, 15 bp, Homo sapiens
ccgggccccgcctcc

SEQ ID NO: 1730224 - DNA, 15 bp, Homo sapiens
cgggccccgcctccc

SEQ ID NO: 1730225 - DNA, 15 bp, Homo sapiens
gggccccgcctcccc

SEQ ID NO: 1730226 - DNA, 15 bp, Homo sapiens
ggccccgcctccccg

SEQ ID NO: 1730227 - DNA, 15 bp, Homo sapiens
gccccgcctccccgc

SEQ ID NO: 1730228 - DNA, 15 bp, Homo sapiens
ccccgcctccccgcg

SEQ ID NO: 1730229 - DNA, 15 bp, Homo sapiens
cccgcctccccgcgc

SEQ ID NO: 1730230 - DNA, 15 bp, Homo sapiens
ccgcctccccgcgcg

SEQ ID NO: 1730231 - DNA, 15 bp, Homo sapiens
cgcctccccgcgcgc

SEQ ID NO: 1730232 - DNA, 15 bp, Homo sapiens
gcctccccgcgcgcc

SEQ ID NO: 1730233 - DNA, 15 bp, Homo sapiens
cctccccgcgcgccg

SEQ ID NO: 1730234 - DNA, 15 bp, Homo sapiens
ctccccgcgcgccgc

SEQ ID NO: 1730235 - DNA, 15 bp, Homo sapiens
tccccgcgcgccgct

SEQ ID NO: 1730236 - DNA, 15 bp, Homo sapiens
ccccgcgcgccgctg

SEQ ID NO: 1730237 - DNA, 15 bp, Homo sapiens
cccgcgcgccgctgc

SEQ ID NO: 1730238 - DNA, 15 bp, Homo sapiens
ccgcgcgccgctgcc

SEQ ID NO: 1730239 - DNA, 15 bp, Homo sapiens
cgcgcgccgctgcca

SEQ ID NO: 1730240 - DNA, 15 bp, Homo sapiens
gcgcgccgctgccac

SEQ ID NO: 1730241 - DNA, 15 bp, Homo sapiens
cgcgccgctgccacc

SEQ ID NO: 1730242 - DNA, 15 bp, Homo sapiens
gcgccgctgccaccg

SEQ ID NO: 1730243 - DNA, 15 bp, Homo sapiens
cgccgctgccaccgc

SEQ ID NO: 1730244 - DNA, 15 bp, Homo sapiens
gccgctgccaccgcc

SEQ ID NO: 1730245 - DNA, 15 bp, Homo sapiens
ccgctgccaccgccc

SEQ ID NO: 1730246 - DNA, 15 bp, Homo sapiens
cgctgccaccgcccc

SEQ ID NO: 1730247 - DNA, 15 bp, Homo sapiens
gctgccaccgccccg

SEQ ID NO: 1730248 - DNA, 15 bp, Homo sapiens
ctgccaccgccccgc

SEQ ID NO: 1730249 - DNA, 15 bp, Homo sapiens
tgccaccgccccgca

SEQ ID NO: 1730250 - DNA, 15 bp, Homo sapiens
gccaccgccccgcac

SEQ ID NO: 1730251 - DNA, 15 bp, Homo sapiens
ccaccgccccgcacc

SEQ ID NO: 1730252 - DNA, 15 bp, Homo sapiens
caccgccccgcacct

SEQ ID NO: 1730253 - DNA, 15 bp, Homo sapiens
accgccccgcacctt

SEQ ID NO: 1730254 - DNA, 15 bp, Homo sapiens
ccgccccgcaccttt

SEQ ID NO: 1730255 - DNA, 15 bp, Homo sapiens
cgccccgcacctttt

SEQ ID NO: 1730256 - DNA, 15 bp, Homo sapiens
gccccgcaccttttt

SEQ ID NO: 1730257 - DNA, 15 bp, Homo sapiens
ccccgcacctttttt

SEQ ID NO: 1730258 - DNA, 15 bp, Homo sapiens
cccgcaccttttttt

SEQ ID NO: 1730259 - DNA, 15 bp, Homo sapiens
ccgcacctttttttg

SEQ ID NO: 1730260 - DNA, 15 bp, Homo sapiens
cgcacctttttttga

SEQ ID NO: 1730261 - DNA, 15 bp, Homo sapiens
gcacctttttttgac

SEQ ID NO: 1730262 - DNA, 15 bp, Homo sapiens
cacctttttttgact

SEQ ID NO: 1730263 - DNA, 15 bp, Homo sapiens
acctttttttgactt

SEQ ID NO: 1730264 - DNA, 15 bp, Homo sapiens
cctttttttgacttt

SEQ ID NO: 1730265 - DNA, 15 bp, Homo sapiens
ctttttttgactttt

SEQ ID NO: 1730266 - DNA, 15 bp, Homo sapiens
tttttttgacttttt

SEQ ID NO: 1730267 - DNA, 15 bp, Homo sapiens
ttttttgacttttta

SEQ ID NO: 1730268 - DNA, 15 bp, Homo sapiens
tttttgactttttaa

SEQ ID NO: 1730269 - DNA, 15 bp, Homo sapiens
ttttgactttttaat

SEQ ID NO: 1730270 - DNA, 15 bp, Homo sapiens
tttgactttttaata

SEQ ID NO: 1730271 - DNA, 15 bp, Homo sapiens
ttgactttttaataa

SEQ ID NO: 1730272 - DNA, 15 bp, Homo sapiens
tgactttttaataat

SEQ ID NO: 1730273 - DNA, 15 bp, Homo sapiens
gactttttaataatg

SEQ ID NO: 1730274 - DNA, 15 bp, Homo sapiens
actttttaataatgc

SEQ ID NO: 1730275 - DNA, 15 bp, Homo sapiens
ctttttaataatgct

SEQ ID NO: 1730276 - DNA, 15 bp, Homo sapiens
tttttaataatgctc

SEQ ID NO: 1730277 - DNA, 15 bp, Homo sapiens
ttttaataatgctca

SEQ ID NO: 1730278 - DNA, 15 bp, Homo sapiens
tttaataatgctcat

SEQ ID NO: 1730279 - DNA, 15 bp, Homo sapiens
ttaataatgctcatt

SEQ ID NO: 1730280 - DNA, 15 bp, Homo sapiens
taataatgctcattc

SEQ ID NO: 1730281 - DNA, 15 bp, Homo sapiens
aataatgctcattct

SEQ ID NO: 1730282 - DNA, 15 bp, Homo sapiens
ataatgctcattctg

SEQ ID NO: 1730283 - DNA, 15 bp, Homo sapiens
taatgctcattctga

SEQ ID NO: 1730284 - DNA, 15 bp, Homo sapiens
aatgctcattctgac

SEQ ID NO: 1730285 - DNA, 15 bp, Homo sapiens
atgctcattctgact

SEQ ID NO: 1730286 - DNA, 15 bp, Homo sapiens
tgctcattctgactg

SEQ ID NO: 1730287 - DNA, 15 bp, Homo sapiens
gctcattctgactgt

SEQ ID NO: 1730288 - DNA, 15 bp, Homo sapiens
ctcattctgactgtg

SEQ ID NO: 1730289 - DNA, 15 bp, Homo sapiens
tcattctgactgtga

SEQ ID NO: 1730290 - DNA, 15 bp, Homo sapiens
cattctgactgtgat

SEQ ID NO: 1730291 - DNA, 15 bp, Homo sapiens
attctgactgtgata

SEQ ID NO: 1730292 - DNA, 15 bp, Homo sapiens
ttctgactgtgataa

SEQ ID NO: 1730293 - DNA, 15 bp, Homo sapiens
tctgactgtgataag

SEQ ID NO: 1730294 - DNA, 15 bp, Homo sapiens
ctgactgtgataagg

SEQ ID NO: 1730295 - DNA, 15 bp, Homo sapiens
tgactgtgataaggt

SEQ ID NO: 1730296 - DNA, 15 bp, Homo sapiens
gactgtgataaggtg

SEQ ID NO: 1730297 - DNA, 15 bp, Homo sapiens
actgtgataaggtgg

SEQ ID NO: 1730298 - DNA, 15 bp, Homo sapiens
ctgtgataaggtggt

SEQ ID NO: 1730299 - DNA, 15 bp, Homo sapiens
tgtgataaggtggta

SEQ ID NO: 1730300 - DNA, 15 bp, Homo sapiens
gtgataaggtggtat

SEQ ID NO: 1730301 - DNA, 15 bp, Homo sapiens
tgataaggtggtatc

SEQ ID NO: 1730302 - DNA, 15 bp, Homo sapiens
gataaggtggtatct

SEQ ID NO: 1730303 - DNA, 15 bp, Homo sapiens
ataaggtggtatctc

SEQ ID NO: 1730304 - DNA, 15 bp, Homo sapiens
taaggtggtatctca

SEQ ID NO: 1730305 - DNA, 15 bp, Homo sapiens
aaggtggtatctcat

SEQ ID NO: 1730306 - DNA, 15 bp, Homo sapiens
aggtggtatctcatt

SEQ ID NO: 1730307 - DNA, 15 bp, Homo sapiens
ggtggtatctcatta

SEQ ID NO: 1730308 - DNA, 15 bp, Homo sapiens
gtggtatctcattat

SEQ ID NO: 1730309 - DNA, 15 bp, Homo sapiens
tggtatctcattatg

SEQ ID NO: 1730310 - DNA, 15 bp, Homo sapiens
ggtatctcattatgg

SEQ ID NO: 1730311 - DNA, 15 bp, Homo sapiens
gtatctcattatggt

SEQ ID NO: 1730312 - DNA, 15 bp, Homo sapiens
tatctcattatggtt

SEQ ID NO: 1730313 - DNA, 15 bp, Homo sapiens
atctcattatggttt

SEQ ID NO: 1730314 - DNA, 15 bp, Homo sapiens
tctcattatggtttt

SEQ ID NO: 1730315 - DNA, 15 bp, Homo sapiens
ctcattatggtttta

SEQ ID NO: 1730316 - DNA, 15 bp, Homo sapiens
tcattatggttttaa

SEQ ID NO: 1730317 - DNA, 15 bp, Homo sapiens
cattatggttttaat

SEQ ID NO: 1730318 - DNA, 15 bp, Homo sapiens
attatggttttaatt

SEQ ID NO: 1730319 - DNA, 15 bp, Homo sapiens
ttatggttttaattg

SEQ ID NO: 1730320 - DNA, 15 bp, Homo sapiens
tatggttttaattgg

SEQ ID NO: 1730321 - DNA, 15 bp, Homo sapiens
atggttttaattggt

SEQ ID NO: 1730322 - DNA, 15 bp, Homo sapiens
tggttttaattggta

SEQ ID NO: 1730323 - DNA, 15 bp, Homo sapiens
ggttttaattggtat

SEQ ID NO: 1730324 - DNA, 15 bp, Homo sapiens
gttttaattggtatt

SEQ ID NO: 1730325 - DNA, 15 bp, Homo sapiens
ttttaattggtattt

SEQ ID NO: 1730326 - DNA, 15 bp, Homo sapiens
tttaattggtatttc

SEQ ID NO: 1730327 - DNA, 15 bp, Homo sapiens
ttaattggtatttcc

SEQ ID NO: 1730328 - DNA, 15 bp, Homo sapiens
taattggtatttccc

SEQ ID NO: 1730329 - DNA, 15 bp, Homo sapiens
aattggtatttccct

SEQ ID NO: 1730330 - DNA, 15 bp, Homo sapiens
attggtatttccctt

SEQ ID NO: 1730331 - DNA, 15 bp, Homo sapiens
ttggtatttcccttg

SEQ ID NO: 1730332 - DNA, 15 bp, Homo sapiens
tggtatttcccttgt

SEQ ID NO: 1730333 - DNA, 15 bp, Homo sapiens
ggtatttcccttgtg

SEQ ID NO: 1730334 - DNA, 15 bp, Homo sapiens
gtatttcccttgtga

SEQ ID NO: 1730335 - DNA, 15 bp, Homo sapiens
tatttcccttgtgat

SEQ ID NO: 1730336 - DNA, 15 bp, Homo sapiens
atttcccttgtgatt

SEQ ID NO: 1730337 - DNA, 15 bp, Homo sapiens
tttcccttgtgattg

SEQ ID NO: 1730338 - DNA, 15 bp, Homo sapiens
ttcccttgtgattgg

SEQ ID NO: 1730339 - DNA, 15 bp, Homo sapiens
tcccttgtgattggt

SEQ ID NO: 1730340 - DNA, 15 bp, Homo sapiens
cccttgtgattggtg

SEQ ID NO: 1730341 - DNA, 15 bp, Homo sapiens
ccttgtgattggtga

SEQ ID NO: 1730342 - DNA, 15 bp, Homo sapiens
cttgtgattggtgat

SEQ ID NO: 1730343 - DNA, 15 bp, Homo sapiens
ttgtgattggtgatg

SEQ ID NO: 1730344 - DNA, 15 bp, Homo sapiens
tgtgattggtgatgt

SEQ ID NO: 1730345 - DNA, 15 bp, Homo sapiens
gtgattggtgatgtt

SEQ ID NO: 1730346 - DNA, 15 bp, Homo sapiens
tgattggtgatgttg

SEQ ID NO: 1730347 - DNA, 15 bp, Homo sapiens
gattggtgatgttga

SEQ ID NO: 1730348 - DNA, 15 bp, Homo sapiens
attggtgatgttgag

SEQ ID NO: 1730349 - DNA, 15 bp, Homo sapiens
ttggtgatgttgagt

SEQ ID NO: 1730350 - DNA, 15 bp, Homo sapiens
tggtgatgttgagta

SEQ ID NO: 1730351 - DNA, 15 bp, Homo sapiens
ggtgatgttgagtat

SEQ ID NO: 1730352 - DNA, 15 bp, Homo sapiens
gtgatgttgagtatt

SEQ ID NO: 1730353 - DNA, 15 bp, Homo sapiens
tgatgttgagtattt

SEQ ID NO: 1730354 - DNA, 15 bp, Homo sapiens
gatgttgagtatttt

SEQ ID NO: 1730355 - DNA, 15 bp, Homo sapiens
atgttgagtattttt

SEQ ID NO: 1730356 - DNA, 15 bp, Homo sapiens
tgttgagtatttttc

SEQ ID NO: 1730357 - DNA, 15 bp, Homo sapiens
gttgagtatttttca

SEQ ID NO: 1730358 - DNA, 15 bp, Homo sapiens
ttgagtatttttcat

SEQ ID NO: 1730359 - DNA, 15 bp, Homo sapiens
tgagtatttttcatg

SEQ ID NO: 1730360 - DNA, 15 bp, Homo sapiens
gagtatttttcatgt

SEQ ID NO: 1730361 - DNA, 15 bp, Homo sapiens
agtatttttcatgtt

SEQ ID NO: 1730362 - DNA, 15 bp, Homo sapiens
gtatttttcatgttt

SEQ ID NO: 1730363 - DNA, 15 bp, Homo sapiens
tatttttcatgtttc

SEQ ID NO: 1730364 - DNA, 15 bp, Homo sapiens
atttttcatgtttct

SEQ ID NO: 1730365 - DNA, 15 bp, Homo sapiens
tttttcatgtttctt

SEQ ID NO: 1730366 - DNA, 15 bp, Homo sapiens
ttttcatgtttcttg

SEQ ID NO: 1730367 - DNA, 15 bp, Homo sapiens
tttcatgtttcttgg

SEQ ID NO: 1730368 - DNA, 15 bp, Homo sapiens
ttcatgtttcttggc

SEQ ID NO: 1730369 - DNA, 15 bp, Homo sapiens
tcatgtttcttggcc

SEQ ID NO: 1730370 - DNA, 15 bp, Homo sapiens
catgtttcttggcca

SEQ ID NO: 1730371 - DNA, 15 bp, Homo sapiens
atgtttcttggccat

SEQ ID NO: 1730372 - DNA, 15 bp, Homo sapiens
tgtttcttggccatt

SEQ ID NO: 1730373 - DNA, 15 bp, Homo sapiens
gtttcttggccattt

SEQ ID NO: 1730374 - DNA, 15 bp, Homo sapiens
tttcttggccatttg

SEQ ID NO: 1730375 - DNA, 15 bp, Homo sapiens
ttcttggccatttgt

SEQ ID NO: 1730376 - DNA, 15 bp, Homo sapiens
tcttggccatttgtg

SEQ ID NO: 1730377 - DNA, 15 bp, Homo sapiens
cttggccatttgtgt

SEQ ID NO: 1730378 - DNA, 15 bp, Homo sapiens
ttggccatttgtgta

SEQ ID NO: 1730379 - DNA, 15 bp, Homo sapiens
tggccatttgtgtat

SEQ ID NO: 1730380 - DNA, 15 bp, Homo sapiens
ggccatttgtgtatc

SEQ ID NO: 1730381 - DNA, 15 bp, Homo sapiens
gccatttgtgtatct

SEQ ID NO: 1730382 - DNA, 15 bp, Homo sapiens
ccatttgtgtatctt

SEQ ID NO: 1730383 - DNA, 15 bp, Homo sapiens
catttgtgtatcttc

SEQ ID NO: 1730384 - DNA, 15 bp, Homo sapiens
atttgtgtatcttct

SEQ ID NO: 1730385 - DNA, 15 bp, Homo sapiens
tttgtgtatcttctt

SEQ ID NO: 1730386 - DNA, 15 bp, Homo sapiens
ttgtgtatcttcttt

SEQ ID NO: 1730387 - DNA, 15 bp, Homo sapiens
tgtgtatcttctttt

SEQ ID NO: 1730388 - DNA, 15 bp, Homo sapiens
gtgtatcttcttttg

SEQ ID NO: 1730389 - DNA, 15 bp, Homo sapiens
tgtatcttcttttga

SEQ ID NO: 1730390 - DNA, 15 bp, Homo sapiens
gtatcttcttttgaa

SEQ ID NO: 1730391 - DNA, 15 bp, Homo sapiens
tatcttcttttgaaa

SEQ ID NO: 1730392 - DNA, 15 bp, Homo sapiens
atcttcttttgaaaa

SEQ ID NO: 1730393 - DNA, 15 bp, Homo sapiens
tcttcttttgaaaaa

SEQ ID NO: 1730394 - DNA, 15 bp, Homo sapiens
cttcttttgaaaaat

SEQ ID NO: 1730395 - DNA, 15 bp, Homo sapiens
tcttttgaaaaatgt

SEQ ID NO: 1730396 - DNA, 15 bp, Homo sapiens
cttttgaaaaatgtc

SEQ ID NO: 1730397 - DNA, 15 bp, Homo sapiens
ttttgaaaaatgtcc

SEQ ID NO: 1730398 - DNA, 15 bp, Homo sapiens
tttgaaaaatgtccg

SEQ ID NO: 1730399 - DNA, 15 bp, Homo sapiens
ttgaaaaatgtccgt

SEQ ID NO: 1730400 - DNA, 15 bp, Homo sapiens
tgaaaaatgtccgtt

SEQ ID NO: 1730401 - DNA, 15 bp, Homo sapiens
gaaaaatgtccgttt

SEQ ID NO: 1730402 - DNA, 15 bp, Homo sapiens
aaaaatgtccgtttg

SEQ ID NO: 1730403 - DNA, 15 bp, Homo sapiens
aaaatgtccgtttgg

SEQ ID NO: 1730404 - DNA, 15 bp, Homo sapiens
aaatgtccgtttggc

SEQ ID NO: 1730405 - DNA, 15 bp, Homo sapiens
aatgtccgtttggct

SEQ ID NO: 1730406 - DNA, 15 bp, Homo sapiens
atgtccgtttggctg

SEQ ID NO: 1730407 - DNA, 15 bp, Homo sapiens
tgtccgtttggctgg

SEQ ID NO: 1730408 - DNA, 15 bp, Homo sapiens
gtccgtttggctggg

SEQ ID NO: 1730409 - DNA, 15 bp, Homo sapiens
tccgtttggctgggc

SEQ ID NO: 1730410 - DNA, 15 bp, Homo sapiens
ccgtttggctgggcg

SEQ ID NO: 1730411 - DNA, 15 bp, Homo sapiens
cgtttggctgggcgc

SEQ ID NO: 1730412 - DNA, 15 bp, Homo sapiens
gtttggctgggcgcg

SEQ ID NO: 1730413 - DNA, 15 bp, Homo sapiens
tttggctgggcgcgg

SEQ ID NO: 1730414 - DNA, 15 bp, Homo sapiens
ttggctgggcgcggt

SEQ ID NO: 1730415 - DNA, 15 bp, Homo sapiens
cgcggtggctcacgt

SEQ ID NO: 1730416 - DNA, 15 bp, Homo sapiens
gcggtggctcacgtc

SEQ ID NO: 1730417 - DNA, 15 bp, Homo sapiens
cggtggctcacgtct

SEQ ID NO: 1730418 - DNA, 15 bp, Homo sapiens
aatcctagcactttc

SEQ ID NO: 1730419 - DNA, 15 bp, Homo sapiens
atcctagcactttcg

SEQ ID NO: 1730420 - DNA, 15 bp, Homo sapiens
tcctagcactttcgg

SEQ ID NO: 1730421 - DNA, 15 bp, Homo sapiens
cctagcactttcgga

SEQ ID NO: 1730422 - DNA, 15 bp, Homo sapiens
ctagcactttcggaa

SEQ ID NO: 1730423 - DNA, 15 bp, Homo sapiens
tagcactttcggaag

SEQ ID NO: 1730424 - DNA, 15 bp, Homo sapiens
agcactttcggaagc

SEQ ID NO: 1730425 - DNA, 15 bp, Homo sapiens
gcactttcggaagcc

SEQ ID NO: 1730426 - DNA, 15 bp, Homo sapiens
cactttcggaagcca

SEQ ID NO: 1730427 - DNA, 15 bp, Homo sapiens
actttcggaagccaa

SEQ ID NO: 1730428 - DNA, 15 bp, Homo sapiens
ctttcggaagccaag

SEQ ID NO: 1730429 - DNA, 15 bp, Homo sapiens
tttcggaagccaagg

SEQ ID NO: 1730430 - DNA, 15 bp, Homo sapiens
ttcggaagccaaggc

SEQ ID NO: 1730431 - DNA, 15 bp, Homo sapiens
tcggaagccaaggcg

SEQ ID NO: 1730432 - DNA, 15 bp, Homo sapiens
cggaagccaaggcgg

SEQ ID NO: 1730433 - DNA, 15 bp, Homo sapiens
ggaagccaaggcggg

SEQ ID NO: 1730434 - DNA, 15 bp, Homo sapiens
gaagccaaggcgggt

SEQ ID NO: 1730435 - DNA, 15 bp, Homo sapiens
aagccaaggcgggtg

SEQ ID NO: 1730436 - DNA, 15 bp, Homo sapiens
agccaaggcgggtgg

SEQ ID NO: 1730437 - DNA, 15 bp, Homo sapiens
taacatggtgaaact

SEQ ID NO: 1730438 - DNA, 15 bp, Homo sapiens
acatggtgaaactcc

SEQ ID NO: 1730439 - DNA, 15 bp, Homo sapiens
catggtgaaactccg

SEQ ID NO: 1730440 - DNA, 15 bp, Homo sapiens
atggtgaaactccgt

SEQ ID NO: 1730441 - DNA, 15 bp, Homo sapiens
tggtgaaactccgtg

SEQ ID NO: 1730442 - DNA, 15 bp, Homo sapiens
ggtgaaactccgtgt

SEQ ID NO: 1730443 - DNA, 15 bp, Homo sapiens
gtgaaactccgtgtc

SEQ ID NO: 1730444 - DNA, 15 bp, Homo sapiens
tgaaactccgtgtct

SEQ ID NO: 1730445 - DNA, 15 bp, Homo sapiens
gaaactccgtgtcta

SEQ ID NO: 1730446 - DNA, 15 bp, Homo sapiens
aaactccgtgtctac

SEQ ID NO: 1730447 - DNA, 15 bp, Homo sapiens
aactccgtgtctact

SEQ ID NO: 1730448 - DNA, 15 bp, Homo sapiens
actccgtgtctacta

SEQ ID NO: 1730449 - DNA, 15 bp, Homo sapiens
ctccgtgtctactaa

SEQ ID NO: 1730450 - DNA, 15 bp, Homo sapiens
tccgtgtctactaaa

SEQ ID NO: 1730451 - DNA, 15 bp, Homo sapiens
ccgtgtctactaaaa

SEQ ID NO: 1730452 - DNA, 15 bp, Homo sapiens
cgtgtctactaaaaa

SEQ ID NO: 1730453 - DNA, 15 bp, Homo sapiens
gtgtctactaaaaat

SEQ ID NO: 1730454 - DNA, 15 bp, Homo sapiens
tgtctactaaaaata

SEQ ID NO: 1730455 - DNA, 15 bp, Homo sapiens
gtctactaaaaatac

SEQ ID NO: 1730456 - DNA, 15 bp, Homo sapiens
gcgtggtggcatgcg

SEQ ID NO: 1730457 - DNA, 15 bp, Homo sapiens
cgtggtggcatgcgc

SEQ ID NO: 1730458 - DNA, 15 bp, Homo sapiens
atcccagctactctc

SEQ ID NO: 1730459 - DNA, 15 bp, Homo sapiens
tcccagctactctcg

SEQ ID NO: 1730460 - DNA, 15 bp, Homo sapiens
cccagctactctcga

SEQ ID NO: 1730461 - DNA, 15 bp, Homo sapiens
ccagctactctcgag

SEQ ID NO: 1730462 - DNA, 15 bp, Homo sapiens
cagctactctcgaga

SEQ ID NO: 1730463 - DNA, 15 bp, Homo sapiens
agctactctcgagac

SEQ ID NO: 1730464 - DNA, 15 bp, Homo sapiens
gctactctcgagact

SEQ ID NO: 1730465 - DNA, 15 bp, Homo sapiens
ctactctcgagactg

SEQ ID NO: 1730466 - DNA, 15 bp, Homo sapiens
tactctcgagactga

SEQ ID NO: 1730467 - DNA, 15 bp, Homo sapiens
actctcgagactgag

SEQ ID NO: 1730468 - DNA, 15 bp, Homo sapiens
ctctcgagactgagg

SEQ ID NO: 1730469 - DNA, 15 bp, Homo sapiens
tctcgagactgaggc

SEQ ID NO: 1730470 - DNA, 15 bp, Homo sapiens
ctcgagactgaggca

SEQ ID NO: 1730471 - DNA, 15 bp, Homo sapiens
tcgagactgaggcag

SEQ ID NO: 1730472 - DNA, 15 bp, Homo sapiens
cgagactgaggcagg

SEQ ID NO: 1730473 - DNA, 15 bp, Homo sapiens
gaggcaggagaatga

SEQ ID NO: 1730474 - DNA, 15 bp, Homo sapiens
aggcaggagaatgac

SEQ ID NO: 1730475 - DNA, 15 bp, Homo sapiens
ggcaggagaatgaca

SEQ ID NO: 1730476 - DNA, 15 bp, Homo sapiens
gcaggagaatgacat

SEQ ID NO: 1730477 - DNA, 15 bp, Homo sapiens
caggagaatgacatg

SEQ ID NO: 1730478 - DNA, 15 bp, Homo sapiens
aggagaatgacatga

SEQ ID NO: 1730479 - DNA, 15 bp, Homo sapiens
ggagaatgacatgaa

SEQ ID NO: 1730480 - DNA, 15 bp, Homo sapiens
gagaatgacatgaac

SEQ ID NO: 1730481 - DNA, 15 bp, Homo sapiens
agaatgacatgaacc

SEQ ID NO: 1730482 - DNA, 15 bp, Homo sapiens
gaatgacatgaaccc

SEQ ID NO: 1730483 - DNA, 15 bp, Homo sapiens
aatgacatgaaccca

SEQ ID NO: 1730484 - DNA, 15 bp, Homo sapiens
atgacatgaacccag

SEQ ID NO: 1730485 - DNA, 15 bp, Homo sapiens
tgacatgaacccagg

SEQ ID NO: 1730486 - DNA, 15 bp, Homo sapiens
gacatgaacccagga

SEQ ID NO: 1730487 - DNA, 15 bp, Homo sapiens
acatgaacccaggag

SEQ ID NO: 1730488 - DNA, 15 bp, Homo sapiens
catgaacccaggagg

SEQ ID NO: 1730489 - DNA, 15 bp, Homo sapiens
atgaacccaggaggc

SEQ ID NO: 1730490 - DNA, 15 bp, Homo sapiens
tgcagtgagccaagg

SEQ ID NO: 1730491 - DNA, 15 bp, Homo sapiens
gcagtgagccaaggt

SEQ ID NO: 1730492 - DNA, 15 bp, Homo sapiens
cagtgagccaaggtt

SEQ ID NO: 1730493 - DNA, 15 bp, Homo sapiens
agtgagccaaggttg

SEQ ID NO: 1730494 - DNA, 15 bp, Homo sapiens
gtgagccaaggttgc

SEQ ID NO: 1730495 - DNA, 15 bp, Homo sapiens
tgagccaaggttgcg

SEQ ID NO: 1730496 - DNA, 15 bp, Homo sapiens
gagccaaggttgcgc

SEQ ID NO: 1730497 - DNA, 15 bp, Homo sapiens
agccaaggttgcgcc

SEQ ID NO: 1730498 - DNA, 15 bp, Homo sapiens
gccaaggttgcgcca

SEQ ID NO: 1730499 - DNA, 15 bp, Homo sapiens
ccaaggttgcgccat

SEQ ID NO: 1730500 - DNA, 15 bp, Homo sapiens
caaggttgcgccatt

SEQ ID NO: 1730501 - DNA, 15 bp, Homo sapiens
aaggttgcgccattg

SEQ ID NO: 1730502 - DNA, 15 bp, Homo sapiens
aggttgcgccattgc

SEQ ID NO: 1730503 - DNA, 15 bp, Homo sapiens
ggttgcgccattgca

SEQ ID NO: 1730504 - DNA, 15 bp, Homo sapiens
gttgcgccattgcac

SEQ ID NO: 1730505 - DNA, 15 bp, Homo sapiens
actccagcctggacg

SEQ ID NO: 1730506 - DNA, 15 bp, Homo sapiens
ctccagcctggacga

SEQ ID NO: 1730507 - DNA, 15 bp, Homo sapiens
tccagcctggacgac

SEQ ID NO: 1730508 - DNA, 15 bp, Homo sapiens
ccagcctggacgaca

SEQ ID NO: 1730509 - DNA, 15 bp, Homo sapiens
cagcctggacgacag

SEQ ID NO: 1730510 - DNA, 15 bp, Homo sapiens
agcctggacgacagg

SEQ ID NO: 1730511 - DNA, 15 bp, Homo sapiens
gcctggacgacagga

SEQ ID NO: 1730512 - DNA, 15 bp, Homo sapiens
cctggacgacaggag

SEQ ID NO: 1730513 - DNA, 15 bp, Homo sapiens
ctggacgacaggagt

SEQ ID NO: 1730514 - DNA, 15 bp, Homo sapiens
tggacgacaggagtg

SEQ ID NO: 1730515 - DNA, 15 bp, Homo sapiens
ggacgacaggagtga

SEQ ID NO: 1730516 - DNA, 15 bp, Homo sapiens
gacgacaggagtgaa

SEQ ID NO: 1730517 - DNA, 15 bp, Homo sapiens
acgacaggagtgaaa

SEQ ID NO: 1730518 - DNA, 15 bp, Homo sapiens
cgacaggagtgaaac

SEQ ID NO: 1730519 - DNA, 15 bp, Homo sapiens
gacaggagtgaaact

SEQ ID NO: 1730520 - DNA, 15 bp, Homo sapiens
acaggagtgaaactg

SEQ ID NO: 1730521 - DNA, 15 bp, Homo sapiens
caggagtgaaactgc

SEQ ID NO: 1730522 - DNA, 15 bp, Homo sapiens
aggagtgaaactgca

SEQ ID NO: 1730523 - DNA, 15 bp, Homo sapiens
ggagtgaaactgcat

SEQ ID NO: 1730524 - DNA, 15 bp, Homo sapiens
gagtgaaactgcatt

SEQ ID NO: 1730525 - DNA, 15 bp, Homo sapiens
agtgaaactgcattg

SEQ ID NO: 1730526 - DNA, 15 bp, Homo sapiens
gtgaaactgcattgc

SEQ ID NO: 1730527 - DNA, 15 bp, Homo sapiens
tgaaactgcattgca

SEQ ID NO: 1730528 - DNA, 15 bp, Homo sapiens
gaaactgcattgcaa

SEQ ID NO: 1730529 - DNA, 15 bp, Homo sapiens
aaactgcattgcaaa

SEQ ID NO: 1730530 - DNA, 15 bp, Homo sapiens
aactgcattgcaaaa

SEQ ID NO: 1730531 - DNA, 15 bp, Homo sapiens
actgcattgcaaaaa

SEQ ID NO: 1730532 - DNA, 15 bp, Homo sapiens
ctgcattgcaaaaac

SEQ ID NO: 1730533 - DNA, 15 bp, Homo sapiens
tgcattgcaaaaaca

SEQ ID NO: 1730534 - DNA, 15 bp, Homo sapiens
gcattgcaaaaacag

SEQ ID NO: 1730535 - DNA, 15 bp, Homo sapiens
cattgcaaaaacagc

SEQ ID NO: 1730536 - DNA, 15 bp, Homo sapiens
attgcaaaaacagca

SEQ ID NO: 1730537 - DNA, 15 bp, Homo sapiens
tgcaaaaacagcaac

SEQ ID NO: 1730538 - DNA, 15 bp, Homo sapiens
gcaaaaacagcaaca

SEQ ID NO: 1730539 - DNA, 15 bp, Homo sapiens
caaaaacagcaacaa

SEQ ID NO: 1730540 - DNA, 15 bp, Homo sapiens
aaaaacagcaacaaa

SEQ ID NO: 1730541 - DNA, 15 bp, Homo sapiens
aaaacagcaacaaaa

SEQ ID NO: 1730542 - DNA, 15 bp, Homo sapiens
aaacagcaacaaaaa

SEQ ID NO: 1730543 - DNA, 15 bp, Homo sapiens
aacagcaacaaaaaa

SEQ ID NO: 1730544 - DNA, 15 bp, Homo sapiens
acagcaacaaaaaaa

SEQ ID NO: 1730545 - DNA, 15 bp, Homo sapiens
cagcaacaaaaaaaa

SEQ ID NO: 1730546 - DNA, 15 bp, Homo sapiens
agcaacaaaaaaaat

SEQ ID NO: 1730547 - DNA, 15 bp, Homo sapiens
gcaacaaaaaaaatc

SEQ ID NO: 1730548 - DNA, 15 bp, Homo sapiens
caacaaaaaaaatcc

SEQ ID NO: 1730549 - DNA, 15 bp, Homo sapiens
aacaaaaaaaatcca

SEQ ID NO: 1730550 - DNA, 15 bp, Homo sapiens
acaaaaaaaatccat

SEQ ID NO: 1730551 - DNA, 15 bp, Homo sapiens
caaaaaaaatccatt

SEQ ID NO: 1730552 - DNA, 15 bp, Homo sapiens
aaaaaaaatccattc

SEQ ID NO: 1730553 - DNA, 15 bp, Homo sapiens
aaaaaaatccattca

SEQ ID NO: 1730554 - DNA, 15 bp, Homo sapiens
aaaaaatccattcat

SEQ ID NO: 1730555 - DNA, 15 bp, Homo sapiens
aaaaatccattcatc

SEQ ID NO: 1730556 - DNA, 15 bp, Homo sapiens
aaaatccattcatct

SEQ ID NO: 1730557 - DNA, 15 bp, Homo sapiens
aaatccattcatcta

SEQ ID NO: 1730558 - DNA, 15 bp, Homo sapiens
aatccattcatctag

SEQ ID NO: 1730559 - DNA, 15 bp, Homo sapiens
atccattcatctagt

SEQ ID NO: 1730560 - DNA, 15 bp, Homo sapiens
tccattcatctagtt

SEQ ID NO: 1730561 - DNA, 15 bp, Homo sapiens
ccattcatctagttt

SEQ ID NO: 1730562 - DNA, 15 bp, Homo sapiens
cattcatctagtttg

SEQ ID NO: 1730563 - DNA, 15 bp, Homo sapiens
attcatctagtttgt

SEQ ID NO: 1730564 - DNA, 15 bp, Homo sapiens
ttcatctagtttgtc

SEQ ID NO: 1730565 - DNA, 15 bp, Homo sapiens
tcatctagtttgtcc

SEQ ID NO: 1730566 - DNA, 15 bp, Homo sapiens
catctagtttgtcca

SEQ ID NO: 1730567 - DNA, 15 bp, Homo sapiens
atctagtttgtccac

SEQ ID NO: 1730568 - DNA, 15 bp, Homo sapiens
tctagtttgtccact

SEQ ID NO: 1730569 - DNA, 15 bp, Homo sapiens
ctagtttgtccactt

SEQ ID NO: 1730570 - DNA, 15 bp, Homo sapiens
tagtttgtccacttt

SEQ ID NO: 1730571 - DNA, 15 bp, Homo sapiens
agtttgtccactttt

SEQ ID NO: 1730572 - DNA, 15 bp, Homo sapiens
gtttgtccacttttt

SEQ ID NO: 1730573 - DNA, 15 bp, Homo sapiens
tttgtccacttttta

SEQ ID NO: 1730574 - DNA, 15 bp, Homo sapiens
ttgtccactttttaa

SEQ ID NO: 1730575 - DNA, 15 bp, Homo sapiens
tgtccactttttaac

SEQ ID NO: 1730576 - DNA, 15 bp, Homo sapiens
gtccactttttaaca

SEQ ID NO: 1730577 - DNA, 15 bp, Homo sapiens
tccactttttaacag

SEQ ID NO: 1730578 - DNA, 15 bp, Homo sapiens
ccactttttaacagg

SEQ ID NO: 1730579 - DNA, 15 bp, Homo sapiens
cactttttaacagga

SEQ ID NO: 1730580 - DNA, 15 bp, Homo sapiens
actttttaacaggat

SEQ ID NO: 1730581 - DNA, 15 bp, Homo sapiens
ctttttaacaggatt

SEQ ID NO: 1730582 - DNA, 15 bp, Homo sapiens
tttttaacaggatta

SEQ ID NO: 1730583 - DNA, 15 bp, Homo sapiens
ttttaacaggattat

SEQ ID NO: 1730584 - DNA, 15 bp, Homo sapiens
tttaacaggattatt

SEQ ID NO: 1730585 - DNA, 15 bp, Homo sapiens
ttaacaggattattt

SEQ ID NO: 1730586 - DNA, 15 bp, Homo sapiens
taacaggattatttg

SEQ ID NO: 1730587 - DNA, 15 bp, Homo sapiens
aacaggattatttgt

SEQ ID NO: 1730588 - DNA, 15 bp, Homo sapiens
acaggattatttgtt

SEQ ID NO: 1730589 - DNA, 15 bp, Homo sapiens
caggattatttgttt

SEQ ID NO: 1730590 - DNA, 15 bp, Homo sapiens
aggattatttgtttt

SEQ ID NO: 1730591 - DNA, 15 bp, Homo sapiens
ggattatttgttttc

SEQ ID NO: 1730592 - DNA, 15 bp, Homo sapiens
gattatttgttttct

SEQ ID NO: 1730593 - DNA, 15 bp, Homo sapiens
attatttgttttctt

SEQ ID NO: 1730594 - DNA, 15 bp, Homo sapiens
ttatttgttttcttc

SEQ ID NO: 1730595 - DNA, 15 bp, Homo sapiens
tatttgttttcttct

SEQ ID NO: 1730596 - DNA, 15 bp, Homo sapiens
atttgttttcttctt

SEQ ID NO: 1730597 - DNA, 15 bp, Homo sapiens
tttgttttcttcttg

SEQ ID NO: 1730598 - DNA, 15 bp, Homo sapiens
ttgttttcttcttgc

SEQ ID NO: 1730599 - DNA, 15 bp, Homo sapiens
tgttttcttcttgct

SEQ ID NO: 1730600 - DNA, 15 bp, Homo sapiens
gttttcttcttgctg

SEQ ID NO: 1730601 - DNA, 15 bp, Homo sapiens
ttttcttcttgctga

SEQ ID NO: 1730602 - DNA, 15 bp, Homo sapiens
tttcttcttgctgat

SEQ ID NO: 1730603 - DNA, 15 bp, Homo sapiens
ttcttcttgctgatt

SEQ ID NO: 1730604 - DNA, 15 bp, Homo sapiens
tcttcttgctgattt

SEQ ID NO: 1730605 - DNA, 15 bp, Homo sapiens
cttcttgctgatttt

SEQ ID NO: 1730606 - DNA, 15 bp, Homo sapiens
ttcttgctgattttc

SEQ ID NO: 1730607 - DNA, 15 bp, Homo sapiens
tcttgctgattttct

SEQ ID NO: 1730608 - DNA, 15 bp, Homo sapiens
cttgctgattttctt

SEQ ID NO: 1730609 - DNA, 15 bp, Homo sapiens
ttgctgattttcttg

SEQ ID NO: 1730610 - DNA, 15 bp, Homo sapiens
tgctgattttcttga

SEQ ID NO: 1730611 - DNA, 15 bp, Homo sapiens
gctgattttcttgag

SEQ ID NO: 1730612 - DNA, 15 bp, Homo sapiens
ctgattttcttgagt

SEQ ID NO: 1730613 - DNA, 15 bp, Homo sapiens
tgattttcttgagtt

SEQ ID NO: 1730614 - DNA, 15 bp, Homo sapiens
gattttcttgagttt

SEQ ID NO: 1730615 - DNA, 15 bp, Homo sapiens
attttcttgagtttc

SEQ ID NO: 1730616 - DNA, 15 bp, Homo sapiens
ttttcttgagtttct

SEQ ID NO: 1730617 - DNA, 15 bp, Homo sapiens
tttcttgagtttctt

SEQ ID NO: 1730618 - DNA, 15 bp, Homo sapiens
ttcttgagtttcttg

SEQ ID NO: 1730619 - DNA, 15 bp, Homo sapiens
tcttgagtttcttgt

SEQ ID NO: 1730620 - DNA, 15 bp, Homo sapiens
cttgagtttcttgta

SEQ ID NO: 1730621 - DNA, 15 bp, Homo sapiens
ttgagtttcttgtag

SEQ ID NO: 1730622 - DNA, 15 bp, Homo sapiens
tgagtttcttgtaga

SEQ ID NO: 1730623 - DNA, 15 bp, Homo sapiens
gagtttcttgtagat

SEQ ID NO: 1730624 - DNA, 15 bp, Homo sapiens
agtttcttgtagatt

SEQ ID NO: 1730625 - DNA, 15 bp, Homo sapiens
gtttcttgtagattc

SEQ ID NO: 1730626 - DNA, 15 bp, Homo sapiens
tttcttgtagattct

SEQ ID NO: 1730627 - DNA, 15 bp, Homo sapiens
ttcttgtagattctg

SEQ ID NO: 1730628 - DNA, 15 bp, Homo sapiens
tcttgtagattctgg

SEQ ID NO: 1730629 - DNA, 15 bp, Homo sapiens
cttgtagattctgga

SEQ ID NO: 1730630 - DNA, 15 bp, Homo sapiens
ttgtagattctggat

SEQ ID NO: 1730631 - DNA, 15 bp, Homo sapiens
tgtagattctggatc

SEQ ID NO: 1730632 - DNA, 15 bp, Homo sapiens
gtagattctggatcc

SEQ ID NO: 1730633 - DNA, 15 bp, Homo sapiens
tagattctggatcct

SEQ ID NO: 1730634 - DNA, 15 bp, Homo sapiens
agattctggatcctt

SEQ ID NO: 1730635 - DNA, 15 bp, Homo sapiens
gattctggatccttt

SEQ ID NO: 1730636 - DNA, 15 bp, Homo sapiens
attctggatcctttg

SEQ ID NO: 1730637 - DNA, 15 bp, Homo sapiens
ttctggatcctttgt

SEQ ID NO: 1730638 - DNA, 15 bp, Homo sapiens
tctggatcctttgtt

SEQ ID NO: 1730639 - DNA, 15 bp, Homo sapiens
ctggatcctttgttg

SEQ ID NO: 1730640 - DNA, 15 bp, Homo sapiens
tggatcctttgttgg

SEQ ID NO: 1730641 - DNA, 15 bp, Homo sapiens
ggatcctttgttgga

SEQ ID NO: 1730642 - DNA, 15 bp, Homo sapiens
gatcctttgttggat

SEQ ID NO: 1730643 - DNA, 15 bp, Homo sapiens
atcctttgttggatg

SEQ ID NO: 1730644 - DNA, 15 bp, Homo sapiens
tcctttgttggatgt

SEQ ID NO: 1730645 - DNA, 15 bp, Homo sapiens
cctttgttggatgta

SEQ ID NO: 1730646 - DNA, 15 bp, Homo sapiens
ctttgttggatgtat

SEQ ID NO: 1730647 - DNA, 15 bp, Homo sapiens
tttgttggatgtata

SEQ ID NO: 1730648 - DNA, 15 bp, Homo sapiens
ttgttggatgtatag

SEQ ID NO: 1730649 - DNA, 15 bp, Homo sapiens
tgttggatgtatagt

SEQ ID NO: 1730650 - DNA, 15 bp, Homo sapiens
gttggatgtatagtt

SEQ ID NO: 1730651 - DNA, 15 bp, Homo sapiens
ttggatgtatagttt

SEQ ID NO: 1730652 - DNA, 15 bp, Homo sapiens
tggatgtatagtttg

SEQ ID NO: 1730653 - DNA, 15 bp, Homo sapiens
ggatgtatagtttgt

SEQ ID NO: 1730654 - DNA, 15 bp, Homo sapiens
gatgtatagtttgta

SEQ ID NO: 1730655 - DNA, 15 bp, Homo sapiens
atgtatagtttgtaa

SEQ ID NO: 1730656 - DNA, 15 bp, Homo sapiens
tgtatagtttgtaaa

SEQ ID NO: 1730657 - DNA, 15 bp, Homo sapiens
gtatagtttgtaaat

SEQ ID NO: 1730658 - DNA, 15 bp, Homo sapiens
tatagtttgtaaata

SEQ ID NO: 1730659 - DNA, 15 bp, Homo sapiens
atagtttgtaaatat

SEQ ID NO: 1730660 - DNA, 15 bp, Homo sapiens
tagtttgtaaatatt

SEQ ID NO: 1730661 - DNA, 15 bp, Homo sapiens
agtttgtaaatattt

SEQ ID NO: 1730662 - DNA, 15 bp, Homo sapiens
gtttgtaaatatttt

SEQ ID NO: 1730663 - DNA, 15 bp, Homo sapiens
tttgtaaatattttc

SEQ ID NO: 1730664 - DNA, 15 bp, Homo sapiens
ttgtaaatattttct

SEQ ID NO: 1730665 - DNA, 15 bp, Homo sapiens
tgtaaatattttctc

SEQ ID NO: 1730666 - DNA, 15 bp, Homo sapiens
gtaaatattttctcc

SEQ ID NO: 1730667 - DNA, 15 bp, Homo sapiens
taaatattttctccc

SEQ ID NO: 1730668 - DNA, 15 bp, Homo sapiens
aaatattttctccca

SEQ ID NO: 1730669 - DNA, 15 bp, Homo sapiens
aatattttctcccat

SEQ ID NO: 1730670 - DNA, 15 bp, Homo sapiens
atattttctcccatt

SEQ ID NO: 1730671 - DNA, 15 bp, Homo sapiens
tattttctcccattc

SEQ ID NO: 1730672 - DNA, 15 bp, Homo sapiens
attttctcccattct

SEQ ID NO: 1730673 - DNA, 15 bp, Homo sapiens
ttttctcccattctg

SEQ ID NO: 1730674 - DNA, 15 bp, Homo sapiens
tttctcccattctga

SEQ ID NO: 1730675 - DNA, 15 bp, Homo sapiens
ttctcccattctgag

SEQ ID NO: 1730676 - DNA, 15 bp, Homo sapiens
tctcccattctgagg

SEQ ID NO: 1730677 - DNA, 15 bp, Homo sapiens
ctcccattctgaggg

SEQ ID NO: 1730678 - DNA, 15 bp, Homo sapiens
tcccattctgagggt

SEQ ID NO: 1730679 - DNA, 15 bp, Homo sapiens
cccattctgagggtt

SEQ ID NO: 1730680 - DNA, 15 bp, Homo sapiens
ccattctgagggttg

SEQ ID NO: 1730681 - DNA, 15 bp, Homo sapiens
cattctgagggttgt

SEQ ID NO: 1730682 - DNA, 15 bp, Homo sapiens
attctgagggttgtc

SEQ ID NO: 1730683 - DNA, 15 bp, Homo sapiens
ttctgagggttgtct

SEQ ID NO: 1730684 - DNA, 15 bp, Homo sapiens
tctgagggttgtctc

SEQ ID NO: 1730685 - DNA, 15 bp, Homo sapiens
ctgagggttgtctct

SEQ ID NO: 1730686 - DNA, 15 bp, Homo sapiens
tgagggttgtctctt

SEQ ID NO: 1730687 - DNA, 15 bp, Homo sapiens
gagggttgtctcttt

SEQ ID NO: 1730688 - DNA, 15 bp, Homo sapiens
agggttgtctctttt

SEQ ID NO: 1730689 - DNA, 15 bp, Homo sapiens
gggttgtctcttttc

SEQ ID NO: 1730690 - DNA, 15 bp, Homo sapiens
ggttgtctcttttct

SEQ ID NO: 1730691 - DNA, 15 bp, Homo sapiens
gttgtctcttttctc

SEQ ID NO: 1730692 - DNA, 15 bp, Homo sapiens
ttgtctcttttctct

SEQ ID NO: 1730693 - DNA, 15 bp, Homo sapiens
tgtctcttttctctg

SEQ ID NO: 1730694 - DNA, 15 bp, Homo sapiens
gtctcttttctctgt

SEQ ID NO: 1730695 - DNA, 15 bp, Homo sapiens
tctcttttctctgtt

SEQ ID NO: 1730696 - DNA, 15 bp, Homo sapiens
ctcttttctctgttg

SEQ ID NO: 1730697 - DNA, 15 bp, Homo sapiens
tcttttctctgttga

SEQ ID NO: 1730698 - DNA, 15 bp, Homo sapiens
cttttctctgttgat

SEQ ID NO: 1730699 - DNA, 15 bp, Homo sapiens
ttttctctgttgatt

SEQ ID NO: 1730700 - DNA, 15 bp, Homo sapiens
tttctctgttgatta

SEQ ID NO: 1730701 - DNA, 15 bp, Homo sapiens
ttctctgttgattat

SEQ ID NO: 1730702 - DNA, 15 bp, Homo sapiens
tctctgttgattatt

SEQ ID NO: 1730703 - DNA, 15 bp, Homo sapiens
ctctgttgattattt

SEQ ID NO: 1730704 - DNA, 15 bp, Homo sapiens
tctgttgattattta

SEQ ID NO: 1730705 - DNA, 15 bp, Homo sapiens
ctgttgattatttat

SEQ ID NO: 1730706 - DNA, 15 bp, Homo sapiens
tgttgattatttatt

SEQ ID NO: 1730707 - DNA, 15 bp, Homo sapiens
gttgattatttattt

SEQ ID NO: 1730708 - DNA, 15 bp, Homo sapiens
ttgattatttatttt

SEQ ID NO: 1730709 - DNA, 15 bp, Homo sapiens
tgattatttattttg

SEQ ID NO: 1730710 - DNA, 15 bp, Homo sapiens
gattatttattttgc

SEQ ID NO: 1730711 - DNA, 15 bp, Homo sapiens
attatttattttgct

SEQ ID NO: 1730712 - DNA, 15 bp, Homo sapiens
ttatttattttgcta

SEQ ID NO: 1730713 - DNA, 15 bp, Homo sapiens
tatttattttgctat

SEQ ID NO: 1730714 - DNA, 15 bp, Homo sapiens
atttattttgctatg

SEQ ID NO: 1730715 - DNA, 15 bp, Homo sapiens
tttattttgctatgc

SEQ ID NO: 1730716 - DNA, 15 bp, Homo sapiens
ttattttgctatgca

SEQ ID NO: 1730717 - DNA, 15 bp, Homo sapiens
tattttgctatgcag

SEQ ID NO: 1730718 - DNA, 15 bp, Homo sapiens
attttgctatgcaga

SEQ ID NO: 1730719 - DNA, 15 bp, Homo sapiens
ttttgctatgcagaa

SEQ ID NO: 1730720 - DNA, 15 bp, Homo sapiens
tttgctatgcagaaa

SEQ ID NO: 1730721 - DNA, 15 bp, Homo sapiens
ttgctatgcagaaac

SEQ ID NO: 1730722 - DNA, 15 bp, Homo sapiens
tgctatgcagaaact

SEQ ID NO: 1730723 - DNA, 15 bp, Homo sapiens
gctatgcagaaactt

SEQ ID NO: 1730724 - DNA, 15 bp, Homo sapiens
ctatgcagaaacttt

SEQ ID NO: 1730725 - DNA, 15 bp, Homo sapiens
tatgcagaaactttt

SEQ ID NO: 1730726 - DNA, 15 bp, Homo sapiens
atgcagaaacttttt

SEQ ID NO: 1730727 - DNA, 15 bp, Homo sapiens
tgcagaaacttttta

SEQ ID NO: 1730728 - DNA, 15 bp, Homo sapiens
gcagaaactttttag

SEQ ID NO: 1730729 - DNA, 15 bp, Homo sapiens
cagaaactttttagt

SEQ ID NO: 1730730 - DNA, 15 bp, Homo sapiens
agaaactttttagtt

SEQ ID NO: 1730731 - DNA, 15 bp, Homo sapiens
gaaactttttagttt

SEQ ID NO: 1730732 - DNA, 15 bp, Homo sapiens
aaactttttagttta

SEQ ID NO: 1730733 - DNA, 15 bp, Homo sapiens
aactttttagtttaa

SEQ ID NO: 1730734 - DNA, 15 bp, Homo sapiens
actttttagtttaag

SEQ ID NO: 1730735 - DNA, 15 bp, Homo sapiens
ctttttagtttaagt

SEQ ID NO: 1730736 - DNA, 15 bp, Homo sapiens
tttttagtttaagtc

SEQ ID NO: 1730737 - DNA, 15 bp, Homo sapiens
ttttagtttaagtcc

SEQ ID NO: 1730738 - DNA, 15 bp, Homo sapiens
tttagtttaagtccc

SEQ ID NO: 1730739 - DNA, 15 bp, Homo sapiens
ttagtttaagtccca

SEQ ID NO: 1730740 - DNA, 15 bp, Homo sapiens
tagtttaagtcccat

SEQ ID NO: 1730741 - DNA, 15 bp, Homo sapiens
agtttaagtcccatt

SEQ ID NO: 1730742 - DNA, 15 bp, Homo sapiens
gtttaagtcccattt

SEQ ID NO: 1730743 - DNA, 15 bp, Homo sapiens
tttaagtcccattta

SEQ ID NO: 1730744 - DNA, 15 bp, Homo sapiens
ttaagtcccatttac

SEQ ID NO: 1730745 - DNA, 15 bp, Homo sapiens
taagtcccatttact

SEQ ID NO: 1730746 - DNA, 15 bp, Homo sapiens
aagtcccatttactt

SEQ ID NO: 1730747 - DNA, 15 bp, Homo sapiens
agtcccatttactta

SEQ ID NO: 1730748 - DNA, 15 bp, Homo sapiens
gtcccatttacttag

SEQ ID NO: 1730749 - DNA, 15 bp, Homo sapiens
tcccatttacttagt

SEQ ID NO: 1730750 - DNA, 15 bp, Homo sapiens
ttttgttgcatttgt

SEQ ID NO: 1730751 - DNA, 15 bp, Homo sapiens
tttgttgcatttgtt

SEQ ID NO: 1730752 - DNA, 15 bp, Homo sapiens
ttgttgcatttgttt

SEQ ID NO: 1730753 - DNA, 15 bp, Homo sapiens
tgttgcatttgtttt

SEQ ID NO: 1730754 - DNA, 15 bp, Homo sapiens
gttgcatttgttttt

SEQ ID NO: 1730755 - DNA, 15 bp, Homo sapiens
ttgcatttgtttttg

SEQ ID NO: 1730756 - DNA, 15 bp, Homo sapiens
tgcatttgtttttgg

SEQ ID NO: 1730757 - DNA, 15 bp, Homo sapiens
gcatttgtttttggt

SEQ ID NO: 1730758 - DNA, 15 bp, Homo sapiens
catttgtttttggtg

SEQ ID NO: 1730759 - DNA, 15 bp, Homo sapiens
atttgtttttggtga

SEQ ID NO: 1730760 - DNA, 15 bp, Homo sapiens
tttgtttttggtgac

SEQ ID NO: 1730761 - DNA, 15 bp, Homo sapiens
ttgtttttggtgaca

SEQ ID NO: 1730762 - DNA, 15 bp, Homo sapiens
tgtttttggtgacac

SEQ ID NO: 1730763 - DNA, 15 bp, Homo sapiens
gtttttggtgacacc

SEQ ID NO: 1730764 - DNA, 15 bp, Homo sapiens
tttttggtgacaccc

SEQ ID NO: 1730765 - DNA, 15 bp, Homo sapiens
ttttggtgacacccc

SEQ ID NO: 1730766 - DNA, 15 bp, Homo sapiens
tttggtgacaccccc

SEQ ID NO: 1730767 - DNA, 15 bp, Homo sapiens
ttggtgacaccccct

SEQ ID NO: 1730768 - DNA, 15 bp, Homo sapiens
tggtgacacccccta

SEQ ID NO: 1730769 - DNA, 15 bp, Homo sapiens
ggtgacaccccctat

SEQ ID NO: 1730770 - DNA, 15 bp, Homo sapiens
gtgacaccccctatt

SEQ ID NO: 1730771 - DNA, 15 bp, Homo sapiens
tgacaccccctattt

SEQ ID NO: 1730772 - DNA, 15 bp, Homo sapiens
gacaccccctatttt

SEQ ID NO: 1730773 - DNA, 15 bp, Homo sapiens
acaccccctattttt

SEQ ID NO: 1730774 - DNA, 15 bp, Homo sapiens
caccccctatttttt

SEQ ID NO: 1730775 - DNA, 15 bp, Homo sapiens
accccctatttttta

SEQ ID NO: 1730776 - DNA, 15 bp, Homo sapiens
ccccctattttttag

SEQ ID NO: 1730777 - DNA, 15 bp, Homo sapiens
cccctattttttaga

SEQ ID NO: 1730778 - DNA, 15 bp, Homo sapiens
ccctattttttagat

SEQ ID NO: 1730779 - DNA, 15 bp, Homo sapiens
cctattttttagatt

SEQ ID NO: 1730780 - DNA, 15 bp, Homo sapiens
ctattttttagattc

SEQ ID NO: 1730781 - DNA, 15 bp, Homo sapiens
tattttttagattcc

SEQ ID NO: 1730782 - DNA, 15 bp, Homo sapiens
attttttagattcca

SEQ ID NO: 1730783 - DNA, 15 bp, Homo sapiens
ttttttagattccac

SEQ ID NO: 1730784 - DNA, 15 bp, Homo sapiens
tttttagattccaca

SEQ ID NO: 1730785 - DNA, 15 bp, Homo sapiens
ttttagattccacat

SEQ ID NO: 1730786 - DNA, 15 bp, Homo sapiens
tttagattccacata

SEQ ID NO: 1730787 - DNA, 15 bp, Homo sapiens
ttagattccacatat

SEQ ID NO: 1730788 - DNA, 15 bp, Homo sapiens
tagattccacatata

SEQ ID NO: 1730789 - DNA, 15 bp, Homo sapiens
agattccacatataa

SEQ ID NO: 1730790 - DNA, 15 bp, Homo sapiens
gattccacatataaa

SEQ ID NO: 1730791 - DNA, 15 bp, Homo sapiens
cacatataaatgaga

SEQ ID NO: 1730792 - DNA, 15 bp, Homo sapiens
acatataaatgagat

SEQ ID NO: 1730793 - DNA, 15 bp, Homo sapiens
catataaatgagatc

SEQ ID NO: 1730794 - DNA, 15 bp, Homo sapiens
atataaatgagatca

SEQ ID NO: 1730795 - DNA, 15 bp, Homo sapiens
tataaatgagatcat

SEQ ID NO: 1730796 - DNA, 15 bp, Homo sapiens
ataaatgagatcatg

SEQ ID NO: 1730797 - DNA, 15 bp, Homo sapiens
taaatgagatcatgc

SEQ ID NO: 1730798 - DNA, 15 bp, Homo sapiens
aaatgagatcatgca

SEQ ID NO: 1730799 - DNA, 15 bp, Homo sapiens
aatgagatcatgcaa

SEQ ID NO: 1730800 - DNA, 15 bp, Homo sapiens
atgagatcatgcaat

SEQ ID NO: 1730801 - DNA, 15 bp, Homo sapiens
tgagatcatgcaata

SEQ ID NO: 1730802 - DNA, 15 bp, Homo sapiens
gagatcatgcaataa

SEQ ID NO: 1730803 - DNA, 15 bp, Homo sapiens
agatcatgcaataat

SEQ ID NO: 1730804 - DNA, 15 bp, Homo sapiens
gatcatgcaataatt

SEQ ID NO: 1730805 - DNA, 15 bp, Homo sapiens
atcatgcaataattt

SEQ ID NO: 1730806 - DNA, 15 bp, Homo sapiens
tcatgcaataatttt

SEQ ID NO: 1730807 - DNA, 15 bp, Homo sapiens
catgcaataattttc

SEQ ID NO: 1730808 - DNA, 15 bp, Homo sapiens
atgcaataattttct

SEQ ID NO: 1730809 - DNA, 15 bp, Homo sapiens
tgcaataattttctt

SEQ ID NO: 1730810 - DNA, 15 bp, Homo sapiens
ataattttctttctg

SEQ ID NO: 1730811 - DNA, 15 bp, Homo sapiens
taattttctttctgt

SEQ ID NO: 1730812 - DNA, 15 bp, Homo sapiens
aattttctttctgtg

SEQ ID NO: 1730813 - DNA, 15 bp, Homo sapiens
ttttctttctgtgtc

SEQ ID NO: 1730814 - DNA, 15 bp, Homo sapiens
tttctttctgtgtct

SEQ ID NO: 1730815 - DNA, 15 bp, Homo sapiens
ttctttctgtgtctg

SEQ ID NO: 1730816 - DNA, 15 bp, Homo sapiens
tctttctgtgtctgc

SEQ ID NO: 1730817 - DNA, 15 bp, Homo sapiens
ctttctgtgtctgct

SEQ ID NO: 1730818 - DNA, 15 bp, Homo sapiens
tttctgtgtctgctt

SEQ ID NO: 1730819 - DNA, 15 bp, Homo sapiens
ttctgtgtctgctta

SEQ ID NO: 1730820 - DNA, 15 bp, Homo sapiens
tctgtgtctgcttat

SEQ ID NO: 1730821 - DNA, 15 bp, Homo sapiens
ctgtgtctgcttatt

SEQ ID NO: 1730822 - DNA, 15 bp, Homo sapiens
tgtgtctgcttattt

SEQ ID NO: 1730823 - DNA, 15 bp, Homo sapiens
gtgtctgcttatttc

SEQ ID NO: 1730824 - DNA, 15 bp, Homo sapiens
acttagcataatggc

SEQ ID NO: 1730825 - DNA, 15 bp, Homo sapiens
cttagcataatggcc

SEQ ID NO: 1730826 - DNA, 15 bp, Homo sapiens
ttagcataatggcct

SEQ ID NO: 1730827 - DNA, 15 bp, Homo sapiens
tagcataatggcctc

SEQ ID NO: 1730828 - DNA, 15 bp, Homo sapiens
agcataatggcctcc

SEQ ID NO: 1730829 - DNA, 15 bp, Homo sapiens
gcataatggcctcca

SEQ ID NO: 1730830 - DNA, 15 bp, Homo sapiens
cataatggcctccat

SEQ ID NO: 1730831 - DNA, 15 bp, Homo sapiens
ataatggcctccatg

SEQ ID NO: 1730832 - DNA, 15 bp, Homo sapiens
taatggcctccatgt

SEQ ID NO: 1730833 - DNA, 15 bp, Homo sapiens
aatggcctccatgtc

SEQ ID NO: 1730834 - DNA, 15 bp, Homo sapiens
atggcctccatgtcc

SEQ ID NO: 1730835 - DNA, 15 bp, Homo sapiens
tggcctccatgtcca

SEQ ID NO: 1730836 - DNA, 15 bp, Homo sapiens
ggcctccatgtccac

SEQ ID NO: 1730837 - DNA, 15 bp, Homo sapiens
gcctccatgtccacc

SEQ ID NO: 1730838 - DNA, 15 bp, Homo sapiens
cctccatgtccacct

SEQ ID NO: 1730839 - DNA, 15 bp, Homo sapiens
ctccatgtccacctg

SEQ ID NO: 1730840 - DNA, 15 bp, Homo sapiens
tccatgtccacctgt

SEQ ID NO: 1730841 - DNA, 15 bp, Homo sapiens
ccatgtccacctgtg

SEQ ID NO: 1730842 - DNA, 15 bp, Homo sapiens
catgtccacctgtgt

SEQ ID NO: 1730843 - DNA, 15 bp, Homo sapiens
atgtccacctgtgtt

SEQ ID NO: 1730844 - DNA, 15 bp, Homo sapiens
tgtccacctgtgttg

SEQ ID NO: 1730845 - DNA, 15 bp, Homo sapiens
gtccacctgtgttgt

SEQ ID NO: 1730846 - DNA, 15 bp, Homo sapiens
tccacctgtgttgtg

SEQ ID NO: 1730847 - DNA, 15 bp, Homo sapiens
ccacctgtgttgtgg

SEQ ID NO: 1730848 - DNA, 15 bp, Homo sapiens
cacctgtgttgtggc

SEQ ID NO: 1730849 - DNA, 15 bp, Homo sapiens
acctgtgttgtggca

SEQ ID NO: 1730850 - DNA, 15 bp, Homo sapiens
cctgtgttgtggcaa

SEQ ID NO: 1730851 - DNA, 15 bp, Homo sapiens
ctgtgttgtggcaag

SEQ ID NO: 1730852 - DNA, 15 bp, Homo sapiens
tgtgttgtggcaagt

SEQ ID NO: 1730853 - DNA, 15 bp, Homo sapiens
gtgttgtggcaagtg

SEQ ID NO: 1730854 - DNA, 15 bp, Homo sapiens
tgttgtggcaagtga

SEQ ID NO: 1730855 - DNA, 15 bp, Homo sapiens
gttgtggcaagtgac

SEQ ID NO: 1730856 - DNA, 15 bp, Homo sapiens
ttgtggcaagtgaca

SEQ ID NO: 1730857 - DNA, 15 bp, Homo sapiens
tgtggcaagtgacag

SEQ ID NO: 1730858 - DNA, 15 bp, Homo sapiens
gtggcaagtgacagg

SEQ ID NO: 1730859 - DNA, 15 bp, Homo sapiens
tggcaagtgacagga

SEQ ID NO: 1730860 - DNA, 15 bp, Homo sapiens
ggcaagtgacaggat

SEQ ID NO: 1730861 - DNA, 15 bp, Homo sapiens
gcaagtgacaggatc

SEQ ID NO: 1730862 - DNA, 15 bp, Homo sapiens
caagtgacaggatca

SEQ ID NO: 1730863 - DNA, 15 bp, Homo sapiens
aagtgacaggatcac

SEQ ID NO: 1730864 - DNA, 15 bp, Homo sapiens
agtgacaggatcacc

SEQ ID NO: 1730865 - DNA, 15 bp, Homo sapiens
gtgacaggatcacct

SEQ ID NO: 1730866 - DNA, 15 bp, Homo sapiens
tgacaggatcacctt

SEQ ID NO: 1730867 - DNA, 15 bp, Homo sapiens
gacaggatcaccttt

SEQ ID NO: 1730868 - DNA, 15 bp, Homo sapiens
acaggatcacctttc

SEQ ID NO: 1730869 - DNA, 15 bp, Homo sapiens
caggatcacctttct

SEQ ID NO: 1730870 - DNA, 15 bp, Homo sapiens
aggatcacctttctt

SEQ ID NO: 1730871 - DNA, 15 bp, Homo sapiens
ggatcacctttcttt

SEQ ID NO: 1730872 - DNA, 15 bp, Homo sapiens
gatcacctttctttt

SEQ ID NO: 1730873 - DNA, 15 bp, Homo sapiens
atcacctttcttttt

SEQ ID NO: 1730874 - DNA, 15 bp, Homo sapiens
tcacctttcttttta

SEQ ID NO: 1730875 - DNA, 15 bp, Homo sapiens
cacctttctttttat

SEQ ID NO: 1730876 - DNA, 15 bp, Homo sapiens
acctttctttttatg

SEQ ID NO: 1730877 - DNA, 15 bp, Homo sapiens
cctttctttttatgg

SEQ ID NO: 1730878 - DNA, 15 bp, Homo sapiens
ctttctttttatggc

SEQ ID NO: 1730879 - DNA, 15 bp, Homo sapiens
tttctttttatggct

SEQ ID NO: 1730880 - DNA, 15 bp, Homo sapiens
ttctttttatggctg

SEQ ID NO: 1730881 - DNA, 15 bp, Homo sapiens
tctttttatggctga

SEQ ID NO: 1730882 - DNA, 15 bp, Homo sapiens
ctttttatggctgaa

SEQ ID NO: 1730883 - DNA, 15 bp, Homo sapiens
tttttatggctgaat

SEQ ID NO: 1730884 - DNA, 15 bp, Homo sapiens
ttttatggctgaata

SEQ ID NO: 1730885 - DNA, 15 bp, Homo sapiens
tttatggctgaataa

SEQ ID NO: 1730886 - DNA, 15 bp, Homo sapiens
ttatggctgaataat

SEQ ID NO: 1730887 - DNA, 15 bp, Homo sapiens
tatggctgaataata

SEQ ID NO: 1730888 - DNA, 15 bp, Homo sapiens
atggctgaataatat

SEQ ID NO: 1730889 - DNA, 15 bp, Homo sapiens
tggctgaataatatt

SEQ ID NO: 1730890 - DNA, 15 bp, Homo sapiens
ggctgaataatattc

SEQ ID NO: 1730891 - DNA, 15 bp, Homo sapiens
gctgaataatattcc

SEQ ID NO: 1730892 - DNA, 15 bp, Homo sapiens
ctgaataatattcca

SEQ ID NO: 1730893 - DNA, 15 bp, Homo sapiens
tgaataatattccat

SEQ ID NO: 1730894 - DNA, 15 bp, Homo sapiens
gaataatattccatt

SEQ ID NO: 1730895 - DNA, 15 bp, Homo sapiens
aataatattccattg

SEQ ID NO: 1730896 - DNA, 15 bp, Homo sapiens
ataatattccattgt

SEQ ID NO: 1730897 - DNA, 15 bp, Homo sapiens
taatattccattgtt

SEQ ID NO: 1730898 - DNA, 15 bp, Homo sapiens
aatattccattgttt

SEQ ID NO: 1730899 - DNA, 15 bp, Homo sapiens
atattccattgttta

SEQ ID NO: 1730900 - DNA, 15 bp, Homo sapiens
tattccattgtttat

SEQ ID NO: 1730901 - DNA, 15 bp, Homo sapiens
attccattgtttata

SEQ ID NO: 1730902 - DNA, 15 bp, Homo sapiens
ttccattgtttatat

SEQ ID NO: 1730903 - DNA, 15 bp, Homo sapiens
tccattgtttatata

SEQ ID NO: 1730904 - DNA, 15 bp, Homo sapiens
ccattgtttatatat

SEQ ID NO: 1730905 - DNA, 15 bp, Homo sapiens
cattgtttatatata

SEQ ID NO: 1730906 - DNA, 15 bp, Homo sapiens
attgtttatatatac

SEQ ID NO: 1730907 - DNA, 15 bp, Homo sapiens
ttgtttatatatact

SEQ ID NO: 1730908 - DNA, 15 bp, Homo sapiens
tgtttatatatacta

SEQ ID NO: 1730909 - DNA, 15 bp, Homo sapiens
gtttatatatactac

SEQ ID NO: 1730910 - DNA, 15 bp, Homo sapiens
tttatatatactaca

SEQ ID NO: 1730911 - DNA, 15 bp, Homo sapiens
ttatatatactacat

SEQ ID NO: 1730912 - DNA, 15 bp, Homo sapiens
tatatatactacatt

SEQ ID NO: 1730913 - DNA, 15 bp, Homo sapiens
atatatactacattt

SEQ ID NO: 1730914 - DNA, 15 bp, Homo sapiens
tatatactacatttt

SEQ ID NO: 1730915 - DNA, 15 bp, Homo sapiens
atatactacattttg

SEQ ID NO: 1730916 - DNA, 15 bp, Homo sapiens
tatactacattttgt

SEQ ID NO: 1730917 - DNA, 15 bp, Homo sapiens
atactacattttgtt

SEQ ID NO: 1730918 - DNA, 15 bp, Homo sapiens
tactacattttgttt

SEQ ID NO: 1730919 - DNA, 15 bp, Homo sapiens
actacattttgttta

SEQ ID NO: 1730920 - DNA, 15 bp, Homo sapiens
ctacattttgtttat

SEQ ID NO: 1730921 - DNA, 15 bp, Homo sapiens
tacattttgtttatc

SEQ ID NO: 1730922 - DNA, 15 bp, Homo sapiens
acattttgtttatcc

SEQ ID NO: 1730923 - DNA, 15 bp, Homo sapiens
cattttgtttatcca

SEQ ID NO: 1730924 - DNA, 15 bp, Homo sapiens
attttgtttatccac

SEQ ID NO: 1730925 - DNA, 15 bp, Homo sapiens
ttttgtttatccact

SEQ ID NO: 1730926 - DNA, 15 bp, Homo sapiens
tttgtttatccactt

SEQ ID NO: 1730927 - DNA, 15 bp, Homo sapiens
ttgtttatccacttc

SEQ ID NO: 1730928 - DNA, 15 bp, Homo sapiens
tgtttatccacttct

SEQ ID NO: 1730929 - DNA, 15 bp, Homo sapiens
gtttatccacttctc

SEQ ID NO: 1730930 - DNA, 15 bp, Homo sapiens
tttatccacttctct

SEQ ID NO: 1730931 - DNA, 15 bp, Homo sapiens
ttatccacttctctg

SEQ ID NO: 1730932 - DNA, 15 bp, Homo sapiens
tatccacttctctgt

SEQ ID NO: 1730933 - DNA, 15 bp, Homo sapiens
atccacttctctgtt

SEQ ID NO: 1730934 - DNA, 15 bp, Homo sapiens
tccacttctctgttg

SEQ ID NO: 1730935 - DNA, 15 bp, Homo sapiens
ccacttctctgttga

SEQ ID NO: 1730936 - DNA, 15 bp, Homo sapiens
cacttctctgttgac

SEQ ID NO: 1730937 - DNA, 15 bp, Homo sapiens
acttctctgttgaca

SEQ ID NO: 1730938 - DNA, 15 bp, Homo sapiens
cttctctgttgacag

SEQ ID NO: 1730939 - DNA, 15 bp, Homo sapiens
ttctctgttgacaga

SEQ ID NO: 1730940 - DNA, 15 bp, Homo sapiens
tctctgttgacagac

SEQ ID NO: 1730941 - DNA, 15 bp, Homo sapiens
ctctgttgacagaca

SEQ ID NO: 1730942 - DNA, 15 bp, Homo sapiens
tctgttgacagacac

SEQ ID NO: 1730943 - DNA, 15 bp, Homo sapiens
ctgttgacagacaca

SEQ ID NO: 1730944 - DNA, 15 bp, Homo sapiens
tgttgacagacacat

SEQ ID NO: 1730945 - DNA, 15 bp, Homo sapiens
gttgacagacacata

SEQ ID NO: 1730946 - DNA, 15 bp, Homo sapiens
ttgacagacacatag

SEQ ID NO: 1730947 - DNA, 15 bp, Homo sapiens
tgacagacacatagg

SEQ ID NO: 1730948 - DNA, 15 bp, Homo sapiens
gacagacacataggt

SEQ ID NO: 1730949 - DNA, 15 bp, Homo sapiens
acagacacataggtt

SEQ ID NO: 1730950 - DNA, 15 bp, Homo sapiens
cagacacataggttg

SEQ ID NO: 1730951 - DNA, 15 bp, Homo sapiens
agacacataggttgt

SEQ ID NO: 1730952 - DNA, 15 bp, Homo sapiens
gacacataggttgtt

SEQ ID NO: 1730953 - DNA, 15 bp, Homo sapiens
acacataggttgttt

SEQ ID NO: 1730954 - DNA, 15 bp, Homo sapiens
cacataggttgtttc

SEQ ID NO: 1730955 - DNA, 15 bp, Homo sapiens
acataggttgtttcc

SEQ ID NO: 1730956 - DNA, 15 bp, Homo sapiens
cataggttgtttcca

SEQ ID NO: 1730957 - DNA, 15 bp, Homo sapiens
ataggttgtttccat

SEQ ID NO: 1730958 - DNA, 15 bp, Homo sapiens
taggttgtttccata

SEQ ID NO: 1730959 - DNA, 15 bp, Homo sapiens
aggttgtttccatat

SEQ ID NO: 1730960 - DNA, 15 bp, Homo sapiens
ggttgtttccatatt

SEQ ID NO: 1730961 - DNA, 15 bp, Homo sapiens
gttgtttccatatta

SEQ ID NO: 1730962 - DNA, 15 bp, Homo sapiens
ttgtttccatattac

SEQ ID NO: 1730963 - DNA, 15 bp, Homo sapiens
tgtttccatattact

SEQ ID NO: 1730964 - DNA, 15 bp, Homo sapiens
gtttccatattactt

SEQ ID NO: 1730965 - DNA, 15 bp, Homo sapiens
tttccatattactta

SEQ ID NO: 1730966 - DNA, 15 bp, Homo sapiens
ttccatattacttag

SEQ ID NO: 1730967 - DNA, 15 bp, Homo sapiens
tccatattacttagc

SEQ ID NO: 1730968 - DNA, 15 bp, Homo sapiens
ccatattacttagct

SEQ ID NO: 1730969 - DNA, 15 bp, Homo sapiens
catattacttagctg

SEQ ID NO: 1730970 - DNA, 15 bp, Homo sapiens
atattacttagctgt

SEQ ID NO: 1730971 - DNA, 15 bp, Homo sapiens
tattacttagctgta

SEQ ID NO: 1730972 - DNA, 15 bp, Homo sapiens
attacttagctgtat

SEQ ID NO: 1730973 - DNA, 15 bp, Homo sapiens
ttacttagctgtata

SEQ ID NO: 1730974 - DNA, 15 bp, Homo sapiens
tacttagctgtatat

SEQ ID NO: 1730975 - DNA, 15 bp, Homo sapiens
acttagctgtatata

SEQ ID NO: 1730976 - DNA, 15 bp, Homo sapiens
cttagctgtatatag

SEQ ID NO: 1730977 - DNA, 15 bp, Homo sapiens
ttagctgtatataga

SEQ ID NO: 1730978 - DNA, 15 bp, Homo sapiens
tagctgtatatagaa

SEQ ID NO: 1730979 - DNA, 15 bp, Homo sapiens
agctgtatatagaaa

SEQ ID NO: 1730980 - DNA, 15 bp, Homo sapiens
gctgtatatagaaat

SEQ ID NO: 1730981 - DNA, 15 bp, Homo sapiens
ctgtatatagaaata

SEQ ID NO: 1730982 - DNA, 15 bp, Homo sapiens
tgtatatagaaatac

SEQ ID NO: 1730983 - DNA, 15 bp, Homo sapiens
gtatatagaaataca

SEQ ID NO: 1730984 - DNA, 15 bp, Homo sapiens
tatatagaaatacag

SEQ ID NO: 1730985 - DNA, 15 bp, Homo sapiens
atatagaaatacagg

SEQ ID NO: 1730986 - DNA, 15 bp, Homo sapiens
tatagaaatacaggt

SEQ ID NO: 1730987 - DNA, 15 bp, Homo sapiens
atagaaatacaggtg

SEQ ID NO: 1730988 - DNA, 15 bp, Homo sapiens
tagaaatacaggtgg

SEQ ID NO: 1730989 - DNA, 15 bp, Homo sapiens
agaaatacaggtggt

SEQ ID NO: 1730990 - DNA, 15 bp, Homo sapiens
gaaatacaggtggtt

SEQ ID NO: 1730991 - DNA, 15 bp, Homo sapiens
aaatacaggtggttt

SEQ ID NO: 1730992 - DNA, 15 bp, Homo sapiens
aatacaggtggtttt

SEQ ID NO: 1730993 - DNA, 15 bp, Homo sapiens
atacaggtggttttt

SEQ ID NO: 1730994 - DNA, 15 bp, Homo sapiens
tacaggtggtttttg

SEQ ID NO: 1730995 - DNA, 15 bp, Homo sapiens
acaggtggtttttgt

SEQ ID NO: 1730996 - DNA, 15 bp, Homo sapiens
caggtggtttttgta

SEQ ID NO: 1730997 - DNA, 15 bp, Homo sapiens
aggtggtttttgtat

SEQ ID NO: 1730998 - DNA, 15 bp, Homo sapiens
ggtggtttttgtatg

SEQ ID NO: 1730999 - DNA, 15 bp, Homo sapiens
gtggtttttgtatgt

SEQ ID NO: 1731000 - DNA, 15 bp, Homo sapiens
tggtttttgtatgtt

SEQ ID NO: 1731001 - DNA, 15 bp, Homo sapiens
ggtttttgtatgttg

SEQ ID NO: 1731002 - DNA, 15 bp, Homo sapiens
gtttttgtatgttga

SEQ ID NO: 1731003 - DNA, 15 bp, Homo sapiens
tttttgtatgttgat

SEQ ID NO: 1731004 - DNA, 15 bp, Homo sapiens
ttttgtatgttgatt

SEQ ID NO: 1731005 - DNA, 15 bp, Homo sapiens
tttgtatgttgattt

SEQ ID NO: 1731006 - DNA, 15 bp, Homo sapiens
ttgtatgttgatttt

SEQ ID NO: 1731007 - DNA, 15 bp, Homo sapiens
tgtatgttgattttg

SEQ ID NO: 1731008 - DNA, 15 bp, Homo sapiens
gtatgttgattttgt

SEQ ID NO: 1731009 - DNA, 15 bp, Homo sapiens
tatgttgattttgta

SEQ ID NO: 1731010 - DNA, 15 bp, Homo sapiens
atgttgattttgtac

SEQ ID NO: 1731011 - DNA, 15 bp, Homo sapiens
tgttgattttgtact

SEQ ID NO: 1731012 - DNA, 15 bp, Homo sapiens
gttgattttgtactc

SEQ ID NO: 1731013 - DNA, 15 bp, Homo sapiens
ttgattttgtactct

SEQ ID NO: 1731014 - DNA, 15 bp, Homo sapiens
tgattttgtactctg

SEQ ID NO: 1731015 - DNA, 15 bp, Homo sapiens
gattttgtactctga

SEQ ID NO: 1731016 - DNA, 15 bp, Homo sapiens
attttgtactctgaa

SEQ ID NO: 1731017 - DNA, 15 bp, Homo sapiens
ttttgtactctgaaa

SEQ ID NO: 1731018 - DNA, 15 bp, Homo sapiens
tttgtactctgaaaa

SEQ ID NO: 1731019 - DNA, 15 bp, Homo sapiens
ttgtactctgaaaac

SEQ ID NO: 1731020 - DNA, 15 bp, Homo sapiens
tgtactctgaaaact

SEQ ID NO: 1731021 - DNA, 15 bp, Homo sapiens
gtactctgaaaactt

SEQ ID NO: 1731022 - DNA, 15 bp, Homo sapiens
tactctgaaaacttg

SEQ ID NO: 1731023 - DNA, 15 bp, Homo sapiens
actctgaaaacttgg

SEQ ID NO: 1731024 - DNA, 15 bp, Homo sapiens
ctctgaaaacttggt

SEQ ID NO: 1731025 - DNA, 15 bp, Homo sapiens
tctgaaaacttggtg

SEQ ID NO: 1731026 - DNA, 15 bp, Homo sapiens
ctgaaaacttggtga

SEQ ID NO: 1731027 - DNA, 15 bp, Homo sapiens
tgaaaacttggtgaa

SEQ ID NO: 1731028 - DNA, 15 bp, Homo sapiens
gaaaacttggtgaac

SEQ ID NO: 1731029 - DNA, 15 bp, Homo sapiens
aaaacttggtgaact

SEQ ID NO: 1731030 - DNA, 15 bp, Homo sapiens
aaacttggtgaacta

SEQ ID NO: 1731031 - DNA, 15 bp, Homo sapiens
aacttggtgaactaa

SEQ ID NO: 1731032 - DNA, 15 bp, Homo sapiens
acttggtgaactaat

SEQ ID NO: 1731033 - DNA, 15 bp, Homo sapiens
cttggtgaactaatt

SEQ ID NO: 1731034 - DNA, 15 bp, Homo sapiens
ttggtgaactaattt

SEQ ID NO: 1731035 - DNA, 15 bp, Homo sapiens
tggtgaactaattta

SEQ ID NO: 1731036 - DNA, 15 bp, Homo sapiens
ggtgaactaatttat

SEQ ID NO: 1731037 - DNA, 15 bp, Homo sapiens
gtgaactaatttatt

SEQ ID NO: 1731038 - DNA, 15 bp, Homo sapiens
tgaactaatttatta

SEQ ID NO: 1731039 - DNA, 15 bp, Homo sapiens
gaactaatttattag

SEQ ID NO: 1731040 - DNA, 15 bp, Homo sapiens
aactaatttattagc

SEQ ID NO: 1731041 - DNA, 15 bp, Homo sapiens
actaatttattagct

SEQ ID NO: 1731042 - DNA, 15 bp, Homo sapiens
ctaatttattagctt

SEQ ID NO: 1731043 - DNA, 15 bp, Homo sapiens
taatttattagcttc

SEQ ID NO: 1731044 - DNA, 15 bp, Homo sapiens
aatttattagcttca

SEQ ID NO: 1731045 - DNA, 15 bp, Homo sapiens
atttattagcttcaa

SEQ ID NO: 1731046 - DNA, 15 bp, Homo sapiens
tttattagcttcaat

SEQ ID NO: 1731047 - DNA, 15 bp, Homo sapiens
ttattagcttcaata

SEQ ID NO: 1731048 - DNA, 15 bp, Homo sapiens
tattagcttcaatag

SEQ ID NO: 1731049 - DNA, 15 bp, Homo sapiens
attagcttcaatagt

SEQ ID NO: 1731050 - DNA, 15 bp, Homo sapiens
ttagcttcaatagtt

SEQ ID NO: 1731051 - DNA, 15 bp, Homo sapiens
tagcttcaatagttt

SEQ ID NO: 1731052 - DNA, 15 bp, Homo sapiens
agcttcaatagtttc

SEQ ID NO: 1731053 - DNA, 15 bp, Homo sapiens
gcttcaatagtttct

SEQ ID NO: 1731054 - DNA, 15 bp, Homo sapiens
cttcaatagtttctt

SEQ ID NO: 1731055 - DNA, 15 bp, Homo sapiens
ttcaatagtttctta

SEQ ID NO: 1731056 - DNA, 15 bp, Homo sapiens
tcaatagtttcttag

SEQ ID NO: 1731057 - DNA, 15 bp, Homo sapiens
caatagtttcttagt

SEQ ID NO: 1731058 - DNA, 15 bp, Homo sapiens
aatagtttcttagtg

SEQ ID NO: 1731059 - DNA, 15 bp, Homo sapiens
atagtttcttagtga

SEQ ID NO: 1731060 - DNA, 15 bp, Homo sapiens
tagtttcttagtgaa

SEQ ID NO: 1731061 - DNA, 15 bp, Homo sapiens
agtttcttagtgaat

SEQ ID NO: 1731062 - DNA, 15 bp, Homo sapiens
gtttcttagtgaatt

SEQ ID NO: 1731063 - DNA, 15 bp, Homo sapiens
tttcttagtgaattc

SEQ ID NO: 1731064 - DNA, 15 bp, Homo sapiens
ttcttagtgaattcc

SEQ ID NO: 1731065 - DNA, 15 bp, Homo sapiens
tcttagtgaattcct

SEQ ID NO: 1731066 - DNA, 15 bp, Homo sapiens
cttagtgaattcctt

SEQ ID NO: 1731067 - DNA, 15 bp, Homo sapiens
ttagtgaattcctta

SEQ ID NO: 1731068 - DNA, 15 bp, Homo sapiens
tagtgaattccttag

SEQ ID NO: 1731069 - DNA, 15 bp, Homo sapiens
agtgaattccttagg

SEQ ID NO: 1731070 - DNA, 15 bp, Homo sapiens
gtgaattccttagga

SEQ ID NO: 1731071 - DNA, 15 bp, Homo sapiens
tgaattccttaggat

SEQ ID NO: 1731072 - DNA, 15 bp, Homo sapiens
gaattccttaggatt

SEQ ID NO: 1731073 - DNA, 15 bp, Homo sapiens
aattccttaggattt

SEQ ID NO: 1731074 - DNA, 15 bp, Homo sapiens
attccttaggatttt

SEQ ID NO: 1731075 - DNA, 15 bp, Homo sapiens
ttccttaggattttc

SEQ ID NO: 1731076 - DNA, 15 bp, Homo sapiens
tccttaggattttct

SEQ ID NO: 1731077 - DNA, 15 bp, Homo sapiens
ccttaggattttcta

SEQ ID NO: 1731078 - DNA, 15 bp, Homo sapiens
cttaggattttctag

SEQ ID NO: 1731079 - DNA, 15 bp, Homo sapiens
ttaggattttctaga

SEQ ID NO: 1731080 - DNA, 15 bp, Homo sapiens
taggattttctagat

SEQ ID NO: 1731081 - DNA, 15 bp, Homo sapiens
aggattttctagatg

SEQ ID NO: 1731082 - DNA, 15 bp, Homo sapiens
ggattttctagatgt

SEQ ID NO: 1731083 - DNA, 15 bp, Homo sapiens
gattttctagatgta

SEQ ID NO: 1731084 - DNA, 15 bp, Homo sapiens
attttctagatgtaa

SEQ ID NO: 1731085 - DNA, 15 bp, Homo sapiens
ttttctagatgtaaa

SEQ ID NO: 1731086 - DNA, 15 bp, Homo sapiens
tttctagatgtaaaa

SEQ ID NO: 1731087 - DNA, 15 bp, Homo sapiens
ttctagatgtaaaat

SEQ ID NO: 1731088 - DNA, 15 bp, Homo sapiens
tctagatgtaaaata

SEQ ID NO: 1731089 - DNA, 15 bp, Homo sapiens
ctagatgtaaaataa

SEQ ID NO: 1731090 - DNA, 15 bp, Homo sapiens
tagatgtaaaataat

SEQ ID NO: 1731091 - DNA, 15 bp, Homo sapiens
agatgtaaaataatg

SEQ ID NO: 1731092 - DNA, 15 bp, Homo sapiens
gatgtaaaataatgt

SEQ ID NO: 1731093 - DNA, 15 bp, Homo sapiens
atgtaaaataatgtc

SEQ ID NO: 1731094 - DNA, 15 bp, Homo sapiens
tgtaaaataatgtca

SEQ ID NO: 1731095 - DNA, 15 bp, Homo sapiens
gtaaaataatgtcat

SEQ ID NO: 1731096 - DNA, 15 bp, Homo sapiens
taaaataatgtcatt

SEQ ID NO: 1731097 - DNA, 15 bp, Homo sapiens
aaaataatgtcattt

SEQ ID NO: 1731098 - DNA, 15 bp, Homo sapiens
aacataaatcacact

SEQ ID NO: 1731099 - DNA, 15 bp, Homo sapiens
acataaatcacactt

SEQ ID NO: 1731100 - DNA, 15 bp, Homo sapiens
cataaatcacacttt

SEQ ID NO: 1731101 - DNA, 15 bp, Homo sapiens
ataaatcacacttta

SEQ ID NO: 1731102 - DNA, 15 bp, Homo sapiens
taaatcacactttat

SEQ ID NO: 1731103 - DNA, 15 bp, Homo sapiens
aaatcacactttata

SEQ ID NO: 1731104 - DNA, 15 bp, Homo sapiens
aatcacactttatag

SEQ ID NO: 1731105 - DNA, 15 bp, Homo sapiens
atcacactttatagt

SEQ ID NO: 1731106 - DNA, 15 bp, Homo sapiens
tcacactttatagta

SEQ ID NO: 1731107 - DNA, 15 bp, Homo sapiens
cacactttatagtaa

SEQ ID NO: 1731108 - DNA, 15 bp, Homo sapiens
acactttatagtaat

SEQ ID NO: 1731109 - DNA, 15 bp, Homo sapiens
cactttatagtaata

SEQ ID NO: 1731110 - DNA, 15 bp, Homo sapiens
actttatagtaataa

SEQ ID NO: 1731111 - DNA, 15 bp, Homo sapiens
ctttatagtaataaa

SEQ ID NO: 1731112 - DNA, 15 bp, Homo sapiens
tttatagtaataaag

SEQ ID NO: 1731113 - DNA, 15 bp, Homo sapiens
ttatagtaataaaga

SEQ ID NO: 1731114 - DNA, 15 bp, Homo sapiens
tatagtaataaagag

SEQ ID NO: 1731115 - DNA, 15 bp, Homo sapiens
atagtaataaagagc

SEQ ID NO: 1731116 - DNA, 15 bp, Homo sapiens
tagtaataaagagcg

SEQ ID NO: 1731117 - DNA, 15 bp, Homo sapiens
agtaataaagagcgg

SEQ ID NO: 1731118 - DNA, 15 bp, Homo sapiens
gtaataaagagcgga

SEQ ID NO: 1731119 - DNA, 15 bp, Homo sapiens
taataaagagcggat

SEQ ID NO: 1731120 - DNA, 15 bp, Homo sapiens
aataaagagcggatc

SEQ ID NO: 1731121 - DNA, 15 bp, Homo sapiens
ataaagagcggatct

SEQ ID NO: 1731122 - DNA, 15 bp, Homo sapiens
taaagagcggatctc

SEQ ID NO: 1731123 - DNA, 15 bp, Homo sapiens
aaagagcggatctct

SEQ ID NO: 1731124 - DNA, 15 bp, Homo sapiens
aagagcggatctctg

SEQ ID NO: 1731125 - DNA, 15 bp, Homo sapiens
agagcggatctctgt

SEQ ID NO: 1731126 - DNA, 15 bp, Homo sapiens
gagcggatctctgtt

SEQ ID NO: 1731127 - DNA, 15 bp, Homo sapiens
agcggatctctgttg

SEQ ID NO: 1731128 - DNA, 15 bp, Homo sapiens
gcggatctctgttgc

SEQ ID NO: 1731129 - DNA, 15 bp, Homo sapiens
cggatctctgttgct

SEQ ID NO: 1731130 - DNA, 15 bp, Homo sapiens
ggatctctgttgctc

SEQ ID NO: 1731131 - DNA, 15 bp, Homo sapiens
gatctctgttgctct

SEQ ID NO: 1731132 - DNA, 15 bp, Homo sapiens
atctctgttgctctc

SEQ ID NO: 1731133 - DNA, 15 bp, Homo sapiens
tctctgttgctctcc

SEQ ID NO: 1731134 - DNA, 15 bp, Homo sapiens
ctctgttgctctcct

SEQ ID NO: 1731135 - DNA, 15 bp, Homo sapiens
tctgttgctctcctt

SEQ ID NO: 1731136 - DNA, 15 bp, Homo sapiens
ctgttgctctccttt

SEQ ID NO: 1731137 - DNA, 15 bp, Homo sapiens
tgttgctctcctttt

SEQ ID NO: 1731138 - DNA, 15 bp, Homo sapiens
gttgctctccttttt

SEQ ID NO: 1731139 - DNA, 15 bp, Homo sapiens
ttgctctcctttttt

SEQ ID NO: 1731140 - DNA, 15 bp, Homo sapiens
tgctctcctttttta

SEQ ID NO: 1731141 - DNA, 15 bp, Homo sapiens
gctctccttttttac

SEQ ID NO: 1731142 - DNA, 15 bp, Homo sapiens
ctctccttttttact

SEQ ID NO: 1731143 - DNA, 15 bp, Homo sapiens
tctccttttttactt

SEQ ID NO: 1731144 - DNA, 15 bp, Homo sapiens
ctccttttttacttt

SEQ ID NO: 1731145 - DNA, 15 bp, Homo sapiens
tccttttttacttta

SEQ ID NO: 1731146 - DNA, 15 bp, Homo sapiens
ccttttttactttaa

SEQ ID NO: 1731147 - DNA, 15 bp, Homo sapiens
cttttttactttaaa

SEQ ID NO: 1731148 - DNA, 15 bp, Homo sapiens
ttttttactttaaaa

SEQ ID NO: 1731149 - DNA, 15 bp, Homo sapiens
tttttactttaaaat

SEQ ID NO: 1731150 - DNA, 15 bp, Homo sapiens
ttttactttaaaatt

SEQ ID NO: 1731151 - DNA, 15 bp, Homo sapiens
tttactttaaaattt

SEQ ID NO: 1731152 - DNA, 15 bp, Homo sapiens
ttactttaaaatttt

SEQ ID NO: 1731153 - DNA, 15 bp, Homo sapiens
tactttaaaattttt

SEQ ID NO: 1731154 - DNA, 15 bp, Homo sapiens
actttaaaatttttt

SEQ ID NO: 1731155 - DNA, 15 bp, Homo sapiens
ctttaaaatttttta

SEQ ID NO: 1731156 - DNA, 15 bp, Homo sapiens
tttaaaattttttat

SEQ ID NO: 1731157 - DNA, 15 bp, Homo sapiens
ttaaaattttttatt

SEQ ID NO: 1731158 - DNA, 15 bp, Homo sapiens
taaaattttttattt

SEQ ID NO: 1731159 - DNA, 15 bp, Homo sapiens
aaaattttttatttt

SEQ ID NO: 1731160 - DNA, 15 bp, Homo sapiens
aaattttttattttt

SEQ ID NO: 1731161 - DNA, 15 bp, Homo sapiens
attttttatttttaa

SEQ ID NO: 1731162 - DNA, 15 bp, Homo sapiens
ttttttatttttaat

SEQ ID NO: 1731163 - DNA, 15 bp, Homo sapiens
tttttatttttaatt

SEQ ID NO: 1731164 - DNA, 15 bp, Homo sapiens
ttttatttttaatta

SEQ ID NO: 1731165 - DNA, 15 bp, Homo sapiens
tttatttttaattat

SEQ ID NO: 1731166 - DNA, 15 bp, Homo sapiens
ttatttttaattatt

SEQ ID NO: 1731167 - DNA, 15 bp, Homo sapiens
tatttttaattatta

SEQ ID NO: 1731168 - DNA, 15 bp, Homo sapiens
atttttaattattat

SEQ ID NO: 1731169 - DNA, 15 bp, Homo sapiens
tttttaattattatg

SEQ ID NO: 1731170 - DNA, 15 bp, Homo sapiens
ttttaattattatgg

SEQ ID NO: 1731171 - DNA, 15 bp, Homo sapiens
tttaattattatgga

SEQ ID NO: 1731172 - DNA, 15 bp, Homo sapiens
ttaattattatggag

SEQ ID NO: 1731173 - DNA, 15 bp, Homo sapiens
taattattatggaga

SEQ ID NO: 1731174 - DNA, 15 bp, Homo sapiens
aattattatggagac

SEQ ID NO: 1731175 - DNA, 15 bp, Homo sapiens
attattatggagaca

SEQ ID NO: 1731176 - DNA, 15 bp, Homo sapiens
ttattatggagacat

SEQ ID NO: 1731177 - DNA, 15 bp, Homo sapiens
tattatggagacata

SEQ ID NO: 1731178 - DNA, 15 bp, Homo sapiens
attatggagacataa

SEQ ID NO: 1731179 - DNA, 15 bp, Homo sapiens
ttatggagacataat

SEQ ID NO: 1731180 - DNA, 15 bp, Homo sapiens
tatggagacataata

SEQ ID NO: 1731181 - DNA, 15 bp, Homo sapiens
atggagacataatag

SEQ ID NO: 1731182 - DNA, 15 bp, Homo sapiens
tggagacataatagg

SEQ ID NO: 1731183 - DNA, 15 bp, Homo sapiens
ggagacataataggt

SEQ ID NO: 1731184 - DNA, 15 bp, Homo sapiens
gagacataataggtg

SEQ ID NO: 1731185 - DNA, 15 bp, Homo sapiens
agacataataggtgt

SEQ ID NO: 1731186 - DNA, 15 bp, Homo sapiens
gacataataggtgta

SEQ ID NO: 1731187 - DNA, 15 bp, Homo sapiens
acataataggtgtac

SEQ ID NO: 1731188 - DNA, 15 bp, Homo sapiens
cataataggtgtaca

SEQ ID NO: 1731189 - DNA, 15 bp, Homo sapiens
ataataggtgtacat

SEQ ID NO: 1731190 - DNA, 15 bp, Homo sapiens
taataggtgtacata

SEQ ID NO: 1731191 - DNA, 15 bp, Homo sapiens
aataggtgtacatat

SEQ ID NO: 1731192 - DNA, 15 bp, Homo sapiens
ataggtgtacatatt

SEQ ID NO: 1731193 - DNA, 15 bp, Homo sapiens
taggtgtacatattt

SEQ ID NO: 1731194 - DNA, 15 bp, Homo sapiens
aggtgtacatattta

SEQ ID NO: 1731195 - DNA, 15 bp, Homo sapiens
ggtgtacatatttat

SEQ ID NO: 1731196 - DNA, 15 bp, Homo sapiens
gtgtacatatttatg

SEQ ID NO: 1731197 - DNA, 15 bp, Homo sapiens
tgtacatatttatgg

SEQ ID NO: 1731198 - DNA, 15 bp, Homo sapiens
gtacatatttatggg

SEQ ID NO: 1731199 - DNA, 15 bp, Homo sapiens
tacatatttatggga

SEQ ID NO: 1731200 - DNA, 15 bp, Homo sapiens
acatatttatgggat

SEQ ID NO: 1731201 - DNA, 15 bp, Homo sapiens
catatttatgggata

SEQ ID NO: 1731202 - DNA, 15 bp, Homo sapiens
atatttatgggatac

SEQ ID NO: 1731203 - DNA, 15 bp, Homo sapiens
tatttatgggataca

SEQ ID NO: 1731204 - DNA, 15 bp, Homo sapiens
atttatgggatacat

SEQ ID NO: 1731205 - DNA, 15 bp, Homo sapiens
tttatgggatacatg

SEQ ID NO: 1731206 - DNA, 15 bp, Homo sapiens
ttatgggatacatgt

SEQ ID NO: 1731207 - DNA, 15 bp, Homo sapiens
tatgggatacatgtg

SEQ ID NO: 1731208 - DNA, 15 bp, Homo sapiens
atgggatacatgtga

SEQ ID NO: 1731209 - DNA, 15 bp, Homo sapiens
tgggatacatgtgat

SEQ ID NO: 1731210 - DNA, 15 bp, Homo sapiens
gggatacatgtgatg

SEQ ID NO: 1731211 - DNA, 15 bp, Homo sapiens
ggatacatgtgatgt

SEQ ID NO: 1731212 - DNA, 15 bp, Homo sapiens
gatacatgtgatgtt

SEQ ID NO: 1731213 - DNA, 15 bp, Homo sapiens
atacatgtgatgttt

SEQ ID NO: 1731214 - DNA, 15 bp, Homo sapiens
tacatgtgatgtttt

SEQ ID NO: 1731215 - DNA, 15 bp, Homo sapiens
acatgtgatgttttg

SEQ ID NO: 1731216 - DNA, 15 bp, Homo sapiens
catgtgatgttttga

SEQ ID NO: 1731217 - DNA, 15 bp, Homo sapiens
atgtgatgttttgat

SEQ ID NO: 1731218 - DNA, 15 bp, Homo sapiens
tgtgatgttttgata

SEQ ID NO: 1731219 - DNA, 15 bp, Homo sapiens
gtgatgttttgatac

SEQ ID NO: 1731220 - DNA, 15 bp, Homo sapiens
tgatgttttgataca

SEQ ID NO: 1731221 - DNA, 15 bp, Homo sapiens
gatgttttgatacaa

SEQ ID NO: 1731222 - DNA, 15 bp, Homo sapiens
atgttttgatacaag

SEQ ID NO: 1731223 - DNA, 15 bp, Homo sapiens
tgttttgatacaagc

SEQ ID NO: 1731224 - DNA, 15 bp, Homo sapiens
gttttgatacaagca

SEQ ID NO: 1731225 - DNA, 15 bp, Homo sapiens
ttttgatacaagcat

SEQ ID NO: 1731226 - DNA, 15 bp, Homo sapiens
tttgatacaagcata

SEQ ID NO: 1731227 - DNA, 15 bp, Homo sapiens
ttgatacaagcatat

SEQ ID NO: 1731228 - DNA, 15 bp, Homo sapiens
tgatacaagcatata

SEQ ID NO: 1731229 - DNA, 15 bp, Homo sapiens
gatacaagcatataa

SEQ ID NO: 1731230 - DNA, 15 bp, Homo sapiens
atacaagcatataat

SEQ ID NO: 1731231 - DNA, 15 bp, Homo sapiens
tacaagcatataatg

SEQ ID NO: 1731232 - DNA, 15 bp, Homo sapiens
acaagcatataatgt

SEQ ID NO: 1731233 - DNA, 15 bp, Homo sapiens
caagcatataatgtg

SEQ ID NO: 1731234 - DNA, 15 bp, Homo sapiens
aagcatataatgtgt

SEQ ID NO: 1731235 - DNA, 15 bp, Homo sapiens
agcatataatgtgta

SEQ ID NO: 1731236 - DNA, 15 bp, Homo sapiens
gcatataatgtgtaa

SEQ ID NO: 1731237 - DNA, 15 bp, Homo sapiens
catataatgtgtaat

SEQ ID NO: 1731238 - DNA, 15 bp, Homo sapiens
atataatgtgtaatg

SEQ ID NO: 1731239 - DNA, 15 bp, Homo sapiens
tataatgtgtaatga

SEQ ID NO: 1731240 - DNA, 15 bp, Homo sapiens
ataatgtgtaatgac

SEQ ID NO: 1731241 - DNA, 15 bp, Homo sapiens
taatgtgtaatgacc

SEQ ID NO: 1731242 - DNA, 15 bp, Homo sapiens
aatgtgtaatgacca

SEQ ID NO: 1731243 - DNA, 15 bp, Homo sapiens
atgtgtaatgaccaa

SEQ ID NO: 1731244 - DNA, 15 bp, Homo sapiens
tgtgtaatgaccaaa

SEQ ID NO: 1731245 - DNA, 15 bp, Homo sapiens
gtgtaatgaccaaat

SEQ ID NO: 1731246 - DNA, 15 bp, Homo sapiens
tgtaatgaccaaatc

SEQ ID NO: 1731247 - DNA, 15 bp, Homo sapiens
gtaatgaccaaatca

SEQ ID NO: 1731248 - DNA, 15 bp, Homo sapiens
taatgaccaaatcat

SEQ ID NO: 1731249 - DNA, 15 bp, Homo sapiens
aatgaccaaatcatg

SEQ ID NO: 1731250 - DNA, 15 bp, Homo sapiens
atgaccaaatcatgg

SEQ ID NO: 1731251 - DNA, 15 bp, Homo sapiens
tgaccaaatcatggt

SEQ ID NO: 1731252 - DNA, 15 bp, Homo sapiens
gaccaaatcatggta

SEQ ID NO: 1731253 - DNA, 15 bp, Homo sapiens
accaaatcatggtag

SEQ ID NO: 1731254 - DNA, 15 bp, Homo sapiens
ccaaatcatggtagt

SEQ ID NO: 1731255 - DNA, 15 bp, Homo sapiens
caaatcatggtagtt

SEQ ID NO: 1731256 - DNA, 15 bp, Homo sapiens
aaatcatggtagttg

SEQ ID NO: 1731257 - DNA, 15 bp, Homo sapiens
aatcatggtagttgg

SEQ ID NO: 1731258 - DNA, 15 bp, Homo sapiens
atcatggtagttgga

SEQ ID NO: 1731259 - DNA, 15 bp, Homo sapiens
tcatggtagttggag

SEQ ID NO: 1731260 - DNA, 15 bp, Homo sapiens
catggtagttggagt

SEQ ID NO: 1731261 - DNA, 15 bp, Homo sapiens
atggtagttggagta

SEQ ID NO: 1731262 - DNA, 15 bp, Homo sapiens
tggtagttggagtat

SEQ ID NO: 1731263 - DNA, 15 bp, Homo sapiens
ggtagttggagtatc

SEQ ID NO: 1731264 - DNA, 15 bp, Homo sapiens
gtagttggagtatcc

SEQ ID NO: 1731265 - DNA, 15 bp, Homo sapiens
tagttggagtatcca

SEQ ID NO: 1731266 - DNA, 15 bp, Homo sapiens
agttggagtatccat

SEQ ID NO: 1731267 - DNA, 15 bp, Homo sapiens
gttggagtatccatc

SEQ ID NO: 1731268 - DNA, 15 bp, Homo sapiens
ttggagtatccatca

SEQ ID NO: 1731269 - DNA, 15 bp, Homo sapiens
tggagtatccatcat

SEQ ID NO: 1731270 - DNA, 15 bp, Homo sapiens
ggagtatccatcatc

SEQ ID NO: 1731271 - DNA, 15 bp, Homo sapiens
gagtatccatcatct

SEQ ID NO: 1731272 - DNA, 15 bp, Homo sapiens
agtatccatcatctt

SEQ ID NO: 1731273 - DNA, 15 bp, Homo sapiens
gtatccatcatctta

SEQ ID NO: 1731274 - DNA, 15 bp, Homo sapiens
tatccatcatcttaa

SEQ ID NO: 1731275 - DNA, 15 bp, Homo sapiens
atccatcatcttaag

SEQ ID NO: 1731276 - DNA, 15 bp, Homo sapiens
tccatcatcttaagc

SEQ ID NO: 1731277 - DNA, 15 bp, Homo sapiens
ccatcatcttaagct

SEQ ID NO: 1731278 - DNA, 15 bp, Homo sapiens
catcatcttaagctt

SEQ ID NO: 1731279 - DNA, 15 bp, Homo sapiens
atcatcttaagcttt

SEQ ID NO: 1731280 - DNA, 15 bp, Homo sapiens
tcatcttaagctttt

SEQ ID NO: 1731281 - DNA, 15 bp, Homo sapiens
catcttaagctttta

SEQ ID NO: 1731282 - DNA, 15 bp, Homo sapiens
atcttaagcttttat

SEQ ID NO: 1731283 - DNA, 15 bp, Homo sapiens
tcttaagcttttatc

SEQ ID NO: 1731284 - DNA, 15 bp, Homo sapiens
cttaagcttttatca

SEQ ID NO: 1731285 - DNA, 15 bp, Homo sapiens
ttaagcttttatcat

SEQ ID NO: 1731286 - DNA, 15 bp, Homo sapiens
taagcttttatcatt

SEQ ID NO: 1731287 - DNA, 15 bp, Homo sapiens
aagcttttatcattt

SEQ ID NO: 1731288 - DNA, 15 bp, Homo sapiens
agcttttatcattta

SEQ ID NO: 1731289 - DNA, 15 bp, Homo sapiens
gcttttatcatttat

SEQ ID NO: 1731290 - DNA, 15 bp, Homo sapiens
cttttatcatttatt

SEQ ID NO: 1731291 - DNA, 15 bp, Homo sapiens
ttttatcatttattt

SEQ ID NO: 1731292 - DNA, 15 bp, Homo sapiens
tttatcatttatttg

SEQ ID NO: 1731293 - DNA, 15 bp, Homo sapiens
ttatcatttatttgt

SEQ ID NO: 1731294 - DNA, 15 bp, Homo sapiens
tatcatttatttgtg

SEQ ID NO: 1731295 - DNA, 15 bp, Homo sapiens
atcatttatttgtgt

SEQ ID NO: 1731296 - DNA, 15 bp, Homo sapiens
tcatttatttgtgtt

SEQ ID NO: 1731297 - DNA, 15 bp, Homo sapiens
catttatttgtgtta

SEQ ID NO: 1731298 - DNA, 15 bp, Homo sapiens
atttatttgtgttag

SEQ ID NO: 1731299 - DNA, 15 bp, Homo sapiens
tttatttgtgttagg

SEQ ID NO: 1731300 - DNA, 15 bp, Homo sapiens
ttatttgtgttagga

SEQ ID NO: 1731301 - DNA, 15 bp, Homo sapiens
tatttgtgttaggag

SEQ ID NO: 1731302 - DNA, 15 bp, Homo sapiens
atttgtgttaggagc

SEQ ID NO: 1731303 - DNA, 15 bp, Homo sapiens
tttgtgttaggagca

SEQ ID NO: 1731304 - DNA, 15 bp, Homo sapiens
ttgtgttaggagcat

SEQ ID NO: 1731305 - DNA, 15 bp, Homo sapiens
tgtgttaggagcatt

SEQ ID NO: 1731306 - DNA, 15 bp, Homo sapiens
gtgttaggagcattc

SEQ ID NO: 1731307 - DNA, 15 bp, Homo sapiens
tgttaggagcattcc

SEQ ID NO: 1731308 - DNA, 15 bp, Homo sapiens
gttaggagcattcca

SEQ ID NO: 1731309 - DNA, 15 bp, Homo sapiens
ttaggagcattccaa

SEQ ID NO: 1731310 - DNA, 15 bp, Homo sapiens
taggagcattccaat

SEQ ID NO: 1731311 - DNA, 15 bp, Homo sapiens
aggagcattccaatt

SEQ ID NO: 1731312 - DNA, 15 bp, Homo sapiens
ggagcattccaattc

SEQ ID NO: 1731313 - DNA, 15 bp, Homo sapiens
gagcattccaattct

SEQ ID NO: 1731314 - DNA, 15 bp, Homo sapiens
agcattccaattcta

SEQ ID NO: 1731315 - DNA, 15 bp, Homo sapiens
gcattccaattctaa

SEQ ID NO: 1731316 - DNA, 15 bp, Homo sapiens
cattccaattctaat

SEQ ID NO: 1731317 - DNA, 15 bp, Homo sapiens
attccaattctaatc

SEQ ID NO: 1731318 - DNA, 15 bp, Homo sapiens
ttccaattctaatct

SEQ ID NO: 1731319 - DNA, 15 bp, Homo sapiens
tccaattctaatctt

SEQ ID NO: 1731320 - DNA, 15 bp, Homo sapiens
ccaattctaatcttt

SEQ ID NO: 1731321 - DNA, 15 bp, Homo sapiens
caattctaatctttt

SEQ ID NO: 1731322 - DNA, 15 bp, Homo sapiens
aattctaatctttta

SEQ ID NO: 1731323 - DNA, 15 bp, Homo sapiens
attctaatcttttag

SEQ ID NO: 1731324 - DNA, 15 bp, Homo sapiens
ttctaatcttttagt

SEQ ID NO: 1731325 - DNA, 15 bp, Homo sapiens
tctaatcttttagtt

SEQ ID NO: 1731326 - DNA, 15 bp, Homo sapiens
ctaatcttttagtta

SEQ ID NO: 1731327 - DNA, 15 bp, Homo sapiens
taatcttttagttat

SEQ ID NO: 1731328 - DNA, 15 bp, Homo sapiens
aatcttttagttatt

SEQ ID NO: 1731329 - DNA, 15 bp, Homo sapiens
atcttttagttattt

SEQ ID NO: 1731330 - DNA, 15 bp, Homo sapiens
tcttttagttatttt

SEQ ID NO: 1731331 - DNA, 15 bp, Homo sapiens
cttttagttattttg

SEQ ID NO: 1731332 - DNA, 15 bp, Homo sapiens
ttttagttattttga

SEQ ID NO: 1731333 - DNA, 15 bp, Homo sapiens
tttagttattttgaa

SEQ ID NO: 1731334 - DNA, 15 bp, Homo sapiens
ttagttattttgaaa

SEQ ID NO: 1731335 - DNA, 15 bp, Homo sapiens
tagttattttgaaat

SEQ ID NO: 1731336 - DNA, 15 bp, Homo sapiens
agttattttgaaata

SEQ ID NO: 1731337 - DNA, 15 bp, Homo sapiens
gttattttgaaatat

SEQ ID NO: 1731338 - DNA, 15 bp, Homo sapiens
ttattttgaaatata

SEQ ID NO: 1731339 - DNA, 15 bp, Homo sapiens
tattttgaaatatac

SEQ ID NO: 1731340 - DNA, 15 bp, Homo sapiens
attttgaaatataca

SEQ ID NO: 1731341 - DNA, 15 bp, Homo sapiens
ttttgaaatatacaa

SEQ ID NO: 1731342 - DNA, 15 bp, Homo sapiens
tttgaaatatacaat

SEQ ID NO: 1731343 - DNA, 15 bp, Homo sapiens
ttgaaatatacaata

SEQ ID NO: 1731344 - DNA, 15 bp, Homo sapiens
tgaaatatacaataa

SEQ ID NO: 1731345 - DNA, 15 bp, Homo sapiens
gaaatatacaataaa

SEQ ID NO: 1731346 - DNA, 15 bp, Homo sapiens
aaatatacaataaat

SEQ ID NO: 1731347 - DNA, 15 bp, Homo sapiens
aatatacaataaatt

SEQ ID NO: 1731348 - DNA, 15 bp, Homo sapiens
atatacaataaatta

SEQ ID NO: 1731349 - DNA, 15 bp, Homo sapiens
tatacaataaattat

SEQ ID NO: 1731350 - DNA, 15 bp, Homo sapiens
atacaataaattatt

SEQ ID NO: 1731351 - DNA, 15 bp, Homo sapiens
tacaataaattattg

SEQ ID NO: 1731352 - DNA, 15 bp, Homo sapiens
acaataaattattgt

SEQ ID NO: 1731353 - DNA, 15 bp, Homo sapiens
caataaattattgtt

SEQ ID NO: 1731354 - DNA, 15 bp, Homo sapiens
aataaattattgtta

SEQ ID NO: 1731355 - DNA, 15 bp, Homo sapiens
ataaattattgttaa

SEQ ID NO: 1731356 - DNA, 15 bp, Homo sapiens
taaattattgttaac

SEQ ID NO: 1731357 - DNA, 15 bp, Homo sapiens
aaattattgttaact

SEQ ID NO: 1731358 - DNA, 15 bp, Homo sapiens
aattattgttaacta

SEQ ID NO: 1731359 - DNA, 15 bp, Homo sapiens
attattgttaactat

SEQ ID NO: 1731360 - DNA, 15 bp, Homo sapiens
ttattgttaactata

SEQ ID NO: 1731361 - DNA, 15 bp, Homo sapiens
tattgttaactatag

SEQ ID NO: 1731362 - DNA, 15 bp, Homo sapiens
attgttaactatagt

SEQ ID NO: 1731363 - DNA, 15 bp, Homo sapiens
ttgttaactatagtc

SEQ ID NO: 1731364 - DNA, 15 bp, Homo sapiens
tgttaactatagtca

SEQ ID NO: 1731365 - DNA, 15 bp, Homo sapiens
gttaactatagtcac

SEQ ID NO: 1731366 - DNA, 15 bp, Homo sapiens
ttaactatagtcact

SEQ ID NO: 1731367 - DNA, 15 bp, Homo sapiens
taactatagtcactg

SEQ ID NO: 1731368 - DNA, 15 bp, Homo sapiens
aactatagtcactgt

SEQ ID NO: 1731369 - DNA, 15 bp, Homo sapiens
actatagtcactgta

SEQ ID NO: 1731370 - DNA, 15 bp, Homo sapiens
ctatagtcactgtat

SEQ ID NO: 1731371 - DNA, 15 bp, Homo sapiens
tatagtcactgtatt

SEQ ID NO: 1731372 - DNA, 15 bp, Homo sapiens
atagtcactgtattg

SEQ ID NO: 1731373 - DNA, 15 bp, Homo sapiens
tagtcactgtattgt

SEQ ID NO: 1731374 - DNA, 15 bp, Homo sapiens
agtcactgtattgtg

SEQ ID NO: 1731375 - DNA, 15 bp, Homo sapiens
gtcactgtattgtga

SEQ ID NO: 1731376 - DNA, 15 bp, Homo sapiens
tcactgtattgtgac

SEQ ID NO: 1731377 - DNA, 15 bp, Homo sapiens
cactgtattgtgact

SEQ ID NO: 1731378 - DNA, 15 bp, Homo sapiens
actgtattgtgacta

SEQ ID NO: 1731379 - DNA, 15 bp, Homo sapiens
ctgtattgtgactat

SEQ ID NO: 1731380 - DNA, 15 bp, Homo sapiens
tgtattgtgactata

SEQ ID NO: 1731381 - DNA, 15 bp, Homo sapiens
gtattgtgactatat

SEQ ID NO: 1731382 - DNA, 15 bp, Homo sapiens
tattgtgactatata

SEQ ID NO: 1731383 - DNA, 15 bp, Homo sapiens
attgtgactatatag

SEQ ID NO: 1731384 - DNA, 15 bp, Homo sapiens
ttgtgactatatagt

SEQ ID NO: 1731385 - DNA, 15 bp, Homo sapiens
tgtgactatatagtg

SEQ ID NO: 1731386 - DNA, 15 bp, Homo sapiens
gtgactatatagtgt

SEQ ID NO: 1731387 - DNA, 15 bp, Homo sapiens
tgactatatagtgtt

SEQ ID NO: 1731388 - DNA, 15 bp, Homo sapiens
gactatatagtgttt

SEQ ID NO: 1731389 - DNA, 15 bp, Homo sapiens
actatatagtgtttc

SEQ ID NO: 1731390 - DNA, 15 bp, Homo sapiens
ctatatagtgtttcc

SEQ ID NO: 1731391 - DNA, 15 bp, Homo sapiens
tatatagtgtttcca

SEQ ID NO: 1731392 - DNA, 15 bp, Homo sapiens
atatagtgtttccat

SEQ ID NO: 1731393 - DNA, 15 bp, Homo sapiens
tatagtgtttccata

SEQ ID NO: 1731394 - DNA, 15 bp, Homo sapiens
atagtgtttccatag

SEQ ID NO: 1731395 - DNA, 15 bp, Homo sapiens
tagtgtttccataga

SEQ ID NO: 1731396 - DNA, 15 bp, Homo sapiens
agtgtttccatagaa

SEQ ID NO: 1731397 - DNA, 15 bp, Homo sapiens
gtgtttccatagaac

SEQ ID NO: 1731398 - DNA, 15 bp, Homo sapiens
tgtttccatagaaca

SEQ ID NO: 1731399 - DNA, 15 bp, Homo sapiens
gtttccatagaacac

SEQ ID NO: 1731400 - DNA, 15 bp, Homo sapiens
tttccatagaacact

SEQ ID NO: 1731401 - DNA, 15 bp, Homo sapiens
ttccatagaacacta

SEQ ID NO: 1731402 - DNA, 15 bp, Homo sapiens
tccatagaacactag

SEQ ID NO: 1731403 - DNA, 15 bp, Homo sapiens
ccatagaacactaga

SEQ ID NO: 1731404 - DNA, 15 bp, Homo sapiens
catagaacactagat

SEQ ID NO: 1731405 - DNA, 15 bp, Homo sapiens
atagaacactagatc

SEQ ID NO: 1731406 - DNA, 15 bp, Homo sapiens
tagaacactagatct

SEQ ID NO: 1731407 - DNA, 15 bp, Homo sapiens
agaacactagatctt

SEQ ID NO: 1731408 - DNA, 15 bp, Homo sapiens
gaacactagatcttg

SEQ ID NO: 1731409 - DNA, 15 bp, Homo sapiens
aacactagatcttgt

SEQ ID NO: 1731410 - DNA, 15 bp, Homo sapiens
acactagatcttgtt

SEQ ID NO: 1731411 - DNA, 15 bp, Homo sapiens
cactagatcttgttc

SEQ ID NO: 1731412 - DNA, 15 bp, Homo sapiens
actagatcttgttcc

SEQ ID NO: 1731413 - DNA, 15 bp, Homo sapiens
ctagatcttgttcct

SEQ ID NO: 1731414 - DNA, 15 bp, Homo sapiens
tagatcttgttcctt

SEQ ID NO: 1731415 - DNA, 15 bp, Homo sapiens
agatcttgttccttc

SEQ ID NO: 1731416 - DNA, 15 bp, Homo sapiens
gatcttgttccttct

SEQ ID NO: 1731417 - DNA, 15 bp, Homo sapiens
atcttgttccttcta

SEQ ID NO: 1731418 - DNA, 15 bp, Homo sapiens
tcttgttccttctat

SEQ ID NO: 1731419 - DNA, 15 bp, Homo sapiens
cttgttccttctatc

SEQ ID NO: 1731420 - DNA, 15 bp, Homo sapiens
ttgttccttctatct

SEQ ID NO: 1731421 - DNA, 15 bp, Homo sapiens
tgttccttctatcta

SEQ ID NO: 1731422 - DNA, 15 bp, Homo sapiens
gttccttctatctaa

SEQ ID NO: 1731423 - DNA, 15 bp, Homo sapiens
ttccttctatctaac

SEQ ID NO: 1731424 - DNA, 15 bp, Homo sapiens
tccttctatctaact

SEQ ID NO: 1731425 - DNA, 15 bp, Homo sapiens
ccttctatctaactg

SEQ ID NO: 1731426 - DNA, 15 bp, Homo sapiens
cttctatctaactgt

SEQ ID NO: 1731427 - DNA, 15 bp, Homo sapiens
ttctatctaactgtc

SEQ ID NO: 1731428 - DNA, 15 bp, Homo sapiens
tctatctaactgtct

SEQ ID NO: 1731429 - DNA, 15 bp, Homo sapiens
ctatctaactgtctt

SEQ ID NO: 1731430 - DNA, 15 bp, Homo sapiens
tatctaactgtcttt

SEQ ID NO: 1731431 - DNA, 15 bp, Homo sapiens
atctaactgtctttt

SEQ ID NO: 1731432 - DNA, 15 bp, Homo sapiens
tctaactgtcttttt

SEQ ID NO: 1731433 - DNA, 15 bp, Homo sapiens
ctaactgtctttttg

SEQ ID NO: 1731434 - DNA, 15 bp, Homo sapiens
taactgtctttttgt

SEQ ID NO: 1731435 - DNA, 15 bp, Homo sapiens
aactgtctttttgta

SEQ ID NO: 1731436 - DNA, 15 bp, Homo sapiens
actgtctttttgtac

SEQ ID NO: 1731437 - DNA, 15 bp, Homo sapiens
ctgtctttttgtacc

SEQ ID NO: 1731438 - DNA, 15 bp, Homo sapiens
tgtctttttgtaccc

SEQ ID NO: 1731439 - DNA, 15 bp, Homo sapiens
gtctttttgtaccca

SEQ ID NO: 1731440 - DNA, 15 bp, Homo sapiens
tctttttgtacccat

SEQ ID NO: 1731441 - DNA, 15 bp, Homo sapiens
ctttttgtacccatt

SEQ ID NO: 1731442 - DNA, 15 bp, Homo sapiens
tttttgtacccatta

SEQ ID NO: 1731443 - DNA, 15 bp, Homo sapiens
ttttgtacccattaa

SEQ ID NO: 1731444 - DNA, 15 bp, Homo sapiens
tttgtacccattaac

SEQ ID NO: 1731445 - DNA, 15 bp, Homo sapiens
ttgtacccattaacc

SEQ ID NO: 1731446 - DNA, 15 bp, Homo sapiens
tgtacccattaacca

SEQ ID NO: 1731447 - DNA, 15 bp, Homo sapiens
gtacccattaaccaa

SEQ ID NO: 1731448 - DNA, 15 bp, Homo sapiens
tacccattaaccaac

SEQ ID NO: 1731449 - DNA, 15 bp, Homo sapiens
acccattaaccaact

SEQ ID NO: 1731450 - DNA, 15 bp, Homo sapiens
cccattaaccaactc

SEQ ID NO: 1731451 - DNA, 15 bp, Homo sapiens
ccattaaccaactcc

SEQ ID NO: 1731452 - DNA, 15 bp, Homo sapiens
cattaaccaactcct

SEQ ID NO: 1731453 - DNA, 15 bp, Homo sapiens
attaaccaactcctc

SEQ ID NO: 1731454 - DNA, 15 bp, Homo sapiens
ttaaccaactcctct

SEQ ID NO: 1731455 - DNA, 15 bp, Homo sapiens
taaccaactcctctt

SEQ ID NO: 1731456 - DNA, 15 bp, Homo sapiens
aaccaactcctcttt

SEQ ID NO: 1731457 - DNA, 15 bp, Homo sapiens
accaactcctctttt

SEQ ID NO: 1731458 - DNA, 15 bp, Homo sapiens
ccaactcctctttta

SEQ ID NO: 1731459 - DNA, 15 bp, Homo sapiens
caactcctcttttat

SEQ ID NO: 1731460 - DNA, 15 bp, Homo sapiens
aactcctcttttatc

SEQ ID NO: 1731461 - DNA, 15 bp, Homo sapiens
actcctcttttatcc

SEQ ID NO: 1731462 - DNA, 15 bp, Homo sapiens
ctcctcttttatcct

SEQ ID NO: 1731463 - DNA, 15 bp, Homo sapiens
tcctcttttatcctc

SEQ ID NO: 1731464 - DNA, 15 bp, Homo sapiens
cctcttttatcctcc

SEQ ID NO: 1731465 - DNA, 15 bp, Homo sapiens
ctcttttatcctccc

SEQ ID NO: 1731466 - DNA, 15 bp, Homo sapiens
tcttttatcctccca

SEQ ID NO: 1731467 - DNA, 15 bp, Homo sapiens
cttttatcctcccat

SEQ ID NO: 1731468 - DNA, 15 bp, Homo sapiens
ttttatcctcccatc

SEQ ID NO: 1731469 - DNA, 15 bp, Homo sapiens
tttatcctcccatcc

SEQ ID NO: 1731470 - DNA, 15 bp, Homo sapiens
ttatcctcccatccc

SEQ ID NO: 1731471 - DNA, 15 bp, Homo sapiens
tatcctcccatcccc

SEQ ID NO: 1731472 - DNA, 15 bp, Homo sapiens
atcctcccatcccca

SEQ ID NO: 1731473 - DNA, 15 bp, Homo sapiens
tcctcccatccccac

SEQ ID NO: 1731474 - DNA, 15 bp, Homo sapiens
cctcccatccccact

SEQ ID NO: 1731475 - DNA, 15 bp, Homo sapiens
ctcccatccccacta

SEQ ID NO: 1731476 - DNA, 15 bp, Homo sapiens
tcccatccccactac

SEQ ID NO: 1731477 - DNA, 15 bp, Homo sapiens
cccatccccactacc

SEQ ID NO: 1731478 - DNA, 15 bp, Homo sapiens
ccatccccactaccc

SEQ ID NO: 1731479 - DNA, 15 bp, Homo sapiens
catccccactaccct

SEQ ID NO: 1731480 - DNA, 15 bp, Homo sapiens
atccccactaccctt

SEQ ID NO: 1731481 - DNA, 15 bp, Homo sapiens
tccccactacccttc

SEQ ID NO: 1731482 - DNA, 15 bp, Homo sapiens
ccccactacccttca

SEQ ID NO: 1731483 - DNA, 15 bp, Homo sapiens
cccactacccttcac

SEQ ID NO: 1731484 - DNA, 15 bp, Homo sapiens
ccactacccttcaca

SEQ ID NO: 1731485 - DNA, 15 bp, Homo sapiens
cactacccttcacag

SEQ ID NO: 1731486 - DNA, 15 bp, Homo sapiens
actacccttcacagc

SEQ ID NO: 1731487 - DNA, 15 bp, Homo sapiens
ctacccttcacagct

SEQ ID NO: 1731488 - DNA, 15 bp, Homo sapiens
tacccttcacagctt

SEQ ID NO: 1731489 - DNA, 15 bp, Homo sapiens
acccttcacagcttc

SEQ ID NO: 1731490 - DNA, 15 bp, Homo sapiens
cccttcacagcttct

SEQ ID NO: 1731491 - DNA, 15 bp, Homo sapiens
ccttcacagcttctg

SEQ ID NO: 1731492 - DNA, 15 bp, Homo sapiens
cttcacagcttctgg

SEQ ID NO: 1731493 - DNA, 15 bp, Homo sapiens
ttcacagcttctggt

SEQ ID NO: 1731494 - DNA, 15 bp, Homo sapiens
tcacagcttctggta

SEQ ID NO: 1731495 - DNA, 15 bp, Homo sapiens
cacagcttctggtaa

SEQ ID NO: 1731496 - DNA, 15 bp, Homo sapiens
acagcttctggtaat

SEQ ID NO: 1731497 - DNA, 15 bp, Homo sapiens
cagcttctggtaatc

SEQ ID NO: 1731498 - DNA, 15 bp, Homo sapiens
agcttctggtaatca

SEQ ID NO: 1731499 - DNA, 15 bp, Homo sapiens
gcttctggtaatcat

SEQ ID NO: 1731500 - DNA, 15 bp, Homo sapiens
cttctggtaatcatc

SEQ ID NO: 1731501 - DNA, 15 bp, Homo sapiens
ttctggtaatcatca

SEQ ID NO: 1731502 - DNA, 15 bp, Homo sapiens
tctggtaatcatcat

SEQ ID NO: 1731503 - DNA, 15 bp, Homo sapiens
ctggtaatcatcatt

SEQ ID NO: 1731504 - DNA, 15 bp, Homo sapiens
tggtaatcatcattc

SEQ ID NO: 1731505 - DNA, 15 bp, Homo sapiens
ggtaatcatcattct

SEQ ID NO: 1731506 - DNA, 15 bp, Homo sapiens
gtaatcatcattcta

SEQ ID NO: 1731507 - DNA, 15 bp, Homo sapiens
taatcatcattctac

SEQ ID NO: 1731508 - DNA, 15 bp, Homo sapiens
aatcatcattctact

SEQ ID NO: 1731509 - DNA, 15 bp, Homo sapiens
atcatcattctactc

SEQ ID NO: 1731510 - DNA, 15 bp, Homo sapiens
tcatcattctactct

SEQ ID NO: 1731511 - DNA, 15 bp, Homo sapiens
catcattctactctg

SEQ ID NO: 1731512 - DNA, 15 bp, Homo sapiens
atcattctactctgt

SEQ ID NO: 1731513 - DNA, 15 bp, Homo sapiens
tcattctactctgtc

SEQ ID NO: 1731514 - DNA, 15 bp, Homo sapiens
cattctactctgtct

SEQ ID NO: 1731515 - DNA, 15 bp, Homo sapiens
ttactttggtagcaa

SEQ ID NO: 1731516 - DNA, 15 bp, Homo sapiens
tactttggtagcaaa

SEQ ID NO: 1731517 - DNA, 15 bp, Homo sapiens
actttggtagcaaat

SEQ ID NO: 1731518 - DNA, 15 bp, Homo sapiens
ctttggtagcaaatg

SEQ ID NO: 1731519 - DNA, 15 bp, Homo sapiens
tttggtagcaaatgg

SEQ ID NO: 1731520 - DNA, 15 bp, Homo sapiens
ttggtagcaaatggt

SEQ ID NO: 1731521 - DNA, 15 bp, Homo sapiens
tggtagcaaatggtt

SEQ ID NO: 1731522 - DNA, 15 bp, Homo sapiens
ggtagcaaatggttt

SEQ ID NO: 1731523 - DNA, 15 bp, Homo sapiens
gtagcaaatggtttt

SEQ ID NO: 1731524 - DNA, 15 bp, Homo sapiens
tagcaaatggttttt

SEQ ID NO: 1731525 - DNA, 15 bp, Homo sapiens
agcaaatggtttttc

SEQ ID NO: 1731526 - DNA, 15 bp, Homo sapiens
gcaaatggtttttct

SEQ ID NO: 1731527 - DNA, 15 bp, Homo sapiens
caaatggtttttctt

SEQ ID NO: 1731528 - DNA, 15 bp, Homo sapiens
aaatggtttttcttt

SEQ ID NO: 1731529 - DNA, 15 bp, Homo sapiens
aatggtttttctttg

SEQ ID NO: 1731530 - DNA, 15 bp, Homo sapiens
atggtttttctttga

SEQ ID NO: 1731531 - DNA, 15 bp, Homo sapiens
tggtttttctttgaa

SEQ ID NO: 1731532 - DNA, 15 bp, Homo sapiens
ggtttttctttgaag

SEQ ID NO: 1731533 - DNA, 15 bp, Homo sapiens
gtttttctttgaaga

SEQ ID NO: 1731534 - DNA, 15 bp, Homo sapiens
tttttctttgaagat

SEQ ID NO: 1731535 - DNA, 15 bp, Homo sapiens
ttttctttgaagatt

SEQ ID NO: 1731536 - DNA, 15 bp, Homo sapiens
tttctttgaagatta

SEQ ID NO: 1731537 - DNA, 15 bp, Homo sapiens
ttctttgaagattaa

SEQ ID NO: 1731538 - DNA, 15 bp, Homo sapiens
tctttgaagattaat

SEQ ID NO: 1731539 - DNA, 15 bp, Homo sapiens
ctttgaagattaatg

SEQ ID NO: 1731540 - DNA, 15 bp, Homo sapiens
tttgaagattaatga

SEQ ID NO: 1731541 - DNA, 15 bp, Homo sapiens
ttgaagattaatgaa

SEQ ID NO: 1731542 - DNA, 15 bp, Homo sapiens
tgaagattaatgaag

SEQ ID NO: 1731543 - DNA, 15 bp, Homo sapiens
gaagattaatgaaga

SEQ ID NO: 1731544 - DNA, 15 bp, Homo sapiens
aagattaatgaagat

SEQ ID NO: 1731545 - DNA, 15 bp, Homo sapiens
agattaatgaagata

SEQ ID NO: 1731546 - DNA, 15 bp, Homo sapiens
gattaatgaagatag

SEQ ID NO: 1731547 - DNA, 15 bp, Homo sapiens
attaatgaagataga

SEQ ID NO: 1731548 - DNA, 15 bp, Homo sapiens
ttaatgaagatagac

SEQ ID NO: 1731549 - DNA, 15 bp, Homo sapiens
taatgaagatagaca

SEQ ID NO: 1731550 - DNA, 15 bp, Homo sapiens
aatgaagatagacaa

SEQ ID NO: 1731551 - DNA, 15 bp, Homo sapiens
atgaagatagacaag

SEQ ID NO: 1731552 - DNA, 15 bp, Homo sapiens
tgaagatagacaaga

SEQ ID NO: 1731553 - DNA, 15 bp, Homo sapiens
gaagatagacaagac

SEQ ID NO: 1731554 - DNA, 15 bp, Homo sapiens
aagatagacaagacc

SEQ ID NO: 1731555 - DNA, 15 bp, Homo sapiens
agatagacaagaccc

SEQ ID NO: 1731556 - DNA, 15 bp, Homo sapiens
gatagacaagaccca

SEQ ID NO: 1731557 - DNA, 15 bp, Homo sapiens
atagacaagacccat

SEQ ID NO: 1731558 - DNA, 15 bp, Homo sapiens
tagacaagacccatt

SEQ ID NO: 1731559 - DNA, 15 bp, Homo sapiens
agacaagacccatta

SEQ ID NO: 1731560 - DNA, 15 bp, Homo sapiens
gacaagacccattaa

SEQ ID NO: 1731561 - DNA, 15 bp, Homo sapiens
acaagacccattaag

SEQ ID NO: 1731562 - DNA, 15 bp, Homo sapiens
caagacccattaagg

SEQ ID NO: 1731563 - DNA, 15 bp, Homo sapiens
aagacccattaaggt

SEQ ID NO: 1731564 - DNA, 15 bp, Homo sapiens
agacccattaaggtg

SEQ ID NO: 1731565 - DNA, 15 bp, Homo sapiens
gacccattaaggtga

SEQ ID NO: 1731566 - DNA, 15 bp, Homo sapiens
acccattaaggtgaa

SEQ ID NO: 1731567 - DNA, 15 bp, Homo sapiens
cccattaaggtgaag

SEQ ID NO: 1731568 - DNA, 15 bp, Homo sapiens
ccattaaggtgaagt

SEQ ID NO: 1731569 - DNA, 15 bp, Homo sapiens
cattaaggtgaagtg

SEQ ID NO: 1731570 - DNA, 15 bp, Homo sapiens
attaaggtgaagtgg

SEQ ID NO: 1731571 - DNA, 15 bp, Homo sapiens
ttaaggtgaagtggg

SEQ ID NO: 1731572 - DNA, 15 bp, Homo sapiens
taaggtgaagtgggc

SEQ ID NO: 1731573 - DNA, 15 bp, Homo sapiens
aaggtgaagtgggct

SEQ ID NO: 1731574 - DNA, 15 bp, Homo sapiens
aggtgaagtgggcta

SEQ ID NO: 1731575 - DNA, 15 bp, Homo sapiens
ggtgaagtgggctat

SEQ ID NO: 1731576 - DNA, 15 bp, Homo sapiens
gtgaagtgggctatt

SEQ ID NO: 1731577 - DNA, 15 bp, Homo sapiens
tgaagtgggctattt

SEQ ID NO: 1731578 - DNA, 15 bp, Homo sapiens
gaagtgggctatttc

SEQ ID NO: 1731579 - DNA, 15 bp, Homo sapiens
aagtgggctatttca

SEQ ID NO: 1731580 - DNA, 15 bp, Homo sapiens
agtgggctatttcaa

SEQ ID NO: 1731581 - DNA, 15 bp, Homo sapiens
gtgggctatttcaaa

SEQ ID NO: 1731582 - DNA, 15 bp, Homo sapiens
tgggctatttcaaat

SEQ ID NO: 1731583 - DNA, 15 bp, Homo sapiens
gggctatttcaaata

SEQ ID NO: 1731584 - DNA, 15 bp, Homo sapiens
ggctatttcaaatat

SEQ ID NO: 1731585 - DNA, 15 bp, Homo sapiens
gctatttcaaatatt

SEQ ID NO: 1731586 - DNA, 15 bp, Homo sapiens
ctatttcaaatattc

SEQ ID NO: 1731587 - DNA, 15 bp, Homo sapiens
tatttcaaatattca

SEQ ID NO: 1731588 - DNA, 15 bp, Homo sapiens
atttcaaatattcaa

SEQ ID NO: 1731589 - DNA, 15 bp, Homo sapiens
tttcaaatattcaac

SEQ ID NO: 1731590 - DNA, 15 bp, Homo sapiens
ttcaaatattcaaca

SEQ ID NO: 1731591 - DNA, 15 bp, Homo sapiens
tcaaatattcaacag

SEQ ID NO: 1731592 - DNA, 15 bp, Homo sapiens
caaatattcaacagt

SEQ ID NO: 1731593 - DNA, 15 bp, Homo sapiens
aaatattcaacagtt

SEQ ID NO: 1731594 - DNA, 15 bp, Homo sapiens
aatattcaacagttt

SEQ ID NO: 1731595 - DNA, 15 bp, Homo sapiens
atattcaacagttta

SEQ ID NO: 1731596 - DNA, 15 bp, Homo sapiens
tattcaacagtttac

SEQ ID NO: 1731597 - DNA, 15 bp, Homo sapiens
attcaacagtttaca

SEQ ID NO: 1731598 - DNA, 15 bp, Homo sapiens
ttcaacagtttacat

SEQ ID NO: 1731599 - DNA, 15 bp, Homo sapiens
tcaacagtttacata

SEQ ID NO: 1731600 - DNA, 15 bp, Homo sapiens
caacagtttacatat

SEQ ID NO: 1731601 - DNA, 15 bp, Homo sapiens
aacagtttacatata

SEQ ID NO: 1731602 - DNA, 15 bp, Homo sapiens
acagtttacatataa

SEQ ID NO: 1731603 - DNA, 15 bp, Homo sapiens
cagtttacatataaa

SEQ ID NO: 1731604 - DNA, 15 bp, Homo sapiens
agtttacatataaaa

SEQ ID NO: 1731605 - DNA, 15 bp, Homo sapiens
gtttacatataaaaa

SEQ ID NO: 1731606 - DNA, 15 bp, Homo sapiens
tttacatataaaaaa

SEQ ID NO: 1731607 - DNA, 15 bp, Homo sapiens
ttacatataaaaaag

SEQ ID NO: 1731608 - DNA, 15 bp, Homo sapiens
tacatataaaaaagt

SEQ ID NO: 1731609 - DNA, 15 bp, Homo sapiens
acatataaaaaagtt

SEQ ID NO: 1731610 - DNA, 15 bp, Homo sapiens
catataaaaaagtta

SEQ ID NO: 1731611 - DNA, 15 bp, Homo sapiens
atataaaaaagttat

SEQ ID NO: 1731612 - DNA, 15 bp, Homo sapiens
tataaaaaagttatt

SEQ ID NO: 1731613 - DNA, 15 bp, Homo sapiens
ataaaaaagttattt

SEQ ID NO: 1731614 - DNA, 15 bp, Homo sapiens
taaaaaagttatttt

SEQ ID NO: 1731615 - DNA, 15 bp, Homo sapiens
aaaaaagttatttta

SEQ ID NO: 1731616 - DNA, 15 bp, Homo sapiens
aaaaagttattttaa

SEQ ID NO: 1731617 - DNA, 15 bp, Homo sapiens
aaaagttattttaag

SEQ ID NO: 1731618 - DNA, 15 bp, Homo sapiens
aaagttattttaaga

SEQ ID NO: 1731619 - DNA, 15 bp, Homo sapiens
aagttattttaagag

SEQ ID NO: 1731620 - DNA, 15 bp, Homo sapiens
agttattttaagagc

SEQ ID NO: 1731621 - DNA, 15 bp, Homo sapiens
gttattttaagagct

SEQ ID NO: 1731622 - DNA, 15 bp, Homo sapiens
ttattttaagagcta

SEQ ID NO: 1731623 - DNA, 15 bp, Homo sapiens
tattttaagagctaa

SEQ ID NO: 1731624 - DNA, 15 bp, Homo sapiens
attttaagagctaag

SEQ ID NO: 1731625 - DNA, 15 bp, Homo sapiens
ttttaagagctaagc

SEQ ID NO: 1731626 - DNA, 15 bp, Homo sapiens
tttaagagctaagcg

SEQ ID NO: 1731627 - DNA, 15 bp, Homo sapiens
ttaagagctaagcgt

SEQ ID NO: 1731628 - DNA, 15 bp, Homo sapiens
taagagctaagcgtc

SEQ ID NO: 1731629 - DNA, 15 bp, Homo sapiens
aagagctaagcgtct

SEQ ID NO: 1731630 - DNA, 15 bp, Homo sapiens
agagctaagcgtctg

SEQ ID NO: 1731631 - DNA, 15 bp, Homo sapiens
gagctaagcgtctgt

SEQ ID NO: 1731632 - DNA, 15 bp, Homo sapiens
agctaagcgtctgta

SEQ ID NO: 1731633 - DNA, 15 bp, Homo sapiens
gctaagcgtctgtat

SEQ ID NO: 1731634 - DNA, 15 bp, Homo sapiens
ctaagcgtctgtatc

SEQ ID NO: 1731635 - DNA, 15 bp, Homo sapiens
taagcgtctgtatcc

SEQ ID NO: 1731636 - DNA, 15 bp, Homo sapiens
aagcgtctgtatcca

SEQ ID NO: 1731637 - DNA, 15 bp, Homo sapiens
agcgtctgtatccac

SEQ ID NO: 1731638 - DNA, 15 bp, Homo sapiens
gcgtctgtatccact

SEQ ID NO: 1731639 - DNA, 15 bp, Homo sapiens
cgtctgtatccactg

SEQ ID NO: 1731640 - DNA, 15 bp, Homo sapiens
gtctgtatccactga

SEQ ID NO: 1731641 - DNA, 15 bp, Homo sapiens
tctgtatccactgat

SEQ ID NO: 1731642 - DNA, 15 bp, Homo sapiens
ctgtatccactgata

SEQ ID NO: 1731643 - DNA, 15 bp, Homo sapiens
tgtatccactgatag

SEQ ID NO: 1731644 - DNA, 15 bp, Homo sapiens
gtatccactgatagc

SEQ ID NO: 1731645 - DNA, 15 bp, Homo sapiens
tatccactgatagca

SEQ ID NO: 1731646 - DNA, 15 bp, Homo sapiens
atccactgatagcaa

SEQ ID NO: 1731647 - DNA, 15 bp, Homo sapiens
tccactgatagcaat

SEQ ID NO: 1731648 - DNA, 15 bp, Homo sapiens
ccactgatagcaatg

SEQ ID NO: 1731649 - DNA, 15 bp, Homo sapiens
cactgatagcaatgc

SEQ ID NO: 1731650 - DNA, 15 bp, Homo sapiens
actgatagcaatgca

SEQ ID NO: 1731651 - DNA, 15 bp, Homo sapiens
ctgatagcaatgcaa

SEQ ID NO: 1731652 - DNA, 15 bp, Homo sapiens
tgatagcaatgcaac

SEQ ID NO: 1731653 - DNA, 15 bp, Homo sapiens
gatagcaatgcaaca

SEQ ID NO: 1731654 - DNA, 15 bp, Homo sapiens
atagcaatgcaacac

SEQ ID NO: 1731655 - DNA, 15 bp, Homo sapiens
tagcaatgcaacacc

SEQ ID NO: 1731656 - DNA, 15 bp, Homo sapiens
agcaatgcaacacct

SEQ ID NO: 1731657 - DNA, 15 bp, Homo sapiens
gcaatgcaacaccta

SEQ ID NO: 1731658 - DNA, 15 bp, Homo sapiens
caatgcaacacctag

SEQ ID NO: 1731659 - DNA, 15 bp, Homo sapiens
aatgcaacacctagt

SEQ ID NO: 1731660 - DNA, 15 bp, Homo sapiens
atgcaacacctagtt

SEQ ID NO: 1731661 - DNA, 15 bp, Homo sapiens
tgcaacacctagttt

SEQ ID NO: 1731662 - DNA, 15 bp, Homo sapiens
gcaacacctagttta

SEQ ID NO: 1731663 - DNA, 15 bp, Homo sapiens
caacacctagtttat

SEQ ID NO: 1731664 - DNA, 15 bp, Homo sapiens
aacacctagtttatg

SEQ ID NO: 1731665 - DNA, 15 bp, Homo sapiens
acacctagtttatga

SEQ ID NO: 1731666 - DNA, 15 bp, Homo sapiens
cacctagtttatgat

SEQ ID NO: 1731667 - DNA, 15 bp, Homo sapiens
acctagtttatgatg

SEQ ID NO: 1731668 - DNA, 15 bp, Homo sapiens
cctagtttatgatga

SEQ ID NO: 1731669 - DNA, 15 bp, Homo sapiens
ctagtttatgatgac

SEQ ID NO: 1731670 - DNA, 15 bp, Homo sapiens
tagtttatgatgact

SEQ ID NO: 1731671 - DNA, 15 bp, Homo sapiens
agtttatgatgactt

SEQ ID NO: 1731672 - DNA, 15 bp, Homo sapiens
gtttatgatgacttg

SEQ ID NO: 1731673 - DNA, 15 bp, Homo sapiens
tttatgatgacttga

SEQ ID NO: 1731674 - DNA, 15 bp, Homo sapiens
ttatgatgacttgaa

SEQ ID NO: 1731675 - DNA, 15 bp, Homo sapiens
tatgatgacttgaaa

SEQ ID NO: 1731676 - DNA, 15 bp, Homo sapiens
atgatgacttgaaag

SEQ ID NO: 1731677 - DNA, 15 bp, Homo sapiens
tgatgacttgaaaga

SEQ ID NO: 1731678 - DNA, 15 bp, Homo sapiens
gatgacttgaaagaa

SEQ ID NO: 1731679 - DNA, 15 bp, Homo sapiens
atgacttgaaagaaa

SEQ ID NO: 1731680 - DNA, 15 bp, Homo sapiens
tgacttgaaagaaaa

SEQ ID NO: 1731681 - DNA, 15 bp, Homo sapiens
gacttgaaagaaaac

SEQ ID NO: 1731682 - DNA, 15 bp, Homo sapiens
acttgaaagaaaaca

SEQ ID NO: 1731683 - DNA, 15 bp, Homo sapiens
cttgaaagaaaacaa

SEQ ID NO: 1731684 - DNA, 15 bp, Homo sapiens
ttgaaagaaaacaaa

SEQ ID NO: 1731685 - DNA, 15 bp, Homo sapiens
tgaaagaaaacaaat

SEQ ID NO: 1731686 - DNA, 15 bp, Homo sapiens
gaaagaaaacaaatg

SEQ ID NO: 1731687 - DNA, 15 bp, Homo sapiens
aaagaaaacaaatgc

SEQ ID NO: 1731688 - DNA, 15 bp, Homo sapiens
aagaaaacaaatgcc

SEQ ID NO: 1731689 - DNA, 15 bp, Homo sapiens
agaaaacaaatgccc

SEQ ID NO: 1731690 - DNA, 15 bp, Homo sapiens
gaaaacaaatgccca

SEQ ID NO: 1731691 - DNA, 15 bp, Homo sapiens
aaaacaaatgcccat

SEQ ID NO: 1731692 - DNA, 15 bp, Homo sapiens
aaacaaatgcccatg

SEQ ID NO: 1731693 - DNA, 15 bp, Homo sapiens
aacaaatgcccatga

SEQ ID NO: 1731694 - DNA, 15 bp, Homo sapiens
acaaatgcccatgaa

SEQ ID NO: 1731695 - DNA, 15 bp, Homo sapiens
caaatgcccatgaag

SEQ ID NO: 1731696 - DNA, 15 bp, Homo sapiens
aaatgcccatgaaga

SEQ ID NO: 1731697 - DNA, 15 bp, Homo sapiens
aatgcccatgaagaa

SEQ ID NO: 1731698 - DNA, 15 bp, Homo sapiens
atgcccatgaagaaa

SEQ ID NO: 1731699 - DNA, 15 bp, Homo sapiens
tgcccatgaagaaaa

SEQ ID NO: 1731700 - DNA, 15 bp, Homo sapiens
gcccatgaagaaaaa

SEQ ID NO: 1731701 - DNA, 15 bp, Homo sapiens
cccatgaagaaaaaa

SEQ ID NO: 1731702 - DNA, 15 bp, Homo sapiens
ccatgaagaaaaaag

SEQ ID NO: 1731703 - DNA, 15 bp, Homo sapiens
catgaagaaaaaagc

SEQ ID NO: 1731704 - DNA, 15 bp, Homo sapiens
atgaagaaaaaagct

SEQ ID NO: 1731705 - DNA, 15 bp, Homo sapiens
tgaagaaaaaagctg

SEQ ID NO: 1731706 - DNA, 15 bp, Homo sapiens
gaagaaaaaagctgt

SEQ ID NO: 1731707 - DNA, 15 bp, Homo sapiens
aagaaaaaagctgta

SEQ ID NO: 1731708 - DNA, 15 bp, Homo sapiens
agaaaaaagctgtat

SEQ ID NO: 1731709 - DNA, 15 bp, Homo sapiens
gaaaaaagctgtatt

SEQ ID NO: 1731710 - DNA, 15 bp, Homo sapiens
aaaaaagctgtattt

SEQ ID NO: 1731711 - DNA, 15 bp, Homo sapiens
aaaaagctgtatttt

SEQ ID NO: 1731712 - DNA, 15 bp, Homo sapiens
aaaagctgtatttta

SEQ ID NO: 1731713 - DNA, 15 bp, Homo sapiens
aaagctgtattttaa

SEQ ID NO: 1731714 - DNA, 15 bp, Homo sapiens
aagctgtattttaat

SEQ ID NO: 1731715 - DNA, 15 bp, Homo sapiens
agctgtattttaatt

SEQ ID NO: 1731716 - DNA, 15 bp, Homo sapiens
gctgtattttaattt

SEQ ID NO: 1731717 - DNA, 15 bp, Homo sapiens
ctgtattttaatttt

SEQ ID NO: 1731718 - DNA, 15 bp, Homo sapiens
tgtattttaatttta

SEQ ID NO: 1731719 - DNA, 15 bp, Homo sapiens
gtattttaattttat

SEQ ID NO: 1731720 - DNA, 15 bp, Homo sapiens
tattttaattttatc

SEQ ID NO: 1731721 - DNA, 15 bp, Homo sapiens
attttaattttatct

SEQ ID NO: 1731722 - DNA, 15 bp, Homo sapiens
ttttaattttatcta

SEQ ID NO: 1731723 - DNA, 15 bp, Homo sapiens
tttaattttatctaa

SEQ ID NO: 1731724 - DNA, 15 bp, Homo sapiens
ttaattttatctaaa

SEQ ID NO: 1731725 - DNA, 15 bp, Homo sapiens
taattttatctaaat

SEQ ID NO: 1731726 - DNA, 15 bp, Homo sapiens
aattttatctaaatg

SEQ ID NO: 1731727 - DNA, 15 bp, Homo sapiens
attttatctaaatgt

SEQ ID NO: 1731728 - DNA, 15 bp, Homo sapiens
ttttatctaaatgta

SEQ ID NO: 1731729 - DNA, 15 bp, Homo sapiens
tttatctaaatgtac

SEQ ID NO: 1731730 - DNA, 15 bp, Homo sapiens
ttatctaaatgtact

SEQ ID NO: 1731731 - DNA, 15 bp, Homo sapiens
tatctaaatgtactt

SEQ ID NO: 1731732 - DNA, 15 bp, Homo sapiens
atctaaatgtacttt

SEQ ID NO: 1731733 - DNA, 15 bp, Homo sapiens
tctaaatgtactttc

SEQ ID NO: 1731734 - DNA, 15 bp, Homo sapiens
ctaaatgtactttca

SEQ ID NO: 1731735 - DNA, 15 bp, Homo sapiens
taaatgtactttcag

SEQ ID NO: 1731736 - DNA, 15 bp, Homo sapiens
aaatgtactttcagt

SEQ ID NO: 1731737 - DNA, 15 bp, Homo sapiens
aatgtactttcagtc

SEQ ID NO: 1731738 - DNA, 15 bp, Homo sapiens
atgtactttcagtca

SEQ ID NO: 1731739 - DNA, 15 bp, Homo sapiens
tgtactttcagtcaa

SEQ ID NO: 1731740 - DNA, 15 bp, Homo sapiens
gtactttcagtcaat

SEQ ID NO: 1731741 - DNA, 15 bp, Homo sapiens
tactttcagtcaata

SEQ ID NO: 1731742 - DNA, 15 bp, Homo sapiens
actttcagtcaatag

SEQ ID NO: 1731743 - DNA, 15 bp, Homo sapiens
ctttcagtcaatagt

SEQ ID NO: 1731744 - DNA, 15 bp, Homo sapiens
tttcagtcaatagtt

SEQ ID NO: 1731745 - DNA, 15 bp, Homo sapiens
ttcagtcaatagttc

SEQ ID NO: 1731746 - DNA, 15 bp, Homo sapiens
tcagtcaatagttca

SEQ ID NO: 1731747 - DNA, 15 bp, Homo sapiens
cagtcaatagttcag

SEQ ID NO: 1731748 - DNA, 15 bp, Homo sapiens
agtcaatagttcagt

SEQ ID NO: 1731749 - DNA, 15 bp, Homo sapiens
gtcaatagttcagta

SEQ ID NO: 1731750 - DNA, 15 bp, Homo sapiens
tcaatagttcagtaa

SEQ ID NO: 1731751 - DNA, 15 bp, Homo sapiens
caatagttcagtaac

SEQ ID NO: 1731752 - DNA, 15 bp, Homo sapiens
aatagttcagtaaca

SEQ ID NO: 1731753 - DNA, 15 bp, Homo sapiens
atagttcagtaacat

SEQ ID NO: 1731754 - DNA, 15 bp, Homo sapiens
tagttcagtaacatt

SEQ ID NO: 1731755 - DNA, 15 bp, Homo sapiens
agttcagtaacattt

SEQ ID NO: 1731756 - DNA, 15 bp, Homo sapiens
gttcagtaacatttt

SEQ ID NO: 1731757 - DNA, 15 bp, Homo sapiens
ttcagtaacattttc

SEQ ID NO: 1731758 - DNA, 15 bp, Homo sapiens
tcagtaacattttcc

SEQ ID NO: 1731759 - DNA, 15 bp, Homo sapiens
cagtaacattttcct

SEQ ID NO: 1731760 - DNA, 15 bp, Homo sapiens
agtaacattttcctc

SEQ ID NO: 1731761 - DNA, 15 bp, Homo sapiens
gtaacattttcctcc

SEQ ID NO: 1731762 - DNA, 15 bp, Homo sapiens
taacattttcctccc

SEQ ID NO: 1731763 - DNA, 15 bp, Homo sapiens
aacattttcctccca

SEQ ID NO: 1731764 - DNA, 15 bp, Homo sapiens
acattttcctcccaa

SEQ ID NO: 1731765 - DNA, 15 bp, Homo sapiens
cattttcctcccaat

SEQ ID NO: 1731766 - DNA, 15 bp, Homo sapiens
attttcctcccaata

SEQ ID NO: 1731767 - DNA, 15 bp, Homo sapiens
ttttcctcccaatac

SEQ ID NO: 1731768 - DNA, 15 bp, Homo sapiens
tttcctcccaataca

SEQ ID NO: 1731769 - DNA, 15 bp, Homo sapiens
ttcctcccaatacaa

SEQ ID NO: 1731770 - DNA, 15 bp, Homo sapiens
tcctcccaatacaat

SEQ ID NO: 1731771 - DNA, 15 bp, Homo sapiens
cctcccaatacaata

SEQ ID NO: 1731772 - DNA, 15 bp, Homo sapiens
ctcccaatacaatac

SEQ ID NO: 1731773 - DNA, 15 bp, Homo sapiens
tcccaatacaatact

SEQ ID NO: 1731774 - DNA, 15 bp, Homo sapiens
cccaatacaatactc

SEQ ID NO: 1731775 - DNA, 15 bp, Homo sapiens
ccaatacaatactcc

SEQ ID NO: 1731776 - DNA, 15 bp, Homo sapiens
caatacaatactccc

SEQ ID NO: 1731777 - DNA, 15 bp, Homo sapiens
aatacaatactccct

SEQ ID NO: 1731778 - DNA, 15 bp, Homo sapiens
atacaatactccctc

SEQ ID NO: 1731779 - DNA, 15 bp, Homo sapiens
tacaatactccctct

SEQ ID NO: 1731780 - DNA, 15 bp, Homo sapiens
acaatactccctctc

SEQ ID NO: 1731781 - DNA, 15 bp, Homo sapiens
caatactccctctct

SEQ ID NO: 1731782 - DNA, 15 bp, Homo sapiens
aatactccctctctc

SEQ ID NO: 1731783 - DNA, 15 bp, Homo sapiens
atactccctctctct

SEQ ID NO: 1731784 - DNA, 15 bp, Homo sapiens
tactccctctctcta

SEQ ID NO: 1731785 - DNA, 15 bp, Homo sapiens
actccctctctctat

SEQ ID NO: 1731786 - DNA, 15 bp, Homo sapiens
ctccctctctctata

SEQ ID NO: 1731787 - DNA, 15 bp, Homo sapiens
tccctctctctataa

SEQ ID NO: 1731788 - DNA, 15 bp, Homo sapiens
ccctctctctataag

SEQ ID NO: 1731789 - DNA, 15 bp, Homo sapiens
cctctctctataagg

SEQ ID NO: 1731790 - DNA, 15 bp, Homo sapiens
ctctctctataaggc

SEQ ID NO: 1731791 - DNA, 15 bp, Homo sapiens
tctctctataaggct

SEQ ID NO: 1731792 - DNA, 15 bp, Homo sapiens
ctctctataaggcta

SEQ ID NO: 1731793 - DNA, 15 bp, Homo sapiens
tctctataaggctat

SEQ ID NO: 1731794 - DNA, 15 bp, Homo sapiens
ctctataaggctatt

SEQ ID NO: 1731795 - DNA, 15 bp, Homo sapiens
tctataaggctattc

SEQ ID NO: 1731796 - DNA, 15 bp, Homo sapiens
ctataaggctattcc

SEQ ID NO: 1731797 - DNA, 15 bp, Homo sapiens
tataaggctattcct

SEQ ID NO: 1731798 - DNA, 15 bp, Homo sapiens
ataaggctattcctg

SEQ ID NO: 1731799 - DNA, 15 bp, Homo sapiens
taaggctattcctgg

SEQ ID NO: 1731800 - DNA, 15 bp, Homo sapiens
aaggctattcctggg

SEQ ID NO: 1731801 - DNA, 15 bp, Homo sapiens
aggctattcctggga

SEQ ID NO: 1731802 - DNA, 15 bp, Homo sapiens
ggctattcctgggag

SEQ ID NO: 1731803 - DNA, 15 bp, Homo sapiens
gctattcctgggagc

SEQ ID NO: 1731804 - DNA, 15 bp, Homo sapiens
ctattcctgggagcc

SEQ ID NO: 1731805 - DNA, 15 bp, Homo sapiens
tattcctgggagcca

SEQ ID NO: 1731806 - DNA, 15 bp, Homo sapiens
attcctgggagccag

SEQ ID NO: 1731807 - DNA, 15 bp, Homo sapiens
ttcctgggagccaga

SEQ ID NO: 1731808 - DNA, 15 bp, Homo sapiens
tcctgggagccagac

SEQ ID NO: 1731809 - DNA, 15 bp, Homo sapiens
cctgggagccagaca

SEQ ID NO: 1731810 - DNA, 15 bp, Homo sapiens
ctgggagccagacaa

SEQ ID NO: 1731811 - DNA, 15 bp, Homo sapiens
tgggagccagacaag

SEQ ID NO: 1731812 - DNA, 15 bp, Homo sapiens
gggagccagacaagt

SEQ ID NO: 1731813 - DNA, 15 bp, Homo sapiens
ggagccagacaagtt

SEQ ID NO: 1731814 - DNA, 15 bp, Homo sapiens
gagccagacaagttt

SEQ ID NO: 1731815 - DNA, 15 bp, Homo sapiens
agccagacaagttta

SEQ ID NO: 1731816 - DNA, 15 bp, Homo sapiens
gccagacaagtttag

SEQ ID NO: 1731817 - DNA, 15 bp, Homo sapiens
ccagacaagtttagg

SEQ ID NO: 1731818 - DNA, 15 bp, Homo sapiens
cagacaagtttaggt

SEQ ID NO: 1731819 - DNA, 15 bp, Homo sapiens
agacaagtttaggta

SEQ ID NO: 1731820 - DNA, 15 bp, Homo sapiens
gacaagtttaggtaa

SEQ ID NO: 1731821 - DNA, 15 bp, Homo sapiens
acaagtttaggtaat

SEQ ID NO: 1731822 - DNA, 15 bp, Homo sapiens
caagtttaggtaata

SEQ ID NO: 1731823 - DNA, 15 bp, Homo sapiens
aagtttaggtaataa

SEQ ID NO: 1731824 - DNA, 15 bp, Homo sapiens
agtttaggtaataag

SEQ ID NO: 1731825 - DNA, 15 bp, Homo sapiens
gtttaggtaataagg

SEQ ID NO: 1731826 - DNA, 15 bp, Homo sapiens
tttaggtaataaggg

SEQ ID NO: 1731827 - DNA, 15 bp, Homo sapiens
ttaggtaataaggga

SEQ ID NO: 1731828 - DNA, 15 bp, Homo sapiens
taggtaataagggag

SEQ ID NO: 1731829 - DNA, 15 bp, Homo sapiens
aggtaataagggagt

SEQ ID NO: 1731830 - DNA, 15 bp, Homo sapiens
ggtaataagggagtt

SEQ ID NO: 1731831 - DNA, 15 bp, Homo sapiens
gtaataagggagtta

SEQ ID NO: 1731832 - DNA, 15 bp, Homo sapiens
taataagggagttaa

SEQ ID NO: 1731833 - DNA, 15 bp, Homo sapiens
aataagggagttaag

SEQ ID NO: 1731834 - DNA, 15 bp, Homo sapiens
ataagggagttaaga

SEQ ID NO: 1731835 - DNA, 15 bp, Homo sapiens
taagggagttaagag

SEQ ID NO: 1731836 - DNA, 15 bp, Homo sapiens
aagggagttaagaga

SEQ ID NO: 1731837 - DNA, 15 bp, Homo sapiens
agggagttaagagag

SEQ ID NO: 1731838 - DNA, 15 bp, Homo sapiens
gggagttaagagagt

SEQ ID NO: 1731839 - DNA, 15 bp, Homo sapiens
ggagttaagagagta

SEQ ID NO: 1731840 - DNA, 15 bp, Homo sapiens
gagttaagagagtaa

SEQ ID NO: 1731841 - DNA, 15 bp, Homo sapiens
agttaagagagtaac

SEQ ID NO: 1731842 - DNA, 15 bp, Homo sapiens
gttaagagagtaact

SEQ ID NO: 1731843 - DNA, 15 bp, Homo sapiens
ttaagagagtaactg

SEQ ID NO: 1731844 - DNA, 15 bp, Homo sapiens
taagagagtaactgc

SEQ ID NO: 1731845 - DNA, 15 bp, Homo sapiens
aagagagtaactgct

SEQ ID NO: 1731846 - DNA, 15 bp, Homo sapiens
agagagtaactgctt

SEQ ID NO: 1731847 - DNA, 15 bp, Homo sapiens
gagagtaactgcttg

SEQ ID NO: 1731848 - DNA, 15 bp, Homo sapiens
agagtaactgcttgc

SEQ ID NO: 1731849 - DNA, 15 bp, Homo sapiens
gagtaactgcttgca

SEQ ID NO: 1731850 - DNA, 15 bp, Homo sapiens
agtaactgcttgcag

SEQ ID NO: 1731851 - DNA, 15 bp, Homo sapiens
gtaactgcttgcagt

SEQ ID NO: 1731852 - DNA, 15 bp, Homo sapiens
taactgcttgcagtt

SEQ ID NO: 1731853 - DNA, 15 bp, Homo sapiens
aactgcttgcagttt

SEQ ID NO: 1731854 - DNA, 15 bp, Homo sapiens
actgcttgcagtttt

SEQ ID NO: 1731855 - DNA, 15 bp, Homo sapiens
ctgcttgcagtttta

SEQ ID NO: 1731856 - DNA, 15 bp, Homo sapiens
tgcttgcagttttaa

SEQ ID NO: 1731857 - DNA, 15 bp, Homo sapiens
gcttgcagttttaaa

SEQ ID NO: 1731858 - DNA, 15 bp, Homo sapiens
cttgcagttttaaat

SEQ ID NO: 1731859 - DNA, 15 bp, Homo sapiens
ttgcagttttaaata

SEQ ID NO: 1731860 - DNA, 15 bp, Homo sapiens
tgcagttttaaatag

SEQ ID NO: 1731861 - DNA, 15 bp, Homo sapiens
gcagttttaaataga

SEQ ID NO: 1731862 - DNA, 15 bp, Homo sapiens
cagttttaaatagac

SEQ ID NO: 1731863 - DNA, 15 bp, Homo sapiens
agttttaaatagaca

SEQ ID NO: 1731864 - DNA, 15 bp, Homo sapiens
gttttaaatagacaa

SEQ ID NO: 1731865 - DNA, 15 bp, Homo sapiens
ttttaaatagacaat

SEQ ID NO: 1731866 - DNA, 15 bp, Homo sapiens
tttaaatagacaatt

SEQ ID NO: 1731867 - DNA, 15 bp, Homo sapiens
ttaaatagacaatta

SEQ ID NO: 1731868 - DNA, 15 bp, Homo sapiens
taaatagacaattaa

SEQ ID NO: 1731869 - DNA, 15 bp, Homo sapiens
aaatagacaattaac

SEQ ID NO: 1731870 - DNA, 15 bp, Homo sapiens
aatagacaattaact

SEQ ID NO: 1731871 - DNA, 15 bp, Homo sapiens
atagacaattaactt

SEQ ID NO: 1731872 - DNA, 15 bp, Homo sapiens
tagacaattaacttt

SEQ ID NO: 1731873 - DNA, 15 bp, Homo sapiens
agacaattaactttt

SEQ ID NO: 1731874 - DNA, 15 bp, Homo sapiens
gacaattaacttttt

SEQ ID NO: 1731875 - DNA, 15 bp, Homo sapiens
acaattaactttttg

SEQ ID NO: 1731876 - DNA, 15 bp, Homo sapiens
caattaactttttgc

SEQ ID NO: 1731877 - DNA, 15 bp, Homo sapiens
aattaactttttgct

SEQ ID NO: 1731878 - DNA, 15 bp, Homo sapiens
attaactttttgctt

SEQ ID NO: 1731879 - DNA, 15 bp, Homo sapiens
ttaactttttgcttc

SEQ ID NO: 1731880 - DNA, 15 bp, Homo sapiens
taactttttgcttcc

SEQ ID NO: 1731881 - DNA, 15 bp, Homo sapiens
aactttttgcttccc

SEQ ID NO: 1731882 - DNA, 15 bp, Homo sapiens
actttttgcttccct

SEQ ID NO: 1731883 - DNA, 15 bp, Homo sapiens
ctttttgcttccctc

SEQ ID NO: 1731884 - DNA, 15 bp, Homo sapiens
tttttgcttccctct

SEQ ID NO: 1731885 - DNA, 15 bp, Homo sapiens
ttttgcttccctctt

SEQ ID NO: 1731886 - DNA, 15 bp, Homo sapiens
tttgcttccctctta

SEQ ID NO: 1731887 - DNA, 15 bp, Homo sapiens
ttgcttccctcttaa

SEQ ID NO: 1731888 - DNA, 15 bp, Homo sapiens
tgcttccctcttaat

SEQ ID NO: 1731889 - DNA, 15 bp, Homo sapiens
gcttccctcttaatg

SEQ ID NO: 1731890 - DNA, 15 bp, Homo sapiens
cttccctcttaatgt

SEQ ID NO: 1731891 - DNA, 15 bp, Homo sapiens
ttccctcttaatgtg

SEQ ID NO: 1731892 - DNA, 15 bp, Homo sapiens
tccctcttaatgtgc

SEQ ID NO: 1731893 - DNA, 15 bp, Homo sapiens
ccctcttaatgtgct

SEQ ID NO: 1731894 - DNA, 15 bp, Homo sapiens
cctcttaatgtgcta

SEQ ID NO: 1731895 - DNA, 15 bp, Homo sapiens
ctcttaatgtgctaa

SEQ ID NO: 1731896 - DNA, 15 bp, Homo sapiens
tcttaatgtgctaat

SEQ ID NO: 1731897 - DNA, 15 bp, Homo sapiens
cttaatgtgctaata

SEQ ID NO: 1731898 - DNA, 15 bp, Homo sapiens
ttaatgtgctaatag

SEQ ID NO: 1731899 - DNA, 15 bp, Homo sapiens
taatgtgctaatagt

SEQ ID NO: 1731900 - DNA, 15 bp, Homo sapiens
aatgtgctaatagtt

SEQ ID NO: 1731901 - DNA, 15 bp, Homo sapiens
atgtgctaatagttg

SEQ ID NO: 1731902 - DNA, 15 bp, Homo sapiens
tgtgctaatagttgt

SEQ ID NO: 1731903 - DNA, 15 bp, Homo sapiens
gtgctaatagttgtg

SEQ ID NO: 1731904 - DNA, 15 bp, Homo sapiens
tgctaatagttgtgt

SEQ ID NO: 1731905 - DNA, 15 bp, Homo sapiens
gctaatagttgtgtc

SEQ ID NO: 1731906 - DNA, 15 bp, Homo sapiens
ctaatagttgtgtct

SEQ ID NO: 1731907 - DNA, 15 bp, Homo sapiens
taatagttgtgtcta

SEQ ID NO: 1731908 - DNA, 15 bp, Homo sapiens
aatagttgtgtctaa

SEQ ID NO: 1731909 - DNA, 15 bp, Homo sapiens
atagttgtgtctaaa

SEQ ID NO: 1731910 - DNA, 15 bp, Homo sapiens
tagttgtgtctaaaa

SEQ ID NO: 1731911 - DNA, 15 bp, Homo sapiens
agttgtgtctaaaaa

SEQ ID NO: 1731912 - DNA, 15 bp, Homo sapiens
gttgtgtctaaaaaa

SEQ ID NO: 1731913 - DNA, 15 bp, Homo sapiens
ttgtgtctaaaaaaa

SEQ ID NO: 1731914 - DNA, 15 bp, Homo sapiens
tgtgtctaaaaaaat

SEQ ID NO: 1731915 - DNA, 15 bp, Homo sapiens
gtgtctaaaaaaata

SEQ ID NO: 1731916 - DNA, 15 bp, Homo sapiens
tgtctaaaaaaatag

SEQ ID NO: 1731917 - DNA, 15 bp, Homo sapiens
gtctaaaaaaatagg

SEQ ID NO: 1731918 - DNA, 15 bp, Homo sapiens
tctaaaaaaataggc

SEQ ID NO: 1731919 - DNA, 15 bp, Homo sapiens
ctaaaaaaataggca

SEQ ID NO: 1731920 - DNA, 15 bp, Homo sapiens
taaaaaaataggcaa

SEQ ID NO: 1731921 - DNA, 15 bp, Homo sapiens
aaaaaaataggcaat

SEQ ID NO: 1731922 - DNA, 15 bp, Homo sapiens
aaaaaataggcaatt

SEQ ID NO: 1731923 - DNA, 15 bp, Homo sapiens
aaaaataggcaattc

SEQ ID NO: 1731924 - DNA, 15 bp, Homo sapiens
aaaataggcaattct

SEQ ID NO: 1731925 - DNA, 15 bp, Homo sapiens
aaataggcaattctt

SEQ ID NO: 1731926 - DNA, 15 bp, Homo sapiens
aataggcaattctta

SEQ ID NO: 1731927 - DNA, 15 bp, Homo sapiens
ataggcaattcttaa

SEQ ID NO: 1731928 - DNA, 15 bp, Homo sapiens
taggcaattcttaaa

SEQ ID NO: 1731929 - DNA, 15 bp, Homo sapiens
aggcaattcttaaaa

SEQ ID NO: 1731930 - DNA, 15 bp, Homo sapiens
ggcaattcttaaaaa

SEQ ID NO: 1731931 - DNA, 15 bp, Homo sapiens
gcaattcttaaaaag

SEQ ID NO: 1731932 - DNA, 15 bp, Homo sapiens
caattcttaaaaagg

SEQ ID NO: 1731933 - DNA, 15 bp, Homo sapiens
aattcttaaaaaggt

SEQ ID NO: 1731934 - DNA, 15 bp, Homo sapiens
attcttaaaaaggta

SEQ ID NO: 1731935 - DNA, 15 bp, Homo sapiens
ttcttaaaaaggtac

SEQ ID NO: 1731936 - DNA, 15 bp, Homo sapiens
tcttaaaaaggtacc

SEQ ID NO: 1731937 - DNA, 15 bp, Homo sapiens
cttaaaaaggtacca

SEQ ID NO: 1731938 - DNA, 15 bp, Homo sapiens
ttaaaaaggtaccat

SEQ ID NO: 1731939 - DNA, 15 bp, Homo sapiens
taaaaaggtaccatt

SEQ ID NO: 1731940 - DNA, 15 bp, Homo sapiens
aaaaaggtaccattt

SEQ ID NO: 1731941 - DNA, 15 bp, Homo sapiens
aaaaggtaccatttc

SEQ ID NO: 1731942 - DNA, 15 bp, Homo sapiens
aaaggtaccatttct

SEQ ID NO: 1731943 - DNA, 15 bp, Homo sapiens
aaggtaccatttctg

SEQ ID NO: 1731944 - DNA, 15 bp, Homo sapiens
aggtaccatttctga

SEQ ID NO: 1731945 - DNA, 15 bp, Homo sapiens
ggtaccatttctgat

SEQ ID NO: 1731946 - DNA, 15 bp, Homo sapiens
gtaccatttctgatt

SEQ ID NO: 1731947 - DNA, 15 bp, Homo sapiens
taccatttctgattt

SEQ ID NO: 1731948 - DNA, 15 bp, Homo sapiens
accatttctgatttc

SEQ ID NO: 1731949 - DNA, 15 bp, Homo sapiens
ccatttctgatttct

SEQ ID NO: 1731950 - DNA, 15 bp, Homo sapiens
catttctgatttctt

SEQ ID NO: 1731951 - DNA, 15 bp, Homo sapiens
atttctgatttcttt

SEQ ID NO: 1731952 - DNA, 15 bp, Homo sapiens
tttctgatttcttta

SEQ ID NO: 1731953 - DNA, 15 bp, Homo sapiens
ttctgatttctttat

SEQ ID NO: 1731954 - DNA, 15 bp, Homo sapiens
tctgatttctttatt

SEQ ID NO: 1731955 - DNA, 15 bp, Homo sapiens
ctgatttctttatta

SEQ ID NO: 1731956 - DNA, 15 bp, Homo sapiens
tgatttctttattat

SEQ ID NO: 1731957 - DNA, 15 bp, Homo sapiens
gatttctttattatc

SEQ ID NO: 1731958 - DNA, 15 bp, Homo sapiens
atttctttattatct

SEQ ID NO: 1731959 - DNA, 15 bp, Homo sapiens
tttctttattatctg

SEQ ID NO: 1731960 - DNA, 15 bp, Homo sapiens
ttctttattatctgt

SEQ ID NO: 1731961 - DNA, 15 bp, Homo sapiens
tctttattatctgta

SEQ ID NO: 1731962 - DNA, 15 bp, Homo sapiens
ctttattatctgtaa

SEQ ID NO: 1731963 - DNA, 15 bp, Homo sapiens
tttattatctgtaaa

SEQ ID NO: 1731964 - DNA, 15 bp, Homo sapiens
ttattatctgtaaac

SEQ ID NO: 1731965 - DNA, 15 bp, Homo sapiens
tattatctgtaaact

SEQ ID NO: 1731966 - DNA, 15 bp, Homo sapiens
attatctgtaaactt

SEQ ID NO: 1731967 - DNA, 15 bp, Homo sapiens
ttatctgtaaacttt

SEQ ID NO: 1731968 - DNA, 15 bp, Homo sapiens
tatctgtaaactttg

SEQ ID NO: 1731969 - DNA, 15 bp, Homo sapiens
atctgtaaactttgg

SEQ ID NO: 1731970 - DNA, 15 bp, Homo sapiens
tctgtaaactttgga

SEQ ID NO: 1731971 - DNA, 15 bp, Homo sapiens
ctgtaaactttggaa

SEQ ID NO: 1731972 - DNA, 15 bp, Homo sapiens
tgtaaactttggaaa

SEQ ID NO: 1731973 - DNA, 15 bp, Homo sapiens
gtaaactttggaaac

SEQ ID NO: 1731974 - DNA, 15 bp, Homo sapiens
taaactttggaaact

SEQ ID NO: 1731975 - DNA, 15 bp, Homo sapiens
aaactttggaaacta

SEQ ID NO: 1731976 - DNA, 15 bp, Homo sapiens
aactttggaaactaa

SEQ ID NO: 1731977 - DNA, 15 bp, Homo sapiens
actttggaaactaat

SEQ ID NO: 1731978 - DNA, 15 bp, Homo sapiens
ctttggaaactaatc

SEQ ID NO: 1731979 - DNA, 15 bp, Homo sapiens
tttggaaactaatca

SEQ ID NO: 1731980 - DNA, 15 bp, Homo sapiens
ttggaaactaatcac

SEQ ID NO: 1731981 - DNA, 15 bp, Homo sapiens
tggaaactaatcaca

SEQ ID NO: 1731982 - DNA, 15 bp, Homo sapiens
ggaaactaatcacac

SEQ ID NO: 1731983 - DNA, 15 bp, Homo sapiens
gaaactaatcacaca

SEQ ID NO: 1731984 - DNA, 15 bp, Homo sapiens
aaactaatcacacaa

SEQ ID NO: 1731985 - DNA, 15 bp, Homo sapiens
aactaatcacacaaa

SEQ ID NO: 1731986 - DNA, 15 bp, Homo sapiens
actaatcacacaaaa

SEQ ID NO: 1731987 - DNA, 15 bp, Homo sapiens
ctaatcacacaaaac

SEQ ID NO: 1731988 - DNA, 15 bp, Homo sapiens
taatcacacaaaact

SEQ ID NO: 1731989 - DNA, 15 bp, Homo sapiens
aatcacacaaaacta

SEQ ID NO: 1731990 - DNA, 15 bp, Homo sapiens
atcacacaaaactac

SEQ ID NO: 1731991 - DNA, 15 bp, Homo sapiens
tcacacaaaactacc

SEQ ID NO: 1731992 - DNA, 15 bp, Homo sapiens
cacacaaaactacca

SEQ ID NO: 1731993 - DNA, 15 bp, Homo sapiens
acacaaaactaccaa

SEQ ID NO: 1731994 - DNA, 15 bp, Homo sapiens
cacaaaactaccaaa

SEQ ID NO: 1731995 - DNA, 15 bp, Homo sapiens
acaaaactaccaaat

SEQ ID NO: 1731996 - DNA, 15 bp, Homo sapiens
caaaactaccaaatt

SEQ ID NO: 1731997 - DNA, 15 bp, Homo sapiens
aaaactaccaaatta

SEQ ID NO: 1731998 - DNA, 15 bp, Homo sapiens
aaactaccaaattag

SEQ ID NO: 1731999 - DNA, 15 bp, Homo sapiens
aactaccaaattagc

SEQ ID NO: 1732000 - DNA, 15 bp, Homo sapiens
actaccaaattagca

SEQ ID NO: 1732001 - DNA, 15 bp, Homo sapiens
ctaccaaattagcaa

SEQ ID NO: 1732002 - DNA, 15 bp, Homo sapiens
taccaaattagcaaa

SEQ ID NO: 1732003 - DNA, 15 bp, Homo sapiens
accaaattagcaaat

SEQ ID NO: 1732004 - DNA, 15 bp, Homo sapiens
ccaaattagcaaatg

SEQ ID NO: 1732005 - DNA, 15 bp, Homo sapiens
caaattagcaaatgt

SEQ ID NO: 1732006 - DNA, 15 bp, Homo sapiens
aaattagcaaatgtc

SEQ ID NO: 1732007 - DNA, 15 bp, Homo sapiens
aattagcaaatgtct

SEQ ID NO: 1732008 - DNA, 15 bp, Homo sapiens
attagcaaatgtctt

SEQ ID NO: 1732009 - DNA, 15 bp, Homo sapiens
ttagcaaatgtcttg

SEQ ID NO: 1732010 - DNA, 15 bp, Homo sapiens
tagcaaatgtcttga

SEQ ID NO: 1732011 - DNA, 15 bp, Homo sapiens
agcaaatgtcttgaa

SEQ ID NO: 1732012 - DNA, 15 bp, Homo sapiens
gcaaatgtcttgaaa

SEQ ID NO: 1732013 - DNA, 15 bp, Homo sapiens
caaatgtcttgaaat

SEQ ID NO: 1732014 - DNA, 15 bp, Homo sapiens
aaatgtcttgaaatc

SEQ ID NO: 1732015 - DNA, 15 bp, Homo sapiens
aatgtcttgaaatct

SEQ ID NO: 1732016 - DNA, 15 bp, Homo sapiens
atgtcttgaaatctg

SEQ ID NO: 1732017 - DNA, 15 bp, Homo sapiens
tgtcttgaaatctgt

SEQ ID NO: 1732018 - DNA, 15 bp, Homo sapiens
gtcttgaaatctgta

SEQ ID NO: 1732019 - DNA, 15 bp, Homo sapiens
tcttgaaatctgtat

SEQ ID NO: 1732020 - DNA, 15 bp, Homo sapiens
cttgaaatctgtata

SEQ ID NO: 1732021 - DNA, 15 bp, Homo sapiens
ttgaaatctgtatac

SEQ ID NO: 1732022 - DNA, 15 bp, Homo sapiens
tgaaatctgtataca

SEQ ID NO: 1732023 - DNA, 15 bp, Homo sapiens
gaaatctgtatacaa

SEQ ID NO: 1732024 - DNA, 15 bp, Homo sapiens
aaatctgtatacaaa

SEQ ID NO: 1732025 - DNA, 15 bp, Homo sapiens
aatctgtatacaaaa

SEQ ID NO: 1732026 - DNA, 15 bp, Homo sapiens
atctgtatacaaaac

SEQ ID NO: 1732027 - DNA, 15 bp, Homo sapiens
tctgtatacaaaaca

SEQ ID NO: 1732028 - DNA, 15 bp, Homo sapiens
ctgtatacaaaacat

SEQ ID NO: 1732029 - DNA, 15 bp, Homo sapiens
tgtatacaaaacata

SEQ ID NO: 1732030 - DNA, 15 bp, Homo sapiens
gtatacaaaacataa

SEQ ID NO: 1732031 - DNA, 15 bp, Homo sapiens
tatacaaaacataaa

SEQ ID NO: 1732032 - DNA, 15 bp, Homo sapiens
atacaaaacataaat

SEQ ID NO: 1732033 - DNA, 15 bp, Homo sapiens
tacaaaacataaatt

SEQ ID NO: 1732034 - DNA, 15 bp, Homo sapiens
acaaaacataaatta

SEQ ID NO: 1732035 - DNA, 15 bp, Homo sapiens
caaaacataaattac

SEQ ID NO: 1732036 - DNA, 15 bp, Homo sapiens
aaaacataaattacc

SEQ ID NO: 1732037 - DNA, 15 bp, Homo sapiens
aaacataaattacct

SEQ ID NO: 1732038 - DNA, 15 bp, Homo sapiens
aacataaattacctc

SEQ ID NO: 1732039 - DNA, 15 bp, Homo sapiens
acataaattacctct

SEQ ID NO: 1732040 - DNA, 15 bp, Homo sapiens
cataaattacctcta

SEQ ID NO: 1732041 - DNA, 15 bp, Homo sapiens
ataaattacctctaa

SEQ ID NO: 1732042 - DNA, 15 bp, Homo sapiens
taaattacctctaat

SEQ ID NO: 1732043 - DNA, 15 bp, Homo sapiens
aaattacctctaatt

SEQ ID NO: 1732044 - DNA, 15 bp, Homo sapiens
aattacctctaattt

SEQ ID NO: 1732045 - DNA, 15 bp, Homo sapiens
attacctctaatttc

SEQ ID NO: 1732046 - DNA, 15 bp, Homo sapiens
ttacctctaatttca

SEQ ID NO: 1732047 - DNA, 15 bp, Homo sapiens
tacctctaatttcaa

SEQ ID NO: 1732048 - DNA, 15 bp, Homo sapiens
acctctaatttcaaa

SEQ ID NO: 1732049 - DNA, 15 bp, Homo sapiens
cctctaatttcaaac

SEQ ID NO: 1732050 - DNA, 15 bp, Homo sapiens
ctctaatttcaaact

SEQ ID NO: 1732051 - DNA, 15 bp, Homo sapiens
tctaatttcaaactc

SEQ ID NO: 1732052 - DNA, 15 bp, Homo sapiens
ctaatttcaaactct

SEQ ID NO: 1732053 - DNA, 15 bp, Homo sapiens
taatttcaaactctc

SEQ ID NO: 1732054 - DNA, 15 bp, Homo sapiens
aatttcaaactctca

SEQ ID NO: 1732055 - DNA, 15 bp, Homo sapiens
atttcaaactctcat

SEQ ID NO: 1732056 - DNA, 15 bp, Homo sapiens
tttcaaactctcatt

SEQ ID NO: 1732057 - DNA, 15 bp, Homo sapiens
ttcaaactctcattt

SEQ ID NO: 1732058 - DNA, 15 bp, Homo sapiens
tcaaactctcattta

SEQ ID NO: 1732059 - DNA, 15 bp, Homo sapiens
caaactctcatttat

SEQ ID NO: 1732060 - DNA, 15 bp, Homo sapiens
aaactctcatttatt

SEQ ID NO: 1732061 - DNA, 15 bp, Homo sapiens
aactctcatttattg

SEQ ID NO: 1732062 - DNA, 15 bp, Homo sapiens
actctcatttattgg

SEQ ID NO: 1732063 - DNA, 15 bp, Homo sapiens
ctctcatttattggt

SEQ ID NO: 1732064 - DNA, 15 bp, Homo sapiens
tctcatttattggtg

SEQ ID NO: 1732065 - DNA, 15 bp, Homo sapiens
ctcatttattggtgt

SEQ ID NO: 1732066 - DNA, 15 bp, Homo sapiens
tcatttattggtgta

SEQ ID NO: 1732067 - DNA, 15 bp, Homo sapiens
catttattggtgtac

SEQ ID NO: 1732068 - DNA, 15 bp, Homo sapiens
atttattggtgtacc

SEQ ID NO: 1732069 - DNA, 15 bp, Homo sapiens
tttattggtgtacca

SEQ ID NO: 1732070 - DNA, 15 bp, Homo sapiens
ttattggtgtaccac

SEQ ID NO: 1732071 - DNA, 15 bp, Homo sapiens
tattggtgtaccact

SEQ ID NO: 1732072 - DNA, 15 bp, Homo sapiens
attggtgtaccactc

SEQ ID NO: 1732073 - DNA, 15 bp, Homo sapiens
ttggtgtaccactca

SEQ ID NO: 1732074 - DNA, 15 bp, Homo sapiens
tggtgtaccactcaa

SEQ ID NO: 1732075 - DNA, 15 bp, Homo sapiens
ggtgtaccactcaat

SEQ ID NO: 1732076 - DNA, 15 bp, Homo sapiens
gtgtaccactcaatc

SEQ ID NO: 1732077 - DNA, 15 bp, Homo sapiens
tgtaccactcaatct

SEQ ID NO: 1732078 - DNA, 15 bp, Homo sapiens
gtaccactcaatctt

SEQ ID NO: 1732079 - DNA, 15 bp, Homo sapiens
taccactcaatcttt

SEQ ID NO: 1732080 - DNA, 15 bp, Homo sapiens
accactcaatctttt

SEQ ID NO: 1732081 - DNA, 15 bp, Homo sapiens
ccactcaatctttta

SEQ ID NO: 1732082 - DNA, 15 bp, Homo sapiens
cactcaatcttttaa

SEQ ID NO: 1732083 - DNA, 15 bp, Homo sapiens
actcaatcttttaaa

SEQ ID NO: 1732084 - DNA, 15 bp, Homo sapiens
ctcaatcttttaaaa

SEQ ID NO: 1732085 - DNA, 15 bp, Homo sapiens
tcaatcttttaaaaa

SEQ ID NO: 1732086 - DNA, 15 bp, Homo sapiens
caatcttttaaaaag

SEQ ID NO: 1732087 - DNA, 15 bp, Homo sapiens
aatcttttaaaaaga

SEQ ID NO: 1732088 - DNA, 15 bp, Homo sapiens
tcttttaaaaagatg

SEQ ID NO: 1732089 - DNA, 15 bp, Homo sapiens
cttttaaaaagatga

SEQ ID NO: 1732090 - DNA, 15 bp, Homo sapiens
ttttaaaaagatgaa

SEQ ID NO: 1732091 - DNA, 15 bp, Homo sapiens
tttaaaaagatgaaa

SEQ ID NO: 1732092 - DNA, 15 bp, Homo sapiens
ttaaaaagatgaaaa

SEQ ID NO: 1732093 - DNA, 15 bp, Homo sapiens
taaaaagatgaaaaa

SEQ ID NO: 1732094 - DNA, 15 bp, Homo sapiens
aaaaagatgaaaaag

SEQ ID NO: 1732095 - DNA, 15 bp, Homo sapiens
aaaagatgaaaaaga

SEQ ID NO: 1732096 - DNA, 15 bp, Homo sapiens
aaagatgaaaaagaa

SEQ ID NO: 1732097 - DNA, 15 bp, Homo sapiens
aagatgaaaaagaaa

SEQ ID NO: 1732098 - DNA, 15 bp, Homo sapiens
agatgaaaaagaaaa

SEQ ID NO: 1732099 - DNA, 15 bp, Homo sapiens
gatgaaaaagaaaaa

SEQ ID NO: 1732100 - DNA, 15 bp, Homo sapiens
atgaaaaagaaaaaa

SEQ ID NO: 1732101 - DNA, 15 bp, Homo sapiens
aaagaaaaaaaaagt

SEQ ID NO: 1732102 - DNA, 15 bp, Homo sapiens
aagaaaaaaaaagtg

SEQ ID NO: 1732103 - DNA, 15 bp, Homo sapiens
agaaaaaaaaagtgg

SEQ ID NO: 1732104 - DNA, 15 bp, Homo sapiens
gaaaaaaaaagtggc

SEQ ID NO: 1732105 - DNA, 15 bp, Homo sapiens
aaaaaaaaagtggct

SEQ ID NO: 1732106 - DNA, 15 bp, Homo sapiens
aaaaaaaagtggctc

SEQ ID NO: 1732107 - DNA, 15 bp, Homo sapiens
aaaaaaagtggctcc

SEQ ID NO: 1732108 - DNA, 15 bp, Homo sapiens
aaaaaagtggctcca

SEQ ID NO: 1732109 - DNA, 15 bp, Homo sapiens
aaaaagtggctccaa

SEQ ID NO: 1732110 - DNA, 15 bp, Homo sapiens
aaaagtggctccaaa

SEQ ID NO: 1732111 - DNA, 15 bp, Homo sapiens
aaagtggctccaaag

SEQ ID NO: 1732112 - DNA, 15 bp, Homo sapiens
aagtggctccaaagg

SEQ ID NO: 1732113 - DNA, 15 bp, Homo sapiens
ctgcggctggaactt

SEQ ID NO: 1732114 - DNA, 15 bp, Homo sapiens
tgcggctggaacttt

SEQ ID NO: 1732115 - DNA, 15 bp, Homo sapiens
gcggctggaactttc

SEQ ID NO: 1732116 - DNA, 15 bp, Homo sapiens
cggctggaactttcc

SEQ ID NO: 1732117 - DNA, 15 bp, Homo sapiens
ggctggaactttcct

SEQ ID NO: 1732118 - DNA, 15 bp, Homo sapiens
gctggaactttcctc

SEQ ID NO: 1732119 - DNA, 15 bp, Homo sapiens
ctggaactttcctct

SEQ ID NO: 1732120 - DNA, 15 bp, Homo sapiens
tggaactttcctctc

SEQ ID NO: 1732121 - DNA, 15 bp, Homo sapiens
ggaactttcctctcc

SEQ ID NO: 1732122 - DNA, 15 bp, Homo sapiens
gaactttcctctcca

SEQ ID NO: 1732123 - DNA, 15 bp, Homo sapiens
aactttcctctccat

SEQ ID NO: 1732124 - DNA, 15 bp, Homo sapiens
actttcctctccatt

SEQ ID NO: 1732125 - DNA, 15 bp, Homo sapiens
ctttcctctccatta

SEQ ID NO: 1732126 - DNA, 15 bp, Homo sapiens
tttcctctccattac

SEQ ID NO: 1732127 - DNA, 15 bp, Homo sapiens
ttcctctccattact

SEQ ID NO: 1732128 - DNA, 15 bp, Homo sapiens
tcctctccattactc

SEQ ID NO: 1732129 - DNA, 15 bp, Homo sapiens
cctctccattactcc

SEQ ID NO: 1732130 - DNA, 15 bp, Homo sapiens
ctctccattactcca

SEQ ID NO: 1732131 - DNA, 15 bp, Homo sapiens
tctccattactccag

SEQ ID NO: 1732132 - DNA, 15 bp, Homo sapiens
ctccattactccagc

SEQ ID NO: 1732133 - DNA, 15 bp, Homo sapiens
tccattactccagca

SEQ ID NO: 1732134 - DNA, 15 bp, Homo sapiens
ccattactccagcag

SEQ ID NO: 1732135 - DNA, 15 bp, Homo sapiens
cattactccagcagc

SEQ ID NO: 1732136 - DNA, 15 bp, Homo sapiens
attactccagcagct

SEQ ID NO: 1732137 - DNA, 15 bp, Homo sapiens
ttactccagcagctc

SEQ ID NO: 1732138 - DNA, 15 bp, Homo sapiens
tactccagcagctcc

SEQ ID NO: 1732139 - DNA, 15 bp, Homo sapiens
actccagcagctcca

SEQ ID NO: 1732140 - DNA, 15 bp, Homo sapiens
ctccagcagctccag

SEQ ID NO: 1732141 - DNA, 15 bp, Homo sapiens
tccagcagctccagc

SEQ ID NO: 1732142 - DNA, 15 bp, Homo sapiens
ccagcagctccagct

SEQ ID NO: 1732143 - DNA, 15 bp, Homo sapiens
cagcagctccagctc

SEQ ID NO: 1732144 - DNA, 15 bp, Homo sapiens
agcagctccagctca

SEQ ID NO: 1732145 - DNA, 15 bp, Homo sapiens
gcagctccagctcat

SEQ ID NO: 1732146 - DNA, 15 bp, Homo sapiens
cagctccagctcatt

SEQ ID NO: 1732147 - DNA, 15 bp, Homo sapiens
agctccagctcattg

SEQ ID NO: 1732148 - DNA, 15 bp, Homo sapiens
gctccagctcattgc

SEQ ID NO: 1732149 - DNA, 15 bp, Homo sapiens
ctccagctcattgcg

SEQ ID NO: 1732150 - DNA, 15 bp, Homo sapiens
tccagctcattgcga

SEQ ID NO: 1732151 - DNA, 15 bp, Homo sapiens
ccagctcattgcgac

SEQ ID NO: 1732152 - DNA, 15 bp, Homo sapiens
cagctcattgcgact

SEQ ID NO: 1732153 - DNA, 15 bp, Homo sapiens
agctcattgcgactt

SEQ ID NO: 1732154 - DNA, 15 bp, Homo sapiens
gctcattgcgacttt

SEQ ID NO: 1732155 - DNA, 15 bp, Homo sapiens
ctcattgcgactttt

SEQ ID NO: 1732156 - DNA, 15 bp, Homo sapiens
tcattgcgacttttc

SEQ ID NO: 1732157 - DNA, 15 bp, Homo sapiens
cattgcgacttttcc

SEQ ID NO: 1732158 - DNA, 15 bp, Homo sapiens
attgcgacttttccg

SEQ ID NO: 1732159 - DNA, 15 bp, Homo sapiens
ttgcgacttttccgg

SEQ ID NO: 1732160 - DNA, 15 bp, Homo sapiens
tgcgacttttccggc

SEQ ID NO: 1732161 - DNA, 15 bp, Homo sapiens
gcgacttttccggct

SEQ ID NO: 1732162 - DNA, 15 bp, Homo sapiens
cgacttttccggctt

SEQ ID NO: 1732163 - DNA, 15 bp, Homo sapiens
gacttttccggcttc

SEQ ID NO: 1732164 - DNA, 15 bp, Homo sapiens
acttttccggcttct

SEQ ID NO: 1732165 - DNA, 15 bp, Homo sapiens
cttttccggcttctc

SEQ ID NO: 1732166 - DNA, 15 bp, Homo sapiens
ttttccggcttctcc

SEQ ID NO: 1732167 - DNA, 15 bp, Homo sapiens
tttccggcttctcct

SEQ ID NO: 1732168 - DNA, 15 bp, Homo sapiens
ttccggcttctcctc

SEQ ID NO: 1732169 - DNA, 15 bp, Homo sapiens
tccggcttctcctct

SEQ ID NO: 1732170 - DNA, 15 bp, Homo sapiens
ccggcttctcctctc

SEQ ID NO: 1732171 - DNA, 15 bp, Homo sapiens
cggcttctcctctcc

SEQ ID NO: 1732172 - DNA, 15 bp, Homo sapiens
ggcttctcctctccc

SEQ ID NO: 1732173 - DNA, 15 bp, Homo sapiens
gcttctcctctcccg

SEQ ID NO: 1732174 - DNA, 15 bp, Homo sapiens
cttctcctctcccgc

SEQ ID NO: 1732175 - DNA, 15 bp, Homo sapiens
ttctcctctcccgcc

SEQ ID NO: 1732176 - DNA, 15 bp, Homo sapiens
tctcctctcccgcct

SEQ ID NO: 1732177 - DNA, 15 bp, Homo sapiens
ctcctctcccgcctt

SEQ ID NO: 1732178 - DNA, 15 bp, Homo sapiens
tcctctcccgccttc

SEQ ID NO: 1732179 - DNA, 15 bp, Homo sapiens
cctctcccgccttcc

SEQ ID NO: 1732180 - DNA, 15 bp, Homo sapiens
ctctcccgccttccc

SEQ ID NO: 1732181 - DNA, 15 bp, Homo sapiens
tctcccgccttccca

SEQ ID NO: 1732182 - DNA, 15 bp, Homo sapiens
ctcccgccttcccat

SEQ ID NO: 1732183 - DNA, 15 bp, Homo sapiens
tcccgccttcccatc

SEQ ID NO: 1732184 - DNA, 15 bp, Homo sapiens
cccgccttcccatca

SEQ ID NO: 1732185 - DNA, 15 bp, Homo sapiens
ccgccttcccatcag

SEQ ID NO: 1732186 - DNA, 15 bp, Homo sapiens
cgccttcccatcagc

SEQ ID NO: 1732187 - DNA, 15 bp, Homo sapiens
gccttcccatcagcc

SEQ ID NO: 1732188 - DNA, 15 bp, Homo sapiens
ccttcccatcagcca

SEQ ID NO: 1732189 - DNA, 15 bp, Homo sapiens
cttcccatcagccat

SEQ ID NO: 1732190 - DNA, 15 bp, Homo sapiens
ttcccatcagccatt

SEQ ID NO: 1732191 - DNA, 15 bp, Homo sapiens
tcccatcagccattt

SEQ ID NO: 1732192 - DNA, 15 bp, Homo sapiens
cccatcagccatttc

SEQ ID NO: 1732193 - DNA, 15 bp, Homo sapiens
ccatcagccatttcc

SEQ ID NO: 1732194 - DNA, 15 bp, Homo sapiens
catcagccatttccc

SEQ ID NO: 1732195 - DNA, 15 bp, Homo sapiens
atcagccatttcccc

SEQ ID NO: 1732196 - DNA, 15 bp, Homo sapiens
tcagccatttccccc

SEQ ID NO: 1732197 - DNA, 15 bp, Homo sapiens
cagccatttcccccg

SEQ ID NO: 1732198 - DNA, 15 bp, Homo sapiens
agccatttcccccgc

SEQ ID NO: 1732199 - DNA, 15 bp, Homo sapiens
gccatttcccccgcc

SEQ ID NO: 1732200 - DNA, 15 bp, Homo sapiens
ccatttcccccgccg

SEQ ID NO: 1732201 - DNA, 15 bp, Homo sapiens
catttcccccgccgc

SEQ ID NO: 1732202 - DNA, 15 bp, Homo sapiens
atttcccccgccgca

SEQ ID NO: 1732203 - DNA, 15 bp, Homo sapiens
tttcccccgccgcat

SEQ ID NO: 1732204 - DNA, 15 bp, Homo sapiens
ttcccccgccgcatt

SEQ ID NO: 1732205 - DNA, 15 bp, Homo sapiens
tcccccgccgcattg

SEQ ID NO: 1732206 - DNA, 15 bp, Homo sapiens
cccccgccgcattgt

SEQ ID NO: 1732207 - DNA, 15 bp, Homo sapiens
ccccgccgcattgtt

SEQ ID NO: 1732208 - DNA, 15 bp, Homo sapiens
cccgccgcattgttt

SEQ ID NO: 1732209 - DNA, 15 bp, Homo sapiens
ccgccgcattgtttt

SEQ ID NO: 1732210 - DNA, 15 bp, Homo sapiens
cgccgcattgttttt

SEQ ID NO: 1732211 - DNA, 15 bp, Homo sapiens
gccgcattgtttttt

SEQ ID NO: 1732212 - DNA, 15 bp, Homo sapiens
ccgcattgttttttt

SEQ ID NO: 1732213 - DNA, 15 bp, Homo sapiens
cgcattgttttttta

SEQ ID NO: 1732214 - DNA, 15 bp, Homo sapiens
gcattgtttttttaa

SEQ ID NO: 1732215 - DNA, 15 bp, Homo sapiens
cattgtttttttaag

SEQ ID NO: 1732216 - DNA, 15 bp, Homo sapiens
attgtttttttaaga

SEQ ID NO: 1732217 - DNA, 15 bp, Homo sapiens
ttgtttttttaagat

SEQ ID NO: 1732218 - DNA, 15 bp, Homo sapiens
tgtttttttaagatt

SEQ ID NO: 1732219 - DNA, 15 bp, Homo sapiens
gtttttttaagattt

SEQ ID NO: 1732220 - DNA, 15 bp, Homo sapiens
tttttttaagatttc

SEQ ID NO: 1732221 - DNA, 15 bp, Homo sapiens
ttttttaagatttca

SEQ ID NO: 1732222 - DNA, 15 bp, Homo sapiens
tttttaagatttcag

SEQ ID NO: 1732223 - DNA, 15 bp, Homo sapiens
ttttaagatttcaga

SEQ ID NO: 1732224 - DNA, 15 bp, Homo sapiens
tttaagatttcagaa

SEQ ID NO: 1732225 - DNA, 15 bp, Homo sapiens
ttaagatttcagaaa

SEQ ID NO: 1732226 - DNA, 15 bp, Homo sapiens
taagatttcagaaat

SEQ ID NO: 1732227 - DNA, 15 bp, Homo sapiens
aagatttcagaaatc

SEQ ID NO: 1732228 - DNA, 15 bp, Homo sapiens
agatttcagaaatct

SEQ ID NO: 1732229 - DNA, 15 bp, Homo sapiens
gatttcagaaatctt

SEQ ID NO: 1732230 - DNA, 15 bp, Homo sapiens
atttcagaaatcttt

SEQ ID NO: 1732231 - DNA, 15 bp, Homo sapiens
tttcagaaatctttc

SEQ ID NO: 1732232 - DNA, 15 bp, Homo sapiens
ttcagaaatctttct

SEQ ID NO: 1732233 - DNA, 15 bp, Homo sapiens
tcagaaatctttcta

SEQ ID NO: 1732234 - DNA, 15 bp, Homo sapiens
cagaaatctttctaa

SEQ ID NO: 1732235 - DNA, 15 bp, Homo sapiens
agaaatctttctaat

SEQ ID NO: 1732236 - DNA, 15 bp, Homo sapiens
gaaatctttctaata

SEQ ID NO: 1732237 - DNA, 15 bp, Homo sapiens
aaatctttctaatac

SEQ ID NO: 1732238 - DNA, 15 bp, Homo sapiens
aatctttctaataca

SEQ ID NO: 1732239 - DNA, 15 bp, Homo sapiens
atctttctaatacaa

SEQ ID NO: 1732240 - DNA, 15 bp, Homo sapiens
tctttctaatacaag

SEQ ID NO: 1732241 - DNA, 15 bp, Homo sapiens
ctttctaatacaagt

SEQ ID NO: 1732242 - DNA, 15 bp, Homo sapiens
tttctaatacaagtt

SEQ ID NO: 1732243 - DNA, 15 bp, Homo sapiens
ttctaatacaagttg

SEQ ID NO: 1732244 - DNA, 15 bp, Homo sapiens
tctaatacaagttgg

SEQ ID NO: 1732245 - DNA, 15 bp, Homo sapiens
ctaatacaagttggg

SEQ ID NO: 1732246 - DNA, 15 bp, Homo sapiens
taatacaagttggga

SEQ ID NO: 1732247 - DNA, 15 bp, Homo sapiens
aatacaagttgggat

SEQ ID NO: 1732248 - DNA, 15 bp, Homo sapiens
atacaagttgggata

SEQ ID NO: 1732249 - DNA, 15 bp, Homo sapiens
tacaagttgggatat

SEQ ID NO: 1732250 - DNA, 15 bp, Homo sapiens
acaagttgggatata

SEQ ID NO: 1732251 - DNA, 15 bp, Homo sapiens
caagttgggatataa

SEQ ID NO: 1732252 - DNA, 15 bp, Homo sapiens
aagttgggatataaa

SEQ ID NO: 1732253 - DNA, 15 bp, Homo sapiens
agttgggatataaat

SEQ ID NO: 1732254 - DNA, 15 bp, Homo sapiens
gttgggatataaata

SEQ ID NO: 1732255 - DNA, 15 bp, Homo sapiens
ttgggatataaataa

SEQ ID NO: 1732256 - DNA, 15 bp, Homo sapiens
tgggatataaataat

SEQ ID NO: 1732257 - DNA, 15 bp, Homo sapiens
gggatataaataatt

SEQ ID NO: 1732258 - DNA, 15 bp, Homo sapiens
ggatataaataatta

SEQ ID NO: 1732259 - DNA, 15 bp, Homo sapiens
gatataaataattag

SEQ ID NO: 1732260 - DNA, 15 bp, Homo sapiens
atataaataattaga

SEQ ID NO: 1732261 - DNA, 15 bp, Homo sapiens
tataaataattagat

SEQ ID NO: 1732262 - DNA, 15 bp, Homo sapiens
ataaataattagata

SEQ ID NO: 1732263 - DNA, 15 bp, Homo sapiens
taaataattagatat

SEQ ID NO: 1732264 - DNA, 15 bp, Homo sapiens
aaataattagatata

SEQ ID NO: 1732265 - DNA, 15 bp, Homo sapiens
aataattagatatag

SEQ ID NO: 1732266 - DNA, 15 bp, Homo sapiens
ataattagatataga

SEQ ID NO: 1732267 - DNA, 15 bp, Homo sapiens
taattagatatagaa

SEQ ID NO: 1732268 - DNA, 15 bp, Homo sapiens
aattagatatagaaa

SEQ ID NO: 1732269 - DNA, 15 bp, Homo sapiens
attagatatagaaaa

SEQ ID NO: 1732270 - DNA, 15 bp, Homo sapiens
ttagatatagaaaat

SEQ ID NO: 1732271 - DNA, 15 bp, Homo sapiens
tagatatagaaaata

SEQ ID NO: 1732272 - DNA, 15 bp, Homo sapiens
agatatagaaaatag

SEQ ID NO: 1732273 - DNA, 15 bp, Homo sapiens
gatatagaaaatagc

SEQ ID NO: 1732274 - DNA, 15 bp, Homo sapiens
atatagaaaatagct

SEQ ID NO: 1732275 - DNA, 15 bp, Homo sapiens
tatagaaaatagcta

SEQ ID NO: 1732276 - DNA, 15 bp, Homo sapiens
atagaaaatagctac

SEQ ID NO: 1732277 - DNA, 15 bp, Homo sapiens
tagaaaatagctaca

SEQ ID NO: 1732278 - DNA, 15 bp, Homo sapiens
agaaaatagctacaa

SEQ ID NO: 1732279 - DNA, 15 bp, Homo sapiens
gaaaatagctacaag

SEQ ID NO: 1732280 - DNA, 15 bp, Homo sapiens
aaaatagctacaagg

SEQ ID NO: 1732281 - DNA, 15 bp, Homo sapiens
aaatagctacaaggt

SEQ ID NO: 1732282 - DNA, 15 bp, Homo sapiens
aatagctacaaggta

SEQ ID NO: 1732283 - DNA, 15 bp, Homo sapiens
atagctacaaggtat

SEQ ID NO: 1732284 - DNA, 15 bp, Homo sapiens
tagctacaaggtatt

SEQ ID NO: 1732285 - DNA, 15 bp, Homo sapiens
agctacaaggtattt

SEQ ID NO: 1732286 - DNA, 15 bp, Homo sapiens
gctacaaggtatttc

SEQ ID NO: 1732287 - DNA, 15 bp, Homo sapiens
ctacaaggtatttct

SEQ ID NO: 1732288 - DNA, 15 bp, Homo sapiens
tacaaggtatttctt

SEQ ID NO: 1732289 - DNA, 15 bp, Homo sapiens
acaaggtatttcttt

SEQ ID NO: 1732290 - DNA, 15 bp, Homo sapiens
caaggtatttctttt

SEQ ID NO: 1732291 - DNA, 15 bp, Homo sapiens
aaggtatttctttta

SEQ ID NO: 1732292 - DNA, 15 bp, Homo sapiens
aggtatttcttttaa

SEQ ID NO: 1732293 - DNA, 15 bp, Homo sapiens
ggtatttcttttaac

SEQ ID NO: 1732294 - DNA, 15 bp, Homo sapiens
gtatttcttttaact

SEQ ID NO: 1732295 - DNA, 15 bp, Homo sapiens
tatttcttttaactt

SEQ ID NO: 1732296 - DNA, 15 bp, Homo sapiens
atttcttttaacttt

SEQ ID NO: 1732297 - DNA, 15 bp, Homo sapiens
tttcttttaactttc

SEQ ID NO: 1732298 - DNA, 15 bp, Homo sapiens
ttcttttaactttct

SEQ ID NO: 1732299 - DNA, 15 bp, Homo sapiens
tcttttaactttctc

SEQ ID NO: 1732300 - DNA, 15 bp, Homo sapiens
cttttaactttctcc

SEQ ID NO: 1732301 - DNA, 15 bp, Homo sapiens
ttttaactttctcca

SEQ ID NO: 1732302 - DNA, 15 bp, Homo sapiens
tttaactttctccac

SEQ ID NO: 1732303 - DNA, 15 bp, Homo sapiens
ttaactttctccacc

SEQ ID NO: 1732304 - DNA, 15 bp, Homo sapiens
taactttctccaccc

SEQ ID NO: 1732305 - DNA, 15 bp, Homo sapiens
aactttctccacccc

SEQ ID NO: 1732306 - DNA, 15 bp, Homo sapiens
actttctccaccccc

SEQ ID NO: 1732307 - DNA, 15 bp, Homo sapiens
ctttctccaccccca

SEQ ID NO: 1732308 - DNA, 15 bp, Homo sapiens
tttctccacccccag

SEQ ID NO: 1732309 - DNA, 15 bp, Homo sapiens
ttctccacccccagc

SEQ ID NO: 1732310 - DNA, 15 bp, Homo sapiens
tctccacccccagct

SEQ ID NO: 1732311 - DNA, 15 bp, Homo sapiens
ctccacccccagctc

SEQ ID NO: 1732312 - DNA, 15 bp, Homo sapiens
tccacccccagctcc

SEQ ID NO: 1732313 - DNA, 15 bp, Homo sapiens
ccacccccagctccc

SEQ ID NO: 1732314 - DNA, 15 bp, Homo sapiens
cacccccagctccca

SEQ ID NO: 1732315 - DNA, 15 bp, Homo sapiens
acccccagctcccag

SEQ ID NO: 1732316 - DNA, 15 bp, Homo sapiens
ccccagctcccagca

SEQ ID NO: 1732317 - DNA, 15 bp, Homo sapiens
cccagctcccagcag

SEQ ID NO: 1732318 - DNA, 15 bp, Homo sapiens
ccagctcccagcagt

SEQ ID NO: 1732319 - DNA, 15 bp, Homo sapiens
cagctcccagcagtc

SEQ ID NO: 1732320 - DNA, 15 bp, Homo sapiens
agctcccagcagtca

SEQ ID NO: 1732321 - DNA, 15 bp, Homo sapiens
gctcccagcagtcaa

SEQ ID NO: 1732322 - DNA, 15 bp, Homo sapiens
ctcccagcagtcaag

SEQ ID NO: 1732323 - DNA, 15 bp, Homo sapiens
tcccagcagtcaaga

SEQ ID NO: 1732324 - DNA, 15 bp, Homo sapiens
cccagcagtcaagag

SEQ ID NO: 1732325 - DNA, 15 bp, Homo sapiens
ccagcagtcaagagt

SEQ ID NO: 1732326 - DNA, 15 bp, Homo sapiens
cagcagtcaagagtc

SEQ ID NO: 1732327 - DNA, 15 bp, Homo sapiens
agcagtcaagagtca

SEQ ID NO: 1732328 - DNA, 15 bp, Homo sapiens
gcagtcaagagtcaa

SEQ ID NO: 1732329 - DNA, 15 bp, Homo sapiens
cagtcaagagtcaag

SEQ ID NO: 1732330 - DNA, 15 bp, Homo sapiens
agtcaagagtcaagc

SEQ ID NO: 1732331 - DNA, 15 bp, Homo sapiens
gtcaagagtcaagcc

SEQ ID NO: 1732332 - DNA, 15 bp, Homo sapiens
tcaagagtcaagccc

SEQ ID NO: 1732333 - DNA, 15 bp, Homo sapiens
caagagtcaagccct

SEQ ID NO: 1732334 - DNA, 15 bp, Homo sapiens
aagagtcaagcccta

SEQ ID NO: 1732335 - DNA, 15 bp, Homo sapiens
agagtcaagccctaa

SEQ ID NO: 1732336 - DNA, 15 bp, Homo sapiens
gagtcaagccctaag

SEQ ID NO: 1732337 - DNA, 15 bp, Homo sapiens
agtcaagccctaagt

SEQ ID NO: 1732338 - DNA, 15 bp, Homo sapiens
gtcaagccctaagtc

SEQ ID NO: 1732339 - DNA, 15 bp, Homo sapiens
tcaagccctaagtct

SEQ ID NO: 1732340 - DNA, 15 bp, Homo sapiens
caagccctaagtctt

SEQ ID NO: 1732341 - DNA, 15 bp, Homo sapiens
aagccctaagtcttg

SEQ ID NO: 1732342 - DNA, 15 bp, Homo sapiens
agccctaagtcttgt

SEQ ID NO: 1732343 - DNA, 15 bp, Homo sapiens
gccctaagtcttgtc

SEQ ID NO: 1732344 - DNA, 15 bp, Homo sapiens
ccctaagtcttgtcc

SEQ ID NO: 1732345 - DNA, 15 bp, Homo sapiens
cctaagtcttgtcct

SEQ ID NO: 1732346 - DNA, 15 bp, Homo sapiens
ctaagtcttgtcctt

SEQ ID NO: 1732347 - DNA, 15 bp, Homo sapiens
taagtcttgtccttt

SEQ ID NO: 1732348 - DNA, 15 bp, Homo sapiens
aagtcttgtcctttc

SEQ ID NO: 1732349 - DNA, 15 bp, Homo sapiens
agtcttgtcctttct

SEQ ID NO: 1732350 - DNA, 15 bp, Homo sapiens
gtcttgtcctttctg

SEQ ID NO: 1732351 - DNA, 15 bp, Homo sapiens
tcttgtcctttctgt

SEQ ID NO: 1732352 - DNA, 15 bp, Homo sapiens
cttgtcctttctgtc

SEQ ID NO: 1732353 - DNA, 15 bp, Homo sapiens
ttgtcctttctgtca

SEQ ID NO: 1732354 - DNA, 15 bp, Homo sapiens
tgtcctttctgtcag

SEQ ID NO: 1732355 - DNA, 15 bp, Homo sapiens
gtcctttctgtcaga

SEQ ID NO: 1732356 - DNA, 15 bp, Homo sapiens
tcctttctgtcagaa

SEQ ID NO: 1732357 - DNA, 15 bp, Homo sapiens
cctttctgtcagaaa

SEQ ID NO: 1732358 - DNA, 15 bp, Homo sapiens
ctttctgtcagaaat

SEQ ID NO: 1732359 - DNA, 15 bp, Homo sapiens
tttctgtcagaaata

SEQ ID NO: 1732360 - DNA, 15 bp, Homo sapiens
ttctgtcagaaatag

SEQ ID NO: 1732361 - DNA, 15 bp, Homo sapiens
tctgtcagaaataga

SEQ ID NO: 1732362 - DNA, 15 bp, Homo sapiens
ctgtcagaaatagat

SEQ ID NO: 1732363 - DNA, 15 bp, Homo sapiens
tgtcagaaatagata

SEQ ID NO: 1732364 - DNA, 15 bp, Homo sapiens
gtcagaaatagatac

SEQ ID NO: 1732365 - DNA, 15 bp, Homo sapiens
tcagaaatagataca

SEQ ID NO: 1732366 - DNA, 15 bp, Homo sapiens
cagaaatagatacaa

SEQ ID NO: 1732367 - DNA, 15 bp, Homo sapiens
agaaatagatacaag

SEQ ID NO: 1732368 - DNA, 15 bp, Homo sapiens
gaaatagatacaaga

SEQ ID NO: 1732369 - DNA, 15 bp, Homo sapiens
aaatagatacaagaa

SEQ ID NO: 1732370 - DNA, 15 bp, Homo sapiens
aatagatacaagaag

SEQ ID NO: 1732371 - DNA, 15 bp, Homo sapiens
atagatacaagaagg

SEQ ID NO: 1732372 - DNA, 15 bp, Homo sapiens
tagatacaagaagga

SEQ ID NO: 1732373 - DNA, 15 bp, Homo sapiens
agatacaagaaggat

SEQ ID NO: 1732374 - DNA, 15 bp, Homo sapiens
gatacaagaaggata

SEQ ID NO: 1732375 - DNA, 15 bp, Homo sapiens
atacaagaaggatac

SEQ ID NO: 1732376 - DNA, 15 bp, Homo sapiens
tacaagaaggataca

SEQ ID NO: 1732377 - DNA, 15 bp, Homo sapiens
acaagaaggatacag

SEQ ID NO: 1732378 - DNA, 15 bp, Homo sapiens
caagaaggatacagc

SEQ ID NO: 1732379 - DNA, 15 bp, Homo sapiens
aagaaggatacagca

SEQ ID NO: 1732380 - DNA, 15 bp, Homo sapiens
agaaggatacagcaa

SEQ ID NO: 1732381 - DNA, 15 bp, Homo sapiens
gaaggatacagcaaa

SEQ ID NO: 1732382 - DNA, 15 bp, Homo sapiens
aaggatacagcaaac

SEQ ID NO: 1732383 - DNA, 15 bp, Homo sapiens
aggatacagcaaaca

SEQ ID NO: 1732384 - DNA, 15 bp, Homo sapiens
ggatacagcaaacac

SEQ ID NO: 1732385 - DNA, 15 bp, Homo sapiens
gatacagcaaacact

SEQ ID NO: 1732386 - DNA, 15 bp, Homo sapiens
atacagcaaacactg

SEQ ID NO: 1732387 - DNA, 15 bp, Homo sapiens
tacagcaaacactgc

SEQ ID NO: 1732388 - DNA, 15 bp, Homo sapiens
acagcaaacactgct

SEQ ID NO: 1732389 - DNA, 15 bp, Homo sapiens
cagcaaacactgcta

SEQ ID NO: 1732390 - DNA, 15 bp, Homo sapiens
agcaaacactgctat

SEQ ID NO: 1732391 - DNA, 15 bp, Homo sapiens
gcaaacactgctata

SEQ ID NO: 1732392 - DNA, 15 bp, Homo sapiens
caaacactgctataa

SEQ ID NO: 1732393 - DNA, 15 bp, Homo sapiens
aaacactgctataac

SEQ ID NO: 1732394 - DNA, 15 bp, Homo sapiens
aacactgctataaca

SEQ ID NO: 1732395 - DNA, 15 bp, Homo sapiens
acactgctataacac

SEQ ID NO: 1732396 - DNA, 15 bp, Homo sapiens
cactgctataacacc

SEQ ID NO: 1732397 - DNA, 15 bp, Homo sapiens
actgctataacacct

SEQ ID NO: 1732398 - DNA, 15 bp, Homo sapiens
ctgctataacacctc

SEQ ID NO: 1732399 - DNA, 15 bp, Homo sapiens
tgctataacacctct

SEQ ID NO: 1732400 - DNA, 15 bp, Homo sapiens
gctataacacctctc

SEQ ID NO: 1732401 - DNA, 15 bp, Homo sapiens
ctataacacctctct

SEQ ID NO: 1732402 - DNA, 15 bp, Homo sapiens
tataacacctctctc

SEQ ID NO: 1732403 - DNA, 15 bp, Homo sapiens
ataacacctctctca

SEQ ID NO: 1732404 - DNA, 15 bp, Homo sapiens
taacacctctctcat

SEQ ID NO: 1732405 - DNA, 15 bp, Homo sapiens
aacacctctctcata

SEQ ID NO: 1732406 - DNA, 15 bp, Homo sapiens
acacctctctcatag

SEQ ID NO: 1732407 - DNA, 15 bp, Homo sapiens
cacctctctcatagg

SEQ ID NO: 1732408 - DNA, 15 bp, Homo sapiens
acctctctcatagga

SEQ ID NO: 1732409 - DNA, 15 bp, Homo sapiens
cctctctcataggat

SEQ ID NO: 1732410 - DNA, 15 bp, Homo sapiens
ctctctcataggatt

SEQ ID NO: 1732411 - DNA, 15 bp, Homo sapiens
tctctcataggattc

SEQ ID NO: 1732412 - DNA, 15 bp, Homo sapiens
ctctcataggattca

SEQ ID NO: 1732413 - DNA, 15 bp, Homo sapiens
tctcataggattcaa

SEQ ID NO: 1732414 - DNA, 15 bp, Homo sapiens
ctcataggattcaaa

SEQ ID NO: 1732415 - DNA, 15 bp, Homo sapiens
tcataggattcaaat

SEQ ID NO: 1732416 - DNA, 15 bp, Homo sapiens
cataggattcaaatc

SEQ ID NO: 1732417 - DNA, 15 bp, Homo sapiens
ataggattcaaatca

SEQ ID NO: 1732418 - DNA, 15 bp, Homo sapiens
taggattcaaatcag

SEQ ID NO: 1732419 - DNA, 15 bp, Homo sapiens
aggattcaaatcagt

SEQ ID NO: 1732420 - DNA, 15 bp, Homo sapiens
ggattcaaatcagtg

SEQ ID NO: 1732421 - DNA, 15 bp, Homo sapiens
gattcaaatcagtgt

SEQ ID NO: 1732422 - DNA, 15 bp, Homo sapiens
attcaaatcagtgtg

SEQ ID NO: 1732423 - DNA, 15 bp, Homo sapiens
ttcaaatcagtgtgg

SEQ ID NO: 1732424 - DNA, 15 bp, Homo sapiens
tcaaatcagtgtgga

SEQ ID NO: 1732425 - DNA, 15 bp, Homo sapiens
caaatcagtgtggag

SEQ ID NO: 1732426 - DNA, 15 bp, Homo sapiens
aaatcagtgtggaga

SEQ ID NO: 1732427 - DNA, 15 bp, Homo sapiens
aatcagtgtggagat

SEQ ID NO: 1732428 - DNA, 15 bp, Homo sapiens
atcagtgtggagatt

SEQ ID NO: 1732429 - DNA, 15 bp, Homo sapiens
tcagtgtggagatta

SEQ ID NO: 1732430 - DNA, 15 bp, Homo sapiens
cagtgtggagattat

SEQ ID NO: 1732431 - DNA, 15 bp, Homo sapiens
agtgtggagattatt

SEQ ID NO: 1732432 - DNA, 15 bp, Homo sapiens
gtgtggagattatta

SEQ ID NO: 1732433 - DNA, 15 bp, Homo sapiens
tgtggagattattat

SEQ ID NO: 1732434 - DNA, 15 bp, Homo sapiens
gtggagattattata

SEQ ID NO: 1732435 - DNA, 15 bp, Homo sapiens
tggagattattatag

SEQ ID NO: 1732436 - DNA, 15 bp, Homo sapiens
ggagattattatagg

SEQ ID NO: 1732437 - DNA, 15 bp, Homo sapiens
gagattattataggc

SEQ ID NO: 1732438 - DNA, 15 bp, Homo sapiens
agattattataggct

SEQ ID NO: 1732439 - DNA, 15 bp, Homo sapiens
gattattataggctc

SEQ ID NO: 1732440 - DNA, 15 bp, Homo sapiens
attattataggctcc

SEQ ID NO: 1732441 - DNA, 15 bp, Homo sapiens
ttattataggctcca

SEQ ID NO: 1732442 - DNA, 15 bp, Homo sapiens
tattataggctccag

SEQ ID NO: 1732443 - DNA, 15 bp, Homo sapiens
attataggctccaga

SEQ ID NO: 1732444 - DNA, 15 bp, Homo sapiens
ttataggctccagat

SEQ ID NO: 1732445 - DNA, 15 bp, Homo sapiens
tataggctccagatg

SEQ ID NO: 1732446 - DNA, 15 bp, Homo sapiens
ataggctccagatga

SEQ ID NO: 1732447 - DNA, 15 bp, Homo sapiens
taggctccagatgag

SEQ ID NO: 1732448 - DNA, 15 bp, Homo sapiens
aggctccagatgagt

SEQ ID NO: 1732449 - DNA, 15 bp, Homo sapiens
ggctccagatgagtt

SEQ ID NO: 1732450 - DNA, 15 bp, Homo sapiens
gctccagatgagtta

SEQ ID NO: 1732451 - DNA, 15 bp, Homo sapiens
ctccagatgagttag

SEQ ID NO: 1732452 - DNA, 15 bp, Homo sapiens
tccagatgagttagg

SEQ ID NO: 1732453 - DNA, 15 bp, Homo sapiens
ccagatgagttagga

SEQ ID NO: 1732454 - DNA, 15 bp, Homo sapiens
cagatgagttaggat

SEQ ID NO: 1732455 - DNA, 15 bp, Homo sapiens
agatgagttaggata

SEQ ID NO: 1732456 - DNA, 15 bp, Homo sapiens
gatgagttaggatat

SEQ ID NO: 1732457 - DNA, 15 bp, Homo sapiens
atgagttaggatatc

SEQ ID NO: 1732458 - DNA, 15 bp, Homo sapiens
tgagttaggatatct

SEQ ID NO: 1732459 - DNA, 15 bp, Homo sapiens
gagttaggatatctt

SEQ ID NO: 1732460 - DNA, 15 bp, Homo sapiens
agttaggatatcttt

SEQ ID NO: 1732461 - DNA, 15 bp, Homo sapiens
gttaggatatcttta

SEQ ID NO: 1732462 - DNA, 15 bp, Homo sapiens
ttaggatatctttaa

SEQ ID NO: 1732463 - DNA, 15 bp, Homo sapiens
taggatatctttaag

SEQ ID NO: 1732464 - DNA, 15 bp, Homo sapiens
aggatatctttaagt

SEQ ID NO: 1732465 - DNA, 15 bp, Homo sapiens
ggatatctttaagtc

SEQ ID NO: 1732466 - DNA, 15 bp, Homo sapiens
gatatctttaagtct

SEQ ID NO: 1732467 - DNA, 15 bp, Homo sapiens
atatctttaagtctc

SEQ ID NO: 1732468 - DNA, 15 bp, Homo sapiens
tatctttaagtctca

SEQ ID NO: 1732469 - DNA, 15 bp, Homo sapiens
atctttaagtctcaa

SEQ ID NO: 1732470 - DNA, 15 bp, Homo sapiens
tctttaagtctcaat

SEQ ID NO: 1732471 - DNA, 15 bp, Homo sapiens
ctttaagtctcaatt

SEQ ID NO: 1732472 - DNA, 15 bp, Homo sapiens
tttaagtctcaattt

SEQ ID NO: 1732473 - DNA, 15 bp, Homo sapiens
ttaagtctcaattta

SEQ ID NO: 1732474 - DNA, 15 bp, Homo sapiens
taagtctcaatttaa

SEQ ID NO: 1732475 - DNA, 15 bp, Homo sapiens
aagtctcaatttaat

SEQ ID NO: 1732476 - DNA, 15 bp, Homo sapiens
agtctcaatttaata

SEQ ID NO: 1732477 - DNA, 15 bp, Homo sapiens
gtctcaatttaataa

SEQ ID NO: 1732478 - DNA, 15 bp, Homo sapiens
tctcaatttaataaa

SEQ ID NO: 1732479 - DNA, 15 bp, Homo sapiens
ctcaatttaataaaa

SEQ ID NO: 1732480 - DNA, 15 bp, Homo sapiens
tcaatttaataaaac

SEQ ID NO: 1732481 - DNA, 15 bp, Homo sapiens
caatttaataaaact

SEQ ID NO: 1732482 - DNA, 15 bp, Homo sapiens
aatttaataaaacta

SEQ ID NO: 1732483 - DNA, 15 bp, Homo sapiens
atttaataaaactaa

SEQ ID NO: 1732484 - DNA, 15 bp, Homo sapiens
tttaataaaactaat

SEQ ID NO: 1732485 - DNA, 15 bp, Homo sapiens
ttaataaaactaatt

SEQ ID NO: 1732486 - DNA, 15 bp, Homo sapiens
taataaaactaattg

SEQ ID NO: 1732487 - DNA, 15 bp, Homo sapiens
aataaaactaattgt

SEQ ID NO: 1732488 - DNA, 15 bp, Homo sapiens
ataaaactaattgtt

SEQ ID NO: 1732489 - DNA, 15 bp, Homo sapiens
taaaactaattgttt

SEQ ID NO: 1732490 - DNA, 15 bp, Homo sapiens
aaaactaattgtttt

SEQ ID NO: 1732491 - DNA, 15 bp, Homo sapiens
aaactaattgttttc

SEQ ID NO: 1732492 - DNA, 15 bp, Homo sapiens
aactaattgttttcc

SEQ ID NO: 1732493 - DNA, 15 bp, Homo sapiens
actaattgttttcct

SEQ ID NO: 1732494 - DNA, 15 bp, Homo sapiens
ctaattgttttcctg

SEQ ID NO: 1732495 - DNA, 15 bp, Homo sapiens
taattgttttcctgt

SEQ ID NO: 1732496 - DNA, 15 bp, Homo sapiens
aattgttttcctgtg

SEQ ID NO: 1732497 - DNA, 15 bp, Homo sapiens
attgttttcctgtgc

SEQ ID NO: 1732498 - DNA, 15 bp, Homo sapiens
ttgttttcctgtgct

SEQ ID NO: 1732499 - DNA, 15 bp, Homo sapiens
tgttttcctgtgctt

SEQ ID NO: 1732500 - DNA, 15 bp, Homo sapiens
gttttcctgtgcttt

SEQ ID NO: 1732501 - DNA, 15 bp, Homo sapiens
ttttcctgtgcttta

SEQ ID NO: 1732502 - DNA, 15 bp, Homo sapiens
tttcctgtgctttaa

SEQ ID NO: 1732503 - DNA, 15 bp, Homo sapiens
ttcctgtgctttaaa

SEQ ID NO: 1732504 - DNA, 15 bp, Homo sapiens
tcctgtgctttaaat

SEQ ID NO: 1732505 - DNA, 15 bp, Homo sapiens
cctgtgctttaaata

SEQ ID NO: 1732506 - DNA, 15 bp, Homo sapiens
ctgtgctttaaatat

SEQ ID NO: 1732507 - DNA, 15 bp, Homo sapiens
tgtgctttaaatatc

SEQ ID NO: 1732508 - DNA, 15 bp, Homo sapiens
gtgctttaaatatct

SEQ ID NO: 1732509 - DNA, 15 bp, Homo sapiens
tgctttaaatatctc

SEQ ID NO: 1732510 - DNA, 15 bp, Homo sapiens
gctttaaatatctct

SEQ ID NO: 1732511 - DNA, 15 bp, Homo sapiens
ctttaaatatctctc

SEQ ID NO: 1732512 - DNA, 15 bp, Homo sapiens
tttaaatatctctcc

SEQ ID NO: 1732513 - DNA, 15 bp, Homo sapiens
ttaaatatctctcca

SEQ ID NO: 1732514 - DNA, 15 bp, Homo sapiens
taaatatctctccat

SEQ ID NO: 1732515 - DNA, 15 bp, Homo sapiens
aaatatctctccatt

SEQ ID NO: 1732516 - DNA, 15 bp, Homo sapiens
aatatctctccattc

SEQ ID NO: 1732517 - DNA, 15 bp, Homo sapiens
atatctctccattct

SEQ ID NO: 1732518 - DNA, 15 bp, Homo sapiens
tatctctccattcta

SEQ ID NO: 1732519 - DNA, 15 bp, Homo sapiens
atctctccattctat

SEQ ID NO: 1732520 - DNA, 15 bp, Homo sapiens
tctctccattctata

SEQ ID NO: 1732521 - DNA, 15 bp, Homo sapiens
ctctccattctatat

SEQ ID NO: 1732522 - DNA, 15 bp, Homo sapiens
tctccattctatata

SEQ ID NO: 1732523 - DNA, 15 bp, Homo sapiens
ctccattctatataa

SEQ ID NO: 1732524 - DNA, 15 bp, Homo sapiens
tccattctatataaa

SEQ ID NO: 1732525 - DNA, 15 bp, Homo sapiens
ccattctatataaat

SEQ ID NO: 1732526 - DNA, 15 bp, Homo sapiens
cattctatataaata

SEQ ID NO: 1732527 - DNA, 15 bp, Homo sapiens
attctatataaatat

SEQ ID NO: 1732528 - DNA, 15 bp, Homo sapiens
ttctatataaatata

SEQ ID NO: 1732529 - DNA, 15 bp, Homo sapiens
tctatataaatataa

SEQ ID NO: 1732530 - DNA, 15 bp, Homo sapiens
ctatataaatataat

SEQ ID NO: 1732531 - DNA, 15 bp, Homo sapiens
tatataaatataata

SEQ ID NO: 1732532 - DNA, 15 bp, Homo sapiens
atataaatataatat

SEQ ID NO: 1732533 - DNA, 15 bp, Homo sapiens
tataaatataatata

SEQ ID NO: 1732534 - DNA, 15 bp, Homo sapiens
ataaatataatatag

SEQ ID NO: 1732535 - DNA, 15 bp, Homo sapiens
taaatataatataga

SEQ ID NO: 1732536 - DNA, 15 bp, Homo sapiens
aaatataatatagat

SEQ ID NO: 1732537 - DNA, 15 bp, Homo sapiens
aatataatatagatc

SEQ ID NO: 1732538 - DNA, 15 bp, Homo sapiens
atataatatagatct

SEQ ID NO: 1732539 - DNA, 15 bp, Homo sapiens
tataatatagatcta

SEQ ID NO: 1732540 - DNA, 15 bp, Homo sapiens
ataatatagatctaa

SEQ ID NO: 1732541 - DNA, 15 bp, Homo sapiens
taatatagatctaac

SEQ ID NO: 1732542 - DNA, 15 bp, Homo sapiens
aatatagatctaaca

SEQ ID NO: 1732543 - DNA, 15 bp, Homo sapiens
atatagatctaacag

SEQ ID NO: 1732544 - DNA, 15 bp, Homo sapiens
tatagatctaacaga

SEQ ID NO: 1732545 - DNA, 15 bp, Homo sapiens
atagatctaacagat

SEQ ID NO: 1732546 - DNA, 15 bp, Homo sapiens
tagatctaacagatg

SEQ ID NO: 1732547 - DNA, 15 bp, Homo sapiens
agatctaacagatgt

SEQ ID NO: 1732548 - DNA, 15 bp, Homo sapiens
gatctaacagatgta

SEQ ID NO: 1732549 - DNA, 15 bp, Homo sapiens
atctaacagatgtag

SEQ ID NO: 1732550 - DNA, 15 bp, Homo sapiens
tctaacagatgtagt

SEQ ID NO: 1732551 - DNA, 15 bp, Homo sapiens
ctaacagatgtagtc

SEQ ID NO: 1732552 - DNA, 15 bp, Homo sapiens
taacagatgtagtct

SEQ ID NO: 1732553 - DNA, 15 bp, Homo sapiens
aacagatgtagtctt

SEQ ID NO: 1732554 - DNA, 15 bp, Homo sapiens
acagatgtagtcttg

SEQ ID NO: 1732555 - DNA, 15 bp, Homo sapiens
cagatgtagtcttga

SEQ ID NO: 1732556 - DNA, 15 bp, Homo sapiens
agatgtagtcttgaa

SEQ ID NO: 1732557 - DNA, 15 bp, Homo sapiens
gatgtagtcttgaaa

SEQ ID NO: 1732558 - DNA, 15 bp, Homo sapiens
atgtagtcttgaaat

SEQ ID NO: 1732559 - DNA, 15 bp, Homo sapiens
tgtagtcttgaaata

SEQ ID NO: 1732560 - DNA, 15 bp, Homo sapiens
gtagtcttgaaatag

SEQ ID NO: 1732561 - DNA, 15 bp, Homo sapiens
tagtcttgaaataga

SEQ ID NO: 1732562 - DNA, 15 bp, Homo sapiens
agtcttgaaatagat

SEQ ID NO: 1732563 - DNA, 15 bp, Homo sapiens
gtcttgaaatagatg

SEQ ID NO: 1732564 - DNA, 15 bp, Homo sapiens
tcttgaaatagatgg

SEQ ID NO: 1732565 - DNA, 15 bp, Homo sapiens
cttgaaatagatggc

SEQ ID NO: 1732566 - DNA, 15 bp, Homo sapiens
ttgaaatagatggct

SEQ ID NO: 1732567 - DNA, 15 bp, Homo sapiens
tgaaatagatggcta

SEQ ID NO: 1732568 - DNA, 15 bp, Homo sapiens
gaaatagatggctat

SEQ ID NO: 1732569 - DNA, 15 bp, Homo sapiens
aaatagatggctata

SEQ ID NO: 1732570 - DNA, 15 bp, Homo sapiens
aatagatggctataa

SEQ ID NO: 1732571 - DNA, 15 bp, Homo sapiens
atagatggctataat

SEQ ID NO: 1732572 - DNA, 15 bp, Homo sapiens
tagatggctataatg

SEQ ID NO: 1732573 - DNA, 15 bp, Homo sapiens
agatggctataatgt

SEQ ID NO: 1732574 - DNA, 15 bp, Homo sapiens
gatggctataatgtc

SEQ ID NO: 1732575 - DNA, 15 bp, Homo sapiens
atggctataatgtca

SEQ ID NO: 1732576 - DNA, 15 bp, Homo sapiens
tggctataatgtcag

SEQ ID NO: 1732577 - DNA, 15 bp, Homo sapiens
ggctataatgtcagt

SEQ ID NO: 1732578 - DNA, 15 bp, Homo sapiens
gctataatgtcagtg

SEQ ID NO: 1732579 - DNA, 15 bp, Homo sapiens
ctataatgtcagtga

SEQ ID NO: 1732580 - DNA, 15 bp, Homo sapiens
tataatgtcagtgaa

SEQ ID NO: 1732581 - DNA, 15 bp, Homo sapiens
ataatgtcagtgaag

SEQ ID NO: 1732582 - DNA, 15 bp, Homo sapiens
taatgtcagtgaagt

SEQ ID NO: 1732583 - DNA, 15 bp, Homo sapiens
aatgtcagtgaagta

SEQ ID NO: 1732584 - DNA, 15 bp, Homo sapiens
atgtcagtgaagtat

SEQ ID NO: 1732585 - DNA, 15 bp, Homo sapiens
tgtcagtgaagtatt

SEQ ID NO: 1732586 - DNA, 15 bp, Homo sapiens
gtcagtgaagtattt

SEQ ID NO: 1732587 - DNA, 15 bp, Homo sapiens
tcagtgaagtatttt

SEQ ID NO: 1732588 - DNA, 15 bp, Homo sapiens
cagtgaagtattttt

SEQ ID NO: 1732589 - DNA, 15 bp, Homo sapiens
agtgaagtatttttt

SEQ ID NO: 1732590 - DNA, 15 bp, Homo sapiens
gtgaagtattttttt

SEQ ID NO: 1732591 - DNA, 15 bp, Homo sapiens
tgaagtatttttttc

SEQ ID NO: 1732592 - DNA, 15 bp, Homo sapiens
gaagtatttttttcc

SEQ ID NO: 1732593 - DNA, 15 bp, Homo sapiens
aagtatttttttcct

SEQ ID NO: 1732594 - DNA, 15 bp, Homo sapiens
agtatttttttcctt

SEQ ID NO: 1732595 - DNA, 15 bp, Homo sapiens
gtatttttttcctta

SEQ ID NO: 1732596 - DNA, 15 bp, Homo sapiens
tatttttttccttat

SEQ ID NO: 1732597 - DNA, 15 bp, Homo sapiens
atttttttccttatt

SEQ ID NO: 1732598 - DNA, 15 bp, Homo sapiens
tttttttccttattt

SEQ ID NO: 1732599 - DNA, 15 bp, Homo sapiens
ttttttccttattta

SEQ ID NO: 1732600 - DNA, 15 bp, Homo sapiens
tttttccttatttat

SEQ ID NO: 1732601 - DNA, 15 bp, Homo sapiens
ttttccttatttata

SEQ ID NO: 1732602 - DNA, 15 bp, Homo sapiens
tttccttatttatat

SEQ ID NO: 1732603 - DNA, 15 bp, Homo sapiens
ttccttatttatata

SEQ ID NO: 1732604 - DNA, 15 bp, Homo sapiens
tccttatttatatac

SEQ ID NO: 1732605 - DNA, 15 bp, Homo sapiens
ccttatttatataca

SEQ ID NO: 1732606 - DNA, 15 bp, Homo sapiens
cttatttatatacat

SEQ ID NO: 1732607 - DNA, 15 bp, Homo sapiens
ttatttatatacatt

SEQ ID NO: 1732608 - DNA, 15 bp, Homo sapiens
tatttatatacatta

SEQ ID NO: 1732609 - DNA, 15 bp, Homo sapiens
atttatatacattat

SEQ ID NO: 1732610 - DNA, 15 bp, Homo sapiens
tttatatacattata

SEQ ID NO: 1732611 - DNA, 15 bp, Homo sapiens
ttatatacattataa

SEQ ID NO: 1732612 - DNA, 15 bp, Homo sapiens
tatatacattataac

SEQ ID NO: 1732613 - DNA, 15 bp, Homo sapiens
atatacattataact

SEQ ID NO: 1732614 - DNA, 15 bp, Homo sapiens
tatacattataactt

SEQ ID NO: 1732615 - DNA, 15 bp, Homo sapiens
atacattataacttt

SEQ ID NO: 1732616 - DNA, 15 bp, Homo sapiens
tacattataactttc

SEQ ID NO: 1732617 - DNA, 15 bp, Homo sapiens
acattataactttcc

SEQ ID NO: 1732618 - DNA, 15 bp, Homo sapiens
cattataactttcct

SEQ ID NO: 1732619 - DNA, 15 bp, Homo sapiens
attataactttcctt

SEQ ID NO: 1732620 - DNA, 15 bp, Homo sapiens
ttataactttcctta

SEQ ID NO: 1732621 - DNA, 15 bp, Homo sapiens
tataactttccttat

SEQ ID NO: 1732622 - DNA, 15 bp, Homo sapiens
ataactttccttatt

SEQ ID NO: 1732623 - DNA, 15 bp, Homo sapiens
taactttccttattt

SEQ ID NO: 1732624 - DNA, 15 bp, Homo sapiens
aactttccttattta

SEQ ID NO: 1732625 - DNA, 15 bp, Homo sapiens
actttccttatttat

SEQ ID NO: 1732626 - DNA, 15 bp, Homo sapiens
ctttccttatttatg

SEQ ID NO: 1732627 - DNA, 15 bp, Homo sapiens
tttccttatttatgt

SEQ ID NO: 1732628 - DNA, 15 bp, Homo sapiens
ttccttatttatgta

SEQ ID NO: 1732629 - DNA, 15 bp, Homo sapiens
tccttatttatgtac

SEQ ID NO: 1732630 - DNA, 15 bp, Homo sapiens
ccttatttatgtaca

SEQ ID NO: 1732631 - DNA, 15 bp, Homo sapiens
cttatttatgtacat

SEQ ID NO: 1732632 - DNA, 15 bp, Homo sapiens
ttatttatgtacatt

SEQ ID NO: 1732633 - DNA, 15 bp, Homo sapiens
tatttatgtacatta

SEQ ID NO: 1732634 - DNA, 15 bp, Homo sapiens
atttatgtacattat

SEQ ID NO: 1732635 - DNA, 15 bp, Homo sapiens
tttatgtacattata

SEQ ID NO: 1732636 - DNA, 15 bp, Homo sapiens
ttatgtacattataa

SEQ ID NO: 1732637 - DNA, 15 bp, Homo sapiens
tatgtacattataat

SEQ ID NO: 1732638 - DNA, 15 bp, Homo sapiens
atgtacattataatt

SEQ ID NO: 1732639 - DNA, 15 bp, Homo sapiens
tgtacattataattt

SEQ ID NO: 1732640 - DNA, 15 bp, Homo sapiens
gtacattataatttt

SEQ ID NO: 1732641 - DNA, 15 bp, Homo sapiens
tacattataatttta

SEQ ID NO: 1732642 - DNA, 15 bp, Homo sapiens
acattataattttaa

SEQ ID NO: 1732643 - DNA, 15 bp, Homo sapiens
cattataattttaaa

SEQ ID NO: 1732644 - DNA, 15 bp, Homo sapiens
attataattttaaag

SEQ ID NO: 1732645 - DNA, 15 bp, Homo sapiens
ttataattttaaagg

SEQ ID NO: 1732646 - DNA, 15 bp, Homo sapiens
tataattttaaaggc

SEQ ID NO: 1732647 - DNA, 15 bp, Homo sapiens
ataattttaaaggcc

SEQ ID NO: 1732648 - DNA, 15 bp, Homo sapiens
taattttaaaggcct

SEQ ID NO: 1732649 - DNA, 15 bp, Homo sapiens
aattttaaaggcctg

SEQ ID NO: 1732650 - DNA, 15 bp, Homo sapiens
attttaaaggcctga

SEQ ID NO: 1732651 - DNA, 15 bp, Homo sapiens
ttttaaaggcctgat

SEQ ID NO: 1732652 - DNA, 15 bp, Homo sapiens
tttaaaggcctgata

SEQ ID NO: 1732653 - DNA, 15 bp, Homo sapiens
ttaaaggcctgatag

SEQ ID NO: 1732654 - DNA, 15 bp, Homo sapiens
taaaggcctgatagt

SEQ ID NO: 1732655 - DNA, 15 bp, Homo sapiens
aaaggcctgatagtc

SEQ ID NO: 1732656 - DNA, 15 bp, Homo sapiens
aaggcctgatagtca

SEQ ID NO: 1732657 - DNA, 15 bp, Homo sapiens
aggcctgatagtcat

SEQ ID NO: 1732658 - DNA, 15 bp, Homo sapiens
ggcctgatagtcata

SEQ ID NO: 1732659 - DNA, 15 bp, Homo sapiens
gcctgatagtcataa

SEQ ID NO: 1732660 - DNA, 15 bp, Homo sapiens
cctgatagtcataat

SEQ ID NO: 1732661 - DNA, 15 bp, Homo sapiens
ctgatagtcataatt

SEQ ID NO: 1732662 - DNA, 15 bp, Homo sapiens
tgatagtcataatta

SEQ ID NO: 1732663 - DNA, 15 bp, Homo sapiens
gatagtcataattat

SEQ ID NO: 1732664 - DNA, 15 bp, Homo sapiens
atagtcataattatt

SEQ ID NO: 1732665 - DNA, 15 bp, Homo sapiens
tagtcataattattg

SEQ ID NO: 1732666 - DNA, 15 bp, Homo sapiens
agtcataattattga

SEQ ID NO: 1732667 - DNA, 15 bp, Homo sapiens
gtcataattattgat

SEQ ID NO: 1732668 - DNA, 15 bp, Homo sapiens
tcataattattgatg

SEQ ID NO: 1732669 - DNA, 15 bp, Homo sapiens
cataattattgatgt

SEQ ID NO: 1732670 - DNA, 15 bp, Homo sapiens
ataattattgatgtt

SEQ ID NO: 1732671 - DNA, 15 bp, Homo sapiens
taattattgatgttc

SEQ ID NO: 1732672 - DNA, 15 bp, Homo sapiens
aattattgatgttca

SEQ ID NO: 1732673 - DNA, 15 bp, Homo sapiens
attattgatgttcag

SEQ ID NO: 1732674 - DNA, 15 bp, Homo sapiens
ttattgatgttcaga

SEQ ID NO: 1732675 - DNA, 15 bp, Homo sapiens
tattgatgttcagat

SEQ ID NO: 1732676 - DNA, 15 bp, Homo sapiens
attgatgttcagatt

SEQ ID NO: 1732677 - DNA, 15 bp, Homo sapiens
ttgatgttcagattg

SEQ ID NO: 1732678 - DNA, 15 bp, Homo sapiens
tgatgttcagattgg

SEQ ID NO: 1732679 - DNA, 15 bp, Homo sapiens
gatgttcagattggt

SEQ ID NO: 1732680 - DNA, 15 bp, Homo sapiens
atgttcagattggta

SEQ ID NO: 1732681 - DNA, 15 bp, Homo sapiens
tgttcagattggtag

SEQ ID NO: 1732682 - DNA, 15 bp, Homo sapiens
gttcagattggtagt

SEQ ID NO: 1732683 - DNA, 15 bp, Homo sapiens
ttcagattggtagtt

SEQ ID NO: 1732684 - DNA, 15 bp, Homo sapiens
tcagattggtagtta

SEQ ID NO: 1732685 - DNA, 15 bp, Homo sapiens
cagattggtagttat

SEQ ID NO: 1732686 - DNA, 15 bp, Homo sapiens
agattggtagttatt

SEQ ID NO: 1732687 - DNA, 15 bp, Homo sapiens
gattggtagttattt

SEQ ID NO: 1732688 - DNA, 15 bp, Homo sapiens
attggtagttatttc

SEQ ID NO: 1732689 - DNA, 15 bp, Homo sapiens
ttggtagttatttct

SEQ ID NO: 1732690 - DNA, 15 bp, Homo sapiens
tggtagttatttctg

SEQ ID NO: 1732691 - DNA, 15 bp, Homo sapiens
ggtagttatttctgt

SEQ ID NO: 1732692 - DNA, 15 bp, Homo sapiens
gtagttatttctgtc

SEQ ID NO: 1732693 - DNA, 15 bp, Homo sapiens
tagttatttctgtct

SEQ ID NO: 1732694 - DNA, 15 bp, Homo sapiens
agttatttctgtctc

SEQ ID NO: 1732695 - DNA, 15 bp, Homo sapiens
gttatttctgtctct

SEQ ID NO: 1732696 - DNA, 15 bp, Homo sapiens
ttatttctgtctctt

SEQ ID NO: 1732697 - DNA, 15 bp, Homo sapiens
tatttctgtctctta

SEQ ID NO: 1732698 - DNA, 15 bp, Homo sapiens
atttctgtctcttat

SEQ ID NO: 1732699 - DNA, 15 bp, Homo sapiens
tttctgtctcttatg

SEQ ID NO: 1732700 - DNA, 15 bp, Homo sapiens
ttctgtctcttatgt

SEQ ID NO: 1732701 - DNA, 15 bp, Homo sapiens
tctgtctcttatgta

SEQ ID NO: 1732702 - DNA, 15 bp, Homo sapiens
ctgtctcttatgtat

SEQ ID NO: 1732703 - DNA, 15 bp, Homo sapiens
tgtctcttatgtatt

SEQ ID NO: 1732704 - DNA, 15 bp, Homo sapiens
gtctcttatgtattc

SEQ ID NO: 1732705 - DNA, 15 bp, Homo sapiens
tctcttatgtattca

SEQ ID NO: 1732706 - DNA, 15 bp, Homo sapiens
ctcttatgtattcaa

SEQ ID NO: 1732707 - DNA, 15 bp, Homo sapiens
tcttatgtattcaac

SEQ ID NO: 1732708 - DNA, 15 bp, Homo sapiens
cttatgtattcaact

SEQ ID NO: 1732709 - DNA, 15 bp, Homo sapiens
ttatgtattcaacta

SEQ ID NO: 1732710 - DNA, 15 bp, Homo sapiens
tatgtattcaactat

SEQ ID NO: 1732711 - DNA, 15 bp, Homo sapiens
atgtattcaactata

SEQ ID NO: 1732712 - DNA, 15 bp, Homo sapiens
tgtattcaactataa

SEQ ID NO: 1732713 - DNA, 15 bp, Homo sapiens
gtattcaactataaa

SEQ ID NO: 1732714 - DNA, 15 bp, Homo sapiens
tattcaactataaac

SEQ ID NO: 1732715 - DNA, 15 bp, Homo sapiens
attcaactataaaca

SEQ ID NO: 1732716 - DNA, 15 bp, Homo sapiens
ttcaactataaacat

SEQ ID NO: 1732717 - DNA, 15 bp, Homo sapiens
tcaactataaacatt

SEQ ID NO: 1732718 - DNA, 15 bp, Homo sapiens
caactataaacattt

SEQ ID NO: 1732719 - DNA, 15 bp, Homo sapiens
aactataaacattta

SEQ ID NO: 1732720 - DNA, 15 bp, Homo sapiens
actataaacatttaa

SEQ ID NO: 1732721 - DNA, 15 bp, Homo sapiens
ctataaacatttaat

SEQ ID NO: 1732722 - DNA, 15 bp, Homo sapiens
tataaacatttaatc

SEQ ID NO: 1732723 - DNA, 15 bp, Homo sapiens
ataaacatttaatca

SEQ ID NO: 1732724 - DNA, 15 bp, Homo sapiens
taaacatttaatcaa

SEQ ID NO: 1732725 - DNA, 15 bp, Homo sapiens
aaacatttaatcaag

SEQ ID NO: 1732726 - DNA, 15 bp, Homo sapiens
aacatttaatcaagt

SEQ ID NO: 1732727 - DNA, 15 bp, Homo sapiens
acatttaatcaagtt

SEQ ID NO: 1732728 - DNA, 15 bp, Homo sapiens
catttaatcaagttt

SEQ ID NO: 1732729 - DNA, 15 bp, Homo sapiens
atttaatcaagttta

SEQ ID NO: 1732730 - DNA, 15 bp, Homo sapiens
tttaatcaagtttat

SEQ ID NO: 1732731 - DNA, 15 bp, Homo sapiens
ttaatcaagtttatg

SEQ ID NO: 1732732 - DNA, 15 bp, Homo sapiens
taatcaagtttatga

SEQ ID NO: 1732733 - DNA, 15 bp, Homo sapiens
aatcaagtttatgag

SEQ ID NO: 1732734 - DNA, 15 bp, Homo sapiens
atcaagtttatgaga

SEQ ID NO: 1732735 - DNA, 15 bp, Homo sapiens
tcaagtttatgagac

SEQ ID NO: 1732736 - DNA, 15 bp, Homo sapiens
caagtttatgagacc

SEQ ID NO: 1732737 - DNA, 15 bp, Homo sapiens
aagtttatgagacct

SEQ ID NO: 1732738 - DNA, 15 bp, Homo sapiens
agtttatgagaccta

SEQ ID NO: 1732739 - DNA, 15 bp, Homo sapiens
gtttatgagacctag

SEQ ID NO: 1732740 - DNA, 15 bp, Homo sapiens
tttatgagacctaga

SEQ ID NO: 1732741 - DNA, 15 bp, Homo sapiens
ttatgagacctagat

SEQ ID NO: 1732742 - DNA, 15 bp, Homo sapiens
tatgagacctagata

SEQ ID NO: 1732743 - DNA, 15 bp, Homo sapiens
atgagacctagatat

SEQ ID NO: 1732744 - DNA, 15 bp, Homo sapiens
tgagacctagatatt

SEQ ID NO: 1732745 - DNA, 15 bp, Homo sapiens
gagacctagatattt

SEQ ID NO: 1732746 - DNA, 15 bp, Homo sapiens
agacctagatattta

SEQ ID NO: 1732747 - DNA, 15 bp, Homo sapiens
gacctagatatttag

SEQ ID NO: 1732748 - DNA, 15 bp, Homo sapiens
acctagatatttagc

SEQ ID NO: 1732749 - DNA, 15 bp, Homo sapiens
cctagatatttagca

SEQ ID NO: 1732750 - DNA, 15 bp, Homo sapiens
ctagatatttagcag

SEQ ID NO: 1732751 - DNA, 15 bp, Homo sapiens
tagatatttagcaga

SEQ ID NO: 1732752 - DNA, 15 bp, Homo sapiens
agatatttagcagag

SEQ ID NO: 1732753 - DNA, 15 bp, Homo sapiens
gatatttagcagagt

SEQ ID NO: 1732754 - DNA, 15 bp, Homo sapiens
atatttagcagagtt

SEQ ID NO: 1732755 - DNA, 15 bp, Homo sapiens
tatttagcagagttt

SEQ ID NO: 1732756 - DNA, 15 bp, Homo sapiens
atttagcagagtttt

SEQ ID NO: 1732757 - DNA, 15 bp, Homo sapiens
tttagcagagttttg

SEQ ID NO: 1732758 - DNA, 15 bp, Homo sapiens
ttagcagagttttgg

SEQ ID NO: 1732759 - DNA, 15 bp, Homo sapiens
tagcagagttttgga

SEQ ID NO: 1732760 - DNA, 15 bp, Homo sapiens
agcagagttttggag

SEQ ID NO: 1732761 - DNA, 15 bp, Homo sapiens
gcagagttttggagt

SEQ ID NO: 1732762 - DNA, 15 bp, Homo sapiens
cagagttttggagta

SEQ ID NO: 1732763 - DNA, 15 bp, Homo sapiens
agagttttggagtaa

SEQ ID NO: 1732764 - DNA, 15 bp, Homo sapiens
gagttttggagtaaa

SEQ ID NO: 1732765 - DNA, 15 bp, Homo sapiens
agttttggagtaaat

SEQ ID NO: 1732766 - DNA, 15 bp, Homo sapiens
gttttggagtaaatt

SEQ ID NO: 1732767 - DNA, 15 bp, Homo sapiens
ttttggagtaaatta

SEQ ID NO: 1732768 - DNA, 15 bp, Homo sapiens
tttggagtaaattat

SEQ ID NO: 1732769 - DNA, 15 bp, Homo sapiens
ttggagtaaattatt

SEQ ID NO: 1732770 - DNA, 15 bp, Homo sapiens
tggagtaaattattt

SEQ ID NO: 1732771 - DNA, 15 bp, Homo sapiens
ggagtaaattatttt

SEQ ID NO: 1732772 - DNA, 15 bp, Homo sapiens
gagtaaattatttta

SEQ ID NO: 1732773 - DNA, 15 bp, Homo sapiens
agtaaattattttat

SEQ ID NO: 1732774 - DNA, 15 bp, Homo sapiens
gtaaattattttatt

SEQ ID NO: 1732775 - DNA, 15 bp, Homo sapiens
taaattattttatta

SEQ ID NO: 1732776 - DNA, 15 bp, Homo sapiens
aaattattttattaa

SEQ ID NO: 1732777 - DNA, 15 bp, Homo sapiens
aattattttattaaa

SEQ ID NO: 1732778 - DNA, 15 bp, Homo sapiens
attattttattaaac

SEQ ID NO: 1732779 - DNA, 15 bp, Homo sapiens
ttattttattaaaca

SEQ ID NO: 1732780 - DNA, 15 bp, Homo sapiens
tattttattaaacaa

SEQ ID NO: 1732781 - DNA, 15 bp, Homo sapiens
attttattaaacaaa

SEQ ID NO: 1732782 - DNA, 15 bp, Homo sapiens
ttttattaaacaaag

SEQ ID NO: 1732783 - DNA, 15 bp, Homo sapiens
tttattaaacaaaga

SEQ ID NO: 1732784 - DNA, 15 bp, Homo sapiens
ttattaaacaaagaa

SEQ ID NO: 1732785 - DNA, 15 bp, Homo sapiens
tattaaacaaagaat

SEQ ID NO: 1732786 - DNA, 15 bp, Homo sapiens
attaaacaaagaata

SEQ ID NO: 1732787 - DNA, 15 bp, Homo sapiens
ttaaacaaagaatat

SEQ ID NO: 1732788 - DNA, 15 bp, Homo sapiens
taaacaaagaatata

SEQ ID NO: 1732789 - DNA, 15 bp, Homo sapiens
aaacaaagaatataa

SEQ ID NO: 1732790 - DNA, 15 bp, Homo sapiens
aacaaagaatataaa

SEQ ID NO: 1732791 - DNA, 15 bp, Homo sapiens
acaaagaatataaaa

SEQ ID NO: 1732792 - DNA, 15 bp, Homo sapiens
caaagaatataaaat

SEQ ID NO: 1732793 - DNA, 15 bp, Homo sapiens
aaagaatataaaata

SEQ ID NO: 1732794 - DNA, 15 bp, Homo sapiens
aagaatataaaataa

SEQ ID NO: 1732795 - DNA, 15 bp, Homo sapiens
agaatataaaataaa

SEQ ID NO: 1732796 - DNA, 15 bp, Homo sapiens
gaatataaaataaac

SEQ ID NO: 1732797 - DNA, 15 bp, Homo sapiens
aatataaaataaaca

SEQ ID NO: 1732798 - DNA, 15 bp, Homo sapiens
atataaaataaacat

SEQ ID NO: 1732799 - DNA, 15 bp, Homo sapiens
tataaaataaacatt

SEQ ID NO: 1732800 - DNA, 15 bp, Homo sapiens
ataaaataaacattt

SEQ ID NO: 1732801 - DNA, 15 bp, Homo sapiens
taaaataaacatttc

SEQ ID NO: 1732802 - DNA, 15 bp, Homo sapiens
aaaataaacatttct

SEQ ID NO: 1732803 - DNA, 15 bp, Homo sapiens
aaataaacatttcta

SEQ ID NO: 1732804 - DNA, 15 bp, Homo sapiens
aataaacatttctac

SEQ ID NO: 1732805 - DNA, 15 bp, Homo sapiens
ataaacatttctact

SEQ ID NO: 1732806 - DNA, 15 bp, Homo sapiens
taaacatttctactt

SEQ ID NO: 1732807 - DNA, 15 bp, Homo sapiens
aaacatttctactta

SEQ ID NO: 1732808 - DNA, 15 bp, Homo sapiens
aacatttctacttat

SEQ ID NO: 1732809 - DNA, 15 bp, Homo sapiens
acatttctacttatg

SEQ ID NO: 1732810 - DNA, 15 bp, Homo sapiens
catttctacttatgt

SEQ ID NO: 1732811 - DNA, 15 bp, Homo sapiens
atttctacttatgtt

SEQ ID NO: 1732812 - DNA, 15 bp, Homo sapiens
tttctacttatgttc

SEQ ID NO: 1732813 - DNA, 15 bp, Homo sapiens
ttctacttatgttcc

SEQ ID NO: 1732814 - DNA, 15 bp, Homo sapiens
tctacttatgttcct

SEQ ID NO: 1732815 - DNA, 15 bp, Homo sapiens
ctacttatgttcctg

SEQ ID NO: 1732816 - DNA, 15 bp, Homo sapiens
tacttatgttcctgt

SEQ ID NO: 1732817 - DNA, 15 bp, Homo sapiens
cttatgttcctgttt

SEQ ID NO: 1732818 - DNA, 15 bp, Homo sapiens
ttatgttcctgtttt

SEQ ID NO: 1732819 - DNA, 15 bp, Homo sapiens
tatgttcctgtttta

SEQ ID NO: 1732820 - DNA, 15 bp, Homo sapiens
atgttcctgttttaa

SEQ ID NO: 1732821 - DNA, 15 bp, Homo sapiens
tgttcctgttttaat

SEQ ID NO: 1732822 - DNA, 15 bp, Homo sapiens
gttcctgttttaatt

SEQ ID NO: 1732823 - DNA, 15 bp, Homo sapiens
ttcctgttttaattt

SEQ ID NO: 1732824 - DNA, 15 bp, Homo sapiens
tcctgttttaattta

SEQ ID NO: 1732825 - DNA, 15 bp, Homo sapiens
cctgttttaatttac

SEQ ID NO: 1732826 - DNA, 15 bp, Homo sapiens
ctgttttaatttacc

SEQ ID NO: 1732827 - DNA, 15 bp, Homo sapiens
tgttttaatttacct

SEQ ID NO: 1732828 - DNA, 15 bp, Homo sapiens
gttttaatttacctc

SEQ ID NO: 1732829 - DNA, 15 bp, Homo sapiens
ttttaatttacctca

SEQ ID NO: 1732830 - DNA, 15 bp, Homo sapiens
tttaatttacctcat

SEQ ID NO: 1732831 - DNA, 15 bp, Homo sapiens
ttaatttacctcatt

SEQ ID NO: 1732832 - DNA, 15 bp, Homo sapiens
taatttacctcattt

SEQ ID NO: 1732833 - DNA, 15 bp, Homo sapiens
aatttacctcattta

SEQ ID NO: 1732834 - DNA, 15 bp, Homo sapiens
atttacctcatttat

SEQ ID NO: 1732835 - DNA, 15 bp, Homo sapiens
tttacctcatttata

SEQ ID NO: 1732836 - DNA, 15 bp, Homo sapiens
ttacctcatttatat

SEQ ID NO: 1732837 - DNA, 15 bp, Homo sapiens
tacctcatttatatg

SEQ ID NO: 1732838 - DNA, 15 bp, Homo sapiens
acctcatttatatgc

SEQ ID NO: 1732839 - DNA, 15 bp, Homo sapiens
cctcatttatatgca

SEQ ID NO: 1732840 - DNA, 15 bp, Homo sapiens
ctcatttatatgcat

SEQ ID NO: 1732841 - DNA, 15 bp, Homo sapiens
tcatttatatgcatc

SEQ ID NO: 1732842 - DNA, 15 bp, Homo sapiens
catttatatgcatct

SEQ ID NO: 1732843 - DNA, 15 bp, Homo sapiens
atttatatgcatctt

SEQ ID NO: 1732844 - DNA, 15 bp, Homo sapiens
tttatatgcatcttg

SEQ ID NO: 1732845 - DNA, 15 bp, Homo sapiens
ttatatgcatcttga

SEQ ID NO: 1732846 - DNA, 15 bp, Homo sapiens
tatatgcatcttgat

SEQ ID NO: 1732847 - DNA, 15 bp, Homo sapiens
atatgcatcttgata

SEQ ID NO: 1732848 - DNA, 15 bp, Homo sapiens
tatgcatcttgatat

SEQ ID NO: 1732849 - DNA, 15 bp, Homo sapiens
atgcatcttgatatt

SEQ ID NO: 1732850 - DNA, 15 bp, Homo sapiens
tgcatcttgatattg

SEQ ID NO: 1732851 - DNA, 15 bp, Homo sapiens
gcatcttgatattgc

SEQ ID NO: 1732852 - DNA, 15 bp, Homo sapiens
catcttgatattgca

SEQ ID NO: 1732853 - DNA, 15 bp, Homo sapiens
atcttgatattgcat

SEQ ID NO: 1732854 - DNA, 15 bp, Homo sapiens
tcttgatattgcatt

SEQ ID NO: 1732855 - DNA, 15 bp, Homo sapiens
cttgatattgcattt

SEQ ID NO: 1732856 - DNA, 15 bp, Homo sapiens
ttgatattgcatttt

SEQ ID NO: 1732857 - DNA, 15 bp, Homo sapiens
tgatattgcattttc

SEQ ID NO: 1732858 - DNA, 15 bp, Homo sapiens
gatattgcattttca

SEQ ID NO: 1732859 - DNA, 15 bp, Homo sapiens
atattgcattttcat

SEQ ID NO: 1732860 - DNA, 15 bp, Homo sapiens
tattgcattttcata

SEQ ID NO: 1732861 - DNA, 15 bp, Homo sapiens
attgcattttcatat

SEQ ID NO: 1732862 - DNA, 15 bp, Homo sapiens
ttgcattttcatatt

SEQ ID NO: 1732863 - DNA, 15 bp, Homo sapiens
tgcattttcatattc

SEQ ID NO: 1732864 - DNA, 15 bp, Homo sapiens
gcattttcatattct

SEQ ID NO: 1732865 - DNA, 15 bp, Homo sapiens
cattttcatattcta

SEQ ID NO: 1732866 - DNA, 15 bp, Homo sapiens
attttcatattctaa

SEQ ID NO: 1732867 - DNA, 15 bp, Homo sapiens
ttttcatattctaaa

SEQ ID NO: 1732868 - DNA, 15 bp, Homo sapiens
tttcatattctaaaa

SEQ ID NO: 1732869 - DNA, 15 bp, Homo sapiens
ttcatattctaaaaa

SEQ ID NO: 1732870 - DNA, 15 bp, Homo sapiens
tcatattctaaaaac

SEQ ID NO: 1732871 - DNA, 15 bp, Homo sapiens
catattctaaaaact

SEQ ID NO: 1732872 - DNA, 15 bp, Homo sapiens
atattctaaaaacta

SEQ ID NO: 1732873 - DNA, 15 bp, Homo sapiens
tattctaaaaactat

SEQ ID NO: 1732874 - DNA, 15 bp, Homo sapiens
attctaaaaactatt

SEQ ID NO: 1732875 - DNA, 15 bp, Homo sapiens
ttctaaaaactattt

SEQ ID NO: 1732876 - DNA, 15 bp, Homo sapiens
tctaaaaactatttt

SEQ ID NO: 1732877 - DNA, 15 bp, Homo sapiens
ctaaaaactattttt

SEQ ID NO: 1732878 - DNA, 15 bp, Homo sapiens
taaaaactattttta

SEQ ID NO: 1732879 - DNA, 15 bp, Homo sapiens
aaaaactatttttaa

SEQ ID NO: 1732880 - DNA, 15 bp, Homo sapiens
aaaactatttttaaa

SEQ ID NO: 1732881 - DNA, 15 bp, Homo sapiens
aaactatttttaaag

SEQ ID NO: 1732882 - DNA, 15 bp, Homo sapiens
aactatttttaaaga

SEQ ID NO: 1732883 - DNA, 15 bp, Homo sapiens
actatttttaaagac

SEQ ID NO: 1732884 - DNA, 15 bp, Homo sapiens
ctatttttaaagaca

SEQ ID NO: 1732885 - DNA, 15 bp, Homo sapiens
tatttttaaagacag

SEQ ID NO: 1732886 - DNA, 15 bp, Homo sapiens
atttttaaagacagg

SEQ ID NO: 1732887 - DNA, 15 bp, Homo sapiens
tttttaaagacaggt

SEQ ID NO: 1732888 - DNA, 15 bp, Homo sapiens
tttaaagacaggttg

SEQ ID NO: 1732889 - DNA, 15 bp, Homo sapiens
ttaaagacaggttga

SEQ ID NO: 1732890 - DNA, 15 bp, Homo sapiens
taaagacaggttgat

SEQ ID NO: 1732891 - DNA, 15 bp, Homo sapiens
aaagacaggttgatt

SEQ ID NO: 1732892 - DNA, 15 bp, Homo sapiens
aagacaggttgattc

SEQ ID NO: 1732893 - DNA, 15 bp, Homo sapiens
agacaggttgattca

SEQ ID NO: 1732894 - DNA, 15 bp, Homo sapiens
gacaggttgattcag

SEQ ID NO: 1732895 - DNA, 15 bp, Homo sapiens
acaggttgattcaga

SEQ ID NO: 1732896 - DNA, 15 bp, Homo sapiens
caggttgattcagaa

SEQ ID NO: 1732897 - DNA, 15 bp, Homo sapiens
aggttgattcagaat

SEQ ID NO: 1732898 - DNA, 15 bp, Homo sapiens
ggttgattcagaatt

SEQ ID NO: 1732899 - DNA, 15 bp, Homo sapiens
gttgattcagaatta

SEQ ID NO: 1732900 - DNA, 15 bp, Homo sapiens
ttgattcagaattac

SEQ ID NO: 1732901 - DNA, 15 bp, Homo sapiens
tgattcagaattaca

SEQ ID NO: 1732902 - DNA, 15 bp, Homo sapiens
gattcagaattacag

SEQ ID NO: 1732903 - DNA, 15 bp, Homo sapiens
attcagaattacagt

SEQ ID NO: 1732904 - DNA, 15 bp, Homo sapiens
ttcagaattacagtg

SEQ ID NO: 1732905 - DNA, 15 bp, Homo sapiens
tcagaattacagtgt

SEQ ID NO: 1732906 - DNA, 15 bp, Homo sapiens
cagaattacagtgta

SEQ ID NO: 1732907 - DNA, 15 bp, Homo sapiens
agaattacagtgtac

SEQ ID NO: 1732908 - DNA, 15 bp, Homo sapiens
gaattacagtgtact

SEQ ID NO: 1732909 - DNA, 15 bp, Homo sapiens
aattacagtgtactt

SEQ ID NO: 1732910 - DNA, 15 bp, Homo sapiens
attacagtgtacttg

SEQ ID NO: 1732911 - DNA, 15 bp, Homo sapiens
ttacagtgtacttga

SEQ ID NO: 1732912 - DNA, 15 bp, Homo sapiens
tacagtgtacttgaa

SEQ ID NO: 1732913 - DNA, 15 bp, Homo sapiens
acagtgtacttgaaa

SEQ ID NO: 1732914 - DNA, 15 bp, Homo sapiens
cagtgtacttgaaaa

SEQ ID NO: 1732915 - DNA, 15 bp, Homo sapiens
agtgtacttgaaaat

SEQ ID NO: 1732916 - DNA, 15 bp, Homo sapiens
gtgtacttgaaaatc

SEQ ID NO: 1732917 - DNA, 15 bp, Homo sapiens
tgtacttgaaaatca

SEQ ID NO: 1732918 - DNA, 15 bp, Homo sapiens
gtacttgaaaatcat

SEQ ID NO: 1732919 - DNA, 15 bp, Homo sapiens
tacttgaaaatcatc

SEQ ID NO: 1732920 - DNA, 15 bp, Homo sapiens
acttgaaaatcatca

SEQ ID NO: 1732921 - DNA, 15 bp, Homo sapiens
cttgaaaatcatcag

SEQ ID NO: 1732922 - DNA, 15 bp, Homo sapiens
ttgaaaatcatcagg

SEQ ID NO: 1732923 - DNA, 15 bp, Homo sapiens
tgaaaatcatcaggt

SEQ ID NO: 1732924 - DNA, 15 bp, Homo sapiens
gaaaatcatcaggta

SEQ ID NO: 1732925 - DNA, 15 bp, Homo sapiens
aaaatcatcaggtac

SEQ ID NO: 1732926 - DNA, 15 bp, Homo sapiens
aaatcatcaggtacc

SEQ ID NO: 1732927 - DNA, 15 bp, Homo sapiens
aatcatcaggtacct

SEQ ID NO: 1732928 - DNA, 15 bp, Homo sapiens
atcatcaggtaccta

SEQ ID NO: 1732929 - DNA, 15 bp, Homo sapiens
tcatcaggtacctat

SEQ ID NO: 1732930 - DNA, 15 bp, Homo sapiens
catcaggtacctatt

SEQ ID NO: 1732931 - DNA, 15 bp, Homo sapiens
atcaggtacctatta

SEQ ID NO: 1732932 - DNA, 15 bp, Homo sapiens
tcaggtacctattat

SEQ ID NO: 1732933 - DNA, 15 bp, Homo sapiens
caggtacctattatt

SEQ ID NO: 1732934 - DNA, 15 bp, Homo sapiens
aggtacctattatta

SEQ ID NO: 1732935 - DNA, 15 bp, Homo sapiens
ggtacctattattag

SEQ ID NO: 1732936 - DNA, 15 bp, Homo sapiens
gtacctattattagt

SEQ ID NO: 1732937 - DNA, 15 bp, Homo sapiens
tacctattattagtt

SEQ ID NO: 1732938 - DNA, 15 bp, Homo sapiens
acctattattagttt

SEQ ID NO: 1732939 - DNA, 15 bp, Homo sapiens
cctattattagtttt

SEQ ID NO: 1732940 - DNA, 15 bp, Homo sapiens
ctattattagttttc

SEQ ID NO: 1732941 - DNA, 15 bp, Homo sapiens
tattattagttttca

SEQ ID NO: 1732942 - DNA, 15 bp, Homo sapiens
attattagttttcac

SEQ ID NO: 1732943 - DNA, 15 bp, Homo sapiens
ttattagttttcacc

SEQ ID NO: 1732944 - DNA, 15 bp, Homo sapiens
tattagttttcaccc

SEQ ID NO: 1732945 - DNA, 15 bp, Homo sapiens
attagttttcaccca

SEQ ID NO: 1732946 - DNA, 15 bp, Homo sapiens
ttagttttcacccac

SEQ ID NO: 1732947 - DNA, 15 bp, Homo sapiens
tagttttcacccaca

SEQ ID NO: 1732948 - DNA, 15 bp, Homo sapiens
agttttcacccacat

SEQ ID NO: 1732949 - DNA, 15 bp, Homo sapiens
gttttcacccacatt

SEQ ID NO: 1732950 - DNA, 15 bp, Homo sapiens
ttttcacccacattg

SEQ ID NO: 1732951 - DNA, 15 bp, Homo sapiens
tttcacccacattga

SEQ ID NO: 1732952 - DNA, 15 bp, Homo sapiens
ttcacccacattgaa

SEQ ID NO: 1732953 - DNA, 15 bp, Homo sapiens
tcacccacattgaat

SEQ ID NO: 1732954 - DNA, 15 bp, Homo sapiens
cacccacattgaatc

SEQ ID NO: 1732955 - DNA, 15 bp, Homo sapiens
acccacattgaatct

SEQ ID NO: 1732956 - DNA, 15 bp, Homo sapiens
cccacattgaatctg

SEQ ID NO: 1732957 - DNA, 15 bp, Homo sapiens
ccacattgaatctgt

SEQ ID NO: 1732958 - DNA, 15 bp, Homo sapiens
cacattgaatctgtg

SEQ ID NO: 1732959 - DNA, 15 bp, Homo sapiens
acattgaatctgtgt

SEQ ID NO: 1732960 - DNA, 15 bp, Homo sapiens
cattgaatctgtgtt

SEQ ID NO: 1732961 - DNA, 15 bp, Homo sapiens
attgaatctgtgttt

SEQ ID NO: 1732962 - DNA, 15 bp, Homo sapiens
ttgaatctgtgtttc

SEQ ID NO: 1732963 - DNA, 15 bp, Homo sapiens
tgaatctgtgtttca

SEQ ID NO: 1732964 - DNA, 15 bp, Homo sapiens
gaatctgtgtttcag

SEQ ID NO: 1732965 - DNA, 15 bp, Homo sapiens
aatctgtgtttcaga

SEQ ID NO: 1732966 - DNA, 15 bp, Homo sapiens
atctgtgtttcagaa

SEQ ID NO: 1732967 - DNA, 15 bp, Homo sapiens
tctgtgtttcagaaa

SEQ ID NO: 1732968 - DNA, 15 bp, Homo sapiens
ctgtgtttcagaaac

SEQ ID NO: 1732969 - DNA, 15 bp, Homo sapiens
tgtgtttcagaaact

SEQ ID NO: 1732970 - DNA, 15 bp, Homo sapiens
gtgtttcagaaactg

SEQ ID NO: 1732971 - DNA, 15 bp, Homo sapiens
tgtttcagaaactgt

SEQ ID NO: 1732972 - DNA, 15 bp, Homo sapiens
gtttcagaaactgtc

SEQ ID NO: 1732973 - DNA, 15 bp, Homo sapiens
tttcagaaactgtct

SEQ ID NO: 1732974 - DNA, 15 bp, Homo sapiens
ttcagaaactgtcta

SEQ ID NO: 1732975 - DNA, 15 bp, Homo sapiens
tcagaaactgtctac

SEQ ID NO: 1732976 - DNA, 15 bp, Homo sapiens
cagaaactgtctacc

SEQ ID NO: 1732977 - DNA, 15 bp, Homo sapiens
agaaactgtctacca

SEQ ID NO: 1732978 - DNA, 15 bp, Homo sapiens
gaaactgtctaccaa

SEQ ID NO: 1732979 - DNA, 15 bp, Homo sapiens
aaactgtctaccaaa

SEQ ID NO: 1732980 - DNA, 15 bp, Homo sapiens
aactgtctaccaaac

SEQ ID NO: 1732981 - DNA, 15 bp, Homo sapiens
actgtctaccaaact

SEQ ID NO: 1732982 - DNA, 15 bp, Homo sapiens
ctgtctaccaaactt

SEQ ID NO: 1732983 - DNA, 15 bp, Homo sapiens
tgtctaccaaacttt

SEQ ID NO: 1732984 - DNA, 15 bp, Homo sapiens
gtctaccaaactttg

SEQ ID NO: 1732985 - DNA, 15 bp, Homo sapiens
tctaccaaactttgt

SEQ ID NO: 1732986 - DNA, 15 bp, Homo sapiens
ctaccaaactttgtt

SEQ ID NO: 1732987 - DNA, 15 bp, Homo sapiens
taccaaactttgttt

SEQ ID NO: 1732988 - DNA, 15 bp, Homo sapiens
accaaactttgttta

SEQ ID NO: 1732989 - DNA, 15 bp, Homo sapiens
ccaaactttgtttat

SEQ ID NO: 1732990 - DNA, 15 bp, Homo sapiens
caaactttgtttatt

SEQ ID NO: 1732991 - DNA, 15 bp, Homo sapiens
aaactttgtttatta

SEQ ID NO: 1732992 - DNA, 15 bp, Homo sapiens
aactttgtttattaa

SEQ ID NO: 1732993 - DNA, 15 bp, Homo sapiens
actttgtttattaag

SEQ ID NO: 1732994 - DNA, 15 bp, Homo sapiens
ctttgtttattaagt

SEQ ID NO: 1732995 - DNA, 15 bp, Homo sapiens
tttgtttattaagta

SEQ ID NO: 1732996 - DNA, 15 bp, Homo sapiens
ttgtttattaagtaa

SEQ ID NO: 1732997 - DNA, 15 bp, Homo sapiens
tgtttattaagtaat

SEQ ID NO: 1732998 - DNA, 15 bp, Homo sapiens
gtttattaagtaatt

SEQ ID NO: 1732999 - DNA, 15 bp, Homo sapiens
tttattaagtaatta

SEQ ID NO: 1733000 - DNA, 15 bp, Homo sapiens
ttattaagtaattat

SEQ ID NO: 1733001 - DNA, 15 bp, Homo sapiens
tattaagtaattatt

SEQ ID NO: 1733002 - DNA, 15 bp, Homo sapiens
attaagtaattattt

SEQ ID NO: 1733003 - DNA, 15 bp, Homo sapiens
ttaagtaattatttt

SEQ ID NO: 1733004 - DNA, 15 bp, Homo sapiens
taagtaattattttc

SEQ ID NO: 1733005 - DNA, 15 bp, Homo sapiens
aagtaattattttcc

SEQ ID NO: 1733006 - DNA, 15 bp, Homo sapiens
agtaattattttccc

SEQ ID NO: 1733007 - DNA, 15 bp, Homo sapiens
gtaattattttccct

SEQ ID NO: 1733008 - DNA, 15 bp, Homo sapiens
taattattttcccta

SEQ ID NO: 1733009 - DNA, 15 bp, Homo sapiens
aattattttccctag

SEQ ID NO: 1733010 - DNA, 15 bp, Homo sapiens
attattttccctagt

SEQ ID NO: 1733011 - DNA, 15 bp, Homo sapiens
ttattttccctagtt

SEQ ID NO: 1733012 - DNA, 15 bp, Homo sapiens
tattttccctagttt

SEQ ID NO: 1733013 - DNA, 15 bp, Homo sapiens
attttccctagtttt

SEQ ID NO: 1733014 - DNA, 15 bp, Homo sapiens
ttttccctagtttta

SEQ ID NO: 1733015 - DNA, 15 bp, Homo sapiens
tttccctagttttat

SEQ ID NO: 1733016 - DNA, 15 bp, Homo sapiens
ttccctagttttatt

SEQ ID NO: 1733017 - DNA, 15 bp, Homo sapiens
tccctagttttattc

SEQ ID NO: 1733018 - DNA, 15 bp, Homo sapiens
ccctagttttattca

SEQ ID NO: 1733019 - DNA, 15 bp, Homo sapiens
cctagttttattcaa

SEQ ID NO: 1733020 - DNA, 15 bp, Homo sapiens
ctagttttattcaag

SEQ ID NO: 1733021 - DNA, 15 bp, Homo sapiens
tagttttattcaaga

SEQ ID NO: 1733022 - DNA, 15 bp, Homo sapiens
agttttattcaagat

SEQ ID NO: 1733023 - DNA, 15 bp, Homo sapiens
gttttattcaagata

SEQ ID NO: 1733024 - DNA, 15 bp, Homo sapiens
ttttattcaagatat

SEQ ID NO: 1733025 - DNA, 15 bp, Homo sapiens
tttattcaagatata

SEQ ID NO: 1733026 - DNA, 15 bp, Homo sapiens
ttattcaagatatac

SEQ ID NO: 1733027 - DNA, 15 bp, Homo sapiens
tattcaagatataca

SEQ ID NO: 1733028 - DNA, 15 bp, Homo sapiens
attcaagatatacaa

SEQ ID NO: 1733029 - DNA, 15 bp, Homo sapiens
ttcaagatatacaaa

SEQ ID NO: 1733030 - DNA, 15 bp, Homo sapiens
tcaagatatacaaag

SEQ ID NO: 1733031 - DNA, 15 bp, Homo sapiens
caagatatacaaagc

SEQ ID NO: 1733032 - DNA, 15 bp, Homo sapiens
aagatatacaaagct

SEQ ID NO: 1733033 - DNA, 15 bp, Homo sapiens
agatatacaaagctg

SEQ ID NO: 1733034 - DNA, 15 bp, Homo sapiens
gatatacaaagctgc

SEQ ID NO: 1733035 - DNA, 15 bp, Homo sapiens
atatacaaagctgcc

SEQ ID NO: 1733036 - DNA, 15 bp, Homo sapiens
tatacaaagctgcca

SEQ ID NO: 1733037 - DNA, 15 bp, Homo sapiens
atacaaagctgccaa

SEQ ID NO: 1733038 - DNA, 15 bp, Homo sapiens
tacaaagctgccaac

SEQ ID NO: 1733039 - DNA, 15 bp, Homo sapiens
acaaagctgccaact

SEQ ID NO: 1733040 - DNA, 15 bp, Homo sapiens
caaagctgccaacta

SEQ ID NO: 1733041 - DNA, 15 bp, Homo sapiens
aaagctgccaactag

SEQ ID NO: 1733042 - DNA, 15 bp, Homo sapiens
aagctgccaactagt

SEQ ID NO: 1733043 - DNA, 15 bp, Homo sapiens
agctgccaactagtg

SEQ ID NO: 1733044 - DNA, 15 bp, Homo sapiens
gctgccaactagtgc

SEQ ID NO: 1733045 - DNA, 15 bp, Homo sapiens
ctgccaactagtgct

SEQ ID NO: 1733046 - DNA, 15 bp, Homo sapiens
tgccaactagtgctt

SEQ ID NO: 1733047 - DNA, 15 bp, Homo sapiens
gccaactagtgcttt

SEQ ID NO: 1733048 - DNA, 15 bp, Homo sapiens
ccaactagtgctttt

SEQ ID NO: 1733049 - DNA, 15 bp, Homo sapiens
caactagtgcttttc

SEQ ID NO: 1733050 - DNA, 15 bp, Homo sapiens
aactagtgcttttca

SEQ ID NO: 1733051 - DNA, 15 bp, Homo sapiens
actagtgcttttcat

SEQ ID NO: 1733052 - DNA, 15 bp, Homo sapiens
ctagtgcttttcatc

SEQ ID NO: 1733053 - DNA, 15 bp, Homo sapiens
tagtgcttttcatca

SEQ ID NO: 1733054 - DNA, 15 bp, Homo sapiens
agtgcttttcatcag

SEQ ID NO: 1733055 - DNA, 15 bp, Homo sapiens
gtgcttttcatcagc

SEQ ID NO: 1733056 - DNA, 15 bp, Homo sapiens
tgcttttcatcagca

SEQ ID NO: 1733057 - DNA, 15 bp, Homo sapiens
gcttttcatcagcat

SEQ ID NO: 1733058 - DNA, 15 bp, Homo sapiens
cttttcatcagcatc

SEQ ID NO: 1733059 - DNA, 15 bp, Homo sapiens
ttttcatcagcatca

SEQ ID NO: 1733060 - DNA, 15 bp, Homo sapiens
tttcatcagcatcag

SEQ ID NO: 1733061 - DNA, 15 bp, Homo sapiens
ttcatcagcatcagg

SEQ ID NO: 1733062 - DNA, 15 bp, Homo sapiens
tcatcagcatcaggt

SEQ ID NO: 1733063 - DNA, 15 bp, Homo sapiens
catcagcatcaggta

SEQ ID NO: 1733064 - DNA, 15 bp, Homo sapiens
atcagcatcaggtaa

SEQ ID NO: 1733065 - DNA, 15 bp, Homo sapiens
tcagcatcaggtaaa

SEQ ID NO: 1733066 - DNA, 15 bp, Homo sapiens
cagcatcaggtaaat

SEQ ID NO: 1733067 - DNA, 15 bp, Homo sapiens
agcatcaggtaaatt

SEQ ID NO: 1733068 - DNA, 15 bp, Homo sapiens
gcatcaggtaaattg

SEQ ID NO: 1733069 - DNA, 15 bp, Homo sapiens
catcaggtaaattgt

SEQ ID NO: 1733070 - DNA, 15 bp, Homo sapiens
atcaggtaaattgtg

SEQ ID NO: 1733071 - DNA, 15 bp, Homo sapiens
tcaggtaaattgtgt

SEQ ID NO: 1733072 - DNA, 15 bp, Homo sapiens
caggtaaattgtgtt

SEQ ID NO: 1733073 - DNA, 15 bp, Homo sapiens
aggtaaattgtgtta

SEQ ID NO: 1733074 - DNA, 15 bp, Homo sapiens
ggtaaattgtgttac

SEQ ID NO: 1733075 - DNA, 15 bp, Homo sapiens
gtaaattgtgttact

SEQ ID NO: 1733076 - DNA, 15 bp, Homo sapiens
taaattgtgttacta

SEQ ID NO: 1733077 - DNA, 15 bp, Homo sapiens
aaattgtgttactat

SEQ ID NO: 1733078 - DNA, 15 bp, Homo sapiens
aattgtgttactata

SEQ ID NO: 1733079 - DNA, 15 bp, Homo sapiens
attgtgttactatac

SEQ ID NO: 1733080 - DNA, 15 bp, Homo sapiens
ttgtgttactatact

SEQ ID NO: 1733081 - DNA, 15 bp, Homo sapiens
tgtgttactatactg

SEQ ID NO: 1733082 - DNA, 15 bp, Homo sapiens
gtgttactatactgc

SEQ ID NO: 1733083 - DNA, 15 bp, Homo sapiens
tgttactatactgcg

SEQ ID NO: 1733084 - DNA, 15 bp, Homo sapiens
gttactatactgcgt

SEQ ID NO: 1733085 - DNA, 15 bp, Homo sapiens
ttactatactgcgtt

SEQ ID NO: 1733086 - DNA, 15 bp, Homo sapiens
tactatactgcgttg

SEQ ID NO: 1733087 - DNA, 15 bp, Homo sapiens
actatactgcgttga

SEQ ID NO: 1733088 - DNA, 15 bp, Homo sapiens
ctatactgcgttgaa

SEQ ID NO: 1733089 - DNA, 15 bp, Homo sapiens
tatactgcgttgaat

SEQ ID NO: 1733090 - DNA, 15 bp, Homo sapiens
atactgcgttgaatt

SEQ ID NO: 1733091 - DNA, 15 bp, Homo sapiens
tactgcgttgaattt

SEQ ID NO: 1733092 - DNA, 15 bp, Homo sapiens
actgcgttgaatttt

SEQ ID NO: 1733093 - DNA, 15 bp, Homo sapiens
ctgcgttgaatttta

SEQ ID NO: 1733094 - DNA, 15 bp, Homo sapiens
tgcgttgaattttag

SEQ ID NO: 1733095 - DNA, 15 bp, Homo sapiens
gcgttgaattttagc

SEQ ID NO: 1733096 - DNA, 15 bp, Homo sapiens
cgttgaattttagca

SEQ ID NO: 1733097 - DNA, 15 bp, Homo sapiens
gttgaattttagcaa

SEQ ID NO: 1733098 - DNA, 15 bp, Homo sapiens
ttgaattttagcaaa

SEQ ID NO: 1733099 - DNA, 15 bp, Homo sapiens
tgaattttagcaaag

SEQ ID NO: 1733100 - DNA, 15 bp, Homo sapiens
gaattttagcaaagg

SEQ ID NO: 1733101 - DNA, 15 bp, Homo sapiens
aattttagcaaaggt

SEQ ID NO: 1733102 - DNA, 15 bp, Homo sapiens
attttagcaaaggta

SEQ ID NO: 1733103 - DNA, 15 bp, Homo sapiens
ttttagcaaaggtaa

SEQ ID NO: 1733104 - DNA, 15 bp, Homo sapiens
tttagcaaaggtaaa

SEQ ID NO: 1733105 - DNA, 15 bp, Homo sapiens
ttagcaaaggtaaag

SEQ ID NO: 1733106 - DNA, 15 bp, Homo sapiens
tagcaaaggtaaagt

SEQ ID NO: 1733107 - DNA, 15 bp, Homo sapiens
agcaaaggtaaagta

SEQ ID NO: 1733108 - DNA, 15 bp, Homo sapiens
gcaaaggtaaagtat

SEQ ID NO: 1733109 - DNA, 15 bp, Homo sapiens
caaaggtaaagtatt

SEQ ID NO: 1733110 - DNA, 15 bp, Homo sapiens
aaaggtaaagtattt

SEQ ID NO: 1733111 - DNA, 15 bp, Homo sapiens
aaggtaaagtatttg

SEQ ID NO: 1733112 - DNA, 15 bp, Homo sapiens
aggtaaagtatttgc

SEQ ID NO: 1733113 - DNA, 15 bp, Homo sapiens
ggtaaagtatttgct

SEQ ID NO: 1733114 - DNA, 15 bp, Homo sapiens
gtaaagtatttgcta

SEQ ID NO: 1733115 - DNA, 15 bp, Homo sapiens
taaagtatttgctat

SEQ ID NO: 1733116 - DNA, 15 bp, Homo sapiens
aaagtatttgctatt

SEQ ID NO: 1733117 - DNA, 15 bp, Homo sapiens
aagtatttgctattt

SEQ ID NO: 1733118 - DNA, 15 bp, Homo sapiens
agtatttgctatttt

SEQ ID NO: 1733119 - DNA, 15 bp, Homo sapiens
gtatttgctatttta

SEQ ID NO: 1733120 - DNA, 15 bp, Homo sapiens
tatttgctattttag

SEQ ID NO: 1733121 - DNA, 15 bp, Homo sapiens
atttgctattttagt

SEQ ID NO: 1733122 - DNA, 15 bp, Homo sapiens
tttgctattttagtt

SEQ ID NO: 1733123 - DNA, 15 bp, Homo sapiens
ttgctattttagtta

SEQ ID NO: 1733124 - DNA, 15 bp, Homo sapiens
tgctattttagttat

SEQ ID NO: 1733125 - DNA, 15 bp, Homo sapiens
gctattttagttatt

SEQ ID NO: 1733126 - DNA, 15 bp, Homo sapiens
ctattttagttattg

SEQ ID NO: 1733127 - DNA, 15 bp, Homo sapiens
tattttagttattgt

SEQ ID NO: 1733128 - DNA, 15 bp, Homo sapiens
attttagttattgta

SEQ ID NO: 1733129 - DNA, 15 bp, Homo sapiens
ttttagttattgtag

SEQ ID NO: 1733130 - DNA, 15 bp, Homo sapiens
tttagttattgtagc

SEQ ID NO: 1733131 - DNA, 15 bp, Homo sapiens
ttagttattgtagct

SEQ ID NO: 1733132 - DNA, 15 bp, Homo sapiens
tagttattgtagctt

SEQ ID NO: 1733133 - DNA, 15 bp, Homo sapiens
agttattgtagcttt

SEQ ID NO: 1733134 - DNA, 15 bp, Homo sapiens
gttattgtagcttta

SEQ ID NO: 1733135 - DNA, 15 bp, Homo sapiens
ttattgtagctttat

SEQ ID NO: 1733136 - DNA, 15 bp, Homo sapiens
tattgtagctttatt

SEQ ID NO: 1733137 - DNA, 15 bp, Homo sapiens
attgtagctttattg

SEQ ID NO: 1733138 - DNA, 15 bp, Homo sapiens
ttgtagctttattga

SEQ ID NO: 1733139 - DNA, 15 bp, Homo sapiens
tgtagctttattgaa

SEQ ID NO: 1733140 - DNA, 15 bp, Homo sapiens
gtagctttattgaaa

SEQ ID NO: 1733141 - DNA, 15 bp, Homo sapiens
tagctttattgaaag

SEQ ID NO: 1733142 - DNA, 15 bp, Homo sapiens
agctttattgaaagc

SEQ ID NO: 1733143 - DNA, 15 bp, Homo sapiens
gctttattgaaagca

SEQ ID NO: 1733144 - DNA, 15 bp, Homo sapiens
ctttattgaaagcaa

SEQ ID NO: 1733145 - DNA, 15 bp, Homo sapiens
tttattgaaagcaaa

SEQ ID NO: 1733146 - DNA, 15 bp, Homo sapiens
ttattgaaagcaaac

SEQ ID NO: 1733147 - DNA, 15 bp, Homo sapiens
tattgaaagcaaaca

SEQ ID NO: 1733148 - DNA, 15 bp, Homo sapiens
attgaaagcaaacat

SEQ ID NO: 1733149 - DNA, 15 bp, Homo sapiens
ttgaaagcaaacata

SEQ ID NO: 1733150 - DNA, 15 bp, Homo sapiens
tgaaagcaaacatat

SEQ ID NO: 1733151 - DNA, 15 bp, Homo sapiens
gaaagcaaacatata

SEQ ID NO: 1733152 - DNA, 15 bp, Homo sapiens
aaagcaaacatatag

SEQ ID NO: 1733153 - DNA, 15 bp, Homo sapiens
aagcaaacatatagg

SEQ ID NO: 1733154 - DNA, 15 bp, Homo sapiens
agcaaacatataggt

SEQ ID NO: 1733155 - DNA, 15 bp, Homo sapiens
gcaaacatataggtt

SEQ ID NO: 1733156 - DNA, 15 bp, Homo sapiens
caaacatataggttt

SEQ ID NO: 1733157 - DNA, 15 bp, Homo sapiens
aaacatataggtttt

SEQ ID NO: 1733158 - DNA, 15 bp, Homo sapiens
aacatataggttttt

SEQ ID NO: 1733159 - DNA, 15 bp, Homo sapiens
acatataggtttttt

SEQ ID NO: 1733160 - DNA, 15 bp, Homo sapiens
catataggtttttta

SEQ ID NO: 1733161 - DNA, 15 bp, Homo sapiens
atataggttttttaa

SEQ ID NO: 1733162 - DNA, 15 bp, Homo sapiens
tataggttttttaaa

SEQ ID NO: 1733163 - DNA, 15 bp, Homo sapiens
ataggttttttaaag

SEQ ID NO: 1733164 - DNA, 15 bp, Homo sapiens
taggttttttaaagt

SEQ ID NO: 1733165 - DNA, 15 bp, Homo sapiens
aggttttttaaagta

SEQ ID NO: 1733166 - DNA, 15 bp, Homo sapiens
ggttttttaaagtat

SEQ ID NO: 1733167 - DNA, 15 bp, Homo sapiens
gttttttaaagtatt

SEQ ID NO: 1733168 - DNA, 15 bp, Homo sapiens
ttttttaaagtattg

SEQ ID NO: 1733169 - DNA, 15 bp, Homo sapiens
tttttaaagtattgg

SEQ ID NO: 1733170 - DNA, 15 bp, Homo sapiens
ttttaaagtattgga

SEQ ID NO: 1733171 - DNA, 15 bp, Homo sapiens
tttaaagtattggaa

SEQ ID NO: 1733172 - DNA, 15 bp, Homo sapiens
ttaaagtattggaaa

SEQ ID NO: 1733173 - DNA, 15 bp, Homo sapiens
taaagtattggaaaa

SEQ ID NO: 1733174 - DNA, 15 bp, Homo sapiens
aaagtattggaaaac

SEQ ID NO: 1733175 - DNA, 15 bp, Homo sapiens
aagtattggaaaact

SEQ ID NO: 1733176 - DNA, 15 bp, Homo sapiens
agtattggaaaactc

SEQ ID NO: 1733177 - DNA, 15 bp, Homo sapiens
gtattggaaaactcg

SEQ ID NO: 1733178 - DNA, 15 bp, Homo sapiens
tattggaaaactcgc

SEQ ID NO: 1733179 - DNA, 15 bp, Homo sapiens
attggaaaactcgcc

SEQ ID NO: 1733180 - DNA, 15 bp, Homo sapiens
ttggaaaactcgcca

SEQ ID NO: 1733181 - DNA, 15 bp, Homo sapiens
tggaaaactcgccag

SEQ ID NO: 1733182 - DNA, 15 bp, Homo sapiens
ggaaaactcgccaga

SEQ ID NO: 1733183 - DNA, 15 bp, Homo sapiens
gaaaactcgccagat

SEQ ID NO: 1733184 - DNA, 15 bp, Homo sapiens
aaaactcgccagatt

SEQ ID NO: 1733185 - DNA, 15 bp, Homo sapiens
aaactcgccagatta

SEQ ID NO: 1733186 - DNA, 15 bp, Homo sapiens
aactcgccagattat

SEQ ID NO: 1733187 - DNA, 15 bp, Homo sapiens
actcgccagattatc

SEQ ID NO: 1733188 - DNA, 15 bp, Homo sapiens
ctcgccagattatca

SEQ ID NO: 1733189 - DNA, 15 bp, Homo sapiens
tcgccagattatcat

SEQ ID NO: 1733190 - DNA, 15 bp, Homo sapiens
cgccagattatcatt

SEQ ID NO: 1733191 - DNA, 15 bp, Homo sapiens
gccagattatcatta

SEQ ID NO: 1733192 - DNA, 15 bp, Homo sapiens
ccagattatcattat

SEQ ID NO: 1733193 - DNA, 15 bp, Homo sapiens
cagattatcattata

SEQ ID NO: 1733194 - DNA, 15 bp, Homo sapiens
agattatcattatat

SEQ ID NO: 1733195 - DNA, 15 bp, Homo sapiens
gattatcattatatg

SEQ ID NO: 1733196 - DNA, 15 bp, Homo sapiens
attatcattatatga

SEQ ID NO: 1733197 - DNA, 15 bp, Homo sapiens
ttatcattatatgac

SEQ ID NO: 1733198 - DNA, 15 bp, Homo sapiens
tatcattatatgact

SEQ ID NO: 1733199 - DNA, 15 bp, Homo sapiens
atcattatatgactt

SEQ ID NO: 1733200 - DNA, 15 bp, Homo sapiens
tcattatatgacttg

SEQ ID NO: 1733201 - DNA, 15 bp, Homo sapiens
cattatatgacttgg

SEQ ID NO: 1733202 - DNA, 15 bp, Homo sapiens
attatatgacttgga

SEQ ID NO: 1733203 - DNA, 15 bp, Homo sapiens
ttatatgacttggaa

SEQ ID NO: 1733204 - DNA, 15 bp, Homo sapiens
tatatgacttggaac

SEQ ID NO: 1733205 - DNA, 15 bp, Homo sapiens
atatgacttggaacc

SEQ ID NO: 1733206 - DNA, 15 bp, Homo sapiens
tatgacttggaaccc

SEQ ID NO: 1733207 - DNA, 15 bp, Homo sapiens
atgacttggaaccct

SEQ ID NO: 1733208 - DNA, 15 bp, Homo sapiens
tgacttggaacccta

SEQ ID NO: 1733209 - DNA, 15 bp, Homo sapiens
gacttggaaccctag

SEQ ID NO: 1733210 - DNA, 15 bp, Homo sapiens
acttggaaccctaga

SEQ ID NO: 1733211 - DNA, 15 bp, Homo sapiens
cttggaaccctagaa

SEQ ID NO: 1733212 - DNA, 15 bp, Homo sapiens
ttggaaccctagaaa

SEQ ID NO: 1733213 - DNA, 15 bp, Homo sapiens
tggaaccctagaaac

SEQ ID NO: 1733214 - DNA, 15 bp, Homo sapiens
ggaaccctagaaact

SEQ ID NO: 1733215 - DNA, 15 bp, Homo sapiens
gaaccctagaaactc

SEQ ID NO: 1733216 - DNA, 15 bp, Homo sapiens
aaccctagaaactcc

SEQ ID NO: 1733217 - DNA, 15 bp, Homo sapiens
accctagaaactccc

SEQ ID NO: 1733218 - DNA, 15 bp, Homo sapiens
ccctagaaactccca

SEQ ID NO: 1733219 - DNA, 15 bp, Homo sapiens
cctagaaactcccag

SEQ ID NO: 1733220 - DNA, 15 bp, Homo sapiens
ctagaaactcccaga

SEQ ID NO: 1733221 - DNA, 15 bp, Homo sapiens
tagaaactcccagac

SEQ ID NO: 1733222 - DNA, 15 bp, Homo sapiens
agaaactcccagacc

SEQ ID NO: 1733223 - DNA, 15 bp, Homo sapiens
gaaactcccagacca

SEQ ID NO: 1733224 - DNA, 15 bp, Homo sapiens
aaactcccagaccac

SEQ ID NO: 1733225 - DNA, 15 bp, Homo sapiens
aactcccagaccacg

SEQ ID NO: 1733226 - DNA, 15 bp, Homo sapiens
actcccagaccacga

SEQ ID NO: 1733227 - DNA, 15 bp, Homo sapiens
ctcccagaccacgag

SEQ ID NO: 1733228 - DNA, 15 bp, Homo sapiens
tcccagaccacgaga

SEQ ID NO: 1733229 - DNA, 15 bp, Homo sapiens
cccagaccacgagac

SEQ ID NO: 1733230 - DNA, 15 bp, Homo sapiens
ccagaccacgagact

SEQ ID NO: 1733231 - DNA, 15 bp, Homo sapiens
cagaccacgagactt

SEQ ID NO: 1733232 - DNA, 15 bp, Homo sapiens
agaccacgagactta

SEQ ID NO: 1733233 - DNA, 15 bp, Homo sapiens
gaccacgagacttaa

SEQ ID NO: 1733234 - DNA, 15 bp, Homo sapiens
accacgagacttaat

SEQ ID NO: 1733235 - DNA, 15 bp, Homo sapiens
ccacgagacttaatg

SEQ ID NO: 1733236 - DNA, 15 bp, Homo sapiens
cacgagacttaatgg

SEQ ID NO: 1733237 - DNA, 15 bp, Homo sapiens
acgagacttaatggt

SEQ ID NO: 1733238 - DNA, 15 bp, Homo sapiens
cgagacttaatggtt

SEQ ID NO: 1733239 - DNA, 15 bp, Homo sapiens
gagacttaatggtta

SEQ ID NO: 1733240 - DNA, 15 bp, Homo sapiens
agacttaatggttaa

SEQ ID NO: 1733241 - DNA, 15 bp, Homo sapiens
gacttaatggttaat

SEQ ID NO: 1733242 - DNA, 15 bp, Homo sapiens
acttaatggttaatg

SEQ ID NO: 1733243 - DNA, 15 bp, Homo sapiens
cttaatggttaatga

SEQ ID NO: 1733244 - DNA, 15 bp, Homo sapiens
ttaatggttaatgat

SEQ ID NO: 1733245 - DNA, 15 bp, Homo sapiens
taatggttaatgatc

SEQ ID NO: 1733246 - DNA, 15 bp, Homo sapiens
aatggttaatgatct

SEQ ID NO: 1733247 - DNA, 15 bp, Homo sapiens
atggttaatgatctc

SEQ ID NO: 1733248 - DNA, 15 bp, Homo sapiens
tggttaatgatctct

SEQ ID NO: 1733249 - DNA, 15 bp, Homo sapiens
ggttaatgatctctt

SEQ ID NO: 1733250 - DNA, 15 bp, Homo sapiens
gttaatgatctcttt

SEQ ID NO: 1733251 - DNA, 15 bp, Homo sapiens
ttaatgatctctttc

SEQ ID NO: 1733252 - DNA, 15 bp, Homo sapiens
taatgatctctttca

SEQ ID NO: 1733253 - DNA, 15 bp, Homo sapiens
aatgatctctttcag

SEQ ID NO: 1733254 - DNA, 15 bp, Homo sapiens
atgatctctttcagt

SEQ ID NO: 1733255 - DNA, 15 bp, Homo sapiens
tgatctctttcagtt

SEQ ID NO: 1733256 - DNA, 15 bp, Homo sapiens
gatctctttcagttc

SEQ ID NO: 1733257 - DNA, 15 bp, Homo sapiens
atctctttcagttct

SEQ ID NO: 1733258 - DNA, 15 bp, Homo sapiens
tctctttcagttctc

SEQ ID NO: 1733259 - DNA, 15 bp, Homo sapiens
ctctttcagttctct

SEQ ID NO: 1733260 - DNA, 15 bp, Homo sapiens
tctttcagttctctt

SEQ ID NO: 1733261 - DNA, 15 bp, Homo sapiens
ctttcagttctcttt

SEQ ID NO: 1733262 - DNA, 15 bp, Homo sapiens
tttcagttctctttc

SEQ ID NO: 1733263 - DNA, 15 bp, Homo sapiens
ttcagttctctttca

SEQ ID NO: 1733264 - DNA, 15 bp, Homo sapiens
tcagttctctttcaa

SEQ ID NO: 1733265 - DNA, 15 bp, Homo sapiens
cagttctctttcaac

SEQ ID NO: 1733266 - DNA, 15 bp, Homo sapiens
agttctctttcaact

SEQ ID NO: 1733267 - DNA, 15 bp, Homo sapiens
gttctctttcaactt

SEQ ID NO: 1733268 - DNA, 15 bp, Homo sapiens
ttctctttcaacttg

SEQ ID NO: 1733269 - DNA, 15 bp, Homo sapiens
tctctttcaacttgg

SEQ ID NO: 1733270 - DNA, 15 bp, Homo sapiens
ctctttcaacttgga

SEQ ID NO: 1733271 - DNA, 15 bp, Homo sapiens
tctttcaacttggaa

SEQ ID NO: 1733272 - DNA, 15 bp, Homo sapiens
ctttcaacttggaat

SEQ ID NO: 1733273 - DNA, 15 bp, Homo sapiens
tttcaacttggaatt

SEQ ID NO: 1733274 - DNA, 15 bp, Homo sapiens
ttcaacttggaattc

SEQ ID NO: 1733275 - DNA, 15 bp, Homo sapiens
tcaacttggaattct

SEQ ID NO: 1733276 - DNA, 15 bp, Homo sapiens
caacttggaattctc

SEQ ID NO: 1733277 - DNA, 15 bp, Homo sapiens
aacttggaattctct

SEQ ID NO: 1733278 - DNA, 15 bp, Homo sapiens
acttggaattctctt

SEQ ID NO: 1733279 - DNA, 15 bp, Homo sapiens
cttggaattctctta

SEQ ID NO: 1733280 - DNA, 15 bp, Homo sapiens
ttggaattctcttat

SEQ ID NO: 1733281 - DNA, 15 bp, Homo sapiens
tggaattctcttatt

SEQ ID NO: 1733282 - DNA, 15 bp, Homo sapiens
ggaattctcttattc

SEQ ID NO: 1733283 - DNA, 15 bp, Homo sapiens
gaattctcttattcc

SEQ ID NO: 1733284 - DNA, 15 bp, Homo sapiens
aattctcttattcca

SEQ ID NO: 1733285 - DNA, 15 bp, Homo sapiens
attctcttattccaa

SEQ ID NO: 1733286 - DNA, 15 bp, Homo sapiens
ttctcttattccaat

SEQ ID NO: 1733287 - DNA, 15 bp, Homo sapiens
tctcttattccaatg

SEQ ID NO: 1733288 - DNA, 15 bp, Homo sapiens
ctcttattccaatgc

SEQ ID NO: 1733289 - DNA, 15 bp, Homo sapiens
tcttattccaatgcc

SEQ ID NO: 1733290 - DNA, 15 bp, Homo sapiens
cttattccaatgcca

SEQ ID NO: 1733291 - DNA, 15 bp, Homo sapiens
ttattccaatgccaa

SEQ ID NO: 1733292 - DNA, 15 bp, Homo sapiens
tattccaatgccaac

SEQ ID NO: 1733293 - DNA, 15 bp, Homo sapiens
attccaatgccaact

SEQ ID NO: 1733294 - DNA, 15 bp, Homo sapiens
ttccaatgccaactc

SEQ ID NO: 1733295 - DNA, 15 bp, Homo sapiens
tccaatgccaactca

SEQ ID NO: 1733296 - DNA, 15 bp, Homo sapiens
ccaatgccaactcat

SEQ ID NO: 1733297 - DNA, 15 bp, Homo sapiens
caatgccaactcatt

SEQ ID NO: 1733298 - DNA, 15 bp, Homo sapiens
aatgccaactcattg

SEQ ID NO: 1733299 - DNA, 15 bp, Homo sapiens
atgccaactcattgc

SEQ ID NO: 1733300 - DNA, 15 bp, Homo sapiens
tgccaactcattgct

SEQ ID NO: 1733301 - DNA, 15 bp, Homo sapiens
gccaactcattgctc

SEQ ID NO: 1733302 - DNA, 15 bp, Homo sapiens
ccaactcattgctct

SEQ ID NO: 1733303 - DNA, 15 bp, Homo sapiens
caactcattgctctt

SEQ ID NO: 1733304 - DNA, 15 bp, Homo sapiens
aactcattgctcttt

SEQ ID NO: 1733305 - DNA, 15 bp, Homo sapiens
actcattgctctttt

SEQ ID NO: 1733306 - DNA, 15 bp, Homo sapiens
ctcattgctcttttg

SEQ ID NO: 1733307 - DNA, 15 bp, Homo sapiens
tcattgctcttttgg

SEQ ID NO: 1733308 - DNA, 15 bp, Homo sapiens
cattgctcttttgga

SEQ ID NO: 1733309 - DNA, 15 bp, Homo sapiens
attgctcttttggaa

SEQ ID NO: 1733310 - DNA, 15 bp, Homo sapiens
ttgctcttttggaaa

SEQ ID NO: 1733311 - DNA, 15 bp, Homo sapiens
tgctcttttggaaag

SEQ ID NO: 1733312 - DNA, 15 bp, Homo sapiens
gctcttttggaaaga

SEQ ID NO: 1733313 - DNA, 15 bp, Homo sapiens
ctcttttggaaagac

SEQ ID NO: 1733314 - DNA, 15 bp, Homo sapiens
tcttttggaaagacc

SEQ ID NO: 1733315 - DNA, 15 bp, Homo sapiens
cttttggaaagaccc

SEQ ID NO: 1733316 - DNA, 15 bp, Homo sapiens
ttttggaaagaccca

SEQ ID NO: 1733317 - DNA, 15 bp, Homo sapiens
tttggaaagacccat

SEQ ID NO: 1733318 - DNA, 15 bp, Homo sapiens
ttggaaagacccatt

SEQ ID NO: 1733319 - DNA, 15 bp, Homo sapiens
tggaaagacccattc

SEQ ID NO: 1733320 - DNA, 15 bp, Homo sapiens
ggaaagacccattct

SEQ ID NO: 1733321 - DNA, 15 bp, Homo sapiens
gaaagacccattctt

SEQ ID NO: 1733322 - DNA, 15 bp, Homo sapiens
aaagacccattcttt

SEQ ID NO: 1733323 - DNA, 15 bp, Homo sapiens
aagacccattctttc

SEQ ID NO: 1733324 - DNA, 15 bp, Homo sapiens
agacccattctttcc

SEQ ID NO: 1733325 - DNA, 15 bp, Homo sapiens
gacccattctttcct

SEQ ID NO: 1733326 - DNA, 15 bp, Homo sapiens
acccattctttcctc

SEQ ID NO: 1733327 - DNA, 15 bp, Homo sapiens
cccattctttcctct

SEQ ID NO: 1733328 - DNA, 15 bp, Homo sapiens
ccattctttcctcta

SEQ ID NO: 1733329 - DNA, 15 bp, Homo sapiens
cattctttcctctat

SEQ ID NO: 1733330 - DNA, 15 bp, Homo sapiens
attctttcctctatt

SEQ ID NO: 1733331 - DNA, 15 bp, Homo sapiens
ttctttcctctattg

SEQ ID NO: 1733332 - DNA, 15 bp, Homo sapiens
tctttcctctattgt

SEQ ID NO: 1733333 - DNA, 15 bp, Homo sapiens
ctttcctctattgtc

SEQ ID NO: 1733334 - DNA, 15 bp, Homo sapiens
tttcctctattgtct

SEQ ID NO: 1733335 - DNA, 15 bp, Homo sapiens
ttcctctattgtctt

SEQ ID NO: 1733336 - DNA, 15 bp, Homo sapiens
tcctctattgtcttg

SEQ ID NO: 1733337 - DNA, 15 bp, Homo sapiens
cctctattgtcttgg

SEQ ID NO: 1733338 - DNA, 15 bp, Homo sapiens
ctctattgtcttggt

SEQ ID NO: 1733339 - DNA, 15 bp, Homo sapiens
tctattgtcttggta

SEQ ID NO: 1733340 - DNA, 15 bp, Homo sapiens
ctattgtcttggtac

SEQ ID NO: 1733341 - DNA, 15 bp, Homo sapiens
tattgtcttggtacc

SEQ ID NO: 1733342 - DNA, 15 bp, Homo sapiens
attgtcttggtacct

SEQ ID NO: 1733343 - DNA, 15 bp, Homo sapiens
ttgtcttggtacctc

SEQ ID NO: 1733344 - DNA, 15 bp, Homo sapiens
tgtcttggtacctcc

SEQ ID NO: 1733345 - DNA, 15 bp, Homo sapiens
gtcttggtacctcct

SEQ ID NO: 1733346 - DNA, 15 bp, Homo sapiens
tcttggtacctcctc

SEQ ID NO: 1733347 - DNA, 15 bp, Homo sapiens
cttggtacctcctca

SEQ ID NO: 1733348 - DNA, 15 bp, Homo sapiens
ttggtacctcctcag

SEQ ID NO: 1733349 - DNA, 15 bp, Homo sapiens
tggtacctcctcagg

SEQ ID NO: 1733350 - DNA, 15 bp, Homo sapiens
ggtacctcctcagga

SEQ ID NO: 1733351 - DNA, 15 bp, Homo sapiens
gtacctcctcaggac

SEQ ID NO: 1733352 - DNA, 15 bp, Homo sapiens
tacctcctcaggaca

SEQ ID NO: 1733353 - DNA, 15 bp, Homo sapiens
acctcctcaggacat

SEQ ID NO: 1733354 - DNA, 15 bp, Homo sapiens
cctcctcaggacata

SEQ ID NO: 1733355 - DNA, 15 bp, Homo sapiens
ctcctcaggacatat

SEQ ID NO: 1733356 - DNA, 15 bp, Homo sapiens
tcctcaggacatatt

SEQ ID NO: 1733357 - DNA, 15 bp, Homo sapiens
cctcaggacatattc

SEQ ID NO: 1733358 - DNA, 15 bp, Homo sapiens
ctcaggacatattcc

SEQ ID NO: 1733359 - DNA, 15 bp, Homo sapiens
tcaggacatattccc

SEQ ID NO: 1733360 - DNA, 15 bp, Homo sapiens
caggacatattcccc

SEQ ID NO: 1733361 - DNA, 15 bp, Homo sapiens
aggacatattcccca

SEQ ID NO: 1733362 - DNA, 15 bp, Homo sapiens
ggacatattccccaa

SEQ ID NO: 1733363 - DNA, 15 bp, Homo sapiens
gacatattccccaaa

SEQ ID NO: 1733364 - DNA, 15 bp, Homo sapiens
acatattccccaaag

SEQ ID NO: 1733365 - DNA, 15 bp, Homo sapiens
catattccccaaagt

SEQ ID NO: 1733366 - DNA, 15 bp, Homo sapiens
atattccccaaagtg

SEQ ID NO: 1733367 - DNA, 15 bp, Homo sapiens
tattccccaaagtgg

SEQ ID NO: 1733368 - DNA, 15 bp, Homo sapiens
attccccaaagtgga

SEQ ID NO: 1733369 - DNA, 15 bp, Homo sapiens
ccaaagtggaaatgt

SEQ ID NO: 1733370 - DNA, 15 bp, Homo sapiens
caaagtggaaatgtc

SEQ ID NO: 1733371 - DNA, 15 bp, Homo sapiens
aaagtggaaatgtca

SEQ ID NO: 1733372 - DNA, 15 bp, Homo sapiens
aagtggaaatgtcag

SEQ ID NO: 1733373 - DNA, 15 bp, Homo sapiens
agtggaaatgtcagt

SEQ ID NO: 1733374 - DNA, 15 bp, Homo sapiens
gtggaaatgtcagtt

SEQ ID NO: 1733375 - DNA, 15 bp, Homo sapiens
tggaaatgtcagttt

SEQ ID NO: 1733376 - DNA, 15 bp, Homo sapiens
ggaaatgtcagttta

SEQ ID NO: 1733377 - DNA, 15 bp, Homo sapiens
gaaatgtcagtttaa

SEQ ID NO: 1733378 - DNA, 15 bp, Homo sapiens
aaatgtcagtttaag

SEQ ID NO: 1733379 - DNA, 15 bp, Homo sapiens
aatgtcagtttaaga

SEQ ID NO: 1733380 - DNA, 15 bp, Homo sapiens
atgtcagtttaagat

SEQ ID NO: 1733381 - DNA, 15 bp, Homo sapiens
tgtcagtttaagata

SEQ ID NO: 1733382 - DNA, 15 bp, Homo sapiens
gtcagtttaagataa

SEQ ID NO: 1733383 - DNA, 15 bp, Homo sapiens
tcagtttaagataat

SEQ ID NO: 1733384 - DNA, 15 bp, Homo sapiens
cagtttaagataatt

SEQ ID NO: 1733385 - DNA, 15 bp, Homo sapiens
agtttaagataattt

SEQ ID NO: 1733386 - DNA, 15 bp, Homo sapiens
gtttaagataatttt

SEQ ID NO: 1733387 - DNA, 15 bp, Homo sapiens
tttaagataattttc

SEQ ID NO: 1733388 - DNA, 15 bp, Homo sapiens
ttaagataattttca

SEQ ID NO: 1733389 - DNA, 15 bp, Homo sapiens
taagataattttcag

SEQ ID NO: 1733390 - DNA, 15 bp, Homo sapiens
aagataattttcagc

SEQ ID NO: 1733391 - DNA, 15 bp, Homo sapiens
agataattttcagca

SEQ ID NO: 1733392 - DNA, 15 bp, Homo sapiens
gataattttcagcat

SEQ ID NO: 1733393 - DNA, 15 bp, Homo sapiens
ataattttcagcatt

SEQ ID NO: 1733394 - DNA, 15 bp, Homo sapiens
taattttcagcattg

SEQ ID NO: 1733395 - DNA, 15 bp, Homo sapiens
aattttcagcattgt

SEQ ID NO: 1733396 - DNA, 15 bp, Homo sapiens
attttcagcattgtg

SEQ ID NO: 1733397 - DNA, 15 bp, Homo sapiens
ttttcagcattgtgt

SEQ ID NO: 1733398 - DNA, 15 bp, Homo sapiens
tttcagcattgtgta

SEQ ID NO: 1733399 - DNA, 15 bp, Homo sapiens
ttcagcattgtgtag

SEQ ID NO: 1733400 - DNA, 15 bp, Homo sapiens
tcagcattgtgtaga

SEQ ID NO: 1733401 - DNA, 15 bp, Homo sapiens
cagcattgtgtagaa

SEQ ID NO: 1733402 - DNA, 15 bp, Homo sapiens
agcattgtgtagaat

SEQ ID NO: 1733403 - DNA, 15 bp, Homo sapiens
gcattgtgtagaata

SEQ ID NO: 1733404 - DNA, 15 bp, Homo sapiens
cattgtgtagaataa

SEQ ID NO: 1733405 - DNA, 15 bp, Homo sapiens
attgtgtagaataag

SEQ ID NO: 1733406 - DNA, 15 bp, Homo sapiens
ttgtgtagaataaga

SEQ ID NO: 1733407 - DNA, 15 bp, Homo sapiens
tgtgtagaataagaa

SEQ ID NO: 1733408 - DNA, 15 bp, Homo sapiens
gtgtagaataagaat

SEQ ID NO: 1733409 - DNA, 15 bp, Homo sapiens
tgtagaataagaatg

SEQ ID NO: 1733410 - DNA, 15 bp, Homo sapiens
gtagaataagaatgg

SEQ ID NO: 1733411 - DNA, 15 bp, Homo sapiens
tagaataagaatggt

SEQ ID NO: 1733412 - DNA, 15 bp, Homo sapiens
agaataagaatggtt

SEQ ID NO: 1733413 - DNA, 15 bp, Homo sapiens
gaataagaatggtta

SEQ ID NO: 1733414 - DNA, 15 bp, Homo sapiens
aataagaatggttag

SEQ ID NO: 1733415 - DNA, 15 bp, Homo sapiens
ataagaatggttaga

SEQ ID NO: 1733416 - DNA, 15 bp, Homo sapiens
taagaatggttagac

SEQ ID NO: 1733417 - DNA, 15 bp, Homo sapiens
aagaatggttagaca

SEQ ID NO: 1733418 - DNA, 15 bp, Homo sapiens
agaatggttagacag

SEQ ID NO: 1733419 - DNA, 15 bp, Homo sapiens
gaatggttagacagc

SEQ ID NO: 1733420 - DNA, 15 bp, Homo sapiens
aatggttagacagct

SEQ ID NO: 1733421 - DNA, 15 bp, Homo sapiens
atggttagacagctg

SEQ ID NO: 1733422 - DNA, 15 bp, Homo sapiens
tggttagacagctga

SEQ ID NO: 1733423 - DNA, 15 bp, Homo sapiens
ggttagacagctgat

SEQ ID NO: 1733424 - DNA, 15 bp, Homo sapiens
gttagacagctgatg

SEQ ID NO: 1733425 - DNA, 15 bp, Homo sapiens
ttagacagctgatgt

SEQ ID NO: 1733426 - DNA, 15 bp, Homo sapiens
tagacagctgatgtc

SEQ ID NO: 1733427 - DNA, 15 bp, Homo sapiens
agacagctgatgtca

SEQ ID NO: 1733428 - DNA, 15 bp, Homo sapiens
gacagctgatgtcag

SEQ ID NO: 1733429 - DNA, 15 bp, Homo sapiens
acagctgatgtcagc

SEQ ID NO: 1733430 - DNA, 15 bp, Homo sapiens
cagctgatgtcagca

SEQ ID NO: 1733431 - DNA, 15 bp, Homo sapiens
agctgatgtcagcaa

SEQ ID NO: 1733432 - DNA, 15 bp, Homo sapiens
gctgatgtcagcaag

SEQ ID NO: 1733433 - DNA, 15 bp, Homo sapiens
ctgatgtcagcaaga

SEQ ID NO: 1733434 - DNA, 15 bp, Homo sapiens
tgatgtcagcaagat

SEQ ID NO: 1733435 - DNA, 15 bp, Homo sapiens
gatgtcagcaagatg

SEQ ID NO: 1733436 - DNA, 15 bp, Homo sapiens
atgtcagcaagatgg

SEQ ID NO: 1733437 - DNA, 15 bp, Homo sapiens
tgtcagcaagatggt

SEQ ID NO: 1733438 - DNA, 15 bp, Homo sapiens
gtcagcaagatggtg

SEQ ID NO: 1733439 - DNA, 15 bp, Homo sapiens
tcagcaagatggtgg

SEQ ID NO: 1733440 - DNA, 15 bp, Homo sapiens
cagcaagatggtgga

SEQ ID NO: 1733441 - DNA, 15 bp, Homo sapiens
agcaagatggtggaa

SEQ ID NO: 1733442 - DNA, 15 bp, Homo sapiens
gcaagatggtggaat

SEQ ID NO: 1733443 - DNA, 15 bp, Homo sapiens
caagatggtggaata

SEQ ID NO: 1733444 - DNA, 15 bp, Homo sapiens
aagatggtggaatag

SEQ ID NO: 1733445 - DNA, 15 bp, Homo sapiens
agatggtggaatagt

SEQ ID NO: 1733446 - DNA, 15 bp, Homo sapiens
gatggtggaatagta

SEQ ID NO: 1733447 - DNA, 15 bp, Homo sapiens
atggtggaatagtag

SEQ ID NO: 1733448 - DNA, 15 bp, Homo sapiens
tggtggaatagtagc

SEQ ID NO: 1733449 - DNA, 15 bp, Homo sapiens
ggtggaatagtagcg

SEQ ID NO: 1733450 - DNA, 15 bp, Homo sapiens
gtggaatagtagcgc

SEQ ID NO: 1733451 - DNA, 15 bp, Homo sapiens
tggaatagtagcgct

SEQ ID NO: 1733452 - DNA, 15 bp, Homo sapiens
ggaatagtagcgctg

SEQ ID NO: 1733453 - DNA, 15 bp, Homo sapiens
gaatagtagcgctgt

SEQ ID NO: 1733454 - DNA, 15 bp, Homo sapiens
aatagtagcgctgtc

SEQ ID NO: 1733455 - DNA, 15 bp, Homo sapiens
atagtagcgctgtcc

SEQ ID NO: 1733456 - DNA, 15 bp, Homo sapiens
tagtagcgctgtcct

SEQ ID NO: 1733457 - DNA, 15 bp, Homo sapiens
agtagcgctgtcctt

SEQ ID NO: 1733458 - DNA, 15 bp, Homo sapiens
gtagcgctgtccttc

SEQ ID NO: 1733459 - DNA, 15 bp, Homo sapiens
tagcgctgtccttca

SEQ ID NO: 1733460 - DNA, 15 bp, Homo sapiens
agcgctgtccttcag

SEQ ID NO: 1733461 - DNA, 15 bp, Homo sapiens
gcgctgtccttcaga

SEQ ID NO: 1733462 - DNA, 15 bp, Homo sapiens
cgctgtccttcagaa

SEQ ID NO: 1733463 - DNA, 15 bp, Homo sapiens
gctgtccttcagaaa

SEQ ID NO: 1733464 - DNA, 15 bp, Homo sapiens
ctgtccttcagaaac

SEQ ID NO: 1733465 - DNA, 15 bp, Homo sapiens
tgtccttcagaaaca

SEQ ID NO: 1733466 - DNA, 15 bp, Homo sapiens
gtccttcagaaacac

SEQ ID NO: 1733467 - DNA, 15 bp, Homo sapiens
tccttcagaaacacc

SEQ ID NO: 1733468 - DNA, 15 bp, Homo sapiens
ccttcagaaacacca

SEQ ID NO: 1733469 - DNA, 15 bp, Homo sapiens
cttcagaaacaccaa

SEQ ID NO: 1733470 - DNA, 15 bp, Homo sapiens
ttcagaaacaccaat

SEQ ID NO: 1733471 - DNA, 15 bp, Homo sapiens
tcagaaacaccaatt

SEQ ID NO: 1733472 - DNA, 15 bp, Homo sapiens
cagaaacaccaattt

SEQ ID NO: 1733473 - DNA, 15 bp, Homo sapiens
agaaacaccaatttt

SEQ ID NO: 1733474 - DNA, 15 bp, Homo sapiens
gaaacaccaattttg

SEQ ID NO: 1733475 - DNA, 15 bp, Homo sapiens
aaacaccaattttga

SEQ ID NO: 1733476 - DNA, 15 bp, Homo sapiens
aacaccaattttgac

SEQ ID NO: 1733477 - DNA, 15 bp, Homo sapiens
acaccaattttgaca

SEQ ID NO: 1733478 - DNA, 15 bp, Homo sapiens
caccaattttgacaa

SEQ ID NO: 1733479 - DNA, 15 bp, Homo sapiens
accaattttgacaac

SEQ ID NO: 1733480 - DNA, 15 bp, Homo sapiens
ccaattttgacaact

SEQ ID NO: 1733481 - DNA, 15 bp, Homo sapiens
caattttgacaacta

SEQ ID NO: 1733482 - DNA, 15 bp, Homo sapiens
aattttgacaactac

SEQ ID NO: 1733483 - DNA, 15 bp, Homo sapiens
attttgacaactacc

SEQ ID NO: 1733484 - DNA, 15 bp, Homo sapiens
ttttgacaactacca

SEQ ID NO: 1733485 - DNA, 15 bp, Homo sapiens
tttgacaactaccat

SEQ ID NO: 1733486 - DNA, 15 bp, Homo sapiens
ttgacaactaccata

SEQ ID NO: 1733487 - DNA, 15 bp, Homo sapiens
tgacaactaccatag

SEQ ID NO: 1733488 - DNA, 15 bp, Homo sapiens
gacaactaccataga

SEQ ID NO: 1733489 - DNA, 15 bp, Homo sapiens
acaactaccatagaa

SEQ ID NO: 1733490 - DNA, 15 bp, Homo sapiens
caactaccatagaaa

SEQ ID NO: 1733491 - DNA, 15 bp, Homo sapiens
aactaccatagaaag

SEQ ID NO: 1733492 - DNA, 15 bp, Homo sapiens
actaccatagaaaga

SEQ ID NO: 1733493 - DNA, 15 bp, Homo sapiens
ctaccatagaaagaa

SEQ ID NO: 1733494 - DNA, 15 bp, Homo sapiens
taccatagaaagaat

SEQ ID NO: 1733495 - DNA, 15 bp, Homo sapiens
accatagaaagaatg

SEQ ID NO: 1733496 - DNA, 15 bp, Homo sapiens
ccatagaaagaatgc

SEQ ID NO: 1733497 - DNA, 15 bp, Homo sapiens
catagaaagaatgcc

SEQ ID NO: 1733498 - DNA, 15 bp, Homo sapiens
atagaaagaatgcct

SEQ ID NO: 1733499 - DNA, 15 bp, Homo sapiens
tagaaagaatgcctt

SEQ ID NO: 1733500 - DNA, 15 bp, Homo sapiens
agaaagaatgccttt

SEQ ID NO: 1733501 - DNA, 15 bp, Homo sapiens
gaaagaatgccttta

SEQ ID NO: 1733502 - DNA, 15 bp, Homo sapiens
aaagaatgcctttat

SEQ ID NO: 1733503 - DNA, 15 bp, Homo sapiens
aagaatgcctttata

SEQ ID NO: 1733504 - DNA, 15 bp, Homo sapiens
agaatgcctttatat

SEQ ID NO: 1733505 - DNA, 15 bp, Homo sapiens
gaatgcctttatatt

SEQ ID NO: 1733506 - DNA, 15 bp, Homo sapiens
tgcctttatatttga

SEQ ID NO: 1733507 - DNA, 15 bp, Homo sapiens
gcctttatatttgag

SEQ ID NO: 1733508 - DNA, 15 bp, Homo sapiens
cctttatatttgagc

SEQ ID NO: 1733509 - DNA, 15 bp, Homo sapiens
ctttatatttgagca

SEQ ID NO: 1733510 - DNA, 15 bp, Homo sapiens
tttatatttgagcat

SEQ ID NO: 1733511 - DNA, 15 bp, Homo sapiens
ttatatttgagcata

SEQ ID NO: 1733512 - DNA, 15 bp, Homo sapiens
tatatttgagcatac

SEQ ID NO: 1733513 - DNA, 15 bp, Homo sapiens
atatttgagcataca

SEQ ID NO: 1733514 - DNA, 15 bp, Homo sapiens
tatttgagcatacat

SEQ ID NO: 1733515 - DNA, 15 bp, Homo sapiens
atttgagcatacatg

SEQ ID NO: 1733516 - DNA, 15 bp, Homo sapiens
tttgagcatacatgg

SEQ ID NO: 1733517 - DNA, 15 bp, Homo sapiens
ttgagcatacatgga

SEQ ID NO: 1733518 - DNA, 15 bp, Homo sapiens
tgagcatacatggaa

SEQ ID NO: 1733519 - DNA, 15 bp, Homo sapiens
gagcatacatggaac

SEQ ID NO: 1733520 - DNA, 15 bp, Homo sapiens
agcatacatggaaca

SEQ ID NO: 1733521 - DNA, 15 bp, Homo sapiens
gcatacatggaacat

SEQ ID NO: 1733522 - DNA, 15 bp, Homo sapiens
catacatggaacatt

SEQ ID NO: 1733523 - DNA, 15 bp, Homo sapiens
atacatggaacattc

SEQ ID NO: 1733524 - DNA, 15 bp, Homo sapiens
tacatggaacattct

SEQ ID NO: 1733525 - DNA, 15 bp, Homo sapiens
acatggaacattctc

SEQ ID NO: 1733526 - DNA, 15 bp, Homo sapiens
catggaacattctcc

SEQ ID NO: 1733527 - DNA, 15 bp, Homo sapiens
atggaacattctcca

SEQ ID NO: 1733528 - DNA, 15 bp, Homo sapiens
tggaacattctccag

SEQ ID NO: 1733529 - DNA, 15 bp, Homo sapiens
ggaacattctccagg

SEQ ID NO: 1733530 - DNA, 15 bp, Homo sapiens
gaacattctccagga

SEQ ID NO: 1733531 - DNA, 15 bp, Homo sapiens
aacattctccaggat

SEQ ID NO: 1733532 - DNA, 15 bp, Homo sapiens
acattctccaggatc

SEQ ID NO: 1733533 - DNA, 15 bp, Homo sapiens
cattctccaggatca

SEQ ID NO: 1733534 - DNA, 15 bp, Homo sapiens
attctccaggatcaa

SEQ ID NO: 1733535 - DNA, 15 bp, Homo sapiens
ttctccaggatcaat

SEQ ID NO: 1733536 - DNA, 15 bp, Homo sapiens
tctccaggatcaatc

SEQ ID NO: 1733537 - DNA, 15 bp, Homo sapiens
ctccaggatcaatca

SEQ ID NO: 1733538 - DNA, 15 bp, Homo sapiens
tccaggatcaatcat

SEQ ID NO: 1733539 - DNA, 15 bp, Homo sapiens
ccaggatcaatcata

SEQ ID NO: 1733540 - DNA, 15 bp, Homo sapiens
caggatcaatcatat

SEQ ID NO: 1733541 - DNA, 15 bp, Homo sapiens
aggatcaatcatatg

SEQ ID NO: 1733542 - DNA, 15 bp, Homo sapiens
ggatcaatcatatgt

SEQ ID NO: 1733543 - DNA, 15 bp, Homo sapiens
gatcaatcatatgtc

SEQ ID NO: 1733544 - DNA, 15 bp, Homo sapiens
atcaatcatatgtca

SEQ ID NO: 1733545 - DNA, 15 bp, Homo sapiens
tcaatcatatgtcag

SEQ ID NO: 1733546 - DNA, 15 bp, Homo sapiens
caatcatatgtcagg

SEQ ID NO: 1733547 - DNA, 15 bp, Homo sapiens
aatcatatgtcaggc

SEQ ID NO: 1733548 - DNA, 15 bp, Homo sapiens
atcatatgtcaggcc

SEQ ID NO: 1733549 - DNA, 15 bp, Homo sapiens
tcatatgtcaggcca

SEQ ID NO: 1733550 - DNA, 15 bp, Homo sapiens
catatgtcaggccat

SEQ ID NO: 1733551 - DNA, 15 bp, Homo sapiens
atatgtcaggccata

SEQ ID NO: 1733552 - DNA, 15 bp, Homo sapiens
tatgtcaggccataa

SEQ ID NO: 1733553 - DNA, 15 bp, Homo sapiens
atgtcaggccataaa

SEQ ID NO: 1733554 - DNA, 15 bp, Homo sapiens
tgtcaggccataaaa

SEQ ID NO: 1733555 - DNA, 15 bp, Homo sapiens
gtcaggccataaaac

SEQ ID NO: 1733556 - DNA, 15 bp, Homo sapiens
tcaggccataaaaca

SEQ ID NO: 1733557 - DNA, 15 bp, Homo sapiens
caggccataaaacaa

SEQ ID NO: 1733558 - DNA, 15 bp, Homo sapiens
aggccataaaacaag

SEQ ID NO: 1733559 - DNA, 15 bp, Homo sapiens
ggccataaaacaagt

SEQ ID NO: 1733560 - DNA, 15 bp, Homo sapiens
gccataaaacaagta

SEQ ID NO: 1733561 - DNA, 15 bp, Homo sapiens
ccataaaacaagtat

SEQ ID NO: 1733562 - DNA, 15 bp, Homo sapiens
cataaaacaagtatt

SEQ ID NO: 1733563 - DNA, 15 bp, Homo sapiens
ataaaacaagtatta

SEQ ID NO: 1733564 - DNA, 15 bp, Homo sapiens
taaaacaagtattaa

SEQ ID NO: 1733565 - DNA, 15 bp, Homo sapiens
aaaacaagtattaat

SEQ ID NO: 1733566 - DNA, 15 bp, Homo sapiens
aaacaagtattaata

SEQ ID NO: 1733567 - DNA, 15 bp, Homo sapiens
aacaagtattaatat

SEQ ID NO: 1733568 - DNA, 15 bp, Homo sapiens
acaagtattaatata

SEQ ID NO: 1733569 - DNA, 15 bp, Homo sapiens
caagtattaatatat

SEQ ID NO: 1733570 - DNA, 15 bp, Homo sapiens
aagtattaatatatt

SEQ ID NO: 1733571 - DNA, 15 bp, Homo sapiens
agtattaatatattt

SEQ ID NO: 1733572 - DNA, 15 bp, Homo sapiens
gtattaatatattta

SEQ ID NO: 1733573 - DNA, 15 bp, Homo sapiens
tattaatatatttaa

SEQ ID NO: 1733574 - DNA, 15 bp, Homo sapiens
attaatatatttaag

SEQ ID NO: 1733575 - DNA, 15 bp, Homo sapiens
ttaatatatttaaga

SEQ ID NO: 1733576 - DNA, 15 bp, Homo sapiens
taatatatttaagaa

SEQ ID NO: 1733577 - DNA, 15 bp, Homo sapiens
aatatatttaagaag

SEQ ID NO: 1733578 - DNA, 15 bp, Homo sapiens
atatatttaagaaga

SEQ ID NO: 1733579 - DNA, 15 bp, Homo sapiens
tatatttaagaagat

SEQ ID NO: 1733580 - DNA, 15 bp, Homo sapiens
atatttaagaagatt

SEQ ID NO: 1733581 - DNA, 15 bp, Homo sapiens
tatttaagaagattg

SEQ ID NO: 1733582 - DNA, 15 bp, Homo sapiens
atttaagaagattga

SEQ ID NO: 1733583 - DNA, 15 bp, Homo sapiens
tttaagaagattgag

SEQ ID NO: 1733584 - DNA, 15 bp, Homo sapiens
ttaagaagattgaga

SEQ ID NO: 1733585 - DNA, 15 bp, Homo sapiens
taagaagattgagat

SEQ ID NO: 1733586 - DNA, 15 bp, Homo sapiens
aagaagattgagata

SEQ ID NO: 1733587 - DNA, 15 bp, Homo sapiens
agaagattgagataa

SEQ ID NO: 1733588 - DNA, 15 bp, Homo sapiens
gaagattgagataat

SEQ ID NO: 1733589 - DNA, 15 bp, Homo sapiens
aagattgagataata

SEQ ID NO: 1733590 - DNA, 15 bp, Homo sapiens
agattgagataatat

SEQ ID NO: 1733591 - DNA, 15 bp, Homo sapiens
gattgagataatatc

SEQ ID NO: 1733592 - DNA, 15 bp, Homo sapiens
attgagataatatca

SEQ ID NO: 1733593 - DNA, 15 bp, Homo sapiens
ttgagataatatcaa

SEQ ID NO: 1733594 - DNA, 15 bp, Homo sapiens
tgagataatatcaag

SEQ ID NO: 1733595 - DNA, 15 bp, Homo sapiens
gagataatatcaagc

SEQ ID NO: 1733596 - DNA, 15 bp, Homo sapiens
agataatatcaagca

SEQ ID NO: 1733597 - DNA, 15 bp, Homo sapiens
gataatatcaagcat

SEQ ID NO: 1733598 - DNA, 15 bp, Homo sapiens
ataatatcaagcatc

SEQ ID NO: 1733599 - DNA, 15 bp, Homo sapiens
taatatcaagcatct

SEQ ID NO: 1733600 - DNA, 15 bp, Homo sapiens
aatatcaagcatctt

SEQ ID NO: 1733601 - DNA, 15 bp, Homo sapiens
atatcaagcatcttt

SEQ ID NO: 1733602 - DNA, 15 bp, Homo sapiens
tatcaagcatctttt

SEQ ID NO: 1733603 - DNA, 15 bp, Homo sapiens
atcaagcatcttttc

SEQ ID NO: 1733604 - DNA, 15 bp, Homo sapiens
tcaagcatcttttct

SEQ ID NO: 1733605 - DNA, 15 bp, Homo sapiens
caagcatcttttctc

SEQ ID NO: 1733606 - DNA, 15 bp, Homo sapiens
aagcatcttttctca

SEQ ID NO: 1733607 - DNA, 15 bp, Homo sapiens
agcatcttttctcac

SEQ ID NO: 1733608 - DNA, 15 bp, Homo sapiens
gcatcttttctcacc

SEQ ID NO: 1733609 - DNA, 15 bp, Homo sapiens
catcttttctcacca

SEQ ID NO: 1733610 - DNA, 15 bp, Homo sapiens
atcttttctcaccat

SEQ ID NO: 1733611 - DNA, 15 bp, Homo sapiens
tcttttctcaccata

SEQ ID NO: 1733612 - DNA, 15 bp, Homo sapiens
cttttctcaccataa

SEQ ID NO: 1733613 - DNA, 15 bp, Homo sapiens
ttttctcaccataat

SEQ ID NO: 1733614 - DNA, 15 bp, Homo sapiens
tttctcaccataatg

SEQ ID NO: 1733615 - DNA, 15 bp, Homo sapiens
ttctcaccataatgg

SEQ ID NO: 1733616 - DNA, 15 bp, Homo sapiens
tctcaccataatggc

SEQ ID NO: 1733617 - DNA, 15 bp, Homo sapiens
ctcaccataatggca

SEQ ID NO: 1733618 - DNA, 15 bp, Homo sapiens
tcaccataatggcat

SEQ ID NO: 1733619 - DNA, 15 bp, Homo sapiens
caccataatggcata

SEQ ID NO: 1733620 - DNA, 15 bp, Homo sapiens
accataatggcataa

SEQ ID NO: 1733621 - DNA, 15 bp, Homo sapiens
ccataatggcataaa

SEQ ID NO: 1733622 - DNA, 15 bp, Homo sapiens
cataatggcataaaa

SEQ ID NO: 1733623 - DNA, 15 bp, Homo sapiens
ataatggcataaaac

SEQ ID NO: 1733624 - DNA, 15 bp, Homo sapiens
taatggcataaaact

SEQ ID NO: 1733625 - DNA, 15 bp, Homo sapiens
aatggcataaaacta

SEQ ID NO: 1733626 - DNA, 15 bp, Homo sapiens
atggcataaaactag

SEQ ID NO: 1733627 - DNA, 15 bp, Homo sapiens
tggcataaaactagc

SEQ ID NO: 1733628 - DNA, 15 bp, Homo sapiens
ggcataaaactagca

SEQ ID NO: 1733629 - DNA, 15 bp, Homo sapiens
gcataaaactagcaa

SEQ ID NO: 1733630 - DNA, 15 bp, Homo sapiens
cataaaactagcaag

SEQ ID NO: 1733631 - DNA, 15 bp, Homo sapiens
ataaaactagcaagc

SEQ ID NO: 1733632 - DNA, 15 bp, Homo sapiens
taaaactagcaagca

SEQ ID NO: 1733633 - DNA, 15 bp, Homo sapiens
aaaactagcaagcaa

SEQ ID NO: 1733634 - DNA, 15 bp, Homo sapiens
aaactagcaagcaaa

SEQ ID NO: 1733635 - DNA, 15 bp, Homo sapiens
aactagcaagcaaaa

SEQ ID NO: 1733636 - DNA, 15 bp, Homo sapiens
actagcaagcaaaaa

SEQ ID NO: 1733637 - DNA, 15 bp, Homo sapiens
ctagcaagcaaaaat

SEQ ID NO: 1733638 - DNA, 15 bp, Homo sapiens
tagcaagcaaaaata

SEQ ID NO: 1733639 - DNA, 15 bp, Homo sapiens
agcaagcaaaaataa

SEQ ID NO: 1733640 - DNA, 15 bp, Homo sapiens
gcaagcaaaaataac

SEQ ID NO: 1733641 - DNA, 15 bp, Homo sapiens
caagcaaaaataaca

SEQ ID NO: 1733642 - DNA, 15 bp, Homo sapiens
aagcaaaaataacag

SEQ ID NO: 1733643 - DNA, 15 bp, Homo sapiens
agcaaaaataacagg

SEQ ID NO: 1733644 - DNA, 15 bp, Homo sapiens
gcaaaaataacagga

SEQ ID NO: 1733645 - DNA, 15 bp, Homo sapiens
caaaaataacaggaa

SEQ ID NO: 1733646 - DNA, 15 bp, Homo sapiens
aaaaataacaggaaa

SEQ ID NO: 1733647 - DNA, 15 bp, Homo sapiens
aaaataacaggaaaa

SEQ ID NO: 1733648 - DNA, 15 bp, Homo sapiens
aaataacaggaaaac

SEQ ID NO: 1733649 - DNA, 15 bp, Homo sapiens
aataacaggaaaact

SEQ ID NO: 1733650 - DNA, 15 bp, Homo sapiens
ataacaggaaaactg

SEQ ID NO: 1733651 - DNA, 15 bp, Homo sapiens
taacaggaaaactgg

SEQ ID NO: 1733652 - DNA, 15 bp, Homo sapiens
aacaggaaaactggg

SEQ ID NO: 1733653 - DNA, 15 bp, Homo sapiens
acaggaaaactggga

SEQ ID NO: 1733654 - DNA, 15 bp, Homo sapiens
caggaaaactgggaa

SEQ ID NO: 1733655 - DNA, 15 bp, Homo sapiens
aggaaaactgggaaa

SEQ ID NO: 1733656 - DNA, 15 bp, Homo sapiens
ggaaaactgggaaat

SEQ ID NO: 1733657 - DNA, 15 bp, Homo sapiens
gaaaactgggaaata

SEQ ID NO: 1733658 - DNA, 15 bp, Homo sapiens
aaaactgggaaatac

SEQ ID NO: 1733659 - DNA, 15 bp, Homo sapiens
aaactgggaaatact

SEQ ID NO: 1733660 - DNA, 15 bp, Homo sapiens
aactgggaaatactc

SEQ ID NO: 1733661 - DNA, 15 bp, Homo sapiens
actgggaaatactca

SEQ ID NO: 1733662 - DNA, 15 bp, Homo sapiens
ctgggaaatactcaa

SEQ ID NO: 1733663 - DNA, 15 bp, Homo sapiens
tgggaaatactcaaa

SEQ ID NO: 1733664 - DNA, 15 bp, Homo sapiens
gggaaatactcaaat

SEQ ID NO: 1733665 - DNA, 15 bp, Homo sapiens
ggaaatactcaaata

SEQ ID NO: 1733666 - DNA, 15 bp, Homo sapiens
gaaatactcaaatat

SEQ ID NO: 1733667 - DNA, 15 bp, Homo sapiens
aaatactcaaatatg

SEQ ID NO: 1733668 - DNA, 15 bp, Homo sapiens
aatactcaaatatgt

SEQ ID NO: 1733669 - DNA, 15 bp, Homo sapiens
atactcaaatatgtg

SEQ ID NO: 1733670 - DNA, 15 bp, Homo sapiens
tactcaaatatgtga

SEQ ID NO: 1733671 - DNA, 15 bp, Homo sapiens
actcaaatatgtgaa

SEQ ID NO: 1733672 - DNA, 15 bp, Homo sapiens
ctcaaatatgtgaaa

SEQ ID NO: 1733673 - DNA, 15 bp, Homo sapiens
tcaaatatgtgaaaa

SEQ ID NO: 1733674 - DNA, 15 bp, Homo sapiens
caaatatgtgaaaat

SEQ ID NO: 1733675 - DNA, 15 bp, Homo sapiens
aaatatgtgaaaatt

SEQ ID NO: 1733676 - DNA, 15 bp, Homo sapiens
atatgtgaaaattaa

SEQ ID NO: 1733677 - DNA, 15 bp, Homo sapiens
tatgtgaaaattaaa

SEQ ID NO: 1733678 - DNA, 15 bp, Homo sapiens
atgtgaaaattaaac

SEQ ID NO: 1733679 - DNA, 15 bp, Homo sapiens
tgtgaaaattaaaca

SEQ ID NO: 1733680 - DNA, 15 bp, Homo sapiens
gtgaaaattaaacat

SEQ ID NO: 1733681 - DNA, 15 bp, Homo sapiens
tgaaaattaaacatg

SEQ ID NO: 1733682 - DNA, 15 bp, Homo sapiens
gaaaattaaacatgt

SEQ ID NO: 1733683 - DNA, 15 bp, Homo sapiens
aaaattaaacatgtt

SEQ ID NO: 1733684 - DNA, 15 bp, Homo sapiens
aaattaaacatgttc

SEQ ID NO: 1733685 - DNA, 15 bp, Homo sapiens
aattaaacatgttcc

SEQ ID NO: 1733686 - DNA, 15 bp, Homo sapiens
attaaacatgttcct

SEQ ID NO: 1733687 - DNA, 15 bp, Homo sapiens
ttaaacatgttcctg

SEQ ID NO: 1733688 - DNA, 15 bp, Homo sapiens
taaacatgttcctga

SEQ ID NO: 1733689 - DNA, 15 bp, Homo sapiens
aaacatgttcctgaa

SEQ ID NO: 1733690 - DNA, 15 bp, Homo sapiens
aacatgttcctgaac

SEQ ID NO: 1733691 - DNA, 15 bp, Homo sapiens
acatgttcctgaaca

SEQ ID NO: 1733692 - DNA, 15 bp, Homo sapiens
catgttcctgaacaa

SEQ ID NO: 1733693 - DNA, 15 bp, Homo sapiens
atgttcctgaacaac

SEQ ID NO: 1733694 - DNA, 15 bp, Homo sapiens
tgttcctgaacaacc

SEQ ID NO: 1733695 - DNA, 15 bp, Homo sapiens
gttcctgaacaacca

SEQ ID NO: 1733696 - DNA, 15 bp, Homo sapiens
ttcctgaacaaccaa

SEQ ID NO: 1733697 - DNA, 15 bp, Homo sapiens
cctgaacaaccaata

SEQ ID NO: 1733698 - DNA, 15 bp, Homo sapiens
ctgaacaaccaatag

SEQ ID NO: 1733699 - DNA, 15 bp, Homo sapiens
tgaacaaccaatagt

SEQ ID NO: 1733700 - DNA, 15 bp, Homo sapiens
gaacaaccaatagtc

SEQ ID NO: 1733701 - DNA, 15 bp, Homo sapiens
aacaaccaatagtca

SEQ ID NO: 1733702 - DNA, 15 bp, Homo sapiens
acaaccaatagtcaa

SEQ ID NO: 1733703 - DNA, 15 bp, Homo sapiens
caaccaatagtcaaa

SEQ ID NO: 1733704 - DNA, 15 bp, Homo sapiens
aaccaatagtcaaat

SEQ ID NO: 1733705 - DNA, 15 bp, Homo sapiens
accaatagtcaaata

SEQ ID NO: 1733706 - DNA, 15 bp, Homo sapiens
ccaatagtcaaataa

SEQ ID NO: 1733707 - DNA, 15 bp, Homo sapiens
caatagtcaaataag

SEQ ID NO: 1733708 - DNA, 15 bp, Homo sapiens
aatagtcaaataaga

SEQ ID NO: 1733709 - DNA, 15 bp, Homo sapiens
atagtcaaataagaa

SEQ ID NO: 1733710 - DNA, 15 bp, Homo sapiens
tagtcaaataagaaa

SEQ ID NO: 1733711 - DNA, 15 bp, Homo sapiens
agtcaaataagaaat

SEQ ID NO: 1733712 - DNA, 15 bp, Homo sapiens
gtcaaataagaaatc

SEQ ID NO: 1733713 - DNA, 15 bp, Homo sapiens
tcaaataagaaatca

SEQ ID NO: 1733714 - DNA, 15 bp, Homo sapiens
caaataagaaatcaa

SEQ ID NO: 1733715 - DNA, 15 bp, Homo sapiens
aaataagaaatcaaa

SEQ ID NO: 1733716 - DNA, 15 bp, Homo sapiens
aataagaaatcaaaa

SEQ ID NO: 1733717 - DNA, 15 bp, Homo sapiens
ataagaaatcaaaat

SEQ ID NO: 1733718 - DNA, 15 bp, Homo sapiens
taagaaatcaaaatg

SEQ ID NO: 1733719 - DNA, 15 bp, Homo sapiens
aagaaatcaaaatgg

SEQ ID NO: 1733720 - DNA, 15 bp, Homo sapiens
agaaatcaaaatgga

SEQ ID NO: 1733721 - DNA, 15 bp, Homo sapiens
gaaatcaaaatggaa

SEQ ID NO: 1733722 - DNA, 15 bp, Homo sapiens
aaatcaaaatggaaa

SEQ ID NO: 1733723 - DNA, 15 bp, Homo sapiens
aatcaaaatggaaat

SEQ ID NO: 1733724 - DNA, 15 bp, Homo sapiens
atcaaaatggaaatt

SEQ ID NO: 1733725 - DNA, 15 bp, Homo sapiens
tcaaaatggaaatta

SEQ ID NO: 1733726 - DNA, 15 bp, Homo sapiens
caaaatggaaattaa

SEQ ID NO: 1733727 - DNA, 15 bp, Homo sapiens
aaaatggaaattaaa

SEQ ID NO: 1733728 - DNA, 15 bp, Homo sapiens
atggaaattaaaaaa

SEQ ID NO: 1733729 - DNA, 15 bp, Homo sapiens
tggaaattaaaaaaa

SEQ ID NO: 1733730 - DNA, 15 bp, Homo sapiens
ggaaattaaaaaaaa

SEQ ID NO: 1733731 - DNA, 15 bp, Homo sapiens
gaaattaaaaaaaaa

SEQ ID NO: 1733732 - DNA, 15 bp, Homo sapiens
taaaaaaaaaaaatg

SEQ ID NO: 1733733 - DNA, 15 bp, Homo sapiens
aaaaaaaaaaatgtg

SEQ ID NO: 1733734 - DNA, 15 bp, Homo sapiens
aaaaaaaaaatgtga

SEQ ID NO: 1733735 - DNA, 15 bp, Homo sapiens
aaaaaaaaatgtgat

SEQ ID NO: 1733736 - DNA, 15 bp, Homo sapiens
aaaaaaaatgtgata

SEQ ID NO: 1733737 - DNA, 15 bp, Homo sapiens
aaaaaaatgtgatac

SEQ ID NO: 1733738 - DNA, 15 bp, Homo sapiens
aaaaaatgtgataca

SEQ ID NO: 1733739 - DNA, 15 bp, Homo sapiens
aaaaatgtgatacaa

SEQ ID NO: 1733740 - DNA, 15 bp, Homo sapiens
aaaatgtgatacaaa

SEQ ID NO: 1733741 - DNA, 15 bp, Homo sapiens
aaatgtgatacaaat

SEQ ID NO: 1733742 - DNA, 15 bp, Homo sapiens
aatgtgatacaaatg

SEQ ID NO: 1733743 - DNA, 15 bp, Homo sapiens
atgtgatacaaatga

SEQ ID NO: 1733744 - DNA, 15 bp, Homo sapiens
tgtgatacaaatgaa

SEQ ID NO: 1733745 - DNA, 15 bp, Homo sapiens
gtgatacaaatgaac

SEQ ID NO: 1733746 - DNA, 15 bp, Homo sapiens
tgatacaaatgaaca

SEQ ID NO: 1733747 - DNA, 15 bp, Homo sapiens
gatacaaatgaacat

SEQ ID NO: 1733748 - DNA, 15 bp, Homo sapiens
atacaaatgaacatg

SEQ ID NO: 1733749 - DNA, 15 bp, Homo sapiens
tacaaatgaacatgg

SEQ ID NO: 1733750 - DNA, 15 bp, Homo sapiens
acaaatgaacatgga

SEQ ID NO: 1733751 - DNA, 15 bp, Homo sapiens
caaatgaacatggaa

SEQ ID NO: 1733752 - DNA, 15 bp, Homo sapiens
aaatgaacatggaaa

SEQ ID NO: 1733753 - DNA, 15 bp, Homo sapiens
aatgaacatggaaac

SEQ ID NO: 1733754 - DNA, 15 bp, Homo sapiens
atgaacatggaaaca

SEQ ID NO: 1733755 - DNA, 15 bp, Homo sapiens
tgaacatggaaacag

SEQ ID NO: 1733756 - DNA, 15 bp, Homo sapiens
gaacatggaaacagc

SEQ ID NO: 1733757 - DNA, 15 bp, Homo sapiens
aacatggaaacagca

SEQ ID NO: 1733758 - DNA, 15 bp, Homo sapiens
acatggaaacagcac

SEQ ID NO: 1733759 - DNA, 15 bp, Homo sapiens
catggaaacagcaca

SEQ ID NO: 1733760 - DNA, 15 bp, Homo sapiens
atggaaacagcacat

SEQ ID NO: 1733761 - DNA, 15 bp, Homo sapiens
tggaaacagcacatc

SEQ ID NO: 1733762 - DNA, 15 bp, Homo sapiens
ggaaacagcacatca

SEQ ID NO: 1733763 - DNA, 15 bp, Homo sapiens
gaaacagcacatcaa

SEQ ID NO: 1733764 - DNA, 15 bp, Homo sapiens
aaacagcacatcaag

SEQ ID NO: 1733765 - DNA, 15 bp, Homo sapiens
aacagcacatcaaga

SEQ ID NO: 1733766 - DNA, 15 bp, Homo sapiens
acagcacatcaagat

SEQ ID NO: 1733767 - DNA, 15 bp, Homo sapiens
cagcacatcaagatt

SEQ ID NO: 1733768 - DNA, 15 bp, Homo sapiens
agcacatcaagattt

SEQ ID NO: 1733769 - DNA, 15 bp, Homo sapiens
gcacatcaagatttg

SEQ ID NO: 1733770 - DNA, 15 bp, Homo sapiens
cacatcaagatttgt

SEQ ID NO: 1733771 - DNA, 15 bp, Homo sapiens
acatcaagatttgtg

SEQ ID NO: 1733772 - DNA, 15 bp, Homo sapiens
catcaagatttgtgg

SEQ ID NO: 1733773 - DNA, 15 bp, Homo sapiens
atcaagatttgtgga

SEQ ID NO: 1733774 - DNA, 15 bp, Homo sapiens
tcaagatttgtggaa

SEQ ID NO: 1733775 - DNA, 15 bp, Homo sapiens
caagatttgtggaat

SEQ ID NO: 1733776 - DNA, 15 bp, Homo sapiens
aagatttgtggaatg

SEQ ID NO: 1733777 - DNA, 15 bp, Homo sapiens
agatttgtggaatgc

SEQ ID NO: 1733778 - DNA, 15 bp, Homo sapiens
gatttgtggaatgca

SEQ ID NO: 1733779 - DNA, 15 bp, Homo sapiens
atttgtggaatgcag

SEQ ID NO: 1733780 - DNA, 15 bp, Homo sapiens
tttgtggaatgcagc

SEQ ID NO: 1733781 - DNA, 15 bp, Homo sapiens
ttgtggaatgcagca

SEQ ID NO: 1733782 - DNA, 15 bp, Homo sapiens
tgtggaatgcagcaa

SEQ ID NO: 1733783 - DNA, 15 bp, Homo sapiens
gtggaatgcagcaaa

SEQ ID NO: 1733784 - DNA, 15 bp, Homo sapiens
tggaatgcagcaaaa

SEQ ID NO: 1733785 - DNA, 15 bp, Homo sapiens
ggaatgcagcaaaac

SEQ ID NO: 1733786 - DNA, 15 bp, Homo sapiens
gaatgcagcaaaaca

SEQ ID NO: 1733787 - DNA, 15 bp, Homo sapiens
aatgcagcaaaacag

SEQ ID NO: 1733788 - DNA, 15 bp, Homo sapiens
atgcagcaaaacagt

SEQ ID NO: 1733789 - DNA, 15 bp, Homo sapiens
tgcagcaaaacagtt

SEQ ID NO: 1733790 - DNA, 15 bp, Homo sapiens
gcagcaaaacagttc

SEQ ID NO: 1733791 - DNA, 15 bp, Homo sapiens
cagcaaaacagttcc

SEQ ID NO: 1733792 - DNA, 15 bp, Homo sapiens
agcaaaacagttcca

SEQ ID NO: 1733793 - DNA, 15 bp, Homo sapiens
gcaaaacagttccaa

SEQ ID NO: 1733794 - DNA, 15 bp, Homo sapiens
caaaacagttccaat

SEQ ID NO: 1733795 - DNA, 15 bp, Homo sapiens
aaaacagttccaata

SEQ ID NO: 1733796 - DNA, 15 bp, Homo sapiens
aaacagttccaatag

SEQ ID NO: 1733797 - DNA, 15 bp, Homo sapiens
aacagttccaatagg

SEQ ID NO: 1733798 - DNA, 15 bp, Homo sapiens
acagttccaatagga

SEQ ID NO: 1733799 - DNA, 15 bp, Homo sapiens
cagttccaataggag

SEQ ID NO: 1733800 - DNA, 15 bp, Homo sapiens
agttccaataggaga

SEQ ID NO: 1733801 - DNA, 15 bp, Homo sapiens
gttccaataggagat

SEQ ID NO: 1733802 - DNA, 15 bp, Homo sapiens
ttccaataggagatt

SEQ ID NO: 1733803 - DNA, 15 bp, Homo sapiens
tccaataggagattt

SEQ ID NO: 1733804 - DNA, 15 bp, Homo sapiens
ccaataggagatttc

SEQ ID NO: 1733805 - DNA, 15 bp, Homo sapiens
caataggagatttca

SEQ ID NO: 1733806 - DNA, 15 bp, Homo sapiens
aataggagatttcat

SEQ ID NO: 1733807 - DNA, 15 bp, Homo sapiens
ataggagatttcata

SEQ ID NO: 1733808 - DNA, 15 bp, Homo sapiens
taggagatttcatag

SEQ ID NO: 1733809 - DNA, 15 bp, Homo sapiens
aggagatttcatagt

SEQ ID NO: 1733810 - DNA, 15 bp, Homo sapiens
ggagatttcatagtg

SEQ ID NO: 1733811 - DNA, 15 bp, Homo sapiens
gagatttcatagtga

SEQ ID NO: 1733812 - DNA, 15 bp, Homo sapiens
agatttcatagtgat

SEQ ID NO: 1733813 - DNA, 15 bp, Homo sapiens
gatttcatagtgata

SEQ ID NO: 1733814 - DNA, 15 bp, Homo sapiens
atttcatagtgataa

SEQ ID NO: 1733815 - DNA, 15 bp, Homo sapiens
tttcatagtgataaa

SEQ ID NO: 1733816 - DNA, 15 bp, Homo sapiens
ttcatagtgataaac

SEQ ID NO: 1733817 - DNA, 15 bp, Homo sapiens
tcatagtgataaaca

SEQ ID NO: 1733818 - DNA, 15 bp, Homo sapiens
catagtgataaacac

SEQ ID NO: 1733819 - DNA, 15 bp, Homo sapiens
atagtgataaacacc

SEQ ID NO: 1733820 - DNA, 15 bp, Homo sapiens
tagtgataaacacca

SEQ ID NO: 1733821 - DNA, 15 bp, Homo sapiens
agtgataaacaccaa

SEQ ID NO: 1733822 - DNA, 15 bp, Homo sapiens
gtgataaacaccaac

SEQ ID NO: 1733823 - DNA, 15 bp, Homo sapiens
tgataaacaccaaca

SEQ ID NO: 1733824 - DNA, 15 bp, Homo sapiens
gataaacaccaacat

SEQ ID NO: 1733825 - DNA, 15 bp, Homo sapiens
ataaacaccaacatg

SEQ ID NO: 1733826 - DNA, 15 bp, Homo sapiens
taaacaccaacatga

SEQ ID NO: 1733827 - DNA, 15 bp, Homo sapiens
aaacaccaacatgaa

SEQ ID NO: 1733828 - DNA, 15 bp, Homo sapiens
aacaccaacatgaag

SEQ ID NO: 1733829 - DNA, 15 bp, Homo sapiens
acaccaacatgaagg

SEQ ID NO: 1733830 - DNA, 15 bp, Homo sapiens
caccaacatgaagga

SEQ ID NO: 1733831 - DNA, 15 bp, Homo sapiens
accaacatgaaggaa

SEQ ID NO: 1733832 - DNA, 15 bp, Homo sapiens
ccaacatgaaggaaa

SEQ ID NO: 1733833 - DNA, 15 bp, Homo sapiens
caacatgaaggaaac

SEQ ID NO: 1733834 - DNA, 15 bp, Homo sapiens
aacatgaaggaaaca

SEQ ID NO: 1733835 - DNA, 15 bp, Homo sapiens
acatgaaggaaacag

SEQ ID NO: 1733836 - DNA, 15 bp, Homo sapiens
catgaaggaaacagt

SEQ ID NO: 1733837 - DNA, 15 bp, Homo sapiens
atgaaggaaacagta

SEQ ID NO: 1733838 - DNA, 15 bp, Homo sapiens
tgaaggaaacagtag

SEQ ID NO: 1733839 - DNA, 15 bp, Homo sapiens
gaaggaaacagtagg

SEQ ID NO: 1733840 - DNA, 15 bp, Homo sapiens
aaggaaacagtagga

SEQ ID NO: 1733841 - DNA, 15 bp, Homo sapiens
aggaaacagtaggac

SEQ ID NO: 1733842 - DNA, 15 bp, Homo sapiens
ggaaacagtaggacc

SEQ ID NO: 1733843 - DNA, 15 bp, Homo sapiens
gaaacagtaggaccc

SEQ ID NO: 1733844 - DNA, 15 bp, Homo sapiens
aaacagtaggacccc

SEQ ID NO: 1733845 - DNA, 15 bp, Homo sapiens
aacagtaggacccca

SEQ ID NO: 1733846 - DNA, 15 bp, Homo sapiens
acagtaggaccccag

SEQ ID NO: 1733847 - DNA, 15 bp, Homo sapiens
cagtaggaccccaga

SEQ ID NO: 1733848 - DNA, 15 bp, Homo sapiens
agtaggaccccagat

SEQ ID NO: 1733849 - DNA, 15 bp, Homo sapiens
gtaggaccccagata

SEQ ID NO: 1733850 - DNA, 15 bp, Homo sapiens
taggaccccagataa

SEQ ID NO: 1733851 - DNA, 15 bp, Homo sapiens
aggaccccagataag

SEQ ID NO: 1733852 - DNA, 15 bp, Homo sapiens
ggaccccagataagt

SEQ ID NO: 1733853 - DNA, 15 bp, Homo sapiens
gaccccagataagta

SEQ ID NO: 1733854 - DNA, 15 bp, Homo sapiens
accccagataagtaa

SEQ ID NO: 1733855 - DNA, 15 bp, Homo sapiens
ccccagataagtaac

SEQ ID NO: 1733856 - DNA, 15 bp, Homo sapiens
cccagataagtaacc

SEQ ID NO: 1733857 - DNA, 15 bp, Homo sapiens
ccagataagtaacct

SEQ ID NO: 1733858 - DNA, 15 bp, Homo sapiens
cagataagtaaccta

SEQ ID NO: 1733859 - DNA, 15 bp, Homo sapiens
agataagtaacctaa

SEQ ID NO: 1733860 - DNA, 15 bp, Homo sapiens
gataagtaacctaac

SEQ ID NO: 1733861 - DNA, 15 bp, Homo sapiens
ataagtaacctaact

SEQ ID NO: 1733862 - DNA, 15 bp, Homo sapiens
taagtaacctaactt

SEQ ID NO: 1733863 - DNA, 15 bp, Homo sapiens
aagtaacctaacttt

SEQ ID NO: 1733864 - DNA, 15 bp, Homo sapiens
agtaacctaacttta

SEQ ID NO: 1733865 - DNA, 15 bp, Homo sapiens
gtaacctaactttac

SEQ ID NO: 1733866 - DNA, 15 bp, Homo sapiens
taacctaactttaca

SEQ ID NO: 1733867 - DNA, 15 bp, Homo sapiens
aacctaactttacat

SEQ ID NO: 1733868 - DNA, 15 bp, Homo sapiens
acctaactttacatc

SEQ ID NO: 1733869 - DNA, 15 bp, Homo sapiens
cctaactttacatct

SEQ ID NO: 1733870 - DNA, 15 bp, Homo sapiens
ctaactttacatctc

SEQ ID NO: 1733871 - DNA, 15 bp, Homo sapiens
taactttacatctct

SEQ ID NO: 1733872 - DNA, 15 bp, Homo sapiens
aactttacatctctc

SEQ ID NO: 1733873 - DNA, 15 bp, Homo sapiens
actttacatctctca

SEQ ID NO: 1733874 - DNA, 15 bp, Homo sapiens
ctttacatctctcag

SEQ ID NO: 1733875 - DNA, 15 bp, Homo sapiens
tttacatctctcaga

SEQ ID NO: 1733876 - DNA, 15 bp, Homo sapiens
ttacatctctcagaa

SEQ ID NO: 1733877 - DNA, 15 bp, Homo sapiens
tacatctctcagaac

SEQ ID NO: 1733878 - DNA, 15 bp, Homo sapiens
acatctctcagaact

SEQ ID NO: 1733879 - DNA, 15 bp, Homo sapiens
catctctcagaacta

SEQ ID NO: 1733880 - DNA, 15 bp, Homo sapiens
atctctcagaactag

SEQ ID NO: 1733881 - DNA, 15 bp, Homo sapiens
tctctcagaactagg

SEQ ID NO: 1733882 - DNA, 15 bp, Homo sapiens
ctctcagaactaggt

SEQ ID NO: 1733883 - DNA, 15 bp, Homo sapiens
tctcagaactaggta

SEQ ID NO: 1733884 - DNA, 15 bp, Homo sapiens
ctcagaactaggtag

SEQ ID NO: 1733885 - DNA, 15 bp, Homo sapiens
tcagaactaggtaga

SEQ ID NO: 1733886 - DNA, 15 bp, Homo sapiens
cagaactaggtagaa

SEQ ID NO: 1733887 - DNA, 15 bp, Homo sapiens
agaactaggtagaaa

SEQ ID NO: 1733888 - DNA, 15 bp, Homo sapiens
gaactaggtagaaaa

SEQ ID NO: 1733889 - DNA, 15 bp, Homo sapiens
aactaggtagaaaaa

SEQ ID NO: 1733890 - DNA, 15 bp, Homo sapiens
actaggtagaaaaag

SEQ ID NO: 1733891 - DNA, 15 bp, Homo sapiens
ctaggtagaaaaaga

SEQ ID NO: 1733892 - DNA, 15 bp, Homo sapiens
taggtagaaaaagaa

SEQ ID NO: 1733893 - DNA, 15 bp, Homo sapiens
aggtagaaaaagaac

SEQ ID NO: 1733894 - DNA, 15 bp, Homo sapiens
ggtagaaaaagaaca

SEQ ID NO: 1733895 - DNA, 15 bp, Homo sapiens
gtagaaaaagaacaa

SEQ ID NO: 1733896 - DNA, 15 bp, Homo sapiens
tagaaaaagaacaaa

SEQ ID NO: 1733897 - DNA, 15 bp, Homo sapiens
agaaaaagaacaaat

SEQ ID NO: 1733898 - DNA, 15 bp, Homo sapiens
gaaaaagaacaaata

SEQ ID NO: 1733899 - DNA, 15 bp, Homo sapiens
aaaaagaacaaataa

SEQ ID NO: 1733900 - DNA, 15 bp, Homo sapiens
aaaagaacaaataag

SEQ ID NO: 1733901 - DNA, 15 bp, Homo sapiens
aaagaacaaataagc

SEQ ID NO: 1733902 - DNA, 15 bp, Homo sapiens
aagaacaaataagcc

SEQ ID NO: 1733903 - DNA, 15 bp, Homo sapiens
agaacaaataagccc

SEQ ID NO: 1733904 - DNA, 15 bp, Homo sapiens
gaacaaataagccca

SEQ ID NO: 1733905 - DNA, 15 bp, Homo sapiens
aacaaataagcccaa

SEQ ID NO: 1733906 - DNA, 15 bp, Homo sapiens
acaaataagcccaaa

SEQ ID NO: 1733907 - DNA, 15 bp, Homo sapiens
caaataagcccaaag

SEQ ID NO: 1733908 - DNA, 15 bp, Homo sapiens
aaataagcccaaagt

SEQ ID NO: 1733909 - DNA, 15 bp, Homo sapiens
aataagcccaaagta

SEQ ID NO: 1733910 - DNA, 15 bp, Homo sapiens
ataagcccaaagtaa

SEQ ID NO: 1733911 - DNA, 15 bp, Homo sapiens
taagcccaaagtaat

SEQ ID NO: 1733912 - DNA, 15 bp, Homo sapiens
aagcccaaagtaata

SEQ ID NO: 1733913 - DNA, 15 bp, Homo sapiens
agcccaaagtaatag

SEQ ID NO: 1733914 - DNA, 15 bp, Homo sapiens
gcccaaagtaataga

SEQ ID NO: 1733915 - DNA, 15 bp, Homo sapiens
cccaaagtaatagaa

SEQ ID NO: 1733916 - DNA, 15 bp, Homo sapiens
ccaaagtaatagaag

SEQ ID NO: 1733917 - DNA, 15 bp, Homo sapiens
caaagtaatagaagg

SEQ ID NO: 1733918 - DNA, 15 bp, Homo sapiens
aaagtaatagaagga

SEQ ID NO: 1733919 - DNA, 15 bp, Homo sapiens
aagtaatagaaggag

SEQ ID NO: 1733920 - DNA, 15 bp, Homo sapiens
agtaatagaaggagg

SEQ ID NO: 1733921 - DNA, 15 bp, Homo sapiens
gtaatagaaggaggg

SEQ ID NO: 1733922 - DNA, 15 bp, Homo sapiens
taatagaaggagggg

SEQ ID NO: 1733923 - DNA, 15 bp, Homo sapiens
aatagaaggaggggg

SEQ ID NO: 1733924 - DNA, 15 bp, Homo sapiens
atagaaggaggggga

SEQ ID NO: 1733925 - DNA, 15 bp, Homo sapiens
tagaaggagggggat

SEQ ID NO: 1733926 - DNA, 15 bp, Homo sapiens
agaaggagggggata

SEQ ID NO: 1733927 - DNA, 15 bp, Homo sapiens
gaaggagggggataa

SEQ ID NO: 1733928 - DNA, 15 bp, Homo sapiens
aaggagggggataag

SEQ ID NO: 1733929 - DNA, 15 bp, Homo sapiens
aggagggggataaga

SEQ ID NO: 1733930 - DNA, 15 bp, Homo sapiens
ggagggggataagaa

SEQ ID NO: 1733931 - DNA, 15 bp, Homo sapiens
gagggggataagaaa

SEQ ID NO: 1733932 - DNA, 15 bp, Homo sapiens
agggggataagaaag

SEQ ID NO: 1733933 - DNA, 15 bp, Homo sapiens
gggggataagaaaga

SEQ ID NO: 1733934 - DNA, 15 bp, Homo sapiens
ggggataagaaagat

SEQ ID NO: 1733935 - DNA, 15 bp, Homo sapiens
gggataagaaagatc

SEQ ID NO: 1733936 - DNA, 15 bp, Homo sapiens
ggataagaaagatca

SEQ ID NO: 1733937 - DNA, 15 bp, Homo sapiens
gataagaaagatcac

SEQ ID NO: 1733938 - DNA, 15 bp, Homo sapiens
ataagaaagatcaca

SEQ ID NO: 1733939 - DNA, 15 bp, Homo sapiens
taagaaagatcacag

SEQ ID NO: 1733940 - DNA, 15 bp, Homo sapiens
aagaaagatcacagc

SEQ ID NO: 1733941 - DNA, 15 bp, Homo sapiens
agaaagatcacagca

SEQ ID NO: 1733942 - DNA, 15 bp, Homo sapiens
gaaagatcacagcag

SEQ ID NO: 1733943 - DNA, 15 bp, Homo sapiens
aaagatcacagcaga

SEQ ID NO: 1733944 - DNA, 15 bp, Homo sapiens
aagatcacagcagaa

SEQ ID NO: 1733945 - DNA, 15 bp, Homo sapiens
agatcacagcagaaa

SEQ ID NO: 1733946 - DNA, 15 bp, Homo sapiens
gatcacagcagaaat

SEQ ID NO: 1733947 - DNA, 15 bp, Homo sapiens
atcacagcagaaata

SEQ ID NO: 1733948 - DNA, 15 bp, Homo sapiens
tcacagcagaaataa

SEQ ID NO: 1733949 - DNA, 15 bp, Homo sapiens
cacagcagaaataaa

SEQ ID NO: 1733950 - DNA, 15 bp, Homo sapiens
acagcagaaataaat

SEQ ID NO: 1733951 - DNA, 15 bp, Homo sapiens
cagcagaaataaatg

SEQ ID NO: 1733952 - DNA, 15 bp, Homo sapiens
agcagaaataaatga

SEQ ID NO: 1733953 - DNA, 15 bp, Homo sapiens
gcagaaataaatgaa

SEQ ID NO: 1733954 - DNA, 15 bp, Homo sapiens
cagaaataaatgaaa

SEQ ID NO: 1733955 - DNA, 15 bp, Homo sapiens
agaaataaatgaaag

SEQ ID NO: 1733956 - DNA, 15 bp, Homo sapiens
gaaataaatgaaaga

SEQ ID NO: 1733957 - DNA, 15 bp, Homo sapiens
aaataaatgaaagac

SEQ ID NO: 1733958 - DNA, 15 bp, Homo sapiens
aataaatgaaagact

SEQ ID NO: 1733959 - DNA, 15 bp, Homo sapiens
ataaatgaaagactc

SEQ ID NO: 1733960 - DNA, 15 bp, Homo sapiens
taaatgaaagactca

SEQ ID NO: 1733961 - DNA, 15 bp, Homo sapiens
aaatgaaagactcaa

SEQ ID NO: 1733962 - DNA, 15 bp, Homo sapiens
aatgaaagactcaaa

SEQ ID NO: 1733963 - DNA, 15 bp, Homo sapiens
atgaaagactcaaaa

SEQ ID NO: 1733964 - DNA, 15 bp, Homo sapiens
tgaaagactcaaaaa

SEQ ID NO: 1733965 - DNA, 15 bp, Homo sapiens
gaaagactcaaaaaa

SEQ ID NO: 1733966 - DNA, 15 bp, Homo sapiens
gactcaaaaaacaat

SEQ ID NO: 1733967 - DNA, 15 bp, Homo sapiens
actcaaaaaacaata

SEQ ID NO: 1733968 - DNA, 15 bp, Homo sapiens
ctcaaaaaacaatag

SEQ ID NO: 1733969 - DNA, 15 bp, Homo sapiens
tcaaaaaacaataga

SEQ ID NO: 1733970 - DNA, 15 bp, Homo sapiens
caaaaaacaatagaa

SEQ ID NO: 1733971 - DNA, 15 bp, Homo sapiens
aaaaaacaatagaaa

SEQ ID NO: 1733972 - DNA, 15 bp, Homo sapiens
aaaaacaatagaaaa

SEQ ID NO: 1733973 - DNA, 15 bp, Homo sapiens
aaaacaatagaaaag

SEQ ID NO: 1733974 - DNA, 15 bp, Homo sapiens
aaacaatagaaaaga

SEQ ID NO: 1733975 - DNA, 15 bp, Homo sapiens
aacaatagaaaagag

SEQ ID NO: 1733976 - DNA, 15 bp, Homo sapiens
acaatagaaaagagc

SEQ ID NO: 1733977 - DNA, 15 bp, Homo sapiens
caatagaaaagagca

SEQ ID NO: 1733978 - DNA, 15 bp, Homo sapiens
aatagaaaagagcaa

SEQ ID NO: 1733979 - DNA, 15 bp, Homo sapiens
atagaaaagagcaac

SEQ ID NO: 1733980 - DNA, 15 bp, Homo sapiens
tagaaaagagcaaca

SEQ ID NO: 1733981 - DNA, 15 bp, Homo sapiens
agaaaagagcaacaa

SEQ ID NO: 1733982 - DNA, 15 bp, Homo sapiens
gaaaagagcaacaaa

SEQ ID NO: 1733983 - DNA, 15 bp, Homo sapiens
aaaagagcaacaaaa

SEQ ID NO: 1733984 - DNA, 15 bp, Homo sapiens
aaagagcaacaaaat

SEQ ID NO: 1733985 - DNA, 15 bp, Homo sapiens
aagagcaacaaaatg

SEQ ID NO: 1733986 - DNA, 15 bp, Homo sapiens
agagcaacaaaatga

SEQ ID NO: 1733987 - DNA, 15 bp, Homo sapiens
gagcaacaaaatgaa

SEQ ID NO: 1733988 - DNA, 15 bp, Homo sapiens
agcaacaaaatgaag

SEQ ID NO: 1733989 - DNA, 15 bp, Homo sapiens
gcaacaaaatgaaga

SEQ ID NO: 1733990 - DNA, 15 bp, Homo sapiens
caacaaaatgaagag

SEQ ID NO: 1733991 - DNA, 15 bp, Homo sapiens
aacaaaatgaagagt

SEQ ID NO: 1733992 - DNA, 15 bp, Homo sapiens
acaaaatgaagagtt

SEQ ID NO: 1733993 - DNA, 15 bp, Homo sapiens
caaaatgaagagttt

SEQ ID NO: 1733994 - DNA, 15 bp, Homo sapiens
aaaatgaagagtttt

SEQ ID NO: 1733995 - DNA, 15 bp, Homo sapiens
aaatgaagagttttt

SEQ ID NO: 1733996 - DNA, 15 bp, Homo sapiens
aatgaagagtttttt

SEQ ID NO: 1733997 - DNA, 15 bp, Homo sapiens
atgaagagttttttt

SEQ ID NO: 1733998 - DNA, 15 bp, Homo sapiens
tgaagagtttttttg

SEQ ID NO: 1733999 - DNA, 15 bp, Homo sapiens
gaagagtttttttga

SEQ ID NO: 1734000 - DNA, 15 bp, Homo sapiens
aagagtttttttgaa

SEQ ID NO: 1734001 - DNA, 15 bp, Homo sapiens
agagtttttttgaaa

SEQ ID NO: 1734002 - DNA, 15 bp, Homo sapiens
gagtttttttgaaaa

SEQ ID NO: 1734003 - DNA, 15 bp, Homo sapiens
agtttttttgaaaag

SEQ ID NO: 1734004 - DNA, 15 bp, Homo sapiens
gtttttttgaaaaga

SEQ ID NO: 1734005 - DNA, 15 bp, Homo sapiens
tttttttgaaaagat

SEQ ID NO: 1734006 - DNA, 15 bp, Homo sapiens
ttttttgaaaagata

SEQ ID NO: 1734007 - DNA, 15 bp, Homo sapiens
tttttgaaaagataa

SEQ ID NO: 1734008 - DNA, 15 bp, Homo sapiens
ttttgaaaagataaa

SEQ ID NO: 1734009 - DNA, 15 bp, Homo sapiens
tttgaaaagataaac

SEQ ID NO: 1734010 - DNA, 15 bp, Homo sapiens
ttgaaaagataaaca

SEQ ID NO: 1734011 - DNA, 15 bp, Homo sapiens
tgaaaagataaacaa

SEQ ID NO: 1734012 - DNA, 15 bp, Homo sapiens
gaaaagataaacaaa

SEQ ID NO: 1734013 - DNA, 15 bp, Homo sapiens
aaaagataaacaaaa

SEQ ID NO: 1734014 - DNA, 15 bp, Homo sapiens
aaagataaacaaaat

SEQ ID NO: 1734015 - DNA, 15 bp, Homo sapiens
aagataaacaaaatt

SEQ ID NO: 1734016 - DNA, 15 bp, Homo sapiens
agataaacaaaattg

SEQ ID NO: 1734017 - DNA, 15 bp, Homo sapiens
gataaacaaaattga

SEQ ID NO: 1734018 - DNA, 15 bp, Homo sapiens
ataaacaaaattgat

SEQ ID NO: 1734019 - DNA, 15 bp, Homo sapiens
taaacaaaattgata

SEQ ID NO: 1734020 - DNA, 15 bp, Homo sapiens
aaacaaaattgataa

SEQ ID NO: 1734021 - DNA, 15 bp, Homo sapiens
aacaaaattgataaa

SEQ ID NO: 1734022 - DNA, 15 bp, Homo sapiens
acaaaattgataaac

SEQ ID NO: 1734023 - DNA, 15 bp, Homo sapiens
caaaattgataaact

SEQ ID NO: 1734024 - DNA, 15 bp, Homo sapiens
aaaattgataaactt

SEQ ID NO: 1734025 - DNA, 15 bp, Homo sapiens
aaattgataaacttt

SEQ ID NO: 1734026 - DNA, 15 bp, Homo sapiens
aattgataaactttt

SEQ ID NO: 1734027 - DNA, 15 bp, Homo sapiens
attgataaactttta

SEQ ID NO: 1734028 - DNA, 15 bp, Homo sapiens
ttgataaacttttag

SEQ ID NO: 1734029 - DNA, 15 bp, Homo sapiens
tgataaacttttagc

SEQ ID NO: 1734030 - DNA, 15 bp, Homo sapiens
gataaacttttagct

SEQ ID NO: 1734031 - DNA, 15 bp, Homo sapiens
ataaacttttagcta

SEQ ID NO: 1734032 - DNA, 15 bp, Homo sapiens
taaacttttagctag

SEQ ID NO: 1734033 - DNA, 15 bp, Homo sapiens
aaacttttagctaga

SEQ ID NO: 1734034 - DNA, 15 bp, Homo sapiens
aacttttagctagaa

SEQ ID NO: 1734035 - DNA, 15 bp, Homo sapiens
acttttagctagaat

SEQ ID NO: 1734036 - DNA, 15 bp, Homo sapiens
cttttagctagaata

SEQ ID NO: 1734037 - DNA, 15 bp, Homo sapiens
ttttagctagaataa

SEQ ID NO: 1734038 - DNA, 15 bp, Homo sapiens
tttagctagaataag

SEQ ID NO: 1734039 - DNA, 15 bp, Homo sapiens
ttagctagaataaga

SEQ ID NO: 1734040 - DNA, 15 bp, Homo sapiens
tagctagaataagaa

SEQ ID NO: 1734041 - DNA, 15 bp, Homo sapiens
agctagaataagaaa

SEQ ID NO: 1734042 - DNA, 15 bp, Homo sapiens
gctagaataagaaaa

SEQ ID NO: 1734043 - DNA, 15 bp, Homo sapiens
ttcatgtgtaagctt

SEQ ID NO: 1734044 - DNA, 15 bp, Homo sapiens
tcatgtgtaagcttt

SEQ ID NO: 1734045 - DNA, 15 bp, Homo sapiens
catgtgtaagctttc

SEQ ID NO: 1734046 - DNA, 15 bp, Homo sapiens
atgtgtaagctttct

SEQ ID NO: 1734047 - DNA, 15 bp, Homo sapiens
tgtgtaagctttctt

SEQ ID NO: 1734048 - DNA, 15 bp, Homo sapiens
gtgtaagctttctta

SEQ ID NO: 1734049 - DNA, 15 bp, Homo sapiens
tgtaagctttcttaa

SEQ ID NO: 1734050 - DNA, 15 bp, Homo sapiens
gtaagctttcttaat

SEQ ID NO: 1734051 - DNA, 15 bp, Homo sapiens
taagctttcttaatt

SEQ ID NO: 1734052 - DNA, 15 bp, Homo sapiens
aagctttcttaattg

SEQ ID NO: 1734053 - DNA, 15 bp, Homo sapiens
agctttcttaattgt

SEQ ID NO: 1734054 - DNA, 15 bp, Homo sapiens
gctttcttaattgtg

SEQ ID NO: 1734055 - DNA, 15 bp, Homo sapiens
ctttcttaattgtgg

SEQ ID NO: 1734056 - DNA, 15 bp, Homo sapiens
tttcttaattgtggc

SEQ ID NO: 1734057 - DNA, 15 bp, Homo sapiens
ttcttaattgtggct

SEQ ID NO: 1734058 - DNA, 15 bp, Homo sapiens
tcttaattgtggctg

SEQ ID NO: 1734059 - DNA, 15 bp, Homo sapiens
cttaattgtggctgt

SEQ ID NO: 1734060 - DNA, 15 bp, Homo sapiens
ttaattgtggctgtt

SEQ ID NO: 1734061 - DNA, 15 bp, Homo sapiens
taattgtggctgtta

SEQ ID NO: 1734062 - DNA, 15 bp, Homo sapiens
aattgtggctgttaa

SEQ ID NO: 1734063 - DNA, 15 bp, Homo sapiens
attgtggctgttaat

SEQ ID NO: 1734064 - DNA, 15 bp, Homo sapiens
ttgtggctgttaata

SEQ ID NO: 1734065 - DNA, 15 bp, Homo sapiens
tgtggctgttaataa

SEQ ID NO: 1734066 - DNA, 15 bp, Homo sapiens
gtggctgttaataaa

SEQ ID NO: 1734067 - DNA, 15 bp, Homo sapiens
tggctgttaataaag

SEQ ID NO: 1734068 - DNA, 15 bp, Homo sapiens
ggctgttaataaagt

SEQ ID NO: 1734069 - DNA, 15 bp, Homo sapiens
gctgttaataaagtg

SEQ ID NO: 1734070 - DNA, 15 bp, Homo sapiens
ctgttaataaagtga

SEQ ID NO: 1734071 - DNA, 15 bp, Homo sapiens
tgttaataaagtgaa

SEQ ID NO: 1734072 - DNA, 15 bp, Homo sapiens
gttaataaagtgaac

SEQ ID NO: 1734073 - DNA, 15 bp, Homo sapiens
ttaataaagtgaaca

SEQ ID NO: 1734074 - DNA, 15 bp, Homo sapiens
taataaagtgaacag

SEQ ID NO: 1734075 - DNA, 15 bp, Homo sapiens
aataaagtgaacaga

SEQ ID NO: 1734076 - DNA, 15 bp, Homo sapiens
ataaagtgaacagaa

SEQ ID NO: 1734077 - DNA, 15 bp, Homo sapiens
taaagtgaacagaaa

SEQ ID NO: 1734078 - DNA, 15 bp, Homo sapiens
aaagtgaacagaaaa

SEQ ID NO: 1734079 - DNA, 15 bp, Homo sapiens
aagtgaacagaaaag

SEQ ID NO: 1734080 - DNA, 15 bp, Homo sapiens
agtgaacagaaaagc

SEQ ID NO: 1734081 - DNA, 15 bp, Homo sapiens
gtgaacagaaaagca

SEQ ID NO: 1734082 - DNA, 15 bp, Homo sapiens
tgaacagaaaagcaa

SEQ ID NO: 1734083 - DNA, 15 bp, Homo sapiens
gaacagaaaagcaag

SEQ ID NO: 1734084 - DNA, 15 bp, Homo sapiens
aacagaaaagcaagg

SEQ ID NO: 1734085 - DNA, 15 bp, Homo sapiens
acagaaaagcaagga

SEQ ID NO: 1734086 - DNA, 15 bp, Homo sapiens
cagaaaagcaaggat

SEQ ID NO: 1734087 - DNA, 15 bp, Homo sapiens
agaaaagcaaggatt

SEQ ID NO: 1734088 - DNA, 15 bp, Homo sapiens
gaaaagcaaggattt

SEQ ID NO: 1734089 - DNA, 15 bp, Homo sapiens
aaaagcaaggatttg

SEQ ID NO: 1734090 - DNA, 15 bp, Homo sapiens
aaagcaaggatttgt

SEQ ID NO: 1734091 - DNA, 15 bp, Homo sapiens
aagcaaggatttgta

SEQ ID NO: 1734092 - DNA, 15 bp, Homo sapiens
agcaaggatttgtaa

SEQ ID NO: 1734093 - DNA, 15 bp, Homo sapiens
gcaaggatttgtaaa

SEQ ID NO: 1734094 - DNA, 15 bp, Homo sapiens
caaggatttgtaaat

SEQ ID NO: 1734095 - DNA, 15 bp, Homo sapiens
aaggatttgtaaata

SEQ ID NO: 1734096 - DNA, 15 bp, Homo sapiens
aggatttgtaaatag

SEQ ID NO: 1734097 - DNA, 15 bp, Homo sapiens
ggatttgtaaatagg

SEQ ID NO: 1734098 - DNA, 15 bp, Homo sapiens
gatttgtaaataggc

SEQ ID NO: 1734099 - DNA, 15 bp, Homo sapiens
atttgtaaataggct

SEQ ID NO: 1734100 - DNA, 15 bp, Homo sapiens
tttgtaaataggctt

SEQ ID NO: 1734101 - DNA, 15 bp, Homo sapiens
ttgtaaataggcttg

SEQ ID NO: 1734102 - DNA, 15 bp, Homo sapiens
tgtaaataggcttgt

SEQ ID NO: 1734103 - DNA, 15 bp, Homo sapiens
gtaaataggcttgtt

SEQ ID NO: 1734104 - DNA, 15 bp, Homo sapiens
taaataggcttgttt

SEQ ID NO: 1734105 - DNA, 15 bp, Homo sapiens
aaataggcttgtttt

SEQ ID NO: 1734106 - DNA, 15 bp, Homo sapiens
aataggcttgtttta

SEQ ID NO: 1734107 - DNA, 15 bp, Homo sapiens
ataggcttgttttat

SEQ ID NO: 1734108 - DNA, 15 bp, Homo sapiens
taggcttgttttata

SEQ ID NO: 1734109 - DNA, 15 bp, Homo sapiens
aggcttgttttatat

SEQ ID NO: 1734110 - DNA, 15 bp, Homo sapiens
ggcttgttttatatt

SEQ ID NO: 1734111 - DNA, 15 bp, Homo sapiens
gcttgttttatatta

SEQ ID NO: 1734112 - DNA, 15 bp, Homo sapiens
cttgttttatattaa

SEQ ID NO: 1734113 - DNA, 15 bp, Homo sapiens
ttgttttatattaaa

SEQ ID NO: 1734114 - DNA, 15 bp, Homo sapiens
tgttttatattaaaa

SEQ ID NO: 1734115 - DNA, 15 bp, Homo sapiens
gttttatattaaaac

SEQ ID NO: 1734116 - DNA, 15 bp, Homo sapiens
ttttatattaaaacc

SEQ ID NO: 1734117 - DNA, 15 bp, Homo sapiens
tttatattaaaacct

SEQ ID NO: 1734118 - DNA, 15 bp, Homo sapiens
ttatattaaaacctt

SEQ ID NO: 1734119 - DNA, 15 bp, Homo sapiens
tatattaaaaccttt

SEQ ID NO: 1734120 - DNA, 15 bp, Homo sapiens
atattaaaaccttta

SEQ ID NO: 1734121 - DNA, 15 bp, Homo sapiens
tattaaaacctttat

SEQ ID NO: 1734122 - DNA, 15 bp, Homo sapiens
attaaaacctttata

SEQ ID NO: 1734123 - DNA, 15 bp, Homo sapiens
ttaaaacctttatat

SEQ ID NO: 1734124 - DNA, 15 bp, Homo sapiens
taaaacctttatata

SEQ ID NO: 1734125 - DNA, 15 bp, Homo sapiens
aaaacctttatataa

SEQ ID NO: 1734126 - DNA, 15 bp, Homo sapiens
aaacctttatataag

SEQ ID NO: 1734127 - DNA, 15 bp, Homo sapiens
aacctttatataagt

SEQ ID NO: 1734128 - DNA, 15 bp, Homo sapiens
acctttatataagta

SEQ ID NO: 1734129 - DNA, 15 bp, Homo sapiens
cctttatataagtag

SEQ ID NO: 1734130 - DNA, 15 bp, Homo sapiens
ctttatataagtagt

SEQ ID NO: 1734131 - DNA, 15 bp, Homo sapiens
tttatataagtagtt

SEQ ID NO: 1734132 - DNA, 15 bp, Homo sapiens
ttatataagtagttt

SEQ ID NO: 1734133 - DNA, 15 bp, Homo sapiens
tatataagtagtttg

SEQ ID NO: 1734134 - DNA, 15 bp, Homo sapiens
atataagtagtttga

SEQ ID NO: 1734135 - DNA, 15 bp, Homo sapiens
tataagtagtttgag

SEQ ID NO: 1734136 - DNA, 15 bp, Homo sapiens
ataagtagtttgagt

SEQ ID NO: 1734137 - DNA, 15 bp, Homo sapiens
taagtagtttgagtt

SEQ ID NO: 1734138 - DNA, 15 bp, Homo sapiens
aagtagtttgagttt

SEQ ID NO: 1734139 - DNA, 15 bp, Homo sapiens
agtagtttgagttta

SEQ ID NO: 1734140 - DNA, 15 bp, Homo sapiens
gtagtttgagtttat

SEQ ID NO: 1734141 - DNA, 15 bp, Homo sapiens
tagtttgagtttatc

SEQ ID NO: 1734142 - DNA, 15 bp, Homo sapiens
agtttgagtttatct

SEQ ID NO: 1734143 - DNA, 15 bp, Homo sapiens
gtttgagtttatctt

SEQ ID NO: 1734144 - DNA, 15 bp, Homo sapiens
tttgagtttatctta

SEQ ID NO: 1734145 - DNA, 15 bp, Homo sapiens
ttgagtttatcttaa

SEQ ID NO: 1734146 - DNA, 15 bp, Homo sapiens
tgagtttatcttaaa

SEQ ID NO: 1734147 - DNA, 15 bp, Homo sapiens
gagtttatcttaaag

SEQ ID NO: 1734148 - DNA, 15 bp, Homo sapiens
agtttatcttaaagg

SEQ ID NO: 1734149 - DNA, 15 bp, Homo sapiens
gtttatcttaaaggt

SEQ ID NO: 1734150 - DNA, 15 bp, Homo sapiens
tttatcttaaaggta

SEQ ID NO: 1734151 - DNA, 15 bp, Homo sapiens
ttatcttaaaggtat

SEQ ID NO: 1734152 - DNA, 15 bp, Homo sapiens
tatcttaaaggtatt

SEQ ID NO: 1734153 - DNA, 15 bp, Homo sapiens
atcttaaaggtattt

SEQ ID NO: 1734154 - DNA, 15 bp, Homo sapiens
tcttaaaggtattta

SEQ ID NO: 1734155 - DNA, 15 bp, Homo sapiens
cttaaaggtatttag

SEQ ID NO: 1734156 - DNA, 15 bp, Homo sapiens
ttaaaggtatttagg

SEQ ID NO: 1734157 - DNA, 15 bp, Homo sapiens
taaaggtatttaggt

SEQ ID NO: 1734158 - DNA, 15 bp, Homo sapiens
aaaggtatttaggta

SEQ ID NO: 1734159 - DNA, 15 bp, Homo sapiens
aaggtatttaggtaa

SEQ ID NO: 1734160 - DNA, 15 bp, Homo sapiens
aggtatttaggtaag

SEQ ID NO: 1734161 - DNA, 15 bp, Homo sapiens
ggtatttaggtaaga

SEQ ID NO: 1734162 - DNA, 15 bp, Homo sapiens
gtatttaggtaagat

SEQ ID NO: 1734163 - DNA, 15 bp, Homo sapiens
tatttaggtaagatt

SEQ ID NO: 1734164 - DNA, 15 bp, Homo sapiens
atttaggtaagattt

SEQ ID NO: 1734165 - DNA, 15 bp, Homo sapiens
tttaggtaagattta

SEQ ID NO: 1734166 - DNA, 15 bp, Homo sapiens
ttaggtaagatttat

SEQ ID NO: 1734167 - DNA, 15 bp, Homo sapiens
taggtaagatttatt

SEQ ID NO: 1734168 - DNA, 15 bp, Homo sapiens
aggtaagatttatta

SEQ ID NO: 1734169 - DNA, 15 bp, Homo sapiens
ggtaagatttattaa

SEQ ID NO: 1734170 - DNA, 15 bp, Homo sapiens
gtaagatttattaaa

SEQ ID NO: 1734171 - DNA, 15 bp, Homo sapiens
taagatttattaaag

SEQ ID NO: 1734172 - DNA, 15 bp, Homo sapiens
aagatttattaaagc

SEQ ID NO: 1734173 - DNA, 15 bp, Homo sapiens
agatttattaaagcc

SEQ ID NO: 1734174 - DNA, 15 bp, Homo sapiens
gatttattaaagcct

SEQ ID NO: 1734175 - DNA, 15 bp, Homo sapiens
atttattaaagccta

SEQ ID NO: 1734176 - DNA, 15 bp, Homo sapiens
tttattaaagcctaa

SEQ ID NO: 1734177 - DNA, 15 bp, Homo sapiens
ttattaaagcctaag

SEQ ID NO: 1734178 - DNA, 15 bp, Homo sapiens
tattaaagcctaaga

SEQ ID NO: 1734179 - DNA, 15 bp, Homo sapiens
attaaagcctaagat

SEQ ID NO: 1734180 - DNA, 15 bp, Homo sapiens
ttaaagcctaagatt

SEQ ID NO: 1734181 - DNA, 15 bp, Homo sapiens
taaagcctaagattg

SEQ ID NO: 1734182 - DNA, 15 bp, Homo sapiens
aaagcctaagattgt

SEQ ID NO: 1734183 - DNA, 15 bp, Homo sapiens
aagcctaagattgtt

SEQ ID NO: 1734184 - DNA, 15 bp, Homo sapiens
agcctaagattgttt

SEQ ID NO: 1734185 - DNA, 15 bp, Homo sapiens
gcctaagattgtttt

SEQ ID NO: 1734186 - DNA, 15 bp, Homo sapiens
cctaagattgtttta

SEQ ID NO: 1734187 - DNA, 15 bp, Homo sapiens
ctaagattgttttaa

SEQ ID NO: 1734188 - DNA, 15 bp, Homo sapiens
taagattgttttaac

SEQ ID NO: 1734189 - DNA, 15 bp, Homo sapiens
aagattgttttaact

SEQ ID NO: 1734190 - DNA, 15 bp, Homo sapiens
agattgttttaacta

SEQ ID NO: 1734191 - DNA, 15 bp, Homo sapiens
gattgttttaactag

SEQ ID NO: 1734192 - DNA, 15 bp, Homo sapiens
attgttttaactaga

SEQ ID NO: 1734193 - DNA, 15 bp, Homo sapiens
ttgttttaactagag

SEQ ID NO: 1734194 - DNA, 15 bp, Homo sapiens
tgttttaactagagg

SEQ ID NO: 1734195 - DNA, 15 bp, Homo sapiens
gttttaactagagga

SEQ ID NO: 1734196 - DNA, 15 bp, Homo sapiens
ttttaactagaggat

SEQ ID NO: 1734197 - DNA, 15 bp, Homo sapiens
tttaactagaggata

SEQ ID NO: 1734198 - DNA, 15 bp, Homo sapiens
ttaactagaggatat

SEQ ID NO: 1734199 - DNA, 15 bp, Homo sapiens
taactagaggatatt

SEQ ID NO: 1734200 - DNA, 15 bp, Homo sapiens
aactagaggatatta

SEQ ID NO: 1734201 - DNA, 15 bp, Homo sapiens
actagaggatattat

SEQ ID NO: 1734202 - DNA, 15 bp, Homo sapiens
ctagaggatattata

SEQ ID NO: 1734203 - DNA, 15 bp, Homo sapiens
tagaggatattataa

SEQ ID NO: 1734204 - DNA, 15 bp, Homo sapiens
agaggatattataac

SEQ ID NO: 1734205 - DNA, 15 bp, Homo sapiens
gaggatattataact

SEQ ID NO: 1734206 - DNA, 15 bp, Homo sapiens
aggatattataacta

SEQ ID NO: 1734207 - DNA, 15 bp, Homo sapiens
ggatattataactaa

SEQ ID NO: 1734208 - DNA, 15 bp, Homo sapiens
gatattataactaaa

SEQ ID NO: 1734209 - DNA, 15 bp, Homo sapiens
atattataactaaat

SEQ ID NO: 1734210 - DNA, 15 bp, Homo sapiens
tattataactaaatg

SEQ ID NO: 1734211 - DNA, 15 bp, Homo sapiens
attataactaaatgc

SEQ ID NO: 1734212 - DNA, 15 bp, Homo sapiens
ttataactaaatgct

SEQ ID NO: 1734213 - DNA, 15 bp, Homo sapiens
tataactaaatgctt

SEQ ID NO: 1734214 - DNA, 15 bp, Homo sapiens
ataactaaatgcttt

SEQ ID NO: 1734215 - DNA, 15 bp, Homo sapiens
taactaaatgctttt

SEQ ID NO: 1734216 - DNA, 15 bp, Homo sapiens
aactaaatgcttttt

SEQ ID NO: 1734217 - DNA, 15 bp, Homo sapiens
actaaatgctttttt

SEQ ID NO: 1734218 - DNA, 15 bp, Homo sapiens
ctaaatgcttttttt

SEQ ID NO: 1734219 - DNA, 15 bp, Homo sapiens
taaatgctttttttc

SEQ ID NO: 1734220 - DNA, 15 bp, Homo sapiens
aaatgctttttttca

SEQ ID NO: 1734221 - DNA, 15 bp, Homo sapiens
aatgctttttttcag

SEQ ID NO: 1734222 - DNA, 15 bp, Homo sapiens
atgctttttttcaga

SEQ ID NO: 1734223 - DNA, 15 bp, Homo sapiens
tgctttttttcagat

SEQ ID NO: 1734224 - DNA, 15 bp, Homo sapiens
gctttttttcagatt

SEQ ID NO: 1734225 - DNA, 15 bp, Homo sapiens
ctttttttcagatta

SEQ ID NO: 1734226 - DNA, 15 bp, Homo sapiens
tttttttcagattat

SEQ ID NO: 1734227 - DNA, 15 bp, Homo sapiens
ttttttcagattata

SEQ ID NO: 1734228 - DNA, 15 bp, Homo sapiens
tttttcagattatat

SEQ ID NO: 1734229 - DNA, 15 bp, Homo sapiens
ttttcagattatata

SEQ ID NO: 1734230 - DNA, 15 bp, Homo sapiens
tttcagattatatat

SEQ ID NO: 1734231 - DNA, 15 bp, Homo sapiens
ttcagattatatatt

SEQ ID NO: 1734232 - DNA, 15 bp, Homo sapiens
tcagattatatattg

SEQ ID NO: 1734233 - DNA, 15 bp, Homo sapiens
cagattatatattga

SEQ ID NO: 1734234 - DNA, 15 bp, Homo sapiens
agattatatattgat

SEQ ID NO: 1734235 - DNA, 15 bp, Homo sapiens
gattatatattgatt

SEQ ID NO: 1734236 - DNA, 15 bp, Homo sapiens
attatatattgattt

SEQ ID NO: 1734237 - DNA, 15 bp, Homo sapiens
ttatatattgatttg

SEQ ID NO: 1734238 - DNA, 15 bp, Homo sapiens
tatatattgatttga

SEQ ID NO: 1734239 - DNA, 15 bp, Homo sapiens
atatattgatttgaa

SEQ ID NO: 1734240 - DNA, 15 bp, Homo sapiens
tatattgatttgaac

SEQ ID NO: 1734241 - DNA, 15 bp, Homo sapiens
atattgatttgaaca

SEQ ID NO: 1734242 - DNA, 15 bp, Homo sapiens
tattgatttgaacat

SEQ ID NO: 1734243 - DNA, 15 bp, Homo sapiens
attgatttgaacatg

SEQ ID NO: 1734244 - DNA, 15 bp, Homo sapiens
ttgatttgaacatgc

SEQ ID NO: 1734245 - DNA, 15 bp, Homo sapiens
tgatttgaacatgct

SEQ ID NO: 1734246 - DNA, 15 bp, Homo sapiens
gatttgaacatgcta

SEQ ID NO: 1734247 - DNA, 15 bp, Homo sapiens
atttgaacatgctac

SEQ ID NO: 1734248 - DNA, 15 bp, Homo sapiens
tttgaacatgctaca

SEQ ID NO: 1734249 - DNA, 15 bp, Homo sapiens
ttgaacatgctacaa

SEQ ID NO: 1734250 - DNA, 15 bp, Homo sapiens
tgaacatgctacaat

SEQ ID NO: 1734251 - DNA, 15 bp, Homo sapiens
gaacatgctacaata

SEQ ID NO: 1734252 - DNA, 15 bp, Homo sapiens
aacatgctacaatac

SEQ ID NO: 1734253 - DNA, 15 bp, Homo sapiens
acatgctacaatact

SEQ ID NO: 1734254 - DNA, 15 bp, Homo sapiens
catgctacaatactt

SEQ ID NO: 1734255 - DNA, 15 bp, Homo sapiens
atgctacaatacttg

SEQ ID NO: 1734256 - DNA, 15 bp, Homo sapiens
tgctacaatacttga

SEQ ID NO: 1734257 - DNA, 15 bp, Homo sapiens
gctacaatacttgaa

SEQ ID NO: 1734258 - DNA, 15 bp, Homo sapiens
ctacaatacttgaac

SEQ ID NO: 1734259 - DNA, 15 bp, Homo sapiens
tacaatacttgaacc

SEQ ID NO: 1734260 - DNA, 15 bp, Homo sapiens
acaatacttgaacca

SEQ ID NO: 1734261 - DNA, 15 bp, Homo sapiens
caatacttgaaccag

SEQ ID NO: 1734262 - DNA, 15 bp, Homo sapiens
aatacttgaaccagt

SEQ ID NO: 1734263 - DNA, 15 bp, Homo sapiens
atacttgaaccagtt

SEQ ID NO: 1734264 - DNA, 15 bp, Homo sapiens
tacttgaaccagtta

SEQ ID NO: 1734265 - DNA, 15 bp, Homo sapiens
acttgaaccagttaa

SEQ ID NO: 1734266 - DNA, 15 bp, Homo sapiens
cttgaaccagttaat

SEQ ID NO: 1734267 - DNA, 15 bp, Homo sapiens
ttgaaccagttaatt

SEQ ID NO: 1734268 - DNA, 15 bp, Homo sapiens
tgaaccagttaatta

SEQ ID NO: 1734269 - DNA, 15 bp, Homo sapiens
gaaccagttaattac

SEQ ID NO: 1734270 - DNA, 15 bp, Homo sapiens
aaccagttaattact

SEQ ID NO: 1734271 - DNA, 15 bp, Homo sapiens
accagttaattactt

SEQ ID NO: 1734272 - DNA, 15 bp, Homo sapiens
ccagttaattactta

SEQ ID NO: 1734273 - DNA, 15 bp, Homo sapiens
cagttaattacttaa

SEQ ID NO: 1734274 - DNA, 15 bp, Homo sapiens
agttaattacttaat

SEQ ID NO: 1734275 - DNA, 15 bp, Homo sapiens
gttaattacttaata

SEQ ID NO: 1734276 - DNA, 15 bp, Homo sapiens
ttaattacttaatag

SEQ ID NO: 1734277 - DNA, 15 bp, Homo sapiens
taattacttaatagg

SEQ ID NO: 1734278 - DNA, 15 bp, Homo sapiens
aattacttaataggt

SEQ ID NO: 1734279 - DNA, 15 bp, Homo sapiens
attacttaataggtg

SEQ ID NO: 1734280 - DNA, 15 bp, Homo sapiens
ttacttaataggtgt

SEQ ID NO: 1734281 - DNA, 15 bp, Homo sapiens
tacttaataggtgtt

SEQ ID NO: 1734282 - DNA, 15 bp, Homo sapiens
acttaataggtgttt

SEQ ID NO: 1734283 - DNA, 15 bp, Homo sapiens
cttaataggtgtttg

SEQ ID NO: 1734284 - DNA, 15 bp, Homo sapiens
ttaataggtgtttgt

SEQ ID NO: 1734285 - DNA, 15 bp, Homo sapiens
taataggtgtttgtt

SEQ ID NO: 1734286 - DNA, 15 bp, Homo sapiens
aataggtgtttgttg

SEQ ID NO: 1734287 - DNA, 15 bp, Homo sapiens
ataggtgtttgttgt

SEQ ID NO: 1734288 - DNA, 15 bp, Homo sapiens
taggtgtttgttgtt

SEQ ID NO: 1734289 - DNA, 15 bp, Homo sapiens
aggtgtttgttgttg

SEQ ID NO: 1734290 - DNA, 15 bp, Homo sapiens
ggtgtttgttgttga

SEQ ID NO: 1734291 - DNA, 15 bp, Homo sapiens
gtgtttgttgttgag

SEQ ID NO: 1734292 - DNA, 15 bp, Homo sapiens
tgtttgttgttgagt

SEQ ID NO: 1734293 - DNA, 15 bp, Homo sapiens
gtttgttgttgagtt

SEQ ID NO: 1734294 - DNA, 15 bp, Homo sapiens
tttgttgttgagttt

SEQ ID NO: 1734295 - DNA, 15 bp, Homo sapiens
ttgttgttgagttta

SEQ ID NO: 1734296 - DNA, 15 bp, Homo sapiens
tgttgttgagtttat

SEQ ID NO: 1734297 - DNA, 15 bp, Homo sapiens
gttgttgagtttata

SEQ ID NO: 1734298 - DNA, 15 bp, Homo sapiens
ttgttgagtttataa

SEQ ID NO: 1734299 - DNA, 15 bp, Homo sapiens
tgttgagtttataag

SEQ ID NO: 1734300 - DNA, 15 bp, Homo sapiens
gttgagtttataagc

SEQ ID NO: 1734301 - DNA, 15 bp, Homo sapiens
ttgagtttataagcc

SEQ ID NO: 1734302 - DNA, 15 bp, Homo sapiens
tgagtttataagcct

SEQ ID NO: 1734303 - DNA, 15 bp, Homo sapiens
gagtttataagcctc

SEQ ID NO: 1734304 - DNA, 15 bp, Homo sapiens
agtttataagcctca

SEQ ID NO: 1734305 - DNA, 15 bp, Homo sapiens
gtttataagcctcat

SEQ ID NO: 1734306 - DNA, 15 bp, Homo sapiens
tttataagcctcata

SEQ ID NO: 1734307 - DNA, 15 bp, Homo sapiens
ttataagcctcataa

SEQ ID NO: 1734308 - DNA, 15 bp, Homo sapiens
tataagcctcataag

SEQ ID NO: 1734309 - DNA, 15 bp, Homo sapiens
ataagcctcataaga

SEQ ID NO: 1734310 - DNA, 15 bp, Homo sapiens
taagcctcataagaa

SEQ ID NO: 1734311 - DNA, 15 bp, Homo sapiens
aagcctcataagaag

SEQ ID NO: 1734312 - DNA, 15 bp, Homo sapiens
agcctcataagaaga

SEQ ID NO: 1734313 - DNA, 15 bp, Homo sapiens
gcctcataagaagag

SEQ ID NO: 1734314 - DNA, 15 bp, Homo sapiens
cctcataagaagagt

SEQ ID NO: 1734315 - DNA, 15 bp, Homo sapiens
ctcataagaagagtt

SEQ ID NO: 1734316 - DNA, 15 bp, Homo sapiens
tcataagaagagttt

SEQ ID NO: 1734317 - DNA, 15 bp, Homo sapiens
cataagaagagttta

SEQ ID NO: 1734318 - DNA, 15 bp, Homo sapiens
ataagaagagtttat

SEQ ID NO: 1734319 - DNA, 15 bp, Homo sapiens
taagaagagtttatt

SEQ ID NO: 1734320 - DNA, 15 bp, Homo sapiens
aagaagagtttatta

SEQ ID NO: 1734321 - DNA, 15 bp, Homo sapiens
agaagagtttattaa

SEQ ID NO: 1734322 - DNA, 15 bp, Homo sapiens
gaagagtttattaat

SEQ ID NO: 1734323 - DNA, 15 bp, Homo sapiens
aagagtttattaatg

SEQ ID NO: 1734324 - DNA, 15 bp, Homo sapiens
agagtttattaatgt

SEQ ID NO: 1734325 - DNA, 15 bp, Homo sapiens
gagtttattaatgtg

SEQ ID NO: 1734326 - DNA, 15 bp, Homo sapiens
agtttattaatgtgt

SEQ ID NO: 1734327 - DNA, 15 bp, Homo sapiens
gtttattaatgtgtt

SEQ ID NO: 1734328 - DNA, 15 bp, Homo sapiens
tttattaatgtgttt

SEQ ID NO: 1734329 - DNA, 15 bp, Homo sapiens
ttattaatgtgtttt

SEQ ID NO: 1734330 - DNA, 15 bp, Homo sapiens
tattaatgtgttttc

SEQ ID NO: 1734331 - DNA, 15 bp, Homo sapiens
attaatgtgttttca

SEQ ID NO: 1734332 - DNA, 15 bp, Homo sapiens
ttaatgtgttttcaa

SEQ ID NO: 1734333 - DNA, 15 bp, Homo sapiens
taatgtgttttcaat

SEQ ID NO: 1734334 - DNA, 15 bp, Homo sapiens
aatgtgttttcaata

SEQ ID NO: 1734335 - DNA, 15 bp, Homo sapiens
atgtgttttcaataa

SEQ ID NO: 1734336 - DNA, 15 bp, Homo sapiens
tgtgttttcaataat

SEQ ID NO: 1734337 - DNA, 15 bp, Homo sapiens
gtgttttcaataatg

SEQ ID NO: 1734338 - DNA, 15 bp, Homo sapiens
tgttttcaataatgt

SEQ ID NO: 1734339 - DNA, 15 bp, Homo sapiens
gttttcaataatgta

SEQ ID NO: 1734340 - DNA, 15 bp, Homo sapiens
ttttcaataatgtat

SEQ ID NO: 1734341 - DNA, 15 bp, Homo sapiens
tttcaataatgtatg

SEQ ID NO: 1734342 - DNA, 15 bp, Homo sapiens
ttcaataatgtatga

SEQ ID NO: 1734343 - DNA, 15 bp, Homo sapiens
tcaataatgtatgaa

SEQ ID NO: 1734344 - DNA, 15 bp, Homo sapiens
caataatgtatgaac

SEQ ID NO: 1734345 - DNA, 15 bp, Homo sapiens
aataatgtatgaact

SEQ ID NO: 1734346 - DNA, 15 bp, Homo sapiens
ataatgtatgaactt

SEQ ID NO: 1734347 - DNA, 15 bp, Homo sapiens
taatgtatgaacttt

SEQ ID NO: 1734348 - DNA, 15 bp, Homo sapiens
aatgtatgaacttta

SEQ ID NO: 1734349 - DNA, 15 bp, Homo sapiens
atgtatgaactttat

SEQ ID NO: 1734350 - DNA, 15 bp, Homo sapiens
tgtatgaactttatc

SEQ ID NO: 1734351 - DNA, 15 bp, Homo sapiens
gtatgaactttatct

SEQ ID NO: 1734352 - DNA, 15 bp, Homo sapiens
tatgaactttatctt

SEQ ID NO: 1734353 - DNA, 15 bp, Homo sapiens
atgaactttatcttc

SEQ ID NO: 1734354 - DNA, 15 bp, Homo sapiens
tgaactttatcttca

SEQ ID NO: 1734355 - DNA, 15 bp, Homo sapiens
gaactttatcttcag

SEQ ID NO: 1734356 - DNA, 15 bp, Homo sapiens
aactttatcttcaga

SEQ ID NO: 1734357 - DNA, 15 bp, Homo sapiens
actttatcttcagaa

SEQ ID NO: 1734358 - DNA, 15 bp, Homo sapiens
ctttatcttcagaaa

SEQ ID NO: 1734359 - DNA, 15 bp, Homo sapiens
tttatcttcagaaag

SEQ ID NO: 1734360 - DNA, 15 bp, Homo sapiens
ttatcttcagaaagt

SEQ ID NO: 1734361 - DNA, 15 bp, Homo sapiens
tatcttcagaaagta

SEQ ID NO: 1734362 - DNA, 15 bp, Homo sapiens
atcttcagaaagtat

SEQ ID NO: 1734363 - DNA, 15 bp, Homo sapiens
tcttcagaaagtatc

SEQ ID NO: 1734364 - DNA, 15 bp, Homo sapiens
cttcagaaagtatcc

SEQ ID NO: 1734365 - DNA, 15 bp, Homo sapiens
ttcagaaagtatcca

SEQ ID NO: 1734366 - DNA, 15 bp, Homo sapiens
tcagaaagtatccag

SEQ ID NO: 1734367 - DNA, 15 bp, Homo sapiens
cagaaagtatccagg

SEQ ID NO: 1734368 - DNA, 15 bp, Homo sapiens
agaaagtatccagga

SEQ ID NO: 1734369 - DNA, 15 bp, Homo sapiens
gaaagtatccaggac

SEQ ID NO: 1734370 - DNA, 15 bp, Homo sapiens
aaagtatccaggact

SEQ ID NO: 1734371 - DNA, 15 bp, Homo sapiens
aagtatccaggactt

SEQ ID NO: 1734372 - DNA, 15 bp, Homo sapiens
agtatccaggacttc

SEQ ID NO: 1734373 - DNA, 15 bp, Homo sapiens
gtatccaggacttcc

SEQ ID NO: 1734374 - DNA, 15 bp, Homo sapiens
tatccaggacttcca

SEQ ID NO: 1734375 - DNA, 15 bp, Homo sapiens
atccaggacttccag

SEQ ID NO: 1734376 - DNA, 15 bp, Homo sapiens
tccaggacttccagt

SEQ ID NO: 1734377 - DNA, 15 bp, Homo sapiens
ccaggacttccagtc

SEQ ID NO: 1734378 - DNA, 15 bp, Homo sapiens
caggacttccagtca

SEQ ID NO: 1734379 - DNA, 15 bp, Homo sapiens
aggacttccagtcat

SEQ ID NO: 1734380 - DNA, 15 bp, Homo sapiens
ggacttccagtcatt

SEQ ID NO: 1734381 - DNA, 15 bp, Homo sapiens
gacttccagtcattt

SEQ ID NO: 1734382 - DNA, 15 bp, Homo sapiens
acttccagtcatttt

SEQ ID NO: 1734383 - DNA, 15 bp, Homo sapiens
cttccagtcattttc

SEQ ID NO: 1734384 - DNA, 15 bp, Homo sapiens
ttccagtcattttct

SEQ ID NO: 1734385 - DNA, 15 bp, Homo sapiens
tccagtcattttctt

SEQ ID NO: 1734386 - DNA, 15 bp, Homo sapiens
ccagtcattttcttt

SEQ ID NO: 1734387 - DNA, 15 bp, Homo sapiens
cagtcattttctttg

SEQ ID NO: 1734388 - DNA, 15 bp, Homo sapiens
agtcattttctttgc

SEQ ID NO: 1734389 - DNA, 15 bp, Homo sapiens
gtcattttctttgca

SEQ ID NO: 1734390 - DNA, 15 bp, Homo sapiens
tcattttctttgcaa

SEQ ID NO: 1734391 - DNA, 15 bp, Homo sapiens
cattttctttgcaac

SEQ ID NO: 1734392 - DNA, 15 bp, Homo sapiens
attttctttgcaaca

SEQ ID NO: 1734393 - DNA, 15 bp, Homo sapiens
ttttctttgcaacat

SEQ ID NO: 1734394 - DNA, 15 bp, Homo sapiens
tttctttgcaacata

SEQ ID NO: 1734395 - DNA, 15 bp, Homo sapiens
ttctttgcaacatat

SEQ ID NO: 1734396 - DNA, 15 bp, Homo sapiens
tctttgcaacatatt

SEQ ID NO: 1734397 - DNA, 15 bp, Homo sapiens
ctttgcaacatattt

SEQ ID NO: 1734398 - DNA, 15 bp, Homo sapiens
tttgcaacatattta

SEQ ID NO: 1734399 - DNA, 15 bp, Homo sapiens
ttgcaacatatttac

SEQ ID NO: 1734400 - DNA, 15 bp, Homo sapiens
tgcaacatatttaca

SEQ ID NO: 1734401 - DNA, 15 bp, Homo sapiens
gcaacatatttacaa

SEQ ID NO: 1734402 - DNA, 15 bp, Homo sapiens
caacatatttacaaa

SEQ ID NO: 1734403 - DNA, 15 bp, Homo sapiens
aacatatttacaaaa

SEQ ID NO: 1734404 - DNA, 15 bp, Homo sapiens
acatatttacaaaaa

SEQ ID NO: 1734405 - DNA, 15 bp, Homo sapiens
catatttacaaaaat

SEQ ID NO: 1734406 - DNA, 15 bp, Homo sapiens
atatttacaaaaatg

SEQ ID NO: 1734407 - DNA, 15 bp, Homo sapiens
tatttacaaaaatgc

SEQ ID NO: 1734408 - DNA, 15 bp, Homo sapiens
atttacaaaaatgca

SEQ ID NO: 1734409 - DNA, 15 bp, Homo sapiens
tttacaaaaatgcaa

SEQ ID NO: 1734410 - DNA, 15 bp, Homo sapiens
ttacaaaaatgcaac

SEQ ID NO: 1734411 - DNA, 15 bp, Homo sapiens
tacaaaaatgcaaca

SEQ ID NO: 1734412 - DNA, 15 bp, Homo sapiens
acaaaaatgcaacag

SEQ ID NO: 1734413 - DNA, 15 bp, Homo sapiens
caaaaatgcaacagt

SEQ ID NO: 1734414 - DNA, 15 bp, Homo sapiens
aaaaatgcaacagta

SEQ ID NO: 1734415 - DNA, 15 bp, Homo sapiens
aaaatgcaacagtat

SEQ ID NO: 1734416 - DNA, 15 bp, Homo sapiens
aaatgcaacagtatg

SEQ ID NO: 1734417 - DNA, 15 bp, Homo sapiens
aatgcaacagtatgt

SEQ ID NO: 1734418 - DNA, 15 bp, Homo sapiens
atgcaacagtatgta

SEQ ID NO: 1734419 - DNA, 15 bp, Homo sapiens
tgcaacagtatgtat

SEQ ID NO: 1734420 - DNA, 15 bp, Homo sapiens
gcaacagtatgtatt

SEQ ID NO: 1734421 - DNA, 15 bp, Homo sapiens
caacagtatgtattt

SEQ ID NO: 1734422 - DNA, 15 bp, Homo sapiens
aacagtatgtatttt

SEQ ID NO: 1734423 - DNA, 15 bp, Homo sapiens
acagtatgtattttt

SEQ ID NO: 1734424 - DNA, 15 bp, Homo sapiens
cagtatgtattttta

SEQ ID NO: 1734425 - DNA, 15 bp, Homo sapiens
agtatgtatttttac

SEQ ID NO: 1734426 - DNA, 15 bp, Homo sapiens
gtatgtatttttacc

SEQ ID NO: 1734427 - DNA, 15 bp, Homo sapiens
tatgtatttttacca

SEQ ID NO: 1734428 - DNA, 15 bp, Homo sapiens
atgtatttttaccaa

SEQ ID NO: 1734429 - DNA, 15 bp, Homo sapiens
tgtatttttaccaaa

SEQ ID NO: 1734430 - DNA, 15 bp, Homo sapiens
gtatttttaccaaat

SEQ ID NO: 1734431 - DNA, 15 bp, Homo sapiens
tatttttaccaaata

SEQ ID NO: 1734432 - DNA, 15 bp, Homo sapiens
atttttaccaaatag

SEQ ID NO: 1734433 - DNA, 15 bp, Homo sapiens
tttttaccaaatagg

SEQ ID NO: 1734434 - DNA, 15 bp, Homo sapiens
ttttaccaaataggt

SEQ ID NO: 1734435 - DNA, 15 bp, Homo sapiens
tttaccaaataggta

SEQ ID NO: 1734436 - DNA, 15 bp, Homo sapiens
ttaccaaataggtaa

SEQ ID NO: 1734437 - DNA, 15 bp, Homo sapiens
taccaaataggtaat

SEQ ID NO: 1734438 - DNA, 15 bp, Homo sapiens
accaaataggtaatt

SEQ ID NO: 1734439 - DNA, 15 bp, Homo sapiens
ccaaataggtaatta

SEQ ID NO: 1734440 - DNA, 15 bp, Homo sapiens
caaataggtaattat

SEQ ID NO: 1734441 - DNA, 15 bp, Homo sapiens
aaataggtaattatg

SEQ ID NO: 1734442 - DNA, 15 bp, Homo sapiens
aataggtaattatgt

SEQ ID NO: 1734443 - DNA, 15 bp, Homo sapiens
ataggtaattatgtt

SEQ ID NO: 1734444 - DNA, 15 bp, Homo sapiens
taggtaattatgttt

SEQ ID NO: 1734445 - DNA, 15 bp, Homo sapiens
aggtaattatgtttc

SEQ ID NO: 1734446 - DNA, 15 bp, Homo sapiens
ggtaattatgtttct

SEQ ID NO: 1734447 - DNA, 15 bp, Homo sapiens
gtaattatgtttctc

SEQ ID NO: 1734448 - DNA, 15 bp, Homo sapiens
taattatgtttctcc

SEQ ID NO: 1734449 - DNA, 15 bp, Homo sapiens
aattatgtttctcct

SEQ ID NO: 1734450 - DNA, 15 bp, Homo sapiens
attatgtttctcctt

SEQ ID NO: 1734451 - DNA, 15 bp, Homo sapiens
ttatgtttctccttg

SEQ ID NO: 1734452 - DNA, 15 bp, Homo sapiens
tatgtttctccttga

SEQ ID NO: 1734453 - DNA, 15 bp, Homo sapiens
atgtttctccttgaa

SEQ ID NO: 1734454 - DNA, 15 bp, Homo sapiens
tgtttctccttgaac

SEQ ID NO: 1734455 - DNA, 15 bp, Homo sapiens
gtttctccttgaaca

SEQ ID NO: 1734456 - DNA, 15 bp, Homo sapiens
tttctccttgaacaa

SEQ ID NO: 1734457 - DNA, 15 bp, Homo sapiens
ttctccttgaacaaa

SEQ ID NO: 1734458 - DNA, 15 bp, Homo sapiens
tctccttgaacaaag

SEQ ID NO: 1734459 - DNA, 15 bp, Homo sapiens
ctccttgaacaaaga

SEQ ID NO: 1734460 - DNA, 15 bp, Homo sapiens
tccttgaacaaagac

SEQ ID NO: 1734461 - DNA, 15 bp, Homo sapiens
ccttgaacaaagaca

SEQ ID NO: 1734462 - DNA, 15 bp, Homo sapiens
cttgaacaaagacat

SEQ ID NO: 1734463 - DNA, 15 bp, Homo sapiens
ttgaacaaagacatc

SEQ ID NO: 1734464 - DNA, 15 bp, Homo sapiens
tgaacaaagacatct

SEQ ID NO: 1734465 - DNA, 15 bp, Homo sapiens
gaacaaagacatcta

SEQ ID NO: 1734466 - DNA, 15 bp, Homo sapiens
aacaaagacatctag

SEQ ID NO: 1734467 - DNA, 15 bp, Homo sapiens
acaaagacatctaga

SEQ ID NO: 1734468 - DNA, 15 bp, Homo sapiens
caaagacatctagaa

SEQ ID NO: 1734469 - DNA, 15 bp, Homo sapiens
aaagacatctagaat

SEQ ID NO: 1734470 - DNA, 15 bp, Homo sapiens
aagacatctagaatt

SEQ ID NO: 1734471 - DNA, 15 bp, Homo sapiens
agacatctagaatta

SEQ ID NO: 1734472 - DNA, 15 bp, Homo sapiens
gacatctagaattaa

SEQ ID NO: 1734473 - DNA, 15 bp, Homo sapiens
acatctagaattaaa

SEQ ID NO: 1734474 - DNA, 15 bp, Homo sapiens
catctagaattaaac

SEQ ID NO: 1734475 - DNA, 15 bp, Homo sapiens
atctagaattaaaca

SEQ ID NO: 1734476 - DNA, 15 bp, Homo sapiens
tctagaattaaacat

SEQ ID NO: 1734477 - DNA, 15 bp, Homo sapiens
ctagaattaaacata

SEQ ID NO: 1734478 - DNA, 15 bp, Homo sapiens
tagaattaaacataa

SEQ ID NO: 1734479 - DNA, 15 bp, Homo sapiens
agaattaaacataat

SEQ ID NO: 1734480 - DNA, 15 bp, Homo sapiens
gaattaaacataatt

SEQ ID NO: 1734481 - DNA, 15 bp, Homo sapiens
aattaaacataattg

SEQ ID NO: 1734482 - DNA, 15 bp, Homo sapiens
attaaacataattga

SEQ ID NO: 1734483 - DNA, 15 bp, Homo sapiens
ttaaacataattgat

SEQ ID NO: 1734484 - DNA, 15 bp, Homo sapiens
taaacataattgata

SEQ ID NO: 1734485 - DNA, 15 bp, Homo sapiens
aaacataattgatat

SEQ ID NO: 1734486 - DNA, 15 bp, Homo sapiens
aacataattgatatt

SEQ ID NO: 1734487 - DNA, 15 bp, Homo sapiens
acataattgatattt

SEQ ID NO: 1734488 - DNA, 15 bp, Homo sapiens
cataattgatatttt

SEQ ID NO: 1734489 - DNA, 15 bp, Homo sapiens
ataattgatatttta

SEQ ID NO: 1734490 - DNA, 15 bp, Homo sapiens
taattgatattttat

SEQ ID NO: 1734491 - DNA, 15 bp, Homo sapiens
aattgatattttatt

SEQ ID NO: 1734492 - DNA, 15 bp, Homo sapiens
attgatattttattt

SEQ ID NO: 1734493 - DNA, 15 bp, Homo sapiens
ttgatattttattta

SEQ ID NO: 1734494 - DNA, 15 bp, Homo sapiens
tgatattttatttaa

SEQ ID NO: 1734495 - DNA, 15 bp, Homo sapiens
gatattttatttaaa

SEQ ID NO: 1734496 - DNA, 15 bp, Homo sapiens
atattttatttaaac

SEQ ID NO: 1734497 - DNA, 15 bp, Homo sapiens
tattttatttaaacg

SEQ ID NO: 1734498 - DNA, 15 bp, Homo sapiens
attttatttaaacga

SEQ ID NO: 1734499 - DNA, 15 bp, Homo sapiens
ttttatttaaacgag

SEQ ID NO: 1734500 - DNA, 15 bp, Homo sapiens
tttatttaaacgaga

SEQ ID NO: 1734501 - DNA, 15 bp, Homo sapiens
ttatttaaacgagat

SEQ ID NO: 1734502 - DNA, 15 bp, Homo sapiens
tatttaaacgagata

SEQ ID NO: 1734503 - DNA, 15 bp, Homo sapiens
atttaaacgagatag

SEQ ID NO: 1734504 - DNA, 15 bp, Homo sapiens
tttaaacgagataga

SEQ ID NO: 1734505 - DNA, 15 bp, Homo sapiens
ttaaacgagatagat

SEQ ID NO: 1734506 - DNA, 15 bp, Homo sapiens
taaacgagatagatt

SEQ ID NO: 1734507 - DNA, 15 bp, Homo sapiens
aaacgagatagatta

SEQ ID NO: 1734508 - DNA, 15 bp, Homo sapiens
aacgagatagattaa

SEQ ID NO: 1734509 - DNA, 15 bp, Homo sapiens
acgagatagattaaa

SEQ ID NO: 1734510 - DNA, 15 bp, Homo sapiens
cgagatagattaaat

SEQ ID NO: 1734511 - DNA, 15 bp, Homo sapiens
gagatagattaaatt

SEQ ID NO: 1734512 - DNA, 15 bp, Homo sapiens
agatagattaaattg

SEQ ID NO: 1734513 - DNA, 15 bp, Homo sapiens
gatagattaaattgt

SEQ ID NO: 1734514 - DNA, 15 bp, Homo sapiens
atagattaaattgtt

SEQ ID NO: 1734515 - DNA, 15 bp, Homo sapiens
tagattaaattgttg

SEQ ID NO: 1734516 - DNA, 15 bp, Homo sapiens
agattaaattgttgc

SEQ ID NO: 1734517 - DNA, 15 bp, Homo sapiens
gattaaattgttgca

SEQ ID NO: 1734518 - DNA, 15 bp, Homo sapiens
attaaattgttgcat

SEQ ID NO: 1734519 - DNA, 15 bp, Homo sapiens
ttaaattgttgcatt

SEQ ID NO: 1734520 - DNA, 15 bp, Homo sapiens
taaattgttgcattt

SEQ ID NO: 1734521 - DNA, 15 bp, Homo sapiens
aaattgttgcatttt

SEQ ID NO: 1734522 - DNA, 15 bp, Homo sapiens
aattgttgcattttt

SEQ ID NO: 1734523 - DNA, 15 bp, Homo sapiens
attgttgcatttttg

SEQ ID NO: 1734524 - DNA, 15 bp, Homo sapiens
ttgttgcatttttga

SEQ ID NO: 1734525 - DNA, 15 bp, Homo sapiens
tgttgcatttttgaa

SEQ ID NO: 1734526 - DNA, 15 bp, Homo sapiens
gttgcatttttgaaa

SEQ ID NO: 1734527 - DNA, 15 bp, Homo sapiens
ttgcatttttgaaat

SEQ ID NO: 1734528 - DNA, 15 bp, Homo sapiens
tgcatttttgaaata

SEQ ID NO: 1734529 - DNA, 15 bp, Homo sapiens
gcatttttgaaatac

SEQ ID NO: 1734530 - DNA, 15 bp, Homo sapiens
catttttgaaatact

SEQ ID NO: 1734531 - DNA, 15 bp, Homo sapiens
atttttgaaatactt

SEQ ID NO: 1734532 - DNA, 15 bp, Homo sapiens
tttttgaaatacttt

SEQ ID NO: 1734533 - DNA, 15 bp, Homo sapiens
ttgaaatactttttt

SEQ ID NO: 1734534 - DNA, 15 bp, Homo sapiens
gaaatactttttttg

SEQ ID NO: 1734535 - DNA, 15 bp, Homo sapiens
aaatactttttttgc

SEQ ID NO: 1734536 - DNA, 15 bp, Homo sapiens
aatactttttttgct

SEQ ID NO: 1734537 - DNA, 15 bp, Homo sapiens
atactttttttgcta

SEQ ID NO: 1734538 - DNA, 15 bp, Homo sapiens
tactttttttgctat

SEQ ID NO: 1734539 - DNA, 15 bp, Homo sapiens
actttttttgctata

SEQ ID NO: 1734540 - DNA, 15 bp, Homo sapiens
ctttttttgctatat

SEQ ID NO: 1734541 - DNA, 15 bp, Homo sapiens
tttttttgctatatc

SEQ ID NO: 1734542 - DNA, 15 bp, Homo sapiens
ttttttgctatatct

SEQ ID NO: 1734543 - DNA, 15 bp, Homo sapiens
tttttgctatatcta

SEQ ID NO: 1734544 - DNA, 15 bp, Homo sapiens
ttttgctatatctaa

SEQ ID NO: 1734545 - DNA, 15 bp, Homo sapiens
tttgctatatctaaa

SEQ ID NO: 1734546 - DNA, 15 bp, Homo sapiens
ttgctatatctaaat

SEQ ID NO: 1734547 - DNA, 15 bp, Homo sapiens
tgctatatctaaata

SEQ ID NO: 1734548 - DNA, 15 bp, Homo sapiens
gctatatctaaataa

SEQ ID NO: 1734549 - DNA, 15 bp, Homo sapiens
ctatatctaaataaa

SEQ ID NO: 1734550 - DNA, 15 bp, Homo sapiens
tatatctaaataaaa

SEQ ID NO: 1734551 - DNA, 15 bp, Homo sapiens
atatctaaataaaat

SEQ ID NO: 1734552 - DNA, 15 bp, Homo sapiens
tatctaaataaaatg

SEQ ID NO: 1734553 - DNA, 15 bp, Homo sapiens
atctaaataaaatgt

SEQ ID NO: 1734554 - DNA, 15 bp, Homo sapiens
tctaaataaaatgtg

SEQ ID NO: 1734555 - DNA, 15 bp, Homo sapiens
ctaaataaaatgtgg

SEQ ID NO: 1734556 - DNA, 15 bp, Homo sapiens
taaataaaatgtgga

SEQ ID NO: 1734557 - DNA, 15 bp, Homo sapiens
aaataaaatgtggaa

SEQ ID NO: 1734558 - DNA, 15 bp, Homo sapiens
aataaaatgtggaaa

SEQ ID NO: 1734559 - DNA, 15 bp, Homo sapiens
ataaaatgtggaaac

SEQ ID NO: 1734560 - DNA, 15 bp, Homo sapiens
taaaatgtggaaaca

SEQ ID NO: 1734561 - DNA, 15 bp, Homo sapiens
aaaatgtggaaacaa

SEQ ID NO: 1734562 - DNA, 15 bp, Homo sapiens
aaatgtggaaacaaa

SEQ ID NO: 1734563 - DNA, 15 bp, Homo sapiens
aatgtggaaacaaag

SEQ ID NO: 1734564 - DNA, 15 bp, Homo sapiens
atgtggaaacaaagg

SEQ ID NO: 1734565 - DNA, 15 bp, Homo sapiens
tgtggaaacaaaggc

SEQ ID NO: 1734566 - DNA, 15 bp, Homo sapiens
gtggaaacaaaggcc

SEQ ID NO: 1734567 - DNA, 15 bp, Homo sapiens
tggaaacaaaggcct

SEQ ID NO: 1734568 - DNA, 15 bp, Homo sapiens
ggaaacaaaggcctt

SEQ ID NO: 1734569 - DNA, 15 bp, Homo sapiens
gaaacaaaggccttg

SEQ ID NO: 1734570 - DNA, 15 bp, Homo sapiens
aaacaaaggccttgt

SEQ ID NO: 1734571 - DNA, 15 bp, Homo sapiens
aacaaaggccttgta

SEQ ID NO: 1734572 - DNA, 15 bp, Homo sapiens
acaaaggccttgtat

SEQ ID NO: 1734573 - DNA, 15 bp, Homo sapiens
caaaggccttgtata

SEQ ID NO: 1734574 - DNA, 15 bp, Homo sapiens
aaaggccttgtatat

SEQ ID NO: 1734575 - DNA, 15 bp, Homo sapiens
aaggccttgtatatt

SEQ ID NO: 1734576 - DNA, 15 bp, Homo sapiens
aggccttgtatattt

SEQ ID NO: 1734577 - DNA, 15 bp, Homo sapiens
ggccttgtatatttg

SEQ ID NO: 1734578 - DNA, 15 bp, Homo sapiens
gccttgtatatttgt

SEQ ID NO: 1734579 - DNA, 15 bp, Homo sapiens
ccttgtatatttgta

SEQ ID NO: 1734580 - DNA, 15 bp, Homo sapiens
cttgtatatttgtaa

SEQ ID NO: 1734581 - DNA, 15 bp, Homo sapiens
ttgtatatttgtaaa

SEQ ID NO: 1734582 - DNA, 15 bp, Homo sapiens
tgtatatttgtaaat

SEQ ID NO: 1734583 - DNA, 15 bp, Homo sapiens
gtatatttgtaaata

SEQ ID NO: 1734584 - DNA, 15 bp, Homo sapiens
tatatttgtaaatat

SEQ ID NO: 1734585 - DNA, 15 bp, Homo sapiens
atatttgtaaatata

SEQ ID NO: 1734586 - DNA, 15 bp, Homo sapiens
tatttgtaaatatac

SEQ ID NO: 1734587 - DNA, 15 bp, Homo sapiens
atttgtaaatataca

SEQ ID NO: 1734588 - DNA, 15 bp, Homo sapiens
tttgtaaatatacaa

SEQ ID NO: 1734589 - DNA, 15 bp, Homo sapiens
ttgtaaatatacaaa

SEQ ID NO: 1734590 - DNA, 15 bp, Homo sapiens
tgtaaatatacaaaa

SEQ ID NO: 1734591 - DNA, 15 bp, Homo sapiens
gtaaatatacaaaat

SEQ ID NO: 1734592 - DNA, 15 bp, Homo sapiens
taaatatacaaaata

SEQ ID NO: 1734593 - DNA, 15 bp, Homo sapiens
aaatatacaaaataa

SEQ ID NO: 1734594 - DNA, 15 bp, Homo sapiens
aatatacaaaataat

SEQ ID NO: 1734595 - DNA, 15 bp, Homo sapiens
atatacaaaataata

SEQ ID NO: 1734596 - DNA, 15 bp, Homo sapiens
tatacaaaataatag

SEQ ID NO: 1734597 - DNA, 15 bp, Homo sapiens
atacaaaataataga

SEQ ID NO: 1734598 - DNA, 15 bp, Homo sapiens
tacaaaataatagaa

SEQ ID NO: 1734599 - DNA, 15 bp, Homo sapiens
acaaaataatagaaa

SEQ ID NO: 1734600 - DNA, 15 bp, Homo sapiens
caaaataatagaaat

SEQ ID NO: 1734601 - DNA, 15 bp, Homo sapiens
aaaataatagaaatg

SEQ ID NO: 1734602 - DNA, 15 bp, Homo sapiens
aaataatagaaatga

SEQ ID NO: 1734603 - DNA, 15 bp, Homo sapiens
aataatagaaatgac

SEQ ID NO: 1734604 - DNA, 15 bp, Homo sapiens
ataatagaaatgaca

SEQ ID NO: 1734605 - DNA, 15 bp, Homo sapiens
taatagaaatgacat

SEQ ID NO: 1734606 - DNA, 15 bp, Homo sapiens
aatagaaatgacata

SEQ ID NO: 1734607 - DNA, 15 bp, Homo sapiens
atagaaatgacataa

SEQ ID NO: 1734608 - DNA, 15 bp, Homo sapiens
tagaaatgacataaa

SEQ ID NO: 1734609 - DNA, 15 bp, Homo sapiens
agaaatgacataaat

SEQ ID NO: 1734610 - DNA, 15 bp, Homo sapiens
gaaatgacataaata

SEQ ID NO: 1734611 - DNA, 15 bp, Homo sapiens
aaatgacataaatag

SEQ ID NO: 1734612 - DNA, 15 bp, Homo sapiens
aatgacataaatagt

SEQ ID NO: 1734613 - DNA, 15 bp, Homo sapiens
atgacataaatagtt

SEQ ID NO: 1734614 - DNA, 15 bp, Homo sapiens
tgacataaatagttc

SEQ ID NO: 1734615 - DNA, 15 bp, Homo sapiens
gacataaatagttca

SEQ ID NO: 1734616 - DNA, 15 bp, Homo sapiens
acataaatagttcat

SEQ ID NO: 1734617 - DNA, 15 bp, Homo sapiens
cataaatagttcata

SEQ ID NO: 1734618 - DNA, 15 bp, Homo sapiens
ataaatagttcatag

SEQ ID NO: 1734619 - DNA, 15 bp, Homo sapiens
taaatagttcataga

SEQ ID NO: 1734620 - DNA, 15 bp, Homo sapiens
aaatagttcatagag

SEQ ID NO: 1734621 - DNA, 15 bp, Homo sapiens
aatagttcatagagt

SEQ ID NO: 1734622 - DNA, 15 bp, Homo sapiens
atagttcatagagtc

SEQ ID NO: 1734623 - DNA, 15 bp, Homo sapiens
tagttcatagagtca

SEQ ID NO: 1734624 - DNA, 15 bp, Homo sapiens
agttcatagagtcaa

SEQ ID NO: 1734625 - DNA, 15 bp, Homo sapiens
gttcatagagtcaat

SEQ ID NO: 1734626 - DNA, 15 bp, Homo sapiens
ttcatagagtcaata

SEQ ID NO: 1734627 - DNA, 15 bp, Homo sapiens
tcatagagtcaatac

SEQ ID NO: 1734628 - DNA, 15 bp, Homo sapiens
catagagtcaatacc

SEQ ID NO: 1734629 - DNA, 15 bp, Homo sapiens
atagagtcaatacct

SEQ ID NO: 1734630 - DNA, 15 bp, Homo sapiens
tagagtcaatacctg

SEQ ID NO: 1734631 - DNA, 15 bp, Homo sapiens
agagtcaatacctgc

SEQ ID NO: 1734632 - DNA, 15 bp, Homo sapiens
gagtcaatacctgca

SEQ ID NO: 1734633 - DNA, 15 bp, Homo sapiens
agtcaatacctgcaa

SEQ ID NO: 1734634 - DNA, 15 bp, Homo sapiens
gtcaatacctgcaac

SEQ ID NO: 1734635 - DNA, 15 bp, Homo sapiens
tcaatacctgcaaca

SEQ ID NO: 1734636 - DNA, 15 bp, Homo sapiens
caatacctgcaacac

SEQ ID NO: 1734637 - DNA, 15 bp, Homo sapiens
aatacctgcaacacc

SEQ ID NO: 1734638 - DNA, 15 bp, Homo sapiens
atacctgcaacacca

SEQ ID NO: 1734639 - DNA, 15 bp, Homo sapiens
tacctgcaacaccac

SEQ ID NO: 1734640 - DNA, 15 bp, Homo sapiens
acctgcaacaccaca

SEQ ID NO: 1734641 - DNA, 15 bp, Homo sapiens
cctgcaacaccacag

SEQ ID NO: 1734642 - DNA, 15 bp, Homo sapiens
ctgcaacaccacagg

SEQ ID NO: 1734643 - DNA, 15 bp, Homo sapiens
tgcaacaccacaggc

SEQ ID NO: 1734644 - DNA, 15 bp, Homo sapiens
gcaacaccacaggca

SEQ ID NO: 1734645 - DNA, 15 bp, Homo sapiens
caacaccacaggcac

SEQ ID NO: 1734646 - DNA, 15 bp, Homo sapiens
aacaccacaggcact

SEQ ID NO: 1734647 - DNA, 15 bp, Homo sapiens
acaccacaggcactc

SEQ ID NO: 1734648 - DNA, 15 bp, Homo sapiens
caccacaggcactca

SEQ ID NO: 1734649 - DNA, 15 bp, Homo sapiens
accacaggcactcac

SEQ ID NO: 1734650 - DNA, 15 bp, Homo sapiens
ccacaggcactcact

SEQ ID NO: 1734651 - DNA, 15 bp, Homo sapiens
cacaggcactcactg

SEQ ID NO: 1734652 - DNA, 15 bp, Homo sapiens
acaggcactcactgc

SEQ ID NO: 1734653 - DNA, 15 bp, Homo sapiens
caggcactcactgct

SEQ ID NO: 1734654 - DNA, 15 bp, Homo sapiens
aggcactcactgctt

SEQ ID NO: 1734655 - DNA, 15 bp, Homo sapiens
ggcactcactgcttc

SEQ ID NO: 1734656 - DNA, 15 bp, Homo sapiens
gcactcactgcttct

SEQ ID NO: 1734657 - DNA, 15 bp, Homo sapiens
cactcactgcttctc

SEQ ID NO: 1734658 - DNA, 15 bp, Homo sapiens
actcactgcttctct

SEQ ID NO: 1734659 - DNA, 15 bp, Homo sapiens
ctcactgcttctctc

SEQ ID NO: 1734660 - DNA, 15 bp, Homo sapiens
tcactgcttctctcc

SEQ ID NO: 1734661 - DNA, 15 bp, Homo sapiens
cactgcttctctccc

SEQ ID NO: 1734662 - DNA, 15 bp, Homo sapiens
actgcttctctccct

SEQ ID NO: 1734663 - DNA, 15 bp, Homo sapiens
ctgcttctctccctt

SEQ ID NO: 1734664 - DNA, 15 bp, Homo sapiens
tgcttctctcccttc

SEQ ID NO: 1734665 - DNA, 15 bp, Homo sapiens
gcttctctcccttcc

SEQ ID NO: 1734666 - DNA, 15 bp, Homo sapiens
cttctctcccttcct

SEQ ID NO: 1734667 - DNA, 15 bp, Homo sapiens
ttctctcccttcctt

SEQ ID NO: 1734668 - DNA, 15 bp, Homo sapiens
tctctcccttccttg

SEQ ID NO: 1734669 - DNA, 15 bp, Homo sapiens
ctctcccttccttgt

SEQ ID NO: 1734670 - DNA, 15 bp, Homo sapiens
tctcccttccttgtt

SEQ ID NO: 1734671 - DNA, 15 bp, Homo sapiens
ctcccttccttgttt

SEQ ID NO: 1734672 - DNA, 15 bp, Homo sapiens
tcccttccttgtttt

SEQ ID NO: 1734673 - DNA, 15 bp, Homo sapiens
cccttccttgttttc

SEQ ID NO: 1734674 - DNA, 15 bp, Homo sapiens
ccttccttgttttct

SEQ ID NO: 1734675 - DNA, 15 bp, Homo sapiens
cttccttgttttctt

SEQ ID NO: 1734676 - DNA, 15 bp, Homo sapiens
ttccttgttttcttc

SEQ ID NO: 1734677 - DNA, 15 bp, Homo sapiens
tccttgttttcttcc

SEQ ID NO: 1734678 - DNA, 15 bp, Homo sapiens
ccttgttttcttccc

SEQ ID NO: 1734679 - DNA, 15 bp, Homo sapiens
cttgttttcttccct

SEQ ID NO: 1734680 - DNA, 15 bp, Homo sapiens
ttgttttcttccctt

SEQ ID NO: 1734681 - DNA, 15 bp, Homo sapiens
tgttttcttccctta

SEQ ID NO: 1734682 - DNA, 15 bp, Homo sapiens
gttttcttcccttaa

SEQ ID NO: 1734683 - DNA, 15 bp, Homo sapiens
ttttcttcccttaag

SEQ ID NO: 1734684 - DNA, 15 bp, Homo sapiens
tttcttcccttaagt

SEQ ID NO: 1734685 - DNA, 15 bp, Homo sapiens
ttcttcccttaagtt

SEQ ID NO: 1734686 - DNA, 15 bp, Homo sapiens
tcttcccttaagttt

SEQ ID NO: 1734687 - DNA, 15 bp, Homo sapiens
cttcccttaagtttc

SEQ ID NO: 1734688 - DNA, 15 bp, Homo sapiens
ttcccttaagtttcc

SEQ ID NO: 1734689 - DNA, 15 bp, Homo sapiens
tcccttaagtttccc

SEQ ID NO: 1734690 - DNA, 15 bp, Homo sapiens
cccttaagtttcccc

SEQ ID NO: 1734691 - DNA, 15 bp, Homo sapiens
ccttaagtttcccct

SEQ ID NO: 1734692 - DNA, 15 bp, Homo sapiens
cttaagtttccccta

SEQ ID NO: 1734693 - DNA, 15 bp, Homo sapiens
ttaagtttcccctag

SEQ ID NO: 1734694 - DNA, 15 bp, Homo sapiens
taagtttcccctaga

SEQ ID NO: 1734695 - DNA, 15 bp, Homo sapiens
aagtttcccctagaa

SEQ ID NO: 1734696 - DNA, 15 bp, Homo sapiens
agtttcccctagaaa

SEQ ID NO: 1734697 - DNA, 15 bp, Homo sapiens
gtttcccctagaaaa

SEQ ID NO: 1734698 - DNA, 15 bp, Homo sapiens
tttcccctagaaaaa

SEQ ID NO: 1734699 - DNA, 15 bp, Homo sapiens
ttcccctagaaaaaa

SEQ ID NO: 1734700 - DNA, 15 bp, Homo sapiens
tcccctagaaaaaag

SEQ ID NO: 1734701 - DNA, 15 bp, Homo sapiens
cccctagaaaaaagg

SEQ ID NO: 1734702 - DNA, 15 bp, Homo sapiens
ccctagaaaaaaggc

SEQ ID NO: 1734703 - DNA, 15 bp, Homo sapiens
cctagaaaaaaggct

SEQ ID NO: 1734704 - DNA, 15 bp, Homo sapiens
ctagaaaaaaggctt

SEQ ID NO: 1734705 - DNA, 15 bp, Homo sapiens
tagaaaaaaggcttt

SEQ ID NO: 1734706 - DNA, 15 bp, Homo sapiens
agaaaaaaggctttg

SEQ ID NO: 1734707 - DNA, 15 bp, Homo sapiens
gaaaaaaggctttgt

SEQ ID NO: 1734708 - DNA, 15 bp, Homo sapiens
aaaaaaggctttgtt

SEQ ID NO: 1734709 - DNA, 15 bp, Homo sapiens
aaaaaggctttgttg

SEQ ID NO: 1734710 - DNA, 15 bp, Homo sapiens
aaaaggctttgttgt

SEQ ID NO: 1734711 - DNA, 15 bp, Homo sapiens
aaaggctttgttgta

SEQ ID NO: 1734712 - DNA, 15 bp, Homo sapiens
aaggctttgttgtaa

SEQ ID NO: 1734713 - DNA, 15 bp, Homo sapiens
aggctttgttgtaac

SEQ ID NO: 1734714 - DNA, 15 bp, Homo sapiens
ggctttgttgtaaca

SEQ ID NO: 1734715 - DNA, 15 bp, Homo sapiens
gctttgttgtaacaa

SEQ ID NO: 1734716 - DNA, 15 bp, Homo sapiens
ctttgttgtaacaat

SEQ ID NO: 1734717 - DNA, 15 bp, Homo sapiens
tttgttgtaacaatt

SEQ ID NO: 1734718 - DNA, 15 bp, Homo sapiens
ttgttgtaacaattc

SEQ ID NO: 1734719 - DNA, 15 bp, Homo sapiens
tgttgtaacaattca

SEQ ID NO: 1734720 - DNA, 15 bp, Homo sapiens
gttgtaacaattcag

SEQ ID NO: 1734721 - DNA, 15 bp, Homo sapiens
ttgtaacaattcagt

SEQ ID NO: 1734722 - DNA, 15 bp, Homo sapiens
tgtaacaattcagtt

SEQ ID NO: 1734723 - DNA, 15 bp, Homo sapiens
gtaacaattcagttt

SEQ ID NO: 1734724 - DNA, 15 bp, Homo sapiens
taacaattcagtttt

SEQ ID NO: 1734725 - DNA, 15 bp, Homo sapiens
aacaattcagttttc

SEQ ID NO: 1734726 - DNA, 15 bp, Homo sapiens
acaattcagttttca

SEQ ID NO: 1734727 - DNA, 15 bp, Homo sapiens
caattcagttttcat

SEQ ID NO: 1734728 - DNA, 15 bp, Homo sapiens
aattcagttttcatg

SEQ ID NO: 1734729 - DNA, 15 bp, Homo sapiens
attcagttttcatgg

SEQ ID NO: 1734730 - DNA, 15 bp, Homo sapiens
ttcagttttcatggt

SEQ ID NO: 1734731 - DNA, 15 bp, Homo sapiens
tcagttttcatggta

SEQ ID NO: 1734732 - DNA, 15 bp, Homo sapiens
cagttttcatggtaa

SEQ ID NO: 1734733 - DNA, 15 bp, Homo sapiens
agttttcatggtaat

SEQ ID NO: 1734734 - DNA, 15 bp, Homo sapiens
gttttcatggtaatc

SEQ ID NO: 1734735 - DNA, 15 bp, Homo sapiens
ttttcatggtaatct

SEQ ID NO: 1734736 - DNA, 15 bp, Homo sapiens
tttcatggtaatctc

SEQ ID NO: 1734737 - DNA, 15 bp, Homo sapiens
ttcatggtaatctca

SEQ ID NO: 1734738 - DNA, 15 bp, Homo sapiens
tcatggtaatctcag

SEQ ID NO: 1734739 - DNA, 15 bp, Homo sapiens
catggtaatctcagg

SEQ ID NO: 1734740 - DNA, 15 bp, Homo sapiens
atggtaatctcagga

SEQ ID NO: 1734741 - DNA, 15 bp, Homo sapiens
tggtaatctcaggac

SEQ ID NO: 1734742 - DNA, 15 bp, Homo sapiens
ggtaatctcaggaca

SEQ ID NO: 1734743 - DNA, 15 bp, Homo sapiens
gtaatctcaggacag

SEQ ID NO: 1734744 - DNA, 15 bp, Homo sapiens
taatctcaggacagg

SEQ ID NO: 1734745 - DNA, 15 bp, Homo sapiens
aatctcaggacaggt

SEQ ID NO: 1734746 - DNA, 15 bp, Homo sapiens
atctcaggacaggta

SEQ ID NO: 1734747 - DNA, 15 bp, Homo sapiens
tctcaggacaggtat

SEQ ID NO: 1734748 - DNA, 15 bp, Homo sapiens
ctcaggacaggtatt

SEQ ID NO: 1734749 - DNA, 15 bp, Homo sapiens
tcaggacaggtattg

SEQ ID NO: 1734750 - DNA, 15 bp, Homo sapiens
caggacaggtattgc

SEQ ID NO: 1734751 - DNA, 15 bp, Homo sapiens
aggacaggtattgcc

SEQ ID NO: 1734752 - DNA, 15 bp, Homo sapiens
ggacaggtattgcca

SEQ ID NO: 1734753 - DNA, 15 bp, Homo sapiens
gacaggtattgccat

SEQ ID NO: 1734754 - DNA, 15 bp, Homo sapiens
acaggtattgccata

SEQ ID NO: 1734755 - DNA, 15 bp, Homo sapiens
caggtattgccatat

SEQ ID NO: 1734756 - DNA, 15 bp, Homo sapiens
aggtattgccatata

SEQ ID NO: 1734757 - DNA, 15 bp, Homo sapiens
ggtattgccatatac

SEQ ID NO: 1734758 - DNA, 15 bp, Homo sapiens
gtattgccatatacc

SEQ ID NO: 1734759 - DNA, 15 bp, Homo sapiens
tattgccatatacct

SEQ ID NO: 1734760 - DNA, 15 bp, Homo sapiens
attgccatatacctc

SEQ ID NO: 1734761 - DNA, 15 bp, Homo sapiens
ttgccatatacctca

SEQ ID NO: 1734762 - DNA, 15 bp, Homo sapiens
tgccatatacctcaa

SEQ ID NO: 1734763 - DNA, 15 bp, Homo sapiens
gccatatacctcaaa

SEQ ID NO: 1734764 - DNA, 15 bp, Homo sapiens
ccatatacctcaaaa

SEQ ID NO: 1734765 - DNA, 15 bp, Homo sapiens
catatacctcaaaaa

SEQ ID NO: 1734766 - DNA, 15 bp, Homo sapiens
atatacctcaaaaaa

SEQ ID NO: 1734767 - DNA, 15 bp, Homo sapiens
tatacctcaaaaaaa

SEQ ID NO: 1734768 - DNA, 15 bp, Homo sapiens
atacctcaaaaaaac

SEQ ID NO: 1734769 - DNA, 15 bp, Homo sapiens
tacctcaaaaaaact

SEQ ID NO: 1734770 - DNA, 15 bp, Homo sapiens
acctcaaaaaaactg

SEQ ID NO: 1734771 - DNA, 15 bp, Homo sapiens
cctcaaaaaaactgg

SEQ ID NO: 1734772 - DNA, 15 bp, Homo sapiens
ctcaaaaaaactgga

SEQ ID NO: 1734773 - DNA, 15 bp, Homo sapiens
tcaaaaaaactggaa

SEQ ID NO: 1734774 - DNA, 15 bp, Homo sapiens
caaaaaaactggaac

SEQ ID NO: 1734775 - DNA, 15 bp, Homo sapiens
aaaaaaactggaact

SEQ ID NO: 1734776 - DNA, 15 bp, Homo sapiens
aaaaaactggaactg

SEQ ID NO: 1734777 - DNA, 15 bp, Homo sapiens
aaaaactggaactga

SEQ ID NO: 1734778 - DNA, 15 bp, Homo sapiens
aaaactggaactgag

SEQ ID NO: 1734779 - DNA, 15 bp, Homo sapiens
aaactggaactgaga

SEQ ID NO: 1734780 - DNA, 15 bp, Homo sapiens
aactggaactgagag

SEQ ID NO: 1734781 - DNA, 15 bp, Homo sapiens
actggaactgagagt

SEQ ID NO: 1734782 - DNA, 15 bp, Homo sapiens
ctggaactgagagta

SEQ ID NO: 1734783 - DNA, 15 bp, Homo sapiens
tggaactgagagtag

SEQ ID NO: 1734784 - DNA, 15 bp, Homo sapiens
ggaactgagagtagt

SEQ ID NO: 1734785 - DNA, 15 bp, Homo sapiens
gaactgagagtagtt

SEQ ID NO: 1734786 - DNA, 15 bp, Homo sapiens
aactgagagtagttc

SEQ ID NO: 1734787 - DNA, 15 bp, Homo sapiens
actgagagtagttct

SEQ ID NO: 1734788 - DNA, 15 bp, Homo sapiens
ctgagagtagttctt

SEQ ID NO: 1734789 - DNA, 15 bp, Homo sapiens
tgagagtagttcttt

SEQ ID NO: 1734790 - DNA, 15 bp, Homo sapiens
gagagtagttcttta

SEQ ID NO: 1734791 - DNA, 15 bp, Homo sapiens
agagtagttctttaa

SEQ ID NO: 1734792 - DNA, 15 bp, Homo sapiens
gagtagttctttaat

SEQ ID NO: 1734793 - DNA, 15 bp, Homo sapiens
agtagttctttaata

SEQ ID NO: 1734794 - DNA, 15 bp, Homo sapiens
gtagttctttaataa

SEQ ID NO: 1734795 - DNA, 15 bp, Homo sapiens
tagttctttaataaa

SEQ ID NO: 1734796 - DNA, 15 bp, Homo sapiens
agttctttaataaat

SEQ ID NO: 1734797 - DNA, 15 bp, Homo sapiens
gttctttaataaatg

SEQ ID NO: 1734798 - DNA, 15 bp, Homo sapiens
ttctttaataaatgc

SEQ ID NO: 1734799 - DNA, 15 bp, Homo sapiens
tctttaataaatgct

SEQ ID NO: 1734800 - DNA, 15 bp, Homo sapiens
ctttaataaatgcta

SEQ ID NO: 1734801 - DNA, 15 bp, Homo sapiens
tttaataaatgctat

SEQ ID NO: 1734802 - DNA, 15 bp, Homo sapiens
ttaataaatgctatt

SEQ ID NO: 1734803 - DNA, 15 bp, Homo sapiens
taataaatgctattc

SEQ ID NO: 1734804 - DNA, 15 bp, Homo sapiens
aataaatgctattct

SEQ ID NO: 1734805 - DNA, 15 bp, Homo sapiens
ataaatgctattctg

SEQ ID NO: 1734806 - DNA, 15 bp, Homo sapiens
taaatgctattctga

SEQ ID NO: 1734807 - DNA, 15 bp, Homo sapiens
aaatgctattctgag

SEQ ID NO: 1734808 - DNA, 15 bp, Homo sapiens
aatgctattctgagg

SEQ ID NO: 1734809 - DNA, 15 bp, Homo sapiens
atgctattctgaggc

SEQ ID NO: 1734810 - DNA, 15 bp, Homo sapiens
tgctattctgaggct

SEQ ID NO: 1734811 - DNA, 15 bp, Homo sapiens
gctattctgaggctg

SEQ ID NO: 1734812 - DNA, 15 bp, Homo sapiens
ctattctgaggctga

SEQ ID NO: 1734813 - DNA, 15 bp, Homo sapiens
tattctgaggctgat

SEQ ID NO: 1734814 - DNA, 15 bp, Homo sapiens
attctgaggctgatt

SEQ ID NO: 1734815 - DNA, 15 bp, Homo sapiens
ttctgaggctgattt

SEQ ID NO: 1734816 - DNA, 15 bp, Homo sapiens
tctgaggctgatttc

SEQ ID NO: 1734817 - DNA, 15 bp, Homo sapiens
ctgaggctgatttct

SEQ ID NO: 1734818 - DNA, 15 bp, Homo sapiens
tgaggctgatttctt

SEQ ID NO: 1734819 - DNA, 15 bp, Homo sapiens
gaggctgatttcttt

SEQ ID NO: 1734820 - DNA, 15 bp, Homo sapiens
aggctgatttctttt

SEQ ID NO: 1734821 - DNA, 15 bp, Homo sapiens
ggctgatttcttttt

SEQ ID NO: 1734822 - DNA, 15 bp, Homo sapiens
gctgatttctttttc

SEQ ID NO: 1734823 - DNA, 15 bp, Homo sapiens
ctgatttctttttct

SEQ ID NO: 1734824 - DNA, 15 bp, Homo sapiens
tgatttctttttctt

SEQ ID NO: 1734825 - DNA, 15 bp, Homo sapiens
gatttctttttcttt

SEQ ID NO: 1734826 - DNA, 15 bp, Homo sapiens
atttctttttctttg

SEQ ID NO: 1734827 - DNA, 15 bp, Homo sapiens
tttctttttctttgg

SEQ ID NO: 1734828 - DNA, 15 bp, Homo sapiens
ttctttttctttgga

SEQ ID NO: 1734829 - DNA, 15 bp, Homo sapiens
tctttttctttggat

SEQ ID NO: 1734830 - DNA, 15 bp, Homo sapiens
ctttttctttggata

SEQ ID NO: 1734831 - DNA, 15 bp, Homo sapiens
tttttctttggatat

SEQ ID NO: 1734832 - DNA, 15 bp, Homo sapiens
ttttctttggatata

SEQ ID NO: 1734833 - DNA, 15 bp, Homo sapiens
tttctttggatatat

SEQ ID NO: 1734834 - DNA, 15 bp, Homo sapiens
ttctttggatatatc

SEQ ID NO: 1734835 - DNA, 15 bp, Homo sapiens
tctttggatatatct

SEQ ID NO: 1734836 - DNA, 15 bp, Homo sapiens
ctttggatatatctg

SEQ ID NO: 1734837 - DNA, 15 bp, Homo sapiens
tttggatatatctgc

SEQ ID NO: 1734838 - DNA, 15 bp, Homo sapiens
ttggatatatctgca

SEQ ID NO: 1734839 - DNA, 15 bp, Homo sapiens
tggatatatctgcac

SEQ ID NO: 1734840 - DNA, 15 bp, Homo sapiens
ggatatatctgcact

SEQ ID NO: 1734841 - DNA, 15 bp, Homo sapiens
gatatatctgcactt

SEQ ID NO: 1734842 - DNA, 15 bp, Homo sapiens
atatatctgcacttt

SEQ ID NO: 1734843 - DNA, 15 bp, Homo sapiens
tatatctgcactttt

SEQ ID NO: 1734844 - DNA, 15 bp, Homo sapiens
atatctgcacttttg

SEQ ID NO: 1734845 - DNA, 15 bp, Homo sapiens
tatctgcacttttgt

SEQ ID NO: 1734846 - DNA, 15 bp, Homo sapiens
atctgcacttttgtt

SEQ ID NO: 1734847 - DNA, 15 bp, Homo sapiens
tctgcacttttgttc

SEQ ID NO: 1734848 - DNA, 15 bp, Homo sapiens
ctgcacttttgttcc

SEQ ID NO: 1734849 - DNA, 15 bp, Homo sapiens
tgcacttttgttcct

SEQ ID NO: 1734850 - DNA, 15 bp, Homo sapiens
gcacttttgttcctt

SEQ ID NO: 1734851 - DNA, 15 bp, Homo sapiens
cacttttgttccttt

SEQ ID NO: 1734852 - DNA, 15 bp, Homo sapiens
acttttgttcctttc

SEQ ID NO: 1734853 - DNA, 15 bp, Homo sapiens
cttttgttcctttct

SEQ ID NO: 1734854 - DNA, 15 bp, Homo sapiens
ttttgttcctttctc

SEQ ID NO: 1734855 - DNA, 15 bp, Homo sapiens
tttgttcctttctct

SEQ ID NO: 1734856 - DNA, 15 bp, Homo sapiens
ttgttcctttctctt

SEQ ID NO: 1734857 - DNA, 15 bp, Homo sapiens
tgttcctttctcttt

SEQ ID NO: 1734858 - DNA, 15 bp, Homo sapiens
gttcctttctctttt

SEQ ID NO: 1734859 - DNA, 15 bp, Homo sapiens
tcctttctcttttct

SEQ ID NO: 1734860 - DNA, 15 bp, Homo sapiens
cctttctcttttctc

SEQ ID NO: 1734861 - DNA, 15 bp, Homo sapiens
ctttctcttttctct

SEQ ID NO: 1734862 - DNA, 15 bp, Homo sapiens
tttctcttttctctt

SEQ ID NO: 1734863 - DNA, 15 bp, Homo sapiens
ttctcttttctcttc

SEQ ID NO: 1734864 - DNA, 15 bp, Homo sapiens
tctcttttctcttct

SEQ ID NO: 1734865 - DNA, 15 bp, Homo sapiens
ctcttttctcttcta

SEQ ID NO: 1734866 - DNA, 15 bp, Homo sapiens
tcttttctcttctaa

SEQ ID NO: 1734867 - DNA, 15 bp, Homo sapiens
cttttctcttctaat

SEQ ID NO: 1734868 - DNA, 15 bp, Homo sapiens
ttttctcttctaatc

SEQ ID NO: 1734869 - DNA, 15 bp, Homo sapiens
tttctcttctaatca

SEQ ID NO: 1734870 - DNA, 15 bp, Homo sapiens
ttctcttctaatcaa

SEQ ID NO: 1734871 - DNA, 15 bp, Homo sapiens
tctcttctaatcaac

SEQ ID NO: 1734872 - DNA, 15 bp, Homo sapiens
ctcttctaatcaaca

SEQ ID NO: 1734873 - DNA, 15 bp, Homo sapiens
tcttctaatcaacat

SEQ ID NO: 1734874 - DNA, 15 bp, Homo sapiens
cttctaatcaacatt

SEQ ID NO: 1734875 - DNA, 15 bp, Homo sapiens
ttctaatcaacattc

SEQ ID NO: 1734876 - DNA, 15 bp, Homo sapiens
tctaatcaacattct

SEQ ID NO: 1734877 - DNA, 15 bp, Homo sapiens
ctaatcaacattctg

SEQ ID NO: 1734878 - DNA, 15 bp, Homo sapiens
taatcaacattctga

SEQ ID NO: 1734879 - DNA, 15 bp, Homo sapiens
aatcaacattctgat

SEQ ID NO: 1734880 - DNA, 15 bp, Homo sapiens
atcaacattctgatc

SEQ ID NO: 1734881 - DNA, 15 bp, Homo sapiens
tcaacattctgatct

SEQ ID NO: 1734882 - DNA, 15 bp, Homo sapiens
caacattctgatctt

SEQ ID NO: 1734883 - DNA, 15 bp, Homo sapiens
aacattctgatcttc

SEQ ID NO: 1734884 - DNA, 15 bp, Homo sapiens
acattctgatcttct

SEQ ID NO: 1734885 - DNA, 15 bp, Homo sapiens
cattctgatcttcta

SEQ ID NO: 1734886 - DNA, 15 bp, Homo sapiens
attctgatcttctat

SEQ ID NO: 1734887 - DNA, 15 bp, Homo sapiens
ttctgatcttctatt

SEQ ID NO: 1734888 - DNA, 15 bp, Homo sapiens
tctgatcttctattc

SEQ ID NO: 1734889 - DNA, 15 bp, Homo sapiens
ctgatcttctattct

SEQ ID NO: 1734890 - DNA, 15 bp, Homo sapiens
tgatcttctattctt

SEQ ID NO: 1734891 - DNA, 15 bp, Homo sapiens
gatcttctattcttt

SEQ ID NO: 1734892 - DNA, 15 bp, Homo sapiens
atcttctattctttg

SEQ ID NO: 1734893 - DNA, 15 bp, Homo sapiens
tcttctattctttgt

SEQ ID NO: 1734894 - DNA, 15 bp, Homo sapiens
cttctattctttgtc

SEQ ID NO: 1734895 - DNA, 15 bp, Homo sapiens
ttctattctttgtca

SEQ ID NO: 1734896 - DNA, 15 bp, Homo sapiens
tctattctttgtcat

SEQ ID NO: 1734897 - DNA, 15 bp, Homo sapiens
ctattctttgtcatt

SEQ ID NO: 1734898 - DNA, 15 bp, Homo sapiens
tattctttgtcattt

SEQ ID NO: 1734899 - DNA, 15 bp, Homo sapiens
attctttgtcatttc

SEQ ID NO: 1734900 - DNA, 15 bp, Homo sapiens
ttctttgtcatttct

SEQ ID NO: 1734901 - DNA, 15 bp, Homo sapiens
tctttgtcatttcta

SEQ ID NO: 1734902 - DNA, 15 bp, Homo sapiens
ctttgtcatttctac

SEQ ID NO: 1734903 - DNA, 15 bp, Homo sapiens
tttgtcatttctact

SEQ ID NO: 1734904 - DNA, 15 bp, Homo sapiens
ttgtcatttctactc

SEQ ID NO: 1734905 - DNA, 15 bp, Homo sapiens
tgtcatttctactct

SEQ ID NO: 1734906 - DNA, 15 bp, Homo sapiens
gtcatttctactctt

SEQ ID NO: 1734907 - DNA, 15 bp, Homo sapiens
tcatttctactcttt

SEQ ID NO: 1734908 - DNA, 15 bp, Homo sapiens
catttctactctttc

SEQ ID NO: 1734909 - DNA, 15 bp, Homo sapiens
atttctactctttct

SEQ ID NO: 1734910 - DNA, 15 bp, Homo sapiens
tttctactctttctt

SEQ ID NO: 1734911 - DNA, 15 bp, Homo sapiens
ttctactctttcttt

SEQ ID NO: 1734912 - DNA, 15 bp, Homo sapiens
tctactctttcttta

SEQ ID NO: 1734913 - DNA, 15 bp, Homo sapiens
ctactctttctttat

SEQ ID NO: 1734914 - DNA, 15 bp, Homo sapiens
tactctttctttatt

SEQ ID NO: 1734915 - DNA, 15 bp, Homo sapiens
actctttctttattt

SEQ ID NO: 1734916 - DNA, 15 bp, Homo sapiens
ctctttctttatttg

SEQ ID NO: 1734917 - DNA, 15 bp, Homo sapiens
tctttctttatttgc

SEQ ID NO: 1734918 - DNA, 15 bp, Homo sapiens
ctttctttatttgct

SEQ ID NO: 1734919 - DNA, 15 bp, Homo sapiens
tttctttatttgctt

SEQ ID NO: 1734920 - DNA, 15 bp, Homo sapiens
ttctttatttgcttt

SEQ ID NO: 1734921 - DNA, 15 bp, Homo sapiens
tctttatttgctttt

SEQ ID NO: 1734922 - DNA, 15 bp, Homo sapiens
ctttatttgcttttt

SEQ ID NO: 1734923 - DNA, 15 bp, Homo sapiens
tttatttgctttttc

SEQ ID NO: 1734924 - DNA, 15 bp, Homo sapiens
ttatttgctttttca

SEQ ID NO: 1734925 - DNA, 15 bp, Homo sapiens
tatttgctttttcac

SEQ ID NO: 1734926 - DNA, 15 bp, Homo sapiens
atttgctttttcaca

SEQ ID NO: 1734927 - DNA, 15 bp, Homo sapiens
tttgctttttcacat

SEQ ID NO: 1734928 - DNA, 15 bp, Homo sapiens
ttgctttttcacata

SEQ ID NO: 1734929 - DNA, 15 bp, Homo sapiens
tgctttttcacatag

SEQ ID NO: 1734930 - DNA, 15 bp, Homo sapiens
gctttttcacatagc

SEQ ID NO: 1734931 - DNA, 15 bp, Homo sapiens
tttttcacatagctt

SEQ ID NO: 1734932 - DNA, 15 bp, Homo sapiens
ttttcacatagcttg

SEQ ID NO: 1734933 - DNA, 15 bp, Homo sapiens
tttcacatagcttgt

SEQ ID NO: 1734934 - DNA, 15 bp, Homo sapiens
ttcacatagcttgtc

SEQ ID NO: 1734935 - DNA, 15 bp, Homo sapiens
tcacatagcttgtca

SEQ ID NO: 1734936 - DNA, 15 bp, Homo sapiens
cacatagcttgtcat

SEQ ID NO: 1734937 - DNA, 15 bp, Homo sapiens
acatagcttgtcatg

SEQ ID NO: 1734938 - DNA, 15 bp, Homo sapiens
catagcttgtcatgg

SEQ ID NO: 1734939 - DNA, 15 bp, Homo sapiens
atagcttgtcatggc

SEQ ID NO: 1734940 - DNA, 15 bp, Homo sapiens
tagcttgtcatggct

SEQ ID NO: 1734941 - DNA, 15 bp, Homo sapiens
agcttgtcatggctc

SEQ ID NO: 1734942 - DNA, 15 bp, Homo sapiens
gcttgtcatggctcc

SEQ ID NO: 1734943 - DNA, 15 bp, Homo sapiens
cttgtcatggctccc

SEQ ID NO: 1734944 - DNA, 15 bp, Homo sapiens
ttgtcatggctcccc

SEQ ID NO: 1734945 - DNA, 15 bp, Homo sapiens
tgtcatggctccccc

SEQ ID NO: 1734946 - DNA, 15 bp, Homo sapiens
gtcatggctccccca

SEQ ID NO: 1734947 - DNA, 15 bp, Homo sapiens
tcatggctcccccat

SEQ ID NO: 1734948 - DNA, 15 bp, Homo sapiens
catggctcccccatt

SEQ ID NO: 1734949 - DNA, 15 bp, Homo sapiens
atggctcccccattc

SEQ ID NO: 1734950 - DNA, 15 bp, Homo sapiens
tggctcccccattcc

SEQ ID NO: 1734951 - DNA, 15 bp, Homo sapiens
ggctcccccattcct

SEQ ID NO: 1734952 - DNA, 15 bp, Homo sapiens
gctcccccattcctt

SEQ ID NO: 1734953 - DNA, 15 bp, Homo sapiens
ctcccccattccttt

SEQ ID NO: 1734954 - DNA, 15 bp, Homo sapiens
tcccccattcctttc

SEQ ID NO: 1734955 - DNA, 15 bp, Homo sapiens
cccccattcctttct

SEQ ID NO: 1734956 - DNA, 15 bp, Homo sapiens
ccccattcctttctg

SEQ ID NO: 1734957 - DNA, 15 bp, Homo sapiens
cccattcctttctgt

SEQ ID NO: 1734958 - DNA, 15 bp, Homo sapiens
ccattcctttctgta

SEQ ID NO: 1734959 - DNA, 15 bp, Homo sapiens
cattcctttctgtat

SEQ ID NO: 1734960 - DNA, 15 bp, Homo sapiens
attcctttctgtatc

SEQ ID NO: 1734961 - DNA, 15 bp, Homo sapiens
ttcctttctgtatca

SEQ ID NO: 1734962 - DNA, 15 bp, Homo sapiens
tcctttctgtatcat

SEQ ID NO: 1734963 - DNA, 15 bp, Homo sapiens
cctttctgtatcata

SEQ ID NO: 1734964 - DNA, 15 bp, Homo sapiens
ctttctgtatcatag

SEQ ID NO: 1734965 - DNA, 15 bp, Homo sapiens
tttctgtatcatagg

SEQ ID NO: 1734966 - DNA, 15 bp, Homo sapiens
ttctgtatcatagga

SEQ ID NO: 1734967 - DNA, 15 bp, Homo sapiens
tctgtatcataggaa

SEQ ID NO: 1734968 - DNA, 15 bp, Homo sapiens
ctgtatcataggaac

SEQ ID NO: 1734969 - DNA, 15 bp, Homo sapiens
tgtatcataggaact

SEQ ID NO: 1734970 - DNA, 15 bp, Homo sapiens
gtatcataggaactt

SEQ ID NO: 1734971 - DNA, 15 bp, Homo sapiens
tatcataggaacttt

SEQ ID NO: 1734972 - DNA, 15 bp, Homo sapiens
atcataggaacttta

SEQ ID NO: 1734973 - DNA, 15 bp, Homo sapiens
tcataggaactttaa

SEQ ID NO: 1734974 - DNA, 15 bp, Homo sapiens
cataggaactttaat

SEQ ID NO: 1734975 - DNA, 15 bp, Homo sapiens
ataggaactttaata

SEQ ID NO: 1734976 - DNA, 15 bp, Homo sapiens
taggaactttaataa

SEQ ID NO: 1734977 - DNA, 15 bp, Homo sapiens
aggaactttaataac

SEQ ID NO: 1734978 - DNA, 15 bp, Homo sapiens
ggaactttaataacc

SEQ ID NO: 1734979 - DNA, 15 bp, Homo sapiens
gaactttaataacct

SEQ ID NO: 1734980 - DNA, 15 bp, Homo sapiens
aactttaataacctt

SEQ ID NO: 1734981 - DNA, 15 bp, Homo sapiens
actttaataaccttt

SEQ ID NO: 1734982 - DNA, 15 bp, Homo sapiens
ctttaataacctttt

SEQ ID NO: 1734983 - DNA, 15 bp, Homo sapiens
tttaataaccttttg

SEQ ID NO: 1734984 - DNA, 15 bp, Homo sapiens
ttaataaccttttgg

SEQ ID NO: 1734985 - DNA, 15 bp, Homo sapiens
taataaccttttggt

SEQ ID NO: 1734986 - DNA, 15 bp, Homo sapiens
aataaccttttggtt

SEQ ID NO: 1734987 - DNA, 15 bp, Homo sapiens
ataaccttttggttc

SEQ ID NO: 1734988 - DNA, 15 bp, Homo sapiens
taaccttttggttcc

SEQ ID NO: 1734989 - DNA, 15 bp, Homo sapiens
aaccttttggttccc

SEQ ID NO: 1734990 - DNA, 15 bp, Homo sapiens
accttttggttcccc

SEQ ID NO: 1734991 - DNA, 15 bp, Homo sapiens
ccttttggttcccct

SEQ ID NO: 1734992 - DNA, 15 bp, Homo sapiens
cttttggttcccctg

SEQ ID NO: 1734993 - DNA, 15 bp, Homo sapiens
ttttggttcccctgc

SEQ ID NO: 1734994 - DNA, 15 bp, Homo sapiens
tttggttcccctgct

SEQ ID NO: 1734995 - DNA, 15 bp, Homo sapiens
ttggttcccctgctg

SEQ ID NO: 1734996 - DNA, 15 bp, Homo sapiens
tggttcccctgctga

SEQ ID NO: 1734997 - DNA, 15 bp, Homo sapiens
ggttcccctgctgat

SEQ ID NO: 1734998 - DNA, 15 bp, Homo sapiens
gttcccctgctgatt

SEQ ID NO: 1734999 - DNA, 15 bp, Homo sapiens
ttcccctgctgatta

SEQ ID NO: 1735000 - DNA, 15 bp, Homo sapiens
tcccctgctgattag

SEQ ID NO: 1735001 - DNA, 15 bp, Homo sapiens
cccctgctgattagc

SEQ ID NO: 1735002 - DNA, 15 bp, Homo sapiens
ccctgctgattagct

SEQ ID NO: 1735003 - DNA, 15 bp, Homo sapiens
cctgctgattagctg

SEQ ID NO: 1735004 - DNA, 15 bp, Homo sapiens
ctgctgattagctga

SEQ ID NO: 1735005 - DNA, 15 bp, Homo sapiens
tgctgattagctgaa

SEQ ID NO: 1735006 - DNA, 15 bp, Homo sapiens
gctgattagctgaag

SEQ ID NO: 1735007 - DNA, 15 bp, Homo sapiens
ctgattagctgaagc

SEQ ID NO: 1735008 - DNA, 15 bp, Homo sapiens
tgattagctgaagct

SEQ ID NO: 1735009 - DNA, 15 bp, Homo sapiens
gattagctgaagctt

SEQ ID NO: 1735010 - DNA, 15 bp, Homo sapiens
attagctgaagcttt

SEQ ID NO: 1735011 - DNA, 15 bp, Homo sapiens
ttagctgaagctttt

SEQ ID NO: 1735012 - DNA, 15 bp, Homo sapiens
tagctgaagctttta

SEQ ID NO: 1735013 - DNA, 15 bp, Homo sapiens
agctgaagcttttat

SEQ ID NO: 1735014 - DNA, 15 bp, Homo sapiens
gctgaagcttttatt

SEQ ID NO: 1735015 - DNA, 15 bp, Homo sapiens
ctgaagcttttattt

SEQ ID NO: 1735016 - DNA, 15 bp, Homo sapiens
tgaagcttttatttc

SEQ ID NO: 1735017 - DNA, 15 bp, Homo sapiens
gaagcttttatttcc

SEQ ID NO: 1735018 - DNA, 15 bp, Homo sapiens
aagcttttatttccc

SEQ ID NO: 1735019 - DNA, 15 bp, Homo sapiens
agcttttatttcccc

SEQ ID NO: 1735020 - DNA, 15 bp, Homo sapiens
gcttttatttcccca

SEQ ID NO: 1735021 - DNA, 15 bp, Homo sapiens
cttttatttccccag

SEQ ID NO: 1735022 - DNA, 15 bp, Homo sapiens
ttttatttccccagt

SEQ ID NO: 1735023 - DNA, 15 bp, Homo sapiens
tttatttccccagtg

SEQ ID NO: 1735024 - DNA, 15 bp, Homo sapiens
ttatttccccagtgt

SEQ ID NO: 1735025 - DNA, 15 bp, Homo sapiens
tatttccccagtgtt

SEQ ID NO: 1735026 - DNA, 15 bp, Homo sapiens
atttccccagtgttt

SEQ ID NO: 1735027 - DNA, 15 bp, Homo sapiens
tttccccagtgtttg

SEQ ID NO: 1735028 - DNA, 15 bp, Homo sapiens
ttccccagtgtttga

SEQ ID NO: 1735029 - DNA, 15 bp, Homo sapiens
tccccagtgtttgat

SEQ ID NO: 1735030 - DNA, 15 bp, Homo sapiens
ccccagtgtttgatt

SEQ ID NO: 1735031 - DNA, 15 bp, Homo sapiens
cccagtgtttgattg

SEQ ID NO: 1735032 - DNA, 15 bp, Homo sapiens
ccagtgtttgattgg

SEQ ID NO: 1735033 - DNA, 15 bp, Homo sapiens
cagtgtttgattggt

SEQ ID NO: 1735034 - DNA, 15 bp, Homo sapiens
agtgtttgattggtc

SEQ ID NO: 1735035 - DNA, 15 bp, Homo sapiens
gtgtttgattggtcc

SEQ ID NO: 1735036 - DNA, 15 bp, Homo sapiens
tgtttgattggtcca

SEQ ID NO: 1735037 - DNA, 15 bp, Homo sapiens
gtttgattggtccag

SEQ ID NO: 1735038 - DNA, 15 bp, Homo sapiens
tttgattggtccagc

SEQ ID NO: 1735039 - DNA, 15 bp, Homo sapiens
ttgattggtccagcc

SEQ ID NO: 1735040 - DNA, 15 bp, Homo sapiens
tgattggtccagccc

SEQ ID NO: 1735041 - DNA, 15 bp, Homo sapiens
gattggtccagccca

SEQ ID NO: 1735042 - DNA, 15 bp, Homo sapiens
attggtccagcccat

SEQ ID NO: 1735043 - DNA, 15 bp, Homo sapiens
ttggtccagcccatt

SEQ ID NO: 1735044 - DNA, 15 bp, Homo sapiens
tggtccagcccattt

SEQ ID NO: 1735045 - DNA, 15 bp, Homo sapiens
ggtccagcccatttt

SEQ ID NO: 1735046 - DNA, 15 bp, Homo sapiens
gtccagcccattttt

SEQ ID NO: 1735047 - DNA, 15 bp, Homo sapiens
tccagcccatttttt

SEQ ID NO: 1735048 - DNA, 15 bp, Homo sapiens
ccagcccattttttt

SEQ ID NO: 1735049 - DNA, 15 bp, Homo sapiens
cagcccatttttttg

SEQ ID NO: 1735050 - DNA, 15 bp, Homo sapiens
agcccatttttttga

SEQ ID NO: 1735051 - DNA, 15 bp, Homo sapiens
gcccatttttttgag

SEQ ID NO: 1735052 - DNA, 15 bp, Homo sapiens
cccatttttttgagt

SEQ ID NO: 1735053 - DNA, 15 bp, Homo sapiens
ccatttttttgagtg

SEQ ID NO: 1735054 - DNA, 15 bp, Homo sapiens
catttttttgagtga

SEQ ID NO: 1735055 - DNA, 15 bp, Homo sapiens
atttttttgagtgag

SEQ ID NO: 1735056 - DNA, 15 bp, Homo sapiens
tttttttgagtgagg

SEQ ID NO: 1735057 - DNA, 15 bp, Homo sapiens
ttttttgagtgaggg

SEQ ID NO: 1735058 - DNA, 15 bp, Homo sapiens
tttttgagtgagggc

SEQ ID NO: 1735059 - DNA, 15 bp, Homo sapiens
ttttgagtgagggct

SEQ ID NO: 1735060 - DNA, 15 bp, Homo sapiens
tttgagtgagggcta

SEQ ID NO: 1735061 - DNA, 15 bp, Homo sapiens
ttgagtgagggctat

SEQ ID NO: 1735062 - DNA, 15 bp, Homo sapiens
tgagtgagggctata

SEQ ID NO: 1735063 - DNA, 15 bp, Homo sapiens
gagtgagggctataa

SEQ ID NO: 1735064 - DNA, 15 bp, Homo sapiens
agtgagggctataac

SEQ ID NO: 1735065 - DNA, 15 bp, Homo sapiens
gtgagggctataact

SEQ ID NO: 1735066 - DNA, 15 bp, Homo sapiens
tgagggctataactc

SEQ ID NO: 1735067 - DNA, 15 bp, Homo sapiens
gagggctataactca

SEQ ID NO: 1735068 - DNA, 15 bp, Homo sapiens
agggctataactcat

SEQ ID NO: 1735069 - DNA, 15 bp, Homo sapiens
gggctataactcatt

SEQ ID NO: 1735070 - DNA, 15 bp, Homo sapiens
ggctataactcattg

SEQ ID NO: 1735071 - DNA, 15 bp, Homo sapiens
gctataactcattgg

SEQ ID NO: 1735072 - DNA, 15 bp, Homo sapiens
ctataactcattggt

SEQ ID NO: 1735073 - DNA, 15 bp, Homo sapiens
tataactcattggtt

SEQ ID NO: 1735074 - DNA, 15 bp, Homo sapiens
ataactcattggttg

SEQ ID NO: 1735075 - DNA, 15 bp, Homo sapiens
taactcattggttgc

SEQ ID NO: 1735076 - DNA, 15 bp, Homo sapiens
aactcattggttgct

SEQ ID NO: 1735077 - DNA, 15 bp, Homo sapiens
actcattggttgctg

SEQ ID NO: 1735078 - DNA, 15 bp, Homo sapiens
ctcattggttgctgg

SEQ ID NO: 1735079 - DNA, 15 bp, Homo sapiens
tcattggttgctgga

SEQ ID NO: 1735080 - DNA, 15 bp, Homo sapiens
cattggttgctggac

SEQ ID NO: 1735081 - DNA, 15 bp, Homo sapiens
attggttgctggaca

SEQ ID NO: 1735082 - DNA, 15 bp, Homo sapiens
ttggttgctggacag

SEQ ID NO: 1735083 - DNA, 15 bp, Homo sapiens
tggttgctggacagc

SEQ ID NO: 1735084 - DNA, 15 bp, Homo sapiens
ggttgctggacagcc

SEQ ID NO: 1735085 - DNA, 15 bp, Homo sapiens
gttgctggacagcct

SEQ ID NO: 1735086 - DNA, 15 bp, Homo sapiens
ttgctggacagccta

SEQ ID NO: 1735087 - DNA, 15 bp, Homo sapiens
tgctggacagcctat

SEQ ID NO: 1735088 - DNA, 15 bp, Homo sapiens
gctggacagcctatg

SEQ ID NO: 1735089 - DNA, 15 bp, Homo sapiens
ctggacagcctatgg

SEQ ID NO: 1735090 - DNA, 15 bp, Homo sapiens
tggacagcctatgga

SEQ ID NO: 1735091 - DNA, 15 bp, Homo sapiens
ggacagcctatggat

SEQ ID NO: 1735092 - DNA, 15 bp, Homo sapiens
gacagcctatggatg

SEQ ID NO: 1735093 - DNA, 15 bp, Homo sapiens
acagcctatggatgg

SEQ ID NO: 1735094 - DNA, 15 bp, Homo sapiens
cagcctatggatggg

SEQ ID NO: 1735095 - DNA, 15 bp, Homo sapiens
agcctatggatgggt

SEQ ID NO: 1735096 - DNA, 15 bp, Homo sapiens
gcctatggatgggtc

SEQ ID NO: 1735097 - DNA, 15 bp, Homo sapiens
cctatggatgggtca

SEQ ID NO: 1735098 - DNA, 15 bp, Homo sapiens
ctatggatgggtcag

SEQ ID NO: 1735099 - DNA, 15 bp, Homo sapiens
tatggatgggtcagg

SEQ ID NO: 1735100 - DNA, 15 bp, Homo sapiens
atggatgggtcaggt

SEQ ID NO: 1735101 - DNA, 15 bp, Homo sapiens
tggatgggtcaggtg

SEQ ID NO: 1735102 - DNA, 15 bp, Homo sapiens
ggatgggtcaggtga

SEQ ID NO: 1735103 - DNA, 15 bp, Homo sapiens
gatgggtcaggtgac

SEQ ID NO: 1735104 - DNA, 15 bp, Homo sapiens
atgggtcaggtgact

SEQ ID NO: 1735105 - DNA, 15 bp, Homo sapiens
tgggtcaggtgacta

SEQ ID NO: 1735106 - DNA, 15 bp, Homo sapiens
gggtcaggtgactat

SEQ ID NO: 1735107 - DNA, 15 bp, Homo sapiens
ggtcaggtgactatc

SEQ ID NO: 1735108 - DNA, 15 bp, Homo sapiens
gtcaggtgactatct

SEQ ID NO: 1735109 - DNA, 15 bp, Homo sapiens
tcaggtgactatctt

SEQ ID NO: 1735110 - DNA, 15 bp, Homo sapiens
caggtgactatcttt

SEQ ID NO: 1735111 - DNA, 15 bp, Homo sapiens
aggtgactatctttt

SEQ ID NO: 1735112 - DNA, 15 bp, Homo sapiens
ggtgactatcttttg

SEQ ID NO: 1735113 - DNA, 15 bp, Homo sapiens
gtgactatcttttgt

SEQ ID NO: 1735114 - DNA, 15 bp, Homo sapiens
tgactatcttttgtt

SEQ ID NO: 1735115 - DNA, 15 bp, Homo sapiens
gactatcttttgttt

SEQ ID NO: 1735116 - DNA, 15 bp, Homo sapiens
actatcttttgtttc

SEQ ID NO: 1735117 - DNA, 15 bp, Homo sapiens
ctatcttttgtttca

SEQ ID NO: 1735118 - DNA, 15 bp, Homo sapiens
tatcttttgtttcag

SEQ ID NO: 1735119 - DNA, 15 bp, Homo sapiens
atcttttgtttcagt

SEQ ID NO: 1735120 - DNA, 15 bp, Homo sapiens
tcttttgtttcagtt

SEQ ID NO: 1735121 - DNA, 15 bp, Homo sapiens
cttttgtttcagtta

SEQ ID NO: 1735122 - DNA, 15 bp, Homo sapiens
ttttgtttcagttag

SEQ ID NO: 1735123 - DNA, 15 bp, Homo sapiens
tttgtttcagttagc

SEQ ID NO: 1735124 - DNA, 15 bp, Homo sapiens
ttgtttcagttagct

SEQ ID NO: 1735125 - DNA, 15 bp, Homo sapiens
tgtttcagttagctg

SEQ ID NO: 1735126 - DNA, 15 bp, Homo sapiens
gtttcagttagctgc

SEQ ID NO: 1735127 - DNA, 15 bp, Homo sapiens
tttcagttagctgct

SEQ ID NO: 1735128 - DNA, 15 bp, Homo sapiens
ttcagttagctgctt

SEQ ID NO: 1735129 - DNA, 15 bp, Homo sapiens
tcagttagctgcttt

SEQ ID NO: 1735130 - DNA, 15 bp, Homo sapiens
cagttagctgctttg

SEQ ID NO: 1735131 - DNA, 15 bp, Homo sapiens
agttagctgctttgg

SEQ ID NO: 1735132 - DNA, 15 bp, Homo sapiens
gttagctgctttggt

SEQ ID NO: 1735133 - DNA, 15 bp, Homo sapiens
ttagctgctttggta

SEQ ID NO: 1735134 - DNA, 15 bp, Homo sapiens
tagctgctttggtat

SEQ ID NO: 1735135 - DNA, 15 bp, Homo sapiens
agctgctttggtata

SEQ ID NO: 1735136 - DNA, 15 bp, Homo sapiens
gctgctttggtataa

SEQ ID NO: 1735137 - DNA, 15 bp, Homo sapiens
ctgctttggtataat

SEQ ID NO: 1735138 - DNA, 15 bp, Homo sapiens
tgctttggtataatt

SEQ ID NO: 1735139 - DNA, 15 bp, Homo sapiens
gctttggtataattc

SEQ ID NO: 1735140 - DNA, 15 bp, Homo sapiens
ctttggtataattcc

SEQ ID NO: 1735141 - DNA, 15 bp, Homo sapiens
tggtataattcctta

SEQ ID NO: 1735142 - DNA, 15 bp, Homo sapiens
ggtataattccttat

SEQ ID NO: 1735143 - DNA, 15 bp, Homo sapiens
gtataattccttata

SEQ ID NO: 1735144 - DNA, 15 bp, Homo sapiens
tataattccttatac

SEQ ID NO: 1735145 - DNA, 15 bp, Homo sapiens
ataattccttataca

SEQ ID NO: 1735146 - DNA, 15 bp, Homo sapiens
taattccttatacaa

SEQ ID NO: 1735147 - DNA, 15 bp, Homo sapiens
aattccttatacaaa

SEQ ID NO: 1735148 - DNA, 15 bp, Homo sapiens
attccttatacaaaa

SEQ ID NO: 1735149 - DNA, 15 bp, Homo sapiens
ttccttatacaaaat

SEQ ID NO: 1735150 - DNA, 15 bp, Homo sapiens
tccttatacaaaatt

SEQ ID NO: 1735151 - DNA, 15 bp, Homo sapiens
ccttatacaaaattc

SEQ ID NO: 1735152 - DNA, 15 bp, Homo sapiens
cttatacaaaattca

SEQ ID NO: 1735153 - DNA, 15 bp, Homo sapiens
ttatacaaaattcat

SEQ ID NO: 1735154 - DNA, 15 bp, Homo sapiens
tatacaaaattcatg

SEQ ID NO: 1735155 - DNA, 15 bp, Homo sapiens
atacaaaattcatga

SEQ ID NO: 1735156 - DNA, 15 bp, Homo sapiens
tacaaaattcatgat

SEQ ID NO: 1735157 - DNA, 15 bp, Homo sapiens
acaaaattcatgatt

SEQ ID NO: 1735158 - DNA, 15 bp, Homo sapiens
caaaattcatgatta

SEQ ID NO: 1735159 - DNA, 15 bp, Homo sapiens
aaaattcatgattag

SEQ ID NO: 1735160 - DNA, 15 bp, Homo sapiens
aaattcatgattaga

SEQ ID NO: 1735161 - DNA, 15 bp, Homo sapiens
aattcatgattagaa

SEQ ID NO: 1735162 - DNA, 15 bp, Homo sapiens
attcatgattagaaa

SEQ ID NO: 1735163 - DNA, 15 bp, Homo sapiens
ttcatgattagaaat

SEQ ID NO: 1735164 - DNA, 15 bp, Homo sapiens
tcatgattagaaatt

SEQ ID NO: 1735165 - DNA, 15 bp, Homo sapiens
catgattagaaatta

SEQ ID NO: 1735166 - DNA, 15 bp, Homo sapiens
atgattagaaattag

SEQ ID NO: 1735167 - DNA, 15 bp, Homo sapiens
tgattagaaattagc

SEQ ID NO: 1735168 - DNA, 15 bp, Homo sapiens
gattagaaattagca

SEQ ID NO: 1735169 - DNA, 15 bp, Homo sapiens
attagaaattagcat

SEQ ID NO: 1735170 - DNA, 15 bp, Homo sapiens
ttagaaattagcatg

SEQ ID NO: 1735171 - DNA, 15 bp, Homo sapiens
tagaaattagcatgt

SEQ ID NO: 1735172 - DNA, 15 bp, Homo sapiens
agaaattagcatgtg

SEQ ID NO: 1735173 - DNA, 15 bp, Homo sapiens
gaaattagcatgtga

SEQ ID NO: 1735174 - DNA, 15 bp, Homo sapiens
aaattagcatgtgag

SEQ ID NO: 1735175 - DNA, 15 bp, Homo sapiens
aattagcatgtgaga

SEQ ID NO: 1735176 - DNA, 15 bp, Homo sapiens
attagcatgtgagat

SEQ ID NO: 1735177 - DNA, 15 bp, Homo sapiens
ttagcatgtgagatg

SEQ ID NO: 1735178 - DNA, 15 bp, Homo sapiens
tagcatgtgagatgt

SEQ ID NO: 1735179 - DNA, 15 bp, Homo sapiens
agcatgtgagatgta

SEQ ID NO: 1735180 - DNA, 15 bp, Homo sapiens
gcatgtgagatgtag

SEQ ID NO: 1735181 - DNA, 15 bp, Homo sapiens
catgtgagatgtagt

SEQ ID NO: 1735182 - DNA, 15 bp, Homo sapiens
atgtgagatgtagtt

SEQ ID NO: 1735183 - DNA, 15 bp, Homo sapiens
tgtgagatgtagttg

SEQ ID NO: 1735184 - DNA, 15 bp, Homo sapiens
gtgagatgtagttga

SEQ ID NO: 1735185 - DNA, 15 bp, Homo sapiens
tgagatgtagttgat

SEQ ID NO: 1735186 - DNA, 15 bp, Homo sapiens
gagatgtagttgatg

SEQ ID NO: 1735187 - DNA, 15 bp, Homo sapiens
agatgtagttgatga

SEQ ID NO: 1735188 - DNA, 15 bp, Homo sapiens
gatgtagttgatgat

SEQ ID NO: 1735189 - DNA, 15 bp, Homo sapiens
atgtagttgatgatt

SEQ ID NO: 1735190 - DNA, 15 bp, Homo sapiens
tgtagttgatgattg

SEQ ID NO: 1735191 - DNA, 15 bp, Homo sapiens
gtagttgatgattgc

SEQ ID NO: 1735192 - DNA, 15 bp, Homo sapiens
tagttgatgattgct

SEQ ID NO: 1735193 - DNA, 15 bp, Homo sapiens
agttgatgattgcta

SEQ ID NO: 1735194 - DNA, 15 bp, Homo sapiens
gttgatgattgctat

SEQ ID NO: 1735195 - DNA, 15 bp, Homo sapiens
ttgatgattgctatc

SEQ ID NO: 1735196 - DNA, 15 bp, Homo sapiens
tgatgattgctatct

SEQ ID NO: 1735197 - DNA, 15 bp, Homo sapiens
gatgattgctatctt

SEQ ID NO: 1735198 - DNA, 15 bp, Homo sapiens
atgattgctatcttt

SEQ ID NO: 1735199 - DNA, 15 bp, Homo sapiens
tgattgctatcttta

SEQ ID NO: 1735200 - DNA, 15 bp, Homo sapiens
gattgctatctttaa

SEQ ID NO: 1735201 - DNA, 15 bp, Homo sapiens
attgctatctttaat

SEQ ID NO: 1735202 - DNA, 15 bp, Homo sapiens
ttgctatctttaata

SEQ ID NO: 1735203 - DNA, 15 bp, Homo sapiens
tgctatctttaatat

SEQ ID NO: 1735204 - DNA, 15 bp, Homo sapiens
gctatctttaatatc

SEQ ID NO: 1735205 - DNA, 15 bp, Homo sapiens
ctatctttaatatcc

SEQ ID NO: 1735206 - DNA, 15 bp, Homo sapiens
tatctttaatatcct

SEQ ID NO: 1735207 - DNA, 15 bp, Homo sapiens
atctttaatatccta

SEQ ID NO: 1735208 - DNA, 15 bp, Homo sapiens
tctttaatatcctat

SEQ ID NO: 1735209 - DNA, 15 bp, Homo sapiens
ctttaatatcctatt

SEQ ID NO: 1735210 - DNA, 15 bp, Homo sapiens
tttaatatcctattg

SEQ ID NO: 1735211 - DNA, 15 bp, Homo sapiens
ttaatatcctattgg

SEQ ID NO: 1735212 - DNA, 15 bp, Homo sapiens
taatatcctattgga

SEQ ID NO: 1735213 - DNA, 15 bp, Homo sapiens
aatatcctattggaa

SEQ ID NO: 1735214 - DNA, 15 bp, Homo sapiens
atatcctattggaaa

SEQ ID NO: 1735215 - DNA, 15 bp, Homo sapiens
tatcctattggaaaa

SEQ ID NO: 1735216 - DNA, 15 bp, Homo sapiens
atcctattggaaaat

SEQ ID NO: 1735217 - DNA, 15 bp, Homo sapiens
tcctattggaaaatg

SEQ ID NO: 1735218 - DNA, 15 bp, Homo sapiens
cctattggaaaatgt

SEQ ID NO: 1735219 - DNA, 15 bp, Homo sapiens
ctattggaaaatgta

SEQ ID NO: 1735220 - DNA, 15 bp, Homo sapiens
tattggaaaatgtat

SEQ ID NO: 1735221 - DNA, 15 bp, Homo sapiens
attggaaaatgtata

SEQ ID NO: 1735222 - DNA, 15 bp, Homo sapiens
ttggaaaatgtatat

SEQ ID NO: 1735223 - DNA, 15 bp, Homo sapiens
tggaaaatgtatata

SEQ ID NO: 1735224 - DNA, 15 bp, Homo sapiens
ggaaaatgtatatat

SEQ ID NO: 1735225 - DNA, 15 bp, Homo sapiens
gaaaatgtatatatt

SEQ ID NO: 1735226 - DNA, 15 bp, Homo sapiens
aaaatgtatatattg

SEQ ID NO: 1735227 - DNA, 15 bp, Homo sapiens
aaatgtatatattga

SEQ ID NO: 1735228 - DNA, 15 bp, Homo sapiens
aatgtatatattgat

SEQ ID NO: 1735229 - DNA, 15 bp, Homo sapiens
atgtatatattgatg

SEQ ID NO: 1735230 - DNA, 15 bp, Homo sapiens
tgtatatattgatgt

SEQ ID NO: 1735231 - DNA, 15 bp, Homo sapiens
gtatatattgatgtt

SEQ ID NO: 1735232 - DNA, 15 bp, Homo sapiens
tatatattgatgttt

SEQ ID NO: 1735233 - DNA, 15 bp, Homo sapiens
atatattgatgtttc

SEQ ID NO: 1735234 - DNA, 15 bp, Homo sapiens
tatattgatgtttca

SEQ ID NO: 1735235 - DNA, 15 bp, Homo sapiens
atattgatgtttcaa

SEQ ID NO: 1735236 - DNA, 15 bp, Homo sapiens
tattgatgtttcaaa

SEQ ID NO: 1735237 - DNA, 15 bp, Homo sapiens
attgatgtttcaaat

SEQ ID NO: 1735238 - DNA, 15 bp, Homo sapiens
ttgatgtttcaaata

SEQ ID NO: 1735239 - DNA, 15 bp, Homo sapiens
tgatgtttcaaatac

SEQ ID NO: 1735240 - DNA, 15 bp, Homo sapiens
gatgtttcaaatacg

SEQ ID NO: 1735241 - DNA, 15 bp, Homo sapiens
atgtttcaaatacgt

SEQ ID NO: 1735242 - DNA, 15 bp, Homo sapiens
tgtttcaaatacgtt

SEQ ID NO: 1735243 - DNA, 15 bp, Homo sapiens
gtttcaaatacgtta

SEQ ID NO: 1735244 - DNA, 15 bp, Homo sapiens
tttcaaatacgttaa

SEQ ID NO: 1735245 - DNA, 15 bp, Homo sapiens
ttcaaatacgttaat

SEQ ID NO: 1735246 - DNA, 15 bp, Homo sapiens
tcaaatacgttaatt

SEQ ID NO: 1735247 - DNA, 15 bp, Homo sapiens
caaatacgttaattt

SEQ ID NO: 1735248 - DNA, 15 bp, Homo sapiens
aaatacgttaatttt

SEQ ID NO: 1735249 - DNA, 15 bp, Homo sapiens
aatacgttaattttt

SEQ ID NO: 1735250 - DNA, 15 bp, Homo sapiens
atacgttaattttta

SEQ ID NO: 1735251 - DNA, 15 bp, Homo sapiens
tacgttaatttttat

SEQ ID NO: 1735252 - DNA, 15 bp, Homo sapiens
acgttaatttttatg

SEQ ID NO: 1735253 - DNA, 15 bp, Homo sapiens
cgttaatttttatgg

SEQ ID NO: 1735254 - DNA, 15 bp, Homo sapiens
gttaatttttatgga

SEQ ID NO: 1735255 - DNA, 15 bp, Homo sapiens
ttaatttttatggaa

SEQ ID NO: 1735256 - DNA, 15 bp, Homo sapiens
taatttttatggaaa

SEQ ID NO: 1735257 - DNA, 15 bp, Homo sapiens
aatttttatggaaaa

SEQ ID NO: 1735258 - DNA, 15 bp, Homo sapiens
atttttatggaaaag

SEQ ID NO: 1735259 - DNA, 15 bp, Homo sapiens
tttttatggaaaaga

SEQ ID NO: 1735260 - DNA, 15 bp, Homo sapiens
ttttatggaaaagag

SEQ ID NO: 1735261 - DNA, 15 bp, Homo sapiens
tttatggaaaagagt

SEQ ID NO: 1735262 - DNA, 15 bp, Homo sapiens
ttatggaaaagagta

SEQ ID NO: 1735263 - DNA, 15 bp, Homo sapiens
tatggaaaagagtaa

SEQ ID NO: 1735264 - DNA, 15 bp, Homo sapiens
atggaaaagagtaac

SEQ ID NO: 1735265 - DNA, 15 bp, Homo sapiens
tggaaaagagtaacg

SEQ ID NO: 1735266 - DNA, 15 bp, Homo sapiens
ggaaaagagtaacga

SEQ ID NO: 1735267 - DNA, 15 bp, Homo sapiens
gaaaagagtaacgaa

SEQ ID NO: 1735268 - DNA, 15 bp, Homo sapiens
aaaagagtaacgaag

SEQ ID NO: 1735269 - DNA, 15 bp, Homo sapiens
aaagagtaacgaaga

SEQ ID NO: 1735270 - DNA, 15 bp, Homo sapiens
aagagtaacgaagag

SEQ ID NO: 1735271 - DNA, 15 bp, Homo sapiens
agagtaacgaagagt

SEQ ID NO: 1735272 - DNA, 15 bp, Homo sapiens
gagtaacgaagagtg

SEQ ID NO: 1735273 - DNA, 15 bp, Homo sapiens
agtaacgaagagtga

SEQ ID NO: 1735274 - DNA, 15 bp, Homo sapiens
gtaacgaagagtgat

SEQ ID NO: 1735275 - DNA, 15 bp, Homo sapiens
taacgaagagtgatt

SEQ ID NO: 1735276 - DNA, 15 bp, Homo sapiens
aacgaagagtgattt

SEQ ID NO: 1735277 - DNA, 15 bp, Homo sapiens
acgaagagtgattta

SEQ ID NO: 1735278 - DNA, 15 bp, Homo sapiens
cgaagagtgatttaa

SEQ ID NO: 1735279 - DNA, 15 bp, Homo sapiens
gaagagtgatttaaa

SEQ ID NO: 1735280 - DNA, 15 bp, Homo sapiens
aagagtgatttaaag

SEQ ID NO: 1735281 - DNA, 15 bp, Homo sapiens
agagtgatttaaagt

SEQ ID NO: 1735282 - DNA, 15 bp, Homo sapiens
gagtgatttaaagtt

SEQ ID NO: 1735283 - DNA, 15 bp, Homo sapiens
agtgatttaaagtta

SEQ ID NO: 1735284 - DNA, 15 bp, Homo sapiens
gtgatttaaagttat

SEQ ID NO: 1735285 - DNA, 15 bp, Homo sapiens
tgatttaaagttatt

SEQ ID NO: 1735286 - DNA, 15 bp, Homo sapiens
gatttaaagttatta

SEQ ID NO: 1735287 - DNA, 15 bp, Homo sapiens
atttaaagttattat

SEQ ID NO: 1735288 - DNA, 15 bp, Homo sapiens
tttaaagttattatt

SEQ ID NO: 1735289 - DNA, 15 bp, Homo sapiens
ttaaagttattattt

SEQ ID NO: 1735290 - DNA, 15 bp, Homo sapiens
taaagttattattta

SEQ ID NO: 1735291 - DNA, 15 bp, Homo sapiens
aaagttattatttaa

SEQ ID NO: 1735292 - DNA, 15 bp, Homo sapiens
aagttattatttaaa

SEQ ID NO: 1735293 - DNA, 15 bp, Homo sapiens
agttattatttaaac

SEQ ID NO: 1735294 - DNA, 15 bp, Homo sapiens
gttattatttaaact

SEQ ID NO: 1735295 - DNA, 15 bp, Homo sapiens
ttattatttaaactg

SEQ ID NO: 1735296 - DNA, 15 bp, Homo sapiens
tattatttaaactgc

SEQ ID NO: 1735297 - DNA, 15 bp, Homo sapiens
attatttaaactgct

SEQ ID NO: 1735298 - DNA, 15 bp, Homo sapiens
ttatttaaactgctt

SEQ ID NO: 1735299 - DNA, 15 bp, Homo sapiens
tatttaaactgctta

SEQ ID NO: 1735300 - DNA, 15 bp, Homo sapiens
atttaaactgcttaa

SEQ ID NO: 1735301 - DNA, 15 bp, Homo sapiens
tttaaactgcttaaa

SEQ ID NO: 1735302 - DNA, 15 bp, Homo sapiens
ttaaactgcttaaat

SEQ ID NO: 1735303 - DNA, 15 bp, Homo sapiens
taaactgcttaaatt

SEQ ID NO: 1735304 - DNA, 15 bp, Homo sapiens
aaactgcttaaatta

SEQ ID NO: 1735305 - DNA, 15 bp, Homo sapiens
aactgcttaaattat

SEQ ID NO: 1735306 - DNA, 15 bp, Homo sapiens
actgcttaaattatt

SEQ ID NO: 1735307 - DNA, 15 bp, Homo sapiens
ctgcttaaattattt

SEQ ID NO: 1735308 - DNA, 15 bp, Homo sapiens
tgcttaaattattta

SEQ ID NO: 1735309 - DNA, 15 bp, Homo sapiens
gcttaaattatttaa

SEQ ID NO: 1735310 - DNA, 15 bp, Homo sapiens
cttaaattatttaaa

SEQ ID NO: 1735311 - DNA, 15 bp, Homo sapiens
ttaaattatttaaat

SEQ ID NO: 1735312 - DNA, 15 bp, Homo sapiens
taaattatttaaatc

SEQ ID NO: 1735313 - DNA, 15 bp, Homo sapiens
aattatttaaatcaa

SEQ ID NO: 1735314 - DNA, 15 bp, Homo sapiens
attatttaaatcaac

SEQ ID NO: 1735315 - DNA, 15 bp, Homo sapiens
ttatttaaatcaact

SEQ ID NO: 1735316 - DNA, 15 bp, Homo sapiens
tatttaaatcaactt

SEQ ID NO: 1735317 - DNA, 15 bp, Homo sapiens
atttaaatcaacttt

SEQ ID NO: 1735318 - DNA, 15 bp, Homo sapiens
tttaaatcaactttc

SEQ ID NO: 1735319 - DNA, 15 bp, Homo sapiens
ttaaatcaactttcc

SEQ ID NO: 1735320 - DNA, 15 bp, Homo sapiens
taaatcaactttcct

SEQ ID NO: 1735321 - DNA, 15 bp, Homo sapiens
aaatcaactttcctt

SEQ ID NO: 1735322 - DNA, 15 bp, Homo sapiens
aatcaactttccttt

SEQ ID NO: 1735323 - DNA, 15 bp, Homo sapiens
atcaactttcctttt

SEQ ID NO: 1735324 - DNA, 15 bp, Homo sapiens
tcaactttccttttc

SEQ ID NO: 1735325 - DNA, 15 bp, Homo sapiens
caactttccttttcc

SEQ ID NO: 1735326 - DNA, 15 bp, Homo sapiens
aactttccttttcca

SEQ ID NO: 1735327 - DNA, 15 bp, Homo sapiens
actttccttttccaa

SEQ ID NO: 1735328 - DNA, 15 bp, Homo sapiens
ctttccttttccaaa

SEQ ID NO: 1735329 - DNA, 15 bp, Homo sapiens
tttccttttccaaaa

SEQ ID NO: 1735330 - DNA, 15 bp, Homo sapiens
ttccttttccaaaaa

SEQ ID NO: 1735331 - DNA, 15 bp, Homo sapiens
tccttttccaaaaat

SEQ ID NO: 1735332 - DNA, 15 bp, Homo sapiens
ccttttccaaaaata

SEQ ID NO: 1735333 - DNA, 15 bp, Homo sapiens
cttttccaaaaataa

SEQ ID NO: 1735334 - DNA, 15 bp, Homo sapiens
ttttccaaaaataat

SEQ ID NO: 1735335 - DNA, 15 bp, Homo sapiens
tttccaaaaataatt

SEQ ID NO: 1735336 - DNA, 15 bp, Homo sapiens
ttccaaaaataattc

SEQ ID NO: 1735337 - DNA, 15 bp, Homo sapiens
tccaaaaataattca

SEQ ID NO: 1735338 - DNA, 15 bp, Homo sapiens
ccaaaaataattcaa

SEQ ID NO: 1735339 - DNA, 15 bp, Homo sapiens
caaaaataattcaat

SEQ ID NO: 1735340 - DNA, 15 bp, Homo sapiens
aaaaataattcaatt

SEQ ID NO: 1735341 - DNA, 15 bp, Homo sapiens
aataattcaattcta

SEQ ID NO: 1735342 - DNA, 15 bp, Homo sapiens
ataattcaattctaa

SEQ ID NO: 1735343 - DNA, 15 bp, Homo sapiens
taattcaattctaaa

SEQ ID NO: 1735344 - DNA, 15 bp, Homo sapiens
aattcaattctaaaa

SEQ ID NO: 1735345 - DNA, 15 bp, Homo sapiens
attcaattctaaaat

SEQ ID NO: 1735346 - DNA, 15 bp, Homo sapiens
ttcaattctaaaatc

SEQ ID NO: 1735347 - DNA, 15 bp, Homo sapiens
tcaattctaaaatca

SEQ ID NO: 1735348 - DNA, 15 bp, Homo sapiens
caattctaaaatcat

SEQ ID NO: 1735349 - DNA, 15 bp, Homo sapiens
aattctaaaatcatt

SEQ ID NO: 1735350 - DNA, 15 bp, Homo sapiens
attctaaaatcattg

SEQ ID NO: 1735351 - DNA, 15 bp, Homo sapiens
ttctaaaatcattgg

SEQ ID NO: 1735352 - DNA, 15 bp, Homo sapiens
tctaaaatcattggt

SEQ ID NO: 1735353 - DNA, 15 bp, Homo sapiens
ctaaaatcattggtg

SEQ ID NO: 1735354 - DNA, 15 bp, Homo sapiens
taaaatcattggtgg

SEQ ID NO: 1735355 - DNA, 15 bp, Homo sapiens
aaaatcattggtggg

SEQ ID NO: 1735356 - DNA, 15 bp, Homo sapiens
aaatcattggtgggg

SEQ ID NO: 1735357 - DNA, 15 bp, Homo sapiens
aatcattggtggggc

SEQ ID NO: 1735358 - DNA, 15 bp, Homo sapiens
atcattggtggggca

SEQ ID NO: 1735359 - DNA, 15 bp, Homo sapiens
tcattggtggggcaa

SEQ ID NO: 1735360 - DNA, 15 bp, Homo sapiens
cattggtggggcaaa

SEQ ID NO: 1735361 - DNA, 15 bp, Homo sapiens
attggtggggcaaat

SEQ ID NO: 1735362 - DNA, 15 bp, Homo sapiens
ttggtggggcaaata

SEQ ID NO: 1735363 - DNA, 15 bp, Homo sapiens
tggtggggcaaataa

SEQ ID NO: 1735364 - DNA, 15 bp, Homo sapiens
ggtggggcaaataaa

SEQ ID NO: 1735365 - DNA, 15 bp, Homo sapiens
gtggggcaaataaag

SEQ ID NO: 1735366 - DNA, 15 bp, Homo sapiens
tggggcaaataaagt

SEQ ID NO: 1735367 - DNA, 15 bp, Homo sapiens
ggggcaaataaagta

SEQ ID NO: 1735368 - DNA, 15 bp, Homo sapiens
gggcaaataaagtat

SEQ ID NO: 1735369 - DNA, 15 bp, Homo sapiens
ggcaaataaagtatg

SEQ ID NO: 1735370 - DNA, 15 bp, Homo sapiens
gcaaataaagtatgc

SEQ ID NO: 1735371 - DNA, 15 bp, Homo sapiens
caaataaagtatgca

SEQ ID NO: 1735372 - DNA, 15 bp, Homo sapiens
aaataaagtatgcat

SEQ ID NO: 1735373 - DNA, 15 bp, Homo sapiens
aataaagtatgcatt

SEQ ID NO: 1735374 - DNA, 15 bp, Homo sapiens
ataaagtatgcattt

SEQ ID NO: 1735375 - DNA, 15 bp, Homo sapiens
taaagtatgcatttt

SEQ ID NO: 1735376 - DNA, 15 bp, Homo sapiens
aaagtatgcattttg

SEQ ID NO: 1735377 - DNA, 15 bp, Homo sapiens
aagtatgcattttgg

SEQ ID NO: 1735378 - DNA, 15 bp, Homo sapiens
agtatgcattttggt

SEQ ID NO: 1735379 - DNA, 15 bp, Homo sapiens
gtatgcattttggtg

SEQ ID NO: 1735380 - DNA, 15 bp, Homo sapiens
tatgcattttggtgt

SEQ ID NO: 1735381 - DNA, 15 bp, Homo sapiens
atgcattttggtgtg

SEQ ID NO: 1735382 - DNA, 15 bp, Homo sapiens
tgcattttggtgtgt

SEQ ID NO: 1735383 - DNA, 15 bp, Homo sapiens
gcattttggtgtgta

SEQ ID NO: 1735384 - DNA, 15 bp, Homo sapiens
cattttggtgtgtat

SEQ ID NO: 1735385 - DNA, 15 bp, Homo sapiens
attttggtgtgtatc

SEQ ID NO: 1735386 - DNA, 15 bp, Homo sapiens
ttttggtgtgtatct

SEQ ID NO: 1735387 - DNA, 15 bp, Homo sapiens
tttggtgtgtatctc

SEQ ID NO: 1735388 - DNA, 15 bp, Homo sapiens
ttggtgtgtatctct

SEQ ID NO: 1735389 - DNA, 15 bp, Homo sapiens
tggtgtgtatctctg

SEQ ID NO: 1735390 - DNA, 15 bp, Homo sapiens
ggtgtgtatctctga

SEQ ID NO: 1735391 - DNA, 15 bp, Homo sapiens
gtgtgtatctctgac

SEQ ID NO: 1735392 - DNA, 15 bp, Homo sapiens
tgtgtatctctgaca

SEQ ID NO: 1735393 - DNA, 15 bp, Homo sapiens
gtgtatctctgacag

SEQ ID NO: 1735394 - DNA, 15 bp, Homo sapiens
tgtatctctgacagg

SEQ ID NO: 1735395 - DNA, 15 bp, Homo sapiens
gtatctctgacagga

SEQ ID NO: 1735396 - DNA, 15 bp, Homo sapiens
tatctctgacaggag

SEQ ID NO: 1735397 - DNA, 15 bp, Homo sapiens
atctctgacaggagg

SEQ ID NO: 1735398 - DNA, 15 bp, Homo sapiens
tctctgacaggaggg

SEQ ID NO: 1735399 - DNA, 15 bp, Homo sapiens
ctctgacaggagggt

SEQ ID NO: 1735400 - DNA, 15 bp, Homo sapiens
tctgacaggagggtg

SEQ ID NO: 1735401 - DNA, 15 bp, Homo sapiens
ctgacaggagggtgc

SEQ ID NO: 1735402 - DNA, 15 bp, Homo sapiens
tgacaggagggtgcc

SEQ ID NO: 1735403 - DNA, 15 bp, Homo sapiens
gacaggagggtgcca

SEQ ID NO: 1735404 - DNA, 15 bp, Homo sapiens
acaggagggtgccac

SEQ ID NO: 1735405 - DNA, 15 bp, Homo sapiens
caggagggtgccaca

SEQ ID NO: 1735406 - DNA, 15 bp, Homo sapiens
aggagggtgccacag

SEQ ID NO: 1735407 - DNA, 15 bp, Homo sapiens
ggagggtgccacagg

SEQ ID NO: 1735408 - DNA, 15 bp, Homo sapiens
gagggtgccacaggg

SEQ ID NO: 1735409 - DNA, 15 bp, Homo sapiens
agggtgccacagggc

SEQ ID NO: 1735410 - DNA, 15 bp, Homo sapiens
gggtgccacagggcc

SEQ ID NO: 1735411 - DNA, 15 bp, Homo sapiens
ggtgccacagggccc

SEQ ID NO: 1735412 - DNA, 15 bp, Homo sapiens
gtgccacagggccca

SEQ ID NO: 1735413 - DNA, 15 bp, Homo sapiens
tgccacagggcccag

SEQ ID NO: 1735414 - DNA, 15 bp, Homo sapiens
gccacagggcccaga

SEQ ID NO: 1735415 - DNA, 15 bp, Homo sapiens
ccacagggcccagag

SEQ ID NO: 1735416 - DNA, 15 bp, Homo sapiens
cacagggcccagagc

SEQ ID NO: 1735417 - DNA, 15 bp, Homo sapiens
acagggcccagagca

SEQ ID NO: 1735418 - DNA, 15 bp, Homo sapiens
cagggcccagagcag

SEQ ID NO: 1735419 - DNA, 15 bp, Homo sapiens
agggcccagagcagg

SEQ ID NO: 1735420 - DNA, 15 bp, Homo sapiens
gggcccagagcagga

SEQ ID NO: 1735421 - DNA, 15 bp, Homo sapiens
ggcccagagcaggat

SEQ ID NO: 1735422 - DNA, 15 bp, Homo sapiens
gcccagagcaggatg

SEQ ID NO: 1735423 - DNA, 15 bp, Homo sapiens
cccagagcaggatgt

SEQ ID NO: 1735424 - DNA, 15 bp, Homo sapiens
ccagagcaggatgtt

SEQ ID NO: 1735425 - DNA, 15 bp, Homo sapiens
cagagcaggatgtta

SEQ ID NO: 1735426 - DNA, 15 bp, Homo sapiens
gagcaggatgttaga

SEQ ID NO: 1735427 - DNA, 15 bp, Homo sapiens
agcaggatgttagag

SEQ ID NO: 1735428 - DNA, 15 bp, Homo sapiens
gcaggatgttagagt

SEQ ID NO: 1735429 - DNA, 15 bp, Homo sapiens
caggatgttagagtc

SEQ ID NO: 1735430 - DNA, 15 bp, Homo sapiens
aggatgttagagtca

SEQ ID NO: 1735431 - DNA, 15 bp, Homo sapiens
ggatgttagagtcaa

SEQ ID NO: 1735432 - DNA, 15 bp, Homo sapiens
gatgttagagtcaaa

SEQ ID NO: 1735433 - DNA, 15 bp, Homo sapiens
atgttagagtcaaag

SEQ ID NO: 1735434 - DNA, 15 bp, Homo sapiens
tgttagagtcaaagt

SEQ ID NO: 1735435 - DNA, 15 bp, Homo sapiens
gttagagtcaaagta

SEQ ID NO: 1735436 - DNA, 15 bp, Homo sapiens
ttagagtcaaagtag

SEQ ID NO: 1735437 - DNA, 15 bp, Homo sapiens
tagagtcaaagtagg

SEQ ID NO: 1735438 - DNA, 15 bp, Homo sapiens
agagtcaaagtaggg

SEQ ID NO: 1735439 - DNA, 15 bp, Homo sapiens
gagtcaaagtagggt

SEQ ID NO: 1735440 - DNA, 15 bp, Homo sapiens
agtcaaagtagggtg

SEQ ID NO: 1735441 - DNA, 15 bp, Homo sapiens
gtcaaagtagggtga

SEQ ID NO: 1735442 - DNA, 15 bp, Homo sapiens
tcaaagtagggtgag

SEQ ID NO: 1735443 - DNA, 15 bp, Homo sapiens
caaagtagggtgagg

SEQ ID NO: 1735444 - DNA, 15 bp, Homo sapiens
aaagtagggtgagga

SEQ ID NO: 1735445 - DNA, 15 bp, Homo sapiens
aagtagggtgaggag

SEQ ID NO: 1735446 - DNA, 15 bp, Homo sapiens
agtagggtgaggagg

SEQ ID NO: 1735447 - DNA, 15 bp, Homo sapiens
gtagggtgaggaggg

SEQ ID NO: 1735448 - DNA, 15 bp, Homo sapiens
tagggtgaggagggc

SEQ ID NO: 1735449 - DNA, 15 bp, Homo sapiens
agggtgaggagggca

SEQ ID NO: 1735450 - DNA, 15 bp, Homo sapiens
gggtgaggagggcat

SEQ ID NO: 1735451 - DNA, 15 bp, Homo sapiens
ggtgaggagggcatc

SEQ ID NO: 1735452 - DNA, 15 bp, Homo sapiens
gtgaggagggcatcc

SEQ ID NO: 1735453 - DNA, 15 bp, Homo sapiens
tgaggagggcatcct

SEQ ID NO: 1735454 - DNA, 15 bp, Homo sapiens
gaggagggcatcctt

SEQ ID NO: 1735455 - DNA, 15 bp, Homo sapiens
aggagggcatccttt

SEQ ID NO: 1735456 - DNA, 15 bp, Homo sapiens
ggagggcatcctttg

SEQ ID NO: 1735457 - DNA, 15 bp, Homo sapiens
gagggcatcctttgt

SEQ ID NO: 1735458 - DNA, 15 bp, Homo sapiens
agggcatcctttgtg

SEQ ID NO: 1735459 - DNA, 15 bp, Homo sapiens
gggcatcctttgtgt

SEQ ID NO: 1735460 - DNA, 15 bp, Homo sapiens
ggcatcctttgtgtg

SEQ ID NO: 1735461 - DNA, 15 bp, Homo sapiens
gcatcctttgtgtgg

SEQ ID NO: 1735462 - DNA, 15 bp, Homo sapiens
catcctttgtgtggg

SEQ ID NO: 1735463 - DNA, 15 bp, Homo sapiens
atcctttgtgtgggg

SEQ ID NO: 1735464 - DNA, 15 bp, Homo sapiens
tcctttgtgtggggg

SEQ ID NO: 1735465 - DNA, 15 bp, Homo sapiens
cctttgtgtgggggc

SEQ ID NO: 1735466 - DNA, 15 bp, Homo sapiens
ctttgtgtgggggca

SEQ ID NO: 1735467 - DNA, 15 bp, Homo sapiens
tttgtgtgggggcaa

SEQ ID NO: 1735468 - DNA, 15 bp, Homo sapiens
ttgtgtgggggcaac

SEQ ID NO: 1735469 - DNA, 15 bp, Homo sapiens
tgtgtgggggcaacc

SEQ ID NO: 1735470 - DNA, 15 bp, Homo sapiens
gtgtgggggcaacct

SEQ ID NO: 1735471 - DNA, 15 bp, Homo sapiens
tgtgggggcaacctg

SEQ ID NO: 1735472 - DNA, 15 bp, Homo sapiens
gtgggggcaacctga

SEQ ID NO: 1735473 - DNA, 15 bp, Homo sapiens
tgggggcaacctgat

SEQ ID NO: 1735474 - DNA, 15 bp, Homo sapiens
gggggcaacctgatg

SEQ ID NO: 1735475 - DNA, 15 bp, Homo sapiens
ggggcaacctgatgg

SEQ ID NO: 1735476 - DNA, 15 bp, Homo sapiens
gggcaacctgatggg

SEQ ID NO: 1735477 - DNA, 15 bp, Homo sapiens
ggcaacctgatgggg

SEQ ID NO: 1735478 - DNA, 15 bp, Homo sapiens
gcaacctgatggggc

SEQ ID NO: 1735479 - DNA, 15 bp, Homo sapiens
caacctgatggggct

SEQ ID NO: 1735480 - DNA, 15 bp, Homo sapiens
aacctgatggggctg

SEQ ID NO: 1735481 - DNA, 15 bp, Homo sapiens
acctgatggggctgc

SEQ ID NO: 1735482 - DNA, 15 bp, Homo sapiens
cctgatggggctgct

SEQ ID NO: 1735483 - DNA, 15 bp, Homo sapiens
ctgatggggctgctt

SEQ ID NO: 1735484 - DNA, 15 bp, Homo sapiens
tgatggggctgcttt

SEQ ID NO: 1735485 - DNA, 15 bp, Homo sapiens
gatggggctgctttg

SEQ ID NO: 1735486 - DNA, 15 bp, Homo sapiens
atggggctgctttgt

SEQ ID NO: 1735487 - DNA, 15 bp, Homo sapiens
tggggctgctttgtg

SEQ ID NO: 1735488 - DNA, 15 bp, Homo sapiens
ggggctgctttgtgt

SEQ ID NO: 1735489 - DNA, 15 bp, Homo sapiens
gggctgctttgtgtg

SEQ ID NO: 1735490 - DNA, 15 bp, Homo sapiens
ggctgctttgtgtgc

SEQ ID NO: 1735491 - DNA, 15 bp, Homo sapiens
gctgctttgtgtgca

SEQ ID NO: 1735492 - DNA, 15 bp, Homo sapiens
ctgctttgtgtgcag

SEQ ID NO: 1735493 - DNA, 15 bp, Homo sapiens
tgctttgtgtgcagt

SEQ ID NO: 1735494 - DNA, 15 bp, Homo sapiens
gctttgtgtgcagtg

SEQ ID NO: 1735495 - DNA, 15 bp, Homo sapiens
ctttgtgtgcagtgt

SEQ ID NO: 1735496 - DNA, 15 bp, Homo sapiens
tttgtgtgcagtgtc

SEQ ID NO: 1735497 - DNA, 15 bp, Homo sapiens
ttgtgtgcagtgtca

SEQ ID NO: 1735498 - DNA, 15 bp, Homo sapiens
tgtgtgcagtgtcag

SEQ ID NO: 1735499 - DNA, 15 bp, Homo sapiens
gtgtgcagtgtcaga

SEQ ID NO: 1735500 - DNA, 15 bp, Homo sapiens
tgtgcagtgtcagag

SEQ ID NO: 1735501 - DNA, 15 bp, Homo sapiens
gtgcagtgtcagaga

SEQ ID NO: 1735502 - DNA, 15 bp, Homo sapiens
tgcagtgtcagagac

SEQ ID NO: 1735503 - DNA, 15 bp, Homo sapiens
gcagtgtcagagact

SEQ ID NO: 1735504 - DNA, 15 bp, Homo sapiens
cagtgtcagagacta

SEQ ID NO: 1735505 - DNA, 15 bp, Homo sapiens
agtgtcagagactaa

SEQ ID NO: 1735506 - DNA, 15 bp, Homo sapiens
gtgtcagagactaag

SEQ ID NO: 1735507 - DNA, 15 bp, Homo sapiens
tgtcagagactaagc

SEQ ID NO: 1735508 - DNA, 15 bp, Homo sapiens
gtcagagactaagca

SEQ ID NO: 1735509 - DNA, 15 bp, Homo sapiens
tcagagactaagcag

SEQ ID NO: 1735510 - DNA, 15 bp, Homo sapiens
cagagactaagcagg

SEQ ID NO: 1735511 - DNA, 15 bp, Homo sapiens
agagactaagcaggg

SEQ ID NO: 1735512 - DNA, 15 bp, Homo sapiens
gagactaagcagggt

SEQ ID NO: 1735513 - DNA, 15 bp, Homo sapiens
agactaagcagggtg

SEQ ID NO: 1735514 - DNA, 15 bp, Homo sapiens
gactaagcagggtgt

SEQ ID NO: 1735515 - DNA, 15 bp, Homo sapiens
actaagcagggtgtg

SEQ ID NO: 1735516 - DNA, 15 bp, Homo sapiens
ctaagcagggtgtgc

SEQ ID NO: 1735517 - DNA, 15 bp, Homo sapiens
taagcagggtgtgca

SEQ ID NO: 1735518 - DNA, 15 bp, Homo sapiens
aagcagggtgtgcag

SEQ ID NO: 1735519 - DNA, 15 bp, Homo sapiens
agcagggtgtgcagg

SEQ ID NO: 1735520 - DNA, 15 bp, Homo sapiens
gcagggtgtgcaggc

SEQ ID NO: 1735521 - DNA, 15 bp, Homo sapiens
cagggtgtgcaggca

SEQ ID NO: 1735522 - DNA, 15 bp, Homo sapiens
agggtgtgcaggcag

SEQ ID NO: 1735523 - DNA, 15 bp, Homo sapiens
gggtgtgcaggcagc

SEQ ID NO: 1735524 - DNA, 15 bp, Homo sapiens
ggtgtgcaggcagcc

SEQ ID NO: 1735525 - DNA, 15 bp, Homo sapiens
gtgtgcaggcagccg

SEQ ID NO: 1735526 - DNA, 15 bp, Homo sapiens
tgtgcaggcagccgg

SEQ ID NO: 1735527 - DNA, 15 bp, Homo sapiens
gtgcaggcagccggt

SEQ ID NO: 1735528 - DNA, 15 bp, Homo sapiens
tgcaggcagccggtg

SEQ ID NO: 1735529 - DNA, 15 bp, Homo sapiens
gcaggcagccggtgc

SEQ ID NO: 1735530 - DNA, 15 bp, Homo sapiens
caggcagccggtgca

SEQ ID NO: 1735531 - DNA, 15 bp, Homo sapiens
aggcagccggtgcac

SEQ ID NO: 1735532 - DNA, 15 bp, Homo sapiens
ggcagccggtgcaca

SEQ ID NO: 1735533 - DNA, 15 bp, Homo sapiens
gcagccggtgcacaa

SEQ ID NO: 1735534 - DNA, 15 bp, Homo sapiens
cagccggtgcacaag

SEQ ID NO: 1735535 - DNA, 15 bp, Homo sapiens
agccggtgcacaagt

SEQ ID NO: 1735536 - DNA, 15 bp, Homo sapiens
gccggtgcacaagtg

SEQ ID NO: 1735537 - DNA, 15 bp, Homo sapiens
ccggtgcacaagtga

SEQ ID NO: 1735538 - DNA, 15 bp, Homo sapiens
cggtgcacaagtgag

SEQ ID NO: 1735539 - DNA, 15 bp, Homo sapiens
ggtgcacaagtgagg

SEQ ID NO: 1735540 - DNA, 15 bp, Homo sapiens
gtgcacaagtgaggt

SEQ ID NO: 1735541 - DNA, 15 bp, Homo sapiens
tgcacaagtgaggtg

SEQ ID NO: 1735542 - DNA, 15 bp, Homo sapiens
gcacaagtgaggtga

SEQ ID NO: 1735543 - DNA, 15 bp, Homo sapiens
cacaagtgaggtgag

SEQ ID NO: 1735544 - DNA, 15 bp, Homo sapiens
acaagtgaggtgagg

SEQ ID NO: 1735545 - DNA, 15 bp, Homo sapiens
caagtgaggtgagga

SEQ ID NO: 1735546 - DNA, 15 bp, Homo sapiens
aagtgaggtgaggag

SEQ ID NO: 1735547 - DNA, 15 bp, Homo sapiens
agtgaggtgaggagg

SEQ ID NO: 1735548 - DNA, 15 bp, Homo sapiens
gtgaggtgaggaggg

SEQ ID NO: 1735549 - DNA, 15 bp, Homo sapiens
tgaggtgaggagggc

SEQ ID NO: 1735550 - DNA, 15 bp, Homo sapiens
gaggtgaggagggca

SEQ ID NO: 1735551 - DNA, 15 bp, Homo sapiens
aggtgaggagggcag

SEQ ID NO: 1735552 - DNA, 15 bp, Homo sapiens
ggtgaggagggcagc

SEQ ID NO: 1735553 - DNA, 15 bp, Homo sapiens
gtgaggagggcagcc

SEQ ID NO: 1735554 - DNA, 15 bp, Homo sapiens
tgaggagggcagcct

SEQ ID NO: 1735555 - DNA, 15 bp, Homo sapiens
gaggagggcagcctg

SEQ ID NO: 1735556 - DNA, 15 bp, Homo sapiens
aggagggcagcctgc

SEQ ID NO: 1735557 - DNA, 15 bp, Homo sapiens
ggagggcagcctgct

SEQ ID NO: 1735558 - DNA, 15 bp, Homo sapiens
gagggcagcctgctg

SEQ ID NO: 1735559 - DNA, 15 bp, Homo sapiens
agggcagcctgctgt

SEQ ID NO: 1735560 - DNA, 15 bp, Homo sapiens
gggcagcctgctgtg

SEQ ID NO: 1735561 - DNA, 15 bp, Homo sapiens
ggcagcctgctgtgg

SEQ ID NO: 1735562 - DNA, 15 bp, Homo sapiens
gcagcctgctgtggg

SEQ ID NO: 1735563 - DNA, 15 bp, Homo sapiens
cagcctgctgtgggg

SEQ ID NO: 1735564 - DNA, 15 bp, Homo sapiens
agcctgctgtgggga

SEQ ID NO: 1735565 - DNA, 15 bp, Homo sapiens
gcctgctgtggggag

SEQ ID NO: 1735566 - DNA, 15 bp, Homo sapiens
cctgctgtggggagt

SEQ ID NO: 1735567 - DNA, 15 bp, Homo sapiens
ctgctgtggggagtc

SEQ ID NO: 1735568 - DNA, 15 bp, Homo sapiens
tgctgtggggagtca

SEQ ID NO: 1735569 - DNA, 15 bp, Homo sapiens
gctgtggggagtcag

SEQ ID NO: 1735570 - DNA, 15 bp, Homo sapiens
ctgtggggagtcaga

SEQ ID NO: 1735571 - DNA, 15 bp, Homo sapiens
tgtggggagtcagaa

SEQ ID NO: 1735572 - DNA, 15 bp, Homo sapiens
gtggggagtcagaac

SEQ ID NO: 1735573 - DNA, 15 bp, Homo sapiens
tggggagtcagaacc

SEQ ID NO: 1735574 - DNA, 15 bp, Homo sapiens
ggggagtcagaaccc

SEQ ID NO: 1735575 - DNA, 15 bp, Homo sapiens
gggagtcagaaccct

SEQ ID NO: 1735576 - DNA, 15 bp, Homo sapiens
ggagtcagaaccctt

SEQ ID NO: 1735577 - DNA, 15 bp, Homo sapiens
gagtcagaacccttc

SEQ ID NO: 1735578 - DNA, 15 bp, Homo sapiens
agtcagaacccttcc

SEQ ID NO: 1735579 - DNA, 15 bp, Homo sapiens
gtcagaacccttcca

SEQ ID NO: 1735580 - DNA, 15 bp, Homo sapiens
tcagaacccttccac

SEQ ID NO: 1735581 - DNA, 15 bp, Homo sapiens
cagaacccttccaca

SEQ ID NO: 1735582 - DNA, 15 bp, Homo sapiens
agaacccttccacag

SEQ ID NO: 1735583 - DNA, 15 bp, Homo sapiens
gaacccttccacagt

SEQ ID NO: 1735584 - DNA, 15 bp, Homo sapiens
aacccttccacagtg

SEQ ID NO: 1735585 - DNA, 15 bp, Homo sapiens
acccttccacagtga

SEQ ID NO: 1735586 - DNA, 15 bp, Homo sapiens
cccttccacagtgag

SEQ ID NO: 1735587 - DNA, 15 bp, Homo sapiens
ccttccacagtgagg

SEQ ID NO: 1735588 - DNA, 15 bp, Homo sapiens
cttccacagtgagga

SEQ ID NO: 1735589 - DNA, 15 bp, Homo sapiens
ttccacagtgaggaa

SEQ ID NO: 1735590 - DNA, 15 bp, Homo sapiens
tccacagtgaggaag

SEQ ID NO: 1735591 - DNA, 15 bp, Homo sapiens
ccacagtgaggaagt

SEQ ID NO: 1735592 - DNA, 15 bp, Homo sapiens
cacagtgaggaagtg

SEQ ID NO: 1735593 - DNA, 15 bp, Homo sapiens
acagtgaggaagtgt

SEQ ID NO: 1735594 - DNA, 15 bp, Homo sapiens
cagtgaggaagtgtc

SEQ ID NO: 1735595 - DNA, 15 bp, Homo sapiens
agtgaggaagtgtct

SEQ ID NO: 1735596 - DNA, 15 bp, Homo sapiens
gtgaggaagtgtcta

SEQ ID NO: 1735597 - DNA, 15 bp, Homo sapiens
tgaggaagtgtctat

SEQ ID NO: 1735598 - DNA, 15 bp, Homo sapiens
gaggaagtgtctatg

SEQ ID NO: 1735599 - DNA, 15 bp, Homo sapiens
aggaagtgtctatgc

SEQ ID NO: 1735600 - DNA, 15 bp, Homo sapiens
ggaagtgtctatgct

SEQ ID NO: 1735601 - DNA, 15 bp, Homo sapiens
gaagtgtctatgcta

SEQ ID NO: 1735602 - DNA, 15 bp, Homo sapiens
aagtgtctatgctaa

SEQ ID NO: 1735603 - DNA, 15 bp, Homo sapiens
agtgtctatgctaag

SEQ ID NO: 1735604 - DNA, 15 bp, Homo sapiens
gtgtctatgctaagg

SEQ ID NO: 1735605 - DNA, 15 bp, Homo sapiens
tgtctatgctaaggg

SEQ ID NO: 1735606 - DNA, 15 bp, Homo sapiens
gtctatgctaagggg

SEQ ID NO: 1735607 - DNA, 15 bp, Homo sapiens
tctatgctaaggggt

SEQ ID NO: 1735608 - DNA, 15 bp, Homo sapiens
ctatgctaaggggtg

SEQ ID NO: 1735609 - DNA, 15 bp, Homo sapiens
tatgctaaggggtgg

SEQ ID NO: 1735610 - DNA, 15 bp, Homo sapiens
atgctaaggggtggg

SEQ ID NO: 1735611 - DNA, 15 bp, Homo sapiens
tgctaaggggtgggg

SEQ ID NO: 1735612 - DNA, 15 bp, Homo sapiens
gctaaggggtggggt

SEQ ID NO: 1735613 - DNA, 15 bp, Homo sapiens
ctaaggggtggggta

SEQ ID NO: 1735614 - DNA, 15 bp, Homo sapiens
taaggggtggggtaa

SEQ ID NO: 1735615 - DNA, 15 bp, Homo sapiens
aaggggtggggtaag

SEQ ID NO: 1735616 - DNA, 15 bp, Homo sapiens
aggggtggggtaagt

SEQ ID NO: 1735617 - DNA, 15 bp, Homo sapiens
ggggtggggtaagtc

SEQ ID NO: 1735618 - DNA, 15 bp, Homo sapiens
gggtggggtaagtcc

SEQ ID NO: 1735619 - DNA, 15 bp, Homo sapiens
ggtggggtaagtcca

SEQ ID NO: 1735620 - DNA, 15 bp, Homo sapiens
gtggggtaagtccag

SEQ ID NO: 1735621 - DNA, 15 bp, Homo sapiens
tggggtaagtccaga

SEQ ID NO: 1735622 - DNA, 15 bp, Homo sapiens
ggggtaagtccagaa

SEQ ID NO: 1735623 - DNA, 15 bp, Homo sapiens
gggtaagtccagaac

SEQ ID NO: 1735624 - DNA, 15 bp, Homo sapiens
ggtaagtccagaact

SEQ ID NO: 1735625 - DNA, 15 bp, Homo sapiens
gtaagtccagaactg

SEQ ID NO: 1735626 - DNA, 15 bp, Homo sapiens
taagtccagaactgg

SEQ ID NO: 1735627 - DNA, 15 bp, Homo sapiens
aagtccagaactggg

SEQ ID NO: 1735628 - DNA, 15 bp, Homo sapiens
agtccagaactggga

SEQ ID NO: 1735629 - DNA, 15 bp, Homo sapiens
gtccagaactgggag

SEQ ID NO: 1735630 - DNA, 15 bp, Homo sapiens
tccagaactgggagt

SEQ ID NO: 1735631 - DNA, 15 bp, Homo sapiens
ccagaactgggagtc

SEQ ID NO: 1735632 - DNA, 15 bp, Homo sapiens
cagaactgggagtca

SEQ ID NO: 1735633 - DNA, 15 bp, Homo sapiens
agaactgggagtcag

SEQ ID NO: 1735634 - DNA, 15 bp, Homo sapiens
gaactgggagtcagt

SEQ ID NO: 1735635 - DNA, 15 bp, Homo sapiens
aactgggagtcagtt

SEQ ID NO: 1735636 - DNA, 15 bp, Homo sapiens
actgggagtcagttc

SEQ ID NO: 1735637 - DNA, 15 bp, Homo sapiens
ctgggagtcagttct

SEQ ID NO: 1735638 - DNA, 15 bp, Homo sapiens
tgggagtcagttctg

SEQ ID NO: 1735639 - DNA, 15 bp, Homo sapiens
gggagtcagttctga

SEQ ID NO: 1735640 - DNA, 15 bp, Homo sapiens
ggagtcagttctgag

SEQ ID NO: 1735641 - DNA, 15 bp, Homo sapiens
gagtcagttctgaga

SEQ ID NO: 1735642 - DNA, 15 bp, Homo sapiens
agtcagttctgagaa

SEQ ID NO: 1735643 - DNA, 15 bp, Homo sapiens
gtcagttctgagaag

SEQ ID NO: 1735644 - DNA, 15 bp, Homo sapiens
tcagttctgagaaga

SEQ ID NO: 1735645 - DNA, 15 bp, Homo sapiens
cagttctgagaagaa

SEQ ID NO: 1735646 - DNA, 15 bp, Homo sapiens
agttctgagaagaac

SEQ ID NO: 1735647 - DNA, 15 bp, Homo sapiens
gttctgagaagaaca

SEQ ID NO: 1735648 - DNA, 15 bp, Homo sapiens
ttctgagaagaacag

SEQ ID NO: 1735649 - DNA, 15 bp, Homo sapiens
tctgagaagaacaga

SEQ ID NO: 1735650 - DNA, 15 bp, Homo sapiens
ctgagaagaacagaa

SEQ ID NO: 1735651 - DNA, 15 bp, Homo sapiens
tgagaagaacagaaa

SEQ ID NO: 1735652 - DNA, 15 bp, Homo sapiens
gagaagaacagaaaa

SEQ ID NO: 1735653 - DNA, 15 bp, Homo sapiens
agaagaacagaaaag

SEQ ID NO: 1735654 - DNA, 15 bp, Homo sapiens
gaagaacagaaaagt

SEQ ID NO: 1735655 - DNA, 15 bp, Homo sapiens
aagaacagaaaagtg

SEQ ID NO: 1735656 - DNA, 15 bp, Homo sapiens
agaacagaaaagtgt

SEQ ID NO: 1735657 - DNA, 15 bp, Homo sapiens
gaacagaaaagtgtc

SEQ ID NO: 1735658 - DNA, 15 bp, Homo sapiens
aacagaaaagtgtcc

SEQ ID NO: 1735659 - DNA, 15 bp, Homo sapiens
acagaaaagtgtcca

SEQ ID NO: 1735660 - DNA, 15 bp, Homo sapiens
cagaaaagtgtccac

SEQ ID NO: 1735661 - DNA, 15 bp, Homo sapiens
agaaaagtgtccaca

SEQ ID NO: 1735662 - DNA, 15 bp, Homo sapiens
gaaaagtgtccacac

SEQ ID NO: 1735663 - DNA, 15 bp, Homo sapiens
aaaagtgtccacacg

SEQ ID NO: 1735664 - DNA, 15 bp, Homo sapiens
aaagtgtccacacgg

SEQ ID NO: 1735665 - DNA, 15 bp, Homo sapiens
aagtgtccacacggg

SEQ ID NO: 1735666 - DNA, 15 bp, Homo sapiens
agtgtccacacgggg

SEQ ID NO: 1735667 - DNA, 15 bp, Homo sapiens
gtgtccacacggggg

SEQ ID NO: 1735668 - DNA, 15 bp, Homo sapiens
tgtccacacggggga

SEQ ID NO: 1735669 - DNA, 15 bp, Homo sapiens
gtccacacgggggag

SEQ ID NO: 1735670 - DNA, 15 bp, Homo sapiens
tccacacgggggagg

SEQ ID NO: 1735671 - DNA, 15 bp, Homo sapiens
ccacacgggggaggg

SEQ ID NO: 1735672 - DNA, 15 bp, Homo sapiens
cacacgggggagggg

SEQ ID NO: 1735673 - DNA, 15 bp, Homo sapiens
acacgggggaggggg

SEQ ID NO: 1735674 - DNA, 15 bp, Homo sapiens
cacgggggagggggt

SEQ ID NO: 1735675 - DNA, 15 bp, Homo sapiens
acgggggagggggtg

SEQ ID NO: 1735676 - DNA, 15 bp, Homo sapiens
cgggggagggggtgg

SEQ ID NO: 1735677 - DNA, 15 bp, Homo sapiens
gggggagggggtggc

SEQ ID NO: 1735678 - DNA, 15 bp, Homo sapiens
ggggagggggtggct

SEQ ID NO: 1735679 - DNA, 15 bp, Homo sapiens
gggagggggtggctt

SEQ ID NO: 1735680 - DNA, 15 bp, Homo sapiens
ggagggggtggcttt

SEQ ID NO: 1735681 - DNA, 15 bp, Homo sapiens
gagggggtggctttg

SEQ ID NO: 1735682 - DNA, 15 bp, Homo sapiens
agggggtggctttgg

SEQ ID NO: 1735683 - DNA, 15 bp, Homo sapiens
gggggtggctttgga

SEQ ID NO: 1735684 - DNA, 15 bp, Homo sapiens
ggggtggctttggag

SEQ ID NO: 1735685 - DNA, 15 bp, Homo sapiens
gggtggctttggaga

SEQ ID NO: 1735686 - DNA, 15 bp, Homo sapiens
ggtggctttggagat

SEQ ID NO: 1735687 - DNA, 15 bp, Homo sapiens
gtggctttggagata

SEQ ID NO: 1735688 - DNA, 15 bp, Homo sapiens
tggctttggagatag

SEQ ID NO: 1735689 - DNA, 15 bp, Homo sapiens
ggctttggagataga

SEQ ID NO: 1735690 - DNA, 15 bp, Homo sapiens
gctttggagatagaa

SEQ ID NO: 1735691 - DNA, 15 bp, Homo sapiens
ctttggagatagaaa

SEQ ID NO: 1735692 - DNA, 15 bp, Homo sapiens
tttggagatagaaaa

SEQ ID NO: 1735693 - DNA, 15 bp, Homo sapiens
ttggagatagaaaat

SEQ ID NO: 1735694 - DNA, 15 bp, Homo sapiens
tggagatagaaaatg

SEQ ID NO: 1735695 - DNA, 15 bp, Homo sapiens
ggagatagaaaatgg

SEQ ID NO: 1735696 - DNA, 15 bp, Homo sapiens
gagatagaaaatggt

SEQ ID NO: 1735697 - DNA, 15 bp, Homo sapiens
agatagaaaatggtt

SEQ ID NO: 1735698 - DNA, 15 bp, Homo sapiens
gatagaaaatggtta

SEQ ID NO: 1735699 - DNA, 15 bp, Homo sapiens
atagaaaatggttac

SEQ ID NO: 1735700 - DNA, 15 bp, Homo sapiens
tagaaaatggttact

SEQ ID NO: 1735701 - DNA, 15 bp, Homo sapiens
agaaaatggttactt

SEQ ID NO: 1735702 - DNA, 15 bp, Homo sapiens
gaaaatggttactta

SEQ ID NO: 1735703 - DNA, 15 bp, Homo sapiens
aaaatggttacttac

SEQ ID NO: 1735704 - DNA, 15 bp, Homo sapiens
aaatggttacttaca

SEQ ID NO: 1735705 - DNA, 15 bp, Homo sapiens
aatggttacttacag

SEQ ID NO: 1735706 - DNA, 15 bp, Homo sapiens
atggttacttacagg

SEQ ID NO: 1735707 - DNA, 15 bp, Homo sapiens
tggttacttacaggg

SEQ ID NO: 1735708 - DNA, 15 bp, Homo sapiens
ggttacttacagggg

SEQ ID NO: 1735709 - DNA, 15 bp, Homo sapiens
gttacttacaggggg

SEQ ID NO: 1735710 - DNA, 15 bp, Homo sapiens
ttacttacaggggga

SEQ ID NO: 1735711 - DNA, 15 bp, Homo sapiens
tacttacagggggat

SEQ ID NO: 1735712 - DNA, 15 bp, Homo sapiens
acttacagggggatt

SEQ ID NO: 1735713 - DNA, 15 bp, Homo sapiens
cttacagggggattg

SEQ ID NO: 1735714 - DNA, 15 bp, Homo sapiens
ttacagggggattga

SEQ ID NO: 1735715 - DNA, 15 bp, Homo sapiens
tacagggggattgat

SEQ ID NO: 1735716 - DNA, 15 bp, Homo sapiens
acagggggattgatt

SEQ ID NO: 1735717 - DNA, 15 bp, Homo sapiens
cagggggattgatta

SEQ ID NO: 1735718 - DNA, 15 bp, Homo sapiens
agggggattgattaa

SEQ ID NO: 1735719 - DNA, 15 bp, Homo sapiens
gggggattgattaaa

SEQ ID NO: 1735720 - DNA, 15 bp, Homo sapiens
ggggattgattaaat

SEQ ID NO: 1735721 - DNA, 15 bp, Homo sapiens
gggattgattaaatg

SEQ ID NO: 1735722 - DNA, 15 bp, Homo sapiens
ggattgattaaatga

SEQ ID NO: 1735723 - DNA, 15 bp, Homo sapiens
gattgattaaatgag

SEQ ID NO: 1735724 - DNA, 15 bp, Homo sapiens
attgattaaatgagt

SEQ ID NO: 1735725 - DNA, 15 bp, Homo sapiens
ttgattaaatgagta

SEQ ID NO: 1735726 - DNA, 15 bp, Homo sapiens
tgattaaatgagtaa

SEQ ID NO: 1735727 - DNA, 15 bp, Homo sapiens
gattaaatgagtaag

SEQ ID NO: 1735728 - DNA, 15 bp, Homo sapiens
attaaatgagtaagt

SEQ ID NO: 1735729 - DNA, 15 bp, Homo sapiens
ttaaatgagtaagta

SEQ ID NO: 1735730 - DNA, 15 bp, Homo sapiens
taaatgagtaagtaa

SEQ ID NO: 1735731 - DNA, 15 bp, Homo sapiens
aaatgagtaagtaaa

SEQ ID NO: 1735732 - DNA, 15 bp, Homo sapiens
aatgagtaagtaaac

SEQ ID NO: 1735733 - DNA, 15 bp, Homo sapiens
atgagtaagtaaact

SEQ ID NO: 1735734 - DNA, 15 bp, Homo sapiens
tgagtaagtaaactg

SEQ ID NO: 1735735 - DNA, 15 bp, Homo sapiens
gagtaagtaaactga

SEQ ID NO: 1735736 - DNA, 15 bp, Homo sapiens
agtaagtaaactgag

SEQ ID NO: 1735737 - DNA, 15 bp, Homo sapiens
gtaagtaaactgagg

SEQ ID NO: 1735738 - DNA, 15 bp, Homo sapiens
taagtaaactgagga

SEQ ID NO: 1735739 - DNA, 15 bp, Homo sapiens
aagtaaactgaggat

SEQ ID NO: 1735740 - DNA, 15 bp, Homo sapiens
agtaaactgaggatg

SEQ ID NO: 1735741 - DNA, 15 bp, Homo sapiens
gtaaactgaggatga

SEQ ID NO: 1735742 - DNA, 15 bp, Homo sapiens
taaactgaggatgaa

SEQ ID NO: 1735743 - DNA, 15 bp, Homo sapiens
aaactgaggatgaat

SEQ ID NO: 1735744 - DNA, 15 bp, Homo sapiens
aactgaggatgaatg

SEQ ID NO: 1735745 - DNA, 15 bp, Homo sapiens
actgaggatgaatgg

SEQ ID NO: 1735746 - DNA, 15 bp, Homo sapiens
ctgaggatgaatggg

SEQ ID NO: 1735747 - DNA, 15 bp, Homo sapiens
tgaggatgaatgggt

SEQ ID NO: 1735748 - DNA, 15 bp, Homo sapiens
gaggatgaatgggtt

SEQ ID NO: 1735749 - DNA, 15 bp, Homo sapiens
aggatgaatgggttc

SEQ ID NO: 1735750 - DNA, 15 bp, Homo sapiens
ggatgaatgggttcc

SEQ ID NO: 1735751 - DNA, 15 bp, Homo sapiens
gatgaatgggttcca

SEQ ID NO: 1735752 - DNA, 15 bp, Homo sapiens
atgaatgggttccag

SEQ ID NO: 1735753 - DNA, 15 bp, Homo sapiens
tgaatgggttccagg

SEQ ID NO: 1735754 - DNA, 15 bp, Homo sapiens
gaatgggttccaggt

SEQ ID NO: 1735755 - DNA, 15 bp, Homo sapiens
aatgggttccaggtt

SEQ ID NO: 1735756 - DNA, 15 bp, Homo sapiens
atgggttccaggttt

SEQ ID NO: 1735757 - DNA, 15 bp, Homo sapiens
tgggttccaggtttc

SEQ ID NO: 1735758 - DNA, 15 bp, Homo sapiens
gggttccaggtttcc

SEQ ID NO: 1735759 - DNA, 15 bp, Homo sapiens
ggttccaggtttccc

SEQ ID NO: 1735760 - DNA, 15 bp, Homo sapiens
gttccaggtttccca

SEQ ID NO: 1735761 - DNA, 15 bp, Homo sapiens
ttccaggtttcccac

SEQ ID NO: 1735762 - DNA, 15 bp, Homo sapiens
tccaggtttcccact

SEQ ID NO: 1735763 - DNA, 15 bp, Homo sapiens
ccaggtttcccactg

SEQ ID NO: 1735764 - DNA, 15 bp, Homo sapiens
caggtttcccactgt

SEQ ID NO: 1735765 - DNA, 15 bp, Homo sapiens
aggtttcccactgtc

SEQ ID NO: 1735766 - DNA, 15 bp, Homo sapiens
ggtttcccactgtca

SEQ ID NO: 1735767 - DNA, 15 bp, Homo sapiens
gtttcccactgtcaa

SEQ ID NO: 1735768 - DNA, 15 bp, Homo sapiens
tttcccactgtcaat

SEQ ID NO: 1735769 - DNA, 15 bp, Homo sapiens
ttcccactgtcaatg

SEQ ID NO: 1735770 - DNA, 15 bp, Homo sapiens
tcccactgtcaatga

SEQ ID NO: 1735771 - DNA, 15 bp, Homo sapiens
cccactgtcaatgaa

SEQ ID NO: 1735772 - DNA, 15 bp, Homo sapiens
ccactgtcaatgaag

SEQ ID NO: 1735773 - DNA, 15 bp, Homo sapiens
cactgtcaatgaaga

SEQ ID NO: 1735774 - DNA, 15 bp, Homo sapiens
actgtcaatgaagag

SEQ ID NO: 1735775 - DNA, 15 bp, Homo sapiens
ctgtcaatgaagagt

SEQ ID NO: 1735776 - DNA, 15 bp, Homo sapiens
tgtcaatgaagagtt

SEQ ID NO: 1735777 - DNA, 15 bp, Homo sapiens
gtcaatgaagagtta

SEQ ID NO: 1735778 - DNA, 15 bp, Homo sapiens
tcaatgaagagttac

SEQ ID NO: 1735779 - DNA, 15 bp, Homo sapiens
caatgaagagttaca

SEQ ID NO: 1735780 - DNA, 15 bp, Homo sapiens
aatgaagagttacaa

SEQ ID NO: 1735781 - DNA, 15 bp, Homo sapiens
atgaagagttacaaa

SEQ ID NO: 1735782 - DNA, 15 bp, Homo sapiens
tgaagagttacaaat

SEQ ID NO: 1735783 - DNA, 15 bp, Homo sapiens
gaagagttacaaata

SEQ ID NO: 1735784 - DNA, 15 bp, Homo sapiens
aagagttacaaatat

SEQ ID NO: 1735785 - DNA, 15 bp, Homo sapiens
agagttacaaatata

SEQ ID NO: 1735786 - DNA, 15 bp, Homo sapiens
gagttacaaatatag

SEQ ID NO: 1735787 - DNA, 15 bp, Homo sapiens
agttacaaatataga

SEQ ID NO: 1735788 - DNA, 15 bp, Homo sapiens
gttacaaatatagaa

SEQ ID NO: 1735789 - DNA, 15 bp, Homo sapiens
ttacaaatatagaaa

SEQ ID NO: 1735790 - DNA, 15 bp, Homo sapiens
tacaaatatagaaag

SEQ ID NO: 1735791 - DNA, 15 bp, Homo sapiens
acaaatatagaaagg

SEQ ID NO: 1735792 - DNA, 15 bp, Homo sapiens
caaatatagaaaggg

SEQ ID NO: 1735793 - DNA, 15 bp, Homo sapiens
aaatatagaaaggga

SEQ ID NO: 1735794 - DNA, 15 bp, Homo sapiens
aatatagaaagggaa

SEQ ID NO: 1735795 - DNA, 15 bp, Homo sapiens
atatagaaagggaaa

SEQ ID NO: 1735796 - DNA, 15 bp, Homo sapiens
tatagaaagggaaac

SEQ ID NO: 1735797 - DNA, 15 bp, Homo sapiens
atagaaagggaaaca

SEQ ID NO: 1735798 - DNA, 15 bp, Homo sapiens
tagaaagggaaacac

SEQ ID NO: 1735799 - DNA, 15 bp, Homo sapiens
agaaagggaaacact

SEQ ID NO: 1735800 - DNA, 15 bp, Homo sapiens
gaaagggaaacacta

SEQ ID NO: 1735801 - DNA, 15 bp, Homo sapiens
aaagggaaacactaa

SEQ ID NO: 1735802 - DNA, 15 bp, Homo sapiens
aagggaaacactaaa

SEQ ID NO: 1735803 - DNA, 15 bp, Homo sapiens
agggaaacactaaaa

SEQ ID NO: 1735804 - DNA, 15 bp, Homo sapiens
gggaaacactaaaat

SEQ ID NO: 1735805 - DNA, 15 bp, Homo sapiens
ggaaacactaaaatg

SEQ ID NO: 1735806 - DNA, 15 bp, Homo sapiens
gaaacactaaaatga

SEQ ID NO: 1735807 - DNA, 15 bp, Homo sapiens
aaacactaaaatgaa

SEQ ID NO: 1735808 - DNA, 15 bp, Homo sapiens
aacactaaaatgaag

SEQ ID NO: 1735809 - DNA, 15 bp, Homo sapiens
acactaaaatgaagc

SEQ ID NO: 1735810 - DNA, 15 bp, Homo sapiens
cactaaaatgaagca

SEQ ID NO: 1735811 - DNA, 15 bp, Homo sapiens
actaaaatgaagcat

SEQ ID NO: 1735812 - DNA, 15 bp, Homo sapiens
ctaaaatgaagcata

SEQ ID NO: 1735813 - DNA, 15 bp, Homo sapiens
taaaatgaagcatat

SEQ ID NO: 1735814 - DNA, 15 bp, Homo sapiens
aaaatgaagcatatg

SEQ ID NO: 1735815 - DNA, 15 bp, Homo sapiens
aaatgaagcatatgg

SEQ ID NO: 1735816 - DNA, 15 bp, Homo sapiens
aatgaagcatatggt

SEQ ID NO: 1735817 - DNA, 15 bp, Homo sapiens
atgaagcatatggtt

SEQ ID NO: 1735818 - DNA, 15 bp, Homo sapiens
tgaagcatatggttt

SEQ ID NO: 1735819 - DNA, 15 bp, Homo sapiens
gaagcatatggtttt

SEQ ID NO: 1735820 - DNA, 15 bp, Homo sapiens
aagcatatggtttta

SEQ ID NO: 1735821 - DNA, 15 bp, Homo sapiens
agcatatggttttat

SEQ ID NO: 1735822 - DNA, 15 bp, Homo sapiens
gcatatggttttata

SEQ ID NO: 1735823 - DNA, 15 bp, Homo sapiens
catatggttttatat

SEQ ID NO: 1735824 - DNA, 15 bp, Homo sapiens
atatggttttatatt

SEQ ID NO: 1735825 - DNA, 15 bp, Homo sapiens
tatggttttatattg

SEQ ID NO: 1735826 - DNA, 15 bp, Homo sapiens
atggttttatattgg

SEQ ID NO: 1735827 - DNA, 15 bp, Homo sapiens
tggttttatattgga

SEQ ID NO: 1735828 - DNA, 15 bp, Homo sapiens
ggttttatattggaa

SEQ ID NO: 1735829 - DNA, 15 bp, Homo sapiens
gttttatattggaat

SEQ ID NO: 1735830 - DNA, 15 bp, Homo sapiens
ttttatattggaatt

SEQ ID NO: 1735831 - DNA, 15 bp, Homo sapiens
tttatattggaattg

SEQ ID NO: 1735832 - DNA, 15 bp, Homo sapiens
ttatattggaattgg

SEQ ID NO: 1735833 - DNA, 15 bp, Homo sapiens
tatattggaattgga

SEQ ID NO: 1735834 - DNA, 15 bp, Homo sapiens
atattggaattggat

SEQ ID NO: 1735835 - DNA, 15 bp, Homo sapiens
tattggaattggatg

SEQ ID NO: 1735836 - DNA, 15 bp, Homo sapiens
attggaattggatga

SEQ ID NO: 1735837 - DNA, 15 bp, Homo sapiens
ttggaattggatgaa

SEQ ID NO: 1735838 - DNA, 15 bp, Homo sapiens
tggaattggatgaat

SEQ ID NO: 1735839 - DNA, 15 bp, Homo sapiens
ggaattggatgaatg

SEQ ID NO: 1735840 - DNA, 15 bp, Homo sapiens
gaattggatgaatgg

SEQ ID NO: 1735841 - DNA, 15 bp, Homo sapiens
aattggatgaatgga

SEQ ID NO: 1735842 - DNA, 15 bp, Homo sapiens
attggatgaatggat

SEQ ID NO: 1735843 - DNA, 15 bp, Homo sapiens
ttggatgaatggatg

SEQ ID NO: 1735844 - DNA, 15 bp, Homo sapiens
tggatgaatggatgt

SEQ ID NO: 1735845 - DNA, 15 bp, Homo sapiens
ggatgaatggatgtg

SEQ ID NO: 1735846 - DNA, 15 bp, Homo sapiens
gatgaatggatgtga

SEQ ID NO: 1735847 - DNA, 15 bp, Homo sapiens
atgaatggatgtgaa

SEQ ID NO: 1735848 - DNA, 15 bp, Homo sapiens
tgaatggatgtgaac

SEQ ID NO: 1735849 - DNA, 15 bp, Homo sapiens
gaatggatgtgaact

SEQ ID NO: 1735850 - DNA, 15 bp, Homo sapiens
aatggatgtgaactc

SEQ ID NO: 1735851 - DNA, 15 bp, Homo sapiens
atggatgtgaactca

SEQ ID NO: 1735852 - DNA, 15 bp, Homo sapiens
tggatgtgaactcat

SEQ ID NO: 1735853 - DNA, 15 bp, Homo sapiens
ggatgtgaactcatg

SEQ ID NO: 1735854 - DNA, 15 bp, Homo sapiens
gatgtgaactcatgt

SEQ ID NO: 1735855 - DNA, 15 bp, Homo sapiens
atgtgaactcatgtt

SEQ ID NO: 1735856 - DNA, 15 bp, Homo sapiens
tgtgaactcatgttt

SEQ ID NO: 1735857 - DNA, 15 bp, Homo sapiens
gtgaactcatgtttt

SEQ ID NO: 1735858 - DNA, 15 bp, Homo sapiens
tgaactcatgttttt

SEQ ID NO: 1735859 - DNA, 15 bp, Homo sapiens
gaactcatgtttttt

SEQ ID NO: 1735860 - DNA, 15 bp, Homo sapiens
aactcatgtttttta

SEQ ID NO: 1735861 - DNA, 15 bp, Homo sapiens
actcatgttttttaa

SEQ ID NO: 1735862 - DNA, 15 bp, Homo sapiens
ctcatgttttttaaa

SEQ ID NO: 1735863 - DNA, 15 bp, Homo sapiens
tcatgttttttaaaa

SEQ ID NO: 1735864 - DNA, 15 bp, Homo sapiens
catgttttttaaaac

SEQ ID NO: 1735865 - DNA, 15 bp, Homo sapiens
atgttttttaaaaca

SEQ ID NO: 1735866 - DNA, 15 bp, Homo sapiens
tgttttttaaaacac

SEQ ID NO: 1735867 - DNA, 15 bp, Homo sapiens
gttttttaaaacaca

SEQ ID NO: 1735868 - DNA, 15 bp, Homo sapiens
ttttttaaaacacat

SEQ ID NO: 1735869 - DNA, 15 bp, Homo sapiens
tttttaaaacacata

SEQ ID NO: 1735870 - DNA, 15 bp, Homo sapiens
ttttaaaacacatag

SEQ ID NO: 1735871 - DNA, 15 bp, Homo sapiens
tttaaaacacataga

SEQ ID NO: 1735872 - DNA, 15 bp, Homo sapiens
ttaaaacacatagac

SEQ ID NO: 1735873 - DNA, 15 bp, Homo sapiens
taaaacacatagaca

SEQ ID NO: 1735874 - DNA, 15 bp, Homo sapiens
aaaacacatagacag

SEQ ID NO: 1735875 - DNA, 15 bp, Homo sapiens
aaacacatagacaga

SEQ ID NO: 1735876 - DNA, 15 bp, Homo sapiens
aacacatagacagat

SEQ ID NO: 1735877 - DNA, 15 bp, Homo sapiens
acacatagacagata

SEQ ID NO: 1735878 - DNA, 15 bp, Homo sapiens
cacatagacagatac

SEQ ID NO: 1735879 - DNA, 15 bp, Homo sapiens
acatagacagataca

SEQ ID NO: 1735880 - DNA, 15 bp, Homo sapiens
catagacagatacag

SEQ ID NO: 1735881 - DNA, 15 bp, Homo sapiens
atagacagatacaga

SEQ ID NO: 1735882 - DNA, 15 bp, Homo sapiens
tagacagatacagaa

SEQ ID NO: 1735883 - DNA, 15 bp, Homo sapiens
agacagatacagaat

SEQ ID NO: 1735884 - DNA, 15 bp, Homo sapiens
gacagatacagaata

SEQ ID NO: 1735885 - DNA, 15 bp, Homo sapiens
acagatacagaataa

SEQ ID NO: 1735886 - DNA, 15 bp, Homo sapiens
cagatacagaataaa

SEQ ID NO: 1735887 - DNA, 15 bp, Homo sapiens
agatacagaataaat

SEQ ID NO: 1735888 - DNA, 15 bp, Homo sapiens
gatacagaataaata

SEQ ID NO: 1735889 - DNA, 15 bp, Homo sapiens
atacagaataaatat

SEQ ID NO: 1735890 - DNA, 15 bp, Homo sapiens
tacagaataaatata

SEQ ID NO: 1735891 - DNA, 15 bp, Homo sapiens
acagaataaatatac

SEQ ID NO: 1735892 - DNA, 15 bp, Homo sapiens
cagaataaatatacg

SEQ ID NO: 1735893 - DNA, 15 bp, Homo sapiens
agaataaatatacgc

SEQ ID NO: 1735894 - DNA, 15 bp, Homo sapiens
gaataaatatacgca

SEQ ID NO: 1735895 - DNA, 15 bp, Homo sapiens
aataaatatacgcat

SEQ ID NO: 1735896 - DNA, 15 bp, Homo sapiens
ataaatatacgcata

SEQ ID NO: 1735897 - DNA, 15 bp, Homo sapiens
taaatatacgcatat

SEQ ID NO: 1735898 - DNA, 15 bp, Homo sapiens
aaatatacgcatatc

SEQ ID NO: 1735899 - DNA, 15 bp, Homo sapiens
aatatacgcatatct

SEQ ID NO: 1735900 - DNA, 15 bp, Homo sapiens
atatacgcatatctc

SEQ ID NO: 1735901 - DNA, 15 bp, Homo sapiens
tatacgcatatctct

SEQ ID NO: 1735902 - DNA, 15 bp, Homo sapiens
atacgcatatctctt

SEQ ID NO: 1735903 - DNA, 15 bp, Homo sapiens
tacgcatatctcttc

SEQ ID NO: 1735904 - DNA, 15 bp, Homo sapiens
acgcatatctcttct

SEQ ID NO: 1735905 - DNA, 15 bp, Homo sapiens
cgcatatctcttctt

SEQ ID NO: 1735906 - DNA, 15 bp, Homo sapiens
gcatatctcttcttg

SEQ ID NO: 1735907 - DNA, 15 bp, Homo sapiens
catatctcttcttga

SEQ ID NO: 1735908 - DNA, 15 bp, Homo sapiens
atatctcttcttgac

SEQ ID NO: 1735909 - DNA, 15 bp, Homo sapiens
tatctcttcttgacc

SEQ ID NO: 1735910 - DNA, 15 bp, Homo sapiens
atctcttcttgaccc

SEQ ID NO: 1735911 - DNA, 15 bp, Homo sapiens
tctcttcttgaccct

SEQ ID NO: 1735912 - DNA, 15 bp, Homo sapiens
ctcttcttgaccctt

SEQ ID NO: 1735913 - DNA, 15 bp, Homo sapiens
tcttcttgacccttc

SEQ ID NO: 1735914 - DNA, 15 bp, Homo sapiens
cttcttgacccttcg

SEQ ID NO: 1735915 - DNA, 15 bp, Homo sapiens
ttcttgacccttcgt

SEQ ID NO: 1735916 - DNA, 15 bp, Homo sapiens
tcttgacccttcgtt

SEQ ID NO: 1735917 - DNA, 15 bp, Homo sapiens
cttgacccttcgttt

SEQ ID NO: 1735918 - DNA, 15 bp, Homo sapiens
ttgacccttcgtttt

SEQ ID NO: 1735919 - DNA, 15 bp, Homo sapiens
tgacccttcgttttc

SEQ ID NO: 1735920 - DNA, 15 bp, Homo sapiens
gacccttcgttttct

SEQ ID NO: 1735921 - DNA, 15 bp, Homo sapiens
acccttcgttttctt

SEQ ID NO: 1735922 - DNA, 15 bp, Homo sapiens
cccttcgttttctta

SEQ ID NO: 1735923 - DNA, 15 bp, Homo sapiens
ccttcgttttcttat

SEQ ID NO: 1735924 - DNA, 15 bp, Homo sapiens
cttcgttttcttata

SEQ ID NO: 1735925 - DNA, 15 bp, Homo sapiens
ttcgttttcttatat

SEQ ID NO: 1735926 - DNA, 15 bp, Homo sapiens
tcgttttcttatatt

SEQ ID NO: 1735927 - DNA, 15 bp, Homo sapiens
cgttttcttatattc

SEQ ID NO: 1735928 - DNA, 15 bp, Homo sapiens
gttttcttatattct

SEQ ID NO: 1735929 - DNA, 15 bp, Homo sapiens
ttttcttatattctc

SEQ ID NO: 1735930 - DNA, 15 bp, Homo sapiens
tttcttatattctca

SEQ ID NO: 1735931 - DNA, 15 bp, Homo sapiens
ttcttatattctcaa

SEQ ID NO: 1735932 - DNA, 15 bp, Homo sapiens
tcttatattctcaat

SEQ ID NO: 1735933 - DNA, 15 bp, Homo sapiens
cttatattctcaatg

SEQ ID NO: 1735934 - DNA, 15 bp, Homo sapiens
ttatattctcaatga

SEQ ID NO: 1735935 - DNA, 15 bp, Homo sapiens
tatattctcaatgat

SEQ ID NO: 1735936 - DNA, 15 bp, Homo sapiens
atattctcaatgatg

SEQ ID NO: 1735937 - DNA, 15 bp, Homo sapiens
tattctcaatgatga

SEQ ID NO: 1735938 - DNA, 15 bp, Homo sapiens
attctcaatgatgaa

SEQ ID NO: 1735939 - DNA, 15 bp, Homo sapiens
ttctcaatgatgaat

SEQ ID NO: 1735940 - DNA, 15 bp, Homo sapiens
tctcaatgatgaata

SEQ ID NO: 1735941 - DNA, 15 bp, Homo sapiens
ctcaatgatgaatag

SEQ ID NO: 1735942 - DNA, 15 bp, Homo sapiens
tcaatgatgaataga

SEQ ID NO: 1735943 - DNA, 15 bp, Homo sapiens
caatgatgaatagat

SEQ ID NO: 1735944 - DNA, 15 bp, Homo sapiens
aatgatgaatagata

SEQ ID NO: 1735945 - DNA, 15 bp, Homo sapiens
atgatgaatagatat

SEQ ID NO: 1735946 - DNA, 15 bp, Homo sapiens
tgatgaatagatata

SEQ ID NO: 1735947 - DNA, 15 bp, Homo sapiens
gatgaatagatataa

SEQ ID NO: 1735948 - DNA, 15 bp, Homo sapiens
atgaatagatataag

SEQ ID NO: 1735949 - DNA, 15 bp, Homo sapiens
tgaatagatataagc

SEQ ID NO: 1735950 - DNA, 15 bp, Homo sapiens
gaatagatataagca

SEQ ID NO: 1735951 - DNA, 15 bp, Homo sapiens
aatagatataagcat

SEQ ID NO: 1735952 - DNA, 15 bp, Homo sapiens
atagatataagcata

SEQ ID NO: 1735953 - DNA, 15 bp, Homo sapiens
tagatataagcatag

SEQ ID NO: 1735954 - DNA, 15 bp, Homo sapiens
agatataagcatagg

SEQ ID NO: 1735955 - DNA, 15 bp, Homo sapiens
gatataagcataggt

SEQ ID NO: 1735956 - DNA, 15 bp, Homo sapiens
atataagcataggta

SEQ ID NO: 1735957 - DNA, 15 bp, Homo sapiens
tataagcataggtat

SEQ ID NO: 1735958 - DNA, 15 bp, Homo sapiens
ataagcataggtata

SEQ ID NO: 1735959 - DNA, 15 bp, Homo sapiens
taagcataggtatat

SEQ ID NO: 1735960 - DNA, 15 bp, Homo sapiens
aagcataggtatata

SEQ ID NO: 1735961 - DNA, 15 bp, Homo sapiens
agcataggtatatag

SEQ ID NO: 1735962 - DNA, 15 bp, Homo sapiens
gcataggtatataga

SEQ ID NO: 1735963 - DNA, 15 bp, Homo sapiens
cataggtatatagat

SEQ ID NO: 1735964 - DNA, 15 bp, Homo sapiens
ataggtatatagata

SEQ ID NO: 1735965 - DNA, 15 bp, Homo sapiens
taggtatatagataa

SEQ ID NO: 1735966 - DNA, 15 bp, Homo sapiens
aggtatatagataat

SEQ ID NO: 1735967 - DNA, 15 bp, Homo sapiens
ggtatatagataata

SEQ ID NO: 1735968 - DNA, 15 bp, Homo sapiens
gtatatagataatag

SEQ ID NO: 1735969 - DNA, 15 bp, Homo sapiens
tatatagataataga

SEQ ID NO: 1735970 - DNA, 15 bp, Homo sapiens
atatagataatagag

SEQ ID NO: 1735971 - DNA, 15 bp, Homo sapiens
tatagataatagagg

SEQ ID NO: 1735972 - DNA, 15 bp, Homo sapiens
atagataatagaggt

SEQ ID NO: 1735973 - DNA, 15 bp, Homo sapiens
tagataatagaggtg

SEQ ID NO: 1735974 - DNA, 15 bp, Homo sapiens
agataatagaggtgt

SEQ ID NO: 1735975 - DNA, 15 bp, Homo sapiens
gataatagaggtgta

SEQ ID NO: 1735976 - DNA, 15 bp, Homo sapiens
ataatagaggtgtaa

SEQ ID NO: 1735977 - DNA, 15 bp, Homo sapiens
taatagaggtgtaag

SEQ ID NO: 1735978 - DNA, 15 bp, Homo sapiens
aatagaggtgtaagt

SEQ ID NO: 1735979 - DNA, 15 bp, Homo sapiens
atagaggtgtaagtt

SEQ ID NO: 1735980 - DNA, 15 bp, Homo sapiens
tagaggtgtaagttg

SEQ ID NO: 1735981 - DNA, 15 bp, Homo sapiens
agaggtgtaagttga

SEQ ID NO: 1735982 - DNA, 15 bp, Homo sapiens
gaggtgtaagttgaa

SEQ ID NO: 1735983 - DNA, 15 bp, Homo sapiens
aggtgtaagttgaag

SEQ ID NO: 1735984 - DNA, 15 bp, Homo sapiens
ggtgtaagttgaagg

SEQ ID NO: 1735985 - DNA, 15 bp, Homo sapiens
gtgtaagttgaaggc

SEQ ID NO: 1735986 - DNA, 15 bp, Homo sapiens
tgtaagttgaaggct

SEQ ID NO: 1735987 - DNA, 15 bp, Homo sapiens
gtaagttgaaggcta

SEQ ID NO: 1735988 - DNA, 15 bp, Homo sapiens
taagttgaaggctaa

SEQ ID NO: 1735989 - DNA, 15 bp, Homo sapiens
aagttgaaggctaat

SEQ ID NO: 1735990 - DNA, 15 bp, Homo sapiens
agttgaaggctaatt

SEQ ID NO: 1735991 - DNA, 15 bp, Homo sapiens
gttgaaggctaatta

SEQ ID NO: 1735992 - DNA, 15 bp, Homo sapiens
ttgaaggctaattat

SEQ ID NO: 1735993 - DNA, 15 bp, Homo sapiens
tgaaggctaattatt

SEQ ID NO: 1735994 - DNA, 15 bp, Homo sapiens
gaaggctaattattt

SEQ ID NO: 1735995 - DNA, 15 bp, Homo sapiens
aaggctaattatttt

SEQ ID NO: 1735996 - DNA, 15 bp, Homo sapiens
aggctaattattttt

SEQ ID NO: 1735997 - DNA, 15 bp, Homo sapiens
ggctaattatttttg

SEQ ID NO: 1735998 - DNA, 15 bp, Homo sapiens
gctaattatttttgc

SEQ ID NO: 1735999 - DNA, 15 bp, Homo sapiens
ctaattatttttgca

SEQ ID NO: 1736000 - DNA, 15 bp, Homo sapiens
taattatttttgcaa

SEQ ID NO: 1736001 - DNA, 15 bp, Homo sapiens
aattatttttgcaaa

SEQ ID NO: 1736002 - DNA, 15 bp, Homo sapiens
attatttttgcaaaa

SEQ ID NO: 1736003 - DNA, 15 bp, Homo sapiens
ttatttttgcaaaaa

SEQ ID NO: 1736004 - DNA, 15 bp, Homo sapiens
tatttttgcaaaaag

SEQ ID NO: 1736005 - DNA, 15 bp, Homo sapiens
atttttgcaaaaagt

SEQ ID NO: 1736006 - DNA, 15 bp, Homo sapiens
tttttgcaaaaagta

SEQ ID NO: 1736007 - DNA, 15 bp, Homo sapiens
ttttgcaaaaagtaa

SEQ ID NO: 1736008 - DNA, 15 bp, Homo sapiens
tttgcaaaaagtaat

SEQ ID NO: 1736009 - DNA, 15 bp, Homo sapiens
ttgcaaaaagtaatt

SEQ ID NO: 1736010 - DNA, 15 bp, Homo sapiens
tgcaaaaagtaattc

SEQ ID NO: 1736011 - DNA, 15 bp, Homo sapiens
gcaaaaagtaattcc

SEQ ID NO: 1736012 - DNA, 15 bp, Homo sapiens
caaaaagtaattcct

SEQ ID NO: 1736013 - DNA, 15 bp, Homo sapiens
aaaaagtaattcctt

SEQ ID NO: 1736014 - DNA, 15 bp, Homo sapiens
aaaagtaattccttc

SEQ ID NO: 1736015 - DNA, 15 bp, Homo sapiens
aaagtaattccttcc

SEQ ID NO: 1736016 - DNA, 15 bp, Homo sapiens
aagtaattccttcca

SEQ ID NO: 1736017 - DNA, 15 bp, Homo sapiens
agtaattccttccaa

SEQ ID NO: 1736018 - DNA, 15 bp, Homo sapiens
gtaattccttccaaa

SEQ ID NO: 1736019 - DNA, 15 bp, Homo sapiens
taattccttccaaag

SEQ ID NO: 1736020 - DNA, 15 bp, Homo sapiens
aattccttccaaagg

SEQ ID NO: 1736021 - DNA, 15 bp, Homo sapiens
attccttccaaagga

SEQ ID NO: 1736022 - DNA, 15 bp, Homo sapiens
ttccttccaaaggat

SEQ ID NO: 1736023 - DNA, 15 bp, Homo sapiens
tccttccaaaggata

SEQ ID NO: 1736024 - DNA, 15 bp, Homo sapiens
ccttccaaaggatat

SEQ ID NO: 1736025 - DNA, 15 bp, Homo sapiens
cttccaaaggatata

SEQ ID NO: 1736026 - DNA, 15 bp, Homo sapiens
ttccaaaggatatag

SEQ ID NO: 1736027 - DNA, 15 bp, Homo sapiens
tccaaaggatatagt

SEQ ID NO: 1736028 - DNA, 15 bp, Homo sapiens
ccaaaggatatagta

SEQ ID NO: 1736029 - DNA, 15 bp, Homo sapiens
caaaggatatagtag

SEQ ID NO: 1736030 - DNA, 15 bp, Homo sapiens
aaaggatatagtagt

SEQ ID NO: 1736031 - DNA, 15 bp, Homo sapiens
aaggatatagtagtg

SEQ ID NO: 1736032 - DNA, 15 bp, Homo sapiens
aggatatagtagtga

SEQ ID NO: 1736033 - DNA, 15 bp, Homo sapiens
ggatatagtagtgat

SEQ ID NO: 1736034 - DNA, 15 bp, Homo sapiens
gatatagtagtgatt

SEQ ID NO: 1736035 - DNA, 15 bp, Homo sapiens
atatagtagtgattt

SEQ ID NO: 1736036 - DNA, 15 bp, Homo sapiens
tatagtagtgatttg

SEQ ID NO: 1736037 - DNA, 15 bp, Homo sapiens
atagtagtgatttga

SEQ ID NO: 1736038 - DNA, 15 bp, Homo sapiens
tagtagtgatttgat

SEQ ID NO: 1736039 - DNA, 15 bp, Homo sapiens
agtagtgatttgatg

SEQ ID NO: 1736040 - DNA, 15 bp, Homo sapiens
gtagtgatttgatgt

SEQ ID NO: 1736041 - DNA, 15 bp, Homo sapiens
tagtgatttgatgta

SEQ ID NO: 1736042 - DNA, 15 bp, Homo sapiens
agtgatttgatgtag

SEQ ID NO: 1736043 - DNA, 15 bp, Homo sapiens
gtgatttgatgtaga

SEQ ID NO: 1736044 - DNA, 15 bp, Homo sapiens
tgatttgatgtagag

SEQ ID NO: 1736045 - DNA, 15 bp, Homo sapiens
gatttgatgtagagc

SEQ ID NO: 1736046 - DNA, 15 bp, Homo sapiens
atttgatgtagagct

SEQ ID NO: 1736047 - DNA, 15 bp, Homo sapiens
tttgatgtagagctg

SEQ ID NO: 1736048 - DNA, 15 bp, Homo sapiens
ttgatgtagagctga

SEQ ID NO: 1736049 - DNA, 15 bp, Homo sapiens
tgatgtagagctgat

SEQ ID NO: 1736050 - DNA, 15 bp, Homo sapiens
gatgtagagctgata

SEQ ID NO: 1736051 - DNA, 15 bp, Homo sapiens
atgtagagctgataa

SEQ ID NO: 1736052 - DNA, 15 bp, Homo sapiens
tgtagagctgataat

SEQ ID NO: 1736053 - DNA, 15 bp, Homo sapiens
gtagagctgataatc

SEQ ID NO: 1736054 - DNA, 15 bp, Homo sapiens
tagagctgataatct

SEQ ID NO: 1736055 - DNA, 15 bp, Homo sapiens
agagctgataatctt

SEQ ID NO: 1736056 - DNA, 15 bp, Homo sapiens
gagctgataatcttt

SEQ ID NO: 1736057 - DNA, 15 bp, Homo sapiens
agctgataatctttt

SEQ ID NO: 1736058 - DNA, 15 bp, Homo sapiens
gctgataatcttttg

SEQ ID NO: 1736059 - DNA, 15 bp, Homo sapiens
ctgataatcttttga

SEQ ID NO: 1736060 - DNA, 15 bp, Homo sapiens
tgataatcttttgaa

SEQ ID NO: 1736061 - DNA, 15 bp, Homo sapiens
gataatcttttgaat

SEQ ID NO: 1736062 - DNA, 15 bp, Homo sapiens
ataatcttttgaatt

SEQ ID NO: 1736063 - DNA, 15 bp, Homo sapiens
taatcttttgaattg

SEQ ID NO: 1736064 - DNA, 15 bp, Homo sapiens
aatcttttgaattga

SEQ ID NO: 1736065 - DNA, 15 bp, Homo sapiens
atcttttgaattgaa

SEQ ID NO: 1736066 - DNA, 15 bp, Homo sapiens
tcttttgaattgaaa

SEQ ID NO: 1736067 - DNA, 15 bp, Homo sapiens
cttttgaattgaaat

SEQ ID NO: 1736068 - DNA, 15 bp, Homo sapiens
ttttgaattgaaata

SEQ ID NO: 1736069 - DNA, 15 bp, Homo sapiens
tttgaattgaaatat

SEQ ID NO: 1736070 - DNA, 15 bp, Homo sapiens
ttgaattgaaatatc

SEQ ID NO: 1736071 - DNA, 15 bp, Homo sapiens
tgaattgaaatatct

SEQ ID NO: 1736072 - DNA, 15 bp, Homo sapiens
gaattgaaatatcta

SEQ ID NO: 1736073 - DNA, 15 bp, Homo sapiens
aattgaaatatctat

SEQ ID NO: 1736074 - DNA, 15 bp, Homo sapiens
attgaaatatctatg

SEQ ID NO: 1736075 - DNA, 15 bp, Homo sapiens
ttgaaatatctatga

SEQ ID NO: 1736076 - DNA, 15 bp, Homo sapiens
tgaaatatctatgat

SEQ ID NO: 1736077 - DNA, 15 bp, Homo sapiens
gaaatatctatgatt

SEQ ID NO: 1736078 - DNA, 15 bp, Homo sapiens
aaatatctatgattt

SEQ ID NO: 1736079 - DNA, 15 bp, Homo sapiens
aatatctatgatttg

SEQ ID NO: 1736080 - DNA, 15 bp, Homo sapiens
atatctatgatttga

SEQ ID NO: 1736081 - DNA, 15 bp, Homo sapiens
tatctatgatttgaa

SEQ ID NO: 1736082 - DNA, 15 bp, Homo sapiens
atctatgatttgaaa

SEQ ID NO: 1736083 - DNA, 15 bp, Homo sapiens
tctatgatttgaaaa

SEQ ID NO: 1736084 - DNA, 15 bp, Homo sapiens
ctatgatttgaaaac

SEQ ID NO: 1736085 - DNA, 15 bp, Homo sapiens
tatgatttgaaaacg

SEQ ID NO: 1736086 - DNA, 15 bp, Homo sapiens
atgatttgaaaacga

SEQ ID NO: 1736087 - DNA, 15 bp, Homo sapiens
tgatttgaaaacgaa

SEQ ID NO: 1736088 - DNA, 15 bp, Homo sapiens
gatttgaaaacgaaa

SEQ ID NO: 1736089 - DNA, 15 bp, Homo sapiens
atttgaaaacgaaat

SEQ ID NO: 1736090 - DNA, 15 bp, Homo sapiens
tttgaaaacgaaata

SEQ ID NO: 1736091 - DNA, 15 bp, Homo sapiens
ttgaaaacgaaataa

SEQ ID NO: 1736092 - DNA, 15 bp, Homo sapiens
tgaaaacgaaataac

SEQ ID NO: 1736093 - DNA, 15 bp, Homo sapiens
gaaaacgaaataaca

SEQ ID NO: 1736094 - DNA, 15 bp, Homo sapiens
aaaacgaaataacac

SEQ ID NO: 1736095 - DNA, 15 bp, Homo sapiens
aaacgaaataacaca

SEQ ID NO: 1736096 - DNA, 15 bp, Homo sapiens
aacgaaataacacaa

SEQ ID NO: 1736097 - DNA, 15 bp, Homo sapiens
acgaaataacacaaa

SEQ ID NO: 1736098 - DNA, 15 bp, Homo sapiens
cgaaataacacaaat

SEQ ID NO: 1736099 - DNA, 15 bp, Homo sapiens
gaaataacacaaatt

SEQ ID NO: 1736100 - DNA, 15 bp, Homo sapiens
aaataacacaaattt

SEQ ID NO: 1736101 - DNA, 15 bp, Homo sapiens
aataacacaaatttt

SEQ ID NO: 1736102 - DNA, 15 bp, Homo sapiens
ataacacaaattttt

SEQ ID NO: 1736103 - DNA, 15 bp, Homo sapiens
taacacaaattttta

SEQ ID NO: 1736104 - DNA, 15 bp, Homo sapiens
aacacaaatttttaa

SEQ ID NO: 1736105 - DNA, 15 bp, Homo sapiens
acacaaatttttaag

SEQ ID NO: 1736106 - DNA, 15 bp, Homo sapiens
cacaaatttttaagg

SEQ ID NO: 1736107 - DNA, 15 bp, Homo sapiens
acaaatttttaaggt

SEQ ID NO: 1736108 - DNA, 15 bp, Homo sapiens
caaatttttaaggtt

SEQ ID NO: 1736109 - DNA, 15 bp, Homo sapiens
aaatttttaaggtta

SEQ ID NO: 1736110 - DNA, 15 bp, Homo sapiens
aatttttaaggttac

SEQ ID NO: 1736111 - DNA, 15 bp, Homo sapiens
atttttaaggttact

SEQ ID NO: 1736112 - DNA, 15 bp, Homo sapiens
tttttaaggttactg

SEQ ID NO: 1736113 - DNA, 15 bp, Homo sapiens
ttttaaggttactga

SEQ ID NO: 1736114 - DNA, 15 bp, Homo sapiens
tttaaggttactgat

SEQ ID NO: 1736115 - DNA, 15 bp, Homo sapiens
ttaaggttactgatt

SEQ ID NO: 1736116 - DNA, 15 bp, Homo sapiens
taaggttactgattt

SEQ ID NO: 1736117 - DNA, 15 bp, Homo sapiens
aaggttactgattta

SEQ ID NO: 1736118 - DNA, 15 bp, Homo sapiens
aggttactgatttac

SEQ ID NO: 1736119 - DNA, 15 bp, Homo sapiens
ggttactgatttact

SEQ ID NO: 1736120 - DNA, 15 bp, Homo sapiens
gttactgatttactt

SEQ ID NO: 1736121 - DNA, 15 bp, Homo sapiens
ttactgatttacttt

SEQ ID NO: 1736122 - DNA, 15 bp, Homo sapiens
tactgatttactttt

SEQ ID NO: 1736123 - DNA, 15 bp, Homo sapiens
actgatttacttttt

SEQ ID NO: 1736124 - DNA, 15 bp, Homo sapiens
ctgatttactttttt

SEQ ID NO: 1736125 - DNA, 15 bp, Homo sapiens
tgatttacttttttc

SEQ ID NO: 1736126 - DNA, 15 bp, Homo sapiens
gatttacttttttct

SEQ ID NO: 1736127 - DNA, 15 bp, Homo sapiens
atttacttttttcta

SEQ ID NO: 1736128 - DNA, 15 bp, Homo sapiens
tttacttttttctat

SEQ ID NO: 1736129 - DNA, 15 bp, Homo sapiens
ttacttttttctatt

SEQ ID NO: 1736130 - DNA, 15 bp, Homo sapiens
tacttttttctattc

SEQ ID NO: 1736131 - DNA, 15 bp, Homo sapiens
acttttttctattct

SEQ ID NO: 1736132 - DNA, 15 bp, Homo sapiens
cttttttctattctt

SEQ ID NO: 1736133 - DNA, 15 bp, Homo sapiens
ttttttctattcttt

SEQ ID NO: 1736134 - DNA, 15 bp, Homo sapiens
tttttctattctttc

SEQ ID NO: 1736135 - DNA, 15 bp, Homo sapiens
ttttctattctttcc

SEQ ID NO: 1736136 - DNA, 15 bp, Homo sapiens
tttctattctttcct

SEQ ID NO: 1736137 - DNA, 15 bp, Homo sapiens
ttctattctttcctt

SEQ ID NO: 1736138 - DNA, 15 bp, Homo sapiens
tctattctttccttt

SEQ ID NO: 1736139 - DNA, 15 bp, Homo sapiens
ctattctttcctttg

SEQ ID NO: 1736140 - DNA, 15 bp, Homo sapiens
tattctttcctttgt

SEQ ID NO: 1736141 - DNA, 15 bp, Homo sapiens
attctttcctttgta

SEQ ID NO: 1736142 - DNA, 15 bp, Homo sapiens
ttctttcctttgtag

SEQ ID NO: 1736143 - DNA, 15 bp, Homo sapiens
tctttcctttgtagt

SEQ ID NO: 1736144 - DNA, 15 bp, Homo sapiens
ctttcctttgtagtg

SEQ ID NO: 1736145 - DNA, 15 bp, Homo sapiens
tttcctttgtagtgt

SEQ ID NO: 1736146 - DNA, 15 bp, Homo sapiens
ttcctttgtagtgtc

SEQ ID NO: 1736147 - DNA, 15 bp, Homo sapiens
tcctttgtagtgtcc

SEQ ID NO: 1736148 - DNA, 15 bp, Homo sapiens
cctttgtagtgtcca

SEQ ID NO: 1736149 - DNA, 15 bp, Homo sapiens
ctttgtagtgtccat

SEQ ID NO: 1736150 - DNA, 15 bp, Homo sapiens
tttgtagtgtccata

SEQ ID NO: 1736151 - DNA, 15 bp, Homo sapiens
ttgtagtgtccataa

SEQ ID NO: 1736152 - DNA, 15 bp, Homo sapiens
tgtagtgtccataaa

SEQ ID NO: 1736153 - DNA, 15 bp, Homo sapiens
gtagtgtccataaat

SEQ ID NO: 1736154 - DNA, 15 bp, Homo sapiens
tagtgtccataaatt

SEQ ID NO: 1736155 - DNA, 15 bp, Homo sapiens
agtgtccataaattc

SEQ ID NO: 1736156 - DNA, 15 bp, Homo sapiens
gtgtccataaattct

SEQ ID NO: 1736157 - DNA, 15 bp, Homo sapiens
tgtccataaattctt

SEQ ID NO: 1736158 - DNA, 15 bp, Homo sapiens
gtccataaattcttt

SEQ ID NO: 1736159 - DNA, 15 bp, Homo sapiens
tccataaattcttta

SEQ ID NO: 1736160 - DNA, 15 bp, Homo sapiens
ccataaattctttaa

SEQ ID NO: 1736161 - DNA, 15 bp, Homo sapiens
cataaattctttaac

SEQ ID NO: 1736162 - DNA, 15 bp, Homo sapiens
ataaattctttaact

SEQ ID NO: 1736163 - DNA, 15 bp, Homo sapiens
taaattctttaactt

SEQ ID NO: 1736164 - DNA, 15 bp, Homo sapiens
aaattctttaactta

SEQ ID NO: 1736165 - DNA, 15 bp, Homo sapiens
aattctttaacttac

SEQ ID NO: 1736166 - DNA, 15 bp, Homo sapiens
attctttaacttact

SEQ ID NO: 1736167 - DNA, 15 bp, Homo sapiens
ttctttaacttacta

SEQ ID NO: 1736168 - DNA, 15 bp, Homo sapiens
tctttaacttactaa

SEQ ID NO: 1736169 - DNA, 15 bp, Homo sapiens
ctttaacttactaaa

SEQ ID NO: 1736170 - DNA, 15 bp, Homo sapiens
tttaacttactaaaa

SEQ ID NO: 1736171 - DNA, 15 bp, Homo sapiens
ttaacttactaaaag

SEQ ID NO: 1736172 - DNA, 15 bp, Homo sapiens
taacttactaaaaga

SEQ ID NO: 1736173 - DNA, 15 bp, Homo sapiens
aacttactaaaagaa

SEQ ID NO: 1736174 - DNA, 15 bp, Homo sapiens
acttactaaaagaaa

SEQ ID NO: 1736175 - DNA, 15 bp, Homo sapiens
cttactaaaagaaat

SEQ ID NO: 1736176 - DNA, 15 bp, Homo sapiens
ttactaaaagaaatt

SEQ ID NO: 1736177 - DNA, 15 bp, Homo sapiens
tactaaaagaaattg

SEQ ID NO: 1736178 - DNA, 15 bp, Homo sapiens
actaaaagaaattga

SEQ ID NO: 1736179 - DNA, 15 bp, Homo sapiens
ctaaaagaaattgat

SEQ ID NO: 1736180 - DNA, 15 bp, Homo sapiens
taaaagaaattgata

SEQ ID NO: 1736181 - DNA, 15 bp, Homo sapiens
aaaagaaattgatac

SEQ ID NO: 1736182 - DNA, 15 bp, Homo sapiens
aaagaaattgatacc

SEQ ID NO: 1736183 - DNA, 15 bp, Homo sapiens
aagaaattgatacca

SEQ ID NO: 1736184 - DNA, 15 bp, Homo sapiens
agaaattgataccag

SEQ ID NO: 1736185 - DNA, 15 bp, Homo sapiens
gaaattgataccagt

SEQ ID NO: 1736186 - DNA, 15 bp, Homo sapiens
aaattgataccagta

SEQ ID NO: 1736187 - DNA, 15 bp, Homo sapiens
aattgataccagtac

SEQ ID NO: 1736188 - DNA, 15 bp, Homo sapiens
attgataccagtacc

SEQ ID NO: 1736189 - DNA, 15 bp, Homo sapiens
ttgataccagtacca

SEQ ID NO: 1736190 - DNA, 15 bp, Homo sapiens
tgataccagtaccaa

SEQ ID NO: 1736191 - DNA, 15 bp, Homo sapiens
gataccagtaccaaa

SEQ ID NO: 1736192 - DNA, 15 bp, Homo sapiens
ataccagtaccaaag

SEQ ID NO: 1736193 - DNA, 15 bp, Homo sapiens
taccagtaccaaagt

SEQ ID NO: 1736194 - DNA, 15 bp, Homo sapiens
accagtaccaaagtt

SEQ ID NO: 1736195 - DNA, 15 bp, Homo sapiens
ccagtaccaaagttg

SEQ ID NO: 1736196 - DNA, 15 bp, Homo sapiens
cagtaccaaagttga

SEQ ID NO: 1736197 - DNA, 15 bp, Homo sapiens
agtaccaaagttgat

SEQ ID NO: 1736198 - DNA, 15 bp, Homo sapiens
gtaccaaagttgata

SEQ ID NO: 1736199 - DNA, 15 bp, Homo sapiens
taccaaagttgataa

SEQ ID NO: 1736200 - DNA, 15 bp, Homo sapiens
accaaagttgataat

SEQ ID NO: 1736201 - DNA, 15 bp, Homo sapiens
ccaaagttgataatg

SEQ ID NO: 1736202 - DNA, 15 bp, Homo sapiens
caaagttgataatgc

SEQ ID NO: 1736203 - DNA, 15 bp, Homo sapiens
aaagttgataatgct

SEQ ID NO: 1736204 - DNA, 15 bp, Homo sapiens
aagttgataatgcta

SEQ ID NO: 1736205 - DNA, 15 bp, Homo sapiens
agttgataatgctat

SEQ ID NO: 1736206 - DNA, 15 bp, Homo sapiens
gttgataatgctatg

SEQ ID NO: 1736207 - DNA, 15 bp, Homo sapiens
ttgataatgctatgt

SEQ ID NO: 1736208 - DNA, 15 bp, Homo sapiens
tgataatgctatgtc

SEQ ID NO: 1736209 - DNA, 15 bp, Homo sapiens
gataatgctatgtca

SEQ ID NO: 1736210 - DNA, 15 bp, Homo sapiens
ataatgctatgtcaa

SEQ ID NO: 1736211 - DNA, 15 bp, Homo sapiens
taatgctatgtcaag

SEQ ID NO: 1736212 - DNA, 15 bp, Homo sapiens
aatgctatgtcaaga

SEQ ID NO: 1736213 - DNA, 15 bp, Homo sapiens
atgctatgtcaagac

SEQ ID NO: 1736214 - DNA, 15 bp, Homo sapiens
tgctatgtcaagact

SEQ ID NO: 1736215 - DNA, 15 bp, Homo sapiens
gctatgtcaagactg

SEQ ID NO: 1736216 - DNA, 15 bp, Homo sapiens
ctatgtcaagactgt

SEQ ID NO: 1736217 - DNA, 15 bp, Homo sapiens
tatgtcaagactgtt

SEQ ID NO: 1736218 - DNA, 15 bp, Homo sapiens
atgtcaagactgttg

SEQ ID NO: 1736219 - DNA, 15 bp, Homo sapiens
tgtcaagactgttga

SEQ ID NO: 1736220 - DNA, 15 bp, Homo sapiens
gtcaagactgttgaa

SEQ ID NO: 1736221 - DNA, 15 bp, Homo sapiens
tcaagactgttgaag

SEQ ID NO: 1736222 - DNA, 15 bp, Homo sapiens
caagactgttgaaga

SEQ ID NO: 1736223 - DNA, 15 bp, Homo sapiens
aagactgttgaagaa

SEQ ID NO: 1736224 - DNA, 15 bp, Homo sapiens
agactgttgaagaag

SEQ ID NO: 1736225 - DNA, 15 bp, Homo sapiens
gactgttgaagaagt

SEQ ID NO: 1736226 - DNA, 15 bp, Homo sapiens
actgttgaagaagta

SEQ ID NO: 1736227 - DNA, 15 bp, Homo sapiens
ctgttgaagaagtat

SEQ ID NO: 1736228 - DNA, 15 bp, Homo sapiens
tgttgaagaagtatg

SEQ ID NO: 1736229 - DNA, 15 bp, Homo sapiens
gttgaagaagtatga

SEQ ID NO: 1736230 - DNA, 15 bp, Homo sapiens
ttgaagaagtatgat

SEQ ID NO: 1736231 - DNA, 15 bp, Homo sapiens
tgaagaagtatgatg

SEQ ID NO: 1736232 - DNA, 15 bp, Homo sapiens
gaagaagtatgatgt

SEQ ID NO: 1736233 - DNA, 15 bp, Homo sapiens
aagaagtatgatgta

SEQ ID NO: 1736234 - DNA, 15 bp, Homo sapiens
agaagtatgatgtat

SEQ ID NO: 1736235 - DNA, 15 bp, Homo sapiens
gaagtatgatgtatt

SEQ ID NO: 1736236 - DNA, 15 bp, Homo sapiens
aagtatgatgtattg

SEQ ID NO: 1736237 - DNA, 15 bp, Homo sapiens
agtatgatgtattgt

SEQ ID NO: 1736238 - DNA, 15 bp, Homo sapiens
gtatgatgtattgtt

SEQ ID NO: 1736239 - DNA, 15 bp, Homo sapiens
tatgatgtattgttt

SEQ ID NO: 1736240 - DNA, 15 bp, Homo sapiens
atgatgtattgtttg

SEQ ID NO: 1736241 - DNA, 15 bp, Homo sapiens
tgatgtattgtttgc

SEQ ID NO: 1736242 - DNA, 15 bp, Homo sapiens
gatgtattgtttgca

SEQ ID NO: 1736243 - DNA, 15 bp, Homo sapiens
atgtattgtttgcac

SEQ ID NO: 1736244 - DNA, 15 bp, Homo sapiens
tgtattgtttgcact

SEQ ID NO: 1736245 - DNA, 15 bp, Homo sapiens
gtattgtttgcactc

SEQ ID NO: 1736246 - DNA, 15 bp, Homo sapiens
tattgtttgcactct

SEQ ID NO: 1736247 - DNA, 15 bp, Homo sapiens
attgtttgcactctt

SEQ ID NO: 1736248 - DNA, 15 bp, Homo sapiens
ttgtttgcactcttc

SEQ ID NO: 1736249 - DNA, 15 bp, Homo sapiens
tgtttgcactcttca

SEQ ID NO: 1736250 - DNA, 15 bp, Homo sapiens
gtttgcactcttcag

SEQ ID NO: 1736251 - DNA, 15 bp, Homo sapiens
tttgcactcttcagc

SEQ ID NO: 1736252 - DNA, 15 bp, Homo sapiens
ttgcactcttcagca

SEQ ID NO: 1736253 - DNA, 15 bp, Homo sapiens
tgcactcttcagcaa

SEQ ID NO: 1736254 - DNA, 15 bp, Homo sapiens
gcactcttcagcaaa

SEQ ID NO: 1736255 - DNA, 15 bp, Homo sapiens
cactcttcagcaaat

SEQ ID NO: 1736256 - DNA, 15 bp, Homo sapiens
actcttcagcaaatt

SEQ ID NO: 1736257 - DNA, 15 bp, Homo sapiens
ctcttcagcaaattg

SEQ ID NO: 1736258 - DNA, 15 bp, Homo sapiens
tcttcagcaaattgg

SEQ ID NO: 1736259 - DNA, 15 bp, Homo sapiens
cttcagcaaattgga

SEQ ID NO: 1736260 - DNA, 15 bp, Homo sapiens
ttcagcaaattggaa

SEQ ID NO: 1736261 - DNA, 15 bp, Homo sapiens
tcagcaaattggaaa

SEQ ID NO: 1736262 - DNA, 15 bp, Homo sapiens
cagcaaattggaaag

SEQ ID NO: 1736263 - DNA, 15 bp, Homo sapiens
agcaaattggaaagg

SEQ ID NO: 1736264 - DNA, 15 bp, Homo sapiens
gcaaattggaaaggt

SEQ ID NO: 1736265 - DNA, 15 bp, Homo sapiens
caaattggaaaggta

SEQ ID NO: 1736266 - DNA, 15 bp, Homo sapiens
aaattggaaaggtaa

SEQ ID NO: 1736267 - DNA, 15 bp, Homo sapiens
aattggaaaggtaaa

SEQ ID NO: 1736268 - DNA, 15 bp, Homo sapiens
attggaaaggtaaag

SEQ ID NO: 1736269 - DNA, 15 bp, Homo sapiens
ttggaaaggtaaagt

SEQ ID NO: 1736270 - DNA, 15 bp, Homo sapiens
tggaaaggtaaagta

SEQ ID NO: 1736271 - DNA, 15 bp, Homo sapiens
ggaaaggtaaagtaa

SEQ ID NO: 1736272 - DNA, 15 bp, Homo sapiens
gaaaggtaaagtaaa

SEQ ID NO: 1736273 - DNA, 15 bp, Homo sapiens
aaaggtaaagtaaac

SEQ ID NO: 1736274 - DNA, 15 bp, Homo sapiens
aaggtaaagtaaaca

SEQ ID NO: 1736275 - DNA, 15 bp, Homo sapiens
aggtaaagtaaacat

SEQ ID NO: 1736276 - DNA, 15 bp, Homo sapiens
ggtaaagtaaacatt

SEQ ID NO: 1736277 - DNA, 15 bp, Homo sapiens
gtaaagtaaacattt

SEQ ID NO: 1736278 - DNA, 15 bp, Homo sapiens
taaagtaaacatttt

SEQ ID NO: 1736279 - DNA, 15 bp, Homo sapiens
aaagtaaacatttta

SEQ ID NO: 1736280 - DNA, 15 bp, Homo sapiens
aagtaaacattttat

SEQ ID NO: 1736281 - DNA, 15 bp, Homo sapiens
agtaaacattttatt

SEQ ID NO: 1736282 - DNA, 15 bp, Homo sapiens
gtaaacattttatta

SEQ ID NO: 1736283 - DNA, 15 bp, Homo sapiens
taaacattttattag

SEQ ID NO: 1736284 - DNA, 15 bp, Homo sapiens
aaacattttattagg

SEQ ID NO: 1736285 - DNA, 15 bp, Homo sapiens
aacattttattaggt

SEQ ID NO: 1736286 - DNA, 15 bp, Homo sapiens
acattttattaggtt

SEQ ID NO: 1736287 - DNA, 15 bp, Homo sapiens
cattttattaggttt

SEQ ID NO: 1736288 - DNA, 15 bp, Homo sapiens
attttattaggttta

SEQ ID NO: 1736289 - DNA, 15 bp, Homo sapiens
ttttattaggtttac

SEQ ID NO: 1736290 - DNA, 15 bp, Homo sapiens
tttattaggtttaca

SEQ ID NO: 1736291 - DNA, 15 bp, Homo sapiens
ttattaggtttacac

SEQ ID NO: 1736292 - DNA, 15 bp, Homo sapiens
tattaggtttacact

SEQ ID NO: 1736293 - DNA, 15 bp, Homo sapiens
attaggtttacactc

SEQ ID NO: 1736294 - DNA, 15 bp, Homo sapiens
ttaggtttacactct

SEQ ID NO: 1736295 - DNA, 15 bp, Homo sapiens
taggtttacactctg

SEQ ID NO: 1736296 - DNA, 15 bp, Homo sapiens
aggtttacactctga

SEQ ID NO: 1736297 - DNA, 15 bp, Homo sapiens
ggtttacactctgat

SEQ ID NO: 1736298 - DNA, 15 bp, Homo sapiens
gtttacactctgatt

SEQ ID NO: 1736299 - DNA, 15 bp, Homo sapiens
tttacactctgattt

SEQ ID NO: 1736300 - DNA, 15 bp, Homo sapiens
ttacactctgatttt

SEQ ID NO: 1736301 - DNA, 15 bp, Homo sapiens
tacactctgattttt

SEQ ID NO: 1736302 - DNA, 15 bp, Homo sapiens
acactctgatttttt

SEQ ID NO: 1736303 - DNA, 15 bp, Homo sapiens
cactctgatttttta

SEQ ID NO: 1736304 - DNA, 15 bp, Homo sapiens
actctgattttttat

SEQ ID NO: 1736305 - DNA, 15 bp, Homo sapiens
ctctgattttttatg

SEQ ID NO: 1736306 - DNA, 15 bp, Homo sapiens
tctgattttttatgt

SEQ ID NO: 1736307 - DNA, 15 bp, Homo sapiens
ctgattttttatgtc

SEQ ID NO: 1736308 - DNA, 15 bp, Homo sapiens
tgattttttatgtca

SEQ ID NO: 1736309 - DNA, 15 bp, Homo sapiens
gattttttatgtcat

SEQ ID NO: 1736310 - DNA, 15 bp, Homo sapiens
attttttatgtcatt

SEQ ID NO: 1736311 - DNA, 15 bp, Homo sapiens
ttttttatgtcattg

SEQ ID NO: 1736312 - DNA, 15 bp, Homo sapiens
tttttatgtcattgt

SEQ ID NO: 1736313 - DNA, 15 bp, Homo sapiens
ttttatgtcattgtt

SEQ ID NO: 1736314 - DNA, 15 bp, Homo sapiens
tttatgtcattgttc

SEQ ID NO: 1736315 - DNA, 15 bp, Homo sapiens
ttatgtcattgttca

SEQ ID NO: 1736316 - DNA, 15 bp, Homo sapiens
tatgtcattgttcac

SEQ ID NO: 1736317 - DNA, 15 bp, Homo sapiens
atgtcattgttcaca

SEQ ID NO: 1736318 - DNA, 15 bp, Homo sapiens
tgtcattgttcacaa

SEQ ID NO: 1736319 - DNA, 15 bp, Homo sapiens
gtcattgttcacaat

SEQ ID NO: 1736320 - DNA, 15 bp, Homo sapiens
tcattgttcacaatt

SEQ ID NO: 1736321 - DNA, 15 bp, Homo sapiens
cattgttcacaatta

SEQ ID NO: 1736322 - DNA, 15 bp, Homo sapiens
attgttcacaattag

SEQ ID NO: 1736323 - DNA, 15 bp, Homo sapiens
ttgttcacaattaga

SEQ ID NO: 1736324 - DNA, 15 bp, Homo sapiens
tgttcacaattagat

SEQ ID NO: 1736325 - DNA, 15 bp, Homo sapiens
gttcacaattagatt

SEQ ID NO: 1736326 - DNA, 15 bp, Homo sapiens
ttcacaattagattc

SEQ ID NO: 1736327 - DNA, 15 bp, Homo sapiens
tcacaattagattct

SEQ ID NO: 1736328 - DNA, 15 bp, Homo sapiens
cacaattagattctg

SEQ ID NO: 1736329 - DNA, 15 bp, Homo sapiens
acaattagattctgg

SEQ ID NO: 1736330 - DNA, 15 bp, Homo sapiens
caattagattctggg

SEQ ID NO: 1736331 - DNA, 15 bp, Homo sapiens
aattagattctggga

SEQ ID NO: 1736332 - DNA, 15 bp, Homo sapiens
attagattctgggaa

SEQ ID NO: 1736333 - DNA, 15 bp, Homo sapiens
ttagattctgggaat

SEQ ID NO: 1736334 - DNA, 15 bp, Homo sapiens
tagattctgggaatt

SEQ ID NO: 1736335 - DNA, 15 bp, Homo sapiens
agattctgggaatta

SEQ ID NO: 1736336 - DNA, 15 bp, Homo sapiens
gattctgggaattat

SEQ ID NO: 1736337 - DNA, 15 bp, Homo sapiens
attctgggaattatt

SEQ ID NO: 1736338 - DNA, 15 bp, Homo sapiens
ttctgggaattattt

SEQ ID NO: 1736339 - DNA, 15 bp, Homo sapiens
tctgggaattattta

SEQ ID NO: 1736340 - DNA, 15 bp, Homo sapiens
ctgggaattatttaa

SEQ ID NO: 1736341 - DNA, 15 bp, Homo sapiens
tgggaattatttaac

SEQ ID NO: 1736342 - DNA, 15 bp, Homo sapiens
gggaattatttaaca

SEQ ID NO: 1736343 - DNA, 15 bp, Homo sapiens
ggaattatttaacac

SEQ ID NO: 1736344 - DNA, 15 bp, Homo sapiens
gaattatttaacaca

SEQ ID NO: 1736345 - DNA, 15 bp, Homo sapiens
aattatttaacacat

SEQ ID NO: 1736346 - DNA, 15 bp, Homo sapiens
attatttaacacatt

SEQ ID NO: 1736347 - DNA, 15 bp, Homo sapiens
ttatttaacacattt

SEQ ID NO: 1736348 - DNA, 15 bp, Homo sapiens
tatttaacacattta

SEQ ID NO: 1736349 - DNA, 15 bp, Homo sapiens
atttaacacatttag

SEQ ID NO: 1736350 - DNA, 15 bp, Homo sapiens
tttaacacatttagt

SEQ ID NO: 1736351 - DNA, 15 bp, Homo sapiens
ttaacacatttagta

SEQ ID NO: 1736352 - DNA, 15 bp, Homo sapiens
taacacatttagtaa

SEQ ID NO: 1736353 - DNA, 15 bp, Homo sapiens
aacacatttagtaaa

SEQ ID NO: 1736354 - DNA, 15 bp, Homo sapiens
acacatttagtaaag

SEQ ID NO: 1736355 - DNA, 15 bp, Homo sapiens
cacatttagtaaagt

SEQ ID NO: 1736356 - DNA, 15 bp, Homo sapiens
acatttagtaaagtt

SEQ ID NO: 1736357 - DNA, 15 bp, Homo sapiens
catttagtaaagtta

SEQ ID NO: 1736358 - DNA, 15 bp, Homo sapiens
atttagtaaagttag

SEQ ID NO: 1736359 - DNA, 15 bp, Homo sapiens
tttagtaaagttagt

SEQ ID NO: 1736360 - DNA, 15 bp, Homo sapiens
ttagtaaagttagta

SEQ ID NO: 1736361 - DNA, 15 bp, Homo sapiens
tagtaaagttagtaa

SEQ ID NO: 1736362 - DNA, 15 bp, Homo sapiens
agtaaagttagtaag

SEQ ID NO: 1736363 - DNA, 15 bp, Homo sapiens
gtaaagttagtaagt

SEQ ID NO: 1736364 - DNA, 15 bp, Homo sapiens
taaagttagtaagta

SEQ ID NO: 1736365 - DNA, 15 bp, Homo sapiens
aaagttagtaagtat

SEQ ID NO: 1736366 - DNA, 15 bp, Homo sapiens
aagttagtaagtatt

SEQ ID NO: 1736367 - DNA, 15 bp, Homo sapiens
agttagtaagtatta

SEQ ID NO: 1736368 - DNA, 15 bp, Homo sapiens
gttagtaagtattaa

SEQ ID NO: 1736369 - DNA, 15 bp, Homo sapiens
ttagtaagtattaat

SEQ ID NO: 1736370 - DNA, 15 bp, Homo sapiens
tagtaagtattaatt

SEQ ID NO: 1736371 - DNA, 15 bp, Homo sapiens
agtaagtattaattc

SEQ ID NO: 1736372 - DNA, 15 bp, Homo sapiens
gtaagtattaattct

SEQ ID NO: 1736373 - DNA, 15 bp, Homo sapiens
taagtattaattctt

SEQ ID NO: 1736374 - DNA, 15 bp, Homo sapiens
aagtattaattctta

SEQ ID NO: 1736375 - DNA, 15 bp, Homo sapiens
agtattaattcttag

SEQ ID NO: 1736376 - DNA, 15 bp, Homo sapiens
gtattaattcttaga

SEQ ID NO: 1736377 - DNA, 15 bp, Homo sapiens
tattaattcttagac

SEQ ID NO: 1736378 - DNA, 15 bp, Homo sapiens
attaattcttagact

SEQ ID NO: 1736379 - DNA, 15 bp, Homo sapiens
ttaattcttagactt

SEQ ID NO: 1736380 - DNA, 15 bp, Homo sapiens
taattcttagacttg

SEQ ID NO: 1736381 - DNA, 15 bp, Homo sapiens
aattcttagacttgt

SEQ ID NO: 1736382 - DNA, 15 bp, Homo sapiens
attcttagacttgtc

SEQ ID NO: 1736383 - DNA, 15 bp, Homo sapiens
ttcttagacttgtcc

SEQ ID NO: 1736384 - DNA, 15 bp, Homo sapiens
tcttagacttgtccc

SEQ ID NO: 1736385 - DNA, 15 bp, Homo sapiens
cttagacttgtccct

SEQ ID NO: 1736386 - DNA, 15 bp, Homo sapiens
ttagacttgtccctt

SEQ ID NO: 1736387 - DNA, 15 bp, Homo sapiens
tagacttgtcccttt

SEQ ID NO: 1736388 - DNA, 15 bp, Homo sapiens
agacttgtccctttt

SEQ ID NO: 1736389 - DNA, 15 bp, Homo sapiens
gacttgtccctttta

SEQ ID NO: 1736390 - DNA, 15 bp, Homo sapiens
acttgtcccttttaa

SEQ ID NO: 1736391 - DNA, 15 bp, Homo sapiens
cttgtcccttttaat

SEQ ID NO: 1736392 - DNA, 15 bp, Homo sapiens
ttgtcccttttaatg

SEQ ID NO: 1736393 - DNA, 15 bp, Homo sapiens
tgtcccttttaatgt

SEQ ID NO: 1736394 - DNA, 15 bp, Homo sapiens
gtcccttttaatgtt

SEQ ID NO: 1736395 - DNA, 15 bp, Homo sapiens
tcccttttaatgtta

SEQ ID NO: 1736396 - DNA, 15 bp, Homo sapiens
cccttttaatgttag

SEQ ID NO: 1736397 - DNA, 15 bp, Homo sapiens
ccttttaatgttagc

SEQ ID NO: 1736398 - DNA, 15 bp, Homo sapiens
cttttaatgttagct

SEQ ID NO: 1736399 - DNA, 15 bp, Homo sapiens
ttttaatgttagctc

SEQ ID NO: 1736400 - DNA, 15 bp, Homo sapiens
tttaatgttagctca

SEQ ID NO: 1736401 - DNA, 15 bp, Homo sapiens
ttaatgttagctcat

SEQ ID NO: 1736402 - DNA, 15 bp, Homo sapiens
taatgttagctcatt

SEQ ID NO: 1736403 - DNA, 15 bp, Homo sapiens
aatgttagctcatta

SEQ ID NO: 1736404 - DNA, 15 bp, Homo sapiens
atgttagctcattaa

SEQ ID NO: 1736405 - DNA, 15 bp, Homo sapiens
tgttagctcattaat

SEQ ID NO: 1736406 - DNA, 15 bp, Homo sapiens
gttagctcattaatt

SEQ ID NO: 1736407 - DNA, 15 bp, Homo sapiens
ttagctcattaattc

SEQ ID NO: 1736408 - DNA, 15 bp, Homo sapiens
tagctcattaattct

SEQ ID NO: 1736409 - DNA, 15 bp, Homo sapiens
agctcattaattctt

SEQ ID NO: 1736410 - DNA, 15 bp, Homo sapiens
gctcattaattctta

SEQ ID NO: 1736411 - DNA, 15 bp, Homo sapiens
ctcattaattcttag

SEQ ID NO: 1736412 - DNA, 15 bp, Homo sapiens
tcattaattcttagc

SEQ ID NO: 1736413 - DNA, 15 bp, Homo sapiens
cattaattcttagct

SEQ ID NO: 1736414 - DNA, 15 bp, Homo sapiens
attaattcttagctt

SEQ ID NO: 1736415 - DNA, 15 bp, Homo sapiens
ttaattcttagcttt

SEQ ID NO: 1736416 - DNA, 15 bp, Homo sapiens
taattcttagctttc

SEQ ID NO: 1736417 - DNA, 15 bp, Homo sapiens
aattcttagctttct

SEQ ID NO: 1736418 - DNA, 15 bp, Homo sapiens
attcttagctttctt

SEQ ID NO: 1736419 - DNA, 15 bp, Homo sapiens
ttcttagctttctta

SEQ ID NO: 1736420 - DNA, 15 bp, Homo sapiens
tcttagctttcttat

SEQ ID NO: 1736421 - DNA, 15 bp, Homo sapiens
cttagctttcttatt

SEQ ID NO: 1736422 - DNA, 15 bp, Homo sapiens
ttagctttcttattt

SEQ ID NO: 1736423 - DNA, 15 bp, Homo sapiens
tagctttcttattta

SEQ ID NO: 1736424 - DNA, 15 bp, Homo sapiens
agctttcttatttat

SEQ ID NO: 1736425 - DNA, 15 bp, Homo sapiens
gctttcttatttatc

SEQ ID NO: 1736426 - DNA, 15 bp, Homo sapiens
ctttcttatttatcc

SEQ ID NO: 1736427 - DNA, 15 bp, Homo sapiens
tttcttatttatcca

SEQ ID NO: 1736428 - DNA, 15 bp, Homo sapiens
ttcttatttatccag

SEQ ID NO: 1736429 - DNA, 15 bp, Homo sapiens
tcttatttatccagt

SEQ ID NO: 1736430 - DNA, 15 bp, Homo sapiens
cttatttatccagta

SEQ ID NO: 1736431 - DNA, 15 bp, Homo sapiens
ttatttatccagtaa

SEQ ID NO: 1736432 - DNA, 15 bp, Homo sapiens
tatttatccagtaat

SEQ ID NO: 1736433 - DNA, 15 bp, Homo sapiens
atttatccagtaata

SEQ ID NO: 1736434 - DNA, 15 bp, Homo sapiens
tttatccagtaatat

SEQ ID NO: 1736435 - DNA, 15 bp, Homo sapiens
ttatccagtaatatg

SEQ ID NO: 1736436 - DNA, 15 bp, Homo sapiens
tatccagtaatatgc

SEQ ID NO: 1736437 - DNA, 15 bp, Homo sapiens
atccagtaatatgca

SEQ ID NO: 1736438 - DNA, 15 bp, Homo sapiens
tccagtaatatgcat

SEQ ID NO: 1736439 - DNA, 15 bp, Homo sapiens
ccagtaatatgcatt

SEQ ID NO: 1736440 - DNA, 15 bp, Homo sapiens
cagtaatatgcattc

SEQ ID NO: 1736441 - DNA, 15 bp, Homo sapiens
agtaatatgcattct

SEQ ID NO: 1736442 - DNA, 15 bp, Homo sapiens
gtaatatgcattctg

SEQ ID NO: 1736443 - DNA, 15 bp, Homo sapiens
taatatgcattctga

SEQ ID NO: 1736444 - DNA, 15 bp, Homo sapiens
aatatgcattctgaa

SEQ ID NO: 1736445 - DNA, 15 bp, Homo sapiens
atatgcattctgaat

SEQ ID NO: 1736446 - DNA, 15 bp, Homo sapiens
tatgcattctgaatg

SEQ ID NO: 1736447 - DNA, 15 bp, Homo sapiens
atgcattctgaatgc

SEQ ID NO: 1736448 - DNA, 15 bp, Homo sapiens
tgcattctgaatgct

SEQ ID NO: 1736449 - DNA, 15 bp, Homo sapiens
gcattctgaatgctt

SEQ ID NO: 1736450 - DNA, 15 bp, Homo sapiens
cattctgaatgcttc

SEQ ID NO: 1736451 - DNA, 15 bp, Homo sapiens
attctgaatgcttcc

SEQ ID NO: 1736452 - DNA, 15 bp, Homo sapiens
ttctgaatgcttcct

SEQ ID NO: 1736453 - DNA, 15 bp, Homo sapiens
tctgaatgcttcctg

SEQ ID NO: 1736454 - DNA, 15 bp, Homo sapiens
ctgaatgcttcctgg

SEQ ID NO: 1736455 - DNA, 15 bp, Homo sapiens
tgaatgcttcctgga

SEQ ID NO: 1736456 - DNA, 15 bp, Homo sapiens
gaatgcttcctggaa

SEQ ID NO: 1736457 - DNA, 15 bp, Homo sapiens
aatgcttcctggaaa

SEQ ID NO: 1736458 - DNA, 15 bp, Homo sapiens
atgcttcctggaaaa

SEQ ID NO: 1736459 - DNA, 15 bp, Homo sapiens
tgcttcctggaaaat

SEQ ID NO: 1736460 - DNA, 15 bp, Homo sapiens
gcttcctggaaaatt

SEQ ID NO: 1736461 - DNA, 15 bp, Homo sapiens
cttcctggaaaatta

SEQ ID NO: 1736462 - DNA, 15 bp, Homo sapiens
ttcctggaaaattaa

SEQ ID NO: 1736463 - DNA, 15 bp, Homo sapiens
tcctggaaaattaac

SEQ ID NO: 1736464 - DNA, 15 bp, Homo sapiens
cctggaaaattaacc

SEQ ID NO: 1736465 - DNA, 15 bp, Homo sapiens
ctggaaaattaaccg

SEQ ID NO: 1736466 - DNA, 15 bp, Homo sapiens
tggaaaattaaccgt

SEQ ID NO: 1736467 - DNA, 15 bp, Homo sapiens
ggaaaattaaccgtt

SEQ ID NO: 1736468 - DNA, 15 bp, Homo sapiens
gaaaattaaccgttt

SEQ ID NO: 1736469 - DNA, 15 bp, Homo sapiens
aaaattaaccgtttt

SEQ ID NO: 1736470 - DNA, 15 bp, Homo sapiens
aaattaaccgtttta

SEQ ID NO: 1736471 - DNA, 15 bp, Homo sapiens
aattaaccgttttat

SEQ ID NO: 1736472 - DNA, 15 bp, Homo sapiens
attaaccgttttatt

SEQ ID NO: 1736473 - DNA, 15 bp, Homo sapiens
ttaaccgttttatta

SEQ ID NO: 1736474 - DNA, 15 bp, Homo sapiens
taaccgttttattat

SEQ ID NO: 1736475 - DNA, 15 bp, Homo sapiens
aaccgttttattatc

SEQ ID NO: 1736476 - DNA, 15 bp, Homo sapiens
accgttttattatcc

SEQ ID NO: 1736477 - DNA, 15 bp, Homo sapiens
ccgttttattatcct

SEQ ID NO: 1736478 - DNA, 15 bp, Homo sapiens
cgttttattatcctt

SEQ ID NO: 1736479 - DNA, 15 bp, Homo sapiens
gttttattatccttt

SEQ ID NO: 1736480 - DNA, 15 bp, Homo sapiens
ttttattatcctttc

SEQ ID NO: 1736481 - DNA, 15 bp, Homo sapiens
tttattatcctttca

SEQ ID NO: 1736482 - DNA, 15 bp, Homo sapiens
ttattatcctttcat

SEQ ID NO: 1736483 - DNA, 15 bp, Homo sapiens
tattatcctttcatg

SEQ ID NO: 1736484 - DNA, 15 bp, Homo sapiens
attatcctttcatgt

SEQ ID NO: 1736485 - DNA, 15 bp, Homo sapiens
ttatcctttcatgtc

SEQ ID NO: 1736486 - DNA, 15 bp, Homo sapiens
tatcctttcatgtct

SEQ ID NO: 1736487 - DNA, 15 bp, Homo sapiens
atcctttcatgtctt

SEQ ID NO: 1736488 - DNA, 15 bp, Homo sapiens
tcctttcatgtcttc

SEQ ID NO: 1736489 - DNA, 15 bp, Homo sapiens
cctttcatgtcttcc

SEQ ID NO: 1736490 - DNA, 15 bp, Homo sapiens
ctttcatgtcttcca

SEQ ID NO: 1736491 - DNA, 15 bp, Homo sapiens
tttcatgtcttccat

SEQ ID NO: 1736492 - DNA, 15 bp, Homo sapiens
ttcatgtcttccatt

SEQ ID NO: 1736493 - DNA, 15 bp, Homo sapiens
tcatgtcttccattt

SEQ ID NO: 1736494 - DNA, 15 bp, Homo sapiens
catgtcttccatttg

SEQ ID NO: 1736495 - DNA, 15 bp, Homo sapiens
atgtcttccatttgt

SEQ ID NO: 1736496 - DNA, 15 bp, Homo sapiens
tgtcttccatttgtt

SEQ ID NO: 1736497 - DNA, 15 bp, Homo sapiens
gtcttccatttgttt

SEQ ID NO: 1736498 - DNA, 15 bp, Homo sapiens
tcttccatttgtttt

SEQ ID NO: 1736499 - DNA, 15 bp, Homo sapiens
cttccatttgttttc

SEQ ID NO: 1736500 - DNA, 15 bp, Homo sapiens
ttccatttgttttca

SEQ ID NO: 1736501 - DNA, 15 bp, Homo sapiens
tccatttgttttcaa

SEQ ID NO: 1736502 - DNA, 15 bp, Homo sapiens
ccatttgttttcaaa

SEQ ID NO: 1736503 - DNA, 15 bp, Homo sapiens
catttgttttcaaaa

SEQ ID NO: 1736504 - DNA, 15 bp, Homo sapiens
atttgttttcaaaaa

SEQ ID NO: 1736505 - DNA, 15 bp, Homo sapiens
tttgttttcaaaaac

SEQ ID NO: 1736506 - DNA, 15 bp, Homo sapiens
ttgttttcaaaaact

SEQ ID NO: 1736507 - DNA, 15 bp, Homo sapiens
tgttttcaaaaactt

SEQ ID NO: 1736508 - DNA, 15 bp, Homo sapiens
gttttcaaaaacttt

SEQ ID NO: 1736509 - DNA, 15 bp, Homo sapiens
ttttcaaaaacttta

SEQ ID NO: 1736510 - DNA, 15 bp, Homo sapiens
tttcaaaaactttaa

SEQ ID NO: 1736511 - DNA, 15 bp, Homo sapiens
ttcaaaaactttaag

SEQ ID NO: 1736512 - DNA, 15 bp, Homo sapiens
tcaaaaactttaagc

SEQ ID NO: 1736513 - DNA, 15 bp, Homo sapiens
caaaaactttaagct

SEQ ID NO: 1736514 - DNA, 15 bp, Homo sapiens
aaaaactttaagctt

SEQ ID NO: 1736515 - DNA, 15 bp, Homo sapiens
aaaactttaagctta

SEQ ID NO: 1736516 - DNA, 15 bp, Homo sapiens
aaactttaagcttat

SEQ ID NO: 1736517 - DNA, 15 bp, Homo sapiens
aactttaagcttatc

SEQ ID NO: 1736518 - DNA, 15 bp, Homo sapiens
actttaagcttatct

SEQ ID NO: 1736519 - DNA, 15 bp, Homo sapiens
ctttaagcttatctc

SEQ ID NO: 1736520 - DNA, 15 bp, Homo sapiens
tttaagcttatctcc

SEQ ID NO: 1736521 - DNA, 15 bp, Homo sapiens
ttaagcttatctccc

SEQ ID NO: 1736522 - DNA, 15 bp, Homo sapiens
taagcttatctccca

SEQ ID NO: 1736523 - DNA, 15 bp, Homo sapiens
aagcttatctcccat

SEQ ID NO: 1736524 - DNA, 15 bp, Homo sapiens
agcttatctcccatt

SEQ ID NO: 1736525 - DNA, 15 bp, Homo sapiens
gcttatctcccattt

SEQ ID NO: 1736526 - DNA, 15 bp, Homo sapiens
cttatctcccatttt

SEQ ID NO: 1736527 - DNA, 15 bp, Homo sapiens
ttatctcccatttta

SEQ ID NO: 1736528 - DNA, 15 bp, Homo sapiens
tatctcccattttag

SEQ ID NO: 1736529 - DNA, 15 bp, Homo sapiens
atctcccattttagc

SEQ ID NO: 1736530 - DNA, 15 bp, Homo sapiens
tctcccattttagcc

SEQ ID NO: 1736531 - DNA, 15 bp, Homo sapiens
ctcccattttagcct

SEQ ID NO: 1736532 - DNA, 15 bp, Homo sapiens
tcccattttagcctt

SEQ ID NO: 1736533 - DNA, 15 bp, Homo sapiens
cccattttagccttc

SEQ ID NO: 1736534 - DNA, 15 bp, Homo sapiens
ccattttagccttct

SEQ ID NO: 1736535 - DNA, 15 bp, Homo sapiens
cattttagccttctt

SEQ ID NO: 1736536 - DNA, 15 bp, Homo sapiens
attttagccttcttt

SEQ ID NO: 1736537 - DNA, 15 bp, Homo sapiens
ttttagccttctttg

SEQ ID NO: 1736538 - DNA, 15 bp, Homo sapiens
tttagccttctttgc

SEQ ID NO: 1736539 - DNA, 15 bp, Homo sapiens
ttagccttctttgcc

SEQ ID NO: 1736540 - DNA, 15 bp, Homo sapiens
tagccttctttgcca

SEQ ID NO: 1736541 - DNA, 15 bp, Homo sapiens
agccttctttgccag

SEQ ID NO: 1736542 - DNA, 15 bp, Homo sapiens
gccttctttgccaga

SEQ ID NO: 1736543 - DNA, 15 bp, Homo sapiens
ccttctttgccagaa

SEQ ID NO: 1736544 - DNA, 15 bp, Homo sapiens
cttctttgccagaaa

SEQ ID NO: 1736545 - DNA, 15 bp, Homo sapiens
ttctttgccagaaaa

SEQ ID NO: 1736546 - DNA, 15 bp, Homo sapiens
tctttgccagaaaac

SEQ ID NO: 1736547 - DNA, 15 bp, Homo sapiens
ctttgccagaaaact

SEQ ID NO: 1736548 - DNA, 15 bp, Homo sapiens
tttgccagaaaactt

SEQ ID NO: 1736549 - DNA, 15 bp, Homo sapiens
ttgccagaaaacttc

SEQ ID NO: 1736550 - DNA, 15 bp, Homo sapiens
tgccagaaaacttct

SEQ ID NO: 1736551 - DNA, 15 bp, Homo sapiens
gccagaaaacttcta

SEQ ID NO: 1736552 - DNA, 15 bp, Homo sapiens
ccagaaaacttctag

SEQ ID NO: 1736553 - DNA, 15 bp, Homo sapiens
cagaaaacttctagt

SEQ ID NO: 1736554 - DNA, 15 bp, Homo sapiens
agaaaacttctagtt

SEQ ID NO: 1736555 - DNA, 15 bp, Homo sapiens
gaaaacttctagttc

SEQ ID NO: 1736556 - DNA, 15 bp, Homo sapiens
aaaacttctagttct

SEQ ID NO: 1736557 - DNA, 15 bp, Homo sapiens
aaacttctagttctg

SEQ ID NO: 1736558 - DNA, 15 bp, Homo sapiens
aacttctagttctga

SEQ ID NO: 1736559 - DNA, 15 bp, Homo sapiens
acttctagttctgaa

SEQ ID NO: 1736560 - DNA, 15 bp, Homo sapiens
cttctagttctgaat

SEQ ID NO: 1736561 - DNA, 15 bp, Homo sapiens
ttctagttctgaata

SEQ ID NO: 1736562 - DNA, 15 bp, Homo sapiens
tctagttctgaatag

SEQ ID NO: 1736563 - DNA, 15 bp, Homo sapiens
ctagttctgaataga

SEQ ID NO: 1736564 - DNA, 15 bp, Homo sapiens
tagttctgaatagaa

SEQ ID NO: 1736565 - DNA, 15 bp, Homo sapiens
agttctgaatagaat

SEQ ID NO: 1736566 - DNA, 15 bp, Homo sapiens
gttctgaatagaatg

SEQ ID NO: 1736567 - DNA, 15 bp, Homo sapiens
ttctgaatagaatgg

SEQ ID NO: 1736568 - DNA, 15 bp, Homo sapiens
tctgaatagaatggt

SEQ ID NO: 1736569 - DNA, 15 bp, Homo sapiens
ctgaatagaatggtg

SEQ ID NO: 1736570 - DNA, 15 bp, Homo sapiens
tgaatagaatggtga

SEQ ID NO: 1736571 - DNA, 15 bp, Homo sapiens
gaatagaatggtgac

SEQ ID NO: 1736572 - DNA, 15 bp, Homo sapiens
aatagaatggtgaca

SEQ ID NO: 1736573 - DNA, 15 bp, Homo sapiens
atagaatggtgacat

SEQ ID NO: 1736574 - DNA, 15 bp, Homo sapiens
tagaatggtgacata

SEQ ID NO: 1736575 - DNA, 15 bp, Homo sapiens
agaatggtgacataa

SEQ ID NO: 1736576 - DNA, 15 bp, Homo sapiens
gaatggtgacataaa

SEQ ID NO: 1736577 - DNA, 15 bp, Homo sapiens
aatggtgacataaat

SEQ ID NO: 1736578 - DNA, 15 bp, Homo sapiens
atggtgacataaatt

SEQ ID NO: 1736579 - DNA, 15 bp, Homo sapiens
tggtgacataaattt

SEQ ID NO: 1736580 - DNA, 15 bp, Homo sapiens
ggtgacataaattta

SEQ ID NO: 1736581 - DNA, 15 bp, Homo sapiens
gtgacataaatttaa

SEQ ID NO: 1736582 - DNA, 15 bp, Homo sapiens
tgacataaatttaaa

SEQ ID NO: 1736583 - DNA, 15 bp, Homo sapiens
gacataaatttaaac

SEQ ID NO: 1736584 - DNA, 15 bp, Homo sapiens
acataaatttaaact

SEQ ID NO: 1736585 - DNA, 15 bp, Homo sapiens
cataaatttaaactt

SEQ ID NO: 1736586 - DNA, 15 bp, Homo sapiens
ataaatttaaacttc

SEQ ID NO: 1736587 - DNA, 15 bp, Homo sapiens
taaatttaaacttct

SEQ ID NO: 1736588 - DNA, 15 bp, Homo sapiens
aaatttaaacttctt

SEQ ID NO: 1736589 - DNA, 15 bp, Homo sapiens
aatttaaacttcttc

SEQ ID NO: 1736590 - DNA, 15 bp, Homo sapiens
atttaaacttcttcc

SEQ ID NO: 1736591 - DNA, 15 bp, Homo sapiens
tttaaacttcttcct

SEQ ID NO: 1736592 - DNA, 15 bp, Homo sapiens
ttaaacttcttccta

SEQ ID NO: 1736593 - DNA, 15 bp, Homo sapiens
taaacttcttcctaa

SEQ ID NO: 1736594 - DNA, 15 bp, Homo sapiens
aaacttcttcctaat

SEQ ID NO: 1736595 - DNA, 15 bp, Homo sapiens
aacttcttcctaata

SEQ ID NO: 1736596 - DNA, 15 bp, Homo sapiens
acttcttcctaatag

SEQ ID NO: 1736597 - DNA, 15 bp, Homo sapiens
cttcttcctaatagt

SEQ ID NO: 1736598 - DNA, 15 bp, Homo sapiens
ttcttcctaatagtg

SEQ ID NO: 1736599 - DNA, 15 bp, Homo sapiens
tcttcctaatagtgt

SEQ ID NO: 1736600 - DNA, 15 bp, Homo sapiens
cttcctaatagtgtt

SEQ ID NO: 1736601 - DNA, 15 bp, Homo sapiens
ttcctaatagtgtta

SEQ ID NO: 1736602 - DNA, 15 bp, Homo sapiens
tcctaatagtgttat

SEQ ID NO: 1736603 - DNA, 15 bp, Homo sapiens
cctaatagtgttatt

SEQ ID NO: 1736604 - DNA, 15 bp, Homo sapiens
ctaatagtgttattt

SEQ ID NO: 1736605 - DNA, 15 bp, Homo sapiens
taatagtgttattta

SEQ ID NO: 1736606 - DNA, 15 bp, Homo sapiens
aatagtgttatttag

SEQ ID NO: 1736607 - DNA, 15 bp, Homo sapiens
atagtgttatttagt

SEQ ID NO: 1736608 - DNA, 15 bp, Homo sapiens
tagtgttatttagtt

SEQ ID NO: 1736609 - DNA, 15 bp, Homo sapiens
agtgttatttagttt

SEQ ID NO: 1736610 - DNA, 15 bp, Homo sapiens
gtgttatttagtttg

SEQ ID NO: 1736611 - DNA, 15 bp, Homo sapiens
tgttatttagtttgg

SEQ ID NO: 1736612 - DNA, 15 bp, Homo sapiens
gttatttagtttgga

SEQ ID NO: 1736613 - DNA, 15 bp, Homo sapiens
ttatttagtttggaa

SEQ ID NO: 1736614 - DNA, 15 bp, Homo sapiens
tatttagtttggaac

SEQ ID NO: 1736615 - DNA, 15 bp, Homo sapiens
atttagtttggaacg

SEQ ID NO: 1736616 - DNA, 15 bp, Homo sapiens
tttagtttggaacga

SEQ ID NO: 1736617 - DNA, 15 bp, Homo sapiens
ttagtttggaacgag

SEQ ID NO: 1736618 - DNA, 15 bp, Homo sapiens
tagtttggaacgaga

SEQ ID NO: 1736619 - DNA, 15 bp, Homo sapiens
agtttggaacgagaa

SEQ ID NO: 1736620 - DNA, 15 bp, Homo sapiens
gtttggaacgagaaa

SEQ ID NO: 1736621 - DNA, 15 bp, Homo sapiens
tttggaacgagaaaa

SEQ ID NO: 1736622 - DNA, 15 bp, Homo sapiens
ttggaacgagaaaac

SEQ ID NO: 1736623 - DNA, 15 bp, Homo sapiens
tggaacgagaaaaca

SEQ ID NO: 1736624 - DNA, 15 bp, Homo sapiens
ggaacgagaaaacac

SEQ ID NO: 1736625 - DNA, 15 bp, Homo sapiens
gaacgagaaaacact

SEQ ID NO: 1736626 - DNA, 15 bp, Homo sapiens
aacgagaaaacactt

SEQ ID NO: 1736627 - DNA, 15 bp, Homo sapiens
acgagaaaacacttg

SEQ ID NO: 1736628 - DNA, 15 bp, Homo sapiens
cgagaaaacacttgc

SEQ ID NO: 1736629 - DNA, 15 bp, Homo sapiens
gagaaaacacttgca

SEQ ID NO: 1736630 - DNA, 15 bp, Homo sapiens
agaaaacacttgcaa

SEQ ID NO: 1736631 - DNA, 15 bp, Homo sapiens
gaaaacacttgcaat

SEQ ID NO: 1736632 - DNA, 15 bp, Homo sapiens
aaaacacttgcaatg

SEQ ID NO: 1736633 - DNA, 15 bp, Homo sapiens
aaacacttgcaatgg

SEQ ID NO: 1736634 - DNA, 15 bp, Homo sapiens
aacacttgcaatgga

SEQ ID NO: 1736635 - DNA, 15 bp, Homo sapiens
acacttgcaatggat

SEQ ID NO: 1736636 - DNA, 15 bp, Homo sapiens
cacttgcaatggatg

SEQ ID NO: 1736637 - DNA, 15 bp, Homo sapiens
acttgcaatggatgg

SEQ ID NO: 1736638 - DNA, 15 bp, Homo sapiens
cttgcaatggatggt

SEQ ID NO: 1736639 - DNA, 15 bp, Homo sapiens
ttgcaatggatggtg

SEQ ID NO: 1736640 - DNA, 15 bp, Homo sapiens
tgcaatggatggtgt

SEQ ID NO: 1736641 - DNA, 15 bp, Homo sapiens
gcaatggatggtgta

SEQ ID NO: 1736642 - DNA, 15 bp, Homo sapiens
caatggatggtgtat

SEQ ID NO: 1736643 - DNA, 15 bp, Homo sapiens
aatggatggtgtatg

SEQ ID NO: 1736644 - DNA, 15 bp, Homo sapiens
atggatggtgtatgt

SEQ ID NO: 1736645 - DNA, 15 bp, Homo sapiens
tggatggtgtatgtg

SEQ ID NO: 1736646 - DNA, 15 bp, Homo sapiens
ggatggtgtatgtga

SEQ ID NO: 1736647 - DNA, 15 bp, Homo sapiens
gatggtgtatgtgac

SEQ ID NO: 1736648 - DNA, 15 bp, Homo sapiens
atggtgtatgtgacc

SEQ ID NO: 1736649 - DNA, 15 bp, Homo sapiens
tggtgtatgtgacct

SEQ ID NO: 1736650 - DNA, 15 bp, Homo sapiens
ggtgtatgtgaccta

SEQ ID NO: 1736651 - DNA, 15 bp, Homo sapiens
gtgtatgtgacctat

SEQ ID NO: 1736652 - DNA, 15 bp, Homo sapiens
tgtatgtgacctata

SEQ ID NO: 1736653 - DNA, 15 bp, Homo sapiens
gtatgtgacctatac

SEQ ID NO: 1736654 - DNA, 15 bp, Homo sapiens
tatgtgacctatact

SEQ ID NO: 1736655 - DNA, 15 bp, Homo sapiens
atgtgacctatacta

SEQ ID NO: 1736656 - DNA, 15 bp, Homo sapiens
tgtgacctatactat

SEQ ID NO: 1736657 - DNA, 15 bp, Homo sapiens
gtgacctatactata

SEQ ID NO: 1736658 - DNA, 15 bp, Homo sapiens
tgacctatactataa

SEQ ID NO: 1736659 - DNA, 15 bp, Homo sapiens
gacctatactataaa

SEQ ID NO: 1736660 - DNA, 15 bp, Homo sapiens
acctatactataaag

SEQ ID NO: 1736661 - DNA, 15 bp, Homo sapiens
cctatactataaagt

SEQ ID NO: 1736662 - DNA, 15 bp, Homo sapiens
ctatactataaagta

SEQ ID NO: 1736663 - DNA, 15 bp, Homo sapiens
tatactataaagtaa

SEQ ID NO: 1736664 - DNA, 15 bp, Homo sapiens
atactataaagtaat

SEQ ID NO: 1736665 - DNA, 15 bp, Homo sapiens
tactataaagtaatg

SEQ ID NO: 1736666 - DNA, 15 bp, Homo sapiens
actataaagtaatga

SEQ ID NO: 1736667 - DNA, 15 bp, Homo sapiens
ctataaagtaatgat

SEQ ID NO: 1736668 - DNA, 15 bp, Homo sapiens
tataaagtaatgatt

SEQ ID NO: 1736669 - DNA, 15 bp, Homo sapiens
ataaagtaatgattt

SEQ ID NO: 1736670 - DNA, 15 bp, Homo sapiens
taaagtaatgatttg

SEQ ID NO: 1736671 - DNA, 15 bp, Homo sapiens
aaagtaatgatttgt

SEQ ID NO: 1736672 - DNA, 15 bp, Homo sapiens
aagtaatgatttgta

SEQ ID NO: 1736673 - DNA, 15 bp, Homo sapiens
agtaatgatttgtac

SEQ ID NO: 1736674 - DNA, 15 bp, Homo sapiens
gtaatgatttgtact

SEQ ID NO: 1736675 - DNA, 15 bp, Homo sapiens
taatgatttgtactc

SEQ ID NO: 1736676 - DNA, 15 bp, Homo sapiens
aatgatttgtactcc

SEQ ID NO: 1736677 - DNA, 15 bp, Homo sapiens
atgatttgtactccc

SEQ ID NO: 1736678 - DNA, 15 bp, Homo sapiens
tgatttgtactccca

SEQ ID NO: 1736679 - DNA, 15 bp, Homo sapiens
gatttgtactcccaa

SEQ ID NO: 1736680 - DNA, 15 bp, Homo sapiens
atttgtactcccaat

SEQ ID NO: 1736681 - DNA, 15 bp, Homo sapiens
tttgtactcccaatg

SEQ ID NO: 1736682 - DNA, 15 bp, Homo sapiens
ttgtactcccaatgg

SEQ ID NO: 1736683 - DNA, 15 bp, Homo sapiens
tgtactcccaatggt

SEQ ID NO: 1736684 - DNA, 15 bp, Homo sapiens
gtactcccaatggtg

SEQ ID NO: 1736685 - DNA, 15 bp, Homo sapiens
tactcccaatggtgg

SEQ ID NO: 1736686 - DNA, 15 bp, Homo sapiens
actcccaatggtggc

SEQ ID NO: 1736687 - DNA, 15 bp, Homo sapiens
ctcccaatggtggct

SEQ ID NO: 1736688 - DNA, 15 bp, Homo sapiens
tcccaatggtggctt

SEQ ID NO: 1736689 - DNA, 15 bp, Homo sapiens
cccaatggtggctta

SEQ ID NO: 1736690 - DNA, 15 bp, Homo sapiens
ccaatggtggcttag

SEQ ID NO: 1736691 - DNA, 15 bp, Homo sapiens
caatggtggcttaga

SEQ ID NO: 1736692 - DNA, 15 bp, Homo sapiens
aatggtggcttagag

SEQ ID NO: 1736693 - DNA, 15 bp, Homo sapiens
atggtggcttagagg

SEQ ID NO: 1736694 - DNA, 15 bp, Homo sapiens
tggtggcttagagga

SEQ ID NO: 1736695 - DNA, 15 bp, Homo sapiens
ggtggcttagaggac

SEQ ID NO: 1736696 - DNA, 15 bp, Homo sapiens
gtggcttagaggact

SEQ ID NO: 1736697 - DNA, 15 bp, Homo sapiens
tggcttagaggactt

SEQ ID NO: 1736698 - DNA, 15 bp, Homo sapiens
ggcttagaggacttt

SEQ ID NO: 1736699 - DNA, 15 bp, Homo sapiens
gcttagaggactttt

SEQ ID NO: 1736700 - DNA, 15 bp, Homo sapiens
cttagaggacttttt

SEQ ID NO: 1736701 - DNA, 15 bp, Homo sapiens
ttagaggactttttc

SEQ ID NO: 1736702 - DNA, 15 bp, Homo sapiens
tagaggactttttcc

SEQ ID NO: 1736703 - DNA, 15 bp, Homo sapiens
agaggactttttcca

SEQ ID NO: 1736704 - DNA, 15 bp, Homo sapiens
gaggactttttccat

SEQ ID NO: 1736705 - DNA, 15 bp, Homo sapiens
aggactttttccatt

SEQ ID NO: 1736706 - DNA, 15 bp, Homo sapiens
ggactttttccatta

SEQ ID NO: 1736707 - DNA, 15 bp, Homo sapiens
gactttttccattac

SEQ ID NO: 1736708 - DNA, 15 bp, Homo sapiens
actttttccattaca

SEQ ID NO: 1736709 - DNA, 15 bp, Homo sapiens
ctttttccattacag

SEQ ID NO: 1736710 - DNA, 15 bp, Homo sapiens
tttttccattacagt

SEQ ID NO: 1736711 - DNA, 15 bp, Homo sapiens
ttttccattacagtt

SEQ ID NO: 1736712 - DNA, 15 bp, Homo sapiens
tttccattacagttc

SEQ ID NO: 1736713 - DNA, 15 bp, Homo sapiens
ttccattacagttcg

SEQ ID NO: 1736714 - DNA, 15 bp, Homo sapiens
tccattacagttcga

SEQ ID NO: 1736715 - DNA, 15 bp, Homo sapiens
ccattacagttcgag

SEQ ID NO: 1736716 - DNA, 15 bp, Homo sapiens
cattacagttcgagt

SEQ ID NO: 1736717 - DNA, 15 bp, Homo sapiens
attacagttcgagta

SEQ ID NO: 1736718 - DNA, 15 bp, Homo sapiens
ttacagttcgagtag

SEQ ID NO: 1736719 - DNA, 15 bp, Homo sapiens
tacagttcgagtagg

SEQ ID NO: 1736720 - DNA, 15 bp, Homo sapiens
acagttcgagtagga

SEQ ID NO: 1736721 - DNA, 15 bp, Homo sapiens
cagttcgagtaggag

SEQ ID NO: 1736722 - DNA, 15 bp, Homo sapiens
agttcgagtaggagc

SEQ ID NO: 1736723 - DNA, 15 bp, Homo sapiens
gttcgagtaggagca

SEQ ID NO: 1736724 - DNA, 15 bp, Homo sapiens
ttcgagtaggagcat

SEQ ID NO: 1736725 - DNA, 15 bp, Homo sapiens
tcgagtaggagcata

SEQ ID NO: 1736726 - DNA, 15 bp, Homo sapiens
cgagtaggagcataa

SEQ ID NO: 1736727 - DNA, 15 bp, Homo sapiens
gagtaggagcataat

SEQ ID NO: 1736728 - DNA, 15 bp, Homo sapiens
agtaggagcataatt

SEQ ID NO: 1736729 - DNA, 15 bp, Homo sapiens
gtaggagcataatta

SEQ ID NO: 1736730 - DNA, 15 bp, Homo sapiens
taggagcataattaa

SEQ ID NO: 1736731 - DNA, 15 bp, Homo sapiens
aggagcataattaat

SEQ ID NO: 1736732 - DNA, 15 bp, Homo sapiens
ggagcataattaata

SEQ ID NO: 1736733 - DNA, 15 bp, Homo sapiens
gagcataattaatat

SEQ ID NO: 1736734 - DNA, 15 bp, Homo sapiens
agcataattaatatg

SEQ ID NO: 1736735 - DNA, 15 bp, Homo sapiens
gcataattaatatgc

SEQ ID NO: 1736736 - DNA, 15 bp, Homo sapiens
cataattaatatgct

SEQ ID NO: 1736737 - DNA, 15 bp, Homo sapiens
ataattaatatgctt

SEQ ID NO: 1736738 - DNA, 15 bp, Homo sapiens
taattaatatgctta

SEQ ID NO: 1736739 - DNA, 15 bp, Homo sapiens
aattaatatgcttag

SEQ ID NO: 1736740 - DNA, 15 bp, Homo sapiens
attaatatgcttagg

SEQ ID NO: 1736741 - DNA, 15 bp, Homo sapiens
ttaatatgcttaggt

SEQ ID NO: 1736742 - DNA, 15 bp, Homo sapiens
taatatgcttaggtt

SEQ ID NO: 1736743 - DNA, 15 bp, Homo sapiens
aatatgcttaggtta

SEQ ID NO: 1736744 - DNA, 15 bp, Homo sapiens
atatgcttaggttaa

SEQ ID NO: 1736745 - DNA, 15 bp, Homo sapiens
tatgcttaggttaag

SEQ ID NO: 1736746 - DNA, 15 bp, Homo sapiens
atgcttaggttaagt

SEQ ID NO: 1736747 - DNA, 15 bp, Homo sapiens
tgcttaggttaagtt

SEQ ID NO: 1736748 - DNA, 15 bp, Homo sapiens
gcttaggttaagttt

SEQ ID NO: 1736749 - DNA, 15 bp, Homo sapiens
cttaggttaagtttt

SEQ ID NO: 1736750 - DNA, 15 bp, Homo sapiens
ttaggttaagttttt

SEQ ID NO: 1736751 - DNA, 15 bp, Homo sapiens
taggttaagtttttt

SEQ ID NO: 1736752 - DNA, 15 bp, Homo sapiens
aggttaagttttttc

SEQ ID NO: 1736753 - DNA, 15 bp, Homo sapiens
ggttaagttttttct

SEQ ID NO: 1736754 - DNA, 15 bp, Homo sapiens
gttaagttttttcta

SEQ ID NO: 1736755 - DNA, 15 bp, Homo sapiens
ttaagttttttctat

SEQ ID NO: 1736756 - DNA, 15 bp, Homo sapiens
taagttttttctata

SEQ ID NO: 1736757 - DNA, 15 bp, Homo sapiens
aagttttttctatac

SEQ ID NO: 1736758 - DNA, 15 bp, Homo sapiens
agttttttctatact

SEQ ID NO: 1736759 - DNA, 15 bp, Homo sapiens
gttttttctatactt

SEQ ID NO: 1736760 - DNA, 15 bp, Homo sapiens
ttttttctatacttt

SEQ ID NO: 1736761 - DNA, 15 bp, Homo sapiens
tttttctatactttt

SEQ ID NO: 1736762 - DNA, 15 bp, Homo sapiens
ttttctatacttttc

SEQ ID NO: 1736763 - DNA, 15 bp, Homo sapiens
tttctatacttttca

SEQ ID NO: 1736764 - DNA, 15 bp, Homo sapiens
ttctatacttttcat

SEQ ID NO: 1736765 - DNA, 15 bp, Homo sapiens
tctatacttttcatc

SEQ ID NO: 1736766 - DNA, 15 bp, Homo sapiens
ctatacttttcatca

SEQ ID NO: 1736767 - DNA, 15 bp, Homo sapiens
tatacttttcatcaa

SEQ ID NO: 1736768 - DNA, 15 bp, Homo sapiens
atacttttcatcaaa

SEQ ID NO: 1736769 - DNA, 15 bp, Homo sapiens
tacttttcatcaaaa

SEQ ID NO: 1736770 - DNA, 15 bp, Homo sapiens
acttttcatcaaaac

SEQ ID NO: 1736771 - DNA, 15 bp, Homo sapiens
cttttcatcaaaact

SEQ ID NO: 1736772 - DNA, 15 bp, Homo sapiens
ttttcatcaaaactg

SEQ ID NO: 1736773 - DNA, 15 bp, Homo sapiens
tttcatcaaaactgt

SEQ ID NO: 1736774 - DNA, 15 bp, Homo sapiens
ttcatcaaaactgta

SEQ ID NO: 1736775 - DNA, 15 bp, Homo sapiens
tcatcaaaactgtac

SEQ ID NO: 1736776 - DNA, 15 bp, Homo sapiens
catcaaaactgtact

SEQ ID NO: 1736777 - DNA, 15 bp, Homo sapiens
atcaaaactgtactt

SEQ ID NO: 1736778 - DNA, 15 bp, Homo sapiens
tcaaaactgtacttc

SEQ ID NO: 1736779 - DNA, 15 bp, Homo sapiens
caaaactgtacttcc

SEQ ID NO: 1736780 - DNA, 15 bp, Homo sapiens
aaaactgtacttccc

SEQ ID NO: 1736781 - DNA, 15 bp, Homo sapiens
aaactgtacttccct

SEQ ID NO: 1736782 - DNA, 15 bp, Homo sapiens
aactgtacttcccta

SEQ ID NO: 1736783 - DNA, 15 bp, Homo sapiens
actgtacttccctac

SEQ ID NO: 1736784 - DNA, 15 bp, Homo sapiens
ctgtacttccctacc

SEQ ID NO: 1736785 - DNA, 15 bp, Homo sapiens
tgtacttccctaccc

SEQ ID NO: 1736786 - DNA, 15 bp, Homo sapiens
gtacttccctacccc

SEQ ID NO: 1736787 - DNA, 15 bp, Homo sapiens
tacttccctacccca

SEQ ID NO: 1736788 - DNA, 15 bp, Homo sapiens
acttccctaccccaa

SEQ ID NO: 1736789 - DNA, 15 bp, Homo sapiens
cttccctaccccaaa

SEQ ID NO: 1736790 - DNA, 15 bp, Homo sapiens
ttccctaccccaaat

SEQ ID NO: 1736791 - DNA, 15 bp, Homo sapiens
tccctaccccaaatg

SEQ ID NO: 1736792 - DNA, 15 bp, Homo sapiens
ccctaccccaaatgt

SEQ ID NO: 1736793 - DNA, 15 bp, Homo sapiens
cctaccccaaatgtt

SEQ ID NO: 1736794 - DNA, 15 bp, Homo sapiens
ctaccccaaatgttt

SEQ ID NO: 1736795 - DNA, 15 bp, Homo sapiens
taccccaaatgtttc

SEQ ID NO: 1736796 - DNA, 15 bp, Homo sapiens
accccaaatgtttca

SEQ ID NO: 1736797 - DNA, 15 bp, Homo sapiens
ccccaaatgtttcag

SEQ ID NO: 1736798 - DNA, 15 bp, Homo sapiens
cccaaatgtttcagc

SEQ ID NO: 1736799 - DNA, 15 bp, Homo sapiens
ccaaatgtttcagcc

SEQ ID NO: 1736800 - DNA, 15 bp, Homo sapiens
caaatgtttcagccc

SEQ ID NO: 1736801 - DNA, 15 bp, Homo sapiens
aaatgtttcagccct

SEQ ID NO: 1736802 - DNA, 15 bp, Homo sapiens
aatgtttcagccctt

SEQ ID NO: 1736803 - DNA, 15 bp, Homo sapiens
atgtttcagccctta

SEQ ID NO: 1736804 - DNA, 15 bp, Homo sapiens
tgtttcagcccttaa

SEQ ID NO: 1736805 - DNA, 15 bp, Homo sapiens
gtttcagcccttaat

SEQ ID NO: 1736806 - DNA, 15 bp, Homo sapiens
tttcagcccttaatt

SEQ ID NO: 1736807 - DNA, 15 bp, Homo sapiens
ttcagcccttaattt

SEQ ID NO: 1736808 - DNA, 15 bp, Homo sapiens
tcagcccttaatttg

SEQ ID NO: 1736809 - DNA, 15 bp, Homo sapiens
cagcccttaatttgg

SEQ ID NO: 1736810 - DNA, 15 bp, Homo sapiens
agcccttaatttggc

SEQ ID NO: 1736811 - DNA, 15 bp, Homo sapiens
gcccttaatttggca

SEQ ID NO: 1736812 - DNA, 15 bp, Homo sapiens
cccttaatttggcat

SEQ ID NO: 1736813 - DNA, 15 bp, Homo sapiens
ccttaatttggcata

SEQ ID NO: 1736814 - DNA, 15 bp, Homo sapiens
cttaatttggcatat

SEQ ID NO: 1736815 - DNA, 15 bp, Homo sapiens
ttaatttggcatatg

SEQ ID NO: 1736816 - DNA, 15 bp, Homo sapiens
taatttggcatatgt

SEQ ID NO: 1736817 - DNA, 15 bp, Homo sapiens
aatttggcatatgtc

SEQ ID NO: 1736818 - DNA, 15 bp, Homo sapiens
atttggcatatgtct

SEQ ID NO: 1736819 - DNA, 15 bp, Homo sapiens
tttggcatatgtctg

SEQ ID NO: 1736820 - DNA, 15 bp, Homo sapiens
ttggcatatgtctgt

SEQ ID NO: 1736821 - DNA, 15 bp, Homo sapiens
tggcatatgtctgtt

SEQ ID NO: 1736822 - DNA, 15 bp, Homo sapiens
ggcatatgtctgtta

SEQ ID NO: 1736823 - DNA, 15 bp, Homo sapiens
gcatatgtctgttat

SEQ ID NO: 1736824 - DNA, 15 bp, Homo sapiens
catatgtctgttatc

SEQ ID NO: 1736825 - DNA, 15 bp, Homo sapiens
atatgtctgttatca

SEQ ID NO: 1736826 - DNA, 15 bp, Homo sapiens
tatgtctgttatcat

SEQ ID NO: 1736827 - DNA, 15 bp, Homo sapiens
atgtctgttatcatg

SEQ ID NO: 1736828 - DNA, 15 bp, Homo sapiens
tgtctgttatcatgt

SEQ ID NO: 1736829 - DNA, 15 bp, Homo sapiens
gtctgttatcatgtt

SEQ ID NO: 1736830 - DNA, 15 bp, Homo sapiens
tctgttatcatgttt

SEQ ID NO: 1736831 - DNA, 15 bp, Homo sapiens
ctgttatcatgtttg

SEQ ID NO: 1736832 - DNA, 15 bp, Homo sapiens
tgttatcatgtttgt

SEQ ID NO: 1736833 - DNA, 15 bp, Homo sapiens
gttatcatgtttgtt

SEQ ID NO: 1736834 - DNA, 15 bp, Homo sapiens
ttatcatgtttgttt

SEQ ID NO: 1736835 - DNA, 15 bp, Homo sapiens
tatcatgtttgtttt

SEQ ID NO: 1736836 - DNA, 15 bp, Homo sapiens
atcatgtttgttttg

SEQ ID NO: 1736837 - DNA, 15 bp, Homo sapiens
tcatgtttgttttga

SEQ ID NO: 1736838 - DNA, 15 bp, Homo sapiens
catgtttgttttgag

SEQ ID NO: 1736839 - DNA, 15 bp, Homo sapiens
atgtttgttttgagg

SEQ ID NO: 1736840 - DNA, 15 bp, Homo sapiens
tgtttgttttgaggc

SEQ ID NO: 1736841 - DNA, 15 bp, Homo sapiens
gtttgttttgaggct

SEQ ID NO: 1736842 - DNA, 15 bp, Homo sapiens
tttgttttgaggctc

SEQ ID NO: 1736843 - DNA, 15 bp, Homo sapiens
ttgttttgaggctca

SEQ ID NO: 1736844 - DNA, 15 bp, Homo sapiens
tgttttgaggctcat

SEQ ID NO: 1736845 - DNA, 15 bp, Homo sapiens
gttttgaggctcatt

SEQ ID NO: 1736846 - DNA, 15 bp, Homo sapiens
ttttgaggctcattt

SEQ ID NO: 1736847 - DNA, 15 bp, Homo sapiens
tttgaggctcatttc

SEQ ID NO: 1736848 - DNA, 15 bp, Homo sapiens
ttgaggctcatttca

SEQ ID NO: 1736849 - DNA, 15 bp, Homo sapiens
tgaggctcatttcat

SEQ ID NO: 1736850 - DNA, 15 bp, Homo sapiens
gaggctcatttcatt

SEQ ID NO: 1736851 - DNA, 15 bp, Homo sapiens
aggctcatttcattt

SEQ ID NO: 1736852 - DNA, 15 bp, Homo sapiens
ggctcatttcatttg

SEQ ID NO: 1736853 - DNA, 15 bp, Homo sapiens
gctcatttcatttgc

SEQ ID NO: 1736854 - DNA, 15 bp, Homo sapiens
ctcatttcatttgcg

SEQ ID NO: 1736855 - DNA, 15 bp, Homo sapiens
tcatttcatttgcgg

SEQ ID NO: 1736856 - DNA, 15 bp, Homo sapiens
catttcatttgcggt

SEQ ID NO: 1736857 - DNA, 15 bp, Homo sapiens
atttcatttgcggtt

SEQ ID NO: 1736858 - DNA, 15 bp, Homo sapiens
tttcatttgcggtta

SEQ ID NO: 1736859 - DNA, 15 bp, Homo sapiens
ttcatttgcggttaa

SEQ ID NO: 1736860 - DNA, 15 bp, Homo sapiens
tcatttgcggttaag

SEQ ID NO: 1736861 - DNA, 15 bp, Homo sapiens
catttgcggttaaga

SEQ ID NO: 1736862 - DNA, 15 bp, Homo sapiens
atttgcggttaagag

SEQ ID NO: 1736863 - DNA, 15 bp, Homo sapiens
tttgcggttaagaga

SEQ ID NO: 1736864 - DNA, 15 bp, Homo sapiens
ttgcggttaagagaa

SEQ ID NO: 1736865 - DNA, 15 bp, Homo sapiens
tgcggttaagagaat

SEQ ID NO: 1736866 - DNA, 15 bp, Homo sapiens
gcggttaagagaata

SEQ ID NO: 1736867 - DNA, 15 bp, Homo sapiens
cggttaagagaatat

SEQ ID NO: 1736868 - DNA, 15 bp, Homo sapiens
ggttaagagaatatg

SEQ ID NO: 1736869 - DNA, 15 bp, Homo sapiens
gttaagagaatatga

SEQ ID NO: 1736870 - DNA, 15 bp, Homo sapiens
ttaagagaatatgaa

SEQ ID NO: 1736871 - DNA, 15 bp, Homo sapiens
taagagaatatgaaa

SEQ ID NO: 1736872 - DNA, 15 bp, Homo sapiens
aagagaatatgaaag

SEQ ID NO: 1736873 - DNA, 15 bp, Homo sapiens
agagaatatgaaagt

SEQ ID NO: 1736874 - DNA, 15 bp, Homo sapiens
gagaatatgaaagtt

SEQ ID NO: 1736875 - DNA, 15 bp, Homo sapiens
agaatatgaaagtta

SEQ ID NO: 1736876 - DNA, 15 bp, Homo sapiens
gaatatgaaagttac

SEQ ID NO: 1736877 - DNA, 15 bp, Homo sapiens
aatatgaaagttaca

SEQ ID NO: 1736878 - DNA, 15 bp, Homo sapiens
atatgaaagttacag

SEQ ID NO: 1736879 - DNA, 15 bp, Homo sapiens
tatgaaagttacagt

SEQ ID NO: 1736880 - DNA, 15 bp, Homo sapiens
atgaaagttacagtg

SEQ ID NO: 1736881 - DNA, 15 bp, Homo sapiens
tgaaagttacagtgt

SEQ ID NO: 1736882 - DNA, 15 bp, Homo sapiens
gaaagttacagtgtt

SEQ ID NO: 1736883 - DNA, 15 bp, Homo sapiens
aaagttacagtgtta

SEQ ID NO: 1736884 - DNA, 15 bp, Homo sapiens
aagttacagtgttag

SEQ ID NO: 1736885 - DNA, 15 bp, Homo sapiens
agttacagtgttagc

SEQ ID NO: 1736886 - DNA, 15 bp, Homo sapiens
gttacagtgttagct

SEQ ID NO: 1736887 - DNA, 15 bp, Homo sapiens
ttacagtgttagcta

SEQ ID NO: 1736888 - DNA, 15 bp, Homo sapiens
tacagtgttagctaa

SEQ ID NO: 1736889 - DNA, 15 bp, Homo sapiens
acagtgttagctaaa

SEQ ID NO: 1736890 - DNA, 15 bp, Homo sapiens
cagtgttagctaaat

SEQ ID NO: 1736891 - DNA, 15 bp, Homo sapiens
agtgttagctaaata

SEQ ID NO: 1736892 - DNA, 15 bp, Homo sapiens
gtgttagctaaataa

SEQ ID NO: 1736893 - DNA, 15 bp, Homo sapiens
tgttagctaaataag

SEQ ID NO: 1736894 - DNA, 15 bp, Homo sapiens
gttagctaaataagc

SEQ ID NO: 1736895 - DNA, 15 bp, Homo sapiens
ttagctaaataagca

SEQ ID NO: 1736896 - DNA, 15 bp, Homo sapiens
tagctaaataagcaa

SEQ ID NO: 1736897 - DNA, 15 bp, Homo sapiens
agctaaataagcaat

SEQ ID NO: 1736898 - DNA, 15 bp, Homo sapiens
gctaaataagcaatt

SEQ ID NO: 1736899 - DNA, 15 bp, Homo sapiens
ctaaataagcaattg

SEQ ID NO: 1736900 - DNA, 15 bp, Homo sapiens
taaataagcaattgt

SEQ ID NO: 1736901 - DNA, 15 bp, Homo sapiens
aaataagcaattgtg

SEQ ID NO: 1736902 - DNA, 15 bp, Homo sapiens
aataagcaattgtgt

SEQ ID NO: 1736903 - DNA, 15 bp, Homo sapiens
ataagcaattgtgta

SEQ ID NO: 1736904 - DNA, 15 bp, Homo sapiens
taagcaattgtgtaa

SEQ ID NO: 1736905 - DNA, 15 bp, Homo sapiens
aagcaattgtgtaat

SEQ ID NO: 1736906 - DNA, 15 bp, Homo sapiens
agcaattgtgtaata

SEQ ID NO: 1736907 - DNA, 15 bp, Homo sapiens
gcaattgtgtaatag

SEQ ID NO: 1736908 - DNA, 15 bp, Homo sapiens
caattgtgtaatagc

SEQ ID NO: 1736909 - DNA, 15 bp, Homo sapiens
aattgtgtaatagca

SEQ ID NO: 1736910 - DNA, 15 bp, Homo sapiens
attgtgtaatagcat

SEQ ID NO: 1736911 - DNA, 15 bp, Homo sapiens
ttgtgtaatagcatg

SEQ ID NO: 1736912 - DNA, 15 bp, Homo sapiens
tgtgtaatagcatgg

SEQ ID NO: 1736913 - DNA, 15 bp, Homo sapiens
gtgtaatagcatggt

SEQ ID NO: 1736914 - DNA, 15 bp, Homo sapiens
tgtaatagcatggta

SEQ ID NO: 1736915 - DNA, 15 bp, Homo sapiens
gtaatagcatggtaa

SEQ ID NO: 1736916 - DNA, 15 bp, Homo sapiens
taatagcatggtaaa

SEQ ID NO: 1736917 - DNA, 15 bp, Homo sapiens
aatagcatggtaaag

SEQ ID NO: 1736918 - DNA, 15 bp, Homo sapiens
atagcatggtaaagg

SEQ ID NO: 1736919 - DNA, 15 bp, Homo sapiens
tagcatggtaaaggg

SEQ ID NO: 1736920 - DNA, 15 bp, Homo sapiens
agcatggtaaaggga

SEQ ID NO: 1736921 - DNA, 15 bp, Homo sapiens
gcatggtaaagggag

SEQ ID NO: 1736922 - DNA, 15 bp, Homo sapiens
catggtaaagggaga

SEQ ID NO: 1736923 - DNA, 15 bp, Homo sapiens
atggtaaagggagaa

SEQ ID NO: 1736924 - DNA, 15 bp, Homo sapiens
tggtaaagggagaag

SEQ ID NO: 1736925 - DNA, 15 bp, Homo sapiens
ggtaaagggagaagg

SEQ ID NO: 1736926 - DNA, 15 bp, Homo sapiens
gtaaagggagaaggg

SEQ ID NO: 1736927 - DNA, 15 bp, Homo sapiens
taaagggagaagggt

SEQ ID NO: 1736928 - DNA, 15 bp, Homo sapiens
aaagggagaagggta

SEQ ID NO: 1736929 - DNA, 15 bp, Homo sapiens
aagggagaagggtaa

SEQ ID NO: 1736930 - DNA, 15 bp, Homo sapiens
agggagaagggtaaa

SEQ ID NO: 1736931 - DNA, 15 bp, Homo sapiens
gggagaagggtaaaa

SEQ ID NO: 1736932 - DNA, 15 bp, Homo sapiens
ggagaagggtaaaag

SEQ ID NO: 1736933 - DNA, 15 bp, Homo sapiens
gagaagggtaaaaga

SEQ ID NO: 1736934 - DNA, 15 bp, Homo sapiens
agaagggtaaaagag

SEQ ID NO: 1736935 - DNA, 15 bp, Homo sapiens
gaagggtaaaagagg

SEQ ID NO: 1736936 - DNA, 15 bp, Homo sapiens
aagggtaaaagaggc

SEQ ID NO: 1736937 - DNA, 15 bp, Homo sapiens
agggtaaaagaggca

SEQ ID NO: 1736938 - DNA, 15 bp, Homo sapiens
gggtaaaagaggcat

SEQ ID NO: 1736939 - DNA, 15 bp, Homo sapiens
ggtaaaagaggcatg

SEQ ID NO: 1736940 - DNA, 15 bp, Homo sapiens
gtaaaagaggcatgg

SEQ ID NO: 1736941 - DNA, 15 bp, Homo sapiens
taaaagaggcatggc

SEQ ID NO: 1736942 - DNA, 15 bp, Homo sapiens
aaaagaggcatggcc

SEQ ID NO: 1736943 - DNA, 15 bp, Homo sapiens
aaagaggcatggccc

SEQ ID NO: 1736944 - DNA, 15 bp, Homo sapiens
aagaggcatggccct

SEQ ID NO: 1736945 - DNA, 15 bp, Homo sapiens
agaggcatggcccta

SEQ ID NO: 1736946 - DNA, 15 bp, Homo sapiens
gaggcatggccctat

SEQ ID NO: 1736947 - DNA, 15 bp, Homo sapiens
aggcatggccctatt

SEQ ID NO: 1736948 - DNA, 15 bp, Homo sapiens
ggcatggccctattc

SEQ ID NO: 1736949 - DNA, 15 bp, Homo sapiens
gcatggccctattct

SEQ ID NO: 1736950 - DNA, 15 bp, Homo sapiens
catggccctattctg

SEQ ID NO: 1736951 - DNA, 15 bp, Homo sapiens
atggccctattctgg

SEQ ID NO: 1736952 - DNA, 15 bp, Homo sapiens
tggccctattctgga

SEQ ID NO: 1736953 - DNA, 15 bp, Homo sapiens
ggccctattctggag

SEQ ID NO: 1736954 - DNA, 15 bp, Homo sapiens
gccctattctggaga

SEQ ID NO: 1736955 - DNA, 15 bp, Homo sapiens
ccctattctggagag

SEQ ID NO: 1736956 - DNA, 15 bp, Homo sapiens
cctattctggagaga

SEQ ID NO: 1736957 - DNA, 15 bp, Homo sapiens
ctattctggagagaa

SEQ ID NO: 1736958 - DNA, 15 bp, Homo sapiens
tattctggagagaat

SEQ ID NO: 1736959 - DNA, 15 bp, Homo sapiens
attctggagagaatg

SEQ ID NO: 1736960 - DNA, 15 bp, Homo sapiens
ttctggagagaatga

SEQ ID NO: 1736961 - DNA, 15 bp, Homo sapiens
tctggagagaatgag

SEQ ID NO: 1736962 - DNA, 15 bp, Homo sapiens
ctggagagaatgagg

SEQ ID NO: 1736963 - DNA, 15 bp, Homo sapiens
tggagagaatgagga

SEQ ID NO: 1736964 - DNA, 15 bp, Homo sapiens
ggagagaatgaggat

SEQ ID NO: 1736965 - DNA, 15 bp, Homo sapiens
gagagaatgaggatg

SEQ ID NO: 1736966 - DNA, 15 bp, Homo sapiens
agagaatgaggatgg

SEQ ID NO: 1736967 - DNA, 15 bp, Homo sapiens
gagaatgaggatgga

SEQ ID NO: 1736968 - DNA, 15 bp, Homo sapiens
agaatgaggatggag

SEQ ID NO: 1736969 - DNA, 15 bp, Homo sapiens
gaatgaggatggaga

SEQ ID NO: 1736970 - DNA, 15 bp, Homo sapiens
aatgaggatggagat

SEQ ID NO: 1736971 - DNA, 15 bp, Homo sapiens
atgaggatggagata

SEQ ID NO: 1736972 - DNA, 15 bp, Homo sapiens
tgaggatggagatag

SEQ ID NO: 1736973 - DNA, 15 bp, Homo sapiens
gaggatggagataga

SEQ ID NO: 1736974 - DNA, 15 bp, Homo sapiens
aggatggagatagag

SEQ ID NO: 1736975 - DNA, 15 bp, Homo sapiens
ggatggagatagagg

SEQ ID NO: 1736976 - DNA, 15 bp, Homo sapiens
gatggagatagaggt

SEQ ID NO: 1736977 - DNA, 15 bp, Homo sapiens
atggagatagaggtg

SEQ ID NO: 1736978 - DNA, 15 bp, Homo sapiens
tggagatagaggtgg

SEQ ID NO: 1736979 - DNA, 15 bp, Homo sapiens
ggagatagaggtgga

SEQ ID NO: 1736980 - DNA, 15 bp, Homo sapiens
gagatagaggtggaa

SEQ ID NO: 1736981 - DNA, 15 bp, Homo sapiens
agatagaggtggaaa

SEQ ID NO: 1736982 - DNA, 15 bp, Homo sapiens
gatagaggtggaaag

SEQ ID NO: 1736983 - DNA, 15 bp, Homo sapiens
atagaggtggaaaga

SEQ ID NO: 1736984 - DNA, 15 bp, Homo sapiens
tagaggtggaaagaa

SEQ ID NO: 1736985 - DNA, 15 bp, Homo sapiens
agaggtggaaagaag

SEQ ID NO: 1736986 - DNA, 15 bp, Homo sapiens
gaggtggaaagaagc

SEQ ID NO: 1736987 - DNA, 15 bp, Homo sapiens
aggtggaaagaagca

SEQ ID NO: 1736988 - DNA, 15 bp, Homo sapiens
ggtggaaagaagcat

SEQ ID NO: 1736989 - DNA, 15 bp, Homo sapiens
gtggaaagaagcatc

SEQ ID NO: 1736990 - DNA, 15 bp, Homo sapiens
tggaaagaagcatct

SEQ ID NO: 1736991 - DNA, 15 bp, Homo sapiens
ggaaagaagcatctc

SEQ ID NO: 1736992 - DNA, 15 bp, Homo sapiens
gaaagaagcatctcc

SEQ ID NO: 1736993 - DNA, 15 bp, Homo sapiens
aaagaagcatctcct

SEQ ID NO: 1736994 - DNA, 15 bp, Homo sapiens
aagaagcatctcctt

SEQ ID NO: 1736995 - DNA, 15 bp, Homo sapiens
agaagcatctcctta

SEQ ID NO: 1736996 - DNA, 15 bp, Homo sapiens
gaagcatctccttag

SEQ ID NO: 1736997 - DNA, 15 bp, Homo sapiens
aagcatctccttagg

SEQ ID NO: 1736998 - DNA, 15 bp, Homo sapiens
agcatctccttagga

SEQ ID NO: 1736999 - DNA, 15 bp, Homo sapiens
gcatctccttaggag

SEQ ID NO: 1737000 - DNA, 15 bp, Homo sapiens
catctccttaggagg

SEQ ID NO: 1737001 - DNA, 15 bp, Homo sapiens
atctccttaggagga

SEQ ID NO: 1737002 - DNA, 15 bp, Homo sapiens
tctccttaggaggat

SEQ ID NO: 1737003 - DNA, 15 bp, Homo sapiens
ctccttaggaggatg

SEQ ID NO: 1737004 - DNA, 15 bp, Homo sapiens
tccttaggaggatgg

SEQ ID NO: 1737005 - DNA, 15 bp, Homo sapiens
ccttaggaggatggc

SEQ ID NO: 1737006 - DNA, 15 bp, Homo sapiens
cttaggaggatggct

SEQ ID NO: 1737007 - DNA, 15 bp, Homo sapiens
ttaggaggatggctc

SEQ ID NO: 1737008 - DNA, 15 bp, Homo sapiens
taggaggatggctct

SEQ ID NO: 1737009 - DNA, 15 bp, Homo sapiens
aggaggatggctcta

SEQ ID NO: 1737010 - DNA, 15 bp, Homo sapiens
ggaggatggctctat

SEQ ID NO: 1737011 - DNA, 15 bp, Homo sapiens
gaggatggctctatt

SEQ ID NO: 1737012 - DNA, 15 bp, Homo sapiens
aggatggctctattt

SEQ ID NO: 1737013 - DNA, 15 bp, Homo sapiens
ggatggctctatttt

SEQ ID NO: 1737014 - DNA, 15 bp, Homo sapiens
gatggctctattttc

SEQ ID NO: 1737015 - DNA, 15 bp, Homo sapiens
atggctctattttct

SEQ ID NO: 1737016 - DNA, 15 bp, Homo sapiens
tggctctattttctc

SEQ ID NO: 1737017 - DNA, 15 bp, Homo sapiens
ggctctattttctcc

SEQ ID NO: 1737018 - DNA, 15 bp, Homo sapiens
gctctattttctccc

SEQ ID NO: 1737019 - DNA, 15 bp, Homo sapiens
ctctattttctcccc

SEQ ID NO: 1737020 - DNA, 15 bp, Homo sapiens
tctattttctccccc

SEQ ID NO: 1737021 - DNA, 15 bp, Homo sapiens
ctattttctccccct

SEQ ID NO: 1737022 - DNA, 15 bp, Homo sapiens
tattttctccccctt

SEQ ID NO: 1737023 - DNA, 15 bp, Homo sapiens
attttctcccccttt

SEQ ID NO: 1737024 - DNA, 15 bp, Homo sapiens
ttttctccccctttt

SEQ ID NO: 1737025 - DNA, 15 bp, Homo sapiens
tttctcccccttttt

SEQ ID NO: 1737026 - DNA, 15 bp, Homo sapiens
ttctccccctttttc

SEQ ID NO: 1737027 - DNA, 15 bp, Homo sapiens
tctccccctttttct

SEQ ID NO: 1737028 - DNA, 15 bp, Homo sapiens
ctccccctttttctt

SEQ ID NO: 1737029 - DNA, 15 bp, Homo sapiens
tccccctttttcttt

SEQ ID NO: 1737030 - DNA, 15 bp, Homo sapiens
ccccctttttctttt

SEQ ID NO: 1737031 - DNA, 15 bp, Homo sapiens
cccctttttcttttt

SEQ ID NO: 1737032 - DNA, 15 bp, Homo sapiens
ccctttttctttttt

SEQ ID NO: 1737033 - DNA, 15 bp, Homo sapiens
cctttttcttttttg

SEQ ID NO: 1737034 - DNA, 15 bp, Homo sapiens
ctttttcttttttga

SEQ ID NO: 1737035 - DNA, 15 bp, Homo sapiens
tttttcttttttgac

SEQ ID NO: 1737036 - DNA, 15 bp, Homo sapiens
ttttcttttttgacc

SEQ ID NO: 1737037 - DNA, 15 bp, Homo sapiens
tttcttttttgacca

SEQ ID NO: 1737038 - DNA, 15 bp, Homo sapiens
ttcttttttgaccac

SEQ ID NO: 1737039 - DNA, 15 bp, Homo sapiens
tcttttttgaccact

SEQ ID NO: 1737040 - DNA, 15 bp, Homo sapiens
cttttttgaccacta

SEQ ID NO: 1737041 - DNA, 15 bp, Homo sapiens
ttttttgaccactaa

SEQ ID NO: 1737042 - DNA, 15 bp, Homo sapiens
tttttgaccactaaa

SEQ ID NO: 1737043 - DNA, 15 bp, Homo sapiens
ttttgaccactaaaa

SEQ ID NO: 1737044 - DNA, 15 bp, Homo sapiens
tttgaccactaaaac

SEQ ID NO: 1737045 - DNA, 15 bp, Homo sapiens
ttgaccactaaaact

SEQ ID NO: 1737046 - DNA, 15 bp, Homo sapiens
tgaccactaaaactt

SEQ ID NO: 1737047 - DNA, 15 bp, Homo sapiens
gaccactaaaacttc

SEQ ID NO: 1737048 - DNA, 15 bp, Homo sapiens
accactaaaacttca

SEQ ID NO: 1737049 - DNA, 15 bp, Homo sapiens
ccactaaaacttcac

SEQ ID NO: 1737050 - DNA, 15 bp, Homo sapiens
cactaaaacttcaca

SEQ ID NO: 1737051 - DNA, 15 bp, Homo sapiens
actaaaacttcacaa

SEQ ID NO: 1737052 - DNA, 15 bp, Homo sapiens
ctaaaacttcacaac

SEQ ID NO: 1737053 - DNA, 15 bp, Homo sapiens
taaaacttcacaact

SEQ ID NO: 1737054 - DNA, 15 bp, Homo sapiens
aaaacttcacaactg

SEQ ID NO: 1737055 - DNA, 15 bp, Homo sapiens
aaacttcacaactgt

SEQ ID NO: 1737056 - DNA, 15 bp, Homo sapiens
aacttcacaactgtg

SEQ ID NO: 1737057 - DNA, 15 bp, Homo sapiens
acttcacaactgtgg

SEQ ID NO: 1737058 - DNA, 15 bp, Homo sapiens
cttcacaactgtggt

SEQ ID NO: 1737059 - DNA, 15 bp, Homo sapiens
ttcacaactgtggtg

SEQ ID NO: 1737060 - DNA, 15 bp, Homo sapiens
tcacaactgtggtgg

SEQ ID NO: 1737061 - DNA, 15 bp, Homo sapiens
cacaactgtggtgga

SEQ ID NO: 1737062 - DNA, 15 bp, Homo sapiens
acaactgtggtggag

SEQ ID NO: 1737063 - DNA, 15 bp, Homo sapiens
caactgtggtggagg

SEQ ID NO: 1737064 - DNA, 15 bp, Homo sapiens
aactgtggtggagga

SEQ ID NO: 1737065 - DNA, 15 bp, Homo sapiens
actgtggtggaggat

SEQ ID NO: 1737066 - DNA, 15 bp, Homo sapiens
ctgtggtggaggatg

SEQ ID NO: 1737067 - DNA, 15 bp, Homo sapiens
tgtggtggaggatga

SEQ ID NO: 1737068 - DNA, 15 bp, Homo sapiens
gtggtggaggatgag

SEQ ID NO: 1737069 - DNA, 15 bp, Homo sapiens
tggtggaggatgaga

SEQ ID NO: 1737070 - DNA, 15 bp, Homo sapiens
ggtggaggatgagaa

SEQ ID NO: 1737071 - DNA, 15 bp, Homo sapiens
gtggaggatgagaaa

SEQ ID NO: 1737072 - DNA, 15 bp, Homo sapiens
tggaggatgagaaaa

SEQ ID NO: 1737073 - DNA, 15 bp, Homo sapiens
ggaggatgagaaaaa

SEQ ID NO: 1737074 - DNA, 15 bp, Homo sapiens
gaggatgagaaaaat

SEQ ID NO: 1737075 - DNA, 15 bp, Homo sapiens
aggatgagaaaaatt

SEQ ID NO: 1737076 - DNA, 15 bp, Homo sapiens
ggatgagaaaaatta

SEQ ID NO: 1737077 - DNA, 15 bp, Homo sapiens
gatgagaaaaattag

SEQ ID NO: 1737078 - DNA, 15 bp, Homo sapiens
atgagaaaaattaga

SEQ ID NO: 1737079 - DNA, 15 bp, Homo sapiens
tgagaaaaattagag

SEQ ID NO: 1737080 - DNA, 15 bp, Homo sapiens
gagaaaaattagaga

SEQ ID NO: 1737081 - DNA, 15 bp, Homo sapiens
agaaaaattagagaa

SEQ ID NO: 1737082 - DNA, 15 bp, Homo sapiens
gaaaaattagagaaa

SEQ ID NO: 1737083 - DNA, 15 bp, Homo sapiens
aaaaattagagaaaa

SEQ ID NO: 1737084 - DNA, 15 bp, Homo sapiens
aaaattagagaaaaa

SEQ ID NO: 1737085 - DNA, 15 bp, Homo sapiens
aaattagagaaaaaa

SEQ ID NO: 1737086 - DNA, 15 bp, Homo sapiens
aattagagaaaaaac

SEQ ID NO: 1737087 - DNA, 15 bp, Homo sapiens
attagagaaaaaact

SEQ ID NO: 1737088 - DNA, 15 bp, Homo sapiens
ttagagaaaaaactc

SEQ ID NO: 1737089 - DNA, 15 bp, Homo sapiens
tagagaaaaaactca

SEQ ID NO: 1737090 - DNA, 15 bp, Homo sapiens
agagaaaaaactcaa

SEQ ID NO: 1737091 - DNA, 15 bp, Homo sapiens
gagaaaaaactcaaa

SEQ ID NO: 1737092 - DNA, 15 bp, Homo sapiens
agaaaaaactcaaag

SEQ ID NO: 1737093 - DNA, 15 bp, Homo sapiens
gaaaaaactcaaagg

SEQ ID NO: 1737094 - DNA, 15 bp, Homo sapiens
aaaaaactcaaaggc

SEQ ID NO: 1737095 - DNA, 15 bp, Homo sapiens
aaaaactcaaaggcc

SEQ ID NO: 1737096 - DNA, 15 bp, Homo sapiens
aaaactcaaaggcct

SEQ ID NO: 1737097 - DNA, 15 bp, Homo sapiens
aaactcaaaggccta

SEQ ID NO: 1737098 - DNA, 15 bp, Homo sapiens
aactcaaaggcctag

SEQ ID NO: 1737099 - DNA, 15 bp, Homo sapiens
actcaaaggcctagg

SEQ ID NO: 1737100 - DNA, 15 bp, Homo sapiens
ctcaaaggcctaggg

SEQ ID NO: 1737101 - DNA, 15 bp, Homo sapiens
tcaaaggcctagggc

SEQ ID NO: 1737102 - DNA, 15 bp, Homo sapiens
caaaggcctagggct

SEQ ID NO: 1737103 - DNA, 15 bp, Homo sapiens
aaaggcctagggctt

SEQ ID NO: 1737104 - DNA, 15 bp, Homo sapiens
aaggcctagggcttt

SEQ ID NO: 1737105 - DNA, 15 bp, Homo sapiens
aggcctagggctttt

SEQ ID NO: 1737106 - DNA, 15 bp, Homo sapiens
ggcctagggcttttg

SEQ ID NO: 1737107 - DNA, 15 bp, Homo sapiens
gcctagggcttttga

SEQ ID NO: 1737108 - DNA, 15 bp, Homo sapiens
cctagggcttttgaa

SEQ ID NO: 1737109 - DNA, 15 bp, Homo sapiens
ctagggcttttgaag

SEQ ID NO: 1737110 - DNA, 15 bp, Homo sapiens
tagggcttttgaagg

SEQ ID NO: 1737111 - DNA, 15 bp, Homo sapiens
agggcttttgaagga

SEQ ID NO: 1737112 - DNA, 15 bp, Homo sapiens
gggcttttgaaggac

SEQ ID NO: 1737113 - DNA, 15 bp, Homo sapiens
ggcttttgaaggact

SEQ ID NO: 1737114 - DNA, 15 bp, Homo sapiens
gcttttgaaggactg

SEQ ID NO: 1737115 - DNA, 15 bp, Homo sapiens
cttttgaaggactgt

SEQ ID NO: 1737116 - DNA, 15 bp, Homo sapiens
ttttgaaggactgtc

SEQ ID NO: 1737117 - DNA, 15 bp, Homo sapiens
tttgaaggactgtct

SEQ ID NO: 1737118 - DNA, 15 bp, Homo sapiens
ttgaaggactgtctt

SEQ ID NO: 1737119 - DNA, 15 bp, Homo sapiens
tgaaggactgtcttt

SEQ ID NO: 1737120 - DNA, 15 bp, Homo sapiens
gaaggactgtctttt

SEQ ID NO: 1737121 - DNA, 15 bp, Homo sapiens
aaggactgtcttttc

SEQ ID NO: 1737122 - DNA, 15 bp, Homo sapiens
aggactgtcttttct

SEQ ID NO: 1737123 - DNA, 15 bp, Homo sapiens
ggactgtcttttctt

SEQ ID NO: 1737124 - DNA, 15 bp, Homo sapiens
gactgtcttttcttg

SEQ ID NO: 1737125 - DNA, 15 bp, Homo sapiens
actgtcttttcttgc

SEQ ID NO: 1737126 - DNA, 15 bp, Homo sapiens
ctgtcttttcttgcc

SEQ ID NO: 1737127 - DNA, 15 bp, Homo sapiens
tgtcttttcttgccc

SEQ ID NO: 1737128 - DNA, 15 bp, Homo sapiens
gtcttttcttgcccc

SEQ ID NO: 1737129 - DNA, 15 bp, Homo sapiens
tcttttcttgcccct

SEQ ID NO: 1737130 - DNA, 15 bp, Homo sapiens
cttttcttgcccctg

SEQ ID NO: 1737131 - DNA, 15 bp, Homo sapiens
ttttcttgcccctgg

SEQ ID NO: 1737132 - DNA, 15 bp, Homo sapiens
tttcttgcccctggt

SEQ ID NO: 1737133 - DNA, 15 bp, Homo sapiens
ttcttgcccctggtt

SEQ ID NO: 1737134 - DNA, 15 bp, Homo sapiens
tcttgcccctggttt

SEQ ID NO: 1737135 - DNA, 15 bp, Homo sapiens
cttgcccctggtttt

SEQ ID NO: 1737136 - DNA, 15 bp, Homo sapiens
ttgcccctggtttta

SEQ ID NO: 1737137 - DNA, 15 bp, Homo sapiens
tgcccctggttttaa

SEQ ID NO: 1737138 - DNA, 15 bp, Homo sapiens
gcccctggttttaat

SEQ ID NO: 1737139 - DNA, 15 bp, Homo sapiens
cccctggttttaatt

SEQ ID NO: 1737140 - DNA, 15 bp, Homo sapiens
ccctggttttaattg

SEQ ID NO: 1737141 - DNA, 15 bp, Homo sapiens
cctggttttaattgt

SEQ ID NO: 1737142 - DNA, 15 bp, Homo sapiens
ctggttttaattgta

SEQ ID NO: 1737143 - DNA, 15 bp, Homo sapiens
tggttttaattgtaa

SEQ ID NO: 1737144 - DNA, 15 bp, Homo sapiens
ggttttaattgtaat

SEQ ID NO: 1737145 - DNA, 15 bp, Homo sapiens
gttttaattgtaata

SEQ ID NO: 1737146 - DNA, 15 bp, Homo sapiens
ttttaattgtaatat

SEQ ID NO: 1737147 - DNA, 15 bp, Homo sapiens
tttaattgtaatatg

SEQ ID NO: 1737148 - DNA, 15 bp, Homo sapiens
ttaattgtaatatgg

SEQ ID NO: 1737149 - DNA, 15 bp, Homo sapiens
attgtaatatggtag

SEQ ID NO: 1737150 - DNA, 15 bp, Homo sapiens
ttgtaatatggtagc

SEQ ID NO: 1737151 - DNA, 15 bp, Homo sapiens
tgtaatatggtagca

SEQ ID NO: 1737152 - DNA, 15 bp, Homo sapiens
gtaatatggtagcat

SEQ ID NO: 1737153 - DNA, 15 bp, Homo sapiens
taatatggtagcatt

SEQ ID NO: 1737154 - DNA, 15 bp, Homo sapiens
aatatggtagcattg

SEQ ID NO: 1737155 - DNA, 15 bp, Homo sapiens
atatggtagcattgg

SEQ ID NO: 1737156 - DNA, 15 bp, Homo sapiens
tatggtagcattggc

SEQ ID NO: 1737157 - DNA, 15 bp, Homo sapiens
atggtagcattggcc

SEQ ID NO: 1737158 - DNA, 15 bp, Homo sapiens
tggtagcattggcca

SEQ ID NO: 1737159 - DNA, 15 bp, Homo sapiens
ggtagcattggccat

SEQ ID NO: 1737160 - DNA, 15 bp, Homo sapiens
gtagcattggccatc

SEQ ID NO: 1737161 - DNA, 15 bp, Homo sapiens
tagcattggccatct

SEQ ID NO: 1737162 - DNA, 15 bp, Homo sapiens
agcattggccatctt

SEQ ID NO: 1737163 - DNA, 15 bp, Homo sapiens
gcattggccatcttt

SEQ ID NO: 1737164 - DNA, 15 bp, Homo sapiens
cattggccatctttt

SEQ ID NO: 1737165 - DNA, 15 bp, Homo sapiens
attggccatcttttt

SEQ ID NO: 1737166 - DNA, 15 bp, Homo sapiens
ttggccatctttttt

SEQ ID NO: 1737167 - DNA, 15 bp, Homo sapiens
tggccatcttttttt

SEQ ID NO: 1737168 - DNA, 15 bp, Homo sapiens
ggccatctttttttt

SEQ ID NO: 1737169 - DNA, 15 bp, Homo sapiens
gccatcttttttttt

SEQ ID NO: 1737170 - DNA, 15 bp, Homo sapiens
tttttttttggtctt

SEQ ID NO: 1737171 - DNA, 15 bp, Homo sapiens
ttttttttggtcttt

SEQ ID NO: 1737172 - DNA, 15 bp, Homo sapiens
tttttttggtctttt

SEQ ID NO: 1737173 - DNA, 15 bp, Homo sapiens
ttttttggtcttttc

SEQ ID NO: 1737174 - DNA, 15 bp, Homo sapiens
tttttggtcttttct

SEQ ID NO: 1737175 - DNA, 15 bp, Homo sapiens
ttttggtcttttctt

SEQ ID NO: 1737176 - DNA, 15 bp, Homo sapiens
tttggtcttttcttg

SEQ ID NO: 1737177 - DNA, 15 bp, Homo sapiens
ttggtcttttcttga

SEQ ID NO: 1737178 - DNA, 15 bp, Homo sapiens
tggtcttttcttgat

SEQ ID NO: 1737179 - DNA, 15 bp, Homo sapiens
ggtcttttcttgatg

SEQ ID NO: 1737180 - DNA, 15 bp, Homo sapiens
gtcttttcttgatga

SEQ ID NO: 1737181 - DNA, 15 bp, Homo sapiens
tcttttcttgatgag

SEQ ID NO: 1737182 - DNA, 15 bp, Homo sapiens
cttttcttgatgaga

SEQ ID NO: 1737183 - DNA, 15 bp, Homo sapiens
ttttcttgatgagaa

SEQ ID NO: 1737184 - DNA, 15 bp, Homo sapiens
tttcttgatgagaat

SEQ ID NO: 1737185 - DNA, 15 bp, Homo sapiens
ttcttgatgagaata

SEQ ID NO: 1737186 - DNA, 15 bp, Homo sapiens
tcttgatgagaatag

SEQ ID NO: 1737187 - DNA, 15 bp, Homo sapiens
cttgatgagaataga

SEQ ID NO: 1737188 - DNA, 15 bp, Homo sapiens
ttgatgagaatagaa

SEQ ID NO: 1737189 - DNA, 15 bp, Homo sapiens
tgatgagaatagaag

SEQ ID NO: 1737190 - DNA, 15 bp, Homo sapiens
gatgagaatagaagc

SEQ ID NO: 1737191 - DNA, 15 bp, Homo sapiens
atgagaatagaagct

SEQ ID NO: 1737192 - DNA, 15 bp, Homo sapiens
tgagaatagaagctt

SEQ ID NO: 1737193 - DNA, 15 bp, Homo sapiens
gagaatagaagcttt

SEQ ID NO: 1737194 - DNA, 15 bp, Homo sapiens
agaatagaagctttt

SEQ ID NO: 1737195 - DNA, 15 bp, Homo sapiens
gaatagaagcttttt

SEQ ID NO: 1737196 - DNA, 15 bp, Homo sapiens
aatagaagctttttg

SEQ ID NO: 1737197 - DNA, 15 bp, Homo sapiens
atagaagctttttgc

SEQ ID NO: 1737198 - DNA, 15 bp, Homo sapiens
tagaagctttttgca

SEQ ID NO: 1737199 - DNA, 15 bp, Homo sapiens
agaagctttttgcac

SEQ ID NO: 1737200 - DNA, 15 bp, Homo sapiens
gaagctttttgcaca

SEQ ID NO: 1737201 - DNA, 15 bp, Homo sapiens
aagctttttgcacaa

SEQ ID NO: 1737202 - DNA, 15 bp, Homo sapiens
agctttttgcacaag

SEQ ID NO: 1737203 - DNA, 15 bp, Homo sapiens
gctttttgcacaaga

SEQ ID NO: 1737204 - DNA, 15 bp, Homo sapiens
ctttttgcacaagaa

SEQ ID NO: 1737205 - DNA, 15 bp, Homo sapiens
tttttgcacaagaaa

SEQ ID NO: 1737206 - DNA, 15 bp, Homo sapiens
ttttgcacaagaaaa

SEQ ID NO: 1737207 - DNA, 15 bp, Homo sapiens
tttgcacaagaaaaa

SEQ ID NO: 1737208 - DNA, 15 bp, Homo sapiens
ttgcacaagaaaaag

SEQ ID NO: 1737209 - DNA, 15 bp, Homo sapiens
tgcacaagaaaaagg

SEQ ID NO: 1737210 - DNA, 15 bp, Homo sapiens
gcacaagaaaaaggg

SEQ ID NO: 1737211 - DNA, 15 bp, Homo sapiens
cacaagaaaaaggga

SEQ ID NO: 1737212 - DNA, 15 bp, Homo sapiens
acaagaaaaagggaa

SEQ ID NO: 1737213 - DNA, 15 bp, Homo sapiens
caagaaaaagggaaa

SEQ ID NO: 1737214 - DNA, 15 bp, Homo sapiens
aagaaaaagggaaat

SEQ ID NO: 1737215 - DNA, 15 bp, Homo sapiens
agaaaaagggaaatt

SEQ ID NO: 1737216 - DNA, 15 bp, Homo sapiens
gaaaaagggaaattt

SEQ ID NO: 1737217 - DNA, 15 bp, Homo sapiens
aaaaagggaaatttt

SEQ ID NO: 1737218 - DNA, 15 bp, Homo sapiens
aaaagggaaattttt

SEQ ID NO: 1737219 - DNA, 15 bp, Homo sapiens
aaagggaaattttta

SEQ ID NO: 1737220 - DNA, 15 bp, Homo sapiens
aagggaaatttttaa

SEQ ID NO: 1737221 - DNA, 15 bp, Homo sapiens
agggaaatttttaat

SEQ ID NO: 1737222 - DNA, 15 bp, Homo sapiens
gggaaatttttaatt

SEQ ID NO: 1737223 - DNA, 15 bp, Homo sapiens
ggaaatttttaatta

SEQ ID NO: 1737224 - DNA, 15 bp, Homo sapiens
gaaatttttaattat

SEQ ID NO: 1737225 - DNA, 15 bp, Homo sapiens
aaatttttaattatt

SEQ ID NO: 1737226 - DNA, 15 bp, Homo sapiens
aatttttaattatta

SEQ ID NO: 1737227 - DNA, 15 bp, Homo sapiens
atttttaattattaa

SEQ ID NO: 1737228 - DNA, 15 bp, Homo sapiens
tttttaattattaat

SEQ ID NO: 1737229 - DNA, 15 bp, Homo sapiens
ttttaattattaatg

SEQ ID NO: 1737230 - DNA, 15 bp, Homo sapiens
tttaattattaatgg

SEQ ID NO: 1737231 - DNA, 15 bp, Homo sapiens
ttaattattaatgga

SEQ ID NO: 1737232 - DNA, 15 bp, Homo sapiens
taattattaatggag

SEQ ID NO: 1737233 - DNA, 15 bp, Homo sapiens
aattattaatggaga

SEQ ID NO: 1737234 - DNA, 15 bp, Homo sapiens
attattaatggagat

SEQ ID NO: 1737235 - DNA, 15 bp, Homo sapiens
ttattaatggagata

SEQ ID NO: 1737236 - DNA, 15 bp, Homo sapiens
tattaatggagataa

SEQ ID NO: 1737237 - DNA, 15 bp, Homo sapiens
attaatggagataaa

SEQ ID NO: 1737238 - DNA, 15 bp, Homo sapiens
ttaatggagataaat

SEQ ID NO: 1737239 - DNA, 15 bp, Homo sapiens
taatggagataaatt

SEQ ID NO: 1737240 - DNA, 15 bp, Homo sapiens
aatggagataaatta

SEQ ID NO: 1737241 - DNA, 15 bp, Homo sapiens
atggagataaattat

SEQ ID NO: 1737242 - DNA, 15 bp, Homo sapiens
tggagataaattatc

SEQ ID NO: 1737243 - DNA, 15 bp, Homo sapiens
ggagataaattatct

SEQ ID NO: 1737244 - DNA, 15 bp, Homo sapiens
gagataaattatcta

SEQ ID NO: 1737245 - DNA, 15 bp, Homo sapiens
agataaattatctaa

SEQ ID NO: 1737246 - DNA, 15 bp, Homo sapiens
gataaattatctaaa

SEQ ID NO: 1737247 - DNA, 15 bp, Homo sapiens
ataaattatctaaat

SEQ ID NO: 1737248 - DNA, 15 bp, Homo sapiens
taaattatctaaata

SEQ ID NO: 1737249 - DNA, 15 bp, Homo sapiens
aaattatctaaataa

SEQ ID NO: 1737250 - DNA, 15 bp, Homo sapiens
aattatctaaataat

SEQ ID NO: 1737251 - DNA, 15 bp, Homo sapiens
attatctaaataatt

SEQ ID NO: 1737252 - DNA, 15 bp, Homo sapiens
ttatctaaataattt

SEQ ID NO: 1737253 - DNA, 15 bp, Homo sapiens
tatctaaataatttg

SEQ ID NO: 1737254 - DNA, 15 bp, Homo sapiens
atctaaataatttgc

SEQ ID NO: 1737255 - DNA, 15 bp, Homo sapiens
tctaaataatttgca

SEQ ID NO: 1737256 - DNA, 15 bp, Homo sapiens
ctaaataatttgcat

SEQ ID NO: 1737257 - DNA, 15 bp, Homo sapiens
taaataatttgcata

SEQ ID NO: 1737258 - DNA, 15 bp, Homo sapiens
aaataatttgcataa

SEQ ID NO: 1737259 - DNA, 15 bp, Homo sapiens
aataatttgcataac

SEQ ID NO: 1737260 - DNA, 15 bp, Homo sapiens
ataatttgcataaca

SEQ ID NO: 1737261 - DNA, 15 bp, Homo sapiens
taatttgcataacaa

SEQ ID NO: 1737262 - DNA, 15 bp, Homo sapiens
aatttgcataacaaa

SEQ ID NO: 1737263 - DNA, 15 bp, Homo sapiens
atttgcataacaaac

SEQ ID NO: 1737264 - DNA, 15 bp, Homo sapiens
tttgcataacaaaca

SEQ ID NO: 1737265 - DNA, 15 bp, Homo sapiens
ttgcataacaaacat

SEQ ID NO: 1737266 - DNA, 15 bp, Homo sapiens
tgcataacaaacatg

SEQ ID NO: 1737267 - DNA, 15 bp, Homo sapiens
gcataacaaacatga

SEQ ID NO: 1737268 - DNA, 15 bp, Homo sapiens
cataacaaacatgaa

SEQ ID NO: 1737269 - DNA, 15 bp, Homo sapiens
ataacaaacatgaac

SEQ ID NO: 1737270 - DNA, 15 bp, Homo sapiens
taacaaacatgaact

SEQ ID NO: 1737271 - DNA, 15 bp, Homo sapiens
aacaaacatgaacta

SEQ ID NO: 1737272 - DNA, 15 bp, Homo sapiens
acaaacatgaactaa

SEQ ID NO: 1737273 - DNA, 15 bp, Homo sapiens
caaacatgaactaat

SEQ ID NO: 1737274 - DNA, 15 bp, Homo sapiens
aaacatgaactaatt

SEQ ID NO: 1737275 - DNA, 15 bp, Homo sapiens
aacatgaactaatta

SEQ ID NO: 1737276 - DNA, 15 bp, Homo sapiens
acatgaactaattat

SEQ ID NO: 1737277 - DNA, 15 bp, Homo sapiens
catgaactaattata

SEQ ID NO: 1737278 - DNA, 15 bp, Homo sapiens
atgaactaattatag

SEQ ID NO: 1737279 - DNA, 15 bp, Homo sapiens
tgaactaattataga

SEQ ID NO: 1737280 - DNA, 15 bp, Homo sapiens
gaactaattatagaa

SEQ ID NO: 1737281 - DNA, 15 bp, Homo sapiens
aactaattatagaat

SEQ ID NO: 1737282 - DNA, 15 bp, Homo sapiens
actaattatagaata

SEQ ID NO: 1737283 - DNA, 15 bp, Homo sapiens
ctaattatagaatac

SEQ ID NO: 1737284 - DNA, 15 bp, Homo sapiens
taattatagaatact

SEQ ID NO: 1737285 - DNA, 15 bp, Homo sapiens
aattatagaatactt

SEQ ID NO: 1737286 - DNA, 15 bp, Homo sapiens
attatagaatacttg

SEQ ID NO: 1737287 - DNA, 15 bp, Homo sapiens
ttatagaatacttgg

SEQ ID NO: 1737288 - DNA, 15 bp, Homo sapiens
tatagaatacttgga

SEQ ID NO: 1737289 - DNA, 15 bp, Homo sapiens
atagaatacttggaa

SEQ ID NO: 1737290 - DNA, 15 bp, Homo sapiens
tagaatacttggaaa

SEQ ID NO: 1737291 - DNA, 15 bp, Homo sapiens
agaatacttggaaaa

SEQ ID NO: 1737292 - DNA, 15 bp, Homo sapiens
gaatacttggaaaac

SEQ ID NO: 1737293 - DNA, 15 bp, Homo sapiens
aatacttggaaaaca

SEQ ID NO: 1737294 - DNA, 15 bp, Homo sapiens
atacttggaaaacac

SEQ ID NO: 1737295 - DNA, 15 bp, Homo sapiens
tacttggaaaacaca

SEQ ID NO: 1737296 - DNA, 15 bp, Homo sapiens
acttggaaaacacag

SEQ ID NO: 1737297 - DNA, 15 bp, Homo sapiens
cttggaaaacacaga

SEQ ID NO: 1737298 - DNA, 15 bp, Homo sapiens
ttggaaaacacagaa

SEQ ID NO: 1737299 - DNA, 15 bp, Homo sapiens
tggaaaacacagaaa

SEQ ID NO: 1737300 - DNA, 15 bp, Homo sapiens
ggaaaacacagaaag

SEQ ID NO: 1737301 - DNA, 15 bp, Homo sapiens
gaaaacacagaaagg

SEQ ID NO: 1737302 - DNA, 15 bp, Homo sapiens
aaaacacagaaaggc

SEQ ID NO: 1737303 - DNA, 15 bp, Homo sapiens
aaacacagaaaggca

SEQ ID NO: 1737304 - DNA, 15 bp, Homo sapiens
aacacagaaaggcat

SEQ ID NO: 1737305 - DNA, 15 bp, Homo sapiens
acacagaaaggcata

SEQ ID NO: 1737306 - DNA, 15 bp, Homo sapiens
cacagaaaggcataa

SEQ ID NO: 1737307 - DNA, 15 bp, Homo sapiens
acagaaaggcataaa

SEQ ID NO: 1737308 - DNA, 15 bp, Homo sapiens
cagaaaggcataaat

SEQ ID NO: 1737309 - DNA, 15 bp, Homo sapiens
agaaaggcataaata

SEQ ID NO: 1737310 - DNA, 15 bp, Homo sapiens
gaaaggcataaataa

SEQ ID NO: 1737311 - DNA, 15 bp, Homo sapiens
aaaggcataaataaa

SEQ ID NO: 1737312 - DNA, 15 bp, Homo sapiens
aaggcataaataaaa

SEQ ID NO: 1737313 - DNA, 15 bp, Homo sapiens
aggcataaataaaat

SEQ ID NO: 1737314 - DNA, 15 bp, Homo sapiens
ggcataaataaaata

SEQ ID NO: 1737315 - DNA, 15 bp, Homo sapiens
gcataaataaaatat

SEQ ID NO: 1737316 - DNA, 15 bp, Homo sapiens
cataaataaaatatg

SEQ ID NO: 1737317 - DNA, 15 bp, Homo sapiens
ataaataaaatatga

SEQ ID NO: 1737318 - DNA, 15 bp, Homo sapiens
taaataaaatatgaa

SEQ ID NO: 1737319 - DNA, 15 bp, Homo sapiens
aaataaaatatgaat

SEQ ID NO: 1737320 - DNA, 15 bp, Homo sapiens
aataaaatatgaatc

SEQ ID NO: 1737321 - DNA, 15 bp, Homo sapiens
ataaaatatgaatcg

SEQ ID NO: 1737322 - DNA, 15 bp, Homo sapiens
taaaatatgaatcga

SEQ ID NO: 1737323 - DNA, 15 bp, Homo sapiens
aaaatatgaatcgac

SEQ ID NO: 1737324 - DNA, 15 bp, Homo sapiens
aaatatgaatcgacc

SEQ ID NO: 1737325 - DNA, 15 bp, Homo sapiens
aatatgaatcgacca

SEQ ID NO: 1737326 - DNA, 15 bp, Homo sapiens
atatgaatcgaccaa

SEQ ID NO: 1737327 - DNA, 15 bp, Homo sapiens
tatgaatcgaccaaa

SEQ ID NO: 1737328 - DNA, 15 bp, Homo sapiens
atgaatcgaccaaaa

SEQ ID NO: 1737329 - DNA, 15 bp, Homo sapiens
tgaatcgaccaaaat

SEQ ID NO: 1737330 - DNA, 15 bp, Homo sapiens
gaatcgaccaaaatg

SEQ ID NO: 1737331 - DNA, 15 bp, Homo sapiens
aatcgaccaaaatgt

SEQ ID NO: 1737332 - DNA, 15 bp, Homo sapiens
atcgaccaaaatgtc

SEQ ID NO: 1737333 - DNA, 15 bp, Homo sapiens
tcgaccaaaatgtca

SEQ ID NO: 1737334 - DNA, 15 bp, Homo sapiens
cgaccaaaatgtcaa

SEQ ID NO: 1737335 - DNA, 15 bp, Homo sapiens
gaccaaaatgtcaac

SEQ ID NO: 1737336 - DNA, 15 bp, Homo sapiens
accaaaatgtcaaca

SEQ ID NO: 1737337 - DNA, 15 bp, Homo sapiens
ccaaaatgtcaacag

SEQ ID NO: 1737338 - DNA, 15 bp, Homo sapiens
caaaatgtcaacagt

SEQ ID NO: 1737339 - DNA, 15 bp, Homo sapiens
aaaatgtcaacagtg

SEQ ID NO: 1737340 - DNA, 15 bp, Homo sapiens
aaatgtcaacagtgg

SEQ ID NO: 1737341 - DNA, 15 bp, Homo sapiens
aatgtcaacagtgga

SEQ ID NO: 1737342 - DNA, 15 bp, Homo sapiens
atgtcaacagtggag

SEQ ID NO: 1737343 - DNA, 15 bp, Homo sapiens
tgtcaacagtggaga

SEQ ID NO: 1737344 - DNA, 15 bp, Homo sapiens
gtcaacagtggagag

SEQ ID NO: 1737345 - DNA, 15 bp, Homo sapiens
tcaacagtggagaga

SEQ ID NO: 1737346 - DNA, 15 bp, Homo sapiens
caacagtggagagaa

SEQ ID NO: 1737347 - DNA, 15 bp, Homo sapiens
aacagtggagagaat

SEQ ID NO: 1737348 - DNA, 15 bp, Homo sapiens
acagtggagagaatc

SEQ ID NO: 1737349 - DNA, 15 bp, Homo sapiens
cagtggagagaatca

SEQ ID NO: 1737350 - DNA, 15 bp, Homo sapiens
agtggagagaatcac

SEQ ID NO: 1737351 - DNA, 15 bp, Homo sapiens
gtggagagaatcact

SEQ ID NO: 1737352 - DNA, 15 bp, Homo sapiens
tggagagaatcactt

SEQ ID NO: 1737353 - DNA, 15 bp, Homo sapiens
ggagagaatcacttt

SEQ ID NO: 1737354 - DNA, 15 bp, Homo sapiens
gagagaatcactttt

SEQ ID NO: 1737355 - DNA, 15 bp, Homo sapiens
agagaatcacttttc

SEQ ID NO: 1737356 - DNA, 15 bp, Homo sapiens
gagaatcacttttca

SEQ ID NO: 1737357 - DNA, 15 bp, Homo sapiens
agaatcacttttcat

SEQ ID NO: 1737358 - DNA, 15 bp, Homo sapiens
gaatcacttttcata

SEQ ID NO: 1737359 - DNA, 15 bp, Homo sapiens
aatcacttttcatat

SEQ ID NO: 1737360 - DNA, 15 bp, Homo sapiens
atcacttttcatatt

SEQ ID NO: 1737361 - DNA, 15 bp, Homo sapiens
tcacttttcatattt

SEQ ID NO: 1737362 - DNA, 15 bp, Homo sapiens
cacttttcatatttt

SEQ ID NO: 1737363 - DNA, 15 bp, Homo sapiens
acttttcatatttta

SEQ ID NO: 1737364 - DNA, 15 bp, Homo sapiens
cttttcatattttag

SEQ ID NO: 1737365 - DNA, 15 bp, Homo sapiens
ttttcatattttaga

SEQ ID NO: 1737366 - DNA, 15 bp, Homo sapiens
tttcatattttagaa

SEQ ID NO: 1737367 - DNA, 15 bp, Homo sapiens
ttcatattttagaat

SEQ ID NO: 1737368 - DNA, 15 bp, Homo sapiens
tcatattttagaatg

SEQ ID NO: 1737369 - DNA, 15 bp, Homo sapiens
catattttagaatgt

SEQ ID NO: 1737370 - DNA, 15 bp, Homo sapiens
atattttagaatgtt

SEQ ID NO: 1737371 - DNA, 15 bp, Homo sapiens
tattttagaatgttt

SEQ ID NO: 1737372 - DNA, 15 bp, Homo sapiens
attttagaatgtttc

SEQ ID NO: 1737373 - DNA, 15 bp, Homo sapiens
ttttagaatgtttct

SEQ ID NO: 1737374 - DNA, 15 bp, Homo sapiens
tttagaatgtttctt

SEQ ID NO: 1737375 - DNA, 15 bp, Homo sapiens
ttagaatgtttcttt

SEQ ID NO: 1737376 - DNA, 15 bp, Homo sapiens
tagaatgtttctttc

SEQ ID NO: 1737377 - DNA, 15 bp, Homo sapiens
agaatgtttctttcc

SEQ ID NO: 1737378 - DNA, 15 bp, Homo sapiens
gaatgtttctttcct

SEQ ID NO: 1737379 - DNA, 15 bp, Homo sapiens
aatgtttctttcctt

SEQ ID NO: 1737380 - DNA, 15 bp, Homo sapiens
atgtttctttccttt

SEQ ID NO: 1737381 - DNA, 15 bp, Homo sapiens
tgtttctttcctttg

SEQ ID NO: 1737382 - DNA, 15 bp, Homo sapiens
gtttctttcctttgg

SEQ ID NO: 1737383 - DNA, 15 bp, Homo sapiens
tttctttcctttggg

SEQ ID NO: 1737384 - DNA, 15 bp, Homo sapiens
ttctttcctttgggt

SEQ ID NO: 1737385 - DNA, 15 bp, Homo sapiens
tctttcctttgggta

SEQ ID NO: 1737386 - DNA, 15 bp, Homo sapiens
ctttcctttgggtat

SEQ ID NO: 1737387 - DNA, 15 bp, Homo sapiens
tttcctttgggtatt

SEQ ID NO: 1737388 - DNA, 15 bp, Homo sapiens
ttcctttgggtattg

SEQ ID NO: 1737389 - DNA, 15 bp, Homo sapiens
tcctttgggtattgt

SEQ ID NO: 1737390 - DNA, 15 bp, Homo sapiens
cctttgggtattgtt

SEQ ID NO: 1737391 - DNA, 15 bp, Homo sapiens
ctttgggtattgttt

SEQ ID NO: 1737392 - DNA, 15 bp, Homo sapiens
tttgggtattgtttc

SEQ ID NO: 1737393 - DNA, 15 bp, Homo sapiens
ttgggtattgtttca

SEQ ID NO: 1737394 - DNA, 15 bp, Homo sapiens
tgggtattgtttcac

SEQ ID NO: 1737395 - DNA, 15 bp, Homo sapiens
gggtattgtttcaca

SEQ ID NO: 1737396 - DNA, 15 bp, Homo sapiens
ggtattgtttcacat

SEQ ID NO: 1737397 - DNA, 15 bp, Homo sapiens
gtattgtttcacatt

SEQ ID NO: 1737398 - DNA, 15 bp, Homo sapiens
tattgtttcacattg

SEQ ID NO: 1737399 - DNA, 15 bp, Homo sapiens
attgtttcacattga

SEQ ID NO: 1737400 - DNA, 15 bp, Homo sapiens
ttgtttcacattgag

SEQ ID NO: 1737401 - DNA, 15 bp, Homo sapiens
tgtttcacattgagt

SEQ ID NO: 1737402 - DNA, 15 bp, Homo sapiens
gtttcacattgagta

SEQ ID NO: 1737403 - DNA, 15 bp, Homo sapiens
tttcacattgagtag

SEQ ID NO: 1737404 - DNA, 15 bp, Homo sapiens
ttcacattgagtaga

SEQ ID NO: 1737405 - DNA, 15 bp, Homo sapiens
tcacattgagtagaa

SEQ ID NO: 1737406 - DNA, 15 bp, Homo sapiens
cacattgagtagaat

SEQ ID NO: 1737407 - DNA, 15 bp, Homo sapiens
acattgagtagaata

SEQ ID NO: 1737408 - DNA, 15 bp, Homo sapiens
cattgagtagaatat

SEQ ID NO: 1737409 - DNA, 15 bp, Homo sapiens
attgagtagaatatt

SEQ ID NO: 1737410 - DNA, 15 bp, Homo sapiens
ttgagtagaatatta

SEQ ID NO: 1737411 - DNA, 15 bp, Homo sapiens
tgagtagaatattat

SEQ ID NO: 1737412 - DNA, 15 bp, Homo sapiens
gagtagaatattata

SEQ ID NO: 1737413 - DNA, 15 bp, Homo sapiens
agtagaatattatat

SEQ ID NO: 1737414 - DNA, 15 bp, Homo sapiens
gtagaatattatata

SEQ ID NO: 1737415 - DNA, 15 bp, Homo sapiens
tagaatattatatat

SEQ ID NO: 1737416 - DNA, 15 bp, Homo sapiens
agaatattatatata

SEQ ID NO: 1737417 - DNA, 15 bp, Homo sapiens
gaatattatatatat

SEQ ID NO: 1737418 - DNA, 15 bp, Homo sapiens
aatattatatatatg

SEQ ID NO: 1737419 - DNA, 15 bp, Homo sapiens
atattatatatatgt

SEQ ID NO: 1737420 - DNA, 15 bp, Homo sapiens
tattatatatatgtg

SEQ ID NO: 1737421 - DNA, 15 bp, Homo sapiens
attatatatatgtgt

SEQ ID NO: 1737422 - DNA, 15 bp, Homo sapiens
tgtgtgtgtgtgtgg

SEQ ID NO: 1737423 - DNA, 15 bp, Homo sapiens
gtgtgtgtgtgtggc

SEQ ID NO: 1737424 - DNA, 15 bp, Homo sapiens
tgtgtgtgtgtggct

SEQ ID NO: 1737425 - DNA, 15 bp, Homo sapiens
gtgtgtgtgtggctt

SEQ ID NO: 1737426 - DNA, 15 bp, Homo sapiens
tgtgtgtgtggcttt

SEQ ID NO: 1737427 - DNA, 15 bp, Homo sapiens
gtgtgtgtggctttt

SEQ ID NO: 1737428 - DNA, 15 bp, Homo sapiens
tgtgtgtggctttta

SEQ ID NO: 1737429 - DNA, 15 bp, Homo sapiens
gtgtgtggcttttaa

SEQ ID NO: 1737430 - DNA, 15 bp, Homo sapiens
tgtgtggcttttaaa

SEQ ID NO: 1737431 - DNA, 15 bp, Homo sapiens
gtgtggcttttaaaa

SEQ ID NO: 1737432 - DNA, 15 bp, Homo sapiens
tgtggcttttaaaat

SEQ ID NO: 1737433 - DNA, 15 bp, Homo sapiens
gtggcttttaaaatt

SEQ ID NO: 1737434 - DNA, 15 bp, Homo sapiens
tggcttttaaaattt

SEQ ID NO: 1737435 - DNA, 15 bp, Homo sapiens
ggcttttaaaattta

SEQ ID NO: 1737436 - DNA, 15 bp, Homo sapiens
gcttttaaaatttac

SEQ ID NO: 1737437 - DNA, 15 bp, Homo sapiens
cttttaaaatttacc

SEQ ID NO: 1737438 - DNA, 15 bp, Homo sapiens
ttttaaaatttacct

SEQ ID NO: 1737439 - DNA, 15 bp, Homo sapiens
tttaaaatttaccta

SEQ ID NO: 1737440 - DNA, 15 bp, Homo sapiens
ttaaaatttacctaa

SEQ ID NO: 1737441 - DNA, 15 bp, Homo sapiens
taaaatttacctaat

SEQ ID NO: 1737442 - DNA, 15 bp, Homo sapiens
aaaatttacctaatt

SEQ ID NO: 1737443 - DNA, 15 bp, Homo sapiens
aaatttacctaattg

SEQ ID NO: 1737444 - DNA, 15 bp, Homo sapiens
aatttacctaattgt

SEQ ID NO: 1737445 - DNA, 15 bp, Homo sapiens
atttacctaattgtg

SEQ ID NO: 1737446 - DNA, 15 bp, Homo sapiens
tttacctaattgtga

SEQ ID NO: 1737447 - DNA, 15 bp, Homo sapiens
ttacctaattgtgac

SEQ ID NO: 1737448 - DNA, 15 bp, Homo sapiens
tacctaattgtgact

SEQ ID NO: 1737449 - DNA, 15 bp, Homo sapiens
acctaattgtgactt

SEQ ID NO: 1737450 - DNA, 15 bp, Homo sapiens
cctaattgtgacttt

SEQ ID NO: 1737451 - DNA, 15 bp, Homo sapiens
ctaattgtgactttc

SEQ ID NO: 1737452 - DNA, 15 bp, Homo sapiens
taattgtgactttct

SEQ ID NO: 1737453 - DNA, 15 bp, Homo sapiens
aattgtgactttcta

SEQ ID NO: 1737454 - DNA, 15 bp, Homo sapiens
attgtgactttctaa

SEQ ID NO: 1737455 - DNA, 15 bp, Homo sapiens
ttgtgactttctaaa

SEQ ID NO: 1737456 - DNA, 15 bp, Homo sapiens
tgtgactttctaaat

SEQ ID NO: 1737457 - DNA, 15 bp, Homo sapiens
gtgactttctaaatt

SEQ ID NO: 1737458 - DNA, 15 bp, Homo sapiens
tgactttctaaattt

SEQ ID NO: 1737459 - DNA, 15 bp, Homo sapiens
gactttctaaatttt

SEQ ID NO: 1737460 - DNA, 15 bp, Homo sapiens
actttctaaattttt

SEQ ID NO: 1737461 - DNA, 15 bp, Homo sapiens
ctttctaaatttttt

SEQ ID NO: 1737462 - DNA, 15 bp, Homo sapiens
tttctaaattttttt

SEQ ID NO: 1737463 - DNA, 15 bp, Homo sapiens
ttctaaatttttttc

SEQ ID NO: 1737464 - DNA, 15 bp, Homo sapiens
tctaaatttttttct

SEQ ID NO: 1737465 - DNA, 15 bp, Homo sapiens
ctaaatttttttcta

SEQ ID NO: 1737466 - DNA, 15 bp, Homo sapiens
taaatttttttctat

SEQ ID NO: 1737467 - DNA, 15 bp, Homo sapiens
aaatttttttctatt

SEQ ID NO: 1737468 - DNA, 15 bp, Homo sapiens
aatttttttctattc

SEQ ID NO: 1737469 - DNA, 15 bp, Homo sapiens
atttttttctattct

SEQ ID NO: 1737470 - DNA, 15 bp, Homo sapiens
tttttttctattctt

SEQ ID NO: 1737471 - DNA, 15 bp, Homo sapiens
tttttctattcttta

SEQ ID NO: 1737472 - DNA, 15 bp, Homo sapiens
ttttctattctttaa

SEQ ID NO: 1737473 - DNA, 15 bp, Homo sapiens
tttctattctttaaa

SEQ ID NO: 1737474 - DNA, 15 bp, Homo sapiens
ttctattctttaaac

SEQ ID NO: 1737475 - DNA, 15 bp, Homo sapiens
tctattctttaaact

SEQ ID NO: 1737476 - DNA, 15 bp, Homo sapiens
ctattctttaaactt

SEQ ID NO: 1737477 - DNA, 15 bp, Homo sapiens
tattctttaaacttg

SEQ ID NO: 1737478 - DNA, 15 bp, Homo sapiens
attctttaaacttgt

SEQ ID NO: 1737479 - DNA, 15 bp, Homo sapiens
ttctttaaacttgtt

SEQ ID NO: 1737480 - DNA, 15 bp, Homo sapiens
tctttaaacttgttt

SEQ ID NO: 1737481 - DNA, 15 bp, Homo sapiens
ctttaaacttgttta

SEQ ID NO: 1737482 - DNA, 15 bp, Homo sapiens
tttaaacttgtttac

SEQ ID NO: 1737483 - DNA, 15 bp, Homo sapiens
aaacttgtttacaac

SEQ ID NO: 1737484 - DNA, 15 bp, Homo sapiens
aacttgtttacaacc

SEQ ID NO: 1737485 - DNA, 15 bp, Homo sapiens
acttgtttacaacct

SEQ ID NO: 1737486 - DNA, 15 bp, Homo sapiens
cttgtttacaacctt

SEQ ID NO: 1737487 - DNA, 15 bp, Homo sapiens
ttgtttacaaccttt

SEQ ID NO: 1737488 - DNA, 15 bp, Homo sapiens
tgtttacaacctttt

SEQ ID NO: 1737489 - DNA, 15 bp, Homo sapiens
gtttacaaccttttt

SEQ ID NO: 1737490 - DNA, 15 bp, Homo sapiens
ttacaacctttttaa

SEQ ID NO: 1737491 - DNA, 15 bp, Homo sapiens
tacaacctttttaat

SEQ ID NO: 1737492 - DNA, 15 bp, Homo sapiens
acaacctttttaatt

SEQ ID NO: 1737493 - DNA, 15 bp, Homo sapiens
caacctttttaattc

SEQ ID NO: 1737494 - DNA, 15 bp, Homo sapiens
aacctttttaattca

SEQ ID NO: 1737495 - DNA, 15 bp, Homo sapiens
acctttttaattcat

SEQ ID NO: 1737496 - DNA, 15 bp, Homo sapiens
cctttttaattcata

SEQ ID NO: 1737497 - DNA, 15 bp, Homo sapiens
ctttttaattcatat

SEQ ID NO: 1737498 - DNA, 15 bp, Homo sapiens
tttttaattcatatc

SEQ ID NO: 1737499 - DNA, 15 bp, Homo sapiens
ttttaattcatatct

SEQ ID NO: 1737500 - DNA, 15 bp, Homo sapiens
tttaattcatatctg

SEQ ID NO: 1737501 - DNA, 15 bp, Homo sapiens
ttaattcatatctgg

SEQ ID NO: 1737502 - DNA, 15 bp, Homo sapiens
taattcatatctggt

SEQ ID NO: 1737503 - DNA, 15 bp, Homo sapiens
aattcatatctggta

SEQ ID NO: 1737504 - DNA, 15 bp, Homo sapiens
attcatatctggtag

SEQ ID NO: 1737505 - DNA, 15 bp, Homo sapiens
ttcatatctggtagc

SEQ ID NO: 1737506 - DNA, 15 bp, Homo sapiens
tcatatctggtagct

SEQ ID NO: 1737507 - DNA, 15 bp, Homo sapiens
catatctggtagctt

SEQ ID NO: 1737508 - DNA, 15 bp, Homo sapiens
atatctggtagctta

SEQ ID NO: 1737509 - DNA, 15 bp, Homo sapiens
tatctggtagcttat

SEQ ID NO: 1737510 - DNA, 15 bp, Homo sapiens
atctggtagcttatt

SEQ ID NO: 1737511 - DNA, 15 bp, Homo sapiens
tctggtagcttattt

SEQ ID NO: 1737512 - DNA, 15 bp, Homo sapiens
ctggtagcttatttt

SEQ ID NO: 1737513 - DNA, 15 bp, Homo sapiens
tggtagcttatttta

SEQ ID NO: 1737514 - DNA, 15 bp, Homo sapiens
ggtagcttattttaa

SEQ ID NO: 1737515 - DNA, 15 bp, Homo sapiens
gtagcttattttaat

SEQ ID NO: 1737516 - DNA, 15 bp, Homo sapiens
tagcttattttaata

SEQ ID NO: 1737517 - DNA, 15 bp, Homo sapiens
agcttattttaatat

SEQ ID NO: 1737518 - DNA, 15 bp, Homo sapiens
gcttattttaatatg

SEQ ID NO: 1737519 - DNA, 15 bp, Homo sapiens
cttattttaatatga

SEQ ID NO: 1737520 - DNA, 15 bp, Homo sapiens
ttattttaatatgat

SEQ ID NO: 1737521 - DNA, 15 bp, Homo sapiens
tattttaatatgatc

SEQ ID NO: 1737522 - DNA, 15 bp, Homo sapiens
attttaatatgatcc

SEQ ID NO: 1737523 - DNA, 15 bp, Homo sapiens
ttttaatatgatcct

SEQ ID NO: 1737524 - DNA, 15 bp, Homo sapiens
tttaatatgatccta

SEQ ID NO: 1737525 - DNA, 15 bp, Homo sapiens
ttaatatgatcctaa

SEQ ID NO: 1737526 - DNA, 15 bp, Homo sapiens
taatatgatcctaaa

SEQ ID NO: 1737527 - DNA, 15 bp, Homo sapiens
aatatgatcctaaat

SEQ ID NO: 1737528 - DNA, 15 bp, Homo sapiens
atatgatcctaaata

SEQ ID NO: 1737529 - DNA, 15 bp, Homo sapiens
tatgatcctaaatac

SEQ ID NO: 1737530 - DNA, 15 bp, Homo sapiens
atgatcctaaataca

SEQ ID NO: 1737531 - DNA, 15 bp, Homo sapiens
tgatcctaaatacaa

SEQ ID NO: 1737532 - DNA, 15 bp, Homo sapiens
gatcctaaatacaat

SEQ ID NO: 1737533 - DNA, 15 bp, Homo sapiens
atcctaaatacaatg

SEQ ID NO: 1737534 - DNA, 15 bp, Homo sapiens
tcctaaatacaatgt

SEQ ID NO: 1737535 - DNA, 15 bp, Homo sapiens
cctaaatacaatgtt

SEQ ID NO: 1737536 - DNA, 15 bp, Homo sapiens
ctaaatacaatgttg

SEQ ID NO: 1737537 - DNA, 15 bp, Homo sapiens
taaatacaatgttgc

SEQ ID NO: 1737538 - DNA, 15 bp, Homo sapiens
aaatacaatgttgct

SEQ ID NO: 1737539 - DNA, 15 bp, Homo sapiens
aatacaatgttgctt

SEQ ID NO: 1737540 - DNA, 15 bp, Homo sapiens
atacaatgttgcttt

SEQ ID NO: 1737541 - DNA, 15 bp, Homo sapiens
tacaatgttgcttta

SEQ ID NO: 1737542 - DNA, 15 bp, Homo sapiens
acaatgttgctttag

SEQ ID NO: 1737543 - DNA, 15 bp, Homo sapiens
caatgttgctttaga

SEQ ID NO: 1737544 - DNA, 15 bp, Homo sapiens
aatgttgctttagag

SEQ ID NO: 1737545 - DNA, 15 bp, Homo sapiens
atgttgctttagagt

SEQ ID NO: 1737546 - DNA, 15 bp, Homo sapiens
tgttgctttagagtt

SEQ ID NO: 1737547 - DNA, 15 bp, Homo sapiens
gttgctttagagttt

SEQ ID NO: 1737548 - DNA, 15 bp, Homo sapiens
ttgctttagagtttt

SEQ ID NO: 1737549 - DNA, 15 bp, Homo sapiens
tgctttagagttttt

SEQ ID NO: 1737550 - DNA, 15 bp, Homo sapiens
gctttagagtttttt

SEQ ID NO: 1737551 - DNA, 15 bp, Homo sapiens
ctttagagttttttt

SEQ ID NO: 1737552 - DNA, 15 bp, Homo sapiens
tttagagtttttttg

SEQ ID NO: 1737553 - DNA, 15 bp, Homo sapiens
ttagagtttttttgg

SEQ ID NO: 1737554 - DNA, 15 bp, Homo sapiens
tagagtttttttggt

SEQ ID NO: 1737555 - DNA, 15 bp, Homo sapiens
agagtttttttggta

SEQ ID NO: 1737556 - DNA, 15 bp, Homo sapiens
gagtttttttggtac

SEQ ID NO: 1737557 - DNA, 15 bp, Homo sapiens
agtttttttggtaca

SEQ ID NO: 1737558 - DNA, 15 bp, Homo sapiens
gtttttttggtacaa

SEQ ID NO: 1737559 - DNA, 15 bp, Homo sapiens
tttttttggtacaat

SEQ ID NO: 1737560 - DNA, 15 bp, Homo sapiens
ttttttggtacaata

SEQ ID NO: 1737561 - DNA, 15 bp, Homo sapiens
tttttggtacaatat

SEQ ID NO: 1737562 - DNA, 15 bp, Homo sapiens
ttttggtacaatatt

SEQ ID NO: 1737563 - DNA, 15 bp, Homo sapiens
tttggtacaatatta

SEQ ID NO: 1737564 - DNA, 15 bp, Homo sapiens
ttggtacaatattat

SEQ ID NO: 1737565 - DNA, 15 bp, Homo sapiens
tggtacaatattatt

SEQ ID NO: 1737566 - DNA, 15 bp, Homo sapiens
ggtacaatattattt

SEQ ID NO: 1737567 - DNA, 15 bp, Homo sapiens
gtacaatattattta

SEQ ID NO: 1737568 - DNA, 15 bp, Homo sapiens
tacaatattatttag

SEQ ID NO: 1737569 - DNA, 15 bp, Homo sapiens
acaatattatttagg

SEQ ID NO: 1737570 - DNA, 15 bp, Homo sapiens
caatattatttaggc

SEQ ID NO: 1737571 - DNA, 15 bp, Homo sapiens
aatattatttaggcc

SEQ ID NO: 1737572 - DNA, 15 bp, Homo sapiens
atattatttaggccc

SEQ ID NO: 1737573 - DNA, 15 bp, Homo sapiens
tattatttaggcccc

SEQ ID NO: 1737574 - DNA, 15 bp, Homo sapiens
attatttaggcccct

SEQ ID NO: 1737575 - DNA, 15 bp, Homo sapiens
ttatttaggcccctg

SEQ ID NO: 1737576 - DNA, 15 bp, Homo sapiens
tatttaggcccctga

SEQ ID NO: 1737577 - DNA, 15 bp, Homo sapiens
atttaggcccctgaa

SEQ ID NO: 1737578 - DNA, 15 bp, Homo sapiens
tttaggcccctgaaa

SEQ ID NO: 1737579 - DNA, 15 bp, Homo sapiens
ttaggcccctgaaaa

SEQ ID NO: 1737580 - DNA, 15 bp, Homo sapiens
taggcccctgaaaaa

SEQ ID NO: 1737581 - DNA, 15 bp, Homo sapiens
aggcccctgaaaaac

SEQ ID NO: 1737582 - DNA, 15 bp, Homo sapiens
ggcccctgaaaaact

SEQ ID NO: 1737583 - DNA, 15 bp, Homo sapiens
gcccctgaaaaactg

SEQ ID NO: 1737584 - DNA, 15 bp, Homo sapiens
cccctgaaaaactgg

SEQ ID NO: 1737585 - DNA, 15 bp, Homo sapiens
ccctgaaaaactgga

SEQ ID NO: 1737586 - DNA, 15 bp, Homo sapiens
cctgaaaaactggaa

SEQ ID NO: 1737587 - DNA, 15 bp, Homo sapiens
ctgaaaaactggaaa

SEQ ID NO: 1737588 - DNA, 15 bp, Homo sapiens
tgaaaaactggaaac

SEQ ID NO: 1737589 - DNA, 15 bp, Homo sapiens
gaaaaactggaaaca

SEQ ID NO: 1737590 - DNA, 15 bp, Homo sapiens
aaaaactggaaacaa

SEQ ID NO: 1737591 - DNA, 15 bp, Homo sapiens
aaaactggaaacaac

SEQ ID NO: 1737592 - DNA, 15 bp, Homo sapiens
aaactggaaacaact

SEQ ID NO: 1737593 - DNA, 15 bp, Homo sapiens
aactggaaacaactg

SEQ ID NO: 1737594 - DNA, 15 bp, Homo sapiens
actggaaacaactga

SEQ ID NO: 1737595 - DNA, 15 bp, Homo sapiens
ctggaaacaactgat

SEQ ID NO: 1737596 - DNA, 15 bp, Homo sapiens
tggaaacaactgata

SEQ ID NO: 1737597 - DNA, 15 bp, Homo sapiens
ggaaacaactgatat

SEQ ID NO: 1737598 - DNA, 15 bp, Homo sapiens
gaaacaactgatatt

SEQ ID NO: 1737599 - DNA, 15 bp, Homo sapiens
aaacaactgatattc

SEQ ID NO: 1737600 - DNA, 15 bp, Homo sapiens
aacaactgatattca

SEQ ID NO: 1737601 - DNA, 15 bp, Homo sapiens
acaactgatattcac

SEQ ID NO: 1737602 - DNA, 15 bp, Homo sapiens
caactgatattcaca

SEQ ID NO: 1737603 - DNA, 15 bp, Homo sapiens
aactgatattcacag

SEQ ID NO: 1737604 - DNA, 15 bp, Homo sapiens
actgatattcacagc

SEQ ID NO: 1737605 - DNA, 15 bp, Homo sapiens
ctgatattcacagct

SEQ ID NO: 1737606 - DNA, 15 bp, Homo sapiens
tgatattcacagctg

SEQ ID NO: 1737607 - DNA, 15 bp, Homo sapiens
gatattcacagctga

SEQ ID NO: 1737608 - DNA, 15 bp, Homo sapiens
atattcacagctgaa

SEQ ID NO: 1737609 - DNA, 15 bp, Homo sapiens
tattcacagctgaag

SEQ ID NO: 1737610 - DNA, 15 bp, Homo sapiens
attcacagctgaagt

SEQ ID NO: 1737611 - DNA, 15 bp, Homo sapiens
ttcacagctgaagtt

SEQ ID NO: 1737612 - DNA, 15 bp, Homo sapiens
tcacagctgaagtta

SEQ ID NO: 1737613 - DNA, 15 bp, Homo sapiens
cacagctgaagttaa

SEQ ID NO: 1737614 - DNA, 15 bp, Homo sapiens
acagctgaagttaaa

SEQ ID NO: 1737615 - DNA, 15 bp, Homo sapiens
cagctgaagttaaac

SEQ ID NO: 1737616 - DNA, 15 bp, Homo sapiens
agctgaagttaaaca

SEQ ID NO: 1737617 - DNA, 15 bp, Homo sapiens
gctgaagttaaacaa

SEQ ID NO: 1737618 - DNA, 15 bp, Homo sapiens
ctgaagttaaacaat

SEQ ID NO: 1737619 - DNA, 15 bp, Homo sapiens
tgaagttaaacaata

SEQ ID NO: 1737620 - DNA, 15 bp, Homo sapiens
gaagttaaacaatac

SEQ ID NO: 1737621 - DNA, 15 bp, Homo sapiens
aagttaaacaataca

SEQ ID NO: 1737622 - DNA, 15 bp, Homo sapiens
agttaaacaatacat

SEQ ID NO: 1737623 - DNA, 15 bp, Homo sapiens
gttaaacaatacata

SEQ ID NO: 1737624 - DNA, 15 bp, Homo sapiens
ttaaacaatacatat

SEQ ID NO: 1737625 - DNA, 15 bp, Homo sapiens
taaacaatacatatt

SEQ ID NO: 1737626 - DNA, 15 bp, Homo sapiens
aaacaatacatatta

SEQ ID NO: 1737627 - DNA, 15 bp, Homo sapiens
aacaatacatattaa

SEQ ID NO: 1737628 - DNA, 15 bp, Homo sapiens
acaatacatattaaa

SEQ ID NO: 1737629 - DNA, 15 bp, Homo sapiens
caatacatattaaac

SEQ ID NO: 1737630 - DNA, 15 bp, Homo sapiens
aatacatattaaaca

SEQ ID NO: 1737631 - DNA, 15 bp, Homo sapiens
atacatattaaacat

SEQ ID NO: 1737632 - DNA, 15 bp, Homo sapiens
tacatattaaacata

SEQ ID NO: 1737633 - DNA, 15 bp, Homo sapiens
acatattaaacatat

SEQ ID NO: 1737634 - DNA, 15 bp, Homo sapiens
catattaaacatatc

SEQ ID NO: 1737635 - DNA, 15 bp, Homo sapiens
atattaaacatatct

SEQ ID NO: 1737636 - DNA, 15 bp, Homo sapiens
tattaaacatatcta

SEQ ID NO: 1737637 - DNA, 15 bp, Homo sapiens
attaaacatatctaa

SEQ ID NO: 1737638 - DNA, 15 bp, Homo sapiens
ttaaacatatctaaa

SEQ ID NO: 1737639 - DNA, 15 bp, Homo sapiens
taaacatatctaaac

SEQ ID NO: 1737640 - DNA, 15 bp, Homo sapiens
aaacatatctaaaca

SEQ ID NO: 1737641 - DNA, 15 bp, Homo sapiens
aacatatctaaacat

SEQ ID NO: 1737642 - DNA, 15 bp, Homo sapiens
acatatctaaacata

SEQ ID NO: 1737643 - DNA, 15 bp, Homo sapiens
catatctaaacataa

SEQ ID NO: 1737644 - DNA, 15 bp, Homo sapiens
atatctaaacataaa

SEQ ID NO: 1737645 - DNA, 15 bp, Homo sapiens
tatctaaacataaaa

SEQ ID NO: 1737646 - DNA, 15 bp, Homo sapiens
atctaaacataaaat

SEQ ID NO: 1737647 - DNA, 15 bp, Homo sapiens
tctaaacataaaatg

SEQ ID NO: 1737648 - DNA, 15 bp, Homo sapiens
ctaaacataaaatgt

SEQ ID NO: 1737649 - DNA, 15 bp, Homo sapiens
taaacataaaatgtt

SEQ ID NO: 1737650 - DNA, 15 bp, Homo sapiens
aaacataaaatgtta

SEQ ID NO: 1737651 - DNA, 15 bp, Homo sapiens
aacataaaatgttat

SEQ ID NO: 1737652 - DNA, 15 bp, Homo sapiens
acataaaatgttata

SEQ ID NO: 1737653 - DNA, 15 bp, Homo sapiens
cataaaatgttataa

SEQ ID NO: 1737654 - DNA, 15 bp, Homo sapiens
ataaaatgttataaa

SEQ ID NO: 1737655 - DNA, 15 bp, Homo sapiens
taaaatgttataaat

SEQ ID NO: 1737656 - DNA, 15 bp, Homo sapiens
aaaatgttataaata

SEQ ID NO: 1737657 - DNA, 15 bp, Homo sapiens
aaatgttataaatat

SEQ ID NO: 1737658 - DNA, 15 bp, Homo sapiens
aatgttataaatata

SEQ ID NO: 1737659 - DNA, 15 bp, Homo sapiens
atgttataaatataa

SEQ ID NO: 1737660 - DNA, 15 bp, Homo sapiens
tgttataaatataaa

SEQ ID NO: 1737661 - DNA, 15 bp, Homo sapiens
gttataaatataaaa

SEQ ID NO: 1737662 - DNA, 15 bp, Homo sapiens
ttataaatataaaat

SEQ ID NO: 1737663 - DNA, 15 bp, Homo sapiens
tataaatataaaata

SEQ ID NO: 1737664 - DNA, 15 bp, Homo sapiens
atataaaataaaatg

SEQ ID NO: 1737665 - DNA, 15 bp, Homo sapiens
tataaaataaaatgt

SEQ ID NO: 1737666 - DNA, 15 bp, Homo sapiens
ataaaataaaatgtg

SEQ ID NO: 1737667 - DNA, 15 bp, Homo sapiens
taaaataaaatgtga

SEQ ID NO: 1737668 - DNA, 15 bp, Homo sapiens
aaaataaaatgtgat

SEQ ID NO: 1737669 - DNA, 15 bp, Homo sapiens
aaataaaatgtgata

SEQ ID NO: 1737670 - DNA, 15 bp, Homo sapiens
aataaaatgtgataa

SEQ ID NO: 1737671 - DNA, 15 bp, Homo sapiens
ataaaatgtgataaa

SEQ ID NO: 1737672 - DNA, 15 bp, Homo sapiens
taaaatgtgataaag

SEQ ID NO: 1737673 - DNA, 15 bp, Homo sapiens
aaaatgtgataaaga

SEQ ID NO: 1737674 - DNA, 15 bp, Homo sapiens
aaatgtgataaagaa

SEQ ID NO: 1737675 - DNA, 15 bp, Homo sapiens
aatgtgataaagaat

SEQ ID NO: 1737676 - DNA, 15 bp, Homo sapiens
atgtgataaagaata

SEQ ID NO: 1737677 - DNA, 15 bp, Homo sapiens
tgtgataaagaataa

SEQ ID NO: 1737678 - DNA, 15 bp, Homo sapiens
gtgataaagaataat

SEQ ID NO: 1737679 - DNA, 15 bp, Homo sapiens
tgataaagaataatg

SEQ ID NO: 1737680 - DNA, 15 bp, Homo sapiens
gataaagaataatgg

SEQ ID NO: 1737681 - DNA, 15 bp, Homo sapiens
ataaagaataatggc

SEQ ID NO: 1737682 - DNA, 15 bp, Homo sapiens
taaagaataatggca

SEQ ID NO: 1737683 - DNA, 15 bp, Homo sapiens
aaagaataatggcaa

SEQ ID NO: 1737684 - DNA, 15 bp, Homo sapiens
aagaataatggcaat

SEQ ID NO: 1737685 - DNA, 15 bp, Homo sapiens
agaataatggcaata

SEQ ID NO: 1737686 - DNA, 15 bp, Homo sapiens
gaataatggcaatat

SEQ ID NO: 1737687 - DNA, 15 bp, Homo sapiens
aataatggcaatatt

SEQ ID NO: 1737688 - DNA, 15 bp, Homo sapiens
ataatggcaatattg

SEQ ID NO: 1737689 - DNA, 15 bp, Homo sapiens
taatggcaatattgg

SEQ ID NO: 1737690 - DNA, 15 bp, Homo sapiens
aatggcaatattggc

SEQ ID NO: 1737691 - DNA, 15 bp, Homo sapiens
atggcaatattggca

SEQ ID NO: 1737692 - DNA, 15 bp, Homo sapiens
tggcaatattggcaa

SEQ ID NO: 1737693 - DNA, 15 bp, Homo sapiens
ggcaatattggcaag

SEQ ID NO: 1737694 - DNA, 15 bp, Homo sapiens
gcaatattggcaagt

SEQ ID NO: 1737695 - DNA, 15 bp, Homo sapiens
caatattggcaagtg

SEQ ID NO: 1737696 - DNA, 15 bp, Homo sapiens
aatattggcaagtgc

SEQ ID NO: 1737697 - DNA, 15 bp, Homo sapiens
atattggcaagtgct

SEQ ID NO: 1737698 - DNA, 15 bp, Homo sapiens
tattggcaagtgctt

SEQ ID NO: 1737699 - DNA, 15 bp, Homo sapiens
attggcaagtgcttc

SEQ ID NO: 1737700 - DNA, 15 bp, Homo sapiens
ttggcaagtgcttct

SEQ ID NO: 1737701 - DNA, 15 bp, Homo sapiens
tggcaagtgcttcta

SEQ ID NO: 1737702 - DNA, 15 bp, Homo sapiens
ggcaagtgcttctaa

SEQ ID NO: 1737703 - DNA, 15 bp, Homo sapiens
gcaagtgcttctaat

SEQ ID NO: 1737704 - DNA, 15 bp, Homo sapiens
caagtgcttctaatg

SEQ ID NO: 1737705 - DNA, 15 bp, Homo sapiens
aagtgcttctaatgt

SEQ ID NO: 1737706 - DNA, 15 bp, Homo sapiens
agtgcttctaatgtt

SEQ ID NO: 1737707 - DNA, 15 bp, Homo sapiens
gtgcttctaatgtta

SEQ ID NO: 1737708 - DNA, 15 bp, Homo sapiens
tgcttctaatgttaa

SEQ ID NO: 1737709 - DNA, 15 bp, Homo sapiens
gcttctaatgttaaa

SEQ ID NO: 1737710 - DNA, 15 bp, Homo sapiens
cttctaatgttaaac

SEQ ID NO: 1737711 - DNA, 15 bp, Homo sapiens
ttctaatgttaaaca

SEQ ID NO: 1737712 - DNA, 15 bp, Homo sapiens
tctaatgttaaacaa

SEQ ID NO: 1737713 - DNA, 15 bp, Homo sapiens
ctaatgttaaacaaa

SEQ ID NO: 1737714 - DNA, 15 bp, Homo sapiens
taatgttaaacaaat

SEQ ID NO: 1737715 - DNA, 15 bp, Homo sapiens
aatgttaaacaaatg

SEQ ID NO: 1737716 - DNA, 15 bp, Homo sapiens
atgttaaacaaatga

SEQ ID NO: 1737717 - DNA, 15 bp, Homo sapiens
tgttaaacaaatgaa

SEQ ID NO: 1737718 - DNA, 15 bp, Homo sapiens
gttaaacaaatgaag

SEQ ID NO: 1737719 - DNA, 15 bp, Homo sapiens
ttaaacaaatgaagc

SEQ ID NO: 1737720 - DNA, 15 bp, Homo sapiens
taaacaaatgaagca

SEQ ID NO: 1737721 - DNA, 15 bp, Homo sapiens
aaacaaatgaagcag

SEQ ID NO: 1737722 - DNA, 15 bp, Homo sapiens
aacaaatgaagcagg

SEQ ID NO: 1737723 - DNA, 15 bp, Homo sapiens
acaaatgaagcagga

SEQ ID NO: 1737724 - DNA, 15 bp, Homo sapiens
caaatgaagcaggat

SEQ ID NO: 1737725 - DNA, 15 bp, Homo sapiens
aaatgaagcaggata

SEQ ID NO: 1737726 - DNA, 15 bp, Homo sapiens
aatgaagcaggatat

SEQ ID NO: 1737727 - DNA, 15 bp, Homo sapiens
atgaagcaggatata

SEQ ID NO: 1737728 - DNA, 15 bp, Homo sapiens
tgaagcaggatatac

SEQ ID NO: 1737729 - DNA, 15 bp, Homo sapiens
gaagcaggatatact

SEQ ID NO: 1737730 - DNA, 15 bp, Homo sapiens
aagcaggatatactc

SEQ ID NO: 1737731 - DNA, 15 bp, Homo sapiens
agcaggatatactct

SEQ ID NO: 1737732 - DNA, 15 bp, Homo sapiens
gcaggatatactctg

SEQ ID NO: 1737733 - DNA, 15 bp, Homo sapiens
caggatatactctga

SEQ ID NO: 1737734 - DNA, 15 bp, Homo sapiens
aggatatactctgat

SEQ ID NO: 1737735 - DNA, 15 bp, Homo sapiens
ggatatactctgatt

SEQ ID NO: 1737736 - DNA, 15 bp, Homo sapiens
gatatactctgatta

SEQ ID NO: 1737737 - DNA, 15 bp, Homo sapiens
atatactctgattat

SEQ ID NO: 1737738 - DNA, 15 bp, Homo sapiens
tatactctgattatg

SEQ ID NO: 1737739 - DNA, 15 bp, Homo sapiens
atactctgattatga

SEQ ID NO: 1737740 - DNA, 15 bp, Homo sapiens
tactctgattatgac

SEQ ID NO: 1737741 - DNA, 15 bp, Homo sapiens
actctgattatgact

SEQ ID NO: 1737742 - DNA, 15 bp, Homo sapiens
ctctgattatgactg

SEQ ID NO: 1737743 - DNA, 15 bp, Homo sapiens
tctgattatgactgt

SEQ ID NO: 1737744 - DNA, 15 bp, Homo sapiens
ctgattatgactgtg

SEQ ID NO: 1737745 - DNA, 15 bp, Homo sapiens
tgattatgactgtgt

SEQ ID NO: 1737746 - DNA, 15 bp, Homo sapiens
gattatgactgtgtg

SEQ ID NO: 1737747 - DNA, 15 bp, Homo sapiens
attatgactgtgtgt

SEQ ID NO: 1737748 - DNA, 15 bp, Homo sapiens
ttatgactgtgtgta

SEQ ID NO: 1737749 - DNA, 15 bp, Homo sapiens
tatgactgtgtgtaa

SEQ ID NO: 1737750 - DNA, 15 bp, Homo sapiens
atgactgtgtgtaag

SEQ ID NO: 1737751 - DNA, 15 bp, Homo sapiens
tgactgtgtgtaagg

SEQ ID NO: 1737752 - DNA, 15 bp, Homo sapiens
gactgtgtgtaagga

SEQ ID NO: 1737753 - DNA, 15 bp, Homo sapiens
actgtgtgtaaggaa

SEQ ID NO: 1737754 - DNA, 15 bp, Homo sapiens
ctgtgtgtaaggaag

SEQ ID NO: 1737755 - DNA, 15 bp, Homo sapiens
tgtgtgtaaggaaga

SEQ ID NO: 1737756 - DNA, 15 bp, Homo sapiens
gtgtgtaaggaagaa

SEQ ID NO: 1737757 - DNA, 15 bp, Homo sapiens
tgtgtaaggaagaaa

SEQ ID NO: 1737758 - DNA, 15 bp, Homo sapiens
gtgtaaggaagaaac

SEQ ID NO: 1737759 - DNA, 15 bp, Homo sapiens
tgtaaggaagaaacc

SEQ ID NO: 1737760 - DNA, 15 bp, Homo sapiens
gtaaggaagaaacct

SEQ ID NO: 1737761 - DNA, 15 bp, Homo sapiens
taaggaagaaaccta

SEQ ID NO: 1737762 - DNA, 15 bp, Homo sapiens
aaggaagaaacctag

SEQ ID NO: 1737763 - DNA, 15 bp, Homo sapiens
aggaagaaacctaga

SEQ ID NO: 1737764 - DNA, 15 bp, Homo sapiens
ggaagaaacctagac

SEQ ID NO: 1737765 - DNA, 15 bp, Homo sapiens
gaagaaacctagacc

SEQ ID NO: 1737766 - DNA, 15 bp, Homo sapiens
aagaaacctagacca

SEQ ID NO: 1737767 - DNA, 15 bp, Homo sapiens
agaaacctagaccac

SEQ ID NO: 1737768 - DNA, 15 bp, Homo sapiens
gaaacctagaccact

SEQ ID NO: 1737769 - DNA, 15 bp, Homo sapiens
aaacctagaccacta

SEQ ID NO: 1737770 - DNA, 15 bp, Homo sapiens
aacctagaccactaa

SEQ ID NO: 1737771 - DNA, 15 bp, Homo sapiens
acctagaccactaac

SEQ ID NO: 1737772 - DNA, 15 bp, Homo sapiens
cctagaccactaacg

SEQ ID NO: 1737773 - DNA, 15 bp, Homo sapiens
ctagaccactaacgc

SEQ ID NO: 1737774 - DNA, 15 bp, Homo sapiens
tagaccactaacgca

SEQ ID NO: 1737775 - DNA, 15 bp, Homo sapiens
agaccactaacgcat

SEQ ID NO: 1737776 - DNA, 15 bp, Homo sapiens
gaccactaacgcata

SEQ ID NO: 1737777 - DNA, 15 bp, Homo sapiens
accactaacgcatag

SEQ ID NO: 1737778 - DNA, 15 bp, Homo sapiens
ccactaacgcataga

SEQ ID NO: 1737779 - DNA, 15 bp, Homo sapiens
cactaacgcatagaa

SEQ ID NO: 1737780 - DNA, 15 bp, Homo sapiens
actaacgcatagaat

SEQ ID NO: 1737781 - DNA, 15 bp, Homo sapiens
ctaacgcatagaatg

SEQ ID NO: 1737782 - DNA, 15 bp, Homo sapiens
taacgcatagaatga

SEQ ID NO: 1737783 - DNA, 15 bp, Homo sapiens
aacgcatagaatgaa

SEQ ID NO: 1737784 - DNA, 15 bp, Homo sapiens
acgcatagaatgaaa

SEQ ID NO: 1737785 - DNA, 15 bp, Homo sapiens
cgcatagaatgaaat

SEQ ID NO: 1737786 - DNA, 15 bp, Homo sapiens
gcatagaatgaaatg

SEQ ID NO: 1737787 - DNA, 15 bp, Homo sapiens
catagaatgaaatga

SEQ ID NO: 1737788 - DNA, 15 bp, Homo sapiens
atagaatgaaatgac

SEQ ID NO: 1737789 - DNA, 15 bp, Homo sapiens
tagaatgaaatgact

SEQ ID NO: 1737790 - DNA, 15 bp, Homo sapiens
agaatgaaatgactg

SEQ ID NO: 1737791 - DNA, 15 bp, Homo sapiens
gaatgaaatgactgg

SEQ ID NO: 1737792 - DNA, 15 bp, Homo sapiens
aatgaaatgactgga

SEQ ID NO: 1737793 - DNA, 15 bp, Homo sapiens
atgaaatgactggag

SEQ ID NO: 1737794 - DNA, 15 bp, Homo sapiens
tgaaatgactggaga

SEQ ID NO: 1737795 - DNA, 15 bp, Homo sapiens
gaaatgactggagag

SEQ ID NO: 1737796 - DNA, 15 bp, Homo sapiens
aaatgactggagaga

SEQ ID NO: 1737797 - DNA, 15 bp, Homo sapiens
aatgactggagagaa

SEQ ID NO: 1737798 - DNA, 15 bp, Homo sapiens
atgactggagagaag

SEQ ID NO: 1737799 - DNA, 15 bp, Homo sapiens
tgactggagagaagt

SEQ ID NO: 1737800 - DNA, 15 bp, Homo sapiens
gactggagagaagtt

SEQ ID NO: 1737801 - DNA, 15 bp, Homo sapiens
actggagagaagttt

SEQ ID NO: 1737802 - DNA, 15 bp, Homo sapiens
ctggagagaagttta

SEQ ID NO: 1737803 - DNA, 15 bp, Homo sapiens
tggagagaagtttac

SEQ ID NO: 1737804 - DNA, 15 bp, Homo sapiens
ggagagaagtttacc

SEQ ID NO: 1737805 - DNA, 15 bp, Homo sapiens
gagagaagtttacca

SEQ ID NO: 1737806 - DNA, 15 bp, Homo sapiens
agagaagtttaccac

SEQ ID NO: 1737807 - DNA, 15 bp, Homo sapiens
gagaagtttaccaca

SEQ ID NO: 1737808 - DNA, 15 bp, Homo sapiens
agaagtttaccacaa

SEQ ID NO: 1737809 - DNA, 15 bp, Homo sapiens
gaagtttaccacaat

SEQ ID NO: 1737810 - DNA, 15 bp, Homo sapiens
aagtttaccacaatg

SEQ ID NO: 1737811 - DNA, 15 bp, Homo sapiens
agtttaccacaatgt

SEQ ID NO: 1737812 - DNA, 15 bp, Homo sapiens
gtttaccacaatgtt

SEQ ID NO: 1737813 - DNA, 15 bp, Homo sapiens
tttaccacaatgtta

SEQ ID NO: 1737814 - DNA, 15 bp, Homo sapiens
ttaccacaatgttaa

SEQ ID NO: 1737815 - DNA, 15 bp, Homo sapiens
taccacaatgttaac

SEQ ID NO: 1737816 - DNA, 15 bp, Homo sapiens
accacaatgttaacc

SEQ ID NO: 1737817 - DNA, 15 bp, Homo sapiens
ccacaatgttaaccc

SEQ ID NO: 1737818 - DNA, 15 bp, Homo sapiens
cacaatgttaaccca

SEQ ID NO: 1737819 - DNA, 15 bp, Homo sapiens
acaatgttaacccaa

SEQ ID NO: 1737820 - DNA, 15 bp, Homo sapiens
caatgttaacccaag

SEQ ID NO: 1737821 - DNA, 15 bp, Homo sapiens
aatgttaacccaagt

SEQ ID NO: 1737822 - DNA, 15 bp, Homo sapiens
atgttaacccaagtt

SEQ ID NO: 1737823 - DNA, 15 bp, Homo sapiens
tgttaacccaagttt

SEQ ID NO: 1737824 - DNA, 15 bp, Homo sapiens
gttaacccaagtttt

SEQ ID NO: 1737825 - DNA, 15 bp, Homo sapiens
ttaacccaagtttta

SEQ ID NO: 1737826 - DNA, 15 bp, Homo sapiens
taacccaagttttat

SEQ ID NO: 1737827 - DNA, 15 bp, Homo sapiens
aacccaagttttata

SEQ ID NO: 1737828 - DNA, 15 bp, Homo sapiens
acccaagttttatat

SEQ ID NO: 1737829 - DNA, 15 bp, Homo sapiens
cccaagttttatatg

SEQ ID NO: 1737830 - DNA, 15 bp, Homo sapiens
ccaagttttatatga

SEQ ID NO: 1737831 - DNA, 15 bp, Homo sapiens
caagttttatatgag

SEQ ID NO: 1737832 - DNA, 15 bp, Homo sapiens
aagttttatatgagt

SEQ ID NO: 1737833 - DNA, 15 bp, Homo sapiens
agttttatatgagta

SEQ ID NO: 1737834 - DNA, 15 bp, Homo sapiens
gttttatatgagtaa

SEQ ID NO: 1737835 - DNA, 15 bp, Homo sapiens
ttttatatgagtaac

SEQ ID NO: 1737836 - DNA, 15 bp, Homo sapiens
tttatatgagtaact

SEQ ID NO: 1737837 - DNA, 15 bp, Homo sapiens
ttatatgagtaactt

SEQ ID NO: 1737838 - DNA, 15 bp, Homo sapiens
tatatgagtaactta

SEQ ID NO: 1737839 - DNA, 15 bp, Homo sapiens
atatgagtaacttac

SEQ ID NO: 1737840 - DNA, 15 bp, Homo sapiens
tatgagtaacttaca

SEQ ID NO: 1737841 - DNA, 15 bp, Homo sapiens
atgagtaacttacat

SEQ ID NO: 1737842 - DNA, 15 bp, Homo sapiens
tgagtaacttacatt

SEQ ID NO: 1737843 - DNA, 15 bp, Homo sapiens
gagtaacttacattt

SEQ ID NO: 1737844 - DNA, 15 bp, Homo sapiens
agtaacttacatttg

SEQ ID NO: 1737845 - DNA, 15 bp, Homo sapiens
gtaacttacatttgt

SEQ ID NO: 1737846 - DNA, 15 bp, Homo sapiens
taacttacatttgta

SEQ ID NO: 1737847 - DNA, 15 bp, Homo sapiens
aacttacatttgtaa

SEQ ID NO: 1737848 - DNA, 15 bp, Homo sapiens
acttacatttgtaag

SEQ ID NO: 1737849 - DNA, 15 bp, Homo sapiens
cttacatttgtaagg

SEQ ID NO: 1737850 - DNA, 15 bp, Homo sapiens
ttacatttgtaagga

SEQ ID NO: 1737851 - DNA, 15 bp, Homo sapiens
tacatttgtaaggag

SEQ ID NO: 1737852 - DNA, 15 bp, Homo sapiens
acatttgtaaggagg

SEQ ID NO: 1737853 - DNA, 15 bp, Homo sapiens
catttgtaaggagga

SEQ ID NO: 1737854 - DNA, 15 bp, Homo sapiens
atttgtaaggaggat

SEQ ID NO: 1737855 - DNA, 15 bp, Homo sapiens
tttgtaaggaggatg

SEQ ID NO: 1737856 - DNA, 15 bp, Homo sapiens
ttgtaaggaggatgt

SEQ ID NO: 1737857 - DNA, 15 bp, Homo sapiens
tgtaaggaggatgta

SEQ ID NO: 1737858 - DNA, 15 bp, Homo sapiens
gtaaggaggatgtat

SEQ ID NO: 1737859 - DNA, 15 bp, Homo sapiens
taaggaggatgtatt

SEQ ID NO: 1737860 - DNA, 15 bp, Homo sapiens
aaggaggatgtatta

SEQ ID NO: 1737861 - DNA, 15 bp, Homo sapiens
aggaggatgtattac

SEQ ID NO: 1737862 - DNA, 15 bp, Homo sapiens
ggaggatgtattacc

SEQ ID NO: 1737863 - DNA, 15 bp, Homo sapiens
gaggatgtattacct

SEQ ID NO: 1737864 - DNA, 15 bp, Homo sapiens
aggatgtattacctt

SEQ ID NO: 1737865 - DNA, 15 bp, Homo sapiens
ggatgtattaccttt

SEQ ID NO: 1737866 - DNA, 15 bp, Homo sapiens
gatgtattacctttc

SEQ ID NO: 1737867 - DNA, 15 bp, Homo sapiens
atgtattacctttct

SEQ ID NO: 1737868 - DNA, 15 bp, Homo sapiens
tgtattacctttcta

SEQ ID NO: 1737869 - DNA, 15 bp, Homo sapiens
gtattacctttctag

SEQ ID NO: 1737870 - DNA, 15 bp, Homo sapiens
tattacctttctagt

SEQ ID NO: 1737871 - DNA, 15 bp, Homo sapiens
attacctttctagta

SEQ ID NO: 1737872 - DNA, 15 bp, Homo sapiens
ttacctttctagtaa

SEQ ID NO: 1737873 - DNA, 15 bp, Homo sapiens
tacctttctagtaaa

SEQ ID NO: 1737874 - DNA, 15 bp, Homo sapiens
acctttctagtaaac

SEQ ID NO: 1737875 - DNA, 15 bp, Homo sapiens
cctttctagtaaaca

SEQ ID NO: 1737876 - DNA, 15 bp, Homo sapiens
ctttctagtaaacaa

SEQ ID NO: 1737877 - DNA, 15 bp, Homo sapiens
tttctagtaaacaaa

SEQ ID NO: 1737878 - DNA, 15 bp, Homo sapiens
ttctagtaaacaaag

SEQ ID NO: 1737879 - DNA, 15 bp, Homo sapiens
tctagtaaacaaagc

SEQ ID NO: 1737880 - DNA, 15 bp, Homo sapiens
ctagtaaacaaagca

SEQ ID NO: 1737881 - DNA, 15 bp, Homo sapiens
tagtaaacaaagcaa

SEQ ID NO: 1737882 - DNA, 15 bp, Homo sapiens
agtaaacaaagcaag

SEQ ID NO: 1737883 - DNA, 15 bp, Homo sapiens
gtaaacaaagcaagc

SEQ ID NO: 1737884 - DNA, 15 bp, Homo sapiens
taaacaaagcaagca

SEQ ID NO: 1737885 - DNA, 15 bp, Homo sapiens
aaacaaagcaagcaa

SEQ ID NO: 1737886 - DNA, 15 bp, Homo sapiens
aacaaagcaagcaaa

SEQ ID NO: 1737887 - DNA, 15 bp, Homo sapiens
acaaagcaagcaaaa

SEQ ID NO: 1737888 - DNA, 15 bp, Homo sapiens
caaagcaagcaaaaa

SEQ ID NO: 1737889 - DNA, 15 bp, Homo sapiens
aaagcaagcaaaaac

SEQ ID NO: 1737890 - DNA, 15 bp, Homo sapiens
aagcaagcaaaaact

SEQ ID NO: 1737891 - DNA, 15 bp, Homo sapiens
agcaagcaaaaactt

SEQ ID NO: 1737892 - DNA, 15 bp, Homo sapiens
gcaagcaaaaacttc

SEQ ID NO: 1737893 - DNA, 15 bp, Homo sapiens
caagcaaaaacttct

SEQ ID NO: 1737894 - DNA, 15 bp, Homo sapiens
aagcaaaaacttctt

SEQ ID NO: 1737895 - DNA, 15 bp, Homo sapiens
agcaaaaacttcttt

SEQ ID NO: 1737896 - DNA, 15 bp, Homo sapiens
gcaaaaacttcttta

SEQ ID NO: 1737897 - DNA, 15 bp, Homo sapiens
caaaaacttctttaa

SEQ ID NO: 1737898 - DNA, 15 bp, Homo sapiens
aaaaacttctttaag

SEQ ID NO: 1737899 - DNA, 15 bp, Homo sapiens
aaaacttctttaagc

SEQ ID NO: 1737900 - DNA, 15 bp, Homo sapiens
aaacttctttaagcc

SEQ ID NO: 1737901 - DNA, 15 bp, Homo sapiens
aacttctttaagcca

SEQ ID NO: 1737902 - DNA, 15 bp, Homo sapiens
acttctttaagccaa

SEQ ID NO: 1737903 - DNA, 15 bp, Homo sapiens
cttctttaagccaac

SEQ ID NO: 1737904 - DNA, 15 bp, Homo sapiens
ttctttaagccaact

SEQ ID NO: 1737905 - DNA, 15 bp, Homo sapiens
tctttaagccaactt

SEQ ID NO: 1737906 - DNA, 15 bp, Homo sapiens
ctttaagccaacttt

SEQ ID NO: 1737907 - DNA, 15 bp, Homo sapiens
tttaagccaacttta

SEQ ID NO: 1737908 - DNA, 15 bp, Homo sapiens
ttaagccaactttaa

SEQ ID NO: 1737909 - DNA, 15 bp, Homo sapiens
taagccaactttaat

SEQ ID NO: 1737910 - DNA, 15 bp, Homo sapiens
aagccaactttaatg

SEQ ID NO: 1737911 - DNA, 15 bp, Homo sapiens
agccaactttaatga

SEQ ID NO: 1737912 - DNA, 15 bp, Homo sapiens
gccaactttaatgag

SEQ ID NO: 1737913 - DNA, 15 bp, Homo sapiens
ccaactttaatgagt

SEQ ID NO: 1737914 - DNA, 15 bp, Homo sapiens
caactttaatgagta

SEQ ID NO: 1737915 - DNA, 15 bp, Homo sapiens
aactttaatgagtat

SEQ ID NO: 1737916 - DNA, 15 bp, Homo sapiens
actttaatgagtatt

SEQ ID NO: 1737917 - DNA, 15 bp, Homo sapiens
ctttaatgagtattc

SEQ ID NO: 1737918 - DNA, 15 bp, Homo sapiens
tttaatgagtattct

SEQ ID NO: 1737919 - DNA, 15 bp, Homo sapiens
ttaatgagtattcta

SEQ ID NO: 1737920 - DNA, 15 bp, Homo sapiens
taatgagtattctat

SEQ ID NO: 1737921 - DNA, 15 bp, Homo sapiens
aatgagtattctata

SEQ ID NO: 1737922 - DNA, 15 bp, Homo sapiens
atgagtattctatac

SEQ ID NO: 1737923 - DNA, 15 bp, Homo sapiens
tgagtattctataca

SEQ ID NO: 1737924 - DNA, 15 bp, Homo sapiens
gagtattctatacat

SEQ ID NO: 1737925 - DNA, 15 bp, Homo sapiens
agtattctatacata

SEQ ID NO: 1737926 - DNA, 15 bp, Homo sapiens
gtattctatacatat

SEQ ID NO: 1737927 - DNA, 15 bp, Homo sapiens
tattctatacatata

SEQ ID NO: 1737928 - DNA, 15 bp, Homo sapiens
attctatacatataa

SEQ ID NO: 1737929 - DNA, 15 bp, Homo sapiens
ttctatacatataag

SEQ ID NO: 1737930 - DNA, 15 bp, Homo sapiens
tctatacatataagt

SEQ ID NO: 1737931 - DNA, 15 bp, Homo sapiens
ctatacatataagta

SEQ ID NO: 1737932 - DNA, 15 bp, Homo sapiens
tatacatataagtac

SEQ ID NO: 1737933 - DNA, 15 bp, Homo sapiens
atacatataagtact

SEQ ID NO: 1737934 - DNA, 15 bp, Homo sapiens
tacatataagtactt

SEQ ID NO: 1737935 - DNA, 15 bp, Homo sapiens
catataagtacttta

SEQ ID NO: 1737936 - DNA, 15 bp, Homo sapiens
atataagtactttaa

SEQ ID NO: 1737937 - DNA, 15 bp, Homo sapiens
tataagtactttaag

SEQ ID NO: 1737938 - DNA, 15 bp, Homo sapiens
ataagtactttaaga

SEQ ID NO: 1737939 - DNA, 15 bp, Homo sapiens
taagtactttaagat

SEQ ID NO: 1737940 - DNA, 15 bp, Homo sapiens
aagtactttaagatc

SEQ ID NO: 1737941 - DNA, 15 bp, Homo sapiens
agtactttaagatct

SEQ ID NO: 1737942 - DNA, 15 bp, Homo sapiens
gtactttaagatcta

SEQ ID NO: 1737943 - DNA, 15 bp, Homo sapiens
tactttaagatctat

SEQ ID NO: 1737944 - DNA, 15 bp, Homo sapiens
actttaagatctata

SEQ ID NO: 1737945 - DNA, 15 bp, Homo sapiens
ctttaagatctataa

SEQ ID NO: 1737946 - DNA, 15 bp, Homo sapiens
tttaagatctataat

SEQ ID NO: 1737947 - DNA, 15 bp, Homo sapiens
ttaagatctataatc

SEQ ID NO: 1737948 - DNA, 15 bp, Homo sapiens
taagatctataatca

SEQ ID NO: 1737949 - DNA, 15 bp, Homo sapiens
aagatctataatcat

SEQ ID NO: 1737950 - DNA, 15 bp, Homo sapiens
agatctataatcatc

SEQ ID NO: 1737951 - DNA, 15 bp, Homo sapiens
gatctataatcatca

SEQ ID NO: 1737952 - DNA, 15 bp, Homo sapiens
atctataatcatcag

SEQ ID NO: 1737953 - DNA, 15 bp, Homo sapiens
tctataatcatcagg

SEQ ID NO: 1737954 - DNA, 15 bp, Homo sapiens
ctataatcatcaggg

SEQ ID NO: 1737955 - DNA, 15 bp, Homo sapiens
tataatcatcagggt

SEQ ID NO: 1737956 - DNA, 15 bp, Homo sapiens
ataatcatcagggtt

SEQ ID NO: 1737957 - DNA, 15 bp, Homo sapiens
taatcatcagggttt

SEQ ID NO: 1737958 - DNA, 15 bp, Homo sapiens
aatcatcagggtttt

SEQ ID NO: 1737959 - DNA, 15 bp, Homo sapiens
atcatcagggttttt

SEQ ID NO: 1737960 - DNA, 15 bp, Homo sapiens
tcatcagggtttttt

SEQ ID NO: 1737961 - DNA, 15 bp, Homo sapiens
catcagggttttttt

SEQ ID NO: 1737962 - DNA, 15 bp, Homo sapiens
atcagggtttttttt

SEQ ID NO: 1737963 - DNA, 15 bp, Homo sapiens
tcagggttttttttt

SEQ ID NO: 1737964 - DNA, 15 bp, Homo sapiens
cagggtttttttttt

SEQ ID NO: 1737965 - DNA, 15 bp, Homo sapiens
gggtttttttttttc

SEQ ID NO: 1737966 - DNA, 15 bp, Homo sapiens
ggtttttttttttct

SEQ ID NO: 1737967 - DNA, 15 bp, Homo sapiens
gtttttttttttcta

SEQ ID NO: 1737968 - DNA, 15 bp, Homo sapiens
tttttttttttctag

SEQ ID NO: 1737969 - DNA, 15 bp, Homo sapiens
ttttttttttctaga

SEQ ID NO: 1737970 - DNA, 15 bp, Homo sapiens
tttttttttctagat

SEQ ID NO: 1737971 - DNA, 15 bp, Homo sapiens
ttttttttctagata

SEQ ID NO: 1737972 - DNA, 15 bp, Homo sapiens
tttttttctagatat

SEQ ID NO: 1737973 - DNA, 15 bp, Homo sapiens
ttttttctagatata

SEQ ID NO: 1737974 - DNA, 15 bp, Homo sapiens
tttttctagatatag

SEQ ID NO: 1737975 - DNA, 15 bp, Homo sapiens
ttttctagatataga

SEQ ID NO: 1737976 - DNA, 15 bp, Homo sapiens
tttctagatatagaa

SEQ ID NO: 1737977 - DNA, 15 bp, Homo sapiens
ttctagatatagaat

SEQ ID NO: 1737978 - DNA, 15 bp, Homo sapiens
tctagatatagaatt

SEQ ID NO: 1737979 - DNA, 15 bp, Homo sapiens
ctagatatagaattt

SEQ ID NO: 1737980 - DNA, 15 bp, Homo sapiens
tagatatagaatttg

SEQ ID NO: 1737981 - DNA, 15 bp, Homo sapiens
agatatagaatttgg

SEQ ID NO: 1737982 - DNA, 15 bp, Homo sapiens
gatatagaatttggg

SEQ ID NO: 1737983 - DNA, 15 bp, Homo sapiens
atatagaatttgggg

SEQ ID NO: 1737984 - DNA, 15 bp, Homo sapiens
tatagaatttgggga

SEQ ID NO: 1737985 - DNA, 15 bp, Homo sapiens
atagaatttggggac

SEQ ID NO: 1737986 - DNA, 15 bp, Homo sapiens
tagaatttggggact

SEQ ID NO: 1737987 - DNA, 15 bp, Homo sapiens
agaatttggggactc

SEQ ID NO: 1737988 - DNA, 15 bp, Homo sapiens
gaatttggggactca

SEQ ID NO: 1737989 - DNA, 15 bp, Homo sapiens
aatttggggactcat

SEQ ID NO: 1737990 - DNA, 15 bp, Homo sapiens
atttggggactcatt

SEQ ID NO: 1737991 - DNA, 15 bp, Homo sapiens
tttggggactcattg

SEQ ID NO: 1737992 - DNA, 15 bp, Homo sapiens
ttggggactcattgg

SEQ ID NO: 1737993 - DNA, 15 bp, Homo sapiens
tggggactcattggt

SEQ ID NO: 1737994 - DNA, 15 bp, Homo sapiens
ggggactcattggta

SEQ ID NO: 1737995 - DNA, 15 bp, Homo sapiens
gggactcattggtag

SEQ ID NO: 1737996 - DNA, 15 bp, Homo sapiens
ggactcattggtagg

SEQ ID NO: 1737997 - DNA, 15 bp, Homo sapiens
gactcattggtagga

SEQ ID NO: 1737998 - DNA, 15 bp, Homo sapiens
actcattggtaggag

SEQ ID NO: 1737999 - DNA, 15 bp, Homo sapiens
ctcattggtaggagt

SEQ ID NO: 1738000 - DNA, 15 bp, Homo sapiens
tcattggtaggagtg

SEQ ID NO: 1738001 - DNA, 15 bp, Homo sapiens
cattggtaggagtga

SEQ ID NO: 1738002 - DNA, 15 bp, Homo sapiens
attggtaggagtgat

SEQ ID NO: 1738003 - DNA, 15 bp, Homo sapiens
ttggtaggagtgatt

SEQ ID NO: 1738004 - DNA, 15 bp, Homo sapiens
tggtaggagtgattt

SEQ ID NO: 1738005 - DNA, 15 bp, Homo sapiens
ggtaggagtgatttg

SEQ ID NO: 1738006 - DNA, 15 bp, Homo sapiens
gtaggagtgatttgg

SEQ ID NO: 1738007 - DNA, 15 bp, Homo sapiens
taggagtgatttggg

SEQ ID NO: 1738008 - DNA, 15 bp, Homo sapiens
aggagtgatttgggg

SEQ ID NO: 1738009 - DNA, 15 bp, Homo sapiens
ggagtgatttggggt

SEQ ID NO: 1738010 - DNA, 15 bp, Homo sapiens
gagtgatttggggta

SEQ ID NO: 1738011 - DNA, 15 bp, Homo sapiens
agtgatttggggtac

SEQ ID NO: 1738012 - DNA, 15 bp, Homo sapiens
gtgatttggggtaca

SEQ ID NO: 1738013 - DNA, 15 bp, Homo sapiens
tgatttggggtacag

SEQ ID NO: 1738014 - DNA, 15 bp, Homo sapiens
gatttggggtacagt

SEQ ID NO: 1738015 - DNA, 15 bp, Homo sapiens
atttggggtacagtt

SEQ ID NO: 1738016 - DNA, 15 bp, Homo sapiens
tttggggtacagttc

SEQ ID NO: 1738017 - DNA, 15 bp, Homo sapiens
ttggggtacagttct

SEQ ID NO: 1738018 - DNA, 15 bp, Homo sapiens
tggggtacagttctg

SEQ ID NO: 1738019 - DNA, 15 bp, Homo sapiens
ggggtacagttctga

SEQ ID NO: 1738020 - DNA, 15 bp, Homo sapiens
gggtacagttctgat

SEQ ID NO: 1738021 - DNA, 15 bp, Homo sapiens
ggtacagttctgatt

SEQ ID NO: 1738022 - DNA, 15 bp, Homo sapiens
gtacagttctgattt

SEQ ID NO: 1738023 - DNA, 15 bp, Homo sapiens
tacagttctgatttt

SEQ ID NO: 1738024 - DNA, 15 bp, Homo sapiens
acagttctgattttt

SEQ ID NO: 1738025 - DNA, 15 bp, Homo sapiens
cagttctgatttttt

SEQ ID NO: 1738026 - DNA, 15 bp, Homo sapiens
agttctgattttttt

SEQ ID NO: 1738027 - DNA, 15 bp, Homo sapiens
gttctgatttttttt

SEQ ID NO: 1738028 - DNA, 15 bp, Homo sapiens
ttctgattttttttc

SEQ ID NO: 1738029 - DNA, 15 bp, Homo sapiens
tctgattttttttcc

SEQ ID NO: 1738030 - DNA, 15 bp, Homo sapiens
ctgattttttttcct

SEQ ID NO: 1738031 - DNA, 15 bp, Homo sapiens
tgattttttttcctg

SEQ ID NO: 1738032 - DNA, 15 bp, Homo sapiens
gattttttttcctgc

SEQ ID NO: 1738033 - DNA, 15 bp, Homo sapiens
attttttttcctgct

SEQ ID NO: 1738034 - DNA, 15 bp, Homo sapiens
ttttttttcctgcta

SEQ ID NO: 1738035 - DNA, 15 bp, Homo sapiens
tttttttcctgctat

SEQ ID NO: 1738036 - DNA, 15 bp, Homo sapiens
ttttttcctgctata

SEQ ID NO: 1738037 - DNA, 15 bp, Homo sapiens
tttttcctgctatag

SEQ ID NO: 1738038 - DNA, 15 bp, Homo sapiens
ttttcctgctatagt

SEQ ID NO: 1738039 - DNA, 15 bp, Homo sapiens
tttcctgctatagta

SEQ ID NO: 1738040 - DNA, 15 bp, Homo sapiens
ttcctgctatagtaa

SEQ ID NO: 1738041 - DNA, 15 bp, Homo sapiens
tcctgctatagtaat

SEQ ID NO: 1738042 - DNA, 15 bp, Homo sapiens
cctgctatagtaatt

SEQ ID NO: 1738043 - DNA, 15 bp, Homo sapiens
ctgctatagtaattt

SEQ ID NO: 1738044 - DNA, 15 bp, Homo sapiens
tgctatagtaatttc

SEQ ID NO: 1738045 - DNA, 15 bp, Homo sapiens
gctatagtaatttcg

SEQ ID NO: 1738046 - DNA, 15 bp, Homo sapiens
ctatagtaatttcga

SEQ ID NO: 1738047 - DNA, 15 bp, Homo sapiens
gtcaatgaagaaatt

SEQ ID NO: 1738048 - DNA, 15 bp, Homo sapiens
tcaatgaagaaatta

SEQ ID NO: 1738049 - DNA, 15 bp, Homo sapiens
caatgaagaaattaa

SEQ ID NO: 1738050 - DNA, 15 bp, Homo sapiens
aatgaagaaattaag

SEQ ID NO: 1738051 - DNA, 15 bp, Homo sapiens
atgaagaaattaaga

SEQ ID NO: 1738052 - DNA, 15 bp, Homo sapiens
tgaagaaattaagag

SEQ ID NO: 1738053 - DNA, 15 bp, Homo sapiens
gaagaaattaagagg

SEQ ID NO: 1738054 - DNA, 15 bp, Homo sapiens
aagaaattaagaggg

SEQ ID NO: 1738055 - DNA, 15 bp, Homo sapiens
agaaattaagaggga

SEQ ID NO: 1738056 - DNA, 15 bp, Homo sapiens
gaaattaagagggaa

SEQ ID NO: 1738057 - DNA, 15 bp, Homo sapiens
aaattaagagggaaa

SEQ ID NO: 1738058 - DNA, 15 bp, Homo sapiens
aattaagagggaaat

SEQ ID NO: 1738059 - DNA, 15 bp, Homo sapiens
attaagagggaaatt

SEQ ID NO: 1738060 - DNA, 15 bp, Homo sapiens
ttaagagggaaatta

SEQ ID NO: 1738061 - DNA, 15 bp, Homo sapiens
taagagggaaattaa

SEQ ID NO: 1738062 - DNA, 15 bp, Homo sapiens
aagagggaaattaaa

SEQ ID NO: 1738063 - DNA, 15 bp, Homo sapiens
agagggaaattaaaa

SEQ ID NO: 1738064 - DNA, 15 bp, Homo sapiens
gagggaaattaaaaa

SEQ ID NO: 1738065 - DNA, 15 bp, Homo sapiens
agggaaattaaaaaa

SEQ ID NO: 1738066 - DNA, 15 bp, Homo sapiens
gggaaattaaaaaaa

SEQ ID NO: 1738067 - DNA, 15 bp, Homo sapiens
ggaaattaaaaaaat

SEQ ID NO: 1738068 - DNA, 15 bp, Homo sapiens
gaaattaaaaaaatt

SEQ ID NO: 1738069 - DNA, 15 bp, Homo sapiens
aaattaaaaaaattt

SEQ ID NO: 1738070 - DNA, 15 bp, Homo sapiens
aattaaaaaaatttt

SEQ ID NO: 1738071 - DNA, 15 bp, Homo sapiens
attaaaaaaattttt

SEQ ID NO: 1738072 - DNA, 15 bp, Homo sapiens
taaaaaaatttttga

SEQ ID NO: 1738073 - DNA, 15 bp, Homo sapiens
aaaaaaatttttgaa

SEQ ID NO: 1738074 - DNA, 15 bp, Homo sapiens
aaaaaatttttgaaa

SEQ ID NO: 1738075 - DNA, 15 bp, Homo sapiens
aaaaatttttgaaac

SEQ ID NO: 1738076 - DNA, 15 bp, Homo sapiens
aaaatttttgaaaca

SEQ ID NO: 1738077 - DNA, 15 bp, Homo sapiens
aaatttttgaaacaa

SEQ ID NO: 1738078 - DNA, 15 bp, Homo sapiens
aatttttgaaacaaa

SEQ ID NO: 1738079 - DNA, 15 bp, Homo sapiens
atttttgaaacaaat

SEQ ID NO: 1738080 - DNA, 15 bp, Homo sapiens
tttttgaaacaaata

SEQ ID NO: 1738081 - DNA, 15 bp, Homo sapiens
ttttgaaacaaataa

SEQ ID NO: 1738082 - DNA, 15 bp, Homo sapiens
tttgaaacaaataat

SEQ ID NO: 1738083 - DNA, 15 bp, Homo sapiens
ttgaaacaaataatg

SEQ ID NO: 1738084 - DNA, 15 bp, Homo sapiens
tgaaacaaataatgg

SEQ ID NO: 1738085 - DNA, 15 bp, Homo sapiens
gaaacaaataatgga

SEQ ID NO: 1738086 - DNA, 15 bp, Homo sapiens
aaacaaataatggaa

SEQ ID NO: 1738087 - DNA, 15 bp, Homo sapiens
aacaaataatggaaa

SEQ ID NO: 1738088 - DNA, 15 bp, Homo sapiens
acaaataatggaaac

SEQ ID NO: 1738089 - DNA, 15 bp, Homo sapiens
caaataatggaaaca

SEQ ID NO: 1738090 - DNA, 15 bp, Homo sapiens
aataatggaaacata

SEQ ID NO: 1738091 - DNA, 15 bp, Homo sapiens
ataatggaaacataa

SEQ ID NO: 1738092 - DNA, 15 bp, Homo sapiens
taatggaaacataac

SEQ ID NO: 1738093 - DNA, 15 bp, Homo sapiens
aatggaaacataaca

SEQ ID NO: 1738094 - DNA, 15 bp, Homo sapiens
atggaaacataacaa

SEQ ID NO: 1738095 - DNA, 15 bp, Homo sapiens
tggaaacataacaaa

SEQ ID NO: 1738096 - DNA, 15 bp, Homo sapiens
ggaaacataacaaac

SEQ ID NO: 1738097 - DNA, 15 bp, Homo sapiens
gaaacataacaaacc

SEQ ID NO: 1738098 - DNA, 15 bp, Homo sapiens
aaacataacaaacca

SEQ ID NO: 1738099 - DNA, 15 bp, Homo sapiens
aacataacaaaccaa

SEQ ID NO: 1738100 - DNA, 15 bp, Homo sapiens
acataacaaaccaaa

SEQ ID NO: 1738101 - DNA, 15 bp, Homo sapiens
cataacaaaccaaaa

SEQ ID NO: 1738102 - DNA, 15 bp, Homo sapiens
ataacaaaccaaaac

SEQ ID NO: 1738103 - DNA, 15 bp, Homo sapiens
taacaaaccaaaacc

SEQ ID NO: 1738104 - DNA, 15 bp, Homo sapiens
aacaaaccaaaacct

SEQ ID NO: 1738105 - DNA, 15 bp, Homo sapiens
acaaaccaaaaccta

SEQ ID NO: 1738106 - DNA, 15 bp, Homo sapiens
caaaccaaaacctat

SEQ ID NO: 1738107 - DNA, 15 bp, Homo sapiens
aaaccaaaacctatg

SEQ ID NO: 1738108 - DNA, 15 bp, Homo sapiens
aaccaaaacctatgg

SEQ ID NO: 1738109 - DNA, 15 bp, Homo sapiens
accaaaacctatggg

SEQ ID NO: 1738110 - DNA, 15 bp, Homo sapiens
ccaaaacctatggga

SEQ ID NO: 1738111 - DNA, 15 bp, Homo sapiens
caaaacctatgggat

SEQ ID NO: 1738112 - DNA, 15 bp, Homo sapiens
aaaacctatgggata

SEQ ID NO: 1738113 - DNA, 15 bp, Homo sapiens
aaacctatgggatac

SEQ ID NO: 1738114 - DNA, 15 bp, Homo sapiens
aacctatgggataca

SEQ ID NO: 1738115 - DNA, 15 bp, Homo sapiens
acctatgggatacag

SEQ ID NO: 1738116 - DNA, 15 bp, Homo sapiens
cctatgggatacagt

SEQ ID NO: 1738117 - DNA, 15 bp, Homo sapiens
ctatgggatacagta

SEQ ID NO: 1738118 - DNA, 15 bp, Homo sapiens
tatgggatacagtaa

SEQ ID NO: 1738119 - DNA, 15 bp, Homo sapiens
atgggatacagtaaa

SEQ ID NO: 1738120 - DNA, 15 bp, Homo sapiens
tgggatacagtaaaa

SEQ ID NO: 1738121 - DNA, 15 bp, Homo sapiens
gggatacagtaaaag

SEQ ID NO: 1738122 - DNA, 15 bp, Homo sapiens
ggatacagtaaaagc

SEQ ID NO: 1738123 - DNA, 15 bp, Homo sapiens
gatacagtaaaagca

SEQ ID NO: 1738124 - DNA, 15 bp, Homo sapiens
atacagtaaaagcag

SEQ ID NO: 1738125 - DNA, 15 bp, Homo sapiens
tacagtaaaagcagt

SEQ ID NO: 1738126 - DNA, 15 bp, Homo sapiens
acagtaaaagcagta

SEQ ID NO: 1738127 - DNA, 15 bp, Homo sapiens
cagtaaaagcagtac

SEQ ID NO: 1738128 - DNA, 15 bp, Homo sapiens
agtaaaagcagtaca

SEQ ID NO: 1738129 - DNA, 15 bp, Homo sapiens
gtaaaagcagtacag

SEQ ID NO: 1738130 - DNA, 15 bp, Homo sapiens
taaaagcagtacaga

SEQ ID NO: 1738131 - DNA, 15 bp, Homo sapiens
aaaagcagtacagag

SEQ ID NO: 1738132 - DNA, 15 bp, Homo sapiens
aaagcagtacagagg

SEQ ID NO: 1738133 - DNA, 15 bp, Homo sapiens
aagcagtacagaggg

SEQ ID NO: 1738134 - DNA, 15 bp, Homo sapiens
agcagtacagaggga

SEQ ID NO: 1738135 - DNA, 15 bp, Homo sapiens
gcagtacagagggaa

SEQ ID NO: 1738136 - DNA, 15 bp, Homo sapiens
cagtacagagggaag

SEQ ID NO: 1738137 - DNA, 15 bp, Homo sapiens
agtacagagggaagt

SEQ ID NO: 1738138 - DNA, 15 bp, Homo sapiens
gtacagagggaagtt

SEQ ID NO: 1738139 - DNA, 15 bp, Homo sapiens
tacagagggaagttt

SEQ ID NO: 1738140 - DNA, 15 bp, Homo sapiens
acagagggaagttta

SEQ ID NO: 1738141 - DNA, 15 bp, Homo sapiens
cagagggaagtttat

SEQ ID NO: 1738142 - DNA, 15 bp, Homo sapiens
agagggaagtttata

SEQ ID NO: 1738143 - DNA, 15 bp, Homo sapiens
gagggaagtttatag

SEQ ID NO: 1738144 - DNA, 15 bp, Homo sapiens
agggaagtttatagc

SEQ ID NO: 1738145 - DNA, 15 bp, Homo sapiens
gggaagtttatagct

SEQ ID NO: 1738146 - DNA, 15 bp, Homo sapiens
ggaagtttatagctg

SEQ ID NO: 1738147 - DNA, 15 bp, Homo sapiens
gaagtttatagctgt

SEQ ID NO: 1738148 - DNA, 15 bp, Homo sapiens
aagtttatagctgta

SEQ ID NO: 1738149 - DNA, 15 bp, Homo sapiens
agtttatagctgtaa

SEQ ID NO: 1738150 - DNA, 15 bp, Homo sapiens
gtttatagctgtaag

SEQ ID NO: 1738151 - DNA, 15 bp, Homo sapiens
tttatagctgtaagt

SEQ ID NO: 1738152 - DNA, 15 bp, Homo sapiens
ttatagctgtaagtg

SEQ ID NO: 1738153 - DNA, 15 bp, Homo sapiens
tatagctgtaagtgc

SEQ ID NO: 1738154 - DNA, 15 bp, Homo sapiens
atagctgtaagtgcc

SEQ ID NO: 1738155 - DNA, 15 bp, Homo sapiens
tagctgtaagtgcct

SEQ ID NO: 1738156 - DNA, 15 bp, Homo sapiens
agctgtaagtgccta

SEQ ID NO: 1738157 - DNA, 15 bp, Homo sapiens
gctgtaagtgcctac

SEQ ID NO: 1738158 - DNA, 15 bp, Homo sapiens
ctgtaagtgcctaca

SEQ ID NO: 1738159 - DNA, 15 bp, Homo sapiens
tgtaagtgcctacat

SEQ ID NO: 1738160 - DNA, 15 bp, Homo sapiens
gtaagtgcctacatc

SEQ ID NO: 1738161 - DNA, 15 bp, Homo sapiens
taagtgcctacatcc

SEQ ID NO: 1738162 - DNA, 15 bp, Homo sapiens
aagtgcctacatccc

SEQ ID NO: 1738163 - DNA, 15 bp, Homo sapiens
agtgcctacatccca

SEQ ID NO: 1738164 - DNA, 15 bp, Homo sapiens
gtgcctacatcccaa

SEQ ID NO: 1738165 - DNA, 15 bp, Homo sapiens
tgcctacatcccaaa

SEQ ID NO: 1738166 - DNA, 15 bp, Homo sapiens
gcctacatcccaaaa

SEQ ID NO: 1738167 - DNA, 15 bp, Homo sapiens
cctacatcccaaaag

SEQ ID NO: 1738168 - DNA, 15 bp, Homo sapiens
ctacatcccaaaaga

SEQ ID NO: 1738169 - DNA, 15 bp, Homo sapiens
tacatcccaaaagag

SEQ ID NO: 1738170 - DNA, 15 bp, Homo sapiens
acatcccaaaagagg

SEQ ID NO: 1738171 - DNA, 15 bp, Homo sapiens
catcccaaaagagga

SEQ ID NO: 1738172 - DNA, 15 bp, Homo sapiens
atcccaaaagaggaa

SEQ ID NO: 1738173 - DNA, 15 bp, Homo sapiens
tcccaaaagaggaaa

SEQ ID NO: 1738174 - DNA, 15 bp, Homo sapiens
cccaaaagaggaaaa

SEQ ID NO: 1738175 - DNA, 15 bp, Homo sapiens
ccaaaagaggaaaac

SEQ ID NO: 1738176 - DNA, 15 bp, Homo sapiens
caaaagaggaaaaca

SEQ ID NO: 1738177 - DNA, 15 bp, Homo sapiens
aaaagaggaaaacat

SEQ ID NO: 1738178 - DNA, 15 bp, Homo sapiens
aaagaggaaaacatc

SEQ ID NO: 1738179 - DNA, 15 bp, Homo sapiens
aagaggaaaacatct

SEQ ID NO: 1738180 - DNA, 15 bp, Homo sapiens
agaggaaaacatctt

SEQ ID NO: 1738181 - DNA, 15 bp, Homo sapiens
gaggaaaacatcttt

SEQ ID NO: 1738182 - DNA, 15 bp, Homo sapiens
aggaaaacatctttt

SEQ ID NO: 1738183 - DNA, 15 bp, Homo sapiens
ggaaaacatcttttt

SEQ ID NO: 1738184 - DNA, 15 bp, Homo sapiens
gaaaacatctttttt

SEQ ID NO: 1738185 - DNA, 15 bp, Homo sapiens
aaaacatcttttttt

SEQ ID NO: 1738186 - DNA, 15 bp, Homo sapiens
aaacatcttttttta

SEQ ID NO: 1738187 - DNA, 15 bp, Homo sapiens
aacatctttttttaa

SEQ ID NO: 1738188 - DNA, 15 bp, Homo sapiens
acatctttttttaaa

SEQ ID NO: 1738189 - DNA, 15 bp, Homo sapiens
catctttttttaaaa

SEQ ID NO: 1738190 - DNA, 15 bp, Homo sapiens
atctttttttaaaaa

SEQ ID NO: 1738191 - DNA, 15 bp, Homo sapiens
tttttttaaaaaaac

SEQ ID NO: 1738192 - DNA, 15 bp, Homo sapiens
ttttttaaaaaaact

SEQ ID NO: 1738193 - DNA, 15 bp, Homo sapiens
tttttaaaaaaactt

SEQ ID NO: 1738194 - DNA, 15 bp, Homo sapiens
ttttaaaaaaacttt

SEQ ID NO: 1738195 - DNA, 15 bp, Homo sapiens
taaaaaaacttttag

SEQ ID NO: 1738196 - DNA, 15 bp, Homo sapiens
aaaaaaacttttagg

SEQ ID NO: 1738197 - DNA, 15 bp, Homo sapiens
aaaaaacttttaggt

SEQ ID NO: 1738198 - DNA, 15 bp, Homo sapiens
aaaaacttttaggtt

SEQ ID NO: 1738199 - DNA, 15 bp, Homo sapiens
aaaacttttaggttc

SEQ ID NO: 1738200 - DNA, 15 bp, Homo sapiens
aaacttttaggttca

SEQ ID NO: 1738201 - DNA, 15 bp, Homo sapiens
aacttttaggttcag

SEQ ID NO: 1738202 - DNA, 15 bp, Homo sapiens
acttttaggttcagg

SEQ ID NO: 1738203 - DNA, 15 bp, Homo sapiens
cttttaggttcaggg

SEQ ID NO: 1738204 - DNA, 15 bp, Homo sapiens
ttttaggttcagggg

SEQ ID NO: 1738205 - DNA, 15 bp, Homo sapiens
tttaggttcaggggt

SEQ ID NO: 1738206 - DNA, 15 bp, Homo sapiens
ttaggttcaggggta

SEQ ID NO: 1738207 - DNA, 15 bp, Homo sapiens
taggttcaggggtac

SEQ ID NO: 1738208 - DNA, 15 bp, Homo sapiens
aggttcaggggtaca

SEQ ID NO: 1738209 - DNA, 15 bp, Homo sapiens
ggttcaggggtacat

SEQ ID NO: 1738210 - DNA, 15 bp, Homo sapiens
caggggtacatgtga

SEQ ID NO: 1738211 - DNA, 15 bp, Homo sapiens
aggggtacatgtgat

SEQ ID NO: 1738212 - DNA, 15 bp, Homo sapiens
ggggtacatgtgatg

SEQ ID NO: 1738213 - DNA, 15 bp, Homo sapiens
gggtacatgtgatgg

SEQ ID NO: 1738214 - DNA, 15 bp, Homo sapiens
ggtacatgtgatggt

SEQ ID NO: 1738215 - DNA, 15 bp, Homo sapiens
gtacatgtgatggtt

SEQ ID NO: 1738216 - DNA, 15 bp, Homo sapiens
tacatgtgatggttt

SEQ ID NO: 1738217 - DNA, 15 bp, Homo sapiens
acatgtgatggtttg

SEQ ID NO: 1738218 - DNA, 15 bp, Homo sapiens
catgtgatggtttgt

SEQ ID NO: 1738219 - DNA, 15 bp, Homo sapiens
atgtgatggtttgtt

SEQ ID NO: 1738220 - DNA, 15 bp, Homo sapiens
tgtgatggtttgtta

SEQ ID NO: 1738221 - DNA, 15 bp, Homo sapiens
gtgatggtttgttac

SEQ ID NO: 1738222 - DNA, 15 bp, Homo sapiens
tgatggtttgttaca

SEQ ID NO: 1738223 - DNA, 15 bp, Homo sapiens
gatggtttgttacat

SEQ ID NO: 1738224 - DNA, 15 bp, Homo sapiens
atggtttgttacata

SEQ ID NO: 1738225 - DNA, 15 bp, Homo sapiens
tggtttgttacatag

SEQ ID NO: 1738226 - DNA, 15 bp, Homo sapiens
ggtttgttacatagg

SEQ ID NO: 1738227 - DNA, 15 bp, Homo sapiens
gtttgttacataggt

SEQ ID NO: 1738228 - DNA, 15 bp, Homo sapiens
acataggtaaacttg

SEQ ID NO: 1738229 - DNA, 15 bp, Homo sapiens
cataggtaaacttgt

SEQ ID NO: 1738230 - DNA, 15 bp, Homo sapiens
ataggtaaacttgtg

SEQ ID NO: 1738231 - DNA, 15 bp, Homo sapiens
taggtaaacttgtgt

SEQ ID NO: 1738232 - DNA, 15 bp, Homo sapiens
aggtaaacttgtgtc

SEQ ID NO: 1738233 - DNA, 15 bp, Homo sapiens
ggtaaacttgtgtca

SEQ ID NO: 1738234 - DNA, 15 bp, Homo sapiens
gtaaacttgtgtcac

SEQ ID NO: 1738235 - DNA, 15 bp, Homo sapiens
taaacttgtgtcaca

SEQ ID NO: 1738236 - DNA, 15 bp, Homo sapiens
aaacttgtgtcacag

SEQ ID NO: 1738237 - DNA, 15 bp, Homo sapiens
aacttgtgtcacagg

SEQ ID NO: 1738238 - DNA, 15 bp, Homo sapiens
acttgtgtcacaggg

SEQ ID NO: 1738239 - DNA, 15 bp, Homo sapiens
cttgtgtcacagggg

SEQ ID NO: 1738240 - DNA, 15 bp, Homo sapiens
ttgtgtcacaggggt

SEQ ID NO: 1738241 - DNA, 15 bp, Homo sapiens
tgtgtcacaggggtt

SEQ ID NO: 1738242 - DNA, 15 bp, Homo sapiens
gtgtcacaggggttt

SEQ ID NO: 1738243 - DNA, 15 bp, Homo sapiens
tgtcacaggggtttg

SEQ ID NO: 1738244 - DNA, 15 bp, Homo sapiens
gtcacaggggtttgt

SEQ ID NO: 1738245 - DNA, 15 bp, Homo sapiens
tcacaggggtttgtt

SEQ ID NO: 1738246 - DNA, 15 bp, Homo sapiens
cacaggggtttgttg

SEQ ID NO: 1738247 - DNA, 15 bp, Homo sapiens
acaggggtttgttgt

SEQ ID NO: 1738248 - DNA, 15 bp, Homo sapiens
caggggtttgttgta

SEQ ID NO: 1738249 - DNA, 15 bp, Homo sapiens
aggggtttgttgtac

SEQ ID NO: 1738250 - DNA, 15 bp, Homo sapiens
ggtttgttgtacagc

SEQ ID NO: 1738251 - DNA, 15 bp, Homo sapiens
gtttgttgtacagct

SEQ ID NO: 1738252 - DNA, 15 bp, Homo sapiens
tttgttgtacagctt

SEQ ID NO: 1738253 - DNA, 15 bp, Homo sapiens
ttgttgtacagctta

SEQ ID NO: 1738254 - DNA, 15 bp, Homo sapiens
tgttgtacagcttac

SEQ ID NO: 1738255 - DNA, 15 bp, Homo sapiens
gttgtacagcttact

SEQ ID NO: 1738256 - DNA, 15 bp, Homo sapiens
ttgtacagcttactt

SEQ ID NO: 1738257 - DNA, 15 bp, Homo sapiens
tgtacagcttacttc

SEQ ID NO: 1738258 - DNA, 15 bp, Homo sapiens
gtacagcttacttca

SEQ ID NO: 1738259 - DNA, 15 bp, Homo sapiens
tacagcttacttcat

SEQ ID NO: 1738260 - DNA, 15 bp, Homo sapiens
acagcttacttcatc

SEQ ID NO: 1738261 - DNA, 15 bp, Homo sapiens
cagcttacttcatca

SEQ ID NO: 1738262 - DNA, 15 bp, Homo sapiens
agcttacttcatcac

SEQ ID NO: 1738263 - DNA, 15 bp, Homo sapiens
gcttacttcatcacc

SEQ ID NO: 1738264 - DNA, 15 bp, Homo sapiens
cttacttcatcaccc

SEQ ID NO: 1738265 - DNA, 15 bp, Homo sapiens
ttacttcatcaccca

SEQ ID NO: 1738266 - DNA, 15 bp, Homo sapiens
tacttcatcacccag

SEQ ID NO: 1738267 - DNA, 15 bp, Homo sapiens
acttcatcacccagg

SEQ ID NO: 1738268 - DNA, 15 bp, Homo sapiens
cttcatcacccagga

SEQ ID NO: 1738269 - DNA, 15 bp, Homo sapiens
ttcatcacccaggaa

SEQ ID NO: 1738270 - DNA, 15 bp, Homo sapiens
tcatcacccaggaat

SEQ ID NO: 1738271 - DNA, 15 bp, Homo sapiens
catcacccaggaatt

SEQ ID NO: 1738272 - DNA, 15 bp, Homo sapiens
atcacccaggaatta

SEQ ID NO: 1738273 - DNA, 15 bp, Homo sapiens
tcacccaggaattaa

SEQ ID NO: 1738274 - DNA, 15 bp, Homo sapiens
cacccaggaattaag

SEQ ID NO: 1738275 - DNA, 15 bp, Homo sapiens
acccaggaattaagc

SEQ ID NO: 1738276 - DNA, 15 bp, Homo sapiens
cccaggaattaagcc

SEQ ID NO: 1738277 - DNA, 15 bp, Homo sapiens
ccaggaattaagccc

SEQ ID NO: 1738278 - DNA, 15 bp, Homo sapiens
caggaattaagccca

SEQ ID NO: 1738279 - DNA, 15 bp, Homo sapiens
aggaattaagcccag

SEQ ID NO: 1738280 - DNA, 15 bp, Homo sapiens
ggaattaagcccagt

SEQ ID NO: 1738281 - DNA, 15 bp, Homo sapiens
gaattaagcccagta

SEQ ID NO: 1738282 - DNA, 15 bp, Homo sapiens
aattaagcccagtat

SEQ ID NO: 1738283 - DNA, 15 bp, Homo sapiens
attaagcccagtatc

SEQ ID NO: 1738284 - DNA, 15 bp, Homo sapiens
ttaagcccagtatcc

SEQ ID NO: 1738285 - DNA, 15 bp, Homo sapiens
taagcccagtatcca

SEQ ID NO: 1738286 - DNA, 15 bp, Homo sapiens
aagcccagtatccaa

SEQ ID NO: 1738287 - DNA, 15 bp, Homo sapiens
agcccagtatccaat

SEQ ID NO: 1738288 - DNA, 15 bp, Homo sapiens
gcccagtatccaata

SEQ ID NO: 1738289 - DNA, 15 bp, Homo sapiens
cccagtatccaatag

SEQ ID NO: 1738290 - DNA, 15 bp, Homo sapiens
ccagtatccaatagc

SEQ ID NO: 1738291 - DNA, 15 bp, Homo sapiens
cagtatccaatagct

SEQ ID NO: 1738292 - DNA, 15 bp, Homo sapiens
agtatccaatagcta

SEQ ID NO: 1738293 - DNA, 15 bp, Homo sapiens
gtatccaatagctat

SEQ ID NO: 1738294 - DNA, 15 bp, Homo sapiens
tatccaatagctatt

SEQ ID NO: 1738295 - DNA, 15 bp, Homo sapiens
atccaatagctattt

SEQ ID NO: 1738296 - DNA, 15 bp, Homo sapiens
tccaatagctatttt

SEQ ID NO: 1738297 - DNA, 15 bp, Homo sapiens
ccaatagctattttt

SEQ ID NO: 1738298 - DNA, 15 bp, Homo sapiens
caatagctatttttt

SEQ ID NO: 1738299 - DNA, 15 bp, Homo sapiens
aatagctattttttc

SEQ ID NO: 1738300 - DNA, 15 bp, Homo sapiens
atagctattttttct

SEQ ID NO: 1738301 - DNA, 15 bp, Homo sapiens
tagctattttttctg

SEQ ID NO: 1738302 - DNA, 15 bp, Homo sapiens
agctattttttctgt

SEQ ID NO: 1738303 - DNA, 15 bp, Homo sapiens
gctattttttctgtt

SEQ ID NO: 1738304 - DNA, 15 bp, Homo sapiens
ctattttttctgttc

SEQ ID NO: 1738305 - DNA, 15 bp, Homo sapiens
tattttttctgttcc

SEQ ID NO: 1738306 - DNA, 15 bp, Homo sapiens
attttttctgttcct

SEQ ID NO: 1738307 - DNA, 15 bp, Homo sapiens
ttttttctgttcctc

SEQ ID NO: 1738308 - DNA, 15 bp, Homo sapiens
tttttctgttcctct

SEQ ID NO: 1738309 - DNA, 15 bp, Homo sapiens
ttttctgttcctctc

SEQ ID NO: 1738310 - DNA, 15 bp, Homo sapiens
tttctgttcctctcc

SEQ ID NO: 1738311 - DNA, 15 bp, Homo sapiens
ttctgttcctctccc

SEQ ID NO: 1738312 - DNA, 15 bp, Homo sapiens
tctgttcctctccct

SEQ ID NO: 1738313 - DNA, 15 bp, Homo sapiens
ctgttcctctccctc

SEQ ID NO: 1738314 - DNA, 15 bp, Homo sapiens
tgttcctctccctct

SEQ ID NO: 1738315 - DNA, 15 bp, Homo sapiens
gttcctctccctctt

SEQ ID NO: 1738316 - DNA, 15 bp, Homo sapiens
ttcctctccctcttc

SEQ ID NO: 1738317 - DNA, 15 bp, Homo sapiens
tcctctccctcttcc

SEQ ID NO: 1738318 - DNA, 15 bp, Homo sapiens
cctctccctcttccc

SEQ ID NO: 1738319 - DNA, 15 bp, Homo sapiens
ctctccctcttccca

SEQ ID NO: 1738320 - DNA, 15 bp, Homo sapiens
tctccctcttcccac

SEQ ID NO: 1738321 - DNA, 15 bp, Homo sapiens
ctccctcttcccact

SEQ ID NO: 1738322 - DNA, 15 bp, Homo sapiens
tccctcttcccactt

SEQ ID NO: 1738323 - DNA, 15 bp, Homo sapiens
ccctcttcccacttt

SEQ ID NO: 1738324 - DNA, 15 bp, Homo sapiens
cctcttcccactttc

SEQ ID NO: 1738325 - DNA, 15 bp, Homo sapiens
ctcttcccactttcc

SEQ ID NO: 1738326 - DNA, 15 bp, Homo sapiens
tcttcccactttcca

SEQ ID NO: 1738327 - DNA, 15 bp, Homo sapiens
cttcccactttccac

SEQ ID NO: 1738328 - DNA, 15 bp, Homo sapiens
ttcccactttccacc

SEQ ID NO: 1738329 - DNA, 15 bp, Homo sapiens
tcccactttccacct

SEQ ID NO: 1738330 - DNA, 15 bp, Homo sapiens
cccactttccacctt

SEQ ID NO: 1738331 - DNA, 15 bp, Homo sapiens
ccactttccaccttc

SEQ ID NO: 1738332 - DNA, 15 bp, Homo sapiens
cactttccaccttca

SEQ ID NO: 1738333 - DNA, 15 bp, Homo sapiens
actttccaccttcaa

SEQ ID NO: 1738334 - DNA, 15 bp, Homo sapiens
ctttccaccttcaag

SEQ ID NO: 1738335 - DNA, 15 bp, Homo sapiens
tttccaccttcaagt

SEQ ID NO: 1738336 - DNA, 15 bp, Homo sapiens
ttccaccttcaagta

SEQ ID NO: 1738337 - DNA, 15 bp, Homo sapiens
tccaccttcaagtag

SEQ ID NO: 1738338 - DNA, 15 bp, Homo sapiens
ccaccttcaagtaga

SEQ ID NO: 1738339 - DNA, 15 bp, Homo sapiens
caccttcaagtagac

SEQ ID NO: 1738340 - DNA, 15 bp, Homo sapiens
accttcaagtagacc

SEQ ID NO: 1738341 - DNA, 15 bp, Homo sapiens
ccttcaagtagaccc

SEQ ID NO: 1738342 - DNA, 15 bp, Homo sapiens
cttcaagtagacccc

SEQ ID NO: 1738343 - DNA, 15 bp, Homo sapiens
ttcaagtagacccca

SEQ ID NO: 1738344 - DNA, 15 bp, Homo sapiens
tcaagtagaccccag

SEQ ID NO: 1738345 - DNA, 15 bp, Homo sapiens
caagtagaccccagt

SEQ ID NO: 1738346 - DNA, 15 bp, Homo sapiens
aagtagaccccagtg

SEQ ID NO: 1738347 - DNA, 15 bp, Homo sapiens
agtagaccccagtgc

SEQ ID NO: 1738348 - DNA, 15 bp, Homo sapiens
gtagaccccagtgcc

SEQ ID NO: 1738349 - DNA, 15 bp, Homo sapiens
tagaccccagtgcct

SEQ ID NO: 1738350 - DNA, 15 bp, Homo sapiens
agaccccagtgcctg

SEQ ID NO: 1738351 - DNA, 15 bp, Homo sapiens
gaccccagtgcctgt

SEQ ID NO: 1738352 - DNA, 15 bp, Homo sapiens
accccagtgcctgtt

SEQ ID NO: 1738353 - DNA, 15 bp, Homo sapiens
ccccagtgcctgttg

SEQ ID NO: 1738354 - DNA, 15 bp, Homo sapiens
cccagtgcctgttgt

SEQ ID NO: 1738355 - DNA, 15 bp, Homo sapiens
ccagtgcctgttgtt

SEQ ID NO: 1738356 - DNA, 15 bp, Homo sapiens
cagtgcctgttgttt

SEQ ID NO: 1738357 - DNA, 15 bp, Homo sapiens
agtgcctgttgtttc

SEQ ID NO: 1738358 - DNA, 15 bp, Homo sapiens
gtgcctgttgtttcc

SEQ ID NO: 1738359 - DNA, 15 bp, Homo sapiens
tgcctgttgtttcca

SEQ ID NO: 1738360 - DNA, 15 bp, Homo sapiens
gcctgttgtttccat

SEQ ID NO: 1738361 - DNA, 15 bp, Homo sapiens
cctgttgtttccatc

SEQ ID NO: 1738362 - DNA, 15 bp, Homo sapiens
ctgttgtttccatct

SEQ ID NO: 1738363 - DNA, 15 bp, Homo sapiens
tgttgtttccatctt

SEQ ID NO: 1738364 - DNA, 15 bp, Homo sapiens
gttgtttccatcttt

SEQ ID NO: 1738365 - DNA, 15 bp, Homo sapiens
ttgtttccatctttg

SEQ ID NO: 1738366 - DNA, 15 bp, Homo sapiens
tgtttccatctttgt

SEQ ID NO: 1738367 - DNA, 15 bp, Homo sapiens
gtttccatctttgtg

SEQ ID NO: 1738368 - DNA, 15 bp, Homo sapiens
tttccatctttgtgt

SEQ ID NO: 1738369 - DNA, 15 bp, Homo sapiens
ttccatctttgtgtt

SEQ ID NO: 1738370 - DNA, 15 bp, Homo sapiens
tccatctttgtgttc

SEQ ID NO: 1738371 - DNA, 15 bp, Homo sapiens
ccatctttgtgttct

SEQ ID NO: 1738372 - DNA, 15 bp, Homo sapiens
catctttgtgttctt

SEQ ID NO: 1738373 - DNA, 15 bp, Homo sapiens
atctttgtgttcttc

SEQ ID NO: 1738374 - DNA, 15 bp, Homo sapiens
tctttgtgttcttca

SEQ ID NO: 1738375 - DNA, 15 bp, Homo sapiens
ctttgtgttcttcag

SEQ ID NO: 1738376 - DNA, 15 bp, Homo sapiens
tttgtgttcttcagt

SEQ ID NO: 1738377 - DNA, 15 bp, Homo sapiens
ttgtgttcttcagtt

SEQ ID NO: 1738378 - DNA, 15 bp, Homo sapiens
tgtgttcttcagttt

SEQ ID NO: 1738379 - DNA, 15 bp, Homo sapiens
gtgttcttcagtttt

SEQ ID NO: 1738380 - DNA, 15 bp, Homo sapiens
tgttcttcagttttc

SEQ ID NO: 1738381 - DNA, 15 bp, Homo sapiens
gttcttcagttttca

SEQ ID NO: 1738382 - DNA, 15 bp, Homo sapiens
ttcttcagttttcat

SEQ ID NO: 1738383 - DNA, 15 bp, Homo sapiens
tcttcagttttcatc

SEQ ID NO: 1738384 - DNA, 15 bp, Homo sapiens
cttcagttttcatca

SEQ ID NO: 1738385 - DNA, 15 bp, Homo sapiens
ttcagttttcatcat

SEQ ID NO: 1738386 - DNA, 15 bp, Homo sapiens
tcagttttcatcatt

SEQ ID NO: 1738387 - DNA, 15 bp, Homo sapiens
cagttttcatcattt

SEQ ID NO: 1738388 - DNA, 15 bp, Homo sapiens
agttttcatcattta

SEQ ID NO: 1738389 - DNA, 15 bp, Homo sapiens
gttttcatcatttag

SEQ ID NO: 1738390 - DNA, 15 bp, Homo sapiens
ttttcatcatttagc

SEQ ID NO: 1738391 - DNA, 15 bp, Homo sapiens
tttcatcatttagct

SEQ ID NO: 1738392 - DNA, 15 bp, Homo sapiens
ttcatcatttagctc

SEQ ID NO: 1738393 - DNA, 15 bp, Homo sapiens
tcatcatttagctcc

SEQ ID NO: 1738394 - DNA, 15 bp, Homo sapiens
catcatttagctccc

SEQ ID NO: 1738395 - DNA, 15 bp, Homo sapiens
atcatttagctccca

SEQ ID NO: 1738396 - DNA, 15 bp, Homo sapiens
tcatttagctcccac

SEQ ID NO: 1738397 - DNA, 15 bp, Homo sapiens
catttagctcccact

SEQ ID NO: 1738398 - DNA, 15 bp, Homo sapiens
atttagctcccactt

SEQ ID NO: 1738399 - DNA, 15 bp, Homo sapiens
cacttataagtgagg

SEQ ID NO: 1738400 - DNA, 15 bp, Homo sapiens
acttataagtgaggc

SEQ ID NO: 1738401 - DNA, 15 bp, Homo sapiens
cttataagtgaggcc

SEQ ID NO: 1738402 - DNA, 15 bp, Homo sapiens
ttataagtgaggcca

SEQ ID NO: 1738403 - DNA, 15 bp, Homo sapiens
tataagtgaggccat

SEQ ID NO: 1738404 - DNA, 15 bp, Homo sapiens
ataagtgaggccatg

SEQ ID NO: 1738405 - DNA, 15 bp, Homo sapiens
taagtgaggccatgc

SEQ ID NO: 1738406 - DNA, 15 bp, Homo sapiens
aagtgaggccatgca

SEQ ID NO: 1738407 - DNA, 15 bp, Homo sapiens
agtgaggccatgcag

SEQ ID NO: 1738408 - DNA, 15 bp, Homo sapiens
gtgaggccatgcagt

SEQ ID NO: 1738409 - DNA, 15 bp, Homo sapiens
tgaggccatgcagta

SEQ ID NO: 1738410 - DNA, 15 bp, Homo sapiens
gaggccatgcagtat

SEQ ID NO: 1738411 - DNA, 15 bp, Homo sapiens
aggccatgcagtatt

SEQ ID NO: 1738412 - DNA, 15 bp, Homo sapiens
ggccatgcagtattt

SEQ ID NO: 1738413 - DNA, 15 bp, Homo sapiens
gccatgcagtattta

SEQ ID NO: 1738414 - DNA, 15 bp, Homo sapiens
ccatgcagtatttag

SEQ ID NO: 1738415 - DNA, 15 bp, Homo sapiens
catgcagtatttagt

SEQ ID NO: 1738416 - DNA, 15 bp, Homo sapiens
atgcagtatttagtt

SEQ ID NO: 1738417 - DNA, 15 bp, Homo sapiens
tgcagtatttagttt

SEQ ID NO: 1738418 - DNA, 15 bp, Homo sapiens
gcagtatttagtttt

SEQ ID NO: 1738419 - DNA, 15 bp, Homo sapiens
cagtatttagttttt

SEQ ID NO: 1738420 - DNA, 15 bp, Homo sapiens
agtatttagtttttt

SEQ ID NO: 1738421 - DNA, 15 bp, Homo sapiens
gtatttagtttttta

SEQ ID NO: 1738422 - DNA, 15 bp, Homo sapiens
tatttagttttttat

SEQ ID NO: 1738423 - DNA, 15 bp, Homo sapiens
atttagttttttatt

SEQ ID NO: 1738424 - DNA, 15 bp, Homo sapiens
tttagttttttattc

SEQ ID NO: 1738425 - DNA, 15 bp, Homo sapiens
ttagttttttattcc

SEQ ID NO: 1738426 - DNA, 15 bp, Homo sapiens
tagttttttattcct

SEQ ID NO: 1738427 - DNA, 15 bp, Homo sapiens
agttttttattcctg

SEQ ID NO: 1738428 - DNA, 15 bp, Homo sapiens
gttttttattcctgc

SEQ ID NO: 1738429 - DNA, 15 bp, Homo sapiens
ttttttattcctgca

SEQ ID NO: 1738430 - DNA, 15 bp, Homo sapiens
tttttattcctgcat

SEQ ID NO: 1738431 - DNA, 15 bp, Homo sapiens
ttttattcctgcatt

SEQ ID NO: 1738432 - DNA, 15 bp, Homo sapiens
tttattcctgcatta

SEQ ID NO: 1738433 - DNA, 15 bp, Homo sapiens
ttattcctgcattag

SEQ ID NO: 1738434 - DNA, 15 bp, Homo sapiens
tattcctgcattagt

SEQ ID NO: 1738435 - DNA, 15 bp, Homo sapiens
attcctgcattagtt

SEQ ID NO: 1738436 - DNA, 15 bp, Homo sapiens
ttcctgcattagttt

SEQ ID NO: 1738437 - DNA, 15 bp, Homo sapiens
tcctgcattagtttg

SEQ ID NO: 1738438 - DNA, 15 bp, Homo sapiens
cctgcattagtttgc

SEQ ID NO: 1738439 - DNA, 15 bp, Homo sapiens
ctgcattagtttgct

SEQ ID NO: 1738440 - DNA, 15 bp, Homo sapiens
tgcattagtttgcta

SEQ ID NO: 1738441 - DNA, 15 bp, Homo sapiens
gcattagtttgctaa

SEQ ID NO: 1738442 - DNA, 15 bp, Homo sapiens
cattagtttgctaag

SEQ ID NO: 1738443 - DNA, 15 bp, Homo sapiens
attagtttgctaagg

SEQ ID NO: 1738444 - DNA, 15 bp, Homo sapiens
ttgctaaggataata

SEQ ID NO: 1738445 - DNA, 15 bp, Homo sapiens
tgctaaggataatag

SEQ ID NO: 1738446 - DNA, 15 bp, Homo sapiens
gctaaggataatagc

SEQ ID NO: 1738447 - DNA, 15 bp, Homo sapiens
ctaaggataatagcc

SEQ ID NO: 1738448 - DNA, 15 bp, Homo sapiens
taaggataatagcct

SEQ ID NO: 1738449 - DNA, 15 bp, Homo sapiens
aaggataatagcctc

SEQ ID NO: 1738450 - DNA, 15 bp, Homo sapiens
aggataatagcctcc

SEQ ID NO: 1738451 - DNA, 15 bp, Homo sapiens
ggataatagcctcca

SEQ ID NO: 1738452 - DNA, 15 bp, Homo sapiens
gataatagcctccag

SEQ ID NO: 1738453 - DNA, 15 bp, Homo sapiens
ataatagcctccagc

SEQ ID NO: 1738454 - DNA, 15 bp, Homo sapiens
taatagcctccagct

SEQ ID NO: 1738455 - DNA, 15 bp, Homo sapiens
aatagcctccagctc

SEQ ID NO: 1738456 - DNA, 15 bp, Homo sapiens
atagcctccagctcc

SEQ ID NO: 1738457 - DNA, 15 bp, Homo sapiens
tagcctccagctcca

SEQ ID NO: 1738458 - DNA, 15 bp, Homo sapiens
agcctccagctccat

SEQ ID NO: 1738459 - DNA, 15 bp, Homo sapiens
gcctccagctccatc

SEQ ID NO: 1738460 - DNA, 15 bp, Homo sapiens
cctccagctccatcc

SEQ ID NO: 1738461 - DNA, 15 bp, Homo sapiens
ctccagctccatcca

SEQ ID NO: 1738462 - DNA, 15 bp, Homo sapiens
tccagctccatccat

SEQ ID NO: 1738463 - DNA, 15 bp, Homo sapiens
ccagctccatccatg

SEQ ID NO: 1738464 - DNA, 15 bp, Homo sapiens
cagctccatccatgt

SEQ ID NO: 1738465 - DNA, 15 bp, Homo sapiens
agctccatccatgtt

SEQ ID NO: 1738466 - DNA, 15 bp, Homo sapiens
catccatgttcctgt

SEQ ID NO: 1738467 - DNA, 15 bp, Homo sapiens
atccatgttcctgtg

SEQ ID NO: 1738468 - DNA, 15 bp, Homo sapiens
tccatgttcctgtga

SEQ ID NO: 1738469 - DNA, 15 bp, Homo sapiens
ccatgttcctgtgaa

SEQ ID NO: 1738470 - DNA, 15 bp, Homo sapiens
catgttcctgtgaag

SEQ ID NO: 1738471 - DNA, 15 bp, Homo sapiens
atgttcctgtgaagg

SEQ ID NO: 1738472 - DNA, 15 bp, Homo sapiens
tgttcctgtgaagga

SEQ ID NO: 1738473 - DNA, 15 bp, Homo sapiens
gttcctgtgaaggac

SEQ ID NO: 1738474 - DNA, 15 bp, Homo sapiens
ttcctgtgaaggaca

SEQ ID NO: 1738475 - DNA, 15 bp, Homo sapiens
tcctgtgaaggacat

SEQ ID NO: 1738476 - DNA, 15 bp, Homo sapiens
cctgtgaaggacatg

SEQ ID NO: 1738477 - DNA, 15 bp, Homo sapiens
ctgtgaaggacatga

SEQ ID NO: 1738478 - DNA, 15 bp, Homo sapiens
tgtgaaggacatgat

SEQ ID NO: 1738479 - DNA, 15 bp, Homo sapiens
gtgaaggacatgatc

SEQ ID NO: 1738480 - DNA, 15 bp, Homo sapiens
tgaaggacatgatct

SEQ ID NO: 1738481 - DNA, 15 bp, Homo sapiens
gaaggacatgatctc

SEQ ID NO: 1738482 - DNA, 15 bp, Homo sapiens
acatgatctcattct

SEQ ID NO: 1738483 - DNA, 15 bp, Homo sapiens
catgatctcattctt

SEQ ID NO: 1738484 - DNA, 15 bp, Homo sapiens
atgatctcattcttt

SEQ ID NO: 1738485 - DNA, 15 bp, Homo sapiens
tgatctcattctttt

SEQ ID NO: 1738486 - DNA, 15 bp, Homo sapiens
gatctcattcttttt

SEQ ID NO: 1738487 - DNA, 15 bp, Homo sapiens
atctcattctttttt

SEQ ID NO: 1738488 - DNA, 15 bp, Homo sapiens
tctcattctttttta

SEQ ID NO: 1738489 - DNA, 15 bp, Homo sapiens
ctcattcttttttat

SEQ ID NO: 1738490 - DNA, 15 bp, Homo sapiens
tcattcttttttatg

SEQ ID NO: 1738491 - DNA, 15 bp, Homo sapiens
cattcttttttatgg

SEQ ID NO: 1738492 - DNA, 15 bp, Homo sapiens
attcttttttatggg

SEQ ID NO: 1738493 - DNA, 15 bp, Homo sapiens
ttcttttttatgggc

SEQ ID NO: 1738494 - DNA, 15 bp, Homo sapiens
tcttttttatgggct

SEQ ID NO: 1738495 - DNA, 15 bp, Homo sapiens
cttttttatgggctg

SEQ ID NO: 1738496 - DNA, 15 bp, Homo sapiens
ttttttatgggctgc

SEQ ID NO: 1738497 - DNA, 15 bp, Homo sapiens
tttttatgggctgca

SEQ ID NO: 1738498 - DNA, 15 bp, Homo sapiens
ttttatgggctgcat

SEQ ID NO: 1738499 - DNA, 15 bp, Homo sapiens
tttatgggctgcata

SEQ ID NO: 1738500 - DNA, 15 bp, Homo sapiens
ttatgggctgcatag

SEQ ID NO: 1738501 - DNA, 15 bp, Homo sapiens
tatgggctgcataga

SEQ ID NO: 1738502 - DNA, 15 bp, Homo sapiens
atgggctgcatagaa

SEQ ID NO: 1738503 - DNA, 15 bp, Homo sapiens
tgggctgcatagaat

SEQ ID NO: 1738504 - DNA, 15 bp, Homo sapiens
gggctgcatagaatt

SEQ ID NO: 1738505 - DNA, 15 bp, Homo sapiens
ggctgcatagaattc

SEQ ID NO: 1738506 - DNA, 15 bp, Homo sapiens
gctgcatagaattcc

SEQ ID NO: 1738507 - DNA, 15 bp, Homo sapiens
ctgcatagaattcca

SEQ ID NO: 1738508 - DNA, 15 bp, Homo sapiens
tgcatagaattccat

SEQ ID NO: 1738509 - DNA, 15 bp, Homo sapiens
gcatagaattccatg

SEQ ID NO: 1738510 - DNA, 15 bp, Homo sapiens
catagaattccatgg

SEQ ID NO: 1738511 - DNA, 15 bp, Homo sapiens
atagaattccatggt

SEQ ID NO: 1738512 - DNA, 15 bp, Homo sapiens
tagaattccatggta

SEQ ID NO: 1738513 - DNA, 15 bp, Homo sapiens
agaattccatggtat

SEQ ID NO: 1738514 - DNA, 15 bp, Homo sapiens
gaattccatggtata

SEQ ID NO: 1738515 - DNA, 15 bp, Homo sapiens
attccatggtatata

SEQ ID NO: 1738516 - DNA, 15 bp, Homo sapiens
ttccatggtatatat

SEQ ID NO: 1738517 - DNA, 15 bp, Homo sapiens
tccatggtatatatg

SEQ ID NO: 1738518 - DNA, 15 bp, Homo sapiens
ccatggtatatatgt

SEQ ID NO: 1738519 - DNA, 15 bp, Homo sapiens
catggtatatatgta

SEQ ID NO: 1738520 - DNA, 15 bp, Homo sapiens
atggtatatatgtac

SEQ ID NO: 1738521 - DNA, 15 bp, Homo sapiens
tggtatatatgtacc

SEQ ID NO: 1738522 - DNA, 15 bp, Homo sapiens
ggtatatatgtacca

SEQ ID NO: 1738523 - DNA, 15 bp, Homo sapiens
gtatatatgtaccac

SEQ ID NO: 1738524 - DNA, 15 bp, Homo sapiens
tatatatgtaccaca

SEQ ID NO: 1738525 - DNA, 15 bp, Homo sapiens
atatatgtaccacat

SEQ ID NO: 1738526 - DNA, 15 bp, Homo sapiens
tttctttatccattc

SEQ ID NO: 1738527 - DNA, 15 bp, Homo sapiens
ttctttatccattct

SEQ ID NO: 1738528 - DNA, 15 bp, Homo sapiens
tctttatccattctg

SEQ ID NO: 1738529 - DNA, 15 bp, Homo sapiens
ctttatccattctgt

SEQ ID NO: 1738530 - DNA, 15 bp, Homo sapiens
tttatccattctgtc

SEQ ID NO: 1738531 - DNA, 15 bp, Homo sapiens
ttatccattctgtca

SEQ ID NO: 1738532 - DNA, 15 bp, Homo sapiens
tatccattctgtcat

SEQ ID NO: 1738533 - DNA, 15 bp, Homo sapiens
atccattctgtcatt

SEQ ID NO: 1738534 - DNA, 15 bp, Homo sapiens
tccattctgtcattg

SEQ ID NO: 1738535 - DNA, 15 bp, Homo sapiens
ccattctgtcattga

SEQ ID NO: 1738536 - DNA, 15 bp, Homo sapiens
cattctgtcattgat

SEQ ID NO: 1738537 - DNA, 15 bp, Homo sapiens
attctgtcattgatg

SEQ ID NO: 1738538 - DNA, 15 bp, Homo sapiens
ttctgtcattgatga

SEQ ID NO: 1738539 - DNA, 15 bp, Homo sapiens
tctgtcattgatgag

SEQ ID NO: 1738540 - DNA, 15 bp, Homo sapiens
ctgtcattgatgagc

SEQ ID NO: 1738541 - DNA, 15 bp, Homo sapiens
tgtcattgatgagca

SEQ ID NO: 1738542 - DNA, 15 bp, Homo sapiens
gtcattgatgagcat

SEQ ID NO: 1738543 - DNA, 15 bp, Homo sapiens
tcattgatgagcatt

SEQ ID NO: 1738544 - DNA, 15 bp, Homo sapiens
cattgatgagcattt

SEQ ID NO: 1738545 - DNA, 15 bp, Homo sapiens
attgatgagcattta

SEQ ID NO: 1738546 - DNA, 15 bp, Homo sapiens
ttgatgagcatttag

SEQ ID NO: 1738547 - DNA, 15 bp, Homo sapiens
tgatgagcatttagg

SEQ ID NO: 1738548 - DNA, 15 bp, Homo sapiens
gatgagcatttaggt

SEQ ID NO: 1738549 - DNA, 15 bp, Homo sapiens
atgagcatttaggtt

SEQ ID NO: 1738550 - DNA, 15 bp, Homo sapiens
tgagcatttaggttg

SEQ ID NO: 1738551 - DNA, 15 bp, Homo sapiens
gagcatttaggttga

SEQ ID NO: 1738552 - DNA, 15 bp, Homo sapiens
agcatttaggttgat

SEQ ID NO: 1738553 - DNA, 15 bp, Homo sapiens
gcatttaggttgatg

SEQ ID NO: 1738554 - DNA, 15 bp, Homo sapiens
catttaggttgatgc

SEQ ID NO: 1738555 - DNA, 15 bp, Homo sapiens
atttaggttgatgcc

SEQ ID NO: 1738556 - DNA, 15 bp, Homo sapiens
tttaggttgatgcca

SEQ ID NO: 1738557 - DNA, 15 bp, Homo sapiens
ttaggttgatgccat

SEQ ID NO: 1738558 - DNA, 15 bp, Homo sapiens
taggttgatgccatg

SEQ ID NO: 1738559 - DNA, 15 bp, Homo sapiens
aggttgatgccatgt

SEQ ID NO: 1738560 - DNA, 15 bp, Homo sapiens
ggttgatgccatgtc

SEQ ID NO: 1738561 - DNA, 15 bp, Homo sapiens
gttgatgccatgtct

SEQ ID NO: 1738562 - DNA, 15 bp, Homo sapiens
ttgatgccatgtctt

SEQ ID NO: 1738563 - DNA, 15 bp, Homo sapiens
tgatgccatgtcttt

SEQ ID NO: 1738564 - DNA, 15 bp, Homo sapiens
gatgccatgtctttg

SEQ ID NO: 1738565 - DNA, 15 bp, Homo sapiens
atgccatgtctttgc

SEQ ID NO: 1738566 - DNA, 15 bp, Homo sapiens
tgccatgtctttgct

SEQ ID NO: 1738567 - DNA, 15 bp, Homo sapiens
gccatgtctttgctt

SEQ ID NO: 1738568 - DNA, 15 bp, Homo sapiens
ccatgtctttgcttt

SEQ ID NO: 1738569 - DNA, 15 bp, Homo sapiens
catgtctttgctttt

SEQ ID NO: 1738570 - DNA, 15 bp, Homo sapiens
atgtctttgcttttg

SEQ ID NO: 1738571 - DNA, 15 bp, Homo sapiens
tgtctttgcttttgt

SEQ ID NO: 1738572 - DNA, 15 bp, Homo sapiens
gtctttgcttttgtg

SEQ ID NO: 1738573 - DNA, 15 bp, Homo sapiens
tctttgcttttgtgg

SEQ ID NO: 1738574 - DNA, 15 bp, Homo sapiens
ctttgcttttgtgga

SEQ ID NO: 1738575 - DNA, 15 bp, Homo sapiens
tttgcttttgtggat

SEQ ID NO: 1738576 - DNA, 15 bp, Homo sapiens
ttgcttttgtggata

SEQ ID NO: 1738577 - DNA, 15 bp, Homo sapiens
tgcttttgtggatag

SEQ ID NO: 1738578 - DNA, 15 bp, Homo sapiens
gcttttgtggatagt

SEQ ID NO: 1738579 - DNA, 15 bp, Homo sapiens
cttttgtggatagtg

SEQ ID NO: 1738580 - DNA, 15 bp, Homo sapiens
ttttgtggatagtgc

SEQ ID NO: 1738581 - DNA, 15 bp, Homo sapiens
tttgtggatagtgct

SEQ ID NO: 1738582 - DNA, 15 bp, Homo sapiens
ttgtggatagtgctg

SEQ ID NO: 1738583 - DNA, 15 bp, Homo sapiens
tgtggatagtgctgc

SEQ ID NO: 1738584 - DNA, 15 bp, Homo sapiens
gtggatagtgctgca

SEQ ID NO: 1738585 - DNA, 15 bp, Homo sapiens
tggatagtgctgcag

SEQ ID NO: 1738586 - DNA, 15 bp, Homo sapiens
ggatagtgctgcagt

SEQ ID NO: 1738587 - DNA, 15 bp, Homo sapiens
gatagtgctgcagtg

SEQ ID NO: 1738588 - DNA, 15 bp, Homo sapiens
atagtgctgcagtga

SEQ ID NO: 1738589 - DNA, 15 bp, Homo sapiens
tagtgctgcagtgaa

SEQ ID NO: 1738590 - DNA, 15 bp, Homo sapiens
agtgctgcagtgaac

SEQ ID NO: 1738591 - DNA, 15 bp, Homo sapiens
gtgctgcagtgaaca

SEQ ID NO: 1738592 - DNA, 15 bp, Homo sapiens
tgctgcagtgaacat

SEQ ID NO: 1738593 - DNA, 15 bp, Homo sapiens
gctgcagtgaacatt

SEQ ID NO: 1738594 - DNA, 15 bp, Homo sapiens
ctgcagtgaacattc

SEQ ID NO: 1738595 - DNA, 15 bp, Homo sapiens
tgcagtgaacattca

SEQ ID NO: 1738596 - DNA, 15 bp, Homo sapiens
gcagtgaacattcac

SEQ ID NO: 1738597 - DNA, 15 bp, Homo sapiens
cagtgaacattcacg

SEQ ID NO: 1738598 - DNA, 15 bp, Homo sapiens
agtgaacattcacgt

SEQ ID NO: 1738599 - DNA, 15 bp, Homo sapiens
gtgaacattcacgtg

SEQ ID NO: 1738600 - DNA, 15 bp, Homo sapiens
tgaacattcacgtgc

SEQ ID NO: 1738601 - DNA, 15 bp, Homo sapiens
gaacattcacgtgct

SEQ ID NO: 1738602 - DNA, 15 bp, Homo sapiens
aacattcacgtgctt

SEQ ID NO: 1738603 - DNA, 15 bp, Homo sapiens
acattcacgtgcttt

SEQ ID NO: 1738604 - DNA, 15 bp, Homo sapiens
cattcacgtgctttt

SEQ ID NO: 1738605 - DNA, 15 bp, Homo sapiens
attcacgtgcttttg

SEQ ID NO: 1738606 - DNA, 15 bp, Homo sapiens
ttcacgtgcttttgt

SEQ ID NO: 1738607 - DNA, 15 bp, Homo sapiens
tcacgtgcttttgtc

SEQ ID NO: 1738608 - DNA, 15 bp, Homo sapiens
cacgtgcttttgtct

SEQ ID NO: 1738609 - DNA, 15 bp, Homo sapiens
acgtgcttttgtctt

SEQ ID NO: 1738610 - DNA, 15 bp, Homo sapiens
cgtgcttttgtcttt

SEQ ID NO: 1738611 - DNA, 15 bp, Homo sapiens
gtgcttttgtcttta

SEQ ID NO: 1738612 - DNA, 15 bp, Homo sapiens
tgcttttgtctttat

SEQ ID NO: 1738613 - DNA, 15 bp, Homo sapiens
gcttttgtctttatg

SEQ ID NO: 1738614 - DNA, 15 bp, Homo sapiens
cttttgtctttatgg

SEQ ID NO: 1738615 - DNA, 15 bp, Homo sapiens
ttttgtctttatggt

SEQ ID NO: 1738616 - DNA, 15 bp, Homo sapiens
tttgtctttatggta

SEQ ID NO: 1738617 - DNA, 15 bp, Homo sapiens
ttgtctttatggtag

SEQ ID NO: 1738618 - DNA, 15 bp, Homo sapiens
tgtctttatggtaga

SEQ ID NO: 1738619 - DNA, 15 bp, Homo sapiens
gtctttatggtagaa

SEQ ID NO: 1738620 - DNA, 15 bp, Homo sapiens
tctttatggtagaat

SEQ ID NO: 1738621 - DNA, 15 bp, Homo sapiens
ctttatggtagaatg

SEQ ID NO: 1738622 - DNA, 15 bp, Homo sapiens
tttatggtagaatga

SEQ ID NO: 1738623 - DNA, 15 bp, Homo sapiens
ttatggtagaatgat

SEQ ID NO: 1738624 - DNA, 15 bp, Homo sapiens
tatggtagaatgatt

SEQ ID NO: 1738625 - DNA, 15 bp, Homo sapiens
atggtagaatgattt

SEQ ID NO: 1738626 - DNA, 15 bp, Homo sapiens
tggtagaatgatttc

SEQ ID NO: 1738627 - DNA, 15 bp, Homo sapiens
ggtagaatgatttct

SEQ ID NO: 1738628 - DNA, 15 bp, Homo sapiens
gtagaatgatttcta

SEQ ID NO: 1738629 - DNA, 15 bp, Homo sapiens
tagaatgatttctat

SEQ ID NO: 1738630 - DNA, 15 bp, Homo sapiens
agaatgatttctatt

SEQ ID NO: 1738631 - DNA, 15 bp, Homo sapiens
gaatgatttctattc

SEQ ID NO: 1738632 - DNA, 15 bp, Homo sapiens
aatgatttctattcc

SEQ ID NO: 1738633 - DNA, 15 bp, Homo sapiens
atgatttctattcct

SEQ ID NO: 1738634 - DNA, 15 bp, Homo sapiens
tgatttctattcctt

SEQ ID NO: 1738635 - DNA, 15 bp, Homo sapiens
gatttctattccttt

SEQ ID NO: 1738636 - DNA, 15 bp, Homo sapiens
atttctattcctttg

SEQ ID NO: 1738637 - DNA, 15 bp, Homo sapiens
tttctattcctttga

SEQ ID NO: 1738638 - DNA, 15 bp, Homo sapiens
ttctattcctttgag

SEQ ID NO: 1738639 - DNA, 15 bp, Homo sapiens
tctattcctttgagt

SEQ ID NO: 1738640 - DNA, 15 bp, Homo sapiens
ctattcctttgagta

SEQ ID NO: 1738641 - DNA, 15 bp, Homo sapiens
tattcctttgagtat

SEQ ID NO: 1738642 - DNA, 15 bp, Homo sapiens
attcctttgagtatg

SEQ ID NO: 1738643 - DNA, 15 bp, Homo sapiens
ttcctttgagtatgt

SEQ ID NO: 1738644 - DNA, 15 bp, Homo sapiens
tcctttgagtatgta

SEQ ID NO: 1738645 - DNA, 15 bp, Homo sapiens
cctttgagtatgtac

SEQ ID NO: 1738646 - DNA, 15 bp, Homo sapiens
ctttgagtatgtact

SEQ ID NO: 1738647 - DNA, 15 bp, Homo sapiens
tttgagtatgtactc

SEQ ID NO: 1738648 - DNA, 15 bp, Homo sapiens
ttgagtatgtactca

SEQ ID NO: 1738649 - DNA, 15 bp, Homo sapiens
tgagtatgtactcag

SEQ ID NO: 1738650 - DNA, 15 bp, Homo sapiens
gagtatgtactcagt

SEQ ID NO: 1738651 - DNA, 15 bp, Homo sapiens
agtatgtactcagta

SEQ ID NO: 1738652 - DNA, 15 bp, Homo sapiens
gtatgtactcagtaa

SEQ ID NO: 1738653 - DNA, 15 bp, Homo sapiens
tatgtactcagtaat

SEQ ID NO: 1738654 - DNA, 15 bp, Homo sapiens
atgtactcagtaatg

SEQ ID NO: 1738655 - DNA, 15 bp, Homo sapiens
tgtactcagtaatgg

SEQ ID NO: 1738656 - DNA, 15 bp, Homo sapiens
gtactcagtaatggg

SEQ ID NO: 1738657 - DNA, 15 bp, Homo sapiens
tactcagtaatggga

SEQ ID NO: 1738658 - DNA, 15 bp, Homo sapiens
actcagtaatgggat

SEQ ID NO: 1738659 - DNA, 15 bp, Homo sapiens
ctcagtaatgggatt

SEQ ID NO: 1738660 - DNA, 15 bp, Homo sapiens
tcagtaatgggattg

SEQ ID NO: 1738661 - DNA, 15 bp, Homo sapiens
cagtaatgggattgc

SEQ ID NO: 1738662 - DNA, 15 bp, Homo sapiens
agtaatgggattgct

SEQ ID NO: 1738663 - DNA, 15 bp, Homo sapiens
gtaatgggattgctg

SEQ ID NO: 1738664 - DNA, 15 bp, Homo sapiens
taatgggattgctgg

SEQ ID NO: 1738665 - DNA, 15 bp, Homo sapiens
aatgggattgctggg

SEQ ID NO: 1738666 - DNA, 15 bp, Homo sapiens
atgggattgctgggt

SEQ ID NO: 1738667 - DNA, 15 bp, Homo sapiens
tgggattgctgggtc

SEQ ID NO: 1738668 - DNA, 15 bp, Homo sapiens
gggattgctgggtcc

SEQ ID NO: 1738669 - DNA, 15 bp, Homo sapiens
ggattgctgggtcca

SEQ ID NO: 1738670 - DNA, 15 bp, Homo sapiens
gattgctgggtccaa

SEQ ID NO: 1738671 - DNA, 15 bp, Homo sapiens
attgctgggtccaag

SEQ ID NO: 1738672 - DNA, 15 bp, Homo sapiens
ttgctgggtccaagg

SEQ ID NO: 1738673 - DNA, 15 bp, Homo sapiens
tgctgggtccaaggg

SEQ ID NO: 1738674 - DNA, 15 bp, Homo sapiens
gctgggtccaagggt

SEQ ID NO: 1738675 - DNA, 15 bp, Homo sapiens
ctgggtccaagggta

SEQ ID NO: 1738676 - DNA, 15 bp, Homo sapiens
tgggtccaagggtag

SEQ ID NO: 1738677 - DNA, 15 bp, Homo sapiens
gggtccaagggtagt

SEQ ID NO: 1738678 - DNA, 15 bp, Homo sapiens
ggtccaagggtagtt

SEQ ID NO: 1738679 - DNA, 15 bp, Homo sapiens
gtccaagggtagttc

SEQ ID NO: 1738680 - DNA, 15 bp, Homo sapiens
tccaagggtagttct

SEQ ID NO: 1738681 - DNA, 15 bp, Homo sapiens
ccaagggtagttctg

SEQ ID NO: 1738682 - DNA, 15 bp, Homo sapiens
caagggtagttctgc

SEQ ID NO: 1738683 - DNA, 15 bp, Homo sapiens
aagggtagttctgct

SEQ ID NO: 1738684 - DNA, 15 bp, Homo sapiens
agggtagttctgctt

SEQ ID NO: 1738685 - DNA, 15 bp, Homo sapiens
gggtagttctgcttt

SEQ ID NO: 1738686 - DNA, 15 bp, Homo sapiens
ggtagttctgctttt

SEQ ID NO: 1738687 - DNA, 15 bp, Homo sapiens
gtagttctgctttta

SEQ ID NO: 1738688 - DNA, 15 bp, Homo sapiens
tagttctgcttttag

SEQ ID NO: 1738689 - DNA, 15 bp, Homo sapiens
agttctgcttttagc

SEQ ID NO: 1738690 - DNA, 15 bp, Homo sapiens
gttctgcttttagct

SEQ ID NO: 1738691 - DNA, 15 bp, Homo sapiens
ttctgcttttagctc

SEQ ID NO: 1738692 - DNA, 15 bp, Homo sapiens
tctgcttttagctct

SEQ ID NO: 1738693 - DNA, 15 bp, Homo sapiens
ctgcttttagctctt

SEQ ID NO: 1738694 - DNA, 15 bp, Homo sapiens
tgcttttagctcttt

SEQ ID NO: 1738695 - DNA, 15 bp, Homo sapiens
gcttttagctctttg

SEQ ID NO: 1738696 - DNA, 15 bp, Homo sapiens
cttttagctctttgc

SEQ ID NO: 1738697 - DNA, 15 bp, Homo sapiens
ttttagctctttgcg

SEQ ID NO: 1738698 - DNA, 15 bp, Homo sapiens
tttagctctttgcgg

SEQ ID NO: 1738699 - DNA, 15 bp, Homo sapiens
ttagctctttgcgga

SEQ ID NO: 1738700 - DNA, 15 bp, Homo sapiens
tagctctttgcggaa

SEQ ID NO: 1738701 - DNA, 15 bp, Homo sapiens
agctctttgcggaat

SEQ ID NO: 1738702 - DNA, 15 bp, Homo sapiens
gctctttgcggaatt

SEQ ID NO: 1738703 - DNA, 15 bp, Homo sapiens
ctctttgcggaattg

SEQ ID NO: 1738704 - DNA, 15 bp, Homo sapiens
tctttgcggaattgt

SEQ ID NO: 1738705 - DNA, 15 bp, Homo sapiens
ctttgcggaattgtc

SEQ ID NO: 1738706 - DNA, 15 bp, Homo sapiens
tttgcggaattgtca

SEQ ID NO: 1738707 - DNA, 15 bp, Homo sapiens
ttgcggaattgtcag

SEQ ID NO: 1738708 - DNA, 15 bp, Homo sapiens
tgcggaattgtcaga

SEQ ID NO: 1738709 - DNA, 15 bp, Homo sapiens
gcggaattgtcagac

SEQ ID NO: 1738710 - DNA, 15 bp, Homo sapiens
cggaattgtcagact

SEQ ID NO: 1738711 - DNA, 15 bp, Homo sapiens
ggaattgtcagactg

SEQ ID NO: 1738712 - DNA, 15 bp, Homo sapiens
gaattgtcagactgc

SEQ ID NO: 1738713 - DNA, 15 bp, Homo sapiens
aattgtcagactgct

SEQ ID NO: 1738714 - DNA, 15 bp, Homo sapiens
attgtcagactgctt

SEQ ID NO: 1738715 - DNA, 15 bp, Homo sapiens
ttgtcagactgcttt

SEQ ID NO: 1738716 - DNA, 15 bp, Homo sapiens
tgtcagactgctttc

SEQ ID NO: 1738717 - DNA, 15 bp, Homo sapiens
gtcagactgctttct

SEQ ID NO: 1738718 - DNA, 15 bp, Homo sapiens
tcagactgctttcta

SEQ ID NO: 1738719 - DNA, 15 bp, Homo sapiens
cagactgctttctac

SEQ ID NO: 1738720 - DNA, 15 bp, Homo sapiens
agactgctttctaca

SEQ ID NO: 1738721 - DNA, 15 bp, Homo sapiens
gactgctttctacaa

SEQ ID NO: 1738722 - DNA, 15 bp, Homo sapiens
actgctttctacaat

SEQ ID NO: 1738723 - DNA, 15 bp, Homo sapiens
ctgctttctacaatg

SEQ ID NO: 1738724 - DNA, 15 bp, Homo sapiens
tgctttctacaatgt

SEQ ID NO: 1738725 - DNA, 15 bp, Homo sapiens
gctttctacaatgtt

SEQ ID NO: 1738726 - DNA, 15 bp, Homo sapiens
ctttctacaatgttt

SEQ ID NO: 1738727 - DNA, 15 bp, Homo sapiens
tttctacaatgtttg

SEQ ID NO: 1738728 - DNA, 15 bp, Homo sapiens
ttctacaatgtttga

SEQ ID NO: 1738729 - DNA, 15 bp, Homo sapiens
tctacaatgtttgaa

SEQ ID NO: 1738730 - DNA, 15 bp, Homo sapiens
ctacaatgtttgaac

SEQ ID NO: 1738731 - DNA, 15 bp, Homo sapiens
tacaatgtttgaact

SEQ ID NO: 1738732 - DNA, 15 bp, Homo sapiens
acaatgtttgaacta

SEQ ID NO: 1738733 - DNA, 15 bp, Homo sapiens
caatgtttgaactaa

SEQ ID NO: 1738734 - DNA, 15 bp, Homo sapiens
aatgtttgaactaat

SEQ ID NO: 1738735 - DNA, 15 bp, Homo sapiens
atgtttgaactaatt

SEQ ID NO: 1738736 - DNA, 15 bp, Homo sapiens
tgtttgaactaattt

SEQ ID NO: 1738737 - DNA, 15 bp, Homo sapiens
gtttgaactaattta

SEQ ID NO: 1738738 - DNA, 15 bp, Homo sapiens
tttgaactaatttac

SEQ ID NO: 1738739 - DNA, 15 bp, Homo sapiens
ttgaactaatttaca

SEQ ID NO: 1738740 - DNA, 15 bp, Homo sapiens
tgaactaatttacac

SEQ ID NO: 1738741 - DNA, 15 bp, Homo sapiens
gaactaatttacact

SEQ ID NO: 1738742 - DNA, 15 bp, Homo sapiens
aactaatttacactc

SEQ ID NO: 1738743 - DNA, 15 bp, Homo sapiens
actaatttacactcc

SEQ ID NO: 1738744 - DNA, 15 bp, Homo sapiens
ctaatttacactccc

SEQ ID NO: 1738745 - DNA, 15 bp, Homo sapiens
taatttacactccca

SEQ ID NO: 1738746 - DNA, 15 bp, Homo sapiens
aatttacactcccaa

SEQ ID NO: 1738747 - DNA, 15 bp, Homo sapiens
atttacactcccaac

SEQ ID NO: 1738748 - DNA, 15 bp, Homo sapiens
tttacactcccaacc

SEQ ID NO: 1738749 - DNA, 15 bp, Homo sapiens
ttacactcccaacca

SEQ ID NO: 1738750 - DNA, 15 bp, Homo sapiens
tacactcccaaccaa

SEQ ID NO: 1738751 - DNA, 15 bp, Homo sapiens
acactcccaaccaag

SEQ ID NO: 1738752 - DNA, 15 bp, Homo sapiens
cactcccaaccaaga

SEQ ID NO: 1738753 - DNA, 15 bp, Homo sapiens
actcccaaccaagag

SEQ ID NO: 1738754 - DNA, 15 bp, Homo sapiens
ctcccaaccaagagt

SEQ ID NO: 1738755 - DNA, 15 bp, Homo sapiens
tcccaaccaagagtg

SEQ ID NO: 1738756 - DNA, 15 bp, Homo sapiens
ccaaccaagagtgta

SEQ ID NO: 1738757 - DNA, 15 bp, Homo sapiens
caaccaagagtgtat

SEQ ID NO: 1738758 - DNA, 15 bp, Homo sapiens
aaccaagagtgtata

SEQ ID NO: 1738759 - DNA, 15 bp, Homo sapiens
accaagagtgtataa

SEQ ID NO: 1738760 - DNA, 15 bp, Homo sapiens
ccaagagtgtataag

SEQ ID NO: 1738761 - DNA, 15 bp, Homo sapiens
caagagtgtataagt

SEQ ID NO: 1738762 - DNA, 15 bp, Homo sapiens
aagagtgtataagtg

SEQ ID NO: 1738763 - DNA, 15 bp, Homo sapiens
agagtgtataagtgt

SEQ ID NO: 1738764 - DNA, 15 bp, Homo sapiens
gagtgtataagtgtt

SEQ ID NO: 1738765 - DNA, 15 bp, Homo sapiens
agtgtataagtgttc

SEQ ID NO: 1738766 - DNA, 15 bp, Homo sapiens
gtgtataagtgttct

SEQ ID NO: 1738767 - DNA, 15 bp, Homo sapiens
tgtataagtgttctc

SEQ ID NO: 1738768 - DNA, 15 bp, Homo sapiens
gtataagtgttctct

SEQ ID NO: 1738769 - DNA, 15 bp, Homo sapiens
tataagtgttctctt

SEQ ID NO: 1738770 - DNA, 15 bp, Homo sapiens
ataagtgttctcttt

SEQ ID NO: 1738771 - DNA, 15 bp, Homo sapiens
taagtgttctctttt

SEQ ID NO: 1738772 - DNA, 15 bp, Homo sapiens
aagtgttctcttttc

SEQ ID NO: 1738773 - DNA, 15 bp, Homo sapiens
agtgttctcttttct

SEQ ID NO: 1738774 - DNA, 15 bp, Homo sapiens
gtgttctcttttctt

SEQ ID NO: 1738775 - DNA, 15 bp, Homo sapiens
tgttctcttttcttt

SEQ ID NO: 1738776 - DNA, 15 bp, Homo sapiens
gttctcttttctttt

SEQ ID NO: 1738777 - DNA, 15 bp, Homo sapiens
ttctcttttcttttg

SEQ ID NO: 1738778 - DNA, 15 bp, Homo sapiens
tctcttttcttttgc

SEQ ID NO: 1738779 - DNA, 15 bp, Homo sapiens
ctcttttcttttgca

SEQ ID NO: 1738780 - DNA, 15 bp, Homo sapiens
tcttttcttttgcaa

SEQ ID NO: 1738781 - DNA, 15 bp, Homo sapiens
cttttcttttgcaac

SEQ ID NO: 1738782 - DNA, 15 bp, Homo sapiens
ttttcttttgcaacc

SEQ ID NO: 1738783 - DNA, 15 bp, Homo sapiens
tttcttttgcaacct

SEQ ID NO: 1738784 - DNA, 15 bp, Homo sapiens
ttcttttgcaacctc

SEQ ID NO: 1738785 - DNA, 15 bp, Homo sapiens
tcttttgcaacctca

SEQ ID NO: 1738786 - DNA, 15 bp, Homo sapiens
cttttgcaacctcac

SEQ ID NO: 1738787 - DNA, 15 bp, Homo sapiens
ttttgcaacctcacc

SEQ ID NO: 1738788 - DNA, 15 bp, Homo sapiens
tttgcaacctcacca

SEQ ID NO: 1738789 - DNA, 15 bp, Homo sapiens
ttgcaacctcaccag

SEQ ID NO: 1738790 - DNA, 15 bp, Homo sapiens
tgcaacctcaccagt

SEQ ID NO: 1738791 - DNA, 15 bp, Homo sapiens
gcaacctcaccagta

SEQ ID NO: 1738792 - DNA, 15 bp, Homo sapiens
caacctcaccagtat

SEQ ID NO: 1738793 - DNA, 15 bp, Homo sapiens
aacctcaccagtatc

SEQ ID NO: 1738794 - DNA, 15 bp, Homo sapiens
acctcaccagtatct

SEQ ID NO: 1738795 - DNA, 15 bp, Homo sapiens
cctcaccagtatctg

SEQ ID NO: 1738796 - DNA, 15 bp, Homo sapiens
ctcaccagtatctgt

SEQ ID NO: 1738797 - DNA, 15 bp, Homo sapiens
tcaccagtatctgtt

SEQ ID NO: 1738798 - DNA, 15 bp, Homo sapiens
caccagtatctgtta

SEQ ID NO: 1738799 - DNA, 15 bp, Homo sapiens
accagtatctgttat

SEQ ID NO: 1738800 - DNA, 15 bp, Homo sapiens
ccagtatctgttatt

SEQ ID NO: 1738801 - DNA, 15 bp, Homo sapiens
cagtatctgttattt

SEQ ID NO: 1738802 - DNA, 15 bp, Homo sapiens
agtatctgttatttt

SEQ ID NO: 1738803 - DNA, 15 bp, Homo sapiens
gtatctgttattttt

SEQ ID NO: 1738804 - DNA, 15 bp, Homo sapiens
tatctgttatttttt

SEQ ID NO: 1738805 - DNA, 15 bp, Homo sapiens
atctgttattttttg

SEQ ID NO: 1738806 - DNA, 15 bp, Homo sapiens
tctgttattttttga

SEQ ID NO: 1738807 - DNA, 15 bp, Homo sapiens
ctgttattttttgac

SEQ ID NO: 1738808 - DNA, 15 bp, Homo sapiens
tgttattttttgact

SEQ ID NO: 1738809 - DNA, 15 bp, Homo sapiens
gttattttttgactt

SEQ ID NO: 1738810 - DNA, 15 bp, Homo sapiens
ttattttttgacttt

SEQ ID NO: 1738811 - DNA, 15 bp, Homo sapiens
tattttttgacttta

SEQ ID NO: 1738812 - DNA, 15 bp, Homo sapiens
attttttgactttat

SEQ ID NO: 1738813 - DNA, 15 bp, Homo sapiens
ttttttgactttata

SEQ ID NO: 1738814 - DNA, 15 bp, Homo sapiens
tttttgactttatag

SEQ ID NO: 1738815 - DNA, 15 bp, Homo sapiens
ttttgactttatagt

SEQ ID NO: 1738816 - DNA, 15 bp, Homo sapiens
tttgactttatagta

SEQ ID NO: 1738817 - DNA, 15 bp, Homo sapiens
ttgactttatagtaa

SEQ ID NO: 1738818 - DNA, 15 bp, Homo sapiens
tgactttatagtaac

SEQ ID NO: 1738819 - DNA, 15 bp, Homo sapiens
gactttatagtaaca

SEQ ID NO: 1738820 - DNA, 15 bp, Homo sapiens
actttatagtaacag

SEQ ID NO: 1738821 - DNA, 15 bp, Homo sapiens
ctttatagtaacagc

SEQ ID NO: 1738822 - DNA, 15 bp, Homo sapiens
tttatagtaacagct

SEQ ID NO: 1738823 - DNA, 15 bp, Homo sapiens
ttatagtaacagcta

SEQ ID NO: 1738824 - DNA, 15 bp, Homo sapiens
tatagtaacagctat

SEQ ID NO: 1738825 - DNA, 15 bp, Homo sapiens
atagtaacagctatt

SEQ ID NO: 1738826 - DNA, 15 bp, Homo sapiens
tagtaacagctattc

SEQ ID NO: 1738827 - DNA, 15 bp, Homo sapiens
agtaacagctattct

SEQ ID NO: 1738828 - DNA, 15 bp, Homo sapiens
gtaacagctattctg

SEQ ID NO: 1738829 - DNA, 15 bp, Homo sapiens
taacagctattctga

SEQ ID NO: 1738830 - DNA, 15 bp, Homo sapiens
aacagctattctgac

SEQ ID NO: 1738831 - DNA, 15 bp, Homo sapiens
acagctattctgact

SEQ ID NO: 1738832 - DNA, 15 bp, Homo sapiens
cagctattctgactg

SEQ ID NO: 1738833 - DNA, 15 bp, Homo sapiens
agctattctgactgg

SEQ ID NO: 1738834 - DNA, 15 bp, Homo sapiens
gctattctgactggt

SEQ ID NO: 1738835 - DNA, 15 bp, Homo sapiens
ctattctgactggtg

SEQ ID NO: 1738836 - DNA, 15 bp, Homo sapiens
tattctgactggtgt

SEQ ID NO: 1738837 - DNA, 15 bp, Homo sapiens
attctgactggtgtg

SEQ ID NO: 1738838 - DNA, 15 bp, Homo sapiens
ttctgactggtgtga

SEQ ID NO: 1738839 - DNA, 15 bp, Homo sapiens
tctgactggtgtgag

SEQ ID NO: 1738840 - DNA, 15 bp, Homo sapiens
ctgactggtgtgaga

SEQ ID NO: 1738841 - DNA, 15 bp, Homo sapiens
tgactggtgtgagat

SEQ ID NO: 1738842 - DNA, 15 bp, Homo sapiens
gactggtgtgagatg

SEQ ID NO: 1738843 - DNA, 15 bp, Homo sapiens
actggtgtgagatga

SEQ ID NO: 1738844 - DNA, 15 bp, Homo sapiens
ctggtgtgagatgat

SEQ ID NO: 1738845 - DNA, 15 bp, Homo sapiens
tggtgtgagatgata

SEQ ID NO: 1738846 - DNA, 15 bp, Homo sapiens
ggtgtgagatgatat

SEQ ID NO: 1738847 - DNA, 15 bp, Homo sapiens
gtgtgagatgatatc

SEQ ID NO: 1738848 - DNA, 15 bp, Homo sapiens
tgtgagatgatatct

SEQ ID NO: 1738849 - DNA, 15 bp, Homo sapiens
gtgagatgatatctc

SEQ ID NO: 1738850 - DNA, 15 bp, Homo sapiens
tgagatgatatctca

SEQ ID NO: 1738851 - DNA, 15 bp, Homo sapiens
gagatgatatctcat

SEQ ID NO: 1738852 - DNA, 15 bp, Homo sapiens
agatgatatctcatt

SEQ ID NO: 1738853 - DNA, 15 bp, Homo sapiens
gatgatatctcattg

SEQ ID NO: 1738854 - DNA, 15 bp, Homo sapiens
atgatatctcattgt

SEQ ID NO: 1738855 - DNA, 15 bp, Homo sapiens
tgatatctcattgtg

SEQ ID NO: 1738856 - DNA, 15 bp, Homo sapiens
gatatctcattgtgg

SEQ ID NO: 1738857 - DNA, 15 bp, Homo sapiens
atatctcattgtggt

SEQ ID NO: 1738858 - DNA, 15 bp, Homo sapiens
tatctcattgtggtt

SEQ ID NO: 1738859 - DNA, 15 bp, Homo sapiens
atctcattgtggttt

SEQ ID NO: 1738860 - DNA, 15 bp, Homo sapiens
tctcattgtggtttt

SEQ ID NO: 1738861 - DNA, 15 bp, Homo sapiens
ctcattgtggttttg

SEQ ID NO: 1738862 - DNA, 15 bp, Homo sapiens
tcattgtggttttga

SEQ ID NO: 1738863 - DNA, 15 bp, Homo sapiens
cattgtggttttgat

SEQ ID NO: 1738864 - DNA, 15 bp, Homo sapiens
attgtggttttgatt

SEQ ID NO: 1738865 - DNA, 15 bp, Homo sapiens
ttgtggttttgattt

SEQ ID NO: 1738866 - DNA, 15 bp, Homo sapiens
tgtggttttgatttg

SEQ ID NO: 1738867 - DNA, 15 bp, Homo sapiens
gtggttttgatttgc

SEQ ID NO: 1738868 - DNA, 15 bp, Homo sapiens
tggttttgatttgca

SEQ ID NO: 1738869 - DNA, 15 bp, Homo sapiens
ggttttgatttgcat

SEQ ID NO: 1738870 - DNA, 15 bp, Homo sapiens
gttttgatttgcatt

SEQ ID NO: 1738871 - DNA, 15 bp, Homo sapiens
ttttgatttgcattt

SEQ ID NO: 1738872 - DNA, 15 bp, Homo sapiens
tttgatttgcatttc

SEQ ID NO: 1738873 - DNA, 15 bp, Homo sapiens
ttgatttgcatttct

SEQ ID NO: 1738874 - DNA, 15 bp, Homo sapiens
tgatttgcatttctc

SEQ ID NO: 1738875 - DNA, 15 bp, Homo sapiens
gatttgcatttctct

SEQ ID NO: 1738876 - DNA, 15 bp, Homo sapiens
atttgcatttctcta

SEQ ID NO: 1738877 - DNA, 15 bp, Homo sapiens
tttgcatttctctaa

SEQ ID NO: 1738878 - DNA, 15 bp, Homo sapiens
ttgcatttctctaat

SEQ ID NO: 1738879 - DNA, 15 bp, Homo sapiens
tgcatttctctaatg

SEQ ID NO: 1738880 - DNA, 15 bp, Homo sapiens
gcatttctctaatga

SEQ ID NO: 1738881 - DNA, 15 bp, Homo sapiens
catttctctaatgat

SEQ ID NO: 1738882 - DNA, 15 bp, Homo sapiens
atttctctaatgatc

SEQ ID NO: 1738883 - DNA, 15 bp, Homo sapiens
tttctctaatgatca

SEQ ID NO: 1738884 - DNA, 15 bp, Homo sapiens
ttctctaatgatcag

SEQ ID NO: 1738885 - DNA, 15 bp, Homo sapiens
tctctaatgatcagt

SEQ ID NO: 1738886 - DNA, 15 bp, Homo sapiens
ctctaatgatcagtg

SEQ ID NO: 1738887 - DNA, 15 bp, Homo sapiens
tctaatgatcagtga

SEQ ID NO: 1738888 - DNA, 15 bp, Homo sapiens
ctaatgatcagtgat

SEQ ID NO: 1738889 - DNA, 15 bp, Homo sapiens
taatgatcagtgata

SEQ ID NO: 1738890 - DNA, 15 bp, Homo sapiens
aatgatcagtgatat

SEQ ID NO: 1738891 - DNA, 15 bp, Homo sapiens
atgatcagtgatatg

SEQ ID NO: 1738892 - DNA, 15 bp, Homo sapiens
tgatcagtgatatgg

SEQ ID NO: 1738893 - DNA, 15 bp, Homo sapiens
gatcagtgatatgga

SEQ ID NO: 1738894 - DNA, 15 bp, Homo sapiens
atcagtgatatggag

SEQ ID NO: 1738895 - DNA, 15 bp, Homo sapiens
tcagtgatatggagc

SEQ ID NO: 1738896 - DNA, 15 bp, Homo sapiens
cagtgatatggagct

SEQ ID NO: 1738897 - DNA, 15 bp, Homo sapiens
agtgatatggagctt

SEQ ID NO: 1738898 - DNA, 15 bp, Homo sapiens
gtgatatggagcttt

SEQ ID NO: 1738899 - DNA, 15 bp, Homo sapiens
tgatatggagctttt

SEQ ID NO: 1738900 - DNA, 15 bp, Homo sapiens
gatatggagcttttt

SEQ ID NO: 1738901 - DNA, 15 bp, Homo sapiens
atatggagctttttt

SEQ ID NO: 1738902 - DNA, 15 bp, Homo sapiens
tatggagcttttttt

SEQ ID NO: 1738903 - DNA, 15 bp, Homo sapiens
atggagctttttttt

SEQ ID NO: 1738904 - DNA, 15 bp, Homo sapiens
tggagcttttttttc

SEQ ID NO: 1738905 - DNA, 15 bp, Homo sapiens
ggagcttttttttca

SEQ ID NO: 1738906 - DNA, 15 bp, Homo sapiens
gagcttttttttcat

SEQ ID NO: 1738907 - DNA, 15 bp, Homo sapiens
agcttttttttcata

SEQ ID NO: 1738908 - DNA, 15 bp, Homo sapiens
gcttttttttcatat

SEQ ID NO: 1738909 - DNA, 15 bp, Homo sapiens
cttttttttcatatg

SEQ ID NO: 1738910 - DNA, 15 bp, Homo sapiens
ttttttttcatatgc

SEQ ID NO: 1738911 - DNA, 15 bp, Homo sapiens
tttttttcatatgct

SEQ ID NO: 1738912 - DNA, 15 bp, Homo sapiens
ttttttcatatgctt

SEQ ID NO: 1738913 - DNA, 15 bp, Homo sapiens
tttttcatatgctta

SEQ ID NO: 1738914 - DNA, 15 bp, Homo sapiens
ttttcatatgcttat

SEQ ID NO: 1738915 - DNA, 15 bp, Homo sapiens
tttcatatgcttatt

SEQ ID NO: 1738916 - DNA, 15 bp, Homo sapiens
ttcatatgcttattg

SEQ ID NO: 1738917 - DNA, 15 bp, Homo sapiens
tcatatgcttattgg

SEQ ID NO: 1738918 - DNA, 15 bp, Homo sapiens
catatgcttattggc

SEQ ID NO: 1738919 - DNA, 15 bp, Homo sapiens
atatgcttattggct

SEQ ID NO: 1738920 - DNA, 15 bp, Homo sapiens
tatgcttattggctg

SEQ ID NO: 1738921 - DNA, 15 bp, Homo sapiens
atgcttattggctgc

SEQ ID NO: 1738922 - DNA, 15 bp, Homo sapiens
tgcttattggctgca

SEQ ID NO: 1738923 - DNA, 15 bp, Homo sapiens
gcttattggctgcat

SEQ ID NO: 1738924 - DNA, 15 bp, Homo sapiens
cttattggctgcatg

SEQ ID NO: 1738925 - DNA, 15 bp, Homo sapiens
ttattggctgcatgt

SEQ ID NO: 1738926 - DNA, 15 bp, Homo sapiens
tattggctgcatgta

SEQ ID NO: 1738927 - DNA, 15 bp, Homo sapiens
attggctgcatgtat

SEQ ID NO: 1738928 - DNA, 15 bp, Homo sapiens
ttggctgcatgtatg

SEQ ID NO: 1738929 - DNA, 15 bp, Homo sapiens
tggctgcatgtatgt

SEQ ID NO: 1738930 - DNA, 15 bp, Homo sapiens
ggctgcatgtatgtc

SEQ ID NO: 1738931 - DNA, 15 bp, Homo sapiens
gctgcatgtatgtct

SEQ ID NO: 1738932 - DNA, 15 bp, Homo sapiens
ctgcatgtatgtctt

SEQ ID NO: 1738933 - DNA, 15 bp, Homo sapiens
tgcatgtatgtcttc

SEQ ID NO: 1738934 - DNA, 15 bp, Homo sapiens
gcatgtatgtcttct

SEQ ID NO: 1738935 - DNA, 15 bp, Homo sapiens
catgtatgtcttctt

SEQ ID NO: 1738936 - DNA, 15 bp, Homo sapiens
atgtatgtcttcttt

SEQ ID NO: 1738937 - DNA, 15 bp, Homo sapiens
tgtatgtcttctttt

SEQ ID NO: 1738938 - DNA, 15 bp, Homo sapiens
gtatgtcttcttttg

SEQ ID NO: 1738939 - DNA, 15 bp, Homo sapiens
tatgtcttcttttga

SEQ ID NO: 1738940 - DNA, 15 bp, Homo sapiens
atgtcttcttttgaa

SEQ ID NO: 1738941 - DNA, 15 bp, Homo sapiens
tgtcttcttttgaaa

SEQ ID NO: 1738942 - DNA, 15 bp, Homo sapiens
gtcttcttttgaaaa

SEQ ID NO: 1738943 - DNA, 15 bp, Homo sapiens
tcttcttttgaaaag

SEQ ID NO: 1738944 - DNA, 15 bp, Homo sapiens
cttcttttgaaaagt

SEQ ID NO: 1738945 - DNA, 15 bp, Homo sapiens
ttcttttgaaaagtg

SEQ ID NO: 1738946 - DNA, 15 bp, Homo sapiens
tcttttgaaaagtgt

SEQ ID NO: 1738947 - DNA, 15 bp, Homo sapiens
cttttgaaaagtgtc

SEQ ID NO: 1738948 - DNA, 15 bp, Homo sapiens
ttttgaaaagtgtct

SEQ ID NO: 1738949 - DNA, 15 bp, Homo sapiens
tttgaaaagtgtctg

SEQ ID NO: 1738950 - DNA, 15 bp, Homo sapiens
ttgaaaagtgtctgt

SEQ ID NO: 1738951 - DNA, 15 bp, Homo sapiens
tgaaaagtgtctgtt

SEQ ID NO: 1738952 - DNA, 15 bp, Homo sapiens
gaaaagtgtctgttc

SEQ ID NO: 1738953 - DNA, 15 bp, Homo sapiens
aaaagtgtctgttca

SEQ ID NO: 1738954 - DNA, 15 bp, Homo sapiens
aaagtgtctgttcat

SEQ ID NO: 1738955 - DNA, 15 bp, Homo sapiens
aagtgtctgttcatg

SEQ ID NO: 1738956 - DNA, 15 bp, Homo sapiens
agtgtctgttcatgt

SEQ ID NO: 1738957 - DNA, 15 bp, Homo sapiens
gtgtctgttcatgtg

SEQ ID NO: 1738958 - DNA, 15 bp, Homo sapiens
tgtctgttcatgtgc

SEQ ID NO: 1738959 - DNA, 15 bp, Homo sapiens
gtctgttcatgtgcc

SEQ ID NO: 1738960 - DNA, 15 bp, Homo sapiens
tctgttcatgtgcct

SEQ ID NO: 1738961 - DNA, 15 bp, Homo sapiens
ctgttcatgtgcctt

SEQ ID NO: 1738962 - DNA, 15 bp, Homo sapiens
tgttcatgtgccttg

SEQ ID NO: 1738963 - DNA, 15 bp, Homo sapiens
gttcatgtgccttgc

SEQ ID NO: 1738964 - DNA, 15 bp, Homo sapiens
ttcatgtgccttgcc

SEQ ID NO: 1738965 - DNA, 15 bp, Homo sapiens
tcatgtgccttgccc

SEQ ID NO: 1738966 - DNA, 15 bp, Homo sapiens
catgtgccttgccca

SEQ ID NO: 1738967 - DNA, 15 bp, Homo sapiens
atgtgccttgcccac

SEQ ID NO: 1738968 - DNA, 15 bp, Homo sapiens
tgtgccttgcccact

SEQ ID NO: 1738969 - DNA, 15 bp, Homo sapiens
gtgccttgcccactt

SEQ ID NO: 1738970 - DNA, 15 bp, Homo sapiens
tgccttgcccacttt

SEQ ID NO: 1738971 - DNA, 15 bp, Homo sapiens
gccttgcccactttt

SEQ ID NO: 1738972 - DNA, 15 bp, Homo sapiens
ccttgcccacttttt

SEQ ID NO: 1738973 - DNA, 15 bp, Homo sapiens
cttgcccacttttta

SEQ ID NO: 1738974 - DNA, 15 bp, Homo sapiens
ttgcccactttttag

SEQ ID NO: 1738975 - DNA, 15 bp, Homo sapiens
tgcccactttttagt

SEQ ID NO: 1738976 - DNA, 15 bp, Homo sapiens
gcccactttttagtg

SEQ ID NO: 1738977 - DNA, 15 bp, Homo sapiens
cccactttttagtgg

SEQ ID NO: 1738978 - DNA, 15 bp, Homo sapiens
ccactttttagtggg

SEQ ID NO: 1738979 - DNA, 15 bp, Homo sapiens
cactttttagtgggg

SEQ ID NO: 1738980 - DNA, 15 bp, Homo sapiens
actttttagtggggt

SEQ ID NO: 1738981 - DNA, 15 bp, Homo sapiens
ctttttagtggggtt

SEQ ID NO: 1738982 - DNA, 15 bp, Homo sapiens
tttttagtggggttg

SEQ ID NO: 1738983 - DNA, 15 bp, Homo sapiens
ttttagtggggttgg

SEQ ID NO: 1738984 - DNA, 15 bp, Homo sapiens
tttagtggggttggt

SEQ ID NO: 1738985 - DNA, 15 bp, Homo sapiens
ttagtggggttggtt

SEQ ID NO: 1738986 - DNA, 15 bp, Homo sapiens
tagtggggttggttt

SEQ ID NO: 1738987 - DNA, 15 bp, Homo sapiens
agtggggttggtttt

SEQ ID NO: 1738988 - DNA, 15 bp, Homo sapiens
gtggggttggttttt

SEQ ID NO: 1738989 - DNA, 15 bp, Homo sapiens
tggggttggtttttt

SEQ ID NO: 1738990 - DNA, 15 bp, Homo sapiens
ggggttggttttttt

SEQ ID NO: 1738991 - DNA, 15 bp, Homo sapiens
gggttggtttttttt

SEQ ID NO: 1738992 - DNA, 15 bp, Homo sapiens
ggttggttttttttc

SEQ ID NO: 1738993 - DNA, 15 bp, Homo sapiens
gttggttttttttct

SEQ ID NO: 1738994 - DNA, 15 bp, Homo sapiens
ttggttttttttctc

SEQ ID NO: 1738995 - DNA, 15 bp, Homo sapiens
tggttttttttctct

SEQ ID NO: 1738996 - DNA, 15 bp, Homo sapiens
ggttttttttctctt

SEQ ID NO: 1738997 - DNA, 15 bp, Homo sapiens
gttttttttctcttg

SEQ ID NO: 1738998 - DNA, 15 bp, Homo sapiens
ttttttttctcttgc

SEQ ID NO: 1738999 - DNA, 15 bp, Homo sapiens
tttttttctcttgca

SEQ ID NO: 1739000 - DNA, 15 bp, Homo sapiens
ttttttctcttgcaa

SEQ ID NO: 1739001 - DNA, 15 bp, Homo sapiens
tttttctcttgcaaa

SEQ ID NO: 1739002 - DNA, 15 bp, Homo sapiens
ttttctcttgcaaat

SEQ ID NO: 1739003 - DNA, 15 bp, Homo sapiens
tttctcttgcaaatt

SEQ ID NO: 1739004 - DNA, 15 bp, Homo sapiens
ttctcttgcaaattt

SEQ ID NO: 1739005 - DNA, 15 bp, Homo sapiens
tctcttgcaaatttg

SEQ ID NO: 1739006 - DNA, 15 bp, Homo sapiens
ctcttgcaaatttgt

SEQ ID NO: 1739007 - DNA, 15 bp, Homo sapiens
tcttgcaaatttgtc

SEQ ID NO: 1739008 - DNA, 15 bp, Homo sapiens
cttgcaaatttgtct

SEQ ID NO: 1739009 - DNA, 15 bp, Homo sapiens
ttgcaaatttgtcta

SEQ ID NO: 1739010 - DNA, 15 bp, Homo sapiens
tgcaaatttgtctaa

SEQ ID NO: 1739011 - DNA, 15 bp, Homo sapiens
gcaaatttgtctaaa

SEQ ID NO: 1739012 - DNA, 15 bp, Homo sapiens
caaatttgtctaaat

SEQ ID NO: 1739013 - DNA, 15 bp, Homo sapiens
aaatttgtctaaatt

SEQ ID NO: 1739014 - DNA, 15 bp, Homo sapiens
aatttgtctaaattc

SEQ ID NO: 1739015 - DNA, 15 bp, Homo sapiens
atttgtctaaattcc

SEQ ID NO: 1739016 - DNA, 15 bp, Homo sapiens
tttgtctaaattcct

SEQ ID NO: 1739017 - DNA, 15 bp, Homo sapiens
ttgtctaaattcctt

SEQ ID NO: 1739018 - DNA, 15 bp, Homo sapiens
tgtctaaattcctta

SEQ ID NO: 1739019 - DNA, 15 bp, Homo sapiens
gtctaaattccttat

SEQ ID NO: 1739020 - DNA, 15 bp, Homo sapiens
tctaaattccttata

SEQ ID NO: 1739021 - DNA, 15 bp, Homo sapiens
ctaaattccttataa

SEQ ID NO: 1739022 - DNA, 15 bp, Homo sapiens
taaattccttataaa

SEQ ID NO: 1739023 - DNA, 15 bp, Homo sapiens
aaattccttataaat

SEQ ID NO: 1739024 - DNA, 15 bp, Homo sapiens
aattccttataaatg

SEQ ID NO: 1739025 - DNA, 15 bp, Homo sapiens
attccttataaatgc

SEQ ID NO: 1739026 - DNA, 15 bp, Homo sapiens
ttccttataaatgct

SEQ ID NO: 1739027 - DNA, 15 bp, Homo sapiens
tccttataaatgctg

SEQ ID NO: 1739028 - DNA, 15 bp, Homo sapiens
ccttataaatgctgg

SEQ ID NO: 1739029 - DNA, 15 bp, Homo sapiens
cttataaatgctgga

SEQ ID NO: 1739030 - DNA, 15 bp, Homo sapiens
ttataaatgctggat

SEQ ID NO: 1739031 - DNA, 15 bp, Homo sapiens
tataaatgctggata

SEQ ID NO: 1739032 - DNA, 15 bp, Homo sapiens
ataaatgctggatat

SEQ ID NO: 1739033 - DNA, 15 bp, Homo sapiens
taaatgctggatatt

SEQ ID NO: 1739034 - DNA, 15 bp, Homo sapiens
aaatgctggatatta

SEQ ID NO: 1739035 - DNA, 15 bp, Homo sapiens
aatgctggatattaa

SEQ ID NO: 1739036 - DNA, 15 bp, Homo sapiens
atgctggatattaaa

SEQ ID NO: 1739037 - DNA, 15 bp, Homo sapiens
tgctggatattaaac

SEQ ID NO: 1739038 - DNA, 15 bp, Homo sapiens
gctggatattaaacc

SEQ ID NO: 1739039 - DNA, 15 bp, Homo sapiens
ctggatattaaacct

SEQ ID NO: 1739040 - DNA, 15 bp, Homo sapiens
tggatattaaacctt

SEQ ID NO: 1739041 - DNA, 15 bp, Homo sapiens
ggatattaaaccttt

SEQ ID NO: 1739042 - DNA, 15 bp, Homo sapiens
gatattaaacctttg

SEQ ID NO: 1739043 - DNA, 15 bp, Homo sapiens
atattaaacctttgt

SEQ ID NO: 1739044 - DNA, 15 bp, Homo sapiens
tattaaacctttgtc

SEQ ID NO: 1739045 - DNA, 15 bp, Homo sapiens
attaaacctttgtca

SEQ ID NO: 1739046 - DNA, 15 bp, Homo sapiens
ttaaacctttgtcag

SEQ ID NO: 1739047 - DNA, 15 bp, Homo sapiens
taaacctttgtcaga

SEQ ID NO: 1739048 - DNA, 15 bp, Homo sapiens
aaacctttgtcagat

SEQ ID NO: 1739049 - DNA, 15 bp, Homo sapiens
aacctttgtcagatg

SEQ ID NO: 1739050 - DNA, 15 bp, Homo sapiens
acctttgtcagatgc

SEQ ID NO: 1739051 - DNA, 15 bp, Homo sapiens
cctttgtcagatgca

SEQ ID NO: 1739052 - DNA, 15 bp, Homo sapiens
ctttgtcagatgcat

SEQ ID NO: 1739053 - DNA, 15 bp, Homo sapiens
tttgtcagatgcata

SEQ ID NO: 1739054 - DNA, 15 bp, Homo sapiens
ttgtcagatgcatag

SEQ ID NO: 1739055 - DNA, 15 bp, Homo sapiens
tgtcagatgcatagt

SEQ ID NO: 1739056 - DNA, 15 bp, Homo sapiens
gtcagatgcatagtt

SEQ ID NO: 1739057 - DNA, 15 bp, Homo sapiens
tcagatgcatagttt

SEQ ID NO: 1739058 - DNA, 15 bp, Homo sapiens
cagatgcatagtttg

SEQ ID NO: 1739059 - DNA, 15 bp, Homo sapiens
agatgcatagtttgc

SEQ ID NO: 1739060 - DNA, 15 bp, Homo sapiens
gatgcatagtttgca

SEQ ID NO: 1739061 - DNA, 15 bp, Homo sapiens
atgcatagtttgcaa

SEQ ID NO: 1739062 - DNA, 15 bp, Homo sapiens
tgcatagtttgcaaa

SEQ ID NO: 1739063 - DNA, 15 bp, Homo sapiens
gcatagtttgcaaaa

SEQ ID NO: 1739064 - DNA, 15 bp, Homo sapiens
catagtttgcaaaat

SEQ ID NO: 1739065 - DNA, 15 bp, Homo sapiens
atagtttgcaaaatt

SEQ ID NO: 1739066 - DNA, 15 bp, Homo sapiens
tagtttgcaaaattt

SEQ ID NO: 1739067 - DNA, 15 bp, Homo sapiens
agtttgcaaaatttt

SEQ ID NO: 1739068 - DNA, 15 bp, Homo sapiens
gtttgcaaaattttt

SEQ ID NO: 1739069 - DNA, 15 bp, Homo sapiens
tttgcaaaatttttc

SEQ ID NO: 1739070 - DNA, 15 bp, Homo sapiens
ttgcaaaatttttcc

SEQ ID NO: 1739071 - DNA, 15 bp, Homo sapiens
tgcaaaatttttccc

SEQ ID NO: 1739072 - DNA, 15 bp, Homo sapiens
gcaaaatttttcccc

SEQ ID NO: 1739073 - DNA, 15 bp, Homo sapiens
caaaatttttcccca

SEQ ID NO: 1739074 - DNA, 15 bp, Homo sapiens
aaaatttttccccat

SEQ ID NO: 1739075 - DNA, 15 bp, Homo sapiens
aaatttttccccatt

SEQ ID NO: 1739076 - DNA, 15 bp, Homo sapiens
aatttttccccattc

SEQ ID NO: 1739077 - DNA, 15 bp, Homo sapiens
atttttccccattct

SEQ ID NO: 1739078 - DNA, 15 bp, Homo sapiens
tttttccccattctg

SEQ ID NO: 1739079 - DNA, 15 bp, Homo sapiens
ttttccccattctgt

SEQ ID NO: 1739080 - DNA, 15 bp, Homo sapiens
tttccccattctgta

SEQ ID NO: 1739081 - DNA, 15 bp, Homo sapiens
ttccccattctgtag

SEQ ID NO: 1739082 - DNA, 15 bp, Homo sapiens
tccccattctgtagg

SEQ ID NO: 1739083 - DNA, 15 bp, Homo sapiens
ccccattctgtaggt

SEQ ID NO: 1739084 - DNA, 15 bp, Homo sapiens
cccattctgtaggtt

SEQ ID NO: 1739085 - DNA, 15 bp, Homo sapiens
ccattctgtaggttg

SEQ ID NO: 1739086 - DNA, 15 bp, Homo sapiens
cattctgtaggttgt

SEQ ID NO: 1739087 - DNA, 15 bp, Homo sapiens
attctgtaggttgtt

SEQ ID NO: 1739088 - DNA, 15 bp, Homo sapiens
ttctgtaggttgttc

SEQ ID NO: 1739089 - DNA, 15 bp, Homo sapiens
tctgtaggttgttca

SEQ ID NO: 1739090 - DNA, 15 bp, Homo sapiens
ctgtaggttgttcat

SEQ ID NO: 1739091 - DNA, 15 bp, Homo sapiens
tgtaggttgttcatt

SEQ ID NO: 1739092 - DNA, 15 bp, Homo sapiens
gtaggttgttcattt

SEQ ID NO: 1739093 - DNA, 15 bp, Homo sapiens
taggttgttcattta

SEQ ID NO: 1739094 - DNA, 15 bp, Homo sapiens
aggttgttcatttac

SEQ ID NO: 1739095 - DNA, 15 bp, Homo sapiens
ggttgttcatttact

SEQ ID NO: 1739096 - DNA, 15 bp, Homo sapiens
gttgttcatttactc

SEQ ID NO: 1739097 - DNA, 15 bp, Homo sapiens
ttgttcatttactct

SEQ ID NO: 1739098 - DNA, 15 bp, Homo sapiens
tgttcatttactctg

SEQ ID NO: 1739099 - DNA, 15 bp, Homo sapiens
gttcatttactctgt

SEQ ID NO: 1739100 - DNA, 15 bp, Homo sapiens
ttcatttactctgtt

SEQ ID NO: 1739101 - DNA, 15 bp, Homo sapiens
tcatttactctgttg

SEQ ID NO: 1739102 - DNA, 15 bp, Homo sapiens
catttactctgttga

SEQ ID NO: 1739103 - DNA, 15 bp, Homo sapiens
atttactctgttgat

SEQ ID NO: 1739104 - DNA, 15 bp, Homo sapiens
tttactctgttgatt

SEQ ID NO: 1739105 - DNA, 15 bp, Homo sapiens
ttactctgttgattg

SEQ ID NO: 1739106 - DNA, 15 bp, Homo sapiens
tactctgttgattgt

SEQ ID NO: 1739107 - DNA, 15 bp, Homo sapiens
actctgttgattgtt

SEQ ID NO: 1739108 - DNA, 15 bp, Homo sapiens
ctctgttgattgttt

SEQ ID NO: 1739109 - DNA, 15 bp, Homo sapiens
tctgttgattgtttc

SEQ ID NO: 1739110 - DNA, 15 bp, Homo sapiens
ctgttgattgtttct

SEQ ID NO: 1739111 - DNA, 15 bp, Homo sapiens
tgttgattgtttctt

SEQ ID NO: 1739112 - DNA, 15 bp, Homo sapiens
gttgattgtttcttt

SEQ ID NO: 1739113 - DNA, 15 bp, Homo sapiens
ttgattgtttctttt

SEQ ID NO: 1739114 - DNA, 15 bp, Homo sapiens
tgattgtttcttttg

SEQ ID NO: 1739115 - DNA, 15 bp, Homo sapiens
gattgtttcttttgc

SEQ ID NO: 1739116 - DNA, 15 bp, Homo sapiens
attgtttcttttgct

SEQ ID NO: 1739117 - DNA, 15 bp, Homo sapiens
ttgtttcttttgctg

SEQ ID NO: 1739118 - DNA, 15 bp, Homo sapiens
tgtttcttttgctgt

SEQ ID NO: 1739119 - DNA, 15 bp, Homo sapiens
gtttcttttgctgtg

SEQ ID NO: 1739120 - DNA, 15 bp, Homo sapiens
tttcttttgctgtgc

SEQ ID NO: 1739121 - DNA, 15 bp, Homo sapiens
ttcttttgctgtgca

SEQ ID NO: 1739122 - DNA, 15 bp, Homo sapiens
tcttttgctgtgcag

SEQ ID NO: 1739123 - DNA, 15 bp, Homo sapiens
cttttgctgtgcaga

SEQ ID NO: 1739124 - DNA, 15 bp, Homo sapiens
ttttgctgtgcagaa

SEQ ID NO: 1739125 - DNA, 15 bp, Homo sapiens
tttgctgtgcagaag

SEQ ID NO: 1739126 - DNA, 15 bp, Homo sapiens
ttgctgtgcagaagc

SEQ ID NO: 1739127 - DNA, 15 bp, Homo sapiens
tgctgtgcagaagct

SEQ ID NO: 1739128 - DNA, 15 bp, Homo sapiens
gctgtgcagaagctc

SEQ ID NO: 1739129 - DNA, 15 bp, Homo sapiens
ctgtgcagaagctct

SEQ ID NO: 1739130 - DNA, 15 bp, Homo sapiens
tgtgcagaagctctt

SEQ ID NO: 1739131 - DNA, 15 bp, Homo sapiens
gtgcagaagctcttg

SEQ ID NO: 1739132 - DNA, 15 bp, Homo sapiens
tgcagaagctcttga

SEQ ID NO: 1739133 - DNA, 15 bp, Homo sapiens
gcagaagctcttgag

SEQ ID NO: 1739134 - DNA, 15 bp, Homo sapiens
cagaagctcttgagt

SEQ ID NO: 1739135 - DNA, 15 bp, Homo sapiens
agaagctcttgagtt

SEQ ID NO: 1739136 - DNA, 15 bp, Homo sapiens
gaagctcttgagttt

SEQ ID NO: 1739137 - DNA, 15 bp, Homo sapiens
aagctcttgagttta

SEQ ID NO: 1739138 - DNA, 15 bp, Homo sapiens
agctcttgagtttaa

SEQ ID NO: 1739139 - DNA, 15 bp, Homo sapiens
gctcttgagtttaat

SEQ ID NO: 1739140 - DNA, 15 bp, Homo sapiens
ctcttgagtttaatt

SEQ ID NO: 1739141 - DNA, 15 bp, Homo sapiens
tcttgagtttaattc

SEQ ID NO: 1739142 - DNA, 15 bp, Homo sapiens
cttgagtttaattca

SEQ ID NO: 1739143 - DNA, 15 bp, Homo sapiens
ttgagtttaattcaa

SEQ ID NO: 1739144 - DNA, 15 bp, Homo sapiens
tgagtttaattcaat

SEQ ID NO: 1739145 - DNA, 15 bp, Homo sapiens
gagtttaattcaatc

SEQ ID NO: 1739146 - DNA, 15 bp, Homo sapiens
agtttaattcaatcc

SEQ ID NO: 1739147 - DNA, 15 bp, Homo sapiens
gtttaattcaatccc

SEQ ID NO: 1739148 - DNA, 15 bp, Homo sapiens
tttaattcaatccca

SEQ ID NO: 1739149 - DNA, 15 bp, Homo sapiens
ttaattcaatcccac

SEQ ID NO: 1739150 - DNA, 15 bp, Homo sapiens
taattcaatcccact

SEQ ID NO: 1739151 - DNA, 15 bp, Homo sapiens
aattcaatcccactt

SEQ ID NO: 1739152 - DNA, 15 bp, Homo sapiens
attcaatcccacttg

SEQ ID NO: 1739153 - DNA, 15 bp, Homo sapiens
ttcaatcccacttgt

SEQ ID NO: 1739154 - DNA, 15 bp, Homo sapiens
tcaatcccacttgtc

SEQ ID NO: 1739155 - DNA, 15 bp, Homo sapiens
caatcccacttgtca

SEQ ID NO: 1739156 - DNA, 15 bp, Homo sapiens
aatcccacttgtcaa

SEQ ID NO: 1739157 - DNA, 15 bp, Homo sapiens
atcccacttgtcaat

SEQ ID NO: 1739158 - DNA, 15 bp, Homo sapiens
tcccacttgtcaatt

SEQ ID NO: 1739159 - DNA, 15 bp, Homo sapiens
cccacttgtcaattt

SEQ ID NO: 1739160 - DNA, 15 bp, Homo sapiens
ccacttgtcaatttt

SEQ ID NO: 1739161 - DNA, 15 bp, Homo sapiens
cacttgtcaattttt

SEQ ID NO: 1739162 - DNA, 15 bp, Homo sapiens
acttgtcaatttttg

SEQ ID NO: 1739163 - DNA, 15 bp, Homo sapiens
cttgtcaatttttga

SEQ ID NO: 1739164 - DNA, 15 bp, Homo sapiens
ttgtcaatttttgat

SEQ ID NO: 1739165 - DNA, 15 bp, Homo sapiens
tgtcaatttttgatt

SEQ ID NO: 1739166 - DNA, 15 bp, Homo sapiens
gtcaatttttgattt

SEQ ID NO: 1739167 - DNA, 15 bp, Homo sapiens
tcaatttttgatttt

SEQ ID NO: 1739168 - DNA, 15 bp, Homo sapiens
caatttttgattttg

SEQ ID NO: 1739169 - DNA, 15 bp, Homo sapiens
aatttttgattttgt

SEQ ID NO: 1739170 - DNA, 15 bp, Homo sapiens
atttttgattttgtt

SEQ ID NO: 1739171 - DNA, 15 bp, Homo sapiens
tttttgattttgttg

SEQ ID NO: 1739172 - DNA, 15 bp, Homo sapiens
ttttgattttgttgt

SEQ ID NO: 1739173 - DNA, 15 bp, Homo sapiens
tttgattttgttgtg

SEQ ID NO: 1739174 - DNA, 15 bp, Homo sapiens
ttgattttgttgtga

SEQ ID NO: 1739175 - DNA, 15 bp, Homo sapiens
tgattttgttgtgat

SEQ ID NO: 1739176 - DNA, 15 bp, Homo sapiens
gattttgttgtgatt

SEQ ID NO: 1739177 - DNA, 15 bp, Homo sapiens
attttgttgtgattg

SEQ ID NO: 1739178 - DNA, 15 bp, Homo sapiens
ttttgttgtgattgc

SEQ ID NO: 1739179 - DNA, 15 bp, Homo sapiens
tttgttgtgattgct

SEQ ID NO: 1739180 - DNA, 15 bp, Homo sapiens
ttgttgtgattgctt

SEQ ID NO: 1739181 - DNA, 15 bp, Homo sapiens
tgttgtgattgcttt

SEQ ID NO: 1739182 - DNA, 15 bp, Homo sapiens
gttgtgattgctttt

SEQ ID NO: 1739183 - DNA, 15 bp, Homo sapiens
ttgtgattgcttttg

SEQ ID NO: 1739184 - DNA, 15 bp, Homo sapiens
tgtgattgcttttgg

SEQ ID NO: 1739185 - DNA, 15 bp, Homo sapiens
gtgattgcttttggt

SEQ ID NO: 1739186 - DNA, 15 bp, Homo sapiens
tgattgcttttggtg

SEQ ID NO: 1739187 - DNA, 15 bp, Homo sapiens
gattgcttttggtgt

SEQ ID NO: 1739188 - DNA, 15 bp, Homo sapiens
attgcttttggtgtc

SEQ ID NO: 1739189 - DNA, 15 bp, Homo sapiens
ttgcttttggtgtct

SEQ ID NO: 1739190 - DNA, 15 bp, Homo sapiens
tgcttttggtgtctt

SEQ ID NO: 1739191 - DNA, 15 bp, Homo sapiens
gcttttggtgtcttt

SEQ ID NO: 1739192 - DNA, 15 bp, Homo sapiens
cttttggtgtcttta

SEQ ID NO: 1739193 - DNA, 15 bp, Homo sapiens
ttttggtgtctttat

SEQ ID NO: 1739194 - DNA, 15 bp, Homo sapiens
tttggtgtctttatc

SEQ ID NO: 1739195 - DNA, 15 bp, Homo sapiens
ttggtgtctttatca

SEQ ID NO: 1739196 - DNA, 15 bp, Homo sapiens
tggtgtctttatcat

SEQ ID NO: 1739197 - DNA, 15 bp, Homo sapiens
ggtgtctttatcatg

SEQ ID NO: 1739198 - DNA, 15 bp, Homo sapiens
gtgtctttatcatga

SEQ ID NO: 1739199 - DNA, 15 bp, Homo sapiens
tgtctttatcatgaa

SEQ ID NO: 1739200 - DNA, 15 bp, Homo sapiens
gtctttatcatgaag

SEQ ID NO: 1739201 - DNA, 15 bp, Homo sapiens
tctttatcatgaaga

SEQ ID NO: 1739202 - DNA, 15 bp, Homo sapiens
ctttatcatgaagac

SEQ ID NO: 1739203 - DNA, 15 bp, Homo sapiens
tttatcatgaagact

SEQ ID NO: 1739204 - DNA, 15 bp, Homo sapiens
ttatcatgaagactt

SEQ ID NO: 1739205 - DNA, 15 bp, Homo sapiens
tatcatgaagacttt

SEQ ID NO: 1739206 - DNA, 15 bp, Homo sapiens
atcatgaagactttg

SEQ ID NO: 1739207 - DNA, 15 bp, Homo sapiens
tcatgaagactttgc

SEQ ID NO: 1739208 - DNA, 15 bp, Homo sapiens
catgaagactttgcc

SEQ ID NO: 1739209 - DNA, 15 bp, Homo sapiens
atgaagactttgcct

SEQ ID NO: 1739210 - DNA, 15 bp, Homo sapiens
tgaagactttgcctg

SEQ ID NO: 1739211 - DNA, 15 bp, Homo sapiens
gaagactttgcctgt

SEQ ID NO: 1739212 - DNA, 15 bp, Homo sapiens
aagactttgcctgtt

SEQ ID NO: 1739213 - DNA, 15 bp, Homo sapiens
agactttgcctgttc

SEQ ID NO: 1739214 - DNA, 15 bp, Homo sapiens
gactttgcctgttcc

SEQ ID NO: 1739215 - DNA, 15 bp, Homo sapiens
actttgcctgttcct

SEQ ID NO: 1739216 - DNA, 15 bp, Homo sapiens
ctttgcctgttccta

SEQ ID NO: 1739217 - DNA, 15 bp, Homo sapiens
tttgcctgttcctat

SEQ ID NO: 1739218 - DNA, 15 bp, Homo sapiens
ttgcctgttcctatg

SEQ ID NO: 1739219 - DNA, 15 bp, Homo sapiens
tgcctgttcctatgt

SEQ ID NO: 1739220 - DNA, 15 bp, Homo sapiens
gcctgttcctatgtc

SEQ ID NO: 1739221 - DNA, 15 bp, Homo sapiens
cctgttcctatgtct

SEQ ID NO: 1739222 - DNA, 15 bp, Homo sapiens
ctgttcctatgtcta

SEQ ID NO: 1739223 - DNA, 15 bp, Homo sapiens
tgttcctatgtctag

SEQ ID NO: 1739224 - DNA, 15 bp, Homo sapiens
gttcctatgtctagg

SEQ ID NO: 1739225 - DNA, 15 bp, Homo sapiens
ttcctatgtctagga

SEQ ID NO: 1739226 - DNA, 15 bp, Homo sapiens
tcctatgtctaggat

SEQ ID NO: 1739227 - DNA, 15 bp, Homo sapiens
cctatgtctaggatc

SEQ ID NO: 1739228 - DNA, 15 bp, Homo sapiens
ctatgtctaggatct

SEQ ID NO: 1739229 - DNA, 15 bp, Homo sapiens
tatgtctaggatcta

SEQ ID NO: 1739230 - DNA, 15 bp, Homo sapiens
atgtctaggatctat

SEQ ID NO: 1739231 - DNA, 15 bp, Homo sapiens
tgtctaggatctatt

SEQ ID NO: 1739232 - DNA, 15 bp, Homo sapiens
gtctaggatctattt

SEQ ID NO: 1739233 - DNA, 15 bp, Homo sapiens
tctaggatctatttt

SEQ ID NO: 1739234 - DNA, 15 bp, Homo sapiens
ctaggatctattttt

SEQ ID NO: 1739235 - DNA, 15 bp, Homo sapiens
taggatctatttttt

SEQ ID NO: 1739236 - DNA, 15 bp, Homo sapiens
aggatctattttttt

SEQ ID NO: 1739237 - DNA, 15 bp, Homo sapiens
ggatctatttttttt

SEQ ID NO: 1739238 - DNA, 15 bp, Homo sapiens
gatctattttttttt

SEQ ID NO: 1739239 - DNA, 15 bp, Homo sapiens
atctatttttttttt

SEQ ID NO: 1739240 - DNA, 15 bp, Homo sapiens
tctattttttttttt

SEQ ID NO: 1739241 - DNA, 15 bp, Homo sapiens
ctatttttttttttt

SEQ ID NO: 1739242 - DNA, 15 bp, Homo sapiens
tattttttttttttg

SEQ ID NO: 1739243 - DNA, 15 bp, Homo sapiens
attttttttttttga

SEQ ID NO: 1739244 - DNA, 15 bp, Homo sapiens
ctgcctcccgggttt

SEQ ID NO: 1739245 - DNA, 15 bp, Homo sapiens
tgcctcccgggttta

SEQ ID NO: 1739246 - DNA, 15 bp, Homo sapiens
gcctcccgggtttaa

SEQ ID NO: 1739247 - DNA, 15 bp, Homo sapiens
cctcccgggtttaag

SEQ ID NO: 1739248 - DNA, 15 bp, Homo sapiens
ctcccgggtttaagt

SEQ ID NO: 1739249 - DNA, 15 bp, Homo sapiens
tcccgggtttaagtg

SEQ ID NO: 1739250 - DNA, 15 bp, Homo sapiens
cccgggtttaagtga

SEQ ID NO: 1739251 - DNA, 15 bp, Homo sapiens
ccgggtttaagtgat

SEQ ID NO: 1739252 - DNA, 15 bp, Homo sapiens
cgggtttaagtgatt

SEQ ID NO: 1739253 - DNA, 15 bp, Homo sapiens
gggtttaagtgatta

SEQ ID NO: 1739254 - DNA, 15 bp, Homo sapiens
ggtttaagtgattat

SEQ ID NO: 1739255 - DNA, 15 bp, Homo sapiens
gtttaagtgattatc

SEQ ID NO: 1739256 - DNA, 15 bp, Homo sapiens
tttaagtgattatct

SEQ ID NO: 1739257 - DNA, 15 bp, Homo sapiens
ttaagtgattatctt

SEQ ID NO: 1739258 - DNA, 15 bp, Homo sapiens
taagtgattatcttg

SEQ ID NO: 1739259 - DNA, 15 bp, Homo sapiens
aagtgattatcttgc

SEQ ID NO: 1739260 - DNA, 15 bp, Homo sapiens
agtgattatcttgcc

SEQ ID NO: 1739261 - DNA, 15 bp, Homo sapiens
gtgattatcttgcct

SEQ ID NO: 1739262 - DNA, 15 bp, Homo sapiens
tgattatcttgcctc

SEQ ID NO: 1739263 - DNA, 15 bp, Homo sapiens
gattatcttgcctca

SEQ ID NO: 1739264 - DNA, 15 bp, Homo sapiens
attatcttgcctcag

SEQ ID NO: 1739265 - DNA, 15 bp, Homo sapiens
ttatcttgcctcagc

SEQ ID NO: 1739266 - DNA, 15 bp, Homo sapiens
tatcttgcctcagcc

SEQ ID NO: 1739267 - DNA, 15 bp, Homo sapiens
atcttgcctcagcct

SEQ ID NO: 1739268 - DNA, 15 bp, Homo sapiens
ctgagtaactgggac

SEQ ID NO: 1739269 - DNA, 15 bp, Homo sapiens
tgagtaactgggact

SEQ ID NO: 1739270 - DNA, 15 bp, Homo sapiens
gagtaactgggacta

SEQ ID NO: 1739271 - DNA, 15 bp, Homo sapiens
aactgggactacagg

SEQ ID NO: 1739272 - DNA, 15 bp, Homo sapiens
actgggactacaggt

SEQ ID NO: 1739273 - DNA, 15 bp, Homo sapiens
agatggggttttact

SEQ ID NO: 1739274 - DNA, 15 bp, Homo sapiens
gatggggttttacta

SEQ ID NO: 1739275 - DNA, 15 bp, Homo sapiens
atggggttttactat

SEQ ID NO: 1739276 - DNA, 15 bp, Homo sapiens
tggggttttactatg

SEQ ID NO: 1739277 - DNA, 15 bp, Homo sapiens
tggtcttgaactccc

SEQ ID NO: 1739278 - DNA, 15 bp, Homo sapiens
ggtcttgaactccct

SEQ ID NO: 1739279 - DNA, 15 bp, Homo sapiens
gtcttgaactcccta

SEQ ID NO: 1739280 - DNA, 15 bp, Homo sapiens
tcttgaactccctac

SEQ ID NO: 1739281 - DNA, 15 bp, Homo sapiens
cttgaactccctacc

SEQ ID NO: 1739282 - DNA, 15 bp, Homo sapiens
ttgaactccctacct

SEQ ID NO: 1739283 - DNA, 15 bp, Homo sapiens
tgaactccctacctc

SEQ ID NO: 1739284 - DNA, 15 bp, Homo sapiens
gaactccctacctca

SEQ ID NO: 1739285 - DNA, 15 bp, Homo sapiens
aactccctacctcag

SEQ ID NO: 1739286 - DNA, 15 bp, Homo sapiens
actccctacctcagg

SEQ ID NO: 1739287 - DNA, 15 bp, Homo sapiens
ctccctacctcaggt

SEQ ID NO: 1739288 - DNA, 15 bp, Homo sapiens
tccctacctcaggtg

SEQ ID NO: 1739289 - DNA, 15 bp, Homo sapiens
ccctacctcaggtga

SEQ ID NO: 1739290 - DNA, 15 bp, Homo sapiens
cctacctcaggtgat

SEQ ID NO: 1739291 - DNA, 15 bp, Homo sapiens
ctacctcaggtgatc

SEQ ID NO: 1739292 - DNA, 15 bp, Homo sapiens
tacctcaggtgatcc

SEQ ID NO: 1739293 - DNA, 15 bp, Homo sapiens
ctcaggtgatccatg

SEQ ID NO: 1739294 - DNA, 15 bp, Homo sapiens
tcaggtgatccatgc

SEQ ID NO: 1739295 - DNA, 15 bp, Homo sapiens
caggtgatccatgca

SEQ ID NO: 1739296 - DNA, 15 bp, Homo sapiens
aggtgatccatgcac

SEQ ID NO: 1739297 - DNA, 15 bp, Homo sapiens
ggtgatccatgcacc

SEQ ID NO: 1739298 - DNA, 15 bp, Homo sapiens
gtgatccatgcacct

SEQ ID NO: 1739299 - DNA, 15 bp, Homo sapiens
tgatccatgcacctc

SEQ ID NO: 1739300 - DNA, 15 bp, Homo sapiens
gatccatgcacctca

SEQ ID NO: 1739301 - DNA, 15 bp, Homo sapiens
atccatgcacctcag

SEQ ID NO: 1739302 - DNA, 15 bp, Homo sapiens
tccatgcacctcagc

SEQ ID NO: 1739303 - DNA, 15 bp, Homo sapiens
ccatgcacctcagcc

SEQ ID NO: 1739304 - DNA, 15 bp, Homo sapiens
catgcacctcagcct

SEQ ID NO: 1739305 - DNA, 15 bp, Homo sapiens
atgcacctcagcctc

SEQ ID NO: 1739306 - DNA, 15 bp, Homo sapiens
tgcacctcagcctcc

SEQ ID NO: 1739307 - DNA, 15 bp, Homo sapiens
gcacctcagcctccc

SEQ ID NO: 1739308 - DNA, 15 bp, Homo sapiens
accacacctggcctg

SEQ ID NO: 1739309 - DNA, 15 bp, Homo sapiens
ccacacctggcctgg

SEQ ID NO: 1739310 - DNA, 15 bp, Homo sapiens
cacacctggcctggc

SEQ ID NO: 1739311 - DNA, 15 bp, Homo sapiens
acacctggcctggcc

SEQ ID NO: 1739312 - DNA, 15 bp, Homo sapiens
cacctggcctggcca

SEQ ID NO: 1739313 - DNA, 15 bp, Homo sapiens
acctggcctggccat

SEQ ID NO: 1739314 - DNA, 15 bp, Homo sapiens
cctggcctggccatc

SEQ ID NO: 1739315 - DNA, 15 bp, Homo sapiens
ctggcctggccatct

SEQ ID NO: 1739316 - DNA, 15 bp, Homo sapiens
tggcctggccatctt

SEQ ID NO: 1739317 - DNA, 15 bp, Homo sapiens
ggcctggccatcttc

SEQ ID NO: 1739318 - DNA, 15 bp, Homo sapiens
gcctggccatcttca

SEQ ID NO: 1739319 - DNA, 15 bp, Homo sapiens
cctggccatcttcaa

SEQ ID NO: 1739320 - DNA, 15 bp, Homo sapiens
ctggccatcttcaat

SEQ ID NO: 1739321 - DNA, 15 bp, Homo sapiens
tggccatcttcaatc

SEQ ID NO: 1739322 - DNA, 15 bp, Homo sapiens
ggccatcttcaatcc

SEQ ID NO: 1739323 - DNA, 15 bp, Homo sapiens
gccatcttcaatcca

SEQ ID NO: 1739324 - DNA, 15 bp, Homo sapiens
ccatcttcaatccat

SEQ ID NO: 1739325 - DNA, 15 bp, Homo sapiens
catcttcaatccatc

SEQ ID NO: 1739326 - DNA, 15 bp, Homo sapiens
atcttcaatccatct

SEQ ID NO: 1739327 - DNA, 15 bp, Homo sapiens
tcttcaatccatctt

SEQ ID NO: 1739328 - DNA, 15 bp, Homo sapiens
cttcaatccatcttg

SEQ ID NO: 1739329 - DNA, 15 bp, Homo sapiens
ttcaatccatcttga

SEQ ID NO: 1739330 - DNA, 15 bp, Homo sapiens
tcaatccatcttgag

SEQ ID NO: 1739331 - DNA, 15 bp, Homo sapiens
caatccatcttgagt

SEQ ID NO: 1739332 - DNA, 15 bp, Homo sapiens
aatccatcttgagtt

SEQ ID NO: 1739333 - DNA, 15 bp, Homo sapiens
atccatcttgagttg

SEQ ID NO: 1739334 - DNA, 15 bp, Homo sapiens
tccatcttgagttga

SEQ ID NO: 1739335 - DNA, 15 bp, Homo sapiens
ccatcttgagttgat

SEQ ID NO: 1739336 - DNA, 15 bp, Homo sapiens
catcttgagttgatt

SEQ ID NO: 1739337 - DNA, 15 bp, Homo sapiens
atcttgagttgattt

SEQ ID NO: 1739338 - DNA, 15 bp, Homo sapiens
tcttgagttgatttt

SEQ ID NO: 1739339 - DNA, 15 bp, Homo sapiens
cttgagttgattttt

SEQ ID NO: 1739340 - DNA, 15 bp, Homo sapiens
ttgagttgatttttg

SEQ ID NO: 1739341 - DNA, 15 bp, Homo sapiens
tgagttgatttttgt

SEQ ID NO: 1739342 - DNA, 15 bp, Homo sapiens
gagttgatttttgta

SEQ ID NO: 1739343 - DNA, 15 bp, Homo sapiens
agttgatttttgtat

SEQ ID NO: 1739344 - DNA, 15 bp, Homo sapiens
gttgatttttgtata

SEQ ID NO: 1739345 - DNA, 15 bp, Homo sapiens
ttgatttttgtatat

SEQ ID NO: 1739346 - DNA, 15 bp, Homo sapiens
tgatttttgtatatg

SEQ ID NO: 1739347 - DNA, 15 bp, Homo sapiens
gatttttgtatatgg

SEQ ID NO: 1739348 - DNA, 15 bp, Homo sapiens
atttttgtatatggt

SEQ ID NO: 1739349 - DNA, 15 bp, Homo sapiens
tttttgtatatggtg

SEQ ID NO: 1739350 - DNA, 15 bp, Homo sapiens
ttttgtatatggtgt

SEQ ID NO: 1739351 - DNA, 15 bp, Homo sapiens
tttgtatatggtgta

SEQ ID NO: 1739352 - DNA, 15 bp, Homo sapiens
ttgtatatggtgtaa

SEQ ID NO: 1739353 - DNA, 15 bp, Homo sapiens
tgtatatggtgtaag

SEQ ID NO: 1739354 - DNA, 15 bp, Homo sapiens
gtatatggtgtaagg

SEQ ID NO: 1739355 - DNA, 15 bp, Homo sapiens
tatatggtgtaagga

SEQ ID NO: 1739356 - DNA, 15 bp, Homo sapiens
atatggtgtaaggaa

SEQ ID NO: 1739357 - DNA, 15 bp, Homo sapiens
tatggtgtaaggaat

SEQ ID NO: 1739358 - DNA, 15 bp, Homo sapiens
atggtgtaaggaatg

SEQ ID NO: 1739359 - DNA, 15 bp, Homo sapiens
tggtgtaaggaatgg

SEQ ID NO: 1739360 - DNA, 15 bp, Homo sapiens
ggtgtaaggaatggg

SEQ ID NO: 1739361 - DNA, 15 bp, Homo sapiens
gtgtaaggaatgggt

SEQ ID NO: 1739362 - DNA, 15 bp, Homo sapiens
tgtaaggaatgggtc

SEQ ID NO: 1739363 - DNA, 15 bp, Homo sapiens
gtaaggaatgggtcc

SEQ ID NO: 1739364 - DNA, 15 bp, Homo sapiens
taaggaatgggtcca

SEQ ID NO: 1739365 - DNA, 15 bp, Homo sapiens
aaggaatgggtccag

SEQ ID NO: 1739366 - DNA, 15 bp, Homo sapiens
aggaatgggtccagc

SEQ ID NO: 1739367 - DNA, 15 bp, Homo sapiens
ggaatgggtccagct

SEQ ID NO: 1739368 - DNA, 15 bp, Homo sapiens
gaatgggtccagctt

SEQ ID NO: 1739369 - DNA, 15 bp, Homo sapiens
aatgggtccagcttc

SEQ ID NO: 1739370 - DNA, 15 bp, Homo sapiens
atgggtccagcttca

SEQ ID NO: 1739371 - DNA, 15 bp, Homo sapiens
tgggtccagcttcaa

SEQ ID NO: 1739372 - DNA, 15 bp, Homo sapiens
gggtccagcttcaat

SEQ ID NO: 1739373 - DNA, 15 bp, Homo sapiens
ggtccagcttcaatc

SEQ ID NO: 1739374 - DNA, 15 bp, Homo sapiens
gtccagcttcaatct

SEQ ID NO: 1739375 - DNA, 15 bp, Homo sapiens
tccagcttcaatctt

SEQ ID NO: 1739376 - DNA, 15 bp, Homo sapiens
ccagcttcaatcttc

SEQ ID NO: 1739377 - DNA, 15 bp, Homo sapiens
cagcttcaatcttct

SEQ ID NO: 1739378 - DNA, 15 bp, Homo sapiens
agcttcaatcttctg

SEQ ID NO: 1739379 - DNA, 15 bp, Homo sapiens
gcttcaatcttctgc

SEQ ID NO: 1739380 - DNA, 15 bp, Homo sapiens
cttcaatcttctgca

SEQ ID NO: 1739381 - DNA, 15 bp, Homo sapiens
ttcaatcttctgcat

SEQ ID NO: 1739382 - DNA, 15 bp, Homo sapiens
tcaatcttctgcata

SEQ ID NO: 1739383 - DNA, 15 bp, Homo sapiens
caatcttctgcatat

SEQ ID NO: 1739384 - DNA, 15 bp, Homo sapiens
aatcttctgcatatg

SEQ ID NO: 1739385 - DNA, 15 bp, Homo sapiens
atcttctgcatatgg

SEQ ID NO: 1739386 - DNA, 15 bp, Homo sapiens
tcttctgcatatggc

SEQ ID NO: 1739387 - DNA, 15 bp, Homo sapiens
cttctgcatatggct

SEQ ID NO: 1739388 - DNA, 15 bp, Homo sapiens
ttctgcatatggcta

SEQ ID NO: 1739389 - DNA, 15 bp, Homo sapiens
tctgcatatggctag

SEQ ID NO: 1739390 - DNA, 15 bp, Homo sapiens
ctgcatatggctagc

SEQ ID NO: 1739391 - DNA, 15 bp, Homo sapiens
tgcatatggctagcc

SEQ ID NO: 1739392 - DNA, 15 bp, Homo sapiens
gcatatggctagcca

SEQ ID NO: 1739393 - DNA, 15 bp, Homo sapiens
catatggctagccac

SEQ ID NO: 1739394 - DNA, 15 bp, Homo sapiens
atatggctagccact

SEQ ID NO: 1739395 - DNA, 15 bp, Homo sapiens
tatggctagccactt

SEQ ID NO: 1739396 - DNA, 15 bp, Homo sapiens
atggctagccactta

SEQ ID NO: 1739397 - DNA, 15 bp, Homo sapiens
tggctagccacttat

SEQ ID NO: 1739398 - DNA, 15 bp, Homo sapiens
ggctagccacttatc

SEQ ID NO: 1739399 - DNA, 15 bp, Homo sapiens
gctagccacttatcc

SEQ ID NO: 1739400 - DNA, 15 bp, Homo sapiens
ctagccacttatcct

SEQ ID NO: 1739401 - DNA, 15 bp, Homo sapiens
tagccacttatccta

SEQ ID NO: 1739402 - DNA, 15 bp, Homo sapiens
agccacttatcctag

SEQ ID NO: 1739403 - DNA, 15 bp, Homo sapiens
gccacttatcctagc

SEQ ID NO: 1739404 - DNA, 15 bp, Homo sapiens
ccacttatcctagca

SEQ ID NO: 1739405 - DNA, 15 bp, Homo sapiens
cacttatcctagcac

SEQ ID NO: 1739406 - DNA, 15 bp, Homo sapiens
acttatcctagcacc

SEQ ID NO: 1739407 - DNA, 15 bp, Homo sapiens
cttatcctagcacca

SEQ ID NO: 1739408 - DNA, 15 bp, Homo sapiens
ttatcctagcaccag

SEQ ID NO: 1739409 - DNA, 15 bp, Homo sapiens
tatcctagcaccagt

SEQ ID NO: 1739410 - DNA, 15 bp, Homo sapiens
atcctagcaccagtt

SEQ ID NO: 1739411 - DNA, 15 bp, Homo sapiens
tcctagcaccagtta

SEQ ID NO: 1739412 - DNA, 15 bp, Homo sapiens
cctagcaccagttaa

SEQ ID NO: 1739413 - DNA, 15 bp, Homo sapiens
ctagcaccagttaat

SEQ ID NO: 1739414 - DNA, 15 bp, Homo sapiens
tagcaccagttaatg

SEQ ID NO: 1739415 - DNA, 15 bp, Homo sapiens
agcaccagttaatga

SEQ ID NO: 1739416 - DNA, 15 bp, Homo sapiens
gcaccagttaatgaa

SEQ ID NO: 1739417 - DNA, 15 bp, Homo sapiens
caccagttaatgaaa

SEQ ID NO: 1739418 - DNA, 15 bp, Homo sapiens
accagttaatgaaat

SEQ ID NO: 1739419 - DNA, 15 bp, Homo sapiens
ccagttaatgaaatg

SEQ ID NO: 1739420 - DNA, 15 bp, Homo sapiens
cagttaatgaaatgg

SEQ ID NO: 1739421 - DNA, 15 bp, Homo sapiens
agttaatgaaatggg

SEQ ID NO: 1739422 - DNA, 15 bp, Homo sapiens
gttaatgaaatggga

SEQ ID NO: 1739423 - DNA, 15 bp, Homo sapiens
ttaatgaaatgggag

SEQ ID NO: 1739424 - DNA, 15 bp, Homo sapiens
taatgaaatgggagt

SEQ ID NO: 1739425 - DNA, 15 bp, Homo sapiens
aatgaaatgggagtc

SEQ ID NO: 1739426 - DNA, 15 bp, Homo sapiens
atgaaatgggagtct

SEQ ID NO: 1739427 - DNA, 15 bp, Homo sapiens
tgaaatgggagtctt

SEQ ID NO: 1739428 - DNA, 15 bp, Homo sapiens
gaaatgggagtcttt

SEQ ID NO: 1739429 - DNA, 15 bp, Homo sapiens
aaatgggagtctttt

SEQ ID NO: 1739430 - DNA, 15 bp, Homo sapiens
aatgggagtcttttc

SEQ ID NO: 1739431 - DNA, 15 bp, Homo sapiens
atgggagtcttttcc

SEQ ID NO: 1739432 - DNA, 15 bp, Homo sapiens
tgggagtcttttccc

SEQ ID NO: 1739433 - DNA, 15 bp, Homo sapiens
gggagtcttttcccc

SEQ ID NO: 1739434 - DNA, 15 bp, Homo sapiens
ggagtcttttcccca

SEQ ID NO: 1739435 - DNA, 15 bp, Homo sapiens
gagtcttttccccat

SEQ ID NO: 1739436 - DNA, 15 bp, Homo sapiens
agtcttttccccatt

SEQ ID NO: 1739437 - DNA, 15 bp, Homo sapiens
gtcttttccccattg

SEQ ID NO: 1739438 - DNA, 15 bp, Homo sapiens
tcttttccccattgc

SEQ ID NO: 1739439 - DNA, 15 bp, Homo sapiens
cttttccccattgct

SEQ ID NO: 1739440 - DNA, 15 bp, Homo sapiens
ttttccccattgctt

SEQ ID NO: 1739441 - DNA, 15 bp, Homo sapiens
tttccccattgcttg

SEQ ID NO: 1739442 - DNA, 15 bp, Homo sapiens
ttccccattgcttgc

SEQ ID NO: 1739443 - DNA, 15 bp, Homo sapiens
tccccattgcttgct

SEQ ID NO: 1739444 - DNA, 15 bp, Homo sapiens
ccccattgcttgctt

SEQ ID NO: 1739445 - DNA, 15 bp, Homo sapiens
cccattgcttgcttt

SEQ ID NO: 1739446 - DNA, 15 bp, Homo sapiens
ccattgcttgctttt

SEQ ID NO: 1739447 - DNA, 15 bp, Homo sapiens
cattgcttgcttttg

SEQ ID NO: 1739448 - DNA, 15 bp, Homo sapiens
attgcttgcttttgt

SEQ ID NO: 1739449 - DNA, 15 bp, Homo sapiens
ttgcttgcttttgtc

SEQ ID NO: 1739450 - DNA, 15 bp, Homo sapiens
tgcttgcttttgtca

SEQ ID NO: 1739451 - DNA, 15 bp, Homo sapiens
gcttgcttttgtcag

SEQ ID NO: 1739452 - DNA, 15 bp, Homo sapiens
cttgcttttgtcagc

SEQ ID NO: 1739453 - DNA, 15 bp, Homo sapiens
ttgcttttgtcagct

SEQ ID NO: 1739454 - DNA, 15 bp, Homo sapiens
tgcttttgtcagctt

SEQ ID NO: 1739455 - DNA, 15 bp, Homo sapiens
gcttttgtcagcttt

SEQ ID NO: 1739456 - DNA, 15 bp, Homo sapiens
cttttgtcagctttg

SEQ ID NO: 1739457 - DNA, 15 bp, Homo sapiens
ttttgtcagctttgt

SEQ ID NO: 1739458 - DNA, 15 bp, Homo sapiens
tttgtcagctttgtc

SEQ ID NO: 1739459 - DNA, 15 bp, Homo sapiens
ttgtcagctttgtca

SEQ ID NO: 1739460 - DNA, 15 bp, Homo sapiens
tgtcagctttgtcaa

SEQ ID NO: 1739461 - DNA, 15 bp, Homo sapiens
gtcagctttgtcaaa

SEQ ID NO: 1739462 - DNA, 15 bp, Homo sapiens
agctttgtcaaaaag

SEQ ID NO: 1739463 - DNA, 15 bp, Homo sapiens
gctttgtcaaaaaga

SEQ ID NO: 1739464 - DNA, 15 bp, Homo sapiens
ctttgtcaaaaagat

SEQ ID NO: 1739465 - DNA, 15 bp, Homo sapiens
tttgtcaaaaagatc

SEQ ID NO: 1739466 - DNA, 15 bp, Homo sapiens
ttgtcaaaaagatca

SEQ ID NO: 1739467 - DNA, 15 bp, Homo sapiens
tgtcaaaaagatcag

SEQ ID NO: 1739468 - DNA, 15 bp, Homo sapiens
gtcaaaaagatcagc

SEQ ID NO: 1739469 - DNA, 15 bp, Homo sapiens
tcaaaaagatcagct

SEQ ID NO: 1739470 - DNA, 15 bp, Homo sapiens
caaaaagatcagctg

SEQ ID NO: 1739471 - DNA, 15 bp, Homo sapiens
aaaaagatcagctgg

SEQ ID NO: 1739472 - DNA, 15 bp, Homo sapiens
aaaagatcagctggt

SEQ ID NO: 1739473 - DNA, 15 bp, Homo sapiens
aaagatcagctggtc

SEQ ID NO: 1739474 - DNA, 15 bp, Homo sapiens
aagatcagctggtcc

SEQ ID NO: 1739475 - DNA, 15 bp, Homo sapiens
agatcagctggtcct

SEQ ID NO: 1739476 - DNA, 15 bp, Homo sapiens
gatcagctggtccta

SEQ ID NO: 1739477 - DNA, 15 bp, Homo sapiens
atcagctggtcctag

SEQ ID NO: 1739478 - DNA, 15 bp, Homo sapiens
tcagctggtcctagg

SEQ ID NO: 1739479 - DNA, 15 bp, Homo sapiens
cagctggtcctaggt

SEQ ID NO: 1739480 - DNA, 15 bp, Homo sapiens
agctggtcctaggtg

SEQ ID NO: 1739481 - DNA, 15 bp, Homo sapiens
gctggtcctaggtgt

SEQ ID NO: 1739482 - DNA, 15 bp, Homo sapiens
ctggtcctaggtgtg

SEQ ID NO: 1739483 - DNA, 15 bp, Homo sapiens
tggtcctaggtgtgc

SEQ ID NO: 1739484 - DNA, 15 bp, Homo sapiens
ggtcctaggtgtgca

SEQ ID NO: 1739485 - DNA, 15 bp, Homo sapiens
gtcctaggtgtgcaa

SEQ ID NO: 1739486 - DNA, 15 bp, Homo sapiens
tcctaggtgtgcaac

SEQ ID NO: 1739487 - DNA, 15 bp, Homo sapiens
cctaggtgtgcaacc

SEQ ID NO: 1739488 - DNA, 15 bp, Homo sapiens
ctaggtgtgcaacct

SEQ ID NO: 1739489 - DNA, 15 bp, Homo sapiens
taggtgtgcaacctt

SEQ ID NO: 1739490 - DNA, 15 bp, Homo sapiens
aggtgtgcaacctta

SEQ ID NO: 1739491 - DNA, 15 bp, Homo sapiens
ggtgtgcaaccttat

SEQ ID NO: 1739492 - DNA, 15 bp, Homo sapiens
gtgtgcaaccttatt

SEQ ID NO: 1739493 - DNA, 15 bp, Homo sapiens
tgtgcaaccttattt

SEQ ID NO: 1739494 - DNA, 15 bp, Homo sapiens
gtgcaaccttatttc

SEQ ID NO: 1739495 - DNA, 15 bp, Homo sapiens
tgcaaccttatttct

SEQ ID NO: 1739496 - DNA, 15 bp, Homo sapiens
gcaaccttatttctg

SEQ ID NO: 1739497 - DNA, 15 bp, Homo sapiens
caaccttatttctgg

SEQ ID NO: 1739498 - DNA, 15 bp, Homo sapiens
aaccttatttctggg

SEQ ID NO: 1739499 - DNA, 15 bp, Homo sapiens
accttatttctgggt

SEQ ID NO: 1739500 - DNA, 15 bp, Homo sapiens
ccttatttctgggtg

SEQ ID NO: 1739501 - DNA, 15 bp, Homo sapiens
cttatttctgggtgc

SEQ ID NO: 1739502 - DNA, 15 bp, Homo sapiens
ttatttctgggtgct

SEQ ID NO: 1739503 - DNA, 15 bp, Homo sapiens
tatttctgggtgctc

SEQ ID NO: 1739504 - DNA, 15 bp, Homo sapiens
atttctgggtgctct

SEQ ID NO: 1739505 - DNA, 15 bp, Homo sapiens
tttctgggtgctcta

SEQ ID NO: 1739506 - DNA, 15 bp, Homo sapiens
ttctgggtgctctat

SEQ ID NO: 1739507 - DNA, 15 bp, Homo sapiens
tctgggtgctctatt

SEQ ID NO: 1739508 - DNA, 15 bp, Homo sapiens
ctgggtgctctattc

SEQ ID NO: 1739509 - DNA, 15 bp, Homo sapiens
tgggtgctctattct

SEQ ID NO: 1739510 - DNA, 15 bp, Homo sapiens
gggtgctctattctg

SEQ ID NO: 1739511 - DNA, 15 bp, Homo sapiens
ggtgctctattctgt

SEQ ID NO: 1739512 - DNA, 15 bp, Homo sapiens
gtgctctattctgtt

SEQ ID NO: 1739513 - DNA, 15 bp, Homo sapiens
tgctctattctgttc

SEQ ID NO: 1739514 - DNA, 15 bp, Homo sapiens
gctctattctgttcc

SEQ ID NO: 1739515 - DNA, 15 bp, Homo sapiens
ctctattctgttcca

SEQ ID NO: 1739516 - DNA, 15 bp, Homo sapiens
tctattctgttccat

SEQ ID NO: 1739517 - DNA, 15 bp, Homo sapiens
ctattctgttccatt

SEQ ID NO: 1739518 - DNA, 15 bp, Homo sapiens
tattctgttccattg

SEQ ID NO: 1739519 - DNA, 15 bp, Homo sapiens
attctgttccattgg

SEQ ID NO: 1739520 - DNA, 15 bp, Homo sapiens
ttctgttccattggt

SEQ ID NO: 1739521 - DNA, 15 bp, Homo sapiens
tctgttccattggtt

SEQ ID NO: 1739522 - DNA, 15 bp, Homo sapiens
ctgttccattggttt

SEQ ID NO: 1739523 - DNA, 15 bp, Homo sapiens
tgttccattggttta

SEQ ID NO: 1739524 - DNA, 15 bp, Homo sapiens
gttccattggtttac

SEQ ID NO: 1739525 - DNA, 15 bp, Homo sapiens
ttccattggtttaca

SEQ ID NO: 1739526 - DNA, 15 bp, Homo sapiens
tccattggtttacat

SEQ ID NO: 1739527 - DNA, 15 bp, Homo sapiens
ccattggtttacatt

SEQ ID NO: 1739528 - DNA, 15 bp, Homo sapiens
cattggtttacatta

SEQ ID NO: 1739529 - DNA, 15 bp, Homo sapiens
attggtttacattat

SEQ ID NO: 1739530 - DNA, 15 bp, Homo sapiens
ttggtttacattatt

SEQ ID NO: 1739531 - DNA, 15 bp, Homo sapiens
tggtttacattattc

SEQ ID NO: 1739532 - DNA, 15 bp, Homo sapiens
ggtttacattattct

SEQ ID NO: 1739533 - DNA, 15 bp, Homo sapiens
gtttacattattctg

SEQ ID NO: 1739534 - DNA, 15 bp, Homo sapiens
tttacattattctga

SEQ ID NO: 1739535 - DNA, 15 bp, Homo sapiens
ttacattattctgaa

SEQ ID NO: 1739536 - DNA, 15 bp, Homo sapiens
tacattattctgaaa

SEQ ID NO: 1739537 - DNA, 15 bp, Homo sapiens
acattattctgaaaa

SEQ ID NO: 1739538 - DNA, 15 bp, Homo sapiens
cattattctgaaaaa

SEQ ID NO: 1739539 - DNA, 15 bp, Homo sapiens
attattctgaaaaaa

SEQ ID NO: 1739540 - DNA, 15 bp, Homo sapiens
ttattctgaaaaaaa

SEQ ID NO: 1739541 - DNA, 15 bp, Homo sapiens
tattctgaaaaaaat

SEQ ID NO: 1739542 - DNA, 15 bp, Homo sapiens
attctgaaaaaaatg

SEQ ID NO: 1739543 - DNA, 15 bp, Homo sapiens
ttctgaaaaaaatgt

SEQ ID NO: 1739544 - DNA, 15 bp, Homo sapiens
tctgaaaaaaatgtg

SEQ ID NO: 1739545 - DNA, 15 bp, Homo sapiens
ctgaaaaaaatgtgc

SEQ ID NO: 1739546 - DNA, 15 bp, Homo sapiens
tgaaaaaaatgtgcc

SEQ ID NO: 1739547 - DNA, 15 bp, Homo sapiens
gaaaaaaatgtgcct

SEQ ID NO: 1739548 - DNA, 15 bp, Homo sapiens
aaaaaaatgtgcctg

SEQ ID NO: 1739549 - DNA, 15 bp, Homo sapiens
aaaaaatgtgcctgt

SEQ ID NO: 1739550 - DNA, 15 bp, Homo sapiens
aaaaatgtgcctgtt

SEQ ID NO: 1739551 - DNA, 15 bp, Homo sapiens
aaaatgtgcctgttt

SEQ ID NO: 1739552 - DNA, 15 bp, Homo sapiens
aaatgtgcctgtttt

SEQ ID NO: 1739553 - DNA, 15 bp, Homo sapiens
aatgtgcctgttttt

SEQ ID NO: 1739554 - DNA, 15 bp, Homo sapiens
atgtgcctgtttttg

SEQ ID NO: 1739555 - DNA, 15 bp, Homo sapiens
tgtgcctgtttttgt

SEQ ID NO: 1739556 - DNA, 15 bp, Homo sapiens
gtgcctgtttttgta

SEQ ID NO: 1739557 - DNA, 15 bp, Homo sapiens
tgcctgtttttgtac

SEQ ID NO: 1739558 - DNA, 15 bp, Homo sapiens
gcctgtttttgtacc

SEQ ID NO: 1739559 - DNA, 15 bp, Homo sapiens
cctgtttttgtacca

SEQ ID NO: 1739560 - DNA, 15 bp, Homo sapiens
ctgtttttgtaccag

SEQ ID NO: 1739561 - DNA, 15 bp, Homo sapiens
tgtttttgtaccagt

SEQ ID NO: 1739562 - DNA, 15 bp, Homo sapiens
gtttttgtaccagta

SEQ ID NO: 1739563 - DNA, 15 bp, Homo sapiens
tttttgtaccagtaa

SEQ ID NO: 1739564 - DNA, 15 bp, Homo sapiens
ttttgtaccagtaac

SEQ ID NO: 1739565 - DNA, 15 bp, Homo sapiens
tttgtaccagtaaca

SEQ ID NO: 1739566 - DNA, 15 bp, Homo sapiens
ttgtaccagtaacat

SEQ ID NO: 1739567 - DNA, 15 bp, Homo sapiens
tgtaccagtaacatg

SEQ ID NO: 1739568 - DNA, 15 bp, Homo sapiens
gtaccagtaacatgc

SEQ ID NO: 1739569 - DNA, 15 bp, Homo sapiens
taccagtaacatgct

SEQ ID NO: 1739570 - DNA, 15 bp, Homo sapiens
accagtaacatgctg

SEQ ID NO: 1739571 - DNA, 15 bp, Homo sapiens
ccagtaacatgctgt

SEQ ID NO: 1739572 - DNA, 15 bp, Homo sapiens
cagtaacatgctgtt

SEQ ID NO: 1739573 - DNA, 15 bp, Homo sapiens
agtaacatgctgttt

SEQ ID NO: 1739574 - DNA, 15 bp, Homo sapiens
gtaacatgctgtttt

SEQ ID NO: 1739575 - DNA, 15 bp, Homo sapiens
taacatgctgttttg

SEQ ID NO: 1739576 - DNA, 15 bp, Homo sapiens
aacatgctgttttgg

SEQ ID NO: 1739577 - DNA, 15 bp, Homo sapiens
acatgctgttttggt

SEQ ID NO: 1739578 - DNA, 15 bp, Homo sapiens
catgctgttttggtt

SEQ ID NO: 1739579 - DNA, 15 bp, Homo sapiens
atgctgttttggtta

SEQ ID NO: 1739580 - DNA, 15 bp, Homo sapiens
tgctgttttggttac

SEQ ID NO: 1739581 - DNA, 15 bp, Homo sapiens
gctgttttggttact

SEQ ID NO: 1739582 - DNA, 15 bp, Homo sapiens
ctgttttggttactg

SEQ ID NO: 1739583 - DNA, 15 bp, Homo sapiens
tgttttggttactgt

SEQ ID NO: 1739584 - DNA, 15 bp, Homo sapiens
gttttggttactgta

SEQ ID NO: 1739585 - DNA, 15 bp, Homo sapiens
ttttggttactgtag

SEQ ID NO: 1739586 - DNA, 15 bp, Homo sapiens
tttggttactgtagc

SEQ ID NO: 1739587 - DNA, 15 bp, Homo sapiens
ttggttactgtagcc

SEQ ID NO: 1739588 - DNA, 15 bp, Homo sapiens
tggttactgtagccc

SEQ ID NO: 1739589 - DNA, 15 bp, Homo sapiens
ggttactgtagccct

SEQ ID NO: 1739590 - DNA, 15 bp, Homo sapiens
gttactgtagccctg

SEQ ID NO: 1739591 - DNA, 15 bp, Homo sapiens
ttactgtagccctgt

SEQ ID NO: 1739592 - DNA, 15 bp, Homo sapiens
tactgtagccctgta

SEQ ID NO: 1739593 - DNA, 15 bp, Homo sapiens
actgtagccctgtag

SEQ ID NO: 1739594 - DNA, 15 bp, Homo sapiens
ctgtagccctgtagt

SEQ ID NO: 1739595 - DNA, 15 bp, Homo sapiens
tgtagccctgtagta

SEQ ID NO: 1739596 - DNA, 15 bp, Homo sapiens
gtagccctgtagtat

SEQ ID NO: 1739597 - DNA, 15 bp, Homo sapiens
tagccctgtagtata

SEQ ID NO: 1739598 - DNA, 15 bp, Homo sapiens
agccctgtagtatag

SEQ ID NO: 1739599 - DNA, 15 bp, Homo sapiens
gccctgtagtatagt

SEQ ID NO: 1739600 - DNA, 15 bp, Homo sapiens
ccctgtagtatagtc

SEQ ID NO: 1739601 - DNA, 15 bp, Homo sapiens
cctgtagtatagtct

SEQ ID NO: 1739602 - DNA, 15 bp, Homo sapiens
ctgtagtatagtctg

SEQ ID NO: 1739603 - DNA, 15 bp, Homo sapiens
tgtagtatagtctga

SEQ ID NO: 1739604 - DNA, 15 bp, Homo sapiens
gtagtatagtctgaa

SEQ ID NO: 1739605 - DNA, 15 bp, Homo sapiens
tagtatagtctgaag

SEQ ID NO: 1739606 - DNA, 15 bp, Homo sapiens
agtatagtctgaagt

SEQ ID NO: 1739607 - DNA, 15 bp, Homo sapiens
gtatagtctgaagtt

SEQ ID NO: 1739608 - DNA, 15 bp, Homo sapiens
tatagtctgaagttg

SEQ ID NO: 1739609 - DNA, 15 bp, Homo sapiens
atagtctgaagttgg

SEQ ID NO: 1739610 - DNA, 15 bp, Homo sapiens
tagtctgaagttgga

SEQ ID NO: 1739611 - DNA, 15 bp, Homo sapiens
agtctgaagttggat

SEQ ID NO: 1739612 - DNA, 15 bp, Homo sapiens
gtctgaagttggata

SEQ ID NO: 1739613 - DNA, 15 bp, Homo sapiens
tctgaagttggataa

SEQ ID NO: 1739614 - DNA, 15 bp, Homo sapiens
ctgaagttggataat

SEQ ID NO: 1739615 - DNA, 15 bp, Homo sapiens
tgaagttggataatg

SEQ ID NO: 1739616 - DNA, 15 bp, Homo sapiens
gaagttggataatgt

SEQ ID NO: 1739617 - DNA, 15 bp, Homo sapiens
aagttggataatgtg

SEQ ID NO: 1739618 - DNA, 15 bp, Homo sapiens
agttggataatgtga

SEQ ID NO: 1739619 - DNA, 15 bp, Homo sapiens
gttggataatgtgat

SEQ ID NO: 1739620 - DNA, 15 bp, Homo sapiens
ttggataatgtgatg

SEQ ID NO: 1739621 - DNA, 15 bp, Homo sapiens
tggataatgtgatgc

SEQ ID NO: 1739622 - DNA, 15 bp, Homo sapiens
ggataatgtgatgcc

SEQ ID NO: 1739623 - DNA, 15 bp, Homo sapiens
gataatgtgatgcct

SEQ ID NO: 1739624 - DNA, 15 bp, Homo sapiens
ataatgtgatgcctc

SEQ ID NO: 1739625 - DNA, 15 bp, Homo sapiens
taatgtgatgcctcc

SEQ ID NO: 1739626 - DNA, 15 bp, Homo sapiens
aatgtgatgcctcca

SEQ ID NO: 1739627 - DNA, 15 bp, Homo sapiens
atgtgatgcctccag

SEQ ID NO: 1739628 - DNA, 15 bp, Homo sapiens
tgtgatgcctccagc

SEQ ID NO: 1739629 - DNA, 15 bp, Homo sapiens
gtgatgcctccagct

SEQ ID NO: 1739630 - DNA, 15 bp, Homo sapiens
tgatgcctccagctt

SEQ ID NO: 1739631 - DNA, 15 bp, Homo sapiens
gatgcctccagcttt

SEQ ID NO: 1739632 - DNA, 15 bp, Homo sapiens
atgcctccagctttg

SEQ ID NO: 1739633 - DNA, 15 bp, Homo sapiens
tgcctccagctttgt

SEQ ID NO: 1739634 - DNA, 15 bp, Homo sapiens
gcctccagctttgtt

SEQ ID NO: 1739635 - DNA, 15 bp, Homo sapiens
cctccagctttgttc

SEQ ID NO: 1739636 - DNA, 15 bp, Homo sapiens
ctccagctttgttct

SEQ ID NO: 1739637 - DNA, 15 bp, Homo sapiens
tccagctttgttctt

SEQ ID NO: 1739638 - DNA, 15 bp, Homo sapiens
ccagctttgttcttt

SEQ ID NO: 1739639 - DNA, 15 bp, Homo sapiens
cagctttgttctttt

SEQ ID NO: 1739640 - DNA, 15 bp, Homo sapiens
agctttgttcttttt

SEQ ID NO: 1739641 - DNA, 15 bp, Homo sapiens
gctttgttctttttg

SEQ ID NO: 1739642 - DNA, 15 bp, Homo sapiens
ctttgttctttttgc

SEQ ID NO: 1739643 - DNA, 15 bp, Homo sapiens
tttgttctttttgct

SEQ ID NO: 1739644 - DNA, 15 bp, Homo sapiens
ttgttctttttgctt

SEQ ID NO: 1739645 - DNA, 15 bp, Homo sapiens
tgttctttttgctta

SEQ ID NO: 1739646 - DNA, 15 bp, Homo sapiens
gttctttttgcttag

SEQ ID NO: 1739647 - DNA, 15 bp, Homo sapiens
ttctttttgcttagg

SEQ ID NO: 1739648 - DNA, 15 bp, Homo sapiens
tctttttgcttagga

SEQ ID NO: 1739649 - DNA, 15 bp, Homo sapiens
ctttttgcttaggat

SEQ ID NO: 1739650 - DNA, 15 bp, Homo sapiens
tttttgcttaggatt

SEQ ID NO: 1739651 - DNA, 15 bp, Homo sapiens
ttttgcttaggattg

SEQ ID NO: 1739652 - DNA, 15 bp, Homo sapiens
tttgcttaggattgc

SEQ ID NO: 1739653 - DNA, 15 bp, Homo sapiens
ttgcttaggattgcc

SEQ ID NO: 1739654 - DNA, 15 bp, Homo sapiens
tgcttaggattgcct

SEQ ID NO: 1739655 - DNA, 15 bp, Homo sapiens
gcttaggattgcctt

SEQ ID NO: 1739656 - DNA, 15 bp, Homo sapiens
cttaggattgccttg

SEQ ID NO: 1739657 - DNA, 15 bp, Homo sapiens
ttaggattgccttgg

SEQ ID NO: 1739658 - DNA, 15 bp, Homo sapiens
taggattgccttggc

SEQ ID NO: 1739659 - DNA, 15 bp, Homo sapiens
aggattgccttggct

SEQ ID NO: 1739660 - DNA, 15 bp, Homo sapiens
ggattgccttggcta

SEQ ID NO: 1739661 - DNA, 15 bp, Homo sapiens
gattgccttggctat

SEQ ID NO: 1739662 - DNA, 15 bp, Homo sapiens
attgccttggctatt

SEQ ID NO: 1739663 - DNA, 15 bp, Homo sapiens
ttgccttggctattc

SEQ ID NO: 1739664 - DNA, 15 bp, Homo sapiens
tgccttggctattca

SEQ ID NO: 1739665 - DNA, 15 bp, Homo sapiens
gccttggctattcag

SEQ ID NO: 1739666 - DNA, 15 bp, Homo sapiens
ccttggctattcagg

SEQ ID NO: 1739667 - DNA, 15 bp, Homo sapiens
cttggctattcaggc

SEQ ID NO: 1739668 - DNA, 15 bp, Homo sapiens
ttggctattcaggct

SEQ ID NO: 1739669 - DNA, 15 bp, Homo sapiens
tggctattcaggctc

SEQ ID NO: 1739670 - DNA, 15 bp, Homo sapiens
ggctattcaggctct

SEQ ID NO: 1739671 - DNA, 15 bp, Homo sapiens
gctattcaggctctt

SEQ ID NO: 1739672 - DNA, 15 bp, Homo sapiens
ctattcaggctcttt

SEQ ID NO: 1739673 - DNA, 15 bp, Homo sapiens
tattcaggctctttt

SEQ ID NO: 1739674 - DNA, 15 bp, Homo sapiens
attcaggctcttttt

SEQ ID NO: 1739675 - DNA, 15 bp, Homo sapiens
ttcaggctctttttt

SEQ ID NO: 1739676 - DNA, 15 bp, Homo sapiens
tcaggctcttttttg

SEQ ID NO: 1739677 - DNA, 15 bp, Homo sapiens
caggctcttttttgg

SEQ ID NO: 1739678 - DNA, 15 bp, Homo sapiens
aggctcttttttggt

SEQ ID NO: 1739679 - DNA, 15 bp, Homo sapiens
ggctcttttttggtt

SEQ ID NO: 1739680 - DNA, 15 bp, Homo sapiens
gctcttttttggttc

SEQ ID NO: 1739681 - DNA, 15 bp, Homo sapiens
ctcttttttggttcc

SEQ ID NO: 1739682 - DNA, 15 bp, Homo sapiens
tcttttttggttcca

SEQ ID NO: 1739683 - DNA, 15 bp, Homo sapiens
cttttttggttccag

SEQ ID NO: 1739684 - DNA, 15 bp, Homo sapiens
ttttttggttccagt

SEQ ID NO: 1739685 - DNA, 15 bp, Homo sapiens
tttttggttccagtt

SEQ ID NO: 1739686 - DNA, 15 bp, Homo sapiens
ttttggttccagttg

SEQ ID NO: 1739687 - DNA, 15 bp, Homo sapiens
tttggttccagttga

SEQ ID NO: 1739688 - DNA, 15 bp, Homo sapiens
ttggttccagttgaa

SEQ ID NO: 1739689 - DNA, 15 bp, Homo sapiens
tggttccagttgaat

SEQ ID NO: 1739690 - DNA, 15 bp, Homo sapiens
ggttccagttgaatt

SEQ ID NO: 1739691 - DNA, 15 bp, Homo sapiens
gttccagttgaattt

SEQ ID NO: 1739692 - DNA, 15 bp, Homo sapiens
ttccagttgaatttt

SEQ ID NO: 1739693 - DNA, 15 bp, Homo sapiens
tccagttgaatttta

SEQ ID NO: 1739694 - DNA, 15 bp, Homo sapiens
ccagttgaattttaa

SEQ ID NO: 1739695 - DNA, 15 bp, Homo sapiens
cagttgaattttaaa

SEQ ID NO: 1739696 - DNA, 15 bp, Homo sapiens
agttgaattttaaaa

SEQ ID NO: 1739697 - DNA, 15 bp, Homo sapiens
gttgaattttaaaat

SEQ ID NO: 1739698 - DNA, 15 bp, Homo sapiens
ttgaattttaaaata

SEQ ID NO: 1739699 - DNA, 15 bp, Homo sapiens
gaattttaaaatagt

SEQ ID NO: 1739700 - DNA, 15 bp, Homo sapiens
aattttaaaatagtt

SEQ ID NO: 1739701 - DNA, 15 bp, Homo sapiens
attttaaaatagttt

SEQ ID NO: 1739702 - DNA, 15 bp, Homo sapiens
ttttaaaatagtttt

SEQ ID NO: 1739703 - DNA, 15 bp, Homo sapiens
tttaaaatagttttt

SEQ ID NO: 1739704 - DNA, 15 bp, Homo sapiens
ttaaaatagtttttt

SEQ ID NO: 1739705 - DNA, 15 bp, Homo sapiens
taaaatagttttttt

SEQ ID NO: 1739706 - DNA, 15 bp, Homo sapiens
aaaatagtttttttt

SEQ ID NO: 1739707 - DNA, 15 bp, Homo sapiens
aaatagttttttttt

SEQ ID NO: 1739708 - DNA, 15 bp, Homo sapiens
tttttttttttttat

SEQ ID NO: 1739709 - DNA, 15 bp, Homo sapiens
ttttttttttttatt

SEQ ID NO: 1739710 - DNA, 15 bp, Homo sapiens
ttttttttttatttc

SEQ ID NO: 1739711 - DNA, 15 bp, Homo sapiens
tttttttttatttct

SEQ ID NO: 1739712 - DNA, 15 bp, Homo sapiens
ttttttttatttctg

SEQ ID NO: 1739713 - DNA, 15 bp, Homo sapiens
tttttttatttctgt

SEQ ID NO: 1739714 - DNA, 15 bp, Homo sapiens
ttttttatttctgtg

SEQ ID NO: 1739715 - DNA, 15 bp, Homo sapiens
tttttatttctgtga

SEQ ID NO: 1739716 - DNA, 15 bp, Homo sapiens
ttttatttctgtgaa

SEQ ID NO: 1739717 - DNA, 15 bp, Homo sapiens
tttatttctgtgaag

SEQ ID NO: 1739718 - DNA, 15 bp, Homo sapiens
ttatttctgtgaaga

SEQ ID NO: 1739719 - DNA, 15 bp, Homo sapiens
tatttctgtgaagaa

SEQ ID NO: 1739720 - DNA, 15 bp, Homo sapiens
atttctgtgaagaat

SEQ ID NO: 1739721 - DNA, 15 bp, Homo sapiens
tttctgtgaagaatg

SEQ ID NO: 1739722 - DNA, 15 bp, Homo sapiens
ttctgtgaagaatgt

SEQ ID NO: 1739723 - DNA, 15 bp, Homo sapiens
tctgtgaagaatgtc

SEQ ID NO: 1739724 - DNA, 15 bp, Homo sapiens
ctgtgaagaatgtca

SEQ ID NO: 1739725 - DNA, 15 bp, Homo sapiens
tgtgaagaatgtcat

SEQ ID NO: 1739726 - DNA, 15 bp, Homo sapiens
gtgaagaatgtcatt

SEQ ID NO: 1739727 - DNA, 15 bp, Homo sapiens
tgaagaatgtcattg

SEQ ID NO: 1739728 - DNA, 15 bp, Homo sapiens
gaagaatgtcattgg

SEQ ID NO: 1739729 - DNA, 15 bp, Homo sapiens
aagaatgtcattggt

SEQ ID NO: 1739730 - DNA, 15 bp, Homo sapiens
agaatgtcattggta

SEQ ID NO: 1739731 - DNA, 15 bp, Homo sapiens
gaatgtcattggtag

SEQ ID NO: 1739732 - DNA, 15 bp, Homo sapiens
atgtcattggtagtt

SEQ ID NO: 1739733 - DNA, 15 bp, Homo sapiens
tgtcattggtagttt

SEQ ID NO: 1739734 - DNA, 15 bp, Homo sapiens
gtcattggtagtttg

SEQ ID NO: 1739735 - DNA, 15 bp, Homo sapiens
tcattggtagtttga

SEQ ID NO: 1739736 - DNA, 15 bp, Homo sapiens
cattggtagtttgat

SEQ ID NO: 1739737 - DNA, 15 bp, Homo sapiens
attggtagtttgata

SEQ ID NO: 1739738 - DNA, 15 bp, Homo sapiens
ttggtagtttgatag

SEQ ID NO: 1739739 - DNA, 15 bp, Homo sapiens
tggtagtttgatagg

SEQ ID NO: 1739740 - DNA, 15 bp, Homo sapiens
ggtagtttgatagga

SEQ ID NO: 1739741 - DNA, 15 bp, Homo sapiens
gtagtttgataggaa

SEQ ID NO: 1739742 - DNA, 15 bp, Homo sapiens
tagtttgataggaat

SEQ ID NO: 1739743 - DNA, 15 bp, Homo sapiens
agtttgataggaata

SEQ ID NO: 1739744 - DNA, 15 bp, Homo sapiens
gtttgataggaatag

SEQ ID NO: 1739745 - DNA, 15 bp, Homo sapiens
tttgataggaatagc

SEQ ID NO: 1739746 - DNA, 15 bp, Homo sapiens
ttgataggaatagcc

SEQ ID NO: 1739747 - DNA, 15 bp, Homo sapiens
tgataggaatagcct

SEQ ID NO: 1739748 - DNA, 15 bp, Homo sapiens
gataggaatagcctt

SEQ ID NO: 1739749 - DNA, 15 bp, Homo sapiens
ataggaatagccttg

SEQ ID NO: 1739750 - DNA, 15 bp, Homo sapiens
taggaatagccttga

SEQ ID NO: 1739751 - DNA, 15 bp, Homo sapiens
aggaatagccttgaa

SEQ ID NO: 1739752 - DNA, 15 bp, Homo sapiens
ggaatagccttgaat

SEQ ID NO: 1739753 - DNA, 15 bp, Homo sapiens
gaatagccttgaatc

SEQ ID NO: 1739754 - DNA, 15 bp, Homo sapiens
aatagccttgaatct

SEQ ID NO: 1739755 - DNA, 15 bp, Homo sapiens
atagccttgaatctg

SEQ ID NO: 1739756 - DNA, 15 bp, Homo sapiens
tagccttgaatctgt

SEQ ID NO: 1739757 - DNA, 15 bp, Homo sapiens
agccttgaatctgta

SEQ ID NO: 1739758 - DNA, 15 bp, Homo sapiens
gccttgaatctgtaa

SEQ ID NO: 1739759 - DNA, 15 bp, Homo sapiens
ccttgaatctgtaat

SEQ ID NO: 1739760 - DNA, 15 bp, Homo sapiens
cttgaatctgtaatt

SEQ ID NO: 1739761 - DNA, 15 bp, Homo sapiens
ttgaatctgtaattt

SEQ ID NO: 1739762 - DNA, 15 bp, Homo sapiens
tgaatctgtaatttt

SEQ ID NO: 1739763 - DNA, 15 bp, Homo sapiens
gaatctgtaattttt

SEQ ID NO: 1739764 - DNA, 15 bp, Homo sapiens
aatctgtaatttttt

SEQ ID NO: 1739765 - DNA, 15 bp, Homo sapiens
atctgtaattttttt

SEQ ID NO: 1739766 - DNA, 15 bp, Homo sapiens
tctgtaatttttttg

SEQ ID NO: 1739767 - DNA, 15 bp, Homo sapiens
ctgtaatttttttgg

SEQ ID NO: 1739768 - DNA, 15 bp, Homo sapiens
tgtaatttttttggg

SEQ ID NO: 1739769 - DNA, 15 bp, Homo sapiens
gtaatttttttgggg

SEQ ID NO: 1739770 - DNA, 15 bp, Homo sapiens
taatttttttggggc

SEQ ID NO: 1739771 - DNA, 15 bp, Homo sapiens
aatttttttggggca

SEQ ID NO: 1739772 - DNA, 15 bp, Homo sapiens
atttttttggggcag

SEQ ID NO: 1739773 - DNA, 15 bp, Homo sapiens
tttttttggggcagt

SEQ ID NO: 1739774 - DNA, 15 bp, Homo sapiens
ttttttggggcagta

SEQ ID NO: 1739775 - DNA, 15 bp, Homo sapiens
tttttggggcagtat

SEQ ID NO: 1739776 - DNA, 15 bp, Homo sapiens
ttttggggcagtatg

SEQ ID NO: 1739777 - DNA, 15 bp, Homo sapiens
tttggggcagtatgg

SEQ ID NO: 1739778 - DNA, 15 bp, Homo sapiens
ttggggcagtatggc

SEQ ID NO: 1739779 - DNA, 15 bp, Homo sapiens
tggggcagtatggcc

SEQ ID NO: 1739780 - DNA, 15 bp, Homo sapiens
ggggcagtatggcca

SEQ ID NO: 1739781 - DNA, 15 bp, Homo sapiens
gggcagtatggccat

SEQ ID NO: 1739782 - DNA, 15 bp, Homo sapiens
ggcagtatggccatt

SEQ ID NO: 1739783 - DNA, 15 bp, Homo sapiens
gcagtatggccattt

SEQ ID NO: 1739784 - DNA, 15 bp, Homo sapiens
cagtatggccatttt

SEQ ID NO: 1739785 - DNA, 15 bp, Homo sapiens
agtatggccatttta

SEQ ID NO: 1739786 - DNA, 15 bp, Homo sapiens
gtatggccattttaa

SEQ ID NO: 1739787 - DNA, 15 bp, Homo sapiens
tatggccattttaat

SEQ ID NO: 1739788 - DNA, 15 bp, Homo sapiens
atggccattttaatg

SEQ ID NO: 1739789 - DNA, 15 bp, Homo sapiens
attttaatgatattt

SEQ ID NO: 1739790 - DNA, 15 bp, Homo sapiens
ttttaatgatattta

SEQ ID NO: 1739791 - DNA, 15 bp, Homo sapiens
taatgatatttattc

SEQ ID NO: 1739792 - DNA, 15 bp, Homo sapiens
aatgatatttattct

SEQ ID NO: 1739793 - DNA, 15 bp, Homo sapiens
atgatatttattctt

SEQ ID NO: 1739794 - DNA, 15 bp, Homo sapiens
tgatatttattcttc

SEQ ID NO: 1739795 - DNA, 15 bp, Homo sapiens
gatatttattcttcc

SEQ ID NO: 1739796 - DNA, 15 bp, Homo sapiens
atatttattcttcct

SEQ ID NO: 1739797 - DNA, 15 bp, Homo sapiens
tatttattcttccta

SEQ ID NO: 1739798 - DNA, 15 bp, Homo sapiens
atttattcttcctat

SEQ ID NO: 1739799 - DNA, 15 bp, Homo sapiens
tttattcttcctatc

SEQ ID NO: 1739800 - DNA, 15 bp, Homo sapiens
ttattcttcctatcc

SEQ ID NO: 1739801 - DNA, 15 bp, Homo sapiens
tattcttcctatcca

SEQ ID NO: 1739802 - DNA, 15 bp, Homo sapiens
attcttcctatccat

SEQ ID NO: 1739803 - DNA, 15 bp, Homo sapiens
ttcttcctatccatg

SEQ ID NO: 1739804 - DNA, 15 bp, Homo sapiens
tcttcctatccatga

SEQ ID NO: 1739805 - DNA, 15 bp, Homo sapiens
cttcctatccatgag

SEQ ID NO: 1739806 - DNA, 15 bp, Homo sapiens
ttcctatccatgagc

SEQ ID NO: 1739807 - DNA, 15 bp, Homo sapiens
tcctatccatgagca

SEQ ID NO: 1739808 - DNA, 15 bp, Homo sapiens
cctatccatgagcat

SEQ ID NO: 1739809 - DNA, 15 bp, Homo sapiens
ctatccatgagcatg

SEQ ID NO: 1739810 - DNA, 15 bp, Homo sapiens
atccatgagcatggg

SEQ ID NO: 1739811 - DNA, 15 bp, Homo sapiens
tccatgagcatggga

SEQ ID NO: 1739812 - DNA, 15 bp, Homo sapiens
ccatgagcatgggat

SEQ ID NO: 1739813 - DNA, 15 bp, Homo sapiens
catgagcatgggatg

SEQ ID NO: 1739814 - DNA, 15 bp, Homo sapiens
atgagcatgggatgt

SEQ ID NO: 1739815 - DNA, 15 bp, Homo sapiens
tgagcatgggatgtt

SEQ ID NO: 1739816 - DNA, 15 bp, Homo sapiens
gagcatgggatgttt

SEQ ID NO: 1739817 - DNA, 15 bp, Homo sapiens
agcatgggatgtttt

SEQ ID NO: 1739818 - DNA, 15 bp, Homo sapiens
gcatgggatgttttt

SEQ ID NO: 1739819 - DNA, 15 bp, Homo sapiens
catgggatgtttttc

SEQ ID NO: 1739820 - DNA, 15 bp, Homo sapiens
atgggatgtttttcc

SEQ ID NO: 1739821 - DNA, 15 bp, Homo sapiens
tgggatgtttttcca

SEQ ID NO: 1739822 - DNA, 15 bp, Homo sapiens
gggatgtttttccat

SEQ ID NO: 1739823 - DNA, 15 bp, Homo sapiens
ggatgtttttccatg

SEQ ID NO: 1739824 - DNA, 15 bp, Homo sapiens
gatgtttttccatgt

SEQ ID NO: 1739825 - DNA, 15 bp, Homo sapiens
atgtttttccatgtg

SEQ ID NO: 1739826 - DNA, 15 bp, Homo sapiens
tgtttttccatgtgt

SEQ ID NO: 1739827 - DNA, 15 bp, Homo sapiens
gtttttccatgtgtt

SEQ ID NO: 1739828 - DNA, 15 bp, Homo sapiens
tttttccatgtgttt

SEQ ID NO: 1739829 - DNA, 15 bp, Homo sapiens
ttttccatgtgtttg

SEQ ID NO: 1739830 - DNA, 15 bp, Homo sapiens
tttccatgtgtttgt

SEQ ID NO: 1739831 - DNA, 15 bp, Homo sapiens
ttccatgtgtttgtg

SEQ ID NO: 1739832 - DNA, 15 bp, Homo sapiens
tccatgtgtttgtgt

SEQ ID NO: 1739833 - DNA, 15 bp, Homo sapiens
ccatgtgtttgtgtc

SEQ ID NO: 1739834 - DNA, 15 bp, Homo sapiens
catgtgtttgtgtca

SEQ ID NO: 1739835 - DNA, 15 bp, Homo sapiens
atgtgtttgtgtcat

SEQ ID NO: 1739836 - DNA, 15 bp, Homo sapiens
tgtgtttgtgtcatc

SEQ ID NO: 1739837 - DNA, 15 bp, Homo sapiens
gtgtttgtgtcatct

SEQ ID NO: 1739838 - DNA, 15 bp, Homo sapiens
tgtttgtgtcatctc

SEQ ID NO: 1739839 - DNA, 15 bp, Homo sapiens
gtttgtgtcatctct

SEQ ID NO: 1739840 - DNA, 15 bp, Homo sapiens
tttgtgtcatctctg

SEQ ID NO: 1739841 - DNA, 15 bp, Homo sapiens
ttgtgtcatctctga

SEQ ID NO: 1739842 - DNA, 15 bp, Homo sapiens
tgtgtcatctctgat

SEQ ID NO: 1739843 - DNA, 15 bp, Homo sapiens
tgtcatctctgattg

SEQ ID NO: 1739844 - DNA, 15 bp, Homo sapiens
gtcatctctgattgc

SEQ ID NO: 1739845 - DNA, 15 bp, Homo sapiens
tcatctctgattgct

SEQ ID NO: 1739846 - DNA, 15 bp, Homo sapiens
catctctgattgctt

SEQ ID NO: 1739847 - DNA, 15 bp, Homo sapiens
atctctgattgcttt

SEQ ID NO: 1739848 - DNA, 15 bp, Homo sapiens
tctctgattgctttg

SEQ ID NO: 1739849 - DNA, 15 bp, Homo sapiens
ctctgattgctttga

SEQ ID NO: 1739850 - DNA, 15 bp, Homo sapiens
tctgattgctttgag

SEQ ID NO: 1739851 - DNA, 15 bp, Homo sapiens
ctgattgctttgagc

SEQ ID NO: 1739852 - DNA, 15 bp, Homo sapiens
tgattgctttgagca

SEQ ID NO: 1739853 - DNA, 15 bp, Homo sapiens
gattgctttgagcag

SEQ ID NO: 1739854 - DNA, 15 bp, Homo sapiens
attgctttgagcagt

SEQ ID NO: 1739855 - DNA, 15 bp, Homo sapiens
ttgctttgagcagtg

SEQ ID NO: 1739856 - DNA, 15 bp, Homo sapiens
tgctttgagcagtgt

SEQ ID NO: 1739857 - DNA, 15 bp, Homo sapiens
gctttgagcagtgtt

SEQ ID NO: 1739858 - DNA, 15 bp, Homo sapiens
ctttgagcagtgttt

SEQ ID NO: 1739859 - DNA, 15 bp, Homo sapiens
tttgagcagtgtttt

SEQ ID NO: 1739860 - DNA, 15 bp, Homo sapiens
ttgagcagtgttttg

SEQ ID NO: 1739861 - DNA, 15 bp, Homo sapiens
tgagcagtgttttga

SEQ ID NO: 1739862 - DNA, 15 bp, Homo sapiens
gagcagtgttttgaa

SEQ ID NO: 1739863 - DNA, 15 bp, Homo sapiens
agcagtgttttgaaa

SEQ ID NO: 1739864 - DNA, 15 bp, Homo sapiens
gcagtgttttgaaat

SEQ ID NO: 1739865 - DNA, 15 bp, Homo sapiens
cagtgttttgaaatt

SEQ ID NO: 1739866 - DNA, 15 bp, Homo sapiens
agtgttttgaaattc

SEQ ID NO: 1739867 - DNA, 15 bp, Homo sapiens
gtgttttgaaattct

SEQ ID NO: 1739868 - DNA, 15 bp, Homo sapiens
tgttttgaaattctt

SEQ ID NO: 1739869 - DNA, 15 bp, Homo sapiens
gttttgaaattcttg

SEQ ID NO: 1739870 - DNA, 15 bp, Homo sapiens
ttttgaaattcttgt

SEQ ID NO: 1739871 - DNA, 15 bp, Homo sapiens
tttgaaattcttgtt

SEQ ID NO: 1739872 - DNA, 15 bp, Homo sapiens
ttgaaattcttgttg

SEQ ID NO: 1739873 - DNA, 15 bp, Homo sapiens
tgaaattcttgttgt

SEQ ID NO: 1739874 - DNA, 15 bp, Homo sapiens
gaaattcttgttgta

SEQ ID NO: 1739875 - DNA, 15 bp, Homo sapiens
aaattcttgttgtag

SEQ ID NO: 1739876 - DNA, 15 bp, Homo sapiens
aattcttgttgtaga

SEQ ID NO: 1739877 - DNA, 15 bp, Homo sapiens
attcttgttgtagag

SEQ ID NO: 1739878 - DNA, 15 bp, Homo sapiens
ttcttgttgtagaga

SEQ ID NO: 1739879 - DNA, 15 bp, Homo sapiens
tcttgttgtagagag

SEQ ID NO: 1739880 - DNA, 15 bp, Homo sapiens
cttgttgtagagagc

SEQ ID NO: 1739881 - DNA, 15 bp, Homo sapiens
ttgttgtagagagct

SEQ ID NO: 1739882 - DNA, 15 bp, Homo sapiens
tgttgtagagagctt

SEQ ID NO: 1739883 - DNA, 15 bp, Homo sapiens
gttgtagagagcttt

SEQ ID NO: 1739884 - DNA, 15 bp, Homo sapiens
gctttcacctccctg

SEQ ID NO: 1739885 - DNA, 15 bp, Homo sapiens
ctttcacctccctgg

SEQ ID NO: 1739886 - DNA, 15 bp, Homo sapiens
tttcacctccctggt

SEQ ID NO: 1739887 - DNA, 15 bp, Homo sapiens
ttcacctccctggtt

SEQ ID NO: 1739888 - DNA, 15 bp, Homo sapiens
tcacctccctggtta

SEQ ID NO: 1739889 - DNA, 15 bp, Homo sapiens
cacctccctggttag

SEQ ID NO: 1739890 - DNA, 15 bp, Homo sapiens
acctccctggttagt

SEQ ID NO: 1739891 - DNA, 15 bp, Homo sapiens
cctccctggttagtt

SEQ ID NO: 1739892 - DNA, 15 bp, Homo sapiens
ctccctggttagttg

SEQ ID NO: 1739893 - DNA, 15 bp, Homo sapiens
tccctggttagttgt

SEQ ID NO: 1739894 - DNA, 15 bp, Homo sapiens
ccctggttagttgta

SEQ ID NO: 1739895 - DNA, 15 bp, Homo sapiens
cctggttagttgtat

SEQ ID NO: 1739896 - DNA, 15 bp, Homo sapiens
ctggttagttgtatt

SEQ ID NO: 1739897 - DNA, 15 bp, Homo sapiens
tggttagttgtattc

SEQ ID NO: 1739898 - DNA, 15 bp, Homo sapiens
ggttagttgtattcc

SEQ ID NO: 1739899 - DNA, 15 bp, Homo sapiens
gttagttgtattcct

SEQ ID NO: 1739900 - DNA, 15 bp, Homo sapiens
ttagttgtattccta

SEQ ID NO: 1739901 - DNA, 15 bp, Homo sapiens
tagttgtattcctat

SEQ ID NO: 1739902 - DNA, 15 bp, Homo sapiens
agttgtattcctatg

SEQ ID NO: 1739903 - DNA, 15 bp, Homo sapiens
gttgtattcctatgt

SEQ ID NO: 1739904 - DNA, 15 bp, Homo sapiens
ttgtattcctatgta

SEQ ID NO: 1739905 - DNA, 15 bp, Homo sapiens
tgtattcctatgtat

SEQ ID NO: 1739906 - DNA, 15 bp, Homo sapiens
gtattcctatgtatt

SEQ ID NO: 1739907 - DNA, 15 bp, Homo sapiens
tattcctatgtattc

SEQ ID NO: 1739908 - DNA, 15 bp, Homo sapiens
attcctatgtattct

SEQ ID NO: 1739909 - DNA, 15 bp, Homo sapiens
ttcctatgtattctt

SEQ ID NO: 1739910 - DNA, 15 bp, Homo sapiens
tcctatgtattcttt

SEQ ID NO: 1739911 - DNA, 15 bp, Homo sapiens
cctatgtattctttt

SEQ ID NO: 1739912 - DNA, 15 bp, Homo sapiens
ctatgtattcttttt

SEQ ID NO: 1739913 - DNA, 15 bp, Homo sapiens
tatgtattctttttg

SEQ ID NO: 1739914 - DNA, 15 bp, Homo sapiens
atgtattctttttgt

SEQ ID NO: 1739915 - DNA, 15 bp, Homo sapiens
tgtattctttttgtg

SEQ ID NO: 1739916 - DNA, 15 bp, Homo sapiens
gtattctttttgtgg

SEQ ID NO: 1739917 - DNA, 15 bp, Homo sapiens
tattctttttgtggc

SEQ ID NO: 1739918 - DNA, 15 bp, Homo sapiens
attctttttgtggca

SEQ ID NO: 1739919 - DNA, 15 bp, Homo sapiens
ttctttttgtggcaa

SEQ ID NO: 1739920 - DNA, 15 bp, Homo sapiens
tctttttgtggcaat

SEQ ID NO: 1739921 - DNA, 15 bp, Homo sapiens
ctttttgtggcaatt

SEQ ID NO: 1739922 - DNA, 15 bp, Homo sapiens
tttttgtggcaattt

SEQ ID NO: 1739923 - DNA, 15 bp, Homo sapiens
ttttgtggcaatttt

SEQ ID NO: 1739924 - DNA, 15 bp, Homo sapiens
tttgtggcaattttt

SEQ ID NO: 1739925 - DNA, 15 bp, Homo sapiens
ttgtggcaattttta

SEQ ID NO: 1739926 - DNA, 15 bp, Homo sapiens
tgtggcaatttttaa

SEQ ID NO: 1739927 - DNA, 15 bp, Homo sapiens
gtggcaatttttaat

SEQ ID NO: 1739928 - DNA, 15 bp, Homo sapiens
tggcaatttttaatg

SEQ ID NO: 1739929 - DNA, 15 bp, Homo sapiens
ggcaatttttaatgg

SEQ ID NO: 1739930 - DNA, 15 bp, Homo sapiens
gcaatttttaatggg

SEQ ID NO: 1739931 - DNA, 15 bp, Homo sapiens
caatttttaatggga

SEQ ID NO: 1739932 - DNA, 15 bp, Homo sapiens
aatttttaatgggat

SEQ ID NO: 1739933 - DNA, 15 bp, Homo sapiens
atttttaatgggatt

SEQ ID NO: 1739934 - DNA, 15 bp, Homo sapiens
tttttaatgggattg

SEQ ID NO: 1739935 - DNA, 15 bp, Homo sapiens
ttttaatgggattgc

SEQ ID NO: 1739936 - DNA, 15 bp, Homo sapiens
tttaatgggattgcc

SEQ ID NO: 1739937 - DNA, 15 bp, Homo sapiens
ttaatgggattgcct

SEQ ID NO: 1739938 - DNA, 15 bp, Homo sapiens
taatgggattgcctt

SEQ ID NO: 1739939 - DNA, 15 bp, Homo sapiens
aatgggattgccttt

SEQ ID NO: 1739940 - DNA, 15 bp, Homo sapiens
atgggattgcctttc

SEQ ID NO: 1739941 - DNA, 15 bp, Homo sapiens
tgggattgcctttct

SEQ ID NO: 1739942 - DNA, 15 bp, Homo sapiens
gggattgcctttctg

SEQ ID NO: 1739943 - DNA, 15 bp, Homo sapiens
ggattgcctttctga

SEQ ID NO: 1739944 - DNA, 15 bp, Homo sapiens
gattgcctttctgat

SEQ ID NO: 1739945 - DNA, 15 bp, Homo sapiens
attgcctttctgatt

SEQ ID NO: 1739946 - DNA, 15 bp, Homo sapiens
ttgcctttctgattt

SEQ ID NO: 1739947 - DNA, 15 bp, Homo sapiens
tgcctttctgatttg

SEQ ID NO: 1739948 - DNA, 15 bp, Homo sapiens
gcctttctgatttgg

SEQ ID NO: 1739949 - DNA, 15 bp, Homo sapiens
cctttctgatttggc

SEQ ID NO: 1739950 - DNA, 15 bp, Homo sapiens
ctttctgatttggct

SEQ ID NO: 1739951 - DNA, 15 bp, Homo sapiens
tttctgatttggctc

SEQ ID NO: 1739952 - DNA, 15 bp, Homo sapiens
ttctgatttggctct

SEQ ID NO: 1739953 - DNA, 15 bp, Homo sapiens
tctgatttggctctc

SEQ ID NO: 1739954 - DNA, 15 bp, Homo sapiens
ctgatttggctctca

SEQ ID NO: 1739955 - DNA, 15 bp, Homo sapiens
ggctctcagcttggc

SEQ ID NO: 1739956 - DNA, 15 bp, Homo sapiens
gctctcagcttggct

SEQ ID NO: 1739957 - DNA, 15 bp, Homo sapiens
ctctcagcttggctc

SEQ ID NO: 1739958 - DNA, 15 bp, Homo sapiens
tctcagcttggctct

SEQ ID NO: 1739959 - DNA, 15 bp, Homo sapiens
ctcagcttggctctt

SEQ ID NO: 1739960 - DNA, 15 bp, Homo sapiens
tcagcttggctcttg

SEQ ID NO: 1739961 - DNA, 15 bp, Homo sapiens
cagcttggctcttgt

SEQ ID NO: 1739962 - DNA, 15 bp, Homo sapiens
agcttggctcttgtt

SEQ ID NO: 1739963 - DNA, 15 bp, Homo sapiens
gcttggctcttgttg

SEQ ID NO: 1739964 - DNA, 15 bp, Homo sapiens
cttggctcttgttgg

SEQ ID NO: 1739965 - DNA, 15 bp, Homo sapiens
ttggctcttgttggt

SEQ ID NO: 1739966 - DNA, 15 bp, Homo sapiens
tggctcttgttggtg

SEQ ID NO: 1739967 - DNA, 15 bp, Homo sapiens
ggctcttgttggtgt

SEQ ID NO: 1739968 - DNA, 15 bp, Homo sapiens
gctcttgttggtgtg

SEQ ID NO: 1739969 - DNA, 15 bp, Homo sapiens
ctcttgttggtgtgt

SEQ ID NO: 1739970 - DNA, 15 bp, Homo sapiens
tcttgttggtgtgta

SEQ ID NO: 1739971 - DNA, 15 bp, Homo sapiens
cttgttggtgtgtag

SEQ ID NO: 1739972 - DNA, 15 bp, Homo sapiens
ttgttggtgtgtaga

SEQ ID NO: 1739973 - DNA, 15 bp, Homo sapiens
tgttggtgtgtagaa

SEQ ID NO: 1739974 - DNA, 15 bp, Homo sapiens
gttggtgtgtagaac

SEQ ID NO: 1739975 - DNA, 15 bp, Homo sapiens
ttggtgtgtagaact

SEQ ID NO: 1739976 - DNA, 15 bp, Homo sapiens
tggtgtgtagaacta

SEQ ID NO: 1739977 - DNA, 15 bp, Homo sapiens
ggtgtgtagaactac

SEQ ID NO: 1739978 - DNA, 15 bp, Homo sapiens
gtgtgtagaactact

SEQ ID NO: 1739979 - DNA, 15 bp, Homo sapiens
tgtgtagaactacta

SEQ ID NO: 1739980 - DNA, 15 bp, Homo sapiens
gtgtagaactactag

SEQ ID NO: 1739981 - DNA, 15 bp, Homo sapiens
tgtagaactactagt

SEQ ID NO: 1739982 - DNA, 15 bp, Homo sapiens
gtagaactactagtg

SEQ ID NO: 1739983 - DNA, 15 bp, Homo sapiens
tagaactactagtga

SEQ ID NO: 1739984 - DNA, 15 bp, Homo sapiens
agaactactagtgat

SEQ ID NO: 1739985 - DNA, 15 bp, Homo sapiens
gaactactagtgatt

SEQ ID NO: 1739986 - DNA, 15 bp, Homo sapiens
aactactagtgattt

SEQ ID NO: 1739987 - DNA, 15 bp, Homo sapiens
actactagtgatttt

SEQ ID NO: 1739988 - DNA, 15 bp, Homo sapiens
ctactagtgattttt

SEQ ID NO: 1739989 - DNA, 15 bp, Homo sapiens
tactagtgattttta

SEQ ID NO: 1739990 - DNA, 15 bp, Homo sapiens
actagtgatttttat

SEQ ID NO: 1739991 - DNA, 15 bp, Homo sapiens
ctagtgatttttata

SEQ ID NO: 1739992 - DNA, 15 bp, Homo sapiens
tagtgatttttatac

SEQ ID NO: 1739993 - DNA, 15 bp, Homo sapiens
agtgatttttataca

SEQ ID NO: 1739994 - DNA, 15 bp, Homo sapiens
gtgatttttatacat

SEQ ID NO: 1739995 - DNA, 15 bp, Homo sapiens
tgatttttatacatt

SEQ ID NO: 1739996 - DNA, 15 bp, Homo sapiens
gatttttatacattg

SEQ ID NO: 1739997 - DNA, 15 bp, Homo sapiens
atttttatacattga

SEQ ID NO: 1739998 - DNA, 15 bp, Homo sapiens
tttttatacattgat

SEQ ID NO: 1739999 - DNA, 15 bp, Homo sapiens
ttttatacattgatt

SEQ ID NO: 1740000 - DNA, 15 bp, Homo sapiens
tttatacattgattt

SEQ ID NO: 1740001 - DNA, 15 bp, Homo sapiens
ttatacattgatttt

SEQ ID NO: 1740002 - DNA, 15 bp, Homo sapiens
tatacattgattttg

SEQ ID NO: 1740003 - DNA, 15 bp, Homo sapiens
atacattgattttgt

SEQ ID NO: 1740004 - DNA, 15 bp, Homo sapiens
tacattgattttgta

SEQ ID NO: 1740005 - DNA, 15 bp, Homo sapiens
acattgattttgtat

SEQ ID NO: 1740006 - DNA, 15 bp, Homo sapiens
cattgattttgtatc

SEQ ID NO: 1740007 - DNA, 15 bp, Homo sapiens
attgattttgtatcc

SEQ ID NO: 1740008 - DNA, 15 bp, Homo sapiens
ttgattttgtatcct

SEQ ID NO: 1740009 - DNA, 15 bp, Homo sapiens
tgattttgtatcctg

SEQ ID NO: 1740010 - DNA, 15 bp, Homo sapiens
gattttgtatcctga

SEQ ID NO: 1740011 - DNA, 15 bp, Homo sapiens
attttgtatcctgaa

SEQ ID NO: 1740012 - DNA, 15 bp, Homo sapiens
ttttgtatcctgaaa

SEQ ID NO: 1740013 - DNA, 15 bp, Homo sapiens
tttgtatcctgaaac

SEQ ID NO: 1740014 - DNA, 15 bp, Homo sapiens
ttgtatcctgaaact

SEQ ID NO: 1740015 - DNA, 15 bp, Homo sapiens
tgtatcctgaaactt

SEQ ID NO: 1740016 - DNA, 15 bp, Homo sapiens
gtatcctgaaacttt

SEQ ID NO: 1740017 - DNA, 15 bp, Homo sapiens
cctgaaactttgctg

SEQ ID NO: 1740018 - DNA, 15 bp, Homo sapiens
ctgaaactttgctga

SEQ ID NO: 1740019 - DNA, 15 bp, Homo sapiens
tgaaactttgctgaa

SEQ ID NO: 1740020 - DNA, 15 bp, Homo sapiens
gaaactttgctgaag

SEQ ID NO: 1740021 - DNA, 15 bp, Homo sapiens
aaactttgctgaagt

SEQ ID NO: 1740022 - DNA, 15 bp, Homo sapiens
aactttgctgaagtt

SEQ ID NO: 1740023 - DNA, 15 bp, Homo sapiens
actttgctgaagttg

SEQ ID NO: 1740024 - DNA, 15 bp, Homo sapiens
ctttgctgaagttgt

SEQ ID NO: 1740025 - DNA, 15 bp, Homo sapiens
tttgctgaagttgtt

SEQ ID NO: 1740026 - DNA, 15 bp, Homo sapiens
ttgctgaagttgttg

SEQ ID NO: 1740027 - DNA, 15 bp, Homo sapiens
tgctgaagttgttga

SEQ ID NO: 1740028 - DNA, 15 bp, Homo sapiens
gctgaagttgttgat

SEQ ID NO: 1740029 - DNA, 15 bp, Homo sapiens
ctgaagttgttgatc

SEQ ID NO: 1740030 - DNA, 15 bp, Homo sapiens
tgaagttgttgatca

SEQ ID NO: 1740031 - DNA, 15 bp, Homo sapiens
gaagttgttgatcag

SEQ ID NO: 1740032 - DNA, 15 bp, Homo sapiens
aagttgttgatcagc

SEQ ID NO: 1740033 - DNA, 15 bp, Homo sapiens
agttgttgatcagct

SEQ ID NO: 1740034 - DNA, 15 bp, Homo sapiens
gttgttgatcagctg

SEQ ID NO: 1740035 - DNA, 15 bp, Homo sapiens
ttgttgatcagctga

SEQ ID NO: 1740036 - DNA, 15 bp, Homo sapiens
tgttgatcagctgaa

SEQ ID NO: 1740037 - DNA, 15 bp, Homo sapiens
gttgatcagctgaag

SEQ ID NO: 1740038 - DNA, 15 bp, Homo sapiens
ttgatcagctgaagg

SEQ ID NO: 1740039 - DNA, 15 bp, Homo sapiens
tgatcagctgaagga

SEQ ID NO: 1740040 - DNA, 15 bp, Homo sapiens
gatcagctgaaggag

SEQ ID NO: 1740041 - DNA, 15 bp, Homo sapiens
atcagctgaaggagc

SEQ ID NO: 1740042 - DNA, 15 bp, Homo sapiens
tcagctgaaggagct

SEQ ID NO: 1740043 - DNA, 15 bp, Homo sapiens
cagctgaaggagctt

SEQ ID NO: 1740044 - DNA, 15 bp, Homo sapiens
agctgaaggagcttt

SEQ ID NO: 1740045 - DNA, 15 bp, Homo sapiens
gctgaaggagctttt

SEQ ID NO: 1740046 - DNA, 15 bp, Homo sapiens
ctgaaggagcttttt

SEQ ID NO: 1740047 - DNA, 15 bp, Homo sapiens
tgaaggagctttttg

SEQ ID NO: 1740048 - DNA, 15 bp, Homo sapiens
gaaggagctttttgg

SEQ ID NO: 1740049 - DNA, 15 bp, Homo sapiens
aaggagctttttggc

SEQ ID NO: 1740050 - DNA, 15 bp, Homo sapiens
aggagctttttggct

SEQ ID NO: 1740051 - DNA, 15 bp, Homo sapiens
ggagctttttggctc

SEQ ID NO: 1740052 - DNA, 15 bp, Homo sapiens
gagctttttggctct

SEQ ID NO: 1740053 - DNA, 15 bp, Homo sapiens
agctttttggctcta

SEQ ID NO: 1740054 - DNA, 15 bp, Homo sapiens
gctttttggctctaa

SEQ ID NO: 1740055 - DNA, 15 bp, Homo sapiens
ctttttggctctaag

SEQ ID NO: 1740056 - DNA, 15 bp, Homo sapiens
tttttggctctaaga

SEQ ID NO: 1740057 - DNA, 15 bp, Homo sapiens
ttttggctctaagac

SEQ ID NO: 1740058 - DNA, 15 bp, Homo sapiens
tttggctctaagact

SEQ ID NO: 1740059 - DNA, 15 bp, Homo sapiens
ttggctctaagacta

SEQ ID NO: 1740060 - DNA, 15 bp, Homo sapiens
tggctctaagactac

SEQ ID NO: 1740061 - DNA, 15 bp, Homo sapiens
ggctctaagactaca

SEQ ID NO: 1740062 - DNA, 15 bp, Homo sapiens
gctctaagactacag

SEQ ID NO: 1740063 - DNA, 15 bp, Homo sapiens
ctctaagactacagg

SEQ ID NO: 1740064 - DNA, 15 bp, Homo sapiens
tctaagactacaggg

SEQ ID NO: 1740065 - DNA, 15 bp, Homo sapiens
ctaagactacagggt

SEQ ID NO: 1740066 - DNA, 15 bp, Homo sapiens
taagactacagggtt

SEQ ID NO: 1740067 - DNA, 15 bp, Homo sapiens
aagactacagggttt

SEQ ID NO: 1740068 - DNA, 15 bp, Homo sapiens
agactacagggtttt

SEQ ID NO: 1740069 - DNA, 15 bp, Homo sapiens
gactacagggttttc

SEQ ID NO: 1740070 - DNA, 15 bp, Homo sapiens
actacagggttttct

SEQ ID NO: 1740071 - DNA, 15 bp, Homo sapiens
ctacagggttttcta

SEQ ID NO: 1740072 - DNA, 15 bp, Homo sapiens
tacagggttttctag

SEQ ID NO: 1740073 - DNA, 15 bp, Homo sapiens
acagggttttctaga

SEQ ID NO: 1740074 - DNA, 15 bp, Homo sapiens
cagggttttctagat

SEQ ID NO: 1740075 - DNA, 15 bp, Homo sapiens
agggttttctagata

SEQ ID NO: 1740076 - DNA, 15 bp, Homo sapiens
gggttttctagatat

SEQ ID NO: 1740077 - DNA, 15 bp, Homo sapiens
ggttttctagatata

SEQ ID NO: 1740078 - DNA, 15 bp, Homo sapiens
gttttctagatatag

SEQ ID NO: 1740079 - DNA, 15 bp, Homo sapiens
ttttctagatatagc

SEQ ID NO: 1740080 - DNA, 15 bp, Homo sapiens
tttctagatatagca

SEQ ID NO: 1740081 - DNA, 15 bp, Homo sapiens
ttctagatatagcat

SEQ ID NO: 1740082 - DNA, 15 bp, Homo sapiens
tctagatatagcatc

SEQ ID NO: 1740083 - DNA, 15 bp, Homo sapiens
ctagatatagcatca

SEQ ID NO: 1740084 - DNA, 15 bp, Homo sapiens
tagatatagcatcat

SEQ ID NO: 1740085 - DNA, 15 bp, Homo sapiens
agatatagcatcatg

SEQ ID NO: 1740086 - DNA, 15 bp, Homo sapiens
gatatagcatcatgt

SEQ ID NO: 1740087 - DNA, 15 bp, Homo sapiens
atatagcatcatgtc

SEQ ID NO: 1740088 - DNA, 15 bp, Homo sapiens
tatagcatcatgtca

SEQ ID NO: 1740089 - DNA, 15 bp, Homo sapiens
atagcatcatgtcat

SEQ ID NO: 1740090 - DNA, 15 bp, Homo sapiens
tagcatcatgtcatc

SEQ ID NO: 1740091 - DNA, 15 bp, Homo sapiens
agcatcatgtcatct

SEQ ID NO: 1740092 - DNA, 15 bp, Homo sapiens
gcatcatgtcatctg

SEQ ID NO: 1740093 - DNA, 15 bp, Homo sapiens
catcatgtcatctgc

SEQ ID NO: 1740094 - DNA, 15 bp, Homo sapiens
atcatgtcatctgcc

SEQ ID NO: 1740095 - DNA, 15 bp, Homo sapiens
tcatgtcatctgcca

SEQ ID NO: 1740096 - DNA, 15 bp, Homo sapiens
catgtcatctgccac

SEQ ID NO: 1740097 - DNA, 15 bp, Homo sapiens
atgtcatctgccaca

SEQ ID NO: 1740098 - DNA, 15 bp, Homo sapiens
tgtcatctgccacag

SEQ ID NO: 1740099 - DNA, 15 bp, Homo sapiens
gtcatctgccacaga

SEQ ID NO: 1740100 - DNA, 15 bp, Homo sapiens
tcatctgccacagag

SEQ ID NO: 1740101 - DNA, 15 bp, Homo sapiens
catctgccacagaga

SEQ ID NO: 1740102 - DNA, 15 bp, Homo sapiens
atctgccacagagat

SEQ ID NO: 1740103 - DNA, 15 bp, Homo sapiens
tctgccacagagata

SEQ ID NO: 1740104 - DNA, 15 bp, Homo sapiens
ctgccacagagatag

SEQ ID NO: 1740105 - DNA, 15 bp, Homo sapiens
tgccacagagatagt

SEQ ID NO: 1740106 - DNA, 15 bp, Homo sapiens
gccacagagatagtt

SEQ ID NO: 1740107 - DNA, 15 bp, Homo sapiens
ccacagagatagttt

SEQ ID NO: 1740108 - DNA, 15 bp, Homo sapiens
cacagagatagtttg

SEQ ID NO: 1740109 - DNA, 15 bp, Homo sapiens
acagagatagtttga

SEQ ID NO: 1740110 - DNA, 15 bp, Homo sapiens
cagagatagtttgac

SEQ ID NO: 1740111 - DNA, 15 bp, Homo sapiens
agagatagtttgact

SEQ ID NO: 1740112 - DNA, 15 bp, Homo sapiens
gagatagtttgactc

SEQ ID NO: 1740113 - DNA, 15 bp, Homo sapiens
agatagtttgactcc

SEQ ID NO: 1740114 - DNA, 15 bp, Homo sapiens
gatagtttgactccc

SEQ ID NO: 1740115 - DNA, 15 bp, Homo sapiens
atagtttgactccct

SEQ ID NO: 1740116 - DNA, 15 bp, Homo sapiens
tagtttgactccctc

SEQ ID NO: 1740117 - DNA, 15 bp, Homo sapiens
agtttgactccctct

SEQ ID NO: 1740118 - DNA, 15 bp, Homo sapiens
gtttgactccctctc

SEQ ID NO: 1740119 - DNA, 15 bp, Homo sapiens
tttgactccctctct

SEQ ID NO: 1740120 - DNA, 15 bp, Homo sapiens
ttgactccctctctt

SEQ ID NO: 1740121 - DNA, 15 bp, Homo sapiens
tgactccctctcttc

SEQ ID NO: 1740122 - DNA, 15 bp, Homo sapiens
gactccctctcttcc

SEQ ID NO: 1740123 - DNA, 15 bp, Homo sapiens
actccctctcttcct

SEQ ID NO: 1740124 - DNA, 15 bp, Homo sapiens
ctccctctcttccta

SEQ ID NO: 1740125 - DNA, 15 bp, Homo sapiens
tccctctcttcctat

SEQ ID NO: 1740126 - DNA, 15 bp, Homo sapiens
ccctctcttcctatt

SEQ ID NO: 1740127 - DNA, 15 bp, Homo sapiens
cctctcttcctattt

SEQ ID NO: 1740128 - DNA, 15 bp, Homo sapiens
ctctcttcctatttg

SEQ ID NO: 1740129 - DNA, 15 bp, Homo sapiens
tctcttcctatttgg

SEQ ID NO: 1740130 - DNA, 15 bp, Homo sapiens
ctcttcctatttgga

SEQ ID NO: 1740131 - DNA, 15 bp, Homo sapiens
tcttcctatttggat

SEQ ID NO: 1740132 - DNA, 15 bp, Homo sapiens
cttcctatttggatg

SEQ ID NO: 1740133 - DNA, 15 bp, Homo sapiens
ttcctatttggatgc

SEQ ID NO: 1740134 - DNA, 15 bp, Homo sapiens
tcctatttggatgcc

SEQ ID NO: 1740135 - DNA, 15 bp, Homo sapiens
cctatttggatgccc

SEQ ID NO: 1740136 - DNA, 15 bp, Homo sapiens
ctatttggatgccct

SEQ ID NO: 1740137 - DNA, 15 bp, Homo sapiens
tatttggatgccctt

SEQ ID NO: 1740138 - DNA, 15 bp, Homo sapiens
atttggatgcccttc

SEQ ID NO: 1740139 - DNA, 15 bp, Homo sapiens
tttggatgcccttca

SEQ ID NO: 1740140 - DNA, 15 bp, Homo sapiens
ttggatgcccttcat

SEQ ID NO: 1740141 - DNA, 15 bp, Homo sapiens
tggatgcccttcatt

SEQ ID NO: 1740142 - DNA, 15 bp, Homo sapiens
ggatgcccttcattt

SEQ ID NO: 1740143 - DNA, 15 bp, Homo sapiens
gatgcccttcatttc

SEQ ID NO: 1740144 - DNA, 15 bp, Homo sapiens
atgcccttcatttct

SEQ ID NO: 1740145 - DNA, 15 bp, Homo sapiens
tgcccttcatttctt

SEQ ID NO: 1740146 - DNA, 15 bp, Homo sapiens
gcccttcatttcttt

SEQ ID NO: 1740147 - DNA, 15 bp, Homo sapiens
cccttcatttctttc

SEQ ID NO: 1740148 - DNA, 15 bp, Homo sapiens
ccttcatttctttct

SEQ ID NO: 1740149 - DNA, 15 bp, Homo sapiens
cttcatttctttctc

SEQ ID NO: 1740150 - DNA, 15 bp, Homo sapiens
ttcatttctttctct

SEQ ID NO: 1740151 - DNA, 15 bp, Homo sapiens
tcatttctttctctc

SEQ ID NO: 1740152 - DNA, 15 bp, Homo sapiens
catttctttctctca

SEQ ID NO: 1740153 - DNA, 15 bp, Homo sapiens
atttctttctctcac

SEQ ID NO: 1740154 - DNA, 15 bp, Homo sapiens
tttctttctctcacc

SEQ ID NO: 1740155 - DNA, 15 bp, Homo sapiens
ttctttctctcacct

SEQ ID NO: 1740156 - DNA, 15 bp, Homo sapiens
tctttctctcacctg

SEQ ID NO: 1740157 - DNA, 15 bp, Homo sapiens
ctttctctcacctga

SEQ ID NO: 1740158 - DNA, 15 bp, Homo sapiens
tttctctcacctgat

SEQ ID NO: 1740159 - DNA, 15 bp, Homo sapiens
ttctctcacctgatt

SEQ ID NO: 1740160 - DNA, 15 bp, Homo sapiens
tctctcacctgattc

SEQ ID NO: 1740161 - DNA, 15 bp, Homo sapiens
ctctcacctgattcc

SEQ ID NO: 1740162 - DNA, 15 bp, Homo sapiens
tctcacctgattcct

SEQ ID NO: 1740163 - DNA, 15 bp, Homo sapiens
ctcacctgattcctc

SEQ ID NO: 1740164 - DNA, 15 bp, Homo sapiens
tcacctgattcctct

SEQ ID NO: 1740165 - DNA, 15 bp, Homo sapiens
cacctgattcctctg

SEQ ID NO: 1740166 - DNA, 15 bp, Homo sapiens
acctgattcctctga

SEQ ID NO: 1740167 - DNA, 15 bp, Homo sapiens
cctgattcctctgat

SEQ ID NO: 1740168 - DNA, 15 bp, Homo sapiens
ctgattcctctgatt

SEQ ID NO: 1740169 - DNA, 15 bp, Homo sapiens
tgattcctctgatta

SEQ ID NO: 1740170 - DNA, 15 bp, Homo sapiens
gattcctctgattag

SEQ ID NO: 1740171 - DNA, 15 bp, Homo sapiens
attcctctgattagg

SEQ ID NO: 1740172 - DNA, 15 bp, Homo sapiens
ttcctctgattagga

SEQ ID NO: 1740173 - DNA, 15 bp, Homo sapiens
tcctctgattaggac

SEQ ID NO: 1740174 - DNA, 15 bp, Homo sapiens
cctctgattaggact

SEQ ID NO: 1740175 - DNA, 15 bp, Homo sapiens
ctctgattaggactt

SEQ ID NO: 1740176 - DNA, 15 bp, Homo sapiens
tctgattaggacttc

SEQ ID NO: 1740177 - DNA, 15 bp, Homo sapiens
ctgattaggacttcc

SEQ ID NO: 1740178 - DNA, 15 bp, Homo sapiens
tgattaggacttcca

SEQ ID NO: 1740179 - DNA, 15 bp, Homo sapiens
gattaggacttccaa

SEQ ID NO: 1740180 - DNA, 15 bp, Homo sapiens
attaggacttccaat

SEQ ID NO: 1740181 - DNA, 15 bp, Homo sapiens
ttaggacttccaata

SEQ ID NO: 1740182 - DNA, 15 bp, Homo sapiens
aggacttccaatact

SEQ ID NO: 1740183 - DNA, 15 bp, Homo sapiens
ggacttccaatactt

SEQ ID NO: 1740184 - DNA, 15 bp, Homo sapiens
gacttccaatacttt

SEQ ID NO: 1740185 - DNA, 15 bp, Homo sapiens
acttccaatactttg

SEQ ID NO: 1740186 - DNA, 15 bp, Homo sapiens
cttccaatactttgt

SEQ ID NO: 1740187 - DNA, 15 bp, Homo sapiens
ttccaatactttgtt

SEQ ID NO: 1740188 - DNA, 15 bp, Homo sapiens
tccaatactttgttg

SEQ ID NO: 1740189 - DNA, 15 bp, Homo sapiens
ccaatactttgttga

SEQ ID NO: 1740190 - DNA, 15 bp, Homo sapiens
caatactttgttgaa

SEQ ID NO: 1740191 - DNA, 15 bp, Homo sapiens
aatactttgttgaat

SEQ ID NO: 1740192 - DNA, 15 bp, Homo sapiens
atactttgttgaata

SEQ ID NO: 1740193 - DNA, 15 bp, Homo sapiens
tactttgttgaatag

SEQ ID NO: 1740194 - DNA, 15 bp, Homo sapiens
actttgttgaatagg

SEQ ID NO: 1740195 - DNA, 15 bp, Homo sapiens
ctttgttgaatagga

SEQ ID NO: 1740196 - DNA, 15 bp, Homo sapiens
tttgttgaataggag

SEQ ID NO: 1740197 - DNA, 15 bp, Homo sapiens
ttgttgaataggagt

SEQ ID NO: 1740198 - DNA, 15 bp, Homo sapiens
aataggagtggtgaa

SEQ ID NO: 1740199 - DNA, 15 bp, Homo sapiens
ataggagtggtgaaa

SEQ ID NO: 1740200 - DNA, 15 bp, Homo sapiens
taggagtggtgaaaa

SEQ ID NO: 1740201 - DNA, 15 bp, Homo sapiens
aggagtggtgaaaaa

SEQ ID NO: 1740202 - DNA, 15 bp, Homo sapiens
ggagtggtgaaaaag

SEQ ID NO: 1740203 - DNA, 15 bp, Homo sapiens
gagtggtgaaaaagg

SEQ ID NO: 1740204 - DNA, 15 bp, Homo sapiens
agtggtgaaaaaggg

SEQ ID NO: 1740205 - DNA, 15 bp, Homo sapiens
gtggtgaaaaagggc

SEQ ID NO: 1740206 - DNA, 15 bp, Homo sapiens
tggtgaaaaagggca

SEQ ID NO: 1740207 - DNA, 15 bp, Homo sapiens
ggtgaaaaagggcat

SEQ ID NO: 1740208 - DNA, 15 bp, Homo sapiens
gtgaaaaagggcatc

SEQ ID NO: 1740209 - DNA, 15 bp, Homo sapiens
tgaaaaagggcatcc

SEQ ID NO: 1740210 - DNA, 15 bp, Homo sapiens
gaaaaagggcatcct

SEQ ID NO: 1740211 - DNA, 15 bp, Homo sapiens
aaaaagggcatcctt

SEQ ID NO: 1740212 - DNA, 15 bp, Homo sapiens
aaaagggcatccttg

SEQ ID NO: 1740213 - DNA, 15 bp, Homo sapiens
aaagggcatccttgt

SEQ ID NO: 1740214 - DNA, 15 bp, Homo sapiens
aagggcatccttgtc

SEQ ID NO: 1740215 - DNA, 15 bp, Homo sapiens
agggcatccttgtct

SEQ ID NO: 1740216 - DNA, 15 bp, Homo sapiens
gggcatccttgtctt

SEQ ID NO: 1740217 - DNA, 15 bp, Homo sapiens
ggcatccttgtcttg

SEQ ID NO: 1740218 - DNA, 15 bp, Homo sapiens
gcatccttgtcttgt

SEQ ID NO: 1740219 - DNA, 15 bp, Homo sapiens
catccttgtcttgtg

SEQ ID NO: 1740220 - DNA, 15 bp, Homo sapiens
atccttgtcttgtgc

SEQ ID NO: 1740221 - DNA, 15 bp, Homo sapiens
tccttgtcttgtgcc

SEQ ID NO: 1740222 - DNA, 15 bp, Homo sapiens
ccttgtcttgtgcca

SEQ ID NO: 1740223 - DNA, 15 bp, Homo sapiens
cttgtcttgtgccag

SEQ ID NO: 1740224 - DNA, 15 bp, Homo sapiens
ttgtcttgtgccagt

SEQ ID NO: 1740225 - DNA, 15 bp, Homo sapiens
tgtcttgtgccagtt

SEQ ID NO: 1740226 - DNA, 15 bp, Homo sapiens
gtcttgtgccagttt

SEQ ID NO: 1740227 - DNA, 15 bp, Homo sapiens
tcttgtgccagtttt

SEQ ID NO: 1740228 - DNA, 15 bp, Homo sapiens
cttgtgccagttttc

SEQ ID NO: 1740229 - DNA, 15 bp, Homo sapiens
ttgtgccagttttca

SEQ ID NO: 1740230 - DNA, 15 bp, Homo sapiens
tgtgccagttttcaa

SEQ ID NO: 1740231 - DNA, 15 bp, Homo sapiens
gtgccagttttcaaa

SEQ ID NO: 1740232 - DNA, 15 bp, Homo sapiens
tgccagttttcaaag

SEQ ID NO: 1740233 - DNA, 15 bp, Homo sapiens
gccagttttcaaagg

SEQ ID NO: 1740234 - DNA, 15 bp, Homo sapiens
ccagttttcaaaggg

SEQ ID NO: 1740235 - DNA, 15 bp, Homo sapiens
cagttttcaaaggga

SEQ ID NO: 1740236 - DNA, 15 bp, Homo sapiens
agttttcaaagggaa

SEQ ID NO: 1740237 - DNA, 15 bp, Homo sapiens
gttttcaaagggaat

SEQ ID NO: 1740238 - DNA, 15 bp, Homo sapiens
ttttcaaagggaatg

SEQ ID NO: 1740239 - DNA, 15 bp, Homo sapiens
tttcaaagggaatgc

SEQ ID NO: 1740240 - DNA, 15 bp, Homo sapiens
ttcaaagggaatgct

SEQ ID NO: 1740241 - DNA, 15 bp, Homo sapiens
tcaaagggaatgctt

SEQ ID NO: 1740242 - DNA, 15 bp, Homo sapiens
caaagggaatgcttc

SEQ ID NO: 1740243 - DNA, 15 bp, Homo sapiens
aaagggaatgcttca

SEQ ID NO: 1740244 - DNA, 15 bp, Homo sapiens
aagggaatgcttcaa

SEQ ID NO: 1740245 - DNA, 15 bp, Homo sapiens
agggaatgcttcaag

SEQ ID NO: 1740246 - DNA, 15 bp, Homo sapiens
gggaatgcttcaagc

SEQ ID NO: 1740247 - DNA, 15 bp, Homo sapiens
ggaatgcttcaagct

SEQ ID NO: 1740248 - DNA, 15 bp, Homo sapiens
gaatgcttcaagctt

SEQ ID NO: 1740249 - DNA, 15 bp, Homo sapiens
aatgcttcaagcttc

SEQ ID NO: 1740250 - DNA, 15 bp, Homo sapiens
atgcttcaagcttct

SEQ ID NO: 1740251 - DNA, 15 bp, Homo sapiens
tgcttcaagcttctg

SEQ ID NO: 1740252 - DNA, 15 bp, Homo sapiens
gcttcaagcttctgc

SEQ ID NO: 1740253 - DNA, 15 bp, Homo sapiens
cttcaagcttctgca

SEQ ID NO: 1740254 - DNA, 15 bp, Homo sapiens
ttcaagcttctgcac

SEQ ID NO: 1740255 - DNA, 15 bp, Homo sapiens
tcaagcttctgcaca

SEQ ID NO: 1740256 - DNA, 15 bp, Homo sapiens
caagcttctgcacat

SEQ ID NO: 1740257 - DNA, 15 bp, Homo sapiens
aagcttctgcacatt

SEQ ID NO: 1740258 - DNA, 15 bp, Homo sapiens
agcttctgcacattc

SEQ ID NO: 1740259 - DNA, 15 bp, Homo sapiens
gcttctgcacattca

SEQ ID NO: 1740260 - DNA, 15 bp, Homo sapiens
cttctgcacattcag

SEQ ID NO: 1740261 - DNA, 15 bp, Homo sapiens
ttctgcacattcagt

SEQ ID NO: 1740262 - DNA, 15 bp, Homo sapiens
tctgcacattcagta

SEQ ID NO: 1740263 - DNA, 15 bp, Homo sapiens
ctgcacattcagtat

SEQ ID NO: 1740264 - DNA, 15 bp, Homo sapiens
tgcacattcagtatg

SEQ ID NO: 1740265 - DNA, 15 bp, Homo sapiens
gcacattcagtatga

SEQ ID NO: 1740266 - DNA, 15 bp, Homo sapiens
cacattcagtatgat

SEQ ID NO: 1740267 - DNA, 15 bp, Homo sapiens
acattcagtatgatg

SEQ ID NO: 1740268 - DNA, 15 bp, Homo sapiens
cattcagtatgatgt

SEQ ID NO: 1740269 - DNA, 15 bp, Homo sapiens
attcagtatgatgtt

SEQ ID NO: 1740270 - DNA, 15 bp, Homo sapiens
ttcagtatgatgttg

SEQ ID NO: 1740271 - DNA, 15 bp, Homo sapiens
tcagtatgatgttgg

SEQ ID NO: 1740272 - DNA, 15 bp, Homo sapiens
cagtatgatgttggc

SEQ ID NO: 1740273 - DNA, 15 bp, Homo sapiens
gatgttggctgtggg

SEQ ID NO: 1740274 - DNA, 15 bp, Homo sapiens
atgttggctgtgggt

SEQ ID NO: 1740275 - DNA, 15 bp, Homo sapiens
tgttggctgtgggtt

SEQ ID NO: 1740276 - DNA, 15 bp, Homo sapiens
gttggctgtgggtta

SEQ ID NO: 1740277 - DNA, 15 bp, Homo sapiens
ttggctgtgggttag

SEQ ID NO: 1740278 - DNA, 15 bp, Homo sapiens
tggctgtgggttagt

SEQ ID NO: 1740279 - DNA, 15 bp, Homo sapiens
ggctgtgggttagtt

SEQ ID NO: 1740280 - DNA, 15 bp, Homo sapiens
gctgtgggttagtta

SEQ ID NO: 1740281 - DNA, 15 bp, Homo sapiens
ctgtgggttagttat

SEQ ID NO: 1740282 - DNA, 15 bp, Homo sapiens
tgtgggttagttata

SEQ ID NO: 1740283 - DNA, 15 bp, Homo sapiens
gtgggttagttatag

SEQ ID NO: 1740284 - DNA, 15 bp, Homo sapiens
tgggttagttatagg

SEQ ID NO: 1740285 - DNA, 15 bp, Homo sapiens
gggttagttataggt

SEQ ID NO: 1740286 - DNA, 15 bp, Homo sapiens
ggttagttataggtg

SEQ ID NO: 1740287 - DNA, 15 bp, Homo sapiens
gttagttataggtga

SEQ ID NO: 1740288 - DNA, 15 bp, Homo sapiens
ttagttataggtgaa

SEQ ID NO: 1740289 - DNA, 15 bp, Homo sapiens
tagttataggtgaaa

SEQ ID NO: 1740290 - DNA, 15 bp, Homo sapiens
agttataggtgaaaa

SEQ ID NO: 1740291 - DNA, 15 bp, Homo sapiens
gttataggtgaaaaa

SEQ ID NO: 1740292 - DNA, 15 bp, Homo sapiens
ttataggtgaaaaaa

SEQ ID NO: 1740293 - DNA, 15 bp, Homo sapiens
tataggtgaaaaaaa

SEQ ID NO: 1740294 - DNA, 15 bp, Homo sapiens
ataggtgaaaaaaag

SEQ ID NO: 1740295 - DNA, 15 bp, Homo sapiens
taggtgaaaaaaaga

SEQ ID NO: 1740296 - DNA, 15 bp, Homo sapiens
aggtgaaaaaaagag

SEQ ID NO: 1740297 - DNA, 15 bp, Homo sapiens
ggtgaaaaaaagagg

SEQ ID NO: 1740298 - DNA, 15 bp, Homo sapiens
gtgaaaaaaagagga

SEQ ID NO: 1740299 - DNA, 15 bp, Homo sapiens
tgaaaaaaagaggaa

SEQ ID NO: 1740300 - DNA, 15 bp, Homo sapiens
gaaaaaaagaggaaa

SEQ ID NO: 1740301 - DNA, 15 bp, Homo sapiens
aaaaaaagaggaaaa

SEQ ID NO: 1740302 - DNA, 15 bp, Homo sapiens
aaaaaagaggaaaaa

SEQ ID NO: 1740303 - DNA, 15 bp, Homo sapiens
aaaaagaggaaaaac

SEQ ID NO: 1740304 - DNA, 15 bp, Homo sapiens
aaaagaggaaaaact

SEQ ID NO: 1740305 - DNA, 15 bp, Homo sapiens
aaagaggaaaaactc

SEQ ID NO: 1740306 - DNA, 15 bp, Homo sapiens
aagaggaaaaactca

SEQ ID NO: 1740307 - DNA, 15 bp, Homo sapiens
agaggaaaaactcaa

SEQ ID NO: 1740308 - DNA, 15 bp, Homo sapiens
gaggaaaaactcaaa

SEQ ID NO: 1740309 - DNA, 15 bp, Homo sapiens
aggaaaaactcaaat

SEQ ID NO: 1740310 - DNA, 15 bp, Homo sapiens
ggaaaaactcaaata

SEQ ID NO: 1740311 - DNA, 15 bp, Homo sapiens
gaaaaactcaaataa

SEQ ID NO: 1740312 - DNA, 15 bp, Homo sapiens
aaaaactcaaataaa

SEQ ID NO: 1740313 - DNA, 15 bp, Homo sapiens
aaaactcaaataaac

SEQ ID NO: 1740314 - DNA, 15 bp, Homo sapiens
aaactcaaataaaca

SEQ ID NO: 1740315 - DNA, 15 bp, Homo sapiens
aactcaaataaacaa

SEQ ID NO: 1740316 - DNA, 15 bp, Homo sapiens
actcaaataaacaat

SEQ ID NO: 1740317 - DNA, 15 bp, Homo sapiens
ctcaaataaacaatc

SEQ ID NO: 1740318 - DNA, 15 bp, Homo sapiens
tcaaataaacaatct

SEQ ID NO: 1740319 - DNA, 15 bp, Homo sapiens
caaataaacaatcta

SEQ ID NO: 1740320 - DNA, 15 bp, Homo sapiens
aaataaacaatctaa

SEQ ID NO: 1740321 - DNA, 15 bp, Homo sapiens
aataaacaatctaac

SEQ ID NO: 1740322 - DNA, 15 bp, Homo sapiens
ataaacaatctaaca

SEQ ID NO: 1740323 - DNA, 15 bp, Homo sapiens
taaacaatctaacat

SEQ ID NO: 1740324 - DNA, 15 bp, Homo sapiens
aaacaatctaacatt

SEQ ID NO: 1740325 - DNA, 15 bp, Homo sapiens
aacaatctaacattg

SEQ ID NO: 1740326 - DNA, 15 bp, Homo sapiens
acaatctaacattgt

SEQ ID NO: 1740327 - DNA, 15 bp, Homo sapiens
caatctaacattgta

SEQ ID NO: 1740328 - DNA, 15 bp, Homo sapiens
aatctaacattgtat

SEQ ID NO: 1740329 - DNA, 15 bp, Homo sapiens
atctaacattgtatc

SEQ ID NO: 1740330 - DNA, 15 bp, Homo sapiens
tctaacattgtatct

SEQ ID NO: 1740331 - DNA, 15 bp, Homo sapiens
ctaacattgtatctt

SEQ ID NO: 1740332 - DNA, 15 bp, Homo sapiens
taacattgtatctta

SEQ ID NO: 1740333 - DNA, 15 bp, Homo sapiens
aacattgtatcttaa

SEQ ID NO: 1740334 - DNA, 15 bp, Homo sapiens
acattgtatcttaaa

SEQ ID NO: 1740335 - DNA, 15 bp, Homo sapiens
cattgtatcttaaag

SEQ ID NO: 1740336 - DNA, 15 bp, Homo sapiens
attgtatcttaaaga

SEQ ID NO: 1740337 - DNA, 15 bp, Homo sapiens
ttgtatcttaaagaa

SEQ ID NO: 1740338 - DNA, 15 bp, Homo sapiens
tgtatcttaaagaag

SEQ ID NO: 1740339 - DNA, 15 bp, Homo sapiens
gtatcttaaagaagt

SEQ ID NO: 1740340 - DNA, 15 bp, Homo sapiens
tatcttaaagaagta

SEQ ID NO: 1740341 - DNA, 15 bp, Homo sapiens
atcttaaagaagtac

SEQ ID NO: 1740342 - DNA, 15 bp, Homo sapiens
tcttaaagaagtaca

SEQ ID NO: 1740343 - DNA, 15 bp, Homo sapiens
cttaaagaagtacaa

SEQ ID NO: 1740344 - DNA, 15 bp, Homo sapiens
ttaaagaagtacaaa

SEQ ID NO: 1740345 - DNA, 15 bp, Homo sapiens
taaagaagtacaaaa

SEQ ID NO: 1740346 - DNA, 15 bp, Homo sapiens
aagaagtacaaaaat

SEQ ID NO: 1740347 - DNA, 15 bp, Homo sapiens
agaagtacaaaaata

SEQ ID NO: 1740348 - DNA, 15 bp, Homo sapiens
gaagtacaaaaataa

SEQ ID NO: 1740349 - DNA, 15 bp, Homo sapiens
aagtacaaaaataag

SEQ ID NO: 1740350 - DNA, 15 bp, Homo sapiens
agtacaaaaataaga

SEQ ID NO: 1740351 - DNA, 15 bp, Homo sapiens
gtacaaaaataagag

SEQ ID NO: 1740352 - DNA, 15 bp, Homo sapiens
tacaaaaataagagc

SEQ ID NO: 1740353 - DNA, 15 bp, Homo sapiens
acaaaaataagagca

SEQ ID NO: 1740354 - DNA, 15 bp, Homo sapiens
caaaaataagagcaa

SEQ ID NO: 1740355 - DNA, 15 bp, Homo sapiens
aaaataagagcaaat

SEQ ID NO: 1740356 - DNA, 15 bp, Homo sapiens
aaataagagcaaatc

SEQ ID NO: 1740357 - DNA, 15 bp, Homo sapiens
aataagagcaaatca

SEQ ID NO: 1740358 - DNA, 15 bp, Homo sapiens
ataagagcaaatcaa

SEQ ID NO: 1740359 - DNA, 15 bp, Homo sapiens
taagagcaaatcaaa

SEQ ID NO: 1740360 - DNA, 15 bp, Homo sapiens
aagagcaaatcaaac

SEQ ID NO: 1740361 - DNA, 15 bp, Homo sapiens
agagcaaatcaaacc

SEQ ID NO: 1740362 - DNA, 15 bp, Homo sapiens
gagcaaatcaaaccc

SEQ ID NO: 1740363 - DNA, 15 bp, Homo sapiens
agcaaatcaaaccca

SEQ ID NO: 1740364 - DNA, 15 bp, Homo sapiens
gcaaatcaaacccaa

SEQ ID NO: 1740365 - DNA, 15 bp, Homo sapiens
caaatcaaacccaaa

SEQ ID NO: 1740366 - DNA, 15 bp, Homo sapiens
aaatcaaacccaaaa

SEQ ID NO: 1740367 - DNA, 15 bp, Homo sapiens
aatcaaacccaaaat

SEQ ID NO: 1740368 - DNA, 15 bp, Homo sapiens
atcaaacccaaaatt

SEQ ID NO: 1740369 - DNA, 15 bp, Homo sapiens
tcaaacccaaaatta

SEQ ID NO: 1740370 - DNA, 15 bp, Homo sapiens
caaacccaaaattag

SEQ ID NO: 1740371 - DNA, 15 bp, Homo sapiens
aaacccaaaattagt

SEQ ID NO: 1740372 - DNA, 15 bp, Homo sapiens
aacccaaaattagta

SEQ ID NO: 1740373 - DNA, 15 bp, Homo sapiens
acccaaaattagtag

SEQ ID NO: 1740374 - DNA, 15 bp, Homo sapiens
cccaaaattagtaga

SEQ ID NO: 1740375 - DNA, 15 bp, Homo sapiens
ccaaaattagtagaa

SEQ ID NO: 1740376 - DNA, 15 bp, Homo sapiens
caaaattagtagaag

SEQ ID NO: 1740377 - DNA, 15 bp, Homo sapiens
aaaattagtagaaga

SEQ ID NO: 1740378 - DNA, 15 bp, Homo sapiens
aaattagtagaagaa

SEQ ID NO: 1740379 - DNA, 15 bp, Homo sapiens
aattagtagaagaaa

SEQ ID NO: 1740380 - DNA, 15 bp, Homo sapiens
attagtagaagaaaa

SEQ ID NO: 1740381 - DNA, 15 bp, Homo sapiens
ttagtagaagaaaag

SEQ ID NO: 1740382 - DNA, 15 bp, Homo sapiens
tagtagaagaaaaga

SEQ ID NO: 1740383 - DNA, 15 bp, Homo sapiens
gtagaagaaaagaaa

SEQ ID NO: 1740384 - DNA, 15 bp, Homo sapiens
tagaagaaaagaaag

SEQ ID NO: 1740385 - DNA, 15 bp, Homo sapiens
gaagaaaagaaagat

SEQ ID NO: 1740386 - DNA, 15 bp, Homo sapiens
aagaaaagaaagatc

SEQ ID NO: 1740387 - DNA, 15 bp, Homo sapiens
agaaaagaaagatcg

SEQ ID NO: 1740388 - DNA, 15 bp, Homo sapiens
gaaaagaaagatcga

SEQ ID NO: 1740389 - DNA, 15 bp, Homo sapiens
aaaagaaagatcgag

SEQ ID NO: 1740390 - DNA, 15 bp, Homo sapiens
aaagaaagatcgagc

SEQ ID NO: 1740391 - DNA, 15 bp, Homo sapiens
aagaaagatcgagca

SEQ ID NO: 1740392 - DNA, 15 bp, Homo sapiens
agaaagatcgagcag

SEQ ID NO: 1740393 - DNA, 15 bp, Homo sapiens
gaaagatcgagcaga

SEQ ID NO: 1740394 - DNA, 15 bp, Homo sapiens
aaagatcgagcagaa

SEQ ID NO: 1740395 - DNA, 15 bp, Homo sapiens
aagatcgagcagaaa

SEQ ID NO: 1740396 - DNA, 15 bp, Homo sapiens
agatcgagcagaaat

SEQ ID NO: 1740397 - DNA, 15 bp, Homo sapiens
gatcgagcagaaata

SEQ ID NO: 1740398 - DNA, 15 bp, Homo sapiens
atcgagcagaaataa

SEQ ID NO: 1740399 - DNA, 15 bp, Homo sapiens
tcgagcagaaataaa

SEQ ID NO: 1740400 - DNA, 15 bp, Homo sapiens
cgagcagaaataaat

SEQ ID NO: 1740401 - DNA, 15 bp, Homo sapiens
gagcagaaataaatg

SEQ ID NO: 1740402 - DNA, 15 bp, Homo sapiens
agaaataaatgaaat

SEQ ID NO: 1740403 - DNA, 15 bp, Homo sapiens
gaaataaatgaaatt

SEQ ID NO: 1740404 - DNA, 15 bp, Homo sapiens
aaataaatgaaattg

SEQ ID NO: 1740405 - DNA, 15 bp, Homo sapiens
aataaatgaaattgc

SEQ ID NO: 1740406 - DNA, 15 bp, Homo sapiens
ataaatgaaattgca

SEQ ID NO: 1740407 - DNA, 15 bp, Homo sapiens
taaatgaaattgcaa

SEQ ID NO: 1740408 - DNA, 15 bp, Homo sapiens
aaatgaaattgcaat

SEQ ID NO: 1740409 - DNA, 15 bp, Homo sapiens
aatgaaattgcaatg

SEQ ID NO: 1740410 - DNA, 15 bp, Homo sapiens
atgaaattgcaatga

SEQ ID NO: 1740411 - DNA, 15 bp, Homo sapiens
tgaaattgcaatgaa

SEQ ID NO: 1740412 - DNA, 15 bp, Homo sapiens
gaaattgcaatgaaa

SEQ ID NO: 1740413 - DNA, 15 bp, Homo sapiens
aaattgcaatgaaaa

SEQ ID NO: 1740414 - DNA, 15 bp, Homo sapiens
aattgcaatgaaaaa

SEQ ID NO: 1740415 - DNA, 15 bp, Homo sapiens
attgcaatgaaaaaa

SEQ ID NO: 1740416 - DNA, 15 bp, Homo sapiens
ttgcaatgaaaaaat

SEQ ID NO: 1740417 - DNA, 15 bp, Homo sapiens
tgcaatgaaaaaatt

SEQ ID NO: 1740418 - DNA, 15 bp, Homo sapiens
gcaatgaaaaaattg

SEQ ID NO: 1740419 - DNA, 15 bp, Homo sapiens
caatgaaaaaattgc

SEQ ID NO: 1740420 - DNA, 15 bp, Homo sapiens
aatgaaaaaattgca

SEQ ID NO: 1740421 - DNA, 15 bp, Homo sapiens
atgaaaaaattgcaa

SEQ ID NO: 1740422 - DNA, 15 bp, Homo sapiens
tgaaaaaattgcaaa

SEQ ID NO: 1740423 - DNA, 15 bp, Homo sapiens
gaaaaaattgcaaaa

SEQ ID NO: 1740424 - DNA, 15 bp, Homo sapiens
aaaaaattgcaaaag

SEQ ID NO: 1740425 - DNA, 15 bp, Homo sapiens
aaaaattgcaaaaga

SEQ ID NO: 1740426 - DNA, 15 bp, Homo sapiens
aaaattgcaaaagat

SEQ ID NO: 1740427 - DNA, 15 bp, Homo sapiens
aaattgcaaaagatc

SEQ ID NO: 1740428 - DNA, 15 bp, Homo sapiens
aattgcaaaagatca

SEQ ID NO: 1740429 - DNA, 15 bp, Homo sapiens
attgcaaaagatcaa

SEQ ID NO: 1740430 - DNA, 15 bp, Homo sapiens
ttgcaaaagatcaat

SEQ ID NO: 1740431 - DNA, 15 bp, Homo sapiens
tgcaaaagatcaatg

SEQ ID NO: 1740432 - DNA, 15 bp, Homo sapiens
gcaaaagatcaatga

SEQ ID NO: 1740433 - DNA, 15 bp, Homo sapiens
caaaagatcaatgaa

SEQ ID NO: 1740434 - DNA, 15 bp, Homo sapiens
aaaagatcaatgaaa

SEQ ID NO: 1740435 - DNA, 15 bp, Homo sapiens
aaagatcaatgaaac

SEQ ID NO: 1740436 - DNA, 15 bp, Homo sapiens
aagatcaatgaaaca

SEQ ID NO: 1740437 - DNA, 15 bp, Homo sapiens
agatcaatgaaacaa

SEQ ID NO: 1740438 - DNA, 15 bp, Homo sapiens
gatcaatgaaacaaa

SEQ ID NO: 1740439 - DNA, 15 bp, Homo sapiens
atcaatgaaacaaag

SEQ ID NO: 1740440 - DNA, 15 bp, Homo sapiens
tcaatgaaacaaagt

SEQ ID NO: 1740441 - DNA, 15 bp, Homo sapiens
caatgaaacaaagtg

SEQ ID NO: 1740442 - DNA, 15 bp, Homo sapiens
aatgaaacaaagtgt

SEQ ID NO: 1740443 - DNA, 15 bp, Homo sapiens
atgaaacaaagtgtt

SEQ ID NO: 1740444 - DNA, 15 bp, Homo sapiens
tgaaacaaagtgttt

SEQ ID NO: 1740445 - DNA, 15 bp, Homo sapiens
gaaacaaagtgtttt

SEQ ID NO: 1740446 - DNA, 15 bp, Homo sapiens
aaacaaagtgttttt

SEQ ID NO: 1740447 - DNA, 15 bp, Homo sapiens
aacaaagtgtttttt

SEQ ID NO: 1740448 - DNA, 15 bp, Homo sapiens
acaaagtgttttttt

SEQ ID NO: 1740449 - DNA, 15 bp, Homo sapiens
caaagtgttttttta

SEQ ID NO: 1740450 - DNA, 15 bp, Homo sapiens
aaagtgtttttttaa

SEQ ID NO: 1740451 - DNA, 15 bp, Homo sapiens
aagtgtttttttaaa

SEQ ID NO: 1740452 - DNA, 15 bp, Homo sapiens
agtgtttttttaaaa

SEQ ID NO: 1740453 - DNA, 15 bp, Homo sapiens
gtgtttttttaaaaa

SEQ ID NO: 1740454 - DNA, 15 bp, Homo sapiens
tgtttttttaaaaag

SEQ ID NO: 1740455 - DNA, 15 bp, Homo sapiens
gtttttttaaaaagt

SEQ ID NO: 1740456 - DNA, 15 bp, Homo sapiens
tttttttaaaaagtt

SEQ ID NO: 1740457 - DNA, 15 bp, Homo sapiens
ttttttaaaaagtta

SEQ ID NO: 1740458 - DNA, 15 bp, Homo sapiens
tttttaaaaagttaa

SEQ ID NO: 1740459 - DNA, 15 bp, Homo sapiens
ttttaaaaagttaaa

SEQ ID NO: 1740460 - DNA, 15 bp, Homo sapiens
tttaaaaagttaaac

SEQ ID NO: 1740461 - DNA, 15 bp, Homo sapiens
ttaaaaagttaaaca

SEQ ID NO: 1740462 - DNA, 15 bp, Homo sapiens
taaaaagttaaacaa

SEQ ID NO: 1740463 - DNA, 15 bp, Homo sapiens
aaaaagttaaacaaa

SEQ ID NO: 1740464 - DNA, 15 bp, Homo sapiens
aaaagttaaacaaaa

SEQ ID NO: 1740465 - DNA, 15 bp, Homo sapiens
aaagttaaacaaaat

SEQ ID NO: 1740466 - DNA, 15 bp, Homo sapiens
aagttaaacaaaatt

SEQ ID NO: 1740467 - DNA, 15 bp, Homo sapiens
agttaaacaaaattg

SEQ ID NO: 1740468 - DNA, 15 bp, Homo sapiens
gttaaacaaaattga

SEQ ID NO: 1740469 - DNA, 15 bp, Homo sapiens
ttaaacaaaattgac

SEQ ID NO: 1740470 - DNA, 15 bp, Homo sapiens
taaacaaaattgaca

SEQ ID NO: 1740471 - DNA, 15 bp, Homo sapiens
aaacaaaattgacaa

SEQ ID NO: 1740472 - DNA, 15 bp, Homo sapiens
aacaaaattgacaag

SEQ ID NO: 1740473 - DNA, 15 bp, Homo sapiens
acaaaattgacaagc

SEQ ID NO: 1740474 - DNA, 15 bp, Homo sapiens
caaaattgacaagcc

SEQ ID NO: 1740475 - DNA, 15 bp, Homo sapiens
aaaattgacaagcct

SEQ ID NO: 1740476 - DNA, 15 bp, Homo sapiens
aaattgacaagcctt

SEQ ID NO: 1740477 - DNA, 15 bp, Homo sapiens
aattgacaagccttt

SEQ ID NO: 1740478 - DNA, 15 bp, Homo sapiens
attgacaagccttta

SEQ ID NO: 1740479 - DNA, 15 bp, Homo sapiens
ttgacaagcctttag

SEQ ID NO: 1740480 - DNA, 15 bp, Homo sapiens
tgacaagcctttagc

SEQ ID NO: 1740481 - DNA, 15 bp, Homo sapiens
gacaagcctttagct

SEQ ID NO: 1740482 - DNA, 15 bp, Homo sapiens
acaagcctttagcta

SEQ ID NO: 1740483 - DNA, 15 bp, Homo sapiens
caagcctttagctag

SEQ ID NO: 1740484 - DNA, 15 bp, Homo sapiens
aagcctttagctaga

SEQ ID NO: 1740485 - DNA, 15 bp, Homo sapiens
agcctttagctagat

SEQ ID NO: 1740486 - DNA, 15 bp, Homo sapiens
gcctttagctagatt

SEQ ID NO: 1740487 - DNA, 15 bp, Homo sapiens
cctttagctagatta

SEQ ID NO: 1740488 - DNA, 15 bp, Homo sapiens
ctttagctagattaa

SEQ ID NO: 1740489 - DNA, 15 bp, Homo sapiens
tttagctagattaac

SEQ ID NO: 1740490 - DNA, 15 bp, Homo sapiens
ttagctagattaact

SEQ ID NO: 1740491 - DNA, 15 bp, Homo sapiens
tagctagattaacta

SEQ ID NO: 1740492 - DNA, 15 bp, Homo sapiens
agctagattaactaa

SEQ ID NO: 1740493 - DNA, 15 bp, Homo sapiens
gctagattaactaag

SEQ ID NO: 1740494 - DNA, 15 bp, Homo sapiens
ctagattaactaagg

SEQ ID NO: 1740495 - DNA, 15 bp, Homo sapiens
tagattaactaagga

SEQ ID NO: 1740496 - DNA, 15 bp, Homo sapiens
agattaactaaggaa

SEQ ID NO: 1740497 - DNA, 15 bp, Homo sapiens
gattaactaaggaaa

SEQ ID NO: 1740498 - DNA, 15 bp, Homo sapiens
attaactaaggaaaa

SEQ ID NO: 1740499 - DNA, 15 bp, Homo sapiens
ttaactaaggaaaaa

SEQ ID NO: 1740500 - DNA, 15 bp, Homo sapiens
taactaaggaaaaaa

SEQ ID NO: 1740501 - DNA, 15 bp, Homo sapiens
aactaaggaaaaaag

SEQ ID NO: 1740502 - DNA, 15 bp, Homo sapiens
actaaggaaaaaaga

SEQ ID NO: 1740503 - DNA, 15 bp, Homo sapiens
ctaaggaaaaaagag

SEQ ID NO: 1740504 - DNA, 15 bp, Homo sapiens
taaggaaaaaagaga

SEQ ID NO: 1740505 - DNA, 15 bp, Homo sapiens
aaggaaaaaagagag

SEQ ID NO: 1740506 - DNA, 15 bp, Homo sapiens
aggaaaaaagagaga

SEQ ID NO: 1740507 - DNA, 15 bp, Homo sapiens
ggaaaaaagagagaa

SEQ ID NO: 1740508 - DNA, 15 bp, Homo sapiens
gaaaaaagagagaag

SEQ ID NO: 1740509 - DNA, 15 bp, Homo sapiens
aaaaaagagagaaga

SEQ ID NO: 1740510 - DNA, 15 bp, Homo sapiens
aaaaagagagaagat

SEQ ID NO: 1740511 - DNA, 15 bp, Homo sapiens
aaaagagagaagata

SEQ ID NO: 1740512 - DNA, 15 bp, Homo sapiens
aaagagagaagatac

SEQ ID NO: 1740513 - DNA, 15 bp, Homo sapiens
aagagagaagataca

SEQ ID NO: 1740514 - DNA, 15 bp, Homo sapiens
agagagaagatacaa

SEQ ID NO: 1740515 - DNA, 15 bp, Homo sapiens
gagagaagatacaaa

SEQ ID NO: 1740516 - DNA, 15 bp, Homo sapiens
agagaagatacaaat

SEQ ID NO: 1740517 - DNA, 15 bp, Homo sapiens
gagaagatacaaata

SEQ ID NO: 1740518 - DNA, 15 bp, Homo sapiens
agaagatacaaataa

SEQ ID NO: 1740519 - DNA, 15 bp, Homo sapiens
gaagatacaaataag

SEQ ID NO: 1740520 - DNA, 15 bp, Homo sapiens
aagatacaaataaga

SEQ ID NO: 1740521 - DNA, 15 bp, Homo sapiens
agatacaaataagat

SEQ ID NO: 1740522 - DNA, 15 bp, Homo sapiens
gatacaaataagatc

SEQ ID NO: 1740523 - DNA, 15 bp, Homo sapiens
atacaaataagatca

SEQ ID NO: 1740524 - DNA, 15 bp, Homo sapiens
tacaaataagatcag

SEQ ID NO: 1740525 - DNA, 15 bp, Homo sapiens
acaaataagatcaga

SEQ ID NO: 1740526 - DNA, 15 bp, Homo sapiens
caaataagatcagaa

SEQ ID NO: 1740527 - DNA, 15 bp, Homo sapiens
aaataagatcagaaa

SEQ ID NO: 1740528 - DNA, 15 bp, Homo sapiens
aataagatcagaaat

SEQ ID NO: 1740529 - DNA, 15 bp, Homo sapiens
ataagatcagaaatg

SEQ ID NO: 1740530 - DNA, 15 bp, Homo sapiens
taagatcagaaatga

SEQ ID NO: 1740531 - DNA, 15 bp, Homo sapiens
aagatcagaaatgaa

SEQ ID NO: 1740532 - DNA, 15 bp, Homo sapiens
agatcagaaatgaaa

SEQ ID NO: 1740533 - DNA, 15 bp, Homo sapiens
gatcagaaatgaaaa

SEQ ID NO: 1740534 - DNA, 15 bp, Homo sapiens
atcagaaatgaaaaa

SEQ ID NO: 1740535 - DNA, 15 bp, Homo sapiens
tcagaaatgaaaaag

SEQ ID NO: 1740536 - DNA, 15 bp, Homo sapiens
cagaaatgaaaaagg

SEQ ID NO: 1740537 - DNA, 15 bp, Homo sapiens
agaaatgaaaaagga

SEQ ID NO: 1740538 - DNA, 15 bp, Homo sapiens
gaaatgaaaaaggag

SEQ ID NO: 1740539 - DNA, 15 bp, Homo sapiens
aaatgaaaaaggaga

SEQ ID NO: 1740540 - DNA, 15 bp, Homo sapiens
aatgaaaaaggagac

SEQ ID NO: 1740541 - DNA, 15 bp, Homo sapiens
atgaaaaaggagaca

SEQ ID NO: 1740542 - DNA, 15 bp, Homo sapiens
tgaaaaaggagacat

SEQ ID NO: 1740543 - DNA, 15 bp, Homo sapiens
gaaaaaggagacatt

SEQ ID NO: 1740544 - DNA, 15 bp, Homo sapiens
aaaaaggagacatta

SEQ ID NO: 1740545 - DNA, 15 bp, Homo sapiens
aaaaggagacattac

SEQ ID NO: 1740546 - DNA, 15 bp, Homo sapiens
aaaggagacattaca

SEQ ID NO: 1740547 - DNA, 15 bp, Homo sapiens
aaggagacattacag

SEQ ID NO: 1740548 - DNA, 15 bp, Homo sapiens
aggagacattacagc

SEQ ID NO: 1740549 - DNA, 15 bp, Homo sapiens
ggagacattacagct

SEQ ID NO: 1740550 - DNA, 15 bp, Homo sapiens
gagacattacagctg

SEQ ID NO: 1740551 - DNA, 15 bp, Homo sapiens
agacattacagctga

SEQ ID NO: 1740552 - DNA, 15 bp, Homo sapiens
gacattacagctgat

SEQ ID NO: 1740553 - DNA, 15 bp, Homo sapiens
acattacagctgata

SEQ ID NO: 1740554 - DNA, 15 bp, Homo sapiens
cattacagctgatac

SEQ ID NO: 1740555 - DNA, 15 bp, Homo sapiens
attacagctgatact

SEQ ID NO: 1740556 - DNA, 15 bp, Homo sapiens
ttacagctgatactg

SEQ ID NO: 1740557 - DNA, 15 bp, Homo sapiens
tacagctgatactgc

SEQ ID NO: 1740558 - DNA, 15 bp, Homo sapiens
acagctgatactgca

SEQ ID NO: 1740559 - DNA, 15 bp, Homo sapiens
cagctgatactgcag

SEQ ID NO: 1740560 - DNA, 15 bp, Homo sapiens
agctgatactgcaga

SEQ ID NO: 1740561 - DNA, 15 bp, Homo sapiens
gctgatactgcagaa

SEQ ID NO: 1740562 - DNA, 15 bp, Homo sapiens
ctgatactgcagaaa

SEQ ID NO: 1740563 - DNA, 15 bp, Homo sapiens
tgatactgcagaaac

SEQ ID NO: 1740564 - DNA, 15 bp, Homo sapiens
gatactgcagaaact

SEQ ID NO: 1740565 - DNA, 15 bp, Homo sapiens
atactgcagaaacta

SEQ ID NO: 1740566 - DNA, 15 bp, Homo sapiens
tactgcagaaactaa

SEQ ID NO: 1740567 - DNA, 15 bp, Homo sapiens
actgcagaaactaaa

SEQ ID NO: 1740568 - DNA, 15 bp, Homo sapiens
ctgcagaaactaaaa

SEQ ID NO: 1740569 - DNA, 15 bp, Homo sapiens
tgcagaaactaaaag

SEQ ID NO: 1740570 - DNA, 15 bp, Homo sapiens
gcagaaactaaaagt

SEQ ID NO: 1740571 - DNA, 15 bp, Homo sapiens
cagaaactaaaagta

SEQ ID NO: 1740572 - DNA, 15 bp, Homo sapiens
agaaactaaaagtat

SEQ ID NO: 1740573 - DNA, 15 bp, Homo sapiens
gaaactaaaagtatc

SEQ ID NO: 1740574 - DNA, 15 bp, Homo sapiens
aaactaaaagtatca

SEQ ID NO: 1740575 - DNA, 15 bp, Homo sapiens
aactaaaagtatcat

SEQ ID NO: 1740576 - DNA, 15 bp, Homo sapiens
actaaaagtatcatt

SEQ ID NO: 1740577 - DNA, 15 bp, Homo sapiens
ctaaaagtatcatta

SEQ ID NO: 1740578 - DNA, 15 bp, Homo sapiens
taaaagtatcattag

SEQ ID NO: 1740579 - DNA, 15 bp, Homo sapiens
aaaagtatcattagt

SEQ ID NO: 1740580 - DNA, 15 bp, Homo sapiens
aaagtatcattagtg

SEQ ID NO: 1740581 - DNA, 15 bp, Homo sapiens
aagtatcattagtgg

SEQ ID NO: 1740582 - DNA, 15 bp, Homo sapiens
agtatcattagtggc

SEQ ID NO: 1740583 - DNA, 15 bp, Homo sapiens
gtatcattagtggct

SEQ ID NO: 1740584 - DNA, 15 bp, Homo sapiens
tatcattagtggctt

SEQ ID NO: 1740585 - DNA, 15 bp, Homo sapiens
atcattagtggcttc

SEQ ID NO: 1740586 - DNA, 15 bp, Homo sapiens
tcattagtggcttct

SEQ ID NO: 1740587 - DNA, 15 bp, Homo sapiens
cattagtggcttcta

SEQ ID NO: 1740588 - DNA, 15 bp, Homo sapiens
attagtggcttctat

SEQ ID NO: 1740589 - DNA, 15 bp, Homo sapiens
ttagtggcttctata

SEQ ID NO: 1740590 - DNA, 15 bp, Homo sapiens
tagtggcttctataa

SEQ ID NO: 1740591 - DNA, 15 bp, Homo sapiens
agtggcttctataag

SEQ ID NO: 1740592 - DNA, 15 bp, Homo sapiens
gtggcttctataagc

SEQ ID NO: 1740593 - DNA, 15 bp, Homo sapiens
tggcttctataagca

SEQ ID NO: 1740594 - DNA, 15 bp, Homo sapiens
ggcttctataagcaa

SEQ ID NO: 1740595 - DNA, 15 bp, Homo sapiens
gcttctataagcaac

SEQ ID NO: 1740596 - DNA, 15 bp, Homo sapiens
cttctataagcaact

SEQ ID NO: 1740597 - DNA, 15 bp, Homo sapiens
ttctataagcaacta

SEQ ID NO: 1740598 - DNA, 15 bp, Homo sapiens
tctataagcaactat

SEQ ID NO: 1740599 - DNA, 15 bp, Homo sapiens
ctataagcaactata

SEQ ID NO: 1740600 - DNA, 15 bp, Homo sapiens
tataagcaactatat

SEQ ID NO: 1740601 - DNA, 15 bp, Homo sapiens
ataagcaactatatg

SEQ ID NO: 1740602 - DNA, 15 bp, Homo sapiens
taagcaactatatgc

SEQ ID NO: 1740603 - DNA, 15 bp, Homo sapiens
aagcaactatatgcc

SEQ ID NO: 1740604 - DNA, 15 bp, Homo sapiens
agcaactatatgcca

SEQ ID NO: 1740605 - DNA, 15 bp, Homo sapiens
gcaactatatgccaa

SEQ ID NO: 1740606 - DNA, 15 bp, Homo sapiens
caactatatgccaat

SEQ ID NO: 1740607 - DNA, 15 bp, Homo sapiens
aactatatgccaata

SEQ ID NO: 1740608 - DNA, 15 bp, Homo sapiens
actatatgccaataa

SEQ ID NO: 1740609 - DNA, 15 bp, Homo sapiens
ctatatgccaataaa

SEQ ID NO: 1740610 - DNA, 15 bp, Homo sapiens
tatatgccaataaac

SEQ ID NO: 1740611 - DNA, 15 bp, Homo sapiens
atatgccaataaact

SEQ ID NO: 1740612 - DNA, 15 bp, Homo sapiens
tatgccaataaactg

SEQ ID NO: 1740613 - DNA, 15 bp, Homo sapiens
atgccaataaactgg

SEQ ID NO: 1740614 - DNA, 15 bp, Homo sapiens
tgccaataaactgga

SEQ ID NO: 1740615 - DNA, 15 bp, Homo sapiens
gccaataaactggaa

SEQ ID NO: 1740616 - DNA, 15 bp, Homo sapiens
ccaataaactggaaa

SEQ ID NO: 1740617 - DNA, 15 bp, Homo sapiens
caataaactggaaaa

SEQ ID NO: 1740618 - DNA, 15 bp, Homo sapiens
aataaactggaaaat

SEQ ID NO: 1740619 - DNA, 15 bp, Homo sapiens
ataaactggaaaata

SEQ ID NO: 1740620 - DNA, 15 bp, Homo sapiens
taaactggaaaatat

SEQ ID NO: 1740621 - DNA, 15 bp, Homo sapiens
aaactggaaaatata

SEQ ID NO: 1740622 - DNA, 15 bp, Homo sapiens
aactggaaaatatag

SEQ ID NO: 1740623 - DNA, 15 bp, Homo sapiens
actggaaaatataga

SEQ ID NO: 1740624 - DNA, 15 bp, Homo sapiens
ctggaaaatatagaa

SEQ ID NO: 1740625 - DNA, 15 bp, Homo sapiens
tggaaaatatagaag

SEQ ID NO: 1740626 - DNA, 15 bp, Homo sapiens
ggaaaatatagaaga

SEQ ID NO: 1740627 - DNA, 15 bp, Homo sapiens
gaaaatatagaagaa

SEQ ID NO: 1740628 - DNA, 15 bp, Homo sapiens
aaaatatagaagaaa

SEQ ID NO: 1740629 - DNA, 15 bp, Homo sapiens
aaatatagaagaaat

SEQ ID NO: 1740630 - DNA, 15 bp, Homo sapiens
aatatagaagaaatg

SEQ ID NO: 1740631 - DNA, 15 bp, Homo sapiens
atatagaagaaatgg

SEQ ID NO: 1740632 - DNA, 15 bp, Homo sapiens
tatagaagaaatggg

SEQ ID NO: 1740633 - DNA, 15 bp, Homo sapiens
atagaagaaatgggc

SEQ ID NO: 1740634 - DNA, 15 bp, Homo sapiens
tagaagaaatgggca

SEQ ID NO: 1740635 - DNA, 15 bp, Homo sapiens
agaagaaatgggcaa

SEQ ID NO: 1740636 - DNA, 15 bp, Homo sapiens
gaagaaatgggcaaa

SEQ ID NO: 1740637 - DNA, 15 bp, Homo sapiens
aagaaatgggcaaat

SEQ ID NO: 1740638 - DNA, 15 bp, Homo sapiens
agaaatgggcaaatt

SEQ ID NO: 1740639 - DNA, 15 bp, Homo sapiens
gaaatgggcaaattc

SEQ ID NO: 1740640 - DNA, 15 bp, Homo sapiens
aaatgggcaaattcc

SEQ ID NO: 1740641 - DNA, 15 bp, Homo sapiens
aatgggcaaattcct

SEQ ID NO: 1740642 - DNA, 15 bp, Homo sapiens
atgggcaaattccta

SEQ ID NO: 1740643 - DNA, 15 bp, Homo sapiens
tgggcaaattcctag

SEQ ID NO: 1740644 - DNA, 15 bp, Homo sapiens
gggcaaattcctaga

SEQ ID NO: 1740645 - DNA, 15 bp, Homo sapiens
ggcaaattcctagac

SEQ ID NO: 1740646 - DNA, 15 bp, Homo sapiens
gcaaattcctagaca

SEQ ID NO: 1740647 - DNA, 15 bp, Homo sapiens
caaattcctagacat

SEQ ID NO: 1740648 - DNA, 15 bp, Homo sapiens
aaattcctagacatg

SEQ ID NO: 1740649 - DNA, 15 bp, Homo sapiens
aattcctagacatgt

SEQ ID NO: 1740650 - DNA, 15 bp, Homo sapiens
attcctagacatgta

SEQ ID NO: 1740651 - DNA, 15 bp, Homo sapiens
ttcctagacatgtac

SEQ ID NO: 1740652 - DNA, 15 bp, Homo sapiens
tcctagacatgtaca

SEQ ID NO: 1740653 - DNA, 15 bp, Homo sapiens
cctagacatgtacaa

SEQ ID NO: 1740654 - DNA, 15 bp, Homo sapiens
ctagacatgtacaac

SEQ ID NO: 1740655 - DNA, 15 bp, Homo sapiens
tagacatgtacaact

SEQ ID NO: 1740656 - DNA, 15 bp, Homo sapiens
agacatgtacaactt

SEQ ID NO: 1740657 - DNA, 15 bp, Homo sapiens
gacatgtacaactta

SEQ ID NO: 1740658 - DNA, 15 bp, Homo sapiens
acatgtacaacttac

SEQ ID NO: 1740659 - DNA, 15 bp, Homo sapiens
catgtacaacttacc

SEQ ID NO: 1740660 - DNA, 15 bp, Homo sapiens
atgtacaacttacca

SEQ ID NO: 1740661 - DNA, 15 bp, Homo sapiens
tgtacaacttaccaa

SEQ ID NO: 1740662 - DNA, 15 bp, Homo sapiens
gtacaacttaccaag

SEQ ID NO: 1740663 - DNA, 15 bp, Homo sapiens
tacaacttaccaaga

SEQ ID NO: 1740664 - DNA, 15 bp, Homo sapiens
acaacttaccaagat

SEQ ID NO: 1740665 - DNA, 15 bp, Homo sapiens
caacttaccaagatt

SEQ ID NO: 1740666 - DNA, 15 bp, Homo sapiens
aacttaccaagattg

SEQ ID NO: 1740667 - DNA, 15 bp, Homo sapiens
acttaccaagattga

SEQ ID NO: 1740668 - DNA, 15 bp, Homo sapiens
cttaccaagattgaa

SEQ ID NO: 1740669 - DNA, 15 bp, Homo sapiens
ttaccaagattgaac

SEQ ID NO: 1740670 - DNA, 15 bp, Homo sapiens
taccaagattgaacc

SEQ ID NO: 1740671 - DNA, 15 bp, Homo sapiens
accaagattgaacca

SEQ ID NO: 1740672 - DNA, 15 bp, Homo sapiens
ccaagattgaaccag

SEQ ID NO: 1740673 - DNA, 15 bp, Homo sapiens
caagattgaaccagg

SEQ ID NO: 1740674 - DNA, 15 bp, Homo sapiens
aagattgaaccagga

SEQ ID NO: 1740675 - DNA, 15 bp, Homo sapiens
agattgaaccaggaa

SEQ ID NO: 1740676 - DNA, 15 bp, Homo sapiens
gattgaaccaggaag

SEQ ID NO: 1740677 - DNA, 15 bp, Homo sapiens
attgaaccaggaaga

SEQ ID NO: 1740678 - DNA, 15 bp, Homo sapiens
ttgaaccaggaagaa

SEQ ID NO: 1740679 - DNA, 15 bp, Homo sapiens
tgaaccaggaagaaa

SEQ ID NO: 1740680 - DNA, 15 bp, Homo sapiens
gaaccaggaagaaat

SEQ ID NO: 1740681 - DNA, 15 bp, Homo sapiens
aaccaggaagaaatc

SEQ ID NO: 1740682 - DNA, 15 bp, Homo sapiens
accaggaagaaatcc

SEQ ID NO: 1740683 - DNA, 15 bp, Homo sapiens
ccaggaagaaatcca

SEQ ID NO: 1740684 - DNA, 15 bp, Homo sapiens
caggaagaaatccaa

SEQ ID NO: 1740685 - DNA, 15 bp, Homo sapiens
aggaagaaatccaaa

SEQ ID NO: 1740686 - DNA, 15 bp, Homo sapiens
ggaagaaatccaaaa

SEQ ID NO: 1740687 - DNA, 15 bp, Homo sapiens
gaagaaatccaaaac

SEQ ID NO: 1740688 - DNA, 15 bp, Homo sapiens
aagaaatccaaaacc

SEQ ID NO: 1740689 - DNA, 15 bp, Homo sapiens
agaaatccaaaacct

SEQ ID NO: 1740690 - DNA, 15 bp, Homo sapiens
gaaatccaaaacctg

SEQ ID NO: 1740691 - DNA, 15 bp, Homo sapiens
aaatccaaaacctga

SEQ ID NO: 1740692 - DNA, 15 bp, Homo sapiens
aatccaaaacctgaa

SEQ ID NO: 1740693 - DNA, 15 bp, Homo sapiens
atccaaaacctgaac

SEQ ID NO: 1740694 - DNA, 15 bp, Homo sapiens
tccaaaacctgaaca

SEQ ID NO: 1740695 - DNA, 15 bp, Homo sapiens
ccaaaacctgaacag

SEQ ID NO: 1740696 - DNA, 15 bp, Homo sapiens
caaaacctgaacaga

SEQ ID NO: 1740697 - DNA, 15 bp, Homo sapiens
aaaacctgaacagac

SEQ ID NO: 1740698 - DNA, 15 bp, Homo sapiens
aaacctgaacagacc

SEQ ID NO: 1740699 - DNA, 15 bp, Homo sapiens
aacctgaacagacca

SEQ ID NO: 1740700 - DNA, 15 bp, Homo sapiens
acctgaacagaccaa

SEQ ID NO: 1740701 - DNA, 15 bp, Homo sapiens
cctgaacagaccaat

SEQ ID NO: 1740702 - DNA, 15 bp, Homo sapiens
ctgaacagaccaata

SEQ ID NO: 1740703 - DNA, 15 bp, Homo sapiens
tgaacagaccaataa

SEQ ID NO: 1740704 - DNA, 15 bp, Homo sapiens
gaacagaccaataac

SEQ ID NO: 1740705 - DNA, 15 bp, Homo sapiens
aacagaccaataaca

SEQ ID NO: 1740706 - DNA, 15 bp, Homo sapiens
acagaccaataacaa

SEQ ID NO: 1740707 - DNA, 15 bp, Homo sapiens
cagaccaataacaag

SEQ ID NO: 1740708 - DNA, 15 bp, Homo sapiens
agaccaataacaagt

SEQ ID NO: 1740709 - DNA, 15 bp, Homo sapiens
gaccaataacaagta

SEQ ID NO: 1740710 - DNA, 15 bp, Homo sapiens
accaataacaagtaa

SEQ ID NO: 1740711 - DNA, 15 bp, Homo sapiens
ccaataacaagtaat

SEQ ID NO: 1740712 - DNA, 15 bp, Homo sapiens
caataacaagtaatg

SEQ ID NO: 1740713 - DNA, 15 bp, Homo sapiens
aataacaagtaatga

SEQ ID NO: 1740714 - DNA, 15 bp, Homo sapiens
ataacaagtaatgag

SEQ ID NO: 1740715 - DNA, 15 bp, Homo sapiens
taacaagtaatgaga

SEQ ID NO: 1740716 - DNA, 15 bp, Homo sapiens
aacaagtaatgagat

SEQ ID NO: 1740717 - DNA, 15 bp, Homo sapiens
acaagtaatgagatt

SEQ ID NO: 1740718 - DNA, 15 bp, Homo sapiens
caagtaatgagattg

SEQ ID NO: 1740719 - DNA, 15 bp, Homo sapiens
aagtaatgagattga

SEQ ID NO: 1740720 - DNA, 15 bp, Homo sapiens
agtaatgagattgaa

SEQ ID NO: 1740721 - DNA, 15 bp, Homo sapiens
gtaatgagattgaag

SEQ ID NO: 1740722 - DNA, 15 bp, Homo sapiens
taatgagattgaagc

SEQ ID NO: 1740723 - DNA, 15 bp, Homo sapiens
aatgagattgaagcc

SEQ ID NO: 1740724 - DNA, 15 bp, Homo sapiens
atgagattgaagcca

SEQ ID NO: 1740725 - DNA, 15 bp, Homo sapiens
tgagattgaagccat

SEQ ID NO: 1740726 - DNA, 15 bp, Homo sapiens
gagattgaagccata

SEQ ID NO: 1740727 - DNA, 15 bp, Homo sapiens
agattgaagccataa

SEQ ID NO: 1740728 - DNA, 15 bp, Homo sapiens
gattgaagccataat

SEQ ID NO: 1740729 - DNA, 15 bp, Homo sapiens
attgaagccataata

SEQ ID NO: 1740730 - DNA, 15 bp, Homo sapiens
ttgaagccataataa

SEQ ID NO: 1740731 - DNA, 15 bp, Homo sapiens
tgaagccataataaa

SEQ ID NO: 1740732 - DNA, 15 bp, Homo sapiens
gaagccataataaag

SEQ ID NO: 1740733 - DNA, 15 bp, Homo sapiens
aagccataataaagt

SEQ ID NO: 1740734 - DNA, 15 bp, Homo sapiens
agccataataaagtc

SEQ ID NO: 1740735 - DNA, 15 bp, Homo sapiens
gccataataaagtct

SEQ ID NO: 1740736 - DNA, 15 bp, Homo sapiens
ccataataaagtctc

SEQ ID NO: 1740737 - DNA, 15 bp, Homo sapiens
cataataaagtctcc

SEQ ID NO: 1740738 - DNA, 15 bp, Homo sapiens
ataataaagtctcct

SEQ ID NO: 1740739 - DNA, 15 bp, Homo sapiens
taataaagtctccta

SEQ ID NO: 1740740 - DNA, 15 bp, Homo sapiens
aataaagtctcctag

SEQ ID NO: 1740741 - DNA, 15 bp, Homo sapiens
ataaagtctcctagt

SEQ ID NO: 1740742 - DNA, 15 bp, Homo sapiens
taaagtctcctagta

SEQ ID NO: 1740743 - DNA, 15 bp, Homo sapiens
aaagtctcctagtaa

SEQ ID NO: 1740744 - DNA, 15 bp, Homo sapiens
aagtctcctagtaaa

SEQ ID NO: 1740745 - DNA, 15 bp, Homo sapiens
agtctcctagtaaag

SEQ ID NO: 1740746 - DNA, 15 bp, Homo sapiens
gtctcctagtaaaga

SEQ ID NO: 1740747 - DNA, 15 bp, Homo sapiens
tctcctagtaaagaa

SEQ ID NO: 1740748 - DNA, 15 bp, Homo sapiens
ctcctagtaaagaaa

SEQ ID NO: 1740749 - DNA, 15 bp, Homo sapiens
tcctagtaaagaaaa

SEQ ID NO: 1740750 - DNA, 15 bp, Homo sapiens
cctagtaaagaaaag

SEQ ID NO: 1740751 - DNA, 15 bp, Homo sapiens
ctagtaaagaaaagc

SEQ ID NO: 1740752 - DNA, 15 bp, Homo sapiens
tagtaaagaaaagcc

SEQ ID NO: 1740753 - DNA, 15 bp, Homo sapiens
agtaaagaaaagcct

SEQ ID NO: 1740754 - DNA, 15 bp, Homo sapiens
gtaaagaaaagcctg

SEQ ID NO: 1740755 - DNA, 15 bp, Homo sapiens
taaagaaaagcctgg

SEQ ID NO: 1740756 - DNA, 15 bp, Homo sapiens
aaagaaaagcctggg

SEQ ID NO: 1740757 - DNA, 15 bp, Homo sapiens
aagaaaagcctggga

SEQ ID NO: 1740758 - DNA, 15 bp, Homo sapiens
agaaaagcctgggac

SEQ ID NO: 1740759 - DNA, 15 bp, Homo sapiens
gaaaagcctgggacc

SEQ ID NO: 1740760 - DNA, 15 bp, Homo sapiens
aaaagcctgggacct

SEQ ID NO: 1740761 - DNA, 15 bp, Homo sapiens
aaagcctgggacctg

SEQ ID NO: 1740762 - DNA, 15 bp, Homo sapiens
aagcctgggacctga

SEQ ID NO: 1740763 - DNA, 15 bp, Homo sapiens
agcctgggacctgat

SEQ ID NO: 1740764 - DNA, 15 bp, Homo sapiens
gcctgggacctgatg

SEQ ID NO: 1740765 - DNA, 15 bp, Homo sapiens
cctgggacctgatgg

SEQ ID NO: 1740766 - DNA, 15 bp, Homo sapiens
ctgggacctgatggc

SEQ ID NO: 1740767 - DNA, 15 bp, Homo sapiens
tgggacctgatggct

SEQ ID NO: 1740768 - DNA, 15 bp, Homo sapiens
gggacctgatggctt

SEQ ID NO: 1740769 - DNA, 15 bp, Homo sapiens
tgatggcttcactgc

SEQ ID NO: 1740770 - DNA, 15 bp, Homo sapiens
gatggcttcactgct

SEQ ID NO: 1740771 - DNA, 15 bp, Homo sapiens
atggcttcactgctg

SEQ ID NO: 1740772 - DNA, 15 bp, Homo sapiens
tggcttcactgctga

SEQ ID NO: 1740773 - DNA, 15 bp, Homo sapiens
ggcttcactgctgaa

SEQ ID NO: 1740774 - DNA, 15 bp, Homo sapiens
gcttcactgctgaat

SEQ ID NO: 1740775 - DNA, 15 bp, Homo sapiens
cttcactgctgaatt

SEQ ID NO: 1740776 - DNA, 15 bp, Homo sapiens
ttcactgctgaattg

SEQ ID NO: 1740777 - DNA, 15 bp, Homo sapiens
tcactgctgaattgt

SEQ ID NO: 1740778 - DNA, 15 bp, Homo sapiens
cactgctgaattgta

SEQ ID NO: 1740779 - DNA, 15 bp, Homo sapiens
actgctgaattgtac

SEQ ID NO: 1740780 - DNA, 15 bp, Homo sapiens
ctgctgaattgtacc

SEQ ID NO: 1740781 - DNA, 15 bp, Homo sapiens
tgctgaattgtacca

SEQ ID NO: 1740782 - DNA, 15 bp, Homo sapiens
gctgaattgtaccaa

SEQ ID NO: 1740783 - DNA, 15 bp, Homo sapiens
ctgaattgtaccaaa

SEQ ID NO: 1740784 - DNA, 15 bp, Homo sapiens
tgaattgtaccaaac

SEQ ID NO: 1740785 - DNA, 15 bp, Homo sapiens
gaattgtaccaaaca

SEQ ID NO: 1740786 - DNA, 15 bp, Homo sapiens
aattgtaccaaacat

SEQ ID NO: 1740787 - DNA, 15 bp, Homo sapiens
attgtaccaaacatt

SEQ ID NO: 1740788 - DNA, 15 bp, Homo sapiens
ttgtaccaaacattt

SEQ ID NO: 1740789 - DNA, 15 bp, Homo sapiens
tgtaccaaacattta

SEQ ID NO: 1740790 - DNA, 15 bp, Homo sapiens
gtaccaaacatttaa

SEQ ID NO: 1740791 - DNA, 15 bp, Homo sapiens
taccaaacatttaaa

SEQ ID NO: 1740792 - DNA, 15 bp, Homo sapiens
accaaacatttaaag

SEQ ID NO: 1740793 - DNA, 15 bp, Homo sapiens
ccaaacatttaaaga

SEQ ID NO: 1740794 - DNA, 15 bp, Homo sapiens
caaacatttaaagaa

SEQ ID NO: 1740795 - DNA, 15 bp, Homo sapiens
aaacatttaaagaag

SEQ ID NO: 1740796 - DNA, 15 bp, Homo sapiens
aacatttaaagaaga

SEQ ID NO: 1740797 - DNA, 15 bp, Homo sapiens
acatttaaagaagaa

SEQ ID NO: 1740798 - DNA, 15 bp, Homo sapiens
catttaaagaagaac

SEQ ID NO: 1740799 - DNA, 15 bp, Homo sapiens
atttaaagaagaact

SEQ ID NO: 1740800 - DNA, 15 bp, Homo sapiens
tttaaagaagaacta

SEQ ID NO: 1740801 - DNA, 15 bp, Homo sapiens
ttaaagaagaactaa

SEQ ID NO: 1740802 - DNA, 15 bp, Homo sapiens
taaagaagaactaat

SEQ ID NO: 1740803 - DNA, 15 bp, Homo sapiens
aagaagaactaatac

SEQ ID NO: 1740804 - DNA, 15 bp, Homo sapiens
agaagaactaatacc

SEQ ID NO: 1740805 - DNA, 15 bp, Homo sapiens
gaagaactaatacca

SEQ ID NO: 1740806 - DNA, 15 bp, Homo sapiens
aagaactaataccaa

SEQ ID NO: 1740807 - DNA, 15 bp, Homo sapiens
agaactaataccaat

SEQ ID NO: 1740808 - DNA, 15 bp, Homo sapiens
gaactaataccaatc

SEQ ID NO: 1740809 - DNA, 15 bp, Homo sapiens
aactaataccaatcc

SEQ ID NO: 1740810 - DNA, 15 bp, Homo sapiens
actaataccaatcct

SEQ ID NO: 1740811 - DNA, 15 bp, Homo sapiens
ctaataccaatccta

SEQ ID NO: 1740812 - DNA, 15 bp, Homo sapiens
taataccaatcctac

SEQ ID NO: 1740813 - DNA, 15 bp, Homo sapiens
aataccaatcctact

SEQ ID NO: 1740814 - DNA, 15 bp, Homo sapiens
ataccaatcctactt

SEQ ID NO: 1740815 - DNA, 15 bp, Homo sapiens
taccaatcctactta

SEQ ID NO: 1740816 - DNA, 15 bp, Homo sapiens
accaatcctacttac

SEQ ID NO: 1740817 - DNA, 15 bp, Homo sapiens
ccaatcctacttaca

SEQ ID NO: 1740818 - DNA, 15 bp, Homo sapiens
caatcctacttacag

SEQ ID NO: 1740819 - DNA, 15 bp, Homo sapiens
aatcctacttacagt

SEQ ID NO: 1740820 - DNA, 15 bp, Homo sapiens
atcctacttacagta

SEQ ID NO: 1740821 - DNA, 15 bp, Homo sapiens
tcctacttacagtat

SEQ ID NO: 1740822 - DNA, 15 bp, Homo sapiens
cctacttacagtatt

SEQ ID NO: 1740823 - DNA, 15 bp, Homo sapiens
ctacttacagtattc

SEQ ID NO: 1740824 - DNA, 15 bp, Homo sapiens
tacttacagtattct

SEQ ID NO: 1740825 - DNA, 15 bp, Homo sapiens
acttacagtattctg

SEQ ID NO: 1740826 - DNA, 15 bp, Homo sapiens
cttacagtattctgg

SEQ ID NO: 1740827 - DNA, 15 bp, Homo sapiens
ttacagtattctgga

SEQ ID NO: 1740828 - DNA, 15 bp, Homo sapiens
tacagtattctggaa

SEQ ID NO: 1740829 - DNA, 15 bp, Homo sapiens
acagtattctggaaa

SEQ ID NO: 1740830 - DNA, 15 bp, Homo sapiens
cagtattctggaaaa

SEQ ID NO: 1740831 - DNA, 15 bp, Homo sapiens
agtattctggaaaat

SEQ ID NO: 1740832 - DNA, 15 bp, Homo sapiens
gtattctggaaaata

SEQ ID NO: 1740833 - DNA, 15 bp, Homo sapiens
tattctggaaaatag

SEQ ID NO: 1740834 - DNA, 15 bp, Homo sapiens
attctggaaaataga

SEQ ID NO: 1740835 - DNA, 15 bp, Homo sapiens
ttctggaaaatagac

SEQ ID NO: 1740836 - DNA, 15 bp, Homo sapiens
tctggaaaatagact

SEQ ID NO: 1740837 - DNA, 15 bp, Homo sapiens
ctggaaaatagacta

SEQ ID NO: 1740838 - DNA, 15 bp, Homo sapiens
tggaaaatagactag

SEQ ID NO: 1740839 - DNA, 15 bp, Homo sapiens
ggaaaatagactagg

SEQ ID NO: 1740840 - DNA, 15 bp, Homo sapiens
gaaaatagactagga

SEQ ID NO: 1740841 - DNA, 15 bp, Homo sapiens
aaaatagactaggaa

SEQ ID NO: 1740842 - DNA, 15 bp, Homo sapiens
aaatagactaggaag

SEQ ID NO: 1740843 - DNA, 15 bp, Homo sapiens
aatagactaggaaga

SEQ ID NO: 1740844 - DNA, 15 bp, Homo sapiens
atagactaggaagaa

SEQ ID NO: 1740845 - DNA, 15 bp, Homo sapiens
tagactaggaagaaa

SEQ ID NO: 1740846 - DNA, 15 bp, Homo sapiens
agactaggaagaaat

SEQ ID NO: 1740847 - DNA, 15 bp, Homo sapiens
gactaggaagaaata

SEQ ID NO: 1740848 - DNA, 15 bp, Homo sapiens
actaggaagaaatac

SEQ ID NO: 1740849 - DNA, 15 bp, Homo sapiens
ctaggaagaaatact

SEQ ID NO: 1740850 - DNA, 15 bp, Homo sapiens
taggaagaaatactt

SEQ ID NO: 1740851 - DNA, 15 bp, Homo sapiens
aggaagaaatacttc

SEQ ID NO: 1740852 - DNA, 15 bp, Homo sapiens
ggaagaaatacttct

SEQ ID NO: 1740853 - DNA, 15 bp, Homo sapiens
gaagaaatacttcta

SEQ ID NO: 1740854 - DNA, 15 bp, Homo sapiens
aagaaatacttctaa

SEQ ID NO: 1740855 - DNA, 15 bp, Homo sapiens
agaaatacttctaaa

SEQ ID NO: 1740856 - DNA, 15 bp, Homo sapiens
gaaatacttctaaac

SEQ ID NO: 1740857 - DNA, 15 bp, Homo sapiens
aaatacttctaaact

SEQ ID NO: 1740858 - DNA, 15 bp, Homo sapiens
aatacttctaaactc

SEQ ID NO: 1740859 - DNA, 15 bp, Homo sapiens
atacttctaaactca

SEQ ID NO: 1740860 - DNA, 15 bp, Homo sapiens
tacttctaaactcat

SEQ ID NO: 1740861 - DNA, 15 bp, Homo sapiens
acttctaaactcatt

SEQ ID NO: 1740862 - DNA, 15 bp, Homo sapiens
cttctaaactcattc

SEQ ID NO: 1740863 - DNA, 15 bp, Homo sapiens
ttctaaactcattct

SEQ ID NO: 1740864 - DNA, 15 bp, Homo sapiens
tctaaactcattcta

SEQ ID NO: 1740865 - DNA, 15 bp, Homo sapiens
ctaaactcattctac

SEQ ID NO: 1740866 - DNA, 15 bp, Homo sapiens
taaactcattctaca

SEQ ID NO: 1740867 - DNA, 15 bp, Homo sapiens
aaactcattctacaa

SEQ ID NO: 1740868 - DNA, 15 bp, Homo sapiens
aactcattctacaag

SEQ ID NO: 1740869 - DNA, 15 bp, Homo sapiens
actcattctacaagg

SEQ ID NO: 1740870 - DNA, 15 bp, Homo sapiens
ctcattctacaaggc

SEQ ID NO: 1740871 - DNA, 15 bp, Homo sapiens
tcattctacaaggcc

SEQ ID NO: 1740872 - DNA, 15 bp, Homo sapiens
cattctacaaggcct

SEQ ID NO: 1740873 - DNA, 15 bp, Homo sapiens
attctacaaggcctg

SEQ ID NO: 1740874 - DNA, 15 bp, Homo sapiens
ttctacaaggcctgt

SEQ ID NO: 1740875 - DNA, 15 bp, Homo sapiens
tctacaaggcctgta

SEQ ID NO: 1740876 - DNA, 15 bp, Homo sapiens
ctacaaggcctgtat

SEQ ID NO: 1740877 - DNA, 15 bp, Homo sapiens
tacaaggcctgtatt

SEQ ID NO: 1740878 - DNA, 15 bp, Homo sapiens
acaaggcctgtatta

SEQ ID NO: 1740879 - DNA, 15 bp, Homo sapiens
caaggcctgtattac

SEQ ID NO: 1740880 - DNA, 15 bp, Homo sapiens
aaggcctgtattacc

SEQ ID NO: 1740881 - DNA, 15 bp, Homo sapiens
aggcctgtattaccc

SEQ ID NO: 1740882 - DNA, 15 bp, Homo sapiens
ggcctgtattaccct

SEQ ID NO: 1740883 - DNA, 15 bp, Homo sapiens
gcctgtattaccctg

SEQ ID NO: 1740884 - DNA, 15 bp, Homo sapiens
cctgtattaccctga

SEQ ID NO: 1740885 - DNA, 15 bp, Homo sapiens
ctgtattaccctgat

SEQ ID NO: 1740886 - DNA, 15 bp, Homo sapiens
tgtattaccctgata

SEQ ID NO: 1740887 - DNA, 15 bp, Homo sapiens
gtattaccctgatac

SEQ ID NO: 1740888 - DNA, 15 bp, Homo sapiens
tattaccctgatacc

SEQ ID NO: 1740889 - DNA, 15 bp, Homo sapiens
attaccctgatacca

SEQ ID NO: 1740890 - DNA, 15 bp, Homo sapiens
ttaccctgataccaa

SEQ ID NO: 1740891 - DNA, 15 bp, Homo sapiens
taccctgataccaaa

SEQ ID NO: 1740892 - DNA, 15 bp, Homo sapiens
accctgataccaaaa

SEQ ID NO: 1740893 - DNA, 15 bp, Homo sapiens
ccctgataccaaaac

SEQ ID NO: 1740894 - DNA, 15 bp, Homo sapiens
cctgataccaaaacc

SEQ ID NO: 1740895 - DNA, 15 bp, Homo sapiens
ctgataccaaaacca

SEQ ID NO: 1740896 - DNA, 15 bp, Homo sapiens
tgataccaaaaccag

SEQ ID NO: 1740897 - DNA, 15 bp, Homo sapiens
gataccaaaaccaga

SEQ ID NO: 1740898 - DNA, 15 bp, Homo sapiens
ataccaaaaccagat

SEQ ID NO: 1740899 - DNA, 15 bp, Homo sapiens
taccaaaaccagata

SEQ ID NO: 1740900 - DNA, 15 bp, Homo sapiens
accaaaaccagataa

SEQ ID NO: 1740901 - DNA, 15 bp, Homo sapiens
ccaaaaccagataaa

SEQ ID NO: 1740902 - DNA, 15 bp, Homo sapiens
caaaaccagataaag

SEQ ID NO: 1740903 - DNA, 15 bp, Homo sapiens
aaaaccagataaaga

SEQ ID NO: 1740904 - DNA, 15 bp, Homo sapiens
aaaccagataaagac

SEQ ID NO: 1740905 - DNA, 15 bp, Homo sapiens
aaccagataaagacc

SEQ ID NO: 1740906 - DNA, 15 bp, Homo sapiens
accagataaagaccc

SEQ ID NO: 1740907 - DNA, 15 bp, Homo sapiens
ccagataaagaccca

SEQ ID NO: 1740908 - DNA, 15 bp, Homo sapiens
cagataaagacccat

SEQ ID NO: 1740909 - DNA, 15 bp, Homo sapiens
agataaagacccatt

SEQ ID NO: 1740910 - DNA, 15 bp, Homo sapiens
gataaagacccatta

SEQ ID NO: 1740911 - DNA, 15 bp, Homo sapiens
ataaagacccattaa

SEQ ID NO: 1740912 - DNA, 15 bp, Homo sapiens
taaagacccattaaa

SEQ ID NO: 1740913 - DNA, 15 bp, Homo sapiens
aaagacccattaaaa

SEQ ID NO: 1740914 - DNA, 15 bp, Homo sapiens
aagacccattaaaaa

SEQ ID NO: 1740915 - DNA, 15 bp, Homo sapiens
agacccattaaaaaa

SEQ ID NO: 1740916 - DNA, 15 bp, Homo sapiens
gacccattaaaaaaa

SEQ ID NO: 1740917 - DNA, 15 bp, Homo sapiens
acccattaaaaaaag

SEQ ID NO: 1740918 - DNA, 15 bp, Homo sapiens
cccattaaaaaaaga

SEQ ID NO: 1740919 - DNA, 15 bp, Homo sapiens
ccattaaaaaaagaa

SEQ ID NO: 1740920 - DNA, 15 bp, Homo sapiens
cattaaaaaaagaaa

SEQ ID NO: 1740921 - DNA, 15 bp, Homo sapiens
attaaaaaaagaaaa

SEQ ID NO: 1740922 - DNA, 15 bp, Homo sapiens
taaaaaaagaaaact

SEQ ID NO: 1740923 - DNA, 15 bp, Homo sapiens
aaaaaaagaaaacta

SEQ ID NO: 1740924 - DNA, 15 bp, Homo sapiens
aaaaaagaaaactat

SEQ ID NO: 1740925 - DNA, 15 bp, Homo sapiens
aaaaagaaaactata

SEQ ID NO: 1740926 - DNA, 15 bp, Homo sapiens
aaaagaaaactatag

SEQ ID NO: 1740927 - DNA, 15 bp, Homo sapiens
aaagaaaactatagg

SEQ ID NO: 1740928 - DNA, 15 bp, Homo sapiens
aagaaaactataggc

SEQ ID NO: 1740929 - DNA, 15 bp, Homo sapiens
agaaaactataggcc

SEQ ID NO: 1740930 - DNA, 15 bp, Homo sapiens
gaaaactataggcca

SEQ ID NO: 1740931 - DNA, 15 bp, Homo sapiens
aaaactataggccag

SEQ ID NO: 1740932 - DNA, 15 bp, Homo sapiens
aaactataggccagt

SEQ ID NO: 1740933 - DNA, 15 bp, Homo sapiens
aactataggccagta

SEQ ID NO: 1740934 - DNA, 15 bp, Homo sapiens
actataggccagtat

SEQ ID NO: 1740935 - DNA, 15 bp, Homo sapiens
ctataggccagtatt

SEQ ID NO: 1740936 - DNA, 15 bp, Homo sapiens
tataggccagtattt

SEQ ID NO: 1740937 - DNA, 15 bp, Homo sapiens
ataggccagtatttc

SEQ ID NO: 1740938 - DNA, 15 bp, Homo sapiens
taggccagtatttct

SEQ ID NO: 1740939 - DNA, 15 bp, Homo sapiens
aggccagtatttctg

SEQ ID NO: 1740940 - DNA, 15 bp, Homo sapiens
ggccagtatttctga

SEQ ID NO: 1740941 - DNA, 15 bp, Homo sapiens
gccagtatttctgag

SEQ ID NO: 1740942 - DNA, 15 bp, Homo sapiens
ccagtatttctgagg

SEQ ID NO: 1740943 - DNA, 15 bp, Homo sapiens
cagtatttctgagga

SEQ ID NO: 1740944 - DNA, 15 bp, Homo sapiens
agtatttctgaggaa

SEQ ID NO: 1740945 - DNA, 15 bp, Homo sapiens
gtatttctgaggaat

SEQ ID NO: 1740946 - DNA, 15 bp, Homo sapiens
tatttctgaggaata

SEQ ID NO: 1740947 - DNA, 15 bp, Homo sapiens
atttctgaggaatat

SEQ ID NO: 1740948 - DNA, 15 bp, Homo sapiens
tttctgaggaatatt

SEQ ID NO: 1740949 - DNA, 15 bp, Homo sapiens
ttctgaggaatattg

SEQ ID NO: 1740950 - DNA, 15 bp, Homo sapiens
tctgaggaatattga

SEQ ID NO: 1740951 - DNA, 15 bp, Homo sapiens
ctgaggaatattgat

SEQ ID NO: 1740952 - DNA, 15 bp, Homo sapiens
tgaggaatattgata

SEQ ID NO: 1740953 - DNA, 15 bp, Homo sapiens
gaggaatattgatac

SEQ ID NO: 1740954 - DNA, 15 bp, Homo sapiens
aggaatattgataca

SEQ ID NO: 1740955 - DNA, 15 bp, Homo sapiens
ggaatattgatacag

SEQ ID NO: 1740956 - DNA, 15 bp, Homo sapiens
gaatattgatacaga

SEQ ID NO: 1740957 - DNA, 15 bp, Homo sapiens
aatattgatacagaa

SEQ ID NO: 1740958 - DNA, 15 bp, Homo sapiens
atattgatacagaaa

SEQ ID NO: 1740959 - DNA, 15 bp, Homo sapiens
tattgatacagaaat

SEQ ID NO: 1740960 - DNA, 15 bp, Homo sapiens
attgatacagaaatc

SEQ ID NO: 1740961 - DNA, 15 bp, Homo sapiens
ttgatacagaaatct

SEQ ID NO: 1740962 - DNA, 15 bp, Homo sapiens
tgatacagaaatctt

SEQ ID NO: 1740963 - DNA, 15 bp, Homo sapiens
gatacagaaatcttc

SEQ ID NO: 1740964 - DNA, 15 bp, Homo sapiens
atacagaaatcttca

SEQ ID NO: 1740965 - DNA, 15 bp, Homo sapiens
tacagaaatcttcaa

SEQ ID NO: 1740966 - DNA, 15 bp, Homo sapiens
acagaaatcttcaac

SEQ ID NO: 1740967 - DNA, 15 bp, Homo sapiens
cagaaatcttcaaca

SEQ ID NO: 1740968 - DNA, 15 bp, Homo sapiens
agaaatcttcaacaa

SEQ ID NO: 1740969 - DNA, 15 bp, Homo sapiens
gaaatcttcaacaaa

SEQ ID NO: 1740970 - DNA, 15 bp, Homo sapiens
aaatcttcaacaaaa

SEQ ID NO: 1740971 - DNA, 15 bp, Homo sapiens
aatcttcaacaaaac

SEQ ID NO: 1740972 - DNA, 15 bp, Homo sapiens
atcttcaacaaaaca

SEQ ID NO: 1740973 - DNA, 15 bp, Homo sapiens
tcttcaacaaaacac

SEQ ID NO: 1740974 - DNA, 15 bp, Homo sapiens
cttcaacaaaacact

SEQ ID NO: 1740975 - DNA, 15 bp, Homo sapiens
ttcaacaaaacacta

SEQ ID NO: 1740976 - DNA, 15 bp, Homo sapiens
tcaacaaaacactag

SEQ ID NO: 1740977 - DNA, 15 bp, Homo sapiens
caacaaaacactagc

SEQ ID NO: 1740978 - DNA, 15 bp, Homo sapiens
aacaaaacactagca

SEQ ID NO: 1740979 - DNA, 15 bp, Homo sapiens
acaaaacactagcaa

SEQ ID NO: 1740980 - DNA, 15 bp, Homo sapiens
caaaacactagcaaa

SEQ ID NO: 1740981 - DNA, 15 bp, Homo sapiens
aaaacactagcaaac

SEQ ID NO: 1740982 - DNA, 15 bp, Homo sapiens
aaacactagcaaact

SEQ ID NO: 1740983 - DNA, 15 bp, Homo sapiens
aacactagcaaactg

SEQ ID NO: 1740984 - DNA, 15 bp, Homo sapiens
acactagcaaactga

SEQ ID NO: 1740985 - DNA, 15 bp, Homo sapiens
cactagcaaactgaa

SEQ ID NO: 1740986 - DNA, 15 bp, Homo sapiens
actagcaaactgaat

SEQ ID NO: 1740987 - DNA, 15 bp, Homo sapiens
ctagcaaactgaatt

SEQ ID NO: 1740988 - DNA, 15 bp, Homo sapiens
tagcaaactgaattc

SEQ ID NO: 1740989 - DNA, 15 bp, Homo sapiens
agcaaactgaattca

SEQ ID NO: 1740990 - DNA, 15 bp, Homo sapiens
gcaaactgaattcaa

SEQ ID NO: 1740991 - DNA, 15 bp, Homo sapiens
caaactgaattcaat

SEQ ID NO: 1740992 - DNA, 15 bp, Homo sapiens
aaactgaattcaata

SEQ ID NO: 1740993 - DNA, 15 bp, Homo sapiens
aactgaattcaataa

SEQ ID NO: 1740994 - DNA, 15 bp, Homo sapiens
actgaattcaataat

SEQ ID NO: 1740995 - DNA, 15 bp, Homo sapiens
ctgaattcaataata

SEQ ID NO: 1740996 - DNA, 15 bp, Homo sapiens
tgaattcaataatac

SEQ ID NO: 1740997 - DNA, 15 bp, Homo sapiens
gaattcaataataca

SEQ ID NO: 1740998 - DNA, 15 bp, Homo sapiens
aattcaataatacat

SEQ ID NO: 1740999 - DNA, 15 bp, Homo sapiens
attcaataatacatt

SEQ ID NO: 1741000 - DNA, 15 bp, Homo sapiens
ttcaataatacatta

SEQ ID NO: 1741001 - DNA, 15 bp, Homo sapiens
tcaataatacattag

SEQ ID NO: 1741002 - DNA, 15 bp, Homo sapiens
caataatacattaga

SEQ ID NO: 1741003 - DNA, 15 bp, Homo sapiens
aataatacattagat

SEQ ID NO: 1741004 - DNA, 15 bp, Homo sapiens
ataatacattagata

SEQ ID NO: 1741005 - DNA, 15 bp, Homo sapiens
taatacattagatag

SEQ ID NO: 1741006 - DNA, 15 bp, Homo sapiens
aatacattagataga

SEQ ID NO: 1741007 - DNA, 15 bp, Homo sapiens
atacattagatagat

SEQ ID NO: 1741008 - DNA, 15 bp, Homo sapiens
tacattagatagatc

SEQ ID NO: 1741009 - DNA, 15 bp, Homo sapiens
acattagatagatca

SEQ ID NO: 1741010 - DNA, 15 bp, Homo sapiens
cattagatagatcat

SEQ ID NO: 1741011 - DNA, 15 bp, Homo sapiens
attagatagatcatt

SEQ ID NO: 1741012 - DNA, 15 bp, Homo sapiens
ttagatagatcattc

SEQ ID NO: 1741013 - DNA, 15 bp, Homo sapiens
tagatagatcattca

SEQ ID NO: 1741014 - DNA, 15 bp, Homo sapiens
agatagatcattcat

SEQ ID NO: 1741015 - DNA, 15 bp, Homo sapiens
gatagatcattcatt

SEQ ID NO: 1741016 - DNA, 15 bp, Homo sapiens
atagatcattcatta

SEQ ID NO: 1741017 - DNA, 15 bp, Homo sapiens
tagatcattcattat

SEQ ID NO: 1741018 - DNA, 15 bp, Homo sapiens
agatcattcattatg

SEQ ID NO: 1741019 - DNA, 15 bp, Homo sapiens
gatcattcattatgt

SEQ ID NO: 1741020 - DNA, 15 bp, Homo sapiens
atcattcattatgtc

SEQ ID NO: 1741021 - DNA, 15 bp, Homo sapiens
tcattcattatgtcg

SEQ ID NO: 1741022 - DNA, 15 bp, Homo sapiens
cattcattatgtcgc

SEQ ID NO: 1741023 - DNA, 15 bp, Homo sapiens
attcattatgtcgca

SEQ ID NO: 1741024 - DNA, 15 bp, Homo sapiens
ttcattatgtcgcag

SEQ ID NO: 1741025 - DNA, 15 bp, Homo sapiens
tcattatgtcgcagt

SEQ ID NO: 1741026 - DNA, 15 bp, Homo sapiens
cattatgtcgcagtg

SEQ ID NO: 1741027 - DNA, 15 bp, Homo sapiens
attatgtcgcagtgg

SEQ ID NO: 1741028 - DNA, 15 bp, Homo sapiens
ttatgtcgcagtggg

SEQ ID NO: 1741029 - DNA, 15 bp, Homo sapiens
tatgtcgcagtggga

SEQ ID NO: 1741030 - DNA, 15 bp, Homo sapiens
atgtcgcagtgggat

SEQ ID NO: 1741031 - DNA, 15 bp, Homo sapiens
tgtcgcagtgggatt

SEQ ID NO: 1741032 - DNA, 15 bp, Homo sapiens
gtcgcagtgggattt

SEQ ID NO: 1741033 - DNA, 15 bp, Homo sapiens
tcgcagtgggattta

SEQ ID NO: 1741034 - DNA, 15 bp, Homo sapiens
cgcagtgggatttat

SEQ ID NO: 1741035 - DNA, 15 bp, Homo sapiens
gcagtgggatttatc

SEQ ID NO: 1741036 - DNA, 15 bp, Homo sapiens
cagtgggatttatcc

SEQ ID NO: 1741037 - DNA, 15 bp, Homo sapiens
agtgggatttatccc

SEQ ID NO: 1741038 - DNA, 15 bp, Homo sapiens
gtgggatttatccct

SEQ ID NO: 1741039 - DNA, 15 bp, Homo sapiens
tgggatttatccctg

SEQ ID NO: 1741040 - DNA, 15 bp, Homo sapiens
gggatttatccctgc

SEQ ID NO: 1741041 - DNA, 15 bp, Homo sapiens
ggatttatccctgca

SEQ ID NO: 1741042 - DNA, 15 bp, Homo sapiens
gatttatccctgcaa

SEQ ID NO: 1741043 - DNA, 15 bp, Homo sapiens
atttatccctgcaat

SEQ ID NO: 1741044 - DNA, 15 bp, Homo sapiens
tttatccctgcaatg

SEQ ID NO: 1741045 - DNA, 15 bp, Homo sapiens
ttatccctgcaatgc

SEQ ID NO: 1741046 - DNA, 15 bp, Homo sapiens
tatccctgcaatgca

SEQ ID NO: 1741047 - DNA, 15 bp, Homo sapiens
atccctgcaatgcaa

SEQ ID NO: 1741048 - DNA, 15 bp, Homo sapiens
tccctgcaatgcaag

SEQ ID NO: 1741049 - DNA, 15 bp, Homo sapiens
ccctgcaatgcaagg

SEQ ID NO: 1741050 - DNA, 15 bp, Homo sapiens
cctgcaatgcaagga

SEQ ID NO: 1741051 - DNA, 15 bp, Homo sapiens
ctgcaatgcaaggat

SEQ ID NO: 1741052 - DNA, 15 bp, Homo sapiens
tgcaatgcaaggatg

SEQ ID NO: 1741053 - DNA, 15 bp, Homo sapiens
gcaatgcaaggatgg

SEQ ID NO: 1741054 - DNA, 15 bp, Homo sapiens
caatgcaaggatggt

SEQ ID NO: 1741055 - DNA, 15 bp, Homo sapiens
aatgcaaggatggtt

SEQ ID NO: 1741056 - DNA, 15 bp, Homo sapiens
atgcaaggatggttc

SEQ ID NO: 1741057 - DNA, 15 bp, Homo sapiens
tgcaaggatggttca

SEQ ID NO: 1741058 - DNA, 15 bp, Homo sapiens
gcaaggatggttcaa

SEQ ID NO: 1741059 - DNA, 15 bp, Homo sapiens
gatggttcaacataa

SEQ ID NO: 1741060 - DNA, 15 bp, Homo sapiens
atggttcaacataaa

SEQ ID NO: 1741061 - DNA, 15 bp, Homo sapiens
tggttcaacataaac

SEQ ID NO: 1741062 - DNA, 15 bp, Homo sapiens
ggttcaacataaaca

SEQ ID NO: 1741063 - DNA, 15 bp, Homo sapiens
gttcaacataaacaa

SEQ ID NO: 1741064 - DNA, 15 bp, Homo sapiens
ttcaacataaacaaa

SEQ ID NO: 1741065 - DNA, 15 bp, Homo sapiens
tcaacataaacaaat

SEQ ID NO: 1741066 - DNA, 15 bp, Homo sapiens
caacataaacaaatc

SEQ ID NO: 1741067 - DNA, 15 bp, Homo sapiens
aacataaacaaatca

SEQ ID NO: 1741068 - DNA, 15 bp, Homo sapiens
acataaacaaatcaa

SEQ ID NO: 1741069 - DNA, 15 bp, Homo sapiens
cataaacaaatcaat

SEQ ID NO: 1741070 - DNA, 15 bp, Homo sapiens
ataaacaaatcaatg

SEQ ID NO: 1741071 - DNA, 15 bp, Homo sapiens
taaacaaatcaatgt

SEQ ID NO: 1741072 - DNA, 15 bp, Homo sapiens
aaacaaatcaatgtg

SEQ ID NO: 1741073 - DNA, 15 bp, Homo sapiens
aacaaatcaatgtgg

SEQ ID NO: 1741074 - DNA, 15 bp, Homo sapiens
acaaatcaatgtggt

SEQ ID NO: 1741075 - DNA, 15 bp, Homo sapiens
caaatcaatgtggta

SEQ ID NO: 1741076 - DNA, 15 bp, Homo sapiens
aaatcaatgtggtat

SEQ ID NO: 1741077 - DNA, 15 bp, Homo sapiens
aatcaatgtggtatg

SEQ ID NO: 1741078 - DNA, 15 bp, Homo sapiens
atcaatgtggtatgt

SEQ ID NO: 1741079 - DNA, 15 bp, Homo sapiens
tcaatgtggtatgtc

SEQ ID NO: 1741080 - DNA, 15 bp, Homo sapiens
caatgtggtatgtca

SEQ ID NO: 1741081 - DNA, 15 bp, Homo sapiens
aatgtggtatgtcat

SEQ ID NO: 1741082 - DNA, 15 bp, Homo sapiens
atgtggtatgtcata

SEQ ID NO: 1741083 - DNA, 15 bp, Homo sapiens
tgtggtatgtcatat

SEQ ID NO: 1741084 - DNA, 15 bp, Homo sapiens
gtggtatgtcatatc

SEQ ID NO: 1741085 - DNA, 15 bp, Homo sapiens
tggtatgtcatatca

SEQ ID NO: 1741086 - DNA, 15 bp, Homo sapiens
ggtatgtcatatcaa

SEQ ID NO: 1741087 - DNA, 15 bp, Homo sapiens
gtatgtcatatcaac

SEQ ID NO: 1741088 - DNA, 15 bp, Homo sapiens
tatgtcatatcaaca

SEQ ID NO: 1741089 - DNA, 15 bp, Homo sapiens
atgtcatatcaacag

SEQ ID NO: 1741090 - DNA, 15 bp, Homo sapiens
tgtcatatcaacaga

SEQ ID NO: 1741091 - DNA, 15 bp, Homo sapiens
gtcatatcaacagaa

SEQ ID NO: 1741092 - DNA, 15 bp, Homo sapiens
tcatatcaacagaat

SEQ ID NO: 1741093 - DNA, 15 bp, Homo sapiens
catatcaacagaatg

SEQ ID NO: 1741094 - DNA, 15 bp, Homo sapiens
atatcaacagaatga

SEQ ID NO: 1741095 - DNA, 15 bp, Homo sapiens
tatcaacagaatgaa

SEQ ID NO: 1741096 - DNA, 15 bp, Homo sapiens
atcaacagaatgaag

SEQ ID NO: 1741097 - DNA, 15 bp, Homo sapiens
gaatgaaggacaaaa

SEQ ID NO: 1741098 - DNA, 15 bp, Homo sapiens
aatgaaggacaaaaa

SEQ ID NO: 1741099 - DNA, 15 bp, Homo sapiens
atgaaggacaaaaat

SEQ ID NO: 1741100 - DNA, 15 bp, Homo sapiens
tgaaggacaaaaatc

SEQ ID NO: 1741101 - DNA, 15 bp, Homo sapiens
gaaggacaaaaatca

SEQ ID NO: 1741102 - DNA, 15 bp, Homo sapiens
aaggacaaaaatcat

SEQ ID NO: 1741103 - DNA, 15 bp, Homo sapiens
aggacaaaaatcata

SEQ ID NO: 1741104 - DNA, 15 bp, Homo sapiens
ggacaaaaatcatat

SEQ ID NO: 1741105 - DNA, 15 bp, Homo sapiens
gacaaaaatcatatg

SEQ ID NO: 1741106 - DNA, 15 bp, Homo sapiens
acaaaaatcatatga

SEQ ID NO: 1741107 - DNA, 15 bp, Homo sapiens
caaaaatcatatgat

SEQ ID NO: 1741108 - DNA, 15 bp, Homo sapiens
aaaaatcatatgatc

SEQ ID NO: 1741109 - DNA, 15 bp, Homo sapiens
aaaatcatatgatca

SEQ ID NO: 1741110 - DNA, 15 bp, Homo sapiens
aaatcatatgatcat

SEQ ID NO: 1741111 - DNA, 15 bp, Homo sapiens
aatcatatgatcatt

SEQ ID NO: 1741112 - DNA, 15 bp, Homo sapiens
atcatatgatcattt

SEQ ID NO: 1741113 - DNA, 15 bp, Homo sapiens
tcatatgatcattta

SEQ ID NO: 1741114 - DNA, 15 bp, Homo sapiens
catatgatcatttaa

SEQ ID NO: 1741115 - DNA, 15 bp, Homo sapiens
atatgatcatttaaa

SEQ ID NO: 1741116 - DNA, 15 bp, Homo sapiens
tatgatcatttaaat

SEQ ID NO: 1741117 - DNA, 15 bp, Homo sapiens
atgatcatttaaatt

SEQ ID NO: 1741118 - DNA, 15 bp, Homo sapiens
tgatcatttaaattg

SEQ ID NO: 1741119 - DNA, 15 bp, Homo sapiens
gatcatttaaattga

SEQ ID NO: 1741120 - DNA, 15 bp, Homo sapiens
atcatttaaattgat

SEQ ID NO: 1741121 - DNA, 15 bp, Homo sapiens
tcatttaaattgatg

SEQ ID NO: 1741122 - DNA, 15 bp, Homo sapiens
catttaaattgatgc

SEQ ID NO: 1741123 - DNA, 15 bp, Homo sapiens
atttaaattgatgct

SEQ ID NO: 1741124 - DNA, 15 bp, Homo sapiens
tttaaattgatgctg

SEQ ID NO: 1741125 - DNA, 15 bp, Homo sapiens
ttaaattgatgctga

SEQ ID NO: 1741126 - DNA, 15 bp, Homo sapiens
taaattgatgctgaa

SEQ ID NO: 1741127 - DNA, 15 bp, Homo sapiens
aaattgatgctgaaa

SEQ ID NO: 1741128 - DNA, 15 bp, Homo sapiens
aattgatgctgaaaa

SEQ ID NO: 1741129 - DNA, 15 bp, Homo sapiens
attgatgctgaaaaa

SEQ ID NO: 1741130 - DNA, 15 bp, Homo sapiens
ttgatgctgaaaaag

SEQ ID NO: 1741131 - DNA, 15 bp, Homo sapiens
tgatgctgaaaaagc

SEQ ID NO: 1741132 - DNA, 15 bp, Homo sapiens
gatgctgaaaaagca

SEQ ID NO: 1741133 - DNA, 15 bp, Homo sapiens
atgctgaaaaagcat

SEQ ID NO: 1741134 - DNA, 15 bp, Homo sapiens
tgctgaaaaagcatt

SEQ ID NO: 1741135 - DNA, 15 bp, Homo sapiens
gctgaaaaagcattt

SEQ ID NO: 1741136 - DNA, 15 bp, Homo sapiens
ctgaaaaagcatttg

SEQ ID NO: 1741137 - DNA, 15 bp, Homo sapiens
tgaaaaagcatttga

SEQ ID NO: 1741138 - DNA, 15 bp, Homo sapiens
gaaaaagcatttgat

SEQ ID NO: 1741139 - DNA, 15 bp, Homo sapiens
aaaaagcatttgata

SEQ ID NO: 1741140 - DNA, 15 bp, Homo sapiens
aaaagcatttgataa

SEQ ID NO: 1741141 - DNA, 15 bp, Homo sapiens
aaagcatttgataaa

SEQ ID NO: 1741142 - DNA, 15 bp, Homo sapiens
aagcatttgataaaa

SEQ ID NO: 1741143 - DNA, 15 bp, Homo sapiens
agcatttgataaaat

SEQ ID NO: 1741144 - DNA, 15 bp, Homo sapiens
gcatttgataaaatt

SEQ ID NO: 1741145 - DNA, 15 bp, Homo sapiens
catttgataaaattc

SEQ ID NO: 1741146 - DNA, 15 bp, Homo sapiens
atttgataaaattca

SEQ ID NO: 1741147 - DNA, 15 bp, Homo sapiens
tttgataaaattcag

SEQ ID NO: 1741148 - DNA, 15 bp, Homo sapiens
ttgataaaattcagc

SEQ ID NO: 1741149 - DNA, 15 bp, Homo sapiens
tgataaaattcagca

SEQ ID NO: 1741150 - DNA, 15 bp, Homo sapiens
gataaaattcagcat

SEQ ID NO: 1741151 - DNA, 15 bp, Homo sapiens
ataaaattcagcatc

SEQ ID NO: 1741152 - DNA, 15 bp, Homo sapiens
taaaattcagcatcc

SEQ ID NO: 1741153 - DNA, 15 bp, Homo sapiens
aaaattcagcatcct

SEQ ID NO: 1741154 - DNA, 15 bp, Homo sapiens
aaattcagcatcctt

SEQ ID NO: 1741155 - DNA, 15 bp, Homo sapiens
aattcagcatccttc

SEQ ID NO: 1741156 - DNA, 15 bp, Homo sapiens
attcagcatccttca

SEQ ID NO: 1741157 - DNA, 15 bp, Homo sapiens
ttcagcatccttcat

SEQ ID NO: 1741158 - DNA, 15 bp, Homo sapiens
tcagcatccttcatg

SEQ ID NO: 1741159 - DNA, 15 bp, Homo sapiens
cagcatccttcatgc

SEQ ID NO: 1741160 - DNA, 15 bp, Homo sapiens
agcatccttcatgcc

SEQ ID NO: 1741161 - DNA, 15 bp, Homo sapiens
gcatccttcatgccc

SEQ ID NO: 1741162 - DNA, 15 bp, Homo sapiens
catccttcatgccca

SEQ ID NO: 1741163 - DNA, 15 bp, Homo sapiens
atccttcatgcccaa

SEQ ID NO: 1741164 - DNA, 15 bp, Homo sapiens
tccttcatgcccaaa

SEQ ID NO: 1741165 - DNA, 15 bp, Homo sapiens
cttcatgcccaaaac

SEQ ID NO: 1741166 - DNA, 15 bp, Homo sapiens
ttcatgcccaaaacc

SEQ ID NO: 1741167 - DNA, 15 bp, Homo sapiens
tcatgcccaaaaccc

SEQ ID NO: 1741168 - DNA, 15 bp, Homo sapiens
catgcccaaaaccct

SEQ ID NO: 1741169 - DNA, 15 bp, Homo sapiens
atgcccaaaacccta

SEQ ID NO: 1741170 - DNA, 15 bp, Homo sapiens
tgcccaaaaccctaa

SEQ ID NO: 1741171 - DNA, 15 bp, Homo sapiens
gcccaaaaccctaaa

SEQ ID NO: 1741172 - DNA, 15 bp, Homo sapiens
cccaaaaccctaaaa

SEQ ID NO: 1741173 - DNA, 15 bp, Homo sapiens
ccaaaaccctaaaaa

SEQ ID NO: 1741174 - DNA, 15 bp, Homo sapiens
caaaaccctaaaaaa

SEQ ID NO: 1741175 - DNA, 15 bp, Homo sapiens
aaaaccctaaaaaac

SEQ ID NO: 1741176 - DNA, 15 bp, Homo sapiens
aaaccctaaaaaacc

SEQ ID NO: 1741177 - DNA, 15 bp, Homo sapiens
aaccctaaaaaacct

SEQ ID NO: 1741178 - DNA, 15 bp, Homo sapiens
accctaaaaaacctg

SEQ ID NO: 1741179 - DNA, 15 bp, Homo sapiens
ccctaaaaaacctga

SEQ ID NO: 1741180 - DNA, 15 bp, Homo sapiens
cctaaaaaacctgag

SEQ ID NO: 1741181 - DNA, 15 bp, Homo sapiens
ctaaaaaacctgagg

SEQ ID NO: 1741182 - DNA, 15 bp, Homo sapiens
taaaaaacctgagga

SEQ ID NO: 1741183 - DNA, 15 bp, Homo sapiens
aaaaaacctgaggat

SEQ ID NO: 1741184 - DNA, 15 bp, Homo sapiens
aaaaacctgaggata

SEQ ID NO: 1741185 - DNA, 15 bp, Homo sapiens
aaaacctgaggatag

SEQ ID NO: 1741186 - DNA, 15 bp, Homo sapiens
aaacctgaggataga

SEQ ID NO: 1741187 - DNA, 15 bp, Homo sapiens
aacctgaggatagaa

SEQ ID NO: 1741188 - DNA, 15 bp, Homo sapiens
acctgaggatagaag

SEQ ID NO: 1741189 - DNA, 15 bp, Homo sapiens
cctgaggatagaagg

SEQ ID NO: 1741190 - DNA, 15 bp, Homo sapiens
ctgaggatagaagga

SEQ ID NO: 1741191 - DNA, 15 bp, Homo sapiens
tgaggatagaaggaa

SEQ ID NO: 1741192 - DNA, 15 bp, Homo sapiens
gaggatagaaggaac

SEQ ID NO: 1741193 - DNA, 15 bp, Homo sapiens
aggatagaaggaaca

SEQ ID NO: 1741194 - DNA, 15 bp, Homo sapiens
ggatagaaggaacat

SEQ ID NO: 1741195 - DNA, 15 bp, Homo sapiens
gatagaaggaacata

SEQ ID NO: 1741196 - DNA, 15 bp, Homo sapiens
atagaaggaacatac

SEQ ID NO: 1741197 - DNA, 15 bp, Homo sapiens
tagaaggaacatacc

SEQ ID NO: 1741198 - DNA, 15 bp, Homo sapiens
agaaggaacatacct

SEQ ID NO: 1741199 - DNA, 15 bp, Homo sapiens
gaaggaacatacctt

SEQ ID NO: 1741200 - DNA, 15 bp, Homo sapiens
aaggaacatacctta

SEQ ID NO: 1741201 - DNA, 15 bp, Homo sapiens
aggaacataccttaa

SEQ ID NO: 1741202 - DNA, 15 bp, Homo sapiens
ggaacataccttaac

SEQ ID NO: 1741203 - DNA, 15 bp, Homo sapiens
gaacataccttaacg

SEQ ID NO: 1741204 - DNA, 15 bp, Homo sapiens
aacataccttaacgt

SEQ ID NO: 1741205 - DNA, 15 bp, Homo sapiens
acataccttaacgta

SEQ ID NO: 1741206 - DNA, 15 bp, Homo sapiens
cataccttaacgtaa

SEQ ID NO: 1741207 - DNA, 15 bp, Homo sapiens
ataccttaacgtaat

SEQ ID NO: 1741208 - DNA, 15 bp, Homo sapiens
taccttaacgtaata

SEQ ID NO: 1741209 - DNA, 15 bp, Homo sapiens
accttaacgtaataa

SEQ ID NO: 1741210 - DNA, 15 bp, Homo sapiens
ccttaacgtaataaa

SEQ ID NO: 1741211 - DNA, 15 bp, Homo sapiens
cttaacgtaataaaa

SEQ ID NO: 1741212 - DNA, 15 bp, Homo sapiens
ttaacgtaataaaag

SEQ ID NO: 1741213 - DNA, 15 bp, Homo sapiens
taacgtaataaaagc

SEQ ID NO: 1741214 - DNA, 15 bp, Homo sapiens
aacgtaataaaagcc

SEQ ID NO: 1741215 - DNA, 15 bp, Homo sapiens
acgtaataaaagcca

SEQ ID NO: 1741216 - DNA, 15 bp, Homo sapiens
cgtaataaaagccat

SEQ ID NO: 1741217 - DNA, 15 bp, Homo sapiens
gtaataaaagccata

SEQ ID NO: 1741218 - DNA, 15 bp, Homo sapiens
taataaaagccatat

SEQ ID NO: 1741219 - DNA, 15 bp, Homo sapiens
aataaaagccatata

SEQ ID NO: 1741220 - DNA, 15 bp, Homo sapiens
ataaaagccatatat

SEQ ID NO: 1741221 - DNA, 15 bp, Homo sapiens
taaaagccatatata

SEQ ID NO: 1741222 - DNA, 15 bp, Homo sapiens
aaaagccatatataa

SEQ ID NO: 1741223 - DNA, 15 bp, Homo sapiens
aaagccatatataac

SEQ ID NO: 1741224 - DNA, 15 bp, Homo sapiens
aagccatatataaca

SEQ ID NO: 1741225 - DNA, 15 bp, Homo sapiens
agccatatataacag

SEQ ID NO: 1741226 - DNA, 15 bp, Homo sapiens
gccatatataacaga

SEQ ID NO: 1741227 - DNA, 15 bp, Homo sapiens
ccatatataacagac

SEQ ID NO: 1741228 - DNA, 15 bp, Homo sapiens
catatataacagacc

SEQ ID NO: 1741229 - DNA, 15 bp, Homo sapiens
atatataacagaccc

SEQ ID NO: 1741230 - DNA, 15 bp, Homo sapiens
tatataacagaccca

SEQ ID NO: 1741231 - DNA, 15 bp, Homo sapiens
atataacagacccac

SEQ ID NO: 1741232 - DNA, 15 bp, Homo sapiens
tataacagacccaca

SEQ ID NO: 1741233 - DNA, 15 bp, Homo sapiens
ataacagacccacag

SEQ ID NO: 1741234 - DNA, 15 bp, Homo sapiens
taacagacccacagc

SEQ ID NO: 1741235 - DNA, 15 bp, Homo sapiens
aacagacccacagct

SEQ ID NO: 1741236 - DNA, 15 bp, Homo sapiens
acagacccacagcta

SEQ ID NO: 1741237 - DNA, 15 bp, Homo sapiens
cagacccacagctag

SEQ ID NO: 1741238 - DNA, 15 bp, Homo sapiens
agacccacagctagt

SEQ ID NO: 1741239 - DNA, 15 bp, Homo sapiens
gacccacagctagta

SEQ ID NO: 1741240 - DNA, 15 bp, Homo sapiens
acccacagctagtat

SEQ ID NO: 1741241 - DNA, 15 bp, Homo sapiens
cccacagctagtata

SEQ ID NO: 1741242 - DNA, 15 bp, Homo sapiens
ccacagctagtataa

SEQ ID NO: 1741243 - DNA, 15 bp, Homo sapiens
cacagctagtataat

SEQ ID NO: 1741244 - DNA, 15 bp, Homo sapiens
acagctagtataata

SEQ ID NO: 1741245 - DNA, 15 bp, Homo sapiens
cagctagtataatac

SEQ ID NO: 1741246 - DNA, 15 bp, Homo sapiens
agctagtataatact

SEQ ID NO: 1741247 - DNA, 15 bp, Homo sapiens
gctagtataatactt

SEQ ID NO: 1741248 - DNA, 15 bp, Homo sapiens
ctagtataatactta

SEQ ID NO: 1741249 - DNA, 15 bp, Homo sapiens
tagtataatacttaa

SEQ ID NO: 1741250 - DNA, 15 bp, Homo sapiens
agtataatacttaat

SEQ ID NO: 1741251 - DNA, 15 bp, Homo sapiens
gtataatacttaatg

SEQ ID NO: 1741252 - DNA, 15 bp, Homo sapiens
tataatacttaatgg

SEQ ID NO: 1741253 - DNA, 15 bp, Homo sapiens
ataatacttaatggg

SEQ ID NO: 1741254 - DNA, 15 bp, Homo sapiens
taatacttaatgggg

SEQ ID NO: 1741255 - DNA, 15 bp, Homo sapiens
aatacttaatgggga

SEQ ID NO: 1741256 - DNA, 15 bp, Homo sapiens
atacttaatggggaa

SEQ ID NO: 1741257 - DNA, 15 bp, Homo sapiens
tacttaatggggaaa

SEQ ID NO: 1741258 - DNA, 15 bp, Homo sapiens
acttaatggggaaaa

SEQ ID NO: 1741259 - DNA, 15 bp, Homo sapiens
cttaatggggaaaaa

SEQ ID NO: 1741260 - DNA, 15 bp, Homo sapiens
ttaatggggaaaaat

SEQ ID NO: 1741261 - DNA, 15 bp, Homo sapiens
taatggggaaaaatt

SEQ ID NO: 1741262 - DNA, 15 bp, Homo sapiens
aatggggaaaaattg

SEQ ID NO: 1741263 - DNA, 15 bp, Homo sapiens
atggggaaaaattga

SEQ ID NO: 1741264 - DNA, 15 bp, Homo sapiens
tggggaaaaattgaa

SEQ ID NO: 1741265 - DNA, 15 bp, Homo sapiens
ggggaaaaattgaaa

SEQ ID NO: 1741266 - DNA, 15 bp, Homo sapiens
gggaaaaattgaaag

SEQ ID NO: 1741267 - DNA, 15 bp, Homo sapiens
ggaaaaattgaaagc

SEQ ID NO: 1741268 - DNA, 15 bp, Homo sapiens
gaaaaattgaaagcc

SEQ ID NO: 1741269 - DNA, 15 bp, Homo sapiens
aaaaattgaaagcct

SEQ ID NO: 1741270 - DNA, 15 bp, Homo sapiens
aaaattgaaagcctt

SEQ ID NO: 1741271 - DNA, 15 bp, Homo sapiens
aaattgaaagccttt

SEQ ID NO: 1741272 - DNA, 15 bp, Homo sapiens
aattgaaagcctttc

SEQ ID NO: 1741273 - DNA, 15 bp, Homo sapiens
attgaaagcctttcc

SEQ ID NO: 1741274 - DNA, 15 bp, Homo sapiens
ttgaaagcctttcct

SEQ ID NO: 1741275 - DNA, 15 bp, Homo sapiens
tgaaagcctttcctc

SEQ ID NO: 1741276 - DNA, 15 bp, Homo sapiens
gaaagcctttcctct

SEQ ID NO: 1741277 - DNA, 15 bp, Homo sapiens
aaagcctttcctcta

SEQ ID NO: 1741278 - DNA, 15 bp, Homo sapiens
aagcctttcctctaa

SEQ ID NO: 1741279 - DNA, 15 bp, Homo sapiens
agcctttcctctaag

SEQ ID NO: 1741280 - DNA, 15 bp, Homo sapiens
gcctttcctctaaga

SEQ ID NO: 1741281 - DNA, 15 bp, Homo sapiens
cctttcctctaagat

SEQ ID NO: 1741282 - DNA, 15 bp, Homo sapiens
ctttcctctaagatc

SEQ ID NO: 1741283 - DNA, 15 bp, Homo sapiens
tttcctctaagatct

SEQ ID NO: 1741284 - DNA, 15 bp, Homo sapiens
ttcctctaagatcta

SEQ ID NO: 1741285 - DNA, 15 bp, Homo sapiens
tcctctaagatctag

SEQ ID NO: 1741286 - DNA, 15 bp, Homo sapiens
cctctaagatctaga

SEQ ID NO: 1741287 - DNA, 15 bp, Homo sapiens
ctctaagatctagaa

SEQ ID NO: 1741288 - DNA, 15 bp, Homo sapiens
tctaagatctagaac

SEQ ID NO: 1741289 - DNA, 15 bp, Homo sapiens
ctaagatctagaaca

SEQ ID NO: 1741290 - DNA, 15 bp, Homo sapiens
taagatctagaacat

SEQ ID NO: 1741291 - DNA, 15 bp, Homo sapiens
aagatctagaacatg

SEQ ID NO: 1741292 - DNA, 15 bp, Homo sapiens
agatctagaacatga

SEQ ID NO: 1741293 - DNA, 15 bp, Homo sapiens
gatctagaacatgat

SEQ ID NO: 1741294 - DNA, 15 bp, Homo sapiens
atctagaacatgatg

SEQ ID NO: 1741295 - DNA, 15 bp, Homo sapiens
tctagaacatgatga

SEQ ID NO: 1741296 - DNA, 15 bp, Homo sapiens
ctagaacatgatgag

SEQ ID NO: 1741297 - DNA, 15 bp, Homo sapiens
tagaacatgatgagg

SEQ ID NO: 1741298 - DNA, 15 bp, Homo sapiens
agaacatgatgagga

SEQ ID NO: 1741299 - DNA, 15 bp, Homo sapiens
gaacatgatgaggat

SEQ ID NO: 1741300 - DNA, 15 bp, Homo sapiens
aacatgatgaggatg

SEQ ID NO: 1741301 - DNA, 15 bp, Homo sapiens
acatgatgaggatgt

SEQ ID NO: 1741302 - DNA, 15 bp, Homo sapiens
catgatgaggatgtc

SEQ ID NO: 1741303 - DNA, 15 bp, Homo sapiens
atgatgaggatgtcc

SEQ ID NO: 1741304 - DNA, 15 bp, Homo sapiens
tgatgaggatgtcca

SEQ ID NO: 1741305 - DNA, 15 bp, Homo sapiens
gatgaggatgtccat

SEQ ID NO: 1741306 - DNA, 15 bp, Homo sapiens
atgaggatgtccatt

SEQ ID NO: 1741307 - DNA, 15 bp, Homo sapiens
tgaggatgtccattg

SEQ ID NO: 1741308 - DNA, 15 bp, Homo sapiens
gaggatgtccattgt

SEQ ID NO: 1741309 - DNA, 15 bp, Homo sapiens
aggatgtccattgtc

SEQ ID NO: 1741310 - DNA, 15 bp, Homo sapiens
ggatgtccattgtca

SEQ ID NO: 1741311 - DNA, 15 bp, Homo sapiens
gatgtccattgtcat

SEQ ID NO: 1741312 - DNA, 15 bp, Homo sapiens
atgtccattgtcatc

SEQ ID NO: 1741313 - DNA, 15 bp, Homo sapiens
tgtccattgtcatca

SEQ ID NO: 1741314 - DNA, 15 bp, Homo sapiens
gtccattgtcatcac

SEQ ID NO: 1741315 - DNA, 15 bp, Homo sapiens
tccattgtcatcact

SEQ ID NO: 1741316 - DNA, 15 bp, Homo sapiens
ccattgtcatcactg

SEQ ID NO: 1741317 - DNA, 15 bp, Homo sapiens
cattgtcatcactgt

SEQ ID NO: 1741318 - DNA, 15 bp, Homo sapiens
attgtcatcactgtt

SEQ ID NO: 1741319 - DNA, 15 bp, Homo sapiens
ttgtcatcactgtta

SEQ ID NO: 1741320 - DNA, 15 bp, Homo sapiens
tgtcatcactgttat

SEQ ID NO: 1741321 - DNA, 15 bp, Homo sapiens
gtcatcactgttatt

SEQ ID NO: 1741322 - DNA, 15 bp, Homo sapiens
tcatcactgttattc

SEQ ID NO: 1741323 - DNA, 15 bp, Homo sapiens
catcactgttattca

SEQ ID NO: 1741324 - DNA, 15 bp, Homo sapiens
atcactgttattcag

SEQ ID NO: 1741325 - DNA, 15 bp, Homo sapiens
tcactgttattcagc

SEQ ID NO: 1741326 - DNA, 15 bp, Homo sapiens
cactgttattcagca

SEQ ID NO: 1741327 - DNA, 15 bp, Homo sapiens
actgttattcagcat

SEQ ID NO: 1741328 - DNA, 15 bp, Homo sapiens
ctgttattcagcata

SEQ ID NO: 1741329 - DNA, 15 bp, Homo sapiens
tgttattcagcatag

SEQ ID NO: 1741330 - DNA, 15 bp, Homo sapiens
gttattcagcatagt

SEQ ID NO: 1741331 - DNA, 15 bp, Homo sapiens
ttattcagcatagta

SEQ ID NO: 1741332 - DNA, 15 bp, Homo sapiens
tattcagcatagtac

SEQ ID NO: 1741333 - DNA, 15 bp, Homo sapiens
attcagcatagtact

SEQ ID NO: 1741334 - DNA, 15 bp, Homo sapiens
ttcagcatagtactg

SEQ ID NO: 1741335 - DNA, 15 bp, Homo sapiens
tcagcatagtactgg

SEQ ID NO: 1741336 - DNA, 15 bp, Homo sapiens
cagcatagtactgga

SEQ ID NO: 1741337 - DNA, 15 bp, Homo sapiens
agcatagtactggaa

SEQ ID NO: 1741338 - DNA, 15 bp, Homo sapiens
gcatagtactggaag

SEQ ID NO: 1741339 - DNA, 15 bp, Homo sapiens
catagtactggaagt

SEQ ID NO: 1741340 - DNA, 15 bp, Homo sapiens
atagtactggaagtc

SEQ ID NO: 1741341 - DNA, 15 bp, Homo sapiens
tagtactggaagtcc

SEQ ID NO: 1741342 - DNA, 15 bp, Homo sapiens
agtactggaagtcct

SEQ ID NO: 1741343 - DNA, 15 bp, Homo sapiens
gtactggaagtccta

SEQ ID NO: 1741344 - DNA, 15 bp, Homo sapiens
tactggaagtcctag

SEQ ID NO: 1741345 - DNA, 15 bp, Homo sapiens
actggaagtcctaga

SEQ ID NO: 1741346 - DNA, 15 bp, Homo sapiens
ctggaagtcctagat

SEQ ID NO: 1741347 - DNA, 15 bp, Homo sapiens
tggaagtcctagata

SEQ ID NO: 1741348 - DNA, 15 bp, Homo sapiens
ggaagtcctagatag

SEQ ID NO: 1741349 - DNA, 15 bp, Homo sapiens
gaagtcctagataga

SEQ ID NO: 1741350 - DNA, 15 bp, Homo sapiens
aagtcctagatagag

SEQ ID NO: 1741351 - DNA, 15 bp, Homo sapiens
agtcctagatagagt

SEQ ID NO: 1741352 - DNA, 15 bp, Homo sapiens
gtcctagatagagta

SEQ ID NO: 1741353 - DNA, 15 bp, Homo sapiens
tcctagatagagtag

SEQ ID NO: 1741354 - DNA, 15 bp, Homo sapiens
cctagatagagtagt

SEQ ID NO: 1741355 - DNA, 15 bp, Homo sapiens
ctagatagagtagtc

SEQ ID NO: 1741356 - DNA, 15 bp, Homo sapiens
tagatagagtagtca

SEQ ID NO: 1741357 - DNA, 15 bp, Homo sapiens
agatagagtagtcag

SEQ ID NO: 1741358 - DNA, 15 bp, Homo sapiens
gatagagtagtcaga

SEQ ID NO: 1741359 - DNA, 15 bp, Homo sapiens
atagagtagtcagac

SEQ ID NO: 1741360 - DNA, 15 bp, Homo sapiens
tagagtagtcagaca

SEQ ID NO: 1741361 - DNA, 15 bp, Homo sapiens
agagtagtcagacaa

SEQ ID NO: 1741362 - DNA, 15 bp, Homo sapiens
gagtagtcagacaaa

SEQ ID NO: 1741363 - DNA, 15 bp, Homo sapiens
agtagtcagacaaaa

SEQ ID NO: 1741364 - DNA, 15 bp, Homo sapiens
gtagtcagacaaaag

SEQ ID NO: 1741365 - DNA, 15 bp, Homo sapiens
tagtcagacaaaaga

SEQ ID NO: 1741366 - DNA, 15 bp, Homo sapiens
agtcagacaaaagat

SEQ ID NO: 1741367 - DNA, 15 bp, Homo sapiens
gtcagacaaaagata

SEQ ID NO: 1741368 - DNA, 15 bp, Homo sapiens
tcagacaaaagatat

SEQ ID NO: 1741369 - DNA, 15 bp, Homo sapiens
cagacaaaagatata

SEQ ID NO: 1741370 - DNA, 15 bp, Homo sapiens
agacaaaagatataa

SEQ ID NO: 1741371 - DNA, 15 bp, Homo sapiens
gacaaaagatataaa

SEQ ID NO: 1741372 - DNA, 15 bp, Homo sapiens
acaaaagatataaag

SEQ ID NO: 1741373 - DNA, 15 bp, Homo sapiens
caaaagatataaagg

SEQ ID NO: 1741374 - DNA, 15 bp, Homo sapiens
aaaagatataaaggg

SEQ ID NO: 1741375 - DNA, 15 bp, Homo sapiens
aaagatataaaggga

SEQ ID NO: 1741376 - DNA, 15 bp, Homo sapiens
aagatataaagggaa

SEQ ID NO: 1741377 - DNA, 15 bp, Homo sapiens
agatataaagggaat

SEQ ID NO: 1741378 - DNA, 15 bp, Homo sapiens
gatataaagggaatc

SEQ ID NO: 1741379 - DNA, 15 bp, Homo sapiens
atataaagggaatcc

SEQ ID NO: 1741380 - DNA, 15 bp, Homo sapiens
tataaagggaatcca

SEQ ID NO: 1741381 - DNA, 15 bp, Homo sapiens
ataaagggaatccag

SEQ ID NO: 1741382 - DNA, 15 bp, Homo sapiens
taaagggaatccaga

SEQ ID NO: 1741383 - DNA, 15 bp, Homo sapiens
aaagggaatccagat

SEQ ID NO: 1741384 - DNA, 15 bp, Homo sapiens
aagggaatccagatt

SEQ ID NO: 1741385 - DNA, 15 bp, Homo sapiens
agggaatccagattg

SEQ ID NO: 1741386 - DNA, 15 bp, Homo sapiens
gggaatccagattgg

SEQ ID NO: 1741387 - DNA, 15 bp, Homo sapiens
ggaatccagattgga

SEQ ID NO: 1741388 - DNA, 15 bp, Homo sapiens
gaatccagattggaa

SEQ ID NO: 1741389 - DNA, 15 bp, Homo sapiens
aatccagattggaaa

SEQ ID NO: 1741390 - DNA, 15 bp, Homo sapiens
atccagattggaaag

SEQ ID NO: 1741391 - DNA, 15 bp, Homo sapiens
tccagattggaaaga

SEQ ID NO: 1741392 - DNA, 15 bp, Homo sapiens
ccagattggaaagaa

SEQ ID NO: 1741393 - DNA, 15 bp, Homo sapiens
cagattggaaagaaa

SEQ ID NO: 1741394 - DNA, 15 bp, Homo sapiens
agattggaaagaaag

SEQ ID NO: 1741395 - DNA, 15 bp, Homo sapiens
gattggaaagaaaga

SEQ ID NO: 1741396 - DNA, 15 bp, Homo sapiens
attggaaagaaagaa

SEQ ID NO: 1741397 - DNA, 15 bp, Homo sapiens
ttggaaagaaagaag

SEQ ID NO: 1741398 - DNA, 15 bp, Homo sapiens
tggaaagaaagaagt

SEQ ID NO: 1741399 - DNA, 15 bp, Homo sapiens
ggaaagaaagaagtc

SEQ ID NO: 1741400 - DNA, 15 bp, Homo sapiens
gaaagaaagaagtca

SEQ ID NO: 1741401 - DNA, 15 bp, Homo sapiens
aaagaaagaagtcaa

SEQ ID NO: 1741402 - DNA, 15 bp, Homo sapiens
aagaaagaagtcaag

SEQ ID NO: 1741403 - DNA, 15 bp, Homo sapiens
agaaagaagtcaagt

SEQ ID NO: 1741404 - DNA, 15 bp, Homo sapiens
gaaagaagtcaagtt

SEQ ID NO: 1741405 - DNA, 15 bp, Homo sapiens
aaagaagtcaagtta

SEQ ID NO: 1741406 - DNA, 15 bp, Homo sapiens
aagaagtcaagttat

SEQ ID NO: 1741407 - DNA, 15 bp, Homo sapiens
agaagtcaagttatc

SEQ ID NO: 1741408 - DNA, 15 bp, Homo sapiens
gaagtcaagttatcc

SEQ ID NO: 1741409 - DNA, 15 bp, Homo sapiens
aagtcaagttatcct

SEQ ID NO: 1741410 - DNA, 15 bp, Homo sapiens
agtcaagttatcctt

SEQ ID NO: 1741411 - DNA, 15 bp, Homo sapiens
gtcaagttatccttg

SEQ ID NO: 1741412 - DNA, 15 bp, Homo sapiens
tcaagttatccttgt

SEQ ID NO: 1741413 - DNA, 15 bp, Homo sapiens
caagttatccttgtt

SEQ ID NO: 1741414 - DNA, 15 bp, Homo sapiens
aagttatccttgttt

SEQ ID NO: 1741415 - DNA, 15 bp, Homo sapiens
agttatccttgtttg

SEQ ID NO: 1741416 - DNA, 15 bp, Homo sapiens
gttatccttgtttgc

SEQ ID NO: 1741417 - DNA, 15 bp, Homo sapiens
ttatccttgtttgca

SEQ ID NO: 1741418 - DNA, 15 bp, Homo sapiens
tatccttgtttgcag

SEQ ID NO: 1741419 - DNA, 15 bp, Homo sapiens
atccttgtttgcagc

SEQ ID NO: 1741420 - DNA, 15 bp, Homo sapiens
tccttgtttgcagct

SEQ ID NO: 1741421 - DNA, 15 bp, Homo sapiens
ccttgtttgcagctg

SEQ ID NO: 1741422 - DNA, 15 bp, Homo sapiens
cttgtttgcagctga

SEQ ID NO: 1741423 - DNA, 15 bp, Homo sapiens
ttgtttgcagctgat

SEQ ID NO: 1741424 - DNA, 15 bp, Homo sapiens
tgtttgcagctgata

SEQ ID NO: 1741425 - DNA, 15 bp, Homo sapiens
gtttgcagctgatac

SEQ ID NO: 1741426 - DNA, 15 bp, Homo sapiens
tttgcagctgataca

SEQ ID NO: 1741427 - DNA, 15 bp, Homo sapiens
ttgcagctgatacaa

SEQ ID NO: 1741428 - DNA, 15 bp, Homo sapiens
tgcagctgatacaat

SEQ ID NO: 1741429 - DNA, 15 bp, Homo sapiens
gcagctgatacaatc

SEQ ID NO: 1741430 - DNA, 15 bp, Homo sapiens
cagctgatacaatct

SEQ ID NO: 1741431 - DNA, 15 bp, Homo sapiens
agctgatacaatctt

SEQ ID NO: 1741432 - DNA, 15 bp, Homo sapiens
gctgatacaatctta

SEQ ID NO: 1741433 - DNA, 15 bp, Homo sapiens
ctgatacaatcttat

SEQ ID NO: 1741434 - DNA, 15 bp, Homo sapiens
tgatacaatcttata

SEQ ID NO: 1741435 - DNA, 15 bp, Homo sapiens
gatacaatcttatat

SEQ ID NO: 1741436 - DNA, 15 bp, Homo sapiens
atacaatcttatatt

SEQ ID NO: 1741437 - DNA, 15 bp, Homo sapiens
tacaatcttatattt

SEQ ID NO: 1741438 - DNA, 15 bp, Homo sapiens
acaatcttatatttg

SEQ ID NO: 1741439 - DNA, 15 bp, Homo sapiens
caatcttatatttgg

SEQ ID NO: 1741440 - DNA, 15 bp, Homo sapiens
aatcttatatttgga

SEQ ID NO: 1741441 - DNA, 15 bp, Homo sapiens
atcttatatttggaa

SEQ ID NO: 1741442 - DNA, 15 bp, Homo sapiens
tcttatatttggaag

SEQ ID NO: 1741443 - DNA, 15 bp, Homo sapiens
cttatatttggaaga

SEQ ID NO: 1741444 - DNA, 15 bp, Homo sapiens
ttatatttggaagaa

SEQ ID NO: 1741445 - DNA, 15 bp, Homo sapiens
tatatttggaagaac

SEQ ID NO: 1741446 - DNA, 15 bp, Homo sapiens
atatttggaagaacc

SEQ ID NO: 1741447 - DNA, 15 bp, Homo sapiens
tatttggaagaacct

SEQ ID NO: 1741448 - DNA, 15 bp, Homo sapiens
atttggaagaaccta

SEQ ID NO: 1741449 - DNA, 15 bp, Homo sapiens
tttggaagaacctaa

SEQ ID NO: 1741450 - DNA, 15 bp, Homo sapiens
ttggaagaacctaaa

SEQ ID NO: 1741451 - DNA, 15 bp, Homo sapiens
tggaagaacctaaag

SEQ ID NO: 1741452 - DNA, 15 bp, Homo sapiens
ggaagaacctaaaga

SEQ ID NO: 1741453 - DNA, 15 bp, Homo sapiens
gaagaacctaaagac

SEQ ID NO: 1741454 - DNA, 15 bp, Homo sapiens
aagaacctaaagact

SEQ ID NO: 1741455 - DNA, 15 bp, Homo sapiens
agaacctaaagactc

SEQ ID NO: 1741456 - DNA, 15 bp, Homo sapiens
gaacctaaagactcc

SEQ ID NO: 1741457 - DNA, 15 bp, Homo sapiens
aacctaaagactcca

SEQ ID NO: 1741458 - DNA, 15 bp, Homo sapiens
acctaaagactccac

SEQ ID NO: 1741459 - DNA, 15 bp, Homo sapiens
cctaaagactccaca

SEQ ID NO: 1741460 - DNA, 15 bp, Homo sapiens
ctaaagactccacaa

SEQ ID NO: 1741461 - DNA, 15 bp, Homo sapiens
taaagactccacaag

SEQ ID NO: 1741462 - DNA, 15 bp, Homo sapiens
aaagactccacaaga

SEQ ID NO: 1741463 - DNA, 15 bp, Homo sapiens
aagactccacaagaa

SEQ ID NO: 1741464 - DNA, 15 bp, Homo sapiens
agactccacaagaaa

SEQ ID NO: 1741465 - DNA, 15 bp, Homo sapiens
gactccacaagaaaa

SEQ ID NO: 1741466 - DNA, 15 bp, Homo sapiens
actccacaagaaaac

SEQ ID NO: 1741467 - DNA, 15 bp, Homo sapiens
ctccacaagaaaact

SEQ ID NO: 1741468 - DNA, 15 bp, Homo sapiens
tccacaagaaaacta

SEQ ID NO: 1741469 - DNA, 15 bp, Homo sapiens
ccacaagaaaactat

SEQ ID NO: 1741470 - DNA, 15 bp, Homo sapiens
cacaagaaaactatt

SEQ ID NO: 1741471 - DNA, 15 bp, Homo sapiens
acaagaaaactatta

SEQ ID NO: 1741472 - DNA, 15 bp, Homo sapiens
caagaaaactattag

SEQ ID NO: 1741473 - DNA, 15 bp, Homo sapiens
aagaaaactattaga

SEQ ID NO: 1741474 - DNA, 15 bp, Homo sapiens
agaaaactattagaa

SEQ ID NO: 1741475 - DNA, 15 bp, Homo sapiens
gaaaactattagaac

SEQ ID NO: 1741476 - DNA, 15 bp, Homo sapiens
aaaactattagaact

SEQ ID NO: 1741477 - DNA, 15 bp, Homo sapiens
aaactattagaacta

SEQ ID NO: 1741478 - DNA, 15 bp, Homo sapiens
aactattagaactaa

SEQ ID NO: 1741479 - DNA, 15 bp, Homo sapiens
actattagaactaat

SEQ ID NO: 1741480 - DNA, 15 bp, Homo sapiens
ctattagaactaata

SEQ ID NO: 1741481 - DNA, 15 bp, Homo sapiens
tattagaactaataa

SEQ ID NO: 1741482 - DNA, 15 bp, Homo sapiens
attagaactaataaa

SEQ ID NO: 1741483 - DNA, 15 bp, Homo sapiens
ttagaactaataaac

SEQ ID NO: 1741484 - DNA, 15 bp, Homo sapiens
tagaactaataaaca

SEQ ID NO: 1741485 - DNA, 15 bp, Homo sapiens
agaactaataaacat

SEQ ID NO: 1741486 - DNA, 15 bp, Homo sapiens
gaactaataaacatg

SEQ ID NO: 1741487 - DNA, 15 bp, Homo sapiens
aactaataaacatgt

SEQ ID NO: 1741488 - DNA, 15 bp, Homo sapiens
actaataaacatgtt

SEQ ID NO: 1741489 - DNA, 15 bp, Homo sapiens
ctaataaacatgttc

SEQ ID NO: 1741490 - DNA, 15 bp, Homo sapiens
taataaacatgttca

SEQ ID NO: 1741491 - DNA, 15 bp, Homo sapiens
aataaacatgttcag

SEQ ID NO: 1741492 - DNA, 15 bp, Homo sapiens
ataaacatgttcagt

SEQ ID NO: 1741493 - DNA, 15 bp, Homo sapiens
taaacatgttcagta

SEQ ID NO: 1741494 - DNA, 15 bp, Homo sapiens
aaacatgttcagtaa

SEQ ID NO: 1741495 - DNA, 15 bp, Homo sapiens
aacatgttcagtaaa

SEQ ID NO: 1741496 - DNA, 15 bp, Homo sapiens
acatgttcagtaaag

SEQ ID NO: 1741497 - DNA, 15 bp, Homo sapiens
catgttcagtaaagt

SEQ ID NO: 1741498 - DNA, 15 bp, Homo sapiens
atgttcagtaaagtt

SEQ ID NO: 1741499 - DNA, 15 bp, Homo sapiens
tgttcagtaaagttg

SEQ ID NO: 1741500 - DNA, 15 bp, Homo sapiens
gttcagtaaagttga

SEQ ID NO: 1741501 - DNA, 15 bp, Homo sapiens
ttcagtaaagttgaa

SEQ ID NO: 1741502 - DNA, 15 bp, Homo sapiens
tcagtaaagttgaag

SEQ ID NO: 1741503 - DNA, 15 bp, Homo sapiens
cagtaaagttgaagg

SEQ ID NO: 1741504 - DNA, 15 bp, Homo sapiens
agtaaagttgaagga

SEQ ID NO: 1741505 - DNA, 15 bp, Homo sapiens
gtaaagttgaaggat

SEQ ID NO: 1741506 - DNA, 15 bp, Homo sapiens
taaagttgaaggata

SEQ ID NO: 1741507 - DNA, 15 bp, Homo sapiens
aaagttgaaggatag

SEQ ID NO: 1741508 - DNA, 15 bp, Homo sapiens
aagttgaaggataga

SEQ ID NO: 1741509 - DNA, 15 bp, Homo sapiens
agttgaaggatagaa

SEQ ID NO: 1741510 - DNA, 15 bp, Homo sapiens
gttgaaggatagaaa

SEQ ID NO: 1741511 - DNA, 15 bp, Homo sapiens
ttgaaggatagaaaa

SEQ ID NO: 1741512 - DNA, 15 bp, Homo sapiens
tgaaggatagaaaat

SEQ ID NO: 1741513 - DNA, 15 bp, Homo sapiens
gaaggatagaaaatc

SEQ ID NO: 1741514 - DNA, 15 bp, Homo sapiens
aaggatagaaaatca

SEQ ID NO: 1741515 - DNA, 15 bp, Homo sapiens
aggatagaaaatcaa

SEQ ID NO: 1741516 - DNA, 15 bp, Homo sapiens
ggatagaaaatcaac

SEQ ID NO: 1741517 - DNA, 15 bp, Homo sapiens
gatagaaaatcaaca

SEQ ID NO: 1741518 - DNA, 15 bp, Homo sapiens
atagaaaatcaacat

SEQ ID NO: 1741519 - DNA, 15 bp, Homo sapiens
tagaaaatcaacata

SEQ ID NO: 1741520 - DNA, 15 bp, Homo sapiens
agaaaatcaacatac

SEQ ID NO: 1741521 - DNA, 15 bp, Homo sapiens
gaaaatcaacataca

SEQ ID NO: 1741522 - DNA, 15 bp, Homo sapiens
aaaatcaacatacaa

SEQ ID NO: 1741523 - DNA, 15 bp, Homo sapiens
aaatcaacatacaaa

SEQ ID NO: 1741524 - DNA, 15 bp, Homo sapiens
aatcaacatacaaaa

SEQ ID NO: 1741525 - DNA, 15 bp, Homo sapiens
atcaacatacaaaaa

SEQ ID NO: 1741526 - DNA, 15 bp, Homo sapiens
tcaacatacaaaaat

SEQ ID NO: 1741527 - DNA, 15 bp, Homo sapiens
caacatacaaaaatc

SEQ ID NO: 1741528 - DNA, 15 bp, Homo sapiens
aacatacaaaaatca

SEQ ID NO: 1741529 - DNA, 15 bp, Homo sapiens
acatacaaaaatcag

SEQ ID NO: 1741530 - DNA, 15 bp, Homo sapiens
catacaaaaatcagt

SEQ ID NO: 1741531 - DNA, 15 bp, Homo sapiens
atacaaaaatcagta

SEQ ID NO: 1741532 - DNA, 15 bp, Homo sapiens
tacaaaaatcagtaa

SEQ ID NO: 1741533 - DNA, 15 bp, Homo sapiens
acaaaaatcagtaat

SEQ ID NO: 1741534 - DNA, 15 bp, Homo sapiens
caaaaatcagtaatg

SEQ ID NO: 1741535 - DNA, 15 bp, Homo sapiens
aaaaatcagtaatgt

SEQ ID NO: 1741536 - DNA, 15 bp, Homo sapiens
aaaatcagtaatgtt

SEQ ID NO: 1741537 - DNA, 15 bp, Homo sapiens
aaatcagtaatgttt

SEQ ID NO: 1741538 - DNA, 15 bp, Homo sapiens
aatcagtaatgtttc

SEQ ID NO: 1741539 - DNA, 15 bp, Homo sapiens
atcagtaatgtttct

SEQ ID NO: 1741540 - DNA, 15 bp, Homo sapiens
tcagtaatgtttctg

SEQ ID NO: 1741541 - DNA, 15 bp, Homo sapiens
cagtaatgtttctgt

SEQ ID NO: 1741542 - DNA, 15 bp, Homo sapiens
agtaatgtttctgta

SEQ ID NO: 1741543 - DNA, 15 bp, Homo sapiens
gtaatgtttctgtat

SEQ ID NO: 1741544 - DNA, 15 bp, Homo sapiens
taatgtttctgtatg

SEQ ID NO: 1741545 - DNA, 15 bp, Homo sapiens
aatgtttctgtatgc

SEQ ID NO: 1741546 - DNA, 15 bp, Homo sapiens
atgtttctgtatgcc

SEQ ID NO: 1741547 - DNA, 15 bp, Homo sapiens
tgtttctgtatgcca

SEQ ID NO: 1741548 - DNA, 15 bp, Homo sapiens
gtttctgtatgccaa

SEQ ID NO: 1741549 - DNA, 15 bp, Homo sapiens
tttctgtatgccaac

SEQ ID NO: 1741550 - DNA, 15 bp, Homo sapiens
ttctgtatgccaaca

SEQ ID NO: 1741551 - DNA, 15 bp, Homo sapiens
tctgtatgccaacag

SEQ ID NO: 1741552 - DNA, 15 bp, Homo sapiens
ctgtatgccaacagt

SEQ ID NO: 1741553 - DNA, 15 bp, Homo sapiens
tgtatgccaacagtg

SEQ ID NO: 1741554 - DNA, 15 bp, Homo sapiens
gtatgccaacagtga

SEQ ID NO: 1741555 - DNA, 15 bp, Homo sapiens
tatgccaacagtgaa

SEQ ID NO: 1741556 - DNA, 15 bp, Homo sapiens
atgccaacagtgaat

SEQ ID NO: 1741557 - DNA, 15 bp, Homo sapiens
tgccaacagtgaata

SEQ ID NO: 1741558 - DNA, 15 bp, Homo sapiens
gccaacagtgaataa

SEQ ID NO: 1741559 - DNA, 15 bp, Homo sapiens
ccaacagtgaataat

SEQ ID NO: 1741560 - DNA, 15 bp, Homo sapiens
caacagtgaataatg

SEQ ID NO: 1741561 - DNA, 15 bp, Homo sapiens
aacagtgaataatgt

SEQ ID NO: 1741562 - DNA, 15 bp, Homo sapiens
acagtgaataatgtg

SEQ ID NO: 1741563 - DNA, 15 bp, Homo sapiens
cagtgaataatgtga

SEQ ID NO: 1741564 - DNA, 15 bp, Homo sapiens
agtgaataatgtgaa

SEQ ID NO: 1741565 - DNA, 15 bp, Homo sapiens
gtgaataatgtgaaa

SEQ ID NO: 1741566 - DNA, 15 bp, Homo sapiens
tgaataatgtgaaaa

SEQ ID NO: 1741567 - DNA, 15 bp, Homo sapiens
gaataatgtgaaaaa

SEQ ID NO: 1741568 - DNA, 15 bp, Homo sapiens
aataatgtgaaaaag

SEQ ID NO: 1741569 - DNA, 15 bp, Homo sapiens
ataatgtgaaaaaga

SEQ ID NO: 1741570 - DNA, 15 bp, Homo sapiens
taatgtgaaaaagaa

SEQ ID NO: 1741571 - DNA, 15 bp, Homo sapiens
aatgtgaaaaagaaa

SEQ ID NO: 1741572 - DNA, 15 bp, Homo sapiens
atgtgaaaaagaaat

SEQ ID NO: 1741573 - DNA, 15 bp, Homo sapiens
tgtgaaaaagaaatt

SEQ ID NO: 1741574 - DNA, 15 bp, Homo sapiens
gtgaaaaagaaattt

SEQ ID NO: 1741575 - DNA, 15 bp, Homo sapiens
tgaaaaagaaattta

SEQ ID NO: 1741576 - DNA, 15 bp, Homo sapiens
gaaaaagaaatttaa

SEQ ID NO: 1741577 - DNA, 15 bp, Homo sapiens
aaaaagaaatttaaa

SEQ ID NO: 1741578 - DNA, 15 bp, Homo sapiens
aaaagaaatttaaaa

SEQ ID NO: 1741579 - DNA, 15 bp, Homo sapiens
aaagaaatttaaaaa

SEQ ID NO: 1741580 - DNA, 15 bp, Homo sapiens
aagaaatttaaaaag

SEQ ID NO: 1741581 - DNA, 15 bp, Homo sapiens
agaaatttaaaaagt

SEQ ID NO: 1741582 - DNA, 15 bp, Homo sapiens
gaaatttaaaaagta

SEQ ID NO: 1741583 - DNA, 15 bp, Homo sapiens
aaatttaaaaagtag

SEQ ID NO: 1741584 - DNA, 15 bp, Homo sapiens
aatttaaaaagtagt

SEQ ID NO: 1741585 - DNA, 15 bp, Homo sapiens
atttaaaaagtagtc

SEQ ID NO: 1741586 - DNA, 15 bp, Homo sapiens
tttaaaaagtagtcc

SEQ ID NO: 1741587 - DNA, 15 bp, Homo sapiens
ttaaaaagtagtcct

SEQ ID NO: 1741588 - DNA, 15 bp, Homo sapiens
taaaaagtagtcctg

SEQ ID NO: 1741589 - DNA, 15 bp, Homo sapiens
aaaaagtagtcctgt

SEQ ID NO: 1741590 - DNA, 15 bp, Homo sapiens
aaaagtagtcctgtt

SEQ ID NO: 1741591 - DNA, 15 bp, Homo sapiens
aaagtagtcctgttt

SEQ ID NO: 1741592 - DNA, 15 bp, Homo sapiens
aagtagtcctgttta

SEQ ID NO: 1741593 - DNA, 15 bp, Homo sapiens
agtagtcctgtttac

SEQ ID NO: 1741594 - DNA, 15 bp, Homo sapiens
gtagtcctgtttaca

SEQ ID NO: 1741595 - DNA, 15 bp, Homo sapiens
tagtcctgtttacaa

SEQ ID NO: 1741596 - DNA, 15 bp, Homo sapiens
agtcctgtttacaat

SEQ ID NO: 1741597 - DNA, 15 bp, Homo sapiens
gtcctgtttacaata

SEQ ID NO: 1741598 - DNA, 15 bp, Homo sapiens
tcctgtttacaatag

SEQ ID NO: 1741599 - DNA, 15 bp, Homo sapiens
cctgtttacaatagc

SEQ ID NO: 1741600 - DNA, 15 bp, Homo sapiens
ctgtttacaatagcc

SEQ ID NO: 1741601 - DNA, 15 bp, Homo sapiens
tgtttacaatagcca

SEQ ID NO: 1741602 - DNA, 15 bp, Homo sapiens
gtttacaatagccac

SEQ ID NO: 1741603 - DNA, 15 bp, Homo sapiens
tttacaatagccaca

SEQ ID NO: 1741604 - DNA, 15 bp, Homo sapiens
ttacaatagccacac

SEQ ID NO: 1741605 - DNA, 15 bp, Homo sapiens
tacaatagccacaca

SEQ ID NO: 1741606 - DNA, 15 bp, Homo sapiens
acaatagccacacat

SEQ ID NO: 1741607 - DNA, 15 bp, Homo sapiens
caatagccacacata

SEQ ID NO: 1741608 - DNA, 15 bp, Homo sapiens
aatagccacacataa

SEQ ID NO: 1741609 - DNA, 15 bp, Homo sapiens
atagccacacataaa

SEQ ID NO: 1741610 - DNA, 15 bp, Homo sapiens
tagccacacataaaa

SEQ ID NO: 1741611 - DNA, 15 bp, Homo sapiens
agccacacataaaat

SEQ ID NO: 1741612 - DNA, 15 bp, Homo sapiens
gccacacataaaata

SEQ ID NO: 1741613 - DNA, 15 bp, Homo sapiens
ccacacataaaataa

SEQ ID NO: 1741614 - DNA, 15 bp, Homo sapiens
cacacataaaataaa

SEQ ID NO: 1741615 - DNA, 15 bp, Homo sapiens
acacataaaataaaa

SEQ ID NO: 1741616 - DNA, 15 bp, Homo sapiens
cacataaaataaaat

SEQ ID NO: 1741617 - DNA, 15 bp, Homo sapiens
cataaaataaaatgc

SEQ ID NO: 1741618 - DNA, 15 bp, Homo sapiens
ataaaataaaatgcc

SEQ ID NO: 1741619 - DNA, 15 bp, Homo sapiens
taaaataaaatgcct

SEQ ID NO: 1741620 - DNA, 15 bp, Homo sapiens
aaaataaaatgccta

SEQ ID NO: 1741621 - DNA, 15 bp, Homo sapiens
aaataaaatgcctag

SEQ ID NO: 1741622 - DNA, 15 bp, Homo sapiens
aataaaatgcctagg

SEQ ID NO: 1741623 - DNA, 15 bp, Homo sapiens
ataaaatgcctagga

SEQ ID NO: 1741624 - DNA, 15 bp, Homo sapiens
taaaatgcctaggaa

SEQ ID NO: 1741625 - DNA, 15 bp, Homo sapiens
aaaatgcctaggaat

SEQ ID NO: 1741626 - DNA, 15 bp, Homo sapiens
aaatgcctaggaatt

SEQ ID NO: 1741627 - DNA, 15 bp, Homo sapiens
aatgcctaggaatta

SEQ ID NO: 1741628 - DNA, 15 bp, Homo sapiens
atgcctaggaattaa

SEQ ID NO: 1741629 - DNA, 15 bp, Homo sapiens
tgcctaggaattaac

SEQ ID NO: 1741630 - DNA, 15 bp, Homo sapiens
gcctaggaattaacc

SEQ ID NO: 1741631 - DNA, 15 bp, Homo sapiens
cctaggaattaacca

SEQ ID NO: 1741632 - DNA, 15 bp, Homo sapiens
ctaggaattaaccac

SEQ ID NO: 1741633 - DNA, 15 bp, Homo sapiens
taggaattaaccaca

SEQ ID NO: 1741634 - DNA, 15 bp, Homo sapiens
aggaattaaccacag

SEQ ID NO: 1741635 - DNA, 15 bp, Homo sapiens
ggaattaaccacaga

SEQ ID NO: 1741636 - DNA, 15 bp, Homo sapiens
gaattaaccacagaa

SEQ ID NO: 1741637 - DNA, 15 bp, Homo sapiens
aattaaccacagaag

SEQ ID NO: 1741638 - DNA, 15 bp, Homo sapiens
attaaccacagaagt

SEQ ID NO: 1741639 - DNA, 15 bp, Homo sapiens
ttaaccacagaagtg

SEQ ID NO: 1741640 - DNA, 15 bp, Homo sapiens
taaccacagaagtga

SEQ ID NO: 1741641 - DNA, 15 bp, Homo sapiens
aaccacagaagtgaa

SEQ ID NO: 1741642 - DNA, 15 bp, Homo sapiens
accacagaagtgaaa

SEQ ID NO: 1741643 - DNA, 15 bp, Homo sapiens
ccacagaagtgaaag

SEQ ID NO: 1741644 - DNA, 15 bp, Homo sapiens
cacagaagtgaaaga

SEQ ID NO: 1741645 - DNA, 15 bp, Homo sapiens
acagaagtgaaagat

SEQ ID NO: 1741646 - DNA, 15 bp, Homo sapiens
cagaagtgaaagatc

SEQ ID NO: 1741647 - DNA, 15 bp, Homo sapiens
agaagtgaaagatct

SEQ ID NO: 1741648 - DNA, 15 bp, Homo sapiens
gaagtgaaagatctc

SEQ ID NO: 1741649 - DNA, 15 bp, Homo sapiens
aagtgaaagatctct

SEQ ID NO: 1741650 - DNA, 15 bp, Homo sapiens
agtgaaagatctcta

SEQ ID NO: 1741651 - DNA, 15 bp, Homo sapiens
gtgaaagatctctat

SEQ ID NO: 1741652 - DNA, 15 bp, Homo sapiens
tgaaagatctctatg

SEQ ID NO: 1741653 - DNA, 15 bp, Homo sapiens
gaaagatctctatga

SEQ ID NO: 1741654 - DNA, 15 bp, Homo sapiens
aaagatctctatgat

SEQ ID NO: 1741655 - DNA, 15 bp, Homo sapiens
aagatctctatgatg

SEQ ID NO: 1741656 - DNA, 15 bp, Homo sapiens
agatctctatgatga

SEQ ID NO: 1741657 - DNA, 15 bp, Homo sapiens
gatctctatgatgaa

SEQ ID NO: 1741658 - DNA, 15 bp, Homo sapiens
atctctatgatgaaa

SEQ ID NO: 1741659 - DNA, 15 bp, Homo sapiens
tctctatgatgaaaa

SEQ ID NO: 1741660 - DNA, 15 bp, Homo sapiens
ctctatgatgaaaac

SEQ ID NO: 1741661 - DNA, 15 bp, Homo sapiens
tctatgatgaaaacc

SEQ ID NO: 1741662 - DNA, 15 bp, Homo sapiens
ctatgatgaaaacca

SEQ ID NO: 1741663 - DNA, 15 bp, Homo sapiens
tatgatgaaaaccat

SEQ ID NO: 1741664 - DNA, 15 bp, Homo sapiens
atgatgaaaaccata

SEQ ID NO: 1741665 - DNA, 15 bp, Homo sapiens
tgatgaaaaccatag

SEQ ID NO: 1741666 - DNA, 15 bp, Homo sapiens
gatgaaaaccataga

SEQ ID NO: 1741667 - DNA, 15 bp, Homo sapiens
atgaaaaccatagaa

SEQ ID NO: 1741668 - DNA, 15 bp, Homo sapiens
tgaaaaccatagaat

SEQ ID NO: 1741669 - DNA, 15 bp, Homo sapiens
gaaaaccatagaata

SEQ ID NO: 1741670 - DNA, 15 bp, Homo sapiens
aaaaccatagaatac

SEQ ID NO: 1741671 - DNA, 15 bp, Homo sapiens
aaaccatagaatact

SEQ ID NO: 1741672 - DNA, 15 bp, Homo sapiens
aaccatagaatactg

SEQ ID NO: 1741673 - DNA, 15 bp, Homo sapiens
accatagaatactga

SEQ ID NO: 1741674 - DNA, 15 bp, Homo sapiens
ccatagaatactgat

SEQ ID NO: 1741675 - DNA, 15 bp, Homo sapiens
catagaatactgatg

SEQ ID NO: 1741676 - DNA, 15 bp, Homo sapiens
atagaatactgatga

SEQ ID NO: 1741677 - DNA, 15 bp, Homo sapiens
tagaatactgatgaa

SEQ ID NO: 1741678 - DNA, 15 bp, Homo sapiens
agaatactgatgaaa

SEQ ID NO: 1741679 - DNA, 15 bp, Homo sapiens
gaatactgatgaaag

SEQ ID NO: 1741680 - DNA, 15 bp, Homo sapiens
aatactgatgaaaga

SEQ ID NO: 1741681 - DNA, 15 bp, Homo sapiens
atactgatgaaagaa

SEQ ID NO: 1741682 - DNA, 15 bp, Homo sapiens
tactgatgaaagaaa

SEQ ID NO: 1741683 - DNA, 15 bp, Homo sapiens
actgatgaaagaaat

SEQ ID NO: 1741684 - DNA, 15 bp, Homo sapiens
ctgatgaaagaaatt

SEQ ID NO: 1741685 - DNA, 15 bp, Homo sapiens
tgatgaaagaaattg

SEQ ID NO: 1741686 - DNA, 15 bp, Homo sapiens
gatgaaagaaattga

SEQ ID NO: 1741687 - DNA, 15 bp, Homo sapiens
atgaaagaaattgaa

SEQ ID NO: 1741688 - DNA, 15 bp, Homo sapiens
tgaaagaaattgaag

SEQ ID NO: 1741689 - DNA, 15 bp, Homo sapiens
gaaagaaattgaaga

SEQ ID NO: 1741690 - DNA, 15 bp, Homo sapiens
aaagaaattgaagag

SEQ ID NO: 1741691 - DNA, 15 bp, Homo sapiens
aagaaattgaagagc

SEQ ID NO: 1741692 - DNA, 15 bp, Homo sapiens
agaaattgaagagca

SEQ ID NO: 1741693 - DNA, 15 bp, Homo sapiens
gaaattgaagagcac

SEQ ID NO: 1741694 - DNA, 15 bp, Homo sapiens
aaattgaagagcaca

SEQ ID NO: 1741695 - DNA, 15 bp, Homo sapiens
aattgaagagcacac

SEQ ID NO: 1741696 - DNA, 15 bp, Homo sapiens
attgaagagcacacc

SEQ ID NO: 1741697 - DNA, 15 bp, Homo sapiens
ttgaagagcacacca

SEQ ID NO: 1741698 - DNA, 15 bp, Homo sapiens
tgaagagcacaccaa

SEQ ID NO: 1741699 - DNA, 15 bp, Homo sapiens
gaagagcacaccaaa

SEQ ID NO: 1741700 - DNA, 15 bp, Homo sapiens
aagagcacaccaaaa

SEQ ID NO: 1741701 - DNA, 15 bp, Homo sapiens
agagcacaccaaaaa

SEQ ID NO: 1741702 - DNA, 15 bp, Homo sapiens
gagcacaccaaaaaa

SEQ ID NO: 1741703 - DNA, 15 bp, Homo sapiens
agcacaccaaaaaaa

SEQ ID NO: 1741704 - DNA, 15 bp, Homo sapiens
gcacaccaaaaaaat

SEQ ID NO: 1741705 - DNA, 15 bp, Homo sapiens
cacaccaaaaaaatg

SEQ ID NO: 1741706 - DNA, 15 bp, Homo sapiens
acaccaaaaaaatgg

SEQ ID NO: 1741707 - DNA, 15 bp, Homo sapiens
caccaaaaaaatgga

SEQ ID NO: 1741708 - DNA, 15 bp, Homo sapiens
accaaaaaaatggaa

SEQ ID NO: 1741709 - DNA, 15 bp, Homo sapiens
ccaaaaaaatggaaa

SEQ ID NO: 1741710 - DNA, 15 bp, Homo sapiens
caaaaaaatggaaaa

SEQ ID NO: 1741711 - DNA, 15 bp, Homo sapiens
aaaaaaatggaaaaa

SEQ ID NO: 1741712 - DNA, 15 bp, Homo sapiens
aaaaaatggaaaaaa

SEQ ID NO: 1741713 - DNA, 15 bp, Homo sapiens
aaaaatggaaaaaaa

SEQ ID NO: 1741714 - DNA, 15 bp, Homo sapiens
aaaatggaaaaaaat

SEQ ID NO: 1741715 - DNA, 15 bp, Homo sapiens
aaatggaaaaaaatt

SEQ ID NO: 1741716 - DNA, 15 bp, Homo sapiens
aatggaaaaaaattt

SEQ ID NO: 1741717 - DNA, 15 bp, Homo sapiens
atggaaaaaaatttt

SEQ ID NO: 1741718 - DNA, 15 bp, Homo sapiens
tggaaaaaaatttta

SEQ ID NO: 1741719 - DNA, 15 bp, Homo sapiens
ggaaaaaaattttat

SEQ ID NO: 1741720 - DNA, 15 bp, Homo sapiens
gaaaaaaattttatg

SEQ ID NO: 1741721 - DNA, 15 bp, Homo sapiens
aaaaaaattttatgt

SEQ ID NO: 1741722 - DNA, 15 bp, Homo sapiens
aaaaaattttatgtt

SEQ ID NO: 1741723 - DNA, 15 bp, Homo sapiens
aaaaattttatgttg

SEQ ID NO: 1741724 - DNA, 15 bp, Homo sapiens
aaaattttatgttgt

SEQ ID NO: 1741725 - DNA, 15 bp, Homo sapiens
aaattttatgttgtt

SEQ ID NO: 1741726 - DNA, 15 bp, Homo sapiens
aattttatgttgttc

SEQ ID NO: 1741727 - DNA, 15 bp, Homo sapiens
attttatgttgttca

SEQ ID NO: 1741728 - DNA, 15 bp, Homo sapiens
ttttatgttgttcat

SEQ ID NO: 1741729 - DNA, 15 bp, Homo sapiens
tttatgttgttcatg

SEQ ID NO: 1741730 - DNA, 15 bp, Homo sapiens
ttatgttgttcatgg

SEQ ID NO: 1741731 - DNA, 15 bp, Homo sapiens
tatgttgttcatgga

SEQ ID NO: 1741732 - DNA, 15 bp, Homo sapiens
atgttgttcatggat

SEQ ID NO: 1741733 - DNA, 15 bp, Homo sapiens
tgttgttcatggatt

SEQ ID NO: 1741734 - DNA, 15 bp, Homo sapiens
gttgttcatggattg

SEQ ID NO: 1741735 - DNA, 15 bp, Homo sapiens
ttgttcatggattgg

SEQ ID NO: 1741736 - DNA, 15 bp, Homo sapiens
tgttcatggattgga

SEQ ID NO: 1741737 - DNA, 15 bp, Homo sapiens
gttcatggattggaa

SEQ ID NO: 1741738 - DNA, 15 bp, Homo sapiens
ttcatggattggaag

SEQ ID NO: 1741739 - DNA, 15 bp, Homo sapiens
tcatggattggaaga

SEQ ID NO: 1741740 - DNA, 15 bp, Homo sapiens
catggattggaagaa

SEQ ID NO: 1741741 - DNA, 15 bp, Homo sapiens
atggattggaagaat

SEQ ID NO: 1741742 - DNA, 15 bp, Homo sapiens
tggattggaagaatt

SEQ ID NO: 1741743 - DNA, 15 bp, Homo sapiens
ggattggaagaatta

SEQ ID NO: 1741744 - DNA, 15 bp, Homo sapiens
gattggaagaattaa

SEQ ID NO: 1741745 - DNA, 15 bp, Homo sapiens
attggaagaattaat

SEQ ID NO: 1741746 - DNA, 15 bp, Homo sapiens
ttggaagaattaata

SEQ ID NO: 1741747 - DNA, 15 bp, Homo sapiens
tggaagaattaatat

SEQ ID NO: 1741748 - DNA, 15 bp, Homo sapiens
ggaagaattaatatt

SEQ ID NO: 1741749 - DNA, 15 bp, Homo sapiens
gaagaattaatattg

SEQ ID NO: 1741750 - DNA, 15 bp, Homo sapiens
aagaattaatattgt

SEQ ID NO: 1741751 - DNA, 15 bp, Homo sapiens
agaattaatattgtt

SEQ ID NO: 1741752 - DNA, 15 bp, Homo sapiens
gaattaatattgtta

SEQ ID NO: 1741753 - DNA, 15 bp, Homo sapiens
aattaatattgttaa

SEQ ID NO: 1741754 - DNA, 15 bp, Homo sapiens
attaatattgttaaa

SEQ ID NO: 1741755 - DNA, 15 bp, Homo sapiens
ttaatattgttaaaa

SEQ ID NO: 1741756 - DNA, 15 bp, Homo sapiens
taatattgttaaaat

SEQ ID NO: 1741757 - DNA, 15 bp, Homo sapiens
aatattgttaaaatg

SEQ ID NO: 1741758 - DNA, 15 bp, Homo sapiens
atattgttaaaatgt

SEQ ID NO: 1741759 - DNA, 15 bp, Homo sapiens
tattgttaaaatgtc

SEQ ID NO: 1741760 - DNA, 15 bp, Homo sapiens
attgttaaaatgtcc

SEQ ID NO: 1741761 - DNA, 15 bp, Homo sapiens
ttgttaaaatgtcca

SEQ ID NO: 1741762 - DNA, 15 bp, Homo sapiens
tgttaaaatgtccat

SEQ ID NO: 1741763 - DNA, 15 bp, Homo sapiens
gttaaaatgtccata

SEQ ID NO: 1741764 - DNA, 15 bp, Homo sapiens
ttaaaatgtccatac

SEQ ID NO: 1741765 - DNA, 15 bp, Homo sapiens
taaaatgtccatact

SEQ ID NO: 1741766 - DNA, 15 bp, Homo sapiens
aaaatgtccatacta

SEQ ID NO: 1741767 - DNA, 15 bp, Homo sapiens
aaatgtccatactac

SEQ ID NO: 1741768 - DNA, 15 bp, Homo sapiens
aatgtccatactacc

SEQ ID NO: 1741769 - DNA, 15 bp, Homo sapiens
atgtccatactaccc

SEQ ID NO: 1741770 - DNA, 15 bp, Homo sapiens
tgtccatactaccca

SEQ ID NO: 1741771 - DNA, 15 bp, Homo sapiens
gtccatactacccaa

SEQ ID NO: 1741772 - DNA, 15 bp, Homo sapiens
tccatactacccaaa

SEQ ID NO: 1741773 - DNA, 15 bp, Homo sapiens
ccatactacccaaag

SEQ ID NO: 1741774 - DNA, 15 bp, Homo sapiens
catactacccaaagc

SEQ ID NO: 1741775 - DNA, 15 bp, Homo sapiens
atactacccaaagca

SEQ ID NO: 1741776 - DNA, 15 bp, Homo sapiens
tactacccaaagcaa

SEQ ID NO: 1741777 - DNA, 15 bp, Homo sapiens
actacccaaagcaat

SEQ ID NO: 1741778 - DNA, 15 bp, Homo sapiens
ctacccaaagcaatc

SEQ ID NO: 1741779 - DNA, 15 bp, Homo sapiens
tacccaaagcaatct

SEQ ID NO: 1741780 - DNA, 15 bp, Homo sapiens
acccaaagcaatcta

SEQ ID NO: 1741781 - DNA, 15 bp, Homo sapiens
cccaaagcaatctat

SEQ ID NO: 1741782 - DNA, 15 bp, Homo sapiens
atgcatgtgattgca

SEQ ID NO: 1741783 - DNA, 15 bp, Homo sapiens
tgcatgtgattgcac

SEQ ID NO: 1741784 - DNA, 15 bp, Homo sapiens
gcatgtgattgcacc

SEQ ID NO: 1741785 - DNA, 15 bp, Homo sapiens
catgtgattgcacct

SEQ ID NO: 1741786 - DNA, 15 bp, Homo sapiens
atgtgattgcacctg

SEQ ID NO: 1741787 - DNA, 15 bp, Homo sapiens
tgtgattgcacctgt

SEQ ID NO: 1741788 - DNA, 15 bp, Homo sapiens
gtgattgcacctgtg

SEQ ID NO: 1741789 - DNA, 15 bp, Homo sapiens
tgattgcacctgtga

SEQ ID NO: 1741790 - DNA, 15 bp, Homo sapiens
gattgcacctgtgaa

SEQ ID NO: 1741791 - DNA, 15 bp, Homo sapiens
attgcacctgtgaat

SEQ ID NO: 1741792 - DNA, 15 bp, Homo sapiens
ttgcacctgtgaata

SEQ ID NO: 1741793 - DNA, 15 bp, Homo sapiens
tgcacctgtgaatag

SEQ ID NO: 1741794 - DNA, 15 bp, Homo sapiens
gcacctgtgaatagc

SEQ ID NO: 1741795 - DNA, 15 bp, Homo sapiens
cacctgtgaatagcc

SEQ ID NO: 1741796 - DNA, 15 bp, Homo sapiens
acctgtgaatagcca

SEQ ID NO: 1741797 - DNA, 15 bp, Homo sapiens
cctgtgaatagccac

SEQ ID NO: 1741798 - DNA, 15 bp, Homo sapiens
ctgtgaatagccact

SEQ ID NO: 1741799 - DNA, 15 bp, Homo sapiens
tgtgaatagccacta

SEQ ID NO: 1741800 - DNA, 15 bp, Homo sapiens
gtgaatagccactac

SEQ ID NO: 1741801 - DNA, 15 bp, Homo sapiens
tgaatagccactaca

SEQ ID NO: 1741802 - DNA, 15 bp, Homo sapiens
gaatagccactacac

SEQ ID NO: 1741803 - DNA, 15 bp, Homo sapiens
aatagccactacact

SEQ ID NO: 1741804 - DNA, 15 bp, Homo sapiens
atagccactacactt

SEQ ID NO: 1741805 - DNA, 15 bp, Homo sapiens
tagccactacacttc

SEQ ID NO: 1741806 - DNA, 15 bp, Homo sapiens
agccactacacttca

SEQ ID NO: 1741807 - DNA, 15 bp, Homo sapiens
gccactacacttcag

SEQ ID NO: 1741808 - DNA, 15 bp, Homo sapiens
ccactacacttcagc

SEQ ID NO: 1741809 - DNA, 15 bp, Homo sapiens
cactacacttcagcc

SEQ ID NO: 1741810 - DNA, 15 bp, Homo sapiens
actacacttcagcct

SEQ ID NO: 1741811 - DNA, 15 bp, Homo sapiens
ctacacttcagccta

SEQ ID NO: 1741812 - DNA, 15 bp, Homo sapiens
tacacttcagcctag

SEQ ID NO: 1741813 - DNA, 15 bp, Homo sapiens
acacttcagcctagg

SEQ ID NO: 1741814 - DNA, 15 bp, Homo sapiens
cacttcagcctaggc

SEQ ID NO: 1741815 - DNA, 15 bp, Homo sapiens
acttcagcctaggca

SEQ ID NO: 1741816 - DNA, 15 bp, Homo sapiens
cttcagcctaggcaa

SEQ ID NO: 1741817 - DNA, 15 bp, Homo sapiens
ttcagcctaggcaat

SEQ ID NO: 1741818 - DNA, 15 bp, Homo sapiens
tcagcctaggcaata

SEQ ID NO: 1741819 - DNA, 15 bp, Homo sapiens
cagcctaggcaatat

SEQ ID NO: 1741820 - DNA, 15 bp, Homo sapiens
agcctaggcaatata

SEQ ID NO: 1741821 - DNA, 15 bp, Homo sapiens
gcctaggcaatatag

SEQ ID NO: 1741822 - DNA, 15 bp, Homo sapiens
cctaggcaatataga

SEQ ID NO: 1741823 - DNA, 15 bp, Homo sapiens
ctaggcaatatagag

SEQ ID NO: 1741824 - DNA, 15 bp, Homo sapiens
taggcaatatagaga

SEQ ID NO: 1741825 - DNA, 15 bp, Homo sapiens
aggcaatatagagag

SEQ ID NO: 1741826 - DNA, 15 bp, Homo sapiens
ggcaatatagagaga

SEQ ID NO: 1741827 - DNA, 15 bp, Homo sapiens
gcaatatagagagac

SEQ ID NO: 1741828 - DNA, 15 bp, Homo sapiens
caatatagagagacc

SEQ ID NO: 1741829 - DNA, 15 bp, Homo sapiens
aatatagagagaccc

SEQ ID NO: 1741830 - DNA, 15 bp, Homo sapiens
atatagagagacccc

SEQ ID NO: 1741831 - DNA, 15 bp, Homo sapiens
tatagagagacccct

SEQ ID NO: 1741832 - DNA, 15 bp, Homo sapiens
atagagagacccctt

SEQ ID NO: 1741833 - DNA, 15 bp, Homo sapiens
tagagagaccccttc

SEQ ID NO: 1741834 - DNA, 15 bp, Homo sapiens
agagagaccccttct

SEQ ID NO: 1741835 - DNA, 15 bp, Homo sapiens
gagagaccccttctc

SEQ ID NO: 1741836 - DNA, 15 bp, Homo sapiens
agagaccccttctct

SEQ ID NO: 1741837 - DNA, 15 bp, Homo sapiens
agaccccttctctaa

SEQ ID NO: 1741838 - DNA, 15 bp, Homo sapiens
gaccccttctctaag

SEQ ID NO: 1741839 - DNA, 15 bp, Homo sapiens
accccttctctaaga

SEQ ID NO: 1741840 - DNA, 15 bp, Homo sapiens
ccccttctctaagaa

SEQ ID NO: 1741841 - DNA, 15 bp, Homo sapiens
cccttctctaagaaa

SEQ ID NO: 1741842 - DNA, 15 bp, Homo sapiens
ccttctctaagaaaa

SEQ ID NO: 1741843 - DNA, 15 bp, Homo sapiens
cttctctaagaaaat

SEQ ID NO: 1741844 - DNA, 15 bp, Homo sapiens
ttctctaagaaaata

SEQ ID NO: 1741845 - DNA, 15 bp, Homo sapiens
tctctaagaaaataa

SEQ ID NO: 1741846 - DNA, 15 bp, Homo sapiens
ctctaagaaaataat

SEQ ID NO: 1741847 - DNA, 15 bp, Homo sapiens
tctaagaaaataata

SEQ ID NO: 1741848 - DNA, 15 bp, Homo sapiens
ctaagaaaataataa

SEQ ID NO: 1741849 - DNA, 15 bp, Homo sapiens
taagaaaataataaa

SEQ ID NO: 1741850 - DNA, 15 bp, Homo sapiens
aagaaaataataaaa

SEQ ID NO: 1741851 - DNA, 15 bp, Homo sapiens
agaaaataataaaaa

SEQ ID NO: 1741852 - DNA, 15 bp, Homo sapiens
gaaaataataaaaaa

SEQ ID NO: 1741853 - DNA, 15 bp, Homo sapiens
aaaataataaaaaat

SEQ ID NO: 1741854 - DNA, 15 bp, Homo sapiens
aaataataaaaaata

SEQ ID NO: 1741855 - DNA, 15 bp, Homo sapiens
aataataaaaaataa

SEQ ID NO: 1741856 - DNA, 15 bp, Homo sapiens
ataataaaaaataaa

SEQ ID NO: 1741857 - DNA, 15 bp, Homo sapiens
taataaaaaataaaa

SEQ ID NO: 1741858 - DNA, 15 bp, Homo sapiens
taaaaaataaaaaag

SEQ ID NO: 1741859 - DNA, 15 bp, Homo sapiens
aaaaaataaaaaagt

SEQ ID NO: 1741860 - DNA, 15 bp, Homo sapiens
aaaaataaaaaagtt

SEQ ID NO: 1741861 - DNA, 15 bp, Homo sapiens
aaaataaaaaagtta

SEQ ID NO: 1741862 - DNA, 15 bp, Homo sapiens
aaataaaaaagttat

SEQ ID NO: 1741863 - DNA, 15 bp, Homo sapiens
aataaaaaagttata

SEQ ID NO: 1741864 - DNA, 15 bp, Homo sapiens
ataaaaaagttatac

SEQ ID NO: 1741865 - DNA, 15 bp, Homo sapiens
taaaaaagttataca

SEQ ID NO: 1741866 - DNA, 15 bp, Homo sapiens
aaaaaagttatacac

SEQ ID NO: 1741867 - DNA, 15 bp, Homo sapiens
aaaaagttatacaca

SEQ ID NO: 1741868 - DNA, 15 bp, Homo sapiens
aaaagttatacacag

SEQ ID NO: 1741869 - DNA, 15 bp, Homo sapiens
aaagttatacacaga

SEQ ID NO: 1741870 - DNA, 15 bp, Homo sapiens
aagttatacacagat

SEQ ID NO: 1741871 - DNA, 15 bp, Homo sapiens
agttatacacagatt

SEQ ID NO: 1741872 - DNA, 15 bp, Homo sapiens
gttatacacagattt

SEQ ID NO: 1741873 - DNA, 15 bp, Homo sapiens
ttatacacagatttt

SEQ ID NO: 1741874 - DNA, 15 bp, Homo sapiens
tatacacagattttt

SEQ ID NO: 1741875 - DNA, 15 bp, Homo sapiens
atacacagatttttt

SEQ ID NO: 1741876 - DNA, 15 bp, Homo sapiens
tacacagatttttta

SEQ ID NO: 1741877 - DNA, 15 bp, Homo sapiens
acacagattttttac

SEQ ID NO: 1741878 - DNA, 15 bp, Homo sapiens
cacagattttttact

SEQ ID NO: 1741879 - DNA, 15 bp, Homo sapiens
acagattttttactg

SEQ ID NO: 1741880 - DNA, 15 bp, Homo sapiens
cagattttttactgc

SEQ ID NO: 1741881 - DNA, 15 bp, Homo sapiens
agattttttactgca

SEQ ID NO: 1741882 - DNA, 15 bp, Homo sapiens
gattttttactgcat

SEQ ID NO: 1741883 - DNA, 15 bp, Homo sapiens
attttttactgcatg

SEQ ID NO: 1741884 - DNA, 15 bp, Homo sapiens
ttttttactgcatgg

SEQ ID NO: 1741885 - DNA, 15 bp, Homo sapiens
tttttactgcatggg

SEQ ID NO: 1741886 - DNA, 15 bp, Homo sapiens
ttttactgcatgggg

SEQ ID NO: 1741887 - DNA, 15 bp, Homo sapiens
tttactgcatggggg

SEQ ID NO: 1741888 - DNA, 15 bp, Homo sapiens
ttactgcatggggga

SEQ ID NO: 1741889 - DNA, 15 bp, Homo sapiens
tactgcatgggggat

SEQ ID NO: 1741890 - DNA, 15 bp, Homo sapiens
actgcatgggggatt

SEQ ID NO: 1741891 - DNA, 15 bp, Homo sapiens
ctgcatgggggattg

SEQ ID NO: 1741892 - DNA, 15 bp, Homo sapiens
tgcatgggggattga

SEQ ID NO: 1741893 - DNA, 15 bp, Homo sapiens
gcatgggggattgac

SEQ ID NO: 1741894 - DNA, 15 bp, Homo sapiens
catgggggattgaca

SEQ ID NO: 1741895 - DNA, 15 bp, Homo sapiens
atgggggattgacac

SEQ ID NO: 1741896 - DNA, 15 bp, Homo sapiens
tgggggattgacacc

SEQ ID NO: 1741897 - DNA, 15 bp, Homo sapiens
gggggattgacacct

SEQ ID NO: 1741898 - DNA, 15 bp, Homo sapiens
ggggattgacacctc

SEQ ID NO: 1741899 - DNA, 15 bp, Homo sapiens
gggattgacacctct

SEQ ID NO: 1741900 - DNA, 15 bp, Homo sapiens
ggattgacacctcta

SEQ ID NO: 1741901 - DNA, 15 bp, Homo sapiens
gattgacacctctaa

SEQ ID NO: 1741902 - DNA, 15 bp, Homo sapiens
attgacacctctaac

SEQ ID NO: 1741903 - DNA, 15 bp, Homo sapiens
ttgacacctctaact

SEQ ID NO: 1741904 - DNA, 15 bp, Homo sapiens
tgacacctctaactt

SEQ ID NO: 1741905 - DNA, 15 bp, Homo sapiens
gacacctctaactta

SEQ ID NO: 1741906 - DNA, 15 bp, Homo sapiens
acacctctaacttac

SEQ ID NO: 1741907 - DNA, 15 bp, Homo sapiens
cacctctaacttacc

SEQ ID NO: 1741908 - DNA, 15 bp, Homo sapiens
acctctaacttaccc

SEQ ID NO: 1741909 - DNA, 15 bp, Homo sapiens
cctctaacttaccct

SEQ ID NO: 1741910 - DNA, 15 bp, Homo sapiens
ctctaacttaccctg

SEQ ID NO: 1741911 - DNA, 15 bp, Homo sapiens
tctaacttaccctgc

SEQ ID NO: 1741912 - DNA, 15 bp, Homo sapiens
ctaacttaccctgca

SEQ ID NO: 1741913 - DNA, 15 bp, Homo sapiens
taacttaccctgcat

SEQ ID NO: 1741914 - DNA, 15 bp, Homo sapiens
aacttaccctgcatt

SEQ ID NO: 1741915 - DNA, 15 bp, Homo sapiens
acttaccctgcattg

SEQ ID NO: 1741916 - DNA, 15 bp, Homo sapiens
cttaccctgcattgt

SEQ ID NO: 1741917 - DNA, 15 bp, Homo sapiens
ttaccctgcattgtt

SEQ ID NO: 1741918 - DNA, 15 bp, Homo sapiens
taccctgcattgttc

SEQ ID NO: 1741919 - DNA, 15 bp, Homo sapiens
accctgcattgttca

SEQ ID NO: 1741920 - DNA, 15 bp, Homo sapiens
ccctgcattgttcaa

SEQ ID NO: 1741921 - DNA, 15 bp, Homo sapiens
cctgcattgttcaag

SEQ ID NO: 1741922 - DNA, 15 bp, Homo sapiens
ctgcattgttcaaga

SEQ ID NO: 1741923 - DNA, 15 bp, Homo sapiens
tgcattgttcaagag

SEQ ID NO: 1741924 - DNA, 15 bp, Homo sapiens
gcattgttcaagagt

SEQ ID NO: 1741925 - DNA, 15 bp, Homo sapiens
cattgttcaagagtc

SEQ ID NO: 1741926 - DNA, 15 bp, Homo sapiens
attgttcaagagtca

SEQ ID NO: 1741927 - DNA, 15 bp, Homo sapiens
ttgttcaagagtcaa

SEQ ID NO: 1741928 - DNA, 15 bp, Homo sapiens
tgttcaagagtcaag

SEQ ID NO: 1741929 - DNA, 15 bp, Homo sapiens
gttcaagagtcaaga

SEQ ID NO: 1741930 - DNA, 15 bp, Homo sapiens
ttcaagagtcaagag

SEQ ID NO: 1741931 - DNA, 15 bp, Homo sapiens
tcaagagtcaagaga

SEQ ID NO: 1741932 - DNA, 15 bp, Homo sapiens
caagagtcaagagat

SEQ ID NO: 1741933 - DNA, 15 bp, Homo sapiens
aagagtcaagagatt

SEQ ID NO: 1741934 - DNA, 15 bp, Homo sapiens
agagtcaagagatta

SEQ ID NO: 1741935 - DNA, 15 bp, Homo sapiens
gagtcaagagattag

SEQ ID NO: 1741936 - DNA, 15 bp, Homo sapiens
agtcaagagattaga

SEQ ID NO: 1741937 - DNA, 15 bp, Homo sapiens
gtcaagagattagat

SEQ ID NO: 1741938 - DNA, 15 bp, Homo sapiens
tcaagagattagatt

SEQ ID NO: 1741939 - DNA, 15 bp, Homo sapiens
caagagattagattt

SEQ ID NO: 1741940 - DNA, 15 bp, Homo sapiens
aagagattagatttt

SEQ ID NO: 1741941 - DNA, 15 bp, Homo sapiens
agagattagattttg

SEQ ID NO: 1741942 - DNA, 15 bp, Homo sapiens
gagattagattttgt

SEQ ID NO: 1741943 - DNA, 15 bp, Homo sapiens
agattagattttgtt

SEQ ID NO: 1741944 - DNA, 15 bp, Homo sapiens
gattagattttgttt

SEQ ID NO: 1741945 - DNA, 15 bp, Homo sapiens
attagattttgtttt

SEQ ID NO: 1741946 - DNA, 15 bp, Homo sapiens
ttagattttgtttta

SEQ ID NO: 1741947 - DNA, 15 bp, Homo sapiens
gattttgttttaaat

SEQ ID NO: 1741948 - DNA, 15 bp, Homo sapiens
attttgttttaaatt

SEQ ID NO: 1741949 - DNA, 15 bp, Homo sapiens
ttttaaattttaatg

SEQ ID NO: 1741950 - DNA, 15 bp, Homo sapiens
tttaaattttaatga

SEQ ID NO: 1741951 - DNA, 15 bp, Homo sapiens
ttaaattttaatgat

SEQ ID NO: 1741952 - DNA, 15 bp, Homo sapiens
taaattttaatgatc

SEQ ID NO: 1741953 - DNA, 15 bp, Homo sapiens
aaattttaatgatca

SEQ ID NO: 1741954 - DNA, 15 bp, Homo sapiens
aattttaatgatcat

SEQ ID NO: 1741955 - DNA, 15 bp, Homo sapiens
attttaatgatcatg

SEQ ID NO: 1741956 - DNA, 15 bp, Homo sapiens
ttttaatgatcatgt

SEQ ID NO: 1741957 - DNA, 15 bp, Homo sapiens
tttaatgatcatgtt

SEQ ID NO: 1741958 - DNA, 15 bp, Homo sapiens
ttaatgatcatgttg

SEQ ID NO: 1741959 - DNA, 15 bp, Homo sapiens
taatgatcatgttgt

SEQ ID NO: 1741960 - DNA, 15 bp, Homo sapiens
aatgatcatgttgta

SEQ ID NO: 1741961 - DNA, 15 bp, Homo sapiens
atgatcatgttgtaa

SEQ ID NO: 1741962 - DNA, 15 bp, Homo sapiens
tgatcatgttgtaac

SEQ ID NO: 1741963 - DNA, 15 bp, Homo sapiens
gatcatgttgtaact

SEQ ID NO: 1741964 - DNA, 15 bp, Homo sapiens
atcatgttgtaactt

SEQ ID NO: 1741965 - DNA, 15 bp, Homo sapiens
tcatgttgtaacttc

SEQ ID NO: 1741966 - DNA, 15 bp, Homo sapiens
catgttgtaacttca

SEQ ID NO: 1741967 - DNA, 15 bp, Homo sapiens
atgttgtaacttcat

SEQ ID NO: 1741968 - DNA, 15 bp, Homo sapiens
tgttgtaacttcatc

SEQ ID NO: 1741969 - DNA, 15 bp, Homo sapiens
gttgtaacttcatct

SEQ ID NO: 1741970 - DNA, 15 bp, Homo sapiens
ttgtaacttcatctt

SEQ ID NO: 1741971 - DNA, 15 bp, Homo sapiens
tgtaacttcatcttt

SEQ ID NO: 1741972 - DNA, 15 bp, Homo sapiens
gtaacttcatctttt

SEQ ID NO: 1741973 - DNA, 15 bp, Homo sapiens
taacttcatcttttt

SEQ ID NO: 1741974 - DNA, 15 bp, Homo sapiens
aacttcatctttttc

SEQ ID NO: 1741975 - DNA, 15 bp, Homo sapiens
acttcatctttttca

SEQ ID NO: 1741976 - DNA, 15 bp, Homo sapiens
cttcatctttttcag

SEQ ID NO: 1741977 - DNA, 15 bp, Homo sapiens
ttcatctttttcagg

SEQ ID NO: 1741978 - DNA, 15 bp, Homo sapiens
tcatctttttcaggt

SEQ ID NO: 1741979 - DNA, 15 bp, Homo sapiens
catctttttcaggtg

SEQ ID NO: 1741980 - DNA, 15 bp, Homo sapiens
atctttttcaggtga

SEQ ID NO: 1741981 - DNA, 15 bp, Homo sapiens
tctttttcaggtgaa

SEQ ID NO: 1741982 - DNA, 15 bp, Homo sapiens
ctttttcaggtgaaa

SEQ ID NO: 1741983 - DNA, 15 bp, Homo sapiens
tttttcaggtgaaaa

SEQ ID NO: 1741984 - DNA, 15 bp, Homo sapiens
ttttcaggtgaaaaa

SEQ ID NO: 1741985 - DNA, 15 bp, Homo sapiens
tttcaggtgaaaaat

SEQ ID NO: 1741986 - DNA, 15 bp, Homo sapiens
ttcaggtgaaaaatg

SEQ ID NO: 1741987 - DNA, 15 bp, Homo sapiens
tcaggtgaaaaatgt

SEQ ID NO: 1741988 - DNA, 15 bp, Homo sapiens
caggtgaaaaatgtt

SEQ ID NO: 1741989 - DNA, 15 bp, Homo sapiens
aggtgaaaaatgttt

SEQ ID NO: 1741990 - DNA, 15 bp, Homo sapiens
ggtgaaaaatgttta

SEQ ID NO: 1741991 - DNA, 15 bp, Homo sapiens
gtgaaaaatgtttat

SEQ ID NO: 1741992 - DNA, 15 bp, Homo sapiens
tgaaaaatgtttatt

SEQ ID NO: 1741993 - DNA, 15 bp, Homo sapiens
gaaaaatgtttattt

SEQ ID NO: 1741994 - DNA, 15 bp, Homo sapiens
aaaaatgtttatttc

SEQ ID NO: 1741995 - DNA, 15 bp, Homo sapiens
aaaatgtttatttca

SEQ ID NO: 1741996 - DNA, 15 bp, Homo sapiens
aaatgtttatttcaa

SEQ ID NO: 1741997 - DNA, 15 bp, Homo sapiens
aatgtttatttcaaa

SEQ ID NO: 1741998 - DNA, 15 bp, Homo sapiens
atgtttatttcaaaa

SEQ ID NO: 1741999 - DNA, 15 bp, Homo sapiens
tgtttatttcaaaaa

SEQ ID NO: 1742000 - DNA, 15 bp, Homo sapiens
gtttatttcaaaaat

SEQ ID NO: 1742001 - DNA, 15 bp, Homo sapiens
tttatttcaaaaatt

SEQ ID NO: 1742002 - DNA, 15 bp, Homo sapiens
ttatttcaaaaattt

SEQ ID NO: 1742003 - DNA, 15 bp, Homo sapiens
tatttcaaaaatttt

SEQ ID NO: 1742004 - DNA, 15 bp, Homo sapiens
atttcaaaaatttta

SEQ ID NO: 1742005 - DNA, 15 bp, Homo sapiens
tttcaaaaattttat

SEQ ID NO: 1742006 - DNA, 15 bp, Homo sapiens
ttcaaaaattttata

SEQ ID NO: 1742007 - DNA, 15 bp, Homo sapiens
tcaaaaattttatac

SEQ ID NO: 1742008 - DNA, 15 bp, Homo sapiens
caaaaattttatacc

SEQ ID NO: 1742009 - DNA, 15 bp, Homo sapiens
aaaaattttatacct

SEQ ID NO: 1742010 - DNA, 15 bp, Homo sapiens
aaaattttatacctt

SEQ ID NO: 1742011 - DNA, 15 bp, Homo sapiens
aaattttataccttt

SEQ ID NO: 1742012 - DNA, 15 bp, Homo sapiens
aattttatacctttt

SEQ ID NO: 1742013 - DNA, 15 bp, Homo sapiens
ttttataccttttat

SEQ ID NO: 1742014 - DNA, 15 bp, Homo sapiens
tttataccttttatg

SEQ ID NO: 1742015 - DNA, 15 bp, Homo sapiens
ttataccttttatga

SEQ ID NO: 1742016 - DNA, 15 bp, Homo sapiens
tataccttttatgaa

SEQ ID NO: 1742017 - DNA, 15 bp, Homo sapiens
ataccttttatgaat

SEQ ID NO: 1742018 - DNA, 15 bp, Homo sapiens
taccttttatgaatt

SEQ ID NO: 1742019 - DNA, 15 bp, Homo sapiens
accttttatgaattc

SEQ ID NO: 1742020 - DNA, 15 bp, Homo sapiens
ccttttatgaattct

SEQ ID NO: 1742021 - DNA, 15 bp, Homo sapiens
cttttatgaattctc

SEQ ID NO: 1742022 - DNA, 15 bp, Homo sapiens
ttttatgaattctct

SEQ ID NO: 1742023 - DNA, 15 bp, Homo sapiens
tttatgaattctctt

SEQ ID NO: 1742024 - DNA, 15 bp, Homo sapiens
ttatgaattctcttg

SEQ ID NO: 1742025 - DNA, 15 bp, Homo sapiens
tatgaattctcttgg

SEQ ID NO: 1742026 - DNA, 15 bp, Homo sapiens
atgaattctcttgga

SEQ ID NO: 1742027 - DNA, 15 bp, Homo sapiens
tgaattctcttggac

SEQ ID NO: 1742028 - DNA, 15 bp, Homo sapiens
gaattctcttggact

SEQ ID NO: 1742029 - DNA, 15 bp, Homo sapiens
aattctcttggactt

SEQ ID NO: 1742030 - DNA, 15 bp, Homo sapiens
attctcttggacttg

SEQ ID NO: 1742031 - DNA, 15 bp, Homo sapiens
ttctcttggacttgt

SEQ ID NO: 1742032 - DNA, 15 bp, Homo sapiens
tctcttggacttgta

SEQ ID NO: 1742033 - DNA, 15 bp, Homo sapiens
ctcttggacttgtaa

SEQ ID NO: 1742034 - DNA, 15 bp, Homo sapiens
tcttggacttgtaac

SEQ ID NO: 1742035 - DNA, 15 bp, Homo sapiens
cttggacttgtaaca

SEQ ID NO: 1742036 - DNA, 15 bp, Homo sapiens
ttggacttgtaacat

SEQ ID NO: 1742037 - DNA, 15 bp, Homo sapiens
tggacttgtaacatc

SEQ ID NO: 1742038 - DNA, 15 bp, Homo sapiens
ggacttgtaacatct

SEQ ID NO: 1742039 - DNA, 15 bp, Homo sapiens
gacttgtaacatcta

SEQ ID NO: 1742040 - DNA, 15 bp, Homo sapiens
acttgtaacatctaa

SEQ ID NO: 1742041 - DNA, 15 bp, Homo sapiens
cttgtaacatctaat

SEQ ID NO: 1742042 - DNA, 15 bp, Homo sapiens
ttgtaacatctaatg

SEQ ID NO: 1742043 - DNA, 15 bp, Homo sapiens
tgtaacatctaatgg

SEQ ID NO: 1742044 - DNA, 15 bp, Homo sapiens
gtaacatctaatgga

SEQ ID NO: 1742045 - DNA, 15 bp, Homo sapiens
taacatctaatggac

SEQ ID NO: 1742046 - DNA, 15 bp, Homo sapiens
aacatctaatggact

SEQ ID NO: 1742047 - DNA, 15 bp, Homo sapiens
acatctaatggactt

SEQ ID NO: 1742048 - DNA, 15 bp, Homo sapiens
catctaatggacttc

SEQ ID NO: 1742049 - DNA, 15 bp, Homo sapiens
atctaatggacttcc

SEQ ID NO: 1742050 - DNA, 15 bp, Homo sapiens
tctaatggacttcca

SEQ ID NO: 1742051 - DNA, 15 bp, Homo sapiens
ctaatggacttccag

SEQ ID NO: 1742052 - DNA, 15 bp, Homo sapiens
taatggacttccaga

SEQ ID NO: 1742053 - DNA, 15 bp, Homo sapiens
aatggacttccagag

SEQ ID NO: 1742054 - DNA, 15 bp, Homo sapiens
atggacttccagagg

SEQ ID NO: 1742055 - DNA, 15 bp, Homo sapiens
tggacttccagaggt

SEQ ID NO: 1742056 - DNA, 15 bp, Homo sapiens
ggacttccagaggta

SEQ ID NO: 1742057 - DNA, 15 bp, Homo sapiens
gacttccagaggtaa

SEQ ID NO: 1742058 - DNA, 15 bp, Homo sapiens
acttccagaggtaat

SEQ ID NO: 1742059 - DNA, 15 bp, Homo sapiens
cttccagaggtaatc

SEQ ID NO: 1742060 - DNA, 15 bp, Homo sapiens
ttccagaggtaatct

SEQ ID NO: 1742061 - DNA, 15 bp, Homo sapiens
tccagaggtaatctg

SEQ ID NO: 1742062 - DNA, 15 bp, Homo sapiens
ccagaggtaatctga

SEQ ID NO: 1742063 - DNA, 15 bp, Homo sapiens
cagaggtaatctgaa

SEQ ID NO: 1742064 - DNA, 15 bp, Homo sapiens
agaggtaatctgaaa

SEQ ID NO: 1742065 - DNA, 15 bp, Homo sapiens
gaggtaatctgaaag

SEQ ID NO: 1742066 - DNA, 15 bp, Homo sapiens
aggtaatctgaaagg

SEQ ID NO: 1742067 - DNA, 15 bp, Homo sapiens
ggtaatctgaaagga

SEQ ID NO: 1742068 - DNA, 15 bp, Homo sapiens
gtaatctgaaaggaa

SEQ ID NO: 1742069 - DNA, 15 bp, Homo sapiens
taatctgaaaggaaa

SEQ ID NO: 1742070 - DNA, 15 bp, Homo sapiens
aatctgaaaggaaat

SEQ ID NO: 1742071 - DNA, 15 bp, Homo sapiens
atctgaaaggaaatt

SEQ ID NO: 1742072 - DNA, 15 bp, Homo sapiens
tctgaaaggaaattt

SEQ ID NO: 1742073 - DNA, 15 bp, Homo sapiens
ctgaaaggaaattta

SEQ ID NO: 1742074 - DNA, 15 bp, Homo sapiens
tgaaaggaaatttaa

SEQ ID NO: 1742075 - DNA, 15 bp, Homo sapiens
gaaaggaaatttaat

SEQ ID NO: 1742076 - DNA, 15 bp, Homo sapiens
aaaggaaatttaata

SEQ ID NO: 1742077 - DNA, 15 bp, Homo sapiens
aaggaaatttaataa

SEQ ID NO: 1742078 - DNA, 15 bp, Homo sapiens
aggaaatttaataaa

SEQ ID NO: 1742079 - DNA, 15 bp, Homo sapiens
ggaaatttaataaaa

SEQ ID NO: 1742080 - DNA, 15 bp, Homo sapiens
gaaatttaataaaat

SEQ ID NO: 1742081 - DNA, 15 bp, Homo sapiens
aaatttaataaaata

SEQ ID NO: 1742082 - DNA, 15 bp, Homo sapiens
aatttaataaaatat

SEQ ID NO: 1742083 - DNA, 15 bp, Homo sapiens
atttaataaaatatt

SEQ ID NO: 1742084 - DNA, 15 bp, Homo sapiens
tttaataaaatatta

SEQ ID NO: 1742085 - DNA, 15 bp, Homo sapiens
ttaataaaatattaa

SEQ ID NO: 1742086 - DNA, 15 bp, Homo sapiens
taataaaatattaat

SEQ ID NO: 1742087 - DNA, 15 bp, Homo sapiens
aataaaatattaatg

SEQ ID NO: 1742088 - DNA, 15 bp, Homo sapiens
taaaatattaatgtt

SEQ ID NO: 1742089 - DNA, 15 bp, Homo sapiens
aaaatattaatgttt

SEQ ID NO: 1742090 - DNA, 15 bp, Homo sapiens
aaatattaatgtttt

SEQ ID NO: 1742091 - DNA, 15 bp, Homo sapiens
aatattaatgttttg

SEQ ID NO: 1742092 - DNA, 15 bp, Homo sapiens
atattaatgttttga

SEQ ID NO: 1742093 - DNA, 15 bp, Homo sapiens
tattaatgttttgag

SEQ ID NO: 1742094 - DNA, 15 bp, Homo sapiens
attaatgttttgaga

SEQ ID NO: 1742095 - DNA, 15 bp, Homo sapiens
ttaatgttttgagac

SEQ ID NO: 1742096 - DNA, 15 bp, Homo sapiens
taatgttttgagact

SEQ ID NO: 1742097 - DNA, 15 bp, Homo sapiens
aatgttttgagactg

SEQ ID NO: 1742098 - DNA, 15 bp, Homo sapiens
atgttttgagactgt

SEQ ID NO: 1742099 - DNA, 15 bp, Homo sapiens
tgttttgagactgtg

SEQ ID NO: 1742100 - DNA, 15 bp, Homo sapiens
gttttgagactgtgg

SEQ ID NO: 1742101 - DNA, 15 bp, Homo sapiens
ttttgagactgtgga

SEQ ID NO: 1742102 - DNA, 15 bp, Homo sapiens
tttgagactgtggag

SEQ ID NO: 1742103 - DNA, 15 bp, Homo sapiens
ttgagactgtggagg

SEQ ID NO: 1742104 - DNA, 15 bp, Homo sapiens
tgagactgtggaggg

SEQ ID NO: 1742105 - DNA, 15 bp, Homo sapiens
gagactgtggaggga

SEQ ID NO: 1742106 - DNA, 15 bp, Homo sapiens
agactgtggagggag

SEQ ID NO: 1742107 - DNA, 15 bp, Homo sapiens
gactgtggagggagg

SEQ ID NO: 1742108 - DNA, 15 bp, Homo sapiens
actgtggagggagga

SEQ ID NO: 1742109 - DNA, 15 bp, Homo sapiens
ctgtggagggaggat

SEQ ID NO: 1742110 - DNA, 15 bp, Homo sapiens
tgtggagggaggata

SEQ ID NO: 1742111 - DNA, 15 bp, Homo sapiens
gtggagggaggataa

SEQ ID NO: 1742112 - DNA, 15 bp, Homo sapiens
tggagggaggataat

SEQ ID NO: 1742113 - DNA, 15 bp, Homo sapiens
ggagggaggataatt

SEQ ID NO: 1742114 - DNA, 15 bp, Homo sapiens
gagggaggataattg

SEQ ID NO: 1742115 - DNA, 15 bp, Homo sapiens
agggaggataattgt

SEQ ID NO: 1742116 - DNA, 15 bp, Homo sapiens
gggaggataattgtc

SEQ ID NO: 1742117 - DNA, 15 bp, Homo sapiens
ggaggataattgtct

SEQ ID NO: 1742118 - DNA, 15 bp, Homo sapiens
gaggataattgtcta

SEQ ID NO: 1742119 - DNA, 15 bp, Homo sapiens
aggataattgtctaa

SEQ ID NO: 1742120 - DNA, 15 bp, Homo sapiens
ggataattgtctaac

SEQ ID NO: 1742121 - DNA, 15 bp, Homo sapiens
gataattgtctaact

SEQ ID NO: 1742122 - DNA, 15 bp, Homo sapiens
ataattgtctaactt

SEQ ID NO: 1742123 - DNA, 15 bp, Homo sapiens
taattgtctaacttt

SEQ ID NO: 1742124 - DNA, 15 bp, Homo sapiens
aattgtctaactttc

SEQ ID NO: 1742125 - DNA, 15 bp, Homo sapiens
attgtctaactttct

SEQ ID NO: 1742126 - DNA, 15 bp, Homo sapiens
ttgtctaactttctt

SEQ ID NO: 1742127 - DNA, 15 bp, Homo sapiens
tgtctaactttctta

SEQ ID NO: 1742128 - DNA, 15 bp, Homo sapiens
gtctaactttcttag

SEQ ID NO: 1742129 - DNA, 15 bp, Homo sapiens
tctaactttcttaga

SEQ ID NO: 1742130 - DNA, 15 bp, Homo sapiens
ctaactttcttagat

SEQ ID NO: 1742131 - DNA, 15 bp, Homo sapiens
taactttcttagatc

SEQ ID NO: 1742132 - DNA, 15 bp, Homo sapiens
aactttcttagatca

SEQ ID NO: 1742133 - DNA, 15 bp, Homo sapiens
actttcttagatcaa

SEQ ID NO: 1742134 - DNA, 15 bp, Homo sapiens
ctttcttagatcaat

SEQ ID NO: 1742135 - DNA, 15 bp, Homo sapiens
tttcttagatcaatt

SEQ ID NO: 1742136 - DNA, 15 bp, Homo sapiens
ttcttagatcaattt

SEQ ID NO: 1742137 - DNA, 15 bp, Homo sapiens
tcttagatcaattta

SEQ ID NO: 1742138 - DNA, 15 bp, Homo sapiens
cttagatcaatttac

SEQ ID NO: 1742139 - DNA, 15 bp, Homo sapiens
ttagatcaatttact

SEQ ID NO: 1742140 - DNA, 15 bp, Homo sapiens
tagatcaatttactg

SEQ ID NO: 1742141 - DNA, 15 bp, Homo sapiens
agatcaatttactgt

SEQ ID NO: 1742142 - DNA, 15 bp, Homo sapiens
gatcaatttactgtg

SEQ ID NO: 1742143 - DNA, 15 bp, Homo sapiens
atcaatttactgtgt

SEQ ID NO: 1742144 - DNA, 15 bp, Homo sapiens
tcaatttactgtgta

SEQ ID NO: 1742145 - DNA, 15 bp, Homo sapiens
caatttactgtgtat

SEQ ID NO: 1742146 - DNA, 15 bp, Homo sapiens
aatttactgtgtatc

SEQ ID NO: 1742147 - DNA, 15 bp, Homo sapiens
atttactgtgtatca

SEQ ID NO: 1742148 - DNA, 15 bp, Homo sapiens
tttactgtgtatcac

SEQ ID NO: 1742149 - DNA, 15 bp, Homo sapiens
ttactgtgtatcaca

SEQ ID NO: 1742150 - DNA, 15 bp, Homo sapiens
tactgtgtatcacat

SEQ ID NO: 1742151 - DNA, 15 bp, Homo sapiens
actgtgtatcacatt

SEQ ID NO: 1742152 - DNA, 15 bp, Homo sapiens
ctgtgtatcacattt

SEQ ID NO: 1742153 - DNA, 15 bp, Homo sapiens
tgtgtatcacatttt

SEQ ID NO: 1742154 - DNA, 15 bp, Homo sapiens
gtgtatcacattttt

SEQ ID NO: 1742155 - DNA, 15 bp, Homo sapiens
acattttttttttgc

SEQ ID NO: 1742156 - DNA, 15 bp, Homo sapiens
cattttttttttgcc

SEQ ID NO: 1742157 - DNA, 15 bp, Homo sapiens
attttttttttgccc

SEQ ID NO: 1742158 - DNA, 15 bp, Homo sapiens
ttttttttttgccca

SEQ ID NO: 1742159 - DNA, 15 bp, Homo sapiens
tttttttttgcccaa

SEQ ID NO: 1742160 - DNA, 15 bp, Homo sapiens
ttttttttgcccaag

SEQ ID NO: 1742161 - DNA, 15 bp, Homo sapiens
tttttttgcccaaga

SEQ ID NO: 1742162 - DNA, 15 bp, Homo sapiens
ttttttgcccaagaa

SEQ ID NO: 1742163 - DNA, 15 bp, Homo sapiens
tttttgcccaagaag

SEQ ID NO: 1742164 - DNA, 15 bp, Homo sapiens
ttttgcccaagaaga

SEQ ID NO: 1742165 - DNA, 15 bp, Homo sapiens
tttgcccaagaagaa

SEQ ID NO: 1742166 - DNA, 15 bp, Homo sapiens
ttgcccaagaagaat

SEQ ID NO: 1742167 - DNA, 15 bp, Homo sapiens
tgcccaagaagaatc

SEQ ID NO: 1742168 - DNA, 15 bp, Homo sapiens
gcccaagaagaatct

SEQ ID NO: 1742169 - DNA, 15 bp, Homo sapiens
cccaagaagaatcta

SEQ ID NO: 1742170 - DNA, 15 bp, Homo sapiens
ccaagaagaatctag

SEQ ID NO: 1742171 - DNA, 15 bp, Homo sapiens
caagaagaatctagc

SEQ ID NO: 1742172 - DNA, 15 bp, Homo sapiens
aagaagaatctagcc

SEQ ID NO: 1742173 - DNA, 15 bp, Homo sapiens
agaagaatctagcca

SEQ ID NO: 1742174 - DNA, 15 bp, Homo sapiens
gaagaatctagccaa

SEQ ID NO: 1742175 - DNA, 15 bp, Homo sapiens
aagaatctagccaag

SEQ ID NO: 1742176 - DNA, 15 bp, Homo sapiens
agaatctagccaagt

SEQ ID NO: 1742177 - DNA, 15 bp, Homo sapiens
gaatctagccaagta

SEQ ID NO: 1742178 - DNA, 15 bp, Homo sapiens
aatctagccaagtag

SEQ ID NO: 1742179 - DNA, 15 bp, Homo sapiens
atctagccaagtaga

SEQ ID NO: 1742180 - DNA, 15 bp, Homo sapiens
tctagccaagtagaa

SEQ ID NO: 1742181 - DNA, 15 bp, Homo sapiens
ctagccaagtagaat

SEQ ID NO: 1742182 - DNA, 15 bp, Homo sapiens
tagccaagtagaatt

SEQ ID NO: 1742183 - DNA, 15 bp, Homo sapiens
agccaagtagaattg

SEQ ID NO: 1742184 - DNA, 15 bp, Homo sapiens
gccaagtagaattgt

SEQ ID NO: 1742185 - DNA, 15 bp, Homo sapiens
ccaagtagaattgtg

SEQ ID NO: 1742186 - DNA, 15 bp, Homo sapiens
caagtagaattgtgg

SEQ ID NO: 1742187 - DNA, 15 bp, Homo sapiens
aagtagaattgtggt

SEQ ID NO: 1742188 - DNA, 15 bp, Homo sapiens
agtagaattgtggtg

SEQ ID NO: 1742189 - DNA, 15 bp, Homo sapiens
gtagaattgtggtga

SEQ ID NO: 1742190 - DNA, 15 bp, Homo sapiens
tagaattgtggtgaa

SEQ ID NO: 1742191 - DNA, 15 bp, Homo sapiens
agaattgtggtgaaa

SEQ ID NO: 1742192 - DNA, 15 bp, Homo sapiens
gaattgtggtgaaac

SEQ ID NO: 1742193 - DNA, 15 bp, Homo sapiens
aattgtggtgaaact

SEQ ID NO: 1742194 - DNA, 15 bp, Homo sapiens
attgtggtgaaacta

SEQ ID NO: 1742195 - DNA, 15 bp, Homo sapiens
ttgtggtgaaactaa

SEQ ID NO: 1742196 - DNA, 15 bp, Homo sapiens
tgtggtgaaactaac

SEQ ID NO: 1742197 - DNA, 15 bp, Homo sapiens
gtggtgaaactaact

SEQ ID NO: 1742198 - DNA, 15 bp, Homo sapiens
tggtgaaactaactt

SEQ ID NO: 1742199 - DNA, 15 bp, Homo sapiens
ggtgaaactaacttt

SEQ ID NO: 1742200 - DNA, 15 bp, Homo sapiens
gtgaaactaactttt

SEQ ID NO: 1742201 - DNA, 15 bp, Homo sapiens
tgaaactaacttttg

SEQ ID NO: 1742202 - DNA, 15 bp, Homo sapiens
gaaactaacttttgt

SEQ ID NO: 1742203 - DNA, 15 bp, Homo sapiens
aaactaacttttgta

SEQ ID NO: 1742204 - DNA, 15 bp, Homo sapiens
aactaacttttgtat

SEQ ID NO: 1742205 - DNA, 15 bp, Homo sapiens
actaacttttgtata

SEQ ID NO: 1742206 - DNA, 15 bp, Homo sapiens
ctaacttttgtatag

SEQ ID NO: 1742207 - DNA, 15 bp, Homo sapiens
taacttttgtatagt

SEQ ID NO: 1742208 - DNA, 15 bp, Homo sapiens
aacttttgtatagta

SEQ ID NO: 1742209 - DNA, 15 bp, Homo sapiens
acttttgtatagtaa

SEQ ID NO: 1742210 - DNA, 15 bp, Homo sapiens
cttttgtatagtaac

SEQ ID NO: 1742211 - DNA, 15 bp, Homo sapiens
ttttgtatagtaaca

SEQ ID NO: 1742212 - DNA, 15 bp, Homo sapiens
tttgtatagtaacaa

SEQ ID NO: 1742213 - DNA, 15 bp, Homo sapiens
ttgtatagtaacaaa

SEQ ID NO: 1742214 - DNA, 15 bp, Homo sapiens
tgtatagtaacaaaa

SEQ ID NO: 1742215 - DNA, 15 bp, Homo sapiens
gtatagtaacaaaaa

SEQ ID NO: 1742216 - DNA, 15 bp, Homo sapiens
tatagtaacaaaaag

SEQ ID NO: 1742217 - DNA, 15 bp, Homo sapiens
atagtaacaaaaagc

SEQ ID NO: 1742218 - DNA, 15 bp, Homo sapiens
tagtaacaaaaagct

SEQ ID NO: 1742219 - DNA, 15 bp, Homo sapiens
agtaacaaaaagctt

SEQ ID NO: 1742220 - DNA, 15 bp, Homo sapiens
gtaacaaaaagcttt

SEQ ID NO: 1742221 - DNA, 15 bp, Homo sapiens
taacaaaaagctttt

SEQ ID NO: 1742222 - DNA, 15 bp, Homo sapiens
aacaaaaagcttttg

SEQ ID NO: 1742223 - DNA, 15 bp, Homo sapiens
acaaaaagcttttga

SEQ ID NO: 1742224 - DNA, 15 bp, Homo sapiens
caaaaagcttttgag

SEQ ID NO: 1742225 - DNA, 15 bp, Homo sapiens
aaaaagcttttgagt

SEQ ID NO: 1742226 - DNA, 15 bp, Homo sapiens
aaaagcttttgagta

SEQ ID NO: 1742227 - DNA, 15 bp, Homo sapiens
aaagcttttgagtat

SEQ ID NO: 1742228 - DNA, 15 bp, Homo sapiens
aagcttttgagtata

SEQ ID NO: 1742229 - DNA, 15 bp, Homo sapiens
agcttttgagtatat

SEQ ID NO: 1742230 - DNA, 15 bp, Homo sapiens
gcttttgagtatata

SEQ ID NO: 1742231 - DNA, 15 bp, Homo sapiens
cttttgagtatataa

SEQ ID NO: 1742232 - DNA, 15 bp, Homo sapiens
ttttgagtatataat

SEQ ID NO: 1742233 - DNA, 15 bp, Homo sapiens
tttgagtatataatc

SEQ ID NO: 1742234 - DNA, 15 bp, Homo sapiens
ttgagtatataatca

SEQ ID NO: 1742235 - DNA, 15 bp, Homo sapiens
tgagtatataatcaa

SEQ ID NO: 1742236 - DNA, 15 bp, Homo sapiens
gagtatataatcaaa

SEQ ID NO: 1742237 - DNA, 15 bp, Homo sapiens
agtatataatcaaat

SEQ ID NO: 1742238 - DNA, 15 bp, Homo sapiens
gtatataatcaaatg

SEQ ID NO: 1742239 - DNA, 15 bp, Homo sapiens
tatataatcaaatgt

SEQ ID NO: 1742240 - DNA, 15 bp, Homo sapiens
atataatcaaatgta

SEQ ID NO: 1742241 - DNA, 15 bp, Homo sapiens
tataatcaaatgtat

SEQ ID NO: 1742242 - DNA, 15 bp, Homo sapiens
ataatcaaatgtatt

SEQ ID NO: 1742243 - DNA, 15 bp, Homo sapiens
taatcaaatgtatta

SEQ ID NO: 1742244 - DNA, 15 bp, Homo sapiens
aatcaaatgtattag

SEQ ID NO: 1742245 - DNA, 15 bp, Homo sapiens
atcaaatgtattagc

SEQ ID NO: 1742246 - DNA, 15 bp, Homo sapiens
tcaaatgtattagca

SEQ ID NO: 1742247 - DNA, 15 bp, Homo sapiens
caaatgtattagcat

SEQ ID NO: 1742248 - DNA, 15 bp, Homo sapiens
aaatgtattagcatc

SEQ ID NO: 1742249 - DNA, 15 bp, Homo sapiens
aatgtattagcatca

SEQ ID NO: 1742250 - DNA, 15 bp, Homo sapiens
atgtattagcatcat

SEQ ID NO: 1742251 - DNA, 15 bp, Homo sapiens
tgtattagcatcatt

SEQ ID NO: 1742252 - DNA, 15 bp, Homo sapiens
gtattagcatcattt

SEQ ID NO: 1742253 - DNA, 15 bp, Homo sapiens
tattagcatcatttt

SEQ ID NO: 1742254 - DNA, 15 bp, Homo sapiens
attagcatcattttg

SEQ ID NO: 1742255 - DNA, 15 bp, Homo sapiens
ttagcatcattttgt

SEQ ID NO: 1742256 - DNA, 15 bp, Homo sapiens
tagcatcattttgtg

SEQ ID NO: 1742257 - DNA, 15 bp, Homo sapiens
agcatcattttgtga

SEQ ID NO: 1742258 - DNA, 15 bp, Homo sapiens
gcatcattttgtgat

SEQ ID NO: 1742259 - DNA, 15 bp, Homo sapiens
catcattttgtgatt

SEQ ID NO: 1742260 - DNA, 15 bp, Homo sapiens
atcattttgtgattt

SEQ ID NO: 1742261 - DNA, 15 bp, Homo sapiens
tcattttgtgattta

SEQ ID NO: 1742262 - DNA, 15 bp, Homo sapiens
cattttgtgatttat

SEQ ID NO: 1742263 - DNA, 15 bp, Homo sapiens
attttgtgatttata

SEQ ID NO: 1742264 - DNA, 15 bp, Homo sapiens
ttttgtgatttatac

SEQ ID NO: 1742265 - DNA, 15 bp, Homo sapiens
tttgtgatttatact

SEQ ID NO: 1742266 - DNA, 15 bp, Homo sapiens
ttgtgatttatacta

SEQ ID NO: 1742267 - DNA, 15 bp, Homo sapiens
tgtgatttatactag

SEQ ID NO: 1742268 - DNA, 15 bp, Homo sapiens
gtgatttatactaga

SEQ ID NO: 1742269 - DNA, 15 bp, Homo sapiens
tgatttatactagaa

SEQ ID NO: 1742270 - DNA, 15 bp, Homo sapiens
gatttatactagaaa

SEQ ID NO: 1742271 - DNA, 15 bp, Homo sapiens
atttatactagaaat

SEQ ID NO: 1742272 - DNA, 15 bp, Homo sapiens
tttatactagaaatc

SEQ ID NO: 1742273 - DNA, 15 bp, Homo sapiens
ttatactagaaatca

SEQ ID NO: 1742274 - DNA, 15 bp, Homo sapiens
tatactagaaatcaa

SEQ ID NO: 1742275 - DNA, 15 bp, Homo sapiens
atactagaaatcaat

SEQ ID NO: 1742276 - DNA, 15 bp, Homo sapiens
tactagaaatcaatc

SEQ ID NO: 1742277 - DNA, 15 bp, Homo sapiens
actagaaatcaatct

SEQ ID NO: 1742278 - DNA, 15 bp, Homo sapiens
ctagaaatcaatctt

SEQ ID NO: 1742279 - DNA, 15 bp, Homo sapiens
tagaaatcaatcttt

SEQ ID NO: 1742280 - DNA, 15 bp, Homo sapiens
agaaatcaatcttta

SEQ ID NO: 1742281 - DNA, 15 bp, Homo sapiens
gaaatcaatctttat

SEQ ID NO: 1742282 - DNA, 15 bp, Homo sapiens
aaatcaatctttatt

SEQ ID NO: 1742283 - DNA, 15 bp, Homo sapiens
aatcaatctttattg

SEQ ID NO: 1742284 - DNA, 15 bp, Homo sapiens
atcaatctttattga

SEQ ID NO: 1742285 - DNA, 15 bp, Homo sapiens
tcaatctttattgaa

SEQ ID NO: 1742286 - DNA, 15 bp, Homo sapiens
caatctttattgaat

SEQ ID NO: 1742287 - DNA, 15 bp, Homo sapiens
aatctttattgaatt

SEQ ID NO: 1742288 - DNA, 15 bp, Homo sapiens
atctttattgaattt

SEQ ID NO: 1742289 - DNA, 15 bp, Homo sapiens
tctttattgaatttt

SEQ ID NO: 1742290 - DNA, 15 bp, Homo sapiens
ctttattgaattttt

SEQ ID NO: 1742291 - DNA, 15 bp, Homo sapiens
tttattgaatttttt

SEQ ID NO: 1742292 - DNA, 15 bp, Homo sapiens
ttattgaattttttc

SEQ ID NO: 1742293 - DNA, 15 bp, Homo sapiens
tattgaattttttcc

SEQ ID NO: 1742294 - DNA, 15 bp, Homo sapiens
attgaattttttcca

SEQ ID NO: 1742295 - DNA, 15 bp, Homo sapiens
ttgaattttttccaa

SEQ ID NO: 1742296 - DNA, 15 bp, Homo sapiens
tgaattttttccaaa

SEQ ID NO: 1742297 - DNA, 15 bp, Homo sapiens
gaattttttccaaaa

SEQ ID NO: 1742298 - DNA, 15 bp, Homo sapiens
aattttttccaaaat

SEQ ID NO: 1742299 - DNA, 15 bp, Homo sapiens
attttttccaaaatc

SEQ ID NO: 1742300 - DNA, 15 bp, Homo sapiens
ttttttccaaaatca

SEQ ID NO: 1742301 - DNA, 15 bp, Homo sapiens
tttttccaaaatcaa

SEQ ID NO: 1742302 - DNA, 15 bp, Homo sapiens
ttttccaaaatcaaa

SEQ ID NO: 1742303 - DNA, 15 bp, Homo sapiens
tttccaaaatcaaag

SEQ ID NO: 1742304 - DNA, 15 bp, Homo sapiens
ttccaaaatcaaagt

SEQ ID NO: 1742305 - DNA, 15 bp, Homo sapiens
tccaaaatcaaagta

SEQ ID NO: 1742306 - DNA, 15 bp, Homo sapiens
ccaaaatcaaagtat

SEQ ID NO: 1742307 - DNA, 15 bp, Homo sapiens
caaaatcaaagtata

SEQ ID NO: 1742308 - DNA, 15 bp, Homo sapiens
aaaatcaaagtatag

SEQ ID NO: 1742309 - DNA, 15 bp, Homo sapiens
aaatcaaagtataga

SEQ ID NO: 1742310 - DNA, 15 bp, Homo sapiens
aatcaaagtatagac

SEQ ID NO: 1742311 - DNA, 15 bp, Homo sapiens
atcaaagtatagact

SEQ ID NO: 1742312 - DNA, 15 bp, Homo sapiens
tcaaagtatagactt

SEQ ID NO: 1742313 - DNA, 15 bp, Homo sapiens
caaagtatagacttt

SEQ ID NO: 1742314 - DNA, 15 bp, Homo sapiens
aaagtatagactttt

SEQ ID NO: 1742315 - DNA, 15 bp, Homo sapiens
aagtatagactttta

SEQ ID NO: 1742316 - DNA, 15 bp, Homo sapiens
agtatagacttttaa

SEQ ID NO: 1742317 - DNA, 15 bp, Homo sapiens
tatagacttttaaac

SEQ ID NO: 1742318 - DNA, 15 bp, Homo sapiens
atagacttttaaact

SEQ ID NO: 1742319 - DNA, 15 bp, Homo sapiens
tagacttttaaactt

SEQ ID NO: 1742320 - DNA, 15 bp, Homo sapiens
agacttttaaacttc

SEQ ID NO: 1742321 - DNA, 15 bp, Homo sapiens
gacttttaaacttct

SEQ ID NO: 1742322 - DNA, 15 bp, Homo sapiens
acttttaaacttcta

SEQ ID NO: 1742323 - DNA, 15 bp, Homo sapiens
cttttaaacttctaa

SEQ ID NO: 1742324 - DNA, 15 bp, Homo sapiens
ttttaaacttctaaa

SEQ ID NO: 1742325 - DNA, 15 bp, Homo sapiens
tttaaacttctaaat

SEQ ID NO: 1742326 - DNA, 15 bp, Homo sapiens
ttaaacttctaaata

SEQ ID NO: 1742327 - DNA, 15 bp, Homo sapiens
taaacttctaaatac

SEQ ID NO: 1742328 - DNA, 15 bp, Homo sapiens
aaacttctaaatacc

SEQ ID NO: 1742329 - DNA, 15 bp, Homo sapiens
aacttctaaatacca

SEQ ID NO: 1742330 - DNA, 15 bp, Homo sapiens
acttctaaataccat

SEQ ID NO: 1742331 - DNA, 15 bp, Homo sapiens
cttctaaataccatt

SEQ ID NO: 1742332 - DNA, 15 bp, Homo sapiens
ttctaaataccatta

SEQ ID NO: 1742333 - DNA, 15 bp, Homo sapiens
tctaaataccattaa

SEQ ID NO: 1742334 - DNA, 15 bp, Homo sapiens
ctaaataccattaaa

SEQ ID NO: 1742335 - DNA, 15 bp, Homo sapiens
taaataccattaaat

SEQ ID NO: 1742336 - DNA, 15 bp, Homo sapiens
aaataccattaaata

SEQ ID NO: 1742337 - DNA, 15 bp, Homo sapiens
aataccattaaatag

SEQ ID NO: 1742338 - DNA, 15 bp, Homo sapiens
ataccattaaatagc

SEQ ID NO: 1742339 - DNA, 15 bp, Homo sapiens
taccattaaatagct

SEQ ID NO: 1742340 - DNA, 15 bp, Homo sapiens
accattaaatagcta

SEQ ID NO: 1742341 - DNA, 15 bp, Homo sapiens
ccattaaatagctaa

SEQ ID NO: 1742342 - DNA, 15 bp, Homo sapiens
cattaaatagctaaa

SEQ ID NO: 1742343 - DNA, 15 bp, Homo sapiens
attaaatagctaaat

SEQ ID NO: 1742344 - DNA, 15 bp, Homo sapiens
ttaaatagctaaatt

SEQ ID NO: 1742345 - DNA, 15 bp, Homo sapiens
taaatagctaaattt

SEQ ID NO: 1742346 - DNA, 15 bp, Homo sapiens
aaatagctaaatttt

SEQ ID NO: 1742347 - DNA, 15 bp, Homo sapiens
aatagctaaatttta

SEQ ID NO: 1742348 - DNA, 15 bp, Homo sapiens
atagctaaattttaa

SEQ ID NO: 1742349 - DNA, 15 bp, Homo sapiens
tagctaaattttaat

SEQ ID NO: 1742350 - DNA, 15 bp, Homo sapiens
agctaaattttaata

SEQ ID NO: 1742351 - DNA, 15 bp, Homo sapiens
gctaaattttaatag

SEQ ID NO: 1742352 - DNA, 15 bp, Homo sapiens
ctaaattttaatagc

SEQ ID NO: 1742353 - DNA, 15 bp, Homo sapiens
taaattttaatagct

SEQ ID NO: 1742354 - DNA, 15 bp, Homo sapiens
aaattttaatagcta

SEQ ID NO: 1742355 - DNA, 15 bp, Homo sapiens
aattttaatagctaa

SEQ ID NO: 1742356 - DNA, 15 bp, Homo sapiens
attttaatagctaaa

SEQ ID NO: 1742357 - DNA, 15 bp, Homo sapiens
ttttaatagctaaat

SEQ ID NO: 1742358 - DNA, 15 bp, Homo sapiens
tttaatagctaaata

SEQ ID NO: 1742359 - DNA, 15 bp, Homo sapiens
ttaatagctaaatat

SEQ ID NO: 1742360 - DNA, 15 bp, Homo sapiens
taatagctaaatata

SEQ ID NO: 1742361 - DNA, 15 bp, Homo sapiens
aatagctaaatataa

SEQ ID NO: 1742362 - DNA, 15 bp, Homo sapiens
atagctaaatataaa

SEQ ID NO: 1742363 - DNA, 15 bp, Homo sapiens
tagctaaatataaac

SEQ ID NO: 1742364 - DNA, 15 bp, Homo sapiens
agctaaatataaacc

SEQ ID NO: 1742365 - DNA, 15 bp, Homo sapiens
gctaaatataaacca

SEQ ID NO: 1742366 - DNA, 15 bp, Homo sapiens
ctaaatataaaccat

SEQ ID NO: 1742367 - DNA, 15 bp, Homo sapiens
taaatataaaccatt

SEQ ID NO: 1742368 - DNA, 15 bp, Homo sapiens
aaatataaaccatta

SEQ ID NO: 1742369 - DNA, 15 bp, Homo sapiens
aatataaaccattaa

SEQ ID NO: 1742370 - DNA, 15 bp, Homo sapiens
atataaaccattaaa

SEQ ID NO: 1742371 - DNA, 15 bp, Homo sapiens
tataaaccattaaat

SEQ ID NO: 1742372 - DNA, 15 bp, Homo sapiens
ataaaccattaaatt

SEQ ID NO: 1742373 - DNA, 15 bp, Homo sapiens
taaaccattaaattt

SEQ ID NO: 1742374 - DNA, 15 bp, Homo sapiens
aaaccattaaatttg

SEQ ID NO: 1742375 - DNA, 15 bp, Homo sapiens
aaccattaaatttgc

SEQ ID NO: 1742376 - DNA, 15 bp, Homo sapiens
accattaaatttgct

SEQ ID NO: 1742377 - DNA, 15 bp, Homo sapiens
ccattaaatttgctt

SEQ ID NO: 1742378 - DNA, 15 bp, Homo sapiens
cattaaatttgcttt

SEQ ID NO: 1742379 - DNA, 15 bp, Homo sapiens
attaaatttgctttg

SEQ ID NO: 1742380 - DNA, 15 bp, Homo sapiens
ttaaatttgctttgg

SEQ ID NO: 1742381 - DNA, 15 bp, Homo sapiens
taaatttgctttggt

SEQ ID NO: 1742382 - DNA, 15 bp, Homo sapiens
aaatttgctttggta

SEQ ID NO: 1742383 - DNA, 15 bp, Homo sapiens
aatttgctttggtaa

SEQ ID NO: 1742384 - DNA, 15 bp, Homo sapiens
atttgctttggtaag

SEQ ID NO: 1742385 - DNA, 15 bp, Homo sapiens
tttgctttggtaagc

SEQ ID NO: 1742386 - DNA, 15 bp, Homo sapiens
ttgctttggtaagcc

SEQ ID NO: 1742387 - DNA, 15 bp, Homo sapiens
tgctttggtaagcct

SEQ ID NO: 1742388 - DNA, 15 bp, Homo sapiens
gctttggtaagcctc

SEQ ID NO: 1742389 - DNA, 15 bp, Homo sapiens
ctttggtaagcctca

SEQ ID NO: 1742390 - DNA, 15 bp, Homo sapiens
tttggtaagcctcat

SEQ ID NO: 1742391 - DNA, 15 bp, Homo sapiens
ttggtaagcctcatt

SEQ ID NO: 1742392 - DNA, 15 bp, Homo sapiens
tggtaagcctcatta

SEQ ID NO: 1742393 - DNA, 15 bp, Homo sapiens
ggtaagcctcattaa

SEQ ID NO: 1742394 - DNA, 15 bp, Homo sapiens
gtaagcctcattaag

SEQ ID NO: 1742395 - DNA, 15 bp, Homo sapiens
taagcctcattaagc

SEQ ID NO: 1742396 - DNA, 15 bp, Homo sapiens
aagcctcattaagcg

SEQ ID NO: 1742397 - DNA, 15 bp, Homo sapiens
agcctcattaagcgt

SEQ ID NO: 1742398 - DNA, 15 bp, Homo sapiens
gcctcattaagcgta

SEQ ID NO: 1742399 - DNA, 15 bp, Homo sapiens
cctcattaagcgtag

SEQ ID NO: 1742400 - DNA, 15 bp, Homo sapiens
ctcattaagcgtagg

SEQ ID NO: 1742401 - DNA, 15 bp, Homo sapiens
tcattaagcgtagga

SEQ ID NO: 1742402 - DNA, 15 bp, Homo sapiens
cattaagcgtaggaa

SEQ ID NO: 1742403 - DNA, 15 bp, Homo sapiens
attaagcgtaggaac

SEQ ID NO: 1742404 - DNA, 15 bp, Homo sapiens
ttaagcgtaggaacc

SEQ ID NO: 1742405 - DNA, 15 bp, Homo sapiens
taagcgtaggaacca

SEQ ID NO: 1742406 - DNA, 15 bp, Homo sapiens
aagcgtaggaaccat

SEQ ID NO: 1742407 - DNA, 15 bp, Homo sapiens
agcgtaggaaccatg

SEQ ID NO: 1742408 - DNA, 15 bp, Homo sapiens
gcgtaggaaccatga

SEQ ID NO: 1742409 - DNA, 15 bp, Homo sapiens
cgtaggaaccatgat

SEQ ID NO: 1742410 - DNA, 15 bp, Homo sapiens
gtaggaaccatgatt

SEQ ID NO: 1742411 - DNA, 15 bp, Homo sapiens
taggaaccatgatta

SEQ ID NO: 1742412 - DNA, 15 bp, Homo sapiens
aggaaccatgattaa

SEQ ID NO: 1742413 - DNA, 15 bp, Homo sapiens
ggaaccatgattaat

SEQ ID NO: 1742414 - DNA, 15 bp, Homo sapiens
gaaccatgattaatg

SEQ ID NO: 1742415 - DNA, 15 bp, Homo sapiens
aaccatgattaatgc

SEQ ID NO: 1742416 - DNA, 15 bp, Homo sapiens
accatgattaatgcc

SEQ ID NO: 1742417 - DNA, 15 bp, Homo sapiens
ccatgattaatgcca

SEQ ID NO: 1742418 - DNA, 15 bp, Homo sapiens
catgattaatgccat

SEQ ID NO: 1742419 - DNA, 15 bp, Homo sapiens
atgattaatgccatc

SEQ ID NO: 1742420 - DNA, 15 bp, Homo sapiens
tgattaatgccatca

SEQ ID NO: 1742421 - DNA, 15 bp, Homo sapiens
gattaatgccatcaa

SEQ ID NO: 1742422 - DNA, 15 bp, Homo sapiens
attaatgccatcaac

SEQ ID NO: 1742423 - DNA, 15 bp, Homo sapiens
ttaatgccatcaaca

SEQ ID NO: 1742424 - DNA, 15 bp, Homo sapiens
taatgccatcaacat

SEQ ID NO: 1742425 - DNA, 15 bp, Homo sapiens
aatgccatcaacatt

SEQ ID NO: 1742426 - DNA, 15 bp, Homo sapiens
atgccatcaacatta

SEQ ID NO: 1742427 - DNA, 15 bp, Homo sapiens
tgccatcaacattat

SEQ ID NO: 1742428 - DNA, 15 bp, Homo sapiens
gccatcaacattatt

SEQ ID NO: 1742429 - DNA, 15 bp, Homo sapiens
ccatcaacattattg

SEQ ID NO: 1742430 - DNA, 15 bp, Homo sapiens
catcaacattattgg

SEQ ID NO: 1742431 - DNA, 15 bp, Homo sapiens
atcaacattattggc

SEQ ID NO: 1742432 - DNA, 15 bp, Homo sapiens
tcaacattattggca

SEQ ID NO: 1742433 - DNA, 15 bp, Homo sapiens
caacattattggcat

SEQ ID NO: 1742434 - DNA, 15 bp, Homo sapiens
aacattattggcatt

SEQ ID NO: 1742435 - DNA, 15 bp, Homo sapiens
acattattggcatta

SEQ ID NO: 1742436 - DNA, 15 bp, Homo sapiens
cattattggcattac

SEQ ID NO: 1742437 - DNA, 15 bp, Homo sapiens
attattggcattact

SEQ ID NO: 1742438 - DNA, 15 bp, Homo sapiens
ttattggcattacta

SEQ ID NO: 1742439 - DNA, 15 bp, Homo sapiens
tattggcattactac

SEQ ID NO: 1742440 - DNA, 15 bp, Homo sapiens
attggcattactaca

SEQ ID NO: 1742441 - DNA, 15 bp, Homo sapiens
ttggcattactacat

SEQ ID NO: 1742442 - DNA, 15 bp, Homo sapiens
tggcattactacatt

SEQ ID NO: 1742443 - DNA, 15 bp, Homo sapiens
ggcattactacattg

SEQ ID NO: 1742444 - DNA, 15 bp, Homo sapiens
gcattactacattgt

SEQ ID NO: 1742445 - DNA, 15 bp, Homo sapiens
cattactacattgtg

SEQ ID NO: 1742446 - DNA, 15 bp, Homo sapiens
attactacattgtgg

SEQ ID NO: 1742447 - DNA, 15 bp, Homo sapiens
ttactacattgtgga

SEQ ID NO: 1742448 - DNA, 15 bp, Homo sapiens
tactacattgtggaa

SEQ ID NO: 1742449 - DNA, 15 bp, Homo sapiens
actacattgtggaac

SEQ ID NO: 1742450 - DNA, 15 bp, Homo sapiens
ctacattgtggaaca

SEQ ID NO: 1742451 - DNA, 15 bp, Homo sapiens
tacattgtggaacat

SEQ ID NO: 1742452 - DNA, 15 bp, Homo sapiens
acattgtggaacatc

SEQ ID NO: 1742453 - DNA, 15 bp, Homo sapiens
cattgtggaacatct

SEQ ID NO: 1742454 - DNA, 15 bp, Homo sapiens
attgtggaacatctc

SEQ ID NO: 1742455 - DNA, 15 bp, Homo sapiens
ttgtggaacatctct

SEQ ID NO: 1742456 - DNA, 15 bp, Homo sapiens
tgtggaacatctctt

SEQ ID NO: 1742457 - DNA, 15 bp, Homo sapiens
gtggaacatctcttt

SEQ ID NO: 1742458 - DNA, 15 bp, Homo sapiens
tggaacatctctttt

SEQ ID NO: 1742459 - DNA, 15 bp, Homo sapiens
ggaacatctcttttg

SEQ ID NO: 1742460 - DNA, 15 bp, Homo sapiens
gaacatctcttttga

SEQ ID NO: 1742461 - DNA, 15 bp, Homo sapiens
aacatctcttttgag

SEQ ID NO: 1742462 - DNA, 15 bp, Homo sapiens
acatctcttttgagg

SEQ ID NO: 1742463 - DNA, 15 bp, Homo sapiens
catctcttttgagga

SEQ ID NO: 1742464 - DNA, 15 bp, Homo sapiens
atctcttttgaggat

SEQ ID NO: 1742465 - DNA, 15 bp, Homo sapiens
tctcttttgaggatt

SEQ ID NO: 1742466 - DNA, 15 bp, Homo sapiens
ctcttttgaggattt

SEQ ID NO: 1742467 - DNA, 15 bp, Homo sapiens
tcttttgaggatttt

SEQ ID NO: 1742468 - DNA, 15 bp, Homo sapiens
cttttgaggattttt

SEQ ID NO: 1742469 - DNA, 15 bp, Homo sapiens
ttttgaggattttta

SEQ ID NO: 1742470 - DNA, 15 bp, Homo sapiens
tttgaggatttttaa

SEQ ID NO: 1742471 - DNA, 15 bp, Homo sapiens
ttgaggatttttaag

SEQ ID NO: 1742472 - DNA, 15 bp, Homo sapiens
tgaggatttttaaga

SEQ ID NO: 1742473 - DNA, 15 bp, Homo sapiens
gaggatttttaagaa

SEQ ID NO: 1742474 - DNA, 15 bp, Homo sapiens
aggatttttaagaac

SEQ ID NO: 1742475 - DNA, 15 bp, Homo sapiens
ggatttttaagaact

SEQ ID NO: 1742476 - DNA, 15 bp, Homo sapiens
gatttttaagaactg

SEQ ID NO: 1742477 - DNA, 15 bp, Homo sapiens
atttttaagaactgc

SEQ ID NO: 1742478 - DNA, 15 bp, Homo sapiens
tttttaagaactgct

SEQ ID NO: 1742479 - DNA, 15 bp, Homo sapiens
ttttaagaactgctt

SEQ ID NO: 1742480 - DNA, 15 bp, Homo sapiens
tttaagaactgctta

SEQ ID NO: 1742481 - DNA, 15 bp, Homo sapiens
ttaagaactgcttaa

SEQ ID NO: 1742482 - DNA, 15 bp, Homo sapiens
taagaactgcttaat

SEQ ID NO: 1742483 - DNA, 15 bp, Homo sapiens
aagaactgcttaatt

SEQ ID NO: 1742484 - DNA, 15 bp, Homo sapiens
agaactgcttaattg

SEQ ID NO: 1742485 - DNA, 15 bp, Homo sapiens
gaactgcttaattga

SEQ ID NO: 1742486 - DNA, 15 bp, Homo sapiens
aactgcttaattgaa

SEQ ID NO: 1742487 - DNA, 15 bp, Homo sapiens
actgcttaattgaaa

SEQ ID NO: 1742488 - DNA, 15 bp, Homo sapiens
ctgcttaattgaaaa

SEQ ID NO: 1742489 - DNA, 15 bp, Homo sapiens
tgcttaattgaaaat

SEQ ID NO: 1742490 - DNA, 15 bp, Homo sapiens
gcttaattgaaaata

SEQ ID NO: 1742491 - DNA, 15 bp, Homo sapiens
cttaattgaaaatac

SEQ ID NO: 1742492 - DNA, 15 bp, Homo sapiens
ttaattgaaaataca

SEQ ID NO: 1742493 - DNA, 15 bp, Homo sapiens
taattgaaaatacaa

SEQ ID NO: 1742494 - DNA, 15 bp, Homo sapiens
aattgaaaatacaaa

SEQ ID NO: 1742495 - DNA, 15 bp, Homo sapiens
attgaaaatacaaat

SEQ ID NO: 1742496 - DNA, 15 bp, Homo sapiens
ttgaaaatacaaatg

SEQ ID NO: 1742497 - DNA, 15 bp, Homo sapiens
tgaaaatacaaatgt

SEQ ID NO: 1742498 - DNA, 15 bp, Homo sapiens
gaaaatacaaatgta

SEQ ID NO: 1742499 - DNA, 15 bp, Homo sapiens
aaaatacaaatgtat

SEQ ID NO: 1742500 - DNA, 15 bp, Homo sapiens
aaatacaaatgtatt

SEQ ID NO: 1742501 - DNA, 15 bp, Homo sapiens
aatacaaatgtattt

SEQ ID NO: 1742502 - DNA, 15 bp, Homo sapiens
atacaaatgtatttg

SEQ ID NO: 1742503 - DNA, 15 bp, Homo sapiens
tacaaatgtatttgt

SEQ ID NO: 1742504 - DNA, 15 bp, Homo sapiens
acaaatgtatttgtt

SEQ ID NO: 1742505 - DNA, 15 bp, Homo sapiens
caaatgtatttgttg

SEQ ID NO: 1742506 - DNA, 15 bp, Homo sapiens
aaatgtatttgttga

SEQ ID NO: 1742507 - DNA, 15 bp, Homo sapiens
aatgtatttgttgaa

SEQ ID NO: 1742508 - DNA, 15 bp, Homo sapiens
atgtatttgttgaaa

SEQ ID NO: 1742509 - DNA, 15 bp, Homo sapiens
tgtatttgttgaaat

SEQ ID NO: 1742510 - DNA, 15 bp, Homo sapiens
gtatttgttgaaatg

SEQ ID NO: 1742511 - DNA, 15 bp, Homo sapiens
tatttgttgaaatga

SEQ ID NO: 1742512 - DNA, 15 bp, Homo sapiens
atttgttgaaatgac

SEQ ID NO: 1742513 - DNA, 15 bp, Homo sapiens
tttgttgaaatgact

SEQ ID NO: 1742514 - DNA, 15 bp, Homo sapiens
ttgttgaaatgactg

SEQ ID NO: 1742515 - DNA, 15 bp, Homo sapiens
tgttgaaatgactgt

SEQ ID NO: 1742516 - DNA, 15 bp, Homo sapiens
gttgaaatgactgtg

SEQ ID NO: 1742517 - DNA, 15 bp, Homo sapiens
ttgaaatgactgtga

SEQ ID NO: 1742518 - DNA, 15 bp, Homo sapiens
tgaaatgactgtgac

SEQ ID NO: 1742519 - DNA, 15 bp, Homo sapiens
gaaatgactgtgact

SEQ ID NO: 1742520 - DNA, 15 bp, Homo sapiens
aaatgactgtgacta

SEQ ID NO: 1742521 - DNA, 15 bp, Homo sapiens
aatgactgtgactat

SEQ ID NO: 1742522 - DNA, 15 bp, Homo sapiens
atgactgtgactatt

SEQ ID NO: 1742523 - DNA, 15 bp, Homo sapiens
tgactgtgactattg

SEQ ID NO: 1742524 - DNA, 15 bp, Homo sapiens
gactgtgactattgc

SEQ ID NO: 1742525 - DNA, 15 bp, Homo sapiens
actgtgactattgca

SEQ ID NO: 1742526 - DNA, 15 bp, Homo sapiens
ctgtgactattgcag

SEQ ID NO: 1742527 - DNA, 15 bp, Homo sapiens
tgtgactattgcaga

SEQ ID NO: 1742528 - DNA, 15 bp, Homo sapiens
gtgactattgcagaa

SEQ ID NO: 1742529 - DNA, 15 bp, Homo sapiens
tgactattgcagaag

SEQ ID NO: 1742530 - DNA, 15 bp, Homo sapiens
gactattgcagaagt

SEQ ID NO: 1742531 - DNA, 15 bp, Homo sapiens
actattgcagaagtg

SEQ ID NO: 1742532 - DNA, 15 bp, Homo sapiens
ctattgcagaagtgt

SEQ ID NO: 1742533 - DNA, 15 bp, Homo sapiens
tattgcagaagtgtt

SEQ ID NO: 1742534 - DNA, 15 bp, Homo sapiens
attgcagaagtgttt

SEQ ID NO: 1742535 - DNA, 15 bp, Homo sapiens
ttgcagaagtgtttt

SEQ ID NO: 1742536 - DNA, 15 bp, Homo sapiens
tgcagaagtgtttta

SEQ ID NO: 1742537 - DNA, 15 bp, Homo sapiens
gcagaagtgttttac

SEQ ID NO: 1742538 - DNA, 15 bp, Homo sapiens
cagaagtgttttacc

SEQ ID NO: 1742539 - DNA, 15 bp, Homo sapiens
agaagtgttttacct

SEQ ID NO: 1742540 - DNA, 15 bp, Homo sapiens
gaagtgttttacctt

SEQ ID NO: 1742541 - DNA, 15 bp, Homo sapiens
aagtgttttacctta

SEQ ID NO: 1742542 - DNA, 15 bp, Homo sapiens
agtgttttaccttag

SEQ ID NO: 1742543 - DNA, 15 bp, Homo sapiens
gtgttttaccttagt

SEQ ID NO: 1742544 - DNA, 15 bp, Homo sapiens
tgttttaccttagtg

SEQ ID NO: 1742545 - DNA, 15 bp, Homo sapiens
gttttaccttagtga

SEQ ID NO: 1742546 - DNA, 15 bp, Homo sapiens
ttttaccttagtgat

SEQ ID NO: 1742547 - DNA, 15 bp, Homo sapiens
tttaccttagtgata

SEQ ID NO: 1742548 - DNA, 15 bp, Homo sapiens
ttaccttagtgatat

SEQ ID NO: 1742549 - DNA, 15 bp, Homo sapiens
taccttagtgatatt

SEQ ID NO: 1742550 - DNA, 15 bp, Homo sapiens
accttagtgatattc

SEQ ID NO: 1742551 - DNA, 15 bp, Homo sapiens
ccttagtgatattcc

SEQ ID NO: 1742552 - DNA, 15 bp, Homo sapiens
cttagtgatattcca

SEQ ID NO: 1742553 - DNA, 15 bp, Homo sapiens
ttagtgatattccat

SEQ ID NO: 1742554 - DNA, 15 bp, Homo sapiens
tagtgatattccatc

SEQ ID NO: 1742555 - DNA, 15 bp, Homo sapiens
agtgatattccatcc

SEQ ID NO: 1742556 - DNA, 15 bp, Homo sapiens
gtgatattccatcca

SEQ ID NO: 1742557 - DNA, 15 bp, Homo sapiens
tgatattccatccat

SEQ ID NO: 1742558 - DNA, 15 bp, Homo sapiens
gatattccatccatc

SEQ ID NO: 1742559 - DNA, 15 bp, Homo sapiens
atattccatccatct

SEQ ID NO: 1742560 - DNA, 15 bp, Homo sapiens
tattccatccatcta

SEQ ID NO: 1742561 - DNA, 15 bp, Homo sapiens
attccatccatctac

SEQ ID NO: 1742562 - DNA, 15 bp, Homo sapiens
ttccatccatctacc

SEQ ID NO: 1742563 - DNA, 15 bp, Homo sapiens
tccatccatctacct

SEQ ID NO: 1742564 - DNA, 15 bp, Homo sapiens
ccatccatctacctg

SEQ ID NO: 1742565 - DNA, 15 bp, Homo sapiens
catccatctacctgt

SEQ ID NO: 1742566 - DNA, 15 bp, Homo sapiens
atccatctacctgtt

SEQ ID NO: 1742567 - DNA, 15 bp, Homo sapiens
tccatctacctgttt

SEQ ID NO: 1742568 - DNA, 15 bp, Homo sapiens
ccatctacctgtttt

SEQ ID NO: 1742569 - DNA, 15 bp, Homo sapiens
catctacctgttttg

SEQ ID NO: 1742570 - DNA, 15 bp, Homo sapiens
atctacctgttttgt

SEQ ID NO: 1742571 - DNA, 15 bp, Homo sapiens
tctacctgttttgtt

SEQ ID NO: 1742572 - DNA, 15 bp, Homo sapiens
ctacctgttttgttt

SEQ ID NO: 1742573 - DNA, 15 bp, Homo sapiens
tacctgttttgtttc

SEQ ID NO: 1742574 - DNA, 15 bp, Homo sapiens
acctgttttgtttcg

SEQ ID NO: 1742575 - DNA, 15 bp, Homo sapiens
cctgttttgtttcgc

SEQ ID NO: 1742576 - DNA, 15 bp, Homo sapiens
ctgttttgtttcgca

SEQ ID NO: 1742577 - DNA, 15 bp, Homo sapiens
tgttttgtttcgcat

SEQ ID NO: 1742578 - DNA, 15 bp, Homo sapiens
gttttgtttcgcatt

SEQ ID NO: 1742579 - DNA, 15 bp, Homo sapiens
ttttgtttcgcattt

SEQ ID NO: 1742580 - DNA, 15 bp, Homo sapiens
tttgtttcgcatttt

SEQ ID NO: 1742581 - DNA, 15 bp, Homo sapiens
ttgtttcgcattttg

SEQ ID NO: 1742582 - DNA, 15 bp, Homo sapiens
tgtttcgcattttgc

SEQ ID NO: 1742583 - DNA, 15 bp, Homo sapiens
gtttcgcattttgct

SEQ ID NO: 1742584 - DNA, 15 bp, Homo sapiens
tttcgcattttgcta

SEQ ID NO: 1742585 - DNA, 15 bp, Homo sapiens
ttcgcattttgctac

SEQ ID NO: 1742586 - DNA, 15 bp, Homo sapiens
tcgcattttgctaca

SEQ ID NO: 1742587 - DNA, 15 bp, Homo sapiens
cgcattttgctacaa

SEQ ID NO: 1742588 - DNA, 15 bp, Homo sapiens
gcattttgctacaaa

SEQ ID NO: 1742589 - DNA, 15 bp, Homo sapiens
cattttgctacaaat

SEQ ID NO: 1742590 - DNA, 15 bp, Homo sapiens
attttgctacaaatg

SEQ ID NO: 1742591 - DNA, 15 bp, Homo sapiens
ttttgctacaaatgt

SEQ ID NO: 1742592 - DNA, 15 bp, Homo sapiens
tttgctacaaatgtc

SEQ ID NO: 1742593 - DNA, 15 bp, Homo sapiens
ttgctacaaatgtct

SEQ ID NO: 1742594 - DNA, 15 bp, Homo sapiens
tgctacaaatgtctt

SEQ ID NO: 1742595 - DNA, 15 bp, Homo sapiens
gctacaaatgtcttt

SEQ ID NO: 1742596 - DNA, 15 bp, Homo sapiens
ctacaaatgtctttc

SEQ ID NO: 1742597 - DNA, 15 bp, Homo sapiens
tacaaatgtctttcc

SEQ ID NO: 1742598 - DNA, 15 bp, Homo sapiens
acaaatgtctttcca

SEQ ID NO: 1742599 - DNA, 15 bp, Homo sapiens
caaatgtctttccaa

SEQ ID NO: 1742600 - DNA, 15 bp, Homo sapiens
aaatgtctttccaat

SEQ ID NO: 1742601 - DNA, 15 bp, Homo sapiens
aatgtctttccaatg

SEQ ID NO: 1742602 - DNA, 15 bp, Homo sapiens
atgtctttccaatga

SEQ ID NO: 1742603 - DNA, 15 bp, Homo sapiens
tgtctttccaatgag

SEQ ID NO: 1742604 - DNA, 15 bp, Homo sapiens
gtctttccaatgaga

SEQ ID NO: 1742605 - DNA, 15 bp, Homo sapiens
tctttccaatgagaa

SEQ ID NO: 1742606 - DNA, 15 bp, Homo sapiens
ctttccaatgagaac

SEQ ID NO: 1742607 - DNA, 15 bp, Homo sapiens
tttccaatgagaaca

SEQ ID NO: 1742608 - DNA, 15 bp, Homo sapiens
ttccaatgagaacag

SEQ ID NO: 1742609 - DNA, 15 bp, Homo sapiens
tccaatgagaacaga

SEQ ID NO: 1742610 - DNA, 15 bp, Homo sapiens
ccaatgagaacagaa

SEQ ID NO: 1742611 - DNA, 15 bp, Homo sapiens
caatgagaacagaat

SEQ ID NO: 1742612 - DNA, 15 bp, Homo sapiens
aatgagaacagaata

SEQ ID NO: 1742613 - DNA, 15 bp, Homo sapiens
atgagaacagaataa

SEQ ID NO: 1742614 - DNA, 15 bp, Homo sapiens
tgagaacagaataac

SEQ ID NO: 1742615 - DNA, 15 bp, Homo sapiens
gagaacagaataact

SEQ ID NO: 1742616 - DNA, 15 bp, Homo sapiens
agaacagaataactg

SEQ ID NO: 1742617 - DNA, 15 bp, Homo sapiens
gaacagaataactga

SEQ ID NO: 1742618 - DNA, 15 bp, Homo sapiens
aacagaataactgag

SEQ ID NO: 1742619 - DNA, 15 bp, Homo sapiens
acagaataactgaga

SEQ ID NO: 1742620 - DNA, 15 bp, Homo sapiens
cagaataactgagag

SEQ ID NO: 1742621 - DNA, 15 bp, Homo sapiens
agaataactgagagc

SEQ ID NO: 1742622 - DNA, 15 bp, Homo sapiens
gaataactgagagct

SEQ ID NO: 1742623 - DNA, 15 bp, Homo sapiens
aataactgagagctt

SEQ ID NO: 1742624 - DNA, 15 bp, Homo sapiens
ataactgagagcttt

SEQ ID NO: 1742625 - DNA, 15 bp, Homo sapiens
taactgagagctttg

SEQ ID NO: 1742626 - DNA, 15 bp, Homo sapiens
aactgagagctttgc

SEQ ID NO: 1742627 - DNA, 15 bp, Homo sapiens
actgagagctttgca

SEQ ID NO: 1742628 - DNA, 15 bp, Homo sapiens
ctgagagctttgcat

SEQ ID NO: 1742629 - DNA, 15 bp, Homo sapiens
tgagagctttgcatg

SEQ ID NO: 1742630 - DNA, 15 bp, Homo sapiens
gagagctttgcatgg

SEQ ID NO: 1742631 - DNA, 15 bp, Homo sapiens
agagctttgcatggt

SEQ ID NO: 1742632 - DNA, 15 bp, Homo sapiens
gagctttgcatggta

SEQ ID NO: 1742633 - DNA, 15 bp, Homo sapiens
agctttgcatggtaa

SEQ ID NO: 1742634 - DNA, 15 bp, Homo sapiens
gctttgcatggtaag

SEQ ID NO: 1742635 - DNA, 15 bp, Homo sapiens
ctttgcatggtaaga

SEQ ID NO: 1742636 - DNA, 15 bp, Homo sapiens
tttgcatggtaagac

SEQ ID NO: 1742637 - DNA, 15 bp, Homo sapiens
ttgcatggtaagacg

SEQ ID NO: 1742638 - DNA, 15 bp, Homo sapiens
tgcatggtaagacga

SEQ ID NO: 1742639 - DNA, 15 bp, Homo sapiens
gcatggtaagacgaa

SEQ ID NO: 1742640 - DNA, 15 bp, Homo sapiens
catggtaagacgaaa

SEQ ID NO: 1742641 - DNA, 15 bp, Homo sapiens
atggtaagacgaaat

SEQ ID NO: 1742642 - DNA, 15 bp, Homo sapiens
tggtaagacgaaata

SEQ ID NO: 1742643 - DNA, 15 bp, Homo sapiens
ggtaagacgaaatat

SEQ ID NO: 1742644 - DNA, 15 bp, Homo sapiens
gtaagacgaaatatg

SEQ ID NO: 1742645 - DNA, 15 bp, Homo sapiens
taagacgaaatatgt

SEQ ID NO: 1742646 - DNA, 15 bp, Homo sapiens
aagacgaaatatgtg

SEQ ID NO: 1742647 - DNA, 15 bp, Homo sapiens
agacgaaatatgtgg

SEQ ID NO: 1742648 - DNA, 15 bp, Homo sapiens
gacgaaatatgtgga

SEQ ID NO: 1742649 - DNA, 15 bp, Homo sapiens
acgaaatatgtggag

SEQ ID NO: 1742650 - DNA, 15 bp, Homo sapiens
cgaaatatgtggaga

SEQ ID NO: 1742651 - DNA, 15 bp, Homo sapiens
gaaatatgtggagaa

SEQ ID NO: 1742652 - DNA, 15 bp, Homo sapiens
aatatgtggagaaaa

SEQ ID NO: 1742653 - DNA, 15 bp, Homo sapiens
atatgtggagaaaag

SEQ ID NO: 1742654 - DNA, 15 bp, Homo sapiens
tatgtggagaaaagg

SEQ ID NO: 1742655 - DNA, 15 bp, Homo sapiens
atgtggagaaaagga

SEQ ID NO: 1742656 - DNA, 15 bp, Homo sapiens
tgtggagaaaaggat

SEQ ID NO: 1742657 - DNA, 15 bp, Homo sapiens
gtggagaaaaggatg

SEQ ID NO: 1742658 - DNA, 15 bp, Homo sapiens
tggagaaaaggatgc

SEQ ID NO: 1742659 - DNA, 15 bp, Homo sapiens
ggagaaaaggatgct

SEQ ID NO: 1742660 - DNA, 15 bp, Homo sapiens
gagaaaaggatgctg

SEQ ID NO: 1742661 - DNA, 15 bp, Homo sapiens
agaaaaggatgctgt

SEQ ID NO: 1742662 - DNA, 15 bp, Homo sapiens
gaaaaggatgctgtg

SEQ ID NO: 1742663 - DNA, 15 bp, Homo sapiens
aaaaggatgctgtga

SEQ ID NO: 1742664 - DNA, 15 bp, Homo sapiens
aaaggatgctgtgat

SEQ ID NO: 1742665 - DNA, 15 bp, Homo sapiens
aaggatgctgtgata

SEQ ID NO: 1742666 - DNA, 15 bp, Homo sapiens
aggatgctgtgatag

SEQ ID NO: 1742667 - DNA, 15 bp, Homo sapiens
ggatgctgtgataga

SEQ ID NO: 1742668 - DNA, 15 bp, Homo sapiens
gatgctgtgatagat

SEQ ID NO: 1742669 - DNA, 15 bp, Homo sapiens
atgctgtgatagatg

SEQ ID NO: 1742670 - DNA, 15 bp, Homo sapiens
tgctgtgatagatga

SEQ ID NO: 1742671 - DNA, 15 bp, Homo sapiens
gctgtgatagatgat

SEQ ID NO: 1742672 - DNA, 15 bp, Homo sapiens
ctgtgatagatgatg

SEQ ID NO: 1742673 - DNA, 15 bp, Homo sapiens
tgtgatagatgatga

SEQ ID NO: 1742674 - DNA, 15 bp, Homo sapiens
gtgatagatgatgaa

SEQ ID NO: 1742675 - DNA, 15 bp, Homo sapiens
tgatagatgatgaag

SEQ ID NO: 1742676 - DNA, 15 bp, Homo sapiens
gatagatgatgaaga

SEQ ID NO: 1742677 - DNA, 15 bp, Homo sapiens
atagatgatgaagaa

SEQ ID NO: 1742678 - DNA, 15 bp, Homo sapiens
tagatgatgaagaac

SEQ ID NO: 1742679 - DNA, 15 bp, Homo sapiens
agatgatgaagaaca

SEQ ID NO: 1742680 - DNA, 15 bp, Homo sapiens
gatgatgaagaacaa

SEQ ID NO: 1742681 - DNA, 15 bp, Homo sapiens
atgatgaagaacaaa

SEQ ID NO: 1742682 - DNA, 15 bp, Homo sapiens
tgatgaagaacaaaa

SEQ ID NO: 1742683 - DNA, 15 bp, Homo sapiens
gatgaagaacaaaac

SEQ ID NO: 1742684 - DNA, 15 bp, Homo sapiens
atgaagaacaaaacc

SEQ ID NO: 1742685 - DNA, 15 bp, Homo sapiens
tgaagaacaaaacca

SEQ ID NO: 1742686 - DNA, 15 bp, Homo sapiens
gaagaacaaaaccag

SEQ ID NO: 1742687 - DNA, 15 bp, Homo sapiens
aagaacaaaaccagt

SEQ ID NO: 1742688 - DNA, 15 bp, Homo sapiens
agaacaaaaccagtg

SEQ ID NO: 1742689 - DNA, 15 bp, Homo sapiens
gaacaaaaccagtgt

SEQ ID NO: 1742690 - DNA, 15 bp, Homo sapiens
aacaaaaccagtgtt

SEQ ID NO: 1742691 - DNA, 15 bp, Homo sapiens
acaaaaccagtgttt

SEQ ID NO: 1742692 - DNA, 15 bp, Homo sapiens
caaaaccagtgtttt

SEQ ID NO: 1742693 - DNA, 15 bp, Homo sapiens
aaaaccagtgtttta

SEQ ID NO: 1742694 - DNA, 15 bp, Homo sapiens
aaaccagtgttttag

SEQ ID NO: 1742695 - DNA, 15 bp, Homo sapiens
aaccagtgttttaga

SEQ ID NO: 1742696 - DNA, 15 bp, Homo sapiens
accagtgttttagaa

SEQ ID NO: 1742697 - DNA, 15 bp, Homo sapiens
ccagtgttttagaag

SEQ ID NO: 1742698 - DNA, 15 bp, Homo sapiens
cagtgttttagaaga

SEQ ID NO: 1742699 - DNA, 15 bp, Homo sapiens
agtgttttagaagac

SEQ ID NO: 1742700 - DNA, 15 bp, Homo sapiens
gtgttttagaagaca

SEQ ID NO: 1742701 - DNA, 15 bp, Homo sapiens
tgttttagaagacat

SEQ ID NO: 1742702 - DNA, 15 bp, Homo sapiens
gttttagaagacata

SEQ ID NO: 1742703 - DNA, 15 bp, Homo sapiens
ttttagaagacatag

SEQ ID NO: 1742704 - DNA, 15 bp, Homo sapiens
tttagaagacatagt

SEQ ID NO: 1742705 - DNA, 15 bp, Homo sapiens
ttagaagacatagta

SEQ ID NO: 1742706 - DNA, 15 bp, Homo sapiens
tagaagacatagtat

SEQ ID NO: 1742707 - DNA, 15 bp, Homo sapiens
agaagacatagtatt

SEQ ID NO: 1742708 - DNA, 15 bp, Homo sapiens
gaagacatagtatta

SEQ ID NO: 1742709 - DNA, 15 bp, Homo sapiens
aagacatagtattag

SEQ ID NO: 1742710 - DNA, 15 bp, Homo sapiens
agacatagtattagt

SEQ ID NO: 1742711 - DNA, 15 bp, Homo sapiens
gacatagtattagtc

SEQ ID NO: 1742712 - DNA, 15 bp, Homo sapiens
acatagtattagtca

SEQ ID NO: 1742713 - DNA, 15 bp, Homo sapiens
catagtattagtcac

SEQ ID NO: 1742714 - DNA, 15 bp, Homo sapiens
atagtattagtcact

SEQ ID NO: 1742715 - DNA, 15 bp, Homo sapiens
tagtattagtcacta

SEQ ID NO: 1742716 - DNA, 15 bp, Homo sapiens
agtattagtcactat

SEQ ID NO: 1742717 - DNA, 15 bp, Homo sapiens
gtattagtcactatg

SEQ ID NO: 1742718 - DNA, 15 bp, Homo sapiens
tattagtcactatga

SEQ ID NO: 1742719 - DNA, 15 bp, Homo sapiens
attagtcactatgac

SEQ ID NO: 1742720 - DNA, 15 bp, Homo sapiens
ttagtcactatgacc

SEQ ID NO: 1742721 - DNA, 15 bp, Homo sapiens
tagtcactatgacca

SEQ ID NO: 1742722 - DNA, 15 bp, Homo sapiens
agtcactatgaccaa

SEQ ID NO: 1742723 - DNA, 15 bp, Homo sapiens
gtcactatgaccaaa

SEQ ID NO: 1742724 - DNA, 15 bp, Homo sapiens
tcactatgaccaaaa

SEQ ID NO: 1742725 - DNA, 15 bp, Homo sapiens
cactatgaccaaaag

SEQ ID NO: 1742726 - DNA, 15 bp, Homo sapiens
actatgaccaaaagg

SEQ ID NO: 1742727 - DNA, 15 bp, Homo sapiens
ctatgaccaaaaggc

SEQ ID NO: 1742728 - DNA, 15 bp, Homo sapiens
tatgaccaaaaggca

SEQ ID NO: 1742729 - DNA, 15 bp, Homo sapiens
atgaccaaaaggcat

SEQ ID NO: 1742730 - DNA, 15 bp, Homo sapiens
tgaccaaaaggcatg

SEQ ID NO: 1742731 - DNA, 15 bp, Homo sapiens
gaccaaaaggcatga

SEQ ID NO: 1742732 - DNA, 15 bp, Homo sapiens
accaaaaggcatgaa

SEQ ID NO: 1742733 - DNA, 15 bp, Homo sapiens
ccaaaaggcatgaaa

SEQ ID NO: 1742734 - DNA, 15 bp, Homo sapiens
caaaaggcatgaaat

SEQ ID NO: 1742735 - DNA, 15 bp, Homo sapiens
aaaaggcatgaaata

SEQ ID NO: 1742736 - DNA, 15 bp, Homo sapiens
aaaggcatgaaataa

SEQ ID NO: 1742737 - DNA, 15 bp, Homo sapiens
aaggcatgaaataaa

SEQ ID NO: 1742738 - DNA, 15 bp, Homo sapiens
aggcatgaaataaaa

SEQ ID NO: 1742739 - DNA, 15 bp, Homo sapiens
ggcatgaaataaaat

SEQ ID NO: 1742740 - DNA, 15 bp, Homo sapiens
gcatgaaataaaata

SEQ ID NO: 1742741 - DNA, 15 bp, Homo sapiens
catgaaataaaatag

SEQ ID NO: 1742742 - DNA, 15 bp, Homo sapiens
atgaaataaaatagc

SEQ ID NO: 1742743 - DNA, 15 bp, Homo sapiens
tgaaataaaatagct

SEQ ID NO: 1742744 - DNA, 15 bp, Homo sapiens
gaaataaaatagcta

SEQ ID NO: 1742745 - DNA, 15 bp, Homo sapiens
aaataaaatagctag

SEQ ID NO: 1742746 - DNA, 15 bp, Homo sapiens
aataaaatagctaga

SEQ ID NO: 1742747 - DNA, 15 bp, Homo sapiens
ataaaatagctagac

SEQ ID NO: 1742748 - DNA, 15 bp, Homo sapiens
taaaatagctagact

SEQ ID NO: 1742749 - DNA, 15 bp, Homo sapiens
aaaatagctagactg

SEQ ID NO: 1742750 - DNA, 15 bp, Homo sapiens
aaatagctagactgc

SEQ ID NO: 1742751 - DNA, 15 bp, Homo sapiens
aatagctagactgct

SEQ ID NO: 1742752 - DNA, 15 bp, Homo sapiens
atagctagactgcta

SEQ ID NO: 1742753 - DNA, 15 bp, Homo sapiens
tagctagactgctag

SEQ ID NO: 1742754 - DNA, 15 bp, Homo sapiens
agctagactgctagt

SEQ ID NO: 1742755 - DNA, 15 bp, Homo sapiens
gctagactgctagtt

SEQ ID NO: 1742756 - DNA, 15 bp, Homo sapiens
ctagactgctagttc

SEQ ID NO: 1742757 - DNA, 15 bp, Homo sapiens
tagactgctagttct

SEQ ID NO: 1742758 - DNA, 15 bp, Homo sapiens
agactgctagttctg

SEQ ID NO: 1742759 - DNA, 15 bp, Homo sapiens
gactgctagttctgt

SEQ ID NO: 1742760 - DNA, 15 bp, Homo sapiens
actgctagttctgta

SEQ ID NO: 1742761 - DNA, 15 bp, Homo sapiens
ctgctagttctgtaa

SEQ ID NO: 1742762 - DNA, 15 bp, Homo sapiens
tgctagttctgtaac

SEQ ID NO: 1742763 - DNA, 15 bp, Homo sapiens
gctagttctgtaacc

SEQ ID NO: 1742764 - DNA, 15 bp, Homo sapiens
ctagttctgtaacct

SEQ ID NO: 1742765 - DNA, 15 bp, Homo sapiens
tagttctgtaacctg

SEQ ID NO: 1742766 - DNA, 15 bp, Homo sapiens
agttctgtaacctga

SEQ ID NO: 1742767 - DNA, 15 bp, Homo sapiens
gttctgtaacctgaa

SEQ ID NO: 1742768 - DNA, 15 bp, Homo sapiens
ttctgtaacctgaat

SEQ ID NO: 1742769 - DNA, 15 bp, Homo sapiens
tctgtaacctgaatt

SEQ ID NO: 1742770 - DNA, 15 bp, Homo sapiens
ctgtaacctgaattg

SEQ ID NO: 1742771 - DNA, 15 bp, Homo sapiens
tgtaacctgaattga

SEQ ID NO: 1742772 - DNA, 15 bp, Homo sapiens
gtaacctgaattgat

SEQ ID NO: 1742773 - DNA, 15 bp, Homo sapiens
taacctgaattgata

SEQ ID NO: 1742774 - DNA, 15 bp, Homo sapiens
aacctgaattgatag

SEQ ID NO: 1742775 - DNA, 15 bp, Homo sapiens
acctgaattgatagc

SEQ ID NO: 1742776 - DNA, 15 bp, Homo sapiens
cctgaattgatagct

SEQ ID NO: 1742777 - DNA, 15 bp, Homo sapiens
ctgaattgatagcta

SEQ ID NO: 1742778 - DNA, 15 bp, Homo sapiens
tgaattgatagctag

SEQ ID NO: 1742779 - DNA, 15 bp, Homo sapiens
gaattgatagctagt

SEQ ID NO: 1742780 - DNA, 15 bp, Homo sapiens
aattgatagctagtt

SEQ ID NO: 1742781 - DNA, 15 bp, Homo sapiens
attgatagctagttt

SEQ ID NO: 1742782 - DNA, 15 bp, Homo sapiens
ttgatagctagtttt

SEQ ID NO: 1742783 - DNA, 15 bp, Homo sapiens
tgatagctagttttt

SEQ ID NO: 1742784 - DNA, 15 bp, Homo sapiens
gatagctagtttttg

SEQ ID NO: 1742785 - DNA, 15 bp, Homo sapiens
atagctagtttttga

SEQ ID NO: 1742786 - DNA, 15 bp, Homo sapiens
tagctagtttttgaa

SEQ ID NO: 1742787 - DNA, 15 bp, Homo sapiens
agctagtttttgaat

SEQ ID NO: 1742788 - DNA, 15 bp, Homo sapiens
gctagtttttgaatt

SEQ ID NO: 1742789 - DNA, 15 bp, Homo sapiens
ctagtttttgaatta

SEQ ID NO: 1742790 - DNA, 15 bp, Homo sapiens
tagtttttgaattaa

SEQ ID NO: 1742791 - DNA, 15 bp, Homo sapiens
agtttttgaattaat

SEQ ID NO: 1742792 - DNA, 15 bp, Homo sapiens
gtttttgaattaatt

SEQ ID NO: 1742793 - DNA, 15 bp, Homo sapiens
tttttgaattaattt

SEQ ID NO: 1742794 - DNA, 15 bp, Homo sapiens
ttttgaattaattta

SEQ ID NO: 1742795 - DNA, 15 bp, Homo sapiens
tttgaattaatttat

SEQ ID NO: 1742796 - DNA, 15 bp, Homo sapiens
ttgaattaatttatt

SEQ ID NO: 1742797 - DNA, 15 bp, Homo sapiens
tgaattaatttatta

SEQ ID NO: 1742798 - DNA, 15 bp, Homo sapiens
gaattaatttattaa

SEQ ID NO: 1742799 - DNA, 15 bp, Homo sapiens
aattaatttattaat

SEQ ID NO: 1742800 - DNA, 15 bp, Homo sapiens
attaatttattaatt

SEQ ID NO: 1742801 - DNA, 15 bp, Homo sapiens
ttaatttattaattc

SEQ ID NO: 1742802 - DNA, 15 bp, Homo sapiens
taatttattaattca

SEQ ID NO: 1742803 - DNA, 15 bp, Homo sapiens
aatttattaattcaa

SEQ ID NO: 1742804 - DNA, 15 bp, Homo sapiens
atttattaattcaac

SEQ ID NO: 1742805 - DNA, 15 bp, Homo sapiens
tttattaattcaaca

SEQ ID NO: 1742806 - DNA, 15 bp, Homo sapiens
ttattaattcaacaa

SEQ ID NO: 1742807 - DNA, 15 bp, Homo sapiens
tattaattcaacaaa

SEQ ID NO: 1742808 - DNA, 15 bp, Homo sapiens
ttaattcaacaaata

SEQ ID NO: 1742809 - DNA, 15 bp, Homo sapiens
taattcaacaaatat

SEQ ID NO: 1742810 - DNA, 15 bp, Homo sapiens
aattcaacaaatatt

SEQ ID NO: 1742811 - DNA, 15 bp, Homo sapiens
ttcaacaaatatttt

SEQ ID NO: 1742812 - DNA, 15 bp, Homo sapiens
tcaacaaatattttt

SEQ ID NO: 1742813 - DNA, 15 bp, Homo sapiens
caacaaatatttttt

SEQ ID NO: 1742814 - DNA, 15 bp, Homo sapiens
aacaaatattttttg

SEQ ID NO: 1742815 - DNA, 15 bp, Homo sapiens
acaaatattttttga

SEQ ID NO: 1742816 - DNA, 15 bp, Homo sapiens
caaatattttttgaa

SEQ ID NO: 1742817 - DNA, 15 bp, Homo sapiens
aaatattttttgaat

SEQ ID NO: 1742818 - DNA, 15 bp, Homo sapiens
aatattttttgaatg

SEQ ID NO: 1742819 - DNA, 15 bp, Homo sapiens
atattttttgaatgc

SEQ ID NO: 1742820 - DNA, 15 bp, Homo sapiens
tattttttgaatgct

SEQ ID NO: 1742821 - DNA, 15 bp, Homo sapiens
attttttgaatgctt

SEQ ID NO: 1742822 - DNA, 15 bp, Homo sapiens
ttttttgaatgctta

SEQ ID NO: 1742823 - DNA, 15 bp, Homo sapiens
tttttgaatgcttaa

SEQ ID NO: 1742824 - DNA, 15 bp, Homo sapiens
ttttgaatgcttaat

SEQ ID NO: 1742825 - DNA, 15 bp, Homo sapiens
tttgaatgcttaata

SEQ ID NO: 1742826 - DNA, 15 bp, Homo sapiens
ttgaatgcttaatat

SEQ ID NO: 1742827 - DNA, 15 bp, Homo sapiens
tgaatgcttaatata

SEQ ID NO: 1742828 - DNA, 15 bp, Homo sapiens
gaatgcttaatatat

SEQ ID NO: 1742829 - DNA, 15 bp, Homo sapiens
aatgcttaatatatg

SEQ ID NO: 1742830 - DNA, 15 bp, Homo sapiens
atgcttaatatatgt

SEQ ID NO: 1742831 - DNA, 15 bp, Homo sapiens
tgcttaatatatgtc

SEQ ID NO: 1742832 - DNA, 15 bp, Homo sapiens
gcttaatatatgtca

SEQ ID NO: 1742833 - DNA, 15 bp, Homo sapiens
cttaatatatgtcag

SEQ ID NO: 1742834 - DNA, 15 bp, Homo sapiens
ttaatatatgtcagg

SEQ ID NO: 1742835 - DNA, 15 bp, Homo sapiens
taatatatgtcaggc

SEQ ID NO: 1742836 - DNA, 15 bp, Homo sapiens
aatatatgtcaggca

SEQ ID NO: 1742837 - DNA, 15 bp, Homo sapiens
atatatgtcaggcac

SEQ ID NO: 1742838 - DNA, 15 bp, Homo sapiens
tatatgtcaggcacg

SEQ ID NO: 1742839 - DNA, 15 bp, Homo sapiens
atatgtcaggcacgt

SEQ ID NO: 1742840 - DNA, 15 bp, Homo sapiens
tatgtcaggcacgtg

SEQ ID NO: 1742841 - DNA, 15 bp, Homo sapiens
atgtcaggcacgtgc

SEQ ID NO: 1742842 - DNA, 15 bp, Homo sapiens
tgtcaggcacgtgct

SEQ ID NO: 1742843 - DNA, 15 bp, Homo sapiens
gtcaggcacgtgcta

SEQ ID NO: 1742844 - DNA, 15 bp, Homo sapiens
tcaggcacgtgctag

SEQ ID NO: 1742845 - DNA, 15 bp, Homo sapiens
caggcacgtgctaga

SEQ ID NO: 1742846 - DNA, 15 bp, Homo sapiens
aggcacgtgctagat

SEQ ID NO: 1742847 - DNA, 15 bp, Homo sapiens
ggcacgtgctagata

SEQ ID NO: 1742848 - DNA, 15 bp, Homo sapiens
gcacgtgctagatac

SEQ ID NO: 1742849 - DNA, 15 bp, Homo sapiens
cacgtgctagatact

SEQ ID NO: 1742850 - DNA, 15 bp, Homo sapiens
acgtgctagatacta

SEQ ID NO: 1742851 - DNA, 15 bp, Homo sapiens
cgtgctagatactat

SEQ ID NO: 1742852 - DNA, 15 bp, Homo sapiens
gtgctagatactatg

SEQ ID NO: 1742853 - DNA, 15 bp, Homo sapiens
tgctagatactatgg

SEQ ID NO: 1742854 - DNA, 15 bp, Homo sapiens
gctagatactatgga

SEQ ID NO: 1742855 - DNA, 15 bp, Homo sapiens
ctagatactatggat

SEQ ID NO: 1742856 - DNA, 15 bp, Homo sapiens
tagatactatggata

SEQ ID NO: 1742857 - DNA, 15 bp, Homo sapiens
agatactatggatac

SEQ ID NO: 1742858 - DNA, 15 bp, Homo sapiens
gatactatggataca

SEQ ID NO: 1742859 - DNA, 15 bp, Homo sapiens
atactatggatacag

SEQ ID NO: 1742860 - DNA, 15 bp, Homo sapiens
tactatggatacaga

SEQ ID NO: 1742861 - DNA, 15 bp, Homo sapiens
actatggatacagag

SEQ ID NO: 1742862 - DNA, 15 bp, Homo sapiens
ctatggatacagaga

SEQ ID NO: 1742863 - DNA, 15 bp, Homo sapiens
tatggatacagagat

SEQ ID NO: 1742864 - DNA, 15 bp, Homo sapiens
atggatacagagatt

SEQ ID NO: 1742865 - DNA, 15 bp, Homo sapiens
tggatacagagattt

SEQ ID NO: 1742866 - DNA, 15 bp, Homo sapiens
ggatacagagatttc

SEQ ID NO: 1742867 - DNA, 15 bp, Homo sapiens
gatacagagatttca

SEQ ID NO: 1742868 - DNA, 15 bp, Homo sapiens
atacagagatttcac

SEQ ID NO: 1742869 - DNA, 15 bp, Homo sapiens
tacagagatttcact

SEQ ID NO: 1742870 - DNA, 15 bp, Homo sapiens
acagagatttcactc

SEQ ID NO: 1742871 - DNA, 15 bp, Homo sapiens
cagagatttcactct

SEQ ID NO: 1742872 - DNA, 15 bp, Homo sapiens
agagatttcactctc

SEQ ID NO: 1742873 - DNA, 15 bp, Homo sapiens
gagatttcactctca

SEQ ID NO: 1742874 - DNA, 15 bp, Homo sapiens
agatttcactctcag

SEQ ID NO: 1742875 - DNA, 15 bp, Homo sapiens
gatttcactctcagt

SEQ ID NO: 1742876 - DNA, 15 bp, Homo sapiens
atttcactctcagtc

SEQ ID NO: 1742877 - DNA, 15 bp, Homo sapiens
tttcactctcagtca

SEQ ID NO: 1742878 - DNA, 15 bp, Homo sapiens
ttcactctcagtcac

SEQ ID NO: 1742879 - DNA, 15 bp, Homo sapiens
tcactctcagtcact

SEQ ID NO: 1742880 - DNA, 15 bp, Homo sapiens
cactctcagtcacta

SEQ ID NO: 1742881 - DNA, 15 bp, Homo sapiens
actctcagtcactat

SEQ ID NO: 1742882 - DNA, 15 bp, Homo sapiens
ctctcagtcactatc

SEQ ID NO: 1742883 - DNA, 15 bp, Homo sapiens
tctcagtcactatcc

SEQ ID NO: 1742884 - DNA, 15 bp, Homo sapiens
ctcagtcactatcct

SEQ ID NO: 1742885 - DNA, 15 bp, Homo sapiens
tcagtcactatcctt

SEQ ID NO: 1742886 - DNA, 15 bp, Homo sapiens
cagtcactatcctta

SEQ ID NO: 1742887 - DNA, 15 bp, Homo sapiens
agtcactatccttaa

SEQ ID NO: 1742888 - DNA, 15 bp, Homo sapiens
gtcactatccttaaa

SEQ ID NO: 1742889 - DNA, 15 bp, Homo sapiens
tcactatccttaaag

SEQ ID NO: 1742890 - DNA, 15 bp, Homo sapiens
cactatccttaaagt

SEQ ID NO: 1742891 - DNA, 15 bp, Homo sapiens
actatccttaaagtg

SEQ ID NO: 1742892 - DNA, 15 bp, Homo sapiens
ctatccttaaagtgc

SEQ ID NO: 1742893 - DNA, 15 bp, Homo sapiens
tatccttaaagtgct

SEQ ID NO: 1742894 - DNA, 15 bp, Homo sapiens
atccttaaagtgcta

SEQ ID NO: 1742895 - DNA, 15 bp, Homo sapiens
tccttaaagtgctag

SEQ ID NO: 1742896 - DNA, 15 bp, Homo sapiens
ccttaaagtgctagt

SEQ ID NO: 1742897 - DNA, 15 bp, Homo sapiens
cttaaagtgctagtg

SEQ ID NO: 1742898 - DNA, 15 bp, Homo sapiens
ttaaagtgctagtgg

SEQ ID NO: 1742899 - DNA, 15 bp, Homo sapiens
taaagtgctagtggg

SEQ ID NO: 1742900 - DNA, 15 bp, Homo sapiens
aaagtgctagtggga

SEQ ID NO: 1742901 - DNA, 15 bp, Homo sapiens
aagtgctagtgggag

SEQ ID NO: 1742902 - DNA, 15 bp, Homo sapiens
agtgctagtgggaga

SEQ ID NO: 1742903 - DNA, 15 bp, Homo sapiens
gtgctagtgggagag

SEQ ID NO: 1742904 - DNA, 15 bp, Homo sapiens
tgctagtgggagagg

SEQ ID NO: 1742905 - DNA, 15 bp, Homo sapiens
gctagtgggagaggc

SEQ ID NO: 1742906 - DNA, 15 bp, Homo sapiens
ctagtgggagaggct

SEQ ID NO: 1742907 - DNA, 15 bp, Homo sapiens
tagtgggagaggctg

SEQ ID NO: 1742908 - DNA, 15 bp, Homo sapiens
agtgggagaggctga

SEQ ID NO: 1742909 - DNA, 15 bp, Homo sapiens
gtgggagaggctgac

SEQ ID NO: 1742910 - DNA, 15 bp, Homo sapiens
tgggagaggctgaca

SEQ ID NO: 1742911 - DNA, 15 bp, Homo sapiens
gggagaggctgacaa

SEQ ID NO: 1742912 - DNA, 15 bp, Homo sapiens
ggagaggctgacaaa

SEQ ID NO: 1742913 - DNA, 15 bp, Homo sapiens
gagaggctgacaaag

SEQ ID NO: 1742914 - DNA, 15 bp, Homo sapiens
agaggctgacaaaga

SEQ ID NO: 1742915 - DNA, 15 bp, Homo sapiens
gaggctgacaaagaa

SEQ ID NO: 1742916 - DNA, 15 bp, Homo sapiens
aggctgacaaagaaa

SEQ ID NO: 1742917 - DNA, 15 bp, Homo sapiens
ggctgacaaagaaat

SEQ ID NO: 1742918 - DNA, 15 bp, Homo sapiens
gctgacaaagaaata

SEQ ID NO: 1742919 - DNA, 15 bp, Homo sapiens
ctgacaaagaaatag

SEQ ID NO: 1742920 - DNA, 15 bp, Homo sapiens
tgacaaagaaataga

SEQ ID NO: 1742921 - DNA, 15 bp, Homo sapiens
gacaaagaaatagag

SEQ ID NO: 1742922 - DNA, 15 bp, Homo sapiens
acaaagaaatagagc

SEQ ID NO: 1742923 - DNA, 15 bp, Homo sapiens
caaagaaatagagca

SEQ ID NO: 1742924 - DNA, 15 bp, Homo sapiens
aaagaaatagagcat

SEQ ID NO: 1742925 - DNA, 15 bp, Homo sapiens
aagaaatagagcatt

SEQ ID NO: 1742926 - DNA, 15 bp, Homo sapiens
agaaatagagcatta

SEQ ID NO: 1742927 - DNA, 15 bp, Homo sapiens
gaaatagagcattac

SEQ ID NO: 1742928 - DNA, 15 bp, Homo sapiens
aaatagagcattaca

SEQ ID NO: 1742929 - DNA, 15 bp, Homo sapiens
aatagagcattacag

SEQ ID NO: 1742930 - DNA, 15 bp, Homo sapiens
atagagcattacagg

SEQ ID NO: 1742931 - DNA, 15 bp, Homo sapiens
tagagcattacagga

SEQ ID NO: 1742932 - DNA, 15 bp, Homo sapiens
agagcattacaggag

SEQ ID NO: 1742933 - DNA, 15 bp, Homo sapiens
gagcattacaggagt

SEQ ID NO: 1742934 - DNA, 15 bp, Homo sapiens
agcattacaggagtc

SEQ ID NO: 1742935 - DNA, 15 bp, Homo sapiens
gcattacaggagtct

SEQ ID NO: 1742936 - DNA, 15 bp, Homo sapiens
cattacaggagtcta

SEQ ID NO: 1742937 - DNA, 15 bp, Homo sapiens
attacaggagtctac

SEQ ID NO: 1742938 - DNA, 15 bp, Homo sapiens
ttacaggagtctaca

SEQ ID NO: 1742939 - DNA, 15 bp, Homo sapiens
tacaggagtctacaa

SEQ ID NO: 1742940 - DNA, 15 bp, Homo sapiens
acaggagtctacaag

SEQ ID NO: 1742941 - DNA, 15 bp, Homo sapiens
caggagtctacaaga

SEQ ID NO: 1742942 - DNA, 15 bp, Homo sapiens
aggagtctacaagag

SEQ ID NO: 1742943 - DNA, 15 bp, Homo sapiens
ggagtctacaagagt

SEQ ID NO: 1742944 - DNA, 15 bp, Homo sapiens
gagtctacaagagtg

SEQ ID NO: 1742945 - DNA, 15 bp, Homo sapiens
agtctacaagagtgt

SEQ ID NO: 1742946 - DNA, 15 bp, Homo sapiens
gtctacaagagtgtg

SEQ ID NO: 1742947 - DNA, 15 bp, Homo sapiens
tctacaagagtgtga

SEQ ID NO: 1742948 - DNA, 15 bp, Homo sapiens
ctacaagagtgtgaa

SEQ ID NO: 1742949 - DNA, 15 bp, Homo sapiens
tacaagagtgtgaaa

SEQ ID NO: 1742950 - DNA, 15 bp, Homo sapiens
acaagagtgtgaaaa

SEQ ID NO: 1742951 - DNA, 15 bp, Homo sapiens
caagagtgtgaaaaa

SEQ ID NO: 1742952 - DNA, 15 bp, Homo sapiens
aagagtgtgaaaaaa

SEQ ID NO: 1742953 - DNA, 15 bp, Homo sapiens
agagtgtgaaaaaag

SEQ ID NO: 1742954 - DNA, 15 bp, Homo sapiens
gagtgtgaaaaaagt

SEQ ID NO: 1742955 - DNA, 15 bp, Homo sapiens
agtgtgaaaaaagta

SEQ ID NO: 1742956 - DNA, 15 bp, Homo sapiens
gtgtgaaaaaagtat

SEQ ID NO: 1742957 - DNA, 15 bp, Homo sapiens
tgtgaaaaaagtatt

SEQ ID NO: 1742958 - DNA, 15 bp, Homo sapiens
gtgaaaaaagtattc

SEQ ID NO: 1742959 - DNA, 15 bp, Homo sapiens
tgaaaaaagtattca

SEQ ID NO: 1742960 - DNA, 15 bp, Homo sapiens
gaaaaaagtattcac

SEQ ID NO: 1742961 - DNA, 15 bp, Homo sapiens
aaaaaagtattcaca

SEQ ID NO: 1742962 - DNA, 15 bp, Homo sapiens
aaaaagtattcacag

SEQ ID NO: 1742963 - DNA, 15 bp, Homo sapiens
aaaagtattcacagg

SEQ ID NO: 1742964 - DNA, 15 bp, Homo sapiens
aaagtattcacaggg

SEQ ID NO: 1742965 - DNA, 15 bp, Homo sapiens
aagtattcacagggt

SEQ ID NO: 1742966 - DNA, 15 bp, Homo sapiens
agtattcacagggtt

SEQ ID NO: 1742967 - DNA, 15 bp, Homo sapiens
gtattcacagggttc

SEQ ID NO: 1742968 - DNA, 15 bp, Homo sapiens
tattcacagggttct

SEQ ID NO: 1742969 - DNA, 15 bp, Homo sapiens
attcacagggttctg

SEQ ID NO: 1742970 - DNA, 15 bp, Homo sapiens
ttcacagggttctgt

SEQ ID NO: 1742971 - DNA, 15 bp, Homo sapiens
tcacagggttctgtg

SEQ ID NO: 1742972 - DNA, 15 bp, Homo sapiens
cacagggttctgtga

SEQ ID NO: 1742973 - DNA, 15 bp, Homo sapiens
acagggttctgtgat

SEQ ID NO: 1742974 - DNA, 15 bp, Homo sapiens
cagggttctgtgata

SEQ ID NO: 1742975 - DNA, 15 bp, Homo sapiens
agggttctgtgatat

SEQ ID NO: 1742976 - DNA, 15 bp, Homo sapiens
gggttctgtgatatc

SEQ ID NO: 1742977 - DNA, 15 bp, Homo sapiens
ggttctgtgatatct

SEQ ID NO: 1742978 - DNA, 15 bp, Homo sapiens
gttctgtgatatctc

SEQ ID NO: 1742979 - DNA, 15 bp, Homo sapiens
ttctgtgatatctca

SEQ ID NO: 1742980 - DNA, 15 bp, Homo sapiens
tctgtgatatctcaa

SEQ ID NO: 1742981 - DNA, 15 bp, Homo sapiens
ctgtgatatctcaaa

SEQ ID NO: 1742982 - DNA, 15 bp, Homo sapiens
tgtgatatctcaaag

SEQ ID NO: 1742983 - DNA, 15 bp, Homo sapiens
gtgatatctcaaagg

SEQ ID NO: 1742984 - DNA, 15 bp, Homo sapiens
tgatatctcaaagga

SEQ ID NO: 1742985 - DNA, 15 bp, Homo sapiens
gatatctcaaaggag

SEQ ID NO: 1742986 - DNA, 15 bp, Homo sapiens
atatctcaaaggaga

SEQ ID NO: 1742987 - DNA, 15 bp, Homo sapiens
tatctcaaaggagag

SEQ ID NO: 1742988 - DNA, 15 bp, Homo sapiens
atctcaaaggagagc

SEQ ID NO: 1742989 - DNA, 15 bp, Homo sapiens
tctcaaaggagagct

SEQ ID NO: 1742990 - DNA, 15 bp, Homo sapiens
ctcaaaggagagcta

SEQ ID NO: 1742991 - DNA, 15 bp, Homo sapiens
tcaaaggagagctac

SEQ ID NO: 1742992 - DNA, 15 bp, Homo sapiens
caaaggagagctacc

SEQ ID NO: 1742993 - DNA, 15 bp, Homo sapiens
aaaggagagctacct

SEQ ID NO: 1742994 - DNA, 15 bp, Homo sapiens
aaggagagctaccta

SEQ ID NO: 1742995 - DNA, 15 bp, Homo sapiens
aggagagctacctaa

SEQ ID NO: 1742996 - DNA, 15 bp, Homo sapiens
ggagagctacctaat

SEQ ID NO: 1742997 - DNA, 15 bp, Homo sapiens
gagagctacctaatc

SEQ ID NO: 1742998 - DNA, 15 bp, Homo sapiens
agagctacctaatcc

SEQ ID NO: 1742999 - DNA, 15 bp, Homo sapiens
gagctacctaatcca

SEQ ID NO: 1743000 - DNA, 15 bp, Homo sapiens
agctacctaatccaa

SEQ ID NO: 1743001 - DNA, 15 bp, Homo sapiens
gctacctaatccaaa

SEQ ID NO: 1743002 - DNA, 15 bp, Homo sapiens
ctacctaatccaaac

SEQ ID NO: 1743003 - DNA, 15 bp, Homo sapiens
tacctaatccaaact

SEQ ID NO: 1743004 - DNA, 15 bp, Homo sapiens
acctaatccaaacta

SEQ ID NO: 1743005 - DNA, 15 bp, Homo sapiens
cctaatccaaactag

SEQ ID NO: 1743006 - DNA, 15 bp, Homo sapiens
ctaatccaaactagg

SEQ ID NO: 1743007 - DNA, 15 bp, Homo sapiens
taatccaaactaggg

SEQ ID NO: 1743008 - DNA, 15 bp, Homo sapiens
aatccaaactagggc

SEQ ID NO: 1743009 - DNA, 15 bp, Homo sapiens
atccaaactagggct

SEQ ID NO: 1743010 - DNA, 15 bp, Homo sapiens
tccaaactagggctg

SEQ ID NO: 1743011 - DNA, 15 bp, Homo sapiens
ccaaactagggctga

SEQ ID NO: 1743012 - DNA, 15 bp, Homo sapiens
caaactagggctgat

SEQ ID NO: 1743013 - DNA, 15 bp, Homo sapiens
aaactagggctgata

SEQ ID NO: 1743014 - DNA, 15 bp, Homo sapiens
aactagggctgatag

SEQ ID NO: 1743015 - DNA, 15 bp, Homo sapiens
actagggctgatagg

SEQ ID NO: 1743016 - DNA, 15 bp, Homo sapiens
ctagggctgataggt

SEQ ID NO: 1743017 - DNA, 15 bp, Homo sapiens
tagggctgataggtt

SEQ ID NO: 1743018 - DNA, 15 bp, Homo sapiens
agggctgataggttt

SEQ ID NO: 1743019 - DNA, 15 bp, Homo sapiens
gggctgataggtttt

SEQ ID NO: 1743020 - DNA, 15 bp, Homo sapiens
ggctgataggttttg

SEQ ID NO: 1743021 - DNA, 15 bp, Homo sapiens
gctgataggttttgt

SEQ ID NO: 1743022 - DNA, 15 bp, Homo sapiens
ctgataggttttgtg

SEQ ID NO: 1743023 - DNA, 15 bp, Homo sapiens
tgataggttttgtgg

SEQ ID NO: 1743024 - DNA, 15 bp, Homo sapiens
gataggttttgtgga

SEQ ID NO: 1743025 - DNA, 15 bp, Homo sapiens
ataggttttgtggaa

SEQ ID NO: 1743026 - DNA, 15 bp, Homo sapiens
taggttttgtggaaa

SEQ ID NO: 1743027 - DNA, 15 bp, Homo sapiens
aggttttgtggaaaa

SEQ ID NO: 1743028 - DNA, 15 bp, Homo sapiens
ggttttgtggaaaat

SEQ ID NO: 1743029 - DNA, 15 bp, Homo sapiens
gttttgtggaaaata

SEQ ID NO: 1743030 - DNA, 15 bp, Homo sapiens
ttttgtggaaaatag

SEQ ID NO: 1743031 - DNA, 15 bp, Homo sapiens
tttgtggaaaatagt

SEQ ID NO: 1743032 - DNA, 15 bp, Homo sapiens
ttgtggaaaatagtt

SEQ ID NO: 1743033 - DNA, 15 bp, Homo sapiens
tgtggaaaatagttt

SEQ ID NO: 1743034 - DNA, 15 bp, Homo sapiens
gtggaaaatagttta

SEQ ID NO: 1743035 - DNA, 15 bp, Homo sapiens
tggaaaatagtttag

SEQ ID NO: 1743036 - DNA, 15 bp, Homo sapiens
ggaaaatagtttaga

SEQ ID NO: 1743037 - DNA, 15 bp, Homo sapiens
gaaaatagtttagag

SEQ ID NO: 1743038 - DNA, 15 bp, Homo sapiens
aaaatagtttagagg

SEQ ID NO: 1743039 - DNA, 15 bp, Homo sapiens
aaatagtttagaggt

SEQ ID NO: 1743040 - DNA, 15 bp, Homo sapiens
aatagtttagaggtg

SEQ ID NO: 1743041 - DNA, 15 bp, Homo sapiens
atagtttagaggtga

SEQ ID NO: 1743042 - DNA, 15 bp, Homo sapiens
tagtttagaggtgat

SEQ ID NO: 1743043 - DNA, 15 bp, Homo sapiens
agtttagaggtgatg

SEQ ID NO: 1743044 - DNA, 15 bp, Homo sapiens
gtttagaggtgatgt

SEQ ID NO: 1743045 - DNA, 15 bp, Homo sapiens
tttagaggtgatgtg

SEQ ID NO: 1743046 - DNA, 15 bp, Homo sapiens
ttagaggtgatgtga

SEQ ID NO: 1743047 - DNA, 15 bp, Homo sapiens
tagaggtgatgtgat

SEQ ID NO: 1743048 - DNA, 15 bp, Homo sapiens
agaggtgatgtgatt

SEQ ID NO: 1743049 - DNA, 15 bp, Homo sapiens
gaggtgatgtgattt

SEQ ID NO: 1743050 - DNA, 15 bp, Homo sapiens
aggtgatgtgatttc

SEQ ID NO: 1743051 - DNA, 15 bp, Homo sapiens
ggtgatgtgatttca

SEQ ID NO: 1743052 - DNA, 15 bp, Homo sapiens
gtgatgtgatttcaa

SEQ ID NO: 1743053 - DNA, 15 bp, Homo sapiens
tgatgtgatttcaaa

SEQ ID NO: 1743054 - DNA, 15 bp, Homo sapiens
gatgtgatttcaaat

SEQ ID NO: 1743055 - DNA, 15 bp, Homo sapiens
atgtgatttcaaatc

SEQ ID NO: 1743056 - DNA, 15 bp, Homo sapiens
tgtgatttcaaatct

SEQ ID NO: 1743057 - DNA, 15 bp, Homo sapiens
gtgatttcaaatctg

SEQ ID NO: 1743058 - DNA, 15 bp, Homo sapiens
tgatttcaaatctga

SEQ ID NO: 1743059 - DNA, 15 bp, Homo sapiens
gatttcaaatctgag

SEQ ID NO: 1743060 - DNA, 15 bp, Homo sapiens
atttcaaatctgagt

SEQ ID NO: 1743061 - DNA, 15 bp, Homo sapiens
tttcaaatctgagta

SEQ ID NO: 1743062 - DNA, 15 bp, Homo sapiens
ttcaaatctgagtaa

SEQ ID NO: 1743063 - DNA, 15 bp, Homo sapiens
tcaaatctgagtaag

SEQ ID NO: 1743064 - DNA, 15 bp, Homo sapiens
caaatctgagtaagc

SEQ ID NO: 1743065 - DNA, 15 bp, Homo sapiens
aaatctgagtaagca

SEQ ID NO: 1743066 - DNA, 15 bp, Homo sapiens
aatctgagtaagcat

SEQ ID NO: 1743067 - DNA, 15 bp, Homo sapiens
atctgagtaagcatt

SEQ ID NO: 1743068 - DNA, 15 bp, Homo sapiens
tctgagtaagcatta

SEQ ID NO: 1743069 - DNA, 15 bp, Homo sapiens
ctgagtaagcattac

SEQ ID NO: 1743070 - DNA, 15 bp, Homo sapiens
tgagtaagcattaca

SEQ ID NO: 1743071 - DNA, 15 bp, Homo sapiens
gagtaagcattacag

SEQ ID NO: 1743072 - DNA, 15 bp, Homo sapiens
agtaagcattacaga

SEQ ID NO: 1743073 - DNA, 15 bp, Homo sapiens
gtaagcattacagat

SEQ ID NO: 1743074 - DNA, 15 bp, Homo sapiens
taagcattacagata

SEQ ID NO: 1743075 - DNA, 15 bp, Homo sapiens
aagcattacagatat

SEQ ID NO: 1743076 - DNA, 15 bp, Homo sapiens
agcattacagatata

SEQ ID NO: 1743077 - DNA, 15 bp, Homo sapiens
gcattacagatatag

SEQ ID NO: 1743078 - DNA, 15 bp, Homo sapiens
cattacagatatagc

SEQ ID NO: 1743079 - DNA, 15 bp, Homo sapiens
attacagatatagca

SEQ ID NO: 1743080 - DNA, 15 bp, Homo sapiens
ttacagatatagcat

SEQ ID NO: 1743081 - DNA, 15 bp, Homo sapiens
tacagatatagcatt

SEQ ID NO: 1743082 - DNA, 15 bp, Homo sapiens
acagatatagcattt

SEQ ID NO: 1743083 - DNA, 15 bp, Homo sapiens
cagatatagcatttc

SEQ ID NO: 1743084 - DNA, 15 bp, Homo sapiens
agatatagcatttcc

SEQ ID NO: 1743085 - DNA, 15 bp, Homo sapiens
gatatagcatttcca

SEQ ID NO: 1743086 - DNA, 15 bp, Homo sapiens
atatagcatttccaa

SEQ ID NO: 1743087 - DNA, 15 bp, Homo sapiens
tatagcatttccaag

SEQ ID NO: 1743088 - DNA, 15 bp, Homo sapiens
atagcatttccaagg

SEQ ID NO: 1743089 - DNA, 15 bp, Homo sapiens
tagcatttccaaggg

SEQ ID NO: 1743090 - DNA, 15 bp, Homo sapiens
agcatttccaagggt

SEQ ID NO: 1743091 - DNA, 15 bp, Homo sapiens
gcatttccaagggtt

SEQ ID NO: 1743092 - DNA, 15 bp, Homo sapiens
catttccaagggttg

SEQ ID NO: 1743093 - DNA, 15 bp, Homo sapiens
atttccaagggttgg

SEQ ID NO: 1743094 - DNA, 15 bp, Homo sapiens
tttccaagggttgga

SEQ ID NO: 1743095 - DNA, 15 bp, Homo sapiens
ttccaagggttggac

SEQ ID NO: 1743096 - DNA, 15 bp, Homo sapiens
tccaagggttggaca

SEQ ID NO: 1743097 - DNA, 15 bp, Homo sapiens
ccaagggttggacat

SEQ ID NO: 1743098 - DNA, 15 bp, Homo sapiens
caagggttggacatt

SEQ ID NO: 1743099 - DNA, 15 bp, Homo sapiens
aagggttggacattg

SEQ ID NO: 1743100 - DNA, 15 bp, Homo sapiens
agggttggacattgt

SEQ ID NO: 1743101 - DNA, 15 bp, Homo sapiens
gggttggacattgta

SEQ ID NO: 1743102 - DNA, 15 bp, Homo sapiens
ggttggacattgtag

SEQ ID NO: 1743103 - DNA, 15 bp, Homo sapiens
gttggacattgtaga

SEQ ID NO: 1743104 - DNA, 15 bp, Homo sapiens
ttggacattgtagat

SEQ ID NO: 1743105 - DNA, 15 bp, Homo sapiens
tggacattgtagatt

SEQ ID NO: 1743106 - DNA, 15 bp, Homo sapiens
ggacattgtagattc

SEQ ID NO: 1743107 - DNA, 15 bp, Homo sapiens
gacattgtagattca

SEQ ID NO: 1743108 - DNA, 15 bp, Homo sapiens
acattgtagattcaa

SEQ ID NO: 1743109 - DNA, 15 bp, Homo sapiens
cattgtagattcaaa

SEQ ID NO: 1743110 - DNA, 15 bp, Homo sapiens
attgtagattcaaag

SEQ ID NO: 1743111 - DNA, 15 bp, Homo sapiens
ttgtagattcaaagg

SEQ ID NO: 1743112 - DNA, 15 bp, Homo sapiens
tgtagattcaaaggt

SEQ ID NO: 1743113 - DNA, 15 bp, Homo sapiens
gtagattcaaaggtg

SEQ ID NO: 1743114 - DNA, 15 bp, Homo sapiens
tagattcaaaggtgc

SEQ ID NO: 1743115 - DNA, 15 bp, Homo sapiens
agattcaaaggtgca

SEQ ID NO: 1743116 - DNA, 15 bp, Homo sapiens
gattcaaaggtgcag

SEQ ID NO: 1743117 - DNA, 15 bp, Homo sapiens
attcaaaggtgcagt

SEQ ID NO: 1743118 - DNA, 15 bp, Homo sapiens
ttcaaaggtgcagtg

SEQ ID NO: 1743119 - DNA, 15 bp, Homo sapiens
tcaaaggtgcagtga

SEQ ID NO: 1743120 - DNA, 15 bp, Homo sapiens
caaaggtgcagtgat

SEQ ID NO: 1743121 - DNA, 15 bp, Homo sapiens
aaaggtgcagtgatg

SEQ ID NO: 1743122 - DNA, 15 bp, Homo sapiens
aaggtgcagtgatgt

SEQ ID NO: 1743123 - DNA, 15 bp, Homo sapiens
aggtgcagtgatgta

SEQ ID NO: 1743124 - DNA, 15 bp, Homo sapiens
ggtgcagtgatgtat

SEQ ID NO: 1743125 - DNA, 15 bp, Homo sapiens
gtgcagtgatgtatg

SEQ ID NO: 1743126 - DNA, 15 bp, Homo sapiens
tgcagtgatgtatga

SEQ ID NO: 1743127 - DNA, 15 bp, Homo sapiens
gcagtgatgtatgat

SEQ ID NO: 1743128 - DNA, 15 bp, Homo sapiens
cagtgatgtatgata

SEQ ID NO: 1743129 - DNA, 15 bp, Homo sapiens
agtgatgtatgatag

SEQ ID NO: 1743130 - DNA, 15 bp, Homo sapiens
gtgatgtatgatagt

SEQ ID NO: 1743131 - DNA, 15 bp, Homo sapiens
tgatgtatgatagta

SEQ ID NO: 1743132 - DNA, 15 bp, Homo sapiens
gatgtatgatagtat

SEQ ID NO: 1743133 - DNA, 15 bp, Homo sapiens
atgtatgatagtatg

SEQ ID NO: 1743134 - DNA, 15 bp, Homo sapiens
tgtatgatagtatgg

SEQ ID NO: 1743135 - DNA, 15 bp, Homo sapiens
gtatgatagtatggt

SEQ ID NO: 1743136 - DNA, 15 bp, Homo sapiens
tatgatagtatggtc

SEQ ID NO: 1743137 - DNA, 15 bp, Homo sapiens
atgatagtatggtct

SEQ ID NO: 1743138 - DNA, 15 bp, Homo sapiens
tgatagtatggtctg

SEQ ID NO: 1743139 - DNA, 15 bp, Homo sapiens
gatagtatggtctga

SEQ ID NO: 1743140 - DNA, 15 bp, Homo sapiens
atagtatggtctgat

SEQ ID NO: 1743141 - DNA, 15 bp, Homo sapiens
tagtatggtctgatc

SEQ ID NO: 1743142 - DNA, 15 bp, Homo sapiens
agtatggtctgatca

SEQ ID NO: 1743143 - DNA, 15 bp, Homo sapiens
gtatggtctgatcag

SEQ ID NO: 1743144 - DNA, 15 bp, Homo sapiens
tatggtctgatcagt

SEQ ID NO: 1743145 - DNA, 15 bp, Homo sapiens
atggtctgatcagtg

SEQ ID NO: 1743146 - DNA, 15 bp, Homo sapiens
tggtctgatcagtga

SEQ ID NO: 1743147 - DNA, 15 bp, Homo sapiens
ggtctgatcagtgaa

SEQ ID NO: 1743148 - DNA, 15 bp, Homo sapiens
gtctgatcagtgaac

SEQ ID NO: 1743149 - DNA, 15 bp, Homo sapiens
tctgatcagtgaact

SEQ ID NO: 1743150 - DNA, 15 bp, Homo sapiens
ctgatcagtgaactc

SEQ ID NO: 1743151 - DNA, 15 bp, Homo sapiens
tgatcagtgaactct

SEQ ID NO: 1743152 - DNA, 15 bp, Homo sapiens
gatcagtgaactcta

SEQ ID NO: 1743153 - DNA, 15 bp, Homo sapiens
atcagtgaactctaa

SEQ ID NO: 1743154 - DNA, 15 bp, Homo sapiens
tcagtgaactctaag

SEQ ID NO: 1743155 - DNA, 15 bp, Homo sapiens
cagtgaactctaagt

SEQ ID NO: 1743156 - DNA, 15 bp, Homo sapiens
agtgaactctaagta

SEQ ID NO: 1743157 - DNA, 15 bp, Homo sapiens
gtgaactctaagtaa

SEQ ID NO: 1743158 - DNA, 15 bp, Homo sapiens
tgaactctaagtaat

SEQ ID NO: 1743159 - DNA, 15 bp, Homo sapiens
gaactctaagtaatt

SEQ ID NO: 1743160 - DNA, 15 bp, Homo sapiens
aactctaagtaattc

SEQ ID NO: 1743161 - DNA, 15 bp, Homo sapiens
actctaagtaattca

SEQ ID NO: 1743162 - DNA, 15 bp, Homo sapiens
ctctaagtaattcat

SEQ ID NO: 1743163 - DNA, 15 bp, Homo sapiens
tctaagtaattcatt

SEQ ID NO: 1743164 - DNA, 15 bp, Homo sapiens
ctaagtaattcatta

SEQ ID NO: 1743165 - DNA, 15 bp, Homo sapiens
taagtaattcattaa

SEQ ID NO: 1743166 - DNA, 15 bp, Homo sapiens
aagtaattcattaag

SEQ ID NO: 1743167 - DNA, 15 bp, Homo sapiens
agtaattcattaagg

SEQ ID NO: 1743168 - DNA, 15 bp, Homo sapiens
gtaattcattaaggt

SEQ ID NO: 1743169 - DNA, 15 bp, Homo sapiens
taattcattaaggtt

SEQ ID NO: 1743170 - DNA, 15 bp, Homo sapiens
aattcattaaggttg

SEQ ID NO: 1743171 - DNA, 15 bp, Homo sapiens
attcattaaggttgg

SEQ ID NO: 1743172 - DNA, 15 bp, Homo sapiens
ttcattaaggttggg

SEQ ID NO: 1743173 - DNA, 15 bp, Homo sapiens
tcattaaggttggga

SEQ ID NO: 1743174 - DNA, 15 bp, Homo sapiens
cattaaggttgggat

SEQ ID NO: 1743175 - DNA, 15 bp, Homo sapiens
attaaggttgggata

SEQ ID NO: 1743176 - DNA, 15 bp, Homo sapiens
ttaaggttgggatac

SEQ ID NO: 1743177 - DNA, 15 bp, Homo sapiens
taaggttgggataca

SEQ ID NO: 1743178 - DNA, 15 bp, Homo sapiens
aaggttgggatacag

SEQ ID NO: 1743179 - DNA, 15 bp, Homo sapiens
aggttgggatacagg

SEQ ID NO: 1743180 - DNA, 15 bp, Homo sapiens
ggttgggatacaggg

SEQ ID NO: 1743181 - DNA, 15 bp, Homo sapiens
gttgggatacagggc

SEQ ID NO: 1743182 - DNA, 15 bp, Homo sapiens
ttgggatacagggca

SEQ ID NO: 1743183 - DNA, 15 bp, Homo sapiens
tgggatacagggcag

SEQ ID NO: 1743184 - DNA, 15 bp, Homo sapiens
gggatacagggcaga

SEQ ID NO: 1743185 - DNA, 15 bp, Homo sapiens
ggatacagggcagaa

SEQ ID NO: 1743186 - DNA, 15 bp, Homo sapiens
gatacagggcagaac

SEQ ID NO: 1743187 - DNA, 15 bp, Homo sapiens
atacagggcagaaca

SEQ ID NO: 1743188 - DNA, 15 bp, Homo sapiens
tacagggcagaacaa

SEQ ID NO: 1743189 - DNA, 15 bp, Homo sapiens
acagggcagaacaat

SEQ ID NO: 1743190 - DNA, 15 bp, Homo sapiens
cagggcagaacaatt

SEQ ID NO: 1743191 - DNA, 15 bp, Homo sapiens
agggcagaacaatta

SEQ ID NO: 1743192 - DNA, 15 bp, Homo sapiens
gggcagaacaattaa

SEQ ID NO: 1743193 - DNA, 15 bp, Homo sapiens
ggcagaacaattaaa

SEQ ID NO: 1743194 - DNA, 15 bp, Homo sapiens
gcagaacaattaaaa

SEQ ID NO: 1743195 - DNA, 15 bp, Homo sapiens
cagaacaattaaaat

SEQ ID NO: 1743196 - DNA, 15 bp, Homo sapiens
agaacaattaaaata

SEQ ID NO: 1743197 - DNA, 15 bp, Homo sapiens
gaacaattaaaatat

SEQ ID NO: 1743198 - DNA, 15 bp, Homo sapiens
aacaattaaaatatg

SEQ ID NO: 1743199 - DNA, 15 bp, Homo sapiens
acaattaaaatatgg

SEQ ID NO: 1743200 - DNA, 15 bp, Homo sapiens
caattaaaatatggt

SEQ ID NO: 1743201 - DNA, 15 bp, Homo sapiens
aattaaaatatggta

SEQ ID NO: 1743202 - DNA, 15 bp, Homo sapiens
attaaaatatggtac

SEQ ID NO: 1743203 - DNA, 15 bp, Homo sapiens
ttaaaatatggtact

SEQ ID NO: 1743204 - DNA, 15 bp, Homo sapiens
taaaatatggtactg

SEQ ID NO: 1743205 - DNA, 15 bp, Homo sapiens
aaaatatggtactga

SEQ ID NO: 1743206 - DNA, 15 bp, Homo sapiens
aaatatggtactgaa

SEQ ID NO: 1743207 - DNA, 15 bp, Homo sapiens
aatatggtactgaag

SEQ ID NO: 1743208 - DNA, 15 bp, Homo sapiens
atatggtactgaaga

SEQ ID NO: 1743209 - DNA, 15 bp, Homo sapiens
tatggtactgaagag

SEQ ID NO: 1743210 - DNA, 15 bp, Homo sapiens
atggtactgaagagg

SEQ ID NO: 1743211 - DNA, 15 bp, Homo sapiens
tggtactgaagaggc

SEQ ID NO: 1743212 - DNA, 15 bp, Homo sapiens
ggtactgaagaggca

SEQ ID NO: 1743213 - DNA, 15 bp, Homo sapiens
gtactgaagaggcaa

SEQ ID NO: 1743214 - DNA, 15 bp, Homo sapiens
tactgaagaggcaag

SEQ ID NO: 1743215 - DNA, 15 bp, Homo sapiens
actgaagaggcaaga

SEQ ID NO: 1743216 - DNA, 15 bp, Homo sapiens
ctgaagaggcaagaa

SEQ ID NO: 1743217 - DNA, 15 bp, Homo sapiens
tgaagaggcaagaag

SEQ ID NO: 1743218 - DNA, 15 bp, Homo sapiens
gaagaggcaagaagg

SEQ ID NO: 1743219 - DNA, 15 bp, Homo sapiens
aagaggcaagaaggg

SEQ ID NO: 1743220 - DNA, 15 bp, Homo sapiens
agaggcaagaaggga

SEQ ID NO: 1743221 - DNA, 15 bp, Homo sapiens
gaggcaagaagggac

SEQ ID NO: 1743222 - DNA, 15 bp, Homo sapiens
aggcaagaagggacc

SEQ ID NO: 1743223 - DNA, 15 bp, Homo sapiens
ggcaagaagggacca

SEQ ID NO: 1743224 - DNA, 15 bp, Homo sapiens
gcaagaagggaccaa

SEQ ID NO: 1743225 - DNA, 15 bp, Homo sapiens
caagaagggaccaaa

SEQ ID NO: 1743226 - DNA, 15 bp, Homo sapiens
aagaagggaccaaat

SEQ ID NO: 1743227 - DNA, 15 bp, Homo sapiens
agaagggaccaaatg

SEQ ID NO: 1743228 - DNA, 15 bp, Homo sapiens
gaagggaccaaatgt

SEQ ID NO: 1743229 - DNA, 15 bp, Homo sapiens
aagggaccaaatgtt

SEQ ID NO: 1743230 - DNA, 15 bp, Homo sapiens
agggaccaaatgtta

SEQ ID NO: 1743231 - DNA, 15 bp, Homo sapiens
gggaccaaatgttat

SEQ ID NO: 1743232 - DNA, 15 bp, Homo sapiens
ggaccaaatgttata

SEQ ID NO: 1743233 - DNA, 15 bp, Homo sapiens
gaccaaatgttatat

SEQ ID NO: 1743234 - DNA, 15 bp, Homo sapiens
accaaatgttatatt

SEQ ID NO: 1743235 - DNA, 15 bp, Homo sapiens
ccaaatgttatatta

SEQ ID NO: 1743236 - DNA, 15 bp, Homo sapiens
caaatgttatattaa

SEQ ID NO: 1743237 - DNA, 15 bp, Homo sapiens
aaatgttatattaat

SEQ ID NO: 1743238 - DNA, 15 bp, Homo sapiens
aatgttatattaatg

SEQ ID NO: 1743239 - DNA, 15 bp, Homo sapiens
atgttatattaatga

SEQ ID NO: 1743240 - DNA, 15 bp, Homo sapiens
tgttatattaatgag

SEQ ID NO: 1743241 - DNA, 15 bp, Homo sapiens
gttatattaatgagt

SEQ ID NO: 1743242 - DNA, 15 bp, Homo sapiens
ttatattaatgagtc

SEQ ID NO: 1743243 - DNA, 15 bp, Homo sapiens
tatattaatgagtct

SEQ ID NO: 1743244 - DNA, 15 bp, Homo sapiens
atattaatgagtctt

SEQ ID NO: 1743245 - DNA, 15 bp, Homo sapiens
tattaatgagtcttg

SEQ ID NO: 1743246 - DNA, 15 bp, Homo sapiens
attaatgagtcttgt

SEQ ID NO: 1743247 - DNA, 15 bp, Homo sapiens
ttaatgagtcttgtt

SEQ ID NO: 1743248 - DNA, 15 bp, Homo sapiens
taatgagtcttgtta

SEQ ID NO: 1743249 - DNA, 15 bp, Homo sapiens
aatgagtcttgttac

SEQ ID NO: 1743250 - DNA, 15 bp, Homo sapiens
atgagtcttgttacc

SEQ ID NO: 1743251 - DNA, 15 bp, Homo sapiens
tgagtcttgttacca

SEQ ID NO: 1743252 - DNA, 15 bp, Homo sapiens
gagtcttgttaccac

SEQ ID NO: 1743253 - DNA, 15 bp, Homo sapiens
agtcttgttaccact

SEQ ID NO: 1743254 - DNA, 15 bp, Homo sapiens
gtcttgttaccactt

SEQ ID NO: 1743255 - DNA, 15 bp, Homo sapiens
tcttgttaccacttt

SEQ ID NO: 1743256 - DNA, 15 bp, Homo sapiens
cttgttaccactttt

SEQ ID NO: 1743257 - DNA, 15 bp, Homo sapiens
ttgttaccacttttg

SEQ ID NO: 1743258 - DNA, 15 bp, Homo sapiens
tgttaccacttttgg

SEQ ID NO: 1743259 - DNA, 15 bp, Homo sapiens
gttaccacttttggt

SEQ ID NO: 1743260 - DNA, 15 bp, Homo sapiens
ttaccacttttggta

SEQ ID NO: 1743261 - DNA, 15 bp, Homo sapiens
taccacttttggtac

SEQ ID NO: 1743262 - DNA, 15 bp, Homo sapiens
accacttttggtacc

SEQ ID NO: 1743263 - DNA, 15 bp, Homo sapiens
ccacttttggtacca

SEQ ID NO: 1743264 - DNA, 15 bp, Homo sapiens
cacttttggtaccaa

SEQ ID NO: 1743265 - DNA, 15 bp, Homo sapiens
acttttggtaccaaa

SEQ ID NO: 1743266 - DNA, 15 bp, Homo sapiens
cttttggtaccaaaa

SEQ ID NO: 1743267 - DNA, 15 bp, Homo sapiens
ttttggtaccaaaaa

SEQ ID NO: 1743268 - DNA, 15 bp, Homo sapiens
tttggtaccaaaaac

SEQ ID NO: 1743269 - DNA, 15 bp, Homo sapiens
ttggtaccaaaaact

SEQ ID NO: 1743270 - DNA, 15 bp, Homo sapiens
tggtaccaaaaacta

SEQ ID NO: 1743271 - DNA, 15 bp, Homo sapiens
ggtaccaaaaactag

SEQ ID NO: 1743272 - DNA, 15 bp, Homo sapiens
gtaccaaaaactagg

SEQ ID NO: 1743273 - DNA, 15 bp, Homo sapiens
taccaaaaactaggc

SEQ ID NO: 1743274 - DNA, 15 bp, Homo sapiens
accaaaaactaggct

SEQ ID NO: 1743275 - DNA, 15 bp, Homo sapiens
ccaaaaactaggctg

SEQ ID NO: 1743276 - DNA, 15 bp, Homo sapiens
caaaaactaggctgt

SEQ ID NO: 1743277 - DNA, 15 bp, Homo sapiens
aaaaactaggctgtt

SEQ ID NO: 1743278 - DNA, 15 bp, Homo sapiens
aaaactaggctgttc

SEQ ID NO: 1743279 - DNA, 15 bp, Homo sapiens
aaactaggctgttca

SEQ ID NO: 1743280 - DNA, 15 bp, Homo sapiens
aactaggctgttcat

SEQ ID NO: 1743281 - DNA, 15 bp, Homo sapiens
actaggctgttcata

SEQ ID NO: 1743282 - DNA, 15 bp, Homo sapiens
ctaggctgttcataa

SEQ ID NO: 1743283 - DNA, 15 bp, Homo sapiens
taggctgttcataac

SEQ ID NO: 1743284 - DNA, 15 bp, Homo sapiens
aggctgttcataact

SEQ ID NO: 1743285 - DNA, 15 bp, Homo sapiens
ggctgttcataactt

SEQ ID NO: 1743286 - DNA, 15 bp, Homo sapiens
gctgttcataacttt

SEQ ID NO: 1743287 - DNA, 15 bp, Homo sapiens
ctgttcataacttta

SEQ ID NO: 1743288 - DNA, 15 bp, Homo sapiens
tgttcataactttaa

SEQ ID NO: 1743289 - DNA, 15 bp, Homo sapiens
gttcataactttaaa

SEQ ID NO: 1743290 - DNA, 15 bp, Homo sapiens
ttcataactttaaaa

SEQ ID NO: 1743291 - DNA, 15 bp, Homo sapiens
tcataactttaaaat

SEQ ID NO: 1743292 - DNA, 15 bp, Homo sapiens
cataactttaaaatc

SEQ ID NO: 1743293 - DNA, 15 bp, Homo sapiens
ataactttaaaatct

SEQ ID NO: 1743294 - DNA, 15 bp, Homo sapiens
taactttaaaatctg

SEQ ID NO: 1743295 - DNA, 15 bp, Homo sapiens
aactttaaaatctgt

SEQ ID NO: 1743296 - DNA, 15 bp, Homo sapiens
actttaaaatctgtt

SEQ ID NO: 1743297 - DNA, 15 bp, Homo sapiens
ctttaaaatctgttg

SEQ ID NO: 1743298 - DNA, 15 bp, Homo sapiens
tttaaaatctgttgt

SEQ ID NO: 1743299 - DNA, 15 bp, Homo sapiens
ttaaaatctgttgta

SEQ ID NO: 1743300 - DNA, 15 bp, Homo sapiens
taaaatctgttgtag

SEQ ID NO: 1743301 - DNA, 15 bp, Homo sapiens
aaaatctgttgtagc

SEQ ID NO: 1743302 - DNA, 15 bp, Homo sapiens
aaatctgttgtagca

SEQ ID NO: 1743303 - DNA, 15 bp, Homo sapiens
aatctgttgtagcaa

SEQ ID NO: 1743304 - DNA, 15 bp, Homo sapiens
atctgttgtagcaat

SEQ ID NO: 1743305 - DNA, 15 bp, Homo sapiens
tctgttgtagcaatc

SEQ ID NO: 1743306 - DNA, 15 bp, Homo sapiens
ctgttgtagcaatct

SEQ ID NO: 1743307 - DNA, 15 bp, Homo sapiens
tgttgtagcaatctt

SEQ ID NO: 1743308 - DNA, 15 bp, Homo sapiens
gttgtagcaatcttt

SEQ ID NO: 1743309 - DNA, 15 bp, Homo sapiens
ttgtagcaatctttt

SEQ ID NO: 1743310 - DNA, 15 bp, Homo sapiens
tgtagcaatcttttt

SEQ ID NO: 1743311 - DNA, 15 bp, Homo sapiens
gtagcaatctttttt

SEQ ID NO: 1743312 - DNA, 15 bp, Homo sapiens
tagcaatcttttttt

SEQ ID NO: 1743313 - DNA, 15 bp, Homo sapiens
agcaatctttttttc

SEQ ID NO: 1743314 - DNA, 15 bp, Homo sapiens
gcaatctttttttct

SEQ ID NO: 1743315 - DNA, 15 bp, Homo sapiens
cttaatgattggtat

SEQ ID NO: 1743316 - DNA, 15 bp, Homo sapiens
ttaatgattggtata

SEQ ID NO: 1743317 - DNA, 15 bp, Homo sapiens
taatgattggtatac

SEQ ID NO: 1743318 - DNA, 15 bp, Homo sapiens
aatgattggtatacc

SEQ ID NO: 1743319 - DNA, 15 bp, Homo sapiens
atgattggtatacct

SEQ ID NO: 1743320 - DNA, 15 bp, Homo sapiens
tgattggtatacctc

SEQ ID NO: 1743321 - DNA, 15 bp, Homo sapiens
gattggtatacctct

SEQ ID NO: 1743322 - DNA, 15 bp, Homo sapiens
attggtatacctctt

SEQ ID NO: 1743323 - DNA, 15 bp, Homo sapiens
ttggtatacctcttt

SEQ ID NO: 1743324 - DNA, 15 bp, Homo sapiens
tggtatacctctttg

SEQ ID NO: 1743325 - DNA, 15 bp, Homo sapiens
ggtatacctctttgt

SEQ ID NO: 1743326 - DNA, 15 bp, Homo sapiens
gtatacctctttgtc

SEQ ID NO: 1743327 - DNA, 15 bp, Homo sapiens
tatacctctttgtca

SEQ ID NO: 1743328 - DNA, 15 bp, Homo sapiens
atacctctttgtcat

SEQ ID NO: 1743329 - DNA, 15 bp, Homo sapiens
tacctctttgtcata

SEQ ID NO: 1743330 - DNA, 15 bp, Homo sapiens
acctctttgtcataa

SEQ ID NO: 1743331 - DNA, 15 bp, Homo sapiens
cctctttgtcataaa

SEQ ID NO: 1743332 - DNA, 15 bp, Homo sapiens
ctctttgtcataaac

SEQ ID NO: 1743333 - DNA, 15 bp, Homo sapiens
tctttgtcataaaca

SEQ ID NO: 1743334 - DNA, 15 bp, Homo sapiens
ctttgtcataaacat

SEQ ID NO: 1743335 - DNA, 15 bp, Homo sapiens
tttgtcataaacata

SEQ ID NO: 1743336 - DNA, 15 bp, Homo sapiens
ttgtcataaacataa

SEQ ID NO: 1743337 - DNA, 15 bp, Homo sapiens
tgtcataaacataat

SEQ ID NO: 1743338 - DNA, 15 bp, Homo sapiens
gtcataaacataatg

SEQ ID NO: 1743339 - DNA, 15 bp, Homo sapiens
tcataaacataatgg

SEQ ID NO: 1743340 - DNA, 15 bp, Homo sapiens
cataaacataatgga

SEQ ID NO: 1743341 - DNA, 15 bp, Homo sapiens
ataaacataatggaa

SEQ ID NO: 1743342 - DNA, 15 bp, Homo sapiens
taaacataatggaaa

SEQ ID NO: 1743343 - DNA, 15 bp, Homo sapiens
aaacataatggaaag

SEQ ID NO: 1743344 - DNA, 15 bp, Homo sapiens
aacataatggaaaga

SEQ ID NO: 1743345 - DNA, 15 bp, Homo sapiens
acataatggaaagag

SEQ ID NO: 1743346 - DNA, 15 bp, Homo sapiens
cataatggaaagaga

SEQ ID NO: 1743347 - DNA, 15 bp, Homo sapiens
ataatggaaagagac

SEQ ID NO: 1743348 - DNA, 15 bp, Homo sapiens
taatggaaagagacc

SEQ ID NO: 1743349 - DNA, 15 bp, Homo sapiens
aatggaaagagaccc

SEQ ID NO: 1743350 - DNA, 15 bp, Homo sapiens
atggaaagagaccca

SEQ ID NO: 1743351 - DNA, 15 bp, Homo sapiens
tggaaagagacccac

SEQ ID NO: 1743352 - DNA, 15 bp, Homo sapiens
ggaaagagacccaca

SEQ ID NO: 1743353 - DNA, 15 bp, Homo sapiens
gaaagagacccacaa

SEQ ID NO: 1743354 - DNA, 15 bp, Homo sapiens
aaagagacccacaat

SEQ ID NO: 1743355 - DNA, 15 bp, Homo sapiens
aagagacccacaatt

SEQ ID NO: 1743356 - DNA, 15 bp, Homo sapiens
agagacccacaatta

SEQ ID NO: 1743357 - DNA, 15 bp, Homo sapiens
gagacccacaattaa

SEQ ID NO: 1743358 - DNA, 15 bp, Homo sapiens
agacccacaattaaa

SEQ ID NO: 1743359 - DNA, 15 bp, Homo sapiens
gacccacaattaaaa

SEQ ID NO: 1743360 - DNA, 15 bp, Homo sapiens
acccacaattaaaaa

SEQ ID NO: 1743361 - DNA, 15 bp, Homo sapiens
cccacaattaaaaag

SEQ ID NO: 1743362 - DNA, 15 bp, Homo sapiens
ccacaattaaaaaga

SEQ ID NO: 1743363 - DNA, 15 bp, Homo sapiens
cacaattaaaaagag

SEQ ID NO: 1743364 - DNA, 15 bp, Homo sapiens
acaattaaaaagagt

SEQ ID NO: 1743365 - DNA, 15 bp, Homo sapiens
caattaaaaagagta

SEQ ID NO: 1743366 - DNA, 15 bp, Homo sapiens
aattaaaaagagtag

SEQ ID NO: 1743367 - DNA, 15 bp, Homo sapiens
attaaaaagagtagt

SEQ ID NO: 1743368 - DNA, 15 bp, Homo sapiens
ttaaaaagagtagtg

SEQ ID NO: 1743369 - DNA, 15 bp, Homo sapiens
taaaaagagtagtga

SEQ ID NO: 1743370 - DNA, 15 bp, Homo sapiens
aaaaagagtagtgaa

SEQ ID NO: 1743371 - DNA, 15 bp, Homo sapiens
aaaagagtagtgaaa

SEQ ID NO: 1743372 - DNA, 15 bp, Homo sapiens
aaagagtagtgaaaa

SEQ ID NO: 1743373 - DNA, 15 bp, Homo sapiens
aagagtagtgaaaaa

SEQ ID NO: 1743374 - DNA, 15 bp, Homo sapiens
agagtagtgaaaaat

SEQ ID NO: 1743375 - DNA, 15 bp, Homo sapiens
gagtagtgaaaaata

SEQ ID NO: 1743376 - DNA, 15 bp, Homo sapiens
agtagtgaaaaatat

SEQ ID NO: 1743377 - DNA, 15 bp, Homo sapiens
gtagtgaaaaatatt

SEQ ID NO: 1743378 - DNA, 15 bp, Homo sapiens
tagtgaaaaatattt

SEQ ID NO: 1743379 - DNA, 15 bp, Homo sapiens
agtgaaaaatatttt

SEQ ID NO: 1743380 - DNA, 15 bp, Homo sapiens
gtgaaaaatatttta

SEQ ID NO: 1743381 - DNA, 15 bp, Homo sapiens
tgaaaaatattttat

SEQ ID NO: 1743382 - DNA, 15 bp, Homo sapiens
gaaaaatattttatt

SEQ ID NO: 1743383 - DNA, 15 bp, Homo sapiens
aaaaatattttattt

SEQ ID NO: 1743384 - DNA, 15 bp, Homo sapiens
aaaatattttattta

SEQ ID NO: 1743385 - DNA, 15 bp, Homo sapiens
aaatattttatttaa

SEQ ID NO: 1743386 - DNA, 15 bp, Homo sapiens
aatattttatttaag

SEQ ID NO: 1743387 - DNA, 15 bp, Homo sapiens
atattttatttaagc

SEQ ID NO: 1743388 - DNA, 15 bp, Homo sapiens
tattttatttaagca

SEQ ID NO: 1743389 - DNA, 15 bp, Homo sapiens
attttatttaagcag

SEQ ID NO: 1743390 - DNA, 15 bp, Homo sapiens
ttttatttaagcagc

SEQ ID NO: 1743391 - DNA, 15 bp, Homo sapiens
tttatttaagcagca

SEQ ID NO: 1743392 - DNA, 15 bp, Homo sapiens
ttatttaagcagcag

SEQ ID NO: 1743393 - DNA, 15 bp, Homo sapiens
tatttaagcagcagc

SEQ ID NO: 1743394 - DNA, 15 bp, Homo sapiens
atttaagcagcagct

SEQ ID NO: 1743395 - DNA, 15 bp, Homo sapiens
tttaagcagcagctg

SEQ ID NO: 1743396 - DNA, 15 bp, Homo sapiens
ttaagcagcagctgg

SEQ ID NO: 1743397 - DNA, 15 bp, Homo sapiens
taagcagcagctggg

SEQ ID NO: 1743398 - DNA, 15 bp, Homo sapiens
aagcagcagctgggt

SEQ ID NO: 1743399 - DNA, 15 bp, Homo sapiens
agcagcagctgggtc

SEQ ID NO: 1743400 - DNA, 15 bp, Homo sapiens
gcagcagctgggtca

SEQ ID NO: 1743401 - DNA, 15 bp, Homo sapiens
cagcagctgggtcat

SEQ ID NO: 1743402 - DNA, 15 bp, Homo sapiens
agcagctgggtcatc

SEQ ID NO: 1743403 - DNA, 15 bp, Homo sapiens
gcagctgggtcatct

SEQ ID NO: 1743404 - DNA, 15 bp, Homo sapiens
cagctgggtcatcta

SEQ ID NO: 1743405 - DNA, 15 bp, Homo sapiens
agctgggtcatctat

SEQ ID NO: 1743406 - DNA, 15 bp, Homo sapiens
gctgggtcatctatt

SEQ ID NO: 1743407 - DNA, 15 bp, Homo sapiens
ctgggtcatctattt

SEQ ID NO: 1743408 - DNA, 15 bp, Homo sapiens
tgggtcatctatttt

SEQ ID NO: 1743409 - DNA, 15 bp, Homo sapiens
gggtcatctattttc

SEQ ID NO: 1743410 - DNA, 15 bp, Homo sapiens
ggtcatctattttct

SEQ ID NO: 1743411 - DNA, 15 bp, Homo sapiens
gtcatctattttcta

SEQ ID NO: 1743412 - DNA, 15 bp, Homo sapiens
tcatctattttctat

SEQ ID NO: 1743413 - DNA, 15 bp, Homo sapiens
catctattttctatc

SEQ ID NO: 1743414 - DNA, 15 bp, Homo sapiens
atctattttctatcc

SEQ ID NO: 1743415 - DNA, 15 bp, Homo sapiens
tctattttctatcct

SEQ ID NO: 1743416 - DNA, 15 bp, Homo sapiens
ctattttctatccta

SEQ ID NO: 1743417 - DNA, 15 bp, Homo sapiens
tattttctatcctat

SEQ ID NO: 1743418 - DNA, 15 bp, Homo sapiens
attttctatcctatc

SEQ ID NO: 1743419 - DNA, 15 bp, Homo sapiens
ttttctatcctatct

SEQ ID NO: 1743420 - DNA, 15 bp, Homo sapiens
tttctatcctatcta

SEQ ID NO: 1743421 - DNA, 15 bp, Homo sapiens
ttctatcctatctat

SEQ ID NO: 1743422 - DNA, 15 bp, Homo sapiens
tctatcctatctatt

SEQ ID NO: 1743423 - DNA, 15 bp, Homo sapiens
ctatcctatctatta

SEQ ID NO: 1743424 - DNA, 15 bp, Homo sapiens
tatcctatctattat

SEQ ID NO: 1743425 - DNA, 15 bp, Homo sapiens
atcctatctattatt

SEQ ID NO: 1743426 - DNA, 15 bp, Homo sapiens
tcctatctattattg

SEQ ID NO: 1743427 - DNA, 15 bp, Homo sapiens
cctatctattattga

SEQ ID NO: 1743428 - DNA, 15 bp, Homo sapiens
ctatctattattgag

SEQ ID NO: 1743429 - DNA, 15 bp, Homo sapiens
tatctattattgagt

SEQ ID NO: 1743430 - DNA, 15 bp, Homo sapiens
atctattattgagtt

SEQ ID NO: 1743431 - DNA, 15 bp, Homo sapiens
tctattattgagtta

SEQ ID NO: 1743432 - DNA, 15 bp, Homo sapiens
ctattattgagttat

SEQ ID NO: 1743433 - DNA, 15 bp, Homo sapiens
tattattgagttatc

SEQ ID NO: 1743434 - DNA, 15 bp, Homo sapiens
attattgagttatca

SEQ ID NO: 1743435 - DNA, 15 bp, Homo sapiens
ttattgagttatcat

SEQ ID NO: 1743436 - DNA, 15 bp, Homo sapiens
tattgagttatcatt

SEQ ID NO: 1743437 - DNA, 15 bp, Homo sapiens
attgagttatcattt

SEQ ID NO: 1743438 - DNA, 15 bp, Homo sapiens
ttgagttatcatttt

SEQ ID NO: 1743439 - DNA, 15 bp, Homo sapiens
tgagttatcatttta

SEQ ID NO: 1743440 - DNA, 15 bp, Homo sapiens
gagttatcattttat

SEQ ID NO: 1743441 - DNA, 15 bp, Homo sapiens
agttatcattttata

SEQ ID NO: 1743442 - DNA, 15 bp, Homo sapiens
gttatcattttatat

SEQ ID NO: 1743443 - DNA, 15 bp, Homo sapiens
ttatcattttatatg

SEQ ID NO: 1743444 - DNA, 15 bp, Homo sapiens
tatcattttatatga

SEQ ID NO: 1743445 - DNA, 15 bp, Homo sapiens
atcattttatatgat

SEQ ID NO: 1743446 - DNA, 15 bp, Homo sapiens
tcattttatatgatt

SEQ ID NO: 1743447 - DNA, 15 bp, Homo sapiens
cattttatatgattt

SEQ ID NO: 1743448 - DNA, 15 bp, Homo sapiens
attttatatgatttt

SEQ ID NO: 1743449 - DNA, 15 bp, Homo sapiens
ttttatatgatttta

SEQ ID NO: 1743450 - DNA, 15 bp, Homo sapiens
tttatatgattttat

SEQ ID NO: 1743451 - DNA, 15 bp, Homo sapiens
ttatatgattttatg

SEQ ID NO: 1743452 - DNA, 15 bp, Homo sapiens
tatatgattttatga

SEQ ID NO: 1743453 - DNA, 15 bp, Homo sapiens
atatgattttatgag

SEQ ID NO: 1743454 - DNA, 15 bp, Homo sapiens
tatgattttatgaga

SEQ ID NO: 1743455 - DNA, 15 bp, Homo sapiens
atgattttatgagac

SEQ ID NO: 1743456 - DNA, 15 bp, Homo sapiens
tgattttatgagaca

SEQ ID NO: 1743457 - DNA, 15 bp, Homo sapiens
gattttatgagacaa

SEQ ID NO: 1743458 - DNA, 15 bp, Homo sapiens
attttatgagacaac

SEQ ID NO: 1743459 - DNA, 15 bp, Homo sapiens
ttttatgagacaaca

SEQ ID NO: 1743460 - DNA, 15 bp, Homo sapiens
tttatgagacaacag

SEQ ID NO: 1743461 - DNA, 15 bp, Homo sapiens
ttatgagacaacaga

SEQ ID NO: 1743462 - DNA, 15 bp, Homo sapiens
tatgagacaacagaa

SEQ ID NO: 1743463 - DNA, 15 bp, Homo sapiens
atgagacaacagaag

SEQ ID NO: 1743464 - DNA, 15 bp, Homo sapiens
tgagacaacagaagc

SEQ ID NO: 1743465 - DNA, 15 bp, Homo sapiens
gagacaacagaagca

SEQ ID NO: 1743466 - DNA, 15 bp, Homo sapiens
agacaacagaagcat

SEQ ID NO: 1743467 - DNA, 15 bp, Homo sapiens
gacaacagaagcatt

SEQ ID NO: 1743468 - DNA, 15 bp, Homo sapiens
acaacagaagcatta

SEQ ID NO: 1743469 - DNA, 15 bp, Homo sapiens
caacagaagcattat

SEQ ID NO: 1743470 - DNA, 15 bp, Homo sapiens
aacagaagcattata

SEQ ID NO: 1743471 - DNA, 15 bp, Homo sapiens
acagaagcattatac

SEQ ID NO: 1743472 - DNA, 15 bp, Homo sapiens
cagaagcattatact

SEQ ID NO: 1743473 - DNA, 15 bp, Homo sapiens
agaagcattatactg

SEQ ID NO: 1743474 - DNA, 15 bp, Homo sapiens
gaagcattatactgc

SEQ ID NO: 1743475 - DNA, 15 bp, Homo sapiens
aagcattatactgct

SEQ ID NO: 1743476 - DNA, 15 bp, Homo sapiens
agcattatactgctt

SEQ ID NO: 1743477 - DNA, 15 bp, Homo sapiens
gcattatactgcttt

SEQ ID NO: 1743478 - DNA, 15 bp, Homo sapiens
cattatactgctttt

SEQ ID NO: 1743479 - DNA, 15 bp, Homo sapiens
attatactgcttttt

SEQ ID NO: 1743480 - DNA, 15 bp, Homo sapiens
ttatactgctttttt

SEQ ID NO: 1743481 - DNA, 15 bp, Homo sapiens
tatactgcttttttg

SEQ ID NO: 1743482 - DNA, 15 bp, Homo sapiens
atactgcttttttga

SEQ ID NO: 1743483 - DNA, 15 bp, Homo sapiens
tactgcttttttgat

SEQ ID NO: 1743484 - DNA, 15 bp, Homo sapiens
actgcttttttgatg

SEQ ID NO: 1743485 - DNA, 15 bp, Homo sapiens
ctgcttttttgatgc

SEQ ID NO: 1743486 - DNA, 15 bp, Homo sapiens
tgcttttttgatgca

SEQ ID NO: 1743487 - DNA, 15 bp, Homo sapiens
gcttttttgatgcat

SEQ ID NO: 1743488 - DNA, 15 bp, Homo sapiens
cttttttgatgcata

SEQ ID NO: 1743489 - DNA, 15 bp, Homo sapiens
ttttttgatgcataa

SEQ ID NO: 1743490 - DNA, 15 bp, Homo sapiens
tttttgatgcataaa

SEQ ID NO: 1743491 - DNA, 15 bp, Homo sapiens
ttttgatgcataaag

SEQ ID NO: 1743492 - DNA, 15 bp, Homo sapiens
tttgatgcataaagc

SEQ ID NO: 1743493 - DNA, 15 bp, Homo sapiens
ttgatgcataaagca

SEQ ID NO: 1743494 - DNA, 15 bp, Homo sapiens
tgatgcataaagcac

SEQ ID NO: 1743495 - DNA, 15 bp, Homo sapiens
gatgcataaagcaca

SEQ ID NO: 1743496 - DNA, 15 bp, Homo sapiens
atgcataaagcacaa

SEQ ID NO: 1743497 - DNA, 15 bp, Homo sapiens
tgcataaagcacaaa

SEQ ID NO: 1743498 - DNA, 15 bp, Homo sapiens
gcataaagcacaaat

SEQ ID NO: 1743499 - DNA, 15 bp, Homo sapiens
cataaagcacaaatt

SEQ ID NO: 1743500 - DNA, 15 bp, Homo sapiens
ataaagcacaaattg

SEQ ID NO: 1743501 - DNA, 15 bp, Homo sapiens
taaagcacaaattgt

SEQ ID NO: 1743502 - DNA, 15 bp, Homo sapiens
aaagcacaaattgta

SEQ ID NO: 1743503 - DNA, 15 bp, Homo sapiens
aagcacaaattgtaa

SEQ ID NO: 1743504 - DNA, 15 bp, Homo sapiens
agcacaaattgtaaa

SEQ ID NO: 1743505 - DNA, 15 bp, Homo sapiens
gcacaaattgtaaat

SEQ ID NO: 1743506 - DNA, 15 bp, Homo sapiens
cacaaattgtaaatt

SEQ ID NO: 1743507 - DNA, 15 bp, Homo sapiens
acaaattgtaaattt

SEQ ID NO: 1743508 - DNA, 15 bp, Homo sapiens
caaattgtaaatttt

SEQ ID NO: 1743509 - DNA, 15 bp, Homo sapiens
aaattgtaaattttc

SEQ ID NO: 1743510 - DNA, 15 bp, Homo sapiens
aattgtaaattttca

SEQ ID NO: 1743511 - DNA, 15 bp, Homo sapiens
attgtaaattttcag

SEQ ID NO: 1743512 - DNA, 15 bp, Homo sapiens
ttgtaaattttcagt

SEQ ID NO: 1743513 - DNA, 15 bp, Homo sapiens
tgtaaattttcagta

SEQ ID NO: 1743514 - DNA, 15 bp, Homo sapiens
gtaaattttcagtat

SEQ ID NO: 1743515 - DNA, 15 bp, Homo sapiens
taaattttcagtatg

SEQ ID NO: 1743516 - DNA, 15 bp, Homo sapiens
aaattttcagtatgt

SEQ ID NO: 1743517 - DNA, 15 bp, Homo sapiens
aattttcagtatgtg

SEQ ID NO: 1743518 - DNA, 15 bp, Homo sapiens
attttcagtatgtga

SEQ ID NO: 1743519 - DNA, 15 bp, Homo sapiens
ttttcagtatgtgaa

SEQ ID NO: 1743520 - DNA, 15 bp, Homo sapiens
tttcagtatgtgaat

SEQ ID NO: 1743521 - DNA, 15 bp, Homo sapiens
ttcagtatgtgaatg

SEQ ID NO: 1743522 - DNA, 15 bp, Homo sapiens
tcagtatgtgaatga

SEQ ID NO: 1743523 - DNA, 15 bp, Homo sapiens
cagtatgtgaatgac

SEQ ID NO: 1743524 - DNA, 15 bp, Homo sapiens
agtatgtgaatgact

SEQ ID NO: 1743525 - DNA, 15 bp, Homo sapiens
gtatgtgaatgactt

SEQ ID NO: 1743526 - DNA, 15 bp, Homo sapiens
tatgtgaatgacttc

SEQ ID NO: 1743527 - DNA, 15 bp, Homo sapiens
atgtgaatgacttca

SEQ ID NO: 1743528 - DNA, 15 bp, Homo sapiens
tgtgaatgacttcac

SEQ ID NO: 1743529 - DNA, 15 bp, Homo sapiens
gtgaatgacttcact

SEQ ID NO: 1743530 - DNA, 15 bp, Homo sapiens
tgaatgacttcactt

SEQ ID NO: 1743531 - DNA, 15 bp, Homo sapiens
gaatgacttcactta

SEQ ID NO: 1743532 - DNA, 15 bp, Homo sapiens
aatgacttcacttat

SEQ ID NO: 1743533 - DNA, 15 bp, Homo sapiens
atgacttcacttatt

SEQ ID NO: 1743534 - DNA, 15 bp, Homo sapiens
tgacttcacttattg

SEQ ID NO: 1743535 - DNA, 15 bp, Homo sapiens
gacttcacttattgt

SEQ ID NO: 1743536 - DNA, 15 bp, Homo sapiens
acttcacttattgtt

SEQ ID NO: 1743537 - DNA, 15 bp, Homo sapiens
cttcacttattgtta

SEQ ID NO: 1743538 - DNA, 15 bp, Homo sapiens
ttcacttattgttat

SEQ ID NO: 1743539 - DNA, 15 bp, Homo sapiens
tcacttattgttatt

SEQ ID NO: 1743540 - DNA, 15 bp, Homo sapiens
cacttattgttattt

SEQ ID NO: 1743541 - DNA, 15 bp, Homo sapiens
acttattgttattta

SEQ ID NO: 1743542 - DNA, 15 bp, Homo sapiens
cttattgttatttag

SEQ ID NO: 1743543 - DNA, 15 bp, Homo sapiens
ttattgttatttagt

SEQ ID NO: 1743544 - DNA, 15 bp, Homo sapiens
tattgttatttagtt

SEQ ID NO: 1743545 - DNA, 15 bp, Homo sapiens
attgttatttagttt

SEQ ID NO: 1743546 - DNA, 15 bp, Homo sapiens
ttgttatttagtttt

SEQ ID NO: 1743547 - DNA, 15 bp, Homo sapiens
tgttatttagttttg

SEQ ID NO: 1743548 - DNA, 15 bp, Homo sapiens
gttatttagttttga

SEQ ID NO: 1743549 - DNA, 15 bp, Homo sapiens
ttatttagttttgaa

SEQ ID NO: 1743550 - DNA, 15 bp, Homo sapiens
tatttagttttgaaa

SEQ ID NO: 1743551 - DNA, 15 bp, Homo sapiens
atttagttttgaaac

SEQ ID NO: 1743552 - DNA, 15 bp, Homo sapiens
tttagttttgaaaca

SEQ ID NO: 1743553 - DNA, 15 bp, Homo sapiens
ttagttttgaaacac

SEQ ID NO: 1743554 - DNA, 15 bp, Homo sapiens
tagttttgaaacaca

SEQ ID NO: 1743555 - DNA, 15 bp, Homo sapiens
agttttgaaacacag

SEQ ID NO: 1743556 - DNA, 15 bp, Homo sapiens
gttttgaaacacaga

SEQ ID NO: 1743557 - DNA, 15 bp, Homo sapiens
ttttgaaacacagag

SEQ ID NO: 1743558 - DNA, 15 bp, Homo sapiens
tttgaaacacagaga

SEQ ID NO: 1743559 - DNA, 15 bp, Homo sapiens
ttgaaacacagagaa

SEQ ID NO: 1743560 - DNA, 15 bp, Homo sapiens
tgaaacacagagaac

SEQ ID NO: 1743561 - DNA, 15 bp, Homo sapiens
gaaacacagagaaca

SEQ ID NO: 1743562 - DNA, 15 bp, Homo sapiens
aaacacagagaacac

SEQ ID NO: 1743563 - DNA, 15 bp, Homo sapiens
aacacagagaacacc

SEQ ID NO: 1743564 - DNA, 15 bp, Homo sapiens
acacagagaacacca

SEQ ID NO: 1743565 - DNA, 15 bp, Homo sapiens
cacagagaacaccac

SEQ ID NO: 1743566 - DNA, 15 bp, Homo sapiens
acagagaacaccacg

SEQ ID NO: 1743567 - DNA, 15 bp, Homo sapiens
cagagaacaccacga

SEQ ID NO: 1743568 - DNA, 15 bp, Homo sapiens
agagaacaccacgaa

SEQ ID NO: 1743569 - DNA, 15 bp, Homo sapiens
gagaacaccacgaaa

SEQ ID NO: 1743570 - DNA, 15 bp, Homo sapiens
agaacaccacgaaaa

SEQ ID NO: 1743571 - DNA, 15 bp, Homo sapiens
gaacaccacgaaaaa

SEQ ID NO: 1743572 - DNA, 15 bp, Homo sapiens
aacaccacgaaaaag

SEQ ID NO: 1743573 - DNA, 15 bp, Homo sapiens
acaccacgaaaaagt

SEQ ID NO: 1743574 - DNA, 15 bp, Homo sapiens
caccacgaaaaagta

SEQ ID NO: 1743575 - DNA, 15 bp, Homo sapiens
accacgaaaaagtaa

SEQ ID NO: 1743576 - DNA, 15 bp, Homo sapiens
ccacgaaaaagtaac

SEQ ID NO: 1743577 - DNA, 15 bp, Homo sapiens
cacgaaaaagtaacc

SEQ ID NO: 1743578 - DNA, 15 bp, Homo sapiens
acgaaaaagtaacct

SEQ ID NO: 1743579 - DNA, 15 bp, Homo sapiens
cgaaaaagtaacctt

SEQ ID NO: 1743580 - DNA, 15 bp, Homo sapiens
gaaaaagtaaccttg

SEQ ID NO: 1743581 - DNA, 15 bp, Homo sapiens
aaaaagtaaccttga

SEQ ID NO: 1743582 - DNA, 15 bp, Homo sapiens
aaaagtaaccttgat

SEQ ID NO: 1743583 - DNA, 15 bp, Homo sapiens
aaagtaaccttgatg

SEQ ID NO: 1743584 - DNA, 15 bp, Homo sapiens
aagtaaccttgatga

SEQ ID NO: 1743585 - DNA, 15 bp, Homo sapiens
agtaaccttgatgaa

SEQ ID NO: 1743586 - DNA, 15 bp, Homo sapiens
gtaaccttgatgaag

SEQ ID NO: 1743587 - DNA, 15 bp, Homo sapiens
taaccttgatgaaga

SEQ ID NO: 1743588 - DNA, 15 bp, Homo sapiens
aaccttgatgaagag

SEQ ID NO: 1743589 - DNA, 15 bp, Homo sapiens
accttgatgaagagg

SEQ ID NO: 1743590 - DNA, 15 bp, Homo sapiens
ccttgatgaagaggt

SEQ ID NO: 1743591 - DNA, 15 bp, Homo sapiens
cttgatgaagaggtg

SEQ ID NO: 1743592 - DNA, 15 bp, Homo sapiens
ttgatgaagaggtga

SEQ ID NO: 1743593 - DNA, 15 bp, Homo sapiens
tgatgaagaggtgaa

SEQ ID NO: 1743594 - DNA, 15 bp, Homo sapiens
gatgaagaggtgaat

SEQ ID NO: 1743595 - DNA, 15 bp, Homo sapiens
atgaagaggtgaatg

SEQ ID NO: 1743596 - DNA, 15 bp, Homo sapiens
tgaagaggtgaatgt

SEQ ID NO: 1743597 - DNA, 15 bp, Homo sapiens
gaagaggtgaatgta

SEQ ID NO: 1743598 - DNA, 15 bp, Homo sapiens
aagaggtgaatgtaa

SEQ ID NO: 1743599 - DNA, 15 bp, Homo sapiens
agaggtgaatgtaat

SEQ ID NO: 1743600 - DNA, 15 bp, Homo sapiens
gaggtgaatgtaatt

SEQ ID NO: 1743601 - DNA, 15 bp, Homo sapiens
aggtgaatgtaattc

SEQ ID NO: 1743602 - DNA, 15 bp, Homo sapiens
ggtgaatgtaattcc

SEQ ID NO: 1743603 - DNA, 15 bp, Homo sapiens
gtgaatgtaattcct

SEQ ID NO: 1743604 - DNA, 15 bp, Homo sapiens
tgaatgtaattcctc

SEQ ID NO: 1743605 - DNA, 15 bp, Homo sapiens
gaatgtaattcctcc

SEQ ID NO: 1743606 - DNA, 15 bp, Homo sapiens
aatgtaattcctcca

SEQ ID NO: 1743607 - DNA, 15 bp, Homo sapiens
atgtaattcctccac

SEQ ID NO: 1743608 - DNA, 15 bp, Homo sapiens
tgtaattcctccaca

SEQ ID NO: 1743609 - DNA, 15 bp, Homo sapiens
gtaattcctccacac

SEQ ID NO: 1743610 - DNA, 15 bp, Homo sapiens
taattcctccacaca

SEQ ID NO: 1743611 - DNA, 15 bp, Homo sapiens
aattcctccacacac

SEQ ID NO: 1743612 - DNA, 15 bp, Homo sapiens
attcctccacacact

SEQ ID NO: 1743613 - DNA, 15 bp, Homo sapiens
ttcctccacacactc

SEQ ID NO: 1743614 - DNA, 15 bp, Homo sapiens
tcctccacacactcc

SEQ ID NO: 1743615 - DNA, 15 bp, Homo sapiens
cctccacacactcca

SEQ ID NO: 1743616 - DNA, 15 bp, Homo sapiens
ctccacacactccag

SEQ ID NO: 1743617 - DNA, 15 bp, Homo sapiens
tccacacactccagt

SEQ ID NO: 1743618 - DNA, 15 bp, Homo sapiens
ccacacactccagtt

SEQ ID NO: 1743619 - DNA, 15 bp, Homo sapiens
cacacactccagtta

SEQ ID NO: 1743620 - DNA, 15 bp, Homo sapiens
acacactccagttag

SEQ ID NO: 1743621 - DNA, 15 bp, Homo sapiens
cacactccagttagg

SEQ ID NO: 1743622 - DNA, 15 bp, Homo sapiens
acactccagttaggt

SEQ ID NO: 1743623 - DNA, 15 bp, Homo sapiens
cactccagttaggta

SEQ ID NO: 1743624 - DNA, 15 bp, Homo sapiens
actccagttaggtat

SEQ ID NO: 1743625 - DNA, 15 bp, Homo sapiens
ctccagttaggtatg

SEQ ID NO: 1743626 - DNA, 15 bp, Homo sapiens
tccagttaggtatga

SEQ ID NO: 1743627 - DNA, 15 bp, Homo sapiens
ccagttaggtatgaa

SEQ ID NO: 1743628 - DNA, 15 bp, Homo sapiens
cagttaggtatgaat

SEQ ID NO: 1743629 - DNA, 15 bp, Homo sapiens
agttaggtatgaatt

SEQ ID NO: 1743630 - DNA, 15 bp, Homo sapiens
gttaggtatgaattt

SEQ ID NO: 1743631 - DNA, 15 bp, Homo sapiens
ttaggtatgaatttt

SEQ ID NO: 1743632 - DNA, 15 bp, Homo sapiens
taggtatgaattttc

SEQ ID NO: 1743633 - DNA, 15 bp, Homo sapiens
aggtatgaattttcc

SEQ ID NO: 1743634 - DNA, 15 bp, Homo sapiens
ggtatgaattttcct

SEQ ID NO: 1743635 - DNA, 15 bp, Homo sapiens
gtatgaattttccta

SEQ ID NO: 1743636 - DNA, 15 bp, Homo sapiens
tatgaattttcctac

SEQ ID NO: 1743637 - DNA, 15 bp, Homo sapiens
atgaattttcctact

SEQ ID NO: 1743638 - DNA, 15 bp, Homo sapiens
tgaattttcctactt

SEQ ID NO: 1743639 - DNA, 15 bp, Homo sapiens
gaattttcctacttt

SEQ ID NO: 1743640 - DNA, 15 bp, Homo sapiens
aattttcctactttt

SEQ ID NO: 1743641 - DNA, 15 bp, Homo sapiens
attttcctactttta

SEQ ID NO: 1743642 - DNA, 15 bp, Homo sapiens
ttttcctacttttaa

SEQ ID NO: 1743643 - DNA, 15 bp, Homo sapiens
tttcctacttttaat

SEQ ID NO: 1743644 - DNA, 15 bp, Homo sapiens
ttcctacttttaatt

SEQ ID NO: 1743645 - DNA, 15 bp, Homo sapiens
tcctacttttaatta

SEQ ID NO: 1743646 - DNA, 15 bp, Homo sapiens
cctacttttaattat

SEQ ID NO: 1743647 - DNA, 15 bp, Homo sapiens
ctacttttaattata

SEQ ID NO: 1743648 - DNA, 15 bp, Homo sapiens
tacttttaattatat

SEQ ID NO: 1743649 - DNA, 15 bp, Homo sapiens
acttttaattatatt

SEQ ID NO: 1743650 - DNA, 15 bp, Homo sapiens
cttttaattatatta

SEQ ID NO: 1743651 - DNA, 15 bp, Homo sapiens
ttttaattatattat

SEQ ID NO: 1743652 - DNA, 15 bp, Homo sapiens
tttaattatattata

SEQ ID NO: 1743653 - DNA, 15 bp, Homo sapiens
ttaattatattataa

SEQ ID NO: 1743654 - DNA, 15 bp, Homo sapiens
taattatattataat

SEQ ID NO: 1743655 - DNA, 15 bp, Homo sapiens
aattatattataatt

SEQ ID NO: 1743656 - DNA, 15 bp, Homo sapiens
attatattataattt

SEQ ID NO: 1743657 - DNA, 15 bp, Homo sapiens
ttatattataatttt

SEQ ID NO: 1743658 - DNA, 15 bp, Homo sapiens
tatattataattttg

SEQ ID NO: 1743659 - DNA, 15 bp, Homo sapiens
atattataattttgt

SEQ ID NO: 1743660 - DNA, 15 bp, Homo sapiens
tattataattttgtt

SEQ ID NO: 1743661 - DNA, 15 bp, Homo sapiens
attataattttgtta

SEQ ID NO: 1743662 - DNA, 15 bp, Homo sapiens
ttataattttgttat

SEQ ID NO: 1743663 - DNA, 15 bp, Homo sapiens
tataattttgttatt

SEQ ID NO: 1743664 - DNA, 15 bp, Homo sapiens
ataattttgttattc

SEQ ID NO: 1743665 - DNA, 15 bp, Homo sapiens
taattttgttattca

SEQ ID NO: 1743666 - DNA, 15 bp, Homo sapiens
aattttgttattcat

SEQ ID NO: 1743667 - DNA, 15 bp, Homo sapiens
attttgttattcatg

SEQ ID NO: 1743668 - DNA, 15 bp, Homo sapiens
ttttgttattcatgg

SEQ ID NO: 1743669 - DNA, 15 bp, Homo sapiens
tttgttattcatggc

SEQ ID NO: 1743670 - DNA, 15 bp, Homo sapiens
ttgttattcatggct

SEQ ID NO: 1743671 - DNA, 15 bp, Homo sapiens
tgttattcatggctt

SEQ ID NO: 1743672 - DNA, 15 bp, Homo sapiens
gttattcatggcttt

SEQ ID NO: 1743673 - DNA, 15 bp, Homo sapiens
ttattcatggcttta

SEQ ID NO: 1743674 - DNA, 15 bp, Homo sapiens
tattcatggctttat

SEQ ID NO: 1743675 - DNA, 15 bp, Homo sapiens
attcatggctttata

SEQ ID NO: 1743676 - DNA, 15 bp, Homo sapiens
ttcatggctttatag

SEQ ID NO: 1743677 - DNA, 15 bp, Homo sapiens
tcatggctttatagt

SEQ ID NO: 1743678 - DNA, 15 bp, Homo sapiens
catggctttatagtg

SEQ ID NO: 1743679 - DNA, 15 bp, Homo sapiens
atggctttatagtgt

SEQ ID NO: 1743680 - DNA, 15 bp, Homo sapiens
tggctttatagtgtt

SEQ ID NO: 1743681 - DNA, 15 bp, Homo sapiens
ggctttatagtgttt

SEQ ID NO: 1743682 - DNA, 15 bp, Homo sapiens
gctttatagtgtttc

SEQ ID NO: 1743683 - DNA, 15 bp, Homo sapiens
ctttatagtgtttca

SEQ ID NO: 1743684 - DNA, 15 bp, Homo sapiens
tttatagtgtttcag

SEQ ID NO: 1743685 - DNA, 15 bp, Homo sapiens
ttatagtgtttcaga

SEQ ID NO: 1743686 - DNA, 15 bp, Homo sapiens
tatagtgtttcagat

SEQ ID NO: 1743687 - DNA, 15 bp, Homo sapiens
atagtgtttcagatt

SEQ ID NO: 1743688 - DNA, 15 bp, Homo sapiens
tagtgtttcagattt

SEQ ID NO: 1743689 - DNA, 15 bp, Homo sapiens
agtgtttcagatttg

SEQ ID NO: 1743690 - DNA, 15 bp, Homo sapiens
gtgtttcagatttgt

SEQ ID NO: 1743691 - DNA, 15 bp, Homo sapiens
tgtttcagatttgtt

SEQ ID NO: 1743692 - DNA, 15 bp, Homo sapiens
gtttcagatttgttc

SEQ ID NO: 1743693 - DNA, 15 bp, Homo sapiens
tttcagatttgttca

SEQ ID NO: 1743694 - DNA, 15 bp, Homo sapiens
ttcagatttgttcac

SEQ ID NO: 1743695 - DNA, 15 bp, Homo sapiens
tcagatttgttcacg

SEQ ID NO: 1743696 - DNA, 15 bp, Homo sapiens
cagatttgttcacgt

SEQ ID NO: 1743697 - DNA, 15 bp, Homo sapiens
agatttgttcacgtt

SEQ ID NO: 1743698 - DNA, 15 bp, Homo sapiens
gatttgttcacgttt

SEQ ID NO: 1743699 - DNA, 15 bp, Homo sapiens
atttgttcacgtttc

SEQ ID NO: 1743700 - DNA, 15 bp, Homo sapiens
tttgttcacgtttct

SEQ ID NO: 1743701 - DNA, 15 bp, Homo sapiens
ttgttcacgtttctt

SEQ ID NO: 1743702 - DNA, 15 bp, Homo sapiens
tgttcacgtttcttt

SEQ ID NO: 1743703 - DNA, 15 bp, Homo sapiens
gttcacgtttcttta

SEQ ID NO: 1743704 - DNA, 15 bp, Homo sapiens
ttcacgtttctttat

SEQ ID NO: 1743705 - DNA, 15 bp, Homo sapiens
tcacgtttctttatg

SEQ ID NO: 1743706 - DNA, 15 bp, Homo sapiens
cacgtttctttatgt

SEQ ID NO: 1743707 - DNA, 15 bp, Homo sapiens
acgtttctttatgta

SEQ ID NO: 1743708 - DNA, 15 bp, Homo sapiens
cgtttctttatgtat

SEQ ID NO: 1743709 - DNA, 15 bp, Homo sapiens
gtttctttatgtatt

SEQ ID NO: 1743710 - DNA, 15 bp, Homo sapiens
tttctttatgtattc

SEQ ID NO: 1743711 - DNA, 15 bp, Homo sapiens
ttctttatgtattca

SEQ ID NO: 1743712 - DNA, 15 bp, Homo sapiens
tctttatgtattcat

SEQ ID NO: 1743713 - DNA, 15 bp, Homo sapiens
ctttatgtattcata

SEQ ID NO: 1743714 - DNA, 15 bp, Homo sapiens
tttatgtattcatac

SEQ ID NO: 1743715 - DNA, 15 bp, Homo sapiens
ttatgtattcataca

SEQ ID NO: 1743716 - DNA, 15 bp, Homo sapiens
tatgtattcatacat

SEQ ID NO: 1743717 - DNA, 15 bp, Homo sapiens
atgtattcatacata

SEQ ID NO: 1743718 - DNA, 15 bp, Homo sapiens
tgtattcatacatac

SEQ ID NO: 1743719 - DNA, 15 bp, Homo sapiens
gtattcatacataca

SEQ ID NO: 1743720 - DNA, 15 bp, Homo sapiens
tattcatacatacat

SEQ ID NO: 1743721 - DNA, 15 bp, Homo sapiens
attcatacatacatg

SEQ ID NO: 1743722 - DNA, 15 bp, Homo sapiens
ttcatacatacatgt

SEQ ID NO: 1743723 - DNA, 15 bp, Homo sapiens
catacatacatgtaa

SEQ ID NO: 1743724 - DNA, 15 bp, Homo sapiens
atacatacatgtaag

SEQ ID NO: 1743725 - DNA, 15 bp, Homo sapiens
tacatacatgtaaga

SEQ ID NO: 1743726 - DNA, 15 bp, Homo sapiens
acatacatgtaagaa

SEQ ID NO: 1743727 - DNA, 15 bp, Homo sapiens
catacatgtaagaaa

SEQ ID NO: 1743728 - DNA, 15 bp, Homo sapiens
atacatgtaagaaat

SEQ ID NO: 1743729 - DNA, 15 bp, Homo sapiens
tacatgtaagaaata

SEQ ID NO: 1743730 - DNA, 15 bp, Homo sapiens
acatgtaagaaatat

SEQ ID NO: 1743731 - DNA, 15 bp, Homo sapiens
catgtaagaaatata

SEQ ID NO: 1743732 - DNA, 15 bp, Homo sapiens
atgtaagaaatatat

SEQ ID NO: 1743733 - DNA, 15 bp, Homo sapiens
tgtaagaaatatata

SEQ ID NO: 1743734 - DNA, 15 bp, Homo sapiens
gtaagaaatatatat

SEQ ID NO: 1743735 - DNA, 15 bp, Homo sapiens
taagaaatatatatt

SEQ ID NO: 1743736 - DNA, 15 bp, Homo sapiens
aagaaatatatattg

SEQ ID NO: 1743737 - DNA, 15 bp, Homo sapiens
agaaatatatattga

SEQ ID NO: 1743738 - DNA, 15 bp, Homo sapiens
gaaatatatattgaa

SEQ ID NO: 1743739 - DNA, 15 bp, Homo sapiens
aaatatatattgaag

SEQ ID NO: 1743740 - DNA, 15 bp, Homo sapiens
aatatatattgaagg

SEQ ID NO: 1743741 - DNA, 15 bp, Homo sapiens
atatatattgaaggc

SEQ ID NO: 1743742 - DNA, 15 bp, Homo sapiens
tatatattgaaggcc

SEQ ID NO: 1743743 - DNA, 15 bp, Homo sapiens
atatattgaaggcca

SEQ ID NO: 1743744 - DNA, 15 bp, Homo sapiens
tatattgaaggccag

SEQ ID NO: 1743745 - DNA, 15 bp, Homo sapiens
atattgaaggccagg

SEQ ID NO: 1743746 - DNA, 15 bp, Homo sapiens
tattgaaggccaggt

SEQ ID NO: 1743747 - DNA, 15 bp, Homo sapiens
attgaaggccaggtg

SEQ ID NO: 1743748 - DNA, 15 bp, Homo sapiens
ttgaaggccaggtgt

SEQ ID NO: 1743749 - DNA, 15 bp, Homo sapiens
tgaaggccaggtgtg

SEQ ID NO: 1743750 - DNA, 15 bp, Homo sapiens
gaaggccaggtgtgg

SEQ ID NO: 1743751 - DNA, 15 bp, Homo sapiens
aaggccaggtgtggt

SEQ ID NO: 1743752 - DNA, 15 bp, Homo sapiens
gccaggtgtggtgga

SEQ ID NO: 1743753 - DNA, 15 bp, Homo sapiens
ccaggtgtggtggat

SEQ ID NO: 1743754 - DNA, 15 bp, Homo sapiens
caggtgtggtggatc

SEQ ID NO: 1743755 - DNA, 15 bp, Homo sapiens
aggtgtggtggatca

SEQ ID NO: 1743756 - DNA, 15 bp, Homo sapiens
ggtgtggtggatcac

SEQ ID NO: 1743757 - DNA, 15 bp, Homo sapiens
gtgtggtggatcaca

SEQ ID NO: 1743758 - DNA, 15 bp, Homo sapiens
tgtggtggatcacac

SEQ ID NO: 1743759 - DNA, 15 bp, Homo sapiens
gtggtggatcacacc

SEQ ID NO: 1743760 - DNA, 15 bp, Homo sapiens
tggtggatcacacct

SEQ ID NO: 1743761 - DNA, 15 bp, Homo sapiens
ggtggatcacacctg

SEQ ID NO: 1743762 - DNA, 15 bp, Homo sapiens
gtggatcacacctgt

SEQ ID NO: 1743763 - DNA, 15 bp, Homo sapiens
tggatcacacctgta

SEQ ID NO: 1743764 - DNA, 15 bp, Homo sapiens
ggatcacacctgtaa

SEQ ID NO: 1743765 - DNA, 15 bp, Homo sapiens
gatcacacctgtaat

SEQ ID NO: 1743766 - DNA, 15 bp, Homo sapiens
atcacacctgtaatc

SEQ ID NO: 1743767 - DNA, 15 bp, Homo sapiens
ggcgggcagatcacc

SEQ ID NO: 1743768 - DNA, 15 bp, Homo sapiens
gcgggcagatcacct

SEQ ID NO: 1743769 - DNA, 15 bp, Homo sapiens
cgggcagatcacctg

SEQ ID NO: 1743770 - DNA, 15 bp, Homo sapiens
gaggttaggagtttg

SEQ ID NO: 1743771 - DNA, 15 bp, Homo sapiens
aggttaggagtttga

SEQ ID NO: 1743772 - DNA, 15 bp, Homo sapiens
ggttaggagtttgag

SEQ ID NO: 1743773 - DNA, 15 bp, Homo sapiens
gttaggagtttgaga

SEQ ID NO: 1743774 - DNA, 15 bp, Homo sapiens
ttaggagtttgagac

SEQ ID NO: 1743775 - DNA, 15 bp, Homo sapiens
aggagtttgagaccg

SEQ ID NO: 1743776 - DNA, 15 bp, Homo sapiens
gtttgagaccggcct

SEQ ID NO: 1743777 - DNA, 15 bp, Homo sapiens
tttgagaccggcctg

SEQ ID NO: 1743778 - DNA, 15 bp, Homo sapiens
ttgagaccggcctgg

SEQ ID NO: 1743779 - DNA, 15 bp, Homo sapiens
tgagaccggcctggc

SEQ ID NO: 1743780 - DNA, 15 bp, Homo sapiens
gagaccggcctggcc

SEQ ID NO: 1743781 - DNA, 15 bp, Homo sapiens
agaccggcctggcca

SEQ ID NO: 1743782 - DNA, 15 bp, Homo sapiens
gaccggcctggccaa

SEQ ID NO: 1743783 - DNA, 15 bp, Homo sapiens
accggcctggccaac

SEQ ID NO: 1743784 - DNA, 15 bp, Homo sapiens
ccggcctggccaaca

SEQ ID NO: 1743785 - DNA, 15 bp, Homo sapiens
cggcctggccaacat

SEQ ID NO: 1743786 - DNA, 15 bp, Homo sapiens
ggcctggccaacatg

SEQ ID NO: 1743787 - DNA, 15 bp, Homo sapiens
ccccgtctctactag

SEQ ID NO: 1743788 - DNA, 15 bp, Homo sapiens
cccgtctctactaga

SEQ ID NO: 1743789 - DNA, 15 bp, Homo sapiens
ccgtctctactagaa

SEQ ID NO: 1743790 - DNA, 15 bp, Homo sapiens
cgtctctactagaaa

SEQ ID NO: 1743791 - DNA, 15 bp, Homo sapiens
gtctctactagaaat

SEQ ID NO: 1743792 - DNA, 15 bp, Homo sapiens
tctctactagaaata

SEQ ID NO: 1743793 - DNA, 15 bp, Homo sapiens
ctctactagaaatac

SEQ ID NO: 1743794 - DNA, 15 bp, Homo sapiens
tctactagaaataca

SEQ ID NO: 1743795 - DNA, 15 bp, Homo sapiens
ctactagaaatacaa

SEQ ID NO: 1743796 - DNA, 15 bp, Homo sapiens
tactagaaatacaaa

SEQ ID NO: 1743797 - DNA, 15 bp, Homo sapiens
actagaaatacaaaa

SEQ ID NO: 1743798 - DNA, 15 bp, Homo sapiens
ctagaaatacaaaaa

SEQ ID NO: 1743799 - DNA, 15 bp, Homo sapiens
tagaaatacaaaaat

SEQ ID NO: 1743800 - DNA, 15 bp, Homo sapiens
agaaatacaaaaatt

SEQ ID NO: 1743801 - DNA, 15 bp, Homo sapiens
gaaatacaaaaatta

SEQ ID NO: 1743802 - DNA, 15 bp, Homo sapiens
aaaaattagctgggg

SEQ ID NO: 1743803 - DNA, 15 bp, Homo sapiens
aaaattagctggggg

SEQ ID NO: 1743804 - DNA, 15 bp, Homo sapiens
aaattagctgggggt

SEQ ID NO: 1743805 - DNA, 15 bp, Homo sapiens
aattagctgggggtg

SEQ ID NO: 1743806 - DNA, 15 bp, Homo sapiens
attagctgggggtgg

SEQ ID NO: 1743807 - DNA, 15 bp, Homo sapiens
ttagctgggggtggt

SEQ ID NO: 1743808 - DNA, 15 bp, Homo sapiens
tagctgggggtggtg

SEQ ID NO: 1743809 - DNA, 15 bp, Homo sapiens
agctgggggtggtgg

SEQ ID NO: 1743810 - DNA, 15 bp, Homo sapiens
gctgggggtggtggt

SEQ ID NO: 1743811 - DNA, 15 bp, Homo sapiens
ctgggggtggtggtg

SEQ ID NO: 1743812 - DNA, 15 bp, Homo sapiens
tgggggtggtggtgt

SEQ ID NO: 1743813 - DNA, 15 bp, Homo sapiens
gggggtggtggtgtg

SEQ ID NO: 1743814 - DNA, 15 bp, Homo sapiens
ggggtggtggtgtgt

SEQ ID NO: 1743815 - DNA, 15 bp, Homo sapiens
gggtggtggtgtgtg

SEQ ID NO: 1743816 - DNA, 15 bp, Homo sapiens
ggtggtggtgtgtgc

SEQ ID NO: 1743817 - DNA, 15 bp, Homo sapiens
gtggtggtgtgtgcc

SEQ ID NO: 1743818 - DNA, 15 bp, Homo sapiens
ggtggtgtgtgcctg

SEQ ID NO: 1743819 - DNA, 15 bp, Homo sapiens
gtggtgtgtgcctgt

SEQ ID NO: 1743820 - DNA, 15 bp, Homo sapiens
tggtgtgtgcctgta

SEQ ID NO: 1743821 - DNA, 15 bp, Homo sapiens
ggtgtgtgcctgtaa

SEQ ID NO: 1743822 - DNA, 15 bp, Homo sapiens
gtgtgtgcctgtaat

SEQ ID NO: 1743823 - DNA, 15 bp, Homo sapiens
tgtgtgcctgtaatc

SEQ ID NO: 1743824 - DNA, 15 bp, Homo sapiens
taatcccagctgctc

SEQ ID NO: 1743825 - DNA, 15 bp, Homo sapiens
aatcccagctgctcg

SEQ ID NO: 1743826 - DNA, 15 bp, Homo sapiens
atcccagctgctcgg

SEQ ID NO: 1743827 - DNA, 15 bp, Homo sapiens
attgcttgaacccgg

SEQ ID NO: 1743828 - DNA, 15 bp, Homo sapiens
ttgcttgaacccggg

SEQ ID NO: 1743829 - DNA, 15 bp, Homo sapiens
tgcttgaacccggga

SEQ ID NO: 1743830 - DNA, 15 bp, Homo sapiens
ggcggaggttgcaga

SEQ ID NO: 1743831 - DNA, 15 bp, Homo sapiens
gcggaggttgcagag

SEQ ID NO: 1743832 - DNA, 15 bp, Homo sapiens
cggaggttgcagaga

SEQ ID NO: 1743833 - DNA, 15 bp, Homo sapiens
ggaggttgcagagag

SEQ ID NO: 1743834 - DNA, 15 bp, Homo sapiens
gaggttgcagagagc

SEQ ID NO: 1743835 - DNA, 15 bp, Homo sapiens
aggttgcagagagct

SEQ ID NO: 1743836 - DNA, 15 bp, Homo sapiens
ggttgcagagagctg

SEQ ID NO: 1743837 - DNA, 15 bp, Homo sapiens
gttgcagagagctga

SEQ ID NO: 1743838 - DNA, 15 bp, Homo sapiens
ttgcagagagctgag

SEQ ID NO: 1743839 - DNA, 15 bp, Homo sapiens
tgcagagagctgaga

SEQ ID NO: 1743840 - DNA, 15 bp, Homo sapiens
gcagagagctgagat

SEQ ID NO: 1743841 - DNA, 15 bp, Homo sapiens
cagagagctgagatc

SEQ ID NO: 1743842 - DNA, 15 bp, Homo sapiens
agagagctgagatcg

SEQ ID NO: 1743843 - DNA, 15 bp, Homo sapiens
gagagctgagatcgt

SEQ ID NO: 1743844 - DNA, 15 bp, Homo sapiens
agagctgagatcgtg

SEQ ID NO: 1743845 - DNA, 15 bp, Homo sapiens
ctgagatcgtgccat

SEQ ID NO: 1743846 - DNA, 15 bp, Homo sapiens
tgagatcgtgccatt

SEQ ID NO: 1743847 - DNA, 15 bp, Homo sapiens
gagatcgtgccattg

SEQ ID NO: 1743848 - DNA, 15 bp, Homo sapiens
cgtgccattgcactt

SEQ ID NO: 1743849 - DNA, 15 bp, Homo sapiens
gtgccattgcacttc

SEQ ID NO: 1743850 - DNA, 15 bp, Homo sapiens
tgccattgcacttca

SEQ ID NO: 1743851 - DNA, 15 bp, Homo sapiens
gccattgcacttcag

SEQ ID NO: 1743852 - DNA, 15 bp, Homo sapiens
ccattgcacttcagc

SEQ ID NO: 1743853 - DNA, 15 bp, Homo sapiens
cattgcacttcagcc

SEQ ID NO: 1743854 - DNA, 15 bp, Homo sapiens
attgcacttcagcct

SEQ ID NO: 1743855 - DNA, 15 bp, Homo sapiens
ttgcacttcagcctg

SEQ ID NO: 1743856 - DNA, 15 bp, Homo sapiens
cacttcagcctgggt

SEQ ID NO: 1743857 - DNA, 15 bp, Homo sapiens
acttcagcctgggtg

SEQ ID NO: 1743858 - DNA, 15 bp, Homo sapiens
cttcagcctgggtga

SEQ ID NO: 1743859 - DNA, 15 bp, Homo sapiens
ttcagcctgggtgac

SEQ ID NO: 1743860 - DNA, 15 bp, Homo sapiens
tcagcctgggtgaca

SEQ ID NO: 1743861 - DNA, 15 bp, Homo sapiens
tctcaaaaaaaaaat

SEQ ID NO: 1743862 - DNA, 15 bp, Homo sapiens
ctcaaaaaaaaaatg

SEQ ID NO: 1743863 - DNA, 15 bp, Homo sapiens
tcaaaaaaaaaatgt

SEQ ID NO: 1743864 - DNA, 15 bp, Homo sapiens
caaaaaaaaaatgtg

SEQ ID NO: 1743865 - DNA, 15 bp, Homo sapiens
aaaaaaaaaatgtgt

SEQ ID NO: 1743866 - DNA, 15 bp, Homo sapiens
aaaaaaaaatgtgta

SEQ ID NO: 1743867 - DNA, 15 bp, Homo sapiens
aaaaaaaatgtgtat

SEQ ID NO: 1743868 - DNA, 15 bp, Homo sapiens
aaaaaaatgtgtata

SEQ ID NO: 1743869 - DNA, 15 bp, Homo sapiens
aaaaaatgtgtatat

SEQ ID NO: 1743870 - DNA, 15 bp, Homo sapiens
aaaaatgtgtatata

SEQ ID NO: 1743871 - DNA, 15 bp, Homo sapiens
aaaatgtgtatatat

SEQ ID NO: 1743872 - DNA, 15 bp, Homo sapiens
aaatgtgtatatata

SEQ ID NO: 1743873 - DNA, 15 bp, Homo sapiens
aatgtgtatatataa

SEQ ID NO: 1743874 - DNA, 15 bp, Homo sapiens
atgtgtatatataat

SEQ ID NO: 1743875 - DNA, 15 bp, Homo sapiens
tgtgtatatataatc

SEQ ID NO: 1743876 - DNA, 15 bp, Homo sapiens
gtgtatatataatct

SEQ ID NO: 1743877 - DNA, 15 bp, Homo sapiens
tgtatatataatctt

SEQ ID NO: 1743878 - DNA, 15 bp, Homo sapiens
gtatatataatcttt

SEQ ID NO: 1743879 - DNA, 15 bp, Homo sapiens
tatatataatctttg

SEQ ID NO: 1743880 - DNA, 15 bp, Homo sapiens
atatataatctttgt

SEQ ID NO: 1743881 - DNA, 15 bp, Homo sapiens
tatataatctttgtg

SEQ ID NO: 1743882 - DNA, 15 bp, Homo sapiens
atataatctttgtgt

SEQ ID NO: 1743883 - DNA, 15 bp, Homo sapiens
tataatctttgtgtg

SEQ ID NO: 1743884 - DNA, 15 bp, Homo sapiens
ataatctttgtgtgc

SEQ ID NO: 1743885 - DNA, 15 bp, Homo sapiens
taatctttgtgtgct

SEQ ID NO: 1743886 - DNA, 15 bp, Homo sapiens
aatctttgtgtgctg

SEQ ID NO: 1743887 - DNA, 15 bp, Homo sapiens
atctttgtgtgctgg

SEQ ID NO: 1743888 - DNA, 15 bp, Homo sapiens
tctttgtgtgctggg

SEQ ID NO: 1743889 - DNA, 15 bp, Homo sapiens
ctttgtgtgctgggc

SEQ ID NO: 1743890 - DNA, 15 bp, Homo sapiens
tttgtgtgctgggca

SEQ ID NO: 1743891 - DNA, 15 bp, Homo sapiens
ttgtgtgctgggcat

SEQ ID NO: 1743892 - DNA, 15 bp, Homo sapiens
tgtgtgctgggcatt

SEQ ID NO: 1743893 - DNA, 15 bp, Homo sapiens
gtgtgctgggcattt

SEQ ID NO: 1743894 - DNA, 15 bp, Homo sapiens
tgtgctgggcatttt

SEQ ID NO: 1743895 - DNA, 15 bp, Homo sapiens
gtgctgggcatttta

SEQ ID NO: 1743896 - DNA, 15 bp, Homo sapiens
tgctgggcattttac

SEQ ID NO: 1743897 - DNA, 15 bp, Homo sapiens
gctgggcattttact

SEQ ID NO: 1743898 - DNA, 15 bp, Homo sapiens
ctgggcattttactg

SEQ ID NO: 1743899 - DNA, 15 bp, Homo sapiens
tgggcattttactgg

SEQ ID NO: 1743900 - DNA, 15 bp, Homo sapiens
gggcattttactggt

SEQ ID NO: 1743901 - DNA, 15 bp, Homo sapiens
ggcattttactggtt

SEQ ID NO: 1743902 - DNA, 15 bp, Homo sapiens
gcattttactggttg

SEQ ID NO: 1743903 - DNA, 15 bp, Homo sapiens
cattttactggttgc

SEQ ID NO: 1743904 - DNA, 15 bp, Homo sapiens
attttactggttgct

SEQ ID NO: 1743905 - DNA, 15 bp, Homo sapiens
ttttactggttgctg

SEQ ID NO: 1743906 - DNA, 15 bp, Homo sapiens
tttactggttgctga

SEQ ID NO: 1743907 - DNA, 15 bp, Homo sapiens
ttactggttgctgaa

SEQ ID NO: 1743908 - DNA, 15 bp, Homo sapiens
tactggttgctgaag

SEQ ID NO: 1743909 - DNA, 15 bp, Homo sapiens
actggttgctgaaga

SEQ ID NO: 1743910 - DNA, 15 bp, Homo sapiens
ctggttgctgaagat

SEQ ID NO: 1743911 - DNA, 15 bp, Homo sapiens
tggttgctgaagata

SEQ ID NO: 1743912 - DNA, 15 bp, Homo sapiens
ggttgctgaagatat

SEQ ID NO: 1743913 - DNA, 15 bp, Homo sapiens
gttgctgaagatatg

SEQ ID NO: 1743914 - DNA, 15 bp, Homo sapiens
ttgctgaagatatgg

SEQ ID NO: 1743915 - DNA, 15 bp, Homo sapiens
tgctgaagatatggt

SEQ ID NO: 1743916 - DNA, 15 bp, Homo sapiens
gctgaagatatggtt

SEQ ID NO: 1743917 - DNA, 15 bp, Homo sapiens
ctgaagatatggtta

SEQ ID NO: 1743918 - DNA, 15 bp, Homo sapiens
tgaagatatggttat

SEQ ID NO: 1743919 - DNA, 15 bp, Homo sapiens
gaagatatggttatt

SEQ ID NO: 1743920 - DNA, 15 bp, Homo sapiens
aagatatggttattg

SEQ ID NO: 1743921 - DNA, 15 bp, Homo sapiens
agatatggttattgg

SEQ ID NO: 1743922 - DNA, 15 bp, Homo sapiens
gatatggttattgga

SEQ ID NO: 1743923 - DNA, 15 bp, Homo sapiens
atatggttattggac

SEQ ID NO: 1743924 - DNA, 15 bp, Homo sapiens
tatggttattggacc

SEQ ID NO: 1743925 - DNA, 15 bp, Homo sapiens
atggttattggacct

SEQ ID NO: 1743926 - DNA, 15 bp, Homo sapiens
tggttattggaccta

SEQ ID NO: 1743927 - DNA, 15 bp, Homo sapiens
ggttattggacctag

SEQ ID NO: 1743928 - DNA, 15 bp, Homo sapiens
gttattggacctagt

SEQ ID NO: 1743929 - DNA, 15 bp, Homo sapiens
ttattggacctagtt

SEQ ID NO: 1743930 - DNA, 15 bp, Homo sapiens
tattggacctagttt

SEQ ID NO: 1743931 - DNA, 15 bp, Homo sapiens
attggacctagtttt

SEQ ID NO: 1743932 - DNA, 15 bp, Homo sapiens
ttggacctagttttg

SEQ ID NO: 1743933 - DNA, 15 bp, Homo sapiens
tggacctagttttgt

SEQ ID NO: 1743934 - DNA, 15 bp, Homo sapiens
ggacctagttttgtc

SEQ ID NO: 1743935 - DNA, 15 bp, Homo sapiens
gacctagttttgtct

SEQ ID NO: 1743936 - DNA, 15 bp, Homo sapiens
acctagttttgtctg

SEQ ID NO: 1743937 - DNA, 15 bp, Homo sapiens
cctagttttgtctgt

SEQ ID NO: 1743938 - DNA, 15 bp, Homo sapiens
ctagttttgtctgtt

SEQ ID NO: 1743939 - DNA, 15 bp, Homo sapiens
tagttttgtctgttc

SEQ ID NO: 1743940 - DNA, 15 bp, Homo sapiens
agttttgtctgttct

SEQ ID NO: 1743941 - DNA, 15 bp, Homo sapiens
gttttgtctgttctt

SEQ ID NO: 1743942 - DNA, 15 bp, Homo sapiens
ttttgtctgttctta

SEQ ID NO: 1743943 - DNA, 15 bp, Homo sapiens
tttgtctgttcttaa

SEQ ID NO: 1743944 - DNA, 15 bp, Homo sapiens
ttgtctgttcttaaa

SEQ ID NO: 1743945 - DNA, 15 bp, Homo sapiens
tgtctgttcttaaag

SEQ ID NO: 1743946 - DNA, 15 bp, Homo sapiens
gtctgttcttaaaga

SEQ ID NO: 1743947 - DNA, 15 bp, Homo sapiens
tctgttcttaaagaa

SEQ ID NO: 1743948 - DNA, 15 bp, Homo sapiens
ctgttcttaaagaac

SEQ ID NO: 1743949 - DNA, 15 bp, Homo sapiens
tgttcttaaagaaca

SEQ ID NO: 1743950 - DNA, 15 bp, Homo sapiens
gttcttaaagaacat

SEQ ID NO: 1743951 - DNA, 15 bp, Homo sapiens
ttcttaaagaacata

SEQ ID NO: 1743952 - DNA, 15 bp, Homo sapiens
tcttaaagaacataa

SEQ ID NO: 1743953 - DNA, 15 bp, Homo sapiens
cttaaagaacataac

SEQ ID NO: 1743954 - DNA, 15 bp, Homo sapiens
ttaaagaacataacc

SEQ ID NO: 1743955 - DNA, 15 bp, Homo sapiens
taaagaacataacct

SEQ ID NO: 1743956 - DNA, 15 bp, Homo sapiens
aaagaacataaccta

SEQ ID NO: 1743957 - DNA, 15 bp, Homo sapiens
aagaacataacctaa

SEQ ID NO: 1743958 - DNA, 15 bp, Homo sapiens
agaacataacctaaa

SEQ ID NO: 1743959 - DNA, 15 bp, Homo sapiens
gaacataacctaaaa

SEQ ID NO: 1743960 - DNA, 15 bp, Homo sapiens
aacataacctaaaat

SEQ ID NO: 1743961 - DNA, 15 bp, Homo sapiens
acataacctaaaata

SEQ ID NO: 1743962 - DNA, 15 bp, Homo sapiens
cataacctaaaatag

SEQ ID NO: 1743963 - DNA, 15 bp, Homo sapiens
ataacctaaaatagg

SEQ ID NO: 1743964 - DNA, 15 bp, Homo sapiens
taacctaaaatagga

SEQ ID NO: 1743965 - DNA, 15 bp, Homo sapiens
aacctaaaataggaa

SEQ ID NO: 1743966 - DNA, 15 bp, Homo sapiens
acctaaaataggaat

SEQ ID NO: 1743967 - DNA, 15 bp, Homo sapiens
cctaaaataggaatg

SEQ ID NO: 1743968 - DNA, 15 bp, Homo sapiens
ctaaaataggaatgt

SEQ ID NO: 1743969 - DNA, 15 bp, Homo sapiens
taaaataggaatgtg

SEQ ID NO: 1743970 - DNA, 15 bp, Homo sapiens
aaaataggaatgtgt

SEQ ID NO: 1743971 - DNA, 15 bp, Homo sapiens
aaataggaatgtgtt

SEQ ID NO: 1743972 - DNA, 15 bp, Homo sapiens
aataggaatgtgttc

SEQ ID NO: 1743973 - DNA, 15 bp, Homo sapiens
ataggaatgtgttcc

SEQ ID NO: 1743974 - DNA, 15 bp, Homo sapiens
taggaatgtgttcca

SEQ ID NO: 1743975 - DNA, 15 bp, Homo sapiens
aggaatgtgttccat

SEQ ID NO: 1743976 - DNA, 15 bp, Homo sapiens
ggaatgtgttccatt

SEQ ID NO: 1743977 - DNA, 15 bp, Homo sapiens
gaatgtgttccattt

SEQ ID NO: 1743978 - DNA, 15 bp, Homo sapiens
aatgtgttccatttc

SEQ ID NO: 1743979 - DNA, 15 bp, Homo sapiens
atgtgttccatttca

SEQ ID NO: 1743980 - DNA, 15 bp, Homo sapiens
tgtgttccatttcag

SEQ ID NO: 1743981 - DNA, 15 bp, Homo sapiens
gtgttccatttcagt

SEQ ID NO: 1743982 - DNA, 15 bp, Homo sapiens
tgttccatttcagta

SEQ ID NO: 1743983 - DNA, 15 bp, Homo sapiens
gttccatttcagtaa

SEQ ID NO: 1743984 - DNA, 15 bp, Homo sapiens
ttccatttcagtaaa

SEQ ID NO: 1743985 - DNA, 15 bp, Homo sapiens
tccatttcagtaaat

SEQ ID NO: 1743986 - DNA, 15 bp, Homo sapiens
ccatttcagtaaata

SEQ ID NO: 1743987 - DNA, 15 bp, Homo sapiens
catttcagtaaataa

SEQ ID NO: 1743988 - DNA, 15 bp, Homo sapiens
atttcagtaaataaa

SEQ ID NO: 1743989 - DNA, 15 bp, Homo sapiens
tttcagtaaataaaa

SEQ ID NO: 1743990 - DNA, 15 bp, Homo sapiens
ttcagtaaataaaaa

SEQ ID NO: 1743991 - DNA, 15 bp, Homo sapiens
tcagtaaataaaaaa

SEQ ID NO: 1743992 - DNA, 15 bp, Homo sapiens
cagtaaataaaaaag

SEQ ID NO: 1743993 - DNA, 15 bp, Homo sapiens
agtaaataaaaaaga

SEQ ID NO: 1743994 - DNA, 15 bp, Homo sapiens
gtaaataaaaaagaa

SEQ ID NO: 1743995 - DNA, 15 bp, Homo sapiens
taaataaaaaagaaa

SEQ ID NO: 1743996 - DNA, 15 bp, Homo sapiens
aaataaaaaagaaaa

SEQ ID NO: 1743997 - DNA, 15 bp, Homo sapiens
aataaaaaagaaaaa

SEQ ID NO: 1743998 - DNA, 15 bp, Homo sapiens
ataaaaaagaaaaaa

SEQ ID NO: 1743999 - DNA, 15 bp, Homo sapiens
taaaaaagaaaaaat

SEQ ID NO: 1744000 - DNA, 15 bp, Homo sapiens
aaaaaagaaaaaatt

SEQ ID NO: 1744001 - DNA, 15 bp, Homo sapiens
aaaaagaaaaaatta

SEQ ID NO: 1744002 - DNA, 15 bp, Homo sapiens
aaaagaaaaaattaa

SEQ ID NO: 1744003 - DNA, 15 bp, Homo sapiens
aaagaaaaaattaaa

SEQ ID NO: 1744004 - DNA, 15 bp, Homo sapiens
aagaaaaaattaaag

SEQ ID NO: 1744005 - DNA, 15 bp, Homo sapiens
agaaaaaattaaagt

SEQ ID NO: 1744006 - DNA, 15 bp, Homo sapiens
gaaaaaattaaagta

SEQ ID NO: 1744007 - DNA, 15 bp, Homo sapiens
aaaaaattaaagtat

SEQ ID NO: 1744008 - DNA, 15 bp, Homo sapiens
aaaaattaaagtatc

SEQ ID NO: 1744009 - DNA, 15 bp, Homo sapiens
aaaattaaagtatca

SEQ ID NO: 1744010 - DNA, 15 bp, Homo sapiens
aaattaaagtatcac

SEQ ID NO: 1744011 - DNA, 15 bp, Homo sapiens
aattaaagtatcact

SEQ ID NO: 1744012 - DNA, 15 bp, Homo sapiens
attaaagtatcacta

SEQ ID NO: 1744013 - DNA, 15 bp, Homo sapiens
ttaaagtatcactat

SEQ ID NO: 1744014 - DNA, 15 bp, Homo sapiens
taaagtatcactatt

SEQ ID NO: 1744015 - DNA, 15 bp, Homo sapiens
aaagtatcactattt

SEQ ID NO: 1744016 - DNA, 15 bp, Homo sapiens
aagtatcactatttg

SEQ ID NO: 1744017 - DNA, 15 bp, Homo sapiens
agtatcactatttga

SEQ ID NO: 1744018 - DNA, 15 bp, Homo sapiens
gtatcactatttgat

SEQ ID NO: 1744019 - DNA, 15 bp, Homo sapiens
tatcactatttgatc

SEQ ID NO: 1744020 - DNA, 15 bp, Homo sapiens
atcactatttgatct

SEQ ID NO: 1744021 - DNA, 15 bp, Homo sapiens
tcactatttgatctg

SEQ ID NO: 1744022 - DNA, 15 bp, Homo sapiens
cactatttgatctgc

SEQ ID NO: 1744023 - DNA, 15 bp, Homo sapiens
actatttgatctgca

SEQ ID NO: 1744024 - DNA, 15 bp, Homo sapiens
ctatttgatctgcat

SEQ ID NO: 1744025 - DNA, 15 bp, Homo sapiens
tatttgatctgcatg

SEQ ID NO: 1744026 - DNA, 15 bp, Homo sapiens
atttgatctgcatgc

SEQ ID NO: 1744027 - DNA, 15 bp, Homo sapiens
tttgatctgcatgca

SEQ ID NO: 1744028 - DNA, 15 bp, Homo sapiens
ttgatctgcatgcaa

SEQ ID NO: 1744029 - DNA, 15 bp, Homo sapiens
tgatctgcatgcaac

SEQ ID NO: 1744030 - DNA, 15 bp, Homo sapiens
gatctgcatgcaacc

SEQ ID NO: 1744031 - DNA, 15 bp, Homo sapiens
atctgcatgcaacct

SEQ ID NO: 1744032 - DNA, 15 bp, Homo sapiens
tctgcatgcaacctt

SEQ ID NO: 1744033 - DNA, 15 bp, Homo sapiens
ctgcatgcaacctta

SEQ ID NO: 1744034 - DNA, 15 bp, Homo sapiens
tgcatgcaaccttaa

SEQ ID NO: 1744035 - DNA, 15 bp, Homo sapiens
gcatgcaaccttaaa

SEQ ID NO: 1744036 - DNA, 15 bp, Homo sapiens
catgcaaccttaaag

SEQ ID NO: 1744037 - DNA, 15 bp, Homo sapiens
atgcaaccttaaagg

SEQ ID NO: 1744038 - DNA, 15 bp, Homo sapiens
tgcaaccttaaagga

SEQ ID NO: 1744039 - DNA, 15 bp, Homo sapiens
gcaaccttaaaggat

SEQ ID NO: 1744040 - DNA, 15 bp, Homo sapiens
caaccttaaaggatt

SEQ ID NO: 1744041 - DNA, 15 bp, Homo sapiens
aaccttaaaggatta

SEQ ID NO: 1744042 - DNA, 15 bp, Homo sapiens
accttaaaggattag

SEQ ID NO: 1744043 - DNA, 15 bp, Homo sapiens
ccttaaaggattaga

SEQ ID NO: 1744044 - DNA, 15 bp, Homo sapiens
cttaaaggattagaa

SEQ ID NO: 1744045 - DNA, 15 bp, Homo sapiens
ttaaaggattagaac

SEQ ID NO: 1744046 - DNA, 15 bp, Homo sapiens
taaaggattagaact

SEQ ID NO: 1744047 - DNA, 15 bp, Homo sapiens
aaaggattagaacta

SEQ ID NO: 1744048 - DNA, 15 bp, Homo sapiens
aaggattagaactat

SEQ ID NO: 1744049 - DNA, 15 bp, Homo sapiens
aggattagaactatt

SEQ ID NO: 1744050 - DNA, 15 bp, Homo sapiens
ggattagaactattt

SEQ ID NO: 1744051 - DNA, 15 bp, Homo sapiens
gattagaactatttt

SEQ ID NO: 1744052 - DNA, 15 bp, Homo sapiens
attagaactattttt

SEQ ID NO: 1744053 - DNA, 15 bp, Homo sapiens
ttagaactatttttt

SEQ ID NO: 1744054 - DNA, 15 bp, Homo sapiens
tagaactatttttta

SEQ ID NO: 1744055 - DNA, 15 bp, Homo sapiens
agaactattttttat

SEQ ID NO: 1744056 - DNA, 15 bp, Homo sapiens
gaactattttttatg

SEQ ID NO: 1744057 - DNA, 15 bp, Homo sapiens
aactattttttatgt

SEQ ID NO: 1744058 - DNA, 15 bp, Homo sapiens
actattttttatgtc

SEQ ID NO: 1744059 - DNA, 15 bp, Homo sapiens
ctattttttatgtct

SEQ ID NO: 1744060 - DNA, 15 bp, Homo sapiens
tattttttatgtctt

SEQ ID NO: 1744061 - DNA, 15 bp, Homo sapiens
attttttatgtcttt

SEQ ID NO: 1744062 - DNA, 15 bp, Homo sapiens
ttttttatgtctttt

SEQ ID NO: 1744063 - DNA, 15 bp, Homo sapiens
tttttatgtcttttt

SEQ ID NO: 1744064 - DNA, 15 bp, Homo sapiens
ttttatgtctttttc

SEQ ID NO: 1744065 - DNA, 15 bp, Homo sapiens
tttatgtctttttcc

SEQ ID NO: 1744066 - DNA, 15 bp, Homo sapiens
ttatgtctttttcct

SEQ ID NO: 1744067 - DNA, 15 bp, Homo sapiens
tatgtctttttcctc

SEQ ID NO: 1744068 - DNA, 15 bp, Homo sapiens
atgtctttttcctca

SEQ ID NO: 1744069 - DNA, 15 bp, Homo sapiens
tgtctttttcctcac

SEQ ID NO: 1744070 - DNA, 15 bp, Homo sapiens
gtctttttcctcact

SEQ ID NO: 1744071 - DNA, 15 bp, Homo sapiens
tctttttcctcactc

SEQ ID NO: 1744072 - DNA, 15 bp, Homo sapiens
ctttttcctcactca

SEQ ID NO: 1744073 - DNA, 15 bp, Homo sapiens
tttttcctcactcat

SEQ ID NO: 1744074 - DNA, 15 bp, Homo sapiens
ttttcctcactcatt

SEQ ID NO: 1744075 - DNA, 15 bp, Homo sapiens
tttcctcactcattt

SEQ ID NO: 1744076 - DNA, 15 bp, Homo sapiens
ttcctcactcatttc

SEQ ID NO: 1744077 - DNA, 15 bp, Homo sapiens
tcctcactcatttcc

SEQ ID NO: 1744078 - DNA, 15 bp, Homo sapiens
cctcactcatttccc

SEQ ID NO: 1744079 - DNA, 15 bp, Homo sapiens
ctcactcatttccca

SEQ ID NO: 1744080 - DNA, 15 bp, Homo sapiens
tcactcatttcccac

SEQ ID NO: 1744081 - DNA, 15 bp, Homo sapiens
cactcatttcccaca

SEQ ID NO: 1744082 - DNA, 15 bp, Homo sapiens
actcatttcccacat

SEQ ID NO: 1744083 - DNA, 15 bp, Homo sapiens
ctcatttcccacatc

SEQ ID NO: 1744084 - DNA, 15 bp, Homo sapiens
tcatttcccacatca

SEQ ID NO: 1744085 - DNA, 15 bp, Homo sapiens
catttcccacatcaa

SEQ ID NO: 1744086 - DNA, 15 bp, Homo sapiens
atttcccacatcaaa

SEQ ID NO: 1744087 - DNA, 15 bp, Homo sapiens
tttcccacatcaaaa

SEQ ID NO: 1744088 - DNA, 15 bp, Homo sapiens
ttcccacatcaaaat

SEQ ID NO: 1744089 - DNA, 15 bp, Homo sapiens
tcccacatcaaaatc

SEQ ID NO: 1744090 - DNA, 15 bp, Homo sapiens
cccacatcaaaatct

SEQ ID NO: 1744091 - DNA, 15 bp, Homo sapiens
ccacatcaaaatctg

SEQ ID NO: 1744092 - DNA, 15 bp, Homo sapiens
cacatcaaaatctgt

SEQ ID NO: 1744093 - DNA, 15 bp, Homo sapiens
acatcaaaatctgtt

SEQ ID NO: 1744094 - DNA, 15 bp, Homo sapiens
catcaaaatctgtta

SEQ ID NO: 1744095 - DNA, 15 bp, Homo sapiens
atcaaaatctgttat

SEQ ID NO: 1744096 - DNA, 15 bp, Homo sapiens
tcaaaatctgttatc

SEQ ID NO: 1744097 - DNA, 15 bp, Homo sapiens
caaaatctgttatca

SEQ ID NO: 1744098 - DNA, 15 bp, Homo sapiens
aaaatctgttatcaa

SEQ ID NO: 1744099 - DNA, 15 bp, Homo sapiens
aaatctgttatcaag

SEQ ID NO: 1744100 - DNA, 15 bp, Homo sapiens
aatctgttatcaagg

SEQ ID NO: 1744101 - DNA, 15 bp, Homo sapiens
atctgttatcaaggc

SEQ ID NO: 1744102 - DNA, 15 bp, Homo sapiens
tctgttatcaaggct

SEQ ID NO: 1744103 - DNA, 15 bp, Homo sapiens
ctgttatcaaggctt

SEQ ID NO: 1744104 - DNA, 15 bp, Homo sapiens
tgttatcaaggcttg

SEQ ID NO: 1744105 - DNA, 15 bp, Homo sapiens
gttatcaaggcttgt

SEQ ID NO: 1744106 - DNA, 15 bp, Homo sapiens
ttatcaaggcttgtt

SEQ ID NO: 1744107 - DNA, 15 bp, Homo sapiens
tatcaaggcttgttg

SEQ ID NO: 1744108 - DNA, 15 bp, Homo sapiens
atcaaggcttgttga

SEQ ID NO: 1744109 - DNA, 15 bp, Homo sapiens
tcaaggcttgttgaa

SEQ ID NO: 1744110 - DNA, 15 bp, Homo sapiens
caaggcttgttgaat

SEQ ID NO: 1744111 - DNA, 15 bp, Homo sapiens
aaggcttgttgaata

SEQ ID NO: 1744112 - DNA, 15 bp, Homo sapiens
aggcttgttgaataa

SEQ ID NO: 1744113 - DNA, 15 bp, Homo sapiens
ggcttgttgaataat

SEQ ID NO: 1744114 - DNA, 15 bp, Homo sapiens
gcttgttgaataatc

SEQ ID NO: 1744115 - DNA, 15 bp, Homo sapiens
cttgttgaataatct

SEQ ID NO: 1744116 - DNA, 15 bp, Homo sapiens
ttgttgaataatcta

SEQ ID NO: 1744117 - DNA, 15 bp, Homo sapiens
tgttgaataatctac

SEQ ID NO: 1744118 - DNA, 15 bp, Homo sapiens
gttgaataatctacc

SEQ ID NO: 1744119 - DNA, 15 bp, Homo sapiens
ttgaataatctacct

SEQ ID NO: 1744120 - DNA, 15 bp, Homo sapiens
tgaataatctacctc

SEQ ID NO: 1744121 - DNA, 15 bp, Homo sapiens
gaataatctacctcc

SEQ ID NO: 1744122 - DNA, 15 bp, Homo sapiens
aataatctacctcca

SEQ ID NO: 1744123 - DNA, 15 bp, Homo sapiens
ataatctacctccaa

SEQ ID NO: 1744124 - DNA, 15 bp, Homo sapiens
taatctacctccaaa

SEQ ID NO: 1744125 - DNA, 15 bp, Homo sapiens
aatctacctccaaaa

SEQ ID NO: 1744126 - DNA, 15 bp, Homo sapiens
atctacctccaaaat

SEQ ID NO: 1744127 - DNA, 15 bp, Homo sapiens
tctacctccaaaata

SEQ ID NO: 1744128 - DNA, 15 bp, Homo sapiens
ctacctccaaaatat

SEQ ID NO: 1744129 - DNA, 15 bp, Homo sapiens
tacctccaaaatatt

SEQ ID NO: 1744130 - DNA, 15 bp, Homo sapiens
acctccaaaatattt

SEQ ID NO: 1744131 - DNA, 15 bp, Homo sapiens
cctccaaaatatttc

SEQ ID NO: 1744132 - DNA, 15 bp, Homo sapiens
ctccaaaatatttcc

SEQ ID NO: 1744133 - DNA, 15 bp, Homo sapiens
tccaaaatatttcct

SEQ ID NO: 1744134 - DNA, 15 bp, Homo sapiens
ccaaaatatttcctg

SEQ ID NO: 1744135 - DNA, 15 bp, Homo sapiens
caaaatatttcctga

SEQ ID NO: 1744136 - DNA, 15 bp, Homo sapiens
aaaatatttcctgag

SEQ ID NO: 1744137 - DNA, 15 bp, Homo sapiens
aaatatttcctgagt

SEQ ID NO: 1744138 - DNA, 15 bp, Homo sapiens
aatatttcctgagtg

SEQ ID NO: 1744139 - DNA, 15 bp, Homo sapiens
atatttcctgagtgc

SEQ ID NO: 1744140 - DNA, 15 bp, Homo sapiens
tatttcctgagtgca

SEQ ID NO: 1744141 - DNA, 15 bp, Homo sapiens
atttcctgagtgcat

SEQ ID NO: 1744142 - DNA, 15 bp, Homo sapiens
tttcctgagtgcatc

SEQ ID NO: 1744143 - DNA, 15 bp, Homo sapiens
ttcctgagtgcatct

SEQ ID NO: 1744144 - DNA, 15 bp, Homo sapiens
tcctgagtgcatcta

SEQ ID NO: 1744145 - DNA, 15 bp, Homo sapiens
cctgagtgcatctac

SEQ ID NO: 1744146 - DNA, 15 bp, Homo sapiens
ctgagtgcatctact

SEQ ID NO: 1744147 - DNA, 15 bp, Homo sapiens
tgagtgcatctactt

SEQ ID NO: 1744148 - DNA, 15 bp, Homo sapiens
gagtgcatctacttt

SEQ ID NO: 1744149 - DNA, 15 bp, Homo sapiens
agtgcatctactttt

SEQ ID NO: 1744150 - DNA, 15 bp, Homo sapiens
gtgcatctacttttc

SEQ ID NO: 1744151 - DNA, 15 bp, Homo sapiens
tgcatctacttttct

SEQ ID NO: 1744152 - DNA, 15 bp, Homo sapiens
gcatctacttttctc

SEQ ID NO: 1744153 - DNA, 15 bp, Homo sapiens
catctacttttctcc

SEQ ID NO: 1744154 - DNA, 15 bp, Homo sapiens
atctacttttctcca

SEQ ID NO: 1744155 - DNA, 15 bp, Homo sapiens
tctacttttctccat

SEQ ID NO: 1744156 - DNA, 15 bp, Homo sapiens
ctacttttctccatt

SEQ ID NO: 1744157 - DNA, 15 bp, Homo sapiens
tacttttctccattt

SEQ ID NO: 1744158 - DNA, 15 bp, Homo sapiens
acttttctccatttc

SEQ ID NO: 1744159 - DNA, 15 bp, Homo sapiens
cttttctccatttct

SEQ ID NO: 1744160 - DNA, 15 bp, Homo sapiens
ttttctccatttctg

SEQ ID NO: 1744161 - DNA, 15 bp, Homo sapiens
tttctccatttctgc

SEQ ID NO: 1744162 - DNA, 15 bp, Homo sapiens
ttctccatttctgct

SEQ ID NO: 1744163 - DNA, 15 bp, Homo sapiens
tctccatttctgctc

SEQ ID NO: 1744164 - DNA, 15 bp, Homo sapiens
ctccatttctgctct

SEQ ID NO: 1744165 - DNA, 15 bp, Homo sapiens
tccatttctgctctc

SEQ ID NO: 1744166 - DNA, 15 bp, Homo sapiens
ccatttctgctctca

SEQ ID NO: 1744167 - DNA, 15 bp, Homo sapiens
catttctgctctcac

SEQ ID NO: 1744168 - DNA, 15 bp, Homo sapiens
atttctgctctcaca

SEQ ID NO: 1744169 - DNA, 15 bp, Homo sapiens
tttctgctctcacaa

SEQ ID NO: 1744170 - DNA, 15 bp, Homo sapiens
ttctgctctcacaac

SEQ ID NO: 1744171 - DNA, 15 bp, Homo sapiens
tctgctctcacaact

SEQ ID NO: 1744172 - DNA, 15 bp, Homo sapiens
ctgctctcacaactc

SEQ ID NO: 1744173 - DNA, 15 bp, Homo sapiens
tgctctcacaactct

SEQ ID NO: 1744174 - DNA, 15 bp, Homo sapiens
gctctcacaactctt

SEQ ID NO: 1744175 - DNA, 15 bp, Homo sapiens
ctctcacaactcttg

SEQ ID NO: 1744176 - DNA, 15 bp, Homo sapiens
tctcacaactcttgt

SEQ ID NO: 1744177 - DNA, 15 bp, Homo sapiens
ctcacaactcttgtc

SEQ ID NO: 1744178 - DNA, 15 bp, Homo sapiens
tcacaactcttgtcc

SEQ ID NO: 1744179 - DNA, 15 bp, Homo sapiens
cacaactcttgtcca

SEQ ID NO: 1744180 - DNA, 15 bp, Homo sapiens
acaactcttgtccaa

SEQ ID NO: 1744181 - DNA, 15 bp, Homo sapiens
caactcttgtccaag

SEQ ID NO: 1744182 - DNA, 15 bp, Homo sapiens
aactcttgtccaaga

SEQ ID NO: 1744183 - DNA, 15 bp, Homo sapiens
actcttgtccaagac

SEQ ID NO: 1744184 - DNA, 15 bp, Homo sapiens
ctcttgtccaagaca

SEQ ID NO: 1744185 - DNA, 15 bp, Homo sapiens
tcttgtccaagacat

SEQ ID NO: 1744186 - DNA, 15 bp, Homo sapiens
cttgtccaagacatt

SEQ ID NO: 1744187 - DNA, 15 bp, Homo sapiens
ttgtccaagacattg

SEQ ID NO: 1744188 - DNA, 15 bp, Homo sapiens
tgtccaagacattgt

SEQ ID NO: 1744189 - DNA, 15 bp, Homo sapiens
gtccaagacattgtt

SEQ ID NO: 1744190 - DNA, 15 bp, Homo sapiens
tccaagacattgttc

SEQ ID NO: 1744191 - DNA, 15 bp, Homo sapiens
ccaagacattgttct

SEQ ID NO: 1744192 - DNA, 15 bp, Homo sapiens
caagacattgttctc

SEQ ID NO: 1744193 - DNA, 15 bp, Homo sapiens
aagacattgttctct

SEQ ID NO: 1744194 - DNA, 15 bp, Homo sapiens
agacattgttctctt

SEQ ID NO: 1744195 - DNA, 15 bp, Homo sapiens
gacattgttctcttt

SEQ ID NO: 1744196 - DNA, 15 bp, Homo sapiens
acattgttctctttc

SEQ ID NO: 1744197 - DNA, 15 bp, Homo sapiens
cattgttctctttct

SEQ ID NO: 1744198 - DNA, 15 bp, Homo sapiens
attgttctctttctc

SEQ ID NO: 1744199 - DNA, 15 bp, Homo sapiens
ttgttctctttctct

SEQ ID NO: 1744200 - DNA, 15 bp, Homo sapiens
tgttctctttctctt

SEQ ID NO: 1744201 - DNA, 15 bp, Homo sapiens
gttctctttctcttg

SEQ ID NO: 1744202 - DNA, 15 bp, Homo sapiens
ttctctttctcttgg

SEQ ID NO: 1744203 - DNA, 15 bp, Homo sapiens
tctctttctcttgga

SEQ ID NO: 1744204 - DNA, 15 bp, Homo sapiens
ctctttctcttggat

SEQ ID NO: 1744205 - DNA, 15 bp, Homo sapiens
tctttctcttggatt

SEQ ID NO: 1744206 - DNA, 15 bp, Homo sapiens
ctttctcttggattt

SEQ ID NO: 1744207 - DNA, 15 bp, Homo sapiens
tttctcttggatttt

SEQ ID NO: 1744208 - DNA, 15 bp, Homo sapiens
ttctcttggattttt

SEQ ID NO: 1744209 - DNA, 15 bp, Homo sapiens
tctcttggatttttt

SEQ ID NO: 1744210 - DNA, 15 bp, Homo sapiens
ctcttggattttttg

SEQ ID NO: 1744211 - DNA, 15 bp, Homo sapiens
tcttggattttttgc

SEQ ID NO: 1744212 - DNA, 15 bp, Homo sapiens
cttggattttttgca

SEQ ID NO: 1744213 - DNA, 15 bp, Homo sapiens
ttggattttttgcag

SEQ ID NO: 1744214 - DNA, 15 bp, Homo sapiens
tggattttttgcagt

SEQ ID NO: 1744215 - DNA, 15 bp, Homo sapiens
ggattttttgcagta

SEQ ID NO: 1744216 - DNA, 15 bp, Homo sapiens
gattttttgcagtag

SEQ ID NO: 1744217 - DNA, 15 bp, Homo sapiens
attttttgcagtagc

SEQ ID NO: 1744218 - DNA, 15 bp, Homo sapiens
ttttttgcagtagcc

SEQ ID NO: 1744219 - DNA, 15 bp, Homo sapiens
tttttgcagtagcct

SEQ ID NO: 1744220 - DNA, 15 bp, Homo sapiens
ttttgcagtagccta

SEQ ID NO: 1744221 - DNA, 15 bp, Homo sapiens
tttgcagtagcctac

SEQ ID NO: 1744222 - DNA, 15 bp, Homo sapiens
ttgcagtagcctact

SEQ ID NO: 1744223 - DNA, 15 bp, Homo sapiens
tgcagtagcctacta

SEQ ID NO: 1744224 - DNA, 15 bp, Homo sapiens
gcagtagcctactac

SEQ ID NO: 1744225 - DNA, 15 bp, Homo sapiens
cagtagcctactacc

SEQ ID NO: 1744226 - DNA, 15 bp, Homo sapiens
agtagcctactacct

SEQ ID NO: 1744227 - DNA, 15 bp, Homo sapiens
gtagcctactacctg

SEQ ID NO: 1744228 - DNA, 15 bp, Homo sapiens
tagcctactacctga

SEQ ID NO: 1744229 - DNA, 15 bp, Homo sapiens
agcctactacctgat

SEQ ID NO: 1744230 - DNA, 15 bp, Homo sapiens
gcctactacctgatc

SEQ ID NO: 1744231 - DNA, 15 bp, Homo sapiens
cctactacctgatct

SEQ ID NO: 1744232 - DNA, 15 bp, Homo sapiens
ctactacctgatctt

SEQ ID NO: 1744233 - DNA, 15 bp, Homo sapiens
tactacctgatcttg

SEQ ID NO: 1744234 - DNA, 15 bp, Homo sapiens
actacctgatcttgc

SEQ ID NO: 1744235 - DNA, 15 bp, Homo sapiens
ctacctgatcttgct

SEQ ID NO: 1744236 - DNA, 15 bp, Homo sapiens
tacctgatcttgctc

SEQ ID NO: 1744237 - DNA, 15 bp, Homo sapiens
acctgatcttgctcc

SEQ ID NO: 1744238 - DNA, 15 bp, Homo sapiens
cctgatcttgctcct

SEQ ID NO: 1744239 - DNA, 15 bp, Homo sapiens
ctgatcttgctcctt

SEQ ID NO: 1744240 - DNA, 15 bp, Homo sapiens
tgatcttgctccttc

SEQ ID NO: 1744241 - DNA, 15 bp, Homo sapiens
gatcttgctccttct

SEQ ID NO: 1744242 - DNA, 15 bp, Homo sapiens
atcttgctccttctg

SEQ ID NO: 1744243 - DNA, 15 bp, Homo sapiens
tcttgctccttctgg

SEQ ID NO: 1744244 - DNA, 15 bp, Homo sapiens
cttgctccttctggt

SEQ ID NO: 1744245 - DNA, 15 bp, Homo sapiens
ttgctccttctggtc

SEQ ID NO: 1744246 - DNA, 15 bp, Homo sapiens
tgctccttctggtct

SEQ ID NO: 1744247 - DNA, 15 bp, Homo sapiens
gctccttctggtctc

SEQ ID NO: 1744248 - DNA, 15 bp, Homo sapiens
ctccttctggtctca

SEQ ID NO: 1744249 - DNA, 15 bp, Homo sapiens
tccttctggtctcat

SEQ ID NO: 1744250 - DNA, 15 bp, Homo sapiens
ccttctggtctcatc

SEQ ID NO: 1744251 - DNA, 15 bp, Homo sapiens
cttctggtctcatca

SEQ ID NO: 1744252 - DNA, 15 bp, Homo sapiens
ttctggtctcatcat

SEQ ID NO: 1744253 - DNA, 15 bp, Homo sapiens
tctggtctcatcatt

SEQ ID NO: 1744254 - DNA, 15 bp, Homo sapiens
ctggtctcatcattg

SEQ ID NO: 1744255 - DNA, 15 bp, Homo sapiens
tggtctcatcattgt

SEQ ID NO: 1744256 - DNA, 15 bp, Homo sapiens
ggtctcatcattgtt

SEQ ID NO: 1744257 - DNA, 15 bp, Homo sapiens
gtctcatcattgttc

SEQ ID NO: 1744258 - DNA, 15 bp, Homo sapiens
tctcatcattgttcc

SEQ ID NO: 1744259 - DNA, 15 bp, Homo sapiens
ctcatcattgttcct

SEQ ID NO: 1744260 - DNA, 15 bp, Homo sapiens
tcatcattgttcctg

SEQ ID NO: 1744261 - DNA, 15 bp, Homo sapiens
catcattgttcctgt

SEQ ID NO: 1744262 - DNA, 15 bp, Homo sapiens
atcattgttcctgtc

SEQ ID NO: 1744263 - DNA, 15 bp, Homo sapiens
tcattgttcctgtct

SEQ ID NO: 1744264 - DNA, 15 bp, Homo sapiens
cattgttcctgtctc

SEQ ID NO: 1744265 - DNA, 15 bp, Homo sapiens
attgttcctgtctcc

SEQ ID NO: 1744266 - DNA, 15 bp, Homo sapiens
ttgttcctgtctcct

SEQ ID NO: 1744267 - DNA, 15 bp, Homo sapiens
tgttcctgtctcctc

SEQ ID NO: 1744268 - DNA, 15 bp, Homo sapiens
gttcctgtctcctca

SEQ ID NO: 1744269 - DNA, 15 bp, Homo sapiens
ttcctgtctcctcac

SEQ ID NO: 1744270 - DNA, 15 bp, Homo sapiens
tcctgtctcctcacc

SEQ ID NO: 1744271 - DNA, 15 bp, Homo sapiens
cctgtctcctcacca

SEQ ID NO: 1744272 - DNA, 15 bp, Homo sapiens
ctgtctcctcaccat

SEQ ID NO: 1744273 - DNA, 15 bp, Homo sapiens
tgtctcctcaccatc

SEQ ID NO: 1744274 - DNA, 15 bp, Homo sapiens
gtctcctcaccatca

SEQ ID NO: 1744275 - DNA, 15 bp, Homo sapiens
tctcctcaccatcaa

SEQ ID NO: 1744276 - DNA, 15 bp, Homo sapiens
ctcctcaccatcaaa

SEQ ID NO: 1744277 - DNA, 15 bp, Homo sapiens
tcctcaccatcaaag

SEQ ID NO: 1744278 - DNA, 15 bp, Homo sapiens
cctcaccatcaaaga

SEQ ID NO: 1744279 - DNA, 15 bp, Homo sapiens
ctcaccatcaaagat

SEQ ID NO: 1744280 - DNA, 15 bp, Homo sapiens
tcaccatcaaagata

SEQ ID NO: 1744281 - DNA, 15 bp, Homo sapiens
caccatcaaagatat

SEQ ID NO: 1744282 - DNA, 15 bp, Homo sapiens
accatcaaagatatt

SEQ ID NO: 1744283 - DNA, 15 bp, Homo sapiens
ccatcaaagatattc

SEQ ID NO: 1744284 - DNA, 15 bp, Homo sapiens
catcaaagatattct

SEQ ID NO: 1744285 - DNA, 15 bp, Homo sapiens
atcaaagatattctc

SEQ ID NO: 1744286 - DNA, 15 bp, Homo sapiens
tcaaagatattctcc

SEQ ID NO: 1744287 - DNA, 15 bp, Homo sapiens
caaagatattctcca

SEQ ID NO: 1744288 - DNA, 15 bp, Homo sapiens
aaagatattctccat

SEQ ID NO: 1744289 - DNA, 15 bp, Homo sapiens
aagatattctccata

SEQ ID NO: 1744290 - DNA, 15 bp, Homo sapiens
agatattctccatag

SEQ ID NO: 1744291 - DNA, 15 bp, Homo sapiens
gatattctccataga

SEQ ID NO: 1744292 - DNA, 15 bp, Homo sapiens
atattctccatagag

SEQ ID NO: 1744293 - DNA, 15 bp, Homo sapiens
tattctccatagagc

SEQ ID NO: 1744294 - DNA, 15 bp, Homo sapiens
attctccatagagcc

SEQ ID NO: 1744295 - DNA, 15 bp, Homo sapiens
ttctccatagagccc

SEQ ID NO: 1744296 - DNA, 15 bp, Homo sapiens
tctccatagagcccc

SEQ ID NO: 1744297 - DNA, 15 bp, Homo sapiens
ctccatagagccccc

SEQ ID NO: 1744298 - DNA, 15 bp, Homo sapiens
tccatagagccccca

SEQ ID NO: 1744299 - DNA, 15 bp, Homo sapiens
ccatagagcccccag

SEQ ID NO: 1744300 - DNA, 15 bp, Homo sapiens
catagagcccccaga

SEQ ID NO: 1744301 - DNA, 15 bp, Homo sapiens
atagagcccccagaa

SEQ ID NO: 1744302 - DNA, 15 bp, Homo sapiens
tagagcccccagaat

SEQ ID NO: 1744303 - DNA, 15 bp, Homo sapiens
agagcccccagaatt

SEQ ID NO: 1744304 - DNA, 15 bp, Homo sapiens
gagcccccagaattt

SEQ ID NO: 1744305 - DNA, 15 bp, Homo sapiens
agcccccagaatttc

SEQ ID NO: 1744306 - DNA, 15 bp, Homo sapiens
gcccccagaatttct

SEQ ID NO: 1744307 - DNA, 15 bp, Homo sapiens
cccccagaatttctc

SEQ ID NO: 1744308 - DNA, 15 bp, Homo sapiens
ccccagaatttctcc

SEQ ID NO: 1744309 - DNA, 15 bp, Homo sapiens
cccagaatttctcct

SEQ ID NO: 1744310 - DNA, 15 bp, Homo sapiens
ccagaatttctccta

SEQ ID NO: 1744311 - DNA, 15 bp, Homo sapiens
cagaatttctcctag

SEQ ID NO: 1744312 - DNA, 15 bp, Homo sapiens
agaatttctcctaga

SEQ ID NO: 1744313 - DNA, 15 bp, Homo sapiens
gaatttctcctagaa

SEQ ID NO: 1744314 - DNA, 15 bp, Homo sapiens
aatttctcctagaaa

SEQ ID NO: 1744315 - DNA, 15 bp, Homo sapiens
atttctcctagaaat

SEQ ID NO: 1744316 - DNA, 15 bp, Homo sapiens
tttctcctagaaatg

SEQ ID NO: 1744317 - DNA, 15 bp, Homo sapiens
ttctcctagaaatgt

SEQ ID NO: 1744318 - DNA, 15 bp, Homo sapiens
tctcctagaaatgta

SEQ ID NO: 1744319 - DNA, 15 bp, Homo sapiens
ctcctagaaatgtaa

SEQ ID NO: 1744320 - DNA, 15 bp, Homo sapiens
tcctagaaatgtaaa

SEQ ID NO: 1744321 - DNA, 15 bp, Homo sapiens
cctagaaatgtaaat

SEQ ID NO: 1744322 - DNA, 15 bp, Homo sapiens
ctagaaatgtaaatc

SEQ ID NO: 1744323 - DNA, 15 bp, Homo sapiens
tagaaatgtaaatca

SEQ ID NO: 1744324 - DNA, 15 bp, Homo sapiens
agaaatgtaaatcag

SEQ ID NO: 1744325 - DNA, 15 bp, Homo sapiens
gaaatgtaaatcagt

SEQ ID NO: 1744326 - DNA, 15 bp, Homo sapiens
aaatgtaaatcagtt

SEQ ID NO: 1744327 - DNA, 15 bp, Homo sapiens
aatgtaaatcagtta

SEQ ID NO: 1744328 - DNA, 15 bp, Homo sapiens
atgtaaatcagttac

SEQ ID NO: 1744329 - DNA, 15 bp, Homo sapiens
tgtaaatcagttaca

SEQ ID NO: 1744330 - DNA, 15 bp, Homo sapiens
gtaaatcagttacat

SEQ ID NO: 1744331 - DNA, 15 bp, Homo sapiens
taaatcagttacatt

SEQ ID NO: 1744332 - DNA, 15 bp, Homo sapiens
aaatcagttacattc

SEQ ID NO: 1744333 - DNA, 15 bp, Homo sapiens
aatcagttacattca

SEQ ID NO: 1744334 - DNA, 15 bp, Homo sapiens
atcagttacattcac

SEQ ID NO: 1744335 - DNA, 15 bp, Homo sapiens
tcagttacattcacc

SEQ ID NO: 1744336 - DNA, 15 bp, Homo sapiens
cagttacattcacct

SEQ ID NO: 1744337 - DNA, 15 bp, Homo sapiens
agttacattcacctt

SEQ ID NO: 1744338 - DNA, 15 bp, Homo sapiens
gttacattcaccttg

SEQ ID NO: 1744339 - DNA, 15 bp, Homo sapiens
ttacattcaccttgc

SEQ ID NO: 1744340 - DNA, 15 bp, Homo sapiens
tacattcaccttgct

SEQ ID NO: 1744341 - DNA, 15 bp, Homo sapiens
acattcaccttgctg

SEQ ID NO: 1744342 - DNA, 15 bp, Homo sapiens
cattcaccttgctgt

SEQ ID NO: 1744343 - DNA, 15 bp, Homo sapiens
attcaccttgctgtt

SEQ ID NO: 1744344 - DNA, 15 bp, Homo sapiens
ttcaccttgctgtta

SEQ ID NO: 1744345 - DNA, 15 bp, Homo sapiens
tcaccttgctgttaa

SEQ ID NO: 1744346 - DNA, 15 bp, Homo sapiens
caccttgctgttaaa

SEQ ID NO: 1744347 - DNA, 15 bp, Homo sapiens
accttgctgttaaac

SEQ ID NO: 1744348 - DNA, 15 bp, Homo sapiens
ccttgctgttaaacc

SEQ ID NO: 1744349 - DNA, 15 bp, Homo sapiens
cttgctgttaaaccc

SEQ ID NO: 1744350 - DNA, 15 bp, Homo sapiens
ttgctgttaaaccca

SEQ ID NO: 1744351 - DNA, 15 bp, Homo sapiens
tgctgttaaacccac

SEQ ID NO: 1744352 - DNA, 15 bp, Homo sapiens
gctgttaaacccact

SEQ ID NO: 1744353 - DNA, 15 bp, Homo sapiens
ctgttaaacccactg

SEQ ID NO: 1744354 - DNA, 15 bp, Homo sapiens
tgttaaacccactga

SEQ ID NO: 1744355 - DNA, 15 bp, Homo sapiens
gttaaacccactgac

SEQ ID NO: 1744356 - DNA, 15 bp, Homo sapiens
ttaaacccactgact

SEQ ID NO: 1744357 - DNA, 15 bp, Homo sapiens
taaacccactgactg

SEQ ID NO: 1744358 - DNA, 15 bp, Homo sapiens
aaacccactgactgc

SEQ ID NO: 1744359 - DNA, 15 bp, Homo sapiens
aacccactgactgct

SEQ ID NO: 1744360 - DNA, 15 bp, Homo sapiens
acccactgactgctt

SEQ ID NO: 1744361 - DNA, 15 bp, Homo sapiens
cccactgactgcttc

SEQ ID NO: 1744362 - DNA, 15 bp, Homo sapiens
ccactgactgcttcc

SEQ ID NO: 1744363 - DNA, 15 bp, Homo sapiens
cactgactgcttccc

SEQ ID NO: 1744364 - DNA, 15 bp, Homo sapiens
actgactgcttccca

SEQ ID NO: 1744365 - DNA, 15 bp, Homo sapiens
ctgactgcttcccat

SEQ ID NO: 1744366 - DNA, 15 bp, Homo sapiens
tgactgcttcccatt

SEQ ID NO: 1744367 - DNA, 15 bp, Homo sapiens
gactgcttcccattg

SEQ ID NO: 1744368 - DNA, 15 bp, Homo sapiens
actgcttcccattgc

SEQ ID NO: 1744369 - DNA, 15 bp, Homo sapiens
ctgcttcccattgca

SEQ ID NO: 1744370 - DNA, 15 bp, Homo sapiens
tgcttcccattgcaa

SEQ ID NO: 1744371 - DNA, 15 bp, Homo sapiens
gcttcccattgcaat

SEQ ID NO: 1744372 - DNA, 15 bp, Homo sapiens
cttcccattgcaatt

SEQ ID NO: 1744373 - DNA, 15 bp, Homo sapiens
ttcccattgcaattg

SEQ ID NO: 1744374 - DNA, 15 bp, Homo sapiens
tcccattgcaattgg

SEQ ID NO: 1744375 - DNA, 15 bp, Homo sapiens
cccattgcaattggt

SEQ ID NO: 1744376 - DNA, 15 bp, Homo sapiens
ccattgcaattggta

SEQ ID NO: 1744377 - DNA, 15 bp, Homo sapiens
cattgcaattggtat

SEQ ID NO: 1744378 - DNA, 15 bp, Homo sapiens
attgcaattggtata

SEQ ID NO: 1744379 - DNA, 15 bp, Homo sapiens
ttgcaattggtatac

SEQ ID NO: 1744380 - DNA, 15 bp, Homo sapiens
tgcaattggtataca

SEQ ID NO: 1744381 - DNA, 15 bp, Homo sapiens
gcaattggtatacag

SEQ ID NO: 1744382 - DNA, 15 bp, Homo sapiens
caattggtatacagt

SEQ ID NO: 1744383 - DNA, 15 bp, Homo sapiens
aattggtatacagtg

SEQ ID NO: 1744384 - DNA, 15 bp, Homo sapiens
attggtatacagtgc

SEQ ID NO: 1744385 - DNA, 15 bp, Homo sapiens
ttggtatacagtgca

SEQ ID NO: 1744386 - DNA, 15 bp, Homo sapiens
tggtatacagtgcaa

SEQ ID NO: 1744387 - DNA, 15 bp, Homo sapiens
ggtatacagtgcaaa

SEQ ID NO: 1744388 - DNA, 15 bp, Homo sapiens
gtatacagtgcaaat

SEQ ID NO: 1744389 - DNA, 15 bp, Homo sapiens
tatacagtgcaaatt

SEQ ID NO: 1744390 - DNA, 15 bp, Homo sapiens
atacagtgcaaattc

SEQ ID NO: 1744391 - DNA, 15 bp, Homo sapiens
tacagtgcaaattcc

SEQ ID NO: 1744392 - DNA, 15 bp, Homo sapiens
acagtgcaaattcct

SEQ ID NO: 1744393 - DNA, 15 bp, Homo sapiens
cagtgcaaattcctt

SEQ ID NO: 1744394 - DNA, 15 bp, Homo sapiens
agtgcaaattcctta

SEQ ID NO: 1744395 - DNA, 15 bp, Homo sapiens
gtgcaaattccttaa

SEQ ID NO: 1744396 - DNA, 15 bp, Homo sapiens
tgcaaattccttaac

SEQ ID NO: 1744397 - DNA, 15 bp, Homo sapiens
gcaaattccttaaca

SEQ ID NO: 1744398 - DNA, 15 bp, Homo sapiens
caaattccttaacaa

SEQ ID NO: 1744399 - DNA, 15 bp, Homo sapiens
aaattccttaacaat

SEQ ID NO: 1744400 - DNA, 15 bp, Homo sapiens
aattccttaacaatg

SEQ ID NO: 1744401 - DNA, 15 bp, Homo sapiens
attccttaacaatgc

SEQ ID NO: 1744402 - DNA, 15 bp, Homo sapiens
ttccttaacaatgcc

SEQ ID NO: 1744403 - DNA, 15 bp, Homo sapiens
tccttaacaatgcct

SEQ ID NO: 1744404 - DNA, 15 bp, Homo sapiens
ccttaacaatgccta

SEQ ID NO: 1744405 - DNA, 15 bp, Homo sapiens
cttaacaatgcctaa

SEQ ID NO: 1744406 - DNA, 15 bp, Homo sapiens
ttaacaatgcctaaa

SEQ ID NO: 1744407 - DNA, 15 bp, Homo sapiens
taacaatgcctaaaa

SEQ ID NO: 1744408 - DNA, 15 bp, Homo sapiens
aacaatgcctaaaag

SEQ ID NO: 1744409 - DNA, 15 bp, Homo sapiens
acaatgcctaaaaga

SEQ ID NO: 1744410 - DNA, 15 bp, Homo sapiens
caatgcctaaaagat

SEQ ID NO: 1744411 - DNA, 15 bp, Homo sapiens
aatgcctaaaagatc

SEQ ID NO: 1744412 - DNA, 15 bp, Homo sapiens
atgcctaaaagatct

SEQ ID NO: 1744413 - DNA, 15 bp, Homo sapiens
tgcctaaaagatctt

SEQ ID NO: 1744414 - DNA, 15 bp, Homo sapiens
gcctaaaagatctta

SEQ ID NO: 1744415 - DNA, 15 bp, Homo sapiens
cctaaaagatcttat

SEQ ID NO: 1744416 - DNA, 15 bp, Homo sapiens
ctaaaagatcttata

SEQ ID NO: 1744417 - DNA, 15 bp, Homo sapiens
taaaagatcttatat

SEQ ID NO: 1744418 - DNA, 15 bp, Homo sapiens
aaaagatcttatatg

SEQ ID NO: 1744419 - DNA, 15 bp, Homo sapiens
aaagatcttatatgg

SEQ ID NO: 1744420 - DNA, 15 bp, Homo sapiens
aagatcttatatggt

SEQ ID NO: 1744421 - DNA, 15 bp, Homo sapiens
agatcttatatggtc

SEQ ID NO: 1744422 - DNA, 15 bp, Homo sapiens
gatcttatatggtct

SEQ ID NO: 1744423 - DNA, 15 bp, Homo sapiens
atcttatatggtctg

SEQ ID NO: 1744424 - DNA, 15 bp, Homo sapiens
tcttatatggtctgg

SEQ ID NO: 1744425 - DNA, 15 bp, Homo sapiens
cttatatggtctggt

SEQ ID NO: 1744426 - DNA, 15 bp, Homo sapiens
ttatatggtctggtt

SEQ ID NO: 1744427 - DNA, 15 bp, Homo sapiens
tatatggtctggttt

SEQ ID NO: 1744428 - DNA, 15 bp, Homo sapiens
atatggtctggtttc

SEQ ID NO: 1744429 - DNA, 15 bp, Homo sapiens
tatggtctggtttct

SEQ ID NO: 1744430 - DNA, 15 bp, Homo sapiens
atggtctggtttctg

SEQ ID NO: 1744431 - DNA, 15 bp, Homo sapiens
tggtctggtttctgt

SEQ ID NO: 1744432 - DNA, 15 bp, Homo sapiens
ggtctggtttctgtt

SEQ ID NO: 1744433 - DNA, 15 bp, Homo sapiens
gtctggtttctgttg

SEQ ID NO: 1744434 - DNA, 15 bp, Homo sapiens
tctggtttctgttgc

SEQ ID NO: 1744435 - DNA, 15 bp, Homo sapiens
ctggtttctgttgcc

SEQ ID NO: 1744436 - DNA, 15 bp, Homo sapiens
tggtttctgttgcct

SEQ ID NO: 1744437 - DNA, 15 bp, Homo sapiens
ggtttctgttgcctc

SEQ ID NO: 1744438 - DNA, 15 bp, Homo sapiens
gtttctgttgcctct

SEQ ID NO: 1744439 - DNA, 15 bp, Homo sapiens
tttctgttgcctctc

SEQ ID NO: 1744440 - DNA, 15 bp, Homo sapiens
ttctgttgcctctcc

SEQ ID NO: 1744441 - DNA, 15 bp, Homo sapiens
tctgttgcctctcca

SEQ ID NO: 1744442 - DNA, 15 bp, Homo sapiens
ctgttgcctctccaa

SEQ ID NO: 1744443 - DNA, 15 bp, Homo sapiens
tgttgcctctccaac

SEQ ID NO: 1744444 - DNA, 15 bp, Homo sapiens
gttgcctctccaacc

SEQ ID NO: 1744445 - DNA, 15 bp, Homo sapiens
ttgcctctccaacct

SEQ ID NO: 1744446 - DNA, 15 bp, Homo sapiens
tgcctctccaacctc

SEQ ID NO: 1744447 - DNA, 15 bp, Homo sapiens
gcctctccaacctca

SEQ ID NO: 1744448 - DNA, 15 bp, Homo sapiens
cctctccaacctcat

SEQ ID NO: 1744449 - DNA, 15 bp, Homo sapiens
ctctccaacctcatc

SEQ ID NO: 1744450 - DNA, 15 bp, Homo sapiens
tctccaacctcatct

SEQ ID NO: 1744451 - DNA, 15 bp, Homo sapiens
ctccaacctcatctt

SEQ ID NO: 1744452 - DNA, 15 bp, Homo sapiens
tccaacctcatcttg

SEQ ID NO: 1744453 - DNA, 15 bp, Homo sapiens
ccaacctcatcttgt

SEQ ID NO: 1744454 - DNA, 15 bp, Homo sapiens
caacctcatcttgtt

SEQ ID NO: 1744455 - DNA, 15 bp, Homo sapiens
aacctcatcttgttt

SEQ ID NO: 1744456 - DNA, 15 bp, Homo sapiens
acctcatcttgtttt

SEQ ID NO: 1744457 - DNA, 15 bp, Homo sapiens
cctcatcttgttttc

SEQ ID NO: 1744458 - DNA, 15 bp, Homo sapiens
ctcatcttgttttct

SEQ ID NO: 1744459 - DNA, 15 bp, Homo sapiens
tcatcttgttttctt

SEQ ID NO: 1744460 - DNA, 15 bp, Homo sapiens
catcttgttttcttt

SEQ ID NO: 1744461 - DNA, 15 bp, Homo sapiens
atcttgttttctttc

SEQ ID NO: 1744462 - DNA, 15 bp, Homo sapiens
tcttgttttctttct

SEQ ID NO: 1744463 - DNA, 15 bp, Homo sapiens
cttgttttctttctc

SEQ ID NO: 1744464 - DNA, 15 bp, Homo sapiens
ttgttttctttctca

SEQ ID NO: 1744465 - DNA, 15 bp, Homo sapiens
tgttttctttctcac

SEQ ID NO: 1744466 - DNA, 15 bp, Homo sapiens
gttttctttctcact

SEQ ID NO: 1744467 - DNA, 15 bp, Homo sapiens
ttttctttctcactc

SEQ ID NO: 1744468 - DNA, 15 bp, Homo sapiens
tttctttctcactct

SEQ ID NO: 1744469 - DNA, 15 bp, Homo sapiens
ttctttctcactctg

SEQ ID NO: 1744470 - DNA, 15 bp, Homo sapiens
tctttctcactctgt

SEQ ID NO: 1744471 - DNA, 15 bp, Homo sapiens
ctttctcactctgtg

SEQ ID NO: 1744472 - DNA, 15 bp, Homo sapiens
tttctcactctgtgt

SEQ ID NO: 1744473 - DNA, 15 bp, Homo sapiens
ttctcactctgtgtt

SEQ ID NO: 1744474 - DNA, 15 bp, Homo sapiens
tctcactctgtgtta

SEQ ID NO: 1744475 - DNA, 15 bp, Homo sapiens
ctcactctgtgttag

SEQ ID NO: 1744476 - DNA, 15 bp, Homo sapiens
tcactctgtgttagc

SEQ ID NO: 1744477 - DNA, 15 bp, Homo sapiens
cactctgtgttagcc

SEQ ID NO: 1744478 - DNA, 15 bp, Homo sapiens
actctgtgttagcca

SEQ ID NO: 1744479 - DNA, 15 bp, Homo sapiens
ctctgtgttagccac

SEQ ID NO: 1744480 - DNA, 15 bp, Homo sapiens
tctgtgttagccaca

SEQ ID NO: 1744481 - DNA, 15 bp, Homo sapiens
ctgtgttagccacac

SEQ ID NO: 1744482 - DNA, 15 bp, Homo sapiens
tgtgttagccacact

SEQ ID NO: 1744483 - DNA, 15 bp, Homo sapiens
gtgttagccacactt

SEQ ID NO: 1744484 - DNA, 15 bp, Homo sapiens
tgttagccacacttt

SEQ ID NO: 1744485 - DNA, 15 bp, Homo sapiens
gttagccacactttg

SEQ ID NO: 1744486 - DNA, 15 bp, Homo sapiens
ttagccacactttgg

SEQ ID NO: 1744487 - DNA, 15 bp, Homo sapiens
tagccacactttggc

SEQ ID NO: 1744488 - DNA, 15 bp, Homo sapiens
agccacactttggcc

SEQ ID NO: 1744489 - DNA, 15 bp, Homo sapiens
gccacactttggcct

SEQ ID NO: 1744490 - DNA, 15 bp, Homo sapiens
ccacactttggcctt

SEQ ID NO: 1744491 - DNA, 15 bp, Homo sapiens
cacactttggccttc

SEQ ID NO: 1744492 - DNA, 15 bp, Homo sapiens
acactttggccttct

SEQ ID NO: 1744493 - DNA, 15 bp, Homo sapiens
cactttggccttctc

SEQ ID NO: 1744494 - DNA, 15 bp, Homo sapiens
actttggccttctct

SEQ ID NO: 1744495 - DNA, 15 bp, Homo sapiens
ctttggccttctctg

SEQ ID NO: 1744496 - DNA, 15 bp, Homo sapiens
tttggccttctctgt

SEQ ID NO: 1744497 - DNA, 15 bp, Homo sapiens
ttggccttctctgtt

SEQ ID NO: 1744498 - DNA, 15 bp, Homo sapiens
tggccttctctgttt

SEQ ID NO: 1744499 - DNA, 15 bp, Homo sapiens
ggccttctctgtttc

SEQ ID NO: 1744500 - DNA, 15 bp, Homo sapiens
gccttctctgtttct

SEQ ID NO: 1744501 - DNA, 15 bp, Homo sapiens
ccttctctgtttctt

SEQ ID NO: 1744502 - DNA, 15 bp, Homo sapiens
cttctctgtttcttg

SEQ ID NO: 1744503 - DNA, 15 bp, Homo sapiens
ttctctgtttcttgg

SEQ ID NO: 1744504 - DNA, 15 bp, Homo sapiens
tctctgtttcttggg

SEQ ID NO: 1744505 - DNA, 15 bp, Homo sapiens
tctgtttcttgggct

SEQ ID NO: 1744506 - DNA, 15 bp, Homo sapiens
ctgtttcttgggctt

SEQ ID NO: 1744507 - DNA, 15 bp, Homo sapiens
tgtttcttgggcttt

SEQ ID NO: 1744508 - DNA, 15 bp, Homo sapiens
gtttcttgggctttc

SEQ ID NO: 1744509 - DNA, 15 bp, Homo sapiens
tttcttgggctttcc

SEQ ID NO: 1744510 - DNA, 15 bp, Homo sapiens
ttcttgggctttcca

SEQ ID NO: 1744511 - DNA, 15 bp, Homo sapiens
tcttgggctttccaa

SEQ ID NO: 1744512 - DNA, 15 bp, Homo sapiens
cttgggctttccaag

SEQ ID NO: 1744513 - DNA, 15 bp, Homo sapiens
ttgggctttccaagt

SEQ ID NO: 1744514 - DNA, 15 bp, Homo sapiens
tgggctttccaagtt

SEQ ID NO: 1744515 - DNA, 15 bp, Homo sapiens
gggctttccaagttt

SEQ ID NO: 1744516 - DNA, 15 bp, Homo sapiens
ggctttccaagtttt

SEQ ID NO: 1744517 - DNA, 15 bp, Homo sapiens
gctttccaagttttt

SEQ ID NO: 1744518 - DNA, 15 bp, Homo sapiens
ctttccaagtttttt

SEQ ID NO: 1744519 - DNA, 15 bp, Homo sapiens
tttccaagttttttg

SEQ ID NO: 1744520 - DNA, 15 bp, Homo sapiens
ttccaagttttttga

SEQ ID NO: 1744521 - DNA, 15 bp, Homo sapiens
tccaagttttttgaa

SEQ ID NO: 1744522 - DNA, 15 bp, Homo sapiens
ccaagttttttgaaa

SEQ ID NO: 1744523 - DNA, 15 bp, Homo sapiens
caagttttttgaaaa

SEQ ID NO: 1744524 - DNA, 15 bp, Homo sapiens
aagttttttgaaaac

SEQ ID NO: 1744525 - DNA, 15 bp, Homo sapiens
agttttttgaaaacc

SEQ ID NO: 1744526 - DNA, 15 bp, Homo sapiens
gttttttgaaaaccc

SEQ ID NO: 1744527 - DNA, 15 bp, Homo sapiens
ttttttgaaaaccct

SEQ ID NO: 1744528 - DNA, 15 bp, Homo sapiens
tttttgaaaaccctc

SEQ ID NO: 1744529 - DNA, 15 bp, Homo sapiens
ttttgaaaaccctcg

SEQ ID NO: 1744530 - DNA, 15 bp, Homo sapiens
tttgaaaaccctcgt

SEQ ID NO: 1744531 - DNA, 15 bp, Homo sapiens
ttgaaaaccctcgta

SEQ ID NO: 1744532 - DNA, 15 bp, Homo sapiens
tgaaaaccctcgtac

SEQ ID NO: 1744533 - DNA, 15 bp, Homo sapiens
gaaaaccctcgtact

SEQ ID NO: 1744534 - DNA, 15 bp, Homo sapiens
aaaaccctcgtactt

SEQ ID NO: 1744535 - DNA, 15 bp, Homo sapiens
aaaccctcgtacttg

SEQ ID NO: 1744536 - DNA, 15 bp, Homo sapiens
aaccctcgtacttga

SEQ ID NO: 1744537 - DNA, 15 bp, Homo sapiens
accctcgtacttgat

SEQ ID NO: 1744538 - DNA, 15 bp, Homo sapiens
ccctcgtacttgata

SEQ ID NO: 1744539 - DNA, 15 bp, Homo sapiens
cctcgtacttgatat

SEQ ID NO: 1744540 - DNA, 15 bp, Homo sapiens
ctcgtacttgatatt

SEQ ID NO: 1744541 - DNA, 15 bp, Homo sapiens
tcgtacttgatattc

SEQ ID NO: 1744542 - DNA, 15 bp, Homo sapiens
cgtacttgatattcc

SEQ ID NO: 1744543 - DNA, 15 bp, Homo sapiens
gtacttgatattccc

SEQ ID NO: 1744544 - DNA, 15 bp, Homo sapiens
tacttgatattccct

SEQ ID NO: 1744545 - DNA, 15 bp, Homo sapiens
acttgatattccctc

SEQ ID NO: 1744546 - DNA, 15 bp, Homo sapiens
cttgatattccctct

SEQ ID NO: 1744547 - DNA, 15 bp, Homo sapiens
ttgatattccctctt

SEQ ID NO: 1744548 - DNA, 15 bp, Homo sapiens
tgatattccctcttc

SEQ ID NO: 1744549 - DNA, 15 bp, Homo sapiens
gatattccctcttct

SEQ ID NO: 1744550 - DNA, 15 bp, Homo sapiens
atattccctcttctt

SEQ ID NO: 1744551 - DNA, 15 bp, Homo sapiens
tattccctcttcttg

SEQ ID NO: 1744552 - DNA, 15 bp, Homo sapiens
attccctcttcttga

SEQ ID NO: 1744553 - DNA, 15 bp, Homo sapiens
ttccctcttcttgaa

SEQ ID NO: 1744554 - DNA, 15 bp, Homo sapiens
tccctcttcttgaaa

SEQ ID NO: 1744555 - DNA, 15 bp, Homo sapiens
ccctcttcttgaaat

SEQ ID NO: 1744556 - DNA, 15 bp, Homo sapiens
cctcttcttgaaatt

SEQ ID NO: 1744557 - DNA, 15 bp, Homo sapiens
ctcttcttgaaattt

SEQ ID NO: 1744558 - DNA, 15 bp, Homo sapiens
tcttcttgaaatttc

SEQ ID NO: 1744559 - DNA, 15 bp, Homo sapiens
cttcttgaaatttcc

SEQ ID NO: 1744560 - DNA, 15 bp, Homo sapiens
ttcttgaaatttcct

SEQ ID NO: 1744561 - DNA, 15 bp, Homo sapiens
tcttgaaatttcctc

SEQ ID NO: 1744562 - DNA, 15 bp, Homo sapiens
cttgaaatttcctcc

SEQ ID NO: 1744563 - DNA, 15 bp, Homo sapiens
ttgaaatttcctcct

SEQ ID NO: 1744564 - DNA, 15 bp, Homo sapiens
tgaaatttcctcctt

SEQ ID NO: 1744565 - DNA, 15 bp, Homo sapiens
gaaatttcctccttt

SEQ ID NO: 1744566 - DNA, 15 bp, Homo sapiens
aaatttcctcctttt

SEQ ID NO: 1744567 - DNA, 15 bp, Homo sapiens
aatttcctccttttc

SEQ ID NO: 1744568 - DNA, 15 bp, Homo sapiens
atttcctccttttct

SEQ ID NO: 1744569 - DNA, 15 bp, Homo sapiens
tttcctccttttctt

SEQ ID NO: 1744570 - DNA, 15 bp, Homo sapiens
ttcctccttttcttt

SEQ ID NO: 1744571 - DNA, 15 bp, Homo sapiens
tcctccttttctttc

SEQ ID NO: 1744572 - DNA, 15 bp, Homo sapiens
cctccttttctttcc

SEQ ID NO: 1744573 - DNA, 15 bp, Homo sapiens
ctccttttctttcca

SEQ ID NO: 1744574 - DNA, 15 bp, Homo sapiens
tccttttctttccat

SEQ ID NO: 1744575 - DNA, 15 bp, Homo sapiens
ccttttctttccatg

SEQ ID NO: 1744576 - DNA, 15 bp, Homo sapiens
cttttctttccatgg

SEQ ID NO: 1744577 - DNA, 15 bp, Homo sapiens
ttttctttccatgga

SEQ ID NO: 1744578 - DNA, 15 bp, Homo sapiens
tttctttccatggat

SEQ ID NO: 1744579 - DNA, 15 bp, Homo sapiens
ttctttccatggatt

SEQ ID NO: 1744580 - DNA, 15 bp, Homo sapiens
tctttccatggatta

SEQ ID NO: 1744581 - DNA, 15 bp, Homo sapiens
ctttccatggattac

SEQ ID NO: 1744582 - DNA, 15 bp, Homo sapiens
tttccatggattacc

SEQ ID NO: 1744583 - DNA, 15 bp, Homo sapiens
ttccatggattacca

SEQ ID NO: 1744584 - DNA, 15 bp, Homo sapiens
tccatggattaccaa

SEQ ID NO: 1744585 - DNA, 15 bp, Homo sapiens
ccatggattaccaac

SEQ ID NO: 1744586 - DNA, 15 bp, Homo sapiens
catggattaccaact

SEQ ID NO: 1744587 - DNA, 15 bp, Homo sapiens
atggattaccaactg

SEQ ID NO: 1744588 - DNA, 15 bp, Homo sapiens
tggattaccaactgc

SEQ ID NO: 1744589 - DNA, 15 bp, Homo sapiens
ggattaccaactgct

SEQ ID NO: 1744590 - DNA, 15 bp, Homo sapiens
gattaccaactgcta

SEQ ID NO: 1744591 - DNA, 15 bp, Homo sapiens
attaccaactgctac

SEQ ID NO: 1744592 - DNA, 15 bp, Homo sapiens
ttaccaactgctact

SEQ ID NO: 1744593 - DNA, 15 bp, Homo sapiens
taccaactgctactc

SEQ ID NO: 1744594 - DNA, 15 bp, Homo sapiens
accaactgctactct

SEQ ID NO: 1744595 - DNA, 15 bp, Homo sapiens
ccaactgctactctt

SEQ ID NO: 1744596 - DNA, 15 bp, Homo sapiens
caactgctactcttc

SEQ ID NO: 1744597 - DNA, 15 bp, Homo sapiens
aactgctactcttca

SEQ ID NO: 1744598 - DNA, 15 bp, Homo sapiens
actgctactcttcat

SEQ ID NO: 1744599 - DNA, 15 bp, Homo sapiens
ctgctactcttcatt

SEQ ID NO: 1744600 - DNA, 15 bp, Homo sapiens
tgctactcttcattc

SEQ ID NO: 1744601 - DNA, 15 bp, Homo sapiens
gctactcttcattca

SEQ ID NO: 1744602 - DNA, 15 bp, Homo sapiens
ctactcttcattcag

SEQ ID NO: 1744603 - DNA, 15 bp, Homo sapiens
tactcttcattcagc

SEQ ID NO: 1744604 - DNA, 15 bp, Homo sapiens
actcttcattcagca

SEQ ID NO: 1744605 - DNA, 15 bp, Homo sapiens
ctcttcattcagcac

SEQ ID NO: 1744606 - DNA, 15 bp, Homo sapiens
tcttcattcagcaca

SEQ ID NO: 1744607 - DNA, 15 bp, Homo sapiens
cttcattcagcacaa

SEQ ID NO: 1744608 - DNA, 15 bp, Homo sapiens
ttcattcagcacaaa

SEQ ID NO: 1744609 - DNA, 15 bp, Homo sapiens
tcattcagcacaaat

SEQ ID NO: 1744610 - DNA, 15 bp, Homo sapiens
cattcagcacaaata

SEQ ID NO: 1744611 - DNA, 15 bp, Homo sapiens
attcagcacaaatat

SEQ ID NO: 1744612 - DNA, 15 bp, Homo sapiens
ttcagcacaaatatt

SEQ ID NO: 1744613 - DNA, 15 bp, Homo sapiens
tcagcacaaatattg

SEQ ID NO: 1744614 - DNA, 15 bp, Homo sapiens
cagcacaaatattgc

SEQ ID NO: 1744615 - DNA, 15 bp, Homo sapiens
agcacaaatattgct

SEQ ID NO: 1744616 - DNA, 15 bp, Homo sapiens
gcacaaatattgctt

SEQ ID NO: 1744617 - DNA, 15 bp, Homo sapiens
cacaaatattgcttt

SEQ ID NO: 1744618 - DNA, 15 bp, Homo sapiens
acaaatattgctttt

SEQ ID NO: 1744619 - DNA, 15 bp, Homo sapiens
caaatattgcttttg

SEQ ID NO: 1744620 - DNA, 15 bp, Homo sapiens
aaatattgcttttga

SEQ ID NO: 1744621 - DNA, 15 bp, Homo sapiens
aatattgcttttgaa

SEQ ID NO: 1744622 - DNA, 15 bp, Homo sapiens
atattgcttttgaaa

SEQ ID NO: 1744623 - DNA, 15 bp, Homo sapiens
tattgcttttgaaaa

SEQ ID NO: 1744624 - DNA, 15 bp, Homo sapiens
attgcttttgaaaag

SEQ ID NO: 1744625 - DNA, 15 bp, Homo sapiens
ttgcttttgaaaaga

SEQ ID NO: 1744626 - DNA, 15 bp, Homo sapiens
tgcttttgaaaagat

SEQ ID NO: 1744627 - DNA, 15 bp, Homo sapiens
gcttttgaaaagata

SEQ ID NO: 1744628 - DNA, 15 bp, Homo sapiens
cttttgaaaagatat

SEQ ID NO: 1744629 - DNA, 15 bp, Homo sapiens
ttttgaaaagatatt

SEQ ID NO: 1744630 - DNA, 15 bp, Homo sapiens
tttgaaaagatattt

SEQ ID NO: 1744631 - DNA, 15 bp, Homo sapiens
ttgaaaagatatttc

SEQ ID NO: 1744632 - DNA, 15 bp, Homo sapiens
tgaaaagatatttct

SEQ ID NO: 1744633 - DNA, 15 bp, Homo sapiens
gaaaagatatttctc

SEQ ID NO: 1744634 - DNA, 15 bp, Homo sapiens
aaaagatatttctct

SEQ ID NO: 1744635 - DNA, 15 bp, Homo sapiens
aaagatatttctctc

SEQ ID NO: 1744636 - DNA, 15 bp, Homo sapiens
aagatatttctctct

SEQ ID NO: 1744637 - DNA, 15 bp, Homo sapiens
agatatttctctctg

SEQ ID NO: 1744638 - DNA, 15 bp, Homo sapiens
gatatttctctctga

SEQ ID NO: 1744639 - DNA, 15 bp, Homo sapiens
atatttctctctgaa

SEQ ID NO: 1744640 - DNA, 15 bp, Homo sapiens
tatttctctctgaag

SEQ ID NO: 1744641 - DNA, 15 bp, Homo sapiens
atttctctctgaagt

SEQ ID NO: 1744642 - DNA, 15 bp, Homo sapiens
tttctctctgaagta

SEQ ID NO: 1744643 - DNA, 15 bp, Homo sapiens
ttctctctgaagtat

SEQ ID NO: 1744644 - DNA, 15 bp, Homo sapiens
tctctctgaagtatt

SEQ ID NO: 1744645 - DNA, 15 bp, Homo sapiens
ctctctgaagtattt

SEQ ID NO: 1744646 - DNA, 15 bp, Homo sapiens
tctctgaagtatttt

SEQ ID NO: 1744647 - DNA, 15 bp, Homo sapiens
ctctgaagtatttta

SEQ ID NO: 1744648 - DNA, 15 bp, Homo sapiens
tctgaagtattttat

SEQ ID NO: 1744649 - DNA, 15 bp, Homo sapiens
ctgaagtattttatt

SEQ ID NO: 1744650 - DNA, 15 bp, Homo sapiens
tgaagtattttatta

SEQ ID NO: 1744651 - DNA, 15 bp, Homo sapiens
gaagtattttattat

SEQ ID NO: 1744652 - DNA, 15 bp, Homo sapiens
aagtattttattatt

SEQ ID NO: 1744653 - DNA, 15 bp, Homo sapiens
agtattttattattt

SEQ ID NO: 1744654 - DNA, 15 bp, Homo sapiens
gtattttattatttc

SEQ ID NO: 1744655 - DNA, 15 bp, Homo sapiens
tattttattatttct

SEQ ID NO: 1744656 - DNA, 15 bp, Homo sapiens
attttattatttctc

SEQ ID NO: 1744657 - DNA, 15 bp, Homo sapiens
ttttattatttctca

SEQ ID NO: 1744658 - DNA, 15 bp, Homo sapiens
tttattatttctcat

SEQ ID NO: 1744659 - DNA, 15 bp, Homo sapiens
ttattatttctcata

SEQ ID NO: 1744660 - DNA, 15 bp, Homo sapiens
tattatttctcatat

SEQ ID NO: 1744661 - DNA, 15 bp, Homo sapiens
attatttctcatatc

SEQ ID NO: 1744662 - DNA, 15 bp, Homo sapiens
ttatttctcatatca

SEQ ID NO: 1744663 - DNA, 15 bp, Homo sapiens
tatttctcatatcat

SEQ ID NO: 1744664 - DNA, 15 bp, Homo sapiens
atttctcatatcatc

SEQ ID NO: 1744665 - DNA, 15 bp, Homo sapiens
tttctcatatcatcc

SEQ ID NO: 1744666 - DNA, 15 bp, Homo sapiens
ttctcatatcatcct

SEQ ID NO: 1744667 - DNA, 15 bp, Homo sapiens
tctcatatcatcctg

SEQ ID NO: 1744668 - DNA, 15 bp, Homo sapiens
ctcatatcatcctgt

SEQ ID NO: 1744669 - DNA, 15 bp, Homo sapiens
tcatatcatcctgtt

SEQ ID NO: 1744670 - DNA, 15 bp, Homo sapiens
catatcatcctgttc

SEQ ID NO: 1744671 - DNA, 15 bp, Homo sapiens
atatcatcctgttcc

SEQ ID NO: 1744672 - DNA, 15 bp, Homo sapiens
tatcatcctgttcca

SEQ ID NO: 1744673 - DNA, 15 bp, Homo sapiens
atcatcctgttccat

SEQ ID NO: 1744674 - DNA, 15 bp, Homo sapiens
tcatcctgttccatt

SEQ ID NO: 1744675 - DNA, 15 bp, Homo sapiens
catcctgttccattc

SEQ ID NO: 1744676 - DNA, 15 bp, Homo sapiens
atcctgttccattcc

SEQ ID NO: 1744677 - DNA, 15 bp, Homo sapiens
tcctgttccattcct

SEQ ID NO: 1744678 - DNA, 15 bp, Homo sapiens
cctgttccattcctt

SEQ ID NO: 1744679 - DNA, 15 bp, Homo sapiens
ctgttccattccttt

SEQ ID NO: 1744680 - DNA, 15 bp, Homo sapiens
tgttccattccttta

SEQ ID NO: 1744681 - DNA, 15 bp, Homo sapiens
gttccattcctttat

SEQ ID NO: 1744682 - DNA, 15 bp, Homo sapiens
ttccattcctttata

SEQ ID NO: 1744683 - DNA, 15 bp, Homo sapiens
tccattcctttatag

SEQ ID NO: 1744684 - DNA, 15 bp, Homo sapiens
ccattcctttatagc

SEQ ID NO: 1744685 - DNA, 15 bp, Homo sapiens
cattcctttatagca

SEQ ID NO: 1744686 - DNA, 15 bp, Homo sapiens
attcctttatagcat

SEQ ID NO: 1744687 - DNA, 15 bp, Homo sapiens
ttcctttatagcatg

SEQ ID NO: 1744688 - DNA, 15 bp, Homo sapiens
tcctttatagcatgt

SEQ ID NO: 1744689 - DNA, 15 bp, Homo sapiens
cctttatagcatgta

SEQ ID NO: 1744690 - DNA, 15 bp, Homo sapiens
ctttatagcatgtat

SEQ ID NO: 1744691 - DNA, 15 bp, Homo sapiens
tttatagcatgtatc

SEQ ID NO: 1744692 - DNA, 15 bp, Homo sapiens
ttatagcatgtatcc

SEQ ID NO: 1744693 - DNA, 15 bp, Homo sapiens
tatagcatgtatccc

SEQ ID NO: 1744694 - DNA, 15 bp, Homo sapiens
atagcatgtatccca

SEQ ID NO: 1744695 - DNA, 15 bp, Homo sapiens
tagcatgtatcccaa

SEQ ID NO: 1744696 - DNA, 15 bp, Homo sapiens
agcatgtatcccaat

SEQ ID NO: 1744697 - DNA, 15 bp, Homo sapiens
gcatgtatcccaatt

SEQ ID NO: 1744698 - DNA, 15 bp, Homo sapiens
catgtatcccaattt

SEQ ID NO: 1744699 - DNA, 15 bp, Homo sapiens
atgtatcccaattta

SEQ ID NO: 1744700 - DNA, 15 bp, Homo sapiens
tgtatcccaatttat

SEQ ID NO: 1744701 - DNA, 15 bp, Homo sapiens
gtatcccaatttata

SEQ ID NO: 1744702 - DNA, 15 bp, Homo sapiens
tatcccaatttatat

SEQ ID NO: 1744703 - DNA, 15 bp, Homo sapiens
atcccaatttatatt

SEQ ID NO: 1744704 - DNA, 15 bp, Homo sapiens
tcccaatttatattg

SEQ ID NO: 1744705 - DNA, 15 bp, Homo sapiens
cccaatttatattga

SEQ ID NO: 1744706 - DNA, 15 bp, Homo sapiens
ccaatttatattgat

SEQ ID NO: 1744707 - DNA, 15 bp, Homo sapiens
caatttatattgata

SEQ ID NO: 1744708 - DNA, 15 bp, Homo sapiens
aatttatattgatag

SEQ ID NO: 1744709 - DNA, 15 bp, Homo sapiens
atttatattgataga

SEQ ID NO: 1744710 - DNA, 15 bp, Homo sapiens
tttatattgatagat

SEQ ID NO: 1744711 - DNA, 15 bp, Homo sapiens
ttatattgatagatt

SEQ ID NO: 1744712 - DNA, 15 bp, Homo sapiens
tatattgatagattc

SEQ ID NO: 1744713 - DNA, 15 bp, Homo sapiens
atattgatagattca

SEQ ID NO: 1744714 - DNA, 15 bp, Homo sapiens
tattgatagattcat

SEQ ID NO: 1744715 - DNA, 15 bp, Homo sapiens
attgatagattcatt

SEQ ID NO: 1744716 - DNA, 15 bp, Homo sapiens
ttgatagattcattt

SEQ ID NO: 1744717 - DNA, 15 bp, Homo sapiens
tgatagattcatttg

SEQ ID NO: 1744718 - DNA, 15 bp, Homo sapiens
gatagattcatttgt

SEQ ID NO: 1744719 - DNA, 15 bp, Homo sapiens
atagattcatttgtg

SEQ ID NO: 1744720 - DNA, 15 bp, Homo sapiens
tagattcatttgtgt

SEQ ID NO: 1744721 - DNA, 15 bp, Homo sapiens
agattcatttgtgtt

SEQ ID NO: 1744722 - DNA, 15 bp, Homo sapiens
gattcatttgtgttt

SEQ ID NO: 1744723 - DNA, 15 bp, Homo sapiens
attcatttgtgtttg

SEQ ID NO: 1744724 - DNA, 15 bp, Homo sapiens
ttcatttgtgtttgc

SEQ ID NO: 1744725 - DNA, 15 bp, Homo sapiens
tcatttgtgtttgct

SEQ ID NO: 1744726 - DNA, 15 bp, Homo sapiens
catttgtgtttgctt

SEQ ID NO: 1744727 - DNA, 15 bp, Homo sapiens
atttgtgtttgcttg

SEQ ID NO: 1744728 - DNA, 15 bp, Homo sapiens
tttgtgtttgcttgc

SEQ ID NO: 1744729 - DNA, 15 bp, Homo sapiens
ttgtgtttgcttgct

SEQ ID NO: 1744730 - DNA, 15 bp, Homo sapiens
tgtgtttgcttgctt

SEQ ID NO: 1744731 - DNA, 15 bp, Homo sapiens
gtgtttgcttgcttt

SEQ ID NO: 1744732 - DNA, 15 bp, Homo sapiens
tgtttgcttgctttt

SEQ ID NO: 1744733 - DNA, 15 bp, Homo sapiens
gtttgcttgctttta

SEQ ID NO: 1744734 - DNA, 15 bp, Homo sapiens
tttgcttgcttttac

SEQ ID NO: 1744735 - DNA, 15 bp, Homo sapiens
ttgcttgcttttact

SEQ ID NO: 1744736 - DNA, 15 bp, Homo sapiens
tgcttgcttttacta

SEQ ID NO: 1744737 - DNA, 15 bp, Homo sapiens
gcttgcttttactaa

SEQ ID NO: 1744738 - DNA, 15 bp, Homo sapiens
cttgcttttactaat

SEQ ID NO: 1744739 - DNA, 15 bp, Homo sapiens
ttgcttttactaata

SEQ ID NO: 1744740 - DNA, 15 bp, Homo sapiens
tgcttttactaatac

SEQ ID NO: 1744741 - DNA, 15 bp, Homo sapiens
gcttttactaatacc

SEQ ID NO: 1744742 - DNA, 15 bp, Homo sapiens
cttttactaataccc

SEQ ID NO: 1744743 - DNA, 15 bp, Homo sapiens
ttttactaataccca

SEQ ID NO: 1744744 - DNA, 15 bp, Homo sapiens
tttactaatacccaa

SEQ ID NO: 1744745 - DNA, 15 bp, Homo sapiens
ttactaatacccaaa

SEQ ID NO: 1744746 - DNA, 15 bp, Homo sapiens
tactaatacccaaaa

SEQ ID NO: 1744747 - DNA, 15 bp, Homo sapiens
actaatacccaaaat

SEQ ID NO: 1744748 - DNA, 15 bp, Homo sapiens
ctaatacccaaaata

SEQ ID NO: 1744749 - DNA, 15 bp, Homo sapiens
taatacccaaaatag

SEQ ID NO: 1744750 - DNA, 15 bp, Homo sapiens
aatacccaaaatagc

SEQ ID NO: 1744751 - DNA, 15 bp, Homo sapiens
atacccaaaatagcc

SEQ ID NO: 1744752 - DNA, 15 bp, Homo sapiens
tacccaaaatagcct

SEQ ID NO: 1744753 - DNA, 15 bp, Homo sapiens
acccaaaatagcctt

SEQ ID NO: 1744754 - DNA, 15 bp, Homo sapiens
cccaaaatagcctta

SEQ ID NO: 1744755 - DNA, 15 bp, Homo sapiens
ccaaaatagccttaa

SEQ ID NO: 1744756 - DNA, 15 bp, Homo sapiens
caaaatagccttaaa

SEQ ID NO: 1744757 - DNA, 15 bp, Homo sapiens
aaaatagccttaaaa

SEQ ID NO: 1744758 - DNA, 15 bp, Homo sapiens
aaatagccttaaaat

SEQ ID NO: 1744759 - DNA, 15 bp, Homo sapiens
aatagccttaaaatt

SEQ ID NO: 1744760 - DNA, 15 bp, Homo sapiens
atagccttaaaattc

SEQ ID NO: 1744761 - DNA, 15 bp, Homo sapiens
tagccttaaaattcc

SEQ ID NO: 1744762 - DNA, 15 bp, Homo sapiens
agccttaaaattcca

SEQ ID NO: 1744763 - DNA, 15 bp, Homo sapiens
gccttaaaattccat

SEQ ID NO: 1744764 - DNA, 15 bp, Homo sapiens
ccttaaaattccata

SEQ ID NO: 1744765 - DNA, 15 bp, Homo sapiens
cttaaaattccatat

SEQ ID NO: 1744766 - DNA, 15 bp, Homo sapiens
ttaaaattccatatc

SEQ ID NO: 1744767 - DNA, 15 bp, Homo sapiens
taaaattccatatca

SEQ ID NO: 1744768 - DNA, 15 bp, Homo sapiens
aaaattccatatcac

SEQ ID NO: 1744769 - DNA, 15 bp, Homo sapiens
aaattccatatcaca

SEQ ID NO: 1744770 - DNA, 15 bp, Homo sapiens
aattccatatcacag

SEQ ID NO: 1744771 - DNA, 15 bp, Homo sapiens
attccatatcacaga

SEQ ID NO: 1744772 - DNA, 15 bp, Homo sapiens
ttccatatcacagag

SEQ ID NO: 1744773 - DNA, 15 bp, Homo sapiens
tccatatcacagaga

SEQ ID NO: 1744774 - DNA, 15 bp, Homo sapiens
ccatatcacagagac

SEQ ID NO: 1744775 - DNA, 15 bp, Homo sapiens
catatcacagagacc

SEQ ID NO: 1744776 - DNA, 15 bp, Homo sapiens
atatcacagagacca

SEQ ID NO: 1744777 - DNA, 15 bp, Homo sapiens
tatcacagagaccat

SEQ ID NO: 1744778 - DNA, 15 bp, Homo sapiens
atcacagagaccata

SEQ ID NO: 1744779 - DNA, 15 bp, Homo sapiens
tcacagagaccataa

SEQ ID NO: 1744780 - DNA, 15 bp, Homo sapiens
cacagagaccataac

SEQ ID NO: 1744781 - DNA, 15 bp, Homo sapiens
acagagaccataacc

SEQ ID NO: 1744782 - DNA, 15 bp, Homo sapiens
cagagaccataacct

SEQ ID NO: 1744783 - DNA, 15 bp, Homo sapiens
agagaccataacctt

SEQ ID NO: 1744784 - DNA, 15 bp, Homo sapiens
gagaccataaccttt

SEQ ID NO: 1744785 - DNA, 15 bp, Homo sapiens
agaccataacctttt

SEQ ID NO: 1744786 - DNA, 15 bp, Homo sapiens
gaccataaccttttt

SEQ ID NO: 1744787 - DNA, 15 bp, Homo sapiens
accataacctttttg

SEQ ID NO: 1744788 - DNA, 15 bp, Homo sapiens
ccataacctttttgt

SEQ ID NO: 1744789 - DNA, 15 bp, Homo sapiens
cataacctttttgtt

SEQ ID NO: 1744790 - DNA, 15 bp, Homo sapiens
ataacctttttgttc

SEQ ID NO: 1744791 - DNA, 15 bp, Homo sapiens
taacctttttgttca

SEQ ID NO: 1744792 - DNA, 15 bp, Homo sapiens
aacctttttgttcac

SEQ ID NO: 1744793 - DNA, 15 bp, Homo sapiens
acctttttgttcact

SEQ ID NO: 1744794 - DNA, 15 bp, Homo sapiens
cctttttgttcactg

SEQ ID NO: 1744795 - DNA, 15 bp, Homo sapiens
ctttttgttcactgt

SEQ ID NO: 1744796 - DNA, 15 bp, Homo sapiens
tttttgttcactgtc

SEQ ID NO: 1744797 - DNA, 15 bp, Homo sapiens
ttttgttcactgtct

SEQ ID NO: 1744798 - DNA, 15 bp, Homo sapiens
tttgttcactgtcta

SEQ ID NO: 1744799 - DNA, 15 bp, Homo sapiens
ttgttcactgtctaa

SEQ ID NO: 1744800 - DNA, 15 bp, Homo sapiens
tgttcactgtctaat

SEQ ID NO: 1744801 - DNA, 15 bp, Homo sapiens
gttcactgtctaata

SEQ ID NO: 1744802 - DNA, 15 bp, Homo sapiens
ttcactgtctaataa

SEQ ID NO: 1744803 - DNA, 15 bp, Homo sapiens
tcactgtctaataat

SEQ ID NO: 1744804 - DNA, 15 bp, Homo sapiens
cactgtctaataatt

SEQ ID NO: 1744805 - DNA, 15 bp, Homo sapiens
actgtctaataatta

SEQ ID NO: 1744806 - DNA, 15 bp, Homo sapiens
ctgtctaataattag

SEQ ID NO: 1744807 - DNA, 15 bp, Homo sapiens
tgtctaataattagg

SEQ ID NO: 1744808 - DNA, 15 bp, Homo sapiens
gtctaataattaggg

SEQ ID NO: 1744809 - DNA, 15 bp, Homo sapiens
tctaataattagggc

SEQ ID NO: 1744810 - DNA, 15 bp, Homo sapiens
ctaataattagggcc

SEQ ID NO: 1744811 - DNA, 15 bp, Homo sapiens
taataattagggcct

SEQ ID NO: 1744812 - DNA, 15 bp, Homo sapiens
aataattagggcctg

SEQ ID NO: 1744813 - DNA, 15 bp, Homo sapiens
ataattagggcctgt

SEQ ID NO: 1744814 - DNA, 15 bp, Homo sapiens
taattagggcctgtt

SEQ ID NO: 1744815 - DNA, 15 bp, Homo sapiens
aattagggcctgtta

SEQ ID NO: 1744816 - DNA, 15 bp, Homo sapiens
attagggcctgttat

SEQ ID NO: 1744817 - DNA, 15 bp, Homo sapiens
ttagggcctgttata

SEQ ID NO: 1744818 - DNA, 15 bp, Homo sapiens
tagggcctgttataa

SEQ ID NO: 1744819 - DNA, 15 bp, Homo sapiens
agggcctgttataaa

SEQ ID NO: 1744820 - DNA, 15 bp, Homo sapiens
gggcctgttataaaa

SEQ ID NO: 1744821 - DNA, 15 bp, Homo sapiens
ggcctgttataaaac

SEQ ID NO: 1744822 - DNA, 15 bp, Homo sapiens
gcctgttataaaact

SEQ ID NO: 1744823 - DNA, 15 bp, Homo sapiens
cctgttataaaactt

SEQ ID NO: 1744824 - DNA, 15 bp, Homo sapiens
ctgttataaaacttg

SEQ ID NO: 1744825 - DNA, 15 bp, Homo sapiens
tgttataaaacttgg

SEQ ID NO: 1744826 - DNA, 15 bp, Homo sapiens
gttataaaacttggt

SEQ ID NO: 1744827 - DNA, 15 bp, Homo sapiens
ttataaaacttggta

SEQ ID NO: 1744828 - DNA, 15 bp, Homo sapiens
tataaaacttggtac

SEQ ID NO: 1744829 - DNA, 15 bp, Homo sapiens
ataaaacttggtaca

SEQ ID NO: 1744830 - DNA, 15 bp, Homo sapiens
taaaacttggtacat

SEQ ID NO: 1744831 - DNA, 15 bp, Homo sapiens
aaaacttggtacata

SEQ ID NO: 1744832 - DNA, 15 bp, Homo sapiens
aaacttggtacatag

SEQ ID NO: 1744833 - DNA, 15 bp, Homo sapiens
aacttggtacatagt

SEQ ID NO: 1744834 - DNA, 15 bp, Homo sapiens
acttggtacatagta

SEQ ID NO: 1744835 - DNA, 15 bp, Homo sapiens
cttggtacatagtag

SEQ ID NO: 1744836 - DNA, 15 bp, Homo sapiens
gtacatagtaggcaa

SEQ ID NO: 1744837 - DNA, 15 bp, Homo sapiens
tacatagtaggcaat

SEQ ID NO: 1744838 - DNA, 15 bp, Homo sapiens
acatagtaggcaatc

SEQ ID NO: 1744839 - DNA, 15 bp, Homo sapiens
catagtaggcaatca

SEQ ID NO: 1744840 - DNA, 15 bp, Homo sapiens
atagtaggcaatcag

SEQ ID NO: 1744841 - DNA, 15 bp, Homo sapiens
tagtaggcaatcagt

SEQ ID NO: 1744842 - DNA, 15 bp, Homo sapiens
agtaggcaatcagta

SEQ ID NO: 1744843 - DNA, 15 bp, Homo sapiens
gtaggcaatcagtaa

SEQ ID NO: 1744844 - DNA, 15 bp, Homo sapiens
taggcaatcagtaat

SEQ ID NO: 1744845 - DNA, 15 bp, Homo sapiens
aggcaatcagtaata

SEQ ID NO: 1744846 - DNA, 15 bp, Homo sapiens
ggcaatcagtaatat

SEQ ID NO: 1744847 - DNA, 15 bp, Homo sapiens
gcaatcagtaatata

SEQ ID NO: 1744848 - DNA, 15 bp, Homo sapiens
caatcagtaatatat

SEQ ID NO: 1744849 - DNA, 15 bp, Homo sapiens
aatcagtaatatatt

SEQ ID NO: 1744850 - DNA, 15 bp, Homo sapiens
atcagtaatatattt

SEQ ID NO: 1744851 - DNA, 15 bp, Homo sapiens
tcagtaatatatttc

SEQ ID NO: 1744852 - DNA, 15 bp, Homo sapiens
cagtaatatatttca

SEQ ID NO: 1744853 - DNA, 15 bp, Homo sapiens
agtaatatatttcaa

SEQ ID NO: 1744854 - DNA, 15 bp, Homo sapiens
gtaatatatttcaaa

SEQ ID NO: 1744855 - DNA, 15 bp, Homo sapiens
taatatatttcaaat

SEQ ID NO: 1744856 - DNA, 15 bp, Homo sapiens
aatatatttcaaatg

SEQ ID NO: 1744857 - DNA, 15 bp, Homo sapiens
atatatttcaaatga

SEQ ID NO: 1744858 - DNA, 15 bp, Homo sapiens
tatatttcaaatgac

SEQ ID NO: 1744859 - DNA, 15 bp, Homo sapiens
atatttcaaatgact

SEQ ID NO: 1744860 - DNA, 15 bp, Homo sapiens
tatttcaaatgactg

SEQ ID NO: 1744861 - DNA, 15 bp, Homo sapiens
atttcaaatgactgt

SEQ ID NO: 1744862 - DNA, 15 bp, Homo sapiens
tttcaaatgactgta

SEQ ID NO: 1744863 - DNA, 15 bp, Homo sapiens
ttcaaatgactgtat

SEQ ID NO: 1744864 - DNA, 15 bp, Homo sapiens
tcaaatgactgtata

SEQ ID NO: 1744865 - DNA, 15 bp, Homo sapiens
caaatgactgtatag

SEQ ID NO: 1744866 - DNA, 15 bp, Homo sapiens
aaatgactgtataga

SEQ ID NO: 1744867 - DNA, 15 bp, Homo sapiens
aatgactgtatagat

SEQ ID NO: 1744868 - DNA, 15 bp, Homo sapiens
atgactgtatagata

SEQ ID NO: 1744869 - DNA, 15 bp, Homo sapiens
tgactgtatagatat

SEQ ID NO: 1744870 - DNA, 15 bp, Homo sapiens
gactgtatagatatg

SEQ ID NO: 1744871 - DNA, 15 bp, Homo sapiens
actgtatagatatgt

SEQ ID NO: 1744872 - DNA, 15 bp, Homo sapiens
ctgtatagatatgta

SEQ ID NO: 1744873 - DNA, 15 bp, Homo sapiens
tgtatagatatgtaa

SEQ ID NO: 1744874 - DNA, 15 bp, Homo sapiens
gtatagatatgtaaa

SEQ ID NO: 1744875 - DNA, 15 bp, Homo sapiens
tatagatatgtaaat

SEQ ID NO: 1744876 - DNA, 15 bp, Homo sapiens
atagatatgtaaatg

SEQ ID NO: 1744877 - DNA, 15 bp, Homo sapiens
tagatatgtaaatgg

SEQ ID NO: 1744878 - DNA, 15 bp, Homo sapiens
agatatgtaaatgga

SEQ ID NO: 1744879 - DNA, 15 bp, Homo sapiens
gatatgtaaatggat

SEQ ID NO: 1744880 - DNA, 15 bp, Homo sapiens
atatgtaaatggata

SEQ ID NO: 1744881 - DNA, 15 bp, Homo sapiens
tatgtaaatggatac

SEQ ID NO: 1744882 - DNA, 15 bp, Homo sapiens
atgtaaatggataca

SEQ ID NO: 1744883 - DNA, 15 bp, Homo sapiens
tgtaaatggatacat

SEQ ID NO: 1744884 - DNA, 15 bp, Homo sapiens
gtaaatggatacatt

SEQ ID NO: 1744885 - DNA, 15 bp, Homo sapiens
taaatggatacattt

SEQ ID NO: 1744886 - DNA, 15 bp, Homo sapiens
aaatggatacatttt

SEQ ID NO: 1744887 - DNA, 15 bp, Homo sapiens
aatggatacattttc

SEQ ID NO: 1744888 - DNA, 15 bp, Homo sapiens
atggatacattttca

SEQ ID NO: 1744889 - DNA, 15 bp, Homo sapiens
tggatacattttcat

SEQ ID NO: 1744890 - DNA, 15 bp, Homo sapiens
ggatacattttcata

SEQ ID NO: 1744891 - DNA, 15 bp, Homo sapiens
gatacattttcatat

SEQ ID NO: 1744892 - DNA, 15 bp, Homo sapiens
atacattttcatata

SEQ ID NO: 1744893 - DNA, 15 bp, Homo sapiens
tacattttcatataa

SEQ ID NO: 1744894 - DNA, 15 bp, Homo sapiens
acattttcatataag

SEQ ID NO: 1744895 - DNA, 15 bp, Homo sapiens
cattttcatataagt

SEQ ID NO: 1744896 - DNA, 15 bp, Homo sapiens
attttcatataagta

SEQ ID NO: 1744897 - DNA, 15 bp, Homo sapiens
ttttcatataagtat

SEQ ID NO: 1744898 - DNA, 15 bp, Homo sapiens
tttcatataagtata

SEQ ID NO: 1744899 - DNA, 15 bp, Homo sapiens
ttcatataagtatag

SEQ ID NO: 1744900 - DNA, 15 bp, Homo sapiens
tcatataagtatagt

SEQ ID NO: 1744901 - DNA, 15 bp, Homo sapiens
catataagtatagta

SEQ ID NO: 1744902 - DNA, 15 bp, Homo sapiens
atataagtatagtat

SEQ ID NO: 1744903 - DNA, 15 bp, Homo sapiens
tataagtatagtata

SEQ ID NO: 1744904 - DNA, 15 bp, Homo sapiens
ataagtatagtatat

SEQ ID NO: 1744905 - DNA, 15 bp, Homo sapiens
taagtatagtatata

SEQ ID NO: 1744906 - DNA, 15 bp, Homo sapiens
aagtatagtatatac

SEQ ID NO: 1744907 - DNA, 15 bp, Homo sapiens
agtatagtatatact

SEQ ID NO: 1744908 - DNA, 15 bp, Homo sapiens
gtatagtatatactt

SEQ ID NO: 1744909 - DNA, 15 bp, Homo sapiens
tatagtatatacttt

SEQ ID NO: 1744910 - DNA, 15 bp, Homo sapiens
atagtatatactttg

SEQ ID NO: 1744911 - DNA, 15 bp, Homo sapiens
tagtatatactttgg

SEQ ID NO: 1744912 - DNA, 15 bp, Homo sapiens
agtatatactttgga

SEQ ID NO: 1744913 - DNA, 15 bp, Homo sapiens
gtatatactttggac

SEQ ID NO: 1744914 - DNA, 15 bp, Homo sapiens
tatatactttggaca

SEQ ID NO: 1744915 - DNA, 15 bp, Homo sapiens
atatactttggacaa

SEQ ID NO: 1744916 - DNA, 15 bp, Homo sapiens
tatactttggacaag

SEQ ID NO: 1744917 - DNA, 15 bp, Homo sapiens
atactttggacaaga

SEQ ID NO: 1744918 - DNA, 15 bp, Homo sapiens
tactttggacaagat

SEQ ID NO: 1744919 - DNA, 15 bp, Homo sapiens
actttggacaagata

SEQ ID NO: 1744920 - DNA, 15 bp, Homo sapiens
ctttggacaagataa

SEQ ID NO: 1744921 - DNA, 15 bp, Homo sapiens
tttggacaagataat

SEQ ID NO: 1744922 - DNA, 15 bp, Homo sapiens
ttggacaagataatg

SEQ ID NO: 1744923 - DNA, 15 bp, Homo sapiens
tggacaagataatga

SEQ ID NO: 1744924 - DNA, 15 bp, Homo sapiens
ggacaagataatgag

SEQ ID NO: 1744925 - DNA, 15 bp, Homo sapiens
gacaagataatgaga

SEQ ID NO: 1744926 - DNA, 15 bp, Homo sapiens
acaagataatgagat

SEQ ID NO: 1744927 - DNA, 15 bp, Homo sapiens
caagataatgagatg

SEQ ID NO: 1744928 - DNA, 15 bp, Homo sapiens
aagataatgagatga

SEQ ID NO: 1744929 - DNA, 15 bp, Homo sapiens
agataatgagatgac

SEQ ID NO: 1744930 - DNA, 15 bp, Homo sapiens
gataatgagatgaca

SEQ ID NO: 1744931 - DNA, 15 bp, Homo sapiens
ataatgagatgacac

SEQ ID NO: 1744932 - DNA, 15 bp, Homo sapiens
taatgagatgacaca

SEQ ID NO: 1744933 - DNA, 15 bp, Homo sapiens
aatgagatgacacag

SEQ ID NO: 1744934 - DNA, 15 bp, Homo sapiens
atgagatgacacaga

SEQ ID NO: 1744935 - DNA, 15 bp, Homo sapiens
tgagatgacacagaa

SEQ ID NO: 1744936 - DNA, 15 bp, Homo sapiens
gagatgacacagaag

SEQ ID NO: 1744937 - DNA, 15 bp, Homo sapiens
agatgacacagaagg

SEQ ID NO: 1744938 - DNA, 15 bp, Homo sapiens
gatgacacagaaggg

SEQ ID NO: 1744939 - DNA, 15 bp, Homo sapiens
atgacacagaaggga

SEQ ID NO: 1744940 - DNA, 15 bp, Homo sapiens
tgacacagaagggac

SEQ ID NO: 1744941 - DNA, 15 bp, Homo sapiens
gacacagaagggact

SEQ ID NO: 1744942 - DNA, 15 bp, Homo sapiens
acacagaagggacta

SEQ ID NO: 1744943 - DNA, 15 bp, Homo sapiens
cacagaagggactat

SEQ ID NO: 1744944 - DNA, 15 bp, Homo sapiens
acagaagggactata

SEQ ID NO: 1744945 - DNA, 15 bp, Homo sapiens
cagaagggactataa

SEQ ID NO: 1744946 - DNA, 15 bp, Homo sapiens
agaagggactataaa

SEQ ID NO: 1744947 - DNA, 15 bp, Homo sapiens
gaagggactataaag

SEQ ID NO: 1744948 - DNA, 15 bp, Homo sapiens
aagggactataaagc

SEQ ID NO: 1744949 - DNA, 15 bp, Homo sapiens
agggactataaagca

SEQ ID NO: 1744950 - DNA, 15 bp, Homo sapiens
gggactataaagcaa

SEQ ID NO: 1744951 - DNA, 15 bp, Homo sapiens
ggactataaagcaat

SEQ ID NO: 1744952 - DNA, 15 bp, Homo sapiens
gactataaagcaatg

SEQ ID NO: 1744953 - DNA, 15 bp, Homo sapiens
actataaagcaatgt

SEQ ID NO: 1744954 - DNA, 15 bp, Homo sapiens
ctataaagcaatgtc

SEQ ID NO: 1744955 - DNA, 15 bp, Homo sapiens
tataaagcaatgtct

SEQ ID NO: 1744956 - DNA, 15 bp, Homo sapiens
ataaagcaatgtctg

SEQ ID NO: 1744957 - DNA, 15 bp, Homo sapiens
taaagcaatgtctga

SEQ ID NO: 1744958 - DNA, 15 bp, Homo sapiens
aaagcaatgtctgaa

SEQ ID NO: 1744959 - DNA, 15 bp, Homo sapiens
aagcaatgtctgaac

SEQ ID NO: 1744960 - DNA, 15 bp, Homo sapiens
agcaatgtctgaact

SEQ ID NO: 1744961 - DNA, 15 bp, Homo sapiens
gcaatgtctgaactg

SEQ ID NO: 1744962 - DNA, 15 bp, Homo sapiens
caatgtctgaactga

SEQ ID NO: 1744963 - DNA, 15 bp, Homo sapiens
aatgtctgaactgaa

SEQ ID NO: 1744964 - DNA, 15 bp, Homo sapiens
atgtctgaactgaat

SEQ ID NO: 1744965 - DNA, 15 bp, Homo sapiens
tgtctgaactgaatt

SEQ ID NO: 1744966 - DNA, 15 bp, Homo sapiens
gtctgaactgaattt

SEQ ID NO: 1744967 - DNA, 15 bp, Homo sapiens
tctgaactgaatttt

SEQ ID NO: 1744968 - DNA, 15 bp, Homo sapiens
ctgaactgaattttg

SEQ ID NO: 1744969 - DNA, 15 bp, Homo sapiens
tgaactgaattttga

SEQ ID NO: 1744970 - DNA, 15 bp, Homo sapiens
gaactgaattttgaa

SEQ ID NO: 1744971 - DNA, 15 bp, Homo sapiens
aactgaattttgaaa

SEQ ID NO: 1744972 - DNA, 15 bp, Homo sapiens
actgaattttgaaac

SEQ ID NO: 1744973 - DNA, 15 bp, Homo sapiens
ctgaattttgaaaca

SEQ ID NO: 1744974 - DNA, 15 bp, Homo sapiens
tgaattttgaaacat

SEQ ID NO: 1744975 - DNA, 15 bp, Homo sapiens
gaattttgaaacatg

SEQ ID NO: 1744976 - DNA, 15 bp, Homo sapiens
aattttgaaacatgc

SEQ ID NO: 1744977 - DNA, 15 bp, Homo sapiens
attttgaaacatgca

SEQ ID NO: 1744978 - DNA, 15 bp, Homo sapiens
ttttgaaacatgcaa

SEQ ID NO: 1744979 - DNA, 15 bp, Homo sapiens
tttgaaacatgcaaa

SEQ ID NO: 1744980 - DNA, 15 bp, Homo sapiens
ttgaaacatgcaaag

SEQ ID NO: 1744981 - DNA, 15 bp, Homo sapiens
tgaaacatgcaaagg

SEQ ID NO: 1744982 - DNA, 15 bp, Homo sapiens
gaaacatgcaaaggc

SEQ ID NO: 1744983 - DNA, 15 bp, Homo sapiens
aaacatgcaaaggcc

SEQ ID NO: 1744984 - DNA, 15 bp, Homo sapiens
aacatgcaaaggcct

SEQ ID NO: 1744985 - DNA, 15 bp, Homo sapiens
acatgcaaaggcctg

SEQ ID NO: 1744986 - DNA, 15 bp, Homo sapiens
catgcaaaggcctgt

SEQ ID NO: 1744987 - DNA, 15 bp, Homo sapiens
atgcaaaggcctgtg

SEQ ID NO: 1744988 - DNA, 15 bp, Homo sapiens
tgcaaaggcctgtgt

SEQ ID NO: 1744989 - DNA, 15 bp, Homo sapiens
gcaaaggcctgtgtc

SEQ ID NO: 1744990 - DNA, 15 bp, Homo sapiens
caaaggcctgtgtca

SEQ ID NO: 1744991 - DNA, 15 bp, Homo sapiens
aaaggcctgtgtcac

SEQ ID NO: 1744992 - DNA, 15 bp, Homo sapiens
aaggcctgtgtcaca

SEQ ID NO: 1744993 - DNA, 15 bp, Homo sapiens
aggcctgtgtcacag

SEQ ID NO: 1744994 - DNA, 15 bp, Homo sapiens
ggcctgtgtcacagg

SEQ ID NO: 1744995 - DNA, 15 bp, Homo sapiens
gcctgtgtcacagga

SEQ ID NO: 1744996 - DNA, 15 bp, Homo sapiens
cctgtgtcacaggat

SEQ ID NO: 1744997 - DNA, 15 bp, Homo sapiens
ctgtgtcacaggata

SEQ ID NO: 1744998 - DNA, 15 bp, Homo sapiens
tgtgtcacaggataa

SEQ ID NO: 1744999 - DNA, 15 bp, Homo sapiens
gtgtcacaggataaa

SEQ ID NO: 1745000 - DNA, 15 bp, Homo sapiens
tgtcacaggataaag

SEQ ID NO: 1745001 - DNA, 15 bp, Homo sapiens
gtcacaggataaaga

SEQ ID NO: 1745002 - DNA, 15 bp, Homo sapiens
tcacaggataaagat

SEQ ID NO: 1745003 - DNA, 15 bp, Homo sapiens
cacaggataaagatt

SEQ ID NO: 1745004 - DNA, 15 bp, Homo sapiens
acaggataaagattt

SEQ ID NO: 1745005 - DNA, 15 bp, Homo sapiens
caggataaagatttt

SEQ ID NO: 1745006 - DNA, 15 bp, Homo sapiens
aggataaagatttta

SEQ ID NO: 1745007 - DNA, 15 bp, Homo sapiens
ggataaagattttag

SEQ ID NO: 1745008 - DNA, 15 bp, Homo sapiens
gataaagattttagg

SEQ ID NO: 1745009 - DNA, 15 bp, Homo sapiens
ataaagattttaggg

SEQ ID NO: 1745010 - DNA, 15 bp, Homo sapiens
taaagattttaggga

SEQ ID NO: 1745011 - DNA, 15 bp, Homo sapiens
aaagattttagggag

SEQ ID NO: 1745012 - DNA, 15 bp, Homo sapiens
aagattttagggagt

SEQ ID NO: 1745013 - DNA, 15 bp, Homo sapiens
agattttagggagtg

SEQ ID NO: 1745014 - DNA, 15 bp, Homo sapiens
gattttagggagtgg

SEQ ID NO: 1745015 - DNA, 15 bp, Homo sapiens
attttagggagtggg

SEQ ID NO: 1745016 - DNA, 15 bp, Homo sapiens
ttttagggagtggga

SEQ ID NO: 1745017 - DNA, 15 bp, Homo sapiens
tttagggagtgggaa

SEQ ID NO: 1745018 - DNA, 15 bp, Homo sapiens
ttagggagtgggaac

SEQ ID NO: 1745019 - DNA, 15 bp, Homo sapiens
tagggagtgggaaca

SEQ ID NO: 1745020 - DNA, 15 bp, Homo sapiens
agggagtgggaacag

SEQ ID NO: 1745021 - DNA, 15 bp, Homo sapiens
gggagtgggaacagc

SEQ ID NO: 1745022 - DNA, 15 bp, Homo sapiens
ggagtgggaacagca

SEQ ID NO: 1745023 - DNA, 15 bp, Homo sapiens
gagtgggaacagcat

SEQ ID NO: 1745024 - DNA, 15 bp, Homo sapiens
agtgggaacagcatg

SEQ ID NO: 1745025 - DNA, 15 bp, Homo sapiens
gtgggaacagcatgt

SEQ ID NO: 1745026 - DNA, 15 bp, Homo sapiens
tgggaacagcatgtt

SEQ ID NO: 1745027 - DNA, 15 bp, Homo sapiens
gggaacagcatgttc

SEQ ID NO: 1745028 - DNA, 15 bp, Homo sapiens
ggaacagcatgttca

SEQ ID NO: 1745029 - DNA, 15 bp, Homo sapiens
gaacagcatgttcaa

SEQ ID NO: 1745030 - DNA, 15 bp, Homo sapiens
aacagcatgttcaaa

SEQ ID NO: 1745031 - DNA, 15 bp, Homo sapiens
acagcatgttcaaag

SEQ ID NO: 1745032 - DNA, 15 bp, Homo sapiens
cagcatgttcaaagg

SEQ ID NO: 1745033 - DNA, 15 bp, Homo sapiens
agcatgttcaaaggg

SEQ ID NO: 1745034 - DNA, 15 bp, Homo sapiens
gcatgttcaaagggc

SEQ ID NO: 1745035 - DNA, 15 bp, Homo sapiens
catgttcaaagggct

SEQ ID NO: 1745036 - DNA, 15 bp, Homo sapiens
atgttcaaagggctg

SEQ ID NO: 1745037 - DNA, 15 bp, Homo sapiens
tgttcaaagggctgg

SEQ ID NO: 1745038 - DNA, 15 bp, Homo sapiens
gttcaaagggctgga

SEQ ID NO: 1745039 - DNA, 15 bp, Homo sapiens
ttcaaagggctggaa

SEQ ID NO: 1745040 - DNA, 15 bp, Homo sapiens
tcaaagggctggaat

SEQ ID NO: 1745041 - DNA, 15 bp, Homo sapiens
caaagggctggaatt

SEQ ID NO: 1745042 - DNA, 15 bp, Homo sapiens
aaagggctggaattg

SEQ ID NO: 1745043 - DNA, 15 bp, Homo sapiens
aagggctggaattgt

SEQ ID NO: 1745044 - DNA, 15 bp, Homo sapiens
agggctggaattgtg

SEQ ID NO: 1745045 - DNA, 15 bp, Homo sapiens
gggctggaattgtga

SEQ ID NO: 1745046 - DNA, 15 bp, Homo sapiens
ggctggaattgtgaa

SEQ ID NO: 1745047 - DNA, 15 bp, Homo sapiens
gctggaattgtgaaa

SEQ ID NO: 1745048 - DNA, 15 bp, Homo sapiens
ctggaattgtgaaac

SEQ ID NO: 1745049 - DNA, 15 bp, Homo sapiens
tggaattgtgaaaca

SEQ ID NO: 1745050 - DNA, 15 bp, Homo sapiens
ggaattgtgaaacat

SEQ ID NO: 1745051 - DNA, 15 bp, Homo sapiens
gaattgtgaaacatg

SEQ ID NO: 1745052 - DNA, 15 bp, Homo sapiens
aattgtgaaacatgt

SEQ ID NO: 1745053 - DNA, 15 bp, Homo sapiens
attgtgaaacatgta

SEQ ID NO: 1745054 - DNA, 15 bp, Homo sapiens
ttgtgaaacatgtaa

SEQ ID NO: 1745055 - DNA, 15 bp, Homo sapiens
tgtgaaacatgtaag

SEQ ID NO: 1745056 - DNA, 15 bp, Homo sapiens
gtgaaacatgtaagt

SEQ ID NO: 1745057 - DNA, 15 bp, Homo sapiens
tgaaacatgtaagtg

SEQ ID NO: 1745058 - DNA, 15 bp, Homo sapiens
gaaacatgtaagtgg

SEQ ID NO: 1745059 - DNA, 15 bp, Homo sapiens
aaacatgtaagtgga

SEQ ID NO: 1745060 - DNA, 15 bp, Homo sapiens
aacatgtaagtggag

SEQ ID NO: 1745061 - DNA, 15 bp, Homo sapiens
acatgtaagtggaga

SEQ ID NO: 1745062 - DNA, 15 bp, Homo sapiens
catgtaagtggagaa

SEQ ID NO: 1745063 - DNA, 15 bp, Homo sapiens
atgtaagtggagaaa

SEQ ID NO: 1745064 - DNA, 15 bp, Homo sapiens
tgtaagtggagaaaa

SEQ ID NO: 1745065 - DNA, 15 bp, Homo sapiens
gtaagtggagaaaac

SEQ ID NO: 1745066 - DNA, 15 bp, Homo sapiens
taagtggagaaaacc

SEQ ID NO: 1745067 - DNA, 15 bp, Homo sapiens
aagtggagaaaaccc

SEQ ID NO: 1745068 - DNA, 15 bp, Homo sapiens
agtggagaaaaccct

SEQ ID NO: 1745069 - DNA, 15 bp, Homo sapiens
gtggagaaaaccctg

SEQ ID NO: 1745070 - DNA, 15 bp, Homo sapiens
tggagaaaaccctgc

SEQ ID NO: 1745071 - DNA, 15 bp, Homo sapiens
ggagaaaaccctgct

SEQ ID NO: 1745072 - DNA, 15 bp, Homo sapiens
gagaaaaccctgctg

SEQ ID NO: 1745073 - DNA, 15 bp, Homo sapiens
agaaaaccctgctgt

SEQ ID NO: 1745074 - DNA, 15 bp, Homo sapiens
gaaaaccctgctgtc

SEQ ID NO: 1745075 - DNA, 15 bp, Homo sapiens
aaaaccctgctgtca

SEQ ID NO: 1745076 - DNA, 15 bp, Homo sapiens
aaaccctgctgtcac

SEQ ID NO: 1745077 - DNA, 15 bp, Homo sapiens
aaccctgctgtcaca

SEQ ID NO: 1745078 - DNA, 15 bp, Homo sapiens
accctgctgtcacac

SEQ ID NO: 1745079 - DNA, 15 bp, Homo sapiens
ccctgctgtcacacc

SEQ ID NO: 1745080 - DNA, 15 bp, Homo sapiens
cctgctgtcacacca

SEQ ID NO: 1745081 - DNA, 15 bp, Homo sapiens
ctgctgtcacaccac

SEQ ID NO: 1745082 - DNA, 15 bp, Homo sapiens
tgctgtcacaccacc

SEQ ID NO: 1745083 - DNA, 15 bp, Homo sapiens
gctgtcacaccaccg

SEQ ID NO: 1745084 - DNA, 15 bp, Homo sapiens
ctgtcacaccaccga

SEQ ID NO: 1745085 - DNA, 15 bp, Homo sapiens
tgtcacaccaccgac

SEQ ID NO: 1745086 - DNA, 15 bp, Homo sapiens
gtcacaccaccgaca

SEQ ID NO: 1745087 - DNA, 15 bp, Homo sapiens
tcacaccaccgacaa

SEQ ID NO: 1745088 - DNA, 15 bp, Homo sapiens
cacaccaccgacaac

SEQ ID NO: 1745089 - DNA, 15 bp, Homo sapiens
acaccaccgacaaca

SEQ ID NO: 1745090 - DNA, 15 bp, Homo sapiens
caccaccgacaacaa

SEQ ID NO: 1745091 - DNA, 15 bp, Homo sapiens
accaccgacaacaat

SEQ ID NO: 1745092 - DNA, 15 bp, Homo sapiens
ccaccgacaacaatc

SEQ ID NO: 1745093 - DNA, 15 bp, Homo sapiens
caccgacaacaatca

SEQ ID NO: 1745094 - DNA, 15 bp, Homo sapiens
accgacaacaatcaa

SEQ ID NO: 1745095 - DNA, 15 bp, Homo sapiens
ccgacaacaatcaac

SEQ ID NO: 1745096 - DNA, 15 bp, Homo sapiens
cgacaacaatcaaca

SEQ ID NO: 1745097 - DNA, 15 bp, Homo sapiens
gacaacaatcaacac

SEQ ID NO: 1745098 - DNA, 15 bp, Homo sapiens
acaacaatcaacaca

SEQ ID NO: 1745099 - DNA, 15 bp, Homo sapiens
caacaatcaacacag

SEQ ID NO: 1745100 - DNA, 15 bp, Homo sapiens
aacaatcaacacaga

SEQ ID NO: 1745101 - DNA, 15 bp, Homo sapiens
acaatcaacacagaa

SEQ ID NO: 1745102 - DNA, 15 bp, Homo sapiens
caatcaacacagaag

SEQ ID NO: 1745103 - DNA, 15 bp, Homo sapiens
aatcaacacagaaga

SEQ ID NO: 1745104 - DNA, 15 bp, Homo sapiens
atcaacacagaagac

SEQ ID NO: 1745105 - DNA, 15 bp, Homo sapiens
tcaacacagaagact

SEQ ID NO: 1745106 - DNA, 15 bp, Homo sapiens
caacacagaagactt

SEQ ID NO: 1745107 - DNA, 15 bp, Homo sapiens
aacacagaagacttt

SEQ ID NO: 1745108 - DNA, 15 bp, Homo sapiens
acacagaagactttt

SEQ ID NO: 1745109 - DNA, 15 bp, Homo sapiens
cacagaagacttttg

SEQ ID NO: 1745110 - DNA, 15 bp, Homo sapiens
acagaagacttttgt

SEQ ID NO: 1745111 - DNA, 15 bp, Homo sapiens
cagaagacttttgtg

SEQ ID NO: 1745112 - DNA, 15 bp, Homo sapiens
agaagacttttgtga

SEQ ID NO: 1745113 - DNA, 15 bp, Homo sapiens
gaagacttttgtgac

SEQ ID NO: 1745114 - DNA, 15 bp, Homo sapiens
aagacttttgtgacc

SEQ ID NO: 1745115 - DNA, 15 bp, Homo sapiens
agacttttgtgacca

SEQ ID NO: 1745116 - DNA, 15 bp, Homo sapiens
gacttttgtgaccaa

SEQ ID NO: 1745117 - DNA, 15 bp, Homo sapiens
acttttgtgaccaaa

SEQ ID NO: 1745118 - DNA, 15 bp, Homo sapiens
cttttgtgaccaaat

SEQ ID NO: 1745119 - DNA, 15 bp, Homo sapiens
ttttgtgaccaaatg

SEQ ID NO: 1745120 - DNA, 15 bp, Homo sapiens
tttgtgaccaaatgt

SEQ ID NO: 1745121 - DNA, 15 bp, Homo sapiens
ttgtgaccaaatgtg

SEQ ID NO: 1745122 - DNA, 15 bp, Homo sapiens
tgtgaccaaatgtgg

SEQ ID NO: 1745123 - DNA, 15 bp, Homo sapiens
gtgaccaaatgtggg

SEQ ID NO: 1745124 - DNA, 15 bp, Homo sapiens
tgaccaaatgtggga

SEQ ID NO: 1745125 - DNA, 15 bp, Homo sapiens
gaccaaatgtgggaa

SEQ ID NO: 1745126 - DNA, 15 bp, Homo sapiens
accaaatgtgggaaa

SEQ ID NO: 1745127 - DNA, 15 bp, Homo sapiens
ccaaatgtgggaaag

SEQ ID NO: 1745128 - DNA, 15 bp, Homo sapiens
caaatgtgggaaagt

SEQ ID NO: 1745129 - DNA, 15 bp, Homo sapiens
aaatgtgggaaagtt

SEQ ID NO: 1745130 - DNA, 15 bp, Homo sapiens
aatgtgggaaagttt

SEQ ID NO: 1745131 - DNA, 15 bp, Homo sapiens
atgtgggaaagtttt

SEQ ID NO: 1745132 - DNA, 15 bp, Homo sapiens
tgtgggaaagttttc

SEQ ID NO: 1745133 - DNA, 15 bp, Homo sapiens
gtgggaaagttttcc

SEQ ID NO: 1745134 - DNA, 15 bp, Homo sapiens
tgggaaagttttcct

SEQ ID NO: 1745135 - DNA, 15 bp, Homo sapiens
gggaaagttttcctc

SEQ ID NO: 1745136 - DNA, 15 bp, Homo sapiens
ggaaagttttcctca

SEQ ID NO: 1745137 - DNA, 15 bp, Homo sapiens
gaaagttttcctcac

SEQ ID NO: 1745138 - DNA, 15 bp, Homo sapiens
aaagttttcctcacc

SEQ ID NO: 1745139 - DNA, 15 bp, Homo sapiens
aagttttcctcacca

SEQ ID NO: 1745140 - DNA, 15 bp, Homo sapiens
agttttcctcaccaa

SEQ ID NO: 1745141 - DNA, 15 bp, Homo sapiens
gttttcctcaccaag

SEQ ID NO: 1745142 - DNA, 15 bp, Homo sapiens
ttttcctcaccaaga

SEQ ID NO: 1745143 - DNA, 15 bp, Homo sapiens
tttcctcaccaagaa

SEQ ID NO: 1745144 - DNA, 15 bp, Homo sapiens
ttcctcaccaagaaa

SEQ ID NO: 1745145 - DNA, 15 bp, Homo sapiens
tcctcaccaagaaac

SEQ ID NO: 1745146 - DNA, 15 bp, Homo sapiens
cctcaccaagaaaca

SEQ ID NO: 1745147 - DNA, 15 bp, Homo sapiens
ctcaccaagaaacaa

SEQ ID NO: 1745148 - DNA, 15 bp, Homo sapiens
tcaccaagaaacaag

SEQ ID NO: 1745149 - DNA, 15 bp, Homo sapiens
caccaagaaacaagc

SEQ ID NO: 1745150 - DNA, 15 bp, Homo sapiens
accaagaaacaagca

SEQ ID NO: 1745151 - DNA, 15 bp, Homo sapiens
ccaagaaacaagcaa

SEQ ID NO: 1745152 - DNA, 15 bp, Homo sapiens
caagaaacaagcaat

SEQ ID NO: 1745153 - DNA, 15 bp, Homo sapiens
aagaaacaagcaatc

SEQ ID NO: 1745154 - DNA, 15 bp, Homo sapiens
agaaacaagcaatca

SEQ ID NO: 1745155 - DNA, 15 bp, Homo sapiens
gaaacaagcaatcag

SEQ ID NO: 1745156 - DNA, 15 bp, Homo sapiens
aaacaagcaatcagt

SEQ ID NO: 1745157 - DNA, 15 bp, Homo sapiens
aacaagcaatcagtt

SEQ ID NO: 1745158 - DNA, 15 bp, Homo sapiens
acaagcaatcagttc

SEQ ID NO: 1745159 - DNA, 15 bp, Homo sapiens
caagcaatcagttct

SEQ ID NO: 1745160 - DNA, 15 bp, Homo sapiens
aagcaatcagttctg

SEQ ID NO: 1745161 - DNA, 15 bp, Homo sapiens
agcaatcagttctgc

SEQ ID NO: 1745162 - DNA, 15 bp, Homo sapiens
gcaatcagttctgca

SEQ ID NO: 1745163 - DNA, 15 bp, Homo sapiens
caatcagttctgcag

SEQ ID NO: 1745164 - DNA, 15 bp, Homo sapiens
aatcagttctgcagc

SEQ ID NO: 1745165 - DNA, 15 bp, Homo sapiens
atcagttctgcagca

SEQ ID NO: 1745166 - DNA, 15 bp, Homo sapiens
tcagttctgcagcag

SEQ ID NO: 1745167 - DNA, 15 bp, Homo sapiens
cagttctgcagcagt

SEQ ID NO: 1745168 - DNA, 15 bp, Homo sapiens
agttctgcagcagtc

SEQ ID NO: 1745169 - DNA, 15 bp, Homo sapiens
gttctgcagcagtca

SEQ ID NO: 1745170 - DNA, 15 bp, Homo sapiens
ttctgcagcagtcac

SEQ ID NO: 1745171 - DNA, 15 bp, Homo sapiens
tctgcagcagtcacc

SEQ ID NO: 1745172 - DNA, 15 bp, Homo sapiens
ctgcagcagtcacca

SEQ ID NO: 1745173 - DNA, 15 bp, Homo sapiens
tgcagcagtcaccag

SEQ ID NO: 1745174 - DNA, 15 bp, Homo sapiens
gcagcagtcaccagc

SEQ ID NO: 1745175 - DNA, 15 bp, Homo sapiens
cagcagtcaccagct

SEQ ID NO: 1745176 - DNA, 15 bp, Homo sapiens
agcagtcaccagctg

SEQ ID NO: 1745177 - DNA, 15 bp, Homo sapiens
gcagtcaccagctgg

SEQ ID NO: 1745178 - DNA, 15 bp, Homo sapiens
cagtcaccagctggg

SEQ ID NO: 1745179 - DNA, 15 bp, Homo sapiens
agtcaccagctgggt

SEQ ID NO: 1745180 - DNA, 15 bp, Homo sapiens
gtcaccagctgggtg

SEQ ID NO: 1745181 - DNA, 15 bp, Homo sapiens
tcaccagctgggtgt

SEQ ID NO: 1745182 - DNA, 15 bp, Homo sapiens
caccagctgggtgtc

SEQ ID NO: 1745183 - DNA, 15 bp, Homo sapiens
accagctgggtgtcc

SEQ ID NO: 1745184 - DNA, 15 bp, Homo sapiens
ccagctgggtgtcct

SEQ ID NO: 1745185 - DNA, 15 bp, Homo sapiens
cagctgggtgtcctc

SEQ ID NO: 1745186 - DNA, 15 bp, Homo sapiens
agctgggtgtcctct

SEQ ID NO: 1745187 - DNA, 15 bp, Homo sapiens
gctgggtgtcctcta

SEQ ID NO: 1745188 - DNA, 15 bp, Homo sapiens
ctgggtgtcctctaa

SEQ ID NO: 1745189 - DNA, 15 bp, Homo sapiens
tgggtgtcctctaat

SEQ ID NO: 1745190 - DNA, 15 bp, Homo sapiens
gggtgtcctctaatt

SEQ ID NO: 1745191 - DNA, 15 bp, Homo sapiens
ggtgtcctctaattt

SEQ ID NO: 1745192 - DNA, 15 bp, Homo sapiens
gtgtcctctaattta

SEQ ID NO: 1745193 - DNA, 15 bp, Homo sapiens
tgtcctctaatttac

SEQ ID NO: 1745194 - DNA, 15 bp, Homo sapiens
gtcctctaatttact

SEQ ID NO: 1745195 - DNA, 15 bp, Homo sapiens
tcctctaatttactt

SEQ ID NO: 1745196 - DNA, 15 bp, Homo sapiens
cctctaatttacttc

SEQ ID NO: 1745197 - DNA, 15 bp, Homo sapiens
ctctaatttacttct

SEQ ID NO: 1745198 - DNA, 15 bp, Homo sapiens
tctaatttacttctg

SEQ ID NO: 1745199 - DNA, 15 bp, Homo sapiens
ctaatttacttctga

SEQ ID NO: 1745200 - DNA, 15 bp, Homo sapiens
taatttacttctgac

SEQ ID NO: 1745201 - DNA, 15 bp, Homo sapiens
aatttacttctgaca

SEQ ID NO: 1745202 - DNA, 15 bp, Homo sapiens
atttacttctgacac

SEQ ID NO: 1745203 - DNA, 15 bp, Homo sapiens
tttacttctgacact

SEQ ID NO: 1745204 - DNA, 15 bp, Homo sapiens
ttacttctgacactg

SEQ ID NO: 1745205 - DNA, 15 bp, Homo sapiens
tacttctgacactgc

SEQ ID NO: 1745206 - DNA, 15 bp, Homo sapiens
acttctgacactgct

SEQ ID NO: 1745207 - DNA, 15 bp, Homo sapiens
cttctgacactgctt

SEQ ID NO: 1745208 - DNA, 15 bp, Homo sapiens
ttctgacactgctta

SEQ ID NO: 1745209 - DNA, 15 bp, Homo sapiens
tctgacactgcttac

SEQ ID NO: 1745210 - DNA, 15 bp, Homo sapiens
ctgacactgcttacc

SEQ ID NO: 1745211 - DNA, 15 bp, Homo sapiens
tgacactgcttacct

SEQ ID NO: 1745212 - DNA, 15 bp, Homo sapiens
gacactgcttacctg

SEQ ID NO: 1745213 - DNA, 15 bp, Homo sapiens
acactgcttacctgg

SEQ ID NO: 1745214 - DNA, 15 bp, Homo sapiens
cactgcttacctgga

SEQ ID NO: 1745215 - DNA, 15 bp, Homo sapiens
actgcttacctggag

SEQ ID NO: 1745216 - DNA, 15 bp, Homo sapiens
ctgcttacctggaga

SEQ ID NO: 1745217 - DNA, 15 bp, Homo sapiens
tgcttacctggagat

SEQ ID NO: 1745218 - DNA, 15 bp, Homo sapiens
gcttacctggagata

SEQ ID NO: 1745219 - DNA, 15 bp, Homo sapiens
cttacctggagatag

SEQ ID NO: 1745220 - DNA, 15 bp, Homo sapiens
ttacctggagatagt

SEQ ID NO: 1745221 - DNA, 15 bp, Homo sapiens
tacctggagatagtg

SEQ ID NO: 1745222 - DNA, 15 bp, Homo sapiens
acctggagatagtgt

SEQ ID NO: 1745223 - DNA, 15 bp, Homo sapiens
cctggagatagtgtc

SEQ ID NO: 1745224 - DNA, 15 bp, Homo sapiens
ctggagatagtgtca

SEQ ID NO: 1745225 - DNA, 15 bp, Homo sapiens
tggagatagtgtcag

SEQ ID NO: 1745226 - DNA, 15 bp, Homo sapiens
ggagatagtgtcaga

SEQ ID NO: 1745227 - DNA, 15 bp, Homo sapiens
gagatagtgtcagat

SEQ ID NO: 1745228 - DNA, 15 bp, Homo sapiens
agatagtgtcagatc

SEQ ID NO: 1745229 - DNA, 15 bp, Homo sapiens
gatagtgtcagatcc

SEQ ID NO: 1745230 - DNA, 15 bp, Homo sapiens
atagtgtcagatccc

SEQ ID NO: 1745231 - DNA, 15 bp, Homo sapiens
tagtgtcagatccca

SEQ ID NO: 1745232 - DNA, 15 bp, Homo sapiens
agtgtcagatcccac

SEQ ID NO: 1745233 - DNA, 15 bp, Homo sapiens
gtgtcagatcccaca

SEQ ID NO: 1745234 - DNA, 15 bp, Homo sapiens
tgtcagatcccacag

SEQ ID NO: 1745235 - DNA, 15 bp, Homo sapiens
gtcagatcccacagg

SEQ ID NO: 1745236 - DNA, 15 bp, Homo sapiens
tcagatcccacaggt

SEQ ID NO: 1745237 - DNA, 15 bp, Homo sapiens
cagatcccacaggtt

SEQ ID NO: 1745238 - DNA, 15 bp, Homo sapiens
agatcccacaggttg

SEQ ID NO: 1745239 - DNA, 15 bp, Homo sapiens
gatcccacaggttga

SEQ ID NO: 1745240 - DNA, 15 bp, Homo sapiens
atcccacaggttgag

SEQ ID NO: 1745241 - DNA, 15 bp, Homo sapiens
tcccacaggttgagg

SEQ ID NO: 1745242 - DNA, 15 bp, Homo sapiens
cccacaggttgaggg

SEQ ID NO: 1745243 - DNA, 15 bp, Homo sapiens
ccacaggttgagggc

SEQ ID NO: 1745244 - DNA, 15 bp, Homo sapiens
cacaggttgagggct

SEQ ID NO: 1745245 - DNA, 15 bp, Homo sapiens
acaggttgagggctc

SEQ ID NO: 1745246 - DNA, 15 bp, Homo sapiens
caggttgagggctca

SEQ ID NO: 1745247 - DNA, 15 bp, Homo sapiens
aggttgagggctcag

SEQ ID NO: 1745248 - DNA, 15 bp, Homo sapiens
ggttgagggctcagt

SEQ ID NO: 1745249 - DNA, 15 bp, Homo sapiens
gttgagggctcagtc

SEQ ID NO: 1745250 - DNA, 15 bp, Homo sapiens
ttgagggctcagtcc

SEQ ID NO: 1745251 - DNA, 15 bp, Homo sapiens
tgagggctcagtccc

SEQ ID NO: 1745252 - DNA, 15 bp, Homo sapiens
gagggctcagtcccc

SEQ ID NO: 1745253 - DNA, 15 bp, Homo sapiens
agggctcagtcccca

SEQ ID NO: 1745254 - DNA, 15 bp, Homo sapiens
gggctcagtccccaa

SEQ ID NO: 1745255 - DNA, 15 bp, Homo sapiens
ggctcagtccccaaa

SEQ ID NO: 1745256 - DNA, 15 bp, Homo sapiens
gctcagtccccaaaa

SEQ ID NO: 1745257 - DNA, 15 bp, Homo sapiens
ctcagtccccaaaac

SEQ ID NO: 1745258 - DNA, 15 bp, Homo sapiens
tcagtccccaaaact

SEQ ID NO: 1745259 - DNA, 15 bp, Homo sapiens
cagtccccaaaactg

SEQ ID NO: 1745260 - DNA, 15 bp, Homo sapiens
agtccccaaaactgg

SEQ ID NO: 1745261 - DNA, 15 bp, Homo sapiens
gtccccaaaactggc

SEQ ID NO: 1745262 - DNA, 15 bp, Homo sapiens
tccccaaaactggcc

SEQ ID NO: 1745263 - DNA, 15 bp, Homo sapiens
ccccaaaactggccc

SEQ ID NO: 1745264 - DNA, 15 bp, Homo sapiens
cccaaaactggcccc

SEQ ID NO: 1745265 - DNA, 15 bp, Homo sapiens
ccaaaactggcccca

SEQ ID NO: 1745266 - DNA, 15 bp, Homo sapiens
caaaactggccccaa

SEQ ID NO: 1745267 - DNA, 15 bp, Homo sapiens
aaaactggccccaac

SEQ ID NO: 1745268 - DNA, 15 bp, Homo sapiens
aaactggccccaact

SEQ ID NO: 1745269 - DNA, 15 bp, Homo sapiens
aactggccccaactt

SEQ ID NO: 1745270 - DNA, 15 bp, Homo sapiens
actggccccaacttc

SEQ ID NO: 1745271 - DNA, 15 bp, Homo sapiens
ctggccccaacttca

SEQ ID NO: 1745272 - DNA, 15 bp, Homo sapiens
tggccccaacttcag

SEQ ID NO: 1745273 - DNA, 15 bp, Homo sapiens
ggccccaacttcaga

SEQ ID NO: 1745274 - DNA, 15 bp, Homo sapiens
gccccaacttcagat

SEQ ID NO: 1745275 - DNA, 15 bp, Homo sapiens
ccccaacttcagatg

SEQ ID NO: 1745276 - DNA, 15 bp, Homo sapiens
cccaacttcagatgc

SEQ ID NO: 1745277 - DNA, 15 bp, Homo sapiens
ccaacttcagatgcc

SEQ ID NO: 1745278 - DNA, 15 bp, Homo sapiens
caacttcagatgcca

SEQ ID NO: 1745279 - DNA, 15 bp, Homo sapiens
aacttcagatgccag

SEQ ID NO: 1745280 - DNA, 15 bp, Homo sapiens
acttcagatgccagt

SEQ ID NO: 1745281 - DNA, 15 bp, Homo sapiens
cttcagatgccagtt

SEQ ID NO: 1745282 - DNA, 15 bp, Homo sapiens
ttcagatgccagttg

SEQ ID NO: 1745283 - DNA, 15 bp, Homo sapiens
tcagatgccagttgc

SEQ ID NO: 1745284 - DNA, 15 bp, Homo sapiens
cagatgccagttgca

SEQ ID NO: 1745285 - DNA, 15 bp, Homo sapiens
agatgccagttgcaa

SEQ ID NO: 1745286 - DNA, 15 bp, Homo sapiens
gatgccagttgcaag

SEQ ID NO: 1745287 - DNA, 15 bp, Homo sapiens
atgccagttgcaagt

SEQ ID NO: 1745288 - DNA, 15 bp, Homo sapiens
tgccagttgcaagtc

SEQ ID NO: 1745289 - DNA, 15 bp, Homo sapiens
gccagttgcaagtct

SEQ ID NO: 1745290 - DNA, 15 bp, Homo sapiens
ccagttgcaagtctg

SEQ ID NO: 1745291 - DNA, 15 bp, Homo sapiens
cagttgcaagtctgg

SEQ ID NO: 1745292 - DNA, 15 bp, Homo sapiens
agttgcaagtctggg

SEQ ID NO: 1745293 - DNA, 15 bp, Homo sapiens
gttgcaagtctgggt

SEQ ID NO: 1745294 - DNA, 15 bp, Homo sapiens
ttgcaagtctgggtt

SEQ ID NO: 1745295 - DNA, 15 bp, Homo sapiens
tgcaagtctgggttt

SEQ ID NO: 1745296 - DNA, 15 bp, Homo sapiens
gcaagtctgggtttt

SEQ ID NO: 1745297 - DNA, 15 bp, Homo sapiens
caagtctgggttttt

SEQ ID NO: 1745298 - DNA, 15 bp, Homo sapiens
aagtctgggtttttg

SEQ ID NO: 1745299 - DNA, 15 bp, Homo sapiens
agtctgggtttttgg

SEQ ID NO: 1745300 - DNA, 15 bp, Homo sapiens
gtctgggtttttgga

SEQ ID NO: 1745301 - DNA, 15 bp, Homo sapiens
tctgggtttttggat

SEQ ID NO: 1745302 - DNA, 15 bp, Homo sapiens
ctgggtttttggatc

SEQ ID NO: 1745303 - DNA, 15 bp, Homo sapiens
tgggtttttggatct

SEQ ID NO: 1745304 - DNA, 15 bp, Homo sapiens
gggtttttggatctt

SEQ ID NO: 1745305 - DNA, 15 bp, Homo sapiens
ggtttttggatcttc

SEQ ID NO: 1745306 - DNA, 15 bp, Homo sapiens
gtttttggatcttct

SEQ ID NO: 1745307 - DNA, 15 bp, Homo sapiens
tttttggatcttctg

SEQ ID NO: 1745308 - DNA, 15 bp, Homo sapiens
ttttggatcttctga

SEQ ID NO: 1745309 - DNA, 15 bp, Homo sapiens
tttggatcttctgac

SEQ ID NO: 1745310 - DNA, 15 bp, Homo sapiens
ttggatcttctgacc

SEQ ID NO: 1745311 - DNA, 15 bp, Homo sapiens
tggatcttctgacca

SEQ ID NO: 1745312 - DNA, 15 bp, Homo sapiens
ggatcttctgaccaa

SEQ ID NO: 1745313 - DNA, 15 bp, Homo sapiens
gatcttctgaccaaa

SEQ ID NO: 1745314 - DNA, 15 bp, Homo sapiens
atcttctgaccaaag

SEQ ID NO: 1745315 - DNA, 15 bp, Homo sapiens
tcttctgaccaaagg

SEQ ID NO: 1745316 - DNA, 15 bp, Homo sapiens
cttctgaccaaaggg

SEQ ID NO: 1745317 - DNA, 15 bp, Homo sapiens
ttctgaccaaagggc

SEQ ID NO: 1745318 - DNA, 15 bp, Homo sapiens
tctgaccaaagggct

SEQ ID NO: 1745319 - DNA, 15 bp, Homo sapiens
ctgaccaaagggctt

SEQ ID NO: 1745320 - DNA, 15 bp, Homo sapiens
tgaccaaagggcttc

SEQ ID NO: 1745321 - DNA, 15 bp, Homo sapiens
gaccaaagggcttca

SEQ ID NO: 1745322 - DNA, 15 bp, Homo sapiens
accaaagggcttcaa

SEQ ID NO: 1745323 - DNA, 15 bp, Homo sapiens
ccaaagggcttcaag

SEQ ID NO: 1745324 - DNA, 15 bp, Homo sapiens
caaagggcttcaagt

SEQ ID NO: 1745325 - DNA, 15 bp, Homo sapiens
aaagggcttcaagtt

SEQ ID NO: 1745326 - DNA, 15 bp, Homo sapiens
aagggcttcaagttg

SEQ ID NO: 1745327 - DNA, 15 bp, Homo sapiens
agggcttcaagttgg

SEQ ID NO: 1745328 - DNA, 15 bp, Homo sapiens
gggcttcaagttggg

SEQ ID NO: 1745329 - DNA, 15 bp, Homo sapiens
ggcttcaagttgggg

SEQ ID NO: 1745330 - DNA, 15 bp, Homo sapiens
gcttcaagttggggt

SEQ ID NO: 1745331 - DNA, 15 bp, Homo sapiens
cttcaagttggggtt

SEQ ID NO: 1745332 - DNA, 15 bp, Homo sapiens
ttcaagttggggttc

SEQ ID NO: 1745333 - DNA, 15 bp, Homo sapiens
tcaagttggggttcc

SEQ ID NO: 1745334 - DNA, 15 bp, Homo sapiens
caagttggggttccc

SEQ ID NO: 1745335 - DNA, 15 bp, Homo sapiens
aagttggggttccca

SEQ ID NO: 1745336 - DNA, 15 bp, Homo sapiens
agttggggttcccat

SEQ ID NO: 1745337 - DNA, 15 bp, Homo sapiens
gttggggttcccatg

SEQ ID NO: 1745338 - DNA, 15 bp, Homo sapiens
ttggggttcccatga

SEQ ID NO: 1745339 - DNA, 15 bp, Homo sapiens
tggggttcccatgac

SEQ ID NO: 1745340 - DNA, 15 bp, Homo sapiens
ggggttcccatgaca

SEQ ID NO: 1745341 - DNA, 15 bp, Homo sapiens
gggttcccatgacac

SEQ ID NO: 1745342 - DNA, 15 bp, Homo sapiens
ggttcccatgacacc

SEQ ID NO: 1745343 - DNA, 15 bp, Homo sapiens
gttcccatgacacct

SEQ ID NO: 1745344 - DNA, 15 bp, Homo sapiens
ttcccatgacacctc

SEQ ID NO: 1745345 - DNA, 15 bp, Homo sapiens
tcccatgacacctct

SEQ ID NO: 1745346 - DNA, 15 bp, Homo sapiens
cccatgacacctctt

SEQ ID NO: 1745347 - DNA, 15 bp, Homo sapiens
ccatgacacctctta

SEQ ID NO: 1745348 - DNA, 15 bp, Homo sapiens
catgacacctcttag

SEQ ID NO: 1745349 - DNA, 15 bp, Homo sapiens
atgacacctcttagg

SEQ ID NO: 1745350 - DNA, 15 bp, Homo sapiens
tgacacctcttaggt

SEQ ID NO: 1745351 - DNA, 15 bp, Homo sapiens
gacacctcttaggtt

SEQ ID NO: 1745352 - DNA, 15 bp, Homo sapiens
acacctcttaggttc

SEQ ID NO: 1745353 - DNA, 15 bp, Homo sapiens
cacctcttaggttcg

SEQ ID NO: 1745354 - DNA, 15 bp, Homo sapiens
acctcttaggttcga

SEQ ID NO: 1745355 - DNA, 15 bp, Homo sapiens
cctcttaggttcgat

SEQ ID NO: 1745356 - DNA, 15 bp, Homo sapiens
ctcttaggttcgatt

SEQ ID NO: 1745357 - DNA, 15 bp, Homo sapiens
tcttaggttcgatta

SEQ ID NO: 1745358 - DNA, 15 bp, Homo sapiens
cttaggttcgattaa

SEQ ID NO: 1745359 - DNA, 15 bp, Homo sapiens
ttaggttcgattaat

SEQ ID NO: 1745360 - DNA, 15 bp, Homo sapiens
taggttcgattaatt

SEQ ID NO: 1745361 - DNA, 15 bp, Homo sapiens
aggttcgattaattt

SEQ ID NO: 1745362 - DNA, 15 bp, Homo sapiens
ggttcgattaatttg

SEQ ID NO: 1745363 - DNA, 15 bp, Homo sapiens
gttcgattaatttgc

SEQ ID NO: 1745364 - DNA, 15 bp, Homo sapiens
ttcgattaatttgct

SEQ ID NO: 1745365 - DNA, 15 bp, Homo sapiens
tcgattaatttgcta

SEQ ID NO: 1745366 - DNA, 15 bp, Homo sapiens
cgattaatttgctag

SEQ ID NO: 1745367 - DNA, 15 bp, Homo sapiens
gattaatttgctaga

SEQ ID NO: 1745368 - DNA, 15 bp, Homo sapiens
attaatttgctagag

SEQ ID NO: 1745369 - DNA, 15 bp, Homo sapiens
ttaatttgctagagt

SEQ ID NO: 1745370 - DNA, 15 bp, Homo sapiens
taatttgctagagta

SEQ ID NO: 1745371 - DNA, 15 bp, Homo sapiens
aatttgctagagtag

SEQ ID NO: 1745372 - DNA, 15 bp, Homo sapiens
atttgctagagtagt

SEQ ID NO: 1745373 - DNA, 15 bp, Homo sapiens
tttgctagagtagtt

SEQ ID NO: 1745374 - DNA, 15 bp, Homo sapiens
ttgctagagtagttc

SEQ ID NO: 1745375 - DNA, 15 bp, Homo sapiens
tgctagagtagttca

SEQ ID NO: 1745376 - DNA, 15 bp, Homo sapiens
gctagagtagttcac

SEQ ID NO: 1745377 - DNA, 15 bp, Homo sapiens
ctagagtagttcaca

SEQ ID NO: 1745378 - DNA, 15 bp, Homo sapiens
tagagtagttcacaa

SEQ ID NO: 1745379 - DNA, 15 bp, Homo sapiens
agagtagttcacaaa

SEQ ID NO: 1745380 - DNA, 15 bp, Homo sapiens
gagtagttcacaaaa

SEQ ID NO: 1745381 - DNA, 15 bp, Homo sapiens
agtagttcacaaaac

SEQ ID NO: 1745382 - DNA, 15 bp, Homo sapiens
gtagttcacaaaact

SEQ ID NO: 1745383 - DNA, 15 bp, Homo sapiens
tagttcacaaaactc

SEQ ID NO: 1745384 - DNA, 15 bp, Homo sapiens
agttcacaaaactca

SEQ ID NO: 1745385 - DNA, 15 bp, Homo sapiens
gttcacaaaactcaa

SEQ ID NO: 1745386 - DNA, 15 bp, Homo sapiens
ttcacaaaactcaag

SEQ ID NO: 1745387 - DNA, 15 bp, Homo sapiens
tcacaaaactcaagg

SEQ ID NO: 1745388 - DNA, 15 bp, Homo sapiens
cacaaaactcaagga

SEQ ID NO: 1745389 - DNA, 15 bp, Homo sapiens
acaaaactcaaggaa

SEQ ID NO: 1745390 - DNA, 15 bp, Homo sapiens
caaaactcaaggaaa

SEQ ID NO: 1745391 - DNA, 15 bp, Homo sapiens
aaaactcaaggaaac

SEQ ID NO: 1745392 - DNA, 15 bp, Homo sapiens
aaactcaaggaaaca

SEQ ID NO: 1745393 - DNA, 15 bp, Homo sapiens
aactcaaggaaacac

SEQ ID NO: 1745394 - DNA, 15 bp, Homo sapiens
actcaaggaaacact

SEQ ID NO: 1745395 - DNA, 15 bp, Homo sapiens
ctcaaggaaacactt

SEQ ID NO: 1745396 - DNA, 15 bp, Homo sapiens
tcaaggaaacacttc

SEQ ID NO: 1745397 - DNA, 15 bp, Homo sapiens
caaggaaacacttct

SEQ ID NO: 1745398 - DNA, 15 bp, Homo sapiens
aaggaaacacttctg

SEQ ID NO: 1745399 - DNA, 15 bp, Homo sapiens
aggaaacacttctgt

SEQ ID NO: 1745400 - DNA, 15 bp, Homo sapiens
ggaaacacttctgtt

SEQ ID NO: 1745401 - DNA, 15 bp, Homo sapiens
gaaacacttctgttt

SEQ ID NO: 1745402 - DNA, 15 bp, Homo sapiens
aaacacttctgttta

SEQ ID NO: 1745403 - DNA, 15 bp, Homo sapiens
aacacttctgtttac

SEQ ID NO: 1745404 - DNA, 15 bp, Homo sapiens
acacttctgtttact

SEQ ID NO: 1745405 - DNA, 15 bp, Homo sapiens
cacttctgtttactg

SEQ ID NO: 1745406 - DNA, 15 bp, Homo sapiens
acttctgtttactgg

SEQ ID NO: 1745407 - DNA, 15 bp, Homo sapiens
cttctgtttactggt

SEQ ID NO: 1745408 - DNA, 15 bp, Homo sapiens
ttctgtttactggtt

SEQ ID NO: 1745409 - DNA, 15 bp, Homo sapiens
tctgtttactggttt

SEQ ID NO: 1745410 - DNA, 15 bp, Homo sapiens
ctgtttactggttta

SEQ ID NO: 1745411 - DNA, 15 bp, Homo sapiens
tgtttactggtttat

SEQ ID NO: 1745412 - DNA, 15 bp, Homo sapiens
gtttactggtttatt

SEQ ID NO: 1745413 - DNA, 15 bp, Homo sapiens
tttactggtttatta

SEQ ID NO: 1745414 - DNA, 15 bp, Homo sapiens
ttactggtttattat

SEQ ID NO: 1745415 - DNA, 15 bp, Homo sapiens
tactggtttattata

SEQ ID NO: 1745416 - DNA, 15 bp, Homo sapiens
actggtttattatag

SEQ ID NO: 1745417 - DNA, 15 bp, Homo sapiens
ctggtttattataga

SEQ ID NO: 1745418 - DNA, 15 bp, Homo sapiens
tggtttattatagat

SEQ ID NO: 1745419 - DNA, 15 bp, Homo sapiens
ggtttattatagatg

SEQ ID NO: 1745420 - DNA, 15 bp, Homo sapiens
gtttattatagatga

SEQ ID NO: 1745421 - DNA, 15 bp, Homo sapiens
tttattatagatgat

SEQ ID NO: 1745422 - DNA, 15 bp, Homo sapiens
ttattatagatgata

SEQ ID NO: 1745423 - DNA, 15 bp, Homo sapiens
tattatagatgatat

SEQ ID NO: 1745424 - DNA, 15 bp, Homo sapiens
attatagatgatatt

SEQ ID NO: 1745425 - DNA, 15 bp, Homo sapiens
ttatagatgatatta

SEQ ID NO: 1745426 - DNA, 15 bp, Homo sapiens
tatagatgatattac

SEQ ID NO: 1745427 - DNA, 15 bp, Homo sapiens
atagatgatattaca

SEQ ID NO: 1745428 - DNA, 15 bp, Homo sapiens
tagatgatattacaa

SEQ ID NO: 1745429 - DNA, 15 bp, Homo sapiens
agatgatattacaaa

SEQ ID NO: 1745430 - DNA, 15 bp, Homo sapiens
gatgatattacaaag

SEQ ID NO: 1745431 - DNA, 15 bp, Homo sapiens
atgatattacaaagg

SEQ ID NO: 1745432 - DNA, 15 bp, Homo sapiens
tgatattacaaagga

SEQ ID NO: 1745433 - DNA, 15 bp, Homo sapiens
gatattacaaaggat

SEQ ID NO: 1745434 - DNA, 15 bp, Homo sapiens
atattacaaaggatg

SEQ ID NO: 1745435 - DNA, 15 bp, Homo sapiens
tattacaaaggatgc

SEQ ID NO: 1745436 - DNA, 15 bp, Homo sapiens
attacaaaggatgca

SEQ ID NO: 1745437 - DNA, 15 bp, Homo sapiens
ttacaaaggatgcag

SEQ ID NO: 1745438 - DNA, 15 bp, Homo sapiens
tacaaaggatgcaga

SEQ ID NO: 1745439 - DNA, 15 bp, Homo sapiens
acaaaggatgcagat

SEQ ID NO: 1745440 - DNA, 15 bp, Homo sapiens
caaaggatgcagatg

SEQ ID NO: 1745441 - DNA, 15 bp, Homo sapiens
aaaggatgcagatgt

SEQ ID NO: 1745442 - DNA, 15 bp, Homo sapiens
aaggatgcagatgta

SEQ ID NO: 1745443 - DNA, 15 bp, Homo sapiens
aggatgcagatgtaa

SEQ ID NO: 1745444 - DNA, 15 bp, Homo sapiens
ggatgcagatgtaaa

SEQ ID NO: 1745445 - DNA, 15 bp, Homo sapiens
gatgcagatgtaaag

SEQ ID NO: 1745446 - DNA, 15 bp, Homo sapiens
atgcagatgtaaaga

SEQ ID NO: 1745447 - DNA, 15 bp, Homo sapiens
tgcagatgtaaagat

SEQ ID NO: 1745448 - DNA, 15 bp, Homo sapiens
gcagatgtaaagatg

SEQ ID NO: 1745449 - DNA, 15 bp, Homo sapiens
cagatgtaaagatgc

SEQ ID NO: 1745450 - DNA, 15 bp, Homo sapiens
agatgtaaagatgca

SEQ ID NO: 1745451 - DNA, 15 bp, Homo sapiens
gatgtaaagatgcat

SEQ ID NO: 1745452 - DNA, 15 bp, Homo sapiens
atgtaaagatgcata

SEQ ID NO: 1745453 - DNA, 15 bp, Homo sapiens
tgtaaagatgcatag

SEQ ID NO: 1745454 - DNA, 15 bp, Homo sapiens
gtaaagatgcatagg

SEQ ID NO: 1745455 - DNA, 15 bp, Homo sapiens
taaagatgcatagga

SEQ ID NO: 1745456 - DNA, 15 bp, Homo sapiens
aaagatgcataggat

SEQ ID NO: 1745457 - DNA, 15 bp, Homo sapiens
aagatgcataggatg

SEQ ID NO: 1745458 - DNA, 15 bp, Homo sapiens
agatgcataggatga

SEQ ID NO: 1745459 - DNA, 15 bp, Homo sapiens
gatgcataggatgag

SEQ ID NO: 1745460 - DNA, 15 bp, Homo sapiens
atgcataggatgagg

SEQ ID NO: 1745461 - DNA, 15 bp, Homo sapiens
tgcataggatgaggt

SEQ ID NO: 1745462 - DNA, 15 bp, Homo sapiens
gcataggatgaggta

SEQ ID NO: 1745463 - DNA, 15 bp, Homo sapiens
cataggatgaggtat

SEQ ID NO: 1745464 - DNA, 15 bp, Homo sapiens
ataggatgaggtatg

SEQ ID NO: 1745465 - DNA, 15 bp, Homo sapiens
taggatgaggtatgg

SEQ ID NO: 1745466 - DNA, 15 bp, Homo sapiens
aggatgaggtatggg

SEQ ID NO: 1745467 - DNA, 15 bp, Homo sapiens
ggatgaggtatgggg

SEQ ID NO: 1745468 - DNA, 15 bp, Homo sapiens
gatgaggtatggggg

SEQ ID NO: 1745469 - DNA, 15 bp, Homo sapiens
atgaggtatggggga

SEQ ID NO: 1745470 - DNA, 15 bp, Homo sapiens
tgaggtatgggggat

SEQ ID NO: 1745471 - DNA, 15 bp, Homo sapiens
gaggtatgggggatg

SEQ ID NO: 1745472 - DNA, 15 bp, Homo sapiens
aggtatgggggatgg

SEQ ID NO: 1745473 - DNA, 15 bp, Homo sapiens
ggtatgggggatggg

SEQ ID NO: 1745474 - DNA, 15 bp, Homo sapiens
gtatgggggatggga

SEQ ID NO: 1745475 - DNA, 15 bp, Homo sapiens
tatgggggatgggat

SEQ ID NO: 1745476 - DNA, 15 bp, Homo sapiens
atgggggatgggatg

SEQ ID NO: 1745477 - DNA, 15 bp, Homo sapiens
tgggggatgggatgg

SEQ ID NO: 1745478 - DNA, 15 bp, Homo sapiens
gggggatgggatggg

SEQ ID NO: 1745479 - DNA, 15 bp, Homo sapiens
ggggatgggatggga

SEQ ID NO: 1745480 - DNA, 15 bp, Homo sapiens
gggatgggatgggaa

SEQ ID NO: 1745481 - DNA, 15 bp, Homo sapiens
ggatgggatgggaag

SEQ ID NO: 1745482 - DNA, 15 bp, Homo sapiens
gatgggatgggaagc

SEQ ID NO: 1745483 - DNA, 15 bp, Homo sapiens
atgggatgggaagct

SEQ ID NO: 1745484 - DNA, 15 bp, Homo sapiens
tgggatgggaagctt

SEQ ID NO: 1745485 - DNA, 15 bp, Homo sapiens
gggatgggaagcttc

SEQ ID NO: 1745486 - DNA, 15 bp, Homo sapiens
ggatgggaagcttct

SEQ ID NO: 1745487 - DNA, 15 bp, Homo sapiens
gatgggaagcttcta

SEQ ID NO: 1745488 - DNA, 15 bp, Homo sapiens
atgggaagcttctat

SEQ ID NO: 1745489 - DNA, 15 bp, Homo sapiens
tgggaagcttctatg

SEQ ID NO: 1745490 - DNA, 15 bp, Homo sapiens
gggaagcttctatgc

SEQ ID NO: 1745491 - DNA, 15 bp, Homo sapiens
ggaagcttctatgcc

SEQ ID NO: 1745492 - DNA, 15 bp, Homo sapiens
gaagcttctatgccc

SEQ ID NO: 1745493 - DNA, 15 bp, Homo sapiens
aagcttctatgccct

SEQ ID NO: 1745494 - DNA, 15 bp, Homo sapiens
agcttctatgccctc

SEQ ID NO: 1745495 - DNA, 15 bp, Homo sapiens
gcttctatgccctcc

SEQ ID NO: 1745496 - DNA, 15 bp, Homo sapiens
cttctatgccctccc

SEQ ID NO: 1745497 - DNA, 15 bp, Homo sapiens
ttctatgccctccct

SEQ ID NO: 1745498 - DNA, 15 bp, Homo sapiens
tctatgccctccctg

SEQ ID NO: 1745499 - DNA, 15 bp, Homo sapiens
ctatgccctccctgg

SEQ ID NO: 1745500 - DNA, 15 bp, Homo sapiens
tatgccctccctggc

SEQ ID NO: 1745501 - DNA, 15 bp, Homo sapiens
atgccctccctggcc

SEQ ID NO: 1745502 - DNA, 15 bp, Homo sapiens
tgccctccctggcca

SEQ ID NO: 1745503 - DNA, 15 bp, Homo sapiens
gccctccctggccag

SEQ ID NO: 1745504 - DNA, 15 bp, Homo sapiens
ccctccctggccaga

SEQ ID NO: 1745505 - DNA, 15 bp, Homo sapiens
cctccctggccagac

SEQ ID NO: 1745506 - DNA, 15 bp, Homo sapiens
ctccctggccagaca

SEQ ID NO: 1745507 - DNA, 15 bp, Homo sapiens
tccctggccagacag

SEQ ID NO: 1745508 - DNA, 15 bp, Homo sapiens
ccctggccagacagc

SEQ ID NO: 1745509 - DNA, 15 bp, Homo sapiens
cctggccagacagct

SEQ ID NO: 1745510 - DNA, 15 bp, Homo sapiens
ctggccagacagctg

SEQ ID NO: 1745511 - DNA, 15 bp, Homo sapiens
tggccagacagctgt

SEQ ID NO: 1745512 - DNA, 15 bp, Homo sapiens
ggccagacagctgtc

SEQ ID NO: 1745513 - DNA, 15 bp, Homo sapiens
gccagacagctgtcc

SEQ ID NO: 1745514 - DNA, 15 bp, Homo sapiens
ccagacagctgtcca

SEQ ID NO: 1745515 - DNA, 15 bp, Homo sapiens
cagacagctgtccag

SEQ ID NO: 1745516 - DNA, 15 bp, Homo sapiens
agacagctgtccagg

SEQ ID NO: 1745517 - DNA, 15 bp, Homo sapiens
gacagctgtccagga

SEQ ID NO: 1745518 - DNA, 15 bp, Homo sapiens
acagctgtccaggag

SEQ ID NO: 1745519 - DNA, 15 bp, Homo sapiens
cagctgtccaggagc

SEQ ID NO: 1745520 - DNA, 15 bp, Homo sapiens
agctgtccaggagcc

SEQ ID NO: 1745521 - DNA, 15 bp, Homo sapiens
gctgtccaggagcct

SEQ ID NO: 1745522 - DNA, 15 bp, Homo sapiens
ctgtccaggagcctc

SEQ ID NO: 1745523 - DNA, 15 bp, Homo sapiens
tgtccaggagcctcc

SEQ ID NO: 1745524 - DNA, 15 bp, Homo sapiens
gtccaggagcctcca

SEQ ID NO: 1745525 - DNA, 15 bp, Homo sapiens
tccaggagcctccac

SEQ ID NO: 1745526 - DNA, 15 bp, Homo sapiens
ccaggagcctccaca

SEQ ID NO: 1745527 - DNA, 15 bp, Homo sapiens
caggagcctccacat

SEQ ID NO: 1745528 - DNA, 15 bp, Homo sapiens
aggagcctccacatg

SEQ ID NO: 1745529 - DNA, 15 bp, Homo sapiens
ggagcctccacatgt

SEQ ID NO: 1745530 - DNA, 15 bp, Homo sapiens
gagcctccacatgtt

SEQ ID NO: 1745531 - DNA, 15 bp, Homo sapiens
agcctccacatgttc

SEQ ID NO: 1745532 - DNA, 15 bp, Homo sapiens
gcctccacatgttca

SEQ ID NO: 1745533 - DNA, 15 bp, Homo sapiens
cctccacatgttcag

SEQ ID NO: 1745534 - DNA, 15 bp, Homo sapiens
ctccacatgttcagc

SEQ ID NO: 1745535 - DNA, 15 bp, Homo sapiens
tccacatgttcagct

SEQ ID NO: 1745536 - DNA, 15 bp, Homo sapiens
cacatgttcagctat

SEQ ID NO: 1745537 - DNA, 15 bp, Homo sapiens
acatgttcagctatc

SEQ ID NO: 1745538 - DNA, 15 bp, Homo sapiens
catgttcagctatcc

SEQ ID NO: 1745539 - DNA, 15 bp, Homo sapiens
atgttcagctatccg

SEQ ID NO: 1745540 - DNA, 15 bp, Homo sapiens
tgttcagctatccgg

SEQ ID NO: 1745541 - DNA, 15 bp, Homo sapiens
gttcagctatccgga

SEQ ID NO: 1745542 - DNA, 15 bp, Homo sapiens
ttcagctatccggaa

SEQ ID NO: 1745543 - DNA, 15 bp, Homo sapiens
tcagctatccggaag

SEQ ID NO: 1745544 - DNA, 15 bp, Homo sapiens
cagctatccggaagt

SEQ ID NO: 1745545 - DNA, 15 bp, Homo sapiens
agctatccggaagtt

SEQ ID NO: 1745546 - DNA, 15 bp, Homo sapiens
gctatccggaagttc

SEQ ID NO: 1745547 - DNA, 15 bp, Homo sapiens
ctatccggaagttct

SEQ ID NO: 1745548 - DNA, 15 bp, Homo sapiens
tatccggaagttctc

SEQ ID NO: 1745549 - DNA, 15 bp, Homo sapiens
atccggaagttctct

SEQ ID NO: 1745550 - DNA, 15 bp, Homo sapiens
tccggaagttctctg

SEQ ID NO: 1745551 - DNA, 15 bp, Homo sapiens
ccggaagttctctga

SEQ ID NO: 1745552 - DNA, 15 bp, Homo sapiens
cggaagttctctgaa

SEQ ID NO: 1745553 - DNA, 15 bp, Homo sapiens
ggaagttctctgaac

SEQ ID NO: 1745554 - DNA, 15 bp, Homo sapiens
gaagttctctgaacc

SEQ ID NO: 1745555 - DNA, 15 bp, Homo sapiens
aagttctctgaaccc

SEQ ID NO: 1745556 - DNA, 15 bp, Homo sapiens
agttctctgaaccct

SEQ ID NO: 1745557 - DNA, 15 bp, Homo sapiens
gttctctgaaccctg

SEQ ID NO: 1745558 - DNA, 15 bp, Homo sapiens
ttctctgaaccctgc

SEQ ID NO: 1745559 - DNA, 15 bp, Homo sapiens
tctctgaaccctgcc

SEQ ID NO: 1745560 - DNA, 15 bp, Homo sapiens
ctctgaaccctgccc

SEQ ID NO: 1745561 - DNA, 15 bp, Homo sapiens
tctgaaccctgccct

SEQ ID NO: 1745562 - DNA, 15 bp, Homo sapiens
ctgaaccctgccctt

SEQ ID NO: 1745563 - DNA, 15 bp, Homo sapiens
tgaaccctgcccttt

SEQ ID NO: 1745564 - DNA, 15 bp, Homo sapiens
gaaccctgccctttt

SEQ ID NO: 1745565 - DNA, 15 bp, Homo sapiens
aaccctgcccttttg

SEQ ID NO: 1745566 - DNA, 15 bp, Homo sapiens
accctgcccttttgg

SEQ ID NO: 1745567 - DNA, 15 bp, Homo sapiens
ccctgcccttttggg

SEQ ID NO: 1745568 - DNA, 15 bp, Homo sapiens
cctgcccttttgggt

SEQ ID NO: 1745569 - DNA, 15 bp, Homo sapiens
ctgcccttttgggtt

SEQ ID NO: 1745570 - DNA, 15 bp, Homo sapiens
tgcccttttgggttt

SEQ ID NO: 1745571 - DNA, 15 bp, Homo sapiens
gcccttttgggtttt

SEQ ID NO: 1745572 - DNA, 15 bp, Homo sapiens
cccttttgggttttt

SEQ ID NO: 1745573 - DNA, 15 bp, Homo sapiens
ccttttgggttttta

SEQ ID NO: 1745574 - DNA, 15 bp, Homo sapiens
cttttgggtttttat

SEQ ID NO: 1745575 - DNA, 15 bp, Homo sapiens
ttttgggtttttatg

SEQ ID NO: 1745576 - DNA, 15 bp, Homo sapiens
tttgggtttttatgg

SEQ ID NO: 1745577 - DNA, 15 bp, Homo sapiens
ttgggtttttatgga

SEQ ID NO: 1745578 - DNA, 15 bp, Homo sapiens
tgggtttttatggag

SEQ ID NO: 1745579 - DNA, 15 bp, Homo sapiens
gggtttttatggagg

SEQ ID NO: 1745580 - DNA, 15 bp, Homo sapiens
ggtttttatggaggc

SEQ ID NO: 1745581 - DNA, 15 bp, Homo sapiens
gtttttatggaggcc

SEQ ID NO: 1745582 - DNA, 15 bp, Homo sapiens
tttttatggaggcct

SEQ ID NO: 1745583 - DNA, 15 bp, Homo sapiens
ttttatggaggcctc

SEQ ID NO: 1745584 - DNA, 15 bp, Homo sapiens
tttatggaggcctca

SEQ ID NO: 1745585 - DNA, 15 bp, Homo sapiens
ttatggaggcctcat

SEQ ID NO: 1745586 - DNA, 15 bp, Homo sapiens
tatggaggcctcatt

SEQ ID NO: 1745587 - DNA, 15 bp, Homo sapiens
atggaggcctcattg

SEQ ID NO: 1745588 - DNA, 15 bp, Homo sapiens
tggaggcctcattgc

SEQ ID NO: 1745589 - DNA, 15 bp, Homo sapiens
ggaggcctcattgca

SEQ ID NO: 1745590 - DNA, 15 bp, Homo sapiens
gaggcctcattgcat

SEQ ID NO: 1745591 - DNA, 15 bp, Homo sapiens
aggcctcattgcata

SEQ ID NO: 1745592 - DNA, 15 bp, Homo sapiens
ggcctcattgcatag

SEQ ID NO: 1745593 - DNA, 15 bp, Homo sapiens
gcctcattgcatagg

SEQ ID NO: 1745594 - DNA, 15 bp, Homo sapiens
cctcattgcataggc

SEQ ID NO: 1745595 - DNA, 15 bp, Homo sapiens
ctcattgcataggca

SEQ ID NO: 1745596 - DNA, 15 bp, Homo sapiens
tcattgcataggcat

SEQ ID NO: 1745597 - DNA, 15 bp, Homo sapiens
cattgcataggcatg

SEQ ID NO: 1745598 - DNA, 15 bp, Homo sapiens
attgcataggcatga

SEQ ID NO: 1745599 - DNA, 15 bp, Homo sapiens
ttgcataggcatgac

SEQ ID NO: 1745600 - DNA, 15 bp, Homo sapiens
tgcataggcatgaca

SEQ ID NO: 1745601 - DNA, 15 bp, Homo sapiens
gcataggcatgacag

SEQ ID NO: 1745602 - DNA, 15 bp, Homo sapiens
cataggcatgacaga

SEQ ID NO: 1745603 - DNA, 15 bp, Homo sapiens
ataggcatgacagat

SEQ ID NO: 1745604 - DNA, 15 bp, Homo sapiens
taggcatgacagatt

SEQ ID NO: 1745605 - DNA, 15 bp, Homo sapiens
aggcatgacagatta

SEQ ID NO: 1745606 - DNA, 15 bp, Homo sapiens
ggcatgacagattag

SEQ ID NO: 1745607 - DNA, 15 bp, Homo sapiens
gcatgacagattaga

SEQ ID NO: 1745608 - DNA, 15 bp, Homo sapiens
catgacagattagat

SEQ ID NO: 1745609 - DNA, 15 bp, Homo sapiens
atgacagattagatc

SEQ ID NO: 1745610 - DNA, 15 bp, Homo sapiens
tgacagattagatca

SEQ ID NO: 1745611 - DNA, 15 bp, Homo sapiens
gacagattagatcat

SEQ ID NO: 1745612 - DNA, 15 bp, Homo sapiens
acagattagatcatt

SEQ ID NO: 1745613 - DNA, 15 bp, Homo sapiens
cagattagatcattg

SEQ ID NO: 1745614 - DNA, 15 bp, Homo sapiens
agattagatcattgg

SEQ ID NO: 1745615 - DNA, 15 bp, Homo sapiens
gattagatcattggc

SEQ ID NO: 1745616 - DNA, 15 bp, Homo sapiens
attagatcattggct

SEQ ID NO: 1745617 - DNA, 15 bp, Homo sapiens
ttagatcattggcta

SEQ ID NO: 1745618 - DNA, 15 bp, Homo sapiens
tagatcattggctat

SEQ ID NO: 1745619 - DNA, 15 bp, Homo sapiens
agatcattggctatt

SEQ ID NO: 1745620 - DNA, 15 bp, Homo sapiens
gatcattggctattg

SEQ ID NO: 1745621 - DNA, 15 bp, Homo sapiens
atcattggctattga

SEQ ID NO: 1745622 - DNA, 15 bp, Homo sapiens
tcattggctattgat

SEQ ID NO: 1745623 - DNA, 15 bp, Homo sapiens
cattggctattgatt

SEQ ID NO: 1745624 - DNA, 15 bp, Homo sapiens
attggctattgatta

SEQ ID NO: 1745625 - DNA, 15 bp, Homo sapiens
ttggctattgattat

SEQ ID NO: 1745626 - DNA, 15 bp, Homo sapiens
tggctattgattatc

SEQ ID NO: 1745627 - DNA, 15 bp, Homo sapiens
ggctattgattatca

SEQ ID NO: 1745628 - DNA, 15 bp, Homo sapiens
gctattgattatcaa

SEQ ID NO: 1745629 - DNA, 15 bp, Homo sapiens
ctattgattatcaac

SEQ ID NO: 1745630 - DNA, 15 bp, Homo sapiens
tattgattatcaacc

SEQ ID NO: 1745631 - DNA, 15 bp, Homo sapiens
attgattatcaacct

SEQ ID NO: 1745632 - DNA, 15 bp, Homo sapiens
ttgattatcaaccta

SEQ ID NO: 1745633 - DNA, 15 bp, Homo sapiens
tgattatcaacctaa

SEQ ID NO: 1745634 - DNA, 15 bp, Homo sapiens
gattatcaacctaac

SEQ ID NO: 1745635 - DNA, 15 bp, Homo sapiens
attatcaacctaacc

SEQ ID NO: 1745636 - DNA, 15 bp, Homo sapiens
ttatcaacctaacct

SEQ ID NO: 1745637 - DNA, 15 bp, Homo sapiens
tatcaacctaacctt

SEQ ID NO: 1745638 - DNA, 15 bp, Homo sapiens
atcaacctaaccttc

SEQ ID NO: 1745639 - DNA, 15 bp, Homo sapiens
tcaacctaaccttca

SEQ ID NO: 1745640 - DNA, 15 bp, Homo sapiens
caacctaaccttcag

SEQ ID NO: 1745641 - DNA, 15 bp, Homo sapiens
aacctaaccttcagc

SEQ ID NO: 1745642 - DNA, 15 bp, Homo sapiens
acctaaccttcagct

SEQ ID NO: 1745643 - DNA, 15 bp, Homo sapiens
cctaaccttcagctt

SEQ ID NO: 1745644 - DNA, 15 bp, Homo sapiens
ctaaccttcagcttc

SEQ ID NO: 1745645 - DNA, 15 bp, Homo sapiens
taaccttcagcttcc

SEQ ID NO: 1745646 - DNA, 15 bp, Homo sapiens
aaccttcagcttccc

SEQ ID NO: 1745647 - DNA, 15 bp, Homo sapiens
accttcagcttccct

SEQ ID NO: 1745648 - DNA, 15 bp, Homo sapiens
ccttcagcttccctc

SEQ ID NO: 1745649 - DNA, 15 bp, Homo sapiens
cttcagcttccctcc

SEQ ID NO: 1745650 - DNA, 15 bp, Homo sapiens
ttcagcttccctccc

SEQ ID NO: 1745651 - DNA, 15 bp, Homo sapiens
tcagcttccctcccc

SEQ ID NO: 1745652 - DNA, 15 bp, Homo sapiens
cagcttccctcccct

SEQ ID NO: 1745653 - DNA, 15 bp, Homo sapiens
agcttccctcccctt

SEQ ID NO: 1745654 - DNA, 15 bp, Homo sapiens
gcttccctccccttc

SEQ ID NO: 1745655 - DNA, 15 bp, Homo sapiens
cttccctccccttcc

SEQ ID NO: 1745656 - DNA, 15 bp, Homo sapiens
ttccctccccttcct

SEQ ID NO: 1745657 - DNA, 15 bp, Homo sapiens
tccctccccttccta

SEQ ID NO: 1745658 - DNA, 15 bp, Homo sapiens
ccctccccttcctag

SEQ ID NO: 1745659 - DNA, 15 bp, Homo sapiens
cctccccttcctaga

SEQ ID NO: 1745660 - DNA, 15 bp, Homo sapiens
ctccccttcctagag

SEQ ID NO: 1745661 - DNA, 15 bp, Homo sapiens
tccccttcctagagg

SEQ ID NO: 1745662 - DNA, 15 bp, Homo sapiens
ccccttcctagaggt

SEQ ID NO: 1745663 - DNA, 15 bp, Homo sapiens
cccttcctagaggtt

SEQ ID NO: 1745664 - DNA, 15 bp, Homo sapiens
ccttcctagaggttg

SEQ ID NO: 1745665 - DNA, 15 bp, Homo sapiens
cttcctagaggttgg

SEQ ID NO: 1745666 - DNA, 15 bp, Homo sapiens
ttcctagaggttggg

SEQ ID NO: 1745667 - DNA, 15 bp, Homo sapiens
tcctagaggttgggg

SEQ ID NO: 1745668 - DNA, 15 bp, Homo sapiens
cctagaggttggggg

SEQ ID NO: 1745669 - DNA, 15 bp, Homo sapiens
ctagaggttgggggc

SEQ ID NO: 1745670 - DNA, 15 bp, Homo sapiens
tagaggttgggggct

SEQ ID NO: 1745671 - DNA, 15 bp, Homo sapiens
agaggttgggggctg

SEQ ID NO: 1745672 - DNA, 15 bp, Homo sapiens
gaggttgggggctgg

SEQ ID NO: 1745673 - DNA, 15 bp, Homo sapiens
aggttgggggctggg

SEQ ID NO: 1745674 - DNA, 15 bp, Homo sapiens
ggttgggggctgggg

SEQ ID NO: 1745675 - DNA, 15 bp, Homo sapiens
gttgggggctggggc

SEQ ID NO: 1745676 - DNA, 15 bp, Homo sapiens
ttgggggctggggct

SEQ ID NO: 1745677 - DNA, 15 bp, Homo sapiens
tgggggctggggctg

SEQ ID NO: 1745678 - DNA, 15 bp, Homo sapiens
gggggctggggctga

SEQ ID NO: 1745679 - DNA, 15 bp, Homo sapiens
ggggctggggctgaa

SEQ ID NO: 1745680 - DNA, 15 bp, Homo sapiens
gggctggggctgaag

SEQ ID NO: 1745681 - DNA, 15 bp, Homo sapiens
ggctggggctgaagg

SEQ ID NO: 1745682 - DNA, 15 bp, Homo sapiens
gctggggctgaaggt

SEQ ID NO: 1745683 - DNA, 15 bp, Homo sapiens
ctggggctgaaggtt

SEQ ID NO: 1745684 - DNA, 15 bp, Homo sapiens
tggggctgaaggttc

SEQ ID NO: 1745685 - DNA, 15 bp, Homo sapiens
ggggctgaaggttcc

SEQ ID NO: 1745686 - DNA, 15 bp, Homo sapiens
gggctgaaggttcca

SEQ ID NO: 1745687 - DNA, 15 bp, Homo sapiens
ggctgaaggttccaa

SEQ ID NO: 1745688 - DNA, 15 bp, Homo sapiens
gctgaaggttccaac

SEQ ID NO: 1745689 - DNA, 15 bp, Homo sapiens
ctgaaggttccaacc

SEQ ID NO: 1745690 - DNA, 15 bp, Homo sapiens
tgaaggttccaaccc

SEQ ID NO: 1745691 - DNA, 15 bp, Homo sapiens
gaaggttccaaccct

SEQ ID NO: 1745692 - DNA, 15 bp, Homo sapiens
aaggttccaaccctc

SEQ ID NO: 1745693 - DNA, 15 bp, Homo sapiens
aggttccaaccctct

SEQ ID NO: 1745694 - DNA, 15 bp, Homo sapiens
ggttccaaccctcta

SEQ ID NO: 1745695 - DNA, 15 bp, Homo sapiens
gttccaaccctctaa

SEQ ID NO: 1745696 - DNA, 15 bp, Homo sapiens
ttccaaccctctaac

SEQ ID NO: 1745697 - DNA, 15 bp, Homo sapiens
tccaaccctctaact

SEQ ID NO: 1745698 - DNA, 15 bp, Homo sapiens
ccaaccctctaactc

SEQ ID NO: 1745699 - DNA, 15 bp, Homo sapiens
caaccctctaactct

SEQ ID NO: 1745700 - DNA, 15 bp, Homo sapiens
aaccctctaactctg

SEQ ID NO: 1745701 - DNA, 15 bp, Homo sapiens
accctctaactctgc

SEQ ID NO: 1745702 - DNA, 15 bp, Homo sapiens
ccctctaactctgcc

SEQ ID NO: 1745703 - DNA, 15 bp, Homo sapiens
cctctaactctgcct

SEQ ID NO: 1745704 - DNA, 15 bp, Homo sapiens
ctctaactctgcctc

SEQ ID NO: 1745705 - DNA, 15 bp, Homo sapiens
tctaactctgcctcg

SEQ ID NO: 1745706 - DNA, 15 bp, Homo sapiens
ctaactctgcctcgg

SEQ ID NO: 1745707 - DNA, 15 bp, Homo sapiens
taactctgcctcggg

SEQ ID NO: 1745708 - DNA, 15 bp, Homo sapiens
aactctgcctcgggc

SEQ ID NO: 1745709 - DNA, 15 bp, Homo sapiens
actctgcctcgggct

SEQ ID NO: 1745710 - DNA, 15 bp, Homo sapiens
ctctgcctcgggctt

SEQ ID NO: 1745711 - DNA, 15 bp, Homo sapiens
tctgcctcgggcttt

SEQ ID NO: 1745712 - DNA, 15 bp, Homo sapiens
ctgcctcgggctttc

SEQ ID NO: 1745713 - DNA, 15 bp, Homo sapiens
tgcctcgggctttct

SEQ ID NO: 1745714 - DNA, 15 bp, Homo sapiens
gcctcgggctttcta

SEQ ID NO: 1745715 - DNA, 15 bp, Homo sapiens
cctcgggctttctag

SEQ ID NO: 1745716 - DNA, 15 bp, Homo sapiens
ctcgggctttctagt

SEQ ID NO: 1745717 - DNA, 15 bp, Homo sapiens
tcgggctttctagtg

SEQ ID NO: 1745718 - DNA, 15 bp, Homo sapiens
cgggctttctagtga

SEQ ID NO: 1745719 - DNA, 15 bp, Homo sapiens
gggctttctagtgac

SEQ ID NO: 1745720 - DNA, 15 bp, Homo sapiens
ggctttctagtgacc

SEQ ID NO: 1745721 - DNA, 15 bp, Homo sapiens
gctttctagtgacca

SEQ ID NO: 1745722 - DNA, 15 bp, Homo sapiens
ctttctagtgaccag

SEQ ID NO: 1745723 - DNA, 15 bp, Homo sapiens
tttctagtgaccagc

SEQ ID NO: 1745724 - DNA, 15 bp, Homo sapiens
ttctagtgaccagcc

SEQ ID NO: 1745725 - DNA, 15 bp, Homo sapiens
tctagtgaccagccc

SEQ ID NO: 1745726 - DNA, 15 bp, Homo sapiens
ctagtgaccagcccc

SEQ ID NO: 1745727 - DNA, 15 bp, Homo sapiens
tagtgaccagccccc

SEQ ID NO: 1745728 - DNA, 15 bp, Homo sapiens
agtgaccagccccca

SEQ ID NO: 1745729 - DNA, 15 bp, Homo sapiens
gtgaccagcccccat

SEQ ID NO: 1745730 - DNA, 15 bp, Homo sapiens
tgaccagcccccatc

SEQ ID NO: 1745731 - DNA, 15 bp, Homo sapiens
gaccagcccccatcc

SEQ ID NO: 1745732 - DNA, 15 bp, Homo sapiens
accagcccccatcca

SEQ ID NO: 1745733 - DNA, 15 bp, Homo sapiens
ccagcccccatccag

SEQ ID NO: 1745734 - DNA, 15 bp, Homo sapiens
cagcccccatccaga

SEQ ID NO: 1745735 - DNA, 15 bp, Homo sapiens
agcccccatccagat

SEQ ID NO: 1745736 - DNA, 15 bp, Homo sapiens
gcccccatccagatg

SEQ ID NO: 1745737 - DNA, 15 bp, Homo sapiens
cccccatccagatgc

SEQ ID NO: 1745738 - DNA, 15 bp, Homo sapiens
ccccatccagatgct

SEQ ID NO: 1745739 - DNA, 15 bp, Homo sapiens
cccatccagatgctt

SEQ ID NO: 1745740 - DNA, 15 bp, Homo sapiens
ccatccagatgcttc

SEQ ID NO: 1745741 - DNA, 15 bp, Homo sapiens
catccagatgcttcc

SEQ ID NO: 1745742 - DNA, 15 bp, Homo sapiens
atccagatgcttcct

SEQ ID NO: 1745743 - DNA, 15 bp, Homo sapiens
tccagatgcttccta

SEQ ID NO: 1745744 - DNA, 15 bp, Homo sapiens
ccagatgcttcctag

SEQ ID NO: 1745745 - DNA, 15 bp, Homo sapiens
cagatgcttcctagg

SEQ ID NO: 1745746 - DNA, 15 bp, Homo sapiens
agatgcttcctaggg

SEQ ID NO: 1745747 - DNA, 15 bp, Homo sapiens
gatgcttcctagggg

SEQ ID NO: 1745748 - DNA, 15 bp, Homo sapiens
atgcttcctaggggc

SEQ ID NO: 1745749 - DNA, 15 bp, Homo sapiens
tgcttcctaggggct

SEQ ID NO: 1745750 - DNA, 15 bp, Homo sapiens
gcttcctaggggctg

SEQ ID NO: 1745751 - DNA, 15 bp, Homo sapiens
cttcctaggggctgc

SEQ ID NO: 1745752 - DNA, 15 bp, Homo sapiens
ttcctaggggctgcc

SEQ ID NO: 1745753 - DNA, 15 bp, Homo sapiens
tcctaggggctgcca

SEQ ID NO: 1745754 - DNA, 15 bp, Homo sapiens
cctaggggctgccag

SEQ ID NO: 1745755 - DNA, 15 bp, Homo sapiens
ctaggggctgccagc

SEQ ID NO: 1745756 - DNA, 15 bp, Homo sapiens
taggggctgccagcc

SEQ ID NO: 1745757 - DNA, 15 bp, Homo sapiens
aggggctgccagcca

SEQ ID NO: 1745758 - DNA, 15 bp, Homo sapiens
ggggctgccagccat

SEQ ID NO: 1745759 - DNA, 15 bp, Homo sapiens
gggctgccagccatg

SEQ ID NO: 1745760 - DNA, 15 bp, Homo sapiens
ggctgccagccatgt

SEQ ID NO: 1745761 - DNA, 15 bp, Homo sapiens
gctgccagccatgtc

SEQ ID NO: 1745762 - DNA, 15 bp, Homo sapiens
ctgccagccatgtca

SEQ ID NO: 1745763 - DNA, 15 bp, Homo sapiens
tgccagccatgtcaa

SEQ ID NO: 1745764 - DNA, 15 bp, Homo sapiens
gccagccatgtcaat

SEQ ID NO: 1745765 - DNA, 15 bp, Homo sapiens
ccagccatgtcaatt

SEQ ID NO: 1745766 - DNA, 15 bp, Homo sapiens
cagccatgtcaattc

SEQ ID NO: 1745767 - DNA, 15 bp, Homo sapiens
agccatgtcaattca

SEQ ID NO: 1745768 - DNA, 15 bp, Homo sapiens
gccatgtcaattcat

SEQ ID NO: 1745769 - DNA, 15 bp, Homo sapiens
ccatgtcaattcatt

SEQ ID NO: 1745770 - DNA, 15 bp, Homo sapiens
catgtcaattcatta

SEQ ID NO: 1745771 - DNA, 15 bp, Homo sapiens
atgtcaattcattag

SEQ ID NO: 1745772 - DNA, 15 bp, Homo sapiens
tgtcaattcattagc

SEQ ID NO: 1745773 - DNA, 15 bp, Homo sapiens
gtcaattcattagca

SEQ ID NO: 1745774 - DNA, 15 bp, Homo sapiens
tcaattcattagcac

SEQ ID NO: 1745775 - DNA, 15 bp, Homo sapiens
caattcattagcaca

SEQ ID NO: 1745776 - DNA, 15 bp, Homo sapiens
aattcattagcacac

SEQ ID NO: 1745777 - DNA, 15 bp, Homo sapiens
attcattagcacaca

SEQ ID NO: 1745778 - DNA, 15 bp, Homo sapiens
ttcattagcacacaa

SEQ ID NO: 1745779 - DNA, 15 bp, Homo sapiens
tcattagcacacaaa

SEQ ID NO: 1745780 - DNA, 15 bp, Homo sapiens
cattagcacacaaaa

SEQ ID NO: 1745781 - DNA, 15 bp, Homo sapiens
attagcacacaaaag

SEQ ID NO: 1745782 - DNA, 15 bp, Homo sapiens
ttagcacacaaaagg

SEQ ID NO: 1745783 - DNA, 15 bp, Homo sapiens
tagcacacaaaagga

SEQ ID NO: 1745784 - DNA, 15 bp, Homo sapiens
agcacacaaaaggac

SEQ ID NO: 1745785 - DNA, 15 bp, Homo sapiens
gcacacaaaaggaca

SEQ ID NO: 1745786 - DNA, 15 bp, Homo sapiens
cacacaaaaggacat

SEQ ID NO: 1745787 - DNA, 15 bp, Homo sapiens
acacaaaaggacatc

SEQ ID NO: 1745788 - DNA, 15 bp, Homo sapiens
cacaaaaggacatca

SEQ ID NO: 1745789 - DNA, 15 bp, Homo sapiens
acaaaaggacatcac

SEQ ID NO: 1745790 - DNA, 15 bp, Homo sapiens
caaaaggacatcact

SEQ ID NO: 1745791 - DNA, 15 bp, Homo sapiens
aaaaggacatcactg

SEQ ID NO: 1745792 - DNA, 15 bp, Homo sapiens
aaaggacatcactgg

SEQ ID NO: 1745793 - DNA, 15 bp, Homo sapiens
aaggacatcactgga

SEQ ID NO: 1745794 - DNA, 15 bp, Homo sapiens
aggacatcactggag

SEQ ID NO: 1745795 - DNA, 15 bp, Homo sapiens
ggacatcactggagt

SEQ ID NO: 1745796 - DNA, 15 bp, Homo sapiens
gacatcactggagtt

SEQ ID NO: 1745797 - DNA, 15 bp, Homo sapiens
acatcactggagttt

SEQ ID NO: 1745798 - DNA, 15 bp, Homo sapiens
catcactggagtttc

SEQ ID NO: 1745799 - DNA, 15 bp, Homo sapiens
atcactggagtttct

SEQ ID NO: 1745800 - DNA, 15 bp, Homo sapiens
tcactggagtttcta

SEQ ID NO: 1745801 - DNA, 15 bp, Homo sapiens
cactggagtttctaa

SEQ ID NO: 1745802 - DNA, 15 bp, Homo sapiens
actggagtttctaag

SEQ ID NO: 1745803 - DNA, 15 bp, Homo sapiens
ctggagtttctaagt

SEQ ID NO: 1745804 - DNA, 15 bp, Homo sapiens
tggagtttctaagta

SEQ ID NO: 1745805 - DNA, 15 bp, Homo sapiens
ggagtttctaagtat

SEQ ID NO: 1745806 - DNA, 15 bp, Homo sapiens
gagtttctaagtatt

SEQ ID NO: 1745807 - DNA, 15 bp, Homo sapiens
agtttctaagtattt

SEQ ID NO: 1745808 - DNA, 15 bp, Homo sapiens
gtttctaagtatttt

SEQ ID NO: 1745809 - DNA, 15 bp, Homo sapiens
tttctaagtatttta

SEQ ID NO: 1745810 - DNA, 15 bp, Homo sapiens
ttctaagtattttac

SEQ ID NO: 1745811 - DNA, 15 bp, Homo sapiens
tctaagtattttacg

SEQ ID NO: 1745812 - DNA, 15 bp, Homo sapiens
ctaagtattttacga

SEQ ID NO: 1745813 - DNA, 15 bp, Homo sapiens
taagtattttacgag

SEQ ID NO: 1745814 - DNA, 15 bp, Homo sapiens
aagtattttacgagt

SEQ ID NO: 1745815 - DNA, 15 bp, Homo sapiens
agtattttacgagtt

SEQ ID NO: 1745816 - DNA, 15 bp, Homo sapiens
gtattttacgagttg

SEQ ID NO: 1745817 - DNA, 15 bp, Homo sapiens
tattttacgagttgt

SEQ ID NO: 1745818 - DNA, 15 bp, Homo sapiens
attttacgagttgta

SEQ ID NO: 1745819 - DNA, 15 bp, Homo sapiens
ttttacgagttgtat

SEQ ID NO: 1745820 - DNA, 15 bp, Homo sapiens
tttacgagttgtatg

SEQ ID NO: 1745821 - DNA, 15 bp, Homo sapiens
ttacgagttgtatgt

SEQ ID NO: 1745822 - DNA, 15 bp, Homo sapiens
tacgagttgtatgtc

SEQ ID NO: 1745823 - DNA, 15 bp, Homo sapiens
acgagttgtatgtca

SEQ ID NO: 1745824 - DNA, 15 bp, Homo sapiens
cgagttgtatgtcag

SEQ ID NO: 1745825 - DNA, 15 bp, Homo sapiens
gagttgtatgtcagg

SEQ ID NO: 1745826 - DNA, 15 bp, Homo sapiens
agttgtatgtcagga

SEQ ID NO: 1745827 - DNA, 15 bp, Homo sapiens
gttgtatgtcaggat

SEQ ID NO: 1745828 - DNA, 15 bp, Homo sapiens
ttgtatgtcaggata

SEQ ID NO: 1745829 - DNA, 15 bp, Homo sapiens
tgtatgtcaggatat

SEQ ID NO: 1745830 - DNA, 15 bp, Homo sapiens
gtatgtcaggatatg

SEQ ID NO: 1745831 - DNA, 15 bp, Homo sapiens
tatgtcaggatatgg

SEQ ID NO: 1745832 - DNA, 15 bp, Homo sapiens
atgtcaggatatggg

SEQ ID NO: 1745833 - DNA, 15 bp, Homo sapiens
tgtcaggatatgggg

SEQ ID NO: 1745834 - DNA, 15 bp, Homo sapiens
gtcaggatatggggt

SEQ ID NO: 1745835 - DNA, 15 bp, Homo sapiens
tcaggatatggggtc

SEQ ID NO: 1745836 - DNA, 15 bp, Homo sapiens
caggatatggggtca

SEQ ID NO: 1745837 - DNA, 15 bp, Homo sapiens
aggatatggggtcaa

SEQ ID NO: 1745838 - DNA, 15 bp, Homo sapiens
ggatatggggtcaaa

SEQ ID NO: 1745839 - DNA, 15 bp, Homo sapiens
gatatggggtcaaag

SEQ ID NO: 1745840 - DNA, 15 bp, Homo sapiens
atatggggtcaaaga

SEQ ID NO: 1745841 - DNA, 15 bp, Homo sapiens
tatggggtcaaagac

SEQ ID NO: 1745842 - DNA, 15 bp, Homo sapiens
atggggtcaaagacc

SEQ ID NO: 1745843 - DNA, 15 bp, Homo sapiens
tggggtcaaagacca

SEQ ID NO: 1745844 - DNA, 15 bp, Homo sapiens
ggggtcaaagaccaa

SEQ ID NO: 1745845 - DNA, 15 bp, Homo sapiens
gggtcaaagaccaaa

SEQ ID NO: 1745846 - DNA, 15 bp, Homo sapiens
ggtcaaagaccaaac

SEQ ID NO: 1745847 - DNA, 15 bp, Homo sapiens
gtcaaagaccaaaca

SEQ ID NO: 1745848 - DNA, 15 bp, Homo sapiens
tcaaagaccaaacat

SEQ ID NO: 1745849 - DNA, 15 bp, Homo sapiens
caaagaccaaacatc

SEQ ID NO: 1745850 - DNA, 15 bp, Homo sapiens
aaagaccaaacatct

SEQ ID NO: 1745851 - DNA, 15 bp, Homo sapiens
aagaccaaacatcta

SEQ ID NO: 1745852 - DNA, 15 bp, Homo sapiens
agaccaaacatctat

SEQ ID NO: 1745853 - DNA, 15 bp, Homo sapiens
gaccaaacatctatt

SEQ ID NO: 1745854 - DNA, 15 bp, Homo sapiens
accaaacatctattt

SEQ ID NO: 1745855 - DNA, 15 bp, Homo sapiens
ccaaacatctatttc

SEQ ID NO: 1745856 - DNA, 15 bp, Homo sapiens
caaacatctatttca

SEQ ID NO: 1745857 - DNA, 15 bp, Homo sapiens
aaacatctatttcac

SEQ ID NO: 1745858 - DNA, 15 bp, Homo sapiens
aacatctatttcaca

SEQ ID NO: 1745859 - DNA, 15 bp, Homo sapiens
acatctatttcacaa

SEQ ID NO: 1745860 - DNA, 15 bp, Homo sapiens
catctatttcacaat

SEQ ID NO: 1745861 - DNA, 15 bp, Homo sapiens
atctatttcacaata

SEQ ID NO: 1745862 - DNA, 15 bp, Homo sapiens
tctatttcacaatat

SEQ ID NO: 1745863 - DNA, 15 bp, Homo sapiens
ctatttcacaatatc

SEQ ID NO: 1745864 - DNA, 15 bp, Homo sapiens
tatttcacaatatca

SEQ ID NO: 1745865 - DNA, 15 bp, Homo sapiens
atttcacaatatcac

SEQ ID NO: 1745866 - DNA, 15 bp, Homo sapiens
tttcacaatatcaca

SEQ ID NO: 1745867 - DNA, 15 bp, Homo sapiens
ttcacaatatcacac

SEQ ID NO: 1745868 - DNA, 15 bp, Homo sapiens
tcacaatatcacaca

SEQ ID NO: 1745869 - DNA, 15 bp, Homo sapiens
cacaatatcacacaa

SEQ ID NO: 1745870 - DNA, 15 bp, Homo sapiens
acaatatcacacaac

SEQ ID NO: 1745871 - DNA, 15 bp, Homo sapiens
caatatcacacaaca

SEQ ID NO: 1745872 - DNA, 15 bp, Homo sapiens
aatatcacacaacac

SEQ ID NO: 1745873 - DNA, 15 bp, Homo sapiens
atatcacacaacaca

SEQ ID NO: 1745874 - DNA, 15 bp, Homo sapiens
tatcacacaacacaa

SEQ ID NO: 1745875 - DNA, 15 bp, Homo sapiens
atcacacaacacaat

SEQ ID NO: 1745876 - DNA, 15 bp, Homo sapiens
tcacacaacacaatg

SEQ ID NO: 1745877 - DNA, 15 bp, Homo sapiens
cacacaacacaatgt

SEQ ID NO: 1745878 - DNA, 15 bp, Homo sapiens
acacaacacaatgtg

SEQ ID NO: 1745879 - DNA, 15 bp, Homo sapiens
cacaacacaatgtgt

SEQ ID NO: 1745880 - DNA, 15 bp, Homo sapiens
acaacacaatgtgtc

SEQ ID NO: 1745881 - DNA, 15 bp, Homo sapiens
caacacaatgtgtct

SEQ ID NO: 1745882 - DNA, 15 bp, Homo sapiens
aacacaatgtgtctg

SEQ ID NO: 1745883 - DNA, 15 bp, Homo sapiens
acacaatgtgtctgg

SEQ ID NO: 1745884 - DNA, 15 bp, Homo sapiens
cacaatgtgtctggg

SEQ ID NO: 1745885 - DNA, 15 bp, Homo sapiens
acaatgtgtctgggg

SEQ ID NO: 1745886 - DNA, 15 bp, Homo sapiens
caatgtgtctgggga

SEQ ID NO: 1745887 - DNA, 15 bp, Homo sapiens
aatgtgtctggggaa

SEQ ID NO: 1745888 - DNA, 15 bp, Homo sapiens
atgtgtctggggaac

SEQ ID NO: 1745889 - DNA, 15 bp, Homo sapiens
tgtgtctggggaact

SEQ ID NO: 1745890 - DNA, 15 bp, Homo sapiens
gtgtctggggaacta

SEQ ID NO: 1745891 - DNA, 15 bp, Homo sapiens
tgtctggggaactat

SEQ ID NO: 1745892 - DNA, 15 bp, Homo sapiens
gtctggggaactatt

SEQ ID NO: 1745893 - DNA, 15 bp, Homo sapiens
tctggggaactatta

SEQ ID NO: 1745894 - DNA, 15 bp, Homo sapiens
ctggggaactattag

SEQ ID NO: 1745895 - DNA, 15 bp, Homo sapiens
tggggaactattagc

SEQ ID NO: 1745896 - DNA, 15 bp, Homo sapiens
ggggaactattagca

SEQ ID NO: 1745897 - DNA, 15 bp, Homo sapiens
gggaactattagcag

SEQ ID NO: 1745898 - DNA, 15 bp, Homo sapiens
ggaactattagcagc

SEQ ID NO: 1745899 - DNA, 15 bp, Homo sapiens
gaactattagcagct

SEQ ID NO: 1745900 - DNA, 15 bp, Homo sapiens
aactattagcagctc

SEQ ID NO: 1745901 - DNA, 15 bp, Homo sapiens
actattagcagctct

SEQ ID NO: 1745902 - DNA, 15 bp, Homo sapiens
ctattagcagctctg

SEQ ID NO: 1745903 - DNA, 15 bp, Homo sapiens
tattagcagctctgt

SEQ ID NO: 1745904 - DNA, 15 bp, Homo sapiens
attagcagctctgta

SEQ ID NO: 1745905 - DNA, 15 bp, Homo sapiens
ttagcagctctgtat

SEQ ID NO: 1745906 - DNA, 15 bp, Homo sapiens
tagcagctctgtatt

SEQ ID NO: 1745907 - DNA, 15 bp, Homo sapiens
agcagctctgtattg

SEQ ID NO: 1745908 - DNA, 15 bp, Homo sapiens
gcagctctgtattga

SEQ ID NO: 1745909 - DNA, 15 bp, Homo sapiens
cagctctgtattgat

SEQ ID NO: 1745910 - DNA, 15 bp, Homo sapiens
agctctgtattgatt

SEQ ID NO: 1745911 - DNA, 15 bp, Homo sapiens
gctctgtattgattg

SEQ ID NO: 1745912 - DNA, 15 bp, Homo sapiens
ctctgtattgattga

SEQ ID NO: 1745913 - DNA, 15 bp, Homo sapiens
tctgtattgattgac

SEQ ID NO: 1745914 - DNA, 15 bp, Homo sapiens
ctgtattgattgact

SEQ ID NO: 1745915 - DNA, 15 bp, Homo sapiens
tgtattgattgacta

SEQ ID NO: 1745916 - DNA, 15 bp, Homo sapiens
gtattgattgactat

SEQ ID NO: 1745917 - DNA, 15 bp, Homo sapiens
tattgattgactata

SEQ ID NO: 1745918 - DNA, 15 bp, Homo sapiens
attgattgactataa

SEQ ID NO: 1745919 - DNA, 15 bp, Homo sapiens
ttgattgactataaa

SEQ ID NO: 1745920 - DNA, 15 bp, Homo sapiens
tgattgactataaaa

SEQ ID NO: 1745921 - DNA, 15 bp, Homo sapiens
gattgactataaaat

SEQ ID NO: 1745922 - DNA, 15 bp, Homo sapiens
attgactataaaatg

SEQ ID NO: 1745923 - DNA, 15 bp, Homo sapiens
ttgactataaaatga

SEQ ID NO: 1745924 - DNA, 15 bp, Homo sapiens
tgactataaaatgag

SEQ ID NO: 1745925 - DNA, 15 bp, Homo sapiens
gactataaaatgaga

SEQ ID NO: 1745926 - DNA, 15 bp, Homo sapiens
actataaaatgagag

SEQ ID NO: 1745927 - DNA, 15 bp, Homo sapiens
ctataaaatgagagt

SEQ ID NO: 1745928 - DNA, 15 bp, Homo sapiens
tataaaatgagagta

SEQ ID NO: 1745929 - DNA, 15 bp, Homo sapiens
ataaaatgagagtag

SEQ ID NO: 1745930 - DNA, 15 bp, Homo sapiens
taaaatgagagtagg

SEQ ID NO: 1745931 - DNA, 15 bp, Homo sapiens
aaaatgagagtagga

SEQ ID NO: 1745932 - DNA, 15 bp, Homo sapiens
aaatgagagtaggaa

SEQ ID NO: 1745933 - DNA, 15 bp, Homo sapiens
aatgagagtaggaag

SEQ ID NO: 1745934 - DNA, 15 bp, Homo sapiens
atgagagtaggaagt

SEQ ID NO: 1745935 - DNA, 15 bp, Homo sapiens
tgagagtaggaagtc

SEQ ID NO: 1745936 - DNA, 15 bp, Homo sapiens
gagagtaggaagtca

SEQ ID NO: 1745937 - DNA, 15 bp, Homo sapiens
agagtaggaagtcac

SEQ ID NO: 1745938 - DNA, 15 bp, Homo sapiens
gagtaggaagtcaca

SEQ ID NO: 1745939 - DNA, 15 bp, Homo sapiens
agtaggaagtcacag

SEQ ID NO: 1745940 - DNA, 15 bp, Homo sapiens
gtaggaagtcacagg

SEQ ID NO: 1745941 - DNA, 15 bp, Homo sapiens
taggaagtcacagga

SEQ ID NO: 1745942 - DNA, 15 bp, Homo sapiens
aggaagtcacaggag

SEQ ID NO: 1745943 - DNA, 15 bp, Homo sapiens
ggaagtcacaggaga

SEQ ID NO: 1745944 - DNA, 15 bp, Homo sapiens
gaagtcacaggagag

SEQ ID NO: 1745945 - DNA, 15 bp, Homo sapiens
aagtcacaggagagg

SEQ ID NO: 1745946 - DNA, 15 bp, Homo sapiens
agtcacaggagagga

SEQ ID NO: 1745947 - DNA, 15 bp, Homo sapiens
gtcacaggagaggag

SEQ ID NO: 1745948 - DNA, 15 bp, Homo sapiens
tcacaggagaggaga

SEQ ID NO: 1745949 - DNA, 15 bp, Homo sapiens
cacaggagaggagag

SEQ ID NO: 1745950 - DNA, 15 bp, Homo sapiens
acaggagaggagagt

SEQ ID NO: 1745951 - DNA, 15 bp, Homo sapiens
caggagaggagagtg

SEQ ID NO: 1745952 - DNA, 15 bp, Homo sapiens
aggagaggagagtgg

SEQ ID NO: 1745953 - DNA, 15 bp, Homo sapiens
gagaggagagtgggt

SEQ ID NO: 1745954 - DNA, 15 bp, Homo sapiens
agaggagagtgggta

SEQ ID NO: 1745955 - DNA, 15 bp, Homo sapiens
gaggagagtgggtac

SEQ ID NO: 1745956 - DNA, 15 bp, Homo sapiens
aggagagtgggtact

SEQ ID NO: 1745957 - DNA, 15 bp, Homo sapiens
ggagagtgggtacta

SEQ ID NO: 1745958 - DNA, 15 bp, Homo sapiens
gagagtgggtactag

SEQ ID NO: 1745959 - DNA, 15 bp, Homo sapiens
agagtgggtactaga

SEQ ID NO: 1745960 - DNA, 15 bp, Homo sapiens
gagtgggtactagat

SEQ ID NO: 1745961 - DNA, 15 bp, Homo sapiens
agtgggtactagata

SEQ ID NO: 1745962 - DNA, 15 bp, Homo sapiens
gtgggtactagatat

SEQ ID NO: 1745963 - DNA, 15 bp, Homo sapiens
tgggtactagatatg

SEQ ID NO: 1745964 - DNA, 15 bp, Homo sapiens
gggtactagatatga

SEQ ID NO: 1745965 - DNA, 15 bp, Homo sapiens
ggtactagatatgaa

SEQ ID NO: 1745966 - DNA, 15 bp, Homo sapiens
gtactagatatgaag

SEQ ID NO: 1745967 - DNA, 15 bp, Homo sapiens
tactagatatgaagg

SEQ ID NO: 1745968 - DNA, 15 bp, Homo sapiens
actagatatgaaggg

SEQ ID NO: 1745969 - DNA, 15 bp, Homo sapiens
ctagatatgaagggc

SEQ ID NO: 1745970 - DNA, 15 bp, Homo sapiens
tagatatgaagggcc

SEQ ID NO: 1745971 - DNA, 15 bp, Homo sapiens
agatatgaagggcct

SEQ ID NO: 1745972 - DNA, 15 bp, Homo sapiens
gatatgaagggcctt

SEQ ID NO: 1745973 - DNA, 15 bp, Homo sapiens
atatgaagggcctta

SEQ ID NO: 1745974 - DNA, 15 bp, Homo sapiens
tatgaagggccttat

SEQ ID NO: 1745975 - DNA, 15 bp, Homo sapiens
atgaagggccttata

SEQ ID NO: 1745976 - DNA, 15 bp, Homo sapiens
tgaagggccttatat

SEQ ID NO: 1745977 - DNA, 15 bp, Homo sapiens
gaagggccttatatg

SEQ ID NO: 1745978 - DNA, 15 bp, Homo sapiens
aagggccttatatgc

SEQ ID NO: 1745979 - DNA, 15 bp, Homo sapiens
agggccttatatgcc

SEQ ID NO: 1745980 - DNA, 15 bp, Homo sapiens
gggccttatatgcca

SEQ ID NO: 1745981 - DNA, 15 bp, Homo sapiens
ggccttatatgccat

SEQ ID NO: 1745982 - DNA, 15 bp, Homo sapiens
gccttatatgccata

SEQ ID NO: 1745983 - DNA, 15 bp, Homo sapiens
ccttatatgccatac

SEQ ID NO: 1745984 - DNA, 15 bp, Homo sapiens
cttatatgccatact

SEQ ID NO: 1745985 - DNA, 15 bp, Homo sapiens
ttatatgccatactc

SEQ ID NO: 1745986 - DNA, 15 bp, Homo sapiens
tatatgccatactca

SEQ ID NO: 1745987 - DNA, 15 bp, Homo sapiens
atatgccatactcac

SEQ ID NO: 1745988 - DNA, 15 bp, Homo sapiens
tatgccatactcaca

SEQ ID NO: 1745989 - DNA, 15 bp, Homo sapiens
atgccatactcacaa

SEQ ID NO: 1745990 - DNA, 15 bp, Homo sapiens
tgccatactcacaaa

SEQ ID NO: 1745991 - DNA, 15 bp, Homo sapiens
gccatactcacaaat

SEQ ID NO: 1745992 - DNA, 15 bp, Homo sapiens
ccatactcacaaatt

SEQ ID NO: 1745993 - DNA, 15 bp, Homo sapiens
catactcacaaattt

SEQ ID NO: 1745994 - DNA, 15 bp, Homo sapiens
atactcacaaatttg

SEQ ID NO: 1745995 - DNA, 15 bp, Homo sapiens
tactcacaaatttgg

SEQ ID NO: 1745996 - DNA, 15 bp, Homo sapiens
actcacaaatttgga

SEQ ID NO: 1745997 - DNA, 15 bp, Homo sapiens
ctcacaaatttggag

SEQ ID NO: 1745998 - DNA, 15 bp, Homo sapiens
tcacaaatttggagt

SEQ ID NO: 1745999 - DNA, 15 bp, Homo sapiens
cacaaatttggagtg

SEQ ID NO: 1746000 - DNA, 15 bp, Homo sapiens
acaaatttggagtgt

SEQ ID NO: 1746001 - DNA, 15 bp, Homo sapiens
caaatttggagtgta

SEQ ID NO: 1746002 - DNA, 15 bp, Homo sapiens
aaatttggagtgtag

SEQ ID NO: 1746003 - DNA, 15 bp, Homo sapiens
aatttggagtgtagc

SEQ ID NO: 1746004 - DNA, 15 bp, Homo sapiens
atttggagtgtagca

SEQ ID NO: 1746005 - DNA, 15 bp, Homo sapiens
tttggagtgtagcat

SEQ ID NO: 1746006 - DNA, 15 bp, Homo sapiens
ttggagtgtagcatg

SEQ ID NO: 1746007 - DNA, 15 bp, Homo sapiens
tggagtgtagcatgt

SEQ ID NO: 1746008 - DNA, 15 bp, Homo sapiens
ggagtgtagcatgtg

SEQ ID NO: 1746009 - DNA, 15 bp, Homo sapiens
gagtgtagcatgtgc

SEQ ID NO: 1746010 - DNA, 15 bp, Homo sapiens
agtgtagcatgtgca

SEQ ID NO: 1746011 - DNA, 15 bp, Homo sapiens
gtgtagcatgtgcat

SEQ ID NO: 1746012 - DNA, 15 bp, Homo sapiens
tgtagcatgtgcatg

SEQ ID NO: 1746013 - DNA, 15 bp, Homo sapiens
gtagcatgtgcatga

SEQ ID NO: 1746014 - DNA, 15 bp, Homo sapiens
tagcatgtgcatgat

SEQ ID NO: 1746015 - DNA, 15 bp, Homo sapiens
agcatgtgcatgata

SEQ ID NO: 1746016 - DNA, 15 bp, Homo sapiens
gcatgtgcatgatat

SEQ ID NO: 1746017 - DNA, 15 bp, Homo sapiens
catgtgcatgatata

SEQ ID NO: 1746018 - DNA, 15 bp, Homo sapiens
atgtgcatgatatag

SEQ ID NO: 1746019 - DNA, 15 bp, Homo sapiens
tgtgcatgatatagc

SEQ ID NO: 1746020 - DNA, 15 bp, Homo sapiens
gtgcatgatatagcc

SEQ ID NO: 1746021 - DNA, 15 bp, Homo sapiens
tgcatgatatagcct

SEQ ID NO: 1746022 - DNA, 15 bp, Homo sapiens
gcatgatatagcctg

SEQ ID NO: 1746023 - DNA, 15 bp, Homo sapiens
catgatatagcctgt

SEQ ID NO: 1746024 - DNA, 15 bp, Homo sapiens
atgatatagcctgtg

SEQ ID NO: 1746025 - DNA, 15 bp, Homo sapiens
tgatatagcctgtgc

SEQ ID NO: 1746026 - DNA, 15 bp, Homo sapiens
gatatagcctgtgct

SEQ ID NO: 1746027 - DNA, 15 bp, Homo sapiens
atatagcctgtgcta

SEQ ID NO: 1746028 - DNA, 15 bp, Homo sapiens
tatagcctgtgctat

SEQ ID NO: 1746029 - DNA, 15 bp, Homo sapiens
atagcctgtgctata

SEQ ID NO: 1746030 - DNA, 15 bp, Homo sapiens
tagcctgtgctataa

SEQ ID NO: 1746031 - DNA, 15 bp, Homo sapiens
agcctgtgctataaa

SEQ ID NO: 1746032 - DNA, 15 bp, Homo sapiens
gcctgtgctataaat

SEQ ID NO: 1746033 - DNA, 15 bp, Homo sapiens
cctgtgctataaatg

SEQ ID NO: 1746034 - DNA, 15 bp, Homo sapiens
ctgtgctataaatgg

SEQ ID NO: 1746035 - DNA, 15 bp, Homo sapiens
tgtgctataaatgga

SEQ ID NO: 1746036 - DNA, 15 bp, Homo sapiens
gtgctataaatggat

SEQ ID NO: 1746037 - DNA, 15 bp, Homo sapiens
tgctataaatggatg

SEQ ID NO: 1746038 - DNA, 15 bp, Homo sapiens
gctataaatggatgt

SEQ ID NO: 1746039 - DNA, 15 bp, Homo sapiens
ctataaatggatgtt

SEQ ID NO: 1746040 - DNA, 15 bp, Homo sapiens
tataaatggatgtta

SEQ ID NO: 1746041 - DNA, 15 bp, Homo sapiens
ataaatggatgttaa

SEQ ID NO: 1746042 - DNA, 15 bp, Homo sapiens
taaatggatgttaag

SEQ ID NO: 1746043 - DNA, 15 bp, Homo sapiens
aaatggatgttaagc

SEQ ID NO: 1746044 - DNA, 15 bp, Homo sapiens
aatggatgttaagca

SEQ ID NO: 1746045 - DNA, 15 bp, Homo sapiens
atggatgttaagcag

SEQ ID NO: 1746046 - DNA, 15 bp, Homo sapiens
tggatgttaagcagg

SEQ ID NO: 1746047 - DNA, 15 bp, Homo sapiens
ggatgttaagcaggg

SEQ ID NO: 1746048 - DNA, 15 bp, Homo sapiens
gatgttaagcagggg

SEQ ID NO: 1746049 - DNA, 15 bp, Homo sapiens
atgttaagcaggggt

SEQ ID NO: 1746050 - DNA, 15 bp, Homo sapiens
tgttaagcaggggta

SEQ ID NO: 1746051 - DNA, 15 bp, Homo sapiens
gttaagcaggggtaa

SEQ ID NO: 1746052 - DNA, 15 bp, Homo sapiens
ttaagcaggggtaag

SEQ ID NO: 1746053 - DNA, 15 bp, Homo sapiens
taagcaggggtaagg

SEQ ID NO: 1746054 - DNA, 15 bp, Homo sapiens
aagcaggggtaagga

SEQ ID NO: 1746055 - DNA, 15 bp, Homo sapiens
agcaggggtaaggat

SEQ ID NO: 1746056 - DNA, 15 bp, Homo sapiens
gcaggggtaaggata

SEQ ID NO: 1746057 - DNA, 15 bp, Homo sapiens
caggggtaaggataa

SEQ ID NO: 1746058 - DNA, 15 bp, Homo sapiens
aggggtaaggataaa

SEQ ID NO: 1746059 - DNA, 15 bp, Homo sapiens
ggggtaaggataaaa

SEQ ID NO: 1746060 - DNA, 15 bp, Homo sapiens
gggtaaggataaaat

SEQ ID NO: 1746061 - DNA, 15 bp, Homo sapiens
ggtaaggataaaatc

SEQ ID NO: 1746062 - DNA, 15 bp, Homo sapiens
gtaaggataaaatca

SEQ ID NO: 1746063 - DNA, 15 bp, Homo sapiens
taaggataaaatcag

SEQ ID NO: 1746064 - DNA, 15 bp, Homo sapiens
aaggataaaatcaga

SEQ ID NO: 1746065 - DNA, 15 bp, Homo sapiens
aggataaaatcagac

SEQ ID NO: 1746066 - DNA, 15 bp, Homo sapiens
ggataaaatcagaca

SEQ ID NO: 1746067 - DNA, 15 bp, Homo sapiens
gataaaatcagacat

SEQ ID NO: 1746068 - DNA, 15 bp, Homo sapiens
ataaaatcagacata

SEQ ID NO: 1746069 - DNA, 15 bp, Homo sapiens
taaaatcagacataa

SEQ ID NO: 1746070 - DNA, 15 bp, Homo sapiens
aaaatcagacataat

SEQ ID NO: 1746071 - DNA, 15 bp, Homo sapiens
aaatcagacataatt

SEQ ID NO: 1746072 - DNA, 15 bp, Homo sapiens
aatcagacataattt

SEQ ID NO: 1746073 - DNA, 15 bp, Homo sapiens
atcagacataatttt

SEQ ID NO: 1746074 - DNA, 15 bp, Homo sapiens
tcagacataattttt

SEQ ID NO: 1746075 - DNA, 15 bp, Homo sapiens
cagacataatttttg

SEQ ID NO: 1746076 - DNA, 15 bp, Homo sapiens
agacataatttttgc

SEQ ID NO: 1746077 - DNA, 15 bp, Homo sapiens
gacataatttttgca

SEQ ID NO: 1746078 - DNA, 15 bp, Homo sapiens
acataatttttgcaa

SEQ ID NO: 1746079 - DNA, 15 bp, Homo sapiens
cataatttttgcaag

SEQ ID NO: 1746080 - DNA, 15 bp, Homo sapiens
ataatttttgcaagt

SEQ ID NO: 1746081 - DNA, 15 bp, Homo sapiens
taatttttgcaagtt

SEQ ID NO: 1746082 - DNA, 15 bp, Homo sapiens
aatttttgcaagttc

SEQ ID NO: 1746083 - DNA, 15 bp, Homo sapiens
atttttgcaagttca

SEQ ID NO: 1746084 - DNA, 15 bp, Homo sapiens
tttttgcaagttcac

SEQ ID NO: 1746085 - DNA, 15 bp, Homo sapiens
ttttgcaagttcaca

SEQ ID NO: 1746086 - DNA, 15 bp, Homo sapiens
tttgcaagttcacat

SEQ ID NO: 1746087 - DNA, 15 bp, Homo sapiens
ttgcaagttcacatg

SEQ ID NO: 1746088 - DNA, 15 bp, Homo sapiens
tgcaagttcacatgg

SEQ ID NO: 1746089 - DNA, 15 bp, Homo sapiens
gcaagttcacatggt

SEQ ID NO: 1746090 - DNA, 15 bp, Homo sapiens
caagttcacatggta

SEQ ID NO: 1746091 - DNA, 15 bp, Homo sapiens
aagttcacatggtaa

SEQ ID NO: 1746092 - DNA, 15 bp, Homo sapiens
agttcacatggtaat

SEQ ID NO: 1746093 - DNA, 15 bp, Homo sapiens
gttcacatggtaata

SEQ ID NO: 1746094 - DNA, 15 bp, Homo sapiens
ttcacatggtaatag

SEQ ID NO: 1746095 - DNA, 15 bp, Homo sapiens
tcacatggtaatagt

SEQ ID NO: 1746096 - DNA, 15 bp, Homo sapiens
cacatggtaatagtc

SEQ ID NO: 1746097 - DNA, 15 bp, Homo sapiens
acatggtaatagtca

SEQ ID NO: 1746098 - DNA, 15 bp, Homo sapiens
catggtaatagtcag

SEQ ID NO: 1746099 - DNA, 15 bp, Homo sapiens
atggtaatagtcagt

SEQ ID NO: 1746100 - DNA, 15 bp, Homo sapiens
tggtaatagtcagtg

SEQ ID NO: 1746101 - DNA, 15 bp, Homo sapiens
ggtaatagtcagtgg

SEQ ID NO: 1746102 - DNA, 15 bp, Homo sapiens
gtaatagtcagtggg

SEQ ID NO: 1746103 - DNA, 15 bp, Homo sapiens
taatagtcagtgggg

SEQ ID NO: 1746104 - DNA, 15 bp, Homo sapiens
aatagtcagtggggg

SEQ ID NO: 1746105 - DNA, 15 bp, Homo sapiens
atagtcagtgggggg

SEQ ID NO: 1746106 - DNA, 15 bp, Homo sapiens
tagtcagtgggggga

SEQ ID NO: 1746107 - DNA, 15 bp, Homo sapiens
agtcagtggggggat

SEQ ID NO: 1746108 - DNA, 15 bp, Homo sapiens
gtcagtggggggata

SEQ ID NO: 1746109 - DNA, 15 bp, Homo sapiens
tcagtggggggatag

SEQ ID NO: 1746110 - DNA, 15 bp, Homo sapiens
cagtggggggataga

SEQ ID NO: 1746111 - DNA, 15 bp, Homo sapiens
agtggggggatagac

SEQ ID NO: 1746112 - DNA, 15 bp, Homo sapiens
gtggggggatagact

SEQ ID NO: 1746113 - DNA, 15 bp, Homo sapiens
tggggggatagactg

SEQ ID NO: 1746114 - DNA, 15 bp, Homo sapiens
ggggggatagactga

SEQ ID NO: 1746115 - DNA, 15 bp, Homo sapiens
gggggatagactgag

SEQ ID NO: 1746116 - DNA, 15 bp, Homo sapiens
ggggatagactgagg

SEQ ID NO: 1746117 - DNA, 15 bp, Homo sapiens
gggatagactgagga

SEQ ID NO: 1746118 - DNA, 15 bp, Homo sapiens
ggatagactgaggag

SEQ ID NO: 1746119 - DNA, 15 bp, Homo sapiens
gatagactgaggaga

SEQ ID NO: 1746120 - DNA, 15 bp, Homo sapiens
atagactgaggagaa

SEQ ID NO: 1746121 - DNA, 15 bp, Homo sapiens
tagactgaggagaat

SEQ ID NO: 1746122 - DNA, 15 bp, Homo sapiens
agactgaggagaata

SEQ ID NO: 1746123 - DNA, 15 bp, Homo sapiens
gactgaggagaataa

SEQ ID NO: 1746124 - DNA, 15 bp, Homo sapiens
actgaggagaataag

SEQ ID NO: 1746125 - DNA, 15 bp, Homo sapiens
ctgaggagaataaga

SEQ ID NO: 1746126 - DNA, 15 bp, Homo sapiens
tgaggagaataagaa

SEQ ID NO: 1746127 - DNA, 15 bp, Homo sapiens
gaggagaataagaaa

SEQ ID NO: 1746128 - DNA, 15 bp, Homo sapiens
aggagaataagaaaa

SEQ ID NO: 1746129 - DNA, 15 bp, Homo sapiens
ggagaataagaaaaa

SEQ ID NO: 1746130 - DNA, 15 bp, Homo sapiens
gagaataagaaaaag

SEQ ID NO: 1746131 - DNA, 15 bp, Homo sapiens
agaataagaaaaagt

SEQ ID NO: 1746132 - DNA, 15 bp, Homo sapiens
gaataagaaaaagtg

SEQ ID NO: 1746133 - DNA, 15 bp, Homo sapiens
aataagaaaaagtga

SEQ ID NO: 1746134 - DNA, 15 bp, Homo sapiens
ataagaaaaagtgag

SEQ ID NO: 1746135 - DNA, 15 bp, Homo sapiens
taagaaaaagtgaga

SEQ ID NO: 1746136 - DNA, 15 bp, Homo sapiens
aagaaaaagtgagaa

SEQ ID NO: 1746137 - DNA, 15 bp, Homo sapiens
agaaaaagtgagaaa

SEQ ID NO: 1746138 - DNA, 15 bp, Homo sapiens
gaaaaagtgagaaat

SEQ ID NO: 1746139 - DNA, 15 bp, Homo sapiens
aaaaagtgagaaata

SEQ ID NO: 1746140 - DNA, 15 bp, Homo sapiens
aaaagtgagaaatag

SEQ ID NO: 1746141 - DNA, 15 bp, Homo sapiens
aaagtgagaaataga

SEQ ID NO: 1746142 - DNA, 15 bp, Homo sapiens
gagaaatagacctgt

SEQ ID NO: 1746143 - DNA, 15 bp, Homo sapiens
agaaatagacctgtc

SEQ ID NO: 1746144 - DNA, 15 bp, Homo sapiens
gaaatagacctgtca

SEQ ID NO: 1746145 - DNA, 15 bp, Homo sapiens
aaatagacctgtcag

SEQ ID NO: 1746146 - DNA, 15 bp, Homo sapiens
aatagacctgtcagt

SEQ ID NO: 1746147 - DNA, 15 bp, Homo sapiens
atagacctgtcagtc

SEQ ID NO: 1746148 - DNA, 15 bp, Homo sapiens
tagacctgtcagtct

SEQ ID NO: 1746149 - DNA, 15 bp, Homo sapiens
agacctgtcagtctg

SEQ ID NO: 1746150 - DNA, 15 bp, Homo sapiens
gacctgtcagtctgt

SEQ ID NO: 1746151 - DNA, 15 bp, Homo sapiens
acctgtcagtctgtc

SEQ ID NO: 1746152 - DNA, 15 bp, Homo sapiens
cctgtcagtctgtct

SEQ ID NO: 1746153 - DNA, 15 bp, Homo sapiens
ctgtcagtctgtctc

SEQ ID NO: 1746154 - DNA, 15 bp, Homo sapiens
tgtcagtctgtctca

SEQ ID NO: 1746155 - DNA, 15 bp, Homo sapiens
gtcagtctgtctcag

SEQ ID NO: 1746156 - DNA, 15 bp, Homo sapiens
tcagtctgtctcagt

SEQ ID NO: 1746157 - DNA, 15 bp, Homo sapiens
cagtctgtctcagtg

SEQ ID NO: 1746158 - DNA, 15 bp, Homo sapiens
agtctgtctcagtgg

SEQ ID NO: 1746159 - DNA, 15 bp, Homo sapiens
gtctgtctcagtggt

SEQ ID NO: 1746160 - DNA, 15 bp, Homo sapiens
tctgtctcagtggtt

SEQ ID NO: 1746161 - DNA, 15 bp, Homo sapiens
ctgtctcagtggttc

SEQ ID NO: 1746162 - DNA, 15 bp, Homo sapiens
tgtctcagtggttct

SEQ ID NO: 1746163 - DNA, 15 bp, Homo sapiens
gtctcagtggttctt

SEQ ID NO: 1746164 - DNA, 15 bp, Homo sapiens
tctcagtggttctta

SEQ ID NO: 1746165 - DNA, 15 bp, Homo sapiens
ctcagtggttcttaa

SEQ ID NO: 1746166 - DNA, 15 bp, Homo sapiens
tcagtggttcttaac

SEQ ID NO: 1746167 - DNA, 15 bp, Homo sapiens
cagtggttcttaacc

SEQ ID NO: 1746168 - DNA, 15 bp, Homo sapiens
agtggttcttaacca

SEQ ID NO: 1746169 - DNA, 15 bp, Homo sapiens
gtggttcttaaccat

SEQ ID NO: 1746170 - DNA, 15 bp, Homo sapiens
tggttcttaaccatg

SEQ ID NO: 1746171 - DNA, 15 bp, Homo sapiens
ggttcttaaccatgt

SEQ ID NO: 1746172 - DNA, 15 bp, Homo sapiens
gttcttaaccatgtg

SEQ ID NO: 1746173 - DNA, 15 bp, Homo sapiens
ttcttaaccatgtgt

SEQ ID NO: 1746174 - DNA, 15 bp, Homo sapiens
tcttaaccatgtgtg

SEQ ID NO: 1746175 - DNA, 15 bp, Homo sapiens
cttaaccatgtgtgc

SEQ ID NO: 1746176 - DNA, 15 bp, Homo sapiens
ttaaccatgtgtgca

SEQ ID NO: 1746177 - DNA, 15 bp, Homo sapiens
taaccatgtgtgcaa

SEQ ID NO: 1746178 - DNA, 15 bp, Homo sapiens
aaccatgtgtgcaaa

SEQ ID NO: 1746179 - DNA, 15 bp, Homo sapiens
accatgtgtgcaaat

SEQ ID NO: 1746180 - DNA, 15 bp, Homo sapiens
ccatgtgtgcaaatt

SEQ ID NO: 1746181 - DNA, 15 bp, Homo sapiens
catgtgtgcaaatta

SEQ ID NO: 1746182 - DNA, 15 bp, Homo sapiens
atgtgtgcaaattag

SEQ ID NO: 1746183 - DNA, 15 bp, Homo sapiens
tgtgtgcaaattaga

SEQ ID NO: 1746184 - DNA, 15 bp, Homo sapiens
gtgtgcaaattagaa

SEQ ID NO: 1746185 - DNA, 15 bp, Homo sapiens
tgtgcaaattagaat

SEQ ID NO: 1746186 - DNA, 15 bp, Homo sapiens
gtgcaaattagaata

SEQ ID NO: 1746187 - DNA, 15 bp, Homo sapiens
tgcaaattagaataa

SEQ ID NO: 1746188 - DNA, 15 bp, Homo sapiens
gcaaattagaataac

SEQ ID NO: 1746189 - DNA, 15 bp, Homo sapiens
caaattagaataacc

SEQ ID NO: 1746190 - DNA, 15 bp, Homo sapiens
aaattagaataacct

SEQ ID NO: 1746191 - DNA, 15 bp, Homo sapiens
aattagaataacctg

SEQ ID NO: 1746192 - DNA, 15 bp, Homo sapiens
attagaataacctga

SEQ ID NO: 1746193 - DNA, 15 bp, Homo sapiens
ttagaataacctgag

SEQ ID NO: 1746194 - DNA, 15 bp, Homo sapiens
tagaataacctgagg

SEQ ID NO: 1746195 - DNA, 15 bp, Homo sapiens
agaataacctgagga

SEQ ID NO: 1746196 - DNA, 15 bp, Homo sapiens
gaataacctgaggaa

SEQ ID NO: 1746197 - DNA, 15 bp, Homo sapiens
aataacctgaggaat

SEQ ID NO: 1746198 - DNA, 15 bp, Homo sapiens
ataacctgaggaatt

SEQ ID NO: 1746199 - DNA, 15 bp, Homo sapiens
taacctgaggaattt

SEQ ID NO: 1746200 - DNA, 15 bp, Homo sapiens
aacctgaggaatttt

SEQ ID NO: 1746201 - DNA, 15 bp, Homo sapiens
acctgaggaattttg

SEQ ID NO: 1746202 - DNA, 15 bp, Homo sapiens
cctgaggaattttgt

SEQ ID NO: 1746203 - DNA, 15 bp, Homo sapiens
ctgaggaattttgtt

SEQ ID NO: 1746204 - DNA, 15 bp, Homo sapiens
tgaggaattttgttt

SEQ ID NO: 1746205 - DNA, 15 bp, Homo sapiens
gaggaattttgtttt

SEQ ID NO: 1746206 - DNA, 15 bp, Homo sapiens
aggaattttgttttg

SEQ ID NO: 1746207 - DNA, 15 bp, Homo sapiens
ggaattttgttttgt

SEQ ID NO: 1746208 - DNA, 15 bp, Homo sapiens
gaattttgttttgtt

SEQ ID NO: 1746209 - DNA, 15 bp, Homo sapiens
aattttgttttgttt

SEQ ID NO: 1746210 - DNA, 15 bp, Homo sapiens
ttgttttgttttttc

SEQ ID NO: 1746211 - DNA, 15 bp, Homo sapiens
tgttttgttttttct

SEQ ID NO: 1746212 - DNA, 15 bp, Homo sapiens
gttttgttttttctt

SEQ ID NO: 1746213 - DNA, 15 bp, Homo sapiens
ttttgttttttcttt

SEQ ID NO: 1746214 - DNA, 15 bp, Homo sapiens
tgttttttcttttta

SEQ ID NO: 1746215 - DNA, 15 bp, Homo sapiens
gttttttctttttaa

SEQ ID NO: 1746216 - DNA, 15 bp, Homo sapiens
tttttctttttaaaa

SEQ ID NO: 1746217 - DNA, 15 bp, Homo sapiens
ttttctttttaaaaa

SEQ ID NO: 1746218 - DNA, 15 bp, Homo sapiens
ttctttttaaaaatt

SEQ ID NO: 1746219 - DNA, 15 bp, Homo sapiens
tctttttaaaaattt

SEQ ID NO: 1746220 - DNA, 15 bp, Homo sapiens
ctttttaaaaatttt

SEQ ID NO: 1746221 - DNA, 15 bp, Homo sapiens
tttttaaaaattttg

SEQ ID NO: 1746222 - DNA, 15 bp, Homo sapiens
ttttaaaaattttgt

SEQ ID NO: 1746223 - DNA, 15 bp, Homo sapiens
tttaaaaattttgtg

SEQ ID NO: 1746224 - DNA, 15 bp, Homo sapiens
ttaaaaattttgtgt

SEQ ID NO: 1746225 - DNA, 15 bp, Homo sapiens
taaaaattttgtgtc

SEQ ID NO: 1746226 - DNA, 15 bp, Homo sapiens
aaaaattttgtgtcc

SEQ ID NO: 1746227 - DNA, 15 bp, Homo sapiens
aaaattttgtgtccc

SEQ ID NO: 1746228 - DNA, 15 bp, Homo sapiens
aaattttgtgtccca

SEQ ID NO: 1746229 - DNA, 15 bp, Homo sapiens
aattttgtgtcccat

SEQ ID NO: 1746230 - DNA, 15 bp, Homo sapiens
attttgtgtcccatt

SEQ ID NO: 1746231 - DNA, 15 bp, Homo sapiens
ttttgtgtcccattc

SEQ ID NO: 1746232 - DNA, 15 bp, Homo sapiens
tttgtgtcccattcc

SEQ ID NO: 1746233 - DNA, 15 bp, Homo sapiens
ttgtgtcccattcca

SEQ ID NO: 1746234 - DNA, 15 bp, Homo sapiens
tgtgtcccattccac

SEQ ID NO: 1746235 - DNA, 15 bp, Homo sapiens
gtgtcccattccact

SEQ ID NO: 1746236 - DNA, 15 bp, Homo sapiens
tgtcccattccactg

SEQ ID NO: 1746237 - DNA, 15 bp, Homo sapiens
gtcccattccactga

SEQ ID NO: 1746238 - DNA, 15 bp, Homo sapiens
tcccattccactgag

SEQ ID NO: 1746239 - DNA, 15 bp, Homo sapiens
cccattccactgagg

SEQ ID NO: 1746240 - DNA, 15 bp, Homo sapiens
ccattccactgagga

SEQ ID NO: 1746241 - DNA, 15 bp, Homo sapiens
cattccactgaggaa

SEQ ID NO: 1746242 - DNA, 15 bp, Homo sapiens
attccactgaggaat

SEQ ID NO: 1746243 - DNA, 15 bp, Homo sapiens
ttccactgaggaata

SEQ ID NO: 1746244 - DNA, 15 bp, Homo sapiens
tccactgaggaatat

SEQ ID NO: 1746245 - DNA, 15 bp, Homo sapiens
ccactgaggaatatg

SEQ ID NO: 1746246 - DNA, 15 bp, Homo sapiens
cactgaggaatatgc

SEQ ID NO: 1746247 - DNA, 15 bp, Homo sapiens
actgaggaatatgcc

SEQ ID NO: 1746248 - DNA, 15 bp, Homo sapiens
ctgaggaatatgcct

SEQ ID NO: 1746249 - DNA, 15 bp, Homo sapiens
tgaggaatatgccta

SEQ ID NO: 1746250 - DNA, 15 bp, Homo sapiens
ggaatatgcctaggc

SEQ ID NO: 1746251 - DNA, 15 bp, Homo sapiens
gaatatgcctaggcc

SEQ ID NO: 1746252 - DNA, 15 bp, Homo sapiens
aatatgcctaggcct

SEQ ID NO: 1746253 - DNA, 15 bp, Homo sapiens
atatgcctaggcctt

SEQ ID NO: 1746254 - DNA, 15 bp, Homo sapiens
tatgcctaggcctta

SEQ ID NO: 1746255 - DNA, 15 bp, Homo sapiens
atgcctaggccttac

SEQ ID NO: 1746256 - DNA, 15 bp, Homo sapiens
tgcctaggccttact

SEQ ID NO: 1746257 - DNA, 15 bp, Homo sapiens
gcctaggccttacta

SEQ ID NO: 1746258 - DNA, 15 bp, Homo sapiens
cctaggccttactac

SEQ ID NO: 1746259 - DNA, 15 bp, Homo sapiens
ctaggccttactacc

SEQ ID NO: 1746260 - DNA, 15 bp, Homo sapiens
taggccttactacca

SEQ ID NO: 1746261 - DNA, 15 bp, Homo sapiens
aggccttactaccac

SEQ ID NO: 1746262 - DNA, 15 bp, Homo sapiens
ggccttactaccaca

SEQ ID NO: 1746263 - DNA, 15 bp, Homo sapiens
gccttactaccacag

SEQ ID NO: 1746264 - DNA, 15 bp, Homo sapiens
ccttactaccacaga

SEQ ID NO: 1746265 - DNA, 15 bp, Homo sapiens
cttactaccacagac

SEQ ID NO: 1746266 - DNA, 15 bp, Homo sapiens
ttactaccacagaca

SEQ ID NO: 1746267 - DNA, 15 bp, Homo sapiens
tactaccacagacat

SEQ ID NO: 1746268 - DNA, 15 bp, Homo sapiens
actaccacagacata

SEQ ID NO: 1746269 - DNA, 15 bp, Homo sapiens
ctaccacagacatag

SEQ ID NO: 1746270 - DNA, 15 bp, Homo sapiens
taccacagacatagt

SEQ ID NO: 1746271 - DNA, 15 bp, Homo sapiens
accacagacatagtg

SEQ ID NO: 1746272 - DNA, 15 bp, Homo sapiens
ccacagacatagtgt

SEQ ID NO: 1746273 - DNA, 15 bp, Homo sapiens
cacagacatagtgta

SEQ ID NO: 1746274 - DNA, 15 bp, Homo sapiens
acagacatagtgtat

SEQ ID NO: 1746275 - DNA, 15 bp, Homo sapiens
cagacatagtgtata

SEQ ID NO: 1746276 - DNA, 15 bp, Homo sapiens
agacatagtgtataa

SEQ ID NO: 1746277 - DNA, 15 bp, Homo sapiens
gacatagtgtataaa

SEQ ID NO: 1746278 - DNA, 15 bp, Homo sapiens
acatagtgtataaaa

SEQ ID NO: 1746279 - DNA, 15 bp, Homo sapiens
catagtgtataaaaa

SEQ ID NO: 1746280 - DNA, 15 bp, Homo sapiens
atagtgtataaaaat

SEQ ID NO: 1746281 - DNA, 15 bp, Homo sapiens
tagtgtataaaaatc

SEQ ID NO: 1746282 - DNA, 15 bp, Homo sapiens
agtgtataaaaatct

SEQ ID NO: 1746283 - DNA, 15 bp, Homo sapiens
gtgtataaaaatctc

SEQ ID NO: 1746284 - DNA, 15 bp, Homo sapiens
tgtataaaaatctct

SEQ ID NO: 1746285 - DNA, 15 bp, Homo sapiens
gtataaaaatctctg

SEQ ID NO: 1746286 - DNA, 15 bp, Homo sapiens
tataaaaatctctgg

SEQ ID NO: 1746287 - DNA, 15 bp, Homo sapiens
ataaaaatctctggg

SEQ ID NO: 1746288 - DNA, 15 bp, Homo sapiens
taaaaatctctgggc

SEQ ID NO: 1746289 - DNA, 15 bp, Homo sapiens
aaaaatctctgggct

SEQ ID NO: 1746290 - DNA, 15 bp, Homo sapiens
aaaatctctgggctt

SEQ ID NO: 1746291 - DNA, 15 bp, Homo sapiens
aaatctctgggcttg

SEQ ID NO: 1746292 - DNA, 15 bp, Homo sapiens
aatctctgggcttgt

SEQ ID NO: 1746293 - DNA, 15 bp, Homo sapiens
atctctgggcttgtc

SEQ ID NO: 1746294 - DNA, 15 bp, Homo sapiens
tctctgggcttgtct

SEQ ID NO: 1746295 - DNA, 15 bp, Homo sapiens
ctctgggcttgtctg

SEQ ID NO: 1746296 - DNA, 15 bp, Homo sapiens
tctgggcttgtctgt

SEQ ID NO: 1746297 - DNA, 15 bp, Homo sapiens
ctgggcttgtctgtt

SEQ ID NO: 1746298 - DNA, 15 bp, Homo sapiens
tgggcttgtctgttg

SEQ ID NO: 1746299 - DNA, 15 bp, Homo sapiens
gggcttgtctgttgt

SEQ ID NO: 1746300 - DNA, 15 bp, Homo sapiens
ggcttgtctgttgta

SEQ ID NO: 1746301 - DNA, 15 bp, Homo sapiens
gcttgtctgttgtag

SEQ ID NO: 1746302 - DNA, 15 bp, Homo sapiens
cttgtctgttgtagc

SEQ ID NO: 1746303 - DNA, 15 bp, Homo sapiens
ttgtctgttgtagca

SEQ ID NO: 1746304 - DNA, 15 bp, Homo sapiens
tgtctgttgtagcag

SEQ ID NO: 1746305 - DNA, 15 bp, Homo sapiens
gtctgttgtagcagt

SEQ ID NO: 1746306 - DNA, 15 bp, Homo sapiens
tctgttgtagcagtt

SEQ ID NO: 1746307 - DNA, 15 bp, Homo sapiens
ctgttgtagcagttt

SEQ ID NO: 1746308 - DNA, 15 bp, Homo sapiens
tgttgtagcagttta

SEQ ID NO: 1746309 - DNA, 15 bp, Homo sapiens
gttgtagcagtttac

SEQ ID NO: 1746310 - DNA, 15 bp, Homo sapiens
ttgtagcagtttact

SEQ ID NO: 1746311 - DNA, 15 bp, Homo sapiens
tgtagcagtttactt

SEQ ID NO: 1746312 - DNA, 15 bp, Homo sapiens
gtagcagtttacttg

SEQ ID NO: 1746313 - DNA, 15 bp, Homo sapiens
tagcagtttacttga

SEQ ID NO: 1746314 - DNA, 15 bp, Homo sapiens
agcagtttacttgag

SEQ ID NO: 1746315 - DNA, 15 bp, Homo sapiens
gcagtttacttgaga

SEQ ID NO: 1746316 - DNA, 15 bp, Homo sapiens
cagtttacttgagag

SEQ ID NO: 1746317 - DNA, 15 bp, Homo sapiens
agtttacttgagagt

SEQ ID NO: 1746318 - DNA, 15 bp, Homo sapiens
gtttacttgagagtt

SEQ ID NO: 1746319 - DNA, 15 bp, Homo sapiens
tttacttgagagttt

SEQ ID NO: 1746320 - DNA, 15 bp, Homo sapiens
ttacttgagagtttt

SEQ ID NO: 1746321 - DNA, 15 bp, Homo sapiens
tacttgagagttttt

SEQ ID NO: 1746322 - DNA, 15 bp, Homo sapiens
acttgagagttttta

SEQ ID NO: 1746323 - DNA, 15 bp, Homo sapiens
cttgagagtttttaa

SEQ ID NO: 1746324 - DNA, 15 bp, Homo sapiens
ttgagagtttttaaa

SEQ ID NO: 1746325 - DNA, 15 bp, Homo sapiens
tgagagtttttaaag

SEQ ID NO: 1746326 - DNA, 15 bp, Homo sapiens
gagagtttttaaaga

SEQ ID NO: 1746327 - DNA, 15 bp, Homo sapiens
agagtttttaaagat

SEQ ID NO: 1746328 - DNA, 15 bp, Homo sapiens
gagtttttaaagatc

SEQ ID NO: 1746329 - DNA, 15 bp, Homo sapiens
agtttttaaagatct

SEQ ID NO: 1746330 - DNA, 15 bp, Homo sapiens
gtttttaaagatctg

SEQ ID NO: 1746331 - DNA, 15 bp, Homo sapiens
tttttaaagatctga

SEQ ID NO: 1746332 - DNA, 15 bp, Homo sapiens
ttttaaagatctgaa

SEQ ID NO: 1746333 - DNA, 15 bp, Homo sapiens
tttaaagatctgaac

SEQ ID NO: 1746334 - DNA, 15 bp, Homo sapiens
ttaaagatctgaacc

SEQ ID NO: 1746335 - DNA, 15 bp, Homo sapiens
taaagatctgaacca

SEQ ID NO: 1746336 - DNA, 15 bp, Homo sapiens
aaagatctgaaccaa

SEQ ID NO: 1746337 - DNA, 15 bp, Homo sapiens
aagatctgaaccaac

SEQ ID NO: 1746338 - DNA, 15 bp, Homo sapiens
agatctgaaccaacg

SEQ ID NO: 1746339 - DNA, 15 bp, Homo sapiens
gatctgaaccaacga

SEQ ID NO: 1746340 - DNA, 15 bp, Homo sapiens
atctgaaccaacgat

SEQ ID NO: 1746341 - DNA, 15 bp, Homo sapiens
tctgaaccaacgata

SEQ ID NO: 1746342 - DNA, 15 bp, Homo sapiens
ctgaaccaacgatag

SEQ ID NO: 1746343 - DNA, 15 bp, Homo sapiens
tgaaccaacgatagt

SEQ ID NO: 1746344 - DNA, 15 bp, Homo sapiens
gaaccaacgatagtg

SEQ ID NO: 1746345 - DNA, 15 bp, Homo sapiens
aaccaacgatagtgg

SEQ ID NO: 1746346 - DNA, 15 bp, Homo sapiens
accaacgatagtggt

SEQ ID NO: 1746347 - DNA, 15 bp, Homo sapiens
ccaacgatagtggtg

SEQ ID NO: 1746348 - DNA, 15 bp, Homo sapiens
caacgatagtggtgg

SEQ ID NO: 1746349 - DNA, 15 bp, Homo sapiens
aacgatagtggtggg

SEQ ID NO: 1746350 - DNA, 15 bp, Homo sapiens
acgatagtggtggga

SEQ ID NO: 1746351 - DNA, 15 bp, Homo sapiens
cgatagtggtgggaa

SEQ ID NO: 1746352 - DNA, 15 bp, Homo sapiens
gatagtggtgggaat

SEQ ID NO: 1746353 - DNA, 15 bp, Homo sapiens
atagtggtgggaatg

SEQ ID NO: 1746354 - DNA, 15 bp, Homo sapiens
tagtggtgggaatga

SEQ ID NO: 1746355 - DNA, 15 bp, Homo sapiens
agtggtgggaatgaa

SEQ ID NO: 1746356 - DNA, 15 bp, Homo sapiens
gtggtgggaatgaag

SEQ ID NO: 1746357 - DNA, 15 bp, Homo sapiens
tggtgggaatgaagg

SEQ ID NO: 1746358 - DNA, 15 bp, Homo sapiens
ggtgggaatgaagga

SEQ ID NO: 1746359 - DNA, 15 bp, Homo sapiens
gtgggaatgaaggaa

SEQ ID NO: 1746360 - DNA, 15 bp, Homo sapiens
tgggaatgaaggaac

SEQ ID NO: 1746361 - DNA, 15 bp, Homo sapiens
gggaatgaaggaaca

SEQ ID NO: 1746362 - DNA, 15 bp, Homo sapiens
ggaatgaaggaacaa

SEQ ID NO: 1746363 - DNA, 15 bp, Homo sapiens
gaatgaaggaacaat

SEQ ID NO: 1746364 - DNA, 15 bp, Homo sapiens
aatgaaggaacaata

SEQ ID NO: 1746365 - DNA, 15 bp, Homo sapiens
atgaaggaacaataa

SEQ ID NO: 1746366 - DNA, 15 bp, Homo sapiens
tgaaggaacaataac

SEQ ID NO: 1746367 - DNA, 15 bp, Homo sapiens
gaaggaacaataaca

SEQ ID NO: 1746368 - DNA, 15 bp, Homo sapiens
aaggaacaataacag

SEQ ID NO: 1746369 - DNA, 15 bp, Homo sapiens
aggaacaataacaga

SEQ ID NO: 1746370 - DNA, 15 bp, Homo sapiens
ggaacaataacagat

SEQ ID NO: 1746371 - DNA, 15 bp, Homo sapiens
gaacaataacagatt

SEQ ID NO: 1746372 - DNA, 15 bp, Homo sapiens
aacaataacagattt

SEQ ID NO: 1746373 - DNA, 15 bp, Homo sapiens
acaataacagatttg

SEQ ID NO: 1746374 - DNA, 15 bp, Homo sapiens
caataacagatttga

SEQ ID NO: 1746375 - DNA, 15 bp, Homo sapiens
aataacagatttgat

SEQ ID NO: 1746376 - DNA, 15 bp, Homo sapiens
ataacagatttgata

SEQ ID NO: 1746377 - DNA, 15 bp, Homo sapiens
taacagatttgataa

SEQ ID NO: 1746378 - DNA, 15 bp, Homo sapiens
aacagatttgataaa

SEQ ID NO: 1746379 - DNA, 15 bp, Homo sapiens
acagatttgataaat

SEQ ID NO: 1746380 - DNA, 15 bp, Homo sapiens
cagatttgataaata

SEQ ID NO: 1746381 - DNA, 15 bp, Homo sapiens
agatttgataaatat

SEQ ID NO: 1746382 - DNA, 15 bp, Homo sapiens
gatttgataaatatt

SEQ ID NO: 1746383 - DNA, 15 bp, Homo sapiens
atttgataaatattt

SEQ ID NO: 1746384 - DNA, 15 bp, Homo sapiens
tttgataaatatttg

SEQ ID NO: 1746385 - DNA, 15 bp, Homo sapiens
ttgataaatatttga

SEQ ID NO: 1746386 - DNA, 15 bp, Homo sapiens
tgataaatatttgat

SEQ ID NO: 1746387 - DNA, 15 bp, Homo sapiens
gataaatatttgatg

SEQ ID NO: 1746388 - DNA, 15 bp, Homo sapiens
ataaatatttgatga

SEQ ID NO: 1746389 - DNA, 15 bp, Homo sapiens
taaatatttgatgaa

SEQ ID NO: 1746390 - DNA, 15 bp, Homo sapiens
aaatatttgatgaat

SEQ ID NO: 1746391 - DNA, 15 bp, Homo sapiens
aatatttgatgaatt

SEQ ID NO: 1746392 - DNA, 15 bp, Homo sapiens
atatttgatgaattc

SEQ ID NO: 1746393 - DNA, 15 bp, Homo sapiens
tatttgatgaattca

SEQ ID NO: 1746394 - DNA, 15 bp, Homo sapiens
atttgatgaattcat

SEQ ID NO: 1746395 - DNA, 15 bp, Homo sapiens
tttgatgaattcata

SEQ ID NO: 1746396 - DNA, 15 bp, Homo sapiens
ttgatgaattcatac

SEQ ID NO: 1746397 - DNA, 15 bp, Homo sapiens
tgatgaattcatact

SEQ ID NO: 1746398 - DNA, 15 bp, Homo sapiens
gatgaattcatactt

SEQ ID NO: 1746399 - DNA, 15 bp, Homo sapiens
atgaattcatactta

SEQ ID NO: 1746400 - DNA, 15 bp, Homo sapiens
tgaattcatacttag

SEQ ID NO: 1746401 - DNA, 15 bp, Homo sapiens
gaattcatacttaga

SEQ ID NO: 1746402 - DNA, 15 bp, Homo sapiens
aattcatacttagaa

SEQ ID NO: 1746403 - DNA, 15 bp, Homo sapiens
attcatacttagaat

SEQ ID NO: 1746404 - DNA, 15 bp, Homo sapiens
ttcatacttagaatg

SEQ ID NO: 1746405 - DNA, 15 bp, Homo sapiens
tcatacttagaatgt

SEQ ID NO: 1746406 - DNA, 15 bp, Homo sapiens
catacttagaatgtt

SEQ ID NO: 1746407 - DNA, 15 bp, Homo sapiens
atacttagaatgttg

SEQ ID NO: 1746408 - DNA, 15 bp, Homo sapiens
tacttagaatgttgt

SEQ ID NO: 1746409 - DNA, 15 bp, Homo sapiens
acttagaatgttgtt

SEQ ID NO: 1746410 - DNA, 15 bp, Homo sapiens
cttagaatgttgttc

SEQ ID NO: 1746411 - DNA, 15 bp, Homo sapiens
ttagaatgttgttct

SEQ ID NO: 1746412 - DNA, 15 bp, Homo sapiens
tagaatgttgttctt

SEQ ID NO: 1746413 - DNA, 15 bp, Homo sapiens
agaatgttgttcttg

SEQ ID NO: 1746414 - DNA, 15 bp, Homo sapiens
gaatgttgttcttga

SEQ ID NO: 1746415 - DNA, 15 bp, Homo sapiens
aatgttgttcttgag

SEQ ID NO: 1746416 - DNA, 15 bp, Homo sapiens
atgttgttcttgagg

SEQ ID NO: 1746417 - DNA, 15 bp, Homo sapiens
tgttgttcttgaggc

SEQ ID NO: 1746418 - DNA, 15 bp, Homo sapiens
gttgttcttgaggca

SEQ ID NO: 1746419 - DNA, 15 bp, Homo sapiens
ttgttcttgaggcat

SEQ ID NO: 1746420 - DNA, 15 bp, Homo sapiens
tgttcttgaggcatt

SEQ ID NO: 1746421 - DNA, 15 bp, Homo sapiens
gttcttgaggcattt

SEQ ID NO: 1746422 - DNA, 15 bp, Homo sapiens
ttcttgaggcatttc

SEQ ID NO: 1746423 - DNA, 15 bp, Homo sapiens
tcttgaggcatttct

SEQ ID NO: 1746424 - DNA, 15 bp, Homo sapiens
cttgaggcatttctg

SEQ ID NO: 1746425 - DNA, 15 bp, Homo sapiens
ttgaggcatttctga

SEQ ID NO: 1746426 - DNA, 15 bp, Homo sapiens
tgaggcatttctgaa

SEQ ID NO: 1746427 - DNA, 15 bp, Homo sapiens
gaggcatttctgaag

SEQ ID NO: 1746428 - DNA, 15 bp, Homo sapiens
aggcatttctgaaga

SEQ ID NO: 1746429 - DNA, 15 bp, Homo sapiens
ggcatttctgaagaa

SEQ ID NO: 1746430 - DNA, 15 bp, Homo sapiens
gcatttctgaagaag

SEQ ID NO: 1746431 - DNA, 15 bp, Homo sapiens
catttctgaagaaga

SEQ ID NO: 1746432 - DNA, 15 bp, Homo sapiens
atttctgaagaagat

SEQ ID NO: 1746433 - DNA, 15 bp, Homo sapiens
tttctgaagaagata

SEQ ID NO: 1746434 - DNA, 15 bp, Homo sapiens
ttctgaagaagatat

SEQ ID NO: 1746435 - DNA, 15 bp, Homo sapiens
tctgaagaagatatc

SEQ ID NO: 1746436 - DNA, 15 bp, Homo sapiens
ctgaagaagatatct

SEQ ID NO: 1746437 - DNA, 15 bp, Homo sapiens
tgaagaagatatcta

SEQ ID NO: 1746438 - DNA, 15 bp, Homo sapiens
gaagaagatatctag

SEQ ID NO: 1746439 - DNA, 15 bp, Homo sapiens
aagaagatatctagt

SEQ ID NO: 1746440 - DNA, 15 bp, Homo sapiens
agaagatatctagta

SEQ ID NO: 1746441 - DNA, 15 bp, Homo sapiens
gaagatatctagtaa

SEQ ID NO: 1746442 - DNA, 15 bp, Homo sapiens
aagatatctagtaag

SEQ ID NO: 1746443 - DNA, 15 bp, Homo sapiens
agatatctagtaagc

SEQ ID NO: 1746444 - DNA, 15 bp, Homo sapiens
gatatctagtaagca

SEQ ID NO: 1746445 - DNA, 15 bp, Homo sapiens
atatctagtaagcag

SEQ ID NO: 1746446 - DNA, 15 bp, Homo sapiens
tatctagtaagcagt

SEQ ID NO: 1746447 - DNA, 15 bp, Homo sapiens
atctagtaagcagta

SEQ ID NO: 1746448 - DNA, 15 bp, Homo sapiens
tctagtaagcagtag

SEQ ID NO: 1746449 - DNA, 15 bp, Homo sapiens
ctagtaagcagtagg

SEQ ID NO: 1746450 - DNA, 15 bp, Homo sapiens
tagtaagcagtagga

SEQ ID NO: 1746451 - DNA, 15 bp, Homo sapiens
agtaagcagtaggat

SEQ ID NO: 1746452 - DNA, 15 bp, Homo sapiens
gtaagcagtaggata

SEQ ID NO: 1746453 - DNA, 15 bp, Homo sapiens
taagcagtaggatag

SEQ ID NO: 1746454 - DNA, 15 bp, Homo sapiens
aagcagtaggatagc

SEQ ID NO: 1746455 - DNA, 15 bp, Homo sapiens
agcagtaggatagcc

SEQ ID NO: 1746456 - DNA, 15 bp, Homo sapiens
gcagtaggatagcct

SEQ ID NO: 1746457 - DNA, 15 bp, Homo sapiens
cagtaggatagcctt

SEQ ID NO: 1746458 - DNA, 15 bp, Homo sapiens
agtaggatagccttc

SEQ ID NO: 1746459 - DNA, 15 bp, Homo sapiens
gtaggatagccttct

SEQ ID NO: 1746460 - DNA, 15 bp, Homo sapiens
taggatagccttcta

SEQ ID NO: 1746461 - DNA, 15 bp, Homo sapiens
aggatagccttctat

SEQ ID NO: 1746462 - DNA, 15 bp, Homo sapiens
ggatagccttctata

SEQ ID NO: 1746463 - DNA, 15 bp, Homo sapiens
gatagccttctatag

SEQ ID NO: 1746464 - DNA, 15 bp, Homo sapiens
atagccttctataga

SEQ ID NO: 1746465 - DNA, 15 bp, Homo sapiens
tagccttctatagat

SEQ ID NO: 1746466 - DNA, 15 bp, Homo sapiens
agccttctatagatt

SEQ ID NO: 1746467 - DNA, 15 bp, Homo sapiens
gccttctatagattt

SEQ ID NO: 1746468 - DNA, 15 bp, Homo sapiens
ccttctatagatttg

SEQ ID NO: 1746469 - DNA, 15 bp, Homo sapiens
cttctatagatttgg

SEQ ID NO: 1746470 - DNA, 15 bp, Homo sapiens
ttctatagatttggg

SEQ ID NO: 1746471 - DNA, 15 bp, Homo sapiens
tctatagatttggga

SEQ ID NO: 1746472 - DNA, 15 bp, Homo sapiens
ctatagatttgggaa

SEQ ID NO: 1746473 - DNA, 15 bp, Homo sapiens
tatagatttgggaat

SEQ ID NO: 1746474 - DNA, 15 bp, Homo sapiens
atagatttgggaatc

SEQ ID NO: 1746475 - DNA, 15 bp, Homo sapiens
tagatttgggaatca

SEQ ID NO: 1746476 - DNA, 15 bp, Homo sapiens
agatttgggaatcat

SEQ ID NO: 1746477 - DNA, 15 bp, Homo sapiens
gatttgggaatcatc

SEQ ID NO: 1746478 - DNA, 15 bp, Homo sapiens
atttgggaatcatca

SEQ ID NO: 1746479 - DNA, 15 bp, Homo sapiens
tttgggaatcatcag

SEQ ID NO: 1746480 - DNA, 15 bp, Homo sapiens
ttgggaatcatcagg

SEQ ID NO: 1746481 - DNA, 15 bp, Homo sapiens
tgggaatcatcaggg

SEQ ID NO: 1746482 - DNA, 15 bp, Homo sapiens
gggaatcatcagggg

SEQ ID NO: 1746483 - DNA, 15 bp, Homo sapiens
ggaatcatcagggga

SEQ ID NO: 1746484 - DNA, 15 bp, Homo sapiens
gaatcatcaggggag

SEQ ID NO: 1746485 - DNA, 15 bp, Homo sapiens
aatcatcaggggagt

SEQ ID NO: 1746486 - DNA, 15 bp, Homo sapiens
atcatcaggggagtt

SEQ ID NO: 1746487 - DNA, 15 bp, Homo sapiens
tcatcaggggagtta

SEQ ID NO: 1746488 - DNA, 15 bp, Homo sapiens
catcaggggagttaa

SEQ ID NO: 1746489 - DNA, 15 bp, Homo sapiens
atcaggggagttaaa

SEQ ID NO: 1746490 - DNA, 15 bp, Homo sapiens
tcaggggagttaaac

SEQ ID NO: 1746491 - DNA, 15 bp, Homo sapiens
caggggagttaaacc

SEQ ID NO: 1746492 - DNA, 15 bp, Homo sapiens
aggggagttaaaccc

SEQ ID NO: 1746493 - DNA, 15 bp, Homo sapiens
ggggagttaaaccca

SEQ ID NO: 1746494 - DNA, 15 bp, Homo sapiens
gggagttaaacccat

SEQ ID NO: 1746495 - DNA, 15 bp, Homo sapiens
ggagttaaacccata

SEQ ID NO: 1746496 - DNA, 15 bp, Homo sapiens
gagttaaacccataa

SEQ ID NO: 1746497 - DNA, 15 bp, Homo sapiens
agttaaacccataaa

SEQ ID NO: 1746498 - DNA, 15 bp, Homo sapiens
gttaaacccataaaa

SEQ ID NO: 1746499 - DNA, 15 bp, Homo sapiens
ttaaacccataaaaa

SEQ ID NO: 1746500 - DNA, 15 bp, Homo sapiens
taaacccataaaaaa

SEQ ID NO: 1746501 - DNA, 15 bp, Homo sapiens
aaacccataaaaaaa

SEQ ID NO: 1746502 - DNA, 15 bp, Homo sapiens
aacccataaaaaaaa

SEQ ID NO: 1746503 - DNA, 15 bp, Homo sapiens
acccataaaaaaaaa

SEQ ID NO: 1746504 - DNA, 15 bp, Homo sapiens
cccataaaaaaaaat

SEQ ID NO: 1746505 - DNA, 15 bp, Homo sapiens
ccataaaaaaaaatg

SEQ ID NO: 1746506 - DNA, 15 bp, Homo sapiens
taaaaaaaaatgaga

SEQ ID NO: 1746507 - DNA, 15 bp, Homo sapiens
aaaaaaaaatgagat

SEQ ID NO: 1746508 - DNA, 15 bp, Homo sapiens
aaaaaaaatgagatt

SEQ ID NO: 1746509 - DNA, 15 bp, Homo sapiens
aaaaaaatgagattg

SEQ ID NO: 1746510 - DNA, 15 bp, Homo sapiens
aaaaaatgagattgc

SEQ ID NO: 1746511 - DNA, 15 bp, Homo sapiens
aaaaatgagattgct

SEQ ID NO: 1746512 - DNA, 15 bp, Homo sapiens
aaaatgagattgctt

SEQ ID NO: 1746513 - DNA, 15 bp, Homo sapiens
aaatgagattgcttg

SEQ ID NO: 1746514 - DNA, 15 bp, Homo sapiens
aatgagattgcttga

SEQ ID NO: 1746515 - DNA, 15 bp, Homo sapiens
atgagattgcttgaa

SEQ ID NO: 1746516 - DNA, 15 bp, Homo sapiens
tgagattgcttgaag

SEQ ID NO: 1746517 - DNA, 15 bp, Homo sapiens
gagattgcttgaagg

SEQ ID NO: 1746518 - DNA, 15 bp, Homo sapiens
agattgcttgaaggg

SEQ ID NO: 1746519 - DNA, 15 bp, Homo sapiens
gattgcttgaaggga

SEQ ID NO: 1746520 - DNA, 15 bp, Homo sapiens
attgcttgaagggag

SEQ ID NO: 1746521 - DNA, 15 bp, Homo sapiens
ttgcttgaagggagg

SEQ ID NO: 1746522 - DNA, 15 bp, Homo sapiens
tgcttgaagggaggg

SEQ ID NO: 1746523 - DNA, 15 bp, Homo sapiens
gcttgaagggagggt

SEQ ID NO: 1746524 - DNA, 15 bp, Homo sapiens
cttgaagggagggtg

SEQ ID NO: 1746525 - DNA, 15 bp, Homo sapiens
ttgaagggagggtgc

SEQ ID NO: 1746526 - DNA, 15 bp, Homo sapiens
tgaagggagggtgca

SEQ ID NO: 1746527 - DNA, 15 bp, Homo sapiens
gaagggagggtgcat

SEQ ID NO: 1746528 - DNA, 15 bp, Homo sapiens
aagggagggtgcata

SEQ ID NO: 1746529 - DNA, 15 bp, Homo sapiens
agggagggtgcataa

SEQ ID NO: 1746530 - DNA, 15 bp, Homo sapiens
gggagggtgcataat

SEQ ID NO: 1746531 - DNA, 15 bp, Homo sapiens
ggagggtgcataatg

SEQ ID NO: 1746532 - DNA, 15 bp, Homo sapiens
gagggtgcataatgg

SEQ ID NO: 1746533 - DNA, 15 bp, Homo sapiens
agggtgcataatggc

SEQ ID NO: 1746534 - DNA, 15 bp, Homo sapiens
gggtgcataatggca

SEQ ID NO: 1746535 - DNA, 15 bp, Homo sapiens
ggtgcataatggcaa

SEQ ID NO: 1746536 - DNA, 15 bp, Homo sapiens
gtgcataatggcaag

SEQ ID NO: 1746537 - DNA, 15 bp, Homo sapiens
tgcataatggcaaga

SEQ ID NO: 1746538 - DNA, 15 bp, Homo sapiens
gcataatggcaagag

SEQ ID NO: 1746539 - DNA, 15 bp, Homo sapiens
cataatggcaagagt

SEQ ID NO: 1746540 - DNA, 15 bp, Homo sapiens
ataatggcaagagtg

SEQ ID NO: 1746541 - DNA, 15 bp, Homo sapiens
taatggcaagagtgg

SEQ ID NO: 1746542 - DNA, 15 bp, Homo sapiens
aatggcaagagtggg

SEQ ID NO: 1746543 - DNA, 15 bp, Homo sapiens
atggcaagagtgggt

SEQ ID NO: 1746544 - DNA, 15 bp, Homo sapiens
tggcaagagtgggtg

SEQ ID NO: 1746545 - DNA, 15 bp, Homo sapiens
ggcaagagtgggtgg

SEQ ID NO: 1746546 - DNA, 15 bp, Homo sapiens
gcaagagtgggtggc

SEQ ID NO: 1746547 - DNA, 15 bp, Homo sapiens
caagagtgggtggct

SEQ ID NO: 1746548 - DNA, 15 bp, Homo sapiens
aagagtgggtggcta

SEQ ID NO: 1746549 - DNA, 15 bp, Homo sapiens
agagtgggtggctaa

SEQ ID NO: 1746550 - DNA, 15 bp, Homo sapiens
gagtgggtggctaag

SEQ ID NO: 1746551 - DNA, 15 bp, Homo sapiens
agtgggtggctaagg

SEQ ID NO: 1746552 - DNA, 15 bp, Homo sapiens
gtgggtggctaaggg

SEQ ID NO: 1746553 - DNA, 15 bp, Homo sapiens
tgggtggctaagggc

SEQ ID NO: 1746554 - DNA, 15 bp, Homo sapiens
gggtggctaagggct

SEQ ID NO: 1746555 - DNA, 15 bp, Homo sapiens
ggtggctaagggctg

SEQ ID NO: 1746556 - DNA, 15 bp, Homo sapiens
gtggctaagggctga

SEQ ID NO: 1746557 - DNA, 15 bp, Homo sapiens
tggctaagggctgaa

SEQ ID NO: 1746558 - DNA, 15 bp, Homo sapiens
ggctaagggctgaag

SEQ ID NO: 1746559 - DNA, 15 bp, Homo sapiens
gctaagggctgaagc

SEQ ID NO: 1746560 - DNA, 15 bp, Homo sapiens
ctaagggctgaagcc

SEQ ID NO: 1746561 - DNA, 15 bp, Homo sapiens
taagggctgaagcct

SEQ ID NO: 1746562 - DNA, 15 bp, Homo sapiens
aagggctgaagccta

SEQ ID NO: 1746563 - DNA, 15 bp, Homo sapiens
agggctgaagcctaa

SEQ ID NO: 1746564 - DNA, 15 bp, Homo sapiens
gggctgaagcctaaa

SEQ ID NO: 1746565 - DNA, 15 bp, Homo sapiens
ggctgaagcctaaag

SEQ ID NO: 1746566 - DNA, 15 bp, Homo sapiens
gctgaagcctaaagg

SEQ ID NO: 1746567 - DNA, 15 bp, Homo sapiens
ctgaagcctaaagga

SEQ ID NO: 1746568 - DNA, 15 bp, Homo sapiens
tgaagcctaaaggat

SEQ ID NO: 1746569 - DNA, 15 bp, Homo sapiens
gaagcctaaaggatg

SEQ ID NO: 1746570 - DNA, 15 bp, Homo sapiens
aagcctaaaggatgc

SEQ ID NO: 1746571 - DNA, 15 bp, Homo sapiens
agcctaaaggatgct

SEQ ID NO: 1746572 - DNA, 15 bp, Homo sapiens
gcctaaaggatgcta

SEQ ID NO: 1746573 - DNA, 15 bp, Homo sapiens
cctaaaggatgctag

SEQ ID NO: 1746574 - DNA, 15 bp, Homo sapiens
ctaaaggatgctagc

SEQ ID NO: 1746575 - DNA, 15 bp, Homo sapiens
taaaggatgctagca

SEQ ID NO: 1746576 - DNA, 15 bp, Homo sapiens
aaaggatgctagcat

SEQ ID NO: 1746577 - DNA, 15 bp, Homo sapiens
aaggatgctagcatt

SEQ ID NO: 1746578 - DNA, 15 bp, Homo sapiens
aggatgctagcatta

SEQ ID NO: 1746579 - DNA, 15 bp, Homo sapiens
ggatgctagcattaa

SEQ ID NO: 1746580 - DNA, 15 bp, Homo sapiens
gatgctagcattaag

SEQ ID NO: 1746581 - DNA, 15 bp, Homo sapiens
atgctagcattaagg

SEQ ID NO: 1746582 - DNA, 15 bp, Homo sapiens
tgctagcattaagga

SEQ ID NO: 1746583 - DNA, 15 bp, Homo sapiens
gctagcattaaggac

SEQ ID NO: 1746584 - DNA, 15 bp, Homo sapiens
ctagcattaaggact

SEQ ID NO: 1746585 - DNA, 15 bp, Homo sapiens
tagcattaaggacta

SEQ ID NO: 1746586 - DNA, 15 bp, Homo sapiens
agcattaaggactag

SEQ ID NO: 1746587 - DNA, 15 bp, Homo sapiens
gcattaaggactaga

SEQ ID NO: 1746588 - DNA, 15 bp, Homo sapiens
cattaaggactagac

SEQ ID NO: 1746589 - DNA, 15 bp, Homo sapiens
attaaggactagaca

SEQ ID NO: 1746590 - DNA, 15 bp, Homo sapiens
ttaaggactagacag

SEQ ID NO: 1746591 - DNA, 15 bp, Homo sapiens
taaggactagacaga

SEQ ID NO: 1746592 - DNA, 15 bp, Homo sapiens
aaggactagacagaa

SEQ ID NO: 1746593 - DNA, 15 bp, Homo sapiens
aggactagacagaaa

SEQ ID NO: 1746594 - DNA, 15 bp, Homo sapiens
ggactagacagaaat

SEQ ID NO: 1746595 - DNA, 15 bp, Homo sapiens
gactagacagaaatt

SEQ ID NO: 1746596 - DNA, 15 bp, Homo sapiens
actagacagaaattg

SEQ ID NO: 1746597 - DNA, 15 bp, Homo sapiens
ctagacagaaattgt

SEQ ID NO: 1746598 - DNA, 15 bp, Homo sapiens
tagacagaaattgtt

SEQ ID NO: 1746599 - DNA, 15 bp, Homo sapiens
agacagaaattgtta

SEQ ID NO: 1746600 - DNA, 15 bp, Homo sapiens
gacagaaattgttag

SEQ ID NO: 1746601 - DNA, 15 bp, Homo sapiens
acagaaattgttagg

SEQ ID NO: 1746602 - DNA, 15 bp, Homo sapiens
cagaaattgttaggt

SEQ ID NO: 1746603 - DNA, 15 bp, Homo sapiens
agaaattgttaggtt

SEQ ID NO: 1746604 - DNA, 15 bp, Homo sapiens
gaaattgttaggttc

SEQ ID NO: 1746605 - DNA, 15 bp, Homo sapiens
aaattgttaggttct

SEQ ID NO: 1746606 - DNA, 15 bp, Homo sapiens
aattgttaggttcta

SEQ ID NO: 1746607 - DNA, 15 bp, Homo sapiens
attgttaggttctag

SEQ ID NO: 1746608 - DNA, 15 bp, Homo sapiens
ttgttaggttctaga

SEQ ID NO: 1746609 - DNA, 15 bp, Homo sapiens
tgttaggttctagag

SEQ ID NO: 1746610 - DNA, 15 bp, Homo sapiens
gttaggttctagagc

SEQ ID NO: 1746611 - DNA, 15 bp, Homo sapiens
ttaggttctagagca

SEQ ID NO: 1746612 - DNA, 15 bp, Homo sapiens
taggttctagagcag

SEQ ID NO: 1746613 - DNA, 15 bp, Homo sapiens
aggttctagagcagg

SEQ ID NO: 1746614 - DNA, 15 bp, Homo sapiens
ggttctagagcaggg

SEQ ID NO: 1746615 - DNA, 15 bp, Homo sapiens
gttctagagcagggg

SEQ ID NO: 1746616 - DNA, 15 bp, Homo sapiens
ttctagagcaggggt

SEQ ID NO: 1746617 - DNA, 15 bp, Homo sapiens
tctagagcaggggtc

SEQ ID NO: 1746618 - DNA, 15 bp, Homo sapiens
ctagagcaggggtcc

SEQ ID NO: 1746619 - DNA, 15 bp, Homo sapiens
tagagcaggggtccc

SEQ ID NO: 1746620 - DNA, 15 bp, Homo sapiens
agagcaggggtcccc

SEQ ID NO: 1746621 - DNA, 15 bp, Homo sapiens
gagcaggggtcccca

SEQ ID NO: 1746622 - DNA, 15 bp, Homo sapiens
agcaggggtccccaa

SEQ ID NO: 1746623 - DNA, 15 bp, Homo sapiens
gcaggggtccccaat

SEQ ID NO: 1746624 - DNA, 15 bp, Homo sapiens
caggggtccccaatt

SEQ ID NO: 1746625 - DNA, 15 bp, Homo sapiens
aggggtccccaattc

SEQ ID NO: 1746626 - DNA, 15 bp, Homo sapiens
ggggtccccaattcc

SEQ ID NO: 1746627 - DNA, 15 bp, Homo sapiens
gggtccccaattccc

SEQ ID NO: 1746628 - DNA, 15 bp, Homo sapiens
ggtccccaattcccg

SEQ ID NO: 1746629 - DNA, 15 bp, Homo sapiens
gtccccaattcccgg

SEQ ID NO: 1746630 - DNA, 15 bp, Homo sapiens
tccccaattcccggg

SEQ ID NO: 1746631 - DNA, 15 bp, Homo sapiens
ccccaattcccgggc

SEQ ID NO: 1746632 - DNA, 15 bp, Homo sapiens
cccaattcccgggcc

SEQ ID NO: 1746633 - DNA, 15 bp, Homo sapiens
ccaattcccgggcca

SEQ ID NO: 1746634 - DNA, 15 bp, Homo sapiens
caattcccgggccag

SEQ ID NO: 1746635 - DNA, 15 bp, Homo sapiens
aattcccgggccaga

SEQ ID NO: 1746636 - DNA, 15 bp, Homo sapiens
attcccgggccagag

SEQ ID NO: 1746637 - DNA, 15 bp, Homo sapiens
ttcccgggccagaga

SEQ ID NO: 1746638 - DNA, 15 bp, Homo sapiens
tcccgggccagagac

SEQ ID NO: 1746639 - DNA, 15 bp, Homo sapiens
cccgggccagagact

SEQ ID NO: 1746640 - DNA, 15 bp, Homo sapiens
ccgggccagagactg

SEQ ID NO: 1746641 - DNA, 15 bp, Homo sapiens
cgggccagagactgg

SEQ ID NO: 1746642 - DNA, 15 bp, Homo sapiens
gggccagagactggt

SEQ ID NO: 1746643 - DNA, 15 bp, Homo sapiens
ggccagagactggtc

SEQ ID NO: 1746644 - DNA, 15 bp, Homo sapiens
gccagagactggtct

SEQ ID NO: 1746645 - DNA, 15 bp, Homo sapiens
ccagagactggtctg

SEQ ID NO: 1746646 - DNA, 15 bp, Homo sapiens
cagagactggtctgt

SEQ ID NO: 1746647 - DNA, 15 bp, Homo sapiens
agagactggtctgtg

SEQ ID NO: 1746648 - DNA, 15 bp, Homo sapiens
gagactggtctgtgt

SEQ ID NO: 1746649 - DNA, 15 bp, Homo sapiens
agactggtctgtgtc

SEQ ID NO: 1746650 - DNA, 15 bp, Homo sapiens
gactggtctgtgtcc

SEQ ID NO: 1746651 - DNA, 15 bp, Homo sapiens
actggtctgtgtccc

SEQ ID NO: 1746652 - DNA, 15 bp, Homo sapiens
ctggtctgtgtccca

SEQ ID NO: 1746653 - DNA, 15 bp, Homo sapiens
tggtctgtgtcccat

SEQ ID NO: 1746654 - DNA, 15 bp, Homo sapiens
ggtctgtgtcccatt

SEQ ID NO: 1746655 - DNA, 15 bp, Homo sapiens
gtctgtgtcccatta

SEQ ID NO: 1746656 - DNA, 15 bp, Homo sapiens
tctgtgtcccattac

SEQ ID NO: 1746657 - DNA, 15 bp, Homo sapiens
ctgtgtcccattacg

SEQ ID NO: 1746658 - DNA, 15 bp, Homo sapiens
tgtgtcccattacga

SEQ ID NO: 1746659 - DNA, 15 bp, Homo sapiens
gtgtcccattacgaa

SEQ ID NO: 1746660 - DNA, 15 bp, Homo sapiens
tgtcccattacgaac

SEQ ID NO: 1746661 - DNA, 15 bp, Homo sapiens
gtcccattacgaact

SEQ ID NO: 1746662 - DNA, 15 bp, Homo sapiens
tcccattacgaactg

SEQ ID NO: 1746663 - DNA, 15 bp, Homo sapiens
cccattacgaactgg

SEQ ID NO: 1746664 - DNA, 15 bp, Homo sapiens
ccattacgaactggg

SEQ ID NO: 1746665 - DNA, 15 bp, Homo sapiens
cattacgaactgggt

SEQ ID NO: 1746666 - DNA, 15 bp, Homo sapiens
attacgaactgggtg

SEQ ID NO: 1746667 - DNA, 15 bp, Homo sapiens
ttacgaactgggtga

SEQ ID NO: 1746668 - DNA, 15 bp, Homo sapiens
tacgaactgggtgat

SEQ ID NO: 1746669 - DNA, 15 bp, Homo sapiens
acgaactgggtgata

SEQ ID NO: 1746670 - DNA, 15 bp, Homo sapiens
cgaactgggtgatac

SEQ ID NO: 1746671 - DNA, 15 bp, Homo sapiens
gaactgggtgataca

SEQ ID NO: 1746672 - DNA, 15 bp, Homo sapiens
aactgggtgatacag

SEQ ID NO: 1746673 - DNA, 15 bp, Homo sapiens
actgggtgatacagc

SEQ ID NO: 1746674 - DNA, 15 bp, Homo sapiens
ctgggtgatacagca

SEQ ID NO: 1746675 - DNA, 15 bp, Homo sapiens
tgggtgatacagcag

SEQ ID NO: 1746676 - DNA, 15 bp, Homo sapiens
gggtgatacagcagg

SEQ ID NO: 1746677 - DNA, 15 bp, Homo sapiens
ggtgatacagcagga

SEQ ID NO: 1746678 - DNA, 15 bp, Homo sapiens
gtgatacagcaggag

SEQ ID NO: 1746679 - DNA, 15 bp, Homo sapiens
tgatacagcaggagg

SEQ ID NO: 1746680 - DNA, 15 bp, Homo sapiens
gatacagcaggaggt

SEQ ID NO: 1746681 - DNA, 15 bp, Homo sapiens
atacagcaggaggtg

SEQ ID NO: 1746682 - DNA, 15 bp, Homo sapiens
tacagcaggaggtga

SEQ ID NO: 1746683 - DNA, 15 bp, Homo sapiens
acagcaggaggtgag

SEQ ID NO: 1746684 - DNA, 15 bp, Homo sapiens
cagcaggaggtgagt

SEQ ID NO: 1746685 - DNA, 15 bp, Homo sapiens
agcaggaggtgagtg

SEQ ID NO: 1746686 - DNA, 15 bp, Homo sapiens
gcaggaggtgagtgg

SEQ ID NO: 1746687 - DNA, 15 bp, Homo sapiens
caggaggtgagtggt

SEQ ID NO: 1746688 - DNA, 15 bp, Homo sapiens
aggaggtgagtggta

SEQ ID NO: 1746689 - DNA, 15 bp, Homo sapiens
ggaggtgagtggtag

SEQ ID NO: 1746690 - DNA, 15 bp, Homo sapiens
gaggtgagtggtaga

SEQ ID NO: 1746691 - DNA, 15 bp, Homo sapiens
aggtgagtggtagac

SEQ ID NO: 1746692 - DNA, 15 bp, Homo sapiens
ggtgagtggtagaca

SEQ ID NO: 1746693 - DNA, 15 bp, Homo sapiens
gtgagtggtagacag

SEQ ID NO: 1746694 - DNA, 15 bp, Homo sapiens
tgagtggtagacagg

SEQ ID NO: 1746695 - DNA, 15 bp, Homo sapiens
gagtggtagacaggc

SEQ ID NO: 1746696 - DNA, 15 bp, Homo sapiens
agtggtagacaggca

SEQ ID NO: 1746697 - DNA, 15 bp, Homo sapiens
gtggtagacaggcaa

SEQ ID NO: 1746698 - DNA, 15 bp, Homo sapiens
tggtagacaggcaag

SEQ ID NO: 1746699 - DNA, 15 bp, Homo sapiens
ggtagacaggcaagt

SEQ ID NO: 1746700 - DNA, 15 bp, Homo sapiens
gtagacaggcaagtg

SEQ ID NO: 1746701 - DNA, 15 bp, Homo sapiens
tagacaggcaagtga

SEQ ID NO: 1746702 - DNA, 15 bp, Homo sapiens
agacaggcaagtgag

SEQ ID NO: 1746703 - DNA, 15 bp, Homo sapiens
gacaggcaagtgagc

SEQ ID NO: 1746704 - DNA, 15 bp, Homo sapiens
acaggcaagtgagca

SEQ ID NO: 1746705 - DNA, 15 bp, Homo sapiens
caggcaagtgagcat

SEQ ID NO: 1746706 - DNA, 15 bp, Homo sapiens
aggcaagtgagcatt

SEQ ID NO: 1746707 - DNA, 15 bp, Homo sapiens
ggcaagtgagcatta

SEQ ID NO: 1746708 - DNA, 15 bp, Homo sapiens
gcaagtgagcattac

SEQ ID NO: 1746709 - DNA, 15 bp, Homo sapiens
caagtgagcattact

SEQ ID NO: 1746710 - DNA, 15 bp, Homo sapiens
aagtgagcattactg

SEQ ID NO: 1746711 - DNA, 15 bp, Homo sapiens
agtgagcattactgc

SEQ ID NO: 1746712 - DNA, 15 bp, Homo sapiens
gtgagcattactgcc

SEQ ID NO: 1746713 - DNA, 15 bp, Homo sapiens
tgagcattactgcct

SEQ ID NO: 1746714 - DNA, 15 bp, Homo sapiens
gagcattactgcctg

SEQ ID NO: 1746715 - DNA, 15 bp, Homo sapiens
agcattactgcctga

SEQ ID NO: 1746716 - DNA, 15 bp, Homo sapiens
gcattactgcctgag

SEQ ID NO: 1746717 - DNA, 15 bp, Homo sapiens
cattactgcctgaga

SEQ ID NO: 1746718 - DNA, 15 bp, Homo sapiens
attactgcctgagat

SEQ ID NO: 1746719 - DNA, 15 bp, Homo sapiens
ttactgcctgagatc

SEQ ID NO: 1746720 - DNA, 15 bp, Homo sapiens
tactgcctgagatct

SEQ ID NO: 1746721 - DNA, 15 bp, Homo sapiens
actgcctgagatcta

SEQ ID NO: 1746722 - DNA, 15 bp, Homo sapiens
ctgcctgagatctac

SEQ ID NO: 1746723 - DNA, 15 bp, Homo sapiens
tgcctgagatctacc

SEQ ID NO: 1746724 - DNA, 15 bp, Homo sapiens
gcctgagatctacct

SEQ ID NO: 1746725 - DNA, 15 bp, Homo sapiens
cctgagatctacctc

SEQ ID NO: 1746726 - DNA, 15 bp, Homo sapiens
ctgagatctacctcc

SEQ ID NO: 1746727 - DNA, 15 bp, Homo sapiens
tgagatctacctcct

SEQ ID NO: 1746728 - DNA, 15 bp, Homo sapiens
gagatctacctcctg

SEQ ID NO: 1746729 - DNA, 15 bp, Homo sapiens
agatctacctcctgt

SEQ ID NO: 1746730 - DNA, 15 bp, Homo sapiens
gatctacctcctgtc

SEQ ID NO: 1746731 - DNA, 15 bp, Homo sapiens
atctacctcctgtca

SEQ ID NO: 1746732 - DNA, 15 bp, Homo sapiens
tctacctcctgtcag

SEQ ID NO: 1746733 - DNA, 15 bp, Homo sapiens
ctacctcctgtcaga

SEQ ID NO: 1746734 - DNA, 15 bp, Homo sapiens
tacctcctgtcagat

SEQ ID NO: 1746735 - DNA, 15 bp, Homo sapiens
acctcctgtcagatc

SEQ ID NO: 1746736 - DNA, 15 bp, Homo sapiens
cctcctgtcagatca

SEQ ID NO: 1746737 - DNA, 15 bp, Homo sapiens
ctcctgtcagatcag

SEQ ID NO: 1746738 - DNA, 15 bp, Homo sapiens
tcctgtcagatcagc

SEQ ID NO: 1746739 - DNA, 15 bp, Homo sapiens
cctgtcagatcagca

SEQ ID NO: 1746740 - DNA, 15 bp, Homo sapiens
ctgtcagatcagcag

SEQ ID NO: 1746741 - DNA, 15 bp, Homo sapiens
tgtcagatcagcagt

SEQ ID NO: 1746742 - DNA, 15 bp, Homo sapiens
gtcagatcagcagtg

SEQ ID NO: 1746743 - DNA, 15 bp, Homo sapiens
tcagatcagcagtgg

SEQ ID NO: 1746744 - DNA, 15 bp, Homo sapiens
cagatcagcagtgga

SEQ ID NO: 1746745 - DNA, 15 bp, Homo sapiens
agatcagcagtggaa

SEQ ID NO: 1746746 - DNA, 15 bp, Homo sapiens
gatcagcagtggaat

SEQ ID NO: 1746747 - DNA, 15 bp, Homo sapiens
atcagcagtggaatt

SEQ ID NO: 1746748 - DNA, 15 bp, Homo sapiens
tcagcagtggaatta

SEQ ID NO: 1746749 - DNA, 15 bp, Homo sapiens
cagcagtggaattag

SEQ ID NO: 1746750 - DNA, 15 bp, Homo sapiens
agcagtggaattaga

SEQ ID NO: 1746751 - DNA, 15 bp, Homo sapiens
gcagtggaattagat

SEQ ID NO: 1746752 - DNA, 15 bp, Homo sapiens
cagtggaattagatt

SEQ ID NO: 1746753 - DNA, 15 bp, Homo sapiens
agtggaattagattc

SEQ ID NO: 1746754 - DNA, 15 bp, Homo sapiens
gtggaattagattct

SEQ ID NO: 1746755 - DNA, 15 bp, Homo sapiens
tggaattagattctc

SEQ ID NO: 1746756 - DNA, 15 bp, Homo sapiens
ggaattagattctca

SEQ ID NO: 1746757 - DNA, 15 bp, Homo sapiens
gaattagattctcat

SEQ ID NO: 1746758 - DNA, 15 bp, Homo sapiens
aattagattctcata

SEQ ID NO: 1746759 - DNA, 15 bp, Homo sapiens
attagattctcatag

SEQ ID NO: 1746760 - DNA, 15 bp, Homo sapiens
ttagattctcatagg

SEQ ID NO: 1746761 - DNA, 15 bp, Homo sapiens
tagattctcataggt

SEQ ID NO: 1746762 - DNA, 15 bp, Homo sapiens
agattctcataggtg

SEQ ID NO: 1746763 - DNA, 15 bp, Homo sapiens
gattctcataggtgc

SEQ ID NO: 1746764 - DNA, 15 bp, Homo sapiens
attctcataggtgca

SEQ ID NO: 1746765 - DNA, 15 bp, Homo sapiens
ttctcataggtgcat

SEQ ID NO: 1746766 - DNA, 15 bp, Homo sapiens
tctcataggtgcatg

SEQ ID NO: 1746767 - DNA, 15 bp, Homo sapiens
ctcataggtgcatga

SEQ ID NO: 1746768 - DNA, 15 bp, Homo sapiens
tcataggtgcatgaa

SEQ ID NO: 1746769 - DNA, 15 bp, Homo sapiens
cataggtgcatgaac

SEQ ID NO: 1746770 - DNA, 15 bp, Homo sapiens
ataggtgcatgaacc

SEQ ID NO: 1746771 - DNA, 15 bp, Homo sapiens
taggtgcatgaacct

SEQ ID NO: 1746772 - DNA, 15 bp, Homo sapiens
aggtgcatgaacctt

SEQ ID NO: 1746773 - DNA, 15 bp, Homo sapiens
ggtgcatgaacctta

SEQ ID NO: 1746774 - DNA, 15 bp, Homo sapiens
gtgcatgaaccttat

SEQ ID NO: 1746775 - DNA, 15 bp, Homo sapiens
tgcatgaaccttatt

SEQ ID NO: 1746776 - DNA, 15 bp, Homo sapiens
gcatgaaccttattg

SEQ ID NO: 1746777 - DNA, 15 bp, Homo sapiens
catgaaccttattgt

SEQ ID NO: 1746778 - DNA, 15 bp, Homo sapiens
atgaaccttattgtg

SEQ ID NO: 1746779 - DNA, 15 bp, Homo sapiens
tgaaccttattgtga

SEQ ID NO: 1746780 - DNA, 15 bp, Homo sapiens
gaaccttattgtgaa

SEQ ID NO: 1746781 - DNA, 15 bp, Homo sapiens
aaccttattgtgaac

SEQ ID NO: 1746782 - DNA, 15 bp, Homo sapiens
accttattgtgaact

SEQ ID NO: 1746783 - DNA, 15 bp, Homo sapiens
ccttattgtgaactg

SEQ ID NO: 1746784 - DNA, 15 bp, Homo sapiens
cttattgtgaactgc

SEQ ID NO: 1746785 - DNA, 15 bp, Homo sapiens
ttattgtgaactgcg

SEQ ID NO: 1746786 - DNA, 15 bp, Homo sapiens
tattgtgaactgcgc

SEQ ID NO: 1746787 - DNA, 15 bp, Homo sapiens
attgtgaactgcgca

SEQ ID NO: 1746788 - DNA, 15 bp, Homo sapiens
ttgtgaactgcgcat

SEQ ID NO: 1746789 - DNA, 15 bp, Homo sapiens
tgtgaactgcgcatg

SEQ ID NO: 1746790 - DNA, 15 bp, Homo sapiens
gtgaactgcgcatgt

SEQ ID NO: 1746791 - DNA, 15 bp, Homo sapiens
tgaactgcgcatgtg

SEQ ID NO: 1746792 - DNA, 15 bp, Homo sapiens
gaactgcgcatgtga

SEQ ID NO: 1746793 - DNA, 15 bp, Homo sapiens
aactgcgcatgtgag

SEQ ID NO: 1746794 - DNA, 15 bp, Homo sapiens
actgcgcatgtgagg

SEQ ID NO: 1746795 - DNA, 15 bp, Homo sapiens
ctgcgcatgtgaggg

SEQ ID NO: 1746796 - DNA, 15 bp, Homo sapiens
tgcgcatgtgaggga

SEQ ID NO: 1746797 - DNA, 15 bp, Homo sapiens
gcgcatgtgagggat

SEQ ID NO: 1746798 - DNA, 15 bp, Homo sapiens
cgcatgtgagggatc

SEQ ID NO: 1746799 - DNA, 15 bp, Homo sapiens
gcatgtgagggatct

SEQ ID NO: 1746800 - DNA, 15 bp, Homo sapiens
catgtgagggatcta

SEQ ID NO: 1746801 - DNA, 15 bp, Homo sapiens
atgtgagggatctag

SEQ ID NO: 1746802 - DNA, 15 bp, Homo sapiens
tgtgagggatctaga

SEQ ID NO: 1746803 - DNA, 15 bp, Homo sapiens
gtgagggatctagat

SEQ ID NO: 1746804 - DNA, 15 bp, Homo sapiens
tgagggatctagatt

SEQ ID NO: 1746805 - DNA, 15 bp, Homo sapiens
gagggatctagattg

SEQ ID NO: 1746806 - DNA, 15 bp, Homo sapiens
agggatctagattgt

SEQ ID NO: 1746807 - DNA, 15 bp, Homo sapiens
gggatctagattgta

SEQ ID NO: 1746808 - DNA, 15 bp, Homo sapiens
ggatctagattgtat

SEQ ID NO: 1746809 - DNA, 15 bp, Homo sapiens
gatctagattgtatg

SEQ ID NO: 1746810 - DNA, 15 bp, Homo sapiens
atctagattgtatgc

SEQ ID NO: 1746811 - DNA, 15 bp, Homo sapiens
tctagattgtatgct

SEQ ID NO: 1746812 - DNA, 15 bp, Homo sapiens
ctagattgtatgctc

SEQ ID NO: 1746813 - DNA, 15 bp, Homo sapiens
tagattgtatgctcc

SEQ ID NO: 1746814 - DNA, 15 bp, Homo sapiens
agattgtatgctcct

SEQ ID NO: 1746815 - DNA, 15 bp, Homo sapiens
gattgtatgctcctt

SEQ ID NO: 1746816 - DNA, 15 bp, Homo sapiens
attgtatgctcctta

SEQ ID NO: 1746817 - DNA, 15 bp, Homo sapiens
ttgtatgctccttat

SEQ ID NO: 1746818 - DNA, 15 bp, Homo sapiens
tgtatgctccttatg

SEQ ID NO: 1746819 - DNA, 15 bp, Homo sapiens
gtatgctccttatga

SEQ ID NO: 1746820 - DNA, 15 bp, Homo sapiens
tatgctccttatgag

SEQ ID NO: 1746821 - DNA, 15 bp, Homo sapiens
atgctccttatgaga

SEQ ID NO: 1746822 - DNA, 15 bp, Homo sapiens
tgctccttatgagaa

SEQ ID NO: 1746823 - DNA, 15 bp, Homo sapiens
gctccttatgagaat

SEQ ID NO: 1746824 - DNA, 15 bp, Homo sapiens
ctccttatgagaatt

SEQ ID NO: 1746825 - DNA, 15 bp, Homo sapiens
tccttatgagaattt

SEQ ID NO: 1746826 - DNA, 15 bp, Homo sapiens
ccttatgagaattta

SEQ ID NO: 1746827 - DNA, 15 bp, Homo sapiens
cttatgagaatttaa

SEQ ID NO: 1746828 - DNA, 15 bp, Homo sapiens
ttatgagaatttaat

SEQ ID NO: 1746829 - DNA, 15 bp, Homo sapiens
tatgagaatttaatg

SEQ ID NO: 1746830 - DNA, 15 bp, Homo sapiens
atgagaatttaatgg

SEQ ID NO: 1746831 - DNA, 15 bp, Homo sapiens
tgagaatttaatggc

SEQ ID NO: 1746832 - DNA, 15 bp, Homo sapiens
gagaatttaatggct

SEQ ID NO: 1746833 - DNA, 15 bp, Homo sapiens
agaatttaatggctg

SEQ ID NO: 1746834 - DNA, 15 bp, Homo sapiens
gaatttaatggctga

SEQ ID NO: 1746835 - DNA, 15 bp, Homo sapiens
aatttaatggctgat

SEQ ID NO: 1746836 - DNA, 15 bp, Homo sapiens
atttaatggctgatg

SEQ ID NO: 1746837 - DNA, 15 bp, Homo sapiens
tttaatggctgatga

SEQ ID NO: 1746838 - DNA, 15 bp, Homo sapiens
ttaatggctgatgat

SEQ ID NO: 1746839 - DNA, 15 bp, Homo sapiens
taatggctgatgatt

SEQ ID NO: 1746840 - DNA, 15 bp, Homo sapiens
aatggctgatgattt

SEQ ID NO: 1746841 - DNA, 15 bp, Homo sapiens
atggctgatgatttg

SEQ ID NO: 1746842 - DNA, 15 bp, Homo sapiens
tggctgatgatttga

SEQ ID NO: 1746843 - DNA, 15 bp, Homo sapiens
ggctgatgatttgag

SEQ ID NO: 1746844 - DNA, 15 bp, Homo sapiens
gctgatgatttgagg

SEQ ID NO: 1746845 - DNA, 15 bp, Homo sapiens
ctgatgatttgaggt

SEQ ID NO: 1746846 - DNA, 15 bp, Homo sapiens
tgatgatttgaggta

SEQ ID NO: 1746847 - DNA, 15 bp, Homo sapiens
gatgatttgaggtag

SEQ ID NO: 1746848 - DNA, 15 bp, Homo sapiens
atgatttgaggtaga

SEQ ID NO: 1746849 - DNA, 15 bp, Homo sapiens
tgatttgaggtagaa

SEQ ID NO: 1746850 - DNA, 15 bp, Homo sapiens
gatttgaggtagaac

SEQ ID NO: 1746851 - DNA, 15 bp, Homo sapiens
atttgaggtagaaca

SEQ ID NO: 1746852 - DNA, 15 bp, Homo sapiens
tttgaggtagaacag

SEQ ID NO: 1746853 - DNA, 15 bp, Homo sapiens
ttgaggtagaacagt

SEQ ID NO: 1746854 - DNA, 15 bp, Homo sapiens
tgaggtagaacagtt

SEQ ID NO: 1746855 - DNA, 15 bp, Homo sapiens
gaggtagaacagttc

SEQ ID NO: 1746856 - DNA, 15 bp, Homo sapiens
aggtagaacagttca

SEQ ID NO: 1746857 - DNA, 15 bp, Homo sapiens
ggtagaacagttcaa

SEQ ID NO: 1746858 - DNA, 15 bp, Homo sapiens
gtagaacagttcaaa

SEQ ID NO: 1746859 - DNA, 15 bp, Homo sapiens
tagaacagttcaaaa

SEQ ID NO: 1746860 - DNA, 15 bp, Homo sapiens
agaacagttcaaaac

SEQ ID NO: 1746861 - DNA, 15 bp, Homo sapiens
gaacagttcaaaacc

SEQ ID NO: 1746862 - DNA, 15 bp, Homo sapiens
aacagttcaaaacca

SEQ ID NO: 1746863 - DNA, 15 bp, Homo sapiens
cagttcaaaaccatt

SEQ ID NO: 1746864 - DNA, 15 bp, Homo sapiens
agttcaaaaccattc

SEQ ID NO: 1746865 - DNA, 15 bp, Homo sapiens
gttcaaaaccattcc

SEQ ID NO: 1746866 - DNA, 15 bp, Homo sapiens
ttcaaaaccattccc

SEQ ID NO: 1746867 - DNA, 15 bp, Homo sapiens
tcaaaaccattcccc

SEQ ID NO: 1746868 - DNA, 15 bp, Homo sapiens
caaaaccattccccc

SEQ ID NO: 1746869 - DNA, 15 bp, Homo sapiens
aaaaccattccccct

SEQ ID NO: 1746870 - DNA, 15 bp, Homo sapiens
aaaccattcccccta

SEQ ID NO: 1746871 - DNA, 15 bp, Homo sapiens
aaccattccccctac

SEQ ID NO: 1746872 - DNA, 15 bp, Homo sapiens
accattccccctact

SEQ ID NO: 1746873 - DNA, 15 bp, Homo sapiens
ccattccccctactc

SEQ ID NO: 1746874 - DNA, 15 bp, Homo sapiens
cattccccctactct

SEQ ID NO: 1746875 - DNA, 15 bp, Homo sapiens
attccccctactctc

SEQ ID NO: 1746876 - DNA, 15 bp, Homo sapiens
ttccccctactctcc

SEQ ID NO: 1746877 - DNA, 15 bp, Homo sapiens
tccccctactctcca

SEQ ID NO: 1746878 - DNA, 15 bp, Homo sapiens
ccccctactctccat

SEQ ID NO: 1746879 - DNA, 15 bp, Homo sapiens
cccctactctccatg

SEQ ID NO: 1746880 - DNA, 15 bp, Homo sapiens
ccctactctccatgg

SEQ ID NO: 1746881 - DNA, 15 bp, Homo sapiens
cctactctccatggt

SEQ ID NO: 1746882 - DNA, 15 bp, Homo sapiens
ctactctccatggtc

SEQ ID NO: 1746883 - DNA, 15 bp, Homo sapiens
tactctccatggtcc

SEQ ID NO: 1746884 - DNA, 15 bp, Homo sapiens
actctccatggtcca

SEQ ID NO: 1746885 - DNA, 15 bp, Homo sapiens
ctctccatggtccat

SEQ ID NO: 1746886 - DNA, 15 bp, Homo sapiens
tctccatggtccatg

SEQ ID NO: 1746887 - DNA, 15 bp, Homo sapiens
ctccatggtccatgg

SEQ ID NO: 1746888 - DNA, 15 bp, Homo sapiens
tccatggtccatgga

SEQ ID NO: 1746889 - DNA, 15 bp, Homo sapiens
ccatggtccatggaa

SEQ ID NO: 1746890 - DNA, 15 bp, Homo sapiens
catggtccatggaaa

SEQ ID NO: 1746891 - DNA, 15 bp, Homo sapiens
atggtccatggaaaa

SEQ ID NO: 1746892 - DNA, 15 bp, Homo sapiens
tggtccatggaaaaa

SEQ ID NO: 1746893 - DNA, 15 bp, Homo sapiens
ggtccatggaaaaat

SEQ ID NO: 1746894 - DNA, 15 bp, Homo sapiens
gtccatggaaaaatt

SEQ ID NO: 1746895 - DNA, 15 bp, Homo sapiens
tccatggaaaaattg

SEQ ID NO: 1746896 - DNA, 15 bp, Homo sapiens
ccatggaaaaattgt

SEQ ID NO: 1746897 - DNA, 15 bp, Homo sapiens
catggaaaaattgtc

SEQ ID NO: 1746898 - DNA, 15 bp, Homo sapiens
atggaaaaattgtct

SEQ ID NO: 1746899 - DNA, 15 bp, Homo sapiens
tggaaaaattgtctt

SEQ ID NO: 1746900 - DNA, 15 bp, Homo sapiens
ggaaaaattgtcttc

SEQ ID NO: 1746901 - DNA, 15 bp, Homo sapiens
gaaaaattgtcttcc

SEQ ID NO: 1746902 - DNA, 15 bp, Homo sapiens
aaaaattgtcttcca

SEQ ID NO: 1746903 - DNA, 15 bp, Homo sapiens
aaaattgtcttccat

SEQ ID NO: 1746904 - DNA, 15 bp, Homo sapiens
aaattgtcttccatg

SEQ ID NO: 1746905 - DNA, 15 bp, Homo sapiens
aattgtcttccatga

SEQ ID NO: 1746906 - DNA, 15 bp, Homo sapiens
attgtcttccatgaa

SEQ ID NO: 1746907 - DNA, 15 bp, Homo sapiens
ttgtcttccatgaaa

SEQ ID NO: 1746908 - DNA, 15 bp, Homo sapiens
tgtcttccatgaaac

SEQ ID NO: 1746909 - DNA, 15 bp, Homo sapiens
gtcttccatgaaacc

SEQ ID NO: 1746910 - DNA, 15 bp, Homo sapiens
tcttccatgaaacca

SEQ ID NO: 1746911 - DNA, 15 bp, Homo sapiens
cttccatgaaaccag

SEQ ID NO: 1746912 - DNA, 15 bp, Homo sapiens
ttccatgaaaccagt

SEQ ID NO: 1746913 - DNA, 15 bp, Homo sapiens
tccatgaaaccagtc

SEQ ID NO: 1746914 - DNA, 15 bp, Homo sapiens
ccatgaaaccagtcc

SEQ ID NO: 1746915 - DNA, 15 bp, Homo sapiens
catgaaaccagtccc

SEQ ID NO: 1746916 - DNA, 15 bp, Homo sapiens
atgaaaccagtccct

SEQ ID NO: 1746917 - DNA, 15 bp, Homo sapiens
tgaaaccagtccctg

SEQ ID NO: 1746918 - DNA, 15 bp, Homo sapiens
gaaaccagtccctgt

SEQ ID NO: 1746919 - DNA, 15 bp, Homo sapiens
aaaccagtccctgtt

SEQ ID NO: 1746920 - DNA, 15 bp, Homo sapiens
aaccagtccctgttg

SEQ ID NO: 1746921 - DNA, 15 bp, Homo sapiens
accagtccctgttgc

SEQ ID NO: 1746922 - DNA, 15 bp, Homo sapiens
ccagtccctgttgcc

SEQ ID NO: 1746923 - DNA, 15 bp, Homo sapiens
cagtccctgttgcca

SEQ ID NO: 1746924 - DNA, 15 bp, Homo sapiens
agtccctgttgccaa

SEQ ID NO: 1746925 - DNA, 15 bp, Homo sapiens
gtccctgttgccaaa

SEQ ID NO: 1746926 - DNA, 15 bp, Homo sapiens
tccctgttgccaaaa

SEQ ID NO: 1746927 - DNA, 15 bp, Homo sapiens
ccctgttgccaaaaa

SEQ ID NO: 1746928 - DNA, 15 bp, Homo sapiens
cctgttgccaaaaag

SEQ ID NO: 1746929 - DNA, 15 bp, Homo sapiens
ctgttgccaaaaagg

SEQ ID NO: 1746930 - DNA, 15 bp, Homo sapiens
tgttgccaaaaaggt

SEQ ID NO: 1746931 - DNA, 15 bp, Homo sapiens
gttgccaaaaaggtt

SEQ ID NO: 1746932 - DNA, 15 bp, Homo sapiens
ttgccaaaaaggttg

SEQ ID NO: 1746933 - DNA, 15 bp, Homo sapiens
tgccaaaaaggttgg

SEQ ID NO: 1746934 - DNA, 15 bp, Homo sapiens
gccaaaaaggttggg

SEQ ID NO: 1746935 - DNA, 15 bp, Homo sapiens
ccaaaaaggttgggg

SEQ ID NO: 1746936 - DNA, 15 bp, Homo sapiens
caaaaaggttgggga

SEQ ID NO: 1746937 - DNA, 15 bp, Homo sapiens
aaaaaggttggggac

SEQ ID NO: 1746938 - DNA, 15 bp, Homo sapiens
aaaaggttggggact

SEQ ID NO: 1746939 - DNA, 15 bp, Homo sapiens
aaaggttggggactg

SEQ ID NO: 1746940 - DNA, 15 bp, Homo sapiens
aaggttggggactgc

SEQ ID NO: 1746941 - DNA, 15 bp, Homo sapiens
aggttggggactgct

SEQ ID NO: 1746942 - DNA, 15 bp, Homo sapiens
ggttggggactgctg

SEQ ID NO: 1746943 - DNA, 15 bp, Homo sapiens
gttggggactgctgt

SEQ ID NO: 1746944 - DNA, 15 bp, Homo sapiens
ttggggactgctgtt

SEQ ID NO: 1746945 - DNA, 15 bp, Homo sapiens
tggggactgctgttc

SEQ ID NO: 1746946 - DNA, 15 bp, Homo sapiens
ggggactgctgttct

SEQ ID NO: 1746947 - DNA, 15 bp, Homo sapiens
gggactgctgttcta

SEQ ID NO: 1746948 - DNA, 15 bp, Homo sapiens
ggactgctgttctag

SEQ ID NO: 1746949 - DNA, 15 bp, Homo sapiens
gactgctgttctaga

SEQ ID NO: 1746950 - DNA, 15 bp, Homo sapiens
actgctgttctagag

SEQ ID NO: 1746951 - DNA, 15 bp, Homo sapiens
ctgctgttctagaga

SEQ ID NO: 1746952 - DNA, 15 bp, Homo sapiens
tgctgttctagagaa

SEQ ID NO: 1746953 - DNA, 15 bp, Homo sapiens
gctgttctagagaat

SEQ ID NO: 1746954 - DNA, 15 bp, Homo sapiens
ctgttctagagaatg

SEQ ID NO: 1746955 - DNA, 15 bp, Homo sapiens
tgttctagagaatgg

SEQ ID NO: 1746956 - DNA, 15 bp, Homo sapiens
gttctagagaatggg

SEQ ID NO: 1746957 - DNA, 15 bp, Homo sapiens
ttctagagaatggga

SEQ ID NO: 1746958 - DNA, 15 bp, Homo sapiens
tctagagaatgggaa

SEQ ID NO: 1746959 - DNA, 15 bp, Homo sapiens
ctagagaatgggaaa

SEQ ID NO: 1746960 - DNA, 15 bp, Homo sapiens
tagagaatgggaaag

SEQ ID NO: 1746961 - DNA, 15 bp, Homo sapiens
agagaatgggaaagt

SEQ ID NO: 1746962 - DNA, 15 bp, Homo sapiens
gagaatgggaaagta

SEQ ID NO: 1746963 - DNA, 15 bp, Homo sapiens
agaatgggaaagtat

SEQ ID NO: 1746964 - DNA, 15 bp, Homo sapiens
gaatgggaaagtatg

SEQ ID NO: 1746965 - DNA, 15 bp, Homo sapiens
aatgggaaagtatga

SEQ ID NO: 1746966 - DNA, 15 bp, Homo sapiens
atgggaaagtatgat

SEQ ID NO: 1746967 - DNA, 15 bp, Homo sapiens
tgggaaagtatgatt

SEQ ID NO: 1746968 - DNA, 15 bp, Homo sapiens
gggaaagtatgattg

SEQ ID NO: 1746969 - DNA, 15 bp, Homo sapiens
ggaaagtatgattgg

SEQ ID NO: 1746970 - DNA, 15 bp, Homo sapiens
gaaagtatgattggg

SEQ ID NO: 1746971 - DNA, 15 bp, Homo sapiens
aaagtatgattgggg

SEQ ID NO: 1746972 - DNA, 15 bp, Homo sapiens
aagtatgattgggga

SEQ ID NO: 1746973 - DNA, 15 bp, Homo sapiens
agtatgattggggag

SEQ ID NO: 1746974 - DNA, 15 bp, Homo sapiens
gtatgattggggagt

SEQ ID NO: 1746975 - DNA, 15 bp, Homo sapiens
tatgattggggagtg

SEQ ID NO: 1746976 - DNA, 15 bp, Homo sapiens
atgattggggagtgc

SEQ ID NO: 1746977 - DNA, 15 bp, Homo sapiens
tgattggggagtgca

SEQ ID NO: 1746978 - DNA, 15 bp, Homo sapiens
gattggggagtgcag

SEQ ID NO: 1746979 - DNA, 15 bp, Homo sapiens
attggggagtgcaga

SEQ ID NO: 1746980 - DNA, 15 bp, Homo sapiens
ttggggagtgcagag

SEQ ID NO: 1746981 - DNA, 15 bp, Homo sapiens
tggggagtgcagaga

SEQ ID NO: 1746982 - DNA, 15 bp, Homo sapiens
ggggagtgcagagat

SEQ ID NO: 1746983 - DNA, 15 bp, Homo sapiens
gggagtgcagagatt

SEQ ID NO: 1746984 - DNA, 15 bp, Homo sapiens
ggagtgcagagattg

SEQ ID NO: 1746985 - DNA, 15 bp, Homo sapiens
gagtgcagagattga

SEQ ID NO: 1746986 - DNA, 15 bp, Homo sapiens
agtgcagagattgaa

SEQ ID NO: 1746987 - DNA, 15 bp, Homo sapiens
gtgcagagattgaag

SEQ ID NO: 1746988 - DNA, 15 bp, Homo sapiens
tgcagagattgaagc

SEQ ID NO: 1746989 - DNA, 15 bp, Homo sapiens
gcagagattgaagcg

SEQ ID NO: 1746990 - DNA, 15 bp, Homo sapiens
cagagattgaagcga

SEQ ID NO: 1746991 - DNA, 15 bp, Homo sapiens
agagattgaagcgaa

SEQ ID NO: 1746992 - DNA, 15 bp, Homo sapiens
gagattgaagcgaag

SEQ ID NO: 1746993 - DNA, 15 bp, Homo sapiens
agattgaagcgaaga

SEQ ID NO: 1746994 - DNA, 15 bp, Homo sapiens
gattgaagcgaagaa

SEQ ID NO: 1746995 - DNA, 15 bp, Homo sapiens
attgaagcgaagaaa

SEQ ID NO: 1746996 - DNA, 15 bp, Homo sapiens
ttgaagcgaagaaag

SEQ ID NO: 1746997 - DNA, 15 bp, Homo sapiens
tgaagcgaagaaagc

SEQ ID NO: 1746998 - DNA, 15 bp, Homo sapiens
gaagcgaagaaagct

SEQ ID NO: 1746999 - DNA, 15 bp, Homo sapiens
aagcgaagaaagctg

SEQ ID NO: 1747000 - DNA, 15 bp, Homo sapiens
agcgaagaaagctga

SEQ ID NO: 1747001 - DNA, 15 bp, Homo sapiens
gcgaagaaagctgag

SEQ ID NO: 1747002 - DNA, 15 bp, Homo sapiens
cgaagaaagctgagg

SEQ ID NO: 1747003 - DNA, 15 bp, Homo sapiens
gaagaaagctgaggg

SEQ ID NO: 1747004 - DNA, 15 bp, Homo sapiens
aagaaagctgaggga

SEQ ID NO: 1747005 - DNA, 15 bp, Homo sapiens
agaaagctgagggag

SEQ ID NO: 1747006 - DNA, 15 bp, Homo sapiens
gaaagctgagggagg

SEQ ID NO: 1747007 - DNA, 15 bp, Homo sapiens
aaagctgagggaggg

SEQ ID NO: 1747008 - DNA, 15 bp, Homo sapiens
aagctgagggaggga

SEQ ID NO: 1747009 - DNA, 15 bp, Homo sapiens
agctgagggagggag

SEQ ID NO: 1747010 - DNA, 15 bp, Homo sapiens
gctgagggagggagg

SEQ ID NO: 1747011 - DNA, 15 bp, Homo sapiens
ctgagggagggaggg

SEQ ID NO: 1747012 - DNA, 15 bp, Homo sapiens
agggagggagggagt

SEQ ID NO: 1747013 - DNA, 15 bp, Homo sapiens
gggagggagggagtt

SEQ ID NO: 1747014 - DNA, 15 bp, Homo sapiens
ggagggagggagttt

SEQ ID NO: 1747015 - DNA, 15 bp, Homo sapiens
gagggagggagtttc

SEQ ID NO: 1747016 - DNA, 15 bp, Homo sapiens
agggagggagtttca

SEQ ID NO: 1747017 - DNA, 15 bp, Homo sapiens
gggagggagtttcat

SEQ ID NO: 1747018 - DNA, 15 bp, Homo sapiens
ggagggagtttcatt

SEQ ID NO: 1747019 - DNA, 15 bp, Homo sapiens
gagggagtttcatta

SEQ ID NO: 1747020 - DNA, 15 bp, Homo sapiens
agggagtttcattaa

SEQ ID NO: 1747021 - DNA, 15 bp, Homo sapiens
gggagtttcattaag

SEQ ID NO: 1747022 - DNA, 15 bp, Homo sapiens
ggagtttcattaaga

SEQ ID NO: 1747023 - DNA, 15 bp, Homo sapiens
gagtttcattaagag

SEQ ID NO: 1747024 - DNA, 15 bp, Homo sapiens
agtttcattaagagc

SEQ ID NO: 1747025 - DNA, 15 bp, Homo sapiens
gtttcattaagagca

SEQ ID NO: 1747026 - DNA, 15 bp, Homo sapiens
tttcattaagagcaa

SEQ ID NO: 1747027 - DNA, 15 bp, Homo sapiens
ttcattaagagcaag

SEQ ID NO: 1747028 - DNA, 15 bp, Homo sapiens
tcattaagagcaagt

SEQ ID NO: 1747029 - DNA, 15 bp, Homo sapiens
cattaagagcaagta

SEQ ID NO: 1747030 - DNA, 15 bp, Homo sapiens
attaagagcaagtat

SEQ ID NO: 1747031 - DNA, 15 bp, Homo sapiens
ttaagagcaagtatt

SEQ ID NO: 1747032 - DNA, 15 bp, Homo sapiens
taagagcaagtattt

SEQ ID NO: 1747033 - DNA, 15 bp, Homo sapiens
aagagcaagtatttc

SEQ ID NO: 1747034 - DNA, 15 bp, Homo sapiens
agagcaagtatttct

SEQ ID NO: 1747035 - DNA, 15 bp, Homo sapiens
gagcaagtatttctc

SEQ ID NO: 1747036 - DNA, 15 bp, Homo sapiens
agcaagtatttctct

SEQ ID NO: 1747037 - DNA, 15 bp, Homo sapiens
gcaagtatttctcta

SEQ ID NO: 1747038 - DNA, 15 bp, Homo sapiens
caagtatttctctaa

SEQ ID NO: 1747039 - DNA, 15 bp, Homo sapiens
aagtatttctctaac

SEQ ID NO: 1747040 - DNA, 15 bp, Homo sapiens
agtatttctctaaca

SEQ ID NO: 1747041 - DNA, 15 bp, Homo sapiens
gtatttctctaacag

SEQ ID NO: 1747042 - DNA, 15 bp, Homo sapiens
tatttctctaacagt

SEQ ID NO: 1747043 - DNA, 15 bp, Homo sapiens
atttctctaacagtg

SEQ ID NO: 1747044 - DNA, 15 bp, Homo sapiens
tttctctaacagtgt

SEQ ID NO: 1747045 - DNA, 15 bp, Homo sapiens
ttctctaacagtgtc

SEQ ID NO: 1747046 - DNA, 15 bp, Homo sapiens
tctctaacagtgtca

SEQ ID NO: 1747047 - DNA, 15 bp, Homo sapiens
ctctaacagtgtcaa

SEQ ID NO: 1747048 - DNA, 15 bp, Homo sapiens
tctaacagtgtcaaa

SEQ ID NO: 1747049 - DNA, 15 bp, Homo sapiens
ctaacagtgtcaaat

SEQ ID NO: 1747050 - DNA, 15 bp, Homo sapiens
taacagtgtcaaatg

SEQ ID NO: 1747051 - DNA, 15 bp, Homo sapiens
aacagtgtcaaatgc

SEQ ID NO: 1747052 - DNA, 15 bp, Homo sapiens
acagtgtcaaatgct

SEQ ID NO: 1747053 - DNA, 15 bp, Homo sapiens
cagtgtcaaatgctt

SEQ ID NO: 1747054 - DNA, 15 bp, Homo sapiens
agtgtcaaatgcttc

SEQ ID NO: 1747055 - DNA, 15 bp, Homo sapiens
gtgtcaaatgcttca

SEQ ID NO: 1747056 - DNA, 15 bp, Homo sapiens
tgtcaaatgcttcaa

SEQ ID NO: 1747057 - DNA, 15 bp, Homo sapiens
gtcaaatgcttcaag

SEQ ID NO: 1747058 - DNA, 15 bp, Homo sapiens
tcaaatgcttcaagg

SEQ ID NO: 1747059 - DNA, 15 bp, Homo sapiens
caaatgcttcaagga

SEQ ID NO: 1747060 - DNA, 15 bp, Homo sapiens
aaatgcttcaaggaa

SEQ ID NO: 1747061 - DNA, 15 bp, Homo sapiens
aatgcttcaaggaag

SEQ ID NO: 1747062 - DNA, 15 bp, Homo sapiens
atgcttcaaggaagg

SEQ ID NO: 1747063 - DNA, 15 bp, Homo sapiens
tgcttcaaggaaggt

SEQ ID NO: 1747064 - DNA, 15 bp, Homo sapiens
gcttcaaggaaggtc

SEQ ID NO: 1747065 - DNA, 15 bp, Homo sapiens
cttcaaggaaggtca

SEQ ID NO: 1747066 - DNA, 15 bp, Homo sapiens
ttcaaggaaggtcaa

SEQ ID NO: 1747067 - DNA, 15 bp, Homo sapiens
tcaaggaaggtcaag

SEQ ID NO: 1747068 - DNA, 15 bp, Homo sapiens
caaggaaggtcaagt

SEQ ID NO: 1747069 - DNA, 15 bp, Homo sapiens
aaggaaggtcaagta

SEQ ID NO: 1747070 - DNA, 15 bp, Homo sapiens
aggaaggtcaagtat

SEQ ID NO: 1747071 - DNA, 15 bp, Homo sapiens
ggaaggtcaagtatt

SEQ ID NO: 1747072 - DNA, 15 bp, Homo sapiens
gaaggtcaagtatta

SEQ ID NO: 1747073 - DNA, 15 bp, Homo sapiens
aaggtcaagtattag

SEQ ID NO: 1747074 - DNA, 15 bp, Homo sapiens
aggtcaagtattaga

SEQ ID NO: 1747075 - DNA, 15 bp, Homo sapiens
ggtcaagtattagaa

SEQ ID NO: 1747076 - DNA, 15 bp, Homo sapiens
gtcaagtattagaac

SEQ ID NO: 1747077 - DNA, 15 bp, Homo sapiens
tcaagtattagaaca

SEQ ID NO: 1747078 - DNA, 15 bp, Homo sapiens
caagtattagaacaa

SEQ ID NO: 1747079 - DNA, 15 bp, Homo sapiens
aagtattagaacaaa

SEQ ID NO: 1747080 - DNA, 15 bp, Homo sapiens
agtattagaacaaat

SEQ ID NO: 1747081 - DNA, 15 bp, Homo sapiens
gtattagaacaaatg

SEQ ID NO: 1747082 - DNA, 15 bp, Homo sapiens
tattagaacaaatga

SEQ ID NO: 1747083 - DNA, 15 bp, Homo sapiens
attagaacaaatgag

SEQ ID NO: 1747084 - DNA, 15 bp, Homo sapiens
ttagaacaaatgaga

SEQ ID NO: 1747085 - DNA, 15 bp, Homo sapiens
agaacaaatgagaaa

SEQ ID NO: 1747086 - DNA, 15 bp, Homo sapiens
gaacaaatgagaaaa

SEQ ID NO: 1747087 - DNA, 15 bp, Homo sapiens
aacaaatgagaaaag

SEQ ID NO: 1747088 - DNA, 15 bp, Homo sapiens
acaaatgagaaaagt

SEQ ID NO: 1747089 - DNA, 15 bp, Homo sapiens
caaatgagaaaagtc

SEQ ID NO: 1747090 - DNA, 15 bp, Homo sapiens
aaatgagaaaagtct

SEQ ID NO: 1747091 - DNA, 15 bp, Homo sapiens
aatgagaaaagtctt

SEQ ID NO: 1747092 - DNA, 15 bp, Homo sapiens
atgagaaaagtcttt

SEQ ID NO: 1747093 - DNA, 15 bp, Homo sapiens
tgagaaaagtctttt

SEQ ID NO: 1747094 - DNA, 15 bp, Homo sapiens
gagaaaagtcttttg

SEQ ID NO: 1747095 - DNA, 15 bp, Homo sapiens
agaaaagtcttttgt

SEQ ID NO: 1747096 - DNA, 15 bp, Homo sapiens
gaaaagtcttttgtt

SEQ ID NO: 1747097 - DNA, 15 bp, Homo sapiens
aaaagtcttttgttt

SEQ ID NO: 1747098 - DNA, 15 bp, Homo sapiens
aaagtcttttgtttt

SEQ ID NO: 1747099 - DNA, 15 bp, Homo sapiens
aagtcttttgttttt

SEQ ID NO: 1747100 - DNA, 15 bp, Homo sapiens
agtcttttgttttta

SEQ ID NO: 1747101 - DNA, 15 bp, Homo sapiens
gtcttttgtttttat

SEQ ID NO: 1747102 - DNA, 15 bp, Homo sapiens
tcttttgtttttatc

SEQ ID NO: 1747103 - DNA, 15 bp, Homo sapiens
cttttgtttttatca

SEQ ID NO: 1747104 - DNA, 15 bp, Homo sapiens
ttttgtttttatcag

SEQ ID NO: 1747105 - DNA, 15 bp, Homo sapiens
tttgtttttatcagt

SEQ ID NO: 1747106 - DNA, 15 bp, Homo sapiens
ttgtttttatcagtt

SEQ ID NO: 1747107 - DNA, 15 bp, Homo sapiens
tgtttttatcagttg

SEQ ID NO: 1747108 - DNA, 15 bp, Homo sapiens
gtttttatcagttgg

SEQ ID NO: 1747109 - DNA, 15 bp, Homo sapiens
tttttatcagttggt

SEQ ID NO: 1747110 - DNA, 15 bp, Homo sapiens
ttttatcagttggtc

SEQ ID NO: 1747111 - DNA, 15 bp, Homo sapiens
tttatcagttggtca

SEQ ID NO: 1747112 - DNA, 15 bp, Homo sapiens
ttatcagttggtcat

SEQ ID NO: 1747113 - DNA, 15 bp, Homo sapiens
tatcagttggtcatt

SEQ ID NO: 1747114 - DNA, 15 bp, Homo sapiens
atcagttggtcattt

SEQ ID NO: 1747115 - DNA, 15 bp, Homo sapiens
tcagttggtcatttg

SEQ ID NO: 1747116 - DNA, 15 bp, Homo sapiens
cagttggtcatttgt

SEQ ID NO: 1747117 - DNA, 15 bp, Homo sapiens
agttggtcatttgtg

SEQ ID NO: 1747118 - DNA, 15 bp, Homo sapiens
gttggtcatttgtgg

SEQ ID NO: 1747119 - DNA, 15 bp, Homo sapiens
ttggtcatttgtggc

SEQ ID NO: 1747120 - DNA, 15 bp, Homo sapiens
tggtcatttgtggct

SEQ ID NO: 1747121 - DNA, 15 bp, Homo sapiens
ggtcatttgtggctt

SEQ ID NO: 1747122 - DNA, 15 bp, Homo sapiens
gtcatttgtggcttt

SEQ ID NO: 1747123 - DNA, 15 bp, Homo sapiens
tcatttgtggcttta

SEQ ID NO: 1747124 - DNA, 15 bp, Homo sapiens
catttgtggctttaa

SEQ ID NO: 1747125 - DNA, 15 bp, Homo sapiens
atttgtggctttaat

SEQ ID NO: 1747126 - DNA, 15 bp, Homo sapiens
tttgtggctttaatc

SEQ ID NO: 1747127 - DNA, 15 bp, Homo sapiens
ttgtggctttaatca

SEQ ID NO: 1747128 - DNA, 15 bp, Homo sapiens
tgtggctttaatcac

SEQ ID NO: 1747129 - DNA, 15 bp, Homo sapiens
gtggctttaatcact

SEQ ID NO: 1747130 - DNA, 15 bp, Homo sapiens
tggctttaatcactg

SEQ ID NO: 1747131 - DNA, 15 bp, Homo sapiens
ggctttaatcactgt

SEQ ID NO: 1747132 - DNA, 15 bp, Homo sapiens
gctttaatcactgta

SEQ ID NO: 1747133 - DNA, 15 bp, Homo sapiens
ctttaatcactgtag

SEQ ID NO: 1747134 - DNA, 15 bp, Homo sapiens
tttaatcactgtagc

SEQ ID NO: 1747135 - DNA, 15 bp, Homo sapiens
ttaatcactgtagct

SEQ ID NO: 1747136 - DNA, 15 bp, Homo sapiens
taatcactgtagctt

SEQ ID NO: 1747137 - DNA, 15 bp, Homo sapiens
aatcactgtagctta

SEQ ID NO: 1747138 - DNA, 15 bp, Homo sapiens
atcactgtagcttaa

SEQ ID NO: 1747139 - DNA, 15 bp, Homo sapiens
tcactgtagcttaaa

SEQ ID NO: 1747140 - DNA, 15 bp, Homo sapiens
cactgtagcttaaat

SEQ ID NO: 1747141 - DNA, 15 bp, Homo sapiens
actgtagcttaaata

SEQ ID NO: 1747142 - DNA, 15 bp, Homo sapiens
ctgtagcttaaatat

SEQ ID NO: 1747143 - DNA, 15 bp, Homo sapiens
tgtagcttaaatatg

SEQ ID NO: 1747144 - DNA, 15 bp, Homo sapiens
gtagcttaaatatga

SEQ ID NO: 1747145 - DNA, 15 bp, Homo sapiens
tagcttaaatatgat

SEQ ID NO: 1747146 - DNA, 15 bp, Homo sapiens
agcttaaatatgatt

SEQ ID NO: 1747147 - DNA, 15 bp, Homo sapiens
gcttaaatatgatta

SEQ ID NO: 1747148 - DNA, 15 bp, Homo sapiens
cttaaatatgattag

SEQ ID NO: 1747149 - DNA, 15 bp, Homo sapiens
ttaaatatgattagt

SEQ ID NO: 1747150 - DNA, 15 bp, Homo sapiens
taaatatgattagtg

SEQ ID NO: 1747151 - DNA, 15 bp, Homo sapiens
aaatatgattagtgg

SEQ ID NO: 1747152 - DNA, 15 bp, Homo sapiens
aatatgattagtgga

SEQ ID NO: 1747153 - DNA, 15 bp, Homo sapiens
atatgattagtggac

SEQ ID NO: 1747154 - DNA, 15 bp, Homo sapiens
tatgattagtggaca

SEQ ID NO: 1747155 - DNA, 15 bp, Homo sapiens
atgattagtggacac

SEQ ID NO: 1747156 - DNA, 15 bp, Homo sapiens
tgattagtggacaca

SEQ ID NO: 1747157 - DNA, 15 bp, Homo sapiens
gattagtggacacag

SEQ ID NO: 1747158 - DNA, 15 bp, Homo sapiens
attagtggacacaga

SEQ ID NO: 1747159 - DNA, 15 bp, Homo sapiens
ttagtggacacagaa

SEQ ID NO: 1747160 - DNA, 15 bp, Homo sapiens
tagtggacacagaag

SEQ ID NO: 1747161 - DNA, 15 bp, Homo sapiens
agtggacacagaagc

SEQ ID NO: 1747162 - DNA, 15 bp, Homo sapiens
gtggacacagaagca

SEQ ID NO: 1747163 - DNA, 15 bp, Homo sapiens
tggacacagaagcat

SEQ ID NO: 1747164 - DNA, 15 bp, Homo sapiens
ggacacagaagcata

SEQ ID NO: 1747165 - DNA, 15 bp, Homo sapiens
gacacagaagcatat

SEQ ID NO: 1747166 - DNA, 15 bp, Homo sapiens
acacagaagcatata

SEQ ID NO: 1747167 - DNA, 15 bp, Homo sapiens
cacagaagcatatag

SEQ ID NO: 1747168 - DNA, 15 bp, Homo sapiens
acagaagcatataga

SEQ ID NO: 1747169 - DNA, 15 bp, Homo sapiens
cagaagcatatagaa

SEQ ID NO: 1747170 - DNA, 15 bp, Homo sapiens
agaagcatatagaag

SEQ ID NO: 1747171 - DNA, 15 bp, Homo sapiens
gaagcatatagaagc

SEQ ID NO: 1747172 - DNA, 15 bp, Homo sapiens
aagcatatagaagct

SEQ ID NO: 1747173 - DNA, 15 bp, Homo sapiens
agcatatagaagctg

SEQ ID NO: 1747174 - DNA, 15 bp, Homo sapiens
gcatatagaagctgt

SEQ ID NO: 1747175 - DNA, 15 bp, Homo sapiens
catatagaagctgtg

SEQ ID NO: 1747176 - DNA, 15 bp, Homo sapiens
atatagaagctgtgt

SEQ ID NO: 1747177 - DNA, 15 bp, Homo sapiens
tatagaagctgtgtt

SEQ ID NO: 1747178 - DNA, 15 bp, Homo sapiens
atagaagctgtgttg

SEQ ID NO: 1747179 - DNA, 15 bp, Homo sapiens
tagaagctgtgttgc

SEQ ID NO: 1747180 - DNA, 15 bp, Homo sapiens
agaagctgtgttgca

SEQ ID NO: 1747181 - DNA, 15 bp, Homo sapiens
gaagctgtgttgcaa

SEQ ID NO: 1747182 - DNA, 15 bp, Homo sapiens
aagctgtgttgcaat

SEQ ID NO: 1747183 - DNA, 15 bp, Homo sapiens
agctgtgttgcaata

SEQ ID NO: 1747184 - DNA, 15 bp, Homo sapiens
gctgtgttgcaatat

SEQ ID NO: 1747185 - DNA, 15 bp, Homo sapiens
ctgtgttgcaatata

SEQ ID NO: 1747186 - DNA, 15 bp, Homo sapiens
tgtgttgcaatatat

SEQ ID NO: 1747187 - DNA, 15 bp, Homo sapiens
gtgttgcaatatatt

SEQ ID NO: 1747188 - DNA, 15 bp, Homo sapiens
tgttgcaatatattt

SEQ ID NO: 1747189 - DNA, 15 bp, Homo sapiens
gttgcaatatatttg

SEQ ID NO: 1747190 - DNA, 15 bp, Homo sapiens
ttgcaatatatttga

SEQ ID NO: 1747191 - DNA, 15 bp, Homo sapiens
tgcaatatatttgaa

SEQ ID NO: 1747192 - DNA, 15 bp, Homo sapiens
gcaatatatttgaaa

SEQ ID NO: 1747193 - DNA, 15 bp, Homo sapiens
caatatatttgaaag

SEQ ID NO: 1747194 - DNA, 15 bp, Homo sapiens
aatatatttgaaaga

SEQ ID NO: 1747195 - DNA, 15 bp, Homo sapiens
atatatttgaaagac

SEQ ID NO: 1747196 - DNA, 15 bp, Homo sapiens
tatatttgaaagacg

SEQ ID NO: 1747197 - DNA, 15 bp, Homo sapiens
atatttgaaagacga

SEQ ID NO: 1747198 - DNA, 15 bp, Homo sapiens
tatttgaaagacgag

SEQ ID NO: 1747199 - DNA, 15 bp, Homo sapiens
atttgaaagacgagg

SEQ ID NO: 1747200 - DNA, 15 bp, Homo sapiens
tttgaaagacgaggc

SEQ ID NO: 1747201 - DNA, 15 bp, Homo sapiens
ttgaaagacgaggct

SEQ ID NO: 1747202 - DNA, 15 bp, Homo sapiens
tgaaagacgaggctg

SEQ ID NO: 1747203 - DNA, 15 bp, Homo sapiens
gaaagacgaggctgg

SEQ ID NO: 1747204 - DNA, 15 bp, Homo sapiens
aaagacgaggctggg

SEQ ID NO: 1747205 - DNA, 15 bp, Homo sapiens
aagacgaggctgggt

SEQ ID NO: 1747206 - DNA, 15 bp, Homo sapiens
agacgaggctgggtg

SEQ ID NO: 1747207 - DNA, 15 bp, Homo sapiens
gacgaggctgggtgt

SEQ ID NO: 1747208 - DNA, 15 bp, Homo sapiens
acgaggctgggtgtg

SEQ ID NO: 1747209 - DNA, 15 bp, Homo sapiens
cgaggctgggtgtgg

SEQ ID NO: 1747210 - DNA, 15 bp, Homo sapiens
cgcctgtaatcccac

SEQ ID NO: 1747211 - DNA, 15 bp, Homo sapiens
gcctgtaatcccact

SEQ ID NO: 1747212 - DNA, 15 bp, Homo sapiens
cctgtaatcccactt

SEQ ID NO: 1747213 - DNA, 15 bp, Homo sapiens
ctgtaatcccacttt

SEQ ID NO: 1747214 - DNA, 15 bp, Homo sapiens
tgtaatcccactttg

SEQ ID NO: 1747215 - DNA, 15 bp, Homo sapiens
gtaatcccactttgg

SEQ ID NO: 1747216 - DNA, 15 bp, Homo sapiens
taatcccactttggg

SEQ ID NO: 1747217 - DNA, 15 bp, Homo sapiens
aatcccactttggga

SEQ ID NO: 1747218 - DNA, 15 bp, Homo sapiens
atcccactttgggag

SEQ ID NO: 1747219 - DNA, 15 bp, Homo sapiens
tcccactttgggagg

SEQ ID NO: 1747220 - DNA, 15 bp, Homo sapiens
cccactttgggaggc

SEQ ID NO: 1747221 - DNA, 15 bp, Homo sapiens
ccactttgggaggcc

SEQ ID NO: 1747222 - DNA, 15 bp, Homo sapiens
cggatcacctgagga

SEQ ID NO: 1747223 - DNA, 15 bp, Homo sapiens
ggatcacctgaggac

SEQ ID NO: 1747224 - DNA, 15 bp, Homo sapiens
gatcacctgaggaca

SEQ ID NO: 1747225 - DNA, 15 bp, Homo sapiens
atcacctgaggacag

SEQ ID NO: 1747226 - DNA, 15 bp, Homo sapiens
tcacctgaggacagg

SEQ ID NO: 1747227 - DNA, 15 bp, Homo sapiens
cacctgaggacagga

SEQ ID NO: 1747228 - DNA, 15 bp, Homo sapiens
acctgaggacaggag

SEQ ID NO: 1747229 - DNA, 15 bp, Homo sapiens
cctgaggacaggagt

SEQ ID NO: 1747230 - DNA, 15 bp, Homo sapiens
ctgaggacaggagtt

SEQ ID NO: 1747231 - DNA, 15 bp, Homo sapiens
tgaggacaggagttc

SEQ ID NO: 1747232 - DNA, 15 bp, Homo sapiens
gaggacaggagttcg

SEQ ID NO: 1747233 - DNA, 15 bp, Homo sapiens
aggacaggagttcga

SEQ ID NO: 1747234 - DNA, 15 bp, Homo sapiens
ggacaggagttcgaa

SEQ ID NO: 1747235 - DNA, 15 bp, Homo sapiens
gacaggagttcgaaa

SEQ ID NO: 1747236 - DNA, 15 bp, Homo sapiens
acaggagttcgaaac

SEQ ID NO: 1747237 - DNA, 15 bp, Homo sapiens
caggagttcgaaacc

SEQ ID NO: 1747238 - DNA, 15 bp, Homo sapiens
aggagttcgaaacca

SEQ ID NO: 1747239 - DNA, 15 bp, Homo sapiens
ggagttcgaaaccag

SEQ ID NO: 1747240 - DNA, 15 bp, Homo sapiens
gagttcgaaaccagc

SEQ ID NO: 1747241 - DNA, 15 bp, Homo sapiens
cgaaaccagcctggg

SEQ ID NO: 1747242 - DNA, 15 bp, Homo sapiens
gaaaccagcctgggc

SEQ ID NO: 1747243 - DNA, 15 bp, Homo sapiens
aaaccagcctgggca

SEQ ID NO: 1747244 - DNA, 15 bp, Homo sapiens
aaccagcctgggcaa

SEQ ID NO: 1747245 - DNA, 15 bp, Homo sapiens
ctgggcaacatggca

SEQ ID NO: 1747246 - DNA, 15 bp, Homo sapiens
tgggcaacatggcaa

SEQ ID NO: 1747247 - DNA, 15 bp, Homo sapiens
gggcaacatggcaaa

SEQ ID NO: 1747248 - DNA, 15 bp, Homo sapiens
ggcaacatggcaaaa

SEQ ID NO: 1747249 - DNA, 15 bp, Homo sapiens
gcaacatggcaaaac

SEQ ID NO: 1747250 - DNA, 15 bp, Homo sapiens
aaaattagcccagct

SEQ ID NO: 1747251 - DNA, 15 bp, Homo sapiens
aaattagcccagctg

SEQ ID NO: 1747252 - DNA, 15 bp, Homo sapiens
aattagcccagctgg

SEQ ID NO: 1747253 - DNA, 15 bp, Homo sapiens
attagcccagctggg

SEQ ID NO: 1747254 - DNA, 15 bp, Homo sapiens
ttagcccagctgggc

SEQ ID NO: 1747255 - DNA, 15 bp, Homo sapiens
tagcccagctgggca

SEQ ID NO: 1747256 - DNA, 15 bp, Homo sapiens
agcccagctgggcac

SEQ ID NO: 1747257 - DNA, 15 bp, Homo sapiens
gcccagctgggcacc

SEQ ID NO: 1747258 - DNA, 15 bp, Homo sapiens
cccagctgggcacct

SEQ ID NO: 1747259 - DNA, 15 bp, Homo sapiens
ccagctgggcacctg

SEQ ID NO: 1747260 - DNA, 15 bp, Homo sapiens
cagctgggcacctgt

SEQ ID NO: 1747261 - DNA, 15 bp, Homo sapiens
agctgggcacctgta

SEQ ID NO: 1747262 - DNA, 15 bp, Homo sapiens
gctgggcacctgtaa

SEQ ID NO: 1747263 - DNA, 15 bp, Homo sapiens
ctgggcacctgtaat

SEQ ID NO: 1747264 - DNA, 15 bp, Homo sapiens
tgggcacctgtaatc

SEQ ID NO: 1747265 - DNA, 15 bp, Homo sapiens
ggcacctgtaatccc

SEQ ID NO: 1747266 - DNA, 15 bp, Homo sapiens
gcacctgtaatccca

SEQ ID NO: 1747267 - DNA, 15 bp, Homo sapiens
cctgtaatcccagat

SEQ ID NO: 1747268 - DNA, 15 bp, Homo sapiens
ctgtaatcccagata

SEQ ID NO: 1747269 - DNA, 15 bp, Homo sapiens
tgtaatcccagataa

SEQ ID NO: 1747270 - DNA, 15 bp, Homo sapiens
gtaatcccagataat

SEQ ID NO: 1747271 - DNA, 15 bp, Homo sapiens
taatcccagataatc

SEQ ID NO: 1747272 - DNA, 15 bp, Homo sapiens
aatcccagataatca

SEQ ID NO: 1747273 - DNA, 15 bp, Homo sapiens
atcccagataatcag

SEQ ID NO: 1747274 - DNA, 15 bp, Homo sapiens
tcccagataatcagg

SEQ ID NO: 1747275 - DNA, 15 bp, Homo sapiens
cccagataatcagga

SEQ ID NO: 1747276 - DNA, 15 bp, Homo sapiens
ccagataatcaggag

SEQ ID NO: 1747277 - DNA, 15 bp, Homo sapiens
cagataatcaggagg

SEQ ID NO: 1747278 - DNA, 15 bp, Homo sapiens
agataatcaggaggc

SEQ ID NO: 1747279 - DNA, 15 bp, Homo sapiens
gataatcaggaggct

SEQ ID NO: 1747280 - DNA, 15 bp, Homo sapiens
ataatcaggaggctg

SEQ ID NO: 1747281 - DNA, 15 bp, Homo sapiens
taatcaggaggctga

SEQ ID NO: 1747282 - DNA, 15 bp, Homo sapiens
aatcaggaggctgag

SEQ ID NO: 1747283 - DNA, 15 bp, Homo sapiens
atcaggaggctgagg

SEQ ID NO: 1747284 - DNA, 15 bp, Homo sapiens
acttgaacccgggaa

SEQ ID NO: 1747285 - DNA, 15 bp, Homo sapiens
ggcgacagagcaagg

SEQ ID NO: 1747286 - DNA, 15 bp, Homo sapiens
gcgacagagcaaggc

SEQ ID NO: 1747287 - DNA, 15 bp, Homo sapiens
cgacagagcaaggct

SEQ ID NO: 1747288 - DNA, 15 bp, Homo sapiens
acagagcaaggctcc

SEQ ID NO: 1747289 - DNA, 15 bp, Homo sapiens
cagagcaaggctcct

SEQ ID NO: 1747290 - DNA, 15 bp, Homo sapiens
agagcaaggctcctt

SEQ ID NO: 1747291 - DNA, 15 bp, Homo sapiens
gagcaaggctccttc

SEQ ID NO: 1747292 - DNA, 15 bp, Homo sapiens
agcaaggctccttct

SEQ ID NO: 1747293 - DNA, 15 bp, Homo sapiens
gcaaggctccttctc

SEQ ID NO: 1747294 - DNA, 15 bp, Homo sapiens
caaggctccttctca

SEQ ID NO: 1747295 - DNA, 15 bp, Homo sapiens
aaggctccttctcaa

SEQ ID NO: 1747296 - DNA, 15 bp, Homo sapiens
aggctccttctcaaa

SEQ ID NO: 1747297 - DNA, 15 bp, Homo sapiens
ggctccttctcaaaa

SEQ ID NO: 1747298 - DNA, 15 bp, Homo sapiens
gctccttctcaaaaa

SEQ ID NO: 1747299 - DNA, 15 bp, Homo sapiens
ctccttctcaaaaaa

SEQ ID NO: 1747300 - DNA, 15 bp, Homo sapiens
tccttctcaaaaaaa

SEQ ID NO: 1747301 - DNA, 15 bp, Homo sapiens
ttctcaaaaaaaaaa

SEQ ID NO: 1747302 - DNA, 15 bp, Homo sapiens
aaaaaaagaaaaaga

SEQ ID NO: 1747303 - DNA, 15 bp, Homo sapiens
aaagaaaaagaaaag

SEQ ID NO: 1747304 - DNA, 15 bp, Homo sapiens
aagaaaaagaaaaga

SEQ ID NO: 1747305 - DNA, 15 bp, Homo sapiens
agaaaaagaaaagaa

SEQ ID NO: 1747306 - DNA, 15 bp, Homo sapiens
gaaaaagaaaagaaa

SEQ ID NO: 1747307 - DNA, 15 bp, Homo sapiens
aaagaaaagaaagat

SEQ ID NO: 1747308 - DNA, 15 bp, Homo sapiens
aagaaaagaaagatg

SEQ ID NO: 1747309 - DNA, 15 bp, Homo sapiens
agaaaagaaagatga

SEQ ID NO: 1747310 - DNA, 15 bp, Homo sapiens
gaaaagaaagatgag

SEQ ID NO: 1747311 - DNA, 15 bp, Homo sapiens
aaaagaaagatgagg

SEQ ID NO: 1747312 - DNA, 15 bp, Homo sapiens
aaagaaagatgagga

SEQ ID NO: 1747313 - DNA, 15 bp, Homo sapiens
aagaaagatgaggaa

SEQ ID NO: 1747314 - DNA, 15 bp, Homo sapiens
agaaagatgaggaag

SEQ ID NO: 1747315 - DNA, 15 bp, Homo sapiens
gaaagatgaggaagt

SEQ ID NO: 1747316 - DNA, 15 bp, Homo sapiens
aaagatgaggaagtg

SEQ ID NO: 1747317 - DNA, 15 bp, Homo sapiens
aagatgaggaagtgt

SEQ ID NO: 1747318 - DNA, 15 bp, Homo sapiens
agatgaggaagtgta

SEQ ID NO: 1747319 - DNA, 15 bp, Homo sapiens
gatgaggaagtgtaa

SEQ ID NO: 1747320 - DNA, 15 bp, Homo sapiens
atgaggaagtgtaaa

SEQ ID NO: 1747321 - DNA, 15 bp, Homo sapiens
tgaggaagtgtaaat

SEQ ID NO: 1747322 - DNA, 15 bp, Homo sapiens
gaggaagtgtaaata

SEQ ID NO: 1747323 - DNA, 15 bp, Homo sapiens
aggaagtgtaaatac

SEQ ID NO: 1747324 - DNA, 15 bp, Homo sapiens
ggaagtgtaaatact

SEQ ID NO: 1747325 - DNA, 15 bp, Homo sapiens
gaagtgtaaatactg

SEQ ID NO: 1747326 - DNA, 15 bp, Homo sapiens
aagtgtaaatactgg

SEQ ID NO: 1747327 - DNA, 15 bp, Homo sapiens
agtgtaaatactggt

SEQ ID NO: 1747328 - DNA, 15 bp, Homo sapiens
gtgtaaatactggtt

SEQ ID NO: 1747329 - DNA, 15 bp, Homo sapiens
tgtaaatactggttt

SEQ ID NO: 1747330 - DNA, 15 bp, Homo sapiens
gtaaatactggttta

SEQ ID NO: 1747331 - DNA, 15 bp, Homo sapiens
taaatactggtttag

SEQ ID NO: 1747332 - DNA, 15 bp, Homo sapiens
aaatactggtttaga

SEQ ID NO: 1747333 - DNA, 15 bp, Homo sapiens
aatactggtttagac

SEQ ID NO: 1747334 - DNA, 15 bp, Homo sapiens
atactggtttagaca

SEQ ID NO: 1747335 - DNA, 15 bp, Homo sapiens
tactggtttagacat

SEQ ID NO: 1747336 - DNA, 15 bp, Homo sapiens
actggtttagacatg

SEQ ID NO: 1747337 - DNA, 15 bp, Homo sapiens
ctggtttagacatgc

SEQ ID NO: 1747338 - DNA, 15 bp, Homo sapiens
tggtttagacatgct

SEQ ID NO: 1747339 - DNA, 15 bp, Homo sapiens
ggtttagacatgctt

SEQ ID NO: 1747340 - DNA, 15 bp, Homo sapiens
gtttagacatgctta

SEQ ID NO: 1747341 - DNA, 15 bp, Homo sapiens
tttagacatgcttag

SEQ ID NO: 1747342 - DNA, 15 bp, Homo sapiens
ttagacatgcttagc

SEQ ID NO: 1747343 - DNA, 15 bp, Homo sapiens
tagacatgcttagct

SEQ ID NO: 1747344 - DNA, 15 bp, Homo sapiens
agacatgcttagctg

SEQ ID NO: 1747345 - DNA, 15 bp, Homo sapiens
gacatgcttagctga

SEQ ID NO: 1747346 - DNA, 15 bp, Homo sapiens
acatgcttagctgag

SEQ ID NO: 1747347 - DNA, 15 bp, Homo sapiens
catgcttagctgaga

SEQ ID NO: 1747348 - DNA, 15 bp, Homo sapiens
atgcttagctgagaa

SEQ ID NO: 1747349 - DNA, 15 bp, Homo sapiens
tgcttagctgagaac

SEQ ID NO: 1747350 - DNA, 15 bp, Homo sapiens
gcttagctgagaaca

SEQ ID NO: 1747351 - DNA, 15 bp, Homo sapiens
cttagctgagaacac

SEQ ID NO: 1747352 - DNA, 15 bp, Homo sapiens
ttagctgagaacact

SEQ ID NO: 1747353 - DNA, 15 bp, Homo sapiens
tagctgagaacactg

SEQ ID NO: 1747354 - DNA, 15 bp, Homo sapiens
agctgagaacactga

SEQ ID NO: 1747355 - DNA, 15 bp, Homo sapiens
gctgagaacactgag

SEQ ID NO: 1747356 - DNA, 15 bp, Homo sapiens
ctgagaacactgagc

SEQ ID NO: 1747357 - DNA, 15 bp, Homo sapiens
tgagaacactgagca

SEQ ID NO: 1747358 - DNA, 15 bp, Homo sapiens
gagaacactgagcat

SEQ ID NO: 1747359 - DNA, 15 bp, Homo sapiens
agaacactgagcata

SEQ ID NO: 1747360 - DNA, 15 bp, Homo sapiens
gaacactgagcatat

SEQ ID NO: 1747361 - DNA, 15 bp, Homo sapiens
aacactgagcatatt

SEQ ID NO: 1747362 - DNA, 15 bp, Homo sapiens
acactgagcatattt

SEQ ID NO: 1747363 - DNA, 15 bp, Homo sapiens
cactgagcatatttt

SEQ ID NO: 1747364 - DNA, 15 bp, Homo sapiens
actgagcatatttta

SEQ ID NO: 1747365 - DNA, 15 bp, Homo sapiens
ctgagcatattttac

SEQ ID NO: 1747366 - DNA, 15 bp, Homo sapiens
tgagcatattttact

SEQ ID NO: 1747367 - DNA, 15 bp, Homo sapiens
gagcatattttacta

SEQ ID NO: 1747368 - DNA, 15 bp, Homo sapiens
agcatattttactaa

SEQ ID NO: 1747369 - DNA, 15 bp, Homo sapiens
gcatattttactaaa

SEQ ID NO: 1747370 - DNA, 15 bp, Homo sapiens
catattttactaaat

SEQ ID NO: 1747371 - DNA, 15 bp, Homo sapiens
atattttactaaata

SEQ ID NO: 1747372 - DNA, 15 bp, Homo sapiens
tattttactaaataa

SEQ ID NO: 1747373 - DNA, 15 bp, Homo sapiens
attttactaaataat

SEQ ID NO: 1747374 - DNA, 15 bp, Homo sapiens
ttttactaaataata

SEQ ID NO: 1747375 - DNA, 15 bp, Homo sapiens
tttactaaataatag

SEQ ID NO: 1747376 - DNA, 15 bp, Homo sapiens
ttactaaataatagt

SEQ ID NO: 1747377 - DNA, 15 bp, Homo sapiens
tactaaataatagtt

SEQ ID NO: 1747378 - DNA, 15 bp, Homo sapiens
actaaataatagttg

SEQ ID NO: 1747379 - DNA, 15 bp, Homo sapiens
ctaaataatagttga

SEQ ID NO: 1747380 - DNA, 15 bp, Homo sapiens
taaataatagttgag

SEQ ID NO: 1747381 - DNA, 15 bp, Homo sapiens
aaataatagttgagg

SEQ ID NO: 1747382 - DNA, 15 bp, Homo sapiens
aataatagttgagga

SEQ ID NO: 1747383 - DNA, 15 bp, Homo sapiens
ataatagttgaggat

SEQ ID NO: 1747384 - DNA, 15 bp, Homo sapiens
taatagttgaggatc

SEQ ID NO: 1747385 - DNA, 15 bp, Homo sapiens
aatagttgaggatct

SEQ ID NO: 1747386 - DNA, 15 bp, Homo sapiens
atagttgaggatctt

SEQ ID NO: 1747387 - DNA, 15 bp, Homo sapiens
tagttgaggatcttt

SEQ ID NO: 1747388 - DNA, 15 bp, Homo sapiens
agttgaggatctttt

SEQ ID NO: 1747389 - DNA, 15 bp, Homo sapiens
gttgaggatcttttc

SEQ ID NO: 1747390 - DNA, 15 bp, Homo sapiens
ttgaggatcttttca

SEQ ID NO: 1747391 - DNA, 15 bp, Homo sapiens
tgaggatcttttcag

SEQ ID NO: 1747392 - DNA, 15 bp, Homo sapiens
gaggatcttttcagc

SEQ ID NO: 1747393 - DNA, 15 bp, Homo sapiens
aggatcttttcagcc

SEQ ID NO: 1747394 - DNA, 15 bp, Homo sapiens
ggatcttttcagccc

SEQ ID NO: 1747395 - DNA, 15 bp, Homo sapiens
gatcttttcagccct

SEQ ID NO: 1747396 - DNA, 15 bp, Homo sapiens
atcttttcagcccta

SEQ ID NO: 1747397 - DNA, 15 bp, Homo sapiens
tcttttcagccctaa

SEQ ID NO: 1747398 - DNA, 15 bp, Homo sapiens
cttttcagccctaaa

SEQ ID NO: 1747399 - DNA, 15 bp, Homo sapiens
ttttcagccctaaac

SEQ ID NO: 1747400 - DNA, 15 bp, Homo sapiens
tttcagccctaaaca

SEQ ID NO: 1747401 - DNA, 15 bp, Homo sapiens
ttcagccctaaacat

SEQ ID NO: 1747402 - DNA, 15 bp, Homo sapiens
tcagccctaaacatt

SEQ ID NO: 1747403 - DNA, 15 bp, Homo sapiens
cagccctaaacattc

SEQ ID NO: 1747404 - DNA, 15 bp, Homo sapiens
agccctaaacattct

SEQ ID NO: 1747405 - DNA, 15 bp, Homo sapiens
gccctaaacattcta

SEQ ID NO: 1747406 - DNA, 15 bp, Homo sapiens
ccctaaacattctac

SEQ ID NO: 1747407 - DNA, 15 bp, Homo sapiens
cctaaacattctaca

SEQ ID NO: 1747408 - DNA, 15 bp, Homo sapiens
ctaaacattctacag

SEQ ID NO: 1747409 - DNA, 15 bp, Homo sapiens
taaacattctacagt

SEQ ID NO: 1747410 - DNA, 15 bp, Homo sapiens
aaacattctacagtt

SEQ ID NO: 1747411 - DNA, 15 bp, Homo sapiens
aacattctacagttc

SEQ ID NO: 1747412 - DNA, 15 bp, Homo sapiens
acattctacagttct

SEQ ID NO: 1747413 - DNA, 15 bp, Homo sapiens
cattctacagttctt

SEQ ID NO: 1747414 - DNA, 15 bp, Homo sapiens
attctacagttcttt

SEQ ID NO: 1747415 - DNA, 15 bp, Homo sapiens
ttctacagttctttg

SEQ ID NO: 1747416 - DNA, 15 bp, Homo sapiens
tctacagttctttgc

SEQ ID NO: 1747417 - DNA, 15 bp, Homo sapiens
ctacagttctttgca

SEQ ID NO: 1747418 - DNA, 15 bp, Homo sapiens
tacagttctttgcat

SEQ ID NO: 1747419 - DNA, 15 bp, Homo sapiens
acagttctttgcata

SEQ ID NO: 1747420 - DNA, 15 bp, Homo sapiens
cagttctttgcataa

SEQ ID NO: 1747421 - DNA, 15 bp, Homo sapiens
agttctttgcataat

SEQ ID NO: 1747422 - DNA, 15 bp, Homo sapiens
gttctttgcataatt

SEQ ID NO: 1747423 - DNA, 15 bp, Homo sapiens
ttctttgcataatta

SEQ ID NO: 1747424 - DNA, 15 bp, Homo sapiens
tctttgcataattaa

SEQ ID NO: 1747425 - DNA, 15 bp, Homo sapiens
ctttgcataattaaa

SEQ ID NO: 1747426 - DNA, 15 bp, Homo sapiens
tttgcataattaaag

SEQ ID NO: 1747427 - DNA, 15 bp, Homo sapiens
ttgcataattaaagt

SEQ ID NO: 1747428 - DNA, 15 bp, Homo sapiens
tgcataattaaagtg

SEQ ID NO: 1747429 - DNA, 15 bp, Homo sapiens
gcataattaaagtgt

SEQ ID NO: 1747430 - DNA, 15 bp, Homo sapiens
cataattaaagtgtc

SEQ ID NO: 1747431 - DNA, 15 bp, Homo sapiens
ataattaaagtgtcc

SEQ ID NO: 1747432 - DNA, 15 bp, Homo sapiens
taattaaagtgtccc

SEQ ID NO: 1747433 - DNA, 15 bp, Homo sapiens
aattaaagtgtccca

SEQ ID NO: 1747434 - DNA, 15 bp, Homo sapiens
attaaagtgtcccaa

SEQ ID NO: 1747435 - DNA, 15 bp, Homo sapiens
ttaaagtgtcccaaa

SEQ ID NO: 1747436 - DNA, 15 bp, Homo sapiens
taaagtgtcccaaat

SEQ ID NO: 1747437 - DNA, 15 bp, Homo sapiens
aaagtgtcccaaatg

SEQ ID NO: 1747438 - DNA, 15 bp, Homo sapiens
aagtgtcccaaatgt

SEQ ID NO: 1747439 - DNA, 15 bp, Homo sapiens
agtgtcccaaatgtt

SEQ ID NO: 1747440 - DNA, 15 bp, Homo sapiens
gtgtcccaaatgttc

SEQ ID NO: 1747441 - DNA, 15 bp, Homo sapiens
tgtcccaaatgttca

SEQ ID NO: 1747442 - DNA, 15 bp, Homo sapiens
gtcccaaatgttcag

SEQ ID NO: 1747443 - DNA, 15 bp, Homo sapiens
tcccaaatgttcagc

SEQ ID NO: 1747444 - DNA, 15 bp, Homo sapiens
cccaaatgttcagct

SEQ ID NO: 1747445 - DNA, 15 bp, Homo sapiens
ccaaatgttcagcta

SEQ ID NO: 1747446 - DNA, 15 bp, Homo sapiens
caaatgttcagctac

SEQ ID NO: 1747447 - DNA, 15 bp, Homo sapiens
aaatgttcagctact

SEQ ID NO: 1747448 - DNA, 15 bp, Homo sapiens
aatgttcagctactc

SEQ ID NO: 1747449 - DNA, 15 bp, Homo sapiens
atgttcagctactcc

SEQ ID NO: 1747450 - DNA, 15 bp, Homo sapiens
tgttcagctactcca

SEQ ID NO: 1747451 - DNA, 15 bp, Homo sapiens
gttcagctactccaa

SEQ ID NO: 1747452 - DNA, 15 bp, Homo sapiens
ttcagctactccaaa

SEQ ID NO: 1747453 - DNA, 15 bp, Homo sapiens
tcagctactccaaaa

SEQ ID NO: 1747454 - DNA, 15 bp, Homo sapiens
cagctactccaaaat

SEQ ID NO: 1747455 - DNA, 15 bp, Homo sapiens
agctactccaaaatt

SEQ ID NO: 1747456 - DNA, 15 bp, Homo sapiens
gctactccaaaattg

SEQ ID NO: 1747457 - DNA, 15 bp, Homo sapiens
ctactccaaaattgt

SEQ ID NO: 1747458 - DNA, 15 bp, Homo sapiens
tactccaaaattgta

SEQ ID NO: 1747459 - DNA, 15 bp, Homo sapiens
actccaaaattgtaa

SEQ ID NO: 1747460 - DNA, 15 bp, Homo sapiens
ctccaaaattgtaac

SEQ ID NO: 1747461 - DNA, 15 bp, Homo sapiens
tccaaaattgtaaca

SEQ ID NO: 1747462 - DNA, 15 bp, Homo sapiens
ccaaaattgtaacat

SEQ ID NO: 1747463 - DNA, 15 bp, Homo sapiens
caaaattgtaacatt

SEQ ID NO: 1747464 - DNA, 15 bp, Homo sapiens
aaaattgtaacattg

SEQ ID NO: 1747465 - DNA, 15 bp, Homo sapiens
aaattgtaacattga

SEQ ID NO: 1747466 - DNA, 15 bp, Homo sapiens
aattgtaacattgat

SEQ ID NO: 1747467 - DNA, 15 bp, Homo sapiens
attgtaacattgata

SEQ ID NO: 1747468 - DNA, 15 bp, Homo sapiens
ttgtaacattgatat

SEQ ID NO: 1747469 - DNA, 15 bp, Homo sapiens
tgtaacattgatatt

SEQ ID NO: 1747470 - DNA, 15 bp, Homo sapiens
gtaacattgatattt

SEQ ID NO: 1747471 - DNA, 15 bp, Homo sapiens
taacattgatattta

SEQ ID NO: 1747472 - DNA, 15 bp, Homo sapiens
aacattgatatttac

SEQ ID NO: 1747473 - DNA, 15 bp, Homo sapiens
acattgatatttacc

SEQ ID NO: 1747474 - DNA, 15 bp, Homo sapiens
cattgatatttacca

SEQ ID NO: 1747475 - DNA, 15 bp, Homo sapiens
attgatatttaccat

SEQ ID NO: 1747476 - DNA, 15 bp, Homo sapiens
tatttaccatatact

SEQ ID NO: 1747477 - DNA, 15 bp, Homo sapiens
atttaccatatactg

SEQ ID NO: 1747478 - DNA, 15 bp, Homo sapiens
tttaccatatactgc

SEQ ID NO: 1747479 - DNA, 15 bp, Homo sapiens
ttaccatatactgcc

SEQ ID NO: 1747480 - DNA, 15 bp, Homo sapiens
taccatatactgccc

SEQ ID NO: 1747481 - DNA, 15 bp, Homo sapiens
accatatactgcccc

SEQ ID NO: 1747482 - DNA, 15 bp, Homo sapiens
ccatatactgccccc

SEQ ID NO: 1747483 - DNA, 15 bp, Homo sapiens
catatactgccccct

SEQ ID NO: 1747484 - DNA, 15 bp, Homo sapiens
atatactgccccctt

SEQ ID NO: 1747485 - DNA, 15 bp, Homo sapiens
tatactgcccccttc

SEQ ID NO: 1747486 - DNA, 15 bp, Homo sapiens
atactgcccccttca

SEQ ID NO: 1747487 - DNA, 15 bp, Homo sapiens
tactgcccccttcat

SEQ ID NO: 1747488 - DNA, 15 bp, Homo sapiens
actgcccccttcata

SEQ ID NO: 1747489 - DNA, 15 bp, Homo sapiens
ctgcccccttcataa

SEQ ID NO: 1747490 - DNA, 15 bp, Homo sapiens
cccccttcataatac

SEQ ID NO: 1747491 - DNA, 15 bp, Homo sapiens
ccccttcataataca

SEQ ID NO: 1747492 - DNA, 15 bp, Homo sapiens
cccttcataatacac

SEQ ID NO: 1747493 - DNA, 15 bp, Homo sapiens
ccttcataatacaca

SEQ ID NO: 1747494 - DNA, 15 bp, Homo sapiens
cttcataatacacac

SEQ ID NO: 1747495 - DNA, 15 bp, Homo sapiens
ttcataatacacaca

SEQ ID NO: 1747496 - DNA, 15 bp, Homo sapiens
tcataatacacacac

SEQ ID NO: 1747497 - DNA, 15 bp, Homo sapiens
cataatacacacaca

SEQ ID NO: 1747498 - DNA, 15 bp, Homo sapiens
ataatacacacacat

SEQ ID NO: 1747499 - DNA, 15 bp, Homo sapiens
taatacacacacata

SEQ ID NO: 1747500 - DNA, 15 bp, Homo sapiens
aatacacacacataa

SEQ ID NO: 1747501 - DNA, 15 bp, Homo sapiens
atacacacacataaa

SEQ ID NO: 1747502 - DNA, 15 bp, Homo sapiens
tacacacacataaaa

SEQ ID NO: 1747503 - DNA, 15 bp, Homo sapiens
acacacacataaaat

SEQ ID NO: 1747504 - DNA, 15 bp, Homo sapiens
cacacacataaaatt

SEQ ID NO: 1747505 - DNA, 15 bp, Homo sapiens
acacacataaaatta

SEQ ID NO: 1747506 - DNA, 15 bp, Homo sapiens
cacacataaaattat

SEQ ID NO: 1747507 - DNA, 15 bp, Homo sapiens
acacataaaattata

SEQ ID NO: 1747508 - DNA, 15 bp, Homo sapiens
cacataaaattatag

SEQ ID NO: 1747509 - DNA, 15 bp, Homo sapiens
acataaaattataga

SEQ ID NO: 1747510 - DNA, 15 bp, Homo sapiens
cataaaattatagaa

SEQ ID NO: 1747511 - DNA, 15 bp, Homo sapiens
ataaaattatagaat

SEQ ID NO: 1747512 - DNA, 15 bp, Homo sapiens
taaaattatagaatt

SEQ ID NO: 1747513 - DNA, 15 bp, Homo sapiens
aaaattatagaatta

SEQ ID NO: 1747514 - DNA, 15 bp, Homo sapiens
aaattatagaattaa

SEQ ID NO: 1747515 - DNA, 15 bp, Homo sapiens
aattatagaattaac

SEQ ID NO: 1747516 - DNA, 15 bp, Homo sapiens
attatagaattaaca

SEQ ID NO: 1747517 - DNA, 15 bp, Homo sapiens
ttatagaattaacaa

SEQ ID NO: 1747518 - DNA, 15 bp, Homo sapiens
tatagaattaacaag

SEQ ID NO: 1747519 - DNA, 15 bp, Homo sapiens
atagaattaacaaga

SEQ ID NO: 1747520 - DNA, 15 bp, Homo sapiens
tagaattaacaagat

SEQ ID NO: 1747521 - DNA, 15 bp, Homo sapiens
agaattaacaagatc

SEQ ID NO: 1747522 - DNA, 15 bp, Homo sapiens
gaattaacaagatct

SEQ ID NO: 1747523 - DNA, 15 bp, Homo sapiens
aattaacaagatctt

SEQ ID NO: 1747524 - DNA, 15 bp, Homo sapiens
attaacaagatctta

SEQ ID NO: 1747525 - DNA, 15 bp, Homo sapiens
ttaacaagatcttaa

SEQ ID NO: 1747526 - DNA, 15 bp, Homo sapiens
taacaagatcttaag

SEQ ID NO: 1747527 - DNA, 15 bp, Homo sapiens
aacaagatcttaaga

SEQ ID NO: 1747528 - DNA, 15 bp, Homo sapiens
acaagatcttaagag

SEQ ID NO: 1747529 - DNA, 15 bp, Homo sapiens
caagatcttaagaga

SEQ ID NO: 1747530 - DNA, 15 bp, Homo sapiens
aagatcttaagagat

SEQ ID NO: 1747531 - DNA, 15 bp, Homo sapiens
agatcttaagagatt

SEQ ID NO: 1747532 - DNA, 15 bp, Homo sapiens
gatcttaagagattg

SEQ ID NO: 1747533 - DNA, 15 bp, Homo sapiens
atcttaagagattga

SEQ ID NO: 1747534 - DNA, 15 bp, Homo sapiens
tcttaagagattgac

SEQ ID NO: 1747535 - DNA, 15 bp, Homo sapiens
cttaagagattgacc

SEQ ID NO: 1747536 - DNA, 15 bp, Homo sapiens
ttaagagattgacct

SEQ ID NO: 1747537 - DNA, 15 bp, Homo sapiens
taagagattgaccta

SEQ ID NO: 1747538 - DNA, 15 bp, Homo sapiens
aagagattgacctaa

SEQ ID NO: 1747539 - DNA, 15 bp, Homo sapiens
agagattgacctaat

SEQ ID NO: 1747540 - DNA, 15 bp, Homo sapiens
gagattgacctaatt

SEQ ID NO: 1747541 - DNA, 15 bp, Homo sapiens
agattgacctaattt

SEQ ID NO: 1747542 - DNA, 15 bp, Homo sapiens
gattgacctaatttt

SEQ ID NO: 1747543 - DNA, 15 bp, Homo sapiens
attgacctaatttta

SEQ ID NO: 1747544 - DNA, 15 bp, Homo sapiens
ttgacctaattttat

SEQ ID NO: 1747545 - DNA, 15 bp, Homo sapiens
tgacctaattttatg

SEQ ID NO: 1747546 - DNA, 15 bp, Homo sapiens
gacctaattttatgc

SEQ ID NO: 1747547 - DNA, 15 bp, Homo sapiens
acctaattttatgct

SEQ ID NO: 1747548 - DNA, 15 bp, Homo sapiens
cctaattttatgctg

SEQ ID NO: 1747549 - DNA, 15 bp, Homo sapiens
ctaattttatgctgt

SEQ ID NO: 1747550 - DNA, 15 bp, Homo sapiens
taattttatgctgtg

SEQ ID NO: 1747551 - DNA, 15 bp, Homo sapiens
aattttatgctgtga

SEQ ID NO: 1747552 - DNA, 15 bp, Homo sapiens
attttatgctgtgaa

SEQ ID NO: 1747553 - DNA, 15 bp, Homo sapiens
ttttatgctgtgaaa

SEQ ID NO: 1747554 - DNA, 15 bp, Homo sapiens
tttatgctgtgaaag

SEQ ID NO: 1747555 - DNA, 15 bp, Homo sapiens
ttatgctgtgaaagt

SEQ ID NO: 1747556 - DNA, 15 bp, Homo sapiens
tatgctgtgaaagtg

SEQ ID NO: 1747557 - DNA, 15 bp, Homo sapiens
atgctgtgaaagtgg

SEQ ID NO: 1747558 - DNA, 15 bp, Homo sapiens
tgctgtgaaagtggt

SEQ ID NO: 1747559 - DNA, 15 bp, Homo sapiens
gctgtgaaagtggtg

SEQ ID NO: 1747560 - DNA, 15 bp, Homo sapiens
ctgtgaaagtggtga

SEQ ID NO: 1747561 - DNA, 15 bp, Homo sapiens
tgtgaaagtggtgat

SEQ ID NO: 1747562 - DNA, 15 bp, Homo sapiens
gtgaaagtggtgatt

SEQ ID NO: 1747563 - DNA, 15 bp, Homo sapiens
tgaaagtggtgattt

SEQ ID NO: 1747564 - DNA, 15 bp, Homo sapiens
gaaagtggtgatttt

SEQ ID NO: 1747565 - DNA, 15 bp, Homo sapiens
aaagtggtgattttt

SEQ ID NO: 1747566 - DNA, 15 bp, Homo sapiens
aagtggtgattttta

SEQ ID NO: 1747567 - DNA, 15 bp, Homo sapiens
agtggtgatttttaa

SEQ ID NO: 1747568 - DNA, 15 bp, Homo sapiens
gtggtgatttttaaa

SEQ ID NO: 1747569 - DNA, 15 bp, Homo sapiens
tggtgatttttaaat

SEQ ID NO: 1747570 - DNA, 15 bp, Homo sapiens
ggtgatttttaaatg

SEQ ID NO: 1747571 - DNA, 15 bp, Homo sapiens
gtgatttttaaatgt

SEQ ID NO: 1747572 - DNA, 15 bp, Homo sapiens
tgatttttaaatgta

SEQ ID NO: 1747573 - DNA, 15 bp, Homo sapiens
gatttttaaatgtat

SEQ ID NO: 1747574 - DNA, 15 bp, Homo sapiens
atttttaaatgtatc

SEQ ID NO: 1747575 - DNA, 15 bp, Homo sapiens
tttttaaatgtatcc

SEQ ID NO: 1747576 - DNA, 15 bp, Homo sapiens
ttttaaatgtatcca

SEQ ID NO: 1747577 - DNA, 15 bp, Homo sapiens
tttaaatgtatccag

SEQ ID NO: 1747578 - DNA, 15 bp, Homo sapiens
ttaaatgtatccagg

SEQ ID NO: 1747579 - DNA, 15 bp, Homo sapiens
taaatgtatccagga

SEQ ID NO: 1747580 - DNA, 15 bp, Homo sapiens
aaatgtatccaggat

SEQ ID NO: 1747581 - DNA, 15 bp, Homo sapiens
aatgtatccaggatc

SEQ ID NO: 1747582 - DNA, 15 bp, Homo sapiens
atgtatccaggatct

SEQ ID NO: 1747583 - DNA, 15 bp, Homo sapiens
tgtatccaggatctt

SEQ ID NO: 1747584 - DNA, 15 bp, Homo sapiens
gtatccaggatctta

SEQ ID NO: 1747585 - DNA, 15 bp, Homo sapiens
tatccaggatcttag

SEQ ID NO: 1747586 - DNA, 15 bp, Homo sapiens
atccaggatcttagt

SEQ ID NO: 1747587 - DNA, 15 bp, Homo sapiens
tccaggatcttagta

SEQ ID NO: 1747588 - DNA, 15 bp, Homo sapiens
ccaggatcttagtat

SEQ ID NO: 1747589 - DNA, 15 bp, Homo sapiens
caggatcttagtatc

SEQ ID NO: 1747590 - DNA, 15 bp, Homo sapiens
aggatcttagtatcc

SEQ ID NO: 1747591 - DNA, 15 bp, Homo sapiens
ggatcttagtatcct

SEQ ID NO: 1747592 - DNA, 15 bp, Homo sapiens
gatcttagtatcctt

SEQ ID NO: 1747593 - DNA, 15 bp, Homo sapiens
atcttagtatccttt

SEQ ID NO: 1747594 - DNA, 15 bp, Homo sapiens
tcttagtatcctttc

SEQ ID NO: 1747595 - DNA, 15 bp, Homo sapiens
cttagtatcctttct

SEQ ID NO: 1747596 - DNA, 15 bp, Homo sapiens
ttagtatcctttctt

SEQ ID NO: 1747597 - DNA, 15 bp, Homo sapiens
tagtatcctttcttc

SEQ ID NO: 1747598 - DNA, 15 bp, Homo sapiens
agtatcctttcttct

SEQ ID NO: 1747599 - DNA, 15 bp, Homo sapiens
gtatcctttcttctt

SEQ ID NO: 1747600 - DNA, 15 bp, Homo sapiens
tatcctttcttcttg

SEQ ID NO: 1747601 - DNA, 15 bp, Homo sapiens
atcctttcttcttga

SEQ ID NO: 1747602 - DNA, 15 bp, Homo sapiens
tcctttcttcttgaa

SEQ ID NO: 1747603 - DNA, 15 bp, Homo sapiens
cctttcttcttgaag

SEQ ID NO: 1747604 - DNA, 15 bp, Homo sapiens
ctttcttcttgaagg

SEQ ID NO: 1747605 - DNA, 15 bp, Homo sapiens
tttcttcttgaaggt

SEQ ID NO: 1747606 - DNA, 15 bp, Homo sapiens
ttcttcttgaaggtc

SEQ ID NO: 1747607 - DNA, 15 bp, Homo sapiens
tcttcttgaaggtct

SEQ ID NO: 1747608 - DNA, 15 bp, Homo sapiens
cttcttgaaggtctc

SEQ ID NO: 1747609 - DNA, 15 bp, Homo sapiens
ttcttgaaggtctct

SEQ ID NO: 1747610 - DNA, 15 bp, Homo sapiens
tcttgaaggtctctg

SEQ ID NO: 1747611 - DNA, 15 bp, Homo sapiens
cttgaaggtctctgt

SEQ ID NO: 1747612 - DNA, 15 bp, Homo sapiens
ttgaaggtctctgta

SEQ ID NO: 1747613 - DNA, 15 bp, Homo sapiens
tgaaggtctctgtaa

SEQ ID NO: 1747614 - DNA, 15 bp, Homo sapiens
gaaggtctctgtaaa

SEQ ID NO: 1747615 - DNA, 15 bp, Homo sapiens
aaggtctctgtaaag

SEQ ID NO: 1747616 - DNA, 15 bp, Homo sapiens
aggtctctgtaaaga

SEQ ID NO: 1747617 - DNA, 15 bp, Homo sapiens
ggtctctgtaaagaa

SEQ ID NO: 1747618 - DNA, 15 bp, Homo sapiens
gtctctgtaaagaaa

SEQ ID NO: 1747619 - DNA, 15 bp, Homo sapiens
tctctgtaaagaaaa

SEQ ID NO: 1747620 - DNA, 15 bp, Homo sapiens
ctctgtaaagaaaaa

SEQ ID NO: 1747621 - DNA, 15 bp, Homo sapiens
tctgtaaagaaaaat

SEQ ID NO: 1747622 - DNA, 15 bp, Homo sapiens
ctgtaaagaaaaatc

SEQ ID NO: 1747623 - DNA, 15 bp, Homo sapiens
tgtaaagaaaaatca

SEQ ID NO: 1747624 - DNA, 15 bp, Homo sapiens
gtaaagaaaaatcat

SEQ ID NO: 1747625 - DNA, 15 bp, Homo sapiens
taaagaaaaatcatc

SEQ ID NO: 1747626 - DNA, 15 bp, Homo sapiens
aaagaaaaatcatct

SEQ ID NO: 1747627 - DNA, 15 bp, Homo sapiens
aagaaaaatcatctg

SEQ ID NO: 1747628 - DNA, 15 bp, Homo sapiens
agaaaaatcatctga

SEQ ID NO: 1747629 - DNA, 15 bp, Homo sapiens
gaaaaatcatctgat

SEQ ID NO: 1747630 - DNA, 15 bp, Homo sapiens
aaaaatcatctgatt

SEQ ID NO: 1747631 - DNA, 15 bp, Homo sapiens
aaaatcatctgattc

SEQ ID NO: 1747632 - DNA, 15 bp, Homo sapiens
aaatcatctgattct

SEQ ID NO: 1747633 - DNA, 15 bp, Homo sapiens
aatcatctgattctt

SEQ ID NO: 1747634 - DNA, 15 bp, Homo sapiens
atcatctgattcttt

SEQ ID NO: 1747635 - DNA, 15 bp, Homo sapiens
tcatctgattcttta

SEQ ID NO: 1747636 - DNA, 15 bp, Homo sapiens
catctgattctttac

SEQ ID NO: 1747637 - DNA, 15 bp, Homo sapiens
atctgattctttact

SEQ ID NO: 1747638 - DNA, 15 bp, Homo sapiens
tctgattctttactt

SEQ ID NO: 1747639 - DNA, 15 bp, Homo sapiens
ctgattctttacttg

SEQ ID NO: 1747640 - DNA, 15 bp, Homo sapiens
tgattctttacttga

SEQ ID NO: 1747641 - DNA, 15 bp, Homo sapiens
gattctttacttgag

SEQ ID NO: 1747642 - DNA, 15 bp, Homo sapiens
attctttacttgagt

SEQ ID NO: 1747643 - DNA, 15 bp, Homo sapiens
ttctttacttgagtt

SEQ ID NO: 1747644 - DNA, 15 bp, Homo sapiens
tctttacttgagttg

SEQ ID NO: 1747645 - DNA, 15 bp, Homo sapiens
ctttacttgagttgc

SEQ ID NO: 1747646 - DNA, 15 bp, Homo sapiens
tttacttgagttgct

SEQ ID NO: 1747647 - DNA, 15 bp, Homo sapiens
ttacttgagttgcta

SEQ ID NO: 1747648 - DNA, 15 bp, Homo sapiens
tacttgagttgctaa

SEQ ID NO: 1747649 - DNA, 15 bp, Homo sapiens
acttgagttgctaag

SEQ ID NO: 1747650 - DNA, 15 bp, Homo sapiens
cttgagttgctaagt

SEQ ID NO: 1747651 - DNA, 15 bp, Homo sapiens
ttgagttgctaagta

SEQ ID NO: 1747652 - DNA, 15 bp, Homo sapiens
tgagttgctaagtat

SEQ ID NO: 1747653 - DNA, 15 bp, Homo sapiens
gagttgctaagtatc

SEQ ID NO: 1747654 - DNA, 15 bp, Homo sapiens
agttgctaagtatct

SEQ ID NO: 1747655 - DNA, 15 bp, Homo sapiens
gttgctaagtatctt

SEQ ID NO: 1747656 - DNA, 15 bp, Homo sapiens
ttgctaagtatctta

SEQ ID NO: 1747657 - DNA, 15 bp, Homo sapiens
tgctaagtatcttat

SEQ ID NO: 1747658 - DNA, 15 bp, Homo sapiens
gctaagtatcttatt

SEQ ID NO: 1747659 - DNA, 15 bp, Homo sapiens
ctaagtatcttattg

SEQ ID NO: 1747660 - DNA, 15 bp, Homo sapiens
taagtatcttattgt

SEQ ID NO: 1747661 - DNA, 15 bp, Homo sapiens
aagtatcttattgtc

SEQ ID NO: 1747662 - DNA, 15 bp, Homo sapiens
agtatcttattgtct

SEQ ID NO: 1747663 - DNA, 15 bp, Homo sapiens
gtatcttattgtctt

SEQ ID NO: 1747664 - DNA, 15 bp, Homo sapiens
tatcttattgtcttt

SEQ ID NO: 1747665 - DNA, 15 bp, Homo sapiens
atcttattgtcttta

SEQ ID NO: 1747666 - DNA, 15 bp, Homo sapiens
tcttattgtctttaa

SEQ ID NO: 1747667 - DNA, 15 bp, Homo sapiens
cttattgtctttaat

SEQ ID NO: 1747668 - DNA, 15 bp, Homo sapiens
ttattgtctttaatt

SEQ ID NO: 1747669 - DNA, 15 bp, Homo sapiens
tattgtctttaattt

SEQ ID NO: 1747670 - DNA, 15 bp, Homo sapiens
attgtctttaatttg

SEQ ID NO: 1747671 - DNA, 15 bp, Homo sapiens
ttgtctttaatttga

SEQ ID NO: 1747672 - DNA, 15 bp, Homo sapiens
tgtctttaatttgaa

SEQ ID NO: 1747673 - DNA, 15 bp, Homo sapiens
gtctttaatttgaaa

SEQ ID NO: 1747674 - DNA, 15 bp, Homo sapiens
tctttaatttgaaaa

SEQ ID NO: 1747675 - DNA, 15 bp, Homo sapiens
ctttaatttgaaaat

SEQ ID NO: 1747676 - DNA, 15 bp, Homo sapiens
tttaatttgaaaatg

SEQ ID NO: 1747677 - DNA, 15 bp, Homo sapiens
ttaatttgaaaatgt

SEQ ID NO: 1747678 - DNA, 15 bp, Homo sapiens
taatttgaaaatgtt

SEQ ID NO: 1747679 - DNA, 15 bp, Homo sapiens
aatttgaaaatgttt

SEQ ID NO: 1747680 - DNA, 15 bp, Homo sapiens
atttgaaaatgttta

SEQ ID NO: 1747681 - DNA, 15 bp, Homo sapiens
tttgaaaatgtttaa

SEQ ID NO: 1747682 - DNA, 15 bp, Homo sapiens
ttgaaaatgtttaat

SEQ ID NO: 1747683 - DNA, 15 bp, Homo sapiens
tgaaaatgtttaata

SEQ ID NO: 1747684 - DNA, 15 bp, Homo sapiens
gaaaatgtttaatat

SEQ ID NO: 1747685 - DNA, 15 bp, Homo sapiens
aaaatgtttaatatt

SEQ ID NO: 1747686 - DNA, 15 bp, Homo sapiens
aaatgtttaatattt

SEQ ID NO: 1747687 - DNA, 15 bp, Homo sapiens
aatgtttaatatttg

SEQ ID NO: 1747688 - DNA, 15 bp, Homo sapiens
atgtttaatatttgg

SEQ ID NO: 1747689 - DNA, 15 bp, Homo sapiens
tgtttaatatttggt

SEQ ID NO: 1747690 - DNA, 15 bp, Homo sapiens
gtttaatatttggtt

SEQ ID NO: 1747691 - DNA, 15 bp, Homo sapiens
tttaatatttggttg

SEQ ID NO: 1747692 - DNA, 15 bp, Homo sapiens
ttaatatttggttgt

SEQ ID NO: 1747693 - DNA, 15 bp, Homo sapiens
taatatttggttgta

SEQ ID NO: 1747694 - DNA, 15 bp, Homo sapiens
aatatttggttgtaa

SEQ ID NO: 1747695 - DNA, 15 bp, Homo sapiens
atatttggttgtaat

SEQ ID NO: 1747696 - DNA, 15 bp, Homo sapiens
tatttggttgtaata

SEQ ID NO: 1747697 - DNA, 15 bp, Homo sapiens
atttggttgtaataa

SEQ ID NO: 1747698 - DNA, 15 bp, Homo sapiens
tttggttgtaataat

SEQ ID NO: 1747699 - DNA, 15 bp, Homo sapiens
ttggttgtaataatg

SEQ ID NO: 1747700 - DNA, 15 bp, Homo sapiens
tggttgtaataatgt

SEQ ID NO: 1747701 - DNA, 15 bp, Homo sapiens
ggttgtaataatgtt

SEQ ID NO: 1747702 - DNA, 15 bp, Homo sapiens
gttgtaataatgttt

SEQ ID NO: 1747703 - DNA, 15 bp, Homo sapiens
ttgtaataatgtttt

SEQ ID NO: 1747704 - DNA, 15 bp, Homo sapiens
tgtaataatgttttc

SEQ ID NO: 1747705 - DNA, 15 bp, Homo sapiens
gtaataatgttttct

SEQ ID NO: 1747706 - DNA, 15 bp, Homo sapiens
taataatgttttctt

SEQ ID NO: 1747707 - DNA, 15 bp, Homo sapiens
aataatgttttctta

SEQ ID NO: 1747708 - DNA, 15 bp, Homo sapiens
ataatgttttcttaa

SEQ ID NO: 1747709 - DNA, 15 bp, Homo sapiens
taatgttttcttaaa

SEQ ID NO: 1747710 - DNA, 15 bp, Homo sapiens
aatgttttcttaaaa

SEQ ID NO: 1747711 - DNA, 15 bp, Homo sapiens
atgttttcttaaaac

SEQ ID NO: 1747712 - DNA, 15 bp, Homo sapiens
tgttttcttaaaaca

SEQ ID NO: 1747713 - DNA, 15 bp, Homo sapiens
gttttcttaaaacaa

SEQ ID NO: 1747714 - DNA, 15 bp, Homo sapiens
ttttcttaaaacaat

SEQ ID NO: 1747715 - DNA, 15 bp, Homo sapiens
tttcttaaaacaata

SEQ ID NO: 1747716 - DNA, 15 bp, Homo sapiens
ttcttaaaacaatac

SEQ ID NO: 1747717 - DNA, 15 bp, Homo sapiens
tcttaaaacaatacc

SEQ ID NO: 1747718 - DNA, 15 bp, Homo sapiens
cttaaaacaatacca

SEQ ID NO: 1747719 - DNA, 15 bp, Homo sapiens
ttaaaacaataccat

SEQ ID NO: 1747720 - DNA, 15 bp, Homo sapiens
taaaacaataccatt

SEQ ID NO: 1747721 - DNA, 15 bp, Homo sapiens
aaaacaataccattt

SEQ ID NO: 1747722 - DNA, 15 bp, Homo sapiens
aaacaataccatttt

SEQ ID NO: 1747723 - DNA, 15 bp, Homo sapiens
aacaataccattttg

SEQ ID NO: 1747724 - DNA, 15 bp, Homo sapiens
acaataccattttgt

SEQ ID NO: 1747725 - DNA, 15 bp, Homo sapiens
caataccattttgtt

SEQ ID NO: 1747726 - DNA, 15 bp, Homo sapiens
aataccattttgttg

SEQ ID NO: 1747727 - DNA, 15 bp, Homo sapiens
ataccattttgttgc

SEQ ID NO: 1747728 - DNA, 15 bp, Homo sapiens
taccattttgttgcc

SEQ ID NO: 1747729 - DNA, 15 bp, Homo sapiens
accattttgttgcca

SEQ ID NO: 1747730 - DNA, 15 bp, Homo sapiens
ccattttgttgccag

SEQ ID NO: 1747731 - DNA, 15 bp, Homo sapiens
cattttgttgccagt

SEQ ID NO: 1747732 - DNA, 15 bp, Homo sapiens
attttgttgccagtt

SEQ ID NO: 1747733 - DNA, 15 bp, Homo sapiens
ttttgttgccagttt

SEQ ID NO: 1747734 - DNA, 15 bp, Homo sapiens
tttgttgccagttta

SEQ ID NO: 1747735 - DNA, 15 bp, Homo sapiens
ttgttgccagtttat

SEQ ID NO: 1747736 - DNA, 15 bp, Homo sapiens
tgttgccagtttata

SEQ ID NO: 1747737 - DNA, 15 bp, Homo sapiens
gttgccagtttatat

SEQ ID NO: 1747738 - DNA, 15 bp, Homo sapiens
ttgccagtttatata

SEQ ID NO: 1747739 - DNA, 15 bp, Homo sapiens
tgccagtttatatag

SEQ ID NO: 1747740 - DNA, 15 bp, Homo sapiens
gccagtttatatagt

SEQ ID NO: 1747741 - DNA, 15 bp, Homo sapiens
ccagtttatatagtt

SEQ ID NO: 1747742 - DNA, 15 bp, Homo sapiens
cagtttatatagttt

SEQ ID NO: 1747743 - DNA, 15 bp, Homo sapiens
agtttatatagtttc

SEQ ID NO: 1747744 - DNA, 15 bp, Homo sapiens
gtttatatagtttct

SEQ ID NO: 1747745 - DNA, 15 bp, Homo sapiens
tttatatagtttctc

SEQ ID NO: 1747746 - DNA, 15 bp, Homo sapiens
ttatatagtttctcc

SEQ ID NO: 1747747 - DNA, 15 bp, Homo sapiens
tatatagtttctcct

SEQ ID NO: 1747748 - DNA, 15 bp, Homo sapiens
atatagtttctccta

SEQ ID NO: 1747749 - DNA, 15 bp, Homo sapiens
tatagtttctcctaa

SEQ ID NO: 1747750 - DNA, 15 bp, Homo sapiens
atagtttctcctaaa

SEQ ID NO: 1747751 - DNA, 15 bp, Homo sapiens
tagtttctcctaaaa

SEQ ID NO: 1747752 - DNA, 15 bp, Homo sapiens
agtttctcctaaaaa

SEQ ID NO: 1747753 - DNA, 15 bp, Homo sapiens
gtttctcctaaaaat

SEQ ID NO: 1747754 - DNA, 15 bp, Homo sapiens
tttctcctaaaaata

SEQ ID NO: 1747755 - DNA, 15 bp, Homo sapiens
ttctcctaaaaataa

SEQ ID NO: 1747756 - DNA, 15 bp, Homo sapiens
tctcctaaaaataat

SEQ ID NO: 1747757 - DNA, 15 bp, Homo sapiens
ctcctaaaaataatg

SEQ ID NO: 1747758 - DNA, 15 bp, Homo sapiens
tcctaaaaataatgc

SEQ ID NO: 1747759 - DNA, 15 bp, Homo sapiens
cctaaaaataatgcc

SEQ ID NO: 1747760 - DNA, 15 bp, Homo sapiens
ctaaaaataatgcca

SEQ ID NO: 1747761 - DNA, 15 bp, Homo sapiens
taaaaataatgccac

SEQ ID NO: 1747762 - DNA, 15 bp, Homo sapiens
aaaaataatgccact

SEQ ID NO: 1747763 - DNA, 15 bp, Homo sapiens
aaaataatgccacta

SEQ ID NO: 1747764 - DNA, 15 bp, Homo sapiens
aaataatgccactat

SEQ ID NO: 1747765 - DNA, 15 bp, Homo sapiens
aataatgccactatt

SEQ ID NO: 1747766 - DNA, 15 bp, Homo sapiens
ataatgccactattt

SEQ ID NO: 1747767 - DNA, 15 bp, Homo sapiens
taatgccactatttt

SEQ ID NO: 1747768 - DNA, 15 bp, Homo sapiens
aatgccactatttta

SEQ ID NO: 1747769 - DNA, 15 bp, Homo sapiens
atgccactattttat

SEQ ID NO: 1747770 - DNA, 15 bp, Homo sapiens
tgccactattttatt

SEQ ID NO: 1747771 - DNA, 15 bp, Homo sapiens
gccactattttattg

SEQ ID NO: 1747772 - DNA, 15 bp, Homo sapiens
ccactattttattga

SEQ ID NO: 1747773 - DNA, 15 bp, Homo sapiens
cactattttattgat

SEQ ID NO: 1747774 - DNA, 15 bp, Homo sapiens
actattttattgata

SEQ ID NO: 1747775 - DNA, 15 bp, Homo sapiens
ctattttattgatat

SEQ ID NO: 1747776 - DNA, 15 bp, Homo sapiens
tattttattgatatg

SEQ ID NO: 1747777 - DNA, 15 bp, Homo sapiens
attttattgatatgt

SEQ ID NO: 1747778 - DNA, 15 bp, Homo sapiens
ttttattgatatgta

SEQ ID NO: 1747779 - DNA, 15 bp, Homo sapiens
tttattgatatgtag

SEQ ID NO: 1747780 - DNA, 15 bp, Homo sapiens
ttattgatatgtagt

SEQ ID NO: 1747781 - DNA, 15 bp, Homo sapiens
tattgatatgtagtt

SEQ ID NO: 1747782 - DNA, 15 bp, Homo sapiens
attgatatgtagttt

SEQ ID NO: 1747783 - DNA, 15 bp, Homo sapiens
ttgatatgtagtttt

SEQ ID NO: 1747784 - DNA, 15 bp, Homo sapiens
tgatatgtagtttta

SEQ ID NO: 1747785 - DNA, 15 bp, Homo sapiens
gatatgtagttttat

SEQ ID NO: 1747786 - DNA, 15 bp, Homo sapiens
atatgtagttttatt

SEQ ID NO: 1747787 - DNA, 15 bp, Homo sapiens
tatgtagttttatta

SEQ ID NO: 1747788 - DNA, 15 bp, Homo sapiens
atgtagttttattag

SEQ ID NO: 1747789 - DNA, 15 bp, Homo sapiens
tgtagttttattagt

SEQ ID NO: 1747790 - DNA, 15 bp, Homo sapiens
gtagttttattagta

SEQ ID NO: 1747791 - DNA, 15 bp, Homo sapiens
tagttttattagtaa

SEQ ID NO: 1747792 - DNA, 15 bp, Homo sapiens
agttttattagtaaa

SEQ ID NO: 1747793 - DNA, 15 bp, Homo sapiens
gttttattagtaaat

SEQ ID NO: 1747794 - DNA, 15 bp, Homo sapiens
ttttattagtaaata

SEQ ID NO: 1747795 - DNA, 15 bp, Homo sapiens
tttattagtaaataa

SEQ ID NO: 1747796 - DNA, 15 bp, Homo sapiens
ttattagtaaataag

SEQ ID NO: 1747797 - DNA, 15 bp, Homo sapiens
tattagtaaataagt

SEQ ID NO: 1747798 - DNA, 15 bp, Homo sapiens
attagtaaataagta

SEQ ID NO: 1747799 - DNA, 15 bp, Homo sapiens
ttagtaaataagtat

SEQ ID NO: 1747800 - DNA, 15 bp, Homo sapiens
tagtaaataagtata

SEQ ID NO: 1747801 - DNA, 15 bp, Homo sapiens
agtaaataagtatat

SEQ ID NO: 1747802 - DNA, 15 bp, Homo sapiens
ggaggccaaggtggt

SEQ ID NO: 1747803 - DNA, 15 bp, Homo sapiens
gaggccaaggtggtt

SEQ ID NO: 1747804 - DNA, 15 bp, Homo sapiens
aggccaaggtggttg

SEQ ID NO: 1747805 - DNA, 15 bp, Homo sapiens
ggccaaggtggttgg

SEQ ID NO: 1747806 - DNA, 15 bp, Homo sapiens
gccaaggtggttgga

SEQ ID NO: 1747807 - DNA, 15 bp, Homo sapiens
ccaaggtggttggat

SEQ ID NO: 1747808 - DNA, 15 bp, Homo sapiens
caaggtggttggatc

SEQ ID NO: 1747809 - DNA, 15 bp, Homo sapiens
aaggtggttggatca

SEQ ID NO: 1747810 - DNA, 15 bp, Homo sapiens
ggtggttggatcacc

SEQ ID NO: 1747811 - DNA, 15 bp, Homo sapiens
gtggttggatcacct

SEQ ID NO: 1747812 - DNA, 15 bp, Homo sapiens
tggttggatcacctg

SEQ ID NO: 1747813 - DNA, 15 bp, Homo sapiens
ggttggatcacctga

SEQ ID NO: 1747814 - DNA, 15 bp, Homo sapiens
gttggatcacctgaa

SEQ ID NO: 1747815 - DNA, 15 bp, Homo sapiens
ttggatcacctgaaa

SEQ ID NO: 1747816 - DNA, 15 bp, Homo sapiens
tggatcacctgaaat

SEQ ID NO: 1747817 - DNA, 15 bp, Homo sapiens
ggatcacctgaaatc

SEQ ID NO: 1747818 - DNA, 15 bp, Homo sapiens
gatcacctgaaatca

SEQ ID NO: 1747819 - DNA, 15 bp, Homo sapiens
atcacctgaaatcag

SEQ ID NO: 1747820 - DNA, 15 bp, Homo sapiens
tcacctgaaatcagg

SEQ ID NO: 1747821 - DNA, 15 bp, Homo sapiens
cacctgaaatcagga

SEQ ID NO: 1747822 - DNA, 15 bp, Homo sapiens
acctgaaatcaggag

SEQ ID NO: 1747823 - DNA, 15 bp, Homo sapiens
cctgaaatcaggagt

SEQ ID NO: 1747824 - DNA, 15 bp, Homo sapiens
ctgaaatcaggagtt

SEQ ID NO: 1747825 - DNA, 15 bp, Homo sapiens
tgaaatcaggagttc

SEQ ID NO: 1747826 - DNA, 15 bp, Homo sapiens
gaaatcaggagttcg

SEQ ID NO: 1747827 - DNA, 15 bp, Homo sapiens
aaatcaggagttcga

SEQ ID NO: 1747828 - DNA, 15 bp, Homo sapiens
aatcaggagttcgag

SEQ ID NO: 1747829 - DNA, 15 bp, Homo sapiens
gagttcgagaccagg

SEQ ID NO: 1747830 - DNA, 15 bp, Homo sapiens
agttcgagaccaggc

SEQ ID NO: 1747831 - DNA, 15 bp, Homo sapiens
gttcgagaccaggct

SEQ ID NO: 1747832 - DNA, 15 bp, Homo sapiens
ttcgagaccaggctg

SEQ ID NO: 1747833 - DNA, 15 bp, Homo sapiens
tcgagaccaggctgg

SEQ ID NO: 1747834 - DNA, 15 bp, Homo sapiens
cgagaccaggctggt

SEQ ID NO: 1747835 - DNA, 15 bp, Homo sapiens
gagaccaggctggtc

SEQ ID NO: 1747836 - DNA, 15 bp, Homo sapiens
agaccaggctggtca

SEQ ID NO: 1747837 - DNA, 15 bp, Homo sapiens
gaccaggctggtcaa

SEQ ID NO: 1747838 - DNA, 15 bp, Homo sapiens
accaggctggtcaac

SEQ ID NO: 1747839 - DNA, 15 bp, Homo sapiens
ccaggctggtcaaca

SEQ ID NO: 1747840 - DNA, 15 bp, Homo sapiens
caggctggtcaacat

SEQ ID NO: 1747841 - DNA, 15 bp, Homo sapiens
aggctggtcaacatg

SEQ ID NO: 1747842 - DNA, 15 bp, Homo sapiens
ggctggtcaacatgg

SEQ ID NO: 1747843 - DNA, 15 bp, Homo sapiens
atctctactaaagag

SEQ ID NO: 1747844 - DNA, 15 bp, Homo sapiens
tctctactaaagaga

SEQ ID NO: 1747845 - DNA, 15 bp, Homo sapiens
ctctactaaagagac

SEQ ID NO: 1747846 - DNA, 15 bp, Homo sapiens
tctactaaagagaca

SEQ ID NO: 1747847 - DNA, 15 bp, Homo sapiens
ctactaaagagacaa

SEQ ID NO: 1747848 - DNA, 15 bp, Homo sapiens
tactaaagagacaaa

SEQ ID NO: 1747849 - DNA, 15 bp, Homo sapiens
actaaagagacaaaa

SEQ ID NO: 1747850 - DNA, 15 bp, Homo sapiens
ctaaagagacaaaaa

SEQ ID NO: 1747851 - DNA, 15 bp, Homo sapiens
taaagagacaaaaat

SEQ ID NO: 1747852 - DNA, 15 bp, Homo sapiens
aaagagacaaaaatt

SEQ ID NO: 1747853 - DNA, 15 bp, Homo sapiens
aagagacaaaaatta

SEQ ID NO: 1747854 - DNA, 15 bp, Homo sapiens
agagacaaaaattag

SEQ ID NO: 1747855 - DNA, 15 bp, Homo sapiens
gagacaaaaattagt

SEQ ID NO: 1747856 - DNA, 15 bp, Homo sapiens
agacaaaaattagtg

SEQ ID NO: 1747857 - DNA, 15 bp, Homo sapiens
gacaaaaattagtga

SEQ ID NO: 1747858 - DNA, 15 bp, Homo sapiens
acaaaaattagtgag

SEQ ID NO: 1747859 - DNA, 15 bp, Homo sapiens
caaaaattagtgagg

SEQ ID NO: 1747860 - DNA, 15 bp, Homo sapiens
aaaattagtgaggcg

SEQ ID NO: 1747861 - DNA, 15 bp, Homo sapiens
aaattagtgaggcgt

SEQ ID NO: 1747862 - DNA, 15 bp, Homo sapiens
aattagtgaggcgtg

SEQ ID NO: 1747863 - DNA, 15 bp, Homo sapiens
attagtgaggcgtgg

SEQ ID NO: 1747864 - DNA, 15 bp, Homo sapiens
ttagtgaggcgtggt

SEQ ID NO: 1747865 - DNA, 15 bp, Homo sapiens
tagtgaggcgtggtg

SEQ ID NO: 1747866 - DNA, 15 bp, Homo sapiens
agtgaggcgtggtgc

SEQ ID NO: 1747867 - DNA, 15 bp, Homo sapiens
gtgaggcgtggtgcg

SEQ ID NO: 1747868 - DNA, 15 bp, Homo sapiens
tgaggcgtggtgcgc

SEQ ID NO: 1747869 - DNA, 15 bp, Homo sapiens
gaggcgtggtgcgct

SEQ ID NO: 1747870 - DNA, 15 bp, Homo sapiens
aggcgtggtgcgctt

SEQ ID NO: 1747871 - DNA, 15 bp, Homo sapiens
ggcgtggtgcgcttg

SEQ ID NO: 1747872 - DNA, 15 bp, Homo sapiens
gcgtggtgcgcttgc

SEQ ID NO: 1747873 - DNA, 15 bp, Homo sapiens
cgtggtgcgcttgcc

SEQ ID NO: 1747874 - DNA, 15 bp, Homo sapiens
gtggtgcgcttgcct

SEQ ID NO: 1747875 - DNA, 15 bp, Homo sapiens
tggtgcgcttgccta

SEQ ID NO: 1747876 - DNA, 15 bp, Homo sapiens
ggtgcgcttgcctat

SEQ ID NO: 1747877 - DNA, 15 bp, Homo sapiens
gtgcgcttgcctata

SEQ ID NO: 1747878 - DNA, 15 bp, Homo sapiens
tgcgcttgcctataa

SEQ ID NO: 1747879 - DNA, 15 bp, Homo sapiens
gcgcttgcctataat

SEQ ID NO: 1747880 - DNA, 15 bp, Homo sapiens
cgcttgcctataatc

SEQ ID NO: 1747881 - DNA, 15 bp, Homo sapiens
gcttgcctataatcc

SEQ ID NO: 1747882 - DNA, 15 bp, Homo sapiens
cttgcctataatccc

SEQ ID NO: 1747883 - DNA, 15 bp, Homo sapiens
ttgcctataatccca

SEQ ID NO: 1747884 - DNA, 15 bp, Homo sapiens
ccagctacttgggat

SEQ ID NO: 1747885 - DNA, 15 bp, Homo sapiens
cagctacttgggatg

SEQ ID NO: 1747886 - DNA, 15 bp, Homo sapiens
agctacttgggatgc

SEQ ID NO: 1747887 - DNA, 15 bp, Homo sapiens
gctacttgggatgct

SEQ ID NO: 1747888 - DNA, 15 bp, Homo sapiens
ctacttgggatgctg

SEQ ID NO: 1747889 - DNA, 15 bp, Homo sapiens
tacttgggatgctga

SEQ ID NO: 1747890 - DNA, 15 bp, Homo sapiens
acttgggatgctgag

SEQ ID NO: 1747891 - DNA, 15 bp, Homo sapiens
cttgggatgctgagg

SEQ ID NO: 1747892 - DNA, 15 bp, Homo sapiens
ttgggatgctgaggc

SEQ ID NO: 1747893 - DNA, 15 bp, Homo sapiens
tgggatgctgaggca

SEQ ID NO: 1747894 - DNA, 15 bp, Homo sapiens
gggatgctgaggcag

SEQ ID NO: 1747895 - DNA, 15 bp, Homo sapiens
ggatgctgaggcagg

SEQ ID NO: 1747896 - DNA, 15 bp, Homo sapiens
gatgctgaggcagga

SEQ ID NO: 1747897 - DNA, 15 bp, Homo sapiens
atgctgaggcaggag

SEQ ID NO: 1747898 - DNA, 15 bp, Homo sapiens
tgctgaggcaggaga

SEQ ID NO: 1747899 - DNA, 15 bp, Homo sapiens
tgaacttgggaggcg

SEQ ID NO: 1747900 - DNA, 15 bp, Homo sapiens
gaacttgggaggcgg

SEQ ID NO: 1747901 - DNA, 15 bp, Homo sapiens
aacttgggaggcgga

SEQ ID NO: 1747902 - DNA, 15 bp, Homo sapiens
acttgggaggcggag

SEQ ID NO: 1747903 - DNA, 15 bp, Homo sapiens
cttgggaggcggagg

SEQ ID NO: 1747904 - DNA, 15 bp, Homo sapiens
ttgggaggcggaggt

SEQ ID NO: 1747905 - DNA, 15 bp, Homo sapiens
gcggaggttgcagta

SEQ ID NO: 1747906 - DNA, 15 bp, Homo sapiens
cggaggttgcagtaa

SEQ ID NO: 1747907 - DNA, 15 bp, Homo sapiens
ggttgcagtaagccg

SEQ ID NO: 1747908 - DNA, 15 bp, Homo sapiens
gttgcagtaagccga

SEQ ID NO: 1747909 - DNA, 15 bp, Homo sapiens
cagtaagccgagatt

SEQ ID NO: 1747910 - DNA, 15 bp, Homo sapiens
agtaagccgagattg

SEQ ID NO: 1747911 - DNA, 15 bp, Homo sapiens
gtaagccgagattgc

SEQ ID NO: 1747912 - DNA, 15 bp, Homo sapiens
taagccgagattgcg

SEQ ID NO: 1747913 - DNA, 15 bp, Homo sapiens
aagccgagattgcgc

SEQ ID NO: 1747914 - DNA, 15 bp, Homo sapiens
gggcgacagagtgac

SEQ ID NO: 1747915 - DNA, 15 bp, Homo sapiens
ggcgacagagtgaca

SEQ ID NO: 1747916 - DNA, 15 bp, Homo sapiens
gcgacagagtgacac

SEQ ID NO: 1747917 - DNA, 15 bp, Homo sapiens
cgacagagtgacact

SEQ ID NO: 1747918 - DNA, 15 bp, Homo sapiens
gacagagtgacactt

SEQ ID NO: 1747919 - DNA, 15 bp, Homo sapiens
acagagtgacacttc

SEQ ID NO: 1747920 - DNA, 15 bp, Homo sapiens
cagagtgacacttca

SEQ ID NO: 1747921 - DNA, 15 bp, Homo sapiens
agagtgacacttcat

SEQ ID NO: 1747922 - DNA, 15 bp, Homo sapiens
gagtgacacttcatc

SEQ ID NO: 1747923 - DNA, 15 bp, Homo sapiens
agtgacacttcatct

SEQ ID NO: 1747924 - DNA, 15 bp, Homo sapiens
gtgacacttcatctc

SEQ ID NO: 1747925 - DNA, 15 bp, Homo sapiens
tgacacttcatctca

SEQ ID NO: 1747926 - DNA, 15 bp, Homo sapiens
gacacttcatctcaa

SEQ ID NO: 1747927 - DNA, 15 bp, Homo sapiens
acacttcatctcaaa

SEQ ID NO: 1747928 - DNA, 15 bp, Homo sapiens
cacttcatctcaaaa

SEQ ID NO: 1747929 - DNA, 15 bp, Homo sapiens
acttcatctcaaaaa

SEQ ID NO: 1747930 - DNA, 15 bp, Homo sapiens
aaaaaaattagtaaa

SEQ ID NO: 1747931 - DNA, 15 bp, Homo sapiens
aaaaaattagtaaat

SEQ ID NO: 1747932 - DNA, 15 bp, Homo sapiens
aaaaattagtaaatg

SEQ ID NO: 1747933 - DNA, 15 bp, Homo sapiens
aaaattagtaaatga

SEQ ID NO: 1747934 - DNA, 15 bp, Homo sapiens
aaattagtaaatgat

SEQ ID NO: 1747935 - DNA, 15 bp, Homo sapiens
aattagtaaatgata

SEQ ID NO: 1747936 - DNA, 15 bp, Homo sapiens
attagtaaatgatac

SEQ ID NO: 1747937 - DNA, 15 bp, Homo sapiens
ttagtaaatgatacc

SEQ ID NO: 1747938 - DNA, 15 bp, Homo sapiens
tagtaaatgatacca

SEQ ID NO: 1747939 - DNA, 15 bp, Homo sapiens
agtaaatgataccaa

SEQ ID NO: 1747940 - DNA, 15 bp, Homo sapiens
gtaaatgataccaag

SEQ ID NO: 1747941 - DNA, 15 bp, Homo sapiens
taaatgataccaagc

SEQ ID NO: 1747942 - DNA, 15 bp, Homo sapiens
aaatgataccaagct

SEQ ID NO: 1747943 - DNA, 15 bp, Homo sapiens
aatgataccaagctc

SEQ ID NO: 1747944 - DNA, 15 bp, Homo sapiens
atgataccaagctca

SEQ ID NO: 1747945 - DNA, 15 bp, Homo sapiens
tgataccaagctcaa

SEQ ID NO: 1747946 - DNA, 15 bp, Homo sapiens
gataccaagctcaag

SEQ ID NO: 1747947 - DNA, 15 bp, Homo sapiens
ataccaagctcaagc

SEQ ID NO: 1747948 - DNA, 15 bp, Homo sapiens
taccaagctcaagcc

SEQ ID NO: 1747949 - DNA, 15 bp, Homo sapiens
accaagctcaagcct

SEQ ID NO: 1747950 - DNA, 15 bp, Homo sapiens
ccaagctcaagcctt

SEQ ID NO: 1747951 - DNA, 15 bp, Homo sapiens
caagctcaagccttg

SEQ ID NO: 1747952 - DNA, 15 bp, Homo sapiens
aagctcaagccttgg

SEQ ID NO: 1747953 - DNA, 15 bp, Homo sapiens
agctcaagccttggt

SEQ ID NO: 1747954 - DNA, 15 bp, Homo sapiens
gctcaagccttggtt

SEQ ID NO: 1747955 - DNA, 15 bp, Homo sapiens
ctcaagccttggttt

SEQ ID NO: 1747956 - DNA, 15 bp, Homo sapiens
tcaagccttggtttt

SEQ ID NO: 1747957 - DNA, 15 bp, Homo sapiens
caagccttggtttta

SEQ ID NO: 1747958 - DNA, 15 bp, Homo sapiens
aagccttggttttat

SEQ ID NO: 1747959 - DNA, 15 bp, Homo sapiens
agccttggttttatt

SEQ ID NO: 1747960 - DNA, 15 bp, Homo sapiens
gccttggttttattt

SEQ ID NO: 1747961 - DNA, 15 bp, Homo sapiens
ccttggttttatttc

SEQ ID NO: 1747962 - DNA, 15 bp, Homo sapiens
cttggttttatttca

SEQ ID NO: 1747963 - DNA, 15 bp, Homo sapiens
ttggttttatttcat

SEQ ID NO: 1747964 - DNA, 15 bp, Homo sapiens
tggttttatttcatt

SEQ ID NO: 1747965 - DNA, 15 bp, Homo sapiens
ggttttatttcattt

SEQ ID NO: 1747966 - DNA, 15 bp, Homo sapiens
gttttatttcatttg

SEQ ID NO: 1747967 - DNA, 15 bp, Homo sapiens
ttttatttcatttgc

SEQ ID NO: 1747968 - DNA, 15 bp, Homo sapiens
tttatttcatttgct

SEQ ID NO: 1747969 - DNA, 15 bp, Homo sapiens
ttatttcatttgctt

SEQ ID NO: 1747970 - DNA, 15 bp, Homo sapiens
tatttcatttgcttt

SEQ ID NO: 1747971 - DNA, 15 bp, Homo sapiens
atttcatttgctttt

SEQ ID NO: 1747972 - DNA, 15 bp, Homo sapiens
tttcatttgcttttt

SEQ ID NO: 1747973 - DNA, 15 bp, Homo sapiens
ttcatttgctttttc

SEQ ID NO: 1747974 - DNA, 15 bp, Homo sapiens
tcatttgctttttcg

SEQ ID NO: 1747975 - DNA, 15 bp, Homo sapiens
catttgctttttcgg

SEQ ID NO: 1747976 - DNA, 15 bp, Homo sapiens
atttgctttttcgga

SEQ ID NO: 1747977 - DNA, 15 bp, Homo sapiens
tttgctttttcggaa

SEQ ID NO: 1747978 - DNA, 15 bp, Homo sapiens
ttgctttttcggaag

SEQ ID NO: 1747979 - DNA, 15 bp, Homo sapiens
tgctttttcggaagc

SEQ ID NO: 1747980 - DNA, 15 bp, Homo sapiens
gctttttcggaagca

SEQ ID NO: 1747981 - DNA, 15 bp, Homo sapiens
ctttttcggaagcaa

SEQ ID NO: 1747982 - DNA, 15 bp, Homo sapiens
tttttcggaagcaac

SEQ ID NO: 1747983 - DNA, 15 bp, Homo sapiens
ttttcggaagcaaca

SEQ ID NO: 1747984 - DNA, 15 bp, Homo sapiens
tttcggaagcaacat

SEQ ID NO: 1747985 - DNA, 15 bp, Homo sapiens
ttcggaagcaacata

SEQ ID NO: 1747986 - DNA, 15 bp, Homo sapiens
tcggaagcaacatac

SEQ ID NO: 1747987 - DNA, 15 bp, Homo sapiens
cggaagcaacataca

SEQ ID NO: 1747988 - DNA, 15 bp, Homo sapiens
ggaagcaacatacat

SEQ ID NO: 1747989 - DNA, 15 bp, Homo sapiens
gaagcaacatacatc

SEQ ID NO: 1747990 - DNA, 15 bp, Homo sapiens
aagcaacatacatcc

SEQ ID NO: 1747991 - DNA, 15 bp, Homo sapiens
agcaacatacatccc

SEQ ID NO: 1747992 - DNA, 15 bp, Homo sapiens
gcaacatacatccca

SEQ ID NO: 1747993 - DNA, 15 bp, Homo sapiens
caacatacatcccaa

SEQ ID NO: 1747994 - DNA, 15 bp, Homo sapiens
aacatacatcccaat

SEQ ID NO: 1747995 - DNA, 15 bp, Homo sapiens
acatacatcccaata

SEQ ID NO: 1747996 - DNA, 15 bp, Homo sapiens
catacatcccaatat

SEQ ID NO: 1747997 - DNA, 15 bp, Homo sapiens
atacatcccaatata

SEQ ID NO: 1747998 - DNA, 15 bp, Homo sapiens
tacatcccaatataa

SEQ ID NO: 1747999 - DNA, 15 bp, Homo sapiens
acatcccaatataac

SEQ ID NO: 1748000 - DNA, 15 bp, Homo sapiens
catcccaatataact

SEQ ID NO: 1748001 - DNA, 15 bp, Homo sapiens
atcccaatataactc

SEQ ID NO: 1748002 - DNA, 15 bp, Homo sapiens
tcccaatataactct

SEQ ID NO: 1748003 - DNA, 15 bp, Homo sapiens
cccaatataactctt

SEQ ID NO: 1748004 - DNA, 15 bp, Homo sapiens
ccaatataactctta

SEQ ID NO: 1748005 - DNA, 15 bp, Homo sapiens
caatataactcttaa

SEQ ID NO: 1748006 - DNA, 15 bp, Homo sapiens
aatataactcttaat

SEQ ID NO: 1748007 - DNA, 15 bp, Homo sapiens
atataactcttaatt

SEQ ID NO: 1748008 - DNA, 15 bp, Homo sapiens
tataactcttaattg

SEQ ID NO: 1748009 - DNA, 15 bp, Homo sapiens
ataactcttaattga

SEQ ID NO: 1748010 - DNA, 15 bp, Homo sapiens
taactcttaattgaa

SEQ ID NO: 1748011 - DNA, 15 bp, Homo sapiens
aactcttaattgaag

SEQ ID NO: 1748012 - DNA, 15 bp, Homo sapiens
actcttaattgaagg

SEQ ID NO: 1748013 - DNA, 15 bp, Homo sapiens
ctcttaattgaaggt

SEQ ID NO: 1748014 - DNA, 15 bp, Homo sapiens
tcttaattgaaggta

SEQ ID NO: 1748015 - DNA, 15 bp, Homo sapiens
cttaattgaaggtat

SEQ ID NO: 1748016 - DNA, 15 bp, Homo sapiens
ttaattgaaggtatt

SEQ ID NO: 1748017 - DNA, 15 bp, Homo sapiens
taattgaaggtattt

SEQ ID NO: 1748018 - DNA, 15 bp, Homo sapiens
aattgaaggtatttt

SEQ ID NO: 1748019 - DNA, 15 bp, Homo sapiens
attgaaggtatttta

SEQ ID NO: 1748020 - DNA, 15 bp, Homo sapiens
ttgaaggtattttat

SEQ ID NO: 1748021 - DNA, 15 bp, Homo sapiens
tgaaggtattttatg

SEQ ID NO: 1748022 - DNA, 15 bp, Homo sapiens
gaaggtattttatga

SEQ ID NO: 1748023 - DNA, 15 bp, Homo sapiens
aaggtattttatgag

SEQ ID NO: 1748024 - DNA, 15 bp, Homo sapiens
aggtattttatgaga

SEQ ID NO: 1748025 - DNA, 15 bp, Homo sapiens
ggtattttatgagaa

SEQ ID NO: 1748026 - DNA, 15 bp, Homo sapiens
gtattttatgagaat

SEQ ID NO: 1748027 - DNA, 15 bp, Homo sapiens
tattttatgagaatg

SEQ ID NO: 1748028 - DNA, 15 bp, Homo sapiens
attttatgagaatgt

SEQ ID NO: 1748029 - DNA, 15 bp, Homo sapiens
ttttatgagaatgta

SEQ ID NO: 1748030 - DNA, 15 bp, Homo sapiens
tttatgagaatgtat

SEQ ID NO: 1748031 - DNA, 15 bp, Homo sapiens
ttatgagaatgtatg

SEQ ID NO: 1748032 - DNA, 15 bp, Homo sapiens
tatgagaatgtatga

SEQ ID NO: 1748033 - DNA, 15 bp, Homo sapiens
atgagaatgtatgag

SEQ ID NO: 1748034 - DNA, 15 bp, Homo sapiens
tgagaatgtatgagg

SEQ ID NO: 1748035 - DNA, 15 bp, Homo sapiens
gagaatgtatgaggc

SEQ ID NO: 1748036 - DNA, 15 bp, Homo sapiens
agaatgtatgaggct

SEQ ID NO: 1748037 - DNA, 15 bp, Homo sapiens
gaatgtatgaggctc

SEQ ID NO: 1748038 - DNA, 15 bp, Homo sapiens
aatgtatgaggctct

SEQ ID NO: 1748039 - DNA, 15 bp, Homo sapiens
atgtatgaggctctt

SEQ ID NO: 1748040 - DNA, 15 bp, Homo sapiens
tgtatgaggctcttt

SEQ ID NO: 1748041 - DNA, 15 bp, Homo sapiens
gtatgaggctctttc

SEQ ID NO: 1748042 - DNA, 15 bp, Homo sapiens
tatgaggctctttct

SEQ ID NO: 1748043 - DNA, 15 bp, Homo sapiens
atgaggctctttctg

SEQ ID NO: 1748044 - DNA, 15 bp, Homo sapiens
tgaggctctttctga

SEQ ID NO: 1748045 - DNA, 15 bp, Homo sapiens
gaggctctttctgat

SEQ ID NO: 1748046 - DNA, 15 bp, Homo sapiens
aggctctttctgatg

SEQ ID NO: 1748047 - DNA, 15 bp, Homo sapiens
ggctctttctgatgg

SEQ ID NO: 1748048 - DNA, 15 bp, Homo sapiens
gctctttctgatgga

SEQ ID NO: 1748049 - DNA, 15 bp, Homo sapiens
ctctttctgatggat

SEQ ID NO: 1748050 - DNA, 15 bp, Homo sapiens
tctttctgatggatg

SEQ ID NO: 1748051 - DNA, 15 bp, Homo sapiens
ctttctgatggatgg

SEQ ID NO: 1748052 - DNA, 15 bp, Homo sapiens
tttctgatggatgga

SEQ ID NO: 1748053 - DNA, 15 bp, Homo sapiens
ttctgatggatggaa

SEQ ID NO: 1748054 - DNA, 15 bp, Homo sapiens
tctgatggatggaaa

SEQ ID NO: 1748055 - DNA, 15 bp, Homo sapiens
ctgatggatggaaag

SEQ ID NO: 1748056 - DNA, 15 bp, Homo sapiens
tgatggatggaaagc

SEQ ID NO: 1748057 - DNA, 15 bp, Homo sapiens
gatggatggaaagct

SEQ ID NO: 1748058 - DNA, 15 bp, Homo sapiens
atggatggaaagctt

SEQ ID NO: 1748059 - DNA, 15 bp, Homo sapiens
tggatggaaagctta

SEQ ID NO: 1748060 - DNA, 15 bp, Homo sapiens
ggatggaaagcttaa

SEQ ID NO: 1748061 - DNA, 15 bp, Homo sapiens
gatggaaagcttaac

SEQ ID NO: 1748062 - DNA, 15 bp, Homo sapiens
atggaaagcttaaca

SEQ ID NO: 1748063 - DNA, 15 bp, Homo sapiens
tggaaagcttaacaa

SEQ ID NO: 1748064 - DNA, 15 bp, Homo sapiens
ggaaagcttaacaaa

SEQ ID NO: 1748065 - DNA, 15 bp, Homo sapiens
gaaagcttaacaaat

SEQ ID NO: 1748066 - DNA, 15 bp, Homo sapiens
aaagcttaacaaatt

SEQ ID NO: 1748067 - DNA, 15 bp, Homo sapiens
aagcttaacaaattt

SEQ ID NO: 1748068 - DNA, 15 bp, Homo sapiens
agcttaacaaatttg

SEQ ID NO: 1748069 - DNA, 15 bp, Homo sapiens
gcttaacaaatttgc

SEQ ID NO: 1748070 - DNA, 15 bp, Homo sapiens
cttaacaaatttgct

SEQ ID NO: 1748071 - DNA, 15 bp, Homo sapiens
ttaacaaatttgctc

SEQ ID NO: 1748072 - DNA, 15 bp, Homo sapiens
taacaaatttgctct

SEQ ID NO: 1748073 - DNA, 15 bp, Homo sapiens
aacaaatttgctctt

SEQ ID NO: 1748074 - DNA, 15 bp, Homo sapiens
acaaatttgctcttc

SEQ ID NO: 1748075 - DNA, 15 bp, Homo sapiens
caaatttgctcttct

SEQ ID NO: 1748076 - DNA, 15 bp, Homo sapiens
aaatttgctcttctc

SEQ ID NO: 1748077 - DNA, 15 bp, Homo sapiens
aatttgctcttctct

SEQ ID NO: 1748078 - DNA, 15 bp, Homo sapiens
atttgctcttctcta

SEQ ID NO: 1748079 - DNA, 15 bp, Homo sapiens
ttgctcttctctagc

SEQ ID NO: 1748080 - DNA, 15 bp, Homo sapiens
tgctcttctctagcc

SEQ ID NO: 1748081 - DNA, 15 bp, Homo sapiens
gctcttctctagcct

SEQ ID NO: 1748082 - DNA, 15 bp, Homo sapiens
ctcttctctagccta

SEQ ID NO: 1748083 - DNA, 15 bp, Homo sapiens
tcttctctagcctag

SEQ ID NO: 1748084 - DNA, 15 bp, Homo sapiens
cttctctagcctagt

SEQ ID NO: 1748085 - DNA, 15 bp, Homo sapiens
ttctctagcctagtg

SEQ ID NO: 1748086 - DNA, 15 bp, Homo sapiens
tctctagcctagtgg

SEQ ID NO: 1748087 - DNA, 15 bp, Homo sapiens
ctctagcctagtggc

SEQ ID NO: 1748088 - DNA, 15 bp, Homo sapiens
tctagcctagtggca

SEQ ID NO: 1748089 - DNA, 15 bp, Homo sapiens
ctagcctagtggcag

SEQ ID NO: 1748090 - DNA, 15 bp, Homo sapiens
tagcctagtggcaga

SEQ ID NO: 1748091 - DNA, 15 bp, Homo sapiens
agcctagtggcagaa

SEQ ID NO: 1748092 - DNA, 15 bp, Homo sapiens
gcctagtggcagaaa

SEQ ID NO: 1748093 - DNA, 15 bp, Homo sapiens
cctagtggcagaaaa

SEQ ID NO: 1748094 - DNA, 15 bp, Homo sapiens
ctagtggcagaaaat

SEQ ID NO: 1748095 - DNA, 15 bp, Homo sapiens
tagtggcagaaaatt

SEQ ID NO: 1748096 - DNA, 15 bp, Homo sapiens
agtggcagaaaattt

SEQ ID NO: 1748097 - DNA, 15 bp, Homo sapiens
gtggcagaaaattta

SEQ ID NO: 1748098 - DNA, 15 bp, Homo sapiens
tggcagaaaatttag

SEQ ID NO: 1748099 - DNA, 15 bp, Homo sapiens
ggcagaaaatttaga

SEQ ID NO: 1748100 - DNA, 15 bp, Homo sapiens
gcagaaaatttagat

SEQ ID NO: 1748101 - DNA, 15 bp, Homo sapiens
cagaaaatttagata

SEQ ID NO: 1748102 - DNA, 15 bp, Homo sapiens
agaaaatttagataa

SEQ ID NO: 1748103 - DNA, 15 bp, Homo sapiens
gaaaatttagataat

SEQ ID NO: 1748104 - DNA, 15 bp, Homo sapiens
aaaatttagataata

SEQ ID NO: 1748105 - DNA, 15 bp, Homo sapiens
aaatttagataatag

SEQ ID NO: 1748106 - DNA, 15 bp, Homo sapiens
aatttagataatagg

SEQ ID NO: 1748107 - DNA, 15 bp, Homo sapiens
atttagataataggg

SEQ ID NO: 1748108 - DNA, 15 bp, Homo sapiens
tttagataatagggt

SEQ ID NO: 1748109 - DNA, 15 bp, Homo sapiens
ttagataatagggtt

SEQ ID NO: 1748110 - DNA, 15 bp, Homo sapiens
tagataatagggttt

SEQ ID NO: 1748111 - DNA, 15 bp, Homo sapiens
agataatagggtttt

SEQ ID NO: 1748112 - DNA, 15 bp, Homo sapiens
gataatagggttttt

SEQ ID NO: 1748113 - DNA, 15 bp, Homo sapiens
ataatagggtttttt

SEQ ID NO: 1748114 - DNA, 15 bp, Homo sapiens
taatagggtttttta

SEQ ID NO: 1748115 - DNA, 15 bp, Homo sapiens
aatagggttttttag

SEQ ID NO: 1748116 - DNA, 15 bp, Homo sapiens
atagggttttttagt

SEQ ID NO: 1748117 - DNA, 15 bp, Homo sapiens
tagggttttttagtt

SEQ ID NO: 1748118 - DNA, 15 bp, Homo sapiens
agggttttttagttg

SEQ ID NO: 1748119 - DNA, 15 bp, Homo sapiens
gggttttttagttgt

SEQ ID NO: 1748120 - DNA, 15 bp, Homo sapiens
ggttttttagttgta

SEQ ID NO: 1748121 - DNA, 15 bp, Homo sapiens
gttttttagttgtac

SEQ ID NO: 1748122 - DNA, 15 bp, Homo sapiens
ttttttagttgtact

SEQ ID NO: 1748123 - DNA, 15 bp, Homo sapiens
tttttagttgtactg

SEQ ID NO: 1748124 - DNA, 15 bp, Homo sapiens
ttttagttgtactgt

SEQ ID NO: 1748125 - DNA, 15 bp, Homo sapiens
tttagttgtactgta

SEQ ID NO: 1748126 - DNA, 15 bp, Homo sapiens
ttagttgtactgtag

SEQ ID NO: 1748127 - DNA, 15 bp, Homo sapiens
tagttgtactgtagt

SEQ ID NO: 1748128 - DNA, 15 bp, Homo sapiens
agttgtactgtagta

SEQ ID NO: 1748129 - DNA, 15 bp, Homo sapiens
gttgtactgtagtat

SEQ ID NO: 1748130 - DNA, 15 bp, Homo sapiens
ttgtactgtagtatt

SEQ ID NO: 1748131 - DNA, 15 bp, Homo sapiens
tgtactgtagtattt

SEQ ID NO: 1748132 - DNA, 15 bp, Homo sapiens
gtactgtagtatttt

SEQ ID NO: 1748133 - DNA, 15 bp, Homo sapiens
tactgtagtattttt

SEQ ID NO: 1748134 - DNA, 15 bp, Homo sapiens
actgtagtatttttt

SEQ ID NO: 1748135 - DNA, 15 bp, Homo sapiens
ctgtagtattttttg

SEQ ID NO: 1748136 - DNA, 15 bp, Homo sapiens
tgtagtattttttgc

SEQ ID NO: 1748137 - DNA, 15 bp, Homo sapiens
gtagtattttttgct

SEQ ID NO: 1748138 - DNA, 15 bp, Homo sapiens
tagtattttttgctc

SEQ ID NO: 1748139 - DNA, 15 bp, Homo sapiens
agtattttttgctca

SEQ ID NO: 1748140 - DNA, 15 bp, Homo sapiens
gtattttttgctcat

SEQ ID NO: 1748141 - DNA, 15 bp, Homo sapiens
tattttttgctcatt

SEQ ID NO: 1748142 - DNA, 15 bp, Homo sapiens
attttttgctcatta

SEQ ID NO: 1748143 - DNA, 15 bp, Homo sapiens
ttttttgctcattaa

SEQ ID NO: 1748144 - DNA, 15 bp, Homo sapiens
tttttgctcattaac

SEQ ID NO: 1748145 - DNA, 15 bp, Homo sapiens
ttttgctcattaaca

SEQ ID NO: 1748146 - DNA, 15 bp, Homo sapiens
tttgctcattaacat

SEQ ID NO: 1748147 - DNA, 15 bp, Homo sapiens
ttgctcattaacatc

SEQ ID NO: 1748148 - DNA, 15 bp, Homo sapiens
tgctcattaacatcc

SEQ ID NO: 1748149 - DNA, 15 bp, Homo sapiens
gctcattaacatcca

SEQ ID NO: 1748150 - DNA, 15 bp, Homo sapiens
ctcattaacatccag

SEQ ID NO: 1748151 - DNA, 15 bp, Homo sapiens
tcattaacatccagt

SEQ ID NO: 1748152 - DNA, 15 bp, Homo sapiens
cattaacatccagtg

SEQ ID NO: 1748153 - DNA, 15 bp, Homo sapiens
attaacatccagtga

SEQ ID NO: 1748154 - DNA, 15 bp, Homo sapiens
ttaacatccagtgaa

SEQ ID NO: 1748155 - DNA, 15 bp, Homo sapiens
taacatccagtgaaa

SEQ ID NO: 1748156 - DNA, 15 bp, Homo sapiens
aacatccagtgaaat

SEQ ID NO: 1748157 - DNA, 15 bp, Homo sapiens
acatccagtgaaatg

SEQ ID NO: 1748158 - DNA, 15 bp, Homo sapiens
catccagtgaaatga

SEQ ID NO: 1748159 - DNA, 15 bp, Homo sapiens
atccagtgaaatgat

SEQ ID NO: 1748160 - DNA, 15 bp, Homo sapiens
tccagtgaaatgata

SEQ ID NO: 1748161 - DNA, 15 bp, Homo sapiens
ccagtgaaatgatat

SEQ ID NO: 1748162 - DNA, 15 bp, Homo sapiens
cagtgaaatgatatt

SEQ ID NO: 1748163 - DNA, 15 bp, Homo sapiens
agtgaaatgatattg

SEQ ID NO: 1748164 - DNA, 15 bp, Homo sapiens
gtgaaatgatattgt

SEQ ID NO: 1748165 - DNA, 15 bp, Homo sapiens
tgaaatgatattgtc

SEQ ID NO: 1748166 - DNA, 15 bp, Homo sapiens
gaaatgatattgtct

SEQ ID NO: 1748167 - DNA, 15 bp, Homo sapiens
aaatgatattgtctg

SEQ ID NO: 1748168 - DNA, 15 bp, Homo sapiens
aatgatattgtctgc

SEQ ID NO: 1748169 - DNA, 15 bp, Homo sapiens
atgatattgtctgct

SEQ ID NO: 1748170 - DNA, 15 bp, Homo sapiens
tgatattgtctgctt

SEQ ID NO: 1748171 - DNA, 15 bp, Homo sapiens
gatattgtctgctta

SEQ ID NO: 1748172 - DNA, 15 bp, Homo sapiens
atattgtctgcttat

SEQ ID NO: 1748173 - DNA, 15 bp, Homo sapiens
tattgtctgcttatg

SEQ ID NO: 1748174 - DNA, 15 bp, Homo sapiens
attgtctgcttatgt

SEQ ID NO: 1748175 - DNA, 15 bp, Homo sapiens
ttgtctgcttatgtt

SEQ ID NO: 1748176 - DNA, 15 bp, Homo sapiens
tgtctgcttatgttc

SEQ ID NO: 1748177 - DNA, 15 bp, Homo sapiens
gtctgcttatgttca

SEQ ID NO: 1748178 - DNA, 15 bp, Homo sapiens
tctgcttatgttcag

SEQ ID NO: 1748179 - DNA, 15 bp, Homo sapiens
ctgcttatgttcagt

SEQ ID NO: 1748180 - DNA, 15 bp, Homo sapiens
tgcttatgttcagta

SEQ ID NO: 1748181 - DNA, 15 bp, Homo sapiens
gcttatgttcagtag

SEQ ID NO: 1748182 - DNA, 15 bp, Homo sapiens
cttatgttcagtagt

SEQ ID NO: 1748183 - DNA, 15 bp, Homo sapiens
ttatgttcagtagtt

SEQ ID NO: 1748184 - DNA, 15 bp, Homo sapiens
tatgttcagtagttg

SEQ ID NO: 1748185 - DNA, 15 bp, Homo sapiens
atgttcagtagttgt

SEQ ID NO: 1748186 - DNA, 15 bp, Homo sapiens
tgttcagtagttgtg

SEQ ID NO: 1748187 - DNA, 15 bp, Homo sapiens
gttcagtagttgtgg

SEQ ID NO: 1748188 - DNA, 15 bp, Homo sapiens
ttcagtagttgtggt

SEQ ID NO: 1748189 - DNA, 15 bp, Homo sapiens
tcagtagttgtggtt

SEQ ID NO: 1748190 - DNA, 15 bp, Homo sapiens
cagtagttgtggtta

SEQ ID NO: 1748191 - DNA, 15 bp, Homo sapiens
agtagttgtggttac

SEQ ID NO: 1748192 - DNA, 15 bp, Homo sapiens
gtagttgtggttacc

SEQ ID NO: 1748193 - DNA, 15 bp, Homo sapiens
tagttgtggttacct

SEQ ID NO: 1748194 - DNA, 15 bp, Homo sapiens
agttgtggttaccta

SEQ ID NO: 1748195 - DNA, 15 bp, Homo sapiens
gttgtggttacctag

SEQ ID NO: 1748196 - DNA, 15 bp, Homo sapiens
ttgtggttacctagt

SEQ ID NO: 1748197 - DNA, 15 bp, Homo sapiens
tgtggttacctagtt

SEQ ID NO: 1748198 - DNA, 15 bp, Homo sapiens
gtggttacctagtta

SEQ ID NO: 1748199 - DNA, 15 bp, Homo sapiens
tggttacctagttat

SEQ ID NO: 1748200 - DNA, 15 bp, Homo sapiens
ggttacctagttatt

SEQ ID NO: 1748201 - DNA, 15 bp, Homo sapiens
gttacctagttatta

SEQ ID NO: 1748202 - DNA, 15 bp, Homo sapiens
ttacctagttattat

SEQ ID NO: 1748203 - DNA, 15 bp, Homo sapiens
tacctagttattatg

SEQ ID NO: 1748204 - DNA, 15 bp, Homo sapiens
acctagttattatgg

SEQ ID NO: 1748205 - DNA, 15 bp, Homo sapiens
cctagttattatgga

SEQ ID NO: 1748206 - DNA, 15 bp, Homo sapiens
ctagttattatggaa

SEQ ID NO: 1748207 - DNA, 15 bp, Homo sapiens
tagttattatggaag

SEQ ID NO: 1748208 - DNA, 15 bp, Homo sapiens
agttattatggaagt

SEQ ID NO: 1748209 - DNA, 15 bp, Homo sapiens
gttattatggaagtg

SEQ ID NO: 1748210 - DNA, 15 bp, Homo sapiens
ttattatggaagtgt

SEQ ID NO: 1748211 - DNA, 15 bp, Homo sapiens
tattatggaagtgtt

SEQ ID NO: 1748212 - DNA, 15 bp, Homo sapiens
attatggaagtgttt

SEQ ID NO: 1748213 - DNA, 15 bp, Homo sapiens
ttatggaagtgtttc

SEQ ID NO: 1748214 - DNA, 15 bp, Homo sapiens
tatggaagtgtttcc

SEQ ID NO: 1748215 - DNA, 15 bp, Homo sapiens
atggaagtgtttcca

SEQ ID NO: 1748216 - DNA, 15 bp, Homo sapiens
tggaagtgtttccac

SEQ ID NO: 1748217 - DNA, 15 bp, Homo sapiens
ggaagtgtttccaca

SEQ ID NO: 1748218 - DNA, 15 bp, Homo sapiens
gaagtgtttccacat

SEQ ID NO: 1748219 - DNA, 15 bp, Homo sapiens
aagtgtttccacatt

SEQ ID NO: 1748220 - DNA, 15 bp, Homo sapiens
agtgtttccacattt

SEQ ID NO: 1748221 - DNA, 15 bp, Homo sapiens
gtgtttccacatttt

SEQ ID NO: 1748222 - DNA, 15 bp, Homo sapiens
tgtttccacattttt

SEQ ID NO: 1748223 - DNA, 15 bp, Homo sapiens
gtttccacattttta

SEQ ID NO: 1748224 - DNA, 15 bp, Homo sapiens
tttccacatttttat

SEQ ID NO: 1748225 - DNA, 15 bp, Homo sapiens
ttccacatttttatg

SEQ ID NO: 1748226 - DNA, 15 bp, Homo sapiens
tccacatttttatga

SEQ ID NO: 1748227 - DNA, 15 bp, Homo sapiens
ccacatttttatgaa

SEQ ID NO: 1748228 - DNA, 15 bp, Homo sapiens
cacatttttatgaac

SEQ ID NO: 1748229 - DNA, 15 bp, Homo sapiens
acatttttatgaaca

SEQ ID NO: 1748230 - DNA, 15 bp, Homo sapiens
catttttatgaacaa

SEQ ID NO: 1748231 - DNA, 15 bp, Homo sapiens
atttttatgaacaat

SEQ ID NO: 1748232 - DNA, 15 bp, Homo sapiens
tttttatgaacaatt

SEQ ID NO: 1748233 - DNA, 15 bp, Homo sapiens
ttttatgaacaattt

SEQ ID NO: 1748234 - DNA, 15 bp, Homo sapiens
tttatgaacaattta

SEQ ID NO: 1748235 - DNA, 15 bp, Homo sapiens
ttatgaacaatttaa

SEQ ID NO: 1748236 - DNA, 15 bp, Homo sapiens
tatgaacaatttaaa

SEQ ID NO: 1748237 - DNA, 15 bp, Homo sapiens
atgaacaatttaaaa

SEQ ID NO: 1748238 - DNA, 15 bp, Homo sapiens
tgaacaatttaaaaa

SEQ ID NO: 1748239 - DNA, 15 bp, Homo sapiens
gaacaatttaaaaag

SEQ ID NO: 1748240 - DNA, 15 bp, Homo sapiens
aacaatttaaaaagt

SEQ ID NO: 1748241 - DNA, 15 bp, Homo sapiens
acaatttaaaaagtc

SEQ ID NO: 1748242 - DNA, 15 bp, Homo sapiens
caatttaaaaagtca

SEQ ID NO: 1748243 - DNA, 15 bp, Homo sapiens
aatttaaaaagtcat

SEQ ID NO: 1748244 - DNA, 15 bp, Homo sapiens
atttaaaaagtcata

SEQ ID NO: 1748245 - DNA, 15 bp, Homo sapiens
tttaaaaagtcatat

SEQ ID NO: 1748246 - DNA, 15 bp, Homo sapiens
ttaaaaagtcatata

SEQ ID NO: 1748247 - DNA, 15 bp, Homo sapiens
taaaaagtcatatat

SEQ ID NO: 1748248 - DNA, 15 bp, Homo sapiens
aaaaagtcatatatt

SEQ ID NO: 1748249 - DNA, 15 bp, Homo sapiens
aaaagtcatatatta

SEQ ID NO: 1748250 - DNA, 15 bp, Homo sapiens
aaagtcatatattat

SEQ ID NO: 1748251 - DNA, 15 bp, Homo sapiens
aagtcatatattatg

SEQ ID NO: 1748252 - DNA, 15 bp, Homo sapiens
agtcatatattatgg

SEQ ID NO: 1748253 - DNA, 15 bp, Homo sapiens
gtcatatattatgga

SEQ ID NO: 1748254 - DNA, 15 bp, Homo sapiens
tcatatattatggag

SEQ ID NO: 1748255 - DNA, 15 bp, Homo sapiens
catatattatggagc

SEQ ID NO: 1748256 - DNA, 15 bp, Homo sapiens
atatattatggagca

SEQ ID NO: 1748257 - DNA, 15 bp, Homo sapiens
tatattatggagcag

SEQ ID NO: 1748258 - DNA, 15 bp, Homo sapiens
atattatggagcaga

SEQ ID NO: 1748259 - DNA, 15 bp, Homo sapiens
tattatggagcagaa

SEQ ID NO: 1748260 - DNA, 15 bp, Homo sapiens
attatggagcagaaa

SEQ ID NO: 1748261 - DNA, 15 bp, Homo sapiens
ttatggagcagaaaa

SEQ ID NO: 1748262 - DNA, 15 bp, Homo sapiens
tatggagcagaaaat

SEQ ID NO: 1748263 - DNA, 15 bp, Homo sapiens
atggagcagaaaata

SEQ ID NO: 1748264 - DNA, 15 bp, Homo sapiens
tggagcagaaaatat

SEQ ID NO: 1748265 - DNA, 15 bp, Homo sapiens
ggagcagaaaatatt

SEQ ID NO: 1748266 - DNA, 15 bp, Homo sapiens
gagcagaaaatatta

SEQ ID NO: 1748267 - DNA, 15 bp, Homo sapiens
agcagaaaatattaa

SEQ ID NO: 1748268 - DNA, 15 bp, Homo sapiens
gcagaaaatattaat

SEQ ID NO: 1748269 - DNA, 15 bp, Homo sapiens
cagaaaatattaatt

SEQ ID NO: 1748270 - DNA, 15 bp, Homo sapiens
agaaaatattaattc

SEQ ID NO: 1748271 - DNA, 15 bp, Homo sapiens
gaaaatattaattct

SEQ ID NO: 1748272 - DNA, 15 bp, Homo sapiens
aaaatattaattctg

SEQ ID NO: 1748273 - DNA, 15 bp, Homo sapiens
aaatattaattctga

SEQ ID NO: 1748274 - DNA, 15 bp, Homo sapiens
aatattaattctgat

SEQ ID NO: 1748275 - DNA, 15 bp, Homo sapiens
atattaattctgatt

SEQ ID NO: 1748276 - DNA, 15 bp, Homo sapiens
tattaattctgatta

SEQ ID NO: 1748277 - DNA, 15 bp, Homo sapiens
attaattctgattac

SEQ ID NO: 1748278 - DNA, 15 bp, Homo sapiens
ttaattctgattaca

SEQ ID NO: 1748279 - DNA, 15 bp, Homo sapiens
taattctgattacac

SEQ ID NO: 1748280 - DNA, 15 bp, Homo sapiens
aattctgattacaca

SEQ ID NO: 1748281 - DNA, 15 bp, Homo sapiens
attctgattacacag

SEQ ID NO: 1748282 - DNA, 15 bp, Homo sapiens
ttctgattacacagt

SEQ ID NO: 1748283 - DNA, 15 bp, Homo sapiens
tctgattacacagta

SEQ ID NO: 1748284 - DNA, 15 bp, Homo sapiens
ctgattacacagtat

SEQ ID NO: 1748285 - DNA, 15 bp, Homo sapiens
tgattacacagtatc

SEQ ID NO: 1748286 - DNA, 15 bp, Homo sapiens
gattacacagtatcc

SEQ ID NO: 1748287 - DNA, 15 bp, Homo sapiens
attacacagtatcct

SEQ ID NO: 1748288 - DNA, 15 bp, Homo sapiens
ttacacagtatcctc

SEQ ID NO: 1748289 - DNA, 15 bp, Homo sapiens
tacacagtatcctcg

SEQ ID NO: 1748290 - DNA, 15 bp, Homo sapiens
acacagtatcctcga

SEQ ID NO: 1748291 - DNA, 15 bp, Homo sapiens
cacagtatcctcgac

SEQ ID NO: 1748292 - DNA, 15 bp, Homo sapiens
acagtatcctcgaca

SEQ ID NO: 1748293 - DNA, 15 bp, Homo sapiens
cagtatcctcgacat

SEQ ID NO: 1748294 - DNA, 15 bp, Homo sapiens
agtatcctcgacatt

SEQ ID NO: 1748295 - DNA, 15 bp, Homo sapiens
gtatcctcgacattg

SEQ ID NO: 1748296 - DNA, 15 bp, Homo sapiens
tatcctcgacattga

SEQ ID NO: 1748297 - DNA, 15 bp, Homo sapiens
atcctcgacattgat

SEQ ID NO: 1748298 - DNA, 15 bp, Homo sapiens
tcctcgacattgatt

SEQ ID NO: 1748299 - DNA, 15 bp, Homo sapiens
cctcgacattgattt

SEQ ID NO: 1748300 - DNA, 15 bp, Homo sapiens
ctcgacattgatttc

SEQ ID NO: 1748301 - DNA, 15 bp, Homo sapiens
tcgacattgatttct

SEQ ID NO: 1748302 - DNA, 15 bp, Homo sapiens
cgacattgatttctg

SEQ ID NO: 1748303 - DNA, 15 bp, Homo sapiens
gacattgatttctgt

SEQ ID NO: 1748304 - DNA, 15 bp, Homo sapiens
acattgatttctgtt

SEQ ID NO: 1748305 - DNA, 15 bp, Homo sapiens
cattgatttctgttt

SEQ ID NO: 1748306 - DNA, 15 bp, Homo sapiens
attgatttctgtttt

SEQ ID NO: 1748307 - DNA, 15 bp, Homo sapiens
ttgatttctgttttt

SEQ ID NO: 1748308 - DNA, 15 bp, Homo sapiens
tgatttctgttttta

SEQ ID NO: 1748309 - DNA, 15 bp, Homo sapiens
gatttctgtttttac

SEQ ID NO: 1748310 - DNA, 15 bp, Homo sapiens
atttctgtttttacc

SEQ ID NO: 1748311 - DNA, 15 bp, Homo sapiens
tttctgtttttacct

SEQ ID NO: 1748312 - DNA, 15 bp, Homo sapiens
ttctgtttttacctc

SEQ ID NO: 1748313 - DNA, 15 bp, Homo sapiens
tctgtttttacctcc

SEQ ID NO: 1748314 - DNA, 15 bp, Homo sapiens
ctgtttttacctcct

SEQ ID NO: 1748315 - DNA, 15 bp, Homo sapiens
tgtttttacctccta

SEQ ID NO: 1748316 - DNA, 15 bp, Homo sapiens
gtttttacctcctaa

SEQ ID NO: 1748317 - DNA, 15 bp, Homo sapiens
tttttacctcctaaa

SEQ ID NO: 1748318 - DNA, 15 bp, Homo sapiens
ttttacctcctaaag

SEQ ID NO: 1748319 - DNA, 15 bp, Homo sapiens
tttacctcctaaaga

SEQ ID NO: 1748320 - DNA, 15 bp, Homo sapiens
ttacctcctaaagaa

SEQ ID NO: 1748321 - DNA, 15 bp, Homo sapiens
tacctcctaaagaac

SEQ ID NO: 1748322 - DNA, 15 bp, Homo sapiens
acctcctaaagaact

SEQ ID NO: 1748323 - DNA, 15 bp, Homo sapiens
cctcctaaagaactg

SEQ ID NO: 1748324 - DNA, 15 bp, Homo sapiens
ctcctaaagaactgc

SEQ ID NO: 1748325 - DNA, 15 bp, Homo sapiens
tcctaaagaactgca

SEQ ID NO: 1748326 - DNA, 15 bp, Homo sapiens
cctaaagaactgcac

SEQ ID NO: 1748327 - DNA, 15 bp, Homo sapiens
ctaaagaactgcaca

SEQ ID NO: 1748328 - DNA, 15 bp, Homo sapiens
taaagaactgcacag

SEQ ID NO: 1748329 - DNA, 15 bp, Homo sapiens
aaagaactgcacagt

SEQ ID NO: 1748330 - DNA, 15 bp, Homo sapiens
aagaactgcacagtg

SEQ ID NO: 1748331 - DNA, 15 bp, Homo sapiens
agaactgcacagtga

SEQ ID NO: 1748332 - DNA, 15 bp, Homo sapiens
gaactgcacagtgaa

SEQ ID NO: 1748333 - DNA, 15 bp, Homo sapiens
aactgcacagtgaat

SEQ ID NO: 1748334 - DNA, 15 bp, Homo sapiens
actgcacagtgaatc

SEQ ID NO: 1748335 - DNA, 15 bp, Homo sapiens
ctgcacagtgaatcc

SEQ ID NO: 1748336 - DNA, 15 bp, Homo sapiens
tgcacagtgaatcca

SEQ ID NO: 1748337 - DNA, 15 bp, Homo sapiens
gcacagtgaatccaa

SEQ ID NO: 1748338 - DNA, 15 bp, Homo sapiens
cacagtgaatccaaa

SEQ ID NO: 1748339 - DNA, 15 bp, Homo sapiens
acagtgaatccaaaa

SEQ ID NO: 1748340 - DNA, 15 bp, Homo sapiens
cagtgaatccaaaag

SEQ ID NO: 1748341 - DNA, 15 bp, Homo sapiens
agtgaatccaaaaga

SEQ ID NO: 1748342 - DNA, 15 bp, Homo sapiens
gtgaatccaaaagaa

SEQ ID NO: 1748343 - DNA, 15 bp, Homo sapiens
tgaatccaaaagaaa

SEQ ID NO: 1748344 - DNA, 15 bp, Homo sapiens
gaatccaaaagaaag

SEQ ID NO: 1748345 - DNA, 15 bp, Homo sapiens
aatccaaaagaaagt

SEQ ID NO: 1748346 - DNA, 15 bp, Homo sapiens
atccaaaagaaagta

SEQ ID NO: 1748347 - DNA, 15 bp, Homo sapiens
tccaaaagaaagtat

SEQ ID NO: 1748348 - DNA, 15 bp, Homo sapiens
ccaaaagaaagtata

SEQ ID NO: 1748349 - DNA, 15 bp, Homo sapiens
caaaagaaagtatac

SEQ ID NO: 1748350 - DNA, 15 bp, Homo sapiens
aaaagaaagtatact

SEQ ID NO: 1748351 - DNA, 15 bp, Homo sapiens
aaagaaagtatactg

SEQ ID NO: 1748352 - DNA, 15 bp, Homo sapiens
aagaaagtatactga

SEQ ID NO: 1748353 - DNA, 15 bp, Homo sapiens
agaaagtatactgaa

SEQ ID NO: 1748354 - DNA, 15 bp, Homo sapiens
gaaagtatactgaaa

SEQ ID NO: 1748355 - DNA, 15 bp, Homo sapiens
aaagtatactgaaaa

SEQ ID NO: 1748356 - DNA, 15 bp, Homo sapiens
aagtatactgaaaag

SEQ ID NO: 1748357 - DNA, 15 bp, Homo sapiens
agtatactgaaaaga

SEQ ID NO: 1748358 - DNA, 15 bp, Homo sapiens
gtatactgaaaagag

SEQ ID NO: 1748359 - DNA, 15 bp, Homo sapiens
tatactgaaaagagt

SEQ ID NO: 1748360 - DNA, 15 bp, Homo sapiens
atactgaaaagagtg

SEQ ID NO: 1748361 - DNA, 15 bp, Homo sapiens
tactgaaaagagtga

SEQ ID NO: 1748362 - DNA, 15 bp, Homo sapiens
actgaaaagagtgaa

SEQ ID NO: 1748363 - DNA, 15 bp, Homo sapiens
ctgaaaagagtgaag

SEQ ID NO: 1748364 - DNA, 15 bp, Homo sapiens
tgaaaagagtgaagg

SEQ ID NO: 1748365 - DNA, 15 bp, Homo sapiens
gaaaagagtgaagga

SEQ ID NO: 1748366 - DNA, 15 bp, Homo sapiens
aaaagagtgaaggat

SEQ ID NO: 1748367 - DNA, 15 bp, Homo sapiens
aaagagtgaaggata

SEQ ID NO: 1748368 - DNA, 15 bp, Homo sapiens
aagagtgaaggatat

SEQ ID NO: 1748369 - DNA, 15 bp, Homo sapiens
agagtgaaggatata

SEQ ID NO: 1748370 - DNA, 15 bp, Homo sapiens
gagtgaaggatatag

SEQ ID NO: 1748371 - DNA, 15 bp, Homo sapiens
agtgaaggatatagg

SEQ ID NO: 1748372 - DNA, 15 bp, Homo sapiens
gtgaaggatatagga

SEQ ID NO: 1748373 - DNA, 15 bp, Homo sapiens
tgaaggatataggat

SEQ ID NO: 1748374 - DNA, 15 bp, Homo sapiens
gaaggatataggata

SEQ ID NO: 1748375 - DNA, 15 bp, Homo sapiens
aaggatataggatac

SEQ ID NO: 1748376 - DNA, 15 bp, Homo sapiens
aggatataggataca

SEQ ID NO: 1748377 - DNA, 15 bp, Homo sapiens
ggatataggatacat

SEQ ID NO: 1748378 - DNA, 15 bp, Homo sapiens
gatataggatacatc

SEQ ID NO: 1748379 - DNA, 15 bp, Homo sapiens
atataggatacatct

SEQ ID NO: 1748380 - DNA, 15 bp, Homo sapiens
tataggatacatctt

SEQ ID NO: 1748381 - DNA, 15 bp, Homo sapiens
ataggatacatcttt

SEQ ID NO: 1748382 - DNA, 15 bp, Homo sapiens
taggatacatcttta

SEQ ID NO: 1748383 - DNA, 15 bp, Homo sapiens
aggatacatctttaa

SEQ ID NO: 1748384 - DNA, 15 bp, Homo sapiens
ggatacatctttaaa

SEQ ID NO: 1748385 - DNA, 15 bp, Homo sapiens
gatacatctttaaag

SEQ ID NO: 1748386 - DNA, 15 bp, Homo sapiens
atacatctttaaaga

SEQ ID NO: 1748387 - DNA, 15 bp, Homo sapiens
tacatctttaaagag

SEQ ID NO: 1748388 - DNA, 15 bp, Homo sapiens
acatctttaaagaga

SEQ ID NO: 1748389 - DNA, 15 bp, Homo sapiens
catctttaaagagaa

SEQ ID NO: 1748390 - DNA, 15 bp, Homo sapiens
atctttaaagagaaa

SEQ ID NO: 1748391 - DNA, 15 bp, Homo sapiens
tctttaaagagaaat

SEQ ID NO: 1748392 - DNA, 15 bp, Homo sapiens
ctttaaagagaaatt

SEQ ID NO: 1748393 - DNA, 15 bp, Homo sapiens
tttaaagagaaattt

SEQ ID NO: 1748394 - DNA, 15 bp, Homo sapiens
ttaaagagaaatttg

SEQ ID NO: 1748395 - DNA, 15 bp, Homo sapiens
taaagagaaatttgc

SEQ ID NO: 1748396 - DNA, 15 bp, Homo sapiens
aaagagaaatttgct

SEQ ID NO: 1748397 - DNA, 15 bp, Homo sapiens
aagagaaatttgcta

SEQ ID NO: 1748398 - DNA, 15 bp, Homo sapiens
agagaaatttgctaa

SEQ ID NO: 1748399 - DNA, 15 bp, Homo sapiens
gagaaatttgctaaa

SEQ ID NO: 1748400 - DNA, 15 bp, Homo sapiens
agaaatttgctaaag

SEQ ID NO: 1748401 - DNA, 15 bp, Homo sapiens
gaaatttgctaaagc

SEQ ID NO: 1748402 - DNA, 15 bp, Homo sapiens
aaatttgctaaagct

SEQ ID NO: 1748403 - DNA, 15 bp, Homo sapiens
aatttgctaaagctg

SEQ ID NO: 1748404 - DNA, 15 bp, Homo sapiens
atttgctaaagctgt

SEQ ID NO: 1748405 - DNA, 15 bp, Homo sapiens
tttgctaaagctgtg

SEQ ID NO: 1748406 - DNA, 15 bp, Homo sapiens
ttgctaaagctgtgg

SEQ ID NO: 1748407 - DNA, 15 bp, Homo sapiens
tgctaaagctgtggg

SEQ ID NO: 1748408 - DNA, 15 bp, Homo sapiens
gctaaagctgtggga

SEQ ID NO: 1748409 - DNA, 15 bp, Homo sapiens
ctaaagctgtgggac

SEQ ID NO: 1748410 - DNA, 15 bp, Homo sapiens
taaagctgtgggaca

SEQ ID NO: 1748411 - DNA, 15 bp, Homo sapiens
aaagctgtgggacag

SEQ ID NO: 1748412 - DNA, 15 bp, Homo sapiens
aagctgtgggacagg

SEQ ID NO: 1748413 - DNA, 15 bp, Homo sapiens
agctgtgggacaggg

SEQ ID NO: 1748414 - DNA, 15 bp, Homo sapiens
gctgtgggacagggt

SEQ ID NO: 1748415 - DNA, 15 bp, Homo sapiens
ctgtgggacagggtt

SEQ ID NO: 1748416 - DNA, 15 bp, Homo sapiens
tgtgggacagggttg

SEQ ID NO: 1748417 - DNA, 15 bp, Homo sapiens
gtgggacagggttgt

SEQ ID NO: 1748418 - DNA, 15 bp, Homo sapiens
tgggacagggttgtg

SEQ ID NO: 1748419 - DNA, 15 bp, Homo sapiens
gggacagggttgtgt

SEQ ID NO: 1748420 - DNA, 15 bp, Homo sapiens
ggacagggttgtgtc

SEQ ID NO: 1748421 - DNA, 15 bp, Homo sapiens
gacagggttgtgtcg

SEQ ID NO: 1748422 - DNA, 15 bp, Homo sapiens
acagggttgtgtcga

SEQ ID NO: 1748423 - DNA, 15 bp, Homo sapiens
cagggttgtgtcgaa

SEQ ID NO: 1748424 - DNA, 15 bp, Homo sapiens
agggttgtgtcgaaa

SEQ ID NO: 1748425 - DNA, 15 bp, Homo sapiens
gggttgtgtcgaaat

SEQ ID NO: 1748426 - DNA, 15 bp, Homo sapiens
ggttgtgtcgaaatt

SEQ ID NO: 1748427 - DNA, 15 bp, Homo sapiens
gttgtgtcgaaattg

SEQ ID NO: 1748428 - DNA, 15 bp, Homo sapiens
ttgtgtcgaaattgg

SEQ ID NO: 1748429 - DNA, 15 bp, Homo sapiens
tgtgtcgaaattgga

SEQ ID NO: 1748430 - DNA, 15 bp, Homo sapiens
gtgtcgaaattggat

SEQ ID NO: 1748431 - DNA, 15 bp, Homo sapiens
tgtcgaaattggatc

SEQ ID NO: 1748432 - DNA, 15 bp, Homo sapiens
gtcgaaattggatca

SEQ ID NO: 1748433 - DNA, 15 bp, Homo sapiens
tcgaaattggatcac

SEQ ID NO: 1748434 - DNA, 15 bp, Homo sapiens
cgaaattggatcaca

SEQ ID NO: 1748435 - DNA, 15 bp, Homo sapiens
gaaattggatcacag

SEQ ID NO: 1748436 - DNA, 15 bp, Homo sapiens
aaattggatcacagg

SEQ ID NO: 1748437 - DNA, 15 bp, Homo sapiens
aattggatcacaggt

SEQ ID NO: 1748438 - DNA, 15 bp, Homo sapiens
attggatcacaggta

SEQ ID NO: 1748439 - DNA, 15 bp, Homo sapiens
ttggatcacaggtaa

SEQ ID NO: 1748440 - DNA, 15 bp, Homo sapiens
tggatcacaggtaac

SEQ ID NO: 1748441 - DNA, 15 bp, Homo sapiens
ggatcacaggtaact

SEQ ID NO: 1748442 - DNA, 15 bp, Homo sapiens
gatcacaggtaactt

SEQ ID NO: 1748443 - DNA, 15 bp, Homo sapiens
atcacaggtaacttg

SEQ ID NO: 1748444 - DNA, 15 bp, Homo sapiens
tcacaggtaacttga

SEQ ID NO: 1748445 - DNA, 15 bp, Homo sapiens
cacaggtaacttgaa

SEQ ID NO: 1748446 - DNA, 15 bp, Homo sapiens
acaggtaacttgaat

SEQ ID NO: 1748447 - DNA, 15 bp, Homo sapiens
caggtaacttgaatt

SEQ ID NO: 1748448 - DNA, 15 bp, Homo sapiens
aggtaacttgaattc

SEQ ID NO: 1748449 - DNA, 15 bp, Homo sapiens
ggtaacttgaattca

SEQ ID NO: 1748450 - DNA, 15 bp, Homo sapiens
gtaacttgaattcat

SEQ ID NO: 1748451 - DNA, 15 bp, Homo sapiens
taacttgaattcatt

SEQ ID NO: 1748452 - DNA, 15 bp, Homo sapiens
aacttgaattcattg

SEQ ID NO: 1748453 - DNA, 15 bp, Homo sapiens
acttgaattcattgt

SEQ ID NO: 1748454 - DNA, 15 bp, Homo sapiens
cttgaattcattgta

SEQ ID NO: 1748455 - DNA, 15 bp, Homo sapiens
ttgaattcattgtaa

SEQ ID NO: 1748456 - DNA, 15 bp, Homo sapiens
tgaattcattgtaat

SEQ ID NO: 1748457 - DNA, 15 bp, Homo sapiens
gaattcattgtaatt

SEQ ID NO: 1748458 - DNA, 15 bp, Homo sapiens
aattcattgtaattc

SEQ ID NO: 1748459 - DNA, 15 bp, Homo sapiens
attcattgtaattcg

SEQ ID NO: 1748460 - DNA, 15 bp, Homo sapiens
ttcattgtaattcgt

SEQ ID NO: 1748461 - DNA, 15 bp, Homo sapiens
tcattgtaattcgtg

SEQ ID NO: 1748462 - DNA, 15 bp, Homo sapiens
cattgtaattcgtgg

SEQ ID NO: 1748463 - DNA, 15 bp, Homo sapiens
attgtaattcgtggt

SEQ ID NO: 1748464 - DNA, 15 bp, Homo sapiens
ttgtaattcgtggta

SEQ ID NO: 1748465 - DNA, 15 bp, Homo sapiens
tgtaattcgtggtac

SEQ ID NO: 1748466 - DNA, 15 bp, Homo sapiens
gtaattcgtggtact

SEQ ID NO: 1748467 - DNA, 15 bp, Homo sapiens
taattcgtggtacta

SEQ ID NO: 1748468 - DNA, 15 bp, Homo sapiens
aattcgtggtactat

SEQ ID NO: 1748469 - DNA, 15 bp, Homo sapiens
attcgtggtactata

SEQ ID NO: 1748470 - DNA, 15 bp, Homo sapiens
ttcgtggtactatag

SEQ ID NO: 1748471 - DNA, 15 bp, Homo sapiens
tcgtggtactataga

SEQ ID NO: 1748472 - DNA, 15 bp, Homo sapiens
cgtggtactatagag

SEQ ID NO: 1748473 - DNA, 15 bp, Homo sapiens
gtggtactatagagt

SEQ ID NO: 1748474 - DNA, 15 bp, Homo sapiens
tggtactatagagta

SEQ ID NO: 1748475 - DNA, 15 bp, Homo sapiens
ggtactatagagtaa

SEQ ID NO: 1748476 - DNA, 15 bp, Homo sapiens
gtactatagagtaat

SEQ ID NO: 1748477 - DNA, 15 bp, Homo sapiens
tactatagagtaata

SEQ ID NO: 1748478 - DNA, 15 bp, Homo sapiens
actatagagtaataa

SEQ ID NO: 1748479 - DNA, 15 bp, Homo sapiens
ctatagagtaataat

SEQ ID NO: 1748480 - DNA, 15 bp, Homo sapiens
tatagagtaataata

SEQ ID NO: 1748481 - DNA, 15 bp, Homo sapiens
atagagtaataatat

SEQ ID NO: 1748482 - DNA, 15 bp, Homo sapiens
tagagtaataatatt

SEQ ID NO: 1748483 - DNA, 15 bp, Homo sapiens
agagtaataatatta

SEQ ID NO: 1748484 - DNA, 15 bp, Homo sapiens
gagtaataatattaa

SEQ ID NO: 1748485 - DNA, 15 bp, Homo sapiens
agtaataatattaaa

SEQ ID NO: 1748486 - DNA, 15 bp, Homo sapiens
gtaataatattaaaa

SEQ ID NO: 1748487 - DNA, 15 bp, Homo sapiens
taataatattaaaag

SEQ ID NO: 1748488 - DNA, 15 bp, Homo sapiens
aataatattaaaagc

SEQ ID NO: 1748489 - DNA, 15 bp, Homo sapiens
ataatattaaaagca

SEQ ID NO: 1748490 - DNA, 15 bp, Homo sapiens
taatattaaaagcag

SEQ ID NO: 1748491 - DNA, 15 bp, Homo sapiens
aatattaaaagcagc

SEQ ID NO: 1748492 - DNA, 15 bp, Homo sapiens
atattaaaagcagca

SEQ ID NO: 1748493 - DNA, 15 bp, Homo sapiens
tattaaaagcagcat

SEQ ID NO: 1748494 - DNA, 15 bp, Homo sapiens
attaaaagcagcatc

SEQ ID NO: 1748495 - DNA, 15 bp, Homo sapiens
ttaaaagcagcatct

SEQ ID NO: 1748496 - DNA, 15 bp, Homo sapiens
taaaagcagcatctt

SEQ ID NO: 1748497 - DNA, 15 bp, Homo sapiens
aaaagcagcatcttt

SEQ ID NO: 1748498 - DNA, 15 bp, Homo sapiens
aaagcagcatctttc

SEQ ID NO: 1748499 - DNA, 15 bp, Homo sapiens
aagcagcatctttcc

SEQ ID NO: 1748500 - DNA, 15 bp, Homo sapiens
agcagcatctttcca

SEQ ID NO: 1748501 - DNA, 15 bp, Homo sapiens
gcagcatctttccag

SEQ ID NO: 1748502 - DNA, 15 bp, Homo sapiens
cagcatctttccagt

SEQ ID NO: 1748503 - DNA, 15 bp, Homo sapiens
agcatctttccagtt

SEQ ID NO: 1748504 - DNA, 15 bp, Homo sapiens
gcatctttccagttc

SEQ ID NO: 1748505 - DNA, 15 bp, Homo sapiens
catctttccagttcg

SEQ ID NO: 1748506 - DNA, 15 bp, Homo sapiens
atctttccagttcgt

SEQ ID NO: 1748507 - DNA, 15 bp, Homo sapiens
tctttccagttcgta

SEQ ID NO: 1748508 - DNA, 15 bp, Homo sapiens
ctttccagttcgtat

SEQ ID NO: 1748509 - DNA, 15 bp, Homo sapiens
tttccagttcgtata

SEQ ID NO: 1748510 - DNA, 15 bp, Homo sapiens
ttccagttcgtataa

SEQ ID NO: 1748511 - DNA, 15 bp, Homo sapiens
tccagttcgtataaa

SEQ ID NO: 1748512 - DNA, 15 bp, Homo sapiens
ccagttcgtataaat

SEQ ID NO: 1748513 - DNA, 15 bp, Homo sapiens
cagttcgtataaata

SEQ ID NO: 1748514 - DNA, 15 bp, Homo sapiens
agttcgtataaatac

SEQ ID NO: 1748515 - DNA, 15 bp, Homo sapiens
gttcgtataaatact

SEQ ID NO: 1748516 - DNA, 15 bp, Homo sapiens
ttcgtataaatactc

SEQ ID NO: 1748517 - DNA, 15 bp, Homo sapiens
tcgtataaatactct

SEQ ID NO: 1748518 - DNA, 15 bp, Homo sapiens
cgtataaatactcta

SEQ ID NO: 1748519 - DNA, 15 bp, Homo sapiens
gtataaatactctaa

SEQ ID NO: 1748520 - DNA, 15 bp, Homo sapiens
tataaatactctaac

SEQ ID NO: 1748521 - DNA, 15 bp, Homo sapiens
ataaatactctaaca

SEQ ID NO: 1748522 - DNA, 15 bp, Homo sapiens
taaatactctaacag

SEQ ID NO: 1748523 - DNA, 15 bp, Homo sapiens
aaatactctaacagt

SEQ ID NO: 1748524 - DNA, 15 bp, Homo sapiens
aatactctaacagta

SEQ ID NO: 1748525 - DNA, 15 bp, Homo sapiens
atactctaacagtat

SEQ ID NO: 1748526 - DNA, 15 bp, Homo sapiens
tactctaacagtatt

SEQ ID NO: 1748527 - DNA, 15 bp, Homo sapiens
actctaacagtattt

SEQ ID NO: 1748528 - DNA, 15 bp, Homo sapiens
ctctaacagtatttg

SEQ ID NO: 1748529 - DNA, 15 bp, Homo sapiens
tctaacagtatttgt

SEQ ID NO: 1748530 - DNA, 15 bp, Homo sapiens
ctaacagtatttgtc

SEQ ID NO: 1748531 - DNA, 15 bp, Homo sapiens
taacagtatttgtct

SEQ ID NO: 1748532 - DNA, 15 bp, Homo sapiens
aacagtatttgtcta

SEQ ID NO: 1748533 - DNA, 15 bp, Homo sapiens
acagtatttgtctag

SEQ ID NO: 1748534 - DNA, 15 bp, Homo sapiens
cagtatttgtctagt

SEQ ID NO: 1748535 - DNA, 15 bp, Homo sapiens
agtatttgtctagta

SEQ ID NO: 1748536 - DNA, 15 bp, Homo sapiens
gtatttgtctagtag

SEQ ID NO: 1748537 - DNA, 15 bp, Homo sapiens
tatttgtctagtagt

SEQ ID NO: 1748538 - DNA, 15 bp, Homo sapiens
atttgtctagtagta

SEQ ID NO: 1748539 - DNA, 15 bp, Homo sapiens
tttgtctagtagtat

SEQ ID NO: 1748540 - DNA, 15 bp, Homo sapiens
ttgtctagtagtata

SEQ ID NO: 1748541 - DNA, 15 bp, Homo sapiens
tgtctagtagtataa

SEQ ID NO: 1748542 - DNA, 15 bp, Homo sapiens
gtctagtagtataaa

SEQ ID NO: 1748543 - DNA, 15 bp, Homo sapiens
tctagtagtataaaa

SEQ ID NO: 1748544 - DNA, 15 bp, Homo sapiens
ctagtagtataaaat

SEQ ID NO: 1748545 - DNA, 15 bp, Homo sapiens
tagtagtataaaata

SEQ ID NO: 1748546 - DNA, 15 bp, Homo sapiens
agtagtataaaatac

SEQ ID NO: 1748547 - DNA, 15 bp, Homo sapiens
gtagtataaaatact

SEQ ID NO: 1748548 - DNA, 15 bp, Homo sapiens
tagtataaaatactg

SEQ ID NO: 1748549 - DNA, 15 bp, Homo sapiens
agtataaaatactgt

SEQ ID NO: 1748550 - DNA, 15 bp, Homo sapiens
gtataaaatactgtc

SEQ ID NO: 1748551 - DNA, 15 bp, Homo sapiens
tataaaatactgtca

SEQ ID NO: 1748552 - DNA, 15 bp, Homo sapiens
ataaaatactgtcag

SEQ ID NO: 1748553 - DNA, 15 bp, Homo sapiens
taaaatactgtcaga

SEQ ID NO: 1748554 - DNA, 15 bp, Homo sapiens
aaaatactgtcagat

SEQ ID NO: 1748555 - DNA, 15 bp, Homo sapiens
aaatactgtcagata

SEQ ID NO: 1748556 - DNA, 15 bp, Homo sapiens
aatactgtcagatac

SEQ ID NO: 1748557 - DNA, 15 bp, Homo sapiens
atactgtcagatact

SEQ ID NO: 1748558 - DNA, 15 bp, Homo sapiens
tactgtcagatacta

SEQ ID NO: 1748559 - DNA, 15 bp, Homo sapiens
actgtcagatactat

SEQ ID NO: 1748560 - DNA, 15 bp, Homo sapiens
ctgtcagatactata

SEQ ID NO: 1748561 - DNA, 15 bp, Homo sapiens
tgtcagatactatat

SEQ ID NO: 1748562 - DNA, 15 bp, Homo sapiens
gtcagatactatatc

SEQ ID NO: 1748563 - DNA, 15 bp, Homo sapiens
tcagatactatatcc

SEQ ID NO: 1748564 - DNA, 15 bp, Homo sapiens
cagatactatatccc

SEQ ID NO: 1748565 - DNA, 15 bp, Homo sapiens
agatactatatccct

SEQ ID NO: 1748566 - DNA, 15 bp, Homo sapiens
gatactatatccctg

SEQ ID NO: 1748567 - DNA, 15 bp, Homo sapiens
atactatatccctgc

SEQ ID NO: 1748568 - DNA, 15 bp, Homo sapiens
tactatatccctgct

SEQ ID NO: 1748569 - DNA, 15 bp, Homo sapiens
actatatccctgctg

SEQ ID NO: 1748570 - DNA, 15 bp, Homo sapiens
ctatatccctgctgc

SEQ ID NO: 1748571 - DNA, 15 bp, Homo sapiens
tatatccctgctgcc

SEQ ID NO: 1748572 - DNA, 15 bp, Homo sapiens
atatccctgctgcct

SEQ ID NO: 1748573 - DNA, 15 bp, Homo sapiens
tatccctgctgcctg

SEQ ID NO: 1748574 - DNA, 15 bp, Homo sapiens
atccctgctgcctgt

SEQ ID NO: 1748575 - DNA, 15 bp, Homo sapiens
tccctgctgcctgtg

SEQ ID NO: 1748576 - DNA, 15 bp, Homo sapiens
ccctgctgcctgtgt

SEQ ID NO: 1748577 - DNA, 15 bp, Homo sapiens
cctgctgcctgtgta

SEQ ID NO: 1748578 - DNA, 15 bp, Homo sapiens
ctgctgcctgtgtat

SEQ ID NO: 1748579 - DNA, 15 bp, Homo sapiens
tgctgcctgtgtatg

SEQ ID NO: 1748580 - DNA, 15 bp, Homo sapiens
gctgcctgtgtatgc

SEQ ID NO: 1748581 - DNA, 15 bp, Homo sapiens
ctgcctgtgtatgct

SEQ ID NO: 1748582 - DNA, 15 bp, Homo sapiens
tgcctgtgtatgctg

SEQ ID NO: 1748583 - DNA, 15 bp, Homo sapiens
gcctgtgtatgctgc

SEQ ID NO: 1748584 - DNA, 15 bp, Homo sapiens
cctgtgtatgctgct

SEQ ID NO: 1748585 - DNA, 15 bp, Homo sapiens
ctgtgtatgctgcta

SEQ ID NO: 1748586 - DNA, 15 bp, Homo sapiens
tgtgtatgctgctat

SEQ ID NO: 1748587 - DNA, 15 bp, Homo sapiens
gtgtatgctgctatt

SEQ ID NO: 1748588 - DNA, 15 bp, Homo sapiens
tgtatgctgctattt

SEQ ID NO: 1748589 - DNA, 15 bp, Homo sapiens
gtatgctgctattta

SEQ ID NO: 1748590 - DNA, 15 bp, Homo sapiens
tatgctgctatttat

SEQ ID NO: 1748591 - DNA, 15 bp, Homo sapiens
atgctgctatttatg

SEQ ID NO: 1748592 - DNA, 15 bp, Homo sapiens
tgctgctatttatgg

SEQ ID NO: 1748593 - DNA, 15 bp, Homo sapiens
gctgctatttatggg

SEQ ID NO: 1748594 - DNA, 15 bp, Homo sapiens
ctgctatttatgggt

SEQ ID NO: 1748595 - DNA, 15 bp, Homo sapiens
tgctatttatgggta

SEQ ID NO: 1748596 - DNA, 15 bp, Homo sapiens
gctatttatgggtaa

SEQ ID NO: 1748597 - DNA, 15 bp, Homo sapiens
ctatttatgggtaac

SEQ ID NO: 1748598 - DNA, 15 bp, Homo sapiens
tatttatgggtaact

SEQ ID NO: 1748599 - DNA, 15 bp, Homo sapiens
atttatgggtaactt

SEQ ID NO: 1748600 - DNA, 15 bp, Homo sapiens
tttatgggtaacttt

SEQ ID NO: 1748601 - DNA, 15 bp, Homo sapiens
tatacagctgtacaa

SEQ ID NO: 1748602 - DNA, 15 bp, Homo sapiens
atacagctgtacaaa

SEQ ID NO: 1748603 - DNA, 15 bp, Homo sapiens
tacagctgtacaaaa

SEQ ID NO: 1748604 - DNA, 15 bp, Homo sapiens
acagctgtacaaaaa

SEQ ID NO: 1748605 - DNA, 15 bp, Homo sapiens
cagctgtacaaaaat

SEQ ID NO: 1748606 - DNA, 15 bp, Homo sapiens
agctgtacaaaaata

SEQ ID NO: 1748607 - DNA, 15 bp, Homo sapiens
gctgtacaaaaatat

SEQ ID NO: 1748608 - DNA, 15 bp, Homo sapiens
ctgtacaaaaatatt

SEQ ID NO: 1748609 - DNA, 15 bp, Homo sapiens
tgtacaaaaatattt

SEQ ID NO: 1748610 - DNA, 15 bp, Homo sapiens
gtacaaaaatatttt

SEQ ID NO: 1748611 - DNA, 15 bp, Homo sapiens
tacaaaaatattttc

SEQ ID NO: 1748612 - DNA, 15 bp, Homo sapiens
acaaaaatattttct

SEQ ID NO: 1748613 - DNA, 15 bp, Homo sapiens
caaaaatattttctt

SEQ ID NO: 1748614 - DNA, 15 bp, Homo sapiens
aaaaatattttcttt

SEQ ID NO: 1748615 - DNA, 15 bp, Homo sapiens
aaaatattttctttc

SEQ ID NO: 1748616 - DNA, 15 bp, Homo sapiens
aaatattttctttct

SEQ ID NO: 1748617 - DNA, 15 bp, Homo sapiens
aatattttctttctt

SEQ ID NO: 1748618 - DNA, 15 bp, Homo sapiens
atattttctttcttt

SEQ ID NO: 1748619 - DNA, 15 bp, Homo sapiens
tattttctttcttta

SEQ ID NO: 1748620 - DNA, 15 bp, Homo sapiens
attttctttctttat

SEQ ID NO: 1748621 - DNA, 15 bp, Homo sapiens
ttttctttctttata

SEQ ID NO: 1748622 - DNA, 15 bp, Homo sapiens
tctttctttataatc

SEQ ID NO: 1748623 - DNA, 15 bp, Homo sapiens
ctttctttataatcc

SEQ ID NO: 1748624 - DNA, 15 bp, Homo sapiens
tttctttataatcct

SEQ ID NO: 1748625 - DNA, 15 bp, Homo sapiens
ttctttataatcctt

SEQ ID NO: 1748626 - DNA, 15 bp, Homo sapiens
tctttataatcctta

SEQ ID NO: 1748627 - DNA, 15 bp, Homo sapiens
ctttataatccttat

SEQ ID NO: 1748628 - DNA, 15 bp, Homo sapiens
tttataatccttatt

SEQ ID NO: 1748629 - DNA, 15 bp, Homo sapiens
ttataatccttattc

SEQ ID NO: 1748630 - DNA, 15 bp, Homo sapiens
tataatccttattct

SEQ ID NO: 1748631 - DNA, 15 bp, Homo sapiens
ataatccttattctg

SEQ ID NO: 1748632 - DNA, 15 bp, Homo sapiens
taatccttattctgt

SEQ ID NO: 1748633 - DNA, 15 bp, Homo sapiens
aatccttattctgta

SEQ ID NO: 1748634 - DNA, 15 bp, Homo sapiens
atccttattctgtac

SEQ ID NO: 1748635 - DNA, 15 bp, Homo sapiens
tccttattctgtaca

SEQ ID NO: 1748636 - DNA, 15 bp, Homo sapiens
ccttattctgtacac

SEQ ID NO: 1748637 - DNA, 15 bp, Homo sapiens
cttattctgtacact

SEQ ID NO: 1748638 - DNA, 15 bp, Homo sapiens
ttattctgtacactt

SEQ ID NO: 1748639 - DNA, 15 bp, Homo sapiens
tattctgtacacttt

SEQ ID NO: 1748640 - DNA, 15 bp, Homo sapiens
attctgtacactttt

SEQ ID NO: 1748641 - DNA, 15 bp, Homo sapiens
ttctgtacacttttt

SEQ ID NO: 1748642 - DNA, 15 bp, Homo sapiens
tctgtacactttttt

SEQ ID NO: 1748643 - DNA, 15 bp, Homo sapiens
ctgtacacttttttc

SEQ ID NO: 1748644 - DNA, 15 bp, Homo sapiens
tgtacacttttttct

SEQ ID NO: 1748645 - DNA, 15 bp, Homo sapiens
gtacacttttttcta

SEQ ID NO: 1748646 - DNA, 15 bp, Homo sapiens
tacacttttttctat

SEQ ID NO: 1748647 - DNA, 15 bp, Homo sapiens
acacttttttctatt

SEQ ID NO: 1748648 - DNA, 15 bp, Homo sapiens
cacttttttctattt

SEQ ID NO: 1748649 - DNA, 15 bp, Homo sapiens
acttttttctattta

SEQ ID NO: 1748650 - DNA, 15 bp, Homo sapiens
cttttttctatttaa

SEQ ID NO: 1748651 - DNA, 15 bp, Homo sapiens
ttttttctatttaaa

SEQ ID NO: 1748652 - DNA, 15 bp, Homo sapiens
tttttctatttaaaa

SEQ ID NO: 1748653 - DNA, 15 bp, Homo sapiens
ttttctatttaaaaa

SEQ ID NO: 1748654 - DNA, 15 bp, Homo sapiens
tttctatttaaaaat

SEQ ID NO: 1748655 - DNA, 15 bp, Homo sapiens
ttctatttaaaaatt

SEQ ID NO: 1748656 - DNA, 15 bp, Homo sapiens
tctatttaaaaattt

SEQ ID NO: 1748657 - DNA, 15 bp, Homo sapiens
ctatttaaaaatttt

SEQ ID NO: 1748658 - DNA, 15 bp, Homo sapiens
tatttaaaaattttt

SEQ ID NO: 1748659 - DNA, 15 bp, Homo sapiens
ttaaaaattttttca

SEQ ID NO: 1748660 - DNA, 15 bp, Homo sapiens
taaaaattttttcaa

SEQ ID NO: 1748661 - DNA, 15 bp, Homo sapiens
aaaaattttttcaat

SEQ ID NO: 1748662 - DNA, 15 bp, Homo sapiens
aaaattttttcaatt

SEQ ID NO: 1748663 - DNA, 15 bp, Homo sapiens
aaattttttcaattt

SEQ ID NO: 1748664 - DNA, 15 bp, Homo sapiens
aattttttcaatttc

SEQ ID NO: 1748665 - DNA, 15 bp, Homo sapiens
attttttcaatttca

SEQ ID NO: 1748666 - DNA, 15 bp, Homo sapiens
ttttttcaatttcat

SEQ ID NO: 1748667 - DNA, 15 bp, Homo sapiens
tttttcaatttcata

SEQ ID NO: 1748668 - DNA, 15 bp, Homo sapiens
ttttcaatttcataa

SEQ ID NO: 1748669 - DNA, 15 bp, Homo sapiens
tttcaatttcataaa

SEQ ID NO: 1748670 - DNA, 15 bp, Homo sapiens
ttcaatttcataaag

SEQ ID NO: 1748671 - DNA, 15 bp, Homo sapiens
tcaatttcataaaga

SEQ ID NO: 1748672 - DNA, 15 bp, Homo sapiens
caatttcataaagat

SEQ ID NO: 1748673 - DNA, 15 bp, Homo sapiens
aatttcataaagatt

SEQ ID NO: 1748674 - DNA, 15 bp, Homo sapiens
atttcataaagattt

SEQ ID NO: 1748675 - DNA, 15 bp, Homo sapiens
tttcataaagatttt

SEQ ID NO: 1748676 - DNA, 15 bp, Homo sapiens
ttcataaagattttt

SEQ ID NO: 1748677 - DNA, 15 bp, Homo sapiens
tcataaagatttttg

SEQ ID NO: 1748678 - DNA, 15 bp, Homo sapiens
cataaagatttttgc

SEQ ID NO: 1748679 - DNA, 15 bp, Homo sapiens
ataaagatttttgcc

SEQ ID NO: 1748680 - DNA, 15 bp, Homo sapiens
taaagatttttgcca

SEQ ID NO: 1748681 - DNA, 15 bp, Homo sapiens
aaagatttttgccaa

SEQ ID NO: 1748682 - DNA, 15 bp, Homo sapiens
aagatttttgccaaa

SEQ ID NO: 1748683 - DNA, 15 bp, Homo sapiens
agatttttgccaaaa

SEQ ID NO: 1748684 - DNA, 15 bp, Homo sapiens
gatttttgccaaaaa

SEQ ID NO: 1748685 - DNA, 15 bp, Homo sapiens
atttttgccaaaaac

SEQ ID NO: 1748686 - DNA, 15 bp, Homo sapiens
tttttgccaaaaaca

SEQ ID NO: 1748687 - DNA, 15 bp, Homo sapiens
ttttgccaaaaacaa

SEQ ID NO: 1748688 - DNA, 15 bp, Homo sapiens
tttgccaaaaacaaa

SEQ ID NO: 1748689 - DNA, 15 bp, Homo sapiens
ttgccaaaaacaaag

SEQ ID NO: 1748690 - DNA, 15 bp, Homo sapiens
aaaacaaaggcaaac

SEQ ID NO: 1748691 - DNA, 15 bp, Homo sapiens
aaacaaaggcaaaca

SEQ ID NO: 1748692 - DNA, 15 bp, Homo sapiens
aacaaaggcaaacac

SEQ ID NO: 1748693 - DNA, 15 bp, Homo sapiens
acaaaggcaaacaca

SEQ ID NO: 1748694 - DNA, 15 bp, Homo sapiens
caaaggcaaacacac

SEQ ID NO: 1748695 - DNA, 15 bp, Homo sapiens
aaaggcaaacacaca

SEQ ID NO: 1748696 - DNA, 15 bp, Homo sapiens
aaggcaaacacacac

SEQ ID NO: 1748697 - DNA, 15 bp, Homo sapiens
aggcaaacacacaca

SEQ ID NO: 1748698 - DNA, 15 bp, Homo sapiens
ggcaaacacacacat

SEQ ID NO: 1748699 - DNA, 15 bp, Homo sapiens
gcaaacacacacatt

SEQ ID NO: 1748700 - DNA, 15 bp, Homo sapiens
caaacacacacatta

SEQ ID NO: 1748701 - DNA, 15 bp, Homo sapiens
aaacacacacattag

SEQ ID NO: 1748702 - DNA, 15 bp, Homo sapiens
aacacacacattagc

SEQ ID NO: 1748703 - DNA, 15 bp, Homo sapiens
acacacacattagcc

SEQ ID NO: 1748704 - DNA, 15 bp, Homo sapiens
cacacacattagcct

SEQ ID NO: 1748705 - DNA, 15 bp, Homo sapiens
acacacattagccta

SEQ ID NO: 1748706 - DNA, 15 bp, Homo sapiens
cacacattagcctag

SEQ ID NO: 1748707 - DNA, 15 bp, Homo sapiens
acacattagcctagg

SEQ ID NO: 1748708 - DNA, 15 bp, Homo sapiens
cacattagcctaggc

SEQ ID NO: 1748709 - DNA, 15 bp, Homo sapiens
acattagcctaggcc

SEQ ID NO: 1748710 - DNA, 15 bp, Homo sapiens
cattagcctaggcct

SEQ ID NO: 1748711 - DNA, 15 bp, Homo sapiens
attagcctaggccta

SEQ ID NO: 1748712 - DNA, 15 bp, Homo sapiens
ttagcctaggcctac

SEQ ID NO: 1748713 - DNA, 15 bp, Homo sapiens
tagcctaggcctaca

SEQ ID NO: 1748714 - DNA, 15 bp, Homo sapiens
agcctaggcctacac

SEQ ID NO: 1748715 - DNA, 15 bp, Homo sapiens
gcctaggcctacaca

SEQ ID NO: 1748716 - DNA, 15 bp, Homo sapiens
cctaggcctacacag

SEQ ID NO: 1748717 - DNA, 15 bp, Homo sapiens
ctaggcctacacagg

SEQ ID NO: 1748718 - DNA, 15 bp, Homo sapiens
taggcctacacagga

SEQ ID NO: 1748719 - DNA, 15 bp, Homo sapiens
aggcctacacaggat

SEQ ID NO: 1748720 - DNA, 15 bp, Homo sapiens
ggcctacacaggatc

SEQ ID NO: 1748721 - DNA, 15 bp, Homo sapiens
gcctacacaggatca

SEQ ID NO: 1748722 - DNA, 15 bp, Homo sapiens
cctacacaggatcag

SEQ ID NO: 1748723 - DNA, 15 bp, Homo sapiens
ctacacaggatcagg

SEQ ID NO: 1748724 - DNA, 15 bp, Homo sapiens
tacacaggatcagga

SEQ ID NO: 1748725 - DNA, 15 bp, Homo sapiens
acacaggatcaggat

SEQ ID NO: 1748726 - DNA, 15 bp, Homo sapiens
cacaggatcaggatt

SEQ ID NO: 1748727 - DNA, 15 bp, Homo sapiens
acaggatcaggatta

SEQ ID NO: 1748728 - DNA, 15 bp, Homo sapiens
caggatcaggattaa

SEQ ID NO: 1748729 - DNA, 15 bp, Homo sapiens
aggatcaggattaac

SEQ ID NO: 1748730 - DNA, 15 bp, Homo sapiens
ggatcaggattaaca

SEQ ID NO: 1748731 - DNA, 15 bp, Homo sapiens
gatcaggattaacaa

SEQ ID NO: 1748732 - DNA, 15 bp, Homo sapiens
atcaggattaacaat

SEQ ID NO: 1748733 - DNA, 15 bp, Homo sapiens
tcaggattaacaata

SEQ ID NO: 1748734 - DNA, 15 bp, Homo sapiens
caggattaacaatac

SEQ ID NO: 1748735 - DNA, 15 bp, Homo sapiens
aggattaacaatacc

SEQ ID NO: 1748736 - DNA, 15 bp, Homo sapiens
ggattaacaatacca

SEQ ID NO: 1748737 - DNA, 15 bp, Homo sapiens
gattaacaataccac

SEQ ID NO: 1748738 - DNA, 15 bp, Homo sapiens
attaacaataccact

SEQ ID NO: 1748739 - DNA, 15 bp, Homo sapiens
ttaacaataccactg

SEQ ID NO: 1748740 - DNA, 15 bp, Homo sapiens
taacaataccactgt

SEQ ID NO: 1748741 - DNA, 15 bp, Homo sapiens
aacaataccactgtc

SEQ ID NO: 1748742 - DNA, 15 bp, Homo sapiens
acaataccactgtct

SEQ ID NO: 1748743 - DNA, 15 bp, Homo sapiens
caataccactgtctt

SEQ ID NO: 1748744 - DNA, 15 bp, Homo sapiens
aataccactgtcttc

SEQ ID NO: 1748745 - DNA, 15 bp, Homo sapiens
ataccactgtcttct

SEQ ID NO: 1748746 - DNA, 15 bp, Homo sapiens
taccactgtcttctg

SEQ ID NO: 1748747 - DNA, 15 bp, Homo sapiens
accactgtcttctgc

SEQ ID NO: 1748748 - DNA, 15 bp, Homo sapiens
ccactgtcttctgcc

SEQ ID NO: 1748749 - DNA, 15 bp, Homo sapiens
cactgtcttctgcct

SEQ ID NO: 1748750 - DNA, 15 bp, Homo sapiens
actgtcttctgcctc

SEQ ID NO: 1748751 - DNA, 15 bp, Homo sapiens
ctgtcttctgcctcc

SEQ ID NO: 1748752 - DNA, 15 bp, Homo sapiens
tgtcttctgcctcca

SEQ ID NO: 1748753 - DNA, 15 bp, Homo sapiens
gtcttctgcctccaa

SEQ ID NO: 1748754 - DNA, 15 bp, Homo sapiens
tcttctgcctccaaa

SEQ ID NO: 1748755 - DNA, 15 bp, Homo sapiens
cttctgcctccaaat

SEQ ID NO: 1748756 - DNA, 15 bp, Homo sapiens
ttctgcctccaaatt

SEQ ID NO: 1748757 - DNA, 15 bp, Homo sapiens
tctgcctccaaattc

SEQ ID NO: 1748758 - DNA, 15 bp, Homo sapiens
ctgcctccaaattct

SEQ ID NO: 1748759 - DNA, 15 bp, Homo sapiens
tgcctccaaattctg

SEQ ID NO: 1748760 - DNA, 15 bp, Homo sapiens
gcctccaaattctgt

SEQ ID NO: 1748761 - DNA, 15 bp, Homo sapiens
cctccaaattctgtc

SEQ ID NO: 1748762 - DNA, 15 bp, Homo sapiens
ctccaaattctgtcc

SEQ ID NO: 1748763 - DNA, 15 bp, Homo sapiens
tccaaattctgtccc

SEQ ID NO: 1748764 - DNA, 15 bp, Homo sapiens
ccaaattctgtccca

SEQ ID NO: 1748765 - DNA, 15 bp, Homo sapiens
caaattctgtcccaa

SEQ ID NO: 1748766 - DNA, 15 bp, Homo sapiens
aaattctgtcccaag

SEQ ID NO: 1748767 - DNA, 15 bp, Homo sapiens
aattctgtcccaagt

SEQ ID NO: 1748768 - DNA, 15 bp, Homo sapiens
attctgtcccaagtc

SEQ ID NO: 1748769 - DNA, 15 bp, Homo sapiens
ttctgtcccaagtct

SEQ ID NO: 1748770 - DNA, 15 bp, Homo sapiens
tctgtcccaagtctt

SEQ ID NO: 1748771 - DNA, 15 bp, Homo sapiens
ctgtcccaagtcttc

SEQ ID NO: 1748772 - DNA, 15 bp, Homo sapiens
tgtcccaagtcttca

SEQ ID NO: 1748773 - DNA, 15 bp, Homo sapiens
gtcccaagtcttcag

SEQ ID NO: 1748774 - DNA, 15 bp, Homo sapiens
tcccaagtcttcagg

SEQ ID NO: 1748775 - DNA, 15 bp, Homo sapiens
cccaagtcttcaggg

SEQ ID NO: 1748776 - DNA, 15 bp, Homo sapiens
ccaagtcttcaggga

SEQ ID NO: 1748777 - DNA, 15 bp, Homo sapiens
caagtcttcagggac

SEQ ID NO: 1748778 - DNA, 15 bp, Homo sapiens
aagtcttcagggaca

SEQ ID NO: 1748779 - DNA, 15 bp, Homo sapiens
agtcttcagggacaa

SEQ ID NO: 1748780 - DNA, 15 bp, Homo sapiens
gtcttcagggacaat

SEQ ID NO: 1748781 - DNA, 15 bp, Homo sapiens
tcttcagggacaata

SEQ ID NO: 1748782 - DNA, 15 bp, Homo sapiens
cttcagggacaataa

SEQ ID NO: 1748783 - DNA, 15 bp, Homo sapiens
ttcagggacaataaa

SEQ ID NO: 1748784 - DNA, 15 bp, Homo sapiens
tcagggacaataaaa

SEQ ID NO: 1748785 - DNA, 15 bp, Homo sapiens
cagggacaataaaat

SEQ ID NO: 1748786 - DNA, 15 bp, Homo sapiens
agggacaataaaatg

SEQ ID NO: 1748787 - DNA, 15 bp, Homo sapiens
gggacaataaaatgc

SEQ ID NO: 1748788 - DNA, 15 bp, Homo sapiens
ggacaataaaatgca

SEQ ID NO: 1748789 - DNA, 15 bp, Homo sapiens
gacaataaaatgcat

SEQ ID NO: 1748790 - DNA, 15 bp, Homo sapiens
acaataaaatgcata

SEQ ID NO: 1748791 - DNA, 15 bp, Homo sapiens
caataaaatgcatag

SEQ ID NO: 1748792 - DNA, 15 bp, Homo sapiens
aataaaatgcataga

SEQ ID NO: 1748793 - DNA, 15 bp, Homo sapiens
ataaaatgcatagag

SEQ ID NO: 1748794 - DNA, 15 bp, Homo sapiens
taaaatgcatagagc

SEQ ID NO: 1748795 - DNA, 15 bp, Homo sapiens
aaaatgcatagagct

SEQ ID NO: 1748796 - DNA, 15 bp, Homo sapiens
aaatgcatagagctg

SEQ ID NO: 1748797 - DNA, 15 bp, Homo sapiens
aatgcatagagctgt

SEQ ID NO: 1748798 - DNA, 15 bp, Homo sapiens
atgcatagagctgtc

SEQ ID NO: 1748799 - DNA, 15 bp, Homo sapiens
tgcatagagctgtca

SEQ ID NO: 1748800 - DNA, 15 bp, Homo sapiens
gcatagagctgtcaa

SEQ ID NO: 1748801 - DNA, 15 bp, Homo sapiens
catagagctgtcaac

SEQ ID NO: 1748802 - DNA, 15 bp, Homo sapiens
atagagctgtcaact

SEQ ID NO: 1748803 - DNA, 15 bp, Homo sapiens
tagagctgtcaactc

SEQ ID NO: 1748804 - DNA, 15 bp, Homo sapiens
agagctgtcaactcc

SEQ ID NO: 1748805 - DNA, 15 bp, Homo sapiens
gagctgtcaactcct

SEQ ID NO: 1748806 - DNA, 15 bp, Homo sapiens
agctgtcaactccta

SEQ ID NO: 1748807 - DNA, 15 bp, Homo sapiens
gctgtcaactcctat

SEQ ID NO: 1748808 - DNA, 15 bp, Homo sapiens
ctgtcaactcctatg

SEQ ID NO: 1748809 - DNA, 15 bp, Homo sapiens
tgtcaactcctatga

SEQ ID NO: 1748810 - DNA, 15 bp, Homo sapiens
gtcaactcctatgat

SEQ ID NO: 1748811 - DNA, 15 bp, Homo sapiens
tcaactcctatgatg

SEQ ID NO: 1748812 - DNA, 15 bp, Homo sapiens
caactcctatgatga

SEQ ID NO: 1748813 - DNA, 15 bp, Homo sapiens
aactcctatgatgat

SEQ ID NO: 1748814 - DNA, 15 bp, Homo sapiens
actcctatgatgatg

SEQ ID NO: 1748815 - DNA, 15 bp, Homo sapiens
ctcctatgatgatga

SEQ ID NO: 1748816 - DNA, 15 bp, Homo sapiens
tcctatgatgatgat

SEQ ID NO: 1748817 - DNA, 15 bp, Homo sapiens
cctatgatgatgatg

SEQ ID NO: 1748818 - DNA, 15 bp, Homo sapiens
ctatgatgatgatgc

SEQ ID NO: 1748819 - DNA, 15 bp, Homo sapiens
tatgatgatgatgct

SEQ ID NO: 1748820 - DNA, 15 bp, Homo sapiens
atgatgatgatgcta

SEQ ID NO: 1748821 - DNA, 15 bp, Homo sapiens
tgatgatgatgctat

SEQ ID NO: 1748822 - DNA, 15 bp, Homo sapiens
gatgatgatgctatc

SEQ ID NO: 1748823 - DNA, 15 bp, Homo sapiens
atgatgatgctatct

SEQ ID NO: 1748824 - DNA, 15 bp, Homo sapiens
tgatgatgctatctt

SEQ ID NO: 1748825 - DNA, 15 bp, Homo sapiens
gatgatgctatcttc

SEQ ID NO: 1748826 - DNA, 15 bp, Homo sapiens
atgatgctatcttct

SEQ ID NO: 1748827 - DNA, 15 bp, Homo sapiens
tgatgctatcttctg

SEQ ID NO: 1748828 - DNA, 15 bp, Homo sapiens
gatgctatcttctgg

SEQ ID NO: 1748829 - DNA, 15 bp, Homo sapiens
atgctatcttctgga

SEQ ID NO: 1748830 - DNA, 15 bp, Homo sapiens
tgctatcttctggaa

SEQ ID NO: 1748831 - DNA, 15 bp, Homo sapiens
gctatcttctggaat

SEQ ID NO: 1748832 - DNA, 15 bp, Homo sapiens
ctatcttctggaata

SEQ ID NO: 1748833 - DNA, 15 bp, Homo sapiens
tatcttctggaatat

SEQ ID NO: 1748834 - DNA, 15 bp, Homo sapiens
atcttctggaatatc

SEQ ID NO: 1748835 - DNA, 15 bp, Homo sapiens
tcttctggaatatct

SEQ ID NO: 1748836 - DNA, 15 bp, Homo sapiens
cttctggaatatctc

SEQ ID NO: 1748837 - DNA, 15 bp, Homo sapiens
ttctggaatatctcc

SEQ ID NO: 1748838 - DNA, 15 bp, Homo sapiens
tctggaatatctcct

SEQ ID NO: 1748839 - DNA, 15 bp, Homo sapiens
ctggaatatctcctg

SEQ ID NO: 1748840 - DNA, 15 bp, Homo sapiens
tggaatatctcctga

SEQ ID NO: 1748841 - DNA, 15 bp, Homo sapiens
ggaatatctcctgaa

SEQ ID NO: 1748842 - DNA, 15 bp, Homo sapiens
gaatatctcctgaag

SEQ ID NO: 1748843 - DNA, 15 bp, Homo sapiens
aatatctcctgaagg

SEQ ID NO: 1748844 - DNA, 15 bp, Homo sapiens
atatctcctgaagga

SEQ ID NO: 1748845 - DNA, 15 bp, Homo sapiens
tatctcctgaaggag

SEQ ID NO: 1748846 - DNA, 15 bp, Homo sapiens
atctcctgaaggagc

SEQ ID NO: 1748847 - DNA, 15 bp, Homo sapiens
tctcctgaaggagct

SEQ ID NO: 1748848 - DNA, 15 bp, Homo sapiens
ctcctgaaggagctg

SEQ ID NO: 1748849 - DNA, 15 bp, Homo sapiens
tcctgaaggagctgc

SEQ ID NO: 1748850 - DNA, 15 bp, Homo sapiens
cctgaaggagctgcc

SEQ ID NO: 1748851 - DNA, 15 bp, Homo sapiens
ctgaaggagctgcct

SEQ ID NO: 1748852 - DNA, 15 bp, Homo sapiens
tgaaggagctgcctg

SEQ ID NO: 1748853 - DNA, 15 bp, Homo sapiens
gaaggagctgcctga

SEQ ID NO: 1748854 - DNA, 15 bp, Homo sapiens
aaggagctgcctgag

SEQ ID NO: 1748855 - DNA, 15 bp, Homo sapiens
aggagctgcctgagg

SEQ ID NO: 1748856 - DNA, 15 bp, Homo sapiens
ggagctgcctgaggg

SEQ ID NO: 1748857 - DNA, 15 bp, Homo sapiens
gagctgcctgagggt

SEQ ID NO: 1748858 - DNA, 15 bp, Homo sapiens
agctgcctgagggtg

SEQ ID NO: 1748859 - DNA, 15 bp, Homo sapiens
gctgcctgagggtgt

SEQ ID NO: 1748860 - DNA, 15 bp, Homo sapiens
ctgcctgagggtgtt

SEQ ID NO: 1748861 - DNA, 15 bp, Homo sapiens
tgcctgagggtgttt

SEQ ID NO: 1748862 - DNA, 15 bp, Homo sapiens
gcctgagggtgtttt

SEQ ID NO: 1748863 - DNA, 15 bp, Homo sapiens
cctgagggtgtttta

SEQ ID NO: 1748864 - DNA, 15 bp, Homo sapiens
ctgagggtgttttac

SEQ ID NO: 1748865 - DNA, 15 bp, Homo sapiens
tgagggtgttttaca

SEQ ID NO: 1748866 - DNA, 15 bp, Homo sapiens
gagggtgttttacat

SEQ ID NO: 1748867 - DNA, 15 bp, Homo sapiens
agggtgttttacatt

SEQ ID NO: 1748868 - DNA, 15 bp, Homo sapiens
gggtgttttacattt

SEQ ID NO: 1748869 - DNA, 15 bp, Homo sapiens
ggtgttttacattta

SEQ ID NO: 1748870 - DNA, 15 bp, Homo sapiens
gtgttttacatttaa

SEQ ID NO: 1748871 - DNA, 15 bp, Homo sapiens
tgttttacatttaac

SEQ ID NO: 1748872 - DNA, 15 bp, Homo sapiens
gttttacatttaact

SEQ ID NO: 1748873 - DNA, 15 bp, Homo sapiens
ttttacatttaactt

SEQ ID NO: 1748874 - DNA, 15 bp, Homo sapiens
ttacatttaactttt

SEQ ID NO: 1748875 - DNA, 15 bp, Homo sapiens
tacatttaacttttt

SEQ ID NO: 1748876 - DNA, 15 bp, Homo sapiens
acatttaactttttt

SEQ ID NO: 1748877 - DNA, 15 bp, Homo sapiens
catttaacttttttt

SEQ ID NO: 1748878 - DNA, 15 bp, Homo sapiens
atttaactttttttt

SEQ ID NO: 1748879 - DNA, 15 bp, Homo sapiens
tttaacttttttttt

SEQ ID NO: 1748880 - DNA, 15 bp, Homo sapiens
ttaactttttttttt

SEQ ID NO: 1748881 - DNA, 15 bp, Homo sapiens
taacttttttttttt

SEQ ID NO: 1748882 - DNA, 15 bp, Homo sapiens
ttttttttttacaag

SEQ ID NO: 1748883 - DNA, 15 bp, Homo sapiens
tttttttttacaagt

SEQ ID NO: 1748884 - DNA, 15 bp, Homo sapiens
ttttttttacaagta

SEQ ID NO: 1748885 - DNA, 15 bp, Homo sapiens
tttttttacaagtag

SEQ ID NO: 1748886 - DNA, 15 bp, Homo sapiens
ttttttacaagtaga

SEQ ID NO: 1748887 - DNA, 15 bp, Homo sapiens
tttttacaagtagaa

SEQ ID NO: 1748888 - DNA, 15 bp, Homo sapiens
ttttacaagtagaag

SEQ ID NO: 1748889 - DNA, 15 bp, Homo sapiens
tttacaagtagaagg

SEQ ID NO: 1748890 - DNA, 15 bp, Homo sapiens
ttacaagtagaagga

SEQ ID NO: 1748891 - DNA, 15 bp, Homo sapiens
tacaagtagaaggag

SEQ ID NO: 1748892 - DNA, 15 bp, Homo sapiens
acaagtagaaggagg

SEQ ID NO: 1748893 - DNA, 15 bp, Homo sapiens
caagtagaaggagga

SEQ ID NO: 1748894 - DNA, 15 bp, Homo sapiens
aagtagaaggaggat

SEQ ID NO: 1748895 - DNA, 15 bp, Homo sapiens
agtagaaggaggatg

SEQ ID NO: 1748896 - DNA, 15 bp, Homo sapiens
gtagaaggaggatgc

SEQ ID NO: 1748897 - DNA, 15 bp, Homo sapiens
tagaaggaggatgct

SEQ ID NO: 1748898 - DNA, 15 bp, Homo sapiens
agaaggaggatgctc

SEQ ID NO: 1748899 - DNA, 15 bp, Homo sapiens
gaaggaggatgctct

SEQ ID NO: 1748900 - DNA, 15 bp, Homo sapiens
aaggaggatgctcta

SEQ ID NO: 1748901 - DNA, 15 bp, Homo sapiens
aggaggatgctctaa

SEQ ID NO: 1748902 - DNA, 15 bp, Homo sapiens
ggaggatgctctaaa

SEQ ID NO: 1748903 - DNA, 15 bp, Homo sapiens
gaggatgctctaaac

SEQ ID NO: 1748904 - DNA, 15 bp, Homo sapiens
aggatgctctaaact

SEQ ID NO: 1748905 - DNA, 15 bp, Homo sapiens
ggatgctctaaacta

SEQ ID NO: 1748906 - DNA, 15 bp, Homo sapiens
gatgctctaaactaa

SEQ ID NO: 1748907 - DNA, 15 bp, Homo sapiens
atgctctaaactaat

SEQ ID NO: 1748908 - DNA, 15 bp, Homo sapiens
tgctctaaactaata

SEQ ID NO: 1748909 - DNA, 15 bp, Homo sapiens
gctctaaactaataa

SEQ ID NO: 1748910 - DNA, 15 bp, Homo sapiens
ctctaaactaataaa

SEQ ID NO: 1748911 - DNA, 15 bp, Homo sapiens
tctaaactaataaaa

SEQ ID NO: 1748912 - DNA, 15 bp, Homo sapiens
ctaaactaataaaaa

SEQ ID NO: 1748913 - DNA, 15 bp, Homo sapiens
taaactaataaaaag

SEQ ID NO: 1748914 - DNA, 15 bp, Homo sapiens
aaactaataaaaagt

SEQ ID NO: 1748915 - DNA, 15 bp, Homo sapiens
aactaataaaaagta

SEQ ID NO: 1748916 - DNA, 15 bp, Homo sapiens
actaataaaaagtat

SEQ ID NO: 1748917 - DNA, 15 bp, Homo sapiens
ctaataaaaagtata

SEQ ID NO: 1748918 - DNA, 15 bp, Homo sapiens
taataaaaagtatag

SEQ ID NO: 1748919 - DNA, 15 bp, Homo sapiens
aataaaaagtatagt

SEQ ID NO: 1748920 - DNA, 15 bp, Homo sapiens
ataaaaagtatagta

SEQ ID NO: 1748921 - DNA, 15 bp, Homo sapiens
taaaaagtatagtat

SEQ ID NO: 1748922 - DNA, 15 bp, Homo sapiens
aaaaagtatagtata

SEQ ID NO: 1748923 - DNA, 15 bp, Homo sapiens
aaaagtatagtataa

SEQ ID NO: 1748924 - DNA, 15 bp, Homo sapiens
aaagtatagtataat

SEQ ID NO: 1748925 - DNA, 15 bp, Homo sapiens
aagtatagtataata

SEQ ID NO: 1748926 - DNA, 15 bp, Homo sapiens
agtatagtataataa

SEQ ID NO: 1748927 - DNA, 15 bp, Homo sapiens
gtatagtataataaa

SEQ ID NO: 1748928 - DNA, 15 bp, Homo sapiens
tatagtataataaat

SEQ ID NO: 1748929 - DNA, 15 bp, Homo sapiens
atagtataataaata

SEQ ID NO: 1748930 - DNA, 15 bp, Homo sapiens
tagtataataaatac

SEQ ID NO: 1748931 - DNA, 15 bp, Homo sapiens
agtataataaataca

SEQ ID NO: 1748932 - DNA, 15 bp, Homo sapiens
gtataataaatacat

SEQ ID NO: 1748933 - DNA, 15 bp, Homo sapiens
tataataaatacata

SEQ ID NO: 1748934 - DNA, 15 bp, Homo sapiens
ataataaatacataa

SEQ ID NO: 1748935 - DNA, 15 bp, Homo sapiens
taataaatacataaa

SEQ ID NO: 1748936 - DNA, 15 bp, Homo sapiens
aataaatacataaac

SEQ ID NO: 1748937 - DNA, 15 bp, Homo sapiens
ataaatacataaacc

SEQ ID NO: 1748938 - DNA, 15 bp, Homo sapiens
aatacataaaccagt

SEQ ID NO: 1748939 - DNA, 15 bp, Homo sapiens
atacataaaccagta

SEQ ID NO: 1748940 - DNA, 15 bp, Homo sapiens
tacataaaccagtaa

SEQ ID NO: 1748941 - DNA, 15 bp, Homo sapiens
acataaaccagtaac

SEQ ID NO: 1748942 - DNA, 15 bp, Homo sapiens
cataaaccagtaaca

SEQ ID NO: 1748943 - DNA, 15 bp, Homo sapiens
ataaaccagtaacat

SEQ ID NO: 1748944 - DNA, 15 bp, Homo sapiens
taaaccagtaacatg

SEQ ID NO: 1748945 - DNA, 15 bp, Homo sapiens
aaaccagtaacatgt

SEQ ID NO: 1748946 - DNA, 15 bp, Homo sapiens
aaccagtaacatgtt

SEQ ID NO: 1748947 - DNA, 15 bp, Homo sapiens
accagtaacatgttc

SEQ ID NO: 1748948 - DNA, 15 bp, Homo sapiens
ccagtaacatgttca

SEQ ID NO: 1748949 - DNA, 15 bp, Homo sapiens
cagtaacatgttcat

SEQ ID NO: 1748950 - DNA, 15 bp, Homo sapiens
agtaacatgttcatt

SEQ ID NO: 1748951 - DNA, 15 bp, Homo sapiens
gtaacatgttcatta

SEQ ID NO: 1748952 - DNA, 15 bp, Homo sapiens
taacatgttcattat

SEQ ID NO: 1748953 - DNA, 15 bp, Homo sapiens
aacatgttcattatt

SEQ ID NO: 1748954 - DNA, 15 bp, Homo sapiens
acatgttcattatta

SEQ ID NO: 1748955 - DNA, 15 bp, Homo sapiens
catgttcattattaa

SEQ ID NO: 1748956 - DNA, 15 bp, Homo sapiens
atgttcattattaag

SEQ ID NO: 1748957 - DNA, 15 bp, Homo sapiens
tgttcattattaagt

SEQ ID NO: 1748958 - DNA, 15 bp, Homo sapiens
gttcattattaagta

SEQ ID NO: 1748959 - DNA, 15 bp, Homo sapiens
ttcattattaagtat

SEQ ID NO: 1748960 - DNA, 15 bp, Homo sapiens
tcattattaagtatt

SEQ ID NO: 1748961 - DNA, 15 bp, Homo sapiens
cattattaagtatta

SEQ ID NO: 1748962 - DNA, 15 bp, Homo sapiens
attattaagtattat

SEQ ID NO: 1748963 - DNA, 15 bp, Homo sapiens
ttattaagtattatg

SEQ ID NO: 1748964 - DNA, 15 bp, Homo sapiens
tattaagtattatgt

SEQ ID NO: 1748965 - DNA, 15 bp, Homo sapiens
attaagtattatgta

SEQ ID NO: 1748966 - DNA, 15 bp, Homo sapiens
ttaagtattatgtac

SEQ ID NO: 1748967 - DNA, 15 bp, Homo sapiens
taagtattatgtact

SEQ ID NO: 1748968 - DNA, 15 bp, Homo sapiens
aagtattatgtactg

SEQ ID NO: 1748969 - DNA, 15 bp, Homo sapiens
agtattatgtactgt

SEQ ID NO: 1748970 - DNA, 15 bp, Homo sapiens
gtattatgtactgta

SEQ ID NO: 1748971 - DNA, 15 bp, Homo sapiens
tattatgtactgtac

SEQ ID NO: 1748972 - DNA, 15 bp, Homo sapiens
attatgtactgtaca

SEQ ID NO: 1748973 - DNA, 15 bp, Homo sapiens
ttatgtactgtacat

SEQ ID NO: 1748974 - DNA, 15 bp, Homo sapiens
tatgtactgtacata

SEQ ID NO: 1748975 - DNA, 15 bp, Homo sapiens
atgtactgtacataa

SEQ ID NO: 1748976 - DNA, 15 bp, Homo sapiens
tactgtacataattg

SEQ ID NO: 1748977 - DNA, 15 bp, Homo sapiens
actgtacataattgt

SEQ ID NO: 1748978 - DNA, 15 bp, Homo sapiens
ctgtacataattgta

SEQ ID NO: 1748979 - DNA, 15 bp, Homo sapiens
tgtacataattgtat

SEQ ID NO: 1748980 - DNA, 15 bp, Homo sapiens
gtacataattgtatg

SEQ ID NO: 1748981 - DNA, 15 bp, Homo sapiens
tacataattgtatgt

SEQ ID NO: 1748982 - DNA, 15 bp, Homo sapiens
acataattgtatgta

SEQ ID NO: 1748983 - DNA, 15 bp, Homo sapiens
cataattgtatgtac

SEQ ID NO: 1748984 - DNA, 15 bp, Homo sapiens
ataattgtatgtact

SEQ ID NO: 1748985 - DNA, 15 bp, Homo sapiens
taattgtatgtacta

SEQ ID NO: 1748986 - DNA, 15 bp, Homo sapiens
aattgtatgtactat

SEQ ID NO: 1748987 - DNA, 15 bp, Homo sapiens
attgtatgtactata

SEQ ID NO: 1748988 - DNA, 15 bp, Homo sapiens
ttgtatgtactatac

SEQ ID NO: 1748989 - DNA, 15 bp, Homo sapiens
tgtatgtactatact

SEQ ID NO: 1748990 - DNA, 15 bp, Homo sapiens
gtatgtactatactt

SEQ ID NO: 1748991 - DNA, 15 bp, Homo sapiens
tatgtactatacttt

SEQ ID NO: 1748992 - DNA, 15 bp, Homo sapiens
atgtactatactttt

SEQ ID NO: 1748993 - DNA, 15 bp, Homo sapiens
tgtactatactttta

SEQ ID NO: 1748994 - DNA, 15 bp, Homo sapiens
gtactatacttttat

SEQ ID NO: 1748995 - DNA, 15 bp, Homo sapiens
tactatacttttata

SEQ ID NO: 1748996 - DNA, 15 bp, Homo sapiens
actatacttttatat

SEQ ID NO: 1748997 - DNA, 15 bp, Homo sapiens
ctatacttttatatg

SEQ ID NO: 1748998 - DNA, 15 bp, Homo sapiens
tatacttttatatga

SEQ ID NO: 1748999 - DNA, 15 bp, Homo sapiens
atacttttatatgac

SEQ ID NO: 1749000 - DNA, 15 bp, Homo sapiens
tacttttatatgact

SEQ ID NO: 1749001 - DNA, 15 bp, Homo sapiens
acttttatatgactg

SEQ ID NO: 1749002 - DNA, 15 bp, Homo sapiens
cttttatatgactgg

SEQ ID NO: 1749003 - DNA, 15 bp, Homo sapiens
ttttatatgactggc

SEQ ID NO: 1749004 - DNA, 15 bp, Homo sapiens
tttatatgactggca

SEQ ID NO: 1749005 - DNA, 15 bp, Homo sapiens
ttatatgactggcag

SEQ ID NO: 1749006 - DNA, 15 bp, Homo sapiens
tatatgactggcagt

SEQ ID NO: 1749007 - DNA, 15 bp, Homo sapiens
atatgactggcagtg

SEQ ID NO: 1749008 - DNA, 15 bp, Homo sapiens
tatgactggcagtgc

SEQ ID NO: 1749009 - DNA, 15 bp, Homo sapiens
atgactggcagtgca

SEQ ID NO: 1749010 - DNA, 15 bp, Homo sapiens
tgactggcagtgcaa

SEQ ID NO: 1749011 - DNA, 15 bp, Homo sapiens
gactggcagtgcaat

SEQ ID NO: 1749012 - DNA, 15 bp, Homo sapiens
actggcagtgcaata

SEQ ID NO: 1749013 - DNA, 15 bp, Homo sapiens
ctggcagtgcaatag

SEQ ID NO: 1749014 - DNA, 15 bp, Homo sapiens
tggcagtgcaatagg

SEQ ID NO: 1749015 - DNA, 15 bp, Homo sapiens
ggcagtgcaataggt

SEQ ID NO: 1749016 - DNA, 15 bp, Homo sapiens
gcagtgcaataggtt

SEQ ID NO: 1749017 - DNA, 15 bp, Homo sapiens
cagtgcaataggttt

SEQ ID NO: 1749018 - DNA, 15 bp, Homo sapiens
agtgcaataggttta

SEQ ID NO: 1749019 - DNA, 15 bp, Homo sapiens
gtgcaataggtttat

SEQ ID NO: 1749020 - DNA, 15 bp, Homo sapiens
tgcaataggtttatt

SEQ ID NO: 1749021 - DNA, 15 bp, Homo sapiens
gcaataggtttattt

SEQ ID NO: 1749022 - DNA, 15 bp, Homo sapiens
caataggtttattta

SEQ ID NO: 1749023 - DNA, 15 bp, Homo sapiens
aataggtttatttac

SEQ ID NO: 1749024 - DNA, 15 bp, Homo sapiens
ataggtttatttaca

SEQ ID NO: 1749025 - DNA, 15 bp, Homo sapiens
taggtttatttacat

SEQ ID NO: 1749026 - DNA, 15 bp, Homo sapiens
aggtttatttacatc

SEQ ID NO: 1749027 - DNA, 15 bp, Homo sapiens
ggtttatttacatca

SEQ ID NO: 1749028 - DNA, 15 bp, Homo sapiens
gtttatttacatcag

SEQ ID NO: 1749029 - DNA, 15 bp, Homo sapiens
tttatttacatcagc

SEQ ID NO: 1749030 - DNA, 15 bp, Homo sapiens
ttatttacatcagca

SEQ ID NO: 1749031 - DNA, 15 bp, Homo sapiens
tatttacatcagcat

SEQ ID NO: 1749032 - DNA, 15 bp, Homo sapiens
atttacatcagcatc

SEQ ID NO: 1749033 - DNA, 15 bp, Homo sapiens
tttacatcagcatca

SEQ ID NO: 1749034 - DNA, 15 bp, Homo sapiens
ttacatcagcatcat

SEQ ID NO: 1749035 - DNA, 15 bp, Homo sapiens
tacatcagcatcatc

SEQ ID NO: 1749036 - DNA, 15 bp, Homo sapiens
acatcagcatcatca

SEQ ID NO: 1749037 - DNA, 15 bp, Homo sapiens
catcagcatcatcac

SEQ ID NO: 1749038 - DNA, 15 bp, Homo sapiens
atcagcatcatcaca

SEQ ID NO: 1749039 - DNA, 15 bp, Homo sapiens
tcagcatcatcacaa

SEQ ID NO: 1749040 - DNA, 15 bp, Homo sapiens
cagcatcatcacaaa

SEQ ID NO: 1749041 - DNA, 15 bp, Homo sapiens
agcatcatcacaaag

SEQ ID NO: 1749042 - DNA, 15 bp, Homo sapiens
gcatcatcacaaaga

SEQ ID NO: 1749043 - DNA, 15 bp, Homo sapiens
catcatcacaaagat

SEQ ID NO: 1749044 - DNA, 15 bp, Homo sapiens
atcatcacaaagatg

SEQ ID NO: 1749045 - DNA, 15 bp, Homo sapiens
tcatcacaaagatgt

SEQ ID NO: 1749046 - DNA, 15 bp, Homo sapiens
catcacaaagatgtg

SEQ ID NO: 1749047 - DNA, 15 bp, Homo sapiens
atcacaaagatgtga

SEQ ID NO: 1749048 - DNA, 15 bp, Homo sapiens
tcacaaagatgtgag

SEQ ID NO: 1749049 - DNA, 15 bp, Homo sapiens
cacaaagatgtgagt

SEQ ID NO: 1749050 - DNA, 15 bp, Homo sapiens
acaaagatgtgagta

SEQ ID NO: 1749051 - DNA, 15 bp, Homo sapiens
caaagatgtgagtaa

SEQ ID NO: 1749052 - DNA, 15 bp, Homo sapiens
aaagatgtgagtaat

SEQ ID NO: 1749053 - DNA, 15 bp, Homo sapiens
aagatgtgagtaatg

SEQ ID NO: 1749054 - DNA, 15 bp, Homo sapiens
agatgtgagtaatgt

SEQ ID NO: 1749055 - DNA, 15 bp, Homo sapiens
gatgtgagtaatgta

SEQ ID NO: 1749056 - DNA, 15 bp, Homo sapiens
atgtgagtaatgtaa

SEQ ID NO: 1749057 - DNA, 15 bp, Homo sapiens
tgtgagtaatgtaat

SEQ ID NO: 1749058 - DNA, 15 bp, Homo sapiens
gtgagtaatgtaatg

SEQ ID NO: 1749059 - DNA, 15 bp, Homo sapiens
tgagtaatgtaatgc

SEQ ID NO: 1749060 - DNA, 15 bp, Homo sapiens
gagtaatgtaatgca

SEQ ID NO: 1749061 - DNA, 15 bp, Homo sapiens
agtaatgtaatgcat

SEQ ID NO: 1749062 - DNA, 15 bp, Homo sapiens
gtaatgtaatgcatt

SEQ ID NO: 1749063 - DNA, 15 bp, Homo sapiens
taatgtaatgcattg

SEQ ID NO: 1749064 - DNA, 15 bp, Homo sapiens
aatgtaatgcattgc

SEQ ID NO: 1749065 - DNA, 15 bp, Homo sapiens
atgtaatgcattgca

SEQ ID NO: 1749066 - DNA, 15 bp, Homo sapiens
tgtaatgcattgcac

SEQ ID NO: 1749067 - DNA, 15 bp, Homo sapiens
gtaatgcattgcact

SEQ ID NO: 1749068 - DNA, 15 bp, Homo sapiens
taatgcattgcacta

SEQ ID NO: 1749069 - DNA, 15 bp, Homo sapiens
aatgcattgcactac

SEQ ID NO: 1749070 - DNA, 15 bp, Homo sapiens
atgcattgcactaca

SEQ ID NO: 1749071 - DNA, 15 bp, Homo sapiens
tgcattgcactacat

SEQ ID NO: 1749072 - DNA, 15 bp, Homo sapiens
gcattgcactacatt

SEQ ID NO: 1749073 - DNA, 15 bp, Homo sapiens
cattgcactacatta

SEQ ID NO: 1749074 - DNA, 15 bp, Homo sapiens
attgcactacattac

SEQ ID NO: 1749075 - DNA, 15 bp, Homo sapiens
ttgcactacattaca

SEQ ID NO: 1749076 - DNA, 15 bp, Homo sapiens
tgcactacattacac

SEQ ID NO: 1749077 - DNA, 15 bp, Homo sapiens
gcactacattacact

SEQ ID NO: 1749078 - DNA, 15 bp, Homo sapiens
cactacattacacta

SEQ ID NO: 1749079 - DNA, 15 bp, Homo sapiens
actacattacactaa

SEQ ID NO: 1749080 - DNA, 15 bp, Homo sapiens
ctacattacactaaa

SEQ ID NO: 1749081 - DNA, 15 bp, Homo sapiens
tacattacactaaac

SEQ ID NO: 1749082 - DNA, 15 bp, Homo sapiens
acattacactaaaca

SEQ ID NO: 1749083 - DNA, 15 bp, Homo sapiens
cattacactaaacaa

SEQ ID NO: 1749084 - DNA, 15 bp, Homo sapiens
attacactaaacaat

SEQ ID NO: 1749085 - DNA, 15 bp, Homo sapiens
ttacactaaacaata

SEQ ID NO: 1749086 - DNA, 15 bp, Homo sapiens
tacactaaacaatag

SEQ ID NO: 1749087 - DNA, 15 bp, Homo sapiens
acactaaacaatagg

SEQ ID NO: 1749088 - DNA, 15 bp, Homo sapiens
cactaaacaatagga

SEQ ID NO: 1749089 - DNA, 15 bp, Homo sapiens
actaaacaataggaa

SEQ ID NO: 1749090 - DNA, 15 bp, Homo sapiens
ctaaacaataggaat

SEQ ID NO: 1749091 - DNA, 15 bp, Homo sapiens
taaacaataggaatt

SEQ ID NO: 1749092 - DNA, 15 bp, Homo sapiens
aaacaataggaattt

SEQ ID NO: 1749093 - DNA, 15 bp, Homo sapiens
aacaataggaatttt

SEQ ID NO: 1749094 - DNA, 15 bp, Homo sapiens
acaataggaattttt

SEQ ID NO: 1749095 - DNA, 15 bp, Homo sapiens
caataggaatttttc

SEQ ID NO: 1749096 - DNA, 15 bp, Homo sapiens
aataggaatttttca

SEQ ID NO: 1749097 - DNA, 15 bp, Homo sapiens
ataggaatttttcag

SEQ ID NO: 1749098 - DNA, 15 bp, Homo sapiens
taggaatttttcagc

SEQ ID NO: 1749099 - DNA, 15 bp, Homo sapiens
aggaatttttcagct

SEQ ID NO: 1749100 - DNA, 15 bp, Homo sapiens
ggaatttttcagctc

SEQ ID NO: 1749101 - DNA, 15 bp, Homo sapiens
gaatttttcagctcc

SEQ ID NO: 1749102 - DNA, 15 bp, Homo sapiens
aatttttcagctcca

SEQ ID NO: 1749103 - DNA, 15 bp, Homo sapiens
atttttcagctccat

SEQ ID NO: 1749104 - DNA, 15 bp, Homo sapiens
tttttcagctccatt

SEQ ID NO: 1749105 - DNA, 15 bp, Homo sapiens
ttttcagctccatta

SEQ ID NO: 1749106 - DNA, 15 bp, Homo sapiens
tttcagctccattat

SEQ ID NO: 1749107 - DNA, 15 bp, Homo sapiens
ttcagctccattata

SEQ ID NO: 1749108 - DNA, 15 bp, Homo sapiens
tcagctccattataa

SEQ ID NO: 1749109 - DNA, 15 bp, Homo sapiens
cagctccattataat

SEQ ID NO: 1749110 - DNA, 15 bp, Homo sapiens
agctccattataatc

SEQ ID NO: 1749111 - DNA, 15 bp, Homo sapiens
gctccattataatct

SEQ ID NO: 1749112 - DNA, 15 bp, Homo sapiens
ctccattataatctt

SEQ ID NO: 1749113 - DNA, 15 bp, Homo sapiens
tccattataatctta

SEQ ID NO: 1749114 - DNA, 15 bp, Homo sapiens
ccattataatcttat

SEQ ID NO: 1749115 - DNA, 15 bp, Homo sapiens
cattataatcttatg

SEQ ID NO: 1749116 - DNA, 15 bp, Homo sapiens
attataatcttatgg

SEQ ID NO: 1749117 - DNA, 15 bp, Homo sapiens
ttataatcttatggg

SEQ ID NO: 1749118 - DNA, 15 bp, Homo sapiens
tataatcttatggga

SEQ ID NO: 1749119 - DNA, 15 bp, Homo sapiens
ataatcttatgggac

SEQ ID NO: 1749120 - DNA, 15 bp, Homo sapiens
taatcttatgggact

SEQ ID NO: 1749121 - DNA, 15 bp, Homo sapiens
aatcttatgggacta

SEQ ID NO: 1749122 - DNA, 15 bp, Homo sapiens
atcttatgggactac

SEQ ID NO: 1749123 - DNA, 15 bp, Homo sapiens
tcttatgggactact

SEQ ID NO: 1749124 - DNA, 15 bp, Homo sapiens
cttatgggactactg

SEQ ID NO: 1749125 - DNA, 15 bp, Homo sapiens
ggaagggatccagtt

SEQ ID NO: 1749126 - DNA, 15 bp, Homo sapiens
gaagggatccagttt

SEQ ID NO: 1749127 - DNA, 15 bp, Homo sapiens
aagggatccagtttc

SEQ ID NO: 1749128 - DNA, 15 bp, Homo sapiens
agggatccagtttca

SEQ ID NO: 1749129 - DNA, 15 bp, Homo sapiens
gggatccagtttcag

SEQ ID NO: 1749130 - DNA, 15 bp, Homo sapiens
ggatccagtttcagc

SEQ ID NO: 1749131 - DNA, 15 bp, Homo sapiens
gatccagtttcagct

SEQ ID NO: 1749132 - DNA, 15 bp, Homo sapiens
atccagtttcagctt

SEQ ID NO: 1749133 - DNA, 15 bp, Homo sapiens
tccagtttcagcttt

SEQ ID NO: 1749134 - DNA, 15 bp, Homo sapiens
ccagtttcagctttc

SEQ ID NO: 1749135 - DNA, 15 bp, Homo sapiens
cagtttcagctttct

SEQ ID NO: 1749136 - DNA, 15 bp, Homo sapiens
agtttcagctttcta

SEQ ID NO: 1749137 - DNA, 15 bp, Homo sapiens
gtttcagctttctac

SEQ ID NO: 1749138 - DNA, 15 bp, Homo sapiens
tttcagctttctaca

SEQ ID NO: 1749139 - DNA, 15 bp, Homo sapiens
ttcagctttctacat

SEQ ID NO: 1749140 - DNA, 15 bp, Homo sapiens
tcagctttctacata

SEQ ID NO: 1749141 - DNA, 15 bp, Homo sapiens
cagctttctacatat

SEQ ID NO: 1749142 - DNA, 15 bp, Homo sapiens
agctttctacatatg

SEQ ID NO: 1749143 - DNA, 15 bp, Homo sapiens
gctttctacatatgg

SEQ ID NO: 1749144 - DNA, 15 bp, Homo sapiens
ctttctacatatggc

SEQ ID NO: 1749145 - DNA, 15 bp, Homo sapiens
tttctacatatggct

SEQ ID NO: 1749146 - DNA, 15 bp, Homo sapiens
ttctacatatggctg

SEQ ID NO: 1749147 - DNA, 15 bp, Homo sapiens
tctacatatggctgg

SEQ ID NO: 1749148 - DNA, 15 bp, Homo sapiens
ctacatatggctggc

SEQ ID NO: 1749149 - DNA, 15 bp, Homo sapiens
tacatatggctggcc

SEQ ID NO: 1749150 - DNA, 15 bp, Homo sapiens
acatatggctggcca

SEQ ID NO: 1749151 - DNA, 15 bp, Homo sapiens
catatggctggccag

SEQ ID NO: 1749152 - DNA, 15 bp, Homo sapiens
atatggctggccagt

SEQ ID NO: 1749153 - DNA, 15 bp, Homo sapiens
tatggctggccagtt

SEQ ID NO: 1749154 - DNA, 15 bp, Homo sapiens
atggctggccagttt

SEQ ID NO: 1749155 - DNA, 15 bp, Homo sapiens
tggctggccagtttt

SEQ ID NO: 1749156 - DNA, 15 bp, Homo sapiens
ggctggccagttttc

SEQ ID NO: 1749157 - DNA, 15 bp, Homo sapiens
gctggccagttttcc

SEQ ID NO: 1749158 - DNA, 15 bp, Homo sapiens
ctggccagttttccc

SEQ ID NO: 1749159 - DNA, 15 bp, Homo sapiens
tggccagttttccca

SEQ ID NO: 1749160 - DNA, 15 bp, Homo sapiens
ggccagttttcccag

SEQ ID NO: 1749161 - DNA, 15 bp, Homo sapiens
gccagttttcccagc

SEQ ID NO: 1749162 - DNA, 15 bp, Homo sapiens
ccagttttcccagca

SEQ ID NO: 1749163 - DNA, 15 bp, Homo sapiens
cagttttcccagcac

SEQ ID NO: 1749164 - DNA, 15 bp, Homo sapiens
agttttcccagcacc

SEQ ID NO: 1749165 - DNA, 15 bp, Homo sapiens
gttttcccagcacca

SEQ ID NO: 1749166 - DNA, 15 bp, Homo sapiens
ttttcccagcaccat

SEQ ID NO: 1749167 - DNA, 15 bp, Homo sapiens
tttcccagcaccatt

SEQ ID NO: 1749168 - DNA, 15 bp, Homo sapiens
ttcccagcaccattt

SEQ ID NO: 1749169 - DNA, 15 bp, Homo sapiens
tcccagcaccattta

SEQ ID NO: 1749170 - DNA, 15 bp, Homo sapiens
cccagcaccatttat

SEQ ID NO: 1749171 - DNA, 15 bp, Homo sapiens
ccagcaccatttatt

SEQ ID NO: 1749172 - DNA, 15 bp, Homo sapiens
cagcaccatttatta

SEQ ID NO: 1749173 - DNA, 15 bp, Homo sapiens
agcaccatttattaa

SEQ ID NO: 1749174 - DNA, 15 bp, Homo sapiens
gcaccatttattaaa

SEQ ID NO: 1749175 - DNA, 15 bp, Homo sapiens
caccatttattaaat

SEQ ID NO: 1749176 - DNA, 15 bp, Homo sapiens
accatttattaaata

SEQ ID NO: 1749177 - DNA, 15 bp, Homo sapiens
ccatttattaaatag

SEQ ID NO: 1749178 - DNA, 15 bp, Homo sapiens
catttattaaatagg

SEQ ID NO: 1749179 - DNA, 15 bp, Homo sapiens
atttattaaataggg

SEQ ID NO: 1749180 - DNA, 15 bp, Homo sapiens
tttattaaataggga

SEQ ID NO: 1749181 - DNA, 15 bp, Homo sapiens
ttattaaatagggaa

SEQ ID NO: 1749182 - DNA, 15 bp, Homo sapiens
tattaaatagggaat

SEQ ID NO: 1749183 - DNA, 15 bp, Homo sapiens
attaaatagggaatc

SEQ ID NO: 1749184 - DNA, 15 bp, Homo sapiens
ttaaatagggaatcc

SEQ ID NO: 1749185 - DNA, 15 bp, Homo sapiens
taaatagggaatcct

SEQ ID NO: 1749186 - DNA, 15 bp, Homo sapiens
aaatagggaatcctt

SEQ ID NO: 1749187 - DNA, 15 bp, Homo sapiens
aatagggaatccttt

SEQ ID NO: 1749188 - DNA, 15 bp, Homo sapiens
atagggaatcctttc

SEQ ID NO: 1749189 - DNA, 15 bp, Homo sapiens
tagggaatcctttct

SEQ ID NO: 1749190 - DNA, 15 bp, Homo sapiens
agggaatcctttctc

SEQ ID NO: 1749191 - DNA, 15 bp, Homo sapiens
gggaatcctttctcc

SEQ ID NO: 1749192 - DNA, 15 bp, Homo sapiens
ggaatcctttctcca

SEQ ID NO: 1749193 - DNA, 15 bp, Homo sapiens
gaatcctttctccat

SEQ ID NO: 1749194 - DNA, 15 bp, Homo sapiens
aatcctttctccatt

SEQ ID NO: 1749195 - DNA, 15 bp, Homo sapiens
atcctttctccattt

SEQ ID NO: 1749196 - DNA, 15 bp, Homo sapiens
tcctttctccatttc

SEQ ID NO: 1749197 - DNA, 15 bp, Homo sapiens
cctttctccatttct

SEQ ID NO: 1749198 - DNA, 15 bp, Homo sapiens
ctttctccatttctt

SEQ ID NO: 1749199 - DNA, 15 bp, Homo sapiens
tttctccatttcttg

SEQ ID NO: 1749200 - DNA, 15 bp, Homo sapiens
ttctccatttcttgt

SEQ ID NO: 1749201 - DNA, 15 bp, Homo sapiens
tctccatttcttgtt

SEQ ID NO: 1749202 - DNA, 15 bp, Homo sapiens
ctccatttcttgttt

SEQ ID NO: 1749203 - DNA, 15 bp, Homo sapiens
tccatttcttgtttt

SEQ ID NO: 1749204 - DNA, 15 bp, Homo sapiens
ccatttcttgttttt

SEQ ID NO: 1749205 - DNA, 15 bp, Homo sapiens
catttcttgtttttg

SEQ ID NO: 1749206 - DNA, 15 bp, Homo sapiens
atttcttgtttttgt

SEQ ID NO: 1749207 - DNA, 15 bp, Homo sapiens
tttcttgtttttgtc

SEQ ID NO: 1749208 - DNA, 15 bp, Homo sapiens
ttcttgtttttgtca

SEQ ID NO: 1749209 - DNA, 15 bp, Homo sapiens
tcttgtttttgtcag

SEQ ID NO: 1749210 - DNA, 15 bp, Homo sapiens
cttgtttttgtcagg

SEQ ID NO: 1749211 - DNA, 15 bp, Homo sapiens
ttgtttttgtcaggt

SEQ ID NO: 1749212 - DNA, 15 bp, Homo sapiens
tgtttttgtcaggtt

SEQ ID NO: 1749213 - DNA, 15 bp, Homo sapiens
gtttttgtcaggttt

SEQ ID NO: 1749214 - DNA, 15 bp, Homo sapiens
tttttgtcaggtttg

SEQ ID NO: 1749215 - DNA, 15 bp, Homo sapiens
ttttgtcaggtttgt

SEQ ID NO: 1749216 - DNA, 15 bp, Homo sapiens
tttgtcaggtttgtc

SEQ ID NO: 1749217 - DNA, 15 bp, Homo sapiens
ttgtcaggtttgtca

SEQ ID NO: 1749218 - DNA, 15 bp, Homo sapiens
tgtcaggtttgtcaa

SEQ ID NO: 1749219 - DNA, 15 bp, Homo sapiens
gtcaggtttgtcaaa

SEQ ID NO: 1749220 - DNA, 15 bp, Homo sapiens
tcaggtttgtcaaag

SEQ ID NO: 1749221 - DNA, 15 bp, Homo sapiens
caggtttgtcaaaga

SEQ ID NO: 1749222 - DNA, 15 bp, Homo sapiens
aggtttgtcaaagat

SEQ ID NO: 1749223 - DNA, 15 bp, Homo sapiens
ggtttgtcaaagatc

SEQ ID NO: 1749224 - DNA, 15 bp, Homo sapiens
gtttgtcaaagatca

SEQ ID NO: 1749225 - DNA, 15 bp, Homo sapiens
tttgtcaaagatcag

SEQ ID NO: 1749226 - DNA, 15 bp, Homo sapiens
gtcaaagatcagatg

SEQ ID NO: 1749227 - DNA, 15 bp, Homo sapiens
tcaaagatcagatgg

SEQ ID NO: 1749228 - DNA, 15 bp, Homo sapiens
caaagatcagatggt

SEQ ID NO: 1749229 - DNA, 15 bp, Homo sapiens
aaagatcagatggtt

SEQ ID NO: 1749230 - DNA, 15 bp, Homo sapiens
aagatcagatggttg

SEQ ID NO: 1749231 - DNA, 15 bp, Homo sapiens
agatcagatggttgt

SEQ ID NO: 1749232 - DNA, 15 bp, Homo sapiens
gatcagatggttgta

SEQ ID NO: 1749233 - DNA, 15 bp, Homo sapiens
atcagatggttgtag

SEQ ID NO: 1749234 - DNA, 15 bp, Homo sapiens
tcagatggttgtaga

SEQ ID NO: 1749235 - DNA, 15 bp, Homo sapiens
cagatggttgtagat

SEQ ID NO: 1749236 - DNA, 15 bp, Homo sapiens
agatggttgtagatg

SEQ ID NO: 1749237 - DNA, 15 bp, Homo sapiens
gatggttgtagatgt

SEQ ID NO: 1749238 - DNA, 15 bp, Homo sapiens
atggttgtagatgtg

SEQ ID NO: 1749239 - DNA, 15 bp, Homo sapiens
tggttgtagatgtgt

SEQ ID NO: 1749240 - DNA, 15 bp, Homo sapiens
ggttgtagatgtgtg

SEQ ID NO: 1749241 - DNA, 15 bp, Homo sapiens
gttgtagatgtgtgg

SEQ ID NO: 1749242 - DNA, 15 bp, Homo sapiens
ttgtagatgtgtggt

SEQ ID NO: 1749243 - DNA, 15 bp, Homo sapiens
tgtagatgtgtggta

SEQ ID NO: 1749244 - DNA, 15 bp, Homo sapiens
gtagatgtgtggtat

SEQ ID NO: 1749245 - DNA, 15 bp, Homo sapiens
tagatgtgtggtatt

SEQ ID NO: 1749246 - DNA, 15 bp, Homo sapiens
agatgtgtggtatta

SEQ ID NO: 1749247 - DNA, 15 bp, Homo sapiens
gatgtgtggtattat

SEQ ID NO: 1749248 - DNA, 15 bp, Homo sapiens
atgtgtggtattatt

SEQ ID NO: 1749249 - DNA, 15 bp, Homo sapiens
tgtgtggtattattt

SEQ ID NO: 1749250 - DNA, 15 bp, Homo sapiens
gtgtggtattatttc

SEQ ID NO: 1749251 - DNA, 15 bp, Homo sapiens
tgtggtattatttct

SEQ ID NO: 1749252 - DNA, 15 bp, Homo sapiens
gtggtattatttctg

SEQ ID NO: 1749253 - DNA, 15 bp, Homo sapiens
tggtattatttctga

SEQ ID NO: 1749254 - DNA, 15 bp, Homo sapiens
ggtattatttctgag

SEQ ID NO: 1749255 - DNA, 15 bp, Homo sapiens
gtattatttctgagg

SEQ ID NO: 1749256 - DNA, 15 bp, Homo sapiens
tattatttctgaggg

SEQ ID NO: 1749257 - DNA, 15 bp, Homo sapiens
attatttctgagggc

SEQ ID NO: 1749258 - DNA, 15 bp, Homo sapiens
ttatttctgagggcc

SEQ ID NO: 1749259 - DNA, 15 bp, Homo sapiens
tatttctgagggccc

SEQ ID NO: 1749260 - DNA, 15 bp, Homo sapiens
atttctgagggccct

SEQ ID NO: 1749261 - DNA, 15 bp, Homo sapiens
tttctgagggccctg

SEQ ID NO: 1749262 - DNA, 15 bp, Homo sapiens
ttctgagggccctgt

SEQ ID NO: 1749263 - DNA, 15 bp, Homo sapiens
tctgagggccctgtt

SEQ ID NO: 1749264 - DNA, 15 bp, Homo sapiens
ctgagggccctgttc

SEQ ID NO: 1749265 - DNA, 15 bp, Homo sapiens
tgagggccctgttct

SEQ ID NO: 1749266 - DNA, 15 bp, Homo sapiens
gagggccctgttcta

SEQ ID NO: 1749267 - DNA, 15 bp, Homo sapiens
gggccctgttctaaa

SEQ ID NO: 1749268 - DNA, 15 bp, Homo sapiens
ggccctgttctaaac

SEQ ID NO: 1749269 - DNA, 15 bp, Homo sapiens
gccctgttctaaacc

SEQ ID NO: 1749270 - DNA, 15 bp, Homo sapiens
ccctgttctaaacca

SEQ ID NO: 1749271 - DNA, 15 bp, Homo sapiens
cctgttctaaaccaa

SEQ ID NO: 1749272 - DNA, 15 bp, Homo sapiens
ctgttctaaaccaaa

SEQ ID NO: 1749273 - DNA, 15 bp, Homo sapiens
tgttctaaaccaaaa

SEQ ID NO: 1749274 - DNA, 15 bp, Homo sapiens
gttctaaaccaaaac

SEQ ID NO: 1749275 - DNA, 15 bp, Homo sapiens
ttctaaaccaaaaca

SEQ ID NO: 1749276 - DNA, 15 bp, Homo sapiens
tctaaaccaaaacag

SEQ ID NO: 1749277 - DNA, 15 bp, Homo sapiens
ctaaaccaaaacaga

SEQ ID NO: 1749278 - DNA, 15 bp, Homo sapiens
taaaccaaaacagaa

SEQ ID NO: 1749279 - DNA, 15 bp, Homo sapiens
aaaccaaaacagaat

SEQ ID NO: 1749280 - DNA, 15 bp, Homo sapiens
aaccaaaacagaatt

SEQ ID NO: 1749281 - DNA, 15 bp, Homo sapiens
accaaaacagaattc

SEQ ID NO: 1749282 - DNA, 15 bp, Homo sapiens
ccaaaacagaattct

SEQ ID NO: 1749283 - DNA, 15 bp, Homo sapiens
caaaacagaattctt

SEQ ID NO: 1749284 - DNA, 15 bp, Homo sapiens
aaaacagaattcttt

SEQ ID NO: 1749285 - DNA, 15 bp, Homo sapiens
aaacagaattcttta

SEQ ID NO: 1749286 - DNA, 15 bp, Homo sapiens
aacagaattctttaa

SEQ ID NO: 1749287 - DNA, 15 bp, Homo sapiens
acagaattctttaaa

SEQ ID NO: 1749288 - DNA, 15 bp, Homo sapiens
cagaattctttaaag

SEQ ID NO: 1749289 - DNA, 15 bp, Homo sapiens
agaattctttaaagt

SEQ ID NO: 1749290 - DNA, 15 bp, Homo sapiens
gaattctttaaagta

SEQ ID NO: 1749291 - DNA, 15 bp, Homo sapiens
ttctttaaagtattt

SEQ ID NO: 1749292 - DNA, 15 bp, Homo sapiens
tctttaaagtattta

SEQ ID NO: 1749293 - DNA, 15 bp, Homo sapiens
ctttaaagtatttag

SEQ ID NO: 1749294 - DNA, 15 bp, Homo sapiens
tttaaagtatttaga

SEQ ID NO: 1749295 - DNA, 15 bp, Homo sapiens
ttaaagtatttagat

SEQ ID NO: 1749296 - DNA, 15 bp, Homo sapiens
taaagtatttagata

SEQ ID NO: 1749297 - DNA, 15 bp, Homo sapiens
aaagtatttagataa

SEQ ID NO: 1749298 - DNA, 15 bp, Homo sapiens
aagtatttagataat

SEQ ID NO: 1749299 - DNA, 15 bp, Homo sapiens
agtatttagataatt

SEQ ID NO: 1749300 - DNA, 15 bp, Homo sapiens
gtatttagataattt

SEQ ID NO: 1749301 - DNA, 15 bp, Homo sapiens
tatttagataattta

SEQ ID NO: 1749302 - DNA, 15 bp, Homo sapiens
atttagataatttat

SEQ ID NO: 1749303 - DNA, 15 bp, Homo sapiens
tttagataatttatt

SEQ ID NO: 1749304 - DNA, 15 bp, Homo sapiens
ttagataatttattt

SEQ ID NO: 1749305 - DNA, 15 bp, Homo sapiens
tagataatttattta

SEQ ID NO: 1749306 - DNA, 15 bp, Homo sapiens
agataatttatttaa

SEQ ID NO: 1749307 - DNA, 15 bp, Homo sapiens
gataatttatttaaa

SEQ ID NO: 1749308 - DNA, 15 bp, Homo sapiens
ataatttatttaaag

SEQ ID NO: 1749309 - DNA, 15 bp, Homo sapiens
taatttatttaaagt

SEQ ID NO: 1749310 - DNA, 15 bp, Homo sapiens
aatttatttaaagta

SEQ ID NO: 1749311 - DNA, 15 bp, Homo sapiens
atttatttaaagtac

SEQ ID NO: 1749312 - DNA, 15 bp, Homo sapiens
tttatttaaagtaca

SEQ ID NO: 1749313 - DNA, 15 bp, Homo sapiens
ttatttaaagtacag

SEQ ID NO: 1749314 - DNA, 15 bp, Homo sapiens
tatttaaagtacagt

SEQ ID NO: 1749315 - DNA, 15 bp, Homo sapiens
atttaaagtacagtt

SEQ ID NO: 1749316 - DNA, 15 bp, Homo sapiens
tttaaagtacagttg

SEQ ID NO: 1749317 - DNA, 15 bp, Homo sapiens
ttaaagtacagttgt

SEQ ID NO: 1749318 - DNA, 15 bp, Homo sapiens
taaagtacagttgtt

SEQ ID NO: 1749319 - DNA, 15 bp, Homo sapiens
aaagtacagttgtta

SEQ ID NO: 1749320 - DNA, 15 bp, Homo sapiens
aagtacagttgttat

SEQ ID NO: 1749321 - DNA, 15 bp, Homo sapiens
agtacagttgttata

SEQ ID NO: 1749322 - DNA, 15 bp, Homo sapiens
gtacagttgttatat

SEQ ID NO: 1749323 - DNA, 15 bp, Homo sapiens
tacagttgttatata

SEQ ID NO: 1749324 - DNA, 15 bp, Homo sapiens
acagttgttatatat

SEQ ID NO: 1749325 - DNA, 15 bp, Homo sapiens
cagttgttatatatt

SEQ ID NO: 1749326 - DNA, 15 bp, Homo sapiens
agttgttatatattt

SEQ ID NO: 1749327 - DNA, 15 bp, Homo sapiens
gttgttatatatttg

SEQ ID NO: 1749328 - DNA, 15 bp, Homo sapiens
ttgttatatatttga

SEQ ID NO: 1749329 - DNA, 15 bp, Homo sapiens
tgttatatatttgaa

SEQ ID NO: 1749330 - DNA, 15 bp, Homo sapiens
gttatatatttgaaa

SEQ ID NO: 1749331 - DNA, 15 bp, Homo sapiens
ttatatatttgaaaa

SEQ ID NO: 1749332 - DNA, 15 bp, Homo sapiens
tatatatttgaaaat

SEQ ID NO: 1749333 - DNA, 15 bp, Homo sapiens
atatatttgaaaatg

SEQ ID NO: 1749334 - DNA, 15 bp, Homo sapiens
tatatttgaaaatgc

SEQ ID NO: 1749335 - DNA, 15 bp, Homo sapiens
atatttgaaaatgca

SEQ ID NO: 1749336 - DNA, 15 bp, Homo sapiens
tatttgaaaatgcaa

SEQ ID NO: 1749337 - DNA, 15 bp, Homo sapiens
atttgaaaatgcaaa

SEQ ID NO: 1749338 - DNA, 15 bp, Homo sapiens
tttgaaaatgcaaat

SEQ ID NO: 1749339 - DNA, 15 bp, Homo sapiens
ttgaaaatgcaaatg

SEQ ID NO: 1749340 - DNA, 15 bp, Homo sapiens
tgaaaatgcaaatgt

SEQ ID NO: 1749341 - DNA, 15 bp, Homo sapiens
gaaaatgcaaatgtc

SEQ ID NO: 1749342 - DNA, 15 bp, Homo sapiens
aaaatgcaaatgtct

SEQ ID NO: 1749343 - DNA, 15 bp, Homo sapiens
aaatgcaaatgtctg

SEQ ID NO: 1749344 - DNA, 15 bp, Homo sapiens
aatgcaaatgtctgc

SEQ ID NO: 1749345 - DNA, 15 bp, Homo sapiens
atgcaaatgtctgct

SEQ ID NO: 1749346 - DNA, 15 bp, Homo sapiens
tgcaaatgtctgctc

SEQ ID NO: 1749347 - DNA, 15 bp, Homo sapiens
gcaaatgtctgctct

SEQ ID NO: 1749348 - DNA, 15 bp, Homo sapiens
caaatgtctgctctt

SEQ ID NO: 1749349 - DNA, 15 bp, Homo sapiens
aaatgtctgctctta

SEQ ID NO: 1749350 - DNA, 15 bp, Homo sapiens
aatgtctgctcttaa

SEQ ID NO: 1749351 - DNA, 15 bp, Homo sapiens
atgtctgctcttaaa

SEQ ID NO: 1749352 - DNA, 15 bp, Homo sapiens
tgtctgctcttaaat

SEQ ID NO: 1749353 - DNA, 15 bp, Homo sapiens
gtctgctcttaaatt

SEQ ID NO: 1749354 - DNA, 15 bp, Homo sapiens
tctgctcttaaattg

SEQ ID NO: 1749355 - DNA, 15 bp, Homo sapiens
ctgctcttaaattgt

SEQ ID NO: 1749356 - DNA, 15 bp, Homo sapiens
tgctcttaaattgtg

SEQ ID NO: 1749357 - DNA, 15 bp, Homo sapiens
gctcttaaattgtga

SEQ ID NO: 1749358 - DNA, 15 bp, Homo sapiens
ctcttaaattgtgag

SEQ ID NO: 1749359 - DNA, 15 bp, Homo sapiens
tcttaaattgtgaga

SEQ ID NO: 1749360 - DNA, 15 bp, Homo sapiens
cttaaattgtgagat

SEQ ID NO: 1749361 - DNA, 15 bp, Homo sapiens
ttaaattgtgagatt

SEQ ID NO: 1749362 - DNA, 15 bp, Homo sapiens
taaattgtgagatta

SEQ ID NO: 1749363 - DNA, 15 bp, Homo sapiens
aaattgtgagattat

SEQ ID NO: 1749364 - DNA, 15 bp, Homo sapiens
aattgtgagattatg

SEQ ID NO: 1749365 - DNA, 15 bp, Homo sapiens
attgtgagattatgc

SEQ ID NO: 1749366 - DNA, 15 bp, Homo sapiens
ttgtgagattatgct

SEQ ID NO: 1749367 - DNA, 15 bp, Homo sapiens
tgtgagattatgcta

SEQ ID NO: 1749368 - DNA, 15 bp, Homo sapiens
gtgagattatgctat

SEQ ID NO: 1749369 - DNA, 15 bp, Homo sapiens
tgagattatgctatt

SEQ ID NO: 1749370 - DNA, 15 bp, Homo sapiens
gagattatgctattt

SEQ ID NO: 1749371 - DNA, 15 bp, Homo sapiens
agattatgctattta

SEQ ID NO: 1749372 - DNA, 15 bp, Homo sapiens
gattatgctatttag

SEQ ID NO: 1749373 - DNA, 15 bp, Homo sapiens
attatgctatttaga

SEQ ID NO: 1749374 - DNA, 15 bp, Homo sapiens
ttatgctatttagat

SEQ ID NO: 1749375 - DNA, 15 bp, Homo sapiens
tatgctatttagatt

SEQ ID NO: 1749376 - DNA, 15 bp, Homo sapiens
atgctatttagatta

SEQ ID NO: 1749377 - DNA, 15 bp, Homo sapiens
tgctatttagattat

SEQ ID NO: 1749378 - DNA, 15 bp, Homo sapiens
gctatttagattatt

SEQ ID NO: 1749379 - DNA, 15 bp, Homo sapiens
ctatttagattatta

SEQ ID NO: 1749380 - DNA, 15 bp, Homo sapiens
tatttagattattaa

SEQ ID NO: 1749381 - DNA, 15 bp, Homo sapiens
atttagattattaaa

SEQ ID NO: 1749382 - DNA, 15 bp, Homo sapiens
tttagattattaaaa

SEQ ID NO: 1749383 - DNA, 15 bp, Homo sapiens
ttagattattaaaaa

SEQ ID NO: 1749384 - DNA, 15 bp, Homo sapiens
tagattattaaaaag

SEQ ID NO: 1749385 - DNA, 15 bp, Homo sapiens
agattattaaaaagt

SEQ ID NO: 1749386 - DNA, 15 bp, Homo sapiens
gattattaaaaagtg

SEQ ID NO: 1749387 - DNA, 15 bp, Homo sapiens
attattaaaaagtgc

SEQ ID NO: 1749388 - DNA, 15 bp, Homo sapiens
ttattaaaaagtgca

SEQ ID NO: 1749389 - DNA, 15 bp, Homo sapiens
tattaaaaagtgcat

SEQ ID NO: 1749390 - DNA, 15 bp, Homo sapiens
attaaaaagtgcatt

SEQ ID NO: 1749391 - DNA, 15 bp, Homo sapiens
ttaaaaagtgcattt

SEQ ID NO: 1749392 - DNA, 15 bp, Homo sapiens
taaaaagtgcatttt

SEQ ID NO: 1749393 - DNA, 15 bp, Homo sapiens
aaaaagtgcattttt

SEQ ID NO: 1749394 - DNA, 15 bp, Homo sapiens
aaaagtgcatttttt

SEQ ID NO: 1749395 - DNA, 15 bp, Homo sapiens
aaagtgcattttttt

SEQ ID NO: 1749396 - DNA, 15 bp, Homo sapiens
aagtgcatttttttc

SEQ ID NO: 1749397 - DNA, 15 bp, Homo sapiens
agtgcatttttttct

SEQ ID NO: 1749398 - DNA, 15 bp, Homo sapiens
gtgcatttttttctt

SEQ ID NO: 1749399 - DNA, 15 bp, Homo sapiens
tgcatttttttcttg

SEQ ID NO: 1749400 - DNA, 15 bp, Homo sapiens
gcatttttttcttgt

SEQ ID NO: 1749401 - DNA, 15 bp, Homo sapiens
catttttttcttgtt

SEQ ID NO: 1749402 - DNA, 15 bp, Homo sapiens
atttttttcttgtta

SEQ ID NO: 1749403 - DNA, 15 bp, Homo sapiens
tttttttcttgttaa

SEQ ID NO: 1749404 - DNA, 15 bp, Homo sapiens
ttttttcttgttaaa

SEQ ID NO: 1749405 - DNA, 15 bp, Homo sapiens
tttttcttgttaaat

SEQ ID NO: 1749406 - DNA, 15 bp, Homo sapiens
ttttcttgttaaata

SEQ ID NO: 1749407 - DNA, 15 bp, Homo sapiens
tttcttgttaaatat

SEQ ID NO: 1749408 - DNA, 15 bp, Homo sapiens
ttcttgttaaatata

SEQ ID NO: 1749409 - DNA, 15 bp, Homo sapiens
tcttgttaaatatag

SEQ ID NO: 1749410 - DNA, 15 bp, Homo sapiens
cttgttaaatatagt

SEQ ID NO: 1749411 - DNA, 15 bp, Homo sapiens
ttgttaaatatagta

SEQ ID NO: 1749412 - DNA, 15 bp, Homo sapiens
tgttaaatatagtag

SEQ ID NO: 1749413 - DNA, 15 bp, Homo sapiens
gttaaatatagtagg

SEQ ID NO: 1749414 - DNA, 15 bp, Homo sapiens
ttaaatatagtagga

SEQ ID NO: 1749415 - DNA, 15 bp, Homo sapiens
taaatatagtaggat

SEQ ID NO: 1749416 - DNA, 15 bp, Homo sapiens
aaatatagtaggatt

SEQ ID NO: 1749417 - DNA, 15 bp, Homo sapiens
aatatagtaggattc

SEQ ID NO: 1749418 - DNA, 15 bp, Homo sapiens
atatagtaggattca

SEQ ID NO: 1749419 - DNA, 15 bp, Homo sapiens
tatagtaggattcat

SEQ ID NO: 1749420 - DNA, 15 bp, Homo sapiens
atagtaggattcatt

SEQ ID NO: 1749421 - DNA, 15 bp, Homo sapiens
tagtaggattcattt

SEQ ID NO: 1749422 - DNA, 15 bp, Homo sapiens
agtaggattcatttt

SEQ ID NO: 1749423 - DNA, 15 bp, Homo sapiens
gtaggattcattttt

SEQ ID NO: 1749424 - DNA, 15 bp, Homo sapiens
taggattcatttttt

SEQ ID NO: 1749425 - DNA, 15 bp, Homo sapiens
aggattcattttttc

SEQ ID NO: 1749426 - DNA, 15 bp, Homo sapiens
ggattcattttttcc

SEQ ID NO: 1749427 - DNA, 15 bp, Homo sapiens
gattcattttttccc

SEQ ID NO: 1749428 - DNA, 15 bp, Homo sapiens
attcattttttccca

SEQ ID NO: 1749429 - DNA, 15 bp, Homo sapiens
ttcattttttcccat

SEQ ID NO: 1749430 - DNA, 15 bp, Homo sapiens
tcattttttcccatt

SEQ ID NO: 1749431 - DNA, 15 bp, Homo sapiens
cattttttcccatta

SEQ ID NO: 1749432 - DNA, 15 bp, Homo sapiens
attttttcccattat

SEQ ID NO: 1749433 - DNA, 15 bp, Homo sapiens
ttttttcccattatt

SEQ ID NO: 1749434 - DNA, 15 bp, Homo sapiens
tttttcccattatta

SEQ ID NO: 1749435 - DNA, 15 bp, Homo sapiens
ttttcccattattaa

SEQ ID NO: 1749436 - DNA, 15 bp, Homo sapiens
tttcccattattaaa

SEQ ID NO: 1749437 - DNA, 15 bp, Homo sapiens
ttcccattattaaag

SEQ ID NO: 1749438 - DNA, 15 bp, Homo sapiens
tcccattattaaagt

SEQ ID NO: 1749439 - DNA, 15 bp, Homo sapiens
cccattattaaagta

SEQ ID NO: 1749440 - DNA, 15 bp, Homo sapiens
ccattattaaagtat

SEQ ID NO: 1749441 - DNA, 15 bp, Homo sapiens
cattattaaagtata

SEQ ID NO: 1749442 - DNA, 15 bp, Homo sapiens
attattaaagtataa

SEQ ID NO: 1749443 - DNA, 15 bp, Homo sapiens
ttattaaagtataaa

SEQ ID NO: 1749444 - DNA, 15 bp, Homo sapiens
tattaaagtataaaa

SEQ ID NO: 1749445 - DNA, 15 bp, Homo sapiens
attaaagtataaaaa

SEQ ID NO: 1749446 - DNA, 15 bp, Homo sapiens
ttaaagtataaaaat

SEQ ID NO: 1749447 - DNA, 15 bp, Homo sapiens
taaagtataaaaatg

SEQ ID NO: 1749448 - DNA, 15 bp, Homo sapiens
gtataaaaatgtata

SEQ ID NO: 1749449 - DNA, 15 bp, Homo sapiens
tataaaaatgtatac

SEQ ID NO: 1749450 - DNA, 15 bp, Homo sapiens
ataaaaatgtatact

SEQ ID NO: 1749451 - DNA, 15 bp, Homo sapiens
taaaaatgtatacta

SEQ ID NO: 1749452 - DNA, 15 bp, Homo sapiens
aaaaatgtatactat

SEQ ID NO: 1749453 - DNA, 15 bp, Homo sapiens
aaaatgtatactatt

SEQ ID NO: 1749454 - DNA, 15 bp, Homo sapiens
aaatgtatactattg

SEQ ID NO: 1749455 - DNA, 15 bp, Homo sapiens
aatgtatactattgt

SEQ ID NO: 1749456 - DNA, 15 bp, Homo sapiens
atgtatactattgtt

SEQ ID NO: 1749457 - DNA, 15 bp, Homo sapiens
tgtatactattgttc

SEQ ID NO: 1749458 - DNA, 15 bp, Homo sapiens
gtatactattgttca

SEQ ID NO: 1749459 - DNA, 15 bp, Homo sapiens
tatactattgttcaa

SEQ ID NO: 1749460 - DNA, 15 bp, Homo sapiens
atactattgttcaat

SEQ ID NO: 1749461 - DNA, 15 bp, Homo sapiens
tactattgttcaatt

SEQ ID NO: 1749462 - DNA, 15 bp, Homo sapiens
actattgttcaatta

SEQ ID NO: 1749463 - DNA, 15 bp, Homo sapiens
ctattgttcaattat

SEQ ID NO: 1749464 - DNA, 15 bp, Homo sapiens
tattgttcaattata

SEQ ID NO: 1749465 - DNA, 15 bp, Homo sapiens
attgttcaattatag

SEQ ID NO: 1749466 - DNA, 15 bp, Homo sapiens
ttgttcaattatagg

SEQ ID NO: 1749467 - DNA, 15 bp, Homo sapiens
tgttcaattataggt

SEQ ID NO: 1749468 - DNA, 15 bp, Homo sapiens
gttcaattataggta

SEQ ID NO: 1749469 - DNA, 15 bp, Homo sapiens
ttcaattataggtat

SEQ ID NO: 1749470 - DNA, 15 bp, Homo sapiens
tcaattataggtatt

SEQ ID NO: 1749471 - DNA, 15 bp, Homo sapiens
caattataggtattg

SEQ ID NO: 1749472 - DNA, 15 bp, Homo sapiens
aattataggtattgg

SEQ ID NO: 1749473 - DNA, 15 bp, Homo sapiens
attataggtattggt

SEQ ID NO: 1749474 - DNA, 15 bp, Homo sapiens
ttataggtattggtt

SEQ ID NO: 1749475 - DNA, 15 bp, Homo sapiens
tataggtattggttc

SEQ ID NO: 1749476 - DNA, 15 bp, Homo sapiens
ataggtattggttca

SEQ ID NO: 1749477 - DNA, 15 bp, Homo sapiens
taggtattggttcaa

SEQ ID NO: 1749478 - DNA, 15 bp, Homo sapiens
aggtattggttcaat

SEQ ID NO: 1749479 - DNA, 15 bp, Homo sapiens
ggtattggttcaatc

SEQ ID NO: 1749480 - DNA, 15 bp, Homo sapiens
gtattggttcaatca

SEQ ID NO: 1749481 - DNA, 15 bp, Homo sapiens
tattggttcaatcaa

SEQ ID NO: 1749482 - DNA, 15 bp, Homo sapiens
attggttcaatcaat

SEQ ID NO: 1749483 - DNA, 15 bp, Homo sapiens
ttggttcaatcaata

SEQ ID NO: 1749484 - DNA, 15 bp, Homo sapiens
tggttcaatcaatat

SEQ ID NO: 1749485 - DNA, 15 bp, Homo sapiens
ggttcaatcaatata

SEQ ID NO: 1749486 - DNA, 15 bp, Homo sapiens
gttcaatcaatatag

SEQ ID NO: 1749487 - DNA, 15 bp, Homo sapiens
ttcaatcaatatagg

SEQ ID NO: 1749488 - DNA, 15 bp, Homo sapiens
tcaatcaatataggg

SEQ ID NO: 1749489 - DNA, 15 bp, Homo sapiens
caatcaatatagggg

SEQ ID NO: 1749490 - DNA, 15 bp, Homo sapiens
aatcaatataggggc

SEQ ID NO: 1749491 - DNA, 15 bp, Homo sapiens
atcaatataggggca

SEQ ID NO: 1749492 - DNA, 15 bp, Homo sapiens
tcaatataggggcac

SEQ ID NO: 1749493 - DNA, 15 bp, Homo sapiens
caatataggggcaca

SEQ ID NO: 1749494 - DNA, 15 bp, Homo sapiens
aatataggggcacaa

SEQ ID NO: 1749495 - DNA, 15 bp, Homo sapiens
atataggggcacaaa

SEQ ID NO: 1749496 - DNA, 15 bp, Homo sapiens
tataggggcacaaat

SEQ ID NO: 1749497 - DNA, 15 bp, Homo sapiens
ataggggcacaaatt

SEQ ID NO: 1749498 - DNA, 15 bp, Homo sapiens
taggggcacaaatta

SEQ ID NO: 1749499 - DNA, 15 bp, Homo sapiens
aggggcacaaattat

SEQ ID NO: 1749500 - DNA, 15 bp, Homo sapiens
ggggcacaaattata

SEQ ID NO: 1749501 - DNA, 15 bp, Homo sapiens
gggcacaaattatat

SEQ ID NO: 1749502 - DNA, 15 bp, Homo sapiens
ggcacaaattatatt

SEQ ID NO: 1749503 - DNA, 15 bp, Homo sapiens
gcacaaattatattg

SEQ ID NO: 1749504 - DNA, 15 bp, Homo sapiens
cacaaattatattgt

SEQ ID NO: 1749505 - DNA, 15 bp, Homo sapiens
acaaattatattgtc

SEQ ID NO: 1749506 - DNA, 15 bp, Homo sapiens
caaattatattgtct

SEQ ID NO: 1749507 - DNA, 15 bp, Homo sapiens
aaattatattgtcta

SEQ ID NO: 1749508 - DNA, 15 bp, Homo sapiens
aattatattgtctag

SEQ ID NO: 1749509 - DNA, 15 bp, Homo sapiens
attatattgtctagg

SEQ ID NO: 1749510 - DNA, 15 bp, Homo sapiens
ttatattgtctagga

SEQ ID NO: 1749511 - DNA, 15 bp, Homo sapiens
tatattgtctaggat

SEQ ID NO: 1749512 - DNA, 15 bp, Homo sapiens
atattgtctaggatt

SEQ ID NO: 1749513 - DNA, 15 bp, Homo sapiens
tattgtctaggattc

SEQ ID NO: 1749514 - DNA, 15 bp, Homo sapiens
attgtctaggattct

SEQ ID NO: 1749515 - DNA, 15 bp, Homo sapiens
ttgtctaggattctc

SEQ ID NO: 1749516 - DNA, 15 bp, Homo sapiens
tgtctaggattctct

SEQ ID NO: 1749517 - DNA, 15 bp, Homo sapiens
gtctaggattctctt

SEQ ID NO: 1749518 - DNA, 15 bp, Homo sapiens
tctaggattctcttt

SEQ ID NO: 1749519 - DNA, 15 bp, Homo sapiens
ctaggattctcttta

SEQ ID NO: 1749520 - DNA, 15 bp, Homo sapiens
taggattctctttat

SEQ ID NO: 1749521 - DNA, 15 bp, Homo sapiens
aggattctctttata

SEQ ID NO: 1749522 - DNA, 15 bp, Homo sapiens
ggattctctttatag

SEQ ID NO: 1749523 - DNA, 15 bp, Homo sapiens
gattctctttatagc

SEQ ID NO: 1749524 - DNA, 15 bp, Homo sapiens
attctctttatagca

SEQ ID NO: 1749525 - DNA, 15 bp, Homo sapiens
ttctctttatagcat

SEQ ID NO: 1749526 - DNA, 15 bp, Homo sapiens
tctctttatagcatt

SEQ ID NO: 1749527 - DNA, 15 bp, Homo sapiens
ctctttatagcatta

SEQ ID NO: 1749528 - DNA, 15 bp, Homo sapiens
tctttatagcattat

SEQ ID NO: 1749529 - DNA, 15 bp, Homo sapiens
ctttatagcattata

SEQ ID NO: 1749530 - DNA, 15 bp, Homo sapiens
tttatagcattataa

SEQ ID NO: 1749531 - DNA, 15 bp, Homo sapiens
ttatagcattataac

SEQ ID NO: 1749532 - DNA, 15 bp, Homo sapiens
tatagcattataact

SEQ ID NO: 1749533 - DNA, 15 bp, Homo sapiens
atagcattataacta

SEQ ID NO: 1749534 - DNA, 15 bp, Homo sapiens
tagcattataactat

SEQ ID NO: 1749535 - DNA, 15 bp, Homo sapiens
agcattataactatt

SEQ ID NO: 1749536 - DNA, 15 bp, Homo sapiens
gcattataactattg

SEQ ID NO: 1749537 - DNA, 15 bp, Homo sapiens
cattataactattga

SEQ ID NO: 1749538 - DNA, 15 bp, Homo sapiens
attataactattgat

SEQ ID NO: 1749539 - DNA, 15 bp, Homo sapiens
ttataactattgata

SEQ ID NO: 1749540 - DNA, 15 bp, Homo sapiens
tataactattgataa

SEQ ID NO: 1749541 - DNA, 15 bp, Homo sapiens
ataactattgataag

SEQ ID NO: 1749542 - DNA, 15 bp, Homo sapiens
taactattgataagg

SEQ ID NO: 1749543 - DNA, 15 bp, Homo sapiens
aactattgataaggc

SEQ ID NO: 1749544 - DNA, 15 bp, Homo sapiens
actattgataaggct

SEQ ID NO: 1749545 - DNA, 15 bp, Homo sapiens
ctattgataaggctt

SEQ ID NO: 1749546 - DNA, 15 bp, Homo sapiens
tattgataaggcttt

SEQ ID NO: 1749547 - DNA, 15 bp, Homo sapiens
attgataaggctttt

SEQ ID NO: 1749548 - DNA, 15 bp, Homo sapiens
ttgataaggcttttg

SEQ ID NO: 1749549 - DNA, 15 bp, Homo sapiens
tgataaggcttttgt

SEQ ID NO: 1749550 - DNA, 15 bp, Homo sapiens
gataaggcttttgtt

SEQ ID NO: 1749551 - DNA, 15 bp, Homo sapiens
ataaggcttttgttt

SEQ ID NO: 1749552 - DNA, 15 bp, Homo sapiens
taaggcttttgtttt

SEQ ID NO: 1749553 - DNA, 15 bp, Homo sapiens
aaggcttttgtttta

SEQ ID NO: 1749554 - DNA, 15 bp, Homo sapiens
aggcttttgttttaa

SEQ ID NO: 1749555 - DNA, 15 bp, Homo sapiens
ggcttttgttttaat

SEQ ID NO: 1749556 - DNA, 15 bp, Homo sapiens
gcttttgttttaata

SEQ ID NO: 1749557 - DNA, 15 bp, Homo sapiens
cttttgttttaataa

SEQ ID NO: 1749558 - DNA, 15 bp, Homo sapiens
ttttgttttaataaa

SEQ ID NO: 1749559 - DNA, 15 bp, Homo sapiens
tttgttttaataaaa

SEQ ID NO: 1749560 - DNA, 15 bp, Homo sapiens
ttgttttaataaaag

SEQ ID NO: 1749561 - DNA, 15 bp, Homo sapiens
tgttttaataaaagt

SEQ ID NO: 1749562 - DNA, 15 bp, Homo sapiens
gttttaataaaagtg

SEQ ID NO: 1749563 - DNA, 15 bp, Homo sapiens
ttttaataaaagtgg

SEQ ID NO: 1749564 - DNA, 15 bp, Homo sapiens
tttaataaaagtggc

SEQ ID NO: 1749565 - DNA, 15 bp, Homo sapiens
ttaataaaagtggca

SEQ ID NO: 1749566 - DNA, 15 bp, Homo sapiens
taataaaagtggcaa

SEQ ID NO: 1749567 - DNA, 15 bp, Homo sapiens
aataaaagtggcaac

SEQ ID NO: 1749568 - DNA, 15 bp, Homo sapiens
ataaaagtggcaact

SEQ ID NO: 1749569 - DNA, 15 bp, Homo sapiens
taaaagtggcaactt

SEQ ID NO: 1749570 - DNA, 15 bp, Homo sapiens
aaaagtggcaacttg

SEQ ID NO: 1749571 - DNA, 15 bp, Homo sapiens
aaagtggcaacttga

SEQ ID NO: 1749572 - DNA, 15 bp, Homo sapiens
aagtggcaacttgag

SEQ ID NO: 1749573 - DNA, 15 bp, Homo sapiens
agtggcaacttgagg

SEQ ID NO: 1749574 - DNA, 15 bp, Homo sapiens
gtggcaacttgaggt

SEQ ID NO: 1749575 - DNA, 15 bp, Homo sapiens
tggcaacttgaggtt

SEQ ID NO: 1749576 - DNA, 15 bp, Homo sapiens
ggcaacttgaggtta

SEQ ID NO: 1749577 - DNA, 15 bp, Homo sapiens
gcaacttgaggttat

SEQ ID NO: 1749578 - DNA, 15 bp, Homo sapiens
caacttgaggttatg

SEQ ID NO: 1749579 - DNA, 15 bp, Homo sapiens
aacttgaggttatgc

SEQ ID NO: 1749580 - DNA, 15 bp, Homo sapiens
acttgaggttatgct

SEQ ID NO: 1749581 - DNA, 15 bp, Homo sapiens
cttgaggttatgctc

SEQ ID NO: 1749582 - DNA, 15 bp, Homo sapiens
ttgaggttatgctct

SEQ ID NO: 1749583 - DNA, 15 bp, Homo sapiens
tgaggttatgctctt

SEQ ID NO: 1749584 - DNA, 15 bp, Homo sapiens
gaggttatgctcttc

SEQ ID NO: 1749585 - DNA, 15 bp, Homo sapiens
aggttatgctcttca

SEQ ID NO: 1749586 - DNA, 15 bp, Homo sapiens
ggttatgctcttcaa

SEQ ID NO: 1749587 - DNA, 15 bp, Homo sapiens
gttatgctcttcaaa

SEQ ID NO: 1749588 - DNA, 15 bp, Homo sapiens
ttatgctcttcaaat

SEQ ID NO: 1749589 - DNA, 15 bp, Homo sapiens
tatgctcttcaaatc

SEQ ID NO: 1749590 - DNA, 15 bp, Homo sapiens
atgctcttcaaatca

SEQ ID NO: 1749591 - DNA, 15 bp, Homo sapiens
tgctcttcaaatcaa

SEQ ID NO: 1749592 - DNA, 15 bp, Homo sapiens
gctcttcaaatcaac

SEQ ID NO: 1749593 - DNA, 15 bp, Homo sapiens
ctcttcaaatcaaca

SEQ ID NO: 1749594 - DNA, 15 bp, Homo sapiens
tcttcaaatcaacat

SEQ ID NO: 1749595 - DNA, 15 bp, Homo sapiens
cttcaaatcaacata

SEQ ID NO: 1749596 - DNA, 15 bp, Homo sapiens
ttcaaatcaacatag

SEQ ID NO: 1749597 - DNA, 15 bp, Homo sapiens
tcaaatcaacatagt

SEQ ID NO: 1749598 - DNA, 15 bp, Homo sapiens
caaatcaacatagtt

SEQ ID NO: 1749599 - DNA, 15 bp, Homo sapiens
aaatcaacatagttg

SEQ ID NO: 1749600 - DNA, 15 bp, Homo sapiens
aatcaacatagttgg

SEQ ID NO: 1749601 - DNA, 15 bp, Homo sapiens
atcaacatagttgga

SEQ ID NO: 1749602 - DNA, 15 bp, Homo sapiens
tcaacatagttggat

SEQ ID NO: 1749603 - DNA, 15 bp, Homo sapiens
caacatagttggata

SEQ ID NO: 1749604 - DNA, 15 bp, Homo sapiens
aacatagttggataa

SEQ ID NO: 1749605 - DNA, 15 bp, Homo sapiens
acatagttggataat

SEQ ID NO: 1749606 - DNA, 15 bp, Homo sapiens
catagttggataata

SEQ ID NO: 1749607 - DNA, 15 bp, Homo sapiens
atagttggataatac

SEQ ID NO: 1749608 - DNA, 15 bp, Homo sapiens
tagttggataatact

SEQ ID NO: 1749609 - DNA, 15 bp, Homo sapiens
agttggataatactt

SEQ ID NO: 1749610 - DNA, 15 bp, Homo sapiens
gttggataatacttt

SEQ ID NO: 1749611 - DNA, 15 bp, Homo sapiens
ttggataatactttg

SEQ ID NO: 1749612 - DNA, 15 bp, Homo sapiens
tggataatactttgt

SEQ ID NO: 1749613 - DNA, 15 bp, Homo sapiens
ggataatactttgtg

SEQ ID NO: 1749614 - DNA, 15 bp, Homo sapiens
gataatactttgtga

SEQ ID NO: 1749615 - DNA, 15 bp, Homo sapiens
ataatactttgtgaa

SEQ ID NO: 1749616 - DNA, 15 bp, Homo sapiens
taatactttgtgaat

SEQ ID NO: 1749617 - DNA, 15 bp, Homo sapiens
aatactttgtgaatc

SEQ ID NO: 1749618 - DNA, 15 bp, Homo sapiens
atactttgtgaatca

SEQ ID NO: 1749619 - DNA, 15 bp, Homo sapiens
tactttgtgaatcat

SEQ ID NO: 1749620 - DNA, 15 bp, Homo sapiens
actttgtgaatcatc

SEQ ID NO: 1749621 - DNA, 15 bp, Homo sapiens
ctttgtgaatcatca

SEQ ID NO: 1749622 - DNA, 15 bp, Homo sapiens
tttgtgaatcatcag

SEQ ID NO: 1749623 - DNA, 15 bp, Homo sapiens
ttgtgaatcatcagt

SEQ ID NO: 1749624 - DNA, 15 bp, Homo sapiens
tgtgaatcatcagtt

SEQ ID NO: 1749625 - DNA, 15 bp, Homo sapiens
gtgaatcatcagttt

SEQ ID NO: 1749626 - DNA, 15 bp, Homo sapiens
tgaatcatcagtttt

SEQ ID NO: 1749627 - DNA, 15 bp, Homo sapiens
gaatcatcagttttg

SEQ ID NO: 1749628 - DNA, 15 bp, Homo sapiens
aatcatcagttttgt

SEQ ID NO: 1749629 - DNA, 15 bp, Homo sapiens
atcatcagttttgta

SEQ ID NO: 1749630 - DNA, 15 bp, Homo sapiens
tcatcagttttgtaa

SEQ ID NO: 1749631 - DNA, 15 bp, Homo sapiens
catcagttttgtaaa

SEQ ID NO: 1749632 - DNA, 15 bp, Homo sapiens
atcagttttgtaaat

SEQ ID NO: 1749633 - DNA, 15 bp, Homo sapiens
tcagttttgtaaatt

SEQ ID NO: 1749634 - DNA, 15 bp, Homo sapiens
cagttttgtaaatta

SEQ ID NO: 1749635 - DNA, 15 bp, Homo sapiens
agttttgtaaattaa

SEQ ID NO: 1749636 - DNA, 15 bp, Homo sapiens
gttttgtaaattaat

SEQ ID NO: 1749637 - DNA, 15 bp, Homo sapiens
ttttgtaaattaatg

SEQ ID NO: 1749638 - DNA, 15 bp, Homo sapiens
tttgtaaattaatgg

SEQ ID NO: 1749639 - DNA, 15 bp, Homo sapiens
ttgtaaattaatggt

SEQ ID NO: 1749640 - DNA, 15 bp, Homo sapiens
tgtaaattaatggtt

SEQ ID NO: 1749641 - DNA, 15 bp, Homo sapiens
gtaaattaatggttt

SEQ ID NO: 1749642 - DNA, 15 bp, Homo sapiens
taaattaatggtttc

SEQ ID NO: 1749643 - DNA, 15 bp, Homo sapiens
aaattaatggtttct

SEQ ID NO: 1749644 - DNA, 15 bp, Homo sapiens
aattaatggtttctt

SEQ ID NO: 1749645 - DNA, 15 bp, Homo sapiens
attaatggtttcttt

SEQ ID NO: 1749646 - DNA, 15 bp, Homo sapiens
ttaatggtttctttt

SEQ ID NO: 1749647 - DNA, 15 bp, Homo sapiens
taatggtttcttttg

SEQ ID NO: 1749648 - DNA, 15 bp, Homo sapiens
aatggtttcttttga

SEQ ID NO: 1749649 - DNA, 15 bp, Homo sapiens
atggtttcttttgaa

SEQ ID NO: 1749650 - DNA, 15 bp, Homo sapiens
tggtttcttttgaaa

SEQ ID NO: 1749651 - DNA, 15 bp, Homo sapiens
ggtttcttttgaaac

SEQ ID NO: 1749652 - DNA, 15 bp, Homo sapiens
gtttcttttgaaact

SEQ ID NO: 1749653 - DNA, 15 bp, Homo sapiens
tttcttttgaaactg

SEQ ID NO: 1749654 - DNA, 15 bp, Homo sapiens
ttcttttgaaactgt

SEQ ID NO: 1749655 - DNA, 15 bp, Homo sapiens
tcttttgaaactgtg

SEQ ID NO: 1749656 - DNA, 15 bp, Homo sapiens
cttttgaaactgtgt

SEQ ID NO: 1749657 - DNA, 15 bp, Homo sapiens
ttttgaaactgtgtt

SEQ ID NO: 1749658 - DNA, 15 bp, Homo sapiens
tttgaaactgtgttg

SEQ ID NO: 1749659 - DNA, 15 bp, Homo sapiens
ttgaaactgtgttgc

SEQ ID NO: 1749660 - DNA, 15 bp, Homo sapiens
tgaaactgtgttgca

SEQ ID NO: 1749661 - DNA, 15 bp, Homo sapiens
gaaactgtgttgcat

SEQ ID NO: 1749662 - DNA, 15 bp, Homo sapiens
aaactgtgttgcatg

SEQ ID NO: 1749663 - DNA, 15 bp, Homo sapiens
aactgtgttgcatgc

SEQ ID NO: 1749664 - DNA, 15 bp, Homo sapiens
actgtgttgcatgct

SEQ ID NO: 1749665 - DNA, 15 bp, Homo sapiens
ctgtgttgcatgcta

SEQ ID NO: 1749666 - DNA, 15 bp, Homo sapiens
tgtgttgcatgctaa

SEQ ID NO: 1749667 - DNA, 15 bp, Homo sapiens
gtgttgcatgctaag

SEQ ID NO: 1749668 - DNA, 15 bp, Homo sapiens
tgttgcatgctaagt

SEQ ID NO: 1749669 - DNA, 15 bp, Homo sapiens
gttgcatgctaagta

SEQ ID NO: 1749670 - DNA, 15 bp, Homo sapiens
ttgcatgctaagtat

SEQ ID NO: 1749671 - DNA, 15 bp, Homo sapiens
tgcatgctaagtata

SEQ ID NO: 1749672 - DNA, 15 bp, Homo sapiens
gcatgctaagtatat

SEQ ID NO: 1749673 - DNA, 15 bp, Homo sapiens
catgctaagtatata

SEQ ID NO: 1749674 - DNA, 15 bp, Homo sapiens
atgctaagtatatat

SEQ ID NO: 1749675 - DNA, 15 bp, Homo sapiens
tgctaagtatatatc

SEQ ID NO: 1749676 - DNA, 15 bp, Homo sapiens
gctaagtatatatct

SEQ ID NO: 1749677 - DNA, 15 bp, Homo sapiens
ctaagtatatatctt

SEQ ID NO: 1749678 - DNA, 15 bp, Homo sapiens
taagtatatatcttt

SEQ ID NO: 1749679 - DNA, 15 bp, Homo sapiens
aagtatatatctttt

SEQ ID NO: 1749680 - DNA, 15 bp, Homo sapiens
agtatatatctttta

SEQ ID NO: 1749681 - DNA, 15 bp, Homo sapiens
gtatatatcttttaa

SEQ ID NO: 1749682 - DNA, 15 bp, Homo sapiens
tatatatcttttaat

SEQ ID NO: 1749683 - DNA, 15 bp, Homo sapiens
atatatcttttaatt

SEQ ID NO: 1749684 - DNA, 15 bp, Homo sapiens
tatatcttttaattt

SEQ ID NO: 1749685 - DNA, 15 bp, Homo sapiens
atatcttttaatttg

SEQ ID NO: 1749686 - DNA, 15 bp, Homo sapiens
tatcttttaatttgt

SEQ ID NO: 1749687 - DNA, 15 bp, Homo sapiens
atcttttaatttgta

SEQ ID NO: 1749688 - DNA, 15 bp, Homo sapiens
tcttttaatttgtat

SEQ ID NO: 1749689 - DNA, 15 bp, Homo sapiens
cttttaatttgtatc

SEQ ID NO: 1749690 - DNA, 15 bp, Homo sapiens
ttttaatttgtatca

SEQ ID NO: 1749691 - DNA, 15 bp, Homo sapiens
tttaatttgtatcag

SEQ ID NO: 1749692 - DNA, 15 bp, Homo sapiens
ttaatttgtatcagt

SEQ ID NO: 1749693 - DNA, 15 bp, Homo sapiens
taatttgtatcagta

SEQ ID NO: 1749694 - DNA, 15 bp, Homo sapiens
aatttgtatcagtat

SEQ ID NO: 1749695 - DNA, 15 bp, Homo sapiens
atttgtatcagtata

SEQ ID NO: 1749696 - DNA, 15 bp, Homo sapiens
tttgtatcagtatat

SEQ ID NO: 1749697 - DNA, 15 bp, Homo sapiens
ttgtatcagtatata

SEQ ID NO: 1749698 - DNA, 15 bp, Homo sapiens
tgtatcagtatatag

SEQ ID NO: 1749699 - DNA, 15 bp, Homo sapiens
gtatcagtatataga

SEQ ID NO: 1749700 - DNA, 15 bp, Homo sapiens
tatcagtatatagaa

SEQ ID NO: 1749701 - DNA, 15 bp, Homo sapiens
atcagtatatagaag

SEQ ID NO: 1749702 - DNA, 15 bp, Homo sapiens
tcagtatatagaagt

SEQ ID NO: 1749703 - DNA, 15 bp, Homo sapiens
cagtatatagaagtg

SEQ ID NO: 1749704 - DNA, 15 bp, Homo sapiens
agtatatagaagtgg

SEQ ID NO: 1749705 - DNA, 15 bp, Homo sapiens
gtatatagaagtggt

SEQ ID NO: 1749706 - DNA, 15 bp, Homo sapiens
tatatagaagtggta

SEQ ID NO: 1749707 - DNA, 15 bp, Homo sapiens
atatagaagtggtaa

SEQ ID NO: 1749708 - DNA, 15 bp, Homo sapiens
tatagaagtggtaat

SEQ ID NO: 1749709 - DNA, 15 bp, Homo sapiens
atagaagtggtaatt

SEQ ID NO: 1749710 - DNA, 15 bp, Homo sapiens
tagaagtggtaatta

SEQ ID NO: 1749711 - DNA, 15 bp, Homo sapiens
agaagtggtaattaa

SEQ ID NO: 1749712 - DNA, 15 bp, Homo sapiens
gaagtggtaattaaa

SEQ ID NO: 1749713 - DNA, 15 bp, Homo sapiens
aagtggtaattaaaa

SEQ ID NO: 1749714 - DNA, 15 bp, Homo sapiens
agtggtaattaaaaa

SEQ ID NO: 1749715 - DNA, 15 bp, Homo sapiens
gtggtaattaaaaaa

SEQ ID NO: 1749716 - DNA, 15 bp, Homo sapiens
tggtaattaaaaaat

SEQ ID NO: 1749717 - DNA, 15 bp, Homo sapiens
ggtaattaaaaaatt

SEQ ID NO: 1749718 - DNA, 15 bp, Homo sapiens
gtaattaaaaaatta

SEQ ID NO: 1749719 - DNA, 15 bp, Homo sapiens
taattaaaaaattaa

SEQ ID NO: 1749720 - DNA, 15 bp, Homo sapiens
aattaaaaaattaag

SEQ ID NO: 1749721 - DNA, 15 bp, Homo sapiens
attaaaaaattaaga

SEQ ID NO: 1749722 - DNA, 15 bp, Homo sapiens
ttaaaaaattaagac

SEQ ID NO: 1749723 - DNA, 15 bp, Homo sapiens
taaaaaattaagact

SEQ ID NO: 1749724 - DNA, 15 bp, Homo sapiens
aaaaaattaagactt

SEQ ID NO: 1749725 - DNA, 15 bp, Homo sapiens
aaaaattaagacttt

SEQ ID NO: 1749726 - DNA, 15 bp, Homo sapiens
aaaattaagacttta

SEQ ID NO: 1749727 - DNA, 15 bp, Homo sapiens
aaattaagactttag

SEQ ID NO: 1749728 - DNA, 15 bp, Homo sapiens
aattaagactttagg

SEQ ID NO: 1749729 - DNA, 15 bp, Homo sapiens
attaagactttaggt

SEQ ID NO: 1749730 - DNA, 15 bp, Homo sapiens
ttaagactttaggta

SEQ ID NO: 1749731 - DNA, 15 bp, Homo sapiens
taagactttaggtat

SEQ ID NO: 1749732 - DNA, 15 bp, Homo sapiens
aagactttaggtatg

SEQ ID NO: 1749733 - DNA, 15 bp, Homo sapiens
agactttaggtatgc

SEQ ID NO: 1749734 - DNA, 15 bp, Homo sapiens
gactttaggtatgcc

SEQ ID NO: 1749735 - DNA, 15 bp, Homo sapiens
actttaggtatgcca

SEQ ID NO: 1749736 - DNA, 15 bp, Homo sapiens
ctttaggtatgccat

SEQ ID NO: 1749737 - DNA, 15 bp, Homo sapiens
tttaggtatgccata

SEQ ID NO: 1749738 - DNA, 15 bp, Homo sapiens
ttaggtatgccataa

SEQ ID NO: 1749739 - DNA, 15 bp, Homo sapiens
taggtatgccataat

SEQ ID NO: 1749740 - DNA, 15 bp, Homo sapiens
aggtatgccataatc

SEQ ID NO: 1749741 - DNA, 15 bp, Homo sapiens
ggtatgccataatcc

SEQ ID NO: 1749742 - DNA, 15 bp, Homo sapiens
gtatgccataatcct

SEQ ID NO: 1749743 - DNA, 15 bp, Homo sapiens
tatgccataatccta

SEQ ID NO: 1749744 - DNA, 15 bp, Homo sapiens
atgccataatcctaa

SEQ ID NO: 1749745 - DNA, 15 bp, Homo sapiens
tgccataatcctaat

SEQ ID NO: 1749746 - DNA, 15 bp, Homo sapiens
gccataatcctaatt

SEQ ID NO: 1749747 - DNA, 15 bp, Homo sapiens
ccataatcctaattt

SEQ ID NO: 1749748 - DNA, 15 bp, Homo sapiens
cataatcctaatttg

SEQ ID NO: 1749749 - DNA, 15 bp, Homo sapiens
ataatcctaatttgc

SEQ ID NO: 1749750 - DNA, 15 bp, Homo sapiens
taatcctaatttgca

SEQ ID NO: 1749751 - DNA, 15 bp, Homo sapiens
aatcctaatttgcac

SEQ ID NO: 1749752 - DNA, 15 bp, Homo sapiens
atcctaatttgcaca

SEQ ID NO: 1749753 - DNA, 15 bp, Homo sapiens
tcctaatttgcacat

SEQ ID NO: 1749754 - DNA, 15 bp, Homo sapiens
cctaatttgcacatg

SEQ ID NO: 1749755 - DNA, 15 bp, Homo sapiens
ctaatttgcacatgt

SEQ ID NO: 1749756 - DNA, 15 bp, Homo sapiens
taatttgcacatgta

SEQ ID NO: 1749757 - DNA, 15 bp, Homo sapiens
aatttgcacatgtaa

SEQ ID NO: 1749758 - DNA, 15 bp, Homo sapiens
atttgcacatgtaac

SEQ ID NO: 1749759 - DNA, 15 bp, Homo sapiens
tttgcacatgtaacc

SEQ ID NO: 1749760 - DNA, 15 bp, Homo sapiens
ttgcacatgtaacct

SEQ ID NO: 1749761 - DNA, 15 bp, Homo sapiens
tgcacatgtaacctt

SEQ ID NO: 1749762 - DNA, 15 bp, Homo sapiens
gcacatgtaacctta

SEQ ID NO: 1749763 - DNA, 15 bp, Homo sapiens
cacatgtaaccttag

SEQ ID NO: 1749764 - DNA, 15 bp, Homo sapiens
acatgtaaccttagt

SEQ ID NO: 1749765 - DNA, 15 bp, Homo sapiens
catgtaaccttagtt

SEQ ID NO: 1749766 - DNA, 15 bp, Homo sapiens
atgtaaccttagttt

SEQ ID NO: 1749767 - DNA, 15 bp, Homo sapiens
tgtaaccttagtttt

SEQ ID NO: 1749768 - DNA, 15 bp, Homo sapiens
gtaaccttagtttta

SEQ ID NO: 1749769 - DNA, 15 bp, Homo sapiens
taaccttagttttaa

SEQ ID NO: 1749770 - DNA, 15 bp, Homo sapiens
aaccttagttttaat

SEQ ID NO: 1749771 - DNA, 15 bp, Homo sapiens
accttagttttaatt

SEQ ID NO: 1749772 - DNA, 15 bp, Homo sapiens
ccttagttttaattt

SEQ ID NO: 1749773 - DNA, 15 bp, Homo sapiens
cttagttttaatttc

SEQ ID NO: 1749774 - DNA, 15 bp, Homo sapiens
ttagttttaatttcc

SEQ ID NO: 1749775 - DNA, 15 bp, Homo sapiens
tagttttaatttcct

SEQ ID NO: 1749776 - DNA, 15 bp, Homo sapiens
agttttaatttcctt

SEQ ID NO: 1749777 - DNA, 15 bp, Homo sapiens
gttttaatttcctta

SEQ ID NO: 1749778 - DNA, 15 bp, Homo sapiens
ttttaatttccttac

SEQ ID NO: 1749779 - DNA, 15 bp, Homo sapiens
tttaatttccttacg

SEQ ID NO: 1749780 - DNA, 15 bp, Homo sapiens
ttaatttccttacgt

SEQ ID NO: 1749781 - DNA, 15 bp, Homo sapiens
taatttccttacgtt

SEQ ID NO: 1749782 - DNA, 15 bp, Homo sapiens
aatttccttacgttt

SEQ ID NO: 1749783 - DNA, 15 bp, Homo sapiens
atttccttacgtttt

SEQ ID NO: 1749784 - DNA, 15 bp, Homo sapiens
tttccttacgttttg

SEQ ID NO: 1749785 - DNA, 15 bp, Homo sapiens
ttccttacgttttga

SEQ ID NO: 1749786 - DNA, 15 bp, Homo sapiens
tccttacgttttgaa

SEQ ID NO: 1749787 - DNA, 15 bp, Homo sapiens
ccttacgttttgaat

SEQ ID NO: 1749788 - DNA, 15 bp, Homo sapiens
cttacgttttgaatt

SEQ ID NO: 1749789 - DNA, 15 bp, Homo sapiens
ttacgttttgaattt

SEQ ID NO: 1749790 - DNA, 15 bp, Homo sapiens
tacgttttgaatttt

SEQ ID NO: 1749791 - DNA, 15 bp, Homo sapiens
acgttttgaattttt

SEQ ID NO: 1749792 - DNA, 15 bp, Homo sapiens
cgttttgaattttta

SEQ ID NO: 1749793 - DNA, 15 bp, Homo sapiens
gttttgaatttttaa

SEQ ID NO: 1749794 - DNA, 15 bp, Homo sapiens
ttttgaatttttaat

SEQ ID NO: 1749795 - DNA, 15 bp, Homo sapiens
tttgaatttttaatg

SEQ ID NO: 1749796 - DNA, 15 bp, Homo sapiens
ttgaatttttaatga

SEQ ID NO: 1749797 - DNA, 15 bp, Homo sapiens
tgaatttttaatgac

SEQ ID NO: 1749798 - DNA, 15 bp, Homo sapiens
gaatttttaatgact

SEQ ID NO: 1749799 - DNA, 15 bp, Homo sapiens
aatttttaatgacta

SEQ ID NO: 1749800 - DNA, 15 bp, Homo sapiens
atttttaatgactaa

SEQ ID NO: 1749801 - DNA, 15 bp, Homo sapiens
tttttaatgactaag

SEQ ID NO: 1749802 - DNA, 15 bp, Homo sapiens
ttttaatgactaagc

SEQ ID NO: 1749803 - DNA, 15 bp, Homo sapiens
tttaatgactaagcg

SEQ ID NO: 1749804 - DNA, 15 bp, Homo sapiens
ttaatgactaagcga

SEQ ID NO: 1749805 - DNA, 15 bp, Homo sapiens
taatgactaagcgat

SEQ ID NO: 1749806 - DNA, 15 bp, Homo sapiens
aatgactaagcgata

SEQ ID NO: 1749807 - DNA, 15 bp, Homo sapiens
atgactaagcgataa

SEQ ID NO: 1749808 - DNA, 15 bp, Homo sapiens
tgactaagcgataat

SEQ ID NO: 1749809 - DNA, 15 bp, Homo sapiens
gactaagcgataatt

SEQ ID NO: 1749810 - DNA, 15 bp, Homo sapiens
actaagcgataattt

SEQ ID NO: 1749811 - DNA, 15 bp, Homo sapiens
ctaagcgataattta

SEQ ID NO: 1749812 - DNA, 15 bp, Homo sapiens
taagcgataatttat

SEQ ID NO: 1749813 - DNA, 15 bp, Homo sapiens
aagcgataatttatt

SEQ ID NO: 1749814 - DNA, 15 bp, Homo sapiens
agcgataatttattt

SEQ ID NO: 1749815 - DNA, 15 bp, Homo sapiens
gcgataatttatttc

SEQ ID NO: 1749816 - DNA, 15 bp, Homo sapiens
cgataatttatttct

SEQ ID NO: 1749817 - DNA, 15 bp, Homo sapiens
gataatttatttctt

SEQ ID NO: 1749818 - DNA, 15 bp, Homo sapiens
ataatttatttctta

SEQ ID NO: 1749819 - DNA, 15 bp, Homo sapiens
taatttatttcttag

SEQ ID NO: 1749820 - DNA, 15 bp, Homo sapiens
aatttatttcttagt

SEQ ID NO: 1749821 - DNA, 15 bp, Homo sapiens
atttatttcttagtg

SEQ ID NO: 1749822 - DNA, 15 bp, Homo sapiens
tttatttcttagtgt

SEQ ID NO: 1749823 - DNA, 15 bp, Homo sapiens
ttatttcttagtgtt

SEQ ID NO: 1749824 - DNA, 15 bp, Homo sapiens
tatttcttagtgttt

SEQ ID NO: 1749825 - DNA, 15 bp, Homo sapiens
atttcttagtgtttt

SEQ ID NO: 1749826 - DNA, 15 bp, Homo sapiens
tttcttagtgttttc

SEQ ID NO: 1749827 - DNA, 15 bp, Homo sapiens
ttcttagtgttttct

SEQ ID NO: 1749828 - DNA, 15 bp, Homo sapiens
tcttagtgttttctt

SEQ ID NO: 1749829 - DNA, 15 bp, Homo sapiens
cttagtgttttcttg

SEQ ID NO: 1749830 - DNA, 15 bp, Homo sapiens
ttagtgttttcttgt

SEQ ID NO: 1749831 - DNA, 15 bp, Homo sapiens
tagtgttttcttgta

SEQ ID NO: 1749832 - DNA, 15 bp, Homo sapiens
agtgttttcttgtat

SEQ ID NO: 1749833 - DNA, 15 bp, Homo sapiens
gtgttttcttgtatt

SEQ ID NO: 1749834 - DNA, 15 bp, Homo sapiens
tgttttcttgtattg

SEQ ID NO: 1749835 - DNA, 15 bp, Homo sapiens
gttttcttgtattgc

SEQ ID NO: 1749836 - DNA, 15 bp, Homo sapiens
ttttcttgtattgcc

SEQ ID NO: 1749837 - DNA, 15 bp, Homo sapiens
tttcttgtattgcca

SEQ ID NO: 1749838 - DNA, 15 bp, Homo sapiens
ttcttgtattgccat

SEQ ID NO: 1749839 - DNA, 15 bp, Homo sapiens
tcttgtattgccata

SEQ ID NO: 1749840 - DNA, 15 bp, Homo sapiens
cttgtattgccatat

SEQ ID NO: 1749841 - DNA, 15 bp, Homo sapiens
ttgtattgccatata

SEQ ID NO: 1749842 - DNA, 15 bp, Homo sapiens
tgtattgccatatag

SEQ ID NO: 1749843 - DNA, 15 bp, Homo sapiens
gtattgccatataga

SEQ ID NO: 1749844 - DNA, 15 bp, Homo sapiens
tattgccatatagac

SEQ ID NO: 1749845 - DNA, 15 bp, Homo sapiens
attgccatatagaca

SEQ ID NO: 1749846 - DNA, 15 bp, Homo sapiens
ttgccatatagacag

SEQ ID NO: 1749847 - DNA, 15 bp, Homo sapiens
tgccatatagacaga

SEQ ID NO: 1749848 - DNA, 15 bp, Homo sapiens
gccatatagacagag

SEQ ID NO: 1749849 - DNA, 15 bp, Homo sapiens
ccatatagacagagt

SEQ ID NO: 1749850 - DNA, 15 bp, Homo sapiens
catatagacagagtg

SEQ ID NO: 1749851 - DNA, 15 bp, Homo sapiens
atatagacagagtga

SEQ ID NO: 1749852 - DNA, 15 bp, Homo sapiens
tatagacagagtgaa

SEQ ID NO: 1749853 - DNA, 15 bp, Homo sapiens
atagacagagtgaat

SEQ ID NO: 1749854 - DNA, 15 bp, Homo sapiens
tagacagagtgaata

SEQ ID NO: 1749855 - DNA, 15 bp, Homo sapiens
agacagagtgaatag

SEQ ID NO: 1749856 - DNA, 15 bp, Homo sapiens
gacagagtgaataga

SEQ ID NO: 1749857 - DNA, 15 bp, Homo sapiens
acagagtgaatagag

SEQ ID NO: 1749858 - DNA, 15 bp, Homo sapiens
cagagtgaatagagg

SEQ ID NO: 1749859 - DNA, 15 bp, Homo sapiens
agagtgaatagagga

SEQ ID NO: 1749860 - DNA, 15 bp, Homo sapiens
gagtgaatagaggag

SEQ ID NO: 1749861 - DNA, 15 bp, Homo sapiens
agtgaatagaggaga

SEQ ID NO: 1749862 - DNA, 15 bp, Homo sapiens
gtgaatagaggagag

SEQ ID NO: 1749863 - DNA, 15 bp, Homo sapiens
tgaatagaggagaga

SEQ ID NO: 1749864 - DNA, 15 bp, Homo sapiens
gaatagaggagagaa

SEQ ID NO: 1749865 - DNA, 15 bp, Homo sapiens
aatagaggagagaaa

SEQ ID NO: 1749866 - DNA, 15 bp, Homo sapiens
atagaggagagaaac

SEQ ID NO: 1749867 - DNA, 15 bp, Homo sapiens
tagaggagagaaaca

SEQ ID NO: 1749868 - DNA, 15 bp, Homo sapiens
agaggagagaaacat

SEQ ID NO: 1749869 - DNA, 15 bp, Homo sapiens
gaggagagaaacatg

SEQ ID NO: 1749870 - DNA, 15 bp, Homo sapiens
aggagagaaacatgg

SEQ ID NO: 1749871 - DNA, 15 bp, Homo sapiens
ggagagaaacatggg

SEQ ID NO: 1749872 - DNA, 15 bp, Homo sapiens
gagagaaacatggga

SEQ ID NO: 1749873 - DNA, 15 bp, Homo sapiens
agagaaacatgggaa

SEQ ID NO: 1749874 - DNA, 15 bp, Homo sapiens
gagaaacatgggaaa

SEQ ID NO: 1749875 - DNA, 15 bp, Homo sapiens
agaaacatgggaaat

SEQ ID NO: 1749876 - DNA, 15 bp, Homo sapiens
gaaacatgggaaatt

SEQ ID NO: 1749877 - DNA, 15 bp, Homo sapiens
aaacatgggaaattg

SEQ ID NO: 1749878 - DNA, 15 bp, Homo sapiens
aacatgggaaattga

SEQ ID NO: 1749879 - DNA, 15 bp, Homo sapiens
acatgggaaattgat

SEQ ID NO: 1749880 - DNA, 15 bp, Homo sapiens
catgggaaattgata

SEQ ID NO: 1749881 - DNA, 15 bp, Homo sapiens
atgggaaattgatag

SEQ ID NO: 1749882 - DNA, 15 bp, Homo sapiens
tgggaaattgataga

SEQ ID NO: 1749883 - DNA, 15 bp, Homo sapiens
gggaaattgatagaa

SEQ ID NO: 1749884 - DNA, 15 bp, Homo sapiens
ggaaattgatagaag

SEQ ID NO: 1749885 - DNA, 15 bp, Homo sapiens
gaaattgatagaaga

SEQ ID NO: 1749886 - DNA, 15 bp, Homo sapiens
aaattgatagaagaa

SEQ ID NO: 1749887 - DNA, 15 bp, Homo sapiens
aattgatagaagaat

SEQ ID NO: 1749888 - DNA, 15 bp, Homo sapiens
attgatagaagaatg

SEQ ID NO: 1749889 - DNA, 15 bp, Homo sapiens
ttgatagaagaatgt

SEQ ID NO: 1749890 - DNA, 15 bp, Homo sapiens
tgatagaagaatgtt

SEQ ID NO: 1749891 - DNA, 15 bp, Homo sapiens
gatagaagaatgtta

SEQ ID NO: 1749892 - DNA, 15 bp, Homo sapiens
atagaagaatgttac

SEQ ID NO: 1749893 - DNA, 15 bp, Homo sapiens
tagaagaatgttaca

SEQ ID NO: 1749894 - DNA, 15 bp, Homo sapiens
agaagaatgttacac

SEQ ID NO: 1749895 - DNA, 15 bp, Homo sapiens
gaagaatgttacact

SEQ ID NO: 1749896 - DNA, 15 bp, Homo sapiens
aagaatgttacactc

SEQ ID NO: 1749897 - DNA, 15 bp, Homo sapiens
agaatgttacactcc

SEQ ID NO: 1749898 - DNA, 15 bp, Homo sapiens
gaatgttacactcct

SEQ ID NO: 1749899 - DNA, 15 bp, Homo sapiens
aatgttacactccta

SEQ ID NO: 1749900 - DNA, 15 bp, Homo sapiens
atgttacactcctat

SEQ ID NO: 1749901 - DNA, 15 bp, Homo sapiens
tgttacactcctatt

SEQ ID NO: 1749902 - DNA, 15 bp, Homo sapiens
gttacactcctatta

SEQ ID NO: 1749903 - DNA, 15 bp, Homo sapiens
ttacactcctattat

SEQ ID NO: 1749904 - DNA, 15 bp, Homo sapiens
tacactcctattatt

SEQ ID NO: 1749905 - DNA, 15 bp, Homo sapiens
acactcctattattg

SEQ ID NO: 1749906 - DNA, 15 bp, Homo sapiens
cactcctattattga

SEQ ID NO: 1749907 - DNA, 15 bp, Homo sapiens
actcctattattgaa

SEQ ID NO: 1749908 - DNA, 15 bp, Homo sapiens
ctcctattattgaat

SEQ ID NO: 1749909 - DNA, 15 bp, Homo sapiens
tcctattattgaatt

SEQ ID NO: 1749910 - DNA, 15 bp, Homo sapiens
cctattattgaattt

SEQ ID NO: 1749911 - DNA, 15 bp, Homo sapiens
ctattattgaatttc

SEQ ID NO: 1749912 - DNA, 15 bp, Homo sapiens
tattattgaatttca

SEQ ID NO: 1749913 - DNA, 15 bp, Homo sapiens
attattgaatttcat

SEQ ID NO: 1749914 - DNA, 15 bp, Homo sapiens
ttattgaatttcata

SEQ ID NO: 1749915 - DNA, 15 bp, Homo sapiens
tattgaatttcataa

SEQ ID NO: 1749916 - DNA, 15 bp, Homo sapiens
attgaatttcataac

SEQ ID NO: 1749917 - DNA, 15 bp, Homo sapiens
ttgaatttcataact

SEQ ID NO: 1749918 - DNA, 15 bp, Homo sapiens
tgaatttcataacta

SEQ ID NO: 1749919 - DNA, 15 bp, Homo sapiens
gaatttcataactac

SEQ ID NO: 1749920 - DNA, 15 bp, Homo sapiens
aatttcataactact

SEQ ID NO: 1749921 - DNA, 15 bp, Homo sapiens
atttcataactactt

SEQ ID NO: 1749922 - DNA, 15 bp, Homo sapiens
tttcataactactta

SEQ ID NO: 1749923 - DNA, 15 bp, Homo sapiens
ttcataactacttat

SEQ ID NO: 1749924 - DNA, 15 bp, Homo sapiens
tcataactacttatg

SEQ ID NO: 1749925 - DNA, 15 bp, Homo sapiens
cataactacttatgg

SEQ ID NO: 1749926 - DNA, 15 bp, Homo sapiens
ataactacttatgga

SEQ ID NO: 1749927 - DNA, 15 bp, Homo sapiens
taactacttatggaa

SEQ ID NO: 1749928 - DNA, 15 bp, Homo sapiens
aactacttatggaat

SEQ ID NO: 1749929 - DNA, 15 bp, Homo sapiens
actacttatggaatg

SEQ ID NO: 1749930 - DNA, 15 bp, Homo sapiens
ctacttatggaatga

SEQ ID NO: 1749931 - DNA, 15 bp, Homo sapiens
tacttatggaatgaa

SEQ ID NO: 1749932 - DNA, 15 bp, Homo sapiens
acttatggaatgaat

SEQ ID NO: 1749933 - DNA, 15 bp, Homo sapiens
cttatggaatgaatt

SEQ ID NO: 1749934 - DNA, 15 bp, Homo sapiens
ttatggaatgaattt

SEQ ID NO: 1749935 - DNA, 15 bp, Homo sapiens
tatggaatgaattta

SEQ ID NO: 1749936 - DNA, 15 bp, Homo sapiens
atggaatgaatttac

SEQ ID NO: 1749937 - DNA, 15 bp, Homo sapiens
tggaatgaatttaca

SEQ ID NO: 1749938 - DNA, 15 bp, Homo sapiens
ggaatgaatttacac

SEQ ID NO: 1749939 - DNA, 15 bp, Homo sapiens
gaatgaatttacact

SEQ ID NO: 1749940 - DNA, 15 bp, Homo sapiens
aatgaatttacactt

SEQ ID NO: 1749941 - DNA, 15 bp, Homo sapiens
atgaatttacacttg

SEQ ID NO: 1749942 - DNA, 15 bp, Homo sapiens
tgaatttacacttga

SEQ ID NO: 1749943 - DNA, 15 bp, Homo sapiens
gaatttacacttgat

SEQ ID NO: 1749944 - DNA, 15 bp, Homo sapiens
aatttacacttgata

SEQ ID NO: 1749945 - DNA, 15 bp, Homo sapiens
atttacacttgataa

SEQ ID NO: 1749946 - DNA, 15 bp, Homo sapiens
tttacacttgataag

SEQ ID NO: 1749947 - DNA, 15 bp, Homo sapiens
ttacacttgataagg

SEQ ID NO: 1749948 - DNA, 15 bp, Homo sapiens
tacacttgataagga

SEQ ID NO: 1749949 - DNA, 15 bp, Homo sapiens
acacttgataaggag

SEQ ID NO: 1749950 - DNA, 15 bp, Homo sapiens
cacttgataaggagt

SEQ ID NO: 1749951 - DNA, 15 bp, Homo sapiens
acttgataaggagta

SEQ ID NO: 1749952 - DNA, 15 bp, Homo sapiens
cttgataaggagtac

SEQ ID NO: 1749953 - DNA, 15 bp, Homo sapiens
ttgataaggagtact

SEQ ID NO: 1749954 - DNA, 15 bp, Homo sapiens
tgataaggagtactt

SEQ ID NO: 1749955 - DNA, 15 bp, Homo sapiens
gataaggagtactta

SEQ ID NO: 1749956 - DNA, 15 bp, Homo sapiens
ataaggagtacttag

SEQ ID NO: 1749957 - DNA, 15 bp, Homo sapiens
taaggagtacttaga

SEQ ID NO: 1749958 - DNA, 15 bp, Homo sapiens
aaggagtacttagaa

SEQ ID NO: 1749959 - DNA, 15 bp, Homo sapiens
aggagtacttagaag

SEQ ID NO: 1749960 - DNA, 15 bp, Homo sapiens
ggagtacttagaaga

SEQ ID NO: 1749961 - DNA, 15 bp, Homo sapiens
gagtacttagaagaa

SEQ ID NO: 1749962 - DNA, 15 bp, Homo sapiens
agtacttagaagaaa

SEQ ID NO: 1749963 - DNA, 15 bp, Homo sapiens
gtacttagaagaaaa

SEQ ID NO: 1749964 - DNA, 15 bp, Homo sapiens
tacttagaagaaaac

SEQ ID NO: 1749965 - DNA, 15 bp, Homo sapiens
acttagaagaaaact

SEQ ID NO: 1749966 - DNA, 15 bp, Homo sapiens
cttagaagaaaactt

SEQ ID NO: 1749967 - DNA, 15 bp, Homo sapiens
ttagaagaaaacttt

SEQ ID NO: 1749968 - DNA, 15 bp, Homo sapiens
tagaagaaaactttc

SEQ ID NO: 1749969 - DNA, 15 bp, Homo sapiens
agaagaaaactttct

SEQ ID NO: 1749970 - DNA, 15 bp, Homo sapiens
gaagaaaactttctg

SEQ ID NO: 1749971 - DNA, 15 bp, Homo sapiens
aagaaaactttctga

SEQ ID NO: 1749972 - DNA, 15 bp, Homo sapiens
agaaaactttctgaa

SEQ ID NO: 1749973 - DNA, 15 bp, Homo sapiens
gaaaactttctgaat

SEQ ID NO: 1749974 - DNA, 15 bp, Homo sapiens
aaaactttctgaatc

SEQ ID NO: 1749975 - DNA, 15 bp, Homo sapiens
aaactttctgaatct

SEQ ID NO: 1749976 - DNA, 15 bp, Homo sapiens
aactttctgaatctg

SEQ ID NO: 1749977 - DNA, 15 bp, Homo sapiens
actttctgaatctgg

SEQ ID NO: 1749978 - DNA, 15 bp, Homo sapiens
ctttctgaatctggg

SEQ ID NO: 1749979 - DNA, 15 bp, Homo sapiens
tttctgaatctgggt

SEQ ID NO: 1749980 - DNA, 15 bp, Homo sapiens
ttctgaatctgggta

SEQ ID NO: 1749981 - DNA, 15 bp, Homo sapiens
tctgaatctgggtaa

SEQ ID NO: 1749982 - DNA, 15 bp, Homo sapiens
ctgaatctgggtaat

SEQ ID NO: 1749983 - DNA, 15 bp, Homo sapiens
tgaatctgggtaatt

SEQ ID NO: 1749984 - DNA, 15 bp, Homo sapiens
gaatctgggtaatta

SEQ ID NO: 1749985 - DNA, 15 bp, Homo sapiens
aatctgggtaattaa

SEQ ID NO: 1749986 - DNA, 15 bp, Homo sapiens
atctgggtaattaag

SEQ ID NO: 1749987 - DNA, 15 bp, Homo sapiens
tctgggtaattaagt

SEQ ID NO: 1749988 - DNA, 15 bp, Homo sapiens
ctgggtaattaagtg

SEQ ID NO: 1749989 - DNA, 15 bp, Homo sapiens
tgggtaattaagtga

SEQ ID NO: 1749990 - DNA, 15 bp, Homo sapiens
gggtaattaagtgaa

SEQ ID NO: 1749991 - DNA, 15 bp, Homo sapiens
ggtaattaagtgaaa

SEQ ID NO: 1749992 - DNA, 15 bp, Homo sapiens
gtaattaagtgaaag

SEQ ID NO: 1749993 - DNA, 15 bp, Homo sapiens
taattaagtgaaagt

SEQ ID NO: 1749994 - DNA, 15 bp, Homo sapiens
aattaagtgaaagta

SEQ ID NO: 1749995 - DNA, 15 bp, Homo sapiens
attaagtgaaagtaa

SEQ ID NO: 1749996 - DNA, 15 bp, Homo sapiens
ttaagtgaaagtaaa

SEQ ID NO: 1749997 - DNA, 15 bp, Homo sapiens
taagtgaaagtaaaa

SEQ ID NO: 1749998 - DNA, 15 bp, Homo sapiens
aagtgaaagtaaaaa

SEQ ID NO: 1749999 - DNA, 15 bp, Homo sapiens
agtgaaagtaaaaat

SEQ ID NO: 1750000 - DNA, 15 bp, Homo sapiens
gtgaaagtaaaaata

SEQ ID NO: 1750001 - DNA, 15 bp, Homo sapiens
tgaaagtaaaaataa

SEQ ID NO: 1750002 - DNA, 15 bp, Homo sapiens
gaaagtaaaaataaa

SEQ ID NO: 1750003 - DNA, 15 bp, Homo sapiens
aaagtaaaaataaat

SEQ ID NO: 1750004 - DNA, 15 bp, Homo sapiens
aagtaaaaataaata

SEQ ID NO: 1750005 - DNA, 15 bp, Homo sapiens
agtaaaaataaatag

SEQ ID NO: 1750006 - DNA, 15 bp, Homo sapiens
gtaaaaataaataga

SEQ ID NO: 1750007 - DNA, 15 bp, Homo sapiens
taaaaataaatagat

SEQ ID NO: 1750008 - DNA, 15 bp, Homo sapiens
aaaaataaatagata

SEQ ID NO: 1750009 - DNA, 15 bp, Homo sapiens
aaaataaatagataa

SEQ ID NO: 1750010 - DNA, 15 bp, Homo sapiens
aaataaatagataag

SEQ ID NO: 1750011 - DNA, 15 bp, Homo sapiens
aataaatagataagt

SEQ ID NO: 1750012 - DNA, 15 bp, Homo sapiens
ataaatagataagta

SEQ ID NO: 1750013 - DNA, 15 bp, Homo sapiens
taaatagataagtaa

SEQ ID NO: 1750014 - DNA, 15 bp, Homo sapiens
aaatagataagtaaa

SEQ ID NO: 1750015 - DNA, 15 bp, Homo sapiens
aatagataagtaaat

SEQ ID NO: 1750016 - DNA, 15 bp, Homo sapiens
atagataagtaaata

SEQ ID NO: 1750017 - DNA, 15 bp, Homo sapiens
tagataagtaaataa

SEQ ID NO: 1750018 - DNA, 15 bp, Homo sapiens
agataagtaaataaa

SEQ ID NO: 1750019 - DNA, 15 bp, Homo sapiens
gataagtaaataaaa

SEQ ID NO: 1750020 - DNA, 15 bp, Homo sapiens
ataagtaaataaaat

SEQ ID NO: 1750021 - DNA, 15 bp, Homo sapiens
taagtaaataaaata

SEQ ID NO: 1750022 - DNA, 15 bp, Homo sapiens
aagtaaataaaataa

SEQ ID NO: 1750023 - DNA, 15 bp, Homo sapiens
agtaaataaaataag

SEQ ID NO: 1750024 - DNA, 15 bp, Homo sapiens
gtaaataaaataagc

SEQ ID NO: 1750025 - DNA, 15 bp, Homo sapiens
taaataaaataagca

SEQ ID NO: 1750026 - DNA, 15 bp, Homo sapiens
aaataaaataagcac

SEQ ID NO: 1750027 - DNA, 15 bp, Homo sapiens
aataaaataagcaca

SEQ ID NO: 1750028 - DNA, 15 bp, Homo sapiens
ataaaataagcacat

SEQ ID NO: 1750029 - DNA, 15 bp, Homo sapiens
taaaataagcacata

SEQ ID NO: 1750030 - DNA, 15 bp, Homo sapiens
aaaataagcacatag

SEQ ID NO: 1750031 - DNA, 15 bp, Homo sapiens
aaataagcacataga

SEQ ID NO: 1750032 - DNA, 15 bp, Homo sapiens
aataagcacatagag

SEQ ID NO: 1750033 - DNA, 15 bp, Homo sapiens
ataagcacatagagt

SEQ ID NO: 1750034 - DNA, 15 bp, Homo sapiens
taagcacatagagta

SEQ ID NO: 1750035 - DNA, 15 bp, Homo sapiens
aagcacatagagtac

SEQ ID NO: 1750036 - DNA, 15 bp, Homo sapiens
agcacatagagtact

SEQ ID NO: 1750037 - DNA, 15 bp, Homo sapiens
gcacatagagtactt

SEQ ID NO: 1750038 - DNA, 15 bp, Homo sapiens
cacatagagtacttt

SEQ ID NO: 1750039 - DNA, 15 bp, Homo sapiens
acatagagtactttt

SEQ ID NO: 1750040 - DNA, 15 bp, Homo sapiens
catagagtacttttt

SEQ ID NO: 1750041 - DNA, 15 bp, Homo sapiens
atagagtacttttta

SEQ ID NO: 1750042 - DNA, 15 bp, Homo sapiens
tagagtactttttaa

SEQ ID NO: 1750043 - DNA, 15 bp, Homo sapiens
agagtactttttaaa

SEQ ID NO: 1750044 - DNA, 15 bp, Homo sapiens
gagtactttttaaag

SEQ ID NO: 1750045 - DNA, 15 bp, Homo sapiens
agtactttttaaagg

SEQ ID NO: 1750046 - DNA, 15 bp, Homo sapiens
gtactttttaaaggc

SEQ ID NO: 1750047 - DNA, 15 bp, Homo sapiens
tactttttaaaggct

SEQ ID NO: 1750048 - DNA, 15 bp, Homo sapiens
actttttaaaggctt

SEQ ID NO: 1750049 - DNA, 15 bp, Homo sapiens
ctttttaaaggctta

SEQ ID NO: 1750050 - DNA, 15 bp, Homo sapiens
tttttaaaggcttat

SEQ ID NO: 1750051 - DNA, 15 bp, Homo sapiens
ttttaaaggcttatg

SEQ ID NO: 1750052 - DNA, 15 bp, Homo sapiens
tttaaaggcttatgt

SEQ ID NO: 1750053 - DNA, 15 bp, Homo sapiens
ttaaaggcttatgtg

SEQ ID NO: 1750054 - DNA, 15 bp, Homo sapiens
taaaggcttatgtgt

SEQ ID NO: 1750055 - DNA, 15 bp, Homo sapiens
aaaggcttatgtgtc

SEQ ID NO: 1750056 - DNA, 15 bp, Homo sapiens
aaggcttatgtgtcc

SEQ ID NO: 1750057 - DNA, 15 bp, Homo sapiens
aggcttatgtgtcct

SEQ ID NO: 1750058 - DNA, 15 bp, Homo sapiens
ggcttatgtgtcctc

SEQ ID NO: 1750059 - DNA, 15 bp, Homo sapiens
gcttatgtgtcctct

SEQ ID NO: 1750060 - DNA, 15 bp, Homo sapiens
cttatgtgtcctctc

SEQ ID NO: 1750061 - DNA, 15 bp, Homo sapiens
ttatgtgtcctctcc

SEQ ID NO: 1750062 - DNA, 15 bp, Homo sapiens
tatgtgtcctctcct

SEQ ID NO: 1750063 - DNA, 15 bp, Homo sapiens
atgtgtcctctcctc

SEQ ID NO: 1750064 - DNA, 15 bp, Homo sapiens
tgtgtcctctcctcc

SEQ ID NO: 1750065 - DNA, 15 bp, Homo sapiens
gtgtcctctcctccc

SEQ ID NO: 1750066 - DNA, 15 bp, Homo sapiens
tgtcctctcctccca

SEQ ID NO: 1750067 - DNA, 15 bp, Homo sapiens
gtcctctcctcccag

SEQ ID NO: 1750068 - DNA, 15 bp, Homo sapiens
tcctctcctcccaga

SEQ ID NO: 1750069 - DNA, 15 bp, Homo sapiens
cctctcctcccagaa

SEQ ID NO: 1750070 - DNA, 15 bp, Homo sapiens
ctctcctcccagaaa

SEQ ID NO: 1750071 - DNA, 15 bp, Homo sapiens
tctcctcccagaaat

SEQ ID NO: 1750072 - DNA, 15 bp, Homo sapiens
ctcctcccagaaatt

SEQ ID NO: 1750073 - DNA, 15 bp, Homo sapiens
tcctcccagaaattg

SEQ ID NO: 1750074 - DNA, 15 bp, Homo sapiens
cctcccagaaattga

SEQ ID NO: 1750075 - DNA, 15 bp, Homo sapiens
ctcccagaaattgat

SEQ ID NO: 1750076 - DNA, 15 bp, Homo sapiens
tcccagaaattgata

SEQ ID NO: 1750077 - DNA, 15 bp, Homo sapiens
cccagaaattgatat

SEQ ID NO: 1750078 - DNA, 15 bp, Homo sapiens
ccagaaattgatatt

SEQ ID NO: 1750079 - DNA, 15 bp, Homo sapiens
cagaaattgatattg

SEQ ID NO: 1750080 - DNA, 15 bp, Homo sapiens
agaaattgatattga

SEQ ID NO: 1750081 - DNA, 15 bp, Homo sapiens
gaaattgatattgag

SEQ ID NO: 1750082 - DNA, 15 bp, Homo sapiens
aaattgatattgaga

SEQ ID NO: 1750083 - DNA, 15 bp, Homo sapiens
aattgatattgagat

SEQ ID NO: 1750084 - DNA, 15 bp, Homo sapiens
attgatattgagata

SEQ ID NO: 1750085 - DNA, 15 bp, Homo sapiens
ttgatattgagatat

SEQ ID NO: 1750086 - DNA, 15 bp, Homo sapiens
tgatattgagatatt

SEQ ID NO: 1750087 - DNA, 15 bp, Homo sapiens
gatattgagatattc

SEQ ID NO: 1750088 - DNA, 15 bp, Homo sapiens
atattgagatattcc

SEQ ID NO: 1750089 - DNA, 15 bp, Homo sapiens
attgagatattcctg

SEQ ID NO: 1750090 - DNA, 15 bp, Homo sapiens
ttgagatattcctgt

SEQ ID NO: 1750091 - DNA, 15 bp, Homo sapiens
tgagatattcctgta

SEQ ID NO: 1750092 - DNA, 15 bp, Homo sapiens
gagatattcctgtat

SEQ ID NO: 1750093 - DNA, 15 bp, Homo sapiens
agatattcctgtatc

SEQ ID NO: 1750094 - DNA, 15 bp, Homo sapiens
gatattcctgtatca

SEQ ID NO: 1750095 - DNA, 15 bp, Homo sapiens
atattcctgtatcat

SEQ ID NO: 1750096 - DNA, 15 bp, Homo sapiens
tattcctgtatcatc

SEQ ID NO: 1750097 - DNA, 15 bp, Homo sapiens
attcctgtatcatct

SEQ ID NO: 1750098 - DNA, 15 bp, Homo sapiens
ttcctgtatcatctg

SEQ ID NO: 1750099 - DNA, 15 bp, Homo sapiens
tcctgtatcatctga

SEQ ID NO: 1750100 - DNA, 15 bp, Homo sapiens
cctgtatcatctgaa

SEQ ID NO: 1750101 - DNA, 15 bp, Homo sapiens
ctgtatcatctgaaa

SEQ ID NO: 1750102 - DNA, 15 bp, Homo sapiens
tgtatcatctgaaag

SEQ ID NO: 1750103 - DNA, 15 bp, Homo sapiens
gtatcatctgaaagt

SEQ ID NO: 1750104 - DNA, 15 bp, Homo sapiens
tatcatctgaaagtg

SEQ ID NO: 1750105 - DNA, 15 bp, Homo sapiens
atcatctgaaagtga

SEQ ID NO: 1750106 - DNA, 15 bp, Homo sapiens
tcatctgaaagtgac

SEQ ID NO: 1750107 - DNA, 15 bp, Homo sapiens
catctgaaagtgact

SEQ ID NO: 1750108 - DNA, 15 bp, Homo sapiens
atctgaaagtgacta

SEQ ID NO: 1750109 - DNA, 15 bp, Homo sapiens
tctgaaagtgactat

SEQ ID NO: 1750110 - DNA, 15 bp, Homo sapiens
ctgaaagtgactatt

SEQ ID NO: 1750111 - DNA, 15 bp, Homo sapiens
tgaaagtgactattg

SEQ ID NO: 1750112 - DNA, 15 bp, Homo sapiens
gaaagtgactattgt

SEQ ID NO: 1750113 - DNA, 15 bp, Homo sapiens
aaagtgactattgtt

SEQ ID NO: 1750114 - DNA, 15 bp, Homo sapiens
aagtgactattgtta

SEQ ID NO: 1750115 - DNA, 15 bp, Homo sapiens
agtgactattgttat

SEQ ID NO: 1750116 - DNA, 15 bp, Homo sapiens
gtgactattgttatt

SEQ ID NO: 1750117 - DNA, 15 bp, Homo sapiens
tgactattgttattt

SEQ ID NO: 1750118 - DNA, 15 bp, Homo sapiens
gactattgttatttc

SEQ ID NO: 1750119 - DNA, 15 bp, Homo sapiens
actattgttatttct

SEQ ID NO: 1750120 - DNA, 15 bp, Homo sapiens
ctattgttatttctt

SEQ ID NO: 1750121 - DNA, 15 bp, Homo sapiens
tattgttatttcttt

SEQ ID NO: 1750122 - DNA, 15 bp, Homo sapiens
attgttatttctttt

SEQ ID NO: 1750123 - DNA, 15 bp, Homo sapiens
ttgttatttctttta

SEQ ID NO: 1750124 - DNA, 15 bp, Homo sapiens
tgttatttcttttag

SEQ ID NO: 1750125 - DNA, 15 bp, Homo sapiens
gttatttcttttaga

SEQ ID NO: 1750126 - DNA, 15 bp, Homo sapiens
ttatttcttttagag

SEQ ID NO: 1750127 - DNA, 15 bp, Homo sapiens
tatttcttttagaga

SEQ ID NO: 1750128 - DNA, 15 bp, Homo sapiens
ttcttttagagaatt

SEQ ID NO: 1750129 - DNA, 15 bp, Homo sapiens
tcttttagagaatta

SEQ ID NO: 1750130 - DNA, 15 bp, Homo sapiens
cttttagagaattaa

SEQ ID NO: 1750131 - DNA, 15 bp, Homo sapiens
ttttagagaattaat

SEQ ID NO: 1750132 - DNA, 15 bp, Homo sapiens
tttagagaattaatt

SEQ ID NO: 1750133 - DNA, 15 bp, Homo sapiens
ttagagaattaattt

SEQ ID NO: 1750134 - DNA, 15 bp, Homo sapiens
tagagaattaatttt

SEQ ID NO: 1750135 - DNA, 15 bp, Homo sapiens
agagaattaatttta

SEQ ID NO: 1750136 - DNA, 15 bp, Homo sapiens
gagaattaattttat

SEQ ID NO: 1750137 - DNA, 15 bp, Homo sapiens
agaattaattttatt

SEQ ID NO: 1750138 - DNA, 15 bp, Homo sapiens
gaattaattttattt

SEQ ID NO: 1750139 - DNA, 15 bp, Homo sapiens
aattaattttatttc

SEQ ID NO: 1750140 - DNA, 15 bp, Homo sapiens
attaattttatttct

SEQ ID NO: 1750141 - DNA, 15 bp, Homo sapiens
ttaattttatttcta

SEQ ID NO: 1750142 - DNA, 15 bp, Homo sapiens
taattttatttctat

SEQ ID NO: 1750143 - DNA, 15 bp, Homo sapiens
aattttatttctatc

SEQ ID NO: 1750144 - DNA, 15 bp, Homo sapiens
attttatttctatca

SEQ ID NO: 1750145 - DNA, 15 bp, Homo sapiens
ttttatttctatcaa

SEQ ID NO: 1750146 - DNA, 15 bp, Homo sapiens
tttatttctatcaac

SEQ ID NO: 1750147 - DNA, 15 bp, Homo sapiens
ttatttctatcaaca

SEQ ID NO: 1750148 - DNA, 15 bp, Homo sapiens
tatttctatcaacac

SEQ ID NO: 1750149 - DNA, 15 bp, Homo sapiens
atttctatcaacaca

SEQ ID NO: 1750150 - DNA, 15 bp, Homo sapiens
tttctatcaacacat

SEQ ID NO: 1750151 - DNA, 15 bp, Homo sapiens
ttctatcaacacata

SEQ ID NO: 1750152 - DNA, 15 bp, Homo sapiens
tctatcaacacatat

SEQ ID NO: 1750153 - DNA, 15 bp, Homo sapiens
ctatcaacacatatt

SEQ ID NO: 1750154 - DNA, 15 bp, Homo sapiens
tatcaacacatattt

SEQ ID NO: 1750155 - DNA, 15 bp, Homo sapiens
atcaacacatattta

SEQ ID NO: 1750156 - DNA, 15 bp, Homo sapiens
tcaacacatatttat

SEQ ID NO: 1750157 - DNA, 15 bp, Homo sapiens
caacacatatttatt

SEQ ID NO: 1750158 - DNA, 15 bp, Homo sapiens
aacacatatttattg

SEQ ID NO: 1750159 - DNA, 15 bp, Homo sapiens
acacatatttattga

SEQ ID NO: 1750160 - DNA, 15 bp, Homo sapiens
cacatatttattgaa

SEQ ID NO: 1750161 - DNA, 15 bp, Homo sapiens
acatatttattgaac

SEQ ID NO: 1750162 - DNA, 15 bp, Homo sapiens
catatttattgaaca

SEQ ID NO: 1750163 - DNA, 15 bp, Homo sapiens
atatttattgaacat

SEQ ID NO: 1750164 - DNA, 15 bp, Homo sapiens
tatttattgaacata

SEQ ID NO: 1750165 - DNA, 15 bp, Homo sapiens
atttattgaacatac

SEQ ID NO: 1750166 - DNA, 15 bp, Homo sapiens
tttattgaacatacg

SEQ ID NO: 1750167 - DNA, 15 bp, Homo sapiens
ttattgaacatacgc

SEQ ID NO: 1750168 - DNA, 15 bp, Homo sapiens
tattgaacatacgcc

SEQ ID NO: 1750169 - DNA, 15 bp, Homo sapiens
attgaacatacgcca

SEQ ID NO: 1750170 - DNA, 15 bp, Homo sapiens
ttgaacatacgccat

SEQ ID NO: 1750171 - DNA, 15 bp, Homo sapiens
tgaacatacgccata

SEQ ID NO: 1750172 - DNA, 15 bp, Homo sapiens
gaacatacgccatat

SEQ ID NO: 1750173 - DNA, 15 bp, Homo sapiens
aacatacgccatatg

SEQ ID NO: 1750174 - DNA, 15 bp, Homo sapiens
acatacgccatatgc

SEQ ID NO: 1750175 - DNA, 15 bp, Homo sapiens
catacgccatatgcc

SEQ ID NO: 1750176 - DNA, 15 bp, Homo sapiens
atacgccatatgcct

SEQ ID NO: 1750177 - DNA, 15 bp, Homo sapiens
tacgccatatgcctt

SEQ ID NO: 1750178 - DNA, 15 bp, Homo sapiens
acgccatatgccttg

SEQ ID NO: 1750179 - DNA, 15 bp, Homo sapiens
cgccatatgccttga

SEQ ID NO: 1750180 - DNA, 15 bp, Homo sapiens
gccatatgccttgaa

SEQ ID NO: 1750181 - DNA, 15 bp, Homo sapiens
ccatatgccttgaat

SEQ ID NO: 1750182 - DNA, 15 bp, Homo sapiens
catatgccttgaatt

SEQ ID NO: 1750183 - DNA, 15 bp, Homo sapiens
atatgccttgaattg

SEQ ID NO: 1750184 - DNA, 15 bp, Homo sapiens
tatgccttgaattga

SEQ ID NO: 1750185 - DNA, 15 bp, Homo sapiens
atgccttgaattgag

SEQ ID NO: 1750186 - DNA, 15 bp, Homo sapiens
tgccttgaattgaga

SEQ ID NO: 1750187 - DNA, 15 bp, Homo sapiens
gccttgaattgagag

SEQ ID NO: 1750188 - DNA, 15 bp, Homo sapiens
ccttgaattgagaga

SEQ ID NO: 1750189 - DNA, 15 bp, Homo sapiens
cttgaattgagagag

SEQ ID NO: 1750190 - DNA, 15 bp, Homo sapiens
ttgaattgagagaga

SEQ ID NO: 1750191 - DNA, 15 bp, Homo sapiens
tgaattgagagagat

SEQ ID NO: 1750192 - DNA, 15 bp, Homo sapiens
gaattgagagagata

SEQ ID NO: 1750193 - DNA, 15 bp, Homo sapiens
aattgagagagatac

SEQ ID NO: 1750194 - DNA, 15 bp, Homo sapiens
attgagagagatact

SEQ ID NO: 1750195 - DNA, 15 bp, Homo sapiens
ttgagagagatactg

SEQ ID NO: 1750196 - DNA, 15 bp, Homo sapiens
tgagagagatactgt

SEQ ID NO: 1750197 - DNA, 15 bp, Homo sapiens
gagagagatactgtg

SEQ ID NO: 1750198 - DNA, 15 bp, Homo sapiens
agagagatactgtga

SEQ ID NO: 1750199 - DNA, 15 bp, Homo sapiens
gagagatactgtgaa

SEQ ID NO: 1750200 - DNA, 15 bp, Homo sapiens
agagatactgtgaag

SEQ ID NO: 1750201 - DNA, 15 bp, Homo sapiens
gagatactgtgaaga

SEQ ID NO: 1750202 - DNA, 15 bp, Homo sapiens
agatactgtgaagat

SEQ ID NO: 1750203 - DNA, 15 bp, Homo sapiens
gatactgtgaagata

SEQ ID NO: 1750204 - DNA, 15 bp, Homo sapiens
atactgtgaagatac

SEQ ID NO: 1750205 - DNA, 15 bp, Homo sapiens
tactgtgaagataca

SEQ ID NO: 1750206 - DNA, 15 bp, Homo sapiens
actgtgaagatacaa

SEQ ID NO: 1750207 - DNA, 15 bp, Homo sapiens
ctgtgaagatacaaa

SEQ ID NO: 1750208 - DNA, 15 bp, Homo sapiens
tgtgaagatacaaaa

SEQ ID NO: 1750209 - DNA, 15 bp, Homo sapiens
gtgaagatacaaaaa

SEQ ID NO: 1750210 - DNA, 15 bp, Homo sapiens
tgaagatacaaaaaa

SEQ ID NO: 1750211 - DNA, 15 bp, Homo sapiens
gaagatacaaaaaag

SEQ ID NO: 1750212 - DNA, 15 bp, Homo sapiens
aagatacaaaaaaga

SEQ ID NO: 1750213 - DNA, 15 bp, Homo sapiens
agatacaaaaaagat

SEQ ID NO: 1750214 - DNA, 15 bp, Homo sapiens
gatacaaaaaagata

SEQ ID NO: 1750215 - DNA, 15 bp, Homo sapiens
atacaaaaaagataa

SEQ ID NO: 1750216 - DNA, 15 bp, Homo sapiens
tacaaaaaagataaa

SEQ ID NO: 1750217 - DNA, 15 bp, Homo sapiens
acaaaaaagataaag

SEQ ID NO: 1750218 - DNA, 15 bp, Homo sapiens
caaaaaagataaagg

SEQ ID NO: 1750219 - DNA, 15 bp, Homo sapiens
aaaaaagataaaggc

SEQ ID NO: 1750220 - DNA, 15 bp, Homo sapiens
aaaaagataaaggct

SEQ ID NO: 1750221 - DNA, 15 bp, Homo sapiens
aaaagataaaggctt

SEQ ID NO: 1750222 - DNA, 15 bp, Homo sapiens
aaagataaaggcttg

SEQ ID NO: 1750223 - DNA, 15 bp, Homo sapiens
aagataaaggcttgg

SEQ ID NO: 1750224 - DNA, 15 bp, Homo sapiens
agataaaggcttgga

SEQ ID NO: 1750225 - DNA, 15 bp, Homo sapiens
gataaaggcttggaa

SEQ ID NO: 1750226 - DNA, 15 bp, Homo sapiens
ataaaggcttggaaa

SEQ ID NO: 1750227 - DNA, 15 bp, Homo sapiens
taaaggcttggaaaa

SEQ ID NO: 1750228 - DNA, 15 bp, Homo sapiens
aaaggcttggaaaat

SEQ ID NO: 1750229 - DNA, 15 bp, Homo sapiens
aaggcttggaaaatt

SEQ ID NO: 1750230 - DNA, 15 bp, Homo sapiens
aggcttggaaaattg

SEQ ID NO: 1750231 - DNA, 15 bp, Homo sapiens
ggcttggaaaattgt

SEQ ID NO: 1750232 - DNA, 15 bp, Homo sapiens
gcttggaaaattgtg

SEQ ID NO: 1750233 - DNA, 15 bp, Homo sapiens
cttggaaaattgtgg

SEQ ID NO: 1750234 - DNA, 15 bp, Homo sapiens
ttggaaaattgtgga

SEQ ID NO: 1750235 - DNA, 15 bp, Homo sapiens
tggaaaattgtggag

SEQ ID NO: 1750236 - DNA, 15 bp, Homo sapiens
ggaaaattgtggagg

SEQ ID NO: 1750237 - DNA, 15 bp, Homo sapiens
gaaaattgtggagga

SEQ ID NO: 1750238 - DNA, 15 bp, Homo sapiens
aaaattgtggaggat

SEQ ID NO: 1750239 - DNA, 15 bp, Homo sapiens
aaattgtggaggatg

SEQ ID NO: 1750240 - DNA, 15 bp, Homo sapiens
aattgtggaggatgt

SEQ ID NO: 1750241 - DNA, 15 bp, Homo sapiens
attgtggaggatgta

SEQ ID NO: 1750242 - DNA, 15 bp, Homo sapiens
ttgtggaggatgtaa

SEQ ID NO: 1750243 - DNA, 15 bp, Homo sapiens
tgtggaggatgtaat

SEQ ID NO: 1750244 - DNA, 15 bp, Homo sapiens
gtggaggatgtaata

SEQ ID NO: 1750245 - DNA, 15 bp, Homo sapiens
tggaggatgtaatag

SEQ ID NO: 1750246 - DNA, 15 bp, Homo sapiens
ggaggatgtaataga

SEQ ID NO: 1750247 - DNA, 15 bp, Homo sapiens
gaggatgtaatagaa

SEQ ID NO: 1750248 - DNA, 15 bp, Homo sapiens
aggatgtaatagaaa

SEQ ID NO: 1750249 - DNA, 15 bp, Homo sapiens
ggatgtaatagaaat

SEQ ID NO: 1750250 - DNA, 15 bp, Homo sapiens
gatgtaatagaaatt

SEQ ID NO: 1750251 - DNA, 15 bp, Homo sapiens
atgtaatagaaattt

SEQ ID NO: 1750252 - DNA, 15 bp, Homo sapiens
tgtaatagaaattta

SEQ ID NO: 1750253 - DNA, 15 bp, Homo sapiens
gtaatagaaatttac

SEQ ID NO: 1750254 - DNA, 15 bp, Homo sapiens
taatagaaatttact

SEQ ID NO: 1750255 - DNA, 15 bp, Homo sapiens
aatagaaatttactg

SEQ ID NO: 1750256 - DNA, 15 bp, Homo sapiens
atagaaatttactgt

SEQ ID NO: 1750257 - DNA, 15 bp, Homo sapiens
tagaaatttactgtt

SEQ ID NO: 1750258 - DNA, 15 bp, Homo sapiens
agaaatttactgttt

SEQ ID NO: 1750259 - DNA, 15 bp, Homo sapiens
gaaatttactgttta

SEQ ID NO: 1750260 - DNA, 15 bp, Homo sapiens
aaatttactgtttaa

SEQ ID NO: 1750261 - DNA, 15 bp, Homo sapiens
aatttactgtttaaa

SEQ ID NO: 1750262 - DNA, 15 bp, Homo sapiens
atttactgtttaaaa

SEQ ID NO: 1750263 - DNA, 15 bp, Homo sapiens
tttactgtttaaaaa

SEQ ID NO: 1750264 - DNA, 15 bp, Homo sapiens
ttactgtttaaaaat

SEQ ID NO: 1750265 - DNA, 15 bp, Homo sapiens
tactgtttaaaaatt

SEQ ID NO: 1750266 - DNA, 15 bp, Homo sapiens
actgtttaaaaattg

SEQ ID NO: 1750267 - DNA, 15 bp, Homo sapiens
ctgtttaaaaattgt

SEQ ID NO: 1750268 - DNA, 15 bp, Homo sapiens
tgtttaaaaattgtt

SEQ ID NO: 1750269 - DNA, 15 bp, Homo sapiens
gtttaaaaattgttt

SEQ ID NO: 1750270 - DNA, 15 bp, Homo sapiens
tttaaaaattgtttg

SEQ ID NO: 1750271 - DNA, 15 bp, Homo sapiens
ttaaaaattgtttgt

SEQ ID NO: 1750272 - DNA, 15 bp, Homo sapiens
taaaaattgtttgta

SEQ ID NO: 1750273 - DNA, 15 bp, Homo sapiens
aaaaattgtttgtac

SEQ ID NO: 1750274 - DNA, 15 bp, Homo sapiens
aaaattgtttgtact

SEQ ID NO: 1750275 - DNA, 15 bp, Homo sapiens
aaattgtttgtactc

SEQ ID NO: 1750276 - DNA, 15 bp, Homo sapiens
aattgtttgtactca

SEQ ID NO: 1750277 - DNA, 15 bp, Homo sapiens
attgtttgtactcaa

SEQ ID NO: 1750278 - DNA, 15 bp, Homo sapiens
ttgtttgtactcaag

SEQ ID NO: 1750279 - DNA, 15 bp, Homo sapiens
tgtttgtactcaagc

SEQ ID NO: 1750280 - DNA, 15 bp, Homo sapiens
gtttgtactcaagcc

SEQ ID NO: 1750281 - DNA, 15 bp, Homo sapiens
tttgtactcaagcct

SEQ ID NO: 1750282 - DNA, 15 bp, Homo sapiens
ttgtactcaagcctg

SEQ ID NO: 1750283 - DNA, 15 bp, Homo sapiens
tgtactcaagcctgt

SEQ ID NO: 1750284 - DNA, 15 bp, Homo sapiens
gtactcaagcctgtt

SEQ ID NO: 1750285 - DNA, 15 bp, Homo sapiens
tactcaagcctgttt

SEQ ID NO: 1750286 - DNA, 15 bp, Homo sapiens
actcaagcctgttta

SEQ ID NO: 1750287 - DNA, 15 bp, Homo sapiens
ctcaagcctgtttag

SEQ ID NO: 1750288 - DNA, 15 bp, Homo sapiens
tcaagcctgtttagc

SEQ ID NO: 1750289 - DNA, 15 bp, Homo sapiens
caagcctgtttagct

SEQ ID NO: 1750290 - DNA, 15 bp, Homo sapiens
aagcctgtttagctc

SEQ ID NO: 1750291 - DNA, 15 bp, Homo sapiens
agcctgtttagctca

SEQ ID NO: 1750292 - DNA, 15 bp, Homo sapiens
gcctgtttagctcag

SEQ ID NO: 1750293 - DNA, 15 bp, Homo sapiens
cctgtttagctcagt

SEQ ID NO: 1750294 - DNA, 15 bp, Homo sapiens
ctgtttagctcagtt

SEQ ID NO: 1750295 - DNA, 15 bp, Homo sapiens
tgtttagctcagtta

SEQ ID NO: 1750296 - DNA, 15 bp, Homo sapiens
gtttagctcagttat

SEQ ID NO: 1750297 - DNA, 15 bp, Homo sapiens
tttagctcagttatt

SEQ ID NO: 1750298 - DNA, 15 bp, Homo sapiens
ttagctcagttattt

SEQ ID NO: 1750299 - DNA, 15 bp, Homo sapiens
tagctcagttattta

SEQ ID NO: 1750300 - DNA, 15 bp, Homo sapiens
agctcagttatttag

SEQ ID NO: 1750301 - DNA, 15 bp, Homo sapiens
gctcagttatttagg

SEQ ID NO: 1750302 - DNA, 15 bp, Homo sapiens
ctcagttatttaggg

SEQ ID NO: 1750303 - DNA, 15 bp, Homo sapiens
tcagttatttagggc

SEQ ID NO: 1750304 - DNA, 15 bp, Homo sapiens
cagttatttagggct

SEQ ID NO: 1750305 - DNA, 15 bp, Homo sapiens
agttatttagggctt

SEQ ID NO: 1750306 - DNA, 15 bp, Homo sapiens
gttatttagggcttc

SEQ ID NO: 1750307 - DNA, 15 bp, Homo sapiens
ttatttagggcttct

SEQ ID NO: 1750308 - DNA, 15 bp, Homo sapiens
tatttagggcttcta

SEQ ID NO: 1750309 - DNA, 15 bp, Homo sapiens
atttagggcttctaa

SEQ ID NO: 1750310 - DNA, 15 bp, Homo sapiens
tttagggcttctaaa

SEQ ID NO: 1750311 - DNA, 15 bp, Homo sapiens
ttagggcttctaaac

SEQ ID NO: 1750312 - DNA, 15 bp, Homo sapiens
tagggcttctaaaca

SEQ ID NO: 1750313 - DNA, 15 bp, Homo sapiens
agggcttctaaacaa

SEQ ID NO: 1750314 - DNA, 15 bp, Homo sapiens
gggcttctaaacaat

SEQ ID NO: 1750315 - DNA, 15 bp, Homo sapiens
ggcttctaaacaata

SEQ ID NO: 1750316 - DNA, 15 bp, Homo sapiens
gcttctaaacaatat

SEQ ID NO: 1750317 - DNA, 15 bp, Homo sapiens
cttctaaacaatatt

SEQ ID NO: 1750318 - DNA, 15 bp, Homo sapiens
ttctaaacaatattc

SEQ ID NO: 1750319 - DNA, 15 bp, Homo sapiens
tctaaacaatattcc

SEQ ID NO: 1750320 - DNA, 15 bp, Homo sapiens
ctaaacaatattcct

SEQ ID NO: 1750321 - DNA, 15 bp, Homo sapiens
taaacaatattcctt

SEQ ID NO: 1750322 - DNA, 15 bp, Homo sapiens
aaacaatattccttt

SEQ ID NO: 1750323 - DNA, 15 bp, Homo sapiens
aacaatattccttta

SEQ ID NO: 1750324 - DNA, 15 bp, Homo sapiens
acaatattcctttat

SEQ ID NO: 1750325 - DNA, 15 bp, Homo sapiens
caatattcctttatt

SEQ ID NO: 1750326 - DNA, 15 bp, Homo sapiens
aatattcctttattt

SEQ ID NO: 1750327 - DNA, 15 bp, Homo sapiens
atattcctttatttt

SEQ ID NO: 1750328 - DNA, 15 bp, Homo sapiens
tattcctttattttt

SEQ ID NO: 1750329 - DNA, 15 bp, Homo sapiens
attcctttatttttg

SEQ ID NO: 1750330 - DNA, 15 bp, Homo sapiens
ttcctttatttttga

SEQ ID NO: 1750331 - DNA, 15 bp, Homo sapiens
tcctttatttttgag

SEQ ID NO: 1750332 - DNA, 15 bp, Homo sapiens
cctttatttttgaga

SEQ ID NO: 1750333 - DNA, 15 bp, Homo sapiens
ctttatttttgagaa

SEQ ID NO: 1750334 - DNA, 15 bp, Homo sapiens
tttatttttgagaat

SEQ ID NO: 1750335 - DNA, 15 bp, Homo sapiens
ttatttttgagaatt

SEQ ID NO: 1750336 - DNA, 15 bp, Homo sapiens
tatttttgagaattt

SEQ ID NO: 1750337 - DNA, 15 bp, Homo sapiens
atttttgagaatttt

SEQ ID NO: 1750338 - DNA, 15 bp, Homo sapiens
tttttgagaattttt

SEQ ID NO: 1750339 - DNA, 15 bp, Homo sapiens
ttttgagaatttttg

SEQ ID NO: 1750340 - DNA, 15 bp, Homo sapiens
tttgagaatttttgg

SEQ ID NO: 1750341 - DNA, 15 bp, Homo sapiens
ttgagaatttttgga

SEQ ID NO: 1750342 - DNA, 15 bp, Homo sapiens
tgagaatttttggag

SEQ ID NO: 1750343 - DNA, 15 bp, Homo sapiens
gagaatttttggaga

SEQ ID NO: 1750344 - DNA, 15 bp, Homo sapiens
agaatttttggagaa

SEQ ID NO: 1750345 - DNA, 15 bp, Homo sapiens
gaatttttggagaaa

SEQ ID NO: 1750346 - DNA, 15 bp, Homo sapiens
aatttttggagaaaa

SEQ ID NO: 1750347 - DNA, 15 bp, Homo sapiens
atttttggagaaaaa

SEQ ID NO: 1750348 - DNA, 15 bp, Homo sapiens
tttttggagaaaaag

SEQ ID NO: 1750349 - DNA, 15 bp, Homo sapiens
ttttggagaaaaagt

SEQ ID NO: 1750350 - DNA, 15 bp, Homo sapiens
tttggagaaaaagtg

SEQ ID NO: 1750351 - DNA, 15 bp, Homo sapiens
ttggagaaaaagtga

SEQ ID NO: 1750352 - DNA, 15 bp, Homo sapiens
tggagaaaaagtgac

SEQ ID NO: 1750353 - DNA, 15 bp, Homo sapiens
ggagaaaaagtgaca

SEQ ID NO: 1750354 - DNA, 15 bp, Homo sapiens
gagaaaaagtgacaa

SEQ ID NO: 1750355 - DNA, 15 bp, Homo sapiens
agaaaaagtgacaag

SEQ ID NO: 1750356 - DNA, 15 bp, Homo sapiens
gaaaaagtgacaagc

SEQ ID NO: 1750357 - DNA, 15 bp, Homo sapiens
aaaaagtgacaagcc

SEQ ID NO: 1750358 - DNA, 15 bp, Homo sapiens
aaaagtgacaagccc

SEQ ID NO: 1750359 - DNA, 15 bp, Homo sapiens
aaagtgacaagcccc

SEQ ID NO: 1750360 - DNA, 15 bp, Homo sapiens
aagtgacaagcccca

SEQ ID NO: 1750361 - DNA, 15 bp, Homo sapiens
agtgacaagccccaa

SEQ ID NO: 1750362 - DNA, 15 bp, Homo sapiens
gtgacaagccccaaa

SEQ ID NO: 1750363 - DNA, 15 bp, Homo sapiens
tgacaagccccaaat

SEQ ID NO: 1750364 - DNA, 15 bp, Homo sapiens
gacaagccccaaatc

SEQ ID NO: 1750365 - DNA, 15 bp, Homo sapiens
acaagccccaaatct

SEQ ID NO: 1750366 - DNA, 15 bp, Homo sapiens
caagccccaaatctg

SEQ ID NO: 1750367 - DNA, 15 bp, Homo sapiens
aagccccaaatctgg

SEQ ID NO: 1750368 - DNA, 15 bp, Homo sapiens
agccccaaatctgga

SEQ ID NO: 1750369 - DNA, 15 bp, Homo sapiens
gccccaaatctggaa

SEQ ID NO: 1750370 - DNA, 15 bp, Homo sapiens
ccccaaatctggaaa

SEQ ID NO: 1750371 - DNA, 15 bp, Homo sapiens
cccaaatctggaaaa

SEQ ID NO: 1750372 - DNA, 15 bp, Homo sapiens
ccaaatctggaaaag

SEQ ID NO: 1750373 - DNA, 15 bp, Homo sapiens
caaatctggaaaaga

SEQ ID NO: 1750374 - DNA, 15 bp, Homo sapiens
aaatctggaaaagag

SEQ ID NO: 1750375 - DNA, 15 bp, Homo sapiens
aatctggaaaagagt

SEQ ID NO: 1750376 - DNA, 15 bp, Homo sapiens
atctggaaaagagta

SEQ ID NO: 1750377 - DNA, 15 bp, Homo sapiens
tctggaaaagagtat

SEQ ID NO: 1750378 - DNA, 15 bp, Homo sapiens
ctggaaaagagtatg

SEQ ID NO: 1750379 - DNA, 15 bp, Homo sapiens
tggaaaagagtatga

SEQ ID NO: 1750380 - DNA, 15 bp, Homo sapiens
ggaaaagagtatgat

SEQ ID NO: 1750381 - DNA, 15 bp, Homo sapiens
gaaaagagtatgatt

SEQ ID NO: 1750382 - DNA, 15 bp, Homo sapiens
aaaagagtatgattg

SEQ ID NO: 1750383 - DNA, 15 bp, Homo sapiens
aaagagtatgattga

SEQ ID NO: 1750384 - DNA, 15 bp, Homo sapiens
aagagtatgattgat

SEQ ID NO: 1750385 - DNA, 15 bp, Homo sapiens
agagtatgattgatt

SEQ ID NO: 1750386 - DNA, 15 bp, Homo sapiens
gagtatgattgattt

SEQ ID NO: 1750387 - DNA, 15 bp, Homo sapiens
agtatgattgattta

SEQ ID NO: 1750388 - DNA, 15 bp, Homo sapiens
gtatgattgatttac

SEQ ID NO: 1750389 - DNA, 15 bp, Homo sapiens
tatgattgatttaca

SEQ ID NO: 1750390 - DNA, 15 bp, Homo sapiens
atgattgatttacaa

SEQ ID NO: 1750391 - DNA, 15 bp, Homo sapiens
tgattgatttacaat

SEQ ID NO: 1750392 - DNA, 15 bp, Homo sapiens
gattgatttacaata

SEQ ID NO: 1750393 - DNA, 15 bp, Homo sapiens
attgatttacaatag

SEQ ID NO: 1750394 - DNA, 15 bp, Homo sapiens
ttgatttacaatagg

SEQ ID NO: 1750395 - DNA, 15 bp, Homo sapiens
tgatttacaatagga

SEQ ID NO: 1750396 - DNA, 15 bp, Homo sapiens
gatttacaataggag

SEQ ID NO: 1750397 - DNA, 15 bp, Homo sapiens
atttacaataggaga

SEQ ID NO: 1750398 - DNA, 15 bp, Homo sapiens
tttacaataggagac

SEQ ID NO: 1750399 - DNA, 15 bp, Homo sapiens
ttacaataggagacg

SEQ ID NO: 1750400 - DNA, 15 bp, Homo sapiens
tacaataggagacgt

SEQ ID NO: 1750401 - DNA, 15 bp, Homo sapiens
acaataggagacgtg

SEQ ID NO: 1750402 - DNA, 15 bp, Homo sapiens
caataggagacgtgg

SEQ ID NO: 1750403 - DNA, 15 bp, Homo sapiens
aataggagacgtgga

SEQ ID NO: 1750404 - DNA, 15 bp, Homo sapiens
ataggagacgtggaa

SEQ ID NO: 1750405 - DNA, 15 bp, Homo sapiens
taggagacgtggaag

SEQ ID NO: 1750406 - DNA, 15 bp, Homo sapiens
aggagacgtggaagt

SEQ ID NO: 1750407 - DNA, 15 bp, Homo sapiens
ggagacgtggaagtc

SEQ ID NO: 1750408 - DNA, 15 bp, Homo sapiens
gagacgtggaagtca

SEQ ID NO: 1750409 - DNA, 15 bp, Homo sapiens
agacgtggaagtcat

SEQ ID NO: 1750410 - DNA, 15 bp, Homo sapiens
gacgtggaagtcata

SEQ ID NO: 1750411 - DNA, 15 bp, Homo sapiens
acgtggaagtcataa

SEQ ID NO: 1750412 - DNA, 15 bp, Homo sapiens
cgtggaagtcataag

SEQ ID NO: 1750413 - DNA, 15 bp, Homo sapiens
gtggaagtcataagc

SEQ ID NO: 1750414 - DNA, 15 bp, Homo sapiens
tggaagtcataagcc

SEQ ID NO: 1750415 - DNA, 15 bp, Homo sapiens
ggaagtcataagcct

SEQ ID NO: 1750416 - DNA, 15 bp, Homo sapiens
gaagtcataagcctc

SEQ ID NO: 1750417 - DNA, 15 bp, Homo sapiens
aagtcataagcctct

SEQ ID NO: 1750418 - DNA, 15 bp, Homo sapiens
agtcataagcctctg

SEQ ID NO: 1750419 - DNA, 15 bp, Homo sapiens
gtcataagcctctga

SEQ ID NO: 1750420 - DNA, 15 bp, Homo sapiens
tcataagcctctgaa

SEQ ID NO: 1750421 - DNA, 15 bp, Homo sapiens
cataagcctctgaat

SEQ ID NO: 1750422 - DNA, 15 bp, Homo sapiens
ataagcctctgaatt

SEQ ID NO: 1750423 - DNA, 15 bp, Homo sapiens
taagcctctgaattt

SEQ ID NO: 1750424 - DNA, 15 bp, Homo sapiens
aagcctctgaattta

SEQ ID NO: 1750425 - DNA, 15 bp, Homo sapiens
agcctctgaatttaa

SEQ ID NO: 1750426 - DNA, 15 bp, Homo sapiens
gcctctgaatttaaa

SEQ ID NO: 1750427 - DNA, 15 bp, Homo sapiens
cctctgaatttaaat

SEQ ID NO: 1750428 - DNA, 15 bp, Homo sapiens
ctctgaatttaaata

SEQ ID NO: 1750429 - DNA, 15 bp, Homo sapiens
tctgaatttaaatat

SEQ ID NO: 1750430 - DNA, 15 bp, Homo sapiens
ctgaatttaaatatt

SEQ ID NO: 1750431 - DNA, 15 bp, Homo sapiens
tgaatttaaatatta

SEQ ID NO: 1750432 - DNA, 15 bp, Homo sapiens
gaatttaaatattaa
